United States Patent Application Publication US 2015/0141320 A1 - sequence listing, part 24

SEQ ID NO: 830775 - DNA, 15 bp, Homo sapiens
tccaaagagaaagat

SEQ ID NO: 830776 - DNA, 15 bp, Homo sapiens
ccaaagagaaagatg

SEQ ID NO: 830777 - DNA, 15 bp, Homo sapiens
caaagagaaagatgt

SEQ ID NO: 830778 - DNA, 15 bp, Homo sapiens
aaagagaaagatgtc

SEQ ID NO: 830779 - DNA, 15 bp, Homo sapiens
aagagaaagatgtca

SEQ ID NO: 830780 - DNA, 15 bp, Homo sapiens
agagaaagatgtcag

SEQ ID NO: 830781 - DNA, 15 bp, Homo sapiens
gagaaagatgtcagt

SEQ ID NO: 830782 - DNA, 15 bp, Homo sapiens
agaaagatgtcagta

SEQ ID NO: 830783 - DNA, 15 bp, Homo sapiens
gaaagatgtcagtac

SEQ ID NO: 830784 - DNA, 15 bp, Homo sapiens
aaagatgtcagtaca

SEQ ID NO: 830785 - DNA, 15 bp, Homo sapiens
aagatgtcagtacag

SEQ ID NO: 830786 - DNA, 15 bp, Homo sapiens
agatgtcagtacaga

SEQ ID NO: 830787 - DNA, 15 bp, Homo sapiens
gatgtcagtacagat

SEQ ID NO: 830788 - DNA, 15 bp, Homo sapiens
atgtcagtacagatc

SEQ ID NO: 830789 - DNA, 15 bp, Homo sapiens
tgtcagtacagatca

SEQ ID NO: 830790 - DNA, 15 bp, Homo sapiens
gtcagtacagatcag

SEQ ID NO: 830791 - DNA, 15 bp, Homo sapiens
tcagtacagatcagc

SEQ ID NO: 830792 - DNA, 15 bp, Homo sapiens
cagtacagatcagca

SEQ ID NO: 830793 - DNA, 15 bp, Homo sapiens
agtacagatcagcac

SEQ ID NO: 830794 - DNA, 15 bp, Homo sapiens
gtacagatcagcacc

SEQ ID NO: 830795 - DNA, 15 bp, Homo sapiens
tacagatcagcacca

SEQ ID NO: 830796 - DNA, 15 bp, Homo sapiens
acagatcagcaccaa

SEQ ID NO: 830797 - DNA, 15 bp, Homo sapiens
cagatcagcaccaag

SEQ ID NO: 830798 - DNA, 15 bp, Homo sapiens
agatcagcaccaaga

SEQ ID NO: 830799 - DNA, 15 bp, Homo sapiens
gatcagcaccaagaa

SEQ ID NO: 830800 - DNA, 15 bp, Homo sapiens
atcagcaccaagaaa

SEQ ID NO: 830801 - DNA, 15 bp, Homo sapiens
tcagcaccaagaaat

SEQ ID NO: 830802 - DNA, 15 bp, Homo sapiens
cagcaccaagaaatg

SEQ ID NO: 830803 - DNA, 15 bp, Homo sapiens
agcaccaagaaatgt

SEQ ID NO: 830804 - DNA, 15 bp, Homo sapiens
gcaccaagaaatgtg

SEQ ID NO: 830805 - DNA, 15 bp, Homo sapiens
caccaagaaatgtga

SEQ ID NO: 830806 - DNA, 15 bp, Homo sapiens
accaagaaatgtgat

SEQ ID NO: 830807 - DNA, 15 bp, Homo sapiens
ccaagaaatgtgatg

SEQ ID NO: 830808 - DNA, 15 bp, Homo sapiens
caagaaatgtgatga

SEQ ID NO: 830809 - DNA, 15 bp, Homo sapiens
aagaaatgtgatgag

SEQ ID NO: 830810 - DNA, 15 bp, Homo sapiens
agaaatgtgatgagt

SEQ ID NO: 830811 - DNA, 15 bp, Homo sapiens
gaaatgtgatgagtc

SEQ ID NO: 830812 - DNA, 15 bp, Homo sapiens
aaatgtgatgagtcg

SEQ ID NO: 830813 - DNA, 15 bp, Homo sapiens
aatgtgatgagtcgc

SEQ ID NO: 830814 - DNA, 15 bp, Homo sapiens
atgtgatgagtcgca

SEQ ID NO: 830815 - DNA, 15 bp, Homo sapiens
tgtgatgagtcgcat

SEQ ID NO: 830816 - DNA, 15 bp, Homo sapiens
gtgatgagtcgcata

SEQ ID NO: 830817 - DNA, 15 bp, Homo sapiens
tgatgagtcgcatac

SEQ ID NO: 830818 - DNA, 15 bp, Homo sapiens
gatgagtcgcataca

SEQ ID NO: 830819 - DNA, 15 bp, Homo sapiens
atgagtcgcatacat

SEQ ID NO: 830820 - DNA, 15 bp, Homo sapiens
tgagtcgcatacatg

SEQ ID NO: 830821 - DNA, 15 bp, Homo sapiens
gagtcgcatacatgt

SEQ ID NO: 830822 - DNA, 15 bp, Homo sapiens
agtcgcatacatgtg

SEQ ID NO: 830823 - DNA, 15 bp, Homo sapiens
gtcgcatacatgtgt

SEQ ID NO: 830824 - DNA, 15 bp, Homo sapiens
tcgcatacatgtgtg

SEQ ID NO: 830825 - DNA, 15 bp, Homo sapiens
cgcatacatgtgtgt

SEQ ID NO: 830826 - DNA, 15 bp, Homo sapiens
gcatacatgtgtgtg

SEQ ID NO: 830827 - DNA, 15 bp, Homo sapiens
catacatgtgtgtga

SEQ ID NO: 830828 - DNA, 15 bp, Homo sapiens
atacatgtgtgtgaa

SEQ ID NO: 830829 - DNA, 15 bp, Homo sapiens
tacatgtgtgtgaat

SEQ ID NO: 830830 - DNA, 15 bp, Homo sapiens
acatgtgtgtgaatc

SEQ ID NO: 830831 - DNA, 15 bp, Homo sapiens
catgtgtgtgaatca

SEQ ID NO: 830832 - DNA, 15 bp, Homo sapiens
atgtgtgtgaatcaa

SEQ ID NO: 830833 - DNA, 15 bp, Homo sapiens
tgtgtgtgaatcaag

SEQ ID NO: 830834 - DNA, 15 bp, Homo sapiens
gtgtgtgaatcaaga

SEQ ID NO: 830835 - DNA, 15 bp, Homo sapiens
tgtgtgaatcaagaa

SEQ ID NO: 830836 - DNA, 15 bp, Homo sapiens
gtgtgaatcaagaac

SEQ ID NO: 830837 - DNA, 15 bp, Homo sapiens
tgtgaatcaagaaca

SEQ ID NO: 830838 - DNA, 15 bp, Homo sapiens
gtgaatcaagaacaa

SEQ ID NO: 830839 - DNA, 15 bp, Homo sapiens
tgaatcaagaacaat

SEQ ID NO: 830840 - DNA, 15 bp, Homo sapiens
gaatcaagaacaata

SEQ ID NO: 830841 - DNA, 15 bp, Homo sapiens
aatcaagaacaataa

SEQ ID NO: 830842 - DNA, 15 bp, Homo sapiens
atcaagaacaataat

SEQ ID NO: 830843 - DNA, 15 bp, Homo sapiens
tcaagaacaataatg

SEQ ID NO: 830844 - DNA, 15 bp, Homo sapiens
caagaacaataatga

SEQ ID NO: 830845 - DNA, 15 bp, Homo sapiens
aagaacaataatgag

SEQ ID NO: 830846 - DNA, 15 bp, Homo sapiens
agaacaataatgaga

SEQ ID NO: 830847 - DNA, 15 bp, Homo sapiens
gaacaataatgagag

SEQ ID NO: 830848 - DNA, 15 bp, Homo sapiens
aacaataatgagagt

SEQ ID NO: 830849 - DNA, 15 bp, Homo sapiens
acaataatgagagta

SEQ ID NO: 830850 - DNA, 15 bp, Homo sapiens
caataatgagagtaa

SEQ ID NO: 830851 - DNA, 15 bp, Homo sapiens
aataatgagagtaaa

SEQ ID NO: 830852 - DNA, 15 bp, Homo sapiens
ataatgagagtaaat

SEQ ID NO: 830853 - DNA, 15 bp, Homo sapiens
taatgagagtaaatt

SEQ ID NO: 830854 - DNA, 15 bp, Homo sapiens
aatgagagtaaatta

SEQ ID NO: 830855 - DNA, 15 bp, Homo sapiens
atgagagtaaattaa

SEQ ID NO: 830856 - DNA, 15 bp, Homo sapiens
tgagagtaaattaag

SEQ ID NO: 830857 - DNA, 15 bp, Homo sapiens
gagagtaaattaagt

SEQ ID NO: 830858 - DNA, 15 bp, Homo sapiens
agagtaaattaagtc

SEQ ID NO: 830859 - DNA, 15 bp, Homo sapiens
gagtaaattaagtct

SEQ ID NO: 830860 - DNA, 15 bp, Homo sapiens
agtaaattaagtctg

SEQ ID NO: 830861 - DNA, 15 bp, Homo sapiens
gtaaattaagtctgt

SEQ ID NO: 830862 - DNA, 15 bp, Homo sapiens
taaattaagtctgtc

SEQ ID NO: 830863 - DNA, 15 bp, Homo sapiens
aaattaagtctgtct

SEQ ID NO: 830864 - DNA, 15 bp, Homo sapiens
aattaagtctgtctg

SEQ ID NO: 830865 - DNA, 15 bp, Homo sapiens
attaagtctgtctgt

SEQ ID NO: 830866 - DNA, 15 bp, Homo sapiens
ttaagtctgtctgtg

SEQ ID NO: 830867 - DNA, 15 bp, Homo sapiens
taagtctgtctgtgg

SEQ ID NO: 830868 - DNA, 15 bp, Homo sapiens
aagtctgtctgtggc

SEQ ID NO: 830869 - DNA, 15 bp, Homo sapiens
agtctgtctgtggct

SEQ ID NO: 830870 - DNA, 15 bp, Homo sapiens
gtctgtctgtggctc

SEQ ID NO: 830871 - DNA, 15 bp, Homo sapiens
tctgtctgtggctcc

SEQ ID NO: 830872 - DNA, 15 bp, Homo sapiens
ctgtctgtggctcct

SEQ ID NO: 830873 - DNA, 15 bp, Homo sapiens
tgtctgtggctcctc

SEQ ID NO: 830874 - DNA, 15 bp, Homo sapiens
gtctgtggctcctca

SEQ ID NO: 830875 - DNA, 15 bp, Homo sapiens
tctgtggctcctcag

SEQ ID NO: 830876 - DNA, 15 bp, Homo sapiens
ctgtggctcctcaga

SEQ ID NO: 830877 - DNA, 15 bp, Homo sapiens
tgtggctcctcagag

SEQ ID NO: 830878 - DNA, 15 bp, Homo sapiens
gtggctcctcagagt

SEQ ID NO: 830879 - DNA, 15 bp, Homo sapiens
tggctcctcagagtg

SEQ ID NO: 830880 - DNA, 15 bp, Homo sapiens
ggctcctcagagtga

SEQ ID NO: 830881 - DNA, 15 bp, Homo sapiens
gctcctcagagtgat

SEQ ID NO: 830882 - DNA, 15 bp, Homo sapiens
ctcctcagagtgata

SEQ ID NO: 830883 - DNA, 15 bp, Homo sapiens
tcctcagagtgatac

SEQ ID NO: 830884 - DNA, 15 bp, Homo sapiens
cctcagagtgatact

SEQ ID NO: 830885 - DNA, 15 bp, Homo sapiens
ctcagagtgatactt

SEQ ID NO: 830886 - DNA, 15 bp, Homo sapiens
tcagagtgatacttt

SEQ ID NO: 830887 - DNA, 15 bp, Homo sapiens
cagagtgatactttt

SEQ ID NO: 830888 - DNA, 15 bp, Homo sapiens
agagtgatacttttt

SEQ ID NO: 830889 - DNA, 15 bp, Homo sapiens
gagtgatactttttg

SEQ ID NO: 830890 - DNA, 15 bp, Homo sapiens
agtgatactttttga

SEQ ID NO: 830891 - DNA, 15 bp, Homo sapiens
gtgatactttttgat

SEQ ID NO: 830892 - DNA, 15 bp, Homo sapiens
tgatactttttgatc

SEQ ID NO: 830893 - DNA, 15 bp, Homo sapiens
gatactttttgatcc

SEQ ID NO: 830894 - DNA, 15 bp, Homo sapiens
atactttttgatcca

SEQ ID NO: 830895 - DNA, 15 bp, Homo sapiens
tactttttgatccag

SEQ ID NO: 830896 - DNA, 15 bp, Homo sapiens
actttttgatccagg

SEQ ID NO: 830897 - DNA, 15 bp, Homo sapiens
ctttttgatccaggc

SEQ ID NO: 830898 - DNA, 15 bp, Homo sapiens
tttttgatccaggcc

SEQ ID NO: 830899 - DNA, 15 bp, Homo sapiens
ttttgatccaggcct

SEQ ID NO: 830900 - DNA, 15 bp, Homo sapiens
tttgatccaggcctt

SEQ ID NO: 830901 - DNA, 15 bp, Homo sapiens
ttgatccaggccttg

SEQ ID NO: 830902 - DNA, 15 bp, Homo sapiens
tgatccaggccttgg

SEQ ID NO: 830903 - DNA, 15 bp, Homo sapiens
gatccaggccttggg

SEQ ID NO: 830904 - DNA, 15 bp, Homo sapiens
atccaggccttgggg

SEQ ID NO: 830905 - DNA, 15 bp, Homo sapiens
tccaggccttggggg

SEQ ID NO: 830906 - DNA, 15 bp, Homo sapiens
ccaggccttggggga

SEQ ID NO: 830907 - DNA, 15 bp, Homo sapiens
caggccttgggggat

SEQ ID NO: 830908 - DNA, 15 bp, Homo sapiens
aggccttgggggatg

SEQ ID NO: 830909 - DNA, 15 bp, Homo sapiens
ggccttgggggatga

SEQ ID NO: 830910 - DNA, 15 bp, Homo sapiens
gccttgggggatgag

SEQ ID NO: 830911 - DNA, 15 bp, Homo sapiens
ccttgggggatgaga

SEQ ID NO: 830912 - DNA, 15 bp, Homo sapiens
cttgggggatgagaa

SEQ ID NO: 830913 - DNA, 15 bp, Homo sapiens
ttgggggatgagaag

SEQ ID NO: 830914 - DNA, 15 bp, Homo sapiens
tgggggatgagaagt

SEQ ID NO: 830915 - DNA, 15 bp, Homo sapiens
gggggatgagaagtc

SEQ ID NO: 830916 - DNA, 15 bp, Homo sapiens
ggggatgagaagtcc

SEQ ID NO: 830917 - DNA, 15 bp, Homo sapiens
gggatgagaagtcca

SEQ ID NO: 830918 - DNA, 15 bp, Homo sapiens
ggatgagaagtccat

SEQ ID NO: 830919 - DNA, 15 bp, Homo sapiens
gatgagaagtccatg

SEQ ID NO: 830920 - DNA, 15 bp, Homo sapiens
atgagaagtccatga

SEQ ID NO: 830921 - DNA, 15 bp, Homo sapiens
tgagaagtccatgag

SEQ ID NO: 830922 - DNA, 15 bp, Homo sapiens
gagaagtccatgaga

SEQ ID NO: 830923 - DNA, 15 bp, Homo sapiens
agaagtccatgagac

SEQ ID NO: 830924 - DNA, 15 bp, Homo sapiens
gaagtccatgagaca

SEQ ID NO: 830925 - DNA, 15 bp, Homo sapiens
aagtccatgagacac

SEQ ID NO: 830926 - DNA, 15 bp, Homo sapiens
agtccatgagacaca

SEQ ID NO: 830927 - DNA, 15 bp, Homo sapiens
gtccatgagacacag

SEQ ID NO: 830928 - DNA, 15 bp, Homo sapiens
tccatgagacacaga

SEQ ID NO: 830929 - DNA, 15 bp, Homo sapiens
ccatgagacacagaa

SEQ ID NO: 830930 - DNA, 15 bp, Homo sapiens
catgagacacagaag

SEQ ID NO: 830931 - DNA, 15 bp, Homo sapiens
atgagacacagaagc

SEQ ID NO: 830932 - DNA, 15 bp, Homo sapiens
tgagacacagaagca

SEQ ID NO: 830933 - DNA, 15 bp, Homo sapiens
gagacacagaagcag

SEQ ID NO: 830934 - DNA, 15 bp, Homo sapiens
agacacagaagcaga

SEQ ID NO: 830935 - DNA, 15 bp, Homo sapiens
gacacagaagcagag

SEQ ID NO: 830936 - DNA, 15 bp, Homo sapiens
acacagaagcagaga

SEQ ID NO: 830937 - DNA, 15 bp, Homo sapiens
cacagaagcagagat

SEQ ID NO: 830938 - DNA, 15 bp, Homo sapiens
acagaagcagagata

SEQ ID NO: 830939 - DNA, 15 bp, Homo sapiens
cagaagcagagataa

SEQ ID NO: 830940 - DNA, 15 bp, Homo sapiens
agaagcagagataag

SEQ ID NO: 830941 - DNA, 15 bp, Homo sapiens
gaagcagagataagg

SEQ ID NO: 830942 - DNA, 15 bp, Homo sapiens
aagcagagataaggt

SEQ ID NO: 830943 - DNA, 15 bp, Homo sapiens
agcagagataaggtt

SEQ ID NO: 830944 - DNA, 15 bp, Homo sapiens
gcagagataaggttc

SEQ ID NO: 830945 - DNA, 15 bp, Homo sapiens
cagagataaggttca

SEQ ID NO: 830946 - DNA, 15 bp, Homo sapiens
agagataaggttcat

SEQ ID NO: 830947 - DNA, 15 bp, Homo sapiens
gagataaggttcatg

SEQ ID NO: 830948 - DNA, 15 bp, Homo sapiens
agataaggttcatga

SEQ ID NO: 830949 - DNA, 15 bp, Homo sapiens
gataaggttcatgat

SEQ ID NO: 830950 - DNA, 15 bp, Homo sapiens
ataaggttcatgatg

SEQ ID NO: 830951 - DNA, 15 bp, Homo sapiens
taaggttcatgatgg

SEQ ID NO: 830952 - DNA, 15 bp, Homo sapiens
aaggttcatgatgga

SEQ ID NO: 830953 - DNA, 15 bp, Homo sapiens
aggttcatgatggag

SEQ ID NO: 830954 - DNA, 15 bp, Homo sapiens
ggttcatgatggagg

SEQ ID NO: 830955 - DNA, 15 bp, Homo sapiens
gttcatgatggaggg

SEQ ID NO: 830956 - DNA, 15 bp, Homo sapiens
ttcatgatggaggga

SEQ ID NO: 830957 - DNA, 15 bp, Homo sapiens
tcatgatggagggaa

SEQ ID NO: 830958 - DNA, 15 bp, Homo sapiens
catgatggagggaac

SEQ ID NO: 830959 - DNA, 15 bp, Homo sapiens
atgatggagggaaca

SEQ ID NO: 830960 - DNA, 15 bp, Homo sapiens
tgatggagggaacag

SEQ ID NO: 830961 - DNA, 15 bp, Homo sapiens
gatggagggaacagc

SEQ ID NO: 830962 - DNA, 15 bp, Homo sapiens
atggagggaacagca

SEQ ID NO: 830963 - DNA, 15 bp, Homo sapiens
tggagggaacagcag

SEQ ID NO: 830964 - DNA, 15 bp, Homo sapiens
ggagggaacagcagg

SEQ ID NO: 830965 - DNA, 15 bp, Homo sapiens
gagggaacagcagga

SEQ ID NO: 830966 - DNA, 15 bp, Homo sapiens
agggaacagcaggat

SEQ ID NO: 830967 - DNA, 15 bp, Homo sapiens
gggaacagcaggatg

SEQ ID NO: 830968 - DNA, 15 bp, Homo sapiens
ggaacagcaggatgc

SEQ ID NO: 830969 - DNA, 15 bp, Homo sapiens
gaacagcaggatgcc

SEQ ID NO: 830970 - DNA, 15 bp, Homo sapiens
aacagcaggatgcct

SEQ ID NO: 830971 - DNA, 15 bp, Homo sapiens
acagcaggatgcctc

SEQ ID NO: 830972 - DNA, 15 bp, Homo sapiens
cagcaggatgcctct

SEQ ID NO: 830973 - DNA, 15 bp, Homo sapiens
agcaggatgcctctc

SEQ ID NO: 830974 - DNA, 15 bp, Homo sapiens
gcaggatgcctctcc

SEQ ID NO: 830975 - DNA, 15 bp, Homo sapiens
caggatgcctctccc

SEQ ID NO: 830976 - DNA, 15 bp, Homo sapiens
aggatgcctctccca

SEQ ID NO: 830977 - DNA, 15 bp, Homo sapiens
ggatgcctctcccag

SEQ ID NO: 830978 - DNA, 15 bp, Homo sapiens
gatgcctctcccagg

SEQ ID NO: 830979 - DNA, 15 bp, Homo sapiens
atgcctctcccaggg

SEQ ID NO: 830980 - DNA, 15 bp, Homo sapiens
tgcctctcccagggg

SEQ ID NO: 830981 - DNA, 15 bp, Homo sapiens
gcctctcccagggga

SEQ ID NO: 830982 - DNA, 15 bp, Homo sapiens
cctctcccaggggaa

SEQ ID NO: 830983 - DNA, 15 bp, Homo sapiens
ctctcccaggggaac

SEQ ID NO: 830984 - DNA, 15 bp, Homo sapiens
tctcccaggggaacc

SEQ ID NO: 830985 - DNA, 15 bp, Homo sapiens
ctcccaggggaacct

SEQ ID NO: 830986 - DNA, 15 bp, Homo sapiens
tcccaggggaacctt

SEQ ID NO: 830987 - DNA, 15 bp, Homo sapiens
cccaggggaaccttc

SEQ ID NO: 830988 - DNA, 15 bp, Homo sapiens
ccaggggaaccttcg

SEQ ID NO: 830989 - DNA, 15 bp, Homo sapiens
caggggaaccttcgg

SEQ ID NO: 830990 - DNA, 15 bp, Homo sapiens
aggggaaccttcggc

SEQ ID NO: 830991 - DNA, 15 bp, Homo sapiens
ggggaaccttcggct

SEQ ID NO: 830992 - DNA, 15 bp, Homo sapiens
gggaaccttcggcta

SEQ ID NO: 830993 - DNA, 15 bp, Homo sapiens
ggaaccttcggctaa

SEQ ID NO: 830994 - DNA, 15 bp, Homo sapiens
gaaccttcggctaat

SEQ ID NO: 830995 - DNA, 15 bp, Homo sapiens
aaccttcggctaatc

SEQ ID NO: 830996 - DNA, 15 bp, Homo sapiens
accttcggctaatcc

SEQ ID NO: 830997 - DNA, 15 bp, Homo sapiens
ccttcggctaatcct

SEQ ID NO: 830998 - DNA, 15 bp, Homo sapiens
cttcggctaatcctt

SEQ ID NO: 830999 - DNA, 15 bp, Homo sapiens
ttcggctaatccttg

SEQ ID NO: 831000 - DNA, 15 bp, Homo sapiens
tcggctaatccttga

SEQ ID NO: 831001 - DNA, 15 bp, Homo sapiens
cggctaatccttgat

SEQ ID NO: 831002 - DNA, 15 bp, Homo sapiens
ggctaatccttgatt

SEQ ID NO: 831003 - DNA, 15 bp, Homo sapiens
gctaatccttgattg

SEQ ID NO: 831004 - DNA, 15 bp, Homo sapiens
ctaatccttgattgt

SEQ ID NO: 831005 - DNA, 15 bp, Homo sapiens
taatccttgattgta

SEQ ID NO: 831006 - DNA, 15 bp, Homo sapiens
aatccttgattgtat

SEQ ID NO: 831007 - DNA, 15 bp, Homo sapiens
atccttgattgtatt

SEQ ID NO: 831008 - DNA, 15 bp, Homo sapiens
tccttgattgtatta

SEQ ID NO: 831009 - DNA, 15 bp, Homo sapiens
ccttgattgtattag

SEQ ID NO: 831010 - DNA, 15 bp, Homo sapiens
cttgattgtattagt

SEQ ID NO: 831011 - DNA, 15 bp, Homo sapiens
ttgattgtattagtc

SEQ ID NO: 831012 - DNA, 15 bp, Homo sapiens
tgattgtattagtca

SEQ ID NO: 831013 - DNA, 15 bp, Homo sapiens
gattgtattagtcag

SEQ ID NO: 831014 - DNA, 15 bp, Homo sapiens
attgtattagtcagg

SEQ ID NO: 831015 - DNA, 15 bp, Homo sapiens
ttgtattagtcaggg

SEQ ID NO: 831016 - DNA, 15 bp, Homo sapiens
tgtattagtcagggc

SEQ ID NO: 831017 - DNA, 15 bp, Homo sapiens
gtattagtcagggct

SEQ ID NO: 831018 - DNA, 15 bp, Homo sapiens
tattagtcagggctc

SEQ ID NO: 831019 - DNA, 15 bp, Homo sapiens
attagtcagggctct

SEQ ID NO: 831020 - DNA, 15 bp, Homo sapiens
ttagtcagggctctc

SEQ ID NO: 831021 - DNA, 15 bp, Homo sapiens
tagtcagggctctcc

SEQ ID NO: 831022 - DNA, 15 bp, Homo sapiens
agtcagggctctcca

SEQ ID NO: 831023 - DNA, 15 bp, Homo sapiens
gtcagggctctccag

SEQ ID NO: 831024 - DNA, 15 bp, Homo sapiens
tcagggctctccagt

SEQ ID NO: 831025 - DNA, 15 bp, Homo sapiens
cagggctctccagtg

SEQ ID NO: 831026 - DNA, 15 bp, Homo sapiens
agggctctccagtga

SEQ ID NO: 831027 - DNA, 15 bp, Homo sapiens
gggctctccagtgaa

SEQ ID NO: 831028 - DNA, 15 bp, Homo sapiens
ggctctccagtgaaa

SEQ ID NO: 831029 - DNA, 15 bp, Homo sapiens
gctctccagtgaaac

SEQ ID NO: 831030 - DNA, 15 bp, Homo sapiens
ctctccagtgaaaca

SEQ ID NO: 831031 - DNA, 15 bp, Homo sapiens
tctccagtgaaacag

SEQ ID NO: 831032 - DNA, 15 bp, Homo sapiens
ctccagtgaaacaga

SEQ ID NO: 831033 - DNA, 15 bp, Homo sapiens
tccagtgaaacagag

SEQ ID NO: 831034 - DNA, 15 bp, Homo sapiens
ccagtgaaacagagt

SEQ ID NO: 831035 - DNA, 15 bp, Homo sapiens
cagtgaaacagagtc

SEQ ID NO: 831036 - DNA, 15 bp, Homo sapiens
agtgaaacagagtca

SEQ ID NO: 831037 - DNA, 15 bp, Homo sapiens
gtgaaacagagtcaa

SEQ ID NO: 831038 - DNA, 15 bp, Homo sapiens
tgaaacagagtcaat

SEQ ID NO: 831039 - DNA, 15 bp, Homo sapiens
gaaacagagtcaata

SEQ ID NO: 831040 - DNA, 15 bp, Homo sapiens
aaacagagtcaatag

SEQ ID NO: 831041 - DNA, 15 bp, Homo sapiens
aacagagtcaatagg

SEQ ID NO: 831042 - DNA, 15 bp, Homo sapiens
acagagtcaatagga

SEQ ID NO: 831043 - DNA, 15 bp, Homo sapiens
cagagtcaataggaa

SEQ ID NO: 831044 - DNA, 15 bp, Homo sapiens
agagtcaataggaaa

SEQ ID NO: 831045 - DNA, 15 bp, Homo sapiens
gagtcaataggaaat

SEQ ID NO: 831046 - DNA, 15 bp, Homo sapiens
agtcaataggaaata

SEQ ID NO: 831047 - DNA, 15 bp, Homo sapiens
gtcaataggaaatat

SEQ ID NO: 831048 - DNA, 15 bp, Homo sapiens
tcaataggaaatata

SEQ ID NO: 831049 - DNA, 15 bp, Homo sapiens
caataggaaatatat

SEQ ID NO: 831050 - DNA, 15 bp, Homo sapiens
aataggaaatatata

SEQ ID NO: 831051 - DNA, 15 bp, Homo sapiens
ataggaaatatatat

SEQ ID NO: 831052 - DNA, 15 bp, Homo sapiens
taggaaatatatata

SEQ ID NO: 831053 - DNA, 15 bp, Homo sapiens
aggaaatatatatat

SEQ ID NO: 831054 - DNA, 15 bp, Homo sapiens
ggaaatatatatatc

SEQ ID NO: 831055 - DNA, 15 bp, Homo sapiens
gaaatatatatatca

SEQ ID NO: 831056 - DNA, 15 bp, Homo sapiens
aaatatatatatcaa

SEQ ID NO: 831057 - DNA, 15 bp, Homo sapiens
aatatatatatcaat

SEQ ID NO: 831058 - DNA, 15 bp, Homo sapiens
atatatatatcaata

SEQ ID NO: 831059 - DNA, 15 bp, Homo sapiens
tatatatatcaatat

SEQ ID NO: 831060 - DNA, 15 bp, Homo sapiens
atatatatcaatata

SEQ ID NO: 831061 - DNA, 15 bp, Homo sapiens
tatatatcaatatat

SEQ ID NO: 831062 - DNA, 15 bp, Homo sapiens
atatatcaatatatc

SEQ ID NO: 831063 - DNA, 15 bp, Homo sapiens
tatatcaatatatct

SEQ ID NO: 831064 - DNA, 15 bp, Homo sapiens
atatcaatatatcta

SEQ ID NO: 831065 - DNA, 15 bp, Homo sapiens
tatcaatatatctaa

SEQ ID NO: 831066 - DNA, 15 bp, Homo sapiens
atcaatatatctaat

SEQ ID NO: 831067 - DNA, 15 bp, Homo sapiens
tcaatatatctaata

SEQ ID NO: 831068 - DNA, 15 bp, Homo sapiens
caatatatctaatac

SEQ ID NO: 831069 - DNA, 15 bp, Homo sapiens
aatatatctaataca

SEQ ID NO: 831070 - DNA, 15 bp, Homo sapiens
atatatctaatacag

SEQ ID NO: 831071 - DNA, 15 bp, Homo sapiens
tatatctaatacaga

SEQ ID NO: 831072 - DNA, 15 bp, Homo sapiens
atatctaatacagat

SEQ ID NO: 831073 - DNA, 15 bp, Homo sapiens
tatctaatacagata

SEQ ID NO: 831074 - DNA, 15 bp, Homo sapiens
atctaatacagatat

SEQ ID NO: 831075 - DNA, 15 bp, Homo sapiens
tctaatacagatata

SEQ ID NO: 831076 - DNA, 15 bp, Homo sapiens
ctaatacagatatat

SEQ ID NO: 831077 - DNA, 15 bp, Homo sapiens
taatacagatatata

SEQ ID NO: 831078 - DNA, 15 bp, Homo sapiens
aatacagatatatat

SEQ ID NO: 831079 - DNA, 15 bp, Homo sapiens
atacagatatatatc

SEQ ID NO: 831080 - DNA, 15 bp, Homo sapiens
tacagatatatatcg

SEQ ID NO: 831081 - DNA, 15 bp, Homo sapiens
acagatatatatcgg

SEQ ID NO: 831082 - DNA, 15 bp, Homo sapiens
cagatatatatcggt

SEQ ID NO: 831083 - DNA, 15 bp, Homo sapiens
agatatatatcggta

SEQ ID NO: 831084 - DNA, 15 bp, Homo sapiens
gatatatatcggtat

SEQ ID NO: 831085 - DNA, 15 bp, Homo sapiens
atatatatcggtatc

SEQ ID NO: 831086 - DNA, 15 bp, Homo sapiens
tatatatcggtatct

SEQ ID NO: 831087 - DNA, 15 bp, Homo sapiens
atatatcggtatcta

SEQ ID NO: 831088 - DNA, 15 bp, Homo sapiens
tatatcggtatctat

SEQ ID NO: 831089 - DNA, 15 bp, Homo sapiens
atatcggtatctata

SEQ ID NO: 831090 - DNA, 15 bp, Homo sapiens
tatcggtatctatat

SEQ ID NO: 831091 - DNA, 15 bp, Homo sapiens
atcggtatctatata

SEQ ID NO: 831092 - DNA, 15 bp, Homo sapiens
tcggtatctatatat

SEQ ID NO: 831093 - DNA, 15 bp, Homo sapiens
cggtatctatatatt

SEQ ID NO: 831094 - DNA, 15 bp, Homo sapiens
ggtatctatatattg

SEQ ID NO: 831095 - DNA, 15 bp, Homo sapiens
gtatctatatattga

SEQ ID NO: 831096 - DNA, 15 bp, Homo sapiens
tatctatatattgat

SEQ ID NO: 831097 - DNA, 15 bp, Homo sapiens
atctatatattgata

SEQ ID NO: 831098 - DNA, 15 bp, Homo sapiens
tctatatattgatac

SEQ ID NO: 831099 - DNA, 15 bp, Homo sapiens
ctatatattgataca

SEQ ID NO: 831100 - DNA, 15 bp, Homo sapiens
tatatattgatacat

SEQ ID NO: 831101 - DNA, 15 bp, Homo sapiens
atatattgatacatc

SEQ ID NO: 831102 - DNA, 15 bp, Homo sapiens
tatattgatacatct

SEQ ID NO: 831103 - DNA, 15 bp, Homo sapiens
atattgatacatcta

SEQ ID NO: 831104 - DNA, 15 bp, Homo sapiens
tattgatacatctat

SEQ ID NO: 831105 - DNA, 15 bp, Homo sapiens
attgatacatctatc

SEQ ID NO: 831106 - DNA, 15 bp, Homo sapiens
ttgatacatctatct

SEQ ID NO: 831107 - DNA, 15 bp, Homo sapiens
tgatacatctatcta

SEQ ID NO: 831108 - DNA, 15 bp, Homo sapiens
gatacatctatctat

SEQ ID NO: 831109 - DNA, 15 bp, Homo sapiens
atacatctatctatc

SEQ ID NO: 831110 - DNA, 15 bp, Homo sapiens
tacatctatctatct

SEQ ID NO: 831111 - DNA, 15 bp, Homo sapiens
acatctatctatcta

SEQ ID NO: 831112 - DNA, 15 bp, Homo sapiens
catctatctatctat

SEQ ID NO: 831113 - DNA, 15 bp, Homo sapiens
atctatctatctatc

SEQ ID NO: 831114 - DNA, 15 bp, Homo sapiens
tctatctatctatct

SEQ ID NO: 831115 - DNA, 15 bp, Homo sapiens
ctatctatctatcta

SEQ ID NO: 831116 - DNA, 15 bp, Homo sapiens
tatctatctatctat

SEQ ID NO: 831117 - DNA, 15 bp, Homo sapiens
ctatctatctatctc

SEQ ID NO: 831118 - DNA, 15 bp, Homo sapiens
tatctatctatctct

SEQ ID NO: 831119 - DNA, 15 bp, Homo sapiens
atctatctatctcta

SEQ ID NO: 831120 - DNA, 15 bp, Homo sapiens
tctatctatctctag

SEQ ID NO: 831121 - DNA, 15 bp, Homo sapiens
ctatctatctctaga

SEQ ID NO: 831122 - DNA, 15 bp, Homo sapiens
tatctatctctagag

SEQ ID NO: 831123 - DNA, 15 bp, Homo sapiens
atctatctctagaga

SEQ ID NO: 831124 - DNA, 15 bp, Homo sapiens
tctatctctagagag

SEQ ID NO: 831125 - DNA, 15 bp, Homo sapiens
ctatctctagagaga

SEQ ID NO: 831126 - DNA, 15 bp, Homo sapiens
tatctctagagagat

SEQ ID NO: 831127 - DNA, 15 bp, Homo sapiens
atctctagagagatt

SEQ ID NO: 831128 - DNA, 15 bp, Homo sapiens
tctctagagagattt

SEQ ID NO: 831129 - DNA, 15 bp, Homo sapiens
ctctagagagattta

SEQ ID NO: 831130 - DNA, 15 bp, Homo sapiens
tctagagagatttat

SEQ ID NO: 831131 - DNA, 15 bp, Homo sapiens
ctagagagatttatt

SEQ ID NO: 831132 - DNA, 15 bp, Homo sapiens
tagagagatttatta

SEQ ID NO: 831133 - DNA, 15 bp, Homo sapiens
agagagatttattag

SEQ ID NO: 831134 - DNA, 15 bp, Homo sapiens
gagagatttattagg

SEQ ID NO: 831135 - DNA, 15 bp, Homo sapiens
agagatttattagga

SEQ ID NO: 831136 - DNA, 15 bp, Homo sapiens
gagatttattaggaa

SEQ ID NO: 831137 - DNA, 15 bp, Homo sapiens
agatttattaggaag

SEQ ID NO: 831138 - DNA, 15 bp, Homo sapiens
gatttattaggaaga

SEQ ID NO: 831139 - DNA, 15 bp, Homo sapiens
atttattaggaagaa

SEQ ID NO: 831140 - DNA, 15 bp, Homo sapiens
tttattaggaagaat

SEQ ID NO: 831141 - DNA, 15 bp, Homo sapiens
ttattaggaagaatt

SEQ ID NO: 831142 - DNA, 15 bp, Homo sapiens
tattaggaagaattg

SEQ ID NO: 831143 - DNA, 15 bp, Homo sapiens
attaggaagaattgg

SEQ ID NO: 831144 - DNA, 15 bp, Homo sapiens
ttaggaagaattggc

SEQ ID NO: 831145 - DNA, 15 bp, Homo sapiens
taggaagaattggct

SEQ ID NO: 831146 - DNA, 15 bp, Homo sapiens
aggaagaattggctc

SEQ ID NO: 831147 - DNA, 15 bp, Homo sapiens
ggaagaattggctca

SEQ ID NO: 831148 - DNA, 15 bp, Homo sapiens
gaagaattggctcat

SEQ ID NO: 831149 - DNA, 15 bp, Homo sapiens
aagaattggctcatt

SEQ ID NO: 831150 - DNA, 15 bp, Homo sapiens
agaattggctcattt

SEQ ID NO: 831151 - DNA, 15 bp, Homo sapiens
gaattggctcatttg

SEQ ID NO: 831152 - DNA, 15 bp, Homo sapiens
aattggctcatttga

SEQ ID NO: 831153 - DNA, 15 bp, Homo sapiens
attggctcatttgat

SEQ ID NO: 831154 - DNA, 15 bp, Homo sapiens
ttggctcatttgatt

SEQ ID NO: 831155 - DNA, 15 bp, Homo sapiens
tggctcatttgatta

SEQ ID NO: 831156 - DNA, 15 bp, Homo sapiens
ggctcatttgattac

SEQ ID NO: 831157 - DNA, 15 bp, Homo sapiens
gctcatttgattaca

SEQ ID NO: 831158 - DNA, 15 bp, Homo sapiens
ctcatttgattacag

SEQ ID NO: 831159 - DNA, 15 bp, Homo sapiens
tcatttgattacaga

SEQ ID NO: 831160 - DNA, 15 bp, Homo sapiens
catttgattacagag

SEQ ID NO: 831161 - DNA, 15 bp, Homo sapiens
atttgattacagagg

SEQ ID NO: 831162 - DNA, 15 bp, Homo sapiens
tttgattacagaggc

SEQ ID NO: 831163 - DNA, 15 bp, Homo sapiens
ttgattacagaggct

SEQ ID NO: 831164 - DNA, 15 bp, Homo sapiens
tgattacagaggctg

SEQ ID NO: 831165 - DNA, 15 bp, Homo sapiens
gattacagaggctgg

SEQ ID NO: 831166 - DNA, 15 bp, Homo sapiens
attacagaggctggg

SEQ ID NO: 831167 - DNA, 15 bp, Homo sapiens
ttacagaggctggga

SEQ ID NO: 831168 - DNA, 15 bp, Homo sapiens
tacagaggctgggaa

SEQ ID NO: 831169 - DNA, 15 bp, Homo sapiens
acagaggctgggaag

SEQ ID NO: 831170 - DNA, 15 bp, Homo sapiens
cagaggctgggaagt

SEQ ID NO: 831171 - DNA, 15 bp, Homo sapiens
agaggctgggaagtc

SEQ ID NO: 831172 - DNA, 15 bp, Homo sapiens
gaggctgggaagtcc

SEQ ID NO: 831173 - DNA, 15 bp, Homo sapiens
aggctgggaagtccc

SEQ ID NO: 831174 - DNA, 15 bp, Homo sapiens
ggctgggaagtccca

SEQ ID NO: 831175 - DNA, 15 bp, Homo sapiens
gctgggaagtcccac

SEQ ID NO: 831176 - DNA, 15 bp, Homo sapiens
ctgggaagtcccact

SEQ ID NO: 831177 - DNA, 15 bp, Homo sapiens
tgggaagtcccactg

SEQ ID NO: 831178 - DNA, 15 bp, Homo sapiens
gggaagtcccactgc

SEQ ID NO: 831179 - DNA, 15 bp, Homo sapiens
ggaagtcccactgcc

SEQ ID NO: 831180 - DNA, 15 bp, Homo sapiens
gaagtcccactgcct

SEQ ID NO: 831181 - DNA, 15 bp, Homo sapiens
aagtcccactgcctg

SEQ ID NO: 831182 - DNA, 15 bp, Homo sapiens
agtcccactgcctgc

SEQ ID NO: 831183 - DNA, 15 bp, Homo sapiens
gtcccactgcctgcc

SEQ ID NO: 831184 - DNA, 15 bp, Homo sapiens
tcccactgcctgcca

SEQ ID NO: 831185 - DNA, 15 bp, Homo sapiens
cccactgcctgccac

SEQ ID NO: 831186 - DNA, 15 bp, Homo sapiens
ccactgcctgccacc

SEQ ID NO: 831187 - DNA, 15 bp, Homo sapiens
cactgcctgccacca

SEQ ID NO: 831188 - DNA, 15 bp, Homo sapiens
actgcctgccaccag

SEQ ID NO: 831189 - DNA, 15 bp, Homo sapiens
ctgcctgccaccagc

SEQ ID NO: 831190 - DNA, 15 bp, Homo sapiens
tgcctgccaccagca

SEQ ID NO: 831191 - DNA, 15 bp, Homo sapiens
gcctgccaccagcaa

SEQ ID NO: 831192 - DNA, 15 bp, Homo sapiens
cctgccaccagcaag

SEQ ID NO: 831193 - DNA, 15 bp, Homo sapiens
ctgccaccagcaagc

SEQ ID NO: 831194 - DNA, 15 bp, Homo sapiens
tgccaccagcaagct

SEQ ID NO: 831195 - DNA, 15 bp, Homo sapiens
gccaccagcaagctg

SEQ ID NO: 831196 - DNA, 15 bp, Homo sapiens
ccaccagcaagctgg

SEQ ID NO: 831197 - DNA, 15 bp, Homo sapiens
caccagcaagctgga

SEQ ID NO: 831198 - DNA, 15 bp, Homo sapiens
accagcaagctggag

SEQ ID NO: 831199 - DNA, 15 bp, Homo sapiens
ccagcaagctggaga

SEQ ID NO: 831200 - DNA, 15 bp, Homo sapiens
cagcaagctggagac

SEQ ID NO: 831201 - DNA, 15 bp, Homo sapiens
agcaagctggagacc

SEQ ID NO: 831202 - DNA, 15 bp, Homo sapiens
gcaagctggagaccc

SEQ ID NO: 831203 - DNA, 15 bp, Homo sapiens
caagctggagaccca

SEQ ID NO: 831204 - DNA, 15 bp, Homo sapiens
aagctggagacccag

SEQ ID NO: 831205 - DNA, 15 bp, Homo sapiens
agctggagacccagg

SEQ ID NO: 831206 - DNA, 15 bp, Homo sapiens
gctggagacccagga

SEQ ID NO: 831207 - DNA, 15 bp, Homo sapiens
ctggagacccaggaa

SEQ ID NO: 831208 - DNA, 15 bp, Homo sapiens
tggagacccaggaaa

SEQ ID NO: 831209 - DNA, 15 bp, Homo sapiens
ggagacccaggaaag

SEQ ID NO: 831210 - DNA, 15 bp, Homo sapiens
gagacccaggaaagc

SEQ ID NO: 831211 - DNA, 15 bp, Homo sapiens
agacccaggaaagct

SEQ ID NO: 831212 - DNA, 15 bp, Homo sapiens
gacccaggaaagctg

SEQ ID NO: 831213 - DNA, 15 bp, Homo sapiens
acccaggaaagctgg

SEQ ID NO: 831214 - DNA, 15 bp, Homo sapiens
cccaggaaagctggt

SEQ ID NO: 831215 - DNA, 15 bp, Homo sapiens
ccaggaaagctggtg

SEQ ID NO: 831216 - DNA, 15 bp, Homo sapiens
caggaaagctggtgg

SEQ ID NO: 831217 - DNA, 15 bp, Homo sapiens
aggaaagctggtggt

SEQ ID NO: 831218 - DNA, 15 bp, Homo sapiens
ggaaagctggtggtg

SEQ ID NO: 831219 - DNA, 15 bp, Homo sapiens
gaaagctggtggtgt

SEQ ID NO: 831220 - DNA, 15 bp, Homo sapiens
aaagctggtggtgtt

SEQ ID NO: 831221 - DNA, 15 bp, Homo sapiens
aagctggtggtgttt

SEQ ID NO: 831222 - DNA, 15 bp, Homo sapiens
agctggtggtgtttg

SEQ ID NO: 831223 - DNA, 15 bp, Homo sapiens
gctggtggtgtttga

SEQ ID NO: 831224 - DNA, 15 bp, Homo sapiens
ctggtggtgtttgag

SEQ ID NO: 831225 - DNA, 15 bp, Homo sapiens
tggtggtgtttgagt

SEQ ID NO: 831226 - DNA, 15 bp, Homo sapiens
ggtggtgtttgagtc

SEQ ID NO: 831227 - DNA, 15 bp, Homo sapiens
gtggtgtttgagtct

SEQ ID NO: 831228 - DNA, 15 bp, Homo sapiens
tggtgtttgagtctg

SEQ ID NO: 831229 - DNA, 15 bp, Homo sapiens
ggtgtttgagtctga

SEQ ID NO: 831230 - DNA, 15 bp, Homo sapiens
gtgtttgagtctgag

SEQ ID NO: 831231 - DNA, 15 bp, Homo sapiens
tgtttgagtctgagg

SEQ ID NO: 831232 - DNA, 15 bp, Homo sapiens
gtttgagtctgaggg

SEQ ID NO: 831233 - DNA, 15 bp, Homo sapiens
tttgagtctgagggc

SEQ ID NO: 831234 - DNA, 15 bp, Homo sapiens
ttgagtctgagggcc

SEQ ID NO: 831235 - DNA, 15 bp, Homo sapiens
tgagtctgagggcca

SEQ ID NO: 831236 - DNA, 15 bp, Homo sapiens
gagtctgagggccag

SEQ ID NO: 831237 - DNA, 15 bp, Homo sapiens
agtctgagggccaga

SEQ ID NO: 831238 - DNA, 15 bp, Homo sapiens
gtctgagggccagag

SEQ ID NO: 831239 - DNA, 15 bp, Homo sapiens
tctgagggccagaga

SEQ ID NO: 831240 - DNA, 15 bp, Homo sapiens
ctgagggccagagag

SEQ ID NO: 831241 - DNA, 15 bp, Homo sapiens
tgagggccagagagt

SEQ ID NO: 831242 - DNA, 15 bp, Homo sapiens
gagggccagagagtc

SEQ ID NO: 831243 - DNA, 15 bp, Homo sapiens
agggccagagagtca

SEQ ID NO: 831244 - DNA, 15 bp, Homo sapiens
gggccagagagtcat

SEQ ID NO: 831245 - DNA, 15 bp, Homo sapiens
ggccagagagtcata

SEQ ID NO: 831246 - DNA, 15 bp, Homo sapiens
gccagagagtcatag

SEQ ID NO: 831247 - DNA, 15 bp, Homo sapiens
ccagagagtcataga

SEQ ID NO: 831248 - DNA, 15 bp, Homo sapiens
cagagagtcatagag

SEQ ID NO: 831249 - DNA, 15 bp, Homo sapiens
agagagtcatagagc

SEQ ID NO: 831250 - DNA, 15 bp, Homo sapiens
gagagtcatagagcc

SEQ ID NO: 831251 - DNA, 15 bp, Homo sapiens
agagtcatagagcca

SEQ ID NO: 831252 - DNA, 15 bp, Homo sapiens
gagtcatagagccaa

SEQ ID NO: 831253 - DNA, 15 bp, Homo sapiens
agtcatagagccaat

SEQ ID NO: 831254 - DNA, 15 bp, Homo sapiens
gtcatagagccaatg

SEQ ID NO: 831255 - DNA, 15 bp, Homo sapiens
tcatagagccaatgt

SEQ ID NO: 831256 - DNA, 15 bp, Homo sapiens
catagagccaatgtc

SEQ ID NO: 831257 - DNA, 15 bp, Homo sapiens
atagagccaatgtca

SEQ ID NO: 831258 - DNA, 15 bp, Homo sapiens
tagagccaatgtcaa

SEQ ID NO: 831259 - DNA, 15 bp, Homo sapiens
agagccaatgtcaac

SEQ ID NO: 831260 - DNA, 15 bp, Homo sapiens
gagccaatgtcaacc

SEQ ID NO: 831261 - DNA, 15 bp, Homo sapiens
agccaatgtcaaccc

SEQ ID NO: 831262 - DNA, 15 bp, Homo sapiens
gccaatgtcaacccc

SEQ ID NO: 831263 - DNA, 15 bp, Homo sapiens
ccaatgtcaacccca

SEQ ID NO: 831264 - DNA, 15 bp, Homo sapiens
caatgtcaaccccag

SEQ ID NO: 831265 - DNA, 15 bp, Homo sapiens
aatgtcaaccccagt

SEQ ID NO: 831266 - DNA, 15 bp, Homo sapiens
atgtcaaccccagtc

SEQ ID NO: 831267 - DNA, 15 bp, Homo sapiens
tgtcaaccccagtcc

SEQ ID NO: 831268 - DNA, 15 bp, Homo sapiens
gtcaaccccagtcca

SEQ ID NO: 831269 - DNA, 15 bp, Homo sapiens
tcaaccccagtccaa

SEQ ID NO: 831270 - DNA, 15 bp, Homo sapiens
caaccccagtccaag

SEQ ID NO: 831271 - DNA, 15 bp, Homo sapiens
aaccccagtccaagg

SEQ ID NO: 831272 - DNA, 15 bp, Homo sapiens
accccagtccaagga

SEQ ID NO: 831273 - DNA, 15 bp, Homo sapiens
ccccagtccaaggat

SEQ ID NO: 831274 - DNA, 15 bp, Homo sapiens
cccagtccaaggata

SEQ ID NO: 831275 - DNA, 15 bp, Homo sapiens
ccagtccaaggatag

SEQ ID NO: 831276 - DNA, 15 bp, Homo sapiens
cagtccaaggatagg

SEQ ID NO: 831277 - DNA, 15 bp, Homo sapiens
agtccaaggatagga

SEQ ID NO: 831278 - DNA, 15 bp, Homo sapiens
gtccaaggataggag

SEQ ID NO: 831279 - DNA, 15 bp, Homo sapiens
tccaaggataggaga

SEQ ID NO: 831280 - DNA, 15 bp, Homo sapiens
ccaaggataggagaa

SEQ ID NO: 831281 - DNA, 15 bp, Homo sapiens
caaggataggagaat

SEQ ID NO: 831282 - DNA, 15 bp, Homo sapiens
aaggataggagaatg

SEQ ID NO: 831283 - DNA, 15 bp, Homo sapiens
aggataggagaatga

SEQ ID NO: 831284 - DNA, 15 bp, Homo sapiens
ggataggagaatgac

SEQ ID NO: 831285 - DNA, 15 bp, Homo sapiens
gataggagaatgaca

SEQ ID NO: 831286 - DNA, 15 bp, Homo sapiens
ataggagaatgacaa

SEQ ID NO: 831287 - DNA, 15 bp, Homo sapiens
taggagaatgacaag

SEQ ID NO: 831288 - DNA, 15 bp, Homo sapiens
aggagaatgacaaga

SEQ ID NO: 831289 - DNA, 15 bp, Homo sapiens
ggagaatgacaagag

SEQ ID NO: 831290 - DNA, 15 bp, Homo sapiens
gagaatgacaagaga

SEQ ID NO: 831291 - DNA, 15 bp, Homo sapiens
agaatgacaagagat

SEQ ID NO: 831292 - DNA, 15 bp, Homo sapiens
gaatgacaagagatg

SEQ ID NO: 831293 - DNA, 15 bp, Homo sapiens
aatgacaagagatgc

SEQ ID NO: 831294 - DNA, 15 bp, Homo sapiens
atgacaagagatgcc

SEQ ID NO: 831295 - DNA, 15 bp, Homo sapiens
tgacaagagatgccc

SEQ ID NO: 831296 - DNA, 15 bp, Homo sapiens
gacaagagatgccca

SEQ ID NO: 831297 - DNA, 15 bp, Homo sapiens
acaagagatgcccag

SEQ ID NO: 831298 - DNA, 15 bp, Homo sapiens
caagagatgcccagt

SEQ ID NO: 831299 - DNA, 15 bp, Homo sapiens
aagagatgcccagtt

SEQ ID NO: 831300 - DNA, 15 bp, Homo sapiens
agagatgcccagttc

SEQ ID NO: 831301 - DNA, 15 bp, Homo sapiens
gagatgcccagttca

SEQ ID NO: 831302 - DNA, 15 bp, Homo sapiens
agatgcccagttcaa

SEQ ID NO: 831303 - DNA, 15 bp, Homo sapiens
gatgcccagttcaag

SEQ ID NO: 831304 - DNA, 15 bp, Homo sapiens
atgcccagttcaagc

SEQ ID NO: 831305 - DNA, 15 bp, Homo sapiens
tgcccagttcaagcc

SEQ ID NO: 831306 - DNA, 15 bp, Homo sapiens
gcccagttcaagccg

SEQ ID NO: 831307 - DNA, 15 bp, Homo sapiens
cccagttcaagccgg

SEQ ID NO: 831308 - DNA, 15 bp, Homo sapiens
ccagttcaagccggc

SEQ ID NO: 831309 - DNA, 15 bp, Homo sapiens
cagttcaagccggca

SEQ ID NO: 831310 - DNA, 15 bp, Homo sapiens
agttcaagccggcag

SEQ ID NO: 831311 - DNA, 15 bp, Homo sapiens
gttcaagccggcagg

SEQ ID NO: 831312 - DNA, 15 bp, Homo sapiens
ttcaagccggcagga

SEQ ID NO: 831313 - DNA, 15 bp, Homo sapiens
tcaagccggcaggaa

SEQ ID NO: 831314 - DNA, 15 bp, Homo sapiens
caagccggcaggaaa

SEQ ID NO: 831315 - DNA, 15 bp, Homo sapiens
aagccggcaggaaag

SEQ ID NO: 831316 - DNA, 15 bp, Homo sapiens
agccggcaggaaaga

SEQ ID NO: 831317 - DNA, 15 bp, Homo sapiens
gccggcaggaaagaa

SEQ ID NO: 831318 - DNA, 15 bp, Homo sapiens
ccggcaggaaagaag

SEQ ID NO: 831319 - DNA, 15 bp, Homo sapiens
cggcaggaaagaagc

SEQ ID NO: 831320 - DNA, 15 bp, Homo sapiens
ggcaggaaagaagca

SEQ ID NO: 831321 - DNA, 15 bp, Homo sapiens
gcaggaaagaagcaa

SEQ ID NO: 831322 - DNA, 15 bp, Homo sapiens
caggaaagaagcaaa

SEQ ID NO: 831323 - DNA, 15 bp, Homo sapiens
aggaaagaagcaaaa

SEQ ID NO: 831324 - DNA, 15 bp, Homo sapiens
ggaaagaagcaaaag

SEQ ID NO: 831325 - DNA, 15 bp, Homo sapiens
gaaagaagcaaaagg

SEQ ID NO: 831326 - DNA, 15 bp, Homo sapiens
aaagaagcaaaaggg

SEQ ID NO: 831327 - DNA, 15 bp, Homo sapiens
aagaagcaaaaggga

SEQ ID NO: 831328 - DNA, 15 bp, Homo sapiens
agaagcaaaagggac

SEQ ID NO: 831329 - DNA, 15 bp, Homo sapiens
gaagcaaaagggaca

SEQ ID NO: 831330 - DNA, 15 bp, Homo sapiens
aagcaaaagggacaa

SEQ ID NO: 831331 - DNA, 15 bp, Homo sapiens
agcaaaagggacaaa

SEQ ID NO: 831332 - DNA, 15 bp, Homo sapiens
gcaaaagggacaaac

SEQ ID NO: 831333 - DNA, 15 bp, Homo sapiens
caaaagggacaaacg

SEQ ID NO: 831334 - DNA, 15 bp, Homo sapiens
aaaagggacaaacgc

SEQ ID NO: 831335 - DNA, 15 bp, Homo sapiens
aaagggacaaacgcc

SEQ ID NO: 831336 - DNA, 15 bp, Homo sapiens
aagggacaaacgcct

SEQ ID NO: 831337 - DNA, 15 bp, Homo sapiens
agggacaaacgcctc

SEQ ID NO: 831338 - DNA, 15 bp, Homo sapiens
gggacaaacgcctct

SEQ ID NO: 831339 - DNA, 15 bp, Homo sapiens
ggacaaacgcctctg

SEQ ID NO: 831340 - DNA, 15 bp, Homo sapiens
gacaaacgcctctgt

SEQ ID NO: 831341 - DNA, 15 bp, Homo sapiens
acaaacgcctctgtc

SEQ ID NO: 831342 - DNA, 15 bp, Homo sapiens
caaacgcctctgtcc

SEQ ID NO: 831343 - DNA, 15 bp, Homo sapiens
aaacgcctctgtcct

SEQ ID NO: 831344 - DNA, 15 bp, Homo sapiens
aacgcctctgtcctc

SEQ ID NO: 831345 - DNA, 15 bp, Homo sapiens
acgcctctgtcctct

SEQ ID NO: 831346 - DNA, 15 bp, Homo sapiens
cgcctctgtcctctg

SEQ ID NO: 831347 - DNA, 15 bp, Homo sapiens
gcctctgtcctctgt

SEQ ID NO: 831348 - DNA, 15 bp, Homo sapiens
cctctgtcctctgtt

SEQ ID NO: 831349 - DNA, 15 bp, Homo sapiens
ctctgtcctctgttt

SEQ ID NO: 831350 - DNA, 15 bp, Homo sapiens
tctgtcctctgtttt

SEQ ID NO: 831351 - DNA, 15 bp, Homo sapiens
ctgtcctctgtttta

SEQ ID NO: 831352 - DNA, 15 bp, Homo sapiens
tgtcctctgttttat

SEQ ID NO: 831353 - DNA, 15 bp, Homo sapiens
gtcctctgttttatt

SEQ ID NO: 831354 - DNA, 15 bp, Homo sapiens
tcctctgttttattg

SEQ ID NO: 831355 - DNA, 15 bp, Homo sapiens
cctctgttttattgt

SEQ ID NO: 831356 - DNA, 15 bp, Homo sapiens
ctctgttttattgtt

SEQ ID NO: 831357 - DNA, 15 bp, Homo sapiens
tctgttttattgttc

SEQ ID NO: 831358 - DNA, 15 bp, Homo sapiens
ctgttttattgttct

SEQ ID NO: 831359 - DNA, 15 bp, Homo sapiens
tgttttattgttctc

SEQ ID NO: 831360 - DNA, 15 bp, Homo sapiens
gttttattgttctct

SEQ ID NO: 831361 - DNA, 15 bp, Homo sapiens
ttttattgttctctt

SEQ ID NO: 831362 - DNA, 15 bp, Homo sapiens
tttattgttctcttc

SEQ ID NO: 831363 - DNA, 15 bp, Homo sapiens
ttattgttctcttca

SEQ ID NO: 831364 - DNA, 15 bp, Homo sapiens
tattgttctcttcag

SEQ ID NO: 831365 - DNA, 15 bp, Homo sapiens
attgttctcttcaga

SEQ ID NO: 831366 - DNA, 15 bp, Homo sapiens
ttgttctcttcagac

SEQ ID NO: 831367 - DNA, 15 bp, Homo sapiens
tgttctcttcagacc

SEQ ID NO: 831368 - DNA, 15 bp, Homo sapiens
gttctcttcagaccc

SEQ ID NO: 831369 - DNA, 15 bp, Homo sapiens
ttctcttcagaccct

SEQ ID NO: 831370 - DNA, 15 bp, Homo sapiens
tctcttcagaccctc

SEQ ID NO: 831371 - DNA, 15 bp, Homo sapiens
ctcttcagaccctca

SEQ ID NO: 831372 - DNA, 15 bp, Homo sapiens
tcttcagaccctcaa

SEQ ID NO: 831373 - DNA, 15 bp, Homo sapiens
cttcagaccctcaaa

SEQ ID NO: 831374 - DNA, 15 bp, Homo sapiens
ttcagaccctcaaag

SEQ ID NO: 831375 - DNA, 15 bp, Homo sapiens
tcagaccctcaaagg

SEQ ID NO: 831376 - DNA, 15 bp, Homo sapiens
cagaccctcaaagga

SEQ ID NO: 831377 - DNA, 15 bp, Homo sapiens
agaccctcaaaggac

SEQ ID NO: 831378 - DNA, 15 bp, Homo sapiens
gaccctcaaaggact

SEQ ID NO: 831379 - DNA, 15 bp, Homo sapiens
accctcaaaggactg

SEQ ID NO: 831380 - DNA, 15 bp, Homo sapiens
ccctcaaaggactgg

SEQ ID NO: 831381 - DNA, 15 bp, Homo sapiens
cctcaaaggactgga

SEQ ID NO: 831382 - DNA, 15 bp, Homo sapiens
ctcaaaggactggat

SEQ ID NO: 831383 - DNA, 15 bp, Homo sapiens
tcaaaggactggatg

SEQ ID NO: 831384 - DNA, 15 bp, Homo sapiens
caaaggactggatga

SEQ ID NO: 831385 - DNA, 15 bp, Homo sapiens
aaaggactggatgat

SEQ ID NO: 831386 - DNA, 15 bp, Homo sapiens
aaggactggatgatg

SEQ ID NO: 831387 - DNA, 15 bp, Homo sapiens
aggactggatgatgc

SEQ ID NO: 831388 - DNA, 15 bp, Homo sapiens
ggactggatgatgcc

SEQ ID NO: 831389 - DNA, 15 bp, Homo sapiens
gactggatgatgccc

SEQ ID NO: 831390 - DNA, 15 bp, Homo sapiens
actggatgatgccca

SEQ ID NO: 831391 - DNA, 15 bp, Homo sapiens
ctggatgatgcccac

SEQ ID NO: 831392 - DNA, 15 bp, Homo sapiens
tggatgatgcccact

SEQ ID NO: 831393 - DNA, 15 bp, Homo sapiens
ggatgatgcccactc

SEQ ID NO: 831394 - DNA, 15 bp, Homo sapiens
gatgatgcccactcc

SEQ ID NO: 831395 - DNA, 15 bp, Homo sapiens
atgatgcccactccc

SEQ ID NO: 831396 - DNA, 15 bp, Homo sapiens
tgatgcccactccca

SEQ ID NO: 831397 - DNA, 15 bp, Homo sapiens
gatgcccactcccac

SEQ ID NO: 831398 - DNA, 15 bp, Homo sapiens
atgcccactcccaca

SEQ ID NO: 831399 - DNA, 15 bp, Homo sapiens
tgcccactcccacaa

SEQ ID NO: 831400 - DNA, 15 bp, Homo sapiens
gcccactcccacaaa

SEQ ID NO: 831401 - DNA, 15 bp, Homo sapiens
cccactcccacaaag

SEQ ID NO: 831402 - DNA, 15 bp, Homo sapiens
ccactcccacaaagg

SEQ ID NO: 831403 - DNA, 15 bp, Homo sapiens
cactcccacaaagga

SEQ ID NO: 831404 - DNA, 15 bp, Homo sapiens
actcccacaaaggag

SEQ ID NO: 831405 - DNA, 15 bp, Homo sapiens
ctcccacaaaggagg

SEQ ID NO: 831406 - DNA, 15 bp, Homo sapiens
tcccacaaaggaggg

SEQ ID NO: 831407 - DNA, 15 bp, Homo sapiens
cccacaaaggagggt

SEQ ID NO: 831408 - DNA, 15 bp, Homo sapiens
ccacaaaggagggta

SEQ ID NO: 831409 - DNA, 15 bp, Homo sapiens
cacaaaggagggtag

SEQ ID NO: 831410 - DNA, 15 bp, Homo sapiens
acaaaggagggtagt

SEQ ID NO: 831411 - DNA, 15 bp, Homo sapiens
caaaggagggtagtc

SEQ ID NO: 831412 - DNA, 15 bp, Homo sapiens
aaaggagggtagtct

SEQ ID NO: 831413 - DNA, 15 bp, Homo sapiens
aaggagggtagtcta

SEQ ID NO: 831414 - DNA, 15 bp, Homo sapiens
aggagggtagtctac

SEQ ID NO: 831415 - DNA, 15 bp, Homo sapiens
ggagggtagtctact

SEQ ID NO: 831416 - DNA, 15 bp, Homo sapiens
gagggtagtctactg

SEQ ID NO: 831417 - DNA, 15 bp, Homo sapiens
agggtagtctactga

SEQ ID NO: 831418 - DNA, 15 bp, Homo sapiens
gggtagtctactgaa

SEQ ID NO: 831419 - DNA, 15 bp, Homo sapiens
ggtagtctactgaat

SEQ ID NO: 831420 - DNA, 15 bp, Homo sapiens
gtagtctactgaatt

SEQ ID NO: 831421 - DNA, 15 bp, Homo sapiens
tagtctactgaattc

SEQ ID NO: 831422 - DNA, 15 bp, Homo sapiens
agtctactgaattca

SEQ ID NO: 831423 - DNA, 15 bp, Homo sapiens
gtctactgaattcac

SEQ ID NO: 831424 - DNA, 15 bp, Homo sapiens
tctactgaattcact

SEQ ID NO: 831425 - DNA, 15 bp, Homo sapiens
ctactgaattcactg

SEQ ID NO: 831426 - DNA, 15 bp, Homo sapiens
tactgaattcactga

SEQ ID NO: 831427 - DNA, 15 bp, Homo sapiens
actgaattcactgat

SEQ ID NO: 831428 - DNA, 15 bp, Homo sapiens
ctgaattcactgatt

SEQ ID NO: 831429 - DNA, 15 bp, Homo sapiens
tgaattcactgattc

SEQ ID NO: 831430 - DNA, 15 bp, Homo sapiens
gaattcactgattca

SEQ ID NO: 831431 - DNA, 15 bp, Homo sapiens
aattcactgattcaa

SEQ ID NO: 831432 - DNA, 15 bp, Homo sapiens
attcactgattcaaa

SEQ ID NO: 831433 - DNA, 15 bp, Homo sapiens
ttcactgattcaaat

SEQ ID NO: 831434 - DNA, 15 bp, Homo sapiens
tcactgattcaaatg

SEQ ID NO: 831435 - DNA, 15 bp, Homo sapiens
cactgattcaaatgc

SEQ ID NO: 831436 - DNA, 15 bp, Homo sapiens
actgattcaaatgcc

SEQ ID NO: 831437 - DNA, 15 bp, Homo sapiens
ctgattcaaatgcca

SEQ ID NO: 831438 - DNA, 15 bp, Homo sapiens
tgattcaaatgccat

SEQ ID NO: 831439 - DNA, 15 bp, Homo sapiens
gattcaaatgccatt

SEQ ID NO: 831440 - DNA, 15 bp, Homo sapiens
attcaaatgccattc

SEQ ID NO: 831441 - DNA, 15 bp, Homo sapiens
ttcaaatgccattct

SEQ ID NO: 831442 - DNA, 15 bp, Homo sapiens
tcaaatgccattctc

SEQ ID NO: 831443 - DNA, 15 bp, Homo sapiens
caaatgccattctca

SEQ ID NO: 831444 - DNA, 15 bp, Homo sapiens
aaatgccattctcat

SEQ ID NO: 831445 - DNA, 15 bp, Homo sapiens
aatgccattctcatc

SEQ ID NO: 831446 - DNA, 15 bp, Homo sapiens
atgccattctcatcc

SEQ ID NO: 831447 - DNA, 15 bp, Homo sapiens
tgccattctcatcca

SEQ ID NO: 831448 - DNA, 15 bp, Homo sapiens
gccattctcatccag

SEQ ID NO: 831449 - DNA, 15 bp, Homo sapiens
ccattctcatccaga

SEQ ID NO: 831450 - DNA, 15 bp, Homo sapiens
cattctcatccagag

SEQ ID NO: 831451 - DNA, 15 bp, Homo sapiens
attctcatccagaga

SEQ ID NO: 831452 - DNA, 15 bp, Homo sapiens
ttctcatccagagac

SEQ ID NO: 831453 - DNA, 15 bp, Homo sapiens
tctcatccagagact

SEQ ID NO: 831454 - DNA, 15 bp, Homo sapiens
ctcatccagagactc

SEQ ID NO: 831455 - DNA, 15 bp, Homo sapiens
tcatccagagactct

SEQ ID NO: 831456 - DNA, 15 bp, Homo sapiens
catccagagactctc

SEQ ID NO: 831457 - DNA, 15 bp, Homo sapiens
atccagagactctcc

SEQ ID NO: 831458 - DNA, 15 bp, Homo sapiens
tccagagactctccc

SEQ ID NO: 831459 - DNA, 15 bp, Homo sapiens
ccagagactctccca

SEQ ID NO: 831460 - DNA, 15 bp, Homo sapiens
cagagactctcccag

SEQ ID NO: 831461 - DNA, 15 bp, Homo sapiens
agagactctcccaga

SEQ ID NO: 831462 - DNA, 15 bp, Homo sapiens
gagactctcccagac

SEQ ID NO: 831463 - DNA, 15 bp, Homo sapiens
agactctcccagaca

SEQ ID NO: 831464 - DNA, 15 bp, Homo sapiens
gactctcccagacac

SEQ ID NO: 831465 - DNA, 15 bp, Homo sapiens
actctcccagacaca

SEQ ID NO: 831466 - DNA, 15 bp, Homo sapiens
ctctcccagacacac

SEQ ID NO: 831467 - DNA, 15 bp, Homo sapiens
tctcccagacacacc

SEQ ID NO: 831468 - DNA, 15 bp, Homo sapiens
ctcccagacacaccc

SEQ ID NO: 831469 - DNA, 15 bp, Homo sapiens
tcccagacacaccca

SEQ ID NO: 831470 - DNA, 15 bp, Homo sapiens
cccagacacacccag

SEQ ID NO: 831471 - DNA, 15 bp, Homo sapiens
ccagacacacccaga

SEQ ID NO: 831472 - DNA, 15 bp, Homo sapiens
cagacacacccagaa

SEQ ID NO: 831473 - DNA, 15 bp, Homo sapiens
agacacacccagaaa

SEQ ID NO: 831474 - DNA, 15 bp, Homo sapiens
gacacacccagaaat

SEQ ID NO: 831475 - DNA, 15 bp, Homo sapiens
acacacccagaaatc

SEQ ID NO: 831476 - DNA, 15 bp, Homo sapiens
cacacccagaaatca

SEQ ID NO: 831477 - DNA, 15 bp, Homo sapiens
acacccagaaatcac

SEQ ID NO: 831478 - DNA, 15 bp, Homo sapiens
cacccagaaatcaca

SEQ ID NO: 831479 - DNA, 15 bp, Homo sapiens
acccagaaatcacac

SEQ ID NO: 831480 - DNA, 15 bp, Homo sapiens
cccagaaatcacact

SEQ ID NO: 831481 - DNA, 15 bp, Homo sapiens
ccagaaatcacactg

SEQ ID NO: 831482 - DNA, 15 bp, Homo sapiens
cagaaatcacactgg

SEQ ID NO: 831483 - DNA, 15 bp, Homo sapiens
agaaatcacactgga

SEQ ID NO: 831484 - DNA, 15 bp, Homo sapiens
gaaatcacactggat

SEQ ID NO: 831485 - DNA, 15 bp, Homo sapiens
aaatcacactggatc

SEQ ID NO: 831486 - DNA, 15 bp, Homo sapiens
aatcacactggatct

SEQ ID NO: 831487 - DNA, 15 bp, Homo sapiens
atcacactggatctg

SEQ ID NO: 831488 - DNA, 15 bp, Homo sapiens
tcacactggatctgg

SEQ ID NO: 831489 - DNA, 15 bp, Homo sapiens
cacactggatctggg

SEQ ID NO: 831490 - DNA, 15 bp, Homo sapiens
acactggatctgggc

SEQ ID NO: 831491 - DNA, 15 bp, Homo sapiens
cactggatctgggca

SEQ ID NO: 831492 - DNA, 15 bp, Homo sapiens
actggatctgggcac

SEQ ID NO: 831493 - DNA, 15 bp, Homo sapiens
ctggatctgggcacc

SEQ ID NO: 831494 - DNA, 15 bp, Homo sapiens
tggatctgggcaccc

SEQ ID NO: 831495 - DNA, 15 bp, Homo sapiens
ggatctgggcaccct

SEQ ID NO: 831496 - DNA, 15 bp, Homo sapiens
gatctgggcaccctc

SEQ ID NO: 831497 - DNA, 15 bp, Homo sapiens
atctgggcaccctct

SEQ ID NO: 831498 - DNA, 15 bp, Homo sapiens
tctgggcaccctctg

SEQ ID NO: 831499 - DNA, 15 bp, Homo sapiens
ctgggcaccctctgg

SEQ ID NO: 831500 - DNA, 15 bp, Homo sapiens
tgggcaccctctggc

SEQ ID NO: 831501 - DNA, 15 bp, Homo sapiens
gggcaccctctggca

SEQ ID NO: 831502 - DNA, 15 bp, Homo sapiens
ggcaccctctggcac

SEQ ID NO: 831503 - DNA, 15 bp, Homo sapiens
gcaccctctggcaca

SEQ ID NO: 831504 - DNA, 15 bp, Homo sapiens
caccctctggcacag

SEQ ID NO: 831505 - DNA, 15 bp, Homo sapiens
accctctggcacagt

SEQ ID NO: 831506 - DNA, 15 bp, Homo sapiens
ccctctggcacagtc

SEQ ID NO: 831507 - DNA, 15 bp, Homo sapiens
cctctggcacagtcc

SEQ ID NO: 831508 - DNA, 15 bp, Homo sapiens
ctctggcacagtccg

SEQ ID NO: 831509 - DNA, 15 bp, Homo sapiens
tctggcacagtccgc

SEQ ID NO: 831510 - DNA, 15 bp, Homo sapiens
ctggcacagtccgca

SEQ ID NO: 831511 - DNA, 15 bp, Homo sapiens
tggcacagtccgcat

SEQ ID NO: 831512 - DNA, 15 bp, Homo sapiens
ggcacagtccgcata

SEQ ID NO: 831513 - DNA, 15 bp, Homo sapiens
gcacagtccgcataa

SEQ ID NO: 831514 - DNA, 15 bp, Homo sapiens
cacagtccgcataaa

SEQ ID NO: 831515 - DNA, 15 bp, Homo sapiens
acagtccgcataaaa

SEQ ID NO: 831516 - DNA, 15 bp, Homo sapiens
cagtccgcataaaat

SEQ ID NO: 831517 - DNA, 15 bp, Homo sapiens
agtccgcataaaatg

SEQ ID NO: 831518 - DNA, 15 bp, Homo sapiens
gtccgcataaaatga

SEQ ID NO: 831519 - DNA, 15 bp, Homo sapiens
tccgcataaaatgaa

SEQ ID NO: 831520 - DNA, 15 bp, Homo sapiens
ccgcataaaatgaac

SEQ ID NO: 831521 - DNA, 15 bp, Homo sapiens
cgcataaaatgaacc

SEQ ID NO: 831522 - DNA, 15 bp, Homo sapiens
gcataaaatgaacca

SEQ ID NO: 831523 - DNA, 15 bp, Homo sapiens
cataaaatgaaccat

SEQ ID NO: 831524 - DNA, 15 bp, Homo sapiens
ataaaatgaaccatc

SEQ ID NO: 831525 - DNA, 15 bp, Homo sapiens
taaaatgaaccatcc

SEQ ID NO: 831526 - DNA, 15 bp, Homo sapiens
aaaatgaaccatccc

SEQ ID NO: 831527 - DNA, 15 bp, Homo sapiens
aaatgaaccatccca

SEQ ID NO: 831528 - DNA, 15 bp, Homo sapiens
aatgaaccatcccac

SEQ ID NO: 831529 - DNA, 15 bp, Homo sapiens
atgaaccatcccact

SEQ ID NO: 831530 - DNA, 15 bp, Homo sapiens
tgaaccatcccacta

SEQ ID NO: 831531 - DNA, 15 bp, Homo sapiens
gaaccatcccactag

SEQ ID NO: 831532 - DNA, 15 bp, Homo sapiens
aaccatcccactagt

SEQ ID NO: 831533 - DNA, 15 bp, Homo sapiens
accatcccactagtg

SEQ ID NO: 831534 - DNA, 15 bp, Homo sapiens
ccatcccactagtgg

SEQ ID NO: 831535 - DNA, 15 bp, Homo sapiens
catcccactagtggc

SEQ ID NO: 831536 - DNA, 15 bp, Homo sapiens
atcccactagtggcg

SEQ ID NO: 831537 - DNA, 15 bp, Homo sapiens
tcccactagtggcgc

SEQ ID NO: 831538 - DNA, 15 bp, Homo sapiens
cccactagtggcgca

SEQ ID NO: 831539 - DNA, 15 bp, Homo sapiens
ccactagtggcgcag

SEQ ID NO: 831540 - DNA, 15 bp, Homo sapiens
cactagtggcgcagc

SEQ ID NO: 831541 - DNA, 15 bp, Homo sapiens
actagtggcgcagcc

SEQ ID NO: 831542 - DNA, 15 bp, Homo sapiens
ctagtggcgcagccc

SEQ ID NO: 831543 - DNA, 15 bp, Homo sapiens
tagtggcgcagccca

SEQ ID NO: 831544 - DNA, 15 bp, Homo sapiens
agtggcgcagcccag

SEQ ID NO: 831545 - DNA, 15 bp, Homo sapiens
gtggcgcagcccagc

SEQ ID NO: 831546 - DNA, 15 bp, Homo sapiens
tggcgcagcccagct

SEQ ID NO: 831547 - DNA, 15 bp, Homo sapiens
ggcgcagcccagctt

SEQ ID NO: 831548 - DNA, 15 bp, Homo sapiens
gcgcagcccagcttc

SEQ ID NO: 831549 - DNA, 15 bp, Homo sapiens
cgcagcccagcttcc

SEQ ID NO: 831550 - DNA, 15 bp, Homo sapiens
gcagcccagcttcca

SEQ ID NO: 831551 - DNA, 15 bp, Homo sapiens
cagcccagcttccat

SEQ ID NO: 831552 - DNA, 15 bp, Homo sapiens
agcccagcttccata

SEQ ID NO: 831553 - DNA, 15 bp, Homo sapiens
gcccagcttccatat

SEQ ID NO: 831554 - DNA, 15 bp, Homo sapiens
cccagcttccatatt

SEQ ID NO: 831555 - DNA, 15 bp, Homo sapiens
ccagcttccatattt

SEQ ID NO: 831556 - DNA, 15 bp, Homo sapiens
cagcttccatattta

SEQ ID NO: 831557 - DNA, 15 bp, Homo sapiens
agcttccatatttat

SEQ ID NO: 831558 - DNA, 15 bp, Homo sapiens
gcttccatatttata

SEQ ID NO: 831559 - DNA, 15 bp, Homo sapiens
cttccatatttataa

SEQ ID NO: 831560 - DNA, 15 bp, Homo sapiens
ttccatatttataag

SEQ ID NO: 831561 - DNA, 15 bp, Homo sapiens
tccatatttataaga

SEQ ID NO: 831562 - DNA, 15 bp, Homo sapiens
ccatatttataagat

SEQ ID NO: 831563 - DNA, 15 bp, Homo sapiens
catatttataagata

SEQ ID NO: 831564 - DNA, 15 bp, Homo sapiens
atatttataagatag

SEQ ID NO: 831565 - DNA, 15 bp, Homo sapiens
tatttataagatagg

SEQ ID NO: 831566 - DNA, 15 bp, Homo sapiens
atttataagatagga

SEQ ID NO: 831567 - DNA, 15 bp, Homo sapiens
tttataagataggaa

SEQ ID NO: 831568 - DNA, 15 bp, Homo sapiens
ttataagataggaat

SEQ ID NO: 831569 - DNA, 15 bp, Homo sapiens
tataagataggaatt

SEQ ID NO: 831570 - DNA, 15 bp, Homo sapiens
ataagataggaattc

SEQ ID NO: 831571 - DNA, 15 bp, Homo sapiens
taagataggaattcc

SEQ ID NO: 831572 - DNA, 15 bp, Homo sapiens
aagataggaattcca

SEQ ID NO: 831573 - DNA, 15 bp, Homo sapiens
agataggaattccat

SEQ ID NO: 831574 - DNA, 15 bp, Homo sapiens
gataggaattccatt

SEQ ID NO: 831575 - DNA, 15 bp, Homo sapiens
ataggaattccattc

SEQ ID NO: 831576 - DNA, 15 bp, Homo sapiens
taggaattccattca

SEQ ID NO: 831577 - DNA, 15 bp, Homo sapiens
aggaattccattcat

SEQ ID NO: 831578 - DNA, 15 bp, Homo sapiens
ggaattccattcata

SEQ ID NO: 831579 - DNA, 15 bp, Homo sapiens
gaattccattcatac

SEQ ID NO: 831580 - DNA, 15 bp, Homo sapiens
aattccattcatacc

SEQ ID NO: 831581 - DNA, 15 bp, Homo sapiens
attccattcataccg

SEQ ID NO: 831582 - DNA, 15 bp, Homo sapiens
ttccattcataccga

SEQ ID NO: 831583 - DNA, 15 bp, Homo sapiens
tccattcataccgaa

SEQ ID NO: 831584 - DNA, 15 bp, Homo sapiens
ccattcataccgaag

SEQ ID NO: 831585 - DNA, 15 bp, Homo sapiens
cattcataccgaaga

SEQ ID NO: 831586 - DNA, 15 bp, Homo sapiens
attcataccgaagag

SEQ ID NO: 831587 - DNA, 15 bp, Homo sapiens
ttcataccgaagaga

SEQ ID NO: 831588 - DNA, 15 bp, Homo sapiens
tcataccgaagagaa

SEQ ID NO: 831589 - DNA, 15 bp, Homo sapiens
cataccgaagagaag

SEQ ID NO: 831590 - DNA, 15 bp, Homo sapiens
ataccgaagagaaga

SEQ ID NO: 831591 - DNA, 15 bp, Homo sapiens
taccgaagagaagac

SEQ ID NO: 831592 - DNA, 15 bp, Homo sapiens
accgaagagaagaca

SEQ ID NO: 831593 - DNA, 15 bp, Homo sapiens
ccgaagagaagacat

SEQ ID NO: 831594 - DNA, 15 bp, Homo sapiens
cgaagagaagacatt

SEQ ID NO: 831595 - DNA, 15 bp, Homo sapiens
gaagagaagacattt

SEQ ID NO: 831596 - DNA, 15 bp, Homo sapiens
aagagaagacatttg

SEQ ID NO: 831597 - DNA, 15 bp, Homo sapiens
agagaagacatttgt

SEQ ID NO: 831598 - DNA, 15 bp, Homo sapiens
gagaagacatttgtc

SEQ ID NO: 831599 - DNA, 15 bp, Homo sapiens
agaagacatttgtcc

SEQ ID NO: 831600 - DNA, 15 bp, Homo sapiens
gaagacatttgtcct

SEQ ID NO: 831601 - DNA, 15 bp, Homo sapiens
aagacatttgtcctg

SEQ ID NO: 831602 - DNA, 15 bp, Homo sapiens
agacatttgtcctga

SEQ ID NO: 831603 - DNA, 15 bp, Homo sapiens
gacatttgtcctgag

SEQ ID NO: 831604 - DNA, 15 bp, Homo sapiens
acatttgtcctgagg

SEQ ID NO: 831605 - DNA, 15 bp, Homo sapiens
catttgtcctgaggt

SEQ ID NO: 831606 - DNA, 15 bp, Homo sapiens
atttgtcctgaggtc

SEQ ID NO: 831607 - DNA, 15 bp, Homo sapiens
tttgtcctgaggtct

SEQ ID NO: 831608 - DNA, 15 bp, Homo sapiens
ttgtcctgaggtctt

SEQ ID NO: 831609 - DNA, 15 bp, Homo sapiens
tgtcctgaggtcttg

SEQ ID NO: 831610 - DNA, 15 bp, Homo sapiens
gtcctgaggtcttgg

SEQ ID NO: 831611 - DNA, 15 bp, Homo sapiens
tcctgaggtcttggc

SEQ ID NO: 831612 - DNA, 15 bp, Homo sapiens
cctgaggtcttggcc

SEQ ID NO: 831613 - DNA, 15 bp, Homo sapiens
ctgaggtcttggcct

SEQ ID NO: 831614 - DNA, 15 bp, Homo sapiens
tgaggtcttggcctt

SEQ ID NO: 831615 - DNA, 15 bp, Homo sapiens
gaggtcttggccttc

SEQ ID NO: 831616 - DNA, 15 bp, Homo sapiens
aggtcttggccttcc

SEQ ID NO: 831617 - DNA, 15 bp, Homo sapiens
ggtcttggccttcct

SEQ ID NO: 831618 - DNA, 15 bp, Homo sapiens
gtcttggccttccta

SEQ ID NO: 831619 - DNA, 15 bp, Homo sapiens
tcttggccttcctaa

SEQ ID NO: 831620 - DNA, 15 bp, Homo sapiens
cttggccttcctaaa

SEQ ID NO: 831621 - DNA, 15 bp, Homo sapiens
ttggccttcctaaag

SEQ ID NO: 831622 - DNA, 15 bp, Homo sapiens
tggccttcctaaagc

SEQ ID NO: 831623 - DNA, 15 bp, Homo sapiens
ggccttcctaaagcc

SEQ ID NO: 831624 - DNA, 15 bp, Homo sapiens
gccttcctaaagccc

SEQ ID NO: 831625 - DNA, 15 bp, Homo sapiens
ccttcctaaagccca

SEQ ID NO: 831626 - DNA, 15 bp, Homo sapiens
cttcctaaagcccat

SEQ ID NO: 831627 - DNA, 15 bp, Homo sapiens
ttcctaaagcccatg

SEQ ID NO: 831628 - DNA, 15 bp, Homo sapiens
tcctaaagcccatga

SEQ ID NO: 831629 - DNA, 15 bp, Homo sapiens
cctaaagcccatgaa

SEQ ID NO: 831630 - DNA, 15 bp, Homo sapiens
ctaaagcccatgaac

SEQ ID NO: 831631 - DNA, 15 bp, Homo sapiens
taaagcccatgaacc

SEQ ID NO: 831632 - DNA, 15 bp, Homo sapiens
aaagcccatgaacct

SEQ ID NO: 831633 - DNA, 15 bp, Homo sapiens
aagcccatgaacctc

SEQ ID NO: 831634 - DNA, 15 bp, Homo sapiens
agcccatgaacctct

SEQ ID NO: 831635 - DNA, 15 bp, Homo sapiens
gcccatgaacctctt

SEQ ID NO: 831636 - DNA, 15 bp, Homo sapiens
cccatgaacctcttt

SEQ ID NO: 831637 - DNA, 15 bp, Homo sapiens
ccatgaacctctttc

SEQ ID NO: 831638 - DNA, 15 bp, Homo sapiens
catgaacctctttct

SEQ ID NO: 831639 - DNA, 15 bp, Homo sapiens
atgaacctctttctt

SEQ ID NO: 831640 - DNA, 15 bp, Homo sapiens
tgaacctctttcttt

SEQ ID NO: 831641 - DNA, 15 bp, Homo sapiens
gaacctctttctttt

SEQ ID NO: 831642 - DNA, 15 bp, Homo sapiens
aacctctttctttta

SEQ ID NO: 831643 - DNA, 15 bp, Homo sapiens
acctctttcttttac

SEQ ID NO: 831644 - DNA, 15 bp, Homo sapiens
cctctttcttttacc

SEQ ID NO: 831645 - DNA, 15 bp, Homo sapiens
ctctttcttttacca

SEQ ID NO: 831646 - DNA, 15 bp, Homo sapiens
tctttcttttaccat

SEQ ID NO: 831647 - DNA, 15 bp, Homo sapiens
ctttcttttaccatg

SEQ ID NO: 831648 - DNA, 15 bp, Homo sapiens
tttcttttaccatgg

SEQ ID NO: 831649 - DNA, 15 bp, Homo sapiens
ttcttttaccatggt

SEQ ID NO: 831650 - DNA, 15 bp, Homo sapiens
tcttttaccatggta

SEQ ID NO: 831651 - DNA, 15 bp, Homo sapiens
cttttaccatggtac

SEQ ID NO: 831652 - DNA, 15 bp, Homo sapiens
ttttaccatggtact

SEQ ID NO: 831653 - DNA, 15 bp, Homo sapiens
tttaccatggtactg

SEQ ID NO: 831654 - DNA, 15 bp, Homo sapiens
ttaccatggtactgg

SEQ ID NO: 831655 - DNA, 15 bp, Homo sapiens
taccatggtactggt

SEQ ID NO: 831656 - DNA, 15 bp, Homo sapiens
accatggtactggtt

SEQ ID NO: 831657 - DNA, 15 bp, Homo sapiens
ccatggtactggttt

SEQ ID NO: 831658 - DNA, 15 bp, Homo sapiens
catggtactggtttg

SEQ ID NO: 831659 - DNA, 15 bp, Homo sapiens
atggtactggtttgg

SEQ ID NO: 831660 - DNA, 15 bp, Homo sapiens
tggtactggtttggt

SEQ ID NO: 831661 - DNA, 15 bp, Homo sapiens
ggtactggtttggtt

SEQ ID NO: 831662 - DNA, 15 bp, Homo sapiens
gtactggtttggttt

SEQ ID NO: 831663 - DNA, 15 bp, Homo sapiens
tactggtttggtttt

SEQ ID NO: 831664 - DNA, 15 bp, Homo sapiens
actggtttggttttc

SEQ ID NO: 831665 - DNA, 15 bp, Homo sapiens
ctggtttggttttca

SEQ ID NO: 831666 - DNA, 15 bp, Homo sapiens
tggtttggttttcag

SEQ ID NO: 831667 - DNA, 15 bp, Homo sapiens
ggtttggttttcagt

SEQ ID NO: 831668 - DNA, 15 bp, Homo sapiens
gtttggttttcagtt

SEQ ID NO: 831669 - DNA, 15 bp, Homo sapiens
tttggttttcagttg

SEQ ID NO: 831670 - DNA, 15 bp, Homo sapiens
ttggttttcagttgg

SEQ ID NO: 831671 - DNA, 15 bp, Homo sapiens
tggttttcagttggg

SEQ ID NO: 831672 - DNA, 15 bp, Homo sapiens
ggttttcagttgggc

SEQ ID NO: 831673 - DNA, 15 bp, Homo sapiens
gttttcagttgggct

SEQ ID NO: 831674 - DNA, 15 bp, Homo sapiens
ttttcagttgggctg

SEQ ID NO: 831675 - DNA, 15 bp, Homo sapiens
tttcagttgggctgg

SEQ ID NO: 831676 - DNA, 15 bp, Homo sapiens
ttcagttgggctggg

SEQ ID NO: 831677 - DNA, 15 bp, Homo sapiens
tcagttgggctgggg

SEQ ID NO: 831678 - DNA, 15 bp, Homo sapiens
cagttgggctggggt

SEQ ID NO: 831679 - DNA, 15 bp, Homo sapiens
ttgggctggggtttt

SEQ ID NO: 831680 - DNA, 15 bp, Homo sapiens
tgggctggggtttta

SEQ ID NO: 831681 - DNA, 15 bp, Homo sapiens
gggctggggttttac

SEQ ID NO: 831682 - DNA, 15 bp, Homo sapiens
ggctggggttttact

SEQ ID NO: 831683 - DNA, 15 bp, Homo sapiens
gctggggttttactt

SEQ ID NO: 831684 - DNA, 15 bp, Homo sapiens
ctggggttttacttc

SEQ ID NO: 831685 - DNA, 15 bp, Homo sapiens
tggggttttacttct

SEQ ID NO: 831686 - DNA, 15 bp, Homo sapiens
ggggttttacttctc

SEQ ID NO: 831687 - DNA, 15 bp, Homo sapiens
gggttttacttctct

SEQ ID NO: 831688 - DNA, 15 bp, Homo sapiens
ggttttacttctctt

SEQ ID NO: 831689 - DNA, 15 bp, Homo sapiens
gttttacttctcttg

SEQ ID NO: 831690 - DNA, 15 bp, Homo sapiens
ttttacttctcttga

SEQ ID NO: 831691 - DNA, 15 bp, Homo sapiens
tttacttctcttgag

SEQ ID NO: 831692 - DNA, 15 bp, Homo sapiens
ttacttctcttgagt

SEQ ID NO: 831693 - DNA, 15 bp, Homo sapiens
tacttctcttgagtg

SEQ ID NO: 831694 - DNA, 15 bp, Homo sapiens
acttctcttgagtgt

SEQ ID NO: 831695 - DNA, 15 bp, Homo sapiens
cttctcttgagtgtg

SEQ ID NO: 831696 - DNA, 15 bp, Homo sapiens
ttctcttgagtgtga

SEQ ID NO: 831697 - DNA, 15 bp, Homo sapiens
tctcttgagtgtgag

SEQ ID NO: 831698 - DNA, 15 bp, Homo sapiens
ctcttgagtgtgagt

SEQ ID NO: 831699 - DNA, 15 bp, Homo sapiens
tcttgagtgtgagtc

SEQ ID NO: 831700 - DNA, 15 bp, Homo sapiens
cttgagtgtgagtct

SEQ ID NO: 831701 - DNA, 15 bp, Homo sapiens
ttgagtgtgagtctt

SEQ ID NO: 831702 - DNA, 15 bp, Homo sapiens
tgagtgtgagtcttt

SEQ ID NO: 831703 - DNA, 15 bp, Homo sapiens
gagtgtgagtctttt

SEQ ID NO: 831704 - DNA, 15 bp, Homo sapiens
agtgtgagtctttta

SEQ ID NO: 831705 - DNA, 15 bp, Homo sapiens
gtgtgagtcttttat

SEQ ID NO: 831706 - DNA, 15 bp, Homo sapiens
tgtgagtcttttatt

SEQ ID NO: 831707 - DNA, 15 bp, Homo sapiens
gtgagtcttttattt

SEQ ID NO: 831708 - DNA, 15 bp, Homo sapiens
tgagtcttttattta

SEQ ID NO: 831709 - DNA, 15 bp, Homo sapiens
gagtcttttatttat

SEQ ID NO: 831710 - DNA, 15 bp, Homo sapiens
agtcttttatttatg

SEQ ID NO: 831711 - DNA, 15 bp, Homo sapiens
gtcttttatttatgg

SEQ ID NO: 831712 - DNA, 15 bp, Homo sapiens
tcttttatttatggc

SEQ ID NO: 831713 - DNA, 15 bp, Homo sapiens
cttttatttatggca

SEQ ID NO: 831714 - DNA, 15 bp, Homo sapiens
ttttatttatggcaa

SEQ ID NO: 831715 - DNA, 15 bp, Homo sapiens
tttatttatggcaag

SEQ ID NO: 831716 - DNA, 15 bp, Homo sapiens
ttatttatggcaagc

SEQ ID NO: 831717 - DNA, 15 bp, Homo sapiens
tatttatggcaagca

SEQ ID NO: 831718 - DNA, 15 bp, Homo sapiens
atttatggcaagcaa

SEQ ID NO: 831719 - DNA, 15 bp, Homo sapiens
tttatggcaagcaaa

SEQ ID NO: 831720 - DNA, 15 bp, Homo sapiens
ttatggcaagcaaaa

SEQ ID NO: 831721 - DNA, 15 bp, Homo sapiens
tatggcaagcaaaag

SEQ ID NO: 831722 - DNA, 15 bp, Homo sapiens
atggcaagcaaaagg

SEQ ID NO: 831723 - DNA, 15 bp, Homo sapiens
tggcaagcaaaaggg

SEQ ID NO: 831724 - DNA, 15 bp, Homo sapiens
ggcaagcaaaagggt

SEQ ID NO: 831725 - DNA, 15 bp, Homo sapiens
gcaagcaaaagggtg

SEQ ID NO: 831726 - DNA, 15 bp, Homo sapiens
caagcaaaagggtga

SEQ ID NO: 831727 - DNA, 15 bp, Homo sapiens
aagcaaaagggtgac

SEQ ID NO: 831728 - DNA, 15 bp, Homo sapiens
agcaaaagggtgact

SEQ ID NO: 831729 - DNA, 15 bp, Homo sapiens
gcaaaagggtgactg

SEQ ID NO: 831730 - DNA, 15 bp, Homo sapiens
caaaagggtgactgt

SEQ ID NO: 831731 - DNA, 15 bp, Homo sapiens
aaaagggtgactgta

SEQ ID NO: 831732 - DNA, 15 bp, Homo sapiens
aaagggtgactgtag

SEQ ID NO: 831733 - DNA, 15 bp, Homo sapiens
aagggtgactgtagg

SEQ ID NO: 831734 - DNA, 15 bp, Homo sapiens
agggtgactgtaggt

SEQ ID NO: 831735 - DNA, 15 bp, Homo sapiens
gggtgactgtaggtc

SEQ ID NO: 831736 - DNA, 15 bp, Homo sapiens
ggtgactgtaggtca

SEQ ID NO: 831737 - DNA, 15 bp, Homo sapiens
gtgactgtaggtcac

SEQ ID NO: 831738 - DNA, 15 bp, Homo sapiens
tgactgtaggtcaca

SEQ ID NO: 831739 - DNA, 15 bp, Homo sapiens
gactgtaggtcacag

SEQ ID NO: 831740 - DNA, 15 bp, Homo sapiens
actgtaggtcacagc

SEQ ID NO: 831741 - DNA, 15 bp, Homo sapiens
ctgtaggtcacagcc

SEQ ID NO: 831742 - DNA, 15 bp, Homo sapiens
tgtaggtcacagcct

SEQ ID NO: 831743 - DNA, 15 bp, Homo sapiens
gtaggtcacagcctc

SEQ ID NO: 831744 - DNA, 15 bp, Homo sapiens
taggtcacagcctct

SEQ ID NO: 831745 - DNA, 15 bp, Homo sapiens
aggtcacagcctctc

SEQ ID NO: 831746 - DNA, 15 bp, Homo sapiens
ggtcacagcctctcc

SEQ ID NO: 831747 - DNA, 15 bp, Homo sapiens
gtcacagcctctccc

SEQ ID NO: 831748 - DNA, 15 bp, Homo sapiens
tcacagcctctcccc

SEQ ID NO: 831749 - DNA, 15 bp, Homo sapiens
cacagcctctcccca

SEQ ID NO: 831750 - DNA, 15 bp, Homo sapiens
acagcctctccccag

SEQ ID NO: 831751 - DNA, 15 bp, Homo sapiens
cagcctctccccagg

SEQ ID NO: 831752 - DNA, 15 bp, Homo sapiens
agcctctccccaggg

SEQ ID NO: 831753 - DNA, 15 bp, Homo sapiens
gcctctccccagggc

SEQ ID NO: 831754 - DNA, 15 bp, Homo sapiens
cctctccccagggct

SEQ ID NO: 831755 - DNA, 15 bp, Homo sapiens
ctctccccagggctc

SEQ ID NO: 831756 - DNA, 15 bp, Homo sapiens
tctccccagggctcc

SEQ ID NO: 831757 - DNA, 15 bp, Homo sapiens
ctccccagggctccc

SEQ ID NO: 831758 - DNA, 15 bp, Homo sapiens
tccccagggctccct

SEQ ID NO: 831759 - DNA, 15 bp, Homo sapiens
ccccagggctccctg

SEQ ID NO: 831760 - DNA, 15 bp, Homo sapiens
cccagggctccctgt

SEQ ID NO: 831761 - DNA, 15 bp, Homo sapiens
ccagggctccctgtg

SEQ ID NO: 831762 - DNA, 15 bp, Homo sapiens
cagggctccctgtgg

SEQ ID NO: 831763 - DNA, 15 bp, Homo sapiens
agggctccctgtgga

SEQ ID NO: 831764 - DNA, 15 bp, Homo sapiens
gggctccctgtggaa

SEQ ID NO: 831765 - DNA, 15 bp, Homo sapiens
ggctccctgtggaaa

SEQ ID NO: 831766 - DNA, 15 bp, Homo sapiens
gctccctgtggaaat

SEQ ID NO: 831767 - DNA, 15 bp, Homo sapiens
ctccctgtggaaatt

SEQ ID NO: 831768 - DNA, 15 bp, Homo sapiens
tccctgtggaaatta

SEQ ID NO: 831769 - DNA, 15 bp, Homo sapiens
ccctgtggaaattag

SEQ ID NO: 831770 - DNA, 15 bp, Homo sapiens
cctgtggaaattaga

SEQ ID NO: 831771 - DNA, 15 bp, Homo sapiens
ctgtggaaattagag

SEQ ID NO: 831772 - DNA, 15 bp, Homo sapiens
tgtggaaattagaga

SEQ ID NO: 831773 - DNA, 15 bp, Homo sapiens
gtggaaattagagag

SEQ ID NO: 831774 - DNA, 15 bp, Homo sapiens
tggaaattagagagg

SEQ ID NO: 831775 - DNA, 15 bp, Homo sapiens
ggaaattagagagga

SEQ ID NO: 831776 - DNA, 15 bp, Homo sapiens
gaaattagagaggaa

SEQ ID NO: 831777 - DNA, 15 bp, Homo sapiens
aaattagagaggaag

SEQ ID NO: 831778 - DNA, 15 bp, Homo sapiens
aattagagaggaagg

SEQ ID NO: 831779 - DNA, 15 bp, Homo sapiens
attagagaggaagga

SEQ ID NO: 831780 - DNA, 15 bp, Homo sapiens
ttagagaggaaggag

SEQ ID NO: 831781 - DNA, 15 bp, Homo sapiens
tagagaggaaggagc

SEQ ID NO: 831782 - DNA, 15 bp, Homo sapiens
agagaggaaggagcc

SEQ ID NO: 831783 - DNA, 15 bp, Homo sapiens
gagaggaaggagccc

SEQ ID NO: 831784 - DNA, 15 bp, Homo sapiens
agaggaaggagccca

SEQ ID NO: 831785 - DNA, 15 bp, Homo sapiens
gaggaaggagcccat

SEQ ID NO: 831786 - DNA, 15 bp, Homo sapiens
aggaaggagcccatg

SEQ ID NO: 831787 - DNA, 15 bp, Homo sapiens
ggaaggagcccatgg

SEQ ID NO: 831788 - DNA, 15 bp, Homo sapiens
gaaggagcccatgga

SEQ ID NO: 831789 - DNA, 15 bp, Homo sapiens
aaggagcccatggag

SEQ ID NO: 831790 - DNA, 15 bp, Homo sapiens
aggagcccatggagg

SEQ ID NO: 831791 - DNA, 15 bp, Homo sapiens
ggagcccatggaggc

SEQ ID NO: 831792 - DNA, 15 bp, Homo sapiens
gagcccatggaggct

SEQ ID NO: 831793 - DNA, 15 bp, Homo sapiens
agcccatggaggctg

SEQ ID NO: 831794 - DNA, 15 bp, Homo sapiens
gcccatggaggctga

SEQ ID NO: 831795 - DNA, 15 bp, Homo sapiens
cccatggaggctgaa

SEQ ID NO: 831796 - DNA, 15 bp, Homo sapiens
ccatggaggctgaaa

SEQ ID NO: 831797 - DNA, 15 bp, Homo sapiens
catggaggctgaaac

SEQ ID NO: 831798 - DNA, 15 bp, Homo sapiens
atggaggctgaaacc

SEQ ID NO: 831799 - DNA, 15 bp, Homo sapiens
tggaggctgaaaccc

SEQ ID NO: 831800 - DNA, 15 bp, Homo sapiens
ggaggctgaaacccc

SEQ ID NO: 831801 - DNA, 15 bp, Homo sapiens
gaggctgaaaccccc

SEQ ID NO: 831802 - DNA, 15 bp, Homo sapiens
aggctgaaacccccg

SEQ ID NO: 831803 - DNA, 15 bp, Homo sapiens
ggctgaaacccccga

SEQ ID NO: 831804 - DNA, 15 bp, Homo sapiens
gctgaaacccccgag

SEQ ID NO: 831805 - DNA, 15 bp, Homo sapiens
ctgaaacccccgagt

SEQ ID NO: 831806 - DNA, 15 bp, Homo sapiens
tgaaacccccgagtc

SEQ ID NO: 831807 - DNA, 15 bp, Homo sapiens
gaaacccccgagtcc

SEQ ID NO: 831808 - DNA, 15 bp, Homo sapiens
aaacccccgagtcca

SEQ ID NO: 831809 - DNA, 15 bp, Homo sapiens
aacccccgagtccat

SEQ ID NO: 831810 - DNA, 15 bp, Homo sapiens
acccccgagtccatt

SEQ ID NO: 831811 - DNA, 15 bp, Homo sapiens
cccccgagtccatta

SEQ ID NO: 831812 - DNA, 15 bp, Homo sapiens
ccccgagtccattaa

SEQ ID NO: 831813 - DNA, 15 bp, Homo sapiens
cccgagtccattaaa

SEQ ID NO: 831814 - DNA, 15 bp, Homo sapiens
ccgagtccattaaat

SEQ ID NO: 831815 - DNA, 15 bp, Homo sapiens
cgagtccattaaatt

SEQ ID NO: 831816 - DNA, 15 bp, Homo sapiens
gagtccattaaatta

SEQ ID NO: 831817 - DNA, 15 bp, Homo sapiens
agtccattaaattaa

SEQ ID NO: 831818 - DNA, 15 bp, Homo sapiens
gtccattaaattaat

SEQ ID NO: 831819 - DNA, 15 bp, Homo sapiens
tccattaaattaata

SEQ ID NO: 831820 - DNA, 15 bp, Homo sapiens
ccattaaattaatag

SEQ ID NO: 831821 - DNA, 15 bp, Homo sapiens
cattaaattaatagc

SEQ ID NO: 831822 - DNA, 15 bp, Homo sapiens
attaaattaatagcg

SEQ ID NO: 831823 - DNA, 15 bp, Homo sapiens
ttaaattaatagcga

SEQ ID NO: 831824 - DNA, 15 bp, Homo sapiens
taaattaatagcgat

SEQ ID NO: 831825 - DNA, 15 bp, Homo sapiens
aaattaatagcgatt

SEQ ID NO: 831826 - DNA, 15 bp, Homo sapiens
aattaatagcgattt

SEQ ID NO: 831827 - DNA, 15 bp, Homo sapiens
attaatagcgatttc

SEQ ID NO: 831828 - DNA, 15 bp, Homo sapiens
ttaatagcgatttct

SEQ ID NO: 831829 - DNA, 15 bp, Homo sapiens
taatagcgatttctt

SEQ ID NO: 831830 - DNA, 15 bp, Homo sapiens
aatagcgatttcttc

SEQ ID NO: 831831 - DNA, 15 bp, Homo sapiens
atagcgatttcttct

SEQ ID NO: 831832 - DNA, 15 bp, Homo sapiens
tagcgatttcttctc

SEQ ID NO: 831833 - DNA, 15 bp, Homo sapiens
agcgatttcttctct

SEQ ID NO: 831834 - DNA, 15 bp, Homo sapiens
gcgatttcttctctc

SEQ ID NO: 831835 - DNA, 15 bp, Homo sapiens
cgatttcttctctcc

SEQ ID NO: 831836 - DNA, 15 bp, Homo sapiens
gatttcttctctccc

SEQ ID NO: 831837 - DNA, 15 bp, Homo sapiens
atttcttctctccct

SEQ ID NO: 831838 - DNA, 15 bp, Homo sapiens
tttcttctctccctg

SEQ ID NO: 831839 - DNA, 15 bp, Homo sapiens
ttcttctctccctgt

SEQ ID NO: 831840 - DNA, 15 bp, Homo sapiens
tcttctctccctgtg

SEQ ID NO: 831841 - DNA, 15 bp, Homo sapiens
cttctctccctgtgt

SEQ ID NO: 831842 - DNA, 15 bp, Homo sapiens
ttctctccctgtgta

SEQ ID NO: 831843 - DNA, 15 bp, Homo sapiens
tctctccctgtgtag

SEQ ID NO: 831844 - DNA, 15 bp, Homo sapiens
ctctccctgtgtagc

SEQ ID NO: 831845 - DNA, 15 bp, Homo sapiens
tctccctgtgtagca

SEQ ID NO: 831846 - DNA, 15 bp, Homo sapiens
ctccctgtgtagcat

SEQ ID NO: 831847 - DNA, 15 bp, Homo sapiens
tccctgtgtagcatc

SEQ ID NO: 831848 - DNA, 15 bp, Homo sapiens
ccctgtgtagcatct

SEQ ID NO: 831849 - DNA, 15 bp, Homo sapiens
cctgtgtagcatctc

SEQ ID NO: 831850 - DNA, 15 bp, Homo sapiens
ctgtgtagcatctcc

SEQ ID NO: 831851 - DNA, 15 bp, Homo sapiens
tgtgtagcatctccc

SEQ ID NO: 831852 - DNA, 15 bp, Homo sapiens
gtgtagcatctcccc

SEQ ID NO: 831853 - DNA, 15 bp, Homo sapiens
tgtagcatctccccc

SEQ ID NO: 831854 - DNA, 15 bp, Homo sapiens
gtagcatctccccca

SEQ ID NO: 831855 - DNA, 15 bp, Homo sapiens
tagcatctcccccaa

SEQ ID NO: 831856 - DNA, 15 bp, Homo sapiens
agcatctcccccaac

SEQ ID NO: 831857 - DNA, 15 bp, Homo sapiens
gcatctcccccaacc

SEQ ID NO: 831858 - DNA, 15 bp, Homo sapiens
catctcccccaacct

SEQ ID NO: 831859 - DNA, 15 bp, Homo sapiens
atctcccccaacctg

SEQ ID NO: 831860 - DNA, 15 bp, Homo sapiens
tctcccccaacctgg

SEQ ID NO: 831861 - DNA, 15 bp, Homo sapiens
ctcccccaacctgga

SEQ ID NO: 831862 - DNA, 15 bp, Homo sapiens
tcccccaacctggag

SEQ ID NO: 831863 - DNA, 15 bp, Homo sapiens
cccccaacctggagc

SEQ ID NO: 831864 - DNA, 15 bp, Homo sapiens
ccccaacctggagct

SEQ ID NO: 831865 - DNA, 15 bp, Homo sapiens
cccaacctggagctt

SEQ ID NO: 831866 - DNA, 15 bp, Homo sapiens
ccaacctggagcttg

SEQ ID NO: 831867 - DNA, 15 bp, Homo sapiens
caacctggagcttga

SEQ ID NO: 831868 - DNA, 15 bp, Homo sapiens
aacctggagcttgaa

SEQ ID NO: 831869 - DNA, 15 bp, Homo sapiens
acctggagcttgaag

SEQ ID NO: 831870 - DNA, 15 bp, Homo sapiens
cctggagcttgaagc

SEQ ID NO: 831871 - DNA, 15 bp, Homo sapiens
ctggagcttgaagct

SEQ ID NO: 831872 - DNA, 15 bp, Homo sapiens
tggagcttgaagctc

SEQ ID NO: 831873 - DNA, 15 bp, Homo sapiens
ggagcttgaagctct

SEQ ID NO: 831874 - DNA, 15 bp, Homo sapiens
gagcttgaagctctg

SEQ ID NO: 831875 - DNA, 15 bp, Homo sapiens
agcttgaagctctgt

SEQ ID NO: 831876 - DNA, 15 bp, Homo sapiens
gcttgaagctctgtt

SEQ ID NO: 831877 - DNA, 15 bp, Homo sapiens
cttgaagctctgttc

SEQ ID NO: 831878 - DNA, 15 bp, Homo sapiens
ttgaagctctgttca

SEQ ID NO: 831879 - DNA, 15 bp, Homo sapiens
tgaagctctgttcaa

SEQ ID NO: 831880 - DNA, 15 bp, Homo sapiens
gaagctctgttcaaa

SEQ ID NO: 831881 - DNA, 15 bp, Homo sapiens
aagctctgttcaaac

SEQ ID NO: 831882 - DNA, 15 bp, Homo sapiens
agctctgttcaaacg

SEQ ID NO: 831883 - DNA, 15 bp, Homo sapiens
gctctgttcaaacga

SEQ ID NO: 831884 - DNA, 15 bp, Homo sapiens
ctctgttcaaacgac

SEQ ID NO: 831885 - DNA, 15 bp, Homo sapiens
tctgttcaaacgaca

SEQ ID NO: 831886 - DNA, 15 bp, Homo sapiens
ctgttcaaacgacat

SEQ ID NO: 831887 - DNA, 15 bp, Homo sapiens
tgttcaaacgacatt

SEQ ID NO: 831888 - DNA, 15 bp, Homo sapiens
gttcaaacgacattt

SEQ ID NO: 831889 - DNA, 15 bp, Homo sapiens
ttcaaacgacatttt

SEQ ID NO: 831890 - DNA, 15 bp, Homo sapiens
tcaaacgacatttta

SEQ ID NO: 831891 - DNA, 15 bp, Homo sapiens
caaacgacattttac

SEQ ID NO: 831892 - DNA, 15 bp, Homo sapiens
aaacgacattttact

SEQ ID NO: 831893 - DNA, 15 bp, Homo sapiens
aacgacattttactc

SEQ ID NO: 831894 - DNA, 15 bp, Homo sapiens
acgacattttactca

SEQ ID NO: 831895 - DNA, 15 bp, Homo sapiens
cgacattttactcag

SEQ ID NO: 831896 - DNA, 15 bp, Homo sapiens
gacattttactcagg

SEQ ID NO: 831897 - DNA, 15 bp, Homo sapiens
acattttactcaggt

SEQ ID NO: 831898 - DNA, 15 bp, Homo sapiens
cattttactcaggtg

SEQ ID NO: 831899 - DNA, 15 bp, Homo sapiens
attttactcaggtgg

SEQ ID NO: 831900 - DNA, 15 bp, Homo sapiens
ttttactcaggtgga

SEQ ID NO: 831901 - DNA, 15 bp, Homo sapiens
tttactcaggtggaa

SEQ ID NO: 831902 - DNA, 15 bp, Homo sapiens
ttactcaggtggaat

SEQ ID NO: 831903 - DNA, 15 bp, Homo sapiens
tactcaggtggaatt

SEQ ID NO: 831904 - DNA, 15 bp, Homo sapiens
actcaggtggaattt

SEQ ID NO: 831905 - DNA, 15 bp, Homo sapiens
ctcaggtggaatttt

SEQ ID NO: 831906 - DNA, 15 bp, Homo sapiens
tcaggtggaatttta

SEQ ID NO: 831907 - DNA, 15 bp, Homo sapiens
caggtggaattttat

SEQ ID NO: 831908 - DNA, 15 bp, Homo sapiens
aggtggaattttatc

SEQ ID NO: 831909 - DNA, 15 bp, Homo sapiens
ggtggaattttatca

SEQ ID NO: 831910 - DNA, 15 bp, Homo sapiens
gtggaattttatcag

SEQ ID NO: 831911 - DNA, 15 bp, Homo sapiens
tggaattttatcagg

SEQ ID NO: 831912 - DNA, 15 bp, Homo sapiens
ggaattttatcaggg

SEQ ID NO: 831913 - DNA, 15 bp, Homo sapiens
gaattttatcagggt

SEQ ID NO: 831914 - DNA, 15 bp, Homo sapiens
aattttatcagggtt

SEQ ID NO: 831915 - DNA, 15 bp, Homo sapiens
attttatcagggttc

SEQ ID NO: 831916 - DNA, 15 bp, Homo sapiens
ttttatcagggttcc

SEQ ID NO: 831917 - DNA, 15 bp, Homo sapiens
tttatcagggttccg

SEQ ID NO: 831918 - DNA, 15 bp, Homo sapiens
ttatcagggttccgt

SEQ ID NO: 831919 - DNA, 15 bp, Homo sapiens
tatcagggttccgtc

SEQ ID NO: 831920 - DNA, 15 bp, Homo sapiens
atcagggttccgtcc

SEQ ID NO: 831921 - DNA, 15 bp, Homo sapiens
tcagggttccgtcct

SEQ ID NO: 831922 - DNA, 15 bp, Homo sapiens
cagggttccgtcctc

SEQ ID NO: 831923 - DNA, 15 bp, Homo sapiens
agggttccgtcctca

SEQ ID NO: 831924 - DNA, 15 bp, Homo sapiens
gggttccgtcctcaa

SEQ ID NO: 831925 - DNA, 15 bp, Homo sapiens
ggttccgtcctcaat

SEQ ID NO: 831926 - DNA, 15 bp, Homo sapiens
gttccgtcctcaatc

SEQ ID NO: 831927 - DNA, 15 bp, Homo sapiens
ttccgtcctcaatcc

SEQ ID NO: 831928 - DNA, 15 bp, Homo sapiens
tccgtcctcaatcca

SEQ ID NO: 831929 - DNA, 15 bp, Homo sapiens
ccgtcctcaatccac

SEQ ID NO: 831930 - DNA, 15 bp, Homo sapiens
cgtcctcaatccaca

SEQ ID NO: 831931 - DNA, 15 bp, Homo sapiens
gtcctcaatccacat

SEQ ID NO: 831932 - DNA, 15 bp, Homo sapiens
tcctcaatccacatg

SEQ ID NO: 831933 - DNA, 15 bp, Homo sapiens
cctcaatccacatga

SEQ ID NO: 831934 - DNA, 15 bp, Homo sapiens
ctcaatccacatgat

SEQ ID NO: 831935 - DNA, 15 bp, Homo sapiens
tcaatccacatgatc

SEQ ID NO: 831936 - DNA, 15 bp, Homo sapiens
caatccacatgatct

SEQ ID NO: 831937 - DNA, 15 bp, Homo sapiens
aatccacatgatctt

SEQ ID NO: 831938 - DNA, 15 bp, Homo sapiens
atccacatgatcttg

SEQ ID NO: 831939 - DNA, 15 bp, Homo sapiens
tccacatgatcttgc

SEQ ID NO: 831940 - DNA, 15 bp, Homo sapiens
ccacatgatcttgca

SEQ ID NO: 831941 - DNA, 15 bp, Homo sapiens
cacatgatcttgcaa

SEQ ID NO: 831942 - DNA, 15 bp, Homo sapiens
acatgatcttgcaag

SEQ ID NO: 831943 - DNA, 15 bp, Homo sapiens
catgatcttgcaaga

SEQ ID NO: 831944 - DNA, 15 bp, Homo sapiens
atgatcttgcaagag

SEQ ID NO: 831945 - DNA, 15 bp, Homo sapiens
tgatcttgcaagagt

SEQ ID NO: 831946 - DNA, 15 bp, Homo sapiens
gatcttgcaagagtc

SEQ ID NO: 831947 - DNA, 15 bp, Homo sapiens
atcttgcaagagtca

SEQ ID NO: 831948 - DNA, 15 bp, Homo sapiens
tcttgcaagagtcaa

SEQ ID NO: 831949 - DNA, 15 bp, Homo sapiens
cttgcaagagtcaag

SEQ ID NO: 831950 - DNA, 15 bp, Homo sapiens
ttgcaagagtcaagg

SEQ ID NO: 831951 - DNA, 15 bp, Homo sapiens
tgcaagagtcaaggt

SEQ ID NO: 831952 - DNA, 15 bp, Homo sapiens
gcaagagtcaaggta

SEQ ID NO: 831953 - DNA, 15 bp, Homo sapiens
caagagtcaaggtaa

SEQ ID NO: 831954 - DNA, 15 bp, Homo sapiens
aagagtcaaggtaag

SEQ ID NO: 831955 - DNA, 15 bp, Homo sapiens
agagtcaaggtaagg

SEQ ID NO: 831956 - DNA, 15 bp, Homo sapiens
gagtcaaggtaagga

SEQ ID NO: 831957 - DNA, 15 bp, Homo sapiens
agtcaaggtaaggag

SEQ ID NO: 831958 - DNA, 15 bp, Homo sapiens
gtcaaggtaaggagg

SEQ ID NO: 831959 - DNA, 15 bp, Homo sapiens
tcaaggtaaggagga

SEQ ID NO: 831960 - DNA, 15 bp, Homo sapiens
caaggtaaggaggaa

SEQ ID NO: 831961 - DNA, 15 bp, Homo sapiens
aaggtaaggaggaag

SEQ ID NO: 831962 - DNA, 15 bp, Homo sapiens
aggtaaggaggaaga

SEQ ID NO: 831963 - DNA, 15 bp, Homo sapiens
ggtaaggaggaagag

SEQ ID NO: 831964 - DNA, 15 bp, Homo sapiens
gtaaggaggaagagg

SEQ ID NO: 831965 - DNA, 15 bp, Homo sapiens
taaggaggaagaggt

SEQ ID NO: 831966 - DNA, 15 bp, Homo sapiens
aaggaggaagaggtg

SEQ ID NO: 831967 - DNA, 15 bp, Homo sapiens
aggaggaagaggtga

SEQ ID NO: 831968 - DNA, 15 bp, Homo sapiens
ggaggaagaggtgac

SEQ ID NO: 831969 - DNA, 15 bp, Homo sapiens
gaggaagaggtgact

SEQ ID NO: 831970 - DNA, 15 bp, Homo sapiens
aggaagaggtgactt

SEQ ID NO: 831971 - DNA, 15 bp, Homo sapiens
ggaagaggtgacttc

SEQ ID NO: 831972 - DNA, 15 bp, Homo sapiens
gaagaggtgacttct

SEQ ID NO: 831973 - DNA, 15 bp, Homo sapiens
aagaggtgacttctg

SEQ ID NO: 831974 - DNA, 15 bp, Homo sapiens
agaggtgacttctgc

SEQ ID NO: 831975 - DNA, 15 bp, Homo sapiens
gaggtgacttctgct

SEQ ID NO: 831976 - DNA, 15 bp, Homo sapiens
aggtgacttctgctt

SEQ ID NO: 831977 - DNA, 15 bp, Homo sapiens
ggtgacttctgcttt

SEQ ID NO: 831978 - DNA, 15 bp, Homo sapiens
gtgacttctgctttt

SEQ ID NO: 831979 - DNA, 15 bp, Homo sapiens
tgacttctgctttta

SEQ ID NO: 831980 - DNA, 15 bp, Homo sapiens
gacttctgcttttat

SEQ ID NO: 831981 - DNA, 15 bp, Homo sapiens
acttctgcttttatt

SEQ ID NO: 831982 - DNA, 15 bp, Homo sapiens
cttctgcttttattc

SEQ ID NO: 831983 - DNA, 15 bp, Homo sapiens
ttctgcttttattcc

SEQ ID NO: 831984 - DNA, 15 bp, Homo sapiens
tctgcttttattcca

SEQ ID NO: 831985 - DNA, 15 bp, Homo sapiens
ctgcttttattccat

SEQ ID NO: 831986 - DNA, 15 bp, Homo sapiens
tgcttttattccatc

SEQ ID NO: 831987 - DNA, 15 bp, Homo sapiens
gcttttattccatct

SEQ ID NO: 831988 - DNA, 15 bp, Homo sapiens
cttttattccatctt

SEQ ID NO: 831989 - DNA, 15 bp, Homo sapiens
ttttattccatcttg

SEQ ID NO: 831990 - DNA, 15 bp, Homo sapiens
tttattccatcttgg

SEQ ID NO: 831991 - DNA, 15 bp, Homo sapiens
ttattccatcttggt

SEQ ID NO: 831992 - DNA, 15 bp, Homo sapiens
tattccatcttggtg

SEQ ID NO: 831993 - DNA, 15 bp, Homo sapiens
attccatcttggtgt

SEQ ID NO: 831994 - DNA, 15 bp, Homo sapiens
ttccatcttggtgtg

SEQ ID NO: 831995 - DNA, 15 bp, Homo sapiens
tccatcttggtgtgg

SEQ ID NO: 831996 - DNA, 15 bp, Homo sapiens
ccatcttggtgtggg

SEQ ID NO: 831997 - DNA, 15 bp, Homo sapiens
catcttggtgtgggt

SEQ ID NO: 831998 - DNA, 15 bp, Homo sapiens
atcttggtgtgggtc

SEQ ID NO: 831999 - DNA, 15 bp, Homo sapiens
tcttggtgtgggtct

SEQ ID NO: 832000 - DNA, 15 bp, Homo sapiens
cttggtgtgggtctg

SEQ ID NO: 832001 - DNA, 15 bp, Homo sapiens
ttggtgtgggtctgg

SEQ ID NO: 832002 - DNA, 15 bp, Homo sapiens
tggtgtgggtctggg

SEQ ID NO: 832003 - DNA, 15 bp, Homo sapiens
ggtgtgggtctgggg

SEQ ID NO: 832004 - DNA, 15 bp, Homo sapiens
gtgtgggtctggggg

SEQ ID NO: 832005 - DNA, 15 bp, Homo sapiens
tgtgggtctgggggg

SEQ ID NO: 832006 - DNA, 15 bp, Homo sapiens
gtgggtctgggggga

SEQ ID NO: 832007 - DNA, 15 bp, Homo sapiens
tgggtctggggggag

SEQ ID NO: 832008 - DNA, 15 bp, Homo sapiens
gggtctggggggagt

SEQ ID NO: 832009 - DNA, 15 bp, Homo sapiens
ggtctggggggagtc

SEQ ID NO: 832010 - DNA, 15 bp, Homo sapiens
gtctggggggagtcc

SEQ ID NO: 832011 - DNA, 15 bp, Homo sapiens
tctggggggagtcct

SEQ ID NO: 832012 - DNA, 15 bp, Homo sapiens
ctggggggagtcctg

SEQ ID NO: 832013 - DNA, 15 bp, Homo sapiens
tggggggagtcctga

SEQ ID NO: 832014 - DNA, 15 bp, Homo sapiens
ggggggagtcctgac

SEQ ID NO: 832015 - DNA, 15 bp, Homo sapiens
gggggagtcctgact

SEQ ID NO: 832016 - DNA, 15 bp, Homo sapiens
ggggagtcctgactc

SEQ ID NO: 832017 - DNA, 15 bp, Homo sapiens
gggagtcctgactct

SEQ ID NO: 832018 - DNA, 15 bp, Homo sapiens
ggagtcctgactctg

SEQ ID NO: 832019 - DNA, 15 bp, Homo sapiens
gagtcctgactctgt

SEQ ID NO: 832020 - DNA, 15 bp, Homo sapiens
agtcctgactctgtg

SEQ ID NO: 832021 - DNA, 15 bp, Homo sapiens
gtcctgactctgtgc

SEQ ID NO: 832022 - DNA, 15 bp, Homo sapiens
tcctgactctgtgct

SEQ ID NO: 832023 - DNA, 15 bp, Homo sapiens
cctgactctgtgctg

SEQ ID NO: 832024 - DNA, 15 bp, Homo sapiens
ctgactctgtgctga

SEQ ID NO: 832025 - DNA, 15 bp, Homo sapiens
tgactctgtgctgag

SEQ ID NO: 832026 - DNA, 15 bp, Homo sapiens
gactctgtgctgagg

SEQ ID NO: 832027 - DNA, 15 bp, Homo sapiens
actctgtgctgaggg

SEQ ID NO: 832028 - DNA, 15 bp, Homo sapiens
ctctgtgctgagggg

SEQ ID NO: 832029 - DNA, 15 bp, Homo sapiens
tctgtgctgagggga

SEQ ID NO: 832030 - DNA, 15 bp, Homo sapiens
ctgtgctgaggggac

SEQ ID NO: 832031 - DNA, 15 bp, Homo sapiens
tgtgctgaggggaca

SEQ ID NO: 832032 - DNA, 15 bp, Homo sapiens
gtgctgaggggacac

SEQ ID NO: 832033 - DNA, 15 bp, Homo sapiens
tgctgaggggacaca

SEQ ID NO: 832034 - DNA, 15 bp, Homo sapiens
gctgaggggacacac

SEQ ID NO: 832035 - DNA, 15 bp, Homo sapiens
ctgaggggacacacc

SEQ ID NO: 832036 - DNA, 15 bp, Homo sapiens
tgaggggacacacct

SEQ ID NO: 832037 - DNA, 15 bp, Homo sapiens
gaggggacacacctc

SEQ ID NO: 832038 - DNA, 15 bp, Homo sapiens
aggggacacacctcc

SEQ ID NO: 832039 - DNA, 15 bp, Homo sapiens
ggggacacacctcct

SEQ ID NO: 832040 - DNA, 15 bp, Homo sapiens
gggacacacctccta

SEQ ID NO: 832041 - DNA, 15 bp, Homo sapiens
ggacacacctcctag

SEQ ID NO: 832042 - DNA, 15 bp, Homo sapiens
gacacacctcctagg

SEQ ID NO: 832043 - DNA, 15 bp, Homo sapiens
acacacctcctaggt

SEQ ID NO: 832044 - DNA, 15 bp, Homo sapiens
cacacctcctaggtt

SEQ ID NO: 832045 - DNA, 15 bp, Homo sapiens
acacctcctaggttg

SEQ ID NO: 832046 - DNA, 15 bp, Homo sapiens
cacctcctaggttgg

SEQ ID NO: 832047 - DNA, 15 bp, Homo sapiens
acctcctaggttggc

SEQ ID NO: 832048 - DNA, 15 bp, Homo sapiens
cctcctaggttggcc

SEQ ID NO: 832049 - DNA, 15 bp, Homo sapiens
ctcctaggttggcca

SEQ ID NO: 832050 - DNA, 15 bp, Homo sapiens
tcctaggttggccac

SEQ ID NO: 832051 - DNA, 15 bp, Homo sapiens
cctaggttggccacg

SEQ ID NO: 832052 - DNA, 15 bp, Homo sapiens
ctaggttggccacga

SEQ ID NO: 832053 - DNA, 15 bp, Homo sapiens
taggttggccacgag

SEQ ID NO: 832054 - DNA, 15 bp, Homo sapiens
aggttggccacgagt

SEQ ID NO: 832055 - DNA, 15 bp, Homo sapiens
ggttggccacgagtc

SEQ ID NO: 832056 - DNA, 15 bp, Homo sapiens
gttggccacgagtca

SEQ ID NO: 832057 - DNA, 15 bp, Homo sapiens
ttggccacgagtcat

SEQ ID NO: 832058 - DNA, 15 bp, Homo sapiens
tggccacgagtcatc

SEQ ID NO: 832059 - DNA, 15 bp, Homo sapiens
ggccacgagtcatct

SEQ ID NO: 832060 - DNA, 15 bp, Homo sapiens
gccacgagtcatctc

SEQ ID NO: 832061 - DNA, 15 bp, Homo sapiens
ccacgagtcatctcc

SEQ ID NO: 832062 - DNA, 15 bp, Homo sapiens
cacgagtcatctcct

SEQ ID NO: 832063 - DNA, 15 bp, Homo sapiens
acgagtcatctccta

SEQ ID NO: 832064 - DNA, 15 bp, Homo sapiens
cgagtcatctcctaa

SEQ ID NO: 832065 - DNA, 15 bp, Homo sapiens
gagtcatctcctaaa

SEQ ID NO: 832066 - DNA, 15 bp, Homo sapiens
agtcatctcctaaac

SEQ ID NO: 832067 - DNA, 15 bp, Homo sapiens
gtcatctcctaaaca

SEQ ID NO: 832068 - DNA, 15 bp, Homo sapiens
tcatctcctaaacac

SEQ ID NO: 832069 - DNA, 15 bp, Homo sapiens
catctcctaaacacc

SEQ ID NO: 832070 - DNA, 15 bp, Homo sapiens
atctcctaaacacct

SEQ ID NO: 832071 - DNA, 15 bp, Homo sapiens
tctcctaaacaccta

SEQ ID NO: 832072 - DNA, 15 bp, Homo sapiens
ctcctaaacacctaa

SEQ ID NO: 832073 - DNA, 15 bp, Homo sapiens
tcctaaacacctaat

SEQ ID NO: 832074 - DNA, 15 bp, Homo sapiens
cctaaacacctaatg

SEQ ID NO: 832075 - DNA, 15 bp, Homo sapiens
ctaaacacctaatga

SEQ ID NO: 832076 - DNA, 15 bp, Homo sapiens
taaacacctaatgag

SEQ ID NO: 832077 - DNA, 15 bp, Homo sapiens
aaacacctaatgaga

SEQ ID NO: 832078 - DNA, 15 bp, Homo sapiens
aacacctaatgagat

SEQ ID NO: 832079 - DNA, 15 bp, Homo sapiens
acacctaatgagatc

SEQ ID NO: 832080 - DNA, 15 bp, Homo sapiens
cacctaatgagatca

SEQ ID NO: 832081 - DNA, 15 bp, Homo sapiens
acctaatgagatcaa

SEQ ID NO: 832082 - DNA, 15 bp, Homo sapiens
cctaatgagatcaat

SEQ ID NO: 832083 - DNA, 15 bp, Homo sapiens
ctaatgagatcaatc

SEQ ID NO: 832084 - DNA, 15 bp, Homo sapiens
taatgagatcaatca

SEQ ID NO: 832085 - DNA, 15 bp, Homo sapiens
aatgagatcaatcac

SEQ ID NO: 832086 - DNA, 15 bp, Homo sapiens
atgagatcaatcaca

SEQ ID NO: 832087 - DNA, 15 bp, Homo sapiens
tgagatcaatcacat

SEQ ID NO: 832088 - DNA, 15 bp, Homo sapiens
gagatcaatcacata

SEQ ID NO: 832089 - DNA, 15 bp, Homo sapiens
agatcaatcacatac

SEQ ID NO: 832090 - DNA, 15 bp, Homo sapiens
gatcaatcacatacc

SEQ ID NO: 832091 - DNA, 15 bp, Homo sapiens
atcaatcacatacca

SEQ ID NO: 832092 - DNA, 15 bp, Homo sapiens
tcaatcacataccag

SEQ ID NO: 832093 - DNA, 15 bp, Homo sapiens
caatcacataccagc

SEQ ID NO: 832094 - DNA, 15 bp, Homo sapiens
aatcacataccagca

SEQ ID NO: 832095 - DNA, 15 bp, Homo sapiens
atcacataccagcaa

SEQ ID NO: 832096 - DNA, 15 bp, Homo sapiens
tcacataccagcaac

SEQ ID NO: 832097 - DNA, 15 bp, Homo sapiens
cacataccagcaacc

SEQ ID NO: 832098 - DNA, 15 bp, Homo sapiens
acataccagcaacct

SEQ ID NO: 832099 - DNA, 15 bp, Homo sapiens
cataccagcaacctt

SEQ ID NO: 832100 - DNA, 15 bp, Homo sapiens
ataccagcaaccttg

SEQ ID NO: 832101 - DNA, 15 bp, Homo sapiens
taccagcaaccttga

SEQ ID NO: 832102 - DNA, 15 bp, Homo sapiens
accagcaaccttgag

SEQ ID NO: 832103 - DNA, 15 bp, Homo sapiens
ccagcaaccttgagg

SEQ ID NO: 832104 - DNA, 15 bp, Homo sapiens
cagcaaccttgaggt

SEQ ID NO: 832105 - DNA, 15 bp, Homo sapiens
agcaaccttgaggtc

SEQ ID NO: 832106 - DNA, 15 bp, Homo sapiens
gcaaccttgaggtca

SEQ ID NO: 832107 - DNA, 15 bp, Homo sapiens
caaccttgaggtcac

SEQ ID NO: 832108 - DNA, 15 bp, Homo sapiens
aaccttgaggtcacc

SEQ ID NO: 832109 - DNA, 15 bp, Homo sapiens
accttgaggtcaccc

SEQ ID NO: 832110 - DNA, 15 bp, Homo sapiens
ccttgaggtcaccct

SEQ ID NO: 832111 - DNA, 15 bp, Homo sapiens
cttgaggtcaccctt

SEQ ID NO: 832112 - DNA, 15 bp, Homo sapiens
ttgaggtcacccttc

SEQ ID NO: 832113 - DNA, 15 bp, Homo sapiens
tgaggtcacccttcc

SEQ ID NO: 832114 - DNA, 15 bp, Homo sapiens
gaggtcacccttcca

SEQ ID NO: 832115 - DNA, 15 bp, Homo sapiens
aggtcacccttccac

SEQ ID NO: 832116 - DNA, 15 bp, Homo sapiens
ggtcacccttccact

SEQ ID NO: 832117 - DNA, 15 bp, Homo sapiens
gtcacccttccactg

SEQ ID NO: 832118 - DNA, 15 bp, Homo sapiens
tcacccttccactgg

SEQ ID NO: 832119 - DNA, 15 bp, Homo sapiens
cacccttccactggt

SEQ ID NO: 832120 - DNA, 15 bp, Homo sapiens
acccttccactggtc

SEQ ID NO: 832121 - DNA, 15 bp, Homo sapiens
cccttccactggtcc

SEQ ID NO: 832122 - DNA, 15 bp, Homo sapiens
ccttccactggtccc

SEQ ID NO: 832123 - DNA, 15 bp, Homo sapiens
cttccactggtccca

SEQ ID NO: 832124 - DNA, 15 bp, Homo sapiens
ttccactggtcccag

SEQ ID NO: 832125 - DNA, 15 bp, Homo sapiens
tccactggtcccagg

SEQ ID NO: 832126 - DNA, 15 bp, Homo sapiens
ccactggtcccagga

SEQ ID NO: 832127 - DNA, 15 bp, Homo sapiens
cactggtcccaggac

SEQ ID NO: 832128 - DNA, 15 bp, Homo sapiens
actggtcccaggacc

SEQ ID NO: 832129 - DNA, 15 bp, Homo sapiens
ctggtcccaggacct

SEQ ID NO: 832130 - DNA, 15 bp, Homo sapiens
tggtcccaggacctc

SEQ ID NO: 832131 - DNA, 15 bp, Homo sapiens
ggtcccaggacctcc

SEQ ID NO: 832132 - DNA, 15 bp, Homo sapiens
gtcccaggacctcct

SEQ ID NO: 832133 - DNA, 15 bp, Homo sapiens
tcccaggacctcctt

SEQ ID NO: 832134 - DNA, 15 bp, Homo sapiens
cccaggacctccttc

SEQ ID NO: 832135 - DNA, 15 bp, Homo sapiens
ccaggacctccttct

SEQ ID NO: 832136 - DNA, 15 bp, Homo sapiens
caggacctccttctg

SEQ ID NO: 832137 - DNA, 15 bp, Homo sapiens
aggacctccttctgc

SEQ ID NO: 832138 - DNA, 15 bp, Homo sapiens
ggacctccttctgct

SEQ ID NO: 832139 - DNA, 15 bp, Homo sapiens
gacctccttctgctg

SEQ ID NO: 832140 - DNA, 15 bp, Homo sapiens
acctccttctgctgg

SEQ ID NO: 832141 - DNA, 15 bp, Homo sapiens
cctccttctgctggc

SEQ ID NO: 832142 - DNA, 15 bp, Homo sapiens
ctccttctgctggca

SEQ ID NO: 832143 - DNA, 15 bp, Homo sapiens
tccttctgctggcat

SEQ ID NO: 832144 - DNA, 15 bp, Homo sapiens
ccttctgctggcata

SEQ ID NO: 832145 - DNA, 15 bp, Homo sapiens
cttctgctggcatat

SEQ ID NO: 832146 - DNA, 15 bp, Homo sapiens
ttctgctggcatatg

SEQ ID NO: 832147 - DNA, 15 bp, Homo sapiens
tctgctggcatatgc

SEQ ID NO: 832148 - DNA, 15 bp, Homo sapiens
ctgctggcatatgca

SEQ ID NO: 832149 - DNA, 15 bp, Homo sapiens
tgctggcatatgcaa

SEQ ID NO: 832150 - DNA, 15 bp, Homo sapiens
gctggcatatgcaac

SEQ ID NO: 832151 - DNA, 15 bp, Homo sapiens
ctggcatatgcaaca

SEQ ID NO: 832152 - DNA, 15 bp, Homo sapiens
tggcatatgcaacac

SEQ ID NO: 832153 - DNA, 15 bp, Homo sapiens
ggcatatgcaacact

SEQ ID NO: 832154 - DNA, 15 bp, Homo sapiens
gcatatgcaacacta

SEQ ID NO: 832155 - DNA, 15 bp, Homo sapiens
catatgcaacactac

SEQ ID NO: 832156 - DNA, 15 bp, Homo sapiens
atatgcaacactacc

SEQ ID NO: 832157 - DNA, 15 bp, Homo sapiens
tatgcaacactacct

SEQ ID NO: 832158 - DNA, 15 bp, Homo sapiens
atgcaacactaccta

SEQ ID NO: 832159 - DNA, 15 bp, Homo sapiens
tgcaacactacctat

SEQ ID NO: 832160 - DNA, 15 bp, Homo sapiens
gcaacactacctata

SEQ ID NO: 832161 - DNA, 15 bp, Homo sapiens
caacactacctataa

SEQ ID NO: 832162 - DNA, 15 bp, Homo sapiens
aacactacctataac

SEQ ID NO: 832163 - DNA, 15 bp, Homo sapiens
acactacctataacc

SEQ ID NO: 832164 - DNA, 15 bp, Homo sapiens
cactacctataacca

SEQ ID NO: 832165 - DNA, 15 bp, Homo sapiens
actacctataaccat

SEQ ID NO: 832166 - DNA, 15 bp, Homo sapiens
ctacctataaccatc

SEQ ID NO: 832167 - DNA, 15 bp, Homo sapiens
tacctataaccatcc

SEQ ID NO: 832168 - DNA, 15 bp, Homo sapiens
acctataaccatccc

SEQ ID NO: 832169 - DNA, 15 bp, Homo sapiens
cctataaccatccca

SEQ ID NO: 832170 - DNA, 15 bp, Homo sapiens
ctataaccatcccac

SEQ ID NO: 832171 - DNA, 15 bp, Homo sapiens
tataaccatcccaca

SEQ ID NO: 832172 - DNA, 15 bp, Homo sapiens
ataaccatcccacac

SEQ ID NO: 832173 - DNA, 15 bp, Homo sapiens
taaccatcccacact

SEQ ID NO: 832174 - DNA, 15 bp, Homo sapiens
aaccatcccacactt

SEQ ID NO: 832175 - DNA, 15 bp, Homo sapiens
accatcccacacttg

SEQ ID NO: 832176 - DNA, 15 bp, Homo sapiens
ccatcccacacttgg

SEQ ID NO: 832177 - DNA, 15 bp, Homo sapiens
catcccacacttgga

SEQ ID NO: 832178 - DNA, 15 bp, Homo sapiens
atcccacacttggac

SEQ ID NO: 832179 - DNA, 15 bp, Homo sapiens
tcccacacttggact

SEQ ID NO: 832180 - DNA, 15 bp, Homo sapiens
cccacacttggactg

SEQ ID NO: 832181 - DNA, 15 bp, Homo sapiens
ccacacttggactgg

SEQ ID NO: 832182 - DNA, 15 bp, Homo sapiens
cacacttggactggt

SEQ ID NO: 832183 - DNA, 15 bp, Homo sapiens
acacttggactggtc

SEQ ID NO: 832184 - DNA, 15 bp, Homo sapiens
cacttggactggtca

SEQ ID NO: 832185 - DNA, 15 bp, Homo sapiens
acttggactggtcat

SEQ ID NO: 832186 - DNA, 15 bp, Homo sapiens
cttggactggtcata

SEQ ID NO: 832187 - DNA, 15 bp, Homo sapiens
ttggactggtcataa

SEQ ID NO: 832188 - DNA, 15 bp, Homo sapiens
tggactggtcataac

SEQ ID NO: 832189 - DNA, 15 bp, Homo sapiens
ggactggtcataaca

SEQ ID NO: 832190 - DNA, 15 bp, Homo sapiens
gactggtcataacat

SEQ ID NO: 832191 - DNA, 15 bp, Homo sapiens
actggtcataacatg

SEQ ID NO: 832192 - DNA, 15 bp, Homo sapiens
ctggtcataacatga

SEQ ID NO: 832193 - DNA, 15 bp, Homo sapiens
tggtcataacatgaa

SEQ ID NO: 832194 - DNA, 15 bp, Homo sapiens
ggtcataacatgaaa

SEQ ID NO: 832195 - DNA, 15 bp, Homo sapiens
gtcataacatgaaac

SEQ ID NO: 832196 - DNA, 15 bp, Homo sapiens
tcataacatgaaact

SEQ ID NO: 832197 - DNA, 15 bp, Homo sapiens
cataacatgaaactt

SEQ ID NO: 832198 - DNA, 15 bp, Homo sapiens
ataacatgaaacttg

SEQ ID NO: 832199 - DNA, 15 bp, Homo sapiens
taacatgaaacttgc

SEQ ID NO: 832200 - DNA, 15 bp, Homo sapiens
aacatgaaacttgct

SEQ ID NO: 832201 - DNA, 15 bp, Homo sapiens
acatgaaacttgctt

SEQ ID NO: 832202 - DNA, 15 bp, Homo sapiens
catgaaacttgcttt

SEQ ID NO: 832203 - DNA, 15 bp, Homo sapiens
atgaaacttgctttg

SEQ ID NO: 832204 - DNA, 15 bp, Homo sapiens
tgaaacttgctttgc

SEQ ID NO: 832205 - DNA, 15 bp, Homo sapiens
gaaacttgctttgct

SEQ ID NO: 832206 - DNA, 15 bp, Homo sapiens
aaacttgctttgctg

SEQ ID NO: 832207 - DNA, 15 bp, Homo sapiens
aacttgctttgctgg

SEQ ID NO: 832208 - DNA, 15 bp, Homo sapiens
acttgctttgctgga

SEQ ID NO: 832209 - DNA, 15 bp, Homo sapiens
cttgctttgctggat

SEQ ID NO: 832210 - DNA, 15 bp, Homo sapiens
ttgctttgctggatt

SEQ ID NO: 832211 - DNA, 15 bp, Homo sapiens
tgctttgctggattc

SEQ ID NO: 832212 - DNA, 15 bp, Homo sapiens
gctttgctggattcc

SEQ ID NO: 832213 - DNA, 15 bp, Homo sapiens
ctttgctggattcct

SEQ ID NO: 832214 - DNA, 15 bp, Homo sapiens
tttgctggattcctc

SEQ ID NO: 832215 - DNA, 15 bp, Homo sapiens
ttgctggattcctca

SEQ ID NO: 832216 - DNA, 15 bp, Homo sapiens
tgctggattcctcaa

SEQ ID NO: 832217 - DNA, 15 bp, Homo sapiens
gctggattcctcaaa

SEQ ID NO: 832218 - DNA, 15 bp, Homo sapiens
ctggattcctcaaaa

SEQ ID NO: 832219 - DNA, 15 bp, Homo sapiens
tggattcctcaaaat

SEQ ID NO: 832220 - DNA, 15 bp, Homo sapiens
ggattcctcaaaatc

SEQ ID NO: 832221 - DNA, 15 bp, Homo sapiens
gattcctcaaaatca

SEQ ID NO: 832222 - DNA, 15 bp, Homo sapiens
attcctcaaaatcag

SEQ ID NO: 832223 - DNA, 15 bp, Homo sapiens
ttcctcaaaatcagc

SEQ ID NO: 832224 - DNA, 15 bp, Homo sapiens
tcctcaaaatcagct

SEQ ID NO: 832225 - DNA, 15 bp, Homo sapiens
cctcaaaatcagcta

SEQ ID NO: 832226 - DNA, 15 bp, Homo sapiens
ctcaaaatcagctac

SEQ ID NO: 832227 - DNA, 15 bp, Homo sapiens
tcaaaatcagctact

SEQ ID NO: 832228 - DNA, 15 bp, Homo sapiens
caaaatcagctactc

SEQ ID NO: 832229 - DNA, 15 bp, Homo sapiens
aaaatcagctactca

SEQ ID NO: 832230 - DNA, 15 bp, Homo sapiens
aaatcagctactcat

SEQ ID NO: 832231 - DNA, 15 bp, Homo sapiens
aatcagctactcatc

SEQ ID NO: 832232 - DNA, 15 bp, Homo sapiens
atcagctactcatca

SEQ ID NO: 832233 - DNA, 15 bp, Homo sapiens
tcagctactcatcaa

SEQ ID NO: 832234 - DNA, 15 bp, Homo sapiens
cagctactcatcaag

SEQ ID NO: 832235 - DNA, 15 bp, Homo sapiens
agctactcatcaagg

SEQ ID NO: 832236 - DNA, 15 bp, Homo sapiens
gctactcatcaagga

SEQ ID NO: 832237 - DNA, 15 bp, Homo sapiens
ctactcatcaaggaa

SEQ ID NO: 832238 - DNA, 15 bp, Homo sapiens
tactcatcaaggaag

SEQ ID NO: 832239 - DNA, 15 bp, Homo sapiens
actcatcaaggaagt

SEQ ID NO: 832240 - DNA, 15 bp, Homo sapiens
ctcatcaaggaagta

SEQ ID NO: 832241 - DNA, 15 bp, Homo sapiens
tcatcaaggaagtag

SEQ ID NO: 832242 - DNA, 15 bp, Homo sapiens
catcaaggaagtaga

SEQ ID NO: 832243 - DNA, 15 bp, Homo sapiens
atcaaggaagtagac

SEQ ID NO: 832244 - DNA, 15 bp, Homo sapiens
tcaaggaagtagacc

SEQ ID NO: 832245 - DNA, 15 bp, Homo sapiens
caaggaagtagacca

SEQ ID NO: 832246 - DNA, 15 bp, Homo sapiens
aaggaagtagaccag

SEQ ID NO: 832247 - DNA, 15 bp, Homo sapiens
aggaagtagaccagt

SEQ ID NO: 832248 - DNA, 15 bp, Homo sapiens
ggaagtagaccagtt

SEQ ID NO: 832249 - DNA, 15 bp, Homo sapiens
gaagtagaccagtta

SEQ ID NO: 832250 - DNA, 15 bp, Homo sapiens
aagtagaccagttat

SEQ ID NO: 832251 - DNA, 15 bp, Homo sapiens
agtagaccagttata

SEQ ID NO: 832252 - DNA, 15 bp, Homo sapiens
gtagaccagttatat

SEQ ID NO: 832253 - DNA, 15 bp, Homo sapiens
tagaccagttatatg

SEQ ID NO: 832254 - DNA, 15 bp, Homo sapiens
agaccagttatatgg

SEQ ID NO: 832255 - DNA, 15 bp, Homo sapiens
gaccagttatatgga

SEQ ID NO: 832256 - DNA, 15 bp, Homo sapiens
accagttatatggac

SEQ ID NO: 832257 - DNA, 15 bp, Homo sapiens
ccagttatatggacc

SEQ ID NO: 832258 - DNA, 15 bp, Homo sapiens
cagttatatggaccc

SEQ ID NO: 832259 - DNA, 15 bp, Homo sapiens
agttatatggaccca

SEQ ID NO: 832260 - DNA, 15 bp, Homo sapiens
gttatatggacccag

SEQ ID NO: 832261 - DNA, 15 bp, Homo sapiens
ttatatggacccagt

SEQ ID NO: 832262 - DNA, 15 bp, Homo sapiens
tatatggacccagta

SEQ ID NO: 832263 - DNA, 15 bp, Homo sapiens
atatggacccagtag

SEQ ID NO: 832264 - DNA, 15 bp, Homo sapiens
tatggacccagtagc

SEQ ID NO: 832265 - DNA, 15 bp, Homo sapiens
atggacccagtagct

SEQ ID NO: 832266 - DNA, 15 bp, Homo sapiens
tggacccagtagctt

SEQ ID NO: 832267 - DNA, 15 bp, Homo sapiens
ggacccagtagcttt

SEQ ID NO: 832268 - DNA, 15 bp, Homo sapiens
gacccagtagcttta

SEQ ID NO: 832269 - DNA, 15 bp, Homo sapiens
acccagtagctttat

SEQ ID NO: 832270 - DNA, 15 bp, Homo sapiens
cccagtagctttata

SEQ ID NO: 832271 - DNA, 15 bp, Homo sapiens
ccagtagctttatac

SEQ ID NO: 832272 - DNA, 15 bp, Homo sapiens
cagtagctttataca

SEQ ID NO: 832273 - DNA, 15 bp, Homo sapiens
agtagctttatacaa

SEQ ID NO: 832274 - DNA, 15 bp, Homo sapiens
gtagctttatacaac

SEQ ID NO: 832275 - DNA, 15 bp, Homo sapiens
tagctttatacaaca

SEQ ID NO: 832276 - DNA, 15 bp, Homo sapiens
agctttatacaacat

SEQ ID NO: 832277 - DNA, 15 bp, Homo sapiens
gctttatacaacata

SEQ ID NO: 832278 - DNA, 15 bp, Homo sapiens
ctttatacaacataa

SEQ ID NO: 832279 - DNA, 15 bp, Homo sapiens
tttatacaacataat

SEQ ID NO: 832280 - DNA, 15 bp, Homo sapiens
ttatacaacataata

SEQ ID NO: 832281 - DNA, 15 bp, Homo sapiens
tatacaacataataa

SEQ ID NO: 832282 - DNA, 15 bp, Homo sapiens
atacaacataataat

SEQ ID NO: 832283 - DNA, 15 bp, Homo sapiens
tacaacataataatc

SEQ ID NO: 832284 - DNA, 15 bp, Homo sapiens
acaacataataatca

SEQ ID NO: 832285 - DNA, 15 bp, Homo sapiens
caacataataatcaa

SEQ ID NO: 832286 - DNA, 15 bp, Homo sapiens
aacataataatcaag

SEQ ID NO: 832287 - DNA, 15 bp, Homo sapiens
acataataatcaagt

SEQ ID NO: 832288 - DNA, 15 bp, Homo sapiens
cataataatcaagta

SEQ ID NO: 832289 - DNA, 15 bp, Homo sapiens
ataataatcaagtaa

SEQ ID NO: 832290 - DNA, 15 bp, Homo sapiens
taataatcaagtaat

SEQ ID NO: 832291 - DNA, 15 bp, Homo sapiens
aataatcaagtaatt

SEQ ID NO: 832292 - DNA, 15 bp, Homo sapiens
ataatcaagtaattc

SEQ ID NO: 832293 - DNA, 15 bp, Homo sapiens
taatcaagtaattcc

SEQ ID NO: 832294 - DNA, 15 bp, Homo sapiens
aatcaagtaattcct

SEQ ID NO: 832295 - DNA, 15 bp, Homo sapiens
atcaagtaattccta

SEQ ID NO: 832296 - DNA, 15 bp, Homo sapiens
tcaagtaattcctat

SEQ ID NO: 832297 - DNA, 15 bp, Homo sapiens
caagtaattcctata

SEQ ID NO: 832298 - DNA, 15 bp, Homo sapiens
aagtaattcctatat

SEQ ID NO: 832299 - DNA, 15 bp, Homo sapiens
agtaattcctatatt

SEQ ID NO: 832300 - DNA, 15 bp, Homo sapiens
gtaattcctatattg

SEQ ID NO: 832301 - DNA, 15 bp, Homo sapiens
taattcctatattga

SEQ ID NO: 832302 - DNA, 15 bp, Homo sapiens
aattcctatattgaa

SEQ ID NO: 832303 - DNA, 15 bp, Homo sapiens
attcctatattgaac

SEQ ID NO: 832304 - DNA, 15 bp, Homo sapiens
ttcctatattgaaca

SEQ ID NO: 832305 - DNA, 15 bp, Homo sapiens
tcctatattgaacac

SEQ ID NO: 832306 - DNA, 15 bp, Homo sapiens
cctatattgaacact

SEQ ID NO: 832307 - DNA, 15 bp, Homo sapiens
ctatattgaacactt

SEQ ID NO: 832308 - DNA, 15 bp, Homo sapiens
tatattgaacactta

SEQ ID NO: 832309 - DNA, 15 bp, Homo sapiens
atattgaacacttaa

SEQ ID NO: 832310 - DNA, 15 bp, Homo sapiens
tattgaacacttaag

SEQ ID NO: 832311 - DNA, 15 bp, Homo sapiens
attgaacacttaagt

SEQ ID NO: 832312 - DNA, 15 bp, Homo sapiens
ttgaacacttaagtt

SEQ ID NO: 832313 - DNA, 15 bp, Homo sapiens
tgaacacttaagttg

SEQ ID NO: 832314 - DNA, 15 bp, Homo sapiens
gaacacttaagttgg

SEQ ID NO: 832315 - DNA, 15 bp, Homo sapiens
aacacttaagttgga

SEQ ID NO: 832316 - DNA, 15 bp, Homo sapiens
acacttaagttggac

SEQ ID NO: 832317 - DNA, 15 bp, Homo sapiens
cacttaagttggact

SEQ ID NO: 832318 - DNA, 15 bp, Homo sapiens
acttaagttggactc

SEQ ID NO: 832319 - DNA, 15 bp, Homo sapiens
cttaagttggactca

SEQ ID NO: 832320 - DNA, 15 bp, Homo sapiens
ttaagttggactcaa

SEQ ID NO: 832321 - DNA, 15 bp, Homo sapiens
taagttggactcaat

SEQ ID NO: 832322 - DNA, 15 bp, Homo sapiens
aagttggactcaata

SEQ ID NO: 832323 - DNA, 15 bp, Homo sapiens
agttggactcaatat

SEQ ID NO: 832324 - DNA, 15 bp, Homo sapiens
gttggactcaatata

SEQ ID NO: 832325 - DNA, 15 bp, Homo sapiens
ttggactcaatatag

SEQ ID NO: 832326 - DNA, 15 bp, Homo sapiens
tggactcaatatagc

SEQ ID NO: 832327 - DNA, 15 bp, Homo sapiens
ggactcaatatagct

SEQ ID NO: 832328 - DNA, 15 bp, Homo sapiens
gactcaatatagctc

SEQ ID NO: 832329 - DNA, 15 bp, Homo sapiens
actcaatatagctct

SEQ ID NO: 832330 - DNA, 15 bp, Homo sapiens
ctcaatatagctctg

SEQ ID NO: 832331 - DNA, 15 bp, Homo sapiens
tcaatatagctctga

SEQ ID NO: 832332 - DNA, 15 bp, Homo sapiens
caatatagctctgac

SEQ ID NO: 832333 - DNA, 15 bp, Homo sapiens
aatatagctctgact

SEQ ID NO: 832334 - DNA, 15 bp, Homo sapiens
atatagctctgactt

SEQ ID NO: 832335 - DNA, 15 bp, Homo sapiens
tatagctctgacttc

SEQ ID NO: 832336 - DNA, 15 bp, Homo sapiens
atagctctgacttct

SEQ ID NO: 832337 - DNA, 15 bp, Homo sapiens
tagctctgacttcta

SEQ ID NO: 832338 - DNA, 15 bp, Homo sapiens
agctctgacttctat

SEQ ID NO: 832339 - DNA, 15 bp, Homo sapiens
atgcctcgaatatca

SEQ ID NO: 832340 - DNA, 15 bp, Homo sapiens
tgcctcgaatatcat

SEQ ID NO: 832341 - DNA, 15 bp, Homo sapiens
gcctcgaatatcatg

SEQ ID NO: 832342 - DNA, 15 bp, Homo sapiens
cctcgaatatcatga

SEQ ID NO: 832343 - DNA, 15 bp, Homo sapiens
ctcgaatatcatgag

SEQ ID NO: 832344 - DNA, 15 bp, Homo sapiens
tcgaatatcatgagg

SEQ ID NO: 832345 - DNA, 15 bp, Homo sapiens
cgaatatcatgaggt

SEQ ID NO: 832346 - DNA, 15 bp, Homo sapiens
gaatatcatgaggta

SEQ ID NO: 832347 - DNA, 15 bp, Homo sapiens
aatatcatgaggtaa

SEQ ID NO: 832348 - DNA, 15 bp, Homo sapiens
atatcatgaggtaac

SEQ ID NO: 832349 - DNA, 15 bp, Homo sapiens
tatcatgaggtaact

SEQ ID NO: 832350 - DNA, 15 bp, Homo sapiens
atcatgaggtaactc

SEQ ID NO: 832351 - DNA, 15 bp, Homo sapiens
tcatgaggtaactct

SEQ ID NO: 832352 - DNA, 15 bp, Homo sapiens
catgaggtaactctt

SEQ ID NO: 832353 - DNA, 15 bp, Homo sapiens
atgaggtaactcttg

SEQ ID NO: 832354 - DNA, 15 bp, Homo sapiens
tgaggtaactcttgg

SEQ ID NO: 832355 - DNA, 15 bp, Homo sapiens
gaggtaactcttggg

SEQ ID NO: 832356 - DNA, 15 bp, Homo sapiens
aggtaactcttgggg

SEQ ID NO: 832357 - DNA, 15 bp, Homo sapiens
ggtaactcttggggc

SEQ ID NO: 832358 - DNA, 15 bp, Homo sapiens
gtaactcttggggcg

SEQ ID NO: 832359 - DNA, 15 bp, Homo sapiens
taactcttggggcgc

SEQ ID NO: 832360 - DNA, 15 bp, Homo sapiens
aactcttggggcgct

SEQ ID NO: 832361 - DNA, 15 bp, Homo sapiens
actcttggggcgctg

SEQ ID NO: 832362 - DNA, 15 bp, Homo sapiens
ctcttggggcgctgc

SEQ ID NO: 832363 - DNA, 15 bp, Homo sapiens
tcttggggcgctgcg

SEQ ID NO: 832364 - DNA, 15 bp, Homo sapiens
cttggggcgctgcgg

SEQ ID NO: 832365 - DNA, 15 bp, Homo sapiens
ttggggcgctgcgga

SEQ ID NO: 832366 - DNA, 15 bp, Homo sapiens
tggggcgctgcggaa

SEQ ID NO: 832367 - DNA, 15 bp, Homo sapiens
ggggcgctgcggaag

SEQ ID NO: 832368 - DNA, 15 bp, Homo sapiens
gggcgctgcggaagg

SEQ ID NO: 832369 - DNA, 15 bp, Homo sapiens
ggcgctgcggaaggc

SEQ ID NO: 832370 - DNA, 15 bp, Homo sapiens
gcgctgcggaaggcc

SEQ ID NO: 832371 - DNA, 15 bp, Homo sapiens
cgctgcggaaggccc

SEQ ID NO: 832372 - DNA, 15 bp, Homo sapiens
gctgcggaaggccct

SEQ ID NO: 832373 - DNA, 15 bp, Homo sapiens
ctgcggaaggccctg

SEQ ID NO: 832374 - DNA, 15 bp, Homo sapiens
tgcggaaggccctgg

SEQ ID NO: 832375 - DNA, 15 bp, Homo sapiens
gcggaaggccctggg

SEQ ID NO: 832376 - DNA, 15 bp, Homo sapiens
cggaaggccctgggc

SEQ ID NO: 832377 - DNA, 15 bp, Homo sapiens
ggaaggccctgggct

SEQ ID NO: 832378 - DNA, 15 bp, Homo sapiens
gaaggccctgggctt

SEQ ID NO: 832379 - DNA, 15 bp, Homo sapiens
aaggccctgggcttg

SEQ ID NO: 832380 - DNA, 15 bp, Homo sapiens
aggccctgggcttgg

SEQ ID NO: 832381 - DNA, 15 bp, Homo sapiens
ggccctgggcttggc

SEQ ID NO: 832382 - DNA, 15 bp, Homo sapiens
gccctgggcttggca

SEQ ID NO: 832383 - DNA, 15 bp, Homo sapiens
ccctgggcttggcag

SEQ ID NO: 832384 - DNA, 15 bp, Homo sapiens
cctgggcttggcagt

SEQ ID NO: 832385 - DNA, 15 bp, Homo sapiens
ctgggcttggcagtc

SEQ ID NO: 832386 - DNA, 15 bp, Homo sapiens
tgggcttggcagtct

SEQ ID NO: 832387 - DNA, 15 bp, Homo sapiens
gggcttggcagtctg

SEQ ID NO: 832388 - DNA, 15 bp, Homo sapiens
ggcttggcagtctgt

SEQ ID NO: 832389 - DNA, 15 bp, Homo sapiens
gcttggcagtctgtg

SEQ ID NO: 832390 - DNA, 15 bp, Homo sapiens
cttggcagtctgtgg

SEQ ID NO: 832391 - DNA, 15 bp, Homo sapiens
ttggcagtctgtggc

SEQ ID NO: 832392 - DNA, 15 bp, Homo sapiens
tggcagtctgtggct

SEQ ID NO: 832393 - DNA, 15 bp, Homo sapiens
ggcagtctgtggctg

SEQ ID NO: 832394 - DNA, 15 bp, Homo sapiens
gcagtctgtggctgt

SEQ ID NO: 832395 - DNA, 15 bp, Homo sapiens
cagtctgtggctgtt

SEQ ID NO: 832396 - DNA, 15 bp, Homo sapiens
agtctgtggctgttc

SEQ ID NO: 832397 - DNA, 15 bp, Homo sapiens
gtctgtggctgttca

SEQ ID NO: 832398 - DNA, 15 bp, Homo sapiens
tctgtggctgttcac

SEQ ID NO: 832399 - DNA, 15 bp, Homo sapiens
ctgtggctgttcacg

SEQ ID NO: 832400 - DNA, 15 bp, Homo sapiens
tgtggctgttcacgg

SEQ ID NO: 832401 - DNA, 15 bp, Homo sapiens
gtggctgttcacggc

SEQ ID NO: 832402 - DNA, 15 bp, Homo sapiens
tggctgttcacggcc

SEQ ID NO: 832403 - DNA, 15 bp, Homo sapiens
ggctgttcacggccc

SEQ ID NO: 832404 - DNA, 15 bp, Homo sapiens
gctgttcacggccct

SEQ ID NO: 832405 - DNA, 15 bp, Homo sapiens
ctgttcacggccctt

SEQ ID NO: 832406 - DNA, 15 bp, Homo sapiens
tgttcacggcccttt

SEQ ID NO: 832407 - DNA, 15 bp, Homo sapiens
gttcacggccctttt

SEQ ID NO: 832408 - DNA, 15 bp, Homo sapiens
ttcacggcccttttg

SEQ ID NO: 832409 - DNA, 15 bp, Homo sapiens
tcacggcccttttgg

SEQ ID NO: 832410 - DNA, 15 bp, Homo sapiens
cacggcccttttgga

SEQ ID NO: 832411 - DNA, 15 bp, Homo sapiens
acggcccttttggat

SEQ ID NO: 832412 - DNA, 15 bp, Homo sapiens
cggcccttttggatc

SEQ ID NO: 832413 - DNA, 15 bp, Homo sapiens
ggcccttttggatct

SEQ ID NO: 832414 - DNA, 15 bp, Homo sapiens
gcccttttggatctt

SEQ ID NO: 832415 - DNA, 15 bp, Homo sapiens
cccttttggatcttc

SEQ ID NO: 832416 - DNA, 15 bp, Homo sapiens
ccttttggatcttct

SEQ ID NO: 832417 - DNA, 15 bp, Homo sapiens
cttttggatcttctg

SEQ ID NO: 832418 - DNA, 15 bp, Homo sapiens
ttttggatcttctgc

SEQ ID NO: 832419 - DNA, 15 bp, Homo sapiens
tttggatcttctgca

SEQ ID NO: 832420 - DNA, 15 bp, Homo sapiens
ttggatcttctgcag

SEQ ID NO: 832421 - DNA, 15 bp, Homo sapiens
tggatcttctgcaga

SEQ ID NO: 832422 - DNA, 15 bp, Homo sapiens
ggatcttctgcagag

SEQ ID NO: 832423 - DNA, 15 bp, Homo sapiens
gatcttctgcagagg

SEQ ID NO: 832424 - DNA, 15 bp, Homo sapiens
atcttctgcagagga

SEQ ID NO: 832425 - DNA, 15 bp, Homo sapiens
tcttctgcagaggac

SEQ ID NO: 832426 - DNA, 15 bp, Homo sapiens
cttctgcagaggact

SEQ ID NO: 832427 - DNA, 15 bp, Homo sapiens
ttctgcagaggacta

SEQ ID NO: 832428 - DNA, 15 bp, Homo sapiens
tctgcagaggactat

SEQ ID NO: 832429 - DNA, 15 bp, Homo sapiens
ctgcagaggactatc

SEQ ID NO: 832430 - DNA, 15 bp, Homo sapiens
tgcagaggactatct

SEQ ID NO: 832431 - DNA, 15 bp, Homo sapiens
gcagaggactatctc

SEQ ID NO: 832432 - DNA, 15 bp, Homo sapiens
cagaggactatctct

SEQ ID NO: 832433 - DNA, 15 bp, Homo sapiens
agaggactatctcta

SEQ ID NO: 832434 - DNA, 15 bp, Homo sapiens
gaggactatctctat

SEQ ID NO: 832435 - DNA, 15 bp, Homo sapiens
aggactatctctatg

SEQ ID NO: 832436 - DNA, 15 bp, Homo sapiens
ggactatctctatga

SEQ ID NO: 832437 - DNA, 15 bp, Homo sapiens
gactatctctatgag

SEQ ID NO: 832438 - DNA, 15 bp, Homo sapiens
actatctctatgagg

SEQ ID NO: 832439 - DNA, 15 bp, Homo sapiens
ctatctctatgaggc

SEQ ID NO: 832440 - DNA, 15 bp, Homo sapiens
tatctctatgaggcc

SEQ ID NO: 832441 - DNA, 15 bp, Homo sapiens
atctctatgaggcct

SEQ ID NO: 832442 - DNA, 15 bp, Homo sapiens
tctctatgaggcctt

SEQ ID NO: 832443 - DNA, 15 bp, Homo sapiens
ctctatgaggccttt

SEQ ID NO: 832444 - DNA, 15 bp, Homo sapiens
tctatgaggcctttt

SEQ ID NO: 832445 - DNA, 15 bp, Homo sapiens
ctatgaggccttttt

SEQ ID NO: 832446 - DNA, 15 bp, Homo sapiens
tatgaggcctttttg

SEQ ID NO: 832447 - DNA, 15 bp, Homo sapiens
atgaggcctttttgc

SEQ ID NO: 832448 - DNA, 15 bp, Homo sapiens
tgaggcctttttgcc

SEQ ID NO: 832449 - DNA, 15 bp, Homo sapiens
gaggcctttttgccc

SEQ ID NO: 832450 - DNA, 15 bp, Homo sapiens
aggcctttttgcccc

SEQ ID NO: 832451 - DNA, 15 bp, Homo sapiens
ggcctttttgcccca

SEQ ID NO: 832452 - DNA, 15 bp, Homo sapiens
gcctttttgccccac

SEQ ID NO: 832453 - DNA, 15 bp, Homo sapiens
cctttttgccccaca

SEQ ID NO: 832454 - DNA, 15 bp, Homo sapiens
ctttttgccccacaa

SEQ ID NO: 832455 - DNA, 15 bp, Homo sapiens
tttttgccccacaag

SEQ ID NO: 832456 - DNA, 15 bp, Homo sapiens
ttttgccccacaagc

SEQ ID NO: 832457 - DNA, 15 bp, Homo sapiens
tttgccccacaagcc

SEQ ID NO: 832458 - DNA, 15 bp, Homo sapiens
ttgccccacaagcca

SEQ ID NO: 832459 - DNA, 15 bp, Homo sapiens
tgccccacaagccac

SEQ ID NO: 832460 - DNA, 15 bp, Homo sapiens
gccccacaagccact

SEQ ID NO: 832461 - DNA, 15 bp, Homo sapiens
ccccacaagccactg

SEQ ID NO: 832462 - DNA, 15 bp, Homo sapiens
cccacaagccactgt

SEQ ID NO: 832463 - DNA, 15 bp, Homo sapiens
ccacaagccactgta

SEQ ID NO: 832464 - DNA, 15 bp, Homo sapiens
cacaagccactgtac

SEQ ID NO: 832465 - DNA, 15 bp, Homo sapiens
acaagccactgtaca

SEQ ID NO: 832466 - DNA, 15 bp, Homo sapiens
caagccactgtacaa

SEQ ID NO: 832467 - DNA, 15 bp, Homo sapiens
aagccactgtacaac

SEQ ID NO: 832468 - DNA, 15 bp, Homo sapiens
agccactgtacaact

SEQ ID NO: 832469 - DNA, 15 bp, Homo sapiens
gccactgtacaactc

SEQ ID NO: 832470 - DNA, 15 bp, Homo sapiens
ccactgtacaactca

SEQ ID NO: 832471 - DNA, 15 bp, Homo sapiens
cactgtacaactcac

SEQ ID NO: 832472 - DNA, 15 bp, Homo sapiens
actgtacaactcacc

SEQ ID NO: 832473 - DNA, 15 bp, Homo sapiens
ctgtacaactcacca

SEQ ID NO: 832474 - DNA, 15 bp, Homo sapiens
tgtacaactcaccag

SEQ ID NO: 832475 - DNA, 15 bp, Homo sapiens
gtacaactcaccagc

SEQ ID NO: 832476 - DNA, 15 bp, Homo sapiens
tacaactcaccagct

SEQ ID NO: 832477 - DNA, 15 bp, Homo sapiens
acaactcaccagctg

SEQ ID NO: 832478 - DNA, 15 bp, Homo sapiens
caactcaccagctgc

SEQ ID NO: 832479 - DNA, 15 bp, Homo sapiens
aactcaccagctgca

SEQ ID NO: 832480 - DNA, 15 bp, Homo sapiens
actcaccagctgcat

SEQ ID NO: 832481 - DNA, 15 bp, Homo sapiens
ctcaccagctgcata

SEQ ID NO: 832482 - DNA, 15 bp, Homo sapiens
tcaccagctgcatag

SEQ ID NO: 832483 - DNA, 15 bp, Homo sapiens
caccagctgcatagg

SEQ ID NO: 832484 - DNA, 15 bp, Homo sapiens
accagctgcataggc

SEQ ID NO: 832485 - DNA, 15 bp, Homo sapiens
ccagctgcataggcc

SEQ ID NO: 832486 - DNA, 15 bp, Homo sapiens
cagctgcataggcct

SEQ ID NO: 832487 - DNA, 15 bp, Homo sapiens
agctgcataggcctg

SEQ ID NO: 832488 - DNA, 15 bp, Homo sapiens
gctgcataggcctgg

SEQ ID NO: 832489 - DNA, 15 bp, Homo sapiens
ctgcataggcctggg

SEQ ID NO: 832490 - DNA, 15 bp, Homo sapiens
tgcataggcctgggg

SEQ ID NO: 832491 - DNA, 15 bp, Homo sapiens
gcataggcctggggg

SEQ ID NO: 832492 - DNA, 15 bp, Homo sapiens
cataggcctggggga

SEQ ID NO: 832493 - DNA, 15 bp, Homo sapiens
ataggcctgggggag

SEQ ID NO: 832494 - DNA, 15 bp, Homo sapiens
taggcctgggggagc

SEQ ID NO: 832495 - DNA, 15 bp, Homo sapiens
aggcctgggggagcc

SEQ ID NO: 832496 - DNA, 15 bp, Homo sapiens
ggcctgggggagccg

SEQ ID NO: 832497 - DNA, 15 bp, Homo sapiens
gcctgggggagccga

SEQ ID NO: 832498 - DNA, 15 bp, Homo sapiens
cctgggggagccgag

SEQ ID NO: 832499 - DNA, 15 bp, Homo sapiens
ctgggggagccgagg

SEQ ID NO: 832500 - DNA, 15 bp, Homo sapiens
tgggggagccgaggc

SEQ ID NO: 832501 - DNA, 15 bp, Homo sapiens
gggggagccgaggct

SEQ ID NO: 832502 - DNA, 15 bp, Homo sapiens
ggggagccgaggctg

SEQ ID NO: 832503 - DNA, 15 bp, Homo sapiens
gggagccgaggctgt

SEQ ID NO: 832504 - DNA, 15 bp, Homo sapiens
ggagccgaggctgtc

SEQ ID NO: 832505 - DNA, 15 bp, Homo sapiens
gagccgaggctgtct

SEQ ID NO: 832506 - DNA, 15 bp, Homo sapiens
agccgaggctgtctg

SEQ ID NO: 832507 - DNA, 15 bp, Homo sapiens
gccgaggctgtctgt

SEQ ID NO: 832508 - DNA, 15 bp, Homo sapiens
ccgaggctgtctgtg

SEQ ID NO: 832509 - DNA, 15 bp, Homo sapiens
cgaggctgtctgtgt

SEQ ID NO: 832510 - DNA, 15 bp, Homo sapiens
gaggctgtctgtgtg

SEQ ID NO: 832511 - DNA, 15 bp, Homo sapiens
aggctgtctgtgtgg

SEQ ID NO: 832512 - DNA, 15 bp, Homo sapiens
ggctgtctgtgtggg

SEQ ID NO: 832513 - DNA, 15 bp, Homo sapiens
gctgtctgtgtgggt

SEQ ID NO: 832514 - DNA, 15 bp, Homo sapiens
ctgtctgtgtgggtt

SEQ ID NO: 832515 - DNA, 15 bp, Homo sapiens
tgtctgtgtgggttg

SEQ ID NO: 832516 - DNA, 15 bp, Homo sapiens
gtctgtgtgggttgg

SEQ ID NO: 832517 - DNA, 15 bp, Homo sapiens
tctgtgtgggttggg

SEQ ID NO: 832518 - DNA, 15 bp, Homo sapiens
ctgtgtgggttgggg

SEQ ID NO: 832519 - DNA, 15 bp, Homo sapiens
tgtgtgggttggggc

SEQ ID NO: 832520 - DNA, 15 bp, Homo sapiens
gtgtgggttggggca

SEQ ID NO: 832521 - DNA, 15 bp, Homo sapiens
tgtgggttggggcag

SEQ ID NO: 832522 - DNA, 15 bp, Homo sapiens
gtgggttggggcagt

SEQ ID NO: 832523 - DNA, 15 bp, Homo sapiens
tgggttggggcagtg

SEQ ID NO: 832524 - DNA, 15 bp, Homo sapiens
gggttggggcagtgg

SEQ ID NO: 832525 - DNA, 15 bp, Homo sapiens
ggttggggcagtggc

SEQ ID NO: 832526 - DNA, 15 bp, Homo sapiens
gttggggcagtggca

SEQ ID NO: 832527 - DNA, 15 bp, Homo sapiens
ttggggcagtggcac

SEQ ID NO: 832528 - DNA, 15 bp, Homo sapiens
tggggcagtggcaca

SEQ ID NO: 832529 - DNA, 15 bp, Homo sapiens
ggggcagtggcacac

SEQ ID NO: 832530 - DNA, 15 bp, Homo sapiens
gggcagtggcacaca

SEQ ID NO: 832531 - DNA, 15 bp, Homo sapiens
ggcagtggcacacag

SEQ ID NO: 832532 - DNA, 15 bp, Homo sapiens
gcagtggcacacagg

SEQ ID NO: 832533 - DNA, 15 bp, Homo sapiens
cagtggcacacaggg

SEQ ID NO: 832534 - DNA, 15 bp, Homo sapiens
agtggcacacagggt

SEQ ID NO: 832535 - DNA, 15 bp, Homo sapiens
gtggcacacagggtg

SEQ ID NO: 832536 - DNA, 15 bp, Homo sapiens
tggcacacagggtgt

SEQ ID NO: 832537 - DNA, 15 bp, Homo sapiens
ggcacacagggtgtc

SEQ ID NO: 832538 - DNA, 15 bp, Homo sapiens
gcacacagggtgtca

SEQ ID NO: 832539 - DNA, 15 bp, Homo sapiens
cacacagggtgtcac

SEQ ID NO: 832540 - DNA, 15 bp, Homo sapiens
acacagggtgtcacc

SEQ ID NO: 832541 - DNA, 15 bp, Homo sapiens
cacagggtgtcacca

SEQ ID NO: 832542 - DNA, 15 bp, Homo sapiens
acagggtgtcaccaa

SEQ ID NO: 832543 - DNA, 15 bp, Homo sapiens
cagggtgtcaccaac

SEQ ID NO: 832544 - DNA, 15 bp, Homo sapiens
agggtgtcaccaacc

SEQ ID NO: 832545 - DNA, 15 bp, Homo sapiens
gggtgtcaccaaccg

SEQ ID NO: 832546 - DNA, 15 bp, Homo sapiens
ggtgtcaccaaccgg

SEQ ID NO: 832547 - DNA, 15 bp, Homo sapiens
gtgtcaccaaccgga

SEQ ID NO: 832548 - DNA, 15 bp, Homo sapiens
tgtcaccaaccggaa

SEQ ID NO: 832549 - DNA, 15 bp, Homo sapiens
gtcaccaaccggaag

SEQ ID NO: 832550 - DNA, 15 bp, Homo sapiens
tcaccaaccggaagc

SEQ ID NO: 832551 - DNA, 15 bp, Homo sapiens
caccaaccggaagct

SEQ ID NO: 832552 - DNA, 15 bp, Homo sapiens
accaaccggaagctc

SEQ ID NO: 832553 - DNA, 15 bp, Homo sapiens
ccaaccggaagctca

SEQ ID NO: 832554 - DNA, 15 bp, Homo sapiens
caaccggaagctcac

SEQ ID NO: 832555 - DNA, 15 bp, Homo sapiens
aaccggaagctcacc

SEQ ID NO: 832556 - DNA, 15 bp, Homo sapiens
accggaagctcaccc

SEQ ID NO: 832557 - DNA, 15 bp, Homo sapiens
ccggaagctcaccct

SEQ ID NO: 832558 - DNA, 15 bp, Homo sapiens
cggaagctcaccctc

SEQ ID NO: 832559 - DNA, 15 bp, Homo sapiens
ggaagctcaccctca

SEQ ID NO: 832560 - DNA, 15 bp, Homo sapiens
gaagctcaccctcag

SEQ ID NO: 832561 - DNA, 15 bp, Homo sapiens
aagctcaccctcagc

SEQ ID NO: 832562 - DNA, 15 bp, Homo sapiens
agctcaccctcagca

SEQ ID NO: 832563 - DNA, 15 bp, Homo sapiens
gctcaccctcagcag

SEQ ID NO: 832564 - DNA, 15 bp, Homo sapiens
ctcaccctcagcagg

SEQ ID NO: 832565 - DNA, 15 bp, Homo sapiens
tcaccctcagcaggt

SEQ ID NO: 832566 - DNA, 15 bp, Homo sapiens
caccctcagcaggtg

SEQ ID NO: 832567 - DNA, 15 bp, Homo sapiens
accctcagcaggtgg

SEQ ID NO: 832568 - DNA, 15 bp, Homo sapiens
ccctcagcaggtggc

SEQ ID NO: 832569 - DNA, 15 bp, Homo sapiens
cctcagcaggtggca

SEQ ID NO: 832570 - DNA, 15 bp, Homo sapiens
ctcagcaggtggcag

SEQ ID NO: 832571 - DNA, 15 bp, Homo sapiens
tcagcaggtggcagc

SEQ ID NO: 832572 - DNA, 15 bp, Homo sapiens
cagcaggtggcagct

SEQ ID NO: 832573 - DNA, 15 bp, Homo sapiens
agcaggtggcagctc

SEQ ID NO: 832574 - DNA, 15 bp, Homo sapiens
gcaggtggcagctct

SEQ ID NO: 832575 - DNA, 15 bp, Homo sapiens
caggtggcagctcta

SEQ ID NO: 832576 - DNA, 15 bp, Homo sapiens
aggtggcagctctag

SEQ ID NO: 832577 - DNA, 15 bp, Homo sapiens
ggtggcagctctagg

SEQ ID NO: 832578 - DNA, 15 bp, Homo sapiens
gtggcagctctaggg

SEQ ID NO: 832579 - DNA, 15 bp, Homo sapiens
tggcagctctagggc

SEQ ID NO: 832580 - DNA, 15 bp, Homo sapiens
ggcagctctagggct

SEQ ID NO: 832581 - DNA, 15 bp, Homo sapiens
gcagctctagggctt

SEQ ID NO: 832582 - DNA, 15 bp, Homo sapiens
cagctctagggctta

SEQ ID NO: 832583 - DNA, 15 bp, Homo sapiens
agctctagggcttac

SEQ ID NO: 832584 - DNA, 15 bp, Homo sapiens
gctctagggcttaca

SEQ ID NO: 832585 - DNA, 15 bp, Homo sapiens
ctctagggcttacag

SEQ ID NO: 832586 - DNA, 15 bp, Homo sapiens
tctagggcttacagc

SEQ ID NO: 832587 - DNA, 15 bp, Homo sapiens
ctagggcttacagct

SEQ ID NO: 832588 - DNA, 15 bp, Homo sapiens
tagggcttacagctg

SEQ ID NO: 832589 - DNA, 15 bp, Homo sapiens
agggcttacagctgg

SEQ ID NO: 832590 - DNA, 15 bp, Homo sapiens
gggcttacagctggc

SEQ ID NO: 832591 - DNA, 15 bp, Homo sapiens
ggcttacagctggcc

SEQ ID NO: 832592 - DNA, 15 bp, Homo sapiens
gcttacagctggcct

SEQ ID NO: 832593 - DNA, 15 bp, Homo sapiens
cttacagctggcctt

SEQ ID NO: 832594 - DNA, 15 bp, Homo sapiens
ttacagctggccttg

SEQ ID NO: 832595 - DNA, 15 bp, Homo sapiens
tacagctggccttgg

SEQ ID NO: 832596 - DNA, 15 bp, Homo sapiens
acagctggccttggg

SEQ ID NO: 832597 - DNA, 15 bp, Homo sapiens
cagctggccttgggt

SEQ ID NO: 832598 - DNA, 15 bp, Homo sapiens
agctggccttgggtt

SEQ ID NO: 832599 - DNA, 15 bp, Homo sapiens
gctggccttgggttt

SEQ ID NO: 832600 - DNA, 15 bp, Homo sapiens
ctggccttgggtttg

SEQ ID NO: 832601 - DNA, 15 bp, Homo sapiens
tggccttgggtttga

SEQ ID NO: 832602 - DNA, 15 bp, Homo sapiens
ggccttgggtttgag

SEQ ID NO: 832603 - DNA, 15 bp, Homo sapiens
gccttgggtttgaga

SEQ ID NO: 832604 - DNA, 15 bp, Homo sapiens
ccttgggtttgagat

SEQ ID NO: 832605 - DNA, 15 bp, Homo sapiens
cttgggtttgagatt

SEQ ID NO: 832606 - DNA, 15 bp, Homo sapiens
ttgggtttgagattc

SEQ ID NO: 832607 - DNA, 15 bp, Homo sapiens
tgggtttgagattcc

SEQ ID NO: 832608 - DNA, 15 bp, Homo sapiens
gggtttgagattcct

SEQ ID NO: 832609 - DNA, 15 bp, Homo sapiens
ggtttgagattcctt

SEQ ID NO: 832610 - DNA, 15 bp, Homo sapiens
gtttgagattccttg

SEQ ID NO: 832611 - DNA, 15 bp, Homo sapiens
tttgagattccttga

SEQ ID NO: 832612 - DNA, 15 bp, Homo sapiens
ttgagattccttgag

SEQ ID NO: 832613 - DNA, 15 bp, Homo sapiens
tgagattccttgaga

SEQ ID NO: 832614 - DNA, 15 bp, Homo sapiens
gagattccttgagac

SEQ ID NO: 832615 - DNA, 15 bp, Homo sapiens
agattccttgagaca

SEQ ID NO: 832616 - DNA, 15 bp, Homo sapiens
gattccttgagacag

SEQ ID NO: 832617 - DNA, 15 bp, Homo sapiens
attccttgagacaga

SEQ ID NO: 832618 - DNA, 15 bp, Homo sapiens
ttccttgagacagaa

SEQ ID NO: 832619 - DNA, 15 bp, Homo sapiens
tccttgagacagaac

SEQ ID NO: 832620 - DNA, 15 bp, Homo sapiens
ccttgagacagaact

SEQ ID NO: 832621 - DNA, 15 bp, Homo sapiens
cttgagacagaacta

SEQ ID NO: 832622 - DNA, 15 bp, Homo sapiens
ttgagacagaactag

SEQ ID NO: 832623 - DNA, 15 bp, Homo sapiens
tgagacagaactagg

SEQ ID NO: 832624 - DNA, 15 bp, Homo sapiens
gagacagaactagga

SEQ ID NO: 832625 - DNA, 15 bp, Homo sapiens
agacagaactaggaa

SEQ ID NO: 832626 - DNA, 15 bp, Homo sapiens
gacagaactaggaaa

SEQ ID NO: 832627 - DNA, 15 bp, Homo sapiens
acagaactaggaaat

SEQ ID NO: 832628 - DNA, 15 bp, Homo sapiens
cagaactaggaaata

SEQ ID NO: 832629 - DNA, 15 bp, Homo sapiens
agaactaggaaatag

SEQ ID NO: 832630 - DNA, 15 bp, Homo sapiens
gaactaggaaataga

SEQ ID NO: 832631 - DNA, 15 bp, Homo sapiens
aactaggaaatagat

SEQ ID NO: 832632 - DNA, 15 bp, Homo sapiens
actaggaaatagatt

SEQ ID NO: 832633 - DNA, 15 bp, Homo sapiens
ctaggaaatagattg

SEQ ID NO: 832634 - DNA, 15 bp, Homo sapiens
taggaaatagattga

SEQ ID NO: 832635 - DNA, 15 bp, Homo sapiens
aggaaatagattgag

SEQ ID NO: 832636 - DNA, 15 bp, Homo sapiens
ggaaatagattgaga

SEQ ID NO: 832637 - DNA, 15 bp, Homo sapiens
gaaatagattgagat

SEQ ID NO: 832638 - DNA, 15 bp, Homo sapiens
aaatagattgagatg

SEQ ID NO: 832639 - DNA, 15 bp, Homo sapiens
aatagattgagatgg

SEQ ID NO: 832640 - DNA, 15 bp, Homo sapiens
atagattgagatggg

SEQ ID NO: 832641 - DNA, 15 bp, Homo sapiens
tagattgagatgggt

SEQ ID NO: 832642 - DNA, 15 bp, Homo sapiens
agattgagatgggtg

SEQ ID NO: 832643 - DNA, 15 bp, Homo sapiens
gattgagatgggtgc

SEQ ID NO: 832644 - DNA, 15 bp, Homo sapiens
attgagatgggtgct

SEQ ID NO: 832645 - DNA, 15 bp, Homo sapiens
ttgagatgggtgctg

SEQ ID NO: 832646 - DNA, 15 bp, Homo sapiens
tgagatgggtgctgg

SEQ ID NO: 832647 - DNA, 15 bp, Homo sapiens
gagatgggtgctggc

SEQ ID NO: 832648 - DNA, 15 bp, Homo sapiens
agatgggtgctggcc

SEQ ID NO: 832649 - DNA, 15 bp, Homo sapiens
gatgggtgctggcct

SEQ ID NO: 832650 - DNA, 15 bp, Homo sapiens
atgggtgctggcctg

SEQ ID NO: 832651 - DNA, 15 bp, Homo sapiens
tgggtgctggcctga

SEQ ID NO: 832652 - DNA, 15 bp, Homo sapiens
gggtgctggcctgaa

SEQ ID NO: 832653 - DNA, 15 bp, Homo sapiens
ggtgctggcctgaat

SEQ ID NO: 832654 - DNA, 15 bp, Homo sapiens
gtgctggcctgaatt

SEQ ID NO: 832655 - DNA, 15 bp, Homo sapiens
tgctggcctgaatta

SEQ ID NO: 832656 - DNA, 15 bp, Homo sapiens
gctggcctgaattaa

SEQ ID NO: 832657 - DNA, 15 bp, Homo sapiens
ctggcctgaattaaa

SEQ ID NO: 832658 - DNA, 15 bp, Homo sapiens
tggcctgaattaaag

SEQ ID NO: 832659 - DNA, 15 bp, Homo sapiens
ggcctgaattaaagt

SEQ ID NO: 832660 - DNA, 15 bp, Homo sapiens
gcctgaattaaagta

SEQ ID NO: 832661 - DNA, 15 bp, Homo sapiens
cctgaattaaagtac

SEQ ID NO: 832662 - DNA, 15 bp, Homo sapiens
ctgaattaaagtacc

SEQ ID NO: 832663 - DNA, 15 bp, Homo sapiens
tgaattaaagtacca

SEQ ID NO: 832664 - DNA, 15 bp, Homo sapiens
gaattaaagtaccat

SEQ ID NO: 832665 - DNA, 15 bp, Homo sapiens
aattaaagtaccatg

SEQ ID NO: 832666 - DNA, 15 bp, Homo sapiens
attaaagtaccatgt

SEQ ID NO: 832667 - DNA, 15 bp, Homo sapiens
ttaaagtaccatgtt

SEQ ID NO: 832668 - DNA, 15 bp, Homo sapiens
taaagtaccatgttc

SEQ ID NO: 832669 - DNA, 15 bp, Homo sapiens
aaagtaccatgttcc

SEQ ID NO: 832670 - DNA, 15 bp, Homo sapiens
aagtaccatgttccc

SEQ ID NO: 832671 - DNA, 15 bp, Homo sapiens
agtaccatgttccct

SEQ ID NO: 832672 - DNA, 15 bp, Homo sapiens
gtaccatgttcccta

SEQ ID NO: 832673 - DNA, 15 bp, Homo sapiens
taccatgttccctaa

SEQ ID NO: 832674 - DNA, 15 bp, Homo sapiens
accatgttccctaaa

SEQ ID NO: 832675 - DNA, 15 bp, Homo sapiens
ccatgttccctaaag

SEQ ID NO: 832676 - DNA, 15 bp, Homo sapiens
catgttccctaaagg

SEQ ID NO: 832677 - DNA, 15 bp, Homo sapiens
atgttccctaaagga

SEQ ID NO: 832678 - DNA, 15 bp, Homo sapiens
tgttccctaaaggaa

SEQ ID NO: 832679 - DNA, 15 bp, Homo sapiens
gttccctaaaggaaa

SEQ ID NO: 832680 - DNA, 15 bp, Homo sapiens
ttccctaaaggaaat

SEQ ID NO: 832681 - DNA, 15 bp, Homo sapiens
tccctaaaggaaatg

SEQ ID NO: 832682 - DNA, 15 bp, Homo sapiens
ccctaaaggaaatgg

SEQ ID NO: 832683 - DNA, 15 bp, Homo sapiens
cctaaaggaaatggg

SEQ ID NO: 832684 - DNA, 15 bp, Homo sapiens
ctaaaggaaatgggc

SEQ ID NO: 832685 - DNA, 15 bp, Homo sapiens
taaaggaaatgggcc

SEQ ID NO: 832686 - DNA, 15 bp, Homo sapiens
aaaggaaatgggcct

SEQ ID NO: 832687 - DNA, 15 bp, Homo sapiens
aaggaaatgggcctg

SEQ ID NO: 832688 - DNA, 15 bp, Homo sapiens
aggaaatgggcctga

SEQ ID NO: 832689 - DNA, 15 bp, Homo sapiens
ggaaatgggcctgag

SEQ ID NO: 832690 - DNA, 15 bp, Homo sapiens
gaaatgggcctgaga

SEQ ID NO: 832691 - DNA, 15 bp, Homo sapiens
aaatgggcctgagat

SEQ ID NO: 832692 - DNA, 15 bp, Homo sapiens
aatgggcctgagata

SEQ ID NO: 832693 - DNA, 15 bp, Homo sapiens
atgggcctgagatat

SEQ ID NO: 832694 - DNA, 15 bp, Homo sapiens
tgggcctgagatatc

SEQ ID NO: 832695 - DNA, 15 bp, Homo sapiens
gggcctgagatatct

SEQ ID NO: 832696 - DNA, 15 bp, Homo sapiens
ggcctgagatatctt

SEQ ID NO: 832697 - DNA, 15 bp, Homo sapiens
gcctgagatatctta

SEQ ID NO: 832698 - DNA, 15 bp, Homo sapiens
cctgagatatcttaa

SEQ ID NO: 832699 - DNA, 15 bp, Homo sapiens
ctgagatatcttaac

SEQ ID NO: 832700 - DNA, 15 bp, Homo sapiens
tgagatatcttaact

SEQ ID NO: 832701 - DNA, 15 bp, Homo sapiens
gagatatcttaacta

SEQ ID NO: 832702 - DNA, 15 bp, Homo sapiens
agatatcttaactaa

SEQ ID NO: 832703 - DNA, 15 bp, Homo sapiens
gatatcttaactaaa

SEQ ID NO: 832704 - DNA, 15 bp, Homo sapiens
atatcttaactaaag

SEQ ID NO: 832705 - DNA, 15 bp, Homo sapiens
tatcttaactaaagg

SEQ ID NO: 832706 - DNA, 15 bp, Homo sapiens
atcttaactaaaggc

SEQ ID NO: 832707 - DNA, 15 bp, Homo sapiens
tcttaactaaaggca

SEQ ID NO: 832708 - DNA, 15 bp, Homo sapiens
cttaactaaaggcag

SEQ ID NO: 832709 - DNA, 15 bp, Homo sapiens
ttaactaaaggcaga

SEQ ID NO: 832710 - DNA, 15 bp, Homo sapiens
taactaaaggcagat

SEQ ID NO: 832711 - DNA, 15 bp, Homo sapiens
aactaaaggcagatg

SEQ ID NO: 832712 - DNA, 15 bp, Homo sapiens
actaaaggcagatgc

SEQ ID NO: 832713 - DNA, 15 bp, Homo sapiens
ctaaaggcagatgcc

SEQ ID NO: 832714 - DNA, 15 bp, Homo sapiens
taaaggcagatgccc

SEQ ID NO: 832715 - DNA, 15 bp, Homo sapiens
aaaggcagatgcccc

SEQ ID NO: 832716 - DNA, 15 bp, Homo sapiens
aaggcagatgccccc

SEQ ID NO: 832717 - DNA, 15 bp, Homo sapiens
aggcagatgccccca

SEQ ID NO: 832718 - DNA, 15 bp, Homo sapiens
ggcagatgcccccag

SEQ ID NO: 832719 - DNA, 15 bp, Homo sapiens
gcagatgcccccagg

SEQ ID NO: 832720 - DNA, 15 bp, Homo sapiens
cagatgcccccaggg

SEQ ID NO: 832721 - DNA, 15 bp, Homo sapiens
agatgcccccagggg

SEQ ID NO: 832722 - DNA, 15 bp, Homo sapiens
gatgcccccagggga

SEQ ID NO: 832723 - DNA, 15 bp, Homo sapiens
atgcccccaggggac

SEQ ID NO: 832724 - DNA, 15 bp, Homo sapiens
tgcccccaggggaca

SEQ ID NO: 832725 - DNA, 15 bp, Homo sapiens
gcccccaggggacat

SEQ ID NO: 832726 - DNA, 15 bp, Homo sapiens
cccccaggggacatt

SEQ ID NO: 832727 - DNA, 15 bp, Homo sapiens
ccccaggggacattt

SEQ ID NO: 832728 - DNA, 15 bp, Homo sapiens
cccaggggacatttt

SEQ ID NO: 832729 - DNA, 15 bp, Homo sapiens
ccaggggacattttg

SEQ ID NO: 832730 - DNA, 15 bp, Homo sapiens
caggggacattttgc

SEQ ID NO: 832731 - DNA, 15 bp, Homo sapiens
aggggacattttgca

SEQ ID NO: 832732 - DNA, 15 bp, Homo sapiens
ggggacattttgcaa

SEQ ID NO: 832733 - DNA, 15 bp, Homo sapiens
gggacattttgcaat

SEQ ID NO: 832734 - DNA, 15 bp, Homo sapiens
ggacattttgcaatg

SEQ ID NO: 832735 - DNA, 15 bp, Homo sapiens
gacattttgcaatgt

SEQ ID NO: 832736 - DNA, 15 bp, Homo sapiens
acattttgcaatgtc

SEQ ID NO: 832737 - DNA, 15 bp, Homo sapiens
cattttgcaatgtct

SEQ ID NO: 832738 - DNA, 15 bp, Homo sapiens
attttgcaatgtctg

SEQ ID NO: 832739 - DNA, 15 bp, Homo sapiens
ttttgcaatgtctgg

SEQ ID NO: 832740 - DNA, 15 bp, Homo sapiens
tttgcaatgtctgga

SEQ ID NO: 832741 - DNA, 15 bp, Homo sapiens
ttgcaatgtctggag

SEQ ID NO: 832742 - DNA, 15 bp, Homo sapiens
tgcaatgtctggaga

SEQ ID NO: 832743 - DNA, 15 bp, Homo sapiens
gcaatgtctggagat

SEQ ID NO: 832744 - DNA, 15 bp, Homo sapiens
caatgtctggagatg

SEQ ID NO: 832745 - DNA, 15 bp, Homo sapiens
aatgtctggagatgt

SEQ ID NO: 832746 - DNA, 15 bp, Homo sapiens
atgtctggagatgtt

SEQ ID NO: 832747 - DNA, 15 bp, Homo sapiens
tgtctggagatgttt

SEQ ID NO: 832748 - DNA, 15 bp, Homo sapiens
gtctggagatgtttt

SEQ ID NO: 832749 - DNA, 15 bp, Homo sapiens
tctggagatgttttt

SEQ ID NO: 832750 - DNA, 15 bp, Homo sapiens
ctggagatgtttttg

SEQ ID NO: 832751 - DNA, 15 bp, Homo sapiens
tggagatgtttttgg

SEQ ID NO: 832752 - DNA, 15 bp, Homo sapiens
agatgtttttggttg

SEQ ID NO: 832753 - DNA, 15 bp, Homo sapiens
gatgtttttggttgt

SEQ ID NO: 832754 - DNA, 15 bp, Homo sapiens
atgtttttggttgtc

SEQ ID NO: 832755 - DNA, 15 bp, Homo sapiens
tgtttttggttgtca

SEQ ID NO: 832756 - DNA, 15 bp, Homo sapiens
gtttttggttgtcac

SEQ ID NO: 832757 - DNA, 15 bp, Homo sapiens
tttttggttgtcaca

SEQ ID NO: 832758 - DNA, 15 bp, Homo sapiens
ttttggttgtcacaa

SEQ ID NO: 832759 - DNA, 15 bp, Homo sapiens
tttggttgtcacaac

SEQ ID NO: 832760 - DNA, 15 bp, Homo sapiens
ttggttgtcacaact

SEQ ID NO: 832761 - DNA, 15 bp, Homo sapiens
tggttgtcacaacta

SEQ ID NO: 832762 - DNA, 15 bp, Homo sapiens
ggttgtcacaactag

SEQ ID NO: 832763 - DNA, 15 bp, Homo sapiens
gttgtcacaactagg

SEQ ID NO: 832764 - DNA, 15 bp, Homo sapiens
ttgtcacaactaggg

SEQ ID NO: 832765 - DNA, 15 bp, Homo sapiens
tgtcacaactagggg

SEQ ID NO: 832766 - DNA, 15 bp, Homo sapiens
gtcacaactagggga

SEQ ID NO: 832767 - DNA, 15 bp, Homo sapiens
tcacaactaggggac

SEQ ID NO: 832768 - DNA, 15 bp, Homo sapiens
cacaactaggggacc

SEQ ID NO: 832769 - DNA, 15 bp, Homo sapiens
acaactaggggaccg

SEQ ID NO: 832770 - DNA, 15 bp, Homo sapiens
caactaggggaccgt

SEQ ID NO: 832771 - DNA, 15 bp, Homo sapiens
aactaggggaccgtg

SEQ ID NO: 832772 - DNA, 15 bp, Homo sapiens
actaggggaccgtgc

SEQ ID NO: 832773 - DNA, 15 bp, Homo sapiens
ctaggggaccgtgct

SEQ ID NO: 832774 - DNA, 15 bp, Homo sapiens
taggggaccgtgctg

SEQ ID NO: 832775 - DNA, 15 bp, Homo sapiens
aggggaccgtgctgc

SEQ ID NO: 832776 - DNA, 15 bp, Homo sapiens
ggggaccgtgctgct

SEQ ID NO: 832777 - DNA, 15 bp, Homo sapiens
gggaccgtgctgctg

SEQ ID NO: 832778 - DNA, 15 bp, Homo sapiens
ggaccgtgctgctgg

SEQ ID NO: 832779 - DNA, 15 bp, Homo sapiens
gaccgtgctgctggc

SEQ ID NO: 832780 - DNA, 15 bp, Homo sapiens
accgtgctgctggca

SEQ ID NO: 832781 - DNA, 15 bp, Homo sapiens
ccgtgctgctggcat

SEQ ID NO: 832782 - DNA, 15 bp, Homo sapiens
cgtgctgctggcatc

SEQ ID NO: 832783 - DNA, 15 bp, Homo sapiens
gtgctgctggcatct

SEQ ID NO: 832784 - DNA, 15 bp, Homo sapiens
tgctgctggcatctg

SEQ ID NO: 832785 - DNA, 15 bp, Homo sapiens
gctgctggcatctga

SEQ ID NO: 832786 - DNA, 15 bp, Homo sapiens
ctgctggcatctgat

SEQ ID NO: 832787 - DNA, 15 bp, Homo sapiens
tgctggcatctgata

SEQ ID NO: 832788 - DNA, 15 bp, Homo sapiens
gctggcatctgatag

SEQ ID NO: 832789 - DNA, 15 bp, Homo sapiens
ctggcatctgatagg

SEQ ID NO: 832790 - DNA, 15 bp, Homo sapiens
tggcatctgataggt

SEQ ID NO: 832791 - DNA, 15 bp, Homo sapiens
ggcatctgataggta

SEQ ID NO: 832792 - DNA, 15 bp, Homo sapiens
gcatctgataggtag

SEQ ID NO: 832793 - DNA, 15 bp, Homo sapiens
catctgataggtaga

SEQ ID NO: 832794 - DNA, 15 bp, Homo sapiens
atctgataggtagag

SEQ ID NO: 832795 - DNA, 15 bp, Homo sapiens
tctgataggtagagc

SEQ ID NO: 832796 - DNA, 15 bp, Homo sapiens
ctgataggtagagcc

SEQ ID NO: 832797 - DNA, 15 bp, Homo sapiens
tgataggtagagccc

SEQ ID NO: 832798 - DNA, 15 bp, Homo sapiens
gataggtagagccca

SEQ ID NO: 832799 - DNA, 15 bp, Homo sapiens
ataggtagagcccag

SEQ ID NO: 832800 - DNA, 15 bp, Homo sapiens
taggtagagcccagg

SEQ ID NO: 832801 - DNA, 15 bp, Homo sapiens
aggtagagcccaggg

SEQ ID NO: 832802 - DNA, 15 bp, Homo sapiens
ggtagagcccaggga

SEQ ID NO: 832803 - DNA, 15 bp, Homo sapiens
gtagagcccagggac

SEQ ID NO: 832804 - DNA, 15 bp, Homo sapiens
tagagcccagggaca

SEQ ID NO: 832805 - DNA, 15 bp, Homo sapiens
agagcccagggacac

SEQ ID NO: 832806 - DNA, 15 bp, Homo sapiens
gagcccagggacact

SEQ ID NO: 832807 - DNA, 15 bp, Homo sapiens
agcccagggacactg

SEQ ID NO: 832808 - DNA, 15 bp, Homo sapiens
gcccagggacactgc

SEQ ID NO: 832809 - DNA, 15 bp, Homo sapiens
cccagggacactgcg

SEQ ID NO: 832810 - DNA, 15 bp, Homo sapiens
ccagggacactgcga

SEQ ID NO: 832811 - DNA, 15 bp, Homo sapiens
cagggacactgcgaa

SEQ ID NO: 832812 - DNA, 15 bp, Homo sapiens
agggacactgcgaac

SEQ ID NO: 832813 - DNA, 15 bp, Homo sapiens
gggacactgcgaacg

SEQ ID NO: 832814 - DNA, 15 bp, Homo sapiens
ggacactgcgaacga

SEQ ID NO: 832815 - DNA, 15 bp, Homo sapiens
gacactgcgaacgac

SEQ ID NO: 832816 - DNA, 15 bp, Homo sapiens
acactgcgaacgacc

SEQ ID NO: 832817 - DNA, 15 bp, Homo sapiens
cactgcgaacgaccc

SEQ ID NO: 832818 - DNA, 15 bp, Homo sapiens
actgcgaacgaccct

SEQ ID NO: 832819 - DNA, 15 bp, Homo sapiens
ctgcgaacgaccctg

SEQ ID NO: 832820 - DNA, 15 bp, Homo sapiens
tgcgaacgaccctgc

SEQ ID NO: 832821 - DNA, 15 bp, Homo sapiens
gcgaacgaccctgca

SEQ ID NO: 832822 - DNA, 15 bp, Homo sapiens
cgaacgaccctgcaa

SEQ ID NO: 832823 - DNA, 15 bp, Homo sapiens
gaacgaccctgcaat

SEQ ID NO: 832824 - DNA, 15 bp, Homo sapiens
aacgaccctgcaatg

SEQ ID NO: 832825 - DNA, 15 bp, Homo sapiens
acgaccctgcaatgc

SEQ ID NO: 832826 - DNA, 15 bp, Homo sapiens
cgaccctgcaatgca

SEQ ID NO: 832827 - DNA, 15 bp, Homo sapiens
gaccctgcaatgcac

SEQ ID NO: 832828 - DNA, 15 bp, Homo sapiens
accctgcaatgcaca

SEQ ID NO: 832829 - DNA, 15 bp, Homo sapiens
ccctgcaatgcacag

SEQ ID NO: 832830 - DNA, 15 bp, Homo sapiens
cctgcaatgcacagg

SEQ ID NO: 832831 - DNA, 15 bp, Homo sapiens
ctgcaatgcacaggt

SEQ ID NO: 832832 - DNA, 15 bp, Homo sapiens
tgcaatgcacaggtc

SEQ ID NO: 832833 - DNA, 15 bp, Homo sapiens
gcaatgcacaggtca

SEQ ID NO: 832834 - DNA, 15 bp, Homo sapiens
caatgcacaggtcag

SEQ ID NO: 832835 - DNA, 15 bp, Homo sapiens
aatgcacaggtcagc

SEQ ID NO: 832836 - DNA, 15 bp, Homo sapiens
atgcacaggtcagcc

SEQ ID NO: 832837 - DNA, 15 bp, Homo sapiens
tgcacaggtcagccc

SEQ ID NO: 832838 - DNA, 15 bp, Homo sapiens
gcacaggtcagcccc

SEQ ID NO: 832839 - DNA, 15 bp, Homo sapiens
cacaggtcagccccc

SEQ ID NO: 832840 - DNA, 15 bp, Homo sapiens
acaggtcagccccca

SEQ ID NO: 832841 - DNA, 15 bp, Homo sapiens
caggtcagcccccaa

SEQ ID NO: 832842 - DNA, 15 bp, Homo sapiens
aggtcagcccccaaa

SEQ ID NO: 832843 - DNA, 15 bp, Homo sapiens
ggtcagcccccaaaa

SEQ ID NO: 832844 - DNA, 15 bp, Homo sapiens
gtcagcccccaaaac

SEQ ID NO: 832845 - DNA, 15 bp, Homo sapiens
tcagcccccaaaaca

SEQ ID NO: 832846 - DNA, 15 bp, Homo sapiens
cagcccccaaaacag

SEQ ID NO: 832847 - DNA, 15 bp, Homo sapiens
agcccccaaaacaga

SEQ ID NO: 832848 - DNA, 15 bp, Homo sapiens
gcccccaaaacagag

SEQ ID NO: 832849 - DNA, 15 bp, Homo sapiens
cccccaaaacagaga

SEQ ID NO: 832850 - DNA, 15 bp, Homo sapiens
ccccaaaacagagaa

SEQ ID NO: 832851 - DNA, 15 bp, Homo sapiens
cccaaaacagagaat

SEQ ID NO: 832852 - DNA, 15 bp, Homo sapiens
ccaaaacagagaatt

SEQ ID NO: 832853 - DNA, 15 bp, Homo sapiens
caaaacagagaattg

SEQ ID NO: 832854 - DNA, 15 bp, Homo sapiens
aaaacagagaattgt

SEQ ID NO: 832855 - DNA, 15 bp, Homo sapiens
aaacagagaattgtc

SEQ ID NO: 832856 - DNA, 15 bp, Homo sapiens
aacagagaattgtct

SEQ ID NO: 832857 - DNA, 15 bp, Homo sapiens
acagagaattgtctg

SEQ ID NO: 832858 - DNA, 15 bp, Homo sapiens
cagagaattgtctgg

SEQ ID NO: 832859 - DNA, 15 bp, Homo sapiens
agagaattgtctggc

SEQ ID NO: 832860 - DNA, 15 bp, Homo sapiens
gagaattgtctggcc

SEQ ID NO: 832861 - DNA, 15 bp, Homo sapiens
agaattgtctggccc

SEQ ID NO: 832862 - DNA, 15 bp, Homo sapiens
gaattgtctggccca

SEQ ID NO: 832863 - DNA, 15 bp, Homo sapiens
aattgtctggcccag

SEQ ID NO: 832864 - DNA, 15 bp, Homo sapiens
attgtctggcccaga

SEQ ID NO: 832865 - DNA, 15 bp, Homo sapiens
ttgtctggcccagaa

SEQ ID NO: 832866 - DNA, 15 bp, Homo sapiens
tgtctggcccagaat

SEQ ID NO: 832867 - DNA, 15 bp, Homo sapiens
gtctggcccagaatg

SEQ ID NO: 832868 - DNA, 15 bp, Homo sapiens
tctggcccagaatgt

SEQ ID NO: 832869 - DNA, 15 bp, Homo sapiens
ctggcccagaatgtt

SEQ ID NO: 832870 - DNA, 15 bp, Homo sapiens
tggcccagaatgtta

SEQ ID NO: 832871 - DNA, 15 bp, Homo sapiens
ggcccagaatgttaa

SEQ ID NO: 832872 - DNA, 15 bp, Homo sapiens
gcccagaatgttaat

SEQ ID NO: 832873 - DNA, 15 bp, Homo sapiens
cccagaatgttaatg

SEQ ID NO: 832874 - DNA, 15 bp, Homo sapiens
ccagaatgttaatgg

SEQ ID NO: 832875 - DNA, 15 bp, Homo sapiens
cagaatgttaatggt

SEQ ID NO: 832876 - DNA, 15 bp, Homo sapiens
agaatgttaatggtg

SEQ ID NO: 832877 - DNA, 15 bp, Homo sapiens
gaatgttaatggtgt

SEQ ID NO: 832878 - DNA, 15 bp, Homo sapiens
aatgttaatggtgtc

SEQ ID NO: 832879 - DNA, 15 bp, Homo sapiens
atgttaatggtgtcg

SEQ ID NO: 832880 - DNA, 15 bp, Homo sapiens
tgttaatggtgtcga

SEQ ID NO: 832881 - DNA, 15 bp, Homo sapiens
gttaatggtgtcgag

SEQ ID NO: 832882 - DNA, 15 bp, Homo sapiens
ttaatggtgtcgagg

SEQ ID NO: 832883 - DNA, 15 bp, Homo sapiens
taatggtgtcgaggc

SEQ ID NO: 832884 - DNA, 15 bp, Homo sapiens
aatggtgtcgaggct

SEQ ID NO: 832885 - DNA, 15 bp, Homo sapiens
atggtgtcgaggctg

SEQ ID NO: 832886 - DNA, 15 bp, Homo sapiens
tggtgtcgaggctga

SEQ ID NO: 832887 - DNA, 15 bp, Homo sapiens
ggtgtcgaggctgag

SEQ ID NO: 832888 - DNA, 15 bp, Homo sapiens
gtgtcgaggctgaga

SEQ ID NO: 832889 - DNA, 15 bp, Homo sapiens
tgtcgaggctgagaa

SEQ ID NO: 832890 - DNA, 15 bp, Homo sapiens
gtcgaggctgagaaa

SEQ ID NO: 832891 - DNA, 15 bp, Homo sapiens
tcgaggctgagaaaa

SEQ ID NO: 832892 - DNA, 15 bp, Homo sapiens
cgaggctgagaaaac

SEQ ID NO: 832893 - DNA, 15 bp, Homo sapiens
gaggctgagaaaacc

SEQ ID NO: 832894 - DNA, 15 bp, Homo sapiens
aggctgagaaaaccc

SEQ ID NO: 832895 - DNA, 15 bp, Homo sapiens
ggctgagaaaaccct

SEQ ID NO: 832896 - DNA, 15 bp, Homo sapiens
gctgagaaaaccctt

SEQ ID NO: 832897 - DNA, 15 bp, Homo sapiens
ctgagaaaaccctta

SEQ ID NO: 832898 - DNA, 15 bp, Homo sapiens
tgagaaaacccttac

SEQ ID NO: 832899 - DNA, 15 bp, Homo sapiens
gagaaaacccttact

SEQ ID NO: 832900 - DNA, 15 bp, Homo sapiens
agaaaacccttacta

SEQ ID NO: 832901 - DNA, 15 bp, Homo sapiens
gaaaacccttactag

SEQ ID NO: 832902 - DNA, 15 bp, Homo sapiens
aaaacccttactagg

SEQ ID NO: 832903 - DNA, 15 bp, Homo sapiens
aaacccttactaggg

SEQ ID NO: 832904 - DNA, 15 bp, Homo sapiens
aacccttactagggc

SEQ ID NO: 832905 - DNA, 15 bp, Homo sapiens
acccttactagggct

SEQ ID NO: 832906 - DNA, 15 bp, Homo sapiens
cccttactagggctt

SEQ ID NO: 832907 - DNA, 15 bp, Homo sapiens
ccttactagggcttt

SEQ ID NO: 832908 - DNA, 15 bp, Homo sapiens
cttactagggctttc

SEQ ID NO: 832909 - DNA, 15 bp, Homo sapiens
ttactagggctttcc

SEQ ID NO: 832910 - DNA, 15 bp, Homo sapiens
tactagggctttcca

SEQ ID NO: 832911 - DNA, 15 bp, Homo sapiens
actagggctttccaa

SEQ ID NO: 832912 - DNA, 15 bp, Homo sapiens
ctagggctttccaag

SEQ ID NO: 832913 - DNA, 15 bp, Homo sapiens
tagggctttccaagt

SEQ ID NO: 832914 - DNA, 15 bp, Homo sapiens
agggctttccaagtg

SEQ ID NO: 832915 - DNA, 15 bp, Homo sapiens
gggctttccaagtgt

SEQ ID NO: 832916 - DNA, 15 bp, Homo sapiens
ggctttccaagtgtg

SEQ ID NO: 832917 - DNA, 15 bp, Homo sapiens
gctttccaagtgtgt

SEQ ID NO: 832918 - DNA, 15 bp, Homo sapiens
ctttccaagtgtgtc

SEQ ID NO: 832919 - DNA, 15 bp, Homo sapiens
tttccaagtgtgtct

SEQ ID NO: 832920 - DNA, 15 bp, Homo sapiens
ttccaagtgtgtcta

SEQ ID NO: 832921 - DNA, 15 bp, Homo sapiens
tccaagtgtgtctac

SEQ ID NO: 832922 - DNA, 15 bp, Homo sapiens
ccaagtgtgtctacg

SEQ ID NO: 832923 - DNA, 15 bp, Homo sapiens
caagtgtgtctacgg

SEQ ID NO: 832924 - DNA, 15 bp, Homo sapiens
aagtgtgtctacggc

SEQ ID NO: 832925 - DNA, 15 bp, Homo sapiens
agtgtgtctacggca

SEQ ID NO: 832926 - DNA, 15 bp, Homo sapiens
gtgtgtctacggcat

SEQ ID NO: 832927 - DNA, 15 bp, Homo sapiens
tgtgtctacggcata

SEQ ID NO: 832928 - DNA, 15 bp, Homo sapiens
gtgtctacggcatat

SEQ ID NO: 832929 - DNA, 15 bp, Homo sapiens
tgtctacggcatatt

SEQ ID NO: 832930 - DNA, 15 bp, Homo sapiens
gtctacggcatattg

SEQ ID NO: 832931 - DNA, 15 bp, Homo sapiens
tctacggcatattga

SEQ ID NO: 832932 - DNA, 15 bp, Homo sapiens
ctacggcatattgat

SEQ ID NO: 832933 - DNA, 15 bp, Homo sapiens
tacggcatattgatt

SEQ ID NO: 832934 - DNA, 15 bp, Homo sapiens
acggcatattgattc

SEQ ID NO: 832935 - DNA, 15 bp, Homo sapiens
cggcatattgattcc

SEQ ID NO: 832936 - DNA, 15 bp, Homo sapiens
ggcatattgattcct

SEQ ID NO: 832937 - DNA, 15 bp, Homo sapiens
gcatattgattccta

SEQ ID NO: 832938 - DNA, 15 bp, Homo sapiens
catattgattcctat

SEQ ID NO: 832939 - DNA, 15 bp, Homo sapiens
atattgattcctatc

SEQ ID NO: 832940 - DNA, 15 bp, Homo sapiens
tattgattcctatca

SEQ ID NO: 832941 - DNA, 15 bp, Homo sapiens
attgattcctatcac

SEQ ID NO: 832942 - DNA, 15 bp, Homo sapiens
ttgattcctatcacc

SEQ ID NO: 832943 - DNA, 15 bp, Homo sapiens
tgattcctatcaccc

SEQ ID NO: 832944 - DNA, 15 bp, Homo sapiens
gattcctatcacccc

SEQ ID NO: 832945 - DNA, 15 bp, Homo sapiens
attcctatcacccca

SEQ ID NO: 832946 - DNA, 15 bp, Homo sapiens
ttcctatcaccccaa

SEQ ID NO: 832947 - DNA, 15 bp, Homo sapiens
tcctatcaccccaaa

SEQ ID NO: 832948 - DNA, 15 bp, Homo sapiens
cctatcaccccaaag

SEQ ID NO: 832949 - DNA, 15 bp, Homo sapiens
ctatcaccccaaagg

SEQ ID NO: 832950 - DNA, 15 bp, Homo sapiens
tatcaccccaaaggg

SEQ ID NO: 832951 - DNA, 15 bp, Homo sapiens
atcaccccaaagggg

SEQ ID NO: 832952 - DNA, 15 bp, Homo sapiens
tcaccccaaagggga

SEQ ID NO: 832953 - DNA, 15 bp, Homo sapiens
caccccaaaggggaa

SEQ ID NO: 832954 - DNA, 15 bp, Homo sapiens
accccaaaggggaat

SEQ ID NO: 832955 - DNA, 15 bp, Homo sapiens
ccccaaaggggaatt

SEQ ID NO: 832956 - DNA, 15 bp, Homo sapiens
cccaaaggggaattt

SEQ ID NO: 832957 - DNA, 15 bp, Homo sapiens
ccaaaggggaattta

SEQ ID NO: 832958 - DNA, 15 bp, Homo sapiens
caaaggggaatttag

SEQ ID NO: 832959 - DNA, 15 bp, Homo sapiens
aaaggggaatttagt

SEQ ID NO: 832960 - DNA, 15 bp, Homo sapiens
aaggggaatttagtg

SEQ ID NO: 832961 - DNA, 15 bp, Homo sapiens
aggggaatttagtga

SEQ ID NO: 832962 - DNA, 15 bp, Homo sapiens
ggggaatttagtgac

SEQ ID NO: 832963 - DNA, 15 bp, Homo sapiens
gggaatttagtgacc

SEQ ID NO: 832964 - DNA, 15 bp, Homo sapiens
ggaatttagtgacca

SEQ ID NO: 832965 - DNA, 15 bp, Homo sapiens
gaatttagtgaccag

SEQ ID NO: 832966 - DNA, 15 bp, Homo sapiens
aatttagtgaccagt

SEQ ID NO: 832967 - DNA, 15 bp, Homo sapiens
atttagtgaccagtt

SEQ ID NO: 832968 - DNA, 15 bp, Homo sapiens
tttagtgaccagtta

SEQ ID NO: 832969 - DNA, 15 bp, Homo sapiens
ttagtgaccagttag

SEQ ID NO: 832970 - DNA, 15 bp, Homo sapiens
tagtgaccagttagg

SEQ ID NO: 832971 - DNA, 15 bp, Homo sapiens
agtgaccagttaggc

SEQ ID NO: 832972 - DNA, 15 bp, Homo sapiens
gtgaccagttaggct

SEQ ID NO: 832973 - DNA, 15 bp, Homo sapiens
tgaccagttaggctg

SEQ ID NO: 832974 - DNA, 15 bp, Homo sapiens
gaccagttaggctgt

SEQ ID NO: 832975 - DNA, 15 bp, Homo sapiens
accagttaggctgtt

SEQ ID NO: 832976 - DNA, 15 bp, Homo sapiens
ccagttaggctgttt

SEQ ID NO: 832977 - DNA, 15 bp, Homo sapiens
cagttaggctgtttc

SEQ ID NO: 832978 - DNA, 15 bp, Homo sapiens
agttaggctgtttca

SEQ ID NO: 832979 - DNA, 15 bp, Homo sapiens
gttaggctgtttcat

SEQ ID NO: 832980 - DNA, 15 bp, Homo sapiens
ttaggctgtttcatc

SEQ ID NO: 832981 - DNA, 15 bp, Homo sapiens
taggctgtttcatcc

SEQ ID NO: 832982 - DNA, 15 bp, Homo sapiens
aggctgtttcatcca

SEQ ID NO: 832983 - DNA, 15 bp, Homo sapiens
ggctgtttcatccag

SEQ ID NO: 832984 - DNA, 15 bp, Homo sapiens
gctgtttcatccagt

SEQ ID NO: 832985 - DNA, 15 bp, Homo sapiens
ctgtttcatccagtt

SEQ ID NO: 832986 - DNA, 15 bp, Homo sapiens
tgtttcatccagttt

SEQ ID NO: 832987 - DNA, 15 bp, Homo sapiens
gtttcatccagtttc

SEQ ID NO: 832988 - DNA, 15 bp, Homo sapiens
tttcatccagtttcc

SEQ ID NO: 832989 - DNA, 15 bp, Homo sapiens
ttcatccagtttccc

SEQ ID NO: 832990 - DNA, 15 bp, Homo sapiens
tcatccagtttccca

SEQ ID NO: 832991 - DNA, 15 bp, Homo sapiens
catccagtttcccaa

SEQ ID NO: 832992 - DNA, 15 bp, Homo sapiens
atccagtttcccaaa

SEQ ID NO: 832993 - DNA, 15 bp, Homo sapiens
tccagtttcccaaaa

SEQ ID NO: 832994 - DNA, 15 bp, Homo sapiens
ccagtttcccaaaat

SEQ ID NO: 832995 - DNA, 15 bp, Homo sapiens
cagtttcccaaaatt

SEQ ID NO: 832996 - DNA, 15 bp, Homo sapiens
agtttcccaaaatta

SEQ ID NO: 832997 - DNA, 15 bp, Homo sapiens
gtttcccaaaattaa

SEQ ID NO: 832998 - DNA, 15 bp, Homo sapiens
tttcccaaaattaat

SEQ ID NO: 832999 - DNA, 15 bp, Homo sapiens
ttcccaaaattaatg

SEQ ID NO: 833000 - DNA, 15 bp, Homo sapiens
tcccaaaattaatgt

SEQ ID NO: 833001 - DNA, 15 bp, Homo sapiens
cccaaaattaatgtt

SEQ ID NO: 833002 - DNA, 15 bp, Homo sapiens
ccaaaattaatgttc

SEQ ID NO: 833003 - DNA, 15 bp, Homo sapiens
caaaattaatgttct

SEQ ID NO: 833004 - DNA, 15 bp, Homo sapiens
aaaattaatgttctt

SEQ ID NO: 833005 - DNA, 15 bp, Homo sapiens
aaattaatgttcttt

SEQ ID NO: 833006 - DNA, 15 bp, Homo sapiens
aattaatgttctttc

SEQ ID NO: 833007 - DNA, 15 bp, Homo sapiens
attaatgttctttct

SEQ ID NO: 833008 - DNA, 15 bp, Homo sapiens
ttaatgttctttctt

SEQ ID NO: 833009 - DNA, 15 bp, Homo sapiens
taatgttctttcttg

SEQ ID NO: 833010 - DNA, 15 bp, Homo sapiens
aatgttctttcttga

SEQ ID NO: 833011 - DNA, 15 bp, Homo sapiens
atgttctttcttgaa

SEQ ID NO: 833012 - DNA, 15 bp, Homo sapiens
tgttctttcttgaaa

SEQ ID NO: 833013 - DNA, 15 bp, Homo sapiens
gttctttcttgaaag

SEQ ID NO: 833014 - DNA, 15 bp, Homo sapiens
ttctttcttgaaagg

SEQ ID NO: 833015 - DNA, 15 bp, Homo sapiens
tctttcttgaaaggc

SEQ ID NO: 833016 - DNA, 15 bp, Homo sapiens
ctttcttgaaaggct

SEQ ID NO: 833017 - DNA, 15 bp, Homo sapiens
tttcttgaaaggctt

SEQ ID NO: 833018 - DNA, 15 bp, Homo sapiens
ttcttgaaaggcttt

SEQ ID NO: 833019 - DNA, 15 bp, Homo sapiens
tcttgaaaggctttt

SEQ ID NO: 833020 - DNA, 15 bp, Homo sapiens
cttgaaaggcttttc

SEQ ID NO: 833021 - DNA, 15 bp, Homo sapiens
ttgaaaggcttttca

SEQ ID NO: 833022 - DNA, 15 bp, Homo sapiens
tgaaaggcttttcag

SEQ ID NO: 833023 - DNA, 15 bp, Homo sapiens
gaaaggcttttcagt

SEQ ID NO: 833024 - DNA, 15 bp, Homo sapiens
aaaggcttttcagtg

SEQ ID NO: 833025 - DNA, 15 bp, Homo sapiens
aaggcttttcagtgc

SEQ ID NO: 833026 - DNA, 15 bp, Homo sapiens
aggcttttcagtgct

SEQ ID NO: 833027 - DNA, 15 bp, Homo sapiens
ggcttttcagtgctt

SEQ ID NO: 833028 - DNA, 15 bp, Homo sapiens
gcttttcagtgcttt

SEQ ID NO: 833029 - DNA, 15 bp, Homo sapiens
cttttcagtgctttt

SEQ ID NO: 833030 - DNA, 15 bp, Homo sapiens
ttttcagtgctttta

SEQ ID NO: 833031 - DNA, 15 bp, Homo sapiens
tttcagtgcttttaa

SEQ ID NO: 833032 - DNA, 15 bp, Homo sapiens
ttcagtgcttttaat

SEQ ID NO: 833033 - DNA, 15 bp, Homo sapiens
tcagtgcttttaata

SEQ ID NO: 833034 - DNA, 15 bp, Homo sapiens
cagtgcttttaatac

SEQ ID NO: 833035 - DNA, 15 bp, Homo sapiens
agtgcttttaatact

SEQ ID NO: 833036 - DNA, 15 bp, Homo sapiens
gtgcttttaatacta

SEQ ID NO: 833037 - DNA, 15 bp, Homo sapiens
tgcttttaatactaa

SEQ ID NO: 833038 - DNA, 15 bp, Homo sapiens
gcttttaatactaat

SEQ ID NO: 833039 - DNA, 15 bp, Homo sapiens
cttttaatactaata

SEQ ID NO: 833040 - DNA, 15 bp, Homo sapiens
ttttaatactaatat

SEQ ID NO: 833041 - DNA, 15 bp, Homo sapiens
tttaatactaatatg

SEQ ID NO: 833042 - DNA, 15 bp, Homo sapiens
ttaatactaatatgc

SEQ ID NO: 833043 - DNA, 15 bp, Homo sapiens
taatactaatatgca

SEQ ID NO: 833044 - DNA, 15 bp, Homo sapiens
aatactaatatgcat

SEQ ID NO: 833045 - DNA, 15 bp, Homo sapiens
atactaatatgcatc

SEQ ID NO: 833046 - DNA, 15 bp, Homo sapiens
tactaatatgcatct

SEQ ID NO: 833047 - DNA, 15 bp, Homo sapiens
actaatatgcatctc

SEQ ID NO: 833048 - DNA, 15 bp, Homo sapiens
ctaatatgcatctct

SEQ ID NO: 833049 - DNA, 15 bp, Homo sapiens
taatatgcatctctg

SEQ ID NO: 833050 - DNA, 15 bp, Homo sapiens
aatatgcatctctga

SEQ ID NO: 833051 - DNA, 15 bp, Homo sapiens
atatgcatctctgag

SEQ ID NO: 833052 - DNA, 15 bp, Homo sapiens
tatgcatctctgaga

SEQ ID NO: 833053 - DNA, 15 bp, Homo sapiens
atgcatctctgagat

SEQ ID NO: 833054 - DNA, 15 bp, Homo sapiens
tgcatctctgagata

SEQ ID NO: 833055 - DNA, 15 bp, Homo sapiens
gcatctctgagataa

SEQ ID NO: 833056 - DNA, 15 bp, Homo sapiens
catctctgagataac

SEQ ID NO: 833057 - DNA, 15 bp, Homo sapiens
atctctgagataacg

SEQ ID NO: 833058 - DNA, 15 bp, Homo sapiens
tctctgagataacgt

SEQ ID NO: 833059 - DNA, 15 bp, Homo sapiens
ctctgagataacgta

SEQ ID NO: 833060 - DNA, 15 bp, Homo sapiens
tctgagataacgtac

SEQ ID NO: 833061 - DNA, 15 bp, Homo sapiens
ctgagataacgtact

SEQ ID NO: 833062 - DNA, 15 bp, Homo sapiens
tgagataacgtacta

SEQ ID NO: 833063 - DNA, 15 bp, Homo sapiens
gagataacgtactat

SEQ ID NO: 833064 - DNA, 15 bp, Homo sapiens
agataacgtactata

SEQ ID NO: 833065 - DNA, 15 bp, Homo sapiens
gataacgtactatag

SEQ ID NO: 833066 - DNA, 15 bp, Homo sapiens
ataacgtactataga

SEQ ID NO: 833067 - DNA, 15 bp, Homo sapiens
taacgtactatagaa

SEQ ID NO: 833068 - DNA, 15 bp, Homo sapiens
aacgtactatagaac

SEQ ID NO: 833069 - DNA, 15 bp, Homo sapiens
acgtactatagaaca

SEQ ID NO: 833070 - DNA, 15 bp, Homo sapiens
cgtactatagaacac

SEQ ID NO: 833071 - DNA, 15 bp, Homo sapiens
gtactatagaacact

SEQ ID NO: 833072 - DNA, 15 bp, Homo sapiens
tactatagaacactt

SEQ ID NO: 833073 - DNA, 15 bp, Homo sapiens
actatagaacacttt

SEQ ID NO: 833074 - DNA, 15 bp, Homo sapiens
ctatagaacactttc

SEQ ID NO: 833075 - DNA, 15 bp, Homo sapiens
tatagaacactttcc

SEQ ID NO: 833076 - DNA, 15 bp, Homo sapiens
atagaacactttcca

SEQ ID NO: 833077 - DNA, 15 bp, Homo sapiens
tagaacactttccaa

SEQ ID NO: 833078 - DNA, 15 bp, Homo sapiens
agaacactttccaaa

SEQ ID NO: 833079 - DNA, 15 bp, Homo sapiens
gaacactttccaaac

SEQ ID NO: 833080 - DNA, 15 bp, Homo sapiens
aacactttccaaacc

SEQ ID NO: 833081 - DNA, 15 bp, Homo sapiens
acactttccaaacct

SEQ ID NO: 833082 - DNA, 15 bp, Homo sapiens
cactttccaaaccta

SEQ ID NO: 833083 - DNA, 15 bp, Homo sapiens
actttccaaacctat

SEQ ID NO: 833084 - DNA, 15 bp, Homo sapiens
ctttccaaacctatt

SEQ ID NO: 833085 - DNA, 15 bp, Homo sapiens
tttccaaacctattt

SEQ ID NO: 833086 - DNA, 15 bp, Homo sapiens
ttccaaacctatttg

SEQ ID NO: 833087 - DNA, 15 bp, Homo sapiens
tccaaacctatttga

SEQ ID NO: 833088 - DNA, 15 bp, Homo sapiens
ccaaacctatttgac

SEQ ID NO: 833089 - DNA, 15 bp, Homo sapiens
caaacctatttgact

SEQ ID NO: 833090 - DNA, 15 bp, Homo sapiens
aaacctatttgacta

SEQ ID NO: 833091 - DNA, 15 bp, Homo sapiens
aacctatttgactat

SEQ ID NO: 833092 - DNA, 15 bp, Homo sapiens
acctatttgactata

SEQ ID NO: 833093 - DNA, 15 bp, Homo sapiens
cctatttgactataa

SEQ ID NO: 833094 - DNA, 15 bp, Homo sapiens
ctatttgactataag

SEQ ID NO: 833095 - DNA, 15 bp, Homo sapiens
tatttgactataagc

SEQ ID NO: 833096 - DNA, 15 bp, Homo sapiens
atttgactataagcc

SEQ ID NO: 833097 - DNA, 15 bp, Homo sapiens
tttgactataagcct

SEQ ID NO: 833098 - DNA, 15 bp, Homo sapiens
ttgactataagcctc

SEQ ID NO: 833099 - DNA, 15 bp, Homo sapiens
tgactataagcctct

SEQ ID NO: 833100 - DNA, 15 bp, Homo sapiens
gactataagcctctg

SEQ ID NO: 833101 - DNA, 15 bp, Homo sapiens
actataagcctctgc

SEQ ID NO: 833102 - DNA, 15 bp, Homo sapiens
ctataagcctctgct

SEQ ID NO: 833103 - DNA, 15 bp, Homo sapiens
tataagcctctgctc

SEQ ID NO: 833104 - DNA, 15 bp, Homo sapiens
ataagcctctgctcc

SEQ ID NO: 833105 - DNA, 15 bp, Homo sapiens
taagcctctgctcct

SEQ ID NO: 833106 - DNA, 15 bp, Homo sapiens
aagcctctgctcctc

SEQ ID NO: 833107 - DNA, 15 bp, Homo sapiens
agcctctgctcctct

SEQ ID NO: 833108 - DNA, 15 bp, Homo sapiens
gcctctgctcctctc

SEQ ID NO: 833109 - DNA, 15 bp, Homo sapiens
cctctgctcctctcc

SEQ ID NO: 833110 - DNA, 15 bp, Homo sapiens
ctctgctcctctccc

SEQ ID NO: 833111 - DNA, 15 bp, Homo sapiens
tctgctcctctccca

SEQ ID NO: 833112 - DNA, 15 bp, Homo sapiens
ctgctcctctcccac

SEQ ID NO: 833113 - DNA, 15 bp, Homo sapiens
tgctcctctcccacc

SEQ ID NO: 833114 - DNA, 15 bp, Homo sapiens
gctcctctcccacct

SEQ ID NO: 833115 - DNA, 15 bp, Homo sapiens
ctcctctcccacctc

SEQ ID NO: 833116 - DNA, 15 bp, Homo sapiens
tcctctcccacctcc

SEQ ID NO: 833117 - DNA, 15 bp, Homo sapiens
cctctcccacctccc

SEQ ID NO: 833118 - DNA, 15 bp, Homo sapiens
ctctcccacctcccc

SEQ ID NO: 833119 - DNA, 15 bp, Homo sapiens
tctcccacctccccc

SEQ ID NO: 833120 - DNA, 15 bp, Homo sapiens
tcccacctcccccaa

SEQ ID NO: 833121 - DNA, 15 bp, Homo sapiens
cccacctcccccaac

SEQ ID NO: 833122 - DNA, 15 bp, Homo sapiens
ccacctcccccaacc

SEQ ID NO: 833123 - DNA, 15 bp, Homo sapiens
cacctcccccaaccc

SEQ ID NO: 833124 - DNA, 15 bp, Homo sapiens
acctcccccaacccc

SEQ ID NO: 833125 - DNA, 15 bp, Homo sapiens
cctcccccaaccccc

SEQ ID NO: 833126 - DNA, 15 bp, Homo sapiens
ctcccccaacccccc

SEQ ID NO: 833127 - DNA, 15 bp, Homo sapiens
tcccccaaccccccc

SEQ ID NO: 833128 - DNA, 15 bp, Homo sapiens
cccccaacccccccc

SEQ ID NO: 833129 - DNA, 15 bp, Homo sapiens
ccccaaccccccccc

SEQ ID NO: 833130 - DNA, 15 bp, Homo sapiens
cccaacccccccccg

SEQ ID NO: 833131 - DNA, 15 bp, Homo sapiens
ccaacccccccccgt

SEQ ID NO: 833132 - DNA, 15 bp, Homo sapiens
caacccccccccgtt

SEQ ID NO: 833133 - DNA, 15 bp, Homo sapiens
aacccccccccgttt

SEQ ID NO: 833134 - DNA, 15 bp, Homo sapiens
acccccccccgtttt

SEQ ID NO: 833135 - DNA, 15 bp, Homo sapiens
cccccccccgttttt

SEQ ID NO: 833136 - DNA, 15 bp, Homo sapiens
ccccccccgtttttt

SEQ ID NO: 833137 - DNA, 15 bp, Homo sapiens
cccccccgttttttt

SEQ ID NO: 833138 - DNA, 15 bp, Homo sapiens
ccccccgtttttttt

SEQ ID NO: 833139 - DNA, 15 bp, Homo sapiens
cccccgttttttttc

SEQ ID NO: 833140 - DNA, 15 bp, Homo sapiens
ccccgttttttttca

SEQ ID NO: 833141 - DNA, 15 bp, Homo sapiens
cccgttttttttcat

SEQ ID NO: 833142 - DNA, 15 bp, Homo sapiens
ccgttttttttcata

SEQ ID NO: 833143 - DNA, 15 bp, Homo sapiens
cgttttttttcatag

SEQ ID NO: 833144 - DNA, 15 bp, Homo sapiens
gttttttttcataga

SEQ ID NO: 833145 - DNA, 15 bp, Homo sapiens
ttttttttcatagag

SEQ ID NO: 833146 - DNA, 15 bp, Homo sapiens
tttttttcatagaga

SEQ ID NO: 833147 - DNA, 15 bp, Homo sapiens
ttttttcatagagac

SEQ ID NO: 833148 - DNA, 15 bp, Homo sapiens
tttttcatagagaca

SEQ ID NO: 833149 - DNA, 15 bp, Homo sapiens
ttttcatagagacag

SEQ ID NO: 833150 - DNA, 15 bp, Homo sapiens
tttcatagagacaga

SEQ ID NO: 833151 - DNA, 15 bp, Homo sapiens
ttcatagagacagag

SEQ ID NO: 833152 - DNA, 15 bp, Homo sapiens
tcatagagacagagt

SEQ ID NO: 833153 - DNA, 15 bp, Homo sapiens
catagagacagagtc

SEQ ID NO: 833154 - DNA, 15 bp, Homo sapiens
atagagacagagtct

SEQ ID NO: 833155 - DNA, 15 bp, Homo sapiens
tagagacagagtctc

SEQ ID NO: 833156 - DNA, 15 bp, Homo sapiens
agagacagagtctcg

SEQ ID NO: 833157 - DNA, 15 bp, Homo sapiens
agacagagtctcgca

SEQ ID NO: 833158 - DNA, 15 bp, Homo sapiens
cagagtctcgcacta

SEQ ID NO: 833159 - DNA, 15 bp, Homo sapiens
agagtctcgcactat

SEQ ID NO: 833160 - DNA, 15 bp, Homo sapiens
gagtctcgcactatc

SEQ ID NO: 833161 - DNA, 15 bp, Homo sapiens
agtctcgcactatcg

SEQ ID NO: 833162 - DNA, 15 bp, Homo sapiens
gtctcgcactatcgc

SEQ ID NO: 833163 - DNA, 15 bp, Homo sapiens
tctcgcactatcgcc

SEQ ID NO: 833164 - DNA, 15 bp, Homo sapiens
ctcgcactatcgccc

SEQ ID NO: 833165 - DNA, 15 bp, Homo sapiens
tcgcactatcgccca

SEQ ID NO: 833166 - DNA, 15 bp, Homo sapiens
cgcactatcgcccag

SEQ ID NO: 833167 - DNA, 15 bp, Homo sapiens
gcactatcgcccagg

SEQ ID NO: 833168 - DNA, 15 bp, Homo sapiens
cactatcgcccaggc

SEQ ID NO: 833169 - DNA, 15 bp, Homo sapiens
actatcgcccaggct

SEQ ID NO: 833170 - DNA, 15 bp, Homo sapiens
ctatcgcccaggctg

SEQ ID NO: 833171 - DNA, 15 bp, Homo sapiens
tatcgcccaggctgg

SEQ ID NO: 833172 - DNA, 15 bp, Homo sapiens
atcgcccaggctgga

SEQ ID NO: 833173 - DNA, 15 bp, Homo sapiens
aggctggagtgcagg

SEQ ID NO: 833174 - DNA, 15 bp, Homo sapiens
ggctggagtgcaggg

SEQ ID NO: 833175 - DNA, 15 bp, Homo sapiens
gctggagtgcaggga

SEQ ID NO: 833176 - DNA, 15 bp, Homo sapiens
ctggagtgcagggac

SEQ ID NO: 833177 - DNA, 15 bp, Homo sapiens
tggagtgcagggact

SEQ ID NO: 833178 - DNA, 15 bp, Homo sapiens
ggagtgcagggactc

SEQ ID NO: 833179 - DNA, 15 bp, Homo sapiens
gagtgcagggactca

SEQ ID NO: 833180 - DNA, 15 bp, Homo sapiens
agtgcagggactcaa

SEQ ID NO: 833181 - DNA, 15 bp, Homo sapiens
gtgcagggactcaat

SEQ ID NO: 833182 - DNA, 15 bp, Homo sapiens
tgcagggactcaatc

SEQ ID NO: 833183 - DNA, 15 bp, Homo sapiens
gcagggactcaatca

SEQ ID NO: 833184 - DNA, 15 bp, Homo sapiens
cagggactcaatcat

SEQ ID NO: 833185 - DNA, 15 bp, Homo sapiens
agggactcaatcata

SEQ ID NO: 833186 - DNA, 15 bp, Homo sapiens
gggactcaatcatag

SEQ ID NO: 833187 - DNA, 15 bp, Homo sapiens
ggactcaatcatagc

SEQ ID NO: 833188 - DNA, 15 bp, Homo sapiens
gactcaatcatagct

SEQ ID NO: 833189 - DNA, 15 bp, Homo sapiens
actcaatcatagctc

SEQ ID NO: 833190 - DNA, 15 bp, Homo sapiens
ctcaatcatagctca

SEQ ID NO: 833191 - DNA, 15 bp, Homo sapiens
tcaatcatagctcac

SEQ ID NO: 833192 - DNA, 15 bp, Homo sapiens
aatcatagctcacta

SEQ ID NO: 833193 - DNA, 15 bp, Homo sapiens
atcatagctcactat

SEQ ID NO: 833194 - DNA, 15 bp, Homo sapiens
tcatagctcactata

SEQ ID NO: 833195 - DNA, 15 bp, Homo sapiens
catagctcactataa

SEQ ID NO: 833196 - DNA, 15 bp, Homo sapiens
atagctcactataac

SEQ ID NO: 833197 - DNA, 15 bp, Homo sapiens
tagctcactataacc

SEQ ID NO: 833198 - DNA, 15 bp, Homo sapiens
agctcactataacct

SEQ ID NO: 833199 - DNA, 15 bp, Homo sapiens
gctcactataacctt

SEQ ID NO: 833200 - DNA, 15 bp, Homo sapiens
ctcactataaccttg

SEQ ID NO: 833201 - DNA, 15 bp, Homo sapiens
tcactataaccttga

SEQ ID NO: 833202 - DNA, 15 bp, Homo sapiens
cactataaccttgaa

SEQ ID NO: 833203 - DNA, 15 bp, Homo sapiens
actataaccttgaac

SEQ ID NO: 833204 - DNA, 15 bp, Homo sapiens
ctataaccttgaact

SEQ ID NO: 833205 - DNA, 15 bp, Homo sapiens
tataaccttgaactc

SEQ ID NO: 833206 - DNA, 15 bp, Homo sapiens
ataaccttgaactcc

SEQ ID NO: 833207 - DNA, 15 bp, Homo sapiens
taaccttgaactcct

SEQ ID NO: 833208 - DNA, 15 bp, Homo sapiens
aaccttgaactcctg

SEQ ID NO: 833209 - DNA, 15 bp, Homo sapiens
accttgaactcctga

SEQ ID NO: 833210 - DNA, 15 bp, Homo sapiens
ttgaactcctgagcc

SEQ ID NO: 833211 - DNA, 15 bp, Homo sapiens
tgaactcctgagccc

SEQ ID NO: 833212 - DNA, 15 bp, Homo sapiens
gaactcctgagccca

SEQ ID NO: 833213 - DNA, 15 bp, Homo sapiens
aactcctgagcccaa

SEQ ID NO: 833214 - DNA, 15 bp, Homo sapiens
actcctgagcccaaa

SEQ ID NO: 833215 - DNA, 15 bp, Homo sapiens
ctcctgagcccaaac

SEQ ID NO: 833216 - DNA, 15 bp, Homo sapiens
tcctgagcccaaacg

SEQ ID NO: 833217 - DNA, 15 bp, Homo sapiens
cctgagcccaaacga

SEQ ID NO: 833218 - DNA, 15 bp, Homo sapiens
ctgagcccaaacgat

SEQ ID NO: 833219 - DNA, 15 bp, Homo sapiens
tgagcccaaacgatc

SEQ ID NO: 833220 - DNA, 15 bp, Homo sapiens
gagcccaaacgatcc

SEQ ID NO: 833221 - DNA, 15 bp, Homo sapiens
agcccaaacgatcct

SEQ ID NO: 833222 - DNA, 15 bp, Homo sapiens
gcccaaacgatcctc

SEQ ID NO: 833223 - DNA, 15 bp, Homo sapiens
cccaaacgatcctct

SEQ ID NO: 833224 - DNA, 15 bp, Homo sapiens
ccaaacgatcctctc

SEQ ID NO: 833225 - DNA, 15 bp, Homo sapiens
caaacgatcctctca

SEQ ID NO: 833226 - DNA, 15 bp, Homo sapiens
aaacgatcctctcac

SEQ ID NO: 833227 - DNA, 15 bp, Homo sapiens
aacgatcctctcacc

SEQ ID NO: 833228 - DNA, 15 bp, Homo sapiens
acgatcctctcacct

SEQ ID NO: 833229 - DNA, 15 bp, Homo sapiens
cgatcctctcacctc

SEQ ID NO: 833230 - DNA, 15 bp, Homo sapiens
gatcctctcacctca

SEQ ID NO: 833231 - DNA, 15 bp, Homo sapiens
atcctctcacctcag

SEQ ID NO: 833232 - DNA, 15 bp, Homo sapiens
tcctctcacctcagc

SEQ ID NO: 833233 - DNA, 15 bp, Homo sapiens
cctctcacctcagcc

SEQ ID NO: 833234 - DNA, 15 bp, Homo sapiens
ctctcacctcagcct

SEQ ID NO: 833235 - DNA, 15 bp, Homo sapiens
tctcacctcagcctc

SEQ ID NO: 833236 - DNA, 15 bp, Homo sapiens
ctcacctcagcctcc

SEQ ID NO: 833237 - DNA, 15 bp, Homo sapiens
tcacctcagcctccc

SEQ ID NO: 833238 - DNA, 15 bp, Homo sapiens
gcctcccaagtagcc

SEQ ID NO: 833239 - DNA, 15 bp, Homo sapiens
cctcccaagtagccg

SEQ ID NO: 833240 - DNA, 15 bp, Homo sapiens
ctcccaagtagccga

SEQ ID NO: 833241 - DNA, 15 bp, Homo sapiens
tcccaagtagccgag

SEQ ID NO: 833242 - DNA, 15 bp, Homo sapiens
cccaagtagccgagg

SEQ ID NO: 833243 - DNA, 15 bp, Homo sapiens
ccaagtagccgaggc

SEQ ID NO: 833244 - DNA, 15 bp, Homo sapiens
caagtagccgaggct

SEQ ID NO: 833245 - DNA, 15 bp, Homo sapiens
aagtagccgaggcta

SEQ ID NO: 833246 - DNA, 15 bp, Homo sapiens
agtagccgaggctat

SEQ ID NO: 833247 - DNA, 15 bp, Homo sapiens
gtagccgaggctata

SEQ ID NO: 833248 - DNA, 15 bp, Homo sapiens
tagccgaggctatag

SEQ ID NO: 833249 - DNA, 15 bp, Homo sapiens
agccgaggctatagg

SEQ ID NO: 833250 - DNA, 15 bp, Homo sapiens
gccgaggctatagga

SEQ ID NO: 833251 - DNA, 15 bp, Homo sapiens
ccgaggctataggaa

SEQ ID NO: 833252 - DNA, 15 bp, Homo sapiens
cgaggctataggaat

SEQ ID NO: 833253 - DNA, 15 bp, Homo sapiens
gaggctataggaatg

SEQ ID NO: 833254 - DNA, 15 bp, Homo sapiens
aggctataggaatgt

SEQ ID NO: 833255 - DNA, 15 bp, Homo sapiens
ggctataggaatgtg

SEQ ID NO: 833256 - DNA, 15 bp, Homo sapiens
gctataggaatgtgc

SEQ ID NO: 833257 - DNA, 15 bp, Homo sapiens
ctataggaatgtgcc

SEQ ID NO: 833258 - DNA, 15 bp, Homo sapiens
tataggaatgtgcca

SEQ ID NO: 833259 - DNA, 15 bp, Homo sapiens
ataggaatgtgccac

SEQ ID NO: 833260 - DNA, 15 bp, Homo sapiens
taggaatgtgccacc

SEQ ID NO: 833261 - DNA, 15 bp, Homo sapiens
aggaatgtgccacca

SEQ ID NO: 833262 - DNA, 15 bp, Homo sapiens
ggaatgtgccaccac

SEQ ID NO: 833263 - DNA, 15 bp, Homo sapiens
gaatgtgccaccaca

SEQ ID NO: 833264 - DNA, 15 bp, Homo sapiens
aatgtgccaccacac

SEQ ID NO: 833265 - DNA, 15 bp, Homo sapiens
atgtgccaccacaca

SEQ ID NO: 833266 - DNA, 15 bp, Homo sapiens
tgtgccaccacacat

SEQ ID NO: 833267 - DNA, 15 bp, Homo sapiens
gtgccaccacacatg

SEQ ID NO: 833268 - DNA, 15 bp, Homo sapiens
tgccaccacacatgg

SEQ ID NO: 833269 - DNA, 15 bp, Homo sapiens
gccaccacacatggc

SEQ ID NO: 833270 - DNA, 15 bp, Homo sapiens
ccaccacacatggcc

SEQ ID NO: 833271 - DNA, 15 bp, Homo sapiens
caccacacatggcca

SEQ ID NO: 833272 - DNA, 15 bp, Homo sapiens
accacacatggccaa

SEQ ID NO: 833273 - DNA, 15 bp, Homo sapiens
ccacacatggccaat

SEQ ID NO: 833274 - DNA, 15 bp, Homo sapiens
cacacatggccaatt

SEQ ID NO: 833275 - DNA, 15 bp, Homo sapiens
acacatggccaattt

SEQ ID NO: 833276 - DNA, 15 bp, Homo sapiens
cacatggccaatttt

SEQ ID NO: 833277 - DNA, 15 bp, Homo sapiens
acatggccaattttt

SEQ ID NO: 833278 - DNA, 15 bp, Homo sapiens
catggccaattttta

SEQ ID NO: 833279 - DNA, 15 bp, Homo sapiens
atggccaatttttag

SEQ ID NO: 833280 - DNA, 15 bp, Homo sapiens
tggccaatttttaga

SEQ ID NO: 833281 - DNA, 15 bp, Homo sapiens
ggccaatttttagat

SEQ ID NO: 833282 - DNA, 15 bp, Homo sapiens
gccaatttttagatt

SEQ ID NO: 833283 - DNA, 15 bp, Homo sapiens
ccaatttttagattt

SEQ ID NO: 833284 - DNA, 15 bp, Homo sapiens
caatttttagatttt

SEQ ID NO: 833285 - DNA, 15 bp, Homo sapiens
aatttttagattttt

SEQ ID NO: 833286 - DNA, 15 bp, Homo sapiens
atttttagatttttt

SEQ ID NO: 833287 - DNA, 15 bp, Homo sapiens
tttttagattttttt

SEQ ID NO: 833288 - DNA, 15 bp, Homo sapiens
agattttttttttta

SEQ ID NO: 833289 - DNA, 15 bp, Homo sapiens
gatttttttttttag

SEQ ID NO: 833290 - DNA, 15 bp, Homo sapiens
atttttttttttagt

SEQ ID NO: 833291 - DNA, 15 bp, Homo sapiens
tttttttttttagta

SEQ ID NO: 833292 - DNA, 15 bp, Homo sapiens
ttttttttttagtag

SEQ ID NO: 833293 - DNA, 15 bp, Homo sapiens
tttttttttagtagg

SEQ ID NO: 833294 - DNA, 15 bp, Homo sapiens
ttttttttagtaggg

SEQ ID NO: 833295 - DNA, 15 bp, Homo sapiens
tttttttagtaggga

SEQ ID NO: 833296 - DNA, 15 bp, Homo sapiens
ttttttagtagggac

SEQ ID NO: 833297 - DNA, 15 bp, Homo sapiens
tttttagtagggaca

SEQ ID NO: 833298 - DNA, 15 bp, Homo sapiens
ttttagtagggacag

SEQ ID NO: 833299 - DNA, 15 bp, Homo sapiens
tttagtagggacagg

SEQ ID NO: 833300 - DNA, 15 bp, Homo sapiens
ttagtagggacaggg

SEQ ID NO: 833301 - DNA, 15 bp, Homo sapiens
tagtagggacagggt

SEQ ID NO: 833302 - DNA, 15 bp, Homo sapiens
agtagggacagggtc

SEQ ID NO: 833303 - DNA, 15 bp, Homo sapiens
gtagggacagggtct

SEQ ID NO: 833304 - DNA, 15 bp, Homo sapiens
tagggacagggtctt

SEQ ID NO: 833305 - DNA, 15 bp, Homo sapiens
agggacagggtcttg

SEQ ID NO: 833306 - DNA, 15 bp, Homo sapiens
gggacagggtcttgc

SEQ ID NO: 833307 - DNA, 15 bp, Homo sapiens
ggacagggtcttgct

SEQ ID NO: 833308 - DNA, 15 bp, Homo sapiens
gacagggtcttgcta

SEQ ID NO: 833309 - DNA, 15 bp, Homo sapiens
acagggtcttgctat

SEQ ID NO: 833310 - DNA, 15 bp, Homo sapiens
cagggtcttgctatg

SEQ ID NO: 833311 - DNA, 15 bp, Homo sapiens
agggtcttgctatgt

SEQ ID NO: 833312 - DNA, 15 bp, Homo sapiens
tgttgcccaggctga

SEQ ID NO: 833313 - DNA, 15 bp, Homo sapiens
gttgcccaggctgat

SEQ ID NO: 833314 - DNA, 15 bp, Homo sapiens
ttgcccaggctgatc

SEQ ID NO: 833315 - DNA, 15 bp, Homo sapiens
tgcccaggctgatct

SEQ ID NO: 833316 - DNA, 15 bp, Homo sapiens
gcccaggctgatctc

SEQ ID NO: 833317 - DNA, 15 bp, Homo sapiens
cccaggctgatctca

SEQ ID NO: 833318 - DNA, 15 bp, Homo sapiens
ccaggctgatctcaa

SEQ ID NO: 833319 - DNA, 15 bp, Homo sapiens
caggctgatctcaac

SEQ ID NO: 833320 - DNA, 15 bp, Homo sapiens
aggctgatctcaacg

SEQ ID NO: 833321 - DNA, 15 bp, Homo sapiens
ggctgatctcaacga

SEQ ID NO: 833322 - DNA, 15 bp, Homo sapiens
gctgatctcaacgaa

SEQ ID NO: 833323 - DNA, 15 bp, Homo sapiens
ctgatctcaacgaac

SEQ ID NO: 833324 - DNA, 15 bp, Homo sapiens
tgatctcaacgaact

SEQ ID NO: 833325 - DNA, 15 bp, Homo sapiens
gatctcaacgaactc

SEQ ID NO: 833326 - DNA, 15 bp, Homo sapiens
atctcaacgaactcc

SEQ ID NO: 833327 - DNA, 15 bp, Homo sapiens
tctcaacgaactcct

SEQ ID NO: 833328 - DNA, 15 bp, Homo sapiens
ctcaacgaactccta

SEQ ID NO: 833329 - DNA, 15 bp, Homo sapiens
tcaacgaactcctaa

SEQ ID NO: 833330 - DNA, 15 bp, Homo sapiens
caacgaactcctaac

SEQ ID NO: 833331 - DNA, 15 bp, Homo sapiens
aacgaactcctaacc

SEQ ID NO: 833332 - DNA, 15 bp, Homo sapiens
acgaactcctaacct

SEQ ID NO: 833333 - DNA, 15 bp, Homo sapiens
cgaactcctaacctc

SEQ ID NO: 833334 - DNA, 15 bp, Homo sapiens
gaactcctaacctca

SEQ ID NO: 833335 - DNA, 15 bp, Homo sapiens
aactcctaacctcaa

SEQ ID NO: 833336 - DNA, 15 bp, Homo sapiens
actcctaacctcaag

SEQ ID NO: 833337 - DNA, 15 bp, Homo sapiens
ctcctaacctcaagt

SEQ ID NO: 833338 - DNA, 15 bp, Homo sapiens
tcctaacctcaagtg

SEQ ID NO: 833339 - DNA, 15 bp, Homo sapiens
cctaacctcaagtga

SEQ ID NO: 833340 - DNA, 15 bp, Homo sapiens
ctaacctcaagtgat

SEQ ID NO: 833341 - DNA, 15 bp, Homo sapiens
taacctcaagtgatc

SEQ ID NO: 833342 - DNA, 15 bp, Homo sapiens
aacctcaagtgatcc

SEQ ID NO: 833343 - DNA, 15 bp, Homo sapiens
acctcaagtgatcct

SEQ ID NO: 833344 - DNA, 15 bp, Homo sapiens
agtgatcctcccacc

SEQ ID NO: 833345 - DNA, 15 bp, Homo sapiens
gtgatcctcccacct

SEQ ID NO: 833346 - DNA, 15 bp, Homo sapiens
tgatcctcccacctg

SEQ ID NO: 833347 - DNA, 15 bp, Homo sapiens
gatcctcccacctgg

SEQ ID NO: 833348 - DNA, 15 bp, Homo sapiens
atcctcccacctggg

SEQ ID NO: 833349 - DNA, 15 bp, Homo sapiens
tcctcccacctgggc

SEQ ID NO: 833350 - DNA, 15 bp, Homo sapiens
cctcccacctgggca

SEQ ID NO: 833351 - DNA, 15 bp, Homo sapiens
ctcccacctgggcat

SEQ ID NO: 833352 - DNA, 15 bp, Homo sapiens
tcccacctgggcatc

SEQ ID NO: 833353 - DNA, 15 bp, Homo sapiens
cccacctgggcatcc

SEQ ID NO: 833354 - DNA, 15 bp, Homo sapiens
ccacctgggcatccc

SEQ ID NO: 833355 - DNA, 15 bp, Homo sapiens
cacctgggcatccca

SEQ ID NO: 833356 - DNA, 15 bp, Homo sapiens
acctgggcatcccaa

SEQ ID NO: 833357 - DNA, 15 bp, Homo sapiens
cctgggcatcccaaa

SEQ ID NO: 833358 - DNA, 15 bp, Homo sapiens
ctgggcatcccaaaa

SEQ ID NO: 833359 - DNA, 15 bp, Homo sapiens
tgggcatcccaaaac

SEQ ID NO: 833360 - DNA, 15 bp, Homo sapiens
gggcatcccaaaact

SEQ ID NO: 833361 - DNA, 15 bp, Homo sapiens
ggcatcccaaaactc

SEQ ID NO: 833362 - DNA, 15 bp, Homo sapiens
gcatcccaaaactct

SEQ ID NO: 833363 - DNA, 15 bp, Homo sapiens
catcccaaaactctg

SEQ ID NO: 833364 - DNA, 15 bp, Homo sapiens
atcccaaaactctgg

SEQ ID NO: 833365 - DNA, 15 bp, Homo sapiens
tcccaaaactctgga

SEQ ID NO: 833366 - DNA, 15 bp, Homo sapiens
cccaaaactctggat

SEQ ID NO: 833367 - DNA, 15 bp, Homo sapiens
ccaaaactctggatt

SEQ ID NO: 833368 - DNA, 15 bp, Homo sapiens
caaaactctggatta

SEQ ID NO: 833369 - DNA, 15 bp, Homo sapiens
aaaactctggattac

SEQ ID NO: 833370 - DNA, 15 bp, Homo sapiens
aaactctggattaca

SEQ ID NO: 833371 - DNA, 15 bp, Homo sapiens
aactctggattacag

SEQ ID NO: 833372 - DNA, 15 bp, Homo sapiens
actctggattacagg

SEQ ID NO: 833373 - DNA, 15 bp, Homo sapiens
ctctggattacagga

SEQ ID NO: 833374 - DNA, 15 bp, Homo sapiens
tctggattacaggag

SEQ ID NO: 833375 - DNA, 15 bp, Homo sapiens
ctggattacaggagt

SEQ ID NO: 833376 - DNA, 15 bp, Homo sapiens
tggattacaggagtg

SEQ ID NO: 833377 - DNA, 15 bp, Homo sapiens
ggattacaggagtgt

SEQ ID NO: 833378 - DNA, 15 bp, Homo sapiens
gattacaggagtgtg

SEQ ID NO: 833379 - DNA, 15 bp, Homo sapiens
attacaggagtgtgc

SEQ ID NO: 833380 - DNA, 15 bp, Homo sapiens
ttacaggagtgtgcc

SEQ ID NO: 833381 - DNA, 15 bp, Homo sapiens
tacaggagtgtgccg

SEQ ID NO: 833382 - DNA, 15 bp, Homo sapiens
acaggagtgtgccgc

SEQ ID NO: 833383 - DNA, 15 bp, Homo sapiens
caggagtgtgccgct

SEQ ID NO: 833384 - DNA, 15 bp, Homo sapiens
aggagtgtgccgctg

SEQ ID NO: 833385 - DNA, 15 bp, Homo sapiens
ggagtgtgccgctgt

SEQ ID NO: 833386 - DNA, 15 bp, Homo sapiens
gagtgtgccgctgtg

SEQ ID NO: 833387 - DNA, 15 bp, Homo sapiens
agtgtgccgctgtgg

SEQ ID NO: 833388 - DNA, 15 bp, Homo sapiens
gtgtgccgctgtggc

SEQ ID NO: 833389 - DNA, 15 bp, Homo sapiens
tgtgccgctgtggcc

SEQ ID NO: 833390 - DNA, 15 bp, Homo sapiens
gtgccgctgtggccc

SEQ ID NO: 833391 - DNA, 15 bp, Homo sapiens
tgccgctgtggccct

SEQ ID NO: 833392 - DNA, 15 bp, Homo sapiens
gccgctgtggccctg

SEQ ID NO: 833393 - DNA, 15 bp, Homo sapiens
ccgctgtggccctgc

SEQ ID NO: 833394 - DNA, 15 bp, Homo sapiens
cgctgtggccctgcc

SEQ ID NO: 833395 - DNA, 15 bp, Homo sapiens
gctgtggccctgccc

SEQ ID NO: 833396 - DNA, 15 bp, Homo sapiens
ctgtggccctgccct

SEQ ID NO: 833397 - DNA, 15 bp, Homo sapiens
tgtggccctgccctg

SEQ ID NO: 833398 - DNA, 15 bp, Homo sapiens
gtggccctgccctgc

SEQ ID NO: 833399 - DNA, 15 bp, Homo sapiens
tggccctgccctgcc

SEQ ID NO: 833400 - DNA, 15 bp, Homo sapiens
ggccctgccctgccc

SEQ ID NO: 833401 - DNA, 15 bp, Homo sapiens
gccctgccctgccct

SEQ ID NO: 833402 - DNA, 15 bp, Homo sapiens
ccctgccctgccctg

SEQ ID NO: 833403 - DNA, 15 bp, Homo sapiens
cctgccctgccctgc

SEQ ID NO: 833404 - DNA, 15 bp, Homo sapiens
ctgccctgccctgcc

SEQ ID NO: 833405 - DNA, 15 bp, Homo sapiens
tgccctgccctgccc

SEQ ID NO: 833406 - DNA, 15 bp, Homo sapiens
ccctgccctgccctc

SEQ ID NO: 833407 - DNA, 15 bp, Homo sapiens
cctgccctgccctcc

SEQ ID NO: 833408 - DNA, 15 bp, Homo sapiens
ctgccctgccctccc

SEQ ID NO: 833409 - DNA, 15 bp, Homo sapiens
tgccctgccctccct

SEQ ID NO: 833410 - DNA, 15 bp, Homo sapiens
gccctgccctccctt

SEQ ID NO: 833411 - DNA, 15 bp, Homo sapiens
ccctgccctcccttt

SEQ ID NO: 833412 - DNA, 15 bp, Homo sapiens
cctgccctccctttt

SEQ ID NO: 833413 - DNA, 15 bp, Homo sapiens
ctgccctcccttttt

SEQ ID NO: 833414 - DNA, 15 bp, Homo sapiens
tgccctccctttttt

SEQ ID NO: 833415 - DNA, 15 bp, Homo sapiens
gccctcccttttttt

SEQ ID NO: 833416 - DNA, 15 bp, Homo sapiens
ccctccctttttttt

SEQ ID NO: 833417 - DNA, 15 bp, Homo sapiens
cctcccttttttttt

SEQ ID NO: 833418 - DNA, 15 bp, Homo sapiens
ctccctttttttttt

SEQ ID NO: 833419 - DNA, 15 bp, Homo sapiens
tttttttttttacag

SEQ ID NO: 833420 - DNA, 15 bp, Homo sapiens
ttttttttttacaga

SEQ ID NO: 833421 - DNA, 15 bp, Homo sapiens
tttttttttacagaa

SEQ ID NO: 833422 - DNA, 15 bp, Homo sapiens
ttttttttacagaac

SEQ ID NO: 833423 - DNA, 15 bp, Homo sapiens
tttttttacagaaca

SEQ ID NO: 833424 - DNA, 15 bp, Homo sapiens
ttttttacagaacat

SEQ ID NO: 833425 - DNA, 15 bp, Homo sapiens
tttttacagaacatc

SEQ ID NO: 833426 - DNA, 15 bp, Homo sapiens
ttttacagaacatct

SEQ ID NO: 833427 - DNA, 15 bp, Homo sapiens
tttacagaacatcta

SEQ ID NO: 833428 - DNA, 15 bp, Homo sapiens
ttacagaacatctag

SEQ ID NO: 833429 - DNA, 15 bp, Homo sapiens
tacagaacatctagg

SEQ ID NO: 833430 - DNA, 15 bp, Homo sapiens
acagaacatctaggg

SEQ ID NO: 833431 - DNA, 15 bp, Homo sapiens
cagaacatctagggg

SEQ ID NO: 833432 - DNA, 15 bp, Homo sapiens
agaacatctagggga

SEQ ID NO: 833433 - DNA, 15 bp, Homo sapiens
gaacatctaggggag

SEQ ID NO: 833434 - DNA, 15 bp, Homo sapiens
aacatctaggggagg

SEQ ID NO: 833435 - DNA, 15 bp, Homo sapiens
acatctaggggaggt

SEQ ID NO: 833436 - DNA, 15 bp, Homo sapiens
catctaggggaggtc

SEQ ID NO: 833437 - DNA, 15 bp, Homo sapiens
atctaggggaggtca

SEQ ID NO: 833438 - DNA, 15 bp, Homo sapiens
tctaggggaggtcat

SEQ ID NO: 833439 - DNA, 15 bp, Homo sapiens
ctaggggaggtcata

SEQ ID NO: 833440 - DNA, 15 bp, Homo sapiens
taggggaggtcatac

SEQ ID NO: 833441 - DNA, 15 bp, Homo sapiens
aggggaggtcatact

SEQ ID NO: 833442 - DNA, 15 bp, Homo sapiens
ggggaggtcatactg

SEQ ID NO: 833443 - DNA, 15 bp, Homo sapiens
gggaggtcatactgg

SEQ ID NO: 833444 - DNA, 15 bp, Homo sapiens
ggaggtcatactggg

SEQ ID NO: 833445 - DNA, 15 bp, Homo sapiens
gaggtcatactggga

SEQ ID NO: 833446 - DNA, 15 bp, Homo sapiens
aggtcatactgggaa

SEQ ID NO: 833447 - DNA, 15 bp, Homo sapiens
ggtcatactgggaaa

SEQ ID NO: 833448 - DNA, 15 bp, Homo sapiens
gtcatactgggaaac

SEQ ID NO: 833449 - DNA, 15 bp, Homo sapiens
tcatactgggaaaca

SEQ ID NO: 833450 - DNA, 15 bp, Homo sapiens
catactgggaaacac

SEQ ID NO: 833451 - DNA, 15 bp, Homo sapiens
atactgggaaacact

SEQ ID NO: 833452 - DNA, 15 bp, Homo sapiens
tactgggaaacactg

SEQ ID NO: 833453 - DNA, 15 bp, Homo sapiens
actgggaaacactgt

SEQ ID NO: 833454 - DNA, 15 bp, Homo sapiens
ctgggaaacactgtg

SEQ ID NO: 833455 - DNA, 15 bp, Homo sapiens
tgggaaacactgtgc

SEQ ID NO: 833456 - DNA, 15 bp, Homo sapiens
gggaaacactgtgca

SEQ ID NO: 833457 - DNA, 15 bp, Homo sapiens
ggaaacactgtgcag

SEQ ID NO: 833458 - DNA, 15 bp, Homo sapiens
gaaacactgtgcagt

SEQ ID NO: 833459 - DNA, 15 bp, Homo sapiens
aaacactgtgcagtg

SEQ ID NO: 833460 - DNA, 15 bp, Homo sapiens
aacactgtgcagtgc

SEQ ID NO: 833461 - DNA, 15 bp, Homo sapiens
acactgtgcagtgct

SEQ ID NO: 833462 - DNA, 15 bp, Homo sapiens
cactgtgcagtgctt

SEQ ID NO: 833463 - DNA, 15 bp, Homo sapiens
actgtgcagtgcttt

SEQ ID NO: 833464 - DNA, 15 bp, Homo sapiens
ctgtgcagtgctttt

SEQ ID NO: 833465 - DNA, 15 bp, Homo sapiens
tgtgcagtgcttttt

SEQ ID NO: 833466 - DNA, 15 bp, Homo sapiens
gtgcagtgctttttg

SEQ ID NO: 833467 - DNA, 15 bp, Homo sapiens
tgcagtgctttttgt

SEQ ID NO: 833468 - DNA, 15 bp, Homo sapiens
gcagtgctttttgtg

SEQ ID NO: 833469 - DNA, 15 bp, Homo sapiens
cagtgctttttgtgc

SEQ ID NO: 833470 - DNA, 15 bp, Homo sapiens
agtgctttttgtgca

SEQ ID NO: 833471 - DNA, 15 bp, Homo sapiens
gtgctttttgtgcac

SEQ ID NO: 833472 - DNA, 15 bp, Homo sapiens
tgctttttgtgcaca

SEQ ID NO: 833473 - DNA, 15 bp, Homo sapiens
gctttttgtgcacaa

SEQ ID NO: 833474 - DNA, 15 bp, Homo sapiens
ctttttgtgcacaag

SEQ ID NO: 833475 - DNA, 15 bp, Homo sapiens
tttttgtgcacaagg

SEQ ID NO: 833476 - DNA, 15 bp, Homo sapiens
ttttgtgcacaaggg

SEQ ID NO: 833477 - DNA, 15 bp, Homo sapiens
tttgtgcacaagggt

SEQ ID NO: 833478 - DNA, 15 bp, Homo sapiens
ttgtgcacaagggtt

SEQ ID NO: 833479 - DNA, 15 bp, Homo sapiens
tgtgcacaagggtta

SEQ ID NO: 833480 - DNA, 15 bp, Homo sapiens
gtgcacaagggttag

SEQ ID NO: 833481 - DNA, 15 bp, Homo sapiens
tgcacaagggttagg

SEQ ID NO: 833482 - DNA, 15 bp, Homo sapiens
gcacaagggttaggc

SEQ ID NO: 833483 - DNA, 15 bp, Homo sapiens
cacaagggttaggcc

SEQ ID NO: 833484 - DNA, 15 bp, Homo sapiens
acaagggttaggcct

SEQ ID NO: 833485 - DNA, 15 bp, Homo sapiens
caagggttaggcctg

SEQ ID NO: 833486 - DNA, 15 bp, Homo sapiens
aagggttaggcctgt

SEQ ID NO: 833487 - DNA, 15 bp, Homo sapiens
agggttaggcctgtc

SEQ ID NO: 833488 - DNA, 15 bp, Homo sapiens
gggttaggcctgtca

SEQ ID NO: 833489 - DNA, 15 bp, Homo sapiens
ggttaggcctgtcaa

SEQ ID NO: 833490 - DNA, 15 bp, Homo sapiens
gttaggcctgtcaac

SEQ ID NO: 833491 - DNA, 15 bp, Homo sapiens
ttaggcctgtcaact

SEQ ID NO: 833492 - DNA, 15 bp, Homo sapiens
taggcctgtcaactg

SEQ ID NO: 833493 - DNA, 15 bp, Homo sapiens
aggcctgtcaactgc

SEQ ID NO: 833494 - DNA, 15 bp, Homo sapiens
ggcctgtcaactgct

SEQ ID NO: 833495 - DNA, 15 bp, Homo sapiens
gcctgtcaactgcta

SEQ ID NO: 833496 - DNA, 15 bp, Homo sapiens
cctgtcaactgctaa

SEQ ID NO: 833497 - DNA, 15 bp, Homo sapiens
ctgtcaactgctaat

SEQ ID NO: 833498 - DNA, 15 bp, Homo sapiens
tgtcaactgctaata

SEQ ID NO: 833499 - DNA, 15 bp, Homo sapiens
gtcaactgctaatat

SEQ ID NO: 833500 - DNA, 15 bp, Homo sapiens
tcaactgctaatatt

SEQ ID NO: 833501 - DNA, 15 bp, Homo sapiens
caactgctaatattg

SEQ ID NO: 833502 - DNA, 15 bp, Homo sapiens
aactgctaatattgg

SEQ ID NO: 833503 - DNA, 15 bp, Homo sapiens
actgctaatattggc

SEQ ID NO: 833504 - DNA, 15 bp, Homo sapiens
ctgctaatattggcc

SEQ ID NO: 833505 - DNA, 15 bp, Homo sapiens
tgctaatattggccc

SEQ ID NO: 833506 - DNA, 15 bp, Homo sapiens
gctaatattggcccc

SEQ ID NO: 833507 - DNA, 15 bp, Homo sapiens
ctaatattggcccca

SEQ ID NO: 833508 - DNA, 15 bp, Homo sapiens
taatattggccccaa

SEQ ID NO: 833509 - DNA, 15 bp, Homo sapiens
aatattggccccaac

SEQ ID NO: 833510 - DNA, 15 bp, Homo sapiens
atattggccccaaca

SEQ ID NO: 833511 - DNA, 15 bp, Homo sapiens
tattggccccaacac

SEQ ID NO: 833512 - DNA, 15 bp, Homo sapiens
attggccccaacacc

SEQ ID NO: 833513 - DNA, 15 bp, Homo sapiens
ttggccccaacacca

SEQ ID NO: 833514 - DNA, 15 bp, Homo sapiens
tggccccaacaccag

SEQ ID NO: 833515 - DNA, 15 bp, Homo sapiens
ggccccaacaccagc

SEQ ID NO: 833516 - DNA, 15 bp, Homo sapiens
gccccaacaccagca

SEQ ID NO: 833517 - DNA, 15 bp, Homo sapiens
ccccaacaccagcac

SEQ ID NO: 833518 - DNA, 15 bp, Homo sapiens
cccaacaccagcacc

SEQ ID NO: 833519 - DNA, 15 bp, Homo sapiens
ccaacaccagcacct

SEQ ID NO: 833520 - DNA, 15 bp, Homo sapiens
caacaccagcacctt

SEQ ID NO: 833521 - DNA, 15 bp, Homo sapiens
aacaccagcacctta

SEQ ID NO: 833522 - DNA, 15 bp, Homo sapiens
acaccagcaccttat

SEQ ID NO: 833523 - DNA, 15 bp, Homo sapiens
caccagcaccttatt

SEQ ID NO: 833524 - DNA, 15 bp, Homo sapiens
accagcaccttattc

SEQ ID NO: 833525 - DNA, 15 bp, Homo sapiens
ccagcaccttattct

SEQ ID NO: 833526 - DNA, 15 bp, Homo sapiens
cagcaccttattctt

SEQ ID NO: 833527 - DNA, 15 bp, Homo sapiens
agcaccttattcttt

SEQ ID NO: 833528 - DNA, 15 bp, Homo sapiens
gcaccttattctttt

SEQ ID NO: 833529 - DNA, 15 bp, Homo sapiens
caccttattcttttc

SEQ ID NO: 833530 - DNA, 15 bp, Homo sapiens
accttattcttttct

SEQ ID NO: 833531 - DNA, 15 bp, Homo sapiens
ccttattcttttctt

SEQ ID NO: 833532 - DNA, 15 bp, Homo sapiens
cttattcttttctta

SEQ ID NO: 833533 - DNA, 15 bp, Homo sapiens
ttattcttttcttaa

SEQ ID NO: 833534 - DNA, 15 bp, Homo sapiens
tattcttttcttaat

SEQ ID NO: 833535 - DNA, 15 bp, Homo sapiens
attcttttcttaatt

SEQ ID NO: 833536 - DNA, 15 bp, Homo sapiens
ttcttttcttaattc

SEQ ID NO: 833537 - DNA, 15 bp, Homo sapiens
tcttttcttaattca

SEQ ID NO: 833538 - DNA, 15 bp, Homo sapiens
cttttcttaattcag

SEQ ID NO: 833539 - DNA, 15 bp, Homo sapiens
ttttcttaattcaga

SEQ ID NO: 833540 - DNA, 15 bp, Homo sapiens
tttcttaattcagaa

SEQ ID NO: 833541 - DNA, 15 bp, Homo sapiens
ttcttaattcagaaa

SEQ ID NO: 833542 - DNA, 15 bp, Homo sapiens
tcttaattcagaaaa

SEQ ID NO: 833543 - DNA, 15 bp, Homo sapiens
cttaattcagaaaaa

SEQ ID NO: 833544 - DNA, 15 bp, Homo sapiens
ttaattcagaaaaaa

SEQ ID NO: 833545 - DNA, 15 bp, Homo sapiens
taattcagaaaaaaa

SEQ ID NO: 833546 - DNA, 15 bp, Homo sapiens
aattcagaaaaaaag

SEQ ID NO: 833547 - DNA, 15 bp, Homo sapiens
attcagaaaaaaagc

SEQ ID NO: 833548 - DNA, 15 bp, Homo sapiens
ttcagaaaaaaagca

SEQ ID NO: 833549 - DNA, 15 bp, Homo sapiens
tcagaaaaaaagcaa

SEQ ID NO: 833550 - DNA, 15 bp, Homo sapiens
cagaaaaaaagcaat

SEQ ID NO: 833551 - DNA, 15 bp, Homo sapiens
agaaaaaaagcaatt

SEQ ID NO: 833552 - DNA, 15 bp, Homo sapiens
gaaaaaaagcaattg

SEQ ID NO: 833553 - DNA, 15 bp, Homo sapiens
aaaaaaagcaattgt

SEQ ID NO: 833554 - DNA, 15 bp, Homo sapiens
aaaaaagcaattgtt

SEQ ID NO: 833555 - DNA, 15 bp, Homo sapiens
aaaaagcaattgttc

SEQ ID NO: 833556 - DNA, 15 bp, Homo sapiens
aaaagcaattgttca

SEQ ID NO: 833557 - DNA, 15 bp, Homo sapiens
aaagcaattgttcag

SEQ ID NO: 833558 - DNA, 15 bp, Homo sapiens
aagcaattgttcagt

SEQ ID NO: 833559 - DNA, 15 bp, Homo sapiens
agcaattgttcagtt

SEQ ID NO: 833560 - DNA, 15 bp, Homo sapiens
gcaattgttcagttt

SEQ ID NO: 833561 - DNA, 15 bp, Homo sapiens
caattgttcagtttt

SEQ ID NO: 833562 - DNA, 15 bp, Homo sapiens
aattgttcagttttt

SEQ ID NO: 833563 - DNA, 15 bp, Homo sapiens
attgttcagtttttg

SEQ ID NO: 833564 - DNA, 15 bp, Homo sapiens
ttgttcagtttttgt

SEQ ID NO: 833565 - DNA, 15 bp, Homo sapiens
tgttcagtttttgtt

SEQ ID NO: 833566 - DNA, 15 bp, Homo sapiens
gttcagtttttgttc

SEQ ID NO: 833567 - DNA, 15 bp, Homo sapiens
ttcagtttttgttcc

SEQ ID NO: 833568 - DNA, 15 bp, Homo sapiens
tcagtttttgttcct

SEQ ID NO: 833569 - DNA, 15 bp, Homo sapiens
cagtttttgttcctt

SEQ ID NO: 833570 - DNA, 15 bp, Homo sapiens
agtttttgttccttg

SEQ ID NO: 833571 - DNA, 15 bp, Homo sapiens
gtttttgttccttgc

SEQ ID NO: 833572 - DNA, 15 bp, Homo sapiens
tttttgttccttgca

SEQ ID NO: 833573 - DNA, 15 bp, Homo sapiens
ttttgttccttgcat

SEQ ID NO: 833574 - DNA, 15 bp, Homo sapiens
tttgttccttgcata

SEQ ID NO: 833575 - DNA, 15 bp, Homo sapiens
ttgttccttgcataa

SEQ ID NO: 833576 - DNA, 15 bp, Homo sapiens
tgttccttgcataaa

SEQ ID NO: 833577 - DNA, 15 bp, Homo sapiens
gttccttgcataaac

SEQ ID NO: 833578 - DNA, 15 bp, Homo sapiens
ttccttgcataaacc

SEQ ID NO: 833579 - DNA, 15 bp, Homo sapiens
tccttgcataaaccc

SEQ ID NO: 833580 - DNA, 15 bp, Homo sapiens
ccttgcataaaccca

SEQ ID NO: 833581 - DNA, 15 bp, Homo sapiens
cttgcataaacccag

SEQ ID NO: 833582 - DNA, 15 bp, Homo sapiens
ttgcataaacccagt

SEQ ID NO: 833583 - DNA, 15 bp, Homo sapiens
tgcataaacccagta

SEQ ID NO: 833584 - DNA, 15 bp, Homo sapiens
gcataaacccagtag

SEQ ID NO: 833585 - DNA, 15 bp, Homo sapiens
cataaacccagtagt

SEQ ID NO: 833586 - DNA, 15 bp, Homo sapiens
ataaacccagtagtc

SEQ ID NO: 833587 - DNA, 15 bp, Homo sapiens
taaacccagtagtca

SEQ ID NO: 833588 - DNA, 15 bp, Homo sapiens
aaacccagtagtcac

SEQ ID NO: 833589 - DNA, 15 bp, Homo sapiens
aacccagtagtcaca

SEQ ID NO: 833590 - DNA, 15 bp, Homo sapiens
acccagtagtcacat

SEQ ID NO: 833591 - DNA, 15 bp, Homo sapiens
cccagtagtcacatt

SEQ ID NO: 833592 - DNA, 15 bp, Homo sapiens
ccagtagtcacattg

SEQ ID NO: 833593 - DNA, 15 bp, Homo sapiens
cagtagtcacattgt

SEQ ID NO: 833594 - DNA, 15 bp, Homo sapiens
agtagtcacattgtg

SEQ ID NO: 833595 - DNA, 15 bp, Homo sapiens
gtagtcacattgtgt

SEQ ID NO: 833596 - DNA, 15 bp, Homo sapiens
tagtcacattgtgtg

SEQ ID NO: 833597 - DNA, 15 bp, Homo sapiens
agtcacattgtgtga

SEQ ID NO: 833598 - DNA, 15 bp, Homo sapiens
gtcacattgtgtgac

SEQ ID NO: 833599 - DNA, 15 bp, Homo sapiens
tcacattgtgtgaca

SEQ ID NO: 833600 - DNA, 15 bp, Homo sapiens
cacattgtgtgacaa

SEQ ID NO: 833601 - DNA, 15 bp, Homo sapiens
acattgtgtgacaat

SEQ ID NO: 833602 - DNA, 15 bp, Homo sapiens
cattgtgtgacaatg

SEQ ID NO: 833603 - DNA, 15 bp, Homo sapiens
attgtgtgacaatga

SEQ ID NO: 833604 - DNA, 15 bp, Homo sapiens
ttgtgtgacaatgaa

SEQ ID NO: 833605 - DNA, 15 bp, Homo sapiens
tgtgtgacaatgaaa

SEQ ID NO: 833606 - DNA, 15 bp, Homo sapiens
gtgtgacaatgaaat

SEQ ID NO: 833607 - DNA, 15 bp, Homo sapiens
tgtgacaatgaaatg

SEQ ID NO: 833608 - DNA, 15 bp, Homo sapiens
gtgacaatgaaatga

SEQ ID NO: 833609 - DNA, 15 bp, Homo sapiens
tgacaatgaaatgac

SEQ ID NO: 833610 - DNA, 15 bp, Homo sapiens
gacaatgaaatgact

SEQ ID NO: 833611 - DNA, 15 bp, Homo sapiens
acaatgaaatgacta

SEQ ID NO: 833612 - DNA, 15 bp, Homo sapiens
caatgaaatgactaa

SEQ ID NO: 833613 - DNA, 15 bp, Homo sapiens
aatgaaatgactaaa

SEQ ID NO: 833614 - DNA, 15 bp, Homo sapiens
atgaaatgactaaaa

SEQ ID NO: 833615 - DNA, 15 bp, Homo sapiens
tgaaatgactaaaaa

SEQ ID NO: 833616 - DNA, 15 bp, Homo sapiens
gaaatgactaaaaag

SEQ ID NO: 833617 - DNA, 15 bp, Homo sapiens
aaatgactaaaaagt

SEQ ID NO: 833618 - DNA, 15 bp, Homo sapiens
aatgactaaaaagtc

SEQ ID NO: 833619 - DNA, 15 bp, Homo sapiens
atgactaaaaagtca

SEQ ID NO: 833620 - DNA, 15 bp, Homo sapiens
tgactaaaaagtcaa

SEQ ID NO: 833621 - DNA, 15 bp, Homo sapiens
gactaaaaagtcaag

SEQ ID NO: 833622 - DNA, 15 bp, Homo sapiens
actaaaaagtcaagg

SEQ ID NO: 833623 - DNA, 15 bp, Homo sapiens
ctaaaaagtcaaggt

SEQ ID NO: 833624 - DNA, 15 bp, Homo sapiens
taaaaagtcaaggta

SEQ ID NO: 833625 - DNA, 15 bp, Homo sapiens
aaaaagtcaaggtat

SEQ ID NO: 833626 - DNA, 15 bp, Homo sapiens
aaaagtcaaggtatt

SEQ ID NO: 833627 - DNA, 15 bp, Homo sapiens
aaagtcaaggtattt

SEQ ID NO: 833628 - DNA, 15 bp, Homo sapiens
aagtcaaggtatttt

SEQ ID NO: 833629 - DNA, 15 bp, Homo sapiens
agtcaaggtattttg

SEQ ID NO: 833630 - DNA, 15 bp, Homo sapiens
gtcaaggtattttgc

SEQ ID NO: 833631 - DNA, 15 bp, Homo sapiens
tcaaggtattttgct

SEQ ID NO: 833632 - DNA, 15 bp, Homo sapiens
caaggtattttgctc

SEQ ID NO: 833633 - DNA, 15 bp, Homo sapiens
aaggtattttgctcc

SEQ ID NO: 833634 - DNA, 15 bp, Homo sapiens
aggtattttgctcca

SEQ ID NO: 833635 - DNA, 15 bp, Homo sapiens
ggtattttgctccag

SEQ ID NO: 833636 - DNA, 15 bp, Homo sapiens
gtattttgctccagg

SEQ ID NO: 833637 - DNA, 15 bp, Homo sapiens
tattttgctccaggt

SEQ ID NO: 833638 - DNA, 15 bp, Homo sapiens
attttgctccaggta

SEQ ID NO: 833639 - DNA, 15 bp, Homo sapiens
ttttgctccaggtag

SEQ ID NO: 833640 - DNA, 15 bp, Homo sapiens
tttgctccaggtagt

SEQ ID NO: 833641 - DNA, 15 bp, Homo sapiens
ttgctccaggtagtt

SEQ ID NO: 833642 - DNA, 15 bp, Homo sapiens
tgctccaggtagtta

SEQ ID NO: 833643 - DNA, 15 bp, Homo sapiens
gctccaggtagttag

SEQ ID NO: 833644 - DNA, 15 bp, Homo sapiens
ctccaggtagttaga

SEQ ID NO: 833645 - DNA, 15 bp, Homo sapiens
tccaggtagttagag

SEQ ID NO: 833646 - DNA, 15 bp, Homo sapiens
ccaggtagttagagg

SEQ ID NO: 833647 - DNA, 15 bp, Homo sapiens
caggtagttagaggc

SEQ ID NO: 833648 - DNA, 15 bp, Homo sapiens
aggtagttagaggcc

SEQ ID NO: 833649 - DNA, 15 bp, Homo sapiens
ggtagttagaggccc

SEQ ID NO: 833650 - DNA, 15 bp, Homo sapiens
gtagttagaggccct

SEQ ID NO: 833651 - DNA, 15 bp, Homo sapiens
tagttagaggccctt

SEQ ID NO: 833652 - DNA, 15 bp, Homo sapiens
agttagaggcccttt

SEQ ID NO: 833653 - DNA, 15 bp, Homo sapiens
gttagaggccctttg

SEQ ID NO: 833654 - DNA, 15 bp, Homo sapiens
ttagaggccctttgg

SEQ ID NO: 833655 - DNA, 15 bp, Homo sapiens
tagaggccctttgga

SEQ ID NO: 833656 - DNA, 15 bp, Homo sapiens
agaggccctttggaa

SEQ ID NO: 833657 - DNA, 15 bp, Homo sapiens
gaggccctttggaat

SEQ ID NO: 833658 - DNA, 15 bp, Homo sapiens
aggccctttggaatt

SEQ ID NO: 833659 - DNA, 15 bp, Homo sapiens
ggccctttggaattt

SEQ ID NO: 833660 - DNA, 15 bp, Homo sapiens
gccctttggaatttg

SEQ ID NO: 833661 - DNA, 15 bp, Homo sapiens
ccctttggaatttgt

SEQ ID NO: 833662 - DNA, 15 bp, Homo sapiens
cctttggaatttgtc

SEQ ID NO: 833663 - DNA, 15 bp, Homo sapiens
ctttggaatttgtct

SEQ ID NO: 833664 - DNA, 15 bp, Homo sapiens
tttggaatttgtctt

SEQ ID NO: 833665 - DNA, 15 bp, Homo sapiens
ttggaatttgtcttt

SEQ ID NO: 833666 - DNA, 15 bp, Homo sapiens
tggaatttgtctttt

SEQ ID NO: 833667 - DNA, 15 bp, Homo sapiens
ggaatttgtcttttc

SEQ ID NO: 833668 - DNA, 15 bp, Homo sapiens
gaatttgtcttttct

SEQ ID NO: 833669 - DNA, 15 bp, Homo sapiens
aatttgtcttttctg

SEQ ID NO: 833670 - DNA, 15 bp, Homo sapiens
atttgtcttttctgt

SEQ ID NO: 833671 - DNA, 15 bp, Homo sapiens
tttgtcttttctgta

SEQ ID NO: 833672 - DNA, 15 bp, Homo sapiens
ttgtcttttctgtag

SEQ ID NO: 833673 - DNA, 15 bp, Homo sapiens
tgtcttttctgtagc

SEQ ID NO: 833674 - DNA, 15 bp, Homo sapiens
gtcttttctgtagca

SEQ ID NO: 833675 - DNA, 15 bp, Homo sapiens
tcttttctgtagcat

SEQ ID NO: 833676 - DNA, 15 bp, Homo sapiens
cttttctgtagcata

SEQ ID NO: 833677 - DNA, 15 bp, Homo sapiens
ttttctgtagcataa

SEQ ID NO: 833678 - DNA, 15 bp, Homo sapiens
tttctgtagcataaa

SEQ ID NO: 833679 - DNA, 15 bp, Homo sapiens
ttctgtagcataaat

SEQ ID NO: 833680 - DNA, 15 bp, Homo sapiens
tctgtagcataaatt

SEQ ID NO: 833681 - DNA, 15 bp, Homo sapiens
ctgtagcataaattg

SEQ ID NO: 833682 - DNA, 15 bp, Homo sapiens
tgtagcataaattgc

SEQ ID NO: 833683 - DNA, 15 bp, Homo sapiens
gtagcataaattgca

SEQ ID NO: 833684 - DNA, 15 bp, Homo sapiens
tagcataaattgcag

SEQ ID NO: 833685 - DNA, 15 bp, Homo sapiens
agcataaattgcaga

SEQ ID NO: 833686 - DNA, 15 bp, Homo sapiens
gcataaattgcagaa

SEQ ID NO: 833687 - DNA, 15 bp, Homo sapiens
cataaattgcagaag

SEQ ID NO: 833688 - DNA, 15 bp, Homo sapiens
ataaattgcagaaga

SEQ ID NO: 833689 - DNA, 15 bp, Homo sapiens
taaattgcagaagag

SEQ ID NO: 833690 - DNA, 15 bp, Homo sapiens
aaattgcagaagagt

SEQ ID NO: 833691 - DNA, 15 bp, Homo sapiens
aattgcagaagagtt

SEQ ID NO: 833692 - DNA, 15 bp, Homo sapiens
attgcagaagagtta

SEQ ID NO: 833693 - DNA, 15 bp, Homo sapiens
ttgcagaagagttaa

SEQ ID NO: 833694 - DNA, 15 bp, Homo sapiens
tgcagaagagttaag

SEQ ID NO: 833695 - DNA, 15 bp, Homo sapiens
gcagaagagttaaga

SEQ ID NO: 833696 - DNA, 15 bp, Homo sapiens
cagaagagttaagag

SEQ ID NO: 833697 - DNA, 15 bp, Homo sapiens
agaagagttaagagg

SEQ ID NO: 833698 - DNA, 15 bp, Homo sapiens
gaagagttaagaggg

SEQ ID NO: 833699 - DNA, 15 bp, Homo sapiens
aagagttaagagggc

SEQ ID NO: 833700 - DNA, 15 bp, Homo sapiens
agagttaagagggct

SEQ ID NO: 833701 - DNA, 15 bp, Homo sapiens
gagttaagagggctg

SEQ ID NO: 833702 - DNA, 15 bp, Homo sapiens
agttaagagggctga

SEQ ID NO: 833703 - DNA, 15 bp, Homo sapiens
gttaagagggctgag

SEQ ID NO: 833704 - DNA, 15 bp, Homo sapiens
ttaagagggctgaga

SEQ ID NO: 833705 - DNA, 15 bp, Homo sapiens
taagagggctgagag

SEQ ID NO: 833706 - DNA, 15 bp, Homo sapiens
aagagggctgagagg

SEQ ID NO: 833707 - DNA, 15 bp, Homo sapiens
agagggctgagagga

SEQ ID NO: 833708 - DNA, 15 bp, Homo sapiens
gagggctgagaggaa

SEQ ID NO: 833709 - DNA, 15 bp, Homo sapiens
agggctgagaggaaa

SEQ ID NO: 833710 - DNA, 15 bp, Homo sapiens
gggctgagaggaaat

SEQ ID NO: 833711 - DNA, 15 bp, Homo sapiens
ggctgagaggaaatg

SEQ ID NO: 833712 - DNA, 15 bp, Homo sapiens
gctgagaggaaatga

SEQ ID NO: 833713 - DNA, 15 bp, Homo sapiens
ctgagaggaaatgat

SEQ ID NO: 833714 - DNA, 15 bp, Homo sapiens
tgagaggaaatgata

SEQ ID NO: 833715 - DNA, 15 bp, Homo sapiens
gagaggaaatgataa

SEQ ID NO: 833716 - DNA, 15 bp, Homo sapiens
agaggaaatgataaa

SEQ ID NO: 833717 - DNA, 15 bp, Homo sapiens
gaggaaatgataaag

SEQ ID NO: 833718 - DNA, 15 bp, Homo sapiens
aggaaatgataaagg

SEQ ID NO: 833719 - DNA, 15 bp, Homo sapiens
ggaaatgataaaggg

SEQ ID NO: 833720 - DNA, 15 bp, Homo sapiens
gaaatgataaaggga

SEQ ID NO: 833721 - DNA, 15 bp, Homo sapiens
aaatgataaagggaa

SEQ ID NO: 833722 - DNA, 15 bp, Homo sapiens
aatgataaagggaag

SEQ ID NO: 833723 - DNA, 15 bp, Homo sapiens
atgataaagggaagc

SEQ ID NO: 833724 - DNA, 15 bp, Homo sapiens
tgataaagggaagct

SEQ ID NO: 833725 - DNA, 15 bp, Homo sapiens
gataaagggaagctt

SEQ ID NO: 833726 - DNA, 15 bp, Homo sapiens
ataaagggaagcttc

SEQ ID NO: 833727 - DNA, 15 bp, Homo sapiens
taaagggaagcttct

SEQ ID NO: 833728 - DNA, 15 bp, Homo sapiens
aaagggaagcttctg

SEQ ID NO: 833729 - DNA, 15 bp, Homo sapiens
aagggaagcttctgg

SEQ ID NO: 833730 - DNA, 15 bp, Homo sapiens
agggaagcttctgga

SEQ ID NO: 833731 - DNA, 15 bp, Homo sapiens
gggaagcttctggag

SEQ ID NO: 833732 - DNA, 15 bp, Homo sapiens
ggaagcttctggaga

SEQ ID NO: 833733 - DNA, 15 bp, Homo sapiens
gaagcttctggagag

SEQ ID NO: 833734 - DNA, 15 bp, Homo sapiens
aagcttctggagagt

SEQ ID NO: 833735 - DNA, 15 bp, Homo sapiens
agcttctggagagtt

SEQ ID NO: 833736 - DNA, 15 bp, Homo sapiens
gcttctggagagttg

SEQ ID NO: 833737 - DNA, 15 bp, Homo sapiens
cttctggagagttga

SEQ ID NO: 833738 - DNA, 15 bp, Homo sapiens
ttctggagagttgag

SEQ ID NO: 833739 - DNA, 15 bp, Homo sapiens
tctggagagttgagc

SEQ ID NO: 833740 - DNA, 15 bp, Homo sapiens
ctggagagttgagct

SEQ ID NO: 833741 - DNA, 15 bp, Homo sapiens
tggagagttgagcta

SEQ ID NO: 833742 - DNA, 15 bp, Homo sapiens
ggagagttgagctaa

SEQ ID NO: 833743 - DNA, 15 bp, Homo sapiens
gagagttgagctaaa

SEQ ID NO: 833744 - DNA, 15 bp, Homo sapiens
agagttgagctaaat

SEQ ID NO: 833745 - DNA, 15 bp, Homo sapiens
gagttgagctaaatt

SEQ ID NO: 833746 - DNA, 15 bp, Homo sapiens
agttgagctaaattc

SEQ ID NO: 833747 - DNA, 15 bp, Homo sapiens
gttgagctaaattca

SEQ ID NO: 833748 - DNA, 15 bp, Homo sapiens
ttgagctaaattcag

SEQ ID NO: 833749 - DNA, 15 bp, Homo sapiens
tgagctaaattcagt

SEQ ID NO: 833750 - DNA, 15 bp, Homo sapiens
gagctaaattcagtg

SEQ ID NO: 833751 - DNA, 15 bp, Homo sapiens
agctaaattcagtgg

SEQ ID NO: 833752 - DNA, 15 bp, Homo sapiens
gctaaattcagtggg

SEQ ID NO: 833753 - DNA, 15 bp, Homo sapiens
ctaaattcagtggga

SEQ ID NO: 833754 - DNA, 15 bp, Homo sapiens
taaattcagtgggat

SEQ ID NO: 833755 - DNA, 15 bp, Homo sapiens
aaattcagtgggatt

SEQ ID NO: 833756 - DNA, 15 bp, Homo sapiens
aattcagtgggattt

SEQ ID NO: 833757 - DNA, 15 bp, Homo sapiens
attcagtgggatttc

SEQ ID NO: 833758 - DNA, 15 bp, Homo sapiens
ttcagtgggatttcc

SEQ ID NO: 833759 - DNA, 15 bp, Homo sapiens
tcagtgggatttccg

SEQ ID NO: 833760 - DNA, 15 bp, Homo sapiens
cagtgggatttccgt

SEQ ID NO: 833761 - DNA, 15 bp, Homo sapiens
agtgggatttccgtc

SEQ ID NO: 833762 - DNA, 15 bp, Homo sapiens
gtgggatttccgtcc

SEQ ID NO: 833763 - DNA, 15 bp, Homo sapiens
tgggatttccgtccc

SEQ ID NO: 833764 - DNA, 15 bp, Homo sapiens
gggatttccgtccca

SEQ ID NO: 833765 - DNA, 15 bp, Homo sapiens
ggatttccgtcccac

SEQ ID NO: 833766 - DNA, 15 bp, Homo sapiens
gatttccgtcccact

SEQ ID NO: 833767 - DNA, 15 bp, Homo sapiens
atttccgtcccactg

SEQ ID NO: 833768 - DNA, 15 bp, Homo sapiens
tttccgtcccactgc

SEQ ID NO: 833769 - DNA, 15 bp, Homo sapiens
ttccgtcccactgca

SEQ ID NO: 833770 - DNA, 15 bp, Homo sapiens
tccgtcccactgcat

SEQ ID NO: 833771 - DNA, 15 bp, Homo sapiens
ccgtcccactgcatt

SEQ ID NO: 833772 - DNA, 15 bp, Homo sapiens
cgtcccactgcattc

SEQ ID NO: 833773 - DNA, 15 bp, Homo sapiens
gtcccactgcattcc

SEQ ID NO: 833774 - DNA, 15 bp, Homo sapiens
tcccactgcattccc

SEQ ID NO: 833775 - DNA, 15 bp, Homo sapiens
cccactgcattccca

SEQ ID NO: 833776 - DNA, 15 bp, Homo sapiens
ccactgcattcccag

SEQ ID NO: 833777 - DNA, 15 bp, Homo sapiens
cactgcattcccagg

SEQ ID NO: 833778 - DNA, 15 bp, Homo sapiens
actgcattcccagga

SEQ ID NO: 833779 - DNA, 15 bp, Homo sapiens
ctgcattcccaggaa

SEQ ID NO: 833780 - DNA, 15 bp, Homo sapiens
tgcattcccaggaac

SEQ ID NO: 833781 - DNA, 15 bp, Homo sapiens
gcattcccaggaact

SEQ ID NO: 833782 - DNA, 15 bp, Homo sapiens
cattcccaggaactt

SEQ ID NO: 833783 - DNA, 15 bp, Homo sapiens
attcccaggaacttt

SEQ ID NO: 833784 - DNA, 15 bp, Homo sapiens
ttcccaggaactttt

SEQ ID NO: 833785 - DNA, 15 bp, Homo sapiens
tcccaggaactttta

SEQ ID NO: 833786 - DNA, 15 bp, Homo sapiens
cccaggaacttttac

SEQ ID NO: 833787 - DNA, 15 bp, Homo sapiens
ccaggaacttttacc

SEQ ID NO: 833788 - DNA, 15 bp, Homo sapiens
caggaacttttacct

SEQ ID NO: 833789 - DNA, 15 bp, Homo sapiens
aggaacttttaccta

SEQ ID NO: 833790 - DNA, 15 bp, Homo sapiens
ggaacttttacctaa

SEQ ID NO: 833791 - DNA, 15 bp, Homo sapiens
gaacttttacctaac

SEQ ID NO: 833792 - DNA, 15 bp, Homo sapiens
aacttttacctaact

SEQ ID NO: 833793 - DNA, 15 bp, Homo sapiens
acttttacctaactg

SEQ ID NO: 833794 - DNA, 15 bp, Homo sapiens
cttttacctaactgt

SEQ ID NO: 833795 - DNA, 15 bp, Homo sapiens
ttttacctaactgtg

SEQ ID NO: 833796 - DNA, 15 bp, Homo sapiens
tttacctaactgtga

SEQ ID NO: 833797 - DNA, 15 bp, Homo sapiens
ttacctaactgtgaa

SEQ ID NO: 833798 - DNA, 15 bp, Homo sapiens
tacctaactgtgaac

SEQ ID NO: 833799 - DNA, 15 bp, Homo sapiens
acctaactgtgaaca

SEQ ID NO: 833800 - DNA, 15 bp, Homo sapiens
cctaactgtgaacag

SEQ ID NO: 833801 - DNA, 15 bp, Homo sapiens
ctaactgtgaacagc

SEQ ID NO: 833802 - DNA, 15 bp, Homo sapiens
taactgtgaacagcc

SEQ ID NO: 833803 - DNA, 15 bp, Homo sapiens
aactgtgaacagcca

SEQ ID NO: 833804 - DNA, 15 bp, Homo sapiens
actgtgaacagccat

SEQ ID NO: 833805 - DNA, 15 bp, Homo sapiens
ctgtgaacagccatc

SEQ ID NO: 833806 - DNA, 15 bp, Homo sapiens
tgtgaacagccatct

SEQ ID NO: 833807 - DNA, 15 bp, Homo sapiens
gtgaacagccatctt

SEQ ID NO: 833808 - DNA, 15 bp, Homo sapiens
tgaacagccatcttt

SEQ ID NO: 833809 - DNA, 15 bp, Homo sapiens
gaacagccatctttc

SEQ ID NO: 833810 - DNA, 15 bp, Homo sapiens
aacagccatctttcg

SEQ ID NO: 833811 - DNA, 15 bp, Homo sapiens
acagccatctttcgg

SEQ ID NO: 833812 - DNA, 15 bp, Homo sapiens
cagccatctttcggg

SEQ ID NO: 833813 - DNA, 15 bp, Homo sapiens
agccatctttcgggc

SEQ ID NO: 833814 - DNA, 15 bp, Homo sapiens
gccatctttcgggcc

SEQ ID NO: 833815 - DNA, 15 bp, Homo sapiens
ccatctttcgggccg

SEQ ID NO: 833816 - DNA, 15 bp, Homo sapiens
catctttcgggccga

SEQ ID NO: 833817 - DNA, 15 bp, Homo sapiens
atctttcgggccgaa

SEQ ID NO: 833818 - DNA, 15 bp, Homo sapiens
tctttcgggccgaag

SEQ ID NO: 833819 - DNA, 15 bp, Homo sapiens
ctttcgggccgaagg

SEQ ID NO: 833820 - DNA, 15 bp, Homo sapiens
tttcgggccgaaggt

SEQ ID NO: 833821 - DNA, 15 bp, Homo sapiens
ttcgggccgaaggtt

SEQ ID NO: 833822 - DNA, 15 bp, Homo sapiens
tcgggccgaaggttc

SEQ ID NO: 833823 - DNA, 15 bp, Homo sapiens
cgggccgaaggttcc

SEQ ID NO: 833824 - DNA, 15 bp, Homo sapiens
gggccgaaggttccc

SEQ ID NO: 833825 - DNA, 15 bp, Homo sapiens
ggccgaaggttcccc

SEQ ID NO: 833826 - DNA, 15 bp, Homo sapiens
gccgaaggttccccc

SEQ ID NO: 833827 - DNA, 15 bp, Homo sapiens
ccgaaggttccccct

SEQ ID NO: 833828 - DNA, 15 bp, Homo sapiens
cgaaggttccccctc

SEQ ID NO: 833829 - DNA, 15 bp, Homo sapiens
gaaggttccccctct

SEQ ID NO: 833830 - DNA, 15 bp, Homo sapiens
aaggttccccctcta

SEQ ID NO: 833831 - DNA, 15 bp, Homo sapiens
aggttccccctctac

SEQ ID NO: 833832 - DNA, 15 bp, Homo sapiens
ggttccccctctacc

SEQ ID NO: 833833 - DNA, 15 bp, Homo sapiens
gttccccctctaccg

SEQ ID NO: 833834 - DNA, 15 bp, Homo sapiens
ttccccctctaccgg

SEQ ID NO: 833835 - DNA, 15 bp, Homo sapiens
tccccctctaccggt

SEQ ID NO: 833836 - DNA, 15 bp, Homo sapiens
ccccctctaccggtg

SEQ ID NO: 833837 - DNA, 15 bp, Homo sapiens
cccctctaccggtgg

SEQ ID NO: 833838 - DNA, 15 bp, Homo sapiens
ccctctaccggtggc

SEQ ID NO: 833839 - DNA, 15 bp, Homo sapiens
cctctaccggtggct

SEQ ID NO: 833840 - DNA, 15 bp, Homo sapiens
ctctaccggtggctt

SEQ ID NO: 833841 - DNA, 15 bp, Homo sapiens
tctaccggtggcttg

SEQ ID NO: 833842 - DNA, 15 bp, Homo sapiens
ctaccggtggcttgg

SEQ ID NO: 833843 - DNA, 15 bp, Homo sapiens
taccggtggcttggt

SEQ ID NO: 833844 - DNA, 15 bp, Homo sapiens
accggtggcttggtt

SEQ ID NO: 833845 - DNA, 15 bp, Homo sapiens
ccggtggcttggttt

SEQ ID NO: 833846 - DNA, 15 bp, Homo sapiens
cggtggcttggttta

SEQ ID NO: 833847 - DNA, 15 bp, Homo sapiens
ggtggcttggtttac

SEQ ID NO: 833848 - DNA, 15 bp, Homo sapiens
gtggcttggtttact

SEQ ID NO: 833849 - DNA, 15 bp, Homo sapiens
tggcttggtttactg

SEQ ID NO: 833850 - DNA, 15 bp, Homo sapiens
ggcttggtttactgc

SEQ ID NO: 833851 - DNA, 15 bp, Homo sapiens
gcttggtttactgcc

SEQ ID NO: 833852 - DNA, 15 bp, Homo sapiens
cttggtttactgcct

SEQ ID NO: 833853 - DNA, 15 bp, Homo sapiens
ttggtttactgcctc

SEQ ID NO: 833854 - DNA, 15 bp, Homo sapiens
tggtttactgcctcc

SEQ ID NO: 833855 - DNA, 15 bp, Homo sapiens
ggtttactgcctcct

SEQ ID NO: 833856 - DNA, 15 bp, Homo sapiens
gtttactgcctcctg

SEQ ID NO: 833857 - DNA, 15 bp, Homo sapiens
tttactgcctcctgg

SEQ ID NO: 833858 - DNA, 15 bp, Homo sapiens
ttactgcctcctggg

SEQ ID NO: 833859 - DNA, 15 bp, Homo sapiens
tactgcctcctggga

SEQ ID NO: 833860 - DNA, 15 bp, Homo sapiens
actgcctcctgggaa

SEQ ID NO: 833861 - DNA, 15 bp, Homo sapiens
ctgcctcctgggaac

SEQ ID NO: 833862 - DNA, 15 bp, Homo sapiens
tgcctcctgggaact

SEQ ID NO: 833863 - DNA, 15 bp, Homo sapiens
gcctcctgggaactt

SEQ ID NO: 833864 - DNA, 15 bp, Homo sapiens
cctcctgggaactta

SEQ ID NO: 833865 - DNA, 15 bp, Homo sapiens
ctcctgggaacttac

SEQ ID NO: 833866 - DNA, 15 bp, Homo sapiens
tcctgggaacttacc

SEQ ID NO: 833867 - DNA, 15 bp, Homo sapiens
cctgggaacttacct

SEQ ID NO: 833868 - DNA, 15 bp, Homo sapiens
ctgggaacttacctg

SEQ ID NO: 833869 - DNA, 15 bp, Homo sapiens
tgggaacttacctga

SEQ ID NO: 833870 - DNA, 15 bp, Homo sapiens
gggaacttacctgag

SEQ ID NO: 833871 - DNA, 15 bp, Homo sapiens
ggaacttacctgagg

SEQ ID NO: 833872 - DNA, 15 bp, Homo sapiens
gaacttacctgaggt

SEQ ID NO: 833873 - DNA, 15 bp, Homo sapiens
aacttacctgaggtt

SEQ ID NO: 833874 - DNA, 15 bp, Homo sapiens
acttacctgaggttg

SEQ ID NO: 833875 - DNA, 15 bp, Homo sapiens
cttacctgaggttga

SEQ ID NO: 833876 - DNA, 15 bp, Homo sapiens
ttacctgaggttgaa

SEQ ID NO: 833877 - DNA, 15 bp, Homo sapiens
tacctgaggttgaag

SEQ ID NO: 833878 - DNA, 15 bp, Homo sapiens
acctgaggttgaagg

SEQ ID NO: 833879 - DNA, 15 bp, Homo sapiens
cctgaggttgaaggt

SEQ ID NO: 833880 - DNA, 15 bp, Homo sapiens
ctgaggttgaaggtc

SEQ ID NO: 833881 - DNA, 15 bp, Homo sapiens
tgaggttgaaggtca

SEQ ID NO: 833882 - DNA, 15 bp, Homo sapiens
gaggttgaaggtcaa

SEQ ID NO: 833883 - DNA, 15 bp, Homo sapiens
aggttgaaggtcaag

SEQ ID NO: 833884 - DNA, 15 bp, Homo sapiens
ggttgaaggtcaaga

SEQ ID NO: 833885 - DNA, 15 bp, Homo sapiens
gttgaaggtcaagaa

SEQ ID NO: 833886 - DNA, 15 bp, Homo sapiens
ttgaaggtcaagaag

SEQ ID NO: 833887 - DNA, 15 bp, Homo sapiens
tgaaggtcaagaagt

SEQ ID NO: 833888 - DNA, 15 bp, Homo sapiens
gaaggtcaagaagtt

SEQ ID NO: 833889 - DNA, 15 bp, Homo sapiens
aaggtcaagaagtta

SEQ ID NO: 833890 - DNA, 15 bp, Homo sapiens
aggtcaagaagttac

SEQ ID NO: 833891 - DNA, 15 bp, Homo sapiens
ggtcaagaagttacc

SEQ ID NO: 833892 - DNA, 15 bp, Homo sapiens
gtcaagaagttacct

SEQ ID NO: 833893 - DNA, 15 bp, Homo sapiens
tcaagaagttacctt

SEQ ID NO: 833894 - DNA, 15 bp, Homo sapiens
caagaagttaccttt

SEQ ID NO: 833895 - DNA, 15 bp, Homo sapiens
aagaagttaccttta

SEQ ID NO: 833896 - DNA, 15 bp, Homo sapiens
agaagttacctttac

SEQ ID NO: 833897 - DNA, 15 bp, Homo sapiens
gaagttacctttaca

SEQ ID NO: 833898 - DNA, 15 bp, Homo sapiens
aagttacctttacat

SEQ ID NO: 833899 - DNA, 15 bp, Homo sapiens
agttacctttacatc

SEQ ID NO: 833900 - DNA, 15 bp, Homo sapiens
gttacctttacatcc

SEQ ID NO: 833901 - DNA, 15 bp, Homo sapiens
ttacctttacatcct

SEQ ID NO: 833902 - DNA, 15 bp, Homo sapiens
tacctttacatcctg

SEQ ID NO: 833903 - DNA, 15 bp, Homo sapiens
acctttacatcctga

SEQ ID NO: 833904 - DNA, 15 bp, Homo sapiens
cctttacatcctgac

SEQ ID NO: 833905 - DNA, 15 bp, Homo sapiens
ctttacatcctgaca

SEQ ID NO: 833906 - DNA, 15 bp, Homo sapiens
tttacatcctgacaa

SEQ ID NO: 833907 - DNA, 15 bp, Homo sapiens
ttacatcctgacaat

SEQ ID NO: 833908 - DNA, 15 bp, Homo sapiens
tacatcctgacaatg

SEQ ID NO: 833909 - DNA, 15 bp, Homo sapiens
acatcctgacaatgt

SEQ ID NO: 833910 - DNA, 15 bp, Homo sapiens
catcctgacaatgtt

SEQ ID NO: 833911 - DNA, 15 bp, Homo sapiens
atcctgacaatgttt

SEQ ID NO: 833912 - DNA, 15 bp, Homo sapiens
tcctgacaatgtttg

SEQ ID NO: 833913 - DNA, 15 bp, Homo sapiens
cctgacaatgtttgc

SEQ ID NO: 833914 - DNA, 15 bp, Homo sapiens
ctgacaatgtttgca

SEQ ID NO: 833915 - DNA, 15 bp, Homo sapiens
tgacaatgtttgcat

SEQ ID NO: 833916 - DNA, 15 bp, Homo sapiens
gacaatgtttgcatt

SEQ ID NO: 833917 - DNA, 15 bp, Homo sapiens
acaatgtttgcattg

SEQ ID NO: 833918 - DNA, 15 bp, Homo sapiens
caatgtttgcattgc

SEQ ID NO: 833919 - DNA, 15 bp, Homo sapiens
aatgtttgcattgcc

SEQ ID NO: 833920 - DNA, 15 bp, Homo sapiens
atgtttgcattgcct

SEQ ID NO: 833921 - DNA, 15 bp, Homo sapiens
tgtttgcattgcctt

SEQ ID NO: 833922 - DNA, 15 bp, Homo sapiens
gtttgcattgccttt

SEQ ID NO: 833923 - DNA, 15 bp, Homo sapiens
tttgcattgcctttg

SEQ ID NO: 833924 - DNA, 15 bp, Homo sapiens
ttgcattgcctttgt

SEQ ID NO: 833925 - DNA, 15 bp, Homo sapiens
tgcattgcctttgtc

SEQ ID NO: 833926 - DNA, 15 bp, Homo sapiens
gcattgcctttgtct

SEQ ID NO: 833927 - DNA, 15 bp, Homo sapiens
cattgcctttgtctt

SEQ ID NO: 833928 - DNA, 15 bp, Homo sapiens
attgcctttgtcttt

SEQ ID NO: 833929 - DNA, 15 bp, Homo sapiens
ttgcctttgtctttg

SEQ ID NO: 833930 - DNA, 15 bp, Homo sapiens
tgcctttgtctttgc

SEQ ID NO: 833931 - DNA, 15 bp, Homo sapiens
gcctttgtctttgct

SEQ ID NO: 833932 - DNA, 15 bp, Homo sapiens
cctttgtctttgctt

SEQ ID NO: 833933 - DNA, 15 bp, Homo sapiens
ctttgtctttgcttt

SEQ ID NO: 833934 - DNA, 15 bp, Homo sapiens
tttgtctttgctttc

SEQ ID NO: 833935 - DNA, 15 bp, Homo sapiens
ttgtctttgctttcc

SEQ ID NO: 833936 - DNA, 15 bp, Homo sapiens
tgtctttgctttcca

SEQ ID NO: 833937 - DNA, 15 bp, Homo sapiens
gtctttgctttccat

SEQ ID NO: 833938 - DNA, 15 bp, Homo sapiens
tctttgctttccatc

SEQ ID NO: 833939 - DNA, 15 bp, Homo sapiens
ctttgctttccatca

SEQ ID NO: 833940 - DNA, 15 bp, Homo sapiens
tttgctttccatcag

SEQ ID NO: 833941 - DNA, 15 bp, Homo sapiens
ttgctttccatcagt

SEQ ID NO: 833942 - DNA, 15 bp, Homo sapiens
tgctttccatcagtg

SEQ ID NO: 833943 - DNA, 15 bp, Homo sapiens
gctttccatcagtgg

SEQ ID NO: 833944 - DNA, 15 bp, Homo sapiens
ctttccatcagtggc

SEQ ID NO: 833945 - DNA, 15 bp, Homo sapiens
tttccatcagtggcc

SEQ ID NO: 833946 - DNA, 15 bp, Homo sapiens
ttccatcagtggccc

SEQ ID NO: 833947 - DNA, 15 bp, Homo sapiens
tccatcagtggcccc

SEQ ID NO: 833948 - DNA, 15 bp, Homo sapiens
ccatcagtggcccca

SEQ ID NO: 833949 - DNA, 15 bp, Homo sapiens
catcagtggccccaa

SEQ ID NO: 833950 - DNA, 15 bp, Homo sapiens
atcagtggccccaag

SEQ ID NO: 833951 - DNA, 15 bp, Homo sapiens
tcagtggccccaagt

SEQ ID NO: 833952 - DNA, 15 bp, Homo sapiens
cagtggccccaagtg

SEQ ID NO: 833953 - DNA, 15 bp, Homo sapiens
agtggccccaagtga

SEQ ID NO: 833954 - DNA, 15 bp, Homo sapiens
gtggccccaagtgac

SEQ ID NO: 833955 - DNA, 15 bp, Homo sapiens
tggccccaagtgacc

SEQ ID NO: 833956 - DNA, 15 bp, Homo sapiens
ggccccaagtgaccg

SEQ ID NO: 833957 - DNA, 15 bp, Homo sapiens
gccccaagtgaccgg

SEQ ID NO: 833958 - DNA, 15 bp, Homo sapiens
ccccaagtgaccgga

SEQ ID NO: 833959 - DNA, 15 bp, Homo sapiens
cccaagtgaccggag

SEQ ID NO: 833960 - DNA, 15 bp, Homo sapiens
ccaagtgaccggagc

SEQ ID NO: 833961 - DNA, 15 bp, Homo sapiens
caagtgaccggagct

SEQ ID NO: 833962 - DNA, 15 bp, Homo sapiens
aagtgaccggagctt

SEQ ID NO: 833963 - DNA, 15 bp, Homo sapiens
agtgaccggagcttc

SEQ ID NO: 833964 - DNA, 15 bp, Homo sapiens
gtgaccggagcttcc

SEQ ID NO: 833965 - DNA, 15 bp, Homo sapiens
tgaccggagcttccc

SEQ ID NO: 833966 - DNA, 15 bp, Homo sapiens
gaccggagcttcccc

SEQ ID NO: 833967 - DNA, 15 bp, Homo sapiens
accggagcttcccca

SEQ ID NO: 833968 - DNA, 15 bp, Homo sapiens
ccggagcttccccat

SEQ ID NO: 833969 - DNA, 15 bp, Homo sapiens
cggagcttccccatc

SEQ ID NO: 833970 - DNA, 15 bp, Homo sapiens
ggagcttccccatca

SEQ ID NO: 833971 - DNA, 15 bp, Homo sapiens
gagcttccccatcag

SEQ ID NO: 833972 - DNA, 15 bp, Homo sapiens
agcttccccatcagt

SEQ ID NO: 833973 - DNA, 15 bp, Homo sapiens
gcttccccatcagtg

SEQ ID NO: 833974 - DNA, 15 bp, Homo sapiens
cttccccatcagtga

SEQ ID NO: 833975 - DNA, 15 bp, Homo sapiens
ttccccatcagtgag

SEQ ID NO: 833976 - DNA, 15 bp, Homo sapiens
tccccatcagtgagg

SEQ ID NO: 833977 - DNA, 15 bp, Homo sapiens
ccccatcagtgaggt

SEQ ID NO: 833978 - DNA, 15 bp, Homo sapiens
cccatcagtgaggtg

SEQ ID NO: 833979 - DNA, 15 bp, Homo sapiens
ccatcagtgaggtgg

SEQ ID NO: 833980 - DNA, 15 bp, Homo sapiens
atcagtgaggtgggg

SEQ ID NO: 833981 - DNA, 15 bp, Homo sapiens
tcagtgaggtggggg

SEQ ID NO: 833982 - DNA, 15 bp, Homo sapiens
cagtgaggtggggga

SEQ ID NO: 833983 - DNA, 15 bp, Homo sapiens
agtgaggtgggggaa

SEQ ID NO: 833984 - DNA, 15 bp, Homo sapiens
gtgaggtgggggaat

SEQ ID NO: 833985 - DNA, 15 bp, Homo sapiens
tgaggtgggggaatt

SEQ ID NO: 833986 - DNA, 15 bp, Homo sapiens
gaggtgggggaattc

SEQ ID NO: 833987 - DNA, 15 bp, Homo sapiens
aggtgggggaattcc

SEQ ID NO: 833988 - DNA, 15 bp, Homo sapiens
ggtgggggaattcct

SEQ ID NO: 833989 - DNA, 15 bp, Homo sapiens
gtgggggaattcctc

SEQ ID NO: 833990 - DNA, 15 bp, Homo sapiens
tgggggaattcctcc

SEQ ID NO: 833991 - DNA, 15 bp, Homo sapiens
gggggaattcctcca

SEQ ID NO: 833992 - DNA, 15 bp, Homo sapiens
ggggaattcctccag

SEQ ID NO: 833993 - DNA, 15 bp, Homo sapiens
gggaattcctccagt

SEQ ID NO: 833994 - DNA, 15 bp, Homo sapiens
ggaattcctccagtg

SEQ ID NO: 833995 - DNA, 15 bp, Homo sapiens
gaattcctccagtgc

SEQ ID NO: 833996 - DNA, 15 bp, Homo sapiens
aattcctccagtgca

SEQ ID NO: 833997 - DNA, 15 bp, Homo sapiens
attcctccagtgcat

SEQ ID NO: 833998 - DNA, 15 bp, Homo sapiens
ttcctccagtgcatt

SEQ ID NO: 833999 - DNA, 15 bp, Homo sapiens
tcctccagtgcattt

SEQ ID NO: 834000 - DNA, 15 bp, Homo sapiens
cctccagtgcatttc

SEQ ID NO: 834001 - DNA, 15 bp, Homo sapiens
ctccagtgcatttca

SEQ ID NO: 834002 - DNA, 15 bp, Homo sapiens
tccagtgcatttcag

SEQ ID NO: 834003 - DNA, 15 bp, Homo sapiens
ccagtgcatttcaga

SEQ ID NO: 834004 - DNA, 15 bp, Homo sapiens
cagtgcatttcagag

SEQ ID NO: 834005 - DNA, 15 bp, Homo sapiens
agtgcatttcagagg

SEQ ID NO: 834006 - DNA, 15 bp, Homo sapiens
gtgcatttcagagga

SEQ ID NO: 834007 - DNA, 15 bp, Homo sapiens
tgcatttcagaggag

SEQ ID NO: 834008 - DNA, 15 bp, Homo sapiens
gcatttcagaggagc

SEQ ID NO: 834009 - DNA, 15 bp, Homo sapiens
catttcagaggagcc

SEQ ID NO: 834010 - DNA, 15 bp, Homo sapiens
atttcagaggagcca

SEQ ID NO: 834011 - DNA, 15 bp, Homo sapiens
tttcagaggagccag

SEQ ID NO: 834012 - DNA, 15 bp, Homo sapiens
ttcagaggagccagt

SEQ ID NO: 834013 - DNA, 15 bp, Homo sapiens
tcagaggagccagtc

SEQ ID NO: 834014 - DNA, 15 bp, Homo sapiens
cagaggagccagtcc

SEQ ID NO: 834015 - DNA, 15 bp, Homo sapiens
agaggagccagtcct

SEQ ID NO: 834016 - DNA, 15 bp, Homo sapiens
gaggagccagtcctc

SEQ ID NO: 834017 - DNA, 15 bp, Homo sapiens
aggagccagtcctcc

SEQ ID NO: 834018 - DNA, 15 bp, Homo sapiens
ggagccagtcctccc

SEQ ID NO: 834019 - DNA, 15 bp, Homo sapiens
gagccagtcctccct

SEQ ID NO: 834020 - DNA, 15 bp, Homo sapiens
agccagtcctccctt

SEQ ID NO: 834021 - DNA, 15 bp, Homo sapiens
gccagtcctccctta

SEQ ID NO: 834022 - DNA, 15 bp, Homo sapiens
ccagtcctcccttaa

SEQ ID NO: 834023 - DNA, 15 bp, Homo sapiens
cagtcctcccttaag

SEQ ID NO: 834024 - DNA, 15 bp, Homo sapiens
agtcctcccttaagc

SEQ ID NO: 834025 - DNA, 15 bp, Homo sapiens
gtcctcccttaagca

SEQ ID NO: 834026 - DNA, 15 bp, Homo sapiens
tcctcccttaagcat

SEQ ID NO: 834027 - DNA, 15 bp, Homo sapiens
cctcccttaagcatc

SEQ ID NO: 834028 - DNA, 15 bp, Homo sapiens
ctcccttaagcatct

SEQ ID NO: 834029 - DNA, 15 bp, Homo sapiens
tcccttaagcatctg

SEQ ID NO: 834030 - DNA, 15 bp, Homo sapiens
cccttaagcatctgg

SEQ ID NO: 834031 - DNA, 15 bp, Homo sapiens
ccttaagcatctggt

SEQ ID NO: 834032 - DNA, 15 bp, Homo sapiens
cttaagcatctggtc

SEQ ID NO: 834033 - DNA, 15 bp, Homo sapiens
ttaagcatctggtcc

SEQ ID NO: 834034 - DNA, 15 bp, Homo sapiens
taagcatctggtcct

SEQ ID NO: 834035 - DNA, 15 bp, Homo sapiens
aagcatctggtcctt

SEQ ID NO: 834036 - DNA, 15 bp, Homo sapiens
agcatctggtccttg

SEQ ID NO: 834037 - DNA, 15 bp, Homo sapiens
gcatctggtccttgt

SEQ ID NO: 834038 - DNA, 15 bp, Homo sapiens
catctggtccttgtg

SEQ ID NO: 834039 - DNA, 15 bp, Homo sapiens
atctggtccttgtgt

SEQ ID NO: 834040 - DNA, 15 bp, Homo sapiens
tctggtccttgtgtc

SEQ ID NO: 834041 - DNA, 15 bp, Homo sapiens
ctggtccttgtgtct

SEQ ID NO: 834042 - DNA, 15 bp, Homo sapiens
tggtccttgtgtctg

SEQ ID NO: 834043 - DNA, 15 bp, Homo sapiens
ggtccttgtgtctgg

SEQ ID NO: 834044 - DNA, 15 bp, Homo sapiens
gtccttgtgtctggc

SEQ ID NO: 834045 - DNA, 15 bp, Homo sapiens
tccttgtgtctggca

SEQ ID NO: 834046 - DNA, 15 bp, Homo sapiens
ccttgtgtctggcag

SEQ ID NO: 834047 - DNA, 15 bp, Homo sapiens
cttgtgtctggcagg

SEQ ID NO: 834048 - DNA, 15 bp, Homo sapiens
ttgtgtctggcaggc

SEQ ID NO: 834049 - DNA, 15 bp, Homo sapiens
tgtgtctggcaggca

SEQ ID NO: 834050 - DNA, 15 bp, Homo sapiens
gtgtctggcaggcaa

SEQ ID NO: 834051 - DNA, 15 bp, Homo sapiens
tgtctggcaggcaac

SEQ ID NO: 834052 - DNA, 15 bp, Homo sapiens
gtctggcaggcaaca

SEQ ID NO: 834053 - DNA, 15 bp, Homo sapiens
tctggcaggcaacat

SEQ ID NO: 834054 - DNA, 15 bp, Homo sapiens
ctggcaggcaacatc

SEQ ID NO: 834055 - DNA, 15 bp, Homo sapiens
tggcaggcaacatct

SEQ ID NO: 834056 - DNA, 15 bp, Homo sapiens
ggcaggcaacatctg

SEQ ID NO: 834057 - DNA, 15 bp, Homo sapiens
gcaggcaacatctgg

SEQ ID NO: 834058 - DNA, 15 bp, Homo sapiens
caggcaacatctggc

SEQ ID NO: 834059 - DNA, 15 bp, Homo sapiens
aggcaacatctggca

SEQ ID NO: 834060 - DNA, 15 bp, Homo sapiens
ggcaacatctggcac

SEQ ID NO: 834061 - DNA, 15 bp, Homo sapiens
gcaacatctggcacc

SEQ ID NO: 834062 - DNA, 15 bp, Homo sapiens
caacatctggcacca

SEQ ID NO: 834063 - DNA, 15 bp, Homo sapiens
aacatctggcaccat

SEQ ID NO: 834064 - DNA, 15 bp, Homo sapiens
acatctggcaccatc

SEQ ID NO: 834065 - DNA, 15 bp, Homo sapiens
catctggcaccatct

SEQ ID NO: 834066 - DNA, 15 bp, Homo sapiens
atctggcaccatctt

SEQ ID NO: 834067 - DNA, 15 bp, Homo sapiens
tctggcaccatcttc

SEQ ID NO: 834068 - DNA, 15 bp, Homo sapiens
ctggcaccatcttct

SEQ ID NO: 834069 - DNA, 15 bp, Homo sapiens
tggcaccatcttctc

SEQ ID NO: 834070 - DNA, 15 bp, Homo sapiens
ggcaccatcttctct

SEQ ID NO: 834071 - DNA, 15 bp, Homo sapiens
gcaccatcttctctt

SEQ ID NO: 834072 - DNA, 15 bp, Homo sapiens
caccatcttctcttg

SEQ ID NO: 834073 - DNA, 15 bp, Homo sapiens
accatcttctcttgc

SEQ ID NO: 834074 - DNA, 15 bp, Homo sapiens
ccatcttctcttgcc

SEQ ID NO: 834075 - DNA, 15 bp, Homo sapiens
catcttctcttgcca

SEQ ID NO: 834076 - DNA, 15 bp, Homo sapiens
atcttctcttgccac

SEQ ID NO: 834077 - DNA, 15 bp, Homo sapiens
tcttctcttgccact

SEQ ID NO: 834078 - DNA, 15 bp, Homo sapiens
cttctcttgccactc

SEQ ID NO: 834079 - DNA, 15 bp, Homo sapiens
ttctcttgccactca

SEQ ID NO: 834080 - DNA, 15 bp, Homo sapiens
tctcttgccactcag

SEQ ID NO: 834081 - DNA, 15 bp, Homo sapiens
ctcttgccactcagt

SEQ ID NO: 834082 - DNA, 15 bp, Homo sapiens
tcttgccactcagtt

SEQ ID NO: 834083 - DNA, 15 bp, Homo sapiens
cttgccactcagttt

SEQ ID NO: 834084 - DNA, 15 bp, Homo sapiens
ttgccactcagtttt

SEQ ID NO: 834085 - DNA, 15 bp, Homo sapiens
tgccactcagttttc

SEQ ID NO: 834086 - DNA, 15 bp, Homo sapiens
gccactcagttttct

SEQ ID NO: 834087 - DNA, 15 bp, Homo sapiens
ccactcagttttctt

SEQ ID NO: 834088 - DNA, 15 bp, Homo sapiens
cactcagttttcttt

SEQ ID NO: 834089 - DNA, 15 bp, Homo sapiens
actcagttttctttg

SEQ ID NO: 834090 - DNA, 15 bp, Homo sapiens
ctcagttttctttgg

SEQ ID NO: 834091 - DNA, 15 bp, Homo sapiens
tcagttttctttggc

SEQ ID NO: 834092 - DNA, 15 bp, Homo sapiens
cagttttctttggca

SEQ ID NO: 834093 - DNA, 15 bp, Homo sapiens
agttttctttggcaa

SEQ ID NO: 834094 - DNA, 15 bp, Homo sapiens
gttttctttggcaat

SEQ ID NO: 834095 - DNA, 15 bp, Homo sapiens
ttttctttggcaata

SEQ ID NO: 834096 - DNA, 15 bp, Homo sapiens
tttctttggcaatat

SEQ ID NO: 834097 - DNA, 15 bp, Homo sapiens
ttctttggcaatatg

SEQ ID NO: 834098 - DNA, 15 bp, Homo sapiens
tctttggcaatatgc

SEQ ID NO: 834099 - DNA, 15 bp, Homo sapiens
ctttggcaatatgct

SEQ ID NO: 834100 - DNA, 15 bp, Homo sapiens
tttggcaatatgctt

SEQ ID NO: 834101 - DNA, 15 bp, Homo sapiens
ttggcaatatgctta

SEQ ID NO: 834102 - DNA, 15 bp, Homo sapiens
tggcaatatgcttag

SEQ ID NO: 834103 - DNA, 15 bp, Homo sapiens
ggcaatatgcttagt

SEQ ID NO: 834104 - DNA, 15 bp, Homo sapiens
gcaatatgcttagtg

SEQ ID NO: 834105 - DNA, 15 bp, Homo sapiens
caatatgcttagtga

SEQ ID NO: 834106 - DNA, 15 bp, Homo sapiens
aatatgcttagtgag

SEQ ID NO: 834107 - DNA, 15 bp, Homo sapiens
atatgcttagtgagg

SEQ ID NO: 834108 - DNA, 15 bp, Homo sapiens
tatgcttagtgaggt

SEQ ID NO: 834109 - DNA, 15 bp, Homo sapiens
atgcttagtgaggtc

SEQ ID NO: 834110 - DNA, 15 bp, Homo sapiens
tgcttagtgaggtca

SEQ ID NO: 834111 - DNA, 15 bp, Homo sapiens
gcttagtgaggtcat

SEQ ID NO: 834112 - DNA, 15 bp, Homo sapiens
cttagtgaggtcatt

SEQ ID NO: 834113 - DNA, 15 bp, Homo sapiens
tagtgaggtcatttt

SEQ ID NO: 834114 - DNA, 15 bp, Homo sapiens
agtgaggtcatttta

SEQ ID NO: 834115 - DNA, 15 bp, Homo sapiens
gtgaggtcattttaa

SEQ ID NO: 834116 - DNA, 15 bp, Homo sapiens
tgaggtcattttaag

SEQ ID NO: 834117 - DNA, 15 bp, Homo sapiens
gaggtcattttaagg

SEQ ID NO: 834118 - DNA, 15 bp, Homo sapiens
aggtcattttaagga

SEQ ID NO: 834119 - DNA, 15 bp, Homo sapiens
ggtcattttaaggaa

SEQ ID NO: 834120 - DNA, 15 bp, Homo sapiens
gtcattttaaggaag

SEQ ID NO: 834121 - DNA, 15 bp, Homo sapiens
tcattttaaggaagt

SEQ ID NO: 834122 - DNA, 15 bp, Homo sapiens
cattttaaggaagtg

SEQ ID NO: 834123 - DNA, 15 bp, Homo sapiens
attttaaggaagtgg

SEQ ID NO: 834124 - DNA, 15 bp, Homo sapiens
ttttaaggaagtgga

SEQ ID NO: 834125 - DNA, 15 bp, Homo sapiens
tttaaggaagtggat

SEQ ID NO: 834126 - DNA, 15 bp, Homo sapiens
ttaaggaagtggatg

SEQ ID NO: 834127 - DNA, 15 bp, Homo sapiens
taaggaagtggatgc

SEQ ID NO: 834128 - DNA, 15 bp, Homo sapiens
aaggaagtggatgcg

SEQ ID NO: 834129 - DNA, 15 bp, Homo sapiens
aggaagtggatgcgt

SEQ ID NO: 834130 - DNA, 15 bp, Homo sapiens
ggaagtggatgcgtg

SEQ ID NO: 834131 - DNA, 15 bp, Homo sapiens
gaagtggatgcgtga

SEQ ID NO: 834132 - DNA, 15 bp, Homo sapiens
aagtggatgcgtgaa

SEQ ID NO: 834133 - DNA, 15 bp, Homo sapiens
agtggatgcgtgaac

SEQ ID NO: 834134 - DNA, 15 bp, Homo sapiens
gtggatgcgtgaact

SEQ ID NO: 834135 - DNA, 15 bp, Homo sapiens
tggatgcgtgaactc

SEQ ID NO: 834136 - DNA, 15 bp, Homo sapiens
ggatgcgtgaactct

SEQ ID NO: 834137 - DNA, 15 bp, Homo sapiens
gatgcgtgaactctt

SEQ ID NO: 834138 - DNA, 15 bp, Homo sapiens
atgcgtgaactcttc

SEQ ID NO: 834139 - DNA, 15 bp, Homo sapiens
tgcgtgaactcttct

SEQ ID NO: 834140 - DNA, 15 bp, Homo sapiens
gcgtgaactcttcta

SEQ ID NO: 834141 - DNA, 15 bp, Homo sapiens
cgtgaactcttctaa

SEQ ID NO: 834142 - DNA, 15 bp, Homo sapiens
gtgaactcttctaag

SEQ ID NO: 834143 - DNA, 15 bp, Homo sapiens
tgaactcttctaagc

SEQ ID NO: 834144 - DNA, 15 bp, Homo sapiens
gaactcttctaagct

SEQ ID NO: 834145 - DNA, 15 bp, Homo sapiens
aactcttctaagctt

SEQ ID NO: 834146 - DNA, 15 bp, Homo sapiens
actcttctaagcttt

SEQ ID NO: 834147 - DNA, 15 bp, Homo sapiens
ctcttctaagctttg

SEQ ID NO: 834148 - DNA, 15 bp, Homo sapiens
tcttctaagctttgg

SEQ ID NO: 834149 - DNA, 15 bp, Homo sapiens
cttctaagctttggg

SEQ ID NO: 834150 - DNA, 15 bp, Homo sapiens
ttctaagctttgggc

SEQ ID NO: 834151 - DNA, 15 bp, Homo sapiens
tctaagctttgggct

SEQ ID NO: 834152 - DNA, 15 bp, Homo sapiens
ctaagctttgggctt

SEQ ID NO: 834153 - DNA, 15 bp, Homo sapiens
taagctttgggcttg

SEQ ID NO: 834154 - DNA, 15 bp, Homo sapiens
aagctttgggcttgc

SEQ ID NO: 834155 - DNA, 15 bp, Homo sapiens
agctttgggcttgcc

SEQ ID NO: 834156 - DNA, 15 bp, Homo sapiens
gctttgggcttgcca

SEQ ID NO: 834157 - DNA, 15 bp, Homo sapiens
ctttgggcttgccag

SEQ ID NO: 834158 - DNA, 15 bp, Homo sapiens
tttgggcttgccagg

SEQ ID NO: 834159 - DNA, 15 bp, Homo sapiens
ttgggcttgccaggc

SEQ ID NO: 834160 - DNA, 15 bp, Homo sapiens
tgggcttgccaggct

SEQ ID NO: 834161 - DNA, 15 bp, Homo sapiens
gggcttgccaggctg

SEQ ID NO: 834162 - DNA, 15 bp, Homo sapiens
ggcttgccaggctgc

SEQ ID NO: 834163 - DNA, 15 bp, Homo sapiens
gcttgccaggctgca

SEQ ID NO: 834164 - DNA, 15 bp, Homo sapiens
cttgccaggctgcag

SEQ ID NO: 834165 - DNA, 15 bp, Homo sapiens
ttgccaggctgcaga

SEQ ID NO: 834166 - DNA, 15 bp, Homo sapiens
tgccaggctgcagag

SEQ ID NO: 834167 - DNA, 15 bp, Homo sapiens
gccaggctgcagaga

SEQ ID NO: 834168 - DNA, 15 bp, Homo sapiens
ccaggctgcagagag

SEQ ID NO: 834169 - DNA, 15 bp, Homo sapiens
caggctgcagagaga

SEQ ID NO: 834170 - DNA, 15 bp, Homo sapiens
aggctgcagagagag

SEQ ID NO: 834171 - DNA, 15 bp, Homo sapiens
ggctgcagagagagg

SEQ ID NO: 834172 - DNA, 15 bp, Homo sapiens
gctgcagagagaggg

SEQ ID NO: 834173 - DNA, 15 bp, Homo sapiens
ctgcagagagagggt

SEQ ID NO: 834174 - DNA, 15 bp, Homo sapiens
tgcagagagagggtg

SEQ ID NO: 834175 - DNA, 15 bp, Homo sapiens
gcagagagagggtgg

SEQ ID NO: 834176 - DNA, 15 bp, Homo sapiens
cagagagagggtgga

SEQ ID NO: 834177 - DNA, 15 bp, Homo sapiens
agagagagggtggaa

SEQ ID NO: 834178 - DNA, 15 bp, Homo sapiens
gagagagggtggaac

SEQ ID NO: 834179 - DNA, 15 bp, Homo sapiens
agagagggtggaaca

SEQ ID NO: 834180 - DNA, 15 bp, Homo sapiens
gagagggtggaacag

SEQ ID NO: 834181 - DNA, 15 bp, Homo sapiens
agagggtggaacaga

SEQ ID NO: 834182 - DNA, 15 bp, Homo sapiens
gagggtggaacagat

SEQ ID NO: 834183 - DNA, 15 bp, Homo sapiens
agggtggaacagatt

SEQ ID NO: 834184 - DNA, 15 bp, Homo sapiens
gggtggaacagattc

SEQ ID NO: 834185 - DNA, 15 bp, Homo sapiens
ggtggaacagattct

SEQ ID NO: 834186 - DNA, 15 bp, Homo sapiens
gtggaacagattctg

SEQ ID NO: 834187 - DNA, 15 bp, Homo sapiens
tggaacagattctgg

SEQ ID NO: 834188 - DNA, 15 bp, Homo sapiens
ggaacagattctggc

SEQ ID NO: 834189 - DNA, 15 bp, Homo sapiens
gaacagattctggct

SEQ ID NO: 834190 - DNA, 15 bp, Homo sapiens
aacagattctggctt

SEQ ID NO: 834191 - DNA, 15 bp, Homo sapiens
acagattctggcttc

SEQ ID NO: 834192 - DNA, 15 bp, Homo sapiens
cagattctggcttca

SEQ ID NO: 834193 - DNA, 15 bp, Homo sapiens
agattctggcttcac

SEQ ID NO: 834194 - DNA, 15 bp, Homo sapiens
gattctggcttcaca

SEQ ID NO: 834195 - DNA, 15 bp, Homo sapiens
attctggcttcacac

SEQ ID NO: 834196 - DNA, 15 bp, Homo sapiens
ttctggcttcacacc

SEQ ID NO: 834197 - DNA, 15 bp, Homo sapiens
tctggcttcacacct

SEQ ID NO: 834198 - DNA, 15 bp, Homo sapiens
ctggcttcacacctg

SEQ ID NO: 834199 - DNA, 15 bp, Homo sapiens
tggcttcacacctgg

SEQ ID NO: 834200 - DNA, 15 bp, Homo sapiens
ggcttcacacctggg

SEQ ID NO: 834201 - DNA, 15 bp, Homo sapiens
gcttcacacctgggc

SEQ ID NO: 834202 - DNA, 15 bp, Homo sapiens
cttcacacctgggct

SEQ ID NO: 834203 - DNA, 15 bp, Homo sapiens
ttcacacctgggctc

SEQ ID NO: 834204 - DNA, 15 bp, Homo sapiens
tcacacctgggctca

SEQ ID NO: 834205 - DNA, 15 bp, Homo sapiens
cacacctgggctcat

SEQ ID NO: 834206 - DNA, 15 bp, Homo sapiens
acacctgggctcatt

SEQ ID NO: 834207 - DNA, 15 bp, Homo sapiens
cacctgggctcattc

SEQ ID NO: 834208 - DNA, 15 bp, Homo sapiens
acctgggctcattcc

SEQ ID NO: 834209 - DNA, 15 bp, Homo sapiens
cctgggctcattccc

SEQ ID NO: 834210 - DNA, 15 bp, Homo sapiens
ctgggctcattcccg

SEQ ID NO: 834211 - DNA, 15 bp, Homo sapiens
tgggctcattcccga

SEQ ID NO: 834212 - DNA, 15 bp, Homo sapiens
gggctcattcccgaa

SEQ ID NO: 834213 - DNA, 15 bp, Homo sapiens
ggctcattcccgaat

SEQ ID NO: 834214 - DNA, 15 bp, Homo sapiens
gctcattcccgaatc

SEQ ID NO: 834215 - DNA, 15 bp, Homo sapiens
ctcattcccgaatca

SEQ ID NO: 834216 - DNA, 15 bp, Homo sapiens
tcattcccgaatcag

SEQ ID NO: 834217 - DNA, 15 bp, Homo sapiens
cattcccgaatcagt

SEQ ID NO: 834218 - DNA, 15 bp, Homo sapiens
attcccgaatcagtt

SEQ ID NO: 834219 - DNA, 15 bp, Homo sapiens
ttcccgaatcagtta

SEQ ID NO: 834220 - DNA, 15 bp, Homo sapiens
tcccgaatcagttac

SEQ ID NO: 834221 - DNA, 15 bp, Homo sapiens
cccgaatcagttaca

SEQ ID NO: 834222 - DNA, 15 bp, Homo sapiens
ccgaatcagttacag

SEQ ID NO: 834223 - DNA, 15 bp, Homo sapiens
cgaatcagttacagc

SEQ ID NO: 834224 - DNA, 15 bp, Homo sapiens
gaatcagttacagct

SEQ ID NO: 834225 - DNA, 15 bp, Homo sapiens
aatcagttacagctg

SEQ ID NO: 834226 - DNA, 15 bp, Homo sapiens
atcagttacagctgc

SEQ ID NO: 834227 - DNA, 15 bp, Homo sapiens
tcagttacagctgca

SEQ ID NO: 834228 - DNA, 15 bp, Homo sapiens
cagttacagctgcac

SEQ ID NO: 834229 - DNA, 15 bp, Homo sapiens
agttacagctgcaca

SEQ ID NO: 834230 - DNA, 15 bp, Homo sapiens
gttacagctgcacag

SEQ ID NO: 834231 - DNA, 15 bp, Homo sapiens
ttacagctgcacagt

SEQ ID NO: 834232 - DNA, 15 bp, Homo sapiens
tacagctgcacagtg

SEQ ID NO: 834233 - DNA, 15 bp, Homo sapiens
acagctgcacagtgg

SEQ ID NO: 834234 - DNA, 15 bp, Homo sapiens
cagctgcacagtggc

SEQ ID NO: 834235 - DNA, 15 bp, Homo sapiens
agctgcacagtggct

SEQ ID NO: 834236 - DNA, 15 bp, Homo sapiens
gctgcacagtggcta

SEQ ID NO: 834237 - DNA, 15 bp, Homo sapiens
ctgcacagtggctac

SEQ ID NO: 834238 - DNA, 15 bp, Homo sapiens
tgcacagtggctaca

SEQ ID NO: 834239 - DNA, 15 bp, Homo sapiens
gcacagtggctacac

SEQ ID NO: 834240 - DNA, 15 bp, Homo sapiens
cacagtggctacacc

SEQ ID NO: 834241 - DNA, 15 bp, Homo sapiens
acagtggctacacca

SEQ ID NO: 834242 - DNA, 15 bp, Homo sapiens
cagtggctacaccag

SEQ ID NO: 834243 - DNA, 15 bp, Homo sapiens
agtggctacaccagg

SEQ ID NO: 834244 - DNA, 15 bp, Homo sapiens
gtggctacaccagga

SEQ ID NO: 834245 - DNA, 15 bp, Homo sapiens
tggctacaccaggat

SEQ ID NO: 834246 - DNA, 15 bp, Homo sapiens
ggctacaccaggatc

SEQ ID NO: 834247 - DNA, 15 bp, Homo sapiens
gctacaccaggatca

SEQ ID NO: 834248 - DNA, 15 bp, Homo sapiens
ctacaccaggatcag

SEQ ID NO: 834249 - DNA, 15 bp, Homo sapiens
tacaccaggatcagg

SEQ ID NO: 834250 - DNA, 15 bp, Homo sapiens
acaccaggatcaggg

SEQ ID NO: 834251 - DNA, 15 bp, Homo sapiens
caccaggatcagggt

SEQ ID NO: 834252 - DNA, 15 bp, Homo sapiens
accaggatcagggtt

SEQ ID NO: 834253 - DNA, 15 bp, Homo sapiens
ccaggatcagggttg

SEQ ID NO: 834254 - DNA, 15 bp, Homo sapiens
caggatcagggttgg

SEQ ID NO: 834255 - DNA, 15 bp, Homo sapiens
aggatcagggttggg

SEQ ID NO: 834256 - DNA, 15 bp, Homo sapiens
ggatcagggttgggt

SEQ ID NO: 834257 - DNA, 15 bp, Homo sapiens
gatcagggttgggtg

SEQ ID NO: 834258 - DNA, 15 bp, Homo sapiens
atcagggttgggtgt

SEQ ID NO: 834259 - DNA, 15 bp, Homo sapiens
tcagggttgggtgtg

SEQ ID NO: 834260 - DNA, 15 bp, Homo sapiens
cagggttgggtgtgt

SEQ ID NO: 834261 - DNA, 15 bp, Homo sapiens
agggttgggtgtgtc

SEQ ID NO: 834262 - DNA, 15 bp, Homo sapiens
gggttgggtgtgtca

SEQ ID NO: 834263 - DNA, 15 bp, Homo sapiens
ggttgggtgtgtcac

SEQ ID NO: 834264 - DNA, 15 bp, Homo sapiens
gttgggtgtgtcact

SEQ ID NO: 834265 - DNA, 15 bp, Homo sapiens
ttgggtgtgtcactt

SEQ ID NO: 834266 - DNA, 15 bp, Homo sapiens
tgggtgtgtcacttg

SEQ ID NO: 834267 - DNA, 15 bp, Homo sapiens
gggtgtgtcacttgt

SEQ ID NO: 834268 - DNA, 15 bp, Homo sapiens
ggtgtgtcacttgtt

SEQ ID NO: 834269 - DNA, 15 bp, Homo sapiens
gtgtgtcacttgttc

SEQ ID NO: 834270 - DNA, 15 bp, Homo sapiens
tgtgtcacttgttcc

SEQ ID NO: 834271 - DNA, 15 bp, Homo sapiens
gtgtcacttgttcct

SEQ ID NO: 834272 - DNA, 15 bp, Homo sapiens
tgtcacttgttcctt

SEQ ID NO: 834273 - DNA, 15 bp, Homo sapiens
gtcacttgttccttt

SEQ ID NO: 834274 - DNA, 15 bp, Homo sapiens
tcacttgttcctttc

SEQ ID NO: 834275 - DNA, 15 bp, Homo sapiens
cacttgttcctttct

SEQ ID NO: 834276 - DNA, 15 bp, Homo sapiens
acttgttcctttctt

SEQ ID NO: 834277 - DNA, 15 bp, Homo sapiens
cttgttcctttcttt

SEQ ID NO: 834278 - DNA, 15 bp, Homo sapiens
ttgttcctttctttg

SEQ ID NO: 834279 - DNA, 15 bp, Homo sapiens
tgttcctttctttga

SEQ ID NO: 834280 - DNA, 15 bp, Homo sapiens
gttcctttctttgaa

SEQ ID NO: 834281 - DNA, 15 bp, Homo sapiens
ttcctttctttgaag

SEQ ID NO: 834282 - DNA, 15 bp, Homo sapiens
tcctttctttgaagt

SEQ ID NO: 834283 - DNA, 15 bp, Homo sapiens
cctttctttgaagta

SEQ ID NO: 834284 - DNA, 15 bp, Homo sapiens
ctttctttgaagtag

SEQ ID NO: 834285 - DNA, 15 bp, Homo sapiens
tttctttgaagtagg

SEQ ID NO: 834286 - DNA, 15 bp, Homo sapiens
ttctttgaagtagga

SEQ ID NO: 834287 - DNA, 15 bp, Homo sapiens
tctttgaagtaggaa

SEQ ID NO: 834288 - DNA, 15 bp, Homo sapiens
ctttgaagtaggaag

SEQ ID NO: 834289 - DNA, 15 bp, Homo sapiens
tttgaagtaggaagg

SEQ ID NO: 834290 - DNA, 15 bp, Homo sapiens
ttgaagtaggaagga

SEQ ID NO: 834291 - DNA, 15 bp, Homo sapiens
tgaagtaggaaggat

SEQ ID NO: 834292 - DNA, 15 bp, Homo sapiens
gaagtaggaaggatt

SEQ ID NO: 834293 - DNA, 15 bp, Homo sapiens
aagtaggaaggattt

SEQ ID NO: 834294 - DNA, 15 bp, Homo sapiens
agtaggaaggatttt

SEQ ID NO: 834295 - DNA, 15 bp, Homo sapiens
gtaggaaggattttc

SEQ ID NO: 834296 - DNA, 15 bp, Homo sapiens
taggaaggattttca

SEQ ID NO: 834297 - DNA, 15 bp, Homo sapiens
aggaaggattttcaa

SEQ ID NO: 834298 - DNA, 15 bp, Homo sapiens
ggaaggattttcaac

SEQ ID NO: 834299 - DNA, 15 bp, Homo sapiens
gaaggattttcaact

SEQ ID NO: 834300 - DNA, 15 bp, Homo sapiens
aaggattttcaactt

SEQ ID NO: 834301 - DNA, 15 bp, Homo sapiens
aggattttcaacttt

SEQ ID NO: 834302 - DNA, 15 bp, Homo sapiens
ggattttcaactttt

SEQ ID NO: 834303 - DNA, 15 bp, Homo sapiens
gattttcaacttttg

SEQ ID NO: 834304 - DNA, 15 bp, Homo sapiens
attttcaacttttga

SEQ ID NO: 834305 - DNA, 15 bp, Homo sapiens
ttttcaacttttgac

SEQ ID NO: 834306 - DNA, 15 bp, Homo sapiens
tttcaacttttgaca

SEQ ID NO: 834307 - DNA, 15 bp, Homo sapiens
ttcaacttttgacac

SEQ ID NO: 834308 - DNA, 15 bp, Homo sapiens
tcaacttttgacacc

SEQ ID NO: 834309 - DNA, 15 bp, Homo sapiens
caacttttgacacct

SEQ ID NO: 834310 - DNA, 15 bp, Homo sapiens
aacttttgacacctt

SEQ ID NO: 834311 - DNA, 15 bp, Homo sapiens
acttttgacaccttt

SEQ ID NO: 834312 - DNA, 15 bp, Homo sapiens
cttttgacacctttt

SEQ ID NO: 834313 - DNA, 15 bp, Homo sapiens
ttttgacaccttttt

SEQ ID NO: 834314 - DNA, 15 bp, Homo sapiens
tttgacacctttttc

SEQ ID NO: 834315 - DNA, 15 bp, Homo sapiens
ttgacacctttttct

SEQ ID NO: 834316 - DNA, 15 bp, Homo sapiens
tgacacctttttctg

SEQ ID NO: 834317 - DNA, 15 bp, Homo sapiens
gacacctttttctgt

SEQ ID NO: 834318 - DNA, 15 bp, Homo sapiens
acacctttttctgtc

SEQ ID NO: 834319 - DNA, 15 bp, Homo sapiens
cacctttttctgtca

SEQ ID NO: 834320 - DNA, 15 bp, Homo sapiens
acctttttctgtcat

SEQ ID NO: 834321 - DNA, 15 bp, Homo sapiens
cctttttctgtcatt

SEQ ID NO: 834322 - DNA, 15 bp, Homo sapiens
ctttttctgtcattg

SEQ ID NO: 834323 - DNA, 15 bp, Homo sapiens
tttttctgtcattgg

SEQ ID NO: 834324 - DNA, 15 bp, Homo sapiens
ttttctgtcattgga

SEQ ID NO: 834325 - DNA, 15 bp, Homo sapiens
tttctgtcattggaa

SEQ ID NO: 834326 - DNA, 15 bp, Homo sapiens
ttctgtcattggaaa

SEQ ID NO: 834327 - DNA, 15 bp, Homo sapiens
tctgtcattggaaat

SEQ ID NO: 834328 - DNA, 15 bp, Homo sapiens
ctgtcattggaaatg

SEQ ID NO: 834329 - DNA, 15 bp, Homo sapiens
tgtcattggaaatga

SEQ ID NO: 834330 - DNA, 15 bp, Homo sapiens
gtcattggaaatgat

SEQ ID NO: 834331 - DNA, 15 bp, Homo sapiens
tcattggaaatgatt

SEQ ID NO: 834332 - DNA, 15 bp, Homo sapiens
cattggaaatgattt

SEQ ID NO: 834333 - DNA, 15 bp, Homo sapiens
attggaaatgattta

SEQ ID NO: 834334 - DNA, 15 bp, Homo sapiens
ttggaaatgatttaa

SEQ ID NO: 834335 - DNA, 15 bp, Homo sapiens
tggaaatgatttaaa

SEQ ID NO: 834336 - DNA, 15 bp, Homo sapiens
ggaaatgatttaaaa

SEQ ID NO: 834337 - DNA, 15 bp, Homo sapiens
gaaatgatttaaaaa

SEQ ID NO: 834338 - DNA, 15 bp, Homo sapiens
aaatgatttaaaaaa

SEQ ID NO: 834339 - DNA, 15 bp, Homo sapiens
aatgatttaaaaaaa

SEQ ID NO: 834340 - DNA, 15 bp, Homo sapiens
atgatttaaaaaaaa

SEQ ID NO: 834341 - DNA, 15 bp, Homo sapiens
tgatttaaaaaaaaa

SEQ ID NO: 834342 - DNA, 15 bp, Homo sapiens
gatttaaaaaaaaaa

SEQ ID NO: 834343 - DNA, 15 bp, Homo sapiens
atttaaaaaaaaaaa

SEQ ID NO: 834344 - DNA, 15 bp, Homo sapiens
tttaaaaaaaaaaat

SEQ ID NO: 834345 - DNA, 15 bp, Homo sapiens
ttaaaaaaaaaaatg

SEQ ID NO: 834346 - DNA, 15 bp, Homo sapiens
taaaaaaaaaaatgt

SEQ ID NO: 834347 - DNA, 15 bp, Homo sapiens
aaaaaaaaaaatgta

SEQ ID NO: 834348 - DNA, 15 bp, Homo sapiens
aaaaaaaaaatgtaa

SEQ ID NO: 834349 - DNA, 15 bp, Homo sapiens
aaaaaaaaatgtaac

SEQ ID NO: 834350 - DNA, 15 bp, Homo sapiens
aaaaaaaatgtaacc

SEQ ID NO: 834351 - DNA, 15 bp, Homo sapiens
aaaaaaatgtaaccc

SEQ ID NO: 834352 - DNA, 15 bp, Homo sapiens
aaaaaatgtaaccct

SEQ ID NO: 834353 - DNA, 15 bp, Homo sapiens
aaaaatgtaaccctt

SEQ ID NO: 834354 - DNA, 15 bp, Homo sapiens
aaaatgtaacccttt

SEQ ID NO: 834355 - DNA, 15 bp, Homo sapiens
aaatgtaacccttta

SEQ ID NO: 834356 - DNA, 15 bp, Homo sapiens
aatgtaaccctttaa

SEQ ID NO: 834357 - DNA, 15 bp, Homo sapiens
atgtaaccctttaag

SEQ ID NO: 834358 - DNA, 15 bp, Homo sapiens
tgtaaccctttaagg

SEQ ID NO: 834359 - DNA, 15 bp, Homo sapiens
gtaaccctttaagga

SEQ ID NO: 834360 - DNA, 15 bp, Homo sapiens
taaccctttaaggaa

SEQ ID NO: 834361 - DNA, 15 bp, Homo sapiens
aaccctttaaggaac

SEQ ID NO: 834362 - DNA, 15 bp, Homo sapiens
accctttaaggaacc

SEQ ID NO: 834363 - DNA, 15 bp, Homo sapiens
ccctttaaggaacct

SEQ ID NO: 834364 - DNA, 15 bp, Homo sapiens
cctttaaggaacctg

SEQ ID NO: 834365 - DNA, 15 bp, Homo sapiens
ctttaaggaacctgg

SEQ ID NO: 834366 - DNA, 15 bp, Homo sapiens
tttaaggaacctggc

SEQ ID NO: 834367 - DNA, 15 bp, Homo sapiens
ttaaggaacctggct

SEQ ID NO: 834368 - DNA, 15 bp, Homo sapiens
taaggaacctggctt

SEQ ID NO: 834369 - DNA, 15 bp, Homo sapiens
aaggaacctggcttc

SEQ ID NO: 834370 - DNA, 15 bp, Homo sapiens
aggaacctggcttca

SEQ ID NO: 834371 - DNA, 15 bp, Homo sapiens
ggaacctggcttcac

SEQ ID NO: 834372 - DNA, 15 bp, Homo sapiens
gaacctggcttcact

SEQ ID NO: 834373 - DNA, 15 bp, Homo sapiens
aacctggcttcactg

SEQ ID NO: 834374 - DNA, 15 bp, Homo sapiens
acctggcttcactgt

SEQ ID NO: 834375 - DNA, 15 bp, Homo sapiens
cctggcttcactgtc

SEQ ID NO: 834376 - DNA, 15 bp, Homo sapiens
ctggcttcactgtct

SEQ ID NO: 834377 - DNA, 15 bp, Homo sapiens
tggcttcactgtctt

SEQ ID NO: 834378 - DNA, 15 bp, Homo sapiens
ggcttcactgtcttc

SEQ ID NO: 834379 - DNA, 15 bp, Homo sapiens
gcttcactgtcttca

SEQ ID NO: 834380 - DNA, 15 bp, Homo sapiens
cttcactgtcttcaa

SEQ ID NO: 834381 - DNA, 15 bp, Homo sapiens
ttcactgtcttcaaa

SEQ ID NO: 834382 - DNA, 15 bp, Homo sapiens
tcactgtcttcaaaa

SEQ ID NO: 834383 - DNA, 15 bp, Homo sapiens
cactgtcttcaaaat

SEQ ID NO: 834384 - DNA, 15 bp, Homo sapiens
actgtcttcaaaatt

SEQ ID NO: 834385 - DNA, 15 bp, Homo sapiens
ctgtcttcaaaattc

SEQ ID NO: 834386 - DNA, 15 bp, Homo sapiens
tgtcttcaaaattcc

SEQ ID NO: 834387 - DNA, 15 bp, Homo sapiens
gtcttcaaaattcca

SEQ ID NO: 834388 - DNA, 15 bp, Homo sapiens
tcttcaaaattccaa

SEQ ID NO: 834389 - DNA, 15 bp, Homo sapiens
cttcaaaattccaaa

SEQ ID NO: 834390 - DNA, 15 bp, Homo sapiens
ttcaaaattccaaat

SEQ ID NO: 834391 - DNA, 15 bp, Homo sapiens
tcaaaattccaaatg

SEQ ID NO: 834392 - DNA, 15 bp, Homo sapiens
caaaattccaaatgg

SEQ ID NO: 834393 - DNA, 15 bp, Homo sapiens
aaaattccaaatgga

SEQ ID NO: 834394 - DNA, 15 bp, Homo sapiens
aaattccaaatggaa

SEQ ID NO: 834395 - DNA, 15 bp, Homo sapiens
aattccaaatggaaa

SEQ ID NO: 834396 - DNA, 15 bp, Homo sapiens
attccaaatggaaaa

SEQ ID NO: 834397 - DNA, 15 bp, Homo sapiens
ttccaaatggaaaac

SEQ ID NO: 834398 - DNA, 15 bp, Homo sapiens
tccaaatggaaaacc

SEQ ID NO: 834399 - DNA, 15 bp, Homo sapiens
ccaaatggaaaacca

SEQ ID NO: 834400 - DNA, 15 bp, Homo sapiens
caaatggaaaaccaa

SEQ ID NO: 834401 - DNA, 15 bp, Homo sapiens
aaatggaaaaccaaa

SEQ ID NO: 834402 - DNA, 15 bp, Homo sapiens
aatggaaaaccaaaa

SEQ ID NO: 834403 - DNA, 15 bp, Homo sapiens
atggaaaaccaaaag

SEQ ID NO: 834404 - DNA, 15 bp, Homo sapiens
tggaaaaccaaaaga

SEQ ID NO: 834405 - DNA, 15 bp, Homo sapiens
ggaaaaccaaaagaa

SEQ ID NO: 834406 - DNA, 15 bp, Homo sapiens
gaaaaccaaaagaag

SEQ ID NO: 834407 - DNA, 15 bp, Homo sapiens
aaaaccaaaagaaga

SEQ ID NO: 834408 - DNA, 15 bp, Homo sapiens
aaaccaaaagaagat

SEQ ID NO: 834409 - DNA, 15 bp, Homo sapiens
aaccaaaagaagatg

SEQ ID NO: 834410 - DNA, 15 bp, Homo sapiens
accaaaagaagatga

SEQ ID NO: 834411 - DNA, 15 bp, Homo sapiens
ccaaaagaagatgaa

SEQ ID NO: 834412 - DNA, 15 bp, Homo sapiens
caaaagaagatgaag

SEQ ID NO: 834413 - DNA, 15 bp, Homo sapiens
aaaagaagatgaagc

SEQ ID NO: 834414 - DNA, 15 bp, Homo sapiens
aaagaagatgaagct

SEQ ID NO: 834415 - DNA, 15 bp, Homo sapiens
aagaagatgaagctt

SEQ ID NO: 834416 - DNA, 15 bp, Homo sapiens
agaagatgaagctta

SEQ ID NO: 834417 - DNA, 15 bp, Homo sapiens
gaagatgaagcttaa

SEQ ID NO: 834418 - DNA, 15 bp, Homo sapiens
aagatgaagcttaat

SEQ ID NO: 834419 - DNA, 15 bp, Homo sapiens
agatgaagcttaatg

SEQ ID NO: 834420 - DNA, 15 bp, Homo sapiens
gatgaagcttaatgt

SEQ ID NO: 834421 - DNA, 15 bp, Homo sapiens
atgaagcttaatgtt

SEQ ID NO: 834422 - DNA, 15 bp, Homo sapiens
tgaagcttaatgttt

SEQ ID NO: 834423 - DNA, 15 bp, Homo sapiens
gaagcttaatgtttt

SEQ ID NO: 834424 - DNA, 15 bp, Homo sapiens
aagcttaatgttttg

SEQ ID NO: 834425 - DNA, 15 bp, Homo sapiens
agcttaatgttttga

SEQ ID NO: 834426 - DNA, 15 bp, Homo sapiens
gcttaatgttttgac

SEQ ID NO: 834427 - DNA, 15 bp, Homo sapiens
cttaatgttttgact

SEQ ID NO: 834428 - DNA, 15 bp, Homo sapiens
ttaatgttttgactc

SEQ ID NO: 834429 - DNA, 15 bp, Homo sapiens
taatgttttgactcc

SEQ ID NO: 834430 - DNA, 15 bp, Homo sapiens
aatgttttgactcca

SEQ ID NO: 834431 - DNA, 15 bp, Homo sapiens
atgttttgactccac

SEQ ID NO: 834432 - DNA, 15 bp, Homo sapiens
tgttttgactccaca

SEQ ID NO: 834433 - DNA, 15 bp, Homo sapiens
gttttgactccacag

SEQ ID NO: 834434 - DNA, 15 bp, Homo sapiens
ttttgactccacaga

SEQ ID NO: 834435 - DNA, 15 bp, Homo sapiens
tttgactccacagag

SEQ ID NO: 834436 - DNA, 15 bp, Homo sapiens
ttgactccacagaga

SEQ ID NO: 834437 - DNA, 15 bp, Homo sapiens
tgactccacagagat

SEQ ID NO: 834438 - DNA, 15 bp, Homo sapiens
gactccacagagatg

SEQ ID NO: 834439 - DNA, 15 bp, Homo sapiens
actccacagagatgt

SEQ ID NO: 834440 - DNA, 15 bp, Homo sapiens
ctccacagagatgtt

SEQ ID NO: 834441 - DNA, 15 bp, Homo sapiens
tccacagagatgttt

SEQ ID NO: 834442 - DNA, 15 bp, Homo sapiens
ccacagagatgtttg

SEQ ID NO: 834443 - DNA, 15 bp, Homo sapiens
cacagagatgtttgg

SEQ ID NO: 834444 - DNA, 15 bp, Homo sapiens
acagagatgtttggg

SEQ ID NO: 834445 - DNA, 15 bp, Homo sapiens
cagagatgtttgggg

SEQ ID NO: 834446 - DNA, 15 bp, Homo sapiens
agagatgtttggggc

SEQ ID NO: 834447 - DNA, 15 bp, Homo sapiens
gagatgtttggggct

SEQ ID NO: 834448 - DNA, 15 bp, Homo sapiens
agatgtttggggcta

SEQ ID NO: 834449 - DNA, 15 bp, Homo sapiens
gatgtttggggctac

SEQ ID NO: 834450 - DNA, 15 bp, Homo sapiens
atgtttggggctacc

SEQ ID NO: 834451 - DNA, 15 bp, Homo sapiens
tgtttggggctacct

SEQ ID NO: 834452 - DNA, 15 bp, Homo sapiens
gtttggggctacctg

SEQ ID NO: 834453 - DNA, 15 bp, Homo sapiens
tttggggctacctga

SEQ ID NO: 834454 - DNA, 15 bp, Homo sapiens
ttggggctacctgag

SEQ ID NO: 834455 - DNA, 15 bp, Homo sapiens
tggggctacctgagt

SEQ ID NO: 834456 - DNA, 15 bp, Homo sapiens
ggggctacctgagta

SEQ ID NO: 834457 - DNA, 15 bp, Homo sapiens
gggctacctgagtaa

SEQ ID NO: 834458 - DNA, 15 bp, Homo sapiens
ggctacctgagtaat

SEQ ID NO: 834459 - DNA, 15 bp, Homo sapiens
gctacctgagtaata

SEQ ID NO: 834460 - DNA, 15 bp, Homo sapiens
ctacctgagtaatag

SEQ ID NO: 834461 - DNA, 15 bp, Homo sapiens
tacctgagtaatagt

SEQ ID NO: 834462 - DNA, 15 bp, Homo sapiens
acctgagtaatagtt

SEQ ID NO: 834463 - DNA, 15 bp, Homo sapiens
cctgagtaatagttt

SEQ ID NO: 834464 - DNA, 15 bp, Homo sapiens
ctgagtaatagtttt

SEQ ID NO: 834465 - DNA, 15 bp, Homo sapiens
tgagtaatagttttg

SEQ ID NO: 834466 - DNA, 15 bp, Homo sapiens
gagtaatagttttga

SEQ ID NO: 834467 - DNA, 15 bp, Homo sapiens
agtaatagttttgaa

SEQ ID NO: 834468 - DNA, 15 bp, Homo sapiens
gtaatagttttgaaa

SEQ ID NO: 834469 - DNA, 15 bp, Homo sapiens
taatagttttgaaat

SEQ ID NO: 834470 - DNA, 15 bp, Homo sapiens
aatagttttgaaatg

SEQ ID NO: 834471 - DNA, 15 bp, Homo sapiens
atagttttgaaatgg

SEQ ID NO: 834472 - DNA, 15 bp, Homo sapiens
tagttttgaaatggg

SEQ ID NO: 834473 - DNA, 15 bp, Homo sapiens
agttttgaaatgggt

SEQ ID NO: 834474 - DNA, 15 bp, Homo sapiens
gttttgaaatgggtg

SEQ ID NO: 834475 - DNA, 15 bp, Homo sapiens
ttttgaaatgggtgt

SEQ ID NO: 834476 - DNA, 15 bp, Homo sapiens
tttgaaatgggtgtt

SEQ ID NO: 834477 - DNA, 15 bp, Homo sapiens
ttgaaatgggtgttt

SEQ ID NO: 834478 - DNA, 15 bp, Homo sapiens
tgaaatgggtgtttc

SEQ ID NO: 834479 - DNA, 15 bp, Homo sapiens
gaaatgggtgtttct

SEQ ID NO: 834480 - DNA, 15 bp, Homo sapiens
aaatgggtgtttctc

SEQ ID NO: 834481 - DNA, 15 bp, Homo sapiens
aatgggtgtttctct

SEQ ID NO: 834482 - DNA, 15 bp, Homo sapiens
atgggtgtttctctt

SEQ ID NO: 834483 - DNA, 15 bp, Homo sapiens
tgggtgtttctctta

SEQ ID NO: 834484 - DNA, 15 bp, Homo sapiens
gggtgtttctcttaa

SEQ ID NO: 834485 - DNA, 15 bp, Homo sapiens
ggtgtttctcttaat

SEQ ID NO: 834486 - DNA, 15 bp, Homo sapiens
gtgtttctcttaatt

SEQ ID NO: 834487 - DNA, 15 bp, Homo sapiens
tgtttctcttaattg

SEQ ID NO: 834488 - DNA, 15 bp, Homo sapiens
gtttctcttaattgt

SEQ ID NO: 834489 - DNA, 15 bp, Homo sapiens
tttctcttaattgta

SEQ ID NO: 834490 - DNA, 15 bp, Homo sapiens
ttctcttaattgtag

SEQ ID NO: 834491 - DNA, 15 bp, Homo sapiens
tctcttaattgtagt

SEQ ID NO: 834492 - DNA, 15 bp, Homo sapiens
ctcttaattgtagta

SEQ ID NO: 834493 - DNA, 15 bp, Homo sapiens
tcttaattgtagtat

SEQ ID NO: 834494 - DNA, 15 bp, Homo sapiens
cttaattgtagtatt

SEQ ID NO: 834495 - DNA, 15 bp, Homo sapiens
ttaattgtagtattt

SEQ ID NO: 834496 - DNA, 15 bp, Homo sapiens
taattgtagtatttt

SEQ ID NO: 834497 - DNA, 15 bp, Homo sapiens
aattgtagtatttta

SEQ ID NO: 834498 - DNA, 15 bp, Homo sapiens
attgtagtattttat

SEQ ID NO: 834499 - DNA, 15 bp, Homo sapiens
ttgtagtattttatt

SEQ ID NO: 834500 - DNA, 15 bp, Homo sapiens
tgtagtattttattt

SEQ ID NO: 834501 - DNA, 15 bp, Homo sapiens
gtagtattttattta

SEQ ID NO: 834502 - DNA, 15 bp, Homo sapiens
tagtattttatttaa

SEQ ID NO: 834503 - DNA, 15 bp, Homo sapiens
agtattttatttaaa

SEQ ID NO: 834504 - DNA, 15 bp, Homo sapiens
gtattttatttaaac

SEQ ID NO: 834505 - DNA, 15 bp, Homo sapiens
tattttatttaaacc

SEQ ID NO: 834506 - DNA, 15 bp, Homo sapiens
attttatttaaaccc

SEQ ID NO: 834507 - DNA, 15 bp, Homo sapiens
ttttatttaaaccct

SEQ ID NO: 834508 - DNA, 15 bp, Homo sapiens
tttatttaaacccta

SEQ ID NO: 834509 - DNA, 15 bp, Homo sapiens
ttatttaaaccctaa

SEQ ID NO: 834510 - DNA, 15 bp, Homo sapiens
tatttaaaccctaac

SEQ ID NO: 834511 - DNA, 15 bp, Homo sapiens
atttaaaccctaact

SEQ ID NO: 834512 - DNA, 15 bp, Homo sapiens
tttaaaccctaactg

SEQ ID NO: 834513 - DNA, 15 bp, Homo sapiens
ttaaaccctaactgt

SEQ ID NO: 834514 - DNA, 15 bp, Homo sapiens
taaaccctaactgtg

SEQ ID NO: 834515 - DNA, 15 bp, Homo sapiens
aaaccctaactgtgg

SEQ ID NO: 834516 - DNA, 15 bp, Homo sapiens
aaccctaactgtggt

SEQ ID NO: 834517 - DNA, 15 bp, Homo sapiens
accctaactgtggta

SEQ ID NO: 834518 - DNA, 15 bp, Homo sapiens
ccctaactgtggtag

SEQ ID NO: 834519 - DNA, 15 bp, Homo sapiens
cctaactgtggtagg

SEQ ID NO: 834520 - DNA, 15 bp, Homo sapiens
ctaactgtggtaggg

SEQ ID NO: 834521 - DNA, 15 bp, Homo sapiens
taactgtggtagggt

SEQ ID NO: 834522 - DNA, 15 bp, Homo sapiens
aactgtggtagggtt

SEQ ID NO: 834523 - DNA, 15 bp, Homo sapiens
actgtggtagggtta

SEQ ID NO: 834524 - DNA, 15 bp, Homo sapiens
ctgtggtagggttaa

SEQ ID NO: 834525 - DNA, 15 bp, Homo sapiens
tgtggtagggttaat

SEQ ID NO: 834526 - DNA, 15 bp, Homo sapiens
gtggtagggttaata

SEQ ID NO: 834527 - DNA, 15 bp, Homo sapiens
tggtagggttaatat

SEQ ID NO: 834528 - DNA, 15 bp, Homo sapiens
ggtagggttaatatg

SEQ ID NO: 834529 - DNA, 15 bp, Homo sapiens
gtagggttaatatga

SEQ ID NO: 834530 - DNA, 15 bp, Homo sapiens
tagggttaatatgaa

SEQ ID NO: 834531 - DNA, 15 bp, Homo sapiens
agggttaatatgaag

SEQ ID NO: 834532 - DNA, 15 bp, Homo sapiens
gggttaatatgaaga

SEQ ID NO: 834533 - DNA, 15 bp, Homo sapiens
ggttaatatgaagac

SEQ ID NO: 834534 - DNA, 15 bp, Homo sapiens
gttaatatgaagaca

SEQ ID NO: 834535 - DNA, 15 bp, Homo sapiens
ttaatatgaagacac

SEQ ID NO: 834536 - DNA, 15 bp, Homo sapiens
taatatgaagacaca

SEQ ID NO: 834537 - DNA, 15 bp, Homo sapiens
aatatgaagacacat

SEQ ID NO: 834538 - DNA, 15 bp, Homo sapiens
atatgaagacacata

SEQ ID NO: 834539 - DNA, 15 bp, Homo sapiens
tatgaagacacatag

SEQ ID NO: 834540 - DNA, 15 bp, Homo sapiens
atgaagacacatagg

SEQ ID NO: 834541 - DNA, 15 bp, Homo sapiens
tgaagacacataggt

SEQ ID NO: 834542 - DNA, 15 bp, Homo sapiens
gaagacacataggta

SEQ ID NO: 834543 - DNA, 15 bp, Homo sapiens
aagacacataggtac

SEQ ID NO: 834544 - DNA, 15 bp, Homo sapiens
agacacataggtact

SEQ ID NO: 834545 - DNA, 15 bp, Homo sapiens
gacacataggtacta

SEQ ID NO: 834546 - DNA, 15 bp, Homo sapiens
acacataggtactag

SEQ ID NO: 834547 - DNA, 15 bp, Homo sapiens
cacataggtactagg

SEQ ID NO: 834548 - DNA, 15 bp, Homo sapiens
acataggtactaggg

SEQ ID NO: 834549 - DNA, 15 bp, Homo sapiens
cataggtactagggt

SEQ ID NO: 834550 - DNA, 15 bp, Homo sapiens
ataggtactagggtg

SEQ ID NO: 834551 - DNA, 15 bp, Homo sapiens
taggtactagggtga

SEQ ID NO: 834552 - DNA, 15 bp, Homo sapiens
aggtactagggtgac

SEQ ID NO: 834553 - DNA, 15 bp, Homo sapiens
ggtactagggtgact

SEQ ID NO: 834554 - DNA, 15 bp, Homo sapiens
gtactagggtgactg

SEQ ID NO: 834555 - DNA, 15 bp, Homo sapiens
tactagggtgactgg

SEQ ID NO: 834556 - DNA, 15 bp, Homo sapiens
actagggtgactggc

SEQ ID NO: 834557 - DNA, 15 bp, Homo sapiens
ctagggtgactggca

SEQ ID NO: 834558 - DNA, 15 bp, Homo sapiens
tagggtgactggcag

SEQ ID NO: 834559 - DNA, 15 bp, Homo sapiens
agggtgactggcagg

SEQ ID NO: 834560 - DNA, 15 bp, Homo sapiens
gggtgactggcagga

SEQ ID NO: 834561 - DNA, 15 bp, Homo sapiens
ggtgactggcaggac

SEQ ID NO: 834562 - DNA, 15 bp, Homo sapiens
gtgactggcaggaca

SEQ ID NO: 834563 - DNA, 15 bp, Homo sapiens
tgactggcaggacaa

SEQ ID NO: 834564 - DNA, 15 bp, Homo sapiens
gactggcaggacaag

SEQ ID NO: 834565 - DNA, 15 bp, Homo sapiens
actggcaggacaagg

SEQ ID NO: 834566 - DNA, 15 bp, Homo sapiens
ctggcaggacaagga

SEQ ID NO: 834567 - DNA, 15 bp, Homo sapiens
tggcaggacaaggag

SEQ ID NO: 834568 - DNA, 15 bp, Homo sapiens
ggcaggacaaggagg

SEQ ID NO: 834569 - DNA, 15 bp, Homo sapiens
gcaggacaaggaggc

SEQ ID NO: 834570 - DNA, 15 bp, Homo sapiens
caggacaaggaggca

SEQ ID NO: 834571 - DNA, 15 bp, Homo sapiens
aggacaaggaggcat

SEQ ID NO: 834572 - DNA, 15 bp, Homo sapiens
ggacaaggaggcata

SEQ ID NO: 834573 - DNA, 15 bp, Homo sapiens
gacaaggaggcatag

SEQ ID NO: 834574 - DNA, 15 bp, Homo sapiens
acaaggaggcataga

SEQ ID NO: 834575 - DNA, 15 bp, Homo sapiens
caaggaggcatagaa

SEQ ID NO: 834576 - DNA, 15 bp, Homo sapiens
aaggaggcatagaaa

SEQ ID NO: 834577 - DNA, 15 bp, Homo sapiens
aggaggcatagaaat

SEQ ID NO: 834578 - DNA, 15 bp, Homo sapiens
ggaggcatagaaatt

SEQ ID NO: 834579 - DNA, 15 bp, Homo sapiens
gaggcatagaaatta

SEQ ID NO: 834580 - DNA, 15 bp, Homo sapiens
aggcatagaaattac

SEQ ID NO: 834581 - DNA, 15 bp, Homo sapiens
ggcatagaaattact

SEQ ID NO: 834582 - DNA, 15 bp, Homo sapiens
gcatagaaattactg

SEQ ID NO: 834583 - DNA, 15 bp, Homo sapiens
catagaaattactgg

SEQ ID NO: 834584 - DNA, 15 bp, Homo sapiens
atagaaattactggt

SEQ ID NO: 834585 - DNA, 15 bp, Homo sapiens
tagaaattactggtc

SEQ ID NO: 834586 - DNA, 15 bp, Homo sapiens
agaaattactggtca

SEQ ID NO: 834587 - DNA, 15 bp, Homo sapiens
gaaattactggtcaa

SEQ ID NO: 834588 - DNA, 15 bp, Homo sapiens
aaattactggtcaag

SEQ ID NO: 834589 - DNA, 15 bp, Homo sapiens
aattactggtcaagg

SEQ ID NO: 834590 - DNA, 15 bp, Homo sapiens
attactggtcaaggg

SEQ ID NO: 834591 - DNA, 15 bp, Homo sapiens
ttactggtcaagggc

SEQ ID NO: 834592 - DNA, 15 bp, Homo sapiens
tactggtcaagggcg

SEQ ID NO: 834593 - DNA, 15 bp, Homo sapiens
actggtcaagggcgg

SEQ ID NO: 834594 - DNA, 15 bp, Homo sapiens
ctggtcaagggcggg

SEQ ID NO: 834595 - DNA, 15 bp, Homo sapiens
tggtcaagggcgggg

SEQ ID NO: 834596 - DNA, 15 bp, Homo sapiens
ggtcaagggcggggc

SEQ ID NO: 834597 - DNA, 15 bp, Homo sapiens
gtcaagggcggggct

SEQ ID NO: 834598 - DNA, 15 bp, Homo sapiens
tcaagggcggggctc

SEQ ID NO: 834599 - DNA, 15 bp, Homo sapiens
caagggcggggctca

SEQ ID NO: 834600 - DNA, 15 bp, Homo sapiens
aagggcggggctcag

SEQ ID NO: 834601 - DNA, 15 bp, Homo sapiens
agggcggggctcagt

SEQ ID NO: 834602 - DNA, 15 bp, Homo sapiens
gggcggggctcagtg

SEQ ID NO: 834603 - DNA, 15 bp, Homo sapiens
ggcggggctcagtgg

SEQ ID NO: 834604 - DNA, 15 bp, Homo sapiens
gcggggctcagtggc

SEQ ID NO: 834605 - DNA, 15 bp, Homo sapiens
cggggctcagtggct

SEQ ID NO: 834606 - DNA, 15 bp, Homo sapiens
ggggctcagtggctt

SEQ ID NO: 834607 - DNA, 15 bp, Homo sapiens
gggctcagtggctta

SEQ ID NO: 834608 - DNA, 15 bp, Homo sapiens
ggctcagtggcttac

SEQ ID NO: 834609 - DNA, 15 bp, Homo sapiens
gctcagtggcttaca

SEQ ID NO: 834610 - DNA, 15 bp, Homo sapiens
ctcagtggcttacac

SEQ ID NO: 834611 - DNA, 15 bp, Homo sapiens
tcagtggcttacacc

SEQ ID NO: 834612 - DNA, 15 bp, Homo sapiens
cagtggcttacacct

SEQ ID NO: 834613 - DNA, 15 bp, Homo sapiens
agtggcttacacctg

SEQ ID NO: 834614 - DNA, 15 bp, Homo sapiens
acctgtaatcccaga

SEQ ID NO: 834615 - DNA, 15 bp, Homo sapiens
ctgtaatcccagaac

SEQ ID NO: 834616 - DNA, 15 bp, Homo sapiens
tgtaatcccagaact

SEQ ID NO: 834617 - DNA, 15 bp, Homo sapiens
gtaatcccagaactt

SEQ ID NO: 834618 - DNA, 15 bp, Homo sapiens
taatcccagaacttt

SEQ ID NO: 834619 - DNA, 15 bp, Homo sapiens
aatcccagaactttg

SEQ ID NO: 834620 - DNA, 15 bp, Homo sapiens
atcccagaactttgg

SEQ ID NO: 834621 - DNA, 15 bp, Homo sapiens
tcccagaactttggg

SEQ ID NO: 834622 - DNA, 15 bp, Homo sapiens
cccagaactttggga

SEQ ID NO: 834623 - DNA, 15 bp, Homo sapiens
aactttgggaggcca

SEQ ID NO: 834624 - DNA, 15 bp, Homo sapiens
ggtgggcagatcacg

SEQ ID NO: 834625 - DNA, 15 bp, Homo sapiens
gtgggcagatcacga

SEQ ID NO: 834626 - DNA, 15 bp, Homo sapiens
tgggcagatcacgag

SEQ ID NO: 834627 - DNA, 15 bp, Homo sapiens
gggcagatcacgagg

SEQ ID NO: 834628 - DNA, 15 bp, Homo sapiens
agatcacgaggtcag

SEQ ID NO: 834629 - DNA, 15 bp, Homo sapiens
tggtgaaaccccgta

SEQ ID NO: 834630 - DNA, 15 bp, Homo sapiens
ggtgaaaccccgtat

SEQ ID NO: 834631 - DNA, 15 bp, Homo sapiens
gtgaaaccccgtatc

SEQ ID NO: 834632 - DNA, 15 bp, Homo sapiens
tgaaaccccgtatct

SEQ ID NO: 834633 - DNA, 15 bp, Homo sapiens
gaaaccccgtatcta

SEQ ID NO: 834634 - DNA, 15 bp, Homo sapiens
aaaccccgtatctac

SEQ ID NO: 834635 - DNA, 15 bp, Homo sapiens
aaccccgtatctact

SEQ ID NO: 834636 - DNA, 15 bp, Homo sapiens
accccgtatctacta

SEQ ID NO: 834637 - DNA, 15 bp, Homo sapiens
ccccgtatctactaa

SEQ ID NO: 834638 - DNA, 15 bp, Homo sapiens
cccgtatctactaaa

SEQ ID NO: 834639 - DNA, 15 bp, Homo sapiens
ccgtatctactaaaa

SEQ ID NO: 834640 - DNA, 15 bp, Homo sapiens
cgtatctactaaaaa

SEQ ID NO: 834641 - DNA, 15 bp, Homo sapiens
gtatctactaaaaat

SEQ ID NO: 834642 - DNA, 15 bp, Homo sapiens
tatctactaaaaata

SEQ ID NO: 834643 - DNA, 15 bp, Homo sapiens
atctactaaaaatac

SEQ ID NO: 834644 - DNA, 15 bp, Homo sapiens
ctaaaaatacaaaac

SEQ ID NO: 834645 - DNA, 15 bp, Homo sapiens
taaaaatacaaaact

SEQ ID NO: 834646 - DNA, 15 bp, Homo sapiens
aaaaatacaaaactt

SEQ ID NO: 834647 - DNA, 15 bp, Homo sapiens
aaaacttagctgggt

SEQ ID NO: 834648 - DNA, 15 bp, Homo sapiens
aaacttagctgggtg

SEQ ID NO: 834649 - DNA, 15 bp, Homo sapiens
aacttagctgggtgt

SEQ ID NO: 834650 - DNA, 15 bp, Homo sapiens
acttagctgggtgtg

SEQ ID NO: 834651 - DNA, 15 bp, Homo sapiens
cttagctgggtgtgg

SEQ ID NO: 834652 - DNA, 15 bp, Homo sapiens
gctgggtgtggtggt

SEQ ID NO: 834653 - DNA, 15 bp, Homo sapiens
ctgggtgtggtggtg

SEQ ID NO: 834654 - DNA, 15 bp, Homo sapiens
tgggtgtggtggtgt

SEQ ID NO: 834655 - DNA, 15 bp, Homo sapiens
gggtgtggtggtgtg

SEQ ID NO: 834656 - DNA, 15 bp, Homo sapiens
ggtgtggtggtgtgt

SEQ ID NO: 834657 - DNA, 15 bp, Homo sapiens
gtgtggtggtgtgtg

SEQ ID NO: 834658 - DNA, 15 bp, Homo sapiens
tgtggtggtgtgtgc

SEQ ID NO: 834659 - DNA, 15 bp, Homo sapiens
gtggtggtgtgtgcc

SEQ ID NO: 834660 - DNA, 15 bp, Homo sapiens
tggtggtgtgtgcct

SEQ ID NO: 834661 - DNA, 15 bp, Homo sapiens
ggtggtgtgtgcctg

SEQ ID NO: 834662 - DNA, 15 bp, Homo sapiens
gtggtgtgtgcctgt

SEQ ID NO: 834663 - DNA, 15 bp, Homo sapiens
tggtgtgtgcctgta

SEQ ID NO: 834664 - DNA, 15 bp, Homo sapiens
ggtgtgtgcctgtaa

SEQ ID NO: 834665 - DNA, 15 bp, Homo sapiens
gtgtgtgcctgtaat

SEQ ID NO: 834666 - DNA, 15 bp, Homo sapiens
tgtgtgcctgtaatc

SEQ ID NO: 834667 - DNA, 15 bp, Homo sapiens
gtgtgcctgtaatcc

SEQ ID NO: 834668 - DNA, 15 bp, Homo sapiens
gcctgtaatcccagt

SEQ ID NO: 834669 - DNA, 15 bp, Homo sapiens
cctgtaatcccagtt

SEQ ID NO: 834670 - DNA, 15 bp, Homo sapiens
ctgtaatcccagtta

SEQ ID NO: 834671 - DNA, 15 bp, Homo sapiens
tgtaatcccagttac

SEQ ID NO: 834672 - DNA, 15 bp, Homo sapiens
gtaatcccagttact

SEQ ID NO: 834673 - DNA, 15 bp, Homo sapiens
taatcccagttactc

SEQ ID NO: 834674 - DNA, 15 bp, Homo sapiens
aatcccagttactca

SEQ ID NO: 834675 - DNA, 15 bp, Homo sapiens
atcccagttactcag

SEQ ID NO: 834676 - DNA, 15 bp, Homo sapiens
tcccagttactcagg

SEQ ID NO: 834677 - DNA, 15 bp, Homo sapiens
cccagttactcagga

SEQ ID NO: 834678 - DNA, 15 bp, Homo sapiens
ccagttactcaggag

SEQ ID NO: 834679 - DNA, 15 bp, Homo sapiens
cagttactcaggagg

SEQ ID NO: 834680 - DNA, 15 bp, Homo sapiens
agttactcaggaggt

SEQ ID NO: 834681 - DNA, 15 bp, Homo sapiens
gttactcaggaggtt

SEQ ID NO: 834682 - DNA, 15 bp, Homo sapiens
ttactcaggaggttg

SEQ ID NO: 834683 - DNA, 15 bp, Homo sapiens
tactcaggaggttga

SEQ ID NO: 834684 - DNA, 15 bp, Homo sapiens
actcaggaggttgag

SEQ ID NO: 834685 - DNA, 15 bp, Homo sapiens
ctcaggaggttgagg

SEQ ID NO: 834686 - DNA, 15 bp, Homo sapiens
tcaggaggttgaggc

SEQ ID NO: 834687 - DNA, 15 bp, Homo sapiens
caggaggttgaggca

SEQ ID NO: 834688 - DNA, 15 bp, Homo sapiens
aggaggttgaggcag

SEQ ID NO: 834689 - DNA, 15 bp, Homo sapiens
ggaggttgaggcagg

SEQ ID NO: 834690 - DNA, 15 bp, Homo sapiens
gaggttgaggcaggg

SEQ ID NO: 834691 - DNA, 15 bp, Homo sapiens
aggttgaggcagggg

SEQ ID NO: 834692 - DNA, 15 bp, Homo sapiens
ggttgaggcagggga

SEQ ID NO: 834693 - DNA, 15 bp, Homo sapiens
gttgaggcaggggaa

SEQ ID NO: 834694 - DNA, 15 bp, Homo sapiens
ttgaggcaggggaat

SEQ ID NO: 834695 - DNA, 15 bp, Homo sapiens
tgaggcaggggaatc

SEQ ID NO: 834696 - DNA, 15 bp, Homo sapiens
gaggcaggggaatcg

SEQ ID NO: 834697 - DNA, 15 bp, Homo sapiens
aggcaggggaatcgc

SEQ ID NO: 834698 - DNA, 15 bp, Homo sapiens
ggcaggggaatcgct

SEQ ID NO: 834699 - DNA, 15 bp, Homo sapiens
gcaggggaatcgctt

SEQ ID NO: 834700 - DNA, 15 bp, Homo sapiens
caggggaatcgcttg

SEQ ID NO: 834701 - DNA, 15 bp, Homo sapiens
aggggaatcgcttga

SEQ ID NO: 834702 - DNA, 15 bp, Homo sapiens
ggggaatcgcttgaa

SEQ ID NO: 834703 - DNA, 15 bp, Homo sapiens
gggaatcgcttgaac

SEQ ID NO: 834704 - DNA, 15 bp, Homo sapiens
ggaatcgcttgaacc

SEQ ID NO: 834705 - DNA, 15 bp, Homo sapiens
cgcgccactgcacta

SEQ ID NO: 834706 - DNA, 15 bp, Homo sapiens
gcgccactgcactac

SEQ ID NO: 834707 - DNA, 15 bp, Homo sapiens
cgccactgcactaca

SEQ ID NO: 834708 - DNA, 15 bp, Homo sapiens
gccactgcactacag

SEQ ID NO: 834709 - DNA, 15 bp, Homo sapiens
ccactgcactacagc

SEQ ID NO: 834710 - DNA, 15 bp, Homo sapiens
cactgcactacagcc

SEQ ID NO: 834711 - DNA, 15 bp, Homo sapiens
actgcactacagcct

SEQ ID NO: 834712 - DNA, 15 bp, Homo sapiens
ctgcactacagcctg

SEQ ID NO: 834713 - DNA, 15 bp, Homo sapiens
tgcactacagcctgg

SEQ ID NO: 834714 - DNA, 15 bp, Homo sapiens
gcactacagcctggg

SEQ ID NO: 834715 - DNA, 15 bp, Homo sapiens
cactacagcctgggc

SEQ ID NO: 834716 - DNA, 15 bp, Homo sapiens
actacagcctgggca

SEQ ID NO: 834717 - DNA, 15 bp, Homo sapiens
ctacagcctgggcaa

SEQ ID NO: 834718 - DNA, 15 bp, Homo sapiens
tacagcctgggcaac

SEQ ID NO: 834719 - DNA, 15 bp, Homo sapiens
acagcctgggcaaca

SEQ ID NO: 834720 - DNA, 15 bp, Homo sapiens
ctgggcaacagagcc

SEQ ID NO: 834721 - DNA, 15 bp, Homo sapiens
tgggcaacagagcca

SEQ ID NO: 834722 - DNA, 15 bp, Homo sapiens
gggcaacagagccag

SEQ ID NO: 834723 - DNA, 15 bp, Homo sapiens
ggcaacagagccagc

SEQ ID NO: 834724 - DNA, 15 bp, Homo sapiens
gcaacagagccagcg

SEQ ID NO: 834725 - DNA, 15 bp, Homo sapiens
caacagagccagcga

SEQ ID NO: 834726 - DNA, 15 bp, Homo sapiens
aacagagccagcgag

SEQ ID NO: 834727 - DNA, 15 bp, Homo sapiens
acagagccagcgagg

SEQ ID NO: 834728 - DNA, 15 bp, Homo sapiens
cagagccagcgaggc

SEQ ID NO: 834729 - DNA, 15 bp, Homo sapiens
agagccagcgaggct

SEQ ID NO: 834730 - DNA, 15 bp, Homo sapiens
gagccagcgaggctc

SEQ ID NO: 834731 - DNA, 15 bp, Homo sapiens
agccagcgaggctcc

SEQ ID NO: 834732 - DNA, 15 bp, Homo sapiens
gccagcgaggctccg

SEQ ID NO: 834733 - DNA, 15 bp, Homo sapiens
ccagcgaggctccgt

SEQ ID NO: 834734 - DNA, 15 bp, Homo sapiens
cagcgaggctccgtc

SEQ ID NO: 834735 - DNA, 15 bp, Homo sapiens
agcgaggctccgtct

SEQ ID NO: 834736 - DNA, 15 bp, Homo sapiens
gcgaggctccgtctt

SEQ ID NO: 834737 - DNA, 15 bp, Homo sapiens
cgaggctccgtctta

SEQ ID NO: 834738 - DNA, 15 bp, Homo sapiens
gaggctccgtcttaa

SEQ ID NO: 834739 - DNA, 15 bp, Homo sapiens
aggctccgtcttaaa

SEQ ID NO: 834740 - DNA, 15 bp, Homo sapiens
ggctccgtcttaaaa

SEQ ID NO: 834741 - DNA, 15 bp, Homo sapiens
gctccgtcttaaaaa

SEQ ID NO: 834742 - DNA, 15 bp, Homo sapiens
ctccgtcttaaaaaa

SEQ ID NO: 834743 - DNA, 15 bp, Homo sapiens
tccgtcttaaaaaaa

SEQ ID NO: 834744 - DNA, 15 bp, Homo sapiens
ccgtcttaaaaaaaa

SEQ ID NO: 834745 - DNA, 15 bp, Homo sapiens
cgtcttaaaaaaaaa

SEQ ID NO: 834746 - DNA, 15 bp, Homo sapiens
gtcttaaaaaaaaaa

SEQ ID NO: 834747 - DNA, 15 bp, Homo sapiens
tcttaaaaaaaaaaa

SEQ ID NO: 834748 - DNA, 15 bp, Homo sapiens
agaaaagaaaaaaag

SEQ ID NO: 834749 - DNA, 15 bp, Homo sapiens
gaaaagaaaaaaaga

SEQ ID NO: 834750 - DNA, 15 bp, Homo sapiens
aagaaaaaaagaaat

SEQ ID NO: 834751 - DNA, 15 bp, Homo sapiens
agaaaaaaagaaatt

SEQ ID NO: 834752 - DNA, 15 bp, Homo sapiens
gaaaaaaagaaatta

SEQ ID NO: 834753 - DNA, 15 bp, Homo sapiens
aaaaaaagaaattac

SEQ ID NO: 834754 - DNA, 15 bp, Homo sapiens
aaaaaagaaattact

SEQ ID NO: 834755 - DNA, 15 bp, Homo sapiens
aaaaagaaattactg

SEQ ID NO: 834756 - DNA, 15 bp, Homo sapiens
aaaagaaattactgg

SEQ ID NO: 834757 - DNA, 15 bp, Homo sapiens
aaagaaattactggt

SEQ ID NO: 834758 - DNA, 15 bp, Homo sapiens
aagaaattactggtc

SEQ ID NO: 834759 - DNA, 15 bp, Homo sapiens
aaattactggtcaaa

SEQ ID NO: 834760 - DNA, 15 bp, Homo sapiens
aattactggtcaaag

SEQ ID NO: 834761 - DNA, 15 bp, Homo sapiens
attactggtcaaagg

SEQ ID NO: 834762 - DNA, 15 bp, Homo sapiens
ttactggtcaaaggt

SEQ ID NO: 834763 - DNA, 15 bp, Homo sapiens
tactggtcaaaggta

SEQ ID NO: 834764 - DNA, 15 bp, Homo sapiens
actggtcaaaggtag

SEQ ID NO: 834765 - DNA, 15 bp, Homo sapiens
ctggtcaaaggtagt

SEQ ID NO: 834766 - DNA, 15 bp, Homo sapiens
tggtcaaaggtagta

SEQ ID NO: 834767 - DNA, 15 bp, Homo sapiens
ggtcaaaggtagtat

SEQ ID NO: 834768 - DNA, 15 bp, Homo sapiens
gtcaaaggtagtatc

SEQ ID NO: 834769 - DNA, 15 bp, Homo sapiens
tcaaaggtagtatca

SEQ ID NO: 834770 - DNA, 15 bp, Homo sapiens
caaaggtagtatcag

SEQ ID NO: 834771 - DNA, 15 bp, Homo sapiens
aaaggtagtatcaga

SEQ ID NO: 834772 - DNA, 15 bp, Homo sapiens
aaggtagtatcagaa

SEQ ID NO: 834773 - DNA, 15 bp, Homo sapiens
aggtagtatcagaaa

SEQ ID NO: 834774 - DNA, 15 bp, Homo sapiens
ggtagtatcagaaat

SEQ ID NO: 834775 - DNA, 15 bp, Homo sapiens
gtagtatcagaaatg

SEQ ID NO: 834776 - DNA, 15 bp, Homo sapiens
tagtatcagaaatgt

SEQ ID NO: 834777 - DNA, 15 bp, Homo sapiens
agtatcagaaatgta

SEQ ID NO: 834778 - DNA, 15 bp, Homo sapiens
gtatcagaaatgtaa

SEQ ID NO: 834779 - DNA, 15 bp, Homo sapiens
tatcagaaatgtaat

SEQ ID NO: 834780 - DNA, 15 bp, Homo sapiens
atcagaaatgtaatt

SEQ ID NO: 834781 - DNA, 15 bp, Homo sapiens
tcagaaatgtaatta

SEQ ID NO: 834782 - DNA, 15 bp, Homo sapiens
cagaaatgtaattaa

SEQ ID NO: 834783 - DNA, 15 bp, Homo sapiens
agaaatgtaattaag

SEQ ID NO: 834784 - DNA, 15 bp, Homo sapiens
gaaatgtaattaagt

SEQ ID NO: 834785 - DNA, 15 bp, Homo sapiens
aaatgtaattaagta

SEQ ID NO: 834786 - DNA, 15 bp, Homo sapiens
aatgtaattaagtag

SEQ ID NO: 834787 - DNA, 15 bp, Homo sapiens
atgtaattaagtaga

SEQ ID NO: 834788 - DNA, 15 bp, Homo sapiens
tgtaattaagtagag

SEQ ID NO: 834789 - DNA, 15 bp, Homo sapiens
gtaattaagtagagc

SEQ ID NO: 834790 - DNA, 15 bp, Homo sapiens
taattaagtagagcc

SEQ ID NO: 834791 - DNA, 15 bp, Homo sapiens
aattaagtagagcca

SEQ ID NO: 834792 - DNA, 15 bp, Homo sapiens
attaagtagagccag

SEQ ID NO: 834793 - DNA, 15 bp, Homo sapiens
ttaagtagagccaga

SEQ ID NO: 834794 - DNA, 15 bp, Homo sapiens
taagtagagccagaa

SEQ ID NO: 834795 - DNA, 15 bp, Homo sapiens
aagtagagccagaac

SEQ ID NO: 834796 - DNA, 15 bp, Homo sapiens
agtagagccagaact

SEQ ID NO: 834797 - DNA, 15 bp, Homo sapiens
gtagagccagaactg

SEQ ID NO: 834798 - DNA, 15 bp, Homo sapiens
tagagccagaactga

SEQ ID NO: 834799 - DNA, 15 bp, Homo sapiens
agagccagaactgag

SEQ ID NO: 834800 - DNA, 15 bp, Homo sapiens
gagccagaactgagg

SEQ ID NO: 834801 - DNA, 15 bp, Homo sapiens
agccagaactgaggc

SEQ ID NO: 834802 - DNA, 15 bp, Homo sapiens
gccagaactgaggcc

SEQ ID NO: 834803 - DNA, 15 bp, Homo sapiens
ccagaactgaggcct

SEQ ID NO: 834804 - DNA, 15 bp, Homo sapiens
cagaactgaggcctt

SEQ ID NO: 834805 - DNA, 15 bp, Homo sapiens
agaactgaggccttg

SEQ ID NO: 834806 - DNA, 15 bp, Homo sapiens
gaactgaggccttgg

SEQ ID NO: 834807 - DNA, 15 bp, Homo sapiens
aactgaggccttggc

SEQ ID NO: 834808 - DNA, 15 bp, Homo sapiens
actgaggccttggct

SEQ ID NO: 834809 - DNA, 15 bp, Homo sapiens
ctgaggccttggctg

SEQ ID NO: 834810 - DNA, 15 bp, Homo sapiens
tgaggccttggctgc

SEQ ID NO: 834811 - DNA, 15 bp, Homo sapiens
gaggccttggctgca

SEQ ID NO: 834812 - DNA, 15 bp, Homo sapiens
aggccttggctgcaa

SEQ ID NO: 834813 - DNA, 15 bp, Homo sapiens
ggccttggctgcaaa

SEQ ID NO: 834814 - DNA, 15 bp, Homo sapiens
gccttggctgcaaaa

SEQ ID NO: 834815 - DNA, 15 bp, Homo sapiens
ccttggctgcaaaaa

SEQ ID NO: 834816 - DNA, 15 bp, Homo sapiens
cttggctgcaaaaag

SEQ ID NO: 834817 - DNA, 15 bp, Homo sapiens
ttggctgcaaaaaga

SEQ ID NO: 834818 - DNA, 15 bp, Homo sapiens
tggctgcaaaaagaa

SEQ ID NO: 834819 - DNA, 15 bp, Homo sapiens
ggctgcaaaaagaag

SEQ ID NO: 834820 - DNA, 15 bp, Homo sapiens
gctgcaaaaagaagt

SEQ ID NO: 834821 - DNA, 15 bp, Homo sapiens
ctgcaaaaagaagtg

SEQ ID NO: 834822 - DNA, 15 bp, Homo sapiens
tgcaaaaagaagtgg

SEQ ID NO: 834823 - DNA, 15 bp, Homo sapiens
gcaaaaagaagtggg

SEQ ID NO: 834824 - DNA, 15 bp, Homo sapiens
caaaaagaagtggga

SEQ ID NO: 834825 - DNA, 15 bp, Homo sapiens
aaaaagaagtgggaa

SEQ ID NO: 834826 - DNA, 15 bp, Homo sapiens
aaaagaagtgggaag

SEQ ID NO: 834827 - DNA, 15 bp, Homo sapiens
aaagaagtgggaagt

SEQ ID NO: 834828 - DNA, 15 bp, Homo sapiens
aagaagtgggaagtt

SEQ ID NO: 834829 - DNA, 15 bp, Homo sapiens
agaagtgggaagttc

SEQ ID NO: 834830 - DNA, 15 bp, Homo sapiens
gaagtgggaagttca

SEQ ID NO: 834831 - DNA, 15 bp, Homo sapiens
aagtgggaagttcag

SEQ ID NO: 834832 - DNA, 15 bp, Homo sapiens
agtgggaagttcagg

SEQ ID NO: 834833 - DNA, 15 bp, Homo sapiens
gtgggaagttcaggg

SEQ ID NO: 834834 - DNA, 15 bp, Homo sapiens
tgggaagttcagggt

SEQ ID NO: 834835 - DNA, 15 bp, Homo sapiens
gggaagttcagggtt

SEQ ID NO: 834836 - DNA, 15 bp, Homo sapiens
ggaagttcagggtta

SEQ ID NO: 834837 - DNA, 15 bp, Homo sapiens
gaagttcagggttaa

SEQ ID NO: 834838 - DNA, 15 bp, Homo sapiens
aagttcagggttaaa

SEQ ID NO: 834839 - DNA, 15 bp, Homo sapiens
agttcagggttaaaa

SEQ ID NO: 834840 - DNA, 15 bp, Homo sapiens
gttcagggttaaaaa

SEQ ID NO: 834841 - DNA, 15 bp, Homo sapiens
ttcagggttaaaaat

SEQ ID NO: 834842 - DNA, 15 bp, Homo sapiens
tcagggttaaaaatg

SEQ ID NO: 834843 - DNA, 15 bp, Homo sapiens
cagggttaaaaatgg

SEQ ID NO: 834844 - DNA, 15 bp, Homo sapiens
agggttaaaaatggg

SEQ ID NO: 834845 - DNA, 15 bp, Homo sapiens
gggttaaaaatgggc

SEQ ID NO: 834846 - DNA, 15 bp, Homo sapiens
ggttaaaaatgggct

SEQ ID NO: 834847 - DNA, 15 bp, Homo sapiens
gttaaaaatgggctt

SEQ ID NO: 834848 - DNA, 15 bp, Homo sapiens
ttaaaaatgggcttt

SEQ ID NO: 834849 - DNA, 15 bp, Homo sapiens
taaaaatgggctttg

SEQ ID NO: 834850 - DNA, 15 bp, Homo sapiens
aaaaatgggctttgt

SEQ ID NO: 834851 - DNA, 15 bp, Homo sapiens
aaaatgggctttgtc

SEQ ID NO: 834852 - DNA, 15 bp, Homo sapiens
aaatgggctttgtct

SEQ ID NO: 834853 - DNA, 15 bp, Homo sapiens
aatgggctttgtctt

SEQ ID NO: 834854 - DNA, 15 bp, Homo sapiens
atgggctttgtcttt

SEQ ID NO: 834855 - DNA, 15 bp, Homo sapiens
tgggctttgtctttc

SEQ ID NO: 834856 - DNA, 15 bp, Homo sapiens
gggctttgtctttct

SEQ ID NO: 834857 - DNA, 15 bp, Homo sapiens
ggctttgtctttctc

SEQ ID NO: 834858 - DNA, 15 bp, Homo sapiens
gctttgtctttctct

SEQ ID NO: 834859 - DNA, 15 bp, Homo sapiens
ctttgtctttctctt

SEQ ID NO: 834860 - DNA, 15 bp, Homo sapiens
tttgtctttctctta

SEQ ID NO: 834861 - DNA, 15 bp, Homo sapiens
ttgtctttctcttat

SEQ ID NO: 834862 - DNA, 15 bp, Homo sapiens
tgtctttctcttatt

SEQ ID NO: 834863 - DNA, 15 bp, Homo sapiens
gtctttctcttattt

SEQ ID NO: 834864 - DNA, 15 bp, Homo sapiens
tctttctcttatttg

SEQ ID NO: 834865 - DNA, 15 bp, Homo sapiens
ctttctcttatttgt

SEQ ID NO: 834866 - DNA, 15 bp, Homo sapiens
tttctcttatttgta

SEQ ID NO: 834867 - DNA, 15 bp, Homo sapiens
ttctcttatttgtat

SEQ ID NO: 834868 - DNA, 15 bp, Homo sapiens
tctcttatttgtata

SEQ ID NO: 834869 - DNA, 15 bp, Homo sapiens
ctcttatttgtataa

SEQ ID NO: 834870 - DNA, 15 bp, Homo sapiens
tcttatttgtataat

SEQ ID NO: 834871 - DNA, 15 bp, Homo sapiens
cttatttgtataatc

SEQ ID NO: 834872 - DNA, 15 bp, Homo sapiens
ttatttgtataatcc

SEQ ID NO: 834873 - DNA, 15 bp, Homo sapiens
tatttgtataatcct

SEQ ID NO: 834874 - DNA, 15 bp, Homo sapiens
atttgtataatcctc

SEQ ID NO: 834875 - DNA, 15 bp, Homo sapiens
tttgtataatcctcc

SEQ ID NO: 834876 - DNA, 15 bp, Homo sapiens
ttgtataatcctcct

SEQ ID NO: 834877 - DNA, 15 bp, Homo sapiens
tgtataatcctcctt

SEQ ID NO: 834878 - DNA, 15 bp, Homo sapiens
gtataatcctccttc

SEQ ID NO: 834879 - DNA, 15 bp, Homo sapiens
tataatcctccttcc

SEQ ID NO: 834880 - DNA, 15 bp, Homo sapiens
ataatcctccttcct

SEQ ID NO: 834881 - DNA, 15 bp, Homo sapiens
taatcctccttcctc

SEQ ID NO: 834882 - DNA, 15 bp, Homo sapiens
aatcctccttcctcc

SEQ ID NO: 834883 - DNA, 15 bp, Homo sapiens
atcctccttcctcct

SEQ ID NO: 834884 - DNA, 15 bp, Homo sapiens
tcctccttcctcctc

SEQ ID NO: 834885 - DNA, 15 bp, Homo sapiens
cctccttcctcctca

SEQ ID NO: 834886 - DNA, 15 bp, Homo sapiens
ctccttcctcctcag

SEQ ID NO: 834887 - DNA, 15 bp, Homo sapiens
tccttcctcctcagt

SEQ ID NO: 834888 - DNA, 15 bp, Homo sapiens
ccttcctcctcagtt

SEQ ID NO: 834889 - DNA, 15 bp, Homo sapiens
cttcctcctcagttt

SEQ ID NO: 834890 - DNA, 15 bp, Homo sapiens
ttcctcctcagttta

SEQ ID NO: 834891 - DNA, 15 bp, Homo sapiens
tcctcctcagtttaa

SEQ ID NO: 834892 - DNA, 15 bp, Homo sapiens
cctcctcagtttaat

SEQ ID NO: 834893 - DNA, 15 bp, Homo sapiens
ctcctcagtttaatg

SEQ ID NO: 834894 - DNA, 15 bp, Homo sapiens
tcctcagtttaatga

SEQ ID NO: 834895 - DNA, 15 bp, Homo sapiens
cctcagtttaatgag

SEQ ID NO: 834896 - DNA, 15 bp, Homo sapiens
ctcagtttaatgaga

SEQ ID NO: 834897 - DNA, 15 bp, Homo sapiens
tcagtttaatgagac

SEQ ID NO: 834898 - DNA, 15 bp, Homo sapiens
cagtttaatgagacc

SEQ ID NO: 834899 - DNA, 15 bp, Homo sapiens
agtttaatgagacca

SEQ ID NO: 834900 - DNA, 15 bp, Homo sapiens
gtttaatgagaccaa

SEQ ID NO: 834901 - DNA, 15 bp, Homo sapiens
tttaatgagaccaat

SEQ ID NO: 834902 - DNA, 15 bp, Homo sapiens
ttaatgagaccaatc

SEQ ID NO: 834903 - DNA, 15 bp, Homo sapiens
taatgagaccaatct

SEQ ID NO: 834904 - DNA, 15 bp, Homo sapiens
aatgagaccaatctg

SEQ ID NO: 834905 - DNA, 15 bp, Homo sapiens
atgagaccaatctgc

SEQ ID NO: 834906 - DNA, 15 bp, Homo sapiens
tgagaccaatctgcc

SEQ ID NO: 834907 - DNA, 15 bp, Homo sapiens
gagaccaatctgcct

SEQ ID NO: 834908 - DNA, 15 bp, Homo sapiens
agaccaatctgcctc

SEQ ID NO: 834909 - DNA, 15 bp, Homo sapiens
gaccaatctgcctcc

SEQ ID NO: 834910 - DNA, 15 bp, Homo sapiens
accaatctgcctcct

SEQ ID NO: 834911 - DNA, 15 bp, Homo sapiens
ccaatctgcctcctt

SEQ ID NO: 834912 - DNA, 15 bp, Homo sapiens
caatctgcctccttt

SEQ ID NO: 834913 - DNA, 15 bp, Homo sapiens
aatctgcctcctttg

SEQ ID NO: 834914 - DNA, 15 bp, Homo sapiens
atctgcctcctttga

SEQ ID NO: 834915 - DNA, 15 bp, Homo sapiens
tctgcctcctttgaa

SEQ ID NO: 834916 - DNA, 15 bp, Homo sapiens
ctgcctcctttgaaa

SEQ ID NO: 834917 - DNA, 15 bp, Homo sapiens
tgcctcctttgaaat

SEQ ID NO: 834918 - DNA, 15 bp, Homo sapiens
gcctcctttgaaatt

SEQ ID NO: 834919 - DNA, 15 bp, Homo sapiens
cctcctttgaaatta

SEQ ID NO: 834920 - DNA, 15 bp, Homo sapiens
ctcctttgaaattaa

SEQ ID NO: 834921 - DNA, 15 bp, Homo sapiens
tcctttgaaattaaa

SEQ ID NO: 834922 - DNA, 15 bp, Homo sapiens
cctttgaaattaaaa

SEQ ID NO: 834923 - DNA, 15 bp, Homo sapiens
ctttgaaattaaaat

SEQ ID NO: 834924 - DNA, 15 bp, Homo sapiens
tttgaaattaaaatg

SEQ ID NO: 834925 - DNA, 15 bp, Homo sapiens
ttgaaattaaaatgt

SEQ ID NO: 834926 - DNA, 15 bp, Homo sapiens
tgaaattaaaatgtc

SEQ ID NO: 834927 - DNA, 15 bp, Homo sapiens
gaaattaaaatgtca

SEQ ID NO: 834928 - DNA, 15 bp, Homo sapiens
aaattaaaatgtcaa

SEQ ID NO: 834929 - DNA, 15 bp, Homo sapiens
aattaaaatgtcaaa

SEQ ID NO: 834930 - DNA, 15 bp, Homo sapiens
attaaaatgtcaaag

SEQ ID NO: 834931 - DNA, 15 bp, Homo sapiens
ttaaaatgtcaaaga

SEQ ID NO: 834932 - DNA, 15 bp, Homo sapiens
taaaatgtcaaagat

SEQ ID NO: 834933 - DNA, 15 bp, Homo sapiens
aaaatgtcaaagatc

SEQ ID NO: 834934 - DNA, 15 bp, Homo sapiens
aaatgtcaaagatcc

SEQ ID NO: 834935 - DNA, 15 bp, Homo sapiens
aatgtcaaagatcca

SEQ ID NO: 834936 - DNA, 15 bp, Homo sapiens
atgtcaaagatccat

SEQ ID NO: 834937 - DNA, 15 bp, Homo sapiens
tgtcaaagatccatt

SEQ ID NO: 834938 - DNA, 15 bp, Homo sapiens
gtcaaagatccattt

SEQ ID NO: 834939 - DNA, 15 bp, Homo sapiens
tcaaagatccatttg

SEQ ID NO: 834940 - DNA, 15 bp, Homo sapiens
caaagatccatttga

SEQ ID NO: 834941 - DNA, 15 bp, Homo sapiens
aaagatccatttgaa

SEQ ID NO: 834942 - DNA, 15 bp, Homo sapiens
aagatccatttgaaa

SEQ ID NO: 834943 - DNA, 15 bp, Homo sapiens
agatccatttgaaat

SEQ ID NO: 834944 - DNA, 15 bp, Homo sapiens
gatccatttgaaatg

SEQ ID NO: 834945 - DNA, 15 bp, Homo sapiens
atccatttgaaatga

SEQ ID NO: 834946 - DNA, 15 bp, Homo sapiens
tccatttgaaatgag

SEQ ID NO: 834947 - DNA, 15 bp, Homo sapiens
ccatttgaaatgagc

SEQ ID NO: 834948 - DNA, 15 bp, Homo sapiens
catttgaaatgagct

SEQ ID NO: 834949 - DNA, 15 bp, Homo sapiens
atttgaaatgagcta

SEQ ID NO: 834950 - DNA, 15 bp, Homo sapiens
tttgaaatgagctaa

SEQ ID NO: 834951 - DNA, 15 bp, Homo sapiens
ttgaaatgagctaat

SEQ ID NO: 834952 - DNA, 15 bp, Homo sapiens
tgaaatgagctaatg

SEQ ID NO: 834953 - DNA, 15 bp, Homo sapiens
gaaatgagctaatgc

SEQ ID NO: 834954 - DNA, 15 bp, Homo sapiens
aaatgagctaatgca

SEQ ID NO: 834955 - DNA, 15 bp, Homo sapiens
aatgagctaatgcag

SEQ ID NO: 834956 - DNA, 15 bp, Homo sapiens
atgagctaatgcaga

SEQ ID NO: 834957 - DNA, 15 bp, Homo sapiens
tgagctaatgcagaa

SEQ ID NO: 834958 - DNA, 15 bp, Homo sapiens
gagctaatgcagaaa

SEQ ID NO: 834959 - DNA, 15 bp, Homo sapiens
agctaatgcagaaaa

SEQ ID NO: 834960 - DNA, 15 bp, Homo sapiens
gctaatgcagaaaac

SEQ ID NO: 834961 - DNA, 15 bp, Homo sapiens
ctaatgcagaaaact

SEQ ID NO: 834962 - DNA, 15 bp, Homo sapiens
taatgcagaaaactg

SEQ ID NO: 834963 - DNA, 15 bp, Homo sapiens
aatgcagaaaactgg

SEQ ID NO: 834964 - DNA, 15 bp, Homo sapiens
atgcagaaaactggc

SEQ ID NO: 834965 - DNA, 15 bp, Homo sapiens
tgcagaaaactggct

SEQ ID NO: 834966 - DNA, 15 bp, Homo sapiens
gcagaaaactggctg

SEQ ID NO: 834967 - DNA, 15 bp, Homo sapiens
cagaaaactggctga

SEQ ID NO: 834968 - DNA, 15 bp, Homo sapiens
agaaaactggctgaa

SEQ ID NO: 834969 - DNA, 15 bp, Homo sapiens
gaaaactggctgaag

SEQ ID NO: 834970 - DNA, 15 bp, Homo sapiens
aaaactggctgaagc

SEQ ID NO: 834971 - DNA, 15 bp, Homo sapiens
aaactggctgaagct

SEQ ID NO: 834972 - DNA, 15 bp, Homo sapiens
aactggctgaagctg

SEQ ID NO: 834973 - DNA, 15 bp, Homo sapiens
actggctgaagctgt

SEQ ID NO: 834974 - DNA, 15 bp, Homo sapiens
ctggctgaagctgtg

SEQ ID NO: 834975 - DNA, 15 bp, Homo sapiens
tggctgaagctgtga

SEQ ID NO: 834976 - DNA, 15 bp, Homo sapiens
ggctgaagctgtgaa

SEQ ID NO: 834977 - DNA, 15 bp, Homo sapiens
gctgaagctgtgaac

SEQ ID NO: 834978 - DNA, 15 bp, Homo sapiens
ctgaagctgtgaact

SEQ ID NO: 834979 - DNA, 15 bp, Homo sapiens
tgaagctgtgaactg

SEQ ID NO: 834980 - DNA, 15 bp, Homo sapiens
gaagctgtgaactgc

SEQ ID NO: 834981 - DNA, 15 bp, Homo sapiens
aagctgtgaactgca

SEQ ID NO: 834982 - DNA, 15 bp, Homo sapiens
agctgtgaactgcaa

SEQ ID NO: 834983 - DNA, 15 bp, Homo sapiens
gctgtgaactgcaag

SEQ ID NO: 834984 - DNA, 15 bp, Homo sapiens
ctgtgaactgcaagg

SEQ ID NO: 834985 - DNA, 15 bp, Homo sapiens
tgtgaactgcaaggc

SEQ ID NO: 834986 - DNA, 15 bp, Homo sapiens
gtgaactgcaaggca

SEQ ID NO: 834987 - DNA, 15 bp, Homo sapiens
tgaactgcaaggcag

SEQ ID NO: 834988 - DNA, 15 bp, Homo sapiens
gaactgcaaggcagg

SEQ ID NO: 834989 - DNA, 15 bp, Homo sapiens
aactgcaaggcaggg

SEQ ID NO: 834990 - DNA, 15 bp, Homo sapiens
actgcaaggcagggc

SEQ ID NO: 834991 - DNA, 15 bp, Homo sapiens
ctgcaaggcagggct

SEQ ID NO: 834992 - DNA, 15 bp, Homo sapiens
tgcaaggcagggctg

SEQ ID NO: 834993 - DNA, 15 bp, Homo sapiens
gcaaggcagggctga

SEQ ID NO: 834994 - DNA, 15 bp, Homo sapiens
caaggcagggctgac

SEQ ID NO: 834995 - DNA, 15 bp, Homo sapiens
aaggcagggctgaca

SEQ ID NO: 834996 - DNA, 15 bp, Homo sapiens
aggcagggctgacag

SEQ ID NO: 834997 - DNA, 15 bp, Homo sapiens
ggcagggctgacaga

SEQ ID NO: 834998 - DNA, 15 bp, Homo sapiens
gcagggctgacagag

SEQ ID NO: 834999 - DNA, 15 bp, Homo sapiens
cagggctgacagagg

SEQ ID NO: 835000 - DNA, 15 bp, Homo sapiens
agggctgacagaggc

SEQ ID NO: 835001 - DNA, 15 bp, Homo sapiens
gggctgacagaggct

SEQ ID NO: 835002 - DNA, 15 bp, Homo sapiens
ggctgacagaggctc

SEQ ID NO: 835003 - DNA, 15 bp, Homo sapiens
gctgacagaggctca

SEQ ID NO: 835004 - DNA, 15 bp, Homo sapiens
ctgacagaggctcaa

SEQ ID NO: 835005 - DNA, 15 bp, Homo sapiens
tgacagaggctcaaa

SEQ ID NO: 835006 - DNA, 15 bp, Homo sapiens
gacagaggctcaaag

SEQ ID NO: 835007 - DNA, 15 bp, Homo sapiens
acagaggctcaaagt

SEQ ID NO: 835008 - DNA, 15 bp, Homo sapiens
cagaggctcaaagtc

SEQ ID NO: 835009 - DNA, 15 bp, Homo sapiens
agaggctcaaagtcc

SEQ ID NO: 835010 - DNA, 15 bp, Homo sapiens
gaggctcaaagtcct

SEQ ID NO: 835011 - DNA, 15 bp, Homo sapiens
aggctcaaagtcctt

SEQ ID NO: 835012 - DNA, 15 bp, Homo sapiens
ggctcaaagtccttg

SEQ ID NO: 835013 - DNA, 15 bp, Homo sapiens
gctcaaagtccttga

SEQ ID NO: 835014 - DNA, 15 bp, Homo sapiens
ctcaaagtccttgag

SEQ ID NO: 835015 - DNA, 15 bp, Homo sapiens
tcaaagtccttgagt

SEQ ID NO: 835016 - DNA, 15 bp, Homo sapiens
caaagtccttgagtt

SEQ ID NO: 835017 - DNA, 15 bp, Homo sapiens
aaagtccttgagtta

SEQ ID NO: 835018 - DNA, 15 bp, Homo sapiens
aagtccttgagttat

SEQ ID NO: 835019 - DNA, 15 bp, Homo sapiens
agtccttgagttata

SEQ ID NO: 835020 - DNA, 15 bp, Homo sapiens
gtccttgagttataa

SEQ ID NO: 835021 - DNA, 15 bp, Homo sapiens
tccttgagttataag

SEQ ID NO: 835022 - DNA, 15 bp, Homo sapiens
ccttgagttataagc

SEQ ID NO: 835023 - DNA, 15 bp, Homo sapiens
cttgagttataagcg

SEQ ID NO: 835024 - DNA, 15 bp, Homo sapiens
ttgagttataagcgt

SEQ ID NO: 835025 - DNA, 15 bp, Homo sapiens
tgagttataagcgtg

SEQ ID NO: 835026 - DNA, 15 bp, Homo sapiens
gagttataagcgtgg

SEQ ID NO: 835027 - DNA, 15 bp, Homo sapiens
agttataagcgtggg

SEQ ID NO: 835028 - DNA, 15 bp, Homo sapiens
gttataagcgtgggc

SEQ ID NO: 835029 - DNA, 15 bp, Homo sapiens
ttataagcgtgggcc

SEQ ID NO: 835030 - DNA, 15 bp, Homo sapiens
tataagcgtgggcca

SEQ ID NO: 835031 - DNA, 15 bp, Homo sapiens
ataagcgtgggccaa

SEQ ID NO: 835032 - DNA, 15 bp, Homo sapiens
taagcgtgggccaac

SEQ ID NO: 835033 - DNA, 15 bp, Homo sapiens
aagcgtgggccaacg

SEQ ID NO: 835034 - DNA, 15 bp, Homo sapiens
agcgtgggccaacgc

SEQ ID NO: 835035 - DNA, 15 bp, Homo sapiens
gcgtgggccaacgca

SEQ ID NO: 835036 - DNA, 15 bp, Homo sapiens
cgtgggccaacgcaa

SEQ ID NO: 835037 - DNA, 15 bp, Homo sapiens
gtgggccaacgcaac

SEQ ID NO: 835038 - DNA, 15 bp, Homo sapiens
tgggccaacgcaaca

SEQ ID NO: 835039 - DNA, 15 bp, Homo sapiens
gggccaacgcaacac

SEQ ID NO: 835040 - DNA, 15 bp, Homo sapiens
ggccaacgcaacact

SEQ ID NO: 835041 - DNA, 15 bp, Homo sapiens
gccaacgcaacactt

SEQ ID NO: 835042 - DNA, 15 bp, Homo sapiens
ccaacgcaacacttt

SEQ ID NO: 835043 - DNA, 15 bp, Homo sapiens
caacgcaacactttt

SEQ ID NO: 835044 - DNA, 15 bp, Homo sapiens
aacgcaacacttttt

SEQ ID NO: 835045 - DNA, 15 bp, Homo sapiens
acgcaacactttttc

SEQ ID NO: 835046 - DNA, 15 bp, Homo sapiens
cgcaacactttttca

SEQ ID NO: 835047 - DNA, 15 bp, Homo sapiens
gcaacactttttcaa

SEQ ID NO: 835048 - DNA, 15 bp, Homo sapiens
caacactttttcaaa

SEQ ID NO: 835049 - DNA, 15 bp, Homo sapiens
aacactttttcaaaa

SEQ ID NO: 835050 - DNA, 15 bp, Homo sapiens
acactttttcaaaaa

SEQ ID NO: 835051 - DNA, 15 bp, Homo sapiens
cactttttcaaaaat

SEQ ID NO: 835052 - DNA, 15 bp, Homo sapiens
actttttcaaaaata

SEQ ID NO: 835053 - DNA, 15 bp, Homo sapiens
ctttttcaaaaataa

SEQ ID NO: 835054 - DNA, 15 bp, Homo sapiens
tttttcaaaaataaa

SEQ ID NO: 835055 - DNA, 15 bp, Homo sapiens
ttttcaaaaataaaa

SEQ ID NO: 835056 - DNA, 15 bp, Homo sapiens
tttcaaaaataaaat

SEQ ID NO: 835057 - DNA, 15 bp, Homo sapiens
ttcaaaaataaaatg

SEQ ID NO: 835058 - DNA, 15 bp, Homo sapiens
tcaaaaataaaatga

SEQ ID NO: 835059 - DNA, 15 bp, Homo sapiens
caaaaataaaatgaa

SEQ ID NO: 835060 - DNA, 15 bp, Homo sapiens
aaaaataaaatgaaa

SEQ ID NO: 835061 - DNA, 15 bp, Homo sapiens
aaaataaaatgaaat

SEQ ID NO: 835062 - DNA, 15 bp, Homo sapiens
aaataaaatgaaatc

SEQ ID NO: 835063 - DNA, 15 bp, Homo sapiens
aataaaatgaaatcc

SEQ ID NO: 835064 - DNA, 15 bp, Homo sapiens
ataaaatgaaatcct

SEQ ID NO: 835065 - DNA, 15 bp, Homo sapiens
taaaatgaaatcctt

SEQ ID NO: 835066 - DNA, 15 bp, Homo sapiens
aaaatgaaatccttc

SEQ ID NO: 835067 - DNA, 15 bp, Homo sapiens
aaatgaaatccttca

SEQ ID NO: 835068 - DNA, 15 bp, Homo sapiens
aatgaaatccttcaa

SEQ ID NO: 835069 - DNA, 15 bp, Homo sapiens
atgaaatccttcaag

SEQ ID NO: 835070 - DNA, 15 bp, Homo sapiens
tgaaatccttcaagt

SEQ ID NO: 835071 - DNA, 15 bp, Homo sapiens
gaaatccttcaagtg

SEQ ID NO: 835072 - DNA, 15 bp, Homo sapiens
aaatccttcaagtgc

SEQ ID NO: 835073 - DNA, 15 bp, Homo sapiens
aatccttcaagtgca

SEQ ID NO: 835074 - DNA, 15 bp, Homo sapiens
atccttcaagtgcaa

SEQ ID NO: 835075 - DNA, 15 bp, Homo sapiens
tccttcaagtgcaaa

SEQ ID NO: 835076 - DNA, 15 bp, Homo sapiens
ccttcaagtgcaaaa

SEQ ID NO: 835077 - DNA, 15 bp, Homo sapiens
cttcaagtgcaaaaa

SEQ ID NO: 835078 - DNA, 15 bp, Homo sapiens
ttcaagtgcaaaaac

SEQ ID NO: 835079 - DNA, 15 bp, Homo sapiens
tcaagtgcaaaaacg

SEQ ID NO: 835080 - DNA, 15 bp, Homo sapiens
caagtgcaaaaacgc

SEQ ID NO: 835081 - DNA, 15 bp, Homo sapiens
aagtgcaaaaacgca

SEQ ID NO: 835082 - DNA, 15 bp, Homo sapiens
agtgcaaaaacgcag

SEQ ID NO: 835083 - DNA, 15 bp, Homo sapiens
gtgcaaaaacgcagg

SEQ ID NO: 835084 - DNA, 15 bp, Homo sapiens
tgcaaaaacgcaggg

SEQ ID NO: 835085 - DNA, 15 bp, Homo sapiens
gcaaaaacgcagggt

SEQ ID NO: 835086 - DNA, 15 bp, Homo sapiens
caaaaacgcagggtg

SEQ ID NO: 835087 - DNA, 15 bp, Homo sapiens
aaaaacgcagggtga

SEQ ID NO: 835088 - DNA, 15 bp, Homo sapiens
aaaacgcagggtgaa

SEQ ID NO: 835089 - DNA, 15 bp, Homo sapiens
aaacgcagggtgaat

SEQ ID NO: 835090 - DNA, 15 bp, Homo sapiens
aacgcagggtgaatt

SEQ ID NO: 835091 - DNA, 15 bp, Homo sapiens
acgcagggtgaattt

SEQ ID NO: 835092 - DNA, 15 bp, Homo sapiens
cgcagggtgaatttg

SEQ ID NO: 835093 - DNA, 15 bp, Homo sapiens
gcagggtgaatttgt

SEQ ID NO: 835094 - DNA, 15 bp, Homo sapiens
cagggtgaatttgtg

SEQ ID NO: 835095 - DNA, 15 bp, Homo sapiens
agggtgaatttgtgc

SEQ ID NO: 835096 - DNA, 15 bp, Homo sapiens
gggtgaatttgtgct

SEQ ID NO: 835097 - DNA, 15 bp, Homo sapiens
ggtgaatttgtgctg

SEQ ID NO: 835098 - DNA, 15 bp, Homo sapiens
gtgaatttgtgctgg

SEQ ID NO: 835099 - DNA, 15 bp, Homo sapiens
tgaatttgtgctggg

SEQ ID NO: 835100 - DNA, 15 bp, Homo sapiens
gaatttgtgctggga

SEQ ID NO: 835101 - DNA, 15 bp, Homo sapiens
aatttgtgctgggag

SEQ ID NO: 835102 - DNA, 15 bp, Homo sapiens
atttgtgctgggaga

SEQ ID NO: 835103 - DNA, 15 bp, Homo sapiens
tttgtgctgggagag

SEQ ID NO: 835104 - DNA, 15 bp, Homo sapiens
ttgtgctgggagagg

SEQ ID NO: 835105 - DNA, 15 bp, Homo sapiens
tgtgctgggagaggc

SEQ ID NO: 835106 - DNA, 15 bp, Homo sapiens
gtgctgggagaggct

SEQ ID NO: 835107 - DNA, 15 bp, Homo sapiens
tgctgggagaggctt

SEQ ID NO: 835108 - DNA, 15 bp, Homo sapiens
gctgggagaggcttt

SEQ ID NO: 835109 - DNA, 15 bp, Homo sapiens
ctgggagaggcttta

SEQ ID NO: 835110 - DNA, 15 bp, Homo sapiens
tgggagaggctttag

SEQ ID NO: 835111 - DNA, 15 bp, Homo sapiens
gggagaggctttagc

SEQ ID NO: 835112 - DNA, 15 bp, Homo sapiens
ggagaggctttagcg

SEQ ID NO: 835113 - DNA, 15 bp, Homo sapiens
gagaggctttagcgt

SEQ ID NO: 835114 - DNA, 15 bp, Homo sapiens
agaggctttagcgtg

SEQ ID NO: 835115 - DNA, 15 bp, Homo sapiens
gaggctttagcgtga

SEQ ID NO: 835116 - DNA, 15 bp, Homo sapiens
aggctttagcgtgat

SEQ ID NO: 835117 - DNA, 15 bp, Homo sapiens
ggctttagcgtgatc

SEQ ID NO: 835118 - DNA, 15 bp, Homo sapiens
gctttagcgtgatcc

SEQ ID NO: 835119 - DNA, 15 bp, Homo sapiens
ctttagcgtgatcca

SEQ ID NO: 835120 - DNA, 15 bp, Homo sapiens
tttagcgtgatccat

SEQ ID NO: 835121 - DNA, 15 bp, Homo sapiens
ttagcgtgatccatt

SEQ ID NO: 835122 - DNA, 15 bp, Homo sapiens
tagcgtgatccattt

SEQ ID NO: 835123 - DNA, 15 bp, Homo sapiens
agcgtgatccatttc

SEQ ID NO: 835124 - DNA, 15 bp, Homo sapiens
gcgtgatccatttcc

SEQ ID NO: 835125 - DNA, 15 bp, Homo sapiens
cgtgatccatttcct

SEQ ID NO: 835126 - DNA, 15 bp, Homo sapiens
gtgatccatttccta

SEQ ID NO: 835127 - DNA, 15 bp, Homo sapiens
tgatccatttcctaa

SEQ ID NO: 835128 - DNA, 15 bp, Homo sapiens
gatccatttcctaaa

SEQ ID NO: 835129 - DNA, 15 bp, Homo sapiens
atccatttcctaaat

SEQ ID NO: 835130 - DNA, 15 bp, Homo sapiens
tccatttcctaaatt

SEQ ID NO: 835131 - DNA, 15 bp, Homo sapiens
ccatttcctaaattc

SEQ ID NO: 835132 - DNA, 15 bp, Homo sapiens
catttcctaaattcg

SEQ ID NO: 835133 - DNA, 15 bp, Homo sapiens
atttcctaaattcgt

SEQ ID NO: 835134 - DNA, 15 bp, Homo sapiens
tttcctaaattcgta

SEQ ID NO: 835135 - DNA, 15 bp, Homo sapiens
ttcctaaattcgtac

SEQ ID NO: 835136 - DNA, 15 bp, Homo sapiens
tcctaaattcgtacg

SEQ ID NO: 835137 - DNA, 15 bp, Homo sapiens
cctaaattcgtacgt

SEQ ID NO: 835138 - DNA, 15 bp, Homo sapiens
ctaaattcgtacgtt

SEQ ID NO: 835139 - DNA, 15 bp, Homo sapiens
taaattcgtacgttg

SEQ ID NO: 835140 - DNA, 15 bp, Homo sapiens
aaattcgtacgttgc

SEQ ID NO: 835141 - DNA, 15 bp, Homo sapiens
aattcgtacgttgca

SEQ ID NO: 835142 - DNA, 15 bp, Homo sapiens
attcgtacgttgcag

SEQ ID NO: 835143 - DNA, 15 bp, Homo sapiens
ttcgtacgttgcagc

SEQ ID NO: 835144 - DNA, 15 bp, Homo sapiens
tcgtacgttgcagct

SEQ ID NO: 835145 - DNA, 15 bp, Homo sapiens
cgtacgttgcagctt

SEQ ID NO: 835146 - DNA, 15 bp, Homo sapiens
gtacgttgcagcttt

SEQ ID NO: 835147 - DNA, 15 bp, Homo sapiens
tacgttgcagctttt

SEQ ID NO: 835148 - DNA, 15 bp, Homo sapiens
acgttgcagcttttc

SEQ ID NO: 835149 - DNA, 15 bp, Homo sapiens
cgttgcagcttttca

SEQ ID NO: 835150 - DNA, 15 bp, Homo sapiens
gttgcagcttttcag

SEQ ID NO: 835151 - DNA, 15 bp, Homo sapiens
ttgcagcttttcaga

SEQ ID NO: 835152 - DNA, 15 bp, Homo sapiens
tgcagcttttcagat

SEQ ID NO: 835153 - DNA, 15 bp, Homo sapiens
gcagcttttcagata

SEQ ID NO: 835154 - DNA, 15 bp, Homo sapiens
cagcttttcagataa

SEQ ID NO: 835155 - DNA, 15 bp, Homo sapiens
agcttttcagataaa

SEQ ID NO: 835156 - DNA, 15 bp, Homo sapiens
gcttttcagataaag

SEQ ID NO: 835157 - DNA, 15 bp, Homo sapiens
cttttcagataaagc

SEQ ID NO: 835158 - DNA, 15 bp, Homo sapiens
ttttcagataaagct

SEQ ID NO: 835159 - DNA, 15 bp, Homo sapiens
tttcagataaagctg

SEQ ID NO: 835160 - DNA, 15 bp, Homo sapiens
ttcagataaagctgc

SEQ ID NO: 835161 - DNA, 15 bp, Homo sapiens
tcagataaagctgct

SEQ ID NO: 835162 - DNA, 15 bp, Homo sapiens
cagataaagctgctc

SEQ ID NO: 835163 - DNA, 15 bp, Homo sapiens
agataaagctgctcc

SEQ ID NO: 835164 - DNA, 15 bp, Homo sapiens
gataaagctgctccc

SEQ ID NO: 835165 - DNA, 15 bp, Homo sapiens
ataaagctgctccct

SEQ ID NO: 835166 - DNA, 15 bp, Homo sapiens
taaagctgctccctg

SEQ ID NO: 835167 - DNA, 15 bp, Homo sapiens
aaagctgctccctgg

SEQ ID NO: 835168 - DNA, 15 bp, Homo sapiens
aagctgctccctggc

SEQ ID NO: 835169 - DNA, 15 bp, Homo sapiens
agctgctccctggct

SEQ ID NO: 835170 - DNA, 15 bp, Homo sapiens
gctgctccctggctg

SEQ ID NO: 835171 - DNA, 15 bp, Homo sapiens
ctgctccctggctgc

SEQ ID NO: 835172 - DNA, 15 bp, Homo sapiens
tgctccctggctgcc

SEQ ID NO: 835173 - DNA, 15 bp, Homo sapiens
gctccctggctgcct

SEQ ID NO: 835174 - DNA, 15 bp, Homo sapiens
ctccctggctgcctt

SEQ ID NO: 835175 - DNA, 15 bp, Homo sapiens
tccctggctgccttc

SEQ ID NO: 835176 - DNA, 15 bp, Homo sapiens
ccctggctgccttct

SEQ ID NO: 835177 - DNA, 15 bp, Homo sapiens
cctggctgccttctc

SEQ ID NO: 835178 - DNA, 15 bp, Homo sapiens
ctggctgccttctct

SEQ ID NO: 835179 - DNA, 15 bp, Homo sapiens
tggctgccttctctc

SEQ ID NO: 835180 - DNA, 15 bp, Homo sapiens
ggctgccttctctcc

SEQ ID NO: 835181 - DNA, 15 bp, Homo sapiens
gctgccttctctcca

SEQ ID NO: 835182 - DNA, 15 bp, Homo sapiens
ctgccttctctccat

SEQ ID NO: 835183 - DNA, 15 bp, Homo sapiens
tgccttctctccatt

SEQ ID NO: 835184 - DNA, 15 bp, Homo sapiens
gccttctctccattt

SEQ ID NO: 835185 - DNA, 15 bp, Homo sapiens
ccttctctccatttc

SEQ ID NO: 835186 - DNA, 15 bp, Homo sapiens
cttctctccatttct

SEQ ID NO: 835187 - DNA, 15 bp, Homo sapiens
ttctctccatttctg

SEQ ID NO: 835188 - DNA, 15 bp, Homo sapiens
tctctccatttctgc

SEQ ID NO: 835189 - DNA, 15 bp, Homo sapiens
ctctccatttctgca

SEQ ID NO: 835190 - DNA, 15 bp, Homo sapiens
tctccatttctgcac

SEQ ID NO: 835191 - DNA, 15 bp, Homo sapiens
ctccatttctgcact

SEQ ID NO: 835192 - DNA, 15 bp, Homo sapiens
tccatttctgcacta

SEQ ID NO: 835193 - DNA, 15 bp, Homo sapiens
ccatttctgcactaa

SEQ ID NO: 835194 - DNA, 15 bp, Homo sapiens
catttctgcactaaa

SEQ ID NO: 835195 - DNA, 15 bp, Homo sapiens
atttctgcactaaaa

SEQ ID NO: 835196 - DNA, 15 bp, Homo sapiens
tttctgcactaaaag

SEQ ID NO: 835197 - DNA, 15 bp, Homo sapiens
ttctgcactaaaagg

SEQ ID NO: 835198 - DNA, 15 bp, Homo sapiens
tctgcactaaaaggg

SEQ ID NO: 835199 - DNA, 15 bp, Homo sapiens
ctgcactaaaagggg

SEQ ID NO: 835200 - DNA, 15 bp, Homo sapiens
tgcactaaaaggggt

SEQ ID NO: 835201 - DNA, 15 bp, Homo sapiens
gcactaaaaggggtg

SEQ ID NO: 835202 - DNA, 15 bp, Homo sapiens
cactaaaaggggtga

SEQ ID NO: 835203 - DNA, 15 bp, Homo sapiens
actaaaaggggtgaa

SEQ ID NO: 835204 - DNA, 15 bp, Homo sapiens
ctaaaaggggtgaag

SEQ ID NO: 835205 - DNA, 15 bp, Homo sapiens
taaaaggggtgaagt

SEQ ID NO: 835206 - DNA, 15 bp, Homo sapiens
aaaaggggtgaagtg

SEQ ID NO: 835207 - DNA, 15 bp, Homo sapiens
aaaggggtgaagtgg

SEQ ID NO: 835208 - DNA, 15 bp, Homo sapiens
aaggggtgaagtggg

SEQ ID NO: 835209 - DNA, 15 bp, Homo sapiens
aggggtgaagtgggg

SEQ ID NO: 835210 - DNA, 15 bp, Homo sapiens
ggggtgaagtgggga

SEQ ID NO: 835211 - DNA, 15 bp, Homo sapiens
gggtgaagtggggag

SEQ ID NO: 835212 - DNA, 15 bp, Homo sapiens
ggtgaagtggggagc

SEQ ID NO: 835213 - DNA, 15 bp, Homo sapiens
gtgaagtggggagcg

SEQ ID NO: 835214 - DNA, 15 bp, Homo sapiens
tgaagtggggagcgc

SEQ ID NO: 835215 - DNA, 15 bp, Homo sapiens
gaagtggggagcgct

SEQ ID NO: 835216 - DNA, 15 bp, Homo sapiens
aagtggggagcgctg

SEQ ID NO: 835217 - DNA, 15 bp, Homo sapiens
agtggggagcgctgc

SEQ ID NO: 835218 - DNA, 15 bp, Homo sapiens
gtggggagcgctgct

SEQ ID NO: 835219 - DNA, 15 bp, Homo sapiens
tggggagcgctgctg

SEQ ID NO: 835220 - DNA, 15 bp, Homo sapiens
ggggagcgctgctgg

SEQ ID NO: 835221 - DNA, 15 bp, Homo sapiens
gggagcgctgctggg

SEQ ID NO: 835222 - DNA, 15 bp, Homo sapiens
ggagcgctgctgggt

SEQ ID NO: 835223 - DNA, 15 bp, Homo sapiens
gagcgctgctgggtg

SEQ ID NO: 835224 - DNA, 15 bp, Homo sapiens
agcgctgctgggtgg

SEQ ID NO: 835225 - DNA, 15 bp, Homo sapiens
gcgctgctgggtggg

SEQ ID NO: 835226 - DNA, 15 bp, Homo sapiens
cgctgctgggtggga

SEQ ID NO: 835227 - DNA, 15 bp, Homo sapiens
gctgctgggtgggaa

SEQ ID NO: 835228 - DNA, 15 bp, Homo sapiens
ctgctgggtgggaag

SEQ ID NO: 835229 - DNA, 15 bp, Homo sapiens
tgctgggtgggaagt

SEQ ID NO: 835230 - DNA, 15 bp, Homo sapiens
gctgggtgggaagtt

SEQ ID NO: 835231 - DNA, 15 bp, Homo sapiens
ctgggtgggaagttt

SEQ ID NO: 835232 - DNA, 15 bp, Homo sapiens
tgggtgggaagtttg

SEQ ID NO: 835233 - DNA, 15 bp, Homo sapiens
gggtgggaagtttgt

SEQ ID NO: 835234 - DNA, 15 bp, Homo sapiens
ggtgggaagtttgtg

SEQ ID NO: 835235 - DNA, 15 bp, Homo sapiens
gtgggaagtttgtgg

SEQ ID NO: 835236 - DNA, 15 bp, Homo sapiens
tgggaagtttgtggg

SEQ ID NO: 835237 - DNA, 15 bp, Homo sapiens
gggaagtttgtgggg

SEQ ID NO: 835238 - DNA, 15 bp, Homo sapiens
ggaagtttgtggggg

SEQ ID NO: 835239 - DNA, 15 bp, Homo sapiens
gaagtttgtgggggt

SEQ ID NO: 835240 - DNA, 15 bp, Homo sapiens
aagtttgtgggggtg

SEQ ID NO: 835241 - DNA, 15 bp, Homo sapiens
agtttgtgggggtgg

SEQ ID NO: 835242 - DNA, 15 bp, Homo sapiens
gtttgtgggggtggt

SEQ ID NO: 835243 - DNA, 15 bp, Homo sapiens
tttgtgggggtggtc

SEQ ID NO: 835244 - DNA, 15 bp, Homo sapiens
ttgtgggggtggtca

SEQ ID NO: 835245 - DNA, 15 bp, Homo sapiens
tgtgggggtggtcat

SEQ ID NO: 835246 - DNA, 15 bp, Homo sapiens
gtgggggtggtcata

SEQ ID NO: 835247 - DNA, 15 bp, Homo sapiens
tgggggtggtcataa

SEQ ID NO: 835248 - DNA, 15 bp, Homo sapiens
gggggtggtcataat

SEQ ID NO: 835249 - DNA, 15 bp, Homo sapiens
ggggtggtcataata

SEQ ID NO: 835250 - DNA, 15 bp, Homo sapiens
gggtggtcataataa

SEQ ID NO: 835251 - DNA, 15 bp, Homo sapiens
ggtggtcataataaa

SEQ ID NO: 835252 - DNA, 15 bp, Homo sapiens
gtggtcataataaat

SEQ ID NO: 835253 - DNA, 15 bp, Homo sapiens
tggtcataataaatg

SEQ ID NO: 835254 - DNA, 15 bp, Homo sapiens
ggtcataataaatgc

SEQ ID NO: 835255 - DNA, 15 bp, Homo sapiens
gtcataataaatgca

SEQ ID NO: 835256 - DNA, 15 bp, Homo sapiens
tcataataaatgcac

SEQ ID NO: 835257 - DNA, 15 bp, Homo sapiens
cataataaatgcact

SEQ ID NO: 835258 - DNA, 15 bp, Homo sapiens
ataataaatgcactt

SEQ ID NO: 835259 - DNA, 15 bp, Homo sapiens
taataaatgcacttg

SEQ ID NO: 835260 - DNA, 15 bp, Homo sapiens
aataaatgcacttgc

SEQ ID NO: 835261 - DNA, 15 bp, Homo sapiens
ataaatgcacttgca

SEQ ID NO: 835262 - DNA, 15 bp, Homo sapiens
taaatgcacttgcat

SEQ ID NO: 835263 - DNA, 15 bp, Homo sapiens
aaatgcacttgcatt

SEQ ID NO: 835264 - DNA, 15 bp, Homo sapiens
aatgcacttgcattt

SEQ ID NO: 835265 - DNA, 15 bp, Homo sapiens
atgcacttgcatttc

SEQ ID NO: 835266 - DNA, 15 bp, Homo sapiens
tgcacttgcatttct

SEQ ID NO: 835267 - DNA, 15 bp, Homo sapiens
gcacttgcatttctg

SEQ ID NO: 835268 - DNA, 15 bp, Homo sapiens
cacttgcatttctga

SEQ ID NO: 835269 - DNA, 15 bp, Homo sapiens
acttgcatttctgat

SEQ ID NO: 835270 - DNA, 15 bp, Homo sapiens
cttgcatttctgatt

SEQ ID NO: 835271 - DNA, 15 bp, Homo sapiens
ttgcatttctgatta

SEQ ID NO: 835272 - DNA, 15 bp, Homo sapiens
ggtggaggtgaattt

SEQ ID NO: 835273 - DNA, 15 bp, Homo sapiens
gtggaggtgaatttt

SEQ ID NO: 835274 - DNA, 15 bp, Homo sapiens
tggaggtgaatttta

SEQ ID NO: 835275 - DNA, 15 bp, Homo sapiens
ggaggtgaattttat

SEQ ID NO: 835276 - DNA, 15 bp, Homo sapiens
gaggtgaattttatt

SEQ ID NO: 835277 - DNA, 15 bp, Homo sapiens
aggtgaattttatta

SEQ ID NO: 835278 - DNA, 15 bp, Homo sapiens
ggtgaattttattag

SEQ ID NO: 835279 - DNA, 15 bp, Homo sapiens
gtgaattttattagc

SEQ ID NO: 835280 - DNA, 15 bp, Homo sapiens
tgaattttattagca

SEQ ID NO: 835281 - DNA, 15 bp, Homo sapiens
gaattttattagcaa

SEQ ID NO: 835282 - DNA, 15 bp, Homo sapiens
aattttattagcaag

SEQ ID NO: 835283 - DNA, 15 bp, Homo sapiens
attttattagcaagg

SEQ ID NO: 835284 - DNA, 15 bp, Homo sapiens
ttttattagcaaggc

SEQ ID NO: 835285 - DNA, 15 bp, Homo sapiens
tttattagcaaggct

SEQ ID NO: 835286 - DNA, 15 bp, Homo sapiens
ttattagcaaggctg

SEQ ID NO: 835287 - DNA, 15 bp, Homo sapiens
tattagcaaggctgt

SEQ ID NO: 835288 - DNA, 15 bp, Homo sapiens
attagcaaggctgtg

SEQ ID NO: 835289 - DNA, 15 bp, Homo sapiens
ttagcaaggctgtga

SEQ ID NO: 835290 - DNA, 15 bp, Homo sapiens
tagcaaggctgtgac

SEQ ID NO: 835291 - DNA, 15 bp, Homo sapiens
agcaaggctgtgact

SEQ ID NO: 835292 - DNA, 15 bp, Homo sapiens
gcaaggctgtgacta

SEQ ID NO: 835293 - DNA, 15 bp, Homo sapiens
caaggctgtgactag

SEQ ID NO: 835294 - DNA, 15 bp, Homo sapiens
aaggctgtgactagt

SEQ ID NO: 835295 - DNA, 15 bp, Homo sapiens
aggctgtgactagtg

SEQ ID NO: 835296 - DNA, 15 bp, Homo sapiens
ggctgtgactagtga

SEQ ID NO: 835297 - DNA, 15 bp, Homo sapiens
gctgtgactagtgac

SEQ ID NO: 835298 - DNA, 15 bp, Homo sapiens
ctgtgactagtgaca

SEQ ID NO: 835299 - DNA, 15 bp, Homo sapiens
tgtgactagtgacag

SEQ ID NO: 835300 - DNA, 15 bp, Homo sapiens
gtgactagtgacagc

SEQ ID NO: 835301 - DNA, 15 bp, Homo sapiens
tgactagtgacagct

SEQ ID NO: 835302 - DNA, 15 bp, Homo sapiens
gactagtgacagctc

SEQ ID NO: 835303 - DNA, 15 bp, Homo sapiens
actagtgacagctcc

SEQ ID NO: 835304 - DNA, 15 bp, Homo sapiens
ctagtgacagctcct

SEQ ID NO: 835305 - DNA, 15 bp, Homo sapiens
tagtgacagctcctg

SEQ ID NO: 835306 - DNA, 15 bp, Homo sapiens
agtgacagctcctgc

SEQ ID NO: 835307 - DNA, 15 bp, Homo sapiens
gtgacagctcctgca

SEQ ID NO: 835308 - DNA, 15 bp, Homo sapiens
tgacagctcctgcag

SEQ ID NO: 835309 - DNA, 15 bp, Homo sapiens
gacagctcctgcagc

SEQ ID NO: 835310 - DNA, 15 bp, Homo sapiens
acagctcctgcagca

SEQ ID NO: 835311 - DNA, 15 bp, Homo sapiens
cagctcctgcagcaa

SEQ ID NO: 835312 - DNA, 15 bp, Homo sapiens
agctcctgcagcaac

SEQ ID NO: 835313 - DNA, 15 bp, Homo sapiens
gctcctgcagcaacg

SEQ ID NO: 835314 - DNA, 15 bp, Homo sapiens
ctcctgcagcaacga

SEQ ID NO: 835315 - DNA, 15 bp, Homo sapiens
tcctgcagcaacgag

SEQ ID NO: 835316 - DNA, 15 bp, Homo sapiens
cctgcagcaacgagc

SEQ ID NO: 835317 - DNA, 15 bp, Homo sapiens
ctgcagcaacgagct

SEQ ID NO: 835318 - DNA, 15 bp, Homo sapiens
tgcagcaacgagctc

SEQ ID NO: 835319 - DNA, 15 bp, Homo sapiens
gcagcaacgagctct

SEQ ID NO: 835320 - DNA, 15 bp, Homo sapiens
cagcaacgagctctc

SEQ ID NO: 835321 - DNA, 15 bp, Homo sapiens
agcaacgagctctcc

SEQ ID NO: 835322 - DNA, 15 bp, Homo sapiens
gcaacgagctctcct

SEQ ID NO: 835323 - DNA, 15 bp, Homo sapiens
caacgagctctcctt

SEQ ID NO: 835324 - DNA, 15 bp, Homo sapiens
aacgagctctccttc

SEQ ID NO: 835325 - DNA, 15 bp, Homo sapiens
acgagctctccttct

SEQ ID NO: 835326 - DNA, 15 bp, Homo sapiens
cgagctctccttctt

SEQ ID NO: 835327 - DNA, 15 bp, Homo sapiens
gagctctccttcttt

SEQ ID NO: 835328 - DNA, 15 bp, Homo sapiens
agctctccttctttc

SEQ ID NO: 835329 - DNA, 15 bp, Homo sapiens
gctctccttctttca

SEQ ID NO: 835330 - DNA, 15 bp, Homo sapiens
ctctccttctttcat

SEQ ID NO: 835331 - DNA, 15 bp, Homo sapiens
tctccttctttcatt

SEQ ID NO: 835332 - DNA, 15 bp, Homo sapiens
ctccttctttcattt

SEQ ID NO: 835333 - DNA, 15 bp, Homo sapiens
tccttctttcatttg

SEQ ID NO: 835334 - DNA, 15 bp, Homo sapiens
ccttctttcatttgt

SEQ ID NO: 835335 - DNA, 15 bp, Homo sapiens
cttctttcatttgtg

SEQ ID NO: 835336 - DNA, 15 bp, Homo sapiens
ttctttcatttgtga

SEQ ID NO: 835337 - DNA, 15 bp, Homo sapiens
tctttcatttgtgat

SEQ ID NO: 835338 - DNA, 15 bp, Homo sapiens
ctttcatttgtgatc

SEQ ID NO: 835339 - DNA, 15 bp, Homo sapiens
tttcatttgtgatct

SEQ ID NO: 835340 - DNA, 15 bp, Homo sapiens
ttcatttgtgatctg

SEQ ID NO: 835341 - DNA, 15 bp, Homo sapiens
tcatttgtgatctga

SEQ ID NO: 835342 - DNA, 15 bp, Homo sapiens
catttgtgatctgaa

SEQ ID NO: 835343 - DNA, 15 bp, Homo sapiens
atttgtgatctgaaa

SEQ ID NO: 835344 - DNA, 15 bp, Homo sapiens
tttgtgatctgaaat

SEQ ID NO: 835345 - DNA, 15 bp, Homo sapiens
ttgtgatctgaaatt

SEQ ID NO: 835346 - DNA, 15 bp, Homo sapiens
tgtgatctgaaattt

SEQ ID NO: 835347 - DNA, 15 bp, Homo sapiens
gtgatctgaaatttc

SEQ ID NO: 835348 - DNA, 15 bp, Homo sapiens
tgatctgaaatttca

SEQ ID NO: 835349 - DNA, 15 bp, Homo sapiens
gatctgaaatttcat

SEQ ID NO: 835350 - DNA, 15 bp, Homo sapiens
atctgaaatttcatt

SEQ ID NO: 835351 - DNA, 15 bp, Homo sapiens
tctgaaatttcattt

SEQ ID NO: 835352 - DNA, 15 bp, Homo sapiens
ctgaaatttcattta

SEQ ID NO: 835353 - DNA, 15 bp, Homo sapiens
tgaaatttcatttag

SEQ ID NO: 835354 - DNA, 15 bp, Homo sapiens
gaaatttcatttagt

SEQ ID NO: 835355 - DNA, 15 bp, Homo sapiens
aaatttcatttagtg

SEQ ID NO: 835356 - DNA, 15 bp, Homo sapiens
aatttcatttagtgt

SEQ ID NO: 835357 - DNA, 15 bp, Homo sapiens
atttcatttagtgtg

SEQ ID NO: 835358 - DNA, 15 bp, Homo sapiens
tttcatttagtgtgg

SEQ ID NO: 835359 - DNA, 15 bp, Homo sapiens
ttcatttagtgtggg

SEQ ID NO: 835360 - DNA, 15 bp, Homo sapiens
tcatttagtgtggga

SEQ ID NO: 835361 - DNA, 15 bp, Homo sapiens
catttagtgtgggag

SEQ ID NO: 835362 - DNA, 15 bp, Homo sapiens
atttagtgtgggagt

SEQ ID NO: 835363 - DNA, 15 bp, Homo sapiens
tttagtgtgggagtg

SEQ ID NO: 835364 - DNA, 15 bp, Homo sapiens
ttagtgtgggagtgc

SEQ ID NO: 835365 - DNA, 15 bp, Homo sapiens
tagtgtgggagtgct

SEQ ID NO: 835366 - DNA, 15 bp, Homo sapiens
agtgtgggagtgctt

SEQ ID NO: 835367 - DNA, 15 bp, Homo sapiens
gtgtgggagtgcttt

SEQ ID NO: 835368 - DNA, 15 bp, Homo sapiens
tgtgggagtgcttta

SEQ ID NO: 835369 - DNA, 15 bp, Homo sapiens
gtgggagtgctttaa

SEQ ID NO: 835370 - DNA, 15 bp, Homo sapiens
tgggagtgctttaag

SEQ ID NO: 835371 - DNA, 15 bp, Homo sapiens
gggagtgctttaagc

SEQ ID NO: 835372 - DNA, 15 bp, Homo sapiens
ggagtgctttaagct

SEQ ID NO: 835373 - DNA, 15 bp, Homo sapiens
gagtgctttaagctg

SEQ ID NO: 835374 - DNA, 15 bp, Homo sapiens
agtgctttaagctgt

SEQ ID NO: 835375 - DNA, 15 bp, Homo sapiens
gtgctttaagctgtt

SEQ ID NO: 835376 - DNA, 15 bp, Homo sapiens
tgctttaagctgttg

SEQ ID NO: 835377 - DNA, 15 bp, Homo sapiens
gctttaagctgttgt

SEQ ID NO: 835378 - DNA, 15 bp, Homo sapiens
ctttaagctgttgtt

SEQ ID NO: 835379 - DNA, 15 bp, Homo sapiens
tttaagctgttgttt

SEQ ID NO: 835380 - DNA, 15 bp, Homo sapiens
ttaagctgttgttta

SEQ ID NO: 835381 - DNA, 15 bp, Homo sapiens
taagctgttgtttag

SEQ ID NO: 835382 - DNA, 15 bp, Homo sapiens
aagctgttgtttaga

SEQ ID NO: 835383 - DNA, 15 bp, Homo sapiens
agctgttgtttagat

SEQ ID NO: 835384 - DNA, 15 bp, Homo sapiens
gctgttgtttagatt

SEQ ID NO: 835385 - DNA, 15 bp, Homo sapiens
ctgttgtttagattt

SEQ ID NO: 835386 - DNA, 15 bp, Homo sapiens
tgttgtttagatttt

SEQ ID NO: 835387 - DNA, 15 bp, Homo sapiens
gttgtttagattttt

SEQ ID NO: 835388 - DNA, 15 bp, Homo sapiens
ttgtttagatttttg

SEQ ID NO: 835389 - DNA, 15 bp, Homo sapiens
tgtttagatttttgg

SEQ ID NO: 835390 - DNA, 15 bp, Homo sapiens
gtttagatttttggc

SEQ ID NO: 835391 - DNA, 15 bp, Homo sapiens
tttagatttttggct

SEQ ID NO: 835392 - DNA, 15 bp, Homo sapiens
ttagatttttggctg

SEQ ID NO: 835393 - DNA, 15 bp, Homo sapiens
tagatttttggctga

SEQ ID NO: 835394 - DNA, 15 bp, Homo sapiens
agatttttggctgaa

SEQ ID NO: 835395 - DNA, 15 bp, Homo sapiens
gatttttggctgaat

SEQ ID NO: 835396 - DNA, 15 bp, Homo sapiens
atttttggctgaatt

SEQ ID NO: 835397 - DNA, 15 bp, Homo sapiens
tttttggctgaattt

SEQ ID NO: 835398 - DNA, 15 bp, Homo sapiens
ttttggctgaattta

SEQ ID NO: 835399 - DNA, 15 bp, Homo sapiens
tttggctgaatttag

SEQ ID NO: 835400 - DNA, 15 bp, Homo sapiens
ttggctgaatttaga

SEQ ID NO: 835401 - DNA, 15 bp, Homo sapiens
tggctgaatttagat

SEQ ID NO: 835402 - DNA, 15 bp, Homo sapiens
ggctgaatttagatt

SEQ ID NO: 835403 - DNA, 15 bp, Homo sapiens
gctgaatttagattg

SEQ ID NO: 835404 - DNA, 15 bp, Homo sapiens
ctgaatttagattga

SEQ ID NO: 835405 - DNA, 15 bp, Homo sapiens
tgaatttagattgaa

SEQ ID NO: 835406 - DNA, 15 bp, Homo sapiens
gaatttagattgaat

SEQ ID NO: 835407 - DNA, 15 bp, Homo sapiens
aatttagattgaata

SEQ ID NO: 835408 - DNA, 15 bp, Homo sapiens
atttagattgaatag

SEQ ID NO: 835409 - DNA, 15 bp, Homo sapiens
tttagattgaatagg

SEQ ID NO: 835410 - DNA, 15 bp, Homo sapiens
ttagattgaatagga

SEQ ID NO: 835411 - DNA, 15 bp, Homo sapiens
tagattgaataggaa

SEQ ID NO: 835412 - DNA, 15 bp, Homo sapiens
agattgaataggaaa

SEQ ID NO: 835413 - DNA, 15 bp, Homo sapiens
gattgaataggaaaa

SEQ ID NO: 835414 - DNA, 15 bp, Homo sapiens
attgaataggaaaat

SEQ ID NO: 835415 - DNA, 15 bp, Homo sapiens
ttgaataggaaaatt

SEQ ID NO: 835416 - DNA, 15 bp, Homo sapiens
tgaataggaaaatta

SEQ ID NO: 835417 - DNA, 15 bp, Homo sapiens
gaataggaaaattaa

SEQ ID NO: 835418 - DNA, 15 bp, Homo sapiens
aataggaaaattaat

SEQ ID NO: 835419 - DNA, 15 bp, Homo sapiens
ataggaaaattaatg

SEQ ID NO: 835420 - DNA, 15 bp, Homo sapiens
taggaaaattaatgt

SEQ ID NO: 835421 - DNA, 15 bp, Homo sapiens
aggaaaattaatgtt

SEQ ID NO: 835422 - DNA, 15 bp, Homo sapiens
ggaaaattaatgttg

SEQ ID NO: 835423 - DNA, 15 bp, Homo sapiens
gaaaattaatgttgt

SEQ ID NO: 835424 - DNA, 15 bp, Homo sapiens
aaaattaatgttgta

SEQ ID NO: 835425 - DNA, 15 bp, Homo sapiens
aaattaatgttgtat

SEQ ID NO: 835426 - DNA, 15 bp, Homo sapiens
aattaatgttgtatg

SEQ ID NO: 835427 - DNA, 15 bp, Homo sapiens
attaatgttgtatgt

SEQ ID NO: 835428 - DNA, 15 bp, Homo sapiens
ttaatgttgtatgtt

SEQ ID NO: 835429 - DNA, 15 bp, Homo sapiens
taatgttgtatgttt

SEQ ID NO: 835430 - DNA, 15 bp, Homo sapiens
aatgttgtatgttta

SEQ ID NO: 835431 - DNA, 15 bp, Homo sapiens
atgttgtatgtttag

SEQ ID NO: 835432 - DNA, 15 bp, Homo sapiens
tgttgtatgtttaga

SEQ ID NO: 835433 - DNA, 15 bp, Homo sapiens
gttgtatgtttagaa

SEQ ID NO: 835434 - DNA, 15 bp, Homo sapiens
ttgtatgtttagaag

SEQ ID NO: 835435 - DNA, 15 bp, Homo sapiens
tgtatgtttagaagg

SEQ ID NO: 835436 - DNA, 15 bp, Homo sapiens
gtatgtttagaaggg

SEQ ID NO: 835437 - DNA, 15 bp, Homo sapiens
tatgtttagaagggg

SEQ ID NO: 835438 - DNA, 15 bp, Homo sapiens
atgtttagaaggggt

SEQ ID NO: 835439 - DNA, 15 bp, Homo sapiens
tgtttagaaggggtt

SEQ ID NO: 835440 - DNA, 15 bp, Homo sapiens
gtttagaaggggttg

SEQ ID NO: 835441 - DNA, 15 bp, Homo sapiens
tttagaaggggttgt

SEQ ID NO: 835442 - DNA, 15 bp, Homo sapiens
ttagaaggggttgtc

SEQ ID NO: 835443 - DNA, 15 bp, Homo sapiens
tagaaggggttgtca

SEQ ID NO: 835444 - DNA, 15 bp, Homo sapiens
agaaggggttgtcag

SEQ ID NO: 835445 - DNA, 15 bp, Homo sapiens
gaaggggttgtcagt

SEQ ID NO: 835446 - DNA, 15 bp, Homo sapiens
aaggggttgtcagtt

SEQ ID NO: 835447 - DNA, 15 bp, Homo sapiens
aggggttgtcagttc

SEQ ID NO: 835448 - DNA, 15 bp, Homo sapiens
ggggttgtcagttcc

SEQ ID NO: 835449 - DNA, 15 bp, Homo sapiens
gggttgtcagttcct

SEQ ID NO: 835450 - DNA, 15 bp, Homo sapiens
ggttgtcagttcctt

SEQ ID NO: 835451 - DNA, 15 bp, Homo sapiens
gttgtcagttccttt

SEQ ID NO: 835452 - DNA, 15 bp, Homo sapiens
ttgtcagttcctttt

SEQ ID NO: 835453 - DNA, 15 bp, Homo sapiens
tgtcagttccttttt

SEQ ID NO: 835454 - DNA, 15 bp, Homo sapiens
gtcagttcctttttt

SEQ ID NO: 835455 - DNA, 15 bp, Homo sapiens
tcagttccttttttt

SEQ ID NO: 835456 - DNA, 15 bp, Homo sapiens
cagttcctttttttt

SEQ ID NO: 835457 - DNA, 15 bp, Homo sapiens
agttccttttttttc

SEQ ID NO: 835458 - DNA, 15 bp, Homo sapiens
gttccttttttttct

SEQ ID NO: 835459 - DNA, 15 bp, Homo sapiens
ttccttttttttctc

SEQ ID NO: 835460 - DNA, 15 bp, Homo sapiens
tccttttttttctct

SEQ ID NO: 835461 - DNA, 15 bp, Homo sapiens
ccttttttttctctt

SEQ ID NO: 835462 - DNA, 15 bp, Homo sapiens
cttttttttctcttt

SEQ ID NO: 835463 - DNA, 15 bp, Homo sapiens
ttttttttctctttc

SEQ ID NO: 835464 - DNA, 15 bp, Homo sapiens
tttttttctctttcc

SEQ ID NO: 835465 - DNA, 15 bp, Homo sapiens
ttttttctctttcca

SEQ ID NO: 835466 - DNA, 15 bp, Homo sapiens
tttttctctttccaa

SEQ ID NO: 835467 - DNA, 15 bp, Homo sapiens
ttttctctttccaat

SEQ ID NO: 835468 - DNA, 15 bp, Homo sapiens
tttctctttccaatg

SEQ ID NO: 835469 - DNA, 15 bp, Homo sapiens
ttctctttccaatga

SEQ ID NO: 835470 - DNA, 15 bp, Homo sapiens
tctctttccaatgag

SEQ ID NO: 835471 - DNA, 15 bp, Homo sapiens
ctctttccaatgagt

SEQ ID NO: 835472 - DNA, 15 bp, Homo sapiens
tctttccaatgagtg

SEQ ID NO: 835473 - DNA, 15 bp, Homo sapiens
ctttccaatgagtgc

SEQ ID NO: 835474 - DNA, 15 bp, Homo sapiens
tttccaatgagtgct

SEQ ID NO: 835475 - DNA, 15 bp, Homo sapiens
ttccaatgagtgctg

SEQ ID NO: 835476 - DNA, 15 bp, Homo sapiens
tccaatgagtgctga

SEQ ID NO: 835477 - DNA, 15 bp, Homo sapiens
ccaatgagtgctgat

SEQ ID NO: 835478 - DNA, 15 bp, Homo sapiens
caatgagtgctgatg

SEQ ID NO: 835479 - DNA, 15 bp, Homo sapiens
aatgagtgctgatgc

SEQ ID NO: 835480 - DNA, 15 bp, Homo sapiens
atgagtgctgatgca

SEQ ID NO: 835481 - DNA, 15 bp, Homo sapiens
tgagtgctgatgcag

SEQ ID NO: 835482 - DNA, 15 bp, Homo sapiens
gagtgctgatgcagc

SEQ ID NO: 835483 - DNA, 15 bp, Homo sapiens
agtgctgatgcagca

SEQ ID NO: 835484 - DNA, 15 bp, Homo sapiens
gtgctgatgcagcat

SEQ ID NO: 835485 - DNA, 15 bp, Homo sapiens
tgctgatgcagcatc

SEQ ID NO: 835486 - DNA, 15 bp, Homo sapiens
gctgatgcagcatct

SEQ ID NO: 835487 - DNA, 15 bp, Homo sapiens
ctgatgcagcatctt

SEQ ID NO: 835488 - DNA, 15 bp, Homo sapiens
tgatgcagcatcttc

SEQ ID NO: 835489 - DNA, 15 bp, Homo sapiens
gatgcagcatcttca

SEQ ID NO: 835490 - DNA, 15 bp, Homo sapiens
atgcagcatcttcaa

SEQ ID NO: 835491 - DNA, 15 bp, Homo sapiens
tgcagcatcttcaag

SEQ ID NO: 835492 - DNA, 15 bp, Homo sapiens
gcagcatcttcaaga

SEQ ID NO: 835493 - DNA, 15 bp, Homo sapiens
cagcatcttcaagaa

SEQ ID NO: 835494 - DNA, 15 bp, Homo sapiens
agcatcttcaagaaa

SEQ ID NO: 835495 - DNA, 15 bp, Homo sapiens
gcatcttcaagaaat

SEQ ID NO: 835496 - DNA, 15 bp, Homo sapiens
catcttcaagaaatt

SEQ ID NO: 835497 - DNA, 15 bp, Homo sapiens
atcttcaagaaatta

SEQ ID NO: 835498 - DNA, 15 bp, Homo sapiens
tcttcaagaaattaa

SEQ ID NO: 835499 - DNA, 15 bp, Homo sapiens
cttcaagaaattaag

SEQ ID NO: 835500 - DNA, 15 bp, Homo sapiens
ttcaagaaattaagg

SEQ ID NO: 835501 - DNA, 15 bp, Homo sapiens
tcaagaaattaagga

SEQ ID NO: 835502 - DNA, 15 bp, Homo sapiens
caagaaattaaggag

SEQ ID NO: 835503 - DNA, 15 bp, Homo sapiens
aagaaattaaggagg

SEQ ID NO: 835504 - DNA, 15 bp, Homo sapiens
agaaattaaggagga

SEQ ID NO: 835505 - DNA, 15 bp, Homo sapiens
gaaattaaggaggat

SEQ ID NO: 835506 - DNA, 15 bp, Homo sapiens
aaattaaggaggatt

SEQ ID NO: 835507 - DNA, 15 bp, Homo sapiens
aattaaggaggattt

SEQ ID NO: 835508 - DNA, 15 bp, Homo sapiens
attaaggaggatttt

SEQ ID NO: 835509 - DNA, 15 bp, Homo sapiens
ttaaggaggatttta

SEQ ID NO: 835510 - DNA, 15 bp, Homo sapiens
taaggaggattttag

SEQ ID NO: 835511 - DNA, 15 bp, Homo sapiens
aaggaggattttagc

SEQ ID NO: 835512 - DNA, 15 bp, Homo sapiens
aggaggattttagct

SEQ ID NO: 835513 - DNA, 15 bp, Homo sapiens
ggaggattttagctg

SEQ ID NO: 835514 - DNA, 15 bp, Homo sapiens
gaggattttagctgt

SEQ ID NO: 835515 - DNA, 15 bp, Homo sapiens
aggattttagctgtg

SEQ ID NO: 835516 - DNA, 15 bp, Homo sapiens
ggattttagctgtgg

SEQ ID NO: 835517 - DNA, 15 bp, Homo sapiens
gattttagctgtggt

SEQ ID NO: 835518 - DNA, 15 bp, Homo sapiens
attttagctgtggtt

SEQ ID NO: 835519 - DNA, 15 bp, Homo sapiens
ttttagctgtggtta

SEQ ID NO: 835520 - DNA, 15 bp, Homo sapiens
tttagctgtggttat

SEQ ID NO: 835521 - DNA, 15 bp, Homo sapiens
ttagctgtggttatt

SEQ ID NO: 835522 - DNA, 15 bp, Homo sapiens
tagctgtggttattg

SEQ ID NO: 835523 - DNA, 15 bp, Homo sapiens
agctgtggttattgt

SEQ ID NO: 835524 - DNA, 15 bp, Homo sapiens
gctgtggttattgtc

SEQ ID NO: 835525 - DNA, 15 bp, Homo sapiens
ctgtggttattgtcc

SEQ ID NO: 835526 - DNA, 15 bp, Homo sapiens
tgtggttattgtcca

SEQ ID NO: 835527 - DNA, 15 bp, Homo sapiens
gtggttattgtccaa

SEQ ID NO: 835528 - DNA, 15 bp, Homo sapiens
tggttattgtccaac

SEQ ID NO: 835529 - DNA, 15 bp, Homo sapiens
ggttattgtccaact

SEQ ID NO: 835530 - DNA, 15 bp, Homo sapiens
gttattgtccaactc

SEQ ID NO: 835531 - DNA, 15 bp, Homo sapiens
ttattgtccaactca

SEQ ID NO: 835532 - DNA, 15 bp, Homo sapiens
tattgtccaactcaa

SEQ ID NO: 835533 - DNA, 15 bp, Homo sapiens
attgtccaactcaaa

SEQ ID NO: 835534 - DNA, 15 bp, Homo sapiens
ttgtccaactcaaag

SEQ ID NO: 835535 - DNA, 15 bp, Homo sapiens
tgtccaactcaaagc

SEQ ID NO: 835536 - DNA, 15 bp, Homo sapiens
gtccaactcaaagca

SEQ ID NO: 835537 - DNA, 15 bp, Homo sapiens
tccaactcaaagcag

SEQ ID NO: 835538 - DNA, 15 bp, Homo sapiens
ccaactcaaagcagc

SEQ ID NO: 835539 - DNA, 15 bp, Homo sapiens
caactcaaagcagct

SEQ ID NO: 835540 - DNA, 15 bp, Homo sapiens
aactcaaagcagctc

SEQ ID NO: 835541 - DNA, 15 bp, Homo sapiens
actcaaagcagctca

SEQ ID NO: 835542 - DNA, 15 bp, Homo sapiens
ctcaaagcagctcag

SEQ ID NO: 835543 - DNA, 15 bp, Homo sapiens
tcaaagcagctcagc

SEQ ID NO: 835544 - DNA, 15 bp, Homo sapiens
caaagcagctcagcc

SEQ ID NO: 835545 - DNA, 15 bp, Homo sapiens
aaagcagctcagccg

SEQ ID NO: 835546 - DNA, 15 bp, Homo sapiens
aagcagctcagccgg

SEQ ID NO: 835547 - DNA, 15 bp, Homo sapiens
agcagctcagccggc

SEQ ID NO: 835548 - DNA, 15 bp, Homo sapiens
gcagctcagccggcc

SEQ ID NO: 835549 - DNA, 15 bp, Homo sapiens
cagctcagccggcct

SEQ ID NO: 835550 - DNA, 15 bp, Homo sapiens
agctcagccggcctg

SEQ ID NO: 835551 - DNA, 15 bp, Homo sapiens
gctcagccggcctgg

SEQ ID NO: 835552 - DNA, 15 bp, Homo sapiens
ctcagccggcctggg

SEQ ID NO: 835553 - DNA, 15 bp, Homo sapiens
tcagccggcctggga

SEQ ID NO: 835554 - DNA, 15 bp, Homo sapiens
cagccggcctgggat

SEQ ID NO: 835555 - DNA, 15 bp, Homo sapiens
agccggcctgggatc

SEQ ID NO: 835556 - DNA, 15 bp, Homo sapiens
gccggcctgggatcc

SEQ ID NO: 835557 - DNA, 15 bp, Homo sapiens
ccggcctgggatcca

SEQ ID NO: 835558 - DNA, 15 bp, Homo sapiens
cggcctgggatccag

SEQ ID NO: 835559 - DNA, 15 bp, Homo sapiens
ggcctgggatccaga

SEQ ID NO: 835560 - DNA, 15 bp, Homo sapiens
gcctgggatccagac

SEQ ID NO: 835561 - DNA, 15 bp, Homo sapiens
cctgggatccagaca

SEQ ID NO: 835562 - DNA, 15 bp, Homo sapiens
ctgggatccagacag

SEQ ID NO: 835563 - DNA, 15 bp, Homo sapiens
tgggatccagacagt

SEQ ID NO: 835564 - DNA, 15 bp, Homo sapiens
gggatccagacagtc

SEQ ID NO: 835565 - DNA, 15 bp, Homo sapiens
ggatccagacagtcc

SEQ ID NO: 835566 - DNA, 15 bp, Homo sapiens
gatccagacagtccc

SEQ ID NO: 835567 - DNA, 15 bp, Homo sapiens
atccagacagtccct

SEQ ID NO: 835568 - DNA, 15 bp, Homo sapiens
tccagacagtccctg

SEQ ID NO: 835569 - DNA, 15 bp, Homo sapiens
ccagacagtccctgg

SEQ ID NO: 835570 - DNA, 15 bp, Homo sapiens
cagacagtccctggt

SEQ ID NO: 835571 - DNA, 15 bp, Homo sapiens
agacagtccctggtc

SEQ ID NO: 835572 - DNA, 15 bp, Homo sapiens
gacagtccctggtca

SEQ ID NO: 835573 - DNA, 15 bp, Homo sapiens
acagtccctggtcag

SEQ ID NO: 835574 - DNA, 15 bp, Homo sapiens
cagtccctggtcagt

SEQ ID NO: 835575 - DNA, 15 bp, Homo sapiens
agtccctggtcagta

SEQ ID NO: 835576 - DNA, 15 bp, Homo sapiens
gtccctggtcagtaa

SEQ ID NO: 835577 - DNA, 15 bp, Homo sapiens
tccctggtcagtaat

SEQ ID NO: 835578 - DNA, 15 bp, Homo sapiens
ccctggtcagtaatc

SEQ ID NO: 835579 - DNA, 15 bp, Homo sapiens
cctggtcagtaatca

SEQ ID NO: 835580 - DNA, 15 bp, Homo sapiens
ctggtcagtaatcac

SEQ ID NO: 835581 - DNA, 15 bp, Homo sapiens
tggtcagtaatcaca

SEQ ID NO: 835582 - DNA, 15 bp, Homo sapiens
ggtcagtaatcacat

SEQ ID NO: 835583 - DNA, 15 bp, Homo sapiens
gtcagtaatcacatg

SEQ ID NO: 835584 - DNA, 15 bp, Homo sapiens
tcagtaatcacatga

SEQ ID NO: 835585 - DNA, 15 bp, Homo sapiens
cagtaatcacatgat

SEQ ID NO: 835586 - DNA, 15 bp, Homo sapiens
agtaatcacatgatc

SEQ ID NO: 835587 - DNA, 15 bp, Homo sapiens
gtaatcacatgatca

SEQ ID NO: 835588 - DNA, 15 bp, Homo sapiens
taatcacatgatcat

SEQ ID NO: 835589 - DNA, 15 bp, Homo sapiens
aatcacatgatcata

SEQ ID NO: 835590 - DNA, 15 bp, Homo sapiens
atcacatgatcatag

SEQ ID NO: 835591 - DNA, 15 bp, Homo sapiens
tcacatgatcatagc

SEQ ID NO: 835592 - DNA, 15 bp, Homo sapiens
cacatgatcatagca

SEQ ID NO: 835593 - DNA, 15 bp, Homo sapiens
acatgatcatagcaa

SEQ ID NO: 835594 - DNA, 15 bp, Homo sapiens
catgatcatagcaac

SEQ ID NO: 835595 - DNA, 15 bp, Homo sapiens
atgatcatagcaacc

SEQ ID NO: 835596 - DNA, 15 bp, Homo sapiens
tgatcatagcaacct

SEQ ID NO: 835597 - DNA, 15 bp, Homo sapiens
gatcatagcaacctg

SEQ ID NO: 835598 - DNA, 15 bp, Homo sapiens
atcatagcaacctga

SEQ ID NO: 835599 - DNA, 15 bp, Homo sapiens
tcatagcaacctgaa

SEQ ID NO: 835600 - DNA, 15 bp, Homo sapiens
catagcaacctgaat

SEQ ID NO: 835601 - DNA, 15 bp, Homo sapiens
atagcaacctgaatg

SEQ ID NO: 835602 - DNA, 15 bp, Homo sapiens
tagcaacctgaatgt

SEQ ID NO: 835603 - DNA, 15 bp, Homo sapiens
agcaacctgaatgtg

SEQ ID NO: 835604 - DNA, 15 bp, Homo sapiens
gcaacctgaatgtgt

SEQ ID NO: 835605 - DNA, 15 bp, Homo sapiens
caacctgaatgtgtt

SEQ ID NO: 835606 - DNA, 15 bp, Homo sapiens
aacctgaatgtgttt

SEQ ID NO: 835607 - DNA, 15 bp, Homo sapiens
acctgaatgtgtttg

SEQ ID NO: 835608 - DNA, 15 bp, Homo sapiens
cctgaatgtgtttgg

SEQ ID NO: 835609 - DNA, 15 bp, Homo sapiens
ctgaatgtgtttggc

SEQ ID NO: 835610 - DNA, 15 bp, Homo sapiens
tgaatgtgtttggca

SEQ ID NO: 835611 - DNA, 15 bp, Homo sapiens
gaatgtgtttggcaa

SEQ ID NO: 835612 - DNA, 15 bp, Homo sapiens
aatgtgtttggcaaa

SEQ ID NO: 835613 - DNA, 15 bp, Homo sapiens
atgtgtttggcaaac

SEQ ID NO: 835614 - DNA, 15 bp, Homo sapiens
tgtgtttggcaaacc

SEQ ID NO: 835615 - DNA, 15 bp, Homo sapiens
gtgtttggcaaacct

SEQ ID NO: 835616 - DNA, 15 bp, Homo sapiens
tgtttggcaaacctc

SEQ ID NO: 835617 - DNA, 15 bp, Homo sapiens
gtttggcaaacctct

SEQ ID NO: 835618 - DNA, 15 bp, Homo sapiens
tttggcaaacctctg

SEQ ID NO: 835619 - DNA, 15 bp, Homo sapiens
ttggcaaacctctgt

SEQ ID NO: 835620 - DNA, 15 bp, Homo sapiens
tggcaaacctctgtg

SEQ ID NO: 835621 - DNA, 15 bp, Homo sapiens
ggcaaacctctgtgt

SEQ ID NO: 835622 - DNA, 15 bp, Homo sapiens
gcaaacctctgtgtt

SEQ ID NO: 835623 - DNA, 15 bp, Homo sapiens
caaacctctgtgttg

SEQ ID NO: 835624 - DNA, 15 bp, Homo sapiens
aaacctctgtgttgt

SEQ ID NO: 835625 - DNA, 15 bp, Homo sapiens
aacctctgtgttgta

SEQ ID NO: 835626 - DNA, 15 bp, Homo sapiens
acctctgtgttgtaa

SEQ ID NO: 835627 - DNA, 15 bp, Homo sapiens
cctctgtgttgtaat

SEQ ID NO: 835628 - DNA, 15 bp, Homo sapiens
ctctgtgttgtaatt

SEQ ID NO: 835629 - DNA, 15 bp, Homo sapiens
tctgtgttgtaatta

SEQ ID NO: 835630 - DNA, 15 bp, Homo sapiens
ctgtgttgtaattat

SEQ ID NO: 835631 - DNA, 15 bp, Homo sapiens
tgtgttgtaattatt

SEQ ID NO: 835632 - DNA, 15 bp, Homo sapiens
gtgttgtaattattc

SEQ ID NO: 835633 - DNA, 15 bp, Homo sapiens
tgttgtaattattca

SEQ ID NO: 835634 - DNA, 15 bp, Homo sapiens
gttgtaattattcag

SEQ ID NO: 835635 - DNA, 15 bp, Homo sapiens
ttgtaattattcaga

SEQ ID NO: 835636 - DNA, 15 bp, Homo sapiens
tgtaattattcagaa

SEQ ID NO: 835637 - DNA, 15 bp, Homo sapiens
gtaattattcagaaa

SEQ ID NO: 835638 - DNA, 15 bp, Homo sapiens
taattattcagaaac

SEQ ID NO: 835639 - DNA, 15 bp, Homo sapiens
aattattcagaaaca

SEQ ID NO: 835640 - DNA, 15 bp, Homo sapiens
attattcagaaacag

SEQ ID NO: 835641 - DNA, 15 bp, Homo sapiens
ttattcagaaacagt

SEQ ID NO: 835642 - DNA, 15 bp, Homo sapiens
tattcagaaacagtg

SEQ ID NO: 835643 - DNA, 15 bp, Homo sapiens
attcagaaacagtga

SEQ ID NO: 835644 - DNA, 15 bp, Homo sapiens
ttcagaaacagtgag

SEQ ID NO: 835645 - DNA, 15 bp, Homo sapiens
tcagaaacagtgagg

SEQ ID NO: 835646 - DNA, 15 bp, Homo sapiens
cagaaacagtgagga

SEQ ID NO: 835647 - DNA, 15 bp, Homo sapiens
agaaacagtgaggaa

SEQ ID NO: 835648 - DNA, 15 bp, Homo sapiens
gaaacagtgaggaag

SEQ ID NO: 835649 - DNA, 15 bp, Homo sapiens
aaacagtgaggaaga

SEQ ID NO: 835650 - DNA, 15 bp, Homo sapiens
aacagtgaggaagat

SEQ ID NO: 835651 - DNA, 15 bp, Homo sapiens
acagtgaggaagata

SEQ ID NO: 835652 - DNA, 15 bp, Homo sapiens
cagtgaggaagatat

SEQ ID NO: 835653 - DNA, 15 bp, Homo sapiens
agtgaggaagatatc

SEQ ID NO: 835654 - DNA, 15 bp, Homo sapiens
gtgaggaagatatca

SEQ ID NO: 835655 - DNA, 15 bp, Homo sapiens
tgaggaagatatcaa

SEQ ID NO: 835656 - DNA, 15 bp, Homo sapiens
gaggaagatatcaac

SEQ ID NO: 835657 - DNA, 15 bp, Homo sapiens
aggaagatatcaacc

SEQ ID NO: 835658 - DNA, 15 bp, Homo sapiens
ggaagatatcaacca

SEQ ID NO: 835659 - DNA, 15 bp, Homo sapiens
gaagatatcaaccaa

SEQ ID NO: 835660 - DNA, 15 bp, Homo sapiens
aagatatcaaccaat

SEQ ID NO: 835661 - DNA, 15 bp, Homo sapiens
agatatcaaccaatt

SEQ ID NO: 835662 - DNA, 15 bp, Homo sapiens
gatatcaaccaattc

SEQ ID NO: 835663 - DNA, 15 bp, Homo sapiens
atatcaaccaattca

SEQ ID NO: 835664 - DNA, 15 bp, Homo sapiens
tatcaaccaattcat

SEQ ID NO: 835665 - DNA, 15 bp, Homo sapiens
atcaaccaattcatg

SEQ ID NO: 835666 - DNA, 15 bp, Homo sapiens
tcaaccaattcatga

SEQ ID NO: 835667 - DNA, 15 bp, Homo sapiens
caaccaattcatgat

SEQ ID NO: 835668 - DNA, 15 bp, Homo sapiens
aaccaattcatgatt

SEQ ID NO: 835669 - DNA, 15 bp, Homo sapiens
accaattcatgatta

SEQ ID NO: 835670 - DNA, 15 bp, Homo sapiens
ccaattcatgattat

SEQ ID NO: 835671 - DNA, 15 bp, Homo sapiens
caattcatgattatt

SEQ ID NO: 835672 - DNA, 15 bp, Homo sapiens
aattcatgattattt

SEQ ID NO: 835673 - DNA, 15 bp, Homo sapiens
attcatgattatttg

SEQ ID NO: 835674 - DNA, 15 bp, Homo sapiens
ttcatgattatttgc

SEQ ID NO: 835675 - DNA, 15 bp, Homo sapiens
tcatgattatttgct

SEQ ID NO: 835676 - DNA, 15 bp, Homo sapiens
catgattatttgctt

SEQ ID NO: 835677 - DNA, 15 bp, Homo sapiens
atgattatttgctta

SEQ ID NO: 835678 - DNA, 15 bp, Homo sapiens
tgattatttgcttaa

SEQ ID NO: 835679 - DNA, 15 bp, Homo sapiens
gattatttgcttaaa

SEQ ID NO: 835680 - DNA, 15 bp, Homo sapiens
attatttgcttaaaa

SEQ ID NO: 835681 - DNA, 15 bp, Homo sapiens
ttatttgcttaaaac

SEQ ID NO: 835682 - DNA, 15 bp, Homo sapiens
tatttgcttaaaaca

SEQ ID NO: 835683 - DNA, 15 bp, Homo sapiens
atttgcttaaaacac

SEQ ID NO: 835684 - DNA, 15 bp, Homo sapiens
tttgcttaaaacaca

SEQ ID NO: 835685 - DNA, 15 bp, Homo sapiens
ttgcttaaaacacat

SEQ ID NO: 835686 - DNA, 15 bp, Homo sapiens
tgcttaaaacacatt

SEQ ID NO: 835687 - DNA, 15 bp, Homo sapiens
gcttaaaacacattt

SEQ ID NO: 835688 - DNA, 15 bp, Homo sapiens
cttaaaacacatttt

SEQ ID NO: 835689 - DNA, 15 bp, Homo sapiens
ttaaaacacattttg

SEQ ID NO: 835690 - DNA, 15 bp, Homo sapiens
taaaacacattttgt

SEQ ID NO: 835691 - DNA, 15 bp, Homo sapiens
aaaacacattttgtt

SEQ ID NO: 835692 - DNA, 15 bp, Homo sapiens
aaacacattttgttt

SEQ ID NO: 835693 - DNA, 15 bp, Homo sapiens
aacacattttgttta

SEQ ID NO: 835694 - DNA, 15 bp, Homo sapiens
acacattttgtttag

SEQ ID NO: 835695 - DNA, 15 bp, Homo sapiens
cacattttgtttaga

SEQ ID NO: 835696 - DNA, 15 bp, Homo sapiens
acattttgtttagaa

SEQ ID NO: 835697 - DNA, 15 bp, Homo sapiens
cattttgtttagaac

SEQ ID NO: 835698 - DNA, 15 bp, Homo sapiens
attttgtttagaacc

SEQ ID NO: 835699 - DNA, 15 bp, Homo sapiens
ttttgtttagaacca

SEQ ID NO: 835700 - DNA, 15 bp, Homo sapiens
tttgtttagaaccat

SEQ ID NO: 835701 - DNA, 15 bp, Homo sapiens
ttgtttagaaccatc

SEQ ID NO: 835702 - DNA, 15 bp, Homo sapiens
tgtttagaaccatcc

SEQ ID NO: 835703 - DNA, 15 bp, Homo sapiens
gtttagaaccatccc

SEQ ID NO: 835704 - DNA, 15 bp, Homo sapiens
tttagaaccatccca

SEQ ID NO: 835705 - DNA, 15 bp, Homo sapiens
ttagaaccatcccaa

SEQ ID NO: 835706 - DNA, 15 bp, Homo sapiens
tagaaccatcccaaa

SEQ ID NO: 835707 - DNA, 15 bp, Homo sapiens
agaaccatcccaaac

SEQ ID NO: 835708 - DNA, 15 bp, Homo sapiens
gaaccatcccaaact

SEQ ID NO: 835709 - DNA, 15 bp, Homo sapiens
aaccatcccaaacta

SEQ ID NO: 835710 - DNA, 15 bp, Homo sapiens
accatcccaaactat

SEQ ID NO: 835711 - DNA, 15 bp, Homo sapiens
ccatcccaaactatt

SEQ ID NO: 835712 - DNA, 15 bp, Homo sapiens
catcccaaactattc

SEQ ID NO: 835713 - DNA, 15 bp, Homo sapiens
atcccaaactattcg

SEQ ID NO: 835714 - DNA, 15 bp, Homo sapiens
tcccaaactattcga

SEQ ID NO: 835715 - DNA, 15 bp, Homo sapiens
cccaaactattcgag

SEQ ID NO: 835716 - DNA, 15 bp, Homo sapiens
ccaaactattcgagt

SEQ ID NO: 835717 - DNA, 15 bp, Homo sapiens
caaactattcgagtt

SEQ ID NO: 835718 - DNA, 15 bp, Homo sapiens
aaactattcgagttt

SEQ ID NO: 835719 - DNA, 15 bp, Homo sapiens
aactattcgagtttt

SEQ ID NO: 835720 - DNA, 15 bp, Homo sapiens
actattcgagttttg

SEQ ID NO: 835721 - DNA, 15 bp, Homo sapiens
ctattcgagttttgg

SEQ ID NO: 835722 - DNA, 15 bp, Homo sapiens
tattcgagttttggg

SEQ ID NO: 835723 - DNA, 15 bp, Homo sapiens
attcgagttttgggg

SEQ ID NO: 835724 - DNA, 15 bp, Homo sapiens
ttcgagttttggggt

SEQ ID NO: 835725 - DNA, 15 bp, Homo sapiens
tcgagttttggggtt

SEQ ID NO: 835726 - DNA, 15 bp, Homo sapiens
cgagttttggggttg

SEQ ID NO: 835727 - DNA, 15 bp, Homo sapiens
gagttttggggttgg

SEQ ID NO: 835728 - DNA, 15 bp, Homo sapiens
agttttggggttggg

SEQ ID NO: 835729 - DNA, 15 bp, Homo sapiens
gttttggggttgggc

SEQ ID NO: 835730 - DNA, 15 bp, Homo sapiens
ttttggggttgggca

SEQ ID NO: 835731 - DNA, 15 bp, Homo sapiens
tttggggttgggcag

SEQ ID NO: 835732 - DNA, 15 bp, Homo sapiens
ttggggttgggcaga

SEQ ID NO: 835733 - DNA, 15 bp, Homo sapiens
tggggttgggcagaa

SEQ ID NO: 835734 - DNA, 15 bp, Homo sapiens
ggggttgggcagaat

SEQ ID NO: 835735 - DNA, 15 bp, Homo sapiens
gggttgggcagaatc

SEQ ID NO: 835736 - DNA, 15 bp, Homo sapiens
ggttgggcagaatca

SEQ ID NO: 835737 - DNA, 15 bp, Homo sapiens
gttgggcagaatcac

SEQ ID NO: 835738 - DNA, 15 bp, Homo sapiens
ttgggcagaatcact

SEQ ID NO: 835739 - DNA, 15 bp, Homo sapiens
tgggcagaatcactt

SEQ ID NO: 835740 - DNA, 15 bp, Homo sapiens
gggcagaatcactta

SEQ ID NO: 835741 - DNA, 15 bp, Homo sapiens
ggcagaatcacttac

SEQ ID NO: 835742 - DNA, 15 bp, Homo sapiens
gcagaatcacttaca

SEQ ID NO: 835743 - DNA, 15 bp, Homo sapiens
cagaatcacttacag

SEQ ID NO: 835744 - DNA, 15 bp, Homo sapiens
agaatcacttacaga

SEQ ID NO: 835745 - DNA, 15 bp, Homo sapiens
gaatcacttacagat

SEQ ID NO: 835746 - DNA, 15 bp, Homo sapiens
aatcacttacagatc

SEQ ID NO: 835747 - DNA, 15 bp, Homo sapiens
atcacttacagatcc

SEQ ID NO: 835748 - DNA, 15 bp, Homo sapiens
tcacttacagatcct

SEQ ID NO: 835749 - DNA, 15 bp, Homo sapiens
cacttacagatcctt

SEQ ID NO: 835750 - DNA, 15 bp, Homo sapiens
acttacagatccttg

SEQ ID NO: 835751 - DNA, 15 bp, Homo sapiens
cttacagatccttgg

SEQ ID NO: 835752 - DNA, 15 bp, Homo sapiens
ttacagatccttgga

SEQ ID NO: 835753 - DNA, 15 bp, Homo sapiens
tacagatccttggat

SEQ ID NO: 835754 - DNA, 15 bp, Homo sapiens
acagatccttggatg

SEQ ID NO: 835755 - DNA, 15 bp, Homo sapiens
cagatccttggatga

SEQ ID NO: 835756 - DNA, 15 bp, Homo sapiens
agatccttggatgat

SEQ ID NO: 835757 - DNA, 15 bp, Homo sapiens
gatccttggatgatt

SEQ ID NO: 835758 - DNA, 15 bp, Homo sapiens
atccttggatgatta

SEQ ID NO: 835759 - DNA, 15 bp, Homo sapiens
tccttggatgattag

SEQ ID NO: 835760 - DNA, 15 bp, Homo sapiens
ccttggatgattagt

SEQ ID NO: 835761 - DNA, 15 bp, Homo sapiens
cttggatgattagtc

SEQ ID NO: 835762 - DNA, 15 bp, Homo sapiens
ttggatgattagtca

SEQ ID NO: 835763 - DNA, 15 bp, Homo sapiens
tggatgattagtcag

SEQ ID NO: 835764 - DNA, 15 bp, Homo sapiens
ggatgattagtcagg

SEQ ID NO: 835765 - DNA, 15 bp, Homo sapiens
gatgattagtcagga

SEQ ID NO: 835766 - DNA, 15 bp, Homo sapiens
atgattagtcaggac

SEQ ID NO: 835767 - DNA, 15 bp, Homo sapiens
tgattagtcaggaca

SEQ ID NO: 835768 - DNA, 15 bp, Homo sapiens
gattagtcaggacac

SEQ ID NO: 835769 - DNA, 15 bp, Homo sapiens
attagtcaggacaca

SEQ ID NO: 835770 - DNA, 15 bp, Homo sapiens
ttagtcaggacacag

SEQ ID NO: 835771 - DNA, 15 bp, Homo sapiens
tagtcaggacacagg

SEQ ID NO: 835772 - DNA, 15 bp, Homo sapiens
agtcaggacacaggg

SEQ ID NO: 835773 - DNA, 15 bp, Homo sapiens
gtcaggacacaggga

SEQ ID NO: 835774 - DNA, 15 bp, Homo sapiens
tcaggacacagggaa

SEQ ID NO: 835775 - DNA, 15 bp, Homo sapiens
caggacacagggaat

SEQ ID NO: 835776 - DNA, 15 bp, Homo sapiens
aggacacagggaata

SEQ ID NO: 835777 - DNA, 15 bp, Homo sapiens
ggacacagggaatag

SEQ ID NO: 835778 - DNA, 15 bp, Homo sapiens
gacacagggaataga

SEQ ID NO: 835779 - DNA, 15 bp, Homo sapiens
acacagggaatagag

SEQ ID NO: 835780 - DNA, 15 bp, Homo sapiens
cacagggaatagagt

SEQ ID NO: 835781 - DNA, 15 bp, Homo sapiens
acagggaatagagtg

SEQ ID NO: 835782 - DNA, 15 bp, Homo sapiens
cagggaatagagtga

SEQ ID NO: 835783 - DNA, 15 bp, Homo sapiens
agggaatagagtgac

SEQ ID NO: 835784 - DNA, 15 bp, Homo sapiens
gggaatagagtgact

SEQ ID NO: 835785 - DNA, 15 bp, Homo sapiens
ggaatagagtgactt

SEQ ID NO: 835786 - DNA, 15 bp, Homo sapiens
gaatagagtgacttt

SEQ ID NO: 835787 - DNA, 15 bp, Homo sapiens
aatagagtgactttg

SEQ ID NO: 835788 - DNA, 15 bp, Homo sapiens
atagagtgactttga

SEQ ID NO: 835789 - DNA, 15 bp, Homo sapiens
tagagtgactttgac

SEQ ID NO: 835790 - DNA, 15 bp, Homo sapiens
agagtgactttgaca

SEQ ID NO: 835791 - DNA, 15 bp, Homo sapiens
gagtgactttgacac

SEQ ID NO: 835792 - DNA, 15 bp, Homo sapiens
agtgactttgacaca

SEQ ID NO: 835793 - DNA, 15 bp, Homo sapiens
gtgactttgacacag

SEQ ID NO: 835794 - DNA, 15 bp, Homo sapiens
tgactttgacacagg

SEQ ID NO: 835795 - DNA, 15 bp, Homo sapiens
gactttgacacaggg

SEQ ID NO: 835796 - DNA, 15 bp, Homo sapiens
actttgacacagggc

SEQ ID NO: 835797 - DNA, 15 bp, Homo sapiens
ctttgacacagggca

SEQ ID NO: 835798 - DNA, 15 bp, Homo sapiens
tttgacacagggcat

SEQ ID NO: 835799 - DNA, 15 bp, Homo sapiens
ttgacacagggcatt

SEQ ID NO: 835800 - DNA, 15 bp, Homo sapiens
tgacacagggcattt

SEQ ID NO: 835801 - DNA, 15 bp, Homo sapiens
gacacagggcatttt

SEQ ID NO: 835802 - DNA, 15 bp, Homo sapiens
acacagggcattttg

SEQ ID NO: 835803 - DNA, 15 bp, Homo sapiens
cacagggcattttgt

SEQ ID NO: 835804 - DNA, 15 bp, Homo sapiens
acagggcattttgtt

SEQ ID NO: 835805 - DNA, 15 bp, Homo sapiens
cagggcattttgttg

SEQ ID NO: 835806 - DNA, 15 bp, Homo sapiens
agggcattttgttgt

SEQ ID NO: 835807 - DNA, 15 bp, Homo sapiens
gggcattttgttgtt

SEQ ID NO: 835808 - DNA, 15 bp, Homo sapiens
ggcattttgttgttg

SEQ ID NO: 835809 - DNA, 15 bp, Homo sapiens
gcattttgttgttgt

SEQ ID NO: 835810 - DNA, 15 bp, Homo sapiens
cattttgttgttgtt

SEQ ID NO: 835811 - DNA, 15 bp, Homo sapiens
attttgttgttgttg

SEQ ID NO: 835812 - DNA, 15 bp, Homo sapiens
ttttgttgttgttgt

SEQ ID NO: 835813 - DNA, 15 bp, Homo sapiens
tttgttgttgttgtt

SEQ ID NO: 835814 - DNA, 15 bp, Homo sapiens
ttgttgttgttgttc

SEQ ID NO: 835815 - DNA, 15 bp, Homo sapiens
tgttgttgttgttct

SEQ ID NO: 835816 - DNA, 15 bp, Homo sapiens
gttgttgttgttctt

SEQ ID NO: 835817 - DNA, 15 bp, Homo sapiens
ttgttgttgttcttt

SEQ ID NO: 835818 - DNA, 15 bp, Homo sapiens
tgttgttgttctttc

SEQ ID NO: 835819 - DNA, 15 bp, Homo sapiens
gttgttgttctttca

SEQ ID NO: 835820 - DNA, 15 bp, Homo sapiens
ttgttgttctttcat

SEQ ID NO: 835821 - DNA, 15 bp, Homo sapiens
tgttgttctttcata

SEQ ID NO: 835822 - DNA, 15 bp, Homo sapiens
gttgttctttcatat

SEQ ID NO: 835823 - DNA, 15 bp, Homo sapiens
ttgttctttcatatc

SEQ ID NO: 835824 - DNA, 15 bp, Homo sapiens
tgttctttcatatct

SEQ ID NO: 835825 - DNA, 15 bp, Homo sapiens
gttctttcatatctc

SEQ ID NO: 835826 - DNA, 15 bp, Homo sapiens
ttctttcatatctct

SEQ ID NO: 835827 - DNA, 15 bp, Homo sapiens
tctttcatatctctc

SEQ ID NO: 835828 - DNA, 15 bp, Homo sapiens
ctttcatatctctct

SEQ ID NO: 835829 - DNA, 15 bp, Homo sapiens
tttcatatctctctt

SEQ ID NO: 835830 - DNA, 15 bp, Homo sapiens
ttcatatctctcttc

SEQ ID NO: 835831 - DNA, 15 bp, Homo sapiens
tcatatctctcttct

SEQ ID NO: 835832 - DNA, 15 bp, Homo sapiens
catatctctcttcta

SEQ ID NO: 835833 - DNA, 15 bp, Homo sapiens
atatctctcttctag

SEQ ID NO: 835834 - DNA, 15 bp, Homo sapiens
tatctctcttctaga

SEQ ID NO: 835835 - DNA, 15 bp, Homo sapiens
atctctcttctagag

SEQ ID NO: 835836 - DNA, 15 bp, Homo sapiens
tctctcttctagaga

SEQ ID NO: 835837 - DNA, 15 bp, Homo sapiens
ctctcttctagagaa

SEQ ID NO: 835838 - DNA, 15 bp, Homo sapiens
tctcttctagagaaa

SEQ ID NO: 835839 - DNA, 15 bp, Homo sapiens
ctcttctagagaaag

SEQ ID NO: 835840 - DNA, 15 bp, Homo sapiens
tcttctagagaaaga

SEQ ID NO: 835841 - DNA, 15 bp, Homo sapiens
cttctagagaaagaa

SEQ ID NO: 835842 - DNA, 15 bp, Homo sapiens
ttctagagaaagaag

SEQ ID NO: 835843 - DNA, 15 bp, Homo sapiens
tctagagaaagaaga

SEQ ID NO: 835844 - DNA, 15 bp, Homo sapiens
ctagagaaagaagaa

SEQ ID NO: 835845 - DNA, 15 bp, Homo sapiens
tagagaaagaagaaa

SEQ ID NO: 835846 - DNA, 15 bp, Homo sapiens
agagaaagaagaaaa

SEQ ID NO: 835847 - DNA, 15 bp, Homo sapiens
gagaaagaagaaaac

SEQ ID NO: 835848 - DNA, 15 bp, Homo sapiens
agaaagaagaaaacg

SEQ ID NO: 835849 - DNA, 15 bp, Homo sapiens
gaaagaagaaaacgt

SEQ ID NO: 835850 - DNA, 15 bp, Homo sapiens
aaagaagaaaacgtc

SEQ ID NO: 835851 - DNA, 15 bp, Homo sapiens
aagaagaaaacgtcc

SEQ ID NO: 835852 - DNA, 15 bp, Homo sapiens
agaagaaaacgtcca

SEQ ID NO: 835853 - DNA, 15 bp, Homo sapiens
gaagaaaacgtccac

SEQ ID NO: 835854 - DNA, 15 bp, Homo sapiens
aagaaaacgtccact

SEQ ID NO: 835855 - DNA, 15 bp, Homo sapiens
agaaaacgtccactc

SEQ ID NO: 835856 - DNA, 15 bp, Homo sapiens
gaaaacgtccactca

SEQ ID NO: 835857 - DNA, 15 bp, Homo sapiens
aaaacgtccactcat

SEQ ID NO: 835858 - DNA, 15 bp, Homo sapiens
aaacgtccactcatc

SEQ ID NO: 835859 - DNA, 15 bp, Homo sapiens
aacgtccactcatca

SEQ ID NO: 835860 - DNA, 15 bp, Homo sapiens
acgtccactcatcat

SEQ ID NO: 835861 - DNA, 15 bp, Homo sapiens
cgtccactcatcatt

SEQ ID NO: 835862 - DNA, 15 bp, Homo sapiens
gtccactcatcattg

SEQ ID NO: 835863 - DNA, 15 bp, Homo sapiens
tccactcatcattgt

SEQ ID NO: 835864 - DNA, 15 bp, Homo sapiens
ccactcatcattgtt

SEQ ID NO: 835865 - DNA, 15 bp, Homo sapiens
cactcatcattgttt

SEQ ID NO: 835866 - DNA, 15 bp, Homo sapiens
actcatcattgtttg

SEQ ID NO: 835867 - DNA, 15 bp, Homo sapiens
ctcatcattgtttgt

SEQ ID NO: 835868 - DNA, 15 bp, Homo sapiens
tcatcattgtttgtc

SEQ ID NO: 835869 - DNA, 15 bp, Homo sapiens
catcattgtttgtct

SEQ ID NO: 835870 - DNA, 15 bp, Homo sapiens
atcattgtttgtctt

SEQ ID NO: 835871 - DNA, 15 bp, Homo sapiens
tcattgtttgtcttt

SEQ ID NO: 835872 - DNA, 15 bp, Homo sapiens
cattgtttgtctttc

SEQ ID NO: 835873 - DNA, 15 bp, Homo sapiens
attgtttgtctttca

SEQ ID NO: 835874 - DNA, 15 bp, Homo sapiens
ttgtttgtctttcat

SEQ ID NO: 835875 - DNA, 15 bp, Homo sapiens
tgtttgtctttcatt

SEQ ID NO: 835876 - DNA, 15 bp, Homo sapiens
gtttgtctttcattc

SEQ ID NO: 835877 - DNA, 15 bp, Homo sapiens
tttgtctttcattcc

SEQ ID NO: 835878 - DNA, 15 bp, Homo sapiens
ttgtctttcattcct

SEQ ID NO: 835879 - DNA, 15 bp, Homo sapiens
tgtctttcattcctt

SEQ ID NO: 835880 - DNA, 15 bp, Homo sapiens
gtctttcattccttg

SEQ ID NO: 835881 - DNA, 15 bp, Homo sapiens
tctttcattccttgt

SEQ ID NO: 835882 - DNA, 15 bp, Homo sapiens
ctttcattccttgta

SEQ ID NO: 835883 - DNA, 15 bp, Homo sapiens
tttcattccttgtag

SEQ ID NO: 835884 - DNA, 15 bp, Homo sapiens
ttcattccttgtaga

SEQ ID NO: 835885 - DNA, 15 bp, Homo sapiens
tcattccttgtagaa

SEQ ID NO: 835886 - DNA, 15 bp, Homo sapiens
cattccttgtagaat

SEQ ID NO: 835887 - DNA, 15 bp, Homo sapiens
attccttgtagaatt

SEQ ID NO: 835888 - DNA, 15 bp, Homo sapiens
ttccttgtagaattg

SEQ ID NO: 835889 - DNA, 15 bp, Homo sapiens
tccttgtagaattgc

SEQ ID NO: 835890 - DNA, 15 bp, Homo sapiens
ccttgtagaattgca

SEQ ID NO: 835891 - DNA, 15 bp, Homo sapiens
cttgtagaattgcaa

SEQ ID NO: 835892 - DNA, 15 bp, Homo sapiens
ttgtagaattgcaaa

SEQ ID NO: 835893 - DNA, 15 bp, Homo sapiens
tgtagaattgcaaat

SEQ ID NO: 835894 - DNA, 15 bp, Homo sapiens
gtagaattgcaaatg

SEQ ID NO: 835895 - DNA, 15 bp, Homo sapiens
tagaattgcaaatgg

SEQ ID NO: 835896 - DNA, 15 bp, Homo sapiens
agaattgcaaatgga

SEQ ID NO: 835897 - DNA, 15 bp, Homo sapiens
gaattgcaaatggac

SEQ ID NO: 835898 - DNA, 15 bp, Homo sapiens
aattgcaaatggaca

SEQ ID NO: 835899 - DNA, 15 bp, Homo sapiens
attgcaaatggacat

SEQ ID NO: 835900 - DNA, 15 bp, Homo sapiens
ttgcaaatggacatt

SEQ ID NO: 835901 - DNA, 15 bp, Homo sapiens
tgcaaatggacattc

SEQ ID NO: 835902 - DNA, 15 bp, Homo sapiens
gcaaatggacattct

SEQ ID NO: 835903 - DNA, 15 bp, Homo sapiens
caaatggacattctt

SEQ ID NO: 835904 - DNA, 15 bp, Homo sapiens
aaatggacattcttc

SEQ ID NO: 835905 - DNA, 15 bp, Homo sapiens
aatggacattcttca

SEQ ID NO: 835906 - DNA, 15 bp, Homo sapiens
atggacattcttcac

SEQ ID NO: 835907 - DNA, 15 bp, Homo sapiens
tggacattcttcacc

SEQ ID NO: 835908 - DNA, 15 bp, Homo sapiens
ggacattcttcacct

SEQ ID NO: 835909 - DNA, 15 bp, Homo sapiens
gacattcttcacctt

SEQ ID NO: 835910 - DNA, 15 bp, Homo sapiens
acattcttcaccttg

SEQ ID NO: 835911 - DNA, 15 bp, Homo sapiens
cattcttcaccttgc

SEQ ID NO: 835912 - DNA, 15 bp, Homo sapiens
attcttcaccttgct

SEQ ID NO: 835913 - DNA, 15 bp, Homo sapiens
ttcttcaccttgctt

SEQ ID NO: 835914 - DNA, 15 bp, Homo sapiens
tcttcaccttgcttc

SEQ ID NO: 835915 - DNA, 15 bp, Homo sapiens
cttcaccttgcttca

SEQ ID NO: 835916 - DNA, 15 bp, Homo sapiens
ttcaccttgcttcac

SEQ ID NO: 835917 - DNA, 15 bp, Homo sapiens
tcaccttgcttcaca

SEQ ID NO: 835918 - DNA, 15 bp, Homo sapiens
caccttgcttcacag

SEQ ID NO: 835919 - DNA, 15 bp, Homo sapiens
accttgcttcacagt

SEQ ID NO: 835920 - DNA, 15 bp, Homo sapiens
ccttgcttcacagtt

SEQ ID NO: 835921 - DNA, 15 bp, Homo sapiens
cttgcttcacagttt

SEQ ID NO: 835922 - DNA, 15 bp, Homo sapiens
ttgcttcacagtttt

SEQ ID NO: 835923 - DNA, 15 bp, Homo sapiens
tgcttcacagttttg

SEQ ID NO: 835924 - DNA, 15 bp, Homo sapiens
gcttcacagttttgc

SEQ ID NO: 835925 - DNA, 15 bp, Homo sapiens
cttcacagttttgct

SEQ ID NO: 835926 - DNA, 15 bp, Homo sapiens
ttcacagttttgctg

SEQ ID NO: 835927 - DNA, 15 bp, Homo sapiens
tcacagttttgctgt

SEQ ID NO: 835928 - DNA, 15 bp, Homo sapiens
cacagttttgctgtg

SEQ ID NO: 835929 - DNA, 15 bp, Homo sapiens
acagttttgctgtgt

SEQ ID NO: 835930 - DNA, 15 bp, Homo sapiens
cagttttgctgtgtt

SEQ ID NO: 835931 - DNA, 15 bp, Homo sapiens
agttttgctgtgttt

SEQ ID NO: 835932 - DNA, 15 bp, Homo sapiens
gttttgctgtgtttc

SEQ ID NO: 835933 - DNA, 15 bp, Homo sapiens
ttttgctgtgtttcc

SEQ ID NO: 835934 - DNA, 15 bp, Homo sapiens
tttgctgtgtttcct

SEQ ID NO: 835935 - DNA, 15 bp, Homo sapiens
ttgctgtgtttcctg

SEQ ID NO: 835936 - DNA, 15 bp, Homo sapiens
tgctgtgtttcctga

SEQ ID NO: 835937 - DNA, 15 bp, Homo sapiens
gctgtgtttcctgag

SEQ ID NO: 835938 - DNA, 15 bp, Homo sapiens
ctgtgtttcctgaga

SEQ ID NO: 835939 - DNA, 15 bp, Homo sapiens
tgtgtttcctgagat

SEQ ID NO: 835940 - DNA, 15 bp, Homo sapiens
gtgtttcctgagatg

SEQ ID NO: 835941 - DNA, 15 bp, Homo sapiens
tgtttcctgagatgt

SEQ ID NO: 835942 - DNA, 15 bp, Homo sapiens
gtttcctgagatgtt

SEQ ID NO: 835943 - DNA, 15 bp, Homo sapiens
tttcctgagatgttt

SEQ ID NO: 835944 - DNA, 15 bp, Homo sapiens
ttcctgagatgtttc

SEQ ID NO: 835945 - DNA, 15 bp, Homo sapiens
tcctgagatgtttcc

SEQ ID NO: 835946 - DNA, 15 bp, Homo sapiens
cctgagatgtttcct

SEQ ID NO: 835947 - DNA, 15 bp, Homo sapiens
ctgagatgtttccta

SEQ ID NO: 835948 - DNA, 15 bp, Homo sapiens
tgagatgtttcctac

SEQ ID NO: 835949 - DNA, 15 bp, Homo sapiens
gagatgtttcctact

SEQ ID NO: 835950 - DNA, 15 bp, Homo sapiens
agatgtttcctactc

SEQ ID NO: 835951 - DNA, 15 bp, Homo sapiens
gatgtttcctactct

SEQ ID NO: 835952 - DNA, 15 bp, Homo sapiens
atgtttcctactctt

SEQ ID NO: 835953 - DNA, 15 bp, Homo sapiens
tgtttcctactcttt

SEQ ID NO: 835954 - DNA, 15 bp, Homo sapiens
gtttcctactctttc

SEQ ID NO: 835955 - DNA, 15 bp, Homo sapiens
tttcctactctttca

SEQ ID NO: 835956 - DNA, 15 bp, Homo sapiens
ttcctactctttcaa

SEQ ID NO: 835957 - DNA, 15 bp, Homo sapiens
tcctactctttcaat

SEQ ID NO: 835958 - DNA, 15 bp, Homo sapiens
cctactctttcaata

SEQ ID NO: 835959 - DNA, 15 bp, Homo sapiens
ctactctttcaatac

SEQ ID NO: 835960 - DNA, 15 bp, Homo sapiens
tactctttcaataca

SEQ ID NO: 835961 - DNA, 15 bp, Homo sapiens
actctttcaatacat

SEQ ID NO: 835962 - DNA, 15 bp, Homo sapiens
ctctttcaatacatt

SEQ ID NO: 835963 - DNA, 15 bp, Homo sapiens
tctttcaatacattt

SEQ ID NO: 835964 - DNA, 15 bp, Homo sapiens
ctttcaatacatttt

SEQ ID NO: 835965 - DNA, 15 bp, Homo sapiens
tttcaatacattttc

SEQ ID NO: 835966 - DNA, 15 bp, Homo sapiens
ttcaatacattttct

SEQ ID NO: 835967 - DNA, 15 bp, Homo sapiens
tcaatacattttctt

SEQ ID NO: 835968 - DNA, 15 bp, Homo sapiens
caatacattttcttc

SEQ ID NO: 835969 - DNA, 15 bp, Homo sapiens
aatacattttcttcc

SEQ ID NO: 835970 - DNA, 15 bp, Homo sapiens
atacattttcttcct

SEQ ID NO: 835971 - DNA, 15 bp, Homo sapiens
tacattttcttcctc

SEQ ID NO: 835972 - DNA, 15 bp, Homo sapiens
acattttcttcctct

SEQ ID NO: 835973 - DNA, 15 bp, Homo sapiens
cattttcttcctctt

SEQ ID NO: 835974 - DNA, 15 bp, Homo sapiens
attttcttcctcttc

SEQ ID NO: 835975 - DNA, 15 bp, Homo sapiens
ttttcttcctcttcc

SEQ ID NO: 835976 - DNA, 15 bp, Homo sapiens
tttcttcctcttccc

SEQ ID NO: 835977 - DNA, 15 bp, Homo sapiens
ttcttcctcttccct

SEQ ID NO: 835978 - DNA, 15 bp, Homo sapiens
tcttcctcttccctt

SEQ ID NO: 835979 - DNA, 15 bp, Homo sapiens
cttcctcttcccttt

SEQ ID NO: 835980 - DNA, 15 bp, Homo sapiens
ttcctcttccctttc

SEQ ID NO: 835981 - DNA, 15 bp, Homo sapiens
tcctcttccctttca

SEQ ID NO: 835982 - DNA, 15 bp, Homo sapiens
cctcttccctttcaa

SEQ ID NO: 835983 - DNA, 15 bp, Homo sapiens
ctcttccctttcaac

SEQ ID NO: 835984 - DNA, 15 bp, Homo sapiens
tcttccctttcaaca

SEQ ID NO: 835985 - DNA, 15 bp, Homo sapiens
cttccctttcaacat

SEQ ID NO: 835986 - DNA, 15 bp, Homo sapiens
ttccctttcaacatt

SEQ ID NO: 835987 - DNA, 15 bp, Homo sapiens
tccctttcaacattt

SEQ ID NO: 835988 - DNA, 15 bp, Homo sapiens
ccctttcaacatttt

SEQ ID NO: 835989 - DNA, 15 bp, Homo sapiens
cctttcaacattttt

SEQ ID NO: 835990 - DNA, 15 bp, Homo sapiens
ctttcaacatttttt

SEQ ID NO: 835991 - DNA, 15 bp, Homo sapiens
tttcaacattttttt

SEQ ID NO: 835992 - DNA, 15 bp, Homo sapiens
ttcaacatttttttt

SEQ ID NO: 835993 - DNA, 15 bp, Homo sapiens
tcaacattttttttc

SEQ ID NO: 835994 - DNA, 15 bp, Homo sapiens
caacattttttttct

SEQ ID NO: 835995 - DNA, 15 bp, Homo sapiens
aacattttttttctg

SEQ ID NO: 835996 - DNA, 15 bp, Homo sapiens
acattttttttctgc

SEQ ID NO: 835997 - DNA, 15 bp, Homo sapiens
cattttttttctgcc

SEQ ID NO: 835998 - DNA, 15 bp, Homo sapiens
attttttttctgcct

SEQ ID NO: 835999 - DNA, 15 bp, Homo sapiens
ttttttttctgcctt

SEQ ID NO: 836000 - DNA, 15 bp, Homo sapiens
tttttttctgccttt

SEQ ID NO: 836001 - DNA, 15 bp, Homo sapiens
ttttttctgcctttc

SEQ ID NO: 836002 - DNA, 15 bp, Homo sapiens
tttttctgcctttct

SEQ ID NO: 836003 - DNA, 15 bp, Homo sapiens
ttttctgcctttctt

SEQ ID NO: 836004 - DNA, 15 bp, Homo sapiens
tttctgcctttcttg

SEQ ID NO: 836005 - DNA, 15 bp, Homo sapiens
ttctgcctttcttgg

SEQ ID NO: 836006 - DNA, 15 bp, Homo sapiens
tctgcctttcttggc

SEQ ID NO: 836007 - DNA, 15 bp, Homo sapiens
ctgcctttcttggca

SEQ ID NO: 836008 - DNA, 15 bp, Homo sapiens
tgcctttcttggcac

SEQ ID NO: 836009 - DNA, 15 bp, Homo sapiens
gcctttcttggcact

SEQ ID NO: 836010 - DNA, 15 bp, Homo sapiens
cctttcttggcactt

SEQ ID NO: 836011 - DNA, 15 bp, Homo sapiens
ctttcttggcacttt

SEQ ID NO: 836012 - DNA, 15 bp, Homo sapiens
tttcttggcactttt

SEQ ID NO: 836013 - DNA, 15 bp, Homo sapiens
ttcttggcacttttt

SEQ ID NO: 836014 - DNA, 15 bp, Homo sapiens
tcttggcactttttg

SEQ ID NO: 836015 - DNA, 15 bp, Homo sapiens
cttggcactttttgc

SEQ ID NO: 836016 - DNA, 15 bp, Homo sapiens
ttggcactttttgct

SEQ ID NO: 836017 - DNA, 15 bp, Homo sapiens
tggcactttttgctg

SEQ ID NO: 836018 - DNA, 15 bp, Homo sapiens
ggcactttttgctgc

SEQ ID NO: 836019 - DNA, 15 bp, Homo sapiens
gcactttttgctgca

SEQ ID NO: 836020 - DNA, 15 bp, Homo sapiens
cactttttgctgcac

SEQ ID NO: 836021 - DNA, 15 bp, Homo sapiens
actttttgctgcact

SEQ ID NO: 836022 - DNA, 15 bp, Homo sapiens
ctttttgctgcactc

SEQ ID NO: 836023 - DNA, 15 bp, Homo sapiens
tttttgctgcactca

SEQ ID NO: 836024 - DNA, 15 bp, Homo sapiens
ttttgctgcactcat

SEQ ID NO: 836025 - DNA, 15 bp, Homo sapiens
tttgctgcactcatc

SEQ ID NO: 836026 - DNA, 15 bp, Homo sapiens
ttgctgcactcatcc

SEQ ID NO: 836027 - DNA, 15 bp, Homo sapiens
tgctgcactcatcct

SEQ ID NO: 836028 - DNA, 15 bp, Homo sapiens
gctgcactcatccta

SEQ ID NO: 836029 - DNA, 15 bp, Homo sapiens
ctgcactcatcctag

SEQ ID NO: 836030 - DNA, 15 bp, Homo sapiens
tgcactcatcctaga

SEQ ID NO: 836031 - DNA, 15 bp, Homo sapiens
gcactcatcctagat

SEQ ID NO: 836032 - DNA, 15 bp, Homo sapiens
cactcatcctagatg

SEQ ID NO: 836033 - DNA, 15 bp, Homo sapiens
actcatcctagatgc

SEQ ID NO: 836034 - DNA, 15 bp, Homo sapiens
ctcatcctagatgct

SEQ ID NO: 836035 - DNA, 15 bp, Homo sapiens
tcatcctagatgctt

SEQ ID NO: 836036 - DNA, 15 bp, Homo sapiens
catcctagatgctta

SEQ ID NO: 836037 - DNA, 15 bp, Homo sapiens
atcctagatgcttag

SEQ ID NO: 836038 - DNA, 15 bp, Homo sapiens
tcctagatgcttaga

SEQ ID NO: 836039 - DNA, 15 bp, Homo sapiens
cctagatgcttagag

SEQ ID NO: 836040 - DNA, 15 bp, Homo sapiens
ctagatgcttagaga

SEQ ID NO: 836041 - DNA, 15 bp, Homo sapiens
tagatgcttagagat

SEQ ID NO: 836042 - DNA, 15 bp, Homo sapiens
agatgcttagagatc

SEQ ID NO: 836043 - DNA, 15 bp, Homo sapiens
gatgcttagagatct

SEQ ID NO: 836044 - DNA, 15 bp, Homo sapiens
atgcttagagatctc

SEQ ID NO: 836045 - DNA, 15 bp, Homo sapiens
tgcttagagatctcc

SEQ ID NO: 836046 - DNA, 15 bp, Homo sapiens
gcttagagatctcca

SEQ ID NO: 836047 - DNA, 15 bp, Homo sapiens
cttagagatctccat

SEQ ID NO: 836048 - DNA, 15 bp, Homo sapiens
ttagagatctccatg

SEQ ID NO: 836049 - DNA, 15 bp, Homo sapiens
tagagatctccatgc

SEQ ID NO: 836050 - DNA, 15 bp, Homo sapiens
agagatctccatgca

SEQ ID NO: 836051 - DNA, 15 bp, Homo sapiens
gagatctccatgcat

SEQ ID NO: 836052 - DNA, 15 bp, Homo sapiens
agatctccatgcatt

SEQ ID NO: 836053 - DNA, 15 bp, Homo sapiens
gatctccatgcatta

SEQ ID NO: 836054 - DNA, 15 bp, Homo sapiens
atctccatgcattac

SEQ ID NO: 836055 - DNA, 15 bp, Homo sapiens
tctccatgcattaca

SEQ ID NO: 836056 - DNA, 15 bp, Homo sapiens
ctccatgcattacaa

SEQ ID NO: 836057 - DNA, 15 bp, Homo sapiens
tccatgcattacaat

SEQ ID NO: 836058 - DNA, 15 bp, Homo sapiens
ccatgcattacaatt

SEQ ID NO: 836059 - DNA, 15 bp, Homo sapiens
catgcattacaattt

SEQ ID NO: 836060 - DNA, 15 bp, Homo sapiens
atgcattacaatttg

SEQ ID NO: 836061 - DNA, 15 bp, Homo sapiens
tgcattacaatttgc

SEQ ID NO: 836062 - DNA, 15 bp, Homo sapiens
gcattacaatttgct

SEQ ID NO: 836063 - DNA, 15 bp, Homo sapiens
cattacaatttgctt

SEQ ID NO: 836064 - DNA, 15 bp, Homo sapiens
attacaatttgcttt

SEQ ID NO: 836065 - DNA, 15 bp, Homo sapiens
ttacaatttgctttc

SEQ ID NO: 836066 - DNA, 15 bp, Homo sapiens
tacaatttgctttca

SEQ ID NO: 836067 - DNA, 15 bp, Homo sapiens
acaatttgctttcag

SEQ ID NO: 836068 - DNA, 15 bp, Homo sapiens
caatttgctttcagg

SEQ ID NO: 836069 - DNA, 15 bp, Homo sapiens
aatttgctttcagga

SEQ ID NO: 836070 - DNA, 15 bp, Homo sapiens
atttgctttcaggaa

SEQ ID NO: 836071 - DNA, 15 bp, Homo sapiens
tttgctttcaggaaa

SEQ ID NO: 836072 - DNA, 15 bp, Homo sapiens
tgtgcctgtaaagtc

SEQ ID NO: 836073 - DNA, 15 bp, Homo sapiens
gtgcctgtaaagtca

SEQ ID NO: 836074 - DNA, 15 bp, Homo sapiens
tgcctgtaaagtcat

SEQ ID NO: 836075 - DNA, 15 bp, Homo sapiens
gcctgtaaagtcatg

SEQ ID NO: 836076 - DNA, 15 bp, Homo sapiens
cctgtaaagtcatgt

SEQ ID NO: 836077 - DNA, 15 bp, Homo sapiens
ctgtaaagtcatgtc

SEQ ID NO: 836078 - DNA, 15 bp, Homo sapiens
tgtaaagtcatgtca

SEQ ID NO: 836079 - DNA, 15 bp, Homo sapiens
gtaaagtcatgtcac

SEQ ID NO: 836080 - DNA, 15 bp, Homo sapiens
taaagtcatgtcact

SEQ ID NO: 836081 - DNA, 15 bp, Homo sapiens
aaagtcatgtcacta

SEQ ID NO: 836082 - DNA, 15 bp, Homo sapiens
aagtcatgtcactat

SEQ ID NO: 836083 - DNA, 15 bp, Homo sapiens
agtcatgtcactatg

SEQ ID NO: 836084 - DNA, 15 bp, Homo sapiens
gtcatgtcactatga

SEQ ID NO: 836085 - DNA, 15 bp, Homo sapiens
tcatgtcactatgaa

SEQ ID NO: 836086 - DNA, 15 bp, Homo sapiens
catgtcactatgaac

SEQ ID NO: 836087 - DNA, 15 bp, Homo sapiens
attccaagagatagc

SEQ ID NO: 836088 - DNA, 15 bp, Homo sapiens
ttccaagagatagct

SEQ ID NO: 836089 - DNA, 15 bp, Homo sapiens
tccaagagatagctg

SEQ ID NO: 836090 - DNA, 15 bp, Homo sapiens
ccaagagatagctga

SEQ ID NO: 836091 - DNA, 15 bp, Homo sapiens
caagagatagctgat

SEQ ID NO: 836092 - DNA, 15 bp, Homo sapiens
aagagatagctgatt

SEQ ID NO: 836093 - DNA, 15 bp, Homo sapiens
agagatagctgattt

SEQ ID NO: 836094 - DNA, 15 bp, Homo sapiens
gagatagctgatttc

SEQ ID NO: 836095 - DNA, 15 bp, Homo sapiens
agatagctgatttca

SEQ ID NO: 836096 - DNA, 15 bp, Homo sapiens
gatagctgatttcat

SEQ ID NO: 836097 - DNA, 15 bp, Homo sapiens
atagctgatttcata

SEQ ID NO: 836098 - DNA, 15 bp, Homo sapiens
tagctgatttcataa

SEQ ID NO: 836099 - DNA, 15 bp, Homo sapiens
agctgatttcataat

SEQ ID NO: 836100 - DNA, 15 bp, Homo sapiens
gctgatttcataatt

SEQ ID NO: 836101 - DNA, 15 bp, Homo sapiens
ctgatttcataattg

SEQ ID NO: 836102 - DNA, 15 bp, Homo sapiens
aatcccctatgatcc

SEQ ID NO: 836103 - DNA, 15 bp, Homo sapiens
atcccctatgatcca

SEQ ID NO: 836104 - DNA, 15 bp, Homo sapiens
tcccctatgatccag

SEQ ID NO: 836105 - DNA, 15 bp, Homo sapiens
cccctatgatccagt

SEQ ID NO: 836106 - DNA, 15 bp, Homo sapiens
ccctatgatccagta

SEQ ID NO: 836107 - DNA, 15 bp, Homo sapiens
cctatgatccagtaa

SEQ ID NO: 836108 - DNA, 15 bp, Homo sapiens
ctatgatccagtaat

SEQ ID NO: 836109 - DNA, 15 bp, Homo sapiens
tatgatccagtaata

SEQ ID NO: 836110 - DNA, 15 bp, Homo sapiens
atgatccagtaatag

SEQ ID NO: 836111 - DNA, 15 bp, Homo sapiens
tgatccagtaatagt

SEQ ID NO: 836112 - DNA, 15 bp, Homo sapiens
gatccagtaatagta

SEQ ID NO: 836113 - DNA, 15 bp, Homo sapiens
atccagtaatagtaa

SEQ ID NO: 836114 - DNA, 15 bp, Homo sapiens
tccagtaatagtaat

SEQ ID NO: 836115 - DNA, 15 bp, Homo sapiens
ccagtaatagtaata

SEQ ID NO: 836116 - DNA, 15 bp, Homo sapiens
cagtaatagtaatat

SEQ ID NO: 836117 - DNA, 15 bp, Homo sapiens
agtaatagtaatatt

SEQ ID NO: 836118 - DNA, 15 bp, Homo sapiens
gtaatagtaatattc

SEQ ID NO: 836119 - DNA, 15 bp, Homo sapiens
taatagtaatattct

SEQ ID NO: 836120 - DNA, 15 bp, Homo sapiens
aatagtaatattcta

SEQ ID NO: 836121 - DNA, 15 bp, Homo sapiens
atagtaatattctag

SEQ ID NO: 836122 - DNA, 15 bp, Homo sapiens
tagtaatattctagg

SEQ ID NO: 836123 - DNA, 15 bp, Homo sapiens
agtaatattctaggg

SEQ ID NO: 836124 - DNA, 15 bp, Homo sapiens
gtaatattctagggc

SEQ ID NO: 836125 - DNA, 15 bp, Homo sapiens
taatattctagggcc

SEQ ID NO: 836126 - DNA, 15 bp, Homo sapiens
aatattctagggcct

SEQ ID NO: 836127 - DNA, 15 bp, Homo sapiens
atattctagggccta

SEQ ID NO: 836128 - DNA, 15 bp, Homo sapiens
tattctagggcctag

SEQ ID NO: 836129 - DNA, 15 bp, Homo sapiens
attctagggcctaga

SEQ ID NO: 836130 - DNA, 15 bp, Homo sapiens
ctagggcctagaggg

SEQ ID NO: 836131 - DNA, 15 bp, Homo sapiens
tagggcctagaggga

SEQ ID NO: 836132 - DNA, 15 bp, Homo sapiens
agggcctagagggat

SEQ ID NO: 836133 - DNA, 15 bp, Homo sapiens
gggcctagagggatg

SEQ ID NO: 836134 - DNA, 15 bp, Homo sapiens
ggcctagagggatgt

SEQ ID NO: 836135 - DNA, 15 bp, Homo sapiens
gcctagagggatgta

SEQ ID NO: 836136 - DNA, 15 bp, Homo sapiens
cctagagggatgtag

SEQ ID NO: 836137 - DNA, 15 bp, Homo sapiens
ctagagggatgtagg

SEQ ID NO: 836138 - DNA, 15 bp, Homo sapiens
tagagggatgtaggg

SEQ ID NO: 836139 - DNA, 15 bp, Homo sapiens
agagggatgtaggga

SEQ ID NO: 836140 - DNA, 15 bp, Homo sapiens
gagggatgtagggaa

SEQ ID NO: 836141 - DNA, 15 bp, Homo sapiens
agggatgtagggaag

SEQ ID NO: 836142 - DNA, 15 bp, Homo sapiens
gggatgtagggaagc

SEQ ID NO: 836143 - DNA, 15 bp, Homo sapiens
ggatgtagggaagct

SEQ ID NO: 836144 - DNA, 15 bp, Homo sapiens
gatgtagggaagctg

SEQ ID NO: 836145 - DNA, 15 bp, Homo sapiens
atgtagggaagctgc

SEQ ID NO: 836146 - DNA, 15 bp, Homo sapiens
tgtagggaagctgcc

SEQ ID NO: 836147 - DNA, 15 bp, Homo sapiens
gtagggaagctgcct

SEQ ID NO: 836148 - DNA, 15 bp, Homo sapiens
tagggaagctgccta

SEQ ID NO: 836149 - DNA, 15 bp, Homo sapiens
agggaagctgcctac

SEQ ID NO: 836150 - DNA, 15 bp, Homo sapiens
gggaagctgcctact

SEQ ID NO: 836151 - DNA, 15 bp, Homo sapiens
ggaagctgcctactt

SEQ ID NO: 836152 - DNA, 15 bp, Homo sapiens
gaagctgcctacttt

SEQ ID NO: 836153 - DNA, 15 bp, Homo sapiens
aagctgcctactttc

SEQ ID NO: 836154 - DNA, 15 bp, Homo sapiens
agctgcctactttct

SEQ ID NO: 836155 - DNA, 15 bp, Homo sapiens
gctgcctactttctc

SEQ ID NO: 836156 - DNA, 15 bp, Homo sapiens
ctgcctactttctct

SEQ ID NO: 836157 - DNA, 15 bp, Homo sapiens
tgcctactttctctc

SEQ ID NO: 836158 - DNA, 15 bp, Homo sapiens
gcctactttctctcc

SEQ ID NO: 836159 - DNA, 15 bp, Homo sapiens
cctactttctctcca

SEQ ID NO: 836160 - DNA, 15 bp, Homo sapiens
ctactttctctccat

SEQ ID NO: 836161 - DNA, 15 bp, Homo sapiens
tactttctctccatg

SEQ ID NO: 836162 - DNA, 15 bp, Homo sapiens
actttctctccatgt

SEQ ID NO: 836163 - DNA, 15 bp, Homo sapiens
ctttctctccatgta

SEQ ID NO: 836164 - DNA, 15 bp, Homo sapiens
tttctctccatgtaa

SEQ ID NO: 836165 - DNA, 15 bp, Homo sapiens
ttctctccatgtaaa

SEQ ID NO: 836166 - DNA, 15 bp, Homo sapiens
tctctccatgtaaaa

SEQ ID NO: 836167 - DNA, 15 bp, Homo sapiens
ctctccatgtaaaac

SEQ ID NO: 836168 - DNA, 15 bp, Homo sapiens
tctccatgtaaaact

SEQ ID NO: 836169 - DNA, 15 bp, Homo sapiens
ctccatgtaaaactg

SEQ ID NO: 836170 - DNA, 15 bp, Homo sapiens
tccatgtaaaactgg

SEQ ID NO: 836171 - DNA, 15 bp, Homo sapiens
ccatgtaaaactggc

SEQ ID NO: 836172 - DNA, 15 bp, Homo sapiens
catgtaaaactggcc

SEQ ID NO: 836173 - DNA, 15 bp, Homo sapiens
atgtaaaactggccc

SEQ ID NO: 836174 - DNA, 15 bp, Homo sapiens
tgtaaaactggccct

SEQ ID NO: 836175 - DNA, 15 bp, Homo sapiens
gtaaaactggccctg

SEQ ID NO: 836176 - DNA, 15 bp, Homo sapiens
taaaactggccctga

SEQ ID NO: 836177 - DNA, 15 bp, Homo sapiens
aaaactggccctgag

SEQ ID NO: 836178 - DNA, 15 bp, Homo sapiens
aaactggccctgagt

SEQ ID NO: 836179 - DNA, 15 bp, Homo sapiens
aactggccctgagtt

SEQ ID NO: 836180 - DNA, 15 bp, Homo sapiens
actggccctgagttt

SEQ ID NO: 836181 - DNA, 15 bp, Homo sapiens
ctggccctgagtttg

SEQ ID NO: 836182 - DNA, 15 bp, Homo sapiens
tggccctgagtttgt

SEQ ID NO: 836183 - DNA, 15 bp, Homo sapiens
ggccctgagtttgtc

SEQ ID NO: 836184 - DNA, 15 bp, Homo sapiens
gccctgagtttgtca

SEQ ID NO: 836185 - DNA, 15 bp, Homo sapiens
ccctgagtttgtcat

SEQ ID NO: 836186 - DNA, 15 bp, Homo sapiens
cctgagtttgtcatc

SEQ ID NO: 836187 - DNA, 15 bp, Homo sapiens
ctgagtttgtcatca

SEQ ID NO: 836188 - DNA, 15 bp, Homo sapiens
tgagtttgtcatcat

SEQ ID NO: 836189 - DNA, 15 bp, Homo sapiens
gagtttgtcatcatc

SEQ ID NO: 836190 - DNA, 15 bp, Homo sapiens
agtttgtcatcatca

SEQ ID NO: 836191 - DNA, 15 bp, Homo sapiens
gtttgtcatcatcat

SEQ ID NO: 836192 - DNA, 15 bp, Homo sapiens
tttgtcatcatcata

SEQ ID NO: 836193 - DNA, 15 bp, Homo sapiens
ttgtcatcatcataa

SEQ ID NO: 836194 - DNA, 15 bp, Homo sapiens
tgtcatcatcataat

SEQ ID NO: 836195 - DNA, 15 bp, Homo sapiens
gtcatcatcataatt

SEQ ID NO: 836196 - DNA, 15 bp, Homo sapiens
tcatcatcataattg

SEQ ID NO: 836197 - DNA, 15 bp, Homo sapiens
catcatcataattgt

SEQ ID NO: 836198 - DNA, 15 bp, Homo sapiens
atcatcataattgta

SEQ ID NO: 836199 - DNA, 15 bp, Homo sapiens
tcatcataattgtag

SEQ ID NO: 836200 - DNA, 15 bp, Homo sapiens
catcataattgtaga

SEQ ID NO: 836201 - DNA, 15 bp, Homo sapiens
atcataattgtagac

SEQ ID NO: 836202 - DNA, 15 bp, Homo sapiens
tcataattgtagaca

SEQ ID NO: 836203 - DNA, 15 bp, Homo sapiens
cataattgtagacat

SEQ ID NO: 836204 - DNA, 15 bp, Homo sapiens
ataattgtagacatg

SEQ ID NO: 836205 - DNA, 15 bp, Homo sapiens
taattgtagacatgt

SEQ ID NO: 836206 - DNA, 15 bp, Homo sapiens
aattgtagacatgtg

SEQ ID NO: 836207 - DNA, 15 bp, Homo sapiens
attgtagacatgtgt

SEQ ID NO: 836208 - DNA, 15 bp, Homo sapiens
ttgtagacatgtgtg

SEQ ID NO: 836209 - DNA, 15 bp, Homo sapiens
tgtagacatgtgtgt

SEQ ID NO: 836210 - DNA, 15 bp, Homo sapiens
gtagacatgtgtgtc

SEQ ID NO: 836211 - DNA, 15 bp, Homo sapiens
tagacatgtgtgtca

SEQ ID NO: 836212 - DNA, 15 bp, Homo sapiens
agacatgtgtgtcat

SEQ ID NO: 836213 - DNA, 15 bp, Homo sapiens
gacatgtgtgtcata

SEQ ID NO: 836214 - DNA, 15 bp, Homo sapiens
acatgtgtgtcatat

SEQ ID NO: 836215 - DNA, 15 bp, Homo sapiens
catgtgtgtcatatt

SEQ ID NO: 836216 - DNA, 15 bp, Homo sapiens
atgtgtgtcatattt

SEQ ID NO: 836217 - DNA, 15 bp, Homo sapiens
tgtgtgtcatatttt

SEQ ID NO: 836218 - DNA, 15 bp, Homo sapiens
gtgtgtcatatttta

SEQ ID NO: 836219 - DNA, 15 bp, Homo sapiens
tgtgtcatattttat

SEQ ID NO: 836220 - DNA, 15 bp, Homo sapiens
gtgtcatattttatg

SEQ ID NO: 836221 - DNA, 15 bp, Homo sapiens
tgtcatattttatgg

SEQ ID NO: 836222 - DNA, 15 bp, Homo sapiens
gtcatattttatggt

SEQ ID NO: 836223 - DNA, 15 bp, Homo sapiens
tcatattttatggtt

SEQ ID NO: 836224 - DNA, 15 bp, Homo sapiens
catattttatggttt

SEQ ID NO: 836225 - DNA, 15 bp, Homo sapiens
atattttatggtttt

SEQ ID NO: 836226 - DNA, 15 bp, Homo sapiens
tattttatggtttta

SEQ ID NO: 836227 - DNA, 15 bp, Homo sapiens
attttatggttttaa

SEQ ID NO: 836228 - DNA, 15 bp, Homo sapiens
ttttatggttttaaa

SEQ ID NO: 836229 - DNA, 15 bp, Homo sapiens
tttatggttttaaaa

SEQ ID NO: 836230 - DNA, 15 bp, Homo sapiens
ttatggttttaaaag

SEQ ID NO: 836231 - DNA, 15 bp, Homo sapiens
tatggttttaaaaga

SEQ ID NO: 836232 - DNA, 15 bp, Homo sapiens
atggttttaaaagag

SEQ ID NO: 836233 - DNA, 15 bp, Homo sapiens
tggttttaaaagagc

SEQ ID NO: 836234 - DNA, 15 bp, Homo sapiens
ggttttaaaagagct

SEQ ID NO: 836235 - DNA, 15 bp, Homo sapiens
gttttaaaagagctt

SEQ ID NO: 836236 - DNA, 15 bp, Homo sapiens
ttttaaaagagcttt

SEQ ID NO: 836237 - DNA, 15 bp, Homo sapiens
tttaaaagagctttg

SEQ ID NO: 836238 - DNA, 15 bp, Homo sapiens
ttaaaagagctttga

SEQ ID NO: 836239 - DNA, 15 bp, Homo sapiens
taaaagagctttgac

SEQ ID NO: 836240 - DNA, 15 bp, Homo sapiens
aaaagagctttgaca

SEQ ID NO: 836241 - DNA, 15 bp, Homo sapiens
aaagagctttgacat

SEQ ID NO: 836242 - DNA, 15 bp, Homo sapiens
aagagctttgacatc

SEQ ID NO: 836243 - DNA, 15 bp, Homo sapiens
agagctttgacatcc

SEQ ID NO: 836244 - DNA, 15 bp, Homo sapiens
gagctttgacatcca

SEQ ID NO: 836245 - DNA, 15 bp, Homo sapiens
agctttgacatccat

SEQ ID NO: 836246 - DNA, 15 bp, Homo sapiens
gctttgacatccatt

SEQ ID NO: 836247 - DNA, 15 bp, Homo sapiens
ctttgacatccatta

SEQ ID NO: 836248 - DNA, 15 bp, Homo sapiens
tttgacatccattat

SEQ ID NO: 836249 - DNA, 15 bp, Homo sapiens
ttgacatccattatc

SEQ ID NO: 836250 - DNA, 15 bp, Homo sapiens
tgacatccattatct

SEQ ID NO: 836251 - DNA, 15 bp, Homo sapiens
gacatccattatctt

SEQ ID NO: 836252 - DNA, 15 bp, Homo sapiens
acatccattatcttc

SEQ ID NO: 836253 - DNA, 15 bp, Homo sapiens
catccattatcttct

SEQ ID NO: 836254 - DNA, 15 bp, Homo sapiens
atccattatcttctt

SEQ ID NO: 836255 - DNA, 15 bp, Homo sapiens
tccattatcttcttt

SEQ ID NO: 836256 - DNA, 15 bp, Homo sapiens
ccattatcttcttta

SEQ ID NO: 836257 - DNA, 15 bp, Homo sapiens
cattatcttctttag

SEQ ID NO: 836258 - DNA, 15 bp, Homo sapiens
attatcttctttagt

SEQ ID NO: 836259 - DNA, 15 bp, Homo sapiens
ttatcttctttagta

SEQ ID NO: 836260 - DNA, 15 bp, Homo sapiens
tatcttctttagtac

SEQ ID NO: 836261 - DNA, 15 bp, Homo sapiens
atcttctttagtact

SEQ ID NO: 836262 - DNA, 15 bp, Homo sapiens
tcttctttagtactc

SEQ ID NO: 836263 - DNA, 15 bp, Homo sapiens
cttctttagtactcg

SEQ ID NO: 836264 - DNA, 15 bp, Homo sapiens
ttctttagtactcgt

SEQ ID NO: 836265 - DNA, 15 bp, Homo sapiens
tctttagtactcgtt

SEQ ID NO: 836266 - DNA, 15 bp, Homo sapiens
ctttagtactcgttg

SEQ ID NO: 836267 - DNA, 15 bp, Homo sapiens
tttagtactcgttgg

SEQ ID NO: 836268 - DNA, 15 bp, Homo sapiens
ttagtactcgttgga

SEQ ID NO: 836269 - DNA, 15 bp, Homo sapiens
tagtactcgttggac

SEQ ID NO: 836270 - DNA, 15 bp, Homo sapiens
agtactcgttggacc

SEQ ID NO: 836271 - DNA, 15 bp, Homo sapiens
gtactcgttggacca

SEQ ID NO: 836272 - DNA, 15 bp, Homo sapiens
tactcgttggaccat

SEQ ID NO: 836273 - DNA, 15 bp, Homo sapiens
actcgttggaccatc

SEQ ID NO: 836274 - DNA, 15 bp, Homo sapiens
ctcgttggaccatct

SEQ ID NO: 836275 - DNA, 15 bp, Homo sapiens
tcgttggaccatctg

SEQ ID NO: 836276 - DNA, 15 bp, Homo sapiens
cgttggaccatctgt

SEQ ID NO: 836277 - DNA, 15 bp, Homo sapiens
gttggaccatctgtg

SEQ ID NO: 836278 - DNA, 15 bp, Homo sapiens
ttggaccatctgtgc

SEQ ID NO: 836279 - DNA, 15 bp, Homo sapiens
tggaccatctgtgca

SEQ ID NO: 836280 - DNA, 15 bp, Homo sapiens
ggaccatctgtgcat

SEQ ID NO: 836281 - DNA, 15 bp, Homo sapiens
gaccatctgtgcatt

SEQ ID NO: 836282 - DNA, 15 bp, Homo sapiens
accatctgtgcattt

SEQ ID NO: 836283 - DNA, 15 bp, Homo sapiens
ccatctgtgcatttt

SEQ ID NO: 836284 - DNA, 15 bp, Homo sapiens
catctgtgcatttta

SEQ ID NO: 836285 - DNA, 15 bp, Homo sapiens
atctgtgcattttag

SEQ ID NO: 836286 - DNA, 15 bp, Homo sapiens
tctgtgcattttagc

SEQ ID NO: 836287 - DNA, 15 bp, Homo sapiens
ctgtgcattttagca

SEQ ID NO: 836288 - DNA, 15 bp, Homo sapiens
tgtgcattttagcat

SEQ ID NO: 836289 - DNA, 15 bp, Homo sapiens
gtgcattttagcatc

SEQ ID NO: 836290 - DNA, 15 bp, Homo sapiens
tgcattttagcatcc

SEQ ID NO: 836291 - DNA, 15 bp, Homo sapiens
gcattttagcatccc

SEQ ID NO: 836292 - DNA, 15 bp, Homo sapiens
cattttagcatccca

SEQ ID NO: 836293 - DNA, 15 bp, Homo sapiens
attttagcatcccag

SEQ ID NO: 836294 - DNA, 15 bp, Homo sapiens
ttttagcatcccagg

SEQ ID NO: 836295 - DNA, 15 bp, Homo sapiens
tttagcatcccaggg

SEQ ID NO: 836296 - DNA, 15 bp, Homo sapiens
ttagcatcccagggt

SEQ ID NO: 836297 - DNA, 15 bp, Homo sapiens
tagcatcccagggta

SEQ ID NO: 836298 - DNA, 15 bp, Homo sapiens
agcatcccagggtaa

SEQ ID NO: 836299 - DNA, 15 bp, Homo sapiens
gcatcccagggtaac

SEQ ID NO: 836300 - DNA, 15 bp, Homo sapiens
catcccagggtaact

SEQ ID NO: 836301 - DNA, 15 bp, Homo sapiens
atcccagggtaactt

SEQ ID NO: 836302 - DNA, 15 bp, Homo sapiens
tcccagggtaacttc

SEQ ID NO: 836303 - DNA, 15 bp, Homo sapiens
cccagggtaacttca

SEQ ID NO: 836304 - DNA, 15 bp, Homo sapiens
ccagggtaacttcag

SEQ ID NO: 836305 - DNA, 15 bp, Homo sapiens
cagggtaacttcaga

SEQ ID NO: 836306 - DNA, 15 bp, Homo sapiens
agggtaacttcagag

SEQ ID NO: 836307 - DNA, 15 bp, Homo sapiens
gggtaacttcagagc

SEQ ID NO: 836308 - DNA, 15 bp, Homo sapiens
ggtaacttcagagca

SEQ ID NO: 836309 - DNA, 15 bp, Homo sapiens
gtaacttcagagcag

SEQ ID NO: 836310 - DNA, 15 bp, Homo sapiens
taacttcagagcagg

SEQ ID NO: 836311 - DNA, 15 bp, Homo sapiens
aacttcagagcaggg

SEQ ID NO: 836312 - DNA, 15 bp, Homo sapiens
acttcagagcagggc

SEQ ID NO: 836313 - DNA, 15 bp, Homo sapiens
cttcagagcagggca

SEQ ID NO: 836314 - DNA, 15 bp, Homo sapiens
ttcagagcagggcat

SEQ ID NO: 836315 - DNA, 15 bp, Homo sapiens
tcagagcagggcatc

SEQ ID NO: 836316 - DNA, 15 bp, Homo sapiens
cagagcagggcatct

SEQ ID NO: 836317 - DNA, 15 bp, Homo sapiens
agagcagggcatcta

SEQ ID NO: 836318 - DNA, 15 bp, Homo sapiens
gagcagggcatctaa

SEQ ID NO: 836319 - DNA, 15 bp, Homo sapiens
agcagggcatctaag

SEQ ID NO: 836320 - DNA, 15 bp, Homo sapiens
gcagggcatctaagc

SEQ ID NO: 836321 - DNA, 15 bp, Homo sapiens
cagggcatctaagct

SEQ ID NO: 836322 - DNA, 15 bp, Homo sapiens
agggcatctaagctc

SEQ ID NO: 836323 - DNA, 15 bp, Homo sapiens
gggcatctaagctct

SEQ ID NO: 836324 - DNA, 15 bp, Homo sapiens
ggcatctaagctctg

SEQ ID NO: 836325 - DNA, 15 bp, Homo sapiens
gcatctaagctctgt

SEQ ID NO: 836326 - DNA, 15 bp, Homo sapiens
catctaagctctgta

SEQ ID NO: 836327 - DNA, 15 bp, Homo sapiens
atctaagctctgtat

SEQ ID NO: 836328 - DNA, 15 bp, Homo sapiens
tctaagctctgtata

SEQ ID NO: 836329 - DNA, 15 bp, Homo sapiens
ctaagctctgtatag

SEQ ID NO: 836330 - DNA, 15 bp, Homo sapiens
taagctctgtataga

SEQ ID NO: 836331 - DNA, 15 bp, Homo sapiens
aagctctgtatagac

SEQ ID NO: 836332 - DNA, 15 bp, Homo sapiens
agctctgtatagaca

SEQ ID NO: 836333 - DNA, 15 bp, Homo sapiens
gctctgtatagacag

SEQ ID NO: 836334 - DNA, 15 bp, Homo sapiens
ctctgtatagacagc

SEQ ID NO: 836335 - DNA, 15 bp, Homo sapiens
tctgtatagacagcg

SEQ ID NO: 836336 - DNA, 15 bp, Homo sapiens
ctgtatagacagcgc

SEQ ID NO: 836337 - DNA, 15 bp, Homo sapiens
tgtatagacagcgca

SEQ ID NO: 836338 - DNA, 15 bp, Homo sapiens
gtatagacagcgcag

SEQ ID NO: 836339 - DNA, 15 bp, Homo sapiens
tatagacagcgcagc

SEQ ID NO: 836340 - DNA, 15 bp, Homo sapiens
atagacagcgcagct

SEQ ID NO: 836341 - DNA, 15 bp, Homo sapiens
tagacagcgcagctc

SEQ ID NO: 836342 - DNA, 15 bp, Homo sapiens
agacagcgcagctct

SEQ ID NO: 836343 - DNA, 15 bp, Homo sapiens
gacagcgcagctctg

SEQ ID NO: 836344 - DNA, 15 bp, Homo sapiens
acagcgcagctctgc

SEQ ID NO: 836345 - DNA, 15 bp, Homo sapiens
cagcgcagctctgct

SEQ ID NO: 836346 - DNA, 15 bp, Homo sapiens
agcgcagctctgctg

SEQ ID NO: 836347 - DNA, 15 bp, Homo sapiens
gcgcagctctgctgg

SEQ ID NO: 836348 - DNA, 15 bp, Homo sapiens
cgcagctctgctggg

SEQ ID NO: 836349 - DNA, 15 bp, Homo sapiens
gcagctctgctgggc

SEQ ID NO: 836350 - DNA, 15 bp, Homo sapiens
cagctctgctgggca

SEQ ID NO: 836351 - DNA, 15 bp, Homo sapiens
agctctgctgggcac

SEQ ID NO: 836352 - DNA, 15 bp, Homo sapiens
gctctgctgggcaca

SEQ ID NO: 836353 - DNA, 15 bp, Homo sapiens
ctctgctgggcacaa

SEQ ID NO: 836354 - DNA, 15 bp, Homo sapiens
tctgctgggcacaaa

SEQ ID NO: 836355 - DNA, 15 bp, Homo sapiens
ctgctgggcacaaat

SEQ ID NO: 836356 - DNA, 15 bp, Homo sapiens
tgctgggcacaaatc

SEQ ID NO: 836357 - DNA, 15 bp, Homo sapiens
gctgggcacaaatca

SEQ ID NO: 836358 - DNA, 15 bp, Homo sapiens
ctgggcacaaatcat

SEQ ID NO: 836359 - DNA, 15 bp, Homo sapiens
tgggcacaaatcatg

SEQ ID NO: 836360 - DNA, 15 bp, Homo sapiens
gggcacaaatcatgg

SEQ ID NO: 836361 - DNA, 15 bp, Homo sapiens
ggcacaaatcatggc

SEQ ID NO: 836362 - DNA, 15 bp, Homo sapiens
gcacaaatcatggcc

SEQ ID NO: 836363 - DNA, 15 bp, Homo sapiens
cacaaatcatggcca

SEQ ID NO: 836364 - DNA, 15 bp, Homo sapiens
acaaatcatggccac

SEQ ID NO: 836365 - DNA, 15 bp, Homo sapiens
caaatcatggccacc

SEQ ID NO: 836366 - DNA, 15 bp, Homo sapiens
aaatcatggccacca

SEQ ID NO: 836367 - DNA, 15 bp, Homo sapiens
aatcatggccaccac

SEQ ID NO: 836368 - DNA, 15 bp, Homo sapiens
atcatggccaccact

SEQ ID NO: 836369 - DNA, 15 bp, Homo sapiens
tcatggccaccactc

SEQ ID NO: 836370 - DNA, 15 bp, Homo sapiens
catggccaccactct

SEQ ID NO: 836371 - DNA, 15 bp, Homo sapiens
atggccaccactctg

SEQ ID NO: 836372 - DNA, 15 bp, Homo sapiens
tggccaccactctgc

SEQ ID NO: 836373 - DNA, 15 bp, Homo sapiens
ggccaccactctgca

SEQ ID NO: 836374 - DNA, 15 bp, Homo sapiens
ccaccactctgcagc

SEQ ID NO: 836375 - DNA, 15 bp, Homo sapiens
caccactctgcagcc

SEQ ID NO: 836376 - DNA, 15 bp, Homo sapiens
accactctgcagcca

SEQ ID NO: 836377 - DNA, 15 bp, Homo sapiens
ccactctgcagccag

SEQ ID NO: 836378 - DNA, 15 bp, Homo sapiens
cactctgcagccagc

SEQ ID NO: 836379 - DNA, 15 bp, Homo sapiens
actctgcagccagcg

SEQ ID NO: 836380 - DNA, 15 bp, Homo sapiens
ctctgcagccagcga

SEQ ID NO: 836381 - DNA, 15 bp, Homo sapiens
tctgcagccagcgag

SEQ ID NO: 836382 - DNA, 15 bp, Homo sapiens
ctgcagccagcgagc

SEQ ID NO: 836383 - DNA, 15 bp, Homo sapiens
tgcagccagcgagcg

SEQ ID NO: 836384 - DNA, 15 bp, Homo sapiens
gcagccagcgagcgg

SEQ ID NO: 836385 - DNA, 15 bp, Homo sapiens
cagccagcgagcggg

SEQ ID NO: 836386 - DNA, 15 bp, Homo sapiens
agccagcgagcgggg

SEQ ID NO: 836387 - DNA, 15 bp, Homo sapiens
gccagcgagcgggga

SEQ ID NO: 836388 - DNA, 15 bp, Homo sapiens
ccagcgagcggggag

SEQ ID NO: 836389 - DNA, 15 bp, Homo sapiens
cagcgagcggggaga

SEQ ID NO: 836390 - DNA, 15 bp, Homo sapiens
agcgagcggggagac

SEQ ID NO: 836391 - DNA, 15 bp, Homo sapiens
gcgagcggggagaca

SEQ ID NO: 836392 - DNA, 15 bp, Homo sapiens
cgagcggggagacag

SEQ ID NO: 836393 - DNA, 15 bp, Homo sapiens
gagcggggagacaga

SEQ ID NO: 836394 - DNA, 15 bp, Homo sapiens
agcggggagacagaa

SEQ ID NO: 836395 - DNA, 15 bp, Homo sapiens
gcggggagacagaag

SEQ ID NO: 836396 - DNA, 15 bp, Homo sapiens
cggggagacagaaga

SEQ ID NO: 836397 - DNA, 15 bp, Homo sapiens
ggggagacagaagag

SEQ ID NO: 836398 - DNA, 15 bp, Homo sapiens
gggagacagaagagc

SEQ ID NO: 836399 - DNA, 15 bp, Homo sapiens
ggagacagaagagct

SEQ ID NO: 836400 - DNA, 15 bp, Homo sapiens
gagacagaagagctt

SEQ ID NO: 836401 - DNA, 15 bp, Homo sapiens
agacagaagagctta

SEQ ID NO: 836402 - DNA, 15 bp, Homo sapiens
gacagaagagcttac

SEQ ID NO: 836403 - DNA, 15 bp, Homo sapiens
acagaagagcttact

SEQ ID NO: 836404 - DNA, 15 bp, Homo sapiens
cagaagagcttactg

SEQ ID NO: 836405 - DNA, 15 bp, Homo sapiens
agaagagcttactgc

SEQ ID NO: 836406 - DNA, 15 bp, Homo sapiens
gaagagcttactgcc

SEQ ID NO: 836407 - DNA, 15 bp, Homo sapiens
aagagcttactgcca

SEQ ID NO: 836408 - DNA, 15 bp, Homo sapiens
agagcttactgccac

SEQ ID NO: 836409 - DNA, 15 bp, Homo sapiens
gagcttactgccacc

SEQ ID NO: 836410 - DNA, 15 bp, Homo sapiens
agcttactgccaccg

SEQ ID NO: 836411 - DNA, 15 bp, Homo sapiens
gcttactgccaccga

SEQ ID NO: 836412 - DNA, 15 bp, Homo sapiens
cttactgccaccgac

SEQ ID NO: 836413 - DNA, 15 bp, Homo sapiens
ttactgccaccgact

SEQ ID NO: 836414 - DNA, 15 bp, Homo sapiens
tactgccaccgactc

SEQ ID NO: 836415 - DNA, 15 bp, Homo sapiens
actgccaccgactct

SEQ ID NO: 836416 - DNA, 15 bp, Homo sapiens
ctgccaccgactctt

SEQ ID NO: 836417 - DNA, 15 bp, Homo sapiens
tgccaccgactcttt

SEQ ID NO: 836418 - DNA, 15 bp, Homo sapiens
gccaccgactcttta

SEQ ID NO: 836419 - DNA, 15 bp, Homo sapiens
ccaccgactctttaa

SEQ ID NO: 836420 - DNA, 15 bp, Homo sapiens
caccgactctttaaa

SEQ ID NO: 836421 - DNA, 15 bp, Homo sapiens
accgactctttaaat

SEQ ID NO: 836422 - DNA, 15 bp, Homo sapiens
ccgactctttaaatg

SEQ ID NO: 836423 - DNA, 15 bp, Homo sapiens
cgactctttaaatgg

SEQ ID NO: 836424 - DNA, 15 bp, Homo sapiens
gactctttaaatgga

SEQ ID NO: 836425 - DNA, 15 bp, Homo sapiens
actctttaaatggag

SEQ ID NO: 836426 - DNA, 15 bp, Homo sapiens
ctctttaaatggagc

SEQ ID NO: 836427 - DNA, 15 bp, Homo sapiens
tctttaaatggagcc

SEQ ID NO: 836428 - DNA, 15 bp, Homo sapiens
ctttaaatggagcca

SEQ ID NO: 836429 - DNA, 15 bp, Homo sapiens
tttaaatggagccac

SEQ ID NO: 836430 - DNA, 15 bp, Homo sapiens
ttaaatggagccaca

SEQ ID NO: 836431 - DNA, 15 bp, Homo sapiens
taaatggagccacag

SEQ ID NO: 836432 - DNA, 15 bp, Homo sapiens
aaatggagccacagc

SEQ ID NO: 836433 - DNA, 15 bp, Homo sapiens
aatggagccacagcc

SEQ ID NO: 836434 - DNA, 15 bp, Homo sapiens
atggagccacagccc

SEQ ID NO: 836435 - DNA, 15 bp, Homo sapiens
tggagccacagccca

SEQ ID NO: 836436 - DNA, 15 bp, Homo sapiens
ggagccacagcccat

SEQ ID NO: 836437 - DNA, 15 bp, Homo sapiens
gagccacagcccatt

SEQ ID NO: 836438 - DNA, 15 bp, Homo sapiens
agccacagcccattg

SEQ ID NO: 836439 - DNA, 15 bp, Homo sapiens
gccacagcccattga

SEQ ID NO: 836440 - DNA, 15 bp, Homo sapiens
ccacagcccattgaa

SEQ ID NO: 836441 - DNA, 15 bp, Homo sapiens
cacagcccattgaac

SEQ ID NO: 836442 - DNA, 15 bp, Homo sapiens
acagcccattgaacc

SEQ ID NO: 836443 - DNA, 15 bp, Homo sapiens
cagcccattgaacca

SEQ ID NO: 836444 - DNA, 15 bp, Homo sapiens
agcccattgaaccaa

SEQ ID NO: 836445 - DNA, 15 bp, Homo sapiens
gcccattgaaccaaa

SEQ ID NO: 836446 - DNA, 15 bp, Homo sapiens
cccattgaaccaaac

SEQ ID NO: 836447 - DNA, 15 bp, Homo sapiens
ccattgaaccaaact

SEQ ID NO: 836448 - DNA, 15 bp, Homo sapiens
cattgaaccaaactg

SEQ ID NO: 836449 - DNA, 15 bp, Homo sapiens
attgaaccaaactgt

SEQ ID NO: 836450 - DNA, 15 bp, Homo sapiens
ttgaaccaaactgtg

SEQ ID NO: 836451 - DNA, 15 bp, Homo sapiens
tgaaccaaactgtgg

SEQ ID NO: 836452 - DNA, 15 bp, Homo sapiens
gaaccaaactgtggt

SEQ ID NO: 836453 - DNA, 15 bp, Homo sapiens
aaccaaactgtggtt

SEQ ID NO: 836454 - DNA, 15 bp, Homo sapiens
accaaactgtggttc

SEQ ID NO: 836455 - DNA, 15 bp, Homo sapiens
ccaaactgtggttcc

SEQ ID NO: 836456 - DNA, 15 bp, Homo sapiens
caaactgtggttccc

SEQ ID NO: 836457 - DNA, 15 bp, Homo sapiens
aaactgtggttcccg

SEQ ID NO: 836458 - DNA, 15 bp, Homo sapiens
aactgtggttcccga

SEQ ID NO: 836459 - DNA, 15 bp, Homo sapiens
actgtggttcccgag

SEQ ID NO: 836460 - DNA, 15 bp, Homo sapiens
ctgtggttcccgaga

SEQ ID NO: 836461 - DNA, 15 bp, Homo sapiens
tgtggttcccgagag

SEQ ID NO: 836462 - DNA, 15 bp, Homo sapiens
gtggttcccgagagt

SEQ ID NO: 836463 - DNA, 15 bp, Homo sapiens
tggttcccgagagta

SEQ ID NO: 836464 - DNA, 15 bp, Homo sapiens
ggttcccgagagtag

SEQ ID NO: 836465 - DNA, 15 bp, Homo sapiens
gttcccgagagtagg

SEQ ID NO: 836466 - DNA, 15 bp, Homo sapiens
ttcccgagagtaggc

SEQ ID NO: 836467 - DNA, 15 bp, Homo sapiens
tcccgagagtaggca

SEQ ID NO: 836468 - DNA, 15 bp, Homo sapiens
cccgagagtaggcat

SEQ ID NO: 836469 - DNA, 15 bp, Homo sapiens
ccgagagtaggcatt

SEQ ID NO: 836470 - DNA, 15 bp, Homo sapiens
cgagagtaggcatta

SEQ ID NO: 836471 - DNA, 15 bp, Homo sapiens
gagagtaggcattat

SEQ ID NO: 836472 - DNA, 15 bp, Homo sapiens
agagtaggcattata

SEQ ID NO: 836473 - DNA, 15 bp, Homo sapiens
gagtaggcattatag

SEQ ID NO: 836474 - DNA, 15 bp, Homo sapiens
agtaggcattataga

SEQ ID NO: 836475 - DNA, 15 bp, Homo sapiens
gtaggcattatagaa

SEQ ID NO: 836476 - DNA, 15 bp, Homo sapiens
taggcattatagaag

SEQ ID NO: 836477 - DNA, 15 bp, Homo sapiens
aggcattatagaagg

SEQ ID NO: 836478 - DNA, 15 bp, Homo sapiens
ggcattatagaaggg

SEQ ID NO: 836479 - DNA, 15 bp, Homo sapiens
gcattatagaagggc

SEQ ID NO: 836480 - DNA, 15 bp, Homo sapiens
cattatagaagggct

SEQ ID NO: 836481 - DNA, 15 bp, Homo sapiens
attatagaagggctg

SEQ ID NO: 836482 - DNA, 15 bp, Homo sapiens
ttatagaagggctga

SEQ ID NO: 836483 - DNA, 15 bp, Homo sapiens
tatagaagggctgat

SEQ ID NO: 836484 - DNA, 15 bp, Homo sapiens
atagaagggctgatg

SEQ ID NO: 836485 - DNA, 15 bp, Homo sapiens
tagaagggctgatgc

SEQ ID NO: 836486 - DNA, 15 bp, Homo sapiens
agaagggctgatgct

SEQ ID NO: 836487 - DNA, 15 bp, Homo sapiens
gaagggctgatgctc

SEQ ID NO: 836488 - DNA, 15 bp, Homo sapiens
aagggctgatgctct

SEQ ID NO: 836489 - DNA, 15 bp, Homo sapiens
agggctgatgctctc

SEQ ID NO: 836490 - DNA, 15 bp, Homo sapiens
gggctgatgctctcc

SEQ ID NO: 836491 - DNA, 15 bp, Homo sapiens
ggctgatgctctcca

SEQ ID NO: 836492 - DNA, 15 bp, Homo sapiens
gctgatgctctccaa

SEQ ID NO: 836493 - DNA, 15 bp, Homo sapiens
ctgatgctctccaaa

SEQ ID NO: 836494 - DNA, 15 bp, Homo sapiens
tgatgctctccaaag

SEQ ID NO: 836495 - DNA, 15 bp, Homo sapiens
gatgctctccaaagt

SEQ ID NO: 836496 - DNA, 15 bp, Homo sapiens
atgctctccaaagtg

SEQ ID NO: 836497 - DNA, 15 bp, Homo sapiens
tgctctccaaagtgt

SEQ ID NO: 836498 - DNA, 15 bp, Homo sapiens
gctctccaaagtgta

SEQ ID NO: 836499 - DNA, 15 bp, Homo sapiens
ctctccaaagtgtat

SEQ ID NO: 836500 - DNA, 15 bp, Homo sapiens
tctccaaagtgtatc

SEQ ID NO: 836501 - DNA, 15 bp, Homo sapiens
ctccaaagtgtatct

SEQ ID NO: 836502 - DNA, 15 bp, Homo sapiens
tccaaagtgtatctt

SEQ ID NO: 836503 - DNA, 15 bp, Homo sapiens
ccaaagtgtatcttt

SEQ ID NO: 836504 - DNA, 15 bp, Homo sapiens
caaagtgtatctttt

SEQ ID NO: 836505 - DNA, 15 bp, Homo sapiens
aaagtgtatctttta

SEQ ID NO: 836506 - DNA, 15 bp, Homo sapiens
aagtgtatcttttaa

SEQ ID NO: 836507 - DNA, 15 bp, Homo sapiens
agtgtatcttttaat

SEQ ID NO: 836508 - DNA, 15 bp, Homo sapiens
gtgtatcttttaata

SEQ ID NO: 836509 - DNA, 15 bp, Homo sapiens
tgtatcttttaatat

SEQ ID NO: 836510 - DNA, 15 bp, Homo sapiens
gtatcttttaatatc

SEQ ID NO: 836511 - DNA, 15 bp, Homo sapiens
tatcttttaatatca

SEQ ID NO: 836512 - DNA, 15 bp, Homo sapiens
atcttttaatatcac

SEQ ID NO: 836513 - DNA, 15 bp, Homo sapiens
tcttttaatatcact

SEQ ID NO: 836514 - DNA, 15 bp, Homo sapiens
cttttaatatcacta

SEQ ID NO: 836515 - DNA, 15 bp, Homo sapiens
ttttaatatcactag

SEQ ID NO: 836516 - DNA, 15 bp, Homo sapiens
tttaatatcactaga

SEQ ID NO: 836517 - DNA, 15 bp, Homo sapiens
ttaatatcactagaa

SEQ ID NO: 836518 - DNA, 15 bp, Homo sapiens
taatatcactagaat

SEQ ID NO: 836519 - DNA, 15 bp, Homo sapiens
aatatcactagaatt

SEQ ID NO: 836520 - DNA, 15 bp, Homo sapiens
atatcactagaattc

SEQ ID NO: 836521 - DNA, 15 bp, Homo sapiens
tatcactagaattct

SEQ ID NO: 836522 - DNA, 15 bp, Homo sapiens
atcactagaattctt

SEQ ID NO: 836523 - DNA, 15 bp, Homo sapiens
tcactagaattcttg

SEQ ID NO: 836524 - DNA, 15 bp, Homo sapiens
cactagaattcttgg

SEQ ID NO: 836525 - DNA, 15 bp, Homo sapiens
actagaattcttgga

SEQ ID NO: 836526 - DNA, 15 bp, Homo sapiens
ctagaattcttggag

SEQ ID NO: 836527 - DNA, 15 bp, Homo sapiens
tagaattcttggaga

SEQ ID NO: 836528 - DNA, 15 bp, Homo sapiens
agaattcttggagag

SEQ ID NO: 836529 - DNA, 15 bp, Homo sapiens
gaattcttggagaga

SEQ ID NO: 836530 - DNA, 15 bp, Homo sapiens
aattcttggagagaa

SEQ ID NO: 836531 - DNA, 15 bp, Homo sapiens
attcttggagagaaa

SEQ ID NO: 836532 - DNA, 15 bp, Homo sapiens
ttcttggagagaaac

SEQ ID NO: 836533 - DNA, 15 bp, Homo sapiens
tcttggagagaaacg

SEQ ID NO: 836534 - DNA, 15 bp, Homo sapiens
cttggagagaaacgc

SEQ ID NO: 836535 - DNA, 15 bp, Homo sapiens
ttggagagaaacgct

SEQ ID NO: 836536 - DNA, 15 bp, Homo sapiens
tggagagaaacgctt

SEQ ID NO: 836537 - DNA, 15 bp, Homo sapiens
ggagagaaacgcttt

SEQ ID NO: 836538 - DNA, 15 bp, Homo sapiens
gagagaaacgctttc

SEQ ID NO: 836539 - DNA, 15 bp, Homo sapiens
agagaaacgctttca

SEQ ID NO: 836540 - DNA, 15 bp, Homo sapiens
gagaaacgctttcat

SEQ ID NO: 836541 - DNA, 15 bp, Homo sapiens
agaaacgctttcatg

SEQ ID NO: 836542 - DNA, 15 bp, Homo sapiens
gaaacgctttcatgc

SEQ ID NO: 836543 - DNA, 15 bp, Homo sapiens
aaacgctttcatgct

SEQ ID NO: 836544 - DNA, 15 bp, Homo sapiens
aacgctttcatgctg

SEQ ID NO: 836545 - DNA, 15 bp, Homo sapiens
acgctttcatgctgg

SEQ ID NO: 836546 - DNA, 15 bp, Homo sapiens
cgctttcatgctggc

SEQ ID NO: 836547 - DNA, 15 bp, Homo sapiens
gctttcatgctggcc

SEQ ID NO: 836548 - DNA, 15 bp, Homo sapiens
ctttcatgctggcca

SEQ ID NO: 836549 - DNA, 15 bp, Homo sapiens
tttcatgctggccat

SEQ ID NO: 836550 - DNA, 15 bp, Homo sapiens
ttcatgctggccatc

SEQ ID NO: 836551 - DNA, 15 bp, Homo sapiens
tcatgctggccatct

SEQ ID NO: 836552 - DNA, 15 bp, Homo sapiens
catgctggccatctt

SEQ ID NO: 836553 - DNA, 15 bp, Homo sapiens
atgctggccatcttt

SEQ ID NO: 836554 - DNA, 15 bp, Homo sapiens
tgctggccatctttt

SEQ ID NO: 836555 - DNA, 15 bp, Homo sapiens
gctggccatctttta

SEQ ID NO: 836556 - DNA, 15 bp, Homo sapiens
ctggccatcttttaa

SEQ ID NO: 836557 - DNA, 15 bp, Homo sapiens
tggccatcttttaaa

SEQ ID NO: 836558 - DNA, 15 bp, Homo sapiens
ggccatcttttaaat

SEQ ID NO: 836559 - DNA, 15 bp, Homo sapiens
gccatcttttaaatg

SEQ ID NO: 836560 - DNA, 15 bp, Homo sapiens
ccatcttttaaatgc

SEQ ID NO: 836561 - DNA, 15 bp, Homo sapiens
catcttttaaatgct

SEQ ID NO: 836562 - DNA, 15 bp, Homo sapiens
atcttttaaatgctg

SEQ ID NO: 836563 - DNA, 15 bp, Homo sapiens
tcttttaaatgctgg

SEQ ID NO: 836564 - DNA, 15 bp, Homo sapiens
cttttaaatgctggc

SEQ ID NO: 836565 - DNA, 15 bp, Homo sapiens
ttttaaatgctggcc

SEQ ID NO: 836566 - DNA, 15 bp, Homo sapiens
tttaaatgctggccc

SEQ ID NO: 836567 - DNA, 15 bp, Homo sapiens
ttaaatgctggccct

SEQ ID NO: 836568 - DNA, 15 bp, Homo sapiens
taaatgctggccctg

SEQ ID NO: 836569 - DNA, 15 bp, Homo sapiens
aaatgctggccctgc

SEQ ID NO: 836570 - DNA, 15 bp, Homo sapiens
aatgctggccctgca

SEQ ID NO: 836571 - DNA, 15 bp, Homo sapiens
atgctggccctgcat

SEQ ID NO: 836572 - DNA, 15 bp, Homo sapiens
tgctggccctgcatc

SEQ ID NO: 836573 - DNA, 15 bp, Homo sapiens
gctggccctgcatct

SEQ ID NO: 836574 - DNA, 15 bp, Homo sapiens
ctggccctgcatctt

SEQ ID NO: 836575 - DNA, 15 bp, Homo sapiens
tggccctgcatcttc

SEQ ID NO: 836576 - DNA, 15 bp, Homo sapiens
ggccctgcatcttct

SEQ ID NO: 836577 - DNA, 15 bp, Homo sapiens
gccctgcatcttctg

SEQ ID NO: 836578 - DNA, 15 bp, Homo sapiens
ccctgcatcttctga

SEQ ID NO: 836579 - DNA, 15 bp, Homo sapiens
cctgcatcttctgat

SEQ ID NO: 836580 - DNA, 15 bp, Homo sapiens
ctgcatcttctgatt

SEQ ID NO: 836581 - DNA, 15 bp, Homo sapiens
tgcatcttctgattt

SEQ ID NO: 836582 - DNA, 15 bp, Homo sapiens
gcatcttctgatttg

SEQ ID NO: 836583 - DNA, 15 bp, Homo sapiens
catcttctgatttga

SEQ ID NO: 836584 - DNA, 15 bp, Homo sapiens
atcttctgatttgag

SEQ ID NO: 836585 - DNA, 15 bp, Homo sapiens
tcttctgatttgagt

SEQ ID NO: 836586 - DNA, 15 bp, Homo sapiens
cttctgatttgagtg

SEQ ID NO: 836587 - DNA, 15 bp, Homo sapiens
ttctgatttgagtgt

SEQ ID NO: 836588 - DNA, 15 bp, Homo sapiens
tctgatttgagtgta

SEQ ID NO: 836589 - DNA, 15 bp, Homo sapiens
ctgatttgagtgtaa

SEQ ID NO: 836590 - DNA, 15 bp, Homo sapiens
tgatttgagtgtaaa

SEQ ID NO: 836591 - DNA, 15 bp, Homo sapiens
gatttgagtgtaaat

SEQ ID NO: 836592 - DNA, 15 bp, Homo sapiens
atttgagtgtaaatg

SEQ ID NO: 836593 - DNA, 15 bp, Homo sapiens
tttgagtgtaaatgg

SEQ ID NO: 836594 - DNA, 15 bp, Homo sapiens
ttgagtgtaaatggc

SEQ ID NO: 836595 - DNA, 15 bp, Homo sapiens
tgagtgtaaatggct

SEQ ID NO: 836596 - DNA, 15 bp, Homo sapiens
gagtgtaaatggctc

SEQ ID NO: 836597 - DNA, 15 bp, Homo sapiens
agtgtaaatggctca

SEQ ID NO: 836598 - DNA, 15 bp, Homo sapiens
gtgtaaatggctcaa

SEQ ID NO: 836599 - DNA, 15 bp, Homo sapiens
tgtaaatggctcaaa

SEQ ID NO: 836600 - DNA, 15 bp, Homo sapiens
gtaaatggctcaaag

SEQ ID NO: 836601 - DNA, 15 bp, Homo sapiens
taaatggctcaaagc

SEQ ID NO: 836602 - DNA, 15 bp, Homo sapiens
aaatggctcaaagct

SEQ ID NO: 836603 - DNA, 15 bp, Homo sapiens
aatggctcaaagctc

SEQ ID NO: 836604 - DNA, 15 bp, Homo sapiens
atggctcaaagctct

SEQ ID NO: 836605 - DNA, 15 bp, Homo sapiens
tggctcaaagctctt

SEQ ID NO: 836606 - DNA, 15 bp, Homo sapiens
ggctcaaagctcttc

SEQ ID NO: 836607 - DNA, 15 bp, Homo sapiens
gctcaaagctcttca

SEQ ID NO: 836608 - DNA, 15 bp, Homo sapiens
ctcaaagctcttcaa

SEQ ID NO: 836609 - DNA, 15 bp, Homo sapiens
tcaaagctcttcaag

SEQ ID NO: 836610 - DNA, 15 bp, Homo sapiens
caaagctcttcaagg

SEQ ID NO: 836611 - DNA, 15 bp, Homo sapiens
aaagctcttcaagga

SEQ ID NO: 836612 - DNA, 15 bp, Homo sapiens
aagctcttcaaggaa

SEQ ID NO: 836613 - DNA, 15 bp, Homo sapiens
agctcttcaaggaaa

SEQ ID NO: 836614 - DNA, 15 bp, Homo sapiens
gctcttcaaggaaag

SEQ ID NO: 836615 - DNA, 15 bp, Homo sapiens
ctcttcaaggaaaga

SEQ ID NO: 836616 - DNA, 15 bp, Homo sapiens
tcttcaaggaaagat

SEQ ID NO: 836617 - DNA, 15 bp, Homo sapiens
cttcaaggaaagatt

SEQ ID NO: 836618 - DNA, 15 bp, Homo sapiens
ttcaaggaaagattg

SEQ ID NO: 836619 - DNA, 15 bp, Homo sapiens
tcaaggaaagattgg

SEQ ID NO: 836620 - DNA, 15 bp, Homo sapiens
caaggaaagattggt

SEQ ID NO: 836621 - DNA, 15 bp, Homo sapiens
aaggaaagattggtt

SEQ ID NO: 836622 - DNA, 15 bp, Homo sapiens
aggaaagattggttt

SEQ ID NO: 836623 - DNA, 15 bp, Homo sapiens
ggaaagattggttta

SEQ ID NO: 836624 - DNA, 15 bp, Homo sapiens
gaaagattggtttat

SEQ ID NO: 836625 - DNA, 15 bp, Homo sapiens
aaagattggtttata

SEQ ID NO: 836626 - DNA, 15 bp, Homo sapiens
aagattggtttataa

SEQ ID NO: 836627 - DNA, 15 bp, Homo sapiens
agattggtttataac

SEQ ID NO: 836628 - DNA, 15 bp, Homo sapiens
gattggtttataact

SEQ ID NO: 836629 - DNA, 15 bp, Homo sapiens
attggtttataactt

SEQ ID NO: 836630 - DNA, 15 bp, Homo sapiens
ttggtttataacttc

SEQ ID NO: 836631 - DNA, 15 bp, Homo sapiens
tggtttataacttct

SEQ ID NO: 836632 - DNA, 15 bp, Homo sapiens
ggtttataacttctt

SEQ ID NO: 836633 - DNA, 15 bp, Homo sapiens
gtttataacttcttg

SEQ ID NO: 836634 - DNA, 15 bp, Homo sapiens
tttataacttcttgg

SEQ ID NO: 836635 - DNA, 15 bp, Homo sapiens
ttataacttcttgga

SEQ ID NO: 836636 - DNA, 15 bp, Homo sapiens
tataacttcttggaa

SEQ ID NO: 836637 - DNA, 15 bp, Homo sapiens
ataacttcttggaaa

SEQ ID NO: 836638 - DNA, 15 bp, Homo sapiens
taacttcttggaaaa

SEQ ID NO: 836639 - DNA, 15 bp, Homo sapiens
aacttcttggaaaag

SEQ ID NO: 836640 - DNA, 15 bp, Homo sapiens
acttcttggaaaagt

SEQ ID NO: 836641 - DNA, 15 bp, Homo sapiens
cttcttggaaaagta

SEQ ID NO: 836642 - DNA, 15 bp, Homo sapiens
ttcttggaaaagtat

SEQ ID NO: 836643 - DNA, 15 bp, Homo sapiens
tcttggaaaagtatc

SEQ ID NO: 836644 - DNA, 15 bp, Homo sapiens
cttggaaaagtatca

SEQ ID NO: 836645 - DNA, 15 bp, Homo sapiens
ttggaaaagtatcac

SEQ ID NO: 836646 - DNA, 15 bp, Homo sapiens
tggaaaagtatcact

SEQ ID NO: 836647 - DNA, 15 bp, Homo sapiens
ggaaaagtatcactc

SEQ ID NO: 836648 - DNA, 15 bp, Homo sapiens
gaaaagtatcactcc

SEQ ID NO: 836649 - DNA, 15 bp, Homo sapiens
aaaagtatcactcct

SEQ ID NO: 836650 - DNA, 15 bp, Homo sapiens
aaagtatcactcctg

SEQ ID NO: 836651 - DNA, 15 bp, Homo sapiens
aagtatcactcctga

SEQ ID NO: 836652 - DNA, 15 bp, Homo sapiens
agtatcactcctgat

SEQ ID NO: 836653 - DNA, 15 bp, Homo sapiens
gtatcactcctgatg

SEQ ID NO: 836654 - DNA, 15 bp, Homo sapiens
tatcactcctgatga

SEQ ID NO: 836655 - DNA, 15 bp, Homo sapiens
atcactcctgatgat

SEQ ID NO: 836656 - DNA, 15 bp, Homo sapiens
tcactcctgatgatt

SEQ ID NO: 836657 - DNA, 15 bp, Homo sapiens
cactcctgatgattt

SEQ ID NO: 836658 - DNA, 15 bp, Homo sapiens
actcctgatgattta

SEQ ID NO: 836659 - DNA, 15 bp, Homo sapiens
ctcctgatgatttac

SEQ ID NO: 836660 - DNA, 15 bp, Homo sapiens
tcctgatgatttacc

SEQ ID NO: 836661 - DNA, 15 bp, Homo sapiens
cctgatgatttacct

SEQ ID NO: 836662 - DNA, 15 bp, Homo sapiens
ctgatgatttacctc

SEQ ID NO: 836663 - DNA, 15 bp, Homo sapiens
tgatgatttacctct

SEQ ID NO: 836664 - DNA, 15 bp, Homo sapiens
gatgatttacctctc

SEQ ID NO: 836665 - DNA, 15 bp, Homo sapiens
atgatttacctctca

SEQ ID NO: 836666 - DNA, 15 bp, Homo sapiens
tgatttacctctcag

SEQ ID NO: 836667 - DNA, 15 bp, Homo sapiens
gatttacctctcagt

SEQ ID NO: 836668 - DNA, 15 bp, Homo sapiens
atttacctctcagtg

SEQ ID NO: 836669 - DNA, 15 bp, Homo sapiens
tttacctctcagtgg

SEQ ID NO: 836670 - DNA, 15 bp, Homo sapiens
ttacctctcagtgga

SEQ ID NO: 836671 - DNA, 15 bp, Homo sapiens
tacctctcagtggat

SEQ ID NO: 836672 - DNA, 15 bp, Homo sapiens
acctctcagtggatt

SEQ ID NO: 836673 - DNA, 15 bp, Homo sapiens
cctctcagtggattt

SEQ ID NO: 836674 - DNA, 15 bp, Homo sapiens
ctctcagtggatttt

SEQ ID NO: 836675 - DNA, 15 bp, Homo sapiens
tctcagtggattttt

SEQ ID NO: 836676 - DNA, 15 bp, Homo sapiens
ctcagtggatttttt

SEQ ID NO: 836677 - DNA, 15 bp, Homo sapiens
tcagtggatttttta

SEQ ID NO: 836678 - DNA, 15 bp, Homo sapiens
cagtggattttttat

SEQ ID NO: 836679 - DNA, 15 bp, Homo sapiens
agtggattttttatt

SEQ ID NO: 836680 - DNA, 15 bp, Homo sapiens
gtggattttttattt

SEQ ID NO: 836681 - DNA, 15 bp, Homo sapiens
tggattttttatttt

SEQ ID NO: 836682 - DNA, 15 bp, Homo sapiens
ggattttttattttt

SEQ ID NO: 836683 - DNA, 15 bp, Homo sapiens
gattttttatttttc

SEQ ID NO: 836684 - DNA, 15 bp, Homo sapiens
attttttatttttcc

SEQ ID NO: 836685 - DNA, 15 bp, Homo sapiens
ttttttatttttccc

SEQ ID NO: 836686 - DNA, 15 bp, Homo sapiens
tttttatttttccca

SEQ ID NO: 836687 - DNA, 15 bp, Homo sapiens
ttttatttttcccaa

SEQ ID NO: 836688 - DNA, 15 bp, Homo sapiens
tttatttttcccaaa

SEQ ID NO: 836689 - DNA, 15 bp, Homo sapiens
ttatttttcccaaag

SEQ ID NO: 836690 - DNA, 15 bp, Homo sapiens
tatttttcccaaaga

SEQ ID NO: 836691 - DNA, 15 bp, Homo sapiens
atttttcccaaagac

SEQ ID NO: 836692 - DNA, 15 bp, Homo sapiens
tttttcccaaagact

SEQ ID NO: 836693 - DNA, 15 bp, Homo sapiens
ttttcccaaagactc

SEQ ID NO: 836694 - DNA, 15 bp, Homo sapiens
tttcccaaagactct

SEQ ID NO: 836695 - DNA, 15 bp, Homo sapiens
ttcccaaagactcta

SEQ ID NO: 836696 - DNA, 15 bp, Homo sapiens
tcccaaagactctag

SEQ ID NO: 836697 - DNA, 15 bp, Homo sapiens
cccaaagactctagt

SEQ ID NO: 836698 - DNA, 15 bp, Homo sapiens
ccaaagactctagtg

SEQ ID NO: 836699 - DNA, 15 bp, Homo sapiens
caaagactctagtga

SEQ ID NO: 836700 - DNA, 15 bp, Homo sapiens
aaagactctagtgaa

SEQ ID NO: 836701 - DNA, 15 bp, Homo sapiens
aagactctagtgaaa

SEQ ID NO: 836702 - DNA, 15 bp, Homo sapiens
agactctagtgaaag

SEQ ID NO: 836703 - DNA, 15 bp, Homo sapiens
gactctagtgaaaga

SEQ ID NO: 836704 - DNA, 15 bp, Homo sapiens
actctagtgaaagag

SEQ ID NO: 836705 - DNA, 15 bp, Homo sapiens
ctctagtgaaagagg

SEQ ID NO: 836706 - DNA, 15 bp, Homo sapiens
tctagtgaaagaggc

SEQ ID NO: 836707 - DNA, 15 bp, Homo sapiens
ctagtgaaagaggcc

SEQ ID NO: 836708 - DNA, 15 bp, Homo sapiens
tagtgaaagaggcct

SEQ ID NO: 836709 - DNA, 15 bp, Homo sapiens
agtgaaagaggcctt

SEQ ID NO: 836710 - DNA, 15 bp, Homo sapiens
gtgaaagaggccttt

SEQ ID NO: 836711 - DNA, 15 bp, Homo sapiens
tgaaagaggccttta

SEQ ID NO: 836712 - DNA, 15 bp, Homo sapiens
gaaagaggcctttat

SEQ ID NO: 836713 - DNA, 15 bp, Homo sapiens
aaagaggcctttatc

SEQ ID NO: 836714 - DNA, 15 bp, Homo sapiens
aagaggcctttatct

SEQ ID NO: 836715 - DNA, 15 bp, Homo sapiens
agaggcctttatctc

SEQ ID NO: 836716 - DNA, 15 bp, Homo sapiens
gaggcctttatctct

SEQ ID NO: 836717 - DNA, 15 bp, Homo sapiens
aggcctttatctctg

SEQ ID NO: 836718 - DNA, 15 bp, Homo sapiens
ggcctttatctctgg

SEQ ID NO: 836719 - DNA, 15 bp, Homo sapiens
gcctttatctctgga

SEQ ID NO: 836720 - DNA, 15 bp, Homo sapiens
cctttatctctggaa

SEQ ID NO: 836721 - DNA, 15 bp, Homo sapiens
ctttatctctggaag

SEQ ID NO: 836722 - DNA, 15 bp, Homo sapiens
tttatctctggaagc

SEQ ID NO: 836723 - DNA, 15 bp, Homo sapiens
ttatctctggaagcc

SEQ ID NO: 836724 - DNA, 15 bp, Homo sapiens
tatctctggaagcca

SEQ ID NO: 836725 - DNA, 15 bp, Homo sapiens
atctctggaagccaa

SEQ ID NO: 836726 - DNA, 15 bp, Homo sapiens
tctctggaagccaag

SEQ ID NO: 836727 - DNA, 15 bp, Homo sapiens
ctctggaagccaagt

SEQ ID NO: 836728 - DNA, 15 bp, Homo sapiens
tctggaagccaagtc

SEQ ID NO: 836729 - DNA, 15 bp, Homo sapiens
ctggaagccaagtcc

SEQ ID NO: 836730 - DNA, 15 bp, Homo sapiens
tggaagccaagtccc

SEQ ID NO: 836731 - DNA, 15 bp, Homo sapiens
ggaagccaagtccca

SEQ ID NO: 836732 - DNA, 15 bp, Homo sapiens
gaagccaagtcccat

SEQ ID NO: 836733 - DNA, 15 bp, Homo sapiens
aagccaagtcccatg

SEQ ID NO: 836734 - DNA, 15 bp, Homo sapiens
agccaagtcccatga

SEQ ID NO: 836735 - DNA, 15 bp, Homo sapiens
gccaagtcccatgag

SEQ ID NO: 836736 - DNA, 15 bp, Homo sapiens
ccaagtcccatgagc

SEQ ID NO: 836737 - DNA, 15 bp, Homo sapiens
ccagtgcagatagag

SEQ ID NO: 836738 - DNA, 15 bp, Homo sapiens
cagtgcagatagagg

SEQ ID NO: 836739 - DNA, 15 bp, Homo sapiens
agtgcagatagaggc

SEQ ID NO: 836740 - DNA, 15 bp, Homo sapiens
gtgcagatagaggca

SEQ ID NO: 836741 - DNA, 15 bp, Homo sapiens
tgcagatagaggcaa

SEQ ID NO: 836742 - DNA, 15 bp, Homo sapiens
gcagatagaggcaag

SEQ ID NO: 836743 - DNA, 15 bp, Homo sapiens
cagatagaggcaagt

SEQ ID NO: 836744 - DNA, 15 bp, Homo sapiens
agatagaggcaagtt

SEQ ID NO: 836745 - DNA, 15 bp, Homo sapiens
gatagaggcaagttc

SEQ ID NO: 836746 - DNA, 15 bp, Homo sapiens
atagaggcaagttct

SEQ ID NO: 836747 - DNA, 15 bp, Homo sapiens
tagaggcaagttctt

SEQ ID NO: 836748 - DNA, 15 bp, Homo sapiens
agaggcaagttcttt

SEQ ID NO: 836749 - DNA, 15 bp, Homo sapiens
gaggcaagttctttg

SEQ ID NO: 836750 - DNA, 15 bp, Homo sapiens
aggcaagttctttga

SEQ ID NO: 836751 - DNA, 15 bp, Homo sapiens
ggcaagttctttgag

SEQ ID NO: 836752 - DNA, 15 bp, Homo sapiens
gttctttgagctttt

SEQ ID NO: 836753 - DNA, 15 bp, Homo sapiens
ttctttgagcttttt

SEQ ID NO: 836754 - DNA, 15 bp, Homo sapiens
tctttgagctttttt

SEQ ID NO: 836755 - DNA, 15 bp, Homo sapiens
ctttgagcttttttt

SEQ ID NO: 836756 - DNA, 15 bp, Homo sapiens
tttgagctttttttt

SEQ ID NO: 836757 - DNA, 15 bp, Homo sapiens
agctttttttttcca

SEQ ID NO: 836758 - DNA, 15 bp, Homo sapiens
gctttttttttccac

SEQ ID NO: 836759 - DNA, 15 bp, Homo sapiens
ctttttttttccact

SEQ ID NO: 836760 - DNA, 15 bp, Homo sapiens
tttttttttccactg

SEQ ID NO: 836761 - DNA, 15 bp, Homo sapiens
ttttttttccactgt

SEQ ID NO: 836762 - DNA, 15 bp, Homo sapiens
tttttttccactgtc

SEQ ID NO: 836763 - DNA, 15 bp, Homo sapiens
ttttttccactgtcc

SEQ ID NO: 836764 - DNA, 15 bp, Homo sapiens
tttttccactgtcca

SEQ ID NO: 836765 - DNA, 15 bp, Homo sapiens
ttttccactgtccac

SEQ ID NO: 836766 - DNA, 15 bp, Homo sapiens
tttccactgtccacc

SEQ ID NO: 836767 - DNA, 15 bp, Homo sapiens
ttccactgtccaccc

SEQ ID NO: 836768 - DNA, 15 bp, Homo sapiens
tccactgtccaccct

SEQ ID NO: 836769 - DNA, 15 bp, Homo sapiens
ccactgtccaccctg

SEQ ID NO: 836770 - DNA, 15 bp, Homo sapiens
cactgtccaccctga

SEQ ID NO: 836771 - DNA, 15 bp, Homo sapiens
actgtccaccctgac

SEQ ID NO: 836772 - DNA, 15 bp, Homo sapiens
ctgtccaccctgaca

SEQ ID NO: 836773 - DNA, 15 bp, Homo sapiens
tgtccaccctgacac

SEQ ID NO: 836774 - DNA, 15 bp, Homo sapiens
gtccaccctgacact

SEQ ID NO: 836775 - DNA, 15 bp, Homo sapiens
tccaccctgacactt

SEQ ID NO: 836776 - DNA, 15 bp, Homo sapiens
ccaccctgacacttg

SEQ ID NO: 836777 - DNA, 15 bp, Homo sapiens
caccctgacacttgg

SEQ ID NO: 836778 - DNA, 15 bp, Homo sapiens
accctgacacttggg

SEQ ID NO: 836779 - DNA, 15 bp, Homo sapiens
ccctgacacttgggc

SEQ ID NO: 836780 - DNA, 15 bp, Homo sapiens
cctgacacttgggca

SEQ ID NO: 836781 - DNA, 15 bp, Homo sapiens
ctgacacttgggcaa

SEQ ID NO: 836782 - DNA, 15 bp, Homo sapiens
tgacacttgggcaat

SEQ ID NO: 836783 - DNA, 15 bp, Homo sapiens
gacacttgggcaatt

SEQ ID NO: 836784 - DNA, 15 bp, Homo sapiens
acacttgggcaattg

SEQ ID NO: 836785 - DNA, 15 bp, Homo sapiens
cacttgggcaattgt

SEQ ID NO: 836786 - DNA, 15 bp, Homo sapiens
acttgggcaattgta

SEQ ID NO: 836787 - DNA, 15 bp, Homo sapiens
cttgggcaattgtat

SEQ ID NO: 836788 - DNA, 15 bp, Homo sapiens
ttgggcaattgtatt

SEQ ID NO: 836789 - DNA, 15 bp, Homo sapiens
tgggcaattgtatta

SEQ ID NO: 836790 - DNA, 15 bp, Homo sapiens
gggcaattgtattaa

SEQ ID NO: 836791 - DNA, 15 bp, Homo sapiens
ggcaattgtattaaa

SEQ ID NO: 836792 - DNA, 15 bp, Homo sapiens
gcaattgtattaaat

SEQ ID NO: 836793 - DNA, 15 bp, Homo sapiens
caattgtattaaatc

SEQ ID NO: 836794 - DNA, 15 bp, Homo sapiens
aattgtattaaatcg

SEQ ID NO: 836795 - DNA, 15 bp, Homo sapiens
attgtattaaatcgt

SEQ ID NO: 836796 - DNA, 15 bp, Homo sapiens
ttgtattaaatcgtt

SEQ ID NO: 836797 - DNA, 15 bp, Homo sapiens
tgtattaaatcgttt

SEQ ID NO: 836798 - DNA, 15 bp, Homo sapiens
gtattaaatcgtttc

SEQ ID NO: 836799 - DNA, 15 bp, Homo sapiens
tattaaatcgtttcc

SEQ ID NO: 836800 - DNA, 15 bp, Homo sapiens
attaaatcgtttcct

SEQ ID NO: 836801 - DNA, 15 bp, Homo sapiens
ttaaatcgtttcctc

SEQ ID NO: 836802 - DNA, 15 bp, Homo sapiens
taaatcgtttcctct

SEQ ID NO: 836803 - DNA, 15 bp, Homo sapiens
aaatcgtttcctctt

SEQ ID NO: 836804 - DNA, 15 bp, Homo sapiens
aatcgtttcctcttt

SEQ ID NO: 836805 - DNA, 15 bp, Homo sapiens
atcgtttcctctttc

SEQ ID NO: 836806 - DNA, 15 bp, Homo sapiens
tcgtttcctctttca

SEQ ID NO: 836807 - DNA, 15 bp, Homo sapiens
cgtttcctctttcat

SEQ ID NO: 836808 - DNA, 15 bp, Homo sapiens
tctttgttcctcata

SEQ ID NO: 836809 - DNA, 15 bp, Homo sapiens
ctttgttcctcatag

SEQ ID NO: 836810 - DNA, 15 bp, Homo sapiens
tttgttcctcatagt

SEQ ID NO: 836811 - DNA, 15 bp, Homo sapiens
ttgttcctcatagtg

SEQ ID NO: 836812 - DNA, 15 bp, Homo sapiens
tgttcctcatagtgg

SEQ ID NO: 836813 - DNA, 15 bp, Homo sapiens
gttcctcatagtggc

SEQ ID NO: 836814 - DNA, 15 bp, Homo sapiens
ttcctcatagtggct

SEQ ID NO: 836815 - DNA, 15 bp, Homo sapiens
tcctcatagtggctt

SEQ ID NO: 836816 - DNA, 15 bp, Homo sapiens
cctcatagtggcttc

SEQ ID NO: 836817 - DNA, 15 bp, Homo sapiens
ctcatagtggcttcc

SEQ ID NO: 836818 - DNA, 15 bp, Homo sapiens
tcatagtggcttccc

SEQ ID NO: 836819 - DNA, 15 bp, Homo sapiens
catagtggcttccca

SEQ ID NO: 836820 - DNA, 15 bp, Homo sapiens
atagtggcttcccaa

SEQ ID NO: 836821 - DNA, 15 bp, Homo sapiens
tagtggcttcccaaa

SEQ ID NO: 836822 - DNA, 15 bp, Homo sapiens
agtggcttcccaaaa

SEQ ID NO: 836823 - DNA, 15 bp, Homo sapiens
gtggcttcccaaaat

SEQ ID NO: 836824 - DNA, 15 bp, Homo sapiens
tggcttcccaaaatt

SEQ ID NO: 836825 - DNA, 15 bp, Homo sapiens
ggcttcccaaaattg

SEQ ID NO: 836826 - DNA, 15 bp, Homo sapiens
gcttcccaaaattgt

SEQ ID NO: 836827 - DNA, 15 bp, Homo sapiens
cttcccaaaattgta

SEQ ID NO: 836828 - DNA, 15 bp, Homo sapiens
ttcccaaaattgtat

SEQ ID NO: 836829 - DNA, 15 bp, Homo sapiens
tcccaaaattgtatg

SEQ ID NO: 836830 - DNA, 15 bp, Homo sapiens
cccaaaattgtatgt

SEQ ID NO: 836831 - DNA, 15 bp, Homo sapiens
ccaaaattgtatgta

SEQ ID NO: 836832 - DNA, 15 bp, Homo sapiens
caaaattgtatgtag

SEQ ID NO: 836833 - DNA, 15 bp, Homo sapiens
aaaattgtatgtagt

SEQ ID NO: 836834 - DNA, 15 bp, Homo sapiens
tgagagatggaacta

SEQ ID NO: 836835 - DNA, 15 bp, Homo sapiens
gagagatggaactag

SEQ ID NO: 836836 - DNA, 15 bp, Homo sapiens
agagatggaactagg

SEQ ID NO: 836837 - DNA, 15 bp, Homo sapiens
gagatggaactagga

SEQ ID NO: 836838 - DNA, 15 bp, Homo sapiens
agatggaactaggac

SEQ ID NO: 836839 - DNA, 15 bp, Homo sapiens
gatggaactaggact

SEQ ID NO: 836840 - DNA, 15 bp, Homo sapiens
atggaactaggactg

SEQ ID NO: 836841 - DNA, 15 bp, Homo sapiens
tggaactaggactga

SEQ ID NO: 836842 - DNA, 15 bp, Homo sapiens
ggaactaggactgaa

SEQ ID NO: 836843 - DNA, 15 bp, Homo sapiens
gaactaggactgaaa

SEQ ID NO: 836844 - DNA, 15 bp, Homo sapiens
aactaggactgaaat

SEQ ID NO: 836845 - DNA, 15 bp, Homo sapiens
actaggactgaaatc

SEQ ID NO: 836846 - DNA, 15 bp, Homo sapiens
ctaggactgaaatcc

SEQ ID NO: 836847 - DNA, 15 bp, Homo sapiens
taggactgaaatcca

SEQ ID NO: 836848 - DNA, 15 bp, Homo sapiens
aggactgaaatccat

SEQ ID NO: 836849 - DNA, 15 bp, Homo sapiens
ggactgaaatccatc

SEQ ID NO: 836850 - DNA, 15 bp, Homo sapiens
gactgaaatccatct

SEQ ID NO: 836851 - DNA, 15 bp, Homo sapiens
actgaaatccatctc

SEQ ID NO: 836852 - DNA, 15 bp, Homo sapiens
ctgaaatccatctct

SEQ ID NO: 836853 - DNA, 15 bp, Homo sapiens
tgaaatccatctctc

SEQ ID NO: 836854 - DNA, 15 bp, Homo sapiens
gaaatccatctctcc

SEQ ID NO: 836855 - DNA, 15 bp, Homo sapiens
aaatccatctctcct

SEQ ID NO: 836856 - DNA, 15 bp, Homo sapiens
aatccatctctcctg

SEQ ID NO: 836857 - DNA, 15 bp, Homo sapiens
atccatctctcctgg

SEQ ID NO: 836858 - DNA, 15 bp, Homo sapiens
tccatctctcctggt

SEQ ID NO: 836859 - DNA, 15 bp, Homo sapiens
ccatctctcctggtt

SEQ ID NO: 836860 - DNA, 15 bp, Homo sapiens
catctctcctggttt

SEQ ID NO: 836861 - DNA, 15 bp, Homo sapiens
atctctcctggtttt

SEQ ID NO: 836862 - DNA, 15 bp, Homo sapiens
tctctcctggttttc

SEQ ID NO: 836863 - DNA, 15 bp, Homo sapiens
ctctcctggttttcc

SEQ ID NO: 836864 - DNA, 15 bp, Homo sapiens
tctcctggttttcca

SEQ ID NO: 836865 - DNA, 15 bp, Homo sapiens
ctcctggttttccag

SEQ ID NO: 836866 - DNA, 15 bp, Homo sapiens
tcctggttttccagg

SEQ ID NO: 836867 - DNA, 15 bp, Homo sapiens
cctggttttccagga

SEQ ID NO: 836868 - DNA, 15 bp, Homo sapiens
ctggttttccaggac

SEQ ID NO: 836869 - DNA, 15 bp, Homo sapiens
tggttttccaggaca

SEQ ID NO: 836870 - DNA, 15 bp, Homo sapiens
ggttttccaggacag

SEQ ID NO: 836871 - DNA, 15 bp, Homo sapiens
gttttccaggacagc

SEQ ID NO: 836872 - DNA, 15 bp, Homo sapiens
ttttccaggacagcg

SEQ ID NO: 836873 - DNA, 15 bp, Homo sapiens
tttccaggacagcgt

SEQ ID NO: 836874 - DNA, 15 bp, Homo sapiens
ttccaggacagcgta

SEQ ID NO: 836875 - DNA, 15 bp, Homo sapiens
tccaggacagcgtat

SEQ ID NO: 836876 - DNA, 15 bp, Homo sapiens
ccaggacagcgtatt

SEQ ID NO: 836877 - DNA, 15 bp, Homo sapiens
caggacagcgtattt

SEQ ID NO: 836878 - DNA, 15 bp, Homo sapiens
aggacagcgtatttc

SEQ ID NO: 836879 - DNA, 15 bp, Homo sapiens
ggacagcgtatttcc

SEQ ID NO: 836880 - DNA, 15 bp, Homo sapiens
gacagcgtatttcca

SEQ ID NO: 836881 - DNA, 15 bp, Homo sapiens
acagcgtatttccag

SEQ ID NO: 836882 - DNA, 15 bp, Homo sapiens
cagcgtatttccagt

SEQ ID NO: 836883 - DNA, 15 bp, Homo sapiens
agcgtatttccagtt

SEQ ID NO: 836884 - DNA, 15 bp, Homo sapiens
gcgtatttccagttc

SEQ ID NO: 836885 - DNA, 15 bp, Homo sapiens
cgtatttccagttcc

SEQ ID NO: 836886 - DNA, 15 bp, Homo sapiens
gtatttccagttcct

SEQ ID NO: 836887 - DNA, 15 bp, Homo sapiens
tatttccagttcctt

SEQ ID NO: 836888 - DNA, 15 bp, Homo sapiens
atttccagttccttc

SEQ ID NO: 836889 - DNA, 15 bp, Homo sapiens
tttccagttccttct

SEQ ID NO: 836890 - DNA, 15 bp, Homo sapiens
ttccagttccttctc

SEQ ID NO: 836891 - DNA, 15 bp, Homo sapiens
tccagttccttctcc

SEQ ID NO: 836892 - DNA, 15 bp, Homo sapiens
ccagttccttctcca

SEQ ID NO: 836893 - DNA, 15 bp, Homo sapiens
cagttccttctccat

SEQ ID NO: 836894 - DNA, 15 bp, Homo sapiens
agttccttctccatg

SEQ ID NO: 836895 - DNA, 15 bp, Homo sapiens
gttccttctccatga

SEQ ID NO: 836896 - DNA, 15 bp, Homo sapiens
ttccttctccatgag

SEQ ID NO: 836897 - DNA, 15 bp, Homo sapiens
tccttctccatgaga

SEQ ID NO: 836898 - DNA, 15 bp, Homo sapiens
ccttctccatgagag

SEQ ID NO: 836899 - DNA, 15 bp, Homo sapiens
cttctccatgagagg

SEQ ID NO: 836900 - DNA, 15 bp, Homo sapiens
ttctccatgagagga

SEQ ID NO: 836901 - DNA, 15 bp, Homo sapiens
tctccatgagaggag

SEQ ID NO: 836902 - DNA, 15 bp, Homo sapiens
ctccatgagaggagg

SEQ ID NO: 836903 - DNA, 15 bp, Homo sapiens
tccatgagaggaggg

SEQ ID NO: 836904 - DNA, 15 bp, Homo sapiens
ccatgagaggaggga

SEQ ID NO: 836905 - DNA, 15 bp, Homo sapiens
catgagaggagggag

SEQ ID NO: 836906 - DNA, 15 bp, Homo sapiens
atgagaggagggagg

SEQ ID NO: 836907 - DNA, 15 bp, Homo sapiens
tgagaggagggaggg

SEQ ID NO: 836908 - DNA, 15 bp, Homo sapiens
gagaggagggagggg

SEQ ID NO: 836909 - DNA, 15 bp, Homo sapiens
agaggagggaggggt

SEQ ID NO: 836910 - DNA, 15 bp, Homo sapiens
gaggagggaggggtg

SEQ ID NO: 836911 - DNA, 15 bp, Homo sapiens
aggagggaggggtgg

SEQ ID NO: 836912 - DNA, 15 bp, Homo sapiens
ggagggaggggtggt

SEQ ID NO: 836913 - DNA, 15 bp, Homo sapiens
gagggaggggtggtg

SEQ ID NO: 836914 - DNA, 15 bp, Homo sapiens
agggaggggtggtga

SEQ ID NO: 836915 - DNA, 15 bp, Homo sapiens
gggaggggtggtgaa

SEQ ID NO: 836916 - DNA, 15 bp, Homo sapiens
ggaggggtggtgaag

SEQ ID NO: 836917 - DNA, 15 bp, Homo sapiens
gaggggtggtgaagt

SEQ ID NO: 836918 - DNA, 15 bp, Homo sapiens
aggggtggtgaagta

SEQ ID NO: 836919 - DNA, 15 bp, Homo sapiens
gggtggtgaagtagc

SEQ ID NO: 836920 - DNA, 15 bp, Homo sapiens
ggtggtgaagtagca

SEQ ID NO: 836921 - DNA, 15 bp, Homo sapiens
gtggtgaagtagcag

SEQ ID NO: 836922 - DNA, 15 bp, Homo sapiens
tggtgaagtagcaga

SEQ ID NO: 836923 - DNA, 15 bp, Homo sapiens
ggtgaagtagcagaa

SEQ ID NO: 836924 - DNA, 15 bp, Homo sapiens
gtgaagtagcagaaa

SEQ ID NO: 836925 - DNA, 15 bp, Homo sapiens
tgaagtagcagaaat

SEQ ID NO: 836926 - DNA, 15 bp, Homo sapiens
gaagtagcagaaatg

SEQ ID NO: 836927 - DNA, 15 bp, Homo sapiens
aagtagcagaaatga

SEQ ID NO: 836928 - DNA, 15 bp, Homo sapiens
agtagcagaaatgaa

SEQ ID NO: 836929 - DNA, 15 bp, Homo sapiens
gtagcagaaatgaag

SEQ ID NO: 836930 - DNA, 15 bp, Homo sapiens
tagcagaaatgaagg

SEQ ID NO: 836931 - DNA, 15 bp, Homo sapiens
agcagaaatgaaggg

SEQ ID NO: 836932 - DNA, 15 bp, Homo sapiens
gcagaaatgaagggc

SEQ ID NO: 836933 - DNA, 15 bp, Homo sapiens
cagaaatgaagggca

SEQ ID NO: 836934 - DNA, 15 bp, Homo sapiens
agaaatgaagggcag

SEQ ID NO: 836935 - DNA, 15 bp, Homo sapiens
gaaatgaagggcagc

SEQ ID NO: 836936 - DNA, 15 bp, Homo sapiens
aaatgaagggcagcc

SEQ ID NO: 836937 - DNA, 15 bp, Homo sapiens
aatgaagggcagcca

SEQ ID NO: 836938 - DNA, 15 bp, Homo sapiens
atgaagggcagccag

SEQ ID NO: 836939 - DNA, 15 bp, Homo sapiens
tgaagggcagccagg

SEQ ID NO: 836940 - DNA, 15 bp, Homo sapiens
gaagggcagccaggt

SEQ ID NO: 836941 - DNA, 15 bp, Homo sapiens
aagggcagccaggtc

SEQ ID NO: 836942 - DNA, 15 bp, Homo sapiens
agggcagccaggtct

SEQ ID NO: 836943 - DNA, 15 bp, Homo sapiens
gggcagccaggtctg

SEQ ID NO: 836944 - DNA, 15 bp, Homo sapiens
ggcagccaggtctgc

SEQ ID NO: 836945 - DNA, 15 bp, Homo sapiens
gcagccaggtctgcc

SEQ ID NO: 836946 - DNA, 15 bp, Homo sapiens
cagccaggtctgcca

SEQ ID NO: 836947 - DNA, 15 bp, Homo sapiens
agccaggtctgccag

SEQ ID NO: 836948 - DNA, 15 bp, Homo sapiens
gccaggtctgccaga

SEQ ID NO: 836949 - DNA, 15 bp, Homo sapiens
ccaggtctgccagac

SEQ ID NO: 836950 - DNA, 15 bp, Homo sapiens
caggtctgccagacc

SEQ ID NO: 836951 - DNA, 15 bp, Homo sapiens
aggtctgccagacct

SEQ ID NO: 836952 - DNA, 15 bp, Homo sapiens
ggtctgccagacctg

SEQ ID NO: 836953 - DNA, 15 bp, Homo sapiens
gtctgccagacctgc

SEQ ID NO: 836954 - DNA, 15 bp, Homo sapiens
tctgccagacctgct

SEQ ID NO: 836955 - DNA, 15 bp, Homo sapiens
ctgccagacctgctc

SEQ ID NO: 836956 - DNA, 15 bp, Homo sapiens
tgccagacctgctct

SEQ ID NO: 836957 - DNA, 15 bp, Homo sapiens
gccagacctgctctt

SEQ ID NO: 836958 - DNA, 15 bp, Homo sapiens
ccagacctgctcttt

SEQ ID NO: 836959 - DNA, 15 bp, Homo sapiens
cagacctgctcttta

SEQ ID NO: 836960 - DNA, 15 bp, Homo sapiens
agacctgctctttat

SEQ ID NO: 836961 - DNA, 15 bp, Homo sapiens
gacctgctctttata

SEQ ID NO: 836962 - DNA, 15 bp, Homo sapiens
acctgctctttatat

SEQ ID NO: 836963 - DNA, 15 bp, Homo sapiens
cctgctctttatatt

SEQ ID NO: 836964 - DNA, 15 bp, Homo sapiens
ctgctctttatattc

SEQ ID NO: 836965 - DNA, 15 bp, Homo sapiens
tgctctttatattct

SEQ ID NO: 836966 - DNA, 15 bp, Homo sapiens
gctctttatattctc

SEQ ID NO: 836967 - DNA, 15 bp, Homo sapiens
ctctttatattctcc

SEQ ID NO: 836968 - DNA, 15 bp, Homo sapiens
tctttatattctcca

SEQ ID NO: 836969 - DNA, 15 bp, Homo sapiens
ctttatattctccaa

SEQ ID NO: 836970 - DNA, 15 bp, Homo sapiens
tttatattctccaag

SEQ ID NO: 836971 - DNA, 15 bp, Homo sapiens
ttatattctccaagt

SEQ ID NO: 836972 - DNA, 15 bp, Homo sapiens
tatattctccaagtt

SEQ ID NO: 836973 - DNA, 15 bp, Homo sapiens
atattctccaagtta

SEQ ID NO: 836974 - DNA, 15 bp, Homo sapiens
tattctccaagttag

SEQ ID NO: 836975 - DNA, 15 bp, Homo sapiens
attctccaagttagg

SEQ ID NO: 836976 - DNA, 15 bp, Homo sapiens
ttctccaagttaggg

SEQ ID NO: 836977 - DNA, 15 bp, Homo sapiens
tctccaagttaggga

SEQ ID NO: 836978 - DNA, 15 bp, Homo sapiens
ctccaagttagggag

SEQ ID NO: 836979 - DNA, 15 bp, Homo sapiens
tccaagttagggaga

SEQ ID NO: 836980 - DNA, 15 bp, Homo sapiens
ccaagttagggagag

SEQ ID NO: 836981 - DNA, 15 bp, Homo sapiens
caagttagggagaga

SEQ ID NO: 836982 - DNA, 15 bp, Homo sapiens
aagttagggagagag

SEQ ID NO: 836983 - DNA, 15 bp, Homo sapiens
agttagggagagagg

SEQ ID NO: 836984 - DNA, 15 bp, Homo sapiens
gttagggagagagga

SEQ ID NO: 836985 - DNA, 15 bp, Homo sapiens
ttagggagagaggat

SEQ ID NO: 836986 - DNA, 15 bp, Homo sapiens
tagggagagaggatt

SEQ ID NO: 836987 - DNA, 15 bp, Homo sapiens
agggagagaggattt

SEQ ID NO: 836988 - DNA, 15 bp, Homo sapiens
gggagagaggatttg

SEQ ID NO: 836989 - DNA, 15 bp, Homo sapiens
ggagagaggatttgc

SEQ ID NO: 836990 - DNA, 15 bp, Homo sapiens
gagagaggatttgcc

SEQ ID NO: 836991 - DNA, 15 bp, Homo sapiens
agagaggatttgcct

SEQ ID NO: 836992 - DNA, 15 bp, Homo sapiens
gagaggatttgcctc

SEQ ID NO: 836993 - DNA, 15 bp, Homo sapiens
agaggatttgcctcc

SEQ ID NO: 836994 - DNA, 15 bp, Homo sapiens
gaggatttgcctcca

SEQ ID NO: 836995 - DNA, 15 bp, Homo sapiens
aggatttgcctccag

SEQ ID NO: 836996 - DNA, 15 bp, Homo sapiens
ggatttgcctccaga

SEQ ID NO: 836997 - DNA, 15 bp, Homo sapiens
gatttgcctccagac

SEQ ID NO: 836998 - DNA, 15 bp, Homo sapiens
atttgcctccagact

SEQ ID NO: 836999 - DNA, 15 bp, Homo sapiens
tttgcctccagactt

SEQ ID NO: 837000 - DNA, 15 bp, Homo sapiens
ttgcctccagacttc

SEQ ID NO: 837001 - DNA, 15 bp, Homo sapiens
tgcctccagacttct

SEQ ID NO: 837002 - DNA, 15 bp, Homo sapiens
gcctccagacttctg

SEQ ID NO: 837003 - DNA, 15 bp, Homo sapiens
cctccagacttctgg

SEQ ID NO: 837004 - DNA, 15 bp, Homo sapiens
ctccagacttctggg

SEQ ID NO: 837005 - DNA, 15 bp, Homo sapiens
tccagacttctgggc

SEQ ID NO: 837006 - DNA, 15 bp, Homo sapiens
ccagacttctgggca

SEQ ID NO: 837007 - DNA, 15 bp, Homo sapiens
cagacttctgggcac

SEQ ID NO: 837008 - DNA, 15 bp, Homo sapiens
agacttctgggcact

SEQ ID NO: 837009 - DNA, 15 bp, Homo sapiens
gacttctgggcacta

SEQ ID NO: 837010 - DNA, 15 bp, Homo sapiens
acttctgggcactaa

SEQ ID NO: 837011 - DNA, 15 bp, Homo sapiens
cttctgggcactaac

SEQ ID NO: 837012 - DNA, 15 bp, Homo sapiens
ttctgggcactaaca

SEQ ID NO: 837013 - DNA, 15 bp, Homo sapiens
tctgggcactaacac

SEQ ID NO: 837014 - DNA, 15 bp, Homo sapiens
ctgggcactaacact

SEQ ID NO: 837015 - DNA, 15 bp, Homo sapiens
tgggcactaacactg

SEQ ID NO: 837016 - DNA, 15 bp, Homo sapiens
gggcactaacactgg

SEQ ID NO: 837017 - DNA, 15 bp, Homo sapiens
ggcactaacactggc

SEQ ID NO: 837018 - DNA, 15 bp, Homo sapiens
gcactaacactggca

SEQ ID NO: 837019 - DNA, 15 bp, Homo sapiens
cactaacactggcat

SEQ ID NO: 837020 - DNA, 15 bp, Homo sapiens
actaacactggcatt

SEQ ID NO: 837021 - DNA, 15 bp, Homo sapiens
ctaacactggcattt

SEQ ID NO: 837022 - DNA, 15 bp, Homo sapiens
taacactggcatttt

SEQ ID NO: 837023 - DNA, 15 bp, Homo sapiens
aacactggcattttt

SEQ ID NO: 837024 - DNA, 15 bp, Homo sapiens
acactggcatttttc

SEQ ID NO: 837025 - DNA, 15 bp, Homo sapiens
cactggcatttttca

SEQ ID NO: 837026 - DNA, 15 bp, Homo sapiens
actggcatttttcat

SEQ ID NO: 837027 - DNA, 15 bp, Homo sapiens
ctggcatttttcatc

SEQ ID NO: 837028 - DNA, 15 bp, Homo sapiens
tggcatttttcatca

SEQ ID NO: 837029 - DNA, 15 bp, Homo sapiens
ggcatttttcatcag

SEQ ID NO: 837030 - DNA, 15 bp, Homo sapiens
gcatttttcatcaga

SEQ ID NO: 837031 - DNA, 15 bp, Homo sapiens
catttttcatcagac

SEQ ID NO: 837032 - DNA, 15 bp, Homo sapiens
atttttcatcagact

SEQ ID NO: 837033 - DNA, 15 bp, Homo sapiens
tttttcatcagactc

SEQ ID NO: 837034 - DNA, 15 bp, Homo sapiens
ttttcatcagactca

SEQ ID NO: 837035 - DNA, 15 bp, Homo sapiens
tttcatcagactcaa

SEQ ID NO: 837036 - DNA, 15 bp, Homo sapiens
ttcatcagactcaat

SEQ ID NO: 837037 - DNA, 15 bp, Homo sapiens
tcatcagactcaatt

SEQ ID NO: 837038 - DNA, 15 bp, Homo sapiens
catcagactcaattt

SEQ ID NO: 837039 - DNA, 15 bp, Homo sapiens
atcagactcaattta

SEQ ID NO: 837040 - DNA, 15 bp, Homo sapiens
tcagactcaatttac

SEQ ID NO: 837041 - DNA, 15 bp, Homo sapiens
cagactcaatttact

SEQ ID NO: 837042 - DNA, 15 bp, Homo sapiens
agactcaatttactt

SEQ ID NO: 837043 - DNA, 15 bp, Homo sapiens
gactcaatttacttc

SEQ ID NO: 837044 - DNA, 15 bp, Homo sapiens
actcaatttacttca

SEQ ID NO: 837045 - DNA, 15 bp, Homo sapiens
ctcaatttacttcaa

SEQ ID NO: 837046 - DNA, 15 bp, Homo sapiens
tcaatttacttcaaa

SEQ ID NO: 837047 - DNA, 15 bp, Homo sapiens
caatttacttcaaat

SEQ ID NO: 837048 - DNA, 15 bp, Homo sapiens
aatttacttcaaatg

SEQ ID NO: 837049 - DNA, 15 bp, Homo sapiens
atttacttcaaatgg

SEQ ID NO: 837050 - DNA, 15 bp, Homo sapiens
tttacttcaaatgga

SEQ ID NO: 837051 - DNA, 15 bp, Homo sapiens
ttacttcaaatggaa

SEQ ID NO: 837052 - DNA, 15 bp, Homo sapiens
tacttcaaatggaaa

SEQ ID NO: 837053 - DNA, 15 bp, Homo sapiens
acttcaaatggaaaa

SEQ ID NO: 837054 - DNA, 15 bp, Homo sapiens
cttcaaatggaaaag

SEQ ID NO: 837055 - DNA, 15 bp, Homo sapiens
ttcaaatggaaaagg

SEQ ID NO: 837056 - DNA, 15 bp, Homo sapiens
aaatggaaaaggacg

SEQ ID NO: 837057 - DNA, 15 bp, Homo sapiens
aatggaaaaggacga

SEQ ID NO: 837058 - DNA, 15 bp, Homo sapiens
atggaaaaggacgaa

SEQ ID NO: 837059 - DNA, 15 bp, Homo sapiens
tggaaaaggacgaag

SEQ ID NO: 837060 - DNA, 15 bp, Homo sapiens
ggaaaaggacgaagt

SEQ ID NO: 837061 - DNA, 15 bp, Homo sapiens
gaaaaggacgaagtt

SEQ ID NO: 837062 - DNA, 15 bp, Homo sapiens
aaaaggacgaagttt

SEQ ID NO: 837063 - DNA, 15 bp, Homo sapiens
aaaggacgaagtttc

SEQ ID NO: 837064 - DNA, 15 bp, Homo sapiens
aaggacgaagtttcc

SEQ ID NO: 837065 - DNA, 15 bp, Homo sapiens
aggacgaagtttcca

SEQ ID NO: 837066 - DNA, 15 bp, Homo sapiens
ggacgaagtttccag

SEQ ID NO: 837067 - DNA, 15 bp, Homo sapiens
gacgaagtttccaga

SEQ ID NO: 837068 - DNA, 15 bp, Homo sapiens
acgaagtttccagaa

SEQ ID NO: 837069 - DNA, 15 bp, Homo sapiens
cgaagtttccagaaa

SEQ ID NO: 837070 - DNA, 15 bp, Homo sapiens
gaagtttccagaaac

SEQ ID NO: 837071 - DNA, 15 bp, Homo sapiens
aagtttccagaaaca

SEQ ID NO: 837072 - DNA, 15 bp, Homo sapiens
agtttccagaaacaa

SEQ ID NO: 837073 - DNA, 15 bp, Homo sapiens
gtttccagaaacaaa

SEQ ID NO: 837074 - DNA, 15 bp, Homo sapiens
tttccagaaacaaag

SEQ ID NO: 837075 - DNA, 15 bp, Homo sapiens
ttccagaaacaaagg

SEQ ID NO: 837076 - DNA, 15 bp, Homo sapiens
tccagaaacaaagga

SEQ ID NO: 837077 - DNA, 15 bp, Homo sapiens
ccagaaacaaaggat

SEQ ID NO: 837078 - DNA, 15 bp, Homo sapiens
cagaaacaaaggatt

SEQ ID NO: 837079 - DNA, 15 bp, Homo sapiens
agaaacaaaggattt

SEQ ID NO: 837080 - DNA, 15 bp, Homo sapiens
gaaacaaaggattta

SEQ ID NO: 837081 - DNA, 15 bp, Homo sapiens
aaacaaaggatttat

SEQ ID NO: 837082 - DNA, 15 bp, Homo sapiens
aacaaaggatttatg

SEQ ID NO: 837083 - DNA, 15 bp, Homo sapiens
acaaaggatttatgt

SEQ ID NO: 837084 - DNA, 15 bp, Homo sapiens
caaaggatttatgtt

SEQ ID NO: 837085 - DNA, 15 bp, Homo sapiens
aaaggatttatgttc

SEQ ID NO: 837086 - DNA, 15 bp, Homo sapiens
aaggatttatgttcc

SEQ ID NO: 837087 - DNA, 15 bp, Homo sapiens
aggatttatgttcct

SEQ ID NO: 837088 - DNA, 15 bp, Homo sapiens
ggatttatgttcctg

SEQ ID NO: 837089 - DNA, 15 bp, Homo sapiens
gatttatgttcctgg

SEQ ID NO: 837090 - DNA, 15 bp, Homo sapiens
atttatgttcctggg

SEQ ID NO: 837091 - DNA, 15 bp, Homo sapiens
tttatgttcctgggt

SEQ ID NO: 837092 - DNA, 15 bp, Homo sapiens
ttatgttcctgggtc

SEQ ID NO: 837093 - DNA, 15 bp, Homo sapiens
tatgttcctgggtca

SEQ ID NO: 837094 - DNA, 15 bp, Homo sapiens
atgttcctgggtcag

SEQ ID NO: 837095 - DNA, 15 bp, Homo sapiens
tgttcctgggtcagt

SEQ ID NO: 837096 - DNA, 15 bp, Homo sapiens
gttcctgggtcagtc

SEQ ID NO: 837097 - DNA, 15 bp, Homo sapiens
ttcctgggtcagtct

SEQ ID NO: 837098 - DNA, 15 bp, Homo sapiens
tcctgggtcagtctc

SEQ ID NO: 837099 - DNA, 15 bp, Homo sapiens
cctgggtcagtctct

SEQ ID NO: 837100 - DNA, 15 bp, Homo sapiens
ctgggtcagtctctt

SEQ ID NO: 837101 - DNA, 15 bp, Homo sapiens
tgggtcagtctcttc

SEQ ID NO: 837102 - DNA, 15 bp, Homo sapiens
gggtcagtctcttct

SEQ ID NO: 837103 - DNA, 15 bp, Homo sapiens
ggtcagtctcttctc

SEQ ID NO: 837104 - DNA, 15 bp, Homo sapiens
gtcagtctcttctct

SEQ ID NO: 837105 - DNA, 15 bp, Homo sapiens
tcagtctcttctctt

SEQ ID NO: 837106 - DNA, 15 bp, Homo sapiens
cagtctcttctcttt

SEQ ID NO: 837107 - DNA, 15 bp, Homo sapiens
agtctcttctctttg

SEQ ID NO: 837108 - DNA, 15 bp, Homo sapiens
gtctcttctctttgt

SEQ ID NO: 837109 - DNA, 15 bp, Homo sapiens
tctcttctctttgtt

SEQ ID NO: 837110 - DNA, 15 bp, Homo sapiens
ctcttctctttgttt

SEQ ID NO: 837111 - DNA, 15 bp, Homo sapiens
tcttctctttgtttc

SEQ ID NO: 837112 - DNA, 15 bp, Homo sapiens
cttctctttgtttca

SEQ ID NO: 837113 - DNA, 15 bp, Homo sapiens
ttctctttgtttcat

SEQ ID NO: 837114 - DNA, 15 bp, Homo sapiens
tctctttgtttcatg

SEQ ID NO: 837115 - DNA, 15 bp, Homo sapiens
ctctttgtttcatgc

SEQ ID NO: 837116 - DNA, 15 bp, Homo sapiens
ctttgtttcatgcac

SEQ ID NO: 837117 - DNA, 15 bp, Homo sapiens
tttgtttcatgcaca

SEQ ID NO: 837118 - DNA, 15 bp, Homo sapiens
ttgtttcatgcacag

SEQ ID NO: 837119 - DNA, 15 bp, Homo sapiens
tgtttcatgcacaga

SEQ ID NO: 837120 - DNA, 15 bp, Homo sapiens
gtttcatgcacagag

SEQ ID NO: 837121 - DNA, 15 bp, Homo sapiens
tttcatgcacagaga

SEQ ID NO: 837122 - DNA, 15 bp, Homo sapiens
ttcatgcacagagat

SEQ ID NO: 837123 - DNA, 15 bp, Homo sapiens
tcatgcacagagatt

SEQ ID NO: 837124 - DNA, 15 bp, Homo sapiens
catgcacagagattt

SEQ ID NO: 837125 - DNA, 15 bp, Homo sapiens
atgcacagagatttc

SEQ ID NO: 837126 - DNA, 15 bp, Homo sapiens
tgcacagagatttcc

SEQ ID NO: 837127 - DNA, 15 bp, Homo sapiens
gcacagagatttccc

SEQ ID NO: 837128 - DNA, 15 bp, Homo sapiens
cacagagatttccct

SEQ ID NO: 837129 - DNA, 15 bp, Homo sapiens
acagagatttccctc

SEQ ID NO: 837130 - DNA, 15 bp, Homo sapiens
cagagatttccctcc

SEQ ID NO: 837131 - DNA, 15 bp, Homo sapiens
agagatttccctcca

SEQ ID NO: 837132 - DNA, 15 bp, Homo sapiens
gagatttccctccaa

SEQ ID NO: 837133 - DNA, 15 bp, Homo sapiens
agatttccctccaag

SEQ ID NO: 837134 - DNA, 15 bp, Homo sapiens
gatttccctccaagc

SEQ ID NO: 837135 - DNA, 15 bp, Homo sapiens
atttccctccaagca

SEQ ID NO: 837136 - DNA, 15 bp, Homo sapiens
tttccctccaagcat

SEQ ID NO: 837137 - DNA, 15 bp, Homo sapiens
ttccctccaagcatt

SEQ ID NO: 837138 - DNA, 15 bp, Homo sapiens
tccctccaagcattc

SEQ ID NO: 837139 - DNA, 15 bp, Homo sapiens
ccctccaagcattca

SEQ ID NO: 837140 - DNA, 15 bp, Homo sapiens
cctccaagcattcag

SEQ ID NO: 837141 - DNA, 15 bp, Homo sapiens
ctccaagcattcagc

SEQ ID NO: 837142 - DNA, 15 bp, Homo sapiens
tccaagcattcagca

SEQ ID NO: 837143 - DNA, 15 bp, Homo sapiens
ccaagcattcagcag

SEQ ID NO: 837144 - DNA, 15 bp, Homo sapiens
caagcattcagcagg

SEQ ID NO: 837145 - DNA, 15 bp, Homo sapiens
aagcattcagcaggt

SEQ ID NO: 837146 - DNA, 15 bp, Homo sapiens
agcattcagcaggtc

SEQ ID NO: 837147 - DNA, 15 bp, Homo sapiens
gcattcagcaggtca

SEQ ID NO: 837148 - DNA, 15 bp, Homo sapiens
cattcagcaggtcac

SEQ ID NO: 837149 - DNA, 15 bp, Homo sapiens
attcagcaggtcacc

SEQ ID NO: 837150 - DNA, 15 bp, Homo sapiens
ttcagcaggtcaccc

SEQ ID NO: 837151 - DNA, 15 bp, Homo sapiens
tcagcaggtcaccct

SEQ ID NO: 837152 - DNA, 15 bp, Homo sapiens
cagcaggtcaccctc

SEQ ID NO: 837153 - DNA, 15 bp, Homo sapiens
agcaggtcaccctca

SEQ ID NO: 837154 - DNA, 15 bp, Homo sapiens
gcaggtcaccctcac

SEQ ID NO: 837155 - DNA, 15 bp, Homo sapiens
caggtcaccctcact

SEQ ID NO: 837156 - DNA, 15 bp, Homo sapiens
aggtcaccctcactc

SEQ ID NO: 837157 - DNA, 15 bp, Homo sapiens
ggtcaccctcactcc

SEQ ID NO: 837158 - DNA, 15 bp, Homo sapiens
gtcaccctcactcct

SEQ ID NO: 837159 - DNA, 15 bp, Homo sapiens
tcaccctcactcctt

SEQ ID NO: 837160 - DNA, 15 bp, Homo sapiens
caccctcactccttc

SEQ ID NO: 837161 - DNA, 15 bp, Homo sapiens
accctcactccttcc

SEQ ID NO: 837162 - DNA, 15 bp, Homo sapiens
ccctcactccttccc

SEQ ID NO: 837163 - DNA, 15 bp, Homo sapiens
cctcactccttccct

SEQ ID NO: 837164 - DNA, 15 bp, Homo sapiens
ctcactccttccctg

SEQ ID NO: 837165 - DNA, 15 bp, Homo sapiens
tcactccttccctgc

SEQ ID NO: 837166 - DNA, 15 bp, Homo sapiens
cactccttccctgcg

SEQ ID NO: 837167 - DNA, 15 bp, Homo sapiens
actccttccctgcgt

SEQ ID NO: 837168 - DNA, 15 bp, Homo sapiens
ctccttccctgcgtt

SEQ ID NO: 837169 - DNA, 15 bp, Homo sapiens
tccttccctgcgttg

SEQ ID NO: 837170 - DNA, 15 bp, Homo sapiens
ccttccctgcgttgg

SEQ ID NO: 837171 - DNA, 15 bp, Homo sapiens
cttccctgcgttgga

SEQ ID NO: 837172 - DNA, 15 bp, Homo sapiens
ttccctgcgttggag

SEQ ID NO: 837173 - DNA, 15 bp, Homo sapiens
tccctgcgttggaga

SEQ ID NO: 837174 - DNA, 15 bp, Homo sapiens
ccctgcgttggagaa

SEQ ID NO: 837175 - DNA, 15 bp, Homo sapiens
cctgcgttggagaaa

SEQ ID NO: 837176 - DNA, 15 bp, Homo sapiens
ctgcgttggagaaaa

SEQ ID NO: 837177 - DNA, 15 bp, Homo sapiens
tgcgttggagaaaat

SEQ ID NO: 837178 - DNA, 15 bp, Homo sapiens
gcgttggagaaaata

SEQ ID NO: 837179 - DNA, 15 bp, Homo sapiens
cgttggagaaaatat

SEQ ID NO: 837180 - DNA, 15 bp, Homo sapiens
gttggagaaaatata

SEQ ID NO: 837181 - DNA, 15 bp, Homo sapiens
ttggagaaaatataa

SEQ ID NO: 837182 - DNA, 15 bp, Homo sapiens
tggagaaaatataat

SEQ ID NO: 837183 - DNA, 15 bp, Homo sapiens
ggagaaaatataata

SEQ ID NO: 837184 - DNA, 15 bp, Homo sapiens
gagaaaatataatat

SEQ ID NO: 837185 - DNA, 15 bp, Homo sapiens
agaaaatataatatc

SEQ ID NO: 837186 - DNA, 15 bp, Homo sapiens
gaaaatataatatcc

SEQ ID NO: 837187 - DNA, 15 bp, Homo sapiens
aaaatataatatcca

SEQ ID NO: 837188 - DNA, 15 bp, Homo sapiens
aaatataatatccaa

SEQ ID NO: 837189 - DNA, 15 bp, Homo sapiens
aatataatatccaaa

SEQ ID NO: 837190 - DNA, 15 bp, Homo sapiens
atataatatccaaaa

SEQ ID NO: 837191 - DNA, 15 bp, Homo sapiens
tataatatccaaaaa

SEQ ID NO: 837192 - DNA, 15 bp, Homo sapiens
ataatatccaaaaaa

SEQ ID NO: 837193 - DNA, 15 bp, Homo sapiens
taatatccaaaaaaa

SEQ ID NO: 837194 - DNA, 15 bp, Homo sapiens
aatatccaaaaaaag

SEQ ID NO: 837195 - DNA, 15 bp, Homo sapiens
atatccaaaaaaaga

SEQ ID NO: 837196 - DNA, 15 bp, Homo sapiens
tatccaaaaaaagag

SEQ ID NO: 837197 - DNA, 15 bp, Homo sapiens
atccaaaaaaagagg

SEQ ID NO: 837198 - DNA, 15 bp, Homo sapiens
tccaaaaaaagaggg

SEQ ID NO: 837199 - DNA, 15 bp, Homo sapiens
ccaaaaaaagagggc

SEQ ID NO: 837200 - DNA, 15 bp, Homo sapiens
caaaaaaagagggca

SEQ ID NO: 837201 - DNA, 15 bp, Homo sapiens
aaaaaaagagggcac

SEQ ID NO: 837202 - DNA, 15 bp, Homo sapiens
aaaaaagagggcaca

SEQ ID NO: 837203 - DNA, 15 bp, Homo sapiens
aaaaagagggcacag

SEQ ID NO: 837204 - DNA, 15 bp, Homo sapiens
aaaagagggcacaga

SEQ ID NO: 837205 - DNA, 15 bp, Homo sapiens
aaagagggcacagaa

SEQ ID NO: 837206 - DNA, 15 bp, Homo sapiens
aagagggcacagaac

SEQ ID NO: 837207 - DNA, 15 bp, Homo sapiens
agagggcacagaacc

SEQ ID NO: 837208 - DNA, 15 bp, Homo sapiens
gagggcacagaaccc

SEQ ID NO: 837209 - DNA, 15 bp, Homo sapiens
agggcacagaaccct

SEQ ID NO: 837210 - DNA, 15 bp, Homo sapiens
gggcacagaaccctg

SEQ ID NO: 837211 - DNA, 15 bp, Homo sapiens
ggcacagaaccctga

SEQ ID NO: 837212 - DNA, 15 bp, Homo sapiens
gcacagaaccctgag

SEQ ID NO: 837213 - DNA, 15 bp, Homo sapiens
cacagaaccctgaga

SEQ ID NO: 837214 - DNA, 15 bp, Homo sapiens
acagaaccctgagat

SEQ ID NO: 837215 - DNA, 15 bp, Homo sapiens
cagaaccctgagata

SEQ ID NO: 837216 - DNA, 15 bp, Homo sapiens
agaaccctgagataa

SEQ ID NO: 837217 - DNA, 15 bp, Homo sapiens
gaaccctgagataag

SEQ ID NO: 837218 - DNA, 15 bp, Homo sapiens
aaccctgagataagg

SEQ ID NO: 837219 - DNA, 15 bp, Homo sapiens
accctgagataagga

SEQ ID NO: 837220 - DNA, 15 bp, Homo sapiens
ccctgagataaggaa

SEQ ID NO: 837221 - DNA, 15 bp, Homo sapiens
cctgagataaggaac

SEQ ID NO: 837222 - DNA, 15 bp, Homo sapiens
ctgagataaggaaca

SEQ ID NO: 837223 - DNA, 15 bp, Homo sapiens
tgagataaggaacaa

SEQ ID NO: 837224 - DNA, 15 bp, Homo sapiens
gagataaggaacaaa

SEQ ID NO: 837225 - DNA, 15 bp, Homo sapiens
agataaggaacaaac

SEQ ID NO: 837226 - DNA, 15 bp, Homo sapiens
gataaggaacaaact

SEQ ID NO: 837227 - DNA, 15 bp, Homo sapiens
ataaggaacaaactc

SEQ ID NO: 837228 - DNA, 15 bp, Homo sapiens
taaggaacaaactca

SEQ ID NO: 837229 - DNA, 15 bp, Homo sapiens
aaggaacaaactcaa

SEQ ID NO: 837230 - DNA, 15 bp, Homo sapiens
aggaacaaactcaac

SEQ ID NO: 837231 - DNA, 15 bp, Homo sapiens
ggaacaaactcaact

SEQ ID NO: 837232 - DNA, 15 bp, Homo sapiens
gaacaaactcaactt

SEQ ID NO: 837233 - DNA, 15 bp, Homo sapiens
aacaaactcaacttt

SEQ ID NO: 837234 - DNA, 15 bp, Homo sapiens
acaaactcaactttt

SEQ ID NO: 837235 - DNA, 15 bp, Homo sapiens
caaactcaacttttc

SEQ ID NO: 837236 - DNA, 15 bp, Homo sapiens
aaactcaacttttct

SEQ ID NO: 837237 - DNA, 15 bp, Homo sapiens
aactcaacttttcta

SEQ ID NO: 837238 - DNA, 15 bp, Homo sapiens
actcaacttttctat

SEQ ID NO: 837239 - DNA, 15 bp, Homo sapiens
ctcaacttttctata

SEQ ID NO: 837240 - DNA, 15 bp, Homo sapiens
tcaacttttctatat

SEQ ID NO: 837241 - DNA, 15 bp, Homo sapiens
caacttttctatata

SEQ ID NO: 837242 - DNA, 15 bp, Homo sapiens
aacttttctatataa

SEQ ID NO: 837243 - DNA, 15 bp, Homo sapiens
acttttctatataat

SEQ ID NO: 837244 - DNA, 15 bp, Homo sapiens
cttttctatataatc

SEQ ID NO: 837245 - DNA, 15 bp, Homo sapiens
ttttctatataatca

SEQ ID NO: 837246 - DNA, 15 bp, Homo sapiens
tttctatataatcac

SEQ ID NO: 837247 - DNA, 15 bp, Homo sapiens
ttctatataatcaca

SEQ ID NO: 837248 - DNA, 15 bp, Homo sapiens
tctatataatcacat

SEQ ID NO: 837249 - DNA, 15 bp, Homo sapiens
ctatataatcacatg

SEQ ID NO: 837250 - DNA, 15 bp, Homo sapiens
tatataatcacatgg

SEQ ID NO: 837251 - DNA, 15 bp, Homo sapiens
atataatcacatggc

SEQ ID NO: 837252 - DNA, 15 bp, Homo sapiens
tataatcacatggcc

SEQ ID NO: 837253 - DNA, 15 bp, Homo sapiens
ataatcacatggcca

SEQ ID NO: 837254 - DNA, 15 bp, Homo sapiens
taatcacatggccaa

SEQ ID NO: 837255 - DNA, 15 bp, Homo sapiens
aatcacatggccaag

SEQ ID NO: 837256 - DNA, 15 bp, Homo sapiens
atcacatggccaagt

SEQ ID NO: 837257 - DNA, 15 bp, Homo sapiens
tcacatggccaagtg

SEQ ID NO: 837258 - DNA, 15 bp, Homo sapiens
cacatggccaagtgt

SEQ ID NO: 837259 - DNA, 15 bp, Homo sapiens
acatggccaagtgtc

SEQ ID NO: 837260 - DNA, 15 bp, Homo sapiens
catggccaagtgtca

SEQ ID NO: 837261 - DNA, 15 bp, Homo sapiens
atggccaagtgtcaa

SEQ ID NO: 837262 - DNA, 15 bp, Homo sapiens
tggccaagtgtcaag

SEQ ID NO: 837263 - DNA, 15 bp, Homo sapiens
ggccaagtgtcaagg

SEQ ID NO: 837264 - DNA, 15 bp, Homo sapiens
gccaagtgtcaaggt

SEQ ID NO: 837265 - DNA, 15 bp, Homo sapiens
ccaagtgtcaaggtg

SEQ ID NO: 837266 - DNA, 15 bp, Homo sapiens
caagtgtcaaggtgg

SEQ ID NO: 837267 - DNA, 15 bp, Homo sapiens
aagtgtcaaggtgga

SEQ ID NO: 837268 - DNA, 15 bp, Homo sapiens
agtgtcaaggtggac

SEQ ID NO: 837269 - DNA, 15 bp, Homo sapiens
gtgtcaaggtggaca

SEQ ID NO: 837270 - DNA, 15 bp, Homo sapiens
tgtcaaggtggacag

SEQ ID NO: 837271 - DNA, 15 bp, Homo sapiens
gtcaaggtggacagt

SEQ ID NO: 837272 - DNA, 15 bp, Homo sapiens
tcaaggtggacagtg

SEQ ID NO: 837273 - DNA, 15 bp, Homo sapiens
caaggtggacagtga

SEQ ID NO: 837274 - DNA, 15 bp, Homo sapiens
aaggtggacagtgag

SEQ ID NO: 837275 - DNA, 15 bp, Homo sapiens
aggtggacagtgaga

SEQ ID NO: 837276 - DNA, 15 bp, Homo sapiens
ggtggacagtgagaa

SEQ ID NO: 837277 - DNA, 15 bp, Homo sapiens
gtggacagtgagaaa

SEQ ID NO: 837278 - DNA, 15 bp, Homo sapiens
tggacagtgagaaag

SEQ ID NO: 837279 - DNA, 15 bp, Homo sapiens
ggacagtgagaaaga

SEQ ID NO: 837280 - DNA, 15 bp, Homo sapiens
gacagtgagaaagaa

SEQ ID NO: 837281 - DNA, 15 bp, Homo sapiens
acagtgagaaagaaa

SEQ ID NO: 837282 - DNA, 15 bp, Homo sapiens
cagtgagaaagaaag

SEQ ID NO: 837283 - DNA, 15 bp, Homo sapiens
agtgagaaagaaagc

SEQ ID NO: 837284 - DNA, 15 bp, Homo sapiens
gtgagaaagaaagct

SEQ ID NO: 837285 - DNA, 15 bp, Homo sapiens
tgagaaagaaagctc

SEQ ID NO: 837286 - DNA, 15 bp, Homo sapiens
gagaaagaaagctca

SEQ ID NO: 837287 - DNA, 15 bp, Homo sapiens
agaaagaaagctcaa

SEQ ID NO: 837288 - DNA, 15 bp, Homo sapiens
gaaagaaagctcaaa

SEQ ID NO: 837289 - DNA, 15 bp, Homo sapiens
aaagaaagctcaaaa

SEQ ID NO: 837290 - DNA, 15 bp, Homo sapiens
aagaaagctcaaaat

SEQ ID NO: 837291 - DNA, 15 bp, Homo sapiens
agaaagctcaaaata

SEQ ID NO: 837292 - DNA, 15 bp, Homo sapiens
gaaagctcaaaatat

SEQ ID NO: 837293 - DNA, 15 bp, Homo sapiens
aaagctcaaaatatg

SEQ ID NO: 837294 - DNA, 15 bp, Homo sapiens
aagctcaaaatatgc

SEQ ID NO: 837295 - DNA, 15 bp, Homo sapiens
agctcaaaatatgcc

SEQ ID NO: 837296 - DNA, 15 bp, Homo sapiens
gctcaaaatatgcct

SEQ ID NO: 837297 - DNA, 15 bp, Homo sapiens
ctcaaaatatgccta

SEQ ID NO: 837298 - DNA, 15 bp, Homo sapiens
tcaaaatatgcctac

SEQ ID NO: 837299 - DNA, 15 bp, Homo sapiens
caaaatatgcctaca

SEQ ID NO: 837300 - DNA, 15 bp, Homo sapiens
aaaatatgcctacag

SEQ ID NO: 837301 - DNA, 15 bp, Homo sapiens
aaatatgcctacaga

SEQ ID NO: 837302 - DNA, 15 bp, Homo sapiens
aatatgcctacagaa

SEQ ID NO: 837303 - DNA, 15 bp, Homo sapiens
atatgcctacagaac

SEQ ID NO: 837304 - DNA, 15 bp, Homo sapiens
tatgcctacagaact

SEQ ID NO: 837305 - DNA, 15 bp, Homo sapiens
atgcctacagaactc

SEQ ID NO: 837306 - DNA, 15 bp, Homo sapiens
tgcctacagaactca

SEQ ID NO: 837307 - DNA, 15 bp, Homo sapiens
gcctacagaactcaa

SEQ ID NO: 837308 - DNA, 15 bp, Homo sapiens
cctacagaactcaaa

SEQ ID NO: 837309 - DNA, 15 bp, Homo sapiens
ctacagaactcaaac

SEQ ID NO: 837310 - DNA, 15 bp, Homo sapiens
tacagaactcaaacc

SEQ ID NO: 837311 - DNA, 15 bp, Homo sapiens
acagaactcaaacca

SEQ ID NO: 837312 - DNA, 15 bp, Homo sapiens
cagaactcaaaccag

SEQ ID NO: 837313 - DNA, 15 bp, Homo sapiens
agaactcaaaccaga

SEQ ID NO: 837314 - DNA, 15 bp, Homo sapiens
gaactcaaaccagac

SEQ ID NO: 837315 - DNA, 15 bp, Homo sapiens
aactcaaaccagaca

SEQ ID NO: 837316 - DNA, 15 bp, Homo sapiens
actcaaaccagacag

SEQ ID NO: 837317 - DNA, 15 bp, Homo sapiens
ctcaaaccagacagg

SEQ ID NO: 837318 - DNA, 15 bp, Homo sapiens
tcaaaccagacaggg

SEQ ID NO: 837319 - DNA, 15 bp, Homo sapiens
caaaccagacagggc

SEQ ID NO: 837320 - DNA, 15 bp, Homo sapiens
aaaccagacagggcc

SEQ ID NO: 837321 - DNA, 15 bp, Homo sapiens
aaccagacagggcca

SEQ ID NO: 837322 - DNA, 15 bp, Homo sapiens
accagacagggccat

SEQ ID NO: 837323 - DNA, 15 bp, Homo sapiens
ccagacagggccatg

SEQ ID NO: 837324 - DNA, 15 bp, Homo sapiens
cagacagggccatgg

SEQ ID NO: 837325 - DNA, 15 bp, Homo sapiens
agacagggccatggg

SEQ ID NO: 837326 - DNA, 15 bp, Homo sapiens
gacagggccatgggg

SEQ ID NO: 837327 - DNA, 15 bp, Homo sapiens
acagggccatggggg

SEQ ID NO: 837328 - DNA, 15 bp, Homo sapiens
cagggccatggggga

SEQ ID NO: 837329 - DNA, 15 bp, Homo sapiens
agggccatgggggac

SEQ ID NO: 837330 - DNA, 15 bp, Homo sapiens
gggccatgggggacc

SEQ ID NO: 837331 - DNA, 15 bp, Homo sapiens
ggccatgggggaccc

SEQ ID NO: 837332 - DNA, 15 bp, Homo sapiens
gccatgggggaccca

SEQ ID NO: 837333 - DNA, 15 bp, Homo sapiens
ccatgggggacccaa

SEQ ID NO: 837334 - DNA, 15 bp, Homo sapiens
catgggggacccaag

SEQ ID NO: 837335 - DNA, 15 bp, Homo sapiens
atgggggacccaagg

SEQ ID NO: 837336 - DNA, 15 bp, Homo sapiens
tgggggacccaagga

SEQ ID NO: 837337 - DNA, 15 bp, Homo sapiens
gggggacccaaggat

SEQ ID NO: 837338 - DNA, 15 bp, Homo sapiens
ggggacccaaggatg

SEQ ID NO: 837339 - DNA, 15 bp, Homo sapiens
gggacccaaggatga

SEQ ID NO: 837340 - DNA, 15 bp, Homo sapiens
ggacccaaggatgaa

SEQ ID NO: 837341 - DNA, 15 bp, Homo sapiens
gacccaaggatgaaa

SEQ ID NO: 837342 - DNA, 15 bp, Homo sapiens
acccaaggatgaaat

SEQ ID NO: 837343 - DNA, 15 bp, Homo sapiens
cccaaggatgaaatg

SEQ ID NO: 837344 - DNA, 15 bp, Homo sapiens
ccaaggatgaaatgc

SEQ ID NO: 837345 - DNA, 15 bp, Homo sapiens
caaggatgaaatgcc

SEQ ID NO: 837346 - DNA, 15 bp, Homo sapiens
aaggatgaaatgcct

SEQ ID NO: 837347 - DNA, 15 bp, Homo sapiens
aggatgaaatgcctc

SEQ ID NO: 837348 - DNA, 15 bp, Homo sapiens
ggatgaaatgcctca

SEQ ID NO: 837349 - DNA, 15 bp, Homo sapiens
gatgaaatgcctcag

SEQ ID NO: 837350 - DNA, 15 bp, Homo sapiens
atgaaatgcctcagc

SEQ ID NO: 837351 - DNA, 15 bp, Homo sapiens
tgaaatgcctcagcc

SEQ ID NO: 837352 - DNA, 15 bp, Homo sapiens
gaaatgcctcagcct

SEQ ID NO: 837353 - DNA, 15 bp, Homo sapiens
aaatgcctcagcctt

SEQ ID NO: 837354 - DNA, 15 bp, Homo sapiens
aatgcctcagcctta

SEQ ID NO: 837355 - DNA, 15 bp, Homo sapiens
atgcctcagccttat

SEQ ID NO: 837356 - DNA, 15 bp, Homo sapiens
tgcctcagccttata

SEQ ID NO: 837357 - DNA, 15 bp, Homo sapiens
gcctcagccttatac

SEQ ID NO: 837358 - DNA, 15 bp, Homo sapiens
cctcagccttatacc

SEQ ID NO: 837359 - DNA, 15 bp, Homo sapiens
ctcagccttatacct

SEQ ID NO: 837360 - DNA, 15 bp, Homo sapiens
tcagccttatacctt

SEQ ID NO: 837361 - DNA, 15 bp, Homo sapiens
cagccttatacctta

SEQ ID NO: 837362 - DNA, 15 bp, Homo sapiens
agccttataccttag

SEQ ID NO: 837363 - DNA, 15 bp, Homo sapiens
gccttataccttaga

SEQ ID NO: 837364 - DNA, 15 bp, Homo sapiens
ccttataccttagat

SEQ ID NO: 837365 - DNA, 15 bp, Homo sapiens
cttataccttagata

SEQ ID NO: 837366 - DNA, 15 bp, Homo sapiens
ttataccttagatag

SEQ ID NO: 837367 - DNA, 15 bp, Homo sapiens
tataccttagatagc

SEQ ID NO: 837368 - DNA, 15 bp, Homo sapiens
ataccttagatagca

SEQ ID NO: 837369 - DNA, 15 bp, Homo sapiens
taccttagatagcac

SEQ ID NO: 837370 - DNA, 15 bp, Homo sapiens
accttagatagcaca

SEQ ID NO: 837371 - DNA, 15 bp, Homo sapiens
ccttagatagcacat

SEQ ID NO: 837372 - DNA, 15 bp, Homo sapiens
cttagatagcacatg

SEQ ID NO: 837373 - DNA, 15 bp, Homo sapiens
ttagatagcacatgc

SEQ ID NO: 837374 - DNA, 15 bp, Homo sapiens
tagatagcacatgcg

SEQ ID NO: 837375 - DNA, 15 bp, Homo sapiens
agatagcacatgcgg

SEQ ID NO: 837376 - DNA, 15 bp, Homo sapiens
gatagcacatgcgga

SEQ ID NO: 837377 - DNA, 15 bp, Homo sapiens
atagcacatgcggat

SEQ ID NO: 837378 - DNA, 15 bp, Homo sapiens
tagcacatgcggata

SEQ ID NO: 837379 - DNA, 15 bp, Homo sapiens
agcacatgcggatag

SEQ ID NO: 837380 - DNA, 15 bp, Homo sapiens
gcacatgcggatagg

SEQ ID NO: 837381 - DNA, 15 bp, Homo sapiens
cacatgcggatagga

SEQ ID NO: 837382 - DNA, 15 bp, Homo sapiens
acatgcggataggag

SEQ ID NO: 837383 - DNA, 15 bp, Homo sapiens
catgcggataggaga

SEQ ID NO: 837384 - DNA, 15 bp, Homo sapiens
atgcggataggagag

SEQ ID NO: 837385 - DNA, 15 bp, Homo sapiens
tgcggataggagaga

SEQ ID NO: 837386 - DNA, 15 bp, Homo sapiens
gcggataggagagac

SEQ ID NO: 837387 - DNA, 15 bp, Homo sapiens
cggataggagagact

SEQ ID NO: 837388 - DNA, 15 bp, Homo sapiens
ggataggagagactt

SEQ ID NO: 837389 - DNA, 15 bp, Homo sapiens
gataggagagacttt

SEQ ID NO: 837390 - DNA, 15 bp, Homo sapiens
ataggagagactttc

SEQ ID NO: 837391 - DNA, 15 bp, Homo sapiens
taggagagactttct

SEQ ID NO: 837392 - DNA, 15 bp, Homo sapiens
aggagagactttctc

SEQ ID NO: 837393 - DNA, 15 bp, Homo sapiens
ggagagactttctct

SEQ ID NO: 837394 - DNA, 15 bp, Homo sapiens
gagagactttctctg

SEQ ID NO: 837395 - DNA, 15 bp, Homo sapiens
agagactttctctga

SEQ ID NO: 837396 - DNA, 15 bp, Homo sapiens
gagactttctctgaa

SEQ ID NO: 837397 - DNA, 15 bp, Homo sapiens
agactttctctgaaa

SEQ ID NO: 837398 - DNA, 15 bp, Homo sapiens
gactttctctgaaag

SEQ ID NO: 837399 - DNA, 15 bp, Homo sapiens
actttctctgaaagg

SEQ ID NO: 837400 - DNA, 15 bp, Homo sapiens
ctttctctgaaaggt

SEQ ID NO: 837401 - DNA, 15 bp, Homo sapiens
tttctctgaaaggtt

SEQ ID NO: 837402 - DNA, 15 bp, Homo sapiens
ttctctgaaaggttt

SEQ ID NO: 837403 - DNA, 15 bp, Homo sapiens
tctctgaaaggtttt

SEQ ID NO: 837404 - DNA, 15 bp, Homo sapiens
ctctgaaaggttttg

SEQ ID NO: 837405 - DNA, 15 bp, Homo sapiens
tctgaaaggttttgc

SEQ ID NO: 837406 - DNA, 15 bp, Homo sapiens
ctgaaaggttttgct

SEQ ID NO: 837407 - DNA, 15 bp, Homo sapiens
tgaaaggttttgctt

SEQ ID NO: 837408 - DNA, 15 bp, Homo sapiens
gaaaggttttgcttg

SEQ ID NO: 837409 - DNA, 15 bp, Homo sapiens
aaaggttttgcttgt

SEQ ID NO: 837410 - DNA, 15 bp, Homo sapiens
aaggttttgcttgtt

SEQ ID NO: 837411 - DNA, 15 bp, Homo sapiens
aggttttgcttgttt

SEQ ID NO: 837412 - DNA, 15 bp, Homo sapiens
ggttttgcttgtttg

SEQ ID NO: 837413 - DNA, 15 bp, Homo sapiens
gttttgcttgtttgt

SEQ ID NO: 837414 - DNA, 15 bp, Homo sapiens
ttttgcttgtttgtt

SEQ ID NO: 837415 - DNA, 15 bp, Homo sapiens
tttgcttgtttgttt

SEQ ID NO: 837416 - DNA, 15 bp, Homo sapiens
ttgcttgtttgtttg

SEQ ID NO: 837417 - DNA, 15 bp, Homo sapiens
tgcttgtttgtttga

SEQ ID NO: 837418 - DNA, 15 bp, Homo sapiens
gcttgtttgtttgaa

SEQ ID NO: 837419 - DNA, 15 bp, Homo sapiens
cttgtttgtttgaag

SEQ ID NO: 837420 - DNA, 15 bp, Homo sapiens
ttgtttgtttgaagg

SEQ ID NO: 837421 - DNA, 15 bp, Homo sapiens
tgtttgtttgaaggt

SEQ ID NO: 837422 - DNA, 15 bp, Homo sapiens
gtttgtttgaaggtg

SEQ ID NO: 837423 - DNA, 15 bp, Homo sapiens
tttgtttgaaggtgc

SEQ ID NO: 837424 - DNA, 15 bp, Homo sapiens
ttgtttgaaggtgcc

SEQ ID NO: 837425 - DNA, 15 bp, Homo sapiens
tgtttgaaggtgcca

SEQ ID NO: 837426 - DNA, 15 bp, Homo sapiens
gtttgaaggtgccat

SEQ ID NO: 837427 - DNA, 15 bp, Homo sapiens
tttgaaggtgccatg

SEQ ID NO: 837428 - DNA, 15 bp, Homo sapiens
ttgaaggtgccatga

SEQ ID NO: 837429 - DNA, 15 bp, Homo sapiens
tgaaggtgccatgaa

SEQ ID NO: 837430 - DNA, 15 bp, Homo sapiens
gaaggtgccatgaag

SEQ ID NO: 837431 - DNA, 15 bp, Homo sapiens
aaggtgccatgaagg

SEQ ID NO: 837432 - DNA, 15 bp, Homo sapiens
aggtgccatgaaggt

SEQ ID NO: 837433 - DNA, 15 bp, Homo sapiens
ggtgccatgaaggtt

SEQ ID NO: 837434 - DNA, 15 bp, Homo sapiens
gtgccatgaaggttc

SEQ ID NO: 837435 - DNA, 15 bp, Homo sapiens
tgccatgaaggttca

SEQ ID NO: 837436 - DNA, 15 bp, Homo sapiens
gccatgaaggttcag

SEQ ID NO: 837437 - DNA, 15 bp, Homo sapiens
ccatgaaggttcaga

SEQ ID NO: 837438 - DNA, 15 bp, Homo sapiens
catgaaggttcagag

SEQ ID NO: 837439 - DNA, 15 bp, Homo sapiens
atgaaggttcagagc

SEQ ID NO: 837440 - DNA, 15 bp, Homo sapiens
tgaaggttcagagct

SEQ ID NO: 837441 - DNA, 15 bp, Homo sapiens
gaaggttcagagctg

SEQ ID NO: 837442 - DNA, 15 bp, Homo sapiens
aaggttcagagctgt

SEQ ID NO: 837443 - DNA, 15 bp, Homo sapiens
aggttcagagctgtc

SEQ ID NO: 837444 - DNA, 15 bp, Homo sapiens
ggttcagagctgtct

SEQ ID NO: 837445 - DNA, 15 bp, Homo sapiens
gttcagagctgtctc

SEQ ID NO: 837446 - DNA, 15 bp, Homo sapiens
ttcagagctgtctct

SEQ ID NO: 837447 - DNA, 15 bp, Homo sapiens
tcagagctgtctctt

SEQ ID NO: 837448 - DNA, 15 bp, Homo sapiens
cagagctgtctcttt

SEQ ID NO: 837449 - DNA, 15 bp, Homo sapiens
agagctgtctcttta

SEQ ID NO: 837450 - DNA, 15 bp, Homo sapiens
gagctgtctctttag

SEQ ID NO: 837451 - DNA, 15 bp, Homo sapiens
agctgtctctttagg

SEQ ID NO: 837452 - DNA, 15 bp, Homo sapiens
gctgtctctttaggg

SEQ ID NO: 837453 - DNA, 15 bp, Homo sapiens
ctgtctctttagggc

SEQ ID NO: 837454 - DNA, 15 bp, Homo sapiens
tgtctctttagggct

SEQ ID NO: 837455 - DNA, 15 bp, Homo sapiens
gtctctttagggctt

SEQ ID NO: 837456 - DNA, 15 bp, Homo sapiens
tctctttagggcttg

SEQ ID NO: 837457 - DNA, 15 bp, Homo sapiens
ctctttagggcttgg

SEQ ID NO: 837458 - DNA, 15 bp, Homo sapiens
tctttagggcttgga

SEQ ID NO: 837459 - DNA, 15 bp, Homo sapiens
ctttagggcttggac

SEQ ID NO: 837460 - DNA, 15 bp, Homo sapiens
tttagggcttggacc

SEQ ID NO: 837461 - DNA, 15 bp, Homo sapiens
ttagggcttggacca

SEQ ID NO: 837462 - DNA, 15 bp, Homo sapiens
tagggcttggaccaa

SEQ ID NO: 837463 - DNA, 15 bp, Homo sapiens
agggcttggaccaaa

SEQ ID NO: 837464 - DNA, 15 bp, Homo sapiens
gggcttggaccaaaa

SEQ ID NO: 837465 - DNA, 15 bp, Homo sapiens
ggcttggaccaaaaa

SEQ ID NO: 837466 - DNA, 15 bp, Homo sapiens
gcttggaccaaaaaa

SEQ ID NO: 837467 - DNA, 15 bp, Homo sapiens
cttggaccaaaaaaa

SEQ ID NO: 837468 - DNA, 15 bp, Homo sapiens
ttggaccaaaaaaat

SEQ ID NO: 837469 - DNA, 15 bp, Homo sapiens
tggaccaaaaaaatc

SEQ ID NO: 837470 - DNA, 15 bp, Homo sapiens
ggaccaaaaaaatct

SEQ ID NO: 837471 - DNA, 15 bp, Homo sapiens
gaccaaaaaaatctc

SEQ ID NO: 837472 - DNA, 15 bp, Homo sapiens
accaaaaaaatctcc

SEQ ID NO: 837473 - DNA, 15 bp, Homo sapiens
ccaaaaaaatctcct

SEQ ID NO: 837474 - DNA, 15 bp, Homo sapiens
caaaaaaatctcctt

SEQ ID NO: 837475 - DNA, 15 bp, Homo sapiens
aaaaaaatctccttt

SEQ ID NO: 837476 - DNA, 15 bp, Homo sapiens
aaaaaatctcctttc

SEQ ID NO: 837477 - DNA, 15 bp, Homo sapiens
aaaaatctcctttca

SEQ ID NO: 837478 - DNA, 15 bp, Homo sapiens
aaaatctcctttcac

SEQ ID NO: 837479 - DNA, 15 bp, Homo sapiens
aaatctcctttcaca

SEQ ID NO: 837480 - DNA, 15 bp, Homo sapiens
aatctcctttcacac

SEQ ID NO: 837481 - DNA, 15 bp, Homo sapiens
atctcctttcacaca

SEQ ID NO: 837482 - DNA, 15 bp, Homo sapiens
tctcctttcacacac

SEQ ID NO: 837483 - DNA, 15 bp, Homo sapiens
ctcctttcacacaca

SEQ ID NO: 837484 - DNA, 15 bp, Homo sapiens
tcctttcacacacaa

SEQ ID NO: 837485 - DNA, 15 bp, Homo sapiens
cctttcacacacaat

SEQ ID NO: 837486 - DNA, 15 bp, Homo sapiens
ctttcacacacaatg

SEQ ID NO: 837487 - DNA, 15 bp, Homo sapiens
tttcacacacaatgc

SEQ ID NO: 837488 - DNA, 15 bp, Homo sapiens
ttcacacacaatgct

SEQ ID NO: 837489 - DNA, 15 bp, Homo sapiens
tcacacacaatgctt

SEQ ID NO: 837490 - DNA, 15 bp, Homo sapiens
cacacacaatgcttg

SEQ ID NO: 837491 - DNA, 15 bp, Homo sapiens
acacacaatgcttga

SEQ ID NO: 837492 - DNA, 15 bp, Homo sapiens
cacacaatgcttgac

SEQ ID NO: 837493 - DNA, 15 bp, Homo sapiens
acacaatgcttgact

SEQ ID NO: 837494 - DNA, 15 bp, Homo sapiens
cacaatgcttgactt

SEQ ID NO: 837495 - DNA, 15 bp, Homo sapiens
acaatgcttgacttg

SEQ ID NO: 837496 - DNA, 15 bp, Homo sapiens
caatgcttgacttgt

SEQ ID NO: 837497 - DNA, 15 bp, Homo sapiens
aatgcttgacttgtt

SEQ ID NO: 837498 - DNA, 15 bp, Homo sapiens
atgcttgacttgttc

SEQ ID NO: 837499 - DNA, 15 bp, Homo sapiens
tgcttgacttgttca

SEQ ID NO: 837500 - DNA, 15 bp, Homo sapiens
gcttgacttgttcat

SEQ ID NO: 837501 - DNA, 15 bp, Homo sapiens
cttgacttgttcatt

SEQ ID NO: 837502 - DNA, 15 bp, Homo sapiens
ttgacttgttcatta

SEQ ID NO: 837503 - DNA, 15 bp, Homo sapiens
tgacttgttcattac

SEQ ID NO: 837504 - DNA, 15 bp, Homo sapiens
gacttgttcattact

SEQ ID NO: 837505 - DNA, 15 bp, Homo sapiens
acttgttcattactt

SEQ ID NO: 837506 - DNA, 15 bp, Homo sapiens
cttgttcattactta

SEQ ID NO: 837507 - DNA, 15 bp, Homo sapiens
ttgttcattacttaa

SEQ ID NO: 837508 - DNA, 15 bp, Homo sapiens
tgttcattacttaaa

SEQ ID NO: 837509 - DNA, 15 bp, Homo sapiens
gttcattacttaaac

SEQ ID NO: 837510 - DNA, 15 bp, Homo sapiens
ttcattacttaaact

SEQ ID NO: 837511 - DNA, 15 bp, Homo sapiens
tcattacttaaactg

SEQ ID NO: 837512 - DNA, 15 bp, Homo sapiens
cattacttaaactga

SEQ ID NO: 837513 - DNA, 15 bp, Homo sapiens
attacttaaactgaa

SEQ ID NO: 837514 - DNA, 15 bp, Homo sapiens
ttacttaaactgaat

SEQ ID NO: 837515 - DNA, 15 bp, Homo sapiens
tacttaaactgaatt

SEQ ID NO: 837516 - DNA, 15 bp, Homo sapiens
acttaaactgaattt

SEQ ID NO: 837517 - DNA, 15 bp, Homo sapiens
cttaaactgaatttc

SEQ ID NO: 837518 - DNA, 15 bp, Homo sapiens
ttaaactgaatttct

SEQ ID NO: 837519 - DNA, 15 bp, Homo sapiens
taaactgaatttctc

SEQ ID NO: 837520 - DNA, 15 bp, Homo sapiens
aaactgaatttctcc

SEQ ID NO: 837521 - DNA, 15 bp, Homo sapiens
aactgaatttctcct

SEQ ID NO: 837522 - DNA, 15 bp, Homo sapiens
actgaatttctcctc

SEQ ID NO: 837523 - DNA, 15 bp, Homo sapiens
ctgaatttctcctca

SEQ ID NO: 837524 - DNA, 15 bp, Homo sapiens
tgaatttctcctcat

SEQ ID NO: 837525 - DNA, 15 bp, Homo sapiens
gaatttctcctcatt

SEQ ID NO: 837526 - DNA, 15 bp, Homo sapiens
aatttctcctcattc

SEQ ID NO: 837527 - DNA, 15 bp, Homo sapiens
atttctcctcattcc

SEQ ID NO: 837528 - DNA, 15 bp, Homo sapiens
tttctcctcattcct

SEQ ID NO: 837529 - DNA, 15 bp, Homo sapiens
ttctcctcattcctc

SEQ ID NO: 837530 - DNA, 15 bp, Homo sapiens
tctcctcattcctct

SEQ ID NO: 837531 - DNA, 15 bp, Homo sapiens
ctcctcattcctctc

SEQ ID NO: 837532 - DNA, 15 bp, Homo sapiens
tcctcattcctctca

SEQ ID NO: 837533 - DNA, 15 bp, Homo sapiens
cctcattcctctcag

SEQ ID NO: 837534 - DNA, 15 bp, Homo sapiens
ctcattcctctcagg

SEQ ID NO: 837535 - DNA, 15 bp, Homo sapiens
tcattcctctcaggt

SEQ ID NO: 837536 - DNA, 15 bp, Homo sapiens
cattcctctcaggtt

SEQ ID NO: 837537 - DNA, 15 bp, Homo sapiens
attcctctcaggttc

SEQ ID NO: 837538 - DNA, 15 bp, Homo sapiens
ttcctctcaggttct

SEQ ID NO: 837539 - DNA, 15 bp, Homo sapiens
tcctctcaggttctc

SEQ ID NO: 837540 - DNA, 15 bp, Homo sapiens
cctctcaggttctca

SEQ ID NO: 837541 - DNA, 15 bp, Homo sapiens
ctctcaggttctcag

SEQ ID NO: 837542 - DNA, 15 bp, Homo sapiens
tctcaggttctcaga

SEQ ID NO: 837543 - DNA, 15 bp, Homo sapiens
ctcaggttctcagat

SEQ ID NO: 837544 - DNA, 15 bp, Homo sapiens
tcaggttctcagatg

SEQ ID NO: 837545 - DNA, 15 bp, Homo sapiens
caggttctcagatga

SEQ ID NO: 837546 - DNA, 15 bp, Homo sapiens
aggttctcagatgat

SEQ ID NO: 837547 - DNA, 15 bp, Homo sapiens
ggttctcagatgata

SEQ ID NO: 837548 - DNA, 15 bp, Homo sapiens
gttctcagatgatat

SEQ ID NO: 837549 - DNA, 15 bp, Homo sapiens
ttctcagatgatatt

SEQ ID NO: 837550 - DNA, 15 bp, Homo sapiens
tctcagatgatatta

SEQ ID NO: 837551 - DNA, 15 bp, Homo sapiens
ctcagatgatattac

SEQ ID NO: 837552 - DNA, 15 bp, Homo sapiens
tcagatgatattact

SEQ ID NO: 837553 - DNA, 15 bp, Homo sapiens
cagatgatattactg

SEQ ID NO: 837554 - DNA, 15 bp, Homo sapiens
agatgatattactgc

SEQ ID NO: 837555 - DNA, 15 bp, Homo sapiens
gatgatattactgca

SEQ ID NO: 837556 - DNA, 15 bp, Homo sapiens
atgatattactgcaa

SEQ ID NO: 837557 - DNA, 15 bp, Homo sapiens
tgatattactgcaag

SEQ ID NO: 837558 - DNA, 15 bp, Homo sapiens
gatattactgcaagt

SEQ ID NO: 837559 - DNA, 15 bp, Homo sapiens
atattactgcaagtg

SEQ ID NO: 837560 - DNA, 15 bp, Homo sapiens
tattactgcaagtga

SEQ ID NO: 837561 - DNA, 15 bp, Homo sapiens
attactgcaagtgag

SEQ ID NO: 837562 - DNA, 15 bp, Homo sapiens
ttactgcaagtgagt

SEQ ID NO: 837563 - DNA, 15 bp, Homo sapiens
tactgcaagtgagta

SEQ ID NO: 837564 - DNA, 15 bp, Homo sapiens
actgcaagtgagtat

SEQ ID NO: 837565 - DNA, 15 bp, Homo sapiens
ctgcaagtgagtatt

SEQ ID NO: 837566 - DNA, 15 bp, Homo sapiens
tgcaagtgagtattt

SEQ ID NO: 837567 - DNA, 15 bp, Homo sapiens
gcaagtgagtatttc

SEQ ID NO: 837568 - DNA, 15 bp, Homo sapiens
caagtgagtatttct

SEQ ID NO: 837569 - DNA, 15 bp, Homo sapiens
aagtgagtatttctc

SEQ ID NO: 837570 - DNA, 15 bp, Homo sapiens
agtgagtatttctcc

SEQ ID NO: 837571 - DNA, 15 bp, Homo sapiens
gtgagtatttctcca

SEQ ID NO: 837572 - DNA, 15 bp, Homo sapiens
tgagtatttctccag

SEQ ID NO: 837573 - DNA, 15 bp, Homo sapiens
gagtatttctccagt

SEQ ID NO: 837574 - DNA, 15 bp, Homo sapiens
agtatttctccagtt

SEQ ID NO: 837575 - DNA, 15 bp, Homo sapiens
gtatttctccagtta

SEQ ID NO: 837576 - DNA, 15 bp, Homo sapiens
tatttctccagttat

SEQ ID NO: 837577 - DNA, 15 bp, Homo sapiens
atttctccagttata

SEQ ID NO: 837578 - DNA, 15 bp, Homo sapiens
tttctccagttatac

SEQ ID NO: 837579 - DNA, 15 bp, Homo sapiens
ttctccagttatacc

SEQ ID NO: 837580 - DNA, 15 bp, Homo sapiens
tctccagttatacca

SEQ ID NO: 837581 - DNA, 15 bp, Homo sapiens
ctccagttataccaa

SEQ ID NO: 837582 - DNA, 15 bp, Homo sapiens
tccagttataccaat

SEQ ID NO: 837583 - DNA, 15 bp, Homo sapiens
ccagttataccaatg

SEQ ID NO: 837584 - DNA, 15 bp, Homo sapiens
cagttataccaatgt

SEQ ID NO: 837585 - DNA, 15 bp, Homo sapiens
agttataccaatgtg

SEQ ID NO: 837586 - DNA, 15 bp, Homo sapiens
gttataccaatgtgt

SEQ ID NO: 837587 - DNA, 15 bp, Homo sapiens
ttataccaatgtgtt

SEQ ID NO: 837588 - DNA, 15 bp, Homo sapiens
tataccaatgtgttc

SEQ ID NO: 837589 - DNA, 15 bp, Homo sapiens
ataccaatgtgttct

SEQ ID NO: 837590 - DNA, 15 bp, Homo sapiens
taccaatgtgttctc

SEQ ID NO: 837591 - DNA, 15 bp, Homo sapiens
accaatgtgttctct

SEQ ID NO: 837592 - DNA, 15 bp, Homo sapiens
ccaatgtgttctcta

SEQ ID NO: 837593 - DNA, 15 bp, Homo sapiens
caatgtgttctctac

SEQ ID NO: 837594 - DNA, 15 bp, Homo sapiens
aatgtgttctctacg

SEQ ID NO: 837595 - DNA, 15 bp, Homo sapiens
atgtgttctctacga

SEQ ID NO: 837596 - DNA, 15 bp, Homo sapiens
tgtgttctctacgat

SEQ ID NO: 837597 - DNA, 15 bp, Homo sapiens
gtgttctctacgatg

SEQ ID NO: 837598 - DNA, 15 bp, Homo sapiens
tgttctctacgatgc

SEQ ID NO: 837599 - DNA, 15 bp, Homo sapiens
gttctctacgatgcc

SEQ ID NO: 837600 - DNA, 15 bp, Homo sapiens
ttctctacgatgccc

SEQ ID NO: 837601 - DNA, 15 bp, Homo sapiens
tctctacgatgccca

SEQ ID NO: 837602 - DNA, 15 bp, Homo sapiens
ctctacgatgcccag

SEQ ID NO: 837603 - DNA, 15 bp, Homo sapiens
tctacgatgcccagg

SEQ ID NO: 837604 - DNA, 15 bp, Homo sapiens
ctacgatgcccagga

SEQ ID NO: 837605 - DNA, 15 bp, Homo sapiens
tacgatgcccaggaa

SEQ ID NO: 837606 - DNA, 15 bp, Homo sapiens
acgatgcccaggaag

SEQ ID NO: 837607 - DNA, 15 bp, Homo sapiens
cgatgcccaggaagt

SEQ ID NO: 837608 - DNA, 15 bp, Homo sapiens
gatgcccaggaagta

SEQ ID NO: 837609 - DNA, 15 bp, Homo sapiens
atgcccaggaagtaa

SEQ ID NO: 837610 - DNA, 15 bp, Homo sapiens
tgcccaggaagtaaa

SEQ ID NO: 837611 - DNA, 15 bp, Homo sapiens
gcccaggaagtaaaa

SEQ ID NO: 837612 - DNA, 15 bp, Homo sapiens
cccaggaagtaaaag

SEQ ID NO: 837613 - DNA, 15 bp, Homo sapiens
ccaggaagtaaaagg

SEQ ID NO: 837614 - DNA, 15 bp, Homo sapiens
caggaagtaaaaggg

SEQ ID NO: 837615 - DNA, 15 bp, Homo sapiens
aggaagtaaaaggga

SEQ ID NO: 837616 - DNA, 15 bp, Homo sapiens
ggaagtaaaagggaa

SEQ ID NO: 837617 - DNA, 15 bp, Homo sapiens
gaagtaaaagggaaa

SEQ ID NO: 837618 - DNA, 15 bp, Homo sapiens
aagtaaaagggaaag

SEQ ID NO: 837619 - DNA, 15 bp, Homo sapiens
agtaaaagggaaagt

SEQ ID NO: 837620 - DNA, 15 bp, Homo sapiens
gtaaaagggaaagtg

SEQ ID NO: 837621 - DNA, 15 bp, Homo sapiens
taaaagggaaagtgg

SEQ ID NO: 837622 - DNA, 15 bp, Homo sapiens
aaaagggaaagtggc

SEQ ID NO: 837623 - DNA, 15 bp, Homo sapiens
aaagggaaagtggcc

SEQ ID NO: 837624 - DNA, 15 bp, Homo sapiens
aagggaaagtggcca

SEQ ID NO: 837625 - DNA, 15 bp, Homo sapiens
agggaaagtggccat

SEQ ID NO: 837626 - DNA, 15 bp, Homo sapiens
gggaaagtggccatc

SEQ ID NO: 837627 - DNA, 15 bp, Homo sapiens
ggaaagtggccatct

SEQ ID NO: 837628 - DNA, 15 bp, Homo sapiens
gaaagtggccatctg

SEQ ID NO: 837629 - DNA, 15 bp, Homo sapiens
aaagtggccatctga

SEQ ID NO: 837630 - DNA, 15 bp, Homo sapiens
aagtggccatctgaa

SEQ ID NO: 837631 - DNA, 15 bp, Homo sapiens
agtggccatctgaag

SEQ ID NO: 837632 - DNA, 15 bp, Homo sapiens
gtggccatctgaagc

SEQ ID NO: 837633 - DNA, 15 bp, Homo sapiens
tggccatctgaagcc

SEQ ID NO: 837634 - DNA, 15 bp, Homo sapiens
ggccatctgaagcca

SEQ ID NO: 837635 - DNA, 15 bp, Homo sapiens
gccatctgaagccac

SEQ ID NO: 837636 - DNA, 15 bp, Homo sapiens
ccatctgaagccact

SEQ ID NO: 837637 - DNA, 15 bp, Homo sapiens
catctgaagccactg

SEQ ID NO: 837638 - DNA, 15 bp, Homo sapiens
atctgaagccactgg

SEQ ID NO: 837639 - DNA, 15 bp, Homo sapiens
tctgaagccactgga

SEQ ID NO: 837640 - DNA, 15 bp, Homo sapiens
ctgaagccactggag

SEQ ID NO: 837641 - DNA, 15 bp, Homo sapiens
tgaagccactggaga

SEQ ID NO: 837642 - DNA, 15 bp, Homo sapiens
gaagccactggagag

SEQ ID NO: 837643 - DNA, 15 bp, Homo sapiens
aagccactggagagt

SEQ ID NO: 837644 - DNA, 15 bp, Homo sapiens
agccactggagagta

SEQ ID NO: 837645 - DNA, 15 bp, Homo sapiens
gccactggagagtag

SEQ ID NO: 837646 - DNA, 15 bp, Homo sapiens
ccactggagagtagg

SEQ ID NO: 837647 - DNA, 15 bp, Homo sapiens
cactggagagtaggg

SEQ ID NO: 837648 - DNA, 15 bp, Homo sapiens
actggagagtaggga

SEQ ID NO: 837649 - DNA, 15 bp, Homo sapiens
ctggagagtagggag

SEQ ID NO: 837650 - DNA, 15 bp, Homo sapiens
tggagagtagggaga

SEQ ID NO: 837651 - DNA, 15 bp, Homo sapiens
ggagagtagggagag

SEQ ID NO: 837652 - DNA, 15 bp, Homo sapiens
gagagtagggagagg

SEQ ID NO: 837653 - DNA, 15 bp, Homo sapiens
agagtagggagagga

SEQ ID NO: 837654 - DNA, 15 bp, Homo sapiens
gagtagggagaggaa

SEQ ID NO: 837655 - DNA, 15 bp, Homo sapiens
agtagggagaggaag

SEQ ID NO: 837656 - DNA, 15 bp, Homo sapiens
gtagggagaggaagg

SEQ ID NO: 837657 - DNA, 15 bp, Homo sapiens
tagggagaggaagga

SEQ ID NO: 837658 - DNA, 15 bp, Homo sapiens
agggagaggaaggaa

SEQ ID NO: 837659 - DNA, 15 bp, Homo sapiens
gggagaggaaggaat

SEQ ID NO: 837660 - DNA, 15 bp, Homo sapiens
ggagaggaaggaata

SEQ ID NO: 837661 - DNA, 15 bp, Homo sapiens
gagaggaaggaataa

SEQ ID NO: 837662 - DNA, 15 bp, Homo sapiens
agaggaaggaataaa

SEQ ID NO: 837663 - DNA, 15 bp, Homo sapiens
gaggaaggaataaag

SEQ ID NO: 837664 - DNA, 15 bp, Homo sapiens
aggaaggaataaagg

SEQ ID NO: 837665 - DNA, 15 bp, Homo sapiens
ggaaggaataaaggg

SEQ ID NO: 837666 - DNA, 15 bp, Homo sapiens
gaaggaataaagggt

SEQ ID NO: 837667 - DNA, 15 bp, Homo sapiens
aaggaataaagggta

SEQ ID NO: 837668 - DNA, 15 bp, Homo sapiens
aggaataaagggtag

SEQ ID NO: 837669 - DNA, 15 bp, Homo sapiens
ggaataaagggtagg

SEQ ID NO: 837670 - DNA, 15 bp, Homo sapiens
gaataaagggtaggg

SEQ ID NO: 837671 - DNA, 15 bp, Homo sapiens
aataaagggtagggc

SEQ ID NO: 837672 - DNA, 15 bp, Homo sapiens
ataaagggtagggct

SEQ ID NO: 837673 - DNA, 15 bp, Homo sapiens
taaagggtagggcta

SEQ ID NO: 837674 - DNA, 15 bp, Homo sapiens
aaagggtagggctag

SEQ ID NO: 837675 - DNA, 15 bp, Homo sapiens
aagggtagggctagt

SEQ ID NO: 837676 - DNA, 15 bp, Homo sapiens
agggtagggctagtt

SEQ ID NO: 837677 - DNA, 15 bp, Homo sapiens
gggtagggctagttg

SEQ ID NO: 837678 - DNA, 15 bp, Homo sapiens
ggtagggctagttgt

SEQ ID NO: 837679 - DNA, 15 bp, Homo sapiens
gtagggctagttgtt

SEQ ID NO: 837680 - DNA, 15 bp, Homo sapiens
tagggctagttgttg

SEQ ID NO: 837681 - DNA, 15 bp, Homo sapiens
agggctagttgttgg

SEQ ID NO: 837682 - DNA, 15 bp, Homo sapiens
gggctagttgttgga

SEQ ID NO: 837683 - DNA, 15 bp, Homo sapiens
ggctagttgttggaa

SEQ ID NO: 837684 - DNA, 15 bp, Homo sapiens
gctagttgttggaat

SEQ ID NO: 837685 - DNA, 15 bp, Homo sapiens
ctagttgttggaatt

SEQ ID NO: 837686 - DNA, 15 bp, Homo sapiens
tagttgttggaattg

SEQ ID NO: 837687 - DNA, 15 bp, Homo sapiens
agttgttggaattga

SEQ ID NO: 837688 - DNA, 15 bp, Homo sapiens
gttgttggaattgag

SEQ ID NO: 837689 - DNA, 15 bp, Homo sapiens
ttgttggaattgagt

SEQ ID NO: 837690 - DNA, 15 bp, Homo sapiens
tgttggaattgagtc

SEQ ID NO: 837691 - DNA, 15 bp, Homo sapiens
gttggaattgagtct

SEQ ID NO: 837692 - DNA, 15 bp, Homo sapiens
ttggaattgagtctg

SEQ ID NO: 837693 - DNA, 15 bp, Homo sapiens
tggaattgagtctgc

SEQ ID NO: 837694 - DNA, 15 bp, Homo sapiens
ggaattgagtctgca

SEQ ID NO: 837695 - DNA, 15 bp, Homo sapiens
gaattgagtctgcag

SEQ ID NO: 837696 - DNA, 15 bp, Homo sapiens
aattgagtctgcagt

SEQ ID NO: 837697 - DNA, 15 bp, Homo sapiens
attgagtctgcagtg

SEQ ID NO: 837698 - DNA, 15 bp, Homo sapiens
ttgagtctgcagtgt

SEQ ID NO: 837699 - DNA, 15 bp, Homo sapiens
tgagtctgcagtgtg

SEQ ID NO: 837700 - DNA, 15 bp, Homo sapiens
gagtctgcagtgtgg

SEQ ID NO: 837701 - DNA, 15 bp, Homo sapiens
agtctgcagtgtggg

SEQ ID NO: 837702 - DNA, 15 bp, Homo sapiens
gtctgcagtgtgggg

SEQ ID NO: 837703 - DNA, 15 bp, Homo sapiens
tctgcagtgtgggga

SEQ ID NO: 837704 - DNA, 15 bp, Homo sapiens
ctgcagtgtggggaa

SEQ ID NO: 837705 - DNA, 15 bp, Homo sapiens
tgcagtgtggggaag

SEQ ID NO: 837706 - DNA, 15 bp, Homo sapiens
gcagtgtggggaagg

SEQ ID NO: 837707 - DNA, 15 bp, Homo sapiens
cagtgtggggaaggt

SEQ ID NO: 837708 - DNA, 15 bp, Homo sapiens
agtgtggggaaggtc

SEQ ID NO: 837709 - DNA, 15 bp, Homo sapiens
gtgtggggaaggtcc

SEQ ID NO: 837710 - DNA, 15 bp, Homo sapiens
tgtggggaaggtcct

SEQ ID NO: 837711 - DNA, 15 bp, Homo sapiens
gtggggaaggtcctt

SEQ ID NO: 837712 - DNA, 15 bp, Homo sapiens
tggggaaggtccttt

SEQ ID NO: 837713 - DNA, 15 bp, Homo sapiens
ggggaaggtcctttg

SEQ ID NO: 837714 - DNA, 15 bp, Homo sapiens
gggaaggtcctttga

SEQ ID NO: 837715 - DNA, 15 bp, Homo sapiens
ggaaggtcctttgat

SEQ ID NO: 837716 - DNA, 15 bp, Homo sapiens
gaaggtcctttgata

SEQ ID NO: 837717 - DNA, 15 bp, Homo sapiens
aaggtcctttgatag

SEQ ID NO: 837718 - DNA, 15 bp, Homo sapiens
aggtcctttgatagt

SEQ ID NO: 837719 - DNA, 15 bp, Homo sapiens
ggtcctttgatagtt

SEQ ID NO: 837720 - DNA, 15 bp, Homo sapiens
gtcctttgatagttt

SEQ ID NO: 837721 - DNA, 15 bp, Homo sapiens
tcctttgatagtttg

SEQ ID NO: 837722 - DNA, 15 bp, Homo sapiens
cctttgatagtttga

SEQ ID NO: 837723 - DNA, 15 bp, Homo sapiens
ctttgatagtttgac

SEQ ID NO: 837724 - DNA, 15 bp, Homo sapiens
tttgatagtttgaca

SEQ ID NO: 837725 - DNA, 15 bp, Homo sapiens
ttgatagtttgacag

SEQ ID NO: 837726 - DNA, 15 bp, Homo sapiens
tgatagtttgacagc

SEQ ID NO: 837727 - DNA, 15 bp, Homo sapiens
gatagtttgacagca

SEQ ID NO: 837728 - DNA, 15 bp, Homo sapiens
atagtttgacagcaa

SEQ ID NO: 837729 - DNA, 15 bp, Homo sapiens
tagtttgacagcaat

SEQ ID NO: 837730 - DNA, 15 bp, Homo sapiens
agtttgacagcaatt

SEQ ID NO: 837731 - DNA, 15 bp, Homo sapiens
gtttgacagcaatta

SEQ ID NO: 837732 - DNA, 15 bp, Homo sapiens
tttgacagcaattac

SEQ ID NO: 837733 - DNA, 15 bp, Homo sapiens
ttgacagcaattacc

SEQ ID NO: 837734 - DNA, 15 bp, Homo sapiens
tgacagcaattacca

SEQ ID NO: 837735 - DNA, 15 bp, Homo sapiens
gacagcaattaccac

SEQ ID NO: 837736 - DNA, 15 bp, Homo sapiens
acagcaattaccact

SEQ ID NO: 837737 - DNA, 15 bp, Homo sapiens
cagcaattaccactt

SEQ ID NO: 837738 - DNA, 15 bp, Homo sapiens
agcaattaccacttg

SEQ ID NO: 837739 - DNA, 15 bp, Homo sapiens
gcaattaccacttgc

SEQ ID NO: 837740 - DNA, 15 bp, Homo sapiens
caattaccacttgct

SEQ ID NO: 837741 - DNA, 15 bp, Homo sapiens
aattaccacttgctg

SEQ ID NO: 837742 - DNA, 15 bp, Homo sapiens
attaccacttgctgt

SEQ ID NO: 837743 - DNA, 15 bp, Homo sapiens
ttaccacttgctgtg

SEQ ID NO: 837744 - DNA, 15 bp, Homo sapiens
taccacttgctgtgg

SEQ ID NO: 837745 - DNA, 15 bp, Homo sapiens
accacttgctgtggc

SEQ ID NO: 837746 - DNA, 15 bp, Homo sapiens
ccacttgctgtggcc

SEQ ID NO: 837747 - DNA, 15 bp, Homo sapiens
cacttgctgtggccc

SEQ ID NO: 837748 - DNA, 15 bp, Homo sapiens
acttgctgtggcccc

SEQ ID NO: 837749 - DNA, 15 bp, Homo sapiens
cttgctgtggcccct

SEQ ID NO: 837750 - DNA, 15 bp, Homo sapiens
ttgctgtggcccctc

SEQ ID NO: 837751 - DNA, 15 bp, Homo sapiens
tgctgtggcccctcc

SEQ ID NO: 837752 - DNA, 15 bp, Homo sapiens
gctgtggcccctcca

SEQ ID NO: 837753 - DNA, 15 bp, Homo sapiens
ctgtggcccctccat

SEQ ID NO: 837754 - DNA, 15 bp, Homo sapiens
tgtggcccctccatg

SEQ ID NO: 837755 - DNA, 15 bp, Homo sapiens
gtggcccctccatga

SEQ ID NO: 837756 - DNA, 15 bp, Homo sapiens
tggcccctccatgag

SEQ ID NO: 837757 - DNA, 15 bp, Homo sapiens
ggcccctccatgaga

SEQ ID NO: 837758 - DNA, 15 bp, Homo sapiens
gcccctccatgagac

SEQ ID NO: 837759 - DNA, 15 bp, Homo sapiens
cccctccatgagact

SEQ ID NO: 837760 - DNA, 15 bp, Homo sapiens
ccctccatgagacta

SEQ ID NO: 837761 - DNA, 15 bp, Homo sapiens
cctccatgagactat

SEQ ID NO: 837762 - DNA, 15 bp, Homo sapiens
ctccatgagactatt

SEQ ID NO: 837763 - DNA, 15 bp, Homo sapiens
tccatgagactattt

SEQ ID NO: 837764 - DNA, 15 bp, Homo sapiens
ccatgagactattta

SEQ ID NO: 837765 - DNA, 15 bp, Homo sapiens
catgagactatttaa

SEQ ID NO: 837766 - DNA, 15 bp, Homo sapiens
atgagactatttaac

SEQ ID NO: 837767 - DNA, 15 bp, Homo sapiens
tgagactatttaacc

SEQ ID NO: 837768 - DNA, 15 bp, Homo sapiens
gagactatttaacca

SEQ ID NO: 837769 - DNA, 15 bp, Homo sapiens
agactatttaaccat

SEQ ID NO: 837770 - DNA, 15 bp, Homo sapiens
gactatttaaccatg

SEQ ID NO: 837771 - DNA, 15 bp, Homo sapiens
actatttaaccatgc

SEQ ID NO: 837772 - DNA, 15 bp, Homo sapiens
ctatttaaccatgct

SEQ ID NO: 837773 - DNA, 15 bp, Homo sapiens
tatttaaccatgctc

SEQ ID NO: 837774 - DNA, 15 bp, Homo sapiens
atttaaccatgctct

SEQ ID NO: 837775 - DNA, 15 bp, Homo sapiens
tttaaccatgctctc

SEQ ID NO: 837776 - DNA, 15 bp, Homo sapiens
ttaaccatgctctca

SEQ ID NO: 837777 - DNA, 15 bp, Homo sapiens
taaccatgctctcat

SEQ ID NO: 837778 - DNA, 15 bp, Homo sapiens
aaccatgctctcatc

SEQ ID NO: 837779 - DNA, 15 bp, Homo sapiens
accatgctctcatca

SEQ ID NO: 837780 - DNA, 15 bp, Homo sapiens
ccatgctctcatcag

SEQ ID NO: 837781 - DNA, 15 bp, Homo sapiens
catgctctcatcagg

SEQ ID NO: 837782 - DNA, 15 bp, Homo sapiens
atgctctcatcaggg

SEQ ID NO: 837783 - DNA, 15 bp, Homo sapiens
tgctctcatcaggga

SEQ ID NO: 837784 - DNA, 15 bp, Homo sapiens
gctctcatcagggag

SEQ ID NO: 837785 - DNA, 15 bp, Homo sapiens
ctctcatcagggagg

SEQ ID NO: 837786 - DNA, 15 bp, Homo sapiens
tctcatcagggaggg

SEQ ID NO: 837787 - DNA, 15 bp, Homo sapiens
ctcatcagggagggc

SEQ ID NO: 837788 - DNA, 15 bp, Homo sapiens
tcatcagggagggca

SEQ ID NO: 837789 - DNA, 15 bp, Homo sapiens
catcagggagggcac

SEQ ID NO: 837790 - DNA, 15 bp, Homo sapiens
atcagggagggcact

SEQ ID NO: 837791 - DNA, 15 bp, Homo sapiens
tcagggagggcactg

SEQ ID NO: 837792 - DNA, 15 bp, Homo sapiens
cagggagggcactgt

SEQ ID NO: 837793 - DNA, 15 bp, Homo sapiens
agggagggcactgtc

SEQ ID NO: 837794 - DNA, 15 bp, Homo sapiens
gggagggcactgtca

SEQ ID NO: 837795 - DNA, 15 bp, Homo sapiens
ggagggcactgtcat

SEQ ID NO: 837796 - DNA, 15 bp, Homo sapiens
gagggcactgtcatc

SEQ ID NO: 837797 - DNA, 15 bp, Homo sapiens
agggcactgtcatct

SEQ ID NO: 837798 - DNA, 15 bp, Homo sapiens
gggcactgtcatctc

SEQ ID NO: 837799 - DNA, 15 bp, Homo sapiens
ggcactgtcatctct

SEQ ID NO: 837800 - DNA, 15 bp, Homo sapiens
gcactgtcatctctc

SEQ ID NO: 837801 - DNA, 15 bp, Homo sapiens
cactgtcatctctcc

SEQ ID NO: 837802 - DNA, 15 bp, Homo sapiens
actgtcatctctccc

SEQ ID NO: 837803 - DNA, 15 bp, Homo sapiens
ctgtcatctctccct

SEQ ID NO: 837804 - DNA, 15 bp, Homo sapiens
tgtcatctctccctg

SEQ ID NO: 837805 - DNA, 15 bp, Homo sapiens
gtcatctctccctgg

SEQ ID NO: 837806 - DNA, 15 bp, Homo sapiens
tcatctctccctgga

SEQ ID NO: 837807 - DNA, 15 bp, Homo sapiens
catctctccctggag

SEQ ID NO: 837808 - DNA, 15 bp, Homo sapiens
atctctccctggagt

SEQ ID NO: 837809 - DNA, 15 bp, Homo sapiens
tctctccctggagta

SEQ ID NO: 837810 - DNA, 15 bp, Homo sapiens
ctctccctggagtac

SEQ ID NO: 837811 - DNA, 15 bp, Homo sapiens
tctccctggagtacc

SEQ ID NO: 837812 - DNA, 15 bp, Homo sapiens
ctccctggagtaccc

SEQ ID NO: 837813 - DNA, 15 bp, Homo sapiens
tccctggagtaccca

SEQ ID NO: 837814 - DNA, 15 bp, Homo sapiens
ccctggagtacccac

SEQ ID NO: 837815 - DNA, 15 bp, Homo sapiens
cctggagtacccact

SEQ ID NO: 837816 - DNA, 15 bp, Homo sapiens
ctggagtacccactt

SEQ ID NO: 837817 - DNA, 15 bp, Homo sapiens
tggagtacccacttt

SEQ ID NO: 837818 - DNA, 15 bp, Homo sapiens
ggagtacccactttt

SEQ ID NO: 837819 - DNA, 15 bp, Homo sapiens
gagtacccacttttg

SEQ ID NO: 837820 - DNA, 15 bp, Homo sapiens
agtacccacttttgg

SEQ ID NO: 837821 - DNA, 15 bp, Homo sapiens
gtacccacttttggc

SEQ ID NO: 837822 - DNA, 15 bp, Homo sapiens
tacccacttttggct

SEQ ID NO: 837823 - DNA, 15 bp, Homo sapiens
acccacttttggctt

SEQ ID NO: 837824 - DNA, 15 bp, Homo sapiens
cccacttttggctta

SEQ ID NO: 837825 - DNA, 15 bp, Homo sapiens
ccacttttggcttag

SEQ ID NO: 837826 - DNA, 15 bp, Homo sapiens
cacttttggcttagg

SEQ ID NO: 837827 - DNA, 15 bp, Homo sapiens
acttttggcttagga

SEQ ID NO: 837828 - DNA, 15 bp, Homo sapiens
ttttggcttaggatg

SEQ ID NO: 837829 - DNA, 15 bp, Homo sapiens
tttggcttaggatgc

SEQ ID NO: 837830 - DNA, 15 bp, Homo sapiens
ttggcttaggatgca

SEQ ID NO: 837831 - DNA, 15 bp, Homo sapiens
tggcttaggatgcac

SEQ ID NO: 837832 - DNA, 15 bp, Homo sapiens
ggcttaggatgcaca

SEQ ID NO: 837833 - DNA, 15 bp, Homo sapiens
gcttaggatgcacaa

SEQ ID NO: 837834 - DNA, 15 bp, Homo sapiens
cttaggatgcacaag

SEQ ID NO: 837835 - DNA, 15 bp, Homo sapiens
ttaggatgcacaaga

SEQ ID NO: 837836 - DNA, 15 bp, Homo sapiens
taggatgcacaagat

SEQ ID NO: 837837 - DNA, 15 bp, Homo sapiens
aggatgcacaagatt

SEQ ID NO: 837838 - DNA, 15 bp, Homo sapiens
ggatgcacaagattg

SEQ ID NO: 837839 - DNA, 15 bp, Homo sapiens
gatgcacaagattgt

SEQ ID NO: 837840 - DNA, 15 bp, Homo sapiens
atgcacaagattgtc

SEQ ID NO: 837841 - DNA, 15 bp, Homo sapiens
tgcacaagattgtca

SEQ ID NO: 837842 - DNA, 15 bp, Homo sapiens
gcacaagattgtcac

SEQ ID NO: 837843 - DNA, 15 bp, Homo sapiens
cacaagattgtcaca

SEQ ID NO: 837844 - DNA, 15 bp, Homo sapiens
acaagattgtcacag

SEQ ID NO: 837845 - DNA, 15 bp, Homo sapiens
caagattgtcacaga

SEQ ID NO: 837846 - DNA, 15 bp, Homo sapiens
aagattgtcacagaa

SEQ ID NO: 837847 - DNA, 15 bp, Homo sapiens
agattgtcacagaag

SEQ ID NO: 837848 - DNA, 15 bp, Homo sapiens
gattgtcacagaagc

SEQ ID NO: 837849 - DNA, 15 bp, Homo sapiens
attgtcacagaagcg

SEQ ID NO: 837850 - DNA, 15 bp, Homo sapiens
ttgtcacagaagcgg

SEQ ID NO: 837851 - DNA, 15 bp, Homo sapiens
tgtcacagaagcgga

SEQ ID NO: 837852 - DNA, 15 bp, Homo sapiens
gtcacagaagcggat

SEQ ID NO: 837853 - DNA, 15 bp, Homo sapiens
tcacagaagcggatt

SEQ ID NO: 837854 - DNA, 15 bp, Homo sapiens
cacagaagcggattt

SEQ ID NO: 837855 - DNA, 15 bp, Homo sapiens
acagaagcggatttt

SEQ ID NO: 837856 - DNA, 15 bp, Homo sapiens
cagaagcggattttg

SEQ ID NO: 837857 - DNA, 15 bp, Homo sapiens
agaagcggattttgc

SEQ ID NO: 837858 - DNA, 15 bp, Homo sapiens
gaagcggattttgca

SEQ ID NO: 837859 - DNA, 15 bp, Homo sapiens
aagcggattttgcaa

SEQ ID NO: 837860 - DNA, 15 bp, Homo sapiens
agcggattttgcaag

SEQ ID NO: 837861 - DNA, 15 bp, Homo sapiens
gcggattttgcaaga

SEQ ID NO: 837862 - DNA, 15 bp, Homo sapiens
cggattttgcaagaa

SEQ ID NO: 837863 - DNA, 15 bp, Homo sapiens
ggattttgcaagaag

SEQ ID NO: 837864 - DNA, 15 bp, Homo sapiens
gattttgcaagaagg

SEQ ID NO: 837865 - DNA, 15 bp, Homo sapiens
attttgcaagaagga

SEQ ID NO: 837866 - DNA, 15 bp, Homo sapiens
ttttgcaagaaggaa

SEQ ID NO: 837867 - DNA, 15 bp, Homo sapiens
tttgcaagaaggaat

SEQ ID NO: 837868 - DNA, 15 bp, Homo sapiens
ttgcaagaaggaatt

SEQ ID NO: 837869 - DNA, 15 bp, Homo sapiens
tgcaagaaggaattt

SEQ ID NO: 837870 - DNA, 15 bp, Homo sapiens
gcaagaaggaatttc

SEQ ID NO: 837871 - DNA, 15 bp, Homo sapiens
caagaaggaatttca

SEQ ID NO: 837872 - DNA, 15 bp, Homo sapiens
aagaaggaatttcat

SEQ ID NO: 837873 - DNA, 15 bp, Homo sapiens
agaaggaatttcata

SEQ ID NO: 837874 - DNA, 15 bp, Homo sapiens
gaaggaatttcataa

SEQ ID NO: 837875 - DNA, 15 bp, Homo sapiens
aaggaatttcataag

SEQ ID NO: 837876 - DNA, 15 bp, Homo sapiens
aggaatttcataaga

SEQ ID NO: 837877 - DNA, 15 bp, Homo sapiens
ggaatttcataagaa

SEQ ID NO: 837878 - DNA, 15 bp, Homo sapiens
gaatttcataagaat

SEQ ID NO: 837879 - DNA, 15 bp, Homo sapiens
aatttcataagaata

SEQ ID NO: 837880 - DNA, 15 bp, Homo sapiens
atttcataagaatag

SEQ ID NO: 837881 - DNA, 15 bp, Homo sapiens
tttcataagaatagt

SEQ ID NO: 837882 - DNA, 15 bp, Homo sapiens
ttcataagaatagta

SEQ ID NO: 837883 - DNA, 15 bp, Homo sapiens
tcataagaatagtat

SEQ ID NO: 837884 - DNA, 15 bp, Homo sapiens
cataagaatagtatt

SEQ ID NO: 837885 - DNA, 15 bp, Homo sapiens
ataagaatagtattt

SEQ ID NO: 837886 - DNA, 15 bp, Homo sapiens
taagaatagtatttt

SEQ ID NO: 837887 - DNA, 15 bp, Homo sapiens
aagaatagtattttt

SEQ ID NO: 837888 - DNA, 15 bp, Homo sapiens
agaatagtatttttg

SEQ ID NO: 837889 - DNA, 15 bp, Homo sapiens
gaatagtatttttga

SEQ ID NO: 837890 - DNA, 15 bp, Homo sapiens
aatagtatttttgaa

SEQ ID NO: 837891 - DNA, 15 bp, Homo sapiens
atagtatttttgaaa

SEQ ID NO: 837892 - DNA, 15 bp, Homo sapiens
tagtatttttgaaag

SEQ ID NO: 837893 - DNA, 15 bp, Homo sapiens
agtatttttgaaagc

SEQ ID NO: 837894 - DNA, 15 bp, Homo sapiens
gtatttttgaaagca

SEQ ID NO: 837895 - DNA, 15 bp, Homo sapiens
tatttttgaaagcag

SEQ ID NO: 837896 - DNA, 15 bp, Homo sapiens
atttttgaaagcaga

SEQ ID NO: 837897 - DNA, 15 bp, Homo sapiens
tttttgaaagcagag

SEQ ID NO: 837898 - DNA, 15 bp, Homo sapiens
ttttgaaagcagagt

SEQ ID NO: 837899 - DNA, 15 bp, Homo sapiens
tttgaaagcagagtg

SEQ ID NO: 837900 - DNA, 15 bp, Homo sapiens
ttgaaagcagagtgt

SEQ ID NO: 837901 - DNA, 15 bp, Homo sapiens
tgaaagcagagtgtg

SEQ ID NO: 837902 - DNA, 15 bp, Homo sapiens
gaaagcagagtgtgg

SEQ ID NO: 837903 - DNA, 15 bp, Homo sapiens
aaagcagagtgtgga

SEQ ID NO: 837904 - DNA, 15 bp, Homo sapiens
aagcagagtgtggaa

SEQ ID NO: 837905 - DNA, 15 bp, Homo sapiens
agcagagtgtggaac

SEQ ID NO: 837906 - DNA, 15 bp, Homo sapiens
gcagagtgtggaacc

SEQ ID NO: 837907 - DNA, 15 bp, Homo sapiens
cagagtgtggaaccc

SEQ ID NO: 837908 - DNA, 15 bp, Homo sapiens
agagtgtggaaccct

SEQ ID NO: 837909 - DNA, 15 bp, Homo sapiens
gagtgtggaaccctt

SEQ ID NO: 837910 - DNA, 15 bp, Homo sapiens
agtgtggaacccttg

SEQ ID NO: 837911 - DNA, 15 bp, Homo sapiens
gtgtggaacccttgg

SEQ ID NO: 837912 - DNA, 15 bp, Homo sapiens
tgtggaacccttgga

SEQ ID NO: 837913 - DNA, 15 bp, Homo sapiens
gtggaacccttggac

SEQ ID NO: 837914 - DNA, 15 bp, Homo sapiens
tggaacccttggact

SEQ ID NO: 837915 - DNA, 15 bp, Homo sapiens
ggaacccttggactt

SEQ ID NO: 837916 - DNA, 15 bp, Homo sapiens
gaacccttggacttg

SEQ ID NO: 837917 - DNA, 15 bp, Homo sapiens
aacccttggacttgc

SEQ ID NO: 837918 - DNA, 15 bp, Homo sapiens
acccttggacttgct

SEQ ID NO: 837919 - DNA, 15 bp, Homo sapiens
cccttggacttgctc

SEQ ID NO: 837920 - DNA, 15 bp, Homo sapiens
ccttggacttgctct

SEQ ID NO: 837921 - DNA, 15 bp, Homo sapiens
cttggacttgctctt

SEQ ID NO: 837922 - DNA, 15 bp, Homo sapiens
ttggacttgctcttt

SEQ ID NO: 837923 - DNA, 15 bp, Homo sapiens
tggacttgctctttg

SEQ ID NO: 837924 - DNA, 15 bp, Homo sapiens
ggacttgctctttgt

SEQ ID NO: 837925 - DNA, 15 bp, Homo sapiens
gacttgctctttgtt

SEQ ID NO: 837926 - DNA, 15 bp, Homo sapiens
acttgctctttgttt

SEQ ID NO: 837927 - DNA, 15 bp, Homo sapiens
cttgctctttgtttt

SEQ ID NO: 837928 - DNA, 15 bp, Homo sapiens
ttgctctttgttttc

SEQ ID NO: 837929 - DNA, 15 bp, Homo sapiens
tgctctttgttttca

SEQ ID NO: 837930 - DNA, 15 bp, Homo sapiens
gctctttgttttcac

SEQ ID NO: 837931 - DNA, 15 bp, Homo sapiens
ctctttgttttcaca

SEQ ID NO: 837932 - DNA, 15 bp, Homo sapiens
tctttgttttcacaa

SEQ ID NO: 837933 - DNA, 15 bp, Homo sapiens
ctttgttttcacaat

SEQ ID NO: 837934 - DNA, 15 bp, Homo sapiens
tttgttttcacaatg

SEQ ID NO: 837935 - DNA, 15 bp, Homo sapiens
ttgttttcacaatgg

SEQ ID NO: 837936 - DNA, 15 bp, Homo sapiens
tgttttcacaatgga

SEQ ID NO: 837937 - DNA, 15 bp, Homo sapiens
gttttcacaatggag

SEQ ID NO: 837938 - DNA, 15 bp, Homo sapiens
ttttcacaatggagt

SEQ ID NO: 837939 - DNA, 15 bp, Homo sapiens
tttcacaatggagtc

SEQ ID NO: 837940 - DNA, 15 bp, Homo sapiens
ttcacaatggagtct

SEQ ID NO: 837941 - DNA, 15 bp, Homo sapiens
tcacaatggagtctt

SEQ ID NO: 837942 - DNA, 15 bp, Homo sapiens
cacaatggagtcttc

SEQ ID NO: 837943 - DNA, 15 bp, Homo sapiens
acaatggagtcttcc

SEQ ID NO: 837944 - DNA, 15 bp, Homo sapiens
caatggagtcttcca

SEQ ID NO: 837945 - DNA, 15 bp, Homo sapiens
aatggagtcttccat

SEQ ID NO: 837946 - DNA, 15 bp, Homo sapiens
atggagtcttccatc

SEQ ID NO: 837947 - DNA, 15 bp, Homo sapiens
tggagtcttccatcc

SEQ ID NO: 837948 - DNA, 15 bp, Homo sapiens
ggagtcttccatcct

SEQ ID NO: 837949 - DNA, 15 bp, Homo sapiens
gagtcttccatcctt

SEQ ID NO: 837950 - DNA, 15 bp, Homo sapiens
agtcttccatccttc

SEQ ID NO: 837951 - DNA, 15 bp, Homo sapiens
gtcttccatccttct

SEQ ID NO: 837952 - DNA, 15 bp, Homo sapiens
tcttccatccttcta

SEQ ID NO: 837953 - DNA, 15 bp, Homo sapiens
cttccatccttctag

SEQ ID NO: 837954 - DNA, 15 bp, Homo sapiens
ttccatccttctagt

SEQ ID NO: 837955 - DNA, 15 bp, Homo sapiens
tccatccttctagtt

SEQ ID NO: 837956 - DNA, 15 bp, Homo sapiens
ccatccttctagttc

SEQ ID NO: 837957 - DNA, 15 bp, Homo sapiens
catccttctagttca

SEQ ID NO: 837958 - DNA, 15 bp, Homo sapiens
atccttctagttcaa

SEQ ID NO: 837959 - DNA, 15 bp, Homo sapiens
tccttctagttcaac

SEQ ID NO: 837960 - DNA, 15 bp, Homo sapiens
ccttctagttcaact

SEQ ID NO: 837961 - DNA, 15 bp, Homo sapiens
cttctagttcaacta

SEQ ID NO: 837962 - DNA, 15 bp, Homo sapiens
ttctagttcaactat

SEQ ID NO: 837963 - DNA, 15 bp, Homo sapiens
tctagttcaactatt

SEQ ID NO: 837964 - DNA, 15 bp, Homo sapiens
ctagttcaactattg

SEQ ID NO: 837965 - DNA, 15 bp, Homo sapiens
tagttcaactattgt

SEQ ID NO: 837966 - DNA, 15 bp, Homo sapiens
agttcaactattgta

SEQ ID NO: 837967 - DNA, 15 bp, Homo sapiens
gttcaactattgtat

SEQ ID NO: 837968 - DNA, 15 bp, Homo sapiens
ttcaactattgtata

SEQ ID NO: 837969 - DNA, 15 bp, Homo sapiens
tcaactattgtatat

SEQ ID NO: 837970 - DNA, 15 bp, Homo sapiens
caactattgtatatt

SEQ ID NO: 837971 - DNA, 15 bp, Homo sapiens
aactattgtatattg

SEQ ID NO: 837972 - DNA, 15 bp, Homo sapiens
actattgtatattgt

SEQ ID NO: 837973 - DNA, 15 bp, Homo sapiens
ctattgtatattgtt

SEQ ID NO: 837974 - DNA, 15 bp, Homo sapiens
tattgtatattgttc

SEQ ID NO: 837975 - DNA, 15 bp, Homo sapiens
attgtatattgttct

SEQ ID NO: 837976 - DNA, 15 bp, Homo sapiens
ttgtatattgttctg

SEQ ID NO: 837977 - DNA, 15 bp, Homo sapiens
tgtatattgttctga

SEQ ID NO: 837978 - DNA, 15 bp, Homo sapiens
gtatattgttctgaa

SEQ ID NO: 837979 - DNA, 15 bp, Homo sapiens
tatattgttctgaaa

SEQ ID NO: 837980 - DNA, 15 bp, Homo sapiens
atattgttctgaaag

SEQ ID NO: 837981 - DNA, 15 bp, Homo sapiens
tattgttctgaaagt

SEQ ID NO: 837982 - DNA, 15 bp, Homo sapiens
attgttctgaaagtg

SEQ ID NO: 837983 - DNA, 15 bp, Homo sapiens
ttgttctgaaagtga

SEQ ID NO: 837984 - DNA, 15 bp, Homo sapiens
tgttctgaaagtgaa

SEQ ID NO: 837985 - DNA, 15 bp, Homo sapiens
gttctgaaagtgaag

SEQ ID NO: 837986 - DNA, 15 bp, Homo sapiens
ttctgaaagtgaagg

SEQ ID NO: 837987 - DNA, 15 bp, Homo sapiens
tctgaaagtgaaggg

SEQ ID NO: 837988 - DNA, 15 bp, Homo sapiens
ctgaaagtgaaggga

SEQ ID NO: 837989 - DNA, 15 bp, Homo sapiens
tgaaagtgaagggaa

SEQ ID NO: 837990 - DNA, 15 bp, Homo sapiens
gaaagtgaagggaat

SEQ ID NO: 837991 - DNA, 15 bp, Homo sapiens
aaagtgaagggaatg

SEQ ID NO: 837992 - DNA, 15 bp, Homo sapiens
aagtgaagggaatgc

SEQ ID NO: 837993 - DNA, 15 bp, Homo sapiens
agtgaagggaatgct

SEQ ID NO: 837994 - DNA, 15 bp, Homo sapiens
gtgaagggaatgctc

SEQ ID NO: 837995 - DNA, 15 bp, Homo sapiens
tgaagggaatgctcc

SEQ ID NO: 837996 - DNA, 15 bp, Homo sapiens
gaagggaatgctccc

SEQ ID NO: 837997 - DNA, 15 bp, Homo sapiens
aagggaatgctccct

SEQ ID NO: 837998 - DNA, 15 bp, Homo sapiens
agggaatgctccctt

SEQ ID NO: 837999 - DNA, 15 bp, Homo sapiens
gggaatgctcccttg

SEQ ID NO: 838000 - DNA, 15 bp, Homo sapiens
ggaatgctcccttgg

SEQ ID NO: 838001 - DNA, 15 bp, Homo sapiens
gaatgctcccttggt

SEQ ID NO: 838002 - DNA, 15 bp, Homo sapiens
aatgctcccttggtg

SEQ ID NO: 838003 - DNA, 15 bp, Homo sapiens
atgctcccttggtgc

SEQ ID NO: 838004 - DNA, 15 bp, Homo sapiens
tgctcccttggtgct

SEQ ID NO: 838005 - DNA, 15 bp, Homo sapiens
gctcccttggtgctc

SEQ ID NO: 838006 - DNA, 15 bp, Homo sapiens
ctcccttggtgctcc

SEQ ID NO: 838007 - DNA, 15 bp, Homo sapiens
tcccttggtgctcct

SEQ ID NO: 838008 - DNA, 15 bp, Homo sapiens
cccttggtgctcctt

SEQ ID NO: 838009 - DNA, 15 bp, Homo sapiens
ccttggtgctccttg

SEQ ID NO: 838010 - DNA, 15 bp, Homo sapiens
cttggtgctccttgt

SEQ ID NO: 838011 - DNA, 15 bp, Homo sapiens
ttggtgctccttgtg

SEQ ID NO: 838012 - DNA, 15 bp, Homo sapiens
tggtgctccttgtgt

SEQ ID NO: 838013 - DNA, 15 bp, Homo sapiens
ggtgctccttgtgtt

SEQ ID NO: 838014 - DNA, 15 bp, Homo sapiens
gtgctccttgtgttt

SEQ ID NO: 838015 - DNA, 15 bp, Homo sapiens
tgctccttgtgtttg

SEQ ID NO: 838016 - DNA, 15 bp, Homo sapiens
gctccttgtgtttgc

SEQ ID NO: 838017 - DNA, 15 bp, Homo sapiens
ctccttgtgtttgct

SEQ ID NO: 838018 - DNA, 15 bp, Homo sapiens
tccttgtgtttgctg

SEQ ID NO: 838019 - DNA, 15 bp, Homo sapiens
ccttgtgtttgctga

SEQ ID NO: 838020 - DNA, 15 bp, Homo sapiens
cttgtgtttgctgag

SEQ ID NO: 838021 - DNA, 15 bp, Homo sapiens
ttgtgtttgctgaga

SEQ ID NO: 838022 - DNA, 15 bp, Homo sapiens
tgtgtttgctgagat

SEQ ID NO: 838023 - DNA, 15 bp, Homo sapiens
gtgtttgctgagatg

SEQ ID NO: 838024 - DNA, 15 bp, Homo sapiens
tgtttgctgagatgt

SEQ ID NO: 838025 - DNA, 15 bp, Homo sapiens
gtttgctgagatgtg

SEQ ID NO: 838026 - DNA, 15 bp, Homo sapiens
tttgctgagatgtgc

SEQ ID NO: 838027 - DNA, 15 bp, Homo sapiens
ttgctgagatgtgca

SEQ ID NO: 838028 - DNA, 15 bp, Homo sapiens
tgctgagatgtgcag

SEQ ID NO: 838029 - DNA, 15 bp, Homo sapiens
gctgagatgtgcaga

SEQ ID NO: 838030 - DNA, 15 bp, Homo sapiens
ctgagatgtgcagag

SEQ ID NO: 838031 - DNA, 15 bp, Homo sapiens
tgagatgtgcagaga

SEQ ID NO: 838032 - DNA, 15 bp, Homo sapiens
gagatgtgcagagaa

SEQ ID NO: 838033 - DNA, 15 bp, Homo sapiens
agatgtgcagagaaa

SEQ ID NO: 838034 - DNA, 15 bp, Homo sapiens
gatgtgcagagaaat

SEQ ID NO: 838035 - DNA, 15 bp, Homo sapiens
atgtgcagagaaata

SEQ ID NO: 838036 - DNA, 15 bp, Homo sapiens
tgtgcagagaaataa

SEQ ID NO: 838037 - DNA, 15 bp, Homo sapiens
gtgcagagaaataat

SEQ ID NO: 838038 - DNA, 15 bp, Homo sapiens
tgcagagaaataata

SEQ ID NO: 838039 - DNA, 15 bp, Homo sapiens
gcagagaaataataa

SEQ ID NO: 838040 - DNA, 15 bp, Homo sapiens
cagagaaataataac

SEQ ID NO: 838041 - DNA, 15 bp, Homo sapiens
agagaaataataact

SEQ ID NO: 838042 - DNA, 15 bp, Homo sapiens
gagaaataataactt

SEQ ID NO: 838043 - DNA, 15 bp, Homo sapiens
agaaataataacttc

SEQ ID NO: 838044 - DNA, 15 bp, Homo sapiens
gaaataataacttca

SEQ ID NO: 838045 - DNA, 15 bp, Homo sapiens
aaataataacttcaa

SEQ ID NO: 838046 - DNA, 15 bp, Homo sapiens
aataataacttcaaa

SEQ ID NO: 838047 - DNA, 15 bp, Homo sapiens
ataataacttcaaag

SEQ ID NO: 838048 - DNA, 15 bp, Homo sapiens
taataacttcaaagc

SEQ ID NO: 838049 - DNA, 15 bp, Homo sapiens
aataacttcaaagcc

SEQ ID NO: 838050 - DNA, 15 bp, Homo sapiens
ataacttcaaagcca

SEQ ID NO: 838051 - DNA, 15 bp, Homo sapiens
taacttcaaagccat

SEQ ID NO: 838052 - DNA, 15 bp, Homo sapiens
aacttcaaagccata

SEQ ID NO: 838053 - DNA, 15 bp, Homo sapiens
acttcaaagccatag

SEQ ID NO: 838054 - DNA, 15 bp, Homo sapiens
cttcaaagccataga

SEQ ID NO: 838055 - DNA, 15 bp, Homo sapiens
ttcaaagccatagaa

SEQ ID NO: 838056 - DNA, 15 bp, Homo sapiens
tcaaagccatagaat

SEQ ID NO: 838057 - DNA, 15 bp, Homo sapiens
caaagccatagaatc

SEQ ID NO: 838058 - DNA, 15 bp, Homo sapiens
aaagccatagaatct

SEQ ID NO: 838059 - DNA, 15 bp, Homo sapiens
aagccatagaatctt

SEQ ID NO: 838060 - DNA, 15 bp, Homo sapiens
agccatagaatcttg

SEQ ID NO: 838061 - DNA, 15 bp, Homo sapiens
gccatagaatcttgg

SEQ ID NO: 838062 - DNA, 15 bp, Homo sapiens
ccatagaatcttggc

SEQ ID NO: 838063 - DNA, 15 bp, Homo sapiens
catagaatcttggca

SEQ ID NO: 838064 - DNA, 15 bp, Homo sapiens
atagaatcttggcac

SEQ ID NO: 838065 - DNA, 15 bp, Homo sapiens
tagaatcttggcact

SEQ ID NO: 838066 - DNA, 15 bp, Homo sapiens
agaatcttggcacta

SEQ ID NO: 838067 - DNA, 15 bp, Homo sapiens
gaatcttggcactag

SEQ ID NO: 838068 - DNA, 15 bp, Homo sapiens
aatcttggcactagc

SEQ ID NO: 838069 - DNA, 15 bp, Homo sapiens
atcttggcactagca

SEQ ID NO: 838070 - DNA, 15 bp, Homo sapiens
tcttggcactagcag

SEQ ID NO: 838071 - DNA, 15 bp, Homo sapiens
cttggcactagcaga

SEQ ID NO: 838072 - DNA, 15 bp, Homo sapiens
ttggcactagcagag

SEQ ID NO: 838073 - DNA, 15 bp, Homo sapiens
tggcactagcagaga

SEQ ID NO: 838074 - DNA, 15 bp, Homo sapiens
ggcactagcagagac

SEQ ID NO: 838075 - DNA, 15 bp, Homo sapiens
gcactagcagagact

SEQ ID NO: 838076 - DNA, 15 bp, Homo sapiens
cactagcagagactt

SEQ ID NO: 838077 - DNA, 15 bp, Homo sapiens
actagcagagactta

SEQ ID NO: 838078 - DNA, 15 bp, Homo sapiens
ctagcagagacttag

SEQ ID NO: 838079 - DNA, 15 bp, Homo sapiens
tagcagagacttaga

SEQ ID NO: 838080 - DNA, 15 bp, Homo sapiens
agcagagacttagaa

SEQ ID NO: 838081 - DNA, 15 bp, Homo sapiens
gcagagacttagaag

SEQ ID NO: 838082 - DNA, 15 bp, Homo sapiens
cagagacttagaagg

SEQ ID NO: 838083 - DNA, 15 bp, Homo sapiens
agagacttagaaggg

SEQ ID NO: 838084 - DNA, 15 bp, Homo sapiens
gagacttagaagggc

SEQ ID NO: 838085 - DNA, 15 bp, Homo sapiens
agacttagaagggct

SEQ ID NO: 838086 - DNA, 15 bp, Homo sapiens
gacttagaagggctc

SEQ ID NO: 838087 - DNA, 15 bp, Homo sapiens
acttagaagggctct

SEQ ID NO: 838088 - DNA, 15 bp, Homo sapiens
cttagaagggctctc

SEQ ID NO: 838089 - DNA, 15 bp, Homo sapiens
ttagaagggctctct

SEQ ID NO: 838090 - DNA, 15 bp, Homo sapiens
tagaagggctctctg

SEQ ID NO: 838091 - DNA, 15 bp, Homo sapiens
agaagggctctctga

SEQ ID NO: 838092 - DNA, 15 bp, Homo sapiens
gaagggctctctgat

SEQ ID NO: 838093 - DNA, 15 bp, Homo sapiens
aagggctctctgatt

SEQ ID NO: 838094 - DNA, 15 bp, Homo sapiens
agggctctctgattc

SEQ ID NO: 838095 - DNA, 15 bp, Homo sapiens
gggctctctgattca

SEQ ID NO: 838096 - DNA, 15 bp, Homo sapiens
ggctctctgattcaa

SEQ ID NO: 838097 - DNA, 15 bp, Homo sapiens
gctctctgattcaac

SEQ ID NO: 838098 - DNA, 15 bp, Homo sapiens
ctctctgattcaacc

SEQ ID NO: 838099 - DNA, 15 bp, Homo sapiens
tctctgattcaacct

SEQ ID NO: 838100 - DNA, 15 bp, Homo sapiens
ctctgattcaacctc

SEQ ID NO: 838101 - DNA, 15 bp, Homo sapiens
tctgattcaacctcc

SEQ ID NO: 838102 - DNA, 15 bp, Homo sapiens
ctgattcaacctcct

SEQ ID NO: 838103 - DNA, 15 bp, Homo sapiens
tgattcaacctccta

SEQ ID NO: 838104 - DNA, 15 bp, Homo sapiens
gattcaacctcctag

SEQ ID NO: 838105 - DNA, 15 bp, Homo sapiens
attcaacctcctagt

SEQ ID NO: 838106 - DNA, 15 bp, Homo sapiens
ttcaacctcctagtg

SEQ ID NO: 838107 - DNA, 15 bp, Homo sapiens
tcaacctcctagtgc

SEQ ID NO: 838108 - DNA, 15 bp, Homo sapiens
caacctcctagtgca

SEQ ID NO: 838109 - DNA, 15 bp, Homo sapiens
aacctcctagtgcag

SEQ ID NO: 838110 - DNA, 15 bp, Homo sapiens
acctcctagtgcaga

SEQ ID NO: 838111 - DNA, 15 bp, Homo sapiens
cctcctagtgcagag

SEQ ID NO: 838112 - DNA, 15 bp, Homo sapiens
ctcctagtgcagagc

SEQ ID NO: 838113 - DNA, 15 bp, Homo sapiens
tcctagtgcagagca

SEQ ID NO: 838114 - DNA, 15 bp, Homo sapiens
cctagtgcagagcaa

SEQ ID NO: 838115 - DNA, 15 bp, Homo sapiens
ctagtgcagagcaaa

SEQ ID NO: 838116 - DNA, 15 bp, Homo sapiens
tagtgcagagcaaaa

SEQ ID NO: 838117 - DNA, 15 bp, Homo sapiens
agtgcagagcaaaag

SEQ ID NO: 838118 - DNA, 15 bp, Homo sapiens
gtgcagagcaaaagt

SEQ ID NO: 838119 - DNA, 15 bp, Homo sapiens
tgcagagcaaaagtt

SEQ ID NO: 838120 - DNA, 15 bp, Homo sapiens
gcagagcaaaagttc

SEQ ID NO: 838121 - DNA, 15 bp, Homo sapiens
cagagcaaaagttct

SEQ ID NO: 838122 - DNA, 15 bp, Homo sapiens
agagcaaaagttctt

SEQ ID NO: 838123 - DNA, 15 bp, Homo sapiens
gagcaaaagttcttt

SEQ ID NO: 838124 - DNA, 15 bp, Homo sapiens
agcaaaagttctttc

SEQ ID NO: 838125 - DNA, 15 bp, Homo sapiens
gcaaaagttctttcc

SEQ ID NO: 838126 - DNA, 15 bp, Homo sapiens
caaaagttctttcca

SEQ ID NO: 838127 - DNA, 15 bp, Homo sapiens
aaaagttctttccat

SEQ ID NO: 838128 - DNA, 15 bp, Homo sapiens
aaagttctttccata

SEQ ID NO: 838129 - DNA, 15 bp, Homo sapiens
aagttctttccatag

SEQ ID NO: 838130 - DNA, 15 bp, Homo sapiens
agttctttccatagt

SEQ ID NO: 838131 - DNA, 15 bp, Homo sapiens
gttctttccatagta

SEQ ID NO: 838132 - DNA, 15 bp, Homo sapiens
ttctttccatagtaa

SEQ ID NO: 838133 - DNA, 15 bp, Homo sapiens
tctttccatagtaac

SEQ ID NO: 838134 - DNA, 15 bp, Homo sapiens
ctttccatagtaact

SEQ ID NO: 838135 - DNA, 15 bp, Homo sapiens
tttccatagtaactt

SEQ ID NO: 838136 - DNA, 15 bp, Homo sapiens
ttccatagtaacttg

SEQ ID NO: 838137 - DNA, 15 bp, Homo sapiens
tccatagtaacttgg

SEQ ID NO: 838138 - DNA, 15 bp, Homo sapiens
ccatagtaacttgga

SEQ ID NO: 838139 - DNA, 15 bp, Homo sapiens
catagtaacttggag

SEQ ID NO: 838140 - DNA, 15 bp, Homo sapiens
atagtaacttggaga

SEQ ID NO: 838141 - DNA, 15 bp, Homo sapiens
tagtaacttggagaa

SEQ ID NO: 838142 - DNA, 15 bp, Homo sapiens
agtaacttggagaaa

SEQ ID NO: 838143 - DNA, 15 bp, Homo sapiens
gtaacttggagaaat

SEQ ID NO: 838144 - DNA, 15 bp, Homo sapiens
taacttggagaaata

SEQ ID NO: 838145 - DNA, 15 bp, Homo sapiens
aacttggagaaatac

SEQ ID NO: 838146 - DNA, 15 bp, Homo sapiens
acttggagaaatact

SEQ ID NO: 838147 - DNA, 15 bp, Homo sapiens
cttggagaaatactt

SEQ ID NO: 838148 - DNA, 15 bp, Homo sapiens
ttggagaaatactta

SEQ ID NO: 838149 - DNA, 15 bp, Homo sapiens
tggagaaatacttac

SEQ ID NO: 838150 - DNA, 15 bp, Homo sapiens
ggagaaatacttact

SEQ ID NO: 838151 - DNA, 15 bp, Homo sapiens
gagaaatacttactg

SEQ ID NO: 838152 - DNA, 15 bp, Homo sapiens
agaaatacttactga

SEQ ID NO: 838153 - DNA, 15 bp, Homo sapiens
gaaatacttactgag

SEQ ID NO: 838154 - DNA, 15 bp, Homo sapiens
aaatacttactgagt

SEQ ID NO: 838155 - DNA, 15 bp, Homo sapiens
aatacttactgagtc

SEQ ID NO: 838156 - DNA, 15 bp, Homo sapiens
atacttactgagtct

SEQ ID NO: 838157 - DNA, 15 bp, Homo sapiens
tacttactgagtctt

SEQ ID NO: 838158 - DNA, 15 bp, Homo sapiens
acttactgagtctta

SEQ ID NO: 838159 - DNA, 15 bp, Homo sapiens
cttactgagtcttag

SEQ ID NO: 838160 - DNA, 15 bp, Homo sapiens
ttactgagtcttagg

SEQ ID NO: 838161 - DNA, 15 bp, Homo sapiens
tactgagtcttaggg

SEQ ID NO: 838162 - DNA, 15 bp, Homo sapiens
actgagtcttaggga

SEQ ID NO: 838163 - DNA, 15 bp, Homo sapiens
ctgagtcttagggac

SEQ ID NO: 838164 - DNA, 15 bp, Homo sapiens
tgagtcttagggaca

SEQ ID NO: 838165 - DNA, 15 bp, Homo sapiens
gagtcttagggacaa

SEQ ID NO: 838166 - DNA, 15 bp, Homo sapiens
agtcttagggacaaa

SEQ ID NO: 838167 - DNA, 15 bp, Homo sapiens
gtcttagggacaaag

SEQ ID NO: 838168 - DNA, 15 bp, Homo sapiens
tcttagggacaaaga

SEQ ID NO: 838169 - DNA, 15 bp, Homo sapiens
cttagggacaaagac

SEQ ID NO: 838170 - DNA, 15 bp, Homo sapiens
ttagggacaaagacc

SEQ ID NO: 838171 - DNA, 15 bp, Homo sapiens
tagggacaaagacct

SEQ ID NO: 838172 - DNA, 15 bp, Homo sapiens
agggacaaagacctt

SEQ ID NO: 838173 - DNA, 15 bp, Homo sapiens
gggacaaagaccttt

SEQ ID NO: 838174 - DNA, 15 bp, Homo sapiens
ggacaaagacctttc

SEQ ID NO: 838175 - DNA, 15 bp, Homo sapiens
gacaaagacctttca

SEQ ID NO: 838176 - DNA, 15 bp, Homo sapiens
acaaagacctttcat

SEQ ID NO: 838177 - DNA, 15 bp, Homo sapiens
caaagacctttcatt

SEQ ID NO: 838178 - DNA, 15 bp, Homo sapiens
aaagacctttcattt

SEQ ID NO: 838179 - DNA, 15 bp, Homo sapiens
aagacctttcatttt

SEQ ID NO: 838180 - DNA, 15 bp, Homo sapiens
agacctttcattttt

SEQ ID NO: 838181 - DNA, 15 bp, Homo sapiens
gacctttcatttttt

SEQ ID NO: 838182 - DNA, 15 bp, Homo sapiens
acctttcatttttta

SEQ ID NO: 838183 - DNA, 15 bp, Homo sapiens
cctttcattttttaa

SEQ ID NO: 838184 - DNA, 15 bp, Homo sapiens
ctttcattttttaag

SEQ ID NO: 838185 - DNA, 15 bp, Homo sapiens
tttcattttttaagg

SEQ ID NO: 838186 - DNA, 15 bp, Homo sapiens
ttcattttttaaggt

SEQ ID NO: 838187 - DNA, 15 bp, Homo sapiens
tcattttttaaggta

SEQ ID NO: 838188 - DNA, 15 bp, Homo sapiens
cattttttaaggtaa

SEQ ID NO: 838189 - DNA, 15 bp, Homo sapiens
attttttaaggtaac

SEQ ID NO: 838190 - DNA, 15 bp, Homo sapiens
ttttttaaggtaacc

SEQ ID NO: 838191 - DNA, 15 bp, Homo sapiens
tttttaaggtaacct

SEQ ID NO: 838192 - DNA, 15 bp, Homo sapiens
ttttaaggtaacctt

SEQ ID NO: 838193 - DNA, 15 bp, Homo sapiens
tttaaggtaaccttc

SEQ ID NO: 838194 - DNA, 15 bp, Homo sapiens
ttaaggtaaccttct

SEQ ID NO: 838195 - DNA, 15 bp, Homo sapiens
taaggtaaccttctc

SEQ ID NO: 838196 - DNA, 15 bp, Homo sapiens
aaggtaaccttctcc

SEQ ID NO: 838197 - DNA, 15 bp, Homo sapiens
aggtaaccttctccg

SEQ ID NO: 838198 - DNA, 15 bp, Homo sapiens
ggtaaccttctccgt

SEQ ID NO: 838199 - DNA, 15 bp, Homo sapiens
gtaaccttctccgtt

SEQ ID NO: 838200 - DNA, 15 bp, Homo sapiens
taaccttctccgttt

SEQ ID NO: 838201 - DNA, 15 bp, Homo sapiens
aaccttctccgtttg

SEQ ID NO: 838202 - DNA, 15 bp, Homo sapiens
accttctccgtttgg

SEQ ID NO: 838203 - DNA, 15 bp, Homo sapiens
ccttctccgtttggt

SEQ ID NO: 838204 - DNA, 15 bp, Homo sapiens
cttctccgtttggta

SEQ ID NO: 838205 - DNA, 15 bp, Homo sapiens
ttctccgtttggtag

SEQ ID NO: 838206 - DNA, 15 bp, Homo sapiens
tctccgtttggtaga

SEQ ID NO: 838207 - DNA, 15 bp, Homo sapiens
ctccgtttggtagac

SEQ ID NO: 838208 - DNA, 15 bp, Homo sapiens
tccgtttggtagaca

SEQ ID NO: 838209 - DNA, 15 bp, Homo sapiens
ccgtttggtagacaa

SEQ ID NO: 838210 - DNA, 15 bp, Homo sapiens
cgtttggtagacaaa

SEQ ID NO: 838211 - DNA, 15 bp, Homo sapiens
gtttggtagacaaat

SEQ ID NO: 838212 - DNA, 15 bp, Homo sapiens
tttggtagacaaatt

SEQ ID NO: 838213 - DNA, 15 bp, Homo sapiens
ttggtagacaaatta

SEQ ID NO: 838214 - DNA, 15 bp, Homo sapiens
tggtagacaaattac

SEQ ID NO: 838215 - DNA, 15 bp, Homo sapiens
ggtagacaaattaca

SEQ ID NO: 838216 - DNA, 15 bp, Homo sapiens
gtagacaaattacat

SEQ ID NO: 838217 - DNA, 15 bp, Homo sapiens
tagacaaattacatc

SEQ ID NO: 838218 - DNA, 15 bp, Homo sapiens
agacaaattacatcc

SEQ ID NO: 838219 - DNA, 15 bp, Homo sapiens
gacaaattacatcct

SEQ ID NO: 838220 - DNA, 15 bp, Homo sapiens
acaaattacatcctt

SEQ ID NO: 838221 - DNA, 15 bp, Homo sapiens
caaattacatcctta

SEQ ID NO: 838222 - DNA, 15 bp, Homo sapiens
aaattacatccttag

SEQ ID NO: 838223 - DNA, 15 bp, Homo sapiens
aattacatccttagg

SEQ ID NO: 838224 - DNA, 15 bp, Homo sapiens
attacatccttagga

SEQ ID NO: 838225 - DNA, 15 bp, Homo sapiens
ttacatccttaggaa

SEQ ID NO: 838226 - DNA, 15 bp, Homo sapiens
tacatccttaggaag

SEQ ID NO: 838227 - DNA, 15 bp, Homo sapiens
acatccttaggaagt

SEQ ID NO: 838228 - DNA, 15 bp, Homo sapiens
catccttaggaagtt

SEQ ID NO: 838229 - DNA, 15 bp, Homo sapiens
atccttaggaagttc

SEQ ID NO: 838230 - DNA, 15 bp, Homo sapiens
tccttaggaagttca

SEQ ID NO: 838231 - DNA, 15 bp, Homo sapiens
ccttaggaagttcat

SEQ ID NO: 838232 - DNA, 15 bp, Homo sapiens
cttaggaagttcatt

SEQ ID NO: 838233 - DNA, 15 bp, Homo sapiens
ttaggaagttcattt

SEQ ID NO: 838234 - DNA, 15 bp, Homo sapiens
taggaagttcattta

SEQ ID NO: 838235 - DNA, 15 bp, Homo sapiens
aggaagttcatttat

SEQ ID NO: 838236 - DNA, 15 bp, Homo sapiens
ggaagttcatttata

SEQ ID NO: 838237 - DNA, 15 bp, Homo sapiens
gaagttcatttataa

SEQ ID NO: 838238 - DNA, 15 bp, Homo sapiens
aagttcatttataaa

SEQ ID NO: 838239 - DNA, 15 bp, Homo sapiens
agttcatttataaaa

SEQ ID NO: 838240 - DNA, 15 bp, Homo sapiens
gttcatttataaaac

SEQ ID NO: 838241 - DNA, 15 bp, Homo sapiens
ttcatttataaaaca

SEQ ID NO: 838242 - DNA, 15 bp, Homo sapiens
tcatttataaaacaa

SEQ ID NO: 838243 - DNA, 15 bp, Homo sapiens
catttataaaacaag

SEQ ID NO: 838244 - DNA, 15 bp, Homo sapiens
atttataaaacaaga

SEQ ID NO: 838245 - DNA, 15 bp, Homo sapiens
tttataaaacaagac

SEQ ID NO: 838246 - DNA, 15 bp, Homo sapiens
ttataaaacaagaca

SEQ ID NO: 838247 - DNA, 15 bp, Homo sapiens
tataaaacaagacaa

SEQ ID NO: 838248 - DNA, 15 bp, Homo sapiens
ataaaacaagacaaa

SEQ ID NO: 838249 - DNA, 15 bp, Homo sapiens
taaaacaagacaaaa

SEQ ID NO: 838250 - DNA, 15 bp, Homo sapiens
aaaacaagacaaaaa

SEQ ID NO: 838251 - DNA, 15 bp, Homo sapiens
aaacaagacaaaaat

SEQ ID NO: 838252 - DNA, 15 bp, Homo sapiens
aacaagacaaaaatc

SEQ ID NO: 838253 - DNA, 15 bp, Homo sapiens
acaagacaaaaatct

SEQ ID NO: 838254 - DNA, 15 bp, Homo sapiens
caagacaaaaatctg

SEQ ID NO: 838255 - DNA, 15 bp, Homo sapiens
aagacaaaaatctgc

SEQ ID NO: 838256 - DNA, 15 bp, Homo sapiens
agacaaaaatctgct

SEQ ID NO: 838257 - DNA, 15 bp, Homo sapiens
gacaaaaatctgctt

SEQ ID NO: 838258 - DNA, 15 bp, Homo sapiens
acaaaaatctgcttt

SEQ ID NO: 838259 - DNA, 15 bp, Homo sapiens
caaaaatctgctttc

SEQ ID NO: 838260 - DNA, 15 bp, Homo sapiens
aaaaatctgctttct

SEQ ID NO: 838261 - DNA, 15 bp, Homo sapiens
aaaatctgctttctt

SEQ ID NO: 838262 - DNA, 15 bp, Homo sapiens
aaatctgctttcttg

SEQ ID NO: 838263 - DNA, 15 bp, Homo sapiens
aatctgctttcttgg

SEQ ID NO: 838264 - DNA, 15 bp, Homo sapiens
atctgctttcttgga

SEQ ID NO: 838265 - DNA, 15 bp, Homo sapiens
tctgctttcttggaa

SEQ ID NO: 838266 - DNA, 15 bp, Homo sapiens
ctgctttcttggaat

SEQ ID NO: 838267 - DNA, 15 bp, Homo sapiens
tgctttcttggaata

SEQ ID NO: 838268 - DNA, 15 bp, Homo sapiens
gctttcttggaatat

SEQ ID NO: 838269 - DNA, 15 bp, Homo sapiens
ctttcttggaatata

SEQ ID NO: 838270 - DNA, 15 bp, Homo sapiens
tttcttggaatatat

SEQ ID NO: 838271 - DNA, 15 bp, Homo sapiens
ttcttggaatatata

SEQ ID NO: 838272 - DNA, 15 bp, Homo sapiens
tcttggaatatatac

SEQ ID NO: 838273 - DNA, 15 bp, Homo sapiens
cttggaatatatacc

SEQ ID NO: 838274 - DNA, 15 bp, Homo sapiens
ttggaatatatacca

SEQ ID NO: 838275 - DNA, 15 bp, Homo sapiens
tggaatatataccag

SEQ ID NO: 838276 - DNA, 15 bp, Homo sapiens
ggaatatataccagt

SEQ ID NO: 838277 - DNA, 15 bp, Homo sapiens
gaatatataccagtc

SEQ ID NO: 838278 - DNA, 15 bp, Homo sapiens
aatatataccagtca

SEQ ID NO: 838279 - DNA, 15 bp, Homo sapiens
atatataccagtcag

SEQ ID NO: 838280 - DNA, 15 bp, Homo sapiens
tatataccagtcagt

SEQ ID NO: 838281 - DNA, 15 bp, Homo sapiens
atataccagtcagtc

SEQ ID NO: 838282 - DNA, 15 bp, Homo sapiens
tataccagtcagtct

SEQ ID NO: 838283 - DNA, 15 bp, Homo sapiens
ataccagtcagtctt

SEQ ID NO: 838284 - DNA, 15 bp, Homo sapiens
taccagtcagtctta

SEQ ID NO: 838285 - DNA, 15 bp, Homo sapiens
accagtcagtcttaa

SEQ ID NO: 838286 - DNA, 15 bp, Homo sapiens
ccagtcagtcttaat

SEQ ID NO: 838287 - DNA, 15 bp, Homo sapiens
cagtcagtcttaatt

SEQ ID NO: 838288 - DNA, 15 bp, Homo sapiens
agtcagtcttaattc

SEQ ID NO: 838289 - DNA, 15 bp, Homo sapiens
gtcagtcttaattct

SEQ ID NO: 838290 - DNA, 15 bp, Homo sapiens
tcagtcttaattctg

SEQ ID NO: 838291 - DNA, 15 bp, Homo sapiens
cagtcttaattctgg

SEQ ID NO: 838292 - DNA, 15 bp, Homo sapiens
agtcttaattctggc

SEQ ID NO: 838293 - DNA, 15 bp, Homo sapiens
gtcttaattctggct

SEQ ID NO: 838294 - DNA, 15 bp, Homo sapiens
tcttaattctggctt

SEQ ID NO: 838295 - DNA, 15 bp, Homo sapiens
cttaattctggcttc

SEQ ID NO: 838296 - DNA, 15 bp, Homo sapiens
ttaattctggcttct

SEQ ID NO: 838297 - DNA, 15 bp, Homo sapiens
taattctggcttcta

SEQ ID NO: 838298 - DNA, 15 bp, Homo sapiens
aattctggcttctag

SEQ ID NO: 838299 - DNA, 15 bp, Homo sapiens
attctggcttctaga

SEQ ID NO: 838300 - DNA, 15 bp, Homo sapiens
ttctggcttctagaa

SEQ ID NO: 838301 - DNA, 15 bp, Homo sapiens
tctggcttctagaac

SEQ ID NO: 838302 - DNA, 15 bp, Homo sapiens
ctggcttctagaaca

SEQ ID NO: 838303 - DNA, 15 bp, Homo sapiens
tggcttctagaacaa

SEQ ID NO: 838304 - DNA, 15 bp, Homo sapiens
ggcttctagaacaaa

SEQ ID NO: 838305 - DNA, 15 bp, Homo sapiens
gcttctagaacaaag

SEQ ID NO: 838306 - DNA, 15 bp, Homo sapiens
cttctagaacaaagc

SEQ ID NO: 838307 - DNA, 15 bp, Homo sapiens
ttctagaacaaagca

SEQ ID NO: 838308 - DNA, 15 bp, Homo sapiens
tctagaacaaagcag

SEQ ID NO: 838309 - DNA, 15 bp, Homo sapiens
ctagaacaaagcagg

SEQ ID NO: 838310 - DNA, 15 bp, Homo sapiens
tagaacaaagcagga

SEQ ID NO: 838311 - DNA, 15 bp, Homo sapiens
agaacaaagcaggac

SEQ ID NO: 838312 - DNA, 15 bp, Homo sapiens
gaacaaagcaggaca

SEQ ID NO: 838313 - DNA, 15 bp, Homo sapiens
aacaaagcaggacaa

SEQ ID NO: 838314 - DNA, 15 bp, Homo sapiens
acaaagcaggacaaa

SEQ ID NO: 838315 - DNA, 15 bp, Homo sapiens
caaagcaggacaaac

SEQ ID NO: 838316 - DNA, 15 bp, Homo sapiens
aaagcaggacaaacc

SEQ ID NO: 838317 - DNA, 15 bp, Homo sapiens
aagcaggacaaacct

SEQ ID NO: 838318 - DNA, 15 bp, Homo sapiens
agcaggacaaaccta

SEQ ID NO: 838319 - DNA, 15 bp, Homo sapiens
gcaggacaaacctaa

SEQ ID NO: 838320 - DNA, 15 bp, Homo sapiens
caggacaaacctaat

SEQ ID NO: 838321 - DNA, 15 bp, Homo sapiens
aggacaaacctaatc

SEQ ID NO: 838322 - DNA, 15 bp, Homo sapiens
ggacaaacctaatct

SEQ ID NO: 838323 - DNA, 15 bp, Homo sapiens
gacaaacctaatctt

SEQ ID NO: 838324 - DNA, 15 bp, Homo sapiens
acaaacctaatcttg

SEQ ID NO: 838325 - DNA, 15 bp, Homo sapiens
caaacctaatcttgt

SEQ ID NO: 838326 - DNA, 15 bp, Homo sapiens
aaacctaatcttgta

SEQ ID NO: 838327 - DNA, 15 bp, Homo sapiens
aacctaatcttgtac

SEQ ID NO: 838328 - DNA, 15 bp, Homo sapiens
acctaatcttgtaca

SEQ ID NO: 838329 - DNA, 15 bp, Homo sapiens
cctaatcttgtacac

SEQ ID NO: 838330 - DNA, 15 bp, Homo sapiens
ctaatcttgtacaca

SEQ ID NO: 838331 - DNA, 15 bp, Homo sapiens
taatcttgtacacag

SEQ ID NO: 838332 - DNA, 15 bp, Homo sapiens
aatcttgtacacagc

SEQ ID NO: 838333 - DNA, 15 bp, Homo sapiens
atcttgtacacagca

SEQ ID NO: 838334 - DNA, 15 bp, Homo sapiens
tcttgtacacagcag

SEQ ID NO: 838335 - DNA, 15 bp, Homo sapiens
cttgtacacagcagc

SEQ ID NO: 838336 - DNA, 15 bp, Homo sapiens
ttgtacacagcagca

SEQ ID NO: 838337 - DNA, 15 bp, Homo sapiens
tgtacacagcagcac

SEQ ID NO: 838338 - DNA, 15 bp, Homo sapiens
gtacacagcagcacc

SEQ ID NO: 838339 - DNA, 15 bp, Homo sapiens
tacacagcagcacct

SEQ ID NO: 838340 - DNA, 15 bp, Homo sapiens
acacagcagcacctg

SEQ ID NO: 838341 - DNA, 15 bp, Homo sapiens
cacagcagcacctga

SEQ ID NO: 838342 - DNA, 15 bp, Homo sapiens
acagcagcacctgaa

SEQ ID NO: 838343 - DNA, 15 bp, Homo sapiens
cagcagcacctgaag

SEQ ID NO: 838344 - DNA, 15 bp, Homo sapiens
agcagcacctgaagt

SEQ ID NO: 838345 - DNA, 15 bp, Homo sapiens
gcagcacctgaagta

SEQ ID NO: 838346 - DNA, 15 bp, Homo sapiens
cagcacctgaagtat

SEQ ID NO: 838347 - DNA, 15 bp, Homo sapiens
agcacctgaagtatt

SEQ ID NO: 838348 - DNA, 15 bp, Homo sapiens
gcacctgaagtattc

SEQ ID NO: 838349 - DNA, 15 bp, Homo sapiens
cacctgaagtattca

SEQ ID NO: 838350 - DNA, 15 bp, Homo sapiens
acctgaagtattcag

SEQ ID NO: 838351 - DNA, 15 bp, Homo sapiens
cctgaagtattcaga

SEQ ID NO: 838352 - DNA, 15 bp, Homo sapiens
ctgaagtattcagat

SEQ ID NO: 838353 - DNA, 15 bp, Homo sapiens
tgaagtattcagatg

SEQ ID NO: 838354 - DNA, 15 bp, Homo sapiens
gaagtattcagatgt

SEQ ID NO: 838355 - DNA, 15 bp, Homo sapiens
aagtattcagatgta

SEQ ID NO: 838356 - DNA, 15 bp, Homo sapiens
agtattcagatgtaa

SEQ ID NO: 838357 - DNA, 15 bp, Homo sapiens
gtattcagatgtaac

SEQ ID NO: 838358 - DNA, 15 bp, Homo sapiens
tattcagatgtaacc

SEQ ID NO: 838359 - DNA, 15 bp, Homo sapiens
attcagatgtaacca

SEQ ID NO: 838360 - DNA, 15 bp, Homo sapiens
ttcagatgtaaccat

SEQ ID NO: 838361 - DNA, 15 bp, Homo sapiens
tcagatgtaaccatc

SEQ ID NO: 838362 - DNA, 15 bp, Homo sapiens
cagatgtaaccatcc

SEQ ID NO: 838363 - DNA, 15 bp, Homo sapiens
agatgtaaccatcct

SEQ ID NO: 838364 - DNA, 15 bp, Homo sapiens
gatgtaaccatcctg

SEQ ID NO: 838365 - DNA, 15 bp, Homo sapiens
atgtaaccatcctgt

SEQ ID NO: 838366 - DNA, 15 bp, Homo sapiens
tgtaaccatcctgtc

SEQ ID NO: 838367 - DNA, 15 bp, Homo sapiens
gtaaccatcctgtct

SEQ ID NO: 838368 - DNA, 15 bp, Homo sapiens
taaccatcctgtctc

SEQ ID NO: 838369 - DNA, 15 bp, Homo sapiens
aaccatcctgtctct

SEQ ID NO: 838370 - DNA, 15 bp, Homo sapiens
accatcctgtctctg

SEQ ID NO: 838371 - DNA, 15 bp, Homo sapiens
ccatcctgtctctgt

SEQ ID NO: 838372 - DNA, 15 bp, Homo sapiens
catcctgtctctgtg

SEQ ID NO: 838373 - DNA, 15 bp, Homo sapiens
atcctgtctctgtga

SEQ ID NO: 838374 - DNA, 15 bp, Homo sapiens
tcctgtctctgtgag

SEQ ID NO: 838375 - DNA, 15 bp, Homo sapiens
cctgtctctgtgagg

SEQ ID NO: 838376 - DNA, 15 bp, Homo sapiens
ctgtctctgtgagga

SEQ ID NO: 838377 - DNA, 15 bp, Homo sapiens
tgtctctgtgaggac

SEQ ID NO: 838378 - DNA, 15 bp, Homo sapiens
gtctctgtgaggacg

SEQ ID NO: 838379 - DNA, 15 bp, Homo sapiens
tctctgtgaggacga

SEQ ID NO: 838380 - DNA, 15 bp, Homo sapiens
ctctgtgaggacgag

SEQ ID NO: 838381 - DNA, 15 bp, Homo sapiens
tctgtgaggacgaga

SEQ ID NO: 838382 - DNA, 15 bp, Homo sapiens
ctgtgaggacgagag

SEQ ID NO: 838383 - DNA, 15 bp, Homo sapiens
tgtgaggacgagagc

SEQ ID NO: 838384 - DNA, 15 bp, Homo sapiens
gtgaggacgagagcc

SEQ ID NO: 838385 - DNA, 15 bp, Homo sapiens
tgaggacgagagcct

SEQ ID NO: 838386 - DNA, 15 bp, Homo sapiens
gaggacgagagcctt

SEQ ID NO: 838387 - DNA, 15 bp, Homo sapiens
aggacgagagccttc

SEQ ID NO: 838388 - DNA, 15 bp, Homo sapiens
ggacgagagccttct

SEQ ID NO: 838389 - DNA, 15 bp, Homo sapiens
gacgagagccttctt

SEQ ID NO: 838390 - DNA, 15 bp, Homo sapiens
acgagagccttcttc

SEQ ID NO: 838391 - DNA, 15 bp, Homo sapiens
cgagagccttcttca

SEQ ID NO: 838392 - DNA, 15 bp, Homo sapiens
gagagccttcttcag

SEQ ID NO: 838393 - DNA, 15 bp, Homo sapiens
agagccttcttcagg

SEQ ID NO: 838394 - DNA, 15 bp, Homo sapiens
gagccttcttcaggc

SEQ ID NO: 838395 - DNA, 15 bp, Homo sapiens
agccttcttcaggcc

SEQ ID NO: 838396 - DNA, 15 bp, Homo sapiens
gccttcttcaggcca

SEQ ID NO: 838397 - DNA, 15 bp, Homo sapiens
ccttcttcaggccaa

SEQ ID NO: 838398 - DNA, 15 bp, Homo sapiens
cttcttcaggccaaa

SEQ ID NO: 838399 - DNA, 15 bp, Homo sapiens
ttcttcaggccaaat

SEQ ID NO: 838400 - DNA, 15 bp, Homo sapiens
tcttcaggccaaata

SEQ ID NO: 838401 - DNA, 15 bp, Homo sapiens
cttcaggccaaatat

SEQ ID NO: 838402 - DNA, 15 bp, Homo sapiens
ttcaggccaaatatt

SEQ ID NO: 838403 - DNA, 15 bp, Homo sapiens
tcaggccaaatatta

SEQ ID NO: 838404 - DNA, 15 bp, Homo sapiens
caggccaaatattac

SEQ ID NO: 838405 - DNA, 15 bp, Homo sapiens
aggccaaatattact

SEQ ID NO: 838406 - DNA, 15 bp, Homo sapiens
ggccaaatattactg

SEQ ID NO: 838407 - DNA, 15 bp, Homo sapiens
gccaaatattactgg

SEQ ID NO: 838408 - DNA, 15 bp, Homo sapiens
ccaaatattactggc

SEQ ID NO: 838409 - DNA, 15 bp, Homo sapiens
caaatattactggct

SEQ ID NO: 838410 - DNA, 15 bp, Homo sapiens
aaatattactggctg

SEQ ID NO: 838411 - DNA, 15 bp, Homo sapiens
aatattactggctgt

SEQ ID NO: 838412 - DNA, 15 bp, Homo sapiens
atattactggctgtc

SEQ ID NO: 838413 - DNA, 15 bp, Homo sapiens
tattactggctgtct

SEQ ID NO: 838414 - DNA, 15 bp, Homo sapiens
attactggctgtctt

SEQ ID NO: 838415 - DNA, 15 bp, Homo sapiens
ttactggctgtctta

SEQ ID NO: 838416 - DNA, 15 bp, Homo sapiens
tactggctgtcttaa

SEQ ID NO: 838417 - DNA, 15 bp, Homo sapiens
actggctgtcttaac

SEQ ID NO: 838418 - DNA, 15 bp, Homo sapiens
ctggctgtcttaact

SEQ ID NO: 838419 - DNA, 15 bp, Homo sapiens
tggctgtcttaactg

SEQ ID NO: 838420 - DNA, 15 bp, Homo sapiens
ggctgtcttaactgt

SEQ ID NO: 838421 - DNA, 15 bp, Homo sapiens
gctgtcttaactgtt

SEQ ID NO: 838422 - DNA, 15 bp, Homo sapiens
ctgtcttaactgttc

SEQ ID NO: 838423 - DNA, 15 bp, Homo sapiens
tgtcttaactgttcc

SEQ ID NO: 838424 - DNA, 15 bp, Homo sapiens
gtcttaactgttcct

SEQ ID NO: 838425 - DNA, 15 bp, Homo sapiens
tcttaactgttcctc

SEQ ID NO: 838426 - DNA, 15 bp, Homo sapiens
cttaactgttcctca

SEQ ID NO: 838427 - DNA, 15 bp, Homo sapiens
ttaactgttcctcaa

SEQ ID NO: 838428 - DNA, 15 bp, Homo sapiens
taactgttcctcaaa

SEQ ID NO: 838429 - DNA, 15 bp, Homo sapiens
aactgttcctcaaaa

SEQ ID NO: 838430 - DNA, 15 bp, Homo sapiens
actgttcctcaaaag

SEQ ID NO: 838431 - DNA, 15 bp, Homo sapiens
ctgttcctcaaaaga

SEQ ID NO: 838432 - DNA, 15 bp, Homo sapiens
tgttcctcaaaagat

SEQ ID NO: 838433 - DNA, 15 bp, Homo sapiens
gttcctcaaaagatc

SEQ ID NO: 838434 - DNA, 15 bp, Homo sapiens
ttcctcaaaagatct

SEQ ID NO: 838435 - DNA, 15 bp, Homo sapiens
tcctcaaaagatctt

SEQ ID NO: 838436 - DNA, 15 bp, Homo sapiens
cctcaaaagatcttt

SEQ ID NO: 838437 - DNA, 15 bp, Homo sapiens
ctcaaaagatctttt

SEQ ID NO: 838438 - DNA, 15 bp, Homo sapiens
tcaaaagatcttttc

SEQ ID NO: 838439 - DNA, 15 bp, Homo sapiens
caaaagatcttttcc

SEQ ID NO: 838440 - DNA, 15 bp, Homo sapiens
aaaagatcttttcca

SEQ ID NO: 838441 - DNA, 15 bp, Homo sapiens
aaagatcttttccag

SEQ ID NO: 838442 - DNA, 15 bp, Homo sapiens
aagatcttttccaga

SEQ ID NO: 838443 - DNA, 15 bp, Homo sapiens
agatcttttccagac

SEQ ID NO: 838444 - DNA, 15 bp, Homo sapiens
gatcttttccagacg

SEQ ID NO: 838445 - DNA, 15 bp, Homo sapiens
atcttttccagacgc

SEQ ID NO: 838446 - DNA, 15 bp, Homo sapiens
tcttttccagacgct

SEQ ID NO: 838447 - DNA, 15 bp, Homo sapiens
cttttccagacgcta

SEQ ID NO: 838448 - DNA, 15 bp, Homo sapiens
ttttccagacgctac

SEQ ID NO: 838449 - DNA, 15 bp, Homo sapiens
tttccagacgctacc

SEQ ID NO: 838450 - DNA, 15 bp, Homo sapiens
ttccagacgctacct

SEQ ID NO: 838451 - DNA, 15 bp, Homo sapiens
tccagacgctacctc

SEQ ID NO: 838452 - DNA, 15 bp, Homo sapiens
ccagacgctacctcc

SEQ ID NO: 838453 - DNA, 15 bp, Homo sapiens
cagacgctacctcct

SEQ ID NO: 838454 - DNA, 15 bp, Homo sapiens
agacgctacctcctc

SEQ ID NO: 838455 - DNA, 15 bp, Homo sapiens
gacgctacctcctct

SEQ ID NO: 838456 - DNA, 15 bp, Homo sapiens
acgctacctcctctt

SEQ ID NO: 838457 - DNA, 15 bp, Homo sapiens
cgctacctcctcttg

SEQ ID NO: 838458 - DNA, 15 bp, Homo sapiens
gctacctcctcttgt

SEQ ID NO: 838459 - DNA, 15 bp, Homo sapiens
ctacctcctcttgtc

SEQ ID NO: 838460 - DNA, 15 bp, Homo sapiens
tacctcctcttgtct

SEQ ID NO: 838461 - DNA, 15 bp, Homo sapiens
acctcctcttgtctt

SEQ ID NO: 838462 - DNA, 15 bp, Homo sapiens
cctcctcttgtcttt

SEQ ID NO: 838463 - DNA, 15 bp, Homo sapiens
ctcctcttgtctttg

SEQ ID NO: 838464 - DNA, 15 bp, Homo sapiens
tcctcttgtctttgt

SEQ ID NO: 838465 - DNA, 15 bp, Homo sapiens
cctcttgtctttgtc

SEQ ID NO: 838466 - DNA, 15 bp, Homo sapiens
ctcttgtctttgtca

SEQ ID NO: 838467 - DNA, 15 bp, Homo sapiens
tcttgtctttgtcac

SEQ ID NO: 838468 - DNA, 15 bp, Homo sapiens
cttgtctttgtcact

SEQ ID NO: 838469 - DNA, 15 bp, Homo sapiens
ttgtctttgtcactt

SEQ ID NO: 838470 - DNA, 15 bp, Homo sapiens
tgtctttgtcacttt

SEQ ID NO: 838471 - DNA, 15 bp, Homo sapiens
gtctttgtcactttt

SEQ ID NO: 838472 - DNA, 15 bp, Homo sapiens
tctttgtcacttttc

SEQ ID NO: 838473 - DNA, 15 bp, Homo sapiens
ctttgtcacttttct

SEQ ID NO: 838474 - DNA, 15 bp, Homo sapiens
tttgtcacttttctc

SEQ ID NO: 838475 - DNA, 15 bp, Homo sapiens
ttgtcacttttctct

SEQ ID NO: 838476 - DNA, 15 bp, Homo sapiens
tgtcacttttctctg

SEQ ID NO: 838477 - DNA, 15 bp, Homo sapiens
gtcacttttctctgg

SEQ ID NO: 838478 - DNA, 15 bp, Homo sapiens
tcacttttctctgga

SEQ ID NO: 838479 - DNA, 15 bp, Homo sapiens
cacttttctctggaa

SEQ ID NO: 838480 - DNA, 15 bp, Homo sapiens
acttttctctggaag

SEQ ID NO: 838481 - DNA, 15 bp, Homo sapiens
cttttctctggaagt

SEQ ID NO: 838482 - DNA, 15 bp, Homo sapiens
ttttctctggaagtt

SEQ ID NO: 838483 - DNA, 15 bp, Homo sapiens
tttctctggaagtta

SEQ ID NO: 838484 - DNA, 15 bp, Homo sapiens
ttctctggaagttat

SEQ ID NO: 838485 - DNA, 15 bp, Homo sapiens
tctctggaagttatt

SEQ ID NO: 838486 - DNA, 15 bp, Homo sapiens
ctctggaagttattc

SEQ ID NO: 838487 - DNA, 15 bp, Homo sapiens
tctggaagttattca

SEQ ID NO: 838488 - DNA, 15 bp, Homo sapiens
ctggaagttattcag

SEQ ID NO: 838489 - DNA, 15 bp, Homo sapiens
tggaagttattcagt

SEQ ID NO: 838490 - DNA, 15 bp, Homo sapiens
ggaagttattcagtt

SEQ ID NO: 838491 - DNA, 15 bp, Homo sapiens
gaagttattcagttg

SEQ ID NO: 838492 - DNA, 15 bp, Homo sapiens
aagttattcagttga

SEQ ID NO: 838493 - DNA, 15 bp, Homo sapiens
agttattcagttgat

SEQ ID NO: 838494 - DNA, 15 bp, Homo sapiens
gttattcagttgatc

SEQ ID NO: 838495 - DNA, 15 bp, Homo sapiens
ttattcagttgatca

SEQ ID NO: 838496 - DNA, 15 bp, Homo sapiens
tattcagttgatcat

SEQ ID NO: 838497 - DNA, 15 bp, Homo sapiens
attcagttgatcatt

SEQ ID NO: 838498 - DNA, 15 bp, Homo sapiens
ttcagttgatcattt

SEQ ID NO: 838499 - DNA, 15 bp, Homo sapiens
tcagttgatcatttt

SEQ ID NO: 838500 - DNA, 15 bp, Homo sapiens
cagttgatcattttc

SEQ ID NO: 838501 - DNA, 15 bp, Homo sapiens
agttgatcattttcc

SEQ ID NO: 838502 - DNA, 15 bp, Homo sapiens
gttgatcattttccc

SEQ ID NO: 838503 - DNA, 15 bp, Homo sapiens
ttgatcattttccct

SEQ ID NO: 838504 - DNA, 15 bp, Homo sapiens
tgatcattttccctc

SEQ ID NO: 838505 - DNA, 15 bp, Homo sapiens
gatcattttccctct

SEQ ID NO: 838506 - DNA, 15 bp, Homo sapiens
atcattttccctctt

SEQ ID NO: 838507 - DNA, 15 bp, Homo sapiens
tcattttccctcttt

SEQ ID NO: 838508 - DNA, 15 bp, Homo sapiens
cattttccctcttta

SEQ ID NO: 838509 - DNA, 15 bp, Homo sapiens
attttccctctttaa

SEQ ID NO: 838510 - DNA, 15 bp, Homo sapiens
ttttccctctttaaa

SEQ ID NO: 838511 - DNA, 15 bp, Homo sapiens
tttccctctttaaat

SEQ ID NO: 838512 - DNA, 15 bp, Homo sapiens
ttccctctttaaatc

SEQ ID NO: 838513 - DNA, 15 bp, Homo sapiens
tccctctttaaatct

SEQ ID NO: 838514 - DNA, 15 bp, Homo sapiens
ccctctttaaatctg

SEQ ID NO: 838515 - DNA, 15 bp, Homo sapiens
cctctttaaatctga

SEQ ID NO: 838516 - DNA, 15 bp, Homo sapiens
ctctttaaatctgac

SEQ ID NO: 838517 - DNA, 15 bp, Homo sapiens
tctttaaatctgact

SEQ ID NO: 838518 - DNA, 15 bp, Homo sapiens
ctttaaatctgactg

SEQ ID NO: 838519 - DNA, 15 bp, Homo sapiens
tttaaatctgactga

SEQ ID NO: 838520 - DNA, 15 bp, Homo sapiens
ttaaatctgactgaa

SEQ ID NO: 838521 - DNA, 15 bp, Homo sapiens
taaatctgactgaaa

SEQ ID NO: 838522 - DNA, 15 bp, Homo sapiens
aaatctgactgaaaa

SEQ ID NO: 838523 - DNA, 15 bp, Homo sapiens
aatctgactgaaaac

SEQ ID NO: 838524 - DNA, 15 bp, Homo sapiens
atctgactgaaaact

SEQ ID NO: 838525 - DNA, 15 bp, Homo sapiens
tctgactgaaaactg

SEQ ID NO: 838526 - DNA, 15 bp, Homo sapiens
ctgactgaaaactgg

SEQ ID NO: 838527 - DNA, 15 bp, Homo sapiens
tgactgaaaactgga

SEQ ID NO: 838528 - DNA, 15 bp, Homo sapiens
gactgaaaactggat

SEQ ID NO: 838529 - DNA, 15 bp, Homo sapiens
actgaaaactggatc

SEQ ID NO: 838530 - DNA, 15 bp, Homo sapiens
ctgaaaactggatca

SEQ ID NO: 838531 - DNA, 15 bp, Homo sapiens
tgaaaactggatcaa

SEQ ID NO: 838532 - DNA, 15 bp, Homo sapiens
gaaaactggatcaag

SEQ ID NO: 838533 - DNA, 15 bp, Homo sapiens
aaaactggatcaagt

SEQ ID NO: 838534 - DNA, 15 bp, Homo sapiens
aaactggatcaagta

SEQ ID NO: 838535 - DNA, 15 bp, Homo sapiens
aactggatcaagtac

SEQ ID NO: 838536 - DNA, 15 bp, Homo sapiens
actggatcaagtact

SEQ ID NO: 838537 - DNA, 15 bp, Homo sapiens
ctggatcaagtactc

SEQ ID NO: 838538 - DNA, 15 bp, Homo sapiens
tggatcaagtactct

SEQ ID NO: 838539 - DNA, 15 bp, Homo sapiens
ggatcaagtactctg

SEQ ID NO: 838540 - DNA, 15 bp, Homo sapiens
gatcaagtactctgg

SEQ ID NO: 838541 - DNA, 15 bp, Homo sapiens
atcaagtactctgga

SEQ ID NO: 838542 - DNA, 15 bp, Homo sapiens
tcaagtactctggaa

SEQ ID NO: 838543 - DNA, 15 bp, Homo sapiens
caagtactctggaac

SEQ ID NO: 838544 - DNA, 15 bp, Homo sapiens
aagtactctggaact

SEQ ID NO: 838545 - DNA, 15 bp, Homo sapiens
agtactctggaacta

SEQ ID NO: 838546 - DNA, 15 bp, Homo sapiens
gtactctggaactag

SEQ ID NO: 838547 - DNA, 15 bp, Homo sapiens
tactctggaactagt

SEQ ID NO: 838548 - DNA, 15 bp, Homo sapiens
actctggaactagtc

SEQ ID NO: 838549 - DNA, 15 bp, Homo sapiens
ctctggaactagtct

SEQ ID NO: 838550 - DNA, 15 bp, Homo sapiens
tctggaactagtctg

SEQ ID NO: 838551 - DNA, 15 bp, Homo sapiens
ctggaactagtctga

SEQ ID NO: 838552 - DNA, 15 bp, Homo sapiens
tggaactagtctgac

SEQ ID NO: 838553 - DNA, 15 bp, Homo sapiens
ggaactagtctgacc

SEQ ID NO: 838554 - DNA, 15 bp, Homo sapiens
gaactagtctgacca

SEQ ID NO: 838555 - DNA, 15 bp, Homo sapiens
aactagtctgaccaa

SEQ ID NO: 838556 - DNA, 15 bp, Homo sapiens
actagtctgaccaat

SEQ ID NO: 838557 - DNA, 15 bp, Homo sapiens
ctagtctgaccaatt

SEQ ID NO: 838558 - DNA, 15 bp, Homo sapiens
tagtctgaccaattc

SEQ ID NO: 838559 - DNA, 15 bp, Homo sapiens
agtctgaccaattca

SEQ ID NO: 838560 - DNA, 15 bp, Homo sapiens
gtctgaccaattcac

SEQ ID NO: 838561 - DNA, 15 bp, Homo sapiens
tctgaccaattcaca

SEQ ID NO: 838562 - DNA, 15 bp, Homo sapiens
ctgaccaattcacaa

SEQ ID NO: 838563 - DNA, 15 bp, Homo sapiens
tgaccaattcacaac

SEQ ID NO: 838564 - DNA, 15 bp, Homo sapiens
gaccaattcacaaca

SEQ ID NO: 838565 - DNA, 15 bp, Homo sapiens
accaattcacaacag

SEQ ID NO: 838566 - DNA, 15 bp, Homo sapiens
ccaattcacaacaga

SEQ ID NO: 838567 - DNA, 15 bp, Homo sapiens
caattcacaacagaa

SEQ ID NO: 838568 - DNA, 15 bp, Homo sapiens
aattcacaacagaat

SEQ ID NO: 838569 - DNA, 15 bp, Homo sapiens
attcacaacagaatg

SEQ ID NO: 838570 - DNA, 15 bp, Homo sapiens
ttcacaacagaatga

SEQ ID NO: 838571 - DNA, 15 bp, Homo sapiens
tcacaacagaatgaa

SEQ ID NO: 838572 - DNA, 15 bp, Homo sapiens
cacaacagaatgaaa

SEQ ID NO: 838573 - DNA, 15 bp, Homo sapiens
acaacagaatgaaat

SEQ ID NO: 838574 - DNA, 15 bp, Homo sapiens
caacagaatgaaatg

SEQ ID NO: 838575 - DNA, 15 bp, Homo sapiens
aacagaatgaaatgt

SEQ ID NO: 838576 - DNA, 15 bp, Homo sapiens
acagaatgaaatgtt

SEQ ID NO: 838577 - DNA, 15 bp, Homo sapiens
cagaatgaaatgttc

SEQ ID NO: 838578 - DNA, 15 bp, Homo sapiens
agaatgaaatgttca

SEQ ID NO: 838579 - DNA, 15 bp, Homo sapiens
gaatgaaatgttcat

SEQ ID NO: 838580 - DNA, 15 bp, Homo sapiens
aatgaaatgttcatt

SEQ ID NO: 838581 - DNA, 15 bp, Homo sapiens
atgaaatgttcattt

SEQ ID NO: 838582 - DNA, 15 bp, Homo sapiens
tgaaatgttcatttc

SEQ ID NO: 838583 - DNA, 15 bp, Homo sapiens
gaaatgttcatttcc

SEQ ID NO: 838584 - DNA, 15 bp, Homo sapiens
aaatgttcatttccc

SEQ ID NO: 838585 - DNA, 15 bp, Homo sapiens
aatgttcatttccct

SEQ ID NO: 838586 - DNA, 15 bp, Homo sapiens
atgttcatttccctt

SEQ ID NO: 838587 - DNA, 15 bp, Homo sapiens
tgttcatttcccttg

SEQ ID NO: 838588 - DNA, 15 bp, Homo sapiens
gttcatttcccttga

SEQ ID NO: 838589 - DNA, 15 bp, Homo sapiens
ttcatttcccttgat

SEQ ID NO: 838590 - DNA, 15 bp, Homo sapiens
tcatttcccttgatc

SEQ ID NO: 838591 - DNA, 15 bp, Homo sapiens
catttcccttgatct

SEQ ID NO: 838592 - DNA, 15 bp, Homo sapiens
atttcccttgatctg

SEQ ID NO: 838593 - DNA, 15 bp, Homo sapiens
tttcccttgatctgg

SEQ ID NO: 838594 - DNA, 15 bp, Homo sapiens
ttcccttgatctggg

SEQ ID NO: 838595 - DNA, 15 bp, Homo sapiens
tcccttgatctgggg

SEQ ID NO: 838596 - DNA, 15 bp, Homo sapiens
cccttgatctgggga

SEQ ID NO: 838597 - DNA, 15 bp, Homo sapiens
ccttgatctggggag

SEQ ID NO: 838598 - DNA, 15 bp, Homo sapiens
cttgatctggggagc

SEQ ID NO: 838599 - DNA, 15 bp, Homo sapiens
ttgatctggggagca

SEQ ID NO: 838600 - DNA, 15 bp, Homo sapiens
tgatctggggagcac

SEQ ID NO: 838601 - DNA, 15 bp, Homo sapiens
gatctggggagcact

SEQ ID NO: 838602 - DNA, 15 bp, Homo sapiens
atctggggagcactt

SEQ ID NO: 838603 - DNA, 15 bp, Homo sapiens
tctggggagcacttc

SEQ ID NO: 838604 - DNA, 15 bp, Homo sapiens
ctggggagcacttct

SEQ ID NO: 838605 - DNA, 15 bp, Homo sapiens
tggggagcacttcta

SEQ ID NO: 838606 - DNA, 15 bp, Homo sapiens
ggggagcacttctaa

SEQ ID NO: 838607 - DNA, 15 bp, Homo sapiens
gggagcacttctaaa

SEQ ID NO: 838608 - DNA, 15 bp, Homo sapiens
ggagcacttctaaaa

SEQ ID NO: 838609 - DNA, 15 bp, Homo sapiens
gagcacttctaaaaa

SEQ ID NO: 838610 - DNA, 15 bp, Homo sapiens
agcacttctaaaaag

SEQ ID NO: 838611 - DNA, 15 bp, Homo sapiens
gcacttctaaaaagt

SEQ ID NO: 838612 - DNA, 15 bp, Homo sapiens
cacttctaaaaagta

SEQ ID NO: 838613 - DNA, 15 bp, Homo sapiens
acttctaaaaagtaa

SEQ ID NO: 838614 - DNA, 15 bp, Homo sapiens
cttctaaaaagtaaa

SEQ ID NO: 838615 - DNA, 15 bp, Homo sapiens
ttctaaaaagtaaac

SEQ ID NO: 838616 - DNA, 15 bp, Homo sapiens
tctaaaaagtaaaca

SEQ ID NO: 838617 - DNA, 15 bp, Homo sapiens
ctaaaaagtaaacac

SEQ ID NO: 838618 - DNA, 15 bp, Homo sapiens
taaaaagtaaacact

SEQ ID NO: 838619 - DNA, 15 bp, Homo sapiens
aaaaagtaaacactg

SEQ ID NO: 838620 - DNA, 15 bp, Homo sapiens
aaaagtaaacactgg

SEQ ID NO: 838621 - DNA, 15 bp, Homo sapiens
aaagtaaacactggc

SEQ ID NO: 838622 - DNA, 15 bp, Homo sapiens
aagtaaacactggct

SEQ ID NO: 838623 - DNA, 15 bp, Homo sapiens
agtaaacactggctt

SEQ ID NO: 838624 - DNA, 15 bp, Homo sapiens
gtaaacactggcttt

SEQ ID NO: 838625 - DNA, 15 bp, Homo sapiens
taaacactggctttc

SEQ ID NO: 838626 - DNA, 15 bp, Homo sapiens
aaacactggctttct

SEQ ID NO: 838627 - DNA, 15 bp, Homo sapiens
aacactggctttctc

SEQ ID NO: 838628 - DNA, 15 bp, Homo sapiens
acactggctttctct

SEQ ID NO: 838629 - DNA, 15 bp, Homo sapiens
cactggctttctctg

SEQ ID NO: 838630 - DNA, 15 bp, Homo sapiens
actggctttctctgt

SEQ ID NO: 838631 - DNA, 15 bp, Homo sapiens
ctggctttctctgta

SEQ ID NO: 838632 - DNA, 15 bp, Homo sapiens
tggctttctctgtaa

SEQ ID NO: 838633 - DNA, 15 bp, Homo sapiens
ggctttctctgtaat

SEQ ID NO: 838634 - DNA, 15 bp, Homo sapiens
gctttctctgtaatg

SEQ ID NO: 838635 - DNA, 15 bp, Homo sapiens
ctttctctgtaatgt

SEQ ID NO: 838636 - DNA, 15 bp, Homo sapiens
tttctctgtaatgtc

SEQ ID NO: 838637 - DNA, 15 bp, Homo sapiens
ttctctgtaatgtca

SEQ ID NO: 838638 - DNA, 15 bp, Homo sapiens
tctctgtaatgtcac

SEQ ID NO: 838639 - DNA, 15 bp, Homo sapiens
ctctgtaatgtcaca

SEQ ID NO: 838640 - DNA, 15 bp, Homo sapiens
tctgtaatgtcacat

SEQ ID NO: 838641 - DNA, 15 bp, Homo sapiens
ctgtaatgtcacatg

SEQ ID NO: 838642 - DNA, 15 bp, Homo sapiens
tgtaatgtcacatgg

SEQ ID NO: 838643 - DNA, 15 bp, Homo sapiens
gtaatgtcacatggc

SEQ ID NO: 838644 - DNA, 15 bp, Homo sapiens
taatgtcacatggct

SEQ ID NO: 838645 - DNA, 15 bp, Homo sapiens
aatgtcacatggcta

SEQ ID NO: 838646 - DNA, 15 bp, Homo sapiens
atgtcacatggctag

SEQ ID NO: 838647 - DNA, 15 bp, Homo sapiens
tgtcacatggctagc

SEQ ID NO: 838648 - DNA, 15 bp, Homo sapiens
gtcacatggctagcc

SEQ ID NO: 838649 - DNA, 15 bp, Homo sapiens
tcacatggctagcct

SEQ ID NO: 838650 - DNA, 15 bp, Homo sapiens
cacatggctagccta

SEQ ID NO: 838651 - DNA, 15 bp, Homo sapiens
acatggctagcctaa

SEQ ID NO: 838652 - DNA, 15 bp, Homo sapiens
catggctagcctaaa

SEQ ID NO: 838653 - DNA, 15 bp, Homo sapiens
atggctagcctaaaa

SEQ ID NO: 838654 - DNA, 15 bp, Homo sapiens
tggctagcctaaaat

SEQ ID NO: 838655 - DNA, 15 bp, Homo sapiens
ggctagcctaaaatt

SEQ ID NO: 838656 - DNA, 15 bp, Homo sapiens
gctagcctaaaattt

SEQ ID NO: 838657 - DNA, 15 bp, Homo sapiens
ctagcctaaaatttg

SEQ ID NO: 838658 - DNA, 15 bp, Homo sapiens
tagcctaaaatttga

SEQ ID NO: 838659 - DNA, 15 bp, Homo sapiens
agcctaaaatttgag

SEQ ID NO: 838660 - DNA, 15 bp, Homo sapiens
gcctaaaatttgagg

SEQ ID NO: 838661 - DNA, 15 bp, Homo sapiens
cctaaaatttgaggt

SEQ ID NO: 838662 - DNA, 15 bp, Homo sapiens
ctaaaatttgaggtt

SEQ ID NO: 838663 - DNA, 15 bp, Homo sapiens
taaaatttgaggttt

SEQ ID NO: 838664 - DNA, 15 bp, Homo sapiens
aaaatttgaggtttt

SEQ ID NO: 838665 - DNA, 15 bp, Homo sapiens
aaatttgaggtttta

SEQ ID NO: 838666 - DNA, 15 bp, Homo sapiens
aatttgaggttttag

SEQ ID NO: 838667 - DNA, 15 bp, Homo sapiens
atttgaggttttagt

SEQ ID NO: 838668 - DNA, 15 bp, Homo sapiens
tttgaggttttagtt

SEQ ID NO: 838669 - DNA, 15 bp, Homo sapiens
ttgaggttttagtta

SEQ ID NO: 838670 - DNA, 15 bp, Homo sapiens
tgaggttttagttac

SEQ ID NO: 838671 - DNA, 15 bp, Homo sapiens
gaggttttagttacc

SEQ ID NO: 838672 - DNA, 15 bp, Homo sapiens
aggttttagttaccc

SEQ ID NO: 838673 - DNA, 15 bp, Homo sapiens
ggttttagttaccca

SEQ ID NO: 838674 - DNA, 15 bp, Homo sapiens
gttttagttacccac

SEQ ID NO: 838675 - DNA, 15 bp, Homo sapiens
ttttagttacccaca

SEQ ID NO: 838676 - DNA, 15 bp, Homo sapiens
tttagttacccacac

SEQ ID NO: 838677 - DNA, 15 bp, Homo sapiens
ttagttacccacaca

SEQ ID NO: 838678 - DNA, 15 bp, Homo sapiens
tagttacccacacac

SEQ ID NO: 838679 - DNA, 15 bp, Homo sapiens
agttacccacacact

SEQ ID NO: 838680 - DNA, 15 bp, Homo sapiens
gttacccacacactt

SEQ ID NO: 838681 - DNA, 15 bp, Homo sapiens
ttacccacacactta

SEQ ID NO: 838682 - DNA, 15 bp, Homo sapiens
tacccacacacttaa

SEQ ID NO: 838683 - DNA, 15 bp, Homo sapiens
acccacacacttaaa

SEQ ID NO: 838684 - DNA, 15 bp, Homo sapiens
cccacacacttaaat

SEQ ID NO: 838685 - DNA, 15 bp, Homo sapiens
ccacacacttaaatt

SEQ ID NO: 838686 - DNA, 15 bp, Homo sapiens
cacacacttaaattt

SEQ ID NO: 838687 - DNA, 15 bp, Homo sapiens
acacacttaaattta

SEQ ID NO: 838688 - DNA, 15 bp, Homo sapiens
cacacttaaatttag

SEQ ID NO: 838689 - DNA, 15 bp, Homo sapiens
acacttaaatttagc

SEQ ID NO: 838690 - DNA, 15 bp, Homo sapiens
cacttaaatttagct

SEQ ID NO: 838691 - DNA, 15 bp, Homo sapiens
acttaaatttagctt

SEQ ID NO: 838692 - DNA, 15 bp, Homo sapiens
cttaaatttagcttt

SEQ ID NO: 838693 - DNA, 15 bp, Homo sapiens
ttaaatttagctttg

SEQ ID NO: 838694 - DNA, 15 bp, Homo sapiens
taaatttagctttgt

SEQ ID NO: 838695 - DNA, 15 bp, Homo sapiens
aaatttagctttgtg

SEQ ID NO: 838696 - DNA, 15 bp, Homo sapiens
aatttagctttgtgt

SEQ ID NO: 838697 - DNA, 15 bp, Homo sapiens
atttagctttgtgtg

SEQ ID NO: 838698 - DNA, 15 bp, Homo sapiens
tttagctttgtgtgt

SEQ ID NO: 838699 - DNA, 15 bp, Homo sapiens
ttagctttgtgtgtt

SEQ ID NO: 838700 - DNA, 15 bp, Homo sapiens
tagctttgtgtgttt

SEQ ID NO: 838701 - DNA, 15 bp, Homo sapiens
agctttgtgtgtttt

SEQ ID NO: 838702 - DNA, 15 bp, Homo sapiens
gctttgtgtgttttg

SEQ ID NO: 838703 - DNA, 15 bp, Homo sapiens
ctttgtgtgttttgt

SEQ ID NO: 838704 - DNA, 15 bp, Homo sapiens
tttgtgtgttttgtt

SEQ ID NO: 838705 - DNA, 15 bp, Homo sapiens
ttgtgtgttttgttt

SEQ ID NO: 838706 - DNA, 15 bp, Homo sapiens
tgtgtgttttgtttt

SEQ ID NO: 838707 - DNA, 15 bp, Homo sapiens
gtgtgttttgttttc

SEQ ID NO: 838708 - DNA, 15 bp, Homo sapiens
tgtgttttgttttct

SEQ ID NO: 838709 - DNA, 15 bp, Homo sapiens
gtgttttgttttctt

SEQ ID NO: 838710 - DNA, 15 bp, Homo sapiens
tgttttgttttcttt

SEQ ID NO: 838711 - DNA, 15 bp, Homo sapiens
gttttgttttctttt

SEQ ID NO: 838712 - DNA, 15 bp, Homo sapiens
ttttgttttctttta

SEQ ID NO: 838713 - DNA, 15 bp, Homo sapiens
tttgttttcttttat

SEQ ID NO: 838714 - DNA, 15 bp, Homo sapiens
ttgttttcttttatt

SEQ ID NO: 838715 - DNA, 15 bp, Homo sapiens
tgttttcttttattt

SEQ ID NO: 838716 - DNA, 15 bp, Homo sapiens
gttttcttttatttc

SEQ ID NO: 838717 - DNA, 15 bp, Homo sapiens
ttttcttttatttct

SEQ ID NO: 838718 - DNA, 15 bp, Homo sapiens
tttcttttatttctc

SEQ ID NO: 838719 - DNA, 15 bp, Homo sapiens
ttcttttatttctct

SEQ ID NO: 838720 - DNA, 15 bp, Homo sapiens
tcttttatttctctc

SEQ ID NO: 838721 - DNA, 15 bp, Homo sapiens
cttttatttctctcc

SEQ ID NO: 838722 - DNA, 15 bp, Homo sapiens
ttttatttctctcct

SEQ ID NO: 838723 - DNA, 15 bp, Homo sapiens
tttatttctctcctg

SEQ ID NO: 838724 - DNA, 15 bp, Homo sapiens
ttatttctctcctgc

SEQ ID NO: 838725 - DNA, 15 bp, Homo sapiens
tatttctctcctgcc

SEQ ID NO: 838726 - DNA, 15 bp, Homo sapiens
atttctctcctgcct

SEQ ID NO: 838727 - DNA, 15 bp, Homo sapiens
tttctctcctgcctg

SEQ ID NO: 838728 - DNA, 15 bp, Homo sapiens
ttctctcctgcctgc

SEQ ID NO: 838729 - DNA, 15 bp, Homo sapiens
tctctcctgcctgct

SEQ ID NO: 838730 - DNA, 15 bp, Homo sapiens
ctctcctgcctgctg

SEQ ID NO: 838731 - DNA, 15 bp, Homo sapiens
tctcctgcctgctgc

SEQ ID NO: 838732 - DNA, 15 bp, Homo sapiens
ctcctgcctgctgcc

SEQ ID NO: 838733 - DNA, 15 bp, Homo sapiens
tcctgcctgctgcca

SEQ ID NO: 838734 - DNA, 15 bp, Homo sapiens
cctgcctgctgccaa

SEQ ID NO: 838735 - DNA, 15 bp, Homo sapiens
ctgcctgctgccaag

SEQ ID NO: 838736 - DNA, 15 bp, Homo sapiens
tgcctgctgccaagc

SEQ ID NO: 838737 - DNA, 15 bp, Homo sapiens
gcctgctgccaagct

SEQ ID NO: 838738 - DNA, 15 bp, Homo sapiens
cctgctgccaagcta

SEQ ID NO: 838739 - DNA, 15 bp, Homo sapiens
ctgctgccaagctag

SEQ ID NO: 838740 - DNA, 15 bp, Homo sapiens
tgctgccaagctagg

SEQ ID NO: 838741 - DNA, 15 bp, Homo sapiens
gctgccaagctaggt

SEQ ID NO: 838742 - DNA, 15 bp, Homo sapiens
ctgccaagctaggtc

SEQ ID NO: 838743 - DNA, 15 bp, Homo sapiens
tgccaagctaggtct

SEQ ID NO: 838744 - DNA, 15 bp, Homo sapiens
gccaagctaggtctt

SEQ ID NO: 838745 - DNA, 15 bp, Homo sapiens
ccaagctaggtcttc

SEQ ID NO: 838746 - DNA, 15 bp, Homo sapiens
caagctaggtcttct

SEQ ID NO: 838747 - DNA, 15 bp, Homo sapiens
aagctaggtcttctc

SEQ ID NO: 838748 - DNA, 15 bp, Homo sapiens
agctaggtcttctca

SEQ ID NO: 838749 - DNA, 15 bp, Homo sapiens
gctaggtcttctcat

SEQ ID NO: 838750 - DNA, 15 bp, Homo sapiens
ctaggtcttctcatt

SEQ ID NO: 838751 - DNA, 15 bp, Homo sapiens
taggtcttctcattt

SEQ ID NO: 838752 - DNA, 15 bp, Homo sapiens
aggtcttctcatttt

SEQ ID NO: 838753 - DNA, 15 bp, Homo sapiens
ggtcttctcattttg

SEQ ID NO: 838754 - DNA, 15 bp, Homo sapiens
gtcttctcattttga

SEQ ID NO: 838755 - DNA, 15 bp, Homo sapiens
tcttctcattttgaa

SEQ ID NO: 838756 - DNA, 15 bp, Homo sapiens
cttctcattttgaat

SEQ ID NO: 838757 - DNA, 15 bp, Homo sapiens
ttctcattttgaatt

SEQ ID NO: 838758 - DNA, 15 bp, Homo sapiens
tctcattttgaattt

SEQ ID NO: 838759 - DNA, 15 bp, Homo sapiens
ctcattttgaattta

SEQ ID NO: 838760 - DNA, 15 bp, Homo sapiens
tcattttgaatttat

SEQ ID NO: 838761 - DNA, 15 bp, Homo sapiens
cattttgaatttata

SEQ ID NO: 838762 - DNA, 15 bp, Homo sapiens
attttgaatttatat

SEQ ID NO: 838763 - DNA, 15 bp, Homo sapiens
ttttgaatttatata

SEQ ID NO: 838764 - DNA, 15 bp, Homo sapiens
tttgaatttatatag

SEQ ID NO: 838765 - DNA, 15 bp, Homo sapiens
ttgaatttatatagt

SEQ ID NO: 838766 - DNA, 15 bp, Homo sapiens
tgaatttatatagtt

SEQ ID NO: 838767 - DNA, 15 bp, Homo sapiens
gaatttatatagttg

SEQ ID NO: 838768 - DNA, 15 bp, Homo sapiens
aatttatatagttga

SEQ ID NO: 838769 - DNA, 15 bp, Homo sapiens
atttatatagttgat

SEQ ID NO: 838770 - DNA, 15 bp, Homo sapiens
tttatatagttgatt

SEQ ID NO: 838771 - DNA, 15 bp, Homo sapiens
ttatatagttgattt

SEQ ID NO: 838772 - DNA, 15 bp, Homo sapiens
tatatagttgatttt

SEQ ID NO: 838773 - DNA, 15 bp, Homo sapiens
atatagttgattttt

SEQ ID NO: 838774 - DNA, 15 bp, Homo sapiens
tatagttgatttttt

SEQ ID NO: 838775 - DNA, 15 bp, Homo sapiens
atagttgattttttt

SEQ ID NO: 838776 - DNA, 15 bp, Homo sapiens
tagttgatttttttt

SEQ ID NO: 838777 - DNA, 15 bp, Homo sapiens
agttgatttttttta

SEQ ID NO: 838778 - DNA, 15 bp, Homo sapiens
gttgattttttttag

SEQ ID NO: 838779 - DNA, 15 bp, Homo sapiens
ttgattttttttagc

SEQ ID NO: 838780 - DNA, 15 bp, Homo sapiens
tgattttttttagcc

SEQ ID NO: 838781 - DNA, 15 bp, Homo sapiens
gattttttttagcct

SEQ ID NO: 838782 - DNA, 15 bp, Homo sapiens
attttttttagccta

SEQ ID NO: 838783 - DNA, 15 bp, Homo sapiens
ttttttttagcctaa

SEQ ID NO: 838784 - DNA, 15 bp, Homo sapiens
tttttttagcctaaa

SEQ ID NO: 838785 - DNA, 15 bp, Homo sapiens
ttttttagcctaaat

SEQ ID NO: 838786 - DNA, 15 bp, Homo sapiens
tttttagcctaaatg

SEQ ID NO: 838787 - DNA, 15 bp, Homo sapiens
ttttagcctaaatgc

SEQ ID NO: 838788 - DNA, 15 bp, Homo sapiens
tttagcctaaatgct

SEQ ID NO: 838789 - DNA, 15 bp, Homo sapiens
ttagcctaaatgctg

SEQ ID NO: 838790 - DNA, 15 bp, Homo sapiens
tagcctaaatgctgt

SEQ ID NO: 838791 - DNA, 15 bp, Homo sapiens
agcctaaatgctgta

SEQ ID NO: 838792 - DNA, 15 bp, Homo sapiens
gcctaaatgctgtac

SEQ ID NO: 838793 - DNA, 15 bp, Homo sapiens
cctaaatgctgtact

SEQ ID NO: 838794 - DNA, 15 bp, Homo sapiens
ctaaatgctgtactt

SEQ ID NO: 838795 - DNA, 15 bp, Homo sapiens
taaatgctgtacttg

SEQ ID NO: 838796 - DNA, 15 bp, Homo sapiens
aaatgctgtacttga

SEQ ID NO: 838797 - DNA, 15 bp, Homo sapiens
aatgctgtacttgac

SEQ ID NO: 838798 - DNA, 15 bp, Homo sapiens
atgctgtacttgaca

SEQ ID NO: 838799 - DNA, 15 bp, Homo sapiens
tgctgtacttgacat

SEQ ID NO: 838800 - DNA, 15 bp, Homo sapiens
gctgtacttgacatg

SEQ ID NO: 838801 - DNA, 15 bp, Homo sapiens
ctgtacttgacatga

SEQ ID NO: 838802 - DNA, 15 bp, Homo sapiens
tgtacttgacatgaa

SEQ ID NO: 838803 - DNA, 15 bp, Homo sapiens
gtacttgacatgaaa

SEQ ID NO: 838804 - DNA, 15 bp, Homo sapiens
tacttgacatgaaag

SEQ ID NO: 838805 - DNA, 15 bp, Homo sapiens
acttgacatgaaagc

SEQ ID NO: 838806 - DNA, 15 bp, Homo sapiens
cttgacatgaaagcc

SEQ ID NO: 838807 - DNA, 15 bp, Homo sapiens
ttgacatgaaagcct

SEQ ID NO: 838808 - DNA, 15 bp, Homo sapiens
tgacatgaaagcctt

SEQ ID NO: 838809 - DNA, 15 bp, Homo sapiens
gacatgaaagccttg

SEQ ID NO: 838810 - DNA, 15 bp, Homo sapiens
acatgaaagccttgt

SEQ ID NO: 838811 - DNA, 15 bp, Homo sapiens
catgaaagccttgta

SEQ ID NO: 838812 - DNA, 15 bp, Homo sapiens
atgaaagccttgtaa

SEQ ID NO: 838813 - DNA, 15 bp, Homo sapiens
tgaaagccttgtaaa

SEQ ID NO: 838814 - DNA, 15 bp, Homo sapiens
gaaagccttgtaaat

SEQ ID NO: 838815 - DNA, 15 bp, Homo sapiens
aaagccttgtaaatc

SEQ ID NO: 838816 - DNA, 15 bp, Homo sapiens
aagccttgtaaatct

SEQ ID NO: 838817 - DNA, 15 bp, Homo sapiens
agccttgtaaatctt

SEQ ID NO: 838818 - DNA, 15 bp, Homo sapiens
gccttgtaaatcttt

SEQ ID NO: 838819 - DNA, 15 bp, Homo sapiens
ccttgtaaatctttt

SEQ ID NO: 838820 - DNA, 15 bp, Homo sapiens
cttgtaaatcttttt

SEQ ID NO: 838821 - DNA, 15 bp, Homo sapiens
ttgtaaatcttttta

SEQ ID NO: 838822 - DNA, 15 bp, Homo sapiens
tgtaaatctttttag

SEQ ID NO: 838823 - DNA, 15 bp, Homo sapiens
gtaaatctttttagt

SEQ ID NO: 838824 - DNA, 15 bp, Homo sapiens
taaatctttttagtt

SEQ ID NO: 838825 - DNA, 15 bp, Homo sapiens
aaatctttttagttt

SEQ ID NO: 838826 - DNA, 15 bp, Homo sapiens
aatctttttagtttg

SEQ ID NO: 838827 - DNA, 15 bp, Homo sapiens
atctttttagtttgg

SEQ ID NO: 838828 - DNA, 15 bp, Homo sapiens
tctttttagtttggt

SEQ ID NO: 838829 - DNA, 15 bp, Homo sapiens
ctttttagtttggtc

SEQ ID NO: 838830 - DNA, 15 bp, Homo sapiens
tttttagtttggtct

SEQ ID NO: 838831 - DNA, 15 bp, Homo sapiens
ttttagtttggtctt

SEQ ID NO: 838832 - DNA, 15 bp, Homo sapiens
tttagtttggtcttt

SEQ ID NO: 838833 - DNA, 15 bp, Homo sapiens
ttagtttggtctttt

SEQ ID NO: 838834 - DNA, 15 bp, Homo sapiens
tagtttggtcttttg

SEQ ID NO: 838835 - DNA, 15 bp, Homo sapiens
agtttggtcttttgc

SEQ ID NO: 838836 - DNA, 15 bp, Homo sapiens
gtttggtcttttgcc

SEQ ID NO: 838837 - DNA, 15 bp, Homo sapiens
tttggtcttttgccg

SEQ ID NO: 838838 - DNA, 15 bp, Homo sapiens
ttggtcttttgccga

SEQ ID NO: 838839 - DNA, 15 bp, Homo sapiens
tggtcttttgccgat

SEQ ID NO: 838840 - DNA, 15 bp, Homo sapiens
ggtcttttgccgatt

SEQ ID NO: 838841 - DNA, 15 bp, Homo sapiens
gtcttttgccgattt

SEQ ID NO: 838842 - DNA, 15 bp, Homo sapiens
tcttttgccgatttt

SEQ ID NO: 838843 - DNA, 15 bp, Homo sapiens
cttttgccgattttt

SEQ ID NO: 838844 - DNA, 15 bp, Homo sapiens
ttttgccgatttttc

SEQ ID NO: 838845 - DNA, 15 bp, Homo sapiens
tttgccgatttttcc

SEQ ID NO: 838846 - DNA, 15 bp, Homo sapiens
ttgccgatttttcca

SEQ ID NO: 838847 - DNA, 15 bp, Homo sapiens
tgccgatttttccaa

SEQ ID NO: 838848 - DNA, 15 bp, Homo sapiens
gccgatttttccaac

SEQ ID NO: 838849 - DNA, 15 bp, Homo sapiens
ccgatttttccaact

SEQ ID NO: 838850 - DNA, 15 bp, Homo sapiens
cgatttttccaactc

SEQ ID NO: 838851 - DNA, 15 bp, Homo sapiens
gatttttccaactct

SEQ ID NO: 838852 - DNA, 15 bp, Homo sapiens
atttttccaactctg

SEQ ID NO: 838853 - DNA, 15 bp, Homo sapiens
tttttccaactctgg

SEQ ID NO: 838854 - DNA, 15 bp, Homo sapiens
ttttccaactctgga

SEQ ID NO: 838855 - DNA, 15 bp, Homo sapiens
tttccaactctggag

SEQ ID NO: 838856 - DNA, 15 bp, Homo sapiens
ttccaactctggaga

SEQ ID NO: 838857 - DNA, 15 bp, Homo sapiens
tccaactctggagaa

SEQ ID NO: 838858 - DNA, 15 bp, Homo sapiens
ccaactctggagaac

SEQ ID NO: 838859 - DNA, 15 bp, Homo sapiens
caactctggagaacc

SEQ ID NO: 838860 - DNA, 15 bp, Homo sapiens
aactctggagaacct

SEQ ID NO: 838861 - DNA, 15 bp, Homo sapiens
actctggagaacctt

SEQ ID NO: 838862 - DNA, 15 bp, Homo sapiens
ctctggagaaccttt

SEQ ID NO: 838863 - DNA, 15 bp, Homo sapiens
tctggagaacctttt

SEQ ID NO: 838864 - DNA, 15 bp, Homo sapiens
ctggagaaccttttg

SEQ ID NO: 838865 - DNA, 15 bp, Homo sapiens
tggagaaccttttga

SEQ ID NO: 838866 - DNA, 15 bp, Homo sapiens
ggagaaccttttgaa

SEQ ID NO: 838867 - DNA, 15 bp, Homo sapiens
gagaaccttttgaac

SEQ ID NO: 838868 - DNA, 15 bp, Homo sapiens
agaaccttttgaact

SEQ ID NO: 838869 - DNA, 15 bp, Homo sapiens
gaaccttttgaactt

SEQ ID NO: 838870 - DNA, 15 bp, Homo sapiens
aaccttttgaacttt

SEQ ID NO: 838871 - DNA, 15 bp, Homo sapiens
accttttgaactttg

SEQ ID NO: 838872 - DNA, 15 bp, Homo sapiens
ccttttgaactttga

SEQ ID NO: 838873 - DNA, 15 bp, Homo sapiens
cttttgaactttgat

SEQ ID NO: 838874 - DNA, 15 bp, Homo sapiens
ttttgaactttgatt

SEQ ID NO: 838875 - DNA, 15 bp, Homo sapiens
tttgaactttgattc

SEQ ID NO: 838876 - DNA, 15 bp, Homo sapiens
ttgaactttgattct

SEQ ID NO: 838877 - DNA, 15 bp, Homo sapiens
tgaactttgattctt

SEQ ID NO: 838878 - DNA, 15 bp, Homo sapiens
gaactttgattcttt

SEQ ID NO: 838879 - DNA, 15 bp, Homo sapiens
aactttgattctttc

SEQ ID NO: 838880 - DNA, 15 bp, Homo sapiens
actttgattctttca

SEQ ID NO: 838881 - DNA, 15 bp, Homo sapiens
ctttgattctttcat

SEQ ID NO: 838882 - DNA, 15 bp, Homo sapiens
tttgattctttcatc

SEQ ID NO: 838883 - DNA, 15 bp, Homo sapiens
ttgattctttcatcc

SEQ ID NO: 838884 - DNA, 15 bp, Homo sapiens
tgattctttcatcca

SEQ ID NO: 838885 - DNA, 15 bp, Homo sapiens
gattctttcatccaa

SEQ ID NO: 838886 - DNA, 15 bp, Homo sapiens
attctttcatccaat

SEQ ID NO: 838887 - DNA, 15 bp, Homo sapiens
ttctttcatccaatg

SEQ ID NO: 838888 - DNA, 15 bp, Homo sapiens
tctttcatccaatgt

SEQ ID NO: 838889 - DNA, 15 bp, Homo sapiens
ctttcatccaatgta

SEQ ID NO: 838890 - DNA, 15 bp, Homo sapiens
tttcatccaatgtat

SEQ ID NO: 838891 - DNA, 15 bp, Homo sapiens
ttcatccaatgtatt

SEQ ID NO: 838892 - DNA, 15 bp, Homo sapiens
tcatccaatgtattt

SEQ ID NO: 838893 - DNA, 15 bp, Homo sapiens
catccaatgtatttt

SEQ ID NO: 838894 - DNA, 15 bp, Homo sapiens
atccaatgtattttc

SEQ ID NO: 838895 - DNA, 15 bp, Homo sapiens
tccaatgtattttct

SEQ ID NO: 838896 - DNA, 15 bp, Homo sapiens
ccaatgtattttcta

SEQ ID NO: 838897 - DNA, 15 bp, Homo sapiens
caatgtattttctat

SEQ ID NO: 838898 - DNA, 15 bp, Homo sapiens
aatgtattttctatg

SEQ ID NO: 838899 - DNA, 15 bp, Homo sapiens
atgtattttctatga

SEQ ID NO: 838900 - DNA, 15 bp, Homo sapiens
tgtattttctatgac

SEQ ID NO: 838901 - DNA, 15 bp, Homo sapiens
gtattttctatgact

SEQ ID NO: 838902 - DNA, 15 bp, Homo sapiens
tattttctatgactc

SEQ ID NO: 838903 - DNA, 15 bp, Homo sapiens
attttctatgactct

SEQ ID NO: 838904 - DNA, 15 bp, Homo sapiens
ttttctatgactctc

SEQ ID NO: 838905 - DNA, 15 bp, Homo sapiens
tttctatgactctct

SEQ ID NO: 838906 - DNA, 15 bp, Homo sapiens
ttctatgactctctg

SEQ ID NO: 838907 - DNA, 15 bp, Homo sapiens
tctatgactctctgc

SEQ ID NO: 838908 - DNA, 15 bp, Homo sapiens
ctatgactctctgct

SEQ ID NO: 838909 - DNA, 15 bp, Homo sapiens
tatgactctctgctt

SEQ ID NO: 838910 - DNA, 15 bp, Homo sapiens
atgactctctgcttc

SEQ ID NO: 838911 - DNA, 15 bp, Homo sapiens
tgactctctgcttca

SEQ ID NO: 838912 - DNA, 15 bp, Homo sapiens
gactctctgcttcat

SEQ ID NO: 838913 - DNA, 15 bp, Homo sapiens
actctctgcttcatg

SEQ ID NO: 838914 - DNA, 15 bp, Homo sapiens
ctctctgcttcatgc

SEQ ID NO: 838915 - DNA, 15 bp, Homo sapiens
tctctgcttcatgcc

SEQ ID NO: 838916 - DNA, 15 bp, Homo sapiens
ctctgcttcatgcca

SEQ ID NO: 838917 - DNA, 15 bp, Homo sapiens
tctgcttcatgccac

SEQ ID NO: 838918 - DNA, 15 bp, Homo sapiens
ctgcttcatgccact

SEQ ID NO: 838919 - DNA, 15 bp, Homo sapiens
tgcttcatgccactt

SEQ ID NO: 838920 - DNA, 15 bp, Homo sapiens
gcttcatgccactta

SEQ ID NO: 838921 - DNA, 15 bp, Homo sapiens
cttcatgccacttaa

SEQ ID NO: 838922 - DNA, 15 bp, Homo sapiens
ttcatgccacttaaa

SEQ ID NO: 838923 - DNA, 15 bp, Homo sapiens
tcatgccacttaaaa

SEQ ID NO: 838924 - DNA, 15 bp, Homo sapiens
catgccacttaaaaa

SEQ ID NO: 838925 - DNA, 15 bp, Homo sapiens
atgccacttaaaaat

SEQ ID NO: 838926 - DNA, 15 bp, Homo sapiens
tgccacttaaaaata

SEQ ID NO: 838927 - DNA, 15 bp, Homo sapiens
gccacttaaaaataa

SEQ ID NO: 838928 - DNA, 15 bp, Homo sapiens
ccacttaaaaataat

SEQ ID NO: 838929 - DNA, 15 bp, Homo sapiens
cacttaaaaataatt

SEQ ID NO: 838930 - DNA, 15 bp, Homo sapiens
acttaaaaataattg

SEQ ID NO: 838931 - DNA, 15 bp, Homo sapiens
cttaaaaataattgg

SEQ ID NO: 838932 - DNA, 15 bp, Homo sapiens
ttaaaaataattgga

SEQ ID NO: 838933 - DNA, 15 bp, Homo sapiens
taaaaataattggat

SEQ ID NO: 838934 - DNA, 15 bp, Homo sapiens
aaaaataattggatg

SEQ ID NO: 838935 - DNA, 15 bp, Homo sapiens
aaaataattggatga

SEQ ID NO: 838936 - DNA, 15 bp, Homo sapiens
aaataattggatgag

SEQ ID NO: 838937 - DNA, 15 bp, Homo sapiens
aataattggatgagc

SEQ ID NO: 838938 - DNA, 15 bp, Homo sapiens
ataattggatgagca

SEQ ID NO: 838939 - DNA, 15 bp, Homo sapiens
taattggatgagcat

SEQ ID NO: 838940 - DNA, 15 bp, Homo sapiens
aattggatgagcatg

SEQ ID NO: 838941 - DNA, 15 bp, Homo sapiens
attggatgagcatgc

SEQ ID NO: 838942 - DNA, 15 bp, Homo sapiens
ttggatgagcatgcc

SEQ ID NO: 838943 - DNA, 15 bp, Homo sapiens
tggatgagcatgcct

SEQ ID NO: 838944 - DNA, 15 bp, Homo sapiens
ggatgagcatgcctc

SEQ ID NO: 838945 - DNA, 15 bp, Homo sapiens
gatgagcatgcctct

SEQ ID NO: 838946 - DNA, 15 bp, Homo sapiens
atgagcatgcctctg

SEQ ID NO: 838947 - DNA, 15 bp, Homo sapiens
tgagcatgcctctgg

SEQ ID NO: 838948 - DNA, 15 bp, Homo sapiens
gagcatgcctctggg

SEQ ID NO: 838949 - DNA, 15 bp, Homo sapiens
agcatgcctctgggt

SEQ ID NO: 838950 - DNA, 15 bp, Homo sapiens
gcatgcctctgggtt

SEQ ID NO: 838951 - DNA, 15 bp, Homo sapiens
catgcctctgggttc

SEQ ID NO: 838952 - DNA, 15 bp, Homo sapiens
atgcctctgggttct

SEQ ID NO: 838953 - DNA, 15 bp, Homo sapiens
tgcctctgggttctt

SEQ ID NO: 838954 - DNA, 15 bp, Homo sapiens
gcctctgggttcttg

SEQ ID NO: 838955 - DNA, 15 bp, Homo sapiens
cctctgggttcttgt

SEQ ID NO: 838956 - DNA, 15 bp, Homo sapiens
ctctgggttcttgtc

SEQ ID NO: 838957 - DNA, 15 bp, Homo sapiens
tctgggttcttgtct

SEQ ID NO: 838958 - DNA, 15 bp, Homo sapiens
ctgggttcttgtctc

SEQ ID NO: 838959 - DNA, 15 bp, Homo sapiens
tgggttcttgtctca

SEQ ID NO: 838960 - DNA, 15 bp, Homo sapiens
gggttcttgtctcag

SEQ ID NO: 838961 - DNA, 15 bp, Homo sapiens
ggttcttgtctcagg

SEQ ID NO: 838962 - DNA, 15 bp, Homo sapiens
gttcttgtctcaggg

SEQ ID NO: 838963 - DNA, 15 bp, Homo sapiens
ttcttgtctcagggc

SEQ ID NO: 838964 - DNA, 15 bp, Homo sapiens
tcttgtctcagggcc

SEQ ID NO: 838965 - DNA, 15 bp, Homo sapiens
cttgtctcagggcct

SEQ ID NO: 838966 - DNA, 15 bp, Homo sapiens
ttgtctcagggcctg

SEQ ID NO: 838967 - DNA, 15 bp, Homo sapiens
tgtctcagggcctga

SEQ ID NO: 838968 - DNA, 15 bp, Homo sapiens
gtctcagggcctgac

SEQ ID NO: 838969 - DNA, 15 bp, Homo sapiens
tctcagggcctgaca

SEQ ID NO: 838970 - DNA, 15 bp, Homo sapiens
ctcagggcctgacat

SEQ ID NO: 838971 - DNA, 15 bp, Homo sapiens
tcagggcctgacata

SEQ ID NO: 838972 - DNA, 15 bp, Homo sapiens
cagggcctgacataa

SEQ ID NO: 838973 - DNA, 15 bp, Homo sapiens
agggcctgacataag

SEQ ID NO: 838974 - DNA, 15 bp, Homo sapiens
gggcctgacataagg

SEQ ID NO: 838975 - DNA, 15 bp, Homo sapiens
ggcctgacataaggg

SEQ ID NO: 838976 - DNA, 15 bp, Homo sapiens
gcctgacataagggt

SEQ ID NO: 838977 - DNA, 15 bp, Homo sapiens
cctgacataagggtt

SEQ ID NO: 838978 - DNA, 15 bp, Homo sapiens
ctgacataagggttg

SEQ ID NO: 838979 - DNA, 15 bp, Homo sapiens
tgacataagggttga

SEQ ID NO: 838980 - DNA, 15 bp, Homo sapiens
gacataagggttgaa

SEQ ID NO: 838981 - DNA, 15 bp, Homo sapiens
acataagggttgaat

SEQ ID NO: 838982 - DNA, 15 bp, Homo sapiens
cataagggttgaata

SEQ ID NO: 838983 - DNA, 15 bp, Homo sapiens
ataagggttgaatag

SEQ ID NO: 838984 - DNA, 15 bp, Homo sapiens
taagggttgaatagg

SEQ ID NO: 838985 - DNA, 15 bp, Homo sapiens
aagggttgaatagga

SEQ ID NO: 838986 - DNA, 15 bp, Homo sapiens
agggttgaataggac

SEQ ID NO: 838987 - DNA, 15 bp, Homo sapiens
gggttgaataggacc

SEQ ID NO: 838988 - DNA, 15 bp, Homo sapiens
ggttgaataggacca

SEQ ID NO: 838989 - DNA, 15 bp, Homo sapiens
gttgaataggaccag

SEQ ID NO: 838990 - DNA, 15 bp, Homo sapiens
ttgaataggaccagt

SEQ ID NO: 838991 - DNA, 15 bp, Homo sapiens
tgaataggaccagtc

SEQ ID NO: 838992 - DNA, 15 bp, Homo sapiens
gaataggaccagtcc

SEQ ID NO: 838993 - DNA, 15 bp, Homo sapiens
aataggaccagtcca

SEQ ID NO: 838994 - DNA, 15 bp, Homo sapiens
ataggaccagtccat

SEQ ID NO: 838995 - DNA, 15 bp, Homo sapiens
taggaccagtccatt

SEQ ID NO: 838996 - DNA, 15 bp, Homo sapiens
aggaccagtccattt

SEQ ID NO: 838997 - DNA, 15 bp, Homo sapiens
ggaccagtccatttg

SEQ ID NO: 838998 - DNA, 15 bp, Homo sapiens
gaccagtccatttgc

SEQ ID NO: 838999 - DNA, 15 bp, Homo sapiens
accagtccatttgca

SEQ ID NO: 839000 - DNA, 15 bp, Homo sapiens
ccagtccatttgcaa

SEQ ID NO: 839001 - DNA, 15 bp, Homo sapiens
cagtccatttgcaag

SEQ ID NO: 839002 - DNA, 15 bp, Homo sapiens
agtccatttgcaaga

SEQ ID NO: 839003 - DNA, 15 bp, Homo sapiens
gtccatttgcaagag

SEQ ID NO: 839004 - DNA, 15 bp, Homo sapiens
tccatttgcaagaga

SEQ ID NO: 839005 - DNA, 15 bp, Homo sapiens
ccatttgcaagagat

SEQ ID NO: 839006 - DNA, 15 bp, Homo sapiens
catttgcaagagatt

SEQ ID NO: 839007 - DNA, 15 bp, Homo sapiens
atttgcaagagattg

SEQ ID NO: 839008 - DNA, 15 bp, Homo sapiens
tttgcaagagattgg

SEQ ID NO: 839009 - DNA, 15 bp, Homo sapiens
ttgcaagagattgga

SEQ ID NO: 839010 - DNA, 15 bp, Homo sapiens
tgcaagagattggaa

SEQ ID NO: 839011 - DNA, 15 bp, Homo sapiens
gcaagagattggaaa

SEQ ID NO: 839012 - DNA, 15 bp, Homo sapiens
caagagattggaaac

SEQ ID NO: 839013 - DNA, 15 bp, Homo sapiens
aagagattggaaacg

SEQ ID NO: 839014 - DNA, 15 bp, Homo sapiens
agagattggaaacgt

SEQ ID NO: 839015 - DNA, 15 bp, Homo sapiens
gagattggaaacgtc

SEQ ID NO: 839016 - DNA, 15 bp, Homo sapiens
agattggaaacgtcg

SEQ ID NO: 839017 - DNA, 15 bp, Homo sapiens
gattggaaacgtcga

SEQ ID NO: 839018 - DNA, 15 bp, Homo sapiens
attggaaacgtcgac

SEQ ID NO: 839019 - DNA, 15 bp, Homo sapiens
ttggaaacgtcgaca

SEQ ID NO: 839020 - DNA, 15 bp, Homo sapiens
tggaaacgtcgacac

SEQ ID NO: 839021 - DNA, 15 bp, Homo sapiens
ggaaacgtcgacact

SEQ ID NO: 839022 - DNA, 15 bp, Homo sapiens
gaaacgtcgacactg

SEQ ID NO: 839023 - DNA, 15 bp, Homo sapiens
aaacgtcgacactgt

SEQ ID NO: 839024 - DNA, 15 bp, Homo sapiens
aacgtcgacactgtg

SEQ ID NO: 839025 - DNA, 15 bp, Homo sapiens
acgtcgacactgtga

SEQ ID NO: 839026 - DNA, 15 bp, Homo sapiens
cgtcgacactgtgat

SEQ ID NO: 839027 - DNA, 15 bp, Homo sapiens
gtcgacactgtgatt

SEQ ID NO: 839028 - DNA, 15 bp, Homo sapiens
tcgacactgtgattt

SEQ ID NO: 839029 - DNA, 15 bp, Homo sapiens
cgacactgtgattta

SEQ ID NO: 839030 - DNA, 15 bp, Homo sapiens
gacactgtgatttac

SEQ ID NO: 839031 - DNA, 15 bp, Homo sapiens
acactgtgatttacc

SEQ ID NO: 839032 - DNA, 15 bp, Homo sapiens
cactgtgatttacct

SEQ ID NO: 839033 - DNA, 15 bp, Homo sapiens
actgtgatttacctg

SEQ ID NO: 839034 - DNA, 15 bp, Homo sapiens
ctgtgatttacctga

SEQ ID NO: 839035 - DNA, 15 bp, Homo sapiens
tgtgatttacctgat

SEQ ID NO: 839036 - DNA, 15 bp, Homo sapiens
gtgatttacctgatg

SEQ ID NO: 839037 - DNA, 15 bp, Homo sapiens
tgatttacctgatgt

SEQ ID NO: 839038 - DNA, 15 bp, Homo sapiens
gatttacctgatgtt

SEQ ID NO: 839039 - DNA, 15 bp, Homo sapiens
atttacctgatgttt

SEQ ID NO: 839040 - DNA, 15 bp, Homo sapiens
tttacctgatgtttt

SEQ ID NO: 839041 - DNA, 15 bp, Homo sapiens
ttacctgatgtttta

SEQ ID NO: 839042 - DNA, 15 bp, Homo sapiens
tacctgatgttttag

SEQ ID NO: 839043 - DNA, 15 bp, Homo sapiens
acctgatgttttagg

SEQ ID NO: 839044 - DNA, 15 bp, Homo sapiens
cctgatgttttaggc

SEQ ID NO: 839045 - DNA, 15 bp, Homo sapiens
ctgatgttttaggcc

SEQ ID NO: 839046 - DNA, 15 bp, Homo sapiens
tgatgttttaggcca

SEQ ID NO: 839047 - DNA, 15 bp, Homo sapiens
gatgttttaggccag

SEQ ID NO: 839048 - DNA, 15 bp, Homo sapiens
atgttttaggccagt

SEQ ID NO: 839049 - DNA, 15 bp, Homo sapiens
tgttttaggccagtg

SEQ ID NO: 839050 - DNA, 15 bp, Homo sapiens
gttttaggccagtgg

SEQ ID NO: 839051 - DNA, 15 bp, Homo sapiens
ttttaggccagtggt

SEQ ID NO: 839052 - DNA, 15 bp, Homo sapiens
tttaggccagtggtt

SEQ ID NO: 839053 - DNA, 15 bp, Homo sapiens
ttaggccagtggttc

SEQ ID NO: 839054 - DNA, 15 bp, Homo sapiens
taggccagtggttct

SEQ ID NO: 839055 - DNA, 15 bp, Homo sapiens
aggccagtggttctc

SEQ ID NO: 839056 - DNA, 15 bp, Homo sapiens
ggccagtggttctca

SEQ ID NO: 839057 - DNA, 15 bp, Homo sapiens
gccagtggttctcaa

SEQ ID NO: 839058 - DNA, 15 bp, Homo sapiens
ttctcaaagtgtggc

SEQ ID NO: 839059 - DNA, 15 bp, Homo sapiens
tctcaaagtgtggcc

SEQ ID NO: 839060 - DNA, 15 bp, Homo sapiens
ctcaaagtgtggccc

SEQ ID NO: 839061 - DNA, 15 bp, Homo sapiens
tcaaagtgtggcccc

SEQ ID NO: 839062 - DNA, 15 bp, Homo sapiens
caaagtgtggcccct

SEQ ID NO: 839063 - DNA, 15 bp, Homo sapiens
aaagtgtggccccta

SEQ ID NO: 839064 - DNA, 15 bp, Homo sapiens
aagtgtggcccctag

SEQ ID NO: 839065 - DNA, 15 bp, Homo sapiens
agtgtggcccctaga

SEQ ID NO: 839066 - DNA, 15 bp, Homo sapiens
gtgtggcccctagat

SEQ ID NO: 839067 - DNA, 15 bp, Homo sapiens
tgtggcccctagatc

SEQ ID NO: 839068 - DNA, 15 bp, Homo sapiens
gtggcccctagatca

SEQ ID NO: 839069 - DNA, 15 bp, Homo sapiens
tggcccctagatcaa

SEQ ID NO: 839070 - DNA, 15 bp, Homo sapiens
ggcccctagatcaac

SEQ ID NO: 839071 - DNA, 15 bp, Homo sapiens
gcccctagatcaaca

SEQ ID NO: 839072 - DNA, 15 bp, Homo sapiens
cccctagatcaacag

SEQ ID NO: 839073 - DNA, 15 bp, Homo sapiens
ccctagatcaacagc

SEQ ID NO: 839074 - DNA, 15 bp, Homo sapiens
cctagatcaacagcg

SEQ ID NO: 839075 - DNA, 15 bp, Homo sapiens
ctagatcaacagcgt

SEQ ID NO: 839076 - DNA, 15 bp, Homo sapiens
tagatcaacagcgtc

SEQ ID NO: 839077 - DNA, 15 bp, Homo sapiens
agatcaacagcgtca

SEQ ID NO: 839078 - DNA, 15 bp, Homo sapiens
gatcaacagcgtcag

SEQ ID NO: 839079 - DNA, 15 bp, Homo sapiens
atcaacagcgtcagc

SEQ ID NO: 839080 - DNA, 15 bp, Homo sapiens
tcaacagcgtcagcg

SEQ ID NO: 839081 - DNA, 15 bp, Homo sapiens
caacagcgtcagcgt

SEQ ID NO: 839082 - DNA, 15 bp, Homo sapiens
aacagcgtcagcgtc

SEQ ID NO: 839083 - DNA, 15 bp, Homo sapiens
acagcgtcagcgtca

SEQ ID NO: 839084 - DNA, 15 bp, Homo sapiens
cagcgtcagcgtcac

SEQ ID NO: 839085 - DNA, 15 bp, Homo sapiens
agcgtcagcgtcacc

SEQ ID NO: 839086 - DNA, 15 bp, Homo sapiens
gcgtcagcgtcacct

SEQ ID NO: 839087 - DNA, 15 bp, Homo sapiens
cgtcagcgtcacctc

SEQ ID NO: 839088 - DNA, 15 bp, Homo sapiens
gtcagcgtcacctcc

SEQ ID NO: 839089 - DNA, 15 bp, Homo sapiens
tcagcgtcacctcca

SEQ ID NO: 839090 - DNA, 15 bp, Homo sapiens
cagcgtcacctccaa

SEQ ID NO: 839091 - DNA, 15 bp, Homo sapiens
agcgtcacctccaac

SEQ ID NO: 839092 - DNA, 15 bp, Homo sapiens
gcgtcacctccaact

SEQ ID NO: 839093 - DNA, 15 bp, Homo sapiens
cgtcacctccaactt

SEQ ID NO: 839094 - DNA, 15 bp, Homo sapiens
gtcacctccaacttg

SEQ ID NO: 839095 - DNA, 15 bp, Homo sapiens
tcacctccaacttgt

SEQ ID NO: 839096 - DNA, 15 bp, Homo sapiens
cacctccaacttgtg

SEQ ID NO: 839097 - DNA, 15 bp, Homo sapiens
acctccaacttgtga

SEQ ID NO: 839098 - DNA, 15 bp, Homo sapiens
cctccaacttgtgag

SEQ ID NO: 839099 - DNA, 15 bp, Homo sapiens
ctccaacttgtgaga

SEQ ID NO: 839100 - DNA, 15 bp, Homo sapiens
tccaacttgtgagaa

SEQ ID NO: 839101 - DNA, 15 bp, Homo sapiens
ccaacttgtgagaaa

SEQ ID NO: 839102 - DNA, 15 bp, Homo sapiens
caacttgtgagaaat

SEQ ID NO: 839103 - DNA, 15 bp, Homo sapiens
aacttgtgagaaatg

SEQ ID NO: 839104 - DNA, 15 bp, Homo sapiens
acttgtgagaaatgc

SEQ ID NO: 839105 - DNA, 15 bp, Homo sapiens
cttgtgagaaatgcc

SEQ ID NO: 839106 - DNA, 15 bp, Homo sapiens
ttgtgagaaatgcca

SEQ ID NO: 839107 - DNA, 15 bp, Homo sapiens
tgtgagaaatgccaa

SEQ ID NO: 839108 - DNA, 15 bp, Homo sapiens
gtgagaaatgccaaa

SEQ ID NO: 839109 - DNA, 15 bp, Homo sapiens
tgagaaatgccaaat

SEQ ID NO: 839110 - DNA, 15 bp, Homo sapiens
gagaaatgccaaatt

SEQ ID NO: 839111 - DNA, 15 bp, Homo sapiens
agaaatgccaaattc

SEQ ID NO: 839112 - DNA, 15 bp, Homo sapiens
gaaatgccaaattct

SEQ ID NO: 839113 - DNA, 15 bp, Homo sapiens
aaatgccaaattctc

SEQ ID NO: 839114 - DNA, 15 bp, Homo sapiens
aatgccaaattctcc

SEQ ID NO: 839115 - DNA, 15 bp, Homo sapiens
atgccaaattctcca

SEQ ID NO: 839116 - DNA, 15 bp, Homo sapiens
tgccaaattctccag

SEQ ID NO: 839117 - DNA, 15 bp, Homo sapiens
gccaaattctccagc

SEQ ID NO: 839118 - DNA, 15 bp, Homo sapiens
ccaaattctccagcc

SEQ ID NO: 839119 - DNA, 15 bp, Homo sapiens
caaattctccagcct

SEQ ID NO: 839120 - DNA, 15 bp, Homo sapiens
aaattctccagcctt

SEQ ID NO: 839121 - DNA, 15 bp, Homo sapiens
aattctccagcctta

SEQ ID NO: 839122 - DNA, 15 bp, Homo sapiens
attctccagccttac

SEQ ID NO: 839123 - DNA, 15 bp, Homo sapiens
ttctccagccttacc

SEQ ID NO: 839124 - DNA, 15 bp, Homo sapiens
tctccagccttaccc

SEQ ID NO: 839125 - DNA, 15 bp, Homo sapiens
ctccagccttacccc

SEQ ID NO: 839126 - DNA, 15 bp, Homo sapiens
tccagccttacccca

SEQ ID NO: 839127 - DNA, 15 bp, Homo sapiens
ccagccttaccccag

SEQ ID NO: 839128 - DNA, 15 bp, Homo sapiens
cagccttaccccaga

SEQ ID NO: 839129 - DNA, 15 bp, Homo sapiens
agccttaccccagat

SEQ ID NO: 839130 - DNA, 15 bp, Homo sapiens
gccttaccccagatc

SEQ ID NO: 839131 - DNA, 15 bp, Homo sapiens
ccttaccccagatct

SEQ ID NO: 839132 - DNA, 15 bp, Homo sapiens
cttaccccagatcta

SEQ ID NO: 839133 - DNA, 15 bp, Homo sapiens
ttaccccagatctac

SEQ ID NO: 839134 - DNA, 15 bp, Homo sapiens
taccccagatctact

SEQ ID NO: 839135 - DNA, 15 bp, Homo sapiens
accccagatctactg

SEQ ID NO: 839136 - DNA, 15 bp, Homo sapiens
ccccagatctactga

SEQ ID NO: 839137 - DNA, 15 bp, Homo sapiens
cccagatctactgaa

SEQ ID NO: 839138 - DNA, 15 bp, Homo sapiens
ccagatctactgaat

SEQ ID NO: 839139 - DNA, 15 bp, Homo sapiens
cagatctactgaatc

SEQ ID NO: 839140 - DNA, 15 bp, Homo sapiens
agatctactgaatca

SEQ ID NO: 839141 - DNA, 15 bp, Homo sapiens
gatctactgaatcag

SEQ ID NO: 839142 - DNA, 15 bp, Homo sapiens
atctactgaatcaga

SEQ ID NO: 839143 - DNA, 15 bp, Homo sapiens
tctactgaatcagaa

SEQ ID NO: 839144 - DNA, 15 bp, Homo sapiens
ctactgaatcagaaa

SEQ ID NO: 839145 - DNA, 15 bp, Homo sapiens
tactgaatcagaaat

SEQ ID NO: 839146 - DNA, 15 bp, Homo sapiens
actgaatcagaaatg

SEQ ID NO: 839147 - DNA, 15 bp, Homo sapiens
ctgaatcagaaatgc

SEQ ID NO: 839148 - DNA, 15 bp, Homo sapiens
tgaatcagaaatgct

SEQ ID NO: 839149 - DNA, 15 bp, Homo sapiens
gaatcagaaatgctg

SEQ ID NO: 839150 - DNA, 15 bp, Homo sapiens
aatcagaaatgctgg

SEQ ID NO: 839151 - DNA, 15 bp, Homo sapiens
atcagaaatgctggt

SEQ ID NO: 839152 - DNA, 15 bp, Homo sapiens
tcagaaatgctggtg

SEQ ID NO: 839153 - DNA, 15 bp, Homo sapiens
cagaaatgctggtgg

SEQ ID NO: 839154 - DNA, 15 bp, Homo sapiens
agaaatgctggtggg

SEQ ID NO: 839155 - DNA, 15 bp, Homo sapiens
gaaatgctggtgggg

SEQ ID NO: 839156 - DNA, 15 bp, Homo sapiens
aaatgctggtggggg

SEQ ID NO: 839157 - DNA, 15 bp, Homo sapiens
aatgctggtgggggg

SEQ ID NO: 839158 - DNA, 15 bp, Homo sapiens
atgctggtggggggc

SEQ ID NO: 839159 - DNA, 15 bp, Homo sapiens
tgctggtggggggcc

SEQ ID NO: 839160 - DNA, 15 bp, Homo sapiens
gctggtggggggcca

SEQ ID NO: 839161 - DNA, 15 bp, Homo sapiens
ctggtggggggccag

SEQ ID NO: 839162 - DNA, 15 bp, Homo sapiens
tggtggggggccagc

SEQ ID NO: 839163 - DNA, 15 bp, Homo sapiens
ggtggggggccagca

SEQ ID NO: 839164 - DNA, 15 bp, Homo sapiens
gtggggggccagcaa

SEQ ID NO: 839165 - DNA, 15 bp, Homo sapiens
tggggggccagcaat

SEQ ID NO: 839166 - DNA, 15 bp, Homo sapiens
ggggggccagcaatc

SEQ ID NO: 839167 - DNA, 15 bp, Homo sapiens
gggggccagcaatct

SEQ ID NO: 839168 - DNA, 15 bp, Homo sapiens
ggggccagcaatctg

SEQ ID NO: 839169 - DNA, 15 bp, Homo sapiens
gggccagcaatctgt

SEQ ID NO: 839170 - DNA, 15 bp, Homo sapiens
ggccagcaatctgtg

SEQ ID NO: 839171 - DNA, 15 bp, Homo sapiens
gccagcaatctgtgt

SEQ ID NO: 839172 - DNA, 15 bp, Homo sapiens
ccagcaatctgtgtt

SEQ ID NO: 839173 - DNA, 15 bp, Homo sapiens
cagcaatctgtgttt

SEQ ID NO: 839174 - DNA, 15 bp, Homo sapiens
agcaatctgtgtttt

SEQ ID NO: 839175 - DNA, 15 bp, Homo sapiens
aggaccagcggggac

SEQ ID NO: 839176 - DNA, 15 bp, Homo sapiens
ggaccagcggggact

SEQ ID NO: 839177 - DNA, 15 bp, Homo sapiens
gaccagcggggactt

SEQ ID NO: 839178 - DNA, 15 bp, Homo sapiens
accagcggggacttg

SEQ ID NO: 839179 - DNA, 15 bp, Homo sapiens
ccagcggggacttgt

SEQ ID NO: 839180 - DNA, 15 bp, Homo sapiens
cagcggggacttgta

SEQ ID NO: 839181 - DNA, 15 bp, Homo sapiens
agcggggacttgtaa

SEQ ID NO: 839182 - DNA, 15 bp, Homo sapiens
gcggggacttgtaat

SEQ ID NO: 839183 - DNA, 15 bp, Homo sapiens
cggggacttgtaatt

SEQ ID NO: 839184 - DNA, 15 bp, Homo sapiens
ggggacttgtaattt

SEQ ID NO: 839185 - DNA, 15 bp, Homo sapiens
gggacttgtaatttg

SEQ ID NO: 839186 - DNA, 15 bp, Homo sapiens
ggacttgtaatttgg

SEQ ID NO: 839187 - DNA, 15 bp, Homo sapiens
gacttgtaatttggt

SEQ ID NO: 839188 - DNA, 15 bp, Homo sapiens
acttgtaatttggtg

SEQ ID NO: 839189 - DNA, 15 bp, Homo sapiens
cttgtaatttggtgt

SEQ ID NO: 839190 - DNA, 15 bp, Homo sapiens
ttgtaatttggtgtg

SEQ ID NO: 839191 - DNA, 15 bp, Homo sapiens
tgtaatttggtgtga

SEQ ID NO: 839192 - DNA, 15 bp, Homo sapiens
gtaatttggtgtgat

SEQ ID NO: 839193 - DNA, 15 bp, Homo sapiens
taatttggtgtgatt

SEQ ID NO: 839194 - DNA, 15 bp, Homo sapiens
aatttggtgtgattt

SEQ ID NO: 839195 - DNA, 15 bp, Homo sapiens
atttggtgtgatttt

SEQ ID NO: 839196 - DNA, 15 bp, Homo sapiens
tttggtgtgattttg

SEQ ID NO: 839197 - DNA, 15 bp, Homo sapiens
ttggtgtgattttgg

SEQ ID NO: 839198 - DNA, 15 bp, Homo sapiens
tggtgtgattttggt

SEQ ID NO: 839199 - DNA, 15 bp, Homo sapiens
ggtgtgattttggtg

SEQ ID NO: 839200 - DNA, 15 bp, Homo sapiens
gtgtgattttggtgc

SEQ ID NO: 839201 - DNA, 15 bp, Homo sapiens
tgtgattttggtgca

SEQ ID NO: 839202 - DNA, 15 bp, Homo sapiens
gtgattttggtgcag

SEQ ID NO: 839203 - DNA, 15 bp, Homo sapiens
tgattttggtgcaga

SEQ ID NO: 839204 - DNA, 15 bp, Homo sapiens
gattttggtgcagaa

SEQ ID NO: 839205 - DNA, 15 bp, Homo sapiens
attttggtgcagaaa

SEQ ID NO: 839206 - DNA, 15 bp, Homo sapiens
ttttggtgcagaaaa

SEQ ID NO: 839207 - DNA, 15 bp, Homo sapiens
tttggtgcagaaaac

SEQ ID NO: 839208 - DNA, 15 bp, Homo sapiens
ttggtgcagaaaact

SEQ ID NO: 839209 - DNA, 15 bp, Homo sapiens
tggtgcagaaaactt

SEQ ID NO: 839210 - DNA, 15 bp, Homo sapiens
ggtgcagaaaacttc

SEQ ID NO: 839211 - DNA, 15 bp, Homo sapiens
gtgcagaaaacttct

SEQ ID NO: 839212 - DNA, 15 bp, Homo sapiens
tgcagaaaacttctt

SEQ ID NO: 839213 - DNA, 15 bp, Homo sapiens
gcagaaaacttcttt

SEQ ID NO: 839214 - DNA, 15 bp, Homo sapiens
cagaaaacttctttc

SEQ ID NO: 839215 - DNA, 15 bp, Homo sapiens
agaaaacttctttct

SEQ ID NO: 839216 - DNA, 15 bp, Homo sapiens
gaaaacttctttctt

SEQ ID NO: 839217 - DNA, 15 bp, Homo sapiens
aaaacttctttcttt

SEQ ID NO: 839218 - DNA, 15 bp, Homo sapiens
aaacttctttctttg

SEQ ID NO: 839219 - DNA, 15 bp, Homo sapiens
aacttctttctttgc

SEQ ID NO: 839220 - DNA, 15 bp, Homo sapiens
acttctttctttgct

SEQ ID NO: 839221 - DNA, 15 bp, Homo sapiens
cttctttctttgcta

SEQ ID NO: 839222 - DNA, 15 bp, Homo sapiens
ttctttctttgctac

SEQ ID NO: 839223 - DNA, 15 bp, Homo sapiens
tctttctttgctact

SEQ ID NO: 839224 - DNA, 15 bp, Homo sapiens
ctttctttgctactg

SEQ ID NO: 839225 - DNA, 15 bp, Homo sapiens
tttctttgctactgt

SEQ ID NO: 839226 - DNA, 15 bp, Homo sapiens
ttctttgctactgta

SEQ ID NO: 839227 - DNA, 15 bp, Homo sapiens
tctttgctactgtat

SEQ ID NO: 839228 - DNA, 15 bp, Homo sapiens
ctttgctactgtata

SEQ ID NO: 839229 - DNA, 15 bp, Homo sapiens
tttgctactgtatat

SEQ ID NO: 839230 - DNA, 15 bp, Homo sapiens
ttgctactgtatatg

SEQ ID NO: 839231 - DNA, 15 bp, Homo sapiens
tgctactgtatatga

SEQ ID NO: 839232 - DNA, 15 bp, Homo sapiens
gctactgtatatgat

SEQ ID NO: 839233 - DNA, 15 bp, Homo sapiens
ctactgtatatgatt

SEQ ID NO: 839234 - DNA, 15 bp, Homo sapiens
tactgtatatgattc

SEQ ID NO: 839235 - DNA, 15 bp, Homo sapiens
actgtatatgattcc

SEQ ID NO: 839236 - DNA, 15 bp, Homo sapiens
ctgtatatgattccc

SEQ ID NO: 839237 - DNA, 15 bp, Homo sapiens
tgtatatgattccct

SEQ ID NO: 839238 - DNA, 15 bp, Homo sapiens
gtatatgattccctt

SEQ ID NO: 839239 - DNA, 15 bp, Homo sapiens
tatatgattcccttg

SEQ ID NO: 839240 - DNA, 15 bp, Homo sapiens
atatgattcccttgc

SEQ ID NO: 839241 - DNA, 15 bp, Homo sapiens
tatgattcccttgcc

SEQ ID NO: 839242 - DNA, 15 bp, Homo sapiens
atgattcccttgcca

SEQ ID NO: 839243 - DNA, 15 bp, Homo sapiens
tgattcccttgccaa

SEQ ID NO: 839244 - DNA, 15 bp, Homo sapiens
gattcccttgccaaa

SEQ ID NO: 839245 - DNA, 15 bp, Homo sapiens
attcccttgccaaat

SEQ ID NO: 839246 - DNA, 15 bp, Homo sapiens
ttcccttgccaaatt

SEQ ID NO: 839247 - DNA, 15 bp, Homo sapiens
tcccttgccaaatta

SEQ ID NO: 839248 - DNA, 15 bp, Homo sapiens
cccttgccaaattaa

SEQ ID NO: 839249 - DNA, 15 bp, Homo sapiens
ccttgccaaattaaa

SEQ ID NO: 839250 - DNA, 15 bp, Homo sapiens
cttgccaaattaaag

SEQ ID NO: 839251 - DNA, 15 bp, Homo sapiens
ttgccaaattaaaga

SEQ ID NO: 839252 - DNA, 15 bp, Homo sapiens
tgccaaattaaagag

SEQ ID NO: 839253 - DNA, 15 bp, Homo sapiens
gccaaattaaagagc

SEQ ID NO: 839254 - DNA, 15 bp, Homo sapiens
ccaaattaaagagct

SEQ ID NO: 839255 - DNA, 15 bp, Homo sapiens
caaattaaagagctt

SEQ ID NO: 839256 - DNA, 15 bp, Homo sapiens
aaattaaagagcttt

SEQ ID NO: 839257 - DNA, 15 bp, Homo sapiens
aattaaagagctttg

SEQ ID NO: 839258 - DNA, 15 bp, Homo sapiens
attaaagagctttga

SEQ ID NO: 839259 - DNA, 15 bp, Homo sapiens
ttaaagagctttgat

SEQ ID NO: 839260 - DNA, 15 bp, Homo sapiens
taaagagctttgatt

SEQ ID NO: 839261 - DNA, 15 bp, Homo sapiens
aaagagctttgattc

SEQ ID NO: 839262 - DNA, 15 bp, Homo sapiens
aagagctttgattca

SEQ ID NO: 839263 - DNA, 15 bp, Homo sapiens
agagctttgattcaa

SEQ ID NO: 839264 - DNA, 15 bp, Homo sapiens
gagctttgattcaat

SEQ ID NO: 839265 - DNA, 15 bp, Homo sapiens
agctttgattcaatg

SEQ ID NO: 839266 - DNA, 15 bp, Homo sapiens
gctttgattcaatgt

SEQ ID NO: 839267 - DNA, 15 bp, Homo sapiens
ctttgattcaatgta

SEQ ID NO: 839268 - DNA, 15 bp, Homo sapiens
tttgattcaatgtag

SEQ ID NO: 839269 - DNA, 15 bp, Homo sapiens
ttgattcaatgtaga

SEQ ID NO: 839270 - DNA, 15 bp, Homo sapiens
tgattcaatgtagaa

SEQ ID NO: 839271 - DNA, 15 bp, Homo sapiens
gattcaatgtagaaa

SEQ ID NO: 839272 - DNA, 15 bp, Homo sapiens
attcaatgtagaaac

SEQ ID NO: 839273 - DNA, 15 bp, Homo sapiens
ttcaatgtagaaaca

SEQ ID NO: 839274 - DNA, 15 bp, Homo sapiens
tcaatgtagaaacat

SEQ ID NO: 839275 - DNA, 15 bp, Homo sapiens
caatgtagaaacatg

SEQ ID NO: 839276 - DNA, 15 bp, Homo sapiens
aatgtagaaacatga

SEQ ID NO: 839277 - DNA, 15 bp, Homo sapiens
atgtagaaacatgaa

SEQ ID NO: 839278 - DNA, 15 bp, Homo sapiens
tgtagaaacatgaaa

SEQ ID NO: 839279 - DNA, 15 bp, Homo sapiens
gtagaaacatgaaat

SEQ ID NO: 839280 - DNA, 15 bp, Homo sapiens
tagaaacatgaaatg

SEQ ID NO: 839281 - DNA, 15 bp, Homo sapiens
agaaacatgaaatgc

SEQ ID NO: 839282 - DNA, 15 bp, Homo sapiens
gaaacatgaaatgca

SEQ ID NO: 839283 - DNA, 15 bp, Homo sapiens
aaacatgaaatgcaa

SEQ ID NO: 839284 - DNA, 15 bp, Homo sapiens
aacatgaaatgcaaa

SEQ ID NO: 839285 - DNA, 15 bp, Homo sapiens
acatgaaatgcaaag

SEQ ID NO: 839286 - DNA, 15 bp, Homo sapiens
catgaaatgcaaagc

SEQ ID NO: 839287 - DNA, 15 bp, Homo sapiens
atgaaatgcaaagct

SEQ ID NO: 839288 - DNA, 15 bp, Homo sapiens
tgaaatgcaaagctc

SEQ ID NO: 839289 - DNA, 15 bp, Homo sapiens
gaaatgcaaagctct

SEQ ID NO: 839290 - DNA, 15 bp, Homo sapiens
aaatgcaaagctctt

SEQ ID NO: 839291 - DNA, 15 bp, Homo sapiens
aatgcaaagctcttt

SEQ ID NO: 839292 - DNA, 15 bp, Homo sapiens
atgcaaagctcttta

SEQ ID NO: 839293 - DNA, 15 bp, Homo sapiens
tgcaaagctctttaa

SEQ ID NO: 839294 - DNA, 15 bp, Homo sapiens
gcaaagctctttaat

SEQ ID NO: 839295 - DNA, 15 bp, Homo sapiens
caaagctctttaatc

SEQ ID NO: 839296 - DNA, 15 bp, Homo sapiens
aaagctctttaatcc

SEQ ID NO: 839297 - DNA, 15 bp, Homo sapiens
aagctctttaatcct

SEQ ID NO: 839298 - DNA, 15 bp, Homo sapiens
agctctttaatcctt

SEQ ID NO: 839299 - DNA, 15 bp, Homo sapiens
gctctttaatccttg

SEQ ID NO: 839300 - DNA, 15 bp, Homo sapiens
ctctttaatccttga

SEQ ID NO: 839301 - DNA, 15 bp, Homo sapiens
tctttaatccttgac

SEQ ID NO: 839302 - DNA, 15 bp, Homo sapiens
ctttaatccttgaca

SEQ ID NO: 839303 - DNA, 15 bp, Homo sapiens
tttaatccttgacaa

SEQ ID NO: 839304 - DNA, 15 bp, Homo sapiens
ttaatccttgacaag

SEQ ID NO: 839305 - DNA, 15 bp, Homo sapiens
taatccttgacaagg

SEQ ID NO: 839306 - DNA, 15 bp, Homo sapiens
aatccttgacaagga

SEQ ID NO: 839307 - DNA, 15 bp, Homo sapiens
atccttgacaaggat

SEQ ID NO: 839308 - DNA, 15 bp, Homo sapiens
tccttgacaaggatt

SEQ ID NO: 839309 - DNA, 15 bp, Homo sapiens
ccttgacaaggattg

SEQ ID NO: 839310 - DNA, 15 bp, Homo sapiens
cttgacaaggattgt

SEQ ID NO: 839311 - DNA, 15 bp, Homo sapiens
ttgacaaggattgtg

SEQ ID NO: 839312 - DNA, 15 bp, Homo sapiens
tgacaaggattgtgc

SEQ ID NO: 839313 - DNA, 15 bp, Homo sapiens
gacaaggattgtgca

SEQ ID NO: 839314 - DNA, 15 bp, Homo sapiens
acaaggattgtgcag

SEQ ID NO: 839315 - DNA, 15 bp, Homo sapiens
caaggattgtgcaga

SEQ ID NO: 839316 - DNA, 15 bp, Homo sapiens
aaggattgtgcagag

SEQ ID NO: 839317 - DNA, 15 bp, Homo sapiens
aggattgtgcagagg

SEQ ID NO: 839318 - DNA, 15 bp, Homo sapiens
ggattgtgcagaggc

SEQ ID NO: 839319 - DNA, 15 bp, Homo sapiens
gattgtgcagaggct

SEQ ID NO: 839320 - DNA, 15 bp, Homo sapiens
attgtgcagaggctg

SEQ ID NO: 839321 - DNA, 15 bp, Homo sapiens
ttgtgcagaggctgg

SEQ ID NO: 839322 - DNA, 15 bp, Homo sapiens
tgtgcagaggctggt

SEQ ID NO: 839323 - DNA, 15 bp, Homo sapiens
gtgcagaggctggtt

SEQ ID NO: 839324 - DNA, 15 bp, Homo sapiens
tgcagaggctggtta

SEQ ID NO: 839325 - DNA, 15 bp, Homo sapiens
gcagaggctggttag

SEQ ID NO: 839326 - DNA, 15 bp, Homo sapiens
cagaggctggttaga

SEQ ID NO: 839327 - DNA, 15 bp, Homo sapiens
agaggctggttagat

SEQ ID NO: 839328 - DNA, 15 bp, Homo sapiens
gaggctggttagatt

SEQ ID NO: 839329 - DNA, 15 bp, Homo sapiens
aggctggttagattt

SEQ ID NO: 839330 - DNA, 15 bp, Homo sapiens
ggctggttagatttg

SEQ ID NO: 839331 - DNA, 15 bp, Homo sapiens
gctggttagatttgg

SEQ ID NO: 839332 - DNA, 15 bp, Homo sapiens
ctggttagatttggt

SEQ ID NO: 839333 - DNA, 15 bp, Homo sapiens
tggttagatttggtt

SEQ ID NO: 839334 - DNA, 15 bp, Homo sapiens
ggttagatttggtta

SEQ ID NO: 839335 - DNA, 15 bp, Homo sapiens
gttagatttggttat

SEQ ID NO: 839336 - DNA, 15 bp, Homo sapiens
ttagatttggttata

SEQ ID NO: 839337 - DNA, 15 bp, Homo sapiens
tagatttggttataa

SEQ ID NO: 839338 - DNA, 15 bp, Homo sapiens
agatttggttataaa

SEQ ID NO: 839339 - DNA, 15 bp, Homo sapiens
gatttggttataaag

SEQ ID NO: 839340 - DNA, 15 bp, Homo sapiens
atttggttataaagc

SEQ ID NO: 839341 - DNA, 15 bp, Homo sapiens
tttggttataaagct

SEQ ID NO: 839342 - DNA, 15 bp, Homo sapiens
ttggttataaagctc

SEQ ID NO: 839343 - DNA, 15 bp, Homo sapiens
tggttataaagctct

SEQ ID NO: 839344 - DNA, 15 bp, Homo sapiens
ggttataaagctctt

SEQ ID NO: 839345 - DNA, 15 bp, Homo sapiens
gttataaagctcttc

SEQ ID NO: 839346 - DNA, 15 bp, Homo sapiens
ttataaagctcttca

SEQ ID NO: 839347 - DNA, 15 bp, Homo sapiens
tataaagctcttcaa

SEQ ID NO: 839348 - DNA, 15 bp, Homo sapiens
ataaagctcttcaac

SEQ ID NO: 839349 - DNA, 15 bp, Homo sapiens
taaagctcttcaact

SEQ ID NO: 839350 - DNA, 15 bp, Homo sapiens
aaagctcttcaactg

SEQ ID NO: 839351 - DNA, 15 bp, Homo sapiens
aagctcttcaactgc

SEQ ID NO: 839352 - DNA, 15 bp, Homo sapiens
agctcttcaactgcc

SEQ ID NO: 839353 - DNA, 15 bp, Homo sapiens
gctcttcaactgcca

SEQ ID NO: 839354 - DNA, 15 bp, Homo sapiens
ctcttcaactgccag

SEQ ID NO: 839355 - DNA, 15 bp, Homo sapiens
tcttcaactgccaga

SEQ ID NO: 839356 - DNA, 15 bp, Homo sapiens
cttcaactgccagaa

SEQ ID NO: 839357 - DNA, 15 bp, Homo sapiens
ttcaactgccagaaa

SEQ ID NO: 839358 - DNA, 15 bp, Homo sapiens
tcaactgccagaaaa

SEQ ID NO: 839359 - DNA, 15 bp, Homo sapiens
caactgccagaaaat

SEQ ID NO: 839360 - DNA, 15 bp, Homo sapiens
aactgccagaaaatc

SEQ ID NO: 839361 - DNA, 15 bp, Homo sapiens
actgccagaaaatcc

SEQ ID NO: 839362 - DNA, 15 bp, Homo sapiens
ctgccagaaaatcca

SEQ ID NO: 839363 - DNA, 15 bp, Homo sapiens
tgccagaaaatccag

SEQ ID NO: 839364 - DNA, 15 bp, Homo sapiens
gccagaaaatccagt

SEQ ID NO: 839365 - DNA, 15 bp, Homo sapiens
ccagaaaatccagtc

SEQ ID NO: 839366 - DNA, 15 bp, Homo sapiens
cagaaaatccagtca

SEQ ID NO: 839367 - DNA, 15 bp, Homo sapiens
agaaaatccagtcag

SEQ ID NO: 839368 - DNA, 15 bp, Homo sapiens
gaaaatccagtcagt

SEQ ID NO: 839369 - DNA, 15 bp, Homo sapiens
aaaatccagtcagtg

SEQ ID NO: 839370 - DNA, 15 bp, Homo sapiens
aaatccagtcagtgt

SEQ ID NO: 839371 - DNA, 15 bp, Homo sapiens
aatccagtcagtgtg

SEQ ID NO: 839372 - DNA, 15 bp, Homo sapiens
atccagtcagtgtgt

SEQ ID NO: 839373 - DNA, 15 bp, Homo sapiens
tccagtcagtgtgtt

SEQ ID NO: 839374 - DNA, 15 bp, Homo sapiens
ccagtcagtgtgttg

SEQ ID NO: 839375 - DNA, 15 bp, Homo sapiens
cagtcagtgtgttgt

SEQ ID NO: 839376 - DNA, 15 bp, Homo sapiens
agtcagtgtgttgtt

SEQ ID NO: 839377 - DNA, 15 bp, Homo sapiens
gtcagtgtgttgttt

SEQ ID NO: 839378 - DNA, 15 bp, Homo sapiens
tcagtgtgttgttta

SEQ ID NO: 839379 - DNA, 15 bp, Homo sapiens
cagtgtgttgtttaa

SEQ ID NO: 839380 - DNA, 15 bp, Homo sapiens
agtgtgttgtttaag

SEQ ID NO: 839381 - DNA, 15 bp, Homo sapiens
gtgtgttgtttaagt

SEQ ID NO: 839382 - DNA, 15 bp, Homo sapiens
tgtgttgtttaagtt

SEQ ID NO: 839383 - DNA, 15 bp, Homo sapiens
gtgttgtttaagttc

SEQ ID NO: 839384 - DNA, 15 bp, Homo sapiens
tgttgtttaagttca

SEQ ID NO: 839385 - DNA, 15 bp, Homo sapiens
gttgtttaagttcac

SEQ ID NO: 839386 - DNA, 15 bp, Homo sapiens
ttgtttaagttcaca

SEQ ID NO: 839387 - DNA, 15 bp, Homo sapiens
tgtttaagttcacaa

SEQ ID NO: 839388 - DNA, 15 bp, Homo sapiens
gtttaagttcacaaa

SEQ ID NO: 839389 - DNA, 15 bp, Homo sapiens
tttaagttcacaaat

SEQ ID NO: 839390 - DNA, 15 bp, Homo sapiens
ttaagttcacaaatc

SEQ ID NO: 839391 - DNA, 15 bp, Homo sapiens
taagttcacaaatca

SEQ ID NO: 839392 - DNA, 15 bp, Homo sapiens
aagttcacaaatcaa

SEQ ID NO: 839393 - DNA, 15 bp, Homo sapiens
agttcacaaatcaaa

SEQ ID NO: 839394 - DNA, 15 bp, Homo sapiens
gttcacaaatcaaaa

SEQ ID NO: 839395 - DNA, 15 bp, Homo sapiens
ttcacaaatcaaaat

SEQ ID NO: 839396 - DNA, 15 bp, Homo sapiens
tcacaaatcaaaata

SEQ ID NO: 839397 - DNA, 15 bp, Homo sapiens
cacaaatcaaaataa

SEQ ID NO: 839398 - DNA, 15 bp, Homo sapiens
acaaatcaaaataaa

SEQ ID NO: 839399 - DNA, 15 bp, Homo sapiens
caaatcaaaataaac

SEQ ID NO: 839400 - DNA, 15 bp, Homo sapiens
aaatcaaaataaaca

SEQ ID NO: 839401 - DNA, 15 bp, Homo sapiens
aatcaaaataaacac

SEQ ID NO: 839402 - DNA, 15 bp, Homo sapiens
atcaaaataaacacc

SEQ ID NO: 839403 - DNA, 15 bp, Homo sapiens
tcaaaataaacaccc

SEQ ID NO: 839404 - DNA, 15 bp, Homo sapiens
caaaataaacaccca

SEQ ID NO: 839405 - DNA, 15 bp, Homo sapiens
aaaataaacacccat

SEQ ID NO: 839406 - DNA, 15 bp, Homo sapiens
aaataaacacccatg

SEQ ID NO: 839407 - DNA, 15 bp, Homo sapiens
aataaacacccatga

SEQ ID NO: 839408 - DNA, 15 bp, Homo sapiens
ataaacacccatgaa

SEQ ID NO: 839409 - DNA, 15 bp, Homo sapiens
taaacacccatgaat

SEQ ID NO: 839410 - DNA, 15 bp, Homo sapiens
aaacacccatgaatt

SEQ ID NO: 839411 - DNA, 15 bp, Homo sapiens
aacacccatgaattg

SEQ ID NO: 839412 - DNA, 15 bp, Homo sapiens
acacccatgaattga

SEQ ID NO: 839413 - DNA, 15 bp, Homo sapiens
cacccatgaattgaa

SEQ ID NO: 839414 - DNA, 15 bp, Homo sapiens
acccatgaattgaaa

SEQ ID NO: 839415 - DNA, 15 bp, Homo sapiens
cccatgaattgaaat

SEQ ID NO: 839416 - DNA, 15 bp, Homo sapiens
ccatgaattgaaatg

SEQ ID NO: 839417 - DNA, 15 bp, Homo sapiens
catgaattgaaatga

SEQ ID NO: 839418 - DNA, 15 bp, Homo sapiens
atgaattgaaatgaa

SEQ ID NO: 839419 - DNA, 15 bp, Homo sapiens
tgaattgaaatgaat

SEQ ID NO: 839420 - DNA, 15 bp, Homo sapiens
gaattgaaatgaatt

SEQ ID NO: 839421 - DNA, 15 bp, Homo sapiens
aattgaaatgaattt

SEQ ID NO: 839422 - DNA, 15 bp, Homo sapiens
attgaaatgaatttg

SEQ ID NO: 839423 - DNA, 15 bp, Homo sapiens
ttgaaatgaatttgc

SEQ ID NO: 839424 - DNA, 15 bp, Homo sapiens
tgaaatgaatttgct

SEQ ID NO: 839425 - DNA, 15 bp, Homo sapiens
gaaatgaatttgcta

SEQ ID NO: 839426 - DNA, 15 bp, Homo sapiens
aaatgaatttgctaa

SEQ ID NO: 839427 - DNA, 15 bp, Homo sapiens
aatgaatttgctaaa

SEQ ID NO: 839428 - DNA, 15 bp, Homo sapiens
atgaatttgctaaac

SEQ ID NO: 839429 - DNA, 15 bp, Homo sapiens
tgaatttgctaaacc

SEQ ID NO: 839430 - DNA, 15 bp, Homo sapiens
gaatttgctaaaccc

SEQ ID NO: 839431 - DNA, 15 bp, Homo sapiens
aatttgctaaacccc

SEQ ID NO: 839432 - DNA, 15 bp, Homo sapiens
atttgctaaacccca

SEQ ID NO: 839433 - DNA, 15 bp, Homo sapiens
tttgctaaaccccag

SEQ ID NO: 839434 - DNA, 15 bp, Homo sapiens
ttgctaaaccccagt

SEQ ID NO: 839435 - DNA, 15 bp, Homo sapiens
tgctaaaccccagta

SEQ ID NO: 839436 - DNA, 15 bp, Homo sapiens
gctaaaccccagtat

SEQ ID NO: 839437 - DNA, 15 bp, Homo sapiens
ctaaaccccagtatc

SEQ ID NO: 839438 - DNA, 15 bp, Homo sapiens
taaaccccagtatcc

SEQ ID NO: 839439 - DNA, 15 bp, Homo sapiens
aaaccccagtatcct

SEQ ID NO: 839440 - DNA, 15 bp, Homo sapiens
aaccccagtatccta

SEQ ID NO: 839441 - DNA, 15 bp, Homo sapiens
accccagtatcctat

SEQ ID NO: 839442 - DNA, 15 bp, Homo sapiens
ccccagtatcctatt

SEQ ID NO: 839443 - DNA, 15 bp, Homo sapiens
cccagtatcctattt

SEQ ID NO: 839444 - DNA, 15 bp, Homo sapiens
ccagtatcctatttg

SEQ ID NO: 839445 - DNA, 15 bp, Homo sapiens
cagtatcctatttgg

SEQ ID NO: 839446 - DNA, 15 bp, Homo sapiens
agtatcctatttggg

SEQ ID NO: 839447 - DNA, 15 bp, Homo sapiens
gtatcctatttgggt

SEQ ID NO: 839448 - DNA, 15 bp, Homo sapiens
tatcctatttgggtc

SEQ ID NO: 839449 - DNA, 15 bp, Homo sapiens
atcctatttgggtca

SEQ ID NO: 839450 - DNA, 15 bp, Homo sapiens
tcctatttgggtcaa

SEQ ID NO: 839451 - DNA, 15 bp, Homo sapiens
cctatttgggtcaac

SEQ ID NO: 839452 - DNA, 15 bp, Homo sapiens
ctatttgggtcaacg

SEQ ID NO: 839453 - DNA, 15 bp, Homo sapiens
tatttgggtcaacgt

SEQ ID NO: 839454 - DNA, 15 bp, Homo sapiens
atttgggtcaacgtc

SEQ ID NO: 839455 - DNA, 15 bp, Homo sapiens
tttgggtcaacgtca

SEQ ID NO: 839456 - DNA, 15 bp, Homo sapiens
ttgggtcaacgtcac

SEQ ID NO: 839457 - DNA, 15 bp, Homo sapiens
tgggtcaacgtcact

SEQ ID NO: 839458 - DNA, 15 bp, Homo sapiens
gggtcaacgtcactg

SEQ ID NO: 839459 - DNA, 15 bp, Homo sapiens
ggtcaacgtcactgt

SEQ ID NO: 839460 - DNA, 15 bp, Homo sapiens
gtcaacgtcactgtg

SEQ ID NO: 839461 - DNA, 15 bp, Homo sapiens
tcaacgtcactgtgt

SEQ ID NO: 839462 - DNA, 15 bp, Homo sapiens
caacgtcactgtgta

SEQ ID NO: 839463 - DNA, 15 bp, Homo sapiens
aacgtcactgtgtac

SEQ ID NO: 839464 - DNA, 15 bp, Homo sapiens
acgtcactgtgtacc

SEQ ID NO: 839465 - DNA, 15 bp, Homo sapiens
cgtcactgtgtaccc

SEQ ID NO: 839466 - DNA, 15 bp, Homo sapiens
gtcactgtgtacccg

SEQ ID NO: 839467 - DNA, 15 bp, Homo sapiens
tcactgtgtacccgc

SEQ ID NO: 839468 - DNA, 15 bp, Homo sapiens
cactgtgtacccgct

SEQ ID NO: 839469 - DNA, 15 bp, Homo sapiens
actgtgtacccgctt

SEQ ID NO: 839470 - DNA, 15 bp, Homo sapiens
ctgtgtacccgcttt

SEQ ID NO: 839471 - DNA, 15 bp, Homo sapiens
tgtgtacccgctttt

SEQ ID NO: 839472 - DNA, 15 bp, Homo sapiens
gtgtacccgcttttc

SEQ ID NO: 839473 - DNA, 15 bp, Homo sapiens
tgtacccgcttttca

SEQ ID NO: 839474 - DNA, 15 bp, Homo sapiens
gtacccgcttttcac

SEQ ID NO: 839475 - DNA, 15 bp, Homo sapiens
tacccgcttttcacc

SEQ ID NO: 839476 - DNA, 15 bp, Homo sapiens
acccgcttttcaccc

SEQ ID NO: 839477 - DNA, 15 bp, Homo sapiens
cccgcttttcaccct

SEQ ID NO: 839478 - DNA, 15 bp, Homo sapiens
ccgcttttcacccta

SEQ ID NO: 839479 - DNA, 15 bp, Homo sapiens
cgcttttcaccctac

SEQ ID NO: 839480 - DNA, 15 bp, Homo sapiens
gcttttcaccctact

SEQ ID NO: 839481 - DNA, 15 bp, Homo sapiens
cttttcaccctactt

SEQ ID NO: 839482 - DNA, 15 bp, Homo sapiens
ttttcaccctactta

SEQ ID NO: 839483 - DNA, 15 bp, Homo sapiens
tttcaccctacttag

SEQ ID NO: 839484 - DNA, 15 bp, Homo sapiens
ttcaccctacttaga

SEQ ID NO: 839485 - DNA, 15 bp, Homo sapiens
tcaccctacttagat

SEQ ID NO: 839486 - DNA, 15 bp, Homo sapiens
caccctacttagatc

SEQ ID NO: 839487 - DNA, 15 bp, Homo sapiens
accctacttagatcc

SEQ ID NO: 839488 - DNA, 15 bp, Homo sapiens
ccctacttagatccc

SEQ ID NO: 839489 - DNA, 15 bp, Homo sapiens
cctacttagatccca

SEQ ID NO: 839490 - DNA, 15 bp, Homo sapiens
ctacttagatcccat

SEQ ID NO: 839491 - DNA, 15 bp, Homo sapiens
tacttagatcccatt

SEQ ID NO: 839492 - DNA, 15 bp, Homo sapiens
acttagatcccatta

SEQ ID NO: 839493 - DNA, 15 bp, Homo sapiens
cttagatcccattag

SEQ ID NO: 839494 - DNA, 15 bp, Homo sapiens
ttagatcccattaga

SEQ ID NO: 839495 - DNA, 15 bp, Homo sapiens
tagatcccattagat

SEQ ID NO: 839496 - DNA, 15 bp, Homo sapiens
agatcccattagatc

SEQ ID NO: 839497 - DNA, 15 bp, Homo sapiens
gatcccattagatca

SEQ ID NO: 839498 - DNA, 15 bp, Homo sapiens
atcccattagatcag

SEQ ID NO: 839499 - DNA, 15 bp, Homo sapiens
tcccattagatcaga

SEQ ID NO: 839500 - DNA, 15 bp, Homo sapiens
cccattagatcagag

SEQ ID NO: 839501 - DNA, 15 bp, Homo sapiens
ccattagatcagagg

SEQ ID NO: 839502 - DNA, 15 bp, Homo sapiens
cattagatcagaggc

SEQ ID NO: 839503 - DNA, 15 bp, Homo sapiens
attagatcagaggct

SEQ ID NO: 839504 - DNA, 15 bp, Homo sapiens
ttagatcagaggctt

SEQ ID NO: 839505 - DNA, 15 bp, Homo sapiens
tagatcagaggcttc

SEQ ID NO: 839506 - DNA, 15 bp, Homo sapiens
agatcagaggcttcc

SEQ ID NO: 839507 - DNA, 15 bp, Homo sapiens
gatcagaggcttcca

SEQ ID NO: 839508 - DNA, 15 bp, Homo sapiens
atcagaggcttccat

SEQ ID NO: 839509 - DNA, 15 bp, Homo sapiens
tcagaggcttccatg

SEQ ID NO: 839510 - DNA, 15 bp, Homo sapiens
cagaggcttccatgc

SEQ ID NO: 839511 - DNA, 15 bp, Homo sapiens
agaggcttccatgca

SEQ ID NO: 839512 - DNA, 15 bp, Homo sapiens
gaggcttccatgcag

SEQ ID NO: 839513 - DNA, 15 bp, Homo sapiens
aggcttccatgcagg

SEQ ID NO: 839514 - DNA, 15 bp, Homo sapiens
ggcttccatgcagga

SEQ ID NO: 839515 - DNA, 15 bp, Homo sapiens
gcttccatgcaggat

SEQ ID NO: 839516 - DNA, 15 bp, Homo sapiens
cttccatgcaggatg

SEQ ID NO: 839517 - DNA, 15 bp, Homo sapiens
ttccatgcaggatgc

SEQ ID NO: 839518 - DNA, 15 bp, Homo sapiens
tccatgcaggatgct

SEQ ID NO: 839519 - DNA, 15 bp, Homo sapiens
ccatgcaggatgctg

SEQ ID NO: 839520 - DNA, 15 bp, Homo sapiens
catgcaggatgctgc

SEQ ID NO: 839521 - DNA, 15 bp, Homo sapiens
atgcaggatgctgcc

SEQ ID NO: 839522 - DNA, 15 bp, Homo sapiens
tgcaggatgctgcct

SEQ ID NO: 839523 - DNA, 15 bp, Homo sapiens
gcaggatgctgcctc

SEQ ID NO: 839524 - DNA, 15 bp, Homo sapiens
caggatgctgcctcc

SEQ ID NO: 839525 - DNA, 15 bp, Homo sapiens
aggatgctgcctccc

SEQ ID NO: 839526 - DNA, 15 bp, Homo sapiens
ggatgctgcctcccg

SEQ ID NO: 839527 - DNA, 15 bp, Homo sapiens
gatgctgcctcccgc

SEQ ID NO: 839528 - DNA, 15 bp, Homo sapiens
atgctgcctcccgca

SEQ ID NO: 839529 - DNA, 15 bp, Homo sapiens
tgctgcctcccgcag

SEQ ID NO: 839530 - DNA, 15 bp, Homo sapiens
gctgcctcccgcagt

SEQ ID NO: 839531 - DNA, 15 bp, Homo sapiens
ctgcctcccgcagtg

SEQ ID NO: 839532 - DNA, 15 bp, Homo sapiens
tgcctcccgcagtgc

SEQ ID NO: 839533 - DNA, 15 bp, Homo sapiens
gcctcccgcagtgcc

SEQ ID NO: 839534 - DNA, 15 bp, Homo sapiens
cctcccgcagtgcca

SEQ ID NO: 839535 - DNA, 15 bp, Homo sapiens
ctcccgcagtgccac

SEQ ID NO: 839536 - DNA, 15 bp, Homo sapiens
tcccgcagtgccact

SEQ ID NO: 839537 - DNA, 15 bp, Homo sapiens
cccgcagtgccactc

SEQ ID NO: 839538 - DNA, 15 bp, Homo sapiens
ccgcagtgccactca

SEQ ID NO: 839539 - DNA, 15 bp, Homo sapiens
cgcagtgccactcag

SEQ ID NO: 839540 - DNA, 15 bp, Homo sapiens
gcagtgccactcagt

SEQ ID NO: 839541 - DNA, 15 bp, Homo sapiens
cagtgccactcagtc

SEQ ID NO: 839542 - DNA, 15 bp, Homo sapiens
agtgccactcagtct

SEQ ID NO: 839543 - DNA, 15 bp, Homo sapiens
gtgccactcagtctg

SEQ ID NO: 839544 - DNA, 15 bp, Homo sapiens
tgccactcagtctga

SEQ ID NO: 839545 - DNA, 15 bp, Homo sapiens
gccactcagtctgac

SEQ ID NO: 839546 - DNA, 15 bp, Homo sapiens
ccactcagtctgacc

SEQ ID NO: 839547 - DNA, 15 bp, Homo sapiens
cactcagtctgacca

SEQ ID NO: 839548 - DNA, 15 bp, Homo sapiens
actcagtctgaccaa

SEQ ID NO: 839549 - DNA, 15 bp, Homo sapiens
ctcagtctgaccaag

SEQ ID NO: 839550 - DNA, 15 bp, Homo sapiens
tcagtctgaccaagc

SEQ ID NO: 839551 - DNA, 15 bp, Homo sapiens
cagtctgaccaagcc

SEQ ID NO: 839552 - DNA, 15 bp, Homo sapiens
agtctgaccaagccc

SEQ ID NO: 839553 - DNA, 15 bp, Homo sapiens
gtctgaccaagccca

SEQ ID NO: 839554 - DNA, 15 bp, Homo sapiens
tctgaccaagcccac

SEQ ID NO: 839555 - DNA, 15 bp, Homo sapiens
ctgaccaagcccact

SEQ ID NO: 839556 - DNA, 15 bp, Homo sapiens
tgaccaagcccacta

SEQ ID NO: 839557 - DNA, 15 bp, Homo sapiens
gaccaagcccactaa

SEQ ID NO: 839558 - DNA, 15 bp, Homo sapiens
accaagcccactaat

SEQ ID NO: 839559 - DNA, 15 bp, Homo sapiens
ccaagcccactaatg

SEQ ID NO: 839560 - DNA, 15 bp, Homo sapiens
caagcccactaatgc

SEQ ID NO: 839561 - DNA, 15 bp, Homo sapiens
aagcccactaatgcc

SEQ ID NO: 839562 - DNA, 15 bp, Homo sapiens
agcccactaatgccc

SEQ ID NO: 839563 - DNA, 15 bp, Homo sapiens
gcccactaatgccca

SEQ ID NO: 839564 - DNA, 15 bp, Homo sapiens
cccactaatgcccac

SEQ ID NO: 839565 - DNA, 15 bp, Homo sapiens
ccactaatgcccacc

SEQ ID NO: 839566 - DNA, 15 bp, Homo sapiens
cactaatgcccacct

SEQ ID NO: 839567 - DNA, 15 bp, Homo sapiens
actaatgcccacctg

SEQ ID NO: 839568 - DNA, 15 bp, Homo sapiens
ctaatgcccacctga

SEQ ID NO: 839569 - DNA, 15 bp, Homo sapiens
taatgcccacctgaa

SEQ ID NO: 839570 - DNA, 15 bp, Homo sapiens
aatgcccacctgaaa

SEQ ID NO: 839571 - DNA, 15 bp, Homo sapiens
atgcccacctgaaag

SEQ ID NO: 839572 - DNA, 15 bp, Homo sapiens
tgcccacctgaaagt

SEQ ID NO: 839573 - DNA, 15 bp, Homo sapiens
gcccacctgaaagta

SEQ ID NO: 839574 - DNA, 15 bp, Homo sapiens
cccacctgaaagtag

SEQ ID NO: 839575 - DNA, 15 bp, Homo sapiens
ccacctgaaagtaga

SEQ ID NO: 839576 - DNA, 15 bp, Homo sapiens
cacctgaaagtagag

SEQ ID NO: 839577 - DNA, 15 bp, Homo sapiens
acctgaaagtagagt

SEQ ID NO: 839578 - DNA, 15 bp, Homo sapiens
cctgaaagtagagta

SEQ ID NO: 839579 - DNA, 15 bp, Homo sapiens
ctgaaagtagagtaa

SEQ ID NO: 839580 - DNA, 15 bp, Homo sapiens
tgaaagtagagtaac

SEQ ID NO: 839581 - DNA, 15 bp, Homo sapiens
gaaagtagagtaact

SEQ ID NO: 839582 - DNA, 15 bp, Homo sapiens
aaagtagagtaactt

SEQ ID NO: 839583 - DNA, 15 bp, Homo sapiens
aagtagagtaacttc

SEQ ID NO: 839584 - DNA, 15 bp, Homo sapiens
agtagagtaacttct

SEQ ID NO: 839585 - DNA, 15 bp, Homo sapiens
gtagagtaacttctg

SEQ ID NO: 839586 - DNA, 15 bp, Homo sapiens
tagagtaacttctgt

SEQ ID NO: 839587 - DNA, 15 bp, Homo sapiens
agagtaacttctgtg

SEQ ID NO: 839588 - DNA, 15 bp, Homo sapiens
gagtaacttctgtga

SEQ ID NO: 839589 - DNA, 15 bp, Homo sapiens
agtaacttctgtgaa

SEQ ID NO: 839590 - DNA, 15 bp, Homo sapiens
gtaacttctgtgaaa

SEQ ID NO: 839591 - DNA, 15 bp, Homo sapiens
taacttctgtgaaaa

SEQ ID NO: 839592 - DNA, 15 bp, Homo sapiens
aacttctgtgaaaac

SEQ ID NO: 839593 - DNA, 15 bp, Homo sapiens
acttctgtgaaaact

SEQ ID NO: 839594 - DNA, 15 bp, Homo sapiens
cttctgtgaaaacta

SEQ ID NO: 839595 - DNA, 15 bp, Homo sapiens
ttctgtgaaaactat

SEQ ID NO: 839596 - DNA, 15 bp, Homo sapiens
tctgtgaaaactatt

SEQ ID NO: 839597 - DNA, 15 bp, Homo sapiens
ctgtgaaaactattt

SEQ ID NO: 839598 - DNA, 15 bp, Homo sapiens
tgtgaaaactatttc

SEQ ID NO: 839599 - DNA, 15 bp, Homo sapiens
gtgaaaactatttct

SEQ ID NO: 839600 - DNA, 15 bp, Homo sapiens
tgaaaactatttcta

SEQ ID NO: 839601 - DNA, 15 bp, Homo sapiens
gaaaactatttctaa

SEQ ID NO: 839602 - DNA, 15 bp, Homo sapiens
aaaactatttctaat

SEQ ID NO: 839603 - DNA, 15 bp, Homo sapiens
aaactatttctaata

SEQ ID NO: 839604 - DNA, 15 bp, Homo sapiens
aactatttctaataa

SEQ ID NO: 839605 - DNA, 15 bp, Homo sapiens
actatttctaataaa

SEQ ID NO: 839606 - DNA, 15 bp, Homo sapiens
ctatttctaataaag

SEQ ID NO: 839607 - DNA, 15 bp, Homo sapiens
tatttctaataaaga

SEQ ID NO: 839608 - DNA, 15 bp, Homo sapiens
atttctaataaagag

SEQ ID NO: 839609 - DNA, 15 bp, Homo sapiens
tttctaataaagaga

SEQ ID NO: 839610 - DNA, 15 bp, Homo sapiens
ttctaataaagagag

SEQ ID NO: 839611 - DNA, 15 bp, Homo sapiens
tctaataaagagaga

SEQ ID NO: 839612 - DNA, 15 bp, Homo sapiens
ctaataaagagagaa

SEQ ID NO: 839613 - DNA, 15 bp, Homo sapiens
taataaagagagaag

SEQ ID NO: 839614 - DNA, 15 bp, Homo sapiens
aataaagagagaagt

SEQ ID NO: 839615 - DNA, 15 bp, Homo sapiens
ataaagagagaagta

SEQ ID NO: 839616 - DNA, 15 bp, Homo sapiens
taaagagagaagtaa

SEQ ID NO: 839617 - DNA, 15 bp, Homo sapiens
aaagagagaagtaat

SEQ ID NO: 839618 - DNA, 15 bp, Homo sapiens
aagagagaagtaatc

SEQ ID NO: 839619 - DNA, 15 bp, Homo sapiens
agagagaagtaatcc

SEQ ID NO: 839620 - DNA, 15 bp, Homo sapiens
gagagaagtaatcca

SEQ ID NO: 839621 - DNA, 15 bp, Homo sapiens
agagaagtaatccat

SEQ ID NO: 839622 - DNA, 15 bp, Homo sapiens
gagaagtaatccatg

SEQ ID NO: 839623 - DNA, 15 bp, Homo sapiens
agaagtaatccatga

SEQ ID NO: 839624 - DNA, 15 bp, Homo sapiens
gaagtaatccatgag

SEQ ID NO: 839625 - DNA, 15 bp, Homo sapiens
aagtaatccatgagc

SEQ ID NO: 839626 - DNA, 15 bp, Homo sapiens
agtaatccatgagct

SEQ ID NO: 839627 - DNA, 15 bp, Homo sapiens
gtaatccatgagcta

SEQ ID NO: 839628 - DNA, 15 bp, Homo sapiens
taatccatgagctat

SEQ ID NO: 839629 - DNA, 15 bp, Homo sapiens
aatccatgagctatt

SEQ ID NO: 839630 - DNA, 15 bp, Homo sapiens
atccatgagctatta

SEQ ID NO: 839631 - DNA, 15 bp, Homo sapiens
tccatgagctattaa

SEQ ID NO: 839632 - DNA, 15 bp, Homo sapiens
ccatgagctattaac

SEQ ID NO: 839633 - DNA, 15 bp, Homo sapiens
catgagctattaaca

SEQ ID NO: 839634 - DNA, 15 bp, Homo sapiens
atgagctattaacag

SEQ ID NO: 839635 - DNA, 15 bp, Homo sapiens
tgagctattaacagg

SEQ ID NO: 839636 - DNA, 15 bp, Homo sapiens
gagctattaacaggg

SEQ ID NO: 839637 - DNA, 15 bp, Homo sapiens
agctattaacaggga

SEQ ID NO: 839638 - DNA, 15 bp, Homo sapiens
gctattaacagggat

SEQ ID NO: 839639 - DNA, 15 bp, Homo sapiens
ctattaacagggatt

SEQ ID NO: 839640 - DNA, 15 bp, Homo sapiens
tattaacagggattc

SEQ ID NO: 839641 - DNA, 15 bp, Homo sapiens
attaacagggattca

SEQ ID NO: 839642 - DNA, 15 bp, Homo sapiens
ttaacagggattcat

SEQ ID NO: 839643 - DNA, 15 bp, Homo sapiens
taacagggattcatt

SEQ ID NO: 839644 - DNA, 15 bp, Homo sapiens
aacagggattcattt

SEQ ID NO: 839645 - DNA, 15 bp, Homo sapiens
acagggattcatttc

SEQ ID NO: 839646 - DNA, 15 bp, Homo sapiens
cagggattcatttcc

SEQ ID NO: 839647 - DNA, 15 bp, Homo sapiens
agggattcatttccc

SEQ ID NO: 839648 - DNA, 15 bp, Homo sapiens
gggattcatttcccc

SEQ ID NO: 839649 - DNA, 15 bp, Homo sapiens
ggattcatttcccct

SEQ ID NO: 839650 - DNA, 15 bp, Homo sapiens
gattcatttccccta

SEQ ID NO: 839651 - DNA, 15 bp, Homo sapiens
attcatttcccctat

SEQ ID NO: 839652 - DNA, 15 bp, Homo sapiens
ttcatttcccctatg

SEQ ID NO: 839653 - DNA, 15 bp, Homo sapiens
tcatttcccctatgg

SEQ ID NO: 839654 - DNA, 15 bp, Homo sapiens
catttcccctatggc

SEQ ID NO: 839655 - DNA, 15 bp, Homo sapiens
atttcccctatggcc

SEQ ID NO: 839656 - DNA, 15 bp, Homo sapiens
tttcccctatggccc

SEQ ID NO: 839657 - DNA, 15 bp, Homo sapiens
ttcccctatggccct

SEQ ID NO: 839658 - DNA, 15 bp, Homo sapiens
tcccctatggccctg

SEQ ID NO: 839659 - DNA, 15 bp, Homo sapiens
cccctatggccctgg

SEQ ID NO: 839660 - DNA, 15 bp, Homo sapiens
ccctatggccctggt

SEQ ID NO: 839661 - DNA, 15 bp, Homo sapiens
cctatggccctggta

SEQ ID NO: 839662 - DNA, 15 bp, Homo sapiens
ctatggccctggtaa

SEQ ID NO: 839663 - DNA, 15 bp, Homo sapiens
tatggccctggtaat

SEQ ID NO: 839664 - DNA, 15 bp, Homo sapiens
atggccctggtaatt

SEQ ID NO: 839665 - DNA, 15 bp, Homo sapiens
tggccctggtaattt

SEQ ID NO: 839666 - DNA, 15 bp, Homo sapiens
ggccctggtaatttc

SEQ ID NO: 839667 - DNA, 15 bp, Homo sapiens
gccctggtaatttct

SEQ ID NO: 839668 - DNA, 15 bp, Homo sapiens
ccctggtaatttcta

SEQ ID NO: 839669 - DNA, 15 bp, Homo sapiens
cctggtaatttctag

SEQ ID NO: 839670 - DNA, 15 bp, Homo sapiens
ctggtaatttctaga

SEQ ID NO: 839671 - DNA, 15 bp, Homo sapiens
tggtaatttctagaa

SEQ ID NO: 839672 - DNA, 15 bp, Homo sapiens
ggtaatttctagaac

SEQ ID NO: 839673 - DNA, 15 bp, Homo sapiens
gtaatttctagaaca

SEQ ID NO: 839674 - DNA, 15 bp, Homo sapiens
taatttctagaacat

SEQ ID NO: 839675 - DNA, 15 bp, Homo sapiens
aatttctagaacatt

SEQ ID NO: 839676 - DNA, 15 bp, Homo sapiens
atttctagaacattg

SEQ ID NO: 839677 - DNA, 15 bp, Homo sapiens
tttctagaacattga

SEQ ID NO: 839678 - DNA, 15 bp, Homo sapiens
ttctagaacattgaa

SEQ ID NO: 839679 - DNA, 15 bp, Homo sapiens
tctagaacattgaat

SEQ ID NO: 839680 - DNA, 15 bp, Homo sapiens
ctagaacattgaatt

SEQ ID NO: 839681 - DNA, 15 bp, Homo sapiens
tagaacattgaatta

SEQ ID NO: 839682 - DNA, 15 bp, Homo sapiens
agaacattgaattaa

SEQ ID NO: 839683 - DNA, 15 bp, Homo sapiens
gaacattgaattaaa

SEQ ID NO: 839684 - DNA, 15 bp, Homo sapiens
aacattgaattaaag

SEQ ID NO: 839685 - DNA, 15 bp, Homo sapiens
acattgaattaaagc

SEQ ID NO: 839686 - DNA, 15 bp, Homo sapiens
cattgaattaaagcg

SEQ ID NO: 839687 - DNA, 15 bp, Homo sapiens
attgaattaaagcgt

SEQ ID NO: 839688 - DNA, 15 bp, Homo sapiens
ttgaattaaagcgtt

SEQ ID NO: 839689 - DNA, 15 bp, Homo sapiens
tgaattaaagcgttc

SEQ ID NO: 839690 - DNA, 15 bp, Homo sapiens
gaattaaagcgttct

SEQ ID NO: 839691 - DNA, 15 bp, Homo sapiens
aattaaagcgttctc

SEQ ID NO: 839692 - DNA, 15 bp, Homo sapiens
attaaagcgttctca

SEQ ID NO: 839693 - DNA, 15 bp, Homo sapiens
ttaaagcgttctcag

SEQ ID NO: 839694 - DNA, 15 bp, Homo sapiens
taaagcgttctcaga

SEQ ID NO: 839695 - DNA, 15 bp, Homo sapiens
aaagcgttctcagac

SEQ ID NO: 839696 - DNA, 15 bp, Homo sapiens
aagcgttctcagacc

SEQ ID NO: 839697 - DNA, 15 bp, Homo sapiens
agcgttctcagacct

SEQ ID NO: 839698 - DNA, 15 bp, Homo sapiens
gcgttctcagacctt

SEQ ID NO: 839699 - DNA, 15 bp, Homo sapiens
cgttctcagaccttt

SEQ ID NO: 839700 - DNA, 15 bp, Homo sapiens
gttctcagaccttta

SEQ ID NO: 839701 - DNA, 15 bp, Homo sapiens
ttctcagacctttac

SEQ ID NO: 839702 - DNA, 15 bp, Homo sapiens
tctcagacctttaca

SEQ ID NO: 839703 - DNA, 15 bp, Homo sapiens
ctcagacctttacaa

SEQ ID NO: 839704 - DNA, 15 bp, Homo sapiens
tcagacctttacaaa

SEQ ID NO: 839705 - DNA, 15 bp, Homo sapiens
cagacctttacaaat

SEQ ID NO: 839706 - DNA, 15 bp, Homo sapiens
agacctttacaaatt

SEQ ID NO: 839707 - DNA, 15 bp, Homo sapiens
gacctttacaaattc

SEQ ID NO: 839708 - DNA, 15 bp, Homo sapiens
acctttacaaattct

SEQ ID NO: 839709 - DNA, 15 bp, Homo sapiens
cctttacaaattctc

SEQ ID NO: 839710 - DNA, 15 bp, Homo sapiens
ctttacaaattctca

SEQ ID NO: 839711 - DNA, 15 bp, Homo sapiens
tttacaaattctcaa

SEQ ID NO: 839712 - DNA, 15 bp, Homo sapiens
ttacaaattctcaag

SEQ ID NO: 839713 - DNA, 15 bp, Homo sapiens
tacaaattctcaagg

SEQ ID NO: 839714 - DNA, 15 bp, Homo sapiens
acaaattctcaaggc

SEQ ID NO: 839715 - DNA, 15 bp, Homo sapiens
caaattctcaaggca

SEQ ID NO: 839716 - DNA, 15 bp, Homo sapiens
aaattctcaaggcaa

SEQ ID NO: 839717 - DNA, 15 bp, Homo sapiens
aattctcaaggcaaa

SEQ ID NO: 839718 - DNA, 15 bp, Homo sapiens
attctcaaggcaaac

SEQ ID NO: 839719 - DNA, 15 bp, Homo sapiens
ttctcaaggcaaaca

SEQ ID NO: 839720 - DNA, 15 bp, Homo sapiens
tctcaaggcaaacat

SEQ ID NO: 839721 - DNA, 15 bp, Homo sapiens
ctcaaggcaaacatt

SEQ ID NO: 839722 - DNA, 15 bp, Homo sapiens
tcaaggcaaacatta

SEQ ID NO: 839723 - DNA, 15 bp, Homo sapiens
caaggcaaacattat

SEQ ID NO: 839724 - DNA, 15 bp, Homo sapiens
aaggcaaacattatt

SEQ ID NO: 839725 - DNA, 15 bp, Homo sapiens
aggcaaacattatta

SEQ ID NO: 839726 - DNA, 15 bp, Homo sapiens
ggcaaacattattag

SEQ ID NO: 839727 - DNA, 15 bp, Homo sapiens
gcaaacattattagc

SEQ ID NO: 839728 - DNA, 15 bp, Homo sapiens
caaacattattagca

SEQ ID NO: 839729 - DNA, 15 bp, Homo sapiens
aaacattattagcaa

SEQ ID NO: 839730 - DNA, 15 bp, Homo sapiens
aacattattagcaaa

SEQ ID NO: 839731 - DNA, 15 bp, Homo sapiens
acattattagcaaaa

SEQ ID NO: 839732 - DNA, 15 bp, Homo sapiens
cattattagcaaaaa

SEQ ID NO: 839733 - DNA, 15 bp, Homo sapiens
attattagcaaaaag

SEQ ID NO: 839734 - DNA, 15 bp, Homo sapiens
ttattagcaaaaaga

SEQ ID NO: 839735 - DNA, 15 bp, Homo sapiens
tattagcaaaaagaa

SEQ ID NO: 839736 - DNA, 15 bp, Homo sapiens
attagcaaaaagaag

SEQ ID NO: 839737 - DNA, 15 bp, Homo sapiens
ttagcaaaaagaagc

SEQ ID NO: 839738 - DNA, 15 bp, Homo sapiens
tagcaaaaagaagcc

SEQ ID NO: 839739 - DNA, 15 bp, Homo sapiens
agcaaaaagaagccc

SEQ ID NO: 839740 - DNA, 15 bp, Homo sapiens
gcaaaaagaagccca

SEQ ID NO: 839741 - DNA, 15 bp, Homo sapiens
caaaaagaagcccat

SEQ ID NO: 839742 - DNA, 15 bp, Homo sapiens
aaaaagaagcccata

SEQ ID NO: 839743 - DNA, 15 bp, Homo sapiens
aaaagaagcccatac

SEQ ID NO: 839744 - DNA, 15 bp, Homo sapiens
aaagaagcccataca

SEQ ID NO: 839745 - DNA, 15 bp, Homo sapiens
aagaagcccatacag

SEQ ID NO: 839746 - DNA, 15 bp, Homo sapiens
agaagcccatacagc

SEQ ID NO: 839747 - DNA, 15 bp, Homo sapiens
gaagcccatacagca

SEQ ID NO: 839748 - DNA, 15 bp, Homo sapiens
aagcccatacagcat

SEQ ID NO: 839749 - DNA, 15 bp, Homo sapiens
agcccatacagcatg

SEQ ID NO: 839750 - DNA, 15 bp, Homo sapiens
gcccatacagcatgt

SEQ ID NO: 839751 - DNA, 15 bp, Homo sapiens
cccatacagcatgtt

SEQ ID NO: 839752 - DNA, 15 bp, Homo sapiens
ccatacagcatgtta

SEQ ID NO: 839753 - DNA, 15 bp, Homo sapiens
catacagcatgttag

SEQ ID NO: 839754 - DNA, 15 bp, Homo sapiens
atacagcatgttaga

SEQ ID NO: 839755 - DNA, 15 bp, Homo sapiens
tacagcatgttagaa

SEQ ID NO: 839756 - DNA, 15 bp, Homo sapiens
acagcatgttagaag

SEQ ID NO: 839757 - DNA, 15 bp, Homo sapiens
cagcatgttagaaga

SEQ ID NO: 839758 - DNA, 15 bp, Homo sapiens
agcatgttagaagat

SEQ ID NO: 839759 - DNA, 15 bp, Homo sapiens
gcatgttagaagata

SEQ ID NO: 839760 - DNA, 15 bp, Homo sapiens
catgttagaagatag

SEQ ID NO: 839761 - DNA, 15 bp, Homo sapiens
atgttagaagataga

SEQ ID NO: 839762 - DNA, 15 bp, Homo sapiens
tgttagaagatagat

SEQ ID NO: 839763 - DNA, 15 bp, Homo sapiens
gttagaagatagatt

SEQ ID NO: 839764 - DNA, 15 bp, Homo sapiens
ttagaagatagattg

SEQ ID NO: 839765 - DNA, 15 bp, Homo sapiens
tagaagatagattgc

SEQ ID NO: 839766 - DNA, 15 bp, Homo sapiens
agaagatagattgcc

SEQ ID NO: 839767 - DNA, 15 bp, Homo sapiens
gaagatagattgcca

SEQ ID NO: 839768 - DNA, 15 bp, Homo sapiens
aagatagattgccag

SEQ ID NO: 839769 - DNA, 15 bp, Homo sapiens
agatagattgccaga

SEQ ID NO: 839770 - DNA, 15 bp, Homo sapiens
gatagattgccagaa

SEQ ID NO: 839771 - DNA, 15 bp, Homo sapiens
atagattgccagaaa

SEQ ID NO: 839772 - DNA, 15 bp, Homo sapiens
tagattgccagaaaa

SEQ ID NO: 839773 - DNA, 15 bp, Homo sapiens
agattgccagaaaat

SEQ ID NO: 839774 - DNA, 15 bp, Homo sapiens
gattgccagaaaatg

SEQ ID NO: 839775 - DNA, 15 bp, Homo sapiens
attgccagaaaatgt

SEQ ID NO: 839776 - DNA, 15 bp, Homo sapiens
ttgccagaaaatgtc

SEQ ID NO: 839777 - DNA, 15 bp, Homo sapiens
tgccagaaaatgtca

SEQ ID NO: 839778 - DNA, 15 bp, Homo sapiens
gccagaaaatgtcaa

SEQ ID NO: 839779 - DNA, 15 bp, Homo sapiens
ccagaaaatgtcaac

SEQ ID NO: 839780 - DNA, 15 bp, Homo sapiens
cagaaaatgtcaacg

SEQ ID NO: 839781 - DNA, 15 bp, Homo sapiens
agaaaatgtcaacgg

SEQ ID NO: 839782 - DNA, 15 bp, Homo sapiens
gaaaatgtcaacgga

SEQ ID NO: 839783 - DNA, 15 bp, Homo sapiens
aaaatgtcaacggat

SEQ ID NO: 839784 - DNA, 15 bp, Homo sapiens
aaatgtcaacggatc

SEQ ID NO: 839785 - DNA, 15 bp, Homo sapiens
aatgtcaacggatct

SEQ ID NO: 839786 - DNA, 15 bp, Homo sapiens
atgtcaacggatctt

SEQ ID NO: 839787 - DNA, 15 bp, Homo sapiens
tgtcaacggatcttc

SEQ ID NO: 839788 - DNA, 15 bp, Homo sapiens
gtcaacggatcttct

SEQ ID NO: 839789 - DNA, 15 bp, Homo sapiens
tcaacggatcttctg

SEQ ID NO: 839790 - DNA, 15 bp, Homo sapiens
caacggatcttctga

SEQ ID NO: 839791 - DNA, 15 bp, Homo sapiens
aacggatcttctgaa

SEQ ID NO: 839792 - DNA, 15 bp, Homo sapiens
acggatcttctgaat

SEQ ID NO: 839793 - DNA, 15 bp, Homo sapiens
cggatcttctgaata

SEQ ID NO: 839794 - DNA, 15 bp, Homo sapiens
ggatcttctgaataa

SEQ ID NO: 839795 - DNA, 15 bp, Homo sapiens
gatcttctgaataaa

SEQ ID NO: 839796 - DNA, 15 bp, Homo sapiens
atcttctgaataaaa

SEQ ID NO: 839797 - DNA, 15 bp, Homo sapiens
tcttctgaataaaat

SEQ ID NO: 839798 - DNA, 15 bp, Homo sapiens
cttctgaataaaata

SEQ ID NO: 839799 - DNA, 15 bp, Homo sapiens
ttctgaataaaataa

SEQ ID NO: 839800 - DNA, 15 bp, Homo sapiens
tctgaataaaataaa

SEQ ID NO: 839801 - DNA, 15 bp, Homo sapiens
ctgaataaaataaaa

SEQ ID NO: 839802 - DNA, 15 bp, Homo sapiens
tgaataaaataaaag

SEQ ID NO: 839803 - DNA, 15 bp, Homo sapiens
gaataaaataaaaga

SEQ ID NO: 839804 - DNA, 15 bp, Homo sapiens
aataaaataaaagaa

SEQ ID NO: 839805 - DNA, 15 bp, Homo sapiens
ataaaataaaagaag

SEQ ID NO: 839806 - DNA, 15 bp, Homo sapiens
taaaataaaagaagt

SEQ ID NO: 839807 - DNA, 15 bp, Homo sapiens
aaaataaaagaagtt

SEQ ID NO: 839808 - DNA, 15 bp, Homo sapiens
aaataaaagaagttg

SEQ ID NO: 839809 - DNA, 15 bp, Homo sapiens
aataaaagaagttga

SEQ ID NO: 839810 - DNA, 15 bp, Homo sapiens
ataaaagaagttgaa

SEQ ID NO: 839811 - DNA, 15 bp, Homo sapiens
taaaagaagttgaaa

SEQ ID NO: 839812 - DNA, 15 bp, Homo sapiens
aaaagaagttgaaac

SEQ ID NO: 839813 - DNA, 15 bp, Homo sapiens
aaagaagttgaaact

SEQ ID NO: 839814 - DNA, 15 bp, Homo sapiens
aagaagttgaaactc

SEQ ID NO: 839815 - DNA, 15 bp, Homo sapiens
agaagttgaaactcc

SEQ ID NO: 839816 - DNA, 15 bp, Homo sapiens
gaagttgaaactcct

SEQ ID NO: 839817 - DNA, 15 bp, Homo sapiens
aagttgaaactcctt

SEQ ID NO: 839818 - DNA, 15 bp, Homo sapiens
agttgaaactccttt

SEQ ID NO: 839819 - DNA, 15 bp, Homo sapiens
gttgaaactcctttc

SEQ ID NO: 839820 - DNA, 15 bp, Homo sapiens
ttgaaactcctttcc

SEQ ID NO: 839821 - DNA, 15 bp, Homo sapiens
tgaaactcctttccc

SEQ ID NO: 839822 - DNA, 15 bp, Homo sapiens
gaaactcctttcccc

SEQ ID NO: 839823 - DNA, 15 bp, Homo sapiens
aaactcctttcccca

SEQ ID NO: 839824 - DNA, 15 bp, Homo sapiens
aactcctttccccat

SEQ ID NO: 839825 - DNA, 15 bp, Homo sapiens
actcctttccccatc

SEQ ID NO: 839826 - DNA, 15 bp, Homo sapiens
ctcctttccccatct

SEQ ID NO: 839827 - DNA, 15 bp, Homo sapiens
tcctttccccatctt

SEQ ID NO: 839828 - DNA, 15 bp, Homo sapiens
cctttccccatcttc

SEQ ID NO: 839829 - DNA, 15 bp, Homo sapiens
ctttccccatcttct

SEQ ID NO: 839830 - DNA, 15 bp, Homo sapiens
tttccccatcttctt

SEQ ID NO: 839831 - DNA, 15 bp, Homo sapiens
ttccccatcttcttc

SEQ ID NO: 839832 - DNA, 15 bp, Homo sapiens
tccccatcttcttcc

SEQ ID NO: 839833 - DNA, 15 bp, Homo sapiens
ccccatcttcttccc

SEQ ID NO: 839834 - DNA, 15 bp, Homo sapiens
cccatcttcttccct

SEQ ID NO: 839835 - DNA, 15 bp, Homo sapiens
ccatcttcttccctt

SEQ ID NO: 839836 - DNA, 15 bp, Homo sapiens
catcttcttcccttc

SEQ ID NO: 839837 - DNA, 15 bp, Homo sapiens
atcttcttcccttct

SEQ ID NO: 839838 - DNA, 15 bp, Homo sapiens
tcttcttcccttctc

SEQ ID NO: 839839 - DNA, 15 bp, Homo sapiens
cttcttcccttctcc

SEQ ID NO: 839840 - DNA, 15 bp, Homo sapiens
ttcttcccttctccc

SEQ ID NO: 839841 - DNA, 15 bp, Homo sapiens
tcttcccttctccct

SEQ ID NO: 839842 - DNA, 15 bp, Homo sapiens
cttcccttctccctc

SEQ ID NO: 839843 - DNA, 15 bp, Homo sapiens
ttcccttctccctcc

SEQ ID NO: 839844 - DNA, 15 bp, Homo sapiens
tcccttctccctcct

SEQ ID NO: 839845 - DNA, 15 bp, Homo sapiens
cccttctccctcctt

SEQ ID NO: 839846 - DNA, 15 bp, Homo sapiens
ccttctccctccttc

SEQ ID NO: 839847 - DNA, 15 bp, Homo sapiens
cttctccctccttcc

SEQ ID NO: 839848 - DNA, 15 bp, Homo sapiens
ttctccctccttccc

SEQ ID NO: 839849 - DNA, 15 bp, Homo sapiens
tctccctccttcccc

SEQ ID NO: 839850 - DNA, 15 bp, Homo sapiens
ctccctccttccccc

SEQ ID NO: 839851 - DNA, 15 bp, Homo sapiens
tccctccttccccca

SEQ ID NO: 839852 - DNA, 15 bp, Homo sapiens
ccctccttcccccaa

SEQ ID NO: 839853 - DNA, 15 bp, Homo sapiens
cctccttcccccaac

SEQ ID NO: 839854 - DNA, 15 bp, Homo sapiens
ctccttcccccaaca

SEQ ID NO: 839855 - DNA, 15 bp, Homo sapiens
tccttcccccaacat

SEQ ID NO: 839856 - DNA, 15 bp, Homo sapiens
ccttcccccaacatg

SEQ ID NO: 839857 - DNA, 15 bp, Homo sapiens
cttcccccaacatga

SEQ ID NO: 839858 - DNA, 15 bp, Homo sapiens
ttcccccaacatgat

SEQ ID NO: 839859 - DNA, 15 bp, Homo sapiens
tcccccaacatgatt

SEQ ID NO: 839860 - DNA, 15 bp, Homo sapiens
cccccaacatgatta

SEQ ID NO: 839861 - DNA, 15 bp, Homo sapiens
ccccaacatgattag

SEQ ID NO: 839862 - DNA, 15 bp, Homo sapiens
cccaacatgattaga

SEQ ID NO: 839863 - DNA, 15 bp, Homo sapiens
ccaacatgattagaa

SEQ ID NO: 839864 - DNA, 15 bp, Homo sapiens
caacatgattagaaa

SEQ ID NO: 839865 - DNA, 15 bp, Homo sapiens
aacatgattagaaag

SEQ ID NO: 839866 - DNA, 15 bp, Homo sapiens
acatgattagaaagt

SEQ ID NO: 839867 - DNA, 15 bp, Homo sapiens
catgattagaaagtc

SEQ ID NO: 839868 - DNA, 15 bp, Homo sapiens
atgattagaaagtca

SEQ ID NO: 839869 - DNA, 15 bp, Homo sapiens
tgattagaaagtcat

SEQ ID NO: 839870 - DNA, 15 bp, Homo sapiens
gattagaaagtcatt

SEQ ID NO: 839871 - DNA, 15 bp, Homo sapiens
attagaaagtcattt

SEQ ID NO: 839872 - DNA, 15 bp, Homo sapiens
ttagaaagtcatttc

SEQ ID NO: 839873 - DNA, 15 bp, Homo sapiens
tagaaagtcatttca

SEQ ID NO: 839874 - DNA, 15 bp, Homo sapiens
agaaagtcatttcat

SEQ ID NO: 839875 - DNA, 15 bp, Homo sapiens
gaaagtcatttcatg

SEQ ID NO: 839876 - DNA, 15 bp, Homo sapiens
aaagtcatttcatgt

SEQ ID NO: 839877 - DNA, 15 bp, Homo sapiens
aagtcatttcatgtg

SEQ ID NO: 839878 - DNA, 15 bp, Homo sapiens
agtcatttcatgtgt

SEQ ID NO: 839879 - DNA, 15 bp, Homo sapiens
gtcatttcatgtgtc

SEQ ID NO: 839880 - DNA, 15 bp, Homo sapiens
tcatttcatgtgtct

SEQ ID NO: 839881 - DNA, 15 bp, Homo sapiens
catttcatgtgtctt

SEQ ID NO: 839882 - DNA, 15 bp, Homo sapiens
atttcatgtgtctta

SEQ ID NO: 839883 - DNA, 15 bp, Homo sapiens
tttcatgtgtcttat

SEQ ID NO: 839884 - DNA, 15 bp, Homo sapiens
ttcatgtgtcttata

SEQ ID NO: 839885 - DNA, 15 bp, Homo sapiens
tcatgtgtcttatat

SEQ ID NO: 839886 - DNA, 15 bp, Homo sapiens
catgtgtcttatatg

SEQ ID NO: 839887 - DNA, 15 bp, Homo sapiens
atgtgtcttatatgt

SEQ ID NO: 839888 - DNA, 15 bp, Homo sapiens
tgtgtcttatatgtt

SEQ ID NO: 839889 - DNA, 15 bp, Homo sapiens
gtgtcttatatgttt

SEQ ID NO: 839890 - DNA, 15 bp, Homo sapiens
tgtcttatatgtttg

SEQ ID NO: 839891 - DNA, 15 bp, Homo sapiens
gtcttatatgtttgg

SEQ ID NO: 839892 - DNA, 15 bp, Homo sapiens
tcttatatgtttggt

SEQ ID NO: 839893 - DNA, 15 bp, Homo sapiens
cttatatgtttggtg

SEQ ID NO: 839894 - DNA, 15 bp, Homo sapiens
ttatatgtttggtga

SEQ ID NO: 839895 - DNA, 15 bp, Homo sapiens
tatatgtttggtgaa

SEQ ID NO: 839896 - DNA, 15 bp, Homo sapiens
atatgtttggtgaat

SEQ ID NO: 839897 - DNA, 15 bp, Homo sapiens
tatgtttggtgaatc

SEQ ID NO: 839898 - DNA, 15 bp, Homo sapiens
atgtttggtgaatca

SEQ ID NO: 839899 - DNA, 15 bp, Homo sapiens
tgtttggtgaatcaa

SEQ ID NO: 839900 - DNA, 15 bp, Homo sapiens
gtttggtgaatcaaa

SEQ ID NO: 839901 - DNA, 15 bp, Homo sapiens
tttggtgaatcaaaa

SEQ ID NO: 839902 - DNA, 15 bp, Homo sapiens
ttggtgaatcaaaag

SEQ ID NO: 839903 - DNA, 15 bp, Homo sapiens
tggtgaatcaaaagc

SEQ ID NO: 839904 - DNA, 15 bp, Homo sapiens
ggtgaatcaaaagca

SEQ ID NO: 839905 - DNA, 15 bp, Homo sapiens
gtgaatcaaaagcaa

SEQ ID NO: 839906 - DNA, 15 bp, Homo sapiens
tgaatcaaaagcaaa

SEQ ID NO: 839907 - DNA, 15 bp, Homo sapiens
gaatcaaaagcaaat

SEQ ID NO: 839908 - DNA, 15 bp, Homo sapiens
aatcaaaagcaaatg

SEQ ID NO: 839909 - DNA, 15 bp, Homo sapiens
atcaaaagcaaatgt

SEQ ID NO: 839910 - DNA, 15 bp, Homo sapiens
tcaaaagcaaatgta

SEQ ID NO: 839911 - DNA, 15 bp, Homo sapiens
caaaagcaaatgtac

SEQ ID NO: 839912 - DNA, 15 bp, Homo sapiens
aaaagcaaatgtaca

SEQ ID NO: 839913 - DNA, 15 bp, Homo sapiens
aaagcaaatgtacat

SEQ ID NO: 839914 - DNA, 15 bp, Homo sapiens
aagcaaatgtacatg

SEQ ID NO: 839915 - DNA, 15 bp, Homo sapiens
agcaaatgtacatga

SEQ ID NO: 839916 - DNA, 15 bp, Homo sapiens
gcaaatgtacatgat

SEQ ID NO: 839917 - DNA, 15 bp, Homo sapiens
caaatgtacatgatt

SEQ ID NO: 839918 - DNA, 15 bp, Homo sapiens
aaatgtacatgattg

SEQ ID NO: 839919 - DNA, 15 bp, Homo sapiens
aatgtacatgattga

SEQ ID NO: 839920 - DNA, 15 bp, Homo sapiens
atgtacatgattgat

SEQ ID NO: 839921 - DNA, 15 bp, Homo sapiens
tgtacatgattgatg

SEQ ID NO: 839922 - DNA, 15 bp, Homo sapiens
gtacatgattgatgg

SEQ ID NO: 839923 - DNA, 15 bp, Homo sapiens
tacatgattgatggt

SEQ ID NO: 839924 - DNA, 15 bp, Homo sapiens
acatgattgatggtg

SEQ ID NO: 839925 - DNA, 15 bp, Homo sapiens
catgattgatggtga

SEQ ID NO: 839926 - DNA, 15 bp, Homo sapiens
atgattgatggtgac

SEQ ID NO: 839927 - DNA, 15 bp, Homo sapiens
tgattgatggtgaca

SEQ ID NO: 839928 - DNA, 15 bp, Homo sapiens
gattgatggtgacag

SEQ ID NO: 839929 - DNA, 15 bp, Homo sapiens
attgatggtgacagg

SEQ ID NO: 839930 - DNA, 15 bp, Homo sapiens
ttgatggtgacaggg

SEQ ID NO: 839931 - DNA, 15 bp, Homo sapiens
tgatggtgacaggga

SEQ ID NO: 839932 - DNA, 15 bp, Homo sapiens
gatggtgacagggaa

SEQ ID NO: 839933 - DNA, 15 bp, Homo sapiens
atggtgacagggaac

SEQ ID NO: 839934 - DNA, 15 bp, Homo sapiens
tggtgacagggaaca

SEQ ID NO: 839935 - DNA, 15 bp, Homo sapiens
ggtgacagggaacac

SEQ ID NO: 839936 - DNA, 15 bp, Homo sapiens
gtgacagggaacaca

SEQ ID NO: 839937 - DNA, 15 bp, Homo sapiens
tgacagggaacacat

SEQ ID NO: 839938 - DNA, 15 bp, Homo sapiens
gacagggaacacatt

SEQ ID NO: 839939 - DNA, 15 bp, Homo sapiens
acagggaacacattt

SEQ ID NO: 839940 - DNA, 15 bp, Homo sapiens
cagggaacacattta

SEQ ID NO: 839941 - DNA, 15 bp, Homo sapiens
agggaacacatttaa

SEQ ID NO: 839942 - DNA, 15 bp, Homo sapiens
gggaacacatttaac

SEQ ID NO: 839943 - DNA, 15 bp, Homo sapiens
ggaacacatttaact

SEQ ID NO: 839944 - DNA, 15 bp, Homo sapiens
gaacacatttaactc

SEQ ID NO: 839945 - DNA, 15 bp, Homo sapiens
aacacatttaactca

SEQ ID NO: 839946 - DNA, 15 bp, Homo sapiens
acacatttaactcat

SEQ ID NO: 839947 - DNA, 15 bp, Homo sapiens
cacatttaactcatt

SEQ ID NO: 839948 - DNA, 15 bp, Homo sapiens
acatttaactcatta

SEQ ID NO: 839949 - DNA, 15 bp, Homo sapiens
catttaactcattat

SEQ ID NO: 839950 - DNA, 15 bp, Homo sapiens
atttaactcattatt

SEQ ID NO: 839951 - DNA, 15 bp, Homo sapiens
tttaactcattattc

SEQ ID NO: 839952 - DNA, 15 bp, Homo sapiens
ttaactcattattct

SEQ ID NO: 839953 - DNA, 15 bp, Homo sapiens
taactcattattctt

SEQ ID NO: 839954 - DNA, 15 bp, Homo sapiens
aactcattattcttt

SEQ ID NO: 839955 - DNA, 15 bp, Homo sapiens
actcattattcttta

SEQ ID NO: 839956 - DNA, 15 bp, Homo sapiens
ctcattattctttac

SEQ ID NO: 839957 - DNA, 15 bp, Homo sapiens
tcattattctttact

SEQ ID NO: 839958 - DNA, 15 bp, Homo sapiens
cattattctttactt

SEQ ID NO: 839959 - DNA, 15 bp, Homo sapiens
attattctttacttt

SEQ ID NO: 839960 - DNA, 15 bp, Homo sapiens
ttattctttactttg

SEQ ID NO: 839961 - DNA, 15 bp, Homo sapiens
tattctttactttgc

SEQ ID NO: 839962 - DNA, 15 bp, Homo sapiens
attctttactttgca

SEQ ID NO: 839963 - DNA, 15 bp, Homo sapiens
ttctttactttgcag

SEQ ID NO: 839964 - DNA, 15 bp, Homo sapiens
tctttactttgcagc

SEQ ID NO: 839965 - DNA, 15 bp, Homo sapiens
ctttactttgcagca

SEQ ID NO: 839966 - DNA, 15 bp, Homo sapiens
tttactttgcagcaa

SEQ ID NO: 839967 - DNA, 15 bp, Homo sapiens
ttactttgcagcaaa

SEQ ID NO: 839968 - DNA, 15 bp, Homo sapiens
tactttgcagcaaaa

SEQ ID NO: 839969 - DNA, 15 bp, Homo sapiens
actttgcagcaaaat

SEQ ID NO: 839970 - DNA, 15 bp, Homo sapiens
ctttgcagcaaaatg

SEQ ID NO: 839971 - DNA, 15 bp, Homo sapiens
tttgcagcaaaatga

SEQ ID NO: 839972 - DNA, 15 bp, Homo sapiens
ttgcagcaaaatgat

SEQ ID NO: 839973 - DNA, 15 bp, Homo sapiens
tgcagcaaaatgatt

SEQ ID NO: 839974 - DNA, 15 bp, Homo sapiens
gcagcaaaatgattt

SEQ ID NO: 839975 - DNA, 15 bp, Homo sapiens
cagcaaaatgatttg

SEQ ID NO: 839976 - DNA, 15 bp, Homo sapiens
agcaaaatgatttgt

SEQ ID NO: 839977 - DNA, 15 bp, Homo sapiens
gcaaaatgatttgtg

SEQ ID NO: 839978 - DNA, 15 bp, Homo sapiens
caaaatgatttgtgt

SEQ ID NO: 839979 - DNA, 15 bp, Homo sapiens
aaaatgatttgtgta

SEQ ID NO: 839980 - DNA, 15 bp, Homo sapiens
aaatgatttgtgtaa

SEQ ID NO: 839981 - DNA, 15 bp, Homo sapiens
aatgatttgtgtaaa

SEQ ID NO: 839982 - DNA, 15 bp, Homo sapiens
atgatttgtgtaaac

SEQ ID NO: 839983 - DNA, 15 bp, Homo sapiens
tgatttgtgtaaact

SEQ ID NO: 839984 - DNA, 15 bp, Homo sapiens
gatttgtgtaaactg

SEQ ID NO: 839985 - DNA, 15 bp, Homo sapiens
atttgtgtaaactgt

SEQ ID NO: 839986 - DNA, 15 bp, Homo sapiens
tttgtgtaaactgtc

SEQ ID NO: 839987 - DNA, 15 bp, Homo sapiens
ttgtgtaaactgtct

SEQ ID NO: 839988 - DNA, 15 bp, Homo sapiens
tgtgtaaactgtctg

SEQ ID NO: 839989 - DNA, 15 bp, Homo sapiens
gtgtaaactgtctgc

SEQ ID NO: 839990 - DNA, 15 bp, Homo sapiens
tgtaaactgtctgcc

SEQ ID NO: 839991 - DNA, 15 bp, Homo sapiens
gtaaactgtctgcct

SEQ ID NO: 839992 - DNA, 15 bp, Homo sapiens
taaactgtctgccta

SEQ ID NO: 839993 - DNA, 15 bp, Homo sapiens
aaactgtctgcctag

SEQ ID NO: 839994 - DNA, 15 bp, Homo sapiens
aactgtctgcctagc

SEQ ID NO: 839995 - DNA, 15 bp, Homo sapiens
actgtctgcctagca

SEQ ID NO: 839996 - DNA, 15 bp, Homo sapiens
ctgtctgcctagcat

SEQ ID NO: 839997 - DNA, 15 bp, Homo sapiens
tgtctgcctagcatt

SEQ ID NO: 839998 - DNA, 15 bp, Homo sapiens
gtctgcctagcatta

SEQ ID NO: 839999 - DNA, 15 bp, Homo sapiens
tctgcctagcattaa

SEQ ID NO: 840000 - DNA, 15 bp, Homo sapiens
ctgcctagcattaaa

SEQ ID NO: 840001 - DNA, 15 bp, Homo sapiens
tgcctagcattaaag

SEQ ID NO: 840002 - DNA, 15 bp, Homo sapiens
gcctagcattaaagg

SEQ ID NO: 840003 - DNA, 15 bp, Homo sapiens
cctagcattaaaggt

SEQ ID NO: 840004 - DNA, 15 bp, Homo sapiens
ctagcattaaaggta

SEQ ID NO: 840005 - DNA, 15 bp, Homo sapiens
tagcattaaaggtaa

SEQ ID NO: 840006 - DNA, 15 bp, Homo sapiens
agcattaaaggtaaa

SEQ ID NO: 840007 - DNA, 15 bp, Homo sapiens
gcattaaaggtaaag

SEQ ID NO: 840008 - DNA, 15 bp, Homo sapiens
cattaaaggtaaagc

SEQ ID NO: 840009 - DNA, 15 bp, Homo sapiens
attaaaggtaaagca

SEQ ID NO: 840010 - DNA, 15 bp, Homo sapiens
ttaaaggtaaagcaa

SEQ ID NO: 840011 - DNA, 15 bp, Homo sapiens
taaaggtaaagcaaa

SEQ ID NO: 840012 - DNA, 15 bp, Homo sapiens
aaaggtaaagcaaac

SEQ ID NO: 840013 - DNA, 15 bp, Homo sapiens
aaggtaaagcaaact

SEQ ID NO: 840014 - DNA, 15 bp, Homo sapiens
aggtaaagcaaactt

SEQ ID NO: 840015 - DNA, 15 bp, Homo sapiens
ggtaaagcaaactta

SEQ ID NO: 840016 - DNA, 15 bp, Homo sapiens
gtaaagcaaacttag

SEQ ID NO: 840017 - DNA, 15 bp, Homo sapiens
taaagcaaacttaga

SEQ ID NO: 840018 - DNA, 15 bp, Homo sapiens
aaagcaaacttagaa

SEQ ID NO: 840019 - DNA, 15 bp, Homo sapiens
aagcaaacttagaaa

SEQ ID NO: 840020 - DNA, 15 bp, Homo sapiens
agcaaacttagaaac

SEQ ID NO: 840021 - DNA, 15 bp, Homo sapiens
gcaaacttagaaacc

SEQ ID NO: 840022 - DNA, 15 bp, Homo sapiens
caaacttagaaaccc

SEQ ID NO: 840023 - DNA, 15 bp, Homo sapiens
aaacttagaaacccc

SEQ ID NO: 840024 - DNA, 15 bp, Homo sapiens
aacttagaaacccca

SEQ ID NO: 840025 - DNA, 15 bp, Homo sapiens
acttagaaaccccaa

SEQ ID NO: 840026 - DNA, 15 bp, Homo sapiens
cttagaaaccccaaa

SEQ ID NO: 840027 - DNA, 15 bp, Homo sapiens
ttagaaaccccaaaa

SEQ ID NO: 840028 - DNA, 15 bp, Homo sapiens
tagaaaccccaaaat

SEQ ID NO: 840029 - DNA, 15 bp, Homo sapiens
agaaaccccaaaatg

SEQ ID NO: 840030 - DNA, 15 bp, Homo sapiens
gaaaccccaaaatgt

SEQ ID NO: 840031 - DNA, 15 bp, Homo sapiens
aaaccccaaaatgtt

SEQ ID NO: 840032 - DNA, 15 bp, Homo sapiens
aaccccaaaatgtta

SEQ ID NO: 840033 - DNA, 15 bp, Homo sapiens
accccaaaatgttat

SEQ ID NO: 840034 - DNA, 15 bp, Homo sapiens
ccccaaaatgttata

SEQ ID NO: 840035 - DNA, 15 bp, Homo sapiens
cccaaaatgttatat

SEQ ID NO: 840036 - DNA, 15 bp, Homo sapiens
ccaaaatgttatatt

SEQ ID NO: 840037 - DNA, 15 bp, Homo sapiens
caaaatgttatattt

SEQ ID NO: 840038 - DNA, 15 bp, Homo sapiens
aaaatgttatatttt

SEQ ID NO: 840039 - DNA, 15 bp, Homo sapiens
aaatgttatattttc

SEQ ID NO: 840040 - DNA, 15 bp, Homo sapiens
aatgttatattttca

SEQ ID NO: 840041 - DNA, 15 bp, Homo sapiens
atgttatattttcat

SEQ ID NO: 840042 - DNA, 15 bp, Homo sapiens
tgttatattttcatc

SEQ ID NO: 840043 - DNA, 15 bp, Homo sapiens
gttatattttcatct

SEQ ID NO: 840044 - DNA, 15 bp, Homo sapiens
ttatattttcatcta

SEQ ID NO: 840045 - DNA, 15 bp, Homo sapiens
tatattttcatctaa

SEQ ID NO: 840046 - DNA, 15 bp, Homo sapiens
atattttcatctaat

SEQ ID NO: 840047 - DNA, 15 bp, Homo sapiens
tattttcatctaata

SEQ ID NO: 840048 - DNA, 15 bp, Homo sapiens
attttcatctaatat

SEQ ID NO: 840049 - DNA, 15 bp, Homo sapiens
ttttcatctaatatt

SEQ ID NO: 840050 - DNA, 15 bp, Homo sapiens
tttcatctaatattt

SEQ ID NO: 840051 - DNA, 15 bp, Homo sapiens
ttcatctaatatttt

SEQ ID NO: 840052 - DNA, 15 bp, Homo sapiens
tcatctaatattttc

SEQ ID NO: 840053 - DNA, 15 bp, Homo sapiens
catctaatattttcc

SEQ ID NO: 840054 - DNA, 15 bp, Homo sapiens
atctaatattttcct

SEQ ID NO: 840055 - DNA, 15 bp, Homo sapiens
tctaatattttcctc

SEQ ID NO: 840056 - DNA, 15 bp, Homo sapiens
ctaatattttcctct

SEQ ID NO: 840057 - DNA, 15 bp, Homo sapiens
taatattttcctctt

SEQ ID NO: 840058 - DNA, 15 bp, Homo sapiens
aatattttcctcttg

SEQ ID NO: 840059 - DNA, 15 bp, Homo sapiens
atattttcctcttgg

SEQ ID NO: 840060 - DNA, 15 bp, Homo sapiens
tattttcctcttggt

SEQ ID NO: 840061 - DNA, 15 bp, Homo sapiens
attttcctcttggtt

SEQ ID NO: 840062 - DNA, 15 bp, Homo sapiens
ttttcctcttggttt

SEQ ID NO: 840063 - DNA, 15 bp, Homo sapiens
tttcctcttggtttt

SEQ ID NO: 840064 - DNA, 15 bp, Homo sapiens
ttcctcttggtttta

SEQ ID NO: 840065 - DNA, 15 bp, Homo sapiens
tcctcttggttttat

SEQ ID NO: 840066 - DNA, 15 bp, Homo sapiens
cctcttggttttata

SEQ ID NO: 840067 - DNA, 15 bp, Homo sapiens
ctcttggttttatag

SEQ ID NO: 840068 - DNA, 15 bp, Homo sapiens
tcttggttttatagc

SEQ ID NO: 840069 - DNA, 15 bp, Homo sapiens
cttggttttatagct

SEQ ID NO: 840070 - DNA, 15 bp, Homo sapiens
ttggttttatagctg

SEQ ID NO: 840071 - DNA, 15 bp, Homo sapiens
tggttttatagctgt

SEQ ID NO: 840072 - DNA, 15 bp, Homo sapiens
ggttttatagctgta

SEQ ID NO: 840073 - DNA, 15 bp, Homo sapiens
gttttatagctgtaa

SEQ ID NO: 840074 - DNA, 15 bp, Homo sapiens
ttttatagctgtaat

SEQ ID NO: 840075 - DNA, 15 bp, Homo sapiens
tttatagctgtaatc

SEQ ID NO: 840076 - DNA, 15 bp, Homo sapiens
ttatagctgtaatca

SEQ ID NO: 840077 - DNA, 15 bp, Homo sapiens
tatagctgtaatcac

SEQ ID NO: 840078 - DNA, 15 bp, Homo sapiens
atagctgtaatcaca

SEQ ID NO: 840079 - DNA, 15 bp, Homo sapiens
tagctgtaatcacat

SEQ ID NO: 840080 - DNA, 15 bp, Homo sapiens
agctgtaatcacata

SEQ ID NO: 840081 - DNA, 15 bp, Homo sapiens
gctgtaatcacatat

SEQ ID NO: 840082 - DNA, 15 bp, Homo sapiens
ctgtaatcacatatg

SEQ ID NO: 840083 - DNA, 15 bp, Homo sapiens
tgtaatcacatatgg

SEQ ID NO: 840084 - DNA, 15 bp, Homo sapiens
gtaatcacatatgga

SEQ ID NO: 840085 - DNA, 15 bp, Homo sapiens
taatcacatatggat

SEQ ID NO: 840086 - DNA, 15 bp, Homo sapiens
aatcacatatggatt

SEQ ID NO: 840087 - DNA, 15 bp, Homo sapiens
atcacatatggattc

SEQ ID NO: 840088 - DNA, 15 bp, Homo sapiens
tcacatatggattct

SEQ ID NO: 840089 - DNA, 15 bp, Homo sapiens
cacatatggattctt

SEQ ID NO: 840090 - DNA, 15 bp, Homo sapiens
acatatggattcttt

SEQ ID NO: 840091 - DNA, 15 bp, Homo sapiens
catatggattctttt

SEQ ID NO: 840092 - DNA, 15 bp, Homo sapiens
atatggattctttta

SEQ ID NO: 840093 - DNA, 15 bp, Homo sapiens
tatggattcttttat

SEQ ID NO: 840094 - DNA, 15 bp, Homo sapiens
atggattcttttata

SEQ ID NO: 840095 - DNA, 15 bp, Homo sapiens
tggattcttttatat

SEQ ID NO: 840096 - DNA, 15 bp, Homo sapiens
ggattcttttatatg

SEQ ID NO: 840097 - DNA, 15 bp, Homo sapiens
gattcttttatatgg

SEQ ID NO: 840098 - DNA, 15 bp, Homo sapiens
attcttttatatggg

SEQ ID NO: 840099 - DNA, 15 bp, Homo sapiens
ttcttttatatgggt

SEQ ID NO: 840100 - DNA, 15 bp, Homo sapiens
tcttttatatgggtc

SEQ ID NO: 840101 - DNA, 15 bp, Homo sapiens
cttttatatgggtct

SEQ ID NO: 840102 - DNA, 15 bp, Homo sapiens
ttttatatgggtctt

SEQ ID NO: 840103 - DNA, 15 bp, Homo sapiens
tttatatgggtcttg

SEQ ID NO: 840104 - DNA, 15 bp, Homo sapiens
ttatatgggtcttgg

SEQ ID NO: 840105 - DNA, 15 bp, Homo sapiens
tatatgggtcttggc

SEQ ID NO: 840106 - DNA, 15 bp, Homo sapiens
atatgggtcttggca

SEQ ID NO: 840107 - DNA, 15 bp, Homo sapiens
tatgggtcttggcat

SEQ ID NO: 840108 - DNA, 15 bp, Homo sapiens
atgggtcttggcatg

SEQ ID NO: 840109 - DNA, 15 bp, Homo sapiens
tgggtcttggcatgg

SEQ ID NO: 840110 - DNA, 15 bp, Homo sapiens
gggtcttggcatgga

SEQ ID NO: 840111 - DNA, 15 bp, Homo sapiens
ggtcttggcatggac

SEQ ID NO: 840112 - DNA, 15 bp, Homo sapiens
gtcttggcatggact

SEQ ID NO: 840113 - DNA, 15 bp, Homo sapiens
tcttggcatggactg

SEQ ID NO: 840114 - DNA, 15 bp, Homo sapiens
cttggcatggactga

SEQ ID NO: 840115 - DNA, 15 bp, Homo sapiens
ttggcatggactgaa

SEQ ID NO: 840116 - DNA, 15 bp, Homo sapiens
tggcatggactgaac

SEQ ID NO: 840117 - DNA, 15 bp, Homo sapiens
ggcatggactgaaca

SEQ ID NO: 840118 - DNA, 15 bp, Homo sapiens
gcatggactgaacaa

SEQ ID NO: 840119 - DNA, 15 bp, Homo sapiens
catggactgaacaaa

SEQ ID NO: 840120 - DNA, 15 bp, Homo sapiens
atggactgaacaaag

SEQ ID NO: 840121 - DNA, 15 bp, Homo sapiens
tggactgaacaaaga

SEQ ID NO: 840122 - DNA, 15 bp, Homo sapiens
ggactgaacaaagag

SEQ ID NO: 840123 - DNA, 15 bp, Homo sapiens
gactgaacaaagaga

SEQ ID NO: 840124 - DNA, 15 bp, Homo sapiens
actgaacaaagagaa

SEQ ID NO: 840125 - DNA, 15 bp, Homo sapiens
ctgaacaaagagaaa

SEQ ID NO: 840126 - DNA, 15 bp, Homo sapiens
tgaacaaagagaaag

SEQ ID NO: 840127 - DNA, 15 bp, Homo sapiens
gaacaaagagaaagg

SEQ ID NO: 840128 - DNA, 15 bp, Homo sapiens
aacaaagagaaaggc

SEQ ID NO: 840129 - DNA, 15 bp, Homo sapiens
acaaagagaaaggca

SEQ ID NO: 840130 - DNA, 15 bp, Homo sapiens
caaagagaaaggcag

SEQ ID NO: 840131 - DNA, 15 bp, Homo sapiens
aaagagaaaggcagc

SEQ ID NO: 840132 - DNA, 15 bp, Homo sapiens
aagagaaaggcagca

SEQ ID NO: 840133 - DNA, 15 bp, Homo sapiens
agagaaaggcagcac

SEQ ID NO: 840134 - DNA, 15 bp, Homo sapiens
gagaaaggcagcaca

SEQ ID NO: 840135 - DNA, 15 bp, Homo sapiens
agaaaggcagcacag

SEQ ID NO: 840136 - DNA, 15 bp, Homo sapiens
gaaaggcagcacaga

SEQ ID NO: 840137 - DNA, 15 bp, Homo sapiens
aaaggcagcacagaa

SEQ ID NO: 840138 - DNA, 15 bp, Homo sapiens
aaggcagcacagaaa

SEQ ID NO: 840139 - DNA, 15 bp, Homo sapiens
aggcagcacagaaag

SEQ ID NO: 840140 - DNA, 15 bp, Homo sapiens
ggcagcacagaaaga

SEQ ID NO: 840141 - DNA, 15 bp, Homo sapiens
gcagcacagaaagat

SEQ ID NO: 840142 - DNA, 15 bp, Homo sapiens
cagcacagaaagatt

SEQ ID NO: 840143 - DNA, 15 bp, Homo sapiens
agcacagaaagatta

SEQ ID NO: 840144 - DNA, 15 bp, Homo sapiens
gcacagaaagattac

SEQ ID NO: 840145 - DNA, 15 bp, Homo sapiens
cacagaaagattaca

SEQ ID NO: 840146 - DNA, 15 bp, Homo sapiens
acagaaagattacat

SEQ ID NO: 840147 - DNA, 15 bp, Homo sapiens
cagaaagattacata

SEQ ID NO: 840148 - DNA, 15 bp, Homo sapiens
agaaagattacataa

SEQ ID NO: 840149 - DNA, 15 bp, Homo sapiens
gaaagattacataac

SEQ ID NO: 840150 - DNA, 15 bp, Homo sapiens
aaagattacataaca

SEQ ID NO: 840151 - DNA, 15 bp, Homo sapiens
aagattacataacat

SEQ ID NO: 840152 - DNA, 15 bp, Homo sapiens
agattacataacata

SEQ ID NO: 840153 - DNA, 15 bp, Homo sapiens
gattacataacatat

SEQ ID NO: 840154 - DNA, 15 bp, Homo sapiens
attacataacatata

SEQ ID NO: 840155 - DNA, 15 bp, Homo sapiens
ttacataacatatac

SEQ ID NO: 840156 - DNA, 15 bp, Homo sapiens
tacataacatataca

SEQ ID NO: 840157 - DNA, 15 bp, Homo sapiens
acataacatatacac

SEQ ID NO: 840158 - DNA, 15 bp, Homo sapiens
cataacatatacaca

SEQ ID NO: 840159 - DNA, 15 bp, Homo sapiens
ataacatatacacag

SEQ ID NO: 840160 - DNA, 15 bp, Homo sapiens
taacatatacacaga

SEQ ID NO: 840161 - DNA, 15 bp, Homo sapiens
aacatatacacagag

SEQ ID NO: 840162 - DNA, 15 bp, Homo sapiens
acatatacacagagt

SEQ ID NO: 840163 - DNA, 15 bp, Homo sapiens
catatacacagagtc

SEQ ID NO: 840164 - DNA, 15 bp, Homo sapiens
atatacacagagtcc

SEQ ID NO: 840165 - DNA, 15 bp, Homo sapiens
tatacacagagtccg

SEQ ID NO: 840166 - DNA, 15 bp, Homo sapiens
atacacagagtccgg

SEQ ID NO: 840167 - DNA, 15 bp, Homo sapiens
tacacagagtccggt

SEQ ID NO: 840168 - DNA, 15 bp, Homo sapiens
acacagagtccggtg

SEQ ID NO: 840169 - DNA, 15 bp, Homo sapiens
cacagagtccggtgc

SEQ ID NO: 840170 - DNA, 15 bp, Homo sapiens
acagagtccggtgcc

SEQ ID NO: 840171 - DNA, 15 bp, Homo sapiens
cagagtccggtgccc

SEQ ID NO: 840172 - DNA, 15 bp, Homo sapiens
agagtccggtgccca

SEQ ID NO: 840173 - DNA, 15 bp, Homo sapiens
gagtccggtgcccag

SEQ ID NO: 840174 - DNA, 15 bp, Homo sapiens
agtccggtgcccagc

SEQ ID NO: 840175 - DNA, 15 bp, Homo sapiens
gtccggtgcccagcg

SEQ ID NO: 840176 - DNA, 15 bp, Homo sapiens
tccggtgcccagcga

SEQ ID NO: 840177 - DNA, 15 bp, Homo sapiens
ccggtgcccagcgag

SEQ ID NO: 840178 - DNA, 15 bp, Homo sapiens
cggtgcccagcgagg

SEQ ID NO: 840179 - DNA, 15 bp, Homo sapiens
ggtgcccagcgagga

SEQ ID NO: 840180 - DNA, 15 bp, Homo sapiens
gtgcccagcgaggat

SEQ ID NO: 840181 - DNA, 15 bp, Homo sapiens
tgcccagcgaggatg

SEQ ID NO: 840182 - DNA, 15 bp, Homo sapiens
gcccagcgaggatgg

SEQ ID NO: 840183 - DNA, 15 bp, Homo sapiens
cccagcgaggatggg

SEQ ID NO: 840184 - DNA, 15 bp, Homo sapiens
ccagcgaggatgggg

SEQ ID NO: 840185 - DNA, 15 bp, Homo sapiens
cagcgaggatggggc

SEQ ID NO: 840186 - DNA, 15 bp, Homo sapiens
agcgaggatggggcc

SEQ ID NO: 840187 - DNA, 15 bp, Homo sapiens
gcgaggatggggccc

SEQ ID NO: 840188 - DNA, 15 bp, Homo sapiens
cgaggatggggcccg

SEQ ID NO: 840189 - DNA, 15 bp, Homo sapiens
gaggatggggcccga

SEQ ID NO: 840190 - DNA, 15 bp, Homo sapiens
aggatggggcccgag

SEQ ID NO: 840191 - DNA, 15 bp, Homo sapiens
ggatggggcccgaga

SEQ ID NO: 840192 - DNA, 15 bp, Homo sapiens
gatggggcccgagaa

SEQ ID NO: 840193 - DNA, 15 bp, Homo sapiens
atggggcccgagaag

SEQ ID NO: 840194 - DNA, 15 bp, Homo sapiens
tggggcccgagaagc

SEQ ID NO: 840195 - DNA, 15 bp, Homo sapiens
ggggcccgagaagcg

SEQ ID NO: 840196 - DNA, 15 bp, Homo sapiens
gggcccgagaagcgg

SEQ ID NO: 840197 - DNA, 15 bp, Homo sapiens
ggcccgagaagcggc

SEQ ID NO: 840198 - DNA, 15 bp, Homo sapiens
gcccgagaagcggca

SEQ ID NO: 840199 - DNA, 15 bp, Homo sapiens
cccgagaagcggcaa

SEQ ID NO: 840200 - DNA, 15 bp, Homo sapiens
ccgagaagcggcaat

SEQ ID NO: 840201 - DNA, 15 bp, Homo sapiens
cgagaagcggcaatg

SEQ ID NO: 840202 - DNA, 15 bp, Homo sapiens
gagaagcggcaatgg

SEQ ID NO: 840203 - DNA, 15 bp, Homo sapiens
agaagcggcaatggt

SEQ ID NO: 840204 - DNA, 15 bp, Homo sapiens
gaagcggcaatggtc

SEQ ID NO: 840205 - DNA, 15 bp, Homo sapiens
aagcggcaatggtca

SEQ ID NO: 840206 - DNA, 15 bp, Homo sapiens
agcggcaatggtcag

SEQ ID NO: 840207 - DNA, 15 bp, Homo sapiens
gcggcaatggtcagg

SEQ ID NO: 840208 - DNA, 15 bp, Homo sapiens
cggcaatggtcagga

SEQ ID NO: 840209 - DNA, 15 bp, Homo sapiens
ggcaatggtcaggac

SEQ ID NO: 840210 - DNA, 15 bp, Homo sapiens
gcaatggtcaggact

SEQ ID NO: 840211 - DNA, 15 bp, Homo sapiens
caatggtcaggactt

SEQ ID NO: 840212 - DNA, 15 bp, Homo sapiens
aatggtcaggactta

SEQ ID NO: 840213 - DNA, 15 bp, Homo sapiens
atggtcaggacttaa

SEQ ID NO: 840214 - DNA, 15 bp, Homo sapiens
tggtcaggacttaat

SEQ ID NO: 840215 - DNA, 15 bp, Homo sapiens
ggtcaggacttaatg

SEQ ID NO: 840216 - DNA, 15 bp, Homo sapiens
gtcaggacttaatgc

SEQ ID NO: 840217 - DNA, 15 bp, Homo sapiens
tcaggacttaatgcg

SEQ ID NO: 840218 - DNA, 15 bp, Homo sapiens
caggacttaatgcga

SEQ ID NO: 840219 - DNA, 15 bp, Homo sapiens
aggacttaatgcgaa

SEQ ID NO: 840220 - DNA, 15 bp, Homo sapiens
ggacttaatgcgaaa

SEQ ID NO: 840221 - DNA, 15 bp, Homo sapiens
gacttaatgcgaaaa

SEQ ID NO: 840222 - DNA, 15 bp, Homo sapiens
acttaatgcgaaaat

SEQ ID NO: 840223 - DNA, 15 bp, Homo sapiens
cttaatgcgaaaatc

SEQ ID NO: 840224 - DNA, 15 bp, Homo sapiens
ttaatgcgaaaatcc

SEQ ID NO: 840225 - DNA, 15 bp, Homo sapiens
taatgcgaaaatcca

SEQ ID NO: 840226 - DNA, 15 bp, Homo sapiens
aatgcgaaaatccag

SEQ ID NO: 840227 - DNA, 15 bp, Homo sapiens
atgcgaaaatccagt

SEQ ID NO: 840228 - DNA, 15 bp, Homo sapiens
tgcgaaaatccagta

SEQ ID NO: 840229 - DNA, 15 bp, Homo sapiens
gcgaaaatccagtag

SEQ ID NO: 840230 - DNA, 15 bp, Homo sapiens
cgaaaatccagtaga

SEQ ID NO: 840231 - DNA, 15 bp, Homo sapiens
gaaaatccagtagaa

SEQ ID NO: 840232 - DNA, 15 bp, Homo sapiens
aaaatccagtagaag

SEQ ID NO: 840233 - DNA, 15 bp, Homo sapiens
aaatccagtagaagc

SEQ ID NO: 840234 - DNA, 15 bp, Homo sapiens
aatccagtagaagct

SEQ ID NO: 840235 - DNA, 15 bp, Homo sapiens
atccagtagaagctg

SEQ ID NO: 840236 - DNA, 15 bp, Homo sapiens
tccagtagaagctga

SEQ ID NO: 840237 - DNA, 15 bp, Homo sapiens
ccagtagaagctgac

SEQ ID NO: 840238 - DNA, 15 bp, Homo sapiens
cagtagaagctgaca

SEQ ID NO: 840239 - DNA, 15 bp, Homo sapiens
agtagaagctgacac

SEQ ID NO: 840240 - DNA, 15 bp, Homo sapiens
gtagaagctgacact

SEQ ID NO: 840241 - DNA, 15 bp, Homo sapiens
tagaagctgacactc

SEQ ID NO: 840242 - DNA, 15 bp, Homo sapiens
agaagctgacactca

SEQ ID NO: 840243 - DNA, 15 bp, Homo sapiens
gaagctgacactcac

SEQ ID NO: 840244 - DNA, 15 bp, Homo sapiens
aagctgacactcacc

SEQ ID NO: 840245 - DNA, 15 bp, Homo sapiens
agctgacactcaccc

SEQ ID NO: 840246 - DNA, 15 bp, Homo sapiens
gctgacactcaccct

SEQ ID NO: 840247 - DNA, 15 bp, Homo sapiens
ctgacactcaccctg

SEQ ID NO: 840248 - DNA, 15 bp, Homo sapiens
tgacactcaccctgg

SEQ ID NO: 840249 - DNA, 15 bp, Homo sapiens
gacactcaccctggc

SEQ ID NO: 840250 - DNA, 15 bp, Homo sapiens
acactcaccctggcc

SEQ ID NO: 840251 - DNA, 15 bp, Homo sapiens
cactcaccctggccc

SEQ ID NO: 840252 - DNA, 15 bp, Homo sapiens
actcaccctggccct

SEQ ID NO: 840253 - DNA, 15 bp, Homo sapiens
ctcaccctggccctt

SEQ ID NO: 840254 - DNA, 15 bp, Homo sapiens
tcaccctggcccttc

SEQ ID NO: 840255 - DNA, 15 bp, Homo sapiens
caccctggcccttct

SEQ ID NO: 840256 - DNA, 15 bp, Homo sapiens
accctggcccttctc

SEQ ID NO: 840257 - DNA, 15 bp, Homo sapiens
ccctggcccttctcg

SEQ ID NO: 840258 - DNA, 15 bp, Homo sapiens
cctggcccttctcgg

SEQ ID NO: 840259 - DNA, 15 bp, Homo sapiens
ctggcccttctcggc

SEQ ID NO: 840260 - DNA, 15 bp, Homo sapiens
tggcccttctcggct

SEQ ID NO: 840261 - DNA, 15 bp, Homo sapiens
ggcccttctcggctg

SEQ ID NO: 840262 - DNA, 15 bp, Homo sapiens
gcccttctcggctgg

SEQ ID NO: 840263 - DNA, 15 bp, Homo sapiens
cccttctcggctggc

SEQ ID NO: 840264 - DNA, 15 bp, Homo sapiens
ccttctcggctggca

SEQ ID NO: 840265 - DNA, 15 bp, Homo sapiens
cttctcggctggcag

SEQ ID NO: 840266 - DNA, 15 bp, Homo sapiens
ttctcggctggcagg

SEQ ID NO: 840267 - DNA, 15 bp, Homo sapiens
tctcggctggcagga

SEQ ID NO: 840268 - DNA, 15 bp, Homo sapiens
ctcggctggcaggat

SEQ ID NO: 840269 - DNA, 15 bp, Homo sapiens
tcggctggcaggata

SEQ ID NO: 840270 - DNA, 15 bp, Homo sapiens
cggctggcaggatat

SEQ ID NO: 840271 - DNA, 15 bp, Homo sapiens
ggctggcaggatata

SEQ ID NO: 840272 - DNA, 15 bp, Homo sapiens
gctggcaggatatag

SEQ ID NO: 840273 - DNA, 15 bp, Homo sapiens
ctggcaggatatagt

SEQ ID NO: 840274 - DNA, 15 bp, Homo sapiens
tggcaggatatagtc

SEQ ID NO: 840275 - DNA, 15 bp, Homo sapiens
ggcaggatatagtca

SEQ ID NO: 840276 - DNA, 15 bp, Homo sapiens
gcaggatatagtcac

SEQ ID NO: 840277 - DNA, 15 bp, Homo sapiens
caggatatagtcact

SEQ ID NO: 840278 - DNA, 15 bp, Homo sapiens
aggatatagtcactg

SEQ ID NO: 840279 - DNA, 15 bp, Homo sapiens
ggatatagtcactga

SEQ ID NO: 840280 - DNA, 15 bp, Homo sapiens
gatatagtcactgat

SEQ ID NO: 840281 - DNA, 15 bp, Homo sapiens
atatagtcactgatg

SEQ ID NO: 840282 - DNA, 15 bp, Homo sapiens
tatagtcactgatgt

SEQ ID NO: 840283 - DNA, 15 bp, Homo sapiens
atagtcactgatgtg

SEQ ID NO: 840284 - DNA, 15 bp, Homo sapiens
tagtcactgatgtga

SEQ ID NO: 840285 - DNA, 15 bp, Homo sapiens
agtcactgatgtgaa

SEQ ID NO: 840286 - DNA, 15 bp, Homo sapiens
gtcactgatgtgaaa

SEQ ID NO: 840287 - DNA, 15 bp, Homo sapiens
tcactgatgtgaaat

SEQ ID NO: 840288 - DNA, 15 bp, Homo sapiens
cactgatgtgaaata

SEQ ID NO: 840289 - DNA, 15 bp, Homo sapiens
actgatgtgaaataa

SEQ ID NO: 840290 - DNA, 15 bp, Homo sapiens
ctgatgtgaaataag

SEQ ID NO: 840291 - DNA, 15 bp, Homo sapiens
tgatgtgaaataaga

SEQ ID NO: 840292 - DNA, 15 bp, Homo sapiens
gatgtgaaataagag

SEQ ID NO: 840293 - DNA, 15 bp, Homo sapiens
atgtgaaataagagc

SEQ ID NO: 840294 - DNA, 15 bp, Homo sapiens
tgtgaaataagagcc

SEQ ID NO: 840295 - DNA, 15 bp, Homo sapiens
gtgaaataagagcca

SEQ ID NO: 840296 - DNA, 15 bp, Homo sapiens
tgaaataagagccat

SEQ ID NO: 840297 - DNA, 15 bp, Homo sapiens
gaaataagagccatc

SEQ ID NO: 840298 - DNA, 15 bp, Homo sapiens
aaataagagccatct

SEQ ID NO: 840299 - DNA, 15 bp, Homo sapiens
aataagagccatctt

SEQ ID NO: 840300 - DNA, 15 bp, Homo sapiens
ataagagccatctta

SEQ ID NO: 840301 - DNA, 15 bp, Homo sapiens
taagagccatcttat

SEQ ID NO: 840302 - DNA, 15 bp, Homo sapiens
aagagccatcttatt

SEQ ID NO: 840303 - DNA, 15 bp, Homo sapiens
agagccatcttattg

SEQ ID NO: 840304 - DNA, 15 bp, Homo sapiens
gagccatcttattga

SEQ ID NO: 840305 - DNA, 15 bp, Homo sapiens
agccatcttattgaa

SEQ ID NO: 840306 - DNA, 15 bp, Homo sapiens
gccatcttattgaac

SEQ ID NO: 840307 - DNA, 15 bp, Homo sapiens
ccatcttattgaaca

SEQ ID NO: 840308 - DNA, 15 bp, Homo sapiens
catcttattgaacaa

SEQ ID NO: 840309 - DNA, 15 bp, Homo sapiens
atcttattgaacaag

SEQ ID NO: 840310 - DNA, 15 bp, Homo sapiens
tcttattgaacaagc

SEQ ID NO: 840311 - DNA, 15 bp, Homo sapiens
cttattgaacaagcc

SEQ ID NO: 840312 - DNA, 15 bp, Homo sapiens
ttattgaacaagcct

SEQ ID NO: 840313 - DNA, 15 bp, Homo sapiens
tattgaacaagcctc

SEQ ID NO: 840314 - DNA, 15 bp, Homo sapiens
attgaacaagcctct

SEQ ID NO: 840315 - DNA, 15 bp, Homo sapiens
ttgaacaagcctctg

SEQ ID NO: 840316 - DNA, 15 bp, Homo sapiens
tgaacaagcctctgg

SEQ ID NO: 840317 - DNA, 15 bp, Homo sapiens
gaacaagcctctggc

SEQ ID NO: 840318 - DNA, 15 bp, Homo sapiens
aacaagcctctggcc

SEQ ID NO: 840319 - DNA, 15 bp, Homo sapiens
acaagcctctggcca

SEQ ID NO: 840320 - DNA, 15 bp, Homo sapiens
caagcctctggccaa

SEQ ID NO: 840321 - DNA, 15 bp, Homo sapiens
aagcctctggccaag

SEQ ID NO: 840322 - DNA, 15 bp, Homo sapiens
agcctctggccaagc

SEQ ID NO: 840323 - DNA, 15 bp, Homo sapiens
gcctctggccaagca

SEQ ID NO: 840324 - DNA, 15 bp, Homo sapiens
cctctggccaagcat

SEQ ID NO: 840325 - DNA, 15 bp, Homo sapiens
ctctggccaagcatc

SEQ ID NO: 840326 - DNA, 15 bp, Homo sapiens
tctggccaagcatca

SEQ ID NO: 840327 - DNA, 15 bp, Homo sapiens
ctggccaagcatcag

SEQ ID NO: 840328 - DNA, 15 bp, Homo sapiens
tggccaagcatcagt

SEQ ID NO: 840329 - DNA, 15 bp, Homo sapiens
ggccaagcatcagtc

SEQ ID NO: 840330 - DNA, 15 bp, Homo sapiens
gccaagcatcagtct

SEQ ID NO: 840331 - DNA, 15 bp, Homo sapiens
ccaagcatcagtctg

SEQ ID NO: 840332 - DNA, 15 bp, Homo sapiens
caagcatcagtctga

SEQ ID NO: 840333 - DNA, 15 bp, Homo sapiens
aagcatcagtctgag

SEQ ID NO: 840334 - DNA, 15 bp, Homo sapiens
agcatcagtctgagc

SEQ ID NO: 840335 - DNA, 15 bp, Homo sapiens
gcatcagtctgagct

SEQ ID NO: 840336 - DNA, 15 bp, Homo sapiens
catcagtctgagctc

SEQ ID NO: 840337 - DNA, 15 bp, Homo sapiens
atcagtctgagctct

SEQ ID NO: 840338 - DNA, 15 bp, Homo sapiens
tcagtctgagctctt

SEQ ID NO: 840339 - DNA, 15 bp, Homo sapiens
cagtctgagctcttt

SEQ ID NO: 840340 - DNA, 15 bp, Homo sapiens
agtctgagctctttc

SEQ ID NO: 840341 - DNA, 15 bp, Homo sapiens
gtctgagctctttca

SEQ ID NO: 840342 - DNA, 15 bp, Homo sapiens
tctgagctctttcag

SEQ ID NO: 840343 - DNA, 15 bp, Homo sapiens
ctgagctctttcaga

SEQ ID NO: 840344 - DNA, 15 bp, Homo sapiens
tgagctctttcagag

SEQ ID NO: 840345 - DNA, 15 bp, Homo sapiens
gagctctttcagaga

SEQ ID NO: 840346 - DNA, 15 bp, Homo sapiens
agctctttcagagat

SEQ ID NO: 840347 - DNA, 15 bp, Homo sapiens
gctctttcagagata

SEQ ID NO: 840348 - DNA, 15 bp, Homo sapiens
ctctttcagagataa

SEQ ID NO: 840349 - DNA, 15 bp, Homo sapiens
tctttcagagataat

SEQ ID NO: 840350 - DNA, 15 bp, Homo sapiens
ctttcagagataatt

SEQ ID NO: 840351 - DNA, 15 bp, Homo sapiens
tttcagagataattg

SEQ ID NO: 840352 - DNA, 15 bp, Homo sapiens
ttcagagataattgg

SEQ ID NO: 840353 - DNA, 15 bp, Homo sapiens
tcagagataattggc

SEQ ID NO: 840354 - DNA, 15 bp, Homo sapiens
cagagataattggcc

SEQ ID NO: 840355 - DNA, 15 bp, Homo sapiens
agagataattggcct

SEQ ID NO: 840356 - DNA, 15 bp, Homo sapiens
gagataattggcctt

SEQ ID NO: 840357 - DNA, 15 bp, Homo sapiens
agataattggccttt

SEQ ID NO: 840358 - DNA, 15 bp, Homo sapiens
gataattggccttta

SEQ ID NO: 840359 - DNA, 15 bp, Homo sapiens
ataattggcctttaa

SEQ ID NO: 840360 - DNA, 15 bp, Homo sapiens
taattggcctttaat

SEQ ID NO: 840361 - DNA, 15 bp, Homo sapiens
aattggcctttaatt

SEQ ID NO: 840362 - DNA, 15 bp, Homo sapiens
attggcctttaatta

SEQ ID NO: 840363 - DNA, 15 bp, Homo sapiens
ttggcctttaattaa

SEQ ID NO: 840364 - DNA, 15 bp, Homo sapiens
tggcctttaattaat

SEQ ID NO: 840365 - DNA, 15 bp, Homo sapiens
ggcctttaattaatt

SEQ ID NO: 840366 - DNA, 15 bp, Homo sapiens
gcctttaattaattg

SEQ ID NO: 840367 - DNA, 15 bp, Homo sapiens
cctttaattaattgc

SEQ ID NO: 840368 - DNA, 15 bp, Homo sapiens
ctttaattaattgca

SEQ ID NO: 840369 - DNA, 15 bp, Homo sapiens
tttaattaattgcat

SEQ ID NO: 840370 - DNA, 15 bp, Homo sapiens
ttaattaattgcatg

SEQ ID NO: 840371 - DNA, 15 bp, Homo sapiens
taattaattgcatgc

SEQ ID NO: 840372 - DNA, 15 bp, Homo sapiens
aattaattgcatgca

SEQ ID NO: 840373 - DNA, 15 bp, Homo sapiens
attaattgcatgcat

SEQ ID NO: 840374 - DNA, 15 bp, Homo sapiens
ttaattgcatgcatt

SEQ ID NO: 840375 - DNA, 15 bp, Homo sapiens
taattgcatgcattc

SEQ ID NO: 840376 - DNA, 15 bp, Homo sapiens
aattgcatgcattcc

SEQ ID NO: 840377 - DNA, 15 bp, Homo sapiens
attgcatgcattcct

SEQ ID NO: 840378 - DNA, 15 bp, Homo sapiens
ttgcatgcattcctg

SEQ ID NO: 840379 - DNA, 15 bp, Homo sapiens
tgcatgcattcctga

SEQ ID NO: 840380 - DNA, 15 bp, Homo sapiens
gcatgcattcctgag

SEQ ID NO: 840381 - DNA, 15 bp, Homo sapiens
catgcattcctgagt

SEQ ID NO: 840382 - DNA, 15 bp, Homo sapiens
atgcattcctgagtc

SEQ ID NO: 840383 - DNA, 15 bp, Homo sapiens
tgcattcctgagtcc

SEQ ID NO: 840384 - DNA, 15 bp, Homo sapiens
gcattcctgagtcca

SEQ ID NO: 840385 - DNA, 15 bp, Homo sapiens
cattcctgagtccac

SEQ ID NO: 840386 - DNA, 15 bp, Homo sapiens
attcctgagtccacc

SEQ ID NO: 840387 - DNA, 15 bp, Homo sapiens
ttcctgagtccacct

SEQ ID NO: 840388 - DNA, 15 bp, Homo sapiens
tcctgagtccacctg

SEQ ID NO: 840389 - DNA, 15 bp, Homo sapiens
cctgagtccacctgg

SEQ ID NO: 840390 - DNA, 15 bp, Homo sapiens
ctgagtccacctggg

SEQ ID NO: 840391 - DNA, 15 bp, Homo sapiens
tgagtccacctgggt

SEQ ID NO: 840392 - DNA, 15 bp, Homo sapiens
gagtccacctgggta

SEQ ID NO: 840393 - DNA, 15 bp, Homo sapiens
agtccacctgggtat

SEQ ID NO: 840394 - DNA, 15 bp, Homo sapiens
gtccacctgggtatc

SEQ ID NO: 840395 - DNA, 15 bp, Homo sapiens
tccacctgggtatcc

SEQ ID NO: 840396 - DNA, 15 bp, Homo sapiens
ccacctgggtatcca

SEQ ID NO: 840397 - DNA, 15 bp, Homo sapiens
cacctgggtatccac

SEQ ID NO: 840398 - DNA, 15 bp, Homo sapiens
acctgggtatccaca

SEQ ID NO: 840399 - DNA, 15 bp, Homo sapiens
cctgggtatccacag

SEQ ID NO: 840400 - DNA, 15 bp, Homo sapiens
ctgggtatccacaga

SEQ ID NO: 840401 - DNA, 15 bp, Homo sapiens
tgggtatccacagac

SEQ ID NO: 840402 - DNA, 15 bp, Homo sapiens
gggtatccacagact

SEQ ID NO: 840403 - DNA, 15 bp, Homo sapiens
ggtatccacagactg

SEQ ID NO: 840404 - DNA, 15 bp, Homo sapiens
gtatccacagactgg

SEQ ID NO: 840405 - DNA, 15 bp, Homo sapiens
tatccacagactggg

SEQ ID NO: 840406 - DNA, 15 bp, Homo sapiens
atccacagactgggt

SEQ ID NO: 840407 - DNA, 15 bp, Homo sapiens
tccacagactgggtc

SEQ ID NO: 840408 - DNA, 15 bp, Homo sapiens
ccacagactgggtct

SEQ ID NO: 840409 - DNA, 15 bp, Homo sapiens
cacagactgggtcta

SEQ ID NO: 840410 - DNA, 15 bp, Homo sapiens
acagactgggtctac

SEQ ID NO: 840411 - DNA, 15 bp, Homo sapiens
cagactgggtctact

SEQ ID NO: 840412 - DNA, 15 bp, Homo sapiens
agactgggtctactc

SEQ ID NO: 840413 - DNA, 15 bp, Homo sapiens
gactgggtctactct

SEQ ID NO: 840414 - DNA, 15 bp, Homo sapiens
actgggtctactctg

SEQ ID NO: 840415 - DNA, 15 bp, Homo sapiens
ctgggtctactctgc

SEQ ID NO: 840416 - DNA, 15 bp, Homo sapiens
tgggtctactctgcc

SEQ ID NO: 840417 - DNA, 15 bp, Homo sapiens
gggtctactctgcct

SEQ ID NO: 840418 - DNA, 15 bp, Homo sapiens
ggtctactctgcctc

SEQ ID NO: 840419 - DNA, 15 bp, Homo sapiens
gtctactctgcctcc

SEQ ID NO: 840420 - DNA, 15 bp, Homo sapiens
tctactctgcctccc

SEQ ID NO: 840421 - DNA, 15 bp, Homo sapiens
ctactctgcctcccc

SEQ ID NO: 840422 - DNA, 15 bp, Homo sapiens
tactctgcctcccca

SEQ ID NO: 840423 - DNA, 15 bp, Homo sapiens
actctgcctccccac

SEQ ID NO: 840424 - DNA, 15 bp, Homo sapiens
ctctgcctccccact

SEQ ID NO: 840425 - DNA, 15 bp, Homo sapiens
tctgcctccccactc

SEQ ID NO: 840426 - DNA, 15 bp, Homo sapiens
ctgcctccccactct

SEQ ID NO: 840427 - DNA, 15 bp, Homo sapiens
tgcctccccactctt

SEQ ID NO: 840428 - DNA, 15 bp, Homo sapiens
gcctccccactcttc

SEQ ID NO: 840429 - DNA, 15 bp, Homo sapiens
cctccccactcttcc

SEQ ID NO: 840430 - DNA, 15 bp, Homo sapiens
ctccccactcttcca

SEQ ID NO: 840431 - DNA, 15 bp, Homo sapiens
tccccactcttccaa

SEQ ID NO: 840432 - DNA, 15 bp, Homo sapiens
ccccactcttccaaa

SEQ ID NO: 840433 - DNA, 15 bp, Homo sapiens
cccactcttccaaat

SEQ ID NO: 840434 - DNA, 15 bp, Homo sapiens
ccactcttccaaatt

SEQ ID NO: 840435 - DNA, 15 bp, Homo sapiens
cactcttccaaattt

SEQ ID NO: 840436 - DNA, 15 bp, Homo sapiens
actcttccaaatttt

SEQ ID NO: 840437 - DNA, 15 bp, Homo sapiens
ctcttccaaattttt

SEQ ID NO: 840438 - DNA, 15 bp, Homo sapiens
tcttccaaatttttg

SEQ ID NO: 840439 - DNA, 15 bp, Homo sapiens
cttccaaatttttga

SEQ ID NO: 840440 - DNA, 15 bp, Homo sapiens
ttccaaatttttgac

SEQ ID NO: 840441 - DNA, 15 bp, Homo sapiens
tccaaatttttgact

SEQ ID NO: 840442 - DNA, 15 bp, Homo sapiens
ccaaatttttgactt

SEQ ID NO: 840443 - DNA, 15 bp, Homo sapiens
caaatttttgacttt

SEQ ID NO: 840444 - DNA, 15 bp, Homo sapiens
aaatttttgactttg

SEQ ID NO: 840445 - DNA, 15 bp, Homo sapiens
aatttttgactttgg

SEQ ID NO: 840446 - DNA, 15 bp, Homo sapiens
atttttgactttggt

SEQ ID NO: 840447 - DNA, 15 bp, Homo sapiens
tttttgactttggtt

SEQ ID NO: 840448 - DNA, 15 bp, Homo sapiens
ttttgactttggttt

SEQ ID NO: 840449 - DNA, 15 bp, Homo sapiens
tttgactttggtttt

SEQ ID NO: 840450 - DNA, 15 bp, Homo sapiens
ttgactttggttttt

SEQ ID NO: 840451 - DNA, 15 bp, Homo sapiens
tgactttggtttttt

SEQ ID NO: 840452 - DNA, 15 bp, Homo sapiens
gactttggttttttg

SEQ ID NO: 840453 - DNA, 15 bp, Homo sapiens
actttggttttttga

SEQ ID NO: 840454 - DNA, 15 bp, Homo sapiens
ctttggttttttgag

SEQ ID NO: 840455 - DNA, 15 bp, Homo sapiens
tttggttttttgagt

SEQ ID NO: 840456 - DNA, 15 bp, Homo sapiens
ttggttttttgagtg

SEQ ID NO: 840457 - DNA, 15 bp, Homo sapiens
tggttttttgagtgc

SEQ ID NO: 840458 - DNA, 15 bp, Homo sapiens
ggttttttgagtgcc

SEQ ID NO: 840459 - DNA, 15 bp, Homo sapiens
gttttttgagtgcca

SEQ ID NO: 840460 - DNA, 15 bp, Homo sapiens
ttttttgagtgccat

SEQ ID NO: 840461 - DNA, 15 bp, Homo sapiens
tttttgagtgccatc

SEQ ID NO: 840462 - DNA, 15 bp, Homo sapiens
ttttgagtgccatcc

SEQ ID NO: 840463 - DNA, 15 bp, Homo sapiens
tttgagtgccatcca

SEQ ID NO: 840464 - DNA, 15 bp, Homo sapiens
ttgagtgccatccac

SEQ ID NO: 840465 - DNA, 15 bp, Homo sapiens
tgagtgccatccact

SEQ ID NO: 840466 - DNA, 15 bp, Homo sapiens
gagtgccatccactg

SEQ ID NO: 840467 - DNA, 15 bp, Homo sapiens
agtgccatccactgt

SEQ ID NO: 840468 - DNA, 15 bp, Homo sapiens
gtgccatccactgtt

SEQ ID NO: 840469 - DNA, 15 bp, Homo sapiens
tgccatccactgtta

SEQ ID NO: 840470 - DNA, 15 bp, Homo sapiens
gccatccactgttag

SEQ ID NO: 840471 - DNA, 15 bp, Homo sapiens
ccatccactgttagt

SEQ ID NO: 840472 - DNA, 15 bp, Homo sapiens
catccactgttagtg

SEQ ID NO: 840473 - DNA, 15 bp, Homo sapiens
atccactgttagtga

SEQ ID NO: 840474 - DNA, 15 bp, Homo sapiens
tccactgttagtgat

SEQ ID NO: 840475 - DNA, 15 bp, Homo sapiens
ccactgttagtgatt

SEQ ID NO: 840476 - DNA, 15 bp, Homo sapiens
cactgttagtgattg

SEQ ID NO: 840477 - DNA, 15 bp, Homo sapiens
actgttagtgattgt

SEQ ID NO: 840478 - DNA, 15 bp, Homo sapiens
ctgttagtgattgtt

SEQ ID NO: 840479 - DNA, 15 bp, Homo sapiens
tgttagtgattgtta

SEQ ID NO: 840480 - DNA, 15 bp, Homo sapiens
gttagtgattgttac

SEQ ID NO: 840481 - DNA, 15 bp, Homo sapiens
ttagtgattgttaca

SEQ ID NO: 840482 - DNA, 15 bp, Homo sapiens
tagtgattgttacat

SEQ ID NO: 840483 - DNA, 15 bp, Homo sapiens
agtgattgttacatg

SEQ ID NO: 840484 - DNA, 15 bp, Homo sapiens
gtgattgttacatga

SEQ ID NO: 840485 - DNA, 15 bp, Homo sapiens
tgattgttacatgaa

SEQ ID NO: 840486 - DNA, 15 bp, Homo sapiens
gattgttacatgaaa

SEQ ID NO: 840487 - DNA, 15 bp, Homo sapiens
attgttacatgaaaa

SEQ ID NO: 840488 - DNA, 15 bp, Homo sapiens
ttgttacatgaaaat

SEQ ID NO: 840489 - DNA, 15 bp, Homo sapiens
tgttacatgaaaatc

SEQ ID NO: 840490 - DNA, 15 bp, Homo sapiens
gttacatgaaaatcg

SEQ ID NO: 840491 - DNA, 15 bp, Homo sapiens
ttacatgaaaatcgc

SEQ ID NO: 840492 - DNA, 15 bp, Homo sapiens
tacatgaaaatcgca

SEQ ID NO: 840493 - DNA, 15 bp, Homo sapiens
acatgaaaatcgcaa

SEQ ID NO: 840494 - DNA, 15 bp, Homo sapiens
catgaaaatcgcaaa

SEQ ID NO: 840495 - DNA, 15 bp, Homo sapiens
atgaaaatcgcaaag

SEQ ID NO: 840496 - DNA, 15 bp, Homo sapiens
tgaaaatcgcaaagt

SEQ ID NO: 840497 - DNA, 15 bp, Homo sapiens
gaaaatcgcaaagtc

SEQ ID NO: 840498 - DNA, 15 bp, Homo sapiens
aaaatcgcaaagtcc

SEQ ID NO: 840499 - DNA, 15 bp, Homo sapiens
aaatcgcaaagtcct

SEQ ID NO: 840500 - DNA, 15 bp, Homo sapiens
aatcgcaaagtccta

SEQ ID NO: 840501 - DNA, 15 bp, Homo sapiens
atcgcaaagtcctat

SEQ ID NO: 840502 - DNA, 15 bp, Homo sapiens
tcgcaaagtcctatg

SEQ ID NO: 840503 - DNA, 15 bp, Homo sapiens
cgcaaagtcctatgt

SEQ ID NO: 840504 - DNA, 15 bp, Homo sapiens
gcaaagtcctatgta

SEQ ID NO: 840505 - DNA, 15 bp, Homo sapiens
caaagtcctatgtaa

SEQ ID NO: 840506 - DNA, 15 bp, Homo sapiens
aaagtcctatgtaag

SEQ ID NO: 840507 - DNA, 15 bp, Homo sapiens
aagtcctatgtaagc

SEQ ID NO: 840508 - DNA, 15 bp, Homo sapiens
agtcctatgtaagcc

SEQ ID NO: 840509 - DNA, 15 bp, Homo sapiens
gtcctatgtaagcca

SEQ ID NO: 840510 - DNA, 15 bp, Homo sapiens
tcctatgtaagccat

SEQ ID NO: 840511 - DNA, 15 bp, Homo sapiens
cctatgtaagccata

SEQ ID NO: 840512 - DNA, 15 bp, Homo sapiens
ctatgtaagccataa

SEQ ID NO: 840513 - DNA, 15 bp, Homo sapiens
tatgtaagccataag

SEQ ID NO: 840514 - DNA, 15 bp, Homo sapiens
atgtaagccataagg

SEQ ID NO: 840515 - DNA, 15 bp, Homo sapiens
tgtaagccataagga

SEQ ID NO: 840516 - DNA, 15 bp, Homo sapiens
gtaagccataaggaa

SEQ ID NO: 840517 - DNA, 15 bp, Homo sapiens
taagccataaggaat

SEQ ID NO: 840518 - DNA, 15 bp, Homo sapiens
aagccataaggaata

SEQ ID NO: 840519 - DNA, 15 bp, Homo sapiens
agccataaggaataa

SEQ ID NO: 840520 - DNA, 15 bp, Homo sapiens
gccataaggaataaa

SEQ ID NO: 840521 - DNA, 15 bp, Homo sapiens
ccataaggaataaaa

SEQ ID NO: 840522 - DNA, 15 bp, Homo sapiens
cataaggaataaaat

SEQ ID NO: 840523 - DNA, 15 bp, Homo sapiens
ataaggaataaaata

SEQ ID NO: 840524 - DNA, 15 bp, Homo sapiens
taaggaataaaatat

SEQ ID NO: 840525 - DNA, 15 bp, Homo sapiens
aaggaataaaatatc

SEQ ID NO: 840526 - DNA, 15 bp, Homo sapiens
aggaataaaatatca

SEQ ID NO: 840527 - DNA, 15 bp, Homo sapiens
ggaataaaatatcag

SEQ ID NO: 840528 - DNA, 15 bp, Homo sapiens
gaataaaatatcaga

SEQ ID NO: 840529 - DNA, 15 bp, Homo sapiens
aataaaatatcagat

SEQ ID NO: 840530 - DNA, 15 bp, Homo sapiens
ataaaatatcagatt

SEQ ID NO: 840531 - DNA, 15 bp, Homo sapiens
taaaatatcagattt

SEQ ID NO: 840532 - DNA, 15 bp, Homo sapiens
aaaatatcagatttc

SEQ ID NO: 840533 - DNA, 15 bp, Homo sapiens
aaatatcagatttcc

SEQ ID NO: 840534 - DNA, 15 bp, Homo sapiens
aatatcagatttcct

SEQ ID NO: 840535 - DNA, 15 bp, Homo sapiens
atatcagatttcctt

SEQ ID NO: 840536 - DNA, 15 bp, Homo sapiens
tatcagatttcctta

SEQ ID NO: 840537 - DNA, 15 bp, Homo sapiens
atcagatttccttaa

SEQ ID NO: 840538 - DNA, 15 bp, Homo sapiens
tcagatttccttaag

SEQ ID NO: 840539 - DNA, 15 bp, Homo sapiens
cagatttccttaagt

SEQ ID NO: 840540 - DNA, 15 bp, Homo sapiens
agatttccttaagtc

SEQ ID NO: 840541 - DNA, 15 bp, Homo sapiens
gatttccttaagtct

SEQ ID NO: 840542 - DNA, 15 bp, Homo sapiens
atttccttaagtcta

SEQ ID NO: 840543 - DNA, 15 bp, Homo sapiens
tttccttaagtctat

SEQ ID NO: 840544 - DNA, 15 bp, Homo sapiens
ttccttaagtctatt

SEQ ID NO: 840545 - DNA, 15 bp, Homo sapiens
tccttaagtctattg

SEQ ID NO: 840546 - DNA, 15 bp, Homo sapiens
ccttaagtctattgg

SEQ ID NO: 840547 - DNA, 15 bp, Homo sapiens
cttaagtctattggt

SEQ ID NO: 840548 - DNA, 15 bp, Homo sapiens
ttaagtctattggtt

SEQ ID NO: 840549 - DNA, 15 bp, Homo sapiens
taagtctattggttg

SEQ ID NO: 840550 - DNA, 15 bp, Homo sapiens
aagtctattggttgt

SEQ ID NO: 840551 - DNA, 15 bp, Homo sapiens
agtctattggttgtc

SEQ ID NO: 840552 - DNA, 15 bp, Homo sapiens
gtctattggttgtcg

SEQ ID NO: 840553 - DNA, 15 bp, Homo sapiens
tctattggttgtcgt

SEQ ID NO: 840554 - DNA, 15 bp, Homo sapiens
ctattggttgtcgtt

SEQ ID NO: 840555 - DNA, 15 bp, Homo sapiens
tattggttgtcgttg

SEQ ID NO: 840556 - DNA, 15 bp, Homo sapiens
attggttgtcgttgc

SEQ ID NO: 840557 - DNA, 15 bp, Homo sapiens
ttggttgtcgttgcc

SEQ ID NO: 840558 - DNA, 15 bp, Homo sapiens
tggttgtcgttgccc

SEQ ID NO: 840559 - DNA, 15 bp, Homo sapiens
ggttgtcgttgccct

SEQ ID NO: 840560 - DNA, 15 bp, Homo sapiens
gttgtcgttgcccta

SEQ ID NO: 840561 - DNA, 15 bp, Homo sapiens
ttgtcgttgccctaa

SEQ ID NO: 840562 - DNA, 15 bp, Homo sapiens
tgtcgttgccctaag

SEQ ID NO: 840563 - DNA, 15 bp, Homo sapiens
gtcgttgccctaagg

SEQ ID NO: 840564 - DNA, 15 bp, Homo sapiens
tcgttgccctaaggt

SEQ ID NO: 840565 - DNA, 15 bp, Homo sapiens
cgttgccctaaggtg

SEQ ID NO: 840566 - DNA, 15 bp, Homo sapiens
gttgccctaaggtga

SEQ ID NO: 840567 - DNA, 15 bp, Homo sapiens
ttgccctaaggtgat

SEQ ID NO: 840568 - DNA, 15 bp, Homo sapiens
tgccctaaggtgatt

SEQ ID NO: 840569 - DNA, 15 bp, Homo sapiens
gccctaaggtgattt

SEQ ID NO: 840570 - DNA, 15 bp, Homo sapiens
ccctaaggtgatttt

SEQ ID NO: 840571 - DNA, 15 bp, Homo sapiens
cctaaggtgatttta

SEQ ID NO: 840572 - DNA, 15 bp, Homo sapiens
ctaaggtgattttaa

SEQ ID NO: 840573 - DNA, 15 bp, Homo sapiens
taaggtgattttaag

SEQ ID NO: 840574 - DNA, 15 bp, Homo sapiens
aaggtgattttaagt

SEQ ID NO: 840575 - DNA, 15 bp, Homo sapiens
aggtgattttaagtg

SEQ ID NO: 840576 - DNA, 15 bp, Homo sapiens
ggtgattttaagtgt

SEQ ID NO: 840577 - DNA, 15 bp, Homo sapiens
gtgattttaagtgtg

SEQ ID NO: 840578 - DNA, 15 bp, Homo sapiens
tgattttaagtgtga

SEQ ID NO: 840579 - DNA, 15 bp, Homo sapiens
gattttaagtgtgaa

SEQ ID NO: 840580 - DNA, 15 bp, Homo sapiens
attttaagtgtgaat

SEQ ID NO: 840581 - DNA, 15 bp, Homo sapiens
ttttaagtgtgaatc

SEQ ID NO: 840582 - DNA, 15 bp, Homo sapiens
tttaagtgtgaatct

SEQ ID NO: 840583 - DNA, 15 bp, Homo sapiens
ttaagtgtgaatctg

SEQ ID NO: 840584 - DNA, 15 bp, Homo sapiens
taagtgtgaatctgt

SEQ ID NO: 840585 - DNA, 15 bp, Homo sapiens
aagtgtgaatctgtg

SEQ ID NO: 840586 - DNA, 15 bp, Homo sapiens
agtgtgaatctgtgt

SEQ ID NO: 840587 - DNA, 15 bp, Homo sapiens
gtgtgaatctgtgtc

SEQ ID NO: 840588 - DNA, 15 bp, Homo sapiens
tgtgaatctgtgtcc

SEQ ID NO: 840589 - DNA, 15 bp, Homo sapiens
gtgaatctgtgtcca

SEQ ID NO: 840590 - DNA, 15 bp, Homo sapiens
tgaatctgtgtccag

SEQ ID NO: 840591 - DNA, 15 bp, Homo sapiens
gaatctgtgtccaga

SEQ ID NO: 840592 - DNA, 15 bp, Homo sapiens
aatctgtgtccagaa

SEQ ID NO: 840593 - DNA, 15 bp, Homo sapiens
atctgtgtccagaac

SEQ ID NO: 840594 - DNA, 15 bp, Homo sapiens
tctgtgtccagaaca

SEQ ID NO: 840595 - DNA, 15 bp, Homo sapiens
ctgtgtccagaacaa

SEQ ID NO: 840596 - DNA, 15 bp, Homo sapiens
tgtgtccagaacaat

SEQ ID NO: 840597 - DNA, 15 bp, Homo sapiens
gtgtccagaacaatg

SEQ ID NO: 840598 - DNA, 15 bp, Homo sapiens
tgtccagaacaatga

SEQ ID NO: 840599 - DNA, 15 bp, Homo sapiens
gtccagaacaatgat

SEQ ID NO: 840600 - DNA, 15 bp, Homo sapiens
tccagaacaatgatg

SEQ ID NO: 840601 - DNA, 15 bp, Homo sapiens
ccagaacaatgatga

SEQ ID NO: 840602 - DNA, 15 bp, Homo sapiens
cagaacaatgatgag

SEQ ID NO: 840603 - DNA, 15 bp, Homo sapiens
agaacaatgatgagg

SEQ ID NO: 840604 - DNA, 15 bp, Homo sapiens
gaacaatgatgagga

SEQ ID NO: 840605 - DNA, 15 bp, Homo sapiens
aacaatgatgaggaa

SEQ ID NO: 840606 - DNA, 15 bp, Homo sapiens
acaatgatgaggaat

SEQ ID NO: 840607 - DNA, 15 bp, Homo sapiens
caatgatgaggaatt

SEQ ID NO: 840608 - DNA, 15 bp, Homo sapiens
aatgatgaggaattt

SEQ ID NO: 840609 - DNA, 15 bp, Homo sapiens
atgatgaggaatttg

SEQ ID NO: 840610 - DNA, 15 bp, Homo sapiens
tgatgaggaatttgg

SEQ ID NO: 840611 - DNA, 15 bp, Homo sapiens
gatgaggaatttgga

SEQ ID NO: 840612 - DNA, 15 bp, Homo sapiens
atgaggaatttggaa

SEQ ID NO: 840613 - DNA, 15 bp, Homo sapiens
tgaggaatttggaac

SEQ ID NO: 840614 - DNA, 15 bp, Homo sapiens
gaggaatttggaact

SEQ ID NO: 840615 - DNA, 15 bp, Homo sapiens
aggaatttggaactt

SEQ ID NO: 840616 - DNA, 15 bp, Homo sapiens
ggaatttggaacttt

SEQ ID NO: 840617 - DNA, 15 bp, Homo sapiens
gaatttggaactttg

SEQ ID NO: 840618 - DNA, 15 bp, Homo sapiens
aatttggaactttga

SEQ ID NO: 840619 - DNA, 15 bp, Homo sapiens
atttggaactttgag

SEQ ID NO: 840620 - DNA, 15 bp, Homo sapiens
tttggaactttgagg

SEQ ID NO: 840621 - DNA, 15 bp, Homo sapiens
ttggaactttgaggc

SEQ ID NO: 840622 - DNA, 15 bp, Homo sapiens
tggaactttgaggca

SEQ ID NO: 840623 - DNA, 15 bp, Homo sapiens
ggaactttgaggcaa

SEQ ID NO: 840624 - DNA, 15 bp, Homo sapiens
gaactttgaggcaac

SEQ ID NO: 840625 - DNA, 15 bp, Homo sapiens
aactttgaggcaact

SEQ ID NO: 840626 - DNA, 15 bp, Homo sapiens
actttgaggcaacta

SEQ ID NO: 840627 - DNA, 15 bp, Homo sapiens
ctttgaggcaactat

SEQ ID NO: 840628 - DNA, 15 bp, Homo sapiens
tttgaggcaactatt

SEQ ID NO: 840629 - DNA, 15 bp, Homo sapiens
ttgaggcaactattc

SEQ ID NO: 840630 - DNA, 15 bp, Homo sapiens
tgaggcaactattct

SEQ ID NO: 840631 - DNA, 15 bp, Homo sapiens
gaggcaactattcta

SEQ ID NO: 840632 - DNA, 15 bp, Homo sapiens
aggcaactattctac

SEQ ID NO: 840633 - DNA, 15 bp, Homo sapiens
ggcaactattctaca

SEQ ID NO: 840634 - DNA, 15 bp, Homo sapiens
gcaactattctacac

SEQ ID NO: 840635 - DNA, 15 bp, Homo sapiens
caactattctacaca

SEQ ID NO: 840636 - DNA, 15 bp, Homo sapiens
aactattctacacat

SEQ ID NO: 840637 - DNA, 15 bp, Homo sapiens
actattctacacatc

SEQ ID NO: 840638 - DNA, 15 bp, Homo sapiens
ctattctacacatct

SEQ ID NO: 840639 - DNA, 15 bp, Homo sapiens
tattctacacatcta

SEQ ID NO: 840640 - DNA, 15 bp, Homo sapiens
attctacacatctag

SEQ ID NO: 840641 - DNA, 15 bp, Homo sapiens
ttctacacatctagg

SEQ ID NO: 840642 - DNA, 15 bp, Homo sapiens
tctacacatctaggg

SEQ ID NO: 840643 - DNA, 15 bp, Homo sapiens
ctacacatctagggg

SEQ ID NO: 840644 - DNA, 15 bp, Homo sapiens
tacacatctaggggt

SEQ ID NO: 840645 - DNA, 15 bp, Homo sapiens
acacatctaggggtg

SEQ ID NO: 840646 - DNA, 15 bp, Homo sapiens
cacatctaggggtgc

SEQ ID NO: 840647 - DNA, 15 bp, Homo sapiens
acatctaggggtgca

SEQ ID NO: 840648 - DNA, 15 bp, Homo sapiens
catctaggggtgcaa

SEQ ID NO: 840649 - DNA, 15 bp, Homo sapiens
atctaggggtgcaaa

SEQ ID NO: 840650 - DNA, 15 bp, Homo sapiens
tctaggggtgcaaaa

SEQ ID NO: 840651 - DNA, 15 bp, Homo sapiens
ctaggggtgcaaaac

SEQ ID NO: 840652 - DNA, 15 bp, Homo sapiens
taggggtgcaaaaca

SEQ ID NO: 840653 - DNA, 15 bp, Homo sapiens
aggggtgcaaaacaa

SEQ ID NO: 840654 - DNA, 15 bp, Homo sapiens
ggggtgcaaaacaag

SEQ ID NO: 840655 - DNA, 15 bp, Homo sapiens
gggtgcaaaacaagg

SEQ ID NO: 840656 - DNA, 15 bp, Homo sapiens
ggtgcaaaacaagga

SEQ ID NO: 840657 - DNA, 15 bp, Homo sapiens
gtgcaaaacaaggaa

SEQ ID NO: 840658 - DNA, 15 bp, Homo sapiens
tgcaaaacaaggaag

SEQ ID NO: 840659 - DNA, 15 bp, Homo sapiens
gcaaaacaaggaagc

SEQ ID NO: 840660 - DNA, 15 bp, Homo sapiens
caaaacaaggaagca

SEQ ID NO: 840661 - DNA, 15 bp, Homo sapiens
aaaacaaggaagcac

SEQ ID NO: 840662 - DNA, 15 bp, Homo sapiens
aaacaaggaagcacc

SEQ ID NO: 840663 - DNA, 15 bp, Homo sapiens
aacaaggaagcacca

SEQ ID NO: 840664 - DNA, 15 bp, Homo sapiens
acaaggaagcaccat

SEQ ID NO: 840665 - DNA, 15 bp, Homo sapiens
caaggaagcaccatt

SEQ ID NO: 840666 - DNA, 15 bp, Homo sapiens
aaggaagcaccattg

SEQ ID NO: 840667 - DNA, 15 bp, Homo sapiens
aggaagcaccattga

SEQ ID NO: 840668 - DNA, 15 bp, Homo sapiens
ggaagcaccattgat

SEQ ID NO: 840669 - DNA, 15 bp, Homo sapiens
gaagcaccattgatt

SEQ ID NO: 840670 - DNA, 15 bp, Homo sapiens
aagcaccattgattt

SEQ ID NO: 840671 - DNA, 15 bp, Homo sapiens
agcaccattgatttg

SEQ ID NO: 840672 - DNA, 15 bp, Homo sapiens
gcaccattgatttga

SEQ ID NO: 840673 - DNA, 15 bp, Homo sapiens
caccattgatttgat

SEQ ID NO: 840674 - DNA, 15 bp, Homo sapiens
accattgatttgata

SEQ ID NO: 840675 - DNA, 15 bp, Homo sapiens
ccattgatttgatac

SEQ ID NO: 840676 - DNA, 15 bp, Homo sapiens
cattgatttgatacc

SEQ ID NO: 840677 - DNA, 15 bp, Homo sapiens
attgatttgataccg

SEQ ID NO: 840678 - DNA, 15 bp, Homo sapiens
ttgatttgataccgt

SEQ ID NO: 840679 - DNA, 15 bp, Homo sapiens
tgatttgataccgtg

SEQ ID NO: 840680 - DNA, 15 bp, Homo sapiens
gatttgataccgtgg

SEQ ID NO: 840681 - DNA, 15 bp, Homo sapiens
atttgataccgtggg

SEQ ID NO: 840682 - DNA, 15 bp, Homo sapiens
tttgataccgtgggt

SEQ ID NO: 840683 - DNA, 15 bp, Homo sapiens
ttgataccgtgggta

SEQ ID NO: 840684 - DNA, 15 bp, Homo sapiens
tgataccgtgggtat

SEQ ID NO: 840685 - DNA, 15 bp, Homo sapiens
gataccgtgggtatt

SEQ ID NO: 840686 - DNA, 15 bp, Homo sapiens
ataccgtgggtattc

SEQ ID NO: 840687 - DNA, 15 bp, Homo sapiens
taccgtgggtattct

SEQ ID NO: 840688 - DNA, 15 bp, Homo sapiens
accgtgggtattctg

SEQ ID NO: 840689 - DNA, 15 bp, Homo sapiens
ccgtgggtattctgt

SEQ ID NO: 840690 - DNA, 15 bp, Homo sapiens
cgtgggtattctgtt

SEQ ID NO: 840691 - DNA, 15 bp, Homo sapiens
gtgggtattctgtta

SEQ ID NO: 840692 - DNA, 15 bp, Homo sapiens
tgggtattctgttaa

SEQ ID NO: 840693 - DNA, 15 bp, Homo sapiens
gggtattctgttaag

SEQ ID NO: 840694 - DNA, 15 bp, Homo sapiens
ggtattctgttaaga

SEQ ID NO: 840695 - DNA, 15 bp, Homo sapiens
gtattctgttaagaa

SEQ ID NO: 840696 - DNA, 15 bp, Homo sapiens
tattctgttaagaac

SEQ ID NO: 840697 - DNA, 15 bp, Homo sapiens
attctgttaagaact

SEQ ID NO: 840698 - DNA, 15 bp, Homo sapiens
ttctgttaagaactt

SEQ ID NO: 840699 - DNA, 15 bp, Homo sapiens
tctgttaagaacttt

SEQ ID NO: 840700 - DNA, 15 bp, Homo sapiens
ctgttaagaactttg

SEQ ID NO: 840701 - DNA, 15 bp, Homo sapiens
tgttaagaactttgg

SEQ ID NO: 840702 - DNA, 15 bp, Homo sapiens
gttaagaactttgga

SEQ ID NO: 840703 - DNA, 15 bp, Homo sapiens
ttaagaactttggaa

SEQ ID NO: 840704 - DNA, 15 bp, Homo sapiens
taagaactttggaat

SEQ ID NO: 840705 - DNA, 15 bp, Homo sapiens
aagaactttggaatt

SEQ ID NO: 840706 - DNA, 15 bp, Homo sapiens
agaactttggaatta

SEQ ID NO: 840707 - DNA, 15 bp, Homo sapiens
gaactttggaattat

SEQ ID NO: 840708 - DNA, 15 bp, Homo sapiens
aactttggaattata

SEQ ID NO: 840709 - DNA, 15 bp, Homo sapiens
actttggaattatag

SEQ ID NO: 840710 - DNA, 15 bp, Homo sapiens
ctttggaattatagt

SEQ ID NO: 840711 - DNA, 15 bp, Homo sapiens
tttggaattatagta

SEQ ID NO: 840712 - DNA, 15 bp, Homo sapiens
ttggaattatagtaa

SEQ ID NO: 840713 - DNA, 15 bp, Homo sapiens
tggaattatagtaat

SEQ ID NO: 840714 - DNA, 15 bp, Homo sapiens
ggaattatagtaata

SEQ ID NO: 840715 - DNA, 15 bp, Homo sapiens
gaattatagtaatac

SEQ ID NO: 840716 - DNA, 15 bp, Homo sapiens
aattatagtaatact

SEQ ID NO: 840717 - DNA, 15 bp, Homo sapiens
attatagtaatactt

SEQ ID NO: 840718 - DNA, 15 bp, Homo sapiens
ttatagtaatacttt

SEQ ID NO: 840719 - DNA, 15 bp, Homo sapiens
tatagtaatacttta

SEQ ID NO: 840720 - DNA, 15 bp, Homo sapiens
atagtaatactttac

SEQ ID NO: 840721 - DNA, 15 bp, Homo sapiens
tagtaatactttacg

SEQ ID NO: 840722 - DNA, 15 bp, Homo sapiens
agtaatactttacgt

SEQ ID NO: 840723 - DNA, 15 bp, Homo sapiens
gtaatactttacgtt

SEQ ID NO: 840724 - DNA, 15 bp, Homo sapiens
taatactttacgttt

SEQ ID NO: 840725 - DNA, 15 bp, Homo sapiens
aatactttacgtttg

SEQ ID NO: 840726 - DNA, 15 bp, Homo sapiens
atactttacgtttgc

SEQ ID NO: 840727 - DNA, 15 bp, Homo sapiens
tactttacgtttgca

SEQ ID NO: 840728 - DNA, 15 bp, Homo sapiens
actttacgtttgcac

SEQ ID NO: 840729 - DNA, 15 bp, Homo sapiens
ctttacgtttgcaca

SEQ ID NO: 840730 - DNA, 15 bp, Homo sapiens
tttacgtttgcacag

SEQ ID NO: 840731 - DNA, 15 bp, Homo sapiens
ttacgtttgcacagc

SEQ ID NO: 840732 - DNA, 15 bp, Homo sapiens
tacgtttgcacagca

SEQ ID NO: 840733 - DNA, 15 bp, Homo sapiens
acgtttgcacagcac

SEQ ID NO: 840734 - DNA, 15 bp, Homo sapiens
cgtttgcacagcact

SEQ ID NO: 840735 - DNA, 15 bp, Homo sapiens
gtttgcacagcactt

SEQ ID NO: 840736 - DNA, 15 bp, Homo sapiens
tttgcacagcacttt

SEQ ID NO: 840737 - DNA, 15 bp, Homo sapiens
ttgcacagcactttt

SEQ ID NO: 840738 - DNA, 15 bp, Homo sapiens
tgcacagcacttttc

SEQ ID NO: 840739 - DNA, 15 bp, Homo sapiens
gcacagcacttttca

SEQ ID NO: 840740 - DNA, 15 bp, Homo sapiens
cacagcacttttcag

SEQ ID NO: 840741 - DNA, 15 bp, Homo sapiens
acagcacttttcagt

SEQ ID NO: 840742 - DNA, 15 bp, Homo sapiens
cagcacttttcagtt

SEQ ID NO: 840743 - DNA, 15 bp, Homo sapiens
agcacttttcagttt

SEQ ID NO: 840744 - DNA, 15 bp, Homo sapiens
gcacttttcagttta

SEQ ID NO: 840745 - DNA, 15 bp, Homo sapiens
cacttttcagtttac

SEQ ID NO: 840746 - DNA, 15 bp, Homo sapiens
acttttcagtttacg

SEQ ID NO: 840747 - DNA, 15 bp, Homo sapiens
cttttcagtttacgt

SEQ ID NO: 840748 - DNA, 15 bp, Homo sapiens
ttttcagtttacgtg

SEQ ID NO: 840749 - DNA, 15 bp, Homo sapiens
tttcagtttacgtga

SEQ ID NO: 840750 - DNA, 15 bp, Homo sapiens
ttcagtttacgtgat

SEQ ID NO: 840751 - DNA, 15 bp, Homo sapiens
tcagtttacgtgata

SEQ ID NO: 840752 - DNA, 15 bp, Homo sapiens
cagtttacgtgatat

SEQ ID NO: 840753 - DNA, 15 bp, Homo sapiens
agtttacgtgatata

SEQ ID NO: 840754 - DNA, 15 bp, Homo sapiens
gtttacgtgatatac

SEQ ID NO: 840755 - DNA, 15 bp, Homo sapiens
tttacgtgatatacc

SEQ ID NO: 840756 - DNA, 15 bp, Homo sapiens
ttacgtgatatacct

SEQ ID NO: 840757 - DNA, 15 bp, Homo sapiens
tacgtgatatacctt

SEQ ID NO: 840758 - DNA, 15 bp, Homo sapiens
acgtgatataccttt

SEQ ID NO: 840759 - DNA, 15 bp, Homo sapiens
cgtgatatacctttt

SEQ ID NO: 840760 - DNA, 15 bp, Homo sapiens
gtgatataccttttt

SEQ ID NO: 840761 - DNA, 15 bp, Homo sapiens
tgatatacctttttt

SEQ ID NO: 840762 - DNA, 15 bp, Homo sapiens
gatataccttttttt

SEQ ID NO: 840763 - DNA, 15 bp, Homo sapiens
atatacctttttttt

SEQ ID NO: 840764 - DNA, 15 bp, Homo sapiens
tataccttttttttt

SEQ ID NO: 840765 - DNA, 15 bp, Homo sapiens
atacctttttttttt

SEQ ID NO: 840766 - DNA, 15 bp, Homo sapiens
taccttttttttttg

SEQ ID NO: 840767 - DNA, 15 bp, Homo sapiens
accttttttttttga

SEQ ID NO: 840768 - DNA, 15 bp, Homo sapiens
ccttttttttttgag

SEQ ID NO: 840769 - DNA, 15 bp, Homo sapiens
cttttttttttgaga

SEQ ID NO: 840770 - DNA, 15 bp, Homo sapiens
tttttgagacggaga

SEQ ID NO: 840771 - DNA, 15 bp, Homo sapiens
ttttgagacggagat

SEQ ID NO: 840772 - DNA, 15 bp, Homo sapiens
tttgagacggagatt

SEQ ID NO: 840773 - DNA, 15 bp, Homo sapiens
ttgagacggagattt

SEQ ID NO: 840774 - DNA, 15 bp, Homo sapiens
tgagacggagatttc

SEQ ID NO: 840775 - DNA, 15 bp, Homo sapiens
gagacggagatttcg

SEQ ID NO: 840776 - DNA, 15 bp, Homo sapiens
agacggagatttcgc

SEQ ID NO: 840777 - DNA, 15 bp, Homo sapiens
gacggagatttcgct

SEQ ID NO: 840778 - DNA, 15 bp, Homo sapiens
acggagatttcgctg

SEQ ID NO: 840779 - DNA, 15 bp, Homo sapiens
cggagatttcgctgt

SEQ ID NO: 840780 - DNA, 15 bp, Homo sapiens
ggagatttcgctgtc

SEQ ID NO: 840781 - DNA, 15 bp, Homo sapiens
gagatttcgctgtct

SEQ ID NO: 840782 - DNA, 15 bp, Homo sapiens
agatttcgctgtctc

SEQ ID NO: 840783 - DNA, 15 bp, Homo sapiens
gatttcgctgtctca

SEQ ID NO: 840784 - DNA, 15 bp, Homo sapiens
atttcgctgtctcac

SEQ ID NO: 840785 - DNA, 15 bp, Homo sapiens
tttcgctgtctcacc

SEQ ID NO: 840786 - DNA, 15 bp, Homo sapiens
ttcgctgtctcaccc

SEQ ID NO: 840787 - DNA, 15 bp, Homo sapiens
tcgctgtctcaccca

SEQ ID NO: 840788 - DNA, 15 bp, Homo sapiens
cgctgtctcacccag

SEQ ID NO: 840789 - DNA, 15 bp, Homo sapiens
gctgtctcacccagg

SEQ ID NO: 840790 - DNA, 15 bp, Homo sapiens
ctgtctcacccaggc

SEQ ID NO: 840791 - DNA, 15 bp, Homo sapiens
tgtctcacccaggct

SEQ ID NO: 840792 - DNA, 15 bp, Homo sapiens
gtctcacccaggctg

SEQ ID NO: 840793 - DNA, 15 bp, Homo sapiens
tctcacccaggctgg

SEQ ID NO: 840794 - DNA, 15 bp, Homo sapiens
ctcacccaggctgga

SEQ ID NO: 840795 - DNA, 15 bp, Homo sapiens
ctggagtgcggtggt

SEQ ID NO: 840796 - DNA, 15 bp, Homo sapiens
tggagtgcggtggtg

SEQ ID NO: 840797 - DNA, 15 bp, Homo sapiens
ggagtgcggtggtgc

SEQ ID NO: 840798 - DNA, 15 bp, Homo sapiens
gagtgcggtggtgca

SEQ ID NO: 840799 - DNA, 15 bp, Homo sapiens
agtgcggtggtgcag

SEQ ID NO: 840800 - DNA, 15 bp, Homo sapiens
gtgcggtggtgcagt

SEQ ID NO: 840801 - DNA, 15 bp, Homo sapiens
tgcggtggtgcagtc

SEQ ID NO: 840802 - DNA, 15 bp, Homo sapiens
gcggtggtgcagtct

SEQ ID NO: 840803 - DNA, 15 bp, Homo sapiens
cggtggtgcagtctc

SEQ ID NO: 840804 - DNA, 15 bp, Homo sapiens
ggtggtgcagtctcg

SEQ ID NO: 840805 - DNA, 15 bp, Homo sapiens
ctgcaacctccgccc

SEQ ID NO: 840806 - DNA, 15 bp, Homo sapiens
tgcaacctccgccca

SEQ ID NO: 840807 - DNA, 15 bp, Homo sapiens
gcaacctccgcccac

SEQ ID NO: 840808 - DNA, 15 bp, Homo sapiens
caacctccgcccacc

SEQ ID NO: 840809 - DNA, 15 bp, Homo sapiens
aacctccgcccacct

SEQ ID NO: 840810 - DNA, 15 bp, Homo sapiens
acctccgcccacctc

SEQ ID NO: 840811 - DNA, 15 bp, Homo sapiens
cctccgcccacctct

SEQ ID NO: 840812 - DNA, 15 bp, Homo sapiens
ctccgcccacctctc

SEQ ID NO: 840813 - DNA, 15 bp, Homo sapiens
tccgcccacctctcc

SEQ ID NO: 840814 - DNA, 15 bp, Homo sapiens
ccgcccacctctccc

SEQ ID NO: 840815 - DNA, 15 bp, Homo sapiens
cgcccacctctcccc

SEQ ID NO: 840816 - DNA, 15 bp, Homo sapiens
gcccacctctccccc

SEQ ID NO: 840817 - DNA, 15 bp, Homo sapiens
cccacctctccccca

SEQ ID NO: 840818 - DNA, 15 bp, Homo sapiens
ccacctctcccccag

SEQ ID NO: 840819 - DNA, 15 bp, Homo sapiens
cacctctcccccagc

SEQ ID NO: 840820 - DNA, 15 bp, Homo sapiens
acctctcccccagca

SEQ ID NO: 840821 - DNA, 15 bp, Homo sapiens
cctctcccccagcaa

SEQ ID NO: 840822 - DNA, 15 bp, Homo sapiens
ctctcccccagcaac

SEQ ID NO: 840823 - DNA, 15 bp, Homo sapiens
tctcccccagcaacc

SEQ ID NO: 840824 - DNA, 15 bp, Homo sapiens
ctcccccagcaaccc

SEQ ID NO: 840825 - DNA, 15 bp, Homo sapiens
tcccccagcaaccca

SEQ ID NO: 840826 - DNA, 15 bp, Homo sapiens
cccccagcaacccag

SEQ ID NO: 840827 - DNA, 15 bp, Homo sapiens
ccccagcaacccagc

SEQ ID NO: 840828 - DNA, 15 bp, Homo sapiens
cccagcaacccagcc

SEQ ID NO: 840829 - DNA, 15 bp, Homo sapiens
ccagcaacccagccg

SEQ ID NO: 840830 - DNA, 15 bp, Homo sapiens
cagcaacccagccgc

SEQ ID NO: 840831 - DNA, 15 bp, Homo sapiens
agcaacccagccgct

SEQ ID NO: 840832 - DNA, 15 bp, Homo sapiens
gcaacccagccgctg

SEQ ID NO: 840833 - DNA, 15 bp, Homo sapiens
caacccagccgctgc

SEQ ID NO: 840834 - DNA, 15 bp, Homo sapiens
aacccagccgctgca

SEQ ID NO: 840835 - DNA, 15 bp, Homo sapiens
acccagccgctgcag

SEQ ID NO: 840836 - DNA, 15 bp, Homo sapiens
cccagccgctgcagc

SEQ ID NO: 840837 - DNA, 15 bp, Homo sapiens
ccagccgctgcagcc

SEQ ID NO: 840838 - DNA, 15 bp, Homo sapiens
cagccgctgcagccc

SEQ ID NO: 840839 - DNA, 15 bp, Homo sapiens
agccgctgcagcccc

SEQ ID NO: 840840 - DNA, 15 bp, Homo sapiens
gccgctgcagccccc

SEQ ID NO: 840841 - DNA, 15 bp, Homo sapiens
ccgctgcagccccca

SEQ ID NO: 840842 - DNA, 15 bp, Homo sapiens
cgctgcagcccccag

SEQ ID NO: 840843 - DNA, 15 bp, Homo sapiens
gctgcagcccccagg

SEQ ID NO: 840844 - DNA, 15 bp, Homo sapiens
ctgcagcccccaggt

SEQ ID NO: 840845 - DNA, 15 bp, Homo sapiens
tgcagcccccaggtt

SEQ ID NO: 840846 - DNA, 15 bp, Homo sapiens
gcagcccccaggttc

SEQ ID NO: 840847 - DNA, 15 bp, Homo sapiens
cagcccccaggttca

SEQ ID NO: 840848 - DNA, 15 bp, Homo sapiens
agcccccaggttcaa

SEQ ID NO: 840849 - DNA, 15 bp, Homo sapiens
gcccccaggttcaag

SEQ ID NO: 840850 - DNA, 15 bp, Homo sapiens
cccccaggttcaagt

SEQ ID NO: 840851 - DNA, 15 bp, Homo sapiens
ccccaggttcaagtg

SEQ ID NO: 840852 - DNA, 15 bp, Homo sapiens
gttcaagtgattctg

SEQ ID NO: 840853 - DNA, 15 bp, Homo sapiens
ttcaagtgattctgc

SEQ ID NO: 840854 - DNA, 15 bp, Homo sapiens
tcaagtgattctgct

SEQ ID NO: 840855 - DNA, 15 bp, Homo sapiens
caagtgattctgctg

SEQ ID NO: 840856 - DNA, 15 bp, Homo sapiens
aagtgattctgctgc

SEQ ID NO: 840857 - DNA, 15 bp, Homo sapiens
agtgattctgctgcc

SEQ ID NO: 840858 - DNA, 15 bp, Homo sapiens
gtgattctgctgcct

SEQ ID NO: 840859 - DNA, 15 bp, Homo sapiens
tgattctgctgcctc

SEQ ID NO: 840860 - DNA, 15 bp, Homo sapiens
gattctgctgcctca

SEQ ID NO: 840861 - DNA, 15 bp, Homo sapiens
attctgctgcctcag

SEQ ID NO: 840862 - DNA, 15 bp, Homo sapiens
ttctgctgcctcagt

SEQ ID NO: 840863 - DNA, 15 bp, Homo sapiens
tctgctgcctcagtc

SEQ ID NO: 840864 - DNA, 15 bp, Homo sapiens
ctgctgcctcagtct

SEQ ID NO: 840865 - DNA, 15 bp, Homo sapiens
tgctgcctcagtctc

SEQ ID NO: 840866 - DNA, 15 bp, Homo sapiens
gctgcctcagtctcc

SEQ ID NO: 840867 - DNA, 15 bp, Homo sapiens
aagtagctgggactg

SEQ ID NO: 840868 - DNA, 15 bp, Homo sapiens
agtagctgggactgc

SEQ ID NO: 840869 - DNA, 15 bp, Homo sapiens
gtagctgggactgca

SEQ ID NO: 840870 - DNA, 15 bp, Homo sapiens
tagctgggactgcag

SEQ ID NO: 840871 - DNA, 15 bp, Homo sapiens
agctgggactgcagg

SEQ ID NO: 840872 - DNA, 15 bp, Homo sapiens
gctgggactgcaggc

SEQ ID NO: 840873 - DNA, 15 bp, Homo sapiens
ctgggactgcaggca

SEQ ID NO: 840874 - DNA, 15 bp, Homo sapiens
tgggactgcaggcac

SEQ ID NO: 840875 - DNA, 15 bp, Homo sapiens
gggactgcaggcacg

SEQ ID NO: 840876 - DNA, 15 bp, Homo sapiens
ggactgcaggcacga

SEQ ID NO: 840877 - DNA, 15 bp, Homo sapiens
gactgcaggcacgag

SEQ ID NO: 840878 - DNA, 15 bp, Homo sapiens
actgcaggcacgagc

SEQ ID NO: 840879 - DNA, 15 bp, Homo sapiens
ctgcaggcacgagcc

SEQ ID NO: 840880 - DNA, 15 bp, Homo sapiens
tgcaggcacgagcca

SEQ ID NO: 840881 - DNA, 15 bp, Homo sapiens
gcaggcacgagccac

SEQ ID NO: 840882 - DNA, 15 bp, Homo sapiens
caggcacgagccacc

SEQ ID NO: 840883 - DNA, 15 bp, Homo sapiens
aggcacgagccacca

SEQ ID NO: 840884 - DNA, 15 bp, Homo sapiens
ggcacgagccaccac

SEQ ID NO: 840885 - DNA, 15 bp, Homo sapiens
gcacgagccaccaca

SEQ ID NO: 840886 - DNA, 15 bp, Homo sapiens
cacgagccaccacac

SEQ ID NO: 840887 - DNA, 15 bp, Homo sapiens
acgagccaccacacc

SEQ ID NO: 840888 - DNA, 15 bp, Homo sapiens
cgagccaccacaccc

SEQ ID NO: 840889 - DNA, 15 bp, Homo sapiens
gtttcaccatgttgc

SEQ ID NO: 840890 - DNA, 15 bp, Homo sapiens
cccaggctggtctca

SEQ ID NO: 840891 - DNA, 15 bp, Homo sapiens
tgacctcaagtgatg

SEQ ID NO: 840892 - DNA, 15 bp, Homo sapiens
gacctcaagtgatgt

SEQ ID NO: 840893 - DNA, 15 bp, Homo sapiens
acctcaagtgatgtg

SEQ ID NO: 840894 - DNA, 15 bp, Homo sapiens
cctcaagtgatgtgc

SEQ ID NO: 840895 - DNA, 15 bp, Homo sapiens
ctcaagtgatgtgcc

SEQ ID NO: 840896 - DNA, 15 bp, Homo sapiens
tcaagtgatgtgccc

SEQ ID NO: 840897 - DNA, 15 bp, Homo sapiens
caagtgatgtgccca

SEQ ID NO: 840898 - DNA, 15 bp, Homo sapiens
aagtgatgtgcccac

SEQ ID NO: 840899 - DNA, 15 bp, Homo sapiens
agtgatgtgcccacc

SEQ ID NO: 840900 - DNA, 15 bp, Homo sapiens
gtgatgtgcccacct

SEQ ID NO: 840901 - DNA, 15 bp, Homo sapiens
tgatgtgcccacctc

SEQ ID NO: 840902 - DNA, 15 bp, Homo sapiens
gatgtgcccacctca

SEQ ID NO: 840903 - DNA, 15 bp, Homo sapiens
atgtgcccacctcag

SEQ ID NO: 840904 - DNA, 15 bp, Homo sapiens
tgtgcccacctcagc

SEQ ID NO: 840905 - DNA, 15 bp, Homo sapiens
gtgcccacctcagcc

SEQ ID NO: 840906 - DNA, 15 bp, Homo sapiens
tgcccacctcagcct

SEQ ID NO: 840907 - DNA, 15 bp, Homo sapiens
gcccacctcagcctc

SEQ ID NO: 840908 - DNA, 15 bp, Homo sapiens
agcatgagccaccgt

SEQ ID NO: 840909 - DNA, 15 bp, Homo sapiens
caccgtgcctggctg

SEQ ID NO: 840910 - DNA, 15 bp, Homo sapiens
accgtgcctggctga

SEQ ID NO: 840911 - DNA, 15 bp, Homo sapiens
ccgtgcctggctgag

SEQ ID NO: 840912 - DNA, 15 bp, Homo sapiens
cgtgcctggctgaga

SEQ ID NO: 840913 - DNA, 15 bp, Homo sapiens
gtgcctggctgagat

SEQ ID NO: 840914 - DNA, 15 bp, Homo sapiens
tgcctggctgagata

SEQ ID NO: 840915 - DNA, 15 bp, Homo sapiens
gcctggctgagatat

SEQ ID NO: 840916 - DNA, 15 bp, Homo sapiens
cctggctgagatata

SEQ ID NO: 840917 - DNA, 15 bp, Homo sapiens
ctggctgagatatac

SEQ ID NO: 840918 - DNA, 15 bp, Homo sapiens
tggctgagatataca

SEQ ID NO: 840919 - DNA, 15 bp, Homo sapiens
ggctgagatatacat

SEQ ID NO: 840920 - DNA, 15 bp, Homo sapiens
gctgagatatacatt

SEQ ID NO: 840921 - DNA, 15 bp, Homo sapiens
ctgagatatacattt

SEQ ID NO: 840922 - DNA, 15 bp, Homo sapiens
tgagatatacatttt

SEQ ID NO: 840923 - DNA, 15 bp, Homo sapiens
gagatatacattttc

SEQ ID NO: 840924 - DNA, 15 bp, Homo sapiens
agatatacattttca

SEQ ID NO: 840925 - DNA, 15 bp, Homo sapiens
gatatacattttcac

SEQ ID NO: 840926 - DNA, 15 bp, Homo sapiens
atatacattttcact

SEQ ID NO: 840927 - DNA, 15 bp, Homo sapiens
tatacattttcactt

SEQ ID NO: 840928 - DNA, 15 bp, Homo sapiens
atacattttcactta

SEQ ID NO: 840929 - DNA, 15 bp, Homo sapiens
tacattttcacttaa

SEQ ID NO: 840930 - DNA, 15 bp, Homo sapiens
acattttcacttaaa

SEQ ID NO: 840931 - DNA, 15 bp, Homo sapiens
cattttcacttaaat

SEQ ID NO: 840932 - DNA, 15 bp, Homo sapiens
attttcacttaaatt

SEQ ID NO: 840933 - DNA, 15 bp, Homo sapiens
ttttcacttaaattc

SEQ ID NO: 840934 - DNA, 15 bp, Homo sapiens
tttcacttaaattct

SEQ ID NO: 840935 - DNA, 15 bp, Homo sapiens
ttcacttaaattctt

SEQ ID NO: 840936 - DNA, 15 bp, Homo sapiens
tcacttaaattcttt

SEQ ID NO: 840937 - DNA, 15 bp, Homo sapiens
cacttaaattcttta

SEQ ID NO: 840938 - DNA, 15 bp, Homo sapiens
acttaaattctttat

SEQ ID NO: 840939 - DNA, 15 bp, Homo sapiens
cttaaattctttatt

SEQ ID NO: 840940 - DNA, 15 bp, Homo sapiens
ttaaattctttattt

SEQ ID NO: 840941 - DNA, 15 bp, Homo sapiens
taaattctttatttg

SEQ ID NO: 840942 - DNA, 15 bp, Homo sapiens
aaattctttatttga

SEQ ID NO: 840943 - DNA, 15 bp, Homo sapiens
aattctttatttgac

SEQ ID NO: 840944 - DNA, 15 bp, Homo sapiens
attctttatttgacc

SEQ ID NO: 840945 - DNA, 15 bp, Homo sapiens
ttctttatttgacca

SEQ ID NO: 840946 - DNA, 15 bp, Homo sapiens
tctttatttgaccag

SEQ ID NO: 840947 - DNA, 15 bp, Homo sapiens
ctttatttgaccaga

SEQ ID NO: 840948 - DNA, 15 bp, Homo sapiens
tttatttgaccagat

SEQ ID NO: 840949 - DNA, 15 bp, Homo sapiens
ttatttgaccagata

SEQ ID NO: 840950 - DNA, 15 bp, Homo sapiens
tatttgaccagatac

SEQ ID NO: 840951 - DNA, 15 bp, Homo sapiens
atttgaccagataca

SEQ ID NO: 840952 - DNA, 15 bp, Homo sapiens
tttgaccagatacac

SEQ ID NO: 840953 - DNA, 15 bp, Homo sapiens
ttgaccagatacaca

SEQ ID NO: 840954 - DNA, 15 bp, Homo sapiens
tgaccagatacacaa

SEQ ID NO: 840955 - DNA, 15 bp, Homo sapiens
gaccagatacacaag

SEQ ID NO: 840956 - DNA, 15 bp, Homo sapiens
accagatacacaagg

SEQ ID NO: 840957 - DNA, 15 bp, Homo sapiens
ccagatacacaagga

SEQ ID NO: 840958 - DNA, 15 bp, Homo sapiens
cagatacacaaggaa

SEQ ID NO: 840959 - DNA, 15 bp, Homo sapiens
agatacacaaggaaa

SEQ ID NO: 840960 - DNA, 15 bp, Homo sapiens
gatacacaaggaaac

SEQ ID NO: 840961 - DNA, 15 bp, Homo sapiens
atacacaaggaaacc

SEQ ID NO: 840962 - DNA, 15 bp, Homo sapiens
tacacaaggaaacca

SEQ ID NO: 840963 - DNA, 15 bp, Homo sapiens
acacaaggaaaccag

SEQ ID NO: 840964 - DNA, 15 bp, Homo sapiens
cacaaggaaaccaga

SEQ ID NO: 840965 - DNA, 15 bp, Homo sapiens
acaaggaaaccagat

SEQ ID NO: 840966 - DNA, 15 bp, Homo sapiens
caaggaaaccagata

SEQ ID NO: 840967 - DNA, 15 bp, Homo sapiens
aaggaaaccagatac

SEQ ID NO: 840968 - DNA, 15 bp, Homo sapiens
aggaaaccagataca

SEQ ID NO: 840969 - DNA, 15 bp, Homo sapiens
ggaaaccagatacat

SEQ ID NO: 840970 - DNA, 15 bp, Homo sapiens
gaaaccagatacata

SEQ ID NO: 840971 - DNA, 15 bp, Homo sapiens
aaaccagatacatat

SEQ ID NO: 840972 - DNA, 15 bp, Homo sapiens
aaccagatacatatg

SEQ ID NO: 840973 - DNA, 15 bp, Homo sapiens
accagatacatatgg

SEQ ID NO: 840974 - DNA, 15 bp, Homo sapiens
ccagatacatatgga

SEQ ID NO: 840975 - DNA, 15 bp, Homo sapiens
cagatacatatggaa

SEQ ID NO: 840976 - DNA, 15 bp, Homo sapiens
agatacatatggaaa

SEQ ID NO: 840977 - DNA, 15 bp, Homo sapiens
gatacatatggaaaa

SEQ ID NO: 840978 - DNA, 15 bp, Homo sapiens
atacatatggaaaac

SEQ ID NO: 840979 - DNA, 15 bp, Homo sapiens
tacatatggaaaaca

SEQ ID NO: 840980 - DNA, 15 bp, Homo sapiens
acatatggaaaacat

SEQ ID NO: 840981 - DNA, 15 bp, Homo sapiens
catatggaaaacatg

SEQ ID NO: 840982 - DNA, 15 bp, Homo sapiens
atatggaaaacatgc

SEQ ID NO: 840983 - DNA, 15 bp, Homo sapiens
tatggaaaacatgcc

SEQ ID NO: 840984 - DNA, 15 bp, Homo sapiens
atggaaaacatgcca

SEQ ID NO: 840985 - DNA, 15 bp, Homo sapiens
tggaaaacatgccaa

SEQ ID NO: 840986 - DNA, 15 bp, Homo sapiens
ggaaaacatgccaaa

SEQ ID NO: 840987 - DNA, 15 bp, Homo sapiens
gaaaacatgccaaat

SEQ ID NO: 840988 - DNA, 15 bp, Homo sapiens
aaaacatgccaaatg

SEQ ID NO: 840989 - DNA, 15 bp, Homo sapiens
aaacatgccaaatgc

SEQ ID NO: 840990 - DNA, 15 bp, Homo sapiens
aacatgccaaatgca

SEQ ID NO: 840991 - DNA, 15 bp, Homo sapiens
acatgccaaatgcaa

SEQ ID NO: 840992 - DNA, 15 bp, Homo sapiens
catgccaaatgcaaa

SEQ ID NO: 840993 - DNA, 15 bp, Homo sapiens
atgccaaatgcaaag

SEQ ID NO: 840994 - DNA, 15 bp, Homo sapiens
tgccaaatgcaaaga

SEQ ID NO: 840995 - DNA, 15 bp, Homo sapiens
gccaaatgcaaagaa

SEQ ID NO: 840996 - DNA, 15 bp, Homo sapiens
ccaaatgcaaagaac

SEQ ID NO: 840997 - DNA, 15 bp, Homo sapiens
caaatgcaaagaacc

SEQ ID NO: 840998 - DNA, 15 bp, Homo sapiens
aaatgcaaagaacct

SEQ ID NO: 840999 - DNA, 15 bp, Homo sapiens
aatgcaaagaaccta

SEQ ID NO: 841000 - DNA, 15 bp, Homo sapiens
atgcaaagaacctaa

SEQ ID NO: 841001 - DNA, 15 bp, Homo sapiens
tgcaaagaacctaat

SEQ ID NO: 841002 - DNA, 15 bp, Homo sapiens
gcaaagaacctaatg

SEQ ID NO: 841003 - DNA, 15 bp, Homo sapiens
caaagaacctaatgt

SEQ ID NO: 841004 - DNA, 15 bp, Homo sapiens
aaagaacctaatgtc

SEQ ID NO: 841005 - DNA, 15 bp, Homo sapiens
aagaacctaatgtct

SEQ ID NO: 841006 - DNA, 15 bp, Homo sapiens
agaacctaatgtctc

SEQ ID NO: 841007 - DNA, 15 bp, Homo sapiens
gaacctaatgtctct

SEQ ID NO: 841008 - DNA, 15 bp, Homo sapiens
aacctaatgtctctg

SEQ ID NO: 841009 - DNA, 15 bp, Homo sapiens
acctaatgtctctga

SEQ ID NO: 841010 - DNA, 15 bp, Homo sapiens
cctaatgtctctgac

SEQ ID NO: 841011 - DNA, 15 bp, Homo sapiens
ctaatgtctctgacc

SEQ ID NO: 841012 - DNA, 15 bp, Homo sapiens
taatgtctctgacct

SEQ ID NO: 841013 - DNA, 15 bp, Homo sapiens
aatgtctctgacctt

SEQ ID NO: 841014 - DNA, 15 bp, Homo sapiens
atgtctctgaccttt

SEQ ID NO: 841015 - DNA, 15 bp, Homo sapiens
tgtctctgacctttc

SEQ ID NO: 841016 - DNA, 15 bp, Homo sapiens
gtctctgacctttct

SEQ ID NO: 841017 - DNA, 15 bp, Homo sapiens
tctctgacctttctt

SEQ ID NO: 841018 - DNA, 15 bp, Homo sapiens
ctctgacctttcttc

SEQ ID NO: 841019 - DNA, 15 bp, Homo sapiens
tctgacctttcttca

SEQ ID NO: 841020 - DNA, 15 bp, Homo sapiens
ctgacctttcttcag

SEQ ID NO: 841021 - DNA, 15 bp, Homo sapiens
tgacctttcttcagt

SEQ ID NO: 841022 - DNA, 15 bp, Homo sapiens
gacctttcttcagtt

SEQ ID NO: 841023 - DNA, 15 bp, Homo sapiens
acctttcttcagttg

SEQ ID NO: 841024 - DNA, 15 bp, Homo sapiens
cctttcttcagttgt

SEQ ID NO: 841025 - DNA, 15 bp, Homo sapiens
ctttcttcagttgta

SEQ ID NO: 841026 - DNA, 15 bp, Homo sapiens
tttcttcagttgtag

SEQ ID NO: 841027 - DNA, 15 bp, Homo sapiens
ttcttcagttgtaga

SEQ ID NO: 841028 - DNA, 15 bp, Homo sapiens
tcttcagttgtagaa

SEQ ID NO: 841029 - DNA, 15 bp, Homo sapiens
cttcagttgtagaat

SEQ ID NO: 841030 - DNA, 15 bp, Homo sapiens
ttcagttgtagaata

SEQ ID NO: 841031 - DNA, 15 bp, Homo sapiens
tcagttgtagaatag

SEQ ID NO: 841032 - DNA, 15 bp, Homo sapiens
cagttgtagaatagt

SEQ ID NO: 841033 - DNA, 15 bp, Homo sapiens
agttgtagaatagta

SEQ ID NO: 841034 - DNA, 15 bp, Homo sapiens
gttgtagaatagtaa

SEQ ID NO: 841035 - DNA, 15 bp, Homo sapiens
ttgtagaatagtaag

SEQ ID NO: 841036 - DNA, 15 bp, Homo sapiens
tgtagaatagtaagc

SEQ ID NO: 841037 - DNA, 15 bp, Homo sapiens
gtagaatagtaagcc

SEQ ID NO: 841038 - DNA, 15 bp, Homo sapiens
tagaatagtaagcca

SEQ ID NO: 841039 - DNA, 15 bp, Homo sapiens
agaatagtaagccac

SEQ ID NO: 841040 - DNA, 15 bp, Homo sapiens
gaatagtaagccaca

SEQ ID NO: 841041 - DNA, 15 bp, Homo sapiens
aatagtaagccacag

SEQ ID NO: 841042 - DNA, 15 bp, Homo sapiens
atagtaagccacagg

SEQ ID NO: 841043 - DNA, 15 bp, Homo sapiens
tagtaagccacagga

SEQ ID NO: 841044 - DNA, 15 bp, Homo sapiens
agtaagccacaggac

SEQ ID NO: 841045 - DNA, 15 bp, Homo sapiens
gtaagccacaggacc

SEQ ID NO: 841046 - DNA, 15 bp, Homo sapiens
taagccacaggaccc

SEQ ID NO: 841047 - DNA, 15 bp, Homo sapiens
aagccacaggaccca

SEQ ID NO: 841048 - DNA, 15 bp, Homo sapiens
agccacaggacccat

SEQ ID NO: 841049 - DNA, 15 bp, Homo sapiens
gccacaggacccatc

SEQ ID NO: 841050 - DNA, 15 bp, Homo sapiens
ccacaggacccatca

SEQ ID NO: 841051 - DNA, 15 bp, Homo sapiens
cacaggacccatcac

SEQ ID NO: 841052 - DNA, 15 bp, Homo sapiens
acaggacccatcacc

SEQ ID NO: 841053 - DNA, 15 bp, Homo sapiens
caggacccatcacca

SEQ ID NO: 841054 - DNA, 15 bp, Homo sapiens
aggacccatcaccat

SEQ ID NO: 841055 - DNA, 15 bp, Homo sapiens
ggacccatcaccata

SEQ ID NO: 841056 - DNA, 15 bp, Homo sapiens
gacccatcaccatag

SEQ ID NO: 841057 - DNA, 15 bp, Homo sapiens
acccatcaccatagc

SEQ ID NO: 841058 - DNA, 15 bp, Homo sapiens
cccatcaccatagct

SEQ ID NO: 841059 - DNA, 15 bp, Homo sapiens
ccatcaccatagctc

SEQ ID NO: 841060 - DNA, 15 bp, Homo sapiens
catcaccatagctct

SEQ ID NO: 841061 - DNA, 15 bp, Homo sapiens
atcaccatagctctt

SEQ ID NO: 841062 - DNA, 15 bp, Homo sapiens
tcaccatagctcttt

SEQ ID NO: 841063 - DNA, 15 bp, Homo sapiens
caccatagctctttg

SEQ ID NO: 841064 - DNA, 15 bp, Homo sapiens
accatagctctttgg

SEQ ID NO: 841065 - DNA, 15 bp, Homo sapiens
ccatagctctttggg

SEQ ID NO: 841066 - DNA, 15 bp, Homo sapiens
catagctctttggga

SEQ ID NO: 841067 - DNA, 15 bp, Homo sapiens
atagctctttgggag

SEQ ID NO: 841068 - DNA, 15 bp, Homo sapiens
tagctctttgggagg

SEQ ID NO: 841069 - DNA, 15 bp, Homo sapiens
agctctttgggagga

SEQ ID NO: 841070 - DNA, 15 bp, Homo sapiens
gctctttgggaggag

SEQ ID NO: 841071 - DNA, 15 bp, Homo sapiens
ctctttgggaggagg

SEQ ID NO: 841072 - DNA, 15 bp, Homo sapiens
tctttgggaggagga

SEQ ID NO: 841073 - DNA, 15 bp, Homo sapiens
ctttgggaggaggaa

SEQ ID NO: 841074 - DNA, 15 bp, Homo sapiens
tttgggaggaggaaa

SEQ ID NO: 841075 - DNA, 15 bp, Homo sapiens
ttgggaggaggaaat

SEQ ID NO: 841076 - DNA, 15 bp, Homo sapiens
tgggaggaggaaatc

SEQ ID NO: 841077 - DNA, 15 bp, Homo sapiens
gggaggaggaaatcg

SEQ ID NO: 841078 - DNA, 15 bp, Homo sapiens
ggaggaggaaatcgg

SEQ ID NO: 841079 - DNA, 15 bp, Homo sapiens
gaggaggaaatcgga

SEQ ID NO: 841080 - DNA, 15 bp, Homo sapiens
aggaggaaatcggaa

SEQ ID NO: 841081 - DNA, 15 bp, Homo sapiens
ggaggaaatcggaag

SEQ ID NO: 841082 - DNA, 15 bp, Homo sapiens
gaggaaatcggaaga

SEQ ID NO: 841083 - DNA, 15 bp, Homo sapiens
aggaaatcggaagat

SEQ ID NO: 841084 - DNA, 15 bp, Homo sapiens
ggaaatcggaagatg

SEQ ID NO: 841085 - DNA, 15 bp, Homo sapiens
gaaatcggaagatga

SEQ ID NO: 841086 - DNA, 15 bp, Homo sapiens
aaatcggaagatgac

SEQ ID NO: 841087 - DNA, 15 bp, Homo sapiens
aatcggaagatgact

SEQ ID NO: 841088 - DNA, 15 bp, Homo sapiens
atcggaagatgactt

SEQ ID NO: 841089 - DNA, 15 bp, Homo sapiens
tcggaagatgacttc

SEQ ID NO: 841090 - DNA, 15 bp, Homo sapiens
cggaagatgacttct

SEQ ID NO: 841091 - DNA, 15 bp, Homo sapiens
ggaagatgacttctg

SEQ ID NO: 841092 - DNA, 15 bp, Homo sapiens
gaagatgacttctgg

SEQ ID NO: 841093 - DNA, 15 bp, Homo sapiens
aagatgacttctggt

SEQ ID NO: 841094 - DNA, 15 bp, Homo sapiens
agatgacttctggtt

SEQ ID NO: 841095 - DNA, 15 bp, Homo sapiens
gatgacttctggttg

SEQ ID NO: 841096 - DNA, 15 bp, Homo sapiens
atgacttctggttgc

SEQ ID NO: 841097 - DNA, 15 bp, Homo sapiens
tgacttctggttgca

SEQ ID NO: 841098 - DNA, 15 bp, Homo sapiens
gacttctggttgcat

SEQ ID NO: 841099 - DNA, 15 bp, Homo sapiens
acttctggttgcatg

SEQ ID NO: 841100 - DNA, 15 bp, Homo sapiens
cttctggttgcatgg

SEQ ID NO: 841101 - DNA, 15 bp, Homo sapiens
ttctggttgcatggc

SEQ ID NO: 841102 - DNA, 15 bp, Homo sapiens
tctggttgcatggct

SEQ ID NO: 841103 - DNA, 15 bp, Homo sapiens
ctggttgcatggctg

SEQ ID NO: 841104 - DNA, 15 bp, Homo sapiens
tggttgcatggctgg

SEQ ID NO: 841105 - DNA, 15 bp, Homo sapiens
ggttgcatggctggt

SEQ ID NO: 841106 - DNA, 15 bp, Homo sapiens
gttgcatggctggtt

SEQ ID NO: 841107 - DNA, 15 bp, Homo sapiens
ttgcatggctggttg

SEQ ID NO: 841108 - DNA, 15 bp, Homo sapiens
tgcatggctggttgg

SEQ ID NO: 841109 - DNA, 15 bp, Homo sapiens
gcatggctggttggg

SEQ ID NO: 841110 - DNA, 15 bp, Homo sapiens
catggctggttgggg

SEQ ID NO: 841111 - DNA, 15 bp, Homo sapiens
atggctggttgggga

SEQ ID NO: 841112 - DNA, 15 bp, Homo sapiens
tggctggttggggaa

SEQ ID NO: 841113 - DNA, 15 bp, Homo sapiens
ggctggttggggaat

SEQ ID NO: 841114 - DNA, 15 bp, Homo sapiens
gctggttggggaatg

SEQ ID NO: 841115 - DNA, 15 bp, Homo sapiens
ctggttggggaatgg

SEQ ID NO: 841116 - DNA, 15 bp, Homo sapiens
tggttggggaatggt

SEQ ID NO: 841117 - DNA, 15 bp, Homo sapiens
ggttggggaatggta

SEQ ID NO: 841118 - DNA, 15 bp, Homo sapiens
gttggggaatggtag

SEQ ID NO: 841119 - DNA, 15 bp, Homo sapiens
ttggggaatggtaga

SEQ ID NO: 841120 - DNA, 15 bp, Homo sapiens
tggggaatggtagag

SEQ ID NO: 841121 - DNA, 15 bp, Homo sapiens
ggggaatggtagagc

SEQ ID NO: 841122 - DNA, 15 bp, Homo sapiens
gggaatggtagagct

SEQ ID NO: 841123 - DNA, 15 bp, Homo sapiens
ggaatggtagagcta

SEQ ID NO: 841124 - DNA, 15 bp, Homo sapiens
gaatggtagagctag

SEQ ID NO: 841125 - DNA, 15 bp, Homo sapiens
aatggtagagctagg

SEQ ID NO: 841126 - DNA, 15 bp, Homo sapiens
atggtagagctaggg

SEQ ID NO: 841127 - DNA, 15 bp, Homo sapiens
tggtagagctagggc

SEQ ID NO: 841128 - DNA, 15 bp, Homo sapiens
ggtagagctagggcc

SEQ ID NO: 841129 - DNA, 15 bp, Homo sapiens
gtagagctagggcca

SEQ ID NO: 841130 - DNA, 15 bp, Homo sapiens
tagagctagggccag

SEQ ID NO: 841131 - DNA, 15 bp, Homo sapiens
agagctagggccaga

SEQ ID NO: 841132 - DNA, 15 bp, Homo sapiens
gagctagggccagaa

SEQ ID NO: 841133 - DNA, 15 bp, Homo sapiens
agctagggccagaac

SEQ ID NO: 841134 - DNA, 15 bp, Homo sapiens
gctagggccagaacg

SEQ ID NO: 841135 - DNA, 15 bp, Homo sapiens
ctagggccagaacgc

SEQ ID NO: 841136 - DNA, 15 bp, Homo sapiens
tagggccagaacgct

SEQ ID NO: 841137 - DNA, 15 bp, Homo sapiens
agggccagaacgcta

SEQ ID NO: 841138 - DNA, 15 bp, Homo sapiens
gggccagaacgctac

SEQ ID NO: 841139 - DNA, 15 bp, Homo sapiens
ggccagaacgctaca

SEQ ID NO: 841140 - DNA, 15 bp, Homo sapiens
gccagaacgctacaa

SEQ ID NO: 841141 - DNA, 15 bp, Homo sapiens
ccagaacgctacaac

SEQ ID NO: 841142 - DNA, 15 bp, Homo sapiens
cagaacgctacaaca

SEQ ID NO: 841143 - DNA, 15 bp, Homo sapiens
agaacgctacaacat

SEQ ID NO: 841144 - DNA, 15 bp, Homo sapiens
gaacgctacaacatc

SEQ ID NO: 841145 - DNA, 15 bp, Homo sapiens
aacgctacaacatca

SEQ ID NO: 841146 - DNA, 15 bp, Homo sapiens
acgctacaacatcat

SEQ ID NO: 841147 - DNA, 15 bp, Homo sapiens
cgctacaacatcatt

SEQ ID NO: 841148 - DNA, 15 bp, Homo sapiens
gctacaacatcattg

SEQ ID NO: 841149 - DNA, 15 bp, Homo sapiens
ctacaacatcattgg

SEQ ID NO: 841150 - DNA, 15 bp, Homo sapiens
tacaacatcattggc

SEQ ID NO: 841151 - DNA, 15 bp, Homo sapiens
acaacatcattggct

SEQ ID NO: 841152 - DNA, 15 bp, Homo sapiens
caacatcattggctt

SEQ ID NO: 841153 - DNA, 15 bp, Homo sapiens
aacatcattggcttc

SEQ ID NO: 841154 - DNA, 15 bp, Homo sapiens
acatcattggcttct

SEQ ID NO: 841155 - DNA, 15 bp, Homo sapiens
catcattggcttctc

SEQ ID NO: 841156 - DNA, 15 bp, Homo sapiens
atcattggcttctca

SEQ ID NO: 841157 - DNA, 15 bp, Homo sapiens
tcattggcttctcag

SEQ ID NO: 841158 - DNA, 15 bp, Homo sapiens
cattggcttctcagc

SEQ ID NO: 841159 - DNA, 15 bp, Homo sapiens
attggcttctcagct

SEQ ID NO: 841160 - DNA, 15 bp, Homo sapiens
ttggcttctcagctc

SEQ ID NO: 841161 - DNA, 15 bp, Homo sapiens
tggcttctcagctca

SEQ ID NO: 841162 - DNA, 15 bp, Homo sapiens
ggcttctcagctcag

SEQ ID NO: 841163 - DNA, 15 bp, Homo sapiens
gcttctcagctcagc

SEQ ID NO: 841164 - DNA, 15 bp, Homo sapiens
cttctcagctcagcg

SEQ ID NO: 841165 - DNA, 15 bp, Homo sapiens
ttctcagctcagcgc

SEQ ID NO: 841166 - DNA, 15 bp, Homo sapiens
tctcagctcagcgct

SEQ ID NO: 841167 - DNA, 15 bp, Homo sapiens
ctcagctcagcgctt

SEQ ID NO: 841168 - DNA, 15 bp, Homo sapiens
tcagctcagcgcttt

SEQ ID NO: 841169 - DNA, 15 bp, Homo sapiens
cagctcagcgctttc

SEQ ID NO: 841170 - DNA, 15 bp, Homo sapiens
agctcagcgctttcc

SEQ ID NO: 841171 - DNA, 15 bp, Homo sapiens
gctcagcgctttccc

SEQ ID NO: 841172 - DNA, 15 bp, Homo sapiens
ctcagcgctttcccc

SEQ ID NO: 841173 - DNA, 15 bp, Homo sapiens
tcagcgctttcccca

SEQ ID NO: 841174 - DNA, 15 bp, Homo sapiens
cagcgctttccccac

SEQ ID NO: 841175 - DNA, 15 bp, Homo sapiens
agcgctttccccact

SEQ ID NO: 841176 - DNA, 15 bp, Homo sapiens
gcgctttccccactg

SEQ ID NO: 841177 - DNA, 15 bp, Homo sapiens
cgctttccccactgt

SEQ ID NO: 841178 - DNA, 15 bp, Homo sapiens
gctttccccactgtt

SEQ ID NO: 841179 - DNA, 15 bp, Homo sapiens
ctttccccactgtta

SEQ ID NO: 841180 - DNA, 15 bp, Homo sapiens
tttccccactgttac

SEQ ID NO: 841181 - DNA, 15 bp, Homo sapiens
ttccccactgttaca

SEQ ID NO: 841182 - DNA, 15 bp, Homo sapiens
tccccactgttacac

SEQ ID NO: 841183 - DNA, 15 bp, Homo sapiens
ccccactgttacaca

SEQ ID NO: 841184 - DNA, 15 bp, Homo sapiens
cccactgttacacat

SEQ ID NO: 841185 - DNA, 15 bp, Homo sapiens
ccactgttacacatt

SEQ ID NO: 841186 - DNA, 15 bp, Homo sapiens
cactgttacacattg

SEQ ID NO: 841187 - DNA, 15 bp, Homo sapiens
actgttacacattgc

SEQ ID NO: 841188 - DNA, 15 bp, Homo sapiens
ctgttacacattgct

SEQ ID NO: 841189 - DNA, 15 bp, Homo sapiens
tgttacacattgctt

SEQ ID NO: 841190 - DNA, 15 bp, Homo sapiens
gttacacattgcttc

SEQ ID NO: 841191 - DNA, 15 bp, Homo sapiens
ttacacattgcttct

SEQ ID NO: 841192 - DNA, 15 bp, Homo sapiens
tacacattgcttctc

SEQ ID NO: 841193 - DNA, 15 bp, Homo sapiens
acacattgcttctcc

SEQ ID NO: 841194 - DNA, 15 bp, Homo sapiens
cacattgcttctcca

SEQ ID NO: 841195 - DNA, 15 bp, Homo sapiens
acattgcttctccaa

SEQ ID NO: 841196 - DNA, 15 bp, Homo sapiens
cattgcttctccaag

SEQ ID NO: 841197 - DNA, 15 bp, Homo sapiens
attgcttctccaaga

SEQ ID NO: 841198 - DNA, 15 bp, Homo sapiens
ttgcttctccaagag

SEQ ID NO: 841199 - DNA, 15 bp, Homo sapiens
tgcttctccaagaga

SEQ ID NO: 841200 - DNA, 15 bp, Homo sapiens
gcttctccaagagaa

SEQ ID NO: 841201 - DNA, 15 bp, Homo sapiens
cttctccaagagaaa

SEQ ID NO: 841202 - DNA, 15 bp, Homo sapiens
ttctccaagagaaat

SEQ ID NO: 841203 - DNA, 15 bp, Homo sapiens
tctccaagagaaatg

SEQ ID NO: 841204 - DNA, 15 bp, Homo sapiens
ctccaagagaaatgt

SEQ ID NO: 841205 - DNA, 15 bp, Homo sapiens
tccaagagaaatgtc

SEQ ID NO: 841206 - DNA, 15 bp, Homo sapiens
ccaagagaaatgtct

SEQ ID NO: 841207 - DNA, 15 bp, Homo sapiens
caagagaaatgtctt

SEQ ID NO: 841208 - DNA, 15 bp, Homo sapiens
aagagaaatgtcttg

SEQ ID NO: 841209 - DNA, 15 bp, Homo sapiens
agagaaatgtcttga

SEQ ID NO: 841210 - DNA, 15 bp, Homo sapiens
gagaaatgtcttgaa

SEQ ID NO: 841211 - DNA, 15 bp, Homo sapiens
agaaatgtcttgaat

SEQ ID NO: 841212 - DNA, 15 bp, Homo sapiens
gaaatgtcttgaatg

SEQ ID NO: 841213 - DNA, 15 bp, Homo sapiens
aaatgtcttgaatgt

SEQ ID NO: 841214 - DNA, 15 bp, Homo sapiens
aatgtcttgaatgta

SEQ ID NO: 841215 - DNA, 15 bp, Homo sapiens
atgtcttgaatgtaa

SEQ ID NO: 841216 - DNA, 15 bp, Homo sapiens
tgtcttgaatgtaaa

SEQ ID NO: 841217 - DNA, 15 bp, Homo sapiens
gtcttgaatgtaaac

SEQ ID NO: 841218 - DNA, 15 bp, Homo sapiens
tcttgaatgtaaaca

SEQ ID NO: 841219 - DNA, 15 bp, Homo sapiens
cttgaatgtaaacac

SEQ ID NO: 841220 - DNA, 15 bp, Homo sapiens
ttgaatgtaaacact

SEQ ID NO: 841221 - DNA, 15 bp, Homo sapiens
tgaatgtaaacactg

SEQ ID NO: 841222 - DNA, 15 bp, Homo sapiens
gaatgtaaacactgc

SEQ ID NO: 841223 - DNA, 15 bp, Homo sapiens
aatgtaaacactgct

SEQ ID NO: 841224 - DNA, 15 bp, Homo sapiens
atgtaaacactgctt

SEQ ID NO: 841225 - DNA, 15 bp, Homo sapiens
tgtaaacactgcttt

SEQ ID NO: 841226 - DNA, 15 bp, Homo sapiens
gtaaacactgctttg

SEQ ID NO: 841227 - DNA, 15 bp, Homo sapiens
taaacactgctttgt

SEQ ID NO: 841228 - DNA, 15 bp, Homo sapiens
aaacactgctttgtt

SEQ ID NO: 841229 - DNA, 15 bp, Homo sapiens
aacactgctttgttt

SEQ ID NO: 841230 - DNA, 15 bp, Homo sapiens
acactgctttgtttt

SEQ ID NO: 841231 - DNA, 15 bp, Homo sapiens
cactgctttgtttta

SEQ ID NO: 841232 - DNA, 15 bp, Homo sapiens
actgctttgttttat

SEQ ID NO: 841233 - DNA, 15 bp, Homo sapiens
ctgctttgttttata

SEQ ID NO: 841234 - DNA, 15 bp, Homo sapiens
tgctttgttttatat

SEQ ID NO: 841235 - DNA, 15 bp, Homo sapiens
gctttgttttatatt

SEQ ID NO: 841236 - DNA, 15 bp, Homo sapiens
ctttgttttatattc

SEQ ID NO: 841237 - DNA, 15 bp, Homo sapiens
tttgttttatattca

SEQ ID NO: 841238 - DNA, 15 bp, Homo sapiens
ttgttttatattcaa

SEQ ID NO: 841239 - DNA, 15 bp, Homo sapiens
tgttttatattcaaa

SEQ ID NO: 841240 - DNA, 15 bp, Homo sapiens
gttttatattcaaat

SEQ ID NO: 841241 - DNA, 15 bp, Homo sapiens
ttttatattcaaatc

SEQ ID NO: 841242 - DNA, 15 bp, Homo sapiens
tttatattcaaatca

SEQ ID NO: 841243 - DNA, 15 bp, Homo sapiens
ttatattcaaatcaa

SEQ ID NO: 841244 - DNA, 15 bp, Homo sapiens
tatattcaaatcaat

SEQ ID NO: 841245 - DNA, 15 bp, Homo sapiens
atattcaaatcaata

SEQ ID NO: 841246 - DNA, 15 bp, Homo sapiens
tattcaaatcaatag

SEQ ID NO: 841247 - DNA, 15 bp, Homo sapiens
attcaaatcaatagc

SEQ ID NO: 841248 - DNA, 15 bp, Homo sapiens
ttcaaatcaatagct

SEQ ID NO: 841249 - DNA, 15 bp, Homo sapiens
tcaaatcaatagctt

SEQ ID NO: 841250 - DNA, 15 bp, Homo sapiens
caaatcaatagcttc

SEQ ID NO: 841251 - DNA, 15 bp, Homo sapiens
aaatcaatagcttct

SEQ ID NO: 841252 - DNA, 15 bp, Homo sapiens
aatcaatagcttcta

SEQ ID NO: 841253 - DNA, 15 bp, Homo sapiens
atcaatagcttctaa

SEQ ID NO: 841254 - DNA, 15 bp, Homo sapiens
tcaatagcttctaag

SEQ ID NO: 841255 - DNA, 15 bp, Homo sapiens
caatagcttctaaga

SEQ ID NO: 841256 - DNA, 15 bp, Homo sapiens
aatagcttctaagaa

SEQ ID NO: 841257 - DNA, 15 bp, Homo sapiens
atagcttctaagaat

SEQ ID NO: 841258 - DNA, 15 bp, Homo sapiens
tagcttctaagaata

SEQ ID NO: 841259 - DNA, 15 bp, Homo sapiens
agcttctaagaatag

SEQ ID NO: 841260 - DNA, 15 bp, Homo sapiens
gcttctaagaataga

SEQ ID NO: 841261 - DNA, 15 bp, Homo sapiens
cttctaagaatagaa

SEQ ID NO: 841262 - DNA, 15 bp, Homo sapiens
ttctaagaatagaaa

SEQ ID NO: 841263 - DNA, 15 bp, Homo sapiens
tctaagaatagaaac

SEQ ID NO: 841264 - DNA, 15 bp, Homo sapiens
ctaagaatagaaacc

SEQ ID NO: 841265 - DNA, 15 bp, Homo sapiens
taagaatagaaacca

SEQ ID NO: 841266 - DNA, 15 bp, Homo sapiens
aagaatagaaaccac

SEQ ID NO: 841267 - DNA, 15 bp, Homo sapiens
agaatagaaaccact

SEQ ID NO: 841268 - DNA, 15 bp, Homo sapiens
gaatagaaaccactt

SEQ ID NO: 841269 - DNA, 15 bp, Homo sapiens
aatagaaaccacttt

SEQ ID NO: 841270 - DNA, 15 bp, Homo sapiens
atagaaaccactttg

SEQ ID NO: 841271 - DNA, 15 bp, Homo sapiens
tagaaaccactttgc

SEQ ID NO: 841272 - DNA, 15 bp, Homo sapiens
agaaaccactttgca

SEQ ID NO: 841273 - DNA, 15 bp, Homo sapiens
gaaaccactttgcaa

SEQ ID NO: 841274 - DNA, 15 bp, Homo sapiens
aaaccactttgcaac

SEQ ID NO: 841275 - DNA, 15 bp, Homo sapiens
aaccactttgcaaca

SEQ ID NO: 841276 - DNA, 15 bp, Homo sapiens
accactttgcaacat

SEQ ID NO: 841277 - DNA, 15 bp, Homo sapiens
ccactttgcaacatt

SEQ ID NO: 841278 - DNA, 15 bp, Homo sapiens
cactttgcaacattt

SEQ ID NO: 841279 - DNA, 15 bp, Homo sapiens
actttgcaacatttg

SEQ ID NO: 841280 - DNA, 15 bp, Homo sapiens
ctttgcaacatttgt

SEQ ID NO: 841281 - DNA, 15 bp, Homo sapiens
tttgcaacatttgta

SEQ ID NO: 841282 - DNA, 15 bp, Homo sapiens
ttgcaacatttgtaa

SEQ ID NO: 841283 - DNA, 15 bp, Homo sapiens
tgcaacatttgtaaa

SEQ ID NO: 841284 - DNA, 15 bp, Homo sapiens
gcaacatttgtaaaa

SEQ ID NO: 841285 - DNA, 15 bp, Homo sapiens
caacatttgtaaaat

SEQ ID NO: 841286 - DNA, 15 bp, Homo sapiens
aacatttgtaaaatg

SEQ ID NO: 841287 - DNA, 15 bp, Homo sapiens
acatttgtaaaatga

SEQ ID NO: 841288 - DNA, 15 bp, Homo sapiens
catttgtaaaatgag

SEQ ID NO: 841289 - DNA, 15 bp, Homo sapiens
atttgtaaaatgagc

SEQ ID NO: 841290 - DNA, 15 bp, Homo sapiens
tttgtaaaatgagct

SEQ ID NO: 841291 - DNA, 15 bp, Homo sapiens
ttgtaaaatgagctt

SEQ ID NO: 841292 - DNA, 15 bp, Homo sapiens
tgtaaaatgagctta

SEQ ID NO: 841293 - DNA, 15 bp, Homo sapiens
gtaaaatgagcttat

SEQ ID NO: 841294 - DNA, 15 bp, Homo sapiens
taaaatgagcttatc

SEQ ID NO: 841295 - DNA, 15 bp, Homo sapiens
aaaatgagcttatcc

SEQ ID NO: 841296 - DNA, 15 bp, Homo sapiens
aaatgagcttatcct

SEQ ID NO: 841297 - DNA, 15 bp, Homo sapiens
aatgagcttatccta

SEQ ID NO: 841298 - DNA, 15 bp, Homo sapiens
atgagcttatcctag

SEQ ID NO: 841299 - DNA, 15 bp, Homo sapiens
tgagcttatcctagg

SEQ ID NO: 841300 - DNA, 15 bp, Homo sapiens
gagcttatcctaggt

SEQ ID NO: 841301 - DNA, 15 bp, Homo sapiens
agcttatcctaggtt

SEQ ID NO: 841302 - DNA, 15 bp, Homo sapiens
gcttatcctaggttt

SEQ ID NO: 841303 - DNA, 15 bp, Homo sapiens
cttatcctaggtttc

SEQ ID NO: 841304 - DNA, 15 bp, Homo sapiens
ttatcctaggtttcc

SEQ ID NO: 841305 - DNA, 15 bp, Homo sapiens
tatcctaggtttccc

SEQ ID NO: 841306 - DNA, 15 bp, Homo sapiens
atcctaggtttcccc

SEQ ID NO: 841307 - DNA, 15 bp, Homo sapiens
tcctaggtttcccct

SEQ ID NO: 841308 - DNA, 15 bp, Homo sapiens
cctaggtttcccctc

SEQ ID NO: 841309 - DNA, 15 bp, Homo sapiens
ctaggtttcccctca

SEQ ID NO: 841310 - DNA, 15 bp, Homo sapiens
taggtttcccctcaa

SEQ ID NO: 841311 - DNA, 15 bp, Homo sapiens
aggtttcccctcaac

SEQ ID NO: 841312 - DNA, 15 bp, Homo sapiens
ggtttcccctcaacc

SEQ ID NO: 841313 - DNA, 15 bp, Homo sapiens
gtttcccctcaacca

SEQ ID NO: 841314 - DNA, 15 bp, Homo sapiens
tttcccctcaaccat

SEQ ID NO: 841315 - DNA, 15 bp, Homo sapiens
ttcccctcaaccatg

SEQ ID NO: 841316 - DNA, 15 bp, Homo sapiens
tcccctcaaccatga

SEQ ID NO: 841317 - DNA, 15 bp, Homo sapiens
cccctcaaccatgaa

SEQ ID NO: 841318 - DNA, 15 bp, Homo sapiens
ccctcaaccatgaaa

SEQ ID NO: 841319 - DNA, 15 bp, Homo sapiens
cctcaaccatgaaaa

SEQ ID NO: 841320 - DNA, 15 bp, Homo sapiens
ctcaaccatgaaaaa

SEQ ID NO: 841321 - DNA, 15 bp, Homo sapiens
tcaaccatgaaaaac

SEQ ID NO: 841322 - DNA, 15 bp, Homo sapiens
caaccatgaaaaact

SEQ ID NO: 841323 - DNA, 15 bp, Homo sapiens
aaccatgaaaaacta

SEQ ID NO: 841324 - DNA, 15 bp, Homo sapiens
accatgaaaaactat

SEQ ID NO: 841325 - DNA, 15 bp, Homo sapiens
ccatgaaaaactata

SEQ ID NO: 841326 - DNA, 15 bp, Homo sapiens
catgaaaaactataa

SEQ ID NO: 841327 - DNA, 15 bp, Homo sapiens
atgaaaaactataaa

SEQ ID NO: 841328 - DNA, 15 bp, Homo sapiens
tgaaaaactataaaa

SEQ ID NO: 841329 - DNA, 15 bp, Homo sapiens
gaaaaactataaaaa

SEQ ID NO: 841330 - DNA, 15 bp, Homo sapiens
aaaaactataaaaat

SEQ ID NO: 841331 - DNA, 15 bp, Homo sapiens
aaaactataaaaatt

SEQ ID NO: 841332 - DNA, 15 bp, Homo sapiens
aaactataaaaatta

SEQ ID NO: 841333 - DNA, 15 bp, Homo sapiens
aactataaaaattaa

SEQ ID NO: 841334 - DNA, 15 bp, Homo sapiens
actataaaaattaag

SEQ ID NO: 841335 - DNA, 15 bp, Homo sapiens
ctataaaaattaagc

SEQ ID NO: 841336 - DNA, 15 bp, Homo sapiens
tataaaaattaagct

SEQ ID NO: 841337 - DNA, 15 bp, Homo sapiens
ataaaaattaagctc

SEQ ID NO: 841338 - DNA, 15 bp, Homo sapiens
taaaaattaagctct

SEQ ID NO: 841339 - DNA, 15 bp, Homo sapiens
aaaaattaagctctt

SEQ ID NO: 841340 - DNA, 15 bp, Homo sapiens
aaaattaagctcttt

SEQ ID NO: 841341 - DNA, 15 bp, Homo sapiens
aaattaagctctttt

SEQ ID NO: 841342 - DNA, 15 bp, Homo sapiens
aattaagctcttttc

SEQ ID NO: 841343 - DNA, 15 bp, Homo sapiens
attaagctcttttcc

SEQ ID NO: 841344 - DNA, 15 bp, Homo sapiens
ttaagctcttttcca

SEQ ID NO: 841345 - DNA, 15 bp, Homo sapiens
taagctcttttccaa

SEQ ID NO: 841346 - DNA, 15 bp, Homo sapiens
aagctcttttccaag

SEQ ID NO: 841347 - DNA, 15 bp, Homo sapiens
agctcttttccaagg

SEQ ID NO: 841348 - DNA, 15 bp, Homo sapiens
gctcttttccaaggt

SEQ ID NO: 841349 - DNA, 15 bp, Homo sapiens
ctcttttccaaggta

SEQ ID NO: 841350 - DNA, 15 bp, Homo sapiens
tcttttccaaggtag

SEQ ID NO: 841351 - DNA, 15 bp, Homo sapiens
cttttccaaggtagg

SEQ ID NO: 841352 - DNA, 15 bp, Homo sapiens
ttttccaaggtagga

SEQ ID NO: 841353 - DNA, 15 bp, Homo sapiens
tttccaaggtaggag

SEQ ID NO: 841354 - DNA, 15 bp, Homo sapiens
ttccaaggtaggaga

SEQ ID NO: 841355 - DNA, 15 bp, Homo sapiens
tccaaggtaggagat

SEQ ID NO: 841356 - DNA, 15 bp, Homo sapiens
ccaaggtaggagata

SEQ ID NO: 841357 - DNA, 15 bp, Homo sapiens
caaggtaggagatac

SEQ ID NO: 841358 - DNA, 15 bp, Homo sapiens
aaggtaggagataca

SEQ ID NO: 841359 - DNA, 15 bp, Homo sapiens
aggtaggagatacat

SEQ ID NO: 841360 - DNA, 15 bp, Homo sapiens
ggtaggagatacata

SEQ ID NO: 841361 - DNA, 15 bp, Homo sapiens
gtaggagatacatat

SEQ ID NO: 841362 - DNA, 15 bp, Homo sapiens
taggagatacatatg

SEQ ID NO: 841363 - DNA, 15 bp, Homo sapiens
aggagatacatatgt

SEQ ID NO: 841364 - DNA, 15 bp, Homo sapiens
ggagatacatatgtc

SEQ ID NO: 841365 - DNA, 15 bp, Homo sapiens
gagatacatatgtct

SEQ ID NO: 841366 - DNA, 15 bp, Homo sapiens
agatacatatgtctg

SEQ ID NO: 841367 - DNA, 15 bp, Homo sapiens
gatacatatgtctgc

SEQ ID NO: 841368 - DNA, 15 bp, Homo sapiens
atacatatgtctgcc

SEQ ID NO: 841369 - DNA, 15 bp, Homo sapiens
tacatatgtctgccc

SEQ ID NO: 841370 - DNA, 15 bp, Homo sapiens
acatatgtctgcccc

SEQ ID NO: 841371 - DNA, 15 bp, Homo sapiens
catatgtctgcccca

SEQ ID NO: 841372 - DNA, 15 bp, Homo sapiens
atatgtctgccccat

SEQ ID NO: 841373 - DNA, 15 bp, Homo sapiens
tatgtctgccccatt

SEQ ID NO: 841374 - DNA, 15 bp, Homo sapiens
atgtctgccccattc

SEQ ID NO: 841375 - DNA, 15 bp, Homo sapiens
tgtctgccccattcc

SEQ ID NO: 841376 - DNA, 15 bp, Homo sapiens
gtctgccccattccc

SEQ ID NO: 841377 - DNA, 15 bp, Homo sapiens
tctgccccattccct

SEQ ID NO: 841378 - DNA, 15 bp, Homo sapiens
ctgccccattccctt

SEQ ID NO: 841379 - DNA, 15 bp, Homo sapiens
tgccccattcccttg

SEQ ID NO: 841380 - DNA, 15 bp, Homo sapiens
gccccattcccttgg

SEQ ID NO: 841381 - DNA, 15 bp, Homo sapiens
ccccattcccttggt

SEQ ID NO: 841382 - DNA, 15 bp, Homo sapiens
cccattcccttggtg

SEQ ID NO: 841383 - DNA, 15 bp, Homo sapiens
ccattcccttggtgg

SEQ ID NO: 841384 - DNA, 15 bp, Homo sapiens
cattcccttggtggt

SEQ ID NO: 841385 - DNA, 15 bp, Homo sapiens
attcccttggtggta

SEQ ID NO: 841386 - DNA, 15 bp, Homo sapiens
ttcccttggtggtag

SEQ ID NO: 841387 - DNA, 15 bp, Homo sapiens
tcccttggtggtagc

SEQ ID NO: 841388 - DNA, 15 bp, Homo sapiens
cccttggtggtagct

SEQ ID NO: 841389 - DNA, 15 bp, Homo sapiens
ccttggtggtagctt

SEQ ID NO: 841390 - DNA, 15 bp, Homo sapiens
cttggtggtagctta

SEQ ID NO: 841391 - DNA, 15 bp, Homo sapiens
ttggtggtagcttag

SEQ ID NO: 841392 - DNA, 15 bp, Homo sapiens
tggtggtagcttagt

SEQ ID NO: 841393 - DNA, 15 bp, Homo sapiens
ggtggtagcttagtc

SEQ ID NO: 841394 - DNA, 15 bp, Homo sapiens
gtggtagcttagtct

SEQ ID NO: 841395 - DNA, 15 bp, Homo sapiens
tggtagcttagtctg

SEQ ID NO: 841396 - DNA, 15 bp, Homo sapiens
ggtagcttagtctgg

SEQ ID NO: 841397 - DNA, 15 bp, Homo sapiens
gtagcttagtctgga

SEQ ID NO: 841398 - DNA, 15 bp, Homo sapiens
tagcttagtctggaa

SEQ ID NO: 841399 - DNA, 15 bp, Homo sapiens
agcttagtctggaaa

SEQ ID NO: 841400 - DNA, 15 bp, Homo sapiens
gcttagtctggaaaa

SEQ ID NO: 841401 - DNA, 15 bp, Homo sapiens
cttagtctggaaaag

SEQ ID NO: 841402 - DNA, 15 bp, Homo sapiens
ttagtctggaaaaga

SEQ ID NO: 841403 - DNA, 15 bp, Homo sapiens
tagtctggaaaagac

SEQ ID NO: 841404 - DNA, 15 bp, Homo sapiens
agtctggaaaagacc

SEQ ID NO: 841405 - DNA, 15 bp, Homo sapiens
gtctggaaaagaccc

SEQ ID NO: 841406 - DNA, 15 bp, Homo sapiens
tctggaaaagaccca

SEQ ID NO: 841407 - DNA, 15 bp, Homo sapiens
ctggaaaagacccag

SEQ ID NO: 841408 - DNA, 15 bp, Homo sapiens
tggaaaagacccagg

SEQ ID NO: 841409 - DNA, 15 bp, Homo sapiens
ggaaaagacccaggc

SEQ ID NO: 841410 - DNA, 15 bp, Homo sapiens
gaaaagacccaggca

SEQ ID NO: 841411 - DNA, 15 bp, Homo sapiens
aaaagacccaggcaa

SEQ ID NO: 841412 - DNA, 15 bp, Homo sapiens
aaagacccaggcaag

SEQ ID NO: 841413 - DNA, 15 bp, Homo sapiens
aagacccaggcaagt

SEQ ID NO: 841414 - DNA, 15 bp, Homo sapiens
agacccaggcaagtg

SEQ ID NO: 841415 - DNA, 15 bp, Homo sapiens
gacccaggcaagtgc

SEQ ID NO: 841416 - DNA, 15 bp, Homo sapiens
acccaggcaagtgct

SEQ ID NO: 841417 - DNA, 15 bp, Homo sapiens
cccaggcaagtgctg

SEQ ID NO: 841418 - DNA, 15 bp, Homo sapiens
ccaggcaagtgctgt

SEQ ID NO: 841419 - DNA, 15 bp, Homo sapiens
caggcaagtgctgtc

SEQ ID NO: 841420 - DNA, 15 bp, Homo sapiens
aggcaagtgctgtct

SEQ ID NO: 841421 - DNA, 15 bp, Homo sapiens
ggcaagtgctgtctt

SEQ ID NO: 841422 - DNA, 15 bp, Homo sapiens
gcaagtgctgtcttg

SEQ ID NO: 841423 - DNA, 15 bp, Homo sapiens
caagtgctgtcttgt

SEQ ID NO: 841424 - DNA, 15 bp, Homo sapiens
aagtgctgtcttgtc

SEQ ID NO: 841425 - DNA, 15 bp, Homo sapiens
agtgctgtcttgtct

SEQ ID NO: 841426 - DNA, 15 bp, Homo sapiens
gtgctgtcttgtcta

SEQ ID NO: 841427 - DNA, 15 bp, Homo sapiens
tgctgtcttgtctag

SEQ ID NO: 841428 - DNA, 15 bp, Homo sapiens
gctgtcttgtctaga

SEQ ID NO: 841429 - DNA, 15 bp, Homo sapiens
ctgtcttgtctagac

SEQ ID NO: 841430 - DNA, 15 bp, Homo sapiens
tgtcttgtctagacc

SEQ ID NO: 841431 - DNA, 15 bp, Homo sapiens
gtcttgtctagacca

SEQ ID NO: 841432 - DNA, 15 bp, Homo sapiens
tcttgtctagaccat

SEQ ID NO: 841433 - DNA, 15 bp, Homo sapiens
cttgtctagaccata

SEQ ID NO: 841434 - DNA, 15 bp, Homo sapiens
ttgtctagaccataa

SEQ ID NO: 841435 - DNA, 15 bp, Homo sapiens
tgtctagaccataat

SEQ ID NO: 841436 - DNA, 15 bp, Homo sapiens
gtctagaccataatg

SEQ ID NO: 841437 - DNA, 15 bp, Homo sapiens
tctagaccataatgc

SEQ ID NO: 841438 - DNA, 15 bp, Homo sapiens
ctagaccataatgcc

SEQ ID NO: 841439 - DNA, 15 bp, Homo sapiens
tagaccataatgcct

SEQ ID NO: 841440 - DNA, 15 bp, Homo sapiens
agaccataatgcctt

SEQ ID NO: 841441 - DNA, 15 bp, Homo sapiens
gaccataatgccttg

SEQ ID NO: 841442 - DNA, 15 bp, Homo sapiens
accataatgccttgt

SEQ ID NO: 841443 - DNA, 15 bp, Homo sapiens
ccataatgccttgta

SEQ ID NO: 841444 - DNA, 15 bp, Homo sapiens
cataatgccttgtag

SEQ ID NO: 841445 - DNA, 15 bp, Homo sapiens
ataatgccttgtagt

SEQ ID NO: 841446 - DNA, 15 bp, Homo sapiens
taatgccttgtagtg

SEQ ID NO: 841447 - DNA, 15 bp, Homo sapiens
aatgccttgtagtgg

SEQ ID NO: 841448 - DNA, 15 bp, Homo sapiens
atgccttgtagtggg

SEQ ID NO: 841449 - DNA, 15 bp, Homo sapiens
tgccttgtagtggga

SEQ ID NO: 841450 - DNA, 15 bp, Homo sapiens
gccttgtagtgggag

SEQ ID NO: 841451 - DNA, 15 bp, Homo sapiens
ccttgtagtgggagg

SEQ ID NO: 841452 - DNA, 15 bp, Homo sapiens
cttgtagtgggagga

SEQ ID NO: 841453 - DNA, 15 bp, Homo sapiens
ttgtagtgggaggat

SEQ ID NO: 841454 - DNA, 15 bp, Homo sapiens
tgtagtgggaggatg

SEQ ID NO: 841455 - DNA, 15 bp, Homo sapiens
gtagtgggaggatgt

SEQ ID NO: 841456 - DNA, 15 bp, Homo sapiens
tagtgggaggatgta

SEQ ID NO: 841457 - DNA, 15 bp, Homo sapiens
agtgggaggatgtat

SEQ ID NO: 841458 - DNA, 15 bp, Homo sapiens
gtgggaggatgtatt

SEQ ID NO: 841459 - DNA, 15 bp, Homo sapiens
tgggaggatgtattg

SEQ ID NO: 841460 - DNA, 15 bp, Homo sapiens
gggaggatgtattgc

SEQ ID NO: 841461 - DNA, 15 bp, Homo sapiens
ggaggatgtattgct

SEQ ID NO: 841462 - DNA, 15 bp, Homo sapiens
gaggatgtattgctc

SEQ ID NO: 841463 - DNA, 15 bp, Homo sapiens
aggatgtattgctca

SEQ ID NO: 841464 - DNA, 15 bp, Homo sapiens
ggatgtattgctcaa

SEQ ID NO: 841465 - DNA, 15 bp, Homo sapiens
gatgtattgctcaag

SEQ ID NO: 841466 - DNA, 15 bp, Homo sapiens
atgtattgctcaagc

SEQ ID NO: 841467 - DNA, 15 bp, Homo sapiens
tgtattgctcaagcc

SEQ ID NO: 841468 - DNA, 15 bp, Homo sapiens
gtattgctcaagcca

SEQ ID NO: 841469 - DNA, 15 bp, Homo sapiens
tattgctcaagccaa

SEQ ID NO: 841470 - DNA, 15 bp, Homo sapiens
attgctcaagccaag

SEQ ID NO: 841471 - DNA, 15 bp, Homo sapiens
ttgctcaagccaagg

SEQ ID NO: 841472 - DNA, 15 bp, Homo sapiens
tgctcaagccaaggg

SEQ ID NO: 841473 - DNA, 15 bp, Homo sapiens
gctcaagccaaggga

SEQ ID NO: 841474 - DNA, 15 bp, Homo sapiens
ctcaagccaagggac

SEQ ID NO: 841475 - DNA, 15 bp, Homo sapiens
tcaagccaagggacg

SEQ ID NO: 841476 - DNA, 15 bp, Homo sapiens
caagccaagggacgc

SEQ ID NO: 841477 - DNA, 15 bp, Homo sapiens
aagccaagggacgca

SEQ ID NO: 841478 - DNA, 15 bp, Homo sapiens
agccaagggacgcaa

SEQ ID NO: 841479 - DNA, 15 bp, Homo sapiens
gccaagggacgcaac

SEQ ID NO: 841480 - DNA, 15 bp, Homo sapiens
ccaagggacgcaact

SEQ ID NO: 841481 - DNA, 15 bp, Homo sapiens
caagggacgcaactg

SEQ ID NO: 841482 - DNA, 15 bp, Homo sapiens
aagggacgcaactga

SEQ ID NO: 841483 - DNA, 15 bp, Homo sapiens
agggacgcaactgag

SEQ ID NO: 841484 - DNA, 15 bp, Homo sapiens
gggacgcaactgagt

SEQ ID NO: 841485 - DNA, 15 bp, Homo sapiens
ggacgcaactgagta

SEQ ID NO: 841486 - DNA, 15 bp, Homo sapiens
gacgcaactgagtac

SEQ ID NO: 841487 - DNA, 15 bp, Homo sapiens
acgcaactgagtaca

SEQ ID NO: 841488 - DNA, 15 bp, Homo sapiens
cgcaactgagtacag

SEQ ID NO: 841489 - DNA, 15 bp, Homo sapiens
gcaactgagtacaga

SEQ ID NO: 841490 - DNA, 15 bp, Homo sapiens
caactgagtacagaa

SEQ ID NO: 841491 - DNA, 15 bp, Homo sapiens
aactgagtacagaag

SEQ ID NO: 841492 - DNA, 15 bp, Homo sapiens
actgagtacagaagg

SEQ ID NO: 841493 - DNA, 15 bp, Homo sapiens
ctgagtacagaaggg

SEQ ID NO: 841494 - DNA, 15 bp, Homo sapiens
tgagtacagaaggga

SEQ ID NO: 841495 - DNA, 15 bp, Homo sapiens
gagtacagaagggag

SEQ ID NO: 841496 - DNA, 15 bp, Homo sapiens
agtacagaagggaga

SEQ ID NO: 841497 - DNA, 15 bp, Homo sapiens
gtacagaagggagat

SEQ ID NO: 841498 - DNA, 15 bp, Homo sapiens
tacagaagggagatg

SEQ ID NO: 841499 - DNA, 15 bp, Homo sapiens
acagaagggagatga

SEQ ID NO: 841500 - DNA, 15 bp, Homo sapiens
cagaagggagatgat

SEQ ID NO: 841501 - DNA, 15 bp, Homo sapiens
agaagggagatgatg

SEQ ID NO: 841502 - DNA, 15 bp, Homo sapiens
gaagggagatgatga

SEQ ID NO: 841503 - DNA, 15 bp, Homo sapiens
aagggagatgatgac

SEQ ID NO: 841504 - DNA, 15 bp, Homo sapiens
agggagatgatgact

SEQ ID NO: 841505 - DNA, 15 bp, Homo sapiens
gggagatgatgactg

SEQ ID NO: 841506 - DNA, 15 bp, Homo sapiens
ggagatgatgactgg

SEQ ID NO: 841507 - DNA, 15 bp, Homo sapiens
gagatgatgactggt

SEQ ID NO: 841508 - DNA, 15 bp, Homo sapiens
agatgatgactggtt

SEQ ID NO: 841509 - DNA, 15 bp, Homo sapiens
gatgatgactggttt

SEQ ID NO: 841510 - DNA, 15 bp, Homo sapiens
atgatgactggtttg

SEQ ID NO: 841511 - DNA, 15 bp, Homo sapiens
tgatgactggtttgt

SEQ ID NO: 841512 - DNA, 15 bp, Homo sapiens
gatgactggtttgtt

SEQ ID NO: 841513 - DNA, 15 bp, Homo sapiens
atgactggtttgttg

SEQ ID NO: 841514 - DNA, 15 bp, Homo sapiens
tgactggtttgttga

SEQ ID NO: 841515 - DNA, 15 bp, Homo sapiens
gactggtttgttgag

SEQ ID NO: 841516 - DNA, 15 bp, Homo sapiens
actggtttgttgagg

SEQ ID NO: 841517 - DNA, 15 bp, Homo sapiens
ctggtttgttgaggg

SEQ ID NO: 841518 - DNA, 15 bp, Homo sapiens
tggtttgttgaggga

SEQ ID NO: 841519 - DNA, 15 bp, Homo sapiens
ggtttgttgagggac

SEQ ID NO: 841520 - DNA, 15 bp, Homo sapiens
gtttgttgagggaca

SEQ ID NO: 841521 - DNA, 15 bp, Homo sapiens
tttgttgagggacat

SEQ ID NO: 841522 - DNA, 15 bp, Homo sapiens
ttgttgagggacatg

SEQ ID NO: 841523 - DNA, 15 bp, Homo sapiens
tgttgagggacatgt

SEQ ID NO: 841524 - DNA, 15 bp, Homo sapiens
gttgagggacatgta

SEQ ID NO: 841525 - DNA, 15 bp, Homo sapiens
ttgagggacatgtaa

SEQ ID NO: 841526 - DNA, 15 bp, Homo sapiens
tgagggacatgtaag

SEQ ID NO: 841527 - DNA, 15 bp, Homo sapiens
gagggacatgtaaga

SEQ ID NO: 841528 - DNA, 15 bp, Homo sapiens
agggacatgtaagaa

SEQ ID NO: 841529 - DNA, 15 bp, Homo sapiens
gggacatgtaagaaa

SEQ ID NO: 841530 - DNA, 15 bp, Homo sapiens
ggacatgtaagaaag

SEQ ID NO: 841531 - DNA, 15 bp, Homo sapiens
gacatgtaagaaagc

SEQ ID NO: 841532 - DNA, 15 bp, Homo sapiens
acatgtaagaaagct

SEQ ID NO: 841533 - DNA, 15 bp, Homo sapiens
catgtaagaaagcta

SEQ ID NO: 841534 - DNA, 15 bp, Homo sapiens
atgtaagaaagctat

SEQ ID NO: 841535 - DNA, 15 bp, Homo sapiens
tgtaagaaagctata

SEQ ID NO: 841536 - DNA, 15 bp, Homo sapiens
gtaagaaagctataa

SEQ ID NO: 841537 - DNA, 15 bp, Homo sapiens
taagaaagctataaa

SEQ ID NO: 841538 - DNA, 15 bp, Homo sapiens
aagaaagctataaag

SEQ ID NO: 841539 - DNA, 15 bp, Homo sapiens
agaaagctataaagt

SEQ ID NO: 841540 - DNA, 15 bp, Homo sapiens
gaaagctataaagtt

SEQ ID NO: 841541 - DNA, 15 bp, Homo sapiens
aaagctataaagttt

SEQ ID NO: 841542 - DNA, 15 bp, Homo sapiens
aagctataaagttta

SEQ ID NO: 841543 - DNA, 15 bp, Homo sapiens
agctataaagtttag

SEQ ID NO: 841544 - DNA, 15 bp, Homo sapiens
gctataaagtttagt

SEQ ID NO: 841545 - DNA, 15 bp, Homo sapiens
ctataaagtttagtc

SEQ ID NO: 841546 - DNA, 15 bp, Homo sapiens
tataaagtttagtct

SEQ ID NO: 841547 - DNA, 15 bp, Homo sapiens
ataaagtttagtctc

SEQ ID NO: 841548 - DNA, 15 bp, Homo sapiens
taaagtttagtctca

SEQ ID NO: 841549 - DNA, 15 bp, Homo sapiens
aaagtttagtctcaa

SEQ ID NO: 841550 - DNA, 15 bp, Homo sapiens
aagtttagtctcaac

SEQ ID NO: 841551 - DNA, 15 bp, Homo sapiens
agtttagtctcaacc

SEQ ID NO: 841552 - DNA, 15 bp, Homo sapiens
gtttagtctcaacca

SEQ ID NO: 841553 - DNA, 15 bp, Homo sapiens
tttagtctcaaccat

SEQ ID NO: 841554 - DNA, 15 bp, Homo sapiens
ttagtctcaaccatt

SEQ ID NO: 841555 - DNA, 15 bp, Homo sapiens
tagtctcaaccattt

SEQ ID NO: 841556 - DNA, 15 bp, Homo sapiens
agtctcaaccatttg

SEQ ID NO: 841557 - DNA, 15 bp, Homo sapiens
gtctcaaccatttga

SEQ ID NO: 841558 - DNA, 15 bp, Homo sapiens
tctcaaccatttgaa

SEQ ID NO: 841559 - DNA, 15 bp, Homo sapiens
ctcaaccatttgaaa

SEQ ID NO: 841560 - DNA, 15 bp, Homo sapiens
tcaaccatttgaaag

SEQ ID NO: 841561 - DNA, 15 bp, Homo sapiens
caaccatttgaaaga

SEQ ID NO: 841562 - DNA, 15 bp, Homo sapiens
aaccatttgaaagaa

SEQ ID NO: 841563 - DNA, 15 bp, Homo sapiens
accatttgaaagaag

SEQ ID NO: 841564 - DNA, 15 bp, Homo sapiens
ccatttgaaagaagg

SEQ ID NO: 841565 - DNA, 15 bp, Homo sapiens
catttgaaagaagga

SEQ ID NO: 841566 - DNA, 15 bp, Homo sapiens
atttgaaagaaggaa

SEQ ID NO: 841567 - DNA, 15 bp, Homo sapiens
tttgaaagaaggaag

SEQ ID NO: 841568 - DNA, 15 bp, Homo sapiens
ttgaaagaaggaagc

SEQ ID NO: 841569 - DNA, 15 bp, Homo sapiens
tgaaagaaggaagca

SEQ ID NO: 841570 - DNA, 15 bp, Homo sapiens
gaaagaaggaagcag

SEQ ID NO: 841571 - DNA, 15 bp, Homo sapiens
aaagaaggaagcagt

SEQ ID NO: 841572 - DNA, 15 bp, Homo sapiens
aagaaggaagcagta

SEQ ID NO: 841573 - DNA, 15 bp, Homo sapiens
agaaggaagcagtag

SEQ ID NO: 841574 - DNA, 15 bp, Homo sapiens
gaaggaagcagtagg

SEQ ID NO: 841575 - DNA, 15 bp, Homo sapiens
aaggaagcagtaggt

SEQ ID NO: 841576 - DNA, 15 bp, Homo sapiens
aggaagcagtaggtt

SEQ ID NO: 841577 - DNA, 15 bp, Homo sapiens
ggaagcagtaggtta

SEQ ID NO: 841578 - DNA, 15 bp, Homo sapiens
gaagcagtaggttac

SEQ ID NO: 841579 - DNA, 15 bp, Homo sapiens
aagcagtaggttaca

SEQ ID NO: 841580 - DNA, 15 bp, Homo sapiens
agcagtaggttacag

SEQ ID NO: 841581 - DNA, 15 bp, Homo sapiens
gcagtaggttacagt

SEQ ID NO: 841582 - DNA, 15 bp, Homo sapiens
cagtaggttacagtg

SEQ ID NO: 841583 - DNA, 15 bp, Homo sapiens
agtaggttacagtgc

SEQ ID NO: 841584 - DNA, 15 bp, Homo sapiens
gtaggttacagtgca

SEQ ID NO: 841585 - DNA, 15 bp, Homo sapiens
taggttacagtgcag

SEQ ID NO: 841586 - DNA, 15 bp, Homo sapiens
aggttacagtgcagt

SEQ ID NO: 841587 - DNA, 15 bp, Homo sapiens
ggttacagtgcagta

SEQ ID NO: 841588 - DNA, 15 bp, Homo sapiens
gttacagtgcagtat

SEQ ID NO: 841589 - DNA, 15 bp, Homo sapiens
ttacagtgcagtatg

SEQ ID NO: 841590 - DNA, 15 bp, Homo sapiens
tacagtgcagtatga

SEQ ID NO: 841591 - DNA, 15 bp, Homo sapiens
acagtgcagtatgat

SEQ ID NO: 841592 - DNA, 15 bp, Homo sapiens
cagtgcagtatgata

SEQ ID NO: 841593 - DNA, 15 bp, Homo sapiens
agtgcagtatgatag

SEQ ID NO: 841594 - DNA, 15 bp, Homo sapiens
gtgcagtatgataga

SEQ ID NO: 841595 - DNA, 15 bp, Homo sapiens
tgcagtatgatagac

SEQ ID NO: 841596 - DNA, 15 bp, Homo sapiens
gcagtatgatagact

SEQ ID NO: 841597 - DNA, 15 bp, Homo sapiens
cagtatgatagactt

SEQ ID NO: 841598 - DNA, 15 bp, Homo sapiens
agtatgatagacttc

SEQ ID NO: 841599 - DNA, 15 bp, Homo sapiens
gtatgatagacttcc

SEQ ID NO: 841600 - DNA, 15 bp, Homo sapiens
tatgatagacttccc

SEQ ID NO: 841601 - DNA, 15 bp, Homo sapiens
atgatagacttccca

SEQ ID NO: 841602 - DNA, 15 bp, Homo sapiens
tgatagacttcccat

SEQ ID NO: 841603 - DNA, 15 bp, Homo sapiens
gatagacttcccatg

SEQ ID NO: 841604 - DNA, 15 bp, Homo sapiens
atagacttcccatgt

SEQ ID NO: 841605 - DNA, 15 bp, Homo sapiens
tagacttcccatgtg

SEQ ID NO: 841606 - DNA, 15 bp, Homo sapiens
agacttcccatgtgt

SEQ ID NO: 841607 - DNA, 15 bp, Homo sapiens
gacttcccatgtgtg

SEQ ID NO: 841608 - DNA, 15 bp, Homo sapiens
acttcccatgtgtga

SEQ ID NO: 841609 - DNA, 15 bp, Homo sapiens
cttcccatgtgtgaa

SEQ ID NO: 841610 - DNA, 15 bp, Homo sapiens
ttcccatgtgtgaaa

SEQ ID NO: 841611 - DNA, 15 bp, Homo sapiens
tcccatgtgtgaaat

SEQ ID NO: 841612 - DNA, 15 bp, Homo sapiens
cccatgtgtgaaatg

SEQ ID NO: 841613 - DNA, 15 bp, Homo sapiens
ccatgtgtgaaatgt

SEQ ID NO: 841614 - DNA, 15 bp, Homo sapiens
catgtgtgaaatgtg

SEQ ID NO: 841615 - DNA, 15 bp, Homo sapiens
atgtgtgaaatgtgt

SEQ ID NO: 841616 - DNA, 15 bp, Homo sapiens
tgtgtgaaatgtgtc

SEQ ID NO: 841617 - DNA, 15 bp, Homo sapiens
gtgtgaaatgtgtct

SEQ ID NO: 841618 - DNA, 15 bp, Homo sapiens
tgtgaaatgtgtctg

SEQ ID NO: 841619 - DNA, 15 bp, Homo sapiens
gtgaaatgtgtctgt

SEQ ID NO: 841620 - DNA, 15 bp, Homo sapiens
tgaaatgtgtctgta

SEQ ID NO: 841621 - DNA, 15 bp, Homo sapiens
gaaatgtgtctgtaa

SEQ ID NO: 841622 - DNA, 15 bp, Homo sapiens
aaatgtgtctgtaaa

SEQ ID NO: 841623 - DNA, 15 bp, Homo sapiens
aatgtgtctgtaaag

SEQ ID NO: 841624 - DNA, 15 bp, Homo sapiens
atgtgtctgtaaagg

SEQ ID NO: 841625 - DNA, 15 bp, Homo sapiens
tgtgtctgtaaaggg

SEQ ID NO: 841626 - DNA, 15 bp, Homo sapiens
gtgtctgtaaagggg

SEQ ID NO: 841627 - DNA, 15 bp, Homo sapiens
tgtctgtaaagggga

SEQ ID NO: 841628 - DNA, 15 bp, Homo sapiens
gtctgtaaaggggag

SEQ ID NO: 841629 - DNA, 15 bp, Homo sapiens
tctgtaaaggggagt

SEQ ID NO: 841630 - DNA, 15 bp, Homo sapiens
ctgtaaaggggagtg

SEQ ID NO: 841631 - DNA, 15 bp, Homo sapiens
tgtaaaggggagtga

SEQ ID NO: 841632 - DNA, 15 bp, Homo sapiens
gtaaaggggagtgag

SEQ ID NO: 841633 - DNA, 15 bp, Homo sapiens
taaaggggagtgaga

SEQ ID NO: 841634 - DNA, 15 bp, Homo sapiens
aaaggggagtgagat

SEQ ID NO: 841635 - DNA, 15 bp, Homo sapiens
aaggggagtgagatc

SEQ ID NO: 841636 - DNA, 15 bp, Homo sapiens
aggggagtgagatcc

SEQ ID NO: 841637 - DNA, 15 bp, Homo sapiens
ggggagtgagatccg

SEQ ID NO: 841638 - DNA, 15 bp, Homo sapiens
gggagtgagatccgg

SEQ ID NO: 841639 - DNA, 15 bp, Homo sapiens
ggagtgagatccgga

SEQ ID NO: 841640 - DNA, 15 bp, Homo sapiens
gagtgagatccggac

SEQ ID NO: 841641 - DNA, 15 bp, Homo sapiens
agtgagatccggacg

SEQ ID NO: 841642 - DNA, 15 bp, Homo sapiens
gtgagatccggacgg

SEQ ID NO: 841643 - DNA, 15 bp, Homo sapiens
tgagatccggacggg

SEQ ID NO: 841644 - DNA, 15 bp, Homo sapiens
gagatccggacgggt

SEQ ID NO: 841645 - DNA, 15 bp, Homo sapiens
agatccggacgggtt

SEQ ID NO: 841646 - DNA, 15 bp, Homo sapiens
gatccggacgggtta

SEQ ID NO: 841647 - DNA, 15 bp, Homo sapiens
atccggacgggttag

SEQ ID NO: 841648 - DNA, 15 bp, Homo sapiens
tccggacgggttagg

SEQ ID NO: 841649 - DNA, 15 bp, Homo sapiens
ccggacgggttaggt

SEQ ID NO: 841650 - DNA, 15 bp, Homo sapiens
cggacgggttaggta

SEQ ID NO: 841651 - DNA, 15 bp, Homo sapiens
ggacgggttaggtag

SEQ ID NO: 841652 - DNA, 15 bp, Homo sapiens
gacgggttaggtagt

SEQ ID NO: 841653 - DNA, 15 bp, Homo sapiens
acgggttaggtagtg

SEQ ID NO: 841654 - DNA, 15 bp, Homo sapiens
cgggttaggtagtgc

SEQ ID NO: 841655 - DNA, 15 bp, Homo sapiens
gggttaggtagtgct

SEQ ID NO: 841656 - DNA, 15 bp, Homo sapiens
ggttaggtagtgcta

SEQ ID NO: 841657 - DNA, 15 bp, Homo sapiens
gttaggtagtgctaa

SEQ ID NO: 841658 - DNA, 15 bp, Homo sapiens
ttaggtagtgctaat

SEQ ID NO: 841659 - DNA, 15 bp, Homo sapiens
taggtagtgctaata

SEQ ID NO: 841660 - DNA, 15 bp, Homo sapiens
aggtagtgctaataa

SEQ ID NO: 841661 - DNA, 15 bp, Homo sapiens
ggtagtgctaataag

SEQ ID NO: 841662 - DNA, 15 bp, Homo sapiens
gtagtgctaataaga

SEQ ID NO: 841663 - DNA, 15 bp, Homo sapiens
tagtgctaataagat

SEQ ID NO: 841664 - DNA, 15 bp, Homo sapiens
agtgctaataagatg

SEQ ID NO: 841665 - DNA, 15 bp, Homo sapiens
gtgctaataagatga

SEQ ID NO: 841666 - DNA, 15 bp, Homo sapiens
tgctaataagatgaa

SEQ ID NO: 841667 - DNA, 15 bp, Homo sapiens
gctaataagatgaag

SEQ ID NO: 841668 - DNA, 15 bp, Homo sapiens
ctaataagatgaaga

SEQ ID NO: 841669 - DNA, 15 bp, Homo sapiens
taataagatgaagaa

SEQ ID NO: 841670 - DNA, 15 bp, Homo sapiens
aataagatgaagaaa

SEQ ID NO: 841671 - DNA, 15 bp, Homo sapiens
ataagatgaagaaag

SEQ ID NO: 841672 - DNA, 15 bp, Homo sapiens
taagatgaagaaaga

SEQ ID NO: 841673 - DNA, 15 bp, Homo sapiens
aagatgaagaaagaa

SEQ ID NO: 841674 - DNA, 15 bp, Homo sapiens
agatgaagaaagaaa

SEQ ID NO: 841675 - DNA, 15 bp, Homo sapiens
gatgaagaaagaaaa

SEQ ID NO: 841676 - DNA, 15 bp, Homo sapiens
atgaagaaagaaaag

SEQ ID NO: 841677 - DNA, 15 bp, Homo sapiens
tgaagaaagaaaagt

SEQ ID NO: 841678 - DNA, 15 bp, Homo sapiens
gaagaaagaaaagta

SEQ ID NO: 841679 - DNA, 15 bp, Homo sapiens
aagaaagaaaagtat

SEQ ID NO: 841680 - DNA, 15 bp, Homo sapiens
agaaagaaaagtatc

SEQ ID NO: 841681 - DNA, 15 bp, Homo sapiens
gaaagaaaagtatct

SEQ ID NO: 841682 - DNA, 15 bp, Homo sapiens
aaagaaaagtatctt

SEQ ID NO: 841683 - DNA, 15 bp, Homo sapiens
aagaaaagtatcttg

SEQ ID NO: 841684 - DNA, 15 bp, Homo sapiens
agaaaagtatcttgg

SEQ ID NO: 841685 - DNA, 15 bp, Homo sapiens
gaaaagtatcttgga

SEQ ID NO: 841686 - DNA, 15 bp, Homo sapiens
aaaagtatcttggag

SEQ ID NO: 841687 - DNA, 15 bp, Homo sapiens
aaagtatcttggaga

SEQ ID NO: 841688 - DNA, 15 bp, Homo sapiens
aagtatcttggagaa

SEQ ID NO: 841689 - DNA, 15 bp, Homo sapiens
agtatcttggagaaa

SEQ ID NO: 841690 - DNA, 15 bp, Homo sapiens
gtatcttggagaaaa

SEQ ID NO: 841691 - DNA, 15 bp, Homo sapiens
tatcttggagaaaaa

SEQ ID NO: 841692 - DNA, 15 bp, Homo sapiens
atcttggagaaaaaa

SEQ ID NO: 841693 - DNA, 15 bp, Homo sapiens
tcttggagaaaaaaa

SEQ ID NO: 841694 - DNA, 15 bp, Homo sapiens
cttggagaaaaaaat

SEQ ID NO: 841695 - DNA, 15 bp, Homo sapiens
ttggagaaaaaaata

SEQ ID NO: 841696 - DNA, 15 bp, Homo sapiens
tggagaaaaaaatat

SEQ ID NO: 841697 - DNA, 15 bp, Homo sapiens
ggagaaaaaaatata

SEQ ID NO: 841698 - DNA, 15 bp, Homo sapiens
gagaaaaaaatatag

SEQ ID NO: 841699 - DNA, 15 bp, Homo sapiens
agaaaaaaatatagt

SEQ ID NO: 841700 - DNA, 15 bp, Homo sapiens
gaaaaaaatatagtt

SEQ ID NO: 841701 - DNA, 15 bp, Homo sapiens
aaaaaaatatagtta

SEQ ID NO: 841702 - DNA, 15 bp, Homo sapiens
aaaaaatatagttaa

SEQ ID NO: 841703 - DNA, 15 bp, Homo sapiens
aaaaatatagttaat

SEQ ID NO: 841704 - DNA, 15 bp, Homo sapiens
aaaatatagttaatc

SEQ ID NO: 841705 - DNA, 15 bp, Homo sapiens
aaatatagttaatcc

SEQ ID NO: 841706 - DNA, 15 bp, Homo sapiens
aatatagttaatcct

SEQ ID NO: 841707 - DNA, 15 bp, Homo sapiens
atatagttaatccta

SEQ ID NO: 841708 - DNA, 15 bp, Homo sapiens
tatagttaatcctaa

SEQ ID NO: 841709 - DNA, 15 bp, Homo sapiens
atagttaatcctaat

SEQ ID NO: 841710 - DNA, 15 bp, Homo sapiens
tagttaatcctaatg

SEQ ID NO: 841711 - DNA, 15 bp, Homo sapiens
agttaatcctaatgt

SEQ ID NO: 841712 - DNA, 15 bp, Homo sapiens
gttaatcctaatgtt

SEQ ID NO: 841713 - DNA, 15 bp, Homo sapiens
ttaatcctaatgttt

SEQ ID NO: 841714 - DNA, 15 bp, Homo sapiens
taatcctaatgttta

SEQ ID NO: 841715 - DNA, 15 bp, Homo sapiens
aatcctaatgtttac

SEQ ID NO: 841716 - DNA, 15 bp, Homo sapiens
atcctaatgtttaca

SEQ ID NO: 841717 - DNA, 15 bp, Homo sapiens
tcctaatgtttacag

SEQ ID NO: 841718 - DNA, 15 bp, Homo sapiens
cctaatgtttacaga

SEQ ID NO: 841719 - DNA, 15 bp, Homo sapiens
ctaatgtttacagac

SEQ ID NO: 841720 - DNA, 15 bp, Homo sapiens
taatgtttacagaca

SEQ ID NO: 841721 - DNA, 15 bp, Homo sapiens
aatgtttacagacac

SEQ ID NO: 841722 - DNA, 15 bp, Homo sapiens
atgtttacagacacc

SEQ ID NO: 841723 - DNA, 15 bp, Homo sapiens
tgtttacagacacct

SEQ ID NO: 841724 - DNA, 15 bp, Homo sapiens
gtttacagacacctt

SEQ ID NO: 841725 - DNA, 15 bp, Homo sapiens
tttacagacaccttc

SEQ ID NO: 841726 - DNA, 15 bp, Homo sapiens
ttacagacaccttct

SEQ ID NO: 841727 - DNA, 15 bp, Homo sapiens
tacagacaccttctg

SEQ ID NO: 841728 - DNA, 15 bp, Homo sapiens
acagacaccttctga

SEQ ID NO: 841729 - DNA, 15 bp, Homo sapiens
cagacaccttctgat

SEQ ID NO: 841730 - DNA, 15 bp, Homo sapiens
agacaccttctgatc

SEQ ID NO: 841731 - DNA, 15 bp, Homo sapiens
gacaccttctgatca

SEQ ID NO: 841732 - DNA, 15 bp, Homo sapiens
acaccttctgatcat

SEQ ID NO: 841733 - DNA, 15 bp, Homo sapiens
caccttctgatcata

SEQ ID NO: 841734 - DNA, 15 bp, Homo sapiens
accttctgatcataa

SEQ ID NO: 841735 - DNA, 15 bp, Homo sapiens
ccttctgatcataac

SEQ ID NO: 841736 - DNA, 15 bp, Homo sapiens
cttctgatcataaca

SEQ ID NO: 841737 - DNA, 15 bp, Homo sapiens
ttctgatcataacaa

SEQ ID NO: 841738 - DNA, 15 bp, Homo sapiens
tctgatcataacaaa

SEQ ID NO: 841739 - DNA, 15 bp, Homo sapiens
ctgatcataacaaaa

SEQ ID NO: 841740 - DNA, 15 bp, Homo sapiens
tgatcataacaaaaa

SEQ ID NO: 841741 - DNA, 15 bp, Homo sapiens
gatcataacaaaaat

SEQ ID NO: 841742 - DNA, 15 bp, Homo sapiens
atcataacaaaaata

SEQ ID NO: 841743 - DNA, 15 bp, Homo sapiens
tcataacaaaaatat

SEQ ID NO: 841744 - DNA, 15 bp, Homo sapiens
cataacaaaaatatt

SEQ ID NO: 841745 - DNA, 15 bp, Homo sapiens
ataacaaaaatattc

SEQ ID NO: 841746 - DNA, 15 bp, Homo sapiens
taacaaaaatattca

SEQ ID NO: 841747 - DNA, 15 bp, Homo sapiens
aacaaaaatattcaa

SEQ ID NO: 841748 - DNA, 15 bp, Homo sapiens
acaaaaatattcaag

SEQ ID NO: 841749 - DNA, 15 bp, Homo sapiens
caaaaatattcaagt

SEQ ID NO: 841750 - DNA, 15 bp, Homo sapiens
aaaaatattcaagta

SEQ ID NO: 841751 - DNA, 15 bp, Homo sapiens
aaaatattcaagtaa

SEQ ID NO: 841752 - DNA, 15 bp, Homo sapiens
aaatattcaagtaac

SEQ ID NO: 841753 - DNA, 15 bp, Homo sapiens
aatattcaagtaact

SEQ ID NO: 841754 - DNA, 15 bp, Homo sapiens
atattcaagtaactc

SEQ ID NO: 841755 - DNA, 15 bp, Homo sapiens
tattcaagtaactca

SEQ ID NO: 841756 - DNA, 15 bp, Homo sapiens
attcaagtaactcaa

SEQ ID NO: 841757 - DNA, 15 bp, Homo sapiens
ttcaagtaactcaag

SEQ ID NO: 841758 - DNA, 15 bp, Homo sapiens
tcaagtaactcaagc

SEQ ID NO: 841759 - DNA, 15 bp, Homo sapiens
caagtaactcaagca

SEQ ID NO: 841760 - DNA, 15 bp, Homo sapiens
aagtaactcaagcaa

SEQ ID NO: 841761 - DNA, 15 bp, Homo sapiens
agtaactcaagcaat

SEQ ID NO: 841762 - DNA, 15 bp, Homo sapiens
gtaactcaagcaatt

SEQ ID NO: 841763 - DNA, 15 bp, Homo sapiens
taactcaagcaattc

SEQ ID NO: 841764 - DNA, 15 bp, Homo sapiens
aactcaagcaattcg

SEQ ID NO: 841765 - DNA, 15 bp, Homo sapiens
actcaagcaattcga

SEQ ID NO: 841766 - DNA, 15 bp, Homo sapiens
ctcaagcaattcgag

SEQ ID NO: 841767 - DNA, 15 bp, Homo sapiens
tcaagcaattcgagt

SEQ ID NO: 841768 - DNA, 15 bp, Homo sapiens
caagcaattcgagtg

SEQ ID NO: 841769 - DNA, 15 bp, Homo sapiens
aagcaattcgagtgg

SEQ ID NO: 841770 - DNA, 15 bp, Homo sapiens
agcaattcgagtgga

SEQ ID NO: 841771 - DNA, 15 bp, Homo sapiens
gcaattcgagtggag

SEQ ID NO: 841772 - DNA, 15 bp, Homo sapiens
caattcgagtggagg

SEQ ID NO: 841773 - DNA, 15 bp, Homo sapiens
aattcgagtggaggt

SEQ ID NO: 841774 - DNA, 15 bp, Homo sapiens
attcgagtggaggtg

SEQ ID NO: 841775 - DNA, 15 bp, Homo sapiens
ttcgagtggaggtgt

SEQ ID NO: 841776 - DNA, 15 bp, Homo sapiens
tcgagtggaggtgtt

SEQ ID NO: 841777 - DNA, 15 bp, Homo sapiens
cgagtggaggtgttg

SEQ ID NO: 841778 - DNA, 15 bp, Homo sapiens
gagtggaggtgttgg

SEQ ID NO: 841779 - DNA, 15 bp, Homo sapiens
agtggaggtgttggg

SEQ ID NO: 841780 - DNA, 15 bp, Homo sapiens
gtggaggtgttgggg

SEQ ID NO: 841781 - DNA, 15 bp, Homo sapiens
tggaggtgttggggc

SEQ ID NO: 841782 - DNA, 15 bp, Homo sapiens
ggaggtgttggggct

SEQ ID NO: 841783 - DNA, 15 bp, Homo sapiens
gaggtgttggggctt

SEQ ID NO: 841784 - DNA, 15 bp, Homo sapiens
aggtgttggggcttt

SEQ ID NO: 841785 - DNA, 15 bp, Homo sapiens
ggtgttggggctttg

SEQ ID NO: 841786 - DNA, 15 bp, Homo sapiens
gtgttggggctttgg

SEQ ID NO: 841787 - DNA, 15 bp, Homo sapiens
tgttggggctttgga

SEQ ID NO: 841788 - DNA, 15 bp, Homo sapiens
gttggggctttggat

SEQ ID NO: 841789 - DNA, 15 bp, Homo sapiens
ttggggctttggatt

SEQ ID NO: 841790 - DNA, 15 bp, Homo sapiens
tggggctttggattg

SEQ ID NO: 841791 - DNA, 15 bp, Homo sapiens
ggggctttggattga

SEQ ID NO: 841792 - DNA, 15 bp, Homo sapiens
gggctttggattgat

SEQ ID NO: 841793 - DNA, 15 bp, Homo sapiens
ggctttggattgata

SEQ ID NO: 841794 - DNA, 15 bp, Homo sapiens
gctttggattgataa

SEQ ID NO: 841795 - DNA, 15 bp, Homo sapiens
ctttggattgataag

SEQ ID NO: 841796 - DNA, 15 bp, Homo sapiens
tttggattgataagt

SEQ ID NO: 841797 - DNA, 15 bp, Homo sapiens
ttggattgataagtc

SEQ ID NO: 841798 - DNA, 15 bp, Homo sapiens
tggattgataagtcc

SEQ ID NO: 841799 - DNA, 15 bp, Homo sapiens
ggattgataagtcct

SEQ ID NO: 841800 - DNA, 15 bp, Homo sapiens
gattgataagtcctc

SEQ ID NO: 841801 - DNA, 15 bp, Homo sapiens
attgataagtcctca

SEQ ID NO: 841802 - DNA, 15 bp, Homo sapiens
ttgataagtcctcaa

SEQ ID NO: 841803 - DNA, 15 bp, Homo sapiens
tgataagtcctcaag

SEQ ID NO: 841804 - DNA, 15 bp, Homo sapiens
gataagtcctcaagg

SEQ ID NO: 841805 - DNA, 15 bp, Homo sapiens
ataagtcctcaaggt

SEQ ID NO: 841806 - DNA, 15 bp, Homo sapiens
taagtcctcaaggtt

SEQ ID NO: 841807 - DNA, 15 bp, Homo sapiens
aagtcctcaaggtta

SEQ ID NO: 841808 - DNA, 15 bp, Homo sapiens
agtcctcaaggttat

SEQ ID NO: 841809 - DNA, 15 bp, Homo sapiens
gtcctcaaggttatt

SEQ ID NO: 841810 - DNA, 15 bp, Homo sapiens
tcctcaaggttatta

SEQ ID NO: 841811 - DNA, 15 bp, Homo sapiens
cctcaaggttattag

SEQ ID NO: 841812 - DNA, 15 bp, Homo sapiens
ctcaaggttattagc

SEQ ID NO: 841813 - DNA, 15 bp, Homo sapiens
tcaaggttattagca

SEQ ID NO: 841814 - DNA, 15 bp, Homo sapiens
caaggttattagcag

SEQ ID NO: 841815 - DNA, 15 bp, Homo sapiens
aaggttattagcaga

SEQ ID NO: 841816 - DNA, 15 bp, Homo sapiens
aggttattagcagag

SEQ ID NO: 841817 - DNA, 15 bp, Homo sapiens
ggttattagcagagt

SEQ ID NO: 841818 - DNA, 15 bp, Homo sapiens
gttattagcagagta

SEQ ID NO: 841819 - DNA, 15 bp, Homo sapiens
ttattagcagagtaa

SEQ ID NO: 841820 - DNA, 15 bp, Homo sapiens
tattagcagagtaat

SEQ ID NO: 841821 - DNA, 15 bp, Homo sapiens
attagcagagtaatc

SEQ ID NO: 841822 - DNA, 15 bp, Homo sapiens
ttagcagagtaatcc

SEQ ID NO: 841823 - DNA, 15 bp, Homo sapiens
tagcagagtaatcca

SEQ ID NO: 841824 - DNA, 15 bp, Homo sapiens
agcagagtaatccat

SEQ ID NO: 841825 - DNA, 15 bp, Homo sapiens
gcagagtaatccatt

SEQ ID NO: 841826 - DNA, 15 bp, Homo sapiens
cagagtaatccattt

SEQ ID NO: 841827 - DNA, 15 bp, Homo sapiens
agagtaatccatttg

SEQ ID NO: 841828 - DNA, 15 bp, Homo sapiens
gagtaatccatttgc

SEQ ID NO: 841829 - DNA, 15 bp, Homo sapiens
agtaatccatttgca

SEQ ID NO: 841830 - DNA, 15 bp, Homo sapiens
gtaatccatttgcat

SEQ ID NO: 841831 - DNA, 15 bp, Homo sapiens
taatccatttgcatt

SEQ ID NO: 841832 - DNA, 15 bp, Homo sapiens
aatccatttgcatta

SEQ ID NO: 841833 - DNA, 15 bp, Homo sapiens
atccatttgcattat

SEQ ID NO: 841834 - DNA, 15 bp, Homo sapiens
tccatttgcattata

SEQ ID NO: 841835 - DNA, 15 bp, Homo sapiens
ccatttgcattatag

SEQ ID NO: 841836 - DNA, 15 bp, Homo sapiens
catttgcattatagg

SEQ ID NO: 841837 - DNA, 15 bp, Homo sapiens
atttgcattatagga

SEQ ID NO: 841838 - DNA, 15 bp, Homo sapiens
tttgcattataggaa

SEQ ID NO: 841839 - DNA, 15 bp, Homo sapiens
ttgcattataggaaa

SEQ ID NO: 841840 - DNA, 15 bp, Homo sapiens
tgcattataggaaaa

SEQ ID NO: 841841 - DNA, 15 bp, Homo sapiens
gcattataggaaaat

SEQ ID NO: 841842 - DNA, 15 bp, Homo sapiens
cattataggaaaatg

SEQ ID NO: 841843 - DNA, 15 bp, Homo sapiens
attataggaaaatgc

SEQ ID NO: 841844 - DNA, 15 bp, Homo sapiens
ttataggaaaatgct

SEQ ID NO: 841845 - DNA, 15 bp, Homo sapiens
tataggaaaatgctg

SEQ ID NO: 841846 - DNA, 15 bp, Homo sapiens
ataggaaaatgctga

SEQ ID NO: 841847 - DNA, 15 bp, Homo sapiens
taggaaaatgctgaa

SEQ ID NO: 841848 - DNA, 15 bp, Homo sapiens
aggaaaatgctgaag

SEQ ID NO: 841849 - DNA, 15 bp, Homo sapiens
ggaaaatgctgaagg

SEQ ID NO: 841850 - DNA, 15 bp, Homo sapiens
gaaaatgctgaaggt

SEQ ID NO: 841851 - DNA, 15 bp, Homo sapiens
aaaatgctgaaggta

SEQ ID NO: 841852 - DNA, 15 bp, Homo sapiens
aaatgctgaaggtac

SEQ ID NO: 841853 - DNA, 15 bp, Homo sapiens
aatgctgaaggtaca

SEQ ID NO: 841854 - DNA, 15 bp, Homo sapiens
atgctgaaggtacat

SEQ ID NO: 841855 - DNA, 15 bp, Homo sapiens
tgctgaaggtacatg

SEQ ID NO: 841856 - DNA, 15 bp, Homo sapiens
gctgaaggtacatga

SEQ ID NO: 841857 - DNA, 15 bp, Homo sapiens
ctgaaggtacatgat

SEQ ID NO: 841858 - DNA, 15 bp, Homo sapiens
tgaaggtacatgatt

SEQ ID NO: 841859 - DNA, 15 bp, Homo sapiens
gaaggtacatgattc

SEQ ID NO: 841860 - DNA, 15 bp, Homo sapiens
aaggtacatgattcc

SEQ ID NO: 841861 - DNA, 15 bp, Homo sapiens
aggtacatgattcca

SEQ ID NO: 841862 - DNA, 15 bp, Homo sapiens
ggtacatgattccag

SEQ ID NO: 841863 - DNA, 15 bp, Homo sapiens
gtacatgattccagt

SEQ ID NO: 841864 - DNA, 15 bp, Homo sapiens
tacatgattccagta

SEQ ID NO: 841865 - DNA, 15 bp, Homo sapiens
acatgattccagtaa

SEQ ID NO: 841866 - DNA, 15 bp, Homo sapiens
catgattccagtaag

SEQ ID NO: 841867 - DNA, 15 bp, Homo sapiens
atgattccagtaaga

SEQ ID NO: 841868 - DNA, 15 bp, Homo sapiens
tgattccagtaagat

SEQ ID NO: 841869 - DNA, 15 bp, Homo sapiens
gattccagtaagatt

SEQ ID NO: 841870 - DNA, 15 bp, Homo sapiens
attccagtaagattt

SEQ ID NO: 841871 - DNA, 15 bp, Homo sapiens
ttccagtaagatttg

SEQ ID NO: 841872 - DNA, 15 bp, Homo sapiens
tccagtaagatttgg

SEQ ID NO: 841873 - DNA, 15 bp, Homo sapiens
ccagtaagatttgga

SEQ ID NO: 841874 - DNA, 15 bp, Homo sapiens
cagtaagatttggaa

SEQ ID NO: 841875 - DNA, 15 bp, Homo sapiens
agtaagatttggaaa

SEQ ID NO: 841876 - DNA, 15 bp, Homo sapiens
gtaagatttggaaat

SEQ ID NO: 841877 - DNA, 15 bp, Homo sapiens
taagatttggaaatg

SEQ ID NO: 841878 - DNA, 15 bp, Homo sapiens
aagatttggaaatga

SEQ ID NO: 841879 - DNA, 15 bp, Homo sapiens
agatttggaaatgat

SEQ ID NO: 841880 - DNA, 15 bp, Homo sapiens
gatttggaaatgatt

SEQ ID NO: 841881 - DNA, 15 bp, Homo sapiens
atttggaaatgatta

SEQ ID NO: 841882 - DNA, 15 bp, Homo sapiens
tttggaaatgattat

SEQ ID NO: 841883 - DNA, 15 bp, Homo sapiens
ttggaaatgattata

SEQ ID NO: 841884 - DNA, 15 bp, Homo sapiens
tggaaatgattatag

SEQ ID NO: 841885 - DNA, 15 bp, Homo sapiens
ggaaatgattatagt

SEQ ID NO: 841886 - DNA, 15 bp, Homo sapiens
gaaatgattatagtt

SEQ ID NO: 841887 - DNA, 15 bp, Homo sapiens
aaatgattatagttt

SEQ ID NO: 841888 - DNA, 15 bp, Homo sapiens
aatgattatagtttt

SEQ ID NO: 841889 - DNA, 15 bp, Homo sapiens
atgattatagttttc

SEQ ID NO: 841890 - DNA, 15 bp, Homo sapiens
tgattatagttttcc

SEQ ID NO: 841891 - DNA, 15 bp, Homo sapiens
gattatagttttcca

SEQ ID NO: 841892 - DNA, 15 bp, Homo sapiens
attatagttttccag

SEQ ID NO: 841893 - DNA, 15 bp, Homo sapiens
ttatagttttccaga

SEQ ID NO: 841894 - DNA, 15 bp, Homo sapiens
tatagttttccagaa

SEQ ID NO: 841895 - DNA, 15 bp, Homo sapiens
atagttttccagaag

SEQ ID NO: 841896 - DNA, 15 bp, Homo sapiens
tagttttccagaagt

SEQ ID NO: 841897 - DNA, 15 bp, Homo sapiens
agttttccagaagtg

SEQ ID NO: 841898 - DNA, 15 bp, Homo sapiens
gttttccagaagtgt

SEQ ID NO: 841899 - DNA, 15 bp, Homo sapiens
ttttccagaagtgtt

SEQ ID NO: 841900 - DNA, 15 bp, Homo sapiens
tttccagaagtgttt

SEQ ID NO: 841901 - DNA, 15 bp, Homo sapiens
ttccagaagtgtttt

SEQ ID NO: 841902 - DNA, 15 bp, Homo sapiens
tccagaagtgttttt

SEQ ID NO: 841903 - DNA, 15 bp, Homo sapiens
ccagaagtgtttttc

SEQ ID NO: 841904 - DNA, 15 bp, Homo sapiens
cagaagtgtttttca

SEQ ID NO: 841905 - DNA, 15 bp, Homo sapiens
agaagtgtttttcat

SEQ ID NO: 841906 - DNA, 15 bp, Homo sapiens
gaagtgtttttcatt

SEQ ID NO: 841907 - DNA, 15 bp, Homo sapiens
aagtgtttttcattt

SEQ ID NO: 841908 - DNA, 15 bp, Homo sapiens
agtgtttttcatttt

SEQ ID NO: 841909 - DNA, 15 bp, Homo sapiens
gtgtttttcatttta

SEQ ID NO: 841910 - DNA, 15 bp, Homo sapiens
tgtttttcattttat

SEQ ID NO: 841911 - DNA, 15 bp, Homo sapiens
gtttttcattttatt

SEQ ID NO: 841912 - DNA, 15 bp, Homo sapiens
tttttcattttattt

SEQ ID NO: 841913 - DNA, 15 bp, Homo sapiens
ttttcattttatttt

SEQ ID NO: 841914 - DNA, 15 bp, Homo sapiens
tttcattttattttt

SEQ ID NO: 841915 - DNA, 15 bp, Homo sapiens
ttcattttatttttt

SEQ ID NO: 841916 - DNA, 15 bp, Homo sapiens
tcattttatttttta

SEQ ID NO: 841917 - DNA, 15 bp, Homo sapiens
cattttattttttaa

SEQ ID NO: 841918 - DNA, 15 bp, Homo sapiens
attttattttttaaa

SEQ ID NO: 841919 - DNA, 15 bp, Homo sapiens
ttttattttttaaat

SEQ ID NO: 841920 - DNA, 15 bp, Homo sapiens
tttattttttaaatt

SEQ ID NO: 841921 - DNA, 15 bp, Homo sapiens
ttattttttaaatta

SEQ ID NO: 841922 - DNA, 15 bp, Homo sapiens
tattttttaaattaa

SEQ ID NO: 841923 - DNA, 15 bp, Homo sapiens
attttttaaattaac

SEQ ID NO: 841924 - DNA, 15 bp, Homo sapiens
ttttttaaattaaca

SEQ ID NO: 841925 - DNA, 15 bp, Homo sapiens
tttttaaattaacat

SEQ ID NO: 841926 - DNA, 15 bp, Homo sapiens
ttttaaattaacata

SEQ ID NO: 841927 - DNA, 15 bp, Homo sapiens
tttaaattaacatac

SEQ ID NO: 841928 - DNA, 15 bp, Homo sapiens
ttaaattaacataca

SEQ ID NO: 841929 - DNA, 15 bp, Homo sapiens
taaattaacatacag

SEQ ID NO: 841930 - DNA, 15 bp, Homo sapiens
aaattaacatacagt

SEQ ID NO: 841931 - DNA, 15 bp, Homo sapiens
aattaacatacagta

SEQ ID NO: 841932 - DNA, 15 bp, Homo sapiens
attaacatacagtaa

SEQ ID NO: 841933 - DNA, 15 bp, Homo sapiens
ttaacatacagtaaa

SEQ ID NO: 841934 - DNA, 15 bp, Homo sapiens
taacatacagtaaag

SEQ ID NO: 841935 - DNA, 15 bp, Homo sapiens
aacatacagtaaagt

SEQ ID NO: 841936 - DNA, 15 bp, Homo sapiens
acatacagtaaagtt

SEQ ID NO: 841937 - DNA, 15 bp, Homo sapiens
catacagtaaagttg

SEQ ID NO: 841938 - DNA, 15 bp, Homo sapiens
atacagtaaagttga

SEQ ID NO: 841939 - DNA, 15 bp, Homo sapiens
tacagtaaagttgat

SEQ ID NO: 841940 - DNA, 15 bp, Homo sapiens
acagtaaagttgatt

SEQ ID NO: 841941 - DNA, 15 bp, Homo sapiens
cagtaaagttgattt

SEQ ID NO: 841942 - DNA, 15 bp, Homo sapiens
agtaaagttgatttt

SEQ ID NO: 841943 - DNA, 15 bp, Homo sapiens
gtaaagttgattttg

SEQ ID NO: 841944 - DNA, 15 bp, Homo sapiens
taaagttgattttgt

SEQ ID NO: 841945 - DNA, 15 bp, Homo sapiens
aaagttgattttgtg

SEQ ID NO: 841946 - DNA, 15 bp, Homo sapiens
aagttgattttgtgt

SEQ ID NO: 841947 - DNA, 15 bp, Homo sapiens
agttgattttgtgta

SEQ ID NO: 841948 - DNA, 15 bp, Homo sapiens
gttgattttgtgtat

SEQ ID NO: 841949 - DNA, 15 bp, Homo sapiens
ttgattttgtgtatg

SEQ ID NO: 841950 - DNA, 15 bp, Homo sapiens
tgattttgtgtatgt

SEQ ID NO: 841951 - DNA, 15 bp, Homo sapiens
gattttgtgtatgtg

SEQ ID NO: 841952 - DNA, 15 bp, Homo sapiens
attttgtgtatgtgt

SEQ ID NO: 841953 - DNA, 15 bp, Homo sapiens
ttttgtgtatgtgta

SEQ ID NO: 841954 - DNA, 15 bp, Homo sapiens
tttgtgtatgtgtag

SEQ ID NO: 841955 - DNA, 15 bp, Homo sapiens
ttgtgtatgtgtagt

SEQ ID NO: 841956 - DNA, 15 bp, Homo sapiens
tgtgtatgtgtagtc

SEQ ID NO: 841957 - DNA, 15 bp, Homo sapiens
gtgtatgtgtagtca

SEQ ID NO: 841958 - DNA, 15 bp, Homo sapiens
tgtatgtgtagtcat

SEQ ID NO: 841959 - DNA, 15 bp, Homo sapiens
gtatgtgtagtcatg

SEQ ID NO: 841960 - DNA, 15 bp, Homo sapiens
tatgtgtagtcatgc

SEQ ID NO: 841961 - DNA, 15 bp, Homo sapiens
atgtgtagtcatgca

SEQ ID NO: 841962 - DNA, 15 bp, Homo sapiens
tgtgtagtcatgcaa

SEQ ID NO: 841963 - DNA, 15 bp, Homo sapiens
gtgtagtcatgcaac

SEQ ID NO: 841964 - DNA, 15 bp, Homo sapiens
tgtagtcatgcaacc

SEQ ID NO: 841965 - DNA, 15 bp, Homo sapiens
gtagtcatgcaacca

SEQ ID NO: 841966 - DNA, 15 bp, Homo sapiens
tagtcatgcaaccac

SEQ ID NO: 841967 - DNA, 15 bp, Homo sapiens
agtcatgcaaccacc

SEQ ID NO: 841968 - DNA, 15 bp, Homo sapiens
gtcatgcaaccacca

SEQ ID NO: 841969 - DNA, 15 bp, Homo sapiens
tcatgcaaccaccac

SEQ ID NO: 841970 - DNA, 15 bp, Homo sapiens
catgcaaccaccacc

SEQ ID NO: 841971 - DNA, 15 bp, Homo sapiens
atgcaaccaccacca

SEQ ID NO: 841972 - DNA, 15 bp, Homo sapiens
tgcaaccaccaccac

SEQ ID NO: 841973 - DNA, 15 bp, Homo sapiens
gcaaccaccaccaca

SEQ ID NO: 841974 - DNA, 15 bp, Homo sapiens
caaccaccaccacaa

SEQ ID NO: 841975 - DNA, 15 bp, Homo sapiens
aaccaccaccacaat

SEQ ID NO: 841976 - DNA, 15 bp, Homo sapiens
accaccaccacaatc

SEQ ID NO: 841977 - DNA, 15 bp, Homo sapiens
ccaccaccacaatca

SEQ ID NO: 841978 - DNA, 15 bp, Homo sapiens
caccaccacaatcag

SEQ ID NO: 841979 - DNA, 15 bp, Homo sapiens
accaccacaatcagg

SEQ ID NO: 841980 - DNA, 15 bp, Homo sapiens
ccaccacaatcagga

SEQ ID NO: 841981 - DNA, 15 bp, Homo sapiens
caccacaatcaggat

SEQ ID NO: 841982 - DNA, 15 bp, Homo sapiens
accacaatcaggata

SEQ ID NO: 841983 - DNA, 15 bp, Homo sapiens
ccacaatcaggatac

SEQ ID NO: 841984 - DNA, 15 bp, Homo sapiens
cacaatcaggataca

SEQ ID NO: 841985 - DNA, 15 bp, Homo sapiens
acaatcaggatacag

SEQ ID NO: 841986 - DNA, 15 bp, Homo sapiens
caatcaggatacagg

SEQ ID NO: 841987 - DNA, 15 bp, Homo sapiens
aatcaggatacagga

SEQ ID NO: 841988 - DNA, 15 bp, Homo sapiens
atcaggatacaggat

SEQ ID NO: 841989 - DNA, 15 bp, Homo sapiens
tcaggatacaggata

SEQ ID NO: 841990 - DNA, 15 bp, Homo sapiens
caggatacaggatag

SEQ ID NO: 841991 - DNA, 15 bp, Homo sapiens
aggatacaggatagt

SEQ ID NO: 841992 - DNA, 15 bp, Homo sapiens
ggatacaggatagtt

SEQ ID NO: 841993 - DNA, 15 bp, Homo sapiens
gatacaggatagttt

SEQ ID NO: 841994 - DNA, 15 bp, Homo sapiens
atacaggatagtttc

SEQ ID NO: 841995 - DNA, 15 bp, Homo sapiens
tacaggatagtttcc

SEQ ID NO: 841996 - DNA, 15 bp, Homo sapiens
acaggatagtttcca

SEQ ID NO: 841997 - DNA, 15 bp, Homo sapiens
caggatagtttccat

SEQ ID NO: 841998 - DNA, 15 bp, Homo sapiens
aggatagtttccata

SEQ ID NO: 841999 - DNA, 15 bp, Homo sapiens
ggatagtttccatac

SEQ ID NO: 842000 - DNA, 15 bp, Homo sapiens
gatagtttccatacc

SEQ ID NO: 842001 - DNA, 15 bp, Homo sapiens
atagtttccataccc

SEQ ID NO: 842002 - DNA, 15 bp, Homo sapiens
tagtttccatacccc

SEQ ID NO: 842003 - DNA, 15 bp, Homo sapiens
agtttccataccccc

SEQ ID NO: 842004 - DNA, 15 bp, Homo sapiens
gtttccataccccca

SEQ ID NO: 842005 - DNA, 15 bp, Homo sapiens
tttccatacccccaa

SEQ ID NO: 842006 - DNA, 15 bp, Homo sapiens
ttccatacccccaaa

SEQ ID NO: 842007 - DNA, 15 bp, Homo sapiens
tccatacccccaaat

SEQ ID NO: 842008 - DNA, 15 bp, Homo sapiens
ccatacccccaaatt

SEQ ID NO: 842009 - DNA, 15 bp, Homo sapiens
catacccccaaattc

SEQ ID NO: 842010 - DNA, 15 bp, Homo sapiens
atacccccaaattcc

SEQ ID NO: 842011 - DNA, 15 bp, Homo sapiens
tacccccaaattccc

SEQ ID NO: 842012 - DNA, 15 bp, Homo sapiens
acccccaaattccct

SEQ ID NO: 842013 - DNA, 15 bp, Homo sapiens
cccccaaattccctc

SEQ ID NO: 842014 - DNA, 15 bp, Homo sapiens
ccccaaattccctca

SEQ ID NO: 842015 - DNA, 15 bp, Homo sapiens
cccaaattccctcat

SEQ ID NO: 842016 - DNA, 15 bp, Homo sapiens
ccaaattccctcatg

SEQ ID NO: 842017 - DNA, 15 bp, Homo sapiens
caaattccctcatgc

SEQ ID NO: 842018 - DNA, 15 bp, Homo sapiens
aaattccctcatgct

SEQ ID NO: 842019 - DNA, 15 bp, Homo sapiens
aattccctcatgctg

SEQ ID NO: 842020 - DNA, 15 bp, Homo sapiens
attccctcatgctgt

SEQ ID NO: 842021 - DNA, 15 bp, Homo sapiens
ttccctcatgctgta

SEQ ID NO: 842022 - DNA, 15 bp, Homo sapiens
tccctcatgctgtac

SEQ ID NO: 842023 - DNA, 15 bp, Homo sapiens
ccctcatgctgtaca

SEQ ID NO: 842024 - DNA, 15 bp, Homo sapiens
cctcatgctgtacag

SEQ ID NO: 842025 - DNA, 15 bp, Homo sapiens
ctcatgctgtacagt

SEQ ID NO: 842026 - DNA, 15 bp, Homo sapiens
tcatgctgtacagtc

SEQ ID NO: 842027 - DNA, 15 bp, Homo sapiens
catgctgtacagtca

SEQ ID NO: 842028 - DNA, 15 bp, Homo sapiens
atgctgtacagtcac

SEQ ID NO: 842029 - DNA, 15 bp, Homo sapiens
tgctgtacagtcaca

SEQ ID NO: 842030 - DNA, 15 bp, Homo sapiens
gctgtacagtcacac

SEQ ID NO: 842031 - DNA, 15 bp, Homo sapiens
ctgtacagtcacacc

SEQ ID NO: 842032 - DNA, 15 bp, Homo sapiens
tgtacagtcacaccc

SEQ ID NO: 842033 - DNA, 15 bp, Homo sapiens
gtacagtcacaccct

SEQ ID NO: 842034 - DNA, 15 bp, Homo sapiens
tacagtcacaccctc

SEQ ID NO: 842035 - DNA, 15 bp, Homo sapiens
acagtcacaccctcc

SEQ ID NO: 842036 - DNA, 15 bp, Homo sapiens
cagtcacaccctcct

SEQ ID NO: 842037 - DNA, 15 bp, Homo sapiens
agtcacaccctcctg

SEQ ID NO: 842038 - DNA, 15 bp, Homo sapiens
gtcacaccctcctgt

SEQ ID NO: 842039 - DNA, 15 bp, Homo sapiens
tcacaccctcctgtc

SEQ ID NO: 842040 - DNA, 15 bp, Homo sapiens
cacaccctcctgtca

SEQ ID NO: 842041 - DNA, 15 bp, Homo sapiens
acaccctcctgtcac

SEQ ID NO: 842042 - DNA, 15 bp, Homo sapiens
caccctcctgtcact

SEQ ID NO: 842043 - DNA, 15 bp, Homo sapiens
accctcctgtcactc

SEQ ID NO: 842044 - DNA, 15 bp, Homo sapiens
ccctcctgtcactcc

SEQ ID NO: 842045 - DNA, 15 bp, Homo sapiens
cctcctgtcactcct

SEQ ID NO: 842046 - DNA, 15 bp, Homo sapiens
ctcctgtcactccta

SEQ ID NO: 842047 - DNA, 15 bp, Homo sapiens
tcctgtcactcctag

SEQ ID NO: 842048 - DNA, 15 bp, Homo sapiens
cctgtcactcctagg

SEQ ID NO: 842049 - DNA, 15 bp, Homo sapiens
ctgtcactcctaggc

SEQ ID NO: 842050 - DNA, 15 bp, Homo sapiens
tgtcactcctaggcc

SEQ ID NO: 842051 - DNA, 15 bp, Homo sapiens
gtcactcctaggccc

SEQ ID NO: 842052 - DNA, 15 bp, Homo sapiens
tcactcctaggccct

SEQ ID NO: 842053 - DNA, 15 bp, Homo sapiens
cactcctaggccctg

SEQ ID NO: 842054 - DNA, 15 bp, Homo sapiens
actcctaggccctgg

SEQ ID NO: 842055 - DNA, 15 bp, Homo sapiens
ctcctaggccctggc

SEQ ID NO: 842056 - DNA, 15 bp, Homo sapiens
tcctaggccctggca

SEQ ID NO: 842057 - DNA, 15 bp, Homo sapiens
cctaggccctggcaa

SEQ ID NO: 842058 - DNA, 15 bp, Homo sapiens
ctaggccctggcaac

SEQ ID NO: 842059 - DNA, 15 bp, Homo sapiens
taggccctggcaacc

SEQ ID NO: 842060 - DNA, 15 bp, Homo sapiens
aggccctggcaacca

SEQ ID NO: 842061 - DNA, 15 bp, Homo sapiens
ggccctggcaaccac

SEQ ID NO: 842062 - DNA, 15 bp, Homo sapiens
gccctggcaaccact

SEQ ID NO: 842063 - DNA, 15 bp, Homo sapiens
ccctggcaaccactg

SEQ ID NO: 842064 - DNA, 15 bp, Homo sapiens
cctggcaaccactga

SEQ ID NO: 842065 - DNA, 15 bp, Homo sapiens
ctggcaaccactgat

SEQ ID NO: 842066 - DNA, 15 bp, Homo sapiens
tggcaaccactgatc

SEQ ID NO: 842067 - DNA, 15 bp, Homo sapiens
ggcaaccactgatct

SEQ ID NO: 842068 - DNA, 15 bp, Homo sapiens
gcaaccactgatcta

SEQ ID NO: 842069 - DNA, 15 bp, Homo sapiens
caaccactgatctat

SEQ ID NO: 842070 - DNA, 15 bp, Homo sapiens
aaccactgatctatt

SEQ ID NO: 842071 - DNA, 15 bp, Homo sapiens
accactgatctattc

SEQ ID NO: 842072 - DNA, 15 bp, Homo sapiens
ccactgatctattct

SEQ ID NO: 842073 - DNA, 15 bp, Homo sapiens
cactgatctattctc

SEQ ID NO: 842074 - DNA, 15 bp, Homo sapiens
actgatctattctct

SEQ ID NO: 842075 - DNA, 15 bp, Homo sapiens
ctgatctattctctg

SEQ ID NO: 842076 - DNA, 15 bp, Homo sapiens
tgatctattctctgt

SEQ ID NO: 842077 - DNA, 15 bp, Homo sapiens
gatctattctctgtc

SEQ ID NO: 842078 - DNA, 15 bp, Homo sapiens
atctattctctgtca

SEQ ID NO: 842079 - DNA, 15 bp, Homo sapiens
tctattctctgtcat

SEQ ID NO: 842080 - DNA, 15 bp, Homo sapiens
ctattctctgtcatt

SEQ ID NO: 842081 - DNA, 15 bp, Homo sapiens
tattctctgtcatta

SEQ ID NO: 842082 - DNA, 15 bp, Homo sapiens
attctctgtcattac

SEQ ID NO: 842083 - DNA, 15 bp, Homo sapiens
ttctctgtcattaca

SEQ ID NO: 842084 - DNA, 15 bp, Homo sapiens
tctctgtcattacag

SEQ ID NO: 842085 - DNA, 15 bp, Homo sapiens
ctctgtcattacagt

SEQ ID NO: 842086 - DNA, 15 bp, Homo sapiens
tctgtcattacagtt

SEQ ID NO: 842087 - DNA, 15 bp, Homo sapiens
ctgtcattacagttt

SEQ ID NO: 842088 - DNA, 15 bp, Homo sapiens
tgtcattacagtttt

SEQ ID NO: 842089 - DNA, 15 bp, Homo sapiens
gtcattacagttttg

SEQ ID NO: 842090 - DNA, 15 bp, Homo sapiens
tcattacagttttgt

SEQ ID NO: 842091 - DNA, 15 bp, Homo sapiens
cattacagttttgtc

SEQ ID NO: 842092 - DNA, 15 bp, Homo sapiens
attacagttttgtct

SEQ ID NO: 842093 - DNA, 15 bp, Homo sapiens
ttacagttttgtctt

SEQ ID NO: 842094 - DNA, 15 bp, Homo sapiens
tacagttttgtcttt

SEQ ID NO: 842095 - DNA, 15 bp, Homo sapiens
acagttttgtctttt

SEQ ID NO: 842096 - DNA, 15 bp, Homo sapiens
cagttttgtcttttc

SEQ ID NO: 842097 - DNA, 15 bp, Homo sapiens
agttttgtcttttca

SEQ ID NO: 842098 - DNA, 15 bp, Homo sapiens
gttttgtcttttcaa

SEQ ID NO: 842099 - DNA, 15 bp, Homo sapiens
ttttgtcttttcaag

SEQ ID NO: 842100 - DNA, 15 bp, Homo sapiens
tttgtcttttcaagt

SEQ ID NO: 842101 - DNA, 15 bp, Homo sapiens
ttgtcttttcaagtc

SEQ ID NO: 842102 - DNA, 15 bp, Homo sapiens
tgtcttttcaagtct

SEQ ID NO: 842103 - DNA, 15 bp, Homo sapiens
gtcttttcaagtctg

SEQ ID NO: 842104 - DNA, 15 bp, Homo sapiens
tcttttcaagtctgt

SEQ ID NO: 842105 - DNA, 15 bp, Homo sapiens
cttttcaagtctgtc

SEQ ID NO: 842106 - DNA, 15 bp, Homo sapiens
ttttcaagtctgtca

SEQ ID NO: 842107 - DNA, 15 bp, Homo sapiens
tttcaagtctgtcat

SEQ ID NO: 842108 - DNA, 15 bp, Homo sapiens
ttcaagtctgtcatg

SEQ ID NO: 842109 - DNA, 15 bp, Homo sapiens
tcaagtctgtcatgt

SEQ ID NO: 842110 - DNA, 15 bp, Homo sapiens
caagtctgtcatgta

SEQ ID NO: 842111 - DNA, 15 bp, Homo sapiens
aagtctgtcatgtaa

SEQ ID NO: 842112 - DNA, 15 bp, Homo sapiens
agtctgtcatgtaaa

SEQ ID NO: 842113 - DNA, 15 bp, Homo sapiens
gtctgtcatgtaaag

SEQ ID NO: 842114 - DNA, 15 bp, Homo sapiens
tctgtcatgtaaagg

SEQ ID NO: 842115 - DNA, 15 bp, Homo sapiens
ctgtcatgtaaaggc

SEQ ID NO: 842116 - DNA, 15 bp, Homo sapiens
tgtcatgtaaaggca

SEQ ID NO: 842117 - DNA, 15 bp, Homo sapiens
gtcatgtaaaggcat

SEQ ID NO: 842118 - DNA, 15 bp, Homo sapiens
tcatgtaaaggcatc

SEQ ID NO: 842119 - DNA, 15 bp, Homo sapiens
catgtaaaggcatca

SEQ ID NO: 842120 - DNA, 15 bp, Homo sapiens
atgtaaaggcatcat

SEQ ID NO: 842121 - DNA, 15 bp, Homo sapiens
tgtaaaggcatcatg

SEQ ID NO: 842122 - DNA, 15 bp, Homo sapiens
gtaaaggcatcatgg

SEQ ID NO: 842123 - DNA, 15 bp, Homo sapiens
taaaggcatcatgga

SEQ ID NO: 842124 - DNA, 15 bp, Homo sapiens
aaaggcatcatggag

SEQ ID NO: 842125 - DNA, 15 bp, Homo sapiens
aaggcatcatggagc

SEQ ID NO: 842126 - DNA, 15 bp, Homo sapiens
aggcatcatggagca

SEQ ID NO: 842127 - DNA, 15 bp, Homo sapiens
ggcatcatggagcat

SEQ ID NO: 842128 - DNA, 15 bp, Homo sapiens
gcatcatggagcatg

SEQ ID NO: 842129 - DNA, 15 bp, Homo sapiens
catcatggagcatgt

SEQ ID NO: 842130 - DNA, 15 bp, Homo sapiens
atcatggagcatgta

SEQ ID NO: 842131 - DNA, 15 bp, Homo sapiens
tcatggagcatgtaa

SEQ ID NO: 842132 - DNA, 15 bp, Homo sapiens
catggagcatgtaac

SEQ ID NO: 842133 - DNA, 15 bp, Homo sapiens
atggagcatgtaacc

SEQ ID NO: 842134 - DNA, 15 bp, Homo sapiens
tggagcatgtaacct

SEQ ID NO: 842135 - DNA, 15 bp, Homo sapiens
ggagcatgtaacctt

SEQ ID NO: 842136 - DNA, 15 bp, Homo sapiens
gagcatgtaaccttt

SEQ ID NO: 842137 - DNA, 15 bp, Homo sapiens
agcatgtaacctttt

SEQ ID NO: 842138 - DNA, 15 bp, Homo sapiens
gcatgtaaccttttg

SEQ ID NO: 842139 - DNA, 15 bp, Homo sapiens
catgtaaccttttga

SEQ ID NO: 842140 - DNA, 15 bp, Homo sapiens
atgtaaccttttgag

SEQ ID NO: 842141 - DNA, 15 bp, Homo sapiens
tgtaaccttttgaga

SEQ ID NO: 842142 - DNA, 15 bp, Homo sapiens
gtaaccttttgagat

SEQ ID NO: 842143 - DNA, 15 bp, Homo sapiens
taaccttttgagatt

SEQ ID NO: 842144 - DNA, 15 bp, Homo sapiens
aaccttttgagattg

SEQ ID NO: 842145 - DNA, 15 bp, Homo sapiens
accttttgagattgg

SEQ ID NO: 842146 - DNA, 15 bp, Homo sapiens
ccttttgagattggc

SEQ ID NO: 842147 - DNA, 15 bp, Homo sapiens
cttttgagattggct

SEQ ID NO: 842148 - DNA, 15 bp, Homo sapiens
ttttgagattggctt

SEQ ID NO: 842149 - DNA, 15 bp, Homo sapiens
tttgagattggcttt

SEQ ID NO: 842150 - DNA, 15 bp, Homo sapiens
ttgagattggctttt

SEQ ID NO: 842151 - DNA, 15 bp, Homo sapiens
tgagattggcttttt

SEQ ID NO: 842152 - DNA, 15 bp, Homo sapiens
gagattggctttttt

SEQ ID NO: 842153 - DNA, 15 bp, Homo sapiens
agattggcttttttc

SEQ ID NO: 842154 - DNA, 15 bp, Homo sapiens
gattggcttttttca

SEQ ID NO: 842155 - DNA, 15 bp, Homo sapiens
attggcttttttcat

SEQ ID NO: 842156 - DNA, 15 bp, Homo sapiens
ttggcttttttcatt

SEQ ID NO: 842157 - DNA, 15 bp, Homo sapiens
tggcttttttcattt

SEQ ID NO: 842158 - DNA, 15 bp, Homo sapiens
ggcttttttcattta

SEQ ID NO: 842159 - DNA, 15 bp, Homo sapiens
gcttttttcatttag

SEQ ID NO: 842160 - DNA, 15 bp, Homo sapiens
cttttttcatttagc

SEQ ID NO: 842161 - DNA, 15 bp, Homo sapiens
ttttttcatttagca

SEQ ID NO: 842162 - DNA, 15 bp, Homo sapiens
tttttcatttagcat

SEQ ID NO: 842163 - DNA, 15 bp, Homo sapiens
ttttcatttagcata

SEQ ID NO: 842164 - DNA, 15 bp, Homo sapiens
tttcatttagcatag

SEQ ID NO: 842165 - DNA, 15 bp, Homo sapiens
ttcatttagcatagt

SEQ ID NO: 842166 - DNA, 15 bp, Homo sapiens
tcatttagcatagtt

SEQ ID NO: 842167 - DNA, 15 bp, Homo sapiens
catttagcatagttc

SEQ ID NO: 842168 - DNA, 15 bp, Homo sapiens
atttagcatagttcc

SEQ ID NO: 842169 - DNA, 15 bp, Homo sapiens
tttagcatagttccc

SEQ ID NO: 842170 - DNA, 15 bp, Homo sapiens
ttagcatagttccct

SEQ ID NO: 842171 - DNA, 15 bp, Homo sapiens
tagcatagttccctt

SEQ ID NO: 842172 - DNA, 15 bp, Homo sapiens
agcatagttcccttg

SEQ ID NO: 842173 - DNA, 15 bp, Homo sapiens
gcatagttcccttga

SEQ ID NO: 842174 - DNA, 15 bp, Homo sapiens
catagttcccttgac

SEQ ID NO: 842175 - DNA, 15 bp, Homo sapiens
atagttcccttgaca

SEQ ID NO: 842176 - DNA, 15 bp, Homo sapiens
tagttcccttgacat

SEQ ID NO: 842177 - DNA, 15 bp, Homo sapiens
agttcccttgacatc

SEQ ID NO: 842178 - DNA, 15 bp, Homo sapiens
gttcccttgacatcc

SEQ ID NO: 842179 - DNA, 15 bp, Homo sapiens
ttcccttgacatcca

SEQ ID NO: 842180 - DNA, 15 bp, Homo sapiens
tcccttgacatccat

SEQ ID NO: 842181 - DNA, 15 bp, Homo sapiens
cccttgacatccatc

SEQ ID NO: 842182 - DNA, 15 bp, Homo sapiens
ccttgacatccatcc

SEQ ID NO: 842183 - DNA, 15 bp, Homo sapiens
cttgacatccatcca

SEQ ID NO: 842184 - DNA, 15 bp, Homo sapiens
ttgacatccatccag

SEQ ID NO: 842185 - DNA, 15 bp, Homo sapiens
tgacatccatccagg

SEQ ID NO: 842186 - DNA, 15 bp, Homo sapiens
gacatccatccaggt

SEQ ID NO: 842187 - DNA, 15 bp, Homo sapiens
acatccatccaggtt

SEQ ID NO: 842188 - DNA, 15 bp, Homo sapiens
catccatccaggttg

SEQ ID NO: 842189 - DNA, 15 bp, Homo sapiens
atccatccaggttgt

SEQ ID NO: 842190 - DNA, 15 bp, Homo sapiens
tccatccaggttgtt

SEQ ID NO: 842191 - DNA, 15 bp, Homo sapiens
ccatccaggttgttg

SEQ ID NO: 842192 - DNA, 15 bp, Homo sapiens
catccaggttgttgc

SEQ ID NO: 842193 - DNA, 15 bp, Homo sapiens
atccaggttgttgca

SEQ ID NO: 842194 - DNA, 15 bp, Homo sapiens
tccaggttgttgcat

SEQ ID NO: 842195 - DNA, 15 bp, Homo sapiens
ccaggttgttgcatg

SEQ ID NO: 842196 - DNA, 15 bp, Homo sapiens
caggttgttgcatgt

SEQ ID NO: 842197 - DNA, 15 bp, Homo sapiens
aggttgttgcatgta

SEQ ID NO: 842198 - DNA, 15 bp, Homo sapiens
ggttgttgcatgtat

SEQ ID NO: 842199 - DNA, 15 bp, Homo sapiens
gttgttgcatgtatc

SEQ ID NO: 842200 - DNA, 15 bp, Homo sapiens
ttgttgcatgtatca

SEQ ID NO: 842201 - DNA, 15 bp, Homo sapiens
tgttgcatgtatcag

SEQ ID NO: 842202 - DNA, 15 bp, Homo sapiens
gttgcatgtatcagt

SEQ ID NO: 842203 - DNA, 15 bp, Homo sapiens
ttgcatgtatcagta

SEQ ID NO: 842204 - DNA, 15 bp, Homo sapiens
tgcatgtatcagtat

SEQ ID NO: 842205 - DNA, 15 bp, Homo sapiens
gcatgtatcagtatt

SEQ ID NO: 842206 - DNA, 15 bp, Homo sapiens
catgtatcagtattc

SEQ ID NO: 842207 - DNA, 15 bp, Homo sapiens
atgtatcagtattcc

SEQ ID NO: 842208 - DNA, 15 bp, Homo sapiens
tgtatcagtattcca

SEQ ID NO: 842209 - DNA, 15 bp, Homo sapiens
gtatcagtattccat

SEQ ID NO: 842210 - DNA, 15 bp, Homo sapiens
tatcagtattccatc

SEQ ID NO: 842211 - DNA, 15 bp, Homo sapiens
atcagtattccatcc

SEQ ID NO: 842212 - DNA, 15 bp, Homo sapiens
tcagtattccatcct

SEQ ID NO: 842213 - DNA, 15 bp, Homo sapiens
cagtattccatcctt

SEQ ID NO: 842214 - DNA, 15 bp, Homo sapiens
agtattccatccttt

SEQ ID NO: 842215 - DNA, 15 bp, Homo sapiens
gtattccatcctttc

SEQ ID NO: 842216 - DNA, 15 bp, Homo sapiens
tattccatcctttct

SEQ ID NO: 842217 - DNA, 15 bp, Homo sapiens
attccatcctttctg

SEQ ID NO: 842218 - DNA, 15 bp, Homo sapiens
ttccatcctttctgt

SEQ ID NO: 842219 - DNA, 15 bp, Homo sapiens
tccatcctttctgtt

SEQ ID NO: 842220 - DNA, 15 bp, Homo sapiens
ccatcctttctgttg

SEQ ID NO: 842221 - DNA, 15 bp, Homo sapiens
catcctttctgttga

SEQ ID NO: 842222 - DNA, 15 bp, Homo sapiens
atcctttctgttgat

SEQ ID NO: 842223 - DNA, 15 bp, Homo sapiens
tcctttctgttgatg

SEQ ID NO: 842224 - DNA, 15 bp, Homo sapiens
cctttctgttgatga

SEQ ID NO: 842225 - DNA, 15 bp, Homo sapiens
ctttctgttgatgaa

SEQ ID NO: 842226 - DNA, 15 bp, Homo sapiens
tttctgttgatgaat

SEQ ID NO: 842227 - DNA, 15 bp, Homo sapiens
ttctgttgatgaata

SEQ ID NO: 842228 - DNA, 15 bp, Homo sapiens
tctgttgatgaatag

SEQ ID NO: 842229 - DNA, 15 bp, Homo sapiens
ctgttgatgaatagt

SEQ ID NO: 842230 - DNA, 15 bp, Homo sapiens
tgttgatgaatagta

SEQ ID NO: 842231 - DNA, 15 bp, Homo sapiens
gttgatgaatagtat

SEQ ID NO: 842232 - DNA, 15 bp, Homo sapiens
ttgatgaatagtatg

SEQ ID NO: 842233 - DNA, 15 bp, Homo sapiens
tgatgaatagtatga

SEQ ID NO: 842234 - DNA, 15 bp, Homo sapiens
gatgaatagtatgac

SEQ ID NO: 842235 - DNA, 15 bp, Homo sapiens
atgaatagtatgaca

SEQ ID NO: 842236 - DNA, 15 bp, Homo sapiens
tgaatagtatgacat

SEQ ID NO: 842237 - DNA, 15 bp, Homo sapiens
gaatagtatgacatc

SEQ ID NO: 842238 - DNA, 15 bp, Homo sapiens
aatagtatgacatct

SEQ ID NO: 842239 - DNA, 15 bp, Homo sapiens
atagtatgacatctt

SEQ ID NO: 842240 - DNA, 15 bp, Homo sapiens
tagtatgacatctta

SEQ ID NO: 842241 - DNA, 15 bp, Homo sapiens
agtatgacatcttat

SEQ ID NO: 842242 - DNA, 15 bp, Homo sapiens
gtatgacatcttata

SEQ ID NO: 842243 - DNA, 15 bp, Homo sapiens
tatgacatcttatat

SEQ ID NO: 842244 - DNA, 15 bp, Homo sapiens
atgacatcttatatg

SEQ ID NO: 842245 - DNA, 15 bp, Homo sapiens
tgacatcttatatgc

SEQ ID NO: 842246 - DNA, 15 bp, Homo sapiens
gacatcttatatgca

SEQ ID NO: 842247 - DNA, 15 bp, Homo sapiens
acatcttatatgcag

SEQ ID NO: 842248 - DNA, 15 bp, Homo sapiens
catcttatatgcagg

SEQ ID NO: 842249 - DNA, 15 bp, Homo sapiens
atcttatatgcaggt

SEQ ID NO: 842250 - DNA, 15 bp, Homo sapiens
tcttatatgcaggta

SEQ ID NO: 842251 - DNA, 15 bp, Homo sapiens
cttatatgcaggtac

SEQ ID NO: 842252 - DNA, 15 bp, Homo sapiens
ttatatgcaggtacc

SEQ ID NO: 842253 - DNA, 15 bp, Homo sapiens
tatatgcaggtacca

SEQ ID NO: 842254 - DNA, 15 bp, Homo sapiens
atatgcaggtaccag

SEQ ID NO: 842255 - DNA, 15 bp, Homo sapiens
tatgcaggtaccagt

SEQ ID NO: 842256 - DNA, 15 bp, Homo sapiens
atgcaggtaccagtt

SEQ ID NO: 842257 - DNA, 15 bp, Homo sapiens
tgcaggtaccagttt

SEQ ID NO: 842258 - DNA, 15 bp, Homo sapiens
gcaggtaccagtttg

SEQ ID NO: 842259 - DNA, 15 bp, Homo sapiens
caggtaccagtttgt

SEQ ID NO: 842260 - DNA, 15 bp, Homo sapiens
aggtaccagtttgtt

SEQ ID NO: 842261 - DNA, 15 bp, Homo sapiens
ggtaccagtttgttt

SEQ ID NO: 842262 - DNA, 15 bp, Homo sapiens
gtaccagtttgttta

SEQ ID NO: 842263 - DNA, 15 bp, Homo sapiens
taccagtttgtttat

SEQ ID NO: 842264 - DNA, 15 bp, Homo sapiens
accagtttgtttatc

SEQ ID NO: 842265 - DNA, 15 bp, Homo sapiens
ccagtttgtttatcc

SEQ ID NO: 842266 - DNA, 15 bp, Homo sapiens
cagtttgtttatcca

SEQ ID NO: 842267 - DNA, 15 bp, Homo sapiens
agtttgtttatccat

SEQ ID NO: 842268 - DNA, 15 bp, Homo sapiens
gtttgtttatccatt

SEQ ID NO: 842269 - DNA, 15 bp, Homo sapiens
tttatccattcatcc

SEQ ID NO: 842270 - DNA, 15 bp, Homo sapiens
ttatccattcatcca

SEQ ID NO: 842271 - DNA, 15 bp, Homo sapiens
tatccattcatccat

SEQ ID NO: 842272 - DNA, 15 bp, Homo sapiens
atccattcatccatt

SEQ ID NO: 842273 - DNA, 15 bp, Homo sapiens
tccattcatccattg

SEQ ID NO: 842274 - DNA, 15 bp, Homo sapiens
ccattcatccattgg

SEQ ID NO: 842275 - DNA, 15 bp, Homo sapiens
cattcatccattgga

SEQ ID NO: 842276 - DNA, 15 bp, Homo sapiens
attcatccattggac

SEQ ID NO: 842277 - DNA, 15 bp, Homo sapiens
ttcatccattggaca

SEQ ID NO: 842278 - DNA, 15 bp, Homo sapiens
tcatccattggacac

SEQ ID NO: 842279 - DNA, 15 bp, Homo sapiens
catccattggacacc

SEQ ID NO: 842280 - DNA, 15 bp, Homo sapiens
atccattggacacca

SEQ ID NO: 842281 - DNA, 15 bp, Homo sapiens
tccattggacaccat

SEQ ID NO: 842282 - DNA, 15 bp, Homo sapiens
ccattggacaccatt

SEQ ID NO: 842283 - DNA, 15 bp, Homo sapiens
cattggacaccattt

SEQ ID NO: 842284 - DNA, 15 bp, Homo sapiens
attggacaccattta

SEQ ID NO: 842285 - DNA, 15 bp, Homo sapiens
ttggacaccatttag

SEQ ID NO: 842286 - DNA, 15 bp, Homo sapiens
tggacaccatttagt

SEQ ID NO: 842287 - DNA, 15 bp, Homo sapiens
ggacaccatttagtt

SEQ ID NO: 842288 - DNA, 15 bp, Homo sapiens
gacaccatttagttt

SEQ ID NO: 842289 - DNA, 15 bp, Homo sapiens
acaccatttagtttt

SEQ ID NO: 842290 - DNA, 15 bp, Homo sapiens
caccatttagttttc

SEQ ID NO: 842291 - DNA, 15 bp, Homo sapiens
accatttagttttcc

SEQ ID NO: 842292 - DNA, 15 bp, Homo sapiens
ccatttagttttcct

SEQ ID NO: 842293 - DNA, 15 bp, Homo sapiens
catttagttttcctc

SEQ ID NO: 842294 - DNA, 15 bp, Homo sapiens
atttagttttcctcc

SEQ ID NO: 842295 - DNA, 15 bp, Homo sapiens
tttagttttcctcca

SEQ ID NO: 842296 - DNA, 15 bp, Homo sapiens
ttagttttcctccag

SEQ ID NO: 842297 - DNA, 15 bp, Homo sapiens
tagttttcctccagt

SEQ ID NO: 842298 - DNA, 15 bp, Homo sapiens
agttttcctccagtt

SEQ ID NO: 842299 - DNA, 15 bp, Homo sapiens
gttttcctccagttg

SEQ ID NO: 842300 - DNA, 15 bp, Homo sapiens
ttttcctccagttgg

SEQ ID NO: 842301 - DNA, 15 bp, Homo sapiens
tttcctccagttggg

SEQ ID NO: 842302 - DNA, 15 bp, Homo sapiens
ttcctccagttgggg

SEQ ID NO: 842303 - DNA, 15 bp, Homo sapiens
tcctccagttggggc

SEQ ID NO: 842304 - DNA, 15 bp, Homo sapiens
cctccagttggggcg

SEQ ID NO: 842305 - DNA, 15 bp, Homo sapiens
ctccagttggggcga

SEQ ID NO: 842306 - DNA, 15 bp, Homo sapiens
tccagttggggcgat

SEQ ID NO: 842307 - DNA, 15 bp, Homo sapiens
ccagttggggcgatc

SEQ ID NO: 842308 - DNA, 15 bp, Homo sapiens
cagttggggcgatca

SEQ ID NO: 842309 - DNA, 15 bp, Homo sapiens
agttggggcgatcat

SEQ ID NO: 842310 - DNA, 15 bp, Homo sapiens
gttggggcgatcatg

SEQ ID NO: 842311 - DNA, 15 bp, Homo sapiens
ttggggcgatcatga

SEQ ID NO: 842312 - DNA, 15 bp, Homo sapiens
tggggcgatcatgaa

SEQ ID NO: 842313 - DNA, 15 bp, Homo sapiens
ggggcgatcatgaat

SEQ ID NO: 842314 - DNA, 15 bp, Homo sapiens
gggcgatcatgaata

SEQ ID NO: 842315 - DNA, 15 bp, Homo sapiens
ggcgatcatgaatac

SEQ ID NO: 842316 - DNA, 15 bp, Homo sapiens
gcgatcatgaataca

SEQ ID NO: 842317 - DNA, 15 bp, Homo sapiens
cgatcatgaatacag

SEQ ID NO: 842318 - DNA, 15 bp, Homo sapiens
gatcatgaatacagt

SEQ ID NO: 842319 - DNA, 15 bp, Homo sapiens
atcatgaatacagtc

SEQ ID NO: 842320 - DNA, 15 bp, Homo sapiens
tcatgaatacagtcg

SEQ ID NO: 842321 - DNA, 15 bp, Homo sapiens
catgaatacagtcga

SEQ ID NO: 842322 - DNA, 15 bp, Homo sapiens
atgaatacagtcgat

SEQ ID NO: 842323 - DNA, 15 bp, Homo sapiens
tgaatacagtcgata

SEQ ID NO: 842324 - DNA, 15 bp, Homo sapiens
gaatacagtcgatat

SEQ ID NO: 842325 - DNA, 15 bp, Homo sapiens
aatacagtcgatata

SEQ ID NO: 842326 - DNA, 15 bp, Homo sapiens
atacagtcgatataa

SEQ ID NO: 842327 - DNA, 15 bp, Homo sapiens
tacagtcgatataaa

SEQ ID NO: 842328 - DNA, 15 bp, Homo sapiens
acagtcgatataaac

SEQ ID NO: 842329 - DNA, 15 bp, Homo sapiens
cagtcgatataaaca

SEQ ID NO: 842330 - DNA, 15 bp, Homo sapiens
agtcgatataaacat

SEQ ID NO: 842331 - DNA, 15 bp, Homo sapiens
gtcgatataaacatt

SEQ ID NO: 842332 - DNA, 15 bp, Homo sapiens
tcgatataaacattt

SEQ ID NO: 842333 - DNA, 15 bp, Homo sapiens
cgatataaacattta

SEQ ID NO: 842334 - DNA, 15 bp, Homo sapiens
gatataaacatttac

SEQ ID NO: 842335 - DNA, 15 bp, Homo sapiens
atataaacatttaca

SEQ ID NO: 842336 - DNA, 15 bp, Homo sapiens
tataaacatttacat

SEQ ID NO: 842337 - DNA, 15 bp, Homo sapiens
ataaacatttacatg

SEQ ID NO: 842338 - DNA, 15 bp, Homo sapiens
taaacatttacatgg

SEQ ID NO: 842339 - DNA, 15 bp, Homo sapiens
aaacatttacatgga

SEQ ID NO: 842340 - DNA, 15 bp, Homo sapiens
aacatttacatggaa

SEQ ID NO: 842341 - DNA, 15 bp, Homo sapiens
acatttacatggaag

SEQ ID NO: 842342 - DNA, 15 bp, Homo sapiens
catttacatggaagt

SEQ ID NO: 842343 - DNA, 15 bp, Homo sapiens
atttacatggaagtt

SEQ ID NO: 842344 - DNA, 15 bp, Homo sapiens
tttacatggaagttt

SEQ ID NO: 842345 - DNA, 15 bp, Homo sapiens
ttacatggaagtttg

SEQ ID NO: 842346 - DNA, 15 bp, Homo sapiens
tacatggaagtttgt

SEQ ID NO: 842347 - DNA, 15 bp, Homo sapiens
acatggaagtttgtg

SEQ ID NO: 842348 - DNA, 15 bp, Homo sapiens
catggaagtttgtgt

SEQ ID NO: 842349 - DNA, 15 bp, Homo sapiens
atggaagtttgtgtg

SEQ ID NO: 842350 - DNA, 15 bp, Homo sapiens
tggaagtttgtgtgg

SEQ ID NO: 842351 - DNA, 15 bp, Homo sapiens
ggaagtttgtgtgga

SEQ ID NO: 842352 - DNA, 15 bp, Homo sapiens
gaagtttgtgtggat

SEQ ID NO: 842353 - DNA, 15 bp, Homo sapiens
aagtttgtgtggata

SEQ ID NO: 842354 - DNA, 15 bp, Homo sapiens
agtttgtgtggatat

SEQ ID NO: 842355 - DNA, 15 bp, Homo sapiens
gtttgtgtggatata

SEQ ID NO: 842356 - DNA, 15 bp, Homo sapiens
tttgtgtggatataa

SEQ ID NO: 842357 - DNA, 15 bp, Homo sapiens
ttgtgtggatataag

SEQ ID NO: 842358 - DNA, 15 bp, Homo sapiens
tgtgtggatataagt

SEQ ID NO: 842359 - DNA, 15 bp, Homo sapiens
gtgtggatataagtt

SEQ ID NO: 842360 - DNA, 15 bp, Homo sapiens
tgtggatataagttt

SEQ ID NO: 842361 - DNA, 15 bp, Homo sapiens
gtggatataagtttt

SEQ ID NO: 842362 - DNA, 15 bp, Homo sapiens
tggatataagtttta

SEQ ID NO: 842363 - DNA, 15 bp, Homo sapiens
ggatataagttttaa

SEQ ID NO: 842364 - DNA, 15 bp, Homo sapiens
gatataagttttaat

SEQ ID NO: 842365 - DNA, 15 bp, Homo sapiens
atataagttttaatt

SEQ ID NO: 842366 - DNA, 15 bp, Homo sapiens
tataagttttaattt

SEQ ID NO: 842367 - DNA, 15 bp, Homo sapiens
ataagttttaatttc

SEQ ID NO: 842368 - DNA, 15 bp, Homo sapiens
taagttttaatttct

SEQ ID NO: 842369 - DNA, 15 bp, Homo sapiens
gttttaatttctcta

SEQ ID NO: 842370 - DNA, 15 bp, Homo sapiens
ttttaatttctctag

SEQ ID NO: 842371 - DNA, 15 bp, Homo sapiens
tttaatttctctagg

SEQ ID NO: 842372 - DNA, 15 bp, Homo sapiens
ttaatttctctaggg

SEQ ID NO: 842373 - DNA, 15 bp, Homo sapiens
taatttctctagggt

SEQ ID NO: 842374 - DNA, 15 bp, Homo sapiens
aatttctctagggta

SEQ ID NO: 842375 - DNA, 15 bp, Homo sapiens
atttctctagggtaa

SEQ ID NO: 842376 - DNA, 15 bp, Homo sapiens
tttctctagggtaag

SEQ ID NO: 842377 - DNA, 15 bp, Homo sapiens
ttctctagggtaagt

SEQ ID NO: 842378 - DNA, 15 bp, Homo sapiens
tctctagggtaagta

SEQ ID NO: 842379 - DNA, 15 bp, Homo sapiens
ctctagggtaagtat

SEQ ID NO: 842380 - DNA, 15 bp, Homo sapiens
tctagggtaagtatc

SEQ ID NO: 842381 - DNA, 15 bp, Homo sapiens
ctagggtaagtatct

SEQ ID NO: 842382 - DNA, 15 bp, Homo sapiens
tagggtaagtatctc

SEQ ID NO: 842383 - DNA, 15 bp, Homo sapiens
agggtaagtatctcg

SEQ ID NO: 842384 - DNA, 15 bp, Homo sapiens
gggtaagtatctcga

SEQ ID NO: 842385 - DNA, 15 bp, Homo sapiens
ggtaagtatctcgaa

SEQ ID NO: 842386 - DNA, 15 bp, Homo sapiens
gtaagtatctcgaat

SEQ ID NO: 842387 - DNA, 15 bp, Homo sapiens
taagtatctcgaatt

SEQ ID NO: 842388 - DNA, 15 bp, Homo sapiens
aagtatctcgaatta

SEQ ID NO: 842389 - DNA, 15 bp, Homo sapiens
agtatctcgaattag

SEQ ID NO: 842390 - DNA, 15 bp, Homo sapiens
gtatctcgaattagg

SEQ ID NO: 842391 - DNA, 15 bp, Homo sapiens
tatctcgaattagga

SEQ ID NO: 842392 - DNA, 15 bp, Homo sapiens
atctcgaattaggat

SEQ ID NO: 842393 - DNA, 15 bp, Homo sapiens
tctcgaattaggatt

SEQ ID NO: 842394 - DNA, 15 bp, Homo sapiens
ctcgaattaggattg

SEQ ID NO: 842395 - DNA, 15 bp, Homo sapiens
tcgaattaggattgc

SEQ ID NO: 842396 - DNA, 15 bp, Homo sapiens
cgaattaggattgct

SEQ ID NO: 842397 - DNA, 15 bp, Homo sapiens
gaattaggattgctg

SEQ ID NO: 842398 - DNA, 15 bp, Homo sapiens
aattaggattgctgg

SEQ ID NO: 842399 - DNA, 15 bp, Homo sapiens
attaggattgctgga

SEQ ID NO: 842400 - DNA, 15 bp, Homo sapiens
ttaggattgctggat

SEQ ID NO: 842401 - DNA, 15 bp, Homo sapiens
taggattgctggatt

SEQ ID NO: 842402 - DNA, 15 bp, Homo sapiens
aggattgctggatta

SEQ ID NO: 842403 - DNA, 15 bp, Homo sapiens
ggattgctggattat

SEQ ID NO: 842404 - DNA, 15 bp, Homo sapiens
gattgctggattata

SEQ ID NO: 842405 - DNA, 15 bp, Homo sapiens
attgctggattatag

SEQ ID NO: 842406 - DNA, 15 bp, Homo sapiens
ttgctggattatagg

SEQ ID NO: 842407 - DNA, 15 bp, Homo sapiens
tgctggattataggg

SEQ ID NO: 842408 - DNA, 15 bp, Homo sapiens
gctggattatagggt

SEQ ID NO: 842409 - DNA, 15 bp, Homo sapiens
ctggattatagggta

SEQ ID NO: 842410 - DNA, 15 bp, Homo sapiens
tggattatagggtaa

SEQ ID NO: 842411 - DNA, 15 bp, Homo sapiens
ggattatagggtaag

SEQ ID NO: 842412 - DNA, 15 bp, Homo sapiens
gattatagggtaagt

SEQ ID NO: 842413 - DNA, 15 bp, Homo sapiens
attatagggtaagtt

SEQ ID NO: 842414 - DNA, 15 bp, Homo sapiens
ttatagggtaagttt

SEQ ID NO: 842415 - DNA, 15 bp, Homo sapiens
tatagggtaagttta

SEQ ID NO: 842416 - DNA, 15 bp, Homo sapiens
atagggtaagtttat

SEQ ID NO: 842417 - DNA, 15 bp, Homo sapiens
tagggtaagtttata

SEQ ID NO: 842418 - DNA, 15 bp, Homo sapiens
agggtaagtttatat

SEQ ID NO: 842419 - DNA, 15 bp, Homo sapiens
gggtaagtttatatt

SEQ ID NO: 842420 - DNA, 15 bp, Homo sapiens
ggtaagtttatattt

SEQ ID NO: 842421 - DNA, 15 bp, Homo sapiens
gtaagtttatattta

SEQ ID NO: 842422 - DNA, 15 bp, Homo sapiens
taagtttatatttaa

SEQ ID NO: 842423 - DNA, 15 bp, Homo sapiens
aagtttatatttaac

SEQ ID NO: 842424 - DNA, 15 bp, Homo sapiens
agtttatatttaact

SEQ ID NO: 842425 - DNA, 15 bp, Homo sapiens
gtttatatttaactt

SEQ ID NO: 842426 - DNA, 15 bp, Homo sapiens
tttatatttaacttt

SEQ ID NO: 842427 - DNA, 15 bp, Homo sapiens
ttatatttaacttta

SEQ ID NO: 842428 - DNA, 15 bp, Homo sapiens
tatatttaactttaa

SEQ ID NO: 842429 - DNA, 15 bp, Homo sapiens
atatttaactttaaa

SEQ ID NO: 842430 - DNA, 15 bp, Homo sapiens
tatttaactttaaaa

SEQ ID NO: 842431 - DNA, 15 bp, Homo sapiens
atttaactttaaaag

SEQ ID NO: 842432 - DNA, 15 bp, Homo sapiens
tttaactttaaaaga

SEQ ID NO: 842433 - DNA, 15 bp, Homo sapiens
ttaactttaaaagaa

SEQ ID NO: 842434 - DNA, 15 bp, Homo sapiens
taactttaaaagaaa

SEQ ID NO: 842435 - DNA, 15 bp, Homo sapiens
aactttaaaagaaac

SEQ ID NO: 842436 - DNA, 15 bp, Homo sapiens
actttaaaagaaact

SEQ ID NO: 842437 - DNA, 15 bp, Homo sapiens
ctttaaaagaaactg

SEQ ID NO: 842438 - DNA, 15 bp, Homo sapiens
tttaaaagaaactgc

SEQ ID NO: 842439 - DNA, 15 bp, Homo sapiens
ttaaaagaaactgcc

SEQ ID NO: 842440 - DNA, 15 bp, Homo sapiens
taaaagaaactgcca

SEQ ID NO: 842441 - DNA, 15 bp, Homo sapiens
aaaagaaactgccaa

SEQ ID NO: 842442 - DNA, 15 bp, Homo sapiens
aaagaaactgccaaa

SEQ ID NO: 842443 - DNA, 15 bp, Homo sapiens
aagaaactgccaaag

SEQ ID NO: 842444 - DNA, 15 bp, Homo sapiens
agaaactgccaaagt

SEQ ID NO: 842445 - DNA, 15 bp, Homo sapiens
gaaactgccaaagtg

SEQ ID NO: 842446 - DNA, 15 bp, Homo sapiens
aaactgccaaagtgt

SEQ ID NO: 842447 - DNA, 15 bp, Homo sapiens
aactgccaaagtgtt

SEQ ID NO: 842448 - DNA, 15 bp, Homo sapiens
actgccaaagtgttt

SEQ ID NO: 842449 - DNA, 15 bp, Homo sapiens
ctgccaaagtgtttt

SEQ ID NO: 842450 - DNA, 15 bp, Homo sapiens
tgccaaagtgttttc

SEQ ID NO: 842451 - DNA, 15 bp, Homo sapiens
gccaaagtgttttcc

SEQ ID NO: 842452 - DNA, 15 bp, Homo sapiens
ccaaagtgttttcca

SEQ ID NO: 842453 - DNA, 15 bp, Homo sapiens
caaagtgttttccag

SEQ ID NO: 842454 - DNA, 15 bp, Homo sapiens
aaagtgttttccaga

SEQ ID NO: 842455 - DNA, 15 bp, Homo sapiens
aagtgttttccagaa

SEQ ID NO: 842456 - DNA, 15 bp, Homo sapiens
agtgttttccagaag

SEQ ID NO: 842457 - DNA, 15 bp, Homo sapiens
gtgttttccagaagg

SEQ ID NO: 842458 - DNA, 15 bp, Homo sapiens
tgttttccagaagga

SEQ ID NO: 842459 - DNA, 15 bp, Homo sapiens
gttttccagaaggac

SEQ ID NO: 842460 - DNA, 15 bp, Homo sapiens
ttttccagaaggact

SEQ ID NO: 842461 - DNA, 15 bp, Homo sapiens
tttccagaaggactg

SEQ ID NO: 842462 - DNA, 15 bp, Homo sapiens
ttccagaaggactgt

SEQ ID NO: 842463 - DNA, 15 bp, Homo sapiens
tccagaaggactgta

SEQ ID NO: 842464 - DNA, 15 bp, Homo sapiens
ccagaaggactgtac

SEQ ID NO: 842465 - DNA, 15 bp, Homo sapiens
cagaaggactgtacc

SEQ ID NO: 842466 - DNA, 15 bp, Homo sapiens
agaaggactgtacca

SEQ ID NO: 842467 - DNA, 15 bp, Homo sapiens
gaaggactgtaccat

SEQ ID NO: 842468 - DNA, 15 bp, Homo sapiens
aaggactgtaccatt

SEQ ID NO: 842469 - DNA, 15 bp, Homo sapiens
aggactgtaccattt

SEQ ID NO: 842470 - DNA, 15 bp, Homo sapiens
ggactgtaccattta

SEQ ID NO: 842471 - DNA, 15 bp, Homo sapiens
gactgtaccatttat

SEQ ID NO: 842472 - DNA, 15 bp, Homo sapiens
actgtaccatttatc

SEQ ID NO: 842473 - DNA, 15 bp, Homo sapiens
ctgtaccatttatca

SEQ ID NO: 842474 - DNA, 15 bp, Homo sapiens
tgtaccatttatcat

SEQ ID NO: 842475 - DNA, 15 bp, Homo sapiens
gtaccatttatcatt

SEQ ID NO: 842476 - DNA, 15 bp, Homo sapiens
taccatttatcattc

SEQ ID NO: 842477 - DNA, 15 bp, Homo sapiens
accatttatcattcc

SEQ ID NO: 842478 - DNA, 15 bp, Homo sapiens
ccatttatcattccc

SEQ ID NO: 842479 - DNA, 15 bp, Homo sapiens
catttatcattccca

SEQ ID NO: 842480 - DNA, 15 bp, Homo sapiens
atttatcattcccat

SEQ ID NO: 842481 - DNA, 15 bp, Homo sapiens
tttatcattcccatc

SEQ ID NO: 842482 - DNA, 15 bp, Homo sapiens
ttatcattcccatca

SEQ ID NO: 842483 - DNA, 15 bp, Homo sapiens
tatcattcccatcag

SEQ ID NO: 842484 - DNA, 15 bp, Homo sapiens
atcattcccatcagc

SEQ ID NO: 842485 - DNA, 15 bp, Homo sapiens
tcattcccatcagca

SEQ ID NO: 842486 - DNA, 15 bp, Homo sapiens
cattcccatcagcaa

SEQ ID NO: 842487 - DNA, 15 bp, Homo sapiens
attcccatcagcaag

SEQ ID NO: 842488 - DNA, 15 bp, Homo sapiens
ttcccatcagcaagc

SEQ ID NO: 842489 - DNA, 15 bp, Homo sapiens
tcccatcagcaagca

SEQ ID NO: 842490 - DNA, 15 bp, Homo sapiens
cccatcagcaagcaa

SEQ ID NO: 842491 - DNA, 15 bp, Homo sapiens
ccatcagcaagcaat

SEQ ID NO: 842492 - DNA, 15 bp, Homo sapiens
catcagcaagcaatg

SEQ ID NO: 842493 - DNA, 15 bp, Homo sapiens
atcagcaagcaatgc

SEQ ID NO: 842494 - DNA, 15 bp, Homo sapiens
tcagcaagcaatgca

SEQ ID NO: 842495 - DNA, 15 bp, Homo sapiens
cagcaagcaatgcag

SEQ ID NO: 842496 - DNA, 15 bp, Homo sapiens
agcaagcaatgcagg

SEQ ID NO: 842497 - DNA, 15 bp, Homo sapiens
gcaagcaatgcagga

SEQ ID NO: 842498 - DNA, 15 bp, Homo sapiens
caagcaatgcaggag

SEQ ID NO: 842499 - DNA, 15 bp, Homo sapiens
aagcaatgcaggagt

SEQ ID NO: 842500 - DNA, 15 bp, Homo sapiens
agcaatgcaggagtt

SEQ ID NO: 842501 - DNA, 15 bp, Homo sapiens
gcaatgcaggagttt

SEQ ID NO: 842502 - DNA, 15 bp, Homo sapiens
caatgcaggagtttc

SEQ ID NO: 842503 - DNA, 15 bp, Homo sapiens
aatgcaggagtttct

SEQ ID NO: 842504 - DNA, 15 bp, Homo sapiens
atgcaggagtttctg

SEQ ID NO: 842505 - DNA, 15 bp, Homo sapiens
tgcaggagtttctgt

SEQ ID NO: 842506 - DNA, 15 bp, Homo sapiens
gcaggagtttctgta

SEQ ID NO: 842507 - DNA, 15 bp, Homo sapiens
caggagtttctgtag

SEQ ID NO: 842508 - DNA, 15 bp, Homo sapiens
aggagtttctgtagc

SEQ ID NO: 842509 - DNA, 15 bp, Homo sapiens
ggagtttctgtagct

SEQ ID NO: 842510 - DNA, 15 bp, Homo sapiens
gagtttctgtagctc

SEQ ID NO: 842511 - DNA, 15 bp, Homo sapiens
agtttctgtagctcc

SEQ ID NO: 842512 - DNA, 15 bp, Homo sapiens
gtttctgtagctccg

SEQ ID NO: 842513 - DNA, 15 bp, Homo sapiens
tttctgtagctccgc

SEQ ID NO: 842514 - DNA, 15 bp, Homo sapiens
ttctgtagctccgca

SEQ ID NO: 842515 - DNA, 15 bp, Homo sapiens
tctgtagctccgcat

SEQ ID NO: 842516 - DNA, 15 bp, Homo sapiens
ctgtagctccgcatc

SEQ ID NO: 842517 - DNA, 15 bp, Homo sapiens
tgtagctccgcatcc

SEQ ID NO: 842518 - DNA, 15 bp, Homo sapiens
gtagctccgcatcct

SEQ ID NO: 842519 - DNA, 15 bp, Homo sapiens
tagctccgcatcctt

SEQ ID NO: 842520 - DNA, 15 bp, Homo sapiens
agctccgcatcctta

SEQ ID NO: 842521 - DNA, 15 bp, Homo sapiens
gctccgcatccttat

SEQ ID NO: 842522 - DNA, 15 bp, Homo sapiens
ctccgcatccttatc

SEQ ID NO: 842523 - DNA, 15 bp, Homo sapiens
tccgcatccttatca

SEQ ID NO: 842524 - DNA, 15 bp, Homo sapiens
ccgcatccttatcat

SEQ ID NO: 842525 - DNA, 15 bp, Homo sapiens
cgcatccttatcatc

SEQ ID NO: 842526 - DNA, 15 bp, Homo sapiens
gcatccttatcatca

SEQ ID NO: 842527 - DNA, 15 bp, Homo sapiens
catccttatcatcac

SEQ ID NO: 842528 - DNA, 15 bp, Homo sapiens
atccttatcatcact

SEQ ID NO: 842529 - DNA, 15 bp, Homo sapiens
tccttatcatcactt

SEQ ID NO: 842530 - DNA, 15 bp, Homo sapiens
ccttatcatcacttg

SEQ ID NO: 842531 - DNA, 15 bp, Homo sapiens
cttatcatcacttgg

SEQ ID NO: 842532 - DNA, 15 bp, Homo sapiens
ttatcatcacttggc

SEQ ID NO: 842533 - DNA, 15 bp, Homo sapiens
tatcatcacttggca

SEQ ID NO: 842534 - DNA, 15 bp, Homo sapiens
atcatcacttggcat

SEQ ID NO: 842535 - DNA, 15 bp, Homo sapiens
tcatcacttggcatt

SEQ ID NO: 842536 - DNA, 15 bp, Homo sapiens
catcacttggcattg

SEQ ID NO: 842537 - DNA, 15 bp, Homo sapiens
atcacttggcattgt

SEQ ID NO: 842538 - DNA, 15 bp, Homo sapiens
tcacttggcattgtc

SEQ ID NO: 842539 - DNA, 15 bp, Homo sapiens
cacttggcattgtca

SEQ ID NO: 842540 - DNA, 15 bp, Homo sapiens
acttggcattgtcaa

SEQ ID NO: 842541 - DNA, 15 bp, Homo sapiens
cttggcattgtcaat

SEQ ID NO: 842542 - DNA, 15 bp, Homo sapiens
ttggcattgtcaata

SEQ ID NO: 842543 - DNA, 15 bp, Homo sapiens
tggcattgtcaatac

SEQ ID NO: 842544 - DNA, 15 bp, Homo sapiens
ggcattgtcaatact

SEQ ID NO: 842545 - DNA, 15 bp, Homo sapiens
gcattgtcaatactt

SEQ ID NO: 842546 - DNA, 15 bp, Homo sapiens
cattgtcaatacttt

SEQ ID NO: 842547 - DNA, 15 bp, Homo sapiens
attgtcaatactttt

SEQ ID NO: 842548 - DNA, 15 bp, Homo sapiens
ttgtcaatacttttt

SEQ ID NO: 842549 - DNA, 15 bp, Homo sapiens
tgtcaatacttttta

SEQ ID NO: 842550 - DNA, 15 bp, Homo sapiens
gtcaatactttttat

SEQ ID NO: 842551 - DNA, 15 bp, Homo sapiens
tcaatactttttatt

SEQ ID NO: 842552 - DNA, 15 bp, Homo sapiens
caatactttttattt

SEQ ID NO: 842553 - DNA, 15 bp, Homo sapiens
aatactttttatttt

SEQ ID NO: 842554 - DNA, 15 bp, Homo sapiens
atactttttatttta

SEQ ID NO: 842555 - DNA, 15 bp, Homo sapiens
tactttttattttaa

SEQ ID NO: 842556 - DNA, 15 bp, Homo sapiens
actttttattttaaa

SEQ ID NO: 842557 - DNA, 15 bp, Homo sapiens
ctttttattttaaac

SEQ ID NO: 842558 - DNA, 15 bp, Homo sapiens
tttttattttaaaca

SEQ ID NO: 842559 - DNA, 15 bp, Homo sapiens
ttttattttaaacag

SEQ ID NO: 842560 - DNA, 15 bp, Homo sapiens
tttattttaaacagt

SEQ ID NO: 842561 - DNA, 15 bp, Homo sapiens
ttattttaaacagtc

SEQ ID NO: 842562 - DNA, 15 bp, Homo sapiens
tattttaaacagtct

SEQ ID NO: 842563 - DNA, 15 bp, Homo sapiens
attttaaacagtcta

SEQ ID NO: 842564 - DNA, 15 bp, Homo sapiens
ttttaaacagtctag

SEQ ID NO: 842565 - DNA, 15 bp, Homo sapiens
tttaaacagtctagt

SEQ ID NO: 842566 - DNA, 15 bp, Homo sapiens
ttaaacagtctagta

SEQ ID NO: 842567 - DNA, 15 bp, Homo sapiens
taaacagtctagtag

SEQ ID NO: 842568 - DNA, 15 bp, Homo sapiens
aaacagtctagtagg

SEQ ID NO: 842569 - DNA, 15 bp, Homo sapiens
aacagtctagtaggt

SEQ ID NO: 842570 - DNA, 15 bp, Homo sapiens
acagtctagtaggtg

SEQ ID NO: 842571 - DNA, 15 bp, Homo sapiens
cagtctagtaggtgg

SEQ ID NO: 842572 - DNA, 15 bp, Homo sapiens
agtctagtaggtggg

SEQ ID NO: 842573 - DNA, 15 bp, Homo sapiens
gtctagtaggtgggc

SEQ ID NO: 842574 - DNA, 15 bp, Homo sapiens
tctagtaggtgggca

SEQ ID NO: 842575 - DNA, 15 bp, Homo sapiens
ctagtaggtgggcag

SEQ ID NO: 842576 - DNA, 15 bp, Homo sapiens
tagtaggtgggcagt

SEQ ID NO: 842577 - DNA, 15 bp, Homo sapiens
agtaggtgggcagtg

SEQ ID NO: 842578 - DNA, 15 bp, Homo sapiens
gtaggtgggcagtgt

SEQ ID NO: 842579 - DNA, 15 bp, Homo sapiens
taggtgggcagtgtg

SEQ ID NO: 842580 - DNA, 15 bp, Homo sapiens
aggtgggcagtgtgg

SEQ ID NO: 842581 - DNA, 15 bp, Homo sapiens
ggtgggcagtgtggt

SEQ ID NO: 842582 - DNA, 15 bp, Homo sapiens
gtgggcagtgtggta

SEQ ID NO: 842583 - DNA, 15 bp, Homo sapiens
tgggcagtgtggtat

SEQ ID NO: 842584 - DNA, 15 bp, Homo sapiens
gggcagtgtggtatc

SEQ ID NO: 842585 - DNA, 15 bp, Homo sapiens
ggcagtgtggtatct

SEQ ID NO: 842586 - DNA, 15 bp, Homo sapiens
gcagtgtggtatctc

SEQ ID NO: 842587 - DNA, 15 bp, Homo sapiens
cagtgtggtatctca

SEQ ID NO: 842588 - DNA, 15 bp, Homo sapiens
agtgtggtatctcat

SEQ ID NO: 842589 - DNA, 15 bp, Homo sapiens
gtgtggtatctcatt

SEQ ID NO: 842590 - DNA, 15 bp, Homo sapiens
tgtggtatctcattg

SEQ ID NO: 842591 - DNA, 15 bp, Homo sapiens
gtggtatctcattgt

SEQ ID NO: 842592 - DNA, 15 bp, Homo sapiens
ctcattgtggttttc

SEQ ID NO: 842593 - DNA, 15 bp, Homo sapiens
tcattgtggttttca

SEQ ID NO: 842594 - DNA, 15 bp, Homo sapiens
cattgtggttttcac

SEQ ID NO: 842595 - DNA, 15 bp, Homo sapiens
attgtggttttcacg

SEQ ID NO: 842596 - DNA, 15 bp, Homo sapiens
ttgtggttttcacgt

SEQ ID NO: 842597 - DNA, 15 bp, Homo sapiens
tgtggttttcacgtg

SEQ ID NO: 842598 - DNA, 15 bp, Homo sapiens
gtggttttcacgtgt

SEQ ID NO: 842599 - DNA, 15 bp, Homo sapiens
tggttttcacgtgta

SEQ ID NO: 842600 - DNA, 15 bp, Homo sapiens
ggttttcacgtgtat

SEQ ID NO: 842601 - DNA, 15 bp, Homo sapiens
gttttcacgtgtatt

SEQ ID NO: 842602 - DNA, 15 bp, Homo sapiens
ttttcacgtgtattt

SEQ ID NO: 842603 - DNA, 15 bp, Homo sapiens
tttcacgtgtatttc

SEQ ID NO: 842604 - DNA, 15 bp, Homo sapiens
ttcacgtgtatttcc

SEQ ID NO: 842605 - DNA, 15 bp, Homo sapiens
tcacgtgtatttccc

SEQ ID NO: 842606 - DNA, 15 bp, Homo sapiens
cacgtgtatttccct

SEQ ID NO: 842607 - DNA, 15 bp, Homo sapiens
acgtgtatttcccta

SEQ ID NO: 842608 - DNA, 15 bp, Homo sapiens
cgtgtatttccctac

SEQ ID NO: 842609 - DNA, 15 bp, Homo sapiens
gtgtatttccctact

SEQ ID NO: 842610 - DNA, 15 bp, Homo sapiens
tgtatttccctactg

SEQ ID NO: 842611 - DNA, 15 bp, Homo sapiens
gtatttccctactga

SEQ ID NO: 842612 - DNA, 15 bp, Homo sapiens
tatttccctactgat

SEQ ID NO: 842613 - DNA, 15 bp, Homo sapiens
atttccctactgatg

SEQ ID NO: 842614 - DNA, 15 bp, Homo sapiens
tttccctactgatgt

SEQ ID NO: 842615 - DNA, 15 bp, Homo sapiens
ttccctactgatgtt

SEQ ID NO: 842616 - DNA, 15 bp, Homo sapiens
tccctactgatgttg

SEQ ID NO: 842617 - DNA, 15 bp, Homo sapiens
ccctactgatgttga

SEQ ID NO: 842618 - DNA, 15 bp, Homo sapiens
cctactgatgttgaa

SEQ ID NO: 842619 - DNA, 15 bp, Homo sapiens
ctactgatgttgaac

SEQ ID NO: 842620 - DNA, 15 bp, Homo sapiens
tactgatgttgaaca

SEQ ID NO: 842621 - DNA, 15 bp, Homo sapiens
actgatgttgaacac

SEQ ID NO: 842622 - DNA, 15 bp, Homo sapiens
ctgatgttgaacacc

SEQ ID NO: 842623 - DNA, 15 bp, Homo sapiens
tgatgttgaacacct

SEQ ID NO: 842624 - DNA, 15 bp, Homo sapiens
gatgttgaacacctt

SEQ ID NO: 842625 - DNA, 15 bp, Homo sapiens
atgttgaacaccttc

SEQ ID NO: 842626 - DNA, 15 bp, Homo sapiens
tgttgaacaccttcc

SEQ ID NO: 842627 - DNA, 15 bp, Homo sapiens
gttgaacaccttccc

SEQ ID NO: 842628 - DNA, 15 bp, Homo sapiens
ttgaacaccttccca

SEQ ID NO: 842629 - DNA, 15 bp, Homo sapiens
tgaacaccttcccag

SEQ ID NO: 842630 - DNA, 15 bp, Homo sapiens
gaacaccttcccagt

SEQ ID NO: 842631 - DNA, 15 bp, Homo sapiens
aacaccttcccagtg

SEQ ID NO: 842632 - DNA, 15 bp, Homo sapiens
acaccttcccagtgg

SEQ ID NO: 842633 - DNA, 15 bp, Homo sapiens
caccttcccagtggt

SEQ ID NO: 842634 - DNA, 15 bp, Homo sapiens
accttcccagtggtt

SEQ ID NO: 842635 - DNA, 15 bp, Homo sapiens
ccttcccagtggtta

SEQ ID NO: 842636 - DNA, 15 bp, Homo sapiens
cttcccagtggttat

SEQ ID NO: 842637 - DNA, 15 bp, Homo sapiens
ttcccagtggttatt

SEQ ID NO: 842638 - DNA, 15 bp, Homo sapiens
tcccagtggttattt

SEQ ID NO: 842639 - DNA, 15 bp, Homo sapiens
cccagtggttatttg

SEQ ID NO: 842640 - DNA, 15 bp, Homo sapiens
ccagtggttatttgt

SEQ ID NO: 842641 - DNA, 15 bp, Homo sapiens
cagtggttatttgtc

SEQ ID NO: 842642 - DNA, 15 bp, Homo sapiens
agtggttatttgtca

SEQ ID NO: 842643 - DNA, 15 bp, Homo sapiens
gtggttatttgtcat

SEQ ID NO: 842644 - DNA, 15 bp, Homo sapiens
tggttatttgtcatc

SEQ ID NO: 842645 - DNA, 15 bp, Homo sapiens
ggttatttgtcatct

SEQ ID NO: 842646 - DNA, 15 bp, Homo sapiens
gttatttgtcatctg

SEQ ID NO: 842647 - DNA, 15 bp, Homo sapiens
ttatttgtcatctgt

SEQ ID NO: 842648 - DNA, 15 bp, Homo sapiens
tatttgtcatctgta

SEQ ID NO: 842649 - DNA, 15 bp, Homo sapiens
atttgtcatctgtat

SEQ ID NO: 842650 - DNA, 15 bp, Homo sapiens
tttgtcatctgtata

SEQ ID NO: 842651 - DNA, 15 bp, Homo sapiens
ttgtcatctgtatat

SEQ ID NO: 842652 - DNA, 15 bp, Homo sapiens
tgtcatctgtatatg

SEQ ID NO: 842653 - DNA, 15 bp, Homo sapiens
gtcatctgtatatgc

SEQ ID NO: 842654 - DNA, 15 bp, Homo sapiens
tcatctgtatatgct

SEQ ID NO: 842655 - DNA, 15 bp, Homo sapiens
catctgtatatgctt

SEQ ID NO: 842656 - DNA, 15 bp, Homo sapiens
atctgtatatgcttt

SEQ ID NO: 842657 - DNA, 15 bp, Homo sapiens
tctgtatatgctttt

SEQ ID NO: 842658 - DNA, 15 bp, Homo sapiens
ctgtatatgcttttt

SEQ ID NO: 842659 - DNA, 15 bp, Homo sapiens
tgtatatgctttttg

SEQ ID NO: 842660 - DNA, 15 bp, Homo sapiens
gtatatgctttttgg

SEQ ID NO: 842661 - DNA, 15 bp, Homo sapiens
tatatgctttttggt

SEQ ID NO: 842662 - DNA, 15 bp, Homo sapiens
atatgctttttggtg

SEQ ID NO: 842663 - DNA, 15 bp, Homo sapiens
tatgctttttggtga

SEQ ID NO: 842664 - DNA, 15 bp, Homo sapiens
atgctttttggtgaa

SEQ ID NO: 842665 - DNA, 15 bp, Homo sapiens
tgctttttggtgaag

SEQ ID NO: 842666 - DNA, 15 bp, Homo sapiens
gctttttggtgaagt

SEQ ID NO: 842667 - DNA, 15 bp, Homo sapiens
ctttttggtgaagtg

SEQ ID NO: 842668 - DNA, 15 bp, Homo sapiens
tttttggtgaagtgc

SEQ ID NO: 842669 - DNA, 15 bp, Homo sapiens
ttttggtgaagtgct

SEQ ID NO: 842670 - DNA, 15 bp, Homo sapiens
tttggtgaagtgctg

SEQ ID NO: 842671 - DNA, 15 bp, Homo sapiens
ttggtgaagtgctgg

SEQ ID NO: 842672 - DNA, 15 bp, Homo sapiens
tggtgaagtgctggg

SEQ ID NO: 842673 - DNA, 15 bp, Homo sapiens
ggtgaagtgctgggt

SEQ ID NO: 842674 - DNA, 15 bp, Homo sapiens
gtgaagtgctgggtc

SEQ ID NO: 842675 - DNA, 15 bp, Homo sapiens
tgaagtgctgggtcc

SEQ ID NO: 842676 - DNA, 15 bp, Homo sapiens
gaagtgctgggtcca

SEQ ID NO: 842677 - DNA, 15 bp, Homo sapiens
aagtgctgggtccat

SEQ ID NO: 842678 - DNA, 15 bp, Homo sapiens
agtgctgggtccatt

SEQ ID NO: 842679 - DNA, 15 bp, Homo sapiens
gtgctgggtccattt

SEQ ID NO: 842680 - DNA, 15 bp, Homo sapiens
tgctgggtccatttt

SEQ ID NO: 842681 - DNA, 15 bp, Homo sapiens
gctgggtccatttta

SEQ ID NO: 842682 - DNA, 15 bp, Homo sapiens
ctgggtccattttaa

SEQ ID NO: 842683 - DNA, 15 bp, Homo sapiens
tgggtccattttaat

SEQ ID NO: 842684 - DNA, 15 bp, Homo sapiens
gggtccattttaatt

SEQ ID NO: 842685 - DNA, 15 bp, Homo sapiens
ggtccattttaattg

SEQ ID NO: 842686 - DNA, 15 bp, Homo sapiens
gtccattttaattga

SEQ ID NO: 842687 - DNA, 15 bp, Homo sapiens
tccattttaattgag

SEQ ID NO: 842688 - DNA, 15 bp, Homo sapiens
ccattttaattgagt

SEQ ID NO: 842689 - DNA, 15 bp, Homo sapiens
cattttaattgagtt

SEQ ID NO: 842690 - DNA, 15 bp, Homo sapiens
attttaattgagttg

SEQ ID NO: 842691 - DNA, 15 bp, Homo sapiens
ttttaattgagttgt

SEQ ID NO: 842692 - DNA, 15 bp, Homo sapiens
tttaattgagttgtt

SEQ ID NO: 842693 - DNA, 15 bp, Homo sapiens
ttaattgagttgttt

SEQ ID NO: 842694 - DNA, 15 bp, Homo sapiens
taattgagttgtttc

SEQ ID NO: 842695 - DNA, 15 bp, Homo sapiens
aattgagttgtttct

SEQ ID NO: 842696 - DNA, 15 bp, Homo sapiens
attgagttgtttctt

SEQ ID NO: 842697 - DNA, 15 bp, Homo sapiens
ttgagttgtttcttt

SEQ ID NO: 842698 - DNA, 15 bp, Homo sapiens
tgagttgtttctttg

SEQ ID NO: 842699 - DNA, 15 bp, Homo sapiens
gagttgtttctttga

SEQ ID NO: 842700 - DNA, 15 bp, Homo sapiens
agttgtttctttgaa

SEQ ID NO: 842701 - DNA, 15 bp, Homo sapiens
gttgtttctttgaat

SEQ ID NO: 842702 - DNA, 15 bp, Homo sapiens
ttgtttctttgaatt

SEQ ID NO: 842703 - DNA, 15 bp, Homo sapiens
tgtttctttgaattt

SEQ ID NO: 842704 - DNA, 15 bp, Homo sapiens
gtttctttgaatttg

SEQ ID NO: 842705 - DNA, 15 bp, Homo sapiens
tttctttgaatttgt

SEQ ID NO: 842706 - DNA, 15 bp, Homo sapiens
ttctttgaatttgtt

SEQ ID NO: 842707 - DNA, 15 bp, Homo sapiens
tctttgaatttgttt

SEQ ID NO: 842708 - DNA, 15 bp, Homo sapiens
ctttgaatttgtttt

SEQ ID NO: 842709 - DNA, 15 bp, Homo sapiens
tttgaatttgttttt

SEQ ID NO: 842710 - DNA, 15 bp, Homo sapiens
ttgaatttgtttttt

SEQ ID NO: 842711 - DNA, 15 bp, Homo sapiens
tgaatttgtttttta

SEQ ID NO: 842712 - DNA, 15 bp, Homo sapiens
gaatttgttttttac

SEQ ID NO: 842713 - DNA, 15 bp, Homo sapiens
aatttgttttttact

SEQ ID NO: 842714 - DNA, 15 bp, Homo sapiens
atttgttttttactg

SEQ ID NO: 842715 - DNA, 15 bp, Homo sapiens
tttgttttttactgt

SEQ ID NO: 842716 - DNA, 15 bp, Homo sapiens
ttgttttttactgtt

SEQ ID NO: 842717 - DNA, 15 bp, Homo sapiens
tgttttttactgttt

SEQ ID NO: 842718 - DNA, 15 bp, Homo sapiens
gttttttactgttta

SEQ ID NO: 842719 - DNA, 15 bp, Homo sapiens
ttttttactgtttaa

SEQ ID NO: 842720 - DNA, 15 bp, Homo sapiens
tttttactgtttaag

SEQ ID NO: 842721 - DNA, 15 bp, Homo sapiens
ttttactgtttaaga

SEQ ID NO: 842722 - DNA, 15 bp, Homo sapiens
tttactgtttaagaa

SEQ ID NO: 842723 - DNA, 15 bp, Homo sapiens
ttactgtttaagaat

SEQ ID NO: 842724 - DNA, 15 bp, Homo sapiens
tactgtttaagaatt

SEQ ID NO: 842725 - DNA, 15 bp, Homo sapiens
actgtttaagaattc

SEQ ID NO: 842726 - DNA, 15 bp, Homo sapiens
ctgtttaagaattct

SEQ ID NO: 842727 - DNA, 15 bp, Homo sapiens
tgtttaagaattctt

SEQ ID NO: 842728 - DNA, 15 bp, Homo sapiens
gtttaagaattcttt

SEQ ID NO: 842729 - DNA, 15 bp, Homo sapiens
tttaagaattcttta

SEQ ID NO: 842730 - DNA, 15 bp, Homo sapiens
ttaagaattctttat

SEQ ID NO: 842731 - DNA, 15 bp, Homo sapiens
taagaattctttata

SEQ ID NO: 842732 - DNA, 15 bp, Homo sapiens
aagaattctttatat

SEQ ID NO: 842733 - DNA, 15 bp, Homo sapiens
agaattctttatata

SEQ ID NO: 842734 - DNA, 15 bp, Homo sapiens
gaattctttatatat

SEQ ID NO: 842735 - DNA, 15 bp, Homo sapiens
aattctttatatatt

SEQ ID NO: 842736 - DNA, 15 bp, Homo sapiens
attctttatatattt

SEQ ID NO: 842737 - DNA, 15 bp, Homo sapiens
ttctttatatatttt

SEQ ID NO: 842738 - DNA, 15 bp, Homo sapiens
tctttatatattttg

SEQ ID NO: 842739 - DNA, 15 bp, Homo sapiens
ctttatatattttgg

SEQ ID NO: 842740 - DNA, 15 bp, Homo sapiens
tttatatattttgga

SEQ ID NO: 842741 - DNA, 15 bp, Homo sapiens
ttatatattttggat

SEQ ID NO: 842742 - DNA, 15 bp, Homo sapiens
tatatattttggatc

SEQ ID NO: 842743 - DNA, 15 bp, Homo sapiens
atatattttggatct

SEQ ID NO: 842744 - DNA, 15 bp, Homo sapiens
tatattttggatctc

SEQ ID NO: 842745 - DNA, 15 bp, Homo sapiens
atattttggatctcg

SEQ ID NO: 842746 - DNA, 15 bp, Homo sapiens
tattttggatctcgt

SEQ ID NO: 842747 - DNA, 15 bp, Homo sapiens
attttggatctcgtt

SEQ ID NO: 842748 - DNA, 15 bp, Homo sapiens
ttttggatctcgttg

SEQ ID NO: 842749 - DNA, 15 bp, Homo sapiens
tttggatctcgttgg

SEQ ID NO: 842750 - DNA, 15 bp, Homo sapiens
ttggatctcgttgga

SEQ ID NO: 842751 - DNA, 15 bp, Homo sapiens
tggatctcgttggat

SEQ ID NO: 842752 - DNA, 15 bp, Homo sapiens
ggatctcgttggata

SEQ ID NO: 842753 - DNA, 15 bp, Homo sapiens
gatctcgttggatat

SEQ ID NO: 842754 - DNA, 15 bp, Homo sapiens
atctcgttggatata

SEQ ID NO: 842755 - DNA, 15 bp, Homo sapiens
tctcgttggatatac

SEQ ID NO: 842756 - DNA, 15 bp, Homo sapiens
ctcgttggatataca

SEQ ID NO: 842757 - DNA, 15 bp, Homo sapiens
tcgttggatatacaa

SEQ ID NO: 842758 - DNA, 15 bp, Homo sapiens
cgttggatatacaat

SEQ ID NO: 842759 - DNA, 15 bp, Homo sapiens
gttggatatacaatt

SEQ ID NO: 842760 - DNA, 15 bp, Homo sapiens
ttggatatacaattt

SEQ ID NO: 842761 - DNA, 15 bp, Homo sapiens
tggatatacaatttg

SEQ ID NO: 842762 - DNA, 15 bp, Homo sapiens
ggatatacaatttgt

SEQ ID NO: 842763 - DNA, 15 bp, Homo sapiens
gatatacaatttgta

SEQ ID NO: 842764 - DNA, 15 bp, Homo sapiens
atatacaatttgtaa

SEQ ID NO: 842765 - DNA, 15 bp, Homo sapiens
tatacaatttgtaaa

SEQ ID NO: 842766 - DNA, 15 bp, Homo sapiens
atacaatttgtaaat

SEQ ID NO: 842767 - DNA, 15 bp, Homo sapiens
tacaatttgtaaata

SEQ ID NO: 842768 - DNA, 15 bp, Homo sapiens
acaatttgtaaatat

SEQ ID NO: 842769 - DNA, 15 bp, Homo sapiens
caatttgtaaatatt

SEQ ID NO: 842770 - DNA, 15 bp, Homo sapiens
aatttgtaaatattt

SEQ ID NO: 842771 - DNA, 15 bp, Homo sapiens
atttgtaaatatttg

SEQ ID NO: 842772 - DNA, 15 bp, Homo sapiens
tttgtaaatatttgc

SEQ ID NO: 842773 - DNA, 15 bp, Homo sapiens
ttgtaaatatttgcc

SEQ ID NO: 842774 - DNA, 15 bp, Homo sapiens
tgtaaatatttgccc

SEQ ID NO: 842775 - DNA, 15 bp, Homo sapiens
gtaaatatttgcccc

SEQ ID NO: 842776 - DNA, 15 bp, Homo sapiens
taaatatttgcccct

SEQ ID NO: 842777 - DNA, 15 bp, Homo sapiens
aaatatttgccccta

SEQ ID NO: 842778 - DNA, 15 bp, Homo sapiens
aatatttgcccctaa

SEQ ID NO: 842779 - DNA, 15 bp, Homo sapiens
atatttgcccctaat

SEQ ID NO: 842780 - DNA, 15 bp, Homo sapiens
tatttgcccctaatc

SEQ ID NO: 842781 - DNA, 15 bp, Homo sapiens
atttgcccctaatct

SEQ ID NO: 842782 - DNA, 15 bp, Homo sapiens
tttgcccctaatctg

SEQ ID NO: 842783 - DNA, 15 bp, Homo sapiens
ttgcccctaatctgt

SEQ ID NO: 842784 - DNA, 15 bp, Homo sapiens
tgcccctaatctgta

SEQ ID NO: 842785 - DNA, 15 bp, Homo sapiens
gcccctaatctgtag

SEQ ID NO: 842786 - DNA, 15 bp, Homo sapiens
cccctaatctgtagc

SEQ ID NO: 842787 - DNA, 15 bp, Homo sapiens
ccctaatctgtagct

SEQ ID NO: 842788 - DNA, 15 bp, Homo sapiens
cctaatctgtagctt

SEQ ID NO: 842789 - DNA, 15 bp, Homo sapiens
ctaatctgtagcttg

SEQ ID NO: 842790 - DNA, 15 bp, Homo sapiens
taatctgtagcttgt

SEQ ID NO: 842791 - DNA, 15 bp, Homo sapiens
aatctgtagcttgtg

SEQ ID NO: 842792 - DNA, 15 bp, Homo sapiens
atctgtagcttgtgt

SEQ ID NO: 842793 - DNA, 15 bp, Homo sapiens
tctgtagcttgtgtt

SEQ ID NO: 842794 - DNA, 15 bp, Homo sapiens
ctgtagcttgtgttt

SEQ ID NO: 842795 - DNA, 15 bp, Homo sapiens
tgtagcttgtgtttt

SEQ ID NO: 842796 - DNA, 15 bp, Homo sapiens
gtagcttgtgttttc

SEQ ID NO: 842797 - DNA, 15 bp, Homo sapiens
tagcttgtgttttca

SEQ ID NO: 842798 - DNA, 15 bp, Homo sapiens
agcttgtgttttcat

SEQ ID NO: 842799 - DNA, 15 bp, Homo sapiens
gcttgtgttttcatt

SEQ ID NO: 842800 - DNA, 15 bp, Homo sapiens
cttgtgttttcattt

SEQ ID NO: 842801 - DNA, 15 bp, Homo sapiens
ttgtgttttcatttt

SEQ ID NO: 842802 - DNA, 15 bp, Homo sapiens
tgtgttttcattttc

SEQ ID NO: 842803 - DNA, 15 bp, Homo sapiens
gtgttttcattttct

SEQ ID NO: 842804 - DNA, 15 bp, Homo sapiens
tgttttcattttctt

SEQ ID NO: 842805 - DNA, 15 bp, Homo sapiens
gttttcattttctta

SEQ ID NO: 842806 - DNA, 15 bp, Homo sapiens
ttttcattttcttaa

SEQ ID NO: 842807 - DNA, 15 bp, Homo sapiens
tttcattttcttaac

SEQ ID NO: 842808 - DNA, 15 bp, Homo sapiens
ttcattttcttaact

SEQ ID NO: 842809 - DNA, 15 bp, Homo sapiens
tcattttcttaactt

SEQ ID NO: 842810 - DNA, 15 bp, Homo sapiens
cattttcttaactta

SEQ ID NO: 842811 - DNA, 15 bp, Homo sapiens
attttcttaacttaa

SEQ ID NO: 842812 - DNA, 15 bp, Homo sapiens
ttttcttaacttaaa

SEQ ID NO: 842813 - DNA, 15 bp, Homo sapiens
tttcttaacttaaac

SEQ ID NO: 842814 - DNA, 15 bp, Homo sapiens
ttcttaacttaaact

SEQ ID NO: 842815 - DNA, 15 bp, Homo sapiens
tcttaacttaaactt

SEQ ID NO: 842816 - DNA, 15 bp, Homo sapiens
cttaacttaaacttt

SEQ ID NO: 842817 - DNA, 15 bp, Homo sapiens
ttaacttaaactttc

SEQ ID NO: 842818 - DNA, 15 bp, Homo sapiens
taacttaaactttct

SEQ ID NO: 842819 - DNA, 15 bp, Homo sapiens
aacttaaactttctt

SEQ ID NO: 842820 - DNA, 15 bp, Homo sapiens
acttaaactttcttt

SEQ ID NO: 842821 - DNA, 15 bp, Homo sapiens
cttaaactttctttc

SEQ ID NO: 842822 - DNA, 15 bp, Homo sapiens
ttaaactttctttcc

SEQ ID NO: 842823 - DNA, 15 bp, Homo sapiens
taaactttctttcct

SEQ ID NO: 842824 - DNA, 15 bp, Homo sapiens
aaactttctttcctg

SEQ ID NO: 842825 - DNA, 15 bp, Homo sapiens
aactttctttcctgg

SEQ ID NO: 842826 - DNA, 15 bp, Homo sapiens
actttctttcctgga

SEQ ID NO: 842827 - DNA, 15 bp, Homo sapiens
ctttctttcctggaa

SEQ ID NO: 842828 - DNA, 15 bp, Homo sapiens
tttctttcctggaaa

SEQ ID NO: 842829 - DNA, 15 bp, Homo sapiens
ttctttcctggaaag

SEQ ID NO: 842830 - DNA, 15 bp, Homo sapiens
tctttcctggaaaga

SEQ ID NO: 842831 - DNA, 15 bp, Homo sapiens
ctttcctggaaagaa

SEQ ID NO: 842832 - DNA, 15 bp, Homo sapiens
tttcctggaaagaag

SEQ ID NO: 842833 - DNA, 15 bp, Homo sapiens
ttcctggaaagaagt

SEQ ID NO: 842834 - DNA, 15 bp, Homo sapiens
tcctggaaagaagtt

SEQ ID NO: 842835 - DNA, 15 bp, Homo sapiens
cctggaaagaagttt

SEQ ID NO: 842836 - DNA, 15 bp, Homo sapiens
ctggaaagaagtttt

SEQ ID NO: 842837 - DNA, 15 bp, Homo sapiens
tggaaagaagttttt

SEQ ID NO: 842838 - DNA, 15 bp, Homo sapiens
ggaaagaagttttta

SEQ ID NO: 842839 - DNA, 15 bp, Homo sapiens
gaaagaagtttttaa

SEQ ID NO: 842840 - DNA, 15 bp, Homo sapiens
aaagaagtttttaag

SEQ ID NO: 842841 - DNA, 15 bp, Homo sapiens
aagaagtttttaagt

SEQ ID NO: 842842 - DNA, 15 bp, Homo sapiens
agaagtttttaagtt

SEQ ID NO: 842843 - DNA, 15 bp, Homo sapiens
gaagtttttaagttg

SEQ ID NO: 842844 - DNA, 15 bp, Homo sapiens
aagtttttaagttga

SEQ ID NO: 842845 - DNA, 15 bp, Homo sapiens
agtttttaagttgaa

SEQ ID NO: 842846 - DNA, 15 bp, Homo sapiens
gtttttaagttgaaa

SEQ ID NO: 842847 - DNA, 15 bp, Homo sapiens
tttttaagttgaaat

SEQ ID NO: 842848 - DNA, 15 bp, Homo sapiens
ttttaagttgaaata

SEQ ID NO: 842849 - DNA, 15 bp, Homo sapiens
tttaagttgaaatat

SEQ ID NO: 842850 - DNA, 15 bp, Homo sapiens
ttaagttgaaatatt

SEQ ID NO: 842851 - DNA, 15 bp, Homo sapiens
taagttgaaatattt

SEQ ID NO: 842852 - DNA, 15 bp, Homo sapiens
aagttgaaatatttg

SEQ ID NO: 842853 - DNA, 15 bp, Homo sapiens
agttgaaatatttgg

SEQ ID NO: 842854 - DNA, 15 bp, Homo sapiens
gttgaaatatttgga

SEQ ID NO: 842855 - DNA, 15 bp, Homo sapiens
ttgaaatatttggag

SEQ ID NO: 842856 - DNA, 15 bp, Homo sapiens
tgaaatatttggagt

SEQ ID NO: 842857 - DNA, 15 bp, Homo sapiens
gaaatatttggagtt

SEQ ID NO: 842858 - DNA, 15 bp, Homo sapiens
aaatatttggagttt

SEQ ID NO: 842859 - DNA, 15 bp, Homo sapiens
aatatttggagtttt

SEQ ID NO: 842860 - DNA, 15 bp, Homo sapiens
atatttggagttttt

SEQ ID NO: 842861 - DNA, 15 bp, Homo sapiens
tatttggagtttttc

SEQ ID NO: 842862 - DNA, 15 bp, Homo sapiens
atttggagtttttct

SEQ ID NO: 842863 - DNA, 15 bp, Homo sapiens
tttggagtttttctt

SEQ ID NO: 842864 - DNA, 15 bp, Homo sapiens
ttggagtttttctta

SEQ ID NO: 842865 - DNA, 15 bp, Homo sapiens
tggagtttttcttaa

SEQ ID NO: 842866 - DNA, 15 bp, Homo sapiens
ggagtttttcttaaa

SEQ ID NO: 842867 - DNA, 15 bp, Homo sapiens
gagtttttcttaaaa

SEQ ID NO: 842868 - DNA, 15 bp, Homo sapiens
agtttttcttaaaag

SEQ ID NO: 842869 - DNA, 15 bp, Homo sapiens
gtttttcttaaaagg

SEQ ID NO: 842870 - DNA, 15 bp, Homo sapiens
tttttcttaaaaggt

SEQ ID NO: 842871 - DNA, 15 bp, Homo sapiens
ttttcttaaaaggtt

SEQ ID NO: 842872 - DNA, 15 bp, Homo sapiens
tttcttaaaaggtta

SEQ ID NO: 842873 - DNA, 15 bp, Homo sapiens
ttcttaaaaggttaa

SEQ ID NO: 842874 - DNA, 15 bp, Homo sapiens
tcttaaaaggttaaa

SEQ ID NO: 842875 - DNA, 15 bp, Homo sapiens
cttaaaaggttaaac

SEQ ID NO: 842876 - DNA, 15 bp, Homo sapiens
ttaaaaggttaaaca

SEQ ID NO: 842877 - DNA, 15 bp, Homo sapiens
taaaaggttaaacat

SEQ ID NO: 842878 - DNA, 15 bp, Homo sapiens
aaaaggttaaacatt

SEQ ID NO: 842879 - DNA, 15 bp, Homo sapiens
aaaggttaaacattg

SEQ ID NO: 842880 - DNA, 15 bp, Homo sapiens
aaggttaaacattga

SEQ ID NO: 842881 - DNA, 15 bp, Homo sapiens
aggttaaacattgag

SEQ ID NO: 842882 - DNA, 15 bp, Homo sapiens
ggttaaacattgagt

SEQ ID NO: 842883 - DNA, 15 bp, Homo sapiens
gttaaacattgagtt

SEQ ID NO: 842884 - DNA, 15 bp, Homo sapiens
ttaaacattgagtta

SEQ ID NO: 842885 - DNA, 15 bp, Homo sapiens
taaacattgagttac

SEQ ID NO: 842886 - DNA, 15 bp, Homo sapiens
aaacattgagttacc

SEQ ID NO: 842887 - DNA, 15 bp, Homo sapiens
aacattgagttacca

SEQ ID NO: 842888 - DNA, 15 bp, Homo sapiens
acattgagttaccat

SEQ ID NO: 842889 - DNA, 15 bp, Homo sapiens
cattgagttaccata

SEQ ID NO: 842890 - DNA, 15 bp, Homo sapiens
attgagttaccatat

SEQ ID NO: 842891 - DNA, 15 bp, Homo sapiens
ttgagttaccatatg

SEQ ID NO: 842892 - DNA, 15 bp, Homo sapiens
tgagttaccatatga

SEQ ID NO: 842893 - DNA, 15 bp, Homo sapiens
gagttaccatatgac

SEQ ID NO: 842894 - DNA, 15 bp, Homo sapiens
agttaccatatgact

SEQ ID NO: 842895 - DNA, 15 bp, Homo sapiens
gttaccatatgactc

SEQ ID NO: 842896 - DNA, 15 bp, Homo sapiens
ttaccatatgactca

SEQ ID NO: 842897 - DNA, 15 bp, Homo sapiens
taccatatgactcag

SEQ ID NO: 842898 - DNA, 15 bp, Homo sapiens
accatatgactcaga

SEQ ID NO: 842899 - DNA, 15 bp, Homo sapiens
ccatatgactcagaa

SEQ ID NO: 842900 - DNA, 15 bp, Homo sapiens
catatgactcagaaa

SEQ ID NO: 842901 - DNA, 15 bp, Homo sapiens
atatgactcagaaat

SEQ ID NO: 842902 - DNA, 15 bp, Homo sapiens
tatgactcagaaata

SEQ ID NO: 842903 - DNA, 15 bp, Homo sapiens
atgactcagaaatac

SEQ ID NO: 842904 - DNA, 15 bp, Homo sapiens
tgactcagaaatacc

SEQ ID NO: 842905 - DNA, 15 bp, Homo sapiens
gactcagaaatacca

SEQ ID NO: 842906 - DNA, 15 bp, Homo sapiens
actcagaaataccac

SEQ ID NO: 842907 - DNA, 15 bp, Homo sapiens
ctcagaaataccact

SEQ ID NO: 842908 - DNA, 15 bp, Homo sapiens
tcagaaataccactc

SEQ ID NO: 842909 - DNA, 15 bp, Homo sapiens
cagaaataccactcc

SEQ ID NO: 842910 - DNA, 15 bp, Homo sapiens
agaaataccactcct

SEQ ID NO: 842911 - DNA, 15 bp, Homo sapiens
gaaataccactccta

SEQ ID NO: 842912 - DNA, 15 bp, Homo sapiens
aaataccactcctag

SEQ ID NO: 842913 - DNA, 15 bp, Homo sapiens
aataccactcctaga

SEQ ID NO: 842914 - DNA, 15 bp, Homo sapiens
ataccactcctagat

SEQ ID NO: 842915 - DNA, 15 bp, Homo sapiens
taccactcctagata

SEQ ID NO: 842916 - DNA, 15 bp, Homo sapiens
accactcctagatat

SEQ ID NO: 842917 - DNA, 15 bp, Homo sapiens
ccactcctagatatc

SEQ ID NO: 842918 - DNA, 15 bp, Homo sapiens
cactcctagatatct

SEQ ID NO: 842919 - DNA, 15 bp, Homo sapiens
actcctagatatcta

SEQ ID NO: 842920 - DNA, 15 bp, Homo sapiens
ctcctagatatctac

SEQ ID NO: 842921 - DNA, 15 bp, Homo sapiens
tcctagatatctacc

SEQ ID NO: 842922 - DNA, 15 bp, Homo sapiens
cctagatatctaccc

SEQ ID NO: 842923 - DNA, 15 bp, Homo sapiens
ctagatatctaccca

SEQ ID NO: 842924 - DNA, 15 bp, Homo sapiens
tagatatctacccaa

SEQ ID NO: 842925 - DNA, 15 bp, Homo sapiens
agatatctacccaag

SEQ ID NO: 842926 - DNA, 15 bp, Homo sapiens
gatatctacccaaga

SEQ ID NO: 842927 - DNA, 15 bp, Homo sapiens
atatctacccaagat

SEQ ID NO: 842928 - DNA, 15 bp, Homo sapiens
tatctacccaagata

SEQ ID NO: 842929 - DNA, 15 bp, Homo sapiens
atctacccaagataa

SEQ ID NO: 842930 - DNA, 15 bp, Homo sapiens
tctacccaagataaa

SEQ ID NO: 842931 - DNA, 15 bp, Homo sapiens
ctacccaagataaat

SEQ ID NO: 842932 - DNA, 15 bp, Homo sapiens
tacccaagataaatg

SEQ ID NO: 842933 - DNA, 15 bp, Homo sapiens
acccaagataaatga

SEQ ID NO: 842934 - DNA, 15 bp, Homo sapiens
cccaagataaatgaa

SEQ ID NO: 842935 - DNA, 15 bp, Homo sapiens
ccaagataaatgaaa

SEQ ID NO: 842936 - DNA, 15 bp, Homo sapiens
caagataaatgaaac

SEQ ID NO: 842937 - DNA, 15 bp, Homo sapiens
aagataaatgaaact

SEQ ID NO: 842938 - DNA, 15 bp, Homo sapiens
agataaatgaaactc

SEQ ID NO: 842939 - DNA, 15 bp, Homo sapiens
gataaatgaaactct

SEQ ID NO: 842940 - DNA, 15 bp, Homo sapiens
ataaatgaaactcta

SEQ ID NO: 842941 - DNA, 15 bp, Homo sapiens
taaatgaaactctat

SEQ ID NO: 842942 - DNA, 15 bp, Homo sapiens
aaatgaaactctatg

SEQ ID NO: 842943 - DNA, 15 bp, Homo sapiens
aatgaaactctatgt

SEQ ID NO: 842944 - DNA, 15 bp, Homo sapiens
atgaaactctatgta

SEQ ID NO: 842945 - DNA, 15 bp, Homo sapiens
tgaaactctatgtat

SEQ ID NO: 842946 - DNA, 15 bp, Homo sapiens
gaaactctatgtatt

SEQ ID NO: 842947 - DNA, 15 bp, Homo sapiens
aaactctatgtatta

SEQ ID NO: 842948 - DNA, 15 bp, Homo sapiens
aactctatgtattag

SEQ ID NO: 842949 - DNA, 15 bp, Homo sapiens
actctatgtattagt

SEQ ID NO: 842950 - DNA, 15 bp, Homo sapiens
ctctatgtattagtt

SEQ ID NO: 842951 - DNA, 15 bp, Homo sapiens
tctatgtattagttt

SEQ ID NO: 842952 - DNA, 15 bp, Homo sapiens
ctatgtattagtttc

SEQ ID NO: 842953 - DNA, 15 bp, Homo sapiens
tatgtattagtttcc

SEQ ID NO: 842954 - DNA, 15 bp, Homo sapiens
atgtattagtttcct

SEQ ID NO: 842955 - DNA, 15 bp, Homo sapiens
tgtattagtttccta

SEQ ID NO: 842956 - DNA, 15 bp, Homo sapiens
gtattagtttcctat

SEQ ID NO: 842957 - DNA, 15 bp, Homo sapiens
tattagtttcctatg

SEQ ID NO: 842958 - DNA, 15 bp, Homo sapiens
attagtttcctatgg

SEQ ID NO: 842959 - DNA, 15 bp, Homo sapiens
ttagtttcctatggc

SEQ ID NO: 842960 - DNA, 15 bp, Homo sapiens
tagtttcctatggct

SEQ ID NO: 842961 - DNA, 15 bp, Homo sapiens
agtttcctatggcta

SEQ ID NO: 842962 - DNA, 15 bp, Homo sapiens
gtttcctatggctac

SEQ ID NO: 842963 - DNA, 15 bp, Homo sapiens
tttcctatggctact

SEQ ID NO: 842964 - DNA, 15 bp, Homo sapiens
ttcctatggctactg

SEQ ID NO: 842965 - DNA, 15 bp, Homo sapiens
tcctatggctactgc

SEQ ID NO: 842966 - DNA, 15 bp, Homo sapiens
cctatggctactgca

SEQ ID NO: 842967 - DNA, 15 bp, Homo sapiens
ctatggctactgcaa

SEQ ID NO: 842968 - DNA, 15 bp, Homo sapiens
tatggctactgcaat

SEQ ID NO: 842969 - DNA, 15 bp, Homo sapiens
atggctactgcaata

SEQ ID NO: 842970 - DNA, 15 bp, Homo sapiens
tggctactgcaataa

SEQ ID NO: 842971 - DNA, 15 bp, Homo sapiens
ggctactgcaataaa

SEQ ID NO: 842972 - DNA, 15 bp, Homo sapiens
gctactgcaataaat

SEQ ID NO: 842973 - DNA, 15 bp, Homo sapiens
ctactgcaataaatt

SEQ ID NO: 842974 - DNA, 15 bp, Homo sapiens
tactgcaataaatta

SEQ ID NO: 842975 - DNA, 15 bp, Homo sapiens
actgcaataaattac

SEQ ID NO: 842976 - DNA, 15 bp, Homo sapiens
ctgcaataaattact

SEQ ID NO: 842977 - DNA, 15 bp, Homo sapiens
tgcaataaattacta

SEQ ID NO: 842978 - DNA, 15 bp, Homo sapiens
gcaataaattactac

SEQ ID NO: 842979 - DNA, 15 bp, Homo sapiens
caataaattactaca

SEQ ID NO: 842980 - DNA, 15 bp, Homo sapiens
aataaattactacaa

SEQ ID NO: 842981 - DNA, 15 bp, Homo sapiens
ataaattactacaaa

SEQ ID NO: 842982 - DNA, 15 bp, Homo sapiens
taaattactacaaac

SEQ ID NO: 842983 - DNA, 15 bp, Homo sapiens
aaattactacaaacc

SEQ ID NO: 842984 - DNA, 15 bp, Homo sapiens
aattactacaaacct

SEQ ID NO: 842985 - DNA, 15 bp, Homo sapiens
attactacaaaccta

SEQ ID NO: 842986 - DNA, 15 bp, Homo sapiens
ttactacaaacctag

SEQ ID NO: 842987 - DNA, 15 bp, Homo sapiens
tactacaaacctagt

SEQ ID NO: 842988 - DNA, 15 bp, Homo sapiens
actacaaacctagtt

SEQ ID NO: 842989 - DNA, 15 bp, Homo sapiens
ctacaaacctagttg

SEQ ID NO: 842990 - DNA, 15 bp, Homo sapiens
tacaaacctagttgc

SEQ ID NO: 842991 - DNA, 15 bp, Homo sapiens
acaaacctagttgct

SEQ ID NO: 842992 - DNA, 15 bp, Homo sapiens
caaacctagttgctg

SEQ ID NO: 842993 - DNA, 15 bp, Homo sapiens
aaacctagttgctgt

SEQ ID NO: 842994 - DNA, 15 bp, Homo sapiens
aacctagttgctgta

SEQ ID NO: 842995 - DNA, 15 bp, Homo sapiens
acctagttgctgtaa

SEQ ID NO: 842996 - DNA, 15 bp, Homo sapiens
cctagttgctgtaaa

SEQ ID NO: 842997 - DNA, 15 bp, Homo sapiens
ctagttgctgtaaat

SEQ ID NO: 842998 - DNA, 15 bp, Homo sapiens
tagttgctgtaaata

SEQ ID NO: 842999 - DNA, 15 bp, Homo sapiens
agttgctgtaaatat

SEQ ID NO: 843000 - DNA, 15 bp, Homo sapiens
gttgctgtaaatatc

SEQ ID NO: 843001 - DNA, 15 bp, Homo sapiens
ttgctgtaaatatca

SEQ ID NO: 843002 - DNA, 15 bp, Homo sapiens
tgctgtaaatatcac

SEQ ID NO: 843003 - DNA, 15 bp, Homo sapiens
gctgtaaatatcaca

SEQ ID NO: 843004 - DNA, 15 bp, Homo sapiens
ctgtaaatatcacaa

SEQ ID NO: 843005 - DNA, 15 bp, Homo sapiens
tgtaaatatcacaag

SEQ ID NO: 843006 - DNA, 15 bp, Homo sapiens
gtaaatatcacaagt

SEQ ID NO: 843007 - DNA, 15 bp, Homo sapiens
taaatatcacaagtt

SEQ ID NO: 843008 - DNA, 15 bp, Homo sapiens
aaatatcacaagttt

SEQ ID NO: 843009 - DNA, 15 bp, Homo sapiens
aatatcacaagtttt

SEQ ID NO: 843010 - DNA, 15 bp, Homo sapiens
atatcacaagttttt

SEQ ID NO: 843011 - DNA, 15 bp, Homo sapiens
tatcacaagtttttt

SEQ ID NO: 843012 - DNA, 15 bp, Homo sapiens
atcacaagttttttt

SEQ ID NO: 843013 - DNA, 15 bp, Homo sapiens
tcacaagtttttttc

SEQ ID NO: 843014 - DNA, 15 bp, Homo sapiens
cacaagtttttttcc

SEQ ID NO: 843015 - DNA, 15 bp, Homo sapiens
acaagtttttttcct

SEQ ID NO: 843016 - DNA, 15 bp, Homo sapiens
caagtttttttcctt

SEQ ID NO: 843017 - DNA, 15 bp, Homo sapiens
aagtttttttccttc

SEQ ID NO: 843018 - DNA, 15 bp, Homo sapiens
agtttttttccttcc

SEQ ID NO: 843019 - DNA, 15 bp, Homo sapiens
gtttttttccttcct

SEQ ID NO: 843020 - DNA, 15 bp, Homo sapiens
tttttttccttcctt

SEQ ID NO: 843021 - DNA, 15 bp, Homo sapiens
ttttttccttccttt

SEQ ID NO: 843022 - DNA, 15 bp, Homo sapiens
tttttccttcctttt

SEQ ID NO: 843023 - DNA, 15 bp, Homo sapiens
ttttccttccttttc

SEQ ID NO: 843024 - DNA, 15 bp, Homo sapiens
tttccttccttttct

SEQ ID NO: 843025 - DNA, 15 bp, Homo sapiens
ttccttccttttctg

SEQ ID NO: 843026 - DNA, 15 bp, Homo sapiens
tccttccttttctgg

SEQ ID NO: 843027 - DNA, 15 bp, Homo sapiens
ccttccttttctgga

SEQ ID NO: 843028 - DNA, 15 bp, Homo sapiens
cttccttttctggag

SEQ ID NO: 843029 - DNA, 15 bp, Homo sapiens
ttccttttctggagg

SEQ ID NO: 843030 - DNA, 15 bp, Homo sapiens
tccttttctggaggc

SEQ ID NO: 843031 - DNA, 15 bp, Homo sapiens
ccttttctggaggcc

SEQ ID NO: 843032 - DNA, 15 bp, Homo sapiens
cttttctggaggcca

SEQ ID NO: 843033 - DNA, 15 bp, Homo sapiens
ttttctggaggccaa

SEQ ID NO: 843034 - DNA, 15 bp, Homo sapiens
tttctggaggccaaa

SEQ ID NO: 843035 - DNA, 15 bp, Homo sapiens
ttctggaggccaaaa

SEQ ID NO: 843036 - DNA, 15 bp, Homo sapiens
tctggaggccaaaac

SEQ ID NO: 843037 - DNA, 15 bp, Homo sapiens
ctggaggccaaaact

SEQ ID NO: 843038 - DNA, 15 bp, Homo sapiens
tggaggccaaaactt

SEQ ID NO: 843039 - DNA, 15 bp, Homo sapiens
ggaggccaaaacttg

SEQ ID NO: 843040 - DNA, 15 bp, Homo sapiens
gaggccaaaacttgg

SEQ ID NO: 843041 - DNA, 15 bp, Homo sapiens
aggccaaaacttgga

SEQ ID NO: 843042 - DNA, 15 bp, Homo sapiens
ggccaaaacttggaa

SEQ ID NO: 843043 - DNA, 15 bp, Homo sapiens
gccaaaacttggaaa

SEQ ID NO: 843044 - DNA, 15 bp, Homo sapiens
ccaaaacttggaaac

SEQ ID NO: 843045 - DNA, 15 bp, Homo sapiens
caaaacttggaaact

SEQ ID NO: 843046 - DNA, 15 bp, Homo sapiens
aaaacttggaaactg

SEQ ID NO: 843047 - DNA, 15 bp, Homo sapiens
aaacttggaaactga

SEQ ID NO: 843048 - DNA, 15 bp, Homo sapiens
aacttggaaactgag

SEQ ID NO: 843049 - DNA, 15 bp, Homo sapiens
acttggaaactgagt

SEQ ID NO: 843050 - DNA, 15 bp, Homo sapiens
cttggaaactgagtt

SEQ ID NO: 843051 - DNA, 15 bp, Homo sapiens
ttggaaactgagttt

SEQ ID NO: 843052 - DNA, 15 bp, Homo sapiens
tggaaactgagtttc

SEQ ID NO: 843053 - DNA, 15 bp, Homo sapiens
ggaaactgagtttca

SEQ ID NO: 843054 - DNA, 15 bp, Homo sapiens
gaaactgagtttcag

SEQ ID NO: 843055 - DNA, 15 bp, Homo sapiens
aaactgagtttcagt

SEQ ID NO: 843056 - DNA, 15 bp, Homo sapiens
aactgagtttcagtg

SEQ ID NO: 843057 - DNA, 15 bp, Homo sapiens
actgagtttcagtgg

SEQ ID NO: 843058 - DNA, 15 bp, Homo sapiens
ctgagtttcagtgga

SEQ ID NO: 843059 - DNA, 15 bp, Homo sapiens
tgagtttcagtggag

SEQ ID NO: 843060 - DNA, 15 bp, Homo sapiens
gagtttcagtggagt

SEQ ID NO: 843061 - DNA, 15 bp, Homo sapiens
agtttcagtggagtt

SEQ ID NO: 843062 - DNA, 15 bp, Homo sapiens
gtttcagtggagtta

SEQ ID NO: 843063 - DNA, 15 bp, Homo sapiens
tttcagtggagttag

SEQ ID NO: 843064 - DNA, 15 bp, Homo sapiens
ttcagtggagttaga

SEQ ID NO: 843065 - DNA, 15 bp, Homo sapiens
tcagtggagttagag

SEQ ID NO: 843066 - DNA, 15 bp, Homo sapiens
cagtggagttagagt

SEQ ID NO: 843067 - DNA, 15 bp, Homo sapiens
agtggagttagagtc

SEQ ID NO: 843068 - DNA, 15 bp, Homo sapiens
gtggagttagagtca

SEQ ID NO: 843069 - DNA, 15 bp, Homo sapiens
tggagttagagtcaa

SEQ ID NO: 843070 - DNA, 15 bp, Homo sapiens
ggagttagagtcaac

SEQ ID NO: 843071 - DNA, 15 bp, Homo sapiens
gagttagagtcaaca

SEQ ID NO: 843072 - DNA, 15 bp, Homo sapiens
agttagagtcaacat

SEQ ID NO: 843073 - DNA, 15 bp, Homo sapiens
tcccaaatggcatgt

SEQ ID NO: 843074 - DNA, 15 bp, Homo sapiens
cccaaatggcatgtt

SEQ ID NO: 843075 - DNA, 15 bp, Homo sapiens
ccaaatggcatgttc

SEQ ID NO: 843076 - DNA, 15 bp, Homo sapiens
caaatggcatgttca

SEQ ID NO: 843077 - DNA, 15 bp, Homo sapiens
aaatggcatgttcaa

SEQ ID NO: 843078 - DNA, 15 bp, Homo sapiens
aatggcatgttcaag

SEQ ID NO: 843079 - DNA, 15 bp, Homo sapiens
atggcatgttcaagt

SEQ ID NO: 843080 - DNA, 15 bp, Homo sapiens
tggcatgttcaagta

SEQ ID NO: 843081 - DNA, 15 bp, Homo sapiens
ggcatgttcaagtaa

SEQ ID NO: 843082 - DNA, 15 bp, Homo sapiens
gcatgttcaagtaat

SEQ ID NO: 843083 - DNA, 15 bp, Homo sapiens
catgttcaagtaatg

SEQ ID NO: 843084 - DNA, 15 bp, Homo sapiens
atgttcaagtaatga

SEQ ID NO: 843085 - DNA, 15 bp, Homo sapiens
tgttcaagtaatgac

SEQ ID NO: 843086 - DNA, 15 bp, Homo sapiens
gttcaagtaatgaca

SEQ ID NO: 843087 - DNA, 15 bp, Homo sapiens
ttcaagtaatgacag

SEQ ID NO: 843088 - DNA, 15 bp, Homo sapiens
tcaagtaatgacaga

SEQ ID NO: 843089 - DNA, 15 bp, Homo sapiens
caagtaatgacagat

SEQ ID NO: 843090 - DNA, 15 bp, Homo sapiens
aagtaatgacagata

SEQ ID NO: 843091 - DNA, 15 bp, Homo sapiens
agtaatgacagatat

SEQ ID NO: 843092 - DNA, 15 bp, Homo sapiens
gtaatgacagatatt

SEQ ID NO: 843093 - DNA, 15 bp, Homo sapiens
taatgacagatattt

SEQ ID NO: 843094 - DNA, 15 bp, Homo sapiens
aatgacagatatttt

SEQ ID NO: 843095 - DNA, 15 bp, Homo sapiens
atgacagatatttta

SEQ ID NO: 843096 - DNA, 15 bp, Homo sapiens
tgacagatattttat

SEQ ID NO: 843097 - DNA, 15 bp, Homo sapiens
gacagatattttata

SEQ ID NO: 843098 - DNA, 15 bp, Homo sapiens
acagatattttataa

SEQ ID NO: 843099 - DNA, 15 bp, Homo sapiens
cagatattttataac

SEQ ID NO: 843100 - DNA, 15 bp, Homo sapiens
agatattttataact

SEQ ID NO: 843101 - DNA, 15 bp, Homo sapiens
gatattttataactt

SEQ ID NO: 843102 - DNA, 15 bp, Homo sapiens
atattttataacttg

SEQ ID NO: 843103 - DNA, 15 bp, Homo sapiens
tattttataacttgc

SEQ ID NO: 843104 - DNA, 15 bp, Homo sapiens
attttataacttgct

SEQ ID NO: 843105 - DNA, 15 bp, Homo sapiens
ttttataacttgctt

SEQ ID NO: 843106 - DNA, 15 bp, Homo sapiens
tttataacttgcttt

SEQ ID NO: 843107 - DNA, 15 bp, Homo sapiens
ttataacttgctttc

SEQ ID NO: 843108 - DNA, 15 bp, Homo sapiens
tataacttgctttct

SEQ ID NO: 843109 - DNA, 15 bp, Homo sapiens
ataacttgctttcta

SEQ ID NO: 843110 - DNA, 15 bp, Homo sapiens
taacttgctttctaa

SEQ ID NO: 843111 - DNA, 15 bp, Homo sapiens
aacttgctttctaaa

SEQ ID NO: 843112 - DNA, 15 bp, Homo sapiens
acttgctttctaaaa

SEQ ID NO: 843113 - DNA, 15 bp, Homo sapiens
cttgctttctaaaaa

SEQ ID NO: 843114 - DNA, 15 bp, Homo sapiens
ttgctttctaaaaag

SEQ ID NO: 843115 - DNA, 15 bp, Homo sapiens
tgctttctaaaaagc

SEQ ID NO: 843116 - DNA, 15 bp, Homo sapiens
gctttctaaaaagca

SEQ ID NO: 843117 - DNA, 15 bp, Homo sapiens
ctttctaaaaagcat

SEQ ID NO: 843118 - DNA, 15 bp, Homo sapiens
tttctaaaaagcatg

SEQ ID NO: 843119 - DNA, 15 bp, Homo sapiens
ttctaaaaagcatgg

SEQ ID NO: 843120 - DNA, 15 bp, Homo sapiens
tctaaaaagcatggg

SEQ ID NO: 843121 - DNA, 15 bp, Homo sapiens
ctaaaaagcatgggt

SEQ ID NO: 843122 - DNA, 15 bp, Homo sapiens
taaaaagcatgggtc

SEQ ID NO: 843123 - DNA, 15 bp, Homo sapiens
aaaaagcatgggtct

SEQ ID NO: 843124 - DNA, 15 bp, Homo sapiens
aaaagcatgggtctg

SEQ ID NO: 843125 - DNA, 15 bp, Homo sapiens
aaagcatgggtctgc

SEQ ID NO: 843126 - DNA, 15 bp, Homo sapiens
aagcatgggtctgct

SEQ ID NO: 843127 - DNA, 15 bp, Homo sapiens
agcatgggtctgctt

SEQ ID NO: 843128 - DNA, 15 bp, Homo sapiens
gcatgggtctgcttg

SEQ ID NO: 843129 - DNA, 15 bp, Homo sapiens
catgggtctgcttga

SEQ ID NO: 843130 - DNA, 15 bp, Homo sapiens
atgggtctgcttgac

SEQ ID NO: 843131 - DNA, 15 bp, Homo sapiens
tgggtctgcttgact

SEQ ID NO: 843132 - DNA, 15 bp, Homo sapiens
gggtctgcttgactg

SEQ ID NO: 843133 - DNA, 15 bp, Homo sapiens
ggtctgcttgactgc

SEQ ID NO: 843134 - DNA, 15 bp, Homo sapiens
gtctgcttgactgca

SEQ ID NO: 843135 - DNA, 15 bp, Homo sapiens
tctgcttgactgcaa

SEQ ID NO: 843136 - DNA, 15 bp, Homo sapiens
ctgcttgactgcaaa

SEQ ID NO: 843137 - DNA, 15 bp, Homo sapiens
tgcttgactgcaaaa

SEQ ID NO: 843138 - DNA, 15 bp, Homo sapiens
gcttgactgcaaaac

SEQ ID NO: 843139 - DNA, 15 bp, Homo sapiens
cttgactgcaaaact

SEQ ID NO: 843140 - DNA, 15 bp, Homo sapiens
ttgactgcaaaactt

SEQ ID NO: 843141 - DNA, 15 bp, Homo sapiens
tgactgcaaaacttt

SEQ ID NO: 843142 - DNA, 15 bp, Homo sapiens
gactgcaaaactttt

SEQ ID NO: 843143 - DNA, 15 bp, Homo sapiens
actgcaaaacttttc

SEQ ID NO: 843144 - DNA, 15 bp, Homo sapiens
ctgcaaaacttttct

SEQ ID NO: 843145 - DNA, 15 bp, Homo sapiens
tgcaaaacttttctt

SEQ ID NO: 843146 - DNA, 15 bp, Homo sapiens
gcaaaacttttcttt

SEQ ID NO: 843147 - DNA, 15 bp, Homo sapiens
caaaacttttctttt

SEQ ID NO: 843148 - DNA, 15 bp, Homo sapiens
aaaacttttcttttg

SEQ ID NO: 843149 - DNA, 15 bp, Homo sapiens
aaacttttcttttgc

SEQ ID NO: 843150 - DNA, 15 bp, Homo sapiens
aacttttcttttgct

SEQ ID NO: 843151 - DNA, 15 bp, Homo sapiens
acttttcttttgctg

SEQ ID NO: 843152 - DNA, 15 bp, Homo sapiens
cttttcttttgctga

SEQ ID NO: 843153 - DNA, 15 bp, Homo sapiens
ttttcttttgctgag

SEQ ID NO: 843154 - DNA, 15 bp, Homo sapiens
tttcttttgctgagt

SEQ ID NO: 843155 - DNA, 15 bp, Homo sapiens
ttcttttgctgagta

SEQ ID NO: 843156 - DNA, 15 bp, Homo sapiens
tcttttgctgagtat

SEQ ID NO: 843157 - DNA, 15 bp, Homo sapiens
cttttgctgagtatg

SEQ ID NO: 843158 - DNA, 15 bp, Homo sapiens
ttttgctgagtatgc

SEQ ID NO: 843159 - DNA, 15 bp, Homo sapiens
tttgctgagtatgca

SEQ ID NO: 843160 - DNA, 15 bp, Homo sapiens
ttgctgagtatgcaa

SEQ ID NO: 843161 - DNA, 15 bp, Homo sapiens
tgctgagtatgcaaa

SEQ ID NO: 843162 - DNA, 15 bp, Homo sapiens
gctgagtatgcaaaa

SEQ ID NO: 843163 - DNA, 15 bp, Homo sapiens
ctgagtatgcaaaat

SEQ ID NO: 843164 - DNA, 15 bp, Homo sapiens
tgagtatgcaaaatt

SEQ ID NO: 843165 - DNA, 15 bp, Homo sapiens
gagtatgcaaaattg

SEQ ID NO: 843166 - DNA, 15 bp, Homo sapiens
agtatgcaaaattgg

SEQ ID NO: 843167 - DNA, 15 bp, Homo sapiens
gtatgcaaaattggg

SEQ ID NO: 843168 - DNA, 15 bp, Homo sapiens
tatgcaaaattgggc

SEQ ID NO: 843169 - DNA, 15 bp, Homo sapiens
atgcaaaattgggct

SEQ ID NO: 843170 - DNA, 15 bp, Homo sapiens
tgcaaaattgggctc

SEQ ID NO: 843171 - DNA, 15 bp, Homo sapiens
gcaaaattgggctca

SEQ ID NO: 843172 - DNA, 15 bp, Homo sapiens
caaaattgggctcaa

SEQ ID NO: 843173 - DNA, 15 bp, Homo sapiens
aaaattgggctcaag

SEQ ID NO: 843174 - DNA, 15 bp, Homo sapiens
aaattgggctcaaga

SEQ ID NO: 843175 - DNA, 15 bp, Homo sapiens
aattgggctcaagat

SEQ ID NO: 843176 - DNA, 15 bp, Homo sapiens
attgggctcaagatt

SEQ ID NO: 843177 - DNA, 15 bp, Homo sapiens
ttgggctcaagattg

SEQ ID NO: 843178 - DNA, 15 bp, Homo sapiens
tgggctcaagattga

SEQ ID NO: 843179 - DNA, 15 bp, Homo sapiens
gggctcaagattgaa

SEQ ID NO: 843180 - DNA, 15 bp, Homo sapiens
ggctcaagattgaat

SEQ ID NO: 843181 - DNA, 15 bp, Homo sapiens
gctcaagattgaatt

SEQ ID NO: 843182 - DNA, 15 bp, Homo sapiens
ctcaagattgaatta

SEQ ID NO: 843183 - DNA, 15 bp, Homo sapiens
tcaagattgaattac

SEQ ID NO: 843184 - DNA, 15 bp, Homo sapiens
caagattgaattact

SEQ ID NO: 843185 - DNA, 15 bp, Homo sapiens
aagattgaattacta

SEQ ID NO: 843186 - DNA, 15 bp, Homo sapiens
agattgaattactag

SEQ ID NO: 843187 - DNA, 15 bp, Homo sapiens
gattgaattactagg

SEQ ID NO: 843188 - DNA, 15 bp, Homo sapiens
attgaattactaggg

SEQ ID NO: 843189 - DNA, 15 bp, Homo sapiens
ttgaattactagggt

SEQ ID NO: 843190 - DNA, 15 bp, Homo sapiens
tgaattactagggtc

SEQ ID NO: 843191 - DNA, 15 bp, Homo sapiens
gaattactagggtca

SEQ ID NO: 843192 - DNA, 15 bp, Homo sapiens
aattactagggtcag

SEQ ID NO: 843193 - DNA, 15 bp, Homo sapiens
attactagggtcagt

SEQ ID NO: 843194 - DNA, 15 bp, Homo sapiens
ttactagggtcagta

SEQ ID NO: 843195 - DNA, 15 bp, Homo sapiens
tactagggtcagtag

SEQ ID NO: 843196 - DNA, 15 bp, Homo sapiens
actagggtcagtagc

SEQ ID NO: 843197 - DNA, 15 bp, Homo sapiens
ctagggtcagtagct

SEQ ID NO: 843198 - DNA, 15 bp, Homo sapiens
tagggtcagtagctg

SEQ ID NO: 843199 - DNA, 15 bp, Homo sapiens
agggtcagtagctga

SEQ ID NO: 843200 - DNA, 15 bp, Homo sapiens
gggtcagtagctgaa

SEQ ID NO: 843201 - DNA, 15 bp, Homo sapiens
ggtcagtagctgaag

SEQ ID NO: 843202 - DNA, 15 bp, Homo sapiens
gtcagtagctgaaga

SEQ ID NO: 843203 - DNA, 15 bp, Homo sapiens
tcagtagctgaagac

SEQ ID NO: 843204 - DNA, 15 bp, Homo sapiens
cagtagctgaagact

SEQ ID NO: 843205 - DNA, 15 bp, Homo sapiens
agtagctgaagactc

SEQ ID NO: 843206 - DNA, 15 bp, Homo sapiens
gtagctgaagactct

SEQ ID NO: 843207 - DNA, 15 bp, Homo sapiens
tagctgaagactctg

SEQ ID NO: 843208 - DNA, 15 bp, Homo sapiens
agctgaagactctga

SEQ ID NO: 843209 - DNA, 15 bp, Homo sapiens
gctgaagactctgac

SEQ ID NO: 843210 - DNA, 15 bp, Homo sapiens
ctgaagactctgacc

SEQ ID NO: 843211 - DNA, 15 bp, Homo sapiens
tgaagactctgacca

SEQ ID NO: 843212 - DNA, 15 bp, Homo sapiens
gaagactctgaccag

SEQ ID NO: 843213 - DNA, 15 bp, Homo sapiens
aagactctgaccagg

SEQ ID NO: 843214 - DNA, 15 bp, Homo sapiens
agactctgaccaggg

SEQ ID NO: 843215 - DNA, 15 bp, Homo sapiens
gactctgaccaggga

SEQ ID NO: 843216 - DNA, 15 bp, Homo sapiens
actctgaccagggat

SEQ ID NO: 843217 - DNA, 15 bp, Homo sapiens
ctctgaccagggatc

SEQ ID NO: 843218 - DNA, 15 bp, Homo sapiens
tctgaccagggatca

SEQ ID NO: 843219 - DNA, 15 bp, Homo sapiens
ctgaccagggatcat

SEQ ID NO: 843220 - DNA, 15 bp, Homo sapiens
tgaccagggatcatt

SEQ ID NO: 843221 - DNA, 15 bp, Homo sapiens
gaccagggatcattc

SEQ ID NO: 843222 - DNA, 15 bp, Homo sapiens
accagggatcattcc

SEQ ID NO: 843223 - DNA, 15 bp, Homo sapiens
ccagggatcattcct

SEQ ID NO: 843224 - DNA, 15 bp, Homo sapiens
cagggatcattcctc

SEQ ID NO: 843225 - DNA, 15 bp, Homo sapiens
agggatcattcctct

SEQ ID NO: 843226 - DNA, 15 bp, Homo sapiens
gggatcattcctctc

SEQ ID NO: 843227 - DNA, 15 bp, Homo sapiens
ggatcattcctctct

SEQ ID NO: 843228 - DNA, 15 bp, Homo sapiens
gatcattcctctctc

SEQ ID NO: 843229 - DNA, 15 bp, Homo sapiens
atcattcctctctct

SEQ ID NO: 843230 - DNA, 15 bp, Homo sapiens
tcattcctctctcta

SEQ ID NO: 843231 - DNA, 15 bp, Homo sapiens
cattcctctctctat

SEQ ID NO: 843232 - DNA, 15 bp, Homo sapiens
attcctctctctatc

SEQ ID NO: 843233 - DNA, 15 bp, Homo sapiens
ttcctctctctatca

SEQ ID NO: 843234 - DNA, 15 bp, Homo sapiens
tcctctctctatcac

SEQ ID NO: 843235 - DNA, 15 bp, Homo sapiens
cctctctctatcacc

SEQ ID NO: 843236 - DNA, 15 bp, Homo sapiens
ctctctctatcaccc

SEQ ID NO: 843237 - DNA, 15 bp, Homo sapiens
tctctctatcacccc

SEQ ID NO: 843238 - DNA, 15 bp, Homo sapiens
ctctctatcacccca

SEQ ID NO: 843239 - DNA, 15 bp, Homo sapiens
tctctatcaccccat

SEQ ID NO: 843240 - DNA, 15 bp, Homo sapiens
ctctatcaccccatc

SEQ ID NO: 843241 - DNA, 15 bp, Homo sapiens
tctatcaccccatct

SEQ ID NO: 843242 - DNA, 15 bp, Homo sapiens
ctatcaccccatcta

SEQ ID NO: 843243 - DNA, 15 bp, Homo sapiens
tatcaccccatctac

SEQ ID NO: 843244 - DNA, 15 bp, Homo sapiens
atcaccccatctact

SEQ ID NO: 843245 - DNA, 15 bp, Homo sapiens
tcaccccatctactg

SEQ ID NO: 843246 - DNA, 15 bp, Homo sapiens
caccccatctactgc

SEQ ID NO: 843247 - DNA, 15 bp, Homo sapiens
accccatctactgct

SEQ ID NO: 843248 - DNA, 15 bp, Homo sapiens
ccccatctactgctc

SEQ ID NO: 843249 - DNA, 15 bp, Homo sapiens
cccatctactgctct

SEQ ID NO: 843250 - DNA, 15 bp, Homo sapiens
ccatctactgctctg

SEQ ID NO: 843251 - DNA, 15 bp, Homo sapiens
catctactgctctgt

SEQ ID NO: 843252 - DNA, 15 bp, Homo sapiens
atctactgctctgtc

SEQ ID NO: 843253 - DNA, 15 bp, Homo sapiens
tctactgctctgtct

SEQ ID NO: 843254 - DNA, 15 bp, Homo sapiens
ctactgctctgtctg

SEQ ID NO: 843255 - DNA, 15 bp, Homo sapiens
tactgctctgtctgt

SEQ ID NO: 843256 - DNA, 15 bp, Homo sapiens
actgctctgtctgtc

SEQ ID NO: 843257 - DNA, 15 bp, Homo sapiens
ctgctctgtctgtcc

SEQ ID NO: 843258 - DNA, 15 bp, Homo sapiens
tgctctgtctgtcct

SEQ ID NO: 843259 - DNA, 15 bp, Homo sapiens
gctctgtctgtcctc

SEQ ID NO: 843260 - DNA, 15 bp, Homo sapiens
ctctgtctgtcctcc

SEQ ID NO: 843261 - DNA, 15 bp, Homo sapiens
tctgtctgtcctcca

SEQ ID NO: 843262 - DNA, 15 bp, Homo sapiens
ctgtctgtcctccaa

SEQ ID NO: 843263 - DNA, 15 bp, Homo sapiens
tgtctgtcctccaaa

SEQ ID NO: 843264 - DNA, 15 bp, Homo sapiens
gtctgtcctccaaat

SEQ ID NO: 843265 - DNA, 15 bp, Homo sapiens
tctgtcctccaaata

SEQ ID NO: 843266 - DNA, 15 bp, Homo sapiens
ctgtcctccaaatac

SEQ ID NO: 843267 - DNA, 15 bp, Homo sapiens
tgtcctccaaataca

SEQ ID NO: 843268 - DNA, 15 bp, Homo sapiens
gtcctccaaatacaa

SEQ ID NO: 843269 - DNA, 15 bp, Homo sapiens
tcctccaaatacaag

SEQ ID NO: 843270 - DNA, 15 bp, Homo sapiens
cctccaaatacaagc

SEQ ID NO: 843271 - DNA, 15 bp, Homo sapiens
ctccaaatacaagct

SEQ ID NO: 843272 - DNA, 15 bp, Homo sapiens
tccaaatacaagctg

SEQ ID NO: 843273 - DNA, 15 bp, Homo sapiens
ccaaatacaagctgg

SEQ ID NO: 843274 - DNA, 15 bp, Homo sapiens
caaatacaagctgga

SEQ ID NO: 843275 - DNA, 15 bp, Homo sapiens
aaatacaagctggac

SEQ ID NO: 843276 - DNA, 15 bp, Homo sapiens
aatacaagctggaca

SEQ ID NO: 843277 - DNA, 15 bp, Homo sapiens
atacaagctggacaa

SEQ ID NO: 843278 - DNA, 15 bp, Homo sapiens
tacaagctggacaag

SEQ ID NO: 843279 - DNA, 15 bp, Homo sapiens
acaagctggacaagt

SEQ ID NO: 843280 - DNA, 15 bp, Homo sapiens
caagctggacaagta

SEQ ID NO: 843281 - DNA, 15 bp, Homo sapiens
aagctggacaagtat

SEQ ID NO: 843282 - DNA, 15 bp, Homo sapiens
agctggacaagtatt

SEQ ID NO: 843283 - DNA, 15 bp, Homo sapiens
gctggacaagtattt

SEQ ID NO: 843284 - DNA, 15 bp, Homo sapiens
ctggacaagtatttt

SEQ ID NO: 843285 - DNA, 15 bp, Homo sapiens
tggacaagtattttt

SEQ ID NO: 843286 - DNA, 15 bp, Homo sapiens
ggacaagtattttta

SEQ ID NO: 843287 - DNA, 15 bp, Homo sapiens
gacaagtatttttaa

SEQ ID NO: 843288 - DNA, 15 bp, Homo sapiens
acaagtatttttaaa

SEQ ID NO: 843289 - DNA, 15 bp, Homo sapiens
caagtatttttaaaa

SEQ ID NO: 843290 - DNA, 15 bp, Homo sapiens
aagtatttttaaaaa

SEQ ID NO: 843291 - DNA, 15 bp, Homo sapiens
agtatttttaaaaag

SEQ ID NO: 843292 - DNA, 15 bp, Homo sapiens
gtatttttaaaaaga

SEQ ID NO: 843293 - DNA, 15 bp, Homo sapiens
tatttttaaaaagaa

SEQ ID NO: 843294 - DNA, 15 bp, Homo sapiens
atttttaaaaagaat

SEQ ID NO: 843295 - DNA, 15 bp, Homo sapiens
tttttaaaaagaata

SEQ ID NO: 843296 - DNA, 15 bp, Homo sapiens
ttttaaaaagaatat

SEQ ID NO: 843297 - DNA, 15 bp, Homo sapiens
tttaaaaagaatatt

SEQ ID NO: 843298 - DNA, 15 bp, Homo sapiens
ttaaaaagaatattt

SEQ ID NO: 843299 - DNA, 15 bp, Homo sapiens
taaaaagaatatttt

SEQ ID NO: 843300 - DNA, 15 bp, Homo sapiens
aaaaagaatattttg

SEQ ID NO: 843301 - DNA, 15 bp, Homo sapiens
aaaagaatattttga

SEQ ID NO: 843302 - DNA, 15 bp, Homo sapiens
aaagaatattttgaa

SEQ ID NO: 843303 - DNA, 15 bp, Homo sapiens
aagaatattttgaat

SEQ ID NO: 843304 - DNA, 15 bp, Homo sapiens
agaatattttgaata

SEQ ID NO: 843305 - DNA, 15 bp, Homo sapiens
gaatattttgaataa

SEQ ID NO: 843306 - DNA, 15 bp, Homo sapiens
aatattttgaataag

SEQ ID NO: 843307 - DNA, 15 bp, Homo sapiens
atattttgaataagt

SEQ ID NO: 843308 - DNA, 15 bp, Homo sapiens
tattttgaataagta

SEQ ID NO: 843309 - DNA, 15 bp, Homo sapiens
attttgaataagtac

SEQ ID NO: 843310 - DNA, 15 bp, Homo sapiens
ttttgaataagtacc

SEQ ID NO: 843311 - DNA, 15 bp, Homo sapiens
tttgaataagtaccc

SEQ ID NO: 843312 - DNA, 15 bp, Homo sapiens
ttgaataagtaccct

SEQ ID NO: 843313 - DNA, 15 bp, Homo sapiens
tgaataagtaccctt

SEQ ID NO: 843314 - DNA, 15 bp, Homo sapiens
gaataagtacccttt

SEQ ID NO: 843315 - DNA, 15 bp, Homo sapiens
aataagtaccctttt

SEQ ID NO: 843316 - DNA, 15 bp, Homo sapiens
ataagtacccttttt

SEQ ID NO: 843317 - DNA, 15 bp, Homo sapiens
taagtaccctttttt

SEQ ID NO: 843318 - DNA, 15 bp, Homo sapiens
aagtacccttttttt

SEQ ID NO: 843319 - DNA, 15 bp, Homo sapiens
agtaccctttttttt

SEQ ID NO: 843320 - DNA, 15 bp, Homo sapiens
gtacccttttttttt

SEQ ID NO: 843321 - DNA, 15 bp, Homo sapiens
taccctttttttttt

SEQ ID NO: 843322 - DNA, 15 bp, Homo sapiens
acccttttttttttt

SEQ ID NO: 843323 - DNA, 15 bp, Homo sapiens
ttttttttttttgca

SEQ ID NO: 843324 - DNA, 15 bp, Homo sapiens
tttttttttttgcac

SEQ ID NO: 843325 - DNA, 15 bp, Homo sapiens
ttttttttttgcaca

SEQ ID NO: 843326 - DNA, 15 bp, Homo sapiens
tttttttttgcacac

SEQ ID NO: 843327 - DNA, 15 bp, Homo sapiens
ttttttttgcacact

SEQ ID NO: 843328 - DNA, 15 bp, Homo sapiens
tttttttgcacactc

SEQ ID NO: 843329 - DNA, 15 bp, Homo sapiens
ttttttgcacactca

SEQ ID NO: 843330 - DNA, 15 bp, Homo sapiens
tttttgcacactcat

SEQ ID NO: 843331 - DNA, 15 bp, Homo sapiens
ttttgcacactcatc

SEQ ID NO: 843332 - DNA, 15 bp, Homo sapiens
tttgcacactcatcc

SEQ ID NO: 843333 - DNA, 15 bp, Homo sapiens
ttgcacactcatcct

SEQ ID NO: 843334 - DNA, 15 bp, Homo sapiens
tgcacactcatcctg

SEQ ID NO: 843335 - DNA, 15 bp, Homo sapiens
gcacactcatcctgt

SEQ ID NO: 843336 - DNA, 15 bp, Homo sapiens
cacactcatcctgtg

SEQ ID NO: 843337 - DNA, 15 bp, Homo sapiens
acactcatcctgtgg

SEQ ID NO: 843338 - DNA, 15 bp, Homo sapiens
cactcatcctgtgga

SEQ ID NO: 843339 - DNA, 15 bp, Homo sapiens
actcatcctgtggac

SEQ ID NO: 843340 - DNA, 15 bp, Homo sapiens
ctcatcctgtggacc

SEQ ID NO: 843341 - DNA, 15 bp, Homo sapiens
tcatcctgtggacca

SEQ ID NO: 843342 - DNA, 15 bp, Homo sapiens
catcctgtggaccaa

SEQ ID NO: 843343 - DNA, 15 bp, Homo sapiens
atcctgtggaccaag

SEQ ID NO: 843344 - DNA, 15 bp, Homo sapiens
tcctgtggaccaagg

SEQ ID NO: 843345 - DNA, 15 bp, Homo sapiens
cctgtggaccaagga

SEQ ID NO: 843346 - DNA, 15 bp, Homo sapiens
ctgtggaccaaggat

SEQ ID NO: 843347 - DNA, 15 bp, Homo sapiens
tgtggaccaaggata

SEQ ID NO: 843348 - DNA, 15 bp, Homo sapiens
gtggaccaaggatat

SEQ ID NO: 843349 - DNA, 15 bp, Homo sapiens
tggaccaaggatatg

SEQ ID NO: 843350 - DNA, 15 bp, Homo sapiens
ggaccaaggatatgc

SEQ ID NO: 843351 - DNA, 15 bp, Homo sapiens
gaccaaggatatgct

SEQ ID NO: 843352 - DNA, 15 bp, Homo sapiens
accaaggatatgcta

SEQ ID NO: 843353 - DNA, 15 bp, Homo sapiens
ccaaggatatgctag

SEQ ID NO: 843354 - DNA, 15 bp, Homo sapiens
caaggatatgctagg

SEQ ID NO: 843355 - DNA, 15 bp, Homo sapiens
aaggatatgctaggt

SEQ ID NO: 843356 - DNA, 15 bp, Homo sapiens
aggatatgctaggta

SEQ ID NO: 843357 - DNA, 15 bp, Homo sapiens
ggatatgctaggtat

SEQ ID NO: 843358 - DNA, 15 bp, Homo sapiens
gatatgctaggtatc

SEQ ID NO: 843359 - DNA, 15 bp, Homo sapiens
atatgctaggtatcc

SEQ ID NO: 843360 - DNA, 15 bp, Homo sapiens
tatgctaggtatcca

SEQ ID NO: 843361 - DNA, 15 bp, Homo sapiens
atgctaggtatccat

SEQ ID NO: 843362 - DNA, 15 bp, Homo sapiens
tgctaggtatccatt

SEQ ID NO: 843363 - DNA, 15 bp, Homo sapiens
gctaggtatccattc

SEQ ID NO: 843364 - DNA, 15 bp, Homo sapiens
ctaggtatccattca

SEQ ID NO: 843365 - DNA, 15 bp, Homo sapiens
taggtatccattcaa

SEQ ID NO: 843366 - DNA, 15 bp, Homo sapiens
aggtatccattcaaa

SEQ ID NO: 843367 - DNA, 15 bp, Homo sapiens
ggtatccattcaaaa

SEQ ID NO: 843368 - DNA, 15 bp, Homo sapiens
gtatccattcaaaat

SEQ ID NO: 843369 - DNA, 15 bp, Homo sapiens
tatccattcaaaatc

SEQ ID NO: 843370 - DNA, 15 bp, Homo sapiens
atccattcaaaatca

SEQ ID NO: 843371 - DNA, 15 bp, Homo sapiens
tccattcaaaatcag

SEQ ID NO: 843372 - DNA, 15 bp, Homo sapiens
ccattcaaaatcagt

SEQ ID NO: 843373 - DNA, 15 bp, Homo sapiens
cattcaaaatcagtc

SEQ ID NO: 843374 - DNA, 15 bp, Homo sapiens
attcaaaatcagtcg

SEQ ID NO: 843375 - DNA, 15 bp, Homo sapiens
ttcaaaatcagtcgt

SEQ ID NO: 843376 - DNA, 15 bp, Homo sapiens
tcaaaatcagtcgtg

SEQ ID NO: 843377 - DNA, 15 bp, Homo sapiens
caaaatcagtcgtgg

SEQ ID NO: 843378 - DNA, 15 bp, Homo sapiens
aaaatcagtcgtgga

SEQ ID NO: 843379 - DNA, 15 bp, Homo sapiens
aaatcagtcgtggag

SEQ ID NO: 843380 - DNA, 15 bp, Homo sapiens
aatcagtcgtggagg

SEQ ID NO: 843381 - DNA, 15 bp, Homo sapiens
atcagtcgtggaggc

SEQ ID NO: 843382 - DNA, 15 bp, Homo sapiens
tcagtcgtggaggca

SEQ ID NO: 843383 - DNA, 15 bp, Homo sapiens
cagtcgtggaggcaa

SEQ ID NO: 843384 - DNA, 15 bp, Homo sapiens
agtcgtggaggcaag

SEQ ID NO: 843385 - DNA, 15 bp, Homo sapiens
gtcgtggaggcaagg

SEQ ID NO: 843386 - DNA, 15 bp, Homo sapiens
tcgtggaggcaaggc

SEQ ID NO: 843387 - DNA, 15 bp, Homo sapiens
cgtggaggcaaggct

SEQ ID NO: 843388 - DNA, 15 bp, Homo sapiens
gtggaggcaaggctg

SEQ ID NO: 843389 - DNA, 15 bp, Homo sapiens
tggaggcaaggctgg

SEQ ID NO: 843390 - DNA, 15 bp, Homo sapiens
ggaggcaaggctgga

SEQ ID NO: 843391 - DNA, 15 bp, Homo sapiens
gaggcaaggctggaa

SEQ ID NO: 843392 - DNA, 15 bp, Homo sapiens
aggcaaggctggaag

SEQ ID NO: 843393 - DNA, 15 bp, Homo sapiens
ggcaaggctggaagt

SEQ ID NO: 843394 - DNA, 15 bp, Homo sapiens
gcaaggctggaagtg

SEQ ID NO: 843395 - DNA, 15 bp, Homo sapiens
caaggctggaagtga

SEQ ID NO: 843396 - DNA, 15 bp, Homo sapiens
aaggctggaagtgag

SEQ ID NO: 843397 - DNA, 15 bp, Homo sapiens
aggctggaagtgagt

SEQ ID NO: 843398 - DNA, 15 bp, Homo sapiens
ggctggaagtgagta

SEQ ID NO: 843399 - DNA, 15 bp, Homo sapiens
gctggaagtgagtag

SEQ ID NO: 843400 - DNA, 15 bp, Homo sapiens
ctggaagtgagtagc

SEQ ID NO: 843401 - DNA, 15 bp, Homo sapiens
tggaagtgagtagca

SEQ ID NO: 843402 - DNA, 15 bp, Homo sapiens
ggaagtgagtagcaa

SEQ ID NO: 843403 - DNA, 15 bp, Homo sapiens
gaagtgagtagcaaa

SEQ ID NO: 843404 - DNA, 15 bp, Homo sapiens
aagtgagtagcaaag

SEQ ID NO: 843405 - DNA, 15 bp, Homo sapiens
agtgagtagcaaagc

SEQ ID NO: 843406 - DNA, 15 bp, Homo sapiens
gtgagtagcaaagcc

SEQ ID NO: 843407 - DNA, 15 bp, Homo sapiens
tgagtagcaaagcca

SEQ ID NO: 843408 - DNA, 15 bp, Homo sapiens
gagtagcaaagccat

SEQ ID NO: 843409 - DNA, 15 bp, Homo sapiens
agtagcaaagccatt

SEQ ID NO: 843410 - DNA, 15 bp, Homo sapiens
gtagcaaagccattt

SEQ ID NO: 843411 - DNA, 15 bp, Homo sapiens
tagcaaagccatttg

SEQ ID NO: 843412 - DNA, 15 bp, Homo sapiens
agcaaagccatttga

SEQ ID NO: 843413 - DNA, 15 bp, Homo sapiens
gcaaagccatttgat

SEQ ID NO: 843414 - DNA, 15 bp, Homo sapiens
caaagccatttgata

SEQ ID NO: 843415 - DNA, 15 bp, Homo sapiens
aaagccatttgatag

SEQ ID NO: 843416 - DNA, 15 bp, Homo sapiens
aagccatttgatagg

SEQ ID NO: 843417 - DNA, 15 bp, Homo sapiens
agccatttgatagga

SEQ ID NO: 843418 - DNA, 15 bp, Homo sapiens
gccatttgataggaa

SEQ ID NO: 843419 - DNA, 15 bp, Homo sapiens
ccatttgataggaag

SEQ ID NO: 843420 - DNA, 15 bp, Homo sapiens
catttgataggaagg

SEQ ID NO: 843421 - DNA, 15 bp, Homo sapiens
atttgataggaagga

SEQ ID NO: 843422 - DNA, 15 bp, Homo sapiens
tttgataggaaggag

SEQ ID NO: 843423 - DNA, 15 bp, Homo sapiens
ttgataggaaggaga

SEQ ID NO: 843424 - DNA, 15 bp, Homo sapiens
tgataggaaggagaa

SEQ ID NO: 843425 - DNA, 15 bp, Homo sapiens
gataggaaggagaac

SEQ ID NO: 843426 - DNA, 15 bp, Homo sapiens
ataggaaggagaacg

SEQ ID NO: 843427 - DNA, 15 bp, Homo sapiens
taggaaggagaacga

SEQ ID NO: 843428 - DNA, 15 bp, Homo sapiens
aggaaggagaacgac

SEQ ID NO: 843429 - DNA, 15 bp, Homo sapiens
ggaaggagaacgaca

SEQ ID NO: 843430 - DNA, 15 bp, Homo sapiens
gaaggagaacgacag

SEQ ID NO: 843431 - DNA, 15 bp, Homo sapiens
aaggagaacgacagg

SEQ ID NO: 843432 - DNA, 15 bp, Homo sapiens
aggagaacgacaggt

SEQ ID NO: 843433 - DNA, 15 bp, Homo sapiens
ggagaacgacaggta

SEQ ID NO: 843434 - DNA, 15 bp, Homo sapiens
gagaacgacaggtac

SEQ ID NO: 843435 - DNA, 15 bp, Homo sapiens
agaacgacaggtacg

SEQ ID NO: 843436 - DNA, 15 bp, Homo sapiens
gaacgacaggtacga

SEQ ID NO: 843437 - DNA, 15 bp, Homo sapiens
aacgacaggtacgaa

SEQ ID NO: 843438 - DNA, 15 bp, Homo sapiens
acgacaggtacgaat

SEQ ID NO: 843439 - DNA, 15 bp, Homo sapiens
cgacaggtacgaata

SEQ ID NO: 843440 - DNA, 15 bp, Homo sapiens
gacaggtacgaatag

SEQ ID NO: 843441 - DNA, 15 bp, Homo sapiens
acaggtacgaatagt

SEQ ID NO: 843442 - DNA, 15 bp, Homo sapiens
caggtacgaatagtg

SEQ ID NO: 843443 - DNA, 15 bp, Homo sapiens
aggtacgaatagtgt

SEQ ID NO: 843444 - DNA, 15 bp, Homo sapiens
ggtacgaatagtgtg

SEQ ID NO: 843445 - DNA, 15 bp, Homo sapiens
gtacgaatagtgtgt

SEQ ID NO: 843446 - DNA, 15 bp, Homo sapiens
tacgaatagtgtgtg

SEQ ID NO: 843447 - DNA, 15 bp, Homo sapiens
acgaatagtgtgtgg

SEQ ID NO: 843448 - DNA, 15 bp, Homo sapiens
cgaatagtgtgtggg

SEQ ID NO: 843449 - DNA, 15 bp, Homo sapiens
gaatagtgtgtgggg

SEQ ID NO: 843450 - DNA, 15 bp, Homo sapiens
aatagtgtgtgggga

SEQ ID NO: 843451 - DNA, 15 bp, Homo sapiens
atagtgtgtggggag

SEQ ID NO: 843452 - DNA, 15 bp, Homo sapiens
tagtgtgtggggagt

SEQ ID NO: 843453 - DNA, 15 bp, Homo sapiens
agtgtgtggggagta

SEQ ID NO: 843454 - DNA, 15 bp, Homo sapiens
gtgtgtggggagtac

SEQ ID NO: 843455 - DNA, 15 bp, Homo sapiens
tgtgtggggagtact

SEQ ID NO: 843456 - DNA, 15 bp, Homo sapiens
gtgtggggagtacta

SEQ ID NO: 843457 - DNA, 15 bp, Homo sapiens
tgtggggagtactaa

SEQ ID NO: 843458 - DNA, 15 bp, Homo sapiens
gtggggagtactaac

SEQ ID NO: 843459 - DNA, 15 bp, Homo sapiens
tggggagtactaact

SEQ ID NO: 843460 - DNA, 15 bp, Homo sapiens
ggggagtactaactg

SEQ ID NO: 843461 - DNA, 15 bp, Homo sapiens
gggagtactaactga

SEQ ID NO: 843462 - DNA, 15 bp, Homo sapiens
ggagtactaactgag

SEQ ID NO: 843463 - DNA, 15 bp, Homo sapiens
gagtactaactgaga

SEQ ID NO: 843464 - DNA, 15 bp, Homo sapiens
agtactaactgagag

SEQ ID NO: 843465 - DNA, 15 bp, Homo sapiens
gtactaactgagaga

SEQ ID NO: 843466 - DNA, 15 bp, Homo sapiens
tactaactgagagat

SEQ ID NO: 843467 - DNA, 15 bp, Homo sapiens
actaactgagagatg

SEQ ID NO: 843468 - DNA, 15 bp, Homo sapiens
ctaactgagagatgt

SEQ ID NO: 843469 - DNA, 15 bp, Homo sapiens
taactgagagatgtg

SEQ ID NO: 843470 - DNA, 15 bp, Homo sapiens
aactgagagatgtgg

SEQ ID NO: 843471 - DNA, 15 bp, Homo sapiens
actgagagatgtggg

SEQ ID NO: 843472 - DNA, 15 bp, Homo sapiens
ctgagagatgtgggc

SEQ ID NO: 843473 - DNA, 15 bp, Homo sapiens
tgagagatgtgggca

SEQ ID NO: 843474 - DNA, 15 bp, Homo sapiens
gagagatgtgggcaa

SEQ ID NO: 843475 - DNA, 15 bp, Homo sapiens
agagatgtgggcaag

SEQ ID NO: 843476 - DNA, 15 bp, Homo sapiens
gagatgtgggcaagt

SEQ ID NO: 843477 - DNA, 15 bp, Homo sapiens
agatgtgggcaagtg

SEQ ID NO: 843478 - DNA, 15 bp, Homo sapiens
gatgtgggcaagtgt

SEQ ID NO: 843479 - DNA, 15 bp, Homo sapiens
atgtgggcaagtgtc

SEQ ID NO: 843480 - DNA, 15 bp, Homo sapiens
tgtgggcaagtgtca

SEQ ID NO: 843481 - DNA, 15 bp, Homo sapiens
gtgggcaagtgtcat

SEQ ID NO: 843482 - DNA, 15 bp, Homo sapiens
tgggcaagtgtcatt

SEQ ID NO: 843483 - DNA, 15 bp, Homo sapiens
gggcaagtgtcattc

SEQ ID NO: 843484 - DNA, 15 bp, Homo sapiens
ggcaagtgtcattct

SEQ ID NO: 843485 - DNA, 15 bp, Homo sapiens
gcaagtgtcattctg

SEQ ID NO: 843486 - DNA, 15 bp, Homo sapiens
caagtgtcattctgg

SEQ ID NO: 843487 - DNA, 15 bp, Homo sapiens
aagtgtcattctggt

SEQ ID NO: 843488 - DNA, 15 bp, Homo sapiens
agtgtcattctggtc

SEQ ID NO: 843489 - DNA, 15 bp, Homo sapiens
gtgtcattctggtca

SEQ ID NO: 843490 - DNA, 15 bp, Homo sapiens
tgtcattctggtcat

SEQ ID NO: 843491 - DNA, 15 bp, Homo sapiens
gtcattctggtcatc

SEQ ID NO: 843492 - DNA, 15 bp, Homo sapiens
tcattctggtcatca

SEQ ID NO: 843493 - DNA, 15 bp, Homo sapiens
cattctggtcatcag

SEQ ID NO: 843494 - DNA, 15 bp, Homo sapiens
attctggtcatcagg

SEQ ID NO: 843495 - DNA, 15 bp, Homo sapiens
ttctggtcatcaggg

SEQ ID NO: 843496 - DNA, 15 bp, Homo sapiens
tctggtcatcagggt

SEQ ID NO: 843497 - DNA, 15 bp, Homo sapiens
ctggtcatcagggtc

SEQ ID NO: 843498 - DNA, 15 bp, Homo sapiens
tggtcatcagggtcc

SEQ ID NO: 843499 - DNA, 15 bp, Homo sapiens
ggtcatcagggtcct

SEQ ID NO: 843500 - DNA, 15 bp, Homo sapiens
gtcatcagggtcctg

SEQ ID NO: 843501 - DNA, 15 bp, Homo sapiens
tcatcagggtcctgt

SEQ ID NO: 843502 - DNA, 15 bp, Homo sapiens
catcagggtcctgtt

SEQ ID NO: 843503 - DNA, 15 bp, Homo sapiens
atcagggtcctgttt

SEQ ID NO: 843504 - DNA, 15 bp, Homo sapiens
tcagggtcctgtttg

SEQ ID NO: 843505 - DNA, 15 bp, Homo sapiens
cagggtcctgtttgc

SEQ ID NO: 843506 - DNA, 15 bp, Homo sapiens
agggtcctgtttgcc

SEQ ID NO: 843507 - DNA, 15 bp, Homo sapiens
gggtcctgtttgccc

SEQ ID NO: 843508 - DNA, 15 bp, Homo sapiens
ggtcctgtttgccca

SEQ ID NO: 843509 - DNA, 15 bp, Homo sapiens
gtcctgtttgcccag

SEQ ID NO: 843510 - DNA, 15 bp, Homo sapiens
tcctgtttgcccagg

SEQ ID NO: 843511 - DNA, 15 bp, Homo sapiens
cctgtttgcccaggg

SEQ ID NO: 843512 - DNA, 15 bp, Homo sapiens
ctgtttgcccagggc

SEQ ID NO: 843513 - DNA, 15 bp, Homo sapiens
tgtttgcccagggct

SEQ ID NO: 843514 - DNA, 15 bp, Homo sapiens
gtttgcccagggctc

SEQ ID NO: 843515 - DNA, 15 bp, Homo sapiens
tttgcccagggctcc

SEQ ID NO: 843516 - DNA, 15 bp, Homo sapiens
ttgcccagggctcct

SEQ ID NO: 843517 - DNA, 15 bp, Homo sapiens
tgcccagggctcctt

SEQ ID NO: 843518 - DNA, 15 bp, Homo sapiens
gcccagggctccttt

SEQ ID NO: 843519 - DNA, 15 bp, Homo sapiens
cccagggctcctttc

SEQ ID NO: 843520 - DNA, 15 bp, Homo sapiens
ccagggctcctttca

SEQ ID NO: 843521 - DNA, 15 bp, Homo sapiens
cagggctcctttcag

SEQ ID NO: 843522 - DNA, 15 bp, Homo sapiens
agggctcctttcaga

SEQ ID NO: 843523 - DNA, 15 bp, Homo sapiens
gggctcctttcagaa

SEQ ID NO: 843524 - DNA, 15 bp, Homo sapiens
ggctcctttcagaaa

SEQ ID NO: 843525 - DNA, 15 bp, Homo sapiens
gctcctttcagaaag

SEQ ID NO: 843526 - DNA, 15 bp, Homo sapiens
ctcctttcagaaagc

SEQ ID NO: 843527 - DNA, 15 bp, Homo sapiens
tcctttcagaaagcc

SEQ ID NO: 843528 - DNA, 15 bp, Homo sapiens
cctttcagaaagcca

SEQ ID NO: 843529 - DNA, 15 bp, Homo sapiens
ctttcagaaagccag

SEQ ID NO: 843530 - DNA, 15 bp, Homo sapiens
tttcagaaagccagg

SEQ ID NO: 843531 - DNA, 15 bp, Homo sapiens
ttcagaaagccaggc

SEQ ID NO: 843532 - DNA, 15 bp, Homo sapiens
tcagaaagccaggct

SEQ ID NO: 843533 - DNA, 15 bp, Homo sapiens
cagaaagccaggctg

SEQ ID NO: 843534 - DNA, 15 bp, Homo sapiens
agaaagccaggctgg

SEQ ID NO: 843535 - DNA, 15 bp, Homo sapiens
gaaagccaggctggg

SEQ ID NO: 843536 - DNA, 15 bp, Homo sapiens
aaagccaggctgggt

SEQ ID NO: 843537 - DNA, 15 bp, Homo sapiens
aagccaggctgggtg

SEQ ID NO: 843538 - DNA, 15 bp, Homo sapiens
agccaggctgggtga

SEQ ID NO: 843539 - DNA, 15 bp, Homo sapiens
gccaggctgggtgat

SEQ ID NO: 843540 - DNA, 15 bp, Homo sapiens
ccaggctgggtgatc

SEQ ID NO: 843541 - DNA, 15 bp, Homo sapiens
caggctgggtgatcc

SEQ ID NO: 843542 - DNA, 15 bp, Homo sapiens
aggctgggtgatcct

SEQ ID NO: 843543 - DNA, 15 bp, Homo sapiens
ggctgggtgatcctg

SEQ ID NO: 843544 - DNA, 15 bp, Homo sapiens
gctgggtgatcctgc

SEQ ID NO: 843545 - DNA, 15 bp, Homo sapiens
ctgggtgatcctgca

SEQ ID NO: 843546 - DNA, 15 bp, Homo sapiens
tgggtgatcctgcat

SEQ ID NO: 843547 - DNA, 15 bp, Homo sapiens
gggtgatcctgcatc

SEQ ID NO: 843548 - DNA, 15 bp, Homo sapiens
ggtgatcctgcatca

SEQ ID NO: 843549 - DNA, 15 bp, Homo sapiens
gtgatcctgcatcat

SEQ ID NO: 843550 - DNA, 15 bp, Homo sapiens
tgatcctgcatcatg

SEQ ID NO: 843551 - DNA, 15 bp, Homo sapiens
gatcctgcatcatgt

SEQ ID NO: 843552 - DNA, 15 bp, Homo sapiens
atcctgcatcatgtt

SEQ ID NO: 843553 - DNA, 15 bp, Homo sapiens
tcctgcatcatgtta

SEQ ID NO: 843554 - DNA, 15 bp, Homo sapiens
cctgcatcatgttaa

SEQ ID NO: 843555 - DNA, 15 bp, Homo sapiens
ctgcatcatgttaat

SEQ ID NO: 843556 - DNA, 15 bp, Homo sapiens
tgcatcatgttaatg

SEQ ID NO: 843557 - DNA, 15 bp, Homo sapiens
gcatcatgttaatgg

SEQ ID NO: 843558 - DNA, 15 bp, Homo sapiens
catcatgttaatggt

SEQ ID NO: 843559 - DNA, 15 bp, Homo sapiens
atcatgttaatggtg

SEQ ID NO: 843560 - DNA, 15 bp, Homo sapiens
tcatgttaatggtgc

SEQ ID NO: 843561 - DNA, 15 bp, Homo sapiens
catgttaatggtgct

SEQ ID NO: 843562 - DNA, 15 bp, Homo sapiens
atgttaatggtgcta

SEQ ID NO: 843563 - DNA, 15 bp, Homo sapiens
tgttaatggtgctac

SEQ ID NO: 843564 - DNA, 15 bp, Homo sapiens
gttaatggtgctacc

SEQ ID NO: 843565 - DNA, 15 bp, Homo sapiens
ttaatggtgctaccc

SEQ ID NO: 843566 - DNA, 15 bp, Homo sapiens
taatggtgctaccca

SEQ ID NO: 843567 - DNA, 15 bp, Homo sapiens
aatggtgctacccac

SEQ ID NO: 843568 - DNA, 15 bp, Homo sapiens
atggtgctacccaca

SEQ ID NO: 843569 - DNA, 15 bp, Homo sapiens
tggtgctacccacac

SEQ ID NO: 843570 - DNA, 15 bp, Homo sapiens
ggtgctacccacaca

SEQ ID NO: 843571 - DNA, 15 bp, Homo sapiens
gtgctacccacacat

SEQ ID NO: 843572 - DNA, 15 bp, Homo sapiens
tgctacccacacatg

SEQ ID NO: 843573 - DNA, 15 bp, Homo sapiens
gctacccacacatga

SEQ ID NO: 843574 - DNA, 15 bp, Homo sapiens
ctacccacacatgat

SEQ ID NO: 843575 - DNA, 15 bp, Homo sapiens
tacccacacatgatc

SEQ ID NO: 843576 - DNA, 15 bp, Homo sapiens
acccacacatgatcc

SEQ ID NO: 843577 - DNA, 15 bp, Homo sapiens
cccacacatgatcca

SEQ ID NO: 843578 - DNA, 15 bp, Homo sapiens
ccacacatgatccat

SEQ ID NO: 843579 - DNA, 15 bp, Homo sapiens
cacacatgatccatt

SEQ ID NO: 843580 - DNA, 15 bp, Homo sapiens
acacatgatccattt

SEQ ID NO: 843581 - DNA, 15 bp, Homo sapiens
cacatgatccatttt

SEQ ID NO: 843582 - DNA, 15 bp, Homo sapiens
acatgatccattttc

SEQ ID NO: 843583 - DNA, 15 bp, Homo sapiens
catgatccattttct

SEQ ID NO: 843584 - DNA, 15 bp, Homo sapiens
atgatccattttcta

SEQ ID NO: 843585 - DNA, 15 bp, Homo sapiens
tgatccattttctat

SEQ ID NO: 843586 - DNA, 15 bp, Homo sapiens
gatccattttctatt

SEQ ID NO: 843587 - DNA, 15 bp, Homo sapiens
atccattttctattt

SEQ ID NO: 843588 - DNA, 15 bp, Homo sapiens
tccattttctatttt

SEQ ID NO: 843589 - DNA, 15 bp, Homo sapiens
ccattttctattttg

SEQ ID NO: 843590 - DNA, 15 bp, Homo sapiens
cattttctattttgg

SEQ ID NO: 843591 - DNA, 15 bp, Homo sapiens
attttctattttggg

SEQ ID NO: 843592 - DNA, 15 bp, Homo sapiens
ttttctattttggga

SEQ ID NO: 843593 - DNA, 15 bp, Homo sapiens
tttctattttgggag

SEQ ID NO: 843594 - DNA, 15 bp, Homo sapiens
ttctattttgggaga

SEQ ID NO: 843595 - DNA, 15 bp, Homo sapiens
tctattttgggagac

SEQ ID NO: 843596 - DNA, 15 bp, Homo sapiens
ctattttgggagacc

SEQ ID NO: 843597 - DNA, 15 bp, Homo sapiens
tattttgggagacca

SEQ ID NO: 843598 - DNA, 15 bp, Homo sapiens
attttgggagaccat

SEQ ID NO: 843599 - DNA, 15 bp, Homo sapiens
ttttgggagaccatc

SEQ ID NO: 843600 - DNA, 15 bp, Homo sapiens
tttgggagaccatca

SEQ ID NO: 843601 - DNA, 15 bp, Homo sapiens
ttgggagaccatcat

SEQ ID NO: 843602 - DNA, 15 bp, Homo sapiens
tgggagaccatcatg

SEQ ID NO: 843603 - DNA, 15 bp, Homo sapiens
gggagaccatcatgt

SEQ ID NO: 843604 - DNA, 15 bp, Homo sapiens
ggagaccatcatgtc

SEQ ID NO: 843605 - DNA, 15 bp, Homo sapiens
gagaccatcatgtcc

SEQ ID NO: 843606 - DNA, 15 bp, Homo sapiens
agaccatcatgtccc

SEQ ID NO: 843607 - DNA, 15 bp, Homo sapiens
gaccatcatgtcccc

SEQ ID NO: 843608 - DNA, 15 bp, Homo sapiens
accatcatgtcccct

SEQ ID NO: 843609 - DNA, 15 bp, Homo sapiens
ccatcatgtcccctc

SEQ ID NO: 843610 - DNA, 15 bp, Homo sapiens
catcatgtcccctca

SEQ ID NO: 843611 - DNA, 15 bp, Homo sapiens
atcatgtcccctcaa

SEQ ID NO: 843612 - DNA, 15 bp, Homo sapiens
tcatgtcccctcaaa

SEQ ID NO: 843613 - DNA, 15 bp, Homo sapiens
catgtcccctcaaaa

SEQ ID NO: 843614 - DNA, 15 bp, Homo sapiens
atgtcccctcaaaat

SEQ ID NO: 843615 - DNA, 15 bp, Homo sapiens
tgtcccctcaaaata

SEQ ID NO: 843616 - DNA, 15 bp, Homo sapiens
gtcccctcaaaatat

SEQ ID NO: 843617 - DNA, 15 bp, Homo sapiens
tcccctcaaaatatc

SEQ ID NO: 843618 - DNA, 15 bp, Homo sapiens
cccctcaaaatatca

SEQ ID NO: 843619 - DNA, 15 bp, Homo sapiens
ccctcaaaatatcaa

SEQ ID NO: 843620 - DNA, 15 bp, Homo sapiens
cctcaaaatatcaac

SEQ ID NO: 843621 - DNA, 15 bp, Homo sapiens
ctcaaaatatcaact

SEQ ID NO: 843622 - DNA, 15 bp, Homo sapiens
tcaaaatatcaactt

SEQ ID NO: 843623 - DNA, 15 bp, Homo sapiens
caaaatatcaacttc

SEQ ID NO: 843624 - DNA, 15 bp, Homo sapiens
aaaatatcaacttct

SEQ ID NO: 843625 - DNA, 15 bp, Homo sapiens
aaatatcaacttctc

SEQ ID NO: 843626 - DNA, 15 bp, Homo sapiens
aatatcaacttctcc

SEQ ID NO: 843627 - DNA, 15 bp, Homo sapiens
atatcaacttctccc

SEQ ID NO: 843628 - DNA, 15 bp, Homo sapiens
tatcaacttctccct

SEQ ID NO: 843629 - DNA, 15 bp, Homo sapiens
atcaacttctccctt

SEQ ID NO: 843630 - DNA, 15 bp, Homo sapiens
tcaacttctccctta

SEQ ID NO: 843631 - DNA, 15 bp, Homo sapiens
caacttctcccttat

SEQ ID NO: 843632 - DNA, 15 bp, Homo sapiens
aacttctcccttatc

SEQ ID NO: 843633 - DNA, 15 bp, Homo sapiens
acttctcccttatca

SEQ ID NO: 843634 - DNA, 15 bp, Homo sapiens
cttctcccttatcat

SEQ ID NO: 843635 - DNA, 15 bp, Homo sapiens
ttctcccttatcatc

SEQ ID NO: 843636 - DNA, 15 bp, Homo sapiens
tctcccttatcatca

SEQ ID NO: 843637 - DNA, 15 bp, Homo sapiens
ctcccttatcatcat

SEQ ID NO: 843638 - DNA, 15 bp, Homo sapiens
tcccttatcatcata

SEQ ID NO: 843639 - DNA, 15 bp, Homo sapiens
cccttatcatcatat

SEQ ID NO: 843640 - DNA, 15 bp, Homo sapiens
ccttatcatcatatc

SEQ ID NO: 843641 - DNA, 15 bp, Homo sapiens
cttatcatcatatct

SEQ ID NO: 843642 - DNA, 15 bp, Homo sapiens
ttatcatcatatcta

SEQ ID NO: 843643 - DNA, 15 bp, Homo sapiens
tatcatcatatctac

SEQ ID NO: 843644 - DNA, 15 bp, Homo sapiens
atcatcatatctacc

SEQ ID NO: 843645 - DNA, 15 bp, Homo sapiens
tcatcatatctaccc

SEQ ID NO: 843646 - DNA, 15 bp, Homo sapiens
catcatatctaccca

SEQ ID NO: 843647 - DNA, 15 bp, Homo sapiens
atcatatctacccag

SEQ ID NO: 843648 - DNA, 15 bp, Homo sapiens
tcatatctacccaga

SEQ ID NO: 843649 - DNA, 15 bp, Homo sapiens
catatctacccagag

SEQ ID NO: 843650 - DNA, 15 bp, Homo sapiens
atatctacccagagt

SEQ ID NO: 843651 - DNA, 15 bp, Homo sapiens
tatctacccagagtt

SEQ ID NO: 843652 - DNA, 15 bp, Homo sapiens
atctacccagagtta

SEQ ID NO: 843653 - DNA, 15 bp, Homo sapiens
tctacccagagttaa

SEQ ID NO: 843654 - DNA, 15 bp, Homo sapiens
ctacccagagttaac

SEQ ID NO: 843655 - DNA, 15 bp, Homo sapiens
tacccagagttaact

SEQ ID NO: 843656 - DNA, 15 bp, Homo sapiens
acccagagttaactt

SEQ ID NO: 843657 - DNA, 15 bp, Homo sapiens
cccagagttaactta

SEQ ID NO: 843658 - DNA, 15 bp, Homo sapiens
ccagagttaacttac

SEQ ID NO: 843659 - DNA, 15 bp, Homo sapiens
cagagttaacttact

SEQ ID NO: 843660 - DNA, 15 bp, Homo sapiens
agagttaacttactg

SEQ ID NO: 843661 - DNA, 15 bp, Homo sapiens
gagttaacttactgg

SEQ ID NO: 843662 - DNA, 15 bp, Homo sapiens
agttaacttactggc

SEQ ID NO: 843663 - DNA, 15 bp, Homo sapiens
gttaacttactggcc

SEQ ID NO: 843664 - DNA, 15 bp, Homo sapiens
ttaacttactggccg

SEQ ID NO: 843665 - DNA, 15 bp, Homo sapiens
taacttactggccgt

SEQ ID NO: 843666 - DNA, 15 bp, Homo sapiens
aacttactggccgtt

SEQ ID NO: 843667 - DNA, 15 bp, Homo sapiens
acttactggccgtta

SEQ ID NO: 843668 - DNA, 15 bp, Homo sapiens
cttactggccgttag

SEQ ID NO: 843669 - DNA, 15 bp, Homo sapiens
ttactggccgttagg

SEQ ID NO: 843670 - DNA, 15 bp, Homo sapiens
tactggccgttagga

SEQ ID NO: 843671 - DNA, 15 bp, Homo sapiens
actggccgttaggaa

SEQ ID NO: 843672 - DNA, 15 bp, Homo sapiens
ctggccgttaggaaa

SEQ ID NO: 843673 - DNA, 15 bp, Homo sapiens
tggccgttaggaaag

SEQ ID NO: 843674 - DNA, 15 bp, Homo sapiens
ggccgttaggaaagt

SEQ ID NO: 843675 - DNA, 15 bp, Homo sapiens
gccgttaggaaagtc

SEQ ID NO: 843676 - DNA, 15 bp, Homo sapiens
ccgttaggaaagtcc

SEQ ID NO: 843677 - DNA, 15 bp, Homo sapiens
cgttaggaaagtcca

SEQ ID NO: 843678 - DNA, 15 bp, Homo sapiens
gttaggaaagtccat

SEQ ID NO: 843679 - DNA, 15 bp, Homo sapiens
ttaggaaagtccatg

SEQ ID NO: 843680 - DNA, 15 bp, Homo sapiens
taggaaagtccatgg

SEQ ID NO: 843681 - DNA, 15 bp, Homo sapiens
aggaaagtccatggg

SEQ ID NO: 843682 - DNA, 15 bp, Homo sapiens
ggaaagtccatgggt

SEQ ID NO: 843683 - DNA, 15 bp, Homo sapiens
gaaagtccatgggtg

SEQ ID NO: 843684 - DNA, 15 bp, Homo sapiens
aaagtccatgggtgg

SEQ ID NO: 843685 - DNA, 15 bp, Homo sapiens
aagtccatgggtggc

SEQ ID NO: 843686 - DNA, 15 bp, Homo sapiens
agtccatgggtggca

SEQ ID NO: 843687 - DNA, 15 bp, Homo sapiens
gtccatgggtggcag

SEQ ID NO: 843688 - DNA, 15 bp, Homo sapiens
tccatgggtggcaga

SEQ ID NO: 843689 - DNA, 15 bp, Homo sapiens
ccatgggtggcagag

SEQ ID NO: 843690 - DNA, 15 bp, Homo sapiens
catgggtggcagaga

SEQ ID NO: 843691 - DNA, 15 bp, Homo sapiens
atgggtggcagagag

SEQ ID NO: 843692 - DNA, 15 bp, Homo sapiens
tgggtggcagagagg

SEQ ID NO: 843693 - DNA, 15 bp, Homo sapiens
gggtggcagagagga

SEQ ID NO: 843694 - DNA, 15 bp, Homo sapiens
ggtggcagagaggac

SEQ ID NO: 843695 - DNA, 15 bp, Homo sapiens
gtggcagagaggacc

SEQ ID NO: 843696 - DNA, 15 bp, Homo sapiens
tggcagagaggacct

SEQ ID NO: 843697 - DNA, 15 bp, Homo sapiens
ggcagagaggacctc

SEQ ID NO: 843698 - DNA, 15 bp, Homo sapiens
gcagagaggacctcc

SEQ ID NO: 843699 - DNA, 15 bp, Homo sapiens
cagagaggacctcca

SEQ ID NO: 843700 - DNA, 15 bp, Homo sapiens
agagaggacctccag

SEQ ID NO: 843701 - DNA, 15 bp, Homo sapiens
gagaggacctccaga

SEQ ID NO: 843702 - DNA, 15 bp, Homo sapiens
agaggacctccagag

SEQ ID NO: 843703 - DNA, 15 bp, Homo sapiens
gaggacctccagaga

SEQ ID NO: 843704 - DNA, 15 bp, Homo sapiens
aggacctccagagaa

SEQ ID NO: 843705 - DNA, 15 bp, Homo sapiens
ggacctccagagaat

SEQ ID NO: 843706 - DNA, 15 bp, Homo sapiens
gacctccagagaata

SEQ ID NO: 843707 - DNA, 15 bp, Homo sapiens
acctccagagaatat

SEQ ID NO: 843708 - DNA, 15 bp, Homo sapiens
cctccagagaatatt

SEQ ID NO: 843709 - DNA, 15 bp, Homo sapiens
ctccagagaatattg

SEQ ID NO: 843710 - DNA, 15 bp, Homo sapiens
tccagagaatattgc

SEQ ID NO: 843711 - DNA, 15 bp, Homo sapiens
ccagagaatattgct

SEQ ID NO: 843712 - DNA, 15 bp, Homo sapiens
cagagaatattgctg

SEQ ID NO: 843713 - DNA, 15 bp, Homo sapiens
agagaatattgctgt

SEQ ID NO: 843714 - DNA, 15 bp, Homo sapiens
gagaatattgctgtc

SEQ ID NO: 843715 - DNA, 15 bp, Homo sapiens
agaatattgctgtct

SEQ ID NO: 843716 - DNA, 15 bp, Homo sapiens
gaatattgctgtctt

SEQ ID NO: 843717 - DNA, 15 bp, Homo sapiens
aatattgctgtcttt

SEQ ID NO: 843718 - DNA, 15 bp, Homo sapiens
atattgctgtctttt

SEQ ID NO: 843719 - DNA, 15 bp, Homo sapiens
tattgctgtcttttg

SEQ ID NO: 843720 - DNA, 15 bp, Homo sapiens
attgctgtcttttgg

SEQ ID NO: 843721 - DNA, 15 bp, Homo sapiens
ttgctgtcttttggg

SEQ ID NO: 843722 - DNA, 15 bp, Homo sapiens
tgctgtcttttgggg

SEQ ID NO: 843723 - DNA, 15 bp, Homo sapiens
gctgtcttttgggga

SEQ ID NO: 843724 - DNA, 15 bp, Homo sapiens
ctgtcttttggggac

SEQ ID NO: 843725 - DNA, 15 bp, Homo sapiens
tgtcttttggggaca

SEQ ID NO: 843726 - DNA, 15 bp, Homo sapiens
gtcttttggggacaa

SEQ ID NO: 843727 - DNA, 15 bp, Homo sapiens
tcttttggggacaaa

SEQ ID NO: 843728 - DNA, 15 bp, Homo sapiens
cttttggggacaaac

SEQ ID NO: 843729 - DNA, 15 bp, Homo sapiens
ttttggggacaaact

SEQ ID NO: 843730 - DNA, 15 bp, Homo sapiens
tttggggacaaactc

SEQ ID NO: 843731 - DNA, 15 bp, Homo sapiens
ttggggacaaactca

SEQ ID NO: 843732 - DNA, 15 bp, Homo sapiens
tggggacaaactcag

SEQ ID NO: 843733 - DNA, 15 bp, Homo sapiens
ggggacaaactcagg

SEQ ID NO: 843734 - DNA, 15 bp, Homo sapiens
gggacaaactcaggc

SEQ ID NO: 843735 - DNA, 15 bp, Homo sapiens
ggacaaactcaggct

SEQ ID NO: 843736 - DNA, 15 bp, Homo sapiens
gacaaactcaggctg

SEQ ID NO: 843737 - DNA, 15 bp, Homo sapiens
acaaactcaggctgc

SEQ ID NO: 843738 - DNA, 15 bp, Homo sapiens
caaactcaggctgct

SEQ ID NO: 843739 - DNA, 15 bp, Homo sapiens
aaactcaggctgctt

SEQ ID NO: 843740 - DNA, 15 bp, Homo sapiens
aactcaggctgctta

SEQ ID NO: 843741 - DNA, 15 bp, Homo sapiens
actcaggctgcttaa

SEQ ID NO: 843742 - DNA, 15 bp, Homo sapiens
ctcaggctgcttaat

SEQ ID NO: 843743 - DNA, 15 bp, Homo sapiens
tcaggctgcttaatg

SEQ ID NO: 843744 - DNA, 15 bp, Homo sapiens
caggctgcttaatgt

SEQ ID NO: 843745 - DNA, 15 bp, Homo sapiens
aggctgcttaatgtt

SEQ ID NO: 843746 - DNA, 15 bp, Homo sapiens
ggctgcttaatgttt

SEQ ID NO: 843747 - DNA, 15 bp, Homo sapiens
gctgcttaatgtttc

SEQ ID NO: 843748 - DNA, 15 bp, Homo sapiens
ctgcttaatgtttct

SEQ ID NO: 843749 - DNA, 15 bp, Homo sapiens
tgcttaatgtttctc

SEQ ID NO: 843750 - DNA, 15 bp, Homo sapiens
gcttaatgtttctct

SEQ ID NO: 843751 - DNA, 15 bp, Homo sapiens
cttaatgtttctctt

SEQ ID NO: 843752 - DNA, 15 bp, Homo sapiens
ttaatgtttctcttc

SEQ ID NO: 843753 - DNA, 15 bp, Homo sapiens
taatgtttctcttca

SEQ ID NO: 843754 - DNA, 15 bp, Homo sapiens
aatgtttctcttcaa

SEQ ID NO: 843755 - DNA, 15 bp, Homo sapiens
atgtttctcttcaat

SEQ ID NO: 843756 - DNA, 15 bp, Homo sapiens
tgtttctcttcaatt

SEQ ID NO: 843757 - DNA, 15 bp, Homo sapiens
gtttctcttcaattc

SEQ ID NO: 843758 - DNA, 15 bp, Homo sapiens
tttctcttcaattca

SEQ ID NO: 843759 - DNA, 15 bp, Homo sapiens
ttctcttcaattcag

SEQ ID NO: 843760 - DNA, 15 bp, Homo sapiens
tctcttcaattcaga

SEQ ID NO: 843761 - DNA, 15 bp, Homo sapiens
ctcttcaattcagag

SEQ ID NO: 843762 - DNA, 15 bp, Homo sapiens
tcttcaattcagaga

SEQ ID NO: 843763 - DNA, 15 bp, Homo sapiens
cttcaattcagagaa

SEQ ID NO: 843764 - DNA, 15 bp, Homo sapiens
ttcaattcagagaac

SEQ ID NO: 843765 - DNA, 15 bp, Homo sapiens
tcaattcagagaacc

SEQ ID NO: 843766 - DNA, 15 bp, Homo sapiens
caattcagagaacca

SEQ ID NO: 843767 - DNA, 15 bp, Homo sapiens
aattcagagaaccac

SEQ ID NO: 843768 - DNA, 15 bp, Homo sapiens
attcagagaaccact

SEQ ID NO: 843769 - DNA, 15 bp, Homo sapiens
ttcagagaaccactg

SEQ ID NO: 843770 - DNA, 15 bp, Homo sapiens
tcagagaaccactgt

SEQ ID NO: 843771 - DNA, 15 bp, Homo sapiens
cagagaaccactgta

SEQ ID NO: 843772 - DNA, 15 bp, Homo sapiens
agagaaccactgtat

SEQ ID NO: 843773 - DNA, 15 bp, Homo sapiens
gagaaccactgtatg

SEQ ID NO: 843774 - DNA, 15 bp, Homo sapiens
agaaccactgtatga

SEQ ID NO: 843775 - DNA, 15 bp, Homo sapiens
gaaccactgtatgat

SEQ ID NO: 843776 - DNA, 15 bp, Homo sapiens
aaccactgtatgatc

SEQ ID NO: 843777 - DNA, 15 bp, Homo sapiens
accactgtatgatca

SEQ ID NO: 843778 - DNA, 15 bp, Homo sapiens
ccactgtatgatcac

SEQ ID NO: 843779 - DNA, 15 bp, Homo sapiens
cactgtatgatcact

SEQ ID NO: 843780 - DNA, 15 bp, Homo sapiens
actgtatgatcactg

SEQ ID NO: 843781 - DNA, 15 bp, Homo sapiens
ctgtatgatcactga

SEQ ID NO: 843782 - DNA, 15 bp, Homo sapiens
tgtatgatcactgat

SEQ ID NO: 843783 - DNA, 15 bp, Homo sapiens
gtatgatcactgatg

SEQ ID NO: 843784 - DNA, 15 bp, Homo sapiens
tatgatcactgatgt

SEQ ID NO: 843785 - DNA, 15 bp, Homo sapiens
atgatcactgatgtt

SEQ ID NO: 843786 - DNA, 15 bp, Homo sapiens
tgatcactgatgttc

SEQ ID NO: 843787 - DNA, 15 bp, Homo sapiens
gatcactgatgttcc

SEQ ID NO: 843788 - DNA, 15 bp, Homo sapiens
atcactgatgttcca

SEQ ID NO: 843789 - DNA, 15 bp, Homo sapiens
tcactgatgttccag

SEQ ID NO: 843790 - DNA, 15 bp, Homo sapiens
cactgatgttccagc

SEQ ID NO: 843791 - DNA, 15 bp, Homo sapiens
actgatgttccagcc

SEQ ID NO: 843792 - DNA, 15 bp, Homo sapiens
ctgatgttccagcct

SEQ ID NO: 843793 - DNA, 15 bp, Homo sapiens
tgatgttccagcctt

SEQ ID NO: 843794 - DNA, 15 bp, Homo sapiens
gatgttccagccttt

SEQ ID NO: 843795 - DNA, 15 bp, Homo sapiens
atgttccagcctttt

SEQ ID NO: 843796 - DNA, 15 bp, Homo sapiens
tgttccagccttttc

SEQ ID NO: 843797 - DNA, 15 bp, Homo sapiens
gttccagccttttct

SEQ ID NO: 843798 - DNA, 15 bp, Homo sapiens
ttccagccttttcta

SEQ ID NO: 843799 - DNA, 15 bp, Homo sapiens
tccagccttttctag

SEQ ID NO: 843800 - DNA, 15 bp, Homo sapiens
ccagccttttctagc

SEQ ID NO: 843801 - DNA, 15 bp, Homo sapiens
cagccttttctagca

SEQ ID NO: 843802 - DNA, 15 bp, Homo sapiens
agccttttctagcag

SEQ ID NO: 843803 - DNA, 15 bp, Homo sapiens
gccttttctagcagc

SEQ ID NO: 843804 - DNA, 15 bp, Homo sapiens
ccttttctagcagca

SEQ ID NO: 843805 - DNA, 15 bp, Homo sapiens
cttttctagcagcag

SEQ ID NO: 843806 - DNA, 15 bp, Homo sapiens
ttttctagcagcagc

SEQ ID NO: 843807 - DNA, 15 bp, Homo sapiens
tttctagcagcagct

SEQ ID NO: 843808 - DNA, 15 bp, Homo sapiens
ttctagcagcagcta

SEQ ID NO: 843809 - DNA, 15 bp, Homo sapiens
tctagcagcagctaa

SEQ ID NO: 843810 - DNA, 15 bp, Homo sapiens
ctagcagcagctaag

SEQ ID NO: 843811 - DNA, 15 bp, Homo sapiens
tagcagcagctaagc

SEQ ID NO: 843812 - DNA, 15 bp, Homo sapiens
agcagcagctaagca

SEQ ID NO: 843813 - DNA, 15 bp, Homo sapiens
gcagcagctaagcaa

SEQ ID NO: 843814 - DNA, 15 bp, Homo sapiens
cagcagctaagcaat

SEQ ID NO: 843815 - DNA, 15 bp, Homo sapiens
agcagctaagcaata

SEQ ID NO: 843816 - DNA, 15 bp, Homo sapiens
gcagctaagcaatag

SEQ ID NO: 843817 - DNA, 15 bp, Homo sapiens
cagctaagcaatagg

SEQ ID NO: 843818 - DNA, 15 bp, Homo sapiens
agctaagcaatagga

SEQ ID NO: 843819 - DNA, 15 bp, Homo sapiens
gctaagcaataggaa

SEQ ID NO: 843820 - DNA, 15 bp, Homo sapiens
ctaagcaataggaag

SEQ ID NO: 843821 - DNA, 15 bp, Homo sapiens
taagcaataggaagc

SEQ ID NO: 843822 - DNA, 15 bp, Homo sapiens
aagcaataggaagcc

SEQ ID NO: 843823 - DNA, 15 bp, Homo sapiens
agcaataggaagcca

SEQ ID NO: 843824 - DNA, 15 bp, Homo sapiens
gcaataggaagccat

SEQ ID NO: 843825 - DNA, 15 bp, Homo sapiens
caataggaagccatg

SEQ ID NO: 843826 - DNA, 15 bp, Homo sapiens
aataggaagccatga

SEQ ID NO: 843827 - DNA, 15 bp, Homo sapiens
ataggaagccatgaa

SEQ ID NO: 843828 - DNA, 15 bp, Homo sapiens
taggaagccatgaat

SEQ ID NO: 843829 - DNA, 15 bp, Homo sapiens
aggaagccatgaatc

SEQ ID NO: 843830 - DNA, 15 bp, Homo sapiens
ggaagccatgaatca

SEQ ID NO: 843831 - DNA, 15 bp, Homo sapiens
gaagccatgaatcac

SEQ ID NO: 843832 - DNA, 15 bp, Homo sapiens
aagccatgaatcaca

SEQ ID NO: 843833 - DNA, 15 bp, Homo sapiens
agccatgaatcacag

SEQ ID NO: 843834 - DNA, 15 bp, Homo sapiens
gccatgaatcacagg

SEQ ID NO: 843835 - DNA, 15 bp, Homo sapiens
ccatgaatcacaggc

SEQ ID NO: 843836 - DNA, 15 bp, Homo sapiens
catgaatcacaggcc

SEQ ID NO: 843837 - DNA, 15 bp, Homo sapiens
atgaatcacaggccc

SEQ ID NO: 843838 - DNA, 15 bp, Homo sapiens
tgaatcacaggcccc

SEQ ID NO: 843839 - DNA, 15 bp, Homo sapiens
gaatcacaggcccca

SEQ ID NO: 843840 - DNA, 15 bp, Homo sapiens
aatcacaggccccac

SEQ ID NO: 843841 - DNA, 15 bp, Homo sapiens
atcacaggccccaca

SEQ ID NO: 843842 - DNA, 15 bp, Homo sapiens
tcacaggccccacat

SEQ ID NO: 843843 - DNA, 15 bp, Homo sapiens
cacaggccccacatc

SEQ ID NO: 843844 - DNA, 15 bp, Homo sapiens
acaggccccacatct

SEQ ID NO: 843845 - DNA, 15 bp, Homo sapiens
caggccccacatcta

SEQ ID NO: 843846 - DNA, 15 bp, Homo sapiens
aggccccacatctaa

SEQ ID NO: 843847 - DNA, 15 bp, Homo sapiens
ggccccacatctaat

SEQ ID NO: 843848 - DNA, 15 bp, Homo sapiens
gccccacatctaatt

SEQ ID NO: 843849 - DNA, 15 bp, Homo sapiens
ccccacatctaattg

SEQ ID NO: 843850 - DNA, 15 bp, Homo sapiens
cccacatctaattgg

SEQ ID NO: 843851 - DNA, 15 bp, Homo sapiens
ccacatctaattggc

SEQ ID NO: 843852 - DNA, 15 bp, Homo sapiens
cacatctaattggca

SEQ ID NO: 843853 - DNA, 15 bp, Homo sapiens
acatctaattggcat

SEQ ID NO: 843854 - DNA, 15 bp, Homo sapiens
catctaattggcata

SEQ ID NO: 843855 - DNA, 15 bp, Homo sapiens
atctaattggcatag

SEQ ID NO: 843856 - DNA, 15 bp, Homo sapiens
tctaattggcatagt

SEQ ID NO: 843857 - DNA, 15 bp, Homo sapiens
ctaattggcatagtt

SEQ ID NO: 843858 - DNA, 15 bp, Homo sapiens
taattggcatagttc

SEQ ID NO: 843859 - DNA, 15 bp, Homo sapiens
aattggcatagttcc

SEQ ID NO: 843860 - DNA, 15 bp, Homo sapiens
attggcatagttcct

SEQ ID NO: 843861 - DNA, 15 bp, Homo sapiens
ttggcatagttcctt

SEQ ID NO: 843862 - DNA, 15 bp, Homo sapiens
tggcatagttccttt

SEQ ID NO: 843863 - DNA, 15 bp, Homo sapiens
ggcatagttcctttg

SEQ ID NO: 843864 - DNA, 15 bp, Homo sapiens
gcatagttcctttgt

SEQ ID NO: 843865 - DNA, 15 bp, Homo sapiens
catagttcctttgtc

SEQ ID NO: 843866 - DNA, 15 bp, Homo sapiens
atagttcctttgtct

SEQ ID NO: 843867 - DNA, 15 bp, Homo sapiens
tagttcctttgtctg

SEQ ID NO: 843868 - DNA, 15 bp, Homo sapiens
agttcctttgtctga

SEQ ID NO: 843869 - DNA, 15 bp, Homo sapiens
gttcctttgtctgag

SEQ ID NO: 843870 - DNA, 15 bp, Homo sapiens
ttcctttgtctgagc

SEQ ID NO: 843871 - DNA, 15 bp, Homo sapiens
tcctttgtctgagca

SEQ ID NO: 843872 - DNA, 15 bp, Homo sapiens
cctttgtctgagcag

SEQ ID NO: 843873 - DNA, 15 bp, Homo sapiens
ctttgtctgagcagt

SEQ ID NO: 843874 - DNA, 15 bp, Homo sapiens
tttgtctgagcagta

SEQ ID NO: 843875 - DNA, 15 bp, Homo sapiens
ttgtctgagcagtag

SEQ ID NO: 843876 - DNA, 15 bp, Homo sapiens
tgtctgagcagtaga

SEQ ID NO: 843877 - DNA, 15 bp, Homo sapiens
gtctgagcagtagag

SEQ ID NO: 843878 - DNA, 15 bp, Homo sapiens
tctgagcagtagagc

SEQ ID NO: 843879 - DNA, 15 bp, Homo sapiens
ctgagcagtagagct

SEQ ID NO: 843880 - DNA, 15 bp, Homo sapiens
tgagcagtagagcta

SEQ ID NO: 843881 - DNA, 15 bp, Homo sapiens
gagcagtagagctat

SEQ ID NO: 843882 - DNA, 15 bp, Homo sapiens
agcagtagagctatc

SEQ ID NO: 843883 - DNA, 15 bp, Homo sapiens
gcagtagagctatct

SEQ ID NO: 843884 - DNA, 15 bp, Homo sapiens
cagtagagctatctt

SEQ ID NO: 843885 - DNA, 15 bp, Homo sapiens
agtagagctatcttg

SEQ ID NO: 843886 - DNA, 15 bp, Homo sapiens
gtagagctatcttgt

SEQ ID NO: 843887 - DNA, 15 bp, Homo sapiens
tagagctatcttgtc

SEQ ID NO: 843888 - DNA, 15 bp, Homo sapiens
agagctatcttgtct

SEQ ID NO: 843889 - DNA, 15 bp, Homo sapiens
gagctatcttgtcta

SEQ ID NO: 843890 - DNA, 15 bp, Homo sapiens
agctatcttgtctat

SEQ ID NO: 843891 - DNA, 15 bp, Homo sapiens
gctatcttgtctatc

SEQ ID NO: 843892 - DNA, 15 bp, Homo sapiens
ctatcttgtctatca

SEQ ID NO: 843893 - DNA, 15 bp, Homo sapiens
tatcttgtctatcat

SEQ ID NO: 843894 - DNA, 15 bp, Homo sapiens
atcttgtctatcatc

SEQ ID NO: 843895 - DNA, 15 bp, Homo sapiens
tcttgtctatcatca

SEQ ID NO: 843896 - DNA, 15 bp, Homo sapiens
cttgtctatcatcag

SEQ ID NO: 843897 - DNA, 15 bp, Homo sapiens
ttgtctatcatcagc

SEQ ID NO: 843898 - DNA, 15 bp, Homo sapiens
tgtctatcatcagca

SEQ ID NO: 843899 - DNA, 15 bp, Homo sapiens
gtctatcatcagcat

SEQ ID NO: 843900 - DNA, 15 bp, Homo sapiens
tctatcatcagcatc

SEQ ID NO: 843901 - DNA, 15 bp, Homo sapiens
ctatcatcagcatca

SEQ ID NO: 843902 - DNA, 15 bp, Homo sapiens
tatcatcagcatcat

SEQ ID NO: 843903 - DNA, 15 bp, Homo sapiens
atcatcagcatcatc

SEQ ID NO: 843904 - DNA, 15 bp, Homo sapiens
tcatcagcatcatca

SEQ ID NO: 843905 - DNA, 15 bp, Homo sapiens
catcagcatcatcag

SEQ ID NO: 843906 - DNA, 15 bp, Homo sapiens
atcagcatcatcagc

SEQ ID NO: 843907 - DNA, 15 bp, Homo sapiens
tcagcatcatcagca

SEQ ID NO: 843908 - DNA, 15 bp, Homo sapiens
cagcatcatcagcat

SEQ ID NO: 843909 - DNA, 15 bp, Homo sapiens
agcatcatcagcatc

SEQ ID NO: 843910 - DNA, 15 bp, Homo sapiens
gcatcatcagcatca

SEQ ID NO: 843911 - DNA, 15 bp, Homo sapiens
catcatcagcatcat

SEQ ID NO: 843912 - DNA, 15 bp, Homo sapiens
catcagcatcatcac

SEQ ID NO: 843913 - DNA, 15 bp, Homo sapiens
atcagcatcatcact

SEQ ID NO: 843914 - DNA, 15 bp, Homo sapiens
tcagcatcatcacta

SEQ ID NO: 843915 - DNA, 15 bp, Homo sapiens
cagcatcatcactat

SEQ ID NO: 843916 - DNA, 15 bp, Homo sapiens
agcatcatcactatc

SEQ ID NO: 843917 - DNA, 15 bp, Homo sapiens
gcatcatcactatca

SEQ ID NO: 843918 - DNA, 15 bp, Homo sapiens
catcatcactatcac

SEQ ID NO: 843919 - DNA, 15 bp, Homo sapiens
atcatcactatcact

SEQ ID NO: 843920 - DNA, 15 bp, Homo sapiens
tcatcactatcacta

SEQ ID NO: 843921 - DNA, 15 bp, Homo sapiens
catcactatcactat

SEQ ID NO: 843922 - DNA, 15 bp, Homo sapiens
atcactatcactatc

SEQ ID NO: 843923 - DNA, 15 bp, Homo sapiens
tcactatcactatca

SEQ ID NO: 843924 - DNA, 15 bp, Homo sapiens
cactatcactatcac

SEQ ID NO: 843925 - DNA, 15 bp, Homo sapiens
actatcactatcact

SEQ ID NO: 843926 - DNA, 15 bp, Homo sapiens
ctatcactatcactc

SEQ ID NO: 843927 - DNA, 15 bp, Homo sapiens
tatcactatcactca

SEQ ID NO: 843928 - DNA, 15 bp, Homo sapiens
atcactatcactcat

SEQ ID NO: 843929 - DNA, 15 bp, Homo sapiens
tcactatcactcatt

SEQ ID NO: 843930 - DNA, 15 bp, Homo sapiens
cactatcactcatta

SEQ ID NO: 843931 - DNA, 15 bp, Homo sapiens
actatcactcattac

SEQ ID NO: 843932 - DNA, 15 bp, Homo sapiens
ctatcactcattact

SEQ ID NO: 843933 - DNA, 15 bp, Homo sapiens
tatcactcattactt

SEQ ID NO: 843934 - DNA, 15 bp, Homo sapiens
atcactcattactta

SEQ ID NO: 843935 - DNA, 15 bp, Homo sapiens
tcactcattacttat

SEQ ID NO: 843936 - DNA, 15 bp, Homo sapiens
cactcattacttata

SEQ ID NO: 843937 - DNA, 15 bp, Homo sapiens
actcattacttataa

SEQ ID NO: 843938 - DNA, 15 bp, Homo sapiens
ctcattacttataat

SEQ ID NO: 843939 - DNA, 15 bp, Homo sapiens
tcattacttataatg

SEQ ID NO: 843940 - DNA, 15 bp, Homo sapiens
cattacttataatga

SEQ ID NO: 843941 - DNA, 15 bp, Homo sapiens
attacttataatgac

SEQ ID NO: 843942 - DNA, 15 bp, Homo sapiens
ttacttataatgaca

SEQ ID NO: 843943 - DNA, 15 bp, Homo sapiens
tacttataatgacag

SEQ ID NO: 843944 - DNA, 15 bp, Homo sapiens
acttataatgacagc

SEQ ID NO: 843945 - DNA, 15 bp, Homo sapiens
cttataatgacagct

SEQ ID NO: 843946 - DNA, 15 bp, Homo sapiens
ttataatgacagctg

SEQ ID NO: 843947 - DNA, 15 bp, Homo sapiens
tataatgacagctga

SEQ ID NO: 843948 - DNA, 15 bp, Homo sapiens
ataatgacagctgac

SEQ ID NO: 843949 - DNA, 15 bp, Homo sapiens
taatgacagctgaca

SEQ ID NO: 843950 - DNA, 15 bp, Homo sapiens
aatgacagctgacat

SEQ ID NO: 843951 - DNA, 15 bp, Homo sapiens
atgacagctgacatg

SEQ ID NO: 843952 - DNA, 15 bp, Homo sapiens
tgacagctgacatgt

SEQ ID NO: 843953 - DNA, 15 bp, Homo sapiens
gacagctgacatgta

SEQ ID NO: 843954 - DNA, 15 bp, Homo sapiens
acagctgacatgtat

SEQ ID NO: 843955 - DNA, 15 bp, Homo sapiens
cagctgacatgtata

SEQ ID NO: 843956 - DNA, 15 bp, Homo sapiens
agctgacatgtatag

SEQ ID NO: 843957 - DNA, 15 bp, Homo sapiens
gctgacatgtataga

SEQ ID NO: 843958 - DNA, 15 bp, Homo sapiens
ctgacatgtatagac

SEQ ID NO: 843959 - DNA, 15 bp, Homo sapiens
tgacatgtatagact

SEQ ID NO: 843960 - DNA, 15 bp, Homo sapiens
gacatgtatagactg

SEQ ID NO: 843961 - DNA, 15 bp, Homo sapiens
acatgtatagactgt

SEQ ID NO: 843962 - DNA, 15 bp, Homo sapiens
catgtatagactgtc

SEQ ID NO: 843963 - DNA, 15 bp, Homo sapiens
atgtatagactgtct

SEQ ID NO: 843964 - DNA, 15 bp, Homo sapiens
tgtatagactgtcta

SEQ ID NO: 843965 - DNA, 15 bp, Homo sapiens
gtatagactgtctac

SEQ ID NO: 843966 - DNA, 15 bp, Homo sapiens
tatagactgtctaca

SEQ ID NO: 843967 - DNA, 15 bp, Homo sapiens
atagactgtctacaa

SEQ ID NO: 843968 - DNA, 15 bp, Homo sapiens
tagactgtctacaag

SEQ ID NO: 843969 - DNA, 15 bp, Homo sapiens
agactgtctacaagg

SEQ ID NO: 843970 - DNA, 15 bp, Homo sapiens
gactgtctacaaggt

SEQ ID NO: 843971 - DNA, 15 bp, Homo sapiens
actgtctacaaggta

SEQ ID NO: 843972 - DNA, 15 bp, Homo sapiens
ctgtctacaaggtac

SEQ ID NO: 843973 - DNA, 15 bp, Homo sapiens
tgtctacaaggtaca

SEQ ID NO: 843974 - DNA, 15 bp, Homo sapiens
gtctacaaggtacaa

SEQ ID NO: 843975 - DNA, 15 bp, Homo sapiens
tctacaaggtacaaa

SEQ ID NO: 843976 - DNA, 15 bp, Homo sapiens
ctacaaggtacaaac

SEQ ID NO: 843977 - DNA, 15 bp, Homo sapiens
tacaaggtacaaact

SEQ ID NO: 843978 - DNA, 15 bp, Homo sapiens
acaaggtacaaactc

SEQ ID NO: 843979 - DNA, 15 bp, Homo sapiens
caaggtacaaactca

SEQ ID NO: 843980 - DNA, 15 bp, Homo sapiens
aaggtacaaactcaa

SEQ ID NO: 843981 - DNA, 15 bp, Homo sapiens
aggtacaaactcaat

SEQ ID NO: 843982 - DNA, 15 bp, Homo sapiens
ggtacaaactcaata

SEQ ID NO: 843983 - DNA, 15 bp, Homo sapiens
gtacaaactcaataa

SEQ ID NO: 843984 - DNA, 15 bp, Homo sapiens
tacaaactcaataaa

SEQ ID NO: 843985 - DNA, 15 bp, Homo sapiens
acaaactcaataaat

SEQ ID NO: 843986 - DNA, 15 bp, Homo sapiens
caaactcaataaatg

SEQ ID NO: 843987 - DNA, 15 bp, Homo sapiens
aaactcaataaatgc

SEQ ID NO: 843988 - DNA, 15 bp, Homo sapiens
aactcaataaatgcc

SEQ ID NO: 843989 - DNA, 15 bp, Homo sapiens
actcaataaatgcca

SEQ ID NO: 843990 - DNA, 15 bp, Homo sapiens
ctcaataaatgccat

SEQ ID NO: 843991 - DNA, 15 bp, Homo sapiens
tcaataaatgccatc

SEQ ID NO: 843992 - DNA, 15 bp, Homo sapiens
caataaatgccatct

SEQ ID NO: 843993 - DNA, 15 bp, Homo sapiens
aataaatgccatctc

SEQ ID NO: 843994 - DNA, 15 bp, Homo sapiens
ataaatgccatctct

SEQ ID NO: 843995 - DNA, 15 bp, Homo sapiens
taaatgccatctctt

SEQ ID NO: 843996 - DNA, 15 bp, Homo sapiens
aaatgccatctctta

SEQ ID NO: 843997 - DNA, 15 bp, Homo sapiens
aatgccatctcttag

SEQ ID NO: 843998 - DNA, 15 bp, Homo sapiens
atgccatctcttagt

SEQ ID NO: 843999 - DNA, 15 bp, Homo sapiens
tgccatctcttagta

SEQ ID NO: 844000 - DNA, 15 bp, Homo sapiens
gccatctcttagtat

SEQ ID NO: 844001 - DNA, 15 bp, Homo sapiens
ccatctcttagtatg

SEQ ID NO: 844002 - DNA, 15 bp, Homo sapiens
catctcttagtatgg

SEQ ID NO: 844003 - DNA, 15 bp, Homo sapiens
atctcttagtatggt

SEQ ID NO: 844004 - DNA, 15 bp, Homo sapiens
tctcttagtatggtt

SEQ ID NO: 844005 - DNA, 15 bp, Homo sapiens
ctcttagtatggtta

SEQ ID NO: 844006 - DNA, 15 bp, Homo sapiens
tcttagtatggttag

SEQ ID NO: 844007 - DNA, 15 bp, Homo sapiens
cttagtatggttaga

SEQ ID NO: 844008 - DNA, 15 bp, Homo sapiens
ttagtatggttagaa

SEQ ID NO: 844009 - DNA, 15 bp, Homo sapiens
tagtatggttagaac

SEQ ID NO: 844010 - DNA, 15 bp, Homo sapiens
agtatggttagaaca

SEQ ID NO: 844011 - DNA, 15 bp, Homo sapiens
gtatggttagaacac

SEQ ID NO: 844012 - DNA, 15 bp, Homo sapiens
tatggttagaacaca

SEQ ID NO: 844013 - DNA, 15 bp, Homo sapiens
atggttagaacacat

SEQ ID NO: 844014 - DNA, 15 bp, Homo sapiens
tggttagaacacatg

SEQ ID NO: 844015 - DNA, 15 bp, Homo sapiens
ggttagaacacatgc

SEQ ID NO: 844016 - DNA, 15 bp, Homo sapiens
gttagaacacatgct

SEQ ID NO: 844017 - DNA, 15 bp, Homo sapiens
ttagaacacatgctc

SEQ ID NO: 844018 - DNA, 15 bp, Homo sapiens
tagaacacatgctca

SEQ ID NO: 844019 - DNA, 15 bp, Homo sapiens
agaacacatgctcat

SEQ ID NO: 844020 - DNA, 15 bp, Homo sapiens
gaacacatgctcatc

SEQ ID NO: 844021 - DNA, 15 bp, Homo sapiens
aacacatgctcatct

SEQ ID NO: 844022 - DNA, 15 bp, Homo sapiens
acacatgctcatctg

SEQ ID NO: 844023 - DNA, 15 bp, Homo sapiens
cacatgctcatctgt

SEQ ID NO: 844024 - DNA, 15 bp, Homo sapiens
acatgctcatctgtt

SEQ ID NO: 844025 - DNA, 15 bp, Homo sapiens
catgctcatctgttg

SEQ ID NO: 844026 - DNA, 15 bp, Homo sapiens
atgctcatctgttgc

SEQ ID NO: 844027 - DNA, 15 bp, Homo sapiens
tgctcatctgttgca

SEQ ID NO: 844028 - DNA, 15 bp, Homo sapiens
gctcatctgttgcat

SEQ ID NO: 844029 - DNA, 15 bp, Homo sapiens
ctcatctgttgcata

SEQ ID NO: 844030 - DNA, 15 bp, Homo sapiens
tcatctgttgcatag

SEQ ID NO: 844031 - DNA, 15 bp, Homo sapiens
catctgttgcataga

SEQ ID NO: 844032 - DNA, 15 bp, Homo sapiens
atctgttgcatagaa

SEQ ID NO: 844033 - DNA, 15 bp, Homo sapiens
tctgttgcatagaaa

SEQ ID NO: 844034 - DNA, 15 bp, Homo sapiens
ctgttgcatagaaag

SEQ ID NO: 844035 - DNA, 15 bp, Homo sapiens
tgttgcatagaaagt

SEQ ID NO: 844036 - DNA, 15 bp, Homo sapiens
gttgcatagaaagta

SEQ ID NO: 844037 - DNA, 15 bp, Homo sapiens
ttgcatagaaagtac

SEQ ID NO: 844038 - DNA, 15 bp, Homo sapiens
tgcatagaaagtact

SEQ ID NO: 844039 - DNA, 15 bp, Homo sapiens
gcatagaaagtactc

SEQ ID NO: 844040 - DNA, 15 bp, Homo sapiens
catagaaagtactcc

SEQ ID NO: 844041 - DNA, 15 bp, Homo sapiens
atagaaagtactcca

SEQ ID NO: 844042 - DNA, 15 bp, Homo sapiens
tagaaagtactccac

SEQ ID NO: 844043 - DNA, 15 bp, Homo sapiens
agaaagtactccaca

SEQ ID NO: 844044 - DNA, 15 bp, Homo sapiens
gaaagtactccacaa

SEQ ID NO: 844045 - DNA, 15 bp, Homo sapiens
aaagtactccacaaa

SEQ ID NO: 844046 - DNA, 15 bp, Homo sapiens
aagtactccacaaat

SEQ ID NO: 844047 - DNA, 15 bp, Homo sapiens
agtactccacaaatg

SEQ ID NO: 844048 - DNA, 15 bp, Homo sapiens
gtactccacaaatgt

SEQ ID NO: 844049 - DNA, 15 bp, Homo sapiens
tactccacaaatgtt

SEQ ID NO: 844050 - DNA, 15 bp, Homo sapiens
actccacaaatgtta

SEQ ID NO: 844051 - DNA, 15 bp, Homo sapiens
ctccacaaatgttag

SEQ ID NO: 844052 - DNA, 15 bp, Homo sapiens
tccacaaatgttagc

SEQ ID NO: 844053 - DNA, 15 bp, Homo sapiens
ccacaaatgttagct

SEQ ID NO: 844054 - DNA, 15 bp, Homo sapiens
cacaaatgttagcta

SEQ ID NO: 844055 - DNA, 15 bp, Homo sapiens
acaaatgttagctat

SEQ ID NO: 844056 - DNA, 15 bp, Homo sapiens
caaatgttagctatt

SEQ ID NO: 844057 - DNA, 15 bp, Homo sapiens
aaatgttagctattt

SEQ ID NO: 844058 - DNA, 15 bp, Homo sapiens
aatgttagctatttg

SEQ ID NO: 844059 - DNA, 15 bp, Homo sapiens
atgttagctatttgc

SEQ ID NO: 844060 - DNA, 15 bp, Homo sapiens
tgttagctatttgcc

SEQ ID NO: 844061 - DNA, 15 bp, Homo sapiens
gttagctatttgcca

SEQ ID NO: 844062 - DNA, 15 bp, Homo sapiens
ttagctatttgccag

SEQ ID NO: 844063 - DNA, 15 bp, Homo sapiens
tagctatttgccagg

SEQ ID NO: 844064 - DNA, 15 bp, Homo sapiens
agctatttgccaggc

SEQ ID NO: 844065 - DNA, 15 bp, Homo sapiens
gctatttgccaggca

SEQ ID NO: 844066 - DNA, 15 bp, Homo sapiens
ctatttgccaggcac

SEQ ID NO: 844067 - DNA, 15 bp, Homo sapiens
tatttgccaggcacc

SEQ ID NO: 844068 - DNA, 15 bp, Homo sapiens
atttgccaggcaccc

SEQ ID NO: 844069 - DNA, 15 bp, Homo sapiens
tttgccaggcaccct

SEQ ID NO: 844070 - DNA, 15 bp, Homo sapiens
ttgccaggcaccctg

SEQ ID NO: 844071 - DNA, 15 bp, Homo sapiens
tgccaggcaccctgc

SEQ ID NO: 844072 - DNA, 15 bp, Homo sapiens
gccaggcaccctgct

SEQ ID NO: 844073 - DNA, 15 bp, Homo sapiens
ccaggcaccctgcta

SEQ ID NO: 844074 - DNA, 15 bp, Homo sapiens
caggcaccctgctaa

SEQ ID NO: 844075 - DNA, 15 bp, Homo sapiens
aggcaccctgctaag

SEQ ID NO: 844076 - DNA, 15 bp, Homo sapiens
ggcaccctgctaagc

SEQ ID NO: 844077 - DNA, 15 bp, Homo sapiens
gcaccctgctaagca

SEQ ID NO: 844078 - DNA, 15 bp, Homo sapiens
caccctgctaagcac

SEQ ID NO: 844079 - DNA, 15 bp, Homo sapiens
accctgctaagcact

SEQ ID NO: 844080 - DNA, 15 bp, Homo sapiens
ccctgctaagcactt

SEQ ID NO: 844081 - DNA, 15 bp, Homo sapiens
cctgctaagcacttt

SEQ ID NO: 844082 - DNA, 15 bp, Homo sapiens
ctgctaagcacttta

SEQ ID NO: 844083 - DNA, 15 bp, Homo sapiens
tgctaagcactttac

SEQ ID NO: 844084 - DNA, 15 bp, Homo sapiens
gctaagcactttaca

SEQ ID NO: 844085 - DNA, 15 bp, Homo sapiens
ctaagcactttacat

SEQ ID NO: 844086 - DNA, 15 bp, Homo sapiens
taagcactttacatg

SEQ ID NO: 844087 - DNA, 15 bp, Homo sapiens
aagcactttacatgc

SEQ ID NO: 844088 - DNA, 15 bp, Homo sapiens
agcactttacatgca

SEQ ID NO: 844089 - DNA, 15 bp, Homo sapiens
gcactttacatgcac

SEQ ID NO: 844090 - DNA, 15 bp, Homo sapiens
cactttacatgcacc

SEQ ID NO: 844091 - DNA, 15 bp, Homo sapiens
actttacatgcacca

SEQ ID NO: 844092 - DNA, 15 bp, Homo sapiens
ctttacatgcaccac

SEQ ID NO: 844093 - DNA, 15 bp, Homo sapiens
tttacatgcaccacc

SEQ ID NO: 844094 - DNA, 15 bp, Homo sapiens
ttacatgcaccacct

SEQ ID NO: 844095 - DNA, 15 bp, Homo sapiens
tacatgcaccacctc

SEQ ID NO: 844096 - DNA, 15 bp, Homo sapiens
acatgcaccacctca

SEQ ID NO: 844097 - DNA, 15 bp, Homo sapiens
catgcaccacctcat

SEQ ID NO: 844098 - DNA, 15 bp, Homo sapiens
atgcaccacctcatt

SEQ ID NO: 844099 - DNA, 15 bp, Homo sapiens
tgcaccacctcattt

SEQ ID NO: 844100 - DNA, 15 bp, Homo sapiens
gcaccacctcatttc

SEQ ID NO: 844101 - DNA, 15 bp, Homo sapiens
caccacctcatttca

SEQ ID NO: 844102 - DNA, 15 bp, Homo sapiens
accacctcatttcag

SEQ ID NO: 844103 - DNA, 15 bp, Homo sapiens
ccacctcatttcagc

SEQ ID NO: 844104 - DNA, 15 bp, Homo sapiens
cacctcatttcagct

SEQ ID NO: 844105 - DNA, 15 bp, Homo sapiens
acctcatttcagctg

SEQ ID NO: 844106 - DNA, 15 bp, Homo sapiens
cctcatttcagctgc

SEQ ID NO: 844107 - DNA, 15 bp, Homo sapiens
ctcatttcagctgcc

SEQ ID NO: 844108 - DNA, 15 bp, Homo sapiens
tcatttcagctgcct

SEQ ID NO: 844109 - DNA, 15 bp, Homo sapiens
catttcagctgcctc

SEQ ID NO: 844110 - DNA, 15 bp, Homo sapiens
atttcagctgcctcc

SEQ ID NO: 844111 - DNA, 15 bp, Homo sapiens
tttcagctgcctccc

SEQ ID NO: 844112 - DNA, 15 bp, Homo sapiens
ttcagctgcctccct

SEQ ID NO: 844113 - DNA, 15 bp, Homo sapiens
tcagctgcctcccta

SEQ ID NO: 844114 - DNA, 15 bp, Homo sapiens
cagctgcctccctag

SEQ ID NO: 844115 - DNA, 15 bp, Homo sapiens
agctgcctccctagg

SEQ ID NO: 844116 - DNA, 15 bp, Homo sapiens
gctgcctccctagga

SEQ ID NO: 844117 - DNA, 15 bp, Homo sapiens
ctgcctccctaggag

SEQ ID NO: 844118 - DNA, 15 bp, Homo sapiens
tgcctccctaggagg

SEQ ID NO: 844119 - DNA, 15 bp, Homo sapiens
gcctccctaggaggt

SEQ ID NO: 844120 - DNA, 15 bp, Homo sapiens
cctccctaggaggta

SEQ ID NO: 844121 - DNA, 15 bp, Homo sapiens
ctccctaggaggtag

SEQ ID NO: 844122 - DNA, 15 bp, Homo sapiens
tccctaggaggtagg

SEQ ID NO: 844123 - DNA, 15 bp, Homo sapiens
ccctaggaggtaggt

SEQ ID NO: 844124 - DNA, 15 bp, Homo sapiens
cctaggaggtaggta

SEQ ID NO: 844125 - DNA, 15 bp, Homo sapiens
ctaggaggtaggtac

SEQ ID NO: 844126 - DNA, 15 bp, Homo sapiens
taggaggtaggtact

SEQ ID NO: 844127 - DNA, 15 bp, Homo sapiens
aggaggtaggtacta

SEQ ID NO: 844128 - DNA, 15 bp, Homo sapiens
ggaggtaggtactag

SEQ ID NO: 844129 - DNA, 15 bp, Homo sapiens
gaggtaggtactagt

SEQ ID NO: 844130 - DNA, 15 bp, Homo sapiens
aggtaggtactagtg

SEQ ID NO: 844131 - DNA, 15 bp, Homo sapiens
ggtaggtactagtgt

SEQ ID NO: 844132 - DNA, 15 bp, Homo sapiens
gtaggtactagtgtt

SEQ ID NO: 844133 - DNA, 15 bp, Homo sapiens
taggtactagtgttg

SEQ ID NO: 844134 - DNA, 15 bp, Homo sapiens
aggtactagtgttgc

SEQ ID NO: 844135 - DNA, 15 bp, Homo sapiens
ggtactagtgttgct

SEQ ID NO: 844136 - DNA, 15 bp, Homo sapiens
gtactagtgttgctc

SEQ ID NO: 844137 - DNA, 15 bp, Homo sapiens
tactagtgttgctct

SEQ ID NO: 844138 - DNA, 15 bp, Homo sapiens
actagtgttgctctc

SEQ ID NO: 844139 - DNA, 15 bp, Homo sapiens
ctagtgttgctctca

SEQ ID NO: 844140 - DNA, 15 bp, Homo sapiens
tagtgttgctctcat

SEQ ID NO: 844141 - DNA, 15 bp, Homo sapiens
agtgttgctctcatt

SEQ ID NO: 844142 - DNA, 15 bp, Homo sapiens
gtgttgctctcattt

SEQ ID NO: 844143 - DNA, 15 bp, Homo sapiens
tgttgctctcatttt

SEQ ID NO: 844144 - DNA, 15 bp, Homo sapiens
gttgctctcattttg

SEQ ID NO: 844145 - DNA, 15 bp, Homo sapiens
ttgctctcattttgc

SEQ ID NO: 844146 - DNA, 15 bp, Homo sapiens
tgctctcattttgca

SEQ ID NO: 844147 - DNA, 15 bp, Homo sapiens
gctctcattttgcag

SEQ ID NO: 844148 - DNA, 15 bp, Homo sapiens
ctctcattttgcagg

SEQ ID NO: 844149 - DNA, 15 bp, Homo sapiens
tctcattttgcaggt

SEQ ID NO: 844150 - DNA, 15 bp, Homo sapiens
ctcattttgcaggtg

SEQ ID NO: 844151 - DNA, 15 bp, Homo sapiens
tcattttgcaggtga

SEQ ID NO: 844152 - DNA, 15 bp, Homo sapiens
cattttgcaggtgaa

SEQ ID NO: 844153 - DNA, 15 bp, Homo sapiens
attttgcaggtgaag

SEQ ID NO: 844154 - DNA, 15 bp, Homo sapiens
ttttgcaggtgaagg

SEQ ID NO: 844155 - DNA, 15 bp, Homo sapiens
tttgcaggtgaaggg

SEQ ID NO: 844156 - DNA, 15 bp, Homo sapiens
ttgcaggtgaaggga

SEQ ID NO: 844157 - DNA, 15 bp, Homo sapiens
tgcaggtgaagggaa

SEQ ID NO: 844158 - DNA, 15 bp, Homo sapiens
gcaggtgaagggaat

SEQ ID NO: 844159 - DNA, 15 bp, Homo sapiens
caggtgaagggaatt

SEQ ID NO: 844160 - DNA, 15 bp, Homo sapiens
aggtgaagggaatta

SEQ ID NO: 844161 - DNA, 15 bp, Homo sapiens
ggtgaagggaattaa

SEQ ID NO: 844162 - DNA, 15 bp, Homo sapiens
gtgaagggaattaag

SEQ ID NO: 844163 - DNA, 15 bp, Homo sapiens
tgaagggaattaagg

SEQ ID NO: 844164 - DNA, 15 bp, Homo sapiens
gaagggaattaaggc

SEQ ID NO: 844165 - DNA, 15 bp, Homo sapiens
aagggaattaaggct

SEQ ID NO: 844166 - DNA, 15 bp, Homo sapiens
agggaattaaggctt

SEQ ID NO: 844167 - DNA, 15 bp, Homo sapiens
gggaattaaggcttg

SEQ ID NO: 844168 - DNA, 15 bp, Homo sapiens
ggaattaaggcttgg

SEQ ID NO: 844169 - DNA, 15 bp, Homo sapiens
gaattaaggcttgga

SEQ ID NO: 844170 - DNA, 15 bp, Homo sapiens
aattaaggcttggag

SEQ ID NO: 844171 - DNA, 15 bp, Homo sapiens
attaaggcttggaga

SEQ ID NO: 844172 - DNA, 15 bp, Homo sapiens
ttaaggcttggagag

SEQ ID NO: 844173 - DNA, 15 bp, Homo sapiens
taaggcttggagagg

SEQ ID NO: 844174 - DNA, 15 bp, Homo sapiens
aaggcttggagaggt

SEQ ID NO: 844175 - DNA, 15 bp, Homo sapiens
aggcttggagaggtt

SEQ ID NO: 844176 - DNA, 15 bp, Homo sapiens
ggcttggagaggtta

SEQ ID NO: 844177 - DNA, 15 bp, Homo sapiens
gcttggagaggttat

SEQ ID NO: 844178 - DNA, 15 bp, Homo sapiens
cttggagaggttatg

SEQ ID NO: 844179 - DNA, 15 bp, Homo sapiens
ttggagaggttatgc

SEQ ID NO: 844180 - DNA, 15 bp, Homo sapiens
tggagaggttatgct

SEQ ID NO: 844181 - DNA, 15 bp, Homo sapiens
ggagaggttatgctc

SEQ ID NO: 844182 - DNA, 15 bp, Homo sapiens
gagaggttatgctcc

SEQ ID NO: 844183 - DNA, 15 bp, Homo sapiens
agaggttatgctcct

SEQ ID NO: 844184 - DNA, 15 bp, Homo sapiens
gaggttatgctcctt

SEQ ID NO: 844185 - DNA, 15 bp, Homo sapiens
aggttatgctccttg

SEQ ID NO: 844186 - DNA, 15 bp, Homo sapiens
ggttatgctccttgg

SEQ ID NO: 844187 - DNA, 15 bp, Homo sapiens
gttatgctccttggc

SEQ ID NO: 844188 - DNA, 15 bp, Homo sapiens
ttatgctccttggct

SEQ ID NO: 844189 - DNA, 15 bp, Homo sapiens
tatgctccttggctc

SEQ ID NO: 844190 - DNA, 15 bp, Homo sapiens
atgctccttggctca

SEQ ID NO: 844191 - DNA, 15 bp, Homo sapiens
tgctccttggctcag

SEQ ID NO: 844192 - DNA, 15 bp, Homo sapiens
gctccttggctcagg

SEQ ID NO: 844193 - DNA, 15 bp, Homo sapiens
ctccttggctcagga

SEQ ID NO: 844194 - DNA, 15 bp, Homo sapiens
tccttggctcaggag

SEQ ID NO: 844195 - DNA, 15 bp, Homo sapiens
ccttggctcaggagc

SEQ ID NO: 844196 - DNA, 15 bp, Homo sapiens
cttggctcaggagca

SEQ ID NO: 844197 - DNA, 15 bp, Homo sapiens
ttggctcaggagcac

SEQ ID NO: 844198 - DNA, 15 bp, Homo sapiens
tggctcaggagcaca

SEQ ID NO: 844199 - DNA, 15 bp, Homo sapiens
ggctcaggagcacat

SEQ ID NO: 844200 - DNA, 15 bp, Homo sapiens
gctcaggagcacatg

SEQ ID NO: 844201 - DNA, 15 bp, Homo sapiens
ctcaggagcacatga

SEQ ID NO: 844202 - DNA, 15 bp, Homo sapiens
tcaggagcacatgat

SEQ ID NO: 844203 - DNA, 15 bp, Homo sapiens
caggagcacatgata

SEQ ID NO: 844204 - DNA, 15 bp, Homo sapiens
aggagcacatgataa

SEQ ID NO: 844205 - DNA, 15 bp, Homo sapiens
ggagcacatgataag

SEQ ID NO: 844206 - DNA, 15 bp, Homo sapiens
gagcacatgataagg

SEQ ID NO: 844207 - DNA, 15 bp, Homo sapiens
agcacatgataaggc

SEQ ID NO: 844208 - DNA, 15 bp, Homo sapiens
gcacatgataaggct

SEQ ID NO: 844209 - DNA, 15 bp, Homo sapiens
cacatgataaggctg

SEQ ID NO: 844210 - DNA, 15 bp, Homo sapiens
acatgataaggctgg

SEQ ID NO: 844211 - DNA, 15 bp, Homo sapiens
catgataaggctggg

SEQ ID NO: 844212 - DNA, 15 bp, Homo sapiens
atgataaggctggga

SEQ ID NO: 844213 - DNA, 15 bp, Homo sapiens
ataaggctgggattt

SEQ ID NO: 844214 - DNA, 15 bp, Homo sapiens
taaggctgggatttt

SEQ ID NO: 844215 - DNA, 15 bp, Homo sapiens
aaggctgggattttt

SEQ ID NO: 844216 - DNA, 15 bp, Homo sapiens
aggctgggatttttt

SEQ ID NO: 844217 - DNA, 15 bp, Homo sapiens
ggctgggattttttg

SEQ ID NO: 844218 - DNA, 15 bp, Homo sapiens
gctgggattttttga

SEQ ID NO: 844219 - DNA, 15 bp, Homo sapiens
ctgggattttttgaa

SEQ ID NO: 844220 - DNA, 15 bp, Homo sapiens
tgggattttttgaag

SEQ ID NO: 844221 - DNA, 15 bp, Homo sapiens
gggattttttgaagc

SEQ ID NO: 844222 - DNA, 15 bp, Homo sapiens
ggattttttgaagcc

SEQ ID NO: 844223 - DNA, 15 bp, Homo sapiens
gattttttgaagcca

SEQ ID NO: 844224 - DNA, 15 bp, Homo sapiens
attttttgaagccag

SEQ ID NO: 844225 - DNA, 15 bp, Homo sapiens
ttttttgaagccaga

SEQ ID NO: 844226 - DNA, 15 bp, Homo sapiens
tttttgaagccagag

SEQ ID NO: 844227 - DNA, 15 bp, Homo sapiens
ttttgaagccagagg

SEQ ID NO: 844228 - DNA, 15 bp, Homo sapiens
tttgaagccagaggc

SEQ ID NO: 844229 - DNA, 15 bp, Homo sapiens
ttgaagccagaggct

SEQ ID NO: 844230 - DNA, 15 bp, Homo sapiens
tgaagccagaggctg

SEQ ID NO: 844231 - DNA, 15 bp, Homo sapiens
gaagccagaggctgc

SEQ ID NO: 844232 - DNA, 15 bp, Homo sapiens
aagccagaggctgcg

SEQ ID NO: 844233 - DNA, 15 bp, Homo sapiens
agccagaggctgcgt

SEQ ID NO: 844234 - DNA, 15 bp, Homo sapiens
gccagaggctgcgtg

SEQ ID NO: 844235 - DNA, 15 bp, Homo sapiens
ccagaggctgcgtga

SEQ ID NO: 844236 - DNA, 15 bp, Homo sapiens
cagaggctgcgtgaa

SEQ ID NO: 844237 - DNA, 15 bp, Homo sapiens
agaggctgcgtgaac

SEQ ID NO: 844238 - DNA, 15 bp, Homo sapiens
gaggctgcgtgaact

SEQ ID NO: 844239 - DNA, 15 bp, Homo sapiens
aggctgcgtgaactt

SEQ ID NO: 844240 - DNA, 15 bp, Homo sapiens
ggctgcgtgaactta

SEQ ID NO: 844241 - DNA, 15 bp, Homo sapiens
gctgcgtgaacttag

SEQ ID NO: 844242 - DNA, 15 bp, Homo sapiens
ctgcgtgaacttagg

SEQ ID NO: 844243 - DNA, 15 bp, Homo sapiens
tgcgtgaacttaggc

SEQ ID NO: 844244 - DNA, 15 bp, Homo sapiens
gcgtgaacttaggca

SEQ ID NO: 844245 - DNA, 15 bp, Homo sapiens
cgtgaacttaggcac

SEQ ID NO: 844246 - DNA, 15 bp, Homo sapiens
gtgaacttaggcact

SEQ ID NO: 844247 - DNA, 15 bp, Homo sapiens
tgaacttaggcactt

SEQ ID NO: 844248 - DNA, 15 bp, Homo sapiens
gaacttaggcacttc

SEQ ID NO: 844249 - DNA, 15 bp, Homo sapiens
aacttaggcacttcc

SEQ ID NO: 844250 - DNA, 15 bp, Homo sapiens
acttaggcacttccc

SEQ ID NO: 844251 - DNA, 15 bp, Homo sapiens
cttaggcacttccct

SEQ ID NO: 844252 - DNA, 15 bp, Homo sapiens
ttaggcacttccctg

SEQ ID NO: 844253 - DNA, 15 bp, Homo sapiens
taggcacttccctgc

SEQ ID NO: 844254 - DNA, 15 bp, Homo sapiens
aggcacttccctgct

SEQ ID NO: 844255 - DNA, 15 bp, Homo sapiens
ggcacttccctgctg

SEQ ID NO: 844256 - DNA, 15 bp, Homo sapiens
gcacttccctgctgt

SEQ ID NO: 844257 - DNA, 15 bp, Homo sapiens
cacttccctgctgta

SEQ ID NO: 844258 - DNA, 15 bp, Homo sapiens
acttccctgctgtac

SEQ ID NO: 844259 - DNA, 15 bp, Homo sapiens
cttccctgctgtact

SEQ ID NO: 844260 - DNA, 15 bp, Homo sapiens
ttccctgctgtactc

SEQ ID NO: 844261 - DNA, 15 bp, Homo sapiens
tccctgctgtactca

SEQ ID NO: 844262 - DNA, 15 bp, Homo sapiens
ccctgctgtactcag

SEQ ID NO: 844263 - DNA, 15 bp, Homo sapiens
cctgctgtactcagt

SEQ ID NO: 844264 - DNA, 15 bp, Homo sapiens
ctgctgtactcagtg

SEQ ID NO: 844265 - DNA, 15 bp, Homo sapiens
tgctgtactcagtga

SEQ ID NO: 844266 - DNA, 15 bp, Homo sapiens
gctgtactcagtgag

SEQ ID NO: 844267 - DNA, 15 bp, Homo sapiens
ctgtactcagtgagc

SEQ ID NO: 844268 - DNA, 15 bp, Homo sapiens
tgtactcagtgagca

SEQ ID NO: 844269 - DNA, 15 bp, Homo sapiens
gtactcagtgagcac

SEQ ID NO: 844270 - DNA, 15 bp, Homo sapiens
tactcagtgagcact

SEQ ID NO: 844271 - DNA, 15 bp, Homo sapiens
actcagtgagcactc

SEQ ID NO: 844272 - DNA, 15 bp, Homo sapiens
ctcagtgagcactca

SEQ ID NO: 844273 - DNA, 15 bp, Homo sapiens
tcagtgagcactcag

SEQ ID NO: 844274 - DNA, 15 bp, Homo sapiens
cagtgagcactcagg

SEQ ID NO: 844275 - DNA, 15 bp, Homo sapiens
agtgagcactcagga

SEQ ID NO: 844276 - DNA, 15 bp, Homo sapiens
gtgagcactcaggat

SEQ ID NO: 844277 - DNA, 15 bp, Homo sapiens
tgagcactcaggatc

SEQ ID NO: 844278 - DNA, 15 bp, Homo sapiens
gagcactcaggatca

SEQ ID NO: 844279 - DNA, 15 bp, Homo sapiens
agcactcaggatcat

SEQ ID NO: 844280 - DNA, 15 bp, Homo sapiens
gcactcaggatcatg

SEQ ID NO: 844281 - DNA, 15 bp, Homo sapiens
cactcaggatcatgg

SEQ ID NO: 844282 - DNA, 15 bp, Homo sapiens
actcaggatcatggt

SEQ ID NO: 844283 - DNA, 15 bp, Homo sapiens
ctcaggatcatggtt

SEQ ID NO: 844284 - DNA, 15 bp, Homo sapiens
tcaggatcatggttt

SEQ ID NO: 844285 - DNA, 15 bp, Homo sapiens
caggatcatggtttc

SEQ ID NO: 844286 - DNA, 15 bp, Homo sapiens
aggatcatggtttcc

SEQ ID NO: 844287 - DNA, 15 bp, Homo sapiens
ggatcatggtttcct

SEQ ID NO: 844288 - DNA, 15 bp, Homo sapiens
gatcatggtttcctc

SEQ ID NO: 844289 - DNA, 15 bp, Homo sapiens
atcatggtttcctcc

SEQ ID NO: 844290 - DNA, 15 bp, Homo sapiens
tcatggtttcctcct

SEQ ID NO: 844291 - DNA, 15 bp, Homo sapiens
catggtttcctcctc

SEQ ID NO: 844292 - DNA, 15 bp, Homo sapiens
atggtttcctcctca

SEQ ID NO: 844293 - DNA, 15 bp, Homo sapiens
tggtttcctcctcaa

SEQ ID NO: 844294 - DNA, 15 bp, Homo sapiens
ggtttcctcctcaaa

SEQ ID NO: 844295 - DNA, 15 bp, Homo sapiens
gtttcctcctcaaag

SEQ ID NO: 844296 - DNA, 15 bp, Homo sapiens
tttcctcctcaaagg

SEQ ID NO: 844297 - DNA, 15 bp, Homo sapiens
ttcctcctcaaagga

SEQ ID NO: 844298 - DNA, 15 bp, Homo sapiens
tcctcctcaaaggaa

SEQ ID NO: 844299 - DNA, 15 bp, Homo sapiens
cctcctcaaaggaaa

SEQ ID NO: 844300 - DNA, 15 bp, Homo sapiens
ctcctcaaaggaaaa

SEQ ID NO: 844301 - DNA, 15 bp, Homo sapiens
tcctcaaaggaaaac

SEQ ID NO: 844302 - DNA, 15 bp, Homo sapiens
cctcaaaggaaaact

SEQ ID NO: 844303 - DNA, 15 bp, Homo sapiens
ctcaaaggaaaactg

SEQ ID NO: 844304 - DNA, 15 bp, Homo sapiens
tcaaaggaaaactgc

SEQ ID NO: 844305 - DNA, 15 bp, Homo sapiens
caaaggaaaactgct

SEQ ID NO: 844306 - DNA, 15 bp, Homo sapiens
aaaggaaaactgcta

SEQ ID NO: 844307 - DNA, 15 bp, Homo sapiens
aaggaaaactgctaa

SEQ ID NO: 844308 - DNA, 15 bp, Homo sapiens
aggaaaactgctaag

SEQ ID NO: 844309 - DNA, 15 bp, Homo sapiens
ggaaaactgctaagc

SEQ ID NO: 844310 - DNA, 15 bp, Homo sapiens
gaaaactgctaagcc

SEQ ID NO: 844311 - DNA, 15 bp, Homo sapiens
aaaactgctaagccc

SEQ ID NO: 844312 - DNA, 15 bp, Homo sapiens
aaactgctaagccca

SEQ ID NO: 844313 - DNA, 15 bp, Homo sapiens
aactgctaagcccag

SEQ ID NO: 844314 - DNA, 15 bp, Homo sapiens
actgctaagcccagc

SEQ ID NO: 844315 - DNA, 15 bp, Homo sapiens
ctgctaagcccagct

SEQ ID NO: 844316 - DNA, 15 bp, Homo sapiens
tgctaagcccagcta

SEQ ID NO: 844317 - DNA, 15 bp, Homo sapiens
gctaagcccagctaa

SEQ ID NO: 844318 - DNA, 15 bp, Homo sapiens
ctaagcccagctaaa

SEQ ID NO: 844319 - DNA, 15 bp, Homo sapiens
taagcccagctaaat

SEQ ID NO: 844320 - DNA, 15 bp, Homo sapiens
aagcccagctaaata

SEQ ID NO: 844321 - DNA, 15 bp, Homo sapiens
agcccagctaaatac

SEQ ID NO: 844322 - DNA, 15 bp, Homo sapiens
gcccagctaaatacc

SEQ ID NO: 844323 - DNA, 15 bp, Homo sapiens
cccagctaaatacct

SEQ ID NO: 844324 - DNA, 15 bp, Homo sapiens
ccagctaaatacctc

SEQ ID NO: 844325 - DNA, 15 bp, Homo sapiens
cagctaaatacctca

SEQ ID NO: 844326 - DNA, 15 bp, Homo sapiens
agctaaatacctcag

SEQ ID NO: 844327 - DNA, 15 bp, Homo sapiens
gctaaatacctcagc

SEQ ID NO: 844328 - DNA, 15 bp, Homo sapiens
ctaaatacctcagca

SEQ ID NO: 844329 - DNA, 15 bp, Homo sapiens
taaatacctcagcaa

SEQ ID NO: 844330 - DNA, 15 bp, Homo sapiens
aaatacctcagcaat

SEQ ID NO: 844331 - DNA, 15 bp, Homo sapiens
aatacctcagcaatt

SEQ ID NO: 844332 - DNA, 15 bp, Homo sapiens
atacctcagcaattt

SEQ ID NO: 844333 - DNA, 15 bp, Homo sapiens
tacctcagcaattta

SEQ ID NO: 844334 - DNA, 15 bp, Homo sapiens
acctcagcaatttat

SEQ ID NO: 844335 - DNA, 15 bp, Homo sapiens
cctcagcaatttata

SEQ ID NO: 844336 - DNA, 15 bp, Homo sapiens
ctcagcaatttatag

SEQ ID NO: 844337 - DNA, 15 bp, Homo sapiens
tcagcaatttatagg

SEQ ID NO: 844338 - DNA, 15 bp, Homo sapiens
cagcaatttataggc

SEQ ID NO: 844339 - DNA, 15 bp, Homo sapiens
agcaatttataggct

SEQ ID NO: 844340 - DNA, 15 bp, Homo sapiens
gcaatttataggctg

SEQ ID NO: 844341 - DNA, 15 bp, Homo sapiens
caatttataggctgc

SEQ ID NO: 844342 - DNA, 15 bp, Homo sapiens
aatttataggctgcc

SEQ ID NO: 844343 - DNA, 15 bp, Homo sapiens
atttataggctgccc

SEQ ID NO: 844344 - DNA, 15 bp, Homo sapiens
tttataggctgccca

SEQ ID NO: 844345 - DNA, 15 bp, Homo sapiens
ttataggctgcccac

SEQ ID NO: 844346 - DNA, 15 bp, Homo sapiens
tataggctgcccact

SEQ ID NO: 844347 - DNA, 15 bp, Homo sapiens
ataggctgcccactt

SEQ ID NO: 844348 - DNA, 15 bp, Homo sapiens
taggctgcccacttt

SEQ ID NO: 844349 - DNA, 15 bp, Homo sapiens
aggctgcccactttc

SEQ ID NO: 844350 - DNA, 15 bp, Homo sapiens
ggctgcccactttca

SEQ ID NO: 844351 - DNA, 15 bp, Homo sapiens
gctgcccactttcaa

SEQ ID NO: 844352 - DNA, 15 bp, Homo sapiens
ctgcccactttcaat

SEQ ID NO: 844353 - DNA, 15 bp, Homo sapiens
tgcccactttcaatc

SEQ ID NO: 844354 - DNA, 15 bp, Homo sapiens
gcccactttcaatct

SEQ ID NO: 844355 - DNA, 15 bp, Homo sapiens
cccactttcaatctc

SEQ ID NO: 844356 - DNA, 15 bp, Homo sapiens
ccactttcaatctct

SEQ ID NO: 844357 - DNA, 15 bp, Homo sapiens
cactttcaatctctg

SEQ ID NO: 844358 - DNA, 15 bp, Homo sapiens
actttcaatctctga

SEQ ID NO: 844359 - DNA, 15 bp, Homo sapiens
ctttcaatctctgaa

SEQ ID NO: 844360 - DNA, 15 bp, Homo sapiens
tttcaatctctgaac

SEQ ID NO: 844361 - DNA, 15 bp, Homo sapiens
ttcaatctctgaacc

SEQ ID NO: 844362 - DNA, 15 bp, Homo sapiens
tcaatctctgaacca

SEQ ID NO: 844363 - DNA, 15 bp, Homo sapiens
caatctctgaaccaa

SEQ ID NO: 844364 - DNA, 15 bp, Homo sapiens
aatctctgaaccaaa

SEQ ID NO: 844365 - DNA, 15 bp, Homo sapiens
atctctgaaccaaat

SEQ ID NO: 844366 - DNA, 15 bp, Homo sapiens
tctctgaaccaaatg

SEQ ID NO: 844367 - DNA, 15 bp, Homo sapiens
ctctgaaccaaatgt

SEQ ID NO: 844368 - DNA, 15 bp, Homo sapiens
tctgaaccaaatgtc

SEQ ID NO: 844369 - DNA, 15 bp, Homo sapiens
ctgaaccaaatgtct

SEQ ID NO: 844370 - DNA, 15 bp, Homo sapiens
tgaaccaaatgtctt

SEQ ID NO: 844371 - DNA, 15 bp, Homo sapiens
gaaccaaatgtcttt

SEQ ID NO: 844372 - DNA, 15 bp, Homo sapiens
aaccaaatgtctttt

SEQ ID NO: 844373 - DNA, 15 bp, Homo sapiens
accaaatgtcttttt

SEQ ID NO: 844374 - DNA, 15 bp, Homo sapiens
ccaaatgtctttttg

SEQ ID NO: 844375 - DNA, 15 bp, Homo sapiens
caaatgtctttttga

SEQ ID NO: 844376 - DNA, 15 bp, Homo sapiens
aaatgtctttttgat

SEQ ID NO: 844377 - DNA, 15 bp, Homo sapiens
aatgtctttttgatg

SEQ ID NO: 844378 - DNA, 15 bp, Homo sapiens
atgtctttttgatga

SEQ ID NO: 844379 - DNA, 15 bp, Homo sapiens
tgtctttttgatgag

SEQ ID NO: 844380 - DNA, 15 bp, Homo sapiens
gtctttttgatgagg

SEQ ID NO: 844381 - DNA, 15 bp, Homo sapiens
tctttttgatgaggc

SEQ ID NO: 844382 - DNA, 15 bp, Homo sapiens
ctttttgatgaggcc

SEQ ID NO: 844383 - DNA, 15 bp, Homo sapiens
tttttgatgaggcct

SEQ ID NO: 844384 - DNA, 15 bp, Homo sapiens
ttttgatgaggccta

SEQ ID NO: 844385 - DNA, 15 bp, Homo sapiens
tttgatgaggcctaa

SEQ ID NO: 844386 - DNA, 15 bp, Homo sapiens
ttgatgaggcctaac

SEQ ID NO: 844387 - DNA, 15 bp, Homo sapiens
tgatgaggcctaaca

SEQ ID NO: 844388 - DNA, 15 bp, Homo sapiens
gatgaggcctaacat

SEQ ID NO: 844389 - DNA, 15 bp, Homo sapiens
atgaggcctaacatc

SEQ ID NO: 844390 - DNA, 15 bp, Homo sapiens
tgaggcctaacatcc

SEQ ID NO: 844391 - DNA, 15 bp, Homo sapiens
gaggcctaacatcca

SEQ ID NO: 844392 - DNA, 15 bp, Homo sapiens
aggcctaacatccac

SEQ ID NO: 844393 - DNA, 15 bp, Homo sapiens
ggcctaacatccact

SEQ ID NO: 844394 - DNA, 15 bp, Homo sapiens
gcctaacatccactc

SEQ ID NO: 844395 - DNA, 15 bp, Homo sapiens
cctaacatccactct

SEQ ID NO: 844396 - DNA, 15 bp, Homo sapiens
ctaacatccactctg

SEQ ID NO: 844397 - DNA, 15 bp, Homo sapiens
taacatccactctga

SEQ ID NO: 844398 - DNA, 15 bp, Homo sapiens
aacatccactctgag

SEQ ID NO: 844399 - DNA, 15 bp, Homo sapiens
acatccactctgaga

SEQ ID NO: 844400 - DNA, 15 bp, Homo sapiens
catccactctgagaa

SEQ ID NO: 844401 - DNA, 15 bp, Homo sapiens
atccactctgagaaa

SEQ ID NO: 844402 - DNA, 15 bp, Homo sapiens
tccactctgagaaac

SEQ ID NO: 844403 - DNA, 15 bp, Homo sapiens
ccactctgagaaact

SEQ ID NO: 844404 - DNA, 15 bp, Homo sapiens
cactctgagaaactg

SEQ ID NO: 844405 - DNA, 15 bp, Homo sapiens
actctgagaaactgc

SEQ ID NO: 844406 - DNA, 15 bp, Homo sapiens
ctctgagaaactgca

SEQ ID NO: 844407 - DNA, 15 bp, Homo sapiens
tctgagaaactgcag

SEQ ID NO: 844408 - DNA, 15 bp, Homo sapiens
ctgagaaactgcaga

SEQ ID NO: 844409 - DNA, 15 bp, Homo sapiens
tgagaaactgcagag

SEQ ID NO: 844410 - DNA, 15 bp, Homo sapiens
gagaaactgcagagg

SEQ ID NO: 844411 - DNA, 15 bp, Homo sapiens
agaaactgcagaggg

SEQ ID NO: 844412 - DNA, 15 bp, Homo sapiens
gaaactgcagagggg

SEQ ID NO: 844413 - DNA, 15 bp, Homo sapiens
aaactgcagagggga

SEQ ID NO: 844414 - DNA, 15 bp, Homo sapiens
aactgcagaggggaa

SEQ ID NO: 844415 - DNA, 15 bp, Homo sapiens
actgcagaggggaat

SEQ ID NO: 844416 - DNA, 15 bp, Homo sapiens
ctgcagaggggaatt

SEQ ID NO: 844417 - DNA, 15 bp, Homo sapiens
tgcagaggggaattt

SEQ ID NO: 844418 - DNA, 15 bp, Homo sapiens
gcagaggggaatttc

SEQ ID NO: 844419 - DNA, 15 bp, Homo sapiens
cagaggggaatttct

SEQ ID NO: 844420 - DNA, 15 bp, Homo sapiens
agaggggaatttctg

SEQ ID NO: 844421 - DNA, 15 bp, Homo sapiens
gaggggaatttctga

SEQ ID NO: 844422 - DNA, 15 bp, Homo sapiens
aggggaatttctgaa

SEQ ID NO: 844423 - DNA, 15 bp, Homo sapiens
ggggaatttctgaaa

SEQ ID NO: 844424 - DNA, 15 bp, Homo sapiens
gggaatttctgaaat

SEQ ID NO: 844425 - DNA, 15 bp, Homo sapiens
ggaatttctgaaatc

SEQ ID NO: 844426 - DNA, 15 bp, Homo sapiens
gaatttctgaaatcg

SEQ ID NO: 844427 - DNA, 15 bp, Homo sapiens
aatttctgaaatcgc

SEQ ID NO: 844428 - DNA, 15 bp, Homo sapiens
atttctgaaatcgct

SEQ ID NO: 844429 - DNA, 15 bp, Homo sapiens
tttctgaaatcgctt

SEQ ID NO: 844430 - DNA, 15 bp, Homo sapiens
ttctgaaatcgcttc

SEQ ID NO: 844431 - DNA, 15 bp, Homo sapiens
tctgaaatcgcttct

SEQ ID NO: 844432 - DNA, 15 bp, Homo sapiens
ctgaaatcgcttcta

SEQ ID NO: 844433 - DNA, 15 bp, Homo sapiens
tgaaatcgcttctaa

SEQ ID NO: 844434 - DNA, 15 bp, Homo sapiens
gaaatcgcttctaac

SEQ ID NO: 844435 - DNA, 15 bp, Homo sapiens
aaatcgcttctaact

SEQ ID NO: 844436 - DNA, 15 bp, Homo sapiens
aatcgcttctaactt

SEQ ID NO: 844437 - DNA, 15 bp, Homo sapiens
atcgcttctaacttc

SEQ ID NO: 844438 - DNA, 15 bp, Homo sapiens
tcgcttctaacttcc

SEQ ID NO: 844439 - DNA, 15 bp, Homo sapiens
cgcttctaacttcct

SEQ ID NO: 844440 - DNA, 15 bp, Homo sapiens
gcttctaacttcctg

SEQ ID NO: 844441 - DNA, 15 bp, Homo sapiens
cttctaacttcctgt

SEQ ID NO: 844442 - DNA, 15 bp, Homo sapiens
ttctaacttcctgtg

SEQ ID NO: 844443 - DNA, 15 bp, Homo sapiens
tctaacttcctgtga

SEQ ID NO: 844444 - DNA, 15 bp, Homo sapiens
ctaacttcctgtgaa

SEQ ID NO: 844445 - DNA, 15 bp, Homo sapiens
taacttcctgtgaaa

SEQ ID NO: 844446 - DNA, 15 bp, Homo sapiens
aacttcctgtgaaaa

SEQ ID NO: 844447 - DNA, 15 bp, Homo sapiens
acttcctgtgaaaat

SEQ ID NO: 844448 - DNA, 15 bp, Homo sapiens
cttcctgtgaaaata

SEQ ID NO: 844449 - DNA, 15 bp, Homo sapiens
ttcctgtgaaaatat

SEQ ID NO: 844450 - DNA, 15 bp, Homo sapiens
tcctgtgaaaatatt

SEQ ID NO: 844451 - DNA, 15 bp, Homo sapiens
cctgtgaaaatattc

SEQ ID NO: 844452 - DNA, 15 bp, Homo sapiens
ctgtgaaaatattct

SEQ ID NO: 844453 - DNA, 15 bp, Homo sapiens
tgtgaaaatattctc

SEQ ID NO: 844454 - DNA, 15 bp, Homo sapiens
gtgaaaatattctct

SEQ ID NO: 844455 - DNA, 15 bp, Homo sapiens
tgaaaatattctcta

SEQ ID NO: 844456 - DNA, 15 bp, Homo sapiens
gaaaatattctctaa

SEQ ID NO: 844457 - DNA, 15 bp, Homo sapiens
aaaatattctctaac

SEQ ID NO: 844458 - DNA, 15 bp, Homo sapiens
aaatattctctaact

SEQ ID NO: 844459 - DNA, 15 bp, Homo sapiens
aatattctctaactg

SEQ ID NO: 844460 - DNA, 15 bp, Homo sapiens
atattctctaactga

SEQ ID NO: 844461 - DNA, 15 bp, Homo sapiens
tattctctaactgac

SEQ ID NO: 844462 - DNA, 15 bp, Homo sapiens
attctctaactgaca

SEQ ID NO: 844463 - DNA, 15 bp, Homo sapiens
ttctctaactgacaa

SEQ ID NO: 844464 - DNA, 15 bp, Homo sapiens
tctctaactgacaag

SEQ ID NO: 844465 - DNA, 15 bp, Homo sapiens
ctctaactgacaaga

SEQ ID NO: 844466 - DNA, 15 bp, Homo sapiens
tctaactgacaagag

SEQ ID NO: 844467 - DNA, 15 bp, Homo sapiens
ctaactgacaagaga

SEQ ID NO: 844468 - DNA, 15 bp, Homo sapiens
taactgacaagagat

SEQ ID NO: 844469 - DNA, 15 bp, Homo sapiens
aactgacaagagatt

SEQ ID NO: 844470 - DNA, 15 bp, Homo sapiens
actgacaagagattg

SEQ ID NO: 844471 - DNA, 15 bp, Homo sapiens
ctgacaagagattgt

SEQ ID NO: 844472 - DNA, 15 bp, Homo sapiens
tgacaagagattgtc

SEQ ID NO: 844473 - DNA, 15 bp, Homo sapiens
gacaagagattgtcc

SEQ ID NO: 844474 - DNA, 15 bp, Homo sapiens
acaagagattgtcca

SEQ ID NO: 844475 - DNA, 15 bp, Homo sapiens
caagagattgtccag

SEQ ID NO: 844476 - DNA, 15 bp, Homo sapiens
aagagattgtccaga

SEQ ID NO: 844477 - DNA, 15 bp, Homo sapiens
agagattgtccagat

SEQ ID NO: 844478 - DNA, 15 bp, Homo sapiens
gagattgtccagata

SEQ ID NO: 844479 - DNA, 15 bp, Homo sapiens
agattgtccagataa

SEQ ID NO: 844480 - DNA, 15 bp, Homo sapiens
gattgtccagataac

SEQ ID NO: 844481 - DNA, 15 bp, Homo sapiens
attgtccagataaca

SEQ ID NO: 844482 - DNA, 15 bp, Homo sapiens
ttgtccagataacaa

SEQ ID NO: 844483 - DNA, 15 bp, Homo sapiens
tgtccagataacaat

SEQ ID NO: 844484 - DNA, 15 bp, Homo sapiens
gtccagataacaatg

SEQ ID NO: 844485 - DNA, 15 bp, Homo sapiens
tccagataacaatga

SEQ ID NO: 844486 - DNA, 15 bp, Homo sapiens
ccagataacaatgaa

SEQ ID NO: 844487 - DNA, 15 bp, Homo sapiens
cagataacaatgaat

SEQ ID NO: 844488 - DNA, 15 bp, Homo sapiens
agataacaatgaata

SEQ ID NO: 844489 - DNA, 15 bp, Homo sapiens
gataacaatgaatac

SEQ ID NO: 844490 - DNA, 15 bp, Homo sapiens
ataacaatgaataca

SEQ ID NO: 844491 - DNA, 15 bp, Homo sapiens
taacaatgaatacac

SEQ ID NO: 844492 - DNA, 15 bp, Homo sapiens
aacaatgaatacaca

SEQ ID NO: 844493 - DNA, 15 bp, Homo sapiens
acaatgaatacacaa

SEQ ID NO: 844494 - DNA, 15 bp, Homo sapiens
caatgaatacacaat

SEQ ID NO: 844495 - DNA, 15 bp, Homo sapiens
aatgaatacacaata

SEQ ID NO: 844496 - DNA, 15 bp, Homo sapiens
atgaatacacaataa

SEQ ID NO: 844497 - DNA, 15 bp, Homo sapiens
tgaatacacaataaa

SEQ ID NO: 844498 - DNA, 15 bp, Homo sapiens
gaatacacaataaag

SEQ ID NO: 844499 - DNA, 15 bp, Homo sapiens
aatacacaataaagc

SEQ ID NO: 844500 - DNA, 15 bp, Homo sapiens
atacacaataaagct

SEQ ID NO: 844501 - DNA, 15 bp, Homo sapiens
tacacaataaagctg

SEQ ID NO: 844502 - DNA, 15 bp, Homo sapiens
acacaataaagctgg

SEQ ID NO: 844503 - DNA, 15 bp, Homo sapiens
cacaataaagctggc

SEQ ID NO: 844504 - DNA, 15 bp, Homo sapiens
acaataaagctggcg

SEQ ID NO: 844505 - DNA, 15 bp, Homo sapiens
caataaagctggcgc

SEQ ID NO: 844506 - DNA, 15 bp, Homo sapiens
aataaagctggcgct

SEQ ID NO: 844507 - DNA, 15 bp, Homo sapiens
ataaagctggcgctt

SEQ ID NO: 844508 - DNA, 15 bp, Homo sapiens
taaagctggcgcttc

SEQ ID NO: 844509 - DNA, 15 bp, Homo sapiens
aaagctggcgcttct

SEQ ID NO: 844510 - DNA, 15 bp, Homo sapiens
aagctggcgcttctg

SEQ ID NO: 844511 - DNA, 15 bp, Homo sapiens
agctggcgcttctgc

SEQ ID NO: 844512 - DNA, 15 bp, Homo sapiens
gctggcgcttctgcc

SEQ ID NO: 844513 - DNA, 15 bp, Homo sapiens
ctggcgcttctgcct

SEQ ID NO: 844514 - DNA, 15 bp, Homo sapiens
tggcgcttctgcctt

SEQ ID NO: 844515 - DNA, 15 bp, Homo sapiens
ggcgcttctgccttt

SEQ ID NO: 844516 - DNA, 15 bp, Homo sapiens
gcgcttctgcctttg

SEQ ID NO: 844517 - DNA, 15 bp, Homo sapiens
cgcttctgcctttgc

SEQ ID NO: 844518 - DNA, 15 bp, Homo sapiens
gcttctgcctttgct

SEQ ID NO: 844519 - DNA, 15 bp, Homo sapiens
cttctgcctttgcta

SEQ ID NO: 844520 - DNA, 15 bp, Homo sapiens
ttctgcctttgctac

SEQ ID NO: 844521 - DNA, 15 bp, Homo sapiens
tctgcctttgctacc

SEQ ID NO: 844522 - DNA, 15 bp, Homo sapiens
ctgcctttgctacca

SEQ ID NO: 844523 - DNA, 15 bp, Homo sapiens
tgcctttgctaccag

SEQ ID NO: 844524 - DNA, 15 bp, Homo sapiens
gcctttgctaccagg

SEQ ID NO: 844525 - DNA, 15 bp, Homo sapiens
cctttgctaccaggc

SEQ ID NO: 844526 - DNA, 15 bp, Homo sapiens
ctttgctaccaggct

SEQ ID NO: 844527 - DNA, 15 bp, Homo sapiens
tttgctaccaggctc

SEQ ID NO: 844528 - DNA, 15 bp, Homo sapiens
ttgctaccaggctca

SEQ ID NO: 844529 - DNA, 15 bp, Homo sapiens
tgctaccaggctcac

SEQ ID NO: 844530 - DNA, 15 bp, Homo sapiens
gctaccaggctcaca

SEQ ID NO: 844531 - DNA, 15 bp, Homo sapiens
ctaccaggctcacaa

SEQ ID NO: 844532 - DNA, 15 bp, Homo sapiens
taccaggctcacaaa

SEQ ID NO: 844533 - DNA, 15 bp, Homo sapiens
accaggctcacaaat

SEQ ID NO: 844534 - DNA, 15 bp, Homo sapiens
ccaggctcacaaata

SEQ ID NO: 844535 - DNA, 15 bp, Homo sapiens
caggctcacaaataa

SEQ ID NO: 844536 - DNA, 15 bp, Homo sapiens
aggctcacaaataac

SEQ ID NO: 844537 - DNA, 15 bp, Homo sapiens
ggctcacaaataacc

SEQ ID NO: 844538 - DNA, 15 bp, Homo sapiens
gctcacaaataaccc

SEQ ID NO: 844539 - DNA, 15 bp, Homo sapiens
ctcacaaataaccca

SEQ ID NO: 844540 - DNA, 15 bp, Homo sapiens
tcacaaataacccat

SEQ ID NO: 844541 - DNA, 15 bp, Homo sapiens
cacaaataacccatt

SEQ ID NO: 844542 - DNA, 15 bp, Homo sapiens
acaaataacccattt

SEQ ID NO: 844543 - DNA, 15 bp, Homo sapiens
caaataacccatttg

SEQ ID NO: 844544 - DNA, 15 bp, Homo sapiens
aaataacccatttgg

SEQ ID NO: 844545 - DNA, 15 bp, Homo sapiens
aataacccatttggc

SEQ ID NO: 844546 - DNA, 15 bp, Homo sapiens
ataacccatttggct

SEQ ID NO: 844547 - DNA, 15 bp, Homo sapiens
taacccatttggctt

SEQ ID NO: 844548 - DNA, 15 bp, Homo sapiens
aacccatttggcttc

SEQ ID NO: 844549 - DNA, 15 bp, Homo sapiens
acccatttggcttcc

SEQ ID NO: 844550 - DNA, 15 bp, Homo sapiens
cccatttggcttccc

SEQ ID NO: 844551 - DNA, 15 bp, Homo sapiens
ccatttggcttccca

SEQ ID NO: 844552 - DNA, 15 bp, Homo sapiens
catttggcttcccaa

SEQ ID NO: 844553 - DNA, 15 bp, Homo sapiens
atttggcttcccaat

SEQ ID NO: 844554 - DNA, 15 bp, Homo sapiens
tttggcttcccaatc

SEQ ID NO: 844555 - DNA, 15 bp, Homo sapiens
ttggcttcccaatca

SEQ ID NO: 844556 - DNA, 15 bp, Homo sapiens
tggcttcccaatcac

SEQ ID NO: 844557 - DNA, 15 bp, Homo sapiens
ggcttcccaatcact

SEQ ID NO: 844558 - DNA, 15 bp, Homo sapiens
gcttcccaatcactc

SEQ ID NO: 844559 - DNA, 15 bp, Homo sapiens
cttcccaatcactct

SEQ ID NO: 844560 - DNA, 15 bp, Homo sapiens
ttcccaatcactctg

SEQ ID NO: 844561 - DNA, 15 bp, Homo sapiens
tcccaatcactctga

SEQ ID NO: 844562 - DNA, 15 bp, Homo sapiens
cccaatcactctgat

SEQ ID NO: 844563 - DNA, 15 bp, Homo sapiens
ccaatcactctgata

SEQ ID NO: 844564 - DNA, 15 bp, Homo sapiens
caatcactctgatac

SEQ ID NO: 844565 - DNA, 15 bp, Homo sapiens
aatcactctgatacc

SEQ ID NO: 844566 - DNA, 15 bp, Homo sapiens
atcactctgatacct

SEQ ID NO: 844567 - DNA, 15 bp, Homo sapiens
tcactctgataccta

SEQ ID NO: 844568 - DNA, 15 bp, Homo sapiens
cactctgatacctaa

SEQ ID NO: 844569 - DNA, 15 bp, Homo sapiens
actctgatacctaaa

SEQ ID NO: 844570 - DNA, 15 bp, Homo sapiens
ctctgatacctaaaa

SEQ ID NO: 844571 - DNA, 15 bp, Homo sapiens
tctgatacctaaaac

SEQ ID NO: 844572 - DNA, 15 bp, Homo sapiens
ctgatacctaaaact

SEQ ID NO: 844573 - DNA, 15 bp, Homo sapiens
tgatacctaaaacta

SEQ ID NO: 844574 - DNA, 15 bp, Homo sapiens
gatacctaaaactag

SEQ ID NO: 844575 - DNA, 15 bp, Homo sapiens
atacctaaaactagc

SEQ ID NO: 844576 - DNA, 15 bp, Homo sapiens
tacctaaaactagca

SEQ ID NO: 844577 - DNA, 15 bp, Homo sapiens
acctaaaactagcag

SEQ ID NO: 844578 - DNA, 15 bp, Homo sapiens
cctaaaactagcaga

SEQ ID NO: 844579 - DNA, 15 bp, Homo sapiens
ctaaaactagcagaa

SEQ ID NO: 844580 - DNA, 15 bp, Homo sapiens
taaaactagcagaat

SEQ ID NO: 844581 - DNA, 15 bp, Homo sapiens
aaaactagcagaatt

SEQ ID NO: 844582 - DNA, 15 bp, Homo sapiens
aaactagcagaattt

SEQ ID NO: 844583 - DNA, 15 bp, Homo sapiens
aactagcagaattta

SEQ ID NO: 844584 - DNA, 15 bp, Homo sapiens
actagcagaatttat

SEQ ID NO: 844585 - DNA, 15 bp, Homo sapiens
ctagcagaatttatg

SEQ ID NO: 844586 - DNA, 15 bp, Homo sapiens
tagcagaatttatgc

SEQ ID NO: 844587 - DNA, 15 bp, Homo sapiens
agcagaatttatgct

SEQ ID NO: 844588 - DNA, 15 bp, Homo sapiens
gcagaatttatgctt

SEQ ID NO: 844589 - DNA, 15 bp, Homo sapiens
cagaatttatgcttg

SEQ ID NO: 844590 - DNA, 15 bp, Homo sapiens
agaatttatgcttgc

SEQ ID NO: 844591 - DNA, 15 bp, Homo sapiens
gaatttatgcttgcg

SEQ ID NO: 844592 - DNA, 15 bp, Homo sapiens
aatttatgcttgcgg

SEQ ID NO: 844593 - DNA, 15 bp, Homo sapiens
atttatgcttgcggc

SEQ ID NO: 844594 - DNA, 15 bp, Homo sapiens
tttatgcttgcggct

SEQ ID NO: 844595 - DNA, 15 bp, Homo sapiens
ttatgcttgcggctg

SEQ ID NO: 844596 - DNA, 15 bp, Homo sapiens
tatgcttgcggctgg

SEQ ID NO: 844597 - DNA, 15 bp, Homo sapiens
atgcttgcggctgga

SEQ ID NO: 844598 - DNA, 15 bp, Homo sapiens
tgcttgcggctggaa

SEQ ID NO: 844599 - DNA, 15 bp, Homo sapiens
gcttgcggctggaat

SEQ ID NO: 844600 - DNA, 15 bp, Homo sapiens
cttgcggctggaatg

SEQ ID NO: 844601 - DNA, 15 bp, Homo sapiens
ttgcggctggaatgg

SEQ ID NO: 844602 - DNA, 15 bp, Homo sapiens
tgcggctggaatggc

SEQ ID NO: 844603 - DNA, 15 bp, Homo sapiens
gcggctggaatggct

SEQ ID NO: 844604 - DNA, 15 bp, Homo sapiens
cggctggaatggctc

SEQ ID NO: 844605 - DNA, 15 bp, Homo sapiens
ggctggaatggctct

SEQ ID NO: 844606 - DNA, 15 bp, Homo sapiens
gctggaatggctctg

SEQ ID NO: 844607 - DNA, 15 bp, Homo sapiens
ctggaatggctctgt

SEQ ID NO: 844608 - DNA, 15 bp, Homo sapiens
tggaatggctctgtt

SEQ ID NO: 844609 - DNA, 15 bp, Homo sapiens
ggaatggctctgttc

SEQ ID NO: 844610 - DNA, 15 bp, Homo sapiens
gaatggctctgttca

SEQ ID NO: 844611 - DNA, 15 bp, Homo sapiens
aatggctctgttcag

SEQ ID NO: 844612 - DNA, 15 bp, Homo sapiens
atggctctgttcagc

SEQ ID NO: 844613 - DNA, 15 bp, Homo sapiens
tggctctgttcagcc

SEQ ID NO: 844614 - DNA, 15 bp, Homo sapiens
ggctctgttcagcca

SEQ ID NO: 844615 - DNA, 15 bp, Homo sapiens
gctctgttcagccag

SEQ ID NO: 844616 - DNA, 15 bp, Homo sapiens
ctctgttcagccaga

SEQ ID NO: 844617 - DNA, 15 bp, Homo sapiens
tctgttcagccagaa

SEQ ID NO: 844618 - DNA, 15 bp, Homo sapiens
ctgttcagccagaaa

SEQ ID NO: 844619 - DNA, 15 bp, Homo sapiens
tgttcagccagaaag

SEQ ID NO: 844620 - DNA, 15 bp, Homo sapiens
gttcagccagaaagc

SEQ ID NO: 844621 - DNA, 15 bp, Homo sapiens
ttcagccagaaagct

SEQ ID NO: 844622 - DNA, 15 bp, Homo sapiens
tcagccagaaagcta

SEQ ID NO: 844623 - DNA, 15 bp, Homo sapiens
cagccagaaagctaa

SEQ ID NO: 844624 - DNA, 15 bp, Homo sapiens
agccagaaagctaaa

SEQ ID NO: 844625 - DNA, 15 bp, Homo sapiens
gccagaaagctaaag

SEQ ID NO: 844626 - DNA, 15 bp, Homo sapiens
ccagaaagctaaagt

SEQ ID NO: 844627 - DNA, 15 bp, Homo sapiens
cagaaagctaaagtt

SEQ ID NO: 844628 - DNA, 15 bp, Homo sapiens
agaaagctaaagttt

SEQ ID NO: 844629 - DNA, 15 bp, Homo sapiens
gaaagctaaagttta

SEQ ID NO: 844630 - DNA, 15 bp, Homo sapiens
aaagctaaagtttac

SEQ ID NO: 844631 - DNA, 15 bp, Homo sapiens
aagctaaagtttacg

SEQ ID NO: 844632 - DNA, 15 bp, Homo sapiens
agctaaagtttacga

SEQ ID NO: 844633 - DNA, 15 bp, Homo sapiens
gctaaagtttacgac

SEQ ID NO: 844634 - DNA, 15 bp, Homo sapiens
ctaaagtttacgact

SEQ ID NO: 844635 - DNA, 15 bp, Homo sapiens
taaagtttacgactg

SEQ ID NO: 844636 - DNA, 15 bp, Homo sapiens
aaagtttacgactga

SEQ ID NO: 844637 - DNA, 15 bp, Homo sapiens
aagtttacgactgaa

SEQ ID NO: 844638 - DNA, 15 bp, Homo sapiens
agtttacgactgaac

SEQ ID NO: 844639 - DNA, 15 bp, Homo sapiens
gtttacgactgaacc

SEQ ID NO: 844640 - DNA, 15 bp, Homo sapiens
tttacgactgaaccc

SEQ ID NO: 844641 - DNA, 15 bp, Homo sapiens
ttacgactgaaccct

SEQ ID NO: 844642 - DNA, 15 bp, Homo sapiens
tacgactgaaccctt

SEQ ID NO: 844643 - DNA, 15 bp, Homo sapiens
acgactgaacccttt

SEQ ID NO: 844644 - DNA, 15 bp, Homo sapiens
cgactgaaccctttg

SEQ ID NO: 844645 - DNA, 15 bp, Homo sapiens
gactgaaccctttgc

SEQ ID NO: 844646 - DNA, 15 bp, Homo sapiens
actgaaccctttgct

SEQ ID NO: 844647 - DNA, 15 bp, Homo sapiens
ctgaaccctttgctc

SEQ ID NO: 844648 - DNA, 15 bp, Homo sapiens
tgaaccctttgctct

SEQ ID NO: 844649 - DNA, 15 bp, Homo sapiens
gaaccctttgctctg

SEQ ID NO: 844650 - DNA, 15 bp, Homo sapiens
aaccctttgctctga

SEQ ID NO: 844651 - DNA, 15 bp, Homo sapiens
accctttgctctgaa

SEQ ID NO: 844652 - DNA, 15 bp, Homo sapiens
ccctttgctctgaaa

SEQ ID NO: 844653 - DNA, 15 bp, Homo sapiens
cctttgctctgaaat

SEQ ID NO: 844654 - DNA, 15 bp, Homo sapiens
ctttgctctgaaatg

SEQ ID NO: 844655 - DNA, 15 bp, Homo sapiens
tttgctctgaaatga

SEQ ID NO: 844656 - DNA, 15 bp, Homo sapiens
ttgctctgaaatgaa

SEQ ID NO: 844657 - DNA, 15 bp, Homo sapiens
tgctctgaaatgaaa

SEQ ID NO: 844658 - DNA, 15 bp, Homo sapiens
gctctgaaatgaaat

SEQ ID NO: 844659 - DNA, 15 bp, Homo sapiens
ctctgaaatgaaatc

SEQ ID NO: 844660 - DNA, 15 bp, Homo sapiens
tctgaaatgaaatct

SEQ ID NO: 844661 - DNA, 15 bp, Homo sapiens
ctgaaatgaaatcta

SEQ ID NO: 844662 - DNA, 15 bp, Homo sapiens
tgaaatgaaatctag

SEQ ID NO: 844663 - DNA, 15 bp, Homo sapiens
gaaatgaaatctagt

SEQ ID NO: 844664 - DNA, 15 bp, Homo sapiens
aaatgaaatctagtc

SEQ ID NO: 844665 - DNA, 15 bp, Homo sapiens
aatgaaatctagtct

SEQ ID NO: 844666 - DNA, 15 bp, Homo sapiens
atgaaatctagtctc

SEQ ID NO: 844667 - DNA, 15 bp, Homo sapiens
tgaaatctagtctct

SEQ ID NO: 844668 - DNA, 15 bp, Homo sapiens
gaaatctagtctctt

SEQ ID NO: 844669 - DNA, 15 bp, Homo sapiens
aaatctagtctcttt

SEQ ID NO: 844670 - DNA, 15 bp, Homo sapiens
aatctagtctctttg

SEQ ID NO: 844671 - DNA, 15 bp, Homo sapiens
atctagtctctttgg

SEQ ID NO: 844672 - DNA, 15 bp, Homo sapiens
tctagtctctttggc

SEQ ID NO: 844673 - DNA, 15 bp, Homo sapiens
ctagtctctttggcg

SEQ ID NO: 844674 - DNA, 15 bp, Homo sapiens
tagtctctttggcgc

SEQ ID NO: 844675 - DNA, 15 bp, Homo sapiens
agtctctttggcgcg

SEQ ID NO: 844676 - DNA, 15 bp, Homo sapiens
gtctctttggcgcga

SEQ ID NO: 844677 - DNA, 15 bp, Homo sapiens
tctctttggcgcgac

SEQ ID NO: 844678 - DNA, 15 bp, Homo sapiens
ctctttggcgcgact

SEQ ID NO: 844679 - DNA, 15 bp, Homo sapiens
tctttggcgcgactt

SEQ ID NO: 844680 - DNA, 15 bp, Homo sapiens
ctttggcgcgacttt

SEQ ID NO: 844681 - DNA, 15 bp, Homo sapiens
tttggcgcgacttta

SEQ ID NO: 844682 - DNA, 15 bp, Homo sapiens
ttggcgcgactttat

SEQ ID NO: 844683 - DNA, 15 bp, Homo sapiens
tggcgcgactttatt

SEQ ID NO: 844684 - DNA, 15 bp, Homo sapiens
ggcgcgactttatta

SEQ ID NO: 844685 - DNA, 15 bp, Homo sapiens
gcgcgactttattag

SEQ ID NO: 844686 - DNA, 15 bp, Homo sapiens
cgcgactttattagg

SEQ ID NO: 844687 - DNA, 15 bp, Homo sapiens
gcgactttattaggc

SEQ ID NO: 844688 - DNA, 15 bp, Homo sapiens
cgactttattaggcc

SEQ ID NO: 844689 - DNA, 15 bp, Homo sapiens
gactttattaggcca

SEQ ID NO: 844690 - DNA, 15 bp, Homo sapiens
actttattaggccat

SEQ ID NO: 844691 - DNA, 15 bp, Homo sapiens
ctttattaggccata

SEQ ID NO: 844692 - DNA, 15 bp, Homo sapiens
tttattaggccatat

SEQ ID NO: 844693 - DNA, 15 bp, Homo sapiens
ttattaggccatatt

SEQ ID NO: 844694 - DNA, 15 bp, Homo sapiens
tattaggccatattg

SEQ ID NO: 844695 - DNA, 15 bp, Homo sapiens
attaggccatattgt

SEQ ID NO: 844696 - DNA, 15 bp, Homo sapiens
ttaggccatattgta

SEQ ID NO: 844697 - DNA, 15 bp, Homo sapiens
taggccatattgtat

SEQ ID NO: 844698 - DNA, 15 bp, Homo sapiens
aggccatattgtatg

SEQ ID NO: 844699 - DNA, 15 bp, Homo sapiens
ggccatattgtatgg

SEQ ID NO: 844700 - DNA, 15 bp, Homo sapiens
gccatattgtatggc

SEQ ID NO: 844701 - DNA, 15 bp, Homo sapiens
ccatattgtatggcg

SEQ ID NO: 844702 - DNA, 15 bp, Homo sapiens
catattgtatggcga

SEQ ID NO: 844703 - DNA, 15 bp, Homo sapiens
atattgtatggcgat

SEQ ID NO: 844704 - DNA, 15 bp, Homo sapiens
tattgtatggcgata

SEQ ID NO: 844705 - DNA, 15 bp, Homo sapiens
attgtatggcgatag

SEQ ID NO: 844706 - DNA, 15 bp, Homo sapiens
ttgtatggcgatagg

SEQ ID NO: 844707 - DNA, 15 bp, Homo sapiens
tgtatggcgatagga

SEQ ID NO: 844708 - DNA, 15 bp, Homo sapiens
gtatggcgataggag

SEQ ID NO: 844709 - DNA, 15 bp, Homo sapiens
tatggcgataggaga

SEQ ID NO: 844710 - DNA, 15 bp, Homo sapiens
atggcgataggagac

SEQ ID NO: 844711 - DNA, 15 bp, Homo sapiens
tggcgataggagaca

SEQ ID NO: 844712 - DNA, 15 bp, Homo sapiens
ggcgataggagacat

SEQ ID NO: 844713 - DNA, 15 bp, Homo sapiens
gcgataggagacata

SEQ ID NO: 844714 - DNA, 15 bp, Homo sapiens
cgataggagacataa

SEQ ID NO: 844715 - DNA, 15 bp, Homo sapiens
gataggagacataag

SEQ ID NO: 844716 - DNA, 15 bp, Homo sapiens
ataggagacataagt

SEQ ID NO: 844717 - DNA, 15 bp, Homo sapiens
taggagacataagta

SEQ ID NO: 844718 - DNA, 15 bp, Homo sapiens
aggagacataagtac

SEQ ID NO: 844719 - DNA, 15 bp, Homo sapiens
ggagacataagtacc

SEQ ID NO: 844720 - DNA, 15 bp, Homo sapiens
gagacataagtaccc

SEQ ID NO: 844721 - DNA, 15 bp, Homo sapiens
agacataagtaccca

SEQ ID NO: 844722 - DNA, 15 bp, Homo sapiens
gacataagtacccag

SEQ ID NO: 844723 - DNA, 15 bp, Homo sapiens
acataagtacccaga

SEQ ID NO: 844724 - DNA, 15 bp, Homo sapiens
cataagtacccagaa

SEQ ID NO: 844725 - DNA, 15 bp, Homo sapiens
ataagtacccagaat

SEQ ID NO: 844726 - DNA, 15 bp, Homo sapiens
taagtacccagaatc

SEQ ID NO: 844727 - DNA, 15 bp, Homo sapiens
aagtacccagaatct

SEQ ID NO: 844728 - DNA, 15 bp, Homo sapiens
agtacccagaatctg

SEQ ID NO: 844729 - DNA, 15 bp, Homo sapiens
gtacccagaatctgc

SEQ ID NO: 844730 - DNA, 15 bp, Homo sapiens
tacccagaatctgct

SEQ ID NO: 844731 - DNA, 15 bp, Homo sapiens
acccagaatctgctg

SEQ ID NO: 844732 - DNA, 15 bp, Homo sapiens
cccagaatctgctgt

SEQ ID NO: 844733 - DNA, 15 bp, Homo sapiens
ccagaatctgctgtc

SEQ ID NO: 844734 - DNA, 15 bp, Homo sapiens
cagaatctgctgtca

SEQ ID NO: 844735 - DNA, 15 bp, Homo sapiens
agaatctgctgtcac

SEQ ID NO: 844736 - DNA, 15 bp, Homo sapiens
gaatctgctgtcact

SEQ ID NO: 844737 - DNA, 15 bp, Homo sapiens
aatctgctgtcacta

SEQ ID NO: 844738 - DNA, 15 bp, Homo sapiens
atctgctgtcactaa

SEQ ID NO: 844739 - DNA, 15 bp, Homo sapiens
tctgctgtcactaaa

SEQ ID NO: 844740 - DNA, 15 bp, Homo sapiens
ctgctgtcactaaaa

SEQ ID NO: 844741 - DNA, 15 bp, Homo sapiens
tgctgtcactaaaac

SEQ ID NO: 844742 - DNA, 15 bp, Homo sapiens
gctgtcactaaaaca

SEQ ID NO: 844743 - DNA, 15 bp, Homo sapiens
ctgtcactaaaacag

SEQ ID NO: 844744 - DNA, 15 bp, Homo sapiens
tgtcactaaaacagg

SEQ ID NO: 844745 - DNA, 15 bp, Homo sapiens
gtcactaaaacagga

SEQ ID NO: 844746 - DNA, 15 bp, Homo sapiens
tcactaaaacaggac

SEQ ID NO: 844747 - DNA, 15 bp, Homo sapiens
cactaaaacaggact

SEQ ID NO: 844748 - DNA, 15 bp, Homo sapiens
actaaaacaggactg

SEQ ID NO: 844749 - DNA, 15 bp, Homo sapiens
ctaaaacaggactgg

SEQ ID NO: 844750 - DNA, 15 bp, Homo sapiens
taaaacaggactggg

SEQ ID NO: 844751 - DNA, 15 bp, Homo sapiens
aaaacaggactgggt

SEQ ID NO: 844752 - DNA, 15 bp, Homo sapiens
aaacaggactgggtt

SEQ ID NO: 844753 - DNA, 15 bp, Homo sapiens
aacaggactgggttg

SEQ ID NO: 844754 - DNA, 15 bp, Homo sapiens
acaggactgggttgg

SEQ ID NO: 844755 - DNA, 15 bp, Homo sapiens
caggactgggttggc

SEQ ID NO: 844756 - DNA, 15 bp, Homo sapiens
aggactgggttggcg

SEQ ID NO: 844757 - DNA, 15 bp, Homo sapiens
ggactgggttggcga

SEQ ID NO: 844758 - DNA, 15 bp, Homo sapiens
gactgggttggcgag

SEQ ID NO: 844759 - DNA, 15 bp, Homo sapiens
actgggttggcgagc

SEQ ID NO: 844760 - DNA, 15 bp, Homo sapiens
ctgggttggcgagcg

SEQ ID NO: 844761 - DNA, 15 bp, Homo sapiens
tgggttggcgagcgt

SEQ ID NO: 844762 - DNA, 15 bp, Homo sapiens
gggttggcgagcgtt

SEQ ID NO: 844763 - DNA, 15 bp, Homo sapiens
ggttggcgagcgttt

SEQ ID NO: 844764 - DNA, 15 bp, Homo sapiens
gttggcgagcgtttt

SEQ ID NO: 844765 - DNA, 15 bp, Homo sapiens
ttggcgagcgttttc

SEQ ID NO: 844766 - DNA, 15 bp, Homo sapiens
tggcgagcgttttcg

SEQ ID NO: 844767 - DNA, 15 bp, Homo sapiens
ggcgagcgttttcgt

SEQ ID NO: 844768 - DNA, 15 bp, Homo sapiens
gcgagcgttttcgtc

SEQ ID NO: 844769 - DNA, 15 bp, Homo sapiens
cgagcgttttcgtcc

SEQ ID NO: 844770 - DNA, 15 bp, Homo sapiens
gagcgttttcgtcct

SEQ ID NO: 844771 - DNA, 15 bp, Homo sapiens
agcgttttcgtcctc

SEQ ID NO: 844772 - DNA, 15 bp, Homo sapiens
gcgttttcgtcctca

SEQ ID NO: 844773 - DNA, 15 bp, Homo sapiens
cgttttcgtcctcac

SEQ ID NO: 844774 - DNA, 15 bp, Homo sapiens
gttttcgtcctcaca

SEQ ID NO: 844775 - DNA, 15 bp, Homo sapiens
ttttcgtcctcacac

SEQ ID NO: 844776 - DNA, 15 bp, Homo sapiens
tttcgtcctcacact

SEQ ID NO: 844777 - DNA, 15 bp, Homo sapiens
ttcgtcctcacactc

SEQ ID NO: 844778 - DNA, 15 bp, Homo sapiens
tcgtcctcacactca

SEQ ID NO: 844779 - DNA, 15 bp, Homo sapiens
cgtcctcacactcaa

SEQ ID NO: 844780 - DNA, 15 bp, Homo sapiens
gtcctcacactcaat

SEQ ID NO: 844781 - DNA, 15 bp, Homo sapiens
tcctcacactcaata

SEQ ID NO: 844782 - DNA, 15 bp, Homo sapiens
cctcacactcaatac

SEQ ID NO: 844783 - DNA, 15 bp, Homo sapiens
ctcacactcaatact

SEQ ID NO: 844784 - DNA, 15 bp, Homo sapiens
tcacactcaatactg

SEQ ID NO: 844785 - DNA, 15 bp, Homo sapiens
cacactcaatactgt

SEQ ID NO: 844786 - DNA, 15 bp, Homo sapiens
acactcaatactgtg

SEQ ID NO: 844787 - DNA, 15 bp, Homo sapiens
cactcaatactgtgt

SEQ ID NO: 844788 - DNA, 15 bp, Homo sapiens
actcaatactgtgtc

SEQ ID NO: 844789 - DNA, 15 bp, Homo sapiens
ctcaatactgtgtcc

SEQ ID NO: 844790 - DNA, 15 bp, Homo sapiens
tcaatactgtgtcct

SEQ ID NO: 844791 - DNA, 15 bp, Homo sapiens
caatactgtgtccta

SEQ ID NO: 844792 - DNA, 15 bp, Homo sapiens
aatactgtgtcctaa

SEQ ID NO: 844793 - DNA, 15 bp, Homo sapiens
atactgtgtcctaaa

SEQ ID NO: 844794 - DNA, 15 bp, Homo sapiens
tactgtgtcctaaaa

SEQ ID NO: 844795 - DNA, 15 bp, Homo sapiens
actgtgtcctaaaat

SEQ ID NO: 844796 - DNA, 15 bp, Homo sapiens
ctgtgtcctaaaatg

SEQ ID NO: 844797 - DNA, 15 bp, Homo sapiens
tgtgtcctaaaatgg

SEQ ID NO: 844798 - DNA, 15 bp, Homo sapiens
gtgtcctaaaatggg

SEQ ID NO: 844799 - DNA, 15 bp, Homo sapiens
tgtcctaaaatggga

SEQ ID NO: 844800 - DNA, 15 bp, Homo sapiens
gtcctaaaatgggaa

SEQ ID NO: 844801 - DNA, 15 bp, Homo sapiens
tcctaaaatgggaaa

SEQ ID NO: 844802 - DNA, 15 bp, Homo sapiens
cctaaaatgggaaag

SEQ ID NO: 844803 - DNA, 15 bp, Homo sapiens
ctaaaatgggaaagt

SEQ ID NO: 844804 - DNA, 15 bp, Homo sapiens
taaaatgggaaagtt

SEQ ID NO: 844805 - DNA, 15 bp, Homo sapiens
aaaatgggaaagttg

SEQ ID NO: 844806 - DNA, 15 bp, Homo sapiens
aaatgggaaagttga

SEQ ID NO: 844807 - DNA, 15 bp, Homo sapiens
aatgggaaagttgaa

SEQ ID NO: 844808 - DNA, 15 bp, Homo sapiens
atgggaaagttgaat

SEQ ID NO: 844809 - DNA, 15 bp, Homo sapiens
tgggaaagttgaata

SEQ ID NO: 844810 - DNA, 15 bp, Homo sapiens
gggaaagttgaatag

SEQ ID NO: 844811 - DNA, 15 bp, Homo sapiens
ggaaagttgaataga

SEQ ID NO: 844812 - DNA, 15 bp, Homo sapiens
gaaagttgaatagaa

SEQ ID NO: 844813 - DNA, 15 bp, Homo sapiens
aaagttgaatagaaa

SEQ ID NO: 844814 - DNA, 15 bp, Homo sapiens
aagttgaatagaaat

SEQ ID NO: 844815 - DNA, 15 bp, Homo sapiens
agttgaatagaaatt

SEQ ID NO: 844816 - DNA, 15 bp, Homo sapiens
gttgaatagaaatta

SEQ ID NO: 844817 - DNA, 15 bp, Homo sapiens
ttgaatagaaattag

SEQ ID NO: 844818 - DNA, 15 bp, Homo sapiens
tgaatagaaattagg

SEQ ID NO: 844819 - DNA, 15 bp, Homo sapiens
gaatagaaattaggg

SEQ ID NO: 844820 - DNA, 15 bp, Homo sapiens
aatagaaattaggga

SEQ ID NO: 844821 - DNA, 15 bp, Homo sapiens
atagaaattagggat

SEQ ID NO: 844822 - DNA, 15 bp, Homo sapiens
tagaaattagggatg

SEQ ID NO: 844823 - DNA, 15 bp, Homo sapiens
agaaattagggatgc

SEQ ID NO: 844824 - DNA, 15 bp, Homo sapiens
gaaattagggatgca

SEQ ID NO: 844825 - DNA, 15 bp, Homo sapiens
aaattagggatgcaa

SEQ ID NO: 844826 - DNA, 15 bp, Homo sapiens
aattagggatgcaaa

SEQ ID NO: 844827 - DNA, 15 bp, Homo sapiens
attagggatgcaaat

SEQ ID NO: 844828 - DNA, 15 bp, Homo sapiens
ttagggatgcaaatc

SEQ ID NO: 844829 - DNA, 15 bp, Homo sapiens
tagggatgcaaatca

SEQ ID NO: 844830 - DNA, 15 bp, Homo sapiens
agggatgcaaatcag

SEQ ID NO: 844831 - DNA, 15 bp, Homo sapiens
gggatgcaaatcagg

SEQ ID NO: 844832 - DNA, 15 bp, Homo sapiens
ggatgcaaatcaggg

SEQ ID NO: 844833 - DNA, 15 bp, Homo sapiens
gatgcaaatcagggc

SEQ ID NO: 844834 - DNA, 15 bp, Homo sapiens
atgcaaatcagggcc

SEQ ID NO: 844835 - DNA, 15 bp, Homo sapiens
tgcaaatcagggcca

SEQ ID NO: 844836 - DNA, 15 bp, Homo sapiens
gcaaatcagggccat

SEQ ID NO: 844837 - DNA, 15 bp, Homo sapiens
caaatcagggccatt

SEQ ID NO: 844838 - DNA, 15 bp, Homo sapiens
aaatcagggccattt

SEQ ID NO: 844839 - DNA, 15 bp, Homo sapiens
aatcagggccatttt

SEQ ID NO: 844840 - DNA, 15 bp, Homo sapiens
atcagggccattttc

SEQ ID NO: 844841 - DNA, 15 bp, Homo sapiens
tcagggccattttct

SEQ ID NO: 844842 - DNA, 15 bp, Homo sapiens
cagggccattttctg

SEQ ID NO: 844843 - DNA, 15 bp, Homo sapiens
agggccattttctga

SEQ ID NO: 844844 - DNA, 15 bp, Homo sapiens
gggccattttctgaa

SEQ ID NO: 844845 - DNA, 15 bp, Homo sapiens
ggccattttctgaaa

SEQ ID NO: 844846 - DNA, 15 bp, Homo sapiens
gccattttctgaaac

SEQ ID NO: 844847 - DNA, 15 bp, Homo sapiens
ccattttctgaaact

SEQ ID NO: 844848 - DNA, 15 bp, Homo sapiens
cattttctgaaactt

SEQ ID NO: 844849 - DNA, 15 bp, Homo sapiens
attttctgaaacttt

SEQ ID NO: 844850 - DNA, 15 bp, Homo sapiens
ttttctgaaacttta

SEQ ID NO: 844851 - DNA, 15 bp, Homo sapiens
tttctgaaactttat

SEQ ID NO: 844852 - DNA, 15 bp, Homo sapiens
ttctgaaactttatt

SEQ ID NO: 844853 - DNA, 15 bp, Homo sapiens
tctgaaactttattt

SEQ ID NO: 844854 - DNA, 15 bp, Homo sapiens
ctgaaactttatttt

SEQ ID NO: 844855 - DNA, 15 bp, Homo sapiens
tgaaactttattttt

SEQ ID NO: 844856 - DNA, 15 bp, Homo sapiens
gaaactttattttta

SEQ ID NO: 844857 - DNA, 15 bp, Homo sapiens
aaactttatttttaa

SEQ ID NO: 844858 - DNA, 15 bp, Homo sapiens
aactttatttttaat

SEQ ID NO: 844859 - DNA, 15 bp, Homo sapiens
actttatttttaatt

SEQ ID NO: 844860 - DNA, 15 bp, Homo sapiens
ctttatttttaattg

SEQ ID NO: 844861 - DNA, 15 bp, Homo sapiens
tttatttttaattga

SEQ ID NO: 844862 - DNA, 15 bp, Homo sapiens
ttatttttaattgaa

SEQ ID NO: 844863 - DNA, 15 bp, Homo sapiens
tatttttaattgaat

SEQ ID NO: 844864 - DNA, 15 bp, Homo sapiens
atttttaattgaatt

SEQ ID NO: 844865 - DNA, 15 bp, Homo sapiens
tttttaattgaattc

SEQ ID NO: 844866 - DNA, 15 bp, Homo sapiens
ttttaattgaattca

SEQ ID NO: 844867 - DNA, 15 bp, Homo sapiens
tttaattgaattcaa

SEQ ID NO: 844868 - DNA, 15 bp, Homo sapiens
ttaattgaattcaat

SEQ ID NO: 844869 - DNA, 15 bp, Homo sapiens
taattgaattcaata

SEQ ID NO: 844870 - DNA, 15 bp, Homo sapiens
aattgaattcaatat

SEQ ID NO: 844871 - DNA, 15 bp, Homo sapiens
attgaattcaatata

SEQ ID NO: 844872 - DNA, 15 bp, Homo sapiens
ttgaattcaatatag

SEQ ID NO: 844873 - DNA, 15 bp, Homo sapiens
tgaattcaatatagt

SEQ ID NO: 844874 - DNA, 15 bp, Homo sapiens
gaattcaatatagtc

SEQ ID NO: 844875 - DNA, 15 bp, Homo sapiens
aattcaatatagtca

SEQ ID NO: 844876 - DNA, 15 bp, Homo sapiens
attcaatatagtcat

SEQ ID NO: 844877 - DNA, 15 bp, Homo sapiens
ttcaatatagtcatg

SEQ ID NO: 844878 - DNA, 15 bp, Homo sapiens
tcaatatagtcatga

SEQ ID NO: 844879 - DNA, 15 bp, Homo sapiens
caatatagtcatgat

SEQ ID NO: 844880 - DNA, 15 bp, Homo sapiens
aatatagtcatgata

SEQ ID NO: 844881 - DNA, 15 bp, Homo sapiens
atatagtcatgatat

SEQ ID NO: 844882 - DNA, 15 bp, Homo sapiens
tatagtcatgatatt

SEQ ID NO: 844883 - DNA, 15 bp, Homo sapiens
atagtcatgatattg

SEQ ID NO: 844884 - DNA, 15 bp, Homo sapiens
tagtcatgatattgc

SEQ ID NO: 844885 - DNA, 15 bp, Homo sapiens
agtcatgatattgct

SEQ ID NO: 844886 - DNA, 15 bp, Homo sapiens
gtcatgatattgctt

SEQ ID NO: 844887 - DNA, 15 bp, Homo sapiens
tcatgatattgcttc

SEQ ID NO: 844888 - DNA, 15 bp, Homo sapiens
catgatattgcttct

SEQ ID NO: 844889 - DNA, 15 bp, Homo sapiens
atgatattgcttctg

SEQ ID NO: 844890 - DNA, 15 bp, Homo sapiens
tgatattgcttctgt

SEQ ID NO: 844891 - DNA, 15 bp, Homo sapiens
gatattgcttctgta

SEQ ID NO: 844892 - DNA, 15 bp, Homo sapiens
atattgcttctgtat

SEQ ID NO: 844893 - DNA, 15 bp, Homo sapiens
tattgcttctgtatc

SEQ ID NO: 844894 - DNA, 15 bp, Homo sapiens
attgcttctgtatct

SEQ ID NO: 844895 - DNA, 15 bp, Homo sapiens
ttgcttctgtatcta

SEQ ID NO: 844896 - DNA, 15 bp, Homo sapiens
tgcttctgtatctac

SEQ ID NO: 844897 - DNA, 15 bp, Homo sapiens
gcttctgtatctaca

SEQ ID NO: 844898 - DNA, 15 bp, Homo sapiens
cttctgtatctacac

SEQ ID NO: 844899 - DNA, 15 bp, Homo sapiens
ttctgtatctacaca

SEQ ID NO: 844900 - DNA, 15 bp, Homo sapiens
tctgtatctacacaa

SEQ ID NO: 844901 - DNA, 15 bp, Homo sapiens
ctgtatctacacaac

SEQ ID NO: 844902 - DNA, 15 bp, Homo sapiens
tgtatctacacaacc

SEQ ID NO: 844903 - DNA, 15 bp, Homo sapiens
gtatctacacaaccc

SEQ ID NO: 844904 - DNA, 15 bp, Homo sapiens
tatctacacaaccca

SEQ ID NO: 844905 - DNA, 15 bp, Homo sapiens
atctacacaacccac

SEQ ID NO: 844906 - DNA, 15 bp, Homo sapiens
tctacacaacccaca

SEQ ID NO: 844907 - DNA, 15 bp, Homo sapiens
ctacacaacccacat

SEQ ID NO: 844908 - DNA, 15 bp, Homo sapiens
tacacaacccacatt

SEQ ID NO: 844909 - DNA, 15 bp, Homo sapiens
acacaacccacattc

SEQ ID NO: 844910 - DNA, 15 bp, Homo sapiens
cacaacccacattcc

SEQ ID NO: 844911 - DNA, 15 bp, Homo sapiens
acaacccacattcca

SEQ ID NO: 844912 - DNA, 15 bp, Homo sapiens
caacccacattccaa

SEQ ID NO: 844913 - DNA, 15 bp, Homo sapiens
aacccacattccaat

SEQ ID NO: 844914 - DNA, 15 bp, Homo sapiens
acccacattccaatg

SEQ ID NO: 844915 - DNA, 15 bp, Homo sapiens
cccacattccaatgg

SEQ ID NO: 844916 - DNA, 15 bp, Homo sapiens
ccacattccaatgga

SEQ ID NO: 844917 - DNA, 15 bp, Homo sapiens
cacattccaatggag

SEQ ID NO: 844918 - DNA, 15 bp, Homo sapiens
acattccaatggaga

SEQ ID NO: 844919 - DNA, 15 bp, Homo sapiens
cattccaatggagat

SEQ ID NO: 844920 - DNA, 15 bp, Homo sapiens
attccaatggagatt

SEQ ID NO: 844921 - DNA, 15 bp, Homo sapiens
ttccaatggagattc

SEQ ID NO: 844922 - DNA, 15 bp, Homo sapiens
tccaatggagattca

SEQ ID NO: 844923 - DNA, 15 bp, Homo sapiens
ccaatggagattcag

SEQ ID NO: 844924 - DNA, 15 bp, Homo sapiens
caatggagattcagc

SEQ ID NO: 844925 - DNA, 15 bp, Homo sapiens
aatggagattcagct

SEQ ID NO: 844926 - DNA, 15 bp, Homo sapiens
atggagattcagcta

SEQ ID NO: 844927 - DNA, 15 bp, Homo sapiens
tggagattcagctat

SEQ ID NO: 844928 - DNA, 15 bp, Homo sapiens
ggagattcagctatt

SEQ ID NO: 844929 - DNA, 15 bp, Homo sapiens
gagattcagctatta

SEQ ID NO: 844930 - DNA, 15 bp, Homo sapiens
agattcagctattac

SEQ ID NO: 844931 - DNA, 15 bp, Homo sapiens
gattcagctattact

SEQ ID NO: 844932 - DNA, 15 bp, Homo sapiens
attcagctattactg

SEQ ID NO: 844933 - DNA, 15 bp, Homo sapiens
ttcagctattactgg

SEQ ID NO: 844934 - DNA, 15 bp, Homo sapiens
tcagctattactggg

SEQ ID NO: 844935 - DNA, 15 bp, Homo sapiens
cagctattactgggg

SEQ ID NO: 844936 - DNA, 15 bp, Homo sapiens
agctattactggggt

SEQ ID NO: 844937 - DNA, 15 bp, Homo sapiens
gctattactggggtc

SEQ ID NO: 844938 - DNA, 15 bp, Homo sapiens
ctattactggggtca

SEQ ID NO: 844939 - DNA, 15 bp, Homo sapiens
tattactggggtcac

SEQ ID NO: 844940 - DNA, 15 bp, Homo sapiens
attactggggtcact

SEQ ID NO: 844941 - DNA, 15 bp, Homo sapiens
ttactggggtcactg

SEQ ID NO: 844942 - DNA, 15 bp, Homo sapiens
tactggggtcactga

SEQ ID NO: 844943 - DNA, 15 bp, Homo sapiens
actggggtcactgaa

SEQ ID NO: 844944 - DNA, 15 bp, Homo sapiens
ctggggtcactgaat

SEQ ID NO: 844945 - DNA, 15 bp, Homo sapiens
tggggtcactgaatc

SEQ ID NO: 844946 - DNA, 15 bp, Homo sapiens
ggggtcactgaatca

SEQ ID NO: 844947 - DNA, 15 bp, Homo sapiens
gggtcactgaatcaa

SEQ ID NO: 844948 - DNA, 15 bp, Homo sapiens
ggtcactgaatcaat

SEQ ID NO: 844949 - DNA, 15 bp, Homo sapiens
gtcactgaatcaatg

SEQ ID NO: 844950 - DNA, 15 bp, Homo sapiens
tcactgaatcaatgg

SEQ ID NO: 844951 - DNA, 15 bp, Homo sapiens
cactgaatcaatgga

SEQ ID NO: 844952 - DNA, 15 bp, Homo sapiens
actgaatcaatggag

SEQ ID NO: 844953 - DNA, 15 bp, Homo sapiens
ctgaatcaatggaga

SEQ ID NO: 844954 - DNA, 15 bp, Homo sapiens
tgaatcaatggagag

SEQ ID NO: 844955 - DNA, 15 bp, Homo sapiens
gaatcaatggagaga

SEQ ID NO: 844956 - DNA, 15 bp, Homo sapiens
aatcaatggagagag

SEQ ID NO: 844957 - DNA, 15 bp, Homo sapiens
atcaatggagagaga

SEQ ID NO: 844958 - DNA, 15 bp, Homo sapiens
tcaatggagagagac

SEQ ID NO: 844959 - DNA, 15 bp, Homo sapiens
caatggagagagact

SEQ ID NO: 844960 - DNA, 15 bp, Homo sapiens
aatggagagagacta

SEQ ID NO: 844961 - DNA, 15 bp, Homo sapiens
atggagagagactaa

SEQ ID NO: 844962 - DNA, 15 bp, Homo sapiens
tggagagagactaag

SEQ ID NO: 844963 - DNA, 15 bp, Homo sapiens
ggagagagactaagt

SEQ ID NO: 844964 - DNA, 15 bp, Homo sapiens
gagagagactaagta

SEQ ID NO: 844965 - DNA, 15 bp, Homo sapiens
agagagactaagtag

SEQ ID NO: 844966 - DNA, 15 bp, Homo sapiens
gagagactaagtaga

SEQ ID NO: 844967 - DNA, 15 bp, Homo sapiens
agagactaagtagat

SEQ ID NO: 844968 - DNA, 15 bp, Homo sapiens
gagactaagtagata

SEQ ID NO: 844969 - DNA, 15 bp, Homo sapiens
agactaagtagataa

SEQ ID NO: 844970 - DNA, 15 bp, Homo sapiens
gactaagtagataaa

SEQ ID NO: 844971 - DNA, 15 bp, Homo sapiens
actaagtagataaat

SEQ ID NO: 844972 - DNA, 15 bp, Homo sapiens
ctaagtagataaatc

SEQ ID NO: 844973 - DNA, 15 bp, Homo sapiens
taagtagataaatct

SEQ ID NO: 844974 - DNA, 15 bp, Homo sapiens
aagtagataaatctg

SEQ ID NO: 844975 - DNA, 15 bp, Homo sapiens
agtagataaatctgg

SEQ ID NO: 844976 - DNA, 15 bp, Homo sapiens
gtagataaatctgga

SEQ ID NO: 844977 - DNA, 15 bp, Homo sapiens
tagataaatctggac

SEQ ID NO: 844978 - DNA, 15 bp, Homo sapiens
agataaatctggacc

SEQ ID NO: 844979 - DNA, 15 bp, Homo sapiens
gataaatctggaccc

SEQ ID NO: 844980 - DNA, 15 bp, Homo sapiens
ataaatctggacccc

SEQ ID NO: 844981 - DNA, 15 bp, Homo sapiens
taaatctggacccct

SEQ ID NO: 844982 - DNA, 15 bp, Homo sapiens
aaatctggacccctg

SEQ ID NO: 844983 - DNA, 15 bp, Homo sapiens
aatctggacccctga

SEQ ID NO: 844984 - DNA, 15 bp, Homo sapiens
atctggacccctgaa

SEQ ID NO: 844985 - DNA, 15 bp, Homo sapiens
tctggacccctgaaa

SEQ ID NO: 844986 - DNA, 15 bp, Homo sapiens
ctggacccctgaaat

SEQ ID NO: 844987 - DNA, 15 bp, Homo sapiens
tggacccctgaaata

SEQ ID NO: 844988 - DNA, 15 bp, Homo sapiens
ggacccctgaaatat

SEQ ID NO: 844989 - DNA, 15 bp, Homo sapiens
gacccctgaaatatt

SEQ ID NO: 844990 - DNA, 15 bp, Homo sapiens
acccctgaaatattg

SEQ ID NO: 844991 - DNA, 15 bp, Homo sapiens
cccctgaaatattgt

SEQ ID NO: 844992 - DNA, 15 bp, Homo sapiens
ccctgaaatattgtt

SEQ ID NO: 844993 - DNA, 15 bp, Homo sapiens
cctgaaatattgttt

SEQ ID NO: 844994 - DNA, 15 bp, Homo sapiens
ctgaaatattgttta

SEQ ID NO: 844995 - DNA, 15 bp, Homo sapiens
tgaaatattgtttag

SEQ ID NO: 844996 - DNA, 15 bp, Homo sapiens
gaaatattgtttagg

SEQ ID NO: 844997 - DNA, 15 bp, Homo sapiens
aaatattgtttaggc

SEQ ID NO: 844998 - DNA, 15 bp, Homo sapiens
aatattgtttaggct

SEQ ID NO: 844999 - DNA, 15 bp, Homo sapiens
atattgtttaggcta

SEQ ID NO: 845000 - DNA, 15 bp, Homo sapiens
tattgtttaggctaa

SEQ ID NO: 845001 - DNA, 15 bp, Homo sapiens
attgtttaggctaat

SEQ ID NO: 845002 - DNA, 15 bp, Homo sapiens
ttgtttaggctaatt

SEQ ID NO: 845003 - DNA, 15 bp, Homo sapiens
tgtttaggctaatta

SEQ ID NO: 845004 - DNA, 15 bp, Homo sapiens
gtttaggctaattat

SEQ ID NO: 845005 - DNA, 15 bp, Homo sapiens
tttaggctaattatc

SEQ ID NO: 845006 - DNA, 15 bp, Homo sapiens
ttaggctaattatca

SEQ ID NO: 845007 - DNA, 15 bp, Homo sapiens
taggctaattatcac

SEQ ID NO: 845008 - DNA, 15 bp, Homo sapiens
aggctaattatcaca

SEQ ID NO: 845009 - DNA, 15 bp, Homo sapiens
ggctaattatcacaa

SEQ ID NO: 845010 - DNA, 15 bp, Homo sapiens
gctaattatcacaac

SEQ ID NO: 845011 - DNA, 15 bp, Homo sapiens
ctaattatcacaaca

SEQ ID NO: 845012 - DNA, 15 bp, Homo sapiens
taattatcacaacag

SEQ ID NO: 845013 - DNA, 15 bp, Homo sapiens
aattatcacaacagc

SEQ ID NO: 845014 - DNA, 15 bp, Homo sapiens
attatcacaacagcc

SEQ ID NO: 845015 - DNA, 15 bp, Homo sapiens
ttatcacaacagccc

SEQ ID NO: 845016 - DNA, 15 bp, Homo sapiens
tatcacaacagccca

SEQ ID NO: 845017 - DNA, 15 bp, Homo sapiens
atcacaacagcccaa

SEQ ID NO: 845018 - DNA, 15 bp, Homo sapiens
tcacaacagcccaaa

SEQ ID NO: 845019 - DNA, 15 bp, Homo sapiens
cacaacagcccaaac

SEQ ID NO: 845020 - DNA, 15 bp, Homo sapiens
acaacagcccaaaca

SEQ ID NO: 845021 - DNA, 15 bp, Homo sapiens
caacagcccaaacac

SEQ ID NO: 845022 - DNA, 15 bp, Homo sapiens
aacagcccaaacact

SEQ ID NO: 845023 - DNA, 15 bp, Homo sapiens
acagcccaaacactt

SEQ ID NO: 845024 - DNA, 15 bp, Homo sapiens
cagcccaaacacttg

SEQ ID NO: 845025 - DNA, 15 bp, Homo sapiens
agcccaaacacttgg

SEQ ID NO: 845026 - DNA, 15 bp, Homo sapiens
gcccaaacacttgga

SEQ ID NO: 845027 - DNA, 15 bp, Homo sapiens
cccaaacacttggat

SEQ ID NO: 845028 - DNA, 15 bp, Homo sapiens
ccaaacacttggata

SEQ ID NO: 845029 - DNA, 15 bp, Homo sapiens
caaacacttggatac

SEQ ID NO: 845030 - DNA, 15 bp, Homo sapiens
aaacacttggatacc

SEQ ID NO: 845031 - DNA, 15 bp, Homo sapiens
aacacttggataccc

SEQ ID NO: 845032 - DNA, 15 bp, Homo sapiens
acacttggataccca

SEQ ID NO: 845033 - DNA, 15 bp, Homo sapiens
cacttggatacccat

SEQ ID NO: 845034 - DNA, 15 bp, Homo sapiens
acttggatacccatc

SEQ ID NO: 845035 - DNA, 15 bp, Homo sapiens
cttggatacccatct

SEQ ID NO: 845036 - DNA, 15 bp, Homo sapiens
ttggatacccatctt

SEQ ID NO: 845037 - DNA, 15 bp, Homo sapiens
tggatacccatcttg

SEQ ID NO: 845038 - DNA, 15 bp, Homo sapiens
ggatacccatcttgt

SEQ ID NO: 845039 - DNA, 15 bp, Homo sapiens
gatacccatcttgtg

SEQ ID NO: 845040 - DNA, 15 bp, Homo sapiens
atacccatcttgtgc

SEQ ID NO: 845041 - DNA, 15 bp, Homo sapiens
tacccatcttgtgct

SEQ ID NO: 845042 - DNA, 15 bp, Homo sapiens
acccatcttgtgctt

SEQ ID NO: 845043 - DNA, 15 bp, Homo sapiens
cccatcttgtgctta

SEQ ID NO: 845044 - DNA, 15 bp, Homo sapiens
ccatcttgtgcttaa

SEQ ID NO: 845045 - DNA, 15 bp, Homo sapiens
catcttgtgcttaat

SEQ ID NO: 845046 - DNA, 15 bp, Homo sapiens
atcttgtgcttaatt

SEQ ID NO: 845047 - DNA, 15 bp, Homo sapiens
tcttgtgcttaattg

SEQ ID NO: 845048 - DNA, 15 bp, Homo sapiens
cttgtgcttaattgt

SEQ ID NO: 845049 - DNA, 15 bp, Homo sapiens
ttgtgcttaattgtc

SEQ ID NO: 845050 - DNA, 15 bp, Homo sapiens
tgtgcttaattgtct

SEQ ID NO: 845051 - DNA, 15 bp, Homo sapiens
gtgcttaattgtcta

SEQ ID NO: 845052 - DNA, 15 bp, Homo sapiens
tgcttaattgtctaa

SEQ ID NO: 845053 - DNA, 15 bp, Homo sapiens
gcttaattgtctaaa

SEQ ID NO: 845054 - DNA, 15 bp, Homo sapiens
cttaattgtctaaaa

SEQ ID NO: 845055 - DNA, 15 bp, Homo sapiens
ttaattgtctaaaag

SEQ ID NO: 845056 - DNA, 15 bp, Homo sapiens
taattgtctaaaagc

SEQ ID NO: 845057 - DNA, 15 bp, Homo sapiens
aattgtctaaaagct

SEQ ID NO: 845058 - DNA, 15 bp, Homo sapiens
attgtctaaaagctt

SEQ ID NO: 845059 - DNA, 15 bp, Homo sapiens
ttgtctaaaagcttt

SEQ ID NO: 845060 - DNA, 15 bp, Homo sapiens
tgtctaaaagctttc

SEQ ID NO: 845061 - DNA, 15 bp, Homo sapiens
gtctaaaagctttct

SEQ ID NO: 845062 - DNA, 15 bp, Homo sapiens
tctaaaagctttctc

SEQ ID NO: 845063 - DNA, 15 bp, Homo sapiens
ctaaaagctttctct

SEQ ID NO: 845064 - DNA, 15 bp, Homo sapiens
taaaagctttctctg

SEQ ID NO: 845065 - DNA, 15 bp, Homo sapiens
aaaagctttctctgt

SEQ ID NO: 845066 - DNA, 15 bp, Homo sapiens
aaagctttctctgta

SEQ ID NO: 845067 - DNA, 15 bp, Homo sapiens
aagctttctctgtaa

SEQ ID NO: 845068 - DNA, 15 bp, Homo sapiens
agctttctctgtaac

SEQ ID NO: 845069 - DNA, 15 bp, Homo sapiens
gctttctctgtaact

SEQ ID NO: 845070 - DNA, 15 bp, Homo sapiens
ctttctctgtaactg

SEQ ID NO: 845071 - DNA, 15 bp, Homo sapiens
tttctctgtaactgg

SEQ ID NO: 845072 - DNA, 15 bp, Homo sapiens
ttctctgtaactggc

SEQ ID NO: 845073 - DNA, 15 bp, Homo sapiens
tctctgtaactggct

SEQ ID NO: 845074 - DNA, 15 bp, Homo sapiens
ctctgtaactggctc

SEQ ID NO: 845075 - DNA, 15 bp, Homo sapiens
tctgtaactggctcc

SEQ ID NO: 845076 - DNA, 15 bp, Homo sapiens
ctgtaactggctcca

SEQ ID NO: 845077 - DNA, 15 bp, Homo sapiens
tgtaactggctccaa

SEQ ID NO: 845078 - DNA, 15 bp, Homo sapiens
gtaactggctccaat

SEQ ID NO: 845079 - DNA, 15 bp, Homo sapiens
taactggctccaata

SEQ ID NO: 845080 - DNA, 15 bp, Homo sapiens
aactggctccaatat

SEQ ID NO: 845081 - DNA, 15 bp, Homo sapiens
actggctccaatatc

SEQ ID NO: 845082 - DNA, 15 bp, Homo sapiens
ctggctccaatatct

SEQ ID NO: 845083 - DNA, 15 bp, Homo sapiens
tggctccaatatcta

SEQ ID NO: 845084 - DNA, 15 bp, Homo sapiens
ggctccaatatctag

SEQ ID NO: 845085 - DNA, 15 bp, Homo sapiens
gctccaatatctagc

SEQ ID NO: 845086 - DNA, 15 bp, Homo sapiens
ctccaatatctagca

SEQ ID NO: 845087 - DNA, 15 bp, Homo sapiens
tccaatatctagcaa

SEQ ID NO: 845088 - DNA, 15 bp, Homo sapiens
ccaatatctagcaat

SEQ ID NO: 845089 - DNA, 15 bp, Homo sapiens
caatatctagcaata

SEQ ID NO: 845090 - DNA, 15 bp, Homo sapiens
aatatctagcaatac

SEQ ID NO: 845091 - DNA, 15 bp, Homo sapiens
atatctagcaatact

SEQ ID NO: 845092 - DNA, 15 bp, Homo sapiens
tatctagcaatactt

SEQ ID NO: 845093 - DNA, 15 bp, Homo sapiens
atctagcaatacttc

SEQ ID NO: 845094 - DNA, 15 bp, Homo sapiens
tctagcaatacttca

SEQ ID NO: 845095 - DNA, 15 bp, Homo sapiens
ctagcaatacttcat

SEQ ID NO: 845096 - DNA, 15 bp, Homo sapiens
tagcaatacttcatg

SEQ ID NO: 845097 - DNA, 15 bp, Homo sapiens
agcaatacttcatgg

SEQ ID NO: 845098 - DNA, 15 bp, Homo sapiens
gcaatacttcatgga

SEQ ID NO: 845099 - DNA, 15 bp, Homo sapiens
caatacttcatggaa

SEQ ID NO: 845100 - DNA, 15 bp, Homo sapiens
aatacttcatggaaa

SEQ ID NO: 845101 - DNA, 15 bp, Homo sapiens
atacttcatggaaag

SEQ ID NO: 845102 - DNA, 15 bp, Homo sapiens
tacttcatggaaagc

SEQ ID NO: 845103 - DNA, 15 bp, Homo sapiens
acttcatggaaagca

SEQ ID NO: 845104 - DNA, 15 bp, Homo sapiens
cttcatggaaagcat

SEQ ID NO: 845105 - DNA, 15 bp, Homo sapiens
ttcatggaaagcatt

SEQ ID NO: 845106 - DNA, 15 bp, Homo sapiens
tcatggaaagcattc

SEQ ID NO: 845107 - DNA, 15 bp, Homo sapiens
catggaaagcattct

SEQ ID NO: 845108 - DNA, 15 bp, Homo sapiens
atggaaagcattctt

SEQ ID NO: 845109 - DNA, 15 bp, Homo sapiens
tggaaagcattcttt

SEQ ID NO: 845110 - DNA, 15 bp, Homo sapiens
ggaaagcattctttt

SEQ ID NO: 845111 - DNA, 15 bp, Homo sapiens
gaaagcattcttttt

SEQ ID NO: 845112 - DNA, 15 bp, Homo sapiens
aaagcattctttttc

SEQ ID NO: 845113 - DNA, 15 bp, Homo sapiens
aagcattctttttca

SEQ ID NO: 845114 - DNA, 15 bp, Homo sapiens
agcattctttttcat

SEQ ID NO: 845115 - DNA, 15 bp, Homo sapiens
gcattctttttcatc

SEQ ID NO: 845116 - DNA, 15 bp, Homo sapiens
cattctttttcatct

SEQ ID NO: 845117 - DNA, 15 bp, Homo sapiens
attctttttcatctc

SEQ ID NO: 845118 - DNA, 15 bp, Homo sapiens
ttctttttcatctct

SEQ ID NO: 845119 - DNA, 15 bp, Homo sapiens
ctttttcatctctgg

SEQ ID NO: 845120 - DNA, 15 bp, Homo sapiens
tttttcatctctggt

SEQ ID NO: 845121 - DNA, 15 bp, Homo sapiens
ttttcatctctggtt

SEQ ID NO: 845122 - DNA, 15 bp, Homo sapiens
tttcatctctggttc

SEQ ID NO: 845123 - DNA, 15 bp, Homo sapiens
ttcatctctggttca

SEQ ID NO: 845124 - DNA, 15 bp, Homo sapiens
tcatctctggttcaa

SEQ ID NO: 845125 - DNA, 15 bp, Homo sapiens
catctctggttcaaa

SEQ ID NO: 845126 - DNA, 15 bp, Homo sapiens
atctctggttcaaat

SEQ ID NO: 845127 - DNA, 15 bp, Homo sapiens
tctctggttcaaatc

SEQ ID NO: 845128 - DNA, 15 bp, Homo sapiens
ctctggttcaaatcc

SEQ ID NO: 845129 - DNA, 15 bp, Homo sapiens
tctggttcaaatcct

SEQ ID NO: 845130 - DNA, 15 bp, Homo sapiens
ctggttcaaatcctt

SEQ ID NO: 845131 - DNA, 15 bp, Homo sapiens
tggttcaaatccttt

SEQ ID NO: 845132 - DNA, 15 bp, Homo sapiens
ggttcaaatccttta

SEQ ID NO: 845133 - DNA, 15 bp, Homo sapiens
gttcaaatcctttag

SEQ ID NO: 845134 - DNA, 15 bp, Homo sapiens
ttcaaatcctttagg

SEQ ID NO: 845135 - DNA, 15 bp, Homo sapiens
tcaaatcctttaggc

SEQ ID NO: 845136 - DNA, 15 bp, Homo sapiens
caaatcctttaggct

SEQ ID NO: 845137 - DNA, 15 bp, Homo sapiens
aaatcctttaggctg

SEQ ID NO: 845138 - DNA, 15 bp, Homo sapiens
aatcctttaggctgt

SEQ ID NO: 845139 - DNA, 15 bp, Homo sapiens
atcctttaggctgta

SEQ ID NO: 845140 - DNA, 15 bp, Homo sapiens
tcctttaggctgtaa

SEQ ID NO: 845141 - DNA, 15 bp, Homo sapiens
cctttaggctgtaat

SEQ ID NO: 845142 - DNA, 15 bp, Homo sapiens
ctttaggctgtaatc

SEQ ID NO: 845143 - DNA, 15 bp, Homo sapiens
tttaggctgtaatcg

SEQ ID NO: 845144 - DNA, 15 bp, Homo sapiens
ttaggctgtaatcga

SEQ ID NO: 845145 - DNA, 15 bp, Homo sapiens
taggctgtaatcgat

SEQ ID NO: 845146 - DNA, 15 bp, Homo sapiens
aggctgtaatcgatt

SEQ ID NO: 845147 - DNA, 15 bp, Homo sapiens
ggctgtaatcgattc

SEQ ID NO: 845148 - DNA, 15 bp, Homo sapiens
gctgtaatcgattct

SEQ ID NO: 845149 - DNA, 15 bp, Homo sapiens
ctgtaatcgattctt

SEQ ID NO: 845150 - DNA, 15 bp, Homo sapiens
tgtaatcgattcttc

SEQ ID NO: 845151 - DNA, 15 bp, Homo sapiens
gtaatcgattcttct

SEQ ID NO: 845152 - DNA, 15 bp, Homo sapiens
taatcgattcttctg

SEQ ID NO: 845153 - DNA, 15 bp, Homo sapiens
aatcgattcttctga

SEQ ID NO: 845154 - DNA, 15 bp, Homo sapiens
atcgattcttctgaa

SEQ ID NO: 845155 - DNA, 15 bp, Homo sapiens
tcgattcttctgaat

SEQ ID NO: 845156 - DNA, 15 bp, Homo sapiens
cgattcttctgaatc

SEQ ID NO: 845157 - DNA, 15 bp, Homo sapiens
gattcttctgaatct

SEQ ID NO: 845158 - DNA, 15 bp, Homo sapiens
attcttctgaatctc

SEQ ID NO: 845159 - DNA, 15 bp, Homo sapiens
ttcttctgaatctct

SEQ ID NO: 845160 - DNA, 15 bp, Homo sapiens
tcttctgaatctctt

SEQ ID NO: 845161 - DNA, 15 bp, Homo sapiens
cttctgaatctcttg

SEQ ID NO: 845162 - DNA, 15 bp, Homo sapiens
ttctgaatctcttgt

SEQ ID NO: 845163 - DNA, 15 bp, Homo sapiens
tctgaatctcttgtc

SEQ ID NO: 845164 - DNA, 15 bp, Homo sapiens
ctgaatctcttgtcc

SEQ ID NO: 845165 - DNA, 15 bp, Homo sapiens
tgaatctcttgtcct

SEQ ID NO: 845166 - DNA, 15 bp, Homo sapiens
gaatctcttgtcctc

SEQ ID NO: 845167 - DNA, 15 bp, Homo sapiens
aatctcttgtcctca

SEQ ID NO: 845168 - DNA, 15 bp, Homo sapiens
atctcttgtcctcaa

SEQ ID NO: 845169 - DNA, 15 bp, Homo sapiens
tctcttgtcctcaag

SEQ ID NO: 845170 - DNA, 15 bp, Homo sapiens
ctcttgtcctcaagg

SEQ ID NO: 845171 - DNA, 15 bp, Homo sapiens
tcttgtcctcaaggc

SEQ ID NO: 845172 - DNA, 15 bp, Homo sapiens
cttgtcctcaaggca

SEQ ID NO: 845173 - DNA, 15 bp, Homo sapiens
ttgtcctcaaggcat

SEQ ID NO: 845174 - DNA, 15 bp, Homo sapiens
tgtcctcaaggcatc

SEQ ID NO: 845175 - DNA, 15 bp, Homo sapiens
gtcctcaaggcatca

SEQ ID NO: 845176 - DNA, 15 bp, Homo sapiens
tcctcaaggcatcat

SEQ ID NO: 845177 - DNA, 15 bp, Homo sapiens
cctcaaggcatcatg

SEQ ID NO: 845178 - DNA, 15 bp, Homo sapiens
ctcaaggcatcatgg

SEQ ID NO: 845179 - DNA, 15 bp, Homo sapiens
tcaaggcatcatgga

SEQ ID NO: 845180 - DNA, 15 bp, Homo sapiens
caaggcatcatggag

SEQ ID NO: 845181 - DNA, 15 bp, Homo sapiens
aaggcatcatggaga

SEQ ID NO: 845182 - DNA, 15 bp, Homo sapiens
aggcatcatggagaa

SEQ ID NO: 845183 - DNA, 15 bp, Homo sapiens
ggcatcatggagaat

SEQ ID NO: 845184 - DNA, 15 bp, Homo sapiens
gcatcatggagaata

SEQ ID NO: 845185 - DNA, 15 bp, Homo sapiens
catcatggagaatac

SEQ ID NO: 845186 - DNA, 15 bp, Homo sapiens
atcatggagaatact

SEQ ID NO: 845187 - DNA, 15 bp, Homo sapiens
tcatggagaatactt

SEQ ID NO: 845188 - DNA, 15 bp, Homo sapiens
catggagaatacttg

SEQ ID NO: 845189 - DNA, 15 bp, Homo sapiens
atggagaatacttgc

SEQ ID NO: 845190 - DNA, 15 bp, Homo sapiens
tggagaatacttgcc

SEQ ID NO: 845191 - DNA, 15 bp, Homo sapiens
ggagaatacttgccc

SEQ ID NO: 845192 - DNA, 15 bp, Homo sapiens
gagaatacttgcccc

SEQ ID NO: 845193 - DNA, 15 bp, Homo sapiens
agaatacttgcccct

SEQ ID NO: 845194 - DNA, 15 bp, Homo sapiens
gaatacttgcccctt

SEQ ID NO: 845195 - DNA, 15 bp, Homo sapiens
aatacttgcccctta

SEQ ID NO: 845196 - DNA, 15 bp, Homo sapiens
atacttgccccttat

SEQ ID NO: 845197 - DNA, 15 bp, Homo sapiens
tacttgccccttatt

SEQ ID NO: 845198 - DNA, 15 bp, Homo sapiens
acttgccccttattc

SEQ ID NO: 845199 - DNA, 15 bp, Homo sapiens
cttgccccttattct

SEQ ID NO: 845200 - DNA, 15 bp, Homo sapiens
ttgccccttattctt

SEQ ID NO: 845201 - DNA, 15 bp, Homo sapiens
tgccccttattcttc

SEQ ID NO: 845202 - DNA, 15 bp, Homo sapiens
gccccttattcttca

SEQ ID NO: 845203 - DNA, 15 bp, Homo sapiens
ccccttattcttcac

SEQ ID NO: 845204 - DNA, 15 bp, Homo sapiens
cccttattcttcacc

SEQ ID NO: 845205 - DNA, 15 bp, Homo sapiens
ccttattcttcaccg

SEQ ID NO: 845206 - DNA, 15 bp, Homo sapiens
cttattcttcaccgt

SEQ ID NO: 845207 - DNA, 15 bp, Homo sapiens
ttattcttcaccgtc

SEQ ID NO: 845208 - DNA, 15 bp, Homo sapiens
tattcttcaccgtct

SEQ ID NO: 845209 - DNA, 15 bp, Homo sapiens
attcttcaccgtctt

SEQ ID NO: 845210 - DNA, 15 bp, Homo sapiens
ttcttcaccgtcttt

SEQ ID NO: 845211 - DNA, 15 bp, Homo sapiens
tcttcaccgtctttg

SEQ ID NO: 845212 - DNA, 15 bp, Homo sapiens
cttcaccgtctttgg

SEQ ID NO: 845213 - DNA, 15 bp, Homo sapiens
ttcaccgtctttggg

SEQ ID NO: 845214 - DNA, 15 bp, Homo sapiens
tcaccgtctttggga

SEQ ID NO: 845215 - DNA, 15 bp, Homo sapiens
caccgtctttgggaa

SEQ ID NO: 845216 - DNA, 15 bp, Homo sapiens
accgtctttgggaac

SEQ ID NO: 845217 - DNA, 15 bp, Homo sapiens
ccgtctttgggaaca

SEQ ID NO: 845218 - DNA, 15 bp, Homo sapiens
cgtctttgggaacag

SEQ ID NO: 845219 - DNA, 15 bp, Homo sapiens
gtctttgggaacagc

SEQ ID NO: 845220 - DNA, 15 bp, Homo sapiens
tctttgggaacagct

SEQ ID NO: 845221 - DNA, 15 bp, Homo sapiens
ctttgggaacagctc

SEQ ID NO: 845222 - DNA, 15 bp, Homo sapiens
tttgggaacagctcc

SEQ ID NO: 845223 - DNA, 15 bp, Homo sapiens
ttgggaacagctcct

SEQ ID NO: 845224 - DNA, 15 bp, Homo sapiens
tgggaacagctcctt

SEQ ID NO: 845225 - DNA, 15 bp, Homo sapiens
gggaacagctccttg

SEQ ID NO: 845226 - DNA, 15 bp, Homo sapiens
ggaacagctccttgc

SEQ ID NO: 845227 - DNA, 15 bp, Homo sapiens
gaacagctccttgct

SEQ ID NO: 845228 - DNA, 15 bp, Homo sapiens
aacagctccttgcta

SEQ ID NO: 845229 - DNA, 15 bp, Homo sapiens
acagctccttgctac

SEQ ID NO: 845230 - DNA, 15 bp, Homo sapiens
cagctccttgctact

SEQ ID NO: 845231 - DNA, 15 bp, Homo sapiens
agctccttgctactc

SEQ ID NO: 845232 - DNA, 15 bp, Homo sapiens
gctccttgctactca

SEQ ID NO: 845233 - DNA, 15 bp, Homo sapiens
ctccttgctactcaa

SEQ ID NO: 845234 - DNA, 15 bp, Homo sapiens
tccttgctactcaaa

SEQ ID NO: 845235 - DNA, 15 bp, Homo sapiens
ccttgctactcaaaa

SEQ ID NO: 845236 - DNA, 15 bp, Homo sapiens
cttgctactcaaaat

SEQ ID NO: 845237 - DNA, 15 bp, Homo sapiens
ttgctactcaaaatg

SEQ ID NO: 845238 - DNA, 15 bp, Homo sapiens
tgctactcaaaatgt

SEQ ID NO: 845239 - DNA, 15 bp, Homo sapiens
gctactcaaaatgtg

SEQ ID NO: 845240 - DNA, 15 bp, Homo sapiens
ctactcaaaatgtgg

SEQ ID NO: 845241 - DNA, 15 bp, Homo sapiens
tactcaaaatgtggg

SEQ ID NO: 845242 - DNA, 15 bp, Homo sapiens
actcaaaatgtgggc

SEQ ID NO: 845243 - DNA, 15 bp, Homo sapiens
ctcaaaatgtgggcc

SEQ ID NO: 845244 - DNA, 15 bp, Homo sapiens
tcaaaatgtgggccc

SEQ ID NO: 845245 - DNA, 15 bp, Homo sapiens
caaaatgtgggccct

SEQ ID NO: 845246 - DNA, 15 bp, Homo sapiens
aaaatgtgggcccta

SEQ ID NO: 845247 - DNA, 15 bp, Homo sapiens
aaatgtgggccctat

SEQ ID NO: 845248 - DNA, 15 bp, Homo sapiens
aatgtgggccctata

SEQ ID NO: 845249 - DNA, 15 bp, Homo sapiens
atgtgggccctatag

SEQ ID NO: 845250 - DNA, 15 bp, Homo sapiens
tgtgggccctatagg

SEQ ID NO: 845251 - DNA, 15 bp, Homo sapiens
gtgggccctataggg

SEQ ID NO: 845252 - DNA, 15 bp, Homo sapiens
tgggccctatagggg

SEQ ID NO: 845253 - DNA, 15 bp, Homo sapiens
gggccctatagggga

SEQ ID NO: 845254 - DNA, 15 bp, Homo sapiens
ggccctataggggaa

SEQ ID NO: 845255 - DNA, 15 bp, Homo sapiens
gccctataggggaag

SEQ ID NO: 845256 - DNA, 15 bp, Homo sapiens
ccctataggggaagc

SEQ ID NO: 845257 - DNA, 15 bp, Homo sapiens
cctataggggaagca

SEQ ID NO: 845258 - DNA, 15 bp, Homo sapiens
ctataggggaagcat

SEQ ID NO: 845259 - DNA, 15 bp, Homo sapiens
tataggggaagcatc

SEQ ID NO: 845260 - DNA, 15 bp, Homo sapiens
ataggggaagcatca

SEQ ID NO: 845261 - DNA, 15 bp, Homo sapiens
taggggaagcatcag

SEQ ID NO: 845262 - DNA, 15 bp, Homo sapiens
aggggaagcatcagt

SEQ ID NO: 845263 - DNA, 15 bp, Homo sapiens
ggggaagcatcagtg

SEQ ID NO: 845264 - DNA, 15 bp, Homo sapiens
gggaagcatcagtgt

SEQ ID NO: 845265 - DNA, 15 bp, Homo sapiens
ggaagcatcagtgtc

SEQ ID NO: 845266 - DNA, 15 bp, Homo sapiens
gaagcatcagtgtca

SEQ ID NO: 845267 - DNA, 15 bp, Homo sapiens
aagcatcagtgtcat

SEQ ID NO: 845268 - DNA, 15 bp, Homo sapiens
agcatcagtgtcatc

SEQ ID NO: 845269 - DNA, 15 bp, Homo sapiens
gcatcagtgtcatct

SEQ ID NO: 845270 - DNA, 15 bp, Homo sapiens
catcagtgtcatctg

SEQ ID NO: 845271 - DNA, 15 bp, Homo sapiens
atcagtgtcatctgc

SEQ ID NO: 845272 - DNA, 15 bp, Homo sapiens
tcagtgtcatctgcg

SEQ ID NO: 845273 - DNA, 15 bp, Homo sapiens
cagtgtcatctgcga

SEQ ID NO: 845274 - DNA, 15 bp, Homo sapiens
agtgtcatctgcgag

SEQ ID NO: 845275 - DNA, 15 bp, Homo sapiens
gtgtcatctgcgagc

SEQ ID NO: 845276 - DNA, 15 bp, Homo sapiens
tgtcatctgcgagct

SEQ ID NO: 845277 - DNA, 15 bp, Homo sapiens
gtcatctgcgagctt

SEQ ID NO: 845278 - DNA, 15 bp, Homo sapiens
tcatctgcgagcttg

SEQ ID NO: 845279 - DNA, 15 bp, Homo sapiens
catctgcgagcttgt

SEQ ID NO: 845280 - DNA, 15 bp, Homo sapiens
atctgcgagcttgtt

SEQ ID NO: 845281 - DNA, 15 bp, Homo sapiens
tctgcgagcttgtta

SEQ ID NO: 845282 - DNA, 15 bp, Homo sapiens
ctgcgagcttgttag

SEQ ID NO: 845283 - DNA, 15 bp, Homo sapiens
tgcgagcttgttaga

SEQ ID NO: 845284 - DNA, 15 bp, Homo sapiens
gcgagcttgttagaa

SEQ ID NO: 845285 - DNA, 15 bp, Homo sapiens
cgagcttgttagaaa

SEQ ID NO: 845286 - DNA, 15 bp, Homo sapiens
ttgttagaaatgcag

SEQ ID NO: 845287 - DNA, 15 bp, Homo sapiens
tgttagaaatgcaga

SEQ ID NO: 845288 - DNA, 15 bp, Homo sapiens
gttagaaatgcagac

SEQ ID NO: 845289 - DNA, 15 bp, Homo sapiens
ttagaaatgcagact

SEQ ID NO: 845290 - DNA, 15 bp, Homo sapiens
tagaaatgcagactc

SEQ ID NO: 845291 - DNA, 15 bp, Homo sapiens
agaaatgcagactca

SEQ ID NO: 845292 - DNA, 15 bp, Homo sapiens
gaaatgcagactcat

SEQ ID NO: 845293 - DNA, 15 bp, Homo sapiens
aaatgcagactcata

SEQ ID NO: 845294 - DNA, 15 bp, Homo sapiens
aatgcagactcatag

SEQ ID NO: 845295 - DNA, 15 bp, Homo sapiens
atgcagactcataga

SEQ ID NO: 845296 - DNA, 15 bp, Homo sapiens
tgcagactcatagac

SEQ ID NO: 845297 - DNA, 15 bp, Homo sapiens
gcagactcatagact

SEQ ID NO: 845298 - DNA, 15 bp, Homo sapiens
cagactcatagactt

SEQ ID NO: 845299 - DNA, 15 bp, Homo sapiens
agactcatagacttg

SEQ ID NO: 845300 - DNA, 15 bp, Homo sapiens
gactcatagacttga

SEQ ID NO: 845301 - DNA, 15 bp, Homo sapiens
actcatagacttgac

SEQ ID NO: 845302 - DNA, 15 bp, Homo sapiens
ctcatagacttgacc

SEQ ID NO: 845303 - DNA, 15 bp, Homo sapiens
tcatagacttgaccc

SEQ ID NO: 845304 - DNA, 15 bp, Homo sapiens
catagacttgacccc

SEQ ID NO: 845305 - DNA, 15 bp, Homo sapiens
atagacttgacccca

SEQ ID NO: 845306 - DNA, 15 bp, Homo sapiens
tagacttgaccccac

SEQ ID NO: 845307 - DNA, 15 bp, Homo sapiens
agacttgaccccacc

SEQ ID NO: 845308 - DNA, 15 bp, Homo sapiens
gacttgaccccacct

SEQ ID NO: 845309 - DNA, 15 bp, Homo sapiens
acttgaccccacctc

SEQ ID NO: 845310 - DNA, 15 bp, Homo sapiens
cttgaccccacctca

SEQ ID NO: 845311 - DNA, 15 bp, Homo sapiens
ttgaccccacctcag

SEQ ID NO: 845312 - DNA, 15 bp, Homo sapiens
tgaccccacctcagg

SEQ ID NO: 845313 - DNA, 15 bp, Homo sapiens
gaccccacctcagga

SEQ ID NO: 845314 - DNA, 15 bp, Homo sapiens
accccacctcaggac

SEQ ID NO: 845315 - DNA, 15 bp, Homo sapiens
ccccacctcaggact

SEQ ID NO: 845316 - DNA, 15 bp, Homo sapiens
cccacctcaggacta

SEQ ID NO: 845317 - DNA, 15 bp, Homo sapiens
ccacctcaggactaa

SEQ ID NO: 845318 - DNA, 15 bp, Homo sapiens
cacctcaggactaag

SEQ ID NO: 845319 - DNA, 15 bp, Homo sapiens
acctcaggactaagg

SEQ ID NO: 845320 - DNA, 15 bp, Homo sapiens
cctcaggactaaggc

SEQ ID NO: 845321 - DNA, 15 bp, Homo sapiens
ctcaggactaaggca

SEQ ID NO: 845322 - DNA, 15 bp, Homo sapiens
tcaggactaaggcat

SEQ ID NO: 845323 - DNA, 15 bp, Homo sapiens
caggactaaggcatg

SEQ ID NO: 845324 - DNA, 15 bp, Homo sapiens
aggactaaggcatga

SEQ ID NO: 845325 - DNA, 15 bp, Homo sapiens
ggactaaggcatgag

SEQ ID NO: 845326 - DNA, 15 bp, Homo sapiens
gactaaggcatgaga

SEQ ID NO: 845327 - DNA, 15 bp, Homo sapiens
actaaggcatgagaa

SEQ ID NO: 845328 - DNA, 15 bp, Homo sapiens
ctaaggcatgagaaa

SEQ ID NO: 845329 - DNA, 15 bp, Homo sapiens
taaggcatgagaaac

SEQ ID NO: 845330 - DNA, 15 bp, Homo sapiens
aaggcatgagaaact

SEQ ID NO: 845331 - DNA, 15 bp, Homo sapiens
aggcatgagaaactg

SEQ ID NO: 845332 - DNA, 15 bp, Homo sapiens
ggcatgagaaactgg

SEQ ID NO: 845333 - DNA, 15 bp, Homo sapiens
gcatgagaaactgga

SEQ ID NO: 845334 - DNA, 15 bp, Homo sapiens
catgagaaactggat

SEQ ID NO: 845335 - DNA, 15 bp, Homo sapiens
atgagaaactggatt

SEQ ID NO: 845336 - DNA, 15 bp, Homo sapiens
tgagaaactggattt

SEQ ID NO: 845337 - DNA, 15 bp, Homo sapiens
gagaaactggatttt

SEQ ID NO: 845338 - DNA, 15 bp, Homo sapiens
agaaactggattttg

SEQ ID NO: 845339 - DNA, 15 bp, Homo sapiens
gaaactggattttgc

SEQ ID NO: 845340 - DNA, 15 bp, Homo sapiens
aaactggattttgcc

SEQ ID NO: 845341 - DNA, 15 bp, Homo sapiens
aactggattttgcca

SEQ ID NO: 845342 - DNA, 15 bp, Homo sapiens
actggattttgccaa

SEQ ID NO: 845343 - DNA, 15 bp, Homo sapiens
ctggattttgccaag

SEQ ID NO: 845344 - DNA, 15 bp, Homo sapiens
tggattttgccaaga

SEQ ID NO: 845345 - DNA, 15 bp, Homo sapiens
ggattttgccaagac

SEQ ID NO: 845346 - DNA, 15 bp, Homo sapiens
gattttgccaagaca

SEQ ID NO: 845347 - DNA, 15 bp, Homo sapiens
attttgccaagacac

SEQ ID NO: 845348 - DNA, 15 bp, Homo sapiens
ttttgccaagacact

SEQ ID NO: 845349 - DNA, 15 bp, Homo sapiens
tttgccaagacactt

SEQ ID NO: 845350 - DNA, 15 bp, Homo sapiens
ttgccaagacacttg

SEQ ID NO: 845351 - DNA, 15 bp, Homo sapiens
tgccaagacacttgg

SEQ ID NO: 845352 - DNA, 15 bp, Homo sapiens
gccaagacacttggg

SEQ ID NO: 845353 - DNA, 15 bp, Homo sapiens
ccaagacacttgggt

SEQ ID NO: 845354 - DNA, 15 bp, Homo sapiens
caagacacttgggtg

SEQ ID NO: 845355 - DNA, 15 bp, Homo sapiens
aagacacttgggtga

SEQ ID NO: 845356 - DNA, 15 bp, Homo sapiens
agacacttgggtgac

SEQ ID NO: 845357 - DNA, 15 bp, Homo sapiens
gacacttgggtgaca

SEQ ID NO: 845358 - DNA, 15 bp, Homo sapiens
acacttgggtgacat

SEQ ID NO: 845359 - DNA, 15 bp, Homo sapiens
cacttgggtgacata

SEQ ID NO: 845360 - DNA, 15 bp, Homo sapiens
acttgggtgacatac

SEQ ID NO: 845361 - DNA, 15 bp, Homo sapiens
cttgggtgacatacg

SEQ ID NO: 845362 - DNA, 15 bp, Homo sapiens
ttgggtgacatacgt

SEQ ID NO: 845363 - DNA, 15 bp, Homo sapiens
tgggtgacatacgtg

SEQ ID NO: 845364 - DNA, 15 bp, Homo sapiens
gggtgacatacgtgc

SEQ ID NO: 845365 - DNA, 15 bp, Homo sapiens
ggtgacatacgtgca

SEQ ID NO: 845366 - DNA, 15 bp, Homo sapiens
gtgacatacgtgcat

SEQ ID NO: 845367 - DNA, 15 bp, Homo sapiens
tgacatacgtgcata

SEQ ID NO: 845368 - DNA, 15 bp, Homo sapiens
gacatacgtgcatat

SEQ ID NO: 845369 - DNA, 15 bp, Homo sapiens
acatacgtgcatatc

SEQ ID NO: 845370 - DNA, 15 bp, Homo sapiens
catacgtgcatatca

SEQ ID NO: 845371 - DNA, 15 bp, Homo sapiens
atacgtgcatatcaa

SEQ ID NO: 845372 - DNA, 15 bp, Homo sapiens
tacgtgcatatcaaa

SEQ ID NO: 845373 - DNA, 15 bp, Homo sapiens
acgtgcatatcaaag

SEQ ID NO: 845374 - DNA, 15 bp, Homo sapiens
cgtgcatatcaaagt

SEQ ID NO: 845375 - DNA, 15 bp, Homo sapiens
gtgcatatcaaagta

SEQ ID NO: 845376 - DNA, 15 bp, Homo sapiens
tgcatatcaaagtat

SEQ ID NO: 845377 - DNA, 15 bp, Homo sapiens
gcatatcaaagtata

SEQ ID NO: 845378 - DNA, 15 bp, Homo sapiens
catatcaaagtatag

SEQ ID NO: 845379 - DNA, 15 bp, Homo sapiens
atatcaaagtataga

SEQ ID NO: 845380 - DNA, 15 bp, Homo sapiens
tatcaaagtatagat

SEQ ID NO: 845381 - DNA, 15 bp, Homo sapiens
atcaaagtatagata

SEQ ID NO: 845382 - DNA, 15 bp, Homo sapiens
tcaaagtatagatag

SEQ ID NO: 845383 - DNA, 15 bp, Homo sapiens
caaagtatagatagc

SEQ ID NO: 845384 - DNA, 15 bp, Homo sapiens
aaagtatagatagca

SEQ ID NO: 845385 - DNA, 15 bp, Homo sapiens
aagtatagatagcac

SEQ ID NO: 845386 - DNA, 15 bp, Homo sapiens
agtatagatagcact

SEQ ID NO: 845387 - DNA, 15 bp, Homo sapiens
gtatagatagcactg

SEQ ID NO: 845388 - DNA, 15 bp, Homo sapiens
tatagatagcactgg

SEQ ID NO: 845389 - DNA, 15 bp, Homo sapiens
atagatagcactgga

SEQ ID NO: 845390 - DNA, 15 bp, Homo sapiens
tagatagcactggac

SEQ ID NO: 845391 - DNA, 15 bp, Homo sapiens
agatagcactggact

SEQ ID NO: 845392 - DNA, 15 bp, Homo sapiens
gatagcactggactc

SEQ ID NO: 845393 - DNA, 15 bp, Homo sapiens
atagcactggactcc

SEQ ID NO: 845394 - DNA, 15 bp, Homo sapiens
tagcactggactcca

SEQ ID NO: 845395 - DNA, 15 bp, Homo sapiens
agcactggactccat

SEQ ID NO: 845396 - DNA, 15 bp, Homo sapiens
gcactggactccata

SEQ ID NO: 845397 - DNA, 15 bp, Homo sapiens
cactggactccatat

SEQ ID NO: 845398 - DNA, 15 bp, Homo sapiens
actggactccatatt

SEQ ID NO: 845399 - DNA, 15 bp, Homo sapiens
ctggactccatattt

SEQ ID NO: 845400 - DNA, 15 bp, Homo sapiens
tggactccatatttc

SEQ ID NO: 845401 - DNA, 15 bp, Homo sapiens
ggactccatatttca

SEQ ID NO: 845402 - DNA, 15 bp, Homo sapiens
gactccatatttcaa

SEQ ID NO: 845403 - DNA, 15 bp, Homo sapiens
actccatatttcaaa

SEQ ID NO: 845404 - DNA, 15 bp, Homo sapiens
ctccatatttcaaag

SEQ ID NO: 845405 - DNA, 15 bp, Homo sapiens
tccatatttcaaagg

SEQ ID NO: 845406 - DNA, 15 bp, Homo sapiens
ccatatttcaaagga

SEQ ID NO: 845407 - DNA, 15 bp, Homo sapiens
catatttcaaaggac

SEQ ID NO: 845408 - DNA, 15 bp, Homo sapiens
atatttcaaaggact

SEQ ID NO: 845409 - DNA, 15 bp, Homo sapiens
tatttcaaaggactt

SEQ ID NO: 845410 - DNA, 15 bp, Homo sapiens
atttcaaaggacttt

SEQ ID NO: 845411 - DNA, 15 bp, Homo sapiens
tttcaaaggactttt

SEQ ID NO: 845412 - DNA, 15 bp, Homo sapiens
ttcaaaggactttta

SEQ ID NO: 845413 - DNA, 15 bp, Homo sapiens
tcaaaggacttttac

SEQ ID NO: 845414 - DNA, 15 bp, Homo sapiens
caaaggacttttact

SEQ ID NO: 845415 - DNA, 15 bp, Homo sapiens
aaaggacttttacta

SEQ ID NO: 845416 - DNA, 15 bp, Homo sapiens
aaggacttttactaa

SEQ ID NO: 845417 - DNA, 15 bp, Homo sapiens
aggacttttactaag

SEQ ID NO: 845418 - DNA, 15 bp, Homo sapiens
ggacttttactaagt

SEQ ID NO: 845419 - DNA, 15 bp, Homo sapiens
gacttttactaagta

SEQ ID NO: 845420 - DNA, 15 bp, Homo sapiens
acttttactaagtaa

SEQ ID NO: 845421 - DNA, 15 bp, Homo sapiens
cttttactaagtaag

SEQ ID NO: 845422 - DNA, 15 bp, Homo sapiens
ttttactaagtaagc

SEQ ID NO: 845423 - DNA, 15 bp, Homo sapiens
tttactaagtaagcc

SEQ ID NO: 845424 - DNA, 15 bp, Homo sapiens
ttactaagtaagccc

SEQ ID NO: 845425 - DNA, 15 bp, Homo sapiens
tactaagtaagccct

SEQ ID NO: 845426 - DNA, 15 bp, Homo sapiens
actaagtaagccctc

SEQ ID NO: 845427 - DNA, 15 bp, Homo sapiens
ctaagtaagccctca

SEQ ID NO: 845428 - DNA, 15 bp, Homo sapiens
taagtaagccctcag

SEQ ID NO: 845429 - DNA, 15 bp, Homo sapiens
aagtaagccctcaga

SEQ ID NO: 845430 - DNA, 15 bp, Homo sapiens
agtaagccctcagac

SEQ ID NO: 845431 - DNA, 15 bp, Homo sapiens
gtaagccctcagaca

SEQ ID NO: 845432 - DNA, 15 bp, Homo sapiens
taagccctcagacac

SEQ ID NO: 845433 - DNA, 15 bp, Homo sapiens
aagccctcagacaca

SEQ ID NO: 845434 - DNA, 15 bp, Homo sapiens
agccctcagacacat

SEQ ID NO: 845435 - DNA, 15 bp, Homo sapiens
gccctcagacacatc

SEQ ID NO: 845436 - DNA, 15 bp, Homo sapiens
ccctcagacacatcc

SEQ ID NO: 845437 - DNA, 15 bp, Homo sapiens
cctcagacacatcca

SEQ ID NO: 845438 - DNA, 15 bp, Homo sapiens
ctcagacacatccac

SEQ ID NO: 845439 - DNA, 15 bp, Homo sapiens
tcagacacatccact

SEQ ID NO: 845440 - DNA, 15 bp, Homo sapiens
cagacacatccactg

SEQ ID NO: 845441 - DNA, 15 bp, Homo sapiens
agacacatccactgg

SEQ ID NO: 845442 - DNA, 15 bp, Homo sapiens
gacacatccactggt

SEQ ID NO: 845443 - DNA, 15 bp, Homo sapiens
acacatccactggtg

SEQ ID NO: 845444 - DNA, 15 bp, Homo sapiens
cacatccactggtga

SEQ ID NO: 845445 - DNA, 15 bp, Homo sapiens
acatccactggtgag

SEQ ID NO: 845446 - DNA, 15 bp, Homo sapiens
catccactggtgaga

SEQ ID NO: 845447 - DNA, 15 bp, Homo sapiens
atccactggtgagac

SEQ ID NO: 845448 - DNA, 15 bp, Homo sapiens
tccactggtgagacc

SEQ ID NO: 845449 - DNA, 15 bp, Homo sapiens
ccactggtgagacct

SEQ ID NO: 845450 - DNA, 15 bp, Homo sapiens
cactggtgagacctt

SEQ ID NO: 845451 - DNA, 15 bp, Homo sapiens
actggtgagaccttg

SEQ ID NO: 845452 - DNA, 15 bp, Homo sapiens
ctggtgagaccttgt

SEQ ID NO: 845453 - DNA, 15 bp, Homo sapiens
tggtgagaccttgtc

SEQ ID NO: 845454 - DNA, 15 bp, Homo sapiens
ggtgagaccttgtca

SEQ ID NO: 845455 - DNA, 15 bp, Homo sapiens
gtgagaccttgtcat

SEQ ID NO: 845456 - DNA, 15 bp, Homo sapiens
tgagaccttgtcatt

SEQ ID NO: 845457 - DNA, 15 bp, Homo sapiens
gagaccttgtcattt

SEQ ID NO: 845458 - DNA, 15 bp, Homo sapiens
agaccttgtcatttg

SEQ ID NO: 845459 - DNA, 15 bp, Homo sapiens
gaccttgtcatttgc

SEQ ID NO: 845460 - DNA, 15 bp, Homo sapiens
accttgtcatttgct

SEQ ID NO: 845461 - DNA, 15 bp, Homo sapiens
ccttgtcatttgcta

SEQ ID NO: 845462 - DNA, 15 bp, Homo sapiens
cttgtcatttgctaa

SEQ ID NO: 845463 - DNA, 15 bp, Homo sapiens
ttgtcatttgctaac

SEQ ID NO: 845464 - DNA, 15 bp, Homo sapiens
tgtcatttgctaaca

SEQ ID NO: 845465 - DNA, 15 bp, Homo sapiens
gtcatttgctaacag

SEQ ID NO: 845466 - DNA, 15 bp, Homo sapiens
tcatttgctaacagc

SEQ ID NO: 845467 - DNA, 15 bp, Homo sapiens
catttgctaacagca

SEQ ID NO: 845468 - DNA, 15 bp, Homo sapiens
atttgctaacagcag

SEQ ID NO: 845469 - DNA, 15 bp, Homo sapiens
tttgctaacagcagt

SEQ ID NO: 845470 - DNA, 15 bp, Homo sapiens
ttgctaacagcagtg

SEQ ID NO: 845471 - DNA, 15 bp, Homo sapiens
tgctaacagcagtgg

SEQ ID NO: 845472 - DNA, 15 bp, Homo sapiens
gctaacagcagtggc

SEQ ID NO: 845473 - DNA, 15 bp, Homo sapiens
ctaacagcagtggct

SEQ ID NO: 845474 - DNA, 15 bp, Homo sapiens
taacagcagtggctg

SEQ ID NO: 845475 - DNA, 15 bp, Homo sapiens
aacagcagtggctgg

SEQ ID NO: 845476 - DNA, 15 bp, Homo sapiens
acagcagtggctggt

SEQ ID NO: 845477 - DNA, 15 bp, Homo sapiens
cagcagtggctggtg

SEQ ID NO: 845478 - DNA, 15 bp, Homo sapiens
agcagtggctggtgg

SEQ ID NO: 845479 - DNA, 15 bp, Homo sapiens
gcagtggctggtggg

SEQ ID NO: 845480 - DNA, 15 bp, Homo sapiens
cagtggctggtggga

SEQ ID NO: 845481 - DNA, 15 bp, Homo sapiens
agtggctggtgggat

SEQ ID NO: 845482 - DNA, 15 bp, Homo sapiens
gtggctggtgggatt

SEQ ID NO: 845483 - DNA, 15 bp, Homo sapiens
tggctggtgggattc

SEQ ID NO: 845484 - DNA, 15 bp, Homo sapiens
ggctggtgggattct

SEQ ID NO: 845485 - DNA, 15 bp, Homo sapiens
gctggtgggattctc

SEQ ID NO: 845486 - DNA, 15 bp, Homo sapiens
ctggtgggattctca

SEQ ID NO: 845487 - DNA, 15 bp, Homo sapiens
tggtgggattctcac

SEQ ID NO: 845488 - DNA, 15 bp, Homo sapiens
ggtgggattctcacc

SEQ ID NO: 845489 - DNA, 15 bp, Homo sapiens
gtgggattctcacca

SEQ ID NO: 845490 - DNA, 15 bp, Homo sapiens
tgggattctcaccaa

SEQ ID NO: 845491 - DNA, 15 bp, Homo sapiens
gggattctcaccaaa

SEQ ID NO: 845492 - DNA, 15 bp, Homo sapiens
ggattctcaccaaac

SEQ ID NO: 845493 - DNA, 15 bp, Homo sapiens
gattctcaccaaact

SEQ ID NO: 845494 - DNA, 15 bp, Homo sapiens
attctcaccaaactg

SEQ ID NO: 845495 - DNA, 15 bp, Homo sapiens
ttctcaccaaactgt

SEQ ID NO: 845496 - DNA, 15 bp, Homo sapiens
tctcaccaaactgtc

SEQ ID NO: 845497 - DNA, 15 bp, Homo sapiens
ctcaccaaactgtct

SEQ ID NO: 845498 - DNA, 15 bp, Homo sapiens
tcaccaaactgtcta

SEQ ID NO: 845499 - DNA, 15 bp, Homo sapiens
caccaaactgtctaa

SEQ ID NO: 845500 - DNA, 15 bp, Homo sapiens
accaaactgtctaaa

SEQ ID NO: 845501 - DNA, 15 bp, Homo sapiens
ccaaactgtctaaaa

SEQ ID NO: 845502 - DNA, 15 bp, Homo sapiens
caaactgtctaaaat

SEQ ID NO: 845503 - DNA, 15 bp, Homo sapiens
aaactgtctaaaata

SEQ ID NO: 845504 - DNA, 15 bp, Homo sapiens
aactgtctaaaatag

SEQ ID NO: 845505 - DNA, 15 bp, Homo sapiens
actgtctaaaatagt

SEQ ID NO: 845506 - DNA, 15 bp, Homo sapiens
ctgtctaaaatagta

SEQ ID NO: 845507 - DNA, 15 bp, Homo sapiens
tgtctaaaatagtaa

SEQ ID NO: 845508 - DNA, 15 bp, Homo sapiens
gtctaaaatagtaaa

SEQ ID NO: 845509 - DNA, 15 bp, Homo sapiens
tctaaaatagtaaag

SEQ ID NO: 845510 - DNA, 15 bp, Homo sapiens
ctaaaatagtaaaga

SEQ ID NO: 845511 - DNA, 15 bp, Homo sapiens
taaaatagtaaagat

SEQ ID NO: 845512 - DNA, 15 bp, Homo sapiens
aaaatagtaaagatc

SEQ ID NO: 845513 - DNA, 15 bp, Homo sapiens
aaatagtaaagatcc

SEQ ID NO: 845514 - DNA, 15 bp, Homo sapiens
aatagtaaagatcct

SEQ ID NO: 845515 - DNA, 15 bp, Homo sapiens
atagtaaagatcctt

SEQ ID NO: 845516 - DNA, 15 bp, Homo sapiens
tagtaaagatccttc

SEQ ID NO: 845517 - DNA, 15 bp, Homo sapiens
agtaaagatccttca

SEQ ID NO: 845518 - DNA, 15 bp, Homo sapiens
gtaaagatccttcaa

SEQ ID NO: 845519 - DNA, 15 bp, Homo sapiens
taaagatccttcaaa

SEQ ID NO: 845520 - DNA, 15 bp, Homo sapiens
aaagatccttcaaag

SEQ ID NO: 845521 - DNA, 15 bp, Homo sapiens
aagatccttcaaagg

SEQ ID NO: 845522 - DNA, 15 bp, Homo sapiens
agatccttcaaaggc

SEQ ID NO: 845523 - DNA, 15 bp, Homo sapiens
gatccttcaaaggca

SEQ ID NO: 845524 - DNA, 15 bp, Homo sapiens
atccttcaaaggcac

SEQ ID NO: 845525 - DNA, 15 bp, Homo sapiens
tccttcaaaggcaca

SEQ ID NO: 845526 - DNA, 15 bp, Homo sapiens
ccttcaaaggcacag

SEQ ID NO: 845527 - DNA, 15 bp, Homo sapiens
cttcaaaggcacagg

SEQ ID NO: 845528 - DNA, 15 bp, Homo sapiens
ttcaaaggcacaggc

SEQ ID NO: 845529 - DNA, 15 bp, Homo sapiens
tcaaaggcacaggca

SEQ ID NO: 845530 - DNA, 15 bp, Homo sapiens
caaaggcacaggcaa

SEQ ID NO: 845531 - DNA, 15 bp, Homo sapiens
aaaggcacaggcaac

SEQ ID NO: 845532 - DNA, 15 bp, Homo sapiens
aaggcacaggcaact

SEQ ID NO: 845533 - DNA, 15 bp, Homo sapiens
aggcacaggcaactc

SEQ ID NO: 845534 - DNA, 15 bp, Homo sapiens
ggcacaggcaactct

SEQ ID NO: 845535 - DNA, 15 bp, Homo sapiens
gcacaggcaactctc

SEQ ID NO: 845536 - DNA, 15 bp, Homo sapiens
cacaggcaactctct

SEQ ID NO: 845537 - DNA, 15 bp, Homo sapiens
acaggcaactctcta

SEQ ID NO: 845538 - DNA, 15 bp, Homo sapiens
caggcaactctctag

SEQ ID NO: 845539 - DNA, 15 bp, Homo sapiens
aggcaactctctagt

SEQ ID NO: 845540 - DNA, 15 bp, Homo sapiens
ggcaactctctagtt

SEQ ID NO: 845541 - DNA, 15 bp, Homo sapiens
gcaactctctagttt

SEQ ID NO: 845542 - DNA, 15 bp, Homo sapiens
caactctctagtttt

SEQ ID NO: 845543 - DNA, 15 bp, Homo sapiens
aactctctagttttt

SEQ ID NO: 845544 - DNA, 15 bp, Homo sapiens
actctctagtttttt

SEQ ID NO: 845545 - DNA, 15 bp, Homo sapiens
ctctctagttttttg

SEQ ID NO: 845546 - DNA, 15 bp, Homo sapiens
tctctagttttttgt

SEQ ID NO: 845547 - DNA, 15 bp, Homo sapiens
ctctagttttttgtg

SEQ ID NO: 845548 - DNA, 15 bp, Homo sapiens
tctagttttttgtgt

SEQ ID NO: 845549 - DNA, 15 bp, Homo sapiens
ctagttttttgtgtt

SEQ ID NO: 845550 - DNA, 15 bp, Homo sapiens
tagttttttgtgtta

SEQ ID NO: 845551 - DNA, 15 bp, Homo sapiens
agttttttgtgttat

SEQ ID NO: 845552 - DNA, 15 bp, Homo sapiens
gttttttgtgttatc

SEQ ID NO: 845553 - DNA, 15 bp, Homo sapiens
ttttttgtgttatca

SEQ ID NO: 845554 - DNA, 15 bp, Homo sapiens
tttttgtgttatcaa

SEQ ID NO: 845555 - DNA, 15 bp, Homo sapiens
ttttgtgttatcaaa

SEQ ID NO: 845556 - DNA, 15 bp, Homo sapiens
tttgtgttatcaaaa

SEQ ID NO: 845557 - DNA, 15 bp, Homo sapiens
ttgtgttatcaaaag

SEQ ID NO: 845558 - DNA, 15 bp, Homo sapiens
tgtgttatcaaaagc

SEQ ID NO: 845559 - DNA, 15 bp, Homo sapiens
gtgttatcaaaagca

SEQ ID NO: 845560 - DNA, 15 bp, Homo sapiens
tgttatcaaaagcaa

SEQ ID NO: 845561 - DNA, 15 bp, Homo sapiens
gttatcaaaagcaag

SEQ ID NO: 845562 - DNA, 15 bp, Homo sapiens
ttatcaaaagcaagc

SEQ ID NO: 845563 - DNA, 15 bp, Homo sapiens
tatcaaaagcaagct

SEQ ID NO: 845564 - DNA, 15 bp, Homo sapiens
atcaaaagcaagctc

SEQ ID NO: 845565 - DNA, 15 bp, Homo sapiens
tcaaaagcaagctcc

SEQ ID NO: 845566 - DNA, 15 bp, Homo sapiens
caaaagcaagctccc

SEQ ID NO: 845567 - DNA, 15 bp, Homo sapiens
aaaagcaagctcccc

SEQ ID NO: 845568 - DNA, 15 bp, Homo sapiens
aaagcaagctcccca

SEQ ID NO: 845569 - DNA, 15 bp, Homo sapiens
aagcaagctccccat

SEQ ID NO: 845570 - DNA, 15 bp, Homo sapiens
agcaagctccccatt

SEQ ID NO: 845571 - DNA, 15 bp, Homo sapiens
gcaagctccccattc

SEQ ID NO: 845572 - DNA, 15 bp, Homo sapiens
caagctccccattcc

SEQ ID NO: 845573 - DNA, 15 bp, Homo sapiens
aagctccccattcct

SEQ ID NO: 845574 - DNA, 15 bp, Homo sapiens
agctccccattccta

SEQ ID NO: 845575 - DNA, 15 bp, Homo sapiens
gctccccattcctat

SEQ ID NO: 845576 - DNA, 15 bp, Homo sapiens
ctccccattcctatg

SEQ ID NO: 845577 - DNA, 15 bp, Homo sapiens
tccccattcctatgt

SEQ ID NO: 845578 - DNA, 15 bp, Homo sapiens
ccccattcctatgtg

SEQ ID NO: 845579 - DNA, 15 bp, Homo sapiens
cccattcctatgtgg

SEQ ID NO: 845580 - DNA, 15 bp, Homo sapiens
ccattcctatgtgga

SEQ ID NO: 845581 - DNA, 15 bp, Homo sapiens
cattcctatgtggat

SEQ ID NO: 845582 - DNA, 15 bp, Homo sapiens
attcctatgtggatt

SEQ ID NO: 845583 - DNA, 15 bp, Homo sapiens
ttcctatgtggattc

SEQ ID NO: 845584 - DNA, 15 bp, Homo sapiens
tcctatgtggattca

SEQ ID NO: 845585 - DNA, 15 bp, Homo sapiens
cctatgtggattcaa

SEQ ID NO: 845586 - DNA, 15 bp, Homo sapiens
ctatgtggattcaaa

SEQ ID NO: 845587 - DNA, 15 bp, Homo sapiens
tatgtggattcaaat

SEQ ID NO: 845588 - DNA, 15 bp, Homo sapiens
atgtggattcaaatg

SEQ ID NO: 845589 - DNA, 15 bp, Homo sapiens
tgtggattcaaatgt

SEQ ID NO: 845590 - DNA, 15 bp, Homo sapiens
gtggattcaaatgtt

SEQ ID NO: 845591 - DNA, 15 bp, Homo sapiens
tggattcaaatgttc

SEQ ID NO: 845592 - DNA, 15 bp, Homo sapiens
ggattcaaatgttct

SEQ ID NO: 845593 - DNA, 15 bp, Homo sapiens
gattcaaatgttctt

SEQ ID NO: 845594 - DNA, 15 bp, Homo sapiens
attcaaatgttcttt

SEQ ID NO: 845595 - DNA, 15 bp, Homo sapiens
ttcaaatgttctttc

SEQ ID NO: 845596 - DNA, 15 bp, Homo sapiens
tcaaatgttctttct

SEQ ID NO: 845597 - DNA, 15 bp, Homo sapiens
caaatgttctttcta

SEQ ID NO: 845598 - DNA, 15 bp, Homo sapiens
aaatgttctttctaa

SEQ ID NO: 845599 - DNA, 15 bp, Homo sapiens
aatgttctttctaac

SEQ ID NO: 845600 - DNA, 15 bp, Homo sapiens
atgttctttctaact

SEQ ID NO: 845601 - DNA, 15 bp, Homo sapiens
tgttctttctaactc

SEQ ID NO: 845602 - DNA, 15 bp, Homo sapiens
gttctttctaactcc

SEQ ID NO: 845603 - DNA, 15 bp, Homo sapiens
ttctttctaactccc

SEQ ID NO: 845604 - DNA, 15 bp, Homo sapiens
tctttctaactccct

SEQ ID NO: 845605 - DNA, 15 bp, Homo sapiens
ctttctaactccctt

SEQ ID NO: 845606 - DNA, 15 bp, Homo sapiens
tttctaactcccttc

SEQ ID NO: 845607 - DNA, 15 bp, Homo sapiens
ttctaactcccttcc

SEQ ID NO: 845608 - DNA, 15 bp, Homo sapiens
tctaactcccttcct

SEQ ID NO: 845609 - DNA, 15 bp, Homo sapiens
ctaactcccttcctc

SEQ ID NO: 845610 - DNA, 15 bp, Homo sapiens
taactcccttcctct

SEQ ID NO: 845611 - DNA, 15 bp, Homo sapiens
aactcccttcctctt

SEQ ID NO: 845612 - DNA, 15 bp, Homo sapiens
actcccttcctcttc

SEQ ID NO: 845613 - DNA, 15 bp, Homo sapiens
ctcccttcctcttct

SEQ ID NO: 845614 - DNA, 15 bp, Homo sapiens
tcccttcctcttctc

SEQ ID NO: 845615 - DNA, 15 bp, Homo sapiens
cccttcctcttctcc

SEQ ID NO: 845616 - DNA, 15 bp, Homo sapiens
ccttcctcttctccc

SEQ ID NO: 845617 - DNA, 15 bp, Homo sapiens
cttcctcttctccca

SEQ ID NO: 845618 - DNA, 15 bp, Homo sapiens
ttcctcttctcccag

SEQ ID NO: 845619 - DNA, 15 bp, Homo sapiens
tcctcttctcccagt

SEQ ID NO: 845620 - DNA, 15 bp, Homo sapiens
cctcttctcccagtt

SEQ ID NO: 845621 - DNA, 15 bp, Homo sapiens
ctcttctcccagttt

SEQ ID NO: 845622 - DNA, 15 bp, Homo sapiens
tcttctcccagtttt

SEQ ID NO: 845623 - DNA, 15 bp, Homo sapiens
cttctcccagttttt

SEQ ID NO: 845624 - DNA, 15 bp, Homo sapiens
ttctcccagtttttt

SEQ ID NO: 845625 - DNA, 15 bp, Homo sapiens
tctcccagttttttt

SEQ ID NO: 845626 - DNA, 15 bp, Homo sapiens
ctcccagtttttttt

SEQ ID NO: 845627 - DNA, 15 bp, Homo sapiens
tcccagttttttttt

SEQ ID NO: 845628 - DNA, 15 bp, Homo sapiens
cccagtttttttttt

SEQ ID NO: 845629 - DNA, 15 bp, Homo sapiens
ccagttttttttttg

SEQ ID NO: 845630 - DNA, 15 bp, Homo sapiens
cagttttttttttgt

SEQ ID NO: 845631 - DNA, 15 bp, Homo sapiens
agttttttttttgtt

SEQ ID NO: 845632 - DNA, 15 bp, Homo sapiens
gttttttttttgttt

SEQ ID NO: 845633 - DNA, 15 bp, Homo sapiens
gtttttttgtttttt

SEQ ID NO: 845634 - DNA, 15 bp, Homo sapiens
tttttgtttttttat

SEQ ID NO: 845635 - DNA, 15 bp, Homo sapiens
ttttgtttttttatt

SEQ ID NO: 845636 - DNA, 15 bp, Homo sapiens
tttgtttttttattt

SEQ ID NO: 845637 - DNA, 15 bp, Homo sapiens
ttgtttttttatttt

SEQ ID NO: 845638 - DNA, 15 bp, Homo sapiens
tgtttttttattttt

SEQ ID NO: 845639 - DNA, 15 bp, Homo sapiens
tttattttttttttt

SEQ ID NO: 845640 - DNA, 15 bp, Homo sapiens
ttatttttttttttt

SEQ ID NO: 845641 - DNA, 15 bp, Homo sapiens
tatttttttttttta

SEQ ID NO: 845642 - DNA, 15 bp, Homo sapiens
attttttttttttag

SEQ ID NO: 845643 - DNA, 15 bp, Homo sapiens
ttttttttttttaga

SEQ ID NO: 845644 - DNA, 15 bp, Homo sapiens
tttttttttttagaa

SEQ ID NO: 845645 - DNA, 15 bp, Homo sapiens
ttttttttttagaaa

SEQ ID NO: 845646 - DNA, 15 bp, Homo sapiens
tttttttttagaaaa

SEQ ID NO: 845647 - DNA, 15 bp, Homo sapiens
ttttttttagaaaag

SEQ ID NO: 845648 - DNA, 15 bp, Homo sapiens
tttttttagaaaaga

SEQ ID NO: 845649 - DNA, 15 bp, Homo sapiens
ttttttagaaaagat

SEQ ID NO: 845650 - DNA, 15 bp, Homo sapiens
tttttagaaaagatc

SEQ ID NO: 845651 - DNA, 15 bp, Homo sapiens
ttttagaaaagatca

SEQ ID NO: 845652 - DNA, 15 bp, Homo sapiens
tttagaaaagatcaa

SEQ ID NO: 845653 - DNA, 15 bp, Homo sapiens
ttagaaaagatcaag

SEQ ID NO: 845654 - DNA, 15 bp, Homo sapiens
tagaaaagatcaagt

SEQ ID NO: 845655 - DNA, 15 bp, Homo sapiens
agaaaagatcaagtt

SEQ ID NO: 845656 - DNA, 15 bp, Homo sapiens
gaaaagatcaagttg

SEQ ID NO: 845657 - DNA, 15 bp, Homo sapiens
aaaagatcaagttgt

SEQ ID NO: 845658 - DNA, 15 bp, Homo sapiens
aaagatcaagttgtt

SEQ ID NO: 845659 - DNA, 15 bp, Homo sapiens
aagatcaagttgttt

SEQ ID NO: 845660 - DNA, 15 bp, Homo sapiens
agatcaagttgtttt

SEQ ID NO: 845661 - DNA, 15 bp, Homo sapiens
gatcaagttgttttg

SEQ ID NO: 845662 - DNA, 15 bp, Homo sapiens
atcaagttgttttgg

SEQ ID NO: 845663 - DNA, 15 bp, Homo sapiens
tcaagttgttttggc

SEQ ID NO: 845664 - DNA, 15 bp, Homo sapiens
caagttgttttggcc

SEQ ID NO: 845665 - DNA, 15 bp, Homo sapiens
aagttgttttggcct

SEQ ID NO: 845666 - DNA, 15 bp, Homo sapiens
agttgttttggcctc

SEQ ID NO: 845667 - DNA, 15 bp, Homo sapiens
gttgttttggcctca

SEQ ID NO: 845668 - DNA, 15 bp, Homo sapiens
ttgttttggcctcaa

SEQ ID NO: 845669 - DNA, 15 bp, Homo sapiens
tgttttggcctcaat

SEQ ID NO: 845670 - DNA, 15 bp, Homo sapiens
gttttggcctcaatt

SEQ ID NO: 845671 - DNA, 15 bp, Homo sapiens
ttttggcctcaattt

SEQ ID NO: 845672 - DNA, 15 bp, Homo sapiens
tttggcctcaatttt

SEQ ID NO: 845673 - DNA, 15 bp, Homo sapiens
ttggcctcaatttta

SEQ ID NO: 845674 - DNA, 15 bp, Homo sapiens
tggcctcaattttag

SEQ ID NO: 845675 - DNA, 15 bp, Homo sapiens
ggcctcaattttaga

SEQ ID NO: 845676 - DNA, 15 bp, Homo sapiens
gcctcaattttagaa

SEQ ID NO: 845677 - DNA, 15 bp, Homo sapiens
cctcaattttagaat

SEQ ID NO: 845678 - DNA, 15 bp, Homo sapiens
ctcaattttagaatt

SEQ ID NO: 845679 - DNA, 15 bp, Homo sapiens
tcaattttagaattt

SEQ ID NO: 845680 - DNA, 15 bp, Homo sapiens
caattttagaattta

SEQ ID NO: 845681 - DNA, 15 bp, Homo sapiens
aattttagaatttag

SEQ ID NO: 845682 - DNA, 15 bp, Homo sapiens
attttagaatttagg

SEQ ID NO: 845683 - DNA, 15 bp, Homo sapiens
ttttagaatttagga

SEQ ID NO: 845684 - DNA, 15 bp, Homo sapiens
tttagaatttaggaa

SEQ ID NO: 845685 - DNA, 15 bp, Homo sapiens
ttagaatttaggaat

SEQ ID NO: 845686 - DNA, 15 bp, Homo sapiens
tagaatttaggaata

SEQ ID NO: 845687 - DNA, 15 bp, Homo sapiens
agaatttaggaataa

SEQ ID NO: 845688 - DNA, 15 bp, Homo sapiens
gaatttaggaataat

SEQ ID NO: 845689 - DNA, 15 bp, Homo sapiens
aatttaggaataatg

SEQ ID NO: 845690 - DNA, 15 bp, Homo sapiens
atttaggaataatga

SEQ ID NO: 845691 - DNA, 15 bp, Homo sapiens
tttaggaataatgaa

SEQ ID NO: 845692 - DNA, 15 bp, Homo sapiens
ttaggaataatgaac

SEQ ID NO: 845693 - DNA, 15 bp, Homo sapiens
taggaataatgaact

SEQ ID NO: 845694 - DNA, 15 bp, Homo sapiens
aggaataatgaactt

SEQ ID NO: 845695 - DNA, 15 bp, Homo sapiens
ggaataatgaacttg

SEQ ID NO: 845696 - DNA, 15 bp, Homo sapiens
gaataatgaacttgc

SEQ ID NO: 845697 - DNA, 15 bp, Homo sapiens
aataatgaacttgcc

SEQ ID NO: 845698 - DNA, 15 bp, Homo sapiens
ataatgaacttgcca

SEQ ID NO: 845699 - DNA, 15 bp, Homo sapiens
taatgaacttgccaa

SEQ ID NO: 845700 - DNA, 15 bp, Homo sapiens
aatgaacttgccaaa

SEQ ID NO: 845701 - DNA, 15 bp, Homo sapiens
atgaacttgccaaat

SEQ ID NO: 845702 - DNA, 15 bp, Homo sapiens
tgaacttgccaaata

SEQ ID NO: 845703 - DNA, 15 bp, Homo sapiens
gaacttgccaaatat

SEQ ID NO: 845704 - DNA, 15 bp, Homo sapiens
aacttgccaaatatc

SEQ ID NO: 845705 - DNA, 15 bp, Homo sapiens
acttgccaaatatca

SEQ ID NO: 845706 - DNA, 15 bp, Homo sapiens
cttgccaaatatcac

SEQ ID NO: 845707 - DNA, 15 bp, Homo sapiens
ttgccaaatatcacc

SEQ ID NO: 845708 - DNA, 15 bp, Homo sapiens
tgccaaatatcacct

SEQ ID NO: 845709 - DNA, 15 bp, Homo sapiens
gccaaatatcacctt

SEQ ID NO: 845710 - DNA, 15 bp, Homo sapiens
ccaaatatcaccttc

SEQ ID NO: 845711 - DNA, 15 bp, Homo sapiens
caaatatcaccttcc

SEQ ID NO: 845712 - DNA, 15 bp, Homo sapiens
aaatatcaccttccc

SEQ ID NO: 845713 - DNA, 15 bp, Homo sapiens
aatatcaccttccct

SEQ ID NO: 845714 - DNA, 15 bp, Homo sapiens
atatcaccttccctg

SEQ ID NO: 845715 - DNA, 15 bp, Homo sapiens
tatcaccttccctgg

SEQ ID NO: 845716 - DNA, 15 bp, Homo sapiens
atcaccttccctggg

SEQ ID NO: 845717 - DNA, 15 bp, Homo sapiens
tcaccttccctgggc

SEQ ID NO: 845718 - DNA, 15 bp, Homo sapiens
caccttccctgggct

SEQ ID NO: 845719 - DNA, 15 bp, Homo sapiens
accttccctgggctc

SEQ ID NO: 845720 - DNA, 15 bp, Homo sapiens
ccttccctgggctca

SEQ ID NO: 845721 - DNA, 15 bp, Homo sapiens
cttccctgggctcag

SEQ ID NO: 845722 - DNA, 15 bp, Homo sapiens
ttccctgggctcagt

SEQ ID NO: 845723 - DNA, 15 bp, Homo sapiens
tccctgggctcagtc

SEQ ID NO: 845724 - DNA, 15 bp, Homo sapiens
ccctgggctcagtct

SEQ ID NO: 845725 - DNA, 15 bp, Homo sapiens
cctgggctcagtcta

SEQ ID NO: 845726 - DNA, 15 bp, Homo sapiens
ctgggctcagtctac

SEQ ID NO: 845727 - DNA, 15 bp, Homo sapiens
tgggctcagtctact

SEQ ID NO: 845728 - DNA, 15 bp, Homo sapiens
gggctcagtctactt

SEQ ID NO: 845729 - DNA, 15 bp, Homo sapiens
ggctcagtctacttc

SEQ ID NO: 845730 - DNA, 15 bp, Homo sapiens
gctcagtctacttcc

SEQ ID NO: 845731 - DNA, 15 bp, Homo sapiens
ctcagtctacttcct

SEQ ID NO: 845732 - DNA, 15 bp, Homo sapiens
tcagtctacttcctg

SEQ ID NO: 845733 - DNA, 15 bp, Homo sapiens
cagtctacttcctgt

SEQ ID NO: 845734 - DNA, 15 bp, Homo sapiens
agtctacttcctgtt

SEQ ID NO: 845735 - DNA, 15 bp, Homo sapiens
gtctacttcctgttg

SEQ ID NO: 845736 - DNA, 15 bp, Homo sapiens
tctacttcctgttga

SEQ ID NO: 845737 - DNA, 15 bp, Homo sapiens
ctacttcctgttgaa

SEQ ID NO: 845738 - DNA, 15 bp, Homo sapiens
tacttcctgttgaat

SEQ ID NO: 845739 - DNA, 15 bp, Homo sapiens
acttcctgttgaatt

SEQ ID NO: 845740 - DNA, 15 bp, Homo sapiens
cttcctgttgaattg

SEQ ID NO: 845741 - DNA, 15 bp, Homo sapiens
ttcctgttgaattgt

SEQ ID NO: 845742 - DNA, 15 bp, Homo sapiens
tcctgttgaattgtt

SEQ ID NO: 845743 - DNA, 15 bp, Homo sapiens
cctgttgaattgttg

SEQ ID NO: 845744 - DNA, 15 bp, Homo sapiens
ctgttgaattgttgt

SEQ ID NO: 845745 - DNA, 15 bp, Homo sapiens
tgttgaattgttgtt

SEQ ID NO: 845746 - DNA, 15 bp, Homo sapiens
gttgaattgttgttt

SEQ ID NO: 845747 - DNA, 15 bp, Homo sapiens
ttgaattgttgtttg

SEQ ID NO: 845748 - DNA, 15 bp, Homo sapiens
tgaattgttgtttga

SEQ ID NO: 845749 - DNA, 15 bp, Homo sapiens
gaattgttgtttgac

SEQ ID NO: 845750 - DNA, 15 bp, Homo sapiens
aattgttgtttgact

SEQ ID NO: 845751 - DNA, 15 bp, Homo sapiens
attgttgtttgactt

SEQ ID NO: 845752 - DNA, 15 bp, Homo sapiens
ttgttgtttgacttt

SEQ ID NO: 845753 - DNA, 15 bp, Homo sapiens
tgttgtttgacttta

SEQ ID NO: 845754 - DNA, 15 bp, Homo sapiens
gttgtttgactttac

SEQ ID NO: 845755 - DNA, 15 bp, Homo sapiens
ttgtttgactttact

SEQ ID NO: 845756 - DNA, 15 bp, Homo sapiens
tgtttgactttactt

SEQ ID NO: 845757 - DNA, 15 bp, Homo sapiens
gtttgactttacttt

SEQ ID NO: 845758 - DNA, 15 bp, Homo sapiens
tttgactttactttg

SEQ ID NO: 845759 - DNA, 15 bp, Homo sapiens
ttgactttactttgg

SEQ ID NO: 845760 - DNA, 15 bp, Homo sapiens
tgactttactttgga

SEQ ID NO: 845761 - DNA, 15 bp, Homo sapiens
gactttactttggaa

SEQ ID NO: 845762 - DNA, 15 bp, Homo sapiens
actttactttggaat

SEQ ID NO: 845763 - DNA, 15 bp, Homo sapiens
ctttactttggaatc

SEQ ID NO: 845764 - DNA, 15 bp, Homo sapiens
tttactttggaatcc

SEQ ID NO: 845765 - DNA, 15 bp, Homo sapiens
ttactttggaatcca

SEQ ID NO: 845766 - DNA, 15 bp, Homo sapiens
tactttggaatccaa

SEQ ID NO: 845767 - DNA, 15 bp, Homo sapiens
actttggaatccaaa

SEQ ID NO: 845768 - DNA, 15 bp, Homo sapiens
ctttggaatccaaaa

SEQ ID NO: 845769 - DNA, 15 bp, Homo sapiens
tttggaatccaaaaa

SEQ ID NO: 845770 - DNA, 15 bp, Homo sapiens
ttggaatccaaaaaa

SEQ ID NO: 845771 - DNA, 15 bp, Homo sapiens
tggaatccaaaaaat

SEQ ID NO: 845772 - DNA, 15 bp, Homo sapiens
ggaatccaaaaaatg

SEQ ID NO: 845773 - DNA, 15 bp, Homo sapiens
gaatccaaaaaatga

SEQ ID NO: 845774 - DNA, 15 bp, Homo sapiens
aatccaaaaaatgaa

SEQ ID NO: 845775 - DNA, 15 bp, Homo sapiens
atccaaaaaatgaag

SEQ ID NO: 845776 - DNA, 15 bp, Homo sapiens
tccaaaaaatgaaga

SEQ ID NO: 845777 - DNA, 15 bp, Homo sapiens
ccaaaaaatgaagac

SEQ ID NO: 845778 - DNA, 15 bp, Homo sapiens
caaaaaatgaagaca

SEQ ID NO: 845779 - DNA, 15 bp, Homo sapiens
aaaaaatgaagacaa

SEQ ID NO: 845780 - DNA, 15 bp, Homo sapiens
aaaaatgaagacaag

SEQ ID NO: 845781 - DNA, 15 bp, Homo sapiens
aaaatgaagacaagg

SEQ ID NO: 845782 - DNA, 15 bp, Homo sapiens
atgaagacaaggaga

SEQ ID NO: 845783 - DNA, 15 bp, Homo sapiens
tgaagacaaggagaa

SEQ ID NO: 845784 - DNA, 15 bp, Homo sapiens
gaagacaaggagaag

SEQ ID NO: 845785 - DNA, 15 bp, Homo sapiens
aagacaaggagaaga

SEQ ID NO: 845786 - DNA, 15 bp, Homo sapiens
agacaaggagaagac

SEQ ID NO: 845787 - DNA, 15 bp, Homo sapiens
gacaaggagaagaca

SEQ ID NO: 845788 - DNA, 15 bp, Homo sapiens
acaaggagaagacaa

SEQ ID NO: 845789 - DNA, 15 bp, Homo sapiens
caaggagaagacaag

SEQ ID NO: 845790 - DNA, 15 bp, Homo sapiens
aaggagaagacaagg

SEQ ID NO: 845791 - DNA, 15 bp, Homo sapiens
aggagaagacaagga

SEQ ID NO: 845792 - DNA, 15 bp, Homo sapiens
ggagaagacaaggag

SEQ ID NO: 845793 - DNA, 15 bp, Homo sapiens
gagaagacaaggagg

SEQ ID NO: 845794 - DNA, 15 bp, Homo sapiens
agaagacaaggaggg

SEQ ID NO: 845795 - DNA, 15 bp, Homo sapiens
gaagacaaggagggc

SEQ ID NO: 845796 - DNA, 15 bp, Homo sapiens
aagacaaggagggct

SEQ ID NO: 845797 - DNA, 15 bp, Homo sapiens
agacaaggagggctg

SEQ ID NO: 845798 - DNA, 15 bp, Homo sapiens
gacaaggagggctga

SEQ ID NO: 845799 - DNA, 15 bp, Homo sapiens
acaaggagggctgag

SEQ ID NO: 845800 - DNA, 15 bp, Homo sapiens
caaggagggctgagt

SEQ ID NO: 845801 - DNA, 15 bp, Homo sapiens
aaggagggctgagtc

SEQ ID NO: 845802 - DNA, 15 bp, Homo sapiens
aggagggctgagtca

SEQ ID NO: 845803 - DNA, 15 bp, Homo sapiens
ggagggctgagtcac

SEQ ID NO: 845804 - DNA, 15 bp, Homo sapiens
gagggctgagtcaca

SEQ ID NO: 845805 - DNA, 15 bp, Homo sapiens
agggctgagtcacat

SEQ ID NO: 845806 - DNA, 15 bp, Homo sapiens
gggctgagtcacatg

SEQ ID NO: 845807 - DNA, 15 bp, Homo sapiens
ggctgagtcacatgg

SEQ ID NO: 845808 - DNA, 15 bp, Homo sapiens
gctgagtcacatggg

SEQ ID NO: 845809 - DNA, 15 bp, Homo sapiens
ctgagtcacatgggg

SEQ ID NO: 845810 - DNA, 15 bp, Homo sapiens
tgagtcacatgggga

SEQ ID NO: 845811 - DNA, 15 bp, Homo sapiens
gagtcacatggggaa

SEQ ID NO: 845812 - DNA, 15 bp, Homo sapiens
agtcacatggggaag

SEQ ID NO: 845813 - DNA, 15 bp, Homo sapiens
gtcacatggggaaga

SEQ ID NO: 845814 - DNA, 15 bp, Homo sapiens
tcacatggggaagat

SEQ ID NO: 845815 - DNA, 15 bp, Homo sapiens
cacatggggaagata

SEQ ID NO: 845816 - DNA, 15 bp, Homo sapiens
acatggggaagatag

SEQ ID NO: 845817 - DNA, 15 bp, Homo sapiens
catggggaagataga

SEQ ID NO: 845818 - DNA, 15 bp, Homo sapiens
atggggaagatagaa

SEQ ID NO: 845819 - DNA, 15 bp, Homo sapiens
tggggaagatagaat

SEQ ID NO: 845820 - DNA, 15 bp, Homo sapiens
ggggaagatagaata

SEQ ID NO: 845821 - DNA, 15 bp, Homo sapiens
gggaagatagaatag

SEQ ID NO: 845822 - DNA, 15 bp, Homo sapiens
ggaagatagaatagg

SEQ ID NO: 845823 - DNA, 15 bp, Homo sapiens
gaagatagaataggc

SEQ ID NO: 845824 - DNA, 15 bp, Homo sapiens
aagatagaataggca

SEQ ID NO: 845825 - DNA, 15 bp, Homo sapiens
agatagaataggcat

SEQ ID NO: 845826 - DNA, 15 bp, Homo sapiens
gatagaataggcatg

SEQ ID NO: 845827 - DNA, 15 bp, Homo sapiens
atagaataggcatga

SEQ ID NO: 845828 - DNA, 15 bp, Homo sapiens
tagaataggcatgag

SEQ ID NO: 845829 - DNA, 15 bp, Homo sapiens
agaataggcatgaga

SEQ ID NO: 845830 - DNA, 15 bp, Homo sapiens
gaataggcatgagat

SEQ ID NO: 845831 - DNA, 15 bp, Homo sapiens
aataggcatgagatg

SEQ ID NO: 845832 - DNA, 15 bp, Homo sapiens
ataggcatgagatgg

SEQ ID NO: 845833 - DNA, 15 bp, Homo sapiens
taggcatgagatggg

SEQ ID NO: 845834 - DNA, 15 bp, Homo sapiens
aggcatgagatgggg

SEQ ID NO: 845835 - DNA, 15 bp, Homo sapiens
ggcatgagatgggga

SEQ ID NO: 845836 - DNA, 15 bp, Homo sapiens
gcatgagatggggag

SEQ ID NO: 845837 - DNA, 15 bp, Homo sapiens
catgagatggggagg

SEQ ID NO: 845838 - DNA, 15 bp, Homo sapiens
atgagatggggaggg

SEQ ID NO: 845839 - DNA, 15 bp, Homo sapiens
tgagatggggaggga

SEQ ID NO: 845840 - DNA, 15 bp, Homo sapiens
gagatggggagggac

SEQ ID NO: 845841 - DNA, 15 bp, Homo sapiens
agatggggagggacg

SEQ ID NO: 845842 - DNA, 15 bp, Homo sapiens
gatggggagggacgg

SEQ ID NO: 845843 - DNA, 15 bp, Homo sapiens
atggggagggacggg

SEQ ID NO: 845844 - DNA, 15 bp, Homo sapiens
tggggagggacgggg

SEQ ID NO: 845845 - DNA, 15 bp, Homo sapiens
ggggagggacggggc

SEQ ID NO: 845846 - DNA, 15 bp, Homo sapiens
gggagggacggggct

SEQ ID NO: 845847 - DNA, 15 bp, Homo sapiens
ggagggacggggctt

SEQ ID NO: 845848 - DNA, 15 bp, Homo sapiens
gagggacggggcttc

SEQ ID NO: 845849 - DNA, 15 bp, Homo sapiens
agggacggggcttcc

SEQ ID NO: 845850 - DNA, 15 bp, Homo sapiens
gggacggggcttcct

SEQ ID NO: 845851 - DNA, 15 bp, Homo sapiens
ggacggggcttcctc

SEQ ID NO: 845852 - DNA, 15 bp, Homo sapiens
gacggggcttcctct

SEQ ID NO: 845853 - DNA, 15 bp, Homo sapiens
acggggcttcctctc

SEQ ID NO: 845854 - DNA, 15 bp, Homo sapiens
cggggcttcctctcc

SEQ ID NO: 845855 - DNA, 15 bp, Homo sapiens
ggggcttcctctccc

SEQ ID NO: 845856 - DNA, 15 bp, Homo sapiens
gggcttcctctccca

SEQ ID NO: 845857 - DNA, 15 bp, Homo sapiens
ggcttcctctcccag

SEQ ID NO: 845858 - DNA, 15 bp, Homo sapiens
gcttcctctcccaga

SEQ ID NO: 845859 - DNA, 15 bp, Homo sapiens
cttcctctcccagag

SEQ ID NO: 845860 - DNA, 15 bp, Homo sapiens
ttcctctcccagagg

SEQ ID NO: 845861 - DNA, 15 bp, Homo sapiens
tcctctcccagagga

SEQ ID NO: 845862 - DNA, 15 bp, Homo sapiens
cctctcccagaggaa

SEQ ID NO: 845863 - DNA, 15 bp, Homo sapiens
ctctcccagaggaat

SEQ ID NO: 845864 - DNA, 15 bp, Homo sapiens
tctcccagaggaatg

SEQ ID NO: 845865 - DNA, 15 bp, Homo sapiens
ctcccagaggaatgc

SEQ ID NO: 845866 - DNA, 15 bp, Homo sapiens
tcccagaggaatgca

SEQ ID NO: 845867 - DNA, 15 bp, Homo sapiens
cccagaggaatgcag

SEQ ID NO: 845868 - DNA, 15 bp, Homo sapiens
ccagaggaatgcagg

SEQ ID NO: 845869 - DNA, 15 bp, Homo sapiens
cagaggaatgcaggc

SEQ ID NO: 845870 - DNA, 15 bp, Homo sapiens
agaggaatgcaggca

SEQ ID NO: 845871 - DNA, 15 bp, Homo sapiens
gaggaatgcaggcag

SEQ ID NO: 845872 - DNA, 15 bp, Homo sapiens
aggaatgcaggcagg

SEQ ID NO: 845873 - DNA, 15 bp, Homo sapiens
ggaatgcaggcagga

SEQ ID NO: 845874 - DNA, 15 bp, Homo sapiens
gaatgcaggcaggac

SEQ ID NO: 845875 - DNA, 15 bp, Homo sapiens
aatgcaggcaggact

SEQ ID NO: 845876 - DNA, 15 bp, Homo sapiens
atgcaggcaggactt

SEQ ID NO: 845877 - DNA, 15 bp, Homo sapiens
tgcaggcaggacttc

SEQ ID NO: 845878 - DNA, 15 bp, Homo sapiens
gcaggcaggacttct

SEQ ID NO: 845879 - DNA, 15 bp, Homo sapiens
caggcaggacttcta

SEQ ID NO: 845880 - DNA, 15 bp, Homo sapiens
aggcaggacttctag

SEQ ID NO: 845881 - DNA, 15 bp, Homo sapiens
ggcaggacttctagc

SEQ ID NO: 845882 - DNA, 15 bp, Homo sapiens
gcaggacttctagct

SEQ ID NO: 845883 - DNA, 15 bp, Homo sapiens
caggacttctagcta

SEQ ID NO: 845884 - DNA, 15 bp, Homo sapiens
aggacttctagctag

SEQ ID NO: 845885 - DNA, 15 bp, Homo sapiens
ggacttctagctagt

SEQ ID NO: 845886 - DNA, 15 bp, Homo sapiens
gacttctagctagta

SEQ ID NO: 845887 - DNA, 15 bp, Homo sapiens
acttctagctagtag

SEQ ID NO: 845888 - DNA, 15 bp, Homo sapiens
cttctagctagtagg

SEQ ID NO: 845889 - DNA, 15 bp, Homo sapiens
ttctagctagtagga

SEQ ID NO: 845890 - DNA, 15 bp, Homo sapiens
tctagctagtaggaa

SEQ ID NO: 845891 - DNA, 15 bp, Homo sapiens
ctagctagtaggaat

SEQ ID NO: 845892 - DNA, 15 bp, Homo sapiens
tagctagtaggaata

SEQ ID NO: 845893 - DNA, 15 bp, Homo sapiens
agctagtaggaataa

SEQ ID NO: 845894 - DNA, 15 bp, Homo sapiens
gctagtaggaataac

SEQ ID NO: 845895 - DNA, 15 bp, Homo sapiens
ctagtaggaataact

SEQ ID NO: 845896 - DNA, 15 bp, Homo sapiens
tagtaggaataactc

SEQ ID NO: 845897 - DNA, 15 bp, Homo sapiens
agtaggaataactcc

SEQ ID NO: 845898 - DNA, 15 bp, Homo sapiens
gtaggaataactcca

SEQ ID NO: 845899 - DNA, 15 bp, Homo sapiens
taggaataactccag

SEQ ID NO: 845900 - DNA, 15 bp, Homo sapiens
aggaataactccagt

SEQ ID NO: 845901 - DNA, 15 bp, Homo sapiens
ggaataactccagtt

SEQ ID NO: 845902 - DNA, 15 bp, Homo sapiens
gaataactccagtta

SEQ ID NO: 845903 - DNA, 15 bp, Homo sapiens
aataactccagttag

SEQ ID NO: 845904 - DNA, 15 bp, Homo sapiens
ataactccagttaga

SEQ ID NO: 845905 - DNA, 15 bp, Homo sapiens
taactccagttagat

SEQ ID NO: 845906 - DNA, 15 bp, Homo sapiens
aactccagttagatt

SEQ ID NO: 845907 - DNA, 15 bp, Homo sapiens
actccagttagattg

SEQ ID NO: 845908 - DNA, 15 bp, Homo sapiens
ctccagttagattgg

SEQ ID NO: 845909 - DNA, 15 bp, Homo sapiens
tccagttagattggt

SEQ ID NO: 845910 - DNA, 15 bp, Homo sapiens
ccagttagattggtg

SEQ ID NO: 845911 - DNA, 15 bp, Homo sapiens
cagttagattggtgg

SEQ ID NO: 845912 - DNA, 15 bp, Homo sapiens
agttagattggtggc

SEQ ID NO: 845913 - DNA, 15 bp, Homo sapiens
gttagattggtggca

SEQ ID NO: 845914 - DNA, 15 bp, Homo sapiens
ttagattggtggcaa

SEQ ID NO: 845915 - DNA, 15 bp, Homo sapiens
tagattggtggcaat

SEQ ID NO: 845916 - DNA, 15 bp, Homo sapiens
agattggtggcaata

SEQ ID NO: 845917 - DNA, 15 bp, Homo sapiens
gattggtggcaatat

SEQ ID NO: 845918 - DNA, 15 bp, Homo sapiens
attggtggcaatata

SEQ ID NO: 845919 - DNA, 15 bp, Homo sapiens
ttggtggcaatatat

SEQ ID NO: 845920 - DNA, 15 bp, Homo sapiens
tggtggcaatatatc

SEQ ID NO: 845921 - DNA, 15 bp, Homo sapiens
ggtggcaatatatca

SEQ ID NO: 845922 - DNA, 15 bp, Homo sapiens
gtggcaatatatcag

SEQ ID NO: 845923 - DNA, 15 bp, Homo sapiens
tggcaatatatcagt

SEQ ID NO: 845924 - DNA, 15 bp, Homo sapiens
ggcaatatatcagtt

SEQ ID NO: 845925 - DNA, 15 bp, Homo sapiens
gcaatatatcagttc

SEQ ID NO: 845926 - DNA, 15 bp, Homo sapiens
caatatatcagttct

SEQ ID NO: 845927 - DNA, 15 bp, Homo sapiens
aatatatcagttctt

SEQ ID NO: 845928 - DNA, 15 bp, Homo sapiens
atatatcagttcttg

SEQ ID NO: 845929 - DNA, 15 bp, Homo sapiens
tatatcagttcttga

SEQ ID NO: 845930 - DNA, 15 bp, Homo sapiens
atatcagttcttgag

SEQ ID NO: 845931 - DNA, 15 bp, Homo sapiens
tatcagttcttgaga

SEQ ID NO: 845932 - DNA, 15 bp, Homo sapiens
atcagttcttgagag

SEQ ID NO: 845933 - DNA, 15 bp, Homo sapiens
tcagttcttgagagt

SEQ ID NO: 845934 - DNA, 15 bp, Homo sapiens
cagttcttgagagtt

SEQ ID NO: 845935 - DNA, 15 bp, Homo sapiens
agttcttgagagttt

SEQ ID NO: 845936 - DNA, 15 bp, Homo sapiens
gttcttgagagtttt

SEQ ID NO: 845937 - DNA, 15 bp, Homo sapiens
ttcttgagagttttg

SEQ ID NO: 845938 - DNA, 15 bp, Homo sapiens
tcttgagagttttgt

SEQ ID NO: 845939 - DNA, 15 bp, Homo sapiens
cttgagagttttgtc

SEQ ID NO: 845940 - DNA, 15 bp, Homo sapiens
ttgagagttttgtct

SEQ ID NO: 845941 - DNA, 15 bp, Homo sapiens
tgagagttttgtctt

SEQ ID NO: 845942 - DNA, 15 bp, Homo sapiens
gagagttttgtcttt

SEQ ID NO: 845943 - DNA, 15 bp, Homo sapiens
agagttttgtctttc

SEQ ID NO: 845944 - DNA, 15 bp, Homo sapiens
gagttttgtctttca

SEQ ID NO: 845945 - DNA, 15 bp, Homo sapiens
agttttgtctttcaa

SEQ ID NO: 845946 - DNA, 15 bp, Homo sapiens
gttttgtctttcaaa

SEQ ID NO: 845947 - DNA, 15 bp, Homo sapiens
ttttgtctttcaaat

SEQ ID NO: 845948 - DNA, 15 bp, Homo sapiens
tttgtctttcaaatt

SEQ ID NO: 845949 - DNA, 15 bp, Homo sapiens
ttgtctttcaaattc

SEQ ID NO: 845950 - DNA, 15 bp, Homo sapiens
tgtctttcaaattca

SEQ ID NO: 845951 - DNA, 15 bp, Homo sapiens
gtctttcaaattcaa

SEQ ID NO: 845952 - DNA, 15 bp, Homo sapiens
tctttcaaattcaag

SEQ ID NO: 845953 - DNA, 15 bp, Homo sapiens
ctttcaaattcaagc

SEQ ID NO: 845954 - DNA, 15 bp, Homo sapiens
tttcaaattcaagcc

SEQ ID NO: 845955 - DNA, 15 bp, Homo sapiens
ttcaaattcaagcct

SEQ ID NO: 845956 - DNA, 15 bp, Homo sapiens
tcaaattcaagcctc

SEQ ID NO: 845957 - DNA, 15 bp, Homo sapiens
caaattcaagcctcc

SEQ ID NO: 845958 - DNA, 15 bp, Homo sapiens
aaattcaagcctcca

SEQ ID NO: 845959 - DNA, 15 bp, Homo sapiens
aattcaagcctccaa

SEQ ID NO: 845960 - DNA, 15 bp, Homo sapiens
attcaagcctccaag

SEQ ID NO: 845961 - DNA, 15 bp, Homo sapiens
ttcaagcctccaagt

SEQ ID NO: 845962 - DNA, 15 bp, Homo sapiens
tcaagcctccaagtt

SEQ ID NO: 845963 - DNA, 15 bp, Homo sapiens
caagcctccaagtta

SEQ ID NO: 845964 - DNA, 15 bp, Homo sapiens
aagcctccaagttat

SEQ ID NO: 845965 - DNA, 15 bp, Homo sapiens
agcctccaagttatc

SEQ ID NO: 845966 - DNA, 15 bp, Homo sapiens
gcctccaagttatcg

SEQ ID NO: 845967 - DNA, 15 bp, Homo sapiens
cctccaagttatcgg

SEQ ID NO: 845968 - DNA, 15 bp, Homo sapiens
ctccaagttatcgga

SEQ ID NO: 845969 - DNA, 15 bp, Homo sapiens
tccaagttatcggat

SEQ ID NO: 845970 - DNA, 15 bp, Homo sapiens
ccaagttatcggatt

SEQ ID NO: 845971 - DNA, 15 bp, Homo sapiens
caagttatcggattt

SEQ ID NO: 845972 - DNA, 15 bp, Homo sapiens
aagttatcggattta

SEQ ID NO: 845973 - DNA, 15 bp, Homo sapiens
agttatcggatttag

SEQ ID NO: 845974 - DNA, 15 bp, Homo sapiens
gttatcggatttaga

SEQ ID NO: 845975 - DNA, 15 bp, Homo sapiens
ttatcggatttagaa

SEQ ID NO: 845976 - DNA, 15 bp, Homo sapiens
tatcggatttagaat

SEQ ID NO: 845977 - DNA, 15 bp, Homo sapiens
atcggatttagaatt

SEQ ID NO: 845978 - DNA, 15 bp, Homo sapiens
tcggatttagaattt

SEQ ID NO: 845979 - DNA, 15 bp, Homo sapiens
cggatttagaattta

SEQ ID NO: 845980 - DNA, 15 bp, Homo sapiens
ggatttagaatttag

SEQ ID NO: 845981 - DNA, 15 bp, Homo sapiens
gatttagaatttaga

SEQ ID NO: 845982 - DNA, 15 bp, Homo sapiens
atttagaatttagaa

SEQ ID NO: 845983 - DNA, 15 bp, Homo sapiens
tttagaatttagaaa

SEQ ID NO: 845984 - DNA, 15 bp, Homo sapiens
ttagaatttagaaaa

SEQ ID NO: 845985 - DNA, 15 bp, Homo sapiens
tagaatttagaaaac

SEQ ID NO: 845986 - DNA, 15 bp, Homo sapiens
agaatttagaaaacc

SEQ ID NO: 845987 - DNA, 15 bp, Homo sapiens
gaatttagaaaaccg

SEQ ID NO: 845988 - DNA, 15 bp, Homo sapiens
aatttagaaaaccgt

SEQ ID NO: 845989 - DNA, 15 bp, Homo sapiens
atttagaaaaccgta

SEQ ID NO: 845990 - DNA, 15 bp, Homo sapiens
tttagaaaaccgtaa

SEQ ID NO: 845991 - DNA, 15 bp, Homo sapiens
ttagaaaaccgtaag

SEQ ID NO: 845992 - DNA, 15 bp, Homo sapiens
tagaaaaccgtaagt

SEQ ID NO: 845993 - DNA, 15 bp, Homo sapiens
agaaaaccgtaagtc

SEQ ID NO: 845994 - DNA, 15 bp, Homo sapiens
gaaaaccgtaagtca

SEQ ID NO: 845995 - DNA, 15 bp, Homo sapiens
aaaaccgtaagtcag

SEQ ID NO: 845996 - DNA, 15 bp, Homo sapiens
aaaccgtaagtcagt

SEQ ID NO: 845997 - DNA, 15 bp, Homo sapiens
aaccgtaagtcagtt

SEQ ID NO: 845998 - DNA, 15 bp, Homo sapiens
accgtaagtcagttg

SEQ ID NO: 845999 - DNA, 15 bp, Homo sapiens
ccgtaagtcagttgc

SEQ ID NO: 846000 - DNA, 15 bp, Homo sapiens
cgtaagtcagttgct

SEQ ID NO: 846001 - DNA, 15 bp, Homo sapiens
gtaagtcagttgcta

SEQ ID NO: 846002 - DNA, 15 bp, Homo sapiens
taagtcagttgctaa

SEQ ID NO: 846003 - DNA, 15 bp, Homo sapiens
aagtcagttgctaag

SEQ ID NO: 846004 - DNA, 15 bp, Homo sapiens
agtcagttgctaaga

SEQ ID NO: 846005 - DNA, 15 bp, Homo sapiens
gtcagttgctaagaa

SEQ ID NO: 846006 - DNA, 15 bp, Homo sapiens
tcagttgctaagaag

SEQ ID NO: 846007 - DNA, 15 bp, Homo sapiens
cagttgctaagaagc

SEQ ID NO: 846008 - DNA, 15 bp, Homo sapiens
agttgctaagaagcc

SEQ ID NO: 846009 - DNA, 15 bp, Homo sapiens
gttgctaagaagccc

SEQ ID NO: 846010 - DNA, 15 bp, Homo sapiens
ttgctaagaagccca

SEQ ID NO: 846011 - DNA, 15 bp, Homo sapiens
tgctaagaagcccaa

SEQ ID NO: 846012 - DNA, 15 bp, Homo sapiens
gctaagaagcccaag

SEQ ID NO: 846013 - DNA, 15 bp, Homo sapiens
ctaagaagcccaaga

SEQ ID NO: 846014 - DNA, 15 bp, Homo sapiens
taagaagcccaagat

SEQ ID NO: 846015 - DNA, 15 bp, Homo sapiens
aagaagcccaagatg

SEQ ID NO: 846016 - DNA, 15 bp, Homo sapiens
agaagcccaagatgt

SEQ ID NO: 846017 - DNA, 15 bp, Homo sapiens
gaagcccaagatgtt

SEQ ID NO: 846018 - DNA, 15 bp, Homo sapiens
aagcccaagatgttc

SEQ ID NO: 846019 - DNA, 15 bp, Homo sapiens
agcccaagatgttct

SEQ ID NO: 846020 - DNA, 15 bp, Homo sapiens
gcccaagatgttctg

SEQ ID NO: 846021 - DNA, 15 bp, Homo sapiens
cccaagatgttctgt

SEQ ID NO: 846022 - DNA, 15 bp, Homo sapiens
ccaagatgttctgta

SEQ ID NO: 846023 - DNA, 15 bp, Homo sapiens
caagatgttctgtaa

SEQ ID NO: 846024 - DNA, 15 bp, Homo sapiens
aagatgttctgtaat

SEQ ID NO: 846025 - DNA, 15 bp, Homo sapiens
agatgttctgtaatg

SEQ ID NO: 846026 - DNA, 15 bp, Homo sapiens
gatgttctgtaatga

SEQ ID NO: 846027 - DNA, 15 bp, Homo sapiens
atgttctgtaatgaa

SEQ ID NO: 846028 - DNA, 15 bp, Homo sapiens
tgttctgtaatgaaa

SEQ ID NO: 846029 - DNA, 15 bp, Homo sapiens
gttctgtaatgaaaa

SEQ ID NO: 846030 - DNA, 15 bp, Homo sapiens
ttctgtaatgaaaaa

SEQ ID NO: 846031 - DNA, 15 bp, Homo sapiens
tctgtaatgaaaaat

SEQ ID NO: 846032 - DNA, 15 bp, Homo sapiens
ctgtaatgaaaaatt

SEQ ID NO: 846033 - DNA, 15 bp, Homo sapiens
tgtaatgaaaaattt

SEQ ID NO: 846034 - DNA, 15 bp, Homo sapiens
gtaatgaaaaatttc

SEQ ID NO: 846035 - DNA, 15 bp, Homo sapiens
taatgaaaaatttcc

SEQ ID NO: 846036 - DNA, 15 bp, Homo sapiens
aatgaaaaatttccc

SEQ ID NO: 846037 - DNA, 15 bp, Homo sapiens
atgaaaaatttccca

SEQ ID NO: 846038 - DNA, 15 bp, Homo sapiens
tgaaaaatttcccag

SEQ ID NO: 846039 - DNA, 15 bp, Homo sapiens
gaaaaatttcccaga

SEQ ID NO: 846040 - DNA, 15 bp, Homo sapiens
aaaaatttcccagaa

SEQ ID NO: 846041 - DNA, 15 bp, Homo sapiens
aaaatttcccagaaa

SEQ ID NO: 846042 - DNA, 15 bp, Homo sapiens
aaatttcccagaaaa

SEQ ID NO: 846043 - DNA, 15 bp, Homo sapiens
aatttcccagaaaat

SEQ ID NO: 846044 - DNA, 15 bp, Homo sapiens
atttcccagaaaata

SEQ ID NO: 846045 - DNA, 15 bp, Homo sapiens
tttcccagaaaatat

SEQ ID NO: 846046 - DNA, 15 bp, Homo sapiens
ttcccagaaaatatt

SEQ ID NO: 846047 - DNA, 15 bp, Homo sapiens
tcccagaaaatattg

SEQ ID NO: 846048 - DNA, 15 bp, Homo sapiens
cccagaaaatattgc

SEQ ID NO: 846049 - DNA, 15 bp, Homo sapiens
ccagaaaatattgct

SEQ ID NO: 846050 - DNA, 15 bp, Homo sapiens
cagaaaatattgctc

SEQ ID NO: 846051 - DNA, 15 bp, Homo sapiens
agaaaatattgctca

SEQ ID NO: 846052 - DNA, 15 bp, Homo sapiens
gaaaatattgctcat

SEQ ID NO: 846053 - DNA, 15 bp, Homo sapiens
aaaatattgctcata

SEQ ID NO: 846054 - DNA, 15 bp, Homo sapiens
aaatattgctcatag

SEQ ID NO: 846055 - DNA, 15 bp, Homo sapiens
aatattgctcatagt

SEQ ID NO: 846056 - DNA, 15 bp, Homo sapiens
atattgctcatagta

SEQ ID NO: 846057 - DNA, 15 bp, Homo sapiens
tattgctcatagtaa

SEQ ID NO: 846058 - DNA, 15 bp, Homo sapiens
attgctcatagtaag

SEQ ID NO: 846059 - DNA, 15 bp, Homo sapiens
ttgctcatagtaaga

SEQ ID NO: 846060 - DNA, 15 bp, Homo sapiens
tgctcatagtaagaa

SEQ ID NO: 846061 - DNA, 15 bp, Homo sapiens
gctcatagtaagaag

SEQ ID NO: 846062 - DNA, 15 bp, Homo sapiens
ctcatagtaagaagt

SEQ ID NO: 846063 - DNA, 15 bp, Homo sapiens
tcatagtaagaagtt

SEQ ID NO: 846064 - DNA, 15 bp, Homo sapiens
catagtaagaagttt

SEQ ID NO: 846065 - DNA, 15 bp, Homo sapiens
atagtaagaagtttt

SEQ ID NO: 846066 - DNA, 15 bp, Homo sapiens
tagtaagaagttttt

SEQ ID NO: 846067 - DNA, 15 bp, Homo sapiens
agtaagaagtttttt

SEQ ID NO: 846068 - DNA, 15 bp, Homo sapiens
gtaagaagttttttg

SEQ ID NO: 846069 - DNA, 15 bp, Homo sapiens
taagaagttttttgg

SEQ ID NO: 846070 - DNA, 15 bp, Homo sapiens
aagaagttttttggg

SEQ ID NO: 846071 - DNA, 15 bp, Homo sapiens
agaagttttttggga

SEQ ID NO: 846072 - DNA, 15 bp, Homo sapiens
gaagttttttgggaa

SEQ ID NO: 846073 - DNA, 15 bp, Homo sapiens
aagttttttgggaag

SEQ ID NO: 846074 - DNA, 15 bp, Homo sapiens
agttttttgggaagt

SEQ ID NO: 846075 - DNA, 15 bp, Homo sapiens
gttttttgggaagtg

SEQ ID NO: 846076 - DNA, 15 bp, Homo sapiens
ttttttgggaagtgt

SEQ ID NO: 846077 - DNA, 15 bp, Homo sapiens
tttttgggaagtgta

SEQ ID NO: 846078 - DNA, 15 bp, Homo sapiens
ttttgggaagtgtaa

SEQ ID NO: 846079 - DNA, 15 bp, Homo sapiens
tttgggaagtgtaaa

SEQ ID NO: 846080 - DNA, 15 bp, Homo sapiens
ttgggaagtgtaaaa

SEQ ID NO: 846081 - DNA, 15 bp, Homo sapiens
tgggaagtgtaaaaa

SEQ ID NO: 846082 - DNA, 15 bp, Homo sapiens
gggaagtgtaaaaat

SEQ ID NO: 846083 - DNA, 15 bp, Homo sapiens
ggaagtgtaaaaatg

SEQ ID NO: 846084 - DNA, 15 bp, Homo sapiens
gaagtgtaaaaatga

SEQ ID NO: 846085 - DNA, 15 bp, Homo sapiens
aagtgtaaaaatgac

SEQ ID NO: 846086 - DNA, 15 bp, Homo sapiens
agtgtaaaaatgacc

SEQ ID NO: 846087 - DNA, 15 bp, Homo sapiens
gtgtaaaaatgaccc

SEQ ID NO: 846088 - DNA, 15 bp, Homo sapiens
tgtaaaaatgaccca

SEQ ID NO: 846089 - DNA, 15 bp, Homo sapiens
gtaaaaatgacccag

SEQ ID NO: 846090 - DNA, 15 bp, Homo sapiens
taaaaatgacccagt

SEQ ID NO: 846091 - DNA, 15 bp, Homo sapiens
aaaaatgacccagtt

SEQ ID NO: 846092 - DNA, 15 bp, Homo sapiens
aaaatgacccagtta

SEQ ID NO: 846093 - DNA, 15 bp, Homo sapiens
aaatgacccagttat

SEQ ID NO: 846094 - DNA, 15 bp, Homo sapiens
aatgacccagttata

SEQ ID NO: 846095 - DNA, 15 bp, Homo sapiens
atgacccagttatac

SEQ ID NO: 846096 - DNA, 15 bp, Homo sapiens
tgacccagttataca

SEQ ID NO: 846097 - DNA, 15 bp, Homo sapiens
gacccagttatacat

SEQ ID NO: 846098 - DNA, 15 bp, Homo sapiens
acccagttatacata

SEQ ID NO: 846099 - DNA, 15 bp, Homo sapiens
cccagttatacatac

SEQ ID NO: 846100 - DNA, 15 bp, Homo sapiens
ccagttatacatact

SEQ ID NO: 846101 - DNA, 15 bp, Homo sapiens
cagttatacatactc

SEQ ID NO: 846102 - DNA, 15 bp, Homo sapiens
agttatacatactcc

SEQ ID NO: 846103 - DNA, 15 bp, Homo sapiens
gttatacatactccc

SEQ ID NO: 846104 - DNA, 15 bp, Homo sapiens
ttatacatactccct

SEQ ID NO: 846105 - DNA, 15 bp, Homo sapiens
tatacatactccctg

SEQ ID NO: 846106 - DNA, 15 bp, Homo sapiens
atacatactccctgg

SEQ ID NO: 846107 - DNA, 15 bp, Homo sapiens
tacatactccctggt

SEQ ID NO: 846108 - DNA, 15 bp, Homo sapiens
acatactccctggta

SEQ ID NO: 846109 - DNA, 15 bp, Homo sapiens
catactccctggtag

SEQ ID NO: 846110 - DNA, 15 bp, Homo sapiens
atactccctggtaga

SEQ ID NO: 846111 - DNA, 15 bp, Homo sapiens
tactccctggtagat

SEQ ID NO: 846112 - DNA, 15 bp, Homo sapiens
actccctggtagatc

SEQ ID NO: 846113 - DNA, 15 bp, Homo sapiens
ctccctggtagatcc

SEQ ID NO: 846114 - DNA, 15 bp, Homo sapiens
tccctggtagatcct

SEQ ID NO: 846115 - DNA, 15 bp, Homo sapiens
ccctggtagatccta

SEQ ID NO: 846116 - DNA, 15 bp, Homo sapiens
cctggtagatcctaa

SEQ ID NO: 846117 - DNA, 15 bp, Homo sapiens
ctggtagatcctaac

SEQ ID NO: 846118 - DNA, 15 bp, Homo sapiens
tggtagatcctaaca

SEQ ID NO: 846119 - DNA, 15 bp, Homo sapiens
ggtagatcctaacag

SEQ ID NO: 846120 - DNA, 15 bp, Homo sapiens
gtagatcctaacagt

SEQ ID NO: 846121 - DNA, 15 bp, Homo sapiens
tagatcctaacagtg

SEQ ID NO: 846122 - DNA, 15 bp, Homo sapiens
agatcctaacagtgc

SEQ ID NO: 846123 - DNA, 15 bp, Homo sapiens
gatcctaacagtgca

SEQ ID NO: 846124 - DNA, 15 bp, Homo sapiens
atcctaacagtgcag

SEQ ID NO: 846125 - DNA, 15 bp, Homo sapiens
tcctaacagtgcaga

SEQ ID NO: 846126 - DNA, 15 bp, Homo sapiens
cctaacagtgcagaa

SEQ ID NO: 846127 - DNA, 15 bp, Homo sapiens
ctaacagtgcagaaa

SEQ ID NO: 846128 - DNA, 15 bp, Homo sapiens
taacagtgcagaaat

SEQ ID NO: 846129 - DNA, 15 bp, Homo sapiens
aacagtgcagaaatt

SEQ ID NO: 846130 - DNA, 15 bp, Homo sapiens
acagtgcagaaattt

SEQ ID NO: 846131 - DNA, 15 bp, Homo sapiens
cagtgcagaaatttt

SEQ ID NO: 846132 - DNA, 15 bp, Homo sapiens
agtgcagaaattttt

SEQ ID NO: 846133 - DNA, 15 bp, Homo sapiens
gtgcagaaatttttt

SEQ ID NO: 846134 - DNA, 15 bp, Homo sapiens
tgcagaaattttttc

SEQ ID NO: 846135 - DNA, 15 bp, Homo sapiens
gcagaaattttttcc

SEQ ID NO: 846136 - DNA, 15 bp, Homo sapiens
cagaaattttttcca

SEQ ID NO: 846137 - DNA, 15 bp, Homo sapiens
agaaattttttccat

SEQ ID NO: 846138 - DNA, 15 bp, Homo sapiens
gaaattttttccatg

SEQ ID NO: 846139 - DNA, 15 bp, Homo sapiens
aaattttttccatgc

SEQ ID NO: 846140 - DNA, 15 bp, Homo sapiens
aattttttccatgct

SEQ ID NO: 846141 - DNA, 15 bp, Homo sapiens
attttttccatgctc

SEQ ID NO: 846142 - DNA, 15 bp, Homo sapiens
ttttttccatgctca

SEQ ID NO: 846143 - DNA, 15 bp, Homo sapiens
tttttccatgctcag

SEQ ID NO: 846144 - DNA, 15 bp, Homo sapiens
ttttccatgctcaga

SEQ ID NO: 846145 - DNA, 15 bp, Homo sapiens
tttccatgctcagaa

SEQ ID NO: 846146 - DNA, 15 bp, Homo sapiens
ttccatgctcagaag

SEQ ID NO: 846147 - DNA, 15 bp, Homo sapiens
tccatgctcagaagc

SEQ ID NO: 846148 - DNA, 15 bp, Homo sapiens
ccatgctcagaagca

SEQ ID NO: 846149 - DNA, 15 bp, Homo sapiens
catgctcagaagcag

SEQ ID NO: 846150 - DNA, 15 bp, Homo sapiens
atgctcagaagcaga

SEQ ID NO: 846151 - DNA, 15 bp, Homo sapiens
tgctcagaagcagaa

SEQ ID NO: 846152 - DNA, 15 bp, Homo sapiens
gctcagaagcagaat

SEQ ID NO: 846153 - DNA, 15 bp, Homo sapiens
ctcagaagcagaatt

SEQ ID NO: 846154 - DNA, 15 bp, Homo sapiens
tcagaagcagaattg

SEQ ID NO: 846155 - DNA, 15 bp, Homo sapiens
cagaagcagaattga

SEQ ID NO: 846156 - DNA, 15 bp, Homo sapiens
agaagcagaattgat

SEQ ID NO: 846157 - DNA, 15 bp, Homo sapiens
gaagcagaattgatt

SEQ ID NO: 846158 - DNA, 15 bp, Homo sapiens
aagcagaattgattt

SEQ ID NO: 846159 - DNA, 15 bp, Homo sapiens
agcagaattgattta

SEQ ID NO: 846160 - DNA, 15 bp, Homo sapiens
gcagaattgatttat

SEQ ID NO: 846161 - DNA, 15 bp, Homo sapiens
cagaattgatttatt

SEQ ID NO: 846162 - DNA, 15 bp, Homo sapiens
agaattgatttattt

SEQ ID NO: 846163 - DNA, 15 bp, Homo sapiens
gaattgatttatttc

SEQ ID NO: 846164 - DNA, 15 bp, Homo sapiens
aattgatttatttca

SEQ ID NO: 846165 - DNA, 15 bp, Homo sapiens
attgatttatttcat

SEQ ID NO: 846166 - DNA, 15 bp, Homo sapiens
ttgatttatttcatg

SEQ ID NO: 846167 - DNA, 15 bp, Homo sapiens
tgatttatttcatgc

SEQ ID NO: 846168 - DNA, 15 bp, Homo sapiens
gatttatttcatgcc

SEQ ID NO: 846169 - DNA, 15 bp, Homo sapiens
atttatttcatgccc

SEQ ID NO: 846170 - DNA, 15 bp, Homo sapiens
tttatttcatgcccc

SEQ ID NO: 846171 - DNA, 15 bp, Homo sapiens
ttatttcatgcccca

SEQ ID NO: 846172 - DNA, 15 bp, Homo sapiens
tatttcatgccccaa

SEQ ID NO: 846173 - DNA, 15 bp, Homo sapiens
atttcatgccccaac

SEQ ID NO: 846174 - DNA, 15 bp, Homo sapiens
tttcatgccccaaca

SEQ ID NO: 846175 - DNA, 15 bp, Homo sapiens
ttcatgccccaacac

SEQ ID NO: 846176 - DNA, 15 bp, Homo sapiens
tcatgccccaacact

SEQ ID NO: 846177 - DNA, 15 bp, Homo sapiens
catgccccaacacta

SEQ ID NO: 846178 - DNA, 15 bp, Homo sapiens
atgccccaacactaa

SEQ ID NO: 846179 - DNA, 15 bp, Homo sapiens
tgccccaacactaaa

SEQ ID NO: 846180 - DNA, 15 bp, Homo sapiens
gccccaacactaaac

SEQ ID NO: 846181 - DNA, 15 bp, Homo sapiens
ccccaacactaaacg

SEQ ID NO: 846182 - DNA, 15 bp, Homo sapiens
cccaacactaaacgc

SEQ ID NO: 846183 - DNA, 15 bp, Homo sapiens
ccaacactaaacgct

SEQ ID NO: 846184 - DNA, 15 bp, Homo sapiens
caacactaaacgcta

SEQ ID NO: 846185 - DNA, 15 bp, Homo sapiens
aacactaaacgctat

SEQ ID NO: 846186 - DNA, 15 bp, Homo sapiens
acactaaacgctatg

SEQ ID NO: 846187 - DNA, 15 bp, Homo sapiens
cactaaacgctatga

SEQ ID NO: 846188 - DNA, 15 bp, Homo sapiens
actaaacgctatgaa

SEQ ID NO: 846189 - DNA, 15 bp, Homo sapiens
ctaaacgctatgaag

SEQ ID NO: 846190 - DNA, 15 bp, Homo sapiens
taaacgctatgaagt

SEQ ID NO: 846191 - DNA, 15 bp, Homo sapiens
aaacgctatgaagtt

SEQ ID NO: 846192 - DNA, 15 bp, Homo sapiens
aacgctatgaagtta

SEQ ID NO: 846193 - DNA, 15 bp, Homo sapiens
acgctatgaagttat

SEQ ID NO: 846194 - DNA, 15 bp, Homo sapiens
cgctatgaagttatt

SEQ ID NO: 846195 - DNA, 15 bp, Homo sapiens
gctatgaagttattg

SEQ ID NO: 846196 - DNA, 15 bp, Homo sapiens
ctatgaagttattga

SEQ ID NO: 846197 - DNA, 15 bp, Homo sapiens
tatgaagttattgaa

SEQ ID NO: 846198 - DNA, 15 bp, Homo sapiens
atgaagttattgaag

SEQ ID NO: 846199 - DNA, 15 bp, Homo sapiens
tgaagttattgaagt

SEQ ID NO: 846200 - DNA, 15 bp, Homo sapiens
gaagttattgaagtt

SEQ ID NO: 846201 - DNA, 15 bp, Homo sapiens
aagttattgaagtta

SEQ ID NO: 846202 - DNA, 15 bp, Homo sapiens
agttattgaagttat

SEQ ID NO: 846203 - DNA, 15 bp, Homo sapiens
gttattgaagttatt

SEQ ID NO: 846204 - DNA, 15 bp, Homo sapiens
ttattgaagttattc

SEQ ID NO: 846205 - DNA, 15 bp, Homo sapiens
tattgaagttattca

SEQ ID NO: 846206 - DNA, 15 bp, Homo sapiens
attgaagttattcat

SEQ ID NO: 846207 - DNA, 15 bp, Homo sapiens
ttgaagttattcatg

SEQ ID NO: 846208 - DNA, 15 bp, Homo sapiens
tgaagttattcatgc

SEQ ID NO: 846209 - DNA, 15 bp, Homo sapiens
gaagttattcatgct

SEQ ID NO: 846210 - DNA, 15 bp, Homo sapiens
aagttattcatgctt

SEQ ID NO: 846211 - DNA, 15 bp, Homo sapiens
agttattcatgctta

SEQ ID NO: 846212 - DNA, 15 bp, Homo sapiens
gttattcatgcttac

SEQ ID NO: 846213 - DNA, 15 bp, Homo sapiens
ttattcatgcttact

SEQ ID NO: 846214 - DNA, 15 bp, Homo sapiens
tattcatgcttactt

SEQ ID NO: 846215 - DNA, 15 bp, Homo sapiens
attcatgcttactta

SEQ ID NO: 846216 - DNA, 15 bp, Homo sapiens
ttcatgcttacttat

SEQ ID NO: 846217 - DNA, 15 bp, Homo sapiens
tcatgcttacttatg

SEQ ID NO: 846218 - DNA, 15 bp, Homo sapiens
catgcttacttatga

SEQ ID NO: 846219 - DNA, 15 bp, Homo sapiens
atgcttacttatgat

SEQ ID NO: 846220 - DNA, 15 bp, Homo sapiens
tgcttacttatgatc

SEQ ID NO: 846221 - DNA, 15 bp, Homo sapiens
gcttacttatgatca

SEQ ID NO: 846222 - DNA, 15 bp, Homo sapiens
cttacttatgatcag

SEQ ID NO: 846223 - DNA, 15 bp, Homo sapiens
ttacttatgatcaga

SEQ ID NO: 846224 - DNA, 15 bp, Homo sapiens
tacttatgatcagat

SEQ ID NO: 846225 - DNA, 15 bp, Homo sapiens
acttatgatcagatg

SEQ ID NO: 846226 - DNA, 15 bp, Homo sapiens
cttatgatcagatgc

SEQ ID NO: 846227 - DNA, 15 bp, Homo sapiens
ttatgatcagatgcc

SEQ ID NO: 846228 - DNA, 15 bp, Homo sapiens
tatgatcagatgcct

SEQ ID NO: 846229 - DNA, 15 bp, Homo sapiens
atgatcagatgccta

SEQ ID NO: 846230 - DNA, 15 bp, Homo sapiens
tgatcagatgcctag

SEQ ID NO: 846231 - DNA, 15 bp, Homo sapiens
gatcagatgcctaga

SEQ ID NO: 846232 - DNA, 15 bp, Homo sapiens
atcagatgcctagaa

SEQ ID NO: 846233 - DNA, 15 bp, Homo sapiens
tcagatgcctagaaa

SEQ ID NO: 846234 - DNA, 15 bp, Homo sapiens
cagatgcctagaaaa

SEQ ID NO: 846235 - DNA, 15 bp, Homo sapiens
agatgcctagaaaaa

SEQ ID NO: 846236 - DNA, 15 bp, Homo sapiens
gatgcctagaaaaat

SEQ ID NO: 846237 - DNA, 15 bp, Homo sapiens
atgcctagaaaaatt

SEQ ID NO: 846238 - DNA, 15 bp, Homo sapiens
tgcctagaaaaattg

SEQ ID NO: 846239 - DNA, 15 bp, Homo sapiens
gcctagaaaaattgt

SEQ ID NO: 846240 - DNA, 15 bp, Homo sapiens
cctagaaaaattgtt

SEQ ID NO: 846241 - DNA, 15 bp, Homo sapiens
ctagaaaaattgttc

SEQ ID NO: 846242 - DNA, 15 bp, Homo sapiens
tagaaaaattgttct

SEQ ID NO: 846243 - DNA, 15 bp, Homo sapiens
agaaaaattgttctt

SEQ ID NO: 846244 - DNA, 15 bp, Homo sapiens
gaaaaattgttcttg

SEQ ID NO: 846245 - DNA, 15 bp, Homo sapiens
aaaaattgttcttgt

SEQ ID NO: 846246 - DNA, 15 bp, Homo sapiens
aaaattgttcttgtt

SEQ ID NO: 846247 - DNA, 15 bp, Homo sapiens
aaattgttcttgttt

SEQ ID NO: 846248 - DNA, 15 bp, Homo sapiens
aattgttcttgtttc

SEQ ID NO: 846249 - DNA, 15 bp, Homo sapiens
attgttcttgtttct

SEQ ID NO: 846250 - DNA, 15 bp, Homo sapiens
ttgttcttgtttctt

SEQ ID NO: 846251 - DNA, 15 bp, Homo sapiens
tgttcttgtttcttt

SEQ ID NO: 846252 - DNA, 15 bp, Homo sapiens
gttcttgtttcttta

SEQ ID NO: 846253 - DNA, 15 bp, Homo sapiens
ttcttgtttctttag

SEQ ID NO: 846254 - DNA, 15 bp, Homo sapiens
tcttgtttctttagg

SEQ ID NO: 846255 - DNA, 15 bp, Homo sapiens
cttgtttctttaggc

SEQ ID NO: 846256 - DNA, 15 bp, Homo sapiens
ttgtttctttaggcc

SEQ ID NO: 846257 - DNA, 15 bp, Homo sapiens
tgtttctttaggcct

SEQ ID NO: 846258 - DNA, 15 bp, Homo sapiens
gtttctttaggcctc

SEQ ID NO: 846259 - DNA, 15 bp, Homo sapiens
tttctttaggcctct

SEQ ID NO: 846260 - DNA, 15 bp, Homo sapiens
ttctttaggcctctc

SEQ ID NO: 846261 - DNA, 15 bp, Homo sapiens
tctttaggcctctct

SEQ ID NO: 846262 - DNA, 15 bp, Homo sapiens
ctttaggcctctctc

SEQ ID NO: 846263 - DNA, 15 bp, Homo sapiens
tttaggcctctctct

SEQ ID NO: 846264 - DNA, 15 bp, Homo sapiens
ttaggcctctctctc

SEQ ID NO: 846265 - DNA, 15 bp, Homo sapiens
taggcctctctctcc

SEQ ID NO: 846266 - DNA, 15 bp, Homo sapiens
aggcctctctctcca

SEQ ID NO: 846267 - DNA, 15 bp, Homo sapiens
ggcctctctctccag

SEQ ID NO: 846268 - DNA, 15 bp, Homo sapiens
gcctctctctccagt

SEQ ID NO: 846269 - DNA, 15 bp, Homo sapiens
cctctctctccagtt

SEQ ID NO: 846270 - DNA, 15 bp, Homo sapiens
ctctctctccagttt

SEQ ID NO: 846271 - DNA, 15 bp, Homo sapiens
tctctctccagtttt

SEQ ID NO: 846272 - DNA, 15 bp, Homo sapiens
ctctctccagtttta

SEQ ID NO: 846273 - DNA, 15 bp, Homo sapiens
tctctccagttttat

SEQ ID NO: 846274 - DNA, 15 bp, Homo sapiens
ctctccagttttatc

SEQ ID NO: 846275 - DNA, 15 bp, Homo sapiens
tctccagttttatct

SEQ ID NO: 846276 - DNA, 15 bp, Homo sapiens
ctccagttttatctt

SEQ ID NO: 846277 - DNA, 15 bp, Homo sapiens
tccagttttatcttg

SEQ ID NO: 846278 - DNA, 15 bp, Homo sapiens
ccagttttatcttgc

SEQ ID NO: 846279 - DNA, 15 bp, Homo sapiens
cagttttatcttgct

SEQ ID NO: 846280 - DNA, 15 bp, Homo sapiens
agttttatcttgctt

SEQ ID NO: 846281 - DNA, 15 bp, Homo sapiens
gttttatcttgctta

SEQ ID NO: 846282 - DNA, 15 bp, Homo sapiens
ttttatcttgcttag

SEQ ID NO: 846283 - DNA, 15 bp, Homo sapiens
tttatcttgcttagt

SEQ ID NO: 846284 - DNA, 15 bp, Homo sapiens
ttatcttgcttagtt

SEQ ID NO: 846285 - DNA, 15 bp, Homo sapiens
tatcttgcttagttc

SEQ ID NO: 846286 - DNA, 15 bp, Homo sapiens
atcttgcttagttca

SEQ ID NO: 846287 - DNA, 15 bp, Homo sapiens
tcttgcttagttcaa

SEQ ID NO: 846288 - DNA, 15 bp, Homo sapiens
cttgcttagttcaac

SEQ ID NO: 846289 - DNA, 15 bp, Homo sapiens
ttgcttagttcaact

SEQ ID NO: 846290 - DNA, 15 bp, Homo sapiens
tgcttagttcaactc

SEQ ID NO: 846291 - DNA, 15 bp, Homo sapiens
gcttagttcaactca

SEQ ID NO: 846292 - DNA, 15 bp, Homo sapiens
cttagttcaactcag

SEQ ID NO: 846293 - DNA, 15 bp, Homo sapiens
ttagttcaactcagc

SEQ ID NO: 846294 - DNA, 15 bp, Homo sapiens
tagttcaactcagca

SEQ ID NO: 846295 - DNA, 15 bp, Homo sapiens
agttcaactcagcag

SEQ ID NO: 846296 - DNA, 15 bp, Homo sapiens
gttcaactcagcaga

SEQ ID NO: 846297 - DNA, 15 bp, Homo sapiens
ttcaactcagcagat

SEQ ID NO: 846298 - DNA, 15 bp, Homo sapiens
tcaactcagcagata

SEQ ID NO: 846299 - DNA, 15 bp, Homo sapiens
caactcagcagatat

SEQ ID NO: 846300 - DNA, 15 bp, Homo sapiens
aactcagcagatatt

SEQ ID NO: 846301 - DNA, 15 bp, Homo sapiens
actcagcagatatta

SEQ ID NO: 846302 - DNA, 15 bp, Homo sapiens
ctcagcagatattaa

SEQ ID NO: 846303 - DNA, 15 bp, Homo sapiens
tcagcagatattaac

SEQ ID NO: 846304 - DNA, 15 bp, Homo sapiens
cagcagatattaacc

SEQ ID NO: 846305 - DNA, 15 bp, Homo sapiens
agcagatattaaccc

SEQ ID NO: 846306 - DNA, 15 bp, Homo sapiens
gcagatattaaccca

SEQ ID NO: 846307 - DNA, 15 bp, Homo sapiens
cagatattaacccag

SEQ ID NO: 846308 - DNA, 15 bp, Homo sapiens
agatattaacccagc

SEQ ID NO: 846309 - DNA, 15 bp, Homo sapiens
gatattaacccagca

SEQ ID NO: 846310 - DNA, 15 bp, Homo sapiens
atattaacccagcac

SEQ ID NO: 846311 - DNA, 15 bp, Homo sapiens
tattaacccagcacc

SEQ ID NO: 846312 - DNA, 15 bp, Homo sapiens
attaacccagcacct

SEQ ID NO: 846313 - DNA, 15 bp, Homo sapiens
ttaacccagcacctc

SEQ ID NO: 846314 - DNA, 15 bp, Homo sapiens
taacccagcacctct

SEQ ID NO: 846315 - DNA, 15 bp, Homo sapiens
aacccagcacctctt

SEQ ID NO: 846316 - DNA, 15 bp, Homo sapiens
acccagcacctctta

SEQ ID NO: 846317 - DNA, 15 bp, Homo sapiens
cccagcacctcttat

SEQ ID NO: 846318 - DNA, 15 bp, Homo sapiens
ccagcacctcttatt

SEQ ID NO: 846319 - DNA, 15 bp, Homo sapiens
cagcacctcttattt

SEQ ID NO: 846320 - DNA, 15 bp, Homo sapiens
agcacctcttatttg

SEQ ID NO: 846321 - DNA, 15 bp, Homo sapiens
gcacctcttatttgc

SEQ ID NO: 846322 - DNA, 15 bp, Homo sapiens
cacctcttatttgca

SEQ ID NO: 846323 - DNA, 15 bp, Homo sapiens
acctcttatttgcaa

SEQ ID NO: 846324 - DNA, 15 bp, Homo sapiens
cctcttatttgcaaa

SEQ ID NO: 846325 - DNA, 15 bp, Homo sapiens
ctcttatttgcaaag

SEQ ID NO: 846326 - DNA, 15 bp, Homo sapiens
tcttatttgcaaagt

SEQ ID NO: 846327 - DNA, 15 bp, Homo sapiens
cttatttgcaaagta

SEQ ID NO: 846328 - DNA, 15 bp, Homo sapiens
ttatttgcaaagtac

SEQ ID NO: 846329 - DNA, 15 bp, Homo sapiens
tatttgcaaagtact

SEQ ID NO: 846330 - DNA, 15 bp, Homo sapiens
atttgcaaagtactg

SEQ ID NO: 846331 - DNA, 15 bp, Homo sapiens
tttgcaaagtactgt

SEQ ID NO: 846332 - DNA, 15 bp, Homo sapiens
ttgcaaagtactgtg

SEQ ID NO: 846333 - DNA, 15 bp, Homo sapiens
tgcaaagtactgtgc

SEQ ID NO: 846334 - DNA, 15 bp, Homo sapiens
gcaaagtactgtgct

SEQ ID NO: 846335 - DNA, 15 bp, Homo sapiens
caaagtactgtgctg

SEQ ID NO: 846336 - DNA, 15 bp, Homo sapiens
aaagtactgtgctgc

SEQ ID NO: 846337 - DNA, 15 bp, Homo sapiens
aagtactgtgctgct

SEQ ID NO: 846338 - DNA, 15 bp, Homo sapiens
agtactgtgctgctc

SEQ ID NO: 846339 - DNA, 15 bp, Homo sapiens
gtactgtgctgctcc

SEQ ID NO: 846340 - DNA, 15 bp, Homo sapiens
tactgtgctgctcct

SEQ ID NO: 846341 - DNA, 15 bp, Homo sapiens
actgtgctgctcctt

SEQ ID NO: 846342 - DNA, 15 bp, Homo sapiens
ctgtgctgctccttc

SEQ ID NO: 846343 - DNA, 15 bp, Homo sapiens
tgtgctgctccttct

SEQ ID NO: 846344 - DNA, 15 bp, Homo sapiens
gtgctgctccttcta

SEQ ID NO: 846345 - DNA, 15 bp, Homo sapiens
tgctgctccttctag

SEQ ID NO: 846346 - DNA, 15 bp, Homo sapiens
gctgctccttctaga

SEQ ID NO: 846347 - DNA, 15 bp, Homo sapiens
ctgctccttctagaa

SEQ ID NO: 846348 - DNA, 15 bp, Homo sapiens
tgctccttctagaag

SEQ ID NO: 846349 - DNA, 15 bp, Homo sapiens
gctccttctagaaga

SEQ ID NO: 846350 - DNA, 15 bp, Homo sapiens
ctccttctagaagat

SEQ ID NO: 846351 - DNA, 15 bp, Homo sapiens
tccttctagaagata

SEQ ID NO: 846352 - DNA, 15 bp, Homo sapiens
ccttctagaagatac

SEQ ID NO: 846353 - DNA, 15 bp, Homo sapiens
cttctagaagataca

SEQ ID NO: 846354 - DNA, 15 bp, Homo sapiens
ttctagaagatacag

SEQ ID NO: 846355 - DNA, 15 bp, Homo sapiens
tctagaagatacaga

SEQ ID NO: 846356 - DNA, 15 bp, Homo sapiens
ctagaagatacagag

SEQ ID NO: 846357 - DNA, 15 bp, Homo sapiens
tagaagatacagagc

SEQ ID NO: 846358 - DNA, 15 bp, Homo sapiens
agaagatacagagct

SEQ ID NO: 846359 - DNA, 15 bp, Homo sapiens
gaagatacagagctg

SEQ ID NO: 846360 - DNA, 15 bp, Homo sapiens
aagatacagagctga

SEQ ID NO: 846361 - DNA, 15 bp, Homo sapiens
agatacagagctgag

SEQ ID NO: 846362 - DNA, 15 bp, Homo sapiens
gatacagagctgagt

SEQ ID NO: 846363 - DNA, 15 bp, Homo sapiens
atacagagctgagta

SEQ ID NO: 846364 - DNA, 15 bp, Homo sapiens
tacagagctgagtaa

SEQ ID NO: 846365 - DNA, 15 bp, Homo sapiens
acagagctgagtaag

SEQ ID NO: 846366 - DNA, 15 bp, Homo sapiens
cagagctgagtaaga

SEQ ID NO: 846367 - DNA, 15 bp, Homo sapiens
agagctgagtaagac

SEQ ID NO: 846368 - DNA, 15 bp, Homo sapiens
gagctgagtaagaca

SEQ ID NO: 846369 - DNA, 15 bp, Homo sapiens
agctgagtaagacag

SEQ ID NO: 846370 - DNA, 15 bp, Homo sapiens
gctgagtaagacagc

SEQ ID NO: 846371 - DNA, 15 bp, Homo sapiens
ctgagtaagacagct

SEQ ID NO: 846372 - DNA, 15 bp, Homo sapiens
tgagtaagacagctc

SEQ ID NO: 846373 - DNA, 15 bp, Homo sapiens
gagtaagacagctct

SEQ ID NO: 846374 - DNA, 15 bp, Homo sapiens
agtaagacagctctt

SEQ ID NO: 846375 - DNA, 15 bp, Homo sapiens
gtaagacagctcttc

SEQ ID NO: 846376 - DNA, 15 bp, Homo sapiens
taagacagctcttcc

SEQ ID NO: 846377 - DNA, 15 bp, Homo sapiens
aagacagctcttcct

SEQ ID NO: 846378 - DNA, 15 bp, Homo sapiens
agacagctcttcctt

SEQ ID NO: 846379 - DNA, 15 bp, Homo sapiens
gacagctcttccttt

SEQ ID NO: 846380 - DNA, 15 bp, Homo sapiens
acagctcttccttta

SEQ ID NO: 846381 - DNA, 15 bp, Homo sapiens
cagctcttcctttaa

SEQ ID NO: 846382 - DNA, 15 bp, Homo sapiens
agctcttcctttaag

SEQ ID NO: 846383 - DNA, 15 bp, Homo sapiens
gctcttcctttaagg

SEQ ID NO: 846384 - DNA, 15 bp, Homo sapiens
ctcttcctttaagga

SEQ ID NO: 846385 - DNA, 15 bp, Homo sapiens
tcttcctttaaggag

SEQ ID NO: 846386 - DNA, 15 bp, Homo sapiens
cttcctttaaggagc

SEQ ID NO: 846387 - DNA, 15 bp, Homo sapiens
ttcctttaaggagct

SEQ ID NO: 846388 - DNA, 15 bp, Homo sapiens
tcctttaaggagctt

SEQ ID NO: 846389 - DNA, 15 bp, Homo sapiens
cctttaaggagctta

SEQ ID NO: 846390 - DNA, 15 bp, Homo sapiens
ctttaaggagcttac

SEQ ID NO: 846391 - DNA, 15 bp, Homo sapiens
tttaaggagcttaca

SEQ ID NO: 846392 - DNA, 15 bp, Homo sapiens
ttaaggagcttacag

SEQ ID NO: 846393 - DNA, 15 bp, Homo sapiens
taaggagcttacagt

SEQ ID NO: 846394 - DNA, 15 bp, Homo sapiens
aaggagcttacagtc

SEQ ID NO: 846395 - DNA, 15 bp, Homo sapiens
aggagcttacagtcg

SEQ ID NO: 846396 - DNA, 15 bp, Homo sapiens
ggagcttacagtcga

SEQ ID NO: 846397 - DNA, 15 bp, Homo sapiens
gagcttacagtcgat

SEQ ID NO: 846398 - DNA, 15 bp, Homo sapiens
agcttacagtcgata

SEQ ID NO: 846399 - DNA, 15 bp, Homo sapiens
gcttacagtcgatac

SEQ ID NO: 846400 - DNA, 15 bp, Homo sapiens
cttacagtcgatacg

SEQ ID NO: 846401 - DNA, 15 bp, Homo sapiens
ttacagtcgatacgg

SEQ ID NO: 846402 - DNA, 15 bp, Homo sapiens
tacagtcgatacgga

SEQ ID NO: 846403 - DNA, 15 bp, Homo sapiens
acagtcgatacggaa

SEQ ID NO: 846404 - DNA, 15 bp, Homo sapiens
cagtcgatacggaaa

SEQ ID NO: 846405 - DNA, 15 bp, Homo sapiens
agtcgatacggaaat

SEQ ID NO: 846406 - DNA, 15 bp, Homo sapiens
gtcgatacggaaatg

SEQ ID NO: 846407 - DNA, 15 bp, Homo sapiens
tcgatacggaaatgg

SEQ ID NO: 846408 - DNA, 15 bp, Homo sapiens
cgatacggaaatgga

SEQ ID NO: 846409 - DNA, 15 bp, Homo sapiens
gatacggaaatggaa

SEQ ID NO: 846410 - DNA, 15 bp, Homo sapiens
atacggaaatggaat

SEQ ID NO: 846411 - DNA, 15 bp, Homo sapiens
tacggaaatggaatt

SEQ ID NO: 846412 - DNA, 15 bp, Homo sapiens
acggaaatggaattc

SEQ ID NO: 846413 - DNA, 15 bp, Homo sapiens
cggaaatggaattcc

SEQ ID NO: 846414 - DNA, 15 bp, Homo sapiens
ggaaatggaattcca

SEQ ID NO: 846415 - DNA, 15 bp, Homo sapiens
gaaatggaattccac

SEQ ID NO: 846416 - DNA, 15 bp, Homo sapiens
aaatggaattccacc

SEQ ID NO: 846417 - DNA, 15 bp, Homo sapiens
aatggaattccacct

SEQ ID NO: 846418 - DNA, 15 bp, Homo sapiens
atggaattccacctc

SEQ ID NO: 846419 - DNA, 15 bp, Homo sapiens
tggaattccacctca

SEQ ID NO: 846420 - DNA, 15 bp, Homo sapiens
ggaattccacctcat

SEQ ID NO: 846421 - DNA, 15 bp, Homo sapiens
gaattccacctcatt

SEQ ID NO: 846422 - DNA, 15 bp, Homo sapiens
aattccacctcattg

SEQ ID NO: 846423 - DNA, 15 bp, Homo sapiens
attccacctcattgt

SEQ ID NO: 846424 - DNA, 15 bp, Homo sapiens
ttccacctcattgta

SEQ ID NO: 846425 - DNA, 15 bp, Homo sapiens
tccacctcattgtag

SEQ ID NO: 846426 - DNA, 15 bp, Homo sapiens
ccacctcattgtagt

SEQ ID NO: 846427 - DNA, 15 bp, Homo sapiens
cacctcattgtagtt

SEQ ID NO: 846428 - DNA, 15 bp, Homo sapiens
acctcattgtagttc

SEQ ID NO: 846429 - DNA, 15 bp, Homo sapiens
cctcattgtagttct

SEQ ID NO: 846430 - DNA, 15 bp, Homo sapiens
ctcattgtagttctc

SEQ ID NO: 846431 - DNA, 15 bp, Homo sapiens
tcattgtagttctct

SEQ ID NO: 846432 - DNA, 15 bp, Homo sapiens
cattgtagttctctt

SEQ ID NO: 846433 - DNA, 15 bp, Homo sapiens
attgtagttctcttc

SEQ ID NO: 846434 - DNA, 15 bp, Homo sapiens
ttgtagttctcttca

SEQ ID NO: 846435 - DNA, 15 bp, Homo sapiens
tgtagttctcttcag

SEQ ID NO: 846436 - DNA, 15 bp, Homo sapiens
gtagttctcttcaga

SEQ ID NO: 846437 - DNA, 15 bp, Homo sapiens
tagttctcttcagat

SEQ ID NO: 846438 - DNA, 15 bp, Homo sapiens
agttctcttcagatg

SEQ ID NO: 846439 - DNA, 15 bp, Homo sapiens
gttctcttcagatgt

SEQ ID NO: 846440 - DNA, 15 bp, Homo sapiens
ttctcttcagatgtc

SEQ ID NO: 846441 - DNA, 15 bp, Homo sapiens
tctcttcagatgtca

SEQ ID NO: 846442 - DNA, 15 bp, Homo sapiens
ctcttcagatgtcag

SEQ ID NO: 846443 - DNA, 15 bp, Homo sapiens
tcttcagatgtcaga

SEQ ID NO: 846444 - DNA, 15 bp, Homo sapiens
cttcagatgtcagag

SEQ ID NO: 846445 - DNA, 15 bp, Homo sapiens
ttcagatgtcagaga

SEQ ID NO: 846446 - DNA, 15 bp, Homo sapiens
tcagatgtcagagaa

SEQ ID NO: 846447 - DNA, 15 bp, Homo sapiens
cagatgtcagagaag

SEQ ID NO: 846448 - DNA, 15 bp, Homo sapiens
agatgtcagagaagt

SEQ ID NO: 846449 - DNA, 15 bp, Homo sapiens
gatgtcagagaagtc

SEQ ID NO: 846450 - DNA, 15 bp, Homo sapiens
atgtcagagaagtca

SEQ ID NO: 846451 - DNA, 15 bp, Homo sapiens
tgtcagagaagtcaa

SEQ ID NO: 846452 - DNA, 15 bp, Homo sapiens
gtcagagaagtcaaa

SEQ ID NO: 846453 - DNA, 15 bp, Homo sapiens
tcagagaagtcaaat

SEQ ID NO: 846454 - DNA, 15 bp, Homo sapiens
cagagaagtcaaatg

SEQ ID NO: 846455 - DNA, 15 bp, Homo sapiens
agagaagtcaaatgc

SEQ ID NO: 846456 - DNA, 15 bp, Homo sapiens
gagaagtcaaatgct

SEQ ID NO: 846457 - DNA, 15 bp, Homo sapiens
agaagtcaaatgctg

SEQ ID NO: 846458 - DNA, 15 bp, Homo sapiens
gaagtcaaatgctgt

SEQ ID NO: 846459 - DNA, 15 bp, Homo sapiens
aagtcaaatgctgtg

SEQ ID NO: 846460 - DNA, 15 bp, Homo sapiens
agtcaaatgctgtga

SEQ ID NO: 846461 - DNA, 15 bp, Homo sapiens
gtcaaatgctgtgat

SEQ ID NO: 846462 - DNA, 15 bp, Homo sapiens
tcaaatgctgtgatg

SEQ ID NO: 846463 - DNA, 15 bp, Homo sapiens
caaatgctgtgatgg

SEQ ID NO: 846464 - DNA, 15 bp, Homo sapiens
aaatgctgtgatggt

SEQ ID NO: 846465 - DNA, 15 bp, Homo sapiens
aatgctgtgatggta

SEQ ID NO: 846466 - DNA, 15 bp, Homo sapiens
atgctgtgatggtac

SEQ ID NO: 846467 - DNA, 15 bp, Homo sapiens
tgctgtgatggtact

SEQ ID NO: 846468 - DNA, 15 bp, Homo sapiens
gctgtgatggtactt

SEQ ID NO: 846469 - DNA, 15 bp, Homo sapiens
ctgtgatggtactta

SEQ ID NO: 846470 - DNA, 15 bp, Homo sapiens
tgtgatggtacttaa

SEQ ID NO: 846471 - DNA, 15 bp, Homo sapiens
gtgatggtacttaat

SEQ ID NO: 846472 - DNA, 15 bp, Homo sapiens
tgatggtacttaatg

SEQ ID NO: 846473 - DNA, 15 bp, Homo sapiens
gatggtacttaatgc

SEQ ID NO: 846474 - DNA, 15 bp, Homo sapiens
atggtacttaatgct

SEQ ID NO: 846475 - DNA, 15 bp, Homo sapiens
tggtacttaatgcta

SEQ ID NO: 846476 - DNA, 15 bp, Homo sapiens
ggtacttaatgctaa

SEQ ID NO: 846477 - DNA, 15 bp, Homo sapiens
gtacttaatgctaat

SEQ ID NO: 846478 - DNA, 15 bp, Homo sapiens
tacttaatgctaatc

SEQ ID NO: 846479 - DNA, 15 bp, Homo sapiens
acttaatgctaatca

SEQ ID NO: 846480 - DNA, 15 bp, Homo sapiens
cttaatgctaatcac

SEQ ID NO: 846481 - DNA, 15 bp, Homo sapiens
ttaatgctaatcacc

SEQ ID NO: 846482 - DNA, 15 bp, Homo sapiens
taatgctaatcacca

SEQ ID NO: 846483 - DNA, 15 bp, Homo sapiens
aatgctaatcaccac

SEQ ID NO: 846484 - DNA, 15 bp, Homo sapiens
atgctaatcaccaca

SEQ ID NO: 846485 - DNA, 15 bp, Homo sapiens
tgctaatcaccacac

SEQ ID NO: 846486 - DNA, 15 bp, Homo sapiens
gctaatcaccacaca

SEQ ID NO: 846487 - DNA, 15 bp, Homo sapiens
ctaatcaccacacat

SEQ ID NO: 846488 - DNA, 15 bp, Homo sapiens
taatcaccacacatg

SEQ ID NO: 846489 - DNA, 15 bp, Homo sapiens
aatcaccacacatgg

SEQ ID NO: 846490 - DNA, 15 bp, Homo sapiens
atcaccacacatgga

SEQ ID NO: 846491 - DNA, 15 bp, Homo sapiens
tcaccacacatggag

SEQ ID NO: 846492 - DNA, 15 bp, Homo sapiens
caccacacatggagc

SEQ ID NO: 846493 - DNA, 15 bp, Homo sapiens
accacacatggagca

SEQ ID NO: 846494 - DNA, 15 bp, Homo sapiens
ccacacatggagcac

SEQ ID NO: 846495 - DNA, 15 bp, Homo sapiens
cacacatggagcact

SEQ ID NO: 846496 - DNA, 15 bp, Homo sapiens
acacatggagcactt

SEQ ID NO: 846497 - DNA, 15 bp, Homo sapiens
cacatggagcactta

SEQ ID NO: 846498 - DNA, 15 bp, Homo sapiens
acatggagcacttac

SEQ ID NO: 846499 - DNA, 15 bp, Homo sapiens
catggagcacttact

SEQ ID NO: 846500 - DNA, 15 bp, Homo sapiens
atggagcacttacta

SEQ ID NO: 846501 - DNA, 15 bp, Homo sapiens
tggagcacttactaa

SEQ ID NO: 846502 - DNA, 15 bp, Homo sapiens
ggagcacttactaag

SEQ ID NO: 846503 - DNA, 15 bp, Homo sapiens
gagcacttactaagt

SEQ ID NO: 846504 - DNA, 15 bp, Homo sapiens
agcacttactaagta

SEQ ID NO: 846505 - DNA, 15 bp, Homo sapiens
gcacttactaagtac

SEQ ID NO: 846506 - DNA, 15 bp, Homo sapiens
cacttactaagtacc

SEQ ID NO: 846507 - DNA, 15 bp, Homo sapiens
acttactaagtacca

SEQ ID NO: 846508 - DNA, 15 bp, Homo sapiens
cttactaagtaccag

SEQ ID NO: 846509 - DNA, 15 bp, Homo sapiens
ttactaagtaccagg

SEQ ID NO: 846510 - DNA, 15 bp, Homo sapiens
tactaagtaccaggt

SEQ ID NO: 846511 - DNA, 15 bp, Homo sapiens
actaagtaccaggta

SEQ ID NO: 846512 - DNA, 15 bp, Homo sapiens
ctaagtaccaggtac

SEQ ID NO: 846513 - DNA, 15 bp, Homo sapiens
taagtaccaggtact

SEQ ID NO: 846514 - DNA, 15 bp, Homo sapiens
aagtaccaggtactg

SEQ ID NO: 846515 - DNA, 15 bp, Homo sapiens
agtaccaggtactgt

SEQ ID NO: 846516 - DNA, 15 bp, Homo sapiens
gtaccaggtactgtt

SEQ ID NO: 846517 - DNA, 15 bp, Homo sapiens
taccaggtactgttc

SEQ ID NO: 846518 - DNA, 15 bp, Homo sapiens
accaggtactgttct

SEQ ID NO: 846519 - DNA, 15 bp, Homo sapiens
ccaggtactgttcta

SEQ ID NO: 846520 - DNA, 15 bp, Homo sapiens
caggtactgttctag

SEQ ID NO: 846521 - DNA, 15 bp, Homo sapiens
aggtactgttctaga

SEQ ID NO: 846522 - DNA, 15 bp, Homo sapiens
ggtactgttctagac

SEQ ID NO: 846523 - DNA, 15 bp, Homo sapiens
gtactgttctagaca

SEQ ID NO: 846524 - DNA, 15 bp, Homo sapiens
tactgttctagacat

SEQ ID NO: 846525 - DNA, 15 bp, Homo sapiens
actgttctagacatt

SEQ ID NO: 846526 - DNA, 15 bp, Homo sapiens
ctgttctagacattc

SEQ ID NO: 846527 - DNA, 15 bp, Homo sapiens
tgttctagacattct

SEQ ID NO: 846528 - DNA, 15 bp, Homo sapiens
gttctagacattctg

SEQ ID NO: 846529 - DNA, 15 bp, Homo sapiens
ttctagacattctgt

SEQ ID NO: 846530 - DNA, 15 bp, Homo sapiens
tctagacattctgta

SEQ ID NO: 846531 - DNA, 15 bp, Homo sapiens
ctagacattctgtac

SEQ ID NO: 846532 - DNA, 15 bp, Homo sapiens
tagacattctgtact

SEQ ID NO: 846533 - DNA, 15 bp, Homo sapiens
agacattctgtactg

SEQ ID NO: 846534 - DNA, 15 bp, Homo sapiens
gacattctgtactga

SEQ ID NO: 846535 - DNA, 15 bp, Homo sapiens
acattctgtactgat

SEQ ID NO: 846536 - DNA, 15 bp, Homo sapiens
cattctgtactgatc

SEQ ID NO: 846537 - DNA, 15 bp, Homo sapiens
attctgtactgatca

SEQ ID NO: 846538 - DNA, 15 bp, Homo sapiens
ttctgtactgatcat

SEQ ID NO: 846539 - DNA, 15 bp, Homo sapiens
tctgtactgatcatc

SEQ ID NO: 846540 - DNA, 15 bp, Homo sapiens
ctgtactgatcatct

SEQ ID NO: 846541 - DNA, 15 bp, Homo sapiens
tgtactgatcatctc

SEQ ID NO: 846542 - DNA, 15 bp, Homo sapiens
gtactgatcatctca

SEQ ID NO: 846543 - DNA, 15 bp, Homo sapiens
tactgatcatctcat

SEQ ID NO: 846544 - DNA, 15 bp, Homo sapiens
actgatcatctcatt

SEQ ID NO: 846545 - DNA, 15 bp, Homo sapiens
ctgatcatctcattc

SEQ ID NO: 846546 - DNA, 15 bp, Homo sapiens
tgatcatctcattca

SEQ ID NO: 846547 - DNA, 15 bp, Homo sapiens
gatcatctcattcag

SEQ ID NO: 846548 - DNA, 15 bp, Homo sapiens
atcatctcattcagc

SEQ ID NO: 846549 - DNA, 15 bp, Homo sapiens
tcatctcattcagcc

SEQ ID NO: 846550 - DNA, 15 bp, Homo sapiens
catctcattcagccc

SEQ ID NO: 846551 - DNA, 15 bp, Homo sapiens
atctcattcagccca

SEQ ID NO: 846552 - DNA, 15 bp, Homo sapiens
tctcattcagcccac

SEQ ID NO: 846553 - DNA, 15 bp, Homo sapiens
ctcattcagcccaca

SEQ ID NO: 846554 - DNA, 15 bp, Homo sapiens
tcattcagcccacat

SEQ ID NO: 846555 - DNA, 15 bp, Homo sapiens
cattcagcccacatg

SEQ ID NO: 846556 - DNA, 15 bp, Homo sapiens
attcagcccacatgg

SEQ ID NO: 846557 - DNA, 15 bp, Homo sapiens
ttcagcccacatggc

SEQ ID NO: 846558 - DNA, 15 bp, Homo sapiens
tcagcccacatggcc

SEQ ID NO: 846559 - DNA, 15 bp, Homo sapiens
cagcccacatggcct

SEQ ID NO: 846560 - DNA, 15 bp, Homo sapiens
agcccacatggcctc

SEQ ID NO: 846561 - DNA, 15 bp, Homo sapiens
gcccacatggcctcc

SEQ ID NO: 846562 - DNA, 15 bp, Homo sapiens
cccacatggcctcct

SEQ ID NO: 846563 - DNA, 15 bp, Homo sapiens
ccacatggcctcctg

SEQ ID NO: 846564 - DNA, 15 bp, Homo sapiens
cacatggcctcctga

SEQ ID NO: 846565 - DNA, 15 bp, Homo sapiens
acatggcctcctgag

SEQ ID NO: 846566 - DNA, 15 bp, Homo sapiens
catggcctcctgaga

SEQ ID NO: 846567 - DNA, 15 bp, Homo sapiens
atggcctcctgagag

SEQ ID NO: 846568 - DNA, 15 bp, Homo sapiens
tggcctcctgagaga

SEQ ID NO: 846569 - DNA, 15 bp, Homo sapiens
ggcctcctgagagat

SEQ ID NO: 846570 - DNA, 15 bp, Homo sapiens
gcctcctgagagatg

SEQ ID NO: 846571 - DNA, 15 bp, Homo sapiens
cctcctgagagatgt

SEQ ID NO: 846572 - DNA, 15 bp, Homo sapiens
ctcctgagagatgtg

SEQ ID NO: 846573 - DNA, 15 bp, Homo sapiens
tcctgagagatgtgt

SEQ ID NO: 846574 - DNA, 15 bp, Homo sapiens
cctgagagatgtgtg

SEQ ID NO: 846575 - DNA, 15 bp, Homo sapiens
ctgagagatgtgtgc

SEQ ID NO: 846576 - DNA, 15 bp, Homo sapiens
tgagagatgtgtgca

SEQ ID NO: 846577 - DNA, 15 bp, Homo sapiens
gagagatgtgtgcag

SEQ ID NO: 846578 - DNA, 15 bp, Homo sapiens
agagatgtgtgcagt

SEQ ID NO: 846579 - DNA, 15 bp, Homo sapiens
gagatgtgtgcagtt

SEQ ID NO: 846580 - DNA, 15 bp, Homo sapiens
agatgtgtgcagtta

SEQ ID NO: 846581 - DNA, 15 bp, Homo sapiens
gatgtgtgcagttac

SEQ ID NO: 846582 - DNA, 15 bp, Homo sapiens
atgtgtgcagttact

SEQ ID NO: 846583 - DNA, 15 bp, Homo sapiens
tgtgtgcagttacta

SEQ ID NO: 846584 - DNA, 15 bp, Homo sapiens
gtgtgcagttactat

SEQ ID NO: 846585 - DNA, 15 bp, Homo sapiens
tgtgcagttactatt

SEQ ID NO: 846586 - DNA, 15 bp, Homo sapiens
gtgcagttactattc

SEQ ID NO: 846587 - DNA, 15 bp, Homo sapiens
tgcagttactattcc

SEQ ID NO: 846588 - DNA, 15 bp, Homo sapiens
gcagttactattccc

SEQ ID NO: 846589 - DNA, 15 bp, Homo sapiens
cagttactattccca

SEQ ID NO: 846590 - DNA, 15 bp, Homo sapiens
agttactattcccat

SEQ ID NO: 846591 - DNA, 15 bp, Homo sapiens
gttactattcccatt

SEQ ID NO: 846592 - DNA, 15 bp, Homo sapiens
ttactattcccatta

SEQ ID NO: 846593 - DNA, 15 bp, Homo sapiens
tactattcccattaa

SEQ ID NO: 846594 - DNA, 15 bp, Homo sapiens
actattcccattaag

SEQ ID NO: 846595 - DNA, 15 bp, Homo sapiens
ctattcccattaagg

SEQ ID NO: 846596 - DNA, 15 bp, Homo sapiens
tattcccattaaggc

SEQ ID NO: 846597 - DNA, 15 bp, Homo sapiens
attcccattaaggca

SEQ ID NO: 846598 - DNA, 15 bp, Homo sapiens
ttcccattaaggcag

SEQ ID NO: 846599 - DNA, 15 bp, Homo sapiens
tcccattaaggcagg

SEQ ID NO: 846600 - DNA, 15 bp, Homo sapiens
cccattaaggcaggg

SEQ ID NO: 846601 - DNA, 15 bp, Homo sapiens
ccattaaggcaggga

SEQ ID NO: 846602 - DNA, 15 bp, Homo sapiens
cattaaggcagggac

SEQ ID NO: 846603 - DNA, 15 bp, Homo sapiens
attaaggcagggaca

SEQ ID NO: 846604 - DNA, 15 bp, Homo sapiens
ttaaggcagggacag

SEQ ID NO: 846605 - DNA, 15 bp, Homo sapiens
taaggcagggacagc

SEQ ID NO: 846606 - DNA, 15 bp, Homo sapiens
aaggcagggacagca

SEQ ID NO: 846607 - DNA, 15 bp, Homo sapiens
aggcagggacagcac

SEQ ID NO: 846608 - DNA, 15 bp, Homo sapiens
ggcagggacagcaca

SEQ ID NO: 846609 - DNA, 15 bp, Homo sapiens
gcagggacagcacag

SEQ ID NO: 846610 - DNA, 15 bp, Homo sapiens
cagggacagcacagc

SEQ ID NO: 846611 - DNA, 15 bp, Homo sapiens
agggacagcacagca

SEQ ID NO: 846612 - DNA, 15 bp, Homo sapiens
gggacagcacagcac

SEQ ID NO: 846613 - DNA, 15 bp, Homo sapiens
ggacagcacagcaca

SEQ ID NO: 846614 - DNA, 15 bp, Homo sapiens
gacagcacagcacat

SEQ ID NO: 846615 - DNA, 15 bp, Homo sapiens
acagcacagcacatt

SEQ ID NO: 846616 - DNA, 15 bp, Homo sapiens
cagcacagcacattg

SEQ ID NO: 846617 - DNA, 15 bp, Homo sapiens
agcacagcacattgg

SEQ ID NO: 846618 - DNA, 15 bp, Homo sapiens
gcacagcacattggt

SEQ ID NO: 846619 - DNA, 15 bp, Homo sapiens
cacagcacattggtg

SEQ ID NO: 846620 - DNA, 15 bp, Homo sapiens
acagcacattggtga

SEQ ID NO: 846621 - DNA, 15 bp, Homo sapiens
cagcacattggtgaa

SEQ ID NO: 846622 - DNA, 15 bp, Homo sapiens
agcacattggtgaaa

SEQ ID NO: 846623 - DNA, 15 bp, Homo sapiens
gcacattggtgaaat

SEQ ID NO: 846624 - DNA, 15 bp, Homo sapiens
cacattggtgaaatg

SEQ ID NO: 846625 - DNA, 15 bp, Homo sapiens
acattggtgaaatga

SEQ ID NO: 846626 - DNA, 15 bp, Homo sapiens
cattggtgaaatgag

SEQ ID NO: 846627 - DNA, 15 bp, Homo sapiens
attggtgaaatgagg

SEQ ID NO: 846628 - DNA, 15 bp, Homo sapiens
ttggtgaaatgagga

SEQ ID NO: 846629 - DNA, 15 bp, Homo sapiens
tggtgaaatgaggaa

SEQ ID NO: 846630 - DNA, 15 bp, Homo sapiens
ggtgaaatgaggaaa

SEQ ID NO: 846631 - DNA, 15 bp, Homo sapiens
gtgaaatgaggaaag

SEQ ID NO: 846632 - DNA, 15 bp, Homo sapiens
tgaaatgaggaaagg

SEQ ID NO: 846633 - DNA, 15 bp, Homo sapiens
gaaatgaggaaaggc

SEQ ID NO: 846634 - DNA, 15 bp, Homo sapiens
aaatgaggaaaggcc

SEQ ID NO: 846635 - DNA, 15 bp, Homo sapiens
aatgaggaaaggcct

SEQ ID NO: 846636 - DNA, 15 bp, Homo sapiens
atgaggaaaggcctc

SEQ ID NO: 846637 - DNA, 15 bp, Homo sapiens
tgaggaaaggcctca

SEQ ID NO: 846638 - DNA, 15 bp, Homo sapiens
gaggaaaggcctcag

SEQ ID NO: 846639 - DNA, 15 bp, Homo sapiens
aggaaaggcctcaga

SEQ ID NO: 846640 - DNA, 15 bp, Homo sapiens
ggaaaggcctcagag

SEQ ID NO: 846641 - DNA, 15 bp, Homo sapiens
gaaaggcctcagaga

SEQ ID NO: 846642 - DNA, 15 bp, Homo sapiens
aaaggcctcagagag

SEQ ID NO: 846643 - DNA, 15 bp, Homo sapiens
aaggcctcagagagg

SEQ ID NO: 846644 - DNA, 15 bp, Homo sapiens
aggcctcagagagga

SEQ ID NO: 846645 - DNA, 15 bp, Homo sapiens
ggcctcagagaggag

SEQ ID NO: 846646 - DNA, 15 bp, Homo sapiens
gcctcagagaggagg

SEQ ID NO: 846647 - DNA, 15 bp, Homo sapiens
cctcagagaggaggt

SEQ ID NO: 846648 - DNA, 15 bp, Homo sapiens
ctcagagaggaggta

SEQ ID NO: 846649 - DNA, 15 bp, Homo sapiens
tcagagaggaggtag

SEQ ID NO: 846650 - DNA, 15 bp, Homo sapiens
cagagaggaggtagt

SEQ ID NO: 846651 - DNA, 15 bp, Homo sapiens
agagaggaggtagtt

SEQ ID NO: 846652 - DNA, 15 bp, Homo sapiens
gagaggaggtagttt

SEQ ID NO: 846653 - DNA, 15 bp, Homo sapiens
agaggaggtagttta

SEQ ID NO: 846654 - DNA, 15 bp, Homo sapiens
gaggaggtagtttat

SEQ ID NO: 846655 - DNA, 15 bp, Homo sapiens
aggaggtagtttatg

SEQ ID NO: 846656 - DNA, 15 bp, Homo sapiens
ggaggtagtttatga

SEQ ID NO: 846657 - DNA, 15 bp, Homo sapiens
gaggtagtttatgac

SEQ ID NO: 846658 - DNA, 15 bp, Homo sapiens
aggtagtttatgact

SEQ ID NO: 846659 - DNA, 15 bp, Homo sapiens
ggtagtttatgactt

SEQ ID NO: 846660 - DNA, 15 bp, Homo sapiens
gtagtttatgacttg

SEQ ID NO: 846661 - DNA, 15 bp, Homo sapiens
tagtttatgacttga

SEQ ID NO: 846662 - DNA, 15 bp, Homo sapiens
agtttatgacttgaa

SEQ ID NO: 846663 - DNA, 15 bp, Homo sapiens
gtttatgacttgaaa

SEQ ID NO: 846664 - DNA, 15 bp, Homo sapiens
tttatgacttgaaag

SEQ ID NO: 846665 - DNA, 15 bp, Homo sapiens
ttatgacttgaaagt

SEQ ID NO: 846666 - DNA, 15 bp, Homo sapiens
tatgacttgaaagtt

SEQ ID NO: 846667 - DNA, 15 bp, Homo sapiens
atgacttgaaagtta

SEQ ID NO: 846668 - DNA, 15 bp, Homo sapiens
tgacttgaaagttac

SEQ ID NO: 846669 - DNA, 15 bp, Homo sapiens
gacttgaaagttaca

SEQ ID NO: 846670 - DNA, 15 bp, Homo sapiens
acttgaaagttacag

SEQ ID NO: 846671 - DNA, 15 bp, Homo sapiens
cttgaaagttacagg

SEQ ID NO: 846672 - DNA, 15 bp, Homo sapiens
ttgaaagttacagga

SEQ ID NO: 846673 - DNA, 15 bp, Homo sapiens
tgaaagttacaggaa

SEQ ID NO: 846674 - DNA, 15 bp, Homo sapiens
gaaagttacaggaag

SEQ ID NO: 846675 - DNA, 15 bp, Homo sapiens
aaagttacaggaagc

SEQ ID NO: 846676 - DNA, 15 bp, Homo sapiens
aagttacaggaagca

SEQ ID NO: 846677 - DNA, 15 bp, Homo sapiens
agttacaggaagcac

SEQ ID NO: 846678 - DNA, 15 bp, Homo sapiens
gttacaggaagcact

SEQ ID NO: 846679 - DNA, 15 bp, Homo sapiens
ttacaggaagcactg

SEQ ID NO: 846680 - DNA, 15 bp, Homo sapiens
tacaggaagcactgg

SEQ ID NO: 846681 - DNA, 15 bp, Homo sapiens
acaggaagcactgga

SEQ ID NO: 846682 - DNA, 15 bp, Homo sapiens
caggaagcactggat

SEQ ID NO: 846683 - DNA, 15 bp, Homo sapiens
aggaagcactggatt

SEQ ID NO: 846684 - DNA, 15 bp, Homo sapiens
ggaagcactggattt

SEQ ID NO: 846685 - DNA, 15 bp, Homo sapiens
gaagcactggatttt

SEQ ID NO: 846686 - DNA, 15 bp, Homo sapiens
aagcactggattttg

SEQ ID NO: 846687 - DNA, 15 bp, Homo sapiens
agcactggattttga

SEQ ID NO: 846688 - DNA, 15 bp, Homo sapiens
gcactggattttgac

SEQ ID NO: 846689 - DNA, 15 bp, Homo sapiens
cactggattttgaca

SEQ ID NO: 846690 - DNA, 15 bp, Homo sapiens
actggattttgacaa

SEQ ID NO: 846691 - DNA, 15 bp, Homo sapiens
ctggattttgacaac

SEQ ID NO: 846692 - DNA, 15 bp, Homo sapiens
tggattttgacaact

SEQ ID NO: 846693 - DNA, 15 bp, Homo sapiens
ggattttgacaactg

SEQ ID NO: 846694 - DNA, 15 bp, Homo sapiens
gattttgacaactga

SEQ ID NO: 846695 - DNA, 15 bp, Homo sapiens
attttgacaactgaa

SEQ ID NO: 846696 - DNA, 15 bp, Homo sapiens
ttttgacaactgaaa

SEQ ID NO: 846697 - DNA, 15 bp, Homo sapiens
tttgacaactgaaaa

SEQ ID NO: 846698 - DNA, 15 bp, Homo sapiens
ttgacaactgaaaaa

SEQ ID NO: 846699 - DNA, 15 bp, Homo sapiens
tgacaactgaaaaag

SEQ ID NO: 846700 - DNA, 15 bp, Homo sapiens
gacaactgaaaaagg

SEQ ID NO: 846701 - DNA, 15 bp, Homo sapiens
acaactgaaaaaggt

SEQ ID NO: 846702 - DNA, 15 bp, Homo sapiens
caactgaaaaaggtc

SEQ ID NO: 846703 - DNA, 15 bp, Homo sapiens
aactgaaaaaggtca

SEQ ID NO: 846704 - DNA, 15 bp, Homo sapiens
actgaaaaaggtcat

SEQ ID NO: 846705 - DNA, 15 bp, Homo sapiens
ctgaaaaaggtcata

SEQ ID NO: 846706 - DNA, 15 bp, Homo sapiens
tgaaaaaggtcatag

SEQ ID NO: 846707 - DNA, 15 bp, Homo sapiens
gaaaaaggtcataga

SEQ ID NO: 846708 - DNA, 15 bp, Homo sapiens
aaaaaggtcatagag

SEQ ID NO: 846709 - DNA, 15 bp, Homo sapiens
aaaaggtcatagaga

SEQ ID NO: 846710 - DNA, 15 bp, Homo sapiens
aaaggtcatagagag

SEQ ID NO: 846711 - DNA, 15 bp, Homo sapiens
aaggtcatagagaga

SEQ ID NO: 846712 - DNA, 15 bp, Homo sapiens
aggtcatagagagac

SEQ ID NO: 846713 - DNA, 15 bp, Homo sapiens
ggtcatagagagaca

SEQ ID NO: 846714 - DNA, 15 bp, Homo sapiens
gtcatagagagacat

SEQ ID NO: 846715 - DNA, 15 bp, Homo sapiens
tcatagagagacata

SEQ ID NO: 846716 - DNA, 15 bp, Homo sapiens
catagagagacatat

SEQ ID NO: 846717 - DNA, 15 bp, Homo sapiens
atagagagacatatt

SEQ ID NO: 846718 - DNA, 15 bp, Homo sapiens
tagagagacatattt

SEQ ID NO: 846719 - DNA, 15 bp, Homo sapiens
agagagacatatttg

SEQ ID NO: 846720 - DNA, 15 bp, Homo sapiens
gagagacatatttgt

SEQ ID NO: 846721 - DNA, 15 bp, Homo sapiens
agagacatatttgtg

SEQ ID NO: 846722 - DNA, 15 bp, Homo sapiens
gagacatatttgtga

SEQ ID NO: 846723 - DNA, 15 bp, Homo sapiens
agacatatttgtgat

SEQ ID NO: 846724 - DNA, 15 bp, Homo sapiens
gacatatttgtgata

SEQ ID NO: 846725 - DNA, 15 bp, Homo sapiens
acatatttgtgatag

SEQ ID NO: 846726 - DNA, 15 bp, Homo sapiens
catatttgtgataga

SEQ ID NO: 846727 - DNA, 15 bp, Homo sapiens
atatttgtgatagaa

SEQ ID NO: 846728 - DNA, 15 bp, Homo sapiens
tatttgtgatagaag

SEQ ID NO: 846729 - DNA, 15 bp, Homo sapiens
atttgtgatagaagc

SEQ ID NO: 846730 - DNA, 15 bp, Homo sapiens
tttgtgatagaagcg

SEQ ID NO: 846731 - DNA, 15 bp, Homo sapiens
ttgtgatagaagcgt

SEQ ID NO: 846732 - DNA, 15 bp, Homo sapiens
tgtgatagaagcgtc

SEQ ID NO: 846733 - DNA, 15 bp, Homo sapiens
gtgatagaagcgtca

SEQ ID NO: 846734 - DNA, 15 bp, Homo sapiens
tgatagaagcgtcaa

SEQ ID NO: 846735 - DNA, 15 bp, Homo sapiens
gatagaagcgtcaag

SEQ ID NO: 846736 - DNA, 15 bp, Homo sapiens
atagaagcgtcaagg

SEQ ID NO: 846737 - DNA, 15 bp, Homo sapiens
tagaagcgtcaaggg

SEQ ID NO: 846738 - DNA, 15 bp, Homo sapiens
agaagcgtcaaggga

SEQ ID NO: 846739 - DNA, 15 bp, Homo sapiens
gaagcgtcaagggaa

SEQ ID NO: 846740 - DNA, 15 bp, Homo sapiens
aagcgtcaagggaaa

SEQ ID NO: 846741 - DNA, 15 bp, Homo sapiens
agcgtcaagggaaac

SEQ ID NO: 846742 - DNA, 15 bp, Homo sapiens
gcgtcaagggaaaca

SEQ ID NO: 846743 - DNA, 15 bp, Homo sapiens
cgtcaagggaaacag

SEQ ID NO: 846744 - DNA, 15 bp, Homo sapiens
gtcaagggaaacaga

SEQ ID NO: 846745 - DNA, 15 bp, Homo sapiens
tcaagggaaacagag

SEQ ID NO: 846746 - DNA, 15 bp, Homo sapiens
caagggaaacagaga

SEQ ID NO: 846747 - DNA, 15 bp, Homo sapiens
aagggaaacagagat

SEQ ID NO: 846748 - DNA, 15 bp, Homo sapiens
agggaaacagagatt

SEQ ID NO: 846749 - DNA, 15 bp, Homo sapiens
gggaaacagagattt

SEQ ID NO: 846750 - DNA, 15 bp, Homo sapiens
ggaaacagagatttc

SEQ ID NO: 846751 - DNA, 15 bp, Homo sapiens
gaaacagagatttca

SEQ ID NO: 846752 - DNA, 15 bp, Homo sapiens
aaacagagatttcag

SEQ ID NO: 846753 - DNA, 15 bp, Homo sapiens
aacagagatttcagg

SEQ ID NO: 846754 - DNA, 15 bp, Homo sapiens
acagagatttcaggg

SEQ ID NO: 846755 - DNA, 15 bp, Homo sapiens
cagagatttcagggt

SEQ ID NO: 846756 - DNA, 15 bp, Homo sapiens
agagatttcagggtg

SEQ ID NO: 846757 - DNA, 15 bp, Homo sapiens
gagatttcagggtgg

SEQ ID NO: 846758 - DNA, 15 bp, Homo sapiens
agatttcagggtggg

SEQ ID NO: 846759 - DNA, 15 bp, Homo sapiens
gatttcagggtggga

SEQ ID NO: 846760 - DNA, 15 bp, Homo sapiens
atttcagggtgggaa

SEQ ID NO: 846761 - DNA, 15 bp, Homo sapiens
tttcagggtgggaag

SEQ ID NO: 846762 - DNA, 15 bp, Homo sapiens
ttcagggtgggaagt

SEQ ID NO: 846763 - DNA, 15 bp, Homo sapiens
tcagggtgggaagtc

SEQ ID NO: 846764 - DNA, 15 bp, Homo sapiens
cagggtgggaagtca

SEQ ID NO: 846765 - DNA, 15 bp, Homo sapiens
agggtgggaagtcag

SEQ ID NO: 846766 - DNA, 15 bp, Homo sapiens
gggtgggaagtcagg

SEQ ID NO: 846767 - DNA, 15 bp, Homo sapiens
ggtgggaagtcagga

SEQ ID NO: 846768 - DNA, 15 bp, Homo sapiens
gtgggaagtcaggag

SEQ ID NO: 846769 - DNA, 15 bp, Homo sapiens
tgggaagtcaggaga

SEQ ID NO: 846770 - DNA, 15 bp, Homo sapiens
gggaagtcaggagag

SEQ ID NO: 846771 - DNA, 15 bp, Homo sapiens
ggaagtcaggagagg

SEQ ID NO: 846772 - DNA, 15 bp, Homo sapiens
gaagtcaggagagga

SEQ ID NO: 846773 - DNA, 15 bp, Homo sapiens
aagtcaggagaggaa

SEQ ID NO: 846774 - DNA, 15 bp, Homo sapiens
agtcaggagaggaag

SEQ ID NO: 846775 - DNA, 15 bp, Homo sapiens
gtcaggagaggaagt

SEQ ID NO: 846776 - DNA, 15 bp, Homo sapiens
tcaggagaggaagtt

SEQ ID NO: 846777 - DNA, 15 bp, Homo sapiens
caggagaggaagttt

SEQ ID NO: 846778 - DNA, 15 bp, Homo sapiens
aggagaggaagtttt

SEQ ID NO: 846779 - DNA, 15 bp, Homo sapiens
ggagaggaagttttt

SEQ ID NO: 846780 - DNA, 15 bp, Homo sapiens
gagaggaagttttta

SEQ ID NO: 846781 - DNA, 15 bp, Homo sapiens
agaggaagtttttag

SEQ ID NO: 846782 - DNA, 15 bp, Homo sapiens
gaggaagtttttaga

SEQ ID NO: 846783 - DNA, 15 bp, Homo sapiens
aggaagtttttagat

SEQ ID NO: 846784 - DNA, 15 bp, Homo sapiens
ggaagtttttagatt

SEQ ID NO: 846785 - DNA, 15 bp, Homo sapiens
gaagtttttagatta

SEQ ID NO: 846786 - DNA, 15 bp, Homo sapiens
aagtttttagattag

SEQ ID NO: 846787 - DNA, 15 bp, Homo sapiens
agtttttagattagc

SEQ ID NO: 846788 - DNA, 15 bp, Homo sapiens
gtttttagattagca

SEQ ID NO: 846789 - DNA, 15 bp, Homo sapiens
tttttagattagcat

SEQ ID NO: 846790 - DNA, 15 bp, Homo sapiens
ttttagattagcatt

SEQ ID NO: 846791 - DNA, 15 bp, Homo sapiens
tttagattagcattt

SEQ ID NO: 846792 - DNA, 15 bp, Homo sapiens
ttagattagcatttc

SEQ ID NO: 846793 - DNA, 15 bp, Homo sapiens
tagattagcatttcc

SEQ ID NO: 846794 - DNA, 15 bp, Homo sapiens
agattagcatttccc

SEQ ID NO: 846795 - DNA, 15 bp, Homo sapiens
gattagcatttccca

SEQ ID NO: 846796 - DNA, 15 bp, Homo sapiens
attagcatttcccat

SEQ ID NO: 846797 - DNA, 15 bp, Homo sapiens
ttagcatttcccatc

SEQ ID NO: 846798 - DNA, 15 bp, Homo sapiens
tagcatttcccatct

SEQ ID NO: 846799 - DNA, 15 bp, Homo sapiens
agcatttcccatctt

SEQ ID NO: 846800 - DNA, 15 bp, Homo sapiens
gcatttcccatcttc

SEQ ID NO: 846801 - DNA, 15 bp, Homo sapiens
catttcccatcttct

SEQ ID NO: 846802 - DNA, 15 bp, Homo sapiens
atttcccatcttctt

SEQ ID NO: 846803 - DNA, 15 bp, Homo sapiens
tttcccatcttctta

SEQ ID NO: 846804 - DNA, 15 bp, Homo sapiens
ttcccatcttcttaa

SEQ ID NO: 846805 - DNA, 15 bp, Homo sapiens
tcccatcttcttaag

SEQ ID NO: 846806 - DNA, 15 bp, Homo sapiens
cccatcttcttaagc

SEQ ID NO: 846807 - DNA, 15 bp, Homo sapiens
ccatcttcttaagct

SEQ ID NO: 846808 - DNA, 15 bp, Homo sapiens
catcttcttaagctg

SEQ ID NO: 846809 - DNA, 15 bp, Homo sapiens
atcttcttaagctgc

SEQ ID NO: 846810 - DNA, 15 bp, Homo sapiens
tcttcttaagctgct

SEQ ID NO: 846811 - DNA, 15 bp, Homo sapiens
cttcttaagctgctc

SEQ ID NO: 846812 - DNA, 15 bp, Homo sapiens
ttcttaagctgctcc

SEQ ID NO: 846813 - DNA, 15 bp, Homo sapiens
tcttaagctgctcct

SEQ ID NO: 846814 - DNA, 15 bp, Homo sapiens
cttaagctgctcctt

SEQ ID NO: 846815 - DNA, 15 bp, Homo sapiens
ttaagctgctccttg

SEQ ID NO: 846816 - DNA, 15 bp, Homo sapiens
taagctgctccttga

SEQ ID NO: 846817 - DNA, 15 bp, Homo sapiens
aagctgctccttgaa

SEQ ID NO: 846818 - DNA, 15 bp, Homo sapiens
agctgctccttgaaa

SEQ ID NO: 846819 - DNA, 15 bp, Homo sapiens
gctgctccttgaaat

SEQ ID NO: 846820 - DNA, 15 bp, Homo sapiens
ctgctccttgaaata

SEQ ID NO: 846821 - DNA, 15 bp, Homo sapiens
tgctccttgaaataa

SEQ ID NO: 846822 - DNA, 15 bp, Homo sapiens
gctccttgaaataaa

SEQ ID NO: 846823 - DNA, 15 bp, Homo sapiens
ctccttgaaataaag

SEQ ID NO: 846824 - DNA, 15 bp, Homo sapiens
tccttgaaataaagg

SEQ ID NO: 846825 - DNA, 15 bp, Homo sapiens
ccttgaaataaagga

SEQ ID NO: 846826 - DNA, 15 bp, Homo sapiens
cttgaaataaaggat

SEQ ID NO: 846827 - DNA, 15 bp, Homo sapiens
ttgaaataaaggatt

SEQ ID NO: 846828 - DNA, 15 bp, Homo sapiens
tgaaataaaggattc

SEQ ID NO: 846829 - DNA, 15 bp, Homo sapiens
gaaataaaggattct

SEQ ID NO: 846830 - DNA, 15 bp, Homo sapiens
aaataaaggattctg

SEQ ID NO: 846831 - DNA, 15 bp, Homo sapiens
aataaaggattctgt

SEQ ID NO: 846832 - DNA, 15 bp, Homo sapiens
ataaaggattctgtg

SEQ ID NO: 846833 - DNA, 15 bp, Homo sapiens
taaaggattctgtga

SEQ ID NO: 846834 - DNA, 15 bp, Homo sapiens
aaaggattctgtgac

SEQ ID NO: 846835 - DNA, 15 bp, Homo sapiens
aaggattctgtgact

SEQ ID NO: 846836 - DNA, 15 bp, Homo sapiens
aggattctgtgacta

SEQ ID NO: 846837 - DNA, 15 bp, Homo sapiens
ggattctgtgactaa

SEQ ID NO: 846838 - DNA, 15 bp, Homo sapiens
gattctgtgactaaa

SEQ ID NO: 846839 - DNA, 15 bp, Homo sapiens
attctgtgactaaat

SEQ ID NO: 846840 - DNA, 15 bp, Homo sapiens
ttctgtgactaaata

SEQ ID NO: 846841 - DNA, 15 bp, Homo sapiens
tctgtgactaaatat

SEQ ID NO: 846842 - DNA, 15 bp, Homo sapiens
ctgtgactaaatatc

SEQ ID NO: 846843 - DNA, 15 bp, Homo sapiens
tgtgactaaatatca

SEQ ID NO: 846844 - DNA, 15 bp, Homo sapiens
gtgactaaatatcac

SEQ ID NO: 846845 - DNA, 15 bp, Homo sapiens
tgactaaatatcacg

SEQ ID NO: 846846 - DNA, 15 bp, Homo sapiens
gactaaatatcacgt

SEQ ID NO: 846847 - DNA, 15 bp, Homo sapiens
actaaatatcacgtt

SEQ ID NO: 846848 - DNA, 15 bp, Homo sapiens
ctaaatatcacgttc

SEQ ID NO: 846849 - DNA, 15 bp, Homo sapiens
taaatatcacgttct

SEQ ID NO: 846850 - DNA, 15 bp, Homo sapiens
aaatatcacgttctg

SEQ ID NO: 846851 - DNA, 15 bp, Homo sapiens
aatatcacgttctgg

SEQ ID NO: 846852 - DNA, 15 bp, Homo sapiens
atatcacgttctggc

SEQ ID NO: 846853 - DNA, 15 bp, Homo sapiens
tatcacgttctggcc

SEQ ID NO: 846854 - DNA, 15 bp, Homo sapiens
atcacgttctggccg

SEQ ID NO: 846855 - DNA, 15 bp, Homo sapiens
tcacgttctggccgg

SEQ ID NO: 846856 - DNA, 15 bp, Homo sapiens
cacgttctggccggg

SEQ ID NO: 846857 - DNA, 15 bp, Homo sapiens
acgttctggccgggc

SEQ ID NO: 846858 - DNA, 15 bp, Homo sapiens
cgttctggccgggcg

SEQ ID NO: 846859 - DNA, 15 bp, Homo sapiens
gttctggccgggcgc

SEQ ID NO: 846860 - DNA, 15 bp, Homo sapiens
ttctggccgggcgcg

SEQ ID NO: 846861 - DNA, 15 bp, Homo sapiens
tctggccgggcgcgg

SEQ ID NO: 846862 - DNA, 15 bp, Homo sapiens
ctggccgggcgcggt

SEQ ID NO: 846863 - DNA, 15 bp, Homo sapiens
cgcggtggctcacgt

SEQ ID NO: 846864 - DNA, 15 bp, Homo sapiens
gcggtggctcacgtc

SEQ ID NO: 846865 - DNA, 15 bp, Homo sapiens
cggtggctcacgtct

SEQ ID NO: 846866 - DNA, 15 bp, Homo sapiens
ggtggctcacgtctg

SEQ ID NO: 846867 - DNA, 15 bp, Homo sapiens
tcacgtctgtaatct

SEQ ID NO: 846868 - DNA, 15 bp, Homo sapiens
cacgtctgtaatctc

SEQ ID NO: 846869 - DNA, 15 bp, Homo sapiens
acgtctgtaatctca

SEQ ID NO: 846870 - DNA, 15 bp, Homo sapiens
cgtctgtaatctcag

SEQ ID NO: 846871 - DNA, 15 bp, Homo sapiens
gtctgtaatctcagc

SEQ ID NO: 846872 - DNA, 15 bp, Homo sapiens
tctgtaatctcagca

SEQ ID NO: 846873 - DNA, 15 bp, Homo sapiens
gaggccgaggcgggt

SEQ ID NO: 846874 - DNA, 15 bp, Homo sapiens
aggccgaggcgggtg

SEQ ID NO: 846875 - DNA, 15 bp, Homo sapiens
ggccgaggcgggtgg

SEQ ID NO: 846876 - DNA, 15 bp, Homo sapiens
gccgaggcgggtgga

SEQ ID NO: 846877 - DNA, 15 bp, Homo sapiens
ccgaggcgggtggat

SEQ ID NO: 846878 - DNA, 15 bp, Homo sapiens
cgaggcgggtggatc

SEQ ID NO: 846879 - DNA, 15 bp, Homo sapiens
gaggcgggtggatct

SEQ ID NO: 846880 - DNA, 15 bp, Homo sapiens
aggcgggtggatctc

SEQ ID NO: 846881 - DNA, 15 bp, Homo sapiens
ggcgggtggatctcc

SEQ ID NO: 846882 - DNA, 15 bp, Homo sapiens
gcgggtggatctcca

SEQ ID NO: 846883 - DNA, 15 bp, Homo sapiens
cgggtggatctccag

SEQ ID NO: 846884 - DNA, 15 bp, Homo sapiens
gggtggatctccagg

SEQ ID NO: 846885 - DNA, 15 bp, Homo sapiens
ggtggatctccaggt

SEQ ID NO: 846886 - DNA, 15 bp, Homo sapiens
gtggatctccaggtc

SEQ ID NO: 846887 - DNA, 15 bp, Homo sapiens
tggatctccaggtca

SEQ ID NO: 846888 - DNA, 15 bp, Homo sapiens
ggatctccaggtcag

SEQ ID NO: 846889 - DNA, 15 bp, Homo sapiens
gatctccaggtcagg

SEQ ID NO: 846890 - DNA, 15 bp, Homo sapiens
atctccaggtcagga

SEQ ID NO: 846891 - DNA, 15 bp, Homo sapiens
tctccaggtcaggag

SEQ ID NO: 846892 - DNA, 15 bp, Homo sapiens
ctccaggtcaggaga

SEQ ID NO: 846893 - DNA, 15 bp, Homo sapiens
tccaggtcaggagat

SEQ ID NO: 846894 - DNA, 15 bp, Homo sapiens
ccaggtcaggagatc

SEQ ID NO: 846895 - DNA, 15 bp, Homo sapiens
caggtcaggagatcg

SEQ ID NO: 846896 - DNA, 15 bp, Homo sapiens
agatcgagaccatct

SEQ ID NO: 846897 - DNA, 15 bp, Homo sapiens
gatcgagaccatctt

SEQ ID NO: 846898 - DNA, 15 bp, Homo sapiens
atcgagaccatcttg

SEQ ID NO: 846899 - DNA, 15 bp, Homo sapiens
tcgagaccatcttgg

SEQ ID NO: 846900 - DNA, 15 bp, Homo sapiens
cgagaccatcttggc

SEQ ID NO: 846901 - DNA, 15 bp, Homo sapiens
gagaccatcttggct

SEQ ID NO: 846902 - DNA, 15 bp, Homo sapiens
agaccatcttggcta

SEQ ID NO: 846903 - DNA, 15 bp, Homo sapiens
gaccatcttggctaa

SEQ ID NO: 846904 - DNA, 15 bp, Homo sapiens
accatcttggctaac

SEQ ID NO: 846905 - DNA, 15 bp, Homo sapiens
ccatcttggctaaca

SEQ ID NO: 846906 - DNA, 15 bp, Homo sapiens
catcttggctaacac

SEQ ID NO: 846907 - DNA, 15 bp, Homo sapiens
atcttggctaacaca

SEQ ID NO: 846908 - DNA, 15 bp, Homo sapiens
tcttggctaacacag

SEQ ID NO: 846909 - DNA, 15 bp, Homo sapiens
cttggctaacacagt

SEQ ID NO: 846910 - DNA, 15 bp, Homo sapiens
ttggctaacacagtg

SEQ ID NO: 846911 - DNA, 15 bp, Homo sapiens
taaaaatacaaaaac

SEQ ID NO: 846912 - DNA, 15 bp, Homo sapiens
aaaaatacaaaaaca

SEQ ID NO: 846913 - DNA, 15 bp, Homo sapiens
aaaatacaaaaacaa

SEQ ID NO: 846914 - DNA, 15 bp, Homo sapiens
aaatacaaaaacaaa

SEQ ID NO: 846915 - DNA, 15 bp, Homo sapiens
aatacaaaaacaaaa

SEQ ID NO: 846916 - DNA, 15 bp, Homo sapiens
atacaaaaacaaaat

SEQ ID NO: 846917 - DNA, 15 bp, Homo sapiens
tacaaaaacaaaatt

SEQ ID NO: 846918 - DNA, 15 bp, Homo sapiens
acaaaaacaaaatta

SEQ ID NO: 846919 - DNA, 15 bp, Homo sapiens
caaaaacaaaattaa

SEQ ID NO: 846920 - DNA, 15 bp, Homo sapiens
aaaaacaaaattaac

SEQ ID NO: 846921 - DNA, 15 bp, Homo sapiens
aaaacaaaattaacc

SEQ ID NO: 846922 - DNA, 15 bp, Homo sapiens
aaacaaaattaaccg

SEQ ID NO: 846923 - DNA, 15 bp, Homo sapiens
aacaaaattaaccgg

SEQ ID NO: 846924 - DNA, 15 bp, Homo sapiens
acaaaattaaccggg

SEQ ID NO: 846925 - DNA, 15 bp, Homo sapiens
caaaattaaccgggc

SEQ ID NO: 846926 - DNA, 15 bp, Homo sapiens
aaaattaaccgggcg

SEQ ID NO: 846927 - DNA, 15 bp, Homo sapiens
aaattaaccgggcgt

SEQ ID NO: 846928 - DNA, 15 bp, Homo sapiens
aattaaccgggcgtg

SEQ ID NO: 846929 - DNA, 15 bp, Homo sapiens
attaaccgggcgtgg

SEQ ID NO: 846930 - DNA, 15 bp, Homo sapiens
ttaaccgggcgtggt

SEQ ID NO: 846931 - DNA, 15 bp, Homo sapiens
taaccgggcgtggtg

SEQ ID NO: 846932 - DNA, 15 bp, Homo sapiens
aaccgggcgtggtgg

SEQ ID NO: 846933 - DNA, 15 bp, Homo sapiens
accgggcgtggtggc

SEQ ID NO: 846934 - DNA, 15 bp, Homo sapiens
ccgggcgtggtggca

SEQ ID NO: 846935 - DNA, 15 bp, Homo sapiens
cgggcgtggtggcag

SEQ ID NO: 846936 - DNA, 15 bp, Homo sapiens
gggcgtggtggcagg

SEQ ID NO: 846937 - DNA, 15 bp, Homo sapiens
ggcgtggtggcaggc

SEQ ID NO: 846938 - DNA, 15 bp, Homo sapiens
gcgtggtggcaggcg

SEQ ID NO: 846939 - DNA, 15 bp, Homo sapiens
cgtggtggcaggcgc

SEQ ID NO: 846940 - DNA, 15 bp, Homo sapiens
gtggtggcaggcgct

SEQ ID NO: 846941 - DNA, 15 bp, Homo sapiens
tggtggcaggcgctt

SEQ ID NO: 846942 - DNA, 15 bp, Homo sapiens
ggtggcaggcgcttg

SEQ ID NO: 846943 - DNA, 15 bp, Homo sapiens
gtggcaggcgcttgt

SEQ ID NO: 846944 - DNA, 15 bp, Homo sapiens
tggcaggcgcttgta

SEQ ID NO: 846945 - DNA, 15 bp, Homo sapiens
ggcaggcgcttgtag

SEQ ID NO: 846946 - DNA, 15 bp, Homo sapiens
gcaggcgcttgtagt

SEQ ID NO: 846947 - DNA, 15 bp, Homo sapiens
caggcgcttgtagtc

SEQ ID NO: 846948 - DNA, 15 bp, Homo sapiens
aggcgcttgtagtcc

SEQ ID NO: 846949 - DNA, 15 bp, Homo sapiens
ggcgcttgtagtccc

SEQ ID NO: 846950 - DNA, 15 bp, Homo sapiens
gcgcttgtagtccca

SEQ ID NO: 846951 - DNA, 15 bp, Homo sapiens
cgcttgtagtcccag

SEQ ID NO: 846952 - DNA, 15 bp, Homo sapiens
gcttgtagtcccagc

SEQ ID NO: 846953 - DNA, 15 bp, Homo sapiens
cttgtagtcccagct

SEQ ID NO: 846954 - DNA, 15 bp, Homo sapiens
ttgtagtcccagcta

SEQ ID NO: 846955 - DNA, 15 bp, Homo sapiens
tgtagtcccagctag

SEQ ID NO: 846956 - DNA, 15 bp, Homo sapiens
gtagtcccagctagt

SEQ ID NO: 846957 - DNA, 15 bp, Homo sapiens
tagtcccagctagtc

SEQ ID NO: 846958 - DNA, 15 bp, Homo sapiens
agtcccagctagtca

SEQ ID NO: 846959 - DNA, 15 bp, Homo sapiens
gtcccagctagtcag

SEQ ID NO: 846960 - DNA, 15 bp, Homo sapiens
tcccagctagtcagg

SEQ ID NO: 846961 - DNA, 15 bp, Homo sapiens
cccagctagtcagga

SEQ ID NO: 846962 - DNA, 15 bp, Homo sapiens
ccagctagtcaggag

SEQ ID NO: 846963 - DNA, 15 bp, Homo sapiens
cagctagtcaggagg

SEQ ID NO: 846964 - DNA, 15 bp, Homo sapiens
agctagtcaggaggc

SEQ ID NO: 846965 - DNA, 15 bp, Homo sapiens
gctagtcaggaggct

SEQ ID NO: 846966 - DNA, 15 bp, Homo sapiens
ctagtcaggaggctg

SEQ ID NO: 846967 - DNA, 15 bp, Homo sapiens
tagtcaggaggctga

SEQ ID NO: 846968 - DNA, 15 bp, Homo sapiens
agtcaggaggctgag

SEQ ID NO: 846969 - DNA, 15 bp, Homo sapiens
gtcaggaggctgagg

SEQ ID NO: 846970 - DNA, 15 bp, Homo sapiens
ggctgaggtgggaga

SEQ ID NO: 846971 - DNA, 15 bp, Homo sapiens
gctgaggtgggagaa

SEQ ID NO: 846972 - DNA, 15 bp, Homo sapiens
ctgaggtgggagaat

SEQ ID NO: 846973 - DNA, 15 bp, Homo sapiens
tgaggtgggagaatg

SEQ ID NO: 846974 - DNA, 15 bp, Homo sapiens
gaggtgggagaatgg

SEQ ID NO: 846975 - DNA, 15 bp, Homo sapiens
aggtgggagaatggc

SEQ ID NO: 846976 - DNA, 15 bp, Homo sapiens
ggtgggagaatggca

SEQ ID NO: 846977 - DNA, 15 bp, Homo sapiens
gtgggagaatggcat

SEQ ID NO: 846978 - DNA, 15 bp, Homo sapiens
tgggagaatggcatg

SEQ ID NO: 846979 - DNA, 15 bp, Homo sapiens
gggagaatggcatga

SEQ ID NO: 846980 - DNA, 15 bp, Homo sapiens
agaatggcatgaacc

SEQ ID NO: 846981 - DNA, 15 bp, Homo sapiens
gaatggcatgaaccc

SEQ ID NO: 846982 - DNA, 15 bp, Homo sapiens
aatggcatgaacccg

SEQ ID NO: 846983 - DNA, 15 bp, Homo sapiens
atggcatgaacccgc

SEQ ID NO: 846984 - DNA, 15 bp, Homo sapiens
tggcatgaacccgcg

SEQ ID NO: 846985 - DNA, 15 bp, Homo sapiens
ggcatgaacccgcga

SEQ ID NO: 846986 - DNA, 15 bp, Homo sapiens
gcatgaacccgcgag

SEQ ID NO: 846987 - DNA, 15 bp, Homo sapiens
catgaacccgcgagg

SEQ ID NO: 846988 - DNA, 15 bp, Homo sapiens
atgaacccgcgaggg

SEQ ID NO: 846989 - DNA, 15 bp, Homo sapiens
tgaacccgcgagggg

SEQ ID NO: 846990 - DNA, 15 bp, Homo sapiens
gaacccgcgaggggg

SEQ ID NO: 846991 - DNA, 15 bp, Homo sapiens
aacccgcgaggggga

SEQ ID NO: 846992 - DNA, 15 bp, Homo sapiens
acccgcgagggggag

SEQ ID NO: 846993 - DNA, 15 bp, Homo sapiens
cccgcgagggggagc

SEQ ID NO: 846994 - DNA, 15 bp, Homo sapiens
ccgcgagggggagct

SEQ ID NO: 846995 - DNA, 15 bp, Homo sapiens
cgcgagggggagctt

SEQ ID NO: 846996 - DNA, 15 bp, Homo sapiens
gcgagggggagcttg

SEQ ID NO: 846997 - DNA, 15 bp, Homo sapiens
cgagggggagcttgc

SEQ ID NO: 846998 - DNA, 15 bp, Homo sapiens
gagggggagcttgca

SEQ ID NO: 846999 - DNA, 15 bp, Homo sapiens
agggggagcttgcag

SEQ ID NO: 847000 - DNA, 15 bp, Homo sapiens
gggggagcttgcagt

SEQ ID NO: 847001 - DNA, 15 bp, Homo sapiens
ggggagcttgcagtg

SEQ ID NO: 847002 - DNA, 15 bp, Homo sapiens
gggagcttgcagtga

SEQ ID NO: 847003 - DNA, 15 bp, Homo sapiens
tgagccaagattgca

SEQ ID NO: 847004 - DNA, 15 bp, Homo sapiens
gagccaagattgcac

SEQ ID NO: 847005 - DNA, 15 bp, Homo sapiens
agccaagattgcacc

SEQ ID NO: 847006 - DNA, 15 bp, Homo sapiens
gccaagattgcacca

SEQ ID NO: 847007 - DNA, 15 bp, Homo sapiens
ccaagattgcaccac

SEQ ID NO: 847008 - DNA, 15 bp, Homo sapiens
caagattgcaccact

SEQ ID NO: 847009 - DNA, 15 bp, Homo sapiens
aagattgcaccactg

SEQ ID NO: 847010 - DNA, 15 bp, Homo sapiens
cattccctctccctg

SEQ ID NO: 847011 - DNA, 15 bp, Homo sapiens
attccctctccctgc

SEQ ID NO: 847012 - DNA, 15 bp, Homo sapiens
ttccctctccctgca

SEQ ID NO: 847013 - DNA, 15 bp, Homo sapiens
tccctctccctgcaa

SEQ ID NO: 847014 - DNA, 15 bp, Homo sapiens
ccctctccctgcaac

SEQ ID NO: 847015 - DNA, 15 bp, Homo sapiens
cctctccctgcaacc

SEQ ID NO: 847016 - DNA, 15 bp, Homo sapiens
ctctccctgcaaccc

SEQ ID NO: 847017 - DNA, 15 bp, Homo sapiens
tctccctgcaacccc

SEQ ID NO: 847018 - DNA, 15 bp, Homo sapiens
ctccctgcaacccct

SEQ ID NO: 847019 - DNA, 15 bp, Homo sapiens
tccctgcaacccctg

SEQ ID NO: 847020 - DNA, 15 bp, Homo sapiens
ccctgcaacccctgg

SEQ ID NO: 847021 - DNA, 15 bp, Homo sapiens
cctgcaacccctggc

SEQ ID NO: 847022 - DNA, 15 bp, Homo sapiens
ctgcaacccctggca

SEQ ID NO: 847023 - DNA, 15 bp, Homo sapiens
tgcaacccctggcag

SEQ ID NO: 847024 - DNA, 15 bp, Homo sapiens
gcaacccctggcagc

SEQ ID NO: 847025 - DNA, 15 bp, Homo sapiens
caacccctggcagcc

SEQ ID NO: 847026 - DNA, 15 bp, Homo sapiens
acccctggcagccac

SEQ ID NO: 847027 - DNA, 15 bp, Homo sapiens
cccctggcagccacc

SEQ ID NO: 847028 - DNA, 15 bp, Homo sapiens
ccctggcagccacct

SEQ ID NO: 847029 - DNA, 15 bp, Homo sapiens
cctggcagccacctt

SEQ ID NO: 847030 - DNA, 15 bp, Homo sapiens
ctggcagccaccttc

SEQ ID NO: 847031 - DNA, 15 bp, Homo sapiens
tggcagccaccttcc

SEQ ID NO: 847032 - DNA, 15 bp, Homo sapiens
ggcagccaccttcct

SEQ ID NO: 847033 - DNA, 15 bp, Homo sapiens
gcagccaccttccta

SEQ ID NO: 847034 - DNA, 15 bp, Homo sapiens
cagccaccttcctac

SEQ ID NO: 847035 - DNA, 15 bp, Homo sapiens
agccaccttcctact

SEQ ID NO: 847036 - DNA, 15 bp, Homo sapiens
gccaccttcctactt

SEQ ID NO: 847037 - DNA, 15 bp, Homo sapiens
ccaccttcctacttt

SEQ ID NO: 847038 - DNA, 15 bp, Homo sapiens
caccttcctactttc

SEQ ID NO: 847039 - DNA, 15 bp, Homo sapiens
accttcctactttct

SEQ ID NO: 847040 - DNA, 15 bp, Homo sapiens
ccttcctactttctg

SEQ ID NO: 847041 - DNA, 15 bp, Homo sapiens
cttcctactttctgt

SEQ ID NO: 847042 - DNA, 15 bp, Homo sapiens
ttcctactttctgtt

SEQ ID NO: 847043 - DNA, 15 bp, Homo sapiens
tcctactttctgttt

SEQ ID NO: 847044 - DNA, 15 bp, Homo sapiens
cctactttctgtttc

SEQ ID NO: 847045 - DNA, 15 bp, Homo sapiens
ctactttctgtttct

SEQ ID NO: 847046 - DNA, 15 bp, Homo sapiens
tactttctgtttcta

SEQ ID NO: 847047 - DNA, 15 bp, Homo sapiens
actttctgtttctat

SEQ ID NO: 847048 - DNA, 15 bp, Homo sapiens
ctttctgtttctatg

SEQ ID NO: 847049 - DNA, 15 bp, Homo sapiens
tttctgtttctatgc

SEQ ID NO: 847050 - DNA, 15 bp, Homo sapiens
ttctgtttctatgca

SEQ ID NO: 847051 - DNA, 15 bp, Homo sapiens
tctgtttctatgcat

SEQ ID NO: 847052 - DNA, 15 bp, Homo sapiens
ctgtttctatgcatt

SEQ ID NO: 847053 - DNA, 15 bp, Homo sapiens
tgtttctatgcattt

SEQ ID NO: 847054 - DNA, 15 bp, Homo sapiens
gtttctatgcatttg

SEQ ID NO: 847055 - DNA, 15 bp, Homo sapiens
tttctatgcatttga

SEQ ID NO: 847056 - DNA, 15 bp, Homo sapiens
ttctatgcatttgag

SEQ ID NO: 847057 - DNA, 15 bp, Homo sapiens
tctatgcatttgagg

SEQ ID NO: 847058 - DNA, 15 bp, Homo sapiens
ctatgcatttgagga

SEQ ID NO: 847059 - DNA, 15 bp, Homo sapiens
tatgcatttgaggac

SEQ ID NO: 847060 - DNA, 15 bp, Homo sapiens
atgcatttgaggact

SEQ ID NO: 847061 - DNA, 15 bp, Homo sapiens
tgcatttgaggactc

SEQ ID NO: 847062 - DNA, 15 bp, Homo sapiens
gcatttgaggactct

SEQ ID NO: 847063 - DNA, 15 bp, Homo sapiens
catttgaggactcta

SEQ ID NO: 847064 - DNA, 15 bp, Homo sapiens
atttgaggactctag

SEQ ID NO: 847065 - DNA, 15 bp, Homo sapiens
tttgaggactctagg

SEQ ID NO: 847066 - DNA, 15 bp, Homo sapiens
ttgaggactctaggt

SEQ ID NO: 847067 - DNA, 15 bp, Homo sapiens
tgaggactctaggta

SEQ ID NO: 847068 - DNA, 15 bp, Homo sapiens
gaggactctaggtac

SEQ ID NO: 847069 - DNA, 15 bp, Homo sapiens
aggactctaggtacc

SEQ ID NO: 847070 - DNA, 15 bp, Homo sapiens
ggactctaggtacct

SEQ ID NO: 847071 - DNA, 15 bp, Homo sapiens
gactctaggtacctc

SEQ ID NO: 847072 - DNA, 15 bp, Homo sapiens
actctaggtacctca

SEQ ID NO: 847073 - DNA, 15 bp, Homo sapiens
ctctaggtacctcat

SEQ ID NO: 847074 - DNA, 15 bp, Homo sapiens
tctaggtacctcata

SEQ ID NO: 847075 - DNA, 15 bp, Homo sapiens
ctaggtacctcatat

SEQ ID NO: 847076 - DNA, 15 bp, Homo sapiens
taggtacctcatata

SEQ ID NO: 847077 - DNA, 15 bp, Homo sapiens
aggtacctcatataa

SEQ ID NO: 847078 - DNA, 15 bp, Homo sapiens
ggtacctcatataag

SEQ ID NO: 847079 - DNA, 15 bp, Homo sapiens
gtacctcatataagt

SEQ ID NO: 847080 - DNA, 15 bp, Homo sapiens
tacctcatataagtg

SEQ ID NO: 847081 - DNA, 15 bp, Homo sapiens
acctcatataagtgg

SEQ ID NO: 847082 - DNA, 15 bp, Homo sapiens
cctcatataagtgga

SEQ ID NO: 847083 - DNA, 15 bp, Homo sapiens
ctcatataagtggaa

SEQ ID NO: 847084 - DNA, 15 bp, Homo sapiens
tataagtggaatcat

SEQ ID NO: 847085 - DNA, 15 bp, Homo sapiens
ataagtggaatcata

SEQ ID NO: 847086 - DNA, 15 bp, Homo sapiens
taagtggaatcataa

SEQ ID NO: 847087 - DNA, 15 bp, Homo sapiens
aagtggaatcataac

SEQ ID NO: 847088 - DNA, 15 bp, Homo sapiens
agtggaatcataaca

SEQ ID NO: 847089 - DNA, 15 bp, Homo sapiens
gtggaatcataacac

SEQ ID NO: 847090 - DNA, 15 bp, Homo sapiens
tggaatcataacacg

SEQ ID NO: 847091 - DNA, 15 bp, Homo sapiens
ggaatcataacacgg

SEQ ID NO: 847092 - DNA, 15 bp, Homo sapiens
gaatcataacacggt

SEQ ID NO: 847093 - DNA, 15 bp, Homo sapiens
aatcataacacggtt

SEQ ID NO: 847094 - DNA, 15 bp, Homo sapiens
atcataacacggttg

SEQ ID NO: 847095 - DNA, 15 bp, Homo sapiens
tcataacacggttgt

SEQ ID NO: 847096 - DNA, 15 bp, Homo sapiens
cataacacggttgtc

SEQ ID NO: 847097 - DNA, 15 bp, Homo sapiens
ataacacggttgtcc

SEQ ID NO: 847098 - DNA, 15 bp, Homo sapiens
taacacggttgtcct

SEQ ID NO: 847099 - DNA, 15 bp, Homo sapiens
aacacggttgtcctt

SEQ ID NO: 847100 - DNA, 15 bp, Homo sapiens
acacggttgtccttt

SEQ ID NO: 847101 - DNA, 15 bp, Homo sapiens
cacggttgtcctttt

SEQ ID NO: 847102 - DNA, 15 bp, Homo sapiens
acggttgtccttttt

SEQ ID NO: 847103 - DNA, 15 bp, Homo sapiens
cggttgtcctttttt

SEQ ID NO: 847104 - DNA, 15 bp, Homo sapiens
ggttgtccttttttg

SEQ ID NO: 847105 - DNA, 15 bp, Homo sapiens
gttgtccttttttga

SEQ ID NO: 847106 - DNA, 15 bp, Homo sapiens
ttgtccttttttgat

SEQ ID NO: 847107 - DNA, 15 bp, Homo sapiens
tgtccttttttgatt

SEQ ID NO: 847108 - DNA, 15 bp, Homo sapiens
gtccttttttgattg

SEQ ID NO: 847109 - DNA, 15 bp, Homo sapiens
tccttttttgattgg

SEQ ID NO: 847110 - DNA, 15 bp, Homo sapiens
ccttttttgattggg

SEQ ID NO: 847111 - DNA, 15 bp, Homo sapiens
cttttttgattgggt

SEQ ID NO: 847112 - DNA, 15 bp, Homo sapiens
ttttttgattgggtt

SEQ ID NO: 847113 - DNA, 15 bp, Homo sapiens
tttttgattgggtta

SEQ ID NO: 847114 - DNA, 15 bp, Homo sapiens
ttttgattgggttat

SEQ ID NO: 847115 - DNA, 15 bp, Homo sapiens
tttgattgggttatt

SEQ ID NO: 847116 - DNA, 15 bp, Homo sapiens
ttgattgggttattt

SEQ ID NO: 847117 - DNA, 15 bp, Homo sapiens
tgattgggttatttc

SEQ ID NO: 847118 - DNA, 15 bp, Homo sapiens
gattgggttatttca

SEQ ID NO: 847119 - DNA, 15 bp, Homo sapiens
attgggttatttcaa

SEQ ID NO: 847120 - DNA, 15 bp, Homo sapiens
ttgggttatttcaat

SEQ ID NO: 847121 - DNA, 15 bp, Homo sapiens
tgggttatttcaatt

SEQ ID NO: 847122 - DNA, 15 bp, Homo sapiens
gggttatttcaatta

SEQ ID NO: 847123 - DNA, 15 bp, Homo sapiens
ggttatttcaattag

SEQ ID NO: 847124 - DNA, 15 bp, Homo sapiens
gttatttcaattagc

SEQ ID NO: 847125 - DNA, 15 bp, Homo sapiens
ttatttcaattagcg

SEQ ID NO: 847126 - DNA, 15 bp, Homo sapiens
tatttcaattagcgt

SEQ ID NO: 847127 - DNA, 15 bp, Homo sapiens
atttcaattagcgta

SEQ ID NO: 847128 - DNA, 15 bp, Homo sapiens
tttcaattagcgtaa

SEQ ID NO: 847129 - DNA, 15 bp, Homo sapiens
ttcaattagcgtaat

SEQ ID NO: 847130 - DNA, 15 bp, Homo sapiens
tcaattagcgtaatg

SEQ ID NO: 847131 - DNA, 15 bp, Homo sapiens
caattagcgtaatgc

SEQ ID NO: 847132 - DNA, 15 bp, Homo sapiens
aattagcgtaatgcc

SEQ ID NO: 847133 - DNA, 15 bp, Homo sapiens
attagcgtaatgcct

SEQ ID NO: 847134 - DNA, 15 bp, Homo sapiens
ttagcgtaatgcctt

SEQ ID NO: 847135 - DNA, 15 bp, Homo sapiens
tagcgtaatgccttc

SEQ ID NO: 847136 - DNA, 15 bp, Homo sapiens
agcgtaatgccttca

SEQ ID NO: 847137 - DNA, 15 bp, Homo sapiens
gcgtaatgccttcaa

SEQ ID NO: 847138 - DNA, 15 bp, Homo sapiens
cgtaatgccttcaag

SEQ ID NO: 847139 - DNA, 15 bp, Homo sapiens
gtaatgccttcaagg

SEQ ID NO: 847140 - DNA, 15 bp, Homo sapiens
taatgccttcaaggg

SEQ ID NO: 847141 - DNA, 15 bp, Homo sapiens
aatgccttcaagggt

SEQ ID NO: 847142 - DNA, 15 bp, Homo sapiens
atgccttcaagggtc

SEQ ID NO: 847143 - DNA, 15 bp, Homo sapiens
tgccttcaagggtca

SEQ ID NO: 847144 - DNA, 15 bp, Homo sapiens
gccttcaagggtcat

SEQ ID NO: 847145 - DNA, 15 bp, Homo sapiens
ccttcaagggtcatc

SEQ ID NO: 847146 - DNA, 15 bp, Homo sapiens
cttcaagggtcatcc

SEQ ID NO: 847147 - DNA, 15 bp, Homo sapiens
ttcaagggtcatcca

SEQ ID NO: 847148 - DNA, 15 bp, Homo sapiens
tcaagggtcatccat

SEQ ID NO: 847149 - DNA, 15 bp, Homo sapiens
caagggtcatccatg

SEQ ID NO: 847150 - DNA, 15 bp, Homo sapiens
aagggtcatccatgt

SEQ ID NO: 847151 - DNA, 15 bp, Homo sapiens
agggtcatccatgtt

SEQ ID NO: 847152 - DNA, 15 bp, Homo sapiens
gggtcatccatgttg

SEQ ID NO: 847153 - DNA, 15 bp, Homo sapiens
ggtcatccatgttgt

SEQ ID NO: 847154 - DNA, 15 bp, Homo sapiens
gtcatccatgttgta

SEQ ID NO: 847155 - DNA, 15 bp, Homo sapiens
tcatccatgttgtag

SEQ ID NO: 847156 - DNA, 15 bp, Homo sapiens
catccatgttgtagc

SEQ ID NO: 847157 - DNA, 15 bp, Homo sapiens
atccatgttgtagca

SEQ ID NO: 847158 - DNA, 15 bp, Homo sapiens
tccatgttgtagcat

SEQ ID NO: 847159 - DNA, 15 bp, Homo sapiens
ccatgttgtagcatg

SEQ ID NO: 847160 - DNA, 15 bp, Homo sapiens
catgttgtagcatgt

SEQ ID NO: 847161 - DNA, 15 bp, Homo sapiens
atgttgtagcatgtg

SEQ ID NO: 847162 - DNA, 15 bp, Homo sapiens
tgttgtagcatgtgt

SEQ ID NO: 847163 - DNA, 15 bp, Homo sapiens
gttgtagcatgtgtc

SEQ ID NO: 847164 - DNA, 15 bp, Homo sapiens
ttgtagcatgtgtca

SEQ ID NO: 847165 - DNA, 15 bp, Homo sapiens
tgtagcatgtgtcag

SEQ ID NO: 847166 - DNA, 15 bp, Homo sapiens
gtagcatgtgtcaga

SEQ ID NO: 847167 - DNA, 15 bp, Homo sapiens
tagcatgtgtcagag

SEQ ID NO: 847168 - DNA, 15 bp, Homo sapiens
agcatgtgtcagagt

SEQ ID NO: 847169 - DNA, 15 bp, Homo sapiens
gcatgtgtcagagtt

SEQ ID NO: 847170 - DNA, 15 bp, Homo sapiens
catgtgtcagagttt

SEQ ID NO: 847171 - DNA, 15 bp, Homo sapiens
atgtgtcagagtttt

SEQ ID NO: 847172 - DNA, 15 bp, Homo sapiens
tgtgtcagagttttc

SEQ ID NO: 847173 - DNA, 15 bp, Homo sapiens
gtgtcagagttttct

SEQ ID NO: 847174 - DNA, 15 bp, Homo sapiens
tgtcagagttttctt

SEQ ID NO: 847175 - DNA, 15 bp, Homo sapiens
gtcagagttttcttc

SEQ ID NO: 847176 - DNA, 15 bp, Homo sapiens
tcagagttttcttct

SEQ ID NO: 847177 - DNA, 15 bp, Homo sapiens
cagagttttcttctt

SEQ ID NO: 847178 - DNA, 15 bp, Homo sapiens
agagttttcttcttt

SEQ ID NO: 847179 - DNA, 15 bp, Homo sapiens
gagttttcttctttt

SEQ ID NO: 847180 - DNA, 15 bp, Homo sapiens
agttttcttcttttt

SEQ ID NO: 847181 - DNA, 15 bp, Homo sapiens
gttttcttctttttt

SEQ ID NO: 847182 - DNA, 15 bp, Homo sapiens
ttttcttctttttta

SEQ ID NO: 847183 - DNA, 15 bp, Homo sapiens
tttcttcttttttaa

SEQ ID NO: 847184 - DNA, 15 bp, Homo sapiens
ttcttcttttttaag

SEQ ID NO: 847185 - DNA, 15 bp, Homo sapiens
tcttcttttttaaga

SEQ ID NO: 847186 - DNA, 15 bp, Homo sapiens
cttcttttttaagac

SEQ ID NO: 847187 - DNA, 15 bp, Homo sapiens
ttcttttttaagact

SEQ ID NO: 847188 - DNA, 15 bp, Homo sapiens
tcttttttaagactg

SEQ ID NO: 847189 - DNA, 15 bp, Homo sapiens
cttttttaagactga

SEQ ID NO: 847190 - DNA, 15 bp, Homo sapiens
ttttttaagactgaa

SEQ ID NO: 847191 - DNA, 15 bp, Homo sapiens
tttttaagactgaat

SEQ ID NO: 847192 - DNA, 15 bp, Homo sapiens
ttttaagactgaata

SEQ ID NO: 847193 - DNA, 15 bp, Homo sapiens
tttaagactgaataa

SEQ ID NO: 847194 - DNA, 15 bp, Homo sapiens
ttaagactgaataat

SEQ ID NO: 847195 - DNA, 15 bp, Homo sapiens
taagactgaataata

SEQ ID NO: 847196 - DNA, 15 bp, Homo sapiens
aagactgaataatat

SEQ ID NO: 847197 - DNA, 15 bp, Homo sapiens
agactgaataatatt

SEQ ID NO: 847198 - DNA, 15 bp, Homo sapiens
gactgaataatattc

SEQ ID NO: 847199 - DNA, 15 bp, Homo sapiens
actgaataatattcc

SEQ ID NO: 847200 - DNA, 15 bp, Homo sapiens
aataatattccattg

SEQ ID NO: 847201 - DNA, 15 bp, Homo sapiens
ataatattccattgt

SEQ ID NO: 847202 - DNA, 15 bp, Homo sapiens
taatattccattgta

SEQ ID NO: 847203 - DNA, 15 bp, Homo sapiens
aatattccattgtaa

SEQ ID NO: 847204 - DNA, 15 bp, Homo sapiens
atattccattgtaaa

SEQ ID NO: 847205 - DNA, 15 bp, Homo sapiens
tattccattgtaaat

SEQ ID NO: 847206 - DNA, 15 bp, Homo sapiens
attccattgtaaatt

SEQ ID NO: 847207 - DNA, 15 bp, Homo sapiens
ttccattgtaaatta

SEQ ID NO: 847208 - DNA, 15 bp, Homo sapiens
tccattgtaaattac

SEQ ID NO: 847209 - DNA, 15 bp, Homo sapiens
ccattgtaaattacc

SEQ ID NO: 847210 - DNA, 15 bp, Homo sapiens
cattgtaaattacca

SEQ ID NO: 847211 - DNA, 15 bp, Homo sapiens
attgtaaattaccac

SEQ ID NO: 847212 - DNA, 15 bp, Homo sapiens
ttgtaaattaccaca

SEQ ID NO: 847213 - DNA, 15 bp, Homo sapiens
tgtaaattaccacac

SEQ ID NO: 847214 - DNA, 15 bp, Homo sapiens
gtaaattaccacact

SEQ ID NO: 847215 - DNA, 15 bp, Homo sapiens
taaattaccacactt

SEQ ID NO: 847216 - DNA, 15 bp, Homo sapiens
aaattaccacacttt

SEQ ID NO: 847217 - DNA, 15 bp, Homo sapiens
aattaccacactttg

SEQ ID NO: 847218 - DNA, 15 bp, Homo sapiens
attaccacactttgt

SEQ ID NO: 847219 - DNA, 15 bp, Homo sapiens
ttaccacactttgtt

SEQ ID NO: 847220 - DNA, 15 bp, Homo sapiens
taccacactttgttt

SEQ ID NO: 847221 - DNA, 15 bp, Homo sapiens
accacactttgttta

SEQ ID NO: 847222 - DNA, 15 bp, Homo sapiens
ccacactttgtttat

SEQ ID NO: 847223 - DNA, 15 bp, Homo sapiens
cacactttgtttatc

SEQ ID NO: 847224 - DNA, 15 bp, Homo sapiens
acactttgtttatct

SEQ ID NO: 847225 - DNA, 15 bp, Homo sapiens
cactttgtttatcta

SEQ ID NO: 847226 - DNA, 15 bp, Homo sapiens
actttgtttatctag

SEQ ID NO: 847227 - DNA, 15 bp, Homo sapiens
ctttgtttatctagt

SEQ ID NO: 847228 - DNA, 15 bp, Homo sapiens
tttgtttatctagtc

SEQ ID NO: 847229 - DNA, 15 bp, Homo sapiens
ttgtttatctagtca

SEQ ID NO: 847230 - DNA, 15 bp, Homo sapiens
tgtttatctagtcat

SEQ ID NO: 847231 - DNA, 15 bp, Homo sapiens
gtttatctagtcatc

SEQ ID NO: 847232 - DNA, 15 bp, Homo sapiens
tttatctagtcatct

SEQ ID NO: 847233 - DNA, 15 bp, Homo sapiens
ttatctagtcatctg

SEQ ID NO: 847234 - DNA, 15 bp, Homo sapiens
tatctagtcatctgt

SEQ ID NO: 847235 - DNA, 15 bp, Homo sapiens
atctagtcatctgtc

SEQ ID NO: 847236 - DNA, 15 bp, Homo sapiens
tctagtcatctgtcc

SEQ ID NO: 847237 - DNA, 15 bp, Homo sapiens
ctagtcatctgtcca

SEQ ID NO: 847238 - DNA, 15 bp, Homo sapiens
tagtcatctgtccat

SEQ ID NO: 847239 - DNA, 15 bp, Homo sapiens
agtcatctgtccatg

SEQ ID NO: 847240 - DNA, 15 bp, Homo sapiens
gtcatctgtccatgg

SEQ ID NO: 847241 - DNA, 15 bp, Homo sapiens
gtccatggacacttg

SEQ ID NO: 847242 - DNA, 15 bp, Homo sapiens
tccatggacacttgg

SEQ ID NO: 847243 - DNA, 15 bp, Homo sapiens
ccatggacacttggg

SEQ ID NO: 847244 - DNA, 15 bp, Homo sapiens
catggacacttgggg

SEQ ID NO: 847245 - DNA, 15 bp, Homo sapiens
atggacacttggggt

SEQ ID NO: 847246 - DNA, 15 bp, Homo sapiens
tggacacttggggtg

SEQ ID NO: 847247 - DNA, 15 bp, Homo sapiens
ggacacttggggtgc

SEQ ID NO: 847248 - DNA, 15 bp, Homo sapiens
gacacttggggtgct

SEQ ID NO: 847249 - DNA, 15 bp, Homo sapiens
acacttggggtgctt

SEQ ID NO: 847250 - DNA, 15 bp, Homo sapiens
cacttggggtgcttc

SEQ ID NO: 847251 - DNA, 15 bp, Homo sapiens
acttggggtgcttcc

SEQ ID NO: 847252 - DNA, 15 bp, Homo sapiens
cttggggtgcttcca

SEQ ID NO: 847253 - DNA, 15 bp, Homo sapiens
ttggggtgcttccac

SEQ ID NO: 847254 - DNA, 15 bp, Homo sapiens
tggggtgcttccacc

SEQ ID NO: 847255 - DNA, 15 bp, Homo sapiens
ggggtgcttccacct

SEQ ID NO: 847256 - DNA, 15 bp, Homo sapiens
gggtgcttccacctc

SEQ ID NO: 847257 - DNA, 15 bp, Homo sapiens
ggtgcttccacctct

SEQ ID NO: 847258 - DNA, 15 bp, Homo sapiens
gtgcttccacctctt

SEQ ID NO: 847259 - DNA, 15 bp, Homo sapiens
tgcttccacctctta

SEQ ID NO: 847260 - DNA, 15 bp, Homo sapiens
gcttccacctcttag

SEQ ID NO: 847261 - DNA, 15 bp, Homo sapiens
cttccacctcttaga

SEQ ID NO: 847262 - DNA, 15 bp, Homo sapiens
ttccacctcttagat

SEQ ID NO: 847263 - DNA, 15 bp, Homo sapiens
tccacctcttagata

SEQ ID NO: 847264 - DNA, 15 bp, Homo sapiens
ccacctcttagatat

SEQ ID NO: 847265 - DNA, 15 bp, Homo sapiens
cacctcttagatatt

SEQ ID NO: 847266 - DNA, 15 bp, Homo sapiens
acctcttagatatta

SEQ ID NO: 847267 - DNA, 15 bp, Homo sapiens
cctcttagatattat

SEQ ID NO: 847268 - DNA, 15 bp, Homo sapiens
ctcttagatattatg

SEQ ID NO: 847269 - DNA, 15 bp, Homo sapiens
tcttagatattatga

SEQ ID NO: 847270 - DNA, 15 bp, Homo sapiens
cttagatattatgac

SEQ ID NO: 847271 - DNA, 15 bp, Homo sapiens
ttagatattatgact

SEQ ID NO: 847272 - DNA, 15 bp, Homo sapiens
tagatattatgacta

SEQ ID NO: 847273 - DNA, 15 bp, Homo sapiens
agatattatgactaa

SEQ ID NO: 847274 - DNA, 15 bp, Homo sapiens
gatattatgactaat

SEQ ID NO: 847275 - DNA, 15 bp, Homo sapiens
atattatgactaatg

SEQ ID NO: 847276 - DNA, 15 bp, Homo sapiens
tattatgactaatgc

SEQ ID NO: 847277 - DNA, 15 bp, Homo sapiens
attatgactaatgct

SEQ ID NO: 847278 - DNA, 15 bp, Homo sapiens
ttatgactaatgctg

SEQ ID NO: 847279 - DNA, 15 bp, Homo sapiens
tatgactaatgctgc

SEQ ID NO: 847280 - DNA, 15 bp, Homo sapiens
atgactaatgctgct

SEQ ID NO: 847281 - DNA, 15 bp, Homo sapiens
tgactaatgctgctg

SEQ ID NO: 847282 - DNA, 15 bp, Homo sapiens
gactaatgctgctgt

SEQ ID NO: 847283 - DNA, 15 bp, Homo sapiens
actaatgctgctgtg

SEQ ID NO: 847284 - DNA, 15 bp, Homo sapiens
ctaatgctgctgtga

SEQ ID NO: 847285 - DNA, 15 bp, Homo sapiens
taatgctgctgtgag

SEQ ID NO: 847286 - DNA, 15 bp, Homo sapiens
aatgctgctgtgagc

SEQ ID NO: 847287 - DNA, 15 bp, Homo sapiens
atgctgctgtgagca

SEQ ID NO: 847288 - DNA, 15 bp, Homo sapiens
tgctgctgtgagcat

SEQ ID NO: 847289 - DNA, 15 bp, Homo sapiens
gctgctgtgagcatg

SEQ ID NO: 847290 - DNA, 15 bp, Homo sapiens
ctgctgtgagcatga

SEQ ID NO: 847291 - DNA, 15 bp, Homo sapiens
tgctgtgagcatgag

SEQ ID NO: 847292 - DNA, 15 bp, Homo sapiens
gctgtgagcatgagt

SEQ ID NO: 847293 - DNA, 15 bp, Homo sapiens
ctgtgagcatgagtg

SEQ ID NO: 847294 - DNA, 15 bp, Homo sapiens
tgtgagcatgagtgt

SEQ ID NO: 847295 - DNA, 15 bp, Homo sapiens
gtgagcatgagtgta

SEQ ID NO: 847296 - DNA, 15 bp, Homo sapiens
tgagcatgagtgtac

SEQ ID NO: 847297 - DNA, 15 bp, Homo sapiens
gagcatgagtgtaca

SEQ ID NO: 847298 - DNA, 15 bp, Homo sapiens
agcatgagtgtacaa

SEQ ID NO: 847299 - DNA, 15 bp, Homo sapiens
gcatgagtgtacaaa

SEQ ID NO: 847300 - DNA, 15 bp, Homo sapiens
catgagtgtacaaat

SEQ ID NO: 847301 - DNA, 15 bp, Homo sapiens
atgagtgtacaaata

SEQ ID NO: 847302 - DNA, 15 bp, Homo sapiens
tgagtgtacaaatat

SEQ ID NO: 847303 - DNA, 15 bp, Homo sapiens
gagtgtacaaatatc

SEQ ID NO: 847304 - DNA, 15 bp, Homo sapiens
agtgtacaaatatct

SEQ ID NO: 847305 - DNA, 15 bp, Homo sapiens
gtgtacaaatatctc

SEQ ID NO: 847306 - DNA, 15 bp, Homo sapiens
tgtacaaatatctct

SEQ ID NO: 847307 - DNA, 15 bp, Homo sapiens
gtacaaatatctctt

SEQ ID NO: 847308 - DNA, 15 bp, Homo sapiens
tacaaatatctcttt

SEQ ID NO: 847309 - DNA, 15 bp, Homo sapiens
acaaatatctctttg

SEQ ID NO: 847310 - DNA, 15 bp, Homo sapiens
caaatatctctttga

SEQ ID NO: 847311 - DNA, 15 bp, Homo sapiens
aaatatctctttgag

SEQ ID NO: 847312 - DNA, 15 bp, Homo sapiens
aatatctctttgaga

SEQ ID NO: 847313 - DNA, 15 bp, Homo sapiens
atatctctttgagat

SEQ ID NO: 847314 - DNA, 15 bp, Homo sapiens
tatctctttgagatc

SEQ ID NO: 847315 - DNA, 15 bp, Homo sapiens
atctctttgagatcc

SEQ ID NO: 847316 - DNA, 15 bp, Homo sapiens
tctctttgagatcct

SEQ ID NO: 847317 - DNA, 15 bp, Homo sapiens
ctctttgagatcctt

SEQ ID NO: 847318 - DNA, 15 bp, Homo sapiens
tctttgagatccttc

SEQ ID NO: 847319 - DNA, 15 bp, Homo sapiens
ctttgagatccttct

SEQ ID NO: 847320 - DNA, 15 bp, Homo sapiens
tttgagatccttctt

SEQ ID NO: 847321 - DNA, 15 bp, Homo sapiens
ttgagatccttcttc

SEQ ID NO: 847322 - DNA, 15 bp, Homo sapiens
tgagatccttcttcc

SEQ ID NO: 847323 - DNA, 15 bp, Homo sapiens
gagatccttcttcca

SEQ ID NO: 847324 - DNA, 15 bp, Homo sapiens
agatccttcttccag

SEQ ID NO: 847325 - DNA, 15 bp, Homo sapiens
gatccttcttccagt

SEQ ID NO: 847326 - DNA, 15 bp, Homo sapiens
atccttcttccagtt

SEQ ID NO: 847327 - DNA, 15 bp, Homo sapiens
tccttcttccagttc

SEQ ID NO: 847328 - DNA, 15 bp, Homo sapiens
ccttcttccagttcc

SEQ ID NO: 847329 - DNA, 15 bp, Homo sapiens
cttcttccagttcct

SEQ ID NO: 847330 - DNA, 15 bp, Homo sapiens
ttcttccagttcctt

SEQ ID NO: 847331 - DNA, 15 bp, Homo sapiens
tcttccagttccttt

SEQ ID NO: 847332 - DNA, 15 bp, Homo sapiens
cttccagttcctttg

SEQ ID NO: 847333 - DNA, 15 bp, Homo sapiens
ttccagttcctttgg

SEQ ID NO: 847334 - DNA, 15 bp, Homo sapiens
tccagttcctttgga

SEQ ID NO: 847335 - DNA, 15 bp, Homo sapiens
ccagttcctttggat

SEQ ID NO: 847336 - DNA, 15 bp, Homo sapiens
cagttcctttggata

SEQ ID NO: 847337 - DNA, 15 bp, Homo sapiens
agttcctttggatat

SEQ ID NO: 847338 - DNA, 15 bp, Homo sapiens
gttcctttggatata

SEQ ID NO: 847339 - DNA, 15 bp, Homo sapiens
tcctttggatatatg

SEQ ID NO: 847340 - DNA, 15 bp, Homo sapiens
cctttggatatatgc

SEQ ID NO: 847341 - DNA, 15 bp, Homo sapiens
ctttggatatatgcc

SEQ ID NO: 847342 - DNA, 15 bp, Homo sapiens
tttggatatatgcct

SEQ ID NO: 847343 - DNA, 15 bp, Homo sapiens
ttggatatatgccta

SEQ ID NO: 847344 - DNA, 15 bp, Homo sapiens
tggatatatgcctag

SEQ ID NO: 847345 - DNA, 15 bp, Homo sapiens
ggatatatgcctaga

SEQ ID NO: 847346 - DNA, 15 bp, Homo sapiens
gatatatgcctagaa

SEQ ID NO: 847347 - DNA, 15 bp, Homo sapiens
atatatgcctagaag

SEQ ID NO: 847348 - DNA, 15 bp, Homo sapiens
tatatgcctagaagt

SEQ ID NO: 847349 - DNA, 15 bp, Homo sapiens
atatgcctagaagtg

SEQ ID NO: 847350 - DNA, 15 bp, Homo sapiens
tatgcctagaagtgg

SEQ ID NO: 847351 - DNA, 15 bp, Homo sapiens
atgcctagaagtgga

SEQ ID NO: 847352 - DNA, 15 bp, Homo sapiens
tgcctagaagtggaa

SEQ ID NO: 847353 - DNA, 15 bp, Homo sapiens
gcctagaagtggaat

SEQ ID NO: 847354 - DNA, 15 bp, Homo sapiens
cctagaagtggaatt

SEQ ID NO: 847355 - DNA, 15 bp, Homo sapiens
ctagaagtggaatta

SEQ ID NO: 847356 - DNA, 15 bp, Homo sapiens
tagaagtggaattat

SEQ ID NO: 847357 - DNA, 15 bp, Homo sapiens
agaagtggaattatg

SEQ ID NO: 847358 - DNA, 15 bp, Homo sapiens
gaagtggaattatga

SEQ ID NO: 847359 - DNA, 15 bp, Homo sapiens
aagtggaattatgaa

SEQ ID NO: 847360 - DNA, 15 bp, Homo sapiens
agtggaattatgaat

SEQ ID NO: 847361 - DNA, 15 bp, Homo sapiens
gtggaattatgaatc

SEQ ID NO: 847362 - DNA, 15 bp, Homo sapiens
tggaattatgaatcc

SEQ ID NO: 847363 - DNA, 15 bp, Homo sapiens
ggaattatgaatcca

SEQ ID NO: 847364 - DNA, 15 bp, Homo sapiens
gaattatgaatccaa

SEQ ID NO: 847365 - DNA, 15 bp, Homo sapiens
aattatgaatccaat

SEQ ID NO: 847366 - DNA, 15 bp, Homo sapiens
attatgaatccaatg

SEQ ID NO: 847367 - DNA, 15 bp, Homo sapiens
ttatgaatccaatgg

SEQ ID NO: 847368 - DNA, 15 bp, Homo sapiens
tatgaatccaatggt

SEQ ID NO: 847369 - DNA, 15 bp, Homo sapiens
atgaatccaatggta

SEQ ID NO: 847370 - DNA, 15 bp, Homo sapiens
tgaatccaatggtaa

SEQ ID NO: 847371 - DNA, 15 bp, Homo sapiens
gaatccaatggtaat

SEQ ID NO: 847372 - DNA, 15 bp, Homo sapiens
aatccaatggtaatt

SEQ ID NO: 847373 - DNA, 15 bp, Homo sapiens
atccaatggtaattc

SEQ ID NO: 847374 - DNA, 15 bp, Homo sapiens
tccaatggtaattct

SEQ ID NO: 847375 - DNA, 15 bp, Homo sapiens
ccaatggtaattcta

SEQ ID NO: 847376 - DNA, 15 bp, Homo sapiens
caatggtaattctat

SEQ ID NO: 847377 - DNA, 15 bp, Homo sapiens
aatggtaattctatg

SEQ ID NO: 847378 - DNA, 15 bp, Homo sapiens
atggtaattctatgt

SEQ ID NO: 847379 - DNA, 15 bp, Homo sapiens
tggtaattctatgtt

SEQ ID NO: 847380 - DNA, 15 bp, Homo sapiens
ggtaattctatgttt

SEQ ID NO: 847381 - DNA, 15 bp, Homo sapiens
gtaattctatgttta

SEQ ID NO: 847382 - DNA, 15 bp, Homo sapiens
taattctatgtttaa

SEQ ID NO: 847383 - DNA, 15 bp, Homo sapiens
aattctatgtttaat

SEQ ID NO: 847384 - DNA, 15 bp, Homo sapiens
attctatgtttaatt

SEQ ID NO: 847385 - DNA, 15 bp, Homo sapiens
ttctatgtttaattt

SEQ ID NO: 847386 - DNA, 15 bp, Homo sapiens
tctatgtttaatttt

SEQ ID NO: 847387 - DNA, 15 bp, Homo sapiens
ctatgtttaattttt

SEQ ID NO: 847388 - DNA, 15 bp, Homo sapiens
tatgtttaatttttt

SEQ ID NO: 847389 - DNA, 15 bp, Homo sapiens
atgtttaattttttg

SEQ ID NO: 847390 - DNA, 15 bp, Homo sapiens
tgtttaattttttga

SEQ ID NO: 847391 - DNA, 15 bp, Homo sapiens
gtttaattttttgag

SEQ ID NO: 847392 - DNA, 15 bp, Homo sapiens
tttaattttttgagg

SEQ ID NO: 847393 - DNA, 15 bp, Homo sapiens
ttaattttttgagga

SEQ ID NO: 847394 - DNA, 15 bp, Homo sapiens
taattttttgaggaa

SEQ ID NO: 847395 - DNA, 15 bp, Homo sapiens
aattttttgaggaac

SEQ ID NO: 847396 - DNA, 15 bp, Homo sapiens
attttttgaggaacc

SEQ ID NO: 847397 - DNA, 15 bp, Homo sapiens
ttttttgaggaacca

SEQ ID NO: 847398 - DNA, 15 bp, Homo sapiens
tttttgaggaaccac

SEQ ID NO: 847399 - DNA, 15 bp, Homo sapiens
ttttgaggaaccacc

SEQ ID NO: 847400 - DNA, 15 bp, Homo sapiens
tttgaggaaccacca

SEQ ID NO: 847401 - DNA, 15 bp, Homo sapiens
ttgaggaaccaccat

SEQ ID NO: 847402 - DNA, 15 bp, Homo sapiens
tgaggaaccaccata

SEQ ID NO: 847403 - DNA, 15 bp, Homo sapiens
gaggaaccaccatac

SEQ ID NO: 847404 - DNA, 15 bp, Homo sapiens
aggaaccaccatact

SEQ ID NO: 847405 - DNA, 15 bp, Homo sapiens
ggaaccaccatactg

SEQ ID NO: 847406 - DNA, 15 bp, Homo sapiens
gaaccaccatactgt

SEQ ID NO: 847407 - DNA, 15 bp, Homo sapiens
aaccaccatactgtt

SEQ ID NO: 847408 - DNA, 15 bp, Homo sapiens
accaccatactgttt

SEQ ID NO: 847409 - DNA, 15 bp, Homo sapiens
ccaccatactgtttt

SEQ ID NO: 847410 - DNA, 15 bp, Homo sapiens
caccatactgttttc

SEQ ID NO: 847411 - DNA, 15 bp, Homo sapiens
accatactgttttcc

SEQ ID NO: 847412 - DNA, 15 bp, Homo sapiens
catactgttttccac

SEQ ID NO: 847413 - DNA, 15 bp, Homo sapiens
atactgttttccaca

SEQ ID NO: 847414 - DNA, 15 bp, Homo sapiens
tactgttttccacag

SEQ ID NO: 847415 - DNA, 15 bp, Homo sapiens
actgttttccacagt

SEQ ID NO: 847416 - DNA, 15 bp, Homo sapiens
ctgttttccacagtg

SEQ ID NO: 847417 - DNA, 15 bp, Homo sapiens
tgttttccacagtgg

SEQ ID NO: 847418 - DNA, 15 bp, Homo sapiens
gttttccacagtggc

SEQ ID NO: 847419 - DNA, 15 bp, Homo sapiens
ttttccacagtggct

SEQ ID NO: 847420 - DNA, 15 bp, Homo sapiens
tttccacagtggctg

SEQ ID NO: 847421 - DNA, 15 bp, Homo sapiens
ttccacagtggctgt

SEQ ID NO: 847422 - DNA, 15 bp, Homo sapiens
tccacagtggctgtg

SEQ ID NO: 847423 - DNA, 15 bp, Homo sapiens
ccacagtggctgtgc

SEQ ID NO: 847424 - DNA, 15 bp, Homo sapiens
cacagtggctgtgcc

SEQ ID NO: 847425 - DNA, 15 bp, Homo sapiens
acagtggctgtgcca

SEQ ID NO: 847426 - DNA, 15 bp, Homo sapiens
cagtggctgtgccac

SEQ ID NO: 847427 - DNA, 15 bp, Homo sapiens
agtggctgtgccact

SEQ ID NO: 847428 - DNA, 15 bp, Homo sapiens
gtggctgtgccactt

SEQ ID NO: 847429 - DNA, 15 bp, Homo sapiens
tggctgtgccacttt

SEQ ID NO: 847430 - DNA, 15 bp, Homo sapiens
ggctgtgccacttta

SEQ ID NO: 847431 - DNA, 15 bp, Homo sapiens
gctgtgccactttac

SEQ ID NO: 847432 - DNA, 15 bp, Homo sapiens
ctgtgccactttaca

SEQ ID NO: 847433 - DNA, 15 bp, Homo sapiens
tgtgccactttacat

SEQ ID NO: 847434 - DNA, 15 bp, Homo sapiens
gtgccactttacatt

SEQ ID NO: 847435 - DNA, 15 bp, Homo sapiens
tgccactttacattc

SEQ ID NO: 847436 - DNA, 15 bp, Homo sapiens
gccactttacattcc

SEQ ID NO: 847437 - DNA, 15 bp, Homo sapiens
ccactttacattccc

SEQ ID NO: 847438 - DNA, 15 bp, Homo sapiens
cactttacattccca

SEQ ID NO: 847439 - DNA, 15 bp, Homo sapiens
actttacattcccac

SEQ ID NO: 847440 - DNA, 15 bp, Homo sapiens
ctttacattcccacc

SEQ ID NO: 847441 - DNA, 15 bp, Homo sapiens
acattcccaccaact

SEQ ID NO: 847442 - DNA, 15 bp, Homo sapiens
cattcccaccaacta

SEQ ID NO: 847443 - DNA, 15 bp, Homo sapiens
attcccaccaactac

SEQ ID NO: 847444 - DNA, 15 bp, Homo sapiens
ttcccaccaactaca

SEQ ID NO: 847445 - DNA, 15 bp, Homo sapiens
tcccaccaactacat

SEQ ID NO: 847446 - DNA, 15 bp, Homo sapiens
cccaccaactacata

SEQ ID NO: 847447 - DNA, 15 bp, Homo sapiens
ccaccaactacatac

SEQ ID NO: 847448 - DNA, 15 bp, Homo sapiens
caccaactacataca

SEQ ID NO: 847449 - DNA, 15 bp, Homo sapiens
accaactacatacat

SEQ ID NO: 847450 - DNA, 15 bp, Homo sapiens
ccaactacatacatt

SEQ ID NO: 847451 - DNA, 15 bp, Homo sapiens
caactacatacattg

SEQ ID NO: 847452 - DNA, 15 bp, Homo sapiens
aactacatacattgc

SEQ ID NO: 847453 - DNA, 15 bp, Homo sapiens
actacatacattgct

SEQ ID NO: 847454 - DNA, 15 bp, Homo sapiens
ctacatacattgctt

SEQ ID NO: 847455 - DNA, 15 bp, Homo sapiens
tacatacattgcttg

SEQ ID NO: 847456 - DNA, 15 bp, Homo sapiens
acatacattgcttga

SEQ ID NO: 847457 - DNA, 15 bp, Homo sapiens
catacattgcttgag

SEQ ID NO: 847458 - DNA, 15 bp, Homo sapiens
atacattgcttgaga

SEQ ID NO: 847459 - DNA, 15 bp, Homo sapiens
tacattgcttgagaa

SEQ ID NO: 847460 - DNA, 15 bp, Homo sapiens
acattgcttgagaat

SEQ ID NO: 847461 - DNA, 15 bp, Homo sapiens
cattgcttgagaata

SEQ ID NO: 847462 - DNA, 15 bp, Homo sapiens
attgcttgagaatat

SEQ ID NO: 847463 - DNA, 15 bp, Homo sapiens
ttgcttgagaatatg

SEQ ID NO: 847464 - DNA, 15 bp, Homo sapiens
tgcttgagaatatga

SEQ ID NO: 847465 - DNA, 15 bp, Homo sapiens
gcttgagaatatgac

SEQ ID NO: 847466 - DNA, 15 bp, Homo sapiens
cttgagaatatgaca

SEQ ID NO: 847467 - DNA, 15 bp, Homo sapiens
ttgagaatatgacag

SEQ ID NO: 847468 - DNA, 15 bp, Homo sapiens
tgagaatatgacagt

SEQ ID NO: 847469 - DNA, 15 bp, Homo sapiens
gagaatatgacagtg

SEQ ID NO: 847470 - DNA, 15 bp, Homo sapiens
agaatatgacagtgt

SEQ ID NO: 847471 - DNA, 15 bp, Homo sapiens
gaatatgacagtgta

SEQ ID NO: 847472 - DNA, 15 bp, Homo sapiens
aatatgacagtgtaa

SEQ ID NO: 847473 - DNA, 15 bp, Homo sapiens
atatgacagtgtaat

SEQ ID NO: 847474 - DNA, 15 bp, Homo sapiens
tatgacagtgtaatt

SEQ ID NO: 847475 - DNA, 15 bp, Homo sapiens
atgacagtgtaattc

SEQ ID NO: 847476 - DNA, 15 bp, Homo sapiens
tgacagtgtaattca

SEQ ID NO: 847477 - DNA, 15 bp, Homo sapiens
gacagtgtaattcaa

SEQ ID NO: 847478 - DNA, 15 bp, Homo sapiens
acagtgtaattcaat

SEQ ID NO: 847479 - DNA, 15 bp, Homo sapiens
cagtgtaattcaatt

SEQ ID NO: 847480 - DNA, 15 bp, Homo sapiens
agtgtaattcaatta

SEQ ID NO: 847481 - DNA, 15 bp, Homo sapiens
gtgtaattcaattag

SEQ ID NO: 847482 - DNA, 15 bp, Homo sapiens
tgtaattcaattagc

SEQ ID NO: 847483 - DNA, 15 bp, Homo sapiens
gtaattcaattagca

SEQ ID NO: 847484 - DNA, 15 bp, Homo sapiens
taattcaattagcaa

SEQ ID NO: 847485 - DNA, 15 bp, Homo sapiens
aattcaattagcaat

SEQ ID NO: 847486 - DNA, 15 bp, Homo sapiens
attcaattagcaatt

SEQ ID NO: 847487 - DNA, 15 bp, Homo sapiens
ttcaattagcaattt

SEQ ID NO: 847488 - DNA, 15 bp, Homo sapiens
tcaattagcaatttt

SEQ ID NO: 847489 - DNA, 15 bp, Homo sapiens
caattagcaatttta

SEQ ID NO: 847490 - DNA, 15 bp, Homo sapiens
aattagcaattttag

SEQ ID NO: 847491 - DNA, 15 bp, Homo sapiens
attagcaattttaga

SEQ ID NO: 847492 - DNA, 15 bp, Homo sapiens
ttagcaattttagac

SEQ ID NO: 847493 - DNA, 15 bp, Homo sapiens
tagcaattttagact

SEQ ID NO: 847494 - DNA, 15 bp, Homo sapiens
agcaattttagactc

SEQ ID NO: 847495 - DNA, 15 bp, Homo sapiens
gcaattttagactct

SEQ ID NO: 847496 - DNA, 15 bp, Homo sapiens
caattttagactctt

SEQ ID NO: 847497 - DNA, 15 bp, Homo sapiens
aattttagactcttt

SEQ ID NO: 847498 - DNA, 15 bp, Homo sapiens
attttagactctttt

SEQ ID NO: 847499 - DNA, 15 bp, Homo sapiens
ttttagactcttttt

SEQ ID NO: 847500 - DNA, 15 bp, Homo sapiens
tttagactcttttta

SEQ ID NO: 847501 - DNA, 15 bp, Homo sapiens
ttagactctttttaa

SEQ ID NO: 847502 - DNA, 15 bp, Homo sapiens
tagactctttttaaa

SEQ ID NO: 847503 - DNA, 15 bp, Homo sapiens
agactctttttaaag

SEQ ID NO: 847504 - DNA, 15 bp, Homo sapiens
gactctttttaaagt

SEQ ID NO: 847505 - DNA, 15 bp, Homo sapiens
actctttttaaagtg

SEQ ID NO: 847506 - DNA, 15 bp, Homo sapiens
ctctttttaaagtga

SEQ ID NO: 847507 - DNA, 15 bp, Homo sapiens
tctttttaaagtgaa

SEQ ID NO: 847508 - DNA, 15 bp, Homo sapiens
ctttttaaagtgaaa

SEQ ID NO: 847509 - DNA, 15 bp, Homo sapiens
tttttaaagtgaaat

SEQ ID NO: 847510 - DNA, 15 bp, Homo sapiens
ttttaaagtgaaatt

SEQ ID NO: 847511 - DNA, 15 bp, Homo sapiens
tttaaagtgaaattc

SEQ ID NO: 847512 - DNA, 15 bp, Homo sapiens
ttaaagtgaaattcc

SEQ ID NO: 847513 - DNA, 15 bp, Homo sapiens
taaagtgaaattcct

SEQ ID NO: 847514 - DNA, 15 bp, Homo sapiens
aaagtgaaattcctt

SEQ ID NO: 847515 - DNA, 15 bp, Homo sapiens
aagtgaaattccttt

SEQ ID NO: 847516 - DNA, 15 bp, Homo sapiens
agtgaaattccttta

SEQ ID NO: 847517 - DNA, 15 bp, Homo sapiens
gtgaaattcctttac

SEQ ID NO: 847518 - DNA, 15 bp, Homo sapiens
tgaaattcctttacc

SEQ ID NO: 847519 - DNA, 15 bp, Homo sapiens
gaaattcctttacca

SEQ ID NO: 847520 - DNA, 15 bp, Homo sapiens
aaattcctttaccag

SEQ ID NO: 847521 - DNA, 15 bp, Homo sapiens
aattcctttaccaga

SEQ ID NO: 847522 - DNA, 15 bp, Homo sapiens
attcctttaccagaa

SEQ ID NO: 847523 - DNA, 15 bp, Homo sapiens
ttcctttaccagaaa

SEQ ID NO: 847524 - DNA, 15 bp, Homo sapiens
tcctttaccagaaac

SEQ ID NO: 847525 - DNA, 15 bp, Homo sapiens
cctttaccagaaacc

SEQ ID NO: 847526 - DNA, 15 bp, Homo sapiens
ctttaccagaaacct

SEQ ID NO: 847527 - DNA, 15 bp, Homo sapiens
tttaccagaaacctc

SEQ ID NO: 847528 - DNA, 15 bp, Homo sapiens
ttaccagaaacctca

SEQ ID NO: 847529 - DNA, 15 bp, Homo sapiens
taccagaaacctcaa

SEQ ID NO: 847530 - DNA, 15 bp, Homo sapiens
accagaaacctcaaa

SEQ ID NO: 847531 - DNA, 15 bp, Homo sapiens
ccagaaacctcaaaa

SEQ ID NO: 847532 - DNA, 15 bp, Homo sapiens
cagaaacctcaaaaa

SEQ ID NO: 847533 - DNA, 15 bp, Homo sapiens
agaaacctcaaaaac

SEQ ID NO: 847534 - DNA, 15 bp, Homo sapiens
gaaacctcaaaaaca

SEQ ID NO: 847535 - DNA, 15 bp, Homo sapiens
aaacctcaaaaacat

SEQ ID NO: 847536 - DNA, 15 bp, Homo sapiens
aacctcaaaaacata

SEQ ID NO: 847537 - DNA, 15 bp, Homo sapiens
acctcaaaaacatat

SEQ ID NO: 847538 - DNA, 15 bp, Homo sapiens
cctcaaaaacatatt

SEQ ID NO: 847539 - DNA, 15 bp, Homo sapiens
ctcaaaaacatattg

SEQ ID NO: 847540 - DNA, 15 bp, Homo sapiens
tcaaaaacatattga

SEQ ID NO: 847541 - DNA, 15 bp, Homo sapiens
caaaaacatattgac

SEQ ID NO: 847542 - DNA, 15 bp, Homo sapiens
aaaaacatattgact

SEQ ID NO: 847543 - DNA, 15 bp, Homo sapiens
aaaacatattgacta

SEQ ID NO: 847544 - DNA, 15 bp, Homo sapiens
aaacatattgactat

SEQ ID NO: 847545 - DNA, 15 bp, Homo sapiens
aacatattgactatc

SEQ ID NO: 847546 - DNA, 15 bp, Homo sapiens
acatattgactatcc

SEQ ID NO: 847547 - DNA, 15 bp, Homo sapiens
catattgactatcca

SEQ ID NO: 847548 - DNA, 15 bp, Homo sapiens
atattgactatccat

SEQ ID NO: 847549 - DNA, 15 bp, Homo sapiens
tattgactatccata

SEQ ID NO: 847550 - DNA, 15 bp, Homo sapiens
attgactatccatat

SEQ ID NO: 847551 - DNA, 15 bp, Homo sapiens
ttgactatccatatg

SEQ ID NO: 847552 - DNA, 15 bp, Homo sapiens
tgactatccatatgg

SEQ ID NO: 847553 - DNA, 15 bp, Homo sapiens
gactatccatatgga

SEQ ID NO: 847554 - DNA, 15 bp, Homo sapiens
actatccatatggaa

SEQ ID NO: 847555 - DNA, 15 bp, Homo sapiens
ctatccatatggaaa

SEQ ID NO: 847556 - DNA, 15 bp, Homo sapiens
tatccatatggaaat

SEQ ID NO: 847557 - DNA, 15 bp, Homo sapiens
atccatatggaaata

SEQ ID NO: 847558 - DNA, 15 bp, Homo sapiens
tccatatggaaatag

SEQ ID NO: 847559 - DNA, 15 bp, Homo sapiens
ccatatggaaatagt

SEQ ID NO: 847560 - DNA, 15 bp, Homo sapiens
catatggaaatagtg

SEQ ID NO: 847561 - DNA, 15 bp, Homo sapiens
atatggaaatagtgt

SEQ ID NO: 847562 - DNA, 15 bp, Homo sapiens
tatggaaatagtgtt

SEQ ID NO: 847563 - DNA, 15 bp, Homo sapiens
atggaaatagtgtta

SEQ ID NO: 847564 - DNA, 15 bp, Homo sapiens
tggaaatagtgttaa

SEQ ID NO: 847565 - DNA, 15 bp, Homo sapiens
ggaaatagtgttaaa

SEQ ID NO: 847566 - DNA, 15 bp, Homo sapiens
gaaatagtgttaaag

SEQ ID NO: 847567 - DNA, 15 bp, Homo sapiens
aaatagtgttaaaga

SEQ ID NO: 847568 - DNA, 15 bp, Homo sapiens
aatagtgttaaagat

SEQ ID NO: 847569 - DNA, 15 bp, Homo sapiens
atagtgttaaagatg

SEQ ID NO: 847570 - DNA, 15 bp, Homo sapiens
tagtgttaaagatgt

SEQ ID NO: 847571 - DNA, 15 bp, Homo sapiens
agtgttaaagatgtg

SEQ ID NO: 847572 - DNA, 15 bp, Homo sapiens
gtgttaaagatgtgg

SEQ ID NO: 847573 - DNA, 15 bp, Homo sapiens
tgttaaagatgtgga

SEQ ID NO: 847574 - DNA, 15 bp, Homo sapiens
gttaaagatgtggaa

SEQ ID NO: 847575 - DNA, 15 bp, Homo sapiens
ttaaagatgtggaaa

SEQ ID NO: 847576 - DNA, 15 bp, Homo sapiens
taaagatgtggaaat

SEQ ID NO: 847577 - DNA, 15 bp, Homo sapiens
aaagatgtggaaatc

SEQ ID NO: 847578 - DNA, 15 bp, Homo sapiens
aagatgtggaaatct

SEQ ID NO: 847579 - DNA, 15 bp, Homo sapiens
agatgtggaaatctt

SEQ ID NO: 847580 - DNA, 15 bp, Homo sapiens
gatgtggaaatctta

SEQ ID NO: 847581 - DNA, 15 bp, Homo sapiens
atgtggaaatcttaa

SEQ ID NO: 847582 - DNA, 15 bp, Homo sapiens
tgtggaaatcttaaa

SEQ ID NO: 847583 - DNA, 15 bp, Homo sapiens
gtggaaatcttaaac

SEQ ID NO: 847584 - DNA, 15 bp, Homo sapiens
tggaaatcttaaaca

SEQ ID NO: 847585 - DNA, 15 bp, Homo sapiens
ggaaatcttaaacag

SEQ ID NO: 847586 - DNA, 15 bp, Homo sapiens
gaaatcttaaacaga

SEQ ID NO: 847587 - DNA, 15 bp, Homo sapiens
aaatcttaaacagat

SEQ ID NO: 847588 - DNA, 15 bp, Homo sapiens
aatcttaaacagatg

SEQ ID NO: 847589 - DNA, 15 bp, Homo sapiens
atcttaaacagatgg

SEQ ID NO: 847590 - DNA, 15 bp, Homo sapiens
tcttaaacagatggc

SEQ ID NO: 847591 - DNA, 15 bp, Homo sapiens
cttaaacagatggca

SEQ ID NO: 847592 - DNA, 15 bp, Homo sapiens
ttaaacagatggcaa

SEQ ID NO: 847593 - DNA, 15 bp, Homo sapiens
taaacagatggcaat

SEQ ID NO: 847594 - DNA, 15 bp, Homo sapiens
aaacagatggcaatg

SEQ ID NO: 847595 - DNA, 15 bp, Homo sapiens
aacagatggcaatgg

SEQ ID NO: 847596 - DNA, 15 bp, Homo sapiens
acagatggcaatggc

SEQ ID NO: 847597 - DNA, 15 bp, Homo sapiens
cagatggcaatggca

SEQ ID NO: 847598 - DNA, 15 bp, Homo sapiens
agatggcaatggcaa

SEQ ID NO: 847599 - DNA, 15 bp, Homo sapiens
gatggcaatggcaac

SEQ ID NO: 847600 - DNA, 15 bp, Homo sapiens
atggcaatggcaacg

SEQ ID NO: 847601 - DNA, 15 bp, Homo sapiens
tggcaatggcaacgg

SEQ ID NO: 847602 - DNA, 15 bp, Homo sapiens
ggcaatggcaacgga

SEQ ID NO: 847603 - DNA, 15 bp, Homo sapiens
gcaatggcaacggat

SEQ ID NO: 847604 - DNA, 15 bp, Homo sapiens
caatggcaacggatt

SEQ ID NO: 847605 - DNA, 15 bp, Homo sapiens
aatggcaacggattt

SEQ ID NO: 847606 - DNA, 15 bp, Homo sapiens
atggcaacggattta

SEQ ID NO: 847607 - DNA, 15 bp, Homo sapiens
tggcaacggatttaa

SEQ ID NO: 847608 - DNA, 15 bp, Homo sapiens
ggcaacggatttaaa

SEQ ID NO: 847609 - DNA, 15 bp, Homo sapiens
gcaacggatttaaat

SEQ ID NO: 847610 - DNA, 15 bp, Homo sapiens
caacggatttaaatg

SEQ ID NO: 847611 - DNA, 15 bp, Homo sapiens
aacggatttaaatgc

SEQ ID NO: 847612 - DNA, 15 bp, Homo sapiens
acggatttaaatgct

SEQ ID NO: 847613 - DNA, 15 bp, Homo sapiens
cggatttaaatgctc

SEQ ID NO: 847614 - DNA, 15 bp, Homo sapiens
ggatttaaatgctcc

SEQ ID NO: 847615 - DNA, 15 bp, Homo sapiens
gatttaaatgctcca

SEQ ID NO: 847616 - DNA, 15 bp, Homo sapiens
atttaaatgctccag

SEQ ID NO: 847617 - DNA, 15 bp, Homo sapiens
tttaaatgctccagc

SEQ ID NO: 847618 - DNA, 15 bp, Homo sapiens
ttaaatgctccagca

SEQ ID NO: 847619 - DNA, 15 bp, Homo sapiens
taaatgctccagcat

SEQ ID NO: 847620 - DNA, 15 bp, Homo sapiens
aaatgctccagcatt

SEQ ID NO: 847621 - DNA, 15 bp, Homo sapiens
aatgctccagcattt

SEQ ID NO: 847622 - DNA, 15 bp, Homo sapiens
atgctccagcattta

SEQ ID NO: 847623 - DNA, 15 bp, Homo sapiens
tgctccagcatttat

SEQ ID NO: 847624 - DNA, 15 bp, Homo sapiens
gctccagcatttatt

SEQ ID NO: 847625 - DNA, 15 bp, Homo sapiens
ctccagcatttattc

SEQ ID NO: 847626 - DNA, 15 bp, Homo sapiens
tccagcatttattca

SEQ ID NO: 847627 - DNA, 15 bp, Homo sapiens
ccagcatttattcag

SEQ ID NO: 847628 - DNA, 15 bp, Homo sapiens
cagcatttattcagt

SEQ ID NO: 847629 - DNA, 15 bp, Homo sapiens
agcatttattcagtt

SEQ ID NO: 847630 - DNA, 15 bp, Homo sapiens
gcatttattcagttg

SEQ ID NO: 847631 - DNA, 15 bp, Homo sapiens
catttattcagttga

SEQ ID NO: 847632 - DNA, 15 bp, Homo sapiens
atttattcagttgat

SEQ ID NO: 847633 - DNA, 15 bp, Homo sapiens
tttattcagttgatt

SEQ ID NO: 847634 - DNA, 15 bp, Homo sapiens
ttattcagttgattc

SEQ ID NO: 847635 - DNA, 15 bp, Homo sapiens
tattcagttgattcg

SEQ ID NO: 847636 - DNA, 15 bp, Homo sapiens
attcagttgattcga

SEQ ID NO: 847637 - DNA, 15 bp, Homo sapiens
ttcagttgattcgat

SEQ ID NO: 847638 - DNA, 15 bp, Homo sapiens
tcagttgattcgatg

SEQ ID NO: 847639 - DNA, 15 bp, Homo sapiens
cagttgattcgatgc

SEQ ID NO: 847640 - DNA, 15 bp, Homo sapiens
agttgattcgatgct

SEQ ID NO: 847641 - DNA, 15 bp, Homo sapiens
gttgattcgatgcta

SEQ ID NO: 847642 - DNA, 15 bp, Homo sapiens
ttgattcgatgctac

SEQ ID NO: 847643 - DNA, 15 bp, Homo sapiens
tgattcgatgctact

SEQ ID NO: 847644 - DNA, 15 bp, Homo sapiens
gattcgatgctacta

SEQ ID NO: 847645 - DNA, 15 bp, Homo sapiens
attcgatgctactag

SEQ ID NO: 847646 - DNA, 15 bp, Homo sapiens
ttcgatgctactagg

SEQ ID NO: 847647 - DNA, 15 bp, Homo sapiens
tcgatgctactaggt

SEQ ID NO: 847648 - DNA, 15 bp, Homo sapiens
cgatgctactaggtc

SEQ ID NO: 847649 - DNA, 15 bp, Homo sapiens
gatgctactaggtct

SEQ ID NO: 847650 - DNA, 15 bp, Homo sapiens
atgctactaggtcta

SEQ ID NO: 847651 - DNA, 15 bp, Homo sapiens
tgctactaggtctag

SEQ ID NO: 847652 - DNA, 15 bp, Homo sapiens
gctactaggtctagt

SEQ ID NO: 847653 - DNA, 15 bp, Homo sapiens
ctactaggtctagtg

SEQ ID NO: 847654 - DNA, 15 bp, Homo sapiens
tactaggtctagtgt

SEQ ID NO: 847655 - DNA, 15 bp, Homo sapiens
actaggtctagtgtg

SEQ ID NO: 847656 - DNA, 15 bp, Homo sapiens
ctaggtctagtgtgt

SEQ ID NO: 847657 - DNA, 15 bp, Homo sapiens
taggtctagtgtgta

SEQ ID NO: 847658 - DNA, 15 bp, Homo sapiens
aggtctagtgtgtag

SEQ ID NO: 847659 - DNA, 15 bp, Homo sapiens
ggtctagtgtgtaga

SEQ ID NO: 847660 - DNA, 15 bp, Homo sapiens
gtctagtgtgtagag

SEQ ID NO: 847661 - DNA, 15 bp, Homo sapiens
tctagtgtgtagaga

SEQ ID NO: 847662 - DNA, 15 bp, Homo sapiens
ctagtgtgtagagac

SEQ ID NO: 847663 - DNA, 15 bp, Homo sapiens
tagtgtgtagagact

SEQ ID NO: 847664 - DNA, 15 bp, Homo sapiens
agtgtgtagagacta

SEQ ID NO: 847665 - DNA, 15 bp, Homo sapiens
gtgtgtagagactat

SEQ ID NO: 847666 - DNA, 15 bp, Homo sapiens
tgtgtagagactatc

SEQ ID NO: 847667 - DNA, 15 bp, Homo sapiens
gtgtagagactatcc

SEQ ID NO: 847668 - DNA, 15 bp, Homo sapiens
tgtagagactatccg

SEQ ID NO: 847669 - DNA, 15 bp, Homo sapiens
gtagagactatccgc

SEQ ID NO: 847670 - DNA, 15 bp, Homo sapiens
tagagactatccgca

SEQ ID NO: 847671 - DNA, 15 bp, Homo sapiens
agagactatccgcag

SEQ ID NO: 847672 - DNA, 15 bp, Homo sapiens
gagactatccgcagg

SEQ ID NO: 847673 - DNA, 15 bp, Homo sapiens
agactatccgcaggt

SEQ ID NO: 847674 - DNA, 15 bp, Homo sapiens
gactatccgcaggtc

SEQ ID NO: 847675 - DNA, 15 bp, Homo sapiens
actatccgcaggtct

SEQ ID NO: 847676 - DNA, 15 bp, Homo sapiens
ctatccgcaggtcta

SEQ ID NO: 847677 - DNA, 15 bp, Homo sapiens
tatccgcaggtctac

SEQ ID NO: 847678 - DNA, 15 bp, Homo sapiens
atccgcaggtctaca

SEQ ID NO: 847679 - DNA, 15 bp, Homo sapiens
tccgcaggtctacac

SEQ ID NO: 847680 - DNA, 15 bp, Homo sapiens
ccgcaggtctacaca

SEQ ID NO: 847681 - DNA, 15 bp, Homo sapiens
cgcaggtctacacaa

SEQ ID NO: 847682 - DNA, 15 bp, Homo sapiens
gcaggtctacacaag

SEQ ID NO: 847683 - DNA, 15 bp, Homo sapiens
caggtctacacaagg

SEQ ID NO: 847684 - DNA, 15 bp, Homo sapiens
aggtctacacaagga

SEQ ID NO: 847685 - DNA, 15 bp, Homo sapiens
ggtctacacaaggat

SEQ ID NO: 847686 - DNA, 15 bp, Homo sapiens
gtctacacaaggatg

SEQ ID NO: 847687 - DNA, 15 bp, Homo sapiens
tctacacaaggatgt

SEQ ID NO: 847688 - DNA, 15 bp, Homo sapiens
ctacacaaggatgtg

SEQ ID NO: 847689 - DNA, 15 bp, Homo sapiens
tacacaaggatgtgg

SEQ ID NO: 847690 - DNA, 15 bp, Homo sapiens
acacaaggatgtgga

SEQ ID NO: 847691 - DNA, 15 bp, Homo sapiens
cacaaggatgtggaa

SEQ ID NO: 847692 - DNA, 15 bp, Homo sapiens
acaaggatgtggaag

SEQ ID NO: 847693 - DNA, 15 bp, Homo sapiens
caaggatgtggaaga

SEQ ID NO: 847694 - DNA, 15 bp, Homo sapiens
aaggatgtggaagag

SEQ ID NO: 847695 - DNA, 15 bp, Homo sapiens
aggatgtggaagagg

SEQ ID NO: 847696 - DNA, 15 bp, Homo sapiens
ggatgtggaagaggc

SEQ ID NO: 847697 - DNA, 15 bp, Homo sapiens
gatgtggaagaggca

SEQ ID NO: 847698 - DNA, 15 bp, Homo sapiens
atgtggaagaggcat

SEQ ID NO: 847699 - DNA, 15 bp, Homo sapiens
tgtggaagaggcatt

SEQ ID NO: 847700 - DNA, 15 bp, Homo sapiens
gtggaagaggcattt

SEQ ID NO: 847701 - DNA, 15 bp, Homo sapiens
tggaagaggcatttt

SEQ ID NO: 847702 - DNA, 15 bp, Homo sapiens
ggaagaggcattttg

SEQ ID NO: 847703 - DNA, 15 bp, Homo sapiens
gaagaggcattttgt

SEQ ID NO: 847704 - DNA, 15 bp, Homo sapiens
aagaggcattttgtt

SEQ ID NO: 847705 - DNA, 15 bp, Homo sapiens
agaggcattttgttt

SEQ ID NO: 847706 - DNA, 15 bp, Homo sapiens
gaggcattttgtttt

SEQ ID NO: 847707 - DNA, 15 bp, Homo sapiens
aggcattttgttttc

SEQ ID NO: 847708 - DNA, 15 bp, Homo sapiens
ggcattttgttttct

SEQ ID NO: 847709 - DNA, 15 bp, Homo sapiens
gcattttgttttcta

SEQ ID NO: 847710 - DNA, 15 bp, Homo sapiens
cattttgttttctag

SEQ ID NO: 847711 - DNA, 15 bp, Homo sapiens
attttgttttctaga

SEQ ID NO: 847712 - DNA, 15 bp, Homo sapiens
ttttgttttctagaa

SEQ ID NO: 847713 - DNA, 15 bp, Homo sapiens
tttgttttctagaac

SEQ ID NO: 847714 - DNA, 15 bp, Homo sapiens
ttgttttctagaaca

SEQ ID NO: 847715 - DNA, 15 bp, Homo sapiens
tgttttctagaacat

SEQ ID NO: 847716 - DNA, 15 bp, Homo sapiens
gttttctagaacatt

SEQ ID NO: 847717 - DNA, 15 bp, Homo sapiens
ttttctagaacattc

SEQ ID NO: 847718 - DNA, 15 bp, Homo sapiens
tttctagaacattct

SEQ ID NO: 847719 - DNA, 15 bp, Homo sapiens
ttctagaacattctg

SEQ ID NO: 847720 - DNA, 15 bp, Homo sapiens
tctagaacattctgt

SEQ ID NO: 847721 - DNA, 15 bp, Homo sapiens
ctagaacattctgta

SEQ ID NO: 847722 - DNA, 15 bp, Homo sapiens
tagaacattctgtac

SEQ ID NO: 847723 - DNA, 15 bp, Homo sapiens
agaacattctgtact

SEQ ID NO: 847724 - DNA, 15 bp, Homo sapiens
gaacattctgtactt

SEQ ID NO: 847725 - DNA, 15 bp, Homo sapiens
aacattctgtacttt

SEQ ID NO: 847726 - DNA, 15 bp, Homo sapiens
acattctgtactttt

SEQ ID NO: 847727 - DNA, 15 bp, Homo sapiens
cattctgtacttttt

SEQ ID NO: 847728 - DNA, 15 bp, Homo sapiens
attctgtactttttt

SEQ ID NO: 847729 - DNA, 15 bp, Homo sapiens
ttctgtacttttttc

SEQ ID NO: 847730 - DNA, 15 bp, Homo sapiens
tctgtacttttttcc

SEQ ID NO: 847731 - DNA, 15 bp, Homo sapiens
ctgtacttttttcca

SEQ ID NO: 847732 - DNA, 15 bp, Homo sapiens
tgtacttttttccag

SEQ ID NO: 847733 - DNA, 15 bp, Homo sapiens
gtacttttttccagt

SEQ ID NO: 847734 - DNA, 15 bp, Homo sapiens
tacttttttccagtt

SEQ ID NO: 847735 - DNA, 15 bp, Homo sapiens
acttttttccagtta

SEQ ID NO: 847736 - DNA, 15 bp, Homo sapiens
cttttttccagttat

SEQ ID NO: 847737 - DNA, 15 bp, Homo sapiens
ttttttccagttata

SEQ ID NO: 847738 - DNA, 15 bp, Homo sapiens
tttttccagttatac

SEQ ID NO: 847739 - DNA, 15 bp, Homo sapiens
ttttccagttatacg

SEQ ID NO: 847740 - DNA, 15 bp, Homo sapiens
tttccagttatacga

SEQ ID NO: 847741 - DNA, 15 bp, Homo sapiens
ttccagttatacgac

SEQ ID NO: 847742 - DNA, 15 bp, Homo sapiens
tccagttatacgact

SEQ ID NO: 847743 - DNA, 15 bp, Homo sapiens
ccagttatacgactt

SEQ ID NO: 847744 - DNA, 15 bp, Homo sapiens
cagttatacgacttt

SEQ ID NO: 847745 - DNA, 15 bp, Homo sapiens
agttatacgactttc

SEQ ID NO: 847746 - DNA, 15 bp, Homo sapiens
gttatacgactttca

SEQ ID NO: 847747 - DNA, 15 bp, Homo sapiens
ttatacgactttcag

SEQ ID NO: 847748 - DNA, 15 bp, Homo sapiens
tatacgactttcagt

SEQ ID NO: 847749 - DNA, 15 bp, Homo sapiens
atacgactttcagtc

SEQ ID NO: 847750 - DNA, 15 bp, Homo sapiens
tacgactttcagtcc

SEQ ID NO: 847751 - DNA, 15 bp, Homo sapiens
acgactttcagtcct

SEQ ID NO: 847752 - DNA, 15 bp, Homo sapiens
cgactttcagtcctc

SEQ ID NO: 847753 - DNA, 15 bp, Homo sapiens
gactttcagtcctca

SEQ ID NO: 847754 - DNA, 15 bp, Homo sapiens
ctttcagtcctcaag

SEQ ID NO: 847755 - DNA, 15 bp, Homo sapiens
tttcagtcctcaagc

SEQ ID NO: 847756 - DNA, 15 bp, Homo sapiens
ttcagtcctcaagca

SEQ ID NO: 847757 - DNA, 15 bp, Homo sapiens
tcagtcctcaagcat

SEQ ID NO: 847758 - DNA, 15 bp, Homo sapiens
cagtcctcaagcatt

SEQ ID NO: 847759 - DNA, 15 bp, Homo sapiens
agtcctcaagcattt

SEQ ID NO: 847760 - DNA, 15 bp, Homo sapiens
gtcctcaagcatttt

SEQ ID NO: 847761 - DNA, 15 bp, Homo sapiens
tcctcaagcattttg

SEQ ID NO: 847762 - DNA, 15 bp, Homo sapiens
cctcaagcattttga

SEQ ID NO: 847763 - DNA, 15 bp, Homo sapiens
ctcaagcattttgat

SEQ ID NO: 847764 - DNA, 15 bp, Homo sapiens
tcaagcattttgatt

SEQ ID NO: 847765 - DNA, 15 bp, Homo sapiens
caagcattttgatta

SEQ ID NO: 847766 - DNA, 15 bp, Homo sapiens
aagcattttgattag

SEQ ID NO: 847767 - DNA, 15 bp, Homo sapiens
agcattttgattagc

SEQ ID NO: 847768 - DNA, 15 bp, Homo sapiens
gcattttgattagcc

SEQ ID NO: 847769 - DNA, 15 bp, Homo sapiens
cattttgattagcca

SEQ ID NO: 847770 - DNA, 15 bp, Homo sapiens
attttgattagccac

SEQ ID NO: 847771 - DNA, 15 bp, Homo sapiens
ttttgattagccaca

SEQ ID NO: 847772 - DNA, 15 bp, Homo sapiens
tttgattagccacag

SEQ ID NO: 847773 - DNA, 15 bp, Homo sapiens
ttgattagccacaga

SEQ ID NO: 847774 - DNA, 15 bp, Homo sapiens
tgattagccacagag

SEQ ID NO: 847775 - DNA, 15 bp, Homo sapiens
gattagccacagagg

SEQ ID NO: 847776 - DNA, 15 bp, Homo sapiens
attagccacagaggc

SEQ ID NO: 847777 - DNA, 15 bp, Homo sapiens
ttagccacagaggca

SEQ ID NO: 847778 - DNA, 15 bp, Homo sapiens
tagccacagaggcaa

SEQ ID NO: 847779 - DNA, 15 bp, Homo sapiens
agccacagaggcaaa

SEQ ID NO: 847780 - DNA, 15 bp, Homo sapiens
gccacagaggcaaac

SEQ ID NO: 847781 - DNA, 15 bp, Homo sapiens
ccacagaggcaaact

SEQ ID NO: 847782 - DNA, 15 bp, Homo sapiens
cacagaggcaaactt

SEQ ID NO: 847783 - DNA, 15 bp, Homo sapiens
acagaggcaaacttg

SEQ ID NO: 847784 - DNA, 15 bp, Homo sapiens
cagaggcaaacttgc

SEQ ID NO: 847785 - DNA, 15 bp, Homo sapiens
agaggcaaacttgca

SEQ ID NO: 847786 - DNA, 15 bp, Homo sapiens
gaggcaaacttgcag

SEQ ID NO: 847787 - DNA, 15 bp, Homo sapiens
aggcaaacttgcagg

SEQ ID NO: 847788 - DNA, 15 bp, Homo sapiens
ggcaaacttgcagga

SEQ ID NO: 847789 - DNA, 15 bp, Homo sapiens
gcaaacttgcaggaa

SEQ ID NO: 847790 - DNA, 15 bp, Homo sapiens
caaacttgcaggaaa

SEQ ID NO: 847791 - DNA, 15 bp, Homo sapiens
aaacttgcaggaaaa

SEQ ID NO: 847792 - DNA, 15 bp, Homo sapiens
aacttgcaggaaaaa

SEQ ID NO: 847793 - DNA, 15 bp, Homo sapiens
acttgcaggaaaaaa

SEQ ID NO: 847794 - DNA, 15 bp, Homo sapiens
cttgcaggaaaaaag

SEQ ID NO: 847795 - DNA, 15 bp, Homo sapiens
ttgcaggaaaaaaga

SEQ ID NO: 847796 - DNA, 15 bp, Homo sapiens
tgcaggaaaaaagat

SEQ ID NO: 847797 - DNA, 15 bp, Homo sapiens
gcaggaaaaaagata

SEQ ID NO: 847798 - DNA, 15 bp, Homo sapiens
caggaaaaaagatat

SEQ ID NO: 847799 - DNA, 15 bp, Homo sapiens
aggaaaaaagatatg

SEQ ID NO: 847800 - DNA, 15 bp, Homo sapiens
ggaaaaaagatatgg

SEQ ID NO: 847801 - DNA, 15 bp, Homo sapiens
gaaaaaagatatgga

SEQ ID NO: 847802 - DNA, 15 bp, Homo sapiens
aaaaaagatatggaa

SEQ ID NO: 847803 - DNA, 15 bp, Homo sapiens
aaaaagatatggaaa

SEQ ID NO: 847804 - DNA, 15 bp, Homo sapiens
aaaagatatggaaaa

SEQ ID NO: 847805 - DNA, 15 bp, Homo sapiens
aaagatatggaaaaa

SEQ ID NO: 847806 - DNA, 15 bp, Homo sapiens
aagatatggaaaaat

SEQ ID NO: 847807 - DNA, 15 bp, Homo sapiens
agatatggaaaaatc

SEQ ID NO: 847808 - DNA, 15 bp, Homo sapiens
gatatggaaaaatca

SEQ ID NO: 847809 - DNA, 15 bp, Homo sapiens
atatggaaaaatcag

SEQ ID NO: 847810 - DNA, 15 bp, Homo sapiens
tatggaaaaatcagt

SEQ ID NO: 847811 - DNA, 15 bp, Homo sapiens
atggaaaaatcagta

SEQ ID NO: 847812 - DNA, 15 bp, Homo sapiens
tggaaaaatcagtaa

SEQ ID NO: 847813 - DNA, 15 bp, Homo sapiens
ggaaaaatcagtaaa

SEQ ID NO: 847814 - DNA, 15 bp, Homo sapiens
gaaaaatcagtaaaa

SEQ ID NO: 847815 - DNA, 15 bp, Homo sapiens
aaaaatcagtaaaag

SEQ ID NO: 847816 - DNA, 15 bp, Homo sapiens
aaaatcagtaaaagt

SEQ ID NO: 847817 - DNA, 15 bp, Homo sapiens
aaatcagtaaaagtc

SEQ ID NO: 847818 - DNA, 15 bp, Homo sapiens
aatcagtaaaagtca

SEQ ID NO: 847819 - DNA, 15 bp, Homo sapiens
atcagtaaaagtcag

SEQ ID NO: 847820 - DNA, 15 bp, Homo sapiens
tcagtaaaagtcaga

SEQ ID NO: 847821 - DNA, 15 bp, Homo sapiens
cagtaaaagtcagat

SEQ ID NO: 847822 - DNA, 15 bp, Homo sapiens
agtaaaagtcagata

SEQ ID NO: 847823 - DNA, 15 bp, Homo sapiens
gtaaaagtcagatat

SEQ ID NO: 847824 - DNA, 15 bp, Homo sapiens
taaaagtcagatata

SEQ ID NO: 847825 - DNA, 15 bp, Homo sapiens
aaaagtcagatatat

SEQ ID NO: 847826 - DNA, 15 bp, Homo sapiens
aaagtcagatatatg

SEQ ID NO: 847827 - DNA, 15 bp, Homo sapiens
aagtcagatatatgt

SEQ ID NO: 847828 - DNA, 15 bp, Homo sapiens
agtcagatatatgtg

SEQ ID NO: 847829 - DNA, 15 bp, Homo sapiens
gtcagatatatgtgg

SEQ ID NO: 847830 - DNA, 15 bp, Homo sapiens
tcagatatatgtggt

SEQ ID NO: 847831 - DNA, 15 bp, Homo sapiens
cagatatatgtggtc

SEQ ID NO: 847832 - DNA, 15 bp, Homo sapiens
agatatatgtggtca

SEQ ID NO: 847833 - DNA, 15 bp, Homo sapiens
gatatatgtggtcag

SEQ ID NO: 847834 - DNA, 15 bp, Homo sapiens
atatatgtggtcagg

SEQ ID NO: 847835 - DNA, 15 bp, Homo sapiens
tatatgtggtcaggt

SEQ ID NO: 847836 - DNA, 15 bp, Homo sapiens
atatgtggtcaggta

SEQ ID NO: 847837 - DNA, 15 bp, Homo sapiens
tatgtggtcaggtat

SEQ ID NO: 847838 - DNA, 15 bp, Homo sapiens
atgtggtcaggtata

SEQ ID NO: 847839 - DNA, 15 bp, Homo sapiens
tgtggtcaggtatat

SEQ ID NO: 847840 - DNA, 15 bp, Homo sapiens
gtggtcaggtatatc

SEQ ID NO: 847841 - DNA, 15 bp, Homo sapiens
tggtcaggtatatca

SEQ ID NO: 847842 - DNA, 15 bp, Homo sapiens
ggtcaggtatatcat

SEQ ID NO: 847843 - DNA, 15 bp, Homo sapiens
gtcaggtatatcata

SEQ ID NO: 847844 - DNA, 15 bp, Homo sapiens
tcaggtatatcatag

SEQ ID NO: 847845 - DNA, 15 bp, Homo sapiens
caggtatatcatagt

SEQ ID NO: 847846 - DNA, 15 bp, Homo sapiens
aggtatatcatagtc

SEQ ID NO: 847847 - DNA, 15 bp, Homo sapiens
ggtatatcatagtca

SEQ ID NO: 847848 - DNA, 15 bp, Homo sapiens
gtatatcatagtcag

SEQ ID NO: 847849 - DNA, 15 bp, Homo sapiens
tatatcatagtcaga

SEQ ID NO: 847850 - DNA, 15 bp, Homo sapiens
atatcatagtcagat

SEQ ID NO: 847851 - DNA, 15 bp, Homo sapiens
tatcatagtcagata

SEQ ID NO: 847852 - DNA, 15 bp, Homo sapiens
atcatagtcagatac

SEQ ID NO: 847853 - DNA, 15 bp, Homo sapiens
tcatagtcagataca

SEQ ID NO: 847854 - DNA, 15 bp, Homo sapiens
catagtcagatacat

SEQ ID NO: 847855 - DNA, 15 bp, Homo sapiens
atagtcagatacatc

SEQ ID NO: 847856 - DNA, 15 bp, Homo sapiens
tagtcagatacatct

SEQ ID NO: 847857 - DNA, 15 bp, Homo sapiens
agtcagatacatctg

SEQ ID NO: 847858 - DNA, 15 bp, Homo sapiens
gtcagatacatctgg

SEQ ID NO: 847859 - DNA, 15 bp, Homo sapiens
tcagatacatctggt

SEQ ID NO: 847860 - DNA, 15 bp, Homo sapiens
cagatacatctggtg

SEQ ID NO: 847861 - DNA, 15 bp, Homo sapiens
agatacatctggtgc

SEQ ID NO: 847862 - DNA, 15 bp, Homo sapiens
gatacatctggtgct

SEQ ID NO: 847863 - DNA, 15 bp, Homo sapiens
atacatctggtgctt

SEQ ID NO: 847864 - DNA, 15 bp, Homo sapiens
tacatctggtgcttt

SEQ ID NO: 847865 - DNA, 15 bp, Homo sapiens
acatctggtgctttc

SEQ ID NO: 847866 - DNA, 15 bp, Homo sapiens
catctggtgctttct

SEQ ID NO: 847867 - DNA, 15 bp, Homo sapiens
atctggtgctttctc

SEQ ID NO: 847868 - DNA, 15 bp, Homo sapiens
tctggtgctttctct

SEQ ID NO: 847869 - DNA, 15 bp, Homo sapiens
ctggtgctttctcta

SEQ ID NO: 847870 - DNA, 15 bp, Homo sapiens
tggtgctttctctag

SEQ ID NO: 847871 - DNA, 15 bp, Homo sapiens
ggtgctttctctagc

SEQ ID NO: 847872 - DNA, 15 bp, Homo sapiens
gtgctttctctagca

SEQ ID NO: 847873 - DNA, 15 bp, Homo sapiens
tgctttctctagcaa

SEQ ID NO: 847874 - DNA, 15 bp, Homo sapiens
gctttctctagcaaa

SEQ ID NO: 847875 - DNA, 15 bp, Homo sapiens
ctttctctagcaaag

SEQ ID NO: 847876 - DNA, 15 bp, Homo sapiens
tttctctagcaaaga

SEQ ID NO: 847877 - DNA, 15 bp, Homo sapiens
ttctctagcaaagag

SEQ ID NO: 847878 - DNA, 15 bp, Homo sapiens
tctctagcaaagaga

SEQ ID NO: 847879 - DNA, 15 bp, Homo sapiens
ctctagcaaagagaa

SEQ ID NO: 847880 - DNA, 15 bp, Homo sapiens
tctagcaaagagaaa

SEQ ID NO: 847881 - DNA, 15 bp, Homo sapiens
ctagcaaagagaaaa

SEQ ID NO: 847882 - DNA, 15 bp, Homo sapiens
tagcaaagagaaaaa

SEQ ID NO: 847883 - DNA, 15 bp, Homo sapiens
agcaaagagaaaaat

SEQ ID NO: 847884 - DNA, 15 bp, Homo sapiens
gcaaagagaaaaata

SEQ ID NO: 847885 - DNA, 15 bp, Homo sapiens
caaagagaaaaatat

SEQ ID NO: 847886 - DNA, 15 bp, Homo sapiens
aaagagaaaaatatg

SEQ ID NO: 847887 - DNA, 15 bp, Homo sapiens
aagagaaaaatatgg

SEQ ID NO: 847888 - DNA, 15 bp, Homo sapiens
agagaaaaatatggg

SEQ ID NO: 847889 - DNA, 15 bp, Homo sapiens
gagaaaaatatgggg

SEQ ID NO: 847890 - DNA, 15 bp, Homo sapiens
agaaaaatatgggga

SEQ ID NO: 847891 - DNA, 15 bp, Homo sapiens
gaaaaatatggggaa

SEQ ID NO: 847892 - DNA, 15 bp, Homo sapiens
aaaaatatggggaag

SEQ ID NO: 847893 - DNA, 15 bp, Homo sapiens
aaaatatggggaagt

SEQ ID NO: 847894 - DNA, 15 bp, Homo sapiens
aaatatggggaagta

SEQ ID NO: 847895 - DNA, 15 bp, Homo sapiens
aatatggggaagtaa

SEQ ID NO: 847896 - DNA, 15 bp, Homo sapiens
atatggggaagtaaa

SEQ ID NO: 847897 - DNA, 15 bp, Homo sapiens
tatggggaagtaaat

SEQ ID NO: 847898 - DNA, 15 bp, Homo sapiens
atggggaagtaaata

SEQ ID NO: 847899 - DNA, 15 bp, Homo sapiens
tggggaagtaaatac

SEQ ID NO: 847900 - DNA, 15 bp, Homo sapiens
ggggaagtaaatacc

SEQ ID NO: 847901 - DNA, 15 bp, Homo sapiens
gggaagtaaatacca

SEQ ID NO: 847902 - DNA, 15 bp, Homo sapiens
ggaagtaaataccag

SEQ ID NO: 847903 - DNA, 15 bp, Homo sapiens
gaagtaaataccagt

SEQ ID NO: 847904 - DNA, 15 bp, Homo sapiens
aagtaaataccagtt

SEQ ID NO: 847905 - DNA, 15 bp, Homo sapiens
agtaaataccagttt

SEQ ID NO: 847906 - DNA, 15 bp, Homo sapiens
gtaaataccagtttt

SEQ ID NO: 847907 - DNA, 15 bp, Homo sapiens
taaataccagttttg

SEQ ID NO: 847908 - DNA, 15 bp, Homo sapiens
aaataccagttttga

SEQ ID NO: 847909 - DNA, 15 bp, Homo sapiens
aataccagttttgat

SEQ ID NO: 847910 - DNA, 15 bp, Homo sapiens
ataccagttttgatt

SEQ ID NO: 847911 - DNA, 15 bp, Homo sapiens
taccagttttgattt

SEQ ID NO: 847912 - DNA, 15 bp, Homo sapiens
accagttttgattta

SEQ ID NO: 847913 - DNA, 15 bp, Homo sapiens
ccagttttgatttaa

SEQ ID NO: 847914 - DNA, 15 bp, Homo sapiens
cagttttgatttaat

SEQ ID NO: 847915 - DNA, 15 bp, Homo sapiens
agttttgatttaatc

SEQ ID NO: 847916 - DNA, 15 bp, Homo sapiens
gttttgatttaatca

SEQ ID NO: 847917 - DNA, 15 bp, Homo sapiens
ttttgatttaatcag

SEQ ID NO: 847918 - DNA, 15 bp, Homo sapiens
tttgatttaatcaga

SEQ ID NO: 847919 - DNA, 15 bp, Homo sapiens
ttgatttaatcagaa

SEQ ID NO: 847920 - DNA, 15 bp, Homo sapiens
tgatttaatcagaag

SEQ ID NO: 847921 - DNA, 15 bp, Homo sapiens
gatttaatcagaagc

SEQ ID NO: 847922 - DNA, 15 bp, Homo sapiens
atttaatcagaagct

SEQ ID NO: 847923 - DNA, 15 bp, Homo sapiens
tttaatcagaagcta

SEQ ID NO: 847924 - DNA, 15 bp, Homo sapiens
ttaatcagaagctag

SEQ ID NO: 847925 - DNA, 15 bp, Homo sapiens
taatcagaagctaga

SEQ ID NO: 847926 - DNA, 15 bp, Homo sapiens
aatcagaagctagaa

SEQ ID NO: 847927 - DNA, 15 bp, Homo sapiens
atcagaagctagaac

SEQ ID NO: 847928 - DNA, 15 bp, Homo sapiens
tcagaagctagaaca

SEQ ID NO: 847929 - DNA, 15 bp, Homo sapiens
cagaagctagaacag

SEQ ID NO: 847930 - DNA, 15 bp, Homo sapiens
agaagctagaacaga

SEQ ID NO: 847931 - DNA, 15 bp, Homo sapiens
gaagctagaacagat

SEQ ID NO: 847932 - DNA, 15 bp, Homo sapiens
aagctagaacagatc

SEQ ID NO: 847933 - DNA, 15 bp, Homo sapiens
agctagaacagatcc

SEQ ID NO: 847934 - DNA, 15 bp, Homo sapiens
gctagaacagatcct

SEQ ID NO: 847935 - DNA, 15 bp, Homo sapiens
ctagaacagatccta

SEQ ID NO: 847936 - DNA, 15 bp, Homo sapiens
tagaacagatcctaa

SEQ ID NO: 847937 - DNA, 15 bp, Homo sapiens
agaacagatcctaag

SEQ ID NO: 847938 - DNA, 15 bp, Homo sapiens
gaacagatcctaaga

SEQ ID NO: 847939 - DNA, 15 bp, Homo sapiens
aacagatcctaagat

SEQ ID NO: 847940 - DNA, 15 bp, Homo sapiens
acagatcctaagatt

SEQ ID NO: 847941 - DNA, 15 bp, Homo sapiens
cagatcctaagatta

SEQ ID NO: 847942 - DNA, 15 bp, Homo sapiens
agatcctaagattaa

SEQ ID NO: 847943 - DNA, 15 bp, Homo sapiens
gatcctaagattaaa

SEQ ID NO: 847944 - DNA, 15 bp, Homo sapiens
atcctaagattaaaa

SEQ ID NO: 847945 - DNA, 15 bp, Homo sapiens
tcctaagattaaaaa

SEQ ID NO: 847946 - DNA, 15 bp, Homo sapiens
cctaagattaaaaat

SEQ ID NO: 847947 - DNA, 15 bp, Homo sapiens
ctaagattaaaaata

SEQ ID NO: 847948 - DNA, 15 bp, Homo sapiens
taagattaaaaatat

SEQ ID NO: 847949 - DNA, 15 bp, Homo sapiens
aagattaaaaatata

SEQ ID NO: 847950 - DNA, 15 bp, Homo sapiens
agattaaaaatatat

SEQ ID NO: 847951 - DNA, 15 bp, Homo sapiens
gattaaaaatatatg

SEQ ID NO: 847952 - DNA, 15 bp, Homo sapiens
attaaaaatatatgc

SEQ ID NO: 847953 - DNA, 15 bp, Homo sapiens
ttaaaaatatatgca

SEQ ID NO: 847954 - DNA, 15 bp, Homo sapiens
taaaaatatatgcag

SEQ ID NO: 847955 - DNA, 15 bp, Homo sapiens
aaaaatatatgcagt

SEQ ID NO: 847956 - DNA, 15 bp, Homo sapiens
aaaatatatgcagtc

SEQ ID NO: 847957 - DNA, 15 bp, Homo sapiens
aaatatatgcagtca

SEQ ID NO: 847958 - DNA, 15 bp, Homo sapiens
aatatatgcagtcaa

SEQ ID NO: 847959 - DNA, 15 bp, Homo sapiens
atatatgcagtcaat

SEQ ID NO: 847960 - DNA, 15 bp, Homo sapiens
tatatgcagtcaata

SEQ ID NO: 847961 - DNA, 15 bp, Homo sapiens
atatgcagtcaatat

SEQ ID NO: 847962 - DNA, 15 bp, Homo sapiens
tatgcagtcaatatt

SEQ ID NO: 847963 - DNA, 15 bp, Homo sapiens
atgcagtcaatattt

SEQ ID NO: 847964 - DNA, 15 bp, Homo sapiens
tgcagtcaatatttg

SEQ ID NO: 847965 - DNA, 15 bp, Homo sapiens
gcagtcaatatttgc

SEQ ID NO: 847966 - DNA, 15 bp, Homo sapiens
gtcaatatttgctga

SEQ ID NO: 847967 - DNA, 15 bp, Homo sapiens
tcaatatttgctgaa

SEQ ID NO: 847968 - DNA, 15 bp, Homo sapiens
caatatttgctgaat

SEQ ID NO: 847969 - DNA, 15 bp, Homo sapiens
aatatttgctgaatg

SEQ ID NO: 847970 - DNA, 15 bp, Homo sapiens
atatttgctgaatga

SEQ ID NO: 847971 - DNA, 15 bp, Homo sapiens
tatttgctgaatgaa

SEQ ID NO: 847972 - DNA, 15 bp, Homo sapiens
atttgctgaatgaat

SEQ ID NO: 847973 - DNA, 15 bp, Homo sapiens
tttgctgaatgaatg

SEQ ID NO: 847974 - DNA, 15 bp, Homo sapiens
ttgctgaatgaatga

SEQ ID NO: 847975 - DNA, 15 bp, Homo sapiens
tgctgaatgaatgac

SEQ ID NO: 847976 - DNA, 15 bp, Homo sapiens
gctgaatgaatgact

SEQ ID NO: 847977 - DNA, 15 bp, Homo sapiens
ctgaatgaatgactc

SEQ ID NO: 847978 - DNA, 15 bp, Homo sapiens
tgaatgaatgactca

SEQ ID NO: 847979 - DNA, 15 bp, Homo sapiens
gaatgaatgactcaa

SEQ ID NO: 847980 - DNA, 15 bp, Homo sapiens
aatgaatgactcaat

SEQ ID NO: 847981 - DNA, 15 bp, Homo sapiens
atgaatgactcaata

SEQ ID NO: 847982 - DNA, 15 bp, Homo sapiens
tgaatgactcaataa

SEQ ID NO: 847983 - DNA, 15 bp, Homo sapiens
gaatgactcaataaa

SEQ ID NO: 847984 - DNA, 15 bp, Homo sapiens
aatgactcaataaaa

SEQ ID NO: 847985 - DNA, 15 bp, Homo sapiens
atgactcaataaaac

SEQ ID NO: 847986 - DNA, 15 bp, Homo sapiens
tgactcaataaaaca

SEQ ID NO: 847987 - DNA, 15 bp, Homo sapiens
gactcaataaaacaa

SEQ ID NO: 847988 - DNA, 15 bp, Homo sapiens
actcaataaaacaat

SEQ ID NO: 847989 - DNA, 15 bp, Homo sapiens
ctcaataaaacaatt

SEQ ID NO: 847990 - DNA, 15 bp, Homo sapiens
tcaataaaacaattt

SEQ ID NO: 847991 - DNA, 15 bp, Homo sapiens
caataaaacaatttt

SEQ ID NO: 847992 - DNA, 15 bp, Homo sapiens
aataaaacaattttt

SEQ ID NO: 847993 - DNA, 15 bp, Homo sapiens
ataaaacaatttttg

SEQ ID NO: 847994 - DNA, 15 bp, Homo sapiens
taaaacaatttttgc

SEQ ID NO: 847995 - DNA, 15 bp, Homo sapiens
aaaacaatttttgct

SEQ ID NO: 847996 - DNA, 15 bp, Homo sapiens
aaacaatttttgcta

SEQ ID NO: 847997 - DNA, 15 bp, Homo sapiens
aacaatttttgctaa

SEQ ID NO: 847998 - DNA, 15 bp, Homo sapiens
acaatttttgctaaa

SEQ ID NO: 847999 - DNA, 15 bp, Homo sapiens
caatttttgctaaat

SEQ ID NO: 848000 - DNA, 15 bp, Homo sapiens
aatttttgctaaatt

SEQ ID NO: 848001 - DNA, 15 bp, Homo sapiens
atttttgctaaattc

SEQ ID NO: 848002 - DNA, 15 bp, Homo sapiens
tttttgctaaattca

SEQ ID NO: 848003 - DNA, 15 bp, Homo sapiens
ttttgctaaattcaa

SEQ ID NO: 848004 - DNA, 15 bp, Homo sapiens
tttgctaaattcaaa

SEQ ID NO: 848005 - DNA, 15 bp, Homo sapiens
ttgctaaattcaaaa

SEQ ID NO: 848006 - DNA, 15 bp, Homo sapiens
tgctaaattcaaaac

SEQ ID NO: 848007 - DNA, 15 bp, Homo sapiens
gctaaattcaaaaca

SEQ ID NO: 848008 - DNA, 15 bp, Homo sapiens
ctaaattcaaaacaa

SEQ ID NO: 848009 - DNA, 15 bp, Homo sapiens
taaattcaaaacaaa

SEQ ID NO: 848010 - DNA, 15 bp, Homo sapiens
aaattcaaaacaaac

SEQ ID NO: 848011 - DNA, 15 bp, Homo sapiens
aattcaaaacaaaca

SEQ ID NO: 848012 - DNA, 15 bp, Homo sapiens
attcaaaacaaacat

SEQ ID NO: 848013 - DNA, 15 bp, Homo sapiens
ttcaaaacaaacatg

SEQ ID NO: 848014 - DNA, 15 bp, Homo sapiens
tcaaaacaaacatga

SEQ ID NO: 848015 - DNA, 15 bp, Homo sapiens
caaaacaaacatgaa

SEQ ID NO: 848016 - DNA, 15 bp, Homo sapiens
aaaacaaacatgaat

SEQ ID NO: 848017 - DNA, 15 bp, Homo sapiens
aaacaaacatgaata

SEQ ID NO: 848018 - DNA, 15 bp, Homo sapiens
aacaaacatgaataa

SEQ ID NO: 848019 - DNA, 15 bp, Homo sapiens
acaaacatgaataat

SEQ ID NO: 848020 - DNA, 15 bp, Homo sapiens
caaacatgaataata

SEQ ID NO: 848021 - DNA, 15 bp, Homo sapiens
aaacatgaataatat

SEQ ID NO: 848022 - DNA, 15 bp, Homo sapiens
aacatgaataatatt

SEQ ID NO: 848023 - DNA, 15 bp, Homo sapiens
acatgaataatattg

SEQ ID NO: 848024 - DNA, 15 bp, Homo sapiens
catgaataatattgt

SEQ ID NO: 848025 - DNA, 15 bp, Homo sapiens
atgaataatattgtt

SEQ ID NO: 848026 - DNA, 15 bp, Homo sapiens
tgaataatattgtta

SEQ ID NO: 848027 - DNA, 15 bp, Homo sapiens
gaataatattgttat

SEQ ID NO: 848028 - DNA, 15 bp, Homo sapiens
aataatattgttatc

SEQ ID NO: 848029 - DNA, 15 bp, Homo sapiens
ataatattgttatcc

SEQ ID NO: 848030 - DNA, 15 bp, Homo sapiens
taatattgttatcct

SEQ ID NO: 848031 - DNA, 15 bp, Homo sapiens
aatattgttatccta

SEQ ID NO: 848032 - DNA, 15 bp, Homo sapiens
atattgttatcctac

SEQ ID NO: 848033 - DNA, 15 bp, Homo sapiens
tattgttatcctaca

SEQ ID NO: 848034 - DNA, 15 bp, Homo sapiens
attgttatcctacaa

SEQ ID NO: 848035 - DNA, 15 bp, Homo sapiens
ttgttatcctacaaa

SEQ ID NO: 848036 - DNA, 15 bp, Homo sapiens
tgttatcctacaaaa

SEQ ID NO: 848037 - DNA, 15 bp, Homo sapiens
gttatcctacaaaaa

SEQ ID NO: 848038 - DNA, 15 bp, Homo sapiens
ttatcctacaaaaaa

SEQ ID NO: 848039 - DNA, 15 bp, Homo sapiens
tatcctacaaaaaat

SEQ ID NO: 848040 - DNA, 15 bp, Homo sapiens
atcctacaaaaaatg

SEQ ID NO: 848041 - DNA, 15 bp, Homo sapiens
tcctacaaaaaatgt

SEQ ID NO: 848042 - DNA, 15 bp, Homo sapiens
cctacaaaaaatgtg

SEQ ID NO: 848043 - DNA, 15 bp, Homo sapiens
ctacaaaaaatgtgt

SEQ ID NO: 848044 - DNA, 15 bp, Homo sapiens
tacaaaaaatgtgtt

SEQ ID NO: 848045 - DNA, 15 bp, Homo sapiens
acaaaaaatgtgttc

SEQ ID NO: 848046 - DNA, 15 bp, Homo sapiens
caaaaaatgtgttcc

SEQ ID NO: 848047 - DNA, 15 bp, Homo sapiens
aaaaaatgtgttcct

SEQ ID NO: 848048 - DNA, 15 bp, Homo sapiens
aaaaatgtgttcctt

SEQ ID NO: 848049 - DNA, 15 bp, Homo sapiens
aaaatgtgttccttc

SEQ ID NO: 848050 - DNA, 15 bp, Homo sapiens
aaatgtgttccttct

SEQ ID NO: 848051 - DNA, 15 bp, Homo sapiens
aatgtgttccttctt

SEQ ID NO: 848052 - DNA, 15 bp, Homo sapiens
atgtgttccttctta

SEQ ID NO: 848053 - DNA, 15 bp, Homo sapiens
tgtgttccttcttat

SEQ ID NO: 848054 - DNA, 15 bp, Homo sapiens
gtgttccttcttatt

SEQ ID NO: 848055 - DNA, 15 bp, Homo sapiens
tgttccttcttattt

SEQ ID NO: 848056 - DNA, 15 bp, Homo sapiens
gttccttcttattta

SEQ ID NO: 848057 - DNA, 15 bp, Homo sapiens
ttccttcttatttaa

SEQ ID NO: 848058 - DNA, 15 bp, Homo sapiens
tccttcttatttaaa

SEQ ID NO: 848059 - DNA, 15 bp, Homo sapiens
ccttcttatttaaaa

SEQ ID NO: 848060 - DNA, 15 bp, Homo sapiens
cttcttatttaaaaa

SEQ ID NO: 848061 - DNA, 15 bp, Homo sapiens
ttcttatttaaaaag

SEQ ID NO: 848062 - DNA, 15 bp, Homo sapiens
tcttatttaaaaagt

SEQ ID NO: 848063 - DNA, 15 bp, Homo sapiens
cttatttaaaaagtt

SEQ ID NO: 848064 - DNA, 15 bp, Homo sapiens
ttatttaaaaagttt

SEQ ID NO: 848065 - DNA, 15 bp, Homo sapiens
tatttaaaaagttta

SEQ ID NO: 848066 - DNA, 15 bp, Homo sapiens
atttaaaaagtttag

SEQ ID NO: 848067 - DNA, 15 bp, Homo sapiens
tttaaaaagtttagt

SEQ ID NO: 848068 - DNA, 15 bp, Homo sapiens
ttaaaaagtttagtg

SEQ ID NO: 848069 - DNA, 15 bp, Homo sapiens
taaaaagtttagtga

SEQ ID NO: 848070 - DNA, 15 bp, Homo sapiens
aaaaagtttagtgat

SEQ ID NO: 848071 - DNA, 15 bp, Homo sapiens
aaaagtttagtgatt

SEQ ID NO: 848072 - DNA, 15 bp, Homo sapiens
aaagtttagtgattc

SEQ ID NO: 848073 - DNA, 15 bp, Homo sapiens
aagtttagtgattca

SEQ ID NO: 848074 - DNA, 15 bp, Homo sapiens
agtttagtgattcac

SEQ ID NO: 848075 - DNA, 15 bp, Homo sapiens
gtttagtgattcacc

SEQ ID NO: 848076 - DNA, 15 bp, Homo sapiens
tttagtgattcacct

SEQ ID NO: 848077 - DNA, 15 bp, Homo sapiens
ttagtgattcaccta

SEQ ID NO: 848078 - DNA, 15 bp, Homo sapiens
tagtgattcacctac

SEQ ID NO: 848079 - DNA, 15 bp, Homo sapiens
agtgattcacctaca

SEQ ID NO: 848080 - DNA, 15 bp, Homo sapiens
gtgattcacctacaa

SEQ ID NO: 848081 - DNA, 15 bp, Homo sapiens
tgattcacctacaat

SEQ ID NO: 848082 - DNA, 15 bp, Homo sapiens
gattcacctacaata

SEQ ID NO: 848083 - DNA, 15 bp, Homo sapiens
attcacctacaataa

SEQ ID NO: 848084 - DNA, 15 bp, Homo sapiens
ttcacctacaataaa

SEQ ID NO: 848085 - DNA, 15 bp, Homo sapiens
tcacctacaataaaa

SEQ ID NO: 848086 - DNA, 15 bp, Homo sapiens
cacctacaataaaat

SEQ ID NO: 848087 - DNA, 15 bp, Homo sapiens
acctacaataaaatt

SEQ ID NO: 848088 - DNA, 15 bp, Homo sapiens
cctacaataaaattt

SEQ ID NO: 848089 - DNA, 15 bp, Homo sapiens
ctacaataaaatttg

SEQ ID NO: 848090 - DNA, 15 bp, Homo sapiens
tacaataaaatttgg

SEQ ID NO: 848091 - DNA, 15 bp, Homo sapiens
acaataaaatttggt

SEQ ID NO: 848092 - DNA, 15 bp, Homo sapiens
caataaaatttggta

SEQ ID NO: 848093 - DNA, 15 bp, Homo sapiens
aataaaatttggtat

SEQ ID NO: 848094 - DNA, 15 bp, Homo sapiens
ataaaatttggtata

SEQ ID NO: 848095 - DNA, 15 bp, Homo sapiens
taaaatttggtataa

SEQ ID NO: 848096 - DNA, 15 bp, Homo sapiens
aaaatttggtataaa

SEQ ID NO: 848097 - DNA, 15 bp, Homo sapiens
aaatttggtataaag

SEQ ID NO: 848098 - DNA, 15 bp, Homo sapiens
aatttggtataaaga

SEQ ID NO: 848099 - DNA, 15 bp, Homo sapiens
atttggtataaagaa

SEQ ID NO: 848100 - DNA, 15 bp, Homo sapiens
tttggtataaagaat

SEQ ID NO: 848101 - DNA, 15 bp, Homo sapiens
ttggtataaagaata

SEQ ID NO: 848102 - DNA, 15 bp, Homo sapiens
tggtataaagaatag

SEQ ID NO: 848103 - DNA, 15 bp, Homo sapiens
ggtataaagaatagc

SEQ ID NO: 848104 - DNA, 15 bp, Homo sapiens
gtataaagaatagct

SEQ ID NO: 848105 - DNA, 15 bp, Homo sapiens
tataaagaatagctt

SEQ ID NO: 848106 - DNA, 15 bp, Homo sapiens
ataaagaatagcttc

SEQ ID NO: 848107 - DNA, 15 bp, Homo sapiens
taaagaatagcttca

SEQ ID NO: 848108 - DNA, 15 bp, Homo sapiens
aaagaatagcttcat

SEQ ID NO: 848109 - DNA, 15 bp, Homo sapiens
aagaatagcttcatt

SEQ ID NO: 848110 - DNA, 15 bp, Homo sapiens
agaatagcttcatta

SEQ ID NO: 848111 - DNA, 15 bp, Homo sapiens
gaatagcttcattag

SEQ ID NO: 848112 - DNA, 15 bp, Homo sapiens
aatagcttcattagg

SEQ ID NO: 848113 - DNA, 15 bp, Homo sapiens
atagcttcattagga

SEQ ID NO: 848114 - DNA, 15 bp, Homo sapiens
tagcttcattaggac

SEQ ID NO: 848115 - DNA, 15 bp, Homo sapiens
agcttcattaggaca

SEQ ID NO: 848116 - DNA, 15 bp, Homo sapiens
gcttcattaggacat

SEQ ID NO: 848117 - DNA, 15 bp, Homo sapiens
cttcattaggacata

SEQ ID NO: 848118 - DNA, 15 bp, Homo sapiens
ttcattaggacataa

SEQ ID NO: 848119 - DNA, 15 bp, Homo sapiens
tcattaggacataaa

SEQ ID NO: 848120 - DNA, 15 bp, Homo sapiens
cattaggacataaag

SEQ ID NO: 848121 - DNA, 15 bp, Homo sapiens
attaggacataaagg

SEQ ID NO: 848122 - DNA, 15 bp, Homo sapiens
ttaggacataaaggc

SEQ ID NO: 848123 - DNA, 15 bp, Homo sapiens
taggacataaaggca

SEQ ID NO: 848124 - DNA, 15 bp, Homo sapiens
aggacataaaggcat

SEQ ID NO: 848125 - DNA, 15 bp, Homo sapiens
ggacataaaggcatg

SEQ ID NO: 848126 - DNA, 15 bp, Homo sapiens
gacataaaggcatga

SEQ ID NO: 848127 - DNA, 15 bp, Homo sapiens
acataaaggcatgaa

SEQ ID NO: 848128 - DNA, 15 bp, Homo sapiens
cataaaggcatgaaa

SEQ ID NO: 848129 - DNA, 15 bp, Homo sapiens
ataaaggcatgaaaa

SEQ ID NO: 848130 - DNA, 15 bp, Homo sapiens
taaaggcatgaaaat

SEQ ID NO: 848131 - DNA, 15 bp, Homo sapiens
aaaggcatgaaaatt

SEQ ID NO: 848132 - DNA, 15 bp, Homo sapiens
aaggcatgaaaattc

SEQ ID NO: 848133 - DNA, 15 bp, Homo sapiens
aggcatgaaaattct

SEQ ID NO: 848134 - DNA, 15 bp, Homo sapiens
ggcatgaaaattctg

SEQ ID NO: 848135 - DNA, 15 bp, Homo sapiens
gcatgaaaattctga

SEQ ID NO: 848136 - DNA, 15 bp, Homo sapiens
catgaaaattctgac

SEQ ID NO: 848137 - DNA, 15 bp, Homo sapiens
atgaaaattctgacc

SEQ ID NO: 848138 - DNA, 15 bp, Homo sapiens
tgaaaattctgacca

SEQ ID NO: 848139 - DNA, 15 bp, Homo sapiens
gaaaattctgaccaa

SEQ ID NO: 848140 - DNA, 15 bp, Homo sapiens
aaaattctgaccaaa

SEQ ID NO: 848141 - DNA, 15 bp, Homo sapiens
aaattctgaccaaaa

SEQ ID NO: 848142 - DNA, 15 bp, Homo sapiens
aattctgaccaaaac

SEQ ID NO: 848143 - DNA, 15 bp, Homo sapiens
attctgaccaaaact

SEQ ID NO: 848144 - DNA, 15 bp, Homo sapiens
ttctgaccaaaacta

SEQ ID NO: 848145 - DNA, 15 bp, Homo sapiens
tctgaccaaaactaa

SEQ ID NO: 848146 - DNA, 15 bp, Homo sapiens
ctgaccaaaactaaa

SEQ ID NO: 848147 - DNA, 15 bp, Homo sapiens
tgaccaaaactaaaa

SEQ ID NO: 848148 - DNA, 15 bp, Homo sapiens
gaccaaaactaaaag

SEQ ID NO: 848149 - DNA, 15 bp, Homo sapiens
accaaaactaaaaga

SEQ ID NO: 848150 - DNA, 15 bp, Homo sapiens
ccaaaactaaaagaa

SEQ ID NO: 848151 - DNA, 15 bp, Homo sapiens
caaaactaaaagaac

SEQ ID NO: 848152 - DNA, 15 bp, Homo sapiens
aaaactaaaagaacc

SEQ ID NO: 848153 - DNA, 15 bp, Homo sapiens
aaactaaaagaacct

SEQ ID NO: 848154 - DNA, 15 bp, Homo sapiens
aactaaaagaacctt

SEQ ID NO: 848155 - DNA, 15 bp, Homo sapiens
actaaaagaaccttg

SEQ ID NO: 848156 - DNA, 15 bp, Homo sapiens
ctaaaagaaccttgt

SEQ ID NO: 848157 - DNA, 15 bp, Homo sapiens
taaaagaaccttgtt

SEQ ID NO: 848158 - DNA, 15 bp, Homo sapiens
aaaagaaccttgtta

SEQ ID NO: 848159 - DNA, 15 bp, Homo sapiens
aaagaaccttgttaa

SEQ ID NO: 848160 - DNA, 15 bp, Homo sapiens
aagaaccttgttaaa

SEQ ID NO: 848161 - DNA, 15 bp, Homo sapiens
agaaccttgttaaaa

SEQ ID NO: 848162 - DNA, 15 bp, Homo sapiens
gaaccttgttaaaac

SEQ ID NO: 848163 - DNA, 15 bp, Homo sapiens
aaccttgttaaaacc

SEQ ID NO: 848164 - DNA, 15 bp, Homo sapiens
accttgttaaaacca

SEQ ID NO: 848165 - DNA, 15 bp, Homo sapiens
ccttgttaaaaccat

SEQ ID NO: 848166 - DNA, 15 bp, Homo sapiens
cttgttaaaaccata

SEQ ID NO: 848167 - DNA, 15 bp, Homo sapiens
ttgttaaaaccatat

SEQ ID NO: 848168 - DNA, 15 bp, Homo sapiens
tgttaaaaccatatt

SEQ ID NO: 848169 - DNA, 15 bp, Homo sapiens
gttaaaaccatatta

SEQ ID NO: 848170 - DNA, 15 bp, Homo sapiens
ttaaaaccatattaa

SEQ ID NO: 848171 - DNA, 15 bp, Homo sapiens
taaaaccatattaat

SEQ ID NO: 848172 - DNA, 15 bp, Homo sapiens
aaaaccatattaatt

SEQ ID NO: 848173 - DNA, 15 bp, Homo sapiens
aaaccatattaattg

SEQ ID NO: 848174 - DNA, 15 bp, Homo sapiens
aaccatattaattga

SEQ ID NO: 848175 - DNA, 15 bp, Homo sapiens
accatattaattgag

SEQ ID NO: 848176 - DNA, 15 bp, Homo sapiens
ccatattaattgagg

SEQ ID NO: 848177 - DNA, 15 bp, Homo sapiens
catattaattgagga

SEQ ID NO: 848178 - DNA, 15 bp, Homo sapiens
atattaattgaggaa

SEQ ID NO: 848179 - DNA, 15 bp, Homo sapiens
tattaattgaggaat

SEQ ID NO: 848180 - DNA, 15 bp, Homo sapiens
attaattgaggaata

SEQ ID NO: 848181 - DNA, 15 bp, Homo sapiens
ttaattgaggaatac

SEQ ID NO: 848182 - DNA, 15 bp, Homo sapiens
taattgaggaatacc

SEQ ID NO: 848183 - DNA, 15 bp, Homo sapiens
aattgaggaatacca

SEQ ID NO: 848184 - DNA, 15 bp, Homo sapiens
attgaggaataccac

SEQ ID NO: 848185 - DNA, 15 bp, Homo sapiens
ttgaggaataccacc

SEQ ID NO: 848186 - DNA, 15 bp, Homo sapiens
tgaggaataccacca

SEQ ID NO: 848187 - DNA, 15 bp, Homo sapiens
gaggaataccaccaa

SEQ ID NO: 848188 - DNA, 15 bp, Homo sapiens
aggaataccaccaat

SEQ ID NO: 848189 - DNA, 15 bp, Homo sapiens
ggaataccaccaatg

SEQ ID NO: 848190 - DNA, 15 bp, Homo sapiens
gaataccaccaatga

SEQ ID NO: 848191 - DNA, 15 bp, Homo sapiens
aataccaccaatgat

SEQ ID NO: 848192 - DNA, 15 bp, Homo sapiens
ataccaccaatgatc

SEQ ID NO: 848193 - DNA, 15 bp, Homo sapiens
taccaccaatgatca

SEQ ID NO: 848194 - DNA, 15 bp, Homo sapiens
accaccaatgatcaa

SEQ ID NO: 848195 - DNA, 15 bp, Homo sapiens
ccaccaatgatcaat

SEQ ID NO: 848196 - DNA, 15 bp, Homo sapiens
caccaatgatcaata

SEQ ID NO: 848197 - DNA, 15 bp, Homo sapiens
accaatgatcaataa

SEQ ID NO: 848198 - DNA, 15 bp, Homo sapiens
ccaatgatcaataat

SEQ ID NO: 848199 - DNA, 15 bp, Homo sapiens
caatgatcaataata

SEQ ID NO: 848200 - DNA, 15 bp, Homo sapiens
aatgatcaataataa

SEQ ID NO: 848201 - DNA, 15 bp, Homo sapiens
atgatcaataataaa

SEQ ID NO: 848202 - DNA, 15 bp, Homo sapiens
tgatcaataataaag

SEQ ID NO: 848203 - DNA, 15 bp, Homo sapiens
gatcaataataaagg

SEQ ID NO: 848204 - DNA, 15 bp, Homo sapiens
atcaataataaaggt

SEQ ID NO: 848205 - DNA, 15 bp, Homo sapiens
tcaataataaaggtt

SEQ ID NO: 848206 - DNA, 15 bp, Homo sapiens
caataataaaggttt

SEQ ID NO: 848207 - DNA, 15 bp, Homo sapiens
aataataaaggtttg

SEQ ID NO: 848208 - DNA, 15 bp, Homo sapiens
ataataaaggtttgt

SEQ ID NO: 848209 - DNA, 15 bp, Homo sapiens
taataaaggtttgta

SEQ ID NO: 848210 - DNA, 15 bp, Homo sapiens
aataaaggtttgtat

SEQ ID NO: 848211 - DNA, 15 bp, Homo sapiens
ataaaggtttgtatt

SEQ ID NO: 848212 - DNA, 15 bp, Homo sapiens
taaaggtttgtattt

SEQ ID NO: 848213 - DNA, 15 bp, Homo sapiens
aaaggtttgtatttt

SEQ ID NO: 848214 - DNA, 15 bp, Homo sapiens
aaggtttgtattttc

SEQ ID NO: 848215 - DNA, 15 bp, Homo sapiens
aggtttgtattttca

SEQ ID NO: 848216 - DNA, 15 bp, Homo sapiens
ggtttgtattttcat

SEQ ID NO: 848217 - DNA, 15 bp, Homo sapiens
gtttgtattttcatt

SEQ ID NO: 848218 - DNA, 15 bp, Homo sapiens
tttgtattttcatta

SEQ ID NO: 848219 - DNA, 15 bp, Homo sapiens
ttgtattttcattat

SEQ ID NO: 848220 - DNA, 15 bp, Homo sapiens
tgtattttcattatt

SEQ ID NO: 848221 - DNA, 15 bp, Homo sapiens
gtattttcattattt

SEQ ID NO: 848222 - DNA, 15 bp, Homo sapiens
tattttcattatttt

SEQ ID NO: 848223 - DNA, 15 bp, Homo sapiens
attttcattattttt

SEQ ID NO: 848224 - DNA, 15 bp, Homo sapiens
ttttcattatttttg

SEQ ID NO: 848225 - DNA, 15 bp, Homo sapiens
tttcattatttttga

SEQ ID NO: 848226 - DNA, 15 bp, Homo sapiens
ttcattatttttgat

SEQ ID NO: 848227 - DNA, 15 bp, Homo sapiens
tcattatttttgata

SEQ ID NO: 848228 - DNA, 15 bp, Homo sapiens
cattatttttgataa

SEQ ID NO: 848229 - DNA, 15 bp, Homo sapiens
attatttttgataat

SEQ ID NO: 848230 - DNA, 15 bp, Homo sapiens
ttatttttgataatc

SEQ ID NO: 848231 - DNA, 15 bp, Homo sapiens
tatttttgataatca

SEQ ID NO: 848232 - DNA, 15 bp, Homo sapiens
atttttgataatcag

SEQ ID NO: 848233 - DNA, 15 bp, Homo sapiens
tttttgataatcagt

SEQ ID NO: 848234 - DNA, 15 bp, Homo sapiens
ttttgataatcagtt

SEQ ID NO: 848235 - DNA, 15 bp, Homo sapiens
tttgataatcagttg

SEQ ID NO: 848236 - DNA, 15 bp, Homo sapiens
ttgataatcagttgt

SEQ ID NO: 848237 - DNA, 15 bp, Homo sapiens
tgataatcagttgtt

SEQ ID NO: 848238 - DNA, 15 bp, Homo sapiens
gataatcagttgttg

SEQ ID NO: 848239 - DNA, 15 bp, Homo sapiens
ataatcagttgttgt

SEQ ID NO: 848240 - DNA, 15 bp, Homo sapiens
taatcagttgttgta

SEQ ID NO: 848241 - DNA, 15 bp, Homo sapiens
aatcagttgttgtat

SEQ ID NO: 848242 - DNA, 15 bp, Homo sapiens
atcagttgttgtatt

SEQ ID NO: 848243 - DNA, 15 bp, Homo sapiens
tcagttgttgtattt

SEQ ID NO: 848244 - DNA, 15 bp, Homo sapiens
cagttgttgtattta

SEQ ID NO: 848245 - DNA, 15 bp, Homo sapiens
agttgttgtatttaa

SEQ ID NO: 848246 - DNA, 15 bp, Homo sapiens
gttgttgtatttaaa

SEQ ID NO: 848247 - DNA, 15 bp, Homo sapiens
ttgttgtatttaaat

SEQ ID NO: 848248 - DNA, 15 bp, Homo sapiens
tgttgtatttaaatt

SEQ ID NO: 848249 - DNA, 15 bp, Homo sapiens
gttgtatttaaatta

SEQ ID NO: 848250 - DNA, 15 bp, Homo sapiens
ttgtatttaaattag

SEQ ID NO: 848251 - DNA, 15 bp, Homo sapiens
tgtatttaaattaga

SEQ ID NO: 848252 - DNA, 15 bp, Homo sapiens
gtatttaaattagac

SEQ ID NO: 848253 - DNA, 15 bp, Homo sapiens
tatttaaattagacc

SEQ ID NO: 848254 - DNA, 15 bp, Homo sapiens
atttaaattagacca

SEQ ID NO: 848255 - DNA, 15 bp, Homo sapiens
tttaaattagaccat

SEQ ID NO: 848256 - DNA, 15 bp, Homo sapiens
ttaaattagaccata

SEQ ID NO: 848257 - DNA, 15 bp, Homo sapiens
taaattagaccataa

SEQ ID NO: 848258 - DNA, 15 bp, Homo sapiens
aaattagaccataaa

SEQ ID NO: 848259 - DNA, 15 bp, Homo sapiens
aattagaccataaac

SEQ ID NO: 848260 - DNA, 15 bp, Homo sapiens
attagaccataaaca

SEQ ID NO: 848261 - DNA, 15 bp, Homo sapiens
ttagaccataaacaa

SEQ ID NO: 848262 - DNA, 15 bp, Homo sapiens
tagaccataaacaac

SEQ ID NO: 848263 - DNA, 15 bp, Homo sapiens
agaccataaacaaca

SEQ ID NO: 848264 - DNA, 15 bp, Homo sapiens
gaccataaacaacac

SEQ ID NO: 848265 - DNA, 15 bp, Homo sapiens
accataaacaacaca

SEQ ID NO: 848266 - DNA, 15 bp, Homo sapiens
ccataaacaacacat

SEQ ID NO: 848267 - DNA, 15 bp, Homo sapiens
cataaacaacacatt

SEQ ID NO: 848268 - DNA, 15 bp, Homo sapiens
ataaacaacacatta

SEQ ID NO: 848269 - DNA, 15 bp, Homo sapiens
taaacaacacattat

SEQ ID NO: 848270 - DNA, 15 bp, Homo sapiens
aaacaacacattata

SEQ ID NO: 848271 - DNA, 15 bp, Homo sapiens
aacaacacattataa

SEQ ID NO: 848272 - DNA, 15 bp, Homo sapiens
acaacacattataaa

SEQ ID NO: 848273 - DNA, 15 bp, Homo sapiens
caacacattataaaa

SEQ ID NO: 848274 - DNA, 15 bp, Homo sapiens
aacacattataaaag

SEQ ID NO: 848275 - DNA, 15 bp, Homo sapiens
acacattataaaaga

SEQ ID NO: 848276 - DNA, 15 bp, Homo sapiens
cacattataaaagaa

SEQ ID NO: 848277 - DNA, 15 bp, Homo sapiens
acattataaaagaac

SEQ ID NO: 848278 - DNA, 15 bp, Homo sapiens
cattataaaagaaca

SEQ ID NO: 848279 - DNA, 15 bp, Homo sapiens
attataaaagaacac

SEQ ID NO: 848280 - DNA, 15 bp, Homo sapiens
ttataaaagaacaca

SEQ ID NO: 848281 - DNA, 15 bp, Homo sapiens
tataaaagaacacat

SEQ ID NO: 848282 - DNA, 15 bp, Homo sapiens
ataaaagaacacata

SEQ ID NO: 848283 - DNA, 15 bp, Homo sapiens
taaaagaacacatat

SEQ ID NO: 848284 - DNA, 15 bp, Homo sapiens
aaaagaacacatatg

SEQ ID NO: 848285 - DNA, 15 bp, Homo sapiens
aaagaacacatatga

SEQ ID NO: 848286 - DNA, 15 bp, Homo sapiens
aagaacacatatgaa

SEQ ID NO: 848287 - DNA, 15 bp, Homo sapiens
agaacacatatgaaa

SEQ ID NO: 848288 - DNA, 15 bp, Homo sapiens
gaacacatatgaaaa

SEQ ID NO: 848289 - DNA, 15 bp, Homo sapiens
aacacatatgaaaag

SEQ ID NO: 848290 - DNA, 15 bp, Homo sapiens
acacatatgaaaaga

SEQ ID NO: 848291 - DNA, 15 bp, Homo sapiens
cacatatgaaaagaa

SEQ ID NO: 848292 - DNA, 15 bp, Homo sapiens
acatatgaaaagaat

SEQ ID NO: 848293 - DNA, 15 bp, Homo sapiens
catatgaaaagaata

SEQ ID NO: 848294 - DNA, 15 bp, Homo sapiens
atatgaaaagaatag

SEQ ID NO: 848295 - DNA, 15 bp, Homo sapiens
tatgaaaagaatagg

SEQ ID NO: 848296 - DNA, 15 bp, Homo sapiens
atgaaaagaataggc

SEQ ID NO: 848297 - DNA, 15 bp, Homo sapiens
tgaaaagaataggct

SEQ ID NO: 848298 - DNA, 15 bp, Homo sapiens
gaaaagaataggctg

SEQ ID NO: 848299 - DNA, 15 bp, Homo sapiens
aaaagaataggctga

SEQ ID NO: 848300 - DNA, 15 bp, Homo sapiens
aaagaataggctgaa

SEQ ID NO: 848301 - DNA, 15 bp, Homo sapiens
aagaataggctgaat

SEQ ID NO: 848302 - DNA, 15 bp, Homo sapiens
agaataggctgaatt

SEQ ID NO: 848303 - DNA, 15 bp, Homo sapiens
gaataggctgaatta

SEQ ID NO: 848304 - DNA, 15 bp, Homo sapiens
aataggctgaattat

SEQ ID NO: 848305 - DNA, 15 bp, Homo sapiens
ataggctgaattatt

SEQ ID NO: 848306 - DNA, 15 bp, Homo sapiens
taggctgaattattt

SEQ ID NO: 848307 - DNA, 15 bp, Homo sapiens
aggctgaattatttt

SEQ ID NO: 848308 - DNA, 15 bp, Homo sapiens
ggctgaattatttta

SEQ ID NO: 848309 - DNA, 15 bp, Homo sapiens
gctgaattattttac

SEQ ID NO: 848310 - DNA, 15 bp, Homo sapiens
ctgaattattttact

SEQ ID NO: 848311 - DNA, 15 bp, Homo sapiens
tgaattattttactt

SEQ ID NO: 848312 - DNA, 15 bp, Homo sapiens
gaattattttacttc

SEQ ID NO: 848313 - DNA, 15 bp, Homo sapiens
aattattttacttca

SEQ ID NO: 848314 - DNA, 15 bp, Homo sapiens
attattttacttcag

SEQ ID NO: 848315 - DNA, 15 bp, Homo sapiens
ttattttacttcagg

SEQ ID NO: 848316 - DNA, 15 bp, Homo sapiens
tattttacttcagga

SEQ ID NO: 848317 - DNA, 15 bp, Homo sapiens
attttacttcaggaa

SEQ ID NO: 848318 - DNA, 15 bp, Homo sapiens
ttttacttcaggaat

SEQ ID NO: 848319 - DNA, 15 bp, Homo sapiens
tttacttcaggaata

SEQ ID NO: 848320 - DNA, 15 bp, Homo sapiens
ttacttcaggaatac

SEQ ID NO: 848321 - DNA, 15 bp, Homo sapiens
tacttcaggaatact

SEQ ID NO: 848322 - DNA, 15 bp, Homo sapiens
acttcaggaatacta

SEQ ID NO: 848323 - DNA, 15 bp, Homo sapiens
cttcaggaatactat

SEQ ID NO: 848324 - DNA, 15 bp, Homo sapiens
ttcaggaatactatt

SEQ ID NO: 848325 - DNA, 15 bp, Homo sapiens
tcaggaatactattt

SEQ ID NO: 848326 - DNA, 15 bp, Homo sapiens
caggaatactatttg

SEQ ID NO: 848327 - DNA, 15 bp, Homo sapiens
aggaatactatttgc

SEQ ID NO: 848328 - DNA, 15 bp, Homo sapiens
ggaatactatttgcc

SEQ ID NO: 848329 - DNA, 15 bp, Homo sapiens
gaatactatttgccc

SEQ ID NO: 848330 - DNA, 15 bp, Homo sapiens
aatactatttgccca

SEQ ID NO: 848331 - DNA, 15 bp, Homo sapiens
atactatttgcccat

SEQ ID NO: 848332 - DNA, 15 bp, Homo sapiens
tactatttgcccata

SEQ ID NO: 848333 - DNA, 15 bp, Homo sapiens
actatttgcccataa

SEQ ID NO: 848334 - DNA, 15 bp, Homo sapiens
ctatttgcccataag

SEQ ID NO: 848335 - DNA, 15 bp, Homo sapiens
tatttgcccataagg

SEQ ID NO: 848336 - DNA, 15 bp, Homo sapiens
atttgcccataaggc

SEQ ID NO: 848337 - DNA, 15 bp, Homo sapiens
tttgcccataaggct

SEQ ID NO: 848338 - DNA, 15 bp, Homo sapiens
ttgcccataaggctc

SEQ ID NO: 848339 - DNA, 15 bp, Homo sapiens
tgcccataaggctct

SEQ ID NO: 848340 - DNA, 15 bp, Homo sapiens
gcccataaggctcta

SEQ ID NO: 848341 - DNA, 15 bp, Homo sapiens
cccataaggctctag

SEQ ID NO: 848342 - DNA, 15 bp, Homo sapiens
ccataaggctctagt

SEQ ID NO: 848343 - DNA, 15 bp, Homo sapiens
cataaggctctagta

SEQ ID NO: 848344 - DNA, 15 bp, Homo sapiens
ataaggctctagtat

SEQ ID NO: 848345 - DNA, 15 bp, Homo sapiens
taaggctctagtatg

SEQ ID NO: 848346 - DNA, 15 bp, Homo sapiens
aaggctctagtatgg

SEQ ID NO: 848347 - DNA, 15 bp, Homo sapiens
aggctctagtatggg

SEQ ID NO: 848348 - DNA, 15 bp, Homo sapiens
ggctctagtatgggg

SEQ ID NO: 848349 - DNA, 15 bp, Homo sapiens
gctctagtatgggga

SEQ ID NO: 848350 - DNA, 15 bp, Homo sapiens
ctctagtatggggat

SEQ ID NO: 848351 - DNA, 15 bp, Homo sapiens
tctagtatggggatt

SEQ ID NO: 848352 - DNA, 15 bp, Homo sapiens
ctagtatggggattt

SEQ ID NO: 848353 - DNA, 15 bp, Homo sapiens
tagtatggggatttg

SEQ ID NO: 848354 - DNA, 15 bp, Homo sapiens
agtatggggatttgt

SEQ ID NO: 848355 - DNA, 15 bp, Homo sapiens
gtatggggatttgta

SEQ ID NO: 848356 - DNA, 15 bp, Homo sapiens
tatggggatttgtaa

SEQ ID NO: 848357 - DNA, 15 bp, Homo sapiens
atggggatttgtaat

SEQ ID NO: 848358 - DNA, 15 bp, Homo sapiens
tggggatttgtaatt

SEQ ID NO: 848359 - DNA, 15 bp, Homo sapiens
ggggatttgtaatta

SEQ ID NO: 848360 - DNA, 15 bp, Homo sapiens
gggatttgtaattag

SEQ ID NO: 848361 - DNA, 15 bp, Homo sapiens
ggatttgtaattagt

SEQ ID NO: 848362 - DNA, 15 bp, Homo sapiens
gatttgtaattagtg

SEQ ID NO: 848363 - DNA, 15 bp, Homo sapiens
atttgtaattagtga

SEQ ID NO: 848364 - DNA, 15 bp, Homo sapiens
tttgtaattagtgat

SEQ ID NO: 848365 - DNA, 15 bp, Homo sapiens
ttgtaattagtgata

SEQ ID NO: 848366 - DNA, 15 bp, Homo sapiens
tgtaattagtgatac

SEQ ID NO: 848367 - DNA, 15 bp, Homo sapiens
gtaattagtgatacc

SEQ ID NO: 848368 - DNA, 15 bp, Homo sapiens
taattagtgatacct

SEQ ID NO: 848369 - DNA, 15 bp, Homo sapiens
aattagtgatacctc

SEQ ID NO: 848370 - DNA, 15 bp, Homo sapiens
attagtgatacctca

SEQ ID NO: 848371 - DNA, 15 bp, Homo sapiens
ttagtgatacctcat

SEQ ID NO: 848372 - DNA, 15 bp, Homo sapiens
tagtgatacctcata

SEQ ID NO: 848373 - DNA, 15 bp, Homo sapiens
agtgatacctcatat

SEQ ID NO: 848374 - DNA, 15 bp, Homo sapiens
gtgatacctcatata

SEQ ID NO: 848375 - DNA, 15 bp, Homo sapiens
tgatacctcatatag

SEQ ID NO: 848376 - DNA, 15 bp, Homo sapiens
gatacctcatatagt

SEQ ID NO: 848377 - DNA, 15 bp, Homo sapiens
atacctcatatagta

SEQ ID NO: 848378 - DNA, 15 bp, Homo sapiens
tacctcatatagtat

SEQ ID NO: 848379 - DNA, 15 bp, Homo sapiens
acctcatatagtatc

SEQ ID NO: 848380 - DNA, 15 bp, Homo sapiens
cctcatatagtatcc

SEQ ID NO: 848381 - DNA, 15 bp, Homo sapiens
ctcatatagtatcct

SEQ ID NO: 848382 - DNA, 15 bp, Homo sapiens
tcatatagtatccta

SEQ ID NO: 848383 - DNA, 15 bp, Homo sapiens
catatagtatcctat

SEQ ID NO: 848384 - DNA, 15 bp, Homo sapiens
atatagtatcctatt

SEQ ID NO: 848385 - DNA, 15 bp, Homo sapiens
tatagtatcctattc

SEQ ID NO: 848386 - DNA, 15 bp, Homo sapiens
atagtatcctattca

SEQ ID NO: 848387 - DNA, 15 bp, Homo sapiens
tagtatcctattcat

SEQ ID NO: 848388 - DNA, 15 bp, Homo sapiens
agtatcctattcatt

SEQ ID NO: 848389 - DNA, 15 bp, Homo sapiens
gtatcctattcatta

SEQ ID NO: 848390 - DNA, 15 bp, Homo sapiens
tatcctattcattaa

SEQ ID NO: 848391 - DNA, 15 bp, Homo sapiens
atcctattcattaat

SEQ ID NO: 848392 - DNA, 15 bp, Homo sapiens
tcctattcattaata

SEQ ID NO: 848393 - DNA, 15 bp, Homo sapiens
cctattcattaataa

SEQ ID NO: 848394 - DNA, 15 bp, Homo sapiens
ctattcattaataaa

SEQ ID NO: 848395 - DNA, 15 bp, Homo sapiens
tattcattaataaaa

SEQ ID NO: 848396 - DNA, 15 bp, Homo sapiens
attcattaataaaac

SEQ ID NO: 848397 - DNA, 15 bp, Homo sapiens
ttcattaataaaaca

SEQ ID NO: 848398 - DNA, 15 bp, Homo sapiens
tcattaataaaacaa

SEQ ID NO: 848399 - DNA, 15 bp, Homo sapiens
cattaataaaacaaa

SEQ ID NO: 848400 - DNA, 15 bp, Homo sapiens
attaataaaacaaat

SEQ ID NO: 848401 - DNA, 15 bp, Homo sapiens
ttaataaaacaaatt

SEQ ID NO: 848402 - DNA, 15 bp, Homo sapiens
taataaaacaaatta

SEQ ID NO: 848403 - DNA, 15 bp, Homo sapiens
aataaaacaaattat

SEQ ID NO: 848404 - DNA, 15 bp, Homo sapiens
ataaaacaaattatg

SEQ ID NO: 848405 - DNA, 15 bp, Homo sapiens
taaaacaaattatgt

SEQ ID NO: 848406 - DNA, 15 bp, Homo sapiens
aaaacaaattatgtt

SEQ ID NO: 848407 - DNA, 15 bp, Homo sapiens
aaacaaattatgtta

SEQ ID NO: 848408 - DNA, 15 bp, Homo sapiens
aacaaattatgttaa

SEQ ID NO: 848409 - DNA, 15 bp, Homo sapiens
acaaattatgttaat

SEQ ID NO: 848410 - DNA, 15 bp, Homo sapiens
caaattatgttaata

SEQ ID NO: 848411 - DNA, 15 bp, Homo sapiens
aaattatgttaatac

SEQ ID NO: 848412 - DNA, 15 bp, Homo sapiens
aattatgttaatact

SEQ ID NO: 848413 - DNA, 15 bp, Homo sapiens
attatgttaatactg

SEQ ID NO: 848414 - DNA, 15 bp, Homo sapiens
ttatgttaatactgt

SEQ ID NO: 848415 - DNA, 15 bp, Homo sapiens
tatgttaatactgtt

SEQ ID NO: 848416 - DNA, 15 bp, Homo sapiens
atgttaatactgttt

SEQ ID NO: 848417 - DNA, 15 bp, Homo sapiens
tgttaatactgtttc

SEQ ID NO: 848418 - DNA, 15 bp, Homo sapiens
gttaatactgtttcc

SEQ ID NO: 848419 - DNA, 15 bp, Homo sapiens
ttaatactgtttccc

SEQ ID NO: 848420 - DNA, 15 bp, Homo sapiens
taatactgtttccca

SEQ ID NO: 848421 - DNA, 15 bp, Homo sapiens
aatactgtttcccaa

SEQ ID NO: 848422 - DNA, 15 bp, Homo sapiens
atactgtttcccaaa

SEQ ID NO: 848423 - DNA, 15 bp, Homo sapiens
tactgtttcccaaat

SEQ ID NO: 848424 - DNA, 15 bp, Homo sapiens
actgtttcccaaata

SEQ ID NO: 848425 - DNA, 15 bp, Homo sapiens
ctgtttcccaaatat

SEQ ID NO: 848426 - DNA, 15 bp, Homo sapiens
tgtttcccaaatatt

SEQ ID NO: 848427 - DNA, 15 bp, Homo sapiens
gtttcccaaatattc

SEQ ID NO: 848428 - DNA, 15 bp, Homo sapiens
tttcccaaatattct

SEQ ID NO: 848429 - DNA, 15 bp, Homo sapiens
ttcccaaatattcta

SEQ ID NO: 848430 - DNA, 15 bp, Homo sapiens
tcccaaatattctat

SEQ ID NO: 848431 - DNA, 15 bp, Homo sapiens
cccaaatattctata

SEQ ID NO: 848432 - DNA, 15 bp, Homo sapiens
ccaaatattctatat

SEQ ID NO: 848433 - DNA, 15 bp, Homo sapiens
caaatattctatatt

SEQ ID NO: 848434 - DNA, 15 bp, Homo sapiens
aaatattctatattc

SEQ ID NO: 848435 - DNA, 15 bp, Homo sapiens
aatattctatattcc

SEQ ID NO: 848436 - DNA, 15 bp, Homo sapiens
atattctatattcca

SEQ ID NO: 848437 - DNA, 15 bp, Homo sapiens
tattctatattccaa

SEQ ID NO: 848438 - DNA, 15 bp, Homo sapiens
attctatattccaac

SEQ ID NO: 848439 - DNA, 15 bp, Homo sapiens
ttctatattccaaca

SEQ ID NO: 848440 - DNA, 15 bp, Homo sapiens
tctatattccaacat

SEQ ID NO: 848441 - DNA, 15 bp, Homo sapiens
ctatattccaacatt

SEQ ID NO: 848442 - DNA, 15 bp, Homo sapiens
tatattccaacattt

SEQ ID NO: 848443 - DNA, 15 bp, Homo sapiens
atattccaacatttt

SEQ ID NO: 848444 - DNA, 15 bp, Homo sapiens
tattccaacattttt

SEQ ID NO: 848445 - DNA, 15 bp, Homo sapiens
attccaacatttttt

SEQ ID NO: 848446 - DNA, 15 bp, Homo sapiens
ttccaacattttttt

SEQ ID NO: 848447 - DNA, 15 bp, Homo sapiens
tccaacattttttta

SEQ ID NO: 848448 - DNA, 15 bp, Homo sapiens
ccaacatttttttac

SEQ ID NO: 848449 - DNA, 15 bp, Homo sapiens
caacatttttttact

SEQ ID NO: 848450 - DNA, 15 bp, Homo sapiens
aacatttttttacta

SEQ ID NO: 848451 - DNA, 15 bp, Homo sapiens
acatttttttactaa

SEQ ID NO: 848452 - DNA, 15 bp, Homo sapiens
catttttttactaag

SEQ ID NO: 848453 - DNA, 15 bp, Homo sapiens
atttttttactaagg

SEQ ID NO: 848454 - DNA, 15 bp, Homo sapiens
tttttttactaaggc

SEQ ID NO: 848455 - DNA, 15 bp, Homo sapiens
ttttttactaaggca

SEQ ID NO: 848456 - DNA, 15 bp, Homo sapiens
tttttactaaggcag

SEQ ID NO: 848457 - DNA, 15 bp, Homo sapiens
ttttactaaggcaga

SEQ ID NO: 848458 - DNA, 15 bp, Homo sapiens
tttactaaggcagat

SEQ ID NO: 848459 - DNA, 15 bp, Homo sapiens
ttactaaggcagatt

SEQ ID NO: 848460 - DNA, 15 bp, Homo sapiens
tactaaggcagatta

SEQ ID NO: 848461 - DNA, 15 bp, Homo sapiens
actaaggcagattag

SEQ ID NO: 848462 - DNA, 15 bp, Homo sapiens
ctaaggcagattagg

SEQ ID NO: 848463 - DNA, 15 bp, Homo sapiens
taaggcagattaggc

SEQ ID NO: 848464 - DNA, 15 bp, Homo sapiens
aaggcagattaggct

SEQ ID NO: 848465 - DNA, 15 bp, Homo sapiens
aggcagattaggctt

SEQ ID NO: 848466 - DNA, 15 bp, Homo sapiens
ggcagattaggcttt

SEQ ID NO: 848467 - DNA, 15 bp, Homo sapiens
gcagattaggctttc

SEQ ID NO: 848468 - DNA, 15 bp, Homo sapiens
cagattaggctttct

SEQ ID NO: 848469 - DNA, 15 bp, Homo sapiens
agattaggctttctt

SEQ ID NO: 848470 - DNA, 15 bp, Homo sapiens
gattaggctttcttc

SEQ ID NO: 848471 - DNA, 15 bp, Homo sapiens
attaggctttcttca

SEQ ID NO: 848472 - DNA, 15 bp, Homo sapiens
ttaggctttcttcaa

SEQ ID NO: 848473 - DNA, 15 bp, Homo sapiens
taggctttcttcaaa

SEQ ID NO: 848474 - DNA, 15 bp, Homo sapiens
aggctttcttcaaat

SEQ ID NO: 848475 - DNA, 15 bp, Homo sapiens
ggctttcttcaaatt

SEQ ID NO: 848476 - DNA, 15 bp, Homo sapiens
gctttcttcaaatta

SEQ ID NO: 848477 - DNA, 15 bp, Homo sapiens
ctttcttcaaattag

SEQ ID NO: 848478 - DNA, 15 bp, Homo sapiens
tttcttcaaattagt

SEQ ID NO: 848479 - DNA, 15 bp, Homo sapiens
ttcttcaaattagtt

SEQ ID NO: 848480 - DNA, 15 bp, Homo sapiens
tcttcaaattagtta

SEQ ID NO: 848481 - DNA, 15 bp, Homo sapiens
cttcaaattagttag

SEQ ID NO: 848482 - DNA, 15 bp, Homo sapiens
ttcaaattagttaga

SEQ ID NO: 848483 - DNA, 15 bp, Homo sapiens
tcaaattagttagag

SEQ ID NO: 848484 - DNA, 15 bp, Homo sapiens
caaattagttagagt

SEQ ID NO: 848485 - DNA, 15 bp, Homo sapiens
aaattagttagagtt

SEQ ID NO: 848486 - DNA, 15 bp, Homo sapiens
aattagttagagtta

SEQ ID NO: 848487 - DNA, 15 bp, Homo sapiens
attagttagagttag

SEQ ID NO: 848488 - DNA, 15 bp, Homo sapiens
ttagttagagttagt

SEQ ID NO: 848489 - DNA, 15 bp, Homo sapiens
tagttagagttagtg

SEQ ID NO: 848490 - DNA, 15 bp, Homo sapiens
agttagagttagtga

SEQ ID NO: 848491 - DNA, 15 bp, Homo sapiens
gttagagttagtgac

SEQ ID NO: 848492 - DNA, 15 bp, Homo sapiens
ttagagttagtgacc

SEQ ID NO: 848493 - DNA, 15 bp, Homo sapiens
tagagttagtgacct

SEQ ID NO: 848494 - DNA, 15 bp, Homo sapiens
agagttagtgacctt

SEQ ID NO: 848495 - DNA, 15 bp, Homo sapiens
gagttagtgaccttt

SEQ ID NO: 848496 - DNA, 15 bp, Homo sapiens
agttagtgacctttg

SEQ ID NO: 848497 - DNA, 15 bp, Homo sapiens
gttagtgacctttgc

SEQ ID NO: 848498 - DNA, 15 bp, Homo sapiens
ttagtgacctttgct

SEQ ID NO: 848499 - DNA, 15 bp, Homo sapiens
tagtgacctttgctt

SEQ ID NO: 848500 - DNA, 15 bp, Homo sapiens
agtgacctttgctta

SEQ ID NO: 848501 - DNA, 15 bp, Homo sapiens
gtgacctttgcttat

SEQ ID NO: 848502 - DNA, 15 bp, Homo sapiens
tgacctttgcttata

SEQ ID NO: 848503 - DNA, 15 bp, Homo sapiens
gacctttgcttataa

SEQ ID NO: 848504 - DNA, 15 bp, Homo sapiens
acctttgcttataag

SEQ ID NO: 848505 - DNA, 15 bp, Homo sapiens
cctttgcttataagt

SEQ ID NO: 848506 - DNA, 15 bp, Homo sapiens
ctttgcttataagtc

SEQ ID NO: 848507 - DNA, 15 bp, Homo sapiens
tttgcttataagtca

SEQ ID NO: 848508 - DNA, 15 bp, Homo sapiens
ttgcttataagtcaa

SEQ ID NO: 848509 - DNA, 15 bp, Homo sapiens
tgcttataagtcaag

SEQ ID NO: 848510 - DNA, 15 bp, Homo sapiens
gcttataagtcaagc

SEQ ID NO: 848511 - DNA, 15 bp, Homo sapiens
cttataagtcaagca

SEQ ID NO: 848512 - DNA, 15 bp, Homo sapiens
ttataagtcaagcat

SEQ ID NO: 848513 - DNA, 15 bp, Homo sapiens
tataagtcaagcata

SEQ ID NO: 848514 - DNA, 15 bp, Homo sapiens
ataagtcaagcatat

SEQ ID NO: 848515 - DNA, 15 bp, Homo sapiens
taagtcaagcatatc

SEQ ID NO: 848516 - DNA, 15 bp, Homo sapiens
aagtcaagcatatct

SEQ ID NO: 848517 - DNA, 15 bp, Homo sapiens
agtcaagcatatctt

SEQ ID NO: 848518 - DNA, 15 bp, Homo sapiens
gtcaagcatatcttt

SEQ ID NO: 848519 - DNA, 15 bp, Homo sapiens
tcaagcatatctttt

SEQ ID NO: 848520 - DNA, 15 bp, Homo sapiens
caagcatatctttta

SEQ ID NO: 848521 - DNA, 15 bp, Homo sapiens
aagcatatcttttat

SEQ ID NO: 848522 - DNA, 15 bp, Homo sapiens
agcatatcttttatt

SEQ ID NO: 848523 - DNA, 15 bp, Homo sapiens
gcatatcttttattc

SEQ ID NO: 848524 - DNA, 15 bp, Homo sapiens
catatcttttattcg

SEQ ID NO: 848525 - DNA, 15 bp, Homo sapiens
atatcttttattcga

SEQ ID NO: 848526 - DNA, 15 bp, Homo sapiens
tatcttttattcgaa

SEQ ID NO: 848527 - DNA, 15 bp, Homo sapiens
atcttttattcgaaa

SEQ ID NO: 848528 - DNA, 15 bp, Homo sapiens
tcttttattcgaaaa

SEQ ID NO: 848529 - DNA, 15 bp, Homo sapiens
cttttattcgaaaaa

SEQ ID NO: 848530 - DNA, 15 bp, Homo sapiens
ttttattcgaaaaaa

SEQ ID NO: 848531 - DNA, 15 bp, Homo sapiens
tttattcgaaaaaaa

SEQ ID NO: 848532 - DNA, 15 bp, Homo sapiens
ttattcgaaaaaaat

SEQ ID NO: 848533 - DNA, 15 bp, Homo sapiens
tattcgaaaaaaatt

SEQ ID NO: 848534 - DNA, 15 bp, Homo sapiens
attcgaaaaaaatta

SEQ ID NO: 848535 - DNA, 15 bp, Homo sapiens
ttcgaaaaaaattat

SEQ ID NO: 848536 - DNA, 15 bp, Homo sapiens
tcgaaaaaaattatt

SEQ ID NO: 848537 - DNA, 15 bp, Homo sapiens
cgaaaaaaattattg

SEQ ID NO: 848538 - DNA, 15 bp, Homo sapiens
gaaaaaaattattga

SEQ ID NO: 848539 - DNA, 15 bp, Homo sapiens
aaaaaaattattgag

SEQ ID NO: 848540 - DNA, 15 bp, Homo sapiens
aaaaaattattgaga

SEQ ID NO: 848541 - DNA, 15 bp, Homo sapiens
aaaaattattgagat

SEQ ID NO: 848542 - DNA, 15 bp, Homo sapiens
aaaattattgagatc

SEQ ID NO: 848543 - DNA, 15 bp, Homo sapiens
aaattattgagatct

SEQ ID NO: 848544 - DNA, 15 bp, Homo sapiens
aattattgagatctt

SEQ ID NO: 848545 - DNA, 15 bp, Homo sapiens
attattgagatctta

SEQ ID NO: 848546 - DNA, 15 bp, Homo sapiens
ttattgagatcttat

SEQ ID NO: 848547 - DNA, 15 bp, Homo sapiens
tattgagatcttatg

SEQ ID NO: 848548 - DNA, 15 bp, Homo sapiens
attgagatcttatgg

SEQ ID NO: 848549 - DNA, 15 bp, Homo sapiens
ttgagatcttatggt

SEQ ID NO: 848550 - DNA, 15 bp, Homo sapiens
tgagatcttatggtt

SEQ ID NO: 848551 - DNA, 15 bp, Homo sapiens
gagatcttatggttt

SEQ ID NO: 848552 - DNA, 15 bp, Homo sapiens
agatcttatggtttg

SEQ ID NO: 848553 - DNA, 15 bp, Homo sapiens
gatcttatggtttgg

SEQ ID NO: 848554 - DNA, 15 bp, Homo sapiens
atcttatggtttgga

SEQ ID NO: 848555 - DNA, 15 bp, Homo sapiens
tcttatggtttggag

SEQ ID NO: 848556 - DNA, 15 bp, Homo sapiens
cttatggtttggaga

SEQ ID NO: 848557 - DNA, 15 bp, Homo sapiens
ttatggtttggagaa

SEQ ID NO: 848558 - DNA, 15 bp, Homo sapiens
tatggtttggagaaa

SEQ ID NO: 848559 - DNA, 15 bp, Homo sapiens
atggtttggagaaat

SEQ ID NO: 848560 - DNA, 15 bp, Homo sapiens
tggtttggagaaatt

SEQ ID NO: 848561 - DNA, 15 bp, Homo sapiens
ggtttggagaaatta

SEQ ID NO: 848562 - DNA, 15 bp, Homo sapiens
gtttggagaaattaa

SEQ ID NO: 848563 - DNA, 15 bp, Homo sapiens
tttggagaaattaaa

SEQ ID NO: 848564 - DNA, 15 bp, Homo sapiens
ttggagaaattaaaa

SEQ ID NO: 848565 - DNA, 15 bp, Homo sapiens
tggagaaattaaaaa

SEQ ID NO: 848566 - DNA, 15 bp, Homo sapiens
ggagaaattaaaaag

SEQ ID NO: 848567 - DNA, 15 bp, Homo sapiens
gagaaattaaaaagt

SEQ ID NO: 848568 - DNA, 15 bp, Homo sapiens
agaaattaaaaagtt

SEQ ID NO: 848569 - DNA, 15 bp, Homo sapiens
gaaattaaaaagttc

SEQ ID NO: 848570 - DNA, 15 bp, Homo sapiens
aaattaaaaagttca

SEQ ID NO: 848571 - DNA, 15 bp, Homo sapiens
aattaaaaagttcag

SEQ ID NO: 848572 - DNA, 15 bp, Homo sapiens
attaaaaagttcagg

SEQ ID NO: 848573 - DNA, 15 bp, Homo sapiens
ttaaaaagttcaggc

SEQ ID NO: 848574 - DNA, 15 bp, Homo sapiens
taaaaagttcaggct

SEQ ID NO: 848575 - DNA, 15 bp, Homo sapiens
aaaaagttcaggctt

SEQ ID NO: 848576 - DNA, 15 bp, Homo sapiens
aaaagttcaggctta

SEQ ID NO: 848577 - DNA, 15 bp, Homo sapiens
aaagttcaggcttag

SEQ ID NO: 848578 - DNA, 15 bp, Homo sapiens
aagttcaggcttagc

SEQ ID NO: 848579 - DNA, 15 bp, Homo sapiens
agttcaggcttagct

SEQ ID NO: 848580 - DNA, 15 bp, Homo sapiens
gttcaggcttagcta

SEQ ID NO: 848581 - DNA, 15 bp, Homo sapiens
ttcaggcttagctaa

SEQ ID NO: 848582 - DNA, 15 bp, Homo sapiens
tcaggcttagctaaa

SEQ ID NO: 848583 - DNA, 15 bp, Homo sapiens
caggcttagctaaac

SEQ ID NO: 848584 - DNA, 15 bp, Homo sapiens
aggcttagctaaaca

SEQ ID NO: 848585 - DNA, 15 bp, Homo sapiens
ggcttagctaaacac

SEQ ID NO: 848586 - DNA, 15 bp, Homo sapiens
gcttagctaaacaca

SEQ ID NO: 848587 - DNA, 15 bp, Homo sapiens
cttagctaaacacat

SEQ ID NO: 848588 - DNA, 15 bp, Homo sapiens
ttagctaaacacatt

SEQ ID NO: 848589 - DNA, 15 bp, Homo sapiens
tagctaaacacattg

SEQ ID NO: 848590 - DNA, 15 bp, Homo sapiens
agctaaacacattgc

SEQ ID NO: 848591 - DNA, 15 bp, Homo sapiens
gctaaacacattgca

SEQ ID NO: 848592 - DNA, 15 bp, Homo sapiens
ctaaacacattgcag

SEQ ID NO: 848593 - DNA, 15 bp, Homo sapiens
taaacacattgcagt

SEQ ID NO: 848594 - DNA, 15 bp, Homo sapiens
aaacacattgcagtt

SEQ ID NO: 848595 - DNA, 15 bp, Homo sapiens
aacacattgcagtta

SEQ ID NO: 848596 - DNA, 15 bp, Homo sapiens
acacattgcagttaa

SEQ ID NO: 848597 - DNA, 15 bp, Homo sapiens
cacattgcagttaat

SEQ ID NO: 848598 - DNA, 15 bp, Homo sapiens
acattgcagttaatt

SEQ ID NO: 848599 - DNA, 15 bp, Homo sapiens
cattgcagttaattt

SEQ ID NO: 848600 - DNA, 15 bp, Homo sapiens
attgcagttaatttt

SEQ ID NO: 848601 - DNA, 15 bp, Homo sapiens
ttgcagttaattttt

SEQ ID NO: 848602 - DNA, 15 bp, Homo sapiens
tgcagttaattttta

SEQ ID NO: 848603 - DNA, 15 bp, Homo sapiens
gcagttaatttttaa

SEQ ID NO: 848604 - DNA, 15 bp, Homo sapiens
cagttaatttttaaa

SEQ ID NO: 848605 - DNA, 15 bp, Homo sapiens
agttaatttttaaaa

SEQ ID NO: 848606 - DNA, 15 bp, Homo sapiens
gttaatttttaaaat

SEQ ID NO: 848607 - DNA, 15 bp, Homo sapiens
ttaatttttaaaatc

SEQ ID NO: 848608 - DNA, 15 bp, Homo sapiens
taatttttaaaatca

SEQ ID NO: 848609 - DNA, 15 bp, Homo sapiens
aatttttaaaatcat

SEQ ID NO: 848610 - DNA, 15 bp, Homo sapiens
atttttaaaatcata

SEQ ID NO: 848611 - DNA, 15 bp, Homo sapiens
tttttaaaatcatac

SEQ ID NO: 848612 - DNA, 15 bp, Homo sapiens
ttttaaaatcatacc

SEQ ID NO: 848613 - DNA, 15 bp, Homo sapiens
tttaaaatcatacca

SEQ ID NO: 848614 - DNA, 15 bp, Homo sapiens
ttaaaatcataccat

SEQ ID NO: 848615 - DNA, 15 bp, Homo sapiens
taaaatcataccatt

SEQ ID NO: 848616 - DNA, 15 bp, Homo sapiens
aaaatcataccattt

SEQ ID NO: 848617 - DNA, 15 bp, Homo sapiens
aaatcataccattta

SEQ ID NO: 848618 - DNA, 15 bp, Homo sapiens
aatcataccatttag

SEQ ID NO: 848619 - DNA, 15 bp, Homo sapiens
atcataccatttagc

SEQ ID NO: 848620 - DNA, 15 bp, Homo sapiens
tcataccatttagca

SEQ ID NO: 848621 - DNA, 15 bp, Homo sapiens
cataccatttagcaa

SEQ ID NO: 848622 - DNA, 15 bp, Homo sapiens
ataccatttagcaat

SEQ ID NO: 848623 - DNA, 15 bp, Homo sapiens
taccatttagcaata

SEQ ID NO: 848624 - DNA, 15 bp, Homo sapiens
accatttagcaatag

SEQ ID NO: 848625 - DNA, 15 bp, Homo sapiens
ccatttagcaataga

SEQ ID NO: 848626 - DNA, 15 bp, Homo sapiens
catttagcaatagaa

SEQ ID NO: 848627 - DNA, 15 bp, Homo sapiens
atttagcaatagaat

SEQ ID NO: 848628 - DNA, 15 bp, Homo sapiens
tttagcaatagaatt

SEQ ID NO: 848629 - DNA, 15 bp, Homo sapiens
ttagcaatagaattg

SEQ ID NO: 848630 - DNA, 15 bp, Homo sapiens
tagcaatagaattgg

SEQ ID NO: 848631 - DNA, 15 bp, Homo sapiens
agcaatagaattggt

SEQ ID NO: 848632 - DNA, 15 bp, Homo sapiens
gcaatagaattggtt

SEQ ID NO: 848633 - DNA, 15 bp, Homo sapiens
caatagaattggttg

SEQ ID NO: 848634 - DNA, 15 bp, Homo sapiens
aatagaattggttga

SEQ ID NO: 848635 - DNA, 15 bp, Homo sapiens
atagaattggttgag

SEQ ID NO: 848636 - DNA, 15 bp, Homo sapiens
tagaattggttgagt

SEQ ID NO: 848637 - DNA, 15 bp, Homo sapiens
agaattggttgagtg

SEQ ID NO: 848638 - DNA, 15 bp, Homo sapiens
gaattggttgagtga

SEQ ID NO: 848639 - DNA, 15 bp, Homo sapiens
aattggttgagtgac

SEQ ID NO: 848640 - DNA, 15 bp, Homo sapiens
attggttgagtgact

SEQ ID NO: 848641 - DNA, 15 bp, Homo sapiens
ttggttgagtgactt

SEQ ID NO: 848642 - DNA, 15 bp, Homo sapiens
ggttgagtgactttt

SEQ ID NO: 848643 - DNA, 15 bp, Homo sapiens
gttgagtgacttttt

SEQ ID NO: 848644 - DNA, 15 bp, Homo sapiens
ttgagtgactttttt

SEQ ID NO: 848645 - DNA, 15 bp, Homo sapiens
tgagtgacttttttt

SEQ ID NO: 848646 - DNA, 15 bp, Homo sapiens
gagtgactttttttt

SEQ ID NO: 848647 - DNA, 15 bp, Homo sapiens
agtgacttttttttt

SEQ ID NO: 848648 - DNA, 15 bp, Homo sapiens
gtgactttttttttt

SEQ ID NO: 848649 - DNA, 15 bp, Homo sapiens
tgactttttttttta

SEQ ID NO: 848650 - DNA, 15 bp, Homo sapiens
gacttttttttttaa

SEQ ID NO: 848651 - DNA, 15 bp, Homo sapiens
acttttttttttaaa

SEQ ID NO: 848652 - DNA, 15 bp, Homo sapiens
cttttttttttaaag

SEQ ID NO: 848653 - DNA, 15 bp, Homo sapiens
ttttttttttaaaga

SEQ ID NO: 848654 - DNA, 15 bp, Homo sapiens
tttttttttaaagac

SEQ ID NO: 848655 - DNA, 15 bp, Homo sapiens
ttttttttaaagacc

SEQ ID NO: 848656 - DNA, 15 bp, Homo sapiens
tttttttaaagaccc

SEQ ID NO: 848657 - DNA, 15 bp, Homo sapiens
ttttttaaagacccc

SEQ ID NO: 848658 - DNA, 15 bp, Homo sapiens
tttttaaagacccca

SEQ ID NO: 848659 - DNA, 15 bp, Homo sapiens
ttttaaagaccccac

SEQ ID NO: 848660 - DNA, 15 bp, Homo sapiens
tttaaagaccccact

SEQ ID NO: 848661 - DNA, 15 bp, Homo sapiens
ttaaagaccccactc

SEQ ID NO: 848662 - DNA, 15 bp, Homo sapiens
taaagaccccactct

SEQ ID NO: 848663 - DNA, 15 bp, Homo sapiens
aaagaccccactctg

SEQ ID NO: 848664 - DNA, 15 bp, Homo sapiens
aagaccccactctgg

SEQ ID NO: 848665 - DNA, 15 bp, Homo sapiens
agaccccactctggg

SEQ ID NO: 848666 - DNA, 15 bp, Homo sapiens
gaccccactctgggg

SEQ ID NO: 848667 - DNA, 15 bp, Homo sapiens
accccactctgggga

SEQ ID NO: 848668 - DNA, 15 bp, Homo sapiens
ccccactctggggaa

SEQ ID NO: 848669 - DNA, 15 bp, Homo sapiens
cccactctggggaag

SEQ ID NO: 848670 - DNA, 15 bp, Homo sapiens
ccactctggggaagg

SEQ ID NO: 848671 - DNA, 15 bp, Homo sapiens
cactctggggaaggc

SEQ ID NO: 848672 - DNA, 15 bp, Homo sapiens
actctggggaaggcc

SEQ ID NO: 848673 - DNA, 15 bp, Homo sapiens
ctctggggaaggcca

SEQ ID NO: 848674 - DNA, 15 bp, Homo sapiens
tctggggaaggccaa

SEQ ID NO: 848675 - DNA, 15 bp, Homo sapiens
ctggggaaggccaat

SEQ ID NO: 848676 - DNA, 15 bp, Homo sapiens
tggggaaggccaatt

SEQ ID NO: 848677 - DNA, 15 bp, Homo sapiens
ggggaaggccaattt

SEQ ID NO: 848678 - DNA, 15 bp, Homo sapiens
gggaaggccaatttg

SEQ ID NO: 848679 - DNA, 15 bp, Homo sapiens
ggaaggccaatttgt

SEQ ID NO: 848680 - DNA, 15 bp, Homo sapiens
gaaggccaatttgta

SEQ ID NO: 848681 - DNA, 15 bp, Homo sapiens
aaggccaatttgtag

SEQ ID NO: 848682 - DNA, 15 bp, Homo sapiens
aggccaatttgtaga

SEQ ID NO: 848683 - DNA, 15 bp, Homo sapiens
ggccaatttgtagat

SEQ ID NO: 848684 - DNA, 15 bp, Homo sapiens
gccaatttgtagata

SEQ ID NO: 848685 - DNA, 15 bp, Homo sapiens
ccaatttgtagataa

SEQ ID NO: 848686 - DNA, 15 bp, Homo sapiens
caatttgtagataaa

SEQ ID NO: 848687 - DNA, 15 bp, Homo sapiens
aatttgtagataaac

SEQ ID NO: 848688 - DNA, 15 bp, Homo sapiens
atttgtagataaact

SEQ ID NO: 848689 - DNA, 15 bp, Homo sapiens
tttgtagataaactg

SEQ ID NO: 848690 - DNA, 15 bp, Homo sapiens
ttgtagataaactgc

SEQ ID NO: 848691 - DNA, 15 bp, Homo sapiens
tgtagataaactgct

SEQ ID NO: 848692 - DNA, 15 bp, Homo sapiens
gtagataaactgctc

SEQ ID NO: 848693 - DNA, 15 bp, Homo sapiens
tagataaactgctca

SEQ ID NO: 848694 - DNA, 15 bp, Homo sapiens
agataaactgctcat

SEQ ID NO: 848695 - DNA, 15 bp, Homo sapiens
gataaactgctcata

SEQ ID NO: 848696 - DNA, 15 bp, Homo sapiens
ataaactgctcatac

SEQ ID NO: 848697 - DNA, 15 bp, Homo sapiens
taaactgctcatacc

SEQ ID NO: 848698 - DNA, 15 bp, Homo sapiens
aaactgctcataccc

SEQ ID NO: 848699 - DNA, 15 bp, Homo sapiens
aactgctcataccca

SEQ ID NO: 848700 - DNA, 15 bp, Homo sapiens
actgctcatacccag

SEQ ID NO: 848701 - DNA, 15 bp, Homo sapiens
ctgctcatacccagc

SEQ ID NO: 848702 - DNA, 15 bp, Homo sapiens
tgctcatacccagca

SEQ ID NO: 848703 - DNA, 15 bp, Homo sapiens
gctcatacccagcag

SEQ ID NO: 848704 - DNA, 15 bp, Homo sapiens
ctcatacccagcagc

SEQ ID NO: 848705 - DNA, 15 bp, Homo sapiens
tcatacccagcagca

SEQ ID NO: 848706 - DNA, 15 bp, Homo sapiens
catacccagcagcac

SEQ ID NO: 848707 - DNA, 15 bp, Homo sapiens
atacccagcagcact

SEQ ID NO: 848708 - DNA, 15 bp, Homo sapiens
tacccagcagcactg

SEQ ID NO: 848709 - DNA, 15 bp, Homo sapiens
acccagcagcactgc

SEQ ID NO: 848710 - DNA, 15 bp, Homo sapiens
cccagcagcactgcc

SEQ ID NO: 848711 - DNA, 15 bp, Homo sapiens
ccagcagcactgcct

SEQ ID NO: 848712 - DNA, 15 bp, Homo sapiens
cagcagcactgccta

SEQ ID NO: 848713 - DNA, 15 bp, Homo sapiens
agcagcactgcctag

SEQ ID NO: 848714 - DNA, 15 bp, Homo sapiens
gcagcactgcctagc

SEQ ID NO: 848715 - DNA, 15 bp, Homo sapiens
cagcactgcctagct

SEQ ID NO: 848716 - DNA, 15 bp, Homo sapiens
agcactgcctagcta

SEQ ID NO: 848717 - DNA, 15 bp, Homo sapiens
gcactgcctagctaa

SEQ ID NO: 848718 - DNA, 15 bp, Homo sapiens
cactgcctagctaat

SEQ ID NO: 848719 - DNA, 15 bp, Homo sapiens
actgcctagctaatg

SEQ ID NO: 848720 - DNA, 15 bp, Homo sapiens
ctgcctagctaatgt

SEQ ID NO: 848721 - DNA, 15 bp, Homo sapiens
tgcctagctaatgtc

SEQ ID NO: 848722 - DNA, 15 bp, Homo sapiens
gcctagctaatgtct

SEQ ID NO: 848723 - DNA, 15 bp, Homo sapiens
cctagctaatgtcta

SEQ ID NO: 848724 - DNA, 15 bp, Homo sapiens
ctagctaatgtctaa

SEQ ID NO: 848725 - DNA, 15 bp, Homo sapiens
tagctaatgtctaac

SEQ ID NO: 848726 - DNA, 15 bp, Homo sapiens
agctaatgtctaacc

SEQ ID NO: 848727 - DNA, 15 bp, Homo sapiens
gctaatgtctaacct

SEQ ID NO: 848728 - DNA, 15 bp, Homo sapiens
ctaatgtctaacctg

SEQ ID NO: 848729 - DNA, 15 bp, Homo sapiens
taatgtctaacctgt

SEQ ID NO: 848730 - DNA, 15 bp, Homo sapiens
aatgtctaacctgtg

SEQ ID NO: 848731 - DNA, 15 bp, Homo sapiens
atgtctaacctgtgg

SEQ ID NO: 848732 - DNA, 15 bp, Homo sapiens
tgtctaacctgtggg

SEQ ID NO: 848733 - DNA, 15 bp, Homo sapiens
gtctaacctgtggga

SEQ ID NO: 848734 - DNA, 15 bp, Homo sapiens
tctaacctgtgggag

SEQ ID NO: 848735 - DNA, 15 bp, Homo sapiens
ctaacctgtgggagt

SEQ ID NO: 848736 - DNA, 15 bp, Homo sapiens
taacctgtgggagta

SEQ ID NO: 848737 - DNA, 15 bp, Homo sapiens
aacctgtgggagtag

SEQ ID NO: 848738 - DNA, 15 bp, Homo sapiens
acctgtgggagtagg

SEQ ID NO: 848739 - DNA, 15 bp, Homo sapiens
cctgtgggagtaggc

SEQ ID NO: 848740 - DNA, 15 bp, Homo sapiens
ctgtgggagtaggct

SEQ ID NO: 848741 - DNA, 15 bp, Homo sapiens
tgtgggagtaggctg

SEQ ID NO: 848742 - DNA, 15 bp, Homo sapiens
gtgggagtaggctgg

SEQ ID NO: 848743 - DNA, 15 bp, Homo sapiens
tgggagtaggctgga

SEQ ID NO: 848744 - DNA, 15 bp, Homo sapiens
gggagtaggctggaa

SEQ ID NO: 848745 - DNA, 15 bp, Homo sapiens
ggagtaggctggaag

SEQ ID NO: 848746 - DNA, 15 bp, Homo sapiens
gagtaggctggaagc

SEQ ID NO: 848747 - DNA, 15 bp, Homo sapiens
agtaggctggaagca

SEQ ID NO: 848748 - DNA, 15 bp, Homo sapiens
gtaggctggaagcag

SEQ ID NO: 848749 - DNA, 15 bp, Homo sapiens
taggctggaagcagc

SEQ ID NO: 848750 - DNA, 15 bp, Homo sapiens
aggctggaagcagct

SEQ ID NO: 848751 - DNA, 15 bp, Homo sapiens
ggctggaagcagctc

SEQ ID NO: 848752 - DNA, 15 bp, Homo sapiens
gctggaagcagctca

SEQ ID NO: 848753 - DNA, 15 bp, Homo sapiens
ctggaagcagctcaa

SEQ ID NO: 848754 - DNA, 15 bp, Homo sapiens
tggaagcagctcaaa

SEQ ID NO: 848755 - DNA, 15 bp, Homo sapiens
ggaagcagctcaaac

SEQ ID NO: 848756 - DNA, 15 bp, Homo sapiens
gaagcagctcaaact

SEQ ID NO: 848757 - DNA, 15 bp, Homo sapiens
aagcagctcaaacta

SEQ ID NO: 848758 - DNA, 15 bp, Homo sapiens
agcagctcaaactaa

SEQ ID NO: 848759 - DNA, 15 bp, Homo sapiens
gcagctcaaactaat

SEQ ID NO: 848760 - DNA, 15 bp, Homo sapiens
cagctcaaactaatg

SEQ ID NO: 848761 - DNA, 15 bp, Homo sapiens
agctcaaactaatga

SEQ ID NO: 848762 - DNA, 15 bp, Homo sapiens
gctcaaactaatgag

SEQ ID NO: 848763 - DNA, 15 bp, Homo sapiens
ctcaaactaatgagg

SEQ ID NO: 848764 - DNA, 15 bp, Homo sapiens
tcaaactaatgaggt

SEQ ID NO: 848765 - DNA, 15 bp, Homo sapiens
caaactaatgaggtt

SEQ ID NO: 848766 - DNA, 15 bp, Homo sapiens
aaactaatgaggtta

SEQ ID NO: 848767 - DNA, 15 bp, Homo sapiens
aactaatgaggttaa

SEQ ID NO: 848768 - DNA, 15 bp, Homo sapiens
actaatgaggttaac

SEQ ID NO: 848769 - DNA, 15 bp, Homo sapiens
ctaatgaggttaacc

SEQ ID NO: 848770 - DNA, 15 bp, Homo sapiens
taatgaggttaacct

SEQ ID NO: 848771 - DNA, 15 bp, Homo sapiens
aatgaggttaaccta

SEQ ID NO: 848772 - DNA, 15 bp, Homo sapiens
atgaggttaacctac

SEQ ID NO: 848773 - DNA, 15 bp, Homo sapiens
tgaggttaacctaca

SEQ ID NO: 848774 - DNA, 15 bp, Homo sapiens
gaggttaacctacat

SEQ ID NO: 848775 - DNA, 15 bp, Homo sapiens
aggttaacctacata

SEQ ID NO: 848776 - DNA, 15 bp, Homo sapiens
ggttaacctacataa

SEQ ID NO: 848777 - DNA, 15 bp, Homo sapiens
gttaacctacataat

SEQ ID NO: 848778 - DNA, 15 bp, Homo sapiens
ttaacctacataatc

SEQ ID NO: 848779 - DNA, 15 bp, Homo sapiens
taacctacataatct

SEQ ID NO: 848780 - DNA, 15 bp, Homo sapiens
aacctacataatcta

SEQ ID NO: 848781 - DNA, 15 bp, Homo sapiens
acctacataatctaa

SEQ ID NO: 848782 - DNA, 15 bp, Homo sapiens
cctacataatctaat

SEQ ID NO: 848783 - DNA, 15 bp, Homo sapiens
ctacataatctaatt

SEQ ID NO: 848784 - DNA, 15 bp, Homo sapiens
tacataatctaattg

SEQ ID NO: 848785 - DNA, 15 bp, Homo sapiens
acataatctaattgc

SEQ ID NO: 848786 - DNA, 15 bp, Homo sapiens
cataatctaattgcc

SEQ ID NO: 848787 - DNA, 15 bp, Homo sapiens
ataatctaattgccc

SEQ ID NO: 848788 - DNA, 15 bp, Homo sapiens
taatctaattgccca

SEQ ID NO: 848789 - DNA, 15 bp, Homo sapiens
aatctaattgcccag

SEQ ID NO: 848790 - DNA, 15 bp, Homo sapiens
atctaattgcccaga

SEQ ID NO: 848791 - DNA, 15 bp, Homo sapiens
tctaattgcccagac

SEQ ID NO: 848792 - DNA, 15 bp, Homo sapiens
ctaattgcccagact

SEQ ID NO: 848793 - DNA, 15 bp, Homo sapiens
taattgcccagactg

SEQ ID NO: 848794 - DNA, 15 bp, Homo sapiens
aattgcccagactga

SEQ ID NO: 848795 - DNA, 15 bp, Homo sapiens
attgcccagactgag

SEQ ID NO: 848796 - DNA, 15 bp, Homo sapiens
ttgcccagactgagc

SEQ ID NO: 848797 - DNA, 15 bp, Homo sapiens
tgcccagactgagct

SEQ ID NO: 848798 - DNA, 15 bp, Homo sapiens
gcccagactgagcta

SEQ ID NO: 848799 - DNA, 15 bp, Homo sapiens
cccagactgagctaa

SEQ ID NO: 848800 - DNA, 15 bp, Homo sapiens
ccagactgagctaaa

SEQ ID NO: 848801 - DNA, 15 bp, Homo sapiens
cagactgagctaaaa

SEQ ID NO: 848802 - DNA, 15 bp, Homo sapiens
agactgagctaaaag

SEQ ID NO: 848803 - DNA, 15 bp, Homo sapiens
gactgagctaaaagc

SEQ ID NO: 848804 - DNA, 15 bp, Homo sapiens
actgagctaaaagca

SEQ ID NO: 848805 - DNA, 15 bp, Homo sapiens
ctgagctaaaagcag

SEQ ID NO: 848806 - DNA, 15 bp, Homo sapiens
tgagctaaaagcaga

SEQ ID NO: 848807 - DNA, 15 bp, Homo sapiens
gagctaaaagcagac

SEQ ID NO: 848808 - DNA, 15 bp, Homo sapiens
agctaaaagcagaca

SEQ ID NO: 848809 - DNA, 15 bp, Homo sapiens
gctaaaagcagacaa

SEQ ID NO: 848810 - DNA, 15 bp, Homo sapiens
ctaaaagcagacaaa

SEQ ID NO: 848811 - DNA, 15 bp, Homo sapiens
taaaagcagacaaag

SEQ ID NO: 848812 - DNA, 15 bp, Homo sapiens
aaaagcagacaaaga

SEQ ID NO: 848813 - DNA, 15 bp, Homo sapiens
aaagcagacaaagag

SEQ ID NO: 848814 - DNA, 15 bp, Homo sapiens
aagcagacaaagagc

SEQ ID NO: 848815 - DNA, 15 bp, Homo sapiens
agcagacaaagagca

SEQ ID NO: 848816 - DNA, 15 bp, Homo sapiens
gcagacaaagagcac

SEQ ID NO: 848817 - DNA, 15 bp, Homo sapiens
cagacaaagagcaca

SEQ ID NO: 848818 - DNA, 15 bp, Homo sapiens
agacaaagagcacag

SEQ ID NO: 848819 - DNA, 15 bp, Homo sapiens
gacaaagagcacaga

SEQ ID NO: 848820 - DNA, 15 bp, Homo sapiens
acaaagagcacagag

SEQ ID NO: 848821 - DNA, 15 bp, Homo sapiens
caaagagcacagagc

SEQ ID NO: 848822 - DNA, 15 bp, Homo sapiens
aaagagcacagagcc

SEQ ID NO: 848823 - DNA, 15 bp, Homo sapiens
aagagcacagagcca

SEQ ID NO: 848824 - DNA, 15 bp, Homo sapiens
agagcacagagccag

SEQ ID NO: 848825 - DNA, 15 bp, Homo sapiens
gagcacagagccagg

SEQ ID NO: 848826 - DNA, 15 bp, Homo sapiens
agcacagagccaggg

SEQ ID NO: 848827 - DNA, 15 bp, Homo sapiens
gcacagagccaggga

SEQ ID NO: 848828 - DNA, 15 bp, Homo sapiens
cacagagccagggag

SEQ ID NO: 848829 - DNA, 15 bp, Homo sapiens
acagagccagggagc

SEQ ID NO: 848830 - DNA, 15 bp, Homo sapiens
cagagccagggagcc

SEQ ID NO: 848831 - DNA, 15 bp, Homo sapiens
agagccagggagcct

SEQ ID NO: 848832 - DNA, 15 bp, Homo sapiens
gagccagggagcctt

SEQ ID NO: 848833 - DNA, 15 bp, Homo sapiens
agccagggagccttc

SEQ ID NO: 848834 - DNA, 15 bp, Homo sapiens
gccagggagccttca

SEQ ID NO: 848835 - DNA, 15 bp, Homo sapiens
ccagggagccttcag

SEQ ID NO: 848836 - DNA, 15 bp, Homo sapiens
cagggagccttcagt

SEQ ID NO: 848837 - DNA, 15 bp, Homo sapiens
agggagccttcagtt

SEQ ID NO: 848838 - DNA, 15 bp, Homo sapiens
gggagccttcagttt

SEQ ID NO: 848839 - DNA, 15 bp, Homo sapiens
ggagccttcagttta

SEQ ID NO: 848840 - DNA, 15 bp, Homo sapiens
gagccttcagtttat

SEQ ID NO: 848841 - DNA, 15 bp, Homo sapiens
agccttcagtttatt

SEQ ID NO: 848842 - DNA, 15 bp, Homo sapiens
gccttcagtttattt

SEQ ID NO: 848843 - DNA, 15 bp, Homo sapiens
ccttcagtttatttc

SEQ ID NO: 848844 - DNA, 15 bp, Homo sapiens
cttcagtttatttct

SEQ ID NO: 848845 - DNA, 15 bp, Homo sapiens
ttcagtttatttcta

SEQ ID NO: 848846 - DNA, 15 bp, Homo sapiens
tcagtttatttctaa

SEQ ID NO: 848847 - DNA, 15 bp, Homo sapiens
cagtttatttctaaa

SEQ ID NO: 848848 - DNA, 15 bp, Homo sapiens
agtttatttctaaat

SEQ ID NO: 848849 - DNA, 15 bp, Homo sapiens
gtttatttctaaatt

SEQ ID NO: 848850 - DNA, 15 bp, Homo sapiens
tttatttctaaattt

SEQ ID NO: 848851 - DNA, 15 bp, Homo sapiens
ttatttctaaatttt

SEQ ID NO: 848852 - DNA, 15 bp, Homo sapiens
tatttctaaattttt

SEQ ID NO: 848853 - DNA, 15 bp, Homo sapiens
atttctaaatttttt

SEQ ID NO: 848854 - DNA, 15 bp, Homo sapiens
tttctaaattttttc

SEQ ID NO: 848855 - DNA, 15 bp, Homo sapiens
ttctaaattttttct

SEQ ID NO: 848856 - DNA, 15 bp, Homo sapiens
tctaaattttttctg

SEQ ID NO: 848857 - DNA, 15 bp, Homo sapiens
ctaaattttttctgg

SEQ ID NO: 848858 - DNA, 15 bp, Homo sapiens
taaattttttctggc

SEQ ID NO: 848859 - DNA, 15 bp, Homo sapiens
aaattttttctggct

SEQ ID NO: 848860 - DNA, 15 bp, Homo sapiens
aattttttctggctt

SEQ ID NO: 848861 - DNA, 15 bp, Homo sapiens
attttttctggcttt

SEQ ID NO: 848862 - DNA, 15 bp, Homo sapiens
ttttttctggctttt

SEQ ID NO: 848863 - DNA, 15 bp, Homo sapiens
tttttctggcttttg

SEQ ID NO: 848864 - DNA, 15 bp, Homo sapiens
ttttctggcttttgt

SEQ ID NO: 848865 - DNA, 15 bp, Homo sapiens
tttctggcttttgta

SEQ ID NO: 848866 - DNA, 15 bp, Homo sapiens
ttctggcttttgtat

SEQ ID NO: 848867 - DNA, 15 bp, Homo sapiens
tctggcttttgtatg

SEQ ID NO: 848868 - DNA, 15 bp, Homo sapiens
ctggcttttgtatgc

SEQ ID NO: 848869 - DNA, 15 bp, Homo sapiens
tggcttttgtatgct

SEQ ID NO: 848870 - DNA, 15 bp, Homo sapiens
ggcttttgtatgctg

SEQ ID NO: 848871 - DNA, 15 bp, Homo sapiens
gcttttgtatgctgg

SEQ ID NO: 848872 - DNA, 15 bp, Homo sapiens
cttttgtatgctgga

SEQ ID NO: 848873 - DNA, 15 bp, Homo sapiens
ttttgtatgctggag

SEQ ID NO: 848874 - DNA, 15 bp, Homo sapiens
tttgtatgctggagt

SEQ ID NO: 848875 - DNA, 15 bp, Homo sapiens
ttgtatgctggagtg

SEQ ID NO: 848876 - DNA, 15 bp, Homo sapiens
tgtatgctggagtgt

SEQ ID NO: 848877 - DNA, 15 bp, Homo sapiens
gtatgctggagtgtc

SEQ ID NO: 848878 - DNA, 15 bp, Homo sapiens
tatgctggagtgtca

SEQ ID NO: 848879 - DNA, 15 bp, Homo sapiens
atgctggagtgtcac

SEQ ID NO: 848880 - DNA, 15 bp, Homo sapiens
tgctggagtgtcacc

SEQ ID NO: 848881 - DNA, 15 bp, Homo sapiens
gctggagtgtcacca

SEQ ID NO: 848882 - DNA, 15 bp, Homo sapiens
ctggagtgtcaccaa

SEQ ID NO: 848883 - DNA, 15 bp, Homo sapiens
tggagtgtcaccaag

SEQ ID NO: 848884 - DNA, 15 bp, Homo sapiens
ggagtgtcaccaagt

SEQ ID NO: 848885 - DNA, 15 bp, Homo sapiens
gagtgtcaccaagta

SEQ ID NO: 848886 - DNA, 15 bp, Homo sapiens
agtgtcaccaagtag

SEQ ID NO: 848887 - DNA, 15 bp, Homo sapiens
gtgtcaccaagtaga

SEQ ID NO: 848888 - DNA, 15 bp, Homo sapiens
tgtcaccaagtagat

SEQ ID NO: 848889 - DNA, 15 bp, Homo sapiens
gtcaccaagtagatg

SEQ ID NO: 848890 - DNA, 15 bp, Homo sapiens
tcaccaagtagatgg

SEQ ID NO: 848891 - DNA, 15 bp, Homo sapiens
caccaagtagatggt

SEQ ID NO: 848892 - DNA, 15 bp, Homo sapiens
accaagtagatggta

SEQ ID NO: 848893 - DNA, 15 bp, Homo sapiens
ccaagtagatggtag

SEQ ID NO: 848894 - DNA, 15 bp, Homo sapiens
caagtagatggtagg

SEQ ID NO: 848895 - DNA, 15 bp, Homo sapiens
aagtagatggtaggt

SEQ ID NO: 848896 - DNA, 15 bp, Homo sapiens
agtagatggtaggtg

SEQ ID NO: 848897 - DNA, 15 bp, Homo sapiens
gtagatggtaggtgt

SEQ ID NO: 848898 - DNA, 15 bp, Homo sapiens
tagatggtaggtgtg

SEQ ID NO: 848899 - DNA, 15 bp, Homo sapiens
agatggtaggtgtgc

SEQ ID NO: 848900 - DNA, 15 bp, Homo sapiens
gatggtaggtgtgcc

SEQ ID NO: 848901 - DNA, 15 bp, Homo sapiens
atggtaggtgtgccc

SEQ ID NO: 848902 - DNA, 15 bp, Homo sapiens
tggtaggtgtgccct

SEQ ID NO: 848903 - DNA, 15 bp, Homo sapiens
ggtaggtgtgccctt

SEQ ID NO: 848904 - DNA, 15 bp, Homo sapiens
gtaggtgtgcccttg

SEQ ID NO: 848905 - DNA, 15 bp, Homo sapiens
taggtgtgcccttgc

SEQ ID NO: 848906 - DNA, 15 bp, Homo sapiens
aggtgtgcccttgcc

SEQ ID NO: 848907 - DNA, 15 bp, Homo sapiens
ggtgtgcccttgccc

SEQ ID NO: 848908 - DNA, 15 bp, Homo sapiens
gtgtgcccttgccca

SEQ ID NO: 848909 - DNA, 15 bp, Homo sapiens
tgtgcccttgcccac

SEQ ID NO: 848910 - DNA, 15 bp, Homo sapiens
gtgcccttgcccact

SEQ ID NO: 848911 - DNA, 15 bp, Homo sapiens
tgcccttgcccactg

SEQ ID NO: 848912 - DNA, 15 bp, Homo sapiens
gcccttgcccactgt

SEQ ID NO: 848913 - DNA, 15 bp, Homo sapiens
cccttgcccactgtt

SEQ ID NO: 848914 - DNA, 15 bp, Homo sapiens
ccttgcccactgttc

SEQ ID NO: 848915 - DNA, 15 bp, Homo sapiens
cttgcccactgttcc

SEQ ID NO: 848916 - DNA, 15 bp, Homo sapiens
ttgcccactgttcct

SEQ ID NO: 848917 - DNA, 15 bp, Homo sapiens
tgcccactgttccta

SEQ ID NO: 848918 - DNA, 15 bp, Homo sapiens
gcccactgttcctag

SEQ ID NO: 848919 - DNA, 15 bp, Homo sapiens
cccactgttcctagc

SEQ ID NO: 848920 - DNA, 15 bp, Homo sapiens
ccactgttcctagct

SEQ ID NO: 848921 - DNA, 15 bp, Homo sapiens
cactgttcctagctc

SEQ ID NO: 848922 - DNA, 15 bp, Homo sapiens
actgttcctagctct

SEQ ID NO: 848923 - DNA, 15 bp, Homo sapiens
ctgttcctagctctc

SEQ ID NO: 848924 - DNA, 15 bp, Homo sapiens
tgttcctagctctcc

SEQ ID NO: 848925 - DNA, 15 bp, Homo sapiens
gttcctagctctcct

SEQ ID NO: 848926 - DNA, 15 bp, Homo sapiens
ttcctagctctcctt

SEQ ID NO: 848927 - DNA, 15 bp, Homo sapiens
tcctagctctccttc

SEQ ID NO: 848928 - DNA, 15 bp, Homo sapiens
cctagctctccttct

SEQ ID NO: 848929 - DNA, 15 bp, Homo sapiens
ctagctctccttctg

SEQ ID NO: 848930 - DNA, 15 bp, Homo sapiens
tagctctccttctgg

SEQ ID NO: 848931 - DNA, 15 bp, Homo sapiens
agctctccttctggt

SEQ ID NO: 848932 - DNA, 15 bp, Homo sapiens
gctctccttctggtc

SEQ ID NO: 848933 - DNA, 15 bp, Homo sapiens
ctctccttctggtcc

SEQ ID NO: 848934 - DNA, 15 bp, Homo sapiens
tctccttctggtcca

SEQ ID NO: 848935 - DNA, 15 bp, Homo sapiens
ctccttctggtccac

SEQ ID NO: 848936 - DNA, 15 bp, Homo sapiens
tccttctggtccaca

SEQ ID NO: 848937 - DNA, 15 bp, Homo sapiens
ccttctggtccacat

SEQ ID NO: 848938 - DNA, 15 bp, Homo sapiens
cttctggtccacatg

SEQ ID NO: 848939 - DNA, 15 bp, Homo sapiens
ttctggtccacatgt

SEQ ID NO: 848940 - DNA, 15 bp, Homo sapiens
tctggtccacatgtt

SEQ ID NO: 848941 - DNA, 15 bp, Homo sapiens
ctggtccacatgttg

SEQ ID NO: 848942 - DNA, 15 bp, Homo sapiens
tggtccacatgttgc

SEQ ID NO: 848943 - DNA, 15 bp, Homo sapiens
ggtccacatgttgca

SEQ ID NO: 848944 - DNA, 15 bp, Homo sapiens
gtccacatgttgcat

SEQ ID NO: 848945 - DNA, 15 bp, Homo sapiens
tccacatgttgcatt

SEQ ID NO: 848946 - DNA, 15 bp, Homo sapiens
ccacatgttgcattt

SEQ ID NO: 848947 - DNA, 15 bp, Homo sapiens
cacatgttgcatttc

SEQ ID NO: 848948 - DNA, 15 bp, Homo sapiens
acatgttgcatttct

SEQ ID NO: 848949 - DNA, 15 bp, Homo sapiens
catgttgcatttctc

SEQ ID NO: 848950 - DNA, 15 bp, Homo sapiens
atgttgcatttctcc

SEQ ID NO: 848951 - DNA, 15 bp, Homo sapiens
tgttgcatttctccc

SEQ ID NO: 848952 - DNA, 15 bp, Homo sapiens
gttgcatttctccca

SEQ ID NO: 848953 - DNA, 15 bp, Homo sapiens
ttgcatttctcccag

SEQ ID NO: 848954 - DNA, 15 bp, Homo sapiens
tgcatttctcccagt

SEQ ID NO: 848955 - DNA, 15 bp, Homo sapiens
gcatttctcccagtg

SEQ ID NO: 848956 - DNA, 15 bp, Homo sapiens
catttctcccagtga

SEQ ID NO: 848957 - DNA, 15 bp, Homo sapiens
atttctcccagtgaa

SEQ ID NO: 848958 - DNA, 15 bp, Homo sapiens
tttctcccagtgaac

SEQ ID NO: 848959 - DNA, 15 bp, Homo sapiens
ttctcccagtgaact

SEQ ID NO: 848960 - DNA, 15 bp, Homo sapiens
tctcccagtgaactg

SEQ ID NO: 848961 - DNA, 15 bp, Homo sapiens
ctcccagtgaactga

SEQ ID NO: 848962 - DNA, 15 bp, Homo sapiens
tcccagtgaactgac

SEQ ID NO: 848963 - DNA, 15 bp, Homo sapiens
cccagtgaactgact

SEQ ID NO: 848964 - DNA, 15 bp, Homo sapiens
ccagtgaactgactg

SEQ ID NO: 848965 - DNA, 15 bp, Homo sapiens
cagtgaactgactga

SEQ ID NO: 848966 - DNA, 15 bp, Homo sapiens
agtgaactgactgac

SEQ ID NO: 848967 - DNA, 15 bp, Homo sapiens
gtgaactgactgact

SEQ ID NO: 848968 - DNA, 15 bp, Homo sapiens
tgaactgactgactg

SEQ ID NO: 848969 - DNA, 15 bp, Homo sapiens
gaactgactgactgg

SEQ ID NO: 848970 - DNA, 15 bp, Homo sapiens
aactgactgactggc

SEQ ID NO: 848971 - DNA, 15 bp, Homo sapiens
actgactgactggct

SEQ ID NO: 848972 - DNA, 15 bp, Homo sapiens
ctgactgactggctg

SEQ ID NO: 848973 - DNA, 15 bp, Homo sapiens
tgactgactggctgc

SEQ ID NO: 848974 - DNA, 15 bp, Homo sapiens
gactgactggctgcc

SEQ ID NO: 848975 - DNA, 15 bp, Homo sapiens
actgactggctgcca

SEQ ID NO: 848976 - DNA, 15 bp, Homo sapiens
ctgactggctgccag

SEQ ID NO: 848977 - DNA, 15 bp, Homo sapiens
tgactggctgccagc

SEQ ID NO: 848978 - DNA, 15 bp, Homo sapiens
gactggctgccagca

SEQ ID NO: 848979 - DNA, 15 bp, Homo sapiens
actggctgccagcaa

SEQ ID NO: 848980 - DNA, 15 bp, Homo sapiens
ctggctgccagcaag

SEQ ID NO: 848981 - DNA, 15 bp, Homo sapiens
tggctgccagcaaga

SEQ ID NO: 848982 - DNA, 15 bp, Homo sapiens
ggctgccagcaagat

SEQ ID NO: 848983 - DNA, 15 bp, Homo sapiens
gctgccagcaagatg

SEQ ID NO: 848984 - DNA, 15 bp, Homo sapiens
ctgccagcaagatgc

SEQ ID NO: 848985 - DNA, 15 bp, Homo sapiens
tgccagcaagatgcc

SEQ ID NO: 848986 - DNA, 15 bp, Homo sapiens
gccagcaagatgcct

SEQ ID NO: 848987 - DNA, 15 bp, Homo sapiens
ccagcaagatgcctt

SEQ ID NO: 848988 - DNA, 15 bp, Homo sapiens
cagcaagatgccttt

SEQ ID NO: 848989 - DNA, 15 bp, Homo sapiens
agcaagatgcctttt

SEQ ID NO: 848990 - DNA, 15 bp, Homo sapiens
gcaagatgcctttta

SEQ ID NO: 848991 - DNA, 15 bp, Homo sapiens
caagatgccttttaa

SEQ ID NO: 848992 - DNA, 15 bp, Homo sapiens
aagatgccttttaat

SEQ ID NO: 848993 - DNA, 15 bp, Homo sapiens
agatgccttttaata

SEQ ID NO: 848994 - DNA, 15 bp, Homo sapiens
gatgccttttaatac

SEQ ID NO: 848995 - DNA, 15 bp, Homo sapiens
atgccttttaataca

SEQ ID NO: 848996 - DNA, 15 bp, Homo sapiens
tgccttttaatacaa

SEQ ID NO: 848997 - DNA, 15 bp, Homo sapiens
gccttttaatacaag

SEQ ID NO: 848998 - DNA, 15 bp, Homo sapiens
ccttttaatacaaga

SEQ ID NO: 848999 - DNA, 15 bp, Homo sapiens
cttttaatacaagat

SEQ ID NO: 849000 - DNA, 15 bp, Homo sapiens
ttttaatacaagata

SEQ ID NO: 849001 - DNA, 15 bp, Homo sapiens
tttaatacaagataa

SEQ ID NO: 849002 - DNA, 15 bp, Homo sapiens
ttaatacaagataag

SEQ ID NO: 849003 - DNA, 15 bp, Homo sapiens
taatacaagataagc

SEQ ID NO: 849004 - DNA, 15 bp, Homo sapiens
aatacaagataagca

SEQ ID NO: 849005 - DNA, 15 bp, Homo sapiens
atacaagataagcac

SEQ ID NO: 849006 - DNA, 15 bp, Homo sapiens
tacaagataagcaca

SEQ ID NO: 849007 - DNA, 15 bp, Homo sapiens
acaagataagcacaa

SEQ ID NO: 849008 - DNA, 15 bp, Homo sapiens
caagataagcacaag

SEQ ID NO: 849009 - DNA, 15 bp, Homo sapiens
aagataagcacaagc

SEQ ID NO: 849010 - DNA, 15 bp, Homo sapiens
agataagcacaagcc

SEQ ID NO: 849011 - DNA, 15 bp, Homo sapiens
gataagcacaagccg

SEQ ID NO: 849012 - DNA, 15 bp, Homo sapiens
ataagcacaagccgt

SEQ ID NO: 849013 - DNA, 15 bp, Homo sapiens
taagcacaagccgtt

SEQ ID NO: 849014 - DNA, 15 bp, Homo sapiens
aagcacaagccgttc

SEQ ID NO: 849015 - DNA, 15 bp, Homo sapiens
agcacaagccgttct

SEQ ID NO: 849016 - DNA, 15 bp, Homo sapiens
gcacaagccgttcta

SEQ ID NO: 849017 - DNA, 15 bp, Homo sapiens
cacaagccgttctaa

SEQ ID NO: 849018 - DNA, 15 bp, Homo sapiens
acaagccgttctaaa

SEQ ID NO: 849019 - DNA, 15 bp, Homo sapiens
caagccgttctaaag

SEQ ID NO: 849020 - DNA, 15 bp, Homo sapiens
aagccgttctaaaga

SEQ ID NO: 849021 - DNA, 15 bp, Homo sapiens
agccgttctaaagag

SEQ ID NO: 849022 - DNA, 15 bp, Homo sapiens
gccgttctaaagagc

SEQ ID NO: 849023 - DNA, 15 bp, Homo sapiens
ccgttctaaagagcc

SEQ ID NO: 849024 - DNA, 15 bp, Homo sapiens
cgttctaaagagcca

SEQ ID NO: 849025 - DNA, 15 bp, Homo sapiens
gttctaaagagccac

SEQ ID NO: 849026 - DNA, 15 bp, Homo sapiens
ttctaaagagccact

SEQ ID NO: 849027 - DNA, 15 bp, Homo sapiens
tctaaagagccactt

SEQ ID NO: 849028 - DNA, 15 bp, Homo sapiens
ctaaagagccacttc

SEQ ID NO: 849029 - DNA, 15 bp, Homo sapiens
taaagagccacttcc

SEQ ID NO: 849030 - DNA, 15 bp, Homo sapiens
aaagagccacttcct

SEQ ID NO: 849031 - DNA, 15 bp, Homo sapiens
aagagccacttcctg

SEQ ID NO: 849032 - DNA, 15 bp, Homo sapiens
agagccacttcctgt

SEQ ID NO: 849033 - DNA, 15 bp, Homo sapiens
gagccacttcctgtt

SEQ ID NO: 849034 - DNA, 15 bp, Homo sapiens
agccacttcctgttg

SEQ ID NO: 849035 - DNA, 15 bp, Homo sapiens
gccacttcctgttgg

SEQ ID NO: 849036 - DNA, 15 bp, Homo sapiens
ccacttcctgttggc

SEQ ID NO: 849037 - DNA, 15 bp, Homo sapiens
cacttcctgttggcg

SEQ ID NO: 849038 - DNA, 15 bp, Homo sapiens
acttcctgttggcgg

SEQ ID NO: 849039 - DNA, 15 bp, Homo sapiens
cttcctgttggcggg

SEQ ID NO: 849040 - DNA, 15 bp, Homo sapiens
ttcctgttggcgggg

SEQ ID NO: 849041 - DNA, 15 bp, Homo sapiens
tcctgttggcggggt

SEQ ID NO: 849042 - DNA, 15 bp, Homo sapiens
cctgttggcggggtg

SEQ ID NO: 849043 - DNA, 15 bp, Homo sapiens
ctgttggcggggtgg

SEQ ID NO: 849044 - DNA, 15 bp, Homo sapiens
tgttggcggggtggc

SEQ ID NO: 849045 - DNA, 15 bp, Homo sapiens
gttggcggggtggct

SEQ ID NO: 849046 - DNA, 15 bp, Homo sapiens
ttggcggggtggctt

SEQ ID NO: 849047 - DNA, 15 bp, Homo sapiens
tggcggggtggcttc

SEQ ID NO: 849048 - DNA, 15 bp, Homo sapiens
ggcggggtggcttcc

SEQ ID NO: 849049 - DNA, 15 bp, Homo sapiens
gcggggtggcttcct

SEQ ID NO: 849050 - DNA, 15 bp, Homo sapiens
cggggtggcttcctc

SEQ ID NO: 849051 - DNA, 15 bp, Homo sapiens
ggggtggcttcctct

SEQ ID NO: 849052 - DNA, 15 bp, Homo sapiens
gggtggcttcctctc

SEQ ID NO: 849053 - DNA, 15 bp, Homo sapiens
ggtggcttcctctca

SEQ ID NO: 849054 - DNA, 15 bp, Homo sapiens
gtggcttcctctcat

SEQ ID NO: 849055 - DNA, 15 bp, Homo sapiens
tggcttcctctcatc

SEQ ID NO: 849056 - DNA, 15 bp, Homo sapiens
ggcttcctctcatct

SEQ ID NO: 849057 - DNA, 15 bp, Homo sapiens
gcttcctctcatctt

SEQ ID NO: 849058 - DNA, 15 bp, Homo sapiens
cttcctctcatcttc

SEQ ID NO: 849059 - DNA, 15 bp, Homo sapiens
ttcctctcatcttcc

SEQ ID NO: 849060 - DNA, 15 bp, Homo sapiens
tcctctcatcttcct

SEQ ID NO: 849061 - DNA, 15 bp, Homo sapiens
cctctcatcttcctc

SEQ ID NO: 849062 - DNA, 15 bp, Homo sapiens
ctctcatcttcctct

SEQ ID NO: 849063 - DNA, 15 bp, Homo sapiens
tctcatcttcctctt

SEQ ID NO: 849064 - DNA, 15 bp, Homo sapiens
ctcatcttcctctta

SEQ ID NO: 849065 - DNA, 15 bp, Homo sapiens
tcatcttcctcttac

SEQ ID NO: 849066 - DNA, 15 bp, Homo sapiens
catcttcctcttacc

SEQ ID NO: 849067 - DNA, 15 bp, Homo sapiens
atcttcctcttaccc

SEQ ID NO: 849068 - DNA, 15 bp, Homo sapiens
tcttcctcttaccca

SEQ ID NO: 849069 - DNA, 15 bp, Homo sapiens
cttcctcttacccat

SEQ ID NO: 849070 - DNA, 15 bp, Homo sapiens
ttcctcttacccatg

SEQ ID NO: 849071 - DNA, 15 bp, Homo sapiens
tcctcttacccatgc

SEQ ID NO: 849072 - DNA, 15 bp, Homo sapiens
cctcttacccatgcc

SEQ ID NO: 849073 - DNA, 15 bp, Homo sapiens
ctcttacccatgccc

SEQ ID NO: 849074 - DNA, 15 bp, Homo sapiens
tcttacccatgcccc

SEQ ID NO: 849075 - DNA, 15 bp, Homo sapiens
cttacccatgccccc

SEQ ID NO: 849076 - DNA, 15 bp, Homo sapiens
ttacccatgccccca

SEQ ID NO: 849077 - DNA, 15 bp, Homo sapiens
tacccatgcccccac

SEQ ID NO: 849078 - DNA, 15 bp, Homo sapiens
acccatgcccccact

SEQ ID NO: 849079 - DNA, 15 bp, Homo sapiens
cccatgcccccactg

SEQ ID NO: 849080 - DNA, 15 bp, Homo sapiens
ccatgcccccactgg

SEQ ID NO: 849081 - DNA, 15 bp, Homo sapiens
catgcccccactgga

SEQ ID NO: 849082 - DNA, 15 bp, Homo sapiens
atgcccccactggaa

SEQ ID NO: 849083 - DNA, 15 bp, Homo sapiens
tgcccccactggaag

SEQ ID NO: 849084 - DNA, 15 bp, Homo sapiens
gcccccactggaagg

SEQ ID NO: 849085 - DNA, 15 bp, Homo sapiens
cccccactggaaggg

SEQ ID NO: 849086 - DNA, 15 bp, Homo sapiens
ccccactggaaggga

SEQ ID NO: 849087 - DNA, 15 bp, Homo sapiens
cccactggaagggaa

SEQ ID NO: 849088 - DNA, 15 bp, Homo sapiens
ccactggaagggaag

SEQ ID NO: 849089 - DNA, 15 bp, Homo sapiens
cactggaagggaagc

SEQ ID NO: 849090 - DNA, 15 bp, Homo sapiens
actggaagggaagcc

SEQ ID NO: 849091 - DNA, 15 bp, Homo sapiens
ctggaagggaagcct

SEQ ID NO: 849092 - DNA, 15 bp, Homo sapiens
tggaagggaagcctg

SEQ ID NO: 849093 - DNA, 15 bp, Homo sapiens
ggaagggaagcctga

SEQ ID NO: 849094 - DNA, 15 bp, Homo sapiens
gaagggaagcctgag

SEQ ID NO: 849095 - DNA, 15 bp, Homo sapiens
aagggaagcctgaga

SEQ ID NO: 849096 - DNA, 15 bp, Homo sapiens
agggaagcctgagag

SEQ ID NO: 849097 - DNA, 15 bp, Homo sapiens
gggaagcctgagagg

SEQ ID NO: 849098 - DNA, 15 bp, Homo sapiens
ggaagcctgagaggc

SEQ ID NO: 849099 - DNA, 15 bp, Homo sapiens
gaagcctgagaggct

SEQ ID NO: 849100 - DNA, 15 bp, Homo sapiens
aagcctgagaggctg

SEQ ID NO: 849101 - DNA, 15 bp, Homo sapiens
agcctgagaggctgc

SEQ ID NO: 849102 - DNA, 15 bp, Homo sapiens
gcctgagaggctgca

SEQ ID NO: 849103 - DNA, 15 bp, Homo sapiens
cctgagaggctgcag

SEQ ID NO: 849104 - DNA, 15 bp, Homo sapiens
ctgagaggctgcagc

SEQ ID NO: 849105 - DNA, 15 bp, Homo sapiens
tgagaggctgcagcc

SEQ ID NO: 849106 - DNA, 15 bp, Homo sapiens
gagaggctgcagcca

SEQ ID NO: 849107 - DNA, 15 bp, Homo sapiens
agaggctgcagccaa

SEQ ID NO: 849108 - DNA, 15 bp, Homo sapiens
gaggctgcagccaaa

SEQ ID NO: 849109 - DNA, 15 bp, Homo sapiens
aggctgcagccaaag

SEQ ID NO: 849110 - DNA, 15 bp, Homo sapiens
ggctgcagccaaaga

SEQ ID NO: 849111 - DNA, 15 bp, Homo sapiens
gctgcagccaaagac

SEQ ID NO: 849112 - DNA, 15 bp, Homo sapiens
ctgcagccaaagaca

SEQ ID NO: 849113 - DNA, 15 bp, Homo sapiens
tgcagccaaagacac

SEQ ID NO: 849114 - DNA, 15 bp, Homo sapiens
gcagccaaagacaca

SEQ ID NO: 849115 - DNA, 15 bp, Homo sapiens
cagccaaagacacac

SEQ ID NO: 849116 - DNA, 15 bp, Homo sapiens
agccaaagacacaca

SEQ ID NO: 849117 - DNA, 15 bp, Homo sapiens
gccaaagacacacag

SEQ ID NO: 849118 - DNA, 15 bp, Homo sapiens
ccaaagacacacagc

SEQ ID NO: 849119 - DNA, 15 bp, Homo sapiens
caaagacacacagct

SEQ ID NO: 849120 - DNA, 15 bp, Homo sapiens
aaagacacacagctt

SEQ ID NO: 849121 - DNA, 15 bp, Homo sapiens
aagacacacagcttg

SEQ ID NO: 849122 - DNA, 15 bp, Homo sapiens
agacacacagcttgc

SEQ ID NO: 849123 - DNA, 15 bp, Homo sapiens
gacacacagcttgcc

SEQ ID NO: 849124 - DNA, 15 bp, Homo sapiens
acacacagcttgccc

SEQ ID NO: 849125 - DNA, 15 bp, Homo sapiens
cacacagcttgccct

SEQ ID NO: 849126 - DNA, 15 bp, Homo sapiens
acacagcttgccctc

SEQ ID NO: 849127 - DNA, 15 bp, Homo sapiens
cacagcttgccctcc

SEQ ID NO: 849128 - DNA, 15 bp, Homo sapiens
acagcttgccctcct

SEQ ID NO: 849129 - DNA, 15 bp, Homo sapiens
cagcttgccctcctt

SEQ ID NO: 849130 - DNA, 15 bp, Homo sapiens
agcttgccctccttc

SEQ ID NO: 849131 - DNA, 15 bp, Homo sapiens
gcttgccctccttcc

SEQ ID NO: 849132 - DNA, 15 bp, Homo sapiens
cttgccctccttccc

SEQ ID NO: 849133 - DNA, 15 bp, Homo sapiens
ttgccctccttccct

SEQ ID NO: 849134 - DNA, 15 bp, Homo sapiens
tgccctccttccctc

SEQ ID NO: 849135 - DNA, 15 bp, Homo sapiens
gccctccttccctca

SEQ ID NO: 849136 - DNA, 15 bp, Homo sapiens
ccctccttccctcag

SEQ ID NO: 849137 - DNA, 15 bp, Homo sapiens
cctccttccctcagg

SEQ ID NO: 849138 - DNA, 15 bp, Homo sapiens
ctccttccctcaggg

SEQ ID NO: 849139 - DNA, 15 bp, Homo sapiens
tccttccctcaggga

SEQ ID NO: 849140 - DNA, 15 bp, Homo sapiens
ccttccctcagggag

SEQ ID NO: 849141 - DNA, 15 bp, Homo sapiens
cttccctcagggagg

SEQ ID NO: 849142 - DNA, 15 bp, Homo sapiens
ttccctcagggaggc

SEQ ID NO: 849143 - DNA, 15 bp, Homo sapiens
tccctcagggaggcc

SEQ ID NO: 849144 - DNA, 15 bp, Homo sapiens
ccctcagggaggcct

SEQ ID NO: 849145 - DNA, 15 bp, Homo sapiens
cctcagggaggcctg

SEQ ID NO: 849146 - DNA, 15 bp, Homo sapiens
ctcagggaggcctgt

SEQ ID NO: 849147 - DNA, 15 bp, Homo sapiens
tcagggaggcctgtg

SEQ ID NO: 849148 - DNA, 15 bp, Homo sapiens
cagggaggcctgtga

SEQ ID NO: 849149 - DNA, 15 bp, Homo sapiens
agggaggcctgtgag

SEQ ID NO: 849150 - DNA, 15 bp, Homo sapiens
gggaggcctgtgaga

SEQ ID NO: 849151 - DNA, 15 bp, Homo sapiens
ggaggcctgtgagat

SEQ ID NO: 849152 - DNA, 15 bp, Homo sapiens
gaggcctgtgagatc

SEQ ID NO: 849153 - DNA, 15 bp, Homo sapiens
aggcctgtgagatcc

SEQ ID NO: 849154 - DNA, 15 bp, Homo sapiens
ggcctgtgagatccc

SEQ ID NO: 849155 - DNA, 15 bp, Homo sapiens
gcctgtgagatccct

SEQ ID NO: 849156 - DNA, 15 bp, Homo sapiens
cctgtgagatcccta

SEQ ID NO: 849157 - DNA, 15 bp, Homo sapiens
ctgtgagatccctaa

SEQ ID NO: 849158 - DNA, 15 bp, Homo sapiens
tgtgagatccctaag

SEQ ID NO: 849159 - DNA, 15 bp, Homo sapiens
gtgagatccctaagc

SEQ ID NO: 849160 - DNA, 15 bp, Homo sapiens
tgagatccctaagct

SEQ ID NO: 849161 - DNA, 15 bp, Homo sapiens
gagatccctaagctc

SEQ ID NO: 849162 - DNA, 15 bp, Homo sapiens
agatccctaagctcc

SEQ ID NO: 849163 - DNA, 15 bp, Homo sapiens
gatccctaagctccc

SEQ ID NO: 849164 - DNA, 15 bp, Homo sapiens
atccctaagctccca

SEQ ID NO: 849165 - DNA, 15 bp, Homo sapiens
tccctaagctcccat

SEQ ID NO: 849166 - DNA, 15 bp, Homo sapiens
ccctaagctcccata

SEQ ID NO: 849167 - DNA, 15 bp, Homo sapiens
cctaagctcccatag

SEQ ID NO: 849168 - DNA, 15 bp, Homo sapiens
ctaagctcccatagc

SEQ ID NO: 849169 - DNA, 15 bp, Homo sapiens
taagctcccatagcg

SEQ ID NO: 849170 - DNA, 15 bp, Homo sapiens
aagctcccatagcgg

SEQ ID NO: 849171 - DNA, 15 bp, Homo sapiens
agctcccatagcggc

SEQ ID NO: 849172 - DNA, 15 bp, Homo sapiens
gctcccatagcggct

SEQ ID NO: 849173 - DNA, 15 bp, Homo sapiens
ctcccatagcggctc

SEQ ID NO: 849174 - DNA, 15 bp, Homo sapiens
tcccatagcggctca

SEQ ID NO: 849175 - DNA, 15 bp, Homo sapiens
cccatagcggctcaa

SEQ ID NO: 849176 - DNA, 15 bp, Homo sapiens
ccatagcggctcaac

SEQ ID NO: 849177 - DNA, 15 bp, Homo sapiens
catagcggctcaacg

SEQ ID NO: 849178 - DNA, 15 bp, Homo sapiens
atagcggctcaacgt

SEQ ID NO: 849179 - DNA, 15 bp, Homo sapiens
tagcggctcaacgtt

SEQ ID NO: 849180 - DNA, 15 bp, Homo sapiens
agcggctcaacgttc

SEQ ID NO: 849181 - DNA, 15 bp, Homo sapiens
gcggctcaacgttct

SEQ ID NO: 849182 - DNA, 15 bp, Homo sapiens
cggctcaacgttctc

SEQ ID NO: 849183 - DNA, 15 bp, Homo sapiens
ggctcaacgttctcc

SEQ ID NO: 849184 - DNA, 15 bp, Homo sapiens
gctcaacgttctcct

SEQ ID NO: 849185 - DNA, 15 bp, Homo sapiens
ctcaacgttctcctt

SEQ ID NO: 849186 - DNA, 15 bp, Homo sapiens
tcaacgttctccttg

SEQ ID NO: 849187 - DNA, 15 bp, Homo sapiens
caacgttctccttgt

SEQ ID NO: 849188 - DNA, 15 bp, Homo sapiens
aacgttctccttgta

SEQ ID NO: 849189 - DNA, 15 bp, Homo sapiens
acgttctccttgtaa

SEQ ID NO: 849190 - DNA, 15 bp, Homo sapiens
cgttctccttgtaat

SEQ ID NO: 849191 - DNA, 15 bp, Homo sapiens
gttctccttgtaatt

SEQ ID NO: 849192 - DNA, 15 bp, Homo sapiens
ttctccttgtaattc

SEQ ID NO: 849193 - DNA, 15 bp, Homo sapiens
tctccttgtaattca

SEQ ID NO: 849194 - DNA, 15 bp, Homo sapiens
ctccttgtaattcac

SEQ ID NO: 849195 - DNA, 15 bp, Homo sapiens
tccttgtaattcacc

SEQ ID NO: 849196 - DNA, 15 bp, Homo sapiens
ccttgtaattcacca

SEQ ID NO: 849197 - DNA, 15 bp, Homo sapiens
cttgtaattcaccag

SEQ ID NO: 849198 - DNA, 15 bp, Homo sapiens
ttgtaattcaccagt

SEQ ID NO: 849199 - DNA, 15 bp, Homo sapiens
tgtaattcaccagtt

SEQ ID NO: 849200 - DNA, 15 bp, Homo sapiens
gtaattcaccagttt

SEQ ID NO: 849201 - DNA, 15 bp, Homo sapiens
taattcaccagtttc

SEQ ID NO: 849202 - DNA, 15 bp, Homo sapiens
aattcaccagtttct

SEQ ID NO: 849203 - DNA, 15 bp, Homo sapiens
attcaccagtttcta

SEQ ID NO: 849204 - DNA, 15 bp, Homo sapiens
ttcaccagtttctaa

SEQ ID NO: 849205 - DNA, 15 bp, Homo sapiens
tcaccagtttctaaa

SEQ ID NO: 849206 - DNA, 15 bp, Homo sapiens
caccagtttctaaag

SEQ ID NO: 849207 - DNA, 15 bp, Homo sapiens
accagtttctaaaga

SEQ ID NO: 849208 - DNA, 15 bp, Homo sapiens
ccagtttctaaagac

SEQ ID NO: 849209 - DNA, 15 bp, Homo sapiens
cagtttctaaagact

SEQ ID NO: 849210 - DNA, 15 bp, Homo sapiens
agtttctaaagactg

SEQ ID NO: 849211 - DNA, 15 bp, Homo sapiens
gtttctaaagactga

SEQ ID NO: 849212 - DNA, 15 bp, Homo sapiens
tttctaaagactgac

SEQ ID NO: 849213 - DNA, 15 bp, Homo sapiens
ttctaaagactgact

SEQ ID NO: 849214 - DNA, 15 bp, Homo sapiens
tctaaagactgactc

SEQ ID NO: 849215 - DNA, 15 bp, Homo sapiens
ctaaagactgactcc

SEQ ID NO: 849216 - DNA, 15 bp, Homo sapiens
taaagactgactcca

SEQ ID NO: 849217 - DNA, 15 bp, Homo sapiens
aaagactgactccat

SEQ ID NO: 849218 - DNA, 15 bp, Homo sapiens
aagactgactccatt

SEQ ID NO: 849219 - DNA, 15 bp, Homo sapiens
agactgactccattg

SEQ ID NO: 849220 - DNA, 15 bp, Homo sapiens
gactgactccattgt

SEQ ID NO: 849221 - DNA, 15 bp, Homo sapiens
actgactccattgta

SEQ ID NO: 849222 - DNA, 15 bp, Homo sapiens
ctgactccattgtaa

SEQ ID NO: 849223 - DNA, 15 bp, Homo sapiens
tgactccattgtaag

SEQ ID NO: 849224 - DNA, 15 bp, Homo sapiens
gactccattgtaagc

SEQ ID NO: 849225 - DNA, 15 bp, Homo sapiens
actccattgtaagcc

SEQ ID NO: 849226 - DNA, 15 bp, Homo sapiens
ctccattgtaagccg

SEQ ID NO: 849227 - DNA, 15 bp, Homo sapiens
tccattgtaagccgg

SEQ ID NO: 849228 - DNA, 15 bp, Homo sapiens
ccattgtaagccggt

SEQ ID NO: 849229 - DNA, 15 bp, Homo sapiens
cattgtaagccggta

SEQ ID NO: 849230 - DNA, 15 bp, Homo sapiens
attgtaagccggtag

SEQ ID NO: 849231 - DNA, 15 bp, Homo sapiens
ttgtaagccggtagc

SEQ ID NO: 849232 - DNA, 15 bp, Homo sapiens
tgtaagccggtagca

SEQ ID NO: 849233 - DNA, 15 bp, Homo sapiens
gtaagccggtagcag

SEQ ID NO: 849234 - DNA, 15 bp, Homo sapiens
taagccggtagcagt

SEQ ID NO: 849235 - DNA, 15 bp, Homo sapiens
aagccggtagcagtg

SEQ ID NO: 849236 - DNA, 15 bp, Homo sapiens
agccggtagcagtgg

SEQ ID NO: 849237 - DNA, 15 bp, Homo sapiens
gccggtagcagtggc

SEQ ID NO: 849238 - DNA, 15 bp, Homo sapiens
ccggtagcagtggct

SEQ ID NO: 849239 - DNA, 15 bp, Homo sapiens
cggtagcagtggctc

SEQ ID NO: 849240 - DNA, 15 bp, Homo sapiens
ggtagcagtggctca

SEQ ID NO: 849241 - DNA, 15 bp, Homo sapiens
gtagcagtggctcat

SEQ ID NO: 849242 - DNA, 15 bp, Homo sapiens
tagcagtggctcatg

SEQ ID NO: 849243 - DNA, 15 bp, Homo sapiens
agcagtggctcatgc

SEQ ID NO: 849244 - DNA, 15 bp, Homo sapiens
ggctcatgcctgtat

SEQ ID NO: 849245 - DNA, 15 bp, Homo sapiens
gctcatgcctgtatt

SEQ ID NO: 849246 - DNA, 15 bp, Homo sapiens
ctcatgcctgtattt

SEQ ID NO: 849247 - DNA, 15 bp, Homo sapiens
tcatgcctgtatttt

SEQ ID NO: 849248 - DNA, 15 bp, Homo sapiens
catgcctgtattttg

SEQ ID NO: 849249 - DNA, 15 bp, Homo sapiens
atgcctgtattttgg

SEQ ID NO: 849250 - DNA, 15 bp, Homo sapiens
tgcctgtattttggg

SEQ ID NO: 849251 - DNA, 15 bp, Homo sapiens
gcctgtattttggga

SEQ ID NO: 849252 - DNA, 15 bp, Homo sapiens
cctgtattttgggag

SEQ ID NO: 849253 - DNA, 15 bp, Homo sapiens
ctgtattttgggagc

SEQ ID NO: 849254 - DNA, 15 bp, Homo sapiens
tgtattttgggagca

SEQ ID NO: 849255 - DNA, 15 bp, Homo sapiens
gtattttgggagcat

SEQ ID NO: 849256 - DNA, 15 bp, Homo sapiens
tattttgggagcatt

SEQ ID NO: 849257 - DNA, 15 bp, Homo sapiens
attttgggagcattt

SEQ ID NO: 849258 - DNA, 15 bp, Homo sapiens
ttttgggagcatttt

SEQ ID NO: 849259 - DNA, 15 bp, Homo sapiens
tttgggagcattttg

SEQ ID NO: 849260 - DNA, 15 bp, Homo sapiens
ttgggagcattttgg

SEQ ID NO: 849261 - DNA, 15 bp, Homo sapiens
tgggagcattttggg

SEQ ID NO: 849262 - DNA, 15 bp, Homo sapiens
gggagcattttggga

SEQ ID NO: 849263 - DNA, 15 bp, Homo sapiens
ggagcattttgggag

SEQ ID NO: 849264 - DNA, 15 bp, Homo sapiens
gagcattttgggagg

SEQ ID NO: 849265 - DNA, 15 bp, Homo sapiens
agcattttgggaggc

SEQ ID NO: 849266 - DNA, 15 bp, Homo sapiens
gcattttgggaggcc

SEQ ID NO: 849267 - DNA, 15 bp, Homo sapiens
cattttgggaggccg

SEQ ID NO: 849268 - DNA, 15 bp, Homo sapiens
attttgggaggccga

SEQ ID NO: 849269 - DNA, 15 bp, Homo sapiens
ttttgggaggccgag

SEQ ID NO: 849270 - DNA, 15 bp, Homo sapiens
ccgaggcaggcagat

SEQ ID NO: 849271 - DNA, 15 bp, Homo sapiens
cgaggcaggcagatc

SEQ ID NO: 849272 - DNA, 15 bp, Homo sapiens
ggcaggcagatcact

SEQ ID NO: 849273 - DNA, 15 bp, Homo sapiens
gcaggcagatcactt

SEQ ID NO: 849274 - DNA, 15 bp, Homo sapiens
caggcagatcacttg

SEQ ID NO: 849275 - DNA, 15 bp, Homo sapiens
aggcagatcacttga

SEQ ID NO: 849276 - DNA, 15 bp, Homo sapiens
tcaggagtttgagat

SEQ ID NO: 849277 - DNA, 15 bp, Homo sapiens
caggagtttgagatc

SEQ ID NO: 849278 - DNA, 15 bp, Homo sapiens
aggagtttgagatca

SEQ ID NO: 849279 - DNA, 15 bp, Homo sapiens
ggagtttgagatcag

SEQ ID NO: 849280 - DNA, 15 bp, Homo sapiens
gagtttgagatcagt

SEQ ID NO: 849281 - DNA, 15 bp, Homo sapiens
agtttgagatcagtc

SEQ ID NO: 849282 - DNA, 15 bp, Homo sapiens
gtttgagatcagtct

SEQ ID NO: 849283 - DNA, 15 bp, Homo sapiens
tttgagatcagtctg

SEQ ID NO: 849284 - DNA, 15 bp, Homo sapiens
ttgagatcagtctgg

SEQ ID NO: 849285 - DNA, 15 bp, Homo sapiens
tgagatcagtctggc

SEQ ID NO: 849286 - DNA, 15 bp, Homo sapiens
gagatcagtctggcc

SEQ ID NO: 849287 - DNA, 15 bp, Homo sapiens
agatcagtctggcca

SEQ ID NO: 849288 - DNA, 15 bp, Homo sapiens
gatcagtctggccaa

SEQ ID NO: 849289 - DNA, 15 bp, Homo sapiens
atcagtctggccaac

SEQ ID NO: 849290 - DNA, 15 bp, Homo sapiens
tcagtctggccaaca

SEQ ID NO: 849291 - DNA, 15 bp, Homo sapiens
cagtctggccaacat

SEQ ID NO: 849292 - DNA, 15 bp, Homo sapiens
agtctggccaacatg

SEQ ID NO: 849293 - DNA, 15 bp, Homo sapiens
gtctggccaacatgg

SEQ ID NO: 849294 - DNA, 15 bp, Homo sapiens
tctggccaacatggt

SEQ ID NO: 849295 - DNA, 15 bp, Homo sapiens
taccaaaaatacaag

SEQ ID NO: 849296 - DNA, 15 bp, Homo sapiens
accaaaaatacaaga

SEQ ID NO: 849297 - DNA, 15 bp, Homo sapiens
ccaaaaatacaagaa

SEQ ID NO: 849298 - DNA, 15 bp, Homo sapiens
caaaaatacaagaat

SEQ ID NO: 849299 - DNA, 15 bp, Homo sapiens
aaaaatacaagaatt

SEQ ID NO: 849300 - DNA, 15 bp, Homo sapiens
aaaatacaagaatta

SEQ ID NO: 849301 - DNA, 15 bp, Homo sapiens
aaatacaagaattag

SEQ ID NO: 849302 - DNA, 15 bp, Homo sapiens
aatacaagaattagg

SEQ ID NO: 849303 - DNA, 15 bp, Homo sapiens
atacaagaattaggg

SEQ ID NO: 849304 - DNA, 15 bp, Homo sapiens
tacaagaattagggc

SEQ ID NO: 849305 - DNA, 15 bp, Homo sapiens
acaagaattagggcc

SEQ ID NO: 849306 - DNA, 15 bp, Homo sapiens
caagaattagggccg

SEQ ID NO: 849307 - DNA, 15 bp, Homo sapiens
aagaattagggccgg

SEQ ID NO: 849308 - DNA, 15 bp, Homo sapiens
agaattagggccggg

SEQ ID NO: 849309 - DNA, 15 bp, Homo sapiens
gaattagggccgggc

SEQ ID NO: 849310 - DNA, 15 bp, Homo sapiens
aattagggccgggcg

SEQ ID NO: 849311 - DNA, 15 bp, Homo sapiens
attagggccgggcgc

SEQ ID NO: 849312 - DNA, 15 bp, Homo sapiens
ttagggccgggcgcg

SEQ ID NO: 849313 - DNA, 15 bp, Homo sapiens
tagggccgggcgcgg

SEQ ID NO: 849314 - DNA, 15 bp, Homo sapiens
agggccgggcgcggt

SEQ ID NO: 849315 - DNA, 15 bp, Homo sapiens
gggccgggcgcggtg

SEQ ID NO: 849316 - DNA, 15 bp, Homo sapiens
aggccgaggcgggcg

SEQ ID NO: 849317 - DNA, 15 bp, Homo sapiens
ggccgaggcgggcgg

SEQ ID NO: 849318 - DNA, 15 bp, Homo sapiens
gccgaggcgggcgga

SEQ ID NO: 849319 - DNA, 15 bp, Homo sapiens
ccgaggcgggcggat

SEQ ID NO: 849320 - DNA, 15 bp, Homo sapiens
cgaggcgggcggatc

SEQ ID NO: 849321 - DNA, 15 bp, Homo sapiens
gaggcgggcggatca

SEQ ID NO: 849322 - DNA, 15 bp, Homo sapiens
aggcgggcggatcac

SEQ ID NO: 849323 - DNA, 15 bp, Homo sapiens
ggcgggcggatcacg

SEQ ID NO: 849324 - DNA, 15 bp, Homo sapiens
gcgggcggatcacga

SEQ ID NO: 849325 - DNA, 15 bp, Homo sapiens
cgggcggatcacgag

SEQ ID NO: 849326 - DNA, 15 bp, Homo sapiens
gggcggatcacgagg

SEQ ID NO: 849327 - DNA, 15 bp, Homo sapiens
ggcggatcacgaggt

SEQ ID NO: 849328 - DNA, 15 bp, Homo sapiens
gcggatcacgaggtc

SEQ ID NO: 849329 - DNA, 15 bp, Homo sapiens
cggatcacgaggtca

SEQ ID NO: 849330 - DNA, 15 bp, Homo sapiens
tagccgggcgtggta

SEQ ID NO: 849331 - DNA, 15 bp, Homo sapiens
agccgggcgtggtag

SEQ ID NO: 849332 - DNA, 15 bp, Homo sapiens
gccgggcgtggtagc

SEQ ID NO: 849333 - DNA, 15 bp, Homo sapiens
ccgggcgtggtagcg

SEQ ID NO: 849334 - DNA, 15 bp, Homo sapiens
cgggcgtggtagcgg

SEQ ID NO: 849335 - DNA, 15 bp, Homo sapiens
gggcgtggtagcggg

SEQ ID NO: 849336 - DNA, 15 bp, Homo sapiens
ggcgtggtagcgggc

SEQ ID NO: 849337 - DNA, 15 bp, Homo sapiens
gcgtggtagcgggcg

SEQ ID NO: 849338 - DNA, 15 bp, Homo sapiens
cgtggtagcgggcgc

SEQ ID NO: 849339 - DNA, 15 bp, Homo sapiens
gtggtagcgggcgcc

SEQ ID NO: 849340 - DNA, 15 bp, Homo sapiens
tggtagcgggcgcct

SEQ ID NO: 849341 - DNA, 15 bp, Homo sapiens
ggtagcgggcgcctg

SEQ ID NO: 849342 - DNA, 15 bp, Homo sapiens
gtagcgggcgcctgt

SEQ ID NO: 849343 - DNA, 15 bp, Homo sapiens
tagcgggcgcctgta

SEQ ID NO: 849344 - DNA, 15 bp, Homo sapiens
agcgggcgcctgtag

SEQ ID NO: 849345 - DNA, 15 bp, Homo sapiens
gcgggcgcctgtagt

SEQ ID NO: 849346 - DNA, 15 bp, Homo sapiens
cgggcgcctgtagtc

SEQ ID NO: 849347 - DNA, 15 bp, Homo sapiens
gggcgcctgtagtcc

SEQ ID NO: 849348 - DNA, 15 bp, Homo sapiens
gaatggcgtgaacct

SEQ ID NO: 849349 - DNA, 15 bp, Homo sapiens
aatggcgtgaacctg

SEQ ID NO: 849350 - DNA, 15 bp, Homo sapiens
atggcgtgaacctgg

SEQ ID NO: 849351 - DNA, 15 bp, Homo sapiens
tggcgtgaacctggg

SEQ ID NO: 849352 - DNA, 15 bp, Homo sapiens
ggcgtgaacctggga

SEQ ID NO: 849353 - DNA, 15 bp, Homo sapiens
gcgtgaacctgggag

SEQ ID NO: 849354 - DNA, 15 bp, Homo sapiens
cgtgaacctgggagg

SEQ ID NO: 849355 - DNA, 15 bp, Homo sapiens
gtgaacctgggaggc

SEQ ID NO: 849356 - DNA, 15 bp, Homo sapiens
cctgggaggcggagc

SEQ ID NO: 849357 - DNA, 15 bp, Homo sapiens
ctgggaggcggagct

SEQ ID NO: 849358 - DNA, 15 bp, Homo sapiens
tgggaggcggagctt

SEQ ID NO: 849359 - DNA, 15 bp, Homo sapiens
ctgggcgacagagcg

SEQ ID NO: 849360 - DNA, 15 bp, Homo sapiens
tgggcgacagagcga

SEQ ID NO: 849361 - DNA, 15 bp, Homo sapiens
gggcgacagagcgag

SEQ ID NO: 849362 - DNA, 15 bp, Homo sapiens
ggcgacagagcgaga

SEQ ID NO: 849363 - DNA, 15 bp, Homo sapiens
gcgacagagcgagac

SEQ ID NO: 849364 - DNA, 15 bp, Homo sapiens
cgacagagcgagact

SEQ ID NO: 849365 - DNA, 15 bp, Homo sapiens
cagagcgagactccg

SEQ ID NO: 849366 - DNA, 15 bp, Homo sapiens
agagcgagactccgt

SEQ ID NO: 849367 - DNA, 15 bp, Homo sapiens
gagcgagactccgtc

SEQ ID NO: 849368 - DNA, 15 bp, Homo sapiens
agcgagactccgtct

SEQ ID NO: 849369 - DNA, 15 bp, Homo sapiens
gcgagactccgtctc

SEQ ID NO: 849370 - DNA, 15 bp, Homo sapiens
cgagactccgtctca

SEQ ID NO: 849371 - DNA, 15 bp, Homo sapiens
aaaaaaaaaaagaat

SEQ ID NO: 849372 - DNA, 15 bp, Homo sapiens
aaaaaaaaaagaatt

SEQ ID NO: 849373 - DNA, 15 bp, Homo sapiens
aaaaaaaaagaatta

SEQ ID NO: 849374 - DNA, 15 bp, Homo sapiens
aaaaaaaagaattag

SEQ ID NO: 849375 - DNA, 15 bp, Homo sapiens
aaaaaaagaattagc

SEQ ID NO: 849376 - DNA, 15 bp, Homo sapiens
aaaaaagaattagcc

SEQ ID NO: 849377 - DNA, 15 bp, Homo sapiens
aaaaagaattagcca

SEQ ID NO: 849378 - DNA, 15 bp, Homo sapiens
aaaagaattagccag

SEQ ID NO: 849379 - DNA, 15 bp, Homo sapiens
aaagaattagccagg

SEQ ID NO: 849380 - DNA, 15 bp, Homo sapiens
aagaattagccaggc

SEQ ID NO: 849381 - DNA, 15 bp, Homo sapiens
agaattagccaggca

SEQ ID NO: 849382 - DNA, 15 bp, Homo sapiens
gaattagccaggcat

SEQ ID NO: 849383 - DNA, 15 bp, Homo sapiens
caggcatggtggtgc

SEQ ID NO: 849384 - DNA, 15 bp, Homo sapiens
aggcatggtggtgca

SEQ ID NO: 849385 - DNA, 15 bp, Homo sapiens
ggcatggtggtgcac

SEQ ID NO: 849386 - DNA, 15 bp, Homo sapiens
gcatggtggtgcaca

SEQ ID NO: 849387 - DNA, 15 bp, Homo sapiens
catggtggtgcacac

SEQ ID NO: 849388 - DNA, 15 bp, Homo sapiens
atggtggtgcacacc

SEQ ID NO: 849389 - DNA, 15 bp, Homo sapiens
gtggtgcacacctgc

SEQ ID NO: 849390 - DNA, 15 bp, Homo sapiens
tggtgcacacctgca

SEQ ID NO: 849391 - DNA, 15 bp, Homo sapiens
ggtgcacacctgcaa

SEQ ID NO: 849392 - DNA, 15 bp, Homo sapiens
gtgcacacctgcaat

SEQ ID NO: 849393 - DNA, 15 bp, Homo sapiens
tgcacacctgcaatt

SEQ ID NO: 849394 - DNA, 15 bp, Homo sapiens
gcacacctgcaattc

SEQ ID NO: 849395 - DNA, 15 bp, Homo sapiens
cacacctgcaattcc

SEQ ID NO: 849396 - DNA, 15 bp, Homo sapiens
acacctgcaattcca

SEQ ID NO: 849397 - DNA, 15 bp, Homo sapiens
cacctgcaattccag

SEQ ID NO: 849398 - DNA, 15 bp, Homo sapiens
acctgcaattccagc

SEQ ID NO: 849399 - DNA, 15 bp, Homo sapiens
cctgcaattccagct

SEQ ID NO: 849400 - DNA, 15 bp, Homo sapiens
ctgcaattccagcta

SEQ ID NO: 849401 - DNA, 15 bp, Homo sapiens
tgcaattccagctac

SEQ ID NO: 849402 - DNA, 15 bp, Homo sapiens
gcaattccagctact

SEQ ID NO: 849403 - DNA, 15 bp, Homo sapiens
caattccagctactc

SEQ ID NO: 849404 - DNA, 15 bp, Homo sapiens
aattccagctactca

SEQ ID NO: 849405 - DNA, 15 bp, Homo sapiens
attccagctactcag

SEQ ID NO: 849406 - DNA, 15 bp, Homo sapiens
ttccagctactcagg

SEQ ID NO: 849407 - DNA, 15 bp, Homo sapiens
tccagctactcagga

SEQ ID NO: 849408 - DNA, 15 bp, Homo sapiens
tcaggaggctgaggc

SEQ ID NO: 849409 - DNA, 15 bp, Homo sapiens
caggaggctgaggca

SEQ ID NO: 849410 - DNA, 15 bp, Homo sapiens
aggaggctgaggcaa

SEQ ID NO: 849411 - DNA, 15 bp, Homo sapiens
ggaggctgaggcaat

SEQ ID NO: 849412 - DNA, 15 bp, Homo sapiens
gaggctgaggcaata

SEQ ID NO: 849413 - DNA, 15 bp, Homo sapiens
aggctgaggcaatag

SEQ ID NO: 849414 - DNA, 15 bp, Homo sapiens
ggctgaggcaataga

SEQ ID NO: 849415 - DNA, 15 bp, Homo sapiens
gctgaggcaatagaa

SEQ ID NO: 849416 - DNA, 15 bp, Homo sapiens
ctgaggcaatagaat

SEQ ID NO: 849417 - DNA, 15 bp, Homo sapiens
tgaggcaatagaatc

SEQ ID NO: 849418 - DNA, 15 bp, Homo sapiens
gaggcaatagaatct

SEQ ID NO: 849419 - DNA, 15 bp, Homo sapiens
aggcaatagaatctc

SEQ ID NO: 849420 - DNA, 15 bp, Homo sapiens
ggcaatagaatctct

SEQ ID NO: 849421 - DNA, 15 bp, Homo sapiens
gcaatagaatctctt

SEQ ID NO: 849422 - DNA, 15 bp, Homo sapiens
caatagaatctcttg

SEQ ID NO: 849423 - DNA, 15 bp, Homo sapiens
aatagaatctcttga

SEQ ID NO: 849424 - DNA, 15 bp, Homo sapiens
atagaatctcttgaa

SEQ ID NO: 849425 - DNA, 15 bp, Homo sapiens
tagaatctcttgaac

SEQ ID NO: 849426 - DNA, 15 bp, Homo sapiens
agaatctcttgaacc

SEQ ID NO: 849427 - DNA, 15 bp, Homo sapiens
gaatctcttgaaccc

SEQ ID NO: 849428 - DNA, 15 bp, Homo sapiens
aatctcttgaaccca

SEQ ID NO: 849429 - DNA, 15 bp, Homo sapiens
atctcttgaacccag

SEQ ID NO: 849430 - DNA, 15 bp, Homo sapiens
tctcttgaacccagg

SEQ ID NO: 849431 - DNA, 15 bp, Homo sapiens
ctcttgaacccaggg

SEQ ID NO: 849432 - DNA, 15 bp, Homo sapiens
tcttgaacccagggg

SEQ ID NO: 849433 - DNA, 15 bp, Homo sapiens
cttgaacccaggggg

SEQ ID NO: 849434 - DNA, 15 bp, Homo sapiens
ttgaacccagggggc

SEQ ID NO: 849435 - DNA, 15 bp, Homo sapiens
tgaacccagggggca

SEQ ID NO: 849436 - DNA, 15 bp, Homo sapiens
gaacccagggggcag

SEQ ID NO: 849437 - DNA, 15 bp, Homo sapiens
aacccagggggcaga

SEQ ID NO: 849438 - DNA, 15 bp, Homo sapiens
acccagggggcagag

SEQ ID NO: 849439 - DNA, 15 bp, Homo sapiens
cccagggggcagaga

SEQ ID NO: 849440 - DNA, 15 bp, Homo sapiens
ccagggggcagagat

SEQ ID NO: 849441 - DNA, 15 bp, Homo sapiens
cagggggcagagatt

SEQ ID NO: 849442 - DNA, 15 bp, Homo sapiens
agggggcagagattg

SEQ ID NO: 849443 - DNA, 15 bp, Homo sapiens
gggggcagagattgc

SEQ ID NO: 849444 - DNA, 15 bp, Homo sapiens
ggggcagagattgca

SEQ ID NO: 849445 - DNA, 15 bp, Homo sapiens
gggcagagattgcag

SEQ ID NO: 849446 - DNA, 15 bp, Homo sapiens
ggcagagattgcagt

SEQ ID NO: 849447 - DNA, 15 bp, Homo sapiens
gcagagattgcagtg

SEQ ID NO: 849448 - DNA, 15 bp, Homo sapiens
cagagattgcagtga

SEQ ID NO: 849449 - DNA, 15 bp, Homo sapiens
agagattgcagtgag

SEQ ID NO: 849450 - DNA, 15 bp, Homo sapiens
gagattgcagtgagc

SEQ ID NO: 849451 - DNA, 15 bp, Homo sapiens
agattgcagtgagct

SEQ ID NO: 849452 - DNA, 15 bp, Homo sapiens
gattgcagtgagctg

SEQ ID NO: 849453 - DNA, 15 bp, Homo sapiens
agtgagctgagatcc

SEQ ID NO: 849454 - DNA, 15 bp, Homo sapiens
gtgagctgagatccc

SEQ ID NO: 849455 - DNA, 15 bp, Homo sapiens
tgagctgagatccca

SEQ ID NO: 849456 - DNA, 15 bp, Homo sapiens
gagctgagatcccac

SEQ ID NO: 849457 - DNA, 15 bp, Homo sapiens
agctgagatcccacc

SEQ ID NO: 849458 - DNA, 15 bp, Homo sapiens
gctgagatcccacca

SEQ ID NO: 849459 - DNA, 15 bp, Homo sapiens
ctgagatcccaccac

SEQ ID NO: 849460 - DNA, 15 bp, Homo sapiens
tgagatcccaccact

SEQ ID NO: 849461 - DNA, 15 bp, Homo sapiens
gagatcccaccactg

SEQ ID NO: 849462 - DNA, 15 bp, Homo sapiens
agatcccaccactgt

SEQ ID NO: 849463 - DNA, 15 bp, Homo sapiens
gatcccaccactgta

SEQ ID NO: 849464 - DNA, 15 bp, Homo sapiens
atcccaccactgtac

SEQ ID NO: 849465 - DNA, 15 bp, Homo sapiens
tcccaccactgtact

SEQ ID NO: 849466 - DNA, 15 bp, Homo sapiens
cccaccactgtactc

SEQ ID NO: 849467 - DNA, 15 bp, Homo sapiens
ccaccactgtactcc

SEQ ID NO: 849468 - DNA, 15 bp, Homo sapiens
caccactgtactcca

SEQ ID NO: 849469 - DNA, 15 bp, Homo sapiens
accactgtactccag

SEQ ID NO: 849470 - DNA, 15 bp, Homo sapiens
tactccagcctgggt

SEQ ID NO: 849471 - DNA, 15 bp, Homo sapiens
gacagagcaagactg

SEQ ID NO: 849472 - DNA, 15 bp, Homo sapiens
acagagcaagactgt

SEQ ID NO: 849473 - DNA, 15 bp, Homo sapiens
cagagcaagactgtc

SEQ ID NO: 849474 - DNA, 15 bp, Homo sapiens
agagcaagactgtct

SEQ ID NO: 849475 - DNA, 15 bp, Homo sapiens
gagcaagactgtctc

SEQ ID NO: 849476 - DNA, 15 bp, Homo sapiens
agcaagactgtctca

SEQ ID NO: 849477 - DNA, 15 bp, Homo sapiens
gcaagactgtctcaa

SEQ ID NO: 849478 - DNA, 15 bp, Homo sapiens
caagactgtctcaaa

SEQ ID NO: 849479 - DNA, 15 bp, Homo sapiens
aagactgtctcaaaa

SEQ ID NO: 849480 - DNA, 15 bp, Homo sapiens
agactgtctcaaaaa

SEQ ID NO: 849481 - DNA, 15 bp, Homo sapiens
gactgtctcaaaaaa

SEQ ID NO: 849482 - DNA, 15 bp, Homo sapiens
actgtctcaaaaaaa

SEQ ID NO: 849483 - DNA, 15 bp, Homo sapiens
ctgtctcaaaaaaac

SEQ ID NO: 849484 - DNA, 15 bp, Homo sapiens
tgtctcaaaaaaaca

SEQ ID NO: 849485 - DNA, 15 bp, Homo sapiens
gtctcaaaaaaacaa

SEQ ID NO: 849486 - DNA, 15 bp, Homo sapiens
aaaaaacaaaaaaga

SEQ ID NO: 849487 - DNA, 15 bp, Homo sapiens
aaaaacaaaaaagaa

SEQ ID NO: 849488 - DNA, 15 bp, Homo sapiens
aaaacaaaaaagaag

SEQ ID NO: 849489 - DNA, 15 bp, Homo sapiens
aaacaaaaaagaaga

SEQ ID NO: 849490 - DNA, 15 bp, Homo sapiens
aacaaaaaagaagat

SEQ ID NO: 849491 - DNA, 15 bp, Homo sapiens
acaaaaaagaagatt

SEQ ID NO: 849492 - DNA, 15 bp, Homo sapiens
caaaaaagaagattc

SEQ ID NO: 849493 - DNA, 15 bp, Homo sapiens
aaaaaagaagattca

SEQ ID NO: 849494 - DNA, 15 bp, Homo sapiens
aaaaagaagattcac

SEQ ID NO: 849495 - DNA, 15 bp, Homo sapiens
aaaagaagattcact

SEQ ID NO: 849496 - DNA, 15 bp, Homo sapiens
aaagaagattcacta

SEQ ID NO: 849497 - DNA, 15 bp, Homo sapiens
aagaagattcactac

SEQ ID NO: 849498 - DNA, 15 bp, Homo sapiens
agaagattcactaca

SEQ ID NO: 849499 - DNA, 15 bp, Homo sapiens
gaagattcactacat

SEQ ID NO: 849500 - DNA, 15 bp, Homo sapiens
aagattcactacatt

SEQ ID NO: 849501 - DNA, 15 bp, Homo sapiens
agattcactacattg

SEQ ID NO: 849502 - DNA, 15 bp, Homo sapiens
gattcactacattgt

SEQ ID NO: 849503 - DNA, 15 bp, Homo sapiens
attcactacattgtg

SEQ ID NO: 849504 - DNA, 15 bp, Homo sapiens
ttcactacattgtga

SEQ ID NO: 849505 - DNA, 15 bp, Homo sapiens
tcactacattgtgaa

SEQ ID NO: 849506 - DNA, 15 bp, Homo sapiens
cactacattgtgaaa

SEQ ID NO: 849507 - DNA, 15 bp, Homo sapiens
actacattgtgaaat

SEQ ID NO: 849508 - DNA, 15 bp, Homo sapiens
ctacattgtgaaatc

SEQ ID NO: 849509 - DNA, 15 bp, Homo sapiens
tacattgtgaaatcc

SEQ ID NO: 849510 - DNA, 15 bp, Homo sapiens
acattgtgaaatcct

SEQ ID NO: 849511 - DNA, 15 bp, Homo sapiens
cattgtgaaatcctt

SEQ ID NO: 849512 - DNA, 15 bp, Homo sapiens
attgtgaaatccttt

SEQ ID NO: 849513 - DNA, 15 bp, Homo sapiens
ttgtgaaatcctttc

SEQ ID NO: 849514 - DNA, 15 bp, Homo sapiens
gtgaaatcctttcag

SEQ ID NO: 849515 - DNA, 15 bp, Homo sapiens
tgaaatcctttcaga

SEQ ID NO: 849516 - DNA, 15 bp, Homo sapiens
gaaatcctttcagag

SEQ ID NO: 849517 - DNA, 15 bp, Homo sapiens
aaatcctttcagaga

SEQ ID NO: 849518 - DNA, 15 bp, Homo sapiens
aatcctttcagagat

SEQ ID NO: 849519 - DNA, 15 bp, Homo sapiens
atcctttcagagatg

SEQ ID NO: 849520 - DNA, 15 bp, Homo sapiens
tcctttcagagatgc

SEQ ID NO: 849521 - DNA, 15 bp, Homo sapiens
cctttcagagatgcc

SEQ ID NO: 849522 - DNA, 15 bp, Homo sapiens
ctttcagagatgcct

SEQ ID NO: 849523 - DNA, 15 bp, Homo sapiens
tttcagagatgccta

SEQ ID NO: 849524 - DNA, 15 bp, Homo sapiens
ttcagagatgcctag

SEQ ID NO: 849525 - DNA, 15 bp, Homo sapiens
tcagagatgcctagc

SEQ ID NO: 849526 - DNA, 15 bp, Homo sapiens
cagagatgcctagca

SEQ ID NO: 849527 - DNA, 15 bp, Homo sapiens
agagatgcctagcat

SEQ ID NO: 849528 - DNA, 15 bp, Homo sapiens
gagatgcctagcatg

SEQ ID NO: 849529 - DNA, 15 bp, Homo sapiens
agatgcctagcatga

SEQ ID NO: 849530 - DNA, 15 bp, Homo sapiens
gatgcctagcatgaa

SEQ ID NO: 849531 - DNA, 15 bp, Homo sapiens
atgcctagcatgaag

SEQ ID NO: 849532 - DNA, 15 bp, Homo sapiens
tgcctagcatgaaga

SEQ ID NO: 849533 - DNA, 15 bp, Homo sapiens
gcctagcatgaagag

SEQ ID NO: 849534 - DNA, 15 bp, Homo sapiens
cctagcatgaagagg

SEQ ID NO: 849535 - DNA, 15 bp, Homo sapiens
ctagcatgaagaggg

SEQ ID NO: 849536 - DNA, 15 bp, Homo sapiens
tagcatgaagagggt

SEQ ID NO: 849537 - DNA, 15 bp, Homo sapiens
agcatgaagagggtt

SEQ ID NO: 849538 - DNA, 15 bp, Homo sapiens
gcatgaagagggttg

SEQ ID NO: 849539 - DNA, 15 bp, Homo sapiens
catgaagagggttgc

SEQ ID NO: 849540 - DNA, 15 bp, Homo sapiens
atgaagagggttgct

SEQ ID NO: 849541 - DNA, 15 bp, Homo sapiens
tgaagagggttgctg

SEQ ID NO: 849542 - DNA, 15 bp, Homo sapiens
gaagagggttgctgg

SEQ ID NO: 849543 - DNA, 15 bp, Homo sapiens
aagagggttgctggg

SEQ ID NO: 849544 - DNA, 15 bp, Homo sapiens
agagggttgctggga

SEQ ID NO: 849545 - DNA, 15 bp, Homo sapiens
gagggttgctgggaa

SEQ ID NO: 849546 - DNA, 15 bp, Homo sapiens
agggttgctgggaaa

SEQ ID NO: 849547 - DNA, 15 bp, Homo sapiens
gggttgctgggaaaa

SEQ ID NO: 849548 - DNA, 15 bp, Homo sapiens
ggttgctgggaaaac

SEQ ID NO: 849549 - DNA, 15 bp, Homo sapiens
gttgctgggaaaacc

SEQ ID NO: 849550 - DNA, 15 bp, Homo sapiens
ttgctgggaaaacca

SEQ ID NO: 849551 - DNA, 15 bp, Homo sapiens
tgctgggaaaaccag

SEQ ID NO: 849552 - DNA, 15 bp, Homo sapiens
gctgggaaaaccagc

SEQ ID NO: 849553 - DNA, 15 bp, Homo sapiens
ctgggaaaaccagct

SEQ ID NO: 849554 - DNA, 15 bp, Homo sapiens
tgggaaaaccagcta

SEQ ID NO: 849555 - DNA, 15 bp, Homo sapiens
gggaaaaccagctaa

SEQ ID NO: 849556 - DNA, 15 bp, Homo sapiens
ggaaaaccagctaaa

SEQ ID NO: 849557 - DNA, 15 bp, Homo sapiens
gaaaaccagctaaac

SEQ ID NO: 849558 - DNA, 15 bp, Homo sapiens
aaaaccagctaaact

SEQ ID NO: 849559 - DNA, 15 bp, Homo sapiens
aaaccagctaaactt

SEQ ID NO: 849560 - DNA, 15 bp, Homo sapiens
aaccagctaaacttg

SEQ ID NO: 849561 - DNA, 15 bp, Homo sapiens
accagctaaacttga

SEQ ID NO: 849562 - DNA, 15 bp, Homo sapiens
ccagctaaacttgac

SEQ ID NO: 849563 - DNA, 15 bp, Homo sapiens
cagctaaacttgact

SEQ ID NO: 849564 - DNA, 15 bp, Homo sapiens
agctaaacttgacta

SEQ ID NO: 849565 - DNA, 15 bp, Homo sapiens
gctaaacttgactac

SEQ ID NO: 849566 - DNA, 15 bp, Homo sapiens
ctaaacttgactact

SEQ ID NO: 849567 - DNA, 15 bp, Homo sapiens
taaacttgactactt

SEQ ID NO: 849568 - DNA, 15 bp, Homo sapiens
aaacttgactactta

SEQ ID NO: 849569 - DNA, 15 bp, Homo sapiens
aacttgactacttag

SEQ ID NO: 849570 - DNA, 15 bp, Homo sapiens
acttgactacttaga

SEQ ID NO: 849571 - DNA, 15 bp, Homo sapiens
cttgactacttagaa

SEQ ID NO: 849572 - DNA, 15 bp, Homo sapiens
ttgactacttagaaa

SEQ ID NO: 849573 - DNA, 15 bp, Homo sapiens
tgactacttagaaaa

SEQ ID NO: 849574 - DNA, 15 bp, Homo sapiens
gactacttagaaaaa

SEQ ID NO: 849575 - DNA, 15 bp, Homo sapiens
actacttagaaaaaa

SEQ ID NO: 849576 - DNA, 15 bp, Homo sapiens
ctacttagaaaaaat

SEQ ID NO: 849577 - DNA, 15 bp, Homo sapiens
tacttagaaaaaatg

SEQ ID NO: 849578 - DNA, 15 bp, Homo sapiens
acttagaaaaaatgc

SEQ ID NO: 849579 - DNA, 15 bp, Homo sapiens
cttagaaaaaatgca

SEQ ID NO: 849580 - DNA, 15 bp, Homo sapiens
ttagaaaaaatgcat

SEQ ID NO: 849581 - DNA, 15 bp, Homo sapiens
tagaaaaaatgcata

SEQ ID NO: 849582 - DNA, 15 bp, Homo sapiens
agaaaaaatgcatat

SEQ ID NO: 849583 - DNA, 15 bp, Homo sapiens
gaaaaaatgcatatt

SEQ ID NO: 849584 - DNA, 15 bp, Homo sapiens
aaaaaatgcatattt

SEQ ID NO: 849585 - DNA, 15 bp, Homo sapiens
aaaaatgcatatttt

SEQ ID NO: 849586 - DNA, 15 bp, Homo sapiens
aaaatgcatatttta

SEQ ID NO: 849587 - DNA, 15 bp, Homo sapiens
aaatgcatattttaa

SEQ ID NO: 849588 - DNA, 15 bp, Homo sapiens
aatgcatattttaat

SEQ ID NO: 849589 - DNA, 15 bp, Homo sapiens
atgcatattttaatg

SEQ ID NO: 849590 - DNA, 15 bp, Homo sapiens
tgcatattttaatga

SEQ ID NO: 849591 - DNA, 15 bp, Homo sapiens
gcatattttaatgaa

SEQ ID NO: 849592 - DNA, 15 bp, Homo sapiens
catattttaatgaaa

SEQ ID NO: 849593 - DNA, 15 bp, Homo sapiens
atattttaatgaaat

SEQ ID NO: 849594 - DNA, 15 bp, Homo sapiens
tattttaatgaaatt

SEQ ID NO: 849595 - DNA, 15 bp, Homo sapiens
attttaatgaaattt

SEQ ID NO: 849596 - DNA, 15 bp, Homo sapiens
ttttaatgaaatttg

SEQ ID NO: 849597 - DNA, 15 bp, Homo sapiens
tttaatgaaatttgg

SEQ ID NO: 849598 - DNA, 15 bp, Homo sapiens
ttaatgaaatttgga

SEQ ID NO: 849599 - DNA, 15 bp, Homo sapiens
taatgaaatttggag

SEQ ID NO: 849600 - DNA, 15 bp, Homo sapiens
aatgaaatttggagc

SEQ ID NO: 849601 - DNA, 15 bp, Homo sapiens
atgaaatttggagca

SEQ ID NO: 849602 - DNA, 15 bp, Homo sapiens
tgaaatttggagcaa

SEQ ID NO: 849603 - DNA, 15 bp, Homo sapiens
gaaatttggagcaag

SEQ ID NO: 849604 - DNA, 15 bp, Homo sapiens
aaatttggagcaaga

SEQ ID NO: 849605 - DNA, 15 bp, Homo sapiens
aatttggagcaagac

SEQ ID NO: 849606 - DNA, 15 bp, Homo sapiens
atttggagcaagacc

SEQ ID NO: 849607 - DNA, 15 bp, Homo sapiens
tttggagcaagacct

SEQ ID NO: 849608 - DNA, 15 bp, Homo sapiens
ttggagcaagacctc

SEQ ID NO: 849609 - DNA, 15 bp, Homo sapiens
tggagcaagacctct

SEQ ID NO: 849610 - DNA, 15 bp, Homo sapiens
ggagcaagacctctc

SEQ ID NO: 849611 - DNA, 15 bp, Homo sapiens
gagcaagacctctct

SEQ ID NO: 849612 - DNA, 15 bp, Homo sapiens
agcaagacctctctg

SEQ ID NO: 849613 - DNA, 15 bp, Homo sapiens
gcaagacctctctga

SEQ ID NO: 849614 - DNA, 15 bp, Homo sapiens
caagacctctctgaa

SEQ ID NO: 849615 - DNA, 15 bp, Homo sapiens
aagacctctctgaaa

SEQ ID NO: 849616 - DNA, 15 bp, Homo sapiens
agacctctctgaaac

SEQ ID NO: 849617 - DNA, 15 bp, Homo sapiens
gacctctctgaaact

SEQ ID NO: 849618 - DNA, 15 bp, Homo sapiens
acctctctgaaacta

SEQ ID NO: 849619 - DNA, 15 bp, Homo sapiens
cctctctgaaactac

SEQ ID NO: 849620 - DNA, 15 bp, Homo sapiens
ctctctgaaactaca

SEQ ID NO: 849621 - DNA, 15 bp, Homo sapiens
tctctgaaactacat

SEQ ID NO: 849622 - DNA, 15 bp, Homo sapiens
ctctgaaactacatt

SEQ ID NO: 849623 - DNA, 15 bp, Homo sapiens
tctgaaactacattt

SEQ ID NO: 849624 - DNA, 15 bp, Homo sapiens
ctgaaactacatttt

SEQ ID NO: 849625 - DNA, 15 bp, Homo sapiens
tgaaactacatttta

SEQ ID NO: 849626 - DNA, 15 bp, Homo sapiens
gaaactacattttac

SEQ ID NO: 849627 - DNA, 15 bp, Homo sapiens
aaactacattttact

SEQ ID NO: 849628 - DNA, 15 bp, Homo sapiens
aactacattttactt

SEQ ID NO: 849629 - DNA, 15 bp, Homo sapiens
actacattttacttt

SEQ ID NO: 849630 - DNA, 15 bp, Homo sapiens
ctacattttactttt

SEQ ID NO: 849631 - DNA, 15 bp, Homo sapiens
tacattttacttttg

SEQ ID NO: 849632 - DNA, 15 bp, Homo sapiens
acattttacttttgt

SEQ ID NO: 849633 - DNA, 15 bp, Homo sapiens
cattttacttttgtg

SEQ ID NO: 849634 - DNA, 15 bp, Homo sapiens
attttacttttgtga

SEQ ID NO: 849635 - DNA, 15 bp, Homo sapiens
ttttacttttgtgat

SEQ ID NO: 849636 - DNA, 15 bp, Homo sapiens
tttacttttgtgata

SEQ ID NO: 849637 - DNA, 15 bp, Homo sapiens
ttacttttgtgatac

SEQ ID NO: 849638 - DNA, 15 bp, Homo sapiens
tacttttgtgatact

SEQ ID NO: 849639 - DNA, 15 bp, Homo sapiens
acttttgtgatactc

SEQ ID NO: 849640 - DNA, 15 bp, Homo sapiens
cttttgtgatactcc

SEQ ID NO: 849641 - DNA, 15 bp, Homo sapiens
ttttgtgatactcct

SEQ ID NO: 849642 - DNA, 15 bp, Homo sapiens
tttgtgatactcctt

SEQ ID NO: 849643 - DNA, 15 bp, Homo sapiens
ttgtgatactccttt

SEQ ID NO: 849644 - DNA, 15 bp, Homo sapiens
tgtgatactcctttt

SEQ ID NO: 849645 - DNA, 15 bp, Homo sapiens
gtgatactccttttg

SEQ ID NO: 849646 - DNA, 15 bp, Homo sapiens
tgatactccttttga

SEQ ID NO: 849647 - DNA, 15 bp, Homo sapiens
gatactccttttgaa

SEQ ID NO: 849648 - DNA, 15 bp, Homo sapiens
atactccttttgaaa

SEQ ID NO: 849649 - DNA, 15 bp, Homo sapiens
tactccttttgaaat

SEQ ID NO: 849650 - DNA, 15 bp, Homo sapiens
actccttttgaaatt

SEQ ID NO: 849651 - DNA, 15 bp, Homo sapiens
ctccttttgaaattt

SEQ ID NO: 849652 - DNA, 15 bp, Homo sapiens
tccttttgaaatttg

SEQ ID NO: 849653 - DNA, 15 bp, Homo sapiens
ccttttgaaatttgg

SEQ ID NO: 849654 - DNA, 15 bp, Homo sapiens
cttttgaaatttgga

SEQ ID NO: 849655 - DNA, 15 bp, Homo sapiens
ttttgaaatttggag

SEQ ID NO: 849656 - DNA, 15 bp, Homo sapiens
tttgaaatttggagc

SEQ ID NO: 849657 - DNA, 15 bp, Homo sapiens
ttgaaatttggagca

SEQ ID NO: 849658 - DNA, 15 bp, Homo sapiens
atttggagcaagaca

SEQ ID NO: 849659 - DNA, 15 bp, Homo sapiens
tttggagcaagacat

SEQ ID NO: 849660 - DNA, 15 bp, Homo sapiens
ttggagcaagacatc

SEQ ID NO: 849661 - DNA, 15 bp, Homo sapiens
tggagcaagacatct

SEQ ID NO: 849662 - DNA, 15 bp, Homo sapiens
ggagcaagacatctc

SEQ ID NO: 849663 - DNA, 15 bp, Homo sapiens
gagcaagacatctct

SEQ ID NO: 849664 - DNA, 15 bp, Homo sapiens
agcaagacatctctg

SEQ ID NO: 849665 - DNA, 15 bp, Homo sapiens
gcaagacatctctga

SEQ ID NO: 849666 - DNA, 15 bp, Homo sapiens
caagacatctctgaa

SEQ ID NO: 849667 - DNA, 15 bp, Homo sapiens
aagacatctctgaaa

SEQ ID NO: 849668 - DNA, 15 bp, Homo sapiens
agacatctctgaaac

SEQ ID NO: 849669 - DNA, 15 bp, Homo sapiens
gacatctctgaaact

SEQ ID NO: 849670 - DNA, 15 bp, Homo sapiens
acatctctgaaacta

SEQ ID NO: 849671 - DNA, 15 bp, Homo sapiens
catctctgaaactaa

SEQ ID NO: 849672 - DNA, 15 bp, Homo sapiens
atctctgaaactaac

SEQ ID NO: 849673 - DNA, 15 bp, Homo sapiens
tctctgaaactaaca

SEQ ID NO: 849674 - DNA, 15 bp, Homo sapiens
ctctgaaactaacat

SEQ ID NO: 849675 - DNA, 15 bp, Homo sapiens
tctgaaactaacatt

SEQ ID NO: 849676 - DNA, 15 bp, Homo sapiens
ctgaaactaacattt

SEQ ID NO: 849677 - DNA, 15 bp, Homo sapiens
tgaaactaacatttt

SEQ ID NO: 849678 - DNA, 15 bp, Homo sapiens
gaaactaacatttta

SEQ ID NO: 849679 - DNA, 15 bp, Homo sapiens
aaactaacattttac

SEQ ID NO: 849680 - DNA, 15 bp, Homo sapiens
aactaacattttacc

SEQ ID NO: 849681 - DNA, 15 bp, Homo sapiens
actaacattttacct

SEQ ID NO: 849682 - DNA, 15 bp, Homo sapiens
ctaacattttacctt

SEQ ID NO: 849683 - DNA, 15 bp, Homo sapiens
taacattttaccttt

SEQ ID NO: 849684 - DNA, 15 bp, Homo sapiens
aacattttacctttt

SEQ ID NO: 849685 - DNA, 15 bp, Homo sapiens
acattttaccttttg

SEQ ID NO: 849686 - DNA, 15 bp, Homo sapiens
cattttaccttttgt

SEQ ID NO: 849687 - DNA, 15 bp, Homo sapiens
attttaccttttgtg

SEQ ID NO: 849688 - DNA, 15 bp, Homo sapiens
ttttaccttttgtga

SEQ ID NO: 849689 - DNA, 15 bp, Homo sapiens
tttaccttttgtgat

SEQ ID NO: 849690 - DNA, 15 bp, Homo sapiens
ttaccttttgtgata

SEQ ID NO: 849691 - DNA, 15 bp, Homo sapiens
taccttttgtgatat

SEQ ID NO: 849692 - DNA, 15 bp, Homo sapiens
accttttgtgatatt

SEQ ID NO: 849693 - DNA, 15 bp, Homo sapiens
ccttttgtgatattc

SEQ ID NO: 849694 - DNA, 15 bp, Homo sapiens
cttttgtgatattcc

SEQ ID NO: 849695 - DNA, 15 bp, Homo sapiens
ttttgtgatattcct

SEQ ID NO: 849696 - DNA, 15 bp, Homo sapiens
tttgtgatattcctt

SEQ ID NO: 849697 - DNA, 15 bp, Homo sapiens
ttgtgatattccttg

SEQ ID NO: 849698 - DNA, 15 bp, Homo sapiens
tgtgatattccttgg

SEQ ID NO: 849699 - DNA, 15 bp, Homo sapiens
gtgatattccttggg

SEQ ID NO: 849700 - DNA, 15 bp, Homo sapiens
tgatattccttgggg

SEQ ID NO: 849701 - DNA, 15 bp, Homo sapiens
gatattccttggggg

SEQ ID NO: 849702 - DNA, 15 bp, Homo sapiens
atattccttgggggg

SEQ ID NO: 849703 - DNA, 15 bp, Homo sapiens
tattccttggggggt

SEQ ID NO: 849704 - DNA, 15 bp, Homo sapiens
attccttggggggtc

SEQ ID NO: 849705 - DNA, 15 bp, Homo sapiens
ttccttggggggtca

SEQ ID NO: 849706 - DNA, 15 bp, Homo sapiens
tccttggggggtcag

SEQ ID NO: 849707 - DNA, 15 bp, Homo sapiens
ccttggggggtcaga

SEQ ID NO: 849708 - DNA, 15 bp, Homo sapiens
cttggggggtcagaa

SEQ ID NO: 849709 - DNA, 15 bp, Homo sapiens
ttggggggtcagaaa

SEQ ID NO: 849710 - DNA, 15 bp, Homo sapiens
tggggggtcagaaaa

SEQ ID NO: 849711 - DNA, 15 bp, Homo sapiens
ggggggtcagaaaaa

SEQ ID NO: 849712 - DNA, 15 bp, Homo sapiens
gggggtcagaaaaat

SEQ ID NO: 849713 - DNA, 15 bp, Homo sapiens
ggggtcagaaaaatc

SEQ ID NO: 849714 - DNA, 15 bp, Homo sapiens
gggtcagaaaaatct

SEQ ID NO: 849715 - DNA, 15 bp, Homo sapiens
ggtcagaaaaatctg

SEQ ID NO: 849716 - DNA, 15 bp, Homo sapiens
gtcagaaaaatctgt

SEQ ID NO: 849717 - DNA, 15 bp, Homo sapiens
tcagaaaaatctgtc

SEQ ID NO: 849718 - DNA, 15 bp, Homo sapiens
cagaaaaatctgtca

SEQ ID NO: 849719 - DNA, 15 bp, Homo sapiens
agaaaaatctgtcat

SEQ ID NO: 849720 - DNA, 15 bp, Homo sapiens
gaaaaatctgtcatt

SEQ ID NO: 849721 - DNA, 15 bp, Homo sapiens
aaaaatctgtcattt

SEQ ID NO: 849722 - DNA, 15 bp, Homo sapiens
aaaatctgtcatttt

SEQ ID NO: 849723 - DNA, 15 bp, Homo sapiens
aaatctgtcattttg

SEQ ID NO: 849724 - DNA, 15 bp, Homo sapiens
aatctgtcattttgt

SEQ ID NO: 849725 - DNA, 15 bp, Homo sapiens
atctgtcattttgtg

SEQ ID NO: 849726 - DNA, 15 bp, Homo sapiens
tctgtcattttgtgc

SEQ ID NO: 849727 - DNA, 15 bp, Homo sapiens
ctgtcattttgtgca

SEQ ID NO: 849728 - DNA, 15 bp, Homo sapiens
tgtcattttgtgcaa

SEQ ID NO: 849729 - DNA, 15 bp, Homo sapiens
gtcattttgtgcaaa

SEQ ID NO: 849730 - DNA, 15 bp, Homo sapiens
tcattttgtgcaaag

SEQ ID NO: 849731 - DNA, 15 bp, Homo sapiens
cattttgtgcaaagt

SEQ ID NO: 849732 - DNA, 15 bp, Homo sapiens
attttgtgcaaagta

SEQ ID NO: 849733 - DNA, 15 bp, Homo sapiens
ttttgtgcaaagtag

SEQ ID NO: 849734 - DNA, 15 bp, Homo sapiens
tttgtgcaaagtaga

SEQ ID NO: 849735 - DNA, 15 bp, Homo sapiens
ttgtgcaaagtagaa

SEQ ID NO: 849736 - DNA, 15 bp, Homo sapiens
tgtgcaaagtagaaa

SEQ ID NO: 849737 - DNA, 15 bp, Homo sapiens
gtgcaaagtagaaat

SEQ ID NO: 849738 - DNA, 15 bp, Homo sapiens
tgcaaagtagaaata

SEQ ID NO: 849739 - DNA, 15 bp, Homo sapiens
gcaaagtagaaatat

SEQ ID NO: 849740 - DNA, 15 bp, Homo sapiens
caaagtagaaatata

SEQ ID NO: 849741 - DNA, 15 bp, Homo sapiens
aaagtagaaatatac

SEQ ID NO: 849742 - DNA, 15 bp, Homo sapiens
aagtagaaatatact

SEQ ID NO: 849743 - DNA, 15 bp, Homo sapiens
agtagaaatatactg

SEQ ID NO: 849744 - DNA, 15 bp, Homo sapiens
gtagaaatatactgt

SEQ ID NO: 849745 - DNA, 15 bp, Homo sapiens
tagaaatatactgtt

SEQ ID NO: 849746 - DNA, 15 bp, Homo sapiens
agaaatatactgttt

SEQ ID NO: 849747 - DNA, 15 bp, Homo sapiens
gaaatatactgtttc

SEQ ID NO: 849748 - DNA, 15 bp, Homo sapiens
aaatatactgtttca

SEQ ID NO: 849749 - DNA, 15 bp, Homo sapiens
aatatactgtttcat

SEQ ID NO: 849750 - DNA, 15 bp, Homo sapiens
atatactgtttcatt

SEQ ID NO: 849751 - DNA, 15 bp, Homo sapiens
tatactgtttcatta

SEQ ID NO: 849752 - DNA, 15 bp, Homo sapiens
atactgtttcattat

SEQ ID NO: 849753 - DNA, 15 bp, Homo sapiens
tactgtttcattata

SEQ ID NO: 849754 - DNA, 15 bp, Homo sapiens
actgtttcattataa

SEQ ID NO: 849755 - DNA, 15 bp, Homo sapiens
ctgtttcattataat

SEQ ID NO: 849756 - DNA, 15 bp, Homo sapiens
tgtttcattataata

SEQ ID NO: 849757 - DNA, 15 bp, Homo sapiens
gtttcattataatat

SEQ ID NO: 849758 - DNA, 15 bp, Homo sapiens
tttcattataatata

SEQ ID NO: 849759 - DNA, 15 bp, Homo sapiens
ttcattataatatat

SEQ ID NO: 849760 - DNA, 15 bp, Homo sapiens
tcattataatatata

SEQ ID NO: 849761 - DNA, 15 bp, Homo sapiens
cattataatatatac

SEQ ID NO: 849762 - DNA, 15 bp, Homo sapiens
attataatatataca

SEQ ID NO: 849763 - DNA, 15 bp, Homo sapiens
ttataatatatacat

SEQ ID NO: 849764 - DNA, 15 bp, Homo sapiens
tataatatatacatg

SEQ ID NO: 849765 - DNA, 15 bp, Homo sapiens
ataatatatacatgc

SEQ ID NO: 849766 - DNA, 15 bp, Homo sapiens
taatatatacatgct

SEQ ID NO: 849767 - DNA, 15 bp, Homo sapiens
aatatatacatgctt

SEQ ID NO: 849768 - DNA, 15 bp, Homo sapiens
atatatacatgctta

SEQ ID NO: 849769 - DNA, 15 bp, Homo sapiens
tatatacatgcttat

SEQ ID NO: 849770 - DNA, 15 bp, Homo sapiens
atatacatgcttatt

SEQ ID NO: 849771 - DNA, 15 bp, Homo sapiens
tatacatgcttatta

SEQ ID NO: 849772 - DNA, 15 bp, Homo sapiens
atacatgcttattat

SEQ ID NO: 849773 - DNA, 15 bp, Homo sapiens
tacatgcttattata

SEQ ID NO: 849774 - DNA, 15 bp, Homo sapiens
acatgcttattataa

SEQ ID NO: 849775 - DNA, 15 bp, Homo sapiens
catgcttattataaa

SEQ ID NO: 849776 - DNA, 15 bp, Homo sapiens
atgcttattataaaa

SEQ ID NO: 849777 - DNA, 15 bp, Homo sapiens
tgcttattataaaag

SEQ ID NO: 849778 - DNA, 15 bp, Homo sapiens
gcttattataaaagc

SEQ ID NO: 849779 - DNA, 15 bp, Homo sapiens
cttattataaaagcc

SEQ ID NO: 849780 - DNA, 15 bp, Homo sapiens
ttattataaaagcct

SEQ ID NO: 849781 - DNA, 15 bp, Homo sapiens
tattataaaagcctt

SEQ ID NO: 849782 - DNA, 15 bp, Homo sapiens
attataaaagccttc

SEQ ID NO: 849783 - DNA, 15 bp, Homo sapiens
ttataaaagccttca

SEQ ID NO: 849784 - DNA, 15 bp, Homo sapiens
tataaaagccttcag

SEQ ID NO: 849785 - DNA, 15 bp, Homo sapiens
ataaaagccttcaga

SEQ ID NO: 849786 - DNA, 15 bp, Homo sapiens
taaaagccttcagac

SEQ ID NO: 849787 - DNA, 15 bp, Homo sapiens
aaaagccttcagaca

SEQ ID NO: 849788 - DNA, 15 bp, Homo sapiens
aaagccttcagacaa

SEQ ID NO: 849789 - DNA, 15 bp, Homo sapiens
aagccttcagacaat

SEQ ID NO: 849790 - DNA, 15 bp, Homo sapiens
agccttcagacaata

SEQ ID NO: 849791 - DNA, 15 bp, Homo sapiens
gccttcagacaatac

SEQ ID NO: 849792 - DNA, 15 bp, Homo sapiens
ccttcagacaataca

SEQ ID NO: 849793 - DNA, 15 bp, Homo sapiens
cttcagacaatacag

SEQ ID NO: 849794 - DNA, 15 bp, Homo sapiens
ttcagacaatacagg

SEQ ID NO: 849795 - DNA, 15 bp, Homo sapiens
tcagacaatacagga

SEQ ID NO: 849796 - DNA, 15 bp, Homo sapiens
cagacaatacaggaa

SEQ ID NO: 849797 - DNA, 15 bp, Homo sapiens
agacaatacaggaat

SEQ ID NO: 849798 - DNA, 15 bp, Homo sapiens
gacaatacaggaatc

SEQ ID NO: 849799 - DNA, 15 bp, Homo sapiens
acaatacaggaatct

SEQ ID NO: 849800 - DNA, 15 bp, Homo sapiens
caatacaggaatcta

SEQ ID NO: 849801 - DNA, 15 bp, Homo sapiens
aatacaggaatctat

SEQ ID NO: 849802 - DNA, 15 bp, Homo sapiens
atacaggaatctata

SEQ ID NO: 849803 - DNA, 15 bp, Homo sapiens
tacaggaatctatag

SEQ ID NO: 849804 - DNA, 15 bp, Homo sapiens
acaggaatctataga

SEQ ID NO: 849805 - DNA, 15 bp, Homo sapiens
caggaatctatagag

SEQ ID NO: 849806 - DNA, 15 bp, Homo sapiens
aggaatctatagagg

SEQ ID NO: 849807 - DNA, 15 bp, Homo sapiens
ggaatctatagagga

SEQ ID NO: 849808 - DNA, 15 bp, Homo sapiens
gaatctatagaggaa

SEQ ID NO: 849809 - DNA, 15 bp, Homo sapiens
aatctatagaggaaa

SEQ ID NO: 849810 - DNA, 15 bp, Homo sapiens
atctatagaggaaaa

SEQ ID NO: 849811 - DNA, 15 bp, Homo sapiens
tctatagaggaaaaa

SEQ ID NO: 849812 - DNA, 15 bp, Homo sapiens
ctatagaggaaaaaa

SEQ ID NO: 849813 - DNA, 15 bp, Homo sapiens
tatagaggaaaaaaa

SEQ ID NO: 849814 - DNA, 15 bp, Homo sapiens
atagaggaaaaaaag

SEQ ID NO: 849815 - DNA, 15 bp, Homo sapiens
tagaggaaaaaaagt

SEQ ID NO: 849816 - DNA, 15 bp, Homo sapiens
agaggaaaaaaagta

SEQ ID NO: 849817 - DNA, 15 bp, Homo sapiens
gaggaaaaaaagtat

SEQ ID NO: 849818 - DNA, 15 bp, Homo sapiens
aggaaaaaaagtatc

SEQ ID NO: 849819 - DNA, 15 bp, Homo sapiens
ggaaaaaaagtatca

SEQ ID NO: 849820 - DNA, 15 bp, Homo sapiens
gaaaaaaagtatcat

SEQ ID NO: 849821 - DNA, 15 bp, Homo sapiens
aaaaaaagtatcatt

SEQ ID NO: 849822 - DNA, 15 bp, Homo sapiens
aaaaaagtatcattc

SEQ ID NO: 849823 - DNA, 15 bp, Homo sapiens
aaaaagtatcattct

SEQ ID NO: 849824 - DNA, 15 bp, Homo sapiens
aaaagtatcattcta

SEQ ID NO: 849825 - DNA, 15 bp, Homo sapiens
aaagtatcattctac

SEQ ID NO: 849826 - DNA, 15 bp, Homo sapiens
aagtatcattctacc

SEQ ID NO: 849827 - DNA, 15 bp, Homo sapiens
agtatcattctacca

SEQ ID NO: 849828 - DNA, 15 bp, Homo sapiens
gtatcattctaccac

SEQ ID NO: 849829 - DNA, 15 bp, Homo sapiens
tatcattctaccact

SEQ ID NO: 849830 - DNA, 15 bp, Homo sapiens
atcattctaccactc

SEQ ID NO: 849831 - DNA, 15 bp, Homo sapiens
tcattctaccactca

SEQ ID NO: 849832 - DNA, 15 bp, Homo sapiens
cattctaccactcag

SEQ ID NO: 849833 - DNA, 15 bp, Homo sapiens
attctaccactcaga

SEQ ID NO: 849834 - DNA, 15 bp, Homo sapiens
ttctaccactcagag

SEQ ID NO: 849835 - DNA, 15 bp, Homo sapiens
tctaccactcagagg

SEQ ID NO: 849836 - DNA, 15 bp, Homo sapiens
ctaccactcagaggt

SEQ ID NO: 849837 - DNA, 15 bp, Homo sapiens
taccactcagaggta

SEQ ID NO: 849838 - DNA, 15 bp, Homo sapiens
accactcagaggtaa

SEQ ID NO: 849839 - DNA, 15 bp, Homo sapiens
ccactcagaggtaac

SEQ ID NO: 849840 - DNA, 15 bp, Homo sapiens
cactcagaggtaaca

SEQ ID NO: 849841 - DNA, 15 bp, Homo sapiens
actcagaggtaacaa

SEQ ID NO: 849842 - DNA, 15 bp, Homo sapiens
ctcagaggtaacaac

SEQ ID NO: 849843 - DNA, 15 bp, Homo sapiens
tcagaggtaacaact

SEQ ID NO: 849844 - DNA, 15 bp, Homo sapiens
cagaggtaacaactg

SEQ ID NO: 849845 - DNA, 15 bp, Homo sapiens
agaggtaacaactgt

SEQ ID NO: 849846 - DNA, 15 bp, Homo sapiens
gaggtaacaactgtt

SEQ ID NO: 849847 - DNA, 15 bp, Homo sapiens
aggtaacaactgtta

SEQ ID NO: 849848 - DNA, 15 bp, Homo sapiens
ggtaacaactgttag

SEQ ID NO: 849849 - DNA, 15 bp, Homo sapiens
gtaacaactgttagt

SEQ ID NO: 849850 - DNA, 15 bp, Homo sapiens
taacaactgttagtg

SEQ ID NO: 849851 - DNA, 15 bp, Homo sapiens
aacaactgttagtgt

SEQ ID NO: 849852 - DNA, 15 bp, Homo sapiens
acaactgttagtgtt

SEQ ID NO: 849853 - DNA, 15 bp, Homo sapiens
caactgttagtgttt

SEQ ID NO: 849854 - DNA, 15 bp, Homo sapiens
aactgttagtgtttt

SEQ ID NO: 849855 - DNA, 15 bp, Homo sapiens
actgttagtgttttg

SEQ ID NO: 849856 - DNA, 15 bp, Homo sapiens
ctgttagtgttttga

SEQ ID NO: 849857 - DNA, 15 bp, Homo sapiens
tgttagtgttttgat

SEQ ID NO: 849858 - DNA, 15 bp, Homo sapiens
gttagtgttttgata

SEQ ID NO: 849859 - DNA, 15 bp, Homo sapiens
ttagtgttttgatat

SEQ ID NO: 849860 - DNA, 15 bp, Homo sapiens
tagtgttttgatata

SEQ ID NO: 849861 - DNA, 15 bp, Homo sapiens
agtgttttgatataa

SEQ ID NO: 849862 - DNA, 15 bp, Homo sapiens
gtgttttgatataaa

SEQ ID NO: 849863 - DNA, 15 bp, Homo sapiens
tgttttgatataaag

SEQ ID NO: 849864 - DNA, 15 bp, Homo sapiens
gttttgatataaagc

SEQ ID NO: 849865 - DNA, 15 bp, Homo sapiens
ttttgatataaagct

SEQ ID NO: 849866 - DNA, 15 bp, Homo sapiens
tttgatataaagctt

SEQ ID NO: 849867 - DNA, 15 bp, Homo sapiens
ttgatataaagcttc

SEQ ID NO: 849868 - DNA, 15 bp, Homo sapiens
tgatataaagcttcc

SEQ ID NO: 849869 - DNA, 15 bp, Homo sapiens
gatataaagcttcct

SEQ ID NO: 849870 - DNA, 15 bp, Homo sapiens
atataaagcttccta

SEQ ID NO: 849871 - DNA, 15 bp, Homo sapiens
tataaagcttcctaa

SEQ ID NO: 849872 - DNA, 15 bp, Homo sapiens
ataaagcttcctaaa

SEQ ID NO: 849873 - DNA, 15 bp, Homo sapiens
taaagcttcctaaat

SEQ ID NO: 849874 - DNA, 15 bp, Homo sapiens
aaagcttcctaaatt

SEQ ID NO: 849875 - DNA, 15 bp, Homo sapiens
aagcttcctaaattc

SEQ ID NO: 849876 - DNA, 15 bp, Homo sapiens
agcttcctaaattct

SEQ ID NO: 849877 - DNA, 15 bp, Homo sapiens
gcttcctaaattctt

SEQ ID NO: 849878 - DNA, 15 bp, Homo sapiens
cttcctaaattcttt

SEQ ID NO: 849879 - DNA, 15 bp, Homo sapiens
ttcctaaattctttt

SEQ ID NO: 849880 - DNA, 15 bp, Homo sapiens
tcctaaattcttttt

SEQ ID NO: 849881 - DNA, 15 bp, Homo sapiens
cctaaattcttttta

SEQ ID NO: 849882 - DNA, 15 bp, Homo sapiens
ctaaattctttttat

SEQ ID NO: 849883 - DNA, 15 bp, Homo sapiens
taaattctttttatg

SEQ ID NO: 849884 - DNA, 15 bp, Homo sapiens
aaattctttttatgg

SEQ ID NO: 849885 - DNA, 15 bp, Homo sapiens
aattctttttatggc

SEQ ID NO: 849886 - DNA, 15 bp, Homo sapiens
attctttttatggct

SEQ ID NO: 849887 - DNA, 15 bp, Homo sapiens
ttctttttatggctt

SEQ ID NO: 849888 - DNA, 15 bp, Homo sapiens
tctttttatggcttt

SEQ ID NO: 849889 - DNA, 15 bp, Homo sapiens
ctttttatggcttta

SEQ ID NO: 849890 - DNA, 15 bp, Homo sapiens
tttttatggctttac

SEQ ID NO: 849891 - DNA, 15 bp, Homo sapiens
ttttatggctttaca

SEQ ID NO: 849892 - DNA, 15 bp, Homo sapiens
tttatggctttacaa

SEQ ID NO: 849893 - DNA, 15 bp, Homo sapiens
ttatggctttacaaa

SEQ ID NO: 849894 - DNA, 15 bp, Homo sapiens
tatggctttacaaac

SEQ ID NO: 849895 - DNA, 15 bp, Homo sapiens
atggctttacaaaca

SEQ ID NO: 849896 - DNA, 15 bp, Homo sapiens
tggctttacaaacat

SEQ ID NO: 849897 - DNA, 15 bp, Homo sapiens
ggctttacaaacatt

SEQ ID NO: 849898 - DNA, 15 bp, Homo sapiens
gctttacaaacattc

SEQ ID NO: 849899 - DNA, 15 bp, Homo sapiens
ctttacaaacattca

SEQ ID NO: 849900 - DNA, 15 bp, Homo sapiens
tttacaaacattcag

SEQ ID NO: 849901 - DNA, 15 bp, Homo sapiens
ttacaaacattcaga

SEQ ID NO: 849902 - DNA, 15 bp, Homo sapiens
tacaaacattcagat

SEQ ID NO: 849903 - DNA, 15 bp, Homo sapiens
acaaacattcagata

SEQ ID NO: 849904 - DNA, 15 bp, Homo sapiens
caaacattcagataa

SEQ ID NO: 849905 - DNA, 15 bp, Homo sapiens
aaacattcagataac

SEQ ID NO: 849906 - DNA, 15 bp, Homo sapiens
aacattcagataact

SEQ ID NO: 849907 - DNA, 15 bp, Homo sapiens
acattcagataacta

SEQ ID NO: 849908 - DNA, 15 bp, Homo sapiens
cattcagataactat

SEQ ID NO: 849909 - DNA, 15 bp, Homo sapiens
attcagataactata

SEQ ID NO: 849910 - DNA, 15 bp, Homo sapiens
ttcagataactatag

SEQ ID NO: 849911 - DNA, 15 bp, Homo sapiens
tcagataactatagg

SEQ ID NO: 849912 - DNA, 15 bp, Homo sapiens
cagataactataggc

SEQ ID NO: 849913 - DNA, 15 bp, Homo sapiens
agataactataggcc

SEQ ID NO: 849914 - DNA, 15 bp, Homo sapiens
gataactataggcca

SEQ ID NO: 849915 - DNA, 15 bp, Homo sapiens
ataactataggccat

SEQ ID NO: 849916 - DNA, 15 bp, Homo sapiens
taactataggccatc

SEQ ID NO: 849917 - DNA, 15 bp, Homo sapiens
aactataggccatct

SEQ ID NO: 849918 - DNA, 15 bp, Homo sapiens
actataggccatcta

SEQ ID NO: 849919 - DNA, 15 bp, Homo sapiens
ctataggccatctaa

SEQ ID NO: 849920 - DNA, 15 bp, Homo sapiens
tataggccatctaaa

SEQ ID NO: 849921 - DNA, 15 bp, Homo sapiens
ataggccatctaaaa

SEQ ID NO: 849922 - DNA, 15 bp, Homo sapiens
taggccatctaaaaa

SEQ ID NO: 849923 - DNA, 15 bp, Homo sapiens
aggccatctaaaaaa

SEQ ID NO: 849924 - DNA, 15 bp, Homo sapiens
ggccatctaaaaaaa

SEQ ID NO: 849925 - DNA, 15 bp, Homo sapiens
gccatctaaaaaaat

SEQ ID NO: 849926 - DNA, 15 bp, Homo sapiens
ccatctaaaaaaata

SEQ ID NO: 849927 - DNA, 15 bp, Homo sapiens
catctaaaaaaatag

SEQ ID NO: 849928 - DNA, 15 bp, Homo sapiens
atctaaaaaaatagg

SEQ ID NO: 849929 - DNA, 15 bp, Homo sapiens
tctaaaaaaatagga

SEQ ID NO: 849930 - DNA, 15 bp, Homo sapiens
ctaaaaaaataggat

SEQ ID NO: 849931 - DNA, 15 bp, Homo sapiens
taaaaaaataggatc

SEQ ID NO: 849932 - DNA, 15 bp, Homo sapiens
aaaaaaataggatca

SEQ ID NO: 849933 - DNA, 15 bp, Homo sapiens
aaaaaataggatcag

SEQ ID NO: 849934 - DNA, 15 bp, Homo sapiens
aaaaataggatcaga

SEQ ID NO: 849935 - DNA, 15 bp, Homo sapiens
aaaataggatcagat

SEQ ID NO: 849936 - DNA, 15 bp, Homo sapiens
aaataggatcagatt

SEQ ID NO: 849937 - DNA, 15 bp, Homo sapiens
aataggatcagatta

SEQ ID NO: 849938 - DNA, 15 bp, Homo sapiens
ataggatcagattat

SEQ ID NO: 849939 - DNA, 15 bp, Homo sapiens
taggatcagattatg

SEQ ID NO: 849940 - DNA, 15 bp, Homo sapiens
aggatcagattatgt

SEQ ID NO: 849941 - DNA, 15 bp, Homo sapiens
ggatcagattatgta

SEQ ID NO: 849942 - DNA, 15 bp, Homo sapiens
gatcagattatgtac

SEQ ID NO: 849943 - DNA, 15 bp, Homo sapiens
atcagattatgtaca

SEQ ID NO: 849944 - DNA, 15 bp, Homo sapiens
tcagattatgtacac

SEQ ID NO: 849945 - DNA, 15 bp, Homo sapiens
cagattatgtacact

SEQ ID NO: 849946 - DNA, 15 bp, Homo sapiens
agattatgtacacta

SEQ ID NO: 849947 - DNA, 15 bp, Homo sapiens
gattatgtacactat

SEQ ID NO: 849948 - DNA, 15 bp, Homo sapiens
attatgtacactatt

SEQ ID NO: 849949 - DNA, 15 bp, Homo sapiens
ttatgtacactattt

SEQ ID NO: 849950 - DNA, 15 bp, Homo sapiens
tatgtacactatttt

SEQ ID NO: 849951 - DNA, 15 bp, Homo sapiens
atgtacactatttta

SEQ ID NO: 849952 - DNA, 15 bp, Homo sapiens
tgtacactattttat

SEQ ID NO: 849953 - DNA, 15 bp, Homo sapiens
gtacactattttata

SEQ ID NO: 849954 - DNA, 15 bp, Homo sapiens
tacactattttataa

SEQ ID NO: 849955 - DNA, 15 bp, Homo sapiens
acactattttataat

SEQ ID NO: 849956 - DNA, 15 bp, Homo sapiens
cactattttataatg

SEQ ID NO: 849957 - DNA, 15 bp, Homo sapiens
actattttataatgt

SEQ ID NO: 849958 - DNA, 15 bp, Homo sapiens
ctattttataatgtg

SEQ ID NO: 849959 - DNA, 15 bp, Homo sapiens
tattttataatgtgc

SEQ ID NO: 849960 - DNA, 15 bp, Homo sapiens
attttataatgtgcc

SEQ ID NO: 849961 - DNA, 15 bp, Homo sapiens
ttttataatgtgcct

SEQ ID NO: 849962 - DNA, 15 bp, Homo sapiens
tttataatgtgcctt

SEQ ID NO: 849963 - DNA, 15 bp, Homo sapiens
ttataatgtgccttt

SEQ ID NO: 849964 - DNA, 15 bp, Homo sapiens
tataatgtgcctttt

SEQ ID NO: 849965 - DNA, 15 bp, Homo sapiens
ataatgtgccttttt

SEQ ID NO: 849966 - DNA, 15 bp, Homo sapiens
taatgtgccttttta

SEQ ID NO: 849967 - DNA, 15 bp, Homo sapiens
aatgtgcctttttac

SEQ ID NO: 849968 - DNA, 15 bp, Homo sapiens
atgtgcctttttaca

SEQ ID NO: 849969 - DNA, 15 bp, Homo sapiens
tgtgcctttttacag

SEQ ID NO: 849970 - DNA, 15 bp, Homo sapiens
gtgcctttttacaga

SEQ ID NO: 849971 - DNA, 15 bp, Homo sapiens
tgcctttttacagaa

SEQ ID NO: 849972 - DNA, 15 bp, Homo sapiens
gcctttttacagaat

SEQ ID NO: 849973 - DNA, 15 bp, Homo sapiens
cctttttacagaatt

SEQ ID NO: 849974 - DNA, 15 bp, Homo sapiens
ctttttacagaattt

SEQ ID NO: 849975 - DNA, 15 bp, Homo sapiens
tttttacagaatttc

SEQ ID NO: 849976 - DNA, 15 bp, Homo sapiens
ttttacagaatttct

SEQ ID NO: 849977 - DNA, 15 bp, Homo sapiens
tttacagaatttctg

SEQ ID NO: 849978 - DNA, 15 bp, Homo sapiens
ttacagaatttctgt

SEQ ID NO: 849979 - DNA, 15 bp, Homo sapiens
tacagaatttctgta

SEQ ID NO: 849980 - DNA, 15 bp, Homo sapiens
acagaatttctgtat

SEQ ID NO: 849981 - DNA, 15 bp, Homo sapiens
cagaatttctgtatg

SEQ ID NO: 849982 - DNA, 15 bp, Homo sapiens
agaatttctgtatga

SEQ ID NO: 849983 - DNA, 15 bp, Homo sapiens
gaatttctgtatgaa

SEQ ID NO: 849984 - DNA, 15 bp, Homo sapiens
aatttctgtatgaac

SEQ ID NO: 849985 - DNA, 15 bp, Homo sapiens
atttctgtatgaaca

SEQ ID NO: 849986 - DNA, 15 bp, Homo sapiens
tttctgtatgaacag

SEQ ID NO: 849987 - DNA, 15 bp, Homo sapiens
ttctgtatgaacagg

SEQ ID NO: 849988 - DNA, 15 bp, Homo sapiens
tctgtatgaacaggt

SEQ ID NO: 849989 - DNA, 15 bp, Homo sapiens
ctgtatgaacaggta

SEQ ID NO: 849990 - DNA, 15 bp, Homo sapiens
tgtatgaacaggtat

SEQ ID NO: 849991 - DNA, 15 bp, Homo sapiens
gtatgaacaggtata

SEQ ID NO: 849992 - DNA, 15 bp, Homo sapiens
tatgaacaggtatac

SEQ ID NO: 849993 - DNA, 15 bp, Homo sapiens
atgaacaggtataca

SEQ ID NO: 849994 - DNA, 15 bp, Homo sapiens
tgaacaggtatacat

SEQ ID NO: 849995 - DNA, 15 bp, Homo sapiens
gaacaggtatacatt

SEQ ID NO: 849996 - DNA, 15 bp, Homo sapiens
aacaggtatacattt

SEQ ID NO: 849997 - DNA, 15 bp, Homo sapiens
acaggtatacatttt

SEQ ID NO: 849998 - DNA, 15 bp, Homo sapiens
caggtatacattttc

SEQ ID NO: 849999 - DNA, 15 bp, Homo sapiens
aggtatacattttca

SEQ ID NO: 850000 - DNA, 15 bp, Homo sapiens
ggtatacattttcat

SEQ ID NO: 850001 - DNA, 15 bp, Homo sapiens
gtatacattttcatt

SEQ ID NO: 850002 - DNA, 15 bp, Homo sapiens
tatacattttcatta

SEQ ID NO: 850003 - DNA, 15 bp, Homo sapiens
atacattttcattat

SEQ ID NO: 850004 - DNA, 15 bp, Homo sapiens
tacattttcattata

SEQ ID NO: 850005 - DNA, 15 bp, Homo sapiens
acattttcattataa

SEQ ID NO: 850006 - DNA, 15 bp, Homo sapiens
cattttcattataat

SEQ ID NO: 850007 - DNA, 15 bp, Homo sapiens
attttcattataatt

SEQ ID NO: 850008 - DNA, 15 bp, Homo sapiens
ttttcattataattt

SEQ ID NO: 850009 - DNA, 15 bp, Homo sapiens
tttcattataatttt

SEQ ID NO: 850010 - DNA, 15 bp, Homo sapiens
ttcattataattttt

SEQ ID NO: 850011 - DNA, 15 bp, Homo sapiens
tcattataattttta

SEQ ID NO: 850012 - DNA, 15 bp, Homo sapiens
cattataatttttaa

SEQ ID NO: 850013 - DNA, 15 bp, Homo sapiens
attataatttttaat

SEQ ID NO: 850014 - DNA, 15 bp, Homo sapiens
ttataatttttaatt

SEQ ID NO: 850015 - DNA, 15 bp, Homo sapiens
tataatttttaattg

SEQ ID NO: 850016 - DNA, 15 bp, Homo sapiens
ataatttttaattgc

SEQ ID NO: 850017 - DNA, 15 bp, Homo sapiens
taatttttaattgct

SEQ ID NO: 850018 - DNA, 15 bp, Homo sapiens
aatttttaattgctt

SEQ ID NO: 850019 - DNA, 15 bp, Homo sapiens
atttttaattgcttc

SEQ ID NO: 850020 - DNA, 15 bp, Homo sapiens
tttttaattgcttct

SEQ ID NO: 850021 - DNA, 15 bp, Homo sapiens
ttttaattgcttctt

SEQ ID NO: 850022 - DNA, 15 bp, Homo sapiens
tttaattgcttctta

SEQ ID NO: 850023 - DNA, 15 bp, Homo sapiens
ttaattgcttcttag

SEQ ID NO: 850024 - DNA, 15 bp, Homo sapiens
taattgcttcttagt

SEQ ID NO: 850025 - DNA, 15 bp, Homo sapiens
aattgcttcttagta

SEQ ID NO: 850026 - DNA, 15 bp, Homo sapiens
attgcttcttagtat

SEQ ID NO: 850027 - DNA, 15 bp, Homo sapiens
ttgcttcttagtatt

SEQ ID NO: 850028 - DNA, 15 bp, Homo sapiens
tgcttcttagtattc

SEQ ID NO: 850029 - DNA, 15 bp, Homo sapiens
gcttcttagtattcc

SEQ ID NO: 850030 - DNA, 15 bp, Homo sapiens
cttcttagtattcca

SEQ ID NO: 850031 - DNA, 15 bp, Homo sapiens
ttcttagtattccat

SEQ ID NO: 850032 - DNA, 15 bp, Homo sapiens
tcttagtattccatt

SEQ ID NO: 850033 - DNA, 15 bp, Homo sapiens
cttagtattccattg

SEQ ID NO: 850034 - DNA, 15 bp, Homo sapiens
ttagtattccattgt

SEQ ID NO: 850035 - DNA, 15 bp, Homo sapiens
tattccattgtatgt

SEQ ID NO: 850036 - DNA, 15 bp, Homo sapiens
attccattgtatgtg

SEQ ID NO: 850037 - DNA, 15 bp, Homo sapiens
ttccattgtatgtgt

SEQ ID NO: 850038 - DNA, 15 bp, Homo sapiens
tccattgtatgtgtg

SEQ ID NO: 850039 - DNA, 15 bp, Homo sapiens
ccattgtatgtgtgc

SEQ ID NO: 850040 - DNA, 15 bp, Homo sapiens
cattgtatgtgtgcc

SEQ ID NO: 850041 - DNA, 15 bp, Homo sapiens
attgtatgtgtgcca

SEQ ID NO: 850042 - DNA, 15 bp, Homo sapiens
ttgtatgtgtgccat

SEQ ID NO: 850043 - DNA, 15 bp, Homo sapiens
tgtatgtgtgccatt

SEQ ID NO: 850044 - DNA, 15 bp, Homo sapiens
gtatgtgtgccattt

SEQ ID NO: 850045 - DNA, 15 bp, Homo sapiens
tatgtgtgccattta

SEQ ID NO: 850046 - DNA, 15 bp, Homo sapiens
atgtgtgccatttac

SEQ ID NO: 850047 - DNA, 15 bp, Homo sapiens
tgtgtgccatttacg

SEQ ID NO: 850048 - DNA, 15 bp, Homo sapiens
gtgtgccatttacgg

SEQ ID NO: 850049 - DNA, 15 bp, Homo sapiens
tgtgccatttacggt

SEQ ID NO: 850050 - DNA, 15 bp, Homo sapiens
gtgccatttacggtt

SEQ ID NO: 850051 - DNA, 15 bp, Homo sapiens
tgccatttacggtta

SEQ ID NO: 850052 - DNA, 15 bp, Homo sapiens
gccatttacggttat

SEQ ID NO: 850053 - DNA, 15 bp, Homo sapiens
ccatttacggttatt

SEQ ID NO: 850054 - DNA, 15 bp, Homo sapiens
catttacggttattt

SEQ ID NO: 850055 - DNA, 15 bp, Homo sapiens
atttacggttatttc

SEQ ID NO: 850056 - DNA, 15 bp, Homo sapiens
tttacggttatttcc

SEQ ID NO: 850057 - DNA, 15 bp, Homo sapiens
ttacggttatttccc

SEQ ID NO: 850058 - DNA, 15 bp, Homo sapiens
tacggttatttccca

SEQ ID NO: 850059 - DNA, 15 bp, Homo sapiens
acggttatttcccat

SEQ ID NO: 850060 - DNA, 15 bp, Homo sapiens
cggttatttcccatt

SEQ ID NO: 850061 - DNA, 15 bp, Homo sapiens
ggttatttcccattt

SEQ ID NO: 850062 - DNA, 15 bp, Homo sapiens
gttatttcccatttt

SEQ ID NO: 850063 - DNA, 15 bp, Homo sapiens
ttatttcccattttt

SEQ ID NO: 850064 - DNA, 15 bp, Homo sapiens
tatttcccatttttc

SEQ ID NO: 850065 - DNA, 15 bp, Homo sapiens
atttcccatttttca

SEQ ID NO: 850066 - DNA, 15 bp, Homo sapiens
tttcccatttttcat

SEQ ID NO: 850067 - DNA, 15 bp, Homo sapiens
ttcccatttttcatg

SEQ ID NO: 850068 - DNA, 15 bp, Homo sapiens
tcccatttttcatga

SEQ ID NO: 850069 - DNA, 15 bp, Homo sapiens
cccatttttcatgaa

SEQ ID NO: 850070 - DNA, 15 bp, Homo sapiens
ccatttttcatgaat

SEQ ID NO: 850071 - DNA, 15 bp, Homo sapiens
catttttcatgaata

SEQ ID NO: 850072 - DNA, 15 bp, Homo sapiens
atttttcatgaatag

SEQ ID NO: 850073 - DNA, 15 bp, Homo sapiens
tttttcatgaataga

SEQ ID NO: 850074 - DNA, 15 bp, Homo sapiens
ttttcatgaatagaa

SEQ ID NO: 850075 - DNA, 15 bp, Homo sapiens
tttcatgaatagaaa

SEQ ID NO: 850076 - DNA, 15 bp, Homo sapiens
ttcatgaatagaaag

SEQ ID NO: 850077 - DNA, 15 bp, Homo sapiens
tcatgaatagaaagg

SEQ ID NO: 850078 - DNA, 15 bp, Homo sapiens
catgaatagaaagga

SEQ ID NO: 850079 - DNA, 15 bp, Homo sapiens
atgaatagaaaggat

SEQ ID NO: 850080 - DNA, 15 bp, Homo sapiens
tgaatagaaaggatg

SEQ ID NO: 850081 - DNA, 15 bp, Homo sapiens
gaatagaaaggatgt

SEQ ID NO: 850082 - DNA, 15 bp, Homo sapiens
aatagaaaggatgtt

SEQ ID NO: 850083 - DNA, 15 bp, Homo sapiens
atagaaaggatgttc

SEQ ID NO: 850084 - DNA, 15 bp, Homo sapiens
tagaaaggatgttct

SEQ ID NO: 850085 - DNA, 15 bp, Homo sapiens
agaaaggatgttctt

SEQ ID NO: 850086 - DNA, 15 bp, Homo sapiens
gaaaggatgttcttg

SEQ ID NO: 850087 - DNA, 15 bp, Homo sapiens
aaaggatgttcttgt

SEQ ID NO: 850088 - DNA, 15 bp, Homo sapiens
aaggatgttcttgta

SEQ ID NO: 850089 - DNA, 15 bp, Homo sapiens
aggatgttcttgtat

SEQ ID NO: 850090 - DNA, 15 bp, Homo sapiens
ggatgttcttgtata

SEQ ID NO: 850091 - DNA, 15 bp, Homo sapiens
gatgttcttgtatat

SEQ ID NO: 850092 - DNA, 15 bp, Homo sapiens
atgttcttgtatatt

SEQ ID NO: 850093 - DNA, 15 bp, Homo sapiens
tgttcttgtatattt

SEQ ID NO: 850094 - DNA, 15 bp, Homo sapiens
gttcttgtatatttt

SEQ ID NO: 850095 - DNA, 15 bp, Homo sapiens
ttcttgtatattttt

SEQ ID NO: 850096 - DNA, 15 bp, Homo sapiens
tcttgtatatttttt

SEQ ID NO: 850097 - DNA, 15 bp, Homo sapiens
cttgtatattttttt

SEQ ID NO: 850098 - DNA, 15 bp, Homo sapiens
ttgtatattttttta

SEQ ID NO: 850099 - DNA, 15 bp, Homo sapiens
tgtatatttttttac

SEQ ID NO: 850100 - DNA, 15 bp, Homo sapiens
gtatatttttttacc

SEQ ID NO: 850101 - DNA, 15 bp, Homo sapiens
tatatttttttacct

SEQ ID NO: 850102 - DNA, 15 bp, Homo sapiens
atatttttttacctc

SEQ ID NO: 850103 - DNA, 15 bp, Homo sapiens
tatttttttacctct

SEQ ID NO: 850104 - DNA, 15 bp, Homo sapiens
atttttttacctctg

SEQ ID NO: 850105 - DNA, 15 bp, Homo sapiens
tttttttacctctgt

SEQ ID NO: 850106 - DNA, 15 bp, Homo sapiens
ttttttacctctgtt

SEQ ID NO: 850107 - DNA, 15 bp, Homo sapiens
tttttacctctgttt

SEQ ID NO: 850108 - DNA, 15 bp, Homo sapiens
ttttacctctgtttt

SEQ ID NO: 850109 - DNA, 15 bp, Homo sapiens
tttacctctgttttc

SEQ ID NO: 850110 - DNA, 15 bp, Homo sapiens
ttacctctgttttcc

SEQ ID NO: 850111 - DNA, 15 bp, Homo sapiens
tacctctgttttcct

SEQ ID NO: 850112 - DNA, 15 bp, Homo sapiens
acctctgttttcctg

SEQ ID NO: 850113 - DNA, 15 bp, Homo sapiens
cctctgttttcctgt

SEQ ID NO: 850114 - DNA, 15 bp, Homo sapiens
ctctgttttcctgtt

SEQ ID NO: 850115 - DNA, 15 bp, Homo sapiens
tctgttttcctgttt

SEQ ID NO: 850116 - DNA, 15 bp, Homo sapiens
ctgttttcctgtttc

SEQ ID NO: 850117 - DNA, 15 bp, Homo sapiens
tgttttcctgtttct

SEQ ID NO: 850118 - DNA, 15 bp, Homo sapiens
gttttcctgtttctt

SEQ ID NO: 850119 - DNA, 15 bp, Homo sapiens
ttttcctgtttcttt

SEQ ID NO: 850120 - DNA, 15 bp, Homo sapiens
tttcctgtttctttg

SEQ ID NO: 850121 - DNA, 15 bp, Homo sapiens
ttcctgtttctttgc

SEQ ID NO: 850122 - DNA, 15 bp, Homo sapiens
tcctgtttctttgct

SEQ ID NO: 850123 - DNA, 15 bp, Homo sapiens
cctgtttctttgcta

SEQ ID NO: 850124 - DNA, 15 bp, Homo sapiens
ctgtttctttgctat

SEQ ID NO: 850125 - DNA, 15 bp, Homo sapiens
tgtttctttgctatg

SEQ ID NO: 850126 - DNA, 15 bp, Homo sapiens
gtttctttgctatga

SEQ ID NO: 850127 - DNA, 15 bp, Homo sapiens
tttctttgctatgaa

SEQ ID NO: 850128 - DNA, 15 bp, Homo sapiens
ttctttgctatgaat

SEQ ID NO: 850129 - DNA, 15 bp, Homo sapiens
tctttgctatgaata

SEQ ID NO: 850130 - DNA, 15 bp, Homo sapiens
ctttgctatgaatac

SEQ ID NO: 850131 - DNA, 15 bp, Homo sapiens
tttgctatgaatact

SEQ ID NO: 850132 - DNA, 15 bp, Homo sapiens
ttgctatgaatactt

SEQ ID NO: 850133 - DNA, 15 bp, Homo sapiens
tgctatgaatacttc

SEQ ID NO: 850134 - DNA, 15 bp, Homo sapiens
gctatgaatacttca

SEQ ID NO: 850135 - DNA, 15 bp, Homo sapiens
ctatgaatacttcaa

SEQ ID NO: 850136 - DNA, 15 bp, Homo sapiens
tatgaatacttcaaa

SEQ ID NO: 850137 - DNA, 15 bp, Homo sapiens
atgaatacttcaaat

SEQ ID NO: 850138 - DNA, 15 bp, Homo sapiens
tgaatacttcaaatg

SEQ ID NO: 850139 - DNA, 15 bp, Homo sapiens
gaatacttcaaatgg

SEQ ID NO: 850140 - DNA, 15 bp, Homo sapiens
aatacttcaaatgga

SEQ ID NO: 850141 - DNA, 15 bp, Homo sapiens
atacttcaaatggaa

SEQ ID NO: 850142 - DNA, 15 bp, Homo sapiens
tacttcaaatggaat

SEQ ID NO: 850143 - DNA, 15 bp, Homo sapiens
acttcaaatggaatt

SEQ ID NO: 850144 - DNA, 15 bp, Homo sapiens
cttcaaatggaattg

SEQ ID NO: 850145 - DNA, 15 bp, Homo sapiens
ttcaaatggaattgt

SEQ ID NO: 850146 - DNA, 15 bp, Homo sapiens
tcaaatggaattgta

SEQ ID NO: 850147 - DNA, 15 bp, Homo sapiens
caaatggaattgtag

SEQ ID NO: 850148 - DNA, 15 bp, Homo sapiens
aaatggaattgtagt

SEQ ID NO: 850149 - DNA, 15 bp, Homo sapiens
aatggaattgtagtg

SEQ ID NO: 850150 - DNA, 15 bp, Homo sapiens
atggaattgtagtgt

SEQ ID NO: 850151 - DNA, 15 bp, Homo sapiens
tggaattgtagtgta

SEQ ID NO: 850152 - DNA, 15 bp, Homo sapiens
ggaattgtagtgtaa

SEQ ID NO: 850153 - DNA, 15 bp, Homo sapiens
gaattgtagtgtaaa

SEQ ID NO: 850154 - DNA, 15 bp, Homo sapiens
aattgtagtgtaaaa

SEQ ID NO: 850155 - DNA, 15 bp, Homo sapiens
attgtagtgtaaaag

SEQ ID NO: 850156 - DNA, 15 bp, Homo sapiens
ttgtagtgtaaaaga

SEQ ID NO: 850157 - DNA, 15 bp, Homo sapiens
tgtagtgtaaaagac

SEQ ID NO: 850158 - DNA, 15 bp, Homo sapiens
gtagtgtaaaagact

SEQ ID NO: 850159 - DNA, 15 bp, Homo sapiens
tagtgtaaaagactg

SEQ ID NO: 850160 - DNA, 15 bp, Homo sapiens
agtgtaaaagactgt

SEQ ID NO: 850161 - DNA, 15 bp, Homo sapiens
gtgtaaaagactgtg

SEQ ID NO: 850162 - DNA, 15 bp, Homo sapiens
tgtaaaagactgtgt

SEQ ID NO: 850163 - DNA, 15 bp, Homo sapiens
gtaaaagactgtgta

SEQ ID NO: 850164 - DNA, 15 bp, Homo sapiens
taaaagactgtgtac

SEQ ID NO: 850165 - DNA, 15 bp, Homo sapiens
aaaagactgtgtact

SEQ ID NO: 850166 - DNA, 15 bp, Homo sapiens
aaagactgtgtactt

SEQ ID NO: 850167 - DNA, 15 bp, Homo sapiens
aagactgtgtacttt

SEQ ID NO: 850168 - DNA, 15 bp, Homo sapiens
agactgtgtactttt

SEQ ID NO: 850169 - DNA, 15 bp, Homo sapiens
gactgtgtactttta

SEQ ID NO: 850170 - DNA, 15 bp, Homo sapiens
actgtgtacttttac

SEQ ID NO: 850171 - DNA, 15 bp, Homo sapiens
ctgtgtacttttaca

SEQ ID NO: 850172 - DNA, 15 bp, Homo sapiens
tgtgtacttttacaa

SEQ ID NO: 850173 - DNA, 15 bp, Homo sapiens
gtgtacttttacaaa

SEQ ID NO: 850174 - DNA, 15 bp, Homo sapiens
tgtacttttacaaat

SEQ ID NO: 850175 - DNA, 15 bp, Homo sapiens
gtacttttacaaatt

SEQ ID NO: 850176 - DNA, 15 bp, Homo sapiens
tacttttacaaattt

SEQ ID NO: 850177 - DNA, 15 bp, Homo sapiens
acttttacaaatttt

SEQ ID NO: 850178 - DNA, 15 bp, Homo sapiens
cttttacaaattttg

SEQ ID NO: 850179 - DNA, 15 bp, Homo sapiens
ttttacaaattttga

SEQ ID NO: 850180 - DNA, 15 bp, Homo sapiens
tttacaaattttgat

SEQ ID NO: 850181 - DNA, 15 bp, Homo sapiens
ttacaaattttgata

SEQ ID NO: 850182 - DNA, 15 bp, Homo sapiens
tacaaattttgataa

SEQ ID NO: 850183 - DNA, 15 bp, Homo sapiens
acaaattttgataat

SEQ ID NO: 850184 - DNA, 15 bp, Homo sapiens
caaattttgataata

SEQ ID NO: 850185 - DNA, 15 bp, Homo sapiens
aaattttgataataa

SEQ ID NO: 850186 - DNA, 15 bp, Homo sapiens
aattttgataataat

SEQ ID NO: 850187 - DNA, 15 bp, Homo sapiens
attttgataataatt

SEQ ID NO: 850188 - DNA, 15 bp, Homo sapiens
ttttgataataattg

SEQ ID NO: 850189 - DNA, 15 bp, Homo sapiens
tttgataataattgc

SEQ ID NO: 850190 - DNA, 15 bp, Homo sapiens
ttgataataattgca

SEQ ID NO: 850191 - DNA, 15 bp, Homo sapiens
tgataataattgcaa

SEQ ID NO: 850192 - DNA, 15 bp, Homo sapiens
gataataattgcaaa

SEQ ID NO: 850193 - DNA, 15 bp, Homo sapiens
ataataattgcaaaa

SEQ ID NO: 850194 - DNA, 15 bp, Homo sapiens
taataattgcaaaat

SEQ ID NO: 850195 - DNA, 15 bp, Homo sapiens
aataattgcaaaatt

SEQ ID NO: 850196 - DNA, 15 bp, Homo sapiens
ataattgcaaaattg

SEQ ID NO: 850197 - DNA, 15 bp, Homo sapiens
taattgcaaaattgc

SEQ ID NO: 850198 - DNA, 15 bp, Homo sapiens
aattgcaaaattgct

SEQ ID NO: 850199 - DNA, 15 bp, Homo sapiens
attgcaaaattgctc

SEQ ID NO: 850200 - DNA, 15 bp, Homo sapiens
ttgcaaaattgctct

SEQ ID NO: 850201 - DNA, 15 bp, Homo sapiens
tgcaaaattgctctt

SEQ ID NO: 850202 - DNA, 15 bp, Homo sapiens
gcaaaattgctcttc

SEQ ID NO: 850203 - DNA, 15 bp, Homo sapiens
caaaattgctcttca

SEQ ID NO: 850204 - DNA, 15 bp, Homo sapiens
aaaattgctcttcaa

SEQ ID NO: 850205 - DNA, 15 bp, Homo sapiens
aaattgctcttcaaa

SEQ ID NO: 850206 - DNA, 15 bp, Homo sapiens
aattgctcttcaaaa

SEQ ID NO: 850207 - DNA, 15 bp, Homo sapiens
attgctcttcaaaac

SEQ ID NO: 850208 - DNA, 15 bp, Homo sapiens
ttgctcttcaaaaca

SEQ ID NO: 850209 - DNA, 15 bp, Homo sapiens
tgctcttcaaaacag

SEQ ID NO: 850210 - DNA, 15 bp, Homo sapiens
gctcttcaaaacagt

SEQ ID NO: 850211 - DNA, 15 bp, Homo sapiens
ctcttcaaaacagtt

SEQ ID NO: 850212 - DNA, 15 bp, Homo sapiens
tcttcaaaacagttg

SEQ ID NO: 850213 - DNA, 15 bp, Homo sapiens
cttcaaaacagttgt

SEQ ID NO: 850214 - DNA, 15 bp, Homo sapiens
ttcaaaacagttgta

SEQ ID NO: 850215 - DNA, 15 bp, Homo sapiens
tcaaaacagttgtat

SEQ ID NO: 850216 - DNA, 15 bp, Homo sapiens
caaaacagttgtatc

SEQ ID NO: 850217 - DNA, 15 bp, Homo sapiens
aaaacagttgtatca

SEQ ID NO: 850218 - DNA, 15 bp, Homo sapiens
aaacagttgtatcaa

SEQ ID NO: 850219 - DNA, 15 bp, Homo sapiens
aacagttgtatcaat

SEQ ID NO: 850220 - DNA, 15 bp, Homo sapiens
acagttgtatcaatt

SEQ ID NO: 850221 - DNA, 15 bp, Homo sapiens
cagttgtatcaattt

SEQ ID NO: 850222 - DNA, 15 bp, Homo sapiens
agttgtatcaatttc

SEQ ID NO: 850223 - DNA, 15 bp, Homo sapiens
gttgtatcaatttcc

SEQ ID NO: 850224 - DNA, 15 bp, Homo sapiens
ttgtatcaatttcct

SEQ ID NO: 850225 - DNA, 15 bp, Homo sapiens
tgtatcaatttcctt

SEQ ID NO: 850226 - DNA, 15 bp, Homo sapiens
gtatcaatttccttg

SEQ ID NO: 850227 - DNA, 15 bp, Homo sapiens
tatcaatttccttgc

SEQ ID NO: 850228 - DNA, 15 bp, Homo sapiens
atcaatttccttgcc

SEQ ID NO: 850229 - DNA, 15 bp, Homo sapiens
tcaatttccttgccc

SEQ ID NO: 850230 - DNA, 15 bp, Homo sapiens
caatttccttgccca

SEQ ID NO: 850231 - DNA, 15 bp, Homo sapiens
aatttccttgcccac

SEQ ID NO: 850232 - DNA, 15 bp, Homo sapiens
atttccttgcccact

SEQ ID NO: 850233 - DNA, 15 bp, Homo sapiens
tttccttgcccacta

SEQ ID NO: 850234 - DNA, 15 bp, Homo sapiens
ttccttgcccactaa

SEQ ID NO: 850235 - DNA, 15 bp, Homo sapiens
tccttgcccactaat

SEQ ID NO: 850236 - DNA, 15 bp, Homo sapiens
ccttgcccactaatg

SEQ ID NO: 850237 - DNA, 15 bp, Homo sapiens
cttgcccactaatgt

SEQ ID NO: 850238 - DNA, 15 bp, Homo sapiens
ttgcccactaatgtg

SEQ ID NO: 850239 - DNA, 15 bp, Homo sapiens
tgcccactaatgtgg

SEQ ID NO: 850240 - DNA, 15 bp, Homo sapiens
gcccactaatgtggg

SEQ ID NO: 850241 - DNA, 15 bp, Homo sapiens
cccactaatgtgggt

SEQ ID NO: 850242 - DNA, 15 bp, Homo sapiens
ccactaatgtgggtg

SEQ ID NO: 850243 - DNA, 15 bp, Homo sapiens
cactaatgtgggtga

SEQ ID NO: 850244 - DNA, 15 bp, Homo sapiens
actaatgtgggtgag

SEQ ID NO: 850245 - DNA, 15 bp, Homo sapiens
ctaatgtgggtgagt

SEQ ID NO: 850246 - DNA, 15 bp, Homo sapiens
taatgtgggtgagtg

SEQ ID NO: 850247 - DNA, 15 bp, Homo sapiens
aatgtgggtgagtgc

SEQ ID NO: 850248 - DNA, 15 bp, Homo sapiens
atgtgggtgagtgcc

SEQ ID NO: 850249 - DNA, 15 bp, Homo sapiens
tgtgggtgagtgccc

SEQ ID NO: 850250 - DNA, 15 bp, Homo sapiens
gtgggtgagtgccca

SEQ ID NO: 850251 - DNA, 15 bp, Homo sapiens
tgggtgagtgcccat

SEQ ID NO: 850252 - DNA, 15 bp, Homo sapiens
gggtgagtgcccatg

SEQ ID NO: 850253 - DNA, 15 bp, Homo sapiens
ggtgagtgcccatgt

SEQ ID NO: 850254 - DNA, 15 bp, Homo sapiens
gtgagtgcccatgtc

SEQ ID NO: 850255 - DNA, 15 bp, Homo sapiens
tgagtgcccatgtct

SEQ ID NO: 850256 - DNA, 15 bp, Homo sapiens
gagtgcccatgtctc

SEQ ID NO: 850257 - DNA, 15 bp, Homo sapiens
agtgcccatgtctcc

SEQ ID NO: 850258 - DNA, 15 bp, Homo sapiens
gtgcccatgtctccg

SEQ ID NO: 850259 - DNA, 15 bp, Homo sapiens
tgcccatgtctccgc

SEQ ID NO: 850260 - DNA, 15 bp, Homo sapiens
gcccatgtctccgca

SEQ ID NO: 850261 - DNA, 15 bp, Homo sapiens
cccatgtctccgcac

SEQ ID NO: 850262 - DNA, 15 bp, Homo sapiens
ccatgtctccgcacc

SEQ ID NO: 850263 - DNA, 15 bp, Homo sapiens
catgtctccgcacca

SEQ ID NO: 850264 - DNA, 15 bp, Homo sapiens
atgtctccgcaccat

SEQ ID NO: 850265 - DNA, 15 bp, Homo sapiens
tgtctccgcaccatt

SEQ ID NO: 850266 - DNA, 15 bp, Homo sapiens
gtctccgcaccatta

SEQ ID NO: 850267 - DNA, 15 bp, Homo sapiens
tctccgcaccattag

SEQ ID NO: 850268 - DNA, 15 bp, Homo sapiens
ctccgcaccattaga

SEQ ID NO: 850269 - DNA, 15 bp, Homo sapiens
tccgcaccattagaa

SEQ ID NO: 850270 - DNA, 15 bp, Homo sapiens
ccgcaccattagaag

SEQ ID NO: 850271 - DNA, 15 bp, Homo sapiens
cgcaccattagaagt

SEQ ID NO: 850272 - DNA, 15 bp, Homo sapiens
gcaccattagaagtc

SEQ ID NO: 850273 - DNA, 15 bp, Homo sapiens
caccattagaagtca

SEQ ID NO: 850274 - DNA, 15 bp, Homo sapiens
accattagaagtcat

SEQ ID NO: 850275 - DNA, 15 bp, Homo sapiens
ccattagaagtcata

SEQ ID NO: 850276 - DNA, 15 bp, Homo sapiens
cattagaagtcatac

SEQ ID NO: 850277 - DNA, 15 bp, Homo sapiens
attagaagtcataca

SEQ ID NO: 850278 - DNA, 15 bp, Homo sapiens
ttagaagtcatacag

SEQ ID NO: 850279 - DNA, 15 bp, Homo sapiens
tagaagtcatacaga

SEQ ID NO: 850280 - DNA, 15 bp, Homo sapiens
agaagtcatacagat

SEQ ID NO: 850281 - DNA, 15 bp, Homo sapiens
gaagtcatacagatt

SEQ ID NO: 850282 - DNA, 15 bp, Homo sapiens
aagtcatacagatta

SEQ ID NO: 850283 - DNA, 15 bp, Homo sapiens
agtcatacagattaa

SEQ ID NO: 850284 - DNA, 15 bp, Homo sapiens
gtcatacagattaaa

SEQ ID NO: 850285 - DNA, 15 bp, Homo sapiens
tcatacagattaaag

SEQ ID NO: 850286 - DNA, 15 bp, Homo sapiens
catacagattaaaga

SEQ ID NO: 850287 - DNA, 15 bp, Homo sapiens
atacagattaaagac

SEQ ID NO: 850288 - DNA, 15 bp, Homo sapiens
tacagattaaagact

SEQ ID NO: 850289 - DNA, 15 bp, Homo sapiens
acagattaaagactg

SEQ ID NO: 850290 - DNA, 15 bp, Homo sapiens
cagattaaagactgt

SEQ ID NO: 850291 - DNA, 15 bp, Homo sapiens
agattaaagactgtg

SEQ ID NO: 850292 - DNA, 15 bp, Homo sapiens
gattaaagactgtgc

SEQ ID NO: 850293 - DNA, 15 bp, Homo sapiens
attaaagactgtgca

SEQ ID NO: 850294 - DNA, 15 bp, Homo sapiens
ttaaagactgtgcac

SEQ ID NO: 850295 - DNA, 15 bp, Homo sapiens
taaagactgtgcacg

SEQ ID NO: 850296 - DNA, 15 bp, Homo sapiens
aaagactgtgcacgg

SEQ ID NO: 850297 - DNA, 15 bp, Homo sapiens
aagactgtgcacggt

SEQ ID NO: 850298 - DNA, 15 bp, Homo sapiens
agactgtgcacggtg

SEQ ID NO: 850299 - DNA, 15 bp, Homo sapiens
gactgtgcacggtgg

SEQ ID NO: 850300 - DNA, 15 bp, Homo sapiens
actgtgcacggtggc

SEQ ID NO: 850301 - DNA, 15 bp, Homo sapiens
ctgtgcacggtggct

SEQ ID NO: 850302 - DNA, 15 bp, Homo sapiens
tgtgcacggtggctc

SEQ ID NO: 850303 - DNA, 15 bp, Homo sapiens
gtgcacggtggctca

SEQ ID NO: 850304 - DNA, 15 bp, Homo sapiens
tgcacggtggctcac

SEQ ID NO: 850305 - DNA, 15 bp, Homo sapiens
cctgtaatcccagga

SEQ ID NO: 850306 - DNA, 15 bp, Homo sapiens
ctgtaatcccaggac

SEQ ID NO: 850307 - DNA, 15 bp, Homo sapiens
tgtaatcccaggact

SEQ ID NO: 850308 - DNA, 15 bp, Homo sapiens
gtaatcccaggactt

SEQ ID NO: 850309 - DNA, 15 bp, Homo sapiens
taatcccaggacttt

SEQ ID NO: 850310 - DNA, 15 bp, Homo sapiens
aatcccaggactttg

SEQ ID NO: 850311 - DNA, 15 bp, Homo sapiens
atcccaggactttga

SEQ ID NO: 850312 - DNA, 15 bp, Homo sapiens
tcccaggactttgag

SEQ ID NO: 850313 - DNA, 15 bp, Homo sapiens
cccaggactttgaga

SEQ ID NO: 850314 - DNA, 15 bp, Homo sapiens
ccaggactttgagag

SEQ ID NO: 850315 - DNA, 15 bp, Homo sapiens
caggactttgagagg

SEQ ID NO: 850316 - DNA, 15 bp, Homo sapiens
aggactttgagaggc

SEQ ID NO: 850317 - DNA, 15 bp, Homo sapiens
ggactttgagaggca

SEQ ID NO: 850318 - DNA, 15 bp, Homo sapiens
gactttgagaggcag

SEQ ID NO: 850319 - DNA, 15 bp, Homo sapiens
actttgagaggcagc

SEQ ID NO: 850320 - DNA, 15 bp, Homo sapiens
ctttgagaggcagca

SEQ ID NO: 850321 - DNA, 15 bp, Homo sapiens
tttgagaggcagcag

SEQ ID NO: 850322 - DNA, 15 bp, Homo sapiens
ttgagaggcagcagc

SEQ ID NO: 850323 - DNA, 15 bp, Homo sapiens
tgagaggcagcagca

SEQ ID NO: 850324 - DNA, 15 bp, Homo sapiens
gagaggcagcagcag

SEQ ID NO: 850325 - DNA, 15 bp, Homo sapiens
agaggcagcagcagg

SEQ ID NO: 850326 - DNA, 15 bp, Homo sapiens
gaggcagcagcagga

SEQ ID NO: 850327 - DNA, 15 bp, Homo sapiens
aggcagcagcaggag

SEQ ID NO: 850328 - DNA, 15 bp, Homo sapiens
ggcagcagcaggagg

SEQ ID NO: 850329 - DNA, 15 bp, Homo sapiens
gcagcagcaggagga

SEQ ID NO: 850330 - DNA, 15 bp, Homo sapiens
cagcagcaggaggat

SEQ ID NO: 850331 - DNA, 15 bp, Homo sapiens
agcagcaggaggatc

SEQ ID NO: 850332 - DNA, 15 bp, Homo sapiens
gcagcaggaggatca

SEQ ID NO: 850333 - DNA, 15 bp, Homo sapiens
cagcaggaggatcac

SEQ ID NO: 850334 - DNA, 15 bp, Homo sapiens
agcaggaggatcact

SEQ ID NO: 850335 - DNA, 15 bp, Homo sapiens
gcaggaggatcactt

SEQ ID NO: 850336 - DNA, 15 bp, Homo sapiens
caggaggatcacttg

SEQ ID NO: 850337 - DNA, 15 bp, Homo sapiens
aggaggatcacttga

SEQ ID NO: 850338 - DNA, 15 bp, Homo sapiens
gaggatcacttgagg

SEQ ID NO: 850339 - DNA, 15 bp, Homo sapiens
aggatcacttgaggc

SEQ ID NO: 850340 - DNA, 15 bp, Homo sapiens
ggatcacttgaggcc

SEQ ID NO: 850341 - DNA, 15 bp, Homo sapiens
gatcacttgaggccg

SEQ ID NO: 850342 - DNA, 15 bp, Homo sapiens
atcacttgaggccgg

SEQ ID NO: 850343 - DNA, 15 bp, Homo sapiens
tcacttgaggccggg

SEQ ID NO: 850344 - DNA, 15 bp, Homo sapiens
cacttgaggccggga

SEQ ID NO: 850345 - DNA, 15 bp, Homo sapiens
acttgaggccgggag

SEQ ID NO: 850346 - DNA, 15 bp, Homo sapiens
cttgaggccgggagt

SEQ ID NO: 850347 - DNA, 15 bp, Homo sapiens
ttgaggccgggagtt

SEQ ID NO: 850348 - DNA, 15 bp, Homo sapiens
tgaggccgggagttc

SEQ ID NO: 850349 - DNA, 15 bp, Homo sapiens
gaggccgggagttca

SEQ ID NO: 850350 - DNA, 15 bp, Homo sapiens
aggccgggagttcaa

SEQ ID NO: 850351 - DNA, 15 bp, Homo sapiens
ggccgggagttcaag

SEQ ID NO: 850352 - DNA, 15 bp, Homo sapiens
gccgggagttcaaga

SEQ ID NO: 850353 - DNA, 15 bp, Homo sapiens
ccgggagttcaagac

SEQ ID NO: 850354 - DNA, 15 bp, Homo sapiens
cgggagttcaagaca

SEQ ID NO: 850355 - DNA, 15 bp, Homo sapiens
gggagttcaagacaa

SEQ ID NO: 850356 - DNA, 15 bp, Homo sapiens
ggagttcaagacaag

SEQ ID NO: 850357 - DNA, 15 bp, Homo sapiens
gagttcaagacaagc

SEQ ID NO: 850358 - DNA, 15 bp, Homo sapiens
agttcaagacaagcc

SEQ ID NO: 850359 - DNA, 15 bp, Homo sapiens
gttcaagacaagcct

SEQ ID NO: 850360 - DNA, 15 bp, Homo sapiens
ttcaagacaagcctg

SEQ ID NO: 850361 - DNA, 15 bp, Homo sapiens
tcaagacaagcctgg

SEQ ID NO: 850362 - DNA, 15 bp, Homo sapiens
caagacaagcctggg

SEQ ID NO: 850363 - DNA, 15 bp, Homo sapiens
aagacaagcctgggc

SEQ ID NO: 850364 - DNA, 15 bp, Homo sapiens
agacaagcctgggca

SEQ ID NO: 850365 - DNA, 15 bp, Homo sapiens
gacaagcctgggcaa

SEQ ID NO: 850366 - DNA, 15 bp, Homo sapiens
acaagcctgggcaac

SEQ ID NO: 850367 - DNA, 15 bp, Homo sapiens
caagcctgggcaaca

SEQ ID NO: 850368 - DNA, 15 bp, Homo sapiens
aagcctgggcaacat

SEQ ID NO: 850369 - DNA, 15 bp, Homo sapiens
caacatagcaagact

SEQ ID NO: 850370 - DNA, 15 bp, Homo sapiens
aacatagcaagactc

SEQ ID NO: 850371 - DNA, 15 bp, Homo sapiens
acatagcaagactct

SEQ ID NO: 850372 - DNA, 15 bp, Homo sapiens
catagcaagactctg

SEQ ID NO: 850373 - DNA, 15 bp, Homo sapiens
atagcaagactctgt

SEQ ID NO: 850374 - DNA, 15 bp, Homo sapiens
tagcaagactctgtc

SEQ ID NO: 850375 - DNA, 15 bp, Homo sapiens
agcaagactctgtct

SEQ ID NO: 850376 - DNA, 15 bp, Homo sapiens
gcaagactctgtctc

SEQ ID NO: 850377 - DNA, 15 bp, Homo sapiens
caagactctgtctct

SEQ ID NO: 850378 - DNA, 15 bp, Homo sapiens
aagactctgtctctt

SEQ ID NO: 850379 - DNA, 15 bp, Homo sapiens
agactctgtctctta

SEQ ID NO: 850380 - DNA, 15 bp, Homo sapiens
gactctgtctcttaa

SEQ ID NO: 850381 - DNA, 15 bp, Homo sapiens
actctgtctcttaaa

SEQ ID NO: 850382 - DNA, 15 bp, Homo sapiens
ctctgtctcttaaaa

SEQ ID NO: 850383 - DNA, 15 bp, Homo sapiens
tctgtctcttaaaaa

SEQ ID NO: 850384 - DNA, 15 bp, Homo sapiens
tgtctcttaaaaaaa

SEQ ID NO: 850385 - DNA, 15 bp, Homo sapiens
gtctcttaaaaaaaa

SEQ ID NO: 850386 - DNA, 15 bp, Homo sapiens
tctcttaaaaaaaaa

SEQ ID NO: 850387 - DNA, 15 bp, Homo sapiens
ctcttaaaaaaaaaa

SEQ ID NO: 850388 - DNA, 15 bp, Homo sapiens
aaaaaaaaaaaattg

SEQ ID NO: 850389 - DNA, 15 bp, Homo sapiens
aaaaaaaaaaattgc

SEQ ID NO: 850390 - DNA, 15 bp, Homo sapiens
aaaaaaaaaattgcc

SEQ ID NO: 850391 - DNA, 15 bp, Homo sapiens
aaaaaaaaattgcca

SEQ ID NO: 850392 - DNA, 15 bp, Homo sapiens
aaaaaaaattgccag

SEQ ID NO: 850393 - DNA, 15 bp, Homo sapiens
aaaaaaattgccagg

SEQ ID NO: 850394 - DNA, 15 bp, Homo sapiens
aaaaaattgccaggt

SEQ ID NO: 850395 - DNA, 15 bp, Homo sapiens
aaaaattgccaggtg

SEQ ID NO: 850396 - DNA, 15 bp, Homo sapiens
aaaattgccaggtgt

SEQ ID NO: 850397 - DNA, 15 bp, Homo sapiens
aaattgccaggtgtg

SEQ ID NO: 850398 - DNA, 15 bp, Homo sapiens
aattgccaggtgtgg

SEQ ID NO: 850399 - DNA, 15 bp, Homo sapiens
attgccaggtgtggt

SEQ ID NO: 850400 - DNA, 15 bp, Homo sapiens
ttgccaggtgtggtg

SEQ ID NO: 850401 - DNA, 15 bp, Homo sapiens
tgccaggtgtggtga

SEQ ID NO: 850402 - DNA, 15 bp, Homo sapiens
gccaggtgtggtgat

SEQ ID NO: 850403 - DNA, 15 bp, Homo sapiens
ccaggtgtggtgatg

SEQ ID NO: 850404 - DNA, 15 bp, Homo sapiens
caggtgtggtgatgc

SEQ ID NO: 850405 - DNA, 15 bp, Homo sapiens
aggtgtggtgatgca

SEQ ID NO: 850406 - DNA, 15 bp, Homo sapiens
ggtgtggtgatgcac

SEQ ID NO: 850407 - DNA, 15 bp, Homo sapiens
gtgtggtgatgcaca

SEQ ID NO: 850408 - DNA, 15 bp, Homo sapiens
tgtggtgatgcacac

SEQ ID NO: 850409 - DNA, 15 bp, Homo sapiens
gtggtgatgcacacc

SEQ ID NO: 850410 - DNA, 15 bp, Homo sapiens
tggtgatgcacacct

SEQ ID NO: 850411 - DNA, 15 bp, Homo sapiens
ggtgatgcacaccta

SEQ ID NO: 850412 - DNA, 15 bp, Homo sapiens
gtgatgcacacctat

SEQ ID NO: 850413 - DNA, 15 bp, Homo sapiens
tgatgcacacctata

SEQ ID NO: 850414 - DNA, 15 bp, Homo sapiens
gatgcacacctatag

SEQ ID NO: 850415 - DNA, 15 bp, Homo sapiens
atgcacacctatagt

SEQ ID NO: 850416 - DNA, 15 bp, Homo sapiens
tgcacacctatagtc

SEQ ID NO: 850417 - DNA, 15 bp, Homo sapiens
gcacacctatagtcc

SEQ ID NO: 850418 - DNA, 15 bp, Homo sapiens
cacacctatagtccc

SEQ ID NO: 850419 - DNA, 15 bp, Homo sapiens
acacctatagtccca

SEQ ID NO: 850420 - DNA, 15 bp, Homo sapiens
cacctatagtcccag

SEQ ID NO: 850421 - DNA, 15 bp, Homo sapiens
acctatagtcccagc

SEQ ID NO: 850422 - DNA, 15 bp, Homo sapiens
atagtcccagctact

SEQ ID NO: 850423 - DNA, 15 bp, Homo sapiens
agtcccagctactcc

SEQ ID NO: 850424 - DNA, 15 bp, Homo sapiens
gtcccagctactcca

SEQ ID NO: 850425 - DNA, 15 bp, Homo sapiens
tcccagctactccag

SEQ ID NO: 850426 - DNA, 15 bp, Homo sapiens
cccagctactccaga

SEQ ID NO: 850427 - DNA, 15 bp, Homo sapiens
ccagctactccagag

SEQ ID NO: 850428 - DNA, 15 bp, Homo sapiens
cagctactccagagg

SEQ ID NO: 850429 - DNA, 15 bp, Homo sapiens
agctactccagaggc

SEQ ID NO: 850430 - DNA, 15 bp, Homo sapiens
gctactccagaggct

SEQ ID NO: 850431 - DNA, 15 bp, Homo sapiens
ctactccagaggctg

SEQ ID NO: 850432 - DNA, 15 bp, Homo sapiens
tactccagaggctga

SEQ ID NO: 850433 - DNA, 15 bp, Homo sapiens
actccagaggctgag

SEQ ID NO: 850434 - DNA, 15 bp, Homo sapiens
ctccagaggctgagg

SEQ ID NO: 850435 - DNA, 15 bp, Homo sapiens
tccagaggctgaggc

SEQ ID NO: 850436 - DNA, 15 bp, Homo sapiens
ccagaggctgaggca

SEQ ID NO: 850437 - DNA, 15 bp, Homo sapiens
cagaggctgaggcag

SEQ ID NO: 850438 - DNA, 15 bp, Homo sapiens
ggctgaggcaggagg

SEQ ID NO: 850439 - DNA, 15 bp, Homo sapiens
tgaggcaggaggatt

SEQ ID NO: 850440 - DNA, 15 bp, Homo sapiens
gaggcaggaggattg

SEQ ID NO: 850441 - DNA, 15 bp, Homo sapiens
aggcaggaggattgc

SEQ ID NO: 850442 - DNA, 15 bp, Homo sapiens
ggcaggaggattgct

SEQ ID NO: 850443 - DNA, 15 bp, Homo sapiens
gcaggaggattgctt

SEQ ID NO: 850444 - DNA, 15 bp, Homo sapiens
caggaggattgcttc

SEQ ID NO: 850445 - DNA, 15 bp, Homo sapiens
aggaggattgcttca

SEQ ID NO: 850446 - DNA, 15 bp, Homo sapiens
ggaggattgcttcag

SEQ ID NO: 850447 - DNA, 15 bp, Homo sapiens
gaggattgcttcagt

SEQ ID NO: 850448 - DNA, 15 bp, Homo sapiens
aggattgcttcagtg

SEQ ID NO: 850449 - DNA, 15 bp, Homo sapiens
ggattgcttcagtgc

SEQ ID NO: 850450 - DNA, 15 bp, Homo sapiens
gattgcttcagtgca

SEQ ID NO: 850451 - DNA, 15 bp, Homo sapiens
attgcttcagtgcag

SEQ ID NO: 850452 - DNA, 15 bp, Homo sapiens
ttgcttcagtgcagg

SEQ ID NO: 850453 - DNA, 15 bp, Homo sapiens
tgcttcagtgcaggt

SEQ ID NO: 850454 - DNA, 15 bp, Homo sapiens
gcttcagtgcaggtg

SEQ ID NO: 850455 - DNA, 15 bp, Homo sapiens
cttcagtgcaggtgt

SEQ ID NO: 850456 - DNA, 15 bp, Homo sapiens
ttcagtgcaggtgtc

SEQ ID NO: 850457 - DNA, 15 bp, Homo sapiens
tcagtgcaggtgtcc

SEQ ID NO: 850458 - DNA, 15 bp, Homo sapiens
cagtgcaggtgtcca

SEQ ID NO: 850459 - DNA, 15 bp, Homo sapiens
agtgcaggtgtccaa

SEQ ID NO: 850460 - DNA, 15 bp, Homo sapiens
gtgcaggtgtccaag

SEQ ID NO: 850461 - DNA, 15 bp, Homo sapiens
tgcaggtgtccaagg

SEQ ID NO: 850462 - DNA, 15 bp, Homo sapiens
gcaggtgtccaaggc

SEQ ID NO: 850463 - DNA, 15 bp, Homo sapiens
caggtgtccaaggct

SEQ ID NO: 850464 - DNA, 15 bp, Homo sapiens
aggtgtccaaggctt

SEQ ID NO: 850465 - DNA, 15 bp, Homo sapiens
ggtgtccaaggcttc

SEQ ID NO: 850466 - DNA, 15 bp, Homo sapiens
gtgtccaaggcttca

SEQ ID NO: 850467 - DNA, 15 bp, Homo sapiens
tgtccaaggcttcag

SEQ ID NO: 850468 - DNA, 15 bp, Homo sapiens
gtccaaggcttcagt

SEQ ID NO: 850469 - DNA, 15 bp, Homo sapiens
tccaaggcttcagtg

SEQ ID NO: 850470 - DNA, 15 bp, Homo sapiens
ccaaggcttcagtga

SEQ ID NO: 850471 - DNA, 15 bp, Homo sapiens
caaggcttcagtgag

SEQ ID NO: 850472 - DNA, 15 bp, Homo sapiens
aaggcttcagtgagc

SEQ ID NO: 850473 - DNA, 15 bp, Homo sapiens
aggcttcagtgagct

SEQ ID NO: 850474 - DNA, 15 bp, Homo sapiens
ggcttcagtgagcta

SEQ ID NO: 850475 - DNA, 15 bp, Homo sapiens
gcttcagtgagctat

SEQ ID NO: 850476 - DNA, 15 bp, Homo sapiens
cttcagtgagctatg

SEQ ID NO: 850477 - DNA, 15 bp, Homo sapiens
ttcagtgagctatga

SEQ ID NO: 850478 - DNA, 15 bp, Homo sapiens
tcagtgagctatgac

SEQ ID NO: 850479 - DNA, 15 bp, Homo sapiens
cagtgagctatgacc

SEQ ID NO: 850480 - DNA, 15 bp, Homo sapiens
agtgagctatgaccc

SEQ ID NO: 850481 - DNA, 15 bp, Homo sapiens
gtgagctatgaccca

SEQ ID NO: 850482 - DNA, 15 bp, Homo sapiens
tgagctatgacccac

SEQ ID NO: 850483 - DNA, 15 bp, Homo sapiens
gagctatgacccact

SEQ ID NO: 850484 - DNA, 15 bp, Homo sapiens
agctatgacccactg

SEQ ID NO: 850485 - DNA, 15 bp, Homo sapiens
gctatgacccactgc

SEQ ID NO: 850486 - DNA, 15 bp, Homo sapiens
ctatgacccactgca

SEQ ID NO: 850487 - DNA, 15 bp, Homo sapiens
tatgacccactgcac

SEQ ID NO: 850488 - DNA, 15 bp, Homo sapiens
atgacccactgcact

SEQ ID NO: 850489 - DNA, 15 bp, Homo sapiens
tgacccactgcactc

SEQ ID NO: 850490 - DNA, 15 bp, Homo sapiens
gacccactgcactcc

SEQ ID NO: 850491 - DNA, 15 bp, Homo sapiens
acccactgcactcca

SEQ ID NO: 850492 - DNA, 15 bp, Homo sapiens
cccactgcactccag

SEQ ID NO: 850493 - DNA, 15 bp, Homo sapiens
actgcactccagccc

SEQ ID NO: 850494 - DNA, 15 bp, Homo sapiens
ctgcactccagccca

SEQ ID NO: 850495 - DNA, 15 bp, Homo sapiens
tgcactccagcccag

SEQ ID NO: 850496 - DNA, 15 bp, Homo sapiens
gcactccagcccagg

SEQ ID NO: 850497 - DNA, 15 bp, Homo sapiens
cactccagcccaggc

SEQ ID NO: 850498 - DNA, 15 bp, Homo sapiens
actccagcccaggca

SEQ ID NO: 850499 - DNA, 15 bp, Homo sapiens
ctccagcccaggcaa

SEQ ID NO: 850500 - DNA, 15 bp, Homo sapiens
tccagcccaggcaac

SEQ ID NO: 850501 - DNA, 15 bp, Homo sapiens
ccagcccaggcaaca

SEQ ID NO: 850502 - DNA, 15 bp, Homo sapiens
cagcccaggcaacag

SEQ ID NO: 850503 - DNA, 15 bp, Homo sapiens
agcccaggcaacagt

SEQ ID NO: 850504 - DNA, 15 bp, Homo sapiens
gcccaggcaacagta

SEQ ID NO: 850505 - DNA, 15 bp, Homo sapiens
cccaggcaacagtaa

SEQ ID NO: 850506 - DNA, 15 bp, Homo sapiens
ccaggcaacagtaag

SEQ ID NO: 850507 - DNA, 15 bp, Homo sapiens
caggcaacagtaaga

SEQ ID NO: 850508 - DNA, 15 bp, Homo sapiens
aggcaacagtaagac

SEQ ID NO: 850509 - DNA, 15 bp, Homo sapiens
ggcaacagtaagacc

SEQ ID NO: 850510 - DNA, 15 bp, Homo sapiens
gcaacagtaagaccc

SEQ ID NO: 850511 - DNA, 15 bp, Homo sapiens
caacagtaagaccct

SEQ ID NO: 850512 - DNA, 15 bp, Homo sapiens
aacagtaagaccctg

SEQ ID NO: 850513 - DNA, 15 bp, Homo sapiens
acagtaagaccctgt

SEQ ID NO: 850514 - DNA, 15 bp, Homo sapiens
cagtaagaccctgtc

SEQ ID NO: 850515 - DNA, 15 bp, Homo sapiens
aaaaaaagaaaaaga

SEQ ID NO: 850516 - DNA, 15 bp, Homo sapiens
aaaaaagaaaaagaa

SEQ ID NO: 850517 - DNA, 15 bp, Homo sapiens
agaaaaaagaaaaag

SEQ ID NO: 850518 - DNA, 15 bp, Homo sapiens
gaaaaaagaaaaagg

SEQ ID NO: 850519 - DNA, 15 bp, Homo sapiens
aaagaaaaaggaaag

SEQ ID NO: 850520 - DNA, 15 bp, Homo sapiens
aagaaaaaggaaaga

SEQ ID NO: 850521 - DNA, 15 bp, Homo sapiens
agaaaaaggaaagaa

SEQ ID NO: 850522 - DNA, 15 bp, Homo sapiens
gaaaaaggaaagaaa

SEQ ID NO: 850523 - DNA, 15 bp, Homo sapiens
aaaaaggaaagaaat

SEQ ID NO: 850524 - DNA, 15 bp, Homo sapiens
aaaaggaaagaaatc

SEQ ID NO: 850525 - DNA, 15 bp, Homo sapiens
aaaggaaagaaatca

SEQ ID NO: 850526 - DNA, 15 bp, Homo sapiens
aaggaaagaaatcac

SEQ ID NO: 850527 - DNA, 15 bp, Homo sapiens
aggaaagaaatcaca

SEQ ID NO: 850528 - DNA, 15 bp, Homo sapiens
ggaaagaaatcacac

SEQ ID NO: 850529 - DNA, 15 bp, Homo sapiens
gaaagaaatcacaca

SEQ ID NO: 850530 - DNA, 15 bp, Homo sapiens
aaagaaatcacacag

SEQ ID NO: 850531 - DNA, 15 bp, Homo sapiens
aagaaatcacacagg

SEQ ID NO: 850532 - DNA, 15 bp, Homo sapiens
agaaatcacacaggt

SEQ ID NO: 850533 - DNA, 15 bp, Homo sapiens
gaaatcacacaggtt

SEQ ID NO: 850534 - DNA, 15 bp, Homo sapiens
aaatcacacaggtta

SEQ ID NO: 850535 - DNA, 15 bp, Homo sapiens
aatcacacaggttaa

SEQ ID NO: 850536 - DNA, 15 bp, Homo sapiens
atcacacaggttaaa

SEQ ID NO: 850537 - DNA, 15 bp, Homo sapiens
tcacacaggttaaaa

SEQ ID NO: 850538 - DNA, 15 bp, Homo sapiens
cacacaggttaaaaa

SEQ ID NO: 850539 - DNA, 15 bp, Homo sapiens
acacaggttaaaaaa

SEQ ID NO: 850540 - DNA, 15 bp, Homo sapiens
cacaggttaaaaaag

SEQ ID NO: 850541 - DNA, 15 bp, Homo sapiens
acaggttaaaaaagt

SEQ ID NO: 850542 - DNA, 15 bp, Homo sapiens
caggttaaaaaagtg

SEQ ID NO: 850543 - DNA, 15 bp, Homo sapiens
aggttaaaaaagtgt

SEQ ID NO: 850544 - DNA, 15 bp, Homo sapiens
ggttaaaaaagtgtt

SEQ ID NO: 850545 - DNA, 15 bp, Homo sapiens
gttaaaaaagtgttt

SEQ ID NO: 850546 - DNA, 15 bp, Homo sapiens
ttaaaaaagtgtttt

SEQ ID NO: 850547 - DNA, 15 bp, Homo sapiens
taaaaaagtgtttta

SEQ ID NO: 850548 - DNA, 15 bp, Homo sapiens
aaaaaagtgttttag

SEQ ID NO: 850549 - DNA, 15 bp, Homo sapiens
aaaaagtgttttaga

SEQ ID NO: 850550 - DNA, 15 bp, Homo sapiens
aaaagtgttttagag

SEQ ID NO: 850551 - DNA, 15 bp, Homo sapiens
aaagtgttttagagg

SEQ ID NO: 850552 - DNA, 15 bp, Homo sapiens
aagtgttttagaggg

SEQ ID NO: 850553 - DNA, 15 bp, Homo sapiens
agtgttttagagggc

SEQ ID NO: 850554 - DNA, 15 bp, Homo sapiens
gtgttttagagggca

SEQ ID NO: 850555 - DNA, 15 bp, Homo sapiens
tgttttagagggcac

SEQ ID NO: 850556 - DNA, 15 bp, Homo sapiens
gttttagagggcaca

SEQ ID NO: 850557 - DNA, 15 bp, Homo sapiens
ttttagagggcacac

SEQ ID NO: 850558 - DNA, 15 bp, Homo sapiens
tttagagggcacaca

SEQ ID NO: 850559 - DNA, 15 bp, Homo sapiens
ttagagggcacacac

SEQ ID NO: 850560 - DNA, 15 bp, Homo sapiens
tagagggcacacact

SEQ ID NO: 850561 - DNA, 15 bp, Homo sapiens
agagggcacacactt

SEQ ID NO: 850562 - DNA, 15 bp, Homo sapiens
gagggcacacacttt

SEQ ID NO: 850563 - DNA, 15 bp, Homo sapiens
agggcacacacttta

SEQ ID NO: 850564 - DNA, 15 bp, Homo sapiens
gggcacacactttat

SEQ ID NO: 850565 - DNA, 15 bp, Homo sapiens
ggcacacactttatg

SEQ ID NO: 850566 - DNA, 15 bp, Homo sapiens
gcacacactttatga

SEQ ID NO: 850567 - DNA, 15 bp, Homo sapiens
cacacactttatgag

SEQ ID NO: 850568 - DNA, 15 bp, Homo sapiens
acacactttatgagt

SEQ ID NO: 850569 - DNA, 15 bp, Homo sapiens
cacactttatgagtt

SEQ ID NO: 850570 - DNA, 15 bp, Homo sapiens
acactttatgagttt

SEQ ID NO: 850571 - DNA, 15 bp, Homo sapiens
cactttatgagttta

SEQ ID NO: 850572 - DNA, 15 bp, Homo sapiens
actttatgagtttag

SEQ ID NO: 850573 - DNA, 15 bp, Homo sapiens
ctttatgagtttagg

SEQ ID NO: 850574 - DNA, 15 bp, Homo sapiens
tttatgagtttaggg

SEQ ID NO: 850575 - DNA, 15 bp, Homo sapiens
ttatgagtttagggt

SEQ ID NO: 850576 - DNA, 15 bp, Homo sapiens
tatgagtttagggtt

SEQ ID NO: 850577 - DNA, 15 bp, Homo sapiens
atgagtttagggtta

SEQ ID NO: 850578 - DNA, 15 bp, Homo sapiens
tgagtttagggttat

SEQ ID NO: 850579 - DNA, 15 bp, Homo sapiens
gagtttagggttatt

SEQ ID NO: 850580 - DNA, 15 bp, Homo sapiens
agtttagggttattg

SEQ ID NO: 850581 - DNA, 15 bp, Homo sapiens
gtttagggttattga

SEQ ID NO: 850582 - DNA, 15 bp, Homo sapiens
tttagggttattgaa

SEQ ID NO: 850583 - DNA, 15 bp, Homo sapiens
ttagggttattgaag

SEQ ID NO: 850584 - DNA, 15 bp, Homo sapiens
tagggttattgaagg

SEQ ID NO: 850585 - DNA, 15 bp, Homo sapiens
agggttattgaaggc

SEQ ID NO: 850586 - DNA, 15 bp, Homo sapiens
gggttattgaaggct

SEQ ID NO: 850587 - DNA, 15 bp, Homo sapiens
ggttattgaaggctt

SEQ ID NO: 850588 - DNA, 15 bp, Homo sapiens
gttattgaaggcttt

SEQ ID NO: 850589 - DNA, 15 bp, Homo sapiens
ttattgaaggcttta

SEQ ID NO: 850590 - DNA, 15 bp, Homo sapiens
caagtctgccaaccg

SEQ ID NO: 850591 - DNA, 15 bp, Homo sapiens
aagtctgccaaccga

SEQ ID NO: 850592 - DNA, 15 bp, Homo sapiens
agtctgccaaccgag

SEQ ID NO: 850593 - DNA, 15 bp, Homo sapiens
gtctgccaaccgaga

SEQ ID NO: 850594 - DNA, 15 bp, Homo sapiens
tctgccaaccgagag

SEQ ID NO: 850595 - DNA, 15 bp, Homo sapiens
ctgccaaccgagaga

SEQ ID NO: 850596 - DNA, 15 bp, Homo sapiens
tgccaaccgagagag

SEQ ID NO: 850597 - DNA, 15 bp, Homo sapiens
gccaaccgagagagc

SEQ ID NO: 850598 - DNA, 15 bp, Homo sapiens
ccaaccgagagagcc

SEQ ID NO: 850599 - DNA, 15 bp, Homo sapiens
caaccgagagagccg

SEQ ID NO: 850600 - DNA, 15 bp, Homo sapiens
aaccgagagagccgg

SEQ ID NO: 850601 - DNA, 15 bp, Homo sapiens
accgagagagccggt

SEQ ID NO: 850602 - DNA, 15 bp, Homo sapiens
ccgagagagccggta

SEQ ID NO: 850603 - DNA, 15 bp, Homo sapiens
cgagagagccggtaa

SEQ ID NO: 850604 - DNA, 15 bp, Homo sapiens
gagagagccggtaag

SEQ ID NO: 850605 - DNA, 15 bp, Homo sapiens
agagagccggtaagt

SEQ ID NO: 850606 - DNA, 15 bp, Homo sapiens
gagagccggtaagtt

SEQ ID NO: 850607 - DNA, 15 bp, Homo sapiens
agagccggtaagttt

SEQ ID NO: 850608 - DNA, 15 bp, Homo sapiens
gagccggtaagtttg

SEQ ID NO: 850609 - DNA, 15 bp, Homo sapiens
agccggtaagtttgc

SEQ ID NO: 850610 - DNA, 15 bp, Homo sapiens
gccggtaagtttgcg

SEQ ID NO: 850611 - DNA, 15 bp, Homo sapiens
ccggtaagtttgcgg

SEQ ID NO: 850612 - DNA, 15 bp, Homo sapiens
cggtaagtttgcggt

SEQ ID NO: 850613 - DNA, 15 bp, Homo sapiens
ggtaagtttgcggtg

SEQ ID NO: 850614 - DNA, 15 bp, Homo sapiens
gtaagtttgcggtga

SEQ ID NO: 850615 - DNA, 15 bp, Homo sapiens
taagtttgcggtgac

SEQ ID NO: 850616 - DNA, 15 bp, Homo sapiens
aagtttgcggtgacc

SEQ ID NO: 850617 - DNA, 15 bp, Homo sapiens
agtttgcggtgaccc

SEQ ID NO: 850618 - DNA, 15 bp, Homo sapiens
gtttgcggtgaccca

SEQ ID NO: 850619 - DNA, 15 bp, Homo sapiens
tttgcggtgacccag

SEQ ID NO: 850620 - DNA, 15 bp, Homo sapiens
ttgcggtgacccagc

SEQ ID NO: 850621 - DNA, 15 bp, Homo sapiens
tgcggtgacccagca

SEQ ID NO: 850622 - DNA, 15 bp, Homo sapiens
gcggtgacccagcag

SEQ ID NO: 850623 - DNA, 15 bp, Homo sapiens
cggtgacccagcagc

SEQ ID NO: 850624 - DNA, 15 bp, Homo sapiens
ggtgacccagcagcc

SEQ ID NO: 850625 - DNA, 15 bp, Homo sapiens
gtgacccagcagcca

SEQ ID NO: 850626 - DNA, 15 bp, Homo sapiens
tgacccagcagccag

SEQ ID NO: 850627 - DNA, 15 bp, Homo sapiens
gacccagcagccagc

SEQ ID NO: 850628 - DNA, 15 bp, Homo sapiens
acccagcagccagct

SEQ ID NO: 850629 - DNA, 15 bp, Homo sapiens
cccagcagccagctg

SEQ ID NO: 850630 - DNA, 15 bp, Homo sapiens
ccagcagccagctga

SEQ ID NO: 850631 - DNA, 15 bp, Homo sapiens
cagcagccagctgac

SEQ ID NO: 850632 - DNA, 15 bp, Homo sapiens
agcagccagctgaca

SEQ ID NO: 850633 - DNA, 15 bp, Homo sapiens
gcagccagctgacac

SEQ ID NO: 850634 - DNA, 15 bp, Homo sapiens
cagccagctgacact

SEQ ID NO: 850635 - DNA, 15 bp, Homo sapiens
agccagctgacactt

SEQ ID NO: 850636 - DNA, 15 bp, Homo sapiens
gccagctgacacttt

SEQ ID NO: 850637 - DNA, 15 bp, Homo sapiens
ccagctgacactttt

SEQ ID NO: 850638 - DNA, 15 bp, Homo sapiens
cagctgacacttttg

SEQ ID NO: 850639 - DNA, 15 bp, Homo sapiens
agctgacacttttga

SEQ ID NO: 850640 - DNA, 15 bp, Homo sapiens
gctgacacttttgat

SEQ ID NO: 850641 - DNA, 15 bp, Homo sapiens
ctgacacttttgatg

SEQ ID NO: 850642 - DNA, 15 bp, Homo sapiens
tgacacttttgatgg

SEQ ID NO: 850643 - DNA, 15 bp, Homo sapiens
gacacttttgatggt

SEQ ID NO: 850644 - DNA, 15 bp, Homo sapiens
acacttttgatggtg

SEQ ID NO: 850645 - DNA, 15 bp, Homo sapiens
cacttttgatggtga

SEQ ID NO: 850646 - DNA, 15 bp, Homo sapiens
acttttgatggtgag

SEQ ID NO: 850647 - DNA, 15 bp, Homo sapiens
cttttgatggtgaga

SEQ ID NO: 850648 - DNA, 15 bp, Homo sapiens
ttttgatggtgagag

SEQ ID NO: 850649 - DNA, 15 bp, Homo sapiens
tttgatggtgagagt

SEQ ID NO: 850650 - DNA, 15 bp, Homo sapiens
ttgatggtgagagtg

SEQ ID NO: 850651 - DNA, 15 bp, Homo sapiens
tgatggtgagagtgc

SEQ ID NO: 850652 - DNA, 15 bp, Homo sapiens
gatggtgagagtgcg

SEQ ID NO: 850653 - DNA, 15 bp, Homo sapiens
atggtgagagtgcgt

SEQ ID NO: 850654 - DNA, 15 bp, Homo sapiens
tggtgagagtgcgtt

SEQ ID NO: 850655 - DNA, 15 bp, Homo sapiens
ggtgagagtgcgttc

SEQ ID NO: 850656 - DNA, 15 bp, Homo sapiens
gtgagagtgcgttct

SEQ ID NO: 850657 - DNA, 15 bp, Homo sapiens
tgagagtgcgttctg

SEQ ID NO: 850658 - DNA, 15 bp, Homo sapiens
gagagtgcgttctga

SEQ ID NO: 850659 - DNA, 15 bp, Homo sapiens
agagtgcgttctgag

SEQ ID NO: 850660 - DNA, 15 bp, Homo sapiens
gagtgcgttctgaga

SEQ ID NO: 850661 - DNA, 15 bp, Homo sapiens
agtgcgttctgagaa

SEQ ID NO: 850662 - DNA, 15 bp, Homo sapiens
gtgcgttctgagaac

SEQ ID NO: 850663 - DNA, 15 bp, Homo sapiens
tgcgttctgagaacg

SEQ ID NO: 850664 - DNA, 15 bp, Homo sapiens
gcgttctgagaacgg

SEQ ID NO: 850665 - DNA, 15 bp, Homo sapiens
cgttctgagaacggt

SEQ ID NO: 850666 - DNA, 15 bp, Homo sapiens
gttctgagaacggtc

SEQ ID NO: 850667 - DNA, 15 bp, Homo sapiens
ttctgagaacggtcg

SEQ ID NO: 850668 - DNA, 15 bp, Homo sapiens
tctgagaacggtcgg

SEQ ID NO: 850669 - DNA, 15 bp, Homo sapiens
ctgagaacggtcggt

SEQ ID NO: 850670 - DNA, 15 bp, Homo sapiens
tgagaacggtcggtt

SEQ ID NO: 850671 - DNA, 15 bp, Homo sapiens
gagaacggtcggttc

SEQ ID NO: 850672 - DNA, 15 bp, Homo sapiens
agaacggtcggttca

SEQ ID NO: 850673 - DNA, 15 bp, Homo sapiens
gaacggtcggttcac

SEQ ID NO: 850674 - DNA, 15 bp, Homo sapiens
aacggtcggttcact

SEQ ID NO: 850675 - DNA, 15 bp, Homo sapiens
acggtcggttcactt

SEQ ID NO: 850676 - DNA, 15 bp, Homo sapiens
cggtcggttcacttc

SEQ ID NO: 850677 - DNA, 15 bp, Homo sapiens
ggtcggttcacttct

SEQ ID NO: 850678 - DNA, 15 bp, Homo sapiens
gtcggttcacttctg

SEQ ID NO: 850679 - DNA, 15 bp, Homo sapiens
tcggttcacttctgc

SEQ ID NO: 850680 - DNA, 15 bp, Homo sapiens
cggttcacttctgct

SEQ ID NO: 850681 - DNA, 15 bp, Homo sapiens
ggttcacttctgctt

SEQ ID NO: 850682 - DNA, 15 bp, Homo sapiens
gttcacttctgcttt

SEQ ID NO: 850683 - DNA, 15 bp, Homo sapiens
ttcacttctgctttc

SEQ ID NO: 850684 - DNA, 15 bp, Homo sapiens
tcacttctgctttct

SEQ ID NO: 850685 - DNA, 15 bp, Homo sapiens
cacttctgctttctt

SEQ ID NO: 850686 - DNA, 15 bp, Homo sapiens
acttctgctttcttg

SEQ ID NO: 850687 - DNA, 15 bp, Homo sapiens
cttctgctttcttgt

SEQ ID NO: 850688 - DNA, 15 bp, Homo sapiens
ttctgctttcttgtg

SEQ ID NO: 850689 - DNA, 15 bp, Homo sapiens
tctgctttcttgtgc

SEQ ID NO: 850690 - DNA, 15 bp, Homo sapiens
ctgctttcttgtgca

SEQ ID NO: 850691 - DNA, 15 bp, Homo sapiens
tgctttcttgtgcat

SEQ ID NO: 850692 - DNA, 15 bp, Homo sapiens
gctttcttgtgcatt

SEQ ID NO: 850693 - DNA, 15 bp, Homo sapiens
ctttcttgtgcatta

SEQ ID NO: 850694 - DNA, 15 bp, Homo sapiens
tttcttgtgcattat

SEQ ID NO: 850695 - DNA, 15 bp, Homo sapiens
ttcttgtgcattatt

SEQ ID NO: 850696 - DNA, 15 bp, Homo sapiens
tcttgtgcattattt

SEQ ID NO: 850697 - DNA, 15 bp, Homo sapiens
cttgtgcattattta

SEQ ID NO: 850698 - DNA, 15 bp, Homo sapiens
ttgtgcattatttat

SEQ ID NO: 850699 - DNA, 15 bp, Homo sapiens
tgtgcattatttatc

SEQ ID NO: 850700 - DNA, 15 bp, Homo sapiens
gtgcattatttatct

SEQ ID NO: 850701 - DNA, 15 bp, Homo sapiens
tgcattatttatctg

SEQ ID NO: 850702 - DNA, 15 bp, Homo sapiens
gcattatttatctgc

SEQ ID NO: 850703 - DNA, 15 bp, Homo sapiens
cattatttatctgca

SEQ ID NO: 850704 - DNA, 15 bp, Homo sapiens
attatttatctgcat

SEQ ID NO: 850705 - DNA, 15 bp, Homo sapiens
ttatttatctgcatg

SEQ ID NO: 850706 - DNA, 15 bp, Homo sapiens
tatttatctgcatgg

SEQ ID NO: 850707 - DNA, 15 bp, Homo sapiens
atttatctgcatgga

SEQ ID NO: 850708 - DNA, 15 bp, Homo sapiens
tttatctgcatggaa

SEQ ID NO: 850709 - DNA, 15 bp, Homo sapiens
ttatctgcatggaac

SEQ ID NO: 850710 - DNA, 15 bp, Homo sapiens
tatctgcatggaacc

SEQ ID NO: 850711 - DNA, 15 bp, Homo sapiens
atctgcatggaacca

SEQ ID NO: 850712 - DNA, 15 bp, Homo sapiens
tctgcatggaaccag

SEQ ID NO: 850713 - DNA, 15 bp, Homo sapiens
ctgcatggaaccaga

SEQ ID NO: 850714 - DNA, 15 bp, Homo sapiens
tgcatggaaccagat

SEQ ID NO: 850715 - DNA, 15 bp, Homo sapiens
gcatggaaccagatg

SEQ ID NO: 850716 - DNA, 15 bp, Homo sapiens
catggaaccagatgt

SEQ ID NO: 850717 - DNA, 15 bp, Homo sapiens
atggaaccagatgta

SEQ ID NO: 850718 - DNA, 15 bp, Homo sapiens
tggaaccagatgtaa

SEQ ID NO: 850719 - DNA, 15 bp, Homo sapiens
ggaaccagatgtaaa

SEQ ID NO: 850720 - DNA, 15 bp, Homo sapiens
gaaccagatgtaaaa

SEQ ID NO: 850721 - DNA, 15 bp, Homo sapiens
aaccagatgtaaaac

SEQ ID NO: 850722 - DNA, 15 bp, Homo sapiens
accagatgtaaaacc

SEQ ID NO: 850723 - DNA, 15 bp, Homo sapiens
ccagatgtaaaacct

SEQ ID NO: 850724 - DNA, 15 bp, Homo sapiens
cagatgtaaaacctc

SEQ ID NO: 850725 - DNA, 15 bp, Homo sapiens
agatgtaaaacctct

SEQ ID NO: 850726 - DNA, 15 bp, Homo sapiens
gatgtaaaacctctc

SEQ ID NO: 850727 - DNA, 15 bp, Homo sapiens
atgtaaaacctctct

SEQ ID NO: 850728 - DNA, 15 bp, Homo sapiens
tgtaaaacctctctg

SEQ ID NO: 850729 - DNA, 15 bp, Homo sapiens
gtaaaacctctctga

SEQ ID NO: 850730 - DNA, 15 bp, Homo sapiens
taaaacctctctgac

SEQ ID NO: 850731 - DNA, 15 bp, Homo sapiens
aaaacctctctgacc

SEQ ID NO: 850732 - DNA, 15 bp, Homo sapiens
aaacctctctgaccc

SEQ ID NO: 850733 - DNA, 15 bp, Homo sapiens
aacctctctgaccct

SEQ ID NO: 850734 - DNA, 15 bp, Homo sapiens
acctctctgacccta

SEQ ID NO: 850735 - DNA, 15 bp, Homo sapiens
cctctctgaccctag

SEQ ID NO: 850736 - DNA, 15 bp, Homo sapiens
ctctctgaccctaga

SEQ ID NO: 850737 - DNA, 15 bp, Homo sapiens
tctctgaccctagag

SEQ ID NO: 850738 - DNA, 15 bp, Homo sapiens
ctctgaccctagagc

SEQ ID NO: 850739 - DNA, 15 bp, Homo sapiens
tctgaccctagagca

SEQ ID NO: 850740 - DNA, 15 bp, Homo sapiens
ctgaccctagagcac

SEQ ID NO: 850741 - DNA, 15 bp, Homo sapiens
tgaccctagagcaca

SEQ ID NO: 850742 - DNA, 15 bp, Homo sapiens
gaccctagagcacat

SEQ ID NO: 850743 - DNA, 15 bp, Homo sapiens
accctagagcacatt

SEQ ID NO: 850744 - DNA, 15 bp, Homo sapiens
ccctagagcacattt

SEQ ID NO: 850745 - DNA, 15 bp, Homo sapiens
cctagagcacatttc

SEQ ID NO: 850746 - DNA, 15 bp, Homo sapiens
ctagagcacatttcg

SEQ ID NO: 850747 - DNA, 15 bp, Homo sapiens
tagagcacatttcga

SEQ ID NO: 850748 - DNA, 15 bp, Homo sapiens
agagcacatttcgag

SEQ ID NO: 850749 - DNA, 15 bp, Homo sapiens
gagcacatttcgagg

SEQ ID NO: 850750 - DNA, 15 bp, Homo sapiens
agcacatttcgaggc

SEQ ID NO: 850751 - DNA, 15 bp, Homo sapiens
gcacatttcgaggca

SEQ ID NO: 850752 - DNA, 15 bp, Homo sapiens
cacatttcgaggcat

SEQ ID NO: 850753 - DNA, 15 bp, Homo sapiens
acatttcgaggcatg

SEQ ID NO: 850754 - DNA, 15 bp, Homo sapiens
catttcgaggcatgc

SEQ ID NO: 850755 - DNA, 15 bp, Homo sapiens
atttcgaggcatgcc

SEQ ID NO: 850756 - DNA, 15 bp, Homo sapiens
tttcgaggcatgccc

SEQ ID NO: 850757 - DNA, 15 bp, Homo sapiens
ttcgaggcatgcccc

SEQ ID NO: 850758 - DNA, 15 bp, Homo sapiens
tcgaggcatgcccca

SEQ ID NO: 850759 - DNA, 15 bp, Homo sapiens
cgaggcatgccccat

SEQ ID NO: 850760 - DNA, 15 bp, Homo sapiens
gaggcatgccccatc

SEQ ID NO: 850761 - DNA, 15 bp, Homo sapiens
aggcatgccccatca

SEQ ID NO: 850762 - DNA, 15 bp, Homo sapiens
ggcatgccccatcag

SEQ ID NO: 850763 - DNA, 15 bp, Homo sapiens
gcatgccccatcaga

SEQ ID NO: 850764 - DNA, 15 bp, Homo sapiens
catgccccatcagac

SEQ ID NO: 850765 - DNA, 15 bp, Homo sapiens
atgccccatcagaca

SEQ ID NO: 850766 - DNA, 15 bp, Homo sapiens
tgccccatcagacac

SEQ ID NO: 850767 - DNA, 15 bp, Homo sapiens
gccccatcagacact

SEQ ID NO: 850768 - DNA, 15 bp, Homo sapiens
ccccatcagacactg

SEQ ID NO: 850769 - DNA, 15 bp, Homo sapiens
cccatcagacactgc

SEQ ID NO: 850770 - DNA, 15 bp, Homo sapiens
ccatcagacactgca

SEQ ID NO: 850771 - DNA, 15 bp, Homo sapiens
catcagacactgcag

SEQ ID NO: 850772 - DNA, 15 bp, Homo sapiens
atcagacactgcagc

SEQ ID NO: 850773 - DNA, 15 bp, Homo sapiens
tcagacactgcagct

SEQ ID NO: 850774 - DNA, 15 bp, Homo sapiens
cagacactgcagctt

SEQ ID NO: 850775 - DNA, 15 bp, Homo sapiens
agacactgcagcttc

SEQ ID NO: 850776 - DNA, 15 bp, Homo sapiens
gacactgcagcttct

SEQ ID NO: 850777 - DNA, 15 bp, Homo sapiens
acactgcagcttcta

SEQ ID NO: 850778 - DNA, 15 bp, Homo sapiens
cactgcagcttctat

SEQ ID NO: 850779 - DNA, 15 bp, Homo sapiens
actgcagcttctatg

SEQ ID NO: 850780 - DNA, 15 bp, Homo sapiens
ctgcagcttctatgc

SEQ ID NO: 850781 - DNA, 15 bp, Homo sapiens
tgcagcttctatgcc

SEQ ID NO: 850782 - DNA, 15 bp, Homo sapiens
gcagcttctatgcca

SEQ ID NO: 850783 - DNA, 15 bp, Homo sapiens
cagcttctatgccag

SEQ ID NO: 850784 - DNA, 15 bp, Homo sapiens
agcttctatgccaga

SEQ ID NO: 850785 - DNA, 15 bp, Homo sapiens
gcttctatgccagac

SEQ ID NO: 850786 - DNA, 15 bp, Homo sapiens
cttctatgccagacc

SEQ ID NO: 850787 - DNA, 15 bp, Homo sapiens
ttctatgccagacca

SEQ ID NO: 850788 - DNA, 15 bp, Homo sapiens
tctatgccagaccag

SEQ ID NO: 850789 - DNA, 15 bp, Homo sapiens
ctatgccagaccagc

SEQ ID NO: 850790 - DNA, 15 bp, Homo sapiens
tatgccagaccagcc

SEQ ID NO: 850791 - DNA, 15 bp, Homo sapiens
atgccagaccagcct

SEQ ID NO: 850792 - DNA, 15 bp, Homo sapiens
tgccagaccagcctg

SEQ ID NO: 850793 - DNA, 15 bp, Homo sapiens
gccagaccagcctgg

SEQ ID NO: 850794 - DNA, 15 bp, Homo sapiens
ccagaccagcctggc

SEQ ID NO: 850795 - DNA, 15 bp, Homo sapiens
cagaccagcctggca

SEQ ID NO: 850796 - DNA, 15 bp, Homo sapiens
agaccagcctggcac

SEQ ID NO: 850797 - DNA, 15 bp, Homo sapiens
gaccagcctggcacc

SEQ ID NO: 850798 - DNA, 15 bp, Homo sapiens
accagcctggcaccc

SEQ ID NO: 850799 - DNA, 15 bp, Homo sapiens
ccagcctggcaccca

SEQ ID NO: 850800 - DNA, 15 bp, Homo sapiens
cagcctggcacccaa

SEQ ID NO: 850801 - DNA, 15 bp, Homo sapiens
agcctggcacccaaa

SEQ ID NO: 850802 - DNA, 15 bp, Homo sapiens
gcctggcacccaaag

SEQ ID NO: 850803 - DNA, 15 bp, Homo sapiens
cctggcacccaaagc

SEQ ID NO: 850804 - DNA, 15 bp, Homo sapiens
ctggcacccaaagcc

SEQ ID NO: 850805 - DNA, 15 bp, Homo sapiens
tggcacccaaagccc

SEQ ID NO: 850806 - DNA, 15 bp, Homo sapiens
ggcacccaaagccct

SEQ ID NO: 850807 - DNA, 15 bp, Homo sapiens
gcacccaaagccctg

SEQ ID NO: 850808 - DNA, 15 bp, Homo sapiens
cacccaaagccctgc

SEQ ID NO: 850809 - DNA, 15 bp, Homo sapiens
acccaaagccctgct

SEQ ID NO: 850810 - DNA, 15 bp, Homo sapiens
cccaaagccctgctg

SEQ ID NO: 850811 - DNA, 15 bp, Homo sapiens
ccaaagccctgctgg

SEQ ID NO: 850812 - DNA, 15 bp, Homo sapiens
caaagccctgctggg

SEQ ID NO: 850813 - DNA, 15 bp, Homo sapiens
aaagccctgctgggc

SEQ ID NO: 850814 - DNA, 15 bp, Homo sapiens
aagccctgctgggca

SEQ ID NO: 850815 - DNA, 15 bp, Homo sapiens
agccctgctgggcat

SEQ ID NO: 850816 - DNA, 15 bp, Homo sapiens
gccctgctgggcatt

SEQ ID NO: 850817 - DNA, 15 bp, Homo sapiens
ccctgctgggcattc

SEQ ID NO: 850818 - DNA, 15 bp, Homo sapiens
cctgctgggcattca

SEQ ID NO: 850819 - DNA, 15 bp, Homo sapiens
ctgctgggcattcag

SEQ ID NO: 850820 - DNA, 15 bp, Homo sapiens
tgctgggcattcaga

SEQ ID NO: 850821 - DNA, 15 bp, Homo sapiens
gctgggcattcagag

SEQ ID NO: 850822 - DNA, 15 bp, Homo sapiens
ctgggcattcagaga

SEQ ID NO: 850823 - DNA, 15 bp, Homo sapiens
tgggcattcagagag

SEQ ID NO: 850824 - DNA, 15 bp, Homo sapiens
gggcattcagagagt

SEQ ID NO: 850825 - DNA, 15 bp, Homo sapiens
ggcattcagagagtg

SEQ ID NO: 850826 - DNA, 15 bp, Homo sapiens
gcattcagagagtgt

SEQ ID NO: 850827 - DNA, 15 bp, Homo sapiens
cattcagagagtgtt

SEQ ID NO: 850828 - DNA, 15 bp, Homo sapiens
attcagagagtgttt

SEQ ID NO: 850829 - DNA, 15 bp, Homo sapiens
ttcagagagtgtttc

SEQ ID NO: 850830 - DNA, 15 bp, Homo sapiens
tcagagagtgtttct

SEQ ID NO: 850831 - DNA, 15 bp, Homo sapiens
cagagagtgtttctc

SEQ ID NO: 850832 - DNA, 15 bp, Homo sapiens
agagagtgtttctcc

SEQ ID NO: 850833 - DNA, 15 bp, Homo sapiens
gagagtgtttctcca

SEQ ID NO: 850834 - DNA, 15 bp, Homo sapiens
agagtgtttctccag

SEQ ID NO: 850835 - DNA, 15 bp, Homo sapiens
gagtgtttctccagg

SEQ ID NO: 850836 - DNA, 15 bp, Homo sapiens
agtgtttctccaggg

SEQ ID NO: 850837 - DNA, 15 bp, Homo sapiens
gtgtttctccaggga

SEQ ID NO: 850838 - DNA, 15 bp, Homo sapiens
tgtttctccagggaa

SEQ ID NO: 850839 - DNA, 15 bp, Homo sapiens
gtttctccagggaag

SEQ ID NO: 850840 - DNA, 15 bp, Homo sapiens
tttctccagggaaga

SEQ ID NO: 850841 - DNA, 15 bp, Homo sapiens
ttctccagggaagag

SEQ ID NO: 850842 - DNA, 15 bp, Homo sapiens
tctccagggaagagg

SEQ ID NO: 850843 - DNA, 15 bp, Homo sapiens
ctccagggaagaggg

SEQ ID NO: 850844 - DNA, 15 bp, Homo sapiens
tccagggaagaggga

SEQ ID NO: 850845 - DNA, 15 bp, Homo sapiens
ccagggaagagggat

SEQ ID NO: 850846 - DNA, 15 bp, Homo sapiens
cagggaagagggatg

SEQ ID NO: 850847 - DNA, 15 bp, Homo sapiens
agggaagagggatga

SEQ ID NO: 850848 - DNA, 15 bp, Homo sapiens
gggaagagggatgag

SEQ ID NO: 850849 - DNA, 15 bp, Homo sapiens
ggaagagggatgagt

SEQ ID NO: 850850 - DNA, 15 bp, Homo sapiens
gaagagggatgagtc

SEQ ID NO: 850851 - DNA, 15 bp, Homo sapiens
aagagggatgagtcc

SEQ ID NO: 850852 - DNA, 15 bp, Homo sapiens
agagggatgagtcct

SEQ ID NO: 850853 - DNA, 15 bp, Homo sapiens
gagggatgagtcctc

SEQ ID NO: 850854 - DNA, 15 bp, Homo sapiens
agggatgagtcctca

SEQ ID NO: 850855 - DNA, 15 bp, Homo sapiens
gggatgagtcctcaa

SEQ ID NO: 850856 - DNA, 15 bp, Homo sapiens
ggatgagtcctcaaa

SEQ ID NO: 850857 - DNA, 15 bp, Homo sapiens
gatgagtcctcaaaa

SEQ ID NO: 850858 - DNA, 15 bp, Homo sapiens
atgagtcctcaaaat

SEQ ID NO: 850859 - DNA, 15 bp, Homo sapiens
tgagtcctcaaaata

SEQ ID NO: 850860 - DNA, 15 bp, Homo sapiens
gagtcctcaaaatat

SEQ ID NO: 850861 - DNA, 15 bp, Homo sapiens
agtcctcaaaatatc

SEQ ID NO: 850862 - DNA, 15 bp, Homo sapiens
gtcctcaaaatatct

SEQ ID NO: 850863 - DNA, 15 bp, Homo sapiens
tcctcaaaatatctc

SEQ ID NO: 850864 - DNA, 15 bp, Homo sapiens
cctcaaaatatctcc

SEQ ID NO: 850865 - DNA, 15 bp, Homo sapiens
ctcaaaatatctcca

SEQ ID NO: 850866 - DNA, 15 bp, Homo sapiens
tcaaaatatctccac

SEQ ID NO: 850867 - DNA, 15 bp, Homo sapiens
caaaatatctccacc

SEQ ID NO: 850868 - DNA, 15 bp, Homo sapiens
aaaatatctccacct

SEQ ID NO: 850869 - DNA, 15 bp, Homo sapiens
aaatatctccacctg

SEQ ID NO: 850870 - DNA, 15 bp, Homo sapiens
aatatctccacctga

SEQ ID NO: 850871 - DNA, 15 bp, Homo sapiens
atatctccacctgat

SEQ ID NO: 850872 - DNA, 15 bp, Homo sapiens
tatctccacctgatc

SEQ ID NO: 850873 - DNA, 15 bp, Homo sapiens
atctccacctgatca

SEQ ID NO: 850874 - DNA, 15 bp, Homo sapiens
tctccacctgatcat

SEQ ID NO: 850875 - DNA, 15 bp, Homo sapiens
ctccacctgatcatg

SEQ ID NO: 850876 - DNA, 15 bp, Homo sapiens
tccacctgatcatgc

SEQ ID NO: 850877 - DNA, 15 bp, Homo sapiens
ccacctgatcatgcc

SEQ ID NO: 850878 - DNA, 15 bp, Homo sapiens
cacctgatcatgccg

SEQ ID NO: 850879 - DNA, 15 bp, Homo sapiens
acctgatcatgccga

SEQ ID NO: 850880 - DNA, 15 bp, Homo sapiens
cctgatcatgccgac

SEQ ID NO: 850881 - DNA, 15 bp, Homo sapiens
ctgatcatgccgacc

SEQ ID NO: 850882 - DNA, 15 bp, Homo sapiens
tgatcatgccgacct

SEQ ID NO: 850883 - DNA, 15 bp, Homo sapiens
gatcatgccgacctg

SEQ ID NO: 850884 - DNA, 15 bp, Homo sapiens
atcatgccgacctgg

SEQ ID NO: 850885 - DNA, 15 bp, Homo sapiens
tcatgccgacctgga

SEQ ID NO: 850886 - DNA, 15 bp, Homo sapiens
catgccgacctggac

SEQ ID NO: 850887 - DNA, 15 bp, Homo sapiens
atgccgacctggact

SEQ ID NO: 850888 - DNA, 15 bp, Homo sapiens
tgccgacctggactt

SEQ ID NO: 850889 - DNA, 15 bp, Homo sapiens
gccgacctggacttt

SEQ ID NO: 850890 - DNA, 15 bp, Homo sapiens
ccgacctggactttt

SEQ ID NO: 850891 - DNA, 15 bp, Homo sapiens
cgacctggacttttc

SEQ ID NO: 850892 - DNA, 15 bp, Homo sapiens
gacctggacttttca

SEQ ID NO: 850893 - DNA, 15 bp, Homo sapiens
acctggacttttcac

SEQ ID NO: 850894 - DNA, 15 bp, Homo sapiens
cctggacttttcacc

SEQ ID NO: 850895 - DNA, 15 bp, Homo sapiens
ctggacttttcacct

SEQ ID NO: 850896 - DNA, 15 bp, Homo sapiens
tggacttttcacctt

SEQ ID NO: 850897 - DNA, 15 bp, Homo sapiens
ggacttttcaccttc

SEQ ID NO: 850898 - DNA, 15 bp, Homo sapiens
gacttttcaccttct

SEQ ID NO: 850899 - DNA, 15 bp, Homo sapiens
acttttcaccttcta

SEQ ID NO: 850900 - DNA, 15 bp, Homo sapiens
cttttcaccttctaa

SEQ ID NO: 850901 - DNA, 15 bp, Homo sapiens
ttttcaccttctaag

SEQ ID NO: 850902 - DNA, 15 bp, Homo sapiens
tttcaccttctaagt

SEQ ID NO: 850903 - DNA, 15 bp, Homo sapiens
ttcaccttctaagta

SEQ ID NO: 850904 - DNA, 15 bp, Homo sapiens
tcaccttctaagtat

SEQ ID NO: 850905 - DNA, 15 bp, Homo sapiens
caccttctaagtatt

SEQ ID NO: 850906 - DNA, 15 bp, Homo sapiens
accttctaagtatta

SEQ ID NO: 850907 - DNA, 15 bp, Homo sapiens
ccttctaagtattaa

SEQ ID NO: 850908 - DNA, 15 bp, Homo sapiens
cttctaagtattaaa

SEQ ID NO: 850909 - DNA, 15 bp, Homo sapiens
ttctaagtattaaac

SEQ ID NO: 850910 - DNA, 15 bp, Homo sapiens
tctaagtattaaacc

SEQ ID NO: 850911 - DNA, 15 bp, Homo sapiens
ctaagtattaaacca

SEQ ID NO: 850912 - DNA, 15 bp, Homo sapiens
taagtattaaaccag

SEQ ID NO: 850913 - DNA, 15 bp, Homo sapiens
aagtattaaaccaga

SEQ ID NO: 850914 - DNA, 15 bp, Homo sapiens
agtattaaaccagaa

SEQ ID NO: 850915 - DNA, 15 bp, Homo sapiens
gtattaaaccagaac

SEQ ID NO: 850916 - DNA, 15 bp, Homo sapiens
tattaaaccagaact

SEQ ID NO: 850917 - DNA, 15 bp, Homo sapiens
attaaaccagaactt

SEQ ID NO: 850918 - DNA, 15 bp, Homo sapiens
ttaaaccagaactta

SEQ ID NO: 850919 - DNA, 15 bp, Homo sapiens
taaaccagaacttaa

SEQ ID NO: 850920 - DNA, 15 bp, Homo sapiens
aaaccagaacttaaa

SEQ ID NO: 850921 - DNA, 15 bp, Homo sapiens
aaccagaacttaaaa

SEQ ID NO: 850922 - DNA, 15 bp, Homo sapiens
accagaacttaaaac

SEQ ID NO: 850923 - DNA, 15 bp, Homo sapiens
ccagaacttaaaacc

SEQ ID NO: 850924 - DNA, 15 bp, Homo sapiens
cagaacttaaaaccc

SEQ ID NO: 850925 - DNA, 15 bp, Homo sapiens
agaacttaaaacccc

SEQ ID NO: 850926 - DNA, 15 bp, Homo sapiens
gaacttaaaacccct

SEQ ID NO: 850927 - DNA, 15 bp, Homo sapiens
aacttaaaacccctt

SEQ ID NO: 850928 - DNA, 15 bp, Homo sapiens
acttaaaaccccttt

SEQ ID NO: 850929 - DNA, 15 bp, Homo sapiens
cttaaaacccctttt

SEQ ID NO: 850930 - DNA, 15 bp, Homo sapiens
ttaaaaccccttttt

SEQ ID NO: 850931 - DNA, 15 bp, Homo sapiens
taaaaccccttttta

SEQ ID NO: 850932 - DNA, 15 bp, Homo sapiens
aaaacccctttttac

SEQ ID NO: 850933 - DNA, 15 bp, Homo sapiens
aaacccctttttact

SEQ ID NO: 850934 - DNA, 15 bp, Homo sapiens
aacccctttttactg

SEQ ID NO: 850935 - DNA, 15 bp, Homo sapiens
acccctttttactgc

SEQ ID NO: 850936 - DNA, 15 bp, Homo sapiens
cccctttttactgct

SEQ ID NO: 850937 - DNA, 15 bp, Homo sapiens
ccctttttactgctg

SEQ ID NO: 850938 - DNA, 15 bp, Homo sapiens
cctttttactgctgt

SEQ ID NO: 850939 - DNA, 15 bp, Homo sapiens
ctttttactgctgtg

SEQ ID NO: 850940 - DNA, 15 bp, Homo sapiens
tttttactgctgtga

SEQ ID NO: 850941 - DNA, 15 bp, Homo sapiens
ttttactgctgtgag

SEQ ID NO: 850942 - DNA, 15 bp, Homo sapiens
tttactgctgtgagc

SEQ ID NO: 850943 - DNA, 15 bp, Homo sapiens
ttactgctgtgagca

SEQ ID NO: 850944 - DNA, 15 bp, Homo sapiens
tactgctgtgagcaa

SEQ ID NO: 850945 - DNA, 15 bp, Homo sapiens
actgctgtgagcaaa

SEQ ID NO: 850946 - DNA, 15 bp, Homo sapiens
ctgctgtgagcaaaa

SEQ ID NO: 850947 - DNA, 15 bp, Homo sapiens
tgctgtgagcaaaaa

SEQ ID NO: 850948 - DNA, 15 bp, Homo sapiens
gctgtgagcaaaaaa

SEQ ID NO: 850949 - DNA, 15 bp, Homo sapiens
ctgtgagcaaaaaag

SEQ ID NO: 850950 - DNA, 15 bp, Homo sapiens
tgtgagcaaaaaagc

SEQ ID NO: 850951 - DNA, 15 bp, Homo sapiens
gtgagcaaaaaagca

SEQ ID NO: 850952 - DNA, 15 bp, Homo sapiens
tgagcaaaaaagcag

SEQ ID NO: 850953 - DNA, 15 bp, Homo sapiens
gagcaaaaaagcagg

SEQ ID NO: 850954 - DNA, 15 bp, Homo sapiens
agcaaaaaagcaggt

SEQ ID NO: 850955 - DNA, 15 bp, Homo sapiens
gcaaaaaagcaggtg

SEQ ID NO: 850956 - DNA, 15 bp, Homo sapiens
caaaaaagcaggtgg

SEQ ID NO: 850957 - DNA, 15 bp, Homo sapiens
aaaaaagcaggtgga

SEQ ID NO: 850958 - DNA, 15 bp, Homo sapiens
aaaaagcaggtggac

SEQ ID NO: 850959 - DNA, 15 bp, Homo sapiens
aaaagcaggtggact

SEQ ID NO: 850960 - DNA, 15 bp, Homo sapiens
aaagcaggtggactc

SEQ ID NO: 850961 - DNA, 15 bp, Homo sapiens
aagcaggtggactct

SEQ ID NO: 850962 - DNA, 15 bp, Homo sapiens
agcaggtggactctg

SEQ ID NO: 850963 - DNA, 15 bp, Homo sapiens
gcaggtggactctgg

SEQ ID NO: 850964 - DNA, 15 bp, Homo sapiens
caggtggactctggc

SEQ ID NO: 850965 - DNA, 15 bp, Homo sapiens
aggtggactctggcc

SEQ ID NO: 850966 - DNA, 15 bp, Homo sapiens
ggtggactctggcct

SEQ ID NO: 850967 - DNA, 15 bp, Homo sapiens
gtggactctggcctc

SEQ ID NO: 850968 - DNA, 15 bp, Homo sapiens
tggactctggcctcc

SEQ ID NO: 850969 - DNA, 15 bp, Homo sapiens
ggactctggcctcct

SEQ ID NO: 850970 - DNA, 15 bp, Homo sapiens
gactctggcctcctt

SEQ ID NO: 850971 - DNA, 15 bp, Homo sapiens
actctggcctccttt

SEQ ID NO: 850972 - DNA, 15 bp, Homo sapiens
ctctggcctccttta

SEQ ID NO: 850973 - DNA, 15 bp, Homo sapiens
tctggcctcctttac

SEQ ID NO: 850974 - DNA, 15 bp, Homo sapiens
ctggcctcctttaca

SEQ ID NO: 850975 - DNA, 15 bp, Homo sapiens
tggcctcctttacag

SEQ ID NO: 850976 - DNA, 15 bp, Homo sapiens
ggcctcctttacagc

SEQ ID NO: 850977 - DNA, 15 bp, Homo sapiens
gcctcctttacagca

SEQ ID NO: 850978 - DNA, 15 bp, Homo sapiens
cctcctttacagcag

SEQ ID NO: 850979 - DNA, 15 bp, Homo sapiens
ctcctttacagcagc

SEQ ID NO: 850980 - DNA, 15 bp, Homo sapiens
tcctttacagcagcc

SEQ ID NO: 850981 - DNA, 15 bp, Homo sapiens
cctttacagcagcct

SEQ ID NO: 850982 - DNA, 15 bp, Homo sapiens
ctttacagcagcctt

SEQ ID NO: 850983 - DNA, 15 bp, Homo sapiens
tttacagcagccttg

SEQ ID NO: 850984 - DNA, 15 bp, Homo sapiens
ttacagcagccttgg

SEQ ID NO: 850985 - DNA, 15 bp, Homo sapiens
tacagcagccttggg

SEQ ID NO: 850986 - DNA, 15 bp, Homo sapiens
acagcagccttgggg

SEQ ID NO: 850987 - DNA, 15 bp, Homo sapiens
cagcagccttggggt

SEQ ID NO: 850988 - DNA, 15 bp, Homo sapiens
agcagccttggggta

SEQ ID NO: 850989 - DNA, 15 bp, Homo sapiens
gcagccttggggtag

SEQ ID NO: 850990 - DNA, 15 bp, Homo sapiens
cagccttggggtaga

SEQ ID NO: 850991 - DNA, 15 bp, Homo sapiens
agccttggggtagag

SEQ ID NO: 850992 - DNA, 15 bp, Homo sapiens
gccttggggtagagc

SEQ ID NO: 850993 - DNA, 15 bp, Homo sapiens
ccttggggtagagct

SEQ ID NO: 850994 - DNA, 15 bp, Homo sapiens
cttggggtagagctg

SEQ ID NO: 850995 - DNA, 15 bp, Homo sapiens
ttggggtagagctgt

SEQ ID NO: 850996 - DNA, 15 bp, Homo sapiens
tggggtagagctgtg

SEQ ID NO: 850997 - DNA, 15 bp, Homo sapiens
ggggtagagctgtga

SEQ ID NO: 850998 - DNA, 15 bp, Homo sapiens
gggtagagctgtgag

SEQ ID NO: 850999 - DNA, 15 bp, Homo sapiens
ggtagagctgtgagg

SEQ ID NO: 851000 - DNA, 15 bp, Homo sapiens
gtagagctgtgaggg

SEQ ID NO: 851001 - DNA, 15 bp, Homo sapiens
tagagctgtgagggg

SEQ ID NO: 851002 - DNA, 15 bp, Homo sapiens
agagctgtgagggga

SEQ ID NO: 851003 - DNA, 15 bp, Homo sapiens
gagctgtgaggggag

SEQ ID NO: 851004 - DNA, 15 bp, Homo sapiens
agctgtgaggggaga

SEQ ID NO: 851005 - DNA, 15 bp, Homo sapiens
gctgtgaggggagac

SEQ ID NO: 851006 - DNA, 15 bp, Homo sapiens
ctgtgaggggagaca

SEQ ID NO: 851007 - DNA, 15 bp, Homo sapiens
tgtgaggggagacac

SEQ ID NO: 851008 - DNA, 15 bp, Homo sapiens
gtgaggggagacacc

SEQ ID NO: 851009 - DNA, 15 bp, Homo sapiens
tgaggggagacacca

SEQ ID NO: 851010 - DNA, 15 bp, Homo sapiens
gaggggagacaccaa

SEQ ID NO: 851011 - DNA, 15 bp, Homo sapiens
aggggagacaccaac

SEQ ID NO: 851012 - DNA, 15 bp, Homo sapiens
ggggagacaccaact

SEQ ID NO: 851013 - DNA, 15 bp, Homo sapiens
gggagacaccaactc

SEQ ID NO: 851014 - DNA, 15 bp, Homo sapiens
ggagacaccaactct

SEQ ID NO: 851015 - DNA, 15 bp, Homo sapiens
gagacaccaactctc

SEQ ID NO: 851016 - DNA, 15 bp, Homo sapiens
agacaccaactctct

SEQ ID NO: 851017 - DNA, 15 bp, Homo sapiens
gacaccaactctctt

SEQ ID NO: 851018 - DNA, 15 bp, Homo sapiens
acaccaactctcttg

SEQ ID NO: 851019 - DNA, 15 bp, Homo sapiens
caccaactctcttga

SEQ ID NO: 851020 - DNA, 15 bp, Homo sapiens
accaactctcttgat

SEQ ID NO: 851021 - DNA, 15 bp, Homo sapiens
ccaactctcttgata

SEQ ID NO: 851022 - DNA, 15 bp, Homo sapiens
caactctcttgatag

SEQ ID NO: 851023 - DNA, 15 bp, Homo sapiens
aactctcttgatagc

SEQ ID NO: 851024 - DNA, 15 bp, Homo sapiens
actctcttgatagcc

SEQ ID NO: 851025 - DNA, 15 bp, Homo sapiens
ctctcttgatagcca

SEQ ID NO: 851026 - DNA, 15 bp, Homo sapiens
tctcttgatagccaa

SEQ ID NO: 851027 - DNA, 15 bp, Homo sapiens
ctcttgatagccaaa

SEQ ID NO: 851028 - DNA, 15 bp, Homo sapiens
tcttgatagccaaat

SEQ ID NO: 851029 - DNA, 15 bp, Homo sapiens
cttgatagccaaatt

SEQ ID NO: 851030 - DNA, 15 bp, Homo sapiens
ttgatagccaaatta

SEQ ID NO: 851031 - DNA, 15 bp, Homo sapiens
tgatagccaaattac

SEQ ID NO: 851032 - DNA, 15 bp, Homo sapiens
gatagccaaattaca

SEQ ID NO: 851033 - DNA, 15 bp, Homo sapiens
atagccaaattacaa

SEQ ID NO: 851034 - DNA, 15 bp, Homo sapiens
tagccaaattacaag

SEQ ID NO: 851035 - DNA, 15 bp, Homo sapiens
agccaaattacaagc

SEQ ID NO: 851036 - DNA, 15 bp, Homo sapiens
gccaaattacaagca

SEQ ID NO: 851037 - DNA, 15 bp, Homo sapiens
ccaaattacaagcag

SEQ ID NO: 851038 - DNA, 15 bp, Homo sapiens
caaattacaagcagc

SEQ ID NO: 851039 - DNA, 15 bp, Homo sapiens
aaattacaagcagcc

SEQ ID NO: 851040 - DNA, 15 bp, Homo sapiens
aattacaagcagcct

SEQ ID NO: 851041 - DNA, 15 bp, Homo sapiens
attacaagcagccta

SEQ ID NO: 851042 - DNA, 15 bp, Homo sapiens
ttacaagcagcctat

SEQ ID NO: 851043 - DNA, 15 bp, Homo sapiens
tacaagcagcctatt

SEQ ID NO: 851044 - DNA, 15 bp, Homo sapiens
acaagcagcctattg

SEQ ID NO: 851045 - DNA, 15 bp, Homo sapiens
caagcagcctattgt

SEQ ID NO: 851046 - DNA, 15 bp, Homo sapiens
aagcagcctattgtg

SEQ ID NO: 851047 - DNA, 15 bp, Homo sapiens
agcagcctattgtgt

SEQ ID NO: 851048 - DNA, 15 bp, Homo sapiens
gcagcctattgtgta

SEQ ID NO: 851049 - DNA, 15 bp, Homo sapiens
cagcctattgtgtac

SEQ ID NO: 851050 - DNA, 15 bp, Homo sapiens
agcctattgtgtacc

SEQ ID NO: 851051 - DNA, 15 bp, Homo sapiens
gcctattgtgtacca

SEQ ID NO: 851052 - DNA, 15 bp, Homo sapiens
cctattgtgtaccat

SEQ ID NO: 851053 - DNA, 15 bp, Homo sapiens
ctattgtgtaccata

SEQ ID NO: 851054 - DNA, 15 bp, Homo sapiens
tattgtgtaccatat

SEQ ID NO: 851055 - DNA, 15 bp, Homo sapiens
attgtgtaccatatg

SEQ ID NO: 851056 - DNA, 15 bp, Homo sapiens
ttgtgtaccatatgt

SEQ ID NO: 851057 - DNA, 15 bp, Homo sapiens
tgtgtaccatatgtg

SEQ ID NO: 851058 - DNA, 15 bp, Homo sapiens
gtgtaccatatgtgc

SEQ ID NO: 851059 - DNA, 15 bp, Homo sapiens
tgtaccatatgtgct

SEQ ID NO: 851060 - DNA, 15 bp, Homo sapiens
gtaccatatgtgctt

SEQ ID NO: 851061 - DNA, 15 bp, Homo sapiens
taccatatgtgcttc

SEQ ID NO: 851062 - DNA, 15 bp, Homo sapiens
accatatgtgcttct

SEQ ID NO: 851063 - DNA, 15 bp, Homo sapiens
ccatatgtgcttctc

SEQ ID NO: 851064 - DNA, 15 bp, Homo sapiens
catatgtgcttctcc

SEQ ID NO: 851065 - DNA, 15 bp, Homo sapiens
atatgtgcttctccc

SEQ ID NO: 851066 - DNA, 15 bp, Homo sapiens
tatgtgcttctcccg

SEQ ID NO: 851067 - DNA, 15 bp, Homo sapiens
atgtgcttctcccgg

SEQ ID NO: 851068 - DNA, 15 bp, Homo sapiens
tgtgcttctcccggt

SEQ ID NO: 851069 - DNA, 15 bp, Homo sapiens
gtgcttctcccggtg

SEQ ID NO: 851070 - DNA, 15 bp, Homo sapiens
tgcttctcccggtgc

SEQ ID NO: 851071 - DNA, 15 bp, Homo sapiens
gcttctcccggtgca

SEQ ID NO: 851072 - DNA, 15 bp, Homo sapiens
cttctcccggtgcaa

SEQ ID NO: 851073 - DNA, 15 bp, Homo sapiens
ttctcccggtgcaac

SEQ ID NO: 851074 - DNA, 15 bp, Homo sapiens
tctcccggtgcaacc

SEQ ID NO: 851075 - DNA, 15 bp, Homo sapiens
ctcccggtgcaacca

SEQ ID NO: 851076 - DNA, 15 bp, Homo sapiens
tcccggtgcaaccaa

SEQ ID NO: 851077 - DNA, 15 bp, Homo sapiens
cccggtgcaaccaaa

SEQ ID NO: 851078 - DNA, 15 bp, Homo sapiens
ccggtgcaaccaaaa

SEQ ID NO: 851079 - DNA, 15 bp, Homo sapiens
cggtgcaaccaaaat

SEQ ID NO: 851080 - DNA, 15 bp, Homo sapiens
ggtgcaaccaaaatc

SEQ ID NO: 851081 - DNA, 15 bp, Homo sapiens
gtgcaaccaaaatcc

SEQ ID NO: 851082 - DNA, 15 bp, Homo sapiens
tgcaaccaaaatcca

SEQ ID NO: 851083 - DNA, 15 bp, Homo sapiens
gcaaccaaaatccag

SEQ ID NO: 851084 - DNA, 15 bp, Homo sapiens
caaccaaaatccagg

SEQ ID NO: 851085 - DNA, 15 bp, Homo sapiens
aaccaaaatccaggt

SEQ ID NO: 851086 - DNA, 15 bp, Homo sapiens
accaaaatccaggtg

SEQ ID NO: 851087 - DNA, 15 bp, Homo sapiens
ccaaaatccaggtgg

SEQ ID NO: 851088 - DNA, 15 bp, Homo sapiens
caaaatccaggtggc

SEQ ID NO: 851089 - DNA, 15 bp, Homo sapiens
aaaatccaggtggca

SEQ ID NO: 851090 - DNA, 15 bp, Homo sapiens
aaatccaggtggcag

SEQ ID NO: 851091 - DNA, 15 bp, Homo sapiens
aatccaggtggcaga

SEQ ID NO: 851092 - DNA, 15 bp, Homo sapiens
atccaggtggcagaa

SEQ ID NO: 851093 - DNA, 15 bp, Homo sapiens
tccaggtggcagaat

SEQ ID NO: 851094 - DNA, 15 bp, Homo sapiens
ccaggtggcagaata

SEQ ID NO: 851095 - DNA, 15 bp, Homo sapiens
caggtggcagaatat

SEQ ID NO: 851096 - DNA, 15 bp, Homo sapiens
aggtggcagaatatc

SEQ ID NO: 851097 - DNA, 15 bp, Homo sapiens
ggtggcagaatatca

SEQ ID NO: 851098 - DNA, 15 bp, Homo sapiens
gtggcagaatatcag

SEQ ID NO: 851099 - DNA, 15 bp, Homo sapiens
tggcagaatatcagc

SEQ ID NO: 851100 - DNA, 15 bp, Homo sapiens
ggcagaatatcagct

SEQ ID NO: 851101 - DNA, 15 bp, Homo sapiens
gcagaatatcagctt

SEQ ID NO: 851102 - DNA, 15 bp, Homo sapiens
cagaatatcagcttc

SEQ ID NO: 851103 - DNA, 15 bp, Homo sapiens
agaatatcagcttca

SEQ ID NO: 851104 - DNA, 15 bp, Homo sapiens
gaatatcagcttcat

SEQ ID NO: 851105 - DNA, 15 bp, Homo sapiens
aatatcagcttcatg

SEQ ID NO: 851106 - DNA, 15 bp, Homo sapiens
atatcagcttcatgt

SEQ ID NO: 851107 - DNA, 15 bp, Homo sapiens
tatcagcttcatgta

SEQ ID NO: 851108 - DNA, 15 bp, Homo sapiens
atcagcttcatgtaa

SEQ ID NO: 851109 - DNA, 15 bp, Homo sapiens
tcagcttcatgtaaa

SEQ ID NO: 851110 - DNA, 15 bp, Homo sapiens
cagcttcatgtaaat

SEQ ID NO: 851111 - DNA, 15 bp, Homo sapiens
agcttcatgtaaatg

SEQ ID NO: 851112 - DNA, 15 bp, Homo sapiens
gcttcatgtaaatga

SEQ ID NO: 851113 - DNA, 15 bp, Homo sapiens
cttcatgtaaatgag

SEQ ID NO: 851114 - DNA, 15 bp, Homo sapiens
ttcatgtaaatgagc

SEQ ID NO: 851115 - DNA, 15 bp, Homo sapiens
tcatgtaaatgagcc

SEQ ID NO: 851116 - DNA, 15 bp, Homo sapiens
catgtaaatgagcca

SEQ ID NO: 851117 - DNA, 15 bp, Homo sapiens
atgtaaatgagccag

SEQ ID NO: 851118 - DNA, 15 bp, Homo sapiens
tgtaaatgagccagg

SEQ ID NO: 851119 - DNA, 15 bp, Homo sapiens
gtaaatgagccagga

SEQ ID NO: 851120 - DNA, 15 bp, Homo sapiens
taaatgagccaggag

SEQ ID NO: 851121 - DNA, 15 bp, Homo sapiens
aaatgagccaggaga

SEQ ID NO: 851122 - DNA, 15 bp, Homo sapiens
aatgagccaggagag

SEQ ID NO: 851123 - DNA, 15 bp, Homo sapiens
atgagccaggagagt

SEQ ID NO: 851124 - DNA, 15 bp, Homo sapiens
tgagccaggagagtg

SEQ ID NO: 851125 - DNA, 15 bp, Homo sapiens
gagccaggagagtgg

SEQ ID NO: 851126 - DNA, 15 bp, Homo sapiens
agccaggagagtgga

SEQ ID NO: 851127 - DNA, 15 bp, Homo sapiens
gccaggagagtggag

SEQ ID NO: 851128 - DNA, 15 bp, Homo sapiens
ccaggagagtggagc

SEQ ID NO: 851129 - DNA, 15 bp, Homo sapiens
caggagagtggagct

SEQ ID NO: 851130 - DNA, 15 bp, Homo sapiens
aggagagtggagctc

SEQ ID NO: 851131 - DNA, 15 bp, Homo sapiens
ggagagtggagctca

SEQ ID NO: 851132 - DNA, 15 bp, Homo sapiens
gagagtggagctcag

SEQ ID NO: 851133 - DNA, 15 bp, Homo sapiens
agagtggagctcaga

SEQ ID NO: 851134 - DNA, 15 bp, Homo sapiens
gagtggagctcagag

SEQ ID NO: 851135 - DNA, 15 bp, Homo sapiens
agtggagctcagagg

SEQ ID NO: 851136 - DNA, 15 bp, Homo sapiens
gtggagctcagaggc

SEQ ID NO: 851137 - DNA, 15 bp, Homo sapiens
tggagctcagaggca

SEQ ID NO: 851138 - DNA, 15 bp, Homo sapiens
ggagctcagaggcag

SEQ ID NO: 851139 - DNA, 15 bp, Homo sapiens
gagctcagaggcagg

SEQ ID NO: 851140 - DNA, 15 bp, Homo sapiens
agctcagaggcagga

SEQ ID NO: 851141 - DNA, 15 bp, Homo sapiens
gctcagaggcaggag

SEQ ID NO: 851142 - DNA, 15 bp, Homo sapiens
ctcagaggcaggagc

SEQ ID NO: 851143 - DNA, 15 bp, Homo sapiens
tcagaggcaggagct

SEQ ID NO: 851144 - DNA, 15 bp, Homo sapiens
cagaggcaggagctc

SEQ ID NO: 851145 - DNA, 15 bp, Homo sapiens
agaggcaggagctct

SEQ ID NO: 851146 - DNA, 15 bp, Homo sapiens
gaggcaggagctctc

SEQ ID NO: 851147 - DNA, 15 bp, Homo sapiens
aggcaggagctctct

SEQ ID NO: 851148 - DNA, 15 bp, Homo sapiens
ggcaggagctctctt

SEQ ID NO: 851149 - DNA, 15 bp, Homo sapiens
gcaggagctctcttt

SEQ ID NO: 851150 - DNA, 15 bp, Homo sapiens
caggagctctcttta

SEQ ID NO: 851151 - DNA, 15 bp, Homo sapiens
aggagctctctttat

SEQ ID NO: 851152 - DNA, 15 bp, Homo sapiens
ggagctctctttatt

SEQ ID NO: 851153 - DNA, 15 bp, Homo sapiens
gagctctctttattt

SEQ ID NO: 851154 - DNA, 15 bp, Homo sapiens
agctctctttattta

SEQ ID NO: 851155 - DNA, 15 bp, Homo sapiens
gctctctttatttat

SEQ ID NO: 851156 - DNA, 15 bp, Homo sapiens
ctctctttatttatt

SEQ ID NO: 851157 - DNA, 15 bp, Homo sapiens
tctctttatttattt

SEQ ID NO: 851158 - DNA, 15 bp, Homo sapiens
ctctttatttattta

SEQ ID NO: 851159 - DNA, 15 bp, Homo sapiens
tctttatttatttat

SEQ ID NO: 851160 - DNA, 15 bp, Homo sapiens
ctttatttatttatt

SEQ ID NO: 851161 - DNA, 15 bp, Homo sapiens
atttatttattttac

SEQ ID NO: 851162 - DNA, 15 bp, Homo sapiens
tttatttattttaca

SEQ ID NO: 851163 - DNA, 15 bp, Homo sapiens
ttatttattttacac

SEQ ID NO: 851164 - DNA, 15 bp, Homo sapiens
tatttattttacact

SEQ ID NO: 851165 - DNA, 15 bp, Homo sapiens
atttattttacactt

SEQ ID NO: 851166 - DNA, 15 bp, Homo sapiens
tttattttacactta

SEQ ID NO: 851167 - DNA, 15 bp, Homo sapiens
ttattttacacttaa

SEQ ID NO: 851168 - DNA, 15 bp, Homo sapiens
tattttacacttaat

SEQ ID NO: 851169 - DNA, 15 bp, Homo sapiens
attttacacttaatt

SEQ ID NO: 851170 - DNA, 15 bp, Homo sapiens
ttttacacttaatta

SEQ ID NO: 851171 - DNA, 15 bp, Homo sapiens
tttacacttaattat

SEQ ID NO: 851172 - DNA, 15 bp, Homo sapiens
ttacacttaattatg

SEQ ID NO: 851173 - DNA, 15 bp, Homo sapiens
tacacttaattatgt

SEQ ID NO: 851174 - DNA, 15 bp, Homo sapiens
acacttaattatgtg

SEQ ID NO: 851175 - DNA, 15 bp, Homo sapiens
cacttaattatgtgc

SEQ ID NO: 851176 - DNA, 15 bp, Homo sapiens
acttaattatgtgca

SEQ ID NO: 851177 - DNA, 15 bp, Homo sapiens
cttaattatgtgcaa

SEQ ID NO: 851178 - DNA, 15 bp, Homo sapiens
ttaattatgtgcaaa

SEQ ID NO: 851179 - DNA, 15 bp, Homo sapiens
taattatgtgcaaat

SEQ ID NO: 851180 - DNA, 15 bp, Homo sapiens
aattatgtgcaaatc

SEQ ID NO: 851181 - DNA, 15 bp, Homo sapiens
attatgtgcaaatca

SEQ ID NO: 851182 - DNA, 15 bp, Homo sapiens
ttatgtgcaaatcag

SEQ ID NO: 851183 - DNA, 15 bp, Homo sapiens
tatgtgcaaatcaga

SEQ ID NO: 851184 - DNA, 15 bp, Homo sapiens
atgtgcaaatcagac

SEQ ID NO: 851185 - DNA, 15 bp, Homo sapiens
tgtgcaaatcagact

SEQ ID NO: 851186 - DNA, 15 bp, Homo sapiens
gtgcaaatcagactg

SEQ ID NO: 851187 - DNA, 15 bp, Homo sapiens
tgcaaatcagactga

SEQ ID NO: 851188 - DNA, 15 bp, Homo sapiens
gcaaatcagactgat

SEQ ID NO: 851189 - DNA, 15 bp, Homo sapiens
caaatcagactgatg

SEQ ID NO: 851190 - DNA, 15 bp, Homo sapiens
aaatcagactgatga

SEQ ID NO: 851191 - DNA, 15 bp, Homo sapiens
aatcagactgatgag

SEQ ID NO: 851192 - DNA, 15 bp, Homo sapiens
atcagactgatgagg

SEQ ID NO: 851193 - DNA, 15 bp, Homo sapiens
tcagactgatgaggg

SEQ ID NO: 851194 - DNA, 15 bp, Homo sapiens
cagactgatgaggga

SEQ ID NO: 851195 - DNA, 15 bp, Homo sapiens
agactgatgagggac

SEQ ID NO: 851196 - DNA, 15 bp, Homo sapiens
gactgatgagggact

SEQ ID NO: 851197 - DNA, 15 bp, Homo sapiens
actgatgagggactg

SEQ ID NO: 851198 - DNA, 15 bp, Homo sapiens
ctgatgagggactgg

SEQ ID NO: 851199 - DNA, 15 bp, Homo sapiens
tgatgagggactggg

SEQ ID NO: 851200 - DNA, 15 bp, Homo sapiens
gatgagggactgggt

SEQ ID NO: 851201 - DNA, 15 bp, Homo sapiens
atgagggactgggtc

SEQ ID NO: 851202 - DNA, 15 bp, Homo sapiens
tgagggactgggtct

SEQ ID NO: 851203 - DNA, 15 bp, Homo sapiens
gagggactgggtctg

SEQ ID NO: 851204 - DNA, 15 bp, Homo sapiens
agggactgggtctgg

SEQ ID NO: 851205 - DNA, 15 bp, Homo sapiens
gggactgggtctggt

SEQ ID NO: 851206 - DNA, 15 bp, Homo sapiens
ggactgggtctggtt

SEQ ID NO: 851207 - DNA, 15 bp, Homo sapiens
gactgggtctggttg

SEQ ID NO: 851208 - DNA, 15 bp, Homo sapiens
actgggtctggttga

SEQ ID NO: 851209 - DNA, 15 bp, Homo sapiens
ctgggtctggttgaa

SEQ ID NO: 851210 - DNA, 15 bp, Homo sapiens
tgggtctggttgaaa

SEQ ID NO: 851211 - DNA, 15 bp, Homo sapiens
gggtctggttgaaat

SEQ ID NO: 851212 - DNA, 15 bp, Homo sapiens
ggtctggttgaaata

SEQ ID NO: 851213 - DNA, 15 bp, Homo sapiens
gtctggttgaaatag

SEQ ID NO: 851214 - DNA, 15 bp, Homo sapiens
tctggttgaaataga

SEQ ID NO: 851215 - DNA, 15 bp, Homo sapiens
ctggttgaaatagat

SEQ ID NO: 851216 - DNA, 15 bp, Homo sapiens
tggttgaaatagata

SEQ ID NO: 851217 - DNA, 15 bp, Homo sapiens
ggttgaaatagataa

SEQ ID NO: 851218 - DNA, 15 bp, Homo sapiens
gttgaaatagataac

SEQ ID NO: 851219 - DNA, 15 bp, Homo sapiens
ttgaaatagataaca

SEQ ID NO: 851220 - DNA, 15 bp, Homo sapiens
tgaaatagataacat

SEQ ID NO: 851221 - DNA, 15 bp, Homo sapiens
gaaatagataacatc

SEQ ID NO: 851222 - DNA, 15 bp, Homo sapiens
aaatagataacatcc

SEQ ID NO: 851223 - DNA, 15 bp, Homo sapiens
aatagataacatccc

SEQ ID NO: 851224 - DNA, 15 bp, Homo sapiens
atagataacatccca

SEQ ID NO: 851225 - DNA, 15 bp, Homo sapiens
tagataacatcccag

SEQ ID NO: 851226 - DNA, 15 bp, Homo sapiens
agataacatcccagt

SEQ ID NO: 851227 - DNA, 15 bp, Homo sapiens
gataacatcccagtc

SEQ ID NO: 851228 - DNA, 15 bp, Homo sapiens
ataacatcccagtca

SEQ ID NO: 851229 - DNA, 15 bp, Homo sapiens
taacatcccagtcaa

SEQ ID NO: 851230 - DNA, 15 bp, Homo sapiens
aacatcccagtcaat

SEQ ID NO: 851231 - DNA, 15 bp, Homo sapiens
acatcccagtcaata

SEQ ID NO: 851232 - DNA, 15 bp, Homo sapiens
catcccagtcaatat

SEQ ID NO: 851233 - DNA, 15 bp, Homo sapiens
atcccagtcaatatg

SEQ ID NO: 851234 - DNA, 15 bp, Homo sapiens
tcccagtcaatatgt

SEQ ID NO: 851235 - DNA, 15 bp, Homo sapiens
cccagtcaatatgtg

SEQ ID NO: 851236 - DNA, 15 bp, Homo sapiens
ccagtcaatatgtga

SEQ ID NO: 851237 - DNA, 15 bp, Homo sapiens
cagtcaatatgtgag

SEQ ID NO: 851238 - DNA, 15 bp, Homo sapiens
agtcaatatgtgagt

SEQ ID NO: 851239 - DNA, 15 bp, Homo sapiens
gtcaatatgtgagtt

SEQ ID NO: 851240 - DNA, 15 bp, Homo sapiens
tcaatatgtgagttc

SEQ ID NO: 851241 - DNA, 15 bp, Homo sapiens
caatatgtgagttca

SEQ ID NO: 851242 - DNA, 15 bp, Homo sapiens
aatatgtgagttcac

SEQ ID NO: 851243 - DNA, 15 bp, Homo sapiens
atatgtgagttcaca

SEQ ID NO: 851244 - DNA, 15 bp, Homo sapiens
tatgtgagttcacac

SEQ ID NO: 851245 - DNA, 15 bp, Homo sapiens
atgtgagttcacact

SEQ ID NO: 851246 - DNA, 15 bp, Homo sapiens
tgtgagttcacactg

SEQ ID NO: 851247 - DNA, 15 bp, Homo sapiens
gtgagttcacactgg

SEQ ID NO: 851248 - DNA, 15 bp, Homo sapiens
tgagttcacactgga

SEQ ID NO: 851249 - DNA, 15 bp, Homo sapiens
gagttcacactggag

SEQ ID NO: 851250 - DNA, 15 bp, Homo sapiens
agttcacactggagg

SEQ ID NO: 851251 - DNA, 15 bp, Homo sapiens
gttcacactggaggt

SEQ ID NO: 851252 - DNA, 15 bp, Homo sapiens
ttcacactggaggtg

SEQ ID NO: 851253 - DNA, 15 bp, Homo sapiens
tcacactggaggtgg

SEQ ID NO: 851254 - DNA, 15 bp, Homo sapiens
cacactggaggtggg

SEQ ID NO: 851255 - DNA, 15 bp, Homo sapiens
acactggaggtggga

SEQ ID NO: 851256 - DNA, 15 bp, Homo sapiens
cactggaggtgggaa

SEQ ID NO: 851257 - DNA, 15 bp, Homo sapiens
actggaggtgggaag

SEQ ID NO: 851258 - DNA, 15 bp, Homo sapiens
ctggaggtgggaagc

SEQ ID NO: 851259 - DNA, 15 bp, Homo sapiens
tggaggtgggaagca

SEQ ID NO: 851260 - DNA, 15 bp, Homo sapiens
ggaggtgggaagcat

SEQ ID NO: 851261 - DNA, 15 bp, Homo sapiens
gaggtgggaagcatc

SEQ ID NO: 851262 - DNA, 15 bp, Homo sapiens
aggtgggaagcatcg

SEQ ID NO: 851263 - DNA, 15 bp, Homo sapiens
ggtgggaagcatcgt

SEQ ID NO: 851264 - DNA, 15 bp, Homo sapiens
gtgggaagcatcgtg

SEQ ID NO: 851265 - DNA, 15 bp, Homo sapiens
tgggaagcatcgtgc

SEQ ID NO: 851266 - DNA, 15 bp, Homo sapiens
gggaagcatcgtgct

SEQ ID NO: 851267 - DNA, 15 bp, Homo sapiens
ggaagcatcgtgcta

SEQ ID NO: 851268 - DNA, 15 bp, Homo sapiens
gaagcatcgtgctaa

SEQ ID NO: 851269 - DNA, 15 bp, Homo sapiens
aagcatcgtgctaac

SEQ ID NO: 851270 - DNA, 15 bp, Homo sapiens
agcatcgtgctaaca

SEQ ID NO: 851271 - DNA, 15 bp, Homo sapiens
gcatcgtgctaacaa

SEQ ID NO: 851272 - DNA, 15 bp, Homo sapiens
catcgtgctaacaag

SEQ ID NO: 851273 - DNA, 15 bp, Homo sapiens
atcgtgctaacaaga

SEQ ID NO: 851274 - DNA, 15 bp, Homo sapiens
tcgtgctaacaagaa

SEQ ID NO: 851275 - DNA, 15 bp, Homo sapiens
cgtgctaacaagaaa

SEQ ID NO: 851276 - DNA, 15 bp, Homo sapiens
gtgctaacaagaaat

SEQ ID NO: 851277 - DNA, 15 bp, Homo sapiens
tgctaacaagaaatt

SEQ ID NO: 851278 - DNA, 15 bp, Homo sapiens
gctaacaagaaattt

SEQ ID NO: 851279 - DNA, 15 bp, Homo sapiens
ctaacaagaaatttt

SEQ ID NO: 851280 - DNA, 15 bp, Homo sapiens
taacaagaaattttg

SEQ ID NO: 851281 - DNA, 15 bp, Homo sapiens
aacaagaaattttgc

SEQ ID NO: 851282 - DNA, 15 bp, Homo sapiens
acaagaaattttgct

SEQ ID NO: 851283 - DNA, 15 bp, Homo sapiens
caagaaattttgctg

SEQ ID NO: 851284 - DNA, 15 bp, Homo sapiens
aagaaattttgctga

SEQ ID NO: 851285 - DNA, 15 bp, Homo sapiens
agaaattttgctgat

SEQ ID NO: 851286 - DNA, 15 bp, Homo sapiens
gaaattttgctgatg

SEQ ID NO: 851287 - DNA, 15 bp, Homo sapiens
aaattttgctgatgg

SEQ ID NO: 851288 - DNA, 15 bp, Homo sapiens
aattttgctgatgga

SEQ ID NO: 851289 - DNA, 15 bp, Homo sapiens
attttgctgatggag

SEQ ID NO: 851290 - DNA, 15 bp, Homo sapiens
ttttgctgatggagt

SEQ ID NO: 851291 - DNA, 15 bp, Homo sapiens
tttgctgatggagta

SEQ ID NO: 851292 - DNA, 15 bp, Homo sapiens
ttgctgatggagtac

SEQ ID NO: 851293 - DNA, 15 bp, Homo sapiens
tgctgatggagtact

SEQ ID NO: 851294 - DNA, 15 bp, Homo sapiens
gctgatggagtactg

SEQ ID NO: 851295 - DNA, 15 bp, Homo sapiens
ctgatggagtactgt

SEQ ID NO: 851296 - DNA, 15 bp, Homo sapiens
tgatggagtactgta

SEQ ID NO: 851297 - DNA, 15 bp, Homo sapiens
gatggagtactgtac

SEQ ID NO: 851298 - DNA, 15 bp, Homo sapiens
atggagtactgtaca

SEQ ID NO: 851299 - DNA, 15 bp, Homo sapiens
tggagtactgtacac

SEQ ID NO: 851300 - DNA, 15 bp, Homo sapiens
ggagtactgtacacc

SEQ ID NO: 851301 - DNA, 15 bp, Homo sapiens
gagtactgtacacct

SEQ ID NO: 851302 - DNA, 15 bp, Homo sapiens
agtactgtacacctt

SEQ ID NO: 851303 - DNA, 15 bp, Homo sapiens
gtactgtacacctta

SEQ ID NO: 851304 - DNA, 15 bp, Homo sapiens
tactgtacaccttac

SEQ ID NO: 851305 - DNA, 15 bp, Homo sapiens
actgtacaccttaca

SEQ ID NO: 851306 - DNA, 15 bp, Homo sapiens
ctgtacaccttacag

SEQ ID NO: 851307 - DNA, 15 bp, Homo sapiens
tgtacaccttacaga

SEQ ID NO: 851308 - DNA, 15 bp, Homo sapiens
gtacaccttacagat

SEQ ID NO: 851309 - DNA, 15 bp, Homo sapiens
tacaccttacagata

SEQ ID NO: 851310 - DNA, 15 bp, Homo sapiens
acaccttacagataa

SEQ ID NO: 851311 - DNA, 15 bp, Homo sapiens
caccttacagataaa

SEQ ID NO: 851312 - DNA, 15 bp, Homo sapiens
accttacagataaaa

SEQ ID NO: 851313 - DNA, 15 bp, Homo sapiens
ccttacagataaaat

SEQ ID NO: 851314 - DNA, 15 bp, Homo sapiens
cttacagataaaata

SEQ ID NO: 851315 - DNA, 15 bp, Homo sapiens
ttacagataaaatag

SEQ ID NO: 851316 - DNA, 15 bp, Homo sapiens
tacagataaaataga

SEQ ID NO: 851317 - DNA, 15 bp, Homo sapiens
acagataaaatagag

SEQ ID NO: 851318 - DNA, 15 bp, Homo sapiens
cagataaaatagaga

SEQ ID NO: 851319 - DNA, 15 bp, Homo sapiens
agataaaatagagat

SEQ ID NO: 851320 - DNA, 15 bp, Homo sapiens
gataaaatagagatg

SEQ ID NO: 851321 - DNA, 15 bp, Homo sapiens
ataaaatagagatga

SEQ ID NO: 851322 - DNA, 15 bp, Homo sapiens
taaaatagagatgat

SEQ ID NO: 851323 - DNA, 15 bp, Homo sapiens
aaaatagagatgatt

SEQ ID NO: 851324 - DNA, 15 bp, Homo sapiens
aaatagagatgattt

SEQ ID NO: 851325 - DNA, 15 bp, Homo sapiens
aatagagatgatttt

SEQ ID NO: 851326 - DNA, 15 bp, Homo sapiens
atagagatgattttt

SEQ ID NO: 851327 - DNA, 15 bp, Homo sapiens
tagagatgatttttt

SEQ ID NO: 851328 - DNA, 15 bp, Homo sapiens
agagatgattttttt

SEQ ID NO: 851329 - DNA, 15 bp, Homo sapiens
gagatgatttttttg

SEQ ID NO: 851330 - DNA, 15 bp, Homo sapiens
agatgatttttttgc

SEQ ID NO: 851331 - DNA, 15 bp, Homo sapiens
gatgatttttttgct

SEQ ID NO: 851332 - DNA, 15 bp, Homo sapiens
atgatttttttgctc

SEQ ID NO: 851333 - DNA, 15 bp, Homo sapiens
tgatttttttgctcc

SEQ ID NO: 851334 - DNA, 15 bp, Homo sapiens
gatttttttgctccc

SEQ ID NO: 851335 - DNA, 15 bp, Homo sapiens
atttttttgctcccc

SEQ ID NO: 851336 - DNA, 15 bp, Homo sapiens
tttttttgctcccca

SEQ ID NO: 851337 - DNA, 15 bp, Homo sapiens
ttttttgctccccag

SEQ ID NO: 851338 - DNA, 15 bp, Homo sapiens
tttttgctccccagt

SEQ ID NO: 851339 - DNA, 15 bp, Homo sapiens
ttttgctccccagtt

SEQ ID NO: 851340 - DNA, 15 bp, Homo sapiens
tttgctccccagttc

SEQ ID NO: 851341 - DNA, 15 bp, Homo sapiens
ttgctccccagttct

SEQ ID NO: 851342 - DNA, 15 bp, Homo sapiens
tgctccccagttctt

SEQ ID NO: 851343 - DNA, 15 bp, Homo sapiens
gctccccagttcttg

SEQ ID NO: 851344 - DNA, 15 bp, Homo sapiens
ctccccagttcttgt

SEQ ID NO: 851345 - DNA, 15 bp, Homo sapiens
tccccagttcttgtc

SEQ ID NO: 851346 - DNA, 15 bp, Homo sapiens
ccccagttcttgtca

SEQ ID NO: 851347 - DNA, 15 bp, Homo sapiens
cccagttcttgtcaa

SEQ ID NO: 851348 - DNA, 15 bp, Homo sapiens
ccagttcttgtcaat

SEQ ID NO: 851349 - DNA, 15 bp, Homo sapiens
cagttcttgtcaata

SEQ ID NO: 851350 - DNA, 15 bp, Homo sapiens
agttcttgtcaatag

SEQ ID NO: 851351 - DNA, 15 bp, Homo sapiens
gttcttgtcaatagt

SEQ ID NO: 851352 - DNA, 15 bp, Homo sapiens
ttcttgtcaatagtt

SEQ ID NO: 851353 - DNA, 15 bp, Homo sapiens
tcttgtcaatagttt

SEQ ID NO: 851354 - DNA, 15 bp, Homo sapiens
cttgtcaatagtttt

SEQ ID NO: 851355 - DNA, 15 bp, Homo sapiens
ttgtcaatagttttg

SEQ ID NO: 851356 - DNA, 15 bp, Homo sapiens
tgtcaatagttttgg

SEQ ID NO: 851357 - DNA, 15 bp, Homo sapiens
gtcaatagttttgga

SEQ ID NO: 851358 - DNA, 15 bp, Homo sapiens
tcaatagttttggaa

SEQ ID NO: 851359 - DNA, 15 bp, Homo sapiens
caatagttttggaag

SEQ ID NO: 851360 - DNA, 15 bp, Homo sapiens
aatagttttggaaga

SEQ ID NO: 851361 - DNA, 15 bp, Homo sapiens
atagttttggaagaa

SEQ ID NO: 851362 - DNA, 15 bp, Homo sapiens
tagttttggaagaaa

SEQ ID NO: 851363 - DNA, 15 bp, Homo sapiens
agttttggaagaaag

SEQ ID NO: 851364 - DNA, 15 bp, Homo sapiens
gttttggaagaaaga

SEQ ID NO: 851365 - DNA, 15 bp, Homo sapiens
ttttggaagaaagag

SEQ ID NO: 851366 - DNA, 15 bp, Homo sapiens
tttggaagaaagaga

SEQ ID NO: 851367 - DNA, 15 bp, Homo sapiens
ttggaagaaagagag

SEQ ID NO: 851368 - DNA, 15 bp, Homo sapiens
tggaagaaagagagc

SEQ ID NO: 851369 - DNA, 15 bp, Homo sapiens
ggaagaaagagagct

SEQ ID NO: 851370 - DNA, 15 bp, Homo sapiens
gaagaaagagagctc

SEQ ID NO: 851371 - DNA, 15 bp, Homo sapiens
aagaaagagagctca

SEQ ID NO: 851372 - DNA, 15 bp, Homo sapiens
agaaagagagctcat

SEQ ID NO: 851373 - DNA, 15 bp, Homo sapiens
gaaagagagctcatt

SEQ ID NO: 851374 - DNA, 15 bp, Homo sapiens
aaagagagctcattg

SEQ ID NO: 851375 - DNA, 15 bp, Homo sapiens
aagagagctcattga

SEQ ID NO: 851376 - DNA, 15 bp, Homo sapiens
agagagctcattgag

SEQ ID NO: 851377 - DNA, 15 bp, Homo sapiens
gagagctcattgaga

SEQ ID NO: 851378 - DNA, 15 bp, Homo sapiens
agagctcattgagaa

SEQ ID NO: 851379 - DNA, 15 bp, Homo sapiens
gagctcattgagaaa

SEQ ID NO: 851380 - DNA, 15 bp, Homo sapiens
agctcattgagaaat

SEQ ID NO: 851381 - DNA, 15 bp, Homo sapiens
gctcattgagaaatg

SEQ ID NO: 851382 - DNA, 15 bp, Homo sapiens
ctcattgagaaatgc

SEQ ID NO: 851383 - DNA, 15 bp, Homo sapiens
tcattgagaaatgct

SEQ ID NO: 851384 - DNA, 15 bp, Homo sapiens
cattgagaaatgctc

SEQ ID NO: 851385 - DNA, 15 bp, Homo sapiens
attgagaaatgctca

SEQ ID NO: 851386 - DNA, 15 bp, Homo sapiens
ttgagaaatgctcaa

SEQ ID NO: 851387 - DNA, 15 bp, Homo sapiens
tgagaaatgctcaag

SEQ ID NO: 851388 - DNA, 15 bp, Homo sapiens
gagaaatgctcaagc

SEQ ID NO: 851389 - DNA, 15 bp, Homo sapiens
agaaatgctcaagct

SEQ ID NO: 851390 - DNA, 15 bp, Homo sapiens
gaaatgctcaagctt

SEQ ID NO: 851391 - DNA, 15 bp, Homo sapiens
aaatgctcaagcttt

SEQ ID NO: 851392 - DNA, 15 bp, Homo sapiens
aatgctcaagctttt

SEQ ID NO: 851393 - DNA, 15 bp, Homo sapiens
atgctcaagcttttg

SEQ ID NO: 851394 - DNA, 15 bp, Homo sapiens
tgctcaagcttttgt

SEQ ID NO: 851395 - DNA, 15 bp, Homo sapiens
gctcaagcttttgtt

SEQ ID NO: 851396 - DNA, 15 bp, Homo sapiens
ctcaagcttttgttc

SEQ ID NO: 851397 - DNA, 15 bp, Homo sapiens
tcaagcttttgttct

SEQ ID NO: 851398 - DNA, 15 bp, Homo sapiens
caagcttttgttctc

SEQ ID NO: 851399 - DNA, 15 bp, Homo sapiens
aagcttttgttctct

SEQ ID NO: 851400 - DNA, 15 bp, Homo sapiens
agcttttgttctctg

SEQ ID NO: 851401 - DNA, 15 bp, Homo sapiens
gcttttgttctctga

SEQ ID NO: 851402 - DNA, 15 bp, Homo sapiens
cttttgttctctgaa

SEQ ID NO: 851403 - DNA, 15 bp, Homo sapiens
ttttgttctctgaaa

SEQ ID NO: 851404 - DNA, 15 bp, Homo sapiens
tttgttctctgaaat

SEQ ID NO: 851405 - DNA, 15 bp, Homo sapiens
ttgttctctgaaatg

SEQ ID NO: 851406 - DNA, 15 bp, Homo sapiens
tgttctctgaaatga

SEQ ID NO: 851407 - DNA, 15 bp, Homo sapiens
gttctctgaaatgac

SEQ ID NO: 851408 - DNA, 15 bp, Homo sapiens
ttctctgaaatgaca

SEQ ID NO: 851409 - DNA, 15 bp, Homo sapiens
tctctgaaatgacac

SEQ ID NO: 851410 - DNA, 15 bp, Homo sapiens
ctctgaaatgacacc

SEQ ID NO: 851411 - DNA, 15 bp, Homo sapiens
tctgaaatgacaccc

SEQ ID NO: 851412 - DNA, 15 bp, Homo sapiens
ctgaaatgacaccca

SEQ ID NO: 851413 - DNA, 15 bp, Homo sapiens
tgaaatgacacccac

SEQ ID NO: 851414 - DNA, 15 bp, Homo sapiens
gaaatgacacccaca

SEQ ID NO: 851415 - DNA, 15 bp, Homo sapiens
aaatgacacccacag

SEQ ID NO: 851416 - DNA, 15 bp, Homo sapiens
aatgacacccacagt

SEQ ID NO: 851417 - DNA, 15 bp, Homo sapiens
atgacacccacagtc

SEQ ID NO: 851418 - DNA, 15 bp, Homo sapiens
tgacacccacagtct

SEQ ID NO: 851419 - DNA, 15 bp, Homo sapiens
gacacccacagtcta

SEQ ID NO: 851420 - DNA, 15 bp, Homo sapiens
acacccacagtctat

SEQ ID NO: 851421 - DNA, 15 bp, Homo sapiens
cacccacagtctatt

SEQ ID NO: 851422 - DNA, 15 bp, Homo sapiens
acccacagtctattc

SEQ ID NO: 851423 - DNA, 15 bp, Homo sapiens
cccacagtctattcc

SEQ ID NO: 851424 - DNA, 15 bp, Homo sapiens
ccacagtctattcct

SEQ ID NO: 851425 - DNA, 15 bp, Homo sapiens
cacagtctattcctc

SEQ ID NO: 851426 - DNA, 15 bp, Homo sapiens
acagtctattcctct

SEQ ID NO: 851427 - DNA, 15 bp, Homo sapiens
cagtctattcctcta

SEQ ID NO: 851428 - DNA, 15 bp, Homo sapiens
agtctattcctctat

SEQ ID NO: 851429 - DNA, 15 bp, Homo sapiens
gtctattcctctata

SEQ ID NO: 851430 - DNA, 15 bp, Homo sapiens
tctattcctctatag

SEQ ID NO: 851431 - DNA, 15 bp, Homo sapiens
ctattcctctatagt

SEQ ID NO: 851432 - DNA, 15 bp, Homo sapiens
tattcctctatagtt

SEQ ID NO: 851433 - DNA, 15 bp, Homo sapiens
attcctctatagttc

SEQ ID NO: 851434 - DNA, 15 bp, Homo sapiens
ttcctctatagttca

SEQ ID NO: 851435 - DNA, 15 bp, Homo sapiens
tcctctatagttcat

SEQ ID NO: 851436 - DNA, 15 bp, Homo sapiens
cctctatagttcata

SEQ ID NO: 851437 - DNA, 15 bp, Homo sapiens
ctctatagttcatat

SEQ ID NO: 851438 - DNA, 15 bp, Homo sapiens
tctatagttcatatt

SEQ ID NO: 851439 - DNA, 15 bp, Homo sapiens
ctatagttcatattt

SEQ ID NO: 851440 - DNA, 15 bp, Homo sapiens
tatagttcatatttt

SEQ ID NO: 851441 - DNA, 15 bp, Homo sapiens
atagttcatattttt

SEQ ID NO: 851442 - DNA, 15 bp, Homo sapiens
tagttcatatttttg

SEQ ID NO: 851443 - DNA, 15 bp, Homo sapiens
agttcatatttttga

SEQ ID NO: 851444 - DNA, 15 bp, Homo sapiens
gttcatatttttgat

SEQ ID NO: 851445 - DNA, 15 bp, Homo sapiens
ttcatatttttgatc

SEQ ID NO: 851446 - DNA, 15 bp, Homo sapiens
tcatatttttgatcc

SEQ ID NO: 851447 - DNA, 15 bp, Homo sapiens
catatttttgatcct

SEQ ID NO: 851448 - DNA, 15 bp, Homo sapiens
atatttttgatcctg

SEQ ID NO: 851449 - DNA, 15 bp, Homo sapiens
tatttttgatcctgc

SEQ ID NO: 851450 - DNA, 15 bp, Homo sapiens
atttttgatcctgca

SEQ ID NO: 851451 - DNA, 15 bp, Homo sapiens
tttttgatcctgcag

SEQ ID NO: 851452 - DNA, 15 bp, Homo sapiens
ttttgatcctgcaga

SEQ ID NO: 851453 - DNA, 15 bp, Homo sapiens
tttgatcctgcagat

SEQ ID NO: 851454 - DNA, 15 bp, Homo sapiens
ttgatcctgcagatg

SEQ ID NO: 851455 - DNA, 15 bp, Homo sapiens
tgatcctgcagatgc

SEQ ID NO: 851456 - DNA, 15 bp, Homo sapiens
gatcctgcagatgcc

SEQ ID NO: 851457 - DNA, 15 bp, Homo sapiens
atcctgcagatgccc

SEQ ID NO: 851458 - DNA, 15 bp, Homo sapiens
tcctgcagatgccca

SEQ ID NO: 851459 - DNA, 15 bp, Homo sapiens
cctgcagatgcccaa

SEQ ID NO: 851460 - DNA, 15 bp, Homo sapiens
ctgcagatgcccaaa

SEQ ID NO: 851461 - DNA, 15 bp, Homo sapiens
tgcagatgcccaaat

SEQ ID NO: 851462 - DNA, 15 bp, Homo sapiens
gcagatgcccaaatg

SEQ ID NO: 851463 - DNA, 15 bp, Homo sapiens
cagatgcccaaatgt

SEQ ID NO: 851464 - DNA, 15 bp, Homo sapiens
agatgcccaaatgta

SEQ ID NO: 851465 - DNA, 15 bp, Homo sapiens
gatgcccaaatgtag

SEQ ID NO: 851466 - DNA, 15 bp, Homo sapiens
atgcccaaatgtaga

SEQ ID NO: 851467 - DNA, 15 bp, Homo sapiens
tgcccaaatgtagag

SEQ ID NO: 851468 - DNA, 15 bp, Homo sapiens
gcccaaatgtagagt

SEQ ID NO: 851469 - DNA, 15 bp, Homo sapiens
cccaaatgtagagtg

SEQ ID NO: 851470 - DNA, 15 bp, Homo sapiens
ccaaatgtagagtgc

SEQ ID NO: 851471 - DNA, 15 bp, Homo sapiens
caaatgtagagtgca

SEQ ID NO: 851472 - DNA, 15 bp, Homo sapiens
aaatgtagagtgcag

SEQ ID NO: 851473 - DNA, 15 bp, Homo sapiens
aatgtagagtgcaga

SEQ ID NO: 851474 - DNA, 15 bp, Homo sapiens
atgtagagtgcagat

SEQ ID NO: 851475 - DNA, 15 bp, Homo sapiens
tgtagagtgcagatc

SEQ ID NO: 851476 - DNA, 15 bp, Homo sapiens
gtagagtgcagatcc

SEQ ID NO: 851477 - DNA, 15 bp, Homo sapiens
tagagtgcagatccc

SEQ ID NO: 851478 - DNA, 15 bp, Homo sapiens
agagtgcagatcccc

SEQ ID NO: 851479 - DNA, 15 bp, Homo sapiens
gagtgcagatcccct

SEQ ID NO: 851480 - DNA, 15 bp, Homo sapiens
agtgcagatcccctc

SEQ ID NO: 851481 - DNA, 15 bp, Homo sapiens
gtgcagatcccctcc

SEQ ID NO: 851482 - DNA, 15 bp, Homo sapiens
tgcagatcccctcca

SEQ ID NO: 851483 - DNA, 15 bp, Homo sapiens
gcagatcccctccaa

SEQ ID NO: 851484 - DNA, 15 bp, Homo sapiens
cagatcccctccaac

SEQ ID NO: 851485 - DNA, 15 bp, Homo sapiens
agatcccctccaaca

SEQ ID NO: 851486 - DNA, 15 bp, Homo sapiens
gatcccctccaacaa

SEQ ID NO: 851487 - DNA, 15 bp, Homo sapiens
atcccctccaacaaa

SEQ ID NO: 851488 - DNA, 15 bp, Homo sapiens
tcccctccaacaaac

SEQ ID NO: 851489 - DNA, 15 bp, Homo sapiens
cccctccaacaaaca

SEQ ID NO: 851490 - DNA, 15 bp, Homo sapiens
ccctccaacaaacac

SEQ ID NO: 851491 - DNA, 15 bp, Homo sapiens
cctccaacaaacacc

SEQ ID NO: 851492 - DNA, 15 bp, Homo sapiens
ctccaacaaacacct

SEQ ID NO: 851493 - DNA, 15 bp, Homo sapiens
tccaacaaacacctt

SEQ ID NO: 851494 - DNA, 15 bp, Homo sapiens
ccaacaaacacctta

SEQ ID NO: 851495 - DNA, 15 bp, Homo sapiens
caacaaacaccttaa

SEQ ID NO: 851496 - DNA, 15 bp, Homo sapiens
aacaaacaccttaat

SEQ ID NO: 851497 - DNA, 15 bp, Homo sapiens
acaaacaccttaata

SEQ ID NO: 851498 - DNA, 15 bp, Homo sapiens
caaacaccttaataa

SEQ ID NO: 851499 - DNA, 15 bp, Homo sapiens
aaacaccttaataac

SEQ ID NO: 851500 - DNA, 15 bp, Homo sapiens
aacaccttaataact

SEQ ID NO: 851501 - DNA, 15 bp, Homo sapiens
acaccttaataactg

SEQ ID NO: 851502 - DNA, 15 bp, Homo sapiens
caccttaataactga

SEQ ID NO: 851503 - DNA, 15 bp, Homo sapiens
accttaataactgag

SEQ ID NO: 851504 - DNA, 15 bp, Homo sapiens
ccttaataactgagc

SEQ ID NO: 851505 - DNA, 15 bp, Homo sapiens
cttaataactgagca

SEQ ID NO: 851506 - DNA, 15 bp, Homo sapiens
ttaataactgagcag

SEQ ID NO: 851507 - DNA, 15 bp, Homo sapiens
taataactgagcaga

SEQ ID NO: 851508 - DNA, 15 bp, Homo sapiens
aataactgagcagag

SEQ ID NO: 851509 - DNA, 15 bp, Homo sapiens
ataactgagcagagt

SEQ ID NO: 851510 - DNA, 15 bp, Homo sapiens
taactgagcagagta

SEQ ID NO: 851511 - DNA, 15 bp, Homo sapiens
aactgagcagagtac

SEQ ID NO: 851512 - DNA, 15 bp, Homo sapiens
actgagcagagtaca

SEQ ID NO: 851513 - DNA, 15 bp, Homo sapiens
ctgagcagagtacag

SEQ ID NO: 851514 - DNA, 15 bp, Homo sapiens
tgagcagagtacagg

SEQ ID NO: 851515 - DNA, 15 bp, Homo sapiens
gagcagagtacaggg

SEQ ID NO: 851516 - DNA, 15 bp, Homo sapiens
agcagagtacagggg

SEQ ID NO: 851517 - DNA, 15 bp, Homo sapiens
gcagagtacagggga

SEQ ID NO: 851518 - DNA, 15 bp, Homo sapiens
cagagtacaggggaa

SEQ ID NO: 851519 - DNA, 15 bp, Homo sapiens
agagtacaggggaag

SEQ ID NO: 851520 - DNA, 15 bp, Homo sapiens
gagtacaggggaaga

SEQ ID NO: 851521 - DNA, 15 bp, Homo sapiens
agtacaggggaagac

SEQ ID NO: 851522 - DNA, 15 bp, Homo sapiens
gtacaggggaagact

SEQ ID NO: 851523 - DNA, 15 bp, Homo sapiens
tacaggggaagacta

SEQ ID NO: 851524 - DNA, 15 bp, Homo sapiens
acaggggaagactag

SEQ ID NO: 851525 - DNA, 15 bp, Homo sapiens
caggggaagactaga

SEQ ID NO: 851526 - DNA, 15 bp, Homo sapiens
aggggaagactagac

SEQ ID NO: 851527 - DNA, 15 bp, Homo sapiens
ggggaagactagacg

SEQ ID NO: 851528 - DNA, 15 bp, Homo sapiens
gggaagactagacgt

SEQ ID NO: 851529 - DNA, 15 bp, Homo sapiens
ggaagactagacgtt

SEQ ID NO: 851530 - DNA, 15 bp, Homo sapiens
gaagactagacgttt

SEQ ID NO: 851531 - DNA, 15 bp, Homo sapiens
aagactagacgtttc

SEQ ID NO: 851532 - DNA, 15 bp, Homo sapiens
agactagacgtttcc

SEQ ID NO: 851533 - DNA, 15 bp, Homo sapiens
gactagacgtttcct

SEQ ID NO: 851534 - DNA, 15 bp, Homo sapiens
actagacgtttcctt

SEQ ID NO: 851535 - DNA, 15 bp, Homo sapiens
ctagacgtttccttt

SEQ ID NO: 851536 - DNA, 15 bp, Homo sapiens
tagacgtttcctttt

SEQ ID NO: 851537 - DNA, 15 bp, Homo sapiens
agacgtttcctttta

SEQ ID NO: 851538 - DNA, 15 bp, Homo sapiens
gacgtttccttttat

SEQ ID NO: 851539 - DNA, 15 bp, Homo sapiens
acgtttccttttatc

SEQ ID NO: 851540 - DNA, 15 bp, Homo sapiens
cgtttccttttatca

SEQ ID NO: 851541 - DNA, 15 bp, Homo sapiens
gtttccttttatcat

SEQ ID NO: 851542 - DNA, 15 bp, Homo sapiens
tttccttttatcatc

SEQ ID NO: 851543 - DNA, 15 bp, Homo sapiens
ttccttttatcatca

SEQ ID NO: 851544 - DNA, 15 bp, Homo sapiens
tccttttatcatcat

SEQ ID NO: 851545 - DNA, 15 bp, Homo sapiens
ccttttatcatcatt

SEQ ID NO: 851546 - DNA, 15 bp, Homo sapiens
cttttatcatcattt

SEQ ID NO: 851547 - DNA, 15 bp, Homo sapiens
ttttatcatcattta

SEQ ID NO: 851548 - DNA, 15 bp, Homo sapiens
tttatcatcatttaa

SEQ ID NO: 851549 - DNA, 15 bp, Homo sapiens
ttatcatcatttaag

SEQ ID NO: 851550 - DNA, 15 bp, Homo sapiens
tatcatcatttaagg

SEQ ID NO: 851551 - DNA, 15 bp, Homo sapiens
atcatcatttaagga

SEQ ID NO: 851552 - DNA, 15 bp, Homo sapiens
tcatcatttaaggag

SEQ ID NO: 851553 - DNA, 15 bp, Homo sapiens
catcatttaaggagt

SEQ ID NO: 851554 - DNA, 15 bp, Homo sapiens
atcatttaaggagtt

SEQ ID NO: 851555 - DNA, 15 bp, Homo sapiens
tcatttaaggagttt

SEQ ID NO: 851556 - DNA, 15 bp, Homo sapiens
catttaaggagtttt

SEQ ID NO: 851557 - DNA, 15 bp, Homo sapiens
atttaaggagttttc

SEQ ID NO: 851558 - DNA, 15 bp, Homo sapiens
tttaaggagttttcc

SEQ ID NO: 851559 - DNA, 15 bp, Homo sapiens
ttaaggagttttcct

SEQ ID NO: 851560 - DNA, 15 bp, Homo sapiens
taaggagttttcctt

SEQ ID NO: 851561 - DNA, 15 bp, Homo sapiens
aaggagttttcctta

SEQ ID NO: 851562 - DNA, 15 bp, Homo sapiens
aggagttttccttat

SEQ ID NO: 851563 - DNA, 15 bp, Homo sapiens
ggagttttccttatc

SEQ ID NO: 851564 - DNA, 15 bp, Homo sapiens
gagttttccttatct

SEQ ID NO: 851565 - DNA, 15 bp, Homo sapiens
agttttccttatctg

SEQ ID NO: 851566 - DNA, 15 bp, Homo sapiens
gttttccttatctgg

SEQ ID NO: 851567 - DNA, 15 bp, Homo sapiens
ttttccttatctggg

SEQ ID NO: 851568 - DNA, 15 bp, Homo sapiens
tttccttatctgggt

SEQ ID NO: 851569 - DNA, 15 bp, Homo sapiens
ttccttatctgggtg

SEQ ID NO: 851570 - DNA, 15 bp, Homo sapiens
tccttatctgggtga

SEQ ID NO: 851571 - DNA, 15 bp, Homo sapiens
ccttatctgggtgaa

SEQ ID NO: 851572 - DNA, 15 bp, Homo sapiens
cttatctgggtgaat

SEQ ID NO: 851573 - DNA, 15 bp, Homo sapiens
ttatctgggtgaata

SEQ ID NO: 851574 - DNA, 15 bp, Homo sapiens
tatctgggtgaataa

SEQ ID NO: 851575 - DNA, 15 bp, Homo sapiens
atctgggtgaataac

SEQ ID NO: 851576 - DNA, 15 bp, Homo sapiens
tctgggtgaataacc

SEQ ID NO: 851577 - DNA, 15 bp, Homo sapiens
ctgggtgaataaccc

SEQ ID NO: 851578 - DNA, 15 bp, Homo sapiens
tgggtgaataaccca

SEQ ID NO: 851579 - DNA, 15 bp, Homo sapiens
gggtgaataacccaa

SEQ ID NO: 851580 - DNA, 15 bp, Homo sapiens
ggtgaataacccaat

SEQ ID NO: 851581 - DNA, 15 bp, Homo sapiens
gtgaataacccaata

SEQ ID NO: 851582 - DNA, 15 bp, Homo sapiens
tgaataacccaatac

SEQ ID NO: 851583 - DNA, 15 bp, Homo sapiens
gaataacccaataca

SEQ ID NO: 851584 - DNA, 15 bp, Homo sapiens
aataacccaatacag

SEQ ID NO: 851585 - DNA, 15 bp, Homo sapiens
ataacccaatacagc

SEQ ID NO: 851586 - DNA, 15 bp, Homo sapiens
taacccaatacagcc

SEQ ID NO: 851587 - DNA, 15 bp, Homo sapiens
aacccaatacagcca

SEQ ID NO: 851588 - DNA, 15 bp, Homo sapiens
acccaatacagccag

SEQ ID NO: 851589 - DNA, 15 bp, Homo sapiens
cccaatacagccaga

SEQ ID NO: 851590 - DNA, 15 bp, Homo sapiens
ccaatacagccagac

SEQ ID NO: 851591 - DNA, 15 bp, Homo sapiens
caatacagccagact

SEQ ID NO: 851592 - DNA, 15 bp, Homo sapiens
aatacagccagactt

SEQ ID NO: 851593 - DNA, 15 bp, Homo sapiens
atacagccagacttt

SEQ ID NO: 851594 - DNA, 15 bp, Homo sapiens
tacagccagactttc

SEQ ID NO: 851595 - DNA, 15 bp, Homo sapiens
acagccagactttca

SEQ ID NO: 851596 - DNA, 15 bp, Homo sapiens
cagccagactttcaa

SEQ ID NO: 851597 - DNA, 15 bp, Homo sapiens
agccagactttcaag

SEQ ID NO: 851598 - DNA, 15 bp, Homo sapiens
gccagactttcaagt

SEQ ID NO: 851599 - DNA, 15 bp, Homo sapiens
ccagactttcaagtg

SEQ ID NO: 851600 - DNA, 15 bp, Homo sapiens
cagactttcaagtgt

SEQ ID NO: 851601 - DNA, 15 bp, Homo sapiens
agactttcaagtgta

SEQ ID NO: 851602 - DNA, 15 bp, Homo sapiens
gactttcaagtgtat

SEQ ID NO: 851603 - DNA, 15 bp, Homo sapiens
actttcaagtgtata

SEQ ID NO: 851604 - DNA, 15 bp, Homo sapiens
ctttcaagtgtatag

SEQ ID NO: 851605 - DNA, 15 bp, Homo sapiens
tttcaagtgtatagt

SEQ ID NO: 851606 - DNA, 15 bp, Homo sapiens
ttcaagtgtatagtc

SEQ ID NO: 851607 - DNA, 15 bp, Homo sapiens
tcaagtgtatagtct

SEQ ID NO: 851608 - DNA, 15 bp, Homo sapiens
caagtgtatagtctg

SEQ ID NO: 851609 - DNA, 15 bp, Homo sapiens
aagtgtatagtctgt

SEQ ID NO: 851610 - DNA, 15 bp, Homo sapiens
agtgtatagtctgtg

SEQ ID NO: 851611 - DNA, 15 bp, Homo sapiens
gtgtatagtctgtgt

SEQ ID NO: 851612 - DNA, 15 bp, Homo sapiens
tgtatagtctgtgtc

SEQ ID NO: 851613 - DNA, 15 bp, Homo sapiens
gtatagtctgtgtct

SEQ ID NO: 851614 - DNA, 15 bp, Homo sapiens
tatagtctgtgtcta

SEQ ID NO: 851615 - DNA, 15 bp, Homo sapiens
atagtctgtgtctat

SEQ ID NO: 851616 - DNA, 15 bp, Homo sapiens
tagtctgtgtctatg

SEQ ID NO: 851617 - DNA, 15 bp, Homo sapiens
agtctgtgtctatga

SEQ ID NO: 851618 - DNA, 15 bp, Homo sapiens
gtctgtgtctatgac

SEQ ID NO: 851619 - DNA, 15 bp, Homo sapiens
tctgtgtctatgaca

SEQ ID NO: 851620 - DNA, 15 bp, Homo sapiens
ctgtgtctatgacaa

SEQ ID NO: 851621 - DNA, 15 bp, Homo sapiens
tgtgtctatgacaag

SEQ ID NO: 851622 - DNA, 15 bp, Homo sapiens
gtgtctatgacaaga

SEQ ID NO: 851623 - DNA, 15 bp, Homo sapiens
tgtctatgacaagac

SEQ ID NO: 851624 - DNA, 15 bp, Homo sapiens
gtctatgacaagaca

SEQ ID NO: 851625 - DNA, 15 bp, Homo sapiens
tctatgacaagacaa

SEQ ID NO: 851626 - DNA, 15 bp, Homo sapiens
ctatgacaagacaaa

SEQ ID NO: 851627 - DNA, 15 bp, Homo sapiens
tatgacaagacaaaa

SEQ ID NO: 851628 - DNA, 15 bp, Homo sapiens
atgacaagacaaaac

SEQ ID NO: 851629 - DNA, 15 bp, Homo sapiens
tgacaagacaaaaca

SEQ ID NO: 851630 - DNA, 15 bp, Homo sapiens
gacaagacaaaacaa

SEQ ID NO: 851631 - DNA, 15 bp, Homo sapiens
acaagacaaaacaaa

SEQ ID NO: 851632 - DNA, 15 bp, Homo sapiens
caagacaaaacaaaa

SEQ ID NO: 851633 - DNA, 15 bp, Homo sapiens
aagacaaaacaaaag

SEQ ID NO: 851634 - DNA, 15 bp, Homo sapiens
agacaaaacaaaaga

SEQ ID NO: 851635 - DNA, 15 bp, Homo sapiens
gacaaaacaaaagaa

SEQ ID NO: 851636 - DNA, 15 bp, Homo sapiens
acaaaacaaaagaaa

SEQ ID NO: 851637 - DNA, 15 bp, Homo sapiens
caaaacaaaagaaaa

SEQ ID NO: 851638 - DNA, 15 bp, Homo sapiens
aaaacaaaagaaaag

SEQ ID NO: 851639 - DNA, 15 bp, Homo sapiens
aaacaaaagaaaaga

SEQ ID NO: 851640 - DNA, 15 bp, Homo sapiens
aacaaaagaaaagaa

SEQ ID NO: 851641 - DNA, 15 bp, Homo sapiens
acaaaagaaaagaaa

SEQ ID NO: 851642 - DNA, 15 bp, Homo sapiens
caaaagaaaagaaaa

SEQ ID NO: 851643 - DNA, 15 bp, Homo sapiens
aaaagaaaagaaaac

SEQ ID NO: 851644 - DNA, 15 bp, Homo sapiens
aaagaaaagaaaaca

SEQ ID NO: 851645 - DNA, 15 bp, Homo sapiens
aagaaaagaaaacac

SEQ ID NO: 851646 - DNA, 15 bp, Homo sapiens
agaaaagaaaacact

SEQ ID NO: 851647 - DNA, 15 bp, Homo sapiens
gaaaagaaaacactg

SEQ ID NO: 851648 - DNA, 15 bp, Homo sapiens
aaaagaaaacactgg

SEQ ID NO: 851649 - DNA, 15 bp, Homo sapiens
aaagaaaacactgga

SEQ ID NO: 851650 - DNA, 15 bp, Homo sapiens
aagaaaacactggat

SEQ ID NO: 851651 - DNA, 15 bp, Homo sapiens
agaaaacactggatt

SEQ ID NO: 851652 - DNA, 15 bp, Homo sapiens
gaaaacactggattg

SEQ ID NO: 851653 - DNA, 15 bp, Homo sapiens
aaaacactggattgt

SEQ ID NO: 851654 - DNA, 15 bp, Homo sapiens
aaacactggattgta

SEQ ID NO: 851655 - DNA, 15 bp, Homo sapiens
aacactggattgtaa

SEQ ID NO: 851656 - DNA, 15 bp, Homo sapiens
acactggattgtaaa

SEQ ID NO: 851657 - DNA, 15 bp, Homo sapiens
cactggattgtaaac

SEQ ID NO: 851658 - DNA, 15 bp, Homo sapiens
actggattgtaaaca

SEQ ID NO: 851659 - DNA, 15 bp, Homo sapiens
ctggattgtaaacag

SEQ ID NO: 851660 - DNA, 15 bp, Homo sapiens
tggattgtaaacaga

SEQ ID NO: 851661 - DNA, 15 bp, Homo sapiens
ggattgtaaacagat

SEQ ID NO: 851662 - DNA, 15 bp, Homo sapiens
gattgtaaacagatc

SEQ ID NO: 851663 - DNA, 15 bp, Homo sapiens
attgtaaacagatca

SEQ ID NO: 851664 - DNA, 15 bp, Homo sapiens
ttgtaaacagatcaa

SEQ ID NO: 851665 - DNA, 15 bp, Homo sapiens
tgtaaacagatcaat

SEQ ID NO: 851666 - DNA, 15 bp, Homo sapiens
gtaaacagatcaatc

SEQ ID NO: 851667 - DNA, 15 bp, Homo sapiens
taaacagatcaatcc

SEQ ID NO: 851668 - DNA, 15 bp, Homo sapiens
aaacagatcaatcca

SEQ ID NO: 851669 - DNA, 15 bp, Homo sapiens
aacagatcaatccaa

SEQ ID NO: 851670 - DNA, 15 bp, Homo sapiens
acagatcaatccaat

SEQ ID NO: 851671 - DNA, 15 bp, Homo sapiens
cagatcaatccaatg

SEQ ID NO: 851672 - DNA, 15 bp, Homo sapiens
agatcaatccaatgt

SEQ ID NO: 851673 - DNA, 15 bp, Homo sapiens
gatcaatccaatgtt

SEQ ID NO: 851674 - DNA, 15 bp, Homo sapiens
atcaatccaatgttt

SEQ ID NO: 851675 - DNA, 15 bp, Homo sapiens
tcaatccaatgtttt

SEQ ID NO: 851676 - DNA, 15 bp, Homo sapiens
caatccaatgttttc

SEQ ID NO: 851677 - DNA, 15 bp, Homo sapiens
aatccaatgttttct

SEQ ID NO: 851678 - DNA, 15 bp, Homo sapiens
atccaatgttttctg

SEQ ID NO: 851679 - DNA, 15 bp, Homo sapiens
tccaatgttttctgt

SEQ ID NO: 851680 - DNA, 15 bp, Homo sapiens
ccaatgttttctgtt

SEQ ID NO: 851681 - DNA, 15 bp, Homo sapiens
caatgttttctgtta

SEQ ID NO: 851682 - DNA, 15 bp, Homo sapiens
aatgttttctgttac

SEQ ID NO: 851683 - DNA, 15 bp, Homo sapiens
atgttttctgttacc

SEQ ID NO: 851684 - DNA, 15 bp, Homo sapiens
tgttttctgttacct

SEQ ID NO: 851685 - DNA, 15 bp, Homo sapiens
gttttctgttacctt

SEQ ID NO: 851686 - DNA, 15 bp, Homo sapiens
ttttctgttacctta

SEQ ID NO: 851687 - DNA, 15 bp, Homo sapiens
tttctgttaccttaa

SEQ ID NO: 851688 - DNA, 15 bp, Homo sapiens
ttctgttaccttaac

SEQ ID NO: 851689 - DNA, 15 bp, Homo sapiens
tctgttaccttaact

SEQ ID NO: 851690 - DNA, 15 bp, Homo sapiens
ctgttaccttaacta

SEQ ID NO: 851691 - DNA, 15 bp, Homo sapiens
tgttaccttaactac

SEQ ID NO: 851692 - DNA, 15 bp, Homo sapiens
gttaccttaactacc

SEQ ID NO: 851693 - DNA, 15 bp, Homo sapiens
ttaccttaactacca

SEQ ID NO: 851694 - DNA, 15 bp, Homo sapiens
taccttaactaccag

SEQ ID NO: 851695 - DNA, 15 bp, Homo sapiens
accttaactaccaga

SEQ ID NO: 851696 - DNA, 15 bp, Homo sapiens
ccttaactaccagat

SEQ ID NO: 851697 - DNA, 15 bp, Homo sapiens
cttaactaccagatc

SEQ ID NO: 851698 - DNA, 15 bp, Homo sapiens
ttaactaccagatca

SEQ ID NO: 851699 - DNA, 15 bp, Homo sapiens
taactaccagatcag

SEQ ID NO: 851700 - DNA, 15 bp, Homo sapiens
aactaccagatcaga

SEQ ID NO: 851701 - DNA, 15 bp, Homo sapiens
actaccagatcagat

SEQ ID NO: 851702 - DNA, 15 bp, Homo sapiens
ctaccagatcagatt

SEQ ID NO: 851703 - DNA, 15 bp, Homo sapiens
taccagatcagattg

SEQ ID NO: 851704 - DNA, 15 bp, Homo sapiens
accagatcagattgc

SEQ ID NO: 851705 - DNA, 15 bp, Homo sapiens
ccagatcagattgct

SEQ ID NO: 851706 - DNA, 15 bp, Homo sapiens
cagatcagattgctc

SEQ ID NO: 851707 - DNA, 15 bp, Homo sapiens
agatcagattgctca

SEQ ID NO: 851708 - DNA, 15 bp, Homo sapiens
gatcagattgctcac

SEQ ID NO: 851709 - DNA, 15 bp, Homo sapiens
atcagattgctcaca

SEQ ID NO: 851710 - DNA, 15 bp, Homo sapiens
tcagattgctcacaa

SEQ ID NO: 851711 - DNA, 15 bp, Homo sapiens
cagattgctcacaaa

SEQ ID NO: 851712 - DNA, 15 bp, Homo sapiens
agattgctcacaaag

SEQ ID NO: 851713 - DNA, 15 bp, Homo sapiens
gattgctcacaaagt

SEQ ID NO: 851714 - DNA, 15 bp, Homo sapiens
attgctcacaaagtc

SEQ ID NO: 851715 - DNA, 15 bp, Homo sapiens
ttgctcacaaagtca

SEQ ID NO: 851716 - DNA, 15 bp, Homo sapiens
tgctcacaaagtcaa

SEQ ID NO: 851717 - DNA, 15 bp, Homo sapiens
gctcacaaagtcaat

SEQ ID NO: 851718 - DNA, 15 bp, Homo sapiens
ctcacaaagtcaatc

SEQ ID NO: 851719 - DNA, 15 bp, Homo sapiens
tcacaaagtcaatct

SEQ ID NO: 851720 - DNA, 15 bp, Homo sapiens
cacaaagtcaatctg

SEQ ID NO: 851721 - DNA, 15 bp, Homo sapiens
acaaagtcaatctga

SEQ ID NO: 851722 - DNA, 15 bp, Homo sapiens
caaagtcaatctgat

SEQ ID NO: 851723 - DNA, 15 bp, Homo sapiens
aaagtcaatctgatc

SEQ ID NO: 851724 - DNA, 15 bp, Homo sapiens
aagtcaatctgatca

SEQ ID NO: 851725 - DNA, 15 bp, Homo sapiens
agtcaatctgatcaa

SEQ ID NO: 851726 - DNA, 15 bp, Homo sapiens
gtcaatctgatcaaa

SEQ ID NO: 851727 - DNA, 15 bp, Homo sapiens
tcaatctgatcaaat

SEQ ID NO: 851728 - DNA, 15 bp, Homo sapiens
caatctgatcaaatg

SEQ ID NO: 851729 - DNA, 15 bp, Homo sapiens
aatctgatcaaatgt

SEQ ID NO: 851730 - DNA, 15 bp, Homo sapiens
atctgatcaaatgtt

SEQ ID NO: 851731 - DNA, 15 bp, Homo sapiens
tctgatcaaatgtta

SEQ ID NO: 851732 - DNA, 15 bp, Homo sapiens
ctgatcaaatgttaa

SEQ ID NO: 851733 - DNA, 15 bp, Homo sapiens
tgatcaaatgttaag

SEQ ID NO: 851734 - DNA, 15 bp, Homo sapiens
gatcaaatgttaagc

SEQ ID NO: 851735 - DNA, 15 bp, Homo sapiens
atcaaatgttaagct

SEQ ID NO: 851736 - DNA, 15 bp, Homo sapiens
tcaaatgttaagcta

SEQ ID NO: 851737 - DNA, 15 bp, Homo sapiens
caaatgttaagctat

SEQ ID NO: 851738 - DNA, 15 bp, Homo sapiens
aaatgttaagctatt

SEQ ID NO: 851739 - DNA, 15 bp, Homo sapiens
aatgttaagctattt

SEQ ID NO: 851740 - DNA, 15 bp, Homo sapiens
atgttaagctatttt

SEQ ID NO: 851741 - DNA, 15 bp, Homo sapiens
tgttaagctattttg

SEQ ID NO: 851742 - DNA, 15 bp, Homo sapiens
gttaagctattttga

SEQ ID NO: 851743 - DNA, 15 bp, Homo sapiens
ttaagctattttgaa

SEQ ID NO: 851744 - DNA, 15 bp, Homo sapiens
taagctattttgaaa

SEQ ID NO: 851745 - DNA, 15 bp, Homo sapiens
aagctattttgaaaa

SEQ ID NO: 851746 - DNA, 15 bp, Homo sapiens
agctattttgaaaac

SEQ ID NO: 851747 - DNA, 15 bp, Homo sapiens
gctattttgaaaacc

SEQ ID NO: 851748 - DNA, 15 bp, Homo sapiens
ctattttgaaaaccc

SEQ ID NO: 851749 - DNA, 15 bp, Homo sapiens
tattttgaaaaccca

SEQ ID NO: 851750 - DNA, 15 bp, Homo sapiens
attttgaaaacccaa

SEQ ID NO: 851751 - DNA, 15 bp, Homo sapiens
ttttgaaaacccaaa

SEQ ID NO: 851752 - DNA, 15 bp, Homo sapiens
tttgaaaacccaaat

SEQ ID NO: 851753 - DNA, 15 bp, Homo sapiens
ttgaaaacccaaatc

SEQ ID NO: 851754 - DNA, 15 bp, Homo sapiens
tgaaaacccaaatca

SEQ ID NO: 851755 - DNA, 15 bp, Homo sapiens
gaaaacccaaatcaa

SEQ ID NO: 851756 - DNA, 15 bp, Homo sapiens
aaaacccaaatcaac

SEQ ID NO: 851757 - DNA, 15 bp, Homo sapiens
aaacccaaatcaacc

SEQ ID NO: 851758 - DNA, 15 bp, Homo sapiens
aacccaaatcaacca

SEQ ID NO: 851759 - DNA, 15 bp, Homo sapiens
acccaaatcaaccaa

SEQ ID NO: 851760 - DNA, 15 bp, Homo sapiens
cccaaatcaaccaaa

SEQ ID NO: 851761 - DNA, 15 bp, Homo sapiens
ccaaatcaaccaaaa

SEQ ID NO: 851762 - DNA, 15 bp, Homo sapiens
caaatcaaccaaaag

SEQ ID NO: 851763 - DNA, 15 bp, Homo sapiens
aaatcaaccaaaagg

SEQ ID NO: 851764 - DNA, 15 bp, Homo sapiens
aatcaaccaaaagga

SEQ ID NO: 851765 - DNA, 15 bp, Homo sapiens
atcaaccaaaaggaa

SEQ ID NO: 851766 - DNA, 15 bp, Homo sapiens
tcaaccaaaaggaag

SEQ ID NO: 851767 - DNA, 15 bp, Homo sapiens
caaccaaaaggaaga

SEQ ID NO: 851768 - DNA, 15 bp, Homo sapiens
aaccaaaaggaagaa

SEQ ID NO: 851769 - DNA, 15 bp, Homo sapiens
accaaaaggaagaaa

SEQ ID NO: 851770 - DNA, 15 bp, Homo sapiens
ccaaaaggaagaaaa

SEQ ID NO: 851771 - DNA, 15 bp, Homo sapiens
caaaaggaagaaaaa

SEQ ID NO: 851772 - DNA, 15 bp, Homo sapiens
aaaaggaagaaaaaa

SEQ ID NO: 851773 - DNA, 15 bp, Homo sapiens
aaaggaagaaaaaaa

SEQ ID NO: 851774 - DNA, 15 bp, Homo sapiens
aaggaagaaaaaaat

SEQ ID NO: 851775 - DNA, 15 bp, Homo sapiens
aggaagaaaaaaatg

SEQ ID NO: 851776 - DNA, 15 bp, Homo sapiens
ggaagaaaaaaatgg

SEQ ID NO: 851777 - DNA, 15 bp, Homo sapiens
gaagaaaaaaatggt

SEQ ID NO: 851778 - DNA, 15 bp, Homo sapiens
aagaaaaaaatggta

SEQ ID NO: 851779 - DNA, 15 bp, Homo sapiens
agaaaaaaatggtag

SEQ ID NO: 851780 - DNA, 15 bp, Homo sapiens
gaaaaaaatggtaga

SEQ ID NO: 851781 - DNA, 15 bp, Homo sapiens
aaaaaaatggtagat

SEQ ID NO: 851782 - DNA, 15 bp, Homo sapiens
aaaaaatggtagatt

SEQ ID NO: 851783 - DNA, 15 bp, Homo sapiens
aaaaatggtagattt

SEQ ID NO: 851784 - DNA, 15 bp, Homo sapiens
aaaatggtagatttg

SEQ ID NO: 851785 - DNA, 15 bp, Homo sapiens
aaatggtagatttgg

SEQ ID NO: 851786 - DNA, 15 bp, Homo sapiens
aatggtagatttggt

SEQ ID NO: 851787 - DNA, 15 bp, Homo sapiens
atggtagatttggtg

SEQ ID NO: 851788 - DNA, 15 bp, Homo sapiens
tggtagatttggtgg

SEQ ID NO: 851789 - DNA, 15 bp, Homo sapiens
ggtagatttggtggc

SEQ ID NO: 851790 - DNA, 15 bp, Homo sapiens
gtagatttggtggcc

SEQ ID NO: 851791 - DNA, 15 bp, Homo sapiens
tagatttggtggcca

SEQ ID NO: 851792 - DNA, 15 bp, Homo sapiens
agatttggtggccat

SEQ ID NO: 851793 - DNA, 15 bp, Homo sapiens
gatttggtggccata

SEQ ID NO: 851794 - DNA, 15 bp, Homo sapiens
atttggtggccatat

SEQ ID NO: 851795 - DNA, 15 bp, Homo sapiens
tttggtggccatatg

SEQ ID NO: 851796 - DNA, 15 bp, Homo sapiens
ttggtggccatatgt

SEQ ID NO: 851797 - DNA, 15 bp, Homo sapiens
tggtggccatatgta

SEQ ID NO: 851798 - DNA, 15 bp, Homo sapiens
ggtggccatatgtag

SEQ ID NO: 851799 - DNA, 15 bp, Homo sapiens
gtggccatatgtaga

SEQ ID NO: 851800 - DNA, 15 bp, Homo sapiens
tggccatatgtagaa

SEQ ID NO: 851801 - DNA, 15 bp, Homo sapiens
ggccatatgtagaac

SEQ ID NO: 851802 - DNA, 15 bp, Homo sapiens
gccatatgtagaaca

SEQ ID NO: 851803 - DNA, 15 bp, Homo sapiens
ccatatgtagaacat

SEQ ID NO: 851804 - DNA, 15 bp, Homo sapiens
catatgtagaacatg

SEQ ID NO: 851805 - DNA, 15 bp, Homo sapiens
atatgtagaacatgg

SEQ ID NO: 851806 - DNA, 15 bp, Homo sapiens
tatgtagaacatggc

SEQ ID NO: 851807 - DNA, 15 bp, Homo sapiens
atgtagaacatggct

SEQ ID NO: 851808 - DNA, 15 bp, Homo sapiens
tgtagaacatggctg

SEQ ID NO: 851809 - DNA, 15 bp, Homo sapiens
gtagaacatggctgt

SEQ ID NO: 851810 - DNA, 15 bp, Homo sapiens
tagaacatggctgta

SEQ ID NO: 851811 - DNA, 15 bp, Homo sapiens
agaacatggctgtag

SEQ ID NO: 851812 - DNA, 15 bp, Homo sapiens
gaacatggctgtagc

SEQ ID NO: 851813 - DNA, 15 bp, Homo sapiens
aacatggctgtagca

SEQ ID NO: 851814 - DNA, 15 bp, Homo sapiens
acatggctgtagcag

SEQ ID NO: 851815 - DNA, 15 bp, Homo sapiens
catggctgtagcagt

SEQ ID NO: 851816 - DNA, 15 bp, Homo sapiens
atggctgtagcagtt

SEQ ID NO: 851817 - DNA, 15 bp, Homo sapiens
tggctgtagcagtta

SEQ ID NO: 851818 - DNA, 15 bp, Homo sapiens
ggctgtagcagttaa

SEQ ID NO: 851819 - DNA, 15 bp, Homo sapiens
gctgtagcagttaac

SEQ ID NO: 851820 - DNA, 15 bp, Homo sapiens
ctgtagcagttaaca

SEQ ID NO: 851821 - DNA, 15 bp, Homo sapiens
tgtagcagttaacaa

SEQ ID NO: 851822 - DNA, 15 bp, Homo sapiens
gtagcagttaacaaa

SEQ ID NO: 851823 - DNA, 15 bp, Homo sapiens
tagcagttaacaaat

SEQ ID NO: 851824 - DNA, 15 bp, Homo sapiens
agcagttaacaaata

SEQ ID NO: 851825 - DNA, 15 bp, Homo sapiens
gcagttaacaaatat

SEQ ID NO: 851826 - DNA, 15 bp, Homo sapiens
cagttaacaaatatg

SEQ ID NO: 851827 - DNA, 15 bp, Homo sapiens
agttaacaaatatgt

SEQ ID NO: 851828 - DNA, 15 bp, Homo sapiens
gttaacaaatatgta

SEQ ID NO: 851829 - DNA, 15 bp, Homo sapiens
ttaacaaatatgtag

SEQ ID NO: 851830 - DNA, 15 bp, Homo sapiens
taacaaatatgtaga

SEQ ID NO: 851831 - DNA, 15 bp, Homo sapiens
aacaaatatgtagat

SEQ ID NO: 851832 - DNA, 15 bp, Homo sapiens
acaaatatgtagata

SEQ ID NO: 851833 - DNA, 15 bp, Homo sapiens
caaatatgtagatag

SEQ ID NO: 851834 - DNA, 15 bp, Homo sapiens
aaatatgtagataga

SEQ ID NO: 851835 - DNA, 15 bp, Homo sapiens
aatatgtagatagat

SEQ ID NO: 851836 - DNA, 15 bp, Homo sapiens
atatgtagatagata

SEQ ID NO: 851837 - DNA, 15 bp, Homo sapiens
tatgtagatagataa

SEQ ID NO: 851838 - DNA, 15 bp, Homo sapiens
atgtagatagataaa

SEQ ID NO: 851839 - DNA, 15 bp, Homo sapiens
tgtagatagataaat

SEQ ID NO: 851840 - DNA, 15 bp, Homo sapiens
gtagatagataaata

SEQ ID NO: 851841 - DNA, 15 bp, Homo sapiens
tagatagataaatat

SEQ ID NO: 851842 - DNA, 15 bp, Homo sapiens
agatagataaatatt

SEQ ID NO: 851843 - DNA, 15 bp, Homo sapiens
gatagataaatattt

SEQ ID NO: 851844 - DNA, 15 bp, Homo sapiens
atagataaatatttt

SEQ ID NO: 851845 - DNA, 15 bp, Homo sapiens
tagataaatattttc

SEQ ID NO: 851846 - DNA, 15 bp, Homo sapiens
agataaatattttct

SEQ ID NO: 851847 - DNA, 15 bp, Homo sapiens
gataaatattttctt

SEQ ID NO: 851848 - DNA, 15 bp, Homo sapiens
ataaatattttcttt

SEQ ID NO: 851849 - DNA, 15 bp, Homo sapiens
taaatattttctttt

SEQ ID NO: 851850 - DNA, 15 bp, Homo sapiens
aaatattttcttttt

SEQ ID NO: 851851 - DNA, 15 bp, Homo sapiens
aatattttctttttc

SEQ ID NO: 851852 - DNA, 15 bp, Homo sapiens
atattttctttttca

SEQ ID NO: 851853 - DNA, 15 bp, Homo sapiens
tattttctttttcat

SEQ ID NO: 851854 - DNA, 15 bp, Homo sapiens
attttctttttcatg

SEQ ID NO: 851855 - DNA, 15 bp, Homo sapiens
ttttctttttcatgt

SEQ ID NO: 851856 - DNA, 15 bp, Homo sapiens
tttctttttcatgtt

SEQ ID NO: 851857 - DNA, 15 bp, Homo sapiens
ttctttttcatgttg

SEQ ID NO: 851858 - DNA, 15 bp, Homo sapiens
tctttttcatgttgg

SEQ ID NO: 851859 - DNA, 15 bp, Homo sapiens
ctttttcatgttggc

SEQ ID NO: 851860 - DNA, 15 bp, Homo sapiens
tttttcatgttggca

SEQ ID NO: 851861 - DNA, 15 bp, Homo sapiens
ttttcatgttggcaa

SEQ ID NO: 851862 - DNA, 15 bp, Homo sapiens
tttcatgttggcaaa

SEQ ID NO: 851863 - DNA, 15 bp, Homo sapiens
ttcatgttggcaaag

SEQ ID NO: 851864 - DNA, 15 bp, Homo sapiens
tcatgttggcaaagt

SEQ ID NO: 851865 - DNA, 15 bp, Homo sapiens
catgttggcaaagtg

SEQ ID NO: 851866 - DNA, 15 bp, Homo sapiens
atgttggcaaagtga

SEQ ID NO: 851867 - DNA, 15 bp, Homo sapiens
tgttggcaaagtgaa

SEQ ID NO: 851868 - DNA, 15 bp, Homo sapiens
gttggcaaagtgaag

SEQ ID NO: 851869 - DNA, 15 bp, Homo sapiens
ttggcaaagtgaaga

SEQ ID NO: 851870 - DNA, 15 bp, Homo sapiens
tggcaaagtgaagaa

SEQ ID NO: 851871 - DNA, 15 bp, Homo sapiens
ggcaaagtgaagaat

SEQ ID NO: 851872 - DNA, 15 bp, Homo sapiens
gcaaagtgaagaata

SEQ ID NO: 851873 - DNA, 15 bp, Homo sapiens
caaagtgaagaatat

SEQ ID NO: 851874 - DNA, 15 bp, Homo sapiens
aaagtgaagaatatt

SEQ ID NO: 851875 - DNA, 15 bp, Homo sapiens
aagtgaagaatattg

SEQ ID NO: 851876 - DNA, 15 bp, Homo sapiens
agtgaagaatattgt

SEQ ID NO: 851877 - DNA, 15 bp, Homo sapiens
gtgaagaatattgtt

SEQ ID NO: 851878 - DNA, 15 bp, Homo sapiens
tgaagaatattgttt

SEQ ID NO: 851879 - DNA, 15 bp, Homo sapiens
gaagaatattgtttg

SEQ ID NO: 851880 - DNA, 15 bp, Homo sapiens
aagaatattgtttgc

SEQ ID NO: 851881 - DNA, 15 bp, Homo sapiens
agaatattgtttgca

SEQ ID NO: 851882 - DNA, 15 bp, Homo sapiens
gaatattgtttgcaa

SEQ ID NO: 851883 - DNA, 15 bp, Homo sapiens
aatattgtttgcaaa

SEQ ID NO: 851884 - DNA, 15 bp, Homo sapiens
atattgtttgcaaaa

SEQ ID NO: 851885 - DNA, 15 bp, Homo sapiens
tattgtttgcaaaaa

SEQ ID NO: 851886 - DNA, 15 bp, Homo sapiens
attgtttgcaaaaac

SEQ ID NO: 851887 - DNA, 15 bp, Homo sapiens
ttgtttgcaaaaact

SEQ ID NO: 851888 - DNA, 15 bp, Homo sapiens
tgtttgcaaaaactg

SEQ ID NO: 851889 - DNA, 15 bp, Homo sapiens
gtttgcaaaaactga

SEQ ID NO: 851890 - DNA, 15 bp, Homo sapiens
tttgcaaaaactgac

SEQ ID NO: 851891 - DNA, 15 bp, Homo sapiens
ttgcaaaaactgaca

SEQ ID NO: 851892 - DNA, 15 bp, Homo sapiens
tgcaaaaactgacag

SEQ ID NO: 851893 - DNA, 15 bp, Homo sapiens
gcaaaaactgacagt

SEQ ID NO: 851894 - DNA, 15 bp, Homo sapiens
caaaaactgacagtc

SEQ ID NO: 851895 - DNA, 15 bp, Homo sapiens
aaaaactgacagtcc

SEQ ID NO: 851896 - DNA, 15 bp, Homo sapiens
aaaactgacagtcct

SEQ ID NO: 851897 - DNA, 15 bp, Homo sapiens
aaactgacagtcctg

SEQ ID NO: 851898 - DNA, 15 bp, Homo sapiens
aactgacagtcctga

SEQ ID NO: 851899 - DNA, 15 bp, Homo sapiens
actgacagtcctgat

SEQ ID NO: 851900 - DNA, 15 bp, Homo sapiens
ctgacagtcctgatt

SEQ ID NO: 851901 - DNA, 15 bp, Homo sapiens
tgacagtcctgatta

SEQ ID NO: 851902 - DNA, 15 bp, Homo sapiens
gacagtcctgattat

SEQ ID NO: 851903 - DNA, 15 bp, Homo sapiens
acagtcctgattatt

SEQ ID NO: 851904 - DNA, 15 bp, Homo sapiens
cagtcctgattatta

SEQ ID NO: 851905 - DNA, 15 bp, Homo sapiens
agtcctgattattag

SEQ ID NO: 851906 - DNA, 15 bp, Homo sapiens
gtcctgattattagt

SEQ ID NO: 851907 - DNA, 15 bp, Homo sapiens
tcctgattattagtt

SEQ ID NO: 851908 - DNA, 15 bp, Homo sapiens
cctgattattagttg

SEQ ID NO: 851909 - DNA, 15 bp, Homo sapiens
ctgattattagttgt

SEQ ID NO: 851910 - DNA, 15 bp, Homo sapiens
tgattattagttgtt

SEQ ID NO: 851911 - DNA, 15 bp, Homo sapiens
gattattagttgttc

SEQ ID NO: 851912 - DNA, 15 bp, Homo sapiens
attattagttgttca

SEQ ID NO: 851913 - DNA, 15 bp, Homo sapiens
ttattagttgttcag

SEQ ID NO: 851914 - DNA, 15 bp, Homo sapiens
tattagttgttcagc

SEQ ID NO: 851915 - DNA, 15 bp, Homo sapiens
attagttgttcagca

SEQ ID NO: 851916 - DNA, 15 bp, Homo sapiens
ttagttgttcagcag

SEQ ID NO: 851917 - DNA, 15 bp, Homo sapiens
tagttgttcagcaga

SEQ ID NO: 851918 - DNA, 15 bp, Homo sapiens
agttgttcagcagat

SEQ ID NO: 851919 - DNA, 15 bp, Homo sapiens
gttgttcagcagatg

SEQ ID NO: 851920 - DNA, 15 bp, Homo sapiens
ttgttcagcagatga

SEQ ID NO: 851921 - DNA, 15 bp, Homo sapiens
tgttcagcagatgag

SEQ ID NO: 851922 - DNA, 15 bp, Homo sapiens
gttcagcagatgagg

SEQ ID NO: 851923 - DNA, 15 bp, Homo sapiens
ttcagcagatgaggt

SEQ ID NO: 851924 - DNA, 15 bp, Homo sapiens
tcagcagatgaggtg

SEQ ID NO: 851925 - DNA, 15 bp, Homo sapiens
cagcagatgaggtgg

SEQ ID NO: 851926 - DNA, 15 bp, Homo sapiens
agcagatgaggtgga

SEQ ID NO: 851927 - DNA, 15 bp, Homo sapiens
gcagatgaggtggaa

SEQ ID NO: 851928 - DNA, 15 bp, Homo sapiens
cagatgaggtggaat

SEQ ID NO: 851929 - DNA, 15 bp, Homo sapiens
agatgaggtggaatt

SEQ ID NO: 851930 - DNA, 15 bp, Homo sapiens
gatgaggtggaattt

SEQ ID NO: 851931 - DNA, 15 bp, Homo sapiens
atgaggtggaatttt

SEQ ID NO: 851932 - DNA, 15 bp, Homo sapiens
tgaggtggaattttc

SEQ ID NO: 851933 - DNA, 15 bp, Homo sapiens
gaggtggaattttct

SEQ ID NO: 851934 - DNA, 15 bp, Homo sapiens
aggtggaattttctg

SEQ ID NO: 851935 - DNA, 15 bp, Homo sapiens
ggtggaattttctgg

SEQ ID NO: 851936 - DNA, 15 bp, Homo sapiens
gtggaattttctggg

SEQ ID NO: 851937 - DNA, 15 bp, Homo sapiens
tggaattttctgggg

SEQ ID NO: 851938 - DNA, 15 bp, Homo sapiens
ggaattttctggggt

SEQ ID NO: 851939 - DNA, 15 bp, Homo sapiens
gaattttctggggtt

SEQ ID NO: 851940 - DNA, 15 bp, Homo sapiens
aattttctggggtta

SEQ ID NO: 851941 - DNA, 15 bp, Homo sapiens
attttctggggttac

SEQ ID NO: 851942 - DNA, 15 bp, Homo sapiens
ttttctggggttact

SEQ ID NO: 851943 - DNA, 15 bp, Homo sapiens
tttctggggttactg

SEQ ID NO: 851944 - DNA, 15 bp, Homo sapiens
ttctggggttactgt

SEQ ID NO: 851945 - DNA, 15 bp, Homo sapiens
tctggggttactgtt

SEQ ID NO: 851946 - DNA, 15 bp, Homo sapiens
ctggggttactgttt

SEQ ID NO: 851947 - DNA, 15 bp, Homo sapiens
tggggttactgttta

SEQ ID NO: 851948 - DNA, 15 bp, Homo sapiens
ggggttactgtttac

SEQ ID NO: 851949 - DNA, 15 bp, Homo sapiens
gggttactgtttacc

SEQ ID NO: 851950 - DNA, 15 bp, Homo sapiens
ggttactgtttaccc

SEQ ID NO: 851951 - DNA, 15 bp, Homo sapiens
gttactgtttaccca

SEQ ID NO: 851952 - DNA, 15 bp, Homo sapiens
ttactgtttacccat

SEQ ID NO: 851953 - DNA, 15 bp, Homo sapiens
tactgtttacccatg

SEQ ID NO: 851954 - DNA, 15 bp, Homo sapiens
actgtttacccatgt

SEQ ID NO: 851955 - DNA, 15 bp, Homo sapiens
ctgtttacccatgtt

SEQ ID NO: 851956 - DNA, 15 bp, Homo sapiens
tgtttacccatgttt

SEQ ID NO: 851957 - DNA, 15 bp, Homo sapiens
gtttacccatgtttt

SEQ ID NO: 851958 - DNA, 15 bp, Homo sapiens
tttacccatgttttt

SEQ ID NO: 851959 - DNA, 15 bp, Homo sapiens
ttacccatgtttttg

SEQ ID NO: 851960 - DNA, 15 bp, Homo sapiens
tacccatgtttttgc

SEQ ID NO: 851961 - DNA, 15 bp, Homo sapiens
acccatgtttttgcc

SEQ ID NO: 851962 - DNA, 15 bp, Homo sapiens
cccatgtttttgcca

SEQ ID NO: 851963 - DNA, 15 bp, Homo sapiens
ccatgtttttgccaa

SEQ ID NO: 851964 - DNA, 15 bp, Homo sapiens
catgtttttgccaat

SEQ ID NO: 851965 - DNA, 15 bp, Homo sapiens
atgtttttgccaata

SEQ ID NO: 851966 - DNA, 15 bp, Homo sapiens
tgtttttgccaatac

SEQ ID NO: 851967 - DNA, 15 bp, Homo sapiens
gtttttgccaatact

SEQ ID NO: 851968 - DNA, 15 bp, Homo sapiens
tttttgccaatactc

SEQ ID NO: 851969 - DNA, 15 bp, Homo sapiens
ttttgccaatactca

SEQ ID NO: 851970 - DNA, 15 bp, Homo sapiens
tttgccaatactcac

SEQ ID NO: 851971 - DNA, 15 bp, Homo sapiens
ttgccaatactcact

SEQ ID NO: 851972 - DNA, 15 bp, Homo sapiens
tgccaatactcactt

SEQ ID NO: 851973 - DNA, 15 bp, Homo sapiens
gccaatactcacttg

SEQ ID NO: 851974 - DNA, 15 bp, Homo sapiens
ccaatactcacttgt

SEQ ID NO: 851975 - DNA, 15 bp, Homo sapiens
caatactcacttgta

SEQ ID NO: 851976 - DNA, 15 bp, Homo sapiens
aatactcacttgtac

SEQ ID NO: 851977 - DNA, 15 bp, Homo sapiens
atactcacttgtacc

SEQ ID NO: 851978 - DNA, 15 bp, Homo sapiens
tactcacttgtacct

SEQ ID NO: 851979 - DNA, 15 bp, Homo sapiens
actcacttgtacctg

SEQ ID NO: 851980 - DNA, 15 bp, Homo sapiens
ctcacttgtacctgt

SEQ ID NO: 851981 - DNA, 15 bp, Homo sapiens
tcacttgtacctgtg

SEQ ID NO: 851982 - DNA, 15 bp, Homo sapiens
cacttgtacctgtgt

SEQ ID NO: 851983 - DNA, 15 bp, Homo sapiens
acttgtacctgtgta

SEQ ID NO: 851984 - DNA, 15 bp, Homo sapiens
cttgtacctgtgtag

SEQ ID NO: 851985 - DNA, 15 bp, Homo sapiens
ttgtacctgtgtagg

SEQ ID NO: 851986 - DNA, 15 bp, Homo sapiens
tgtacctgtgtaggg

SEQ ID NO: 851987 - DNA, 15 bp, Homo sapiens
gtacctgtgtagggg

SEQ ID NO: 851988 - DNA, 15 bp, Homo sapiens
tacctgtgtagggga

SEQ ID NO: 851989 - DNA, 15 bp, Homo sapiens
acctgtgtaggggaa

SEQ ID NO: 851990 - DNA, 15 bp, Homo sapiens
cctgtgtaggggaac

SEQ ID NO: 851991 - DNA, 15 bp, Homo sapiens
ctgtgtaggggaact

SEQ ID NO: 851992 - DNA, 15 bp, Homo sapiens
tgtgtaggggaactg

SEQ ID NO: 851993 - DNA, 15 bp, Homo sapiens
gtgtaggggaactgt

SEQ ID NO: 851994 - DNA, 15 bp, Homo sapiens
tgtaggggaactgta

SEQ ID NO: 851995 - DNA, 15 bp, Homo sapiens
gtaggggaactgtat

SEQ ID NO: 851996 - DNA, 15 bp, Homo sapiens
taggggaactgtatg

SEQ ID NO: 851997 - DNA, 15 bp, Homo sapiens
aggggaactgtatgt

SEQ ID NO: 851998 - DNA, 15 bp, Homo sapiens
ggggaactgtatgta

SEQ ID NO: 851999 - DNA, 15 bp, Homo sapiens
gggaactgtatgtat

SEQ ID NO: 852000 - DNA, 15 bp, Homo sapiens
ggaactgtatgtatc

SEQ ID NO: 852001 - DNA, 15 bp, Homo sapiens
gaactgtatgtatcc

SEQ ID NO: 852002 - DNA, 15 bp, Homo sapiens
aactgtatgtatcct

SEQ ID NO: 852003 - DNA, 15 bp, Homo sapiens
actgtatgtatcctg

SEQ ID NO: 852004 - DNA, 15 bp, Homo sapiens
ctgtatgtatcctgg

SEQ ID NO: 852005 - DNA, 15 bp, Homo sapiens
tgtatgtatcctgga

SEQ ID NO: 852006 - DNA, 15 bp, Homo sapiens
gtatgtatcctggat

SEQ ID NO: 852007 - DNA, 15 bp, Homo sapiens
tatgtatcctggatt

SEQ ID NO: 852008 - DNA, 15 bp, Homo sapiens
atgtatcctggattt

SEQ ID NO: 852009 - DNA, 15 bp, Homo sapiens
tgtatcctggatttt

SEQ ID NO: 852010 - DNA, 15 bp, Homo sapiens
gtatcctggattttt

SEQ ID NO: 852011 - DNA, 15 bp, Homo sapiens
tatcctggatttttg

SEQ ID NO: 852012 - DNA, 15 bp, Homo sapiens
atcctggatttttgc

SEQ ID NO: 852013 - DNA, 15 bp, Homo sapiens
tcctggatttttgca

SEQ ID NO: 852014 - DNA, 15 bp, Homo sapiens
cctggatttttgcaa

SEQ ID NO: 852015 - DNA, 15 bp, Homo sapiens
ctggatttttgcaaa

SEQ ID NO: 852016 - DNA, 15 bp, Homo sapiens
tggatttttgcaaat

SEQ ID NO: 852017 - DNA, 15 bp, Homo sapiens
ggatttttgcaaatg

SEQ ID NO: 852018 - DNA, 15 bp, Homo sapiens
gatttttgcaaatga

SEQ ID NO: 852019 - DNA, 15 bp, Homo sapiens
atttttgcaaatgat

SEQ ID NO: 852020 - DNA, 15 bp, Homo sapiens
tttttgcaaatgata

SEQ ID NO: 852021 - DNA, 15 bp, Homo sapiens
ttttgcaaatgatat

SEQ ID NO: 852022 - DNA, 15 bp, Homo sapiens
tttgcaaatgatatt

SEQ ID NO: 852023 - DNA, 15 bp, Homo sapiens
ttgcaaatgatattc

SEQ ID NO: 852024 - DNA, 15 bp, Homo sapiens
tgcaaatgatattcc

SEQ ID NO: 852025 - DNA, 15 bp, Homo sapiens
gcaaatgatattccc

SEQ ID NO: 852026 - DNA, 15 bp, Homo sapiens
caaatgatattcccc

SEQ ID NO: 852027 - DNA, 15 bp, Homo sapiens
aaatgatattccccg

SEQ ID NO: 852028 - DNA, 15 bp, Homo sapiens
aatgatattccccgt

SEQ ID NO: 852029 - DNA, 15 bp, Homo sapiens
atgatattccccgtg

SEQ ID NO: 852030 - DNA, 15 bp, Homo sapiens
tgatattccccgtgt

SEQ ID NO: 852031 - DNA, 15 bp, Homo sapiens
gatattccccgtgtt

SEQ ID NO: 852032 - DNA, 15 bp, Homo sapiens
atattccccgtgttg

SEQ ID NO: 852033 - DNA, 15 bp, Homo sapiens
tattccccgtgttgc

SEQ ID NO: 852034 - DNA, 15 bp, Homo sapiens
attccccgtgttgcg

SEQ ID NO: 852035 - DNA, 15 bp, Homo sapiens
ttccccgtgttgcga

SEQ ID NO: 852036 - DNA, 15 bp, Homo sapiens
tccccgtgttgcgaa

SEQ ID NO: 852037 - DNA, 15 bp, Homo sapiens
ccccgtgttgcgaaa

SEQ ID NO: 852038 - DNA, 15 bp, Homo sapiens
cccgtgttgcgaaat

SEQ ID NO: 852039 - DNA, 15 bp, Homo sapiens
ccgtgttgcgaaatc

SEQ ID NO: 852040 - DNA, 15 bp, Homo sapiens
cgtgttgcgaaatcg

SEQ ID NO: 852041 - DNA, 15 bp, Homo sapiens
gtgttgcgaaatcgc

SEQ ID NO: 852042 - DNA, 15 bp, Homo sapiens
tgttgcgaaatcgca

SEQ ID NO: 852043 - DNA, 15 bp, Homo sapiens
gttgcgaaatcgcaa

SEQ ID NO: 852044 - DNA, 15 bp, Homo sapiens
ttgcgaaatcgcaaa

SEQ ID NO: 852045 - DNA, 15 bp, Homo sapiens
tgcgaaatcgcaaat

SEQ ID NO: 852046 - DNA, 15 bp, Homo sapiens
gcgaaatcgcaaatc

SEQ ID NO: 852047 - DNA, 15 bp, Homo sapiens
cgaaatcgcaaatct

SEQ ID NO: 852048 - DNA, 15 bp, Homo sapiens
gaaatcgcaaatctt

SEQ ID NO: 852049 - DNA, 15 bp, Homo sapiens
aaatcgcaaatcttt

SEQ ID NO: 852050 - DNA, 15 bp, Homo sapiens
aatcgcaaatctttg

SEQ ID NO: 852051 - DNA, 15 bp, Homo sapiens
atcgcaaatctttgt

SEQ ID NO: 852052 - DNA, 15 bp, Homo sapiens
tcgcaaatctttgtg

SEQ ID NO: 852053 - DNA, 15 bp, Homo sapiens
cgcaaatctttgtgt

SEQ ID NO: 852054 - DNA, 15 bp, Homo sapiens
gcaaatctttgtgta

SEQ ID NO: 852055 - DNA, 15 bp, Homo sapiens
caaatctttgtgtaa

SEQ ID NO: 852056 - DNA, 15 bp, Homo sapiens
aaatctttgtgtaac

SEQ ID NO: 852057 - DNA, 15 bp, Homo sapiens
aatctttgtgtaact

SEQ ID NO: 852058 - DNA, 15 bp, Homo sapiens
atctttgtgtaactc

SEQ ID NO: 852059 - DNA, 15 bp, Homo sapiens
tctttgtgtaactca

SEQ ID NO: 852060 - DNA, 15 bp, Homo sapiens
ctttgtgtaactcag

SEQ ID NO: 852061 - DNA, 15 bp, Homo sapiens
tttgtgtaactcagt

SEQ ID NO: 852062 - DNA, 15 bp, Homo sapiens
ttgtgtaactcagtg

SEQ ID NO: 852063 - DNA, 15 bp, Homo sapiens
tgtgtaactcagtgt

SEQ ID NO: 852064 - DNA, 15 bp, Homo sapiens
gtgtaactcagtgtt

SEQ ID NO: 852065 - DNA, 15 bp, Homo sapiens
tgtaactcagtgttc

SEQ ID NO: 852066 - DNA, 15 bp, Homo sapiens
gtaactcagtgttct

SEQ ID NO: 852067 - DNA, 15 bp, Homo sapiens
taactcagtgttctc

SEQ ID NO: 852068 - DNA, 15 bp, Homo sapiens
aactcagtgttctct

SEQ ID NO: 852069 - DNA, 15 bp, Homo sapiens
actcagtgttctcta

SEQ ID NO: 852070 - DNA, 15 bp, Homo sapiens
ctcagtgttctctat

SEQ ID NO: 852071 - DNA, 15 bp, Homo sapiens
tcagtgttctctatt

SEQ ID NO: 852072 - DNA, 15 bp, Homo sapiens
cagtgttctctattt

SEQ ID NO: 852073 - DNA, 15 bp, Homo sapiens
agtgttctctattta

SEQ ID NO: 852074 - DNA, 15 bp, Homo sapiens
gtgttctctatttac

SEQ ID NO: 852075 - DNA, 15 bp, Homo sapiens
tgttctctatttact

SEQ ID NO: 852076 - DNA, 15 bp, Homo sapiens
gttctctatttactt

SEQ ID NO: 852077 - DNA, 15 bp, Homo sapiens
ttctctatttacttt

SEQ ID NO: 852078 - DNA, 15 bp, Homo sapiens
tctctatttactttt

SEQ ID NO: 852079 - DNA, 15 bp, Homo sapiens
ctctatttacttttg

SEQ ID NO: 852080 - DNA, 15 bp, Homo sapiens
tctatttacttttgt

SEQ ID NO: 852081 - DNA, 15 bp, Homo sapiens
ctatttacttttgtg

SEQ ID NO: 852082 - DNA, 15 bp, Homo sapiens
tatttacttttgtgc

SEQ ID NO: 852083 - DNA, 15 bp, Homo sapiens
atttacttttgtgca

SEQ ID NO: 852084 - DNA, 15 bp, Homo sapiens
tttacttttgtgcat

SEQ ID NO: 852085 - DNA, 15 bp, Homo sapiens
ttacttttgtgcatc

SEQ ID NO: 852086 - DNA, 15 bp, Homo sapiens
tacttttgtgcatct

SEQ ID NO: 852087 - DNA, 15 bp, Homo sapiens
acttttgtgcatctt

SEQ ID NO: 852088 - DNA, 15 bp, Homo sapiens
cttttgtgcatcttt

SEQ ID NO: 852089 - DNA, 15 bp, Homo sapiens
ttttgtgcatctttc

SEQ ID NO: 852090 - DNA, 15 bp, Homo sapiens
tttgtgcatctttca

SEQ ID NO: 852091 - DNA, 15 bp, Homo sapiens
ttgtgcatctttcaa

SEQ ID NO: 852092 - DNA, 15 bp, Homo sapiens
tgtgcatctttcaaa

SEQ ID NO: 852093 - DNA, 15 bp, Homo sapiens
gtgcatctttcaaaa

SEQ ID NO: 852094 - DNA, 15 bp, Homo sapiens
tgcatctttcaaaaa

SEQ ID NO: 852095 - DNA, 15 bp, Homo sapiens
gcatctttcaaaaaa

SEQ ID NO: 852096 - DNA, 15 bp, Homo sapiens
catctttcaaaaaaa

SEQ ID NO: 852097 - DNA, 15 bp, Homo sapiens
atctttcaaaaaaaa

SEQ ID NO: 852098 - DNA, 15 bp, Homo sapiens
tctttcaaaaaaaaa

SEQ ID NO: 852099 - DNA, 15 bp, Homo sapiens
ctttcaaaaaaaaat

SEQ ID NO: 852100 - DNA, 15 bp, Homo sapiens
tttcaaaaaaaaatg

SEQ ID NO: 852101 - DNA, 15 bp, Homo sapiens
ttcaaaaaaaaatgt

SEQ ID NO: 852102 - DNA, 15 bp, Homo sapiens
tcaaaaaaaaatgtc

SEQ ID NO: 852103 - DNA, 15 bp, Homo sapiens
caaaaaaaaatgtca

SEQ ID NO: 852104 - DNA, 15 bp, Homo sapiens
aaaaaaaaatgtcat

SEQ ID NO: 852105 - DNA, 15 bp, Homo sapiens
aaaaaaaatgtcatg

SEQ ID NO: 852106 - DNA, 15 bp, Homo sapiens
aaaaaaatgtcatga

SEQ ID NO: 852107 - DNA, 15 bp, Homo sapiens
aaaaaatgtcatgat

SEQ ID NO: 852108 - DNA, 15 bp, Homo sapiens
aaaaatgtcatgatg

SEQ ID NO: 852109 - DNA, 15 bp, Homo sapiens
aaaatgtcatgatgt

SEQ ID NO: 852110 - DNA, 15 bp, Homo sapiens
aaatgtcatgatgtg

SEQ ID NO: 852111 - DNA, 15 bp, Homo sapiens
aatgtcatgatgtgg

SEQ ID NO: 852112 - DNA, 15 bp, Homo sapiens
atgtcatgatgtggg

SEQ ID NO: 852113 - DNA, 15 bp, Homo sapiens
tgtcatgatgtgggt

SEQ ID NO: 852114 - DNA, 15 bp, Homo sapiens
gtcatgatgtgggtg

SEQ ID NO: 852115 - DNA, 15 bp, Homo sapiens
tcatgatgtgggtga

SEQ ID NO: 852116 - DNA, 15 bp, Homo sapiens
catgatgtgggtgat

SEQ ID NO: 852117 - DNA, 15 bp, Homo sapiens
atgatgtgggtgatg

SEQ ID NO: 852118 - DNA, 15 bp, Homo sapiens
tgatgtgggtgatgc

SEQ ID NO: 852119 - DNA, 15 bp, Homo sapiens
gatgtgggtgatgct

SEQ ID NO: 852120 - DNA, 15 bp, Homo sapiens
atgtgggtgatgctg

SEQ ID NO: 852121 - DNA, 15 bp, Homo sapiens
tgtgggtgatgctga

SEQ ID NO: 852122 - DNA, 15 bp, Homo sapiens
gtgggtgatgctgat

SEQ ID NO: 852123 - DNA, 15 bp, Homo sapiens
tgggtgatgctgatg

SEQ ID NO: 852124 - DNA, 15 bp, Homo sapiens
gggtgatgctgatgc

SEQ ID NO: 852125 - DNA, 15 bp, Homo sapiens
ggtgatgctgatgct

SEQ ID NO: 852126 - DNA, 15 bp, Homo sapiens
gtgatgctgatgctg

SEQ ID NO: 852127 - DNA, 15 bp, Homo sapiens
tgatgctgatgctgc

SEQ ID NO: 852128 - DNA, 15 bp, Homo sapiens
gatgctgatgctgca

SEQ ID NO: 852129 - DNA, 15 bp, Homo sapiens
atgctgatgctgcat

SEQ ID NO: 852130 - DNA, 15 bp, Homo sapiens
tgctgatgctgcata

SEQ ID NO: 852131 - DNA, 15 bp, Homo sapiens
gctgatgctgcatag

SEQ ID NO: 852132 - DNA, 15 bp, Homo sapiens
ctgatgctgcatagt

SEQ ID NO: 852133 - DNA, 15 bp, Homo sapiens
tgatgctgcatagtg

SEQ ID NO: 852134 - DNA, 15 bp, Homo sapiens
gatgctgcatagtgt

SEQ ID NO: 852135 - DNA, 15 bp, Homo sapiens
atgctgcatagtgtt

SEQ ID NO: 852136 - DNA, 15 bp, Homo sapiens
tgctgcatagtgttt

SEQ ID NO: 852137 - DNA, 15 bp, Homo sapiens
gctgcatagtgtttt

SEQ ID NO: 852138 - DNA, 15 bp, Homo sapiens
ctgcatagtgttttt

SEQ ID NO: 852139 - DNA, 15 bp, Homo sapiens
tgcatagtgtttttc

SEQ ID NO: 852140 - DNA, 15 bp, Homo sapiens
gcatagtgtttttcg

SEQ ID NO: 852141 - DNA, 15 bp, Homo sapiens
catagtgtttttcga

SEQ ID NO: 852142 - DNA, 15 bp, Homo sapiens
atagtgtttttcgac

SEQ ID NO: 852143 - DNA, 15 bp, Homo sapiens
tagtgtttttcgacc

SEQ ID NO: 852144 - DNA, 15 bp, Homo sapiens
agtgtttttcgacca

SEQ ID NO: 852145 - DNA, 15 bp, Homo sapiens
gtgtttttcgaccat

SEQ ID NO: 852146 - DNA, 15 bp, Homo sapiens
tgtttttcgaccatt

SEQ ID NO: 852147 - DNA, 15 bp, Homo sapiens
gtttttcgaccattc

SEQ ID NO: 852148 - DNA, 15 bp, Homo sapiens
tttttcgaccattct

SEQ ID NO: 852149 - DNA, 15 bp, Homo sapiens
ttttcgaccattctg

SEQ ID NO: 852150 - DNA, 15 bp, Homo sapiens
tttcgaccattctgg

SEQ ID NO: 852151 - DNA, 15 bp, Homo sapiens
ttcgaccattctgga

SEQ ID NO: 852152 - DNA, 15 bp, Homo sapiens
tcgaccattctggaa

SEQ ID NO: 852153 - DNA, 15 bp, Homo sapiens
cgaccattctggaat

SEQ ID NO: 852154 - DNA, 15 bp, Homo sapiens
gaccattctggaata

SEQ ID NO: 852155 - DNA, 15 bp, Homo sapiens
accattctggaataa

SEQ ID NO: 852156 - DNA, 15 bp, Homo sapiens
ccattctggaataat

SEQ ID NO: 852157 - DNA, 15 bp, Homo sapiens
cattctggaataatc

SEQ ID NO: 852158 - DNA, 15 bp, Homo sapiens
attctggaataatct

SEQ ID NO: 852159 - DNA, 15 bp, Homo sapiens
ttctggaataatctg

SEQ ID NO: 852160 - DNA, 15 bp, Homo sapiens
tctggaataatctga

SEQ ID NO: 852161 - DNA, 15 bp, Homo sapiens
ctggaataatctgac

SEQ ID NO: 852162 - DNA, 15 bp, Homo sapiens
tggaataatctgact

SEQ ID NO: 852163 - DNA, 15 bp, Homo sapiens
ggaataatctgactg

SEQ ID NO: 852164 - DNA, 15 bp, Homo sapiens
gaataatctgactgc

SEQ ID NO: 852165 - DNA, 15 bp, Homo sapiens
aataatctgactgca

SEQ ID NO: 852166 - DNA, 15 bp, Homo sapiens
ataatctgactgcag

SEQ ID NO: 852167 - DNA, 15 bp, Homo sapiens
taatctgactgcagg

SEQ ID NO: 852168 - DNA, 15 bp, Homo sapiens
aatctgactgcagga

SEQ ID NO: 852169 - DNA, 15 bp, Homo sapiens
atctgactgcaggag

SEQ ID NO: 852170 - DNA, 15 bp, Homo sapiens
tctgactgcaggaga

SEQ ID NO: 852171 - DNA, 15 bp, Homo sapiens
ctgactgcaggagat

SEQ ID NO: 852172 - DNA, 15 bp, Homo sapiens
tgactgcaggagatt

SEQ ID NO: 852173 - DNA, 15 bp, Homo sapiens
gactgcaggagattg

SEQ ID NO: 852174 - DNA, 15 bp, Homo sapiens
actgcaggagattgc

SEQ ID NO: 852175 - DNA, 15 bp, Homo sapiens
ctgcaggagattgca

SEQ ID NO: 852176 - DNA, 15 bp, Homo sapiens
tgcaggagattgcac

SEQ ID NO: 852177 - DNA, 15 bp, Homo sapiens
gcaggagattgcacc

SEQ ID NO: 852178 - DNA, 15 bp, Homo sapiens
caggagattgcaccc

SEQ ID NO: 852179 - DNA, 15 bp, Homo sapiens
aggagattgcaccct

SEQ ID NO: 852180 - DNA, 15 bp, Homo sapiens
ggagattgcaccctg

SEQ ID NO: 852181 - DNA, 15 bp, Homo sapiens
gagattgcaccctga

SEQ ID NO: 852182 - DNA, 15 bp, Homo sapiens
agattgcaccctgaa

SEQ ID NO: 852183 - DNA, 15 bp, Homo sapiens
gattgcaccctgaac

SEQ ID NO: 852184 - DNA, 15 bp, Homo sapiens
attgcaccctgaacc

SEQ ID NO: 852185 - DNA, 15 bp, Homo sapiens
ttgcaccctgaacct

SEQ ID NO: 852186 - DNA, 15 bp, Homo sapiens
tgcaccctgaacctt

SEQ ID NO: 852187 - DNA, 15 bp, Homo sapiens
gcaccctgaaccttg

SEQ ID NO: 852188 - DNA, 15 bp, Homo sapiens
caccctgaaccttga

SEQ ID NO: 852189 - DNA, 15 bp, Homo sapiens
accctgaaccttgag

SEQ ID NO: 852190 - DNA, 15 bp, Homo sapiens
ccctgaaccttgagc

SEQ ID NO: 852191 - DNA, 15 bp, Homo sapiens
cctgaaccttgagca

SEQ ID NO: 852192 - DNA, 15 bp, Homo sapiens
ctgaaccttgagcag

SEQ ID NO: 852193 - DNA, 15 bp, Homo sapiens
tgaaccttgagcagt

SEQ ID NO: 852194 - DNA, 15 bp, Homo sapiens
gaaccttgagcagtt

SEQ ID NO: 852195 - DNA, 15 bp, Homo sapiens
aaccttgagcagttg

SEQ ID NO: 852196 - DNA, 15 bp, Homo sapiens
accttgagcagttgt

SEQ ID NO: 852197 - DNA, 15 bp, Homo sapiens
ccttgagcagttgtc

SEQ ID NO: 852198 - DNA, 15 bp, Homo sapiens
cttgagcagttgtct

SEQ ID NO: 852199 - DNA, 15 bp, Homo sapiens
ttgagcagttgtctt

SEQ ID NO: 852200 - DNA, 15 bp, Homo sapiens
tgagcagttgtcttt

SEQ ID NO: 852201 - DNA, 15 bp, Homo sapiens
gagcagttgtctttc

SEQ ID NO: 852202 - DNA, 15 bp, Homo sapiens
agcagttgtctttca

SEQ ID NO: 852203 - DNA, 15 bp, Homo sapiens
gcagttgtctttcac

SEQ ID NO: 852204 - DNA, 15 bp, Homo sapiens
cagttgtctttcact

SEQ ID NO: 852205 - DNA, 15 bp, Homo sapiens
agttgtctttcactt

SEQ ID NO: 852206 - DNA, 15 bp, Homo sapiens
gttgtctttcacttg

SEQ ID NO: 852207 - DNA, 15 bp, Homo sapiens
ttgtctttcacttgt

SEQ ID NO: 852208 - DNA, 15 bp, Homo sapiens
tgtctttcacttgtt

SEQ ID NO: 852209 - DNA, 15 bp, Homo sapiens
gtctttcacttgttg

SEQ ID NO: 852210 - DNA, 15 bp, Homo sapiens
tctttcacttgttgc

SEQ ID NO: 852211 - DNA, 15 bp, Homo sapiens
ctttcacttgttgcc

SEQ ID NO: 852212 - DNA, 15 bp, Homo sapiens
tttcacttgttgcct

SEQ ID NO: 852213 - DNA, 15 bp, Homo sapiens
ttcacttgttgcctt

SEQ ID NO: 852214 - DNA, 15 bp, Homo sapiens
tcacttgttgccttt

SEQ ID NO: 852215 - DNA, 15 bp, Homo sapiens
cacttgttgcctttt

SEQ ID NO: 852216 - DNA, 15 bp, Homo sapiens
acttgttgccttttg

SEQ ID NO: 852217 - DNA, 15 bp, Homo sapiens
cttgttgccttttgg

SEQ ID NO: 852218 - DNA, 15 bp, Homo sapiens
ttgttgccttttggt

SEQ ID NO: 852219 - DNA, 15 bp, Homo sapiens
tgttgccttttggtt

SEQ ID NO: 852220 - DNA, 15 bp, Homo sapiens
gttgccttttggttc

SEQ ID NO: 852221 - DNA, 15 bp, Homo sapiens
ttgccttttggttcc

SEQ ID NO: 852222 - DNA, 15 bp, Homo sapiens
tgccttttggttcca

SEQ ID NO: 852223 - DNA, 15 bp, Homo sapiens
gccttttggttccaa

SEQ ID NO: 852224 - DNA, 15 bp, Homo sapiens
ccttttggttccaag

SEQ ID NO: 852225 - DNA, 15 bp, Homo sapiens
cttttggttccaagg

SEQ ID NO: 852226 - DNA, 15 bp, Homo sapiens
ttttggttccaagga

SEQ ID NO: 852227 - DNA, 15 bp, Homo sapiens
tttggttccaaggag

SEQ ID NO: 852228 - DNA, 15 bp, Homo sapiens
ttggttccaaggaga

SEQ ID NO: 852229 - DNA, 15 bp, Homo sapiens
tggttccaaggagag

SEQ ID NO: 852230 - DNA, 15 bp, Homo sapiens
ggttccaaggagaga

SEQ ID NO: 852231 - DNA, 15 bp, Homo sapiens
gttccaaggagagaa

SEQ ID NO: 852232 - DNA, 15 bp, Homo sapiens
ttccaaggagagaaa

SEQ ID NO: 852233 - DNA, 15 bp, Homo sapiens
tccaaggagagaaaa

SEQ ID NO: 852234 - DNA, 15 bp, Homo sapiens
ccaaggagagaaaaa

SEQ ID NO: 852235 - DNA, 15 bp, Homo sapiens
caaggagagaaaaag

SEQ ID NO: 852236 - DNA, 15 bp, Homo sapiens
aaggagagaaaaaga

SEQ ID NO: 852237 - DNA, 15 bp, Homo sapiens
aggagagaaaaagag

SEQ ID NO: 852238 - DNA, 15 bp, Homo sapiens
ggagagaaaaagagc

SEQ ID NO: 852239 - DNA, 15 bp, Homo sapiens
gagagaaaaagagcg

SEQ ID NO: 852240 - DNA, 15 bp, Homo sapiens
agagaaaaagagcga

SEQ ID NO: 852241 - DNA, 15 bp, Homo sapiens
gagaaaaagagcgaa

SEQ ID NO: 852242 - DNA, 15 bp, Homo sapiens
agaaaaagagcgaaa

SEQ ID NO: 852243 - DNA, 15 bp, Homo sapiens
gaaaaagagcgaaag

SEQ ID NO: 852244 - DNA, 15 bp, Homo sapiens
aaaaagagcgaaagg

SEQ ID NO: 852245 - DNA, 15 bp, Homo sapiens
aaaagagcgaaaggc

SEQ ID NO: 852246 - DNA, 15 bp, Homo sapiens
aaagagcgaaaggct

SEQ ID NO: 852247 - DNA, 15 bp, Homo sapiens
aagagcgaaaggctg

SEQ ID NO: 852248 - DNA, 15 bp, Homo sapiens
agagcgaaaggctgt

SEQ ID NO: 852249 - DNA, 15 bp, Homo sapiens
gagcgaaaggctgtt

SEQ ID NO: 852250 - DNA, 15 bp, Homo sapiens
agcgaaaggctgtta

SEQ ID NO: 852251 - DNA, 15 bp, Homo sapiens
gcgaaaggctgttaa

SEQ ID NO: 852252 - DNA, 15 bp, Homo sapiens
cgaaaggctgttaat

SEQ ID NO: 852253 - DNA, 15 bp, Homo sapiens
gaaaggctgttaatg

SEQ ID NO: 852254 - DNA, 15 bp, Homo sapiens
aaaggctgttaatgg

SEQ ID NO: 852255 - DNA, 15 bp, Homo sapiens
aaggctgttaatggt

SEQ ID NO: 852256 - DNA, 15 bp, Homo sapiens
aggctgttaatggtt

SEQ ID NO: 852257 - DNA, 15 bp, Homo sapiens
ggctgttaatggttc

SEQ ID NO: 852258 - DNA, 15 bp, Homo sapiens
gctgttaatggttca

SEQ ID NO: 852259 - DNA, 15 bp, Homo sapiens
ctgttaatggttcat

SEQ ID NO: 852260 - DNA, 15 bp, Homo sapiens
tgttaatggttcatt

SEQ ID NO: 852261 - DNA, 15 bp, Homo sapiens
gttaatggttcattg

SEQ ID NO: 852262 - DNA, 15 bp, Homo sapiens
ttaatggttcattgt

SEQ ID NO: 852263 - DNA, 15 bp, Homo sapiens
taatggttcattgtg

SEQ ID NO: 852264 - DNA, 15 bp, Homo sapiens
aatggttcattgtga

SEQ ID NO: 852265 - DNA, 15 bp, Homo sapiens
atggttcattgtgaa

SEQ ID NO: 852266 - DNA, 15 bp, Homo sapiens
tggttcattgtgaac

SEQ ID NO: 852267 - DNA, 15 bp, Homo sapiens
ggttcattgtgaact

SEQ ID NO: 852268 - DNA, 15 bp, Homo sapiens
gttcattgtgaactc

SEQ ID NO: 852269 - DNA, 15 bp, Homo sapiens
ttcattgtgaactca

SEQ ID NO: 852270 - DNA, 15 bp, Homo sapiens
tcattgtgaactcaa

SEQ ID NO: 852271 - DNA, 15 bp, Homo sapiens
cattgtgaactcaat

SEQ ID NO: 852272 - DNA, 15 bp, Homo sapiens
attgtgaactcaatg

SEQ ID NO: 852273 - DNA, 15 bp, Homo sapiens
ttgtgaactcaatgt

SEQ ID NO: 852274 - DNA, 15 bp, Homo sapiens
tgtgaactcaatgtc

SEQ ID NO: 852275 - DNA, 15 bp, Homo sapiens
gtgaactcaatgtca

SEQ ID NO: 852276 - DNA, 15 bp, Homo sapiens
tgaactcaatgtcac

SEQ ID NO: 852277 - DNA, 15 bp, Homo sapiens
gaactcaatgtcact

SEQ ID NO: 852278 - DNA, 15 bp, Homo sapiens
aactcaatgtcacta

SEQ ID NO: 852279 - DNA, 15 bp, Homo sapiens
actcaatgtcactat

SEQ ID NO: 852280 - DNA, 15 bp, Homo sapiens
ctcaatgtcactatt

SEQ ID NO: 852281 - DNA, 15 bp, Homo sapiens
tcaatgtcactattc

SEQ ID NO: 852282 - DNA, 15 bp, Homo sapiens
caatgtcactattct

SEQ ID NO: 852283 - DNA, 15 bp, Homo sapiens
aatgtcactattcta

SEQ ID NO: 852284 - DNA, 15 bp, Homo sapiens
atgtcactattctaa

SEQ ID NO: 852285 - DNA, 15 bp, Homo sapiens
tgtcactattctaag

SEQ ID NO: 852286 - DNA, 15 bp, Homo sapiens
gtcactattctaaga

SEQ ID NO: 852287 - DNA, 15 bp, Homo sapiens
tcactattctaagaa

SEQ ID NO: 852288 - DNA, 15 bp, Homo sapiens
cactattctaagaaa

SEQ ID NO: 852289 - DNA, 15 bp, Homo sapiens
actattctaagaaaa

SEQ ID NO: 852290 - DNA, 15 bp, Homo sapiens
ctattctaagaaaac

SEQ ID NO: 852291 - DNA, 15 bp, Homo sapiens
tattctaagaaaact

SEQ ID NO: 852292 - DNA, 15 bp, Homo sapiens
attctaagaaaacta

SEQ ID NO: 852293 - DNA, 15 bp, Homo sapiens
ttctaagaaaactaa

SEQ ID NO: 852294 - DNA, 15 bp, Homo sapiens
tctaagaaaactaac

SEQ ID NO: 852295 - DNA, 15 bp, Homo sapiens
ctaagaaaactaact

SEQ ID NO: 852296 - DNA, 15 bp, Homo sapiens
taagaaaactaactc

SEQ ID NO: 852297 - DNA, 15 bp, Homo sapiens
aagaaaactaactca

SEQ ID NO: 852298 - DNA, 15 bp, Homo sapiens
agaaaactaactcag

SEQ ID NO: 852299 - DNA, 15 bp, Homo sapiens
gaaaactaactcaga

SEQ ID NO: 852300 - DNA, 15 bp, Homo sapiens
aaaactaactcagag

SEQ ID NO: 852301 - DNA, 15 bp, Homo sapiens
aaactaactcagagc

SEQ ID NO: 852302 - DNA, 15 bp, Homo sapiens
aactaactcagagca

SEQ ID NO: 852303 - DNA, 15 bp, Homo sapiens
actaactcagagcac

SEQ ID NO: 852304 - DNA, 15 bp, Homo sapiens
ctaactcagagcact

SEQ ID NO: 852305 - DNA, 15 bp, Homo sapiens
taactcagagcactc

SEQ ID NO: 852306 - DNA, 15 bp, Homo sapiens
aactcagagcactcc

SEQ ID NO: 852307 - DNA, 15 bp, Homo sapiens
actcagagcactccc

SEQ ID NO: 852308 - DNA, 15 bp, Homo sapiens
ctcagagcactccct

SEQ ID NO: 852309 - DNA, 15 bp, Homo sapiens
tcagagcactccctg

SEQ ID NO: 852310 - DNA, 15 bp, Homo sapiens
cagagcactccctga

SEQ ID NO: 852311 - DNA, 15 bp, Homo sapiens
agagcactccctgaa

SEQ ID NO: 852312 - DNA, 15 bp, Homo sapiens
gagcactccctgaag

SEQ ID NO: 852313 - DNA, 15 bp, Homo sapiens
agcactccctgaaga

SEQ ID NO: 852314 - DNA, 15 bp, Homo sapiens
gcactccctgaagat

SEQ ID NO: 852315 - DNA, 15 bp, Homo sapiens
cactccctgaagatg

SEQ ID NO: 852316 - DNA, 15 bp, Homo sapiens
actccctgaagatga

SEQ ID NO: 852317 - DNA, 15 bp, Homo sapiens
ctccctgaagatgaa

SEQ ID NO: 852318 - DNA, 15 bp, Homo sapiens
tccctgaagatgaaa

SEQ ID NO: 852319 - DNA, 15 bp, Homo sapiens
ccctgaagatgaaac

SEQ ID NO: 852320 - DNA, 15 bp, Homo sapiens
cctgaagatgaaact

SEQ ID NO: 852321 - DNA, 15 bp, Homo sapiens
ctgaagatgaaactt

SEQ ID NO: 852322 - DNA, 15 bp, Homo sapiens
tgaagatgaaacttt

SEQ ID NO: 852323 - DNA, 15 bp, Homo sapiens
gaagatgaaactttt

SEQ ID NO: 852324 - DNA, 15 bp, Homo sapiens
aagatgaaacttttc

SEQ ID NO: 852325 - DNA, 15 bp, Homo sapiens
agatgaaacttttct

SEQ ID NO: 852326 - DNA, 15 bp, Homo sapiens
gatgaaacttttctt

SEQ ID NO: 852327 - DNA, 15 bp, Homo sapiens
atgaaacttttcttg

SEQ ID NO: 852328 - DNA, 15 bp, Homo sapiens
tgaaacttttcttgg

SEQ ID NO: 852329 - DNA, 15 bp, Homo sapiens
gaaacttttcttgga

SEQ ID NO: 852330 - DNA, 15 bp, Homo sapiens
aaacttttcttggat

SEQ ID NO: 852331 - DNA, 15 bp, Homo sapiens
aacttttcttggata

SEQ ID NO: 852332 - DNA, 15 bp, Homo sapiens
acttttcttggatag

SEQ ID NO: 852333 - DNA, 15 bp, Homo sapiens
cttttcttggatagg

SEQ ID NO: 852334 - DNA, 15 bp, Homo sapiens
ttttcttggataggc

SEQ ID NO: 852335 - DNA, 15 bp, Homo sapiens
tttcttggataggcc

SEQ ID NO: 852336 - DNA, 15 bp, Homo sapiens
ttcttggataggccc

SEQ ID NO: 852337 - DNA, 15 bp, Homo sapiens
tcttggataggccct

SEQ ID NO: 852338 - DNA, 15 bp, Homo sapiens
cttggataggccctt

SEQ ID NO: 852339 - DNA, 15 bp, Homo sapiens
ttggataggcccttc

SEQ ID NO: 852340 - DNA, 15 bp, Homo sapiens
tggataggcccttca

SEQ ID NO: 852341 - DNA, 15 bp, Homo sapiens
ggataggcccttcaa

SEQ ID NO: 852342 - DNA, 15 bp, Homo sapiens
gataggcccttcaat

SEQ ID NO: 852343 - DNA, 15 bp, Homo sapiens
ataggcccttcaatt

SEQ ID NO: 852344 - DNA, 15 bp, Homo sapiens
taggcccttcaattg

SEQ ID NO: 852345 - DNA, 15 bp, Homo sapiens
aggcccttcaattga

SEQ ID NO: 852346 - DNA, 15 bp, Homo sapiens
ggcccttcaattgag

SEQ ID NO: 852347 - DNA, 15 bp, Homo sapiens
gcccttcaattgagt

SEQ ID NO: 852348 - DNA, 15 bp, Homo sapiens
cccttcaattgagtc

SEQ ID NO: 852349 - DNA, 15 bp, Homo sapiens
ccttcaattgagtca

SEQ ID NO: 852350 - DNA, 15 bp, Homo sapiens
cttcaattgagtcac

SEQ ID NO: 852351 - DNA, 15 bp, Homo sapiens
ttcaattgagtcaca

SEQ ID NO: 852352 - DNA, 15 bp, Homo sapiens
tcaattgagtcacaa

SEQ ID NO: 852353 - DNA, 15 bp, Homo sapiens
caattgagtcacaat

SEQ ID NO: 852354 - DNA, 15 bp, Homo sapiens
aattgagtcacaatt

SEQ ID NO: 852355 - DNA, 15 bp, Homo sapiens
attgagtcacaattc

SEQ ID NO: 852356 - DNA, 15 bp, Homo sapiens
ttgagtcacaattct

SEQ ID NO: 852357 - DNA, 15 bp, Homo sapiens
tgagtcacaattctg

SEQ ID NO: 852358 - DNA, 15 bp, Homo sapiens
gagtcacaattctga

SEQ ID NO: 852359 - DNA, 15 bp, Homo sapiens
agtcacaattctgag

SEQ ID NO: 852360 - DNA, 15 bp, Homo sapiens
gtcacaattctgaga

SEQ ID NO: 852361 - DNA, 15 bp, Homo sapiens
tcacaattctgagat

SEQ ID NO: 852362 - DNA, 15 bp, Homo sapiens
cacaattctgagatg

SEQ ID NO: 852363 - DNA, 15 bp, Homo sapiens
acaattctgagatgt

SEQ ID NO: 852364 - DNA, 15 bp, Homo sapiens
caattctgagatgtt

SEQ ID NO: 852365 - DNA, 15 bp, Homo sapiens
aattctgagatgttt

SEQ ID NO: 852366 - DNA, 15 bp, Homo sapiens
attctgagatgtttt

SEQ ID NO: 852367 - DNA, 15 bp, Homo sapiens
ttctgagatgttttc

SEQ ID NO: 852368 - DNA, 15 bp, Homo sapiens
tctgagatgttttca

SEQ ID NO: 852369 - DNA, 15 bp, Homo sapiens
ctgagatgttttcaa

SEQ ID NO: 852370 - DNA, 15 bp, Homo sapiens
tgagatgttttcaac

SEQ ID NO: 852371 - DNA, 15 bp, Homo sapiens
gagatgttttcaaca

SEQ ID NO: 852372 - DNA, 15 bp, Homo sapiens
agatgttttcaacaa

SEQ ID NO: 852373 - DNA, 15 bp, Homo sapiens
gatgttttcaacaaa

SEQ ID NO: 852374 - DNA, 15 bp, Homo sapiens
atgttttcaacaaag

SEQ ID NO: 852375 - DNA, 15 bp, Homo sapiens
tgttttcaacaaagc

SEQ ID NO: 852376 - DNA, 15 bp, Homo sapiens
gttttcaacaaagcc

SEQ ID NO: 852377 - DNA, 15 bp, Homo sapiens
ttttcaacaaagcca

SEQ ID NO: 852378 - DNA, 15 bp, Homo sapiens
tttcaacaaagccat

SEQ ID NO: 852379 - DNA, 15 bp, Homo sapiens
ttcaacaaagccata

SEQ ID NO: 852380 - DNA, 15 bp, Homo sapiens
tcaacaaagccatat

SEQ ID NO: 852381 - DNA, 15 bp, Homo sapiens
caacaaagccatatt

SEQ ID NO: 852382 - DNA, 15 bp, Homo sapiens
aacaaagccatattt

SEQ ID NO: 852383 - DNA, 15 bp, Homo sapiens
acaaagccatatttg

SEQ ID NO: 852384 - DNA, 15 bp, Homo sapiens
caaagccatatttgt

SEQ ID NO: 852385 - DNA, 15 bp, Homo sapiens
aaagccatatttgta

SEQ ID NO: 852386 - DNA, 15 bp, Homo sapiens
aagccatatttgtag

SEQ ID NO: 852387 - DNA, 15 bp, Homo sapiens
agccatatttgtaga

SEQ ID NO: 852388 - DNA, 15 bp, Homo sapiens
gccatatttgtagat

SEQ ID NO: 852389 - DNA, 15 bp, Homo sapiens
ccatatttgtagata

SEQ ID NO: 852390 - DNA, 15 bp, Homo sapiens
catatttgtagatat

SEQ ID NO: 852391 - DNA, 15 bp, Homo sapiens
atatttgtagatata

SEQ ID NO: 852392 - DNA, 15 bp, Homo sapiens
tatttgtagatatag

SEQ ID NO: 852393 - DNA, 15 bp, Homo sapiens
atttgtagatatagt

SEQ ID NO: 852394 - DNA, 15 bp, Homo sapiens
tttgtagatatagtt

SEQ ID NO: 852395 - DNA, 15 bp, Homo sapiens
ttgtagatatagttt

SEQ ID NO: 852396 - DNA, 15 bp, Homo sapiens
tgtagatatagtttt

SEQ ID NO: 852397 - DNA, 15 bp, Homo sapiens
gtagatatagttttt

SEQ ID NO: 852398 - DNA, 15 bp, Homo sapiens
tagatatagttttta

SEQ ID NO: 852399 - DNA, 15 bp, Homo sapiens
agatatagtttttag

SEQ ID NO: 852400 - DNA, 15 bp, Homo sapiens
gatatagtttttagt

SEQ ID NO: 852401 - DNA, 15 bp, Homo sapiens
atatagtttttagta

SEQ ID NO: 852402 - DNA, 15 bp, Homo sapiens
tatagtttttagtat

SEQ ID NO: 852403 - DNA, 15 bp, Homo sapiens
atagtttttagtata

SEQ ID NO: 852404 - DNA, 15 bp, Homo sapiens
tagtttttagtatat

SEQ ID NO: 852405 - DNA, 15 bp, Homo sapiens
agtttttagtatata

SEQ ID NO: 852406 - DNA, 15 bp, Homo sapiens
gtttttagtatatat

SEQ ID NO: 852407 - DNA, 15 bp, Homo sapiens
tttttagtatatata

SEQ ID NO: 852408 - DNA, 15 bp, Homo sapiens
ttttagtatatatat

SEQ ID NO: 852409 - DNA, 15 bp, Homo sapiens
tttagtatatatata

SEQ ID NO: 852410 - DNA, 15 bp, Homo sapiens
ttagtatatatatat

SEQ ID NO: 852411 - DNA, 15 bp, Homo sapiens
tagtatatatatata

SEQ ID NO: 852412 - DNA, 15 bp, Homo sapiens
agtatatatatatat

SEQ ID NO: 852413 - DNA, 15 bp, Homo sapiens
tatattttttttttc

SEQ ID NO: 852414 - DNA, 15 bp, Homo sapiens
atattttttttttct

SEQ ID NO: 852415 - DNA, 15 bp, Homo sapiens
tttttttttcttcag

SEQ ID NO: 852416 - DNA, 15 bp, Homo sapiens
ttttttttcttcaga

SEQ ID NO: 852417 - DNA, 15 bp, Homo sapiens
tttttttcttcagaa

SEQ ID NO: 852418 - DNA, 15 bp, Homo sapiens
ttttttcttcagaaa

SEQ ID NO: 852419 - DNA, 15 bp, Homo sapiens
tttttcttcagaaaa

SEQ ID NO: 852420 - DNA, 15 bp, Homo sapiens
ttttcttcagaaaag

SEQ ID NO: 852421 - DNA, 15 bp, Homo sapiens
tttcttcagaaaagg

SEQ ID NO: 852422 - DNA, 15 bp, Homo sapiens
ttcttcagaaaaggg

SEQ ID NO: 852423 - DNA, 15 bp, Homo sapiens
tcttcagaaaagggc

SEQ ID NO: 852424 - DNA, 15 bp, Homo sapiens
cttcagaaaagggca

SEQ ID NO: 852425 - DNA, 15 bp, Homo sapiens
ttcagaaaagggcaa

SEQ ID NO: 852426 - DNA, 15 bp, Homo sapiens
tcagaaaagggcaaa

SEQ ID NO: 852427 - DNA, 15 bp, Homo sapiens
cagaaaagggcaaaa

SEQ ID NO: 852428 - DNA, 15 bp, Homo sapiens
agaaaagggcaaaaa

SEQ ID NO: 852429 - DNA, 15 bp, Homo sapiens
gaaaagggcaaaaag

SEQ ID NO: 852430 - DNA, 15 bp, Homo sapiens
aaaagggcaaaaagg

SEQ ID NO: 852431 - DNA, 15 bp, Homo sapiens
aaagggcaaaaagga

SEQ ID NO: 852432 - DNA, 15 bp, Homo sapiens
aagggcaaaaaggac

SEQ ID NO: 852433 - DNA, 15 bp, Homo sapiens
agggcaaaaaggact

SEQ ID NO: 852434 - DNA, 15 bp, Homo sapiens
gggcaaaaaggactt

SEQ ID NO: 852435 - DNA, 15 bp, Homo sapiens
ggcaaaaaggacttg

SEQ ID NO: 852436 - DNA, 15 bp, Homo sapiens
gcaaaaaggacttgt

SEQ ID NO: 852437 - DNA, 15 bp, Homo sapiens
caaaaaggacttgtt

SEQ ID NO: 852438 - DNA, 15 bp, Homo sapiens
aaaaaggacttgttt

SEQ ID NO: 852439 - DNA, 15 bp, Homo sapiens
aaaaggacttgtttg

SEQ ID NO: 852440 - DNA, 15 bp, Homo sapiens
aaaggacttgtttgg

SEQ ID NO: 852441 - DNA, 15 bp, Homo sapiens
aaggacttgtttggc

SEQ ID NO: 852442 - DNA, 15 bp, Homo sapiens
aggacttgtttggct

SEQ ID NO: 852443 - DNA, 15 bp, Homo sapiens
ggacttgtttggctt

SEQ ID NO: 852444 - DNA, 15 bp, Homo sapiens
gacttgtttggcttt

SEQ ID NO: 852445 - DNA, 15 bp, Homo sapiens
acttgtttggctttg

SEQ ID NO: 852446 - DNA, 15 bp, Homo sapiens
cttgtttggctttgt

SEQ ID NO: 852447 - DNA, 15 bp, Homo sapiens
ttgtttggctttgtt

SEQ ID NO: 852448 - DNA, 15 bp, Homo sapiens
tgtttggctttgttt

SEQ ID NO: 852449 - DNA, 15 bp, Homo sapiens
gtttggctttgtttg

SEQ ID NO: 852450 - DNA, 15 bp, Homo sapiens
tttggctttgtttgg

SEQ ID NO: 852451 - DNA, 15 bp, Homo sapiens
ttggctttgtttggg

SEQ ID NO: 852452 - DNA, 15 bp, Homo sapiens
tggctttgtttgggc

SEQ ID NO: 852453 - DNA, 15 bp, Homo sapiens
ggctttgtttgggct

SEQ ID NO: 852454 - DNA, 15 bp, Homo sapiens
gctttgtttgggctt

SEQ ID NO: 852455 - DNA, 15 bp, Homo sapiens
ctttgtttgggcttt

SEQ ID NO: 852456 - DNA, 15 bp, Homo sapiens
tttgtttgggctttc

SEQ ID NO: 852457 - DNA, 15 bp, Homo sapiens
ttgtttgggctttct

SEQ ID NO: 852458 - DNA, 15 bp, Homo sapiens
tgtttgggctttctt

SEQ ID NO: 852459 - DNA, 15 bp, Homo sapiens
gtttgggctttcttt

SEQ ID NO: 852460 - DNA, 15 bp, Homo sapiens
tttgggctttctttg

SEQ ID NO: 852461 - DNA, 15 bp, Homo sapiens
ttgggctttctttgt

SEQ ID NO: 852462 - DNA, 15 bp, Homo sapiens
tgggctttctttgtg

SEQ ID NO: 852463 - DNA, 15 bp, Homo sapiens
gggctttctttgtgc

SEQ ID NO: 852464 - DNA, 15 bp, Homo sapiens
ggctttctttgtgca

SEQ ID NO: 852465 - DNA, 15 bp, Homo sapiens
gctttctttgtgcag

SEQ ID NO: 852466 - DNA, 15 bp, Homo sapiens
ctttctttgtgcagt

SEQ ID NO: 852467 - DNA, 15 bp, Homo sapiens
tttctttgtgcagtt

SEQ ID NO: 852468 - DNA, 15 bp, Homo sapiens
ttctttgtgcagttg

SEQ ID NO: 852469 - DNA, 15 bp, Homo sapiens
tctttgtgcagttgc

SEQ ID NO: 852470 - DNA, 15 bp, Homo sapiens
ctttgtgcagttgcc

SEQ ID NO: 852471 - DNA, 15 bp, Homo sapiens
tttgtgcagttgcca

SEQ ID NO: 852472 - DNA, 15 bp, Homo sapiens
ttgtgcagttgccag

SEQ ID NO: 852473 - DNA, 15 bp, Homo sapiens
tgtgcagttgccagc

SEQ ID NO: 852474 - DNA, 15 bp, Homo sapiens
gtgcagttgccagct

SEQ ID NO: 852475 - DNA, 15 bp, Homo sapiens
tgcagttgccagctt

SEQ ID NO: 852476 - DNA, 15 bp, Homo sapiens
gcagttgccagcttt

SEQ ID NO: 852477 - DNA, 15 bp, Homo sapiens
cagttgccagcttta

SEQ ID NO: 852478 - DNA, 15 bp, Homo sapiens
agttgccagctttaa

SEQ ID NO: 852479 - DNA, 15 bp, Homo sapiens
gttgccagctttaat

SEQ ID NO: 852480 - DNA, 15 bp, Homo sapiens
ttgccagctttaatt

SEQ ID NO: 852481 - DNA, 15 bp, Homo sapiens
tgccagctttaattc

SEQ ID NO: 852482 - DNA, 15 bp, Homo sapiens
gccagctttaattct

SEQ ID NO: 852483 - DNA, 15 bp, Homo sapiens
ccagctttaattctc

SEQ ID NO: 852484 - DNA, 15 bp, Homo sapiens
cagctttaattctca

SEQ ID NO: 852485 - DNA, 15 bp, Homo sapiens
agctttaattctcaa

SEQ ID NO: 852486 - DNA, 15 bp, Homo sapiens
gctttaattctcaaa

SEQ ID NO: 852487 - DNA, 15 bp, Homo sapiens
ctttaattctcaaat

SEQ ID NO: 852488 - DNA, 15 bp, Homo sapiens
tttaattctcaaatg

SEQ ID NO: 852489 - DNA, 15 bp, Homo sapiens
ttaattctcaaatgt

SEQ ID NO: 852490 - DNA, 15 bp, Homo sapiens
taattctcaaatgtg

SEQ ID NO: 852491 - DNA, 15 bp, Homo sapiens
aattctcaaatgtgg

SEQ ID NO: 852492 - DNA, 15 bp, Homo sapiens
attctcaaatgtggc

SEQ ID NO: 852493 - DNA, 15 bp, Homo sapiens
ttctcaaatgtggct

SEQ ID NO: 852494 - DNA, 15 bp, Homo sapiens
tctcaaatgtggctt

SEQ ID NO: 852495 - DNA, 15 bp, Homo sapiens
ctcaaatgtggcttg

SEQ ID NO: 852496 - DNA, 15 bp, Homo sapiens
tcaaatgtggcttgg

SEQ ID NO: 852497 - DNA, 15 bp, Homo sapiens
caaatgtggcttggt

SEQ ID NO: 852498 - DNA, 15 bp, Homo sapiens
aaatgtggcttggtc

SEQ ID NO: 852499 - DNA, 15 bp, Homo sapiens
aatgtggcttggtct

SEQ ID NO: 852500 - DNA, 15 bp, Homo sapiens
atgtggcttggtctc

SEQ ID NO: 852501 - DNA, 15 bp, Homo sapiens
tgtggcttggtctca

SEQ ID NO: 852502 - DNA, 15 bp, Homo sapiens
gtggcttggtctcag

SEQ ID NO: 852503 - DNA, 15 bp, Homo sapiens
tggcttggtctcagt

SEQ ID NO: 852504 - DNA, 15 bp, Homo sapiens
ggcttggtctcagtg

SEQ ID NO: 852505 - DNA, 15 bp, Homo sapiens
gcttggtctcagtgt

SEQ ID NO: 852506 - DNA, 15 bp, Homo sapiens
cttggtctcagtgtg

SEQ ID NO: 852507 - DNA, 15 bp, Homo sapiens
ttggtctcagtgtgg

SEQ ID NO: 852508 - DNA, 15 bp, Homo sapiens
tggtctcagtgtgga

SEQ ID NO: 852509 - DNA, 15 bp, Homo sapiens
ggtctcagtgtggaa

SEQ ID NO: 852510 - DNA, 15 bp, Homo sapiens
gtctcagtgtggaag

SEQ ID NO: 852511 - DNA, 15 bp, Homo sapiens
tctcagtgtggaagc

SEQ ID NO: 852512 - DNA, 15 bp, Homo sapiens
ctcagtgtggaagca

SEQ ID NO: 852513 - DNA, 15 bp, Homo sapiens
tcagtgtggaagcac

SEQ ID NO: 852514 - DNA, 15 bp, Homo sapiens
cagtgtggaagcaca

SEQ ID NO: 852515 - DNA, 15 bp, Homo sapiens
agtgtggaagcacat

SEQ ID NO: 852516 - DNA, 15 bp, Homo sapiens
gtgtggaagcacatt

SEQ ID NO: 852517 - DNA, 15 bp, Homo sapiens
tgtggaagcacattg

SEQ ID NO: 852518 - DNA, 15 bp, Homo sapiens
gtggaagcacattgg

SEQ ID NO: 852519 - DNA, 15 bp, Homo sapiens
tggaagcacattggt

SEQ ID NO: 852520 - DNA, 15 bp, Homo sapiens
ggaagcacattggtt

SEQ ID NO: 852521 - DNA, 15 bp, Homo sapiens
gaagcacattggttc

SEQ ID NO: 852522 - DNA, 15 bp, Homo sapiens
aagcacattggttct

SEQ ID NO: 852523 - DNA, 15 bp, Homo sapiens
agcacattggttctt

SEQ ID NO: 852524 - DNA, 15 bp, Homo sapiens
gcacattggttcttg

SEQ ID NO: 852525 - DNA, 15 bp, Homo sapiens
cacattggttcttgt

SEQ ID NO: 852526 - DNA, 15 bp, Homo sapiens
acattggttcttgtg

SEQ ID NO: 852527 - DNA, 15 bp, Homo sapiens
cattggttcttgtgg

SEQ ID NO: 852528 - DNA, 15 bp, Homo sapiens
attggttcttgtgga

SEQ ID NO: 852529 - DNA, 15 bp, Homo sapiens
ttggttcttgtggaa

SEQ ID NO: 852530 - DNA, 15 bp, Homo sapiens
tggttcttgtggaaa

SEQ ID NO: 852531 - DNA, 15 bp, Homo sapiens
ggttcttgtggaaaa

SEQ ID NO: 852532 - DNA, 15 bp, Homo sapiens
gttcttgtggaaaaa

SEQ ID NO: 852533 - DNA, 15 bp, Homo sapiens
ttcttgtggaaaaag

SEQ ID NO: 852534 - DNA, 15 bp, Homo sapiens
tcttgtggaaaaagg

SEQ ID NO: 852535 - DNA, 15 bp, Homo sapiens
cttgtggaaaaaggt

SEQ ID NO: 852536 - DNA, 15 bp, Homo sapiens
ttgtggaaaaaggtg

SEQ ID NO: 852537 - DNA, 15 bp, Homo sapiens
tgtggaaaaaggtgt

SEQ ID NO: 852538 - DNA, 15 bp, Homo sapiens
gtggaaaaaggtgtg

SEQ ID NO: 852539 - DNA, 15 bp, Homo sapiens
tggaaaaaggtgtgt

SEQ ID NO: 852540 - DNA, 15 bp, Homo sapiens
ggaaaaaggtgtgtt

SEQ ID NO: 852541 - DNA, 15 bp, Homo sapiens
gaaaaaggtgtgttt

SEQ ID NO: 852542 - DNA, 15 bp, Homo sapiens
aaaaaggtgtgtttg

SEQ ID NO: 852543 - DNA, 15 bp, Homo sapiens
aaaaggtgtgtttga

SEQ ID NO: 852544 - DNA, 15 bp, Homo sapiens
aaaggtgtgtttgag

SEQ ID NO: 852545 - DNA, 15 bp, Homo sapiens
aaggtgtgtttgagg

SEQ ID NO: 852546 - DNA, 15 bp, Homo sapiens
aggtgtgtttgaggg

SEQ ID NO: 852547 - DNA, 15 bp, Homo sapiens
ggtgtgtttgaggga

SEQ ID NO: 852548 - DNA, 15 bp, Homo sapiens
gtgtgtttgagggaa

SEQ ID NO: 852549 - DNA, 15 bp, Homo sapiens
tgtgtttgagggaat

SEQ ID NO: 852550 - DNA, 15 bp, Homo sapiens
gtgtttgagggaatg

SEQ ID NO: 852551 - DNA, 15 bp, Homo sapiens
tgtttgagggaatgt

SEQ ID NO: 852552 - DNA, 15 bp, Homo sapiens
gtttgagggaatgtg

SEQ ID NO: 852553 - DNA, 15 bp, Homo sapiens
tttgagggaatgtgg

SEQ ID NO: 852554 - DNA, 15 bp, Homo sapiens
ttgagggaatgtgga

SEQ ID NO: 852555 - DNA, 15 bp, Homo sapiens
tgagggaatgtggat

SEQ ID NO: 852556 - DNA, 15 bp, Homo sapiens
gagggaatgtggatc

SEQ ID NO: 852557 - DNA, 15 bp, Homo sapiens
agggaatgtggatca

SEQ ID NO: 852558 - DNA, 15 bp, Homo sapiens
gggaatgtggatcat

SEQ ID NO: 852559 - DNA, 15 bp, Homo sapiens
ggaatgtggatcatg

SEQ ID NO: 852560 - DNA, 15 bp, Homo sapiens
gaatgtggatcatgc

SEQ ID NO: 852561 - DNA, 15 bp, Homo sapiens
aatgtggatcatgcc

SEQ ID NO: 852562 - DNA, 15 bp, Homo sapiens
atgtggatcatgcct

SEQ ID NO: 852563 - DNA, 15 bp, Homo sapiens
tgtggatcatgcctc

SEQ ID NO: 852564 - DNA, 15 bp, Homo sapiens
gtggatcatgcctct

SEQ ID NO: 852565 - DNA, 15 bp, Homo sapiens
tggatcatgcctctg

SEQ ID NO: 852566 - DNA, 15 bp, Homo sapiens
ggatcatgcctctga

SEQ ID NO: 852567 - DNA, 15 bp, Homo sapiens
gatcatgcctctgag

SEQ ID NO: 852568 - DNA, 15 bp, Homo sapiens
atcatgcctctgaga

SEQ ID NO: 852569 - DNA, 15 bp, Homo sapiens
tcatgcctctgagaa

SEQ ID NO: 852570 - DNA, 15 bp, Homo sapiens
catgcctctgagaaa

SEQ ID NO: 852571 - DNA, 15 bp, Homo sapiens
atgcctctgagaaaa

SEQ ID NO: 852572 - DNA, 15 bp, Homo sapiens
tgcctctgagaaaac

SEQ ID NO: 852573 - DNA, 15 bp, Homo sapiens
gcctctgagaaaaca

SEQ ID NO: 852574 - DNA, 15 bp, Homo sapiens
cctctgagaaaacac

SEQ ID NO: 852575 - DNA, 15 bp, Homo sapiens
ctctgagaaaacaca

SEQ ID NO: 852576 - DNA, 15 bp, Homo sapiens
tctgagaaaacacag

SEQ ID NO: 852577 - DNA, 15 bp, Homo sapiens
ctgagaaaacacagg

SEQ ID NO: 852578 - DNA, 15 bp, Homo sapiens
tgagaaaacacagga

SEQ ID NO: 852579 - DNA, 15 bp, Homo sapiens
gagaaaacacaggac

SEQ ID NO: 852580 - DNA, 15 bp, Homo sapiens
agaaaacacaggact

SEQ ID NO: 852581 - DNA, 15 bp, Homo sapiens
gaaaacacaggactt

SEQ ID NO: 852582 - DNA, 15 bp, Homo sapiens
aaaacacaggactta

SEQ ID NO: 852583 - DNA, 15 bp, Homo sapiens
aaacacaggacttat

SEQ ID NO: 852584 - DNA, 15 bp, Homo sapiens
aacacaggacttatc

SEQ ID NO: 852585 - DNA, 15 bp, Homo sapiens
acacaggacttatca

SEQ ID NO: 852586 - DNA, 15 bp, Homo sapiens
cacaggacttatcaa

SEQ ID NO: 852587 - DNA, 15 bp, Homo sapiens
acaggacttatcaaa

SEQ ID NO: 852588 - DNA, 15 bp, Homo sapiens
caggacttatcaaac

SEQ ID NO: 852589 - DNA, 15 bp, Homo sapiens
aggacttatcaaaca

SEQ ID NO: 852590 - DNA, 15 bp, Homo sapiens
ggacttatcaaacac

SEQ ID NO: 852591 - DNA, 15 bp, Homo sapiens
gacttatcaaacaca

SEQ ID NO: 852592 - DNA, 15 bp, Homo sapiens
acttatcaaacacaa

SEQ ID NO: 852593 - DNA, 15 bp, Homo sapiens
cttatcaaacacaat

SEQ ID NO: 852594 - DNA, 15 bp, Homo sapiens
ttatcaaacacaata

SEQ ID NO: 852595 - DNA, 15 bp, Homo sapiens
tatcaaacacaatat

SEQ ID NO: 852596 - DNA, 15 bp, Homo sapiens
atcaaacacaatatc

SEQ ID NO: 852597 - DNA, 15 bp, Homo sapiens
tcaaacacaatatcc

SEQ ID NO: 852598 - DNA, 15 bp, Homo sapiens
caaacacaatatcca

SEQ ID NO: 852599 - DNA, 15 bp, Homo sapiens
aaacacaatatccac

SEQ ID NO: 852600 - DNA, 15 bp, Homo sapiens
aacacaatatccacg

SEQ ID NO: 852601 - DNA, 15 bp, Homo sapiens
acacaatatccacgt

SEQ ID NO: 852602 - DNA, 15 bp, Homo sapiens
cacaatatccacgtg

SEQ ID NO: 852603 - DNA, 15 bp, Homo sapiens
acaatatccacgtga

SEQ ID NO: 852604 - DNA, 15 bp, Homo sapiens
caatatccacgtgaa

SEQ ID NO: 852605 - DNA, 15 bp, Homo sapiens
aatatccacgtgaaa

SEQ ID NO: 852606 - DNA, 15 bp, Homo sapiens
atatccacgtgaaaa

SEQ ID NO: 852607 - DNA, 15 bp, Homo sapiens
tatccacgtgaaaac

SEQ ID NO: 852608 - DNA, 15 bp, Homo sapiens
atccacgtgaaaaca

SEQ ID NO: 852609 - DNA, 15 bp, Homo sapiens
tccacgtgaaaacac

SEQ ID NO: 852610 - DNA, 15 bp, Homo sapiens
ccacgtgaaaacaca

SEQ ID NO: 852611 - DNA, 15 bp, Homo sapiens
cacgtgaaaacacac

SEQ ID NO: 852612 - DNA, 15 bp, Homo sapiens
acgtgaaaacacaca

SEQ ID NO: 852613 - DNA, 15 bp, Homo sapiens
cgtgaaaacacacat

SEQ ID NO: 852614 - DNA, 15 bp, Homo sapiens
gtgaaaacacacatt

SEQ ID NO: 852615 - DNA, 15 bp, Homo sapiens
tgaaaacacacattt

SEQ ID NO: 852616 - DNA, 15 bp, Homo sapiens
gaaaacacacatttt

SEQ ID NO: 852617 - DNA, 15 bp, Homo sapiens
aaaacacacattttt

SEQ ID NO: 852618 - DNA, 15 bp, Homo sapiens
aaacacacatttttt

SEQ ID NO: 852619 - DNA, 15 bp, Homo sapiens
aacacacatttttta

SEQ ID NO: 852620 - DNA, 15 bp, Homo sapiens
acacacattttttaa

SEQ ID NO: 852621 - DNA, 15 bp, Homo sapiens
cacacattttttaaa

SEQ ID NO: 852622 - DNA, 15 bp, Homo sapiens
acacattttttaaaa

SEQ ID NO: 852623 - DNA, 15 bp, Homo sapiens
cacattttttaaaat

SEQ ID NO: 852624 - DNA, 15 bp, Homo sapiens
acattttttaaaatc

SEQ ID NO: 852625 - DNA, 15 bp, Homo sapiens
cattttttaaaatct

SEQ ID NO: 852626 - DNA, 15 bp, Homo sapiens
attttttaaaatctt

SEQ ID NO: 852627 - DNA, 15 bp, Homo sapiens
ttttttaaaatcttc

SEQ ID NO: 852628 - DNA, 15 bp, Homo sapiens
tttttaaaatcttcc

SEQ ID NO: 852629 - DNA, 15 bp, Homo sapiens
ttttaaaatcttccc

SEQ ID NO: 852630 - DNA, 15 bp, Homo sapiens
tttaaaatcttccct

SEQ ID NO: 852631 - DNA, 15 bp, Homo sapiens
ttaaaatcttccctg

SEQ ID NO: 852632 - DNA, 15 bp, Homo sapiens
taaaatcttccctga

SEQ ID NO: 852633 - DNA, 15 bp, Homo sapiens
aaaatcttccctgag

SEQ ID NO: 852634 - DNA, 15 bp, Homo sapiens
aaatcttccctgaga

SEQ ID NO: 852635 - DNA, 15 bp, Homo sapiens
aatcttccctgagat

SEQ ID NO: 852636 - DNA, 15 bp, Homo sapiens
atcttccctgagata

SEQ ID NO: 852637 - DNA, 15 bp, Homo sapiens
tcttccctgagataa

SEQ ID NO: 852638 - DNA, 15 bp, Homo sapiens
cttccctgagataat

SEQ ID NO: 852639 - DNA, 15 bp, Homo sapiens
ttccctgagataata

SEQ ID NO: 852640 - DNA, 15 bp, Homo sapiens
tccctgagataataa

SEQ ID NO: 852641 - DNA, 15 bp, Homo sapiens
ccctgagataataat

SEQ ID NO: 852642 - DNA, 15 bp, Homo sapiens
cctgagataataatt

SEQ ID NO: 852643 - DNA, 15 bp, Homo sapiens
ctgagataataattt

SEQ ID NO: 852644 - DNA, 15 bp, Homo sapiens
tgagataataatttt

SEQ ID NO: 852645 - DNA, 15 bp, Homo sapiens
gagataataatttta

SEQ ID NO: 852646 - DNA, 15 bp, Homo sapiens
agataataattttaa

SEQ ID NO: 852647 - DNA, 15 bp, Homo sapiens
gataataattttaat

SEQ ID NO: 852648 - DNA, 15 bp, Homo sapiens
ataataattttaatg

SEQ ID NO: 852649 - DNA, 15 bp, Homo sapiens
taataattttaatgt

SEQ ID NO: 852650 - DNA, 15 bp, Homo sapiens
aataattttaatgtt

SEQ ID NO: 852651 - DNA, 15 bp, Homo sapiens
ataattttaatgttt

SEQ ID NO: 852652 - DNA, 15 bp, Homo sapiens
taattttaatgtttt

SEQ ID NO: 852653 - DNA, 15 bp, Homo sapiens
aattttaatgttttt

SEQ ID NO: 852654 - DNA, 15 bp, Homo sapiens
attttaatgtttttc

SEQ ID NO: 852655 - DNA, 15 bp, Homo sapiens
ttttaatgtttttct

SEQ ID NO: 852656 - DNA, 15 bp, Homo sapiens
tttaatgtttttctt

SEQ ID NO: 852657 - DNA, 15 bp, Homo sapiens
ttaatgtttttcttt

SEQ ID NO: 852658 - DNA, 15 bp, Homo sapiens
taatgtttttcttta

SEQ ID NO: 852659 - DNA, 15 bp, Homo sapiens
aatgtttttctttat

SEQ ID NO: 852660 - DNA, 15 bp, Homo sapiens
atgtttttctttatt

SEQ ID NO: 852661 - DNA, 15 bp, Homo sapiens
tgtttttctttattt

SEQ ID NO: 852662 - DNA, 15 bp, Homo sapiens
gtttttctttattta

SEQ ID NO: 852663 - DNA, 15 bp, Homo sapiens
tttttctttatttaa

SEQ ID NO: 852664 - DNA, 15 bp, Homo sapiens
ttttctttatttaaa

SEQ ID NO: 852665 - DNA, 15 bp, Homo sapiens
tttctttatttaaac

SEQ ID NO: 852666 - DNA, 15 bp, Homo sapiens
ttctttatttaaaca

SEQ ID NO: 852667 - DNA, 15 bp, Homo sapiens
tctttatttaaacat

SEQ ID NO: 852668 - DNA, 15 bp, Homo sapiens
ctttatttaaacatg

SEQ ID NO: 852669 - DNA, 15 bp, Homo sapiens
tttatttaaacatgt

SEQ ID NO: 852670 - DNA, 15 bp, Homo sapiens
ttatttaaacatgtc

SEQ ID NO: 852671 - DNA, 15 bp, Homo sapiens
tatttaaacatgtcc

SEQ ID NO: 852672 - DNA, 15 bp, Homo sapiens
atttaaacatgtccc

SEQ ID NO: 852673 - DNA, 15 bp, Homo sapiens
tttaaacatgtccca

SEQ ID NO: 852674 - DNA, 15 bp, Homo sapiens
ttaaacatgtcccac

SEQ ID NO: 852675 - DNA, 15 bp, Homo sapiens
taaacatgtcccact

SEQ ID NO: 852676 - DNA, 15 bp, Homo sapiens
aaacatgtcccactt

SEQ ID NO: 852677 - DNA, 15 bp, Homo sapiens
aacatgtcccacttc

SEQ ID NO: 852678 - DNA, 15 bp, Homo sapiens
acatgtcccacttct

SEQ ID NO: 852679 - DNA, 15 bp, Homo sapiens
catgtcccacttctt

SEQ ID NO: 852680 - DNA, 15 bp, Homo sapiens
atgtcccacttcttt

SEQ ID NO: 852681 - DNA, 15 bp, Homo sapiens
tgtcccacttctttc

SEQ ID NO: 852682 - DNA, 15 bp, Homo sapiens
gtcccacttctttcc

SEQ ID NO: 852683 - DNA, 15 bp, Homo sapiens
tcccacttctttccc

SEQ ID NO: 852684 - DNA, 15 bp, Homo sapiens
cccacttctttccct

SEQ ID NO: 852685 - DNA, 15 bp, Homo sapiens
ccacttctttccctc

SEQ ID NO: 852686 - DNA, 15 bp, Homo sapiens
cacttctttccctct

SEQ ID NO: 852687 - DNA, 15 bp, Homo sapiens
acttctttccctctc

SEQ ID NO: 852688 - DNA, 15 bp, Homo sapiens
cttctttccctctca

SEQ ID NO: 852689 - DNA, 15 bp, Homo sapiens
ttctttccctctcac

SEQ ID NO: 852690 - DNA, 15 bp, Homo sapiens
tctttccctctcaca

SEQ ID NO: 852691 - DNA, 15 bp, Homo sapiens
ctttccctctcacat

SEQ ID NO: 852692 - DNA, 15 bp, Homo sapiens
tttccctctcacatt

SEQ ID NO: 852693 - DNA, 15 bp, Homo sapiens
ttccctctcacattt

SEQ ID NO: 852694 - DNA, 15 bp, Homo sapiens
tccctctcacatttt

SEQ ID NO: 852695 - DNA, 15 bp, Homo sapiens
ccctctcacattttc

SEQ ID NO: 852696 - DNA, 15 bp, Homo sapiens
cctctcacattttct

SEQ ID NO: 852697 - DNA, 15 bp, Homo sapiens
ctctcacattttcta

SEQ ID NO: 852698 - DNA, 15 bp, Homo sapiens
tctcacattttctaa

SEQ ID NO: 852699 - DNA, 15 bp, Homo sapiens
ctcacattttctaac

SEQ ID NO: 852700 - DNA, 15 bp, Homo sapiens
tcacattttctaact

SEQ ID NO: 852701 - DNA, 15 bp, Homo sapiens
cacattttctaactg

SEQ ID NO: 852702 - DNA, 15 bp, Homo sapiens
acattttctaactga

SEQ ID NO: 852703 - DNA, 15 bp, Homo sapiens
cattttctaactgac

SEQ ID NO: 852704 - DNA, 15 bp, Homo sapiens
attttctaactgact

SEQ ID NO: 852705 - DNA, 15 bp, Homo sapiens
ttttctaactgactg

SEQ ID NO: 852706 - DNA, 15 bp, Homo sapiens
tttctaactgactgg

SEQ ID NO: 852707 - DNA, 15 bp, Homo sapiens
ttctaactgactggg

SEQ ID NO: 852708 - DNA, 15 bp, Homo sapiens
tctaactgactgggt

SEQ ID NO: 852709 - DNA, 15 bp, Homo sapiens
ctaactgactgggtg

SEQ ID NO: 852710 - DNA, 15 bp, Homo sapiens
taactgactgggtgt

SEQ ID NO: 852711 - DNA, 15 bp, Homo sapiens
aactgactgggtgtg

SEQ ID NO: 852712 - DNA, 15 bp, Homo sapiens
actgactgggtgtga

SEQ ID NO: 852713 - DNA, 15 bp, Homo sapiens
ctgactgggtgtgaa

SEQ ID NO: 852714 - DNA, 15 bp, Homo sapiens
tgactgggtgtgaaa

SEQ ID NO: 852715 - DNA, 15 bp, Homo sapiens
gactgggtgtgaaaa

SEQ ID NO: 852716 - DNA, 15 bp, Homo sapiens
actgggtgtgaaaat

SEQ ID NO: 852717 - DNA, 15 bp, Homo sapiens
ctgggtgtgaaaatt

SEQ ID NO: 852718 - DNA, 15 bp, Homo sapiens
tgggtgtgaaaattc

SEQ ID NO: 852719 - DNA, 15 bp, Homo sapiens
gggtgtgaaaattca

SEQ ID NO: 852720 - DNA, 15 bp, Homo sapiens
ggtgtgaaaattcaa

SEQ ID NO: 852721 - DNA, 15 bp, Homo sapiens
gtgtgaaaattcaaa

SEQ ID NO: 852722 - DNA, 15 bp, Homo sapiens
tgtgaaaattcaaag

SEQ ID NO: 852723 - DNA, 15 bp, Homo sapiens
gtgaaaattcaaagg

SEQ ID NO: 852724 - DNA, 15 bp, Homo sapiens
tgaaaattcaaagga

SEQ ID NO: 852725 - DNA, 15 bp, Homo sapiens
gaaaattcaaaggac

SEQ ID NO: 852726 - DNA, 15 bp, Homo sapiens
aaaattcaaaggacc

SEQ ID NO: 852727 - DNA, 15 bp, Homo sapiens
aaattcaaaggacct

SEQ ID NO: 852728 - DNA, 15 bp, Homo sapiens
aattcaaaggacctg

SEQ ID NO: 852729 - DNA, 15 bp, Homo sapiens
attcaaaggacctgt

SEQ ID NO: 852730 - DNA, 15 bp, Homo sapiens
ttcaaaggacctgtt

SEQ ID NO: 852731 - DNA, 15 bp, Homo sapiens
tcaaaggacctgttt

SEQ ID NO: 852732 - DNA, 15 bp, Homo sapiens
caaaggacctgtttc

SEQ ID NO: 852733 - DNA, 15 bp, Homo sapiens
aaaggacctgtttct

SEQ ID NO: 852734 - DNA, 15 bp, Homo sapiens
aaggacctgtttctc

SEQ ID NO: 852735 - DNA, 15 bp, Homo sapiens
aggacctgtttctcc

SEQ ID NO: 852736 - DNA, 15 bp, Homo sapiens
ggacctgtttctcct

SEQ ID NO: 852737 - DNA, 15 bp, Homo sapiens
gacctgtttctcctt

SEQ ID NO: 852738 - DNA, 15 bp, Homo sapiens
acctgtttctccttc

SEQ ID NO: 852739 - DNA, 15 bp, Homo sapiens
cctgtttctccttcc

SEQ ID NO: 852740 - DNA, 15 bp, Homo sapiens
ctgtttctccttccc

SEQ ID NO: 852741 - DNA, 15 bp, Homo sapiens
tgtttctccttccca

SEQ ID NO: 852742 - DNA, 15 bp, Homo sapiens
gtttctccttcccac

SEQ ID NO: 852743 - DNA, 15 bp, Homo sapiens
tttctccttcccacc

SEQ ID NO: 852744 - DNA, 15 bp, Homo sapiens
ttctccttcccacct

SEQ ID NO: 852745 - DNA, 15 bp, Homo sapiens
tctccttcccacctt

SEQ ID NO: 852746 - DNA, 15 bp, Homo sapiens
ctccttcccaccttc

SEQ ID NO: 852747 - DNA, 15 bp, Homo sapiens
tccttcccaccttct

SEQ ID NO: 852748 - DNA, 15 bp, Homo sapiens
ccttcccaccttctt

SEQ ID NO: 852749 - DNA, 15 bp, Homo sapiens
cttcccaccttcttt

SEQ ID NO: 852750 - DNA, 15 bp, Homo sapiens
ttcccaccttcttta

SEQ ID NO: 852751 - DNA, 15 bp, Homo sapiens
tcccaccttctttaa

SEQ ID NO: 852752 - DNA, 15 bp, Homo sapiens
cccaccttctttaac

SEQ ID NO: 852753 - DNA, 15 bp, Homo sapiens
ccaccttctttaacc

SEQ ID NO: 852754 - DNA, 15 bp, Homo sapiens
caccttctttaacct

SEQ ID NO: 852755 - DNA, 15 bp, Homo sapiens
accttctttaacctg

SEQ ID NO: 852756 - DNA, 15 bp, Homo sapiens
ccttctttaacctgt

SEQ ID NO: 852757 - DNA, 15 bp, Homo sapiens
cttctttaacctgtg

SEQ ID NO: 852758 - DNA, 15 bp, Homo sapiens
ttctttaacctgtgt

SEQ ID NO: 852759 - DNA, 15 bp, Homo sapiens
tctttaacctgtgtt

SEQ ID NO: 852760 - DNA, 15 bp, Homo sapiens
ctttaacctgtgttt

SEQ ID NO: 852761 - DNA, 15 bp, Homo sapiens
tttaacctgtgttta

SEQ ID NO: 852762 - DNA, 15 bp, Homo sapiens
ttaacctgtgtttaa

SEQ ID NO: 852763 - DNA, 15 bp, Homo sapiens
taacctgtgtttaac

SEQ ID NO: 852764 - DNA, 15 bp, Homo sapiens
aacctgtgtttaact

SEQ ID NO: 852765 - DNA, 15 bp, Homo sapiens
acctgtgtttaactg

SEQ ID NO: 852766 - DNA, 15 bp, Homo sapiens
cctgtgtttaactgc

SEQ ID NO: 852767 - DNA, 15 bp, Homo sapiens
ctgtgtttaactgcc

SEQ ID NO: 852768 - DNA, 15 bp, Homo sapiens
tgtgtttaactgcct

SEQ ID NO: 852769 - DNA, 15 bp, Homo sapiens
gtgtttaactgcctt

SEQ ID NO: 852770 - DNA, 15 bp, Homo sapiens
tgtttaactgccttt

SEQ ID NO: 852771 - DNA, 15 bp, Homo sapiens
gtttaactgcctttg

SEQ ID NO: 852772 - DNA, 15 bp, Homo sapiens
tttaactgcctttgt

SEQ ID NO: 852773 - DNA, 15 bp, Homo sapiens
ttaactgcctttgtt

SEQ ID NO: 852774 - DNA, 15 bp, Homo sapiens
taactgcctttgttg

SEQ ID NO: 852775 - DNA, 15 bp, Homo sapiens
aactgcctttgttgt

SEQ ID NO: 852776 - DNA, 15 bp, Homo sapiens
actgcctttgttgtt

SEQ ID NO: 852777 - DNA, 15 bp, Homo sapiens
ctgcctttgttgttg

SEQ ID NO: 852778 - DNA, 15 bp, Homo sapiens
tgcctttgttgttgg

SEQ ID NO: 852779 - DNA, 15 bp, Homo sapiens
gcctttgttgttggt

SEQ ID NO: 852780 - DNA, 15 bp, Homo sapiens
cctttgttgttggtt

SEQ ID NO: 852781 - DNA, 15 bp, Homo sapiens
ctttgttgttggttt

SEQ ID NO: 852782 - DNA, 15 bp, Homo sapiens
tttgttgttggtttc

SEQ ID NO: 852783 - DNA, 15 bp, Homo sapiens
ttgttgttggtttca

SEQ ID NO: 852784 - DNA, 15 bp, Homo sapiens
tgttgttggtttcac

SEQ ID NO: 852785 - DNA, 15 bp, Homo sapiens
gttgttggtttcacc

SEQ ID NO: 852786 - DNA, 15 bp, Homo sapiens
ttgttggtttcaccc

SEQ ID NO: 852787 - DNA, 15 bp, Homo sapiens
tgttggtttcacccc

SEQ ID NO: 852788 - DNA, 15 bp, Homo sapiens
gttggtttcacccca

SEQ ID NO: 852789 - DNA, 15 bp, Homo sapiens
ttggtttcaccccat

SEQ ID NO: 852790 - DNA, 15 bp, Homo sapiens
tggtttcaccccatg

SEQ ID NO: 852791 - DNA, 15 bp, Homo sapiens
ggtttcaccccatga

SEQ ID NO: 852792 - DNA, 15 bp, Homo sapiens
gtttcaccccatgat

SEQ ID NO: 852793 - DNA, 15 bp, Homo sapiens
tttcaccccatgata

SEQ ID NO: 852794 - DNA, 15 bp, Homo sapiens
ttcaccccatgatac

SEQ ID NO: 852795 - DNA, 15 bp, Homo sapiens
tcaccccatgatact

SEQ ID NO: 852796 - DNA, 15 bp, Homo sapiens
caccccatgatactg

SEQ ID NO: 852797 - DNA, 15 bp, Homo sapiens
accccatgatactgt

SEQ ID NO: 852798 - DNA, 15 bp, Homo sapiens
ccccatgatactgtt

SEQ ID NO: 852799 - DNA, 15 bp, Homo sapiens
cccatgatactgttt

SEQ ID NO: 852800 - DNA, 15 bp, Homo sapiens
ccatgatactgtttt

SEQ ID NO: 852801 - DNA, 15 bp, Homo sapiens
catgatactgttttc

SEQ ID NO: 852802 - DNA, 15 bp, Homo sapiens
atgatactgttttca

SEQ ID NO: 852803 - DNA, 15 bp, Homo sapiens
tgatactgttttcat

SEQ ID NO: 852804 - DNA, 15 bp, Homo sapiens
gatactgttttcatg

SEQ ID NO: 852805 - DNA, 15 bp, Homo sapiens
atactgttttcatgc

SEQ ID NO: 852806 - DNA, 15 bp, Homo sapiens
tactgttttcatgct

SEQ ID NO: 852807 - DNA, 15 bp, Homo sapiens
actgttttcatgctt

SEQ ID NO: 852808 - DNA, 15 bp, Homo sapiens
ctgttttcatgcttt

SEQ ID NO: 852809 - DNA, 15 bp, Homo sapiens
tgttttcatgctttg

SEQ ID NO: 852810 - DNA, 15 bp, Homo sapiens
gttttcatgctttgc

SEQ ID NO: 852811 - DNA, 15 bp, Homo sapiens
ttttcatgctttgcc

SEQ ID NO: 852812 - DNA, 15 bp, Homo sapiens
tttcatgctttgcca

SEQ ID NO: 852813 - DNA, 15 bp, Homo sapiens
ttcatgctttgccaa

SEQ ID NO: 852814 - DNA, 15 bp, Homo sapiens
tcatgctttgccaaa

SEQ ID NO: 852815 - DNA, 15 bp, Homo sapiens
catgctttgccaaaa

SEQ ID NO: 852816 - DNA, 15 bp, Homo sapiens
atgctttgccaaaaa

SEQ ID NO: 852817 - DNA, 15 bp, Homo sapiens
tgctttgccaaaaaa

SEQ ID NO: 852818 - DNA, 15 bp, Homo sapiens
gctttgccaaaaaac

SEQ ID NO: 852819 - DNA, 15 bp, Homo sapiens
ctttgccaaaaaacc

SEQ ID NO: 852820 - DNA, 15 bp, Homo sapiens
tttgccaaaaaacct

SEQ ID NO: 852821 - DNA, 15 bp, Homo sapiens
ttgccaaaaaacctt

SEQ ID NO: 852822 - DNA, 15 bp, Homo sapiens
tgccaaaaaaccttg

SEQ ID NO: 852823 - DNA, 15 bp, Homo sapiens
gccaaaaaaccttgt

SEQ ID NO: 852824 - DNA, 15 bp, Homo sapiens
ccaaaaaaccttgtt

SEQ ID NO: 852825 - DNA, 15 bp, Homo sapiens
caaaaaaccttgttt

SEQ ID NO: 852826 - DNA, 15 bp, Homo sapiens
aaaaaaccttgtttt

SEQ ID NO: 852827 - DNA, 15 bp, Homo sapiens
aaaaaccttgttttc

SEQ ID NO: 852828 - DNA, 15 bp, Homo sapiens
aaaaccttgttttca

SEQ ID NO: 852829 - DNA, 15 bp, Homo sapiens
aaaccttgttttcac

SEQ ID NO: 852830 - DNA, 15 bp, Homo sapiens
aaccttgttttcaca

SEQ ID NO: 852831 - DNA, 15 bp, Homo sapiens
accttgttttcacat

SEQ ID NO: 852832 - DNA, 15 bp, Homo sapiens
ccttgttttcacatg

SEQ ID NO: 852833 - DNA, 15 bp, Homo sapiens
cttgttttcacatgc

SEQ ID NO: 852834 - DNA, 15 bp, Homo sapiens
ttgttttcacatgca

SEQ ID NO: 852835 - DNA, 15 bp, Homo sapiens
tgttttcacatgcat

SEQ ID NO: 852836 - DNA, 15 bp, Homo sapiens
gttttcacatgcatc

SEQ ID NO: 852837 - DNA, 15 bp, Homo sapiens
ttttcacatgcatcc

SEQ ID NO: 852838 - DNA, 15 bp, Homo sapiens
tttcacatgcatcct

SEQ ID NO: 852839 - DNA, 15 bp, Homo sapiens
ttcacatgcatcctt

SEQ ID NO: 852840 - DNA, 15 bp, Homo sapiens
tcacatgcatccttc

SEQ ID NO: 852841 - DNA, 15 bp, Homo sapiens
cacatgcatccttca

SEQ ID NO: 852842 - DNA, 15 bp, Homo sapiens
acatgcatccttcaa

SEQ ID NO: 852843 - DNA, 15 bp, Homo sapiens
catgcatccttcaag

SEQ ID NO: 852844 - DNA, 15 bp, Homo sapiens
atgcatccttcaagt

SEQ ID NO: 852845 - DNA, 15 bp, Homo sapiens
tgcatccttcaagtg

SEQ ID NO: 852846 - DNA, 15 bp, Homo sapiens
gcatccttcaagtga

SEQ ID NO: 852847 - DNA, 15 bp, Homo sapiens
catccttcaagtgat

SEQ ID NO: 852848 - DNA, 15 bp, Homo sapiens
atccttcaagtgatt

SEQ ID NO: 852849 - DNA, 15 bp, Homo sapiens
tccttcaagtgattt

SEQ ID NO: 852850 - DNA, 15 bp, Homo sapiens
ccttcaagtgatttg

SEQ ID NO: 852851 - DNA, 15 bp, Homo sapiens
cttcaagtgatttga

SEQ ID NO: 852852 - DNA, 15 bp, Homo sapiens
ttcaagtgatttgaa

SEQ ID NO: 852853 - DNA, 15 bp, Homo sapiens
tcaagtgatttgaaa

SEQ ID NO: 852854 - DNA, 15 bp, Homo sapiens
caagtgatttgaaac

SEQ ID NO: 852855 - DNA, 15 bp, Homo sapiens
aagtgatttgaaaca

SEQ ID NO: 852856 - DNA, 15 bp, Homo sapiens
agtgatttgaaacaa

SEQ ID NO: 852857 - DNA, 15 bp, Homo sapiens
gtgatttgaaacaaa

SEQ ID NO: 852858 - DNA, 15 bp, Homo sapiens
tgatttgaaacaaag

SEQ ID NO: 852859 - DNA, 15 bp, Homo sapiens
gatttgaaacaaagg

SEQ ID NO: 852860 - DNA, 15 bp, Homo sapiens
atttgaaacaaaggt

SEQ ID NO: 852861 - DNA, 15 bp, Homo sapiens
tttgaaacaaaggtt

SEQ ID NO: 852862 - DNA, 15 bp, Homo sapiens
ttgaaacaaaggttt

SEQ ID NO: 852863 - DNA, 15 bp, Homo sapiens
tgaaacaaaggtttt

SEQ ID NO: 852864 - DNA, 15 bp, Homo sapiens
gaaacaaaggtttta

SEQ ID NO: 852865 - DNA, 15 bp, Homo sapiens
aaacaaaggttttat

SEQ ID NO: 852866 - DNA, 15 bp, Homo sapiens
aacaaaggttttatt

SEQ ID NO: 852867 - DNA, 15 bp, Homo sapiens
acaaaggttttattc

SEQ ID NO: 852868 - DNA, 15 bp, Homo sapiens
caaaggttttattcc

SEQ ID NO: 852869 - DNA, 15 bp, Homo sapiens
aaaggttttattcct

SEQ ID NO: 852870 - DNA, 15 bp, Homo sapiens
aaggttttattcctt

SEQ ID NO: 852871 - DNA, 15 bp, Homo sapiens
aggttttattccttc

SEQ ID NO: 852872 - DNA, 15 bp, Homo sapiens
ggttttattccttct

SEQ ID NO: 852873 - DNA, 15 bp, Homo sapiens
gttttattccttctt

SEQ ID NO: 852874 - DNA, 15 bp, Homo sapiens
ttttattccttcttt

SEQ ID NO: 852875 - DNA, 15 bp, Homo sapiens
tttattccttctttc

SEQ ID NO: 852876 - DNA, 15 bp, Homo sapiens
ttattccttctttcc

SEQ ID NO: 852877 - DNA, 15 bp, Homo sapiens
tattccttctttcct

SEQ ID NO: 852878 - DNA, 15 bp, Homo sapiens
attccttctttcctt

SEQ ID NO: 852879 - DNA, 15 bp, Homo sapiens
tccttctttccttct

SEQ ID NO: 852880 - DNA, 15 bp, Homo sapiens
ccttctttccttctg

SEQ ID NO: 852881 - DNA, 15 bp, Homo sapiens
cttctttccttctgg

SEQ ID NO: 852882 - DNA, 15 bp, Homo sapiens
ttctttccttctggt

SEQ ID NO: 852883 - DNA, 15 bp, Homo sapiens
tctttccttctggtg

SEQ ID NO: 852884 - DNA, 15 bp, Homo sapiens
ctttccttctggtgt

SEQ ID NO: 852885 - DNA, 15 bp, Homo sapiens
tttccttctggtgtc

SEQ ID NO: 852886 - DNA, 15 bp, Homo sapiens
ttccttctggtgtca

SEQ ID NO: 852887 - DNA, 15 bp, Homo sapiens
tccttctggtgtcag

SEQ ID NO: 852888 - DNA, 15 bp, Homo sapiens
ccttctggtgtcagt

SEQ ID NO: 852889 - DNA, 15 bp, Homo sapiens
cttctggtgtcagtc

SEQ ID NO: 852890 - DNA, 15 bp, Homo sapiens
ttctggtgtcagtcg

SEQ ID NO: 852891 - DNA, 15 bp, Homo sapiens
tctggtgtcagtcga

SEQ ID NO: 852892 - DNA, 15 bp, Homo sapiens
ctggtgtcagtcgat

SEQ ID NO: 852893 - DNA, 15 bp, Homo sapiens
tggtgtcagtcgatt

SEQ ID NO: 852894 - DNA, 15 bp, Homo sapiens
ggtgtcagtcgattt

SEQ ID NO: 852895 - DNA, 15 bp, Homo sapiens
gtgtcagtcgattta

SEQ ID NO: 852896 - DNA, 15 bp, Homo sapiens
tgtcagtcgatttat

SEQ ID NO: 852897 - DNA, 15 bp, Homo sapiens
gtcagtcgatttatt

SEQ ID NO: 852898 - DNA, 15 bp, Homo sapiens
tcagtcgatttatta

SEQ ID NO: 852899 - DNA, 15 bp, Homo sapiens
cagtcgatttattat

SEQ ID NO: 852900 - DNA, 15 bp, Homo sapiens
agtcgatttattatc

SEQ ID NO: 852901 - DNA, 15 bp, Homo sapiens
gtcgatttattatca

SEQ ID NO: 852902 - DNA, 15 bp, Homo sapiens
tcgatttattatcaa

SEQ ID NO: 852903 - DNA, 15 bp, Homo sapiens
cgatttattatcaaa

SEQ ID NO: 852904 - DNA, 15 bp, Homo sapiens
gatttattatcaaat

SEQ ID NO: 852905 - DNA, 15 bp, Homo sapiens
atttattatcaaatt

SEQ ID NO: 852906 - DNA, 15 bp, Homo sapiens
tttattatcaaattg

SEQ ID NO: 852907 - DNA, 15 bp, Homo sapiens
ttattatcaaattgt

SEQ ID NO: 852908 - DNA, 15 bp, Homo sapiens
tattatcaaattgtt

SEQ ID NO: 852909 - DNA, 15 bp, Homo sapiens
attatcaaattgttt

SEQ ID NO: 852910 - DNA, 15 bp, Homo sapiens
ttatcaaattgtttg

SEQ ID NO: 852911 - DNA, 15 bp, Homo sapiens
tatcaaattgtttga

SEQ ID NO: 852912 - DNA, 15 bp, Homo sapiens
atcaaattgtttgat

SEQ ID NO: 852913 - DNA, 15 bp, Homo sapiens
tcaaattgtttgatt

SEQ ID NO: 852914 - DNA, 15 bp, Homo sapiens
caaattgtttgattt

SEQ ID NO: 852915 - DNA, 15 bp, Homo sapiens
aaattgtttgatttt

SEQ ID NO: 852916 - DNA, 15 bp, Homo sapiens
aattgtttgatttta

SEQ ID NO: 852917 - DNA, 15 bp, Homo sapiens
attgtttgattttaa

SEQ ID NO: 852918 - DNA, 15 bp, Homo sapiens
ttgtttgattttaaa

SEQ ID NO: 852919 - DNA, 15 bp, Homo sapiens
tgtttgattttaaat

SEQ ID NO: 852920 - DNA, 15 bp, Homo sapiens
gtttgattttaaatt

SEQ ID NO: 852921 - DNA, 15 bp, Homo sapiens
tttgattttaaattc

SEQ ID NO: 852922 - DNA, 15 bp, Homo sapiens
ttgattttaaattct

SEQ ID NO: 852923 - DNA, 15 bp, Homo sapiens
tgattttaaattctt

SEQ ID NO: 852924 - DNA, 15 bp, Homo sapiens
gattttaaattcttt

SEQ ID NO: 852925 - DNA, 15 bp, Homo sapiens
attttaaattctttt

SEQ ID NO: 852926 - DNA, 15 bp, Homo sapiens
ttttaaattcttttc

SEQ ID NO: 852927 - DNA, 15 bp, Homo sapiens
tttaaattcttttct

SEQ ID NO: 852928 - DNA, 15 bp, Homo sapiens
ttaaattcttttctt

SEQ ID NO: 852929 - DNA, 15 bp, Homo sapiens
taaattcttttcttg

SEQ ID NO: 852930 - DNA, 15 bp, Homo sapiens
aaattcttttcttgt

SEQ ID NO: 852931 - DNA, 15 bp, Homo sapiens
aattcttttcttgtc

SEQ ID NO: 852932 - DNA, 15 bp, Homo sapiens
attcttttcttgtcg

SEQ ID NO: 852933 - DNA, 15 bp, Homo sapiens
ttcttttcttgtcgt

SEQ ID NO: 852934 - DNA, 15 bp, Homo sapiens
tcttttcttgtcgtt

SEQ ID NO: 852935 - DNA, 15 bp, Homo sapiens
cttttcttgtcgttt

SEQ ID NO: 852936 - DNA, 15 bp, Homo sapiens
ttttcttgtcgtttt

SEQ ID NO: 852937 - DNA, 15 bp, Homo sapiens
tttcttgtcgttttg

SEQ ID NO: 852938 - DNA, 15 bp, Homo sapiens
ttcttgtcgttttgc

SEQ ID NO: 852939 - DNA, 15 bp, Homo sapiens
tcttgtcgttttgca

SEQ ID NO: 852940 - DNA, 15 bp, Homo sapiens
cttgtcgttttgcag

SEQ ID NO: 852941 - DNA, 15 bp, Homo sapiens
ttgtcgttttgcaga

SEQ ID NO: 852942 - DNA, 15 bp, Homo sapiens
tgtcgttttgcagaa

SEQ ID NO: 852943 - DNA, 15 bp, Homo sapiens
gtcgttttgcagaag

SEQ ID NO: 852944 - DNA, 15 bp, Homo sapiens
tcgttttgcagaagc

SEQ ID NO: 852945 - DNA, 15 bp, Homo sapiens
cgttttgcagaagcc

SEQ ID NO: 852946 - DNA, 15 bp, Homo sapiens
gttttgcagaagccg

SEQ ID NO: 852947 - DNA, 15 bp, Homo sapiens
ttttgcagaagccga

SEQ ID NO: 852948 - DNA, 15 bp, Homo sapiens
tttgcagaagccgaa

SEQ ID NO: 852949 - DNA, 15 bp, Homo sapiens
ttgcagaagccgaaa

SEQ ID NO: 852950 - DNA, 15 bp, Homo sapiens
tgcagaagccgaaag

SEQ ID NO: 852951 - DNA, 15 bp, Homo sapiens
gcagaagccgaaagc

SEQ ID NO: 852952 - DNA, 15 bp, Homo sapiens
cagaagccgaaagcg

SEQ ID NO: 852953 - DNA, 15 bp, Homo sapiens
agaagccgaaagcgg

SEQ ID NO: 852954 - DNA, 15 bp, Homo sapiens
gaagccgaaagcggt

SEQ ID NO: 852955 - DNA, 15 bp, Homo sapiens
aagccgaaagcggta

SEQ ID NO: 852956 - DNA, 15 bp, Homo sapiens
agccgaaagcggtat

SEQ ID NO: 852957 - DNA, 15 bp, Homo sapiens
gccgaaagcggtatg

SEQ ID NO: 852958 - DNA, 15 bp, Homo sapiens
ccgaaagcggtatgc

SEQ ID NO: 852959 - DNA, 15 bp, Homo sapiens
cgaaagcggtatgca

SEQ ID NO: 852960 - DNA, 15 bp, Homo sapiens
gaaagcggtatgcac

SEQ ID NO: 852961 - DNA, 15 bp, Homo sapiens
aaagcggtatgcact

SEQ ID NO: 852962 - DNA, 15 bp, Homo sapiens
aagcggtatgcactc

SEQ ID NO: 852963 - DNA, 15 bp, Homo sapiens
agcggtatgcactct

SEQ ID NO: 852964 - DNA, 15 bp, Homo sapiens
gcggtatgcactctt

SEQ ID NO: 852965 - DNA, 15 bp, Homo sapiens
cggtatgcactcttc

SEQ ID NO: 852966 - DNA, 15 bp, Homo sapiens
ggtatgcactcttcg

SEQ ID NO: 852967 - DNA, 15 bp, Homo sapiens
gtatgcactcttcgt

SEQ ID NO: 852968 - DNA, 15 bp, Homo sapiens
tatgcactcttcgtt

SEQ ID NO: 852969 - DNA, 15 bp, Homo sapiens
atgcactcttcgtta

SEQ ID NO: 852970 - DNA, 15 bp, Homo sapiens
tgcactcttcgttaa

SEQ ID NO: 852971 - DNA, 15 bp, Homo sapiens
gcactcttcgttaac

SEQ ID NO: 852972 - DNA, 15 bp, Homo sapiens
cactcttcgttaact

SEQ ID NO: 852973 - DNA, 15 bp, Homo sapiens
actcttcgttaactt

SEQ ID NO: 852974 - DNA, 15 bp, Homo sapiens
ctcttcgttaacttt

SEQ ID NO: 852975 - DNA, 15 bp, Homo sapiens
tcttcgttaactttt

SEQ ID NO: 852976 - DNA, 15 bp, Homo sapiens
cttcgttaacttttc

SEQ ID NO: 852977 - DNA, 15 bp, Homo sapiens
ttcgttaacttttct

SEQ ID NO: 852978 - DNA, 15 bp, Homo sapiens
tcgttaacttttctt

SEQ ID NO: 852979 - DNA, 15 bp, Homo sapiens
cgttaacttttcttc

SEQ ID NO: 852980 - DNA, 15 bp, Homo sapiens
gttaacttttcttcc

SEQ ID NO: 852981 - DNA, 15 bp, Homo sapiens
ttaacttttcttcca

SEQ ID NO: 852982 - DNA, 15 bp, Homo sapiens
taacttttcttccaa

SEQ ID NO: 852983 - DNA, 15 bp, Homo sapiens
aacttttcttccaac

SEQ ID NO: 852984 - DNA, 15 bp, Homo sapiens
acttttcttccaacc

SEQ ID NO: 852985 - DNA, 15 bp, Homo sapiens
cttttcttccaacct

SEQ ID NO: 852986 - DNA, 15 bp, Homo sapiens
ttttcttccaacctc

SEQ ID NO: 852987 - DNA, 15 bp, Homo sapiens
tttcttccaacctcc

SEQ ID NO: 852988 - DNA, 15 bp, Homo sapiens
ttcttccaacctcca

SEQ ID NO: 852989 - DNA, 15 bp, Homo sapiens
tcttccaacctccac

SEQ ID NO: 852990 - DNA, 15 bp, Homo sapiens
cttccaacctccacc

SEQ ID NO: 852991 - DNA, 15 bp, Homo sapiens
ttccaacctccaccc

SEQ ID NO: 852992 - DNA, 15 bp, Homo sapiens
tccaacctccaccct

SEQ ID NO: 852993 - DNA, 15 bp, Homo sapiens
ccaacctccaccctc

SEQ ID NO: 852994 - DNA, 15 bp, Homo sapiens
caacctccaccctct

SEQ ID NO: 852995 - DNA, 15 bp, Homo sapiens
aacctccaccctcta

SEQ ID NO: 852996 - DNA, 15 bp, Homo sapiens
acctccaccctctat

SEQ ID NO: 852997 - DNA, 15 bp, Homo sapiens
cctccaccctctatc

SEQ ID NO: 852998 - DNA, 15 bp, Homo sapiens
ctccaccctctatct

SEQ ID NO: 852999 - DNA, 15 bp, Homo sapiens
tccaccctctatctt

SEQ ID NO: 853000 - DNA, 15 bp, Homo sapiens
ccaccctctatcttc

SEQ ID NO: 853001 - DNA, 15 bp, Homo sapiens
caccctctatcttca

SEQ ID NO: 853002 - DNA, 15 bp, Homo sapiens
accctctatcttcac

SEQ ID NO: 853003 - DNA, 15 bp, Homo sapiens
ccctctatcttcact

SEQ ID NO: 853004 - DNA, 15 bp, Homo sapiens
cctctatcttcactc

SEQ ID NO: 853005 - DNA, 15 bp, Homo sapiens
ctctatcttcactcc

SEQ ID NO: 853006 - DNA, 15 bp, Homo sapiens
tctatcttcactcct

SEQ ID NO: 853007 - DNA, 15 bp, Homo sapiens
ctatcttcactccta

SEQ ID NO: 853008 - DNA, 15 bp, Homo sapiens
tatcttcactcctaa

SEQ ID NO: 853009 - DNA, 15 bp, Homo sapiens
atcttcactcctaac

SEQ ID NO: 853010 - DNA, 15 bp, Homo sapiens
tcttcactcctaacc

SEQ ID NO: 853011 - DNA, 15 bp, Homo sapiens
cttcactcctaacca

SEQ ID NO: 853012 - DNA, 15 bp, Homo sapiens
ttcactcctaaccac

SEQ ID NO: 853013 - DNA, 15 bp, Homo sapiens
tcactcctaaccaca

SEQ ID NO: 853014 - DNA, 15 bp, Homo sapiens
cactcctaaccacag

SEQ ID NO: 853015 - DNA, 15 bp, Homo sapiens
actcctaaccacagg

SEQ ID NO: 853016 - DNA, 15 bp, Homo sapiens
ctcctaaccacagga

SEQ ID NO: 853017 - DNA, 15 bp, Homo sapiens
tcctaaccacaggac

SEQ ID NO: 853018 - DNA, 15 bp, Homo sapiens
cctaaccacaggact

SEQ ID NO: 853019 - DNA, 15 bp, Homo sapiens
ctaaccacaggacta

SEQ ID NO: 853020 - DNA, 15 bp, Homo sapiens
taaccacaggactaa

SEQ ID NO: 853021 - DNA, 15 bp, Homo sapiens
aaccacaggactaac

SEQ ID NO: 853022 - DNA, 15 bp, Homo sapiens
accacaggactaacc

SEQ ID NO: 853023 - DNA, 15 bp, Homo sapiens
ccacaggactaacca

SEQ ID NO: 853024 - DNA, 15 bp, Homo sapiens
cacaggactaaccat

SEQ ID NO: 853025 - DNA, 15 bp, Homo sapiens
acaggactaaccatt

SEQ ID NO: 853026 - DNA, 15 bp, Homo sapiens
caggactaaccattt

SEQ ID NO: 853027 - DNA, 15 bp, Homo sapiens
aggactaaccatttg

SEQ ID NO: 853028 - DNA, 15 bp, Homo sapiens
ggactaaccatttgc

SEQ ID NO: 853029 - DNA, 15 bp, Homo sapiens
gactaaccatttgcc

SEQ ID NO: 853030 - DNA, 15 bp, Homo sapiens
actaaccatttgcca

SEQ ID NO: 853031 - DNA, 15 bp, Homo sapiens
ctaaccatttgccaa

SEQ ID NO: 853032 - DNA, 15 bp, Homo sapiens
taaccatttgccaag

SEQ ID NO: 853033 - DNA, 15 bp, Homo sapiens
aaccatttgccaaga

SEQ ID NO: 853034 - DNA, 15 bp, Homo sapiens
accatttgccaagaa

SEQ ID NO: 853035 - DNA, 15 bp, Homo sapiens
ccatttgccaagaat

SEQ ID NO: 853036 - DNA, 15 bp, Homo sapiens
catttgccaagaatt

SEQ ID NO: 853037 - DNA, 15 bp, Homo sapiens
atttgccaagaattc

SEQ ID NO: 853038 - DNA, 15 bp, Homo sapiens
tttgccaagaattca

SEQ ID NO: 853039 - DNA, 15 bp, Homo sapiens
ttgccaagaattcaa

SEQ ID NO: 853040 - DNA, 15 bp, Homo sapiens
tgccaagaattcaag

SEQ ID NO: 853041 - DNA, 15 bp, Homo sapiens
gccaagaattcaaga

SEQ ID NO: 853042 - DNA, 15 bp, Homo sapiens
ccaagaattcaagaa

SEQ ID NO: 853043 - DNA, 15 bp, Homo sapiens
caagaattcaagaag

SEQ ID NO: 853044 - DNA, 15 bp, Homo sapiens
aagaattcaagaaga

SEQ ID NO: 853045 - DNA, 15 bp, Homo sapiens
agaattcaagaagag

SEQ ID NO: 853046 - DNA, 15 bp, Homo sapiens
gaattcaagaagaga

SEQ ID NO: 853047 - DNA, 15 bp, Homo sapiens
aattcaagaagagag

SEQ ID NO: 853048 - DNA, 15 bp, Homo sapiens
attcaagaagagaga

SEQ ID NO: 853049 - DNA, 15 bp, Homo sapiens
ttcaagaagagagag

SEQ ID NO: 853050 - DNA, 15 bp, Homo sapiens
tcaagaagagagaga

SEQ ID NO: 853051 - DNA, 15 bp, Homo sapiens
caagaagagagagat

SEQ ID NO: 853052 - DNA, 15 bp, Homo sapiens
aagaagagagagatt

SEQ ID NO: 853053 - DNA, 15 bp, Homo sapiens
agaagagagagatta

SEQ ID NO: 853054 - DNA, 15 bp, Homo sapiens
gaagagagagattat

SEQ ID NO: 853055 - DNA, 15 bp, Homo sapiens
aagagagagattata

SEQ ID NO: 853056 - DNA, 15 bp, Homo sapiens
agagagagattatat

SEQ ID NO: 853057 - DNA, 15 bp, Homo sapiens
gagagagattatata

SEQ ID NO: 853058 - DNA, 15 bp, Homo sapiens
agagagattatatat

SEQ ID NO: 853059 - DNA, 15 bp, Homo sapiens
gagagattatatata

SEQ ID NO: 853060 - DNA, 15 bp, Homo sapiens
agagattatatatat

SEQ ID NO: 853061 - DNA, 15 bp, Homo sapiens
gagattatatatatg

SEQ ID NO: 853062 - DNA, 15 bp, Homo sapiens
agattatatatatgt

SEQ ID NO: 853063 - DNA, 15 bp, Homo sapiens
gattatatatatgta

SEQ ID NO: 853064 - DNA, 15 bp, Homo sapiens
attatatatatgtat

SEQ ID NO: 853065 - DNA, 15 bp, Homo sapiens
ttatatatatgtata

SEQ ID NO: 853066 - DNA, 15 bp, Homo sapiens
atatatatgtatata

SEQ ID NO: 853067 - DNA, 15 bp, Homo sapiens
tatatgtatatataa

SEQ ID NO: 853068 - DNA, 15 bp, Homo sapiens
atatgtatatataat

SEQ ID NO: 853069 - DNA, 15 bp, Homo sapiens
tatgtatatataatc

SEQ ID NO: 853070 - DNA, 15 bp, Homo sapiens
atgtatatataatct

SEQ ID NO: 853071 - DNA, 15 bp, Homo sapiens
tgtatatataatctc

SEQ ID NO: 853072 - DNA, 15 bp, Homo sapiens
gtatatataatctca

SEQ ID NO: 853073 - DNA, 15 bp, Homo sapiens
tatatataatctcat

SEQ ID NO: 853074 - DNA, 15 bp, Homo sapiens
atatataatctcatt

SEQ ID NO: 853075 - DNA, 15 bp, Homo sapiens
tatataatctcattc

SEQ ID NO: 853076 - DNA, 15 bp, Homo sapiens
atataatctcattcc

SEQ ID NO: 853077 - DNA, 15 bp, Homo sapiens
tataatctcattccc

SEQ ID NO: 853078 - DNA, 15 bp, Homo sapiens
ataatctcattccct

SEQ ID NO: 853079 - DNA, 15 bp, Homo sapiens
taatctcattccctt

SEQ ID NO: 853080 - DNA, 15 bp, Homo sapiens
aatctcattcccttg

SEQ ID NO: 853081 - DNA, 15 bp, Homo sapiens
atctcattcccttgt

SEQ ID NO: 853082 - DNA, 15 bp, Homo sapiens
tctcattcccttgtc

SEQ ID NO: 853083 - DNA, 15 bp, Homo sapiens
ctcattcccttgtct

SEQ ID NO: 853084 - DNA, 15 bp, Homo sapiens
tcattcccttgtctg

SEQ ID NO: 853085 - DNA, 15 bp, Homo sapiens
cattcccttgtctgg

SEQ ID NO: 853086 - DNA, 15 bp, Homo sapiens
attcccttgtctggt

SEQ ID NO: 853087 - DNA, 15 bp, Homo sapiens
ttcccttgtctggtg

SEQ ID NO: 853088 - DNA, 15 bp, Homo sapiens
tcccttgtctggtgt

SEQ ID NO: 853089 - DNA, 15 bp, Homo sapiens
cccttgtctggtgta

SEQ ID NO: 853090 - DNA, 15 bp, Homo sapiens
ccttgtctggtgtat

SEQ ID NO: 853091 - DNA, 15 bp, Homo sapiens
cttgtctggtgtatc

SEQ ID NO: 853092 - DNA, 15 bp, Homo sapiens
ttgtctggtgtatct

SEQ ID NO: 853093 - DNA, 15 bp, Homo sapiens
tgtctggtgtatcta

SEQ ID NO: 853094 - DNA, 15 bp, Homo sapiens
gtctggtgtatctat

SEQ ID NO: 853095 - DNA, 15 bp, Homo sapiens
tctggtgtatctata

SEQ ID NO: 853096 - DNA, 15 bp, Homo sapiens
ctggtgtatctatat

SEQ ID NO: 853097 - DNA, 15 bp, Homo sapiens
tggtgtatctatatt

SEQ ID NO: 853098 - DNA, 15 bp, Homo sapiens
ggtgtatctatatta

SEQ ID NO: 853099 - DNA, 15 bp, Homo sapiens
gtgtatctatattat

SEQ ID NO: 853100 - DNA, 15 bp, Homo sapiens
tgtatctatattata

SEQ ID NO: 853101 - DNA, 15 bp, Homo sapiens
gtatctatattatat

SEQ ID NO: 853102 - DNA, 15 bp, Homo sapiens
tatctatattatata

SEQ ID NO: 853103 - DNA, 15 bp, Homo sapiens
atctatattatatat

SEQ ID NO: 853104 - DNA, 15 bp, Homo sapiens
tctatattatatatg

SEQ ID NO: 853105 - DNA, 15 bp, Homo sapiens
ctatattatatatgt

SEQ ID NO: 853106 - DNA, 15 bp, Homo sapiens
tatattatatatgtg

SEQ ID NO: 853107 - DNA, 15 bp, Homo sapiens
atattatatatgtgt

SEQ ID NO: 853108 - DNA, 15 bp, Homo sapiens
tattatatatgtgtg

SEQ ID NO: 853109 - DNA, 15 bp, Homo sapiens
attatatatgtgtgt

SEQ ID NO: 853110 - DNA, 15 bp, Homo sapiens
ttatatatgtgtgtg

SEQ ID NO: 853111 - DNA, 15 bp, Homo sapiens
atatgtgtgtgtgta

SEQ ID NO: 853112 - DNA, 15 bp, Homo sapiens
tatgtgtgtgtgtat

SEQ ID NO: 853113 - DNA, 15 bp, Homo sapiens
atgtgtgtgtgtata

SEQ ID NO: 853114 - DNA, 15 bp, Homo sapiens
atatacacacacacc

SEQ ID NO: 853115 - DNA, 15 bp, Homo sapiens
tatacacacacaccc

SEQ ID NO: 853116 - DNA, 15 bp, Homo sapiens
atacacacacacccc

SEQ ID NO: 853117 - DNA, 15 bp, Homo sapiens
tacacacacacccct

SEQ ID NO: 853118 - DNA, 15 bp, Homo sapiens
acacacacacccctc

SEQ ID NO: 853119 - DNA, 15 bp, Homo sapiens
cacacacacccctct

SEQ ID NO: 853120 - DNA, 15 bp, Homo sapiens
acacacacccctctc

SEQ ID NO: 853121 - DNA, 15 bp, Homo sapiens
cacacacccctctcc

SEQ ID NO: 853122 - DNA, 15 bp, Homo sapiens
acacacccctctcca

SEQ ID NO: 853123 - DNA, 15 bp, Homo sapiens
cacacccctctccaa

SEQ ID NO: 853124 - DNA, 15 bp, Homo sapiens
acacccctctccaac

SEQ ID NO: 853125 - DNA, 15 bp, Homo sapiens
cacccctctccaact

SEQ ID NO: 853126 - DNA, 15 bp, Homo sapiens
acccctctccaacta

SEQ ID NO: 853127 - DNA, 15 bp, Homo sapiens
cccctctccaactag

SEQ ID NO: 853128 - DNA, 15 bp, Homo sapiens
ccctctccaactaga

SEQ ID NO: 853129 - DNA, 15 bp, Homo sapiens
cctctccaactagag

SEQ ID NO: 853130 - DNA, 15 bp, Homo sapiens
ctctccaactagagt

SEQ ID NO: 853131 - DNA, 15 bp, Homo sapiens
tctccaactagagta

SEQ ID NO: 853132 - DNA, 15 bp, Homo sapiens
ctccaactagagtac

SEQ ID NO: 853133 - DNA, 15 bp, Homo sapiens
tccaactagagtaca

SEQ ID NO: 853134 - DNA, 15 bp, Homo sapiens
ccaactagagtacat

SEQ ID NO: 853135 - DNA, 15 bp, Homo sapiens
caactagagtacata

SEQ ID NO: 853136 - DNA, 15 bp, Homo sapiens
aactagagtacataa

SEQ ID NO: 853137 - DNA, 15 bp, Homo sapiens
actagagtacataaa

SEQ ID NO: 853138 - DNA, 15 bp, Homo sapiens
ctagagtacataaat

SEQ ID NO: 853139 - DNA, 15 bp, Homo sapiens
tagagtacataaatt

SEQ ID NO: 853140 - DNA, 15 bp, Homo sapiens
agagtacataaattg

SEQ ID NO: 853141 - DNA, 15 bp, Homo sapiens
gagtacataaattgg

SEQ ID NO: 853142 - DNA, 15 bp, Homo sapiens
agtacataaattgga

SEQ ID NO: 853143 - DNA, 15 bp, Homo sapiens
gtacataaattggaa

SEQ ID NO: 853144 - DNA, 15 bp, Homo sapiens
tacataaattggaag

SEQ ID NO: 853145 - DNA, 15 bp, Homo sapiens
acataaattggaagt

SEQ ID NO: 853146 - DNA, 15 bp, Homo sapiens
cataaattggaagta

SEQ ID NO: 853147 - DNA, 15 bp, Homo sapiens
ataaattggaagtag

SEQ ID NO: 853148 - DNA, 15 bp, Homo sapiens
taaattggaagtagc

SEQ ID NO: 853149 - DNA, 15 bp, Homo sapiens
aaattggaagtagcc

SEQ ID NO: 853150 - DNA, 15 bp, Homo sapiens
aattggaagtagcct

SEQ ID NO: 853151 - DNA, 15 bp, Homo sapiens
attggaagtagccta

SEQ ID NO: 853152 - DNA, 15 bp, Homo sapiens
ttggaagtagcctat

SEQ ID NO: 853153 - DNA, 15 bp, Homo sapiens
tggaagtagcctatt

SEQ ID NO: 853154 - DNA, 15 bp, Homo sapiens
ggaagtagcctattt

SEQ ID NO: 853155 - DNA, 15 bp, Homo sapiens
gaagtagcctatttc

SEQ ID NO: 853156 - DNA, 15 bp, Homo sapiens
aagtagcctatttct

SEQ ID NO: 853157 - DNA, 15 bp, Homo sapiens
agtagcctatttctg

SEQ ID NO: 853158 - DNA, 15 bp, Homo sapiens
gtagcctatttctgt

SEQ ID NO: 853159 - DNA, 15 bp, Homo sapiens
tagcctatttctgtt

SEQ ID NO: 853160 - DNA, 15 bp, Homo sapiens
agcctatttctgttc

SEQ ID NO: 853161 - DNA, 15 bp, Homo sapiens
gcctatttctgttcc

SEQ ID NO: 853162 - DNA, 15 bp, Homo sapiens
cctatttctgttcct

SEQ ID NO: 853163 - DNA, 15 bp, Homo sapiens
ctatttctgttcctg

SEQ ID NO: 853164 - DNA, 15 bp, Homo sapiens
tatttctgttcctgt

SEQ ID NO: 853165 - DNA, 15 bp, Homo sapiens
atttctgttcctgtt

SEQ ID NO: 853166 - DNA, 15 bp, Homo sapiens
tttctgttcctgttt

SEQ ID NO: 853167 - DNA, 15 bp, Homo sapiens
ttctgttcctgtttg

SEQ ID NO: 853168 - DNA, 15 bp, Homo sapiens
tctgttcctgtttga

SEQ ID NO: 853169 - DNA, 15 bp, Homo sapiens
ctgttcctgtttgat

SEQ ID NO: 853170 - DNA, 15 bp, Homo sapiens
tgttcctgtttgatt

SEQ ID NO: 853171 - DNA, 15 bp, Homo sapiens
gttcctgtttgattt

SEQ ID NO: 853172 - DNA, 15 bp, Homo sapiens
ttcctgtttgatttg

SEQ ID NO: 853173 - DNA, 15 bp, Homo sapiens
tcctgtttgatttgt

SEQ ID NO: 853174 - DNA, 15 bp, Homo sapiens
cctgtttgatttgtt

SEQ ID NO: 853175 - DNA, 15 bp, Homo sapiens
ctgtttgatttgttg

SEQ ID NO: 853176 - DNA, 15 bp, Homo sapiens
tgtttgatttgttgg

SEQ ID NO: 853177 - DNA, 15 bp, Homo sapiens
gtttgatttgttggt

SEQ ID NO: 853178 - DNA, 15 bp, Homo sapiens
tttgatttgttggtt

SEQ ID NO: 853179 - DNA, 15 bp, Homo sapiens
ttgatttgttggttc

SEQ ID NO: 853180 - DNA, 15 bp, Homo sapiens
tgatttgttggttct

SEQ ID NO: 853181 - DNA, 15 bp, Homo sapiens
gatttgttggttctt

SEQ ID NO: 853182 - DNA, 15 bp, Homo sapiens
atttgttggttcttt

SEQ ID NO: 853183 - DNA, 15 bp, Homo sapiens
tttgttggttctttt

SEQ ID NO: 853184 - DNA, 15 bp, Homo sapiens
ttgttggttcttttg

SEQ ID NO: 853185 - DNA, 15 bp, Homo sapiens
tgttggttcttttgg

SEQ ID NO: 853186 - DNA, 15 bp, Homo sapiens
gttggttcttttgga

SEQ ID NO: 853187 - DNA, 15 bp, Homo sapiens
ttggttcttttggat

SEQ ID NO: 853188 - DNA, 15 bp, Homo sapiens
tggttcttttggatg

SEQ ID NO: 853189 - DNA, 15 bp, Homo sapiens
ggttcttttggatga

SEQ ID NO: 853190 - DNA, 15 bp, Homo sapiens
gttcttttggatgac

SEQ ID NO: 853191 - DNA, 15 bp, Homo sapiens
ttcttttggatgacg

SEQ ID NO: 853192 - DNA, 15 bp, Homo sapiens
tcttttggatgacgc

SEQ ID NO: 853193 - DNA, 15 bp, Homo sapiens
cttttggatgacgca

SEQ ID NO: 853194 - DNA, 15 bp, Homo sapiens
ttttggatgacgcac

SEQ ID NO: 853195 - DNA, 15 bp, Homo sapiens
tttggatgacgcact

SEQ ID NO: 853196 - DNA, 15 bp, Homo sapiens
ttggatgacgcacta

SEQ ID NO: 853197 - DNA, 15 bp, Homo sapiens
tggatgacgcactaa

SEQ ID NO: 853198 - DNA, 15 bp, Homo sapiens
ggatgacgcactaac

SEQ ID NO: 853199 - DNA, 15 bp, Homo sapiens
gatgacgcactaact

SEQ ID NO: 853200 - DNA, 15 bp, Homo sapiens
atgacgcactaactt

SEQ ID NO: 853201 - DNA, 15 bp, Homo sapiens
tgacgcactaacttc

SEQ ID NO: 853202 - DNA, 15 bp, Homo sapiens
gacgcactaacttct

SEQ ID NO: 853203 - DNA, 15 bp, Homo sapiens
acgcactaacttctt

SEQ ID NO: 853204 - DNA, 15 bp, Homo sapiens
cgcactaacttcttt

SEQ ID NO: 853205 - DNA, 15 bp, Homo sapiens
gcactaacttctttg

SEQ ID NO: 853206 - DNA, 15 bp, Homo sapiens
cactaacttctttgc

SEQ ID NO: 853207 - DNA, 15 bp, Homo sapiens
actaacttctttgca

SEQ ID NO: 853208 - DNA, 15 bp, Homo sapiens
ctaacttctttgcag

SEQ ID NO: 853209 - DNA, 15 bp, Homo sapiens
taacttctttgcagg

SEQ ID NO: 853210 - DNA, 15 bp, Homo sapiens
aacttctttgcagga

SEQ ID NO: 853211 - DNA, 15 bp, Homo sapiens
acttctttgcaggaa

SEQ ID NO: 853212 - DNA, 15 bp, Homo sapiens
cttctttgcaggaaa

SEQ ID NO: 853213 - DNA, 15 bp, Homo sapiens
ttctttgcaggaaac

SEQ ID NO: 853214 - DNA, 15 bp, Homo sapiens
tctttgcaggaaacc

SEQ ID NO: 853215 - DNA, 15 bp, Homo sapiens
ctttgcaggaaacct

SEQ ID NO: 853216 - DNA, 15 bp, Homo sapiens
tttgcaggaaaccta

SEQ ID NO: 853217 - DNA, 15 bp, Homo sapiens
ttgcaggaaacctaa

SEQ ID NO: 853218 - DNA, 15 bp, Homo sapiens
tgcaggaaacctaag

SEQ ID NO: 853219 - DNA, 15 bp, Homo sapiens
gcaggaaacctaaga

SEQ ID NO: 853220 - DNA, 15 bp, Homo sapiens
caggaaacctaagaa

SEQ ID NO: 853221 - DNA, 15 bp, Homo sapiens
aggaaacctaagaaa

SEQ ID NO: 853222 - DNA, 15 bp, Homo sapiens
ggaaacctaagaaag

SEQ ID NO: 853223 - DNA, 15 bp, Homo sapiens
gaaacctaagaaagg

SEQ ID NO: 853224 - DNA, 15 bp, Homo sapiens
aaacctaagaaagga

SEQ ID NO: 853225 - DNA, 15 bp, Homo sapiens
aacctaagaaaggaa

SEQ ID NO: 853226 - DNA, 15 bp, Homo sapiens
acctaagaaaggaaa

SEQ ID NO: 853227 - DNA, 15 bp, Homo sapiens
cctaagaaaggaaag

SEQ ID NO: 853228 - DNA, 15 bp, Homo sapiens
ctaagaaaggaaagg

SEQ ID NO: 853229 - DNA, 15 bp, Homo sapiens
taagaaaggaaaggc

SEQ ID NO: 853230 - DNA, 15 bp, Homo sapiens
aagaaaggaaaggca

SEQ ID NO: 853231 - DNA, 15 bp, Homo sapiens
agaaaggaaaggcac

SEQ ID NO: 853232 - DNA, 15 bp, Homo sapiens
gaaaggaaaggcaca

SEQ ID NO: 853233 - DNA, 15 bp, Homo sapiens
aaaggaaaggcacac

SEQ ID NO: 853234 - DNA, 15 bp, Homo sapiens
aaggaaaggcacact

SEQ ID NO: 853235 - DNA, 15 bp, Homo sapiens
aggaaaggcacactc

SEQ ID NO: 853236 - DNA, 15 bp, Homo sapiens
ggaaaggcacactcc

SEQ ID NO: 853237 - DNA, 15 bp, Homo sapiens
gaaaggcacactcct

SEQ ID NO: 853238 - DNA, 15 bp, Homo sapiens
aaaggcacactcctg

SEQ ID NO: 853239 - DNA, 15 bp, Homo sapiens
aaggcacactcctgt

SEQ ID NO: 853240 - DNA, 15 bp, Homo sapiens
aggcacactcctgtt

SEQ ID NO: 853241 - DNA, 15 bp, Homo sapiens
ggcacactcctgttt

SEQ ID NO: 853242 - DNA, 15 bp, Homo sapiens
gcacactcctgtttt

SEQ ID NO: 853243 - DNA, 15 bp, Homo sapiens
cacactcctgttttc

SEQ ID NO: 853244 - DNA, 15 bp, Homo sapiens
acactcctgttttca

SEQ ID NO: 853245 - DNA, 15 bp, Homo sapiens
cactcctgttttcag

SEQ ID NO: 853246 - DNA, 15 bp, Homo sapiens
actcctgttttcagt

SEQ ID NO: 853247 - DNA, 15 bp, Homo sapiens
ctcctgttttcagtc

SEQ ID NO: 853248 - DNA, 15 bp, Homo sapiens
tcctgttttcagtca

SEQ ID NO: 853249 - DNA, 15 bp, Homo sapiens
cctgttttcagtcat

SEQ ID NO: 853250 - DNA, 15 bp, Homo sapiens
ctgttttcagtcatg

SEQ ID NO: 853251 - DNA, 15 bp, Homo sapiens
tgttttcagtcatgg

SEQ ID NO: 853252 - DNA, 15 bp, Homo sapiens
gttttcagtcatggc

SEQ ID NO: 853253 - DNA, 15 bp, Homo sapiens
ttttcagtcatggca

SEQ ID NO: 853254 - DNA, 15 bp, Homo sapiens
tttcagtcatggcac

SEQ ID NO: 853255 - DNA, 15 bp, Homo sapiens
ttcagtcatggcacc

SEQ ID NO: 853256 - DNA, 15 bp, Homo sapiens
tcagtcatggcacca

SEQ ID NO: 853257 - DNA, 15 bp, Homo sapiens
cagtcatggcaccaa

SEQ ID NO: 853258 - DNA, 15 bp, Homo sapiens
agtcatggcaccaat

SEQ ID NO: 853259 - DNA, 15 bp, Homo sapiens
gtcatggcaccaata

SEQ ID NO: 853260 - DNA, 15 bp, Homo sapiens
tcatggcaccaataa

SEQ ID NO: 853261 - DNA, 15 bp, Homo sapiens
catggcaccaataat

SEQ ID NO: 853262 - DNA, 15 bp, Homo sapiens
atggcaccaataatg

SEQ ID NO: 853263 - DNA, 15 bp, Homo sapiens
tggcaccaataatgg

SEQ ID NO: 853264 - DNA, 15 bp, Homo sapiens
ggcaccaataatggg

SEQ ID NO: 853265 - DNA, 15 bp, Homo sapiens
gcaccaataatggga

SEQ ID NO: 853266 - DNA, 15 bp, Homo sapiens
caccaataatgggaa

SEQ ID NO: 853267 - DNA, 15 bp, Homo sapiens
accaataatgggaac

SEQ ID NO: 853268 - DNA, 15 bp, Homo sapiens
ccaataatgggaaca

SEQ ID NO: 853269 - DNA, 15 bp, Homo sapiens
caataatgggaacaa

SEQ ID NO: 853270 - DNA, 15 bp, Homo sapiens
aataatgggaacaaa

SEQ ID NO: 853271 - DNA, 15 bp, Homo sapiens
ataatgggaacaaat

SEQ ID NO: 853272 - DNA, 15 bp, Homo sapiens
taatgggaacaaata

SEQ ID NO: 853273 - DNA, 15 bp, Homo sapiens
aatgggaacaaatac

SEQ ID NO: 853274 - DNA, 15 bp, Homo sapiens
atgggaacaaatact

SEQ ID NO: 853275 - DNA, 15 bp, Homo sapiens
tgggaacaaatacta

SEQ ID NO: 853276 - DNA, 15 bp, Homo sapiens
gggaacaaatactat

SEQ ID NO: 853277 - DNA, 15 bp, Homo sapiens
ggaacaaatactatt

SEQ ID NO: 853278 - DNA, 15 bp, Homo sapiens
gaacaaatactatta

SEQ ID NO: 853279 - DNA, 15 bp, Homo sapiens
aacaaatactattaa

SEQ ID NO: 853280 - DNA, 15 bp, Homo sapiens
acaaatactattaaa

SEQ ID NO: 853281 - DNA, 15 bp, Homo sapiens
caaatactattaaag

SEQ ID NO: 853282 - DNA, 15 bp, Homo sapiens
aaatactattaaagt

SEQ ID NO: 853283 - DNA, 15 bp, Homo sapiens
aatactattaaagtt

SEQ ID NO: 853284 - DNA, 15 bp, Homo sapiens
atactattaaagttg

SEQ ID NO: 853285 - DNA, 15 bp, Homo sapiens
tactattaaagttga

SEQ ID NO: 853286 - DNA, 15 bp, Homo sapiens
actattaaagttgaa

SEQ ID NO: 853287 - DNA, 15 bp, Homo sapiens
ctattaaagttgaac

SEQ ID NO: 853288 - DNA, 15 bp, Homo sapiens
tattaaagttgaaca

SEQ ID NO: 853289 - DNA, 15 bp, Homo sapiens
attaaagttgaacag

SEQ ID NO: 853290 - DNA, 15 bp, Homo sapiens
ttaaagttgaacagg

SEQ ID NO: 853291 - DNA, 15 bp, Homo sapiens
taaagttgaacagga

SEQ ID NO: 853292 - DNA, 15 bp, Homo sapiens
aaagttgaacaggag

SEQ ID NO: 853293 - DNA, 15 bp, Homo sapiens
aagttgaacaggagg

SEQ ID NO: 853294 - DNA, 15 bp, Homo sapiens
agttgaacaggagga

SEQ ID NO: 853295 - DNA, 15 bp, Homo sapiens
gttgaacaggaggat

SEQ ID NO: 853296 - DNA, 15 bp, Homo sapiens
ttgaacaggaggatg

SEQ ID NO: 853297 - DNA, 15 bp, Homo sapiens
tgaacaggaggatgc

SEQ ID NO: 853298 - DNA, 15 bp, Homo sapiens
gaacaggaggatgct

SEQ ID NO: 853299 - DNA, 15 bp, Homo sapiens
aacaggaggatgctt

SEQ ID NO: 853300 - DNA, 15 bp, Homo sapiens
acaggaggatgcttc

SEQ ID NO: 853301 - DNA, 15 bp, Homo sapiens
caggaggatgcttct

SEQ ID NO: 853302 - DNA, 15 bp, Homo sapiens
aggaggatgcttctc

SEQ ID NO: 853303 - DNA, 15 bp, Homo sapiens
ggaggatgcttctct

SEQ ID NO: 853304 - DNA, 15 bp, Homo sapiens
gaggatgcttctctc

SEQ ID NO: 853305 - DNA, 15 bp, Homo sapiens
aggatgcttctctcc

SEQ ID NO: 853306 - DNA, 15 bp, Homo sapiens
ggatgcttctctcca

SEQ ID NO: 853307 - DNA, 15 bp, Homo sapiens
gatgcttctctccag

SEQ ID NO: 853308 - DNA, 15 bp, Homo sapiens
atgcttctctccagc

SEQ ID NO: 853309 - DNA, 15 bp, Homo sapiens
tgcttctctccagcc

SEQ ID NO: 853310 - DNA, 15 bp, Homo sapiens
gcttctctccagccc

SEQ ID NO: 853311 - DNA, 15 bp, Homo sapiens
cttctctccagccct

SEQ ID NO: 853312 - DNA, 15 bp, Homo sapiens
ttctctccagccctt

SEQ ID NO: 853313 - DNA, 15 bp, Homo sapiens
tctctccagcccttt

SEQ ID NO: 853314 - DNA, 15 bp, Homo sapiens
ctctccagccctttg

SEQ ID NO: 853315 - DNA, 15 bp, Homo sapiens
tctccagccctttgt

SEQ ID NO: 853316 - DNA, 15 bp, Homo sapiens
ctccagccctttgtg

SEQ ID NO: 853317 - DNA, 15 bp, Homo sapiens
tccagccctttgtgt

SEQ ID NO: 853318 - DNA, 15 bp, Homo sapiens
ccagccctttgtgtc

SEQ ID NO: 853319 - DNA, 15 bp, Homo sapiens
cagccctttgtgtct

SEQ ID NO: 853320 - DNA, 15 bp, Homo sapiens
agccctttgtgtctg

SEQ ID NO: 853321 - DNA, 15 bp, Homo sapiens
gccctttgtgtctgt

SEQ ID NO: 853322 - DNA, 15 bp, Homo sapiens
ccctttgtgtctgtt

SEQ ID NO: 853323 - DNA, 15 bp, Homo sapiens
cctttgtgtctgttt

SEQ ID NO: 853324 - DNA, 15 bp, Homo sapiens
ctttgtgtctgtttc

SEQ ID NO: 853325 - DNA, 15 bp, Homo sapiens
tttgtgtctgtttct

SEQ ID NO: 853326 - DNA, 15 bp, Homo sapiens
ttgtgtctgtttctg

SEQ ID NO: 853327 - DNA, 15 bp, Homo sapiens
tgtgtctgtttctgt

SEQ ID NO: 853328 - DNA, 15 bp, Homo sapiens
gtgtctgtttctgta

SEQ ID NO: 853329 - DNA, 15 bp, Homo sapiens
tgtctgtttctgtat

SEQ ID NO: 853330 - DNA, 15 bp, Homo sapiens
gtctgtttctgtatt

SEQ ID NO: 853331 - DNA, 15 bp, Homo sapiens
tctgtttctgtattg

SEQ ID NO: 853332 - DNA, 15 bp, Homo sapiens
ctgtttctgtattgt

SEQ ID NO: 853333 - DNA, 15 bp, Homo sapiens
tgtttctgtattgtc

SEQ ID NO: 853334 - DNA, 15 bp, Homo sapiens
gtttctgtattgtcc

SEQ ID NO: 853335 - DNA, 15 bp, Homo sapiens
tttctgtattgtcct

SEQ ID NO: 853336 - DNA, 15 bp, Homo sapiens
ttctgtattgtcctg

SEQ ID NO: 853337 - DNA, 15 bp, Homo sapiens
tctgtattgtcctga

SEQ ID NO: 853338 - DNA, 15 bp, Homo sapiens
ctgtattgtcctgac

SEQ ID NO: 853339 - DNA, 15 bp, Homo sapiens
tgtattgtcctgacg

SEQ ID NO: 853340 - DNA, 15 bp, Homo sapiens
gtattgtcctgacgt

SEQ ID NO: 853341 - DNA, 15 bp, Homo sapiens
tattgtcctgacgtg

SEQ ID NO: 853342 - DNA, 15 bp, Homo sapiens
attgtcctgacgtgt

SEQ ID NO: 853343 - DNA, 15 bp, Homo sapiens
ttgtcctgacgtgtc

SEQ ID NO: 853344 - DNA, 15 bp, Homo sapiens
tgtcctgacgtgtct

SEQ ID NO: 853345 - DNA, 15 bp, Homo sapiens
gtcctgacgtgtctt

SEQ ID NO: 853346 - DNA, 15 bp, Homo sapiens
tcctgacgtgtcttg

SEQ ID NO: 853347 - DNA, 15 bp, Homo sapiens
cctgacgtgtcttga

SEQ ID NO: 853348 - DNA, 15 bp, Homo sapiens
ctgacgtgtcttgat

SEQ ID NO: 853349 - DNA, 15 bp, Homo sapiens
tgacgtgtcttgatg

SEQ ID NO: 853350 - DNA, 15 bp, Homo sapiens
gacgtgtcttgatgt

SEQ ID NO: 853351 - DNA, 15 bp, Homo sapiens
acgtgtcttgatgtc

SEQ ID NO: 853352 - DNA, 15 bp, Homo sapiens
cgtgtcttgatgtcc

SEQ ID NO: 853353 - DNA, 15 bp, Homo sapiens
gtgtcttgatgtcca

SEQ ID NO: 853354 - DNA, 15 bp, Homo sapiens
tgtcttgatgtccat

SEQ ID NO: 853355 - DNA, 15 bp, Homo sapiens
gtcttgatgtccatt

SEQ ID NO: 853356 - DNA, 15 bp, Homo sapiens
tcttgatgtccattg

SEQ ID NO: 853357 - DNA, 15 bp, Homo sapiens
cttgatgtccattgc

SEQ ID NO: 853358 - DNA, 15 bp, Homo sapiens
ttgatgtccattgca

SEQ ID NO: 853359 - DNA, 15 bp, Homo sapiens
tgatgtccattgcac

SEQ ID NO: 853360 - DNA, 15 bp, Homo sapiens
gatgtccattgcact

SEQ ID NO: 853361 - DNA, 15 bp, Homo sapiens
atgtccattgcactc

SEQ ID NO: 853362 - DNA, 15 bp, Homo sapiens
tgtccattgcactct

SEQ ID NO: 853363 - DNA, 15 bp, Homo sapiens
gtccattgcactcta

SEQ ID NO: 853364 - DNA, 15 bp, Homo sapiens
tccattgcactctag

SEQ ID NO: 853365 - DNA, 15 bp, Homo sapiens
ccattgcactctagt

SEQ ID NO: 853366 - DNA, 15 bp, Homo sapiens
cattgcactctagtg

SEQ ID NO: 853367 - DNA, 15 bp, Homo sapiens
attgcactctagtgc

SEQ ID NO: 853368 - DNA, 15 bp, Homo sapiens
ttgcactctagtgcc

SEQ ID NO: 853369 - DNA, 15 bp, Homo sapiens
tgcactctagtgcca

SEQ ID NO: 853370 - DNA, 15 bp, Homo sapiens
gcactctagtgccat

SEQ ID NO: 853371 - DNA, 15 bp, Homo sapiens
cactctagtgccatt

SEQ ID NO: 853372 - DNA, 15 bp, Homo sapiens
actctagtgccattt

SEQ ID NO: 853373 - DNA, 15 bp, Homo sapiens
ctctagtgccatttt

SEQ ID NO: 853374 - DNA, 15 bp, Homo sapiens
tctagtgccattttg

SEQ ID NO: 853375 - DNA, 15 bp, Homo sapiens
ctagtgccattttgt

SEQ ID NO: 853376 - DNA, 15 bp, Homo sapiens
tagtgccattttgtc

SEQ ID NO: 853377 - DNA, 15 bp, Homo sapiens
agtgccattttgtct

SEQ ID NO: 853378 - DNA, 15 bp, Homo sapiens
gtgccattttgtcta

SEQ ID NO: 853379 - DNA, 15 bp, Homo sapiens
tgccattttgtctac

SEQ ID NO: 853380 - DNA, 15 bp, Homo sapiens
gccattttgtctaca

SEQ ID NO: 853381 - DNA, 15 bp, Homo sapiens
ccattttgtctacat

SEQ ID NO: 853382 - DNA, 15 bp, Homo sapiens
cattttgtctacata

SEQ ID NO: 853383 - DNA, 15 bp, Homo sapiens
attttgtctacatac

SEQ ID NO: 853384 - DNA, 15 bp, Homo sapiens
ttttgtctacatacc

SEQ ID NO: 853385 - DNA, 15 bp, Homo sapiens
tttgtctacatacca

SEQ ID NO: 853386 - DNA, 15 bp, Homo sapiens
ttgtctacataccac

SEQ ID NO: 853387 - DNA, 15 bp, Homo sapiens
tgtctacataccact

SEQ ID NO: 853388 - DNA, 15 bp, Homo sapiens
gtctacataccactt

SEQ ID NO: 853389 - DNA, 15 bp, Homo sapiens
tctacataccacttc

SEQ ID NO: 853390 - DNA, 15 bp, Homo sapiens
ctacataccacttcc

SEQ ID NO: 853391 - DNA, 15 bp, Homo sapiens
tacataccacttcca

SEQ ID NO: 853392 - DNA, 15 bp, Homo sapiens
acataccacttccac

SEQ ID NO: 853393 - DNA, 15 bp, Homo sapiens
cataccacttccaca

SEQ ID NO: 853394 - DNA, 15 bp, Homo sapiens
ataccacttccacat

SEQ ID NO: 853395 - DNA, 15 bp, Homo sapiens
taccacttccacatt

SEQ ID NO: 853396 - DNA, 15 bp, Homo sapiens
accacttccacattc

SEQ ID NO: 853397 - DNA, 15 bp, Homo sapiens
ccacttccacattcc

SEQ ID NO: 853398 - DNA, 15 bp, Homo sapiens
cacttccacattccc

SEQ ID NO: 853399 - DNA, 15 bp, Homo sapiens
acttccacattccca

SEQ ID NO: 853400 - DNA, 15 bp, Homo sapiens
cttccacattcccag

SEQ ID NO: 853401 - DNA, 15 bp, Homo sapiens
ttccacattcccagt

SEQ ID NO: 853402 - DNA, 15 bp, Homo sapiens
tccacattcccagtg

SEQ ID NO: 853403 - DNA, 15 bp, Homo sapiens
ccacattcccagtga

SEQ ID NO: 853404 - DNA, 15 bp, Homo sapiens
cacattcccagtgac

SEQ ID NO: 853405 - DNA, 15 bp, Homo sapiens
acattcccagtgacc

SEQ ID NO: 853406 - DNA, 15 bp, Homo sapiens
cattcccagtgacct

SEQ ID NO: 853407 - DNA, 15 bp, Homo sapiens
attcccagtgacctc

SEQ ID NO: 853408 - DNA, 15 bp, Homo sapiens
ttcccagtgacctcc

SEQ ID NO: 853409 - DNA, 15 bp, Homo sapiens
tcccagtgacctcct

SEQ ID NO: 853410 - DNA, 15 bp, Homo sapiens
cccagtgacctcctc

SEQ ID NO: 853411 - DNA, 15 bp, Homo sapiens
ccagtgacctcctcc

SEQ ID NO: 853412 - DNA, 15 bp, Homo sapiens
cagtgacctcctcct

SEQ ID NO: 853413 - DNA, 15 bp, Homo sapiens
agtgacctcctcctc

SEQ ID NO: 853414 - DNA, 15 bp, Homo sapiens
gtgacctcctcctcc

SEQ ID NO: 853415 - DNA, 15 bp, Homo sapiens
tgacctcctcctccc

SEQ ID NO: 853416 - DNA, 15 bp, Homo sapiens
gacctcctcctccct

SEQ ID NO: 853417 - DNA, 15 bp, Homo sapiens
acctcctcctccctg

SEQ ID NO: 853418 - DNA, 15 bp, Homo sapiens
cctcctcctccctgt

SEQ ID NO: 853419 - DNA, 15 bp, Homo sapiens
ctcctcctccctgtg

SEQ ID NO: 853420 - DNA, 15 bp, Homo sapiens
tcctcctccctgtgt

SEQ ID NO: 853421 - DNA, 15 bp, Homo sapiens
cctcctccctgtgtc

SEQ ID NO: 853422 - DNA, 15 bp, Homo sapiens
ctcctccctgtgtcg

SEQ ID NO: 853423 - DNA, 15 bp, Homo sapiens
tcctccctgtgtcga

SEQ ID NO: 853424 - DNA, 15 bp, Homo sapiens
cctccctgtgtcgag

SEQ ID NO: 853425 - DNA, 15 bp, Homo sapiens
ctccctgtgtcgagt

SEQ ID NO: 853426 - DNA, 15 bp, Homo sapiens
tccctgtgtcgagtt

SEQ ID NO: 853427 - DNA, 15 bp, Homo sapiens
ccctgtgtcgagttt

SEQ ID NO: 853428 - DNA, 15 bp, Homo sapiens
cctgtgtcgagtttc

SEQ ID NO: 853429 - DNA, 15 bp, Homo sapiens
ctgtgtcgagtttct

SEQ ID NO: 853430 - DNA, 15 bp, Homo sapiens
tgtgtcgagtttctt

SEQ ID NO: 853431 - DNA, 15 bp, Homo sapiens
tgtcgagtttcttgt

SEQ ID NO: 853432 - DNA, 15 bp, Homo sapiens
gtcgagtttcttgtc

SEQ ID NO: 853433 - DNA, 15 bp, Homo sapiens
tcgagtttcttgtct

SEQ ID NO: 853434 - DNA, 15 bp, Homo sapiens
cgagtttcttgtcta

SEQ ID NO: 853435 - DNA, 15 bp, Homo sapiens
gagtttcttgtctat

SEQ ID NO: 853436 - DNA, 15 bp, Homo sapiens
agtttcttgtctata

SEQ ID NO: 853437 - DNA, 15 bp, Homo sapiens
gtttcttgtctatag

SEQ ID NO: 853438 - DNA, 15 bp, Homo sapiens
tttcttgtctataga

SEQ ID NO: 853439 - DNA, 15 bp, Homo sapiens
ttcttgtctatagag

SEQ ID NO: 853440 - DNA, 15 bp, Homo sapiens
tcttgtctatagagc

SEQ ID NO: 853441 - DNA, 15 bp, Homo sapiens
cttgtctatagagca

SEQ ID NO: 853442 - DNA, 15 bp, Homo sapiens
ttgtctatagagcag

SEQ ID NO: 853443 - DNA, 15 bp, Homo sapiens
tgtctatagagcaga

SEQ ID NO: 853444 - DNA, 15 bp, Homo sapiens
gtctatagagcagaa

SEQ ID NO: 853445 - DNA, 15 bp, Homo sapiens
tctatagagcagaat

SEQ ID NO: 853446 - DNA, 15 bp, Homo sapiens
ctatagagcagaatt

SEQ ID NO: 853447 - DNA, 15 bp, Homo sapiens
tatagagcagaattc

SEQ ID NO: 853448 - DNA, 15 bp, Homo sapiens
atagagcagaattcc

SEQ ID NO: 853449 - DNA, 15 bp, Homo sapiens
tagagcagaattcct

SEQ ID NO: 853450 - DNA, 15 bp, Homo sapiens
agagcagaattcctg

SEQ ID NO: 853451 - DNA, 15 bp, Homo sapiens
gagcagaattcctgt

SEQ ID NO: 853452 - DNA, 15 bp, Homo sapiens
agcagaattcctgtc

SEQ ID NO: 853453 - DNA, 15 bp, Homo sapiens
gcagaattcctgtcc

SEQ ID NO: 853454 - DNA, 15 bp, Homo sapiens
cagaattcctgtcct

SEQ ID NO: 853455 - DNA, 15 bp, Homo sapiens
agaattcctgtcctt

SEQ ID NO: 853456 - DNA, 15 bp, Homo sapiens
gaattcctgtccttt

SEQ ID NO: 853457 - DNA, 15 bp, Homo sapiens
aattcctgtcctttt

SEQ ID NO: 853458 - DNA, 15 bp, Homo sapiens
attcctgtcctttta

SEQ ID NO: 853459 - DNA, 15 bp, Homo sapiens
ttcctgtccttttat

SEQ ID NO: 853460 - DNA, 15 bp, Homo sapiens
tcctgtccttttatc

SEQ ID NO: 853461 - DNA, 15 bp, Homo sapiens
cctgtccttttatcc

SEQ ID NO: 853462 - DNA, 15 bp, Homo sapiens
ctgtccttttatcca

SEQ ID NO: 853463 - DNA, 15 bp, Homo sapiens
tgtccttttatccac

SEQ ID NO: 853464 - DNA, 15 bp, Homo sapiens
gtccttttatccaca

SEQ ID NO: 853465 - DNA, 15 bp, Homo sapiens
tccttttatccacaa

SEQ ID NO: 853466 - DNA, 15 bp, Homo sapiens
ccttttatccacaaa

SEQ ID NO: 853467 - DNA, 15 bp, Homo sapiens
cttttatccacaaaa

SEQ ID NO: 853468 - DNA, 15 bp, Homo sapiens
ttttatccacaaaac

SEQ ID NO: 853469 - DNA, 15 bp, Homo sapiens
tttatccacaaaaca

SEQ ID NO: 853470 - DNA, 15 bp, Homo sapiens
ttatccacaaaacag

SEQ ID NO: 853471 - DNA, 15 bp, Homo sapiens
tatccacaaaacaga

SEQ ID NO: 853472 - DNA, 15 bp, Homo sapiens
atccacaaaacagag

SEQ ID NO: 853473 - DNA, 15 bp, Homo sapiens
tccacaaaacagaga

SEQ ID NO: 853474 - DNA, 15 bp, Homo sapiens
ccacaaaacagagac

SEQ ID NO: 853475 - DNA, 15 bp, Homo sapiens
cacaaaacagagacc

SEQ ID NO: 853476 - DNA, 15 bp, Homo sapiens
acaaaacagagacca

SEQ ID NO: 853477 - DNA, 15 bp, Homo sapiens
caaaacagagaccaa

SEQ ID NO: 853478 - DNA, 15 bp, Homo sapiens
aaaacagagaccaag

SEQ ID NO: 853479 - DNA, 15 bp, Homo sapiens
aaacagagaccaagc

SEQ ID NO: 853480 - DNA, 15 bp, Homo sapiens
aacagagaccaagcc

SEQ ID NO: 853481 - DNA, 15 bp, Homo sapiens
acagagaccaagccc

SEQ ID NO: 853482 - DNA, 15 bp, Homo sapiens
cagagaccaagccct

SEQ ID NO: 853483 - DNA, 15 bp, Homo sapiens
agagaccaagccctt

SEQ ID NO: 853484 - DNA, 15 bp, Homo sapiens
gagaccaagccctta

SEQ ID NO: 853485 - DNA, 15 bp, Homo sapiens
agaccaagcccttac

SEQ ID NO: 853486 - DNA, 15 bp, Homo sapiens
gaccaagcccttaca

SEQ ID NO: 853487 - DNA, 15 bp, Homo sapiens
accaagcccttacac

SEQ ID NO: 853488 - DNA, 15 bp, Homo sapiens
ccaagcccttacact

SEQ ID NO: 853489 - DNA, 15 bp, Homo sapiens
caagcccttacactt

SEQ ID NO: 853490 - DNA, 15 bp, Homo sapiens
aagcccttacacttc

SEQ ID NO: 853491 - DNA, 15 bp, Homo sapiens
agcccttacacttct

SEQ ID NO: 853492 - DNA, 15 bp, Homo sapiens
gcccttacacttcta

SEQ ID NO: 853493 - DNA, 15 bp, Homo sapiens
cccttacacttctat

SEQ ID NO: 853494 - DNA, 15 bp, Homo sapiens
ccttacacttctatt

SEQ ID NO: 853495 - DNA, 15 bp, Homo sapiens
cttacacttctattt

SEQ ID NO: 853496 - DNA, 15 bp, Homo sapiens
ttacacttctatttt

SEQ ID NO: 853497 - DNA, 15 bp, Homo sapiens
tacacttctattttt

SEQ ID NO: 853498 - DNA, 15 bp, Homo sapiens
acacttctatttttc

SEQ ID NO: 853499 - DNA, 15 bp, Homo sapiens
cacttctatttttcc

SEQ ID NO: 853500 - DNA, 15 bp, Homo sapiens
acttctatttttcct

SEQ ID NO: 853501 - DNA, 15 bp, Homo sapiens
cttctatttttcctt

SEQ ID NO: 853502 - DNA, 15 bp, Homo sapiens
ttctatttttcctta

SEQ ID NO: 853503 - DNA, 15 bp, Homo sapiens
tctatttttccttac

SEQ ID NO: 853504 - DNA, 15 bp, Homo sapiens
ctatttttccttaca

SEQ ID NO: 853505 - DNA, 15 bp, Homo sapiens
tatttttccttacat

SEQ ID NO: 853506 - DNA, 15 bp, Homo sapiens
atttttccttacatt

SEQ ID NO: 853507 - DNA, 15 bp, Homo sapiens
tttttccttacattt

SEQ ID NO: 853508 - DNA, 15 bp, Homo sapiens
ttttccttacattta

SEQ ID NO: 853509 - DNA, 15 bp, Homo sapiens
tttccttacatttat

SEQ ID NO: 853510 - DNA, 15 bp, Homo sapiens
ttccttacatttatt

SEQ ID NO: 853511 - DNA, 15 bp, Homo sapiens
tccttacatttattt

SEQ ID NO: 853512 - DNA, 15 bp, Homo sapiens
ccttacatttatttt

SEQ ID NO: 853513 - DNA, 15 bp, Homo sapiens
cttacatttattttg

SEQ ID NO: 853514 - DNA, 15 bp, Homo sapiens
ttacatttattttgg

SEQ ID NO: 853515 - DNA, 15 bp, Homo sapiens
tacatttattttggt

SEQ ID NO: 853516 - DNA, 15 bp, Homo sapiens
acatttattttggtg

SEQ ID NO: 853517 - DNA, 15 bp, Homo sapiens
catttattttggtga

SEQ ID NO: 853518 - DNA, 15 bp, Homo sapiens
atttattttggtgat

SEQ ID NO: 853519 - DNA, 15 bp, Homo sapiens
tttattttggtgata

SEQ ID NO: 853520 - DNA, 15 bp, Homo sapiens
ttattttggtgataa

SEQ ID NO: 853521 - DNA, 15 bp, Homo sapiens
tattttggtgataac

SEQ ID NO: 853522 - DNA, 15 bp, Homo sapiens
attttggtgataaca

SEQ ID NO: 853523 - DNA, 15 bp, Homo sapiens
ttttggtgataacat

SEQ ID NO: 853524 - DNA, 15 bp, Homo sapiens
tttggtgataacatt

SEQ ID NO: 853525 - DNA, 15 bp, Homo sapiens
ttggtgataacattt

SEQ ID NO: 853526 - DNA, 15 bp, Homo sapiens
tggtgataacatttt

SEQ ID NO: 853527 - DNA, 15 bp, Homo sapiens
ggtgataacattttg

SEQ ID NO: 853528 - DNA, 15 bp, Homo sapiens
gtgataacattttga

SEQ ID NO: 853529 - DNA, 15 bp, Homo sapiens
tgataacattttgaa

SEQ ID NO: 853530 - DNA, 15 bp, Homo sapiens
gataacattttgaat

SEQ ID NO: 853531 - DNA, 15 bp, Homo sapiens
ataacattttgaata

SEQ ID NO: 853532 - DNA, 15 bp, Homo sapiens
taacattttgaatat

SEQ ID NO: 853533 - DNA, 15 bp, Homo sapiens
aacattttgaatatt

SEQ ID NO: 853534 - DNA, 15 bp, Homo sapiens
acattttgaatattt

SEQ ID NO: 853535 - DNA, 15 bp, Homo sapiens
cattttgaatatttt

SEQ ID NO: 853536 - DNA, 15 bp, Homo sapiens
attttgaatatttta

SEQ ID NO: 853537 - DNA, 15 bp, Homo sapiens
ttttgaatattttat

SEQ ID NO: 853538 - DNA, 15 bp, Homo sapiens
tttgaatattttatt

SEQ ID NO: 853539 - DNA, 15 bp, Homo sapiens
ttgaatattttattt

SEQ ID NO: 853540 - DNA, 15 bp, Homo sapiens
tgaatattttatttc

SEQ ID NO: 853541 - DNA, 15 bp, Homo sapiens
gaatattttatttct

SEQ ID NO: 853542 - DNA, 15 bp, Homo sapiens
aatattttatttctt

SEQ ID NO: 853543 - DNA, 15 bp, Homo sapiens
atattttatttcttg

SEQ ID NO: 853544 - DNA, 15 bp, Homo sapiens
tattttatttcttgg

SEQ ID NO: 853545 - DNA, 15 bp, Homo sapiens
attttatttcttggg

SEQ ID NO: 853546 - DNA, 15 bp, Homo sapiens
ttttatttcttgggc

SEQ ID NO: 853547 - DNA, 15 bp, Homo sapiens
tttatttcttgggca

SEQ ID NO: 853548 - DNA, 15 bp, Homo sapiens
ttatttcttgggcag

SEQ ID NO: 853549 - DNA, 15 bp, Homo sapiens
tatttcttgggcagt

SEQ ID NO: 853550 - DNA, 15 bp, Homo sapiens
atttcttgggcagtg

SEQ ID NO: 853551 - DNA, 15 bp, Homo sapiens
tttcttgggcagtgc

SEQ ID NO: 853552 - DNA, 15 bp, Homo sapiens
ttcttgggcagtgct

SEQ ID NO: 853553 - DNA, 15 bp, Homo sapiens
tcttgggcagtgctc

SEQ ID NO: 853554 - DNA, 15 bp, Homo sapiens
cttgggcagtgctca

SEQ ID NO: 853555 - DNA, 15 bp, Homo sapiens
ttgggcagtgctcag

SEQ ID NO: 853556 - DNA, 15 bp, Homo sapiens
tgggcagtgctcagt

SEQ ID NO: 853557 - DNA, 15 bp, Homo sapiens
gggcagtgctcagta

SEQ ID NO: 853558 - DNA, 15 bp, Homo sapiens
ggcagtgctcagtat

SEQ ID NO: 853559 - DNA, 15 bp, Homo sapiens
gcagtgctcagtata

SEQ ID NO: 853560 - DNA, 15 bp, Homo sapiens
cagtgctcagtatag

SEQ ID NO: 853561 - DNA, 15 bp, Homo sapiens
agtgctcagtatagt

SEQ ID NO: 853562 - DNA, 15 bp, Homo sapiens
gtgctcagtatagtc

SEQ ID NO: 853563 - DNA, 15 bp, Homo sapiens
tgctcagtatagtct

SEQ ID NO: 853564 - DNA, 15 bp, Homo sapiens
gctcagtatagtctt

SEQ ID NO: 853565 - DNA, 15 bp, Homo sapiens
ctcagtatagtctta

SEQ ID NO: 853566 - DNA, 15 bp, Homo sapiens
tcagtatagtcttag

SEQ ID NO: 853567 - DNA, 15 bp, Homo sapiens
cagtatagtcttaga

SEQ ID NO: 853568 - DNA, 15 bp, Homo sapiens
agtatagtcttagaa

SEQ ID NO: 853569 - DNA, 15 bp, Homo sapiens
gtatagtcttagaac

SEQ ID NO: 853570 - DNA, 15 bp, Homo sapiens
tatagtcttagaaca

SEQ ID NO: 853571 - DNA, 15 bp, Homo sapiens
atagtcttagaacac

SEQ ID NO: 853572 - DNA, 15 bp, Homo sapiens
tagtcttagaacact

SEQ ID NO: 853573 - DNA, 15 bp, Homo sapiens
agtcttagaacactg

SEQ ID NO: 853574 - DNA, 15 bp, Homo sapiens
gtcttagaacactgc

SEQ ID NO: 853575 - DNA, 15 bp, Homo sapiens
tcttagaacactgct

SEQ ID NO: 853576 - DNA, 15 bp, Homo sapiens
cttagaacactgcta

SEQ ID NO: 853577 - DNA, 15 bp, Homo sapiens
ttagaacactgctat

SEQ ID NO: 853578 - DNA, 15 bp, Homo sapiens
tagaacactgctatt

SEQ ID NO: 853579 - DNA, 15 bp, Homo sapiens
agaacactgctatta

SEQ ID NO: 853580 - DNA, 15 bp, Homo sapiens
gaacactgctattaa

SEQ ID NO: 853581 - DNA, 15 bp, Homo sapiens
aacactgctattaaa

SEQ ID NO: 853582 - DNA, 15 bp, Homo sapiens
acactgctattaaat

SEQ ID NO: 853583 - DNA, 15 bp, Homo sapiens
cactgctattaaatt

SEQ ID NO: 853584 - DNA, 15 bp, Homo sapiens
actgctattaaattg

SEQ ID NO: 853585 - DNA, 15 bp, Homo sapiens
ctgctattaaattgc

SEQ ID NO: 853586 - DNA, 15 bp, Homo sapiens
tgctattaaattgcc

SEQ ID NO: 853587 - DNA, 15 bp, Homo sapiens
gctattaaattgcca

SEQ ID NO: 853588 - DNA, 15 bp, Homo sapiens
ctattaaattgccag

SEQ ID NO: 853589 - DNA, 15 bp, Homo sapiens
tattaaattgccaga

SEQ ID NO: 853590 - DNA, 15 bp, Homo sapiens
attaaattgccagat

SEQ ID NO: 853591 - DNA, 15 bp, Homo sapiens
ttaaattgccagatt

SEQ ID NO: 853592 - DNA, 15 bp, Homo sapiens
taaattgccagatta

SEQ ID NO: 853593 - DNA, 15 bp, Homo sapiens
aaattgccagattat

SEQ ID NO: 853594 - DNA, 15 bp, Homo sapiens
aattgccagattatc

SEQ ID NO: 853595 - DNA, 15 bp, Homo sapiens
attgccagattatca

SEQ ID NO: 853596 - DNA, 15 bp, Homo sapiens
ttgccagattatcac

SEQ ID NO: 853597 - DNA, 15 bp, Homo sapiens
tgccagattatcaca

SEQ ID NO: 853598 - DNA, 15 bp, Homo sapiens
gccagattatcacac

SEQ ID NO: 853599 - DNA, 15 bp, Homo sapiens
ccagattatcacact

SEQ ID NO: 853600 - DNA, 15 bp, Homo sapiens
cagattatcacactt

SEQ ID NO: 853601 - DNA, 15 bp, Homo sapiens
agattatcacacttg

SEQ ID NO: 853602 - DNA, 15 bp, Homo sapiens
gattatcacacttga

SEQ ID NO: 853603 - DNA, 15 bp, Homo sapiens
attatcacacttgat

SEQ ID NO: 853604 - DNA, 15 bp, Homo sapiens
ttatcacacttgatt

SEQ ID NO: 853605 - DNA, 15 bp, Homo sapiens
tatcacacttgattt

SEQ ID NO: 853606 - DNA, 15 bp, Homo sapiens
atcacacttgattta

SEQ ID NO: 853607 - DNA, 15 bp, Homo sapiens
tcacacttgatttac

SEQ ID NO: 853608 - DNA, 15 bp, Homo sapiens
cacacttgatttaca

SEQ ID NO: 853609 - DNA, 15 bp, Homo sapiens
acacttgatttacag

SEQ ID NO: 853610 - DNA, 15 bp, Homo sapiens
cacttgatttacaga

SEQ ID NO: 853611 - DNA, 15 bp, Homo sapiens
acttgatttacagag

SEQ ID NO: 853612 - DNA, 15 bp, Homo sapiens
cttgatttacagagt

SEQ ID NO: 853613 - DNA, 15 bp, Homo sapiens
ttgatttacagagtt

SEQ ID NO: 853614 - DNA, 15 bp, Homo sapiens
tgatttacagagtta

SEQ ID NO: 853615 - DNA, 15 bp, Homo sapiens
gatttacagagttag

SEQ ID NO: 853616 - DNA, 15 bp, Homo sapiens
atttacagagttagt

SEQ ID NO: 853617 - DNA, 15 bp, Homo sapiens
tttacagagttagta

SEQ ID NO: 853618 - DNA, 15 bp, Homo sapiens
ttacagagttagtac

SEQ ID NO: 853619 - DNA, 15 bp, Homo sapiens
tacagagttagtact

SEQ ID NO: 853620 - DNA, 15 bp, Homo sapiens
acagagttagtactg

SEQ ID NO: 853621 - DNA, 15 bp, Homo sapiens
cagagttagtactgt

SEQ ID NO: 853622 - DNA, 15 bp, Homo sapiens
agagttagtactgtt

SEQ ID NO: 853623 - DNA, 15 bp, Homo sapiens
gagttagtactgttt

SEQ ID NO: 853624 - DNA, 15 bp, Homo sapiens
agttagtactgttta

SEQ ID NO: 853625 - DNA, 15 bp, Homo sapiens
gttagtactgtttat

SEQ ID NO: 853626 - DNA, 15 bp, Homo sapiens
ttagtactgtttatt

SEQ ID NO: 853627 - DNA, 15 bp, Homo sapiens
tagtactgtttattg

SEQ ID NO: 853628 - DNA, 15 bp, Homo sapiens
agtactgtttattga

SEQ ID NO: 853629 - DNA, 15 bp, Homo sapiens
gtactgtttattgag

SEQ ID NO: 853630 - DNA, 15 bp, Homo sapiens
tactgtttattgaga

SEQ ID NO: 853631 - DNA, 15 bp, Homo sapiens
actgtttattgagac

SEQ ID NO: 853632 - DNA, 15 bp, Homo sapiens
ctgtttattgagaca

SEQ ID NO: 853633 - DNA, 15 bp, Homo sapiens
tgtttattgagacag

SEQ ID NO: 853634 - DNA, 15 bp, Homo sapiens
gtttattgagacaga

SEQ ID NO: 853635 - DNA, 15 bp, Homo sapiens
tttattgagacagac

SEQ ID NO: 853636 - DNA, 15 bp, Homo sapiens
ttattgagacagact

SEQ ID NO: 853637 - DNA, 15 bp, Homo sapiens
tattgagacagactc

SEQ ID NO: 853638 - DNA, 15 bp, Homo sapiens
attgagacagactca

SEQ ID NO: 853639 - DNA, 15 bp, Homo sapiens
ttgagacagactcat

SEQ ID NO: 853640 - DNA, 15 bp, Homo sapiens
tgagacagactcatg

SEQ ID NO: 853641 - DNA, 15 bp, Homo sapiens
gagacagactcatgg

SEQ ID NO: 853642 - DNA, 15 bp, Homo sapiens
agacagactcatggc

SEQ ID NO: 853643 - DNA, 15 bp, Homo sapiens
gacagactcatggct

SEQ ID NO: 853644 - DNA, 15 bp, Homo sapiens
acagactcatggctt

SEQ ID NO: 853645 - DNA, 15 bp, Homo sapiens
cagactcatggcttt

SEQ ID NO: 853646 - DNA, 15 bp, Homo sapiens
agactcatggctttt

SEQ ID NO: 853647 - DNA, 15 bp, Homo sapiens
gactcatggcttttt

SEQ ID NO: 853648 - DNA, 15 bp, Homo sapiens
actcatggctttttt

SEQ ID NO: 853649 - DNA, 15 bp, Homo sapiens
ctcatggcttttttt

SEQ ID NO: 853650 - DNA, 15 bp, Homo sapiens
tcatggctttttttt

SEQ ID NO: 853651 - DNA, 15 bp, Homo sapiens
catggcttttttttc

SEQ ID NO: 853652 - DNA, 15 bp, Homo sapiens
atggcttttttttcc

SEQ ID NO: 853653 - DNA, 15 bp, Homo sapiens
tggcttttttttcct

SEQ ID NO: 853654 - DNA, 15 bp, Homo sapiens
ggcttttttttccta

SEQ ID NO: 853655 - DNA, 15 bp, Homo sapiens
gcttttttttcctag

SEQ ID NO: 853656 - DNA, 15 bp, Homo sapiens
cttttttttcctagt

SEQ ID NO: 853657 - DNA, 15 bp, Homo sapiens
ttttttttcctagtg

SEQ ID NO: 853658 - DNA, 15 bp, Homo sapiens
tttttttcctagtgt

SEQ ID NO: 853659 - DNA, 15 bp, Homo sapiens
ttttttcctagtgtg

SEQ ID NO: 853660 - DNA, 15 bp, Homo sapiens
tttttcctagtgtgt

SEQ ID NO: 853661 - DNA, 15 bp, Homo sapiens
ttttcctagtgtgtt

SEQ ID NO: 853662 - DNA, 15 bp, Homo sapiens
tttcctagtgtgttt

SEQ ID NO: 853663 - DNA, 15 bp, Homo sapiens
ttcctagtgtgtttg

SEQ ID NO: 853664 - DNA, 15 bp, Homo sapiens
tcctagtgtgtttgg

SEQ ID NO: 853665 - DNA, 15 bp, Homo sapiens
cctagtgtgtttggg

SEQ ID NO: 853666 - DNA, 15 bp, Homo sapiens
ctagtgtgtttgggc

SEQ ID NO: 853667 - DNA, 15 bp, Homo sapiens
tagtgtgtttgggca

SEQ ID NO: 853668 - DNA, 15 bp, Homo sapiens
agtgtgtttgggcat

SEQ ID NO: 853669 - DNA, 15 bp, Homo sapiens
gtgtgtttgggcata

SEQ ID NO: 853670 - DNA, 15 bp, Homo sapiens
tgtgtttgggcatat

SEQ ID NO: 853671 - DNA, 15 bp, Homo sapiens
gtgtttgggcatatt

SEQ ID NO: 853672 - DNA, 15 bp, Homo sapiens
tgtttgggcatattt

SEQ ID NO: 853673 - DNA, 15 bp, Homo sapiens
gtttgggcatatttc

SEQ ID NO: 853674 - DNA, 15 bp, Homo sapiens
tttgggcatatttct

SEQ ID NO: 853675 - DNA, 15 bp, Homo sapiens
ttgggcatatttctt

SEQ ID NO: 853676 - DNA, 15 bp, Homo sapiens
tgggcatatttctta

SEQ ID NO: 853677 - DNA, 15 bp, Homo sapiens
gggcatatttcttaa

SEQ ID NO: 853678 - DNA, 15 bp, Homo sapiens
ggcatatttcttaat

SEQ ID NO: 853679 - DNA, 15 bp, Homo sapiens
gcatatttcttaata

SEQ ID NO: 853680 - DNA, 15 bp, Homo sapiens
catatttcttaatat

SEQ ID NO: 853681 - DNA, 15 bp, Homo sapiens
atatttcttaatatg

SEQ ID NO: 853682 - DNA, 15 bp, Homo sapiens
tatttcttaatatga

SEQ ID NO: 853683 - DNA, 15 bp, Homo sapiens
atttcttaatatgaa

SEQ ID NO: 853684 - DNA, 15 bp, Homo sapiens
tttcttaatatgaag

SEQ ID NO: 853685 - DNA, 15 bp, Homo sapiens
ttcttaatatgaagt

SEQ ID NO: 853686 - DNA, 15 bp, Homo sapiens
tcttaatatgaagtt

SEQ ID NO: 853687 - DNA, 15 bp, Homo sapiens
cttaatatgaagttt

SEQ ID NO: 853688 - DNA, 15 bp, Homo sapiens
ttaatatgaagtttc

SEQ ID NO: 853689 - DNA, 15 bp, Homo sapiens
taatatgaagtttct

SEQ ID NO: 853690 - DNA, 15 bp, Homo sapiens
aatatgaagtttctc

SEQ ID NO: 853691 - DNA, 15 bp, Homo sapiens
atatgaagtttctca

SEQ ID NO: 853692 - DNA, 15 bp, Homo sapiens
tatgaagtttctcaa

SEQ ID NO: 853693 - DNA, 15 bp, Homo sapiens
atgaagtttctcaat

SEQ ID NO: 853694 - DNA, 15 bp, Homo sapiens
tgaagtttctcaatt

SEQ ID NO: 853695 - DNA, 15 bp, Homo sapiens
gaagtttctcaattt

SEQ ID NO: 853696 - DNA, 15 bp, Homo sapiens
aagtttctcaatttt

SEQ ID NO: 853697 - DNA, 15 bp, Homo sapiens
agtttctcaattttc

SEQ ID NO: 853698 - DNA, 15 bp, Homo sapiens
gtttctcaattttca

SEQ ID NO: 853699 - DNA, 15 bp, Homo sapiens
tttctcaattttcac

SEQ ID NO: 853700 - DNA, 15 bp, Homo sapiens
ttctcaattttcacc

SEQ ID NO: 853701 - DNA, 15 bp, Homo sapiens
tctcaattttcacca

SEQ ID NO: 853702 - DNA, 15 bp, Homo sapiens
ctcaattttcaccat

SEQ ID NO: 853703 - DNA, 15 bp, Homo sapiens
tcaattttcaccatg

SEQ ID NO: 853704 - DNA, 15 bp, Homo sapiens
caattttcaccatgt

SEQ ID NO: 853705 - DNA, 15 bp, Homo sapiens
aattttcaccatgtg

SEQ ID NO: 853706 - DNA, 15 bp, Homo sapiens
attttcaccatgtga

SEQ ID NO: 853707 - DNA, 15 bp, Homo sapiens
ttttcaccatgtgat

SEQ ID NO: 853708 - DNA, 15 bp, Homo sapiens
tttcaccatgtgatt

SEQ ID NO: 853709 - DNA, 15 bp, Homo sapiens
ttcaccatgtgattt

SEQ ID NO: 853710 - DNA, 15 bp, Homo sapiens
tcaccatgtgatttc

SEQ ID NO: 853711 - DNA, 15 bp, Homo sapiens
caccatgtgatttca

SEQ ID NO: 853712 - DNA, 15 bp, Homo sapiens
accatgtgatttcac

SEQ ID NO: 853713 - DNA, 15 bp, Homo sapiens
ccatgtgatttcacc

SEQ ID NO: 853714 - DNA, 15 bp, Homo sapiens
catgtgatttcaccc

SEQ ID NO: 853715 - DNA, 15 bp, Homo sapiens
atgtgatttcaccct

SEQ ID NO: 853716 - DNA, 15 bp, Homo sapiens
tgtgatttcaccctg

SEQ ID NO: 853717 - DNA, 15 bp, Homo sapiens
gtgatttcaccctgt

SEQ ID NO: 853718 - DNA, 15 bp, Homo sapiens
tgatttcaccctgtt

SEQ ID NO: 853719 - DNA, 15 bp, Homo sapiens
gatttcaccctgttt

SEQ ID NO: 853720 - DNA, 15 bp, Homo sapiens
atttcaccctgtttt

SEQ ID NO: 853721 - DNA, 15 bp, Homo sapiens
tttcaccctgttttg

SEQ ID NO: 853722 - DNA, 15 bp, Homo sapiens
ttcaccctgttttgc

SEQ ID NO: 853723 - DNA, 15 bp, Homo sapiens
tcaccctgttttgct

SEQ ID NO: 853724 - DNA, 15 bp, Homo sapiens
caccctgttttgctg

SEQ ID NO: 853725 - DNA, 15 bp, Homo sapiens
accctgttttgctgc

SEQ ID NO: 853726 - DNA, 15 bp, Homo sapiens
ccctgttttgctgct

SEQ ID NO: 853727 - DNA, 15 bp, Homo sapiens
cctgttttgctgctg

SEQ ID NO: 853728 - DNA, 15 bp, Homo sapiens
ctgttttgctgctgt

SEQ ID NO: 853729 - DNA, 15 bp, Homo sapiens
tgttttgctgctgtt

SEQ ID NO: 853730 - DNA, 15 bp, Homo sapiens
gttttgctgctgttt

SEQ ID NO: 853731 - DNA, 15 bp, Homo sapiens
ttttgctgctgtttt

SEQ ID NO: 853732 - DNA, 15 bp, Homo sapiens
tttgctgctgtttta

SEQ ID NO: 853733 - DNA, 15 bp, Homo sapiens
ttgctgctgttttac

SEQ ID NO: 853734 - DNA, 15 bp, Homo sapiens
tgctgctgttttaca

SEQ ID NO: 853735 - DNA, 15 bp, Homo sapiens
gctgctgttttacat

SEQ ID NO: 853736 - DNA, 15 bp, Homo sapiens
tgctgttttacattg

SEQ ID NO: 853737 - DNA, 15 bp, Homo sapiens
gctgttttacattgc

SEQ ID NO: 853738 - DNA, 15 bp, Homo sapiens
ctgttttacattgca

SEQ ID NO: 853739 - DNA, 15 bp, Homo sapiens
tgttttacattgcat

SEQ ID NO: 853740 - DNA, 15 bp, Homo sapiens
gttttacattgcatg

SEQ ID NO: 853741 - DNA, 15 bp, Homo sapiens
ttttacattgcatga

SEQ ID NO: 853742 - DNA, 15 bp, Homo sapiens
tttacattgcatgaa

SEQ ID NO: 853743 - DNA, 15 bp, Homo sapiens
ttacattgcatgaag

SEQ ID NO: 853744 - DNA, 15 bp, Homo sapiens
tacattgcatgaagc

SEQ ID NO: 853745 - DNA, 15 bp, Homo sapiens
acattgcatgaagca

SEQ ID NO: 853746 - DNA, 15 bp, Homo sapiens
cattgcatgaagcat

SEQ ID NO: 853747 - DNA, 15 bp, Homo sapiens
attgcatgaagcatg

SEQ ID NO: 853748 - DNA, 15 bp, Homo sapiens
ttgcatgaagcatga

SEQ ID NO: 853749 - DNA, 15 bp, Homo sapiens
tgcatgaagcatgac

SEQ ID NO: 853750 - DNA, 15 bp, Homo sapiens
gcatgaagcatgact

SEQ ID NO: 853751 - DNA, 15 bp, Homo sapiens
catgaagcatgacta

SEQ ID NO: 853752 - DNA, 15 bp, Homo sapiens
atgaagcatgactaa

SEQ ID NO: 853753 - DNA, 15 bp, Homo sapiens
tgaagcatgactaaa

SEQ ID NO: 853754 - DNA, 15 bp, Homo sapiens
gaagcatgactaaat

SEQ ID NO: 853755 - DNA, 15 bp, Homo sapiens
aagcatgactaaatc

SEQ ID NO: 853756 - DNA, 15 bp, Homo sapiens
agcatgactaaatca

SEQ ID NO: 853757 - DNA, 15 bp, Homo sapiens
gcatgactaaatcat

SEQ ID NO: 853758 - DNA, 15 bp, Homo sapiens
catgactaaatcatc

SEQ ID NO: 853759 - DNA, 15 bp, Homo sapiens
atgactaaatcatca

SEQ ID NO: 853760 - DNA, 15 bp, Homo sapiens
tgactaaatcatcat

SEQ ID NO: 853761 - DNA, 15 bp, Homo sapiens
gactaaatcatcatc

SEQ ID NO: 853762 - DNA, 15 bp, Homo sapiens
actaaatcatcatca

SEQ ID NO: 853763 - DNA, 15 bp, Homo sapiens
ctaaatcatcatcaa

SEQ ID NO: 853764 - DNA, 15 bp, Homo sapiens
taaatcatcatcaat

SEQ ID NO: 853765 - DNA, 15 bp, Homo sapiens
aaatcatcatcaatg

SEQ ID NO: 853766 - DNA, 15 bp, Homo sapiens
aatcatcatcaatgg

SEQ ID NO: 853767 - DNA, 15 bp, Homo sapiens
atcatcatcaatggc

SEQ ID NO: 853768 - DNA, 15 bp, Homo sapiens
tcatcatcaatggca

SEQ ID NO: 853769 - DNA, 15 bp, Homo sapiens
catcatcaatggcat

SEQ ID NO: 853770 - DNA, 15 bp, Homo sapiens
atcatcaatggcatt

SEQ ID NO: 853771 - DNA, 15 bp, Homo sapiens
tcatcaatggcattt

SEQ ID NO: 853772 - DNA, 15 bp, Homo sapiens
catcaatggcattta

SEQ ID NO: 853773 - DNA, 15 bp, Homo sapiens
atcaatggcatttaa

SEQ ID NO: 853774 - DNA, 15 bp, Homo sapiens
tcaatggcatttaaa

SEQ ID NO: 853775 - DNA, 15 bp, Homo sapiens
caatggcatttaaaa

SEQ ID NO: 853776 - DNA, 15 bp, Homo sapiens
aatggcatttaaaaa

SEQ ID NO: 853777 - DNA, 15 bp, Homo sapiens
atggcatttaaaaaa

SEQ ID NO: 853778 - DNA, 15 bp, Homo sapiens
tggcatttaaaaaaa

SEQ ID NO: 853779 - DNA, 15 bp, Homo sapiens
ggcatttaaaaaaaa

SEQ ID NO: 853780 - DNA, 15 bp, Homo sapiens
gcatttaaaaaaaaa

SEQ ID NO: 853781 - DNA, 15 bp, Homo sapiens
catttaaaaaaaaac

SEQ ID NO: 853782 - DNA, 15 bp, Homo sapiens
atttaaaaaaaaact

SEQ ID NO: 853783 - DNA, 15 bp, Homo sapiens
tttaaaaaaaaactt

SEQ ID NO: 853784 - DNA, 15 bp, Homo sapiens
ttaaaaaaaaacttt

SEQ ID NO: 853785 - DNA, 15 bp, Homo sapiens
taaaaaaaaactttt

SEQ ID NO: 853786 - DNA, 15 bp, Homo sapiens
aaaaaaaaacttttg

SEQ ID NO: 853787 - DNA, 15 bp, Homo sapiens
aaaaaaaacttttgg

SEQ ID NO: 853788 - DNA, 15 bp, Homo sapiens
aaaaaaacttttggg

SEQ ID NO: 853789 - DNA, 15 bp, Homo sapiens
aaaaaacttttgggt

SEQ ID NO: 853790 - DNA, 15 bp, Homo sapiens
aaaaacttttgggtt

SEQ ID NO: 853791 - DNA, 15 bp, Homo sapiens
aaaacttttgggtta

SEQ ID NO: 853792 - DNA, 15 bp, Homo sapiens
aaacttttgggttaa

SEQ ID NO: 853793 - DNA, 15 bp, Homo sapiens
aacttttgggttaat

SEQ ID NO: 853794 - DNA, 15 bp, Homo sapiens
acttttgggttaata

SEQ ID NO: 853795 - DNA, 15 bp, Homo sapiens
cttttgggttaatag

SEQ ID NO: 853796 - DNA, 15 bp, Homo sapiens
ttttgggttaatagt

SEQ ID NO: 853797 - DNA, 15 bp, Homo sapiens
tttgggttaatagtt

SEQ ID NO: 853798 - DNA, 15 bp, Homo sapiens
ttgggttaatagttc

SEQ ID NO: 853799 - DNA, 15 bp, Homo sapiens
tgggttaatagttcc

SEQ ID NO: 853800 - DNA, 15 bp, Homo sapiens
gggttaatagttcca

SEQ ID NO: 853801 - DNA, 15 bp, Homo sapiens
ggttaatagttccag

SEQ ID NO: 853802 - DNA, 15 bp, Homo sapiens
gttaatagttccagg

SEQ ID NO: 853803 - DNA, 15 bp, Homo sapiens
ttaatagttccagga

SEQ ID NO: 853804 - DNA, 15 bp, Homo sapiens
taatagttccaggat

SEQ ID NO: 853805 - DNA, 15 bp, Homo sapiens
aatagttccaggata

SEQ ID NO: 853806 - DNA, 15 bp, Homo sapiens
atagttccaggatag

SEQ ID NO: 853807 - DNA, 15 bp, Homo sapiens
tagttccaggatagc

SEQ ID NO: 853808 - DNA, 15 bp, Homo sapiens
agttccaggatagct

SEQ ID NO: 853809 - DNA, 15 bp, Homo sapiens
gttccaggatagctt

SEQ ID NO: 853810 - DNA, 15 bp, Homo sapiens
ttccaggatagcttt

SEQ ID NO: 853811 - DNA, 15 bp, Homo sapiens
tccaggatagctttt

SEQ ID NO: 853812 - DNA, 15 bp, Homo sapiens
ccaggatagcttttc

SEQ ID NO: 853813 - DNA, 15 bp, Homo sapiens
caggatagcttttca

SEQ ID NO: 853814 - DNA, 15 bp, Homo sapiens
aggatagcttttcaa

SEQ ID NO: 853815 - DNA, 15 bp, Homo sapiens
ggatagcttttcaat

SEQ ID NO: 853816 - DNA, 15 bp, Homo sapiens
gatagcttttcaata

SEQ ID NO: 853817 - DNA, 15 bp, Homo sapiens
atagcttttcaataa

SEQ ID NO: 853818 - DNA, 15 bp, Homo sapiens
tagcttttcaataat

SEQ ID NO: 853819 - DNA, 15 bp, Homo sapiens
agcttttcaataatg

SEQ ID NO: 853820 - DNA, 15 bp, Homo sapiens
gcttttcaataatgt

SEQ ID NO: 853821 - DNA, 15 bp, Homo sapiens
cttttcaataatgtg

SEQ ID NO: 853822 - DNA, 15 bp, Homo sapiens
ttttcaataatgtgt

SEQ ID NO: 853823 - DNA, 15 bp, Homo sapiens
tttcaataatgtgtt

SEQ ID NO: 853824 - DNA, 15 bp, Homo sapiens
ttcaataatgtgtta

SEQ ID NO: 853825 - DNA, 15 bp, Homo sapiens
tcaataatgtgttat

SEQ ID NO: 853826 - DNA, 15 bp, Homo sapiens
caataatgtgttatc

SEQ ID NO: 853827 - DNA, 15 bp, Homo sapiens
aataatgtgttatct

SEQ ID NO: 853828 - DNA, 15 bp, Homo sapiens
ataatgtgttatcta

SEQ ID NO: 853829 - DNA, 15 bp, Homo sapiens
taatgtgttatctaa

SEQ ID NO: 853830 - DNA, 15 bp, Homo sapiens
aatgtgttatctaag

SEQ ID NO: 853831 - DNA, 15 bp, Homo sapiens
atgtgttatctaaga

SEQ ID NO: 853832 - DNA, 15 bp, Homo sapiens
tgtgttatctaagac

SEQ ID NO: 853833 - DNA, 15 bp, Homo sapiens
gtgttatctaagaca

SEQ ID NO: 853834 - DNA, 15 bp, Homo sapiens
tgttatctaagacaa

SEQ ID NO: 853835 - DNA, 15 bp, Homo sapiens
gttatctaagacaat

SEQ ID NO: 853836 - DNA, 15 bp, Homo sapiens
ttatctaagacaata

SEQ ID NO: 853837 - DNA, 15 bp, Homo sapiens
tatctaagacaatat

SEQ ID NO: 853838 - DNA, 15 bp, Homo sapiens
atctaagacaatatt

SEQ ID NO: 853839 - DNA, 15 bp, Homo sapiens
tctaagacaatattg

SEQ ID NO: 853840 - DNA, 15 bp, Homo sapiens
ctaagacaatattgt

SEQ ID NO: 853841 - DNA, 15 bp, Homo sapiens
taagacaatattgtt

SEQ ID NO: 853842 - DNA, 15 bp, Homo sapiens
aagacaatattgttg

SEQ ID NO: 853843 - DNA, 15 bp, Homo sapiens
agacaatattgttga

SEQ ID NO: 853844 - DNA, 15 bp, Homo sapiens
gacaatattgttgaa

SEQ ID NO: 853845 - DNA, 15 bp, Homo sapiens
acaatattgttgaaa

SEQ ID NO: 853846 - DNA, 15 bp, Homo sapiens
caatattgttgaaaa

SEQ ID NO: 853847 - DNA, 15 bp, Homo sapiens
aatattgttgaaaac

SEQ ID NO: 853848 - DNA, 15 bp, Homo sapiens
atattgttgaaaaca

SEQ ID NO: 853849 - DNA, 15 bp, Homo sapiens
tattgttgaaaacat

SEQ ID NO: 853850 - DNA, 15 bp, Homo sapiens
attgttgaaaacata

SEQ ID NO: 853851 - DNA, 15 bp, Homo sapiens
ttgttgaaaacatac

SEQ ID NO: 853852 - DNA, 15 bp, Homo sapiens
tgttgaaaacatact

SEQ ID NO: 853853 - DNA, 15 bp, Homo sapiens
gttgaaaacatactg

SEQ ID NO: 853854 - DNA, 15 bp, Homo sapiens
ttgaaaacatactgt

SEQ ID NO: 853855 - DNA, 15 bp, Homo sapiens
tgaaaacatactgtt

SEQ ID NO: 853856 - DNA, 15 bp, Homo sapiens
gaaaacatactgttg

SEQ ID NO: 853857 - DNA, 15 bp, Homo sapiens
aaaacatactgttga

SEQ ID NO: 853858 - DNA, 15 bp, Homo sapiens
aaacatactgttgag

SEQ ID NO: 853859 - DNA, 15 bp, Homo sapiens
aacatactgttgaga

SEQ ID NO: 853860 - DNA, 15 bp, Homo sapiens
acatactgttgagat

SEQ ID NO: 853861 - DNA, 15 bp, Homo sapiens
catactgttgagatg

SEQ ID NO: 853862 - DNA, 15 bp, Homo sapiens
atactgttgagatgc

SEQ ID NO: 853863 - DNA, 15 bp, Homo sapiens
tactgttgagatgcc

SEQ ID NO: 853864 - DNA, 15 bp, Homo sapiens
actgttgagatgcct

SEQ ID NO: 853865 - DNA, 15 bp, Homo sapiens
ctgttgagatgccta

SEQ ID NO: 853866 - DNA, 15 bp, Homo sapiens
tgttgagatgcctac

SEQ ID NO: 853867 - DNA, 15 bp, Homo sapiens
gttgagatgcctact

SEQ ID NO: 853868 - DNA, 15 bp, Homo sapiens
ttgagatgcctactt

SEQ ID NO: 853869 - DNA, 15 bp, Homo sapiens
tgagatgcctacttg

SEQ ID NO: 853870 - DNA, 15 bp, Homo sapiens
gagatgcctacttgt

SEQ ID NO: 853871 - DNA, 15 bp, Homo sapiens
agatgcctacttgtt

SEQ ID NO: 853872 - DNA, 15 bp, Homo sapiens
gatgcctacttgttc

SEQ ID NO: 853873 - DNA, 15 bp, Homo sapiens
atgcctacttgttca

SEQ ID NO: 853874 - DNA, 15 bp, Homo sapiens
tgcctacttgttcat

SEQ ID NO: 853875 - DNA, 15 bp, Homo sapiens
gcctacttgttcatc

SEQ ID NO: 853876 - DNA, 15 bp, Homo sapiens
cctacttgttcatct

SEQ ID NO: 853877 - DNA, 15 bp, Homo sapiens
ctacttgttcatctt

SEQ ID NO: 853878 - DNA, 15 bp, Homo sapiens
tacttgttcatcttt

SEQ ID NO: 853879 - DNA, 15 bp, Homo sapiens
acttgttcatctttt

SEQ ID NO: 853880 - DNA, 15 bp, Homo sapiens
cttgttcatcttttc

SEQ ID NO: 853881 - DNA, 15 bp, Homo sapiens
ttgttcatcttttca

SEQ ID NO: 853882 - DNA, 15 bp, Homo sapiens
tgttcatcttttcaa

SEQ ID NO: 853883 - DNA, 15 bp, Homo sapiens
gttcatcttttcaag

SEQ ID NO: 853884 - DNA, 15 bp, Homo sapiens
ttcatcttttcaagt

SEQ ID NO: 853885 - DNA, 15 bp, Homo sapiens
tcatcttttcaagtt

SEQ ID NO: 853886 - DNA, 15 bp, Homo sapiens
catcttttcaagtta

SEQ ID NO: 853887 - DNA, 15 bp, Homo sapiens
atcttttcaagttac

SEQ ID NO: 853888 - DNA, 15 bp, Homo sapiens
tcttttcaagttact

SEQ ID NO: 853889 - DNA, 15 bp, Homo sapiens
cttttcaagttactt

SEQ ID NO: 853890 - DNA, 15 bp, Homo sapiens
ttttcaagttacttt

SEQ ID NO: 853891 - DNA, 15 bp, Homo sapiens
tttcaagttactttt

SEQ ID NO: 853892 - DNA, 15 bp, Homo sapiens
ttcaagttacttttc

SEQ ID NO: 853893 - DNA, 15 bp, Homo sapiens
tcaagttacttttct

SEQ ID NO: 853894 - DNA, 15 bp, Homo sapiens
caagttacttttctc

SEQ ID NO: 853895 - DNA, 15 bp, Homo sapiens
aagttacttttctct

SEQ ID NO: 853896 - DNA, 15 bp, Homo sapiens
agttacttttctctg

SEQ ID NO: 853897 - DNA, 15 bp, Homo sapiens
gttacttttctctgt

SEQ ID NO: 853898 - DNA, 15 bp, Homo sapiens
ttacttttctctgtg

SEQ ID NO: 853899 - DNA, 15 bp, Homo sapiens
tacttttctctgtga

SEQ ID NO: 853900 - DNA, 15 bp, Homo sapiens
acttttctctgtgat

SEQ ID NO: 853901 - DNA, 15 bp, Homo sapiens
cttttctctgtgatt

SEQ ID NO: 853902 - DNA, 15 bp, Homo sapiens
ttttctctgtgattg

SEQ ID NO: 853903 - DNA, 15 bp, Homo sapiens
tttctctgtgattgt

SEQ ID NO: 853904 - DNA, 15 bp, Homo sapiens
ttctctgtgattgta

SEQ ID NO: 853905 - DNA, 15 bp, Homo sapiens
tctctgtgattgtaa

SEQ ID NO: 853906 - DNA, 15 bp, Homo sapiens
ctctgtgattgtaat

SEQ ID NO: 853907 - DNA, 15 bp, Homo sapiens
tctgtgattgtaatc

SEQ ID NO: 853908 - DNA, 15 bp, Homo sapiens
ctgtgattgtaatca

SEQ ID NO: 853909 - DNA, 15 bp, Homo sapiens
tgtgattgtaatcac

SEQ ID NO: 853910 - DNA, 15 bp, Homo sapiens
gtgattgtaatcact

SEQ ID NO: 853911 - DNA, 15 bp, Homo sapiens
tgattgtaatcactg

SEQ ID NO: 853912 - DNA, 15 bp, Homo sapiens
gattgtaatcactgt

SEQ ID NO: 853913 - DNA, 15 bp, Homo sapiens
attgtaatcactgtc

SEQ ID NO: 853914 - DNA, 15 bp, Homo sapiens
ttgtaatcactgtca

SEQ ID NO: 853915 - DNA, 15 bp, Homo sapiens
tgtaatcactgtcat

SEQ ID NO: 853916 - DNA, 15 bp, Homo sapiens
gtaatcactgtcatg

SEQ ID NO: 853917 - DNA, 15 bp, Homo sapiens
taatcactgtcatgt

SEQ ID NO: 853918 - DNA, 15 bp, Homo sapiens
aatcactgtcatgtg

SEQ ID NO: 853919 - DNA, 15 bp, Homo sapiens
atcactgtcatgtgt

SEQ ID NO: 853920 - DNA, 15 bp, Homo sapiens
tcactgtcatgtgtt

SEQ ID NO: 853921 - DNA, 15 bp, Homo sapiens
cactgtcatgtgttt

SEQ ID NO: 853922 - DNA, 15 bp, Homo sapiens
actgtcatgtgtttg

SEQ ID NO: 853923 - DNA, 15 bp, Homo sapiens
ctgtcatgtgtttgt

SEQ ID NO: 853924 - DNA, 15 bp, Homo sapiens
tgtcatgtgtttgtg

SEQ ID NO: 853925 - DNA, 15 bp, Homo sapiens
gtcatgtgtttgtgt

SEQ ID NO: 853926 - DNA, 15 bp, Homo sapiens
tcatgtgtttgtgtt

SEQ ID NO: 853927 - DNA, 15 bp, Homo sapiens
catgtgtttgtgttt

SEQ ID NO: 853928 - DNA, 15 bp, Homo sapiens
gtgtttgtgtttgta

SEQ ID NO: 853929 - DNA, 15 bp, Homo sapiens
tgtttgtgtttgtaa

SEQ ID NO: 853930 - DNA, 15 bp, Homo sapiens
gtttgtgtttgtaat

SEQ ID NO: 853931 - DNA, 15 bp, Homo sapiens
tttgtgtttgtaatt

SEQ ID NO: 853932 - DNA, 15 bp, Homo sapiens
ttgtgtttgtaattg

SEQ ID NO: 853933 - DNA, 15 bp, Homo sapiens
tgtgtttgtaattgt

SEQ ID NO: 853934 - DNA, 15 bp, Homo sapiens
gtgtttgtaattgtg

SEQ ID NO: 853935 - DNA, 15 bp, Homo sapiens
tgtttgtaattgtgt

SEQ ID NO: 853936 - DNA, 15 bp, Homo sapiens
gtttgtaattgtgtg

SEQ ID NO: 853937 - DNA, 15 bp, Homo sapiens
tttgtaattgtgtgt

SEQ ID NO: 853938 - DNA, 15 bp, Homo sapiens
taattgtgtgtgtgt

SEQ ID NO: 853939 - DNA, 15 bp, Homo sapiens
gtgtgtgtctgtgcg

SEQ ID NO: 853940 - DNA, 15 bp, Homo sapiens
tgtgtgtctgtgcgt

SEQ ID NO: 853941 - DNA, 15 bp, Homo sapiens
gtgtgtctgtgcgtg

SEQ ID NO: 853942 - DNA, 15 bp, Homo sapiens
tgtgtctgtgcgtgt

SEQ ID NO: 853943 - DNA, 15 bp, Homo sapiens
gtgtctgtgcgtgtg

SEQ ID NO: 853944 - DNA, 15 bp, Homo sapiens
tgtctgtgcgtgtgt

SEQ ID NO: 853945 - DNA, 15 bp, Homo sapiens
gtctgtgcgtgtgta

SEQ ID NO: 853946 - DNA, 15 bp, Homo sapiens
tctgtgcgtgtgtat

SEQ ID NO: 853947 - DNA, 15 bp, Homo sapiens
ctgtgcgtgtgtatt

SEQ ID NO: 853948 - DNA, 15 bp, Homo sapiens
tgtgcgtgtgtattt

SEQ ID NO: 853949 - DNA, 15 bp, Homo sapiens
gtgcgtgtgtatttg

SEQ ID NO: 853950 - DNA, 15 bp, Homo sapiens
tgcgtgtgtatttgt

SEQ ID NO: 853951 - DNA, 15 bp, Homo sapiens
gcgtgtgtatttgtc

SEQ ID NO: 853952 - DNA, 15 bp, Homo sapiens
cgtgtgtatttgtct

SEQ ID NO: 853953 - DNA, 15 bp, Homo sapiens
gtgtgtatttgtctg

SEQ ID NO: 853954 - DNA, 15 bp, Homo sapiens
tgtgtatttgtctgt

SEQ ID NO: 853955 - DNA, 15 bp, Homo sapiens
gtgtatttgtctgta

SEQ ID NO: 853956 - DNA, 15 bp, Homo sapiens
tgtatttgtctgtat

SEQ ID NO: 853957 - DNA, 15 bp, Homo sapiens
gtatttgtctgtatc

SEQ ID NO: 853958 - DNA, 15 bp, Homo sapiens
tatttgtctgtatct

SEQ ID NO: 853959 - DNA, 15 bp, Homo sapiens
atttgtctgtatctt

SEQ ID NO: 853960 - DNA, 15 bp, Homo sapiens
tttgtctgtatcttt

SEQ ID NO: 853961 - DNA, 15 bp, Homo sapiens
ttgtctgtatctttt

SEQ ID NO: 853962 - DNA, 15 bp, Homo sapiens
tgtctgtatcttttt

SEQ ID NO: 853963 - DNA, 15 bp, Homo sapiens
gtctgtatctttttc

SEQ ID NO: 853964 - DNA, 15 bp, Homo sapiens
tctgtatctttttcc

SEQ ID NO: 853965 - DNA, 15 bp, Homo sapiens
ctgtatctttttcca

SEQ ID NO: 853966 - DNA, 15 bp, Homo sapiens
tgtatctttttccaa

SEQ ID NO: 853967 - DNA, 15 bp, Homo sapiens
gtatctttttccaaa

SEQ ID NO: 853968 - DNA, 15 bp, Homo sapiens
tatctttttccaaaa

SEQ ID NO: 853969 - DNA, 15 bp, Homo sapiens
atctttttccaaaat

SEQ ID NO: 853970 - DNA, 15 bp, Homo sapiens
tctttttccaaaatc

SEQ ID NO: 853971 - DNA, 15 bp, Homo sapiens
ctttttccaaaatct

SEQ ID NO: 853972 - DNA, 15 bp, Homo sapiens
tttttccaaaatctg

SEQ ID NO: 853973 - DNA, 15 bp, Homo sapiens
ttttccaaaatctga

SEQ ID NO: 853974 - DNA, 15 bp, Homo sapiens
tttccaaaatctgat

SEQ ID NO: 853975 - DNA, 15 bp, Homo sapiens
ttccaaaatctgatt

SEQ ID NO: 853976 - DNA, 15 bp, Homo sapiens
tccaaaatctgattc

SEQ ID NO: 853977 - DNA, 15 bp, Homo sapiens
ccaaaatctgattct

SEQ ID NO: 853978 - DNA, 15 bp, Homo sapiens
caaaatctgattctt

SEQ ID NO: 853979 - DNA, 15 bp, Homo sapiens
aaaatctgattcttc

SEQ ID NO: 853980 - DNA, 15 bp, Homo sapiens
aaatctgattcttct

SEQ ID NO: 853981 - DNA, 15 bp, Homo sapiens
aatctgattcttctg

SEQ ID NO: 853982 - DNA, 15 bp, Homo sapiens
atctgattcttctgt

SEQ ID NO: 853983 - DNA, 15 bp, Homo sapiens
tctgattcttctgtt

SEQ ID NO: 853984 - DNA, 15 bp, Homo sapiens
ctgattcttctgttg

SEQ ID NO: 853985 - DNA, 15 bp, Homo sapiens
tgattcttctgttgt

SEQ ID NO: 853986 - DNA, 15 bp, Homo sapiens
gattcttctgttgtt

SEQ ID NO: 853987 - DNA, 15 bp, Homo sapiens
attcttctgttgttt

SEQ ID NO: 853988 - DNA, 15 bp, Homo sapiens
ttcttctgttgtttt

SEQ ID NO: 853989 - DNA, 15 bp, Homo sapiens
tcttctgttgttttt

SEQ ID NO: 853990 - DNA, 15 bp, Homo sapiens
cttctgttgtttttt

SEQ ID NO: 853991 - DNA, 15 bp, Homo sapiens
ttctgttgttttttt

SEQ ID NO: 853992 - DNA, 15 bp, Homo sapiens
tctgttgtttttttg

SEQ ID NO: 853993 - DNA, 15 bp, Homo sapiens
ctgttgtttttttga

SEQ ID NO: 853994 - DNA, 15 bp, Homo sapiens
tgttgtttttttgag

SEQ ID NO: 853995 - DNA, 15 bp, Homo sapiens
gttgtttttttgagt

SEQ ID NO: 853996 - DNA, 15 bp, Homo sapiens
ttgtttttttgagta

SEQ ID NO: 853997 - DNA, 15 bp, Homo sapiens
tgtttttttgagtac

SEQ ID NO: 853998 - DNA, 15 bp, Homo sapiens
gtttttttgagtaca

SEQ ID NO: 853999 - DNA, 15 bp, Homo sapiens
tttttttgagtacat

SEQ ID NO: 854000 - DNA, 15 bp, Homo sapiens
ttttttgagtacatg

SEQ ID NO: 854001 - DNA, 15 bp, Homo sapiens
tttttgagtacatgt

SEQ ID NO: 854002 - DNA, 15 bp, Homo sapiens
ttttgagtacatgtg

SEQ ID NO: 854003 - DNA, 15 bp, Homo sapiens
tttgagtacatgtgt

SEQ ID NO: 854004 - DNA, 15 bp, Homo sapiens
ttgagtacatgtgta

SEQ ID NO: 854005 - DNA, 15 bp, Homo sapiens
tgagtacatgtgtat

SEQ ID NO: 854006 - DNA, 15 bp, Homo sapiens
gagtacatgtgtata

SEQ ID NO: 854007 - DNA, 15 bp, Homo sapiens
agtacatgtgtataa

SEQ ID NO: 854008 - DNA, 15 bp, Homo sapiens
gtacatgtgtataaa

SEQ ID NO: 854009 - DNA, 15 bp, Homo sapiens
tacatgtgtataaat

SEQ ID NO: 854010 - DNA, 15 bp, Homo sapiens
acatgtgtataaata

SEQ ID NO: 854011 - DNA, 15 bp, Homo sapiens
catgtgtataaatag

SEQ ID NO: 854012 - DNA, 15 bp, Homo sapiens
atgtgtataaataga

SEQ ID NO: 854013 - DNA, 15 bp, Homo sapiens
tgtgtataaatagag

SEQ ID NO: 854014 - DNA, 15 bp, Homo sapiens
gtgtataaatagagg

SEQ ID NO: 854015 - DNA, 15 bp, Homo sapiens
tgtataaatagaggt

SEQ ID NO: 854016 - DNA, 15 bp, Homo sapiens
gtataaatagaggtg

SEQ ID NO: 854017 - DNA, 15 bp, Homo sapiens
tataaatagaggtgg

SEQ ID NO: 854018 - DNA, 15 bp, Homo sapiens
ataaatagaggtggc

SEQ ID NO: 854019 - DNA, 15 bp, Homo sapiens
taaatagaggtggct

SEQ ID NO: 854020 - DNA, 15 bp, Homo sapiens
aaatagaggtggctt

SEQ ID NO: 854021 - DNA, 15 bp, Homo sapiens
aatagaggtggcttc

SEQ ID NO: 854022 - DNA, 15 bp, Homo sapiens
atagaggtggcttcc

SEQ ID NO: 854023 - DNA, 15 bp, Homo sapiens
tagaggtggcttcct

SEQ ID NO: 854024 - DNA, 15 bp, Homo sapiens
agaggtggcttcctg

SEQ ID NO: 854025 - DNA, 15 bp, Homo sapiens
gaggtggcttcctgt

SEQ ID NO: 854026 - DNA, 15 bp, Homo sapiens
aggtggcttcctgtc

SEQ ID NO: 854027 - DNA, 15 bp, Homo sapiens
ggtggcttcctgtca

SEQ ID NO: 854028 - DNA, 15 bp, Homo sapiens
gtggcttcctgtcag

SEQ ID NO: 854029 - DNA, 15 bp, Homo sapiens
tggcttcctgtcagt

SEQ ID NO: 854030 - DNA, 15 bp, Homo sapiens
ggcttcctgtcagtt

SEQ ID NO: 854031 - DNA, 15 bp, Homo sapiens
gcttcctgtcagttt

SEQ ID NO: 854032 - DNA, 15 bp, Homo sapiens
cttcctgtcagtttg

SEQ ID NO: 854033 - DNA, 15 bp, Homo sapiens
ttcctgtcagtttgg

SEQ ID NO: 854034 - DNA, 15 bp, Homo sapiens
tcctgtcagtttggt

SEQ ID NO: 854035 - DNA, 15 bp, Homo sapiens
cctgtcagtttggta

SEQ ID NO: 854036 - DNA, 15 bp, Homo sapiens
ctgtcagtttggtat

SEQ ID NO: 854037 - DNA, 15 bp, Homo sapiens
tgtcagtttggtatt

SEQ ID NO: 854038 - DNA, 15 bp, Homo sapiens
gtcagtttggtatta

SEQ ID NO: 854039 - DNA, 15 bp, Homo sapiens
tcagtttggtattat

SEQ ID NO: 854040 - DNA, 15 bp, Homo sapiens
cagtttggtattatt

SEQ ID NO: 854041 - DNA, 15 bp, Homo sapiens
agtttggtattattg

SEQ ID NO: 854042 - DNA, 15 bp, Homo sapiens
gtttggtattattga

SEQ ID NO: 854043 - DNA, 15 bp, Homo sapiens
tttggtattattgat

SEQ ID NO: 854044 - DNA, 15 bp, Homo sapiens
ttggtattattgata

SEQ ID NO: 854045 - DNA, 15 bp, Homo sapiens
tggtattattgatat

SEQ ID NO: 854046 - DNA, 15 bp, Homo sapiens
ggtattattgatatg

SEQ ID NO: 854047 - DNA, 15 bp, Homo sapiens
gtattattgatatga

SEQ ID NO: 854048 - DNA, 15 bp, Homo sapiens
tattattgatatgat

SEQ ID NO: 854049 - DNA, 15 bp, Homo sapiens
attattgatatgatc

SEQ ID NO: 854050 - DNA, 15 bp, Homo sapiens
ttattgatatgatcc

SEQ ID NO: 854051 - DNA, 15 bp, Homo sapiens
tattgatatgatcca

SEQ ID NO: 854052 - DNA, 15 bp, Homo sapiens
attgatatgatccaa

SEQ ID NO: 854053 - DNA, 15 bp, Homo sapiens
ttgatatgatccaac

SEQ ID NO: 854054 - DNA, 15 bp, Homo sapiens
tgatatgatccaact

SEQ ID NO: 854055 - DNA, 15 bp, Homo sapiens
gatatgatccaactg

SEQ ID NO: 854056 - DNA, 15 bp, Homo sapiens
atatgatccaactgc

SEQ ID NO: 854057 - DNA, 15 bp, Homo sapiens
tatgatccaactgca

SEQ ID NO: 854058 - DNA, 15 bp, Homo sapiens
atgatccaactgcaa

SEQ ID NO: 854059 - DNA, 15 bp, Homo sapiens
tgatccaactgcaag

SEQ ID NO: 854060 - DNA, 15 bp, Homo sapiens
gatccaactgcaaga

SEQ ID NO: 854061 - DNA, 15 bp, Homo sapiens
atccaactgcaagaa

SEQ ID NO: 854062 - DNA, 15 bp, Homo sapiens
tccaactgcaagaag

SEQ ID NO: 854063 - DNA, 15 bp, Homo sapiens
ccaactgcaagaagt

SEQ ID NO: 854064 - DNA, 15 bp, Homo sapiens
caactgcaagaagtt

SEQ ID NO: 854065 - DNA, 15 bp, Homo sapiens
aactgcaagaagtta

SEQ ID NO: 854066 - DNA, 15 bp, Homo sapiens
actgcaagaagttac

SEQ ID NO: 854067 - DNA, 15 bp, Homo sapiens
ctgcaagaagttact

SEQ ID NO: 854068 - DNA, 15 bp, Homo sapiens
tgcaagaagttactg

SEQ ID NO: 854069 - DNA, 15 bp, Homo sapiens
gcaagaagttactgc

SEQ ID NO: 854070 - DNA, 15 bp, Homo sapiens
caagaagttactgca

SEQ ID NO: 854071 - DNA, 15 bp, Homo sapiens
aagaagttactgcaa

SEQ ID NO: 854072 - DNA, 15 bp, Homo sapiens
agaagttactgcaac

SEQ ID NO: 854073 - DNA, 15 bp, Homo sapiens
gaagttactgcaaca

SEQ ID NO: 854074 - DNA, 15 bp, Homo sapiens
aagttactgcaacac

SEQ ID NO: 854075 - DNA, 15 bp, Homo sapiens
agttactgcaacact

SEQ ID NO: 854076 - DNA, 15 bp, Homo sapiens
gttactgcaacactt

SEQ ID NO: 854077 - DNA, 15 bp, Homo sapiens
ttactgcaacacttt

SEQ ID NO: 854078 - DNA, 15 bp, Homo sapiens
tactgcaacactttg

SEQ ID NO: 854079 - DNA, 15 bp, Homo sapiens
actgcaacactttgc

SEQ ID NO: 854080 - DNA, 15 bp, Homo sapiens
ctgcaacactttgca

SEQ ID NO: 854081 - DNA, 15 bp, Homo sapiens
tgcaacactttgcat

SEQ ID NO: 854082 - DNA, 15 bp, Homo sapiens
gcaacactttgcatc

SEQ ID NO: 854083 - DNA, 15 bp, Homo sapiens
caacactttgcatct

SEQ ID NO: 854084 - DNA, 15 bp, Homo sapiens
aacactttgcatctt

SEQ ID NO: 854085 - DNA, 15 bp, Homo sapiens
acactttgcatctta

SEQ ID NO: 854086 - DNA, 15 bp, Homo sapiens
cactttgcatcttaa

SEQ ID NO: 854087 - DNA, 15 bp, Homo sapiens
actttgcatcttaaa

SEQ ID NO: 854088 - DNA, 15 bp, Homo sapiens
ctttgcatcttaaag

SEQ ID NO: 854089 - DNA, 15 bp, Homo sapiens
tttgcatcttaaagg

SEQ ID NO: 854090 - DNA, 15 bp, Homo sapiens
ttgcatcttaaaggt

SEQ ID NO: 854091 - DNA, 15 bp, Homo sapiens
tgcatcttaaaggtc

SEQ ID NO: 854092 - DNA, 15 bp, Homo sapiens
gcatcttaaaggtcc

SEQ ID NO: 854093 - DNA, 15 bp, Homo sapiens
catcttaaaggtcca

SEQ ID NO: 854094 - DNA, 15 bp, Homo sapiens
atcttaaaggtccac

SEQ ID NO: 854095 - DNA, 15 bp, Homo sapiens
tcttaaaggtccaca

SEQ ID NO: 854096 - DNA, 15 bp, Homo sapiens
cttaaaggtccacag

SEQ ID NO: 854097 - DNA, 15 bp, Homo sapiens
ttaaaggtccacagt

SEQ ID NO: 854098 - DNA, 15 bp, Homo sapiens
taaaggtccacagtg

SEQ ID NO: 854099 - DNA, 15 bp, Homo sapiens
aaaggtccacagtgg

SEQ ID NO: 854100 - DNA, 15 bp, Homo sapiens
aaggtccacagtggt

SEQ ID NO: 854101 - DNA, 15 bp, Homo sapiens
aggtccacagtggtt

SEQ ID NO: 854102 - DNA, 15 bp, Homo sapiens
ggtccacagtggttg

SEQ ID NO: 854103 - DNA, 15 bp, Homo sapiens
gtccacagtggttgc

SEQ ID NO: 854104 - DNA, 15 bp, Homo sapiens
tccacagtggttgca

SEQ ID NO: 854105 - DNA, 15 bp, Homo sapiens
ccacagtggttgcac

SEQ ID NO: 854106 - DNA, 15 bp, Homo sapiens
cacagtggttgcacc

SEQ ID NO: 854107 - DNA, 15 bp, Homo sapiens
acagtggttgcacct

SEQ ID NO: 854108 - DNA, 15 bp, Homo sapiens
cagtggttgcacctc

SEQ ID NO: 854109 - DNA, 15 bp, Homo sapiens
agtggttgcacctct

SEQ ID NO: 854110 - DNA, 15 bp, Homo sapiens
gtggttgcacctctg

SEQ ID NO: 854111 - DNA, 15 bp, Homo sapiens
tggttgcacctctgc

SEQ ID NO: 854112 - DNA, 15 bp, Homo sapiens
ggttgcacctctgct

SEQ ID NO: 854113 - DNA, 15 bp, Homo sapiens
gttgcacctctgctg

SEQ ID NO: 854114 - DNA, 15 bp, Homo sapiens
ttgcacctctgctgt

SEQ ID NO: 854115 - DNA, 15 bp, Homo sapiens
tgcacctctgctgtt

SEQ ID NO: 854116 - DNA, 15 bp, Homo sapiens
gcacctctgctgttg

SEQ ID NO: 854117 - DNA, 15 bp, Homo sapiens
cacctctgctgttgg

SEQ ID NO: 854118 - DNA, 15 bp, Homo sapiens
acctctgctgttggc

SEQ ID NO: 854119 - DNA, 15 bp, Homo sapiens
cctctgctgttggct

SEQ ID NO: 854120 - DNA, 15 bp, Homo sapiens
ctctgctgttggctt

SEQ ID NO: 854121 - DNA, 15 bp, Homo sapiens
tctgctgttggcttt

SEQ ID NO: 854122 - DNA, 15 bp, Homo sapiens
ctgctgttggctttt

SEQ ID NO: 854123 - DNA, 15 bp, Homo sapiens
tgctgttggcttttg

SEQ ID NO: 854124 - DNA, 15 bp, Homo sapiens
gctgttggcttttgg

SEQ ID NO: 854125 - DNA, 15 bp, Homo sapiens
ctgttggcttttggc

SEQ ID NO: 854126 - DNA, 15 bp, Homo sapiens
tgttggcttttggcc

SEQ ID NO: 854127 - DNA, 15 bp, Homo sapiens
gttggcttttggcct

SEQ ID NO: 854128 - DNA, 15 bp, Homo sapiens
ttggcttttggcctt

SEQ ID NO: 854129 - DNA, 15 bp, Homo sapiens
tggcttttggccttt

SEQ ID NO: 854130 - DNA, 15 bp, Homo sapiens
ggcttttggcctttg

SEQ ID NO: 854131 - DNA, 15 bp, Homo sapiens
gcttttggcctttga

SEQ ID NO: 854132 - DNA, 15 bp, Homo sapiens
cttttggcctttgag

SEQ ID NO: 854133 - DNA, 15 bp, Homo sapiens
ttttggcctttgagt

SEQ ID NO: 854134 - DNA, 15 bp, Homo sapiens
tttggcctttgagtc

SEQ ID NO: 854135 - DNA, 15 bp, Homo sapiens
ttggcctttgagtcc

SEQ ID NO: 854136 - DNA, 15 bp, Homo sapiens
tggcctttgagtcct

SEQ ID NO: 854137 - DNA, 15 bp, Homo sapiens
ggcctttgagtcctt

SEQ ID NO: 854138 - DNA, 15 bp, Homo sapiens
gcctttgagtccttt

SEQ ID NO: 854139 - DNA, 15 bp, Homo sapiens
cctttgagtcctttt

SEQ ID NO: 854140 - DNA, 15 bp, Homo sapiens
ctttgagtcctttta

SEQ ID NO: 854141 - DNA, 15 bp, Homo sapiens
tttgagtccttttat

SEQ ID NO: 854142 - DNA, 15 bp, Homo sapiens
ttgagtccttttatc

SEQ ID NO: 854143 - DNA, 15 bp, Homo sapiens
tgagtccttttatct

SEQ ID NO: 854144 - DNA, 15 bp, Homo sapiens
gagtccttttatctt

SEQ ID NO: 854145 - DNA, 15 bp, Homo sapiens
agtccttttatcttg

SEQ ID NO: 854146 - DNA, 15 bp, Homo sapiens
gtccttttatcttgt

SEQ ID NO: 854147 - DNA, 15 bp, Homo sapiens
tccttttatcttgtg

SEQ ID NO: 854148 - DNA, 15 bp, Homo sapiens
ccttttatcttgtgg

SEQ ID NO: 854149 - DNA, 15 bp, Homo sapiens
cttttatcttgtggt

SEQ ID NO: 854150 - DNA, 15 bp, Homo sapiens
ttttatcttgtggtg

SEQ ID NO: 854151 - DNA, 15 bp, Homo sapiens
tttatcttgtggtga

SEQ ID NO: 854152 - DNA, 15 bp, Homo sapiens
ttatcttgtggtgaa

SEQ ID NO: 854153 - DNA, 15 bp, Homo sapiens
tatcttgtggtgaag

SEQ ID NO: 854154 - DNA, 15 bp, Homo sapiens
atcttgtggtgaagg

SEQ ID NO: 854155 - DNA, 15 bp, Homo sapiens
tcttgtggtgaaggc

SEQ ID NO: 854156 - DNA, 15 bp, Homo sapiens
cttgtggtgaaggca

SEQ ID NO: 854157 - DNA, 15 bp, Homo sapiens
ttgtggtgaaggcat

SEQ ID NO: 854158 - DNA, 15 bp, Homo sapiens
tgtggtgaaggcatg

SEQ ID NO: 854159 - DNA, 15 bp, Homo sapiens
gtggtgaaggcatgt

SEQ ID NO: 854160 - DNA, 15 bp, Homo sapiens
tggtgaaggcatgtt

SEQ ID NO: 854161 - DNA, 15 bp, Homo sapiens
ggtgaaggcatgttg

SEQ ID NO: 854162 - DNA, 15 bp, Homo sapiens
gtgaaggcatgttgt

SEQ ID NO: 854163 - DNA, 15 bp, Homo sapiens
tgaaggcatgttgtg

SEQ ID NO: 854164 - DNA, 15 bp, Homo sapiens
gaaggcatgttgtga

SEQ ID NO: 854165 - DNA, 15 bp, Homo sapiens
aaggcatgttgtgat

SEQ ID NO: 854166 - DNA, 15 bp, Homo sapiens
aggcatgttgtgatg

SEQ ID NO: 854167 - DNA, 15 bp, Homo sapiens
ggcatgttgtgatgt

SEQ ID NO: 854168 - DNA, 15 bp, Homo sapiens
gcatgttgtgatgta

SEQ ID NO: 854169 - DNA, 15 bp, Homo sapiens
catgttgtgatgtag

SEQ ID NO: 854170 - DNA, 15 bp, Homo sapiens
atgttgtgatgtagg

SEQ ID NO: 854171 - DNA, 15 bp, Homo sapiens
tgttgtgatgtaggc

SEQ ID NO: 854172 - DNA, 15 bp, Homo sapiens
gttgtgatgtaggca

SEQ ID NO: 854173 - DNA, 15 bp, Homo sapiens
ttgtgatgtaggcat

SEQ ID NO: 854174 - DNA, 15 bp, Homo sapiens
tgtgatgtaggcatg

SEQ ID NO: 854175 - DNA, 15 bp, Homo sapiens
gtgatgtaggcatga

SEQ ID NO: 854176 - DNA, 15 bp, Homo sapiens
tgatgtaggcatgac

SEQ ID NO: 854177 - DNA, 15 bp, Homo sapiens
gatgtaggcatgact

SEQ ID NO: 854178 - DNA, 15 bp, Homo sapiens
atgtaggcatgactt

SEQ ID NO: 854179 - DNA, 15 bp, Homo sapiens
tgtaggcatgacttg

SEQ ID NO: 854180 - DNA, 15 bp, Homo sapiens
gtaggcatgacttgt

SEQ ID NO: 854181 - DNA, 15 bp, Homo sapiens
taggcatgacttgtc

SEQ ID NO: 854182 - DNA, 15 bp, Homo sapiens
aggcatgacttgtcc

SEQ ID NO: 854183 - DNA, 15 bp, Homo sapiens
ggcatgacttgtcct

SEQ ID NO: 854184 - DNA, 15 bp, Homo sapiens
gcatgacttgtccta

SEQ ID NO: 854185 - DNA, 15 bp, Homo sapiens
catgacttgtcctaa

SEQ ID NO: 854186 - DNA, 15 bp, Homo sapiens
atgacttgtcctaag

SEQ ID NO: 854187 - DNA, 15 bp, Homo sapiens
tgacttgtcctaagt

SEQ ID NO: 854188 - DNA, 15 bp, Homo sapiens
gacttgtcctaagta

SEQ ID NO: 854189 - DNA, 15 bp, Homo sapiens
acttgtcctaagtat

SEQ ID NO: 854190 - DNA, 15 bp, Homo sapiens
cttgtcctaagtata

SEQ ID NO: 854191 - DNA, 15 bp, Homo sapiens
ttgtcctaagtatac

SEQ ID NO: 854192 - DNA, 15 bp, Homo sapiens
tgtcctaagtatacc

SEQ ID NO: 854193 - DNA, 15 bp, Homo sapiens
gtcctaagtatacca

SEQ ID NO: 854194 - DNA, 15 bp, Homo sapiens
tcctaagtataccag

SEQ ID NO: 854195 - DNA, 15 bp, Homo sapiens
cctaagtataccaga

SEQ ID NO: 854196 - DNA, 15 bp, Homo sapiens
ctaagtataccagaa

SEQ ID NO: 854197 - DNA, 15 bp, Homo sapiens
taagtataccagaaa

SEQ ID NO: 854198 - DNA, 15 bp, Homo sapiens
aagtataccagaaaa

SEQ ID NO: 854199 - DNA, 15 bp, Homo sapiens
agtataccagaaaat

SEQ ID NO: 854200 - DNA, 15 bp, Homo sapiens
gtataccagaaaatg

SEQ ID NO: 854201 - DNA, 15 bp, Homo sapiens
tataccagaaaatga

SEQ ID NO: 854202 - DNA, 15 bp, Homo sapiens
ataccagaaaatgat

SEQ ID NO: 854203 - DNA, 15 bp, Homo sapiens
taccagaaaatgatt

SEQ ID NO: 854204 - DNA, 15 bp, Homo sapiens
accagaaaatgattt

SEQ ID NO: 854205 - DNA, 15 bp, Homo sapiens
ccagaaaatgatttg

SEQ ID NO: 854206 - DNA, 15 bp, Homo sapiens
cagaaaatgatttgg

SEQ ID NO: 854207 - DNA, 15 bp, Homo sapiens
agaaaatgatttggc

SEQ ID NO: 854208 - DNA, 15 bp, Homo sapiens
gaaaatgatttggct

SEQ ID NO: 854209 - DNA, 15 bp, Homo sapiens
aaaatgatttggctt

SEQ ID NO: 854210 - DNA, 15 bp, Homo sapiens
aaatgatttggcttg

SEQ ID NO: 854211 - DNA, 15 bp, Homo sapiens
aatgatttggcttgc

SEQ ID NO: 854212 - DNA, 15 bp, Homo sapiens
atgatttggcttgct

SEQ ID NO: 854213 - DNA, 15 bp, Homo sapiens
tgatttggcttgctc

SEQ ID NO: 854214 - DNA, 15 bp, Homo sapiens
gatttggcttgctcc

SEQ ID NO: 854215 - DNA, 15 bp, Homo sapiens
atttggcttgctccc

SEQ ID NO: 854216 - DNA, 15 bp, Homo sapiens
tttggcttgctccca

SEQ ID NO: 854217 - DNA, 15 bp, Homo sapiens
ttggcttgctcccag

SEQ ID NO: 854218 - DNA, 15 bp, Homo sapiens
tggcttgctcccaga

SEQ ID NO: 854219 - DNA, 15 bp, Homo sapiens
ggcttgctcccagaa

SEQ ID NO: 854220 - DNA, 15 bp, Homo sapiens
gcttgctcccagaac

SEQ ID NO: 854221 - DNA, 15 bp, Homo sapiens
cttgctcccagaacc

SEQ ID NO: 854222 - DNA, 15 bp, Homo sapiens
ttgctcccagaacca

SEQ ID NO: 854223 - DNA, 15 bp, Homo sapiens
tgctcccagaaccaa

SEQ ID NO: 854224 - DNA, 15 bp, Homo sapiens
gctcccagaaccaaa

SEQ ID NO: 854225 - DNA, 15 bp, Homo sapiens
ctcccagaaccaaat

SEQ ID NO: 854226 - DNA, 15 bp, Homo sapiens
tcccagaaccaaata

SEQ ID NO: 854227 - DNA, 15 bp, Homo sapiens
cccagaaccaaatat

SEQ ID NO: 854228 - DNA, 15 bp, Homo sapiens
ccagaaccaaatatc

SEQ ID NO: 854229 - DNA, 15 bp, Homo sapiens
cagaaccaaatatcc

SEQ ID NO: 854230 - DNA, 15 bp, Homo sapiens
agaaccaaatatcca

SEQ ID NO: 854231 - DNA, 15 bp, Homo sapiens
gaaccaaatatccag

SEQ ID NO: 854232 - DNA, 15 bp, Homo sapiens
aaccaaatatccagc

SEQ ID NO: 854233 - DNA, 15 bp, Homo sapiens
accaaatatccagca

SEQ ID NO: 854234 - DNA, 15 bp, Homo sapiens
ccaaatatccagcat

SEQ ID NO: 854235 - DNA, 15 bp, Homo sapiens
caaatatccagcatt

SEQ ID NO: 854236 - DNA, 15 bp, Homo sapiens
aaatatccagcatta

SEQ ID NO: 854237 - DNA, 15 bp, Homo sapiens
aatatccagcattat

SEQ ID NO: 854238 - DNA, 15 bp, Homo sapiens
atatccagcattatc

SEQ ID NO: 854239 - DNA, 15 bp, Homo sapiens
tatccagcattatcc

SEQ ID NO: 854240 - DNA, 15 bp, Homo sapiens
atccagcattatcct

SEQ ID NO: 854241 - DNA, 15 bp, Homo sapiens
tccagcattatcctt

SEQ ID NO: 854242 - DNA, 15 bp, Homo sapiens
ccagcattatccttt

SEQ ID NO: 854243 - DNA, 15 bp, Homo sapiens
cagcattatcctttc

SEQ ID NO: 854244 - DNA, 15 bp, Homo sapiens
agcattatcctttct

SEQ ID NO: 854245 - DNA, 15 bp, Homo sapiens
gcattatcctttcta

SEQ ID NO: 854246 - DNA, 15 bp, Homo sapiens
cattatcctttctag

SEQ ID NO: 854247 - DNA, 15 bp, Homo sapiens
attatcctttctaga

SEQ ID NO: 854248 - DNA, 15 bp, Homo sapiens
ttatcctttctagat

SEQ ID NO: 854249 - DNA, 15 bp, Homo sapiens
tatcctttctagatc

SEQ ID NO: 854250 - DNA, 15 bp, Homo sapiens
atcctttctagatca

SEQ ID NO: 854251 - DNA, 15 bp, Homo sapiens
tcctttctagatcac

SEQ ID NO: 854252 - DNA, 15 bp, Homo sapiens
cctttctagatcacc

SEQ ID NO: 854253 - DNA, 15 bp, Homo sapiens
ctttctagatcacct

SEQ ID NO: 854254 - DNA, 15 bp, Homo sapiens
tttctagatcacctc

SEQ ID NO: 854255 - DNA, 15 bp, Homo sapiens
ttctagatcacctct

SEQ ID NO: 854256 - DNA, 15 bp, Homo sapiens
tctagatcacctctc

SEQ ID NO: 854257 - DNA, 15 bp, Homo sapiens
ctagatcacctctct

SEQ ID NO: 854258 - DNA, 15 bp, Homo sapiens
tagatcacctctctg

SEQ ID NO: 854259 - DNA, 15 bp, Homo sapiens
agatcacctctctgt

SEQ ID NO: 854260 - DNA, 15 bp, Homo sapiens
gatcacctctctgtt

SEQ ID NO: 854261 - DNA, 15 bp, Homo sapiens
atcacctctctgttc

SEQ ID NO: 854262 - DNA, 15 bp, Homo sapiens
tcacctctctgttcc

SEQ ID NO: 854263 - DNA, 15 bp, Homo sapiens
cacctctctgttccc

SEQ ID NO: 854264 - DNA, 15 bp, Homo sapiens
acctctctgttcccc

SEQ ID NO: 854265 - DNA, 15 bp, Homo sapiens
cctctctgttcccca

SEQ ID NO: 854266 - DNA, 15 bp, Homo sapiens
ctctctgttccccat

SEQ ID NO: 854267 - DNA, 15 bp, Homo sapiens
tctctgttccccatc

SEQ ID NO: 854268 - DNA, 15 bp, Homo sapiens
ctctgttccccatcc

SEQ ID NO: 854269 - DNA, 15 bp, Homo sapiens
tctgttccccatccc

SEQ ID NO: 854270 - DNA, 15 bp, Homo sapiens
ctgttccccatccca

SEQ ID NO: 854271 - DNA, 15 bp, Homo sapiens
tgttccccatcccat

SEQ ID NO: 854272 - DNA, 15 bp, Homo sapiens
gttccccatcccata

SEQ ID NO: 854273 - DNA, 15 bp, Homo sapiens
ttccccatcccatat

SEQ ID NO: 854274 - DNA, 15 bp, Homo sapiens
tccccatcccatatg

SEQ ID NO: 854275 - DNA, 15 bp, Homo sapiens
ccccatcccatatgg

SEQ ID NO: 854276 - DNA, 15 bp, Homo sapiens
cccatcccatatggc

SEQ ID NO: 854277 - DNA, 15 bp, Homo sapiens
ccatcccatatggct

SEQ ID NO: 854278 - DNA, 15 bp, Homo sapiens
catcccatatggcta

SEQ ID NO: 854279 - DNA, 15 bp, Homo sapiens
atcccatatggctaa

SEQ ID NO: 854280 - DNA, 15 bp, Homo sapiens
tcccatatggctaat

SEQ ID NO: 854281 - DNA, 15 bp, Homo sapiens
cccatatggctaata

SEQ ID NO: 854282 - DNA, 15 bp, Homo sapiens
ccatatggctaatat

SEQ ID NO: 854283 - DNA, 15 bp, Homo sapiens
catatggctaatatt

SEQ ID NO: 854284 - DNA, 15 bp, Homo sapiens
atatggctaatattt

SEQ ID NO: 854285 - DNA, 15 bp, Homo sapiens
tatggctaatatttt

SEQ ID NO: 854286 - DNA, 15 bp, Homo sapiens
atggctaatattttt

SEQ ID NO: 854287 - DNA, 15 bp, Homo sapiens
tggctaatatttttt

SEQ ID NO: 854288 - DNA, 15 bp, Homo sapiens
ggctaatattttttt

SEQ ID NO: 854289 - DNA, 15 bp, Homo sapiens
gctaatatttttttg

SEQ ID NO: 854290 - DNA, 15 bp, Homo sapiens
ctaatatttttttgt

SEQ ID NO: 854291 - DNA, 15 bp, Homo sapiens
taatatttttttgta

SEQ ID NO: 854292 - DNA, 15 bp, Homo sapiens
aatatttttttgtat

SEQ ID NO: 854293 - DNA, 15 bp, Homo sapiens
atatttttttgtatg

SEQ ID NO: 854294 - DNA, 15 bp, Homo sapiens
tatttttttgtatgt

SEQ ID NO: 854295 - DNA, 15 bp, Homo sapiens
atttttttgtatgta

SEQ ID NO: 854296 - DNA, 15 bp, Homo sapiens
tttttttgtatgtac

SEQ ID NO: 854297 - DNA, 15 bp, Homo sapiens
ttttttgtatgtacg

SEQ ID NO: 854298 - DNA, 15 bp, Homo sapiens
tttttgtatgtacga

SEQ ID NO: 854299 - DNA, 15 bp, Homo sapiens
ttttgtatgtacgaa

SEQ ID NO: 854300 - DNA, 15 bp, Homo sapiens
tttgtatgtacgaaa

SEQ ID NO: 854301 - DNA, 15 bp, Homo sapiens
ttgtatgtacgaaat

SEQ ID NO: 854302 - DNA, 15 bp, Homo sapiens
tgtatgtacgaaata

SEQ ID NO: 854303 - DNA, 15 bp, Homo sapiens
gtatgtacgaaatat

SEQ ID NO: 854304 - DNA, 15 bp, Homo sapiens
tatgtacgaaatata

SEQ ID NO: 854305 - DNA, 15 bp, Homo sapiens
atgtacgaaatatat

SEQ ID NO: 854306 - DNA, 15 bp, Homo sapiens
tgtacgaaatatatt

SEQ ID NO: 854307 - DNA, 15 bp, Homo sapiens
gtacgaaatatattt

SEQ ID NO: 854308 - DNA, 15 bp, Homo sapiens
tacgaaatatatttg

SEQ ID NO: 854309 - DNA, 15 bp, Homo sapiens
acgaaatatatttga

SEQ ID NO: 854310 - DNA, 15 bp, Homo sapiens
cgaaatatatttgaa

SEQ ID NO: 854311 - DNA, 15 bp, Homo sapiens
gaaatatatttgaaa

SEQ ID NO: 854312 - DNA, 15 bp, Homo sapiens
aaatatatttgaaaa

SEQ ID NO: 854313 - DNA, 15 bp, Homo sapiens
aatatatttgaaaat

SEQ ID NO: 854314 - DNA, 15 bp, Homo sapiens
atatatttgaaaatg

SEQ ID NO: 854315 - DNA, 15 bp, Homo sapiens
tatatttgaaaatgc

SEQ ID NO: 854316 - DNA, 15 bp, Homo sapiens
atatttgaaaatgcc

SEQ ID NO: 854317 - DNA, 15 bp, Homo sapiens
tatttgaaaatgcca

SEQ ID NO: 854318 - DNA, 15 bp, Homo sapiens
atttgaaaatgccat

SEQ ID NO: 854319 - DNA, 15 bp, Homo sapiens
tttgaaaatgccatt

SEQ ID NO: 854320 - DNA, 15 bp, Homo sapiens
ttgaaaatgccattt

SEQ ID NO: 854321 - DNA, 15 bp, Homo sapiens
tgaaaatgccatttc

SEQ ID NO: 854322 - DNA, 15 bp, Homo sapiens
gaaaatgccatttct

SEQ ID NO: 854323 - DNA, 15 bp, Homo sapiens
aaaatgccatttcta

SEQ ID NO: 854324 - DNA, 15 bp, Homo sapiens
aaatgccatttctaa

SEQ ID NO: 854325 - DNA, 15 bp, Homo sapiens
aatgccatttctaaa

SEQ ID NO: 854326 - DNA, 15 bp, Homo sapiens
atgccatttctaaag

SEQ ID NO: 854327 - DNA, 15 bp, Homo sapiens
tgccatttctaaagt

SEQ ID NO: 854328 - DNA, 15 bp, Homo sapiens
gccatttctaaagtt

SEQ ID NO: 854329 - DNA, 15 bp, Homo sapiens
ccatttctaaagtta

SEQ ID NO: 854330 - DNA, 15 bp, Homo sapiens
catttctaaagttac

SEQ ID NO: 854331 - DNA, 15 bp, Homo sapiens
atttctaaagttact

SEQ ID NO: 854332 - DNA, 15 bp, Homo sapiens
tttctaaagttactg

SEQ ID NO: 854333 - DNA, 15 bp, Homo sapiens
ttctaaagttactga

SEQ ID NO: 854334 - DNA, 15 bp, Homo sapiens
tctaaagttactgag

SEQ ID NO: 854335 - DNA, 15 bp, Homo sapiens
ctaaagttactgaga

SEQ ID NO: 854336 - DNA, 15 bp, Homo sapiens
taaagttactgagat

SEQ ID NO: 854337 - DNA, 15 bp, Homo sapiens
aaagttactgagatg

SEQ ID NO: 854338 - DNA, 15 bp, Homo sapiens
aagttactgagatgg

SEQ ID NO: 854339 - DNA, 15 bp, Homo sapiens
agttactgagatgga

SEQ ID NO: 854340 - DNA, 15 bp, Homo sapiens
gttactgagatggat

SEQ ID NO: 854341 - DNA, 15 bp, Homo sapiens
ttactgagatggatg

SEQ ID NO: 854342 - DNA, 15 bp, Homo sapiens
tactgagatggatgc

SEQ ID NO: 854343 - DNA, 15 bp, Homo sapiens
actgagatggatgca

SEQ ID NO: 854344 - DNA, 15 bp, Homo sapiens
ctgagatggatgcag

SEQ ID NO: 854345 - DNA, 15 bp, Homo sapiens
tgagatggatgcagg

SEQ ID NO: 854346 - DNA, 15 bp, Homo sapiens
gagatggatgcaggc

SEQ ID NO: 854347 - DNA, 15 bp, Homo sapiens
agatggatgcaggct

SEQ ID NO: 854348 - DNA, 15 bp, Homo sapiens
gatggatgcaggctg

SEQ ID NO: 854349 - DNA, 15 bp, Homo sapiens
atggatgcaggctga

SEQ ID NO: 854350 - DNA, 15 bp, Homo sapiens
tggatgcaggctgag

SEQ ID NO: 854351 - DNA, 15 bp, Homo sapiens
ggatgcaggctgagt

SEQ ID NO: 854352 - DNA, 15 bp, Homo sapiens
gatgcaggctgagta

SEQ ID NO: 854353 - DNA, 15 bp, Homo sapiens
atgcaggctgagtaa

SEQ ID NO: 854354 - DNA, 15 bp, Homo sapiens
tgcaggctgagtaag

SEQ ID NO: 854355 - DNA, 15 bp, Homo sapiens
gcaggctgagtaagt

SEQ ID NO: 854356 - DNA, 15 bp, Homo sapiens
caggctgagtaagtc

SEQ ID NO: 854357 - DNA, 15 bp, Homo sapiens
aggctgagtaagtcc

SEQ ID NO: 854358 - DNA, 15 bp, Homo sapiens
ggctgagtaagtcct

SEQ ID NO: 854359 - DNA, 15 bp, Homo sapiens
gctgagtaagtcctc

SEQ ID NO: 854360 - DNA, 15 bp, Homo sapiens
ctgagtaagtcctca

SEQ ID NO: 854361 - DNA, 15 bp, Homo sapiens
tgagtaagtcctcac

SEQ ID NO: 854362 - DNA, 15 bp, Homo sapiens
gagtaagtcctcacc

SEQ ID NO: 854363 - DNA, 15 bp, Homo sapiens
agtaagtcctcacca

SEQ ID NO: 854364 - DNA, 15 bp, Homo sapiens
gtaagtcctcaccag

SEQ ID NO: 854365 - DNA, 15 bp, Homo sapiens
taagtcctcaccagt

SEQ ID NO: 854366 - DNA, 15 bp, Homo sapiens
aagtcctcaccagta

SEQ ID NO: 854367 - DNA, 15 bp, Homo sapiens
agtcctcaccagtat

SEQ ID NO: 854368 - DNA, 15 bp, Homo sapiens
gtcctcaccagtatc

SEQ ID NO: 854369 - DNA, 15 bp, Homo sapiens
tcctcaccagtatct

SEQ ID NO: 854370 - DNA, 15 bp, Homo sapiens
cctcaccagtatctc

SEQ ID NO: 854371 - DNA, 15 bp, Homo sapiens
ctcaccagtatctct

SEQ ID NO: 854372 - DNA, 15 bp, Homo sapiens
tcaccagtatctctg

SEQ ID NO: 854373 - DNA, 15 bp, Homo sapiens
caccagtatctctgg

SEQ ID NO: 854374 - DNA, 15 bp, Homo sapiens
accagtatctctggt

SEQ ID NO: 854375 - DNA, 15 bp, Homo sapiens
ccagtatctctggtg

SEQ ID NO: 854376 - DNA, 15 bp, Homo sapiens
cagtatctctggtgg

SEQ ID NO: 854377 - DNA, 15 bp, Homo sapiens
agtatctctggtgga

SEQ ID NO: 854378 - DNA, 15 bp, Homo sapiens
gtatctctggtggac

SEQ ID NO: 854379 - DNA, 15 bp, Homo sapiens
tatctctggtggacc

SEQ ID NO: 854380 - DNA, 15 bp, Homo sapiens
atctctggtggacca

SEQ ID NO: 854381 - DNA, 15 bp, Homo sapiens
tctctggtggaccac

SEQ ID NO: 854382 - DNA, 15 bp, Homo sapiens
ctctggtggaccaca

SEQ ID NO: 854383 - DNA, 15 bp, Homo sapiens
tctggtggaccacag

SEQ ID NO: 854384 - DNA, 15 bp, Homo sapiens
ctggtggaccacagt

SEQ ID NO: 854385 - DNA, 15 bp, Homo sapiens
tggtggaccacagtg

SEQ ID NO: 854386 - DNA, 15 bp, Homo sapiens
ggtggaccacagtgg

SEQ ID NO: 854387 - DNA, 15 bp, Homo sapiens
gtggaccacagtggc

SEQ ID NO: 854388 - DNA, 15 bp, Homo sapiens
tggaccacagtggca

SEQ ID NO: 854389 - DNA, 15 bp, Homo sapiens
ggaccacagtggcag

SEQ ID NO: 854390 - DNA, 15 bp, Homo sapiens
gaccacagtggcagt

SEQ ID NO: 854391 - DNA, 15 bp, Homo sapiens
accacagtggcagtc

SEQ ID NO: 854392 - DNA, 15 bp, Homo sapiens
ccacagtggcagtca

SEQ ID NO: 854393 - DNA, 15 bp, Homo sapiens
cacagtggcagtcat

SEQ ID NO: 854394 - DNA, 15 bp, Homo sapiens
acagtggcagtcatt

SEQ ID NO: 854395 - DNA, 15 bp, Homo sapiens
cagtggcagtcattt

SEQ ID NO: 854396 - DNA, 15 bp, Homo sapiens
agtggcagtcatttg

SEQ ID NO: 854397 - DNA, 15 bp, Homo sapiens
gtggcagtcatttga

SEQ ID NO: 854398 - DNA, 15 bp, Homo sapiens
tggcagtcatttgag

SEQ ID NO: 854399 - DNA, 15 bp, Homo sapiens
ggcagtcatttgagt

SEQ ID NO: 854400 - DNA, 15 bp, Homo sapiens
gcagtcatttgagtc

SEQ ID NO: 854401 - DNA, 15 bp, Homo sapiens
cagtcatttgagtct

SEQ ID NO: 854402 - DNA, 15 bp, Homo sapiens
agtcatttgagtctg

SEQ ID NO: 854403 - DNA, 15 bp, Homo sapiens
gtcatttgagtctga

SEQ ID NO: 854404 - DNA, 15 bp, Homo sapiens
tcatttgagtctgac

SEQ ID NO: 854405 - DNA, 15 bp, Homo sapiens
catttgagtctgacc

SEQ ID NO: 854406 - DNA, 15 bp, Homo sapiens
atttgagtctgacca

SEQ ID NO: 854407 - DNA, 15 bp, Homo sapiens
tttgagtctgaccaa

SEQ ID NO: 854408 - DNA, 15 bp, Homo sapiens
ttgagtctgaccaac

SEQ ID NO: 854409 - DNA, 15 bp, Homo sapiens
tgagtctgaccaact

SEQ ID NO: 854410 - DNA, 15 bp, Homo sapiens
gagtctgaccaactg

SEQ ID NO: 854411 - DNA, 15 bp, Homo sapiens
agtctgaccaactgg

SEQ ID NO: 854412 - DNA, 15 bp, Homo sapiens
gtctgaccaactggg

SEQ ID NO: 854413 - DNA, 15 bp, Homo sapiens
tctgaccaactggga

SEQ ID NO: 854414 - DNA, 15 bp, Homo sapiens
ctgaccaactgggag

SEQ ID NO: 854415 - DNA, 15 bp, Homo sapiens
tgaccaactgggagc

SEQ ID NO: 854416 - DNA, 15 bp, Homo sapiens
gaccaactgggagca

SEQ ID NO: 854417 - DNA, 15 bp, Homo sapiens
accaactgggagcaa

SEQ ID NO: 854418 - DNA, 15 bp, Homo sapiens
ccaactgggagcaat

SEQ ID NO: 854419 - DNA, 15 bp, Homo sapiens
caactgggagcaatc

SEQ ID NO: 854420 - DNA, 15 bp, Homo sapiens
aactgggagcaatct

SEQ ID NO: 854421 - DNA, 15 bp, Homo sapiens
actgggagcaatctt

SEQ ID NO: 854422 - DNA, 15 bp, Homo sapiens
ctgggagcaatcttt

SEQ ID NO: 854423 - DNA, 15 bp, Homo sapiens
tgggagcaatcttta

SEQ ID NO: 854424 - DNA, 15 bp, Homo sapiens
gggagcaatctttat

SEQ ID NO: 854425 - DNA, 15 bp, Homo sapiens
ggagcaatctttatc

SEQ ID NO: 854426 - DNA, 15 bp, Homo sapiens
gagcaatctttatca

SEQ ID NO: 854427 - DNA, 15 bp, Homo sapiens
agcaatctttatcat

SEQ ID NO: 854428 - DNA, 15 bp, Homo sapiens
gcaatctttatcatg

SEQ ID NO: 854429 - DNA, 15 bp, Homo sapiens
caatctttatcatgc

SEQ ID NO: 854430 - DNA, 15 bp, Homo sapiens
aatctttatcatgct

SEQ ID NO: 854431 - DNA, 15 bp, Homo sapiens
atctttatcatgctg

SEQ ID NO: 854432 - DNA, 15 bp, Homo sapiens
tctttatcatgctgt

SEQ ID NO: 854433 - DNA, 15 bp, Homo sapiens
ctttatcatgctgtc

SEQ ID NO: 854434 - DNA, 15 bp, Homo sapiens
tttatcatgctgtct

SEQ ID NO: 854435 - DNA, 15 bp, Homo sapiens
ttatcatgctgtctg

SEQ ID NO: 854436 - DNA, 15 bp, Homo sapiens
tatcatgctgtctgt

SEQ ID NO: 854437 - DNA, 15 bp, Homo sapiens
atcatgctgtctgtg

SEQ ID NO: 854438 - DNA, 15 bp, Homo sapiens
tcatgctgtctgtgt

SEQ ID NO: 854439 - DNA, 15 bp, Homo sapiens
catgctgtctgtgtg

SEQ ID NO: 854440 - DNA, 15 bp, Homo sapiens
atgctgtctgtgtgt

SEQ ID NO: 854441 - DNA, 15 bp, Homo sapiens
tgctgtctgtgtgta

SEQ ID NO: 854442 - DNA, 15 bp, Homo sapiens
gctgtctgtgtgtaa

SEQ ID NO: 854443 - DNA, 15 bp, Homo sapiens
ctgtctgtgtgtaag

SEQ ID NO: 854444 - DNA, 15 bp, Homo sapiens
tgtctgtgtgtaagt

SEQ ID NO: 854445 - DNA, 15 bp, Homo sapiens
gtctgtgtgtaagtg

SEQ ID NO: 854446 - DNA, 15 bp, Homo sapiens
tctgtgtgtaagtga

SEQ ID NO: 854447 - DNA, 15 bp, Homo sapiens
ctgtgtgtaagtgaa

SEQ ID NO: 854448 - DNA, 15 bp, Homo sapiens
tgtgtgtaagtgaac

SEQ ID NO: 854449 - DNA, 15 bp, Homo sapiens
gtgtgtaagtgaact

SEQ ID NO: 854450 - DNA, 15 bp, Homo sapiens
tgtgtaagtgaactg

SEQ ID NO: 854451 - DNA, 15 bp, Homo sapiens
gtgtaagtgaactgg

SEQ ID NO: 854452 - DNA, 15 bp, Homo sapiens
tgtaagtgaactggg

SEQ ID NO: 854453 - DNA, 15 bp, Homo sapiens
gtaagtgaactgggc

SEQ ID NO: 854454 - DNA, 15 bp, Homo sapiens
taagtgaactgggct

SEQ ID NO: 854455 - DNA, 15 bp, Homo sapiens
aagtgaactgggctt

SEQ ID NO: 854456 - DNA, 15 bp, Homo sapiens
agtgaactgggctta

SEQ ID NO: 854457 - DNA, 15 bp, Homo sapiens
gtgaactgggcttaa

SEQ ID NO: 854458 - DNA, 15 bp, Homo sapiens
tgaactgggcttaag

SEQ ID NO: 854459 - DNA, 15 bp, Homo sapiens
gaactgggcttaagt

SEQ ID NO: 854460 - DNA, 15 bp, Homo sapiens
aactgggcttaagta

SEQ ID NO: 854461 - DNA, 15 bp, Homo sapiens
actgggcttaagtat

SEQ ID NO: 854462 - DNA, 15 bp, Homo sapiens
ctgggcttaagtata

SEQ ID NO: 854463 - DNA, 15 bp, Homo sapiens
tgggcttaagtatat

SEQ ID NO: 854464 - DNA, 15 bp, Homo sapiens
gggcttaagtatatt

SEQ ID NO: 854465 - DNA, 15 bp, Homo sapiens
ggcttaagtatattg

SEQ ID NO: 854466 - DNA, 15 bp, Homo sapiens
gcttaagtatattga

SEQ ID NO: 854467 - DNA, 15 bp, Homo sapiens
cttaagtatattgac

SEQ ID NO: 854468 - DNA, 15 bp, Homo sapiens
ttaagtatattgaca

SEQ ID NO: 854469 - DNA, 15 bp, Homo sapiens
taagtatattgacat

SEQ ID NO: 854470 - DNA, 15 bp, Homo sapiens
aagtatattgacata

SEQ ID NO: 854471 - DNA, 15 bp, Homo sapiens
agtatattgacatat

SEQ ID NO: 854472 - DNA, 15 bp, Homo sapiens
gtatattgacatatg

SEQ ID NO: 854473 - DNA, 15 bp, Homo sapiens
tatattgacatatga

SEQ ID NO: 854474 - DNA, 15 bp, Homo sapiens
atattgacatatgaa

SEQ ID NO: 854475 - DNA, 15 bp, Homo sapiens
tattgacatatgaaa

SEQ ID NO: 854476 - DNA, 15 bp, Homo sapiens
attgacatatgaaat

SEQ ID NO: 854477 - DNA, 15 bp, Homo sapiens
ttgacatatgaaata

SEQ ID NO: 854478 - DNA, 15 bp, Homo sapiens
tgacatatgaaatac

SEQ ID NO: 854479 - DNA, 15 bp, Homo sapiens
gacatatgaaataca

SEQ ID NO: 854480 - DNA, 15 bp, Homo sapiens
acatatgaaatacac

SEQ ID NO: 854481 - DNA, 15 bp, Homo sapiens
catatgaaatacaca

SEQ ID NO: 854482 - DNA, 15 bp, Homo sapiens
atatgaaatacacaa

SEQ ID NO: 854483 - DNA, 15 bp, Homo sapiens
tatgaaatacacaac

SEQ ID NO: 854484 - DNA, 15 bp, Homo sapiens
atgaaatacacaact

SEQ ID NO: 854485 - DNA, 15 bp, Homo sapiens
tgaaatacacaactg

SEQ ID NO: 854486 - DNA, 15 bp, Homo sapiens
gaaatacacaactgt

SEQ ID NO: 854487 - DNA, 15 bp, Homo sapiens
aaatacacaactgtg

SEQ ID NO: 854488 - DNA, 15 bp, Homo sapiens
aatacacaactgtgt

SEQ ID NO: 854489 - DNA, 15 bp, Homo sapiens
atacacaactgtgtc

SEQ ID NO: 854490 - DNA, 15 bp, Homo sapiens
tacacaactgtgtct

SEQ ID NO: 854491 - DNA, 15 bp, Homo sapiens
acacaactgtgtctc

SEQ ID NO: 854492 - DNA, 15 bp, Homo sapiens
cacaactgtgtctcc

SEQ ID NO: 854493 - DNA, 15 bp, Homo sapiens
acaactgtgtctcca

SEQ ID NO: 854494 - DNA, 15 bp, Homo sapiens
caactgtgtctccaa

SEQ ID NO: 854495 - DNA, 15 bp, Homo sapiens
aactgtgtctccaat

SEQ ID NO: 854496 - DNA, 15 bp, Homo sapiens
actgtgtctccaatg

SEQ ID NO: 854497 - DNA, 15 bp, Homo sapiens
ctgtgtctccaatgg

SEQ ID NO: 854498 - DNA, 15 bp, Homo sapiens
tgtgtctccaatggt

SEQ ID NO: 854499 - DNA, 15 bp, Homo sapiens
gtgtctccaatggta

SEQ ID NO: 854500 - DNA, 15 bp, Homo sapiens
tgtctccaatggtat

SEQ ID NO: 854501 - DNA, 15 bp, Homo sapiens
gtctccaatggtatc

SEQ ID NO: 854502 - DNA, 15 bp, Homo sapiens
tctccaatggtatcc

SEQ ID NO: 854503 - DNA, 15 bp, Homo sapiens
ctccaatggtatcct

SEQ ID NO: 854504 - DNA, 15 bp, Homo sapiens
tccaatggtatccta

SEQ ID NO: 854505 - DNA, 15 bp, Homo sapiens
ccaatggtatcctaa

SEQ ID NO: 854506 - DNA, 15 bp, Homo sapiens
caatggtatcctaaa

SEQ ID NO: 854507 - DNA, 15 bp, Homo sapiens
aatggtatcctaaag

SEQ ID NO: 854508 - DNA, 15 bp, Homo sapiens
atggtatcctaaagt

SEQ ID NO: 854509 - DNA, 15 bp, Homo sapiens
tggtatcctaaagta

SEQ ID NO: 854510 - DNA, 15 bp, Homo sapiens
ggtatcctaaagtaa

SEQ ID NO: 854511 - DNA, 15 bp, Homo sapiens
gtatcctaaagtaaa

SEQ ID NO: 854512 - DNA, 15 bp, Homo sapiens
tatcctaaagtaaaa

SEQ ID NO: 854513 - DNA, 15 bp, Homo sapiens
atcctaaagtaaaag

SEQ ID NO: 854514 - DNA, 15 bp, Homo sapiens
tcctaaagtaaaagt

SEQ ID NO: 854515 - DNA, 15 bp, Homo sapiens
cctaaagtaaaagtg

SEQ ID NO: 854516 - DNA, 15 bp, Homo sapiens
ctaaagtaaaagtgt

SEQ ID NO: 854517 - DNA, 15 bp, Homo sapiens
taaagtaaaagtgtg

SEQ ID NO: 854518 - DNA, 15 bp, Homo sapiens
aaagtaaaagtgtgt

SEQ ID NO: 854519 - DNA, 15 bp, Homo sapiens
aagtaaaagtgtgtg

SEQ ID NO: 854520 - DNA, 15 bp, Homo sapiens
agtaaaagtgtgtgt

SEQ ID NO: 854521 - DNA, 15 bp, Homo sapiens
gtaaaagtgtgtgtg

SEQ ID NO: 854522 - DNA, 15 bp, Homo sapiens
taaaagtgtgtgtgt

SEQ ID NO: 854523 - DNA, 15 bp, Homo sapiens
aaaagtgtgtgtgtc

SEQ ID NO: 854524 - DNA, 15 bp, Homo sapiens
aaagtgtgtgtgtct

SEQ ID NO: 854525 - DNA, 15 bp, Homo sapiens
aagtgtgtgtgtcta

SEQ ID NO: 854526 - DNA, 15 bp, Homo sapiens
agtgtgtgtgtctag

SEQ ID NO: 854527 - DNA, 15 bp, Homo sapiens
gtgtgtgtgtctagt

SEQ ID NO: 854528 - DNA, 15 bp, Homo sapiens
tgtgtgtgtctagtt

SEQ ID NO: 854529 - DNA, 15 bp, Homo sapiens
gtgtgtgtctagttg

SEQ ID NO: 854530 - DNA, 15 bp, Homo sapiens
tgtgtgtctagttgt

SEQ ID NO: 854531 - DNA, 15 bp, Homo sapiens
gtgtgtctagttgtg

SEQ ID NO: 854532 - DNA, 15 bp, Homo sapiens
tgtgtctagttgtgt

SEQ ID NO: 854533 - DNA, 15 bp, Homo sapiens
gtgtctagttgtgtg

SEQ ID NO: 854534 - DNA, 15 bp, Homo sapiens
tgtctagttgtgtgg

SEQ ID NO: 854535 - DNA, 15 bp, Homo sapiens
gtctagttgtgtggg

SEQ ID NO: 854536 - DNA, 15 bp, Homo sapiens
tctagttgtgtggga

SEQ ID NO: 854537 - DNA, 15 bp, Homo sapiens
ctagttgtgtgggac

SEQ ID NO: 854538 - DNA, 15 bp, Homo sapiens
tagttgtgtgggact

SEQ ID NO: 854539 - DNA, 15 bp, Homo sapiens
agttgtgtgggactc

SEQ ID NO: 854540 - DNA, 15 bp, Homo sapiens
gttgtgtgggactcc

SEQ ID NO: 854541 - DNA, 15 bp, Homo sapiens
ttgtgtgggactcca

SEQ ID NO: 854542 - DNA, 15 bp, Homo sapiens
tgtgtgggactccag

SEQ ID NO: 854543 - DNA, 15 bp, Homo sapiens
gtgtgggactccagc

SEQ ID NO: 854544 - DNA, 15 bp, Homo sapiens
tgtgggactccagca

SEQ ID NO: 854545 - DNA, 15 bp, Homo sapiens
gtgggactccagcag

SEQ ID NO: 854546 - DNA, 15 bp, Homo sapiens
tgggactccagcagc

SEQ ID NO: 854547 - DNA, 15 bp, Homo sapiens
gggactccagcagca

SEQ ID NO: 854548 - DNA, 15 bp, Homo sapiens
ggactccagcagcag

SEQ ID NO: 854549 - DNA, 15 bp, Homo sapiens
gactccagcagcagc

SEQ ID NO: 854550 - DNA, 15 bp, Homo sapiens
actccagcagcagca

SEQ ID NO: 854551 - DNA, 15 bp, Homo sapiens
ctccagcagcagcat

SEQ ID NO: 854552 - DNA, 15 bp, Homo sapiens
tccagcagcagcatg

SEQ ID NO: 854553 - DNA, 15 bp, Homo sapiens
ccagcagcagcatgt

SEQ ID NO: 854554 - DNA, 15 bp, Homo sapiens
aagagatcagagatc

SEQ ID NO: 854555 - DNA, 15 bp, Homo sapiens
agagatcagagatcc

SEQ ID NO: 854556 - DNA, 15 bp, Homo sapiens
gagatcagagatcct

SEQ ID NO: 854557 - DNA, 15 bp, Homo sapiens
agatcagagatcctt

SEQ ID NO: 854558 - DNA, 15 bp, Homo sapiens
gatcagagatccttg

SEQ ID NO: 854559 - DNA, 15 bp, Homo sapiens
atcagagatccttgg

SEQ ID NO: 854560 - DNA, 15 bp, Homo sapiens
tcagagatccttgga

SEQ ID NO: 854561 - DNA, 15 bp, Homo sapiens
cagagatccttggaa

SEQ ID NO: 854562 - DNA, 15 bp, Homo sapiens
agagatccttggaaa

SEQ ID NO: 854563 - DNA, 15 bp, Homo sapiens
gagatccttggaaaa

SEQ ID NO: 854564 - DNA, 15 bp, Homo sapiens
agatccttggaaaaa

SEQ ID NO: 854565 - DNA, 15 bp, Homo sapiens
gatccttggaaaaat

SEQ ID NO: 854566 - DNA, 15 bp, Homo sapiens
atccttggaaaaatt

SEQ ID NO: 854567 - DNA, 15 bp, Homo sapiens
tccttggaaaaattt

SEQ ID NO: 854568 - DNA, 15 bp, Homo sapiens
ccttggaaaaattta

SEQ ID NO: 854569 - DNA, 15 bp, Homo sapiens
cttggaaaaatttat

SEQ ID NO: 854570 - DNA, 15 bp, Homo sapiens
ttggaaaaatttatg

SEQ ID NO: 854571 - DNA, 15 bp, Homo sapiens
tggaaaaatttatgt

SEQ ID NO: 854572 - DNA, 15 bp, Homo sapiens
ggaaaaatttatgtg

SEQ ID NO: 854573 - DNA, 15 bp, Homo sapiens
gaaaaatttatgtgt

SEQ ID NO: 854574 - DNA, 15 bp, Homo sapiens
aaaaatttatgtgtt

SEQ ID NO: 854575 - DNA, 15 bp, Homo sapiens
aaaatttatgtgttc

SEQ ID NO: 854576 - DNA, 15 bp, Homo sapiens
aaatttatgtgttcc

SEQ ID NO: 854577 - DNA, 15 bp, Homo sapiens
aatttatgtgttcct

SEQ ID NO: 854578 - DNA, 15 bp, Homo sapiens
atttatgtgttccta

SEQ ID NO: 854579 - DNA, 15 bp, Homo sapiens
tttatgtgttcctat

SEQ ID NO: 854580 - DNA, 15 bp, Homo sapiens
ttatgtgttcctatt

SEQ ID NO: 854581 - DNA, 15 bp, Homo sapiens
tatgtgttcctatta

SEQ ID NO: 854582 - DNA, 15 bp, Homo sapiens
atgtgttcctattag

SEQ ID NO: 854583 - DNA, 15 bp, Homo sapiens
tgtgttcctattaga

SEQ ID NO: 854584 - DNA, 15 bp, Homo sapiens
gtgttcctattagaa

SEQ ID NO: 854585 - DNA, 15 bp, Homo sapiens
tgttcctattagaag

SEQ ID NO: 854586 - DNA, 15 bp, Homo sapiens
gttcctattagaagg

SEQ ID NO: 854587 - DNA, 15 bp, Homo sapiens
ttcctattagaaggt

SEQ ID NO: 854588 - DNA, 15 bp, Homo sapiens
tcctattagaaggtc

SEQ ID NO: 854589 - DNA, 15 bp, Homo sapiens
cctattagaaggtca

SEQ ID NO: 854590 - DNA, 15 bp, Homo sapiens
ctattagaaggtcaa

SEQ ID NO: 854591 - DNA, 15 bp, Homo sapiens
tattagaaggtcaat

SEQ ID NO: 854592 - DNA, 15 bp, Homo sapiens
attagaaggtcaata

SEQ ID NO: 854593 - DNA, 15 bp, Homo sapiens
ttagaaggtcaataa

SEQ ID NO: 854594 - DNA, 15 bp, Homo sapiens
tagaaggtcaataac

SEQ ID NO: 854595 - DNA, 15 bp, Homo sapiens
agaaggtcaataacg

SEQ ID NO: 854596 - DNA, 15 bp, Homo sapiens
gaaggtcaataacga

SEQ ID NO: 854597 - DNA, 15 bp, Homo sapiens
aaggtcaataacgaa

SEQ ID NO: 854598 - DNA, 15 bp, Homo sapiens
aggtcaataacgaat

SEQ ID NO: 854599 - DNA, 15 bp, Homo sapiens
ggtcaataacgaatt

SEQ ID NO: 854600 - DNA, 15 bp, Homo sapiens
gtcaataacgaattc

SEQ ID NO: 854601 - DNA, 15 bp, Homo sapiens
tcaataacgaattct

SEQ ID NO: 854602 - DNA, 15 bp, Homo sapiens
caataacgaattcta

SEQ ID NO: 854603 - DNA, 15 bp, Homo sapiens
aataacgaattctaa

SEQ ID NO: 854604 - DNA, 15 bp, Homo sapiens
ataacgaattctaaa

SEQ ID NO: 854605 - DNA, 15 bp, Homo sapiens
taacgaattctaaag

SEQ ID NO: 854606 - DNA, 15 bp, Homo sapiens
aacgaattctaaaga

SEQ ID NO: 854607 - DNA, 15 bp, Homo sapiens
acgaattctaaagat

SEQ ID NO: 854608 - DNA, 15 bp, Homo sapiens
cgaattctaaagata

SEQ ID NO: 854609 - DNA, 15 bp, Homo sapiens
gaattctaaagatag

SEQ ID NO: 854610 - DNA, 15 bp, Homo sapiens
aattctaaagatagt

SEQ ID NO: 854611 - DNA, 15 bp, Homo sapiens
attctaaagatagta

SEQ ID NO: 854612 - DNA, 15 bp, Homo sapiens
ttctaaagatagtag

SEQ ID NO: 854613 - DNA, 15 bp, Homo sapiens
tctaaagatagtagg

SEQ ID NO: 854614 - DNA, 15 bp, Homo sapiens
ctaaagatagtaggc

SEQ ID NO: 854615 - DNA, 15 bp, Homo sapiens
taaagatagtaggca

SEQ ID NO: 854616 - DNA, 15 bp, Homo sapiens
aaagatagtaggcaa

SEQ ID NO: 854617 - DNA, 15 bp, Homo sapiens
aagatagtaggcaaa

SEQ ID NO: 854618 - DNA, 15 bp, Homo sapiens
agatagtaggcaaaa

SEQ ID NO: 854619 - DNA, 15 bp, Homo sapiens
gatagtaggcaaaag

SEQ ID NO: 854620 - DNA, 15 bp, Homo sapiens
atagtaggcaaaagg

SEQ ID NO: 854621 - DNA, 15 bp, Homo sapiens
tagtaggcaaaaggg

SEQ ID NO: 854622 - DNA, 15 bp, Homo sapiens
agtaggcaaaagggg

SEQ ID NO: 854623 - DNA, 15 bp, Homo sapiens
gtaggcaaaaggggg

SEQ ID NO: 854624 - DNA, 15 bp, Homo sapiens
taggcaaaaggggga

SEQ ID NO: 854625 - DNA, 15 bp, Homo sapiens
aggcaaaagggggag

SEQ ID NO: 854626 - DNA, 15 bp, Homo sapiens
ggcaaaagggggaga

SEQ ID NO: 854627 - DNA, 15 bp, Homo sapiens
gcaaaagggggagaa

SEQ ID NO: 854628 - DNA, 15 bp, Homo sapiens
caaaagggggagaag

SEQ ID NO: 854629 - DNA, 15 bp, Homo sapiens
aaaagggggagaagg

SEQ ID NO: 854630 - DNA, 15 bp, Homo sapiens
aaagggggagaaggt

SEQ ID NO: 854631 - DNA, 15 bp, Homo sapiens
aagggggagaaggtt

SEQ ID NO: 854632 - DNA, 15 bp, Homo sapiens
agggggagaaggtta

SEQ ID NO: 854633 - DNA, 15 bp, Homo sapiens
gggggagaaggttat

SEQ ID NO: 854634 - DNA, 15 bp, Homo sapiens
ggggagaaggttatc

SEQ ID NO: 854635 - DNA, 15 bp, Homo sapiens
gggagaaggttatca

SEQ ID NO: 854636 - DNA, 15 bp, Homo sapiens
ggagaaggttatcac

SEQ ID NO: 854637 - DNA, 15 bp, Homo sapiens
gagaaggttatcact

SEQ ID NO: 854638 - DNA, 15 bp, Homo sapiens
agaaggttatcacta

SEQ ID NO: 854639 - DNA, 15 bp, Homo sapiens
gaaggttatcactat

SEQ ID NO: 854640 - DNA, 15 bp, Homo sapiens
aaggttatcactatc

SEQ ID NO: 854641 - DNA, 15 bp, Homo sapiens
aggttatcactatcc

SEQ ID NO: 854642 - DNA, 15 bp, Homo sapiens
ggttatcactatcca

SEQ ID NO: 854643 - DNA, 15 bp, Homo sapiens
gttatcactatccag

SEQ ID NO: 854644 - DNA, 15 bp, Homo sapiens
ttatcactatccaga

SEQ ID NO: 854645 - DNA, 15 bp, Homo sapiens
tatcactatccagaa

SEQ ID NO: 854646 - DNA, 15 bp, Homo sapiens
atcactatccagaat

SEQ ID NO: 854647 - DNA, 15 bp, Homo sapiens
tcactatccagaatc

SEQ ID NO: 854648 - DNA, 15 bp, Homo sapiens
cactatccagaatcc

SEQ ID NO: 854649 - DNA, 15 bp, Homo sapiens
actatccagaatcct

SEQ ID NO: 854650 - DNA, 15 bp, Homo sapiens
ctatccagaatcctt

SEQ ID NO: 854651 - DNA, 15 bp, Homo sapiens
tatccagaatccttg

SEQ ID NO: 854652 - DNA, 15 bp, Homo sapiens
atccagaatccttgt

SEQ ID NO: 854653 - DNA, 15 bp, Homo sapiens
tccagaatccttgtc

SEQ ID NO: 854654 - DNA, 15 bp, Homo sapiens
ccagaatccttgtct

SEQ ID NO: 854655 - DNA, 15 bp, Homo sapiens
cagaatccttgtctt

SEQ ID NO: 854656 - DNA, 15 bp, Homo sapiens
agaatccttgtcttt

SEQ ID NO: 854657 - DNA, 15 bp, Homo sapiens
gaatccttgtctttt

SEQ ID NO: 854658 - DNA, 15 bp, Homo sapiens
aatccttgtcttttt

SEQ ID NO: 854659 - DNA, 15 bp, Homo sapiens
atccttgtcttttta

SEQ ID NO: 854660 - DNA, 15 bp, Homo sapiens
tccttgtctttttat

SEQ ID NO: 854661 - DNA, 15 bp, Homo sapiens
ccttgtctttttata

SEQ ID NO: 854662 - DNA, 15 bp, Homo sapiens
cttgtctttttatat

SEQ ID NO: 854663 - DNA, 15 bp, Homo sapiens
ttgtctttttatatt

SEQ ID NO: 854664 - DNA, 15 bp, Homo sapiens
tgtctttttatattt

SEQ ID NO: 854665 - DNA, 15 bp, Homo sapiens
gtctttttatatttt

SEQ ID NO: 854666 - DNA, 15 bp, Homo sapiens
tctttttatattttg

SEQ ID NO: 854667 - DNA, 15 bp, Homo sapiens
ctttttatattttga

SEQ ID NO: 854668 - DNA, 15 bp, Homo sapiens
tttttatattttgaa

SEQ ID NO: 854669 - DNA, 15 bp, Homo sapiens
ttttatattttgaag

SEQ ID NO: 854670 - DNA, 15 bp, Homo sapiens
tttatattttgaaga

SEQ ID NO: 854671 - DNA, 15 bp, Homo sapiens
ttatattttgaagaa

SEQ ID NO: 854672 - DNA, 15 bp, Homo sapiens
tatattttgaagaag

SEQ ID NO: 854673 - DNA, 15 bp, Homo sapiens
atattttgaagaaga

SEQ ID NO: 854674 - DNA, 15 bp, Homo sapiens
tattttgaagaagac

SEQ ID NO: 854675 - DNA, 15 bp, Homo sapiens
attttgaagaagacg

SEQ ID NO: 854676 - DNA, 15 bp, Homo sapiens
ttttgaagaagacgg

SEQ ID NO: 854677 - DNA, 15 bp, Homo sapiens
tttgaagaagacggg

SEQ ID NO: 854678 - DNA, 15 bp, Homo sapiens
ttgaagaagacgggg

SEQ ID NO: 854679 - DNA, 15 bp, Homo sapiens
tgaagaagacgggga

SEQ ID NO: 854680 - DNA, 15 bp, Homo sapiens
gaagaagacggggat

SEQ ID NO: 854681 - DNA, 15 bp, Homo sapiens
aagaagacggggatt

SEQ ID NO: 854682 - DNA, 15 bp, Homo sapiens
agaagacggggatta

SEQ ID NO: 854683 - DNA, 15 bp, Homo sapiens
gaagacggggattag

SEQ ID NO: 854684 - DNA, 15 bp, Homo sapiens
aagacggggattagc

SEQ ID NO: 854685 - DNA, 15 bp, Homo sapiens
agacggggattagca

SEQ ID NO: 854686 - DNA, 15 bp, Homo sapiens
gacggggattagcat

SEQ ID NO: 854687 - DNA, 15 bp, Homo sapiens
acggggattagcatt

SEQ ID NO: 854688 - DNA, 15 bp, Homo sapiens
cggggattagcattt

SEQ ID NO: 854689 - DNA, 15 bp, Homo sapiens
ggggattagcatttt

SEQ ID NO: 854690 - DNA, 15 bp, Homo sapiens
gggattagcatttta

SEQ ID NO: 854691 - DNA, 15 bp, Homo sapiens
ggattagcattttat

SEQ ID NO: 854692 - DNA, 15 bp, Homo sapiens
gattagcattttatt

SEQ ID NO: 854693 - DNA, 15 bp, Homo sapiens
attagcattttattt

SEQ ID NO: 854694 - DNA, 15 bp, Homo sapiens
ttagcattttattta

SEQ ID NO: 854695 - DNA, 15 bp, Homo sapiens
tagcattttatttaa

SEQ ID NO: 854696 - DNA, 15 bp, Homo sapiens
agcattttatttaaa

SEQ ID NO: 854697 - DNA, 15 bp, Homo sapiens
gcattttatttaaac

SEQ ID NO: 854698 - DNA, 15 bp, Homo sapiens
cattttatttaaact

SEQ ID NO: 854699 - DNA, 15 bp, Homo sapiens
attttatttaaactt

SEQ ID NO: 854700 - DNA, 15 bp, Homo sapiens
ttttatttaaacttt

SEQ ID NO: 854701 - DNA, 15 bp, Homo sapiens
tttatttaaactttc

SEQ ID NO: 854702 - DNA, 15 bp, Homo sapiens
ttatttaaactttct

SEQ ID NO: 854703 - DNA, 15 bp, Homo sapiens
tatttaaactttcta

SEQ ID NO: 854704 - DNA, 15 bp, Homo sapiens
atttaaactttctag

SEQ ID NO: 854705 - DNA, 15 bp, Homo sapiens
tttaaactttctaga

SEQ ID NO: 854706 - DNA, 15 bp, Homo sapiens
ttaaactttctagat

SEQ ID NO: 854707 - DNA, 15 bp, Homo sapiens
taaactttctagatt

SEQ ID NO: 854708 - DNA, 15 bp, Homo sapiens
aaactttctagattt

SEQ ID NO: 854709 - DNA, 15 bp, Homo sapiens
aactttctagatttg

SEQ ID NO: 854710 - DNA, 15 bp, Homo sapiens
actttctagatttgg

SEQ ID NO: 854711 - DNA, 15 bp, Homo sapiens
ctttctagatttgga

SEQ ID NO: 854712 - DNA, 15 bp, Homo sapiens
tttctagatttggaa

SEQ ID NO: 854713 - DNA, 15 bp, Homo sapiens
ttctagatttggaat

SEQ ID NO: 854714 - DNA, 15 bp, Homo sapiens
tctagatttggaatg

SEQ ID NO: 854715 - DNA, 15 bp, Homo sapiens
ctagatttggaatgt

SEQ ID NO: 854716 - DNA, 15 bp, Homo sapiens
tagatttggaatgtg

SEQ ID NO: 854717 - DNA, 15 bp, Homo sapiens
agatttggaatgtgt

SEQ ID NO: 854718 - DNA, 15 bp, Homo sapiens
gatttggaatgtgta

SEQ ID NO: 854719 - DNA, 15 bp, Homo sapiens
atttggaatgtgtat

SEQ ID NO: 854720 - DNA, 15 bp, Homo sapiens
tttggaatgtgtata

SEQ ID NO: 854721 - DNA, 15 bp, Homo sapiens
ttggaatgtgtatag

SEQ ID NO: 854722 - DNA, 15 bp, Homo sapiens
tggaatgtgtataga

SEQ ID NO: 854723 - DNA, 15 bp, Homo sapiens
ggaatgtgtatagaa

SEQ ID NO: 854724 - DNA, 15 bp, Homo sapiens
gaatgtgtatagaag

SEQ ID NO: 854725 - DNA, 15 bp, Homo sapiens
aatgtgtatagaaga

SEQ ID NO: 854726 - DNA, 15 bp, Homo sapiens
atgtgtatagaagac

SEQ ID NO: 854727 - DNA, 15 bp, Homo sapiens
tgtgtatagaagact

SEQ ID NO: 854728 - DNA, 15 bp, Homo sapiens
gtgtatagaagactt

SEQ ID NO: 854729 - DNA, 15 bp, Homo sapiens
tgtatagaagactta

SEQ ID NO: 854730 - DNA, 15 bp, Homo sapiens
gtatagaagacttaa

SEQ ID NO: 854731 - DNA, 15 bp, Homo sapiens
tatagaagacttaat

SEQ ID NO: 854732 - DNA, 15 bp, Homo sapiens
atagaagacttaatg

SEQ ID NO: 854733 - DNA, 15 bp, Homo sapiens
tagaagacttaatgt

SEQ ID NO: 854734 - DNA, 15 bp, Homo sapiens
agaagacttaatgtc

SEQ ID NO: 854735 - DNA, 15 bp, Homo sapiens
gaagacttaatgtcg

SEQ ID NO: 854736 - DNA, 15 bp, Homo sapiens
aagacttaatgtcga

SEQ ID NO: 854737 - DNA, 15 bp, Homo sapiens
agacttaatgtcgaa

SEQ ID NO: 854738 - DNA, 15 bp, Homo sapiens
gacttaatgtcgaaa

SEQ ID NO: 854739 - DNA, 15 bp, Homo sapiens
acttaatgtcgaaaa

SEQ ID NO: 854740 - DNA, 15 bp, Homo sapiens
cttaatgtcgaaaat

SEQ ID NO: 854741 - DNA, 15 bp, Homo sapiens
ttaatgtcgaaaata

SEQ ID NO: 854742 - DNA, 15 bp, Homo sapiens
taatgtcgaaaatat

SEQ ID NO: 854743 - DNA, 15 bp, Homo sapiens
aatgtcgaaaatatt

SEQ ID NO: 854744 - DNA, 15 bp, Homo sapiens
atgtcgaaaatatta

SEQ ID NO: 854745 - DNA, 15 bp, Homo sapiens
tgtcgaaaatattaa

SEQ ID NO: 854746 - DNA, 15 bp, Homo sapiens
gtcgaaaatattaaa

SEQ ID NO: 854747 - DNA, 15 bp, Homo sapiens
tcgaaaatattaaaa

SEQ ID NO: 854748 - DNA, 15 bp, Homo sapiens
cgaaaatattaaaaa

SEQ ID NO: 854749 - DNA, 15 bp, Homo sapiens
gaaaatattaaaaac

SEQ ID NO: 854750 - DNA, 15 bp, Homo sapiens
aaaatattaaaaaca

SEQ ID NO: 854751 - DNA, 15 bp, Homo sapiens
aaatattaaaaacaa

SEQ ID NO: 854752 - DNA, 15 bp, Homo sapiens
aatattaaaaacaaa

SEQ ID NO: 854753 - DNA, 15 bp, Homo sapiens
atattaaaaacaaaa

SEQ ID NO: 854754 - DNA, 15 bp, Homo sapiens
tattaaaaacaaaaa

SEQ ID NO: 854755 - DNA, 15 bp, Homo sapiens
attaaaaacaaaaac

SEQ ID NO: 854756 - DNA, 15 bp, Homo sapiens
ttaaaaacaaaaaca

SEQ ID NO: 854757 - DNA, 15 bp, Homo sapiens
taaaaacaaaaacaa

SEQ ID NO: 854758 - DNA, 15 bp, Homo sapiens
acaaaaacaaaaacc

SEQ ID NO: 854759 - DNA, 15 bp, Homo sapiens
caaaaacaaaaacca

SEQ ID NO: 854760 - DNA, 15 bp, Homo sapiens
aaaaacaaaaaccag

SEQ ID NO: 854761 - DNA, 15 bp, Homo sapiens
aaaacaaaaaccagt

SEQ ID NO: 854762 - DNA, 15 bp, Homo sapiens
aaacaaaaaccagta

SEQ ID NO: 854763 - DNA, 15 bp, Homo sapiens
aacaaaaaccagtaa

SEQ ID NO: 854764 - DNA, 15 bp, Homo sapiens
acaaaaaccagtaat

SEQ ID NO: 854765 - DNA, 15 bp, Homo sapiens
caaaaaccagtaatg

SEQ ID NO: 854766 - DNA, 15 bp, Homo sapiens
aaaaaccagtaatgt

SEQ ID NO: 854767 - DNA, 15 bp, Homo sapiens
aaaaccagtaatgta

SEQ ID NO: 854768 - DNA, 15 bp, Homo sapiens
aaaccagtaatgtag

SEQ ID NO: 854769 - DNA, 15 bp, Homo sapiens
aaccagtaatgtagt

SEQ ID NO: 854770 - DNA, 15 bp, Homo sapiens
accagtaatgtagtt

SEQ ID NO: 854771 - DNA, 15 bp, Homo sapiens
ccagtaatgtagttt

SEQ ID NO: 854772 - DNA, 15 bp, Homo sapiens
cagtaatgtagtttc

SEQ ID NO: 854773 - DNA, 15 bp, Homo sapiens
agtaatgtagtttct

SEQ ID NO: 854774 - DNA, 15 bp, Homo sapiens
gtaatgtagtttctg

SEQ ID NO: 854775 - DNA, 15 bp, Homo sapiens
taatgtagtttctgg

SEQ ID NO: 854776 - DNA, 15 bp, Homo sapiens
aatgtagtttctggt

SEQ ID NO: 854777 - DNA, 15 bp, Homo sapiens
atgtagtttctggtg

SEQ ID NO: 854778 - DNA, 15 bp, Homo sapiens
tgtagtttctggtgc

SEQ ID NO: 854779 - DNA, 15 bp, Homo sapiens
gtagtttctggtgct

SEQ ID NO: 854780 - DNA, 15 bp, Homo sapiens
tagtttctggtgctt

SEQ ID NO: 854781 - DNA, 15 bp, Homo sapiens
agtttctggtgcttc

SEQ ID NO: 854782 - DNA, 15 bp, Homo sapiens
gtttctggtgcttca

SEQ ID NO: 854783 - DNA, 15 bp, Homo sapiens
tttctggtgcttcag

SEQ ID NO: 854784 - DNA, 15 bp, Homo sapiens
ttctggtgcttcagc

SEQ ID NO: 854785 - DNA, 15 bp, Homo sapiens
tctggtgcttcagcg

SEQ ID NO: 854786 - DNA, 15 bp, Homo sapiens
ctggtgcttcagcgc

SEQ ID NO: 854787 - DNA, 15 bp, Homo sapiens
tggtgcttcagcgcc

SEQ ID NO: 854788 - DNA, 15 bp, Homo sapiens
ggtgcttcagcgcca

SEQ ID NO: 854789 - DNA, 15 bp, Homo sapiens
gtgcttcagcgccaa

SEQ ID NO: 854790 - DNA, 15 bp, Homo sapiens
tgcttcagcgccaag

SEQ ID NO: 854791 - DNA, 15 bp, Homo sapiens
gcttcagcgccaaga

SEQ ID NO: 854792 - DNA, 15 bp, Homo sapiens
cttcagcgccaagag

SEQ ID NO: 854793 - DNA, 15 bp, Homo sapiens
ttcagcgccaagagc

SEQ ID NO: 854794 - DNA, 15 bp, Homo sapiens
tcagcgccaagagca

SEQ ID NO: 854795 - DNA, 15 bp, Homo sapiens
cagcgccaagagcat

SEQ ID NO: 854796 - DNA, 15 bp, Homo sapiens
agcgccaagagcatc

SEQ ID NO: 854797 - DNA, 15 bp, Homo sapiens
gcgccaagagcatct

SEQ ID NO: 854798 - DNA, 15 bp, Homo sapiens
cgccaagagcatctt

SEQ ID NO: 854799 - DNA, 15 bp, Homo sapiens
gccaagagcatcttt

SEQ ID NO: 854800 - DNA, 15 bp, Homo sapiens
ccaagagcatcttta

SEQ ID NO: 854801 - DNA, 15 bp, Homo sapiens
caagagcatctttat

SEQ ID NO: 854802 - DNA, 15 bp, Homo sapiens
aagagcatctttatg

SEQ ID NO: 854803 - DNA, 15 bp, Homo sapiens
agagcatctttatgt

SEQ ID NO: 854804 - DNA, 15 bp, Homo sapiens
gagcatctttatgta

SEQ ID NO: 854805 - DNA, 15 bp, Homo sapiens
agcatctttatgtat

SEQ ID NO: 854806 - DNA, 15 bp, Homo sapiens
gcatctttatgtatc

SEQ ID NO: 854807 - DNA, 15 bp, Homo sapiens
catctttatgtatct

SEQ ID NO: 854808 - DNA, 15 bp, Homo sapiens
atctttatgtatcta

SEQ ID NO: 854809 - DNA, 15 bp, Homo sapiens
tctttatgtatctag

SEQ ID NO: 854810 - DNA, 15 bp, Homo sapiens
ctttatgtatctaga

SEQ ID NO: 854811 - DNA, 15 bp, Homo sapiens
tttatgtatctagat

SEQ ID NO: 854812 - DNA, 15 bp, Homo sapiens
ttatgtatctagatt

SEQ ID NO: 854813 - DNA, 15 bp, Homo sapiens
tatgtatctagattt

SEQ ID NO: 854814 - DNA, 15 bp, Homo sapiens
atgtatctagatttc

SEQ ID NO: 854815 - DNA, 15 bp, Homo sapiens
tgtatctagatttct

SEQ ID NO: 854816 - DNA, 15 bp, Homo sapiens
gtatctagatttctt

SEQ ID NO: 854817 - DNA, 15 bp, Homo sapiens
tatctagatttcttt

SEQ ID NO: 854818 - DNA, 15 bp, Homo sapiens
atctagatttctttc

SEQ ID NO: 854819 - DNA, 15 bp, Homo sapiens
tctagatttctttct

SEQ ID NO: 854820 - DNA, 15 bp, Homo sapiens
ctagatttctttctt

SEQ ID NO: 854821 - DNA, 15 bp, Homo sapiens
tagatttctttcttt

SEQ ID NO: 854822 - DNA, 15 bp, Homo sapiens
agatttctttctttc

SEQ ID NO: 854823 - DNA, 15 bp, Homo sapiens
gatttctttctttca

SEQ ID NO: 854824 - DNA, 15 bp, Homo sapiens
atttctttctttcat

SEQ ID NO: 854825 - DNA, 15 bp, Homo sapiens
tttctttctttcatt

SEQ ID NO: 854826 - DNA, 15 bp, Homo sapiens
ttctttctttcatta

SEQ ID NO: 854827 - DNA, 15 bp, Homo sapiens
tctttctttcattat

SEQ ID NO: 854828 - DNA, 15 bp, Homo sapiens
ctttctttcattatt

SEQ ID NO: 854829 - DNA, 15 bp, Homo sapiens
tttctttcattattt

SEQ ID NO: 854830 - DNA, 15 bp, Homo sapiens
ttctttcattatttc

SEQ ID NO: 854831 - DNA, 15 bp, Homo sapiens
tctttcattatttca

SEQ ID NO: 854832 - DNA, 15 bp, Homo sapiens
ctttcattatttcaa

SEQ ID NO: 854833 - DNA, 15 bp, Homo sapiens
tttcattatttcaag

SEQ ID NO: 854834 - DNA, 15 bp, Homo sapiens
ttcattatttcaagg

SEQ ID NO: 854835 - DNA, 15 bp, Homo sapiens
tcattatttcaagga

SEQ ID NO: 854836 - DNA, 15 bp, Homo sapiens
cattatttcaaggac

SEQ ID NO: 854837 - DNA, 15 bp, Homo sapiens
attatttcaaggact

SEQ ID NO: 854838 - DNA, 15 bp, Homo sapiens
ttatttcaaggactg

SEQ ID NO: 854839 - DNA, 15 bp, Homo sapiens
tatttcaaggactgg

SEQ ID NO: 854840 - DNA, 15 bp, Homo sapiens
atttcaaggactgga

SEQ ID NO: 854841 - DNA, 15 bp, Homo sapiens
tttcaaggactggat

SEQ ID NO: 854842 - DNA, 15 bp, Homo sapiens
ttcaaggactggatc

SEQ ID NO: 854843 - DNA, 15 bp, Homo sapiens
tcaaggactggatcc

SEQ ID NO: 854844 - DNA, 15 bp, Homo sapiens
caaggactggatcca

SEQ ID NO: 854845 - DNA, 15 bp, Homo sapiens
aaggactggatccat

SEQ ID NO: 854846 - DNA, 15 bp, Homo sapiens
aggactggatccatt

SEQ ID NO: 854847 - DNA, 15 bp, Homo sapiens
ggactggatccattc

SEQ ID NO: 854848 - DNA, 15 bp, Homo sapiens
gactggatccattct

SEQ ID NO: 854849 - DNA, 15 bp, Homo sapiens
actggatccattctt

SEQ ID NO: 854850 - DNA, 15 bp, Homo sapiens
ctggatccattcttt

SEQ ID NO: 854851 - DNA, 15 bp, Homo sapiens
tggatccattcttta

SEQ ID NO: 854852 - DNA, 15 bp, Homo sapiens
ggatccattctttag

SEQ ID NO: 854853 - DNA, 15 bp, Homo sapiens
gatccattctttaga

SEQ ID NO: 854854 - DNA, 15 bp, Homo sapiens
atccattctttagat

SEQ ID NO: 854855 - DNA, 15 bp, Homo sapiens
tccattctttagatt

SEQ ID NO: 854856 - DNA, 15 bp, Homo sapiens
ccattctttagattc

SEQ ID NO: 854857 - DNA, 15 bp, Homo sapiens
cattctttagattcc

SEQ ID NO: 854858 - DNA, 15 bp, Homo sapiens
attctttagattccc

SEQ ID NO: 854859 - DNA, 15 bp, Homo sapiens
ttctttagattccca

SEQ ID NO: 854860 - DNA, 15 bp, Homo sapiens
tctttagattcccac

SEQ ID NO: 854861 - DNA, 15 bp, Homo sapiens
ctttagattcccacc

SEQ ID NO: 854862 - DNA, 15 bp, Homo sapiens
tttagattcccaccc

SEQ ID NO: 854863 - DNA, 15 bp, Homo sapiens
ttagattcccaccca

SEQ ID NO: 854864 - DNA, 15 bp, Homo sapiens
tagattcccacccag

SEQ ID NO: 854865 - DNA, 15 bp, Homo sapiens
agattcccacccaga

SEQ ID NO: 854866 - DNA, 15 bp, Homo sapiens
gattcccacccagaa

SEQ ID NO: 854867 - DNA, 15 bp, Homo sapiens
attcccacccagaag

SEQ ID NO: 854868 - DNA, 15 bp, Homo sapiens
ttcccacccagaagg

SEQ ID NO: 854869 - DNA, 15 bp, Homo sapiens
tcccacccagaaggc

SEQ ID NO: 854870 - DNA, 15 bp, Homo sapiens
cccacccagaaggct

SEQ ID NO: 854871 - DNA, 15 bp, Homo sapiens
ccacccagaaggctg

SEQ ID NO: 854872 - DNA, 15 bp, Homo sapiens
cacccagaaggctgc

SEQ ID NO: 854873 - DNA, 15 bp, Homo sapiens
acccagaaggctgcc

SEQ ID NO: 854874 - DNA, 15 bp, Homo sapiens
cccagaaggctgcct

SEQ ID NO: 854875 - DNA, 15 bp, Homo sapiens
ccagaaggctgcctt

SEQ ID NO: 854876 - DNA, 15 bp, Homo sapiens
cagaaggctgcctta

SEQ ID NO: 854877 - DNA, 15 bp, Homo sapiens
agaaggctgccttag

SEQ ID NO: 854878 - DNA, 15 bp, Homo sapiens
gaaggctgccttagc

SEQ ID NO: 854879 - DNA, 15 bp, Homo sapiens
aaggctgccttagcc

SEQ ID NO: 854880 - DNA, 15 bp, Homo sapiens
aggctgccttagcct

SEQ ID NO: 854881 - DNA, 15 bp, Homo sapiens
ggctgccttagcctt

SEQ ID NO: 854882 - DNA, 15 bp, Homo sapiens
gctgccttagcctta

SEQ ID NO: 854883 - DNA, 15 bp, Homo sapiens
ctgccttagccttag

SEQ ID NO: 854884 - DNA, 15 bp, Homo sapiens
tgccttagccttagc

SEQ ID NO: 854885 - DNA, 15 bp, Homo sapiens
gccttagccttagct

SEQ ID NO: 854886 - DNA, 15 bp, Homo sapiens
ccttagccttagctt

SEQ ID NO: 854887 - DNA, 15 bp, Homo sapiens
cttagccttagctta

SEQ ID NO: 854888 - DNA, 15 bp, Homo sapiens
ttagccttagcttag

SEQ ID NO: 854889 - DNA, 15 bp, Homo sapiens
tagccttagcttagt

SEQ ID NO: 854890 - DNA, 15 bp, Homo sapiens
agccttagcttagta

SEQ ID NO: 854891 - DNA, 15 bp, Homo sapiens
gccttagcttagtat

SEQ ID NO: 854892 - DNA, 15 bp, Homo sapiens
ccttagcttagtatc

SEQ ID NO: 854893 - DNA, 15 bp, Homo sapiens
cttagcttagtatct

SEQ ID NO: 854894 - DNA, 15 bp, Homo sapiens
ttagcttagtatctg

SEQ ID NO: 854895 - DNA, 15 bp, Homo sapiens
tagcttagtatctgc

SEQ ID NO: 854896 - DNA, 15 bp, Homo sapiens
agcttagtatctgca

SEQ ID NO: 854897 - DNA, 15 bp, Homo sapiens
gcttagtatctgcaa

SEQ ID NO: 854898 - DNA, 15 bp, Homo sapiens
cttagtatctgcaaa

SEQ ID NO: 854899 - DNA, 15 bp, Homo sapiens
ttagtatctgcaaat

SEQ ID NO: 854900 - DNA, 15 bp, Homo sapiens
tagtatctgcaaatg

SEQ ID NO: 854901 - DNA, 15 bp, Homo sapiens
agtatctgcaaatgg

SEQ ID NO: 854902 - DNA, 15 bp, Homo sapiens
gtatctgcaaatggt

SEQ ID NO: 854903 - DNA, 15 bp, Homo sapiens
tatctgcaaatggtt

SEQ ID NO: 854904 - DNA, 15 bp, Homo sapiens
atctgcaaatggttc

SEQ ID NO: 854905 - DNA, 15 bp, Homo sapiens
tctgcaaatggttct

SEQ ID NO: 854906 - DNA, 15 bp, Homo sapiens
ctgcaaatggttctg

SEQ ID NO: 854907 - DNA, 15 bp, Homo sapiens
tgcaaatggttctgc

SEQ ID NO: 854908 - DNA, 15 bp, Homo sapiens
gcaaatggttctgcc

SEQ ID NO: 854909 - DNA, 15 bp, Homo sapiens
caaatggttctgcct

SEQ ID NO: 854910 - DNA, 15 bp, Homo sapiens
aaatggttctgcctt

SEQ ID NO: 854911 - DNA, 15 bp, Homo sapiens
aatggttctgcctta

SEQ ID NO: 854912 - DNA, 15 bp, Homo sapiens
atggttctgccttac

SEQ ID NO: 854913 - DNA, 15 bp, Homo sapiens
tggttctgccttaca

SEQ ID NO: 854914 - DNA, 15 bp, Homo sapiens
ggttctgccttacac

SEQ ID NO: 854915 - DNA, 15 bp, Homo sapiens
gttctgccttacacc

SEQ ID NO: 854916 - DNA, 15 bp, Homo sapiens
ttctgccttacacct

SEQ ID NO: 854917 - DNA, 15 bp, Homo sapiens
tctgccttacacctc

SEQ ID NO: 854918 - DNA, 15 bp, Homo sapiens
ctgccttacacctca

SEQ ID NO: 854919 - DNA, 15 bp, Homo sapiens
tgccttacacctcac

SEQ ID NO: 854920 - DNA, 15 bp, Homo sapiens
gccttacacctcaca

SEQ ID NO: 854921 - DNA, 15 bp, Homo sapiens
ccttacacctcacat

SEQ ID NO: 854922 - DNA, 15 bp, Homo sapiens
cttacacctcacatg

SEQ ID NO: 854923 - DNA, 15 bp, Homo sapiens
ttacacctcacatgg

SEQ ID NO: 854924 - DNA, 15 bp, Homo sapiens
tacacctcacatggg

SEQ ID NO: 854925 - DNA, 15 bp, Homo sapiens
acacctcacatgggg

SEQ ID NO: 854926 - DNA, 15 bp, Homo sapiens
cacctcacatgggga

SEQ ID NO: 854927 - DNA, 15 bp, Homo sapiens
acctcacatggggat

SEQ ID NO: 854928 - DNA, 15 bp, Homo sapiens
cctcacatggggatg

SEQ ID NO: 854929 - DNA, 15 bp, Homo sapiens
ctcacatggggatga

SEQ ID NO: 854930 - DNA, 15 bp, Homo sapiens
tcacatggggatgat

SEQ ID NO: 854931 - DNA, 15 bp, Homo sapiens
cacatggggatgatt

SEQ ID NO: 854932 - DNA, 15 bp, Homo sapiens
acatggggatgattt

SEQ ID NO: 854933 - DNA, 15 bp, Homo sapiens
catggggatgattta

SEQ ID NO: 854934 - DNA, 15 bp, Homo sapiens
atggggatgatttaa

SEQ ID NO: 854935 - DNA, 15 bp, Homo sapiens
tggggatgatttaaa

SEQ ID NO: 854936 - DNA, 15 bp, Homo sapiens
ggggatgatttaaac

SEQ ID NO: 854937 - DNA, 15 bp, Homo sapiens
gggatgatttaaacc

SEQ ID NO: 854938 - DNA, 15 bp, Homo sapiens
ggatgatttaaaccc

SEQ ID NO: 854939 - DNA, 15 bp, Homo sapiens
gatgatttaaacccc

SEQ ID NO: 854940 - DNA, 15 bp, Homo sapiens
atgatttaaaccccc

SEQ ID NO: 854941 - DNA, 15 bp, Homo sapiens
tgatttaaaccccct

SEQ ID NO: 854942 - DNA, 15 bp, Homo sapiens
gatttaaaccccctc

SEQ ID NO: 854943 - DNA, 15 bp, Homo sapiens
atttaaaccccctca

SEQ ID NO: 854944 - DNA, 15 bp, Homo sapiens
tttaaaccccctcac

SEQ ID NO: 854945 - DNA, 15 bp, Homo sapiens
ttaaaccccctcacc

SEQ ID NO: 854946 - DNA, 15 bp, Homo sapiens
taaaccccctcaccc

SEQ ID NO: 854947 - DNA, 15 bp, Homo sapiens
aaaccccctcacccc

SEQ ID NO: 854948 - DNA, 15 bp, Homo sapiens
aaccccctcacccct

SEQ ID NO: 854949 - DNA, 15 bp, Homo sapiens
accccctcacccctg

SEQ ID NO: 854950 - DNA, 15 bp, Homo sapiens
ccccctcacccctgt

SEQ ID NO: 854951 - DNA, 15 bp, Homo sapiens
cccctcacccctgtt

SEQ ID NO: 854952 - DNA, 15 bp, Homo sapiens
ccctcacccctgttc

SEQ ID NO: 854953 - DNA, 15 bp, Homo sapiens
cctcacccctgttca

SEQ ID NO: 854954 - DNA, 15 bp, Homo sapiens
ctcacccctgttcac

SEQ ID NO: 854955 - DNA, 15 bp, Homo sapiens
tcacccctgttcaca

SEQ ID NO: 854956 - DNA, 15 bp, Homo sapiens
cacccctgttcacag

SEQ ID NO: 854957 - DNA, 15 bp, Homo sapiens
acccctgttcacagg

SEQ ID NO: 854958 - DNA, 15 bp, Homo sapiens
cccctgttcacaggg

SEQ ID NO: 854959 - DNA, 15 bp, Homo sapiens
ccctgttcacaggga

SEQ ID NO: 854960 - DNA, 15 bp, Homo sapiens
cctgttcacagggaa

SEQ ID NO: 854961 - DNA, 15 bp, Homo sapiens
ctgttcacagggaat

SEQ ID NO: 854962 - DNA, 15 bp, Homo sapiens
tgttcacagggaata

SEQ ID NO: 854963 - DNA, 15 bp, Homo sapiens
gttcacagggaataa

SEQ ID NO: 854964 - DNA, 15 bp, Homo sapiens
ttcacagggaataag

SEQ ID NO: 854965 - DNA, 15 bp, Homo sapiens
tcacagggaataaga

SEQ ID NO: 854966 - DNA, 15 bp, Homo sapiens
cacagggaataagag

SEQ ID NO: 854967 - DNA, 15 bp, Homo sapiens
acagggaataagagg

SEQ ID NO: 854968 - DNA, 15 bp, Homo sapiens
cagggaataagaggg

SEQ ID NO: 854969 - DNA, 15 bp, Homo sapiens
agggaataagagggc

SEQ ID NO: 854970 - DNA, 15 bp, Homo sapiens
gggaataagagggca

SEQ ID NO: 854971 - DNA, 15 bp, Homo sapiens
ggaataagagggcat

SEQ ID NO: 854972 - DNA, 15 bp, Homo sapiens
gaataagagggcatc

SEQ ID NO: 854973 - DNA, 15 bp, Homo sapiens
aataagagggcatcc

SEQ ID NO: 854974 - DNA, 15 bp, Homo sapiens
ataagagggcatcct

SEQ ID NO: 854975 - DNA, 15 bp, Homo sapiens
taagagggcatcctg

SEQ ID NO: 854976 - DNA, 15 bp, Homo sapiens
aagagggcatcctgg

SEQ ID NO: 854977 - DNA, 15 bp, Homo sapiens
agagggcatcctgga

SEQ ID NO: 854978 - DNA, 15 bp, Homo sapiens
gagggcatcctggaa

SEQ ID NO: 854979 - DNA, 15 bp, Homo sapiens
agggcatcctggaat

SEQ ID NO: 854980 - DNA, 15 bp, Homo sapiens
gggcatcctggaatc

SEQ ID NO: 854981 - DNA, 15 bp, Homo sapiens
ggcatcctggaatcc

SEQ ID NO: 854982 - DNA, 15 bp, Homo sapiens
gcatcctggaatcca

SEQ ID NO: 854983 - DNA, 15 bp, Homo sapiens
catcctggaatccac

SEQ ID NO: 854984 - DNA, 15 bp, Homo sapiens
atcctggaatccaca

SEQ ID NO: 854985 - DNA, 15 bp, Homo sapiens
tcctggaatccacat

SEQ ID NO: 854986 - DNA, 15 bp, Homo sapiens
cctggaatccacatg

SEQ ID NO: 854987 - DNA, 15 bp, Homo sapiens
ctggaatccacatga

SEQ ID NO: 854988 - DNA, 15 bp, Homo sapiens
tggaatccacatgat

SEQ ID NO: 854989 - DNA, 15 bp, Homo sapiens
ggaatccacatgatc

SEQ ID NO: 854990 - DNA, 15 bp, Homo sapiens
gaatccacatgatct

SEQ ID NO: 854991 - DNA, 15 bp, Homo sapiens
aatccacatgatctg

SEQ ID NO: 854992 - DNA, 15 bp, Homo sapiens
atccacatgatctgt

SEQ ID NO: 854993 - DNA, 15 bp, Homo sapiens
tccacatgatctgtg

SEQ ID NO: 854994 - DNA, 15 bp, Homo sapiens
ccacatgatctgtga

SEQ ID NO: 854995 - DNA, 15 bp, Homo sapiens
cacatgatctgtgag

SEQ ID NO: 854996 - DNA, 15 bp, Homo sapiens
acatgatctgtgagg

SEQ ID NO: 854997 - DNA, 15 bp, Homo sapiens
catgatctgtgaggt

SEQ ID NO: 854998 - DNA, 15 bp, Homo sapiens
atgatctgtgaggta

SEQ ID NO: 854999 - DNA, 15 bp, Homo sapiens
tgatctgtgaggtaa

SEQ ID NO: 855000 - DNA, 15 bp, Homo sapiens
gatctgtgaggtaat

SEQ ID NO: 855001 - DNA, 15 bp, Homo sapiens
atctgtgaggtaatt

SEQ ID NO: 855002 - DNA, 15 bp, Homo sapiens
tctgtgaggtaatta

SEQ ID NO: 855003 - DNA, 15 bp, Homo sapiens
ctgtgaggtaattag

SEQ ID NO: 855004 - DNA, 15 bp, Homo sapiens
tgtgaggtaattaga

SEQ ID NO: 855005 - DNA, 15 bp, Homo sapiens
gtgaggtaattagag

SEQ ID NO: 855006 - DNA, 15 bp, Homo sapiens
tgaggtaattagaga

SEQ ID NO: 855007 - DNA, 15 bp, Homo sapiens
gaggtaattagagat

SEQ ID NO: 855008 - DNA, 15 bp, Homo sapiens
aggtaattagagatg

SEQ ID NO: 855009 - DNA, 15 bp, Homo sapiens
ggtaattagagatgc

SEQ ID NO: 855010 - DNA, 15 bp, Homo sapiens
gtaattagagatgct

SEQ ID NO: 855011 - DNA, 15 bp, Homo sapiens
taattagagatgctt

SEQ ID NO: 855012 - DNA, 15 bp, Homo sapiens
aattagagatgcttt

SEQ ID NO: 855013 - DNA, 15 bp, Homo sapiens
attagagatgctttc

SEQ ID NO: 855014 - DNA, 15 bp, Homo sapiens
ttagagatgctttcg

SEQ ID NO: 855015 - DNA, 15 bp, Homo sapiens
tagagatgctttcga

SEQ ID NO: 855016 - DNA, 15 bp, Homo sapiens
agagatgctttcgat

SEQ ID NO: 855017 - DNA, 15 bp, Homo sapiens
gagatgctttcgatt

SEQ ID NO: 855018 - DNA, 15 bp, Homo sapiens
agatgctttcgattc

SEQ ID NO: 855019 - DNA, 15 bp, Homo sapiens
gatgctttcgattcc

SEQ ID NO: 855020 - DNA, 15 bp, Homo sapiens
atgctttcgattcct

SEQ ID NO: 855021 - DNA, 15 bp, Homo sapiens
tgctttcgattcctt

SEQ ID NO: 855022 - DNA, 15 bp, Homo sapiens
gctttcgattcctta

SEQ ID NO: 855023 - DNA, 15 bp, Homo sapiens
ctttcgattccttac

SEQ ID NO: 855024 - DNA, 15 bp, Homo sapiens
tttcgattccttaca

SEQ ID NO: 855025 - DNA, 15 bp, Homo sapiens
ttcgattccttacac

SEQ ID NO: 855026 - DNA, 15 bp, Homo sapiens
tcgattccttacaca

SEQ ID NO: 855027 - DNA, 15 bp, Homo sapiens
cgattccttacacaa

SEQ ID NO: 855028 - DNA, 15 bp, Homo sapiens
gattccttacacaat

SEQ ID NO: 855029 - DNA, 15 bp, Homo sapiens
attccttacacaatc

SEQ ID NO: 855030 - DNA, 15 bp, Homo sapiens
ttccttacacaatca

SEQ ID NO: 855031 - DNA, 15 bp, Homo sapiens
tccttacacaatcag

SEQ ID NO: 855032 - DNA, 15 bp, Homo sapiens
ccttacacaatcagc

SEQ ID NO: 855033 - DNA, 15 bp, Homo sapiens
cttacacaatcagcc

SEQ ID NO: 855034 - DNA, 15 bp, Homo sapiens
ttacacaatcagcca

SEQ ID NO: 855035 - DNA, 15 bp, Homo sapiens
tacacaatcagccat

SEQ ID NO: 855036 - DNA, 15 bp, Homo sapiens
acacaatcagccata

SEQ ID NO: 855037 - DNA, 15 bp, Homo sapiens
cacaatcagccatag

SEQ ID NO: 855038 - DNA, 15 bp, Homo sapiens
acaatcagccataga

SEQ ID NO: 855039 - DNA, 15 bp, Homo sapiens
caatcagccatagat

SEQ ID NO: 855040 - DNA, 15 bp, Homo sapiens
aatcagccatagatt

SEQ ID NO: 855041 - DNA, 15 bp, Homo sapiens
atcagccatagattt

SEQ ID NO: 855042 - DNA, 15 bp, Homo sapiens
tcagccatagattta

SEQ ID NO: 855043 - DNA, 15 bp, Homo sapiens
cagccatagatttaa

SEQ ID NO: 855044 - DNA, 15 bp, Homo sapiens
agccatagatttaag

SEQ ID NO: 855045 - DNA, 15 bp, Homo sapiens
gccatagatttaagg

SEQ ID NO: 855046 - DNA, 15 bp, Homo sapiens
ccatagatttaagga

SEQ ID NO: 855047 - DNA, 15 bp, Homo sapiens
catagatttaaggaa

SEQ ID NO: 855048 - DNA, 15 bp, Homo sapiens
atagatttaaggaac

SEQ ID NO: 855049 - DNA, 15 bp, Homo sapiens
tagatttaaggaaca

SEQ ID NO: 855050 - DNA, 15 bp, Homo sapiens
agatttaaggaacac

SEQ ID NO: 855051 - DNA, 15 bp, Homo sapiens
gatttaaggaacaca

SEQ ID NO: 855052 - DNA, 15 bp, Homo sapiens
atttaaggaacacag

SEQ ID NO: 855053 - DNA, 15 bp, Homo sapiens
tttaaggaacacagg

SEQ ID NO: 855054 - DNA, 15 bp, Homo sapiens
ttaaggaacacagga

SEQ ID NO: 855055 - DNA, 15 bp, Homo sapiens
taaggaacacaggat

SEQ ID NO: 855056 - DNA, 15 bp, Homo sapiens
aaggaacacaggata

SEQ ID NO: 855057 - DNA, 15 bp, Homo sapiens
aggaacacaggatac

SEQ ID NO: 855058 - DNA, 15 bp, Homo sapiens
ggaacacaggatact

SEQ ID NO: 855059 - DNA, 15 bp, Homo sapiens
gaacacaggatactt

SEQ ID NO: 855060 - DNA, 15 bp, Homo sapiens
aacacaggatacttc

SEQ ID NO: 855061 - DNA, 15 bp, Homo sapiens
acacaggatacttca

SEQ ID NO: 855062 - DNA, 15 bp, Homo sapiens
cacaggatacttcac

SEQ ID NO: 855063 - DNA, 15 bp, Homo sapiens
acaggatacttcact

SEQ ID NO: 855064 - DNA, 15 bp, Homo sapiens
caggatacttcactg

SEQ ID NO: 855065 - DNA, 15 bp, Homo sapiens
aggatacttcactgt

SEQ ID NO: 855066 - DNA, 15 bp, Homo sapiens
ggatacttcactgtg

SEQ ID NO: 855067 - DNA, 15 bp, Homo sapiens
gatacttcactgtgc

SEQ ID NO: 855068 - DNA, 15 bp, Homo sapiens
atacttcactgtgca

SEQ ID NO: 855069 - DNA, 15 bp, Homo sapiens
tacttcactgtgcag

SEQ ID NO: 855070 - DNA, 15 bp, Homo sapiens
acttcactgtgcaga

SEQ ID NO: 855071 - DNA, 15 bp, Homo sapiens
cttcactgtgcagac

SEQ ID NO: 855072 - DNA, 15 bp, Homo sapiens
ttcactgtgcagaca

SEQ ID NO: 855073 - DNA, 15 bp, Homo sapiens
tcactgtgcagacaa

SEQ ID NO: 855074 - DNA, 15 bp, Homo sapiens
cactgtgcagacaaa

SEQ ID NO: 855075 - DNA, 15 bp, Homo sapiens
actgtgcagacaaaa

SEQ ID NO: 855076 - DNA, 15 bp, Homo sapiens
ctgtgcagacaaaag

SEQ ID NO: 855077 - DNA, 15 bp, Homo sapiens
tgtgcagacaaaagt

SEQ ID NO: 855078 - DNA, 15 bp, Homo sapiens
gtgcagacaaaagtc

SEQ ID NO: 855079 - DNA, 15 bp, Homo sapiens
tgcagacaaaagtca

SEQ ID NO: 855080 - DNA, 15 bp, Homo sapiens
gcagacaaaagtcag

SEQ ID NO: 855081 - DNA, 15 bp, Homo sapiens
cagacaaaagtcagt

SEQ ID NO: 855082 - DNA, 15 bp, Homo sapiens
agacaaaagtcagtc

SEQ ID NO: 855083 - DNA, 15 bp, Homo sapiens
gacaaaagtcagtct

SEQ ID NO: 855084 - DNA, 15 bp, Homo sapiens
acaaaagtcagtcta

SEQ ID NO: 855085 - DNA, 15 bp, Homo sapiens
caaaagtcagtctaa

SEQ ID NO: 855086 - DNA, 15 bp, Homo sapiens
aaaagtcagtctaaa

SEQ ID NO: 855087 - DNA, 15 bp, Homo sapiens
aaagtcagtctaaat

SEQ ID NO: 855088 - DNA, 15 bp, Homo sapiens
aagtcagtctaaatt

SEQ ID NO: 855089 - DNA, 15 bp, Homo sapiens
agtcagtctaaatta

SEQ ID NO: 855090 - DNA, 15 bp, Homo sapiens
gtcagtctaaattag

SEQ ID NO: 855091 - DNA, 15 bp, Homo sapiens
tcagtctaaattagc

SEQ ID NO: 855092 - DNA, 15 bp, Homo sapiens
cagtctaaattagcc

SEQ ID NO: 855093 - DNA, 15 bp, Homo sapiens
agtctaaattagccc

SEQ ID NO: 855094 - DNA, 15 bp, Homo sapiens
gtctaaattagccca

SEQ ID NO: 855095 - DNA, 15 bp, Homo sapiens
tctaaattagcccat

SEQ ID NO: 855096 - DNA, 15 bp, Homo sapiens
ctaaattagcccatc

SEQ ID NO: 855097 - DNA, 15 bp, Homo sapiens
taaattagcccatca

SEQ ID NO: 855098 - DNA, 15 bp, Homo sapiens
aaattagcccatcac

SEQ ID NO: 855099 - DNA, 15 bp, Homo sapiens
aattagcccatcacc

SEQ ID NO: 855100 - DNA, 15 bp, Homo sapiens
attagcccatcacca

SEQ ID NO: 855101 - DNA, 15 bp, Homo sapiens
ttagcccatcaccag

SEQ ID NO: 855102 - DNA, 15 bp, Homo sapiens
tagcccatcaccaga

SEQ ID NO: 855103 - DNA, 15 bp, Homo sapiens
agcccatcaccagat

SEQ ID NO: 855104 - DNA, 15 bp, Homo sapiens
gcccatcaccagata

SEQ ID NO: 855105 - DNA, 15 bp, Homo sapiens
cccatcaccagatat

SEQ ID NO: 855106 - DNA, 15 bp, Homo sapiens
ccatcaccagatatt

SEQ ID NO: 855107 - DNA, 15 bp, Homo sapiens
catcaccagatattg

SEQ ID NO: 855108 - DNA, 15 bp, Homo sapiens
atcaccagatattgt

SEQ ID NO: 855109 - DNA, 15 bp, Homo sapiens
tcaccagatattgtg

SEQ ID NO: 855110 - DNA, 15 bp, Homo sapiens
caccagatattgtgc

SEQ ID NO: 855111 - DNA, 15 bp, Homo sapiens
accagatattgtgca

SEQ ID NO: 855112 - DNA, 15 bp, Homo sapiens
ccagatattgtgcag

SEQ ID NO: 855113 - DNA, 15 bp, Homo sapiens
cagatattgtgcagg

SEQ ID NO: 855114 - DNA, 15 bp, Homo sapiens
agatattgtgcaggg

SEQ ID NO: 855115 - DNA, 15 bp, Homo sapiens
gatattgtgcaggga

SEQ ID NO: 855116 - DNA, 15 bp, Homo sapiens
atattgtgcagggat

SEQ ID NO: 855117 - DNA, 15 bp, Homo sapiens
tattgtgcagggata

SEQ ID NO: 855118 - DNA, 15 bp, Homo sapiens
attgtgcagggataa

SEQ ID NO: 855119 - DNA, 15 bp, Homo sapiens
ttgtgcagggataaa

SEQ ID NO: 855120 - DNA, 15 bp, Homo sapiens
tgtgcagggataaaa

SEQ ID NO: 855121 - DNA, 15 bp, Homo sapiens
gtgcagggataaaat

SEQ ID NO: 855122 - DNA, 15 bp, Homo sapiens
tgcagggataaaatg

SEQ ID NO: 855123 - DNA, 15 bp, Homo sapiens
gcagggataaaatgc

SEQ ID NO: 855124 - DNA, 15 bp, Homo sapiens
cagggataaaatgct

SEQ ID NO: 855125 - DNA, 15 bp, Homo sapiens
agggataaaatgctt

SEQ ID NO: 855126 - DNA, 15 bp, Homo sapiens
gggataaaatgcttt

SEQ ID NO: 855127 - DNA, 15 bp, Homo sapiens
ggataaaatgctttg

SEQ ID NO: 855128 - DNA, 15 bp, Homo sapiens
gataaaatgctttgg

SEQ ID NO: 855129 - DNA, 15 bp, Homo sapiens
ataaaatgctttgga

SEQ ID NO: 855130 - DNA, 15 bp, Homo sapiens
taaaatgctttggat

SEQ ID NO: 855131 - DNA, 15 bp, Homo sapiens
aaaatgctttggatt

SEQ ID NO: 855132 - DNA, 15 bp, Homo sapiens
aaatgctttggattt

SEQ ID NO: 855133 - DNA, 15 bp, Homo sapiens
aatgctttggatttc

SEQ ID NO: 855134 - DNA, 15 bp, Homo sapiens
atgctttggatttcc

SEQ ID NO: 855135 - DNA, 15 bp, Homo sapiens
tgctttggatttcct

SEQ ID NO: 855136 - DNA, 15 bp, Homo sapiens
gctttggatttcctt

SEQ ID NO: 855137 - DNA, 15 bp, Homo sapiens
ctttggatttccttg

SEQ ID NO: 855138 - DNA, 15 bp, Homo sapiens
tttggatttccttgc

SEQ ID NO: 855139 - DNA, 15 bp, Homo sapiens
ttggatttccttgca

SEQ ID NO: 855140 - DNA, 15 bp, Homo sapiens
tggatttccttgcag

SEQ ID NO: 855141 - DNA, 15 bp, Homo sapiens
ggatttccttgcagt

SEQ ID NO: 855142 - DNA, 15 bp, Homo sapiens
gatttccttgcagtc

SEQ ID NO: 855143 - DNA, 15 bp, Homo sapiens
atttccttgcagtca

SEQ ID NO: 855144 - DNA, 15 bp, Homo sapiens
tttccttgcagtcag

SEQ ID NO: 855145 - DNA, 15 bp, Homo sapiens
ttccttgcagtcagt

SEQ ID NO: 855146 - DNA, 15 bp, Homo sapiens
tccttgcagtcagtg

SEQ ID NO: 855147 - DNA, 15 bp, Homo sapiens
ccttgcagtcagtgg

SEQ ID NO: 855148 - DNA, 15 bp, Homo sapiens
cttgcagtcagtgga

SEQ ID NO: 855149 - DNA, 15 bp, Homo sapiens
ttgcagtcagtggaa

SEQ ID NO: 855150 - DNA, 15 bp, Homo sapiens
tgcagtcagtggaaa

SEQ ID NO: 855151 - DNA, 15 bp, Homo sapiens
gcagtcagtggaaaa

SEQ ID NO: 855152 - DNA, 15 bp, Homo sapiens
cagtcagtggaaaag

SEQ ID NO: 855153 - DNA, 15 bp, Homo sapiens
agtcagtggaaaagt

SEQ ID NO: 855154 - DNA, 15 bp, Homo sapiens
gtcagtggaaaagtc

SEQ ID NO: 855155 - DNA, 15 bp, Homo sapiens
tcagtggaaaagtct

SEQ ID NO: 855156 - DNA, 15 bp, Homo sapiens
cagtggaaaagtctt

SEQ ID NO: 855157 - DNA, 15 bp, Homo sapiens
agtggaaaagtcttt

SEQ ID NO: 855158 - DNA, 15 bp, Homo sapiens
gtggaaaagtctttc

SEQ ID NO: 855159 - DNA, 15 bp, Homo sapiens
tggaaaagtctttca

SEQ ID NO: 855160 - DNA, 15 bp, Homo sapiens
ggaaaagtctttcaa

SEQ ID NO: 855161 - DNA, 15 bp, Homo sapiens
gaaaagtctttcaat

SEQ ID NO: 855162 - DNA, 15 bp, Homo sapiens
aaaagtctttcaatg

SEQ ID NO: 855163 - DNA, 15 bp, Homo sapiens
aaagtctttcaatgc

SEQ ID NO: 855164 - DNA, 15 bp, Homo sapiens
aagtctttcaatgcc

SEQ ID NO: 855165 - DNA, 15 bp, Homo sapiens
agtctttcaatgcca

SEQ ID NO: 855166 - DNA, 15 bp, Homo sapiens
gtctttcaatgccaa

SEQ ID NO: 855167 - DNA, 15 bp, Homo sapiens
tctttcaatgccaat

SEQ ID NO: 855168 - DNA, 15 bp, Homo sapiens
ctttcaatgccaata

SEQ ID NO: 855169 - DNA, 15 bp, Homo sapiens
tttcaatgccaatag

SEQ ID NO: 855170 - DNA, 15 bp, Homo sapiens
ttcaatgccaatagg

SEQ ID NO: 855171 - DNA, 15 bp, Homo sapiens
tcaatgccaataggg

SEQ ID NO: 855172 - DNA, 15 bp, Homo sapiens
caatgccaatagggc

SEQ ID NO: 855173 - DNA, 15 bp, Homo sapiens
aatgccaatagggca

SEQ ID NO: 855174 - DNA, 15 bp, Homo sapiens
atgccaatagggcac

SEQ ID NO: 855175 - DNA, 15 bp, Homo sapiens
tgccaatagggcacc

SEQ ID NO: 855176 - DNA, 15 bp, Homo sapiens
gccaatagggcacct

SEQ ID NO: 855177 - DNA, 15 bp, Homo sapiens
ccaatagggcacctc

SEQ ID NO: 855178 - DNA, 15 bp, Homo sapiens
caatagggcacctcc

SEQ ID NO: 855179 - DNA, 15 bp, Homo sapiens
aatagggcacctcct

SEQ ID NO: 855180 - DNA, 15 bp, Homo sapiens
atagggcacctcctg

SEQ ID NO: 855181 - DNA, 15 bp, Homo sapiens
tagggcacctcctgg

SEQ ID NO: 855182 - DNA, 15 bp, Homo sapiens
agggcacctcctggg

SEQ ID NO: 855183 - DNA, 15 bp, Homo sapiens
gggcacctcctgggt

SEQ ID NO: 855184 - DNA, 15 bp, Homo sapiens
ggcacctcctgggtc

SEQ ID NO: 855185 - DNA, 15 bp, Homo sapiens
gcacctcctgggtca

SEQ ID NO: 855186 - DNA, 15 bp, Homo sapiens
cacctcctgggtcat

SEQ ID NO: 855187 - DNA, 15 bp, Homo sapiens
acctcctgggtcatt

SEQ ID NO: 855188 - DNA, 15 bp, Homo sapiens
cctcctgggtcattt

SEQ ID NO: 855189 - DNA, 15 bp, Homo sapiens
ctcctgggtcattta

SEQ ID NO: 855190 - DNA, 15 bp, Homo sapiens
tcctgggtcatttat

SEQ ID NO: 855191 - DNA, 15 bp, Homo sapiens
cctgggtcatttatt

SEQ ID NO: 855192 - DNA, 15 bp, Homo sapiens
ctgggtcatttatta

SEQ ID NO: 855193 - DNA, 15 bp, Homo sapiens
tgggtcatttattag

SEQ ID NO: 855194 - DNA, 15 bp, Homo sapiens
gggtcatttattagc

SEQ ID NO: 855195 - DNA, 15 bp, Homo sapiens
ggtcatttattagca

SEQ ID NO: 855196 - DNA, 15 bp, Homo sapiens
gtcatttattagcag

SEQ ID NO: 855197 - DNA, 15 bp, Homo sapiens
tcatttattagcagc

SEQ ID NO: 855198 - DNA, 15 bp, Homo sapiens
catttattagcagca

SEQ ID NO: 855199 - DNA, 15 bp, Homo sapiens
atttattagcagcag

SEQ ID NO: 855200 - DNA, 15 bp, Homo sapiens
tttattagcagcagg

SEQ ID NO: 855201 - DNA, 15 bp, Homo sapiens
ttattagcagcaggg

SEQ ID NO: 855202 - DNA, 15 bp, Homo sapiens
attagcagcagggac

SEQ ID NO: 855203 - DNA, 15 bp, Homo sapiens
ttagcagcagggaca

SEQ ID NO: 855204 - DNA, 15 bp, Homo sapiens
tagcagcagggacaa

SEQ ID NO: 855205 - DNA, 15 bp, Homo sapiens
agcagcagggacaaa

SEQ ID NO: 855206 - DNA, 15 bp, Homo sapiens
gcagcagggacaaag

SEQ ID NO: 855207 - DNA, 15 bp, Homo sapiens
cagcagggacaaagt

SEQ ID NO: 855208 - DNA, 15 bp, Homo sapiens
agcagggacaaagtg

SEQ ID NO: 855209 - DNA, 15 bp, Homo sapiens
gcagggacaaagtgg

SEQ ID NO: 855210 - DNA, 15 bp, Homo sapiens
cagggacaaagtgga

SEQ ID NO: 855211 - DNA, 15 bp, Homo sapiens
agggacaaagtggag

SEQ ID NO: 855212 - DNA, 15 bp, Homo sapiens
gggacaaagtggagg

SEQ ID NO: 855213 - DNA, 15 bp, Homo sapiens
ggacaaagtggaggg

SEQ ID NO: 855214 - DNA, 15 bp, Homo sapiens
gacaaagtggagggt

SEQ ID NO: 855215 - DNA, 15 bp, Homo sapiens
acaaagtggagggtg

SEQ ID NO: 855216 - DNA, 15 bp, Homo sapiens
caaagtggagggtga

SEQ ID NO: 855217 - DNA, 15 bp, Homo sapiens
aaagtggagggtgat

SEQ ID NO: 855218 - DNA, 15 bp, Homo sapiens
aagtggagggtgatg

SEQ ID NO: 855219 - DNA, 15 bp, Homo sapiens
agtggagggtgatgg

SEQ ID NO: 855220 - DNA, 15 bp, Homo sapiens
gtggagggtgatggt

SEQ ID NO: 855221 - DNA, 15 bp, Homo sapiens
tggagggtgatggtg

SEQ ID NO: 855222 - DNA, 15 bp, Homo sapiens
ggagggtgatggtgc

SEQ ID NO: 855223 - DNA, 15 bp, Homo sapiens
gagggtgatggtgct

SEQ ID NO: 855224 - DNA, 15 bp, Homo sapiens
agggtgatggtgctg

SEQ ID NO: 855225 - DNA, 15 bp, Homo sapiens
gggtgatggtgctgt

SEQ ID NO: 855226 - DNA, 15 bp, Homo sapiens
ggtgatggtgctgtg

SEQ ID NO: 855227 - DNA, 15 bp, Homo sapiens
gtgatggtgctgtga

SEQ ID NO: 855228 - DNA, 15 bp, Homo sapiens
tgatggtgctgtgag

SEQ ID NO: 855229 - DNA, 15 bp, Homo sapiens
gatggtgctgtgagg

SEQ ID NO: 855230 - DNA, 15 bp, Homo sapiens
atggtgctgtgagga

SEQ ID NO: 855231 - DNA, 15 bp, Homo sapiens
tggtgctgtgaggat

SEQ ID NO: 855232 - DNA, 15 bp, Homo sapiens
ggtgctgtgaggatt

SEQ ID NO: 855233 - DNA, 15 bp, Homo sapiens
gtgctgtgaggattt

SEQ ID NO: 855234 - DNA, 15 bp, Homo sapiens
tgctgtgaggatttt

SEQ ID NO: 855235 - DNA, 15 bp, Homo sapiens
gctgtgaggattttt

SEQ ID NO: 855236 - DNA, 15 bp, Homo sapiens
ctgtgaggatttttt

SEQ ID NO: 855237 - DNA, 15 bp, Homo sapiens
tgtgaggattttttt

SEQ ID NO: 855238 - DNA, 15 bp, Homo sapiens
gtgaggattttttta

SEQ ID NO: 855239 - DNA, 15 bp, Homo sapiens
tgaggatttttttac

SEQ ID NO: 855240 - DNA, 15 bp, Homo sapiens
gaggatttttttacc

SEQ ID NO: 855241 - DNA, 15 bp, Homo sapiens
aggatttttttacct

SEQ ID NO: 855242 - DNA, 15 bp, Homo sapiens
ggatttttttacctc

SEQ ID NO: 855243 - DNA, 15 bp, Homo sapiens
gatttttttacctct

SEQ ID NO: 855244 - DNA, 15 bp, Homo sapiens
atttttttacctctc

SEQ ID NO: 855245 - DNA, 15 bp, Homo sapiens
tttttttacctctca

SEQ ID NO: 855246 - DNA, 15 bp, Homo sapiens
ttttttacctctcag

SEQ ID NO: 855247 - DNA, 15 bp, Homo sapiens
tttttacctctcagt

SEQ ID NO: 855248 - DNA, 15 bp, Homo sapiens
ttttacctctcagtt

SEQ ID NO: 855249 - DNA, 15 bp, Homo sapiens
tttacctctcagttt

SEQ ID NO: 855250 - DNA, 15 bp, Homo sapiens
ttacctctcagtttt

SEQ ID NO: 855251 - DNA, 15 bp, Homo sapiens
tacctctcagtttta

SEQ ID NO: 855252 - DNA, 15 bp, Homo sapiens
acctctcagttttat

SEQ ID NO: 855253 - DNA, 15 bp, Homo sapiens
cctctcagttttata

SEQ ID NO: 855254 - DNA, 15 bp, Homo sapiens
ctctcagttttataa

SEQ ID NO: 855255 - DNA, 15 bp, Homo sapiens
tctcagttttataat

SEQ ID NO: 855256 - DNA, 15 bp, Homo sapiens
ctcagttttataatc

SEQ ID NO: 855257 - DNA, 15 bp, Homo sapiens
tcagttttataatca

SEQ ID NO: 855258 - DNA, 15 bp, Homo sapiens
cagttttataatcac

SEQ ID NO: 855259 - DNA, 15 bp, Homo sapiens
agttttataatcacc

SEQ ID NO: 855260 - DNA, 15 bp, Homo sapiens
gttttataatcacct

SEQ ID NO: 855261 - DNA, 15 bp, Homo sapiens
ttttataatcaccta

SEQ ID NO: 855262 - DNA, 15 bp, Homo sapiens
tttataatcacctag

SEQ ID NO: 855263 - DNA, 15 bp, Homo sapiens
ttataatcacctagc

SEQ ID NO: 855264 - DNA, 15 bp, Homo sapiens
tataatcacctagct

SEQ ID NO: 855265 - DNA, 15 bp, Homo sapiens
ataatcacctagctc

SEQ ID NO: 855266 - DNA, 15 bp, Homo sapiens
taatcacctagctca

SEQ ID NO: 855267 - DNA, 15 bp, Homo sapiens
aatcacctagctcac

SEQ ID NO: 855268 - DNA, 15 bp, Homo sapiens
atcacctagctcact

SEQ ID NO: 855269 - DNA, 15 bp, Homo sapiens
tcacctagctcactg

SEQ ID NO: 855270 - DNA, 15 bp, Homo sapiens
cacctagctcactga

SEQ ID NO: 855271 - DNA, 15 bp, Homo sapiens
acctagctcactgag

SEQ ID NO: 855272 - DNA, 15 bp, Homo sapiens
cctagctcactgaga

SEQ ID NO: 855273 - DNA, 15 bp, Homo sapiens
ctagctcactgagag

SEQ ID NO: 855274 - DNA, 15 bp, Homo sapiens
tagctcactgagagt

SEQ ID NO: 855275 - DNA, 15 bp, Homo sapiens
agctcactgagagta

SEQ ID NO: 855276 - DNA, 15 bp, Homo sapiens
gctcactgagagtag

SEQ ID NO: 855277 - DNA, 15 bp, Homo sapiens
ctcactgagagtagc

SEQ ID NO: 855278 - DNA, 15 bp, Homo sapiens
tcactgagagtagca

SEQ ID NO: 855279 - DNA, 15 bp, Homo sapiens
cactgagagtagcaa

SEQ ID NO: 855280 - DNA, 15 bp, Homo sapiens
actgagagtagcaac

SEQ ID NO: 855281 - DNA, 15 bp, Homo sapiens
ctgagagtagcaact

SEQ ID NO: 855282 - DNA, 15 bp, Homo sapiens
tgagagtagcaacta

SEQ ID NO: 855283 - DNA, 15 bp, Homo sapiens
gagagtagcaactaa

SEQ ID NO: 855284 - DNA, 15 bp, Homo sapiens
agagtagcaactaag

SEQ ID NO: 855285 - DNA, 15 bp, Homo sapiens
gagtagcaactaaga

SEQ ID NO: 855286 - DNA, 15 bp, Homo sapiens
agtagcaactaagaa

SEQ ID NO: 855287 - DNA, 15 bp, Homo sapiens
gtagcaactaagaat

SEQ ID NO: 855288 - DNA, 15 bp, Homo sapiens
tagcaactaagaatt

SEQ ID NO: 855289 - DNA, 15 bp, Homo sapiens
agcaactaagaattt

SEQ ID NO: 855290 - DNA, 15 bp, Homo sapiens
gcaactaagaattta

SEQ ID NO: 855291 - DNA, 15 bp, Homo sapiens
caactaagaatttaa

SEQ ID NO: 855292 - DNA, 15 bp, Homo sapiens
aactaagaatttaag

SEQ ID NO: 855293 - DNA, 15 bp, Homo sapiens
actaagaatttaaga

SEQ ID NO: 855294 - DNA, 15 bp, Homo sapiens
ctaagaatttaagac

SEQ ID NO: 855295 - DNA, 15 bp, Homo sapiens
taagaatttaagacc

SEQ ID NO: 855296 - DNA, 15 bp, Homo sapiens
aagaatttaagacct

SEQ ID NO: 855297 - DNA, 15 bp, Homo sapiens
agaatttaagacctt

SEQ ID NO: 855298 - DNA, 15 bp, Homo sapiens
gaatttaagaccttc

SEQ ID NO: 855299 - DNA, 15 bp, Homo sapiens
aatttaagaccttct

SEQ ID NO: 855300 - DNA, 15 bp, Homo sapiens
atttaagaccttcta

SEQ ID NO: 855301 - DNA, 15 bp, Homo sapiens
tttaagaccttctat

SEQ ID NO: 855302 - DNA, 15 bp, Homo sapiens
ttaagaccttctatg

SEQ ID NO: 855303 - DNA, 15 bp, Homo sapiens
taagaccttctatgt

SEQ ID NO: 855304 - DNA, 15 bp, Homo sapiens
aagaccttctatgtg

SEQ ID NO: 855305 - DNA, 15 bp, Homo sapiens
agaccttctatgtgt

SEQ ID NO: 855306 - DNA, 15 bp, Homo sapiens
gaccttctatgtgtc

SEQ ID NO: 855307 - DNA, 15 bp, Homo sapiens
accttctatgtgtca

SEQ ID NO: 855308 - DNA, 15 bp, Homo sapiens
ccttctatgtgtcag

SEQ ID NO: 855309 - DNA, 15 bp, Homo sapiens
cttctatgtgtcagt

SEQ ID NO: 855310 - DNA, 15 bp, Homo sapiens
ttctatgtgtcagtc

SEQ ID NO: 855311 - DNA, 15 bp, Homo sapiens
tctatgtgtcagtca

SEQ ID NO: 855312 - DNA, 15 bp, Homo sapiens
ctatgtgtcagtcat

SEQ ID NO: 855313 - DNA, 15 bp, Homo sapiens
tatgtgtcagtcatg

SEQ ID NO: 855314 - DNA, 15 bp, Homo sapiens
atgtgtcagtcatgt

SEQ ID NO: 855315 - DNA, 15 bp, Homo sapiens
tgtgtcagtcatgta

SEQ ID NO: 855316 - DNA, 15 bp, Homo sapiens
gtgtcagtcatgtag

SEQ ID NO: 855317 - DNA, 15 bp, Homo sapiens
tgtcagtcatgtagc

SEQ ID NO: 855318 - DNA, 15 bp, Homo sapiens
gtcagtcatgtagca

SEQ ID NO: 855319 - DNA, 15 bp, Homo sapiens
tcagtcatgtagcac

SEQ ID NO: 855320 - DNA, 15 bp, Homo sapiens
cagtcatgtagcaca

SEQ ID NO: 855321 - DNA, 15 bp, Homo sapiens
agtcatgtagcacat

SEQ ID NO: 855322 - DNA, 15 bp, Homo sapiens
gtcatgtagcacata

SEQ ID NO: 855323 - DNA, 15 bp, Homo sapiens
tcatgtagcacatag

SEQ ID NO: 855324 - DNA, 15 bp, Homo sapiens
catgtagcacatagt

SEQ ID NO: 855325 - DNA, 15 bp, Homo sapiens
atgtagcacatagta

SEQ ID NO: 855326 - DNA, 15 bp, Homo sapiens
tgtagcacatagtac

SEQ ID NO: 855327 - DNA, 15 bp, Homo sapiens
gtagcacatagtaca

SEQ ID NO: 855328 - DNA, 15 bp, Homo sapiens
tagcacatagtacat

SEQ ID NO: 855329 - DNA, 15 bp, Homo sapiens
agcacatagtacata

SEQ ID NO: 855330 - DNA, 15 bp, Homo sapiens
gcacatagtacatac

SEQ ID NO: 855331 - DNA, 15 bp, Homo sapiens
cacatagtacatact

SEQ ID NO: 855332 - DNA, 15 bp, Homo sapiens
acatagtacatactt

SEQ ID NO: 855333 - DNA, 15 bp, Homo sapiens
catagtacatacttt

SEQ ID NO: 855334 - DNA, 15 bp, Homo sapiens
atagtacatacttta

SEQ ID NO: 855335 - DNA, 15 bp, Homo sapiens
tagtacatactttaa

SEQ ID NO: 855336 - DNA, 15 bp, Homo sapiens
agtacatactttaac

SEQ ID NO: 855337 - DNA, 15 bp, Homo sapiens
gtacatactttaact

SEQ ID NO: 855338 - DNA, 15 bp, Homo sapiens
tacatactttaactc

SEQ ID NO: 855339 - DNA, 15 bp, Homo sapiens
acatactttaactct

SEQ ID NO: 855340 - DNA, 15 bp, Homo sapiens
catactttaactctc

SEQ ID NO: 855341 - DNA, 15 bp, Homo sapiens
atactttaactctct

SEQ ID NO: 855342 - DNA, 15 bp, Homo sapiens
tactttaactctctt

SEQ ID NO: 855343 - DNA, 15 bp, Homo sapiens
actttaactctctta

SEQ ID NO: 855344 - DNA, 15 bp, Homo sapiens
ctttaactctcttag

SEQ ID NO: 855345 - DNA, 15 bp, Homo sapiens
tttaactctcttaga

SEQ ID NO: 855346 - DNA, 15 bp, Homo sapiens
ttaactctcttagag

SEQ ID NO: 855347 - DNA, 15 bp, Homo sapiens
taactctcttagagg

SEQ ID NO: 855348 - DNA, 15 bp, Homo sapiens
aactctcttagaggc

SEQ ID NO: 855349 - DNA, 15 bp, Homo sapiens
actctcttagaggca

SEQ ID NO: 855350 - DNA, 15 bp, Homo sapiens
ctctcttagaggcat

SEQ ID NO: 855351 - DNA, 15 bp, Homo sapiens
tctcttagaggcatt

SEQ ID NO: 855352 - DNA, 15 bp, Homo sapiens
ctcttagaggcattg

SEQ ID NO: 855353 - DNA, 15 bp, Homo sapiens
tcttagaggcattgt

SEQ ID NO: 855354 - DNA, 15 bp, Homo sapiens
cttagaggcattgta

SEQ ID NO: 855355 - DNA, 15 bp, Homo sapiens
ttagaggcattgtaa

SEQ ID NO: 855356 - DNA, 15 bp, Homo sapiens
tagaggcattgtaag

SEQ ID NO: 855357 - DNA, 15 bp, Homo sapiens
agaggcattgtaagc

SEQ ID NO: 855358 - DNA, 15 bp, Homo sapiens
gaggcattgtaagct

SEQ ID NO: 855359 - DNA, 15 bp, Homo sapiens
aggcattgtaagcta

SEQ ID NO: 855360 - DNA, 15 bp, Homo sapiens
ggcattgtaagctag

SEQ ID NO: 855361 - DNA, 15 bp, Homo sapiens
gcattgtaagctagc

SEQ ID NO: 855362 - DNA, 15 bp, Homo sapiens
cattgtaagctagcg

SEQ ID NO: 855363 - DNA, 15 bp, Homo sapiens
attgtaagctagcga

SEQ ID NO: 855364 - DNA, 15 bp, Homo sapiens
ttgtaagctagcgat

SEQ ID NO: 855365 - DNA, 15 bp, Homo sapiens
tgtaagctagcgatt

SEQ ID NO: 855366 - DNA, 15 bp, Homo sapiens
gtaagctagcgatta

SEQ ID NO: 855367 - DNA, 15 bp, Homo sapiens
taagctagcgattat

SEQ ID NO: 855368 - DNA, 15 bp, Homo sapiens
aagctagcgattatt

SEQ ID NO: 855369 - DNA, 15 bp, Homo sapiens
agctagcgattattc

SEQ ID NO: 855370 - DNA, 15 bp, Homo sapiens
gctagcgattattca

SEQ ID NO: 855371 - DNA, 15 bp, Homo sapiens
ctagcgattattcac

SEQ ID NO: 855372 - DNA, 15 bp, Homo sapiens
tagcgattattcacc

SEQ ID NO: 855373 - DNA, 15 bp, Homo sapiens
agcgattattcaccc

SEQ ID NO: 855374 - DNA, 15 bp, Homo sapiens
gcgattattcaccca

SEQ ID NO: 855375 - DNA, 15 bp, Homo sapiens
cgattattcacccat

SEQ ID NO: 855376 - DNA, 15 bp, Homo sapiens
gattattcacccatt

SEQ ID NO: 855377 - DNA, 15 bp, Homo sapiens
attattcacccattt

SEQ ID NO: 855378 - DNA, 15 bp, Homo sapiens
ttattcacccatttt

SEQ ID NO: 855379 - DNA, 15 bp, Homo sapiens
tattcacccatttta

SEQ ID NO: 855380 - DNA, 15 bp, Homo sapiens
attcacccattttac

SEQ ID NO: 855381 - DNA, 15 bp, Homo sapiens
ttcacccattttaca

SEQ ID NO: 855382 - DNA, 15 bp, Homo sapiens
tcacccattttacag

SEQ ID NO: 855383 - DNA, 15 bp, Homo sapiens
cacccattttacaga

SEQ ID NO: 855384 - DNA, 15 bp, Homo sapiens
acccattttacagat

SEQ ID NO: 855385 - DNA, 15 bp, Homo sapiens
attttacagatgaga

SEQ ID NO: 855386 - DNA, 15 bp, Homo sapiens
ttttacagatgagaa

SEQ ID NO: 855387 - DNA, 15 bp, Homo sapiens
tttacagatgagaag

SEQ ID NO: 855388 - DNA, 15 bp, Homo sapiens
ttacagatgagaagt

SEQ ID NO: 855389 - DNA, 15 bp, Homo sapiens
tacagatgagaagtg

SEQ ID NO: 855390 - DNA, 15 bp, Homo sapiens
acagatgagaagtgt

SEQ ID NO: 855391 - DNA, 15 bp, Homo sapiens
cagatgagaagtgtg

SEQ ID NO: 855392 - DNA, 15 bp, Homo sapiens
agatgagaagtgtga

SEQ ID NO: 855393 - DNA, 15 bp, Homo sapiens
gatgagaagtgtgag

SEQ ID NO: 855394 - DNA, 15 bp, Homo sapiens
atgagaagtgtgagg

SEQ ID NO: 855395 - DNA, 15 bp, Homo sapiens
tgagaagtgtgaggc

SEQ ID NO: 855396 - DNA, 15 bp, Homo sapiens
gagaagtgtgaggct

SEQ ID NO: 855397 - DNA, 15 bp, Homo sapiens
agaagtgtgaggctt

SEQ ID NO: 855398 - DNA, 15 bp, Homo sapiens
gaagtgtgaggctta

SEQ ID NO: 855399 - DNA, 15 bp, Homo sapiens
aagtgtgaggcttac

SEQ ID NO: 855400 - DNA, 15 bp, Homo sapiens
agtgtgaggcttacc

SEQ ID NO: 855401 - DNA, 15 bp, Homo sapiens
gtgtgaggcttacct

SEQ ID NO: 855402 - DNA, 15 bp, Homo sapiens
gtgaggcttacctgc

SEQ ID NO: 855403 - DNA, 15 bp, Homo sapiens
tgaggcttacctgca

SEQ ID NO: 855404 - DNA, 15 bp, Homo sapiens
gaggcttacctgcat

SEQ ID NO: 855405 - DNA, 15 bp, Homo sapiens
aggcttacctgcatt

SEQ ID NO: 855406 - DNA, 15 bp, Homo sapiens
ggcttacctgcattt

SEQ ID NO: 855407 - DNA, 15 bp, Homo sapiens
gcttacctgcatttg

SEQ ID NO: 855408 - DNA, 15 bp, Homo sapiens
cttacctgcatttgc

SEQ ID NO: 855409 - DNA, 15 bp, Homo sapiens
ttacctgcatttgca

SEQ ID NO: 855410 - DNA, 15 bp, Homo sapiens
tacctgcatttgcaa

SEQ ID NO: 855411 - DNA, 15 bp, Homo sapiens
acctgcatttgcaaa

SEQ ID NO: 855412 - DNA, 15 bp, Homo sapiens
cctgcatttgcaaag

SEQ ID NO: 855413 - DNA, 15 bp, Homo sapiens
ctgcatttgcaaagc

SEQ ID NO: 855414 - DNA, 15 bp, Homo sapiens
tgcatttgcaaagcc

SEQ ID NO: 855415 - DNA, 15 bp, Homo sapiens
gcatttgcaaagcca

SEQ ID NO: 855416 - DNA, 15 bp, Homo sapiens
catttgcaaagccag

SEQ ID NO: 855417 - DNA, 15 bp, Homo sapiens
atttgcaaagccagg

SEQ ID NO: 855418 - DNA, 15 bp, Homo sapiens
tttgcaaagccagga

SEQ ID NO: 855419 - DNA, 15 bp, Homo sapiens
ttgcaaagccaggac

SEQ ID NO: 855420 - DNA, 15 bp, Homo sapiens
tgcaaagccaggacc

SEQ ID NO: 855421 - DNA, 15 bp, Homo sapiens
gcaaagccaggaccc

SEQ ID NO: 855422 - DNA, 15 bp, Homo sapiens
caaagccaggaccca

SEQ ID NO: 855423 - DNA, 15 bp, Homo sapiens
aaagccaggacccat

SEQ ID NO: 855424 - DNA, 15 bp, Homo sapiens
aagccaggacccatt

SEQ ID NO: 855425 - DNA, 15 bp, Homo sapiens
agccaggacccattt

SEQ ID NO: 855426 - DNA, 15 bp, Homo sapiens
gccaggacccatttt

SEQ ID NO: 855427 - DNA, 15 bp, Homo sapiens
ccaggacccatttta

SEQ ID NO: 855428 - DNA, 15 bp, Homo sapiens
caggacccattttac

SEQ ID NO: 855429 - DNA, 15 bp, Homo sapiens
aggacccattttaca

SEQ ID NO: 855430 - DNA, 15 bp, Homo sapiens
ggacccattttacag

SEQ ID NO: 855431 - DNA, 15 bp, Homo sapiens
gacccattttacaga

SEQ ID NO: 855432 - DNA, 15 bp, Homo sapiens
atttgcaaagccagt

SEQ ID NO: 855433 - DNA, 15 bp, Homo sapiens
tttgcaaagccagtg

SEQ ID NO: 855434 - DNA, 15 bp, Homo sapiens
ttgcaaagccagtgc

SEQ ID NO: 855435 - DNA, 15 bp, Homo sapiens
tgcaaagccagtgca

SEQ ID NO: 855436 - DNA, 15 bp, Homo sapiens
gcaaagccagtgcat

SEQ ID NO: 855437 - DNA, 15 bp, Homo sapiens
caaagccagtgcatg

SEQ ID NO: 855438 - DNA, 15 bp, Homo sapiens
aaagccagtgcatgg

SEQ ID NO: 855439 - DNA, 15 bp, Homo sapiens
aagccagtgcatgga

SEQ ID NO: 855440 - DNA, 15 bp, Homo sapiens
agccagtgcatggaa

SEQ ID NO: 855441 - DNA, 15 bp, Homo sapiens
gccagtgcatggaat

SEQ ID NO: 855442 - DNA, 15 bp, Homo sapiens
ccagtgcatggaatt

SEQ ID NO: 855443 - DNA, 15 bp, Homo sapiens
cagtgcatggaattt

SEQ ID NO: 855444 - DNA, 15 bp, Homo sapiens
agtgcatggaatttt

SEQ ID NO: 855445 - DNA, 15 bp, Homo sapiens
gtgcatggaattttt

SEQ ID NO: 855446 - DNA, 15 bp, Homo sapiens
tgcatggaatttttt

SEQ ID NO: 855447 - DNA, 15 bp, Homo sapiens
gcatggaattttttg

SEQ ID NO: 855448 - DNA, 15 bp, Homo sapiens
catggaattttttgt

SEQ ID NO: 855449 - DNA, 15 bp, Homo sapiens
atggaattttttgtg

SEQ ID NO: 855450 - DNA, 15 bp, Homo sapiens
tggaattttttgtgt

SEQ ID NO: 855451 - DNA, 15 bp, Homo sapiens
ggaattttttgtgta

SEQ ID NO: 855452 - DNA, 15 bp, Homo sapiens
gaattttttgtgtat

SEQ ID NO: 855453 - DNA, 15 bp, Homo sapiens
aattttttgtgtatg

SEQ ID NO: 855454 - DNA, 15 bp, Homo sapiens
attttttgtgtatgt

SEQ ID NO: 855455 - DNA, 15 bp, Homo sapiens
ttttttgtgtatgtc

SEQ ID NO: 855456 - DNA, 15 bp, Homo sapiens
tttttgtgtatgtcc

SEQ ID NO: 855457 - DNA, 15 bp, Homo sapiens
ttttgtgtatgtcct

SEQ ID NO: 855458 - DNA, 15 bp, Homo sapiens
tttgtgtatgtcctt

SEQ ID NO: 855459 - DNA, 15 bp, Homo sapiens
ttgtgtatgtcctta

SEQ ID NO: 855460 - DNA, 15 bp, Homo sapiens
tgtgtatgtccttat

SEQ ID NO: 855461 - DNA, 15 bp, Homo sapiens
gtgtatgtccttata

SEQ ID NO: 855462 - DNA, 15 bp, Homo sapiens
tgtatgtccttatac

SEQ ID NO: 855463 - DNA, 15 bp, Homo sapiens
gtatgtccttataca

SEQ ID NO: 855464 - DNA, 15 bp, Homo sapiens
tatgtccttatacat

SEQ ID NO: 855465 - DNA, 15 bp, Homo sapiens
atgtccttatacatt

SEQ ID NO: 855466 - DNA, 15 bp, Homo sapiens
tgtccttatacatta

SEQ ID NO: 855467 - DNA, 15 bp, Homo sapiens
gtccttatacattat

SEQ ID NO: 855468 - DNA, 15 bp, Homo sapiens
tccttatacattatt

SEQ ID NO: 855469 - DNA, 15 bp, Homo sapiens
ccttatacattattc

SEQ ID NO: 855470 - DNA, 15 bp, Homo sapiens
cttatacattattct

SEQ ID NO: 855471 - DNA, 15 bp, Homo sapiens
ttatacattattctg

SEQ ID NO: 855472 - DNA, 15 bp, Homo sapiens
tatacattattctgt

SEQ ID NO: 855473 - DNA, 15 bp, Homo sapiens
atacattattctgta

SEQ ID NO: 855474 - DNA, 15 bp, Homo sapiens
tacattattctgtag

SEQ ID NO: 855475 - DNA, 15 bp, Homo sapiens
acattattctgtagc

SEQ ID NO: 855476 - DNA, 15 bp, Homo sapiens
cattattctgtagcg

SEQ ID NO: 855477 - DNA, 15 bp, Homo sapiens
attattctgtagcgt

SEQ ID NO: 855478 - DNA, 15 bp, Homo sapiens
ttattctgtagcgta

SEQ ID NO: 855479 - DNA, 15 bp, Homo sapiens
tattctgtagcgtac

SEQ ID NO: 855480 - DNA, 15 bp, Homo sapiens
attctgtagcgtaca

SEQ ID NO: 855481 - DNA, 15 bp, Homo sapiens
ttctgtagcgtacag

SEQ ID NO: 855482 - DNA, 15 bp, Homo sapiens
tctgtagcgtacagt

SEQ ID NO: 855483 - DNA, 15 bp, Homo sapiens
ctgtagcgtacagtt

SEQ ID NO: 855484 - DNA, 15 bp, Homo sapiens
tgtagcgtacagttc

SEQ ID NO: 855485 - DNA, 15 bp, Homo sapiens
gtagcgtacagttct

SEQ ID NO: 855486 - DNA, 15 bp, Homo sapiens
tagcgtacagttctt

SEQ ID NO: 855487 - DNA, 15 bp, Homo sapiens
agcgtacagttcttt

SEQ ID NO: 855488 - DNA, 15 bp, Homo sapiens
gcgtacagttcttta

SEQ ID NO: 855489 - DNA, 15 bp, Homo sapiens
cgtacagttctttac

SEQ ID NO: 855490 - DNA, 15 bp, Homo sapiens
gtacagttctttacc

SEQ ID NO: 855491 - DNA, 15 bp, Homo sapiens
tacagttctttaccc

SEQ ID NO: 855492 - DNA, 15 bp, Homo sapiens
acagttctttaccct

SEQ ID NO: 855493 - DNA, 15 bp, Homo sapiens
cagttctttacccta

SEQ ID NO: 855494 - DNA, 15 bp, Homo sapiens
agttctttaccctat

SEQ ID NO: 855495 - DNA, 15 bp, Homo sapiens
gttctttaccctata

SEQ ID NO: 855496 - DNA, 15 bp, Homo sapiens
ttctttaccctataa

SEQ ID NO: 855497 - DNA, 15 bp, Homo sapiens
tctttaccctataat

SEQ ID NO: 855498 - DNA, 15 bp, Homo sapiens
ctttaccctataatt

SEQ ID NO: 855499 - DNA, 15 bp, Homo sapiens
tttaccctataattt

SEQ ID NO: 855500 - DNA, 15 bp, Homo sapiens
ttaccctataatttc

SEQ ID NO: 855501 - DNA, 15 bp, Homo sapiens
taccctataatttca

SEQ ID NO: 855502 - DNA, 15 bp, Homo sapiens
accctataatttcat

SEQ ID NO: 855503 - DNA, 15 bp, Homo sapiens
ccctataatttcatc

SEQ ID NO: 855504 - DNA, 15 bp, Homo sapiens
cctataatttcatct

SEQ ID NO: 855505 - DNA, 15 bp, Homo sapiens
ctataatttcatctc

SEQ ID NO: 855506 - DNA, 15 bp, Homo sapiens
tataatttcatctca

SEQ ID NO: 855507 - DNA, 15 bp, Homo sapiens
ataatttcatctcat

SEQ ID NO: 855508 - DNA, 15 bp, Homo sapiens
taatttcatctcatt

SEQ ID NO: 855509 - DNA, 15 bp, Homo sapiens
aatttcatctcatta

SEQ ID NO: 855510 - DNA, 15 bp, Homo sapiens
atttcatctcattaa

SEQ ID NO: 855511 - DNA, 15 bp, Homo sapiens
tttcatctcattaat

SEQ ID NO: 855512 - DNA, 15 bp, Homo sapiens
ttcatctcattaatg

SEQ ID NO: 855513 - DNA, 15 bp, Homo sapiens
tcatctcattaatgg

SEQ ID NO: 855514 - DNA, 15 bp, Homo sapiens
catctcattaatggg

SEQ ID NO: 855515 - DNA, 15 bp, Homo sapiens
atctcattaatgggc

SEQ ID NO: 855516 - DNA, 15 bp, Homo sapiens
tctcattaatgggca

SEQ ID NO: 855517 - DNA, 15 bp, Homo sapiens
ctcattaatgggcaa

SEQ ID NO: 855518 - DNA, 15 bp, Homo sapiens
tcattaatgggcaag

SEQ ID NO: 855519 - DNA, 15 bp, Homo sapiens
cattaatgggcaagg

SEQ ID NO: 855520 - DNA, 15 bp, Homo sapiens
attaatgggcaaggt

SEQ ID NO: 855521 - DNA, 15 bp, Homo sapiens
ttaatgggcaaggta

SEQ ID NO: 855522 - DNA, 15 bp, Homo sapiens
taatgggcaaggtat

SEQ ID NO: 855523 - DNA, 15 bp, Homo sapiens
aatgggcaaggtatt

SEQ ID NO: 855524 - DNA, 15 bp, Homo sapiens
atgggcaaggtattt

SEQ ID NO: 855525 - DNA, 15 bp, Homo sapiens
tgggcaaggtatttt

SEQ ID NO: 855526 - DNA, 15 bp, Homo sapiens
gggcaaggtattttg

SEQ ID NO: 855527 - DNA, 15 bp, Homo sapiens
ggcaaggtattttga

SEQ ID NO: 855528 - DNA, 15 bp, Homo sapiens
gcaaggtattttgat

SEQ ID NO: 855529 - DNA, 15 bp, Homo sapiens
caaggtattttgata

SEQ ID NO: 855530 - DNA, 15 bp, Homo sapiens
aaggtattttgataa

SEQ ID NO: 855531 - DNA, 15 bp, Homo sapiens
aggtattttgataag

SEQ ID NO: 855532 - DNA, 15 bp, Homo sapiens
ggtattttgataaga

SEQ ID NO: 855533 - DNA, 15 bp, Homo sapiens
gtattttgataagaa

SEQ ID NO: 855534 - DNA, 15 bp, Homo sapiens
tattttgataagaag

SEQ ID NO: 855535 - DNA, 15 bp, Homo sapiens
attttgataagaaga

SEQ ID NO: 855536 - DNA, 15 bp, Homo sapiens
ttttgataagaagac

SEQ ID NO: 855537 - DNA, 15 bp, Homo sapiens
tttgataagaagact

SEQ ID NO: 855538 - DNA, 15 bp, Homo sapiens
ttgataagaagactg

SEQ ID NO: 855539 - DNA, 15 bp, Homo sapiens
tgataagaagactgt

SEQ ID NO: 855540 - DNA, 15 bp, Homo sapiens
gataagaagactgta

SEQ ID NO: 855541 - DNA, 15 bp, Homo sapiens
ataagaagactgtat

SEQ ID NO: 855542 - DNA, 15 bp, Homo sapiens
taagaagactgtatt

SEQ ID NO: 855543 - DNA, 15 bp, Homo sapiens
aagaagactgtatta

SEQ ID NO: 855544 - DNA, 15 bp, Homo sapiens
agaagactgtattat

SEQ ID NO: 855545 - DNA, 15 bp, Homo sapiens
gaagactgtattata

SEQ ID NO: 855546 - DNA, 15 bp, Homo sapiens
aagactgtattatat

SEQ ID NO: 855547 - DNA, 15 bp, Homo sapiens
agactgtattatatt

SEQ ID NO: 855548 - DNA, 15 bp, Homo sapiens
gactgtattatattc

SEQ ID NO: 855549 - DNA, 15 bp, Homo sapiens
actgtattatattcc

SEQ ID NO: 855550 - DNA, 15 bp, Homo sapiens
ctgtattatattcca

SEQ ID NO: 855551 - DNA, 15 bp, Homo sapiens
tgtattatattccat

SEQ ID NO: 855552 - DNA, 15 bp, Homo sapiens
gtattatattccatg

SEQ ID NO: 855553 - DNA, 15 bp, Homo sapiens
tattatattccatgg

SEQ ID NO: 855554 - DNA, 15 bp, Homo sapiens
attatattccatggg

SEQ ID NO: 855555 - DNA, 15 bp, Homo sapiens
ttatattccatgggg

SEQ ID NO: 855556 - DNA, 15 bp, Homo sapiens
tatattccatggggt

SEQ ID NO: 855557 - DNA, 15 bp, Homo sapiens
atattccatggggtc

SEQ ID NO: 855558 - DNA, 15 bp, Homo sapiens
tattccatggggtca

SEQ ID NO: 855559 - DNA, 15 bp, Homo sapiens
attccatggggtcag

SEQ ID NO: 855560 - DNA, 15 bp, Homo sapiens
ttccatggggtcagc

SEQ ID NO: 855561 - DNA, 15 bp, Homo sapiens
tccatggggtcagct

SEQ ID NO: 855562 - DNA, 15 bp, Homo sapiens
ccatggggtcagcta

SEQ ID NO: 855563 - DNA, 15 bp, Homo sapiens
catggggtcagctag

SEQ ID NO: 855564 - DNA, 15 bp, Homo sapiens
atggggtcagctaga

SEQ ID NO: 855565 - DNA, 15 bp, Homo sapiens
tggggtcagctagag

SEQ ID NO: 855566 - DNA, 15 bp, Homo sapiens
ggggtcagctagaga

SEQ ID NO: 855567 - DNA, 15 bp, Homo sapiens
gggtcagctagagaa

SEQ ID NO: 855568 - DNA, 15 bp, Homo sapiens
ggtcagctagagaaa

SEQ ID NO: 855569 - DNA, 15 bp, Homo sapiens
gtcagctagagaaaa

SEQ ID NO: 855570 - DNA, 15 bp, Homo sapiens
tcagctagagaaaat

SEQ ID NO: 855571 - DNA, 15 bp, Homo sapiens
cagctagagaaaatc

SEQ ID NO: 855572 - DNA, 15 bp, Homo sapiens
agctagagaaaatct

SEQ ID NO: 855573 - DNA, 15 bp, Homo sapiens
gctagagaaaatctg

SEQ ID NO: 855574 - DNA, 15 bp, Homo sapiens
ctagagaaaatctgt

SEQ ID NO: 855575 - DNA, 15 bp, Homo sapiens
tagagaaaatctgtg

SEQ ID NO: 855576 - DNA, 15 bp, Homo sapiens
agagaaaatctgtga

SEQ ID NO: 855577 - DNA, 15 bp, Homo sapiens
gagaaaatctgtgat

SEQ ID NO: 855578 - DNA, 15 bp, Homo sapiens
agaaaatctgtgata

SEQ ID NO: 855579 - DNA, 15 bp, Homo sapiens
gaaaatctgtgataa

SEQ ID NO: 855580 - DNA, 15 bp, Homo sapiens
aaaatctgtgataac

SEQ ID NO: 855581 - DNA, 15 bp, Homo sapiens
aaatctgtgataact

SEQ ID NO: 855582 - DNA, 15 bp, Homo sapiens
aatctgtgataactt

SEQ ID NO: 855583 - DNA, 15 bp, Homo sapiens
atctgtgataacttt

SEQ ID NO: 855584 - DNA, 15 bp, Homo sapiens
tctgtgataactttg

SEQ ID NO: 855585 - DNA, 15 bp, Homo sapiens
ctgtgataactttgt

SEQ ID NO: 855586 - DNA, 15 bp, Homo sapiens
tgtgataactttgtt

SEQ ID NO: 855587 - DNA, 15 bp, Homo sapiens
gtgataactttgttg

SEQ ID NO: 855588 - DNA, 15 bp, Homo sapiens
tgataactttgttga

SEQ ID NO: 855589 - DNA, 15 bp, Homo sapiens
gataactttgttgaa

SEQ ID NO: 855590 - DNA, 15 bp, Homo sapiens
ataactttgttgaaa

SEQ ID NO: 855591 - DNA, 15 bp, Homo sapiens
taactttgttgaaaa

SEQ ID NO: 855592 - DNA, 15 bp, Homo sapiens
aactttgttgaaaat

SEQ ID NO: 855593 - DNA, 15 bp, Homo sapiens
actttgttgaaaatg

SEQ ID NO: 855594 - DNA, 15 bp, Homo sapiens
ctttgttgaaaatga

SEQ ID NO: 855595 - DNA, 15 bp, Homo sapiens
tttgttgaaaatgaa

SEQ ID NO: 855596 - DNA, 15 bp, Homo sapiens
ttgttgaaaatgaaa

SEQ ID NO: 855597 - DNA, 15 bp, Homo sapiens
tgttgaaaatgaaat

SEQ ID NO: 855598 - DNA, 15 bp, Homo sapiens
gttgaaaatgaaata

SEQ ID NO: 855599 - DNA, 15 bp, Homo sapiens
ttgaaaatgaaatac

SEQ ID NO: 855600 - DNA, 15 bp, Homo sapiens
tgaaaatgaaataca

SEQ ID NO: 855601 - DNA, 15 bp, Homo sapiens
gaaaatgaaatacac

SEQ ID NO: 855602 - DNA, 15 bp, Homo sapiens
aaaatgaaatacact

SEQ ID NO: 855603 - DNA, 15 bp, Homo sapiens
aaatgaaatacactt

SEQ ID NO: 855604 - DNA, 15 bp, Homo sapiens
aatgaaatacacttt

SEQ ID NO: 855605 - DNA, 15 bp, Homo sapiens
atgaaatacactttg

SEQ ID NO: 855606 - DNA, 15 bp, Homo sapiens
tgaaatacactttgg

SEQ ID NO: 855607 - DNA, 15 bp, Homo sapiens
gaaatacactttgga

SEQ ID NO: 855608 - DNA, 15 bp, Homo sapiens
aaatacactttggat

SEQ ID NO: 855609 - DNA, 15 bp, Homo sapiens
aatacactttggatt

SEQ ID NO: 855610 - DNA, 15 bp, Homo sapiens
atacactttggattt

SEQ ID NO: 855611 - DNA, 15 bp, Homo sapiens
tacactttggatttt

SEQ ID NO: 855612 - DNA, 15 bp, Homo sapiens
acactttggattttt

SEQ ID NO: 855613 - DNA, 15 bp, Homo sapiens
cactttggatttttt

SEQ ID NO: 855614 - DNA, 15 bp, Homo sapiens
actttggattttttt

SEQ ID NO: 855615 - DNA, 15 bp, Homo sapiens
ctttggatttttttt

SEQ ID NO: 855616 - DNA, 15 bp, Homo sapiens
tttggattttttttt

SEQ ID NO: 855617 - DNA, 15 bp, Homo sapiens
ttggatttttttttg

SEQ ID NO: 855618 - DNA, 15 bp, Homo sapiens
tggatttttttttgc

SEQ ID NO: 855619 - DNA, 15 bp, Homo sapiens
ggatttttttttgca

SEQ ID NO: 855620 - DNA, 15 bp, Homo sapiens
gatttttttttgcaa

SEQ ID NO: 855621 - DNA, 15 bp, Homo sapiens
atttttttttgcaag

SEQ ID NO: 855622 - DNA, 15 bp, Homo sapiens
tttttttttgcaaga

SEQ ID NO: 855623 - DNA, 15 bp, Homo sapiens
ttttttttgcaagaa

SEQ ID NO: 855624 - DNA, 15 bp, Homo sapiens
tttttttgcaagaat

SEQ ID NO: 855625 - DNA, 15 bp, Homo sapiens
ttttttgcaagaatt

SEQ ID NO: 855626 - DNA, 15 bp, Homo sapiens
tttttgcaagaatta

SEQ ID NO: 855627 - DNA, 15 bp, Homo sapiens
ttttgcaagaattaa

SEQ ID NO: 855628 - DNA, 15 bp, Homo sapiens
tttgcaagaattaaa

SEQ ID NO: 855629 - DNA, 15 bp, Homo sapiens
ttgcaagaattaaaa

SEQ ID NO: 855630 - DNA, 15 bp, Homo sapiens
tgcaagaattaaaaa

SEQ ID NO: 855631 - DNA, 15 bp, Homo sapiens
gcaagaattaaaaaa

SEQ ID NO: 855632 - DNA, 15 bp, Homo sapiens
caagaattaaaaaaa

SEQ ID NO: 855633 - DNA, 15 bp, Homo sapiens
aagaattaaaaaaag

SEQ ID NO: 855634 - DNA, 15 bp, Homo sapiens
agaattaaaaaaagg

SEQ ID NO: 855635 - DNA, 15 bp, Homo sapiens
gaattaaaaaaagga

SEQ ID NO: 855636 - DNA, 15 bp, Homo sapiens
aattaaaaaaaggaa

SEQ ID NO: 855637 - DNA, 15 bp, Homo sapiens
attaaaaaaaggaac

SEQ ID NO: 855638 - DNA, 15 bp, Homo sapiens
ttaaaaaaaggaaca

SEQ ID NO: 855639 - DNA, 15 bp, Homo sapiens
taaaaaaaggaacaa

SEQ ID NO: 855640 - DNA, 15 bp, Homo sapiens
aaaaaaaggaacaat

SEQ ID NO: 855641 - DNA, 15 bp, Homo sapiens
aaaaaaggaacaata

SEQ ID NO: 855642 - DNA, 15 bp, Homo sapiens
aaaaaggaacaataa

SEQ ID NO: 855643 - DNA, 15 bp, Homo sapiens
aaaaggaacaataac

SEQ ID NO: 855644 - DNA, 15 bp, Homo sapiens
aaaggaacaataacc

SEQ ID NO: 855645 - DNA, 15 bp, Homo sapiens
aaggaacaataaccc

SEQ ID NO: 855646 - DNA, 15 bp, Homo sapiens
aggaacaataaccca

SEQ ID NO: 855647 - DNA, 15 bp, Homo sapiens
ggaacaataacccac

SEQ ID NO: 855648 - DNA, 15 bp, Homo sapiens
gaacaataacccaca

SEQ ID NO: 855649 - DNA, 15 bp, Homo sapiens
aacaataacccacat

SEQ ID NO: 855650 - DNA, 15 bp, Homo sapiens
acaataacccacatg

SEQ ID NO: 855651 - DNA, 15 bp, Homo sapiens
caataacccacatgc

SEQ ID NO: 855652 - DNA, 15 bp, Homo sapiens
aataacccacatgca

SEQ ID NO: 855653 - DNA, 15 bp, Homo sapiens
ataacccacatgcat

SEQ ID NO: 855654 - DNA, 15 bp, Homo sapiens
taacccacatgcatt

SEQ ID NO: 855655 - DNA, 15 bp, Homo sapiens
aacccacatgcattg

SEQ ID NO: 855656 - DNA, 15 bp, Homo sapiens
acccacatgcattga

SEQ ID NO: 855657 - DNA, 15 bp, Homo sapiens
cccacatgcattgag

SEQ ID NO: 855658 - DNA, 15 bp, Homo sapiens
ccacatgcattgagc

SEQ ID NO: 855659 - DNA, 15 bp, Homo sapiens
cacatgcattgagcc

SEQ ID NO: 855660 - DNA, 15 bp, Homo sapiens
acatgcattgagcct

SEQ ID NO: 855661 - DNA, 15 bp, Homo sapiens
catgcattgagcctt

SEQ ID NO: 855662 - DNA, 15 bp, Homo sapiens
atgcattgagccttc

SEQ ID NO: 855663 - DNA, 15 bp, Homo sapiens
tgcattgagccttct

SEQ ID NO: 855664 - DNA, 15 bp, Homo sapiens
gcattgagccttcta

SEQ ID NO: 855665 - DNA, 15 bp, Homo sapiens
cattgagccttctat

SEQ ID NO: 855666 - DNA, 15 bp, Homo sapiens
attgagccttctata

SEQ ID NO: 855667 - DNA, 15 bp, Homo sapiens
ttgagccttctatac

SEQ ID NO: 855668 - DNA, 15 bp, Homo sapiens
tgagccttctataca

SEQ ID NO: 855669 - DNA, 15 bp, Homo sapiens
gagccttctatacat

SEQ ID NO: 855670 - DNA, 15 bp, Homo sapiens
agccttctatacatc

SEQ ID NO: 855671 - DNA, 15 bp, Homo sapiens
gccttctatacatca

SEQ ID NO: 855672 - DNA, 15 bp, Homo sapiens
ccttctatacatcat

SEQ ID NO: 855673 - DNA, 15 bp, Homo sapiens
cttctatacatcatc

SEQ ID NO: 855674 - DNA, 15 bp, Homo sapiens
ttctatacatcatct

SEQ ID NO: 855675 - DNA, 15 bp, Homo sapiens
tctatacatcatctc

SEQ ID NO: 855676 - DNA, 15 bp, Homo sapiens
ctatacatcatctct

SEQ ID NO: 855677 - DNA, 15 bp, Homo sapiens
tatacatcatctctc

SEQ ID NO: 855678 - DNA, 15 bp, Homo sapiens
atacatcatctctct

SEQ ID NO: 855679 - DNA, 15 bp, Homo sapiens
tacatcatctctctt

SEQ ID NO: 855680 - DNA, 15 bp, Homo sapiens
acatcatctctctta

SEQ ID NO: 855681 - DNA, 15 bp, Homo sapiens
catcatctctcttaa

SEQ ID NO: 855682 - DNA, 15 bp, Homo sapiens
atcatctctcttaat

SEQ ID NO: 855683 - DNA, 15 bp, Homo sapiens
tcatctctcttaatt

SEQ ID NO: 855684 - DNA, 15 bp, Homo sapiens
catctctcttaattc

SEQ ID NO: 855685 - DNA, 15 bp, Homo sapiens
atctctcttaattct

SEQ ID NO: 855686 - DNA, 15 bp, Homo sapiens
tctctcttaattctc

SEQ ID NO: 855687 - DNA, 15 bp, Homo sapiens
ctctcttaattctct

SEQ ID NO: 855688 - DNA, 15 bp, Homo sapiens
tctcttaattctcta

SEQ ID NO: 855689 - DNA, 15 bp, Homo sapiens
ctcttaattctctaa

SEQ ID NO: 855690 - DNA, 15 bp, Homo sapiens
tcttaattctctaaa

SEQ ID NO: 855691 - DNA, 15 bp, Homo sapiens
cttaattctctaaag

SEQ ID NO: 855692 - DNA, 15 bp, Homo sapiens
ttaattctctaaaga

SEQ ID NO: 855693 - DNA, 15 bp, Homo sapiens
taattctctaaagat

SEQ ID NO: 855694 - DNA, 15 bp, Homo sapiens
aattctctaaagatt

SEQ ID NO: 855695 - DNA, 15 bp, Homo sapiens
attctctaaagatta

SEQ ID NO: 855696 - DNA, 15 bp, Homo sapiens
ttctctaaagattat

SEQ ID NO: 855697 - DNA, 15 bp, Homo sapiens
tctctaaagattatt

SEQ ID NO: 855698 - DNA, 15 bp, Homo sapiens
ctctaaagattattg

SEQ ID NO: 855699 - DNA, 15 bp, Homo sapiens
tctaaagattattgt

SEQ ID NO: 855700 - DNA, 15 bp, Homo sapiens
ctaaagattattgtt

SEQ ID NO: 855701 - DNA, 15 bp, Homo sapiens
taaagattattgtta

SEQ ID NO: 855702 - DNA, 15 bp, Homo sapiens
aaagattattgttac

SEQ ID NO: 855703 - DNA, 15 bp, Homo sapiens
aagattattgttacc

SEQ ID NO: 855704 - DNA, 15 bp, Homo sapiens
agattattgttacca

SEQ ID NO: 855705 - DNA, 15 bp, Homo sapiens
gattattgttaccat

SEQ ID NO: 855706 - DNA, 15 bp, Homo sapiens
attattgttaccatt

SEQ ID NO: 855707 - DNA, 15 bp, Homo sapiens
ttattgttaccatta

SEQ ID NO: 855708 - DNA, 15 bp, Homo sapiens
tattgttaccattat

SEQ ID NO: 855709 - DNA, 15 bp, Homo sapiens
attgttaccattatc

SEQ ID NO: 855710 - DNA, 15 bp, Homo sapiens
ttgttaccattatcc

SEQ ID NO: 855711 - DNA, 15 bp, Homo sapiens
tgttaccattatcca

SEQ ID NO: 855712 - DNA, 15 bp, Homo sapiens
gttaccattatccac

SEQ ID NO: 855713 - DNA, 15 bp, Homo sapiens
ttaccattatccacc

SEQ ID NO: 855714 - DNA, 15 bp, Homo sapiens
taccattatccacct

SEQ ID NO: 855715 - DNA, 15 bp, Homo sapiens
accattatccacctc

SEQ ID NO: 855716 - DNA, 15 bp, Homo sapiens
ccattatccacctct

SEQ ID NO: 855717 - DNA, 15 bp, Homo sapiens
cattatccacctctt

SEQ ID NO: 855718 - DNA, 15 bp, Homo sapiens
attatccacctcttg

SEQ ID NO: 855719 - DNA, 15 bp, Homo sapiens
ttatccacctcttgt

SEQ ID NO: 855720 - DNA, 15 bp, Homo sapiens
tatccacctcttgta

SEQ ID NO: 855721 - DNA, 15 bp, Homo sapiens
atccacctcttgtag

SEQ ID NO: 855722 - DNA, 15 bp, Homo sapiens
tccacctcttgtagg

SEQ ID NO: 855723 - DNA, 15 bp, Homo sapiens
ccacctcttgtaggt

SEQ ID NO: 855724 - DNA, 15 bp, Homo sapiens
cacctcttgtaggta

SEQ ID NO: 855725 - DNA, 15 bp, Homo sapiens
acctcttgtaggtaa

SEQ ID NO: 855726 - DNA, 15 bp, Homo sapiens
cctcttgtaggtaag

SEQ ID NO: 855727 - DNA, 15 bp, Homo sapiens
ctcttgtaggtaaga

SEQ ID NO: 855728 - DNA, 15 bp, Homo sapiens
tcttgtaggtaagaa

SEQ ID NO: 855729 - DNA, 15 bp, Homo sapiens
cttgtaggtaagaaa

SEQ ID NO: 855730 - DNA, 15 bp, Homo sapiens
ttgtaggtaagaaag

SEQ ID NO: 855731 - DNA, 15 bp, Homo sapiens
tgtaggtaagaaagt

SEQ ID NO: 855732 - DNA, 15 bp, Homo sapiens
gtaggtaagaaagtt

SEQ ID NO: 855733 - DNA, 15 bp, Homo sapiens
taggtaagaaagttg

SEQ ID NO: 855734 - DNA, 15 bp, Homo sapiens
aggtaagaaagttga

SEQ ID NO: 855735 - DNA, 15 bp, Homo sapiens
ggtaagaaagttgag

SEQ ID NO: 855736 - DNA, 15 bp, Homo sapiens
gtaagaaagttgagt

SEQ ID NO: 855737 - DNA, 15 bp, Homo sapiens
taagaaagttgagtt

SEQ ID NO: 855738 - DNA, 15 bp, Homo sapiens
aagaaagttgagttc

SEQ ID NO: 855739 - DNA, 15 bp, Homo sapiens
agaaagttgagttct

SEQ ID NO: 855740 - DNA, 15 bp, Homo sapiens
gaaagttgagttcta

SEQ ID NO: 855741 - DNA, 15 bp, Homo sapiens
aaagttgagttctag

SEQ ID NO: 855742 - DNA, 15 bp, Homo sapiens
aagttgagttctagg

SEQ ID NO: 855743 - DNA, 15 bp, Homo sapiens
agttgagttctaggg

SEQ ID NO: 855744 - DNA, 15 bp, Homo sapiens
gttgagttctaggga

SEQ ID NO: 855745 - DNA, 15 bp, Homo sapiens
ttgagttctagggat

SEQ ID NO: 855746 - DNA, 15 bp, Homo sapiens
tgagttctagggata

SEQ ID NO: 855747 - DNA, 15 bp, Homo sapiens
gagttctagggatat

SEQ ID NO: 855748 - DNA, 15 bp, Homo sapiens
agttctagggatatt

SEQ ID NO: 855749 - DNA, 15 bp, Homo sapiens
gttctagggatattt

SEQ ID NO: 855750 - DNA, 15 bp, Homo sapiens
ttctagggatattta

SEQ ID NO: 855751 - DNA, 15 bp, Homo sapiens
tctagggatatttag

SEQ ID NO: 855752 - DNA, 15 bp, Homo sapiens
ctagggatatttagt

SEQ ID NO: 855753 - DNA, 15 bp, Homo sapiens
tagggatatttagta

SEQ ID NO: 855754 - DNA, 15 bp, Homo sapiens
agggatatttagtaa

SEQ ID NO: 855755 - DNA, 15 bp, Homo sapiens
gggatatttagtaac

SEQ ID NO: 855756 - DNA, 15 bp, Homo sapiens
ggatatttagtaact

SEQ ID NO: 855757 - DNA, 15 bp, Homo sapiens
gatatttagtaactg

SEQ ID NO: 855758 - DNA, 15 bp, Homo sapiens
atatttagtaactgg

SEQ ID NO: 855759 - DNA, 15 bp, Homo sapiens
tatttagtaactggc

SEQ ID NO: 855760 - DNA, 15 bp, Homo sapiens
atttagtaactggcc

SEQ ID NO: 855761 - DNA, 15 bp, Homo sapiens
tttagtaactggccc

SEQ ID NO: 855762 - DNA, 15 bp, Homo sapiens
ttagtaactggccca

SEQ ID NO: 855763 - DNA, 15 bp, Homo sapiens
tagtaactggcccaa

SEQ ID NO: 855764 - DNA, 15 bp, Homo sapiens
agtaactggcccaaa

SEQ ID NO: 855765 - DNA, 15 bp, Homo sapiens
gtaactggcccaaag

SEQ ID NO: 855766 - DNA, 15 bp, Homo sapiens
taactggcccaaagt

SEQ ID NO: 855767 - DNA, 15 bp, Homo sapiens
aactggcccaaagtc

SEQ ID NO: 855768 - DNA, 15 bp, Homo sapiens
actggcccaaagtca

SEQ ID NO: 855769 - DNA, 15 bp, Homo sapiens
ctggcccaaagtcaa

SEQ ID NO: 855770 - DNA, 15 bp, Homo sapiens
tggcccaaagtcaaa

SEQ ID NO: 855771 - DNA, 15 bp, Homo sapiens
ggcccaaagtcaaac

SEQ ID NO: 855772 - DNA, 15 bp, Homo sapiens
gcccaaagtcaaaca

SEQ ID NO: 855773 - DNA, 15 bp, Homo sapiens
cccaaagtcaaacag

SEQ ID NO: 855774 - DNA, 15 bp, Homo sapiens
ccaaagtcaaacagc

SEQ ID NO: 855775 - DNA, 15 bp, Homo sapiens
caaagtcaaacagct

SEQ ID NO: 855776 - DNA, 15 bp, Homo sapiens
aaagtcaaacagcta

SEQ ID NO: 855777 - DNA, 15 bp, Homo sapiens
aagtcaaacagctat

SEQ ID NO: 855778 - DNA, 15 bp, Homo sapiens
agtcaaacagctatt

SEQ ID NO: 855779 - DNA, 15 bp, Homo sapiens
gtcaaacagctatta

SEQ ID NO: 855780 - DNA, 15 bp, Homo sapiens
tcaaacagctattaa

SEQ ID NO: 855781 - DNA, 15 bp, Homo sapiens
caaacagctattaag

SEQ ID NO: 855782 - DNA, 15 bp, Homo sapiens
aaacagctattaagt

SEQ ID NO: 855783 - DNA, 15 bp, Homo sapiens
aacagctattaagtg

SEQ ID NO: 855784 - DNA, 15 bp, Homo sapiens
agctattaagtggta

SEQ ID NO: 855785 - DNA, 15 bp, Homo sapiens
gctattaagtggtag

SEQ ID NO: 855786 - DNA, 15 bp, Homo sapiens
ctattaagtggtagt

SEQ ID NO: 855787 - DNA, 15 bp, Homo sapiens
tattaagtggtagtg

SEQ ID NO: 855788 - DNA, 15 bp, Homo sapiens
attaagtggtagtgt

SEQ ID NO: 855789 - DNA, 15 bp, Homo sapiens
ttaagtggtagtgtt

SEQ ID NO: 855790 - DNA, 15 bp, Homo sapiens
taagtggtagtgttg

SEQ ID NO: 855791 - DNA, 15 bp, Homo sapiens
aagtggtagtgttgg

SEQ ID NO: 855792 - DNA, 15 bp, Homo sapiens
agtggtagtgttgga

SEQ ID NO: 855793 - DNA, 15 bp, Homo sapiens
gtggtagtgttggaa

SEQ ID NO: 855794 - DNA, 15 bp, Homo sapiens
tggtagtgttggaat

SEQ ID NO: 855795 - DNA, 15 bp, Homo sapiens
ggtagtgttggaatt

SEQ ID NO: 855796 - DNA, 15 bp, Homo sapiens
gtagtgttggaattt

SEQ ID NO: 855797 - DNA, 15 bp, Homo sapiens
tagtgttggaatttg

SEQ ID NO: 855798 - DNA, 15 bp, Homo sapiens
agtgttggaatttgg

SEQ ID NO: 855799 - DNA, 15 bp, Homo sapiens
gtgttggaatttgga

SEQ ID NO: 855800 - DNA, 15 bp, Homo sapiens
tgttggaatttggac

SEQ ID NO: 855801 - DNA, 15 bp, Homo sapiens
gttggaatttggacc

SEQ ID NO: 855802 - DNA, 15 bp, Homo sapiens
ttggaatttggaccc

SEQ ID NO: 855803 - DNA, 15 bp, Homo sapiens
tggaatttggaccca

SEQ ID NO: 855804 - DNA, 15 bp, Homo sapiens
ggaatttggacccaa

SEQ ID NO: 855805 - DNA, 15 bp, Homo sapiens
gaatttggacccaaa

SEQ ID NO: 855806 - DNA, 15 bp, Homo sapiens
aatttggacccaaat

SEQ ID NO: 855807 - DNA, 15 bp, Homo sapiens
atttggacccaaatt

SEQ ID NO: 855808 - DNA, 15 bp, Homo sapiens
tttggacccaaattc

SEQ ID NO: 855809 - DNA, 15 bp, Homo sapiens
ttggacccaaattct

SEQ ID NO: 855810 - DNA, 15 bp, Homo sapiens
tggacccaaattctg

SEQ ID NO: 855811 - DNA, 15 bp, Homo sapiens
ggacccaaattctga

SEQ ID NO: 855812 - DNA, 15 bp, Homo sapiens
gacccaaattctgat

SEQ ID NO: 855813 - DNA, 15 bp, Homo sapiens
acccaaattctgatt

SEQ ID NO: 855814 - DNA, 15 bp, Homo sapiens
cccaaattctgattg

SEQ ID NO: 855815 - DNA, 15 bp, Homo sapiens
ccaaattctgattgc

SEQ ID NO: 855816 - DNA, 15 bp, Homo sapiens
caaattctgattgca

SEQ ID NO: 855817 - DNA, 15 bp, Homo sapiens
aaattctgattgcag

SEQ ID NO: 855818 - DNA, 15 bp, Homo sapiens
aattctgattgcaga

SEQ ID NO: 855819 - DNA, 15 bp, Homo sapiens
attctgattgcagag

SEQ ID NO: 855820 - DNA, 15 bp, Homo sapiens
ttctgattgcagagc

SEQ ID NO: 855821 - DNA, 15 bp, Homo sapiens
tctgattgcagagcc

SEQ ID NO: 855822 - DNA, 15 bp, Homo sapiens
ctgattgcagagcca

SEQ ID NO: 855823 - DNA, 15 bp, Homo sapiens
tgattgcagagccag

SEQ ID NO: 855824 - DNA, 15 bp, Homo sapiens
gattgcagagccagg

SEQ ID NO: 855825 - DNA, 15 bp, Homo sapiens
attgcagagccaggg

SEQ ID NO: 855826 - DNA, 15 bp, Homo sapiens
ttgcagagccagggc

SEQ ID NO: 855827 - DNA, 15 bp, Homo sapiens
tgcagagccagggca

SEQ ID NO: 855828 - DNA, 15 bp, Homo sapiens
gcagagccagggcat

SEQ ID NO: 855829 - DNA, 15 bp, Homo sapiens
cagagccagggcatg

SEQ ID NO: 855830 - DNA, 15 bp, Homo sapiens
agagccagggcatgt

SEQ ID NO: 855831 - DNA, 15 bp, Homo sapiens
gagccagggcatgta

SEQ ID NO: 855832 - DNA, 15 bp, Homo sapiens
agccagggcatgtaa

SEQ ID NO: 855833 - DNA, 15 bp, Homo sapiens
gccagggcatgtaaa

SEQ ID NO: 855834 - DNA, 15 bp, Homo sapiens
ccagggcatgtaaaa

SEQ ID NO: 855835 - DNA, 15 bp, Homo sapiens
cagggcatgtaaaaa

SEQ ID NO: 855836 - DNA, 15 bp, Homo sapiens
agggcatgtaaaaac

SEQ ID NO: 855837 - DNA, 15 bp, Homo sapiens
gggcatgtaaaaact

SEQ ID NO: 855838 - DNA, 15 bp, Homo sapiens
ggcatgtaaaaactg

SEQ ID NO: 855839 - DNA, 15 bp, Homo sapiens
gcatgtaaaaactgc

SEQ ID NO: 855840 - DNA, 15 bp, Homo sapiens
catgtaaaaactgcc

SEQ ID NO: 855841 - DNA, 15 bp, Homo sapiens
atgtaaaaactgcct

SEQ ID NO: 855842 - DNA, 15 bp, Homo sapiens
tgtaaaaactgcctt

SEQ ID NO: 855843 - DNA, 15 bp, Homo sapiens
gtaaaaactgccttg

SEQ ID NO: 855844 - DNA, 15 bp, Homo sapiens
taaaaactgccttgc

SEQ ID NO: 855845 - DNA, 15 bp, Homo sapiens
aaaaactgccttgca

SEQ ID NO: 855846 - DNA, 15 bp, Homo sapiens
aaaactgccttgcag

SEQ ID NO: 855847 - DNA, 15 bp, Homo sapiens
aaactgccttgcagg

SEQ ID NO: 855848 - DNA, 15 bp, Homo sapiens
aactgccttgcagga

SEQ ID NO: 855849 - DNA, 15 bp, Homo sapiens
actgccttgcaggaa

SEQ ID NO: 855850 - DNA, 15 bp, Homo sapiens
ctgccttgcaggaaa

SEQ ID NO: 855851 - DNA, 15 bp, Homo sapiens
tgccttgcaggaaag

SEQ ID NO: 855852 - DNA, 15 bp, Homo sapiens
gccttgcaggaaagg

SEQ ID NO: 855853 - DNA, 15 bp, Homo sapiens
ccttgcaggaaagga

SEQ ID NO: 855854 - DNA, 15 bp, Homo sapiens
cttgcaggaaaggag

SEQ ID NO: 855855 - DNA, 15 bp, Homo sapiens
ttgcaggaaaggagg

SEQ ID NO: 855856 - DNA, 15 bp, Homo sapiens
tgcaggaaaggaggt

SEQ ID NO: 855857 - DNA, 15 bp, Homo sapiens
gcaggaaaggaggtt

SEQ ID NO: 855858 - DNA, 15 bp, Homo sapiens
caggaaaggaggtta

SEQ ID NO: 855859 - DNA, 15 bp, Homo sapiens
aggaaaggaggttaa

SEQ ID NO: 855860 - DNA, 15 bp, Homo sapiens
ggaaaggaggttaaa

SEQ ID NO: 855861 - DNA, 15 bp, Homo sapiens
gaaaggaggttaaaa

SEQ ID NO: 855862 - DNA, 15 bp, Homo sapiens
aaaggaggttaaaaa

SEQ ID NO: 855863 - DNA, 15 bp, Homo sapiens
aaggaggttaaaaaa

SEQ ID NO: 855864 - DNA, 15 bp, Homo sapiens
aggaggttaaaaaaa

SEQ ID NO: 855865 - DNA, 15 bp, Homo sapiens
ggaggttaaaaaaat

SEQ ID NO: 855866 - DNA, 15 bp, Homo sapiens
gaggttaaaaaaatg

SEQ ID NO: 855867 - DNA, 15 bp, Homo sapiens
aggttaaaaaaatgt

SEQ ID NO: 855868 - DNA, 15 bp, Homo sapiens
ggttaaaaaaatgtg

SEQ ID NO: 855869 - DNA, 15 bp, Homo sapiens
gttaaaaaaatgtgc

SEQ ID NO: 855870 - DNA, 15 bp, Homo sapiens
ttaaaaaaatgtgca

SEQ ID NO: 855871 - DNA, 15 bp, Homo sapiens
taaaaaaatgtgcaa

SEQ ID NO: 855872 - DNA, 15 bp, Homo sapiens
aaaaaaatgtgcaaa

SEQ ID NO: 855873 - DNA, 15 bp, Homo sapiens
aaaaaatgtgcaaaa

SEQ ID NO: 855874 - DNA, 15 bp, Homo sapiens
aaaaatgtgcaaaat

SEQ ID NO: 855875 - DNA, 15 bp, Homo sapiens
aaaatgtgcaaaatt

SEQ ID NO: 855876 - DNA, 15 bp, Homo sapiens
aaatgtgcaaaattt

SEQ ID NO: 855877 - DNA, 15 bp, Homo sapiens
aatgtgcaaaattta

SEQ ID NO: 855878 - DNA, 15 bp, Homo sapiens
atgtgcaaaatttat

SEQ ID NO: 855879 - DNA, 15 bp, Homo sapiens
tgtgcaaaatttata

SEQ ID NO: 855880 - DNA, 15 bp, Homo sapiens
gtgcaaaatttataa

SEQ ID NO: 855881 - DNA, 15 bp, Homo sapiens
tgcaaaatttataat

SEQ ID NO: 855882 - DNA, 15 bp, Homo sapiens
gcaaaatttataatc

SEQ ID NO: 855883 - DNA, 15 bp, Homo sapiens
caaaatttataatcc

SEQ ID NO: 855884 - DNA, 15 bp, Homo sapiens
aaaatttataatcct

SEQ ID NO: 855885 - DNA, 15 bp, Homo sapiens
aaatttataatcctg

SEQ ID NO: 855886 - DNA, 15 bp, Homo sapiens
aatttataatcctgc

SEQ ID NO: 855887 - DNA, 15 bp, Homo sapiens
atttataatcctgcc

SEQ ID NO: 855888 - DNA, 15 bp, Homo sapiens
tttataatcctgcct

SEQ ID NO: 855889 - DNA, 15 bp, Homo sapiens
ttataatcctgcctt

SEQ ID NO: 855890 - DNA, 15 bp, Homo sapiens
tataatcctgccttt

SEQ ID NO: 855891 - DNA, 15 bp, Homo sapiens
ataatcctgcctttc

SEQ ID NO: 855892 - DNA, 15 bp, Homo sapiens
taatcctgcctttct

SEQ ID NO: 855893 - DNA, 15 bp, Homo sapiens
aatcctgcctttcta

SEQ ID NO: 855894 - DNA, 15 bp, Homo sapiens
atcctgcctttctaa

SEQ ID NO: 855895 - DNA, 15 bp, Homo sapiens
tcctgcctttctaaa

SEQ ID NO: 855896 - DNA, 15 bp, Homo sapiens
cctgcctttctaaaa

SEQ ID NO: 855897 - DNA, 15 bp, Homo sapiens
ctgcctttctaaaac

SEQ ID NO: 855898 - DNA, 15 bp, Homo sapiens
tgcctttctaaaaca

SEQ ID NO: 855899 - DNA, 15 bp, Homo sapiens
gcctttctaaaacat

SEQ ID NO: 855900 - DNA, 15 bp, Homo sapiens
cctttctaaaacatc

SEQ ID NO: 855901 - DNA, 15 bp, Homo sapiens
ctttctaaaacatca

SEQ ID NO: 855902 - DNA, 15 bp, Homo sapiens
tttctaaaacatcat

SEQ ID NO: 855903 - DNA, 15 bp, Homo sapiens
ttctaaaacatcata

SEQ ID NO: 855904 - DNA, 15 bp, Homo sapiens
tctaaaacatcatac

SEQ ID NO: 855905 - DNA, 15 bp, Homo sapiens
ctaaaacatcatact

SEQ ID NO: 855906 - DNA, 15 bp, Homo sapiens
taaaacatcatactg

SEQ ID NO: 855907 - DNA, 15 bp, Homo sapiens
aaaacatcatactga

SEQ ID NO: 855908 - DNA, 15 bp, Homo sapiens
aaacatcatactgaa

SEQ ID NO: 855909 - DNA, 15 bp, Homo sapiens
aacatcatactgaat

SEQ ID NO: 855910 - DNA, 15 bp, Homo sapiens
acatcatactgaatt

SEQ ID NO: 855911 - DNA, 15 bp, Homo sapiens
catcatactgaattg

SEQ ID NO: 855912 - DNA, 15 bp, Homo sapiens
atcatactgaattgg

SEQ ID NO: 855913 - DNA, 15 bp, Homo sapiens
tcatactgaattggc

SEQ ID NO: 855914 - DNA, 15 bp, Homo sapiens
catactgaattggct

SEQ ID NO: 855915 - DNA, 15 bp, Homo sapiens
atactgaattggctt

SEQ ID NO: 855916 - DNA, 15 bp, Homo sapiens
tactgaattggcttt

SEQ ID NO: 855917 - DNA, 15 bp, Homo sapiens
actgaattggctttg

SEQ ID NO: 855918 - DNA, 15 bp, Homo sapiens
ctgaattggctttga

SEQ ID NO: 855919 - DNA, 15 bp, Homo sapiens
tgaattggctttgaa

SEQ ID NO: 855920 - DNA, 15 bp, Homo sapiens
gaattggctttgaaa

SEQ ID NO: 855921 - DNA, 15 bp, Homo sapiens
aattggctttgaaag

SEQ ID NO: 855922 - DNA, 15 bp, Homo sapiens
attggctttgaaaga

SEQ ID NO: 855923 - DNA, 15 bp, Homo sapiens
ttggctttgaaagat

SEQ ID NO: 855924 - DNA, 15 bp, Homo sapiens
tggctttgaaagata

SEQ ID NO: 855925 - DNA, 15 bp, Homo sapiens
ggctttgaaagataa

SEQ ID NO: 855926 - DNA, 15 bp, Homo sapiens
gctttgaaagataaa

SEQ ID NO: 855927 - DNA, 15 bp, Homo sapiens
ctttgaaagataaat

SEQ ID NO: 855928 - DNA, 15 bp, Homo sapiens
tttgaaagataaatt

SEQ ID NO: 855929 - DNA, 15 bp, Homo sapiens
ttgaaagataaattc

SEQ ID NO: 855930 - DNA, 15 bp, Homo sapiens
tgaaagataaattca

SEQ ID NO: 855931 - DNA, 15 bp, Homo sapiens
gaaagataaattcat

SEQ ID NO: 855932 - DNA, 15 bp, Homo sapiens
aaagataaattcatc

SEQ ID NO: 855933 - DNA, 15 bp, Homo sapiens
aagataaattcatct

SEQ ID NO: 855934 - DNA, 15 bp, Homo sapiens
agataaattcatcta

SEQ ID NO: 855935 - DNA, 15 bp, Homo sapiens
gataaattcatctaa

SEQ ID NO: 855936 - DNA, 15 bp, Homo sapiens
ataaattcatctaaa

SEQ ID NO: 855937 - DNA, 15 bp, Homo sapiens
taaattcatctaaac

SEQ ID NO: 855938 - DNA, 15 bp, Homo sapiens
aaattcatctaaact

SEQ ID NO: 855939 - DNA, 15 bp, Homo sapiens
aattcatctaaactg

SEQ ID NO: 855940 - DNA, 15 bp, Homo sapiens
attcatctaaactgt

SEQ ID NO: 855941 - DNA, 15 bp, Homo sapiens
ttcatctaaactgta

SEQ ID NO: 855942 - DNA, 15 bp, Homo sapiens
tcatctaaactgtat

SEQ ID NO: 855943 - DNA, 15 bp, Homo sapiens
catctaaactgtatg

SEQ ID NO: 855944 - DNA, 15 bp, Homo sapiens
atctaaactgtatga

SEQ ID NO: 855945 - DNA, 15 bp, Homo sapiens
tctaaactgtatgag

SEQ ID NO: 855946 - DNA, 15 bp, Homo sapiens
ctaaactgtatgagc

SEQ ID NO: 855947 - DNA, 15 bp, Homo sapiens
taaactgtatgagct

SEQ ID NO: 855948 - DNA, 15 bp, Homo sapiens
aaactgtatgagctc

SEQ ID NO: 855949 - DNA, 15 bp, Homo sapiens
aactgtatgagctct

SEQ ID NO: 855950 - DNA, 15 bp, Homo sapiens
actgtatgagctcta

SEQ ID NO: 855951 - DNA, 15 bp, Homo sapiens
ctgtatgagctctaa

SEQ ID NO: 855952 - DNA, 15 bp, Homo sapiens
tgtatgagctctaac

SEQ ID NO: 855953 - DNA, 15 bp, Homo sapiens
gtatgagctctaaca

SEQ ID NO: 855954 - DNA, 15 bp, Homo sapiens
tatgagctctaacac

SEQ ID NO: 855955 - DNA, 15 bp, Homo sapiens
atgagctctaacact

SEQ ID NO: 855956 - DNA, 15 bp, Homo sapiens
tgagctctaacactt

SEQ ID NO: 855957 - DNA, 15 bp, Homo sapiens
gagctctaacacttc

SEQ ID NO: 855958 - DNA, 15 bp, Homo sapiens
agctctaacacttca

SEQ ID NO: 855959 - DNA, 15 bp, Homo sapiens
gctctaacacttcac

SEQ ID NO: 855960 - DNA, 15 bp, Homo sapiens
ctctaacacttcacc

SEQ ID NO: 855961 - DNA, 15 bp, Homo sapiens
tctaacacttcaccc

SEQ ID NO: 855962 - DNA, 15 bp, Homo sapiens
ctaacacttcaccct

SEQ ID NO: 855963 - DNA, 15 bp, Homo sapiens
taacacttcaccctc

SEQ ID NO: 855964 - DNA, 15 bp, Homo sapiens
aacacttcaccctcg

SEQ ID NO: 855965 - DNA, 15 bp, Homo sapiens
acacttcaccctcgt

SEQ ID NO: 855966 - DNA, 15 bp, Homo sapiens
cacttcaccctcgtg

SEQ ID NO: 855967 - DNA, 15 bp, Homo sapiens
acttcaccctcgtga

SEQ ID NO: 855968 - DNA, 15 bp, Homo sapiens
cttcaccctcgtgat

SEQ ID NO: 855969 - DNA, 15 bp, Homo sapiens
ttcaccctcgtgatt

SEQ ID NO: 855970 - DNA, 15 bp, Homo sapiens
tcaccctcgtgattg

SEQ ID NO: 855971 - DNA, 15 bp, Homo sapiens
caccctcgtgattgc

SEQ ID NO: 855972 - DNA, 15 bp, Homo sapiens
accctcgtgattgca

SEQ ID NO: 855973 - DNA, 15 bp, Homo sapiens
ccctcgtgattgcat

SEQ ID NO: 855974 - DNA, 15 bp, Homo sapiens
cctcgtgattgcatg

SEQ ID NO: 855975 - DNA, 15 bp, Homo sapiens
ctcgtgattgcatga

SEQ ID NO: 855976 - DNA, 15 bp, Homo sapiens
tcgtgattgcatgaa

SEQ ID NO: 855977 - DNA, 15 bp, Homo sapiens
cgtgattgcatgaag

SEQ ID NO: 855978 - DNA, 15 bp, Homo sapiens
gtgattgcatgaagt

SEQ ID NO: 855979 - DNA, 15 bp, Homo sapiens
tgattgcatgaagtc

SEQ ID NO: 855980 - DNA, 15 bp, Homo sapiens
gattgcatgaagtca

SEQ ID NO: 855981 - DNA, 15 bp, Homo sapiens
attgcatgaagtcag

SEQ ID NO: 855982 - DNA, 15 bp, Homo sapiens
ttgcatgaagtcaga

SEQ ID NO: 855983 - DNA, 15 bp, Homo sapiens
tgcatgaagtcagag

SEQ ID NO: 855984 - DNA, 15 bp, Homo sapiens
gcatgaagtcagagg

SEQ ID NO: 855985 - DNA, 15 bp, Homo sapiens
catgaagtcagaggg

SEQ ID NO: 855986 - DNA, 15 bp, Homo sapiens
atgaagtcagagggc

SEQ ID NO: 855987 - DNA, 15 bp, Homo sapiens
tgaagtcagagggct

SEQ ID NO: 855988 - DNA, 15 bp, Homo sapiens
gaagtcagagggctt

SEQ ID NO: 855989 - DNA, 15 bp, Homo sapiens
aagtcagagggcttg

SEQ ID NO: 855990 - DNA, 15 bp, Homo sapiens
agtcagagggcttgt

SEQ ID NO: 855991 - DNA, 15 bp, Homo sapiens
gtcagagggcttgtt

SEQ ID NO: 855992 - DNA, 15 bp, Homo sapiens
tcagagggcttgtta

SEQ ID NO: 855993 - DNA, 15 bp, Homo sapiens
cagagggcttgttat

SEQ ID NO: 855994 - DNA, 15 bp, Homo sapiens
agagggcttgttata

SEQ ID NO: 855995 - DNA, 15 bp, Homo sapiens
gagggcttgttatac

SEQ ID NO: 855996 - DNA, 15 bp, Homo sapiens
agggcttgttatacc

SEQ ID NO: 855997 - DNA, 15 bp, Homo sapiens
gggcttgttataccc

SEQ ID NO: 855998 - DNA, 15 bp, Homo sapiens
ggcttgttataccca

SEQ ID NO: 855999 - DNA, 15 bp, Homo sapiens
gcttgttatacccat

SEQ ID NO: 856000 - DNA, 15 bp, Homo sapiens
cttgttatacccatg

SEQ ID NO: 856001 - DNA, 15 bp, Homo sapiens
ttgttatacccatgt

SEQ ID NO: 856002 - DNA, 15 bp, Homo sapiens
tgttatacccatgtg

SEQ ID NO: 856003 - DNA, 15 bp, Homo sapiens
gttatacccatgtga

SEQ ID NO: 856004 - DNA, 15 bp, Homo sapiens
ttatacccatgtgaa

SEQ ID NO: 856005 - DNA, 15 bp, Homo sapiens
tatacccatgtgaag

SEQ ID NO: 856006 - DNA, 15 bp, Homo sapiens
atacccatgtgaaga

SEQ ID NO: 856007 - DNA, 15 bp, Homo sapiens
tacccatgtgaagag

SEQ ID NO: 856008 - DNA, 15 bp, Homo sapiens
acccatgtgaagagt

SEQ ID NO: 856009 - DNA, 15 bp, Homo sapiens
cccatgtgaagagtt

SEQ ID NO: 856010 - DNA, 15 bp, Homo sapiens
ccatgtgaagagttg

SEQ ID NO: 856011 - DNA, 15 bp, Homo sapiens
catgtgaagagttgg

SEQ ID NO: 856012 - DNA, 15 bp, Homo sapiens
atgtgaagagttggc

SEQ ID NO: 856013 - DNA, 15 bp, Homo sapiens
tgtgaagagttggcg

SEQ ID NO: 856014 - DNA, 15 bp, Homo sapiens
gtgaagagttggcgg

SEQ ID NO: 856015 - DNA, 15 bp, Homo sapiens
tgaagagttggcgga

SEQ ID NO: 856016 - DNA, 15 bp, Homo sapiens
gaagagttggcggag

SEQ ID NO: 856017 - DNA, 15 bp, Homo sapiens
aagagttggcggagg

SEQ ID NO: 856018 - DNA, 15 bp, Homo sapiens
agagttggcggaggg

SEQ ID NO: 856019 - DNA, 15 bp, Homo sapiens
gagttggcggagggg

SEQ ID NO: 856020 - DNA, 15 bp, Homo sapiens
agttggcggaggggt

SEQ ID NO: 856021 - DNA, 15 bp, Homo sapiens
gttggcggaggggtc

SEQ ID NO: 856022 - DNA, 15 bp, Homo sapiens
ttggcggaggggtca

SEQ ID NO: 856023 - DNA, 15 bp, Homo sapiens
tggcggaggggtcat

SEQ ID NO: 856024 - DNA, 15 bp, Homo sapiens
ggcggaggggtcatt

SEQ ID NO: 856025 - DNA, 15 bp, Homo sapiens
gcggaggggtcatta

SEQ ID NO: 856026 - DNA, 15 bp, Homo sapiens
cggaggggtcattag

SEQ ID NO: 856027 - DNA, 15 bp, Homo sapiens
ggaggggtcattagg

SEQ ID NO: 856028 - DNA, 15 bp, Homo sapiens
gaggggtcattagga

SEQ ID NO: 856029 - DNA, 15 bp, Homo sapiens
aggggtcattaggag

SEQ ID NO: 856030 - DNA, 15 bp, Homo sapiens
ggggtcattaggagg

SEQ ID NO: 856031 - DNA, 15 bp, Homo sapiens
gggtcattaggaggt

SEQ ID NO: 856032 - DNA, 15 bp, Homo sapiens
ggtcattaggaggtg

SEQ ID NO: 856033 - DNA, 15 bp, Homo sapiens
gtcattaggaggtgc

SEQ ID NO: 856034 - DNA, 15 bp, Homo sapiens
tcattaggaggtgct

SEQ ID NO: 856035 - DNA, 15 bp, Homo sapiens
cattaggaggtgctt

SEQ ID NO: 856036 - DNA, 15 bp, Homo sapiens
attaggaggtgctta

SEQ ID NO: 856037 - DNA, 15 bp, Homo sapiens
ttaggaggtgcttat

SEQ ID NO: 856038 - DNA, 15 bp, Homo sapiens
taggaggtgcttatg

SEQ ID NO: 856039 - DNA, 15 bp, Homo sapiens
aggaggtgcttatgg

SEQ ID NO: 856040 - DNA, 15 bp, Homo sapiens
ggaggtgcttatgga

SEQ ID NO: 856041 - DNA, 15 bp, Homo sapiens
gaggtgcttatggag

SEQ ID NO: 856042 - DNA, 15 bp, Homo sapiens
aggtgcttatggaga

SEQ ID NO: 856043 - DNA, 15 bp, Homo sapiens
ggtgcttatggagag

SEQ ID NO: 856044 - DNA, 15 bp, Homo sapiens
gtgcttatggagagc

SEQ ID NO: 856045 - DNA, 15 bp, Homo sapiens
tgcttatggagagcc

SEQ ID NO: 856046 - DNA, 15 bp, Homo sapiens
gcttatggagagccg

SEQ ID NO: 856047 - DNA, 15 bp, Homo sapiens
cttatggagagccgc

SEQ ID NO: 856048 - DNA, 15 bp, Homo sapiens
ttatggagagccgct

SEQ ID NO: 856049 - DNA, 15 bp, Homo sapiens
tatggagagccgctg

SEQ ID NO: 856050 - DNA, 15 bp, Homo sapiens
atggagagccgctgc

SEQ ID NO: 856051 - DNA, 15 bp, Homo sapiens
tggagagccgctgct

SEQ ID NO: 856052 - DNA, 15 bp, Homo sapiens
ggagagccgctgctc

SEQ ID NO: 856053 - DNA, 15 bp, Homo sapiens
gagagccgctgctca

SEQ ID NO: 856054 - DNA, 15 bp, Homo sapiens
agagccgctgctcag

SEQ ID NO: 856055 - DNA, 15 bp, Homo sapiens
gagccgctgctcagt

SEQ ID NO: 856056 - DNA, 15 bp, Homo sapiens
agccgctgctcagtg

SEQ ID NO: 856057 - DNA, 15 bp, Homo sapiens
gccgctgctcagtgc

SEQ ID NO: 856058 - DNA, 15 bp, Homo sapiens
ccgctgctcagtgca

SEQ ID NO: 856059 - DNA, 15 bp, Homo sapiens
cgctgctcagtgcag

SEQ ID NO: 856060 - DNA, 15 bp, Homo sapiens
gctgctcagtgcagg

SEQ ID NO: 856061 - DNA, 15 bp, Homo sapiens
ctgctcagtgcaggc

SEQ ID NO: 856062 - DNA, 15 bp, Homo sapiens
tgctcagtgcaggcc

SEQ ID NO: 856063 - DNA, 15 bp, Homo sapiens
gctcagtgcaggccg

SEQ ID NO: 856064 - DNA, 15 bp, Homo sapiens
ctcagtgcaggccgt

SEQ ID NO: 856065 - DNA, 15 bp, Homo sapiens
tcagtgcaggccgtg

SEQ ID NO: 856066 - DNA, 15 bp, Homo sapiens
cagtgcaggccgtgc

SEQ ID NO: 856067 - DNA, 15 bp, Homo sapiens
agtgcaggccgtgct

SEQ ID NO: 856068 - DNA, 15 bp, Homo sapiens
gtgcaggccgtgcta

SEQ ID NO: 856069 - DNA, 15 bp, Homo sapiens
tgcaggccgtgctat

SEQ ID NO: 856070 - DNA, 15 bp, Homo sapiens
gcaggccgtgctatt

SEQ ID NO: 856071 - DNA, 15 bp, Homo sapiens
caggccgtgctatta

SEQ ID NO: 856072 - DNA, 15 bp, Homo sapiens
aggccgtgctattag

SEQ ID NO: 856073 - DNA, 15 bp, Homo sapiens
ggccgtgctattagt

SEQ ID NO: 856074 - DNA, 15 bp, Homo sapiens
gccgtgctattagtg

SEQ ID NO: 856075 - DNA, 15 bp, Homo sapiens
ccgtgctattagtgt

SEQ ID NO: 856076 - DNA, 15 bp, Homo sapiens
cgtgctattagtgtg

SEQ ID NO: 856077 - DNA, 15 bp, Homo sapiens
gtgctattagtgtgg

SEQ ID NO: 856078 - DNA, 15 bp, Homo sapiens
tgctattagtgtgga

SEQ ID NO: 856079 - DNA, 15 bp, Homo sapiens
gctattagtgtggac

SEQ ID NO: 856080 - DNA, 15 bp, Homo sapiens
ctattagtgtggact

SEQ ID NO: 856081 - DNA, 15 bp, Homo sapiens
tattagtgtggactg

SEQ ID NO: 856082 - DNA, 15 bp, Homo sapiens
attagtgtggactgc

SEQ ID NO: 856083 - DNA, 15 bp, Homo sapiens
ttagtgtggactgct

SEQ ID NO: 856084 - DNA, 15 bp, Homo sapiens
tagtgtggactgctg

SEQ ID NO: 856085 - DNA, 15 bp, Homo sapiens
agtgtggactgctgc

SEQ ID NO: 856086 - DNA, 15 bp, Homo sapiens
gtgtggactgctgct

SEQ ID NO: 856087 - DNA, 15 bp, Homo sapiens
tgtggactgctgctg

SEQ ID NO: 856088 - DNA, 15 bp, Homo sapiens
gtggactgctgctgt

SEQ ID NO: 856089 - DNA, 15 bp, Homo sapiens
tggactgctgctgtc

SEQ ID NO: 856090 - DNA, 15 bp, Homo sapiens
ggactgctgctgtct

SEQ ID NO: 856091 - DNA, 15 bp, Homo sapiens
gactgctgctgtctg

SEQ ID NO: 856092 - DNA, 15 bp, Homo sapiens
actgctgctgtctga

SEQ ID NO: 856093 - DNA, 15 bp, Homo sapiens
ctgctgctgtctgat

SEQ ID NO: 856094 - DNA, 15 bp, Homo sapiens
tgctgctgtctgatt

SEQ ID NO: 856095 - DNA, 15 bp, Homo sapiens
gctgctgtctgattt

SEQ ID NO: 856096 - DNA, 15 bp, Homo sapiens
ctgctgtctgatttg

SEQ ID NO: 856097 - DNA, 15 bp, Homo sapiens
tgctgtctgatttgg

SEQ ID NO: 856098 - DNA, 15 bp, Homo sapiens
gctgtctgatttggg

SEQ ID NO: 856099 - DNA, 15 bp, Homo sapiens
ctgtctgatttggga

SEQ ID NO: 856100 - DNA, 15 bp, Homo sapiens
tgtctgatttgggag

SEQ ID NO: 856101 - DNA, 15 bp, Homo sapiens
gtctgatttgggagg

SEQ ID NO: 856102 - DNA, 15 bp, Homo sapiens
tctgatttgggagga

SEQ ID NO: 856103 - DNA, 15 bp, Homo sapiens
ctgatttgggaggaa

SEQ ID NO: 856104 - DNA, 15 bp, Homo sapiens
tgatttgggaggaat

SEQ ID NO: 856105 - DNA, 15 bp, Homo sapiens
gatttgggaggaatc

SEQ ID NO: 856106 - DNA, 15 bp, Homo sapiens
atttgggaggaatct

SEQ ID NO: 856107 - DNA, 15 bp, Homo sapiens
tttgggaggaatctc

SEQ ID NO: 856108 - DNA, 15 bp, Homo sapiens
ttgggaggaatctca

SEQ ID NO: 856109 - DNA, 15 bp, Homo sapiens
tgggaggaatctcac

SEQ ID NO: 856110 - DNA, 15 bp, Homo sapiens
gggaggaatctcact

SEQ ID NO: 856111 - DNA, 15 bp, Homo sapiens
ggaggaatctcactg

SEQ ID NO: 856112 - DNA, 15 bp, Homo sapiens
gaggaatctcactgc

SEQ ID NO: 856113 - DNA, 15 bp, Homo sapiens
aggaatctcactgct

SEQ ID NO: 856114 - DNA, 15 bp, Homo sapiens
ggaatctcactgctg

SEQ ID NO: 856115 - DNA, 15 bp, Homo sapiens
gaatctcactgctgc

SEQ ID NO: 856116 - DNA, 15 bp, Homo sapiens
aatctcactgctgcc

SEQ ID NO: 856117 - DNA, 15 bp, Homo sapiens
atctcactgctgcct

SEQ ID NO: 856118 - DNA, 15 bp, Homo sapiens
tctcactgctgcctg

SEQ ID NO: 856119 - DNA, 15 bp, Homo sapiens
ctcactgctgcctgt

SEQ ID NO: 856120 - DNA, 15 bp, Homo sapiens
tcactgctgcctgtg

SEQ ID NO: 856121 - DNA, 15 bp, Homo sapiens
cactgctgcctgtgg

SEQ ID NO: 856122 - DNA, 15 bp, Homo sapiens
actgctgcctgtggt

SEQ ID NO: 856123 - DNA, 15 bp, Homo sapiens
ctgctgcctgtggtt

SEQ ID NO: 856124 - DNA, 15 bp, Homo sapiens
tgctgcctgtggttg

SEQ ID NO: 856125 - DNA, 15 bp, Homo sapiens
gctgcctgtggttgt

SEQ ID NO: 856126 - DNA, 15 bp, Homo sapiens
ctgcctgtggttgta

SEQ ID NO: 856127 - DNA, 15 bp, Homo sapiens
tgcctgtggttgtag

SEQ ID NO: 856128 - DNA, 15 bp, Homo sapiens
gcctgtggttgtagg

SEQ ID NO: 856129 - DNA, 15 bp, Homo sapiens
cctgtggttgtaggg

SEQ ID NO: 856130 - DNA, 15 bp, Homo sapiens
ctgtggttgtagggc

SEQ ID NO: 856131 - DNA, 15 bp, Homo sapiens
tgtggttgtagggca

SEQ ID NO: 856132 - DNA, 15 bp, Homo sapiens
gtggttgtagggcag

SEQ ID NO: 856133 - DNA, 15 bp, Homo sapiens
tggttgtagggcaga

SEQ ID NO: 856134 - DNA, 15 bp, Homo sapiens
ggttgtagggcagaa

SEQ ID NO: 856135 - DNA, 15 bp, Homo sapiens
gttgtagggcagaac

SEQ ID NO: 856136 - DNA, 15 bp, Homo sapiens
ttgtagggcagaaca

SEQ ID NO: 856137 - DNA, 15 bp, Homo sapiens
tgtagggcagaacag

SEQ ID NO: 856138 - DNA, 15 bp, Homo sapiens
gtagggcagaacagt

SEQ ID NO: 856139 - DNA, 15 bp, Homo sapiens
tagggcagaacagtt

SEQ ID NO: 856140 - DNA, 15 bp, Homo sapiens
agggcagaacagtta

SEQ ID NO: 856141 - DNA, 15 bp, Homo sapiens
gggcagaacagttaa

SEQ ID NO: 856142 - DNA, 15 bp, Homo sapiens
ggcagaacagttaaa

SEQ ID NO: 856143 - DNA, 15 bp, Homo sapiens
gcagaacagttaaat

SEQ ID NO: 856144 - DNA, 15 bp, Homo sapiens
cagaacagttaaatc

SEQ ID NO: 856145 - DNA, 15 bp, Homo sapiens
agaacagttaaatct

SEQ ID NO: 856146 - DNA, 15 bp, Homo sapiens
gaacagttaaatctt

SEQ ID NO: 856147 - DNA, 15 bp, Homo sapiens
aacagttaaatcttc

SEQ ID NO: 856148 - DNA, 15 bp, Homo sapiens
acagttaaatcttca

SEQ ID NO: 856149 - DNA, 15 bp, Homo sapiens
cagttaaatcttcat

SEQ ID NO: 856150 - DNA, 15 bp, Homo sapiens
agttaaatcttcata

SEQ ID NO: 856151 - DNA, 15 bp, Homo sapiens
gttaaatcttcatag

SEQ ID NO: 856152 - DNA, 15 bp, Homo sapiens
ttaaatcttcatagc

SEQ ID NO: 856153 - DNA, 15 bp, Homo sapiens
taaatcttcatagcc

SEQ ID NO: 856154 - DNA, 15 bp, Homo sapiens
aaatcttcatagcct

SEQ ID NO: 856155 - DNA, 15 bp, Homo sapiens
aatcttcatagcctt

SEQ ID NO: 856156 - DNA, 15 bp, Homo sapiens
atcttcatagccttt

SEQ ID NO: 856157 - DNA, 15 bp, Homo sapiens
tcttcatagcctttt

SEQ ID NO: 856158 - DNA, 15 bp, Homo sapiens
cttcatagccttttg

SEQ ID NO: 856159 - DNA, 15 bp, Homo sapiens
ttcatagccttttgg

SEQ ID NO: 856160 - DNA, 15 bp, Homo sapiens
tcatagccttttggt

SEQ ID NO: 856161 - DNA, 15 bp, Homo sapiens
catagccttttggta

SEQ ID NO: 856162 - DNA, 15 bp, Homo sapiens
atagccttttggtat

SEQ ID NO: 856163 - DNA, 15 bp, Homo sapiens
tagccttttggtatt

SEQ ID NO: 856164 - DNA, 15 bp, Homo sapiens
agccttttggtatta

SEQ ID NO: 856165 - DNA, 15 bp, Homo sapiens
gccttttggtattat

SEQ ID NO: 856166 - DNA, 15 bp, Homo sapiens
ccttttggtattatt

SEQ ID NO: 856167 - DNA, 15 bp, Homo sapiens
cttttggtattattg

SEQ ID NO: 856168 - DNA, 15 bp, Homo sapiens
ttttggtattattga

SEQ ID NO: 856169 - DNA, 15 bp, Homo sapiens
tttggtattattgag

SEQ ID NO: 856170 - DNA, 15 bp, Homo sapiens
ttggtattattgagt

SEQ ID NO: 856171 - DNA, 15 bp, Homo sapiens
tggtattattgagtg

SEQ ID NO: 856172 - DNA, 15 bp, Homo sapiens
ggtattattgagtgt

SEQ ID NO: 856173 - DNA, 15 bp, Homo sapiens
gtattattgagtgtt

SEQ ID NO: 856174 - DNA, 15 bp, Homo sapiens
tattattgagtgtta

SEQ ID NO: 856175 - DNA, 15 bp, Homo sapiens
attattgagtgttaa

SEQ ID NO: 856176 - DNA, 15 bp, Homo sapiens
ttattgagtgttaat

SEQ ID NO: 856177 - DNA, 15 bp, Homo sapiens
tattgagtgttaata

SEQ ID NO: 856178 - DNA, 15 bp, Homo sapiens
attgagtgttaataa

SEQ ID NO: 856179 - DNA, 15 bp, Homo sapiens
ttgagtgttaataat

SEQ ID NO: 856180 - DNA, 15 bp, Homo sapiens
tgagtgttaataata

SEQ ID NO: 856181 - DNA, 15 bp, Homo sapiens
gagtgttaataatag

SEQ ID NO: 856182 - DNA, 15 bp, Homo sapiens
agtgttaataatagt

SEQ ID NO: 856183 - DNA, 15 bp, Homo sapiens
gtgttaataatagtc

SEQ ID NO: 856184 - DNA, 15 bp, Homo sapiens
tgttaataatagtca

SEQ ID NO: 856185 - DNA, 15 bp, Homo sapiens
gttaataatagtcat

SEQ ID NO: 856186 - DNA, 15 bp, Homo sapiens
ttaataatagtcatg

SEQ ID NO: 856187 - DNA, 15 bp, Homo sapiens
taataatagtcatga

SEQ ID NO: 856188 - DNA, 15 bp, Homo sapiens
aataatagtcatgac

SEQ ID NO: 856189 - DNA, 15 bp, Homo sapiens
ataatagtcatgaca

SEQ ID NO: 856190 - DNA, 15 bp, Homo sapiens
taatagtcatgacac

SEQ ID NO: 856191 - DNA, 15 bp, Homo sapiens
aatagtcatgacaca

SEQ ID NO: 856192 - DNA, 15 bp, Homo sapiens
atagtcatgacacaa

SEQ ID NO: 856193 - DNA, 15 bp, Homo sapiens
tagtcatgacacaag

SEQ ID NO: 856194 - DNA, 15 bp, Homo sapiens
agtcatgacacaagt

SEQ ID NO: 856195 - DNA, 15 bp, Homo sapiens
gtcatgacacaagta

SEQ ID NO: 856196 - DNA, 15 bp, Homo sapiens
tcatgacacaagtac

SEQ ID NO: 856197 - DNA, 15 bp, Homo sapiens
catgacacaagtaca

SEQ ID NO: 856198 - DNA, 15 bp, Homo sapiens
atgacacaagtacag

SEQ ID NO: 856199 - DNA, 15 bp, Homo sapiens
tgacacaagtacagt

SEQ ID NO: 856200 - DNA, 15 bp, Homo sapiens
gacacaagtacagtt

SEQ ID NO: 856201 - DNA, 15 bp, Homo sapiens
acacaagtacagttt

SEQ ID NO: 856202 - DNA, 15 bp, Homo sapiens
cacaagtacagtttc

SEQ ID NO: 856203 - DNA, 15 bp, Homo sapiens
acaagtacagtttcc

SEQ ID NO: 856204 - DNA, 15 bp, Homo sapiens
caagtacagtttcct

SEQ ID NO: 856205 - DNA, 15 bp, Homo sapiens
aagtacagtttcctc

SEQ ID NO: 856206 - DNA, 15 bp, Homo sapiens
agtacagtttcctcc

SEQ ID NO: 856207 - DNA, 15 bp, Homo sapiens
gtacagtttcctcct

SEQ ID NO: 856208 - DNA, 15 bp, Homo sapiens
tacagtttcctcctg

SEQ ID NO: 856209 - DNA, 15 bp, Homo sapiens
acagtttcctcctgt

SEQ ID NO: 856210 - DNA, 15 bp, Homo sapiens
cagtttcctcctgtc

SEQ ID NO: 856211 - DNA, 15 bp, Homo sapiens
agtttcctcctgtca

SEQ ID NO: 856212 - DNA, 15 bp, Homo sapiens
gtttcctcctgtcag

SEQ ID NO: 856213 - DNA, 15 bp, Homo sapiens
tttcctcctgtcagg

SEQ ID NO: 856214 - DNA, 15 bp, Homo sapiens
ttcctcctgtcaggt

SEQ ID NO: 856215 - DNA, 15 bp, Homo sapiens
tcctcctgtcaggta

SEQ ID NO: 856216 - DNA, 15 bp, Homo sapiens
cctcctgtcaggtat

SEQ ID NO: 856217 - DNA, 15 bp, Homo sapiens
ctcctgtcaggtatt

SEQ ID NO: 856218 - DNA, 15 bp, Homo sapiens
tcctgtcaggtattg

SEQ ID NO: 856219 - DNA, 15 bp, Homo sapiens
cctgtcaggtattgt

SEQ ID NO: 856220 - DNA, 15 bp, Homo sapiens
ctgtcaggtattgtt

SEQ ID NO: 856221 - DNA, 15 bp, Homo sapiens
tgtcaggtattgtta

SEQ ID NO: 856222 - DNA, 15 bp, Homo sapiens
gtcaggtattgttat

SEQ ID NO: 856223 - DNA, 15 bp, Homo sapiens
tcaggtattgttata

SEQ ID NO: 856224 - DNA, 15 bp, Homo sapiens
caggtattgttataa

SEQ ID NO: 856225 - DNA, 15 bp, Homo sapiens
aggtattgttataag

SEQ ID NO: 856226 - DNA, 15 bp, Homo sapiens
ggtattgttataagt

SEQ ID NO: 856227 - DNA, 15 bp, Homo sapiens
gtattgttataagta

SEQ ID NO: 856228 - DNA, 15 bp, Homo sapiens
tattgttataagtaa

SEQ ID NO: 856229 - DNA, 15 bp, Homo sapiens
attgttataagtaat

SEQ ID NO: 856230 - DNA, 15 bp, Homo sapiens
ttgttataagtaatg

SEQ ID NO: 856231 - DNA, 15 bp, Homo sapiens
tgttataagtaatgg

SEQ ID NO: 856232 - DNA, 15 bp, Homo sapiens
gttataagtaatggt

SEQ ID NO: 856233 - DNA, 15 bp, Homo sapiens
ttataagtaatggta

SEQ ID NO: 856234 - DNA, 15 bp, Homo sapiens
tataagtaatggtag

SEQ ID NO: 856235 - DNA, 15 bp, Homo sapiens
ataagtaatggtaga

SEQ ID NO: 856236 - DNA, 15 bp, Homo sapiens
taagtaatggtagat

SEQ ID NO: 856237 - DNA, 15 bp, Homo sapiens
aagtaatggtagatg

SEQ ID NO: 856238 - DNA, 15 bp, Homo sapiens
agtaatggtagatgt

SEQ ID NO: 856239 - DNA, 15 bp, Homo sapiens
gtaatggtagatgtt

SEQ ID NO: 856240 - DNA, 15 bp, Homo sapiens
taatggtagatgttc

SEQ ID NO: 856241 - DNA, 15 bp, Homo sapiens
aatggtagatgttct

SEQ ID NO: 856242 - DNA, 15 bp, Homo sapiens
atggtagatgttctt

SEQ ID NO: 856243 - DNA, 15 bp, Homo sapiens
tggtagatgttcttg

SEQ ID NO: 856244 - DNA, 15 bp, Homo sapiens
ggtagatgttcttgt

SEQ ID NO: 856245 - DNA, 15 bp, Homo sapiens
gtagatgttcttgtg

SEQ ID NO: 856246 - DNA, 15 bp, Homo sapiens
tagatgttcttgtga

SEQ ID NO: 856247 - DNA, 15 bp, Homo sapiens
agatgttcttgtgac

SEQ ID NO: 856248 - DNA, 15 bp, Homo sapiens
gatgttcttgtgacc

SEQ ID NO: 856249 - DNA, 15 bp, Homo sapiens
atgttcttgtgacca

SEQ ID NO: 856250 - DNA, 15 bp, Homo sapiens
tgttcttgtgaccac

SEQ ID NO: 856251 - DNA, 15 bp, Homo sapiens
gttcttgtgaccaca

SEQ ID NO: 856252 - DNA, 15 bp, Homo sapiens
ttcttgtgaccacaa

SEQ ID NO: 856253 - DNA, 15 bp, Homo sapiens
tcttgtgaccacaaa

SEQ ID NO: 856254 - DNA, 15 bp, Homo sapiens
cttgtgaccacaaaa

SEQ ID NO: 856255 - DNA, 15 bp, Homo sapiens
ttgtgaccacaaaaa

SEQ ID NO: 856256 - DNA, 15 bp, Homo sapiens
tgtgaccacaaaaaa

SEQ ID NO: 856257 - DNA, 15 bp, Homo sapiens
gtgaccacaaaaaat

SEQ ID NO: 856258 - DNA, 15 bp, Homo sapiens
tgaccacaaaaaatt

SEQ ID NO: 856259 - DNA, 15 bp, Homo sapiens
gaccacaaaaaatta

SEQ ID NO: 856260 - DNA, 15 bp, Homo sapiens
accacaaaaaattat

SEQ ID NO: 856261 - DNA, 15 bp, Homo sapiens
ccacaaaaaattatt

SEQ ID NO: 856262 - DNA, 15 bp, Homo sapiens
cacaaaaaattattt

SEQ ID NO: 856263 - DNA, 15 bp, Homo sapiens
acaaaaaattatttt

SEQ ID NO: 856264 - DNA, 15 bp, Homo sapiens
caaaaaattattttg

SEQ ID NO: 856265 - DNA, 15 bp, Homo sapiens
aaaaaattattttgc

SEQ ID NO: 856266 - DNA, 15 bp, Homo sapiens
aaaaattattttgca

SEQ ID NO: 856267 - DNA, 15 bp, Homo sapiens
aaaattattttgcaa

SEQ ID NO: 856268 - DNA, 15 bp, Homo sapiens
aaattattttgcaat

SEQ ID NO: 856269 - DNA, 15 bp, Homo sapiens
aattattttgcaata

SEQ ID NO: 856270 - DNA, 15 bp, Homo sapiens
attattttgcaataa

SEQ ID NO: 856271 - DNA, 15 bp, Homo sapiens
ttattttgcaataat

SEQ ID NO: 856272 - DNA, 15 bp, Homo sapiens
tattttgcaataatg

SEQ ID NO: 856273 - DNA, 15 bp, Homo sapiens
attttgcaataatga

SEQ ID NO: 856274 - DNA, 15 bp, Homo sapiens
ttttgcaataatgat

SEQ ID NO: 856275 - DNA, 15 bp, Homo sapiens
tttgcaataatgatc

SEQ ID NO: 856276 - DNA, 15 bp, Homo sapiens
ttgcaataatgatct

SEQ ID NO: 856277 - DNA, 15 bp, Homo sapiens
tgcaataatgatctg

SEQ ID NO: 856278 - DNA, 15 bp, Homo sapiens
gcaataatgatctgc

SEQ ID NO: 856279 - DNA, 15 bp, Homo sapiens
caataatgatctgct

SEQ ID NO: 856280 - DNA, 15 bp, Homo sapiens
aataatgatctgctc

SEQ ID NO: 856281 - DNA, 15 bp, Homo sapiens
ataatgatctgctcg

SEQ ID NO: 856282 - DNA, 15 bp, Homo sapiens
taatgatctgctcgg

SEQ ID NO: 856283 - DNA, 15 bp, Homo sapiens
aatgatctgctcgga

SEQ ID NO: 856284 - DNA, 15 bp, Homo sapiens
atgatctgctcggag

SEQ ID NO: 856285 - DNA, 15 bp, Homo sapiens
tgatctgctcggagg

SEQ ID NO: 856286 - DNA, 15 bp, Homo sapiens
gatctgctcggaggt

SEQ ID NO: 856287 - DNA, 15 bp, Homo sapiens
atctgctcggaggtc

SEQ ID NO: 856288 - DNA, 15 bp, Homo sapiens
tctgctcggaggtct

SEQ ID NO: 856289 - DNA, 15 bp, Homo sapiens
ctgctcggaggtctc

SEQ ID NO: 856290 - DNA, 15 bp, Homo sapiens
tgctcggaggtctcc

SEQ ID NO: 856291 - DNA, 15 bp, Homo sapiens
gctcggaggtctccc

SEQ ID NO: 856292 - DNA, 15 bp, Homo sapiens
ctcggaggtctccca

SEQ ID NO: 856293 - DNA, 15 bp, Homo sapiens
tcggaggtctcccaa

SEQ ID NO: 856294 - DNA, 15 bp, Homo sapiens
cggaggtctcccaac

SEQ ID NO: 856295 - DNA, 15 bp, Homo sapiens
ggaggtctcccaacc

SEQ ID NO: 856296 - DNA, 15 bp, Homo sapiens
gaggtctcccaacca

SEQ ID NO: 856297 - DNA, 15 bp, Homo sapiens
aggtctcccaaccag

SEQ ID NO: 856298 - DNA, 15 bp, Homo sapiens
ggtctcccaaccagg

SEQ ID NO: 856299 - DNA, 15 bp, Homo sapiens
gtctcccaaccaggt

SEQ ID NO: 856300 - DNA, 15 bp, Homo sapiens
tctcccaaccaggtg

SEQ ID NO: 856301 - DNA, 15 bp, Homo sapiens
ctcccaaccaggtga

SEQ ID NO: 856302 - DNA, 15 bp, Homo sapiens
tcccaaccaggtgaa

SEQ ID NO: 856303 - DNA, 15 bp, Homo sapiens
cccaaccaggtgaac

SEQ ID NO: 856304 - DNA, 15 bp, Homo sapiens
ccaaccaggtgaaca

SEQ ID NO: 856305 - DNA, 15 bp, Homo sapiens
caaccaggtgaacaa

SEQ ID NO: 856306 - DNA, 15 bp, Homo sapiens
aaccaggtgaacaaa

SEQ ID NO: 856307 - DNA, 15 bp, Homo sapiens
accaggtgaacaaag

SEQ ID NO: 856308 - DNA, 15 bp, Homo sapiens
ccaggtgaacaaagg

SEQ ID NO: 856309 - DNA, 15 bp, Homo sapiens
caggtgaacaaaggt

SEQ ID NO: 856310 - DNA, 15 bp, Homo sapiens
aggtgaacaaaggtt

SEQ ID NO: 856311 - DNA, 15 bp, Homo sapiens
ggtgaacaaaggttc

SEQ ID NO: 856312 - DNA, 15 bp, Homo sapiens
gtgaacaaaggttca

SEQ ID NO: 856313 - DNA, 15 bp, Homo sapiens
tgaacaaaggttcac

SEQ ID NO: 856314 - DNA, 15 bp, Homo sapiens
gaacaaaggttcacc

SEQ ID NO: 856315 - DNA, 15 bp, Homo sapiens
aacaaaggttcacct

SEQ ID NO: 856316 - DNA, 15 bp, Homo sapiens
acaaaggttcacctg

SEQ ID NO: 856317 - DNA, 15 bp, Homo sapiens
caaaggttcacctgg

SEQ ID NO: 856318 - DNA, 15 bp, Homo sapiens
aaaggttcacctggg

SEQ ID NO: 856319 - DNA, 15 bp, Homo sapiens
aaggttcacctgggt

SEQ ID NO: 856320 - DNA, 15 bp, Homo sapiens
aggttcacctgggtc

SEQ ID NO: 856321 - DNA, 15 bp, Homo sapiens
ggttcacctgggtcc

SEQ ID NO: 856322 - DNA, 15 bp, Homo sapiens
gttcacctgggtcct

SEQ ID NO: 856323 - DNA, 15 bp, Homo sapiens
ttcacctgggtcctt

SEQ ID NO: 856324 - DNA, 15 bp, Homo sapiens
tcacctgggtccttc

SEQ ID NO: 856325 - DNA, 15 bp, Homo sapiens
cacctgggtccttcc

SEQ ID NO: 856326 - DNA, 15 bp, Homo sapiens
acctgggtccttcct

SEQ ID NO: 856327 - DNA, 15 bp, Homo sapiens
cctgggtccttcctg

SEQ ID NO: 856328 - DNA, 15 bp, Homo sapiens
ctgggtccttcctgt

SEQ ID NO: 856329 - DNA, 15 bp, Homo sapiens
tgggtccttcctgta

SEQ ID NO: 856330 - DNA, 15 bp, Homo sapiens
gggtccttcctgtat

SEQ ID NO: 856331 - DNA, 15 bp, Homo sapiens
ggtccttcctgtatg

SEQ ID NO: 856332 - DNA, 15 bp, Homo sapiens
gtccttcctgtatga

SEQ ID NO: 856333 - DNA, 15 bp, Homo sapiens
tccttcctgtatgac

SEQ ID NO: 856334 - DNA, 15 bp, Homo sapiens
ccttcctgtatgact

SEQ ID NO: 856335 - DNA, 15 bp, Homo sapiens
cttcctgtatgacta

SEQ ID NO: 856336 - DNA, 15 bp, Homo sapiens
ttcctgtatgactac

SEQ ID NO: 856337 - DNA, 15 bp, Homo sapiens
tcctgtatgactaca

SEQ ID NO: 856338 - DNA, 15 bp, Homo sapiens
cctgtatgactacag

SEQ ID NO: 856339 - DNA, 15 bp, Homo sapiens
ctgtatgactacaga

SEQ ID NO: 856340 - DNA, 15 bp, Homo sapiens
tgtatgactacagac

SEQ ID NO: 856341 - DNA, 15 bp, Homo sapiens
gtatgactacagacg

SEQ ID NO: 856342 - DNA, 15 bp, Homo sapiens
tatgactacagacgt

SEQ ID NO: 856343 - DNA, 15 bp, Homo sapiens
atgactacagacgta

SEQ ID NO: 856344 - DNA, 15 bp, Homo sapiens
tgactacagacgtat

SEQ ID NO: 856345 - DNA, 15 bp, Homo sapiens
gactacagacgtatc

SEQ ID NO: 856346 - DNA, 15 bp, Homo sapiens
actacagacgtatca

SEQ ID NO: 856347 - DNA, 15 bp, Homo sapiens
ctacagacgtatcac

SEQ ID NO: 856348 - DNA, 15 bp, Homo sapiens
tacagacgtatcact

SEQ ID NO: 856349 - DNA, 15 bp, Homo sapiens
acagacgtatcactt

SEQ ID NO: 856350 - DNA, 15 bp, Homo sapiens
cagacgtatcacttc

SEQ ID NO: 856351 - DNA, 15 bp, Homo sapiens
agacgtatcacttca

SEQ ID NO: 856352 - DNA, 15 bp, Homo sapiens
gacgtatcacttcat

SEQ ID NO: 856353 - DNA, 15 bp, Homo sapiens
acgtatcacttcatg

SEQ ID NO: 856354 - DNA, 15 bp, Homo sapiens
cgtatcacttcatga

SEQ ID NO: 856355 - DNA, 15 bp, Homo sapiens
gtatcacttcatgac

SEQ ID NO: 856356 - DNA, 15 bp, Homo sapiens
tatcacttcatgacc

SEQ ID NO: 856357 - DNA, 15 bp, Homo sapiens
atcacttcatgacca

SEQ ID NO: 856358 - DNA, 15 bp, Homo sapiens
tcacttcatgaccac

SEQ ID NO: 856359 - DNA, 15 bp, Homo sapiens
cacttcatgaccaca

SEQ ID NO: 856360 - DNA, 15 bp, Homo sapiens
acttcatgaccacaa

SEQ ID NO: 856361 - DNA, 15 bp, Homo sapiens
cttcatgaccacaac

SEQ ID NO: 856362 - DNA, 15 bp, Homo sapiens
ttcatgaccacaaca

SEQ ID NO: 856363 - DNA, 15 bp, Homo sapiens
tcatgaccacaacac

SEQ ID NO: 856364 - DNA, 15 bp, Homo sapiens
catgaccacaacact

SEQ ID NO: 856365 - DNA, 15 bp, Homo sapiens
atgaccacaacactt

SEQ ID NO: 856366 - DNA, 15 bp, Homo sapiens
tgaccacaacacttc

SEQ ID NO: 856367 - DNA, 15 bp, Homo sapiens
gaccacaacacttct

SEQ ID NO: 856368 - DNA, 15 bp, Homo sapiens
accacaacacttctc

SEQ ID NO: 856369 - DNA, 15 bp, Homo sapiens
ccacaacacttctct

SEQ ID NO: 856370 - DNA, 15 bp, Homo sapiens
cacaacacttctctg

SEQ ID NO: 856371 - DNA, 15 bp, Homo sapiens
acaacacttctctgg

SEQ ID NO: 856372 - DNA, 15 bp, Homo sapiens
caacacttctctgga

SEQ ID NO: 856373 - DNA, 15 bp, Homo sapiens
aacacttctctggaa

SEQ ID NO: 856374 - DNA, 15 bp, Homo sapiens
acacttctctggaat

SEQ ID NO: 856375 - DNA, 15 bp, Homo sapiens
cacttctctggaatg

SEQ ID NO: 856376 - DNA, 15 bp, Homo sapiens
acttctctggaatgg

SEQ ID NO: 856377 - DNA, 15 bp, Homo sapiens
cttctctggaatggt

SEQ ID NO: 856378 - DNA, 15 bp, Homo sapiens
ttctctggaatggtt

SEQ ID NO: 856379 - DNA, 15 bp, Homo sapiens
tctctggaatggttt

SEQ ID NO: 856380 - DNA, 15 bp, Homo sapiens
ctctggaatggttta

SEQ ID NO: 856381 - DNA, 15 bp, Homo sapiens
tctggaatggtttat

SEQ ID NO: 856382 - DNA, 15 bp, Homo sapiens
ctggaatggtttatc

SEQ ID NO: 856383 - DNA, 15 bp, Homo sapiens
tggaatggtttatca

SEQ ID NO: 856384 - DNA, 15 bp, Homo sapiens
ggaatggtttatcag

SEQ ID NO: 856385 - DNA, 15 bp, Homo sapiens
gaatggtttatcagt

SEQ ID NO: 856386 - DNA, 15 bp, Homo sapiens
aatggtttatcagta

SEQ ID NO: 856387 - DNA, 15 bp, Homo sapiens
atggtttatcagtag

SEQ ID NO: 856388 - DNA, 15 bp, Homo sapiens
tggtttatcagtagg

SEQ ID NO: 856389 - DNA, 15 bp, Homo sapiens
ggtttatcagtagga

SEQ ID NO: 856390 - DNA, 15 bp, Homo sapiens
gtttatcagtaggaa

SEQ ID NO: 856391 - DNA, 15 bp, Homo sapiens
tttatcagtaggaaa

SEQ ID NO: 856392 - DNA, 15 bp, Homo sapiens
ttatcagtaggaaaa

SEQ ID NO: 856393 - DNA, 15 bp, Homo sapiens
tatcagtaggaaaaa

SEQ ID NO: 856394 - DNA, 15 bp, Homo sapiens
atcagtaggaaaaaa

SEQ ID NO: 856395 - DNA, 15 bp, Homo sapiens
tcagtaggaaaaaag

SEQ ID NO: 856396 - DNA, 15 bp, Homo sapiens
cagtaggaaaaaaga

SEQ ID NO: 856397 - DNA, 15 bp, Homo sapiens
agtaggaaaaaagat

SEQ ID NO: 856398 - DNA, 15 bp, Homo sapiens
gtaggaaaaaagatt

SEQ ID NO: 856399 - DNA, 15 bp, Homo sapiens
taggaaaaaagatta

SEQ ID NO: 856400 - DNA, 15 bp, Homo sapiens
aggaaaaaagattat

SEQ ID NO: 856401 - DNA, 15 bp, Homo sapiens
ggaaaaaagattatg

SEQ ID NO: 856402 - DNA, 15 bp, Homo sapiens
gaaaaaagattatgt

SEQ ID NO: 856403 - DNA, 15 bp, Homo sapiens
aaaaaagattatgtg

SEQ ID NO: 856404 - DNA, 15 bp, Homo sapiens
aaaaagattatgtgt

SEQ ID NO: 856405 - DNA, 15 bp, Homo sapiens
aaaagattatgtgtt

SEQ ID NO: 856406 - DNA, 15 bp, Homo sapiens
aaagattatgtgtta

SEQ ID NO: 856407 - DNA, 15 bp, Homo sapiens
aagattatgtgttaa

SEQ ID NO: 856408 - DNA, 15 bp, Homo sapiens
agattatgtgttaat

SEQ ID NO: 856409 - DNA, 15 bp, Homo sapiens
gattatgtgttaatt

SEQ ID NO: 856410 - DNA, 15 bp, Homo sapiens
attatgtgttaatta

SEQ ID NO: 856411 - DNA, 15 bp, Homo sapiens
ttatgtgttaattac

SEQ ID NO: 856412 - DNA, 15 bp, Homo sapiens
tatgtgttaattacc

SEQ ID NO: 856413 - DNA, 15 bp, Homo sapiens
atgtgttaattacca

SEQ ID NO: 856414 - DNA, 15 bp, Homo sapiens
tgtgttaattaccat

SEQ ID NO: 856415 - DNA, 15 bp, Homo sapiens
gtgttaattaccatc

SEQ ID NO: 856416 - DNA, 15 bp, Homo sapiens
tgttaattaccatcc

SEQ ID NO: 856417 - DNA, 15 bp, Homo sapiens
gttaattaccatcct

SEQ ID NO: 856418 - DNA, 15 bp, Homo sapiens
ttaattaccatcctc

SEQ ID NO: 856419 - DNA, 15 bp, Homo sapiens
taattaccatcctct

SEQ ID NO: 856420 - DNA, 15 bp, Homo sapiens
aattaccatcctcta

SEQ ID NO: 856421 - DNA, 15 bp, Homo sapiens
attaccatcctctat

SEQ ID NO: 856422 - DNA, 15 bp, Homo sapiens
ttaccatcctctata

SEQ ID NO: 856423 - DNA, 15 bp, Homo sapiens
taccatcctctatat

SEQ ID NO: 856424 - DNA, 15 bp, Homo sapiens
accatcctctatatt

SEQ ID NO: 856425 - DNA, 15 bp, Homo sapiens
ccatcctctatattt

SEQ ID NO: 856426 - DNA, 15 bp, Homo sapiens
catcctctatatttt

SEQ ID NO: 856427 - DNA, 15 bp, Homo sapiens
atcctctatattttg

SEQ ID NO: 856428 - DNA, 15 bp, Homo sapiens
tcctctatattttga

SEQ ID NO: 856429 - DNA, 15 bp, Homo sapiens
cctctatattttgat

SEQ ID NO: 856430 - DNA, 15 bp, Homo sapiens
ctctatattttgatt

SEQ ID NO: 856431 - DNA, 15 bp, Homo sapiens
tctatattttgattg

SEQ ID NO: 856432 - DNA, 15 bp, Homo sapiens
ctatattttgattgt

SEQ ID NO: 856433 - DNA, 15 bp, Homo sapiens
tatattttgattgtt

SEQ ID NO: 856434 - DNA, 15 bp, Homo sapiens
atattttgattgttt

SEQ ID NO: 856435 - DNA, 15 bp, Homo sapiens
tattttgattgtttg

SEQ ID NO: 856436 - DNA, 15 bp, Homo sapiens
attttgattgtttgg

SEQ ID NO: 856437 - DNA, 15 bp, Homo sapiens
ttttgattgtttggg

SEQ ID NO: 856438 - DNA, 15 bp, Homo sapiens
tttgattgtttgggg

SEQ ID NO: 856439 - DNA, 15 bp, Homo sapiens
ttgattgtttggggc

SEQ ID NO: 856440 - DNA, 15 bp, Homo sapiens
tgattgtttggggca

SEQ ID NO: 856441 - DNA, 15 bp, Homo sapiens
gattgtttggggcag

SEQ ID NO: 856442 - DNA, 15 bp, Homo sapiens
attgtttggggcagc

SEQ ID NO: 856443 - DNA, 15 bp, Homo sapiens
ttgtttggggcagct

SEQ ID NO: 856444 - DNA, 15 bp, Homo sapiens
tgtttggggcagctg

SEQ ID NO: 856445 - DNA, 15 bp, Homo sapiens
gtttggggcagctga

SEQ ID NO: 856446 - DNA, 15 bp, Homo sapiens
tttggggcagctgag

SEQ ID NO: 856447 - DNA, 15 bp, Homo sapiens
ttggggcagctgaga

SEQ ID NO: 856448 - DNA, 15 bp, Homo sapiens
tggggcagctgagaa

SEQ ID NO: 856449 - DNA, 15 bp, Homo sapiens
ggggcagctgagaac

SEQ ID NO: 856450 - DNA, 15 bp, Homo sapiens
gggcagctgagaact

SEQ ID NO: 856451 - DNA, 15 bp, Homo sapiens
ggcagctgagaactt

SEQ ID NO: 856452 - DNA, 15 bp, Homo sapiens
gcagctgagaacttc

SEQ ID NO: 856453 - DNA, 15 bp, Homo sapiens
cagctgagaacttcc

SEQ ID NO: 856454 - DNA, 15 bp, Homo sapiens
agctgagaacttcct

SEQ ID NO: 856455 - DNA, 15 bp, Homo sapiens
gctgagaacttcctt

SEQ ID NO: 856456 - DNA, 15 bp, Homo sapiens
ctgagaacttccttt

SEQ ID NO: 856457 - DNA, 15 bp, Homo sapiens
tgagaacttccttta

SEQ ID NO: 856458 - DNA, 15 bp, Homo sapiens
gagaacttcctttag

SEQ ID NO: 856459 - DNA, 15 bp, Homo sapiens
agaacttcctttaga

SEQ ID NO: 856460 - DNA, 15 bp, Homo sapiens
gaacttcctttagac

SEQ ID NO: 856461 - DNA, 15 bp, Homo sapiens
aacttcctttagact

SEQ ID NO: 856462 - DNA, 15 bp, Homo sapiens
acttcctttagactg

SEQ ID NO: 856463 - DNA, 15 bp, Homo sapiens
cttcctttagactga

SEQ ID NO: 856464 - DNA, 15 bp, Homo sapiens
ttcctttagactgat

SEQ ID NO: 856465 - DNA, 15 bp, Homo sapiens
tcctttagactgatt

SEQ ID NO: 856466 - DNA, 15 bp, Homo sapiens
cctttagactgattc

SEQ ID NO: 856467 - DNA, 15 bp, Homo sapiens
ctttagactgattcc

SEQ ID NO: 856468 - DNA, 15 bp, Homo sapiens
tttagactgattcca

SEQ ID NO: 856469 - DNA, 15 bp, Homo sapiens
ttagactgattccaa

SEQ ID NO: 856470 - DNA, 15 bp, Homo sapiens
tagactgattccaaa

SEQ ID NO: 856471 - DNA, 15 bp, Homo sapiens
agactgattccaaat

SEQ ID NO: 856472 - DNA, 15 bp, Homo sapiens
gactgattccaaata

SEQ ID NO: 856473 - DNA, 15 bp, Homo sapiens
actgattccaaatat

SEQ ID NO: 856474 - DNA, 15 bp, Homo sapiens
ctgattccaaatatc

SEQ ID NO: 856475 - DNA, 15 bp, Homo sapiens
tgattccaaatatct

SEQ ID NO: 856476 - DNA, 15 bp, Homo sapiens
gattccaaatatcta

SEQ ID NO: 856477 - DNA, 15 bp, Homo sapiens
attccaaatatctat

SEQ ID NO: 856478 - DNA, 15 bp, Homo sapiens
ttccaaatatctatt

SEQ ID NO: 856479 - DNA, 15 bp, Homo sapiens
tccaaatatctatta

SEQ ID NO: 856480 - DNA, 15 bp, Homo sapiens
ccaaatatctattac

SEQ ID NO: 856481 - DNA, 15 bp, Homo sapiens
caaatatctattacc

SEQ ID NO: 856482 - DNA, 15 bp, Homo sapiens
aaatatctattacct

SEQ ID NO: 856483 - DNA, 15 bp, Homo sapiens
aatatctattacctt

SEQ ID NO: 856484 - DNA, 15 bp, Homo sapiens
atatctattacctta

SEQ ID NO: 856485 - DNA, 15 bp, Homo sapiens
tatctattaccttat

SEQ ID NO: 856486 - DNA, 15 bp, Homo sapiens
atctattaccttatt

SEQ ID NO: 856487 - DNA, 15 bp, Homo sapiens
tctattaccttatta

SEQ ID NO: 856488 - DNA, 15 bp, Homo sapiens
ctattaccttattaa

SEQ ID NO: 856489 - DNA, 15 bp, Homo sapiens
tattaccttattaag

SEQ ID NO: 856490 - DNA, 15 bp, Homo sapiens
attaccttattaagc

SEQ ID NO: 856491 - DNA, 15 bp, Homo sapiens
ttaccttattaagca

SEQ ID NO: 856492 - DNA, 15 bp, Homo sapiens
taccttattaagcaa

SEQ ID NO: 856493 - DNA, 15 bp, Homo sapiens
accttattaagcaac

SEQ ID NO: 856494 - DNA, 15 bp, Homo sapiens
ccttattaagcaaca

SEQ ID NO: 856495 - DNA, 15 bp, Homo sapiens
cttattaagcaacat

SEQ ID NO: 856496 - DNA, 15 bp, Homo sapiens
ttattaagcaacatc

SEQ ID NO: 856497 - DNA, 15 bp, Homo sapiens
tattaagcaacatct

SEQ ID NO: 856498 - DNA, 15 bp, Homo sapiens
attaagcaacatctt

SEQ ID NO: 856499 - DNA, 15 bp, Homo sapiens
ttaagcaacatcttt

SEQ ID NO: 856500 - DNA, 15 bp, Homo sapiens
taagcaacatctttt

SEQ ID NO: 856501 - DNA, 15 bp, Homo sapiens
aagcaacatcttttc

SEQ ID NO: 856502 - DNA, 15 bp, Homo sapiens
agcaacatcttttca

SEQ ID NO: 856503 - DNA, 15 bp, Homo sapiens
gcaacatcttttcag

SEQ ID NO: 856504 - DNA, 15 bp, Homo sapiens
caacatcttttcaga

SEQ ID NO: 856505 - DNA, 15 bp, Homo sapiens
aacatcttttcagaa

SEQ ID NO: 856506 - DNA, 15 bp, Homo sapiens
acatcttttcagaac

SEQ ID NO: 856507 - DNA, 15 bp, Homo sapiens
catcttttcagaaca

SEQ ID NO: 856508 - DNA, 15 bp, Homo sapiens
atcttttcagaacaa

SEQ ID NO: 856509 - DNA, 15 bp, Homo sapiens
tcttttcagaacaag

SEQ ID NO: 856510 - DNA, 15 bp, Homo sapiens
cttttcagaacaagg

SEQ ID NO: 856511 - DNA, 15 bp, Homo sapiens
ttttcagaacaagga

SEQ ID NO: 856512 - DNA, 15 bp, Homo sapiens
tttcagaacaaggaa

SEQ ID NO: 856513 - DNA, 15 bp, Homo sapiens
ttcagaacaaggaat

SEQ ID NO: 856514 - DNA, 15 bp, Homo sapiens
tcagaacaaggaata

SEQ ID NO: 856515 - DNA, 15 bp, Homo sapiens
cagaacaaggaatac

SEQ ID NO: 856516 - DNA, 15 bp, Homo sapiens
agaacaaggaatacc

SEQ ID NO: 856517 - DNA, 15 bp, Homo sapiens
gaacaaggaatacct

SEQ ID NO: 856518 - DNA, 15 bp, Homo sapiens
aacaaggaatacctc

SEQ ID NO: 856519 - DNA, 15 bp, Homo sapiens
acaaggaatacctct

SEQ ID NO: 856520 - DNA, 15 bp, Homo sapiens
caaggaatacctctg

SEQ ID NO: 856521 - DNA, 15 bp, Homo sapiens
aaggaatacctctgt

SEQ ID NO: 856522 - DNA, 15 bp, Homo sapiens
aggaatacctctgtt

SEQ ID NO: 856523 - DNA, 15 bp, Homo sapiens
ggaatacctctgttg

SEQ ID NO: 856524 - DNA, 15 bp, Homo sapiens
gaatacctctgttgt

SEQ ID NO: 856525 - DNA, 15 bp, Homo sapiens
aatacctctgttgta

SEQ ID NO: 856526 - DNA, 15 bp, Homo sapiens
atacctctgttgtat

SEQ ID NO: 856527 - DNA, 15 bp, Homo sapiens
tacctctgttgtatc

SEQ ID NO: 856528 - DNA, 15 bp, Homo sapiens
acctctgttgtatct

SEQ ID NO: 856529 - DNA, 15 bp, Homo sapiens
cctctgttgtatctg

SEQ ID NO: 856530 - DNA, 15 bp, Homo sapiens
ctctgttgtatctgt

SEQ ID NO: 856531 - DNA, 15 bp, Homo sapiens
tctgttgtatctgtt

SEQ ID NO: 856532 - DNA, 15 bp, Homo sapiens
ctgttgtatctgttg

SEQ ID NO: 856533 - DNA, 15 bp, Homo sapiens
tgttgtatctgttgt

SEQ ID NO: 856534 - DNA, 15 bp, Homo sapiens
gttgtatctgttgtt

SEQ ID NO: 856535 - DNA, 15 bp, Homo sapiens
ttgtatctgttgttt

SEQ ID NO: 856536 - DNA, 15 bp, Homo sapiens
tgtatctgttgtttt

SEQ ID NO: 856537 - DNA, 15 bp, Homo sapiens
gtatctgttgtttta

SEQ ID NO: 856538 - DNA, 15 bp, Homo sapiens
tatctgttgttttat

SEQ ID NO: 856539 - DNA, 15 bp, Homo sapiens
atctgttgttttatt

SEQ ID NO: 856540 - DNA, 15 bp, Homo sapiens
tctgttgttttattc

SEQ ID NO: 856541 - DNA, 15 bp, Homo sapiens
ctgttgttttattca

SEQ ID NO: 856542 - DNA, 15 bp, Homo sapiens
tgttgttttattcag

SEQ ID NO: 856543 - DNA, 15 bp, Homo sapiens
gttgttttattcaga

SEQ ID NO: 856544 - DNA, 15 bp, Homo sapiens
ttgttttattcagaa

SEQ ID NO: 856545 - DNA, 15 bp, Homo sapiens
tgttttattcagaat

SEQ ID NO: 856546 - DNA, 15 bp, Homo sapiens
gttttattcagaatc

SEQ ID NO: 856547 - DNA, 15 bp, Homo sapiens
ttttattcagaatcc

SEQ ID NO: 856548 - DNA, 15 bp, Homo sapiens
tttattcagaatccc

SEQ ID NO: 856549 - DNA, 15 bp, Homo sapiens
ttattcagaatccct

SEQ ID NO: 856550 - DNA, 15 bp, Homo sapiens
tattcagaatccctg

SEQ ID NO: 856551 - DNA, 15 bp, Homo sapiens
attcagaatccctga

SEQ ID NO: 856552 - DNA, 15 bp, Homo sapiens
ttcagaatccctgaa

SEQ ID NO: 856553 - DNA, 15 bp, Homo sapiens
tcagaatccctgaat

SEQ ID NO: 856554 - DNA, 15 bp, Homo sapiens
cagaatccctgaatt

SEQ ID NO: 856555 - DNA, 15 bp, Homo sapiens
agaatccctgaattc

SEQ ID NO: 856556 - DNA, 15 bp, Homo sapiens
gaatccctgaattca

SEQ ID NO: 856557 - DNA, 15 bp, Homo sapiens
aatccctgaattcag

SEQ ID NO: 856558 - DNA, 15 bp, Homo sapiens
atccctgaattcagt

SEQ ID NO: 856559 - DNA, 15 bp, Homo sapiens
tccctgaattcagta

SEQ ID NO: 856560 - DNA, 15 bp, Homo sapiens
ccctgaattcagtat

SEQ ID NO: 856561 - DNA, 15 bp, Homo sapiens
cctgaattcagtatc

SEQ ID NO: 856562 - DNA, 15 bp, Homo sapiens
ctgaattcagtatcc

SEQ ID NO: 856563 - DNA, 15 bp, Homo sapiens
tgaattcagtatcca

SEQ ID NO: 856564 - DNA, 15 bp, Homo sapiens
gaattcagtatccat

SEQ ID NO: 856565 - DNA, 15 bp, Homo sapiens
aattcagtatccatt

SEQ ID NO: 856566 - DNA, 15 bp, Homo sapiens
attcagtatccatta

SEQ ID NO: 856567 - DNA, 15 bp, Homo sapiens
ttcagtatccattaa

SEQ ID NO: 856568 - DNA, 15 bp, Homo sapiens
tcagtatccattaag

SEQ ID NO: 856569 - DNA, 15 bp, Homo sapiens
cagtatccattaagc

SEQ ID NO: 856570 - DNA, 15 bp, Homo sapiens
agtatccattaagcc

SEQ ID NO: 856571 - DNA, 15 bp, Homo sapiens
gtatccattaagcct

SEQ ID NO: 856572 - DNA, 15 bp, Homo sapiens
tatccattaagcctg

SEQ ID NO: 856573 - DNA, 15 bp, Homo sapiens
atccattaagcctga

SEQ ID NO: 856574 - DNA, 15 bp, Homo sapiens
tccattaagcctgaa

SEQ ID NO: 856575 - DNA, 15 bp, Homo sapiens
ccattaagcctgaag

SEQ ID NO: 856576 - DNA, 15 bp, Homo sapiens
cattaagcctgaagt

SEQ ID NO: 856577 - DNA, 15 bp, Homo sapiens
attaagcctgaagtc

SEQ ID NO: 856578 - DNA, 15 bp, Homo sapiens
ttaagcctgaagtct

SEQ ID NO: 856579 - DNA, 15 bp, Homo sapiens
taagcctgaagtctt

SEQ ID NO: 856580 - DNA, 15 bp, Homo sapiens
aagcctgaagtcttt

SEQ ID NO: 856581 - DNA, 15 bp, Homo sapiens
agcctgaagtctttt

SEQ ID NO: 856582 - DNA, 15 bp, Homo sapiens
gcctgaagtcttttc

SEQ ID NO: 856583 - DNA, 15 bp, Homo sapiens
cctgaagtcttttct

SEQ ID NO: 856584 - DNA, 15 bp, Homo sapiens
ctgaagtcttttctc

SEQ ID NO: 856585 - DNA, 15 bp, Homo sapiens
tgaagtcttttctca

SEQ ID NO: 856586 - DNA, 15 bp, Homo sapiens
gaagtcttttctcag

SEQ ID NO: 856587 - DNA, 15 bp, Homo sapiens
aagtcttttctcagt

SEQ ID NO: 856588 - DNA, 15 bp, Homo sapiens
agtcttttctcagtc

SEQ ID NO: 856589 - DNA, 15 bp, Homo sapiens
gtcttttctcagtct

SEQ ID NO: 856590 - DNA, 15 bp, Homo sapiens
tcttttctcagtctc

SEQ ID NO: 856591 - DNA, 15 bp, Homo sapiens
cttttctcagtctct

SEQ ID NO: 856592 - DNA, 15 bp, Homo sapiens
ttttctcagtctctg

SEQ ID NO: 856593 - DNA, 15 bp, Homo sapiens
tttctcagtctctgc

SEQ ID NO: 856594 - DNA, 15 bp, Homo sapiens
ttctcagtctctgca

SEQ ID NO: 856595 - DNA, 15 bp, Homo sapiens
tctcagtctctgcat

SEQ ID NO: 856596 - DNA, 15 bp, Homo sapiens
ctcagtctctgcatc

SEQ ID NO: 856597 - DNA, 15 bp, Homo sapiens
tcagtctctgcatca

SEQ ID NO: 856598 - DNA, 15 bp, Homo sapiens
cagtctctgcatcag

SEQ ID NO: 856599 - DNA, 15 bp, Homo sapiens
agtctctgcatcaga

SEQ ID NO: 856600 - DNA, 15 bp, Homo sapiens
gtctctgcatcagac

SEQ ID NO: 856601 - DNA, 15 bp, Homo sapiens
tctctgcatcagaca

SEQ ID NO: 856602 - DNA, 15 bp, Homo sapiens
ctctgcatcagacaa

SEQ ID NO: 856603 - DNA, 15 bp, Homo sapiens
tctgcatcagacaat

SEQ ID NO: 856604 - DNA, 15 bp, Homo sapiens
ctgcatcagacaatc

SEQ ID NO: 856605 - DNA, 15 bp, Homo sapiens
tgcatcagacaatct

SEQ ID NO: 856606 - DNA, 15 bp, Homo sapiens
gcatcagacaatctt

SEQ ID NO: 856607 - DNA, 15 bp, Homo sapiens
catcagacaatcttg

SEQ ID NO: 856608 - DNA, 15 bp, Homo sapiens
atcagacaatcttgt

SEQ ID NO: 856609 - DNA, 15 bp, Homo sapiens
tcagacaatcttgta

SEQ ID NO: 856610 - DNA, 15 bp, Homo sapiens
cagacaatcttgtat

SEQ ID NO: 856611 - DNA, 15 bp, Homo sapiens
agacaatcttgtatt

SEQ ID NO: 856612 - DNA, 15 bp, Homo sapiens
gacaatcttgtattc

SEQ ID NO: 856613 - DNA, 15 bp, Homo sapiens
acaatcttgtattct

SEQ ID NO: 856614 - DNA, 15 bp, Homo sapiens
caatcttgtattctg

SEQ ID NO: 856615 - DNA, 15 bp, Homo sapiens
aatcttgtattctgc

SEQ ID NO: 856616 - DNA, 15 bp, Homo sapiens
atcttgtattctgct

SEQ ID NO: 856617 - DNA, 15 bp, Homo sapiens
tcttgtattctgctt

SEQ ID NO: 856618 - DNA, 15 bp, Homo sapiens
cttgtattctgcttt

SEQ ID NO: 856619 - DNA, 15 bp, Homo sapiens
ttgtattctgctttt

SEQ ID NO: 856620 - DNA, 15 bp, Homo sapiens
tgtattctgcttttg

SEQ ID NO: 856621 - DNA, 15 bp, Homo sapiens
gtattctgcttttga

SEQ ID NO: 856622 - DNA, 15 bp, Homo sapiens
tattctgcttttgat

SEQ ID NO: 856623 - DNA, 15 bp, Homo sapiens
attctgcttttgatc

SEQ ID NO: 856624 - DNA, 15 bp, Homo sapiens
ttctgcttttgatct

SEQ ID NO: 856625 - DNA, 15 bp, Homo sapiens
tctgcttttgatctg

SEQ ID NO: 856626 - DNA, 15 bp, Homo sapiens
ctgcttttgatctgc

SEQ ID NO: 856627 - DNA, 15 bp, Homo sapiens
tgcttttgatctgca

SEQ ID NO: 856628 - DNA, 15 bp, Homo sapiens
gcttttgatctgcag

SEQ ID NO: 856629 - DNA, 15 bp, Homo sapiens
cttttgatctgcaga

SEQ ID NO: 856630 - DNA, 15 bp, Homo sapiens
ttttgatctgcagaa

SEQ ID NO: 856631 - DNA, 15 bp, Homo sapiens
tttgatctgcagaaa

SEQ ID NO: 856632 - DNA, 15 bp, Homo sapiens
ttgatctgcagaaaa

SEQ ID NO: 856633 - DNA, 15 bp, Homo sapiens
tgatctgcagaaaat

SEQ ID NO: 856634 - DNA, 15 bp, Homo sapiens
gatctgcagaaaatt

SEQ ID NO: 856635 - DNA, 15 bp, Homo sapiens
atctgcagaaaatta

SEQ ID NO: 856636 - DNA, 15 bp, Homo sapiens
tctgcagaaaattaa

SEQ ID NO: 856637 - DNA, 15 bp, Homo sapiens
ctgcagaaaattaaa

SEQ ID NO: 856638 - DNA, 15 bp, Homo sapiens
tgcagaaaattaaac

SEQ ID NO: 856639 - DNA, 15 bp, Homo sapiens
gcagaaaattaaact

SEQ ID NO: 856640 - DNA, 15 bp, Homo sapiens
cagaaaattaaactt

SEQ ID NO: 856641 - DNA, 15 bp, Homo sapiens
agaaaattaaacttg

SEQ ID NO: 856642 - DNA, 15 bp, Homo sapiens
gaaaattaaacttgt

SEQ ID NO: 856643 - DNA, 15 bp, Homo sapiens
aaaattaaacttgtt

SEQ ID NO: 856644 - DNA, 15 bp, Homo sapiens
aaattaaacttgttt

SEQ ID NO: 856645 - DNA, 15 bp, Homo sapiens
aattaaacttgtttg

SEQ ID NO: 856646 - DNA, 15 bp, Homo sapiens
attaaacttgtttgt

SEQ ID NO: 856647 - DNA, 15 bp, Homo sapiens
ttaaacttgtttgtt

SEQ ID NO: 856648 - DNA, 15 bp, Homo sapiens
taaacttgtttgttt

SEQ ID NO: 856649 - DNA, 15 bp, Homo sapiens
aaacttgtttgtttc

SEQ ID NO: 856650 - DNA, 15 bp, Homo sapiens
aacttgtttgtttca

SEQ ID NO: 856651 - DNA, 15 bp, Homo sapiens
acttgtttgtttcat

SEQ ID NO: 856652 - DNA, 15 bp, Homo sapiens
cttgtttgtttcatc

SEQ ID NO: 856653 - DNA, 15 bp, Homo sapiens
ttgtttgtttcatcc

SEQ ID NO: 856654 - DNA, 15 bp, Homo sapiens
tgtttgtttcatcca

SEQ ID NO: 856655 - DNA, 15 bp, Homo sapiens
gtttgtttcatccat

SEQ ID NO: 856656 - DNA, 15 bp, Homo sapiens
tttgtttcatccatt

SEQ ID NO: 856657 - DNA, 15 bp, Homo sapiens
ttgtttcatccattt

SEQ ID NO: 856658 - DNA, 15 bp, Homo sapiens
tgtttcatccattta

SEQ ID NO: 856659 - DNA, 15 bp, Homo sapiens
gtttcatccatttat

SEQ ID NO: 856660 - DNA, 15 bp, Homo sapiens
tttcatccatttatt

SEQ ID NO: 856661 - DNA, 15 bp, Homo sapiens
ttcatccatttatta

SEQ ID NO: 856662 - DNA, 15 bp, Homo sapiens
tcatccatttattag

SEQ ID NO: 856663 - DNA, 15 bp, Homo sapiens
catccatttattaga

SEQ ID NO: 856664 - DNA, 15 bp, Homo sapiens
atccatttattagat

SEQ ID NO: 856665 - DNA, 15 bp, Homo sapiens
tccatttattagatt

SEQ ID NO: 856666 - DNA, 15 bp, Homo sapiens
ccatttattagatta

SEQ ID NO: 856667 - DNA, 15 bp, Homo sapiens
catttattagattag

SEQ ID NO: 856668 - DNA, 15 bp, Homo sapiens
atttattagattagg

SEQ ID NO: 856669 - DNA, 15 bp, Homo sapiens
tttattagattagga

SEQ ID NO: 856670 - DNA, 15 bp, Homo sapiens
ttattagattaggat

SEQ ID NO: 856671 - DNA, 15 bp, Homo sapiens
tattagattaggata

SEQ ID NO: 856672 - DNA, 15 bp, Homo sapiens
attagattaggatac

SEQ ID NO: 856673 - DNA, 15 bp, Homo sapiens
ttagattaggataca

SEQ ID NO: 856674 - DNA, 15 bp, Homo sapiens
tagattaggatacat

SEQ ID NO: 856675 - DNA, 15 bp, Homo sapiens
agattaggatacatt

SEQ ID NO: 856676 - DNA, 15 bp, Homo sapiens
gattaggatacattt

SEQ ID NO: 856677 - DNA, 15 bp, Homo sapiens
attaggatacattta

SEQ ID NO: 856678 - DNA, 15 bp, Homo sapiens
ttaggatacatttat

SEQ ID NO: 856679 - DNA, 15 bp, Homo sapiens
taggatacatttatc

SEQ ID NO: 856680 - DNA, 15 bp, Homo sapiens
aggatacatttatct

SEQ ID NO: 856681 - DNA, 15 bp, Homo sapiens
ggatacatttatctc

SEQ ID NO: 856682 - DNA, 15 bp, Homo sapiens
gatacatttatctct

SEQ ID NO: 856683 - DNA, 15 bp, Homo sapiens
atacatttatctctt

SEQ ID NO: 856684 - DNA, 15 bp, Homo sapiens
tacatttatctcttc

SEQ ID NO: 856685 - DNA, 15 bp, Homo sapiens
acatttatctcttct

SEQ ID NO: 856686 - DNA, 15 bp, Homo sapiens
catttatctcttctg

SEQ ID NO: 856687 - DNA, 15 bp, Homo sapiens
atttatctcttctgt

SEQ ID NO: 856688 - DNA, 15 bp, Homo sapiens
tttatctcttctgtc

SEQ ID NO: 856689 - DNA, 15 bp, Homo sapiens
ttatctcttctgtca

SEQ ID NO: 856690 - DNA, 15 bp, Homo sapiens
tatctcttctgtcag

SEQ ID NO: 856691 - DNA, 15 bp, Homo sapiens
atctcttctgtcagt

SEQ ID NO: 856692 - DNA, 15 bp, Homo sapiens
tctcttctgtcagtc

SEQ ID NO: 856693 - DNA, 15 bp, Homo sapiens
ctcttctgtcagtcc

SEQ ID NO: 856694 - DNA, 15 bp, Homo sapiens
tcttctgtcagtcca

SEQ ID NO: 856695 - DNA, 15 bp, Homo sapiens
cttctgtcagtccaa

SEQ ID NO: 856696 - DNA, 15 bp, Homo sapiens
ttctgtcagtccaaa

SEQ ID NO: 856697 - DNA, 15 bp, Homo sapiens
tctgtcagtccaaac

SEQ ID NO: 856698 - DNA, 15 bp, Homo sapiens
ctgtcagtccaaaca

SEQ ID NO: 856699 - DNA, 15 bp, Homo sapiens
tgtcagtccaaacac

SEQ ID NO: 856700 - DNA, 15 bp, Homo sapiens
gtcagtccaaacaca

SEQ ID NO: 856701 - DNA, 15 bp, Homo sapiens
tcagtccaaacacaa

SEQ ID NO: 856702 - DNA, 15 bp, Homo sapiens
cagtccaaacacaac

SEQ ID NO: 856703 - DNA, 15 bp, Homo sapiens
agtccaaacacaact

SEQ ID NO: 856704 - DNA, 15 bp, Homo sapiens
gtccaaacacaactt

SEQ ID NO: 856705 - DNA, 15 bp, Homo sapiens
tccaaacacaacttg

SEQ ID NO: 856706 - DNA, 15 bp, Homo sapiens
ccaaacacaacttgg

SEQ ID NO: 856707 - DNA, 15 bp, Homo sapiens
caaacacaacttggt

SEQ ID NO: 856708 - DNA, 15 bp, Homo sapiens
aaacacaacttggtc

SEQ ID NO: 856709 - DNA, 15 bp, Homo sapiens
aacacaacttggtcc

SEQ ID NO: 856710 - DNA, 15 bp, Homo sapiens
acacaacttggtccg

SEQ ID NO: 856711 - DNA, 15 bp, Homo sapiens
cacaacttggtccgc

SEQ ID NO: 856712 - DNA, 15 bp, Homo sapiens
acaacttggtccgct

SEQ ID NO: 856713 - DNA, 15 bp, Homo sapiens
caacttggtccgcta

SEQ ID NO: 856714 - DNA, 15 bp, Homo sapiens
aacttggtccgctaa

SEQ ID NO: 856715 - DNA, 15 bp, Homo sapiens
acttggtccgctaat

SEQ ID NO: 856716 - DNA, 15 bp, Homo sapiens
cttggtccgctaatc

SEQ ID NO: 856717 - DNA, 15 bp, Homo sapiens
ttggtccgctaatct

SEQ ID NO: 856718 - DNA, 15 bp, Homo sapiens
tggtccgctaatcta

SEQ ID NO: 856719 - DNA, 15 bp, Homo sapiens
ggtccgctaatctat

SEQ ID NO: 856720 - DNA, 15 bp, Homo sapiens
gtccgctaatctatt

SEQ ID NO: 856721 - DNA, 15 bp, Homo sapiens
tccgctaatctattt

SEQ ID NO: 856722 - DNA, 15 bp, Homo sapiens
ccgctaatctattta

SEQ ID NO: 856723 - DNA, 15 bp, Homo sapiens
cgctaatctatttat

SEQ ID NO: 856724 - DNA, 15 bp, Homo sapiens
gctaatctatttatg

SEQ ID NO: 856725 - DNA, 15 bp, Homo sapiens
ctaatctatttatgc

SEQ ID NO: 856726 - DNA, 15 bp, Homo sapiens
taatctatttatgcc

SEQ ID NO: 856727 - DNA, 15 bp, Homo sapiens
aatctatttatgcca

SEQ ID NO: 856728 - DNA, 15 bp, Homo sapiens
atctatttatgccac

SEQ ID NO: 856729 - DNA, 15 bp, Homo sapiens
tctatttatgccact

SEQ ID NO: 856730 - DNA, 15 bp, Homo sapiens
ctatttatgccactt

SEQ ID NO: 856731 - DNA, 15 bp, Homo sapiens
tatttatgccacttt

SEQ ID NO: 856732 - DNA, 15 bp, Homo sapiens
atttatgccactttg

SEQ ID NO: 856733 - DNA, 15 bp, Homo sapiens
tttatgccactttga

SEQ ID NO: 856734 - DNA, 15 bp, Homo sapiens
ttatgccactttgaa

SEQ ID NO: 856735 - DNA, 15 bp, Homo sapiens
tatgccactttgaaa

SEQ ID NO: 856736 - DNA, 15 bp, Homo sapiens
atgccactttgaaat

SEQ ID NO: 856737 - DNA, 15 bp, Homo sapiens
tgccactttgaaata

SEQ ID NO: 856738 - DNA, 15 bp, Homo sapiens
gccactttgaaatag

SEQ ID NO: 856739 - DNA, 15 bp, Homo sapiens
ccactttgaaatagg

SEQ ID NO: 856740 - DNA, 15 bp, Homo sapiens
cactttgaaatagga

SEQ ID NO: 856741 - DNA, 15 bp, Homo sapiens
actttgaaataggac

SEQ ID NO: 856742 - DNA, 15 bp, Homo sapiens
ctttgaaataggaca

SEQ ID NO: 856743 - DNA, 15 bp, Homo sapiens
tttgaaataggacaa

SEQ ID NO: 856744 - DNA, 15 bp, Homo sapiens
ttgaaataggacaat

SEQ ID NO: 856745 - DNA, 15 bp, Homo sapiens
tgaaataggacaatg

SEQ ID NO: 856746 - DNA, 15 bp, Homo sapiens
gaaataggacaatgt

SEQ ID NO: 856747 - DNA, 15 bp, Homo sapiens
aaataggacaatgta

SEQ ID NO: 856748 - DNA, 15 bp, Homo sapiens
aataggacaatgtat

SEQ ID NO: 856749 - DNA, 15 bp, Homo sapiens
ataggacaatgtata

SEQ ID NO: 856750 - DNA, 15 bp, Homo sapiens
taggacaatgtatat

SEQ ID NO: 856751 - DNA, 15 bp, Homo sapiens
aggacaatgtatatt

SEQ ID NO: 856752 - DNA, 15 bp, Homo sapiens
ggacaatgtatattt

SEQ ID NO: 856753 - DNA, 15 bp, Homo sapiens
gacaatgtatattta

SEQ ID NO: 856754 - DNA, 15 bp, Homo sapiens
acaatgtatatttag

SEQ ID NO: 856755 - DNA, 15 bp, Homo sapiens
caatgtatatttagg

SEQ ID NO: 856756 - DNA, 15 bp, Homo sapiens
aatgtatatttaggt

SEQ ID NO: 856757 - DNA, 15 bp, Homo sapiens
atgtatatttaggtt

SEQ ID NO: 856758 - DNA, 15 bp, Homo sapiens
tgtatatttaggttc

SEQ ID NO: 856759 - DNA, 15 bp, Homo sapiens
gtatatttaggttcc

SEQ ID NO: 856760 - DNA, 15 bp, Homo sapiens
tatatttaggttccc

SEQ ID NO: 856761 - DNA, 15 bp, Homo sapiens
atatttaggttccca

SEQ ID NO: 856762 - DNA, 15 bp, Homo sapiens
tatttaggttcccac

SEQ ID NO: 856763 - DNA, 15 bp, Homo sapiens
atttaggttcccact

SEQ ID NO: 856764 - DNA, 15 bp, Homo sapiens
tttaggttcccactt

SEQ ID NO: 856765 - DNA, 15 bp, Homo sapiens
ttaggttcccacttc

SEQ ID NO: 856766 - DNA, 15 bp, Homo sapiens
taggttcccacttct

SEQ ID NO: 856767 - DNA, 15 bp, Homo sapiens
aggttcccacttctc

SEQ ID NO: 856768 - DNA, 15 bp, Homo sapiens
ggttcccacttctct

SEQ ID NO: 856769 - DNA, 15 bp, Homo sapiens
gttcccacttctctg

SEQ ID NO: 856770 - DNA, 15 bp, Homo sapiens
ttcccacttctctgc

SEQ ID NO: 856771 - DNA, 15 bp, Homo sapiens
tcccacttctctgca

SEQ ID NO: 856772 - DNA, 15 bp, Homo sapiens
cccacttctctgcag

SEQ ID NO: 856773 - DNA, 15 bp, Homo sapiens
ccacttctctgcagg

SEQ ID NO: 856774 - DNA, 15 bp, Homo sapiens
cacttctctgcaggg

SEQ ID NO: 856775 - DNA, 15 bp, Homo sapiens
acttctctgcagggc

SEQ ID NO: 856776 - DNA, 15 bp, Homo sapiens
cttctctgcagggca

SEQ ID NO: 856777 - DNA, 15 bp, Homo sapiens
ttctctgcagggcaa

SEQ ID NO: 856778 - DNA, 15 bp, Homo sapiens
tctctgcagggcaag

SEQ ID NO: 856779 - DNA, 15 bp, Homo sapiens
ctctgcagggcaagt

SEQ ID NO: 856780 - DNA, 15 bp, Homo sapiens
tctgcagggcaagtt

SEQ ID NO: 856781 - DNA, 15 bp, Homo sapiens
ctgcagggcaagttt

SEQ ID NO: 856782 - DNA, 15 bp, Homo sapiens
tgcagggcaagtttt

SEQ ID NO: 856783 - DNA, 15 bp, Homo sapiens
gcagggcaagttttt

SEQ ID NO: 856784 - DNA, 15 bp, Homo sapiens
cagggcaagtttttt

SEQ ID NO: 856785 - DNA, 15 bp, Homo sapiens
agggcaagttttttt

SEQ ID NO: 856786 - DNA, 15 bp, Homo sapiens
gggcaagttttttta

SEQ ID NO: 856787 - DNA, 15 bp, Homo sapiens
ggcaagtttttttaa

SEQ ID NO: 856788 - DNA, 15 bp, Homo sapiens
gcaagtttttttaag

SEQ ID NO: 856789 - DNA, 15 bp, Homo sapiens
caagtttttttaagg

SEQ ID NO: 856790 - DNA, 15 bp, Homo sapiens
aagtttttttaaggg

SEQ ID NO: 856791 - DNA, 15 bp, Homo sapiens
agtttttttaagggg

SEQ ID NO: 856792 - DNA, 15 bp, Homo sapiens
gtttttttaagggga

SEQ ID NO: 856793 - DNA, 15 bp, Homo sapiens
tttttttaaggggag

SEQ ID NO: 856794 - DNA, 15 bp, Homo sapiens
ttttttaaggggagg

SEQ ID NO: 856795 - DNA, 15 bp, Homo sapiens
tttttaaggggaggt

SEQ ID NO: 856796 - DNA, 15 bp, Homo sapiens
ttttaaggggaggtt

SEQ ID NO: 856797 - DNA, 15 bp, Homo sapiens
tttaaggggaggttt

SEQ ID NO: 856798 - DNA, 15 bp, Homo sapiens
ttaaggggaggtttg

SEQ ID NO: 856799 - DNA, 15 bp, Homo sapiens
taaggggaggtttgc

SEQ ID NO: 856800 - DNA, 15 bp, Homo sapiens
aaggggaggtttgca

SEQ ID NO: 856801 - DNA, 15 bp, Homo sapiens
aggggaggtttgcat

SEQ ID NO: 856802 - DNA, 15 bp, Homo sapiens
ggggaggtttgcatt

SEQ ID NO: 856803 - DNA, 15 bp, Homo sapiens
gggaggtttgcattt

SEQ ID NO: 856804 - DNA, 15 bp, Homo sapiens
ggaggtttgcatttg

SEQ ID NO: 856805 - DNA, 15 bp, Homo sapiens
gaggtttgcatttgt

SEQ ID NO: 856806 - DNA, 15 bp, Homo sapiens
aggtttgcatttgtt

SEQ ID NO: 856807 - DNA, 15 bp, Homo sapiens
ggtttgcatttgttt

SEQ ID NO: 856808 - DNA, 15 bp, Homo sapiens
gtttgcatttgtttt

SEQ ID NO: 856809 - DNA, 15 bp, Homo sapiens
tttgcatttgttttc

SEQ ID NO: 856810 - DNA, 15 bp, Homo sapiens
ttgcatttgttttct

SEQ ID NO: 856811 - DNA, 15 bp, Homo sapiens
tgcatttgttttctc

SEQ ID NO: 856812 - DNA, 15 bp, Homo sapiens
gcatttgttttctca

SEQ ID NO: 856813 - DNA, 15 bp, Homo sapiens
catttgttttctcaa

SEQ ID NO: 856814 - DNA, 15 bp, Homo sapiens
atttgttttctcaat

SEQ ID NO: 856815 - DNA, 15 bp, Homo sapiens
tttgttttctcaatt

SEQ ID NO: 856816 - DNA, 15 bp, Homo sapiens
ttgttttctcaattt

SEQ ID NO: 856817 - DNA, 15 bp, Homo sapiens
tgttttctcaatttg

SEQ ID NO: 856818 - DNA, 15 bp, Homo sapiens
gttttctcaatttgc

SEQ ID NO: 856819 - DNA, 15 bp, Homo sapiens
ttttctcaatttgcc

SEQ ID NO: 856820 - DNA, 15 bp, Homo sapiens
tttctcaatttgcct

SEQ ID NO: 856821 - DNA, 15 bp, Homo sapiens
ttctcaatttgcctc

SEQ ID NO: 856822 - DNA, 15 bp, Homo sapiens
tctcaatttgcctca

SEQ ID NO: 856823 - DNA, 15 bp, Homo sapiens
ctcaatttgcctcaa

SEQ ID NO: 856824 - DNA, 15 bp, Homo sapiens
tcaatttgcctcaat

SEQ ID NO: 856825 - DNA, 15 bp, Homo sapiens
caatttgcctcaatt

SEQ ID NO: 856826 - DNA, 15 bp, Homo sapiens
aatttgcctcaatta

SEQ ID NO: 856827 - DNA, 15 bp, Homo sapiens
atttgcctcaattag

SEQ ID NO: 856828 - DNA, 15 bp, Homo sapiens
tttgcctcaattagg

SEQ ID NO: 856829 - DNA, 15 bp, Homo sapiens
ttgcctcaattagga

SEQ ID NO: 856830 - DNA, 15 bp, Homo sapiens
tgcctcaattaggac

SEQ ID NO: 856831 - DNA, 15 bp, Homo sapiens
gcctcaattaggaca

SEQ ID NO: 856832 - DNA, 15 bp, Homo sapiens
cctcaattaggacat

SEQ ID NO: 856833 - DNA, 15 bp, Homo sapiens
ctcaattaggacatg

SEQ ID NO: 856834 - DNA, 15 bp, Homo sapiens
tcaattaggacatgc

SEQ ID NO: 856835 - DNA, 15 bp, Homo sapiens
caattaggacatgct

SEQ ID NO: 856836 - DNA, 15 bp, Homo sapiens
aattaggacatgcta

SEQ ID NO: 856837 - DNA, 15 bp, Homo sapiens
attaggacatgctag

SEQ ID NO: 856838 - DNA, 15 bp, Homo sapiens
ttaggacatgctaga

SEQ ID NO: 856839 - DNA, 15 bp, Homo sapiens
taggacatgctagac

SEQ ID NO: 856840 - DNA, 15 bp, Homo sapiens
aggacatgctagaca

SEQ ID NO: 856841 - DNA, 15 bp, Homo sapiens
ggacatgctagacac

SEQ ID NO: 856842 - DNA, 15 bp, Homo sapiens
gacatgctagacaca

SEQ ID NO: 856843 - DNA, 15 bp, Homo sapiens
acatgctagacacac

SEQ ID NO: 856844 - DNA, 15 bp, Homo sapiens
catgctagacacaca

SEQ ID NO: 856845 - DNA, 15 bp, Homo sapiens
atgctagacacacat

SEQ ID NO: 856846 - DNA, 15 bp, Homo sapiens
tgctagacacacatc

SEQ ID NO: 856847 - DNA, 15 bp, Homo sapiens
gctagacacacatct

SEQ ID NO: 856848 - DNA, 15 bp, Homo sapiens
ctagacacacatctt

SEQ ID NO: 856849 - DNA, 15 bp, Homo sapiens
tagacacacatctta

SEQ ID NO: 856850 - DNA, 15 bp, Homo sapiens
agacacacatcttat

SEQ ID NO: 856851 - DNA, 15 bp, Homo sapiens
gacacacatcttatt

SEQ ID NO: 856852 - DNA, 15 bp, Homo sapiens
acacacatcttattc

SEQ ID NO: 856853 - DNA, 15 bp, Homo sapiens
cacacatcttattca

SEQ ID NO: 856854 - DNA, 15 bp, Homo sapiens
acacatcttattcaa

SEQ ID NO: 856855 - DNA, 15 bp, Homo sapiens
cacatcttattcaaa

SEQ ID NO: 856856 - DNA, 15 bp, Homo sapiens
acatcttattcaaac

SEQ ID NO: 856857 - DNA, 15 bp, Homo sapiens
catcttattcaaaca

SEQ ID NO: 856858 - DNA, 15 bp, Homo sapiens
atcttattcaaacac

SEQ ID NO: 856859 - DNA, 15 bp, Homo sapiens
tcttattcaaacacc

SEQ ID NO: 856860 - DNA, 15 bp, Homo sapiens
cttattcaaacaccc

SEQ ID NO: 856861 - DNA, 15 bp, Homo sapiens
ttattcaaacaccct

SEQ ID NO: 856862 - DNA, 15 bp, Homo sapiens
tattcaaacaccctg

SEQ ID NO: 856863 - DNA, 15 bp, Homo sapiens
attcaaacaccctgt

SEQ ID NO: 856864 - DNA, 15 bp, Homo sapiens
ttcaaacaccctgta

SEQ ID NO: 856865 - DNA, 15 bp, Homo sapiens
tcaaacaccctgtac

SEQ ID NO: 856866 - DNA, 15 bp, Homo sapiens
caaacaccctgtacg

SEQ ID NO: 856867 - DNA, 15 bp, Homo sapiens
aaacaccctgtacgt

SEQ ID NO: 856868 - DNA, 15 bp, Homo sapiens
aacaccctgtacgtt

SEQ ID NO: 856869 - DNA, 15 bp, Homo sapiens
acaccctgtacgttt

SEQ ID NO: 856870 - DNA, 15 bp, Homo sapiens
caccctgtacgtttt

SEQ ID NO: 856871 - DNA, 15 bp, Homo sapiens
accctgtacgttttt

SEQ ID NO: 856872 - DNA, 15 bp, Homo sapiens
ccctgtacgttttta

SEQ ID NO: 856873 - DNA, 15 bp, Homo sapiens
cctgtacgtttttat

SEQ ID NO: 856874 - DNA, 15 bp, Homo sapiens
ctgtacgtttttata

SEQ ID NO: 856875 - DNA, 15 bp, Homo sapiens
tgtacgtttttataa

SEQ ID NO: 856876 - DNA, 15 bp, Homo sapiens
gtacgtttttataaa

SEQ ID NO: 856877 - DNA, 15 bp, Homo sapiens
tacgtttttataaac

SEQ ID NO: 856878 - DNA, 15 bp, Homo sapiens
acgtttttataaaca

SEQ ID NO: 856879 - DNA, 15 bp, Homo sapiens
cgtttttataaacag

SEQ ID NO: 856880 - DNA, 15 bp, Homo sapiens
gtttttataaacagc

SEQ ID NO: 856881 - DNA, 15 bp, Homo sapiens
tttttataaacagca

SEQ ID NO: 856882 - DNA, 15 bp, Homo sapiens
ttttataaacagcag

SEQ ID NO: 856883 - DNA, 15 bp, Homo sapiens
tttataaacagcaga

SEQ ID NO: 856884 - DNA, 15 bp, Homo sapiens
ttataaacagcagac

SEQ ID NO: 856885 - DNA, 15 bp, Homo sapiens
tataaacagcagact

SEQ ID NO: 856886 - DNA, 15 bp, Homo sapiens
ataaacagcagactg

SEQ ID NO: 856887 - DNA, 15 bp, Homo sapiens
taaacagcagactgg

SEQ ID NO: 856888 - DNA, 15 bp, Homo sapiens
aaacagcagactgga

SEQ ID NO: 856889 - DNA, 15 bp, Homo sapiens
aacagcagactggaa

SEQ ID NO: 856890 - DNA, 15 bp, Homo sapiens
acagcagactggaat

SEQ ID NO: 856891 - DNA, 15 bp, Homo sapiens
cagcagactggaatt

SEQ ID NO: 856892 - DNA, 15 bp, Homo sapiens
agcagactggaattg

SEQ ID NO: 856893 - DNA, 15 bp, Homo sapiens
gcagactggaattgt

SEQ ID NO: 856894 - DNA, 15 bp, Homo sapiens
cagactggaattgtt

SEQ ID NO: 856895 - DNA, 15 bp, Homo sapiens
agactggaattgtta

SEQ ID NO: 856896 - DNA, 15 bp, Homo sapiens
gactggaattgttaa

SEQ ID NO: 856897 - DNA, 15 bp, Homo sapiens
actggaattgttaag

SEQ ID NO: 856898 - DNA, 15 bp, Homo sapiens
ctggaattgttaagt

SEQ ID NO: 856899 - DNA, 15 bp, Homo sapiens
tggaattgttaagta

SEQ ID NO: 856900 - DNA, 15 bp, Homo sapiens
ggaattgttaagtat

SEQ ID NO: 856901 - DNA, 15 bp, Homo sapiens
gaattgttaagtata

SEQ ID NO: 856902 - DNA, 15 bp, Homo sapiens
aattgttaagtatat

SEQ ID NO: 856903 - DNA, 15 bp, Homo sapiens
attgttaagtatatc

SEQ ID NO: 856904 - DNA, 15 bp, Homo sapiens
ttgttaagtatatcc

SEQ ID NO: 856905 - DNA, 15 bp, Homo sapiens
tgttaagtatatcca

SEQ ID NO: 856906 - DNA, 15 bp, Homo sapiens
gttaagtatatccaa

SEQ ID NO: 856907 - DNA, 15 bp, Homo sapiens
ttaagtatatccaac

SEQ ID NO: 856908 - DNA, 15 bp, Homo sapiens
taagtatatccaact

SEQ ID NO: 856909 - DNA, 15 bp, Homo sapiens
aagtatatccaactg

SEQ ID NO: 856910 - DNA, 15 bp, Homo sapiens
agtatatccaactgc

SEQ ID NO: 856911 - DNA, 15 bp, Homo sapiens
gtatatccaactgct

SEQ ID NO: 856912 - DNA, 15 bp, Homo sapiens
actctcgggaagttc

SEQ ID NO: 856913 - DNA, 15 bp, Homo sapiens
ctctcgggaagttca

SEQ ID NO: 856914 - DNA, 15 bp, Homo sapiens
tctcgggaagttcag

SEQ ID NO: 856915 - DNA, 15 bp, Homo sapiens
ctcgggaagttcagc

SEQ ID NO: 856916 - DNA, 15 bp, Homo sapiens
tcgggaagttcagca

SEQ ID NO: 856917 - DNA, 15 bp, Homo sapiens
cgggaagttcagcaa

SEQ ID NO: 856918 - DNA, 15 bp, Homo sapiens
gggaagttcagcaaa

SEQ ID NO: 856919 - DNA, 15 bp, Homo sapiens
ggaagttcagcaaag

SEQ ID NO: 856920 - DNA, 15 bp, Homo sapiens
gaagttcagcaaagg

SEQ ID NO: 856921 - DNA, 15 bp, Homo sapiens
aagttcagcaaaggc

SEQ ID NO: 856922 - DNA, 15 bp, Homo sapiens
agttcagcaaaggca

SEQ ID NO: 856923 - DNA, 15 bp, Homo sapiens
gttcagcaaaggcat

SEQ ID NO: 856924 - DNA, 15 bp, Homo sapiens
ttcagcaaaggcatc

SEQ ID NO: 856925 - DNA, 15 bp, Homo sapiens
tcagcaaaggcatcc

SEQ ID NO: 856926 - DNA, 15 bp, Homo sapiens
cagcaaaggcatcct

SEQ ID NO: 856927 - DNA, 15 bp, Homo sapiens
agcaaaggcatcctt

SEQ ID NO: 856928 - DNA, 15 bp, Homo sapiens
gcaaaggcatcctta

SEQ ID NO: 856929 - DNA, 15 bp, Homo sapiens
caaaggcatccttag

SEQ ID NO: 856930 - DNA, 15 bp, Homo sapiens
aaaggcatccttaga

SEQ ID NO: 856931 - DNA, 15 bp, Homo sapiens
aaggcatccttagat

SEQ ID NO: 856932 - DNA, 15 bp, Homo sapiens
aggcatccttagata

SEQ ID NO: 856933 - DNA, 15 bp, Homo sapiens
ggcatccttagatac

SEQ ID NO: 856934 - DNA, 15 bp, Homo sapiens
gcatccttagatact

SEQ ID NO: 856935 - DNA, 15 bp, Homo sapiens
catccttagatactg

SEQ ID NO: 856936 - DNA, 15 bp, Homo sapiens
atccttagatactgt

SEQ ID NO: 856937 - DNA, 15 bp, Homo sapiens
tccttagatactgta

SEQ ID NO: 856938 - DNA, 15 bp, Homo sapiens
ccttagatactgtat

SEQ ID NO: 856939 - DNA, 15 bp, Homo sapiens
cttagatactgtatt

SEQ ID NO: 856940 - DNA, 15 bp, Homo sapiens
ttagatactgtatta

SEQ ID NO: 856941 - DNA, 15 bp, Homo sapiens
tagatactgtattaa

SEQ ID NO: 856942 - DNA, 15 bp, Homo sapiens
agatactgtattaac

SEQ ID NO: 856943 - DNA, 15 bp, Homo sapiens
gatactgtattaaca

SEQ ID NO: 856944 - DNA, 15 bp, Homo sapiens
atactgtattaacac

SEQ ID NO: 856945 - DNA, 15 bp, Homo sapiens
tactgtattaacacg

SEQ ID NO: 856946 - DNA, 15 bp, Homo sapiens
actgtattaacacgt

SEQ ID NO: 856947 - DNA, 15 bp, Homo sapiens
ctgtattaacacgta

SEQ ID NO: 856948 - DNA, 15 bp, Homo sapiens
tgtattaacacgtaa

SEQ ID NO: 856949 - DNA, 15 bp, Homo sapiens
gtattaacacgtaat

SEQ ID NO: 856950 - DNA, 15 bp, Homo sapiens
tattaacacgtaatc

SEQ ID NO: 856951 - DNA, 15 bp, Homo sapiens
attaacacgtaatcg

SEQ ID NO: 856952 - DNA, 15 bp, Homo sapiens
ttaacacgtaatcgt

SEQ ID NO: 856953 - DNA, 15 bp, Homo sapiens
taacacgtaatcgtt

SEQ ID NO: 856954 - DNA, 15 bp, Homo sapiens
aacacgtaatcgttt

SEQ ID NO: 856955 - DNA, 15 bp, Homo sapiens
acacgtaatcgtttc

SEQ ID NO: 856956 - DNA, 15 bp, Homo sapiens
cacgtaatcgtttca

SEQ ID NO: 856957 - DNA, 15 bp, Homo sapiens
acgtaatcgtttcac

SEQ ID NO: 856958 - DNA, 15 bp, Homo sapiens
cgtaatcgtttcaca

SEQ ID NO: 856959 - DNA, 15 bp, Homo sapiens
gtaatcgtttcacat

SEQ ID NO: 856960 - DNA, 15 bp, Homo sapiens
taatcgtttcacatc

SEQ ID NO: 856961 - DNA, 15 bp, Homo sapiens
aatcgtttcacatct

SEQ ID NO: 856962 - DNA, 15 bp, Homo sapiens
atcgtttcacatcta

SEQ ID NO: 856963 - DNA, 15 bp, Homo sapiens
tcgtttcacatctaa

SEQ ID NO: 856964 - DNA, 15 bp, Homo sapiens
cgtttcacatctaat

SEQ ID NO: 856965 - DNA, 15 bp, Homo sapiens
gtttcacatctaatt

SEQ ID NO: 856966 - DNA, 15 bp, Homo sapiens
tttcacatctaattt

SEQ ID NO: 856967 - DNA, 15 bp, Homo sapiens
ttcacatctaatttg

SEQ ID NO: 856968 - DNA, 15 bp, Homo sapiens
tcacatctaatttga

SEQ ID NO: 856969 - DNA, 15 bp, Homo sapiens
cacatctaatttgat

SEQ ID NO: 856970 - DNA, 15 bp, Homo sapiens
acatctaatttgatg

SEQ ID NO: 856971 - DNA, 15 bp, Homo sapiens
catctaatttgatga

SEQ ID NO: 856972 - DNA, 15 bp, Homo sapiens
atctaatttgatgaa

SEQ ID NO: 856973 - DNA, 15 bp, Homo sapiens
tctaatttgatgaaa

SEQ ID NO: 856974 - DNA, 15 bp, Homo sapiens
ctaatttgatgaaag

SEQ ID NO: 856975 - DNA, 15 bp, Homo sapiens
taatttgatgaaagc

SEQ ID NO: 856976 - DNA, 15 bp, Homo sapiens
aatttgatgaaagct

SEQ ID NO: 856977 - DNA, 15 bp, Homo sapiens
atttgatgaaagctt

SEQ ID NO: 856978 - DNA, 15 bp, Homo sapiens
tttgatgaaagcttg

SEQ ID NO: 856979 - DNA, 15 bp, Homo sapiens
ttgatgaaagcttgt

SEQ ID NO: 856980 - DNA, 15 bp, Homo sapiens
tgatgaaagcttgtc

SEQ ID NO: 856981 - DNA, 15 bp, Homo sapiens
gatgaaagcttgtcc

SEQ ID NO: 856982 - DNA, 15 bp, Homo sapiens
atgaaagcttgtccc

SEQ ID NO: 856983 - DNA, 15 bp, Homo sapiens
tgaaagcttgtccca

SEQ ID NO: 856984 - DNA, 15 bp, Homo sapiens
gaaagcttgtcccag

SEQ ID NO: 856985 - DNA, 15 bp, Homo sapiens
aaagcttgtcccagc

SEQ ID NO: 856986 - DNA, 15 bp, Homo sapiens
aagcttgtcccagcc

SEQ ID NO: 856987 - DNA, 15 bp, Homo sapiens
agcttgtcccagcct

SEQ ID NO: 856988 - DNA, 15 bp, Homo sapiens
gcttgtcccagcctc

SEQ ID NO: 856989 - DNA, 15 bp, Homo sapiens
cttgtcccagcctct

SEQ ID NO: 856990 - DNA, 15 bp, Homo sapiens
ttgtcccagcctctg

SEQ ID NO: 856991 - DNA, 15 bp, Homo sapiens
tgtcccagcctctgc

SEQ ID NO: 856992 - DNA, 15 bp, Homo sapiens
gtcccagcctctgcc

SEQ ID NO: 856993 - DNA, 15 bp, Homo sapiens
tcccagcctctgcct

SEQ ID NO: 856994 - DNA, 15 bp, Homo sapiens
cccagcctctgccta

SEQ ID NO: 856995 - DNA, 15 bp, Homo sapiens
ccagcctctgcctaa

SEQ ID NO: 856996 - DNA, 15 bp, Homo sapiens
cagcctctgcctaat

SEQ ID NO: 856997 - DNA, 15 bp, Homo sapiens
agcctctgcctaatg

SEQ ID NO: 856998 - DNA, 15 bp, Homo sapiens
gcctctgcctaatgc

SEQ ID NO: 856999 - DNA, 15 bp, Homo sapiens
cctctgcctaatgcc

SEQ ID NO: 857000 - DNA, 15 bp, Homo sapiens
ctctgcctaatgccc

SEQ ID NO: 857001 - DNA, 15 bp, Homo sapiens
tctgcctaatgccca

SEQ ID NO: 857002 - DNA, 15 bp, Homo sapiens
ctgcctaatgcccag

SEQ ID NO: 857003 - DNA, 15 bp, Homo sapiens
tgcctaatgcccaga

SEQ ID NO: 857004 - DNA, 15 bp, Homo sapiens
gcctaatgcccagaa

SEQ ID NO: 857005 - DNA, 15 bp, Homo sapiens
cctaatgcccagaaa

SEQ ID NO: 857006 - DNA, 15 bp, Homo sapiens
ctaatgcccagaaat

SEQ ID NO: 857007 - DNA, 15 bp, Homo sapiens
taatgcccagaaatg

SEQ ID NO: 857008 - DNA, 15 bp, Homo sapiens
aatgcccagaaatgg

SEQ ID NO: 857009 - DNA, 15 bp, Homo sapiens
atgcccagaaatgga

SEQ ID NO: 857010 - DNA, 15 bp, Homo sapiens
tgcccagaaatggat

SEQ ID NO: 857011 - DNA, 15 bp, Homo sapiens
gcccagaaatggatg

SEQ ID NO: 857012 - DNA, 15 bp, Homo sapiens
cccagaaatggatgg

SEQ ID NO: 857013 - DNA, 15 bp, Homo sapiens
ccagaaatggatgga

SEQ ID NO: 857014 - DNA, 15 bp, Homo sapiens
cagaaatggatggaa

SEQ ID NO: 857015 - DNA, 15 bp, Homo sapiens
agaaatggatggaaa

SEQ ID NO: 857016 - DNA, 15 bp, Homo sapiens
gaaatggatggaaat

SEQ ID NO: 857017 - DNA, 15 bp, Homo sapiens
aaatggatggaaatt

SEQ ID NO: 857018 - DNA, 15 bp, Homo sapiens
aatggatggaaatta

SEQ ID NO: 857019 - DNA, 15 bp, Homo sapiens
atggatggaaattag

SEQ ID NO: 857020 - DNA, 15 bp, Homo sapiens
tggatggaaattaga

SEQ ID NO: 857021 - DNA, 15 bp, Homo sapiens
ggatggaaattagaa

SEQ ID NO: 857022 - DNA, 15 bp, Homo sapiens
gatggaaattagaaa

SEQ ID NO: 857023 - DNA, 15 bp, Homo sapiens
atggaaattagaaag

SEQ ID NO: 857024 - DNA, 15 bp, Homo sapiens
tggaaattagaaagc

SEQ ID NO: 857025 - DNA, 15 bp, Homo sapiens
ggaaattagaaagcc

SEQ ID NO: 857026 - DNA, 15 bp, Homo sapiens
gaaattagaaagcct

SEQ ID NO: 857027 - DNA, 15 bp, Homo sapiens
aaattagaaagccta

SEQ ID NO: 857028 - DNA, 15 bp, Homo sapiens
aattagaaagcctac

SEQ ID NO: 857029 - DNA, 15 bp, Homo sapiens
attagaaagcctaca

SEQ ID NO: 857030 - DNA, 15 bp, Homo sapiens
ttagaaagcctacat

SEQ ID NO: 857031 - DNA, 15 bp, Homo sapiens
tagaaagcctacata

SEQ ID NO: 857032 - DNA, 15 bp, Homo sapiens
agaaagcctacatat

SEQ ID NO: 857033 - DNA, 15 bp, Homo sapiens
gaaagcctacatatt

SEQ ID NO: 857034 - DNA, 15 bp, Homo sapiens
aaagcctacatatta

SEQ ID NO: 857035 - DNA, 15 bp, Homo sapiens
aagcctacatattag

SEQ ID NO: 857036 - DNA, 15 bp, Homo sapiens
agcctacatattaga

SEQ ID NO: 857037 - DNA, 15 bp, Homo sapiens
gcctacatattagat

SEQ ID NO: 857038 - DNA, 15 bp, Homo sapiens
cctacatattagata

SEQ ID NO: 857039 - DNA, 15 bp, Homo sapiens
ctacatattagatat

SEQ ID NO: 857040 - DNA, 15 bp, Homo sapiens
tacatattagatatt

SEQ ID NO: 857041 - DNA, 15 bp, Homo sapiens
acatattagatattt

SEQ ID NO: 857042 - DNA, 15 bp, Homo sapiens
catattagatatttt

SEQ ID NO: 857043 - DNA, 15 bp, Homo sapiens
atattagatattttt

SEQ ID NO: 857044 - DNA, 15 bp, Homo sapiens
tattagatatttttg

SEQ ID NO: 857045 - DNA, 15 bp, Homo sapiens
attagatatttttgc

SEQ ID NO: 857046 - DNA, 15 bp, Homo sapiens
ttagatatttttgca

SEQ ID NO: 857047 - DNA, 15 bp, Homo sapiens
tagatatttttgcat

SEQ ID NO: 857048 - DNA, 15 bp, Homo sapiens
agatatttttgcatc

SEQ ID NO: 857049 - DNA, 15 bp, Homo sapiens
gatatttttgcatct

SEQ ID NO: 857050 - DNA, 15 bp, Homo sapiens
atatttttgcatctt

SEQ ID NO: 857051 - DNA, 15 bp, Homo sapiens
tatttttgcatcttg

SEQ ID NO: 857052 - DNA, 15 bp, Homo sapiens
atttttgcatcttgc

SEQ ID NO: 857053 - DNA, 15 bp, Homo sapiens
tttttgcatcttgca

SEQ ID NO: 857054 - DNA, 15 bp, Homo sapiens
ttttgcatcttgcaa

SEQ ID NO: 857055 - DNA, 15 bp, Homo sapiens
tttgcatcttgcaaa

SEQ ID NO: 857056 - DNA, 15 bp, Homo sapiens
ttgcatcttgcaaaa

SEQ ID NO: 857057 - DNA, 15 bp, Homo sapiens
tgcatcttgcaaaaa

SEQ ID NO: 857058 - DNA, 15 bp, Homo sapiens
gcatcttgcaaaaac

SEQ ID NO: 857059 - DNA, 15 bp, Homo sapiens
catcttgcaaaaacc

SEQ ID NO: 857060 - DNA, 15 bp, Homo sapiens
atcttgcaaaaacca

SEQ ID NO: 857061 - DNA, 15 bp, Homo sapiens
tcttgcaaaaaccat

SEQ ID NO: 857062 - DNA, 15 bp, Homo sapiens
cttgcaaaaaccatt

SEQ ID NO: 857063 - DNA, 15 bp, Homo sapiens
ttgcaaaaaccattt

SEQ ID NO: 857064 - DNA, 15 bp, Homo sapiens
tgcaaaaaccattta

SEQ ID NO: 857065 - DNA, 15 bp, Homo sapiens
gcaaaaaccatttat

SEQ ID NO: 857066 - DNA, 15 bp, Homo sapiens
caaaaaccatttatt

SEQ ID NO: 857067 - DNA, 15 bp, Homo sapiens
aaaaaccatttatta

SEQ ID NO: 857068 - DNA, 15 bp, Homo sapiens
aaaaccatttattat

SEQ ID NO: 857069 - DNA, 15 bp, Homo sapiens
aaaccatttattata

SEQ ID NO: 857070 - DNA, 15 bp, Homo sapiens
aaccatttattatac

SEQ ID NO: 857071 - DNA, 15 bp, Homo sapiens
accatttattatacc

SEQ ID NO: 857072 - DNA, 15 bp, Homo sapiens
ccatttattatacca

SEQ ID NO: 857073 - DNA, 15 bp, Homo sapiens
catttattataccaa

SEQ ID NO: 857074 - DNA, 15 bp, Homo sapiens
atttattataccaaa

SEQ ID NO: 857075 - DNA, 15 bp, Homo sapiens
tttattataccaaat

SEQ ID NO: 857076 - DNA, 15 bp, Homo sapiens
ttattataccaaata

SEQ ID NO: 857077 - DNA, 15 bp, Homo sapiens
tattataccaaataa

SEQ ID NO: 857078 - DNA, 15 bp, Homo sapiens
attataccaaataag

SEQ ID NO: 857079 - DNA, 15 bp, Homo sapiens
ttataccaaataagc

SEQ ID NO: 857080 - DNA, 15 bp, Homo sapiens
tataccaaataagca

SEQ ID NO: 857081 - DNA, 15 bp, Homo sapiens
ataccaaataagcag

SEQ ID NO: 857082 - DNA, 15 bp, Homo sapiens
taccaaataagcagc

SEQ ID NO: 857083 - DNA, 15 bp, Homo sapiens
accaaataagcagct

SEQ ID NO: 857084 - DNA, 15 bp, Homo sapiens
ccaaataagcagcta

SEQ ID NO: 857085 - DNA, 15 bp, Homo sapiens
caaataagcagctaa

SEQ ID NO: 857086 - DNA, 15 bp, Homo sapiens
aaataagcagctaat

SEQ ID NO: 857087 - DNA, 15 bp, Homo sapiens
aataagcagctaatt

SEQ ID NO: 857088 - DNA, 15 bp, Homo sapiens
ataagcagctaattt

SEQ ID NO: 857089 - DNA, 15 bp, Homo sapiens
taagcagctaatttc

SEQ ID NO: 857090 - DNA, 15 bp, Homo sapiens
aagcagctaatttca

SEQ ID NO: 857091 - DNA, 15 bp, Homo sapiens
agcagctaatttcat

SEQ ID NO: 857092 - DNA, 15 bp, Homo sapiens
gcagctaatttcatt

SEQ ID NO: 857093 - DNA, 15 bp, Homo sapiens
cagctaatttcattg

SEQ ID NO: 857094 - DNA, 15 bp, Homo sapiens
agctaatttcattga

SEQ ID NO: 857095 - DNA, 15 bp, Homo sapiens
gctaatttcattgat

SEQ ID NO: 857096 - DNA, 15 bp, Homo sapiens
ctaatttcattgatt

SEQ ID NO: 857097 - DNA, 15 bp, Homo sapiens
taatttcattgattg

SEQ ID NO: 857098 - DNA, 15 bp, Homo sapiens
aatttcattgattgg

SEQ ID NO: 857099 - DNA, 15 bp, Homo sapiens
atttcattgattggc

SEQ ID NO: 857100 - DNA, 15 bp, Homo sapiens
tttcattgattggca

SEQ ID NO: 857101 - DNA, 15 bp, Homo sapiens
ttcattgattggcag

SEQ ID NO: 857102 - DNA, 15 bp, Homo sapiens
tcattgattggcagt

SEQ ID NO: 857103 - DNA, 15 bp, Homo sapiens
cattgattggcagtg

SEQ ID NO: 857104 - DNA, 15 bp, Homo sapiens
attgattggcagtgt

SEQ ID NO: 857105 - DNA, 15 bp, Homo sapiens
ttgattggcagtgtg

SEQ ID NO: 857106 - DNA, 15 bp, Homo sapiens
tgattggcagtgtgt

SEQ ID NO: 857107 - DNA, 15 bp, Homo sapiens
gattggcagtgtgta

SEQ ID NO: 857108 - DNA, 15 bp, Homo sapiens
attggcagtgtgtat

SEQ ID NO: 857109 - DNA, 15 bp, Homo sapiens
ttggcagtgtgtata

SEQ ID NO: 857110 - DNA, 15 bp, Homo sapiens
tggcagtgtgtatat

SEQ ID NO: 857111 - DNA, 15 bp, Homo sapiens
ggcagtgtgtatatt

SEQ ID NO: 857112 - DNA, 15 bp, Homo sapiens
gcagtgtgtatattt

SEQ ID NO: 857113 - DNA, 15 bp, Homo sapiens
cagtgtgtatatttt

SEQ ID NO: 857114 - DNA, 15 bp, Homo sapiens
agtgtgtatattttg

SEQ ID NO: 857115 - DNA, 15 bp, Homo sapiens
gtgtgtatattttgt

SEQ ID NO: 857116 - DNA, 15 bp, Homo sapiens
tgtgtatattttgtc

SEQ ID NO: 857117 - DNA, 15 bp, Homo sapiens
gtgtatattttgtcc

SEQ ID NO: 857118 - DNA, 15 bp, Homo sapiens
tgtatattttgtcct

SEQ ID NO: 857119 - DNA, 15 bp, Homo sapiens
gtatattttgtcctc

SEQ ID NO: 857120 - DNA, 15 bp, Homo sapiens
tatattttgtcctcc

SEQ ID NO: 857121 - DNA, 15 bp, Homo sapiens
atattttgtcctcct

SEQ ID NO: 857122 - DNA, 15 bp, Homo sapiens
tattttgtcctcctg

SEQ ID NO: 857123 - DNA, 15 bp, Homo sapiens
attttgtcctcctgt

SEQ ID NO: 857124 - DNA, 15 bp, Homo sapiens
ttttgtcctcctgta

SEQ ID NO: 857125 - DNA, 15 bp, Homo sapiens
tttgtcctcctgtat

SEQ ID NO: 857126 - DNA, 15 bp, Homo sapiens
ttgtcctcctgtatt

SEQ ID NO: 857127 - DNA, 15 bp, Homo sapiens
tgtcctcctgtatta

SEQ ID NO: 857128 - DNA, 15 bp, Homo sapiens
gtcctcctgtattaa

SEQ ID NO: 857129 - DNA, 15 bp, Homo sapiens
tcctcctgtattaat

SEQ ID NO: 857130 - DNA, 15 bp, Homo sapiens
cctcctgtattaatc

SEQ ID NO: 857131 - DNA, 15 bp, Homo sapiens
ctcctgtattaatca

SEQ ID NO: 857132 - DNA, 15 bp, Homo sapiens
tcctgtattaatcat

SEQ ID NO: 857133 - DNA, 15 bp, Homo sapiens
cctgtattaatcata

SEQ ID NO: 857134 - DNA, 15 bp, Homo sapiens
ctgtattaatcatat

SEQ ID NO: 857135 - DNA, 15 bp, Homo sapiens
tgtattaatcatatc

SEQ ID NO: 857136 - DNA, 15 bp, Homo sapiens
gtattaatcatatca

SEQ ID NO: 857137 - DNA, 15 bp, Homo sapiens
tattaatcatatcag

SEQ ID NO: 857138 - DNA, 15 bp, Homo sapiens
attaatcatatcagg

SEQ ID NO: 857139 - DNA, 15 bp, Homo sapiens
ttaatcatatcaggg

SEQ ID NO: 857140 - DNA, 15 bp, Homo sapiens
taatcatatcagggg

SEQ ID NO: 857141 - DNA, 15 bp, Homo sapiens
aatcatatcagggga

SEQ ID NO: 857142 - DNA, 15 bp, Homo sapiens
atcatatcaggggaa

SEQ ID NO: 857143 - DNA, 15 bp, Homo sapiens
tcatatcaggggaaa

SEQ ID NO: 857144 - DNA, 15 bp, Homo sapiens
catatcaggggaaaa

SEQ ID NO: 857145 - DNA, 15 bp, Homo sapiens
atatcaggggaaaag

SEQ ID NO: 857146 - DNA, 15 bp, Homo sapiens
tatcaggggaaaagt

SEQ ID NO: 857147 - DNA, 15 bp, Homo sapiens
atcaggggaaaagtg

SEQ ID NO: 857148 - DNA, 15 bp, Homo sapiens
tcaggggaaaagtgt

SEQ ID NO: 857149 - DNA, 15 bp, Homo sapiens
caggggaaaagtgtt

SEQ ID NO: 857150 - DNA, 15 bp, Homo sapiens
aggggaaaagtgttg

SEQ ID NO: 857151 - DNA, 15 bp, Homo sapiens
ggggaaaagtgttgg

SEQ ID NO: 857152 - DNA, 15 bp, Homo sapiens
gggaaaagtgttggt

SEQ ID NO: 857153 - DNA, 15 bp, Homo sapiens
ggaaaagtgttggtt

SEQ ID NO: 857154 - DNA, 15 bp, Homo sapiens
gaaaagtgttggtta

SEQ ID NO: 857155 - DNA, 15 bp, Homo sapiens
aaaagtgttggttac

SEQ ID NO: 857156 - DNA, 15 bp, Homo sapiens
aaagtgttggttacg

SEQ ID NO: 857157 - DNA, 15 bp, Homo sapiens
aagtgttggttacgt

SEQ ID NO: 857158 - DNA, 15 bp, Homo sapiens
agtgttggttacgtt

SEQ ID NO: 857159 - DNA, 15 bp, Homo sapiens
gtgttggttacgttt

SEQ ID NO: 857160 - DNA, 15 bp, Homo sapiens
tgttggttacgtttt

SEQ ID NO: 857161 - DNA, 15 bp, Homo sapiens
gttggttacgttttt

SEQ ID NO: 857162 - DNA, 15 bp, Homo sapiens
ttggttacgtttttt

SEQ ID NO: 857163 - DNA, 15 bp, Homo sapiens
tggttacgttttttg

SEQ ID NO: 857164 - DNA, 15 bp, Homo sapiens
ggttacgttttttgc

SEQ ID NO: 857165 - DNA, 15 bp, Homo sapiens
gttacgttttttgct

SEQ ID NO: 857166 - DNA, 15 bp, Homo sapiens
ttacgttttttgctg

SEQ ID NO: 857167 - DNA, 15 bp, Homo sapiens
tacgttttttgctgt

SEQ ID NO: 857168 - DNA, 15 bp, Homo sapiens
acgttttttgctgtc

SEQ ID NO: 857169 - DNA, 15 bp, Homo sapiens
cgttttttgctgtcg

SEQ ID NO: 857170 - DNA, 15 bp, Homo sapiens
gttttttgctgtcga

SEQ ID NO: 857171 - DNA, 15 bp, Homo sapiens
ttttttgctgtcgat

SEQ ID NO: 857172 - DNA, 15 bp, Homo sapiens
tttttgctgtcgata

SEQ ID NO: 857173 - DNA, 15 bp, Homo sapiens
ttttgctgtcgataa

SEQ ID NO: 857174 - DNA, 15 bp, Homo sapiens
tttgctgtcgataat

SEQ ID NO: 857175 - DNA, 15 bp, Homo sapiens
ttgctgtcgataatt

SEQ ID NO: 857176 - DNA, 15 bp, Homo sapiens
tgctgtcgataattt

SEQ ID NO: 857177 - DNA, 15 bp, Homo sapiens
gctgtcgataatttg

SEQ ID NO: 857178 - DNA, 15 bp, Homo sapiens
ctgtcgataatttgc

SEQ ID NO: 857179 - DNA, 15 bp, Homo sapiens
tgtcgataatttgct

SEQ ID NO: 857180 - DNA, 15 bp, Homo sapiens
gtcgataatttgctc

SEQ ID NO: 857181 - DNA, 15 bp, Homo sapiens
tcgataatttgctct

SEQ ID NO: 857182 - DNA, 15 bp, Homo sapiens
cgataatttgctctt

SEQ ID NO: 857183 - DNA, 15 bp, Homo sapiens
gataatttgctcttc

SEQ ID NO: 857184 - DNA, 15 bp, Homo sapiens
ataatttgctcttct

SEQ ID NO: 857185 - DNA, 15 bp, Homo sapiens
taatttgctcttctt

SEQ ID NO: 857186 - DNA, 15 bp, Homo sapiens
aatttgctcttcttc

SEQ ID NO: 857187 - DNA, 15 bp, Homo sapiens
atttgctcttcttcc

SEQ ID NO: 857188 - DNA, 15 bp, Homo sapiens
tttgctcttcttccc

SEQ ID NO: 857189 - DNA, 15 bp, Homo sapiens
ttgctcttcttccca

SEQ ID NO: 857190 - DNA, 15 bp, Homo sapiens
tgctcttcttcccat

SEQ ID NO: 857191 - DNA, 15 bp, Homo sapiens
gctcttcttcccatt

SEQ ID NO: 857192 - DNA, 15 bp, Homo sapiens
ctcttcttcccattt

SEQ ID NO: 857193 - DNA, 15 bp, Homo sapiens
tcttcttcccatttg

SEQ ID NO: 857194 - DNA, 15 bp, Homo sapiens
cttcttcccatttga

SEQ ID NO: 857195 - DNA, 15 bp, Homo sapiens
ttcttcccatttgag

SEQ ID NO: 857196 - DNA, 15 bp, Homo sapiens
tcttcccatttgaga

SEQ ID NO: 857197 - DNA, 15 bp, Homo sapiens
cttcccatttgagaa

SEQ ID NO: 857198 - DNA, 15 bp, Homo sapiens
ttcccatttgagaac

SEQ ID NO: 857199 - DNA, 15 bp, Homo sapiens
tcccatttgagaacc

SEQ ID NO: 857200 - DNA, 15 bp, Homo sapiens
cccatttgagaaccc

SEQ ID NO: 857201 - DNA, 15 bp, Homo sapiens
ccatttgagaacccg

SEQ ID NO: 857202 - DNA, 15 bp, Homo sapiens
catttgagaacccga

SEQ ID NO: 857203 - DNA, 15 bp, Homo sapiens
atttgagaacccgag

SEQ ID NO: 857204 - DNA, 15 bp, Homo sapiens
tttgagaacccgagt

SEQ ID NO: 857205 - DNA, 15 bp, Homo sapiens
ttgagaacccgagtg

SEQ ID NO: 857206 - DNA, 15 bp, Homo sapiens
tgagaacccgagtgt

SEQ ID NO: 857207 - DNA, 15 bp, Homo sapiens
gagaacccgagtgta

SEQ ID NO: 857208 - DNA, 15 bp, Homo sapiens
agaacccgagtgtat

SEQ ID NO: 857209 - DNA, 15 bp, Homo sapiens
gaacccgagtgtatt

SEQ ID NO: 857210 - DNA, 15 bp, Homo sapiens
aacccgagtgtattc

SEQ ID NO: 857211 - DNA, 15 bp, Homo sapiens
acccgagtgtattca

SEQ ID NO: 857212 - DNA, 15 bp, Homo sapiens
cccgagtgtattcag

SEQ ID NO: 857213 - DNA, 15 bp, Homo sapiens
ccgagtgtattcagc

SEQ ID NO: 857214 - DNA, 15 bp, Homo sapiens
cgagtgtattcagcc

SEQ ID NO: 857215 - DNA, 15 bp, Homo sapiens
gagtgtattcagcca

SEQ ID NO: 857216 - DNA, 15 bp, Homo sapiens
agtgtattcagccat

SEQ ID NO: 857217 - DNA, 15 bp, Homo sapiens
gtgtattcagccatg

SEQ ID NO: 857218 - DNA, 15 bp, Homo sapiens
tgtattcagccatgc

SEQ ID NO: 857219 - DNA, 15 bp, Homo sapiens
gtattcagccatgcc

SEQ ID NO: 857220 - DNA, 15 bp, Homo sapiens
tattcagccatgccc

SEQ ID NO: 857221 - DNA, 15 bp, Homo sapiens
attcagccatgccct

SEQ ID NO: 857222 - DNA, 15 bp, Homo sapiens
ttcagccatgccctt

SEQ ID NO: 857223 - DNA, 15 bp, Homo sapiens
tcagccatgcccttt

SEQ ID NO: 857224 - DNA, 15 bp, Homo sapiens
cagccatgccctttt

SEQ ID NO: 857225 - DNA, 15 bp, Homo sapiens
agccatgcccttttc

SEQ ID NO: 857226 - DNA, 15 bp, Homo sapiens
gccatgcccttttcc

SEQ ID NO: 857227 - DNA, 15 bp, Homo sapiens
ccatgcccttttcct

SEQ ID NO: 857228 - DNA, 15 bp, Homo sapiens
catgcccttttcctg

SEQ ID NO: 857229 - DNA, 15 bp, Homo sapiens
atgcccttttcctgt

SEQ ID NO: 857230 - DNA, 15 bp, Homo sapiens
tgcccttttcctgtg

SEQ ID NO: 857231 - DNA, 15 bp, Homo sapiens
gcccttttcctgtgg

SEQ ID NO: 857232 - DNA, 15 bp, Homo sapiens
cccttttcctgtggt

SEQ ID NO: 857233 - DNA, 15 bp, Homo sapiens
ccttttcctgtggtc

SEQ ID NO: 857234 - DNA, 15 bp, Homo sapiens
cttttcctgtggtca

SEQ ID NO: 857235 - DNA, 15 bp, Homo sapiens
ttttcctgtggtcac

SEQ ID NO: 857236 - DNA, 15 bp, Homo sapiens
tttcctgtggtcacc

SEQ ID NO: 857237 - DNA, 15 bp, Homo sapiens
ttcctgtggtcaccg

SEQ ID NO: 857238 - DNA, 15 bp, Homo sapiens
tcctgtggtcaccgc

SEQ ID NO: 857239 - DNA, 15 bp, Homo sapiens
cctgtggtcaccgct

SEQ ID NO: 857240 - DNA, 15 bp, Homo sapiens
ctgtggtcaccgctt

SEQ ID NO: 857241 - DNA, 15 bp, Homo sapiens
tgtggtcaccgcttt

SEQ ID NO: 857242 - DNA, 15 bp, Homo sapiens
gtggtcaccgcttta

SEQ ID NO: 857243 - DNA, 15 bp, Homo sapiens
tggtcaccgctttac

SEQ ID NO: 857244 - DNA, 15 bp, Homo sapiens
ggtcaccgctttacc

SEQ ID NO: 857245 - DNA, 15 bp, Homo sapiens
gtcaccgctttacct

SEQ ID NO: 857246 - DNA, 15 bp, Homo sapiens
tcaccgctttaccta

SEQ ID NO: 857247 - DNA, 15 bp, Homo sapiens
caccgctttacctag

SEQ ID NO: 857248 - DNA, 15 bp, Homo sapiens
accgctttacctagg

SEQ ID NO: 857249 - DNA, 15 bp, Homo sapiens
ccgctttacctaggg

SEQ ID NO: 857250 - DNA, 15 bp, Homo sapiens
cgctttacctagggg

SEQ ID NO: 857251 - DNA, 15 bp, Homo sapiens
gctttacctagggga

SEQ ID NO: 857252 - DNA, 15 bp, Homo sapiens
ctttacctaggggag

SEQ ID NO: 857253 - DNA, 15 bp, Homo sapiens
tttacctaggggaga

SEQ ID NO: 857254 - DNA, 15 bp, Homo sapiens
ttacctaggggagaa

SEQ ID NO: 857255 - DNA, 15 bp, Homo sapiens
tacctaggggagaaa

SEQ ID NO: 857256 - DNA, 15 bp, Homo sapiens
acctaggggagaaaa

SEQ ID NO: 857257 - DNA, 15 bp, Homo sapiens
cctaggggagaaaaa

SEQ ID NO: 857258 - DNA, 15 bp, Homo sapiens
ctaggggagaaaaat

SEQ ID NO: 857259 - DNA, 15 bp, Homo sapiens
taggggagaaaaatc

SEQ ID NO: 857260 - DNA, 15 bp, Homo sapiens
aggggagaaaaatca

SEQ ID NO: 857261 - DNA, 15 bp, Homo sapiens
ggggagaaaaatcat

SEQ ID NO: 857262 - DNA, 15 bp, Homo sapiens
gggagaaaaatcatg

SEQ ID NO: 857263 - DNA, 15 bp, Homo sapiens
ggagaaaaatcatgt

SEQ ID NO: 857264 - DNA, 15 bp, Homo sapiens
gagaaaaatcatgtg

SEQ ID NO: 857265 - DNA, 15 bp, Homo sapiens
agaaaaatcatgtgc

SEQ ID NO: 857266 - DNA, 15 bp, Homo sapiens
gaaaaatcatgtgca

SEQ ID NO: 857267 - DNA, 15 bp, Homo sapiens
aaaaatcatgtgcaa

SEQ ID NO: 857268 - DNA, 15 bp, Homo sapiens
aaaatcatgtgcaac

SEQ ID NO: 857269 - DNA, 15 bp, Homo sapiens
aaatcatgtgcaaca

SEQ ID NO: 857270 - DNA, 15 bp, Homo sapiens
aatcatgtgcaacag

SEQ ID NO: 857271 - DNA, 15 bp, Homo sapiens
atcatgtgcaacagc

SEQ ID NO: 857272 - DNA, 15 bp, Homo sapiens
tcatgtgcaacagcc

SEQ ID NO: 857273 - DNA, 15 bp, Homo sapiens
catgtgcaacagcct

SEQ ID NO: 857274 - DNA, 15 bp, Homo sapiens
atgtgcaacagcctt

SEQ ID NO: 857275 - DNA, 15 bp, Homo sapiens
tgtgcaacagccttg

SEQ ID NO: 857276 - DNA, 15 bp, Homo sapiens
gtgcaacagccttgg

SEQ ID NO: 857277 - DNA, 15 bp, Homo sapiens
tgcaacagccttggg

SEQ ID NO: 857278 - DNA, 15 bp, Homo sapiens
gcaacagccttggga

SEQ ID NO: 857279 - DNA, 15 bp, Homo sapiens
caacagccttgggag

SEQ ID NO: 857280 - DNA, 15 bp, Homo sapiens
aacagccttgggaga

SEQ ID NO: 857281 - DNA, 15 bp, Homo sapiens
acagccttgggagac

SEQ ID NO: 857282 - DNA, 15 bp, Homo sapiens
cagccttgggagacg

SEQ ID NO: 857283 - DNA, 15 bp, Homo sapiens
agccttgggagacga

SEQ ID NO: 857284 - DNA, 15 bp, Homo sapiens
gccttgggagacgat

SEQ ID NO: 857285 - DNA, 15 bp, Homo sapiens
ccttgggagacgata

SEQ ID NO: 857286 - DNA, 15 bp, Homo sapiens
cttgggagacgataa

SEQ ID NO: 857287 - DNA, 15 bp, Homo sapiens
ttgggagacgataaa

SEQ ID NO: 857288 - DNA, 15 bp, Homo sapiens
tgggagacgataaag

SEQ ID NO: 857289 - DNA, 15 bp, Homo sapiens
gggagacgataaagg

SEQ ID NO: 857290 - DNA, 15 bp, Homo sapiens
ggagacgataaaggc

SEQ ID NO: 857291 - DNA, 15 bp, Homo sapiens
gagacgataaaggca

SEQ ID NO: 857292 - DNA, 15 bp, Homo sapiens
agacgataaaggcaa

SEQ ID NO: 857293 - DNA, 15 bp, Homo sapiens
gacgataaaggcaat

SEQ ID NO: 857294 - DNA, 15 bp, Homo sapiens
acgataaaggcaatt

SEQ ID NO: 857295 - DNA, 15 bp, Homo sapiens
cgataaaggcaattt

SEQ ID NO: 857296 - DNA, 15 bp, Homo sapiens
gataaaggcaattta

SEQ ID NO: 857297 - DNA, 15 bp, Homo sapiens
ataaaggcaatttat

SEQ ID NO: 857298 - DNA, 15 bp, Homo sapiens
taaaggcaatttata

SEQ ID NO: 857299 - DNA, 15 bp, Homo sapiens
aaaggcaatttatat

SEQ ID NO: 857300 - DNA, 15 bp, Homo sapiens
aaggcaatttatatt

SEQ ID NO: 857301 - DNA, 15 bp, Homo sapiens
aggcaatttatattt

SEQ ID NO: 857302 - DNA, 15 bp, Homo sapiens
ggcaatttatatttt

SEQ ID NO: 857303 - DNA, 15 bp, Homo sapiens
gcaatttatattttc

SEQ ID NO: 857304 - DNA, 15 bp, Homo sapiens
caatttatattttcg

SEQ ID NO: 857305 - DNA, 15 bp, Homo sapiens
aatttatattttcgc

SEQ ID NO: 857306 - DNA, 15 bp, Homo sapiens
atttatattttcgct

SEQ ID NO: 857307 - DNA, 15 bp, Homo sapiens
tttatattttcgctg

SEQ ID NO: 857308 - DNA, 15 bp, Homo sapiens
ttatattttcgctgc

SEQ ID NO: 857309 - DNA, 15 bp, Homo sapiens
tatattttcgctgct

SEQ ID NO: 857310 - DNA, 15 bp, Homo sapiens
atattttcgctgctt

SEQ ID NO: 857311 - DNA, 15 bp, Homo sapiens
tattttcgctgcttt

SEQ ID NO: 857312 - DNA, 15 bp, Homo sapiens
attttcgctgctttt

SEQ ID NO: 857313 - DNA, 15 bp, Homo sapiens
ttttcgctgcttttt

SEQ ID NO: 857314 - DNA, 15 bp, Homo sapiens
tttcgctgctttttt

SEQ ID NO: 857315 - DNA, 15 bp, Homo sapiens
ttcgctgcttttttg

SEQ ID NO: 857316 - DNA, 15 bp, Homo sapiens
tcgctgcttttttga

SEQ ID NO: 857317 - DNA, 15 bp, Homo sapiens
cgctgcttttttgat

SEQ ID NO: 857318 - DNA, 15 bp, Homo sapiens
gctgcttttttgatg

SEQ ID NO: 857319 - DNA, 15 bp, Homo sapiens
ctgcttttttgatgt

SEQ ID NO: 857320 - DNA, 15 bp, Homo sapiens
tgcttttttgatgta

SEQ ID NO: 857321 - DNA, 15 bp, Homo sapiens
gcttttttgatgtac

SEQ ID NO: 857322 - DNA, 15 bp, Homo sapiens
cttttttgatgtaca

SEQ ID NO: 857323 - DNA, 15 bp, Homo sapiens
ttttttgatgtacaa

SEQ ID NO: 857324 - DNA, 15 bp, Homo sapiens
tttttgatgtacaac

SEQ ID NO: 857325 - DNA, 15 bp, Homo sapiens
ttttgatgtacaacc

SEQ ID NO: 857326 - DNA, 15 bp, Homo sapiens
tttgatgtacaacca

SEQ ID NO: 857327 - DNA, 15 bp, Homo sapiens
ttgatgtacaaccaa

SEQ ID NO: 857328 - DNA, 15 bp, Homo sapiens
tgatgtacaaccaaa

SEQ ID NO: 857329 - DNA, 15 bp, Homo sapiens
gatgtacaaccaaac

SEQ ID NO: 857330 - DNA, 15 bp, Homo sapiens
atgtacaaccaaact

SEQ ID NO: 857331 - DNA, 15 bp, Homo sapiens
tgtacaaccaaactg

SEQ ID NO: 857332 - DNA, 15 bp, Homo sapiens
gtacaaccaaactgt

SEQ ID NO: 857333 - DNA, 15 bp, Homo sapiens
tacaaccaaactgtt

SEQ ID NO: 857334 - DNA, 15 bp, Homo sapiens
acaaccaaactgtta

SEQ ID NO: 857335 - DNA, 15 bp, Homo sapiens
caaccaaactgttac

SEQ ID NO: 857336 - DNA, 15 bp, Homo sapiens
aaccaaactgttacc

SEQ ID NO: 857337 - DNA, 15 bp, Homo sapiens
accaaactgttacca

SEQ ID NO: 857338 - DNA, 15 bp, Homo sapiens
ccaaactgttaccaa

SEQ ID NO: 857339 - DNA, 15 bp, Homo sapiens
caaactgttaccaac

SEQ ID NO: 857340 - DNA, 15 bp, Homo sapiens
aaactgttaccaaca

SEQ ID NO: 857341 - DNA, 15 bp, Homo sapiens
aactgttaccaacaa

SEQ ID NO: 857342 - DNA, 15 bp, Homo sapiens
actgttaccaacaat

SEQ ID NO: 857343 - DNA, 15 bp, Homo sapiens
ctgttaccaacaatc

SEQ ID NO: 857344 - DNA, 15 bp, Homo sapiens
tgttaccaacaatca

SEQ ID NO: 857345 - DNA, 15 bp, Homo sapiens
gttaccaacaatcac

SEQ ID NO: 857346 - DNA, 15 bp, Homo sapiens
ttaccaacaatcact

SEQ ID NO: 857347 - DNA, 15 bp, Homo sapiens
taccaacaatcactc

SEQ ID NO: 857348 - DNA, 15 bp, Homo sapiens
accaacaatcactct

SEQ ID NO: 857349 - DNA, 15 bp, Homo sapiens
ccaacaatcactctg

SEQ ID NO: 857350 - DNA, 15 bp, Homo sapiens
caacaatcactctgc

SEQ ID NO: 857351 - DNA, 15 bp, Homo sapiens
aacaatcactctgca

SEQ ID NO: 857352 - DNA, 15 bp, Homo sapiens
acaatcactctgcat

SEQ ID NO: 857353 - DNA, 15 bp, Homo sapiens
caatcactctgcatt

SEQ ID NO: 857354 - DNA, 15 bp, Homo sapiens
aatcactctgcattt

SEQ ID NO: 857355 - DNA, 15 bp, Homo sapiens
atcactctgcatttt

SEQ ID NO: 857356 - DNA, 15 bp, Homo sapiens
tcactctgcattttt

SEQ ID NO: 857357 - DNA, 15 bp, Homo sapiens
cactctgcatttttt

SEQ ID NO: 857358 - DNA, 15 bp, Homo sapiens
actctgcattttttt

SEQ ID NO: 857359 - DNA, 15 bp, Homo sapiens
ctctgcatttttttc

SEQ ID NO: 857360 - DNA, 15 bp, Homo sapiens
tctgcatttttttct

SEQ ID NO: 857361 - DNA, 15 bp, Homo sapiens
ctgcatttttttctg

SEQ ID NO: 857362 - DNA, 15 bp, Homo sapiens
tgcatttttttctgg

SEQ ID NO: 857363 - DNA, 15 bp, Homo sapiens
gcatttttttctggg

SEQ ID NO: 857364 - DNA, 15 bp, Homo sapiens
catttttttctgggt

SEQ ID NO: 857365 - DNA, 15 bp, Homo sapiens
atttttttctgggtc

SEQ ID NO: 857366 - DNA, 15 bp, Homo sapiens
tttttttctgggtca

SEQ ID NO: 857367 - DNA, 15 bp, Homo sapiens
ttttttctgggtcaa

SEQ ID NO: 857368 - DNA, 15 bp, Homo sapiens
tttttctgggtcaag

SEQ ID NO: 857369 - DNA, 15 bp, Homo sapiens
ttttctgggtcaaga

SEQ ID NO: 857370 - DNA, 15 bp, Homo sapiens
tttctgggtcaagac

SEQ ID NO: 857371 - DNA, 15 bp, Homo sapiens
ttctgggtcaagact

SEQ ID NO: 857372 - DNA, 15 bp, Homo sapiens
tctgggtcaagactg

SEQ ID NO: 857373 - DNA, 15 bp, Homo sapiens
ctgggtcaagactgt

SEQ ID NO: 857374 - DNA, 15 bp, Homo sapiens
tgggtcaagactgtt

SEQ ID NO: 857375 - DNA, 15 bp, Homo sapiens
gggtcaagactgtta

SEQ ID NO: 857376 - DNA, 15 bp, Homo sapiens
ggtcaagactgttaa

SEQ ID NO: 857377 - DNA, 15 bp, Homo sapiens
gtcaagactgttaaa

SEQ ID NO: 857378 - DNA, 15 bp, Homo sapiens
tcaagactgttaaag

SEQ ID NO: 857379 - DNA, 15 bp, Homo sapiens
caagactgttaaagt

SEQ ID NO: 857380 - DNA, 15 bp, Homo sapiens
aagactgttaaagtg

SEQ ID NO: 857381 - DNA, 15 bp, Homo sapiens
agactgttaaagtga

SEQ ID NO: 857382 - DNA, 15 bp, Homo sapiens
gactgttaaagtgaa

SEQ ID NO: 857383 - DNA, 15 bp, Homo sapiens
actgttaaagtgaac

SEQ ID NO: 857384 - DNA, 15 bp, Homo sapiens
ctgttaaagtgaact

SEQ ID NO: 857385 - DNA, 15 bp, Homo sapiens
tgttaaagtgaacta

SEQ ID NO: 857386 - DNA, 15 bp, Homo sapiens
gttaaagtgaactaa

SEQ ID NO: 857387 - DNA, 15 bp, Homo sapiens
ttaaagtgaactaag

SEQ ID NO: 857388 - DNA, 15 bp, Homo sapiens
taaagtgaactaaga

SEQ ID NO: 857389 - DNA, 15 bp, Homo sapiens
aaagtgaactaagac

SEQ ID NO: 857390 - DNA, 15 bp, Homo sapiens
aagtgaactaagacc

SEQ ID NO: 857391 - DNA, 15 bp, Homo sapiens
agtgaactaagacct

SEQ ID NO: 857392 - DNA, 15 bp, Homo sapiens
gtgaactaagacctg

SEQ ID NO: 857393 - DNA, 15 bp, Homo sapiens
tgaactaagacctgt

SEQ ID NO: 857394 - DNA, 15 bp, Homo sapiens
gaactaagacctgtg

SEQ ID NO: 857395 - DNA, 15 bp, Homo sapiens
aactaagacctgtgt

SEQ ID NO: 857396 - DNA, 15 bp, Homo sapiens
actaagacctgtgtt

SEQ ID NO: 857397 - DNA, 15 bp, Homo sapiens
ctaagacctgtgtta

SEQ ID NO: 857398 - DNA, 15 bp, Homo sapiens
taagacctgtgttaa

SEQ ID NO: 857399 - DNA, 15 bp, Homo sapiens
aagacctgtgttaaa

SEQ ID NO: 857400 - DNA, 15 bp, Homo sapiens
agacctgtgttaaat

SEQ ID NO: 857401 - DNA, 15 bp, Homo sapiens
gacctgtgttaaatc

SEQ ID NO: 857402 - DNA, 15 bp, Homo sapiens
acctgtgttaaatcc

SEQ ID NO: 857403 - DNA, 15 bp, Homo sapiens
cctgtgttaaatccc

SEQ ID NO: 857404 - DNA, 15 bp, Homo sapiens
ctgtgttaaatccct

SEQ ID NO: 857405 - DNA, 15 bp, Homo sapiens
tgtgttaaatccctt

SEQ ID NO: 857406 - DNA, 15 bp, Homo sapiens
gtgttaaatcccttc

SEQ ID NO: 857407 - DNA, 15 bp, Homo sapiens
tgttaaatcccttca

SEQ ID NO: 857408 - DNA, 15 bp, Homo sapiens
gttaaatcccttcag

SEQ ID NO: 857409 - DNA, 15 bp, Homo sapiens
ttaaatcccttcagc

SEQ ID NO: 857410 - DNA, 15 bp, Homo sapiens
taaatcccttcagct

SEQ ID NO: 857411 - DNA, 15 bp, Homo sapiens
aaatcccttcagctc

SEQ ID NO: 857412 - DNA, 15 bp, Homo sapiens
aatcccttcagctcc

SEQ ID NO: 857413 - DNA, 15 bp, Homo sapiens
atcccttcagctccc

SEQ ID NO: 857414 - DNA, 15 bp, Homo sapiens
tcccttcagctccct

SEQ ID NO: 857415 - DNA, 15 bp, Homo sapiens
cccttcagctccctt

SEQ ID NO: 857416 - DNA, 15 bp, Homo sapiens
ccttcagctcccttc

SEQ ID NO: 857417 - DNA, 15 bp, Homo sapiens
cttcagctcccttcc

SEQ ID NO: 857418 - DNA, 15 bp, Homo sapiens
ttcagctcccttcca

SEQ ID NO: 857419 - DNA, 15 bp, Homo sapiens
tcagctcccttccag

SEQ ID NO: 857420 - DNA, 15 bp, Homo sapiens
cagctcccttccagc

SEQ ID NO: 857421 - DNA, 15 bp, Homo sapiens
agctcccttccagct

SEQ ID NO: 857422 - DNA, 15 bp, Homo sapiens
gctcccttccagctg

SEQ ID NO: 857423 - DNA, 15 bp, Homo sapiens
ctcccttccagctgc

SEQ ID NO: 857424 - DNA, 15 bp, Homo sapiens
tcccttccagctgcc

SEQ ID NO: 857425 - DNA, 15 bp, Homo sapiens
cccttccagctgcct

SEQ ID NO: 857426 - DNA, 15 bp, Homo sapiens
ccttccagctgcctt

SEQ ID NO: 857427 - DNA, 15 bp, Homo sapiens
cttccagctgccttg

SEQ ID NO: 857428 - DNA, 15 bp, Homo sapiens
ttccagctgccttgc

SEQ ID NO: 857429 - DNA, 15 bp, Homo sapiens
tccagctgccttgct

SEQ ID NO: 857430 - DNA, 15 bp, Homo sapiens
ccagctgccttgctg

SEQ ID NO: 857431 - DNA, 15 bp, Homo sapiens
cagctgccttgctgt

SEQ ID NO: 857432 - DNA, 15 bp, Homo sapiens
agctgccttgctgtg

SEQ ID NO: 857433 - DNA, 15 bp, Homo sapiens
gctgccttgctgtgt

SEQ ID NO: 857434 - DNA, 15 bp, Homo sapiens
ctgccttgctgtgtg

SEQ ID NO: 857435 - DNA, 15 bp, Homo sapiens
tgccttgctgtgtgt

SEQ ID NO: 857436 - DNA, 15 bp, Homo sapiens
gccttgctgtgtgtg

SEQ ID NO: 857437 - DNA, 15 bp, Homo sapiens
ccttgctgtgtgtga

SEQ ID NO: 857438 - DNA, 15 bp, Homo sapiens
cttgctgtgtgtgac

SEQ ID NO: 857439 - DNA, 15 bp, Homo sapiens
ttgctgtgtgtgacc

SEQ ID NO: 857440 - DNA, 15 bp, Homo sapiens
tgctgtgtgtgacct

SEQ ID NO: 857441 - DNA, 15 bp, Homo sapiens
gctgtgtgtgacctt

SEQ ID NO: 857442 - DNA, 15 bp, Homo sapiens
ctgtgtgtgaccttg

SEQ ID NO: 857443 - DNA, 15 bp, Homo sapiens
tgtgtgtgaccttgc

SEQ ID NO: 857444 - DNA, 15 bp, Homo sapiens
gtgtgtgaccttgcc

SEQ ID NO: 857445 - DNA, 15 bp, Homo sapiens
tgtgtgaccttgcca

SEQ ID NO: 857446 - DNA, 15 bp, Homo sapiens
gtgtgaccttgccat

SEQ ID NO: 857447 - DNA, 15 bp, Homo sapiens
tgtgaccttgccatt

SEQ ID NO: 857448 - DNA, 15 bp, Homo sapiens
gtgaccttgccatta

SEQ ID NO: 857449 - DNA, 15 bp, Homo sapiens
tgaccttgccattaa

SEQ ID NO: 857450 - DNA, 15 bp, Homo sapiens
gaccttgccattaat

SEQ ID NO: 857451 - DNA, 15 bp, Homo sapiens
accttgccattaatt

SEQ ID NO: 857452 - DNA, 15 bp, Homo sapiens
ccttgccattaattg

SEQ ID NO: 857453 - DNA, 15 bp, Homo sapiens
cttgccattaattgc

SEQ ID NO: 857454 - DNA, 15 bp, Homo sapiens
ttgccattaattgcc

SEQ ID NO: 857455 - DNA, 15 bp, Homo sapiens
tgccattaattgccg

SEQ ID NO: 857456 - DNA, 15 bp, Homo sapiens
gccattaattgccgc

SEQ ID NO: 857457 - DNA, 15 bp, Homo sapiens
ccattaattgccgct

SEQ ID NO: 857458 - DNA, 15 bp, Homo sapiens
cattaattgccgctc

SEQ ID NO: 857459 - DNA, 15 bp, Homo sapiens
attaattgccgctct

SEQ ID NO: 857460 - DNA, 15 bp, Homo sapiens
ttaattgccgctctt

SEQ ID NO: 857461 - DNA, 15 bp, Homo sapiens
taattgccgctcttc

SEQ ID NO: 857462 - DNA, 15 bp, Homo sapiens
aattgccgctcttcc

SEQ ID NO: 857463 - DNA, 15 bp, Homo sapiens
attgccgctcttcct

SEQ ID NO: 857464 - DNA, 15 bp, Homo sapiens
ttgccgctcttcctc

SEQ ID NO: 857465 - DNA, 15 bp, Homo sapiens
tgccgctcttcctct

SEQ ID NO: 857466 - DNA, 15 bp, Homo sapiens
gccgctcttcctctc

SEQ ID NO: 857467 - DNA, 15 bp, Homo sapiens
ccgctcttcctctcc

SEQ ID NO: 857468 - DNA, 15 bp, Homo sapiens
cgctcttcctctcct

SEQ ID NO: 857469 - DNA, 15 bp, Homo sapiens
gctcttcctctcctc

SEQ ID NO: 857470 - DNA, 15 bp, Homo sapiens
ctcttcctctcctcc

SEQ ID NO: 857471 - DNA, 15 bp, Homo sapiens
tcttcctctcctccc

SEQ ID NO: 857472 - DNA, 15 bp, Homo sapiens
cttcctctcctccca

SEQ ID NO: 857473 - DNA, 15 bp, Homo sapiens
ttcctctcctcccat

SEQ ID NO: 857474 - DNA, 15 bp, Homo sapiens
tcctctcctcccatc

SEQ ID NO: 857475 - DNA, 15 bp, Homo sapiens
cctctcctcccatcc

SEQ ID NO: 857476 - DNA, 15 bp, Homo sapiens
ctctcctcccatcca

SEQ ID NO: 857477 - DNA, 15 bp, Homo sapiens
tctcctcccatccaa

SEQ ID NO: 857478 - DNA, 15 bp, Homo sapiens
ctcctcccatccaac

SEQ ID NO: 857479 - DNA, 15 bp, Homo sapiens
tcctcccatccaacc

SEQ ID NO: 857480 - DNA, 15 bp, Homo sapiens
cctcccatccaacca

SEQ ID NO: 857481 - DNA, 15 bp, Homo sapiens
ctcccatccaaccac

SEQ ID NO: 857482 - DNA, 15 bp, Homo sapiens
tcccatccaaccaca

SEQ ID NO: 857483 - DNA, 15 bp, Homo sapiens
cccatccaaccacac

SEQ ID NO: 857484 - DNA, 15 bp, Homo sapiens
ccatccaaccacacg

SEQ ID NO: 857485 - DNA, 15 bp, Homo sapiens
catccaaccacacgg

SEQ ID NO: 857486 - DNA, 15 bp, Homo sapiens
atccaaccacacggt

SEQ ID NO: 857487 - DNA, 15 bp, Homo sapiens
tccaaccacacggtt

SEQ ID NO: 857488 - DNA, 15 bp, Homo sapiens
ccaaccacacggtta

SEQ ID NO: 857489 - DNA, 15 bp, Homo sapiens
caaccacacggttat

SEQ ID NO: 857490 - DNA, 15 bp, Homo sapiens
aaccacacggttata

SEQ ID NO: 857491 - DNA, 15 bp, Homo sapiens
accacacggttatag

SEQ ID NO: 857492 - DNA, 15 bp, Homo sapiens
ccacacggttatagc

SEQ ID NO: 857493 - DNA, 15 bp, Homo sapiens
cacacggttatagcc

SEQ ID NO: 857494 - DNA, 15 bp, Homo sapiens
acacggttatagcca

SEQ ID NO: 857495 - DNA, 15 bp, Homo sapiens
cacggttatagccaa

SEQ ID NO: 857496 - DNA, 15 bp, Homo sapiens
acggttatagccaag

SEQ ID NO: 857497 - DNA, 15 bp, Homo sapiens
cggttatagccaaga

SEQ ID NO: 857498 - DNA, 15 bp, Homo sapiens
ggttatagccaagat

SEQ ID NO: 857499 - DNA, 15 bp, Homo sapiens
gttatagccaagatg

SEQ ID NO: 857500 - DNA, 15 bp, Homo sapiens
ttatagccaagatgt

SEQ ID NO: 857501 - DNA, 15 bp, Homo sapiens
tatagccaagatgtc

SEQ ID NO: 857502 - DNA, 15 bp, Homo sapiens
atagccaagatgtcc

SEQ ID NO: 857503 - DNA, 15 bp, Homo sapiens
tagccaagatgtcca

SEQ ID NO: 857504 - DNA, 15 bp, Homo sapiens
agccaagatgtccat

SEQ ID NO: 857505 - DNA, 15 bp, Homo sapiens
gccaagatgtccatc

SEQ ID NO: 857506 - DNA, 15 bp, Homo sapiens
ccaagatgtccatct

SEQ ID NO: 857507 - DNA, 15 bp, Homo sapiens
caagatgtccatcta

SEQ ID NO: 857508 - DNA, 15 bp, Homo sapiens
aagatgtccatctac

SEQ ID NO: 857509 - DNA, 15 bp, Homo sapiens
agatgtccatctaca

SEQ ID NO: 857510 - DNA, 15 bp, Homo sapiens
gatgtccatctacaa

SEQ ID NO: 857511 - DNA, 15 bp, Homo sapiens
atgtccatctacaag

SEQ ID NO: 857512 - DNA, 15 bp, Homo sapiens
tgtccatctacaaga

SEQ ID NO: 857513 - DNA, 15 bp, Homo sapiens
gtccatctacaagag

SEQ ID NO: 857514 - DNA, 15 bp, Homo sapiens
tccatctacaagaga

SEQ ID NO: 857515 - DNA, 15 bp, Homo sapiens
ccatctacaagagaa

SEQ ID NO: 857516 - DNA, 15 bp, Homo sapiens
catctacaagagaat

SEQ ID NO: 857517 - DNA, 15 bp, Homo sapiens
atctacaagagaatg

SEQ ID NO: 857518 - DNA, 15 bp, Homo sapiens
tctacaagagaatga

SEQ ID NO: 857519 - DNA, 15 bp, Homo sapiens
ctacaagagaatgag

SEQ ID NO: 857520 - DNA, 15 bp, Homo sapiens
tacaagagaatgaga

SEQ ID NO: 857521 - DNA, 15 bp, Homo sapiens
acaagagaatgagac

SEQ ID NO: 857522 - DNA, 15 bp, Homo sapiens
caagagaatgagacg

SEQ ID NO: 857523 - DNA, 15 bp, Homo sapiens
aagagaatgagacgg

SEQ ID NO: 857524 - DNA, 15 bp, Homo sapiens
agagaatgagacggg

SEQ ID NO: 857525 - DNA, 15 bp, Homo sapiens
gagaatgagacgggc

SEQ ID NO: 857526 - DNA, 15 bp, Homo sapiens
agaatgagacgggca

SEQ ID NO: 857527 - DNA, 15 bp, Homo sapiens
gaatgagacgggcat

SEQ ID NO: 857528 - DNA, 15 bp, Homo sapiens
aatgagacgggcatg

SEQ ID NO: 857529 - DNA, 15 bp, Homo sapiens
atgagacgggcatgt

SEQ ID NO: 857530 - DNA, 15 bp, Homo sapiens
tgagacgggcatgtt

SEQ ID NO: 857531 - DNA, 15 bp, Homo sapiens
gagacgggcatgttg

SEQ ID NO: 857532 - DNA, 15 bp, Homo sapiens
agacgggcatgttgt

SEQ ID NO: 857533 - DNA, 15 bp, Homo sapiens
gacgggcatgttgtt

SEQ ID NO: 857534 - DNA, 15 bp, Homo sapiens
acgggcatgttgttt

SEQ ID NO: 857535 - DNA, 15 bp, Homo sapiens
cgggcatgttgtttt

SEQ ID NO: 857536 - DNA, 15 bp, Homo sapiens
gggcatgttgttttg

SEQ ID NO: 857537 - DNA, 15 bp, Homo sapiens
ggcatgttgttttga

SEQ ID NO: 857538 - DNA, 15 bp, Homo sapiens
gcatgttgttttgat

SEQ ID NO: 857539 - DNA, 15 bp, Homo sapiens
catgttgttttgatt

SEQ ID NO: 857540 - DNA, 15 bp, Homo sapiens
atgttgttttgattg

SEQ ID NO: 857541 - DNA, 15 bp, Homo sapiens
tgttgttttgattgc

SEQ ID NO: 857542 - DNA, 15 bp, Homo sapiens
gttgttttgattgcg

SEQ ID NO: 857543 - DNA, 15 bp, Homo sapiens
ttgttttgattgcgg

SEQ ID NO: 857544 - DNA, 15 bp, Homo sapiens
tgttttgattgcgga

SEQ ID NO: 857545 - DNA, 15 bp, Homo sapiens
gttttgattgcggac

SEQ ID NO: 857546 - DNA, 15 bp, Homo sapiens
ttttgattgcggacg

SEQ ID NO: 857547 - DNA, 15 bp, Homo sapiens
tttgattgcggacgt

SEQ ID NO: 857548 - DNA, 15 bp, Homo sapiens
ttgattgcggacgtt

SEQ ID NO: 857549 - DNA, 15 bp, Homo sapiens
tgattgcggacgttc

SEQ ID NO: 857550 - DNA, 15 bp, Homo sapiens
gattgcggacgttct

SEQ ID NO: 857551 - DNA, 15 bp, Homo sapiens
attgcggacgttctg

SEQ ID NO: 857552 - DNA, 15 bp, Homo sapiens
ttgcggacgttctga

SEQ ID NO: 857553 - DNA, 15 bp, Homo sapiens
tgcggacgttctgag

SEQ ID NO: 857554 - DNA, 15 bp, Homo sapiens
gcggacgttctgagc

SEQ ID NO: 857555 - DNA, 15 bp, Homo sapiens
cggacgttctgagcg

SEQ ID NO: 857556 - DNA, 15 bp, Homo sapiens
ggacgttctgagcgt

SEQ ID NO: 857557 - DNA, 15 bp, Homo sapiens
gacgttctgagcgtg

SEQ ID NO: 857558 - DNA, 15 bp, Homo sapiens
acgttctgagcgtga

SEQ ID NO: 857559 - DNA, 15 bp, Homo sapiens
cgttctgagcgtgac

SEQ ID NO: 857560 - DNA, 15 bp, Homo sapiens
gttctgagcgtgact

SEQ ID NO: 857561 - DNA, 15 bp, Homo sapiens
ttctgagcgtgactg

SEQ ID NO: 857562 - DNA, 15 bp, Homo sapiens
tctgagcgtgactgc

SEQ ID NO: 857563 - DNA, 15 bp, Homo sapiens
ctgagcgtgactgct

SEQ ID NO: 857564 - DNA, 15 bp, Homo sapiens
tgagcgtgactgctc

SEQ ID NO: 857565 - DNA, 15 bp, Homo sapiens
gagcgtgactgctca

SEQ ID NO: 857566 - DNA, 15 bp, Homo sapiens
agcgtgactgctcat

SEQ ID NO: 857567 - DNA, 15 bp, Homo sapiens
gcgtgactgctcatg

SEQ ID NO: 857568 - DNA, 15 bp, Homo sapiens
cgtgactgctcatgc

SEQ ID NO: 857569 - DNA, 15 bp, Homo sapiens
gtgactgctcatgca

SEQ ID NO: 857570 - DNA, 15 bp, Homo sapiens
tgactgctcatgcat

SEQ ID NO: 857571 - DNA, 15 bp, Homo sapiens
gactgctcatgcatg

SEQ ID NO: 857572 - DNA, 15 bp, Homo sapiens
actgctcatgcatgt

SEQ ID NO: 857573 - DNA, 15 bp, Homo sapiens
ctgctcatgcatgtc

SEQ ID NO: 857574 - DNA, 15 bp, Homo sapiens
tgctcatgcatgtca

SEQ ID NO: 857575 - DNA, 15 bp, Homo sapiens
gctcatgcatgtcag

SEQ ID NO: 857576 - DNA, 15 bp, Homo sapiens
ctcatgcatgtcagg

SEQ ID NO: 857577 - DNA, 15 bp, Homo sapiens
tcatgcatgtcaggc

SEQ ID NO: 857578 - DNA, 15 bp, Homo sapiens
catgcatgtcaggcc

SEQ ID NO: 857579 - DNA, 15 bp, Homo sapiens
atgcatgtcaggccg

SEQ ID NO: 857580 - DNA, 15 bp, Homo sapiens
tgcatgtcaggccgt

SEQ ID NO: 857581 - DNA, 15 bp, Homo sapiens
gcatgtcaggccgtg

SEQ ID NO: 857582 - DNA, 15 bp, Homo sapiens
catgtcaggccgtgt

SEQ ID NO: 857583 - DNA, 15 bp, Homo sapiens
atgtcaggccgtgtg

SEQ ID NO: 857584 - DNA, 15 bp, Homo sapiens
tgtcaggccgtgtgc

SEQ ID NO: 857585 - DNA, 15 bp, Homo sapiens
gtcaggccgtgtgcg

SEQ ID NO: 857586 - DNA, 15 bp, Homo sapiens
tcaggccgtgtgcgt

SEQ ID NO: 857587 - DNA, 15 bp, Homo sapiens
caggccgtgtgcgtg

SEQ ID NO: 857588 - DNA, 15 bp, Homo sapiens
aggccgtgtgcgtgg

SEQ ID NO: 857589 - DNA, 15 bp, Homo sapiens
ggccgtgtgcgtggt

SEQ ID NO: 857590 - DNA, 15 bp, Homo sapiens
gccgtgtgcgtggta

SEQ ID NO: 857591 - DNA, 15 bp, Homo sapiens
ccgtgtgcgtggtaa

SEQ ID NO: 857592 - DNA, 15 bp, Homo sapiens
cgtgtgcgtggtaac

SEQ ID NO: 857593 - DNA, 15 bp, Homo sapiens
gtgtgcgtggtaacg

SEQ ID NO: 857594 - DNA, 15 bp, Homo sapiens
tgtgcgtggtaacgt

SEQ ID NO: 857595 - DNA, 15 bp, Homo sapiens
gtgcgtggtaacgtg

SEQ ID NO: 857596 - DNA, 15 bp, Homo sapiens
tgcgtggtaacgtgg

SEQ ID NO: 857597 - DNA, 15 bp, Homo sapiens
gcgtggtaacgtgga

SEQ ID NO: 857598 - DNA, 15 bp, Homo sapiens
cgtggtaacgtggac

SEQ ID NO: 857599 - DNA, 15 bp, Homo sapiens
gtggtaacgtggaca

SEQ ID NO: 857600 - DNA, 15 bp, Homo sapiens
tggtaacgtggacac

SEQ ID NO: 857601 - DNA, 15 bp, Homo sapiens
ggtaacgtggacacc

SEQ ID NO: 857602 - DNA, 15 bp, Homo sapiens
gtaacgtggacaccc

SEQ ID NO: 857603 - DNA, 15 bp, Homo sapiens
taacgtggacaccct

SEQ ID NO: 857604 - DNA, 15 bp, Homo sapiens
aacgtggacaccctt

SEQ ID NO: 857605 - DNA, 15 bp, Homo sapiens
acgtggacacccttg

SEQ ID NO: 857606 - DNA, 15 bp, Homo sapiens
cgtggacacccttga

SEQ ID NO: 857607 - DNA, 15 bp, Homo sapiens
gtggacacccttgag

SEQ ID NO: 857608 - DNA, 15 bp, Homo sapiens
tggacacccttgaga

SEQ ID NO: 857609 - DNA, 15 bp, Homo sapiens
ggacacccttgagag

SEQ ID NO: 857610 - DNA, 15 bp, Homo sapiens
gacacccttgagaga

SEQ ID NO: 857611 - DNA, 15 bp, Homo sapiens
acacccttgagagag

SEQ ID NO: 857612 - DNA, 15 bp, Homo sapiens
cacccttgagagagc

SEQ ID NO: 857613 - DNA, 15 bp, Homo sapiens
acccttgagagagcc

SEQ ID NO: 857614 - DNA, 15 bp, Homo sapiens
cccttgagagagcct

SEQ ID NO: 857615 - DNA, 15 bp, Homo sapiens
ccttgagagagcctt

SEQ ID NO: 857616 - DNA, 15 bp, Homo sapiens
cttgagagagccttc

SEQ ID NO: 857617 - DNA, 15 bp, Homo sapiens
ttgagagagccttcc

SEQ ID NO: 857618 - DNA, 15 bp, Homo sapiens
tgagagagccttccc

SEQ ID NO: 857619 - DNA, 15 bp, Homo sapiens
gagagagccttccca

SEQ ID NO: 857620 - DNA, 15 bp, Homo sapiens
agagagccttcccac

SEQ ID NO: 857621 - DNA, 15 bp, Homo sapiens
gagagccttcccact

SEQ ID NO: 857622 - DNA, 15 bp, Homo sapiens
agagccttcccactt

SEQ ID NO: 857623 - DNA, 15 bp, Homo sapiens
gagccttcccacttt

SEQ ID NO: 857624 - DNA, 15 bp, Homo sapiens
agccttcccactttc

SEQ ID NO: 857625 - DNA, 15 bp, Homo sapiens
gccttcccactttct

SEQ ID NO: 857626 - DNA, 15 bp, Homo sapiens
ccttcccactttctt

SEQ ID NO: 857627 - DNA, 15 bp, Homo sapiens
cttcccactttcttc

SEQ ID NO: 857628 - DNA, 15 bp, Homo sapiens
ttcccactttcttct

SEQ ID NO: 857629 - DNA, 15 bp, Homo sapiens
tcccactttcttctg

SEQ ID NO: 857630 - DNA, 15 bp, Homo sapiens
cccactttcttctgt

SEQ ID NO: 857631 - DNA, 15 bp, Homo sapiens
ccactttcttctgtc

SEQ ID NO: 857632 - DNA, 15 bp, Homo sapiens
cactttcttctgtct

SEQ ID NO: 857633 - DNA, 15 bp, Homo sapiens
actttcttctgtctc

SEQ ID NO: 857634 - DNA, 15 bp, Homo sapiens
ctttcttctgtctct

SEQ ID NO: 857635 - DNA, 15 bp, Homo sapiens
tttcttctgtctctg

SEQ ID NO: 857636 - DNA, 15 bp, Homo sapiens
ttcttctgtctctgt

SEQ ID NO: 857637 - DNA, 15 bp, Homo sapiens
tcttctgtctctgtt

SEQ ID NO: 857638 - DNA, 15 bp, Homo sapiens
cttctgtctctgtta

SEQ ID NO: 857639 - DNA, 15 bp, Homo sapiens
ttctgtctctgttaa

SEQ ID NO: 857640 - DNA, 15 bp, Homo sapiens
tctgtctctgttaat

SEQ ID NO: 857641 - DNA, 15 bp, Homo sapiens
ctgtctctgttaatg

SEQ ID NO: 857642 - DNA, 15 bp, Homo sapiens
tgtctctgttaatga

SEQ ID NO: 857643 - DNA, 15 bp, Homo sapiens
gtctctgttaatgat

SEQ ID NO: 857644 - DNA, 15 bp, Homo sapiens
tctctgttaatgatt

SEQ ID NO: 857645 - DNA, 15 bp, Homo sapiens
ctctgttaatgattg

SEQ ID NO: 857646 - DNA, 15 bp, Homo sapiens
tctgttaatgattgc

SEQ ID NO: 857647 - DNA, 15 bp, Homo sapiens
ctgttaatgattgct

SEQ ID NO: 857648 - DNA, 15 bp, Homo sapiens
tgttaatgattgctc

SEQ ID NO: 857649 - DNA, 15 bp, Homo sapiens
gttaatgattgctcc

SEQ ID NO: 857650 - DNA, 15 bp, Homo sapiens
ttaatgattgctcca

SEQ ID NO: 857651 - DNA, 15 bp, Homo sapiens
taatgattgctccac

SEQ ID NO: 857652 - DNA, 15 bp, Homo sapiens
aatgattgctccacc

SEQ ID NO: 857653 - DNA, 15 bp, Homo sapiens
atgattgctccacca

SEQ ID NO: 857654 - DNA, 15 bp, Homo sapiens
tgattgctccaccag

SEQ ID NO: 857655 - DNA, 15 bp, Homo sapiens
gattgctccaccagt

SEQ ID NO: 857656 - DNA, 15 bp, Homo sapiens
attgctccaccagtt

SEQ ID NO: 857657 - DNA, 15 bp, Homo sapiens
ttgctccaccagttt

SEQ ID NO: 857658 - DNA, 15 bp, Homo sapiens
tgctccaccagtttc

SEQ ID NO: 857659 - DNA, 15 bp, Homo sapiens
gctccaccagtttcc

SEQ ID NO: 857660 - DNA, 15 bp, Homo sapiens
ctccaccagtttccg

SEQ ID NO: 857661 - DNA, 15 bp, Homo sapiens
tccaccagtttccgt

SEQ ID NO: 857662 - DNA, 15 bp, Homo sapiens
ccaccagtttccgtg

SEQ ID NO: 857663 - DNA, 15 bp, Homo sapiens
caccagtttccgtgc

SEQ ID NO: 857664 - DNA, 15 bp, Homo sapiens
accagtttccgtgcc

SEQ ID NO: 857665 - DNA, 15 bp, Homo sapiens
ccagtttccgtgcct

SEQ ID NO: 857666 - DNA, 15 bp, Homo sapiens
cagtttccgtgcctg

SEQ ID NO: 857667 - DNA, 15 bp, Homo sapiens
agtttccgtgcctgt

SEQ ID NO: 857668 - DNA, 15 bp, Homo sapiens
gtttccgtgcctgta

SEQ ID NO: 857669 - DNA, 15 bp, Homo sapiens
tttccgtgcctgtaa

SEQ ID NO: 857670 - DNA, 15 bp, Homo sapiens
ttccgtgcctgtaag

SEQ ID NO: 857671 - DNA, 15 bp, Homo sapiens
tccgtgcctgtaagt

SEQ ID NO: 857672 - DNA, 15 bp, Homo sapiens
ccgtgcctgtaagtt

SEQ ID NO: 857673 - DNA, 15 bp, Homo sapiens
cgtgcctgtaagttt

SEQ ID NO: 857674 - DNA, 15 bp, Homo sapiens
gtgcctgtaagttta

SEQ ID NO: 857675 - DNA, 15 bp, Homo sapiens
tgcctgtaagtttaa

SEQ ID NO: 857676 - DNA, 15 bp, Homo sapiens
gcctgtaagtttaac

SEQ ID NO: 857677 - DNA, 15 bp, Homo sapiens
cctgtaagtttaacc

SEQ ID NO: 857678 - DNA, 15 bp, Homo sapiens
ctgtaagtttaacct

SEQ ID NO: 857679 - DNA, 15 bp, Homo sapiens
tgtaagtttaacctc

SEQ ID NO: 857680 - DNA, 15 bp, Homo sapiens
gtaagtttaacctca

SEQ ID NO: 857681 - DNA, 15 bp, Homo sapiens
taagtttaacctcaa

SEQ ID NO: 857682 - DNA, 15 bp, Homo sapiens
aagtttaacctcaac

SEQ ID NO: 857683 - DNA, 15 bp, Homo sapiens
agtttaacctcaaca

SEQ ID NO: 857684 - DNA, 15 bp, Homo sapiens
gtttaacctcaacac

SEQ ID NO: 857685 - DNA, 15 bp, Homo sapiens
tttaacctcaacaca

SEQ ID NO: 857686 - DNA, 15 bp, Homo sapiens
ttaacctcaacacac

SEQ ID NO: 857687 - DNA, 15 bp, Homo sapiens
taacctcaacacacg

SEQ ID NO: 857688 - DNA, 15 bp, Homo sapiens
aacctcaacacacgt

SEQ ID NO: 857689 - DNA, 15 bp, Homo sapiens
acctcaacacacgta

SEQ ID NO: 857690 - DNA, 15 bp, Homo sapiens
cctcaacacacgtag

SEQ ID NO: 857691 - DNA, 15 bp, Homo sapiens
ctcaacacacgtagt

SEQ ID NO: 857692 - DNA, 15 bp, Homo sapiens
tcaacacacgtagtt

SEQ ID NO: 857693 - DNA, 15 bp, Homo sapiens
caacacacgtagttc

SEQ ID NO: 857694 - DNA, 15 bp, Homo sapiens
aacacacgtagttcc

SEQ ID NO: 857695 - DNA, 15 bp, Homo sapiens
acacacgtagttcca

SEQ ID NO: 857696 - DNA, 15 bp, Homo sapiens
cacacgtagttccat

SEQ ID NO: 857697 - DNA, 15 bp, Homo sapiens
acacgtagttccatg

SEQ ID NO: 857698 - DNA, 15 bp, Homo sapiens
cacgtagttccatgt

SEQ ID NO: 857699 - DNA, 15 bp, Homo sapiens
acgtagttccatgtt

SEQ ID NO: 857700 - DNA, 15 bp, Homo sapiens
cgtagttccatgttt

SEQ ID NO: 857701 - DNA, 15 bp, Homo sapiens
gtagttccatgtttg

SEQ ID NO: 857702 - DNA, 15 bp, Homo sapiens
tagttccatgtttgt

SEQ ID NO: 857703 - DNA, 15 bp, Homo sapiens
agttccatgtttgtg

SEQ ID NO: 857704 - DNA, 15 bp, Homo sapiens
gttccatgtttgtgc

SEQ ID NO: 857705 - DNA, 15 bp, Homo sapiens
ttccatgtttgtgct

SEQ ID NO: 857706 - DNA, 15 bp, Homo sapiens
tccatgtttgtgctg

SEQ ID NO: 857707 - DNA, 15 bp, Homo sapiens
ccatgtttgtgctgt

SEQ ID NO: 857708 - DNA, 15 bp, Homo sapiens
catgtttgtgctgtc

SEQ ID NO: 857709 - DNA, 15 bp, Homo sapiens
atgtttgtgctgtct

SEQ ID NO: 857710 - DNA, 15 bp, Homo sapiens
tgtttgtgctgtctg

SEQ ID NO: 857711 - DNA, 15 bp, Homo sapiens
gtttgtgctgtctgt

SEQ ID NO: 857712 - DNA, 15 bp, Homo sapiens
tttgtgctgtctgtg

SEQ ID NO: 857713 - DNA, 15 bp, Homo sapiens
ttgtgctgtctgtgg

SEQ ID NO: 857714 - DNA, 15 bp, Homo sapiens
tgtgctgtctgtggt

SEQ ID NO: 857715 - DNA, 15 bp, Homo sapiens
gtgctgtctgtggta

SEQ ID NO: 857716 - DNA, 15 bp, Homo sapiens
tgctgtctgtggtat

SEQ ID NO: 857717 - DNA, 15 bp, Homo sapiens
gctgtctgtggtatc

SEQ ID NO: 857718 - DNA, 15 bp, Homo sapiens
ctgtctgtggtatca

SEQ ID NO: 857719 - DNA, 15 bp, Homo sapiens
tgtctgtggtatcat

SEQ ID NO: 857720 - DNA, 15 bp, Homo sapiens
gtctgtggtatcatc

SEQ ID NO: 857721 - DNA, 15 bp, Homo sapiens
tctgtggtatcatcc

SEQ ID NO: 857722 - DNA, 15 bp, Homo sapiens
ctgtggtatcatccc

SEQ ID NO: 857723 - DNA, 15 bp, Homo sapiens
tgtggtatcatccct

SEQ ID NO: 857724 - DNA, 15 bp, Homo sapiens
gtggtatcatccctg

SEQ ID NO: 857725 - DNA, 15 bp, Homo sapiens
tggtatcatccctgt

SEQ ID NO: 857726 - DNA, 15 bp, Homo sapiens
ggtatcatccctgtc

SEQ ID NO: 857727 - DNA, 15 bp, Homo sapiens
gtatcatccctgtct

SEQ ID NO: 857728 - DNA, 15 bp, Homo sapiens
tatcatccctgtctt

SEQ ID NO: 857729 - DNA, 15 bp, Homo sapiens
atcatccctgtcttg

SEQ ID NO: 857730 - DNA, 15 bp, Homo sapiens
tcatccctgtcttgt

SEQ ID NO: 857731 - DNA, 15 bp, Homo sapiens
ccctgtcttgtgctg

SEQ ID NO: 857732 - DNA, 15 bp, Homo sapiens
cctgtcttgtgctgt

SEQ ID NO: 857733 - DNA, 15 bp, Homo sapiens
ctgtcttgtgctgtg

SEQ ID NO: 857734 - DNA, 15 bp, Homo sapiens
tgtcttgtgctgtgc

SEQ ID NO: 857735 - DNA, 15 bp, Homo sapiens
gtcttgtgctgtgcc

SEQ ID NO: 857736 - DNA, 15 bp, Homo sapiens
tcttgtgctgtgccc

SEQ ID NO: 857737 - DNA, 15 bp, Homo sapiens
cttgtgctgtgccct

SEQ ID NO: 857738 - DNA, 15 bp, Homo sapiens
ttgtgctgtgccctg

SEQ ID NO: 857739 - DNA, 15 bp, Homo sapiens
tgtgctgtgccctgt

SEQ ID NO: 857740 - DNA, 15 bp, Homo sapiens
gtgctgtgccctgtg

SEQ ID NO: 857741 - DNA, 15 bp, Homo sapiens
tgctgtgccctgtgg

SEQ ID NO: 857742 - DNA, 15 bp, Homo sapiens
gctgtgccctgtggt

SEQ ID NO: 857743 - DNA, 15 bp, Homo sapiens
ctgtgccctgtggtt

SEQ ID NO: 857744 - DNA, 15 bp, Homo sapiens
tgtgccctgtggttc

SEQ ID NO: 857745 - DNA, 15 bp, Homo sapiens
gtgccctgtggttct

SEQ ID NO: 857746 - DNA, 15 bp, Homo sapiens
tgccctgtggttctg

SEQ ID NO: 857747 - DNA, 15 bp, Homo sapiens
gccctgtggttctga

SEQ ID NO: 857748 - DNA, 15 bp, Homo sapiens
ccctgtggttctgag

SEQ ID NO: 857749 - DNA, 15 bp, Homo sapiens
cctgtggttctgagt

SEQ ID NO: 857750 - DNA, 15 bp, Homo sapiens
ctgtggttctgagtc

SEQ ID NO: 857751 - DNA, 15 bp, Homo sapiens
tgtggttctgagtca

SEQ ID NO: 857752 - DNA, 15 bp, Homo sapiens
gtggttctgagtcag

SEQ ID NO: 857753 - DNA, 15 bp, Homo sapiens
tggttctgagtcagt

SEQ ID NO: 857754 - DNA, 15 bp, Homo sapiens
ggttctgagtcagtc

SEQ ID NO: 857755 - DNA, 15 bp, Homo sapiens
gttctgagtcagtcg

SEQ ID NO: 857756 - DNA, 15 bp, Homo sapiens
ttctgagtcagtcgg

SEQ ID NO: 857757 - DNA, 15 bp, Homo sapiens
tctgagtcagtcggg

SEQ ID NO: 857758 - DNA, 15 bp, Homo sapiens
ctgagtcagtcgggc

SEQ ID NO: 857759 - DNA, 15 bp, Homo sapiens
tgagtcagtcgggct

SEQ ID NO: 857760 - DNA, 15 bp, Homo sapiens
gagtcagtcgggctg

SEQ ID NO: 857761 - DNA, 15 bp, Homo sapiens
agtcagtcgggctga

SEQ ID NO: 857762 - DNA, 15 bp, Homo sapiens
gtcagtcgggctgat

SEQ ID NO: 857763 - DNA, 15 bp, Homo sapiens
tcagtcgggctgatg

SEQ ID NO: 857764 - DNA, 15 bp, Homo sapiens
cagtcgggctgatgt

SEQ ID NO: 857765 - DNA, 15 bp, Homo sapiens
agtcgggctgatgtc

SEQ ID NO: 857766 - DNA, 15 bp, Homo sapiens
gtcgggctgatgtct

SEQ ID NO: 857767 - DNA, 15 bp, Homo sapiens
tcgggctgatgtctt

SEQ ID NO: 857768 - DNA, 15 bp, Homo sapiens
cgggctgatgtcttc

SEQ ID NO: 857769 - DNA, 15 bp, Homo sapiens
gggctgatgtcttct

SEQ ID NO: 857770 - DNA, 15 bp, Homo sapiens
ggctgatgtcttctt

SEQ ID NO: 857771 - DNA, 15 bp, Homo sapiens
gctgatgtcttcttc

SEQ ID NO: 857772 - DNA, 15 bp, Homo sapiens
ctgatgtcttcttcc

SEQ ID NO: 857773 - DNA, 15 bp, Homo sapiens
tgatgtcttcttccc

SEQ ID NO: 857774 - DNA, 15 bp, Homo sapiens
gatgtcttcttccca

SEQ ID NO: 857775 - DNA, 15 bp, Homo sapiens
atgtcttcttcccag

SEQ ID NO: 857776 - DNA, 15 bp, Homo sapiens
tgtcttcttcccagt

SEQ ID NO: 857777 - DNA, 15 bp, Homo sapiens
gtcttcttcccagtg

SEQ ID NO: 857778 - DNA, 15 bp, Homo sapiens
tcttcttcccagtgt

SEQ ID NO: 857779 - DNA, 15 bp, Homo sapiens
cttcttcccagtgtg

SEQ ID NO: 857780 - DNA, 15 bp, Homo sapiens
ttcttcccagtgtga

SEQ ID NO: 857781 - DNA, 15 bp, Homo sapiens
tcttcccagtgtgaa

SEQ ID NO: 857782 - DNA, 15 bp, Homo sapiens
cttcccagtgtgaac

SEQ ID NO: 857783 - DNA, 15 bp, Homo sapiens
ttcccagtgtgaact

SEQ ID NO: 857784 - DNA, 15 bp, Homo sapiens
tcccagtgtgaactc

SEQ ID NO: 857785 - DNA, 15 bp, Homo sapiens
cccagtgtgaactcc

SEQ ID NO: 857786 - DNA, 15 bp, Homo sapiens
ccagtgtgaactcct

SEQ ID NO: 857787 - DNA, 15 bp, Homo sapiens
cagtgtgaactcctg

SEQ ID NO: 857788 - DNA, 15 bp, Homo sapiens
agtgtgaactcctgt

SEQ ID NO: 857789 - DNA, 15 bp, Homo sapiens
gtgtgaactcctgtg

SEQ ID NO: 857790 - DNA, 15 bp, Homo sapiens
tgtgaactcctgtgt

SEQ ID NO: 857791 - DNA, 15 bp, Homo sapiens
gtgaactcctgtgtg

SEQ ID NO: 857792 - DNA, 15 bp, Homo sapiens
tgaactcctgtgtgc

SEQ ID NO: 857793 - DNA, 15 bp, Homo sapiens
gaactcctgtgtgct

SEQ ID NO: 857794 - DNA, 15 bp, Homo sapiens
aactcctgtgtgctg

SEQ ID NO: 857795 - DNA, 15 bp, Homo sapiens
actcctgtgtgctga

SEQ ID NO: 857796 - DNA, 15 bp, Homo sapiens
ctcctgtgtgctgac

SEQ ID NO: 857797 - DNA, 15 bp, Homo sapiens
tcctgtgtgctgaca

SEQ ID NO: 857798 - DNA, 15 bp, Homo sapiens
cctgtgtgctgacat

SEQ ID NO: 857799 - DNA, 15 bp, Homo sapiens
ctgtgtgctgacatg

SEQ ID NO: 857800 - DNA, 15 bp, Homo sapiens
tgtgtgctgacatgt

SEQ ID NO: 857801 - DNA, 15 bp, Homo sapiens
gtgtgctgacatgtt

SEQ ID NO: 857802 - DNA, 15 bp, Homo sapiens
tgtgctgacatgttg

SEQ ID NO: 857803 - DNA, 15 bp, Homo sapiens
gtgctgacatgttgc

SEQ ID NO: 857804 - DNA, 15 bp, Homo sapiens
tgctgacatgttgcc

SEQ ID NO: 857805 - DNA, 15 bp, Homo sapiens
gctgacatgttgccc

SEQ ID NO: 857806 - DNA, 15 bp, Homo sapiens
ctgacatgttgcccc

SEQ ID NO: 857807 - DNA, 15 bp, Homo sapiens
tgacatgttgcccca

SEQ ID NO: 857808 - DNA, 15 bp, Homo sapiens
gacatgttgccccag

SEQ ID NO: 857809 - DNA, 15 bp, Homo sapiens
acatgttgccccagc

SEQ ID NO: 857810 - DNA, 15 bp, Homo sapiens
catgttgccccagct

SEQ ID NO: 857811 - DNA, 15 bp, Homo sapiens
atgttgccccagctg

SEQ ID NO: 857812 - DNA, 15 bp, Homo sapiens
tgttgccccagctgc

SEQ ID NO: 857813 - DNA, 15 bp, Homo sapiens
gttgccccagctgcc

SEQ ID NO: 857814 - DNA, 15 bp, Homo sapiens
ttgccccagctgcct

SEQ ID NO: 857815 - DNA, 15 bp, Homo sapiens
tgccccagctgccta

SEQ ID NO: 857816 - DNA, 15 bp, Homo sapiens
gccccagctgcctat

SEQ ID NO: 857817 - DNA, 15 bp, Homo sapiens
ccccagctgcctatg

SEQ ID NO: 857818 - DNA, 15 bp, Homo sapiens
cccagctgcctatgt

SEQ ID NO: 857819 - DNA, 15 bp, Homo sapiens
ccagctgcctatgtc

SEQ ID NO: 857820 - DNA, 15 bp, Homo sapiens
cagctgcctatgtct

SEQ ID NO: 857821 - DNA, 15 bp, Homo sapiens
agctgcctatgtctc

SEQ ID NO: 857822 - DNA, 15 bp, Homo sapiens
gctgcctatgtctct

SEQ ID NO: 857823 - DNA, 15 bp, Homo sapiens
ctgcctatgtctctg

SEQ ID NO: 857824 - DNA, 15 bp, Homo sapiens
tgcctatgtctctgt

SEQ ID NO: 857825 - DNA, 15 bp, Homo sapiens
gcctatgtctctgtg

SEQ ID NO: 857826 - DNA, 15 bp, Homo sapiens
cctatgtctctgtgt

SEQ ID NO: 857827 - DNA, 15 bp, Homo sapiens
ctatgtctctgtgta

SEQ ID NO: 857828 - DNA, 15 bp, Homo sapiens
tatgtctctgtgtac

SEQ ID NO: 857829 - DNA, 15 bp, Homo sapiens
atgtctctgtgtacg

SEQ ID NO: 857830 - DNA, 15 bp, Homo sapiens
tgtctctgtgtacgt

SEQ ID NO: 857831 - DNA, 15 bp, Homo sapiens
gtctctgtgtacgtg

SEQ ID NO: 857832 - DNA, 15 bp, Homo sapiens
tctctgtgtacgtgc

SEQ ID NO: 857833 - DNA, 15 bp, Homo sapiens
ctctgtgtacgtgcc

SEQ ID NO: 857834 - DNA, 15 bp, Homo sapiens
tctgtgtacgtgcct

SEQ ID NO: 857835 - DNA, 15 bp, Homo sapiens
ctgtgtacgtgccta

SEQ ID NO: 857836 - DNA, 15 bp, Homo sapiens
tgtgtacgtgcctag

SEQ ID NO: 857837 - DNA, 15 bp, Homo sapiens
gtgtacgtgcctagg

SEQ ID NO: 857838 - DNA, 15 bp, Homo sapiens
tgtacgtgcctagga

SEQ ID NO: 857839 - DNA, 15 bp, Homo sapiens
gtacgtgcctaggaa

SEQ ID NO: 857840 - DNA, 15 bp, Homo sapiens
tacgtgcctaggaag

SEQ ID NO: 857841 - DNA, 15 bp, Homo sapiens
acgtgcctaggaagg

SEQ ID NO: 857842 - DNA, 15 bp, Homo sapiens
cgtgcctaggaaggc

SEQ ID NO: 857843 - DNA, 15 bp, Homo sapiens
gtgcctaggaaggcc

SEQ ID NO: 857844 - DNA, 15 bp, Homo sapiens
tgcctaggaaggcct

SEQ ID NO: 857845 - DNA, 15 bp, Homo sapiens
gcctaggaaggcctc

SEQ ID NO: 857846 - DNA, 15 bp, Homo sapiens
cctaggaaggcctcc

SEQ ID NO: 857847 - DNA, 15 bp, Homo sapiens
ctaggaaggcctccc

SEQ ID NO: 857848 - DNA, 15 bp, Homo sapiens
taggaaggcctccct

SEQ ID NO: 857849 - DNA, 15 bp, Homo sapiens
aggaaggcctccctt

SEQ ID NO: 857850 - DNA, 15 bp, Homo sapiens
ggaaggcctcccttc

SEQ ID NO: 857851 - DNA, 15 bp, Homo sapiens
gaaggcctcccttct

SEQ ID NO: 857852 - DNA, 15 bp, Homo sapiens
aaggcctcccttctg

SEQ ID NO: 857853 - DNA, 15 bp, Homo sapiens
aggcctcccttctga

SEQ ID NO: 857854 - DNA, 15 bp, Homo sapiens
ggcctcccttctgat

SEQ ID NO: 857855 - DNA, 15 bp, Homo sapiens
gcctcccttctgatt

SEQ ID NO: 857856 - DNA, 15 bp, Homo sapiens
cctcccttctgattt

SEQ ID NO: 857857 - DNA, 15 bp, Homo sapiens
ctcccttctgatttt

SEQ ID NO: 857858 - DNA, 15 bp, Homo sapiens
tcccttctgattttc

SEQ ID NO: 857859 - DNA, 15 bp, Homo sapiens
cccttctgattttct

SEQ ID NO: 857860 - DNA, 15 bp, Homo sapiens
ccttctgattttctt

SEQ ID NO: 857861 - DNA, 15 bp, Homo sapiens
cttctgattttctta

SEQ ID NO: 857862 - DNA, 15 bp, Homo sapiens
ttctgattttcttaa

SEQ ID NO: 857863 - DNA, 15 bp, Homo sapiens
tctgattttcttaac

SEQ ID NO: 857864 - DNA, 15 bp, Homo sapiens
ctgattttcttaact

SEQ ID NO: 857865 - DNA, 15 bp, Homo sapiens
tgattttcttaactt

SEQ ID NO: 857866 - DNA, 15 bp, Homo sapiens
gattttcttaactta

SEQ ID NO: 857867 - DNA, 15 bp, Homo sapiens
attttcttaacttac

SEQ ID NO: 857868 - DNA, 15 bp, Homo sapiens
ttttcttaacttacg

SEQ ID NO: 857869 - DNA, 15 bp, Homo sapiens
tttcttaacttacgc

SEQ ID NO: 857870 - DNA, 15 bp, Homo sapiens
ttcttaacttacgct

SEQ ID NO: 857871 - DNA, 15 bp, Homo sapiens
tcttaacttacgctt

SEQ ID NO: 857872 - DNA, 15 bp, Homo sapiens
cttaacttacgcttc

SEQ ID NO: 857873 - DNA, 15 bp, Homo sapiens
ttaacttacgcttct

SEQ ID NO: 857874 - DNA, 15 bp, Homo sapiens
taacttacgcttctc

SEQ ID NO: 857875 - DNA, 15 bp, Homo sapiens
aacttacgcttctcg

SEQ ID NO: 857876 - DNA, 15 bp, Homo sapiens
acttacgcttctcgt

SEQ ID NO: 857877 - DNA, 15 bp, Homo sapiens
cttacgcttctcgta

SEQ ID NO: 857878 - DNA, 15 bp, Homo sapiens
ttacgcttctcgtaa

SEQ ID NO: 857879 - DNA, 15 bp, Homo sapiens
tacgcttctcgtaac

SEQ ID NO: 857880 - DNA, 15 bp, Homo sapiens
acgcttctcgtaaca

SEQ ID NO: 857881 - DNA, 15 bp, Homo sapiens
cgcttctcgtaacag

SEQ ID NO: 857882 - DNA, 15 bp, Homo sapiens
gcttctcgtaacagc

SEQ ID NO: 857883 - DNA, 15 bp, Homo sapiens
cttctcgtaacagca

SEQ ID NO: 857884 - DNA, 15 bp, Homo sapiens
ttctcgtaacagcat

SEQ ID NO: 857885 - DNA, 15 bp, Homo sapiens
tctcgtaacagcatg

SEQ ID NO: 857886 - DNA, 15 bp, Homo sapiens
ctcgtaacagcatgc

SEQ ID NO: 857887 - DNA, 15 bp, Homo sapiens
tcgtaacagcatgca

SEQ ID NO: 857888 - DNA, 15 bp, Homo sapiens
cgtaacagcatgcag

SEQ ID NO: 857889 - DNA, 15 bp, Homo sapiens
gtaacagcatgcagg

SEQ ID NO: 857890 - DNA, 15 bp, Homo sapiens
taacagcatgcagga

SEQ ID NO: 857891 - DNA, 15 bp, Homo sapiens
aacagcatgcaggac

SEQ ID NO: 857892 - DNA, 15 bp, Homo sapiens
acagcatgcaggact

SEQ ID NO: 857893 - DNA, 15 bp, Homo sapiens
cagcatgcaggactg

SEQ ID NO: 857894 - DNA, 15 bp, Homo sapiens
agcatgcaggactgt

SEQ ID NO: 857895 - DNA, 15 bp, Homo sapiens
gcatgcaggactgtg

SEQ ID NO: 857896 - DNA, 15 bp, Homo sapiens
catgcaggactgtga

SEQ ID NO: 857897 - DNA, 15 bp, Homo sapiens
atgcaggactgtgat

SEQ ID NO: 857898 - DNA, 15 bp, Homo sapiens
tgcaggactgtgata

SEQ ID NO: 857899 - DNA, 15 bp, Homo sapiens
gcaggactgtgatat

SEQ ID NO: 857900 - DNA, 15 bp, Homo sapiens
caggactgtgatatt

SEQ ID NO: 857901 - DNA, 15 bp, Homo sapiens
aggactgtgatatta

SEQ ID NO: 857902 - DNA, 15 bp, Homo sapiens
ggactgtgatattac

SEQ ID NO: 857903 - DNA, 15 bp, Homo sapiens
gactgtgatattaca

SEQ ID NO: 857904 - DNA, 15 bp, Homo sapiens
actgtgatattacag

SEQ ID NO: 857905 - DNA, 15 bp, Homo sapiens
ctgtgatattacagt

SEQ ID NO: 857906 - DNA, 15 bp, Homo sapiens
tgtgatattacagtc

SEQ ID NO: 857907 - DNA, 15 bp, Homo sapiens
gtgatattacagtct

SEQ ID NO: 857908 - DNA, 15 bp, Homo sapiens
tgatattacagtctg

SEQ ID NO: 857909 - DNA, 15 bp, Homo sapiens
gatattacagtctgg

SEQ ID NO: 857910 - DNA, 15 bp, Homo sapiens
atattacagtctggt

SEQ ID NO: 857911 - DNA, 15 bp, Homo sapiens
tattacagtctggtg

SEQ ID NO: 857912 - DNA, 15 bp, Homo sapiens
attacagtctggtga

SEQ ID NO: 857913 - DNA, 15 bp, Homo sapiens
ttacagtctggtgat

SEQ ID NO: 857914 - DNA, 15 bp, Homo sapiens
tacagtctggtgata

SEQ ID NO: 857915 - DNA, 15 bp, Homo sapiens
acagtctggtgatat

SEQ ID NO: 857916 - DNA, 15 bp, Homo sapiens
cagtctggtgatatc

SEQ ID NO: 857917 - DNA, 15 bp, Homo sapiens
agtctggtgatatct

SEQ ID NO: 857918 - DNA, 15 bp, Homo sapiens
gtctggtgatatctt

SEQ ID NO: 857919 - DNA, 15 bp, Homo sapiens
tctggtgatatcttt

SEQ ID NO: 857920 - DNA, 15 bp, Homo sapiens
ctggtgatatctttc

SEQ ID NO: 857921 - DNA, 15 bp, Homo sapiens
tggtgatatctttcc

SEQ ID NO: 857922 - DNA, 15 bp, Homo sapiens
ggtgatatctttcct

SEQ ID NO: 857923 - DNA, 15 bp, Homo sapiens
gtgatatctttcctc

SEQ ID NO: 857924 - DNA, 15 bp, Homo sapiens
tgatatctttcctct

SEQ ID NO: 857925 - DNA, 15 bp, Homo sapiens
gatatctttcctctc

SEQ ID NO: 857926 - DNA, 15 bp, Homo sapiens
atatctttcctctct

SEQ ID NO: 857927 - DNA, 15 bp, Homo sapiens
tatctttcctctctc

SEQ ID NO: 857928 - DNA, 15 bp, Homo sapiens
atctttcctctctct

SEQ ID NO: 857929 - DNA, 15 bp, Homo sapiens
tctttcctctctctc

SEQ ID NO: 857930 - DNA, 15 bp, Homo sapiens
ctttcctctctctcc

SEQ ID NO: 857931 - DNA, 15 bp, Homo sapiens
tttcctctctctcct

SEQ ID NO: 857932 - DNA, 15 bp, Homo sapiens
ttcctctctctcctt

SEQ ID NO: 857933 - DNA, 15 bp, Homo sapiens
tcctctctctccttt

SEQ ID NO: 857934 - DNA, 15 bp, Homo sapiens
cctctctctccttta

SEQ ID NO: 857935 - DNA, 15 bp, Homo sapiens
ctctctctcctttaa

SEQ ID NO: 857936 - DNA, 15 bp, Homo sapiens
tctctctcctttaaa

SEQ ID NO: 857937 - DNA, 15 bp, Homo sapiens
ctctctcctttaaat

SEQ ID NO: 857938 - DNA, 15 bp, Homo sapiens
tctctcctttaaata

SEQ ID NO: 857939 - DNA, 15 bp, Homo sapiens
ctctcctttaaataa

SEQ ID NO: 857940 - DNA, 15 bp, Homo sapiens
tctcctttaaataaa

SEQ ID NO: 857941 - DNA, 15 bp, Homo sapiens
ctcctttaaataaat

SEQ ID NO: 857942 - DNA, 15 bp, Homo sapiens
tcctttaaataaata

SEQ ID NO: 857943 - DNA, 15 bp, Homo sapiens
cctttaaataaatat

SEQ ID NO: 857944 - DNA, 15 bp, Homo sapiens
ctttaaataaatata

SEQ ID NO: 857945 - DNA, 15 bp, Homo sapiens
tttaaataaatataa

SEQ ID NO: 857946 - DNA, 15 bp, Homo sapiens
ttaaataaatataaa

SEQ ID NO: 857947 - DNA, 15 bp, Homo sapiens
taaataaatataaat

SEQ ID NO: 857948 - DNA, 15 bp, Homo sapiens
aaataaatataaatg

SEQ ID NO: 857949 - DNA, 15 bp, Homo sapiens
aataaatataaatgg

SEQ ID NO: 857950 - DNA, 15 bp, Homo sapiens
ataaatataaatgga

SEQ ID NO: 857951 - DNA, 15 bp, Homo sapiens
taaatataaatggaa

SEQ ID NO: 857952 - DNA, 15 bp, Homo sapiens
aaatataaatggaaa

SEQ ID NO: 857953 - DNA, 15 bp, Homo sapiens
aatataaatggaaat

SEQ ID NO: 857954 - DNA, 15 bp, Homo sapiens
atataaatggaaatt

SEQ ID NO: 857955 - DNA, 15 bp, Homo sapiens
tataaatggaaatta

SEQ ID NO: 857956 - DNA, 15 bp, Homo sapiens
ataaatggaaattaa

SEQ ID NO: 857957 - DNA, 15 bp, Homo sapiens
taaatggaaattaaa

SEQ ID NO: 857958 - DNA, 15 bp, Homo sapiens
aaatggaaattaaag

SEQ ID NO: 857959 - DNA, 15 bp, Homo sapiens
aatggaaattaaagt

SEQ ID NO: 857960 - DNA, 15 bp, Homo sapiens
atggaaattaaagtg

SEQ ID NO: 857961 - DNA, 15 bp, Homo sapiens
tggaaattaaagtga

SEQ ID NO: 857962 - DNA, 15 bp, Homo sapiens
ggaaattaaagtgac

SEQ ID NO: 857963 - DNA, 15 bp, Homo sapiens
gaaattaaagtgaca

SEQ ID NO: 857964 - DNA, 15 bp, Homo sapiens
aaattaaagtgacag

SEQ ID NO: 857965 - DNA, 15 bp, Homo sapiens
aattaaagtgacagc

SEQ ID NO: 857966 - DNA, 15 bp, Homo sapiens
attaaagtgacagca

SEQ ID NO: 857967 - DNA, 15 bp, Homo sapiens
ttaaagtgacagcat

SEQ ID NO: 857968 - DNA, 15 bp, Homo sapiens
taaagtgacagcata

SEQ ID NO: 857969 - DNA, 15 bp, Homo sapiens
aaagtgacagcatat

SEQ ID NO: 857970 - DNA, 15 bp, Homo sapiens
aagtgacagcatatc

SEQ ID NO: 857971 - DNA, 15 bp, Homo sapiens
agtgacagcatatca

SEQ ID NO: 857972 - DNA, 15 bp, Homo sapiens
gtgacagcatatcac

SEQ ID NO: 857973 - DNA, 15 bp, Homo sapiens
tgacagcatatcacc

SEQ ID NO: 857974 - DNA, 15 bp, Homo sapiens
gacagcatatcacct

SEQ ID NO: 857975 - DNA, 15 bp, Homo sapiens
acagcatatcaccta

SEQ ID NO: 857976 - DNA, 15 bp, Homo sapiens
cagcatatcacctac

SEQ ID NO: 857977 - DNA, 15 bp, Homo sapiens
agcatatcacctact

SEQ ID NO: 857978 - DNA, 15 bp, Homo sapiens
gcatatcacctactg

SEQ ID NO: 857979 - DNA, 15 bp, Homo sapiens
catatcacctactgt

SEQ ID NO: 857980 - DNA, 15 bp, Homo sapiens
atatcacctactgta

SEQ ID NO: 857981 - DNA, 15 bp, Homo sapiens
tatcacctactgtat

SEQ ID NO: 857982 - DNA, 15 bp, Homo sapiens
atcacctactgtatt

SEQ ID NO: 857983 - DNA, 15 bp, Homo sapiens
tcacctactgtatta

SEQ ID NO: 857984 - DNA, 15 bp, Homo sapiens
cacctactgtattaa

SEQ ID NO: 857985 - DNA, 15 bp, Homo sapiens
acctactgtattaat

SEQ ID NO: 857986 - DNA, 15 bp, Homo sapiens
cctactgtattaata

SEQ ID NO: 857987 - DNA, 15 bp, Homo sapiens
ctactgtattaatac

SEQ ID NO: 857988 - DNA, 15 bp, Homo sapiens
tactgtattaataca

SEQ ID NO: 857989 - DNA, 15 bp, Homo sapiens
actgtattaatacag

SEQ ID NO: 857990 - DNA, 15 bp, Homo sapiens
ctgtattaatacaga

SEQ ID NO: 857991 - DNA, 15 bp, Homo sapiens
tgtattaatacagag

SEQ ID NO: 857992 - DNA, 15 bp, Homo sapiens
gtattaatacagaga

SEQ ID NO: 857993 - DNA, 15 bp, Homo sapiens
tattaatacagagat

SEQ ID NO: 857994 - DNA, 15 bp, Homo sapiens
attaatacagagata

SEQ ID NO: 857995 - DNA, 15 bp, Homo sapiens
ttaatacagagatat

SEQ ID NO: 857996 - DNA, 15 bp, Homo sapiens
taatacagagatatg

SEQ ID NO: 857997 - DNA, 15 bp, Homo sapiens
aatacagagatatgc

SEQ ID NO: 857998 - DNA, 15 bp, Homo sapiens
atacagagatatgca

SEQ ID NO: 857999 - DNA, 15 bp, Homo sapiens
tacagagatatgcag

SEQ ID NO: 858000 - DNA, 15 bp, Homo sapiens
acagagatatgcaga

SEQ ID NO: 858001 - DNA, 15 bp, Homo sapiens
cagagatatgcagaa

SEQ ID NO: 858002 - DNA, 15 bp, Homo sapiens
agagatatgcagaag

SEQ ID NO: 858003 - DNA, 15 bp, Homo sapiens
gagatatgcagaagt

SEQ ID NO: 858004 - DNA, 15 bp, Homo sapiens
agatatgcagaagtg

SEQ ID NO: 858005 - DNA, 15 bp, Homo sapiens
gatatgcagaagtgt

SEQ ID NO: 858006 - DNA, 15 bp, Homo sapiens
atatgcagaagtgta

SEQ ID NO: 858007 - DNA, 15 bp, Homo sapiens
tatgcagaagtgtac

SEQ ID NO: 858008 - DNA, 15 bp, Homo sapiens
atgcagaagtgtaca

SEQ ID NO: 858009 - DNA, 15 bp, Homo sapiens
tgcagaagtgtacat

SEQ ID NO: 858010 - DNA, 15 bp, Homo sapiens
gcagaagtgtacatg

SEQ ID NO: 858011 - DNA, 15 bp, Homo sapiens
cagaagtgtacatgt

SEQ ID NO: 858012 - DNA, 15 bp, Homo sapiens
agaagtgtacatgtt

SEQ ID NO: 858013 - DNA, 15 bp, Homo sapiens
gaagtgtacatgtta

SEQ ID NO: 858014 - DNA, 15 bp, Homo sapiens
aagtgtacatgttaa

SEQ ID NO: 858015 - DNA, 15 bp, Homo sapiens
agtgtacatgttaat

SEQ ID NO: 858016 - DNA, 15 bp, Homo sapiens
gtgtacatgttaata

SEQ ID NO: 858017 - DNA, 15 bp, Homo sapiens
tgtacatgttaatat

SEQ ID NO: 858018 - DNA, 15 bp, Homo sapiens
gtacatgttaatatt

SEQ ID NO: 858019 - DNA, 15 bp, Homo sapiens
tacatgttaatattt

SEQ ID NO: 858020 - DNA, 15 bp, Homo sapiens
acatgttaatatttt

SEQ ID NO: 858021 - DNA, 15 bp, Homo sapiens
catgttaatattttt

SEQ ID NO: 858022 - DNA, 15 bp, Homo sapiens
atgttaatatttttg

SEQ ID NO: 858023 - DNA, 15 bp, Homo sapiens
tgttaatatttttga

SEQ ID NO: 858024 - DNA, 15 bp, Homo sapiens
gttaatatttttgaa

SEQ ID NO: 858025 - DNA, 15 bp, Homo sapiens
ttaatatttttgaaa

SEQ ID NO: 858026 - DNA, 15 bp, Homo sapiens
taatatttttgaaat

SEQ ID NO: 858027 - DNA, 15 bp, Homo sapiens
aatatttttgaaatg

SEQ ID NO: 858028 - DNA, 15 bp, Homo sapiens
atatttttgaaatgg

SEQ ID NO: 858029 - DNA, 15 bp, Homo sapiens
tatttttgaaatggc

SEQ ID NO: 858030 - DNA, 15 bp, Homo sapiens
atttttgaaatggct

SEQ ID NO: 858031 - DNA, 15 bp, Homo sapiens
tttttgaaatggctg

SEQ ID NO: 858032 - DNA, 15 bp, Homo sapiens
ttttgaaatggctgt

SEQ ID NO: 858033 - DNA, 15 bp, Homo sapiens
tttgaaatggctgta

SEQ ID NO: 858034 - DNA, 15 bp, Homo sapiens
ttgaaatggctgtaa

SEQ ID NO: 858035 - DNA, 15 bp, Homo sapiens
tgaaatggctgtaaa

SEQ ID NO: 858036 - DNA, 15 bp, Homo sapiens
gaaatggctgtaaat

SEQ ID NO: 858037 - DNA, 15 bp, Homo sapiens
aaatggctgtaaatt

SEQ ID NO: 858038 - DNA, 15 bp, Homo sapiens
aatggctgtaaattg

SEQ ID NO: 858039 - DNA, 15 bp, Homo sapiens
atggctgtaaattga

SEQ ID NO: 858040 - DNA, 15 bp, Homo sapiens
tggctgtaaattgaa

SEQ ID NO: 858041 - DNA, 15 bp, Homo sapiens
ggctgtaaattgaat

SEQ ID NO: 858042 - DNA, 15 bp, Homo sapiens
gctgtaaattgaatt

SEQ ID NO: 858043 - DNA, 15 bp, Homo sapiens
ctgtaaattgaattg

SEQ ID NO: 858044 - DNA, 15 bp, Homo sapiens
tgtaaattgaattgt

SEQ ID NO: 858045 - DNA, 15 bp, Homo sapiens
gtaaattgaattgta

SEQ ID NO: 858046 - DNA, 15 bp, Homo sapiens
taaattgaattgtat

SEQ ID NO: 858047 - DNA, 15 bp, Homo sapiens
aaattgaattgtatc

SEQ ID NO: 858048 - DNA, 15 bp, Homo sapiens
aattgaattgtatca

SEQ ID NO: 858049 - DNA, 15 bp, Homo sapiens
attgaattgtatcaa

SEQ ID NO: 858050 - DNA, 15 bp, Homo sapiens
ttgaattgtatcaaa

SEQ ID NO: 858051 - DNA, 15 bp, Homo sapiens
tgaattgtatcaaag

SEQ ID NO: 858052 - DNA, 15 bp, Homo sapiens
gaattgtatcaaagg

SEQ ID NO: 858053 - DNA, 15 bp, Homo sapiens
aattgtatcaaaggg

SEQ ID NO: 858054 - DNA, 15 bp, Homo sapiens
attgtatcaaaggga

SEQ ID NO: 858055 - DNA, 15 bp, Homo sapiens
ttgtatcaaagggag

SEQ ID NO: 858056 - DNA, 15 bp, Homo sapiens
tgtatcaaagggagg

SEQ ID NO: 858057 - DNA, 15 bp, Homo sapiens
gtatcaaagggagga

SEQ ID NO: 858058 - DNA, 15 bp, Homo sapiens
tatcaaagggaggaa

SEQ ID NO: 858059 - DNA, 15 bp, Homo sapiens
atcaaagggaggaag

SEQ ID NO: 858060 - DNA, 15 bp, Homo sapiens
tcaaagggaggaagg

SEQ ID NO: 858061 - DNA, 15 bp, Homo sapiens
caaagggaggaagga

SEQ ID NO: 858062 - DNA, 15 bp, Homo sapiens
aaagggaggaaggaa

SEQ ID NO: 858063 - DNA, 15 bp, Homo sapiens
aagggaggaaggaaa

SEQ ID NO: 858064 - DNA, 15 bp, Homo sapiens
agggaggaaggaaag

SEQ ID NO: 858065 - DNA, 15 bp, Homo sapiens
gggaggaaggaaagg

SEQ ID NO: 858066 - DNA, 15 bp, Homo sapiens
ggaggaaggaaaggg

SEQ ID NO: 858067 - DNA, 15 bp, Homo sapiens
gaggaaggaaagggt

SEQ ID NO: 858068 - DNA, 15 bp, Homo sapiens
aggaaggaaagggtg

SEQ ID NO: 858069 - DNA, 15 bp, Homo sapiens
ggaaggaaagggtgt

SEQ ID NO: 858070 - DNA, 15 bp, Homo sapiens
gaaggaaagggtgta

SEQ ID NO: 858071 - DNA, 15 bp, Homo sapiens
aaggaaagggtgtag

SEQ ID NO: 858072 - DNA, 15 bp, Homo sapiens
aggaaagggtgtagc

SEQ ID NO: 858073 - DNA, 15 bp, Homo sapiens
ggaaagggtgtagcg

SEQ ID NO: 858074 - DNA, 15 bp, Homo sapiens
gaaagggtgtagcga

SEQ ID NO: 858075 - DNA, 15 bp, Homo sapiens
aaagggtgtagcgag

SEQ ID NO: 858076 - DNA, 15 bp, Homo sapiens
aagggtgtagcgaga

SEQ ID NO: 858077 - DNA, 15 bp, Homo sapiens
agggtgtagcgagaa

SEQ ID NO: 858078 - DNA, 15 bp, Homo sapiens
gggtgtagcgagaac

SEQ ID NO: 858079 - DNA, 15 bp, Homo sapiens
ggtgtagcgagaaca

SEQ ID NO: 858080 - DNA, 15 bp, Homo sapiens
gtgtagcgagaacaa

SEQ ID NO: 858081 - DNA, 15 bp, Homo sapiens
tgtagcgagaacaag

SEQ ID NO: 858082 - DNA, 15 bp, Homo sapiens
gtagcgagaacaagc

SEQ ID NO: 858083 - DNA, 15 bp, Homo sapiens
tagcgagaacaagcc

SEQ ID NO: 858084 - DNA, 15 bp, Homo sapiens
agcgagaacaagcca

SEQ ID NO: 858085 - DNA, 15 bp, Homo sapiens
gcgagaacaagccag

SEQ ID NO: 858086 - DNA, 15 bp, Homo sapiens
cgagaacaagccagc

SEQ ID NO: 858087 - DNA, 15 bp, Homo sapiens
gagaacaagccagct

SEQ ID NO: 858088 - DNA, 15 bp, Homo sapiens
agaacaagccagctc

SEQ ID NO: 858089 - DNA, 15 bp, Homo sapiens
gaacaagccagctct

SEQ ID NO: 858090 - DNA, 15 bp, Homo sapiens
aacaagccagctcta

SEQ ID NO: 858091 - DNA, 15 bp, Homo sapiens
acaagccagctctag

SEQ ID NO: 858092 - DNA, 15 bp, Homo sapiens
caagccagctctagc

SEQ ID NO: 858093 - DNA, 15 bp, Homo sapiens
aagccagctctagca

SEQ ID NO: 858094 - DNA, 15 bp, Homo sapiens
agccagctctagcat

SEQ ID NO: 858095 - DNA, 15 bp, Homo sapiens
gccagctctagcatt

SEQ ID NO: 858096 - DNA, 15 bp, Homo sapiens
ccagctctagcattg

SEQ ID NO: 858097 - DNA, 15 bp, Homo sapiens
cagctctagcattga

SEQ ID NO: 858098 - DNA, 15 bp, Homo sapiens
agctctagcattgaa

SEQ ID NO: 858099 - DNA, 15 bp, Homo sapiens
gctctagcattgaat

SEQ ID NO: 858100 - DNA, 15 bp, Homo sapiens
ctctagcattgaatt

SEQ ID NO: 858101 - DNA, 15 bp, Homo sapiens
tctagcattgaattg

SEQ ID NO: 858102 - DNA, 15 bp, Homo sapiens
ctagcattgaattgc

SEQ ID NO: 858103 - DNA, 15 bp, Homo sapiens
tagcattgaattgct

SEQ ID NO: 858104 - DNA, 15 bp, Homo sapiens
agcattgaattgctt

SEQ ID NO: 858105 - DNA, 15 bp, Homo sapiens
gcattgaattgcttt

SEQ ID NO: 858106 - DNA, 15 bp, Homo sapiens
cattgaattgctttt

SEQ ID NO: 858107 - DNA, 15 bp, Homo sapiens
attgaattgctttta

SEQ ID NO: 858108 - DNA, 15 bp, Homo sapiens
ttgaattgcttttag

SEQ ID NO: 858109 - DNA, 15 bp, Homo sapiens
tgaattgcttttagt

SEQ ID NO: 858110 - DNA, 15 bp, Homo sapiens
gaattgcttttagtg

SEQ ID NO: 858111 - DNA, 15 bp, Homo sapiens
aattgcttttagtga

SEQ ID NO: 858112 - DNA, 15 bp, Homo sapiens
attgcttttagtgag

SEQ ID NO: 858113 - DNA, 15 bp, Homo sapiens
ttgcttttagtgagc

SEQ ID NO: 858114 - DNA, 15 bp, Homo sapiens
tgcttttagtgagct

SEQ ID NO: 858115 - DNA, 15 bp, Homo sapiens
gcttttagtgagctt

SEQ ID NO: 858116 - DNA, 15 bp, Homo sapiens
cttttagtgagctta

SEQ ID NO: 858117 - DNA, 15 bp, Homo sapiens
ttttagtgagcttag

SEQ ID NO: 858118 - DNA, 15 bp, Homo sapiens
tttagtgagcttaga

SEQ ID NO: 858119 - DNA, 15 bp, Homo sapiens
ttagtgagcttagat

SEQ ID NO: 858120 - DNA, 15 bp, Homo sapiens
tagtgagcttagata

SEQ ID NO: 858121 - DNA, 15 bp, Homo sapiens
agtgagcttagatag

SEQ ID NO: 858122 - DNA, 15 bp, Homo sapiens
gtgagcttagatagt

SEQ ID NO: 858123 - DNA, 15 bp, Homo sapiens
tgagcttagatagtt

SEQ ID NO: 858124 - DNA, 15 bp, Homo sapiens
gagcttagatagttt

SEQ ID NO: 858125 - DNA, 15 bp, Homo sapiens
agcttagatagtttc

SEQ ID NO: 858126 - DNA, 15 bp, Homo sapiens
gcttagatagtttct

SEQ ID NO: 858127 - DNA, 15 bp, Homo sapiens
cttagatagtttctt

SEQ ID NO: 858128 - DNA, 15 bp, Homo sapiens
ttagatagtttctta

SEQ ID NO: 858129 - DNA, 15 bp, Homo sapiens
tagatagtttcttag

SEQ ID NO: 858130 - DNA, 15 bp, Homo sapiens
agatagtttcttaga

SEQ ID NO: 858131 - DNA, 15 bp, Homo sapiens
gatagtttcttagat

SEQ ID NO: 858132 - DNA, 15 bp, Homo sapiens
atagtttcttagata

SEQ ID NO: 858133 - DNA, 15 bp, Homo sapiens
tagtttcttagatag

SEQ ID NO: 858134 - DNA, 15 bp, Homo sapiens
agtttcttagatagt

SEQ ID NO: 858135 - DNA, 15 bp, Homo sapiens
gtttcttagatagtt

SEQ ID NO: 858136 - DNA, 15 bp, Homo sapiens
tttcttagatagttt

SEQ ID NO: 858137 - DNA, 15 bp, Homo sapiens
ttcttagatagtttc

SEQ ID NO: 858138 - DNA, 15 bp, Homo sapiens
tcttagatagtttcc

SEQ ID NO: 858139 - DNA, 15 bp, Homo sapiens
cttagatagtttcca

SEQ ID NO: 858140 - DNA, 15 bp, Homo sapiens
ttagatagtttccaa

SEQ ID NO: 858141 - DNA, 15 bp, Homo sapiens
tagatagtttccaaa

SEQ ID NO: 858142 - DNA, 15 bp, Homo sapiens
agatagtttccaaaa

SEQ ID NO: 858143 - DNA, 15 bp, Homo sapiens
gatagtttccaaaat

SEQ ID NO: 858144 - DNA, 15 bp, Homo sapiens
atagtttccaaaata

SEQ ID NO: 858145 - DNA, 15 bp, Homo sapiens
tagtttccaaaatac

SEQ ID NO: 858146 - DNA, 15 bp, Homo sapiens
agtttccaaaataca

SEQ ID NO: 858147 - DNA, 15 bp, Homo sapiens
gtttccaaaatacaa

SEQ ID NO: 858148 - DNA, 15 bp, Homo sapiens
tttccaaaatacaac

SEQ ID NO: 858149 - DNA, 15 bp, Homo sapiens
ttccaaaatacaaca

SEQ ID NO: 858150 - DNA, 15 bp, Homo sapiens
tccaaaatacaacag

SEQ ID NO: 858151 - DNA, 15 bp, Homo sapiens
ccaaaatacaacaga

SEQ ID NO: 858152 - DNA, 15 bp, Homo sapiens
caaaatacaacagag

SEQ ID NO: 858153 - DNA, 15 bp, Homo sapiens
aaaatacaacagagt

SEQ ID NO: 858154 - DNA, 15 bp, Homo sapiens
aaatacaacagagtt

SEQ ID NO: 858155 - DNA, 15 bp, Homo sapiens
aatacaacagagttt

SEQ ID NO: 858156 - DNA, 15 bp, Homo sapiens
atacaacagagtttt

SEQ ID NO: 858157 - DNA, 15 bp, Homo sapiens
tacaacagagttttg

SEQ ID NO: 858158 - DNA, 15 bp, Homo sapiens
acaacagagttttga

SEQ ID NO: 858159 - DNA, 15 bp, Homo sapiens
caacagagttttgat

SEQ ID NO: 858160 - DNA, 15 bp, Homo sapiens
aacagagttttgatg

SEQ ID NO: 858161 - DNA, 15 bp, Homo sapiens
acagagttttgatgc

SEQ ID NO: 858162 - DNA, 15 bp, Homo sapiens
cagagttttgatgca

SEQ ID NO: 858163 - DNA, 15 bp, Homo sapiens
agagttttgatgcag

SEQ ID NO: 858164 - DNA, 15 bp, Homo sapiens
gagttttgatgcaga

SEQ ID NO: 858165 - DNA, 15 bp, Homo sapiens
agttttgatgcagat

SEQ ID NO: 858166 - DNA, 15 bp, Homo sapiens
gttttgatgcagatg

SEQ ID NO: 858167 - DNA, 15 bp, Homo sapiens
ttttgatgcagatgg

SEQ ID NO: 858168 - DNA, 15 bp, Homo sapiens
tttgatgcagatgga

SEQ ID NO: 858169 - DNA, 15 bp, Homo sapiens
ttgatgcagatggat

SEQ ID NO: 858170 - DNA, 15 bp, Homo sapiens
tgatgcagatggata

SEQ ID NO: 858171 - DNA, 15 bp, Homo sapiens
gatgcagatggatat

SEQ ID NO: 858172 - DNA, 15 bp, Homo sapiens
atgcagatggatata

SEQ ID NO: 858173 - DNA, 15 bp, Homo sapiens
tgcagatggatatat

SEQ ID NO: 858174 - DNA, 15 bp, Homo sapiens
gcagatggatatata

SEQ ID NO: 858175 - DNA, 15 bp, Homo sapiens
cagatggatatatat

SEQ ID NO: 858176 - DNA, 15 bp, Homo sapiens
agatggatatatata

SEQ ID NO: 858177 - DNA, 15 bp, Homo sapiens
gatggatatatatat

SEQ ID NO: 858178 - DNA, 15 bp, Homo sapiens
atggatatatatata

SEQ ID NO: 858179 - DNA, 15 bp, Homo sapiens
tggatatatatatat

SEQ ID NO: 858180 - DNA, 15 bp, Homo sapiens
ggatatatatatata

SEQ ID NO: 858181 - DNA, 15 bp, Homo sapiens
gatatatatatatat

SEQ ID NO: 858182 - DNA, 15 bp, Homo sapiens
tatatatatattttc

SEQ ID NO: 858183 - DNA, 15 bp, Homo sapiens
atatatatattttct

SEQ ID NO: 858184 - DNA, 15 bp, Homo sapiens
tatatatattttctt

SEQ ID NO: 858185 - DNA, 15 bp, Homo sapiens
atatatattttcttt

SEQ ID NO: 858186 - DNA, 15 bp, Homo sapiens
tatatattttctttt

SEQ ID NO: 858187 - DNA, 15 bp, Homo sapiens
atatattttcttttt

SEQ ID NO: 858188 - DNA, 15 bp, Homo sapiens
tatattttcttttta

SEQ ID NO: 858189 - DNA, 15 bp, Homo sapiens
atattttctttttac

SEQ ID NO: 858190 - DNA, 15 bp, Homo sapiens
tattttctttttact

SEQ ID NO: 858191 - DNA, 15 bp, Homo sapiens
attttctttttacta

SEQ ID NO: 858192 - DNA, 15 bp, Homo sapiens
ttttctttttactat

SEQ ID NO: 858193 - DNA, 15 bp, Homo sapiens
tttctttttactatg

SEQ ID NO: 858194 - DNA, 15 bp, Homo sapiens
ttctttttactatgt

SEQ ID NO: 858195 - DNA, 15 bp, Homo sapiens
tctttttactatgtc

SEQ ID NO: 858196 - DNA, 15 bp, Homo sapiens
ctttttactatgtct

SEQ ID NO: 858197 - DNA, 15 bp, Homo sapiens
tttttactatgtctc

SEQ ID NO: 858198 - DNA, 15 bp, Homo sapiens
ttttactatgtctct

SEQ ID NO: 858199 - DNA, 15 bp, Homo sapiens
tttactatgtctctc

SEQ ID NO: 858200 - DNA, 15 bp, Homo sapiens
ttactatgtctctct

SEQ ID NO: 858201 - DNA, 15 bp, Homo sapiens
tactatgtctctcta

SEQ ID NO: 858202 - DNA, 15 bp, Homo sapiens
actatgtctctctaa

SEQ ID NO: 858203 - DNA, 15 bp, Homo sapiens
ctatgtctctctaac

SEQ ID NO: 858204 - DNA, 15 bp, Homo sapiens
tatgtctctctaacc

SEQ ID NO: 858205 - DNA, 15 bp, Homo sapiens
atgtctctctaacct

SEQ ID NO: 858206 - DNA, 15 bp, Homo sapiens
tgtctctctaacctg

SEQ ID NO: 858207 - DNA, 15 bp, Homo sapiens
gtctctctaacctgt

SEQ ID NO: 858208 - DNA, 15 bp, Homo sapiens
tctctctaacctgtg

SEQ ID NO: 858209 - DNA, 15 bp, Homo sapiens
ctctctaacctgtgc

SEQ ID NO: 858210 - DNA, 15 bp, Homo sapiens
tctctaacctgtgcc

SEQ ID NO: 858211 - DNA, 15 bp, Homo sapiens
ctctaacctgtgcct

SEQ ID NO: 858212 - DNA, 15 bp, Homo sapiens
tctaacctgtgcctc

SEQ ID NO: 858213 - DNA, 15 bp, Homo sapiens
ctaacctgtgcctca

SEQ ID NO: 858214 - DNA, 15 bp, Homo sapiens
taacctgtgcctcat

SEQ ID NO: 858215 - DNA, 15 bp, Homo sapiens
aacctgtgcctcatt

SEQ ID NO: 858216 - DNA, 15 bp, Homo sapiens
acctgtgcctcattc

SEQ ID NO: 858217 - DNA, 15 bp, Homo sapiens
cctgtgcctcattcc

SEQ ID NO: 858218 - DNA, 15 bp, Homo sapiens
ctgtgcctcattcct

SEQ ID NO: 858219 - DNA, 15 bp, Homo sapiens
tgtgcctcattcctc

SEQ ID NO: 858220 - DNA, 15 bp, Homo sapiens
gtgcctcattcctcc

SEQ ID NO: 858221 - DNA, 15 bp, Homo sapiens
tgcctcattcctcca

SEQ ID NO: 858222 - DNA, 15 bp, Homo sapiens
gcctcattcctccag

SEQ ID NO: 858223 - DNA, 15 bp, Homo sapiens
cctcattcctccagt

SEQ ID NO: 858224 - DNA, 15 bp, Homo sapiens
ctcattcctccagtg

SEQ ID NO: 858225 - DNA, 15 bp, Homo sapiens
tcattcctccagtgc

SEQ ID NO: 858226 - DNA, 15 bp, Homo sapiens
cattcctccagtgcc

SEQ ID NO: 858227 - DNA, 15 bp, Homo sapiens
attcctccagtgcca

SEQ ID NO: 858228 - DNA, 15 bp, Homo sapiens
ttcctccagtgccag

SEQ ID NO: 858229 - DNA, 15 bp, Homo sapiens
tcctccagtgccaga

SEQ ID NO: 858230 - DNA, 15 bp, Homo sapiens
cctccagtgccagat

SEQ ID NO: 858231 - DNA, 15 bp, Homo sapiens
ctccagtgccagatt

SEQ ID NO: 858232 - DNA, 15 bp, Homo sapiens
tccagtgccagattt

SEQ ID NO: 858233 - DNA, 15 bp, Homo sapiens
ccagtgccagatttt

SEQ ID NO: 858234 - DNA, 15 bp, Homo sapiens
cagtgccagattttg

SEQ ID NO: 858235 - DNA, 15 bp, Homo sapiens
agtgccagattttgt

SEQ ID NO: 858236 - DNA, 15 bp, Homo sapiens
gtgccagattttgtc

SEQ ID NO: 858237 - DNA, 15 bp, Homo sapiens
tgccagattttgtct

SEQ ID NO: 858238 - DNA, 15 bp, Homo sapiens
gccagattttgtctt

SEQ ID NO: 858239 - DNA, 15 bp, Homo sapiens
ccagattttgtcttt

SEQ ID NO: 858240 - DNA, 15 bp, Homo sapiens
cagattttgtctttt

SEQ ID NO: 858241 - DNA, 15 bp, Homo sapiens
agattttgtcttttg

SEQ ID NO: 858242 - DNA, 15 bp, Homo sapiens
gattttgtcttttgt

SEQ ID NO: 858243 - DNA, 15 bp, Homo sapiens
attttgtcttttgtt

SEQ ID NO: 858244 - DNA, 15 bp, Homo sapiens
ttttgtcttttgttc

SEQ ID NO: 858245 - DNA, 15 bp, Homo sapiens
tttgtcttttgttct

SEQ ID NO: 858246 - DNA, 15 bp, Homo sapiens
ttgtcttttgttctg

SEQ ID NO: 858247 - DNA, 15 bp, Homo sapiens
tgtcttttgttctgg

SEQ ID NO: 858248 - DNA, 15 bp, Homo sapiens
gtcttttgttctgga

SEQ ID NO: 858249 - DNA, 15 bp, Homo sapiens
tcttttgttctggaa

SEQ ID NO: 858250 - DNA, 15 bp, Homo sapiens
cttttgttctggaaa

SEQ ID NO: 858251 - DNA, 15 bp, Homo sapiens
ttttgttctggaaac

SEQ ID NO: 858252 - DNA, 15 bp, Homo sapiens
tttgttctggaaacg

SEQ ID NO: 858253 - DNA, 15 bp, Homo sapiens
ttgttctggaaacga

SEQ ID NO: 858254 - DNA, 15 bp, Homo sapiens
tgttctggaaacgag

SEQ ID NO: 858255 - DNA, 15 bp, Homo sapiens
gttctggaaacgagt

SEQ ID NO: 858256 - DNA, 15 bp, Homo sapiens
ttctggaaacgagtt

SEQ ID NO: 858257 - DNA, 15 bp, Homo sapiens
tctggaaacgagttt

SEQ ID NO: 858258 - DNA, 15 bp, Homo sapiens
ctggaaacgagtttt

SEQ ID NO: 858259 - DNA, 15 bp, Homo sapiens
tggaaacgagttttc

SEQ ID NO: 858260 - DNA, 15 bp, Homo sapiens
ggaaacgagttttct

SEQ ID NO: 858261 - DNA, 15 bp, Homo sapiens
gaaacgagttttcta

SEQ ID NO: 858262 - DNA, 15 bp, Homo sapiens
aaacgagttttctat

SEQ ID NO: 858263 - DNA, 15 bp, Homo sapiens
aacgagttttctatg

SEQ ID NO: 858264 - DNA, 15 bp, Homo sapiens
acgagttttctatgt

SEQ ID NO: 858265 - DNA, 15 bp, Homo sapiens
cgagttttctatgtc

SEQ ID NO: 858266 - DNA, 15 bp, Homo sapiens
gagttttctatgtct

SEQ ID NO: 858267 - DNA, 15 bp, Homo sapiens
agttttctatgtctg

SEQ ID NO: 858268 - DNA, 15 bp, Homo sapiens
gttttctatgtctgt

SEQ ID NO: 858269 - DNA, 15 bp, Homo sapiens
ttttctatgtctgtc

SEQ ID NO: 858270 - DNA, 15 bp, Homo sapiens
tttctatgtctgtca

SEQ ID NO: 858271 - DNA, 15 bp, Homo sapiens
ttctatgtctgtcag

SEQ ID NO: 858272 - DNA, 15 bp, Homo sapiens
tctatgtctgtcagc

SEQ ID NO: 858273 - DNA, 15 bp, Homo sapiens
ctatgtctgtcagcc

SEQ ID NO: 858274 - DNA, 15 bp, Homo sapiens
tatgtctgtcagcct

SEQ ID NO: 858275 - DNA, 15 bp, Homo sapiens
atgtctgtcagcctg

SEQ ID NO: 858276 - DNA, 15 bp, Homo sapiens
tgtctgtcagcctgc

SEQ ID NO: 858277 - DNA, 15 bp, Homo sapiens
gtctgtcagcctgca

SEQ ID NO: 858278 - DNA, 15 bp, Homo sapiens
tctgtcagcctgcac

SEQ ID NO: 858279 - DNA, 15 bp, Homo sapiens
ctgtcagcctgcact

SEQ ID NO: 858280 - DNA, 15 bp, Homo sapiens
tgtcagcctgcactg

SEQ ID NO: 858281 - DNA, 15 bp, Homo sapiens
gtcagcctgcactgg

SEQ ID NO: 858282 - DNA, 15 bp, Homo sapiens
tcagcctgcactggg

SEQ ID NO: 858283 - DNA, 15 bp, Homo sapiens
cagcctgcactgggc

SEQ ID NO: 858284 - DNA, 15 bp, Homo sapiens
agcctgcactgggct

SEQ ID NO: 858285 - DNA, 15 bp, Homo sapiens
gcctgcactgggcta

SEQ ID NO: 858286 - DNA, 15 bp, Homo sapiens
cctgcactgggctag

SEQ ID NO: 858287 - DNA, 15 bp, Homo sapiens
ctgcactgggctagt

SEQ ID NO: 858288 - DNA, 15 bp, Homo sapiens
tgcactgggctagtg

SEQ ID NO: 858289 - DNA, 15 bp, Homo sapiens
gcactgggctagtgg

SEQ ID NO: 858290 - DNA, 15 bp, Homo sapiens
cactgggctagtgga

SEQ ID NO: 858291 - DNA, 15 bp, Homo sapiens
actgggctagtggat

SEQ ID NO: 858292 - DNA, 15 bp, Homo sapiens
ctgggctagtggatt

SEQ ID NO: 858293 - DNA, 15 bp, Homo sapiens
tgggctagtggatta

SEQ ID NO: 858294 - DNA, 15 bp, Homo sapiens
gggctagtggattac

SEQ ID NO: 858295 - DNA, 15 bp, Homo sapiens
ggctagtggattaca

SEQ ID NO: 858296 - DNA, 15 bp, Homo sapiens
gctagtggattacag

SEQ ID NO: 858297 - DNA, 15 bp, Homo sapiens
ctagtggattacaga

SEQ ID NO: 858298 - DNA, 15 bp, Homo sapiens
tagtggattacagag

SEQ ID NO: 858299 - DNA, 15 bp, Homo sapiens
agtggattacagagc

SEQ ID NO: 858300 - DNA, 15 bp, Homo sapiens
gtggattacagagct

SEQ ID NO: 858301 - DNA, 15 bp, Homo sapiens
tggattacagagctt

SEQ ID NO: 858302 - DNA, 15 bp, Homo sapiens
ggattacagagcttt

SEQ ID NO: 858303 - DNA, 15 bp, Homo sapiens
gattacagagctttt

SEQ ID NO: 858304 - DNA, 15 bp, Homo sapiens
attacagagcttttt

SEQ ID NO: 858305 - DNA, 15 bp, Homo sapiens
ttacagagctttttc

SEQ ID NO: 858306 - DNA, 15 bp, Homo sapiens
tacagagctttttct

SEQ ID NO: 858307 - DNA, 15 bp, Homo sapiens
acagagctttttctc

SEQ ID NO: 858308 - DNA, 15 bp, Homo sapiens
cagagctttttctca

SEQ ID NO: 858309 - DNA, 15 bp, Homo sapiens
agagctttttctcag

SEQ ID NO: 858310 - DNA, 15 bp, Homo sapiens
gagctttttctcaga

SEQ ID NO: 858311 - DNA, 15 bp, Homo sapiens
agctttttctcagaa

SEQ ID NO: 858312 - DNA, 15 bp, Homo sapiens
gctttttctcagaat

SEQ ID NO: 858313 - DNA, 15 bp, Homo sapiens
ctttttctcagaatg

SEQ ID NO: 858314 - DNA, 15 bp, Homo sapiens
tttttctcagaatga

SEQ ID NO: 858315 - DNA, 15 bp, Homo sapiens
ttttctcagaatgat

SEQ ID NO: 858316 - DNA, 15 bp, Homo sapiens
tttctcagaatgatg

SEQ ID NO: 858317 - DNA, 15 bp, Homo sapiens
ttctcagaatgatga

SEQ ID NO: 858318 - DNA, 15 bp, Homo sapiens
tctcagaatgatgac

SEQ ID NO: 858319 - DNA, 15 bp, Homo sapiens
ctcagaatgatgact

SEQ ID NO: 858320 - DNA, 15 bp, Homo sapiens
tcagaatgatgacta

SEQ ID NO: 858321 - DNA, 15 bp, Homo sapiens
cagaatgatgactat

SEQ ID NO: 858322 - DNA, 15 bp, Homo sapiens
agaatgatgactatt

SEQ ID NO: 858323 - DNA, 15 bp, Homo sapiens
gaatgatgactattt

SEQ ID NO: 858324 - DNA, 15 bp, Homo sapiens
aatgatgactatttt

SEQ ID NO: 858325 - DNA, 15 bp, Homo sapiens
atgatgactattttg

SEQ ID NO: 858326 - DNA, 15 bp, Homo sapiens
tgatgactattttga

SEQ ID NO: 858327 - DNA, 15 bp, Homo sapiens
gatgactattttgaa

SEQ ID NO: 858328 - DNA, 15 bp, Homo sapiens
atgactattttgaag

SEQ ID NO: 858329 - DNA, 15 bp, Homo sapiens
tgactattttgaagg

SEQ ID NO: 858330 - DNA, 15 bp, Homo sapiens
gactattttgaagga

SEQ ID NO: 858331 - DNA, 15 bp, Homo sapiens
actattttgaaggac

SEQ ID NO: 858332 - DNA, 15 bp, Homo sapiens
ctattttgaaggact

SEQ ID NO: 858333 - DNA, 15 bp, Homo sapiens
tattttgaaggactg

SEQ ID NO: 858334 - DNA, 15 bp, Homo sapiens
attttgaaggactgt

SEQ ID NO: 858335 - DNA, 15 bp, Homo sapiens
ttttgaaggactgtt

SEQ ID NO: 858336 - DNA, 15 bp, Homo sapiens
tttgaaggactgttc

SEQ ID NO: 858337 - DNA, 15 bp, Homo sapiens
ttgaaggactgttcc

SEQ ID NO: 858338 - DNA, 15 bp, Homo sapiens
tgaaggactgttcca

SEQ ID NO: 858339 - DNA, 15 bp, Homo sapiens
gaaggactgttccat

SEQ ID NO: 858340 - DNA, 15 bp, Homo sapiens
aaggactgttccatt

SEQ ID NO: 858341 - DNA, 15 bp, Homo sapiens
aggactgttccatta

SEQ ID NO: 858342 - DNA, 15 bp, Homo sapiens
ggactgttccattaa

SEQ ID NO: 858343 - DNA, 15 bp, Homo sapiens
gactgttccattaat

SEQ ID NO: 858344 - DNA, 15 bp, Homo sapiens
actgttccattaata

SEQ ID NO: 858345 - DNA, 15 bp, Homo sapiens
ctgttccattaatat

SEQ ID NO: 858346 - DNA, 15 bp, Homo sapiens
tgttccattaatatc

SEQ ID NO: 858347 - DNA, 15 bp, Homo sapiens
gttccattaatatct

SEQ ID NO: 858348 - DNA, 15 bp, Homo sapiens
ttccattaatatctt

SEQ ID NO: 858349 - DNA, 15 bp, Homo sapiens
tccattaatatcttt

SEQ ID NO: 858350 - DNA, 15 bp, Homo sapiens
ccattaatatctttt

SEQ ID NO: 858351 - DNA, 15 bp, Homo sapiens
cattaatatctttta

SEQ ID NO: 858352 - DNA, 15 bp, Homo sapiens
attaatatcttttat

SEQ ID NO: 858353 - DNA, 15 bp, Homo sapiens
ttaatatcttttatt

SEQ ID NO: 858354 - DNA, 15 bp, Homo sapiens
taatatcttttattt

SEQ ID NO: 858355 - DNA, 15 bp, Homo sapiens
aatatcttttatttt

SEQ ID NO: 858356 - DNA, 15 bp, Homo sapiens
atatcttttattttt

SEQ ID NO: 858357 - DNA, 15 bp, Homo sapiens
tatcttttatttttc

SEQ ID NO: 858358 - DNA, 15 bp, Homo sapiens
atcttttatttttcc

SEQ ID NO: 858359 - DNA, 15 bp, Homo sapiens
tcttttatttttcca

SEQ ID NO: 858360 - DNA, 15 bp, Homo sapiens
cttttatttttccaa

SEQ ID NO: 858361 - DNA, 15 bp, Homo sapiens
ttttatttttccaat

SEQ ID NO: 858362 - DNA, 15 bp, Homo sapiens
tttatttttccaata

SEQ ID NO: 858363 - DNA, 15 bp, Homo sapiens
ttatttttccaatag

SEQ ID NO: 858364 - DNA, 15 bp, Homo sapiens
tatttttccaatagt

SEQ ID NO: 858365 - DNA, 15 bp, Homo sapiens
atttttccaatagta

SEQ ID NO: 858366 - DNA, 15 bp, Homo sapiens
tttttccaatagtat

SEQ ID NO: 858367 - DNA, 15 bp, Homo sapiens
ttttccaatagtata

SEQ ID NO: 858368 - DNA, 15 bp, Homo sapiens
tttccaatagtatag

SEQ ID NO: 858369 - DNA, 15 bp, Homo sapiens
ttccaatagtatagc

SEQ ID NO: 858370 - DNA, 15 bp, Homo sapiens
tccaatagtatagcc

SEQ ID NO: 858371 - DNA, 15 bp, Homo sapiens
ccaatagtatagccc

SEQ ID NO: 858372 - DNA, 15 bp, Homo sapiens
caatagtatagcccc

SEQ ID NO: 858373 - DNA, 15 bp, Homo sapiens
aatagtatagcccct

SEQ ID NO: 858374 - DNA, 15 bp, Homo sapiens
atagtatagcccctg

SEQ ID NO: 858375 - DNA, 15 bp, Homo sapiens
tagtatagcccctgt

SEQ ID NO: 858376 - DNA, 15 bp, Homo sapiens
agtatagcccctgtt

SEQ ID NO: 858377 - DNA, 15 bp, Homo sapiens
gtatagcccctgttt

SEQ ID NO: 858378 - DNA, 15 bp, Homo sapiens
tatagcccctgttta

SEQ ID NO: 858379 - DNA, 15 bp, Homo sapiens
atagcccctgtttaa

SEQ ID NO: 858380 - DNA, 15 bp, Homo sapiens
tagcccctgtttaac

SEQ ID NO: 858381 - DNA, 15 bp, Homo sapiens
agcccctgtttaact

SEQ ID NO: 858382 - DNA, 15 bp, Homo sapiens
gcccctgtttaacta

SEQ ID NO: 858383 - DNA, 15 bp, Homo sapiens
cccctgtttaactaa

SEQ ID NO: 858384 - DNA, 15 bp, Homo sapiens
ccctgtttaactaag

SEQ ID NO: 858385 - DNA, 15 bp, Homo sapiens
cctgtttaactaagg

SEQ ID NO: 858386 - DNA, 15 bp, Homo sapiens
ctgtttaactaaggt

SEQ ID NO: 858387 - DNA, 15 bp, Homo sapiens
tgtttaactaaggta

SEQ ID NO: 858388 - DNA, 15 bp, Homo sapiens
gtttaactaaggtat

SEQ ID NO: 858389 - DNA, 15 bp, Homo sapiens
tttaactaaggtatc

SEQ ID NO: 858390 - DNA, 15 bp, Homo sapiens
ttaactaaggtatct

SEQ ID NO: 858391 - DNA, 15 bp, Homo sapiens
taactaaggtatctt

SEQ ID NO: 858392 - DNA, 15 bp, Homo sapiens
aactaaggtatcttg

SEQ ID NO: 858393 - DNA, 15 bp, Homo sapiens
actaaggtatcttgc

SEQ ID NO: 858394 - DNA, 15 bp, Homo sapiens
ctaaggtatcttgca

SEQ ID NO: 858395 - DNA, 15 bp, Homo sapiens
taaggtatcttgcag

SEQ ID NO: 858396 - DNA, 15 bp, Homo sapiens
aaggtatcttgcagc

SEQ ID NO: 858397 - DNA, 15 bp, Homo sapiens
aggtatcttgcagca

SEQ ID NO: 858398 - DNA, 15 bp, Homo sapiens
ggtatcttgcagcaa

SEQ ID NO: 858399 - DNA, 15 bp, Homo sapiens
gtatcttgcagcaat

SEQ ID NO: 858400 - DNA, 15 bp, Homo sapiens
tatcttgcagcaatt

SEQ ID NO: 858401 - DNA, 15 bp, Homo sapiens
atcttgcagcaattg

SEQ ID NO: 858402 - DNA, 15 bp, Homo sapiens
tcttgcagcaattgt

SEQ ID NO: 858403 - DNA, 15 bp, Homo sapiens
cttgcagcaattgtg

SEQ ID NO: 858404 - DNA, 15 bp, Homo sapiens
ttgcagcaattgtga

SEQ ID NO: 858405 - DNA, 15 bp, Homo sapiens
tgcagcaattgtgat

SEQ ID NO: 858406 - DNA, 15 bp, Homo sapiens
gcagcaattgtgatt

SEQ ID NO: 858407 - DNA, 15 bp, Homo sapiens
cagcaattgtgattc

SEQ ID NO: 858408 - DNA, 15 bp, Homo sapiens
agcaattgtgattcc

SEQ ID NO: 858409 - DNA, 15 bp, Homo sapiens
gcaattgtgattcca

SEQ ID NO: 858410 - DNA, 15 bp, Homo sapiens
caattgtgattccaa

SEQ ID NO: 858411 - DNA, 15 bp, Homo sapiens
aattgtgattccaaa

SEQ ID NO: 858412 - DNA, 15 bp, Homo sapiens
attgtgattccaaat

SEQ ID NO: 858413 - DNA, 15 bp, Homo sapiens
ttgtgattccaaatg

SEQ ID NO: 858414 - DNA, 15 bp, Homo sapiens
tgtgattccaaatgc

SEQ ID NO: 858415 - DNA, 15 bp, Homo sapiens
gtgattccaaatgcc

SEQ ID NO: 858416 - DNA, 15 bp, Homo sapiens
tgattccaaatgcca

SEQ ID NO: 858417 - DNA, 15 bp, Homo sapiens
gattccaaatgccaa

SEQ ID NO: 858418 - DNA, 15 bp, Homo sapiens
attccaaatgccaac

SEQ ID NO: 858419 - DNA, 15 bp, Homo sapiens
ttccaaatgccaaca

SEQ ID NO: 858420 - DNA, 15 bp, Homo sapiens
tccaaatgccaacaa

SEQ ID NO: 858421 - DNA, 15 bp, Homo sapiens
ccaaatgccaacaaa

SEQ ID NO: 858422 - DNA, 15 bp, Homo sapiens
caaatgccaacaaaa

SEQ ID NO: 858423 - DNA, 15 bp, Homo sapiens
aaatgccaacaaaaa

SEQ ID NO: 858424 - DNA, 15 bp, Homo sapiens
aatgccaacaaaaaa

SEQ ID NO: 858425 - DNA, 15 bp, Homo sapiens
atgccaacaaaaaat

SEQ ID NO: 858426 - DNA, 15 bp, Homo sapiens
tgccaacaaaaaatt

SEQ ID NO: 858427 - DNA, 15 bp, Homo sapiens
gccaacaaaaaattt

SEQ ID NO: 858428 - DNA, 15 bp, Homo sapiens
ccaacaaaaaattta

SEQ ID NO: 858429 - DNA, 15 bp, Homo sapiens
caacaaaaaatttaa

SEQ ID NO: 858430 - DNA, 15 bp, Homo sapiens
aacaaaaaatttaag

SEQ ID NO: 858431 - DNA, 15 bp, Homo sapiens
acaaaaaatttaagt

SEQ ID NO: 858432 - DNA, 15 bp, Homo sapiens
caaaaaatttaagtc

SEQ ID NO: 858433 - DNA, 15 bp, Homo sapiens
aaaaaatttaagtca

SEQ ID NO: 858434 - DNA, 15 bp, Homo sapiens
aaaaatttaagtcag

SEQ ID NO: 858435 - DNA, 15 bp, Homo sapiens
aaaatttaagtcaga

SEQ ID NO: 858436 - DNA, 15 bp, Homo sapiens
aaatttaagtcagaa

SEQ ID NO: 858437 - DNA, 15 bp, Homo sapiens
aatttaagtcagaaa

SEQ ID NO: 858438 - DNA, 15 bp, Homo sapiens
atttaagtcagaaac

SEQ ID NO: 858439 - DNA, 15 bp, Homo sapiens
tttaagtcagaaacc

SEQ ID NO: 858440 - DNA, 15 bp, Homo sapiens
ttaagtcagaaacct

SEQ ID NO: 858441 - DNA, 15 bp, Homo sapiens
taagtcagaaacctc

SEQ ID NO: 858442 - DNA, 15 bp, Homo sapiens
aagtcagaaacctct

SEQ ID NO: 858443 - DNA, 15 bp, Homo sapiens
agtcagaaacctctg

SEQ ID NO: 858444 - DNA, 15 bp, Homo sapiens
gtcagaaacctctgt

SEQ ID NO: 858445 - DNA, 15 bp, Homo sapiens
tcagaaacctctgtg

SEQ ID NO: 858446 - DNA, 15 bp, Homo sapiens
cagaaacctctgtga

SEQ ID NO: 858447 - DNA, 15 bp, Homo sapiens
agaaacctctgtgat

SEQ ID NO: 858448 - DNA, 15 bp, Homo sapiens
gaaacctctgtgata

SEQ ID NO: 858449 - DNA, 15 bp, Homo sapiens
aaacctctgtgatat

SEQ ID NO: 858450 - DNA, 15 bp, Homo sapiens
aacctctgtgatatc

SEQ ID NO: 858451 - DNA, 15 bp, Homo sapiens
acctctgtgatatcc

SEQ ID NO: 858452 - DNA, 15 bp, Homo sapiens
cctctgtgatatccc

SEQ ID NO: 858453 - DNA, 15 bp, Homo sapiens
ctctgtgatatccct

SEQ ID NO: 858454 - DNA, 15 bp, Homo sapiens
tctgtgatatccctg

SEQ ID NO: 858455 - DNA, 15 bp, Homo sapiens
ctgtgatatccctga

SEQ ID NO: 858456 - DNA, 15 bp, Homo sapiens
tgtgatatccctgag

SEQ ID NO: 858457 - DNA, 15 bp, Homo sapiens
gtgatatccctgagt

SEQ ID NO: 858458 - DNA, 15 bp, Homo sapiens
tgatatccctgagtc

SEQ ID NO: 858459 - DNA, 15 bp, Homo sapiens
gatatccctgagtcc

SEQ ID NO: 858460 - DNA, 15 bp, Homo sapiens
atatccctgagtcca

SEQ ID NO: 858461 - DNA, 15 bp, Homo sapiens
tatccctgagtccat

SEQ ID NO: 858462 - DNA, 15 bp, Homo sapiens
atccctgagtccata

SEQ ID NO: 858463 - DNA, 15 bp, Homo sapiens
tccctgagtccatag

SEQ ID NO: 858464 - DNA, 15 bp, Homo sapiens
ccctgagtccatagc

SEQ ID NO: 858465 - DNA, 15 bp, Homo sapiens
cctgagtccatagca

SEQ ID NO: 858466 - DNA, 15 bp, Homo sapiens
ctgagtccatagcac

SEQ ID NO: 858467 - DNA, 15 bp, Homo sapiens
tgagtccatagcaca

SEQ ID NO: 858468 - DNA, 15 bp, Homo sapiens
gagtccatagcacag

SEQ ID NO: 858469 - DNA, 15 bp, Homo sapiens
agtccatagcacagg

SEQ ID NO: 858470 - DNA, 15 bp, Homo sapiens
gtccatagcacaggc

SEQ ID NO: 858471 - DNA, 15 bp, Homo sapiens
tccatagcacaggcc

SEQ ID NO: 858472 - DNA, 15 bp, Homo sapiens
ccatagcacaggcct

SEQ ID NO: 858473 - DNA, 15 bp, Homo sapiens
catagcacaggcctc

SEQ ID NO: 858474 - DNA, 15 bp, Homo sapiens
atagcacaggcctct

SEQ ID NO: 858475 - DNA, 15 bp, Homo sapiens
tagcacaggcctctg

SEQ ID NO: 858476 - DNA, 15 bp, Homo sapiens
agcacaggcctctga

SEQ ID NO: 858477 - DNA, 15 bp, Homo sapiens
gcacaggcctctgat

SEQ ID NO: 858478 - DNA, 15 bp, Homo sapiens
cacaggcctctgatg

SEQ ID NO: 858479 - DNA, 15 bp, Homo sapiens
acaggcctctgatgt

SEQ ID NO: 858480 - DNA, 15 bp, Homo sapiens
caggcctctgatgtc

SEQ ID NO: 858481 - DNA, 15 bp, Homo sapiens
aggcctctgatgtca

SEQ ID NO: 858482 - DNA, 15 bp, Homo sapiens
ggcctctgatgtcag

SEQ ID NO: 858483 - DNA, 15 bp, Homo sapiens
gcctctgatgtcagt

SEQ ID NO: 858484 - DNA, 15 bp, Homo sapiens
cctctgatgtcagtc

SEQ ID NO: 858485 - DNA, 15 bp, Homo sapiens
ctctgatgtcagtct

SEQ ID NO: 858486 - DNA, 15 bp, Homo sapiens
tctgatgtcagtctt

SEQ ID NO: 858487 - DNA, 15 bp, Homo sapiens
ctgatgtcagtcttc

SEQ ID NO: 858488 - DNA, 15 bp, Homo sapiens
tgatgtcagtcttct

SEQ ID NO: 858489 - DNA, 15 bp, Homo sapiens
gatgtcagtcttctt

SEQ ID NO: 858490 - DNA, 15 bp, Homo sapiens
atgtcagtcttcttt

SEQ ID NO: 858491 - DNA, 15 bp, Homo sapiens
tgtcagtcttctttg

SEQ ID NO: 858492 - DNA, 15 bp, Homo sapiens
gtcagtcttctttgt

SEQ ID NO: 858493 - DNA, 15 bp, Homo sapiens
tcagtcttctttgtc

SEQ ID NO: 858494 - DNA, 15 bp, Homo sapiens
cagtcttctttgtca

SEQ ID NO: 858495 - DNA, 15 bp, Homo sapiens
agtcttctttgtcat

SEQ ID NO: 858496 - DNA, 15 bp, Homo sapiens
gtcttctttgtcatc

SEQ ID NO: 858497 - DNA, 15 bp, Homo sapiens
tcttctttgtcatcc

SEQ ID NO: 858498 - DNA, 15 bp, Homo sapiens
cttctttgtcatcca

SEQ ID NO: 858499 - DNA, 15 bp, Homo sapiens
ttctttgtcatccac

SEQ ID NO: 858500 - DNA, 15 bp, Homo sapiens
tctttgtcatccaca

SEQ ID NO: 858501 - DNA, 15 bp, Homo sapiens
ctttgtcatccacaa

SEQ ID NO: 858502 - DNA, 15 bp, Homo sapiens
tttgtcatccacaag

SEQ ID NO: 858503 - DNA, 15 bp, Homo sapiens
ttgtcatccacaagc

SEQ ID NO: 858504 - DNA, 15 bp, Homo sapiens
tgtcatccacaagct

SEQ ID NO: 858505 - DNA, 15 bp, Homo sapiens
gtcatccacaagctc

SEQ ID NO: 858506 - DNA, 15 bp, Homo sapiens
tcatccacaagctca

SEQ ID NO: 858507 - DNA, 15 bp, Homo sapiens
catccacaagctcag

SEQ ID NO: 858508 - DNA, 15 bp, Homo sapiens
atccacaagctcaga

SEQ ID NO: 858509 - DNA, 15 bp, Homo sapiens
tccacaagctcagag

SEQ ID NO: 858510 - DNA, 15 bp, Homo sapiens
ccacaagctcagaga

SEQ ID NO: 858511 - DNA, 15 bp, Homo sapiens
cacaagctcagagat

SEQ ID NO: 858512 - DNA, 15 bp, Homo sapiens
acaagctcagagatg

SEQ ID NO: 858513 - DNA, 15 bp, Homo sapiens
caagctcagagatgt

SEQ ID NO: 858514 - DNA, 15 bp, Homo sapiens
aagctcagagatgtt

SEQ ID NO: 858515 - DNA, 15 bp, Homo sapiens
agctcagagatgtta

SEQ ID NO: 858516 - DNA, 15 bp, Homo sapiens
gctcagagatgttaa

SEQ ID NO: 858517 - DNA, 15 bp, Homo sapiens
ctcagagatgttaaa

SEQ ID NO: 858518 - DNA, 15 bp, Homo sapiens
tcagagatgttaaag

SEQ ID NO: 858519 - DNA, 15 bp, Homo sapiens
cagagatgttaaaga

SEQ ID NO: 858520 - DNA, 15 bp, Homo sapiens
agagatgttaaagaa

SEQ ID NO: 858521 - DNA, 15 bp, Homo sapiens
gagatgttaaagaac

SEQ ID NO: 858522 - DNA, 15 bp, Homo sapiens
agatgttaaagaacc

SEQ ID NO: 858523 - DNA, 15 bp, Homo sapiens
gatgttaaagaacct

SEQ ID NO: 858524 - DNA, 15 bp, Homo sapiens
atgttaaagaacctg

SEQ ID NO: 858525 - DNA, 15 bp, Homo sapiens
tgttaaagaacctgt

SEQ ID NO: 858526 - DNA, 15 bp, Homo sapiens
gttaaagaacctgtc

SEQ ID NO: 858527 - DNA, 15 bp, Homo sapiens
ttaaagaacctgtca

SEQ ID NO: 858528 - DNA, 15 bp, Homo sapiens
taaagaacctgtcaa

SEQ ID NO: 858529 - DNA, 15 bp, Homo sapiens
aaagaacctgtcaag

SEQ ID NO: 858530 - DNA, 15 bp, Homo sapiens
aagaacctgtcaagg

SEQ ID NO: 858531 - DNA, 15 bp, Homo sapiens
agaacctgtcaaggc

SEQ ID NO: 858532 - DNA, 15 bp, Homo sapiens
gaacctgtcaaggct

SEQ ID NO: 858533 - DNA, 15 bp, Homo sapiens
aacctgtcaaggcta

SEQ ID NO: 858534 - DNA, 15 bp, Homo sapiens
acctgtcaaggctat

SEQ ID NO: 858535 - DNA, 15 bp, Homo sapiens
cctgtcaaggctatg

SEQ ID NO: 858536 - DNA, 15 bp, Homo sapiens
ctgtcaaggctatgc

SEQ ID NO: 858537 - DNA, 15 bp, Homo sapiens
tgtcaaggctatgca

SEQ ID NO: 858538 - DNA, 15 bp, Homo sapiens
gtcaaggctatgcag

SEQ ID NO: 858539 - DNA, 15 bp, Homo sapiens
tcaaggctatgcagc

SEQ ID NO: 858540 - DNA, 15 bp, Homo sapiens
caaggctatgcagct

SEQ ID NO: 858541 - DNA, 15 bp, Homo sapiens
aaggctatgcagctg

SEQ ID NO: 858542 - DNA, 15 bp, Homo sapiens
aggctatgcagctgg

SEQ ID NO: 858543 - DNA, 15 bp, Homo sapiens
ggctatgcagctggt

SEQ ID NO: 858544 - DNA, 15 bp, Homo sapiens
gctatgcagctggta

SEQ ID NO: 858545 - DNA, 15 bp, Homo sapiens
ctatgcagctggtag

SEQ ID NO: 858546 - DNA, 15 bp, Homo sapiens
tatgcagctggtagc

SEQ ID NO: 858547 - DNA, 15 bp, Homo sapiens
atgcagctggtagct

SEQ ID NO: 858548 - DNA, 15 bp, Homo sapiens
tgcagctggtagctg

SEQ ID NO: 858549 - DNA, 15 bp, Homo sapiens
gcagctggtagctgg

SEQ ID NO: 858550 - DNA, 15 bp, Homo sapiens
cagctggtagctggc

SEQ ID NO: 858551 - DNA, 15 bp, Homo sapiens
agctggtagctggca

SEQ ID NO: 858552 - DNA, 15 bp, Homo sapiens
gctggtagctggcaa

SEQ ID NO: 858553 - DNA, 15 bp, Homo sapiens
ctggtagctggcaag

SEQ ID NO: 858554 - DNA, 15 bp, Homo sapiens
tggtagctggcaagg

SEQ ID NO: 858555 - DNA, 15 bp, Homo sapiens
ggtagctggcaaggc

SEQ ID NO: 858556 - DNA, 15 bp, Homo sapiens
gtagctggcaaggct

SEQ ID NO: 858557 - DNA, 15 bp, Homo sapiens
tagctggcaaggctg

SEQ ID NO: 858558 - DNA, 15 bp, Homo sapiens
agctggcaaggctga

SEQ ID NO: 858559 - DNA, 15 bp, Homo sapiens
gctggcaaggctgag

SEQ ID NO: 858560 - DNA, 15 bp, Homo sapiens
ctggcaaggctgaga

SEQ ID NO: 858561 - DNA, 15 bp, Homo sapiens
tggcaaggctgagat

SEQ ID NO: 858562 - DNA, 15 bp, Homo sapiens
ggcaaggctgagatg

SEQ ID NO: 858563 - DNA, 15 bp, Homo sapiens
gcaaggctgagatgt

SEQ ID NO: 858564 - DNA, 15 bp, Homo sapiens
caaggctgagatgtg

SEQ ID NO: 858565 - DNA, 15 bp, Homo sapiens
aaggctgagatgtgc

SEQ ID NO: 858566 - DNA, 15 bp, Homo sapiens
aggctgagatgtgcc

SEQ ID NO: 858567 - DNA, 15 bp, Homo sapiens
ggctgagatgtgcca

SEQ ID NO: 858568 - DNA, 15 bp, Homo sapiens
gctgagatgtgccag

SEQ ID NO: 858569 - DNA, 15 bp, Homo sapiens
ctgagatgtgccagt

SEQ ID NO: 858570 - DNA, 15 bp, Homo sapiens
tgagatgtgccagtt

SEQ ID NO: 858571 - DNA, 15 bp, Homo sapiens
gagatgtgccagttt

SEQ ID NO: 858572 - DNA, 15 bp, Homo sapiens
agatgtgccagtttc

SEQ ID NO: 858573 - DNA, 15 bp, Homo sapiens
gatgtgccagtttcc

SEQ ID NO: 858574 - DNA, 15 bp, Homo sapiens
atgtgccagtttcct

SEQ ID NO: 858575 - DNA, 15 bp, Homo sapiens
tgtgccagtttcctg

SEQ ID NO: 858576 - DNA, 15 bp, Homo sapiens
gtgccagtttcctga

SEQ ID NO: 858577 - DNA, 15 bp, Homo sapiens
tgccagtttcctgag

SEQ ID NO: 858578 - DNA, 15 bp, Homo sapiens
gccagtttcctgaga

SEQ ID NO: 858579 - DNA, 15 bp, Homo sapiens
ccagtttcctgagac

SEQ ID NO: 858580 - DNA, 15 bp, Homo sapiens
cagtttcctgagacc

SEQ ID NO: 858581 - DNA, 15 bp, Homo sapiens
agtttcctgagacct

SEQ ID NO: 858582 - DNA, 15 bp, Homo sapiens
gtttcctgagacctc

SEQ ID NO: 858583 - DNA, 15 bp, Homo sapiens
tttcctgagacctcc

SEQ ID NO: 858584 - DNA, 15 bp, Homo sapiens
ttcctgagacctccc

SEQ ID NO: 858585 - DNA, 15 bp, Homo sapiens
tcctgagacctccct

SEQ ID NO: 858586 - DNA, 15 bp, Homo sapiens
cctgagacctccctt

SEQ ID NO: 858587 - DNA, 15 bp, Homo sapiens
ctgagacctccctta

SEQ ID NO: 858588 - DNA, 15 bp, Homo sapiens
tgagacctcccttat

SEQ ID NO: 858589 - DNA, 15 bp, Homo sapiens
gagacctcccttatc

SEQ ID NO: 858590 - DNA, 15 bp, Homo sapiens
agacctcccttatcc

SEQ ID NO: 858591 - DNA, 15 bp, Homo sapiens
gacctcccttatcct

SEQ ID NO: 858592 - DNA, 15 bp, Homo sapiens
acctcccttatcctt

SEQ ID NO: 858593 - DNA, 15 bp, Homo sapiens
cctcccttatccttg

SEQ ID NO: 858594 - DNA, 15 bp, Homo sapiens
ctcccttatccttgc

SEQ ID NO: 858595 - DNA, 15 bp, Homo sapiens
tcccttatccttgct

SEQ ID NO: 858596 - DNA, 15 bp, Homo sapiens
cccttatccttgctt

SEQ ID NO: 858597 - DNA, 15 bp, Homo sapiens
ccttatccttgcttc

SEQ ID NO: 858598 - DNA, 15 bp, Homo sapiens
cttatccttgcttcc

SEQ ID NO: 858599 - DNA, 15 bp, Homo sapiens
ttatccttgcttccc

SEQ ID NO: 858600 - DNA, 15 bp, Homo sapiens
tatccttgcttcccc

SEQ ID NO: 858601 - DNA, 15 bp, Homo sapiens
atccttgcttcccca

SEQ ID NO: 858602 - DNA, 15 bp, Homo sapiens
tccttgcttccccat

SEQ ID NO: 858603 - DNA, 15 bp, Homo sapiens
ccttgcttccccatg

SEQ ID NO: 858604 - DNA, 15 bp, Homo sapiens
cttgcttccccatgg

SEQ ID NO: 858605 - DNA, 15 bp, Homo sapiens
ttgcttccccatgga

SEQ ID NO: 858606 - DNA, 15 bp, Homo sapiens
tgcttccccatggac

SEQ ID NO: 858607 - DNA, 15 bp, Homo sapiens
gcttccccatggact

SEQ ID NO: 858608 - DNA, 15 bp, Homo sapiens
cttccccatggactt

SEQ ID NO: 858609 - DNA, 15 bp, Homo sapiens
ttccccatggacttt

SEQ ID NO: 858610 - DNA, 15 bp, Homo sapiens
tccccatggactttg

SEQ ID NO: 858611 - DNA, 15 bp, Homo sapiens
ccccatggactttgc

SEQ ID NO: 858612 - DNA, 15 bp, Homo sapiens
cccatggactttgct

SEQ ID NO: 858613 - DNA, 15 bp, Homo sapiens
ccatggactttgctg

SEQ ID NO: 858614 - DNA, 15 bp, Homo sapiens
catggactttgctgt

SEQ ID NO: 858615 - DNA, 15 bp, Homo sapiens
atggactttgctgtt

SEQ ID NO: 858616 - DNA, 15 bp, Homo sapiens
tggactttgctgttt

SEQ ID NO: 858617 - DNA, 15 bp, Homo sapiens
ggactttgctgtttt

SEQ ID NO: 858618 - DNA, 15 bp, Homo sapiens
gactttgctgttttc

SEQ ID NO: 858619 - DNA, 15 bp, Homo sapiens
actttgctgttttcc

SEQ ID NO: 858620 - DNA, 15 bp, Homo sapiens
ctttgctgttttcct

SEQ ID NO: 858621 - DNA, 15 bp, Homo sapiens
tttgctgttttcctg

SEQ ID NO: 858622 - DNA, 15 bp, Homo sapiens
ttgctgttttcctga

SEQ ID NO: 858623 - DNA, 15 bp, Homo sapiens
tgctgttttcctgat

SEQ ID NO: 858624 - DNA, 15 bp, Homo sapiens
gctgttttcctgata

SEQ ID NO: 858625 - DNA, 15 bp, Homo sapiens
ctgttttcctgatac

SEQ ID NO: 858626 - DNA, 15 bp, Homo sapiens
tgttttcctgatacg

SEQ ID NO: 858627 - DNA, 15 bp, Homo sapiens
gttttcctgatacgg

SEQ ID NO: 858628 - DNA, 15 bp, Homo sapiens
ttttcctgatacggt

SEQ ID NO: 858629 - DNA, 15 bp, Homo sapiens
tttcctgatacggtt

SEQ ID NO: 858630 - DNA, 15 bp, Homo sapiens
ttcctgatacggttc

SEQ ID NO: 858631 - DNA, 15 bp, Homo sapiens
tcctgatacggttca

SEQ ID NO: 858632 - DNA, 15 bp, Homo sapiens
cctgatacggttcat

SEQ ID NO: 858633 - DNA, 15 bp, Homo sapiens
ctgatacggttcata

SEQ ID NO: 858634 - DNA, 15 bp, Homo sapiens
tgatacggttcataa

SEQ ID NO: 858635 - DNA, 15 bp, Homo sapiens
gatacggttcataag

SEQ ID NO: 858636 - DNA, 15 bp, Homo sapiens
atacggttcataagt

SEQ ID NO: 858637 - DNA, 15 bp, Homo sapiens
tacggttcataagtg

SEQ ID NO: 858638 - DNA, 15 bp, Homo sapiens
acggttcataagtga

SEQ ID NO: 858639 - DNA, 15 bp, Homo sapiens
cggttcataagtgaa

SEQ ID NO: 858640 - DNA, 15 bp, Homo sapiens
ggttcataagtgaag

SEQ ID NO: 858641 - DNA, 15 bp, Homo sapiens
gttcataagtgaagt

SEQ ID NO: 858642 - DNA, 15 bp, Homo sapiens
ttcataagtgaagtt

SEQ ID NO: 858643 - DNA, 15 bp, Homo sapiens
tcataagtgaagttc

SEQ ID NO: 858644 - DNA, 15 bp, Homo sapiens
cataagtgaagttcc

SEQ ID NO: 858645 - DNA, 15 bp, Homo sapiens
ataagtgaagttcct

SEQ ID NO: 858646 - DNA, 15 bp, Homo sapiens
taagtgaagttcctg

SEQ ID NO: 858647 - DNA, 15 bp, Homo sapiens
aagtgaagttcctga

SEQ ID NO: 858648 - DNA, 15 bp, Homo sapiens
agtgaagttcctgaa

SEQ ID NO: 858649 - DNA, 15 bp, Homo sapiens
gtgaagttcctgaaa

SEQ ID NO: 858650 - DNA, 15 bp, Homo sapiens
tgaagttcctgaaag

SEQ ID NO: 858651 - DNA, 15 bp, Homo sapiens
gaagttcctgaaagc

SEQ ID NO: 858652 - DNA, 15 bp, Homo sapiens
aagttcctgaaagct

SEQ ID NO: 858653 - DNA, 15 bp, Homo sapiens
agttcctgaaagctc

SEQ ID NO: 858654 - DNA, 15 bp, Homo sapiens
gttcctgaaagctcc

SEQ ID NO: 858655 - DNA, 15 bp, Homo sapiens
ttcctgaaagctcca

SEQ ID NO: 858656 - DNA, 15 bp, Homo sapiens
tcctgaaagctccag

SEQ ID NO: 858657 - DNA, 15 bp, Homo sapiens
cctgaaagctccagt

SEQ ID NO: 858658 - DNA, 15 bp, Homo sapiens
ctgaaagctccagtt

SEQ ID NO: 858659 - DNA, 15 bp, Homo sapiens
tgaaagctccagttt

SEQ ID NO: 858660 - DNA, 15 bp, Homo sapiens
gaaagctccagtttg

SEQ ID NO: 858661 - DNA, 15 bp, Homo sapiens
aaagctccagtttga

SEQ ID NO: 858662 - DNA, 15 bp, Homo sapiens
aagctccagtttgag

SEQ ID NO: 858663 - DNA, 15 bp, Homo sapiens
gctccagtttgagac

SEQ ID NO: 858664 - DNA, 15 bp, Homo sapiens
ctccagtttgagacc

SEQ ID NO: 858665 - DNA, 15 bp, Homo sapiens
tccagtttgagaccc

SEQ ID NO: 858666 - DNA, 15 bp, Homo sapiens
ccagtttgagaccct

SEQ ID NO: 858667 - DNA, 15 bp, Homo sapiens
cagtttgagaccctg

SEQ ID NO: 858668 - DNA, 15 bp, Homo sapiens
agtttgagaccctgg

SEQ ID NO: 858669 - DNA, 15 bp, Homo sapiens
gtttgagaccctggg

SEQ ID NO: 858670 - DNA, 15 bp, Homo sapiens
tttgagaccctggga

SEQ ID NO: 858671 - DNA, 15 bp, Homo sapiens
ttgagaccctgggac

SEQ ID NO: 858672 - DNA, 15 bp, Homo sapiens
tgagaccctgggact

SEQ ID NO: 858673 - DNA, 15 bp, Homo sapiens
gagaccctgggactg

SEQ ID NO: 858674 - DNA, 15 bp, Homo sapiens
agaccctgggactgt

SEQ ID NO: 858675 - DNA, 15 bp, Homo sapiens
gaccctgggactgtg

SEQ ID NO: 858676 - DNA, 15 bp, Homo sapiens
accctgggactgtgg

SEQ ID NO: 858677 - DNA, 15 bp, Homo sapiens
ccctgggactgtggg

SEQ ID NO: 858678 - DNA, 15 bp, Homo sapiens
cctgggactgtgggt

SEQ ID NO: 858679 - DNA, 15 bp, Homo sapiens
ctgggactgtgggtc

SEQ ID NO: 858680 - DNA, 15 bp, Homo sapiens
tgggactgtgggtct

SEQ ID NO: 858681 - DNA, 15 bp, Homo sapiens
gggactgtgggtctt

SEQ ID NO: 858682 - DNA, 15 bp, Homo sapiens
ggactgtgggtcttg

SEQ ID NO: 858683 - DNA, 15 bp, Homo sapiens
gactgtgggtcttgg

SEQ ID NO: 858684 - DNA, 15 bp, Homo sapiens
actgtgggtcttggt

SEQ ID NO: 858685 - DNA, 15 bp, Homo sapiens
ctgtgggtcttggtc

SEQ ID NO: 858686 - DNA, 15 bp, Homo sapiens
tgtgggtcttggtcc

SEQ ID NO: 858687 - DNA, 15 bp, Homo sapiens
gtgggtcttggtcca

SEQ ID NO: 858688 - DNA, 15 bp, Homo sapiens
tgggtcttggtccaa

SEQ ID NO: 858689 - DNA, 15 bp, Homo sapiens
gggtcttggtccaag

SEQ ID NO: 858690 - DNA, 15 bp, Homo sapiens
ggtcttggtccaagt

SEQ ID NO: 858691 - DNA, 15 bp, Homo sapiens
gtcttggtccaagtg

SEQ ID NO: 858692 - DNA, 15 bp, Homo sapiens
tcttggtccaagtgc

SEQ ID NO: 858693 - DNA, 15 bp, Homo sapiens
cttggtccaagtgca

SEQ ID NO: 858694 - DNA, 15 bp, Homo sapiens
ttggtccaagtgcag

SEQ ID NO: 858695 - DNA, 15 bp, Homo sapiens
tggtccaagtgcaga

SEQ ID NO: 858696 - DNA, 15 bp, Homo sapiens
ggtccaagtgcagaa

SEQ ID NO: 858697 - DNA, 15 bp, Homo sapiens
gtccaagtgcagaaa

SEQ ID NO: 858698 - DNA, 15 bp, Homo sapiens
tccaagtgcagaaaa

SEQ ID NO: 858699 - DNA, 15 bp, Homo sapiens
ccaagtgcagaaaag

SEQ ID NO: 858700 - DNA, 15 bp, Homo sapiens
caagtgcagaaaagg

SEQ ID NO: 858701 - DNA, 15 bp, Homo sapiens
aagtgcagaaaaggc

SEQ ID NO: 858702 - DNA, 15 bp, Homo sapiens
agtgcagaaaaggct

SEQ ID NO: 858703 - DNA, 15 bp, Homo sapiens
gtgcagaaaaggctg

SEQ ID NO: 858704 - DNA, 15 bp, Homo sapiens
tgcagaaaaggctgt

SEQ ID NO: 858705 - DNA, 15 bp, Homo sapiens
gcagaaaaggctgtg

SEQ ID NO: 858706 - DNA, 15 bp, Homo sapiens
cagaaaaggctgtgg

SEQ ID NO: 858707 - DNA, 15 bp, Homo sapiens
agaaaaggctgtggt

SEQ ID NO: 858708 - DNA, 15 bp, Homo sapiens
gaaaaggctgtggtt

SEQ ID NO: 858709 - DNA, 15 bp, Homo sapiens
aaaaggctgtggttc

SEQ ID NO: 858710 - DNA, 15 bp, Homo sapiens
aaaggctgtggttcc

SEQ ID NO: 858711 - DNA, 15 bp, Homo sapiens
aaggctgtggttcca

SEQ ID NO: 858712 - DNA, 15 bp, Homo sapiens
aggctgtggttccac

SEQ ID NO: 858713 - DNA, 15 bp, Homo sapiens
ggctgtggttccact

SEQ ID NO: 858714 - DNA, 15 bp, Homo sapiens
gctgtggttccactg

SEQ ID NO: 858715 - DNA, 15 bp, Homo sapiens
ctgtggttccactgg

SEQ ID NO: 858716 - DNA, 15 bp, Homo sapiens
tgtggttccactgga

SEQ ID NO: 858717 - DNA, 15 bp, Homo sapiens
gtggttccactggag

SEQ ID NO: 858718 - DNA, 15 bp, Homo sapiens
tggttccactggagg

SEQ ID NO: 858719 - DNA, 15 bp, Homo sapiens
ggttccactggagga

SEQ ID NO: 858720 - DNA, 15 bp, Homo sapiens
gttccactggaggac

SEQ ID NO: 858721 - DNA, 15 bp, Homo sapiens
ttccactggaggact

SEQ ID NO: 858722 - DNA, 15 bp, Homo sapiens
tccactggaggactt

SEQ ID NO: 858723 - DNA, 15 bp, Homo sapiens
ccactggaggacttt

SEQ ID NO: 858724 - DNA, 15 bp, Homo sapiens
cactggaggacttta

SEQ ID NO: 858725 - DNA, 15 bp, Homo sapiens
actggaggactttac

SEQ ID NO: 858726 - DNA, 15 bp, Homo sapiens
ctggaggactttact

SEQ ID NO: 858727 - DNA, 15 bp, Homo sapiens
tggaggactttactt

SEQ ID NO: 858728 - DNA, 15 bp, Homo sapiens
ggaggactttacttg

SEQ ID NO: 858729 - DNA, 15 bp, Homo sapiens
gaggactttacttga

SEQ ID NO: 858730 - DNA, 15 bp, Homo sapiens
aggactttacttgaa

SEQ ID NO: 858731 - DNA, 15 bp, Homo sapiens
ggactttacttgaag

SEQ ID NO: 858732 - DNA, 15 bp, Homo sapiens
gactttacttgaagt

SEQ ID NO: 858733 - DNA, 15 bp, Homo sapiens
actttacttgaagta

SEQ ID NO: 858734 - DNA, 15 bp, Homo sapiens
ctttacttgaagtat

SEQ ID NO: 858735 - DNA, 15 bp, Homo sapiens
tttacttgaagtata

SEQ ID NO: 858736 - DNA, 15 bp, Homo sapiens
ttacttgaagtataa

SEQ ID NO: 858737 - DNA, 15 bp, Homo sapiens
tacttgaagtataac

SEQ ID NO: 858738 - DNA, 15 bp, Homo sapiens
acttgaagtataact

SEQ ID NO: 858739 - DNA, 15 bp, Homo sapiens
cttgaagtataacta

SEQ ID NO: 858740 - DNA, 15 bp, Homo sapiens
ttgaagtataactat

SEQ ID NO: 858741 - DNA, 15 bp, Homo sapiens
tgaagtataactata

SEQ ID NO: 858742 - DNA, 15 bp, Homo sapiens
gaagtataactataa

SEQ ID NO: 858743 - DNA, 15 bp, Homo sapiens
aagtataactataac

SEQ ID NO: 858744 - DNA, 15 bp, Homo sapiens
agtataactataact

SEQ ID NO: 858745 - DNA, 15 bp, Homo sapiens
gtataactataactt

SEQ ID NO: 858746 - DNA, 15 bp, Homo sapiens
tataactataacttt

SEQ ID NO: 858747 - DNA, 15 bp, Homo sapiens
ataactataactttg

SEQ ID NO: 858748 - DNA, 15 bp, Homo sapiens
taactataactttgt

SEQ ID NO: 858749 - DNA, 15 bp, Homo sapiens
aactataactttgtt

SEQ ID NO: 858750 - DNA, 15 bp, Homo sapiens
actataactttgttt

SEQ ID NO: 858751 - DNA, 15 bp, Homo sapiens
ctataactttgtttt

SEQ ID NO: 858752 - DNA, 15 bp, Homo sapiens
tataactttgttttc

SEQ ID NO: 858753 - DNA, 15 bp, Homo sapiens
ataactttgttttca

SEQ ID NO: 858754 - DNA, 15 bp, Homo sapiens
taactttgttttcat

SEQ ID NO: 858755 - DNA, 15 bp, Homo sapiens
aactttgttttcatg

SEQ ID NO: 858756 - DNA, 15 bp, Homo sapiens
actttgttttcatgt

SEQ ID NO: 858757 - DNA, 15 bp, Homo sapiens
ctttgttttcatgtt

SEQ ID NO: 858758 - DNA, 15 bp, Homo sapiens
tttgttttcatgttt

SEQ ID NO: 858759 - DNA, 15 bp, Homo sapiens
ttgttttcatgtttt

SEQ ID NO: 858760 - DNA, 15 bp, Homo sapiens
tgttttcatgttttg

SEQ ID NO: 858761 - DNA, 15 bp, Homo sapiens
gttttcatgttttgg

SEQ ID NO: 858762 - DNA, 15 bp, Homo sapiens
ttttcatgttttggt

SEQ ID NO: 858763 - DNA, 15 bp, Homo sapiens
tttcatgttttggta

SEQ ID NO: 858764 - DNA, 15 bp, Homo sapiens
ttcatgttttggtag

SEQ ID NO: 858765 - DNA, 15 bp, Homo sapiens
tcatgttttggtagc

SEQ ID NO: 858766 - DNA, 15 bp, Homo sapiens
catgttttggtagca

SEQ ID NO: 858767 - DNA, 15 bp, Homo sapiens
atgttttggtagcat

SEQ ID NO: 858768 - DNA, 15 bp, Homo sapiens
tgttttggtagcata

SEQ ID NO: 858769 - DNA, 15 bp, Homo sapiens
gttttggtagcatag

SEQ ID NO: 858770 - DNA, 15 bp, Homo sapiens
ttttggtagcataga

SEQ ID NO: 858771 - DNA, 15 bp, Homo sapiens
tttggtagcatagaa

SEQ ID NO: 858772 - DNA, 15 bp, Homo sapiens
ttggtagcatagaag

SEQ ID NO: 858773 - DNA, 15 bp, Homo sapiens
tggtagcatagaagg

SEQ ID NO: 858774 - DNA, 15 bp, Homo sapiens
ggtagcatagaaggt

SEQ ID NO: 858775 - DNA, 15 bp, Homo sapiens
gtagcatagaaggta

SEQ ID NO: 858776 - DNA, 15 bp, Homo sapiens
tagcatagaaggtag

SEQ ID NO: 858777 - DNA, 15 bp, Homo sapiens
agcatagaaggtagg

SEQ ID NO: 858778 - DNA, 15 bp, Homo sapiens
gcatagaaggtagga

SEQ ID NO: 858779 - DNA, 15 bp, Homo sapiens
catagaaggtaggag

SEQ ID NO: 858780 - DNA, 15 bp, Homo sapiens
atagaaggtaggaga

SEQ ID NO: 858781 - DNA, 15 bp, Homo sapiens
tagaaggtaggagat

SEQ ID NO: 858782 - DNA, 15 bp, Homo sapiens
agaaggtaggagatg

SEQ ID NO: 858783 - DNA, 15 bp, Homo sapiens
gaaggtaggagatgg

SEQ ID NO: 858784 - DNA, 15 bp, Homo sapiens
aaggtaggagatggt

SEQ ID NO: 858785 - DNA, 15 bp, Homo sapiens
aggtaggagatggtt

SEQ ID NO: 858786 - DNA, 15 bp, Homo sapiens
ggtaggagatggttc

SEQ ID NO: 858787 - DNA, 15 bp, Homo sapiens
gtaggagatggttct

SEQ ID NO: 858788 - DNA, 15 bp, Homo sapiens
taggagatggttctc

SEQ ID NO: 858789 - DNA, 15 bp, Homo sapiens
aggagatggttctcg

SEQ ID NO: 858790 - DNA, 15 bp, Homo sapiens
ggagatggttctcgt

SEQ ID NO: 858791 - DNA, 15 bp, Homo sapiens
gagatggttctcgtt

SEQ ID NO: 858792 - DNA, 15 bp, Homo sapiens
agatggttctcgttt

SEQ ID NO: 858793 - DNA, 15 bp, Homo sapiens
gatggttctcgtttc

SEQ ID NO: 858794 - DNA, 15 bp, Homo sapiens
atggttctcgtttct

SEQ ID NO: 858795 - DNA, 15 bp, Homo sapiens
tggttctcgtttctg

SEQ ID NO: 858796 - DNA, 15 bp, Homo sapiens
ggttctcgtttctgc

SEQ ID NO: 858797 - DNA, 15 bp, Homo sapiens
gttctcgtttctgca

SEQ ID NO: 858798 - DNA, 15 bp, Homo sapiens
ttctcgtttctgcac

SEQ ID NO: 858799 - DNA, 15 bp, Homo sapiens
tctcgtttctgcact

SEQ ID NO: 858800 - DNA, 15 bp, Homo sapiens
ctcgtttctgcactt

SEQ ID NO: 858801 - DNA, 15 bp, Homo sapiens
tcgtttctgcacttc

SEQ ID NO: 858802 - DNA, 15 bp, Homo sapiens
cgtttctgcacttcc

SEQ ID NO: 858803 - DNA, 15 bp, Homo sapiens
gtttctgcacttcct

SEQ ID NO: 858804 - DNA, 15 bp, Homo sapiens
tttctgcacttcctc

SEQ ID NO: 858805 - DNA, 15 bp, Homo sapiens
ttctgcacttcctcc

SEQ ID NO: 858806 - DNA, 15 bp, Homo sapiens
tctgcacttcctccc

SEQ ID NO: 858807 - DNA, 15 bp, Homo sapiens
ctgcacttcctccct

SEQ ID NO: 858808 - DNA, 15 bp, Homo sapiens
tgcacttcctccctt

SEQ ID NO: 858809 - DNA, 15 bp, Homo sapiens
gcacttcctcccttc

SEQ ID NO: 858810 - DNA, 15 bp, Homo sapiens
cacttcctcccttcc

SEQ ID NO: 858811 - DNA, 15 bp, Homo sapiens
acttcctcccttcct

SEQ ID NO: 858812 - DNA, 15 bp, Homo sapiens
cttcctcccttcctc

SEQ ID NO: 858813 - DNA, 15 bp, Homo sapiens
ttcctcccttcctct

SEQ ID NO: 858814 - DNA, 15 bp, Homo sapiens
tcctcccttcctctt

SEQ ID NO: 858815 - DNA, 15 bp, Homo sapiens
cctcccttcctcttt

SEQ ID NO: 858816 - DNA, 15 bp, Homo sapiens
ctcccttcctcttta

SEQ ID NO: 858817 - DNA, 15 bp, Homo sapiens
tcccttcctctttaa

SEQ ID NO: 858818 - DNA, 15 bp, Homo sapiens
cccttcctctttaaa

SEQ ID NO: 858819 - DNA, 15 bp, Homo sapiens
ccttcctctttaaag

SEQ ID NO: 858820 - DNA, 15 bp, Homo sapiens
cttcctctttaaagc

SEQ ID NO: 858821 - DNA, 15 bp, Homo sapiens
ttcctctttaaagca

SEQ ID NO: 858822 - DNA, 15 bp, Homo sapiens
tcctctttaaagcag

SEQ ID NO: 858823 - DNA, 15 bp, Homo sapiens
cctctttaaagcagc

SEQ ID NO: 858824 - DNA, 15 bp, Homo sapiens
ctctttaaagcagcc

SEQ ID NO: 858825 - DNA, 15 bp, Homo sapiens
tctttaaagcagcca

SEQ ID NO: 858826 - DNA, 15 bp, Homo sapiens
ctttaaagcagccaa

SEQ ID NO: 858827 - DNA, 15 bp, Homo sapiens
tttaaagcagccaac

SEQ ID NO: 858828 - DNA, 15 bp, Homo sapiens
ttaaagcagccaaca

SEQ ID NO: 858829 - DNA, 15 bp, Homo sapiens
taaagcagccaacac

SEQ ID NO: 858830 - DNA, 15 bp, Homo sapiens
aaagcagccaacaca

SEQ ID NO: 858831 - DNA, 15 bp, Homo sapiens
aagcagccaacacat

SEQ ID NO: 858832 - DNA, 15 bp, Homo sapiens
agcagccaacacata

SEQ ID NO: 858833 - DNA, 15 bp, Homo sapiens
gcagccaacacatat

SEQ ID NO: 858834 - DNA, 15 bp, Homo sapiens
cagccaacacatata

SEQ ID NO: 858835 - DNA, 15 bp, Homo sapiens
agccaacacatatat

SEQ ID NO: 858836 - DNA, 15 bp, Homo sapiens
gccaacacatatatt

SEQ ID NO: 858837 - DNA, 15 bp, Homo sapiens
ccaacacatatattg

SEQ ID NO: 858838 - DNA, 15 bp, Homo sapiens
caacacatatattgc

SEQ ID NO: 858839 - DNA, 15 bp, Homo sapiens
aacacatatattgct

SEQ ID NO: 858840 - DNA, 15 bp, Homo sapiens
acacatatattgcta

SEQ ID NO: 858841 - DNA, 15 bp, Homo sapiens
cacatatattgctaa

SEQ ID NO: 858842 - DNA, 15 bp, Homo sapiens
acatatattgctaac

SEQ ID NO: 858843 - DNA, 15 bp, Homo sapiens
catatattgctaacc

SEQ ID NO: 858844 - DNA, 15 bp, Homo sapiens
atatattgctaacct

SEQ ID NO: 858845 - DNA, 15 bp, Homo sapiens
tatattgctaacctc

SEQ ID NO: 858846 - DNA, 15 bp, Homo sapiens
atattgctaacctct

SEQ ID NO: 858847 - DNA, 15 bp, Homo sapiens
tattgctaacctctt

SEQ ID NO: 858848 - DNA, 15 bp, Homo sapiens
attgctaacctcttg

SEQ ID NO: 858849 - DNA, 15 bp, Homo sapiens
ttgctaacctcttgc

SEQ ID NO: 858850 - DNA, 15 bp, Homo sapiens
tgctaacctcttgct

SEQ ID NO: 858851 - DNA, 15 bp, Homo sapiens
gctaacctcttgctc

SEQ ID NO: 858852 - DNA, 15 bp, Homo sapiens
ctaacctcttgctcc

SEQ ID NO: 858853 - DNA, 15 bp, Homo sapiens
taacctcttgctccc

SEQ ID NO: 858854 - DNA, 15 bp, Homo sapiens
aacctcttgctccct

SEQ ID NO: 858855 - DNA, 15 bp, Homo sapiens
acctcttgctccctg

SEQ ID NO: 858856 - DNA, 15 bp, Homo sapiens
cctcttgctccctgt

SEQ ID NO: 858857 - DNA, 15 bp, Homo sapiens
ctcttgctccctgtc

SEQ ID NO: 858858 - DNA, 15 bp, Homo sapiens
tcttgctccctgtcc

SEQ ID NO: 858859 - DNA, 15 bp, Homo sapiens
cttgctccctgtcct

SEQ ID NO: 858860 - DNA, 15 bp, Homo sapiens
ttgctccctgtcctc

SEQ ID NO: 858861 - DNA, 15 bp, Homo sapiens
tgctccctgtcctct

SEQ ID NO: 858862 - DNA, 15 bp, Homo sapiens
gctccctgtcctctc

SEQ ID NO: 858863 - DNA, 15 bp, Homo sapiens
ctccctgtcctctca

SEQ ID NO: 858864 - DNA, 15 bp, Homo sapiens
tccctgtcctctcac

SEQ ID NO: 858865 - DNA, 15 bp, Homo sapiens
ccctgtcctctcacc

SEQ ID NO: 858866 - DNA, 15 bp, Homo sapiens
cctgtcctctcacct

SEQ ID NO: 858867 - DNA, 15 bp, Homo sapiens
ctgtcctctcacctt

SEQ ID NO: 858868 - DNA, 15 bp, Homo sapiens
tgtcctctcaccttc

SEQ ID NO: 858869 - DNA, 15 bp, Homo sapiens
gtcctctcaccttcc

SEQ ID NO: 858870 - DNA, 15 bp, Homo sapiens
tcctctcaccttcca

SEQ ID NO: 858871 - DNA, 15 bp, Homo sapiens
cctctcaccttccaa

SEQ ID NO: 858872 - DNA, 15 bp, Homo sapiens
ctctcaccttccaag

SEQ ID NO: 858873 - DNA, 15 bp, Homo sapiens
tctcaccttccaagt

SEQ ID NO: 858874 - DNA, 15 bp, Homo sapiens
ctcaccttccaagtg

SEQ ID NO: 858875 - DNA, 15 bp, Homo sapiens
tcaccttccaagtgc

SEQ ID NO: 858876 - DNA, 15 bp, Homo sapiens
caccttccaagtgct

SEQ ID NO: 858877 - DNA, 15 bp, Homo sapiens
accttccaagtgctc

SEQ ID NO: 858878 - DNA, 15 bp, Homo sapiens
ccttccaagtgctca

SEQ ID NO: 858879 - DNA, 15 bp, Homo sapiens
cttccaagtgctcag

SEQ ID NO: 858880 - DNA, 15 bp, Homo sapiens
ttccaagtgctcaga

SEQ ID NO: 858881 - DNA, 15 bp, Homo sapiens
tccaagtgctcagag

SEQ ID NO: 858882 - DNA, 15 bp, Homo sapiens
ccaagtgctcagagc

SEQ ID NO: 858883 - DNA, 15 bp, Homo sapiens
caagtgctcagagct

SEQ ID NO: 858884 - DNA, 15 bp, Homo sapiens
aagtgctcagagctg

SEQ ID NO: 858885 - DNA, 15 bp, Homo sapiens
agtgctcagagctgg

SEQ ID NO: 858886 - DNA, 15 bp, Homo sapiens
gtgctcagagctggt

SEQ ID NO: 858887 - DNA, 15 bp, Homo sapiens
tgctcagagctggtt

SEQ ID NO: 858888 - DNA, 15 bp, Homo sapiens
gctcagagctggttg

SEQ ID NO: 858889 - DNA, 15 bp, Homo sapiens
ctcagagctggttga

SEQ ID NO: 858890 - DNA, 15 bp, Homo sapiens
tcagagctggttgag

SEQ ID NO: 858891 - DNA, 15 bp, Homo sapiens
cagagctggttgagc

SEQ ID NO: 858892 - DNA, 15 bp, Homo sapiens
agagctggttgagct

SEQ ID NO: 858893 - DNA, 15 bp, Homo sapiens
gagctggttgagcta

SEQ ID NO: 858894 - DNA, 15 bp, Homo sapiens
agctggttgagctac

SEQ ID NO: 858895 - DNA, 15 bp, Homo sapiens
gctggttgagctaca

SEQ ID NO: 858896 - DNA, 15 bp, Homo sapiens
ctggttgagctacac

SEQ ID NO: 858897 - DNA, 15 bp, Homo sapiens
tggttgagctacact

SEQ ID NO: 858898 - DNA, 15 bp, Homo sapiens
ggttgagctacactt

SEQ ID NO: 858899 - DNA, 15 bp, Homo sapiens
gttgagctacacttt

SEQ ID NO: 858900 - DNA, 15 bp, Homo sapiens
ttgagctacactttc

SEQ ID NO: 858901 - DNA, 15 bp, Homo sapiens
tgagctacactttcc

SEQ ID NO: 858902 - DNA, 15 bp, Homo sapiens
gagctacactttcct

SEQ ID NO: 858903 - DNA, 15 bp, Homo sapiens
agctacactttccta

SEQ ID NO: 858904 - DNA, 15 bp, Homo sapiens
gctacactttcctag

SEQ ID NO: 858905 - DNA, 15 bp, Homo sapiens
ctacactttcctagc

SEQ ID NO: 858906 - DNA, 15 bp, Homo sapiens
tacactttcctagca

SEQ ID NO: 858907 - DNA, 15 bp, Homo sapiens
acactttcctagcag

SEQ ID NO: 858908 - DNA, 15 bp, Homo sapiens
cactttcctagcagg

SEQ ID NO: 858909 - DNA, 15 bp, Homo sapiens
actttcctagcaggg

SEQ ID NO: 858910 - DNA, 15 bp, Homo sapiens
ctttcctagcagggg

SEQ ID NO: 858911 - DNA, 15 bp, Homo sapiens
tttcctagcaggggt

SEQ ID NO: 858912 - DNA, 15 bp, Homo sapiens
ttcctagcaggggta

SEQ ID NO: 858913 - DNA, 15 bp, Homo sapiens
tcctagcaggggtag

SEQ ID NO: 858914 - DNA, 15 bp, Homo sapiens
cctagcaggggtagg

SEQ ID NO: 858915 - DNA, 15 bp, Homo sapiens
ctagcaggggtaggt

SEQ ID NO: 858916 - DNA, 15 bp, Homo sapiens
tagcaggggtaggtg

SEQ ID NO: 858917 - DNA, 15 bp, Homo sapiens
agcaggggtaggtgt

SEQ ID NO: 858918 - DNA, 15 bp, Homo sapiens
gcaggggtaggtgta

SEQ ID NO: 858919 - DNA, 15 bp, Homo sapiens
caggggtaggtgtac

SEQ ID NO: 858920 - DNA, 15 bp, Homo sapiens
aggggtaggtgtaca

SEQ ID NO: 858921 - DNA, 15 bp, Homo sapiens
ggggtaggtgtacac

SEQ ID NO: 858922 - DNA, 15 bp, Homo sapiens
gggtaggtgtacact

SEQ ID NO: 858923 - DNA, 15 bp, Homo sapiens
ggtaggtgtacactg

SEQ ID NO: 858924 - DNA, 15 bp, Homo sapiens
gtaggtgtacactga

SEQ ID NO: 858925 - DNA, 15 bp, Homo sapiens
taggtgtacactgac

SEQ ID NO: 858926 - DNA, 15 bp, Homo sapiens
aggtgtacactgacg

SEQ ID NO: 858927 - DNA, 15 bp, Homo sapiens
ggtgtacactgacga

SEQ ID NO: 858928 - DNA, 15 bp, Homo sapiens
gtgtacactgacgac

SEQ ID NO: 858929 - DNA, 15 bp, Homo sapiens
tgtacactgacgaca

SEQ ID NO: 858930 - DNA, 15 bp, Homo sapiens
gtacactgacgacag

SEQ ID NO: 858931 - DNA, 15 bp, Homo sapiens
tacactgacgacagg

SEQ ID NO: 858932 - DNA, 15 bp, Homo sapiens
acactgacgacagga

SEQ ID NO: 858933 - DNA, 15 bp, Homo sapiens
cactgacgacaggag

SEQ ID NO: 858934 - DNA, 15 bp, Homo sapiens
actgacgacaggagg

SEQ ID NO: 858935 - DNA, 15 bp, Homo sapiens
ctgacgacaggagga

SEQ ID NO: 858936 - DNA, 15 bp, Homo sapiens
tgacgacaggaggaa

SEQ ID NO: 858937 - DNA, 15 bp, Homo sapiens
gacgacaggaggaag

SEQ ID NO: 858938 - DNA, 15 bp, Homo sapiens
acgacaggaggaaga

SEQ ID NO: 858939 - DNA, 15 bp, Homo sapiens
cgacaggaggaagaa

SEQ ID NO: 858940 - DNA, 15 bp, Homo sapiens
gacaggaggaagaag

SEQ ID NO: 858941 - DNA, 15 bp, Homo sapiens
acaggaggaagaaga

SEQ ID NO: 858942 - DNA, 15 bp, Homo sapiens
caggaggaagaagat

SEQ ID NO: 858943 - DNA, 15 bp, Homo sapiens
aggaggaagaagatc

SEQ ID NO: 858944 - DNA, 15 bp, Homo sapiens
ggaggaagaagatca

SEQ ID NO: 858945 - DNA, 15 bp, Homo sapiens
gaggaagaagatcac

SEQ ID NO: 858946 - DNA, 15 bp, Homo sapiens
aggaagaagatcact

SEQ ID NO: 858947 - DNA, 15 bp, Homo sapiens
ggaagaagatcactg

SEQ ID NO: 858948 - DNA, 15 bp, Homo sapiens
gaagaagatcactga

SEQ ID NO: 858949 - DNA, 15 bp, Homo sapiens
aagaagatcactgag

SEQ ID NO: 858950 - DNA, 15 bp, Homo sapiens
agaagatcactgagc

SEQ ID NO: 858951 - DNA, 15 bp, Homo sapiens
gaagatcactgagct

SEQ ID NO: 858952 - DNA, 15 bp, Homo sapiens
aagatcactgagctc

SEQ ID NO: 858953 - DNA, 15 bp, Homo sapiens
agatcactgagctct

SEQ ID NO: 858954 - DNA, 15 bp, Homo sapiens
gatcactgagctctt

SEQ ID NO: 858955 - DNA, 15 bp, Homo sapiens
atcactgagctctta

SEQ ID NO: 858956 - DNA, 15 bp, Homo sapiens
tcactgagctcttaa

SEQ ID NO: 858957 - DNA, 15 bp, Homo sapiens
cactgagctcttaag

SEQ ID NO: 858958 - DNA, 15 bp, Homo sapiens
actgagctcttaagc

SEQ ID NO: 858959 - DNA, 15 bp, Homo sapiens
ctgagctcttaagca

SEQ ID NO: 858960 - DNA, 15 bp, Homo sapiens
tgagctcttaagcat

SEQ ID NO: 858961 - DNA, 15 bp, Homo sapiens
gagctcttaagcatt

SEQ ID NO: 858962 - DNA, 15 bp, Homo sapiens
agctcttaagcattt

SEQ ID NO: 858963 - DNA, 15 bp, Homo sapiens
gctcttaagcattta

SEQ ID NO: 858964 - DNA, 15 bp, Homo sapiens
ctcttaagcatttat

SEQ ID NO: 858965 - DNA, 15 bp, Homo sapiens
tcttaagcatttatt

SEQ ID NO: 858966 - DNA, 15 bp, Homo sapiens
cttaagcatttattc

SEQ ID NO: 858967 - DNA, 15 bp, Homo sapiens
ttaagcatttattcc

SEQ ID NO: 858968 - DNA, 15 bp, Homo sapiens
taagcatttattccc

SEQ ID NO: 858969 - DNA, 15 bp, Homo sapiens
aagcatttattccca

SEQ ID NO: 858970 - DNA, 15 bp, Homo sapiens
agcatttattcccat

SEQ ID NO: 858971 - DNA, 15 bp, Homo sapiens
gcatttattcccatg

SEQ ID NO: 858972 - DNA, 15 bp, Homo sapiens
catttattcccatgg

SEQ ID NO: 858973 - DNA, 15 bp, Homo sapiens
atttattcccatgga

SEQ ID NO: 858974 - DNA, 15 bp, Homo sapiens
tttattcccatggaa

SEQ ID NO: 858975 - DNA, 15 bp, Homo sapiens
ttattcccatggaaa

SEQ ID NO: 858976 - DNA, 15 bp, Homo sapiens
tattcccatggaaaa

SEQ ID NO: 858977 - DNA, 15 bp, Homo sapiens
attcccatggaaaat

SEQ ID NO: 858978 - DNA, 15 bp, Homo sapiens
ttcccatggaaaatg

SEQ ID NO: 858979 - DNA, 15 bp, Homo sapiens
tcccatggaaaatga

SEQ ID NO: 858980 - DNA, 15 bp, Homo sapiens
cccatggaaaatgaa

SEQ ID NO: 858981 - DNA, 15 bp, Homo sapiens
ccatggaaaatgaac

SEQ ID NO: 858982 - DNA, 15 bp, Homo sapiens
catggaaaatgaact

SEQ ID NO: 858983 - DNA, 15 bp, Homo sapiens
atggaaaatgaactg

SEQ ID NO: 858984 - DNA, 15 bp, Homo sapiens
tggaaaatgaactgg

SEQ ID NO: 858985 - DNA, 15 bp, Homo sapiens
ggaaaatgaactggc

SEQ ID NO: 858986 - DNA, 15 bp, Homo sapiens
gaaaatgaactggct

SEQ ID NO: 858987 - DNA, 15 bp, Homo sapiens
aaaatgaactggctt

SEQ ID NO: 858988 - DNA, 15 bp, Homo sapiens
aaatgaactggcttg

SEQ ID NO: 858989 - DNA, 15 bp, Homo sapiens
aatgaactggcttga

SEQ ID NO: 858990 - DNA, 15 bp, Homo sapiens
atgaactggcttgac

SEQ ID NO: 858991 - DNA, 15 bp, Homo sapiens
tgaactggcttgact

SEQ ID NO: 858992 - DNA, 15 bp, Homo sapiens
gaactggcttgactc

SEQ ID NO: 858993 - DNA, 15 bp, Homo sapiens
aactggcttgactcc

SEQ ID NO: 858994 - DNA, 15 bp, Homo sapiens
actggcttgactccc

SEQ ID NO: 858995 - DNA, 15 bp, Homo sapiens
ctggcttgactcccc

SEQ ID NO: 858996 - DNA, 15 bp, Homo sapiens
tggcttgactcccct

SEQ ID NO: 858997 - DNA, 15 bp, Homo sapiens
ggcttgactcccctg

SEQ ID NO: 858998 - DNA, 15 bp, Homo sapiens
gcttgactcccctgt

SEQ ID NO: 858999 - DNA, 15 bp, Homo sapiens
cttgactcccctgtg

SEQ ID NO: 859000 - DNA, 15 bp, Homo sapiens
ttgactcccctgtgc

SEQ ID NO: 859001 - DNA, 15 bp, Homo sapiens
tgactcccctgtgct

SEQ ID NO: 859002 - DNA, 15 bp, Homo sapiens
gactcccctgtgctg

SEQ ID NO: 859003 - DNA, 15 bp, Homo sapiens
actcccctgtgctgg

SEQ ID NO: 859004 - DNA, 15 bp, Homo sapiens
ctcccctgtgctggt

SEQ ID NO: 859005 - DNA, 15 bp, Homo sapiens
tcccctgtgctggtg

SEQ ID NO: 859006 - DNA, 15 bp, Homo sapiens
cccctgtgctggtgt

SEQ ID NO: 859007 - DNA, 15 bp, Homo sapiens
ccctgtgctggtgtt

SEQ ID NO: 859008 - DNA, 15 bp, Homo sapiens
cctgtgctggtgttg

SEQ ID NO: 859009 - DNA, 15 bp, Homo sapiens
ctgtgctggtgttga

SEQ ID NO: 859010 - DNA, 15 bp, Homo sapiens
tgtgctggtgttgag

SEQ ID NO: 859011 - DNA, 15 bp, Homo sapiens
gtgctggtgttgagg

SEQ ID NO: 859012 - DNA, 15 bp, Homo sapiens
tggtgttgaggctgg

SEQ ID NO: 859013 - DNA, 15 bp, Homo sapiens
ggtgttgaggctggt

SEQ ID NO: 859014 - DNA, 15 bp, Homo sapiens
gtgttgaggctggtc

SEQ ID NO: 859015 - DNA, 15 bp, Homo sapiens
tgttgaggctggtcc

SEQ ID NO: 859016 - DNA, 15 bp, Homo sapiens
gttgaggctggtccc

SEQ ID NO: 859017 - DNA, 15 bp, Homo sapiens
ttgaggctggtccca

SEQ ID NO: 859018 - DNA, 15 bp, Homo sapiens
tgaggctggtcccag

SEQ ID NO: 859019 - DNA, 15 bp, Homo sapiens
gaggctggtcccagc

SEQ ID NO: 859020 - DNA, 15 bp, Homo sapiens
aggctggtcccagca

SEQ ID NO: 859021 - DNA, 15 bp, Homo sapiens
ggctggtcccagcag

SEQ ID NO: 859022 - DNA, 15 bp, Homo sapiens
gctggtcccagcaga

SEQ ID NO: 859023 - DNA, 15 bp, Homo sapiens
ctggtcccagcagag

SEQ ID NO: 859024 - DNA, 15 bp, Homo sapiens
tggtcccagcagagt

SEQ ID NO: 859025 - DNA, 15 bp, Homo sapiens
ggtcccagcagagtg

SEQ ID NO: 859026 - DNA, 15 bp, Homo sapiens
gtcccagcagagtgc

SEQ ID NO: 859027 - DNA, 15 bp, Homo sapiens
tcccagcagagtgcg

SEQ ID NO: 859028 - DNA, 15 bp, Homo sapiens
cccagcagagtgcgg

SEQ ID NO: 859029 - DNA, 15 bp, Homo sapiens
ccagcagagtgcggc

SEQ ID NO: 859030 - DNA, 15 bp, Homo sapiens
cagcagagtgcggct

SEQ ID NO: 859031 - DNA, 15 bp, Homo sapiens
agcagagtgcggctg

SEQ ID NO: 859032 - DNA, 15 bp, Homo sapiens
gcagagtgcggctgt

SEQ ID NO: 859033 - DNA, 15 bp, Homo sapiens
cagagtgcggctgtg

SEQ ID NO: 859034 - DNA, 15 bp, Homo sapiens
agagtgcggctgtgt

SEQ ID NO: 859035 - DNA, 15 bp, Homo sapiens
gagtgcggctgtgta

SEQ ID NO: 859036 - DNA, 15 bp, Homo sapiens
agtgcggctgtgtag

SEQ ID NO: 859037 - DNA, 15 bp, Homo sapiens
gtgcggctgtgtagc

SEQ ID NO: 859038 - DNA, 15 bp, Homo sapiens
tgcggctgtgtagcc

SEQ ID NO: 859039 - DNA, 15 bp, Homo sapiens
gcggctgtgtagccg

SEQ ID NO: 859040 - DNA, 15 bp, Homo sapiens
cggctgtgtagccgg

SEQ ID NO: 859041 - DNA, 15 bp, Homo sapiens
ggctgtgtagccggg

SEQ ID NO: 859042 - DNA, 15 bp, Homo sapiens
gctgtgtagccggga

SEQ ID NO: 859043 - DNA, 15 bp, Homo sapiens
ctgtgtagccgggat

SEQ ID NO: 859044 - DNA, 15 bp, Homo sapiens
tgtgtagccgggatc

SEQ ID NO: 859045 - DNA, 15 bp, Homo sapiens
gtgtagccgggatcc

SEQ ID NO: 859046 - DNA, 15 bp, Homo sapiens
tgtagccgggatcca

SEQ ID NO: 859047 - DNA, 15 bp, Homo sapiens
gtagccgggatccat

SEQ ID NO: 859048 - DNA, 15 bp, Homo sapiens
tagccgggatccatg

SEQ ID NO: 859049 - DNA, 15 bp, Homo sapiens
agccgggatccatga

SEQ ID NO: 859050 - DNA, 15 bp, Homo sapiens
gccgggatccatgag

SEQ ID NO: 859051 - DNA, 15 bp, Homo sapiens
ccgggatccatgagg

SEQ ID NO: 859052 - DNA, 15 bp, Homo sapiens
cgggatccatgaggc

SEQ ID NO: 859053 - DNA, 15 bp, Homo sapiens
gggatccatgaggcc

SEQ ID NO: 859054 - DNA, 15 bp, Homo sapiens
ggatccatgaggcct

SEQ ID NO: 859055 - DNA, 15 bp, Homo sapiens
gatccatgaggcctc

SEQ ID NO: 859056 - DNA, 15 bp, Homo sapiens
atccatgaggcctct

SEQ ID NO: 859057 - DNA, 15 bp, Homo sapiens
tccatgaggcctcta

SEQ ID NO: 859058 - DNA, 15 bp, Homo sapiens
ccatgaggcctctag

SEQ ID NO: 859059 - DNA, 15 bp, Homo sapiens
catgaggcctctagg

SEQ ID NO: 859060 - DNA, 15 bp, Homo sapiens
atgaggcctctaggg

SEQ ID NO: 859061 - DNA, 15 bp, Homo sapiens
tgaggcctctagggc

SEQ ID NO: 859062 - DNA, 15 bp, Homo sapiens
gaggcctctagggct

SEQ ID NO: 859063 - DNA, 15 bp, Homo sapiens
aggcctctagggctc

SEQ ID NO: 859064 - DNA, 15 bp, Homo sapiens
ggcctctagggctca

SEQ ID NO: 859065 - DNA, 15 bp, Homo sapiens
gcctctagggctcag

SEQ ID NO: 859066 - DNA, 15 bp, Homo sapiens
cctctagggctcagg

SEQ ID NO: 859067 - DNA, 15 bp, Homo sapiens
ctctagggctcaggg

SEQ ID NO: 859068 - DNA, 15 bp, Homo sapiens
tctagggctcaggga

SEQ ID NO: 859069 - DNA, 15 bp, Homo sapiens
ctagggctcagggaa

SEQ ID NO: 859070 - DNA, 15 bp, Homo sapiens
tagggctcagggaac

SEQ ID NO: 859071 - DNA, 15 bp, Homo sapiens
agggctcagggaacc

SEQ ID NO: 859072 - DNA, 15 bp, Homo sapiens
gggctcagggaaccg

SEQ ID NO: 859073 - DNA, 15 bp, Homo sapiens
ggctcagggaaccgg

SEQ ID NO: 859074 - DNA, 15 bp, Homo sapiens
gctcagggaaccggg

SEQ ID NO: 859075 - DNA, 15 bp, Homo sapiens
ctcagggaaccggga

SEQ ID NO: 859076 - DNA, 15 bp, Homo sapiens
tcagggaaccgggac

SEQ ID NO: 859077 - DNA, 15 bp, Homo sapiens
cagggaaccgggact

SEQ ID NO: 859078 - DNA, 15 bp, Homo sapiens
agggaaccgggactt

SEQ ID NO: 859079 - DNA, 15 bp, Homo sapiens
gggaaccgggacttc

SEQ ID NO: 859080 - DNA, 15 bp, Homo sapiens
ggaaccgggacttca

SEQ ID NO: 859081 - DNA, 15 bp, Homo sapiens
gaaccgggacttcac

SEQ ID NO: 859082 - DNA, 15 bp, Homo sapiens
aaccgggacttcact

SEQ ID NO: 859083 - DNA, 15 bp, Homo sapiens
accgggacttcactg

SEQ ID NO: 859084 - DNA, 15 bp, Homo sapiens
ccgggacttcactgt

SEQ ID NO: 859085 - DNA, 15 bp, Homo sapiens
cgggacttcactgtg

SEQ ID NO: 859086 - DNA, 15 bp, Homo sapiens
gggacttcactgtgt

SEQ ID NO: 859087 - DNA, 15 bp, Homo sapiens
ggacttcactgtgtg

SEQ ID NO: 859088 - DNA, 15 bp, Homo sapiens
gacttcactgtgtgc

SEQ ID NO: 859089 - DNA, 15 bp, Homo sapiens
acttcactgtgtgcc

SEQ ID NO: 859090 - DNA, 15 bp, Homo sapiens
cttcactgtgtgcca

SEQ ID NO: 859091 - DNA, 15 bp, Homo sapiens
ttcactgtgtgccat

SEQ ID NO: 859092 - DNA, 15 bp, Homo sapiens
tcactgtgtgccatg

SEQ ID NO: 859093 - DNA, 15 bp, Homo sapiens
cactgtgtgccatgc

SEQ ID NO: 859094 - DNA, 15 bp, Homo sapiens
actgtgtgccatgcc

SEQ ID NO: 859095 - DNA, 15 bp, Homo sapiens
ctgtgtgccatgcca

SEQ ID NO: 859096 - DNA, 15 bp, Homo sapiens
tgtgtgccatgccag

SEQ ID NO: 859097 - DNA, 15 bp, Homo sapiens
gtgtgccatgccagg

SEQ ID NO: 859098 - DNA, 15 bp, Homo sapiens
tgtgccatgccaggt

SEQ ID NO: 859099 - DNA, 15 bp, Homo sapiens
gtgccatgccaggtg

SEQ ID NO: 859100 - DNA, 15 bp, Homo sapiens
tgccatgccaggtgc

SEQ ID NO: 859101 - DNA, 15 bp, Homo sapiens
gccatgccaggtgct

SEQ ID NO: 859102 - DNA, 15 bp, Homo sapiens
ccatgccaggtgctt

SEQ ID NO: 859103 - DNA, 15 bp, Homo sapiens
catgccaggtgctta

SEQ ID NO: 859104 - DNA, 15 bp, Homo sapiens
atgccaggtgcttat

SEQ ID NO: 859105 - DNA, 15 bp, Homo sapiens
tgccaggtgcttatg

SEQ ID NO: 859106 - DNA, 15 bp, Homo sapiens
gccaggtgcttatgt

SEQ ID NO: 859107 - DNA, 15 bp, Homo sapiens
ccaggtgcttatgtt

SEQ ID NO: 859108 - DNA, 15 bp, Homo sapiens
caggtgcttatgttt

SEQ ID NO: 859109 - DNA, 15 bp, Homo sapiens
aggtgcttatgtttg

SEQ ID NO: 859110 - DNA, 15 bp, Homo sapiens
ggtgcttatgtttgg

SEQ ID NO: 859111 - DNA, 15 bp, Homo sapiens
gtgcttatgtttggg

SEQ ID NO: 859112 - DNA, 15 bp, Homo sapiens
tgcttatgtttgggc

SEQ ID NO: 859113 - DNA, 15 bp, Homo sapiens
gcttatgtttgggcc

SEQ ID NO: 859114 - DNA, 15 bp, Homo sapiens
cttatgtttgggccc

SEQ ID NO: 859115 - DNA, 15 bp, Homo sapiens
ttatgtttgggccca

SEQ ID NO: 859116 - DNA, 15 bp, Homo sapiens
tatgtttgggcccaa

SEQ ID NO: 859117 - DNA, 15 bp, Homo sapiens
atgtttgggcccaaa

SEQ ID NO: 859118 - DNA, 15 bp, Homo sapiens
tgtttgggcccaaag

SEQ ID NO: 859119 - DNA, 15 bp, Homo sapiens
gtttgggcccaaagt

SEQ ID NO: 859120 - DNA, 15 bp, Homo sapiens
tttgggcccaaagtt

SEQ ID NO: 859121 - DNA, 15 bp, Homo sapiens
ttgggcccaaagttc

SEQ ID NO: 859122 - DNA, 15 bp, Homo sapiens
tgggcccaaagttca

SEQ ID NO: 859123 - DNA, 15 bp, Homo sapiens
gggcccaaagttcaa

SEQ ID NO: 859124 - DNA, 15 bp, Homo sapiens
ggcccaaagttcaag

SEQ ID NO: 859125 - DNA, 15 bp, Homo sapiens
gcccaaagttcaagt

SEQ ID NO: 859126 - DNA, 15 bp, Homo sapiens
cccaaagttcaagtg

SEQ ID NO: 859127 - DNA, 15 bp, Homo sapiens
ccaaagttcaagtgc

SEQ ID NO: 859128 - DNA, 15 bp, Homo sapiens
caaagttcaagtgca

SEQ ID NO: 859129 - DNA, 15 bp, Homo sapiens
aaagttcaagtgcaa

SEQ ID NO: 859130 - DNA, 15 bp, Homo sapiens
aagttcaagtgcaaa

SEQ ID NO: 859131 - DNA, 15 bp, Homo sapiens
agttcaagtgcaaag

SEQ ID NO: 859132 - DNA, 15 bp, Homo sapiens
gttcaagtgcaaagc

SEQ ID NO: 859133 - DNA, 15 bp, Homo sapiens
ttcaagtgcaaagca

SEQ ID NO: 859134 - DNA, 15 bp, Homo sapiens
tcaagtgcaaagcat

SEQ ID NO: 859135 - DNA, 15 bp, Homo sapiens
caagtgcaaagcatg

SEQ ID NO: 859136 - DNA, 15 bp, Homo sapiens
aagtgcaaagcatga

SEQ ID NO: 859137 - DNA, 15 bp, Homo sapiens
agtgcaaagcatgat

SEQ ID NO: 859138 - DNA, 15 bp, Homo sapiens
gtgcaaagcatgatt

SEQ ID NO: 859139 - DNA, 15 bp, Homo sapiens
tgcaaagcatgattt

SEQ ID NO: 859140 - DNA, 15 bp, Homo sapiens
gcaaagcatgatttg

SEQ ID NO: 859141 - DNA, 15 bp, Homo sapiens
caaagcatgatttgt

SEQ ID NO: 859142 - DNA, 15 bp, Homo sapiens
aaagcatgatttgtg

SEQ ID NO: 859143 - DNA, 15 bp, Homo sapiens
aagcatgatttgtgc

SEQ ID NO: 859144 - DNA, 15 bp, Homo sapiens
agcatgatttgtgca

SEQ ID NO: 859145 - DNA, 15 bp, Homo sapiens
gcatgatttgtgcat

SEQ ID NO: 859146 - DNA, 15 bp, Homo sapiens
catgatttgtgcatc

SEQ ID NO: 859147 - DNA, 15 bp, Homo sapiens
atgatttgtgcatcg

SEQ ID NO: 859148 - DNA, 15 bp, Homo sapiens
tgatttgtgcatcga

SEQ ID NO: 859149 - DNA, 15 bp, Homo sapiens
gatttgtgcatcgag

SEQ ID NO: 859150 - DNA, 15 bp, Homo sapiens
atttgtgcatcgagc

SEQ ID NO: 859151 - DNA, 15 bp, Homo sapiens
tttgtgcatcgagcc

SEQ ID NO: 859152 - DNA, 15 bp, Homo sapiens
ttgtgcatcgagcca

SEQ ID NO: 859153 - DNA, 15 bp, Homo sapiens
tgtgcatcgagccat

SEQ ID NO: 859154 - DNA, 15 bp, Homo sapiens
gtgcatcgagccata

SEQ ID NO: 859155 - DNA, 15 bp, Homo sapiens
tgcatcgagccatat

SEQ ID NO: 859156 - DNA, 15 bp, Homo sapiens
gcatcgagccatatt

SEQ ID NO: 859157 - DNA, 15 bp, Homo sapiens
catcgagccatatta

SEQ ID NO: 859158 - DNA, 15 bp, Homo sapiens
atcgagccatattag

SEQ ID NO: 859159 - DNA, 15 bp, Homo sapiens
tcgagccatattaga

SEQ ID NO: 859160 - DNA, 15 bp, Homo sapiens
cgagccatattagag

SEQ ID NO: 859161 - DNA, 15 bp, Homo sapiens
gagccatattagagg

SEQ ID NO: 859162 - DNA, 15 bp, Homo sapiens
agccatattagaggc

SEQ ID NO: 859163 - DNA, 15 bp, Homo sapiens
gccatattagaggca

SEQ ID NO: 859164 - DNA, 15 bp, Homo sapiens
ccatattagaggcat

SEQ ID NO: 859165 - DNA, 15 bp, Homo sapiens
catattagaggcatt

SEQ ID NO: 859166 - DNA, 15 bp, Homo sapiens
atattagaggcattt

SEQ ID NO: 859167 - DNA, 15 bp, Homo sapiens
tattagaggcatttg

SEQ ID NO: 859168 - DNA, 15 bp, Homo sapiens
attagaggcatttgg

SEQ ID NO: 859169 - DNA, 15 bp, Homo sapiens
ttagaggcatttgga

SEQ ID NO: 859170 - DNA, 15 bp, Homo sapiens
tagaggcatttggaa

SEQ ID NO: 859171 - DNA, 15 bp, Homo sapiens
agaggcatttggaaa

SEQ ID NO: 859172 - DNA, 15 bp, Homo sapiens
gaggcatttggaaaa

SEQ ID NO: 859173 - DNA, 15 bp, Homo sapiens
aggcatttggaaaac

SEQ ID NO: 859174 - DNA, 15 bp, Homo sapiens
ggcatttggaaaact

SEQ ID NO: 859175 - DNA, 15 bp, Homo sapiens
gcatttggaaaactt

SEQ ID NO: 859176 - DNA, 15 bp, Homo sapiens
catttggaaaacttt

SEQ ID NO: 859177 - DNA, 15 bp, Homo sapiens
atttggaaaactttg

SEQ ID NO: 859178 - DNA, 15 bp, Homo sapiens
tttggaaaactttga

SEQ ID NO: 859179 - DNA, 15 bp, Homo sapiens
ttggaaaactttgat

SEQ ID NO: 859180 - DNA, 15 bp, Homo sapiens
tggaaaactttgatc

SEQ ID NO: 859181 - DNA, 15 bp, Homo sapiens
ggaaaactttgatct

SEQ ID NO: 859182 - DNA, 15 bp, Homo sapiens
gaaaactttgatcta

SEQ ID NO: 859183 - DNA, 15 bp, Homo sapiens
aaaactttgatctag

SEQ ID NO: 859184 - DNA, 15 bp, Homo sapiens
aaactttgatctagg

SEQ ID NO: 859185 - DNA, 15 bp, Homo sapiens
aactttgatctagga

SEQ ID NO: 859186 - DNA, 15 bp, Homo sapiens
actttgatctaggac

SEQ ID NO: 859187 - DNA, 15 bp, Homo sapiens
ctttgatctaggacc

SEQ ID NO: 859188 - DNA, 15 bp, Homo sapiens
tttgatctaggacca

SEQ ID NO: 859189 - DNA, 15 bp, Homo sapiens
ttgatctaggaccag

SEQ ID NO: 859190 - DNA, 15 bp, Homo sapiens
tgatctaggaccaga

SEQ ID NO: 859191 - DNA, 15 bp, Homo sapiens
gatctaggaccagag

SEQ ID NO: 859192 - DNA, 15 bp, Homo sapiens
atctaggaccagaga

SEQ ID NO: 859193 - DNA, 15 bp, Homo sapiens
tctaggaccagagag

SEQ ID NO: 859194 - DNA, 15 bp, Homo sapiens
ctaggaccagagagt

SEQ ID NO: 859195 - DNA, 15 bp, Homo sapiens
taggaccagagagtc

SEQ ID NO: 859196 - DNA, 15 bp, Homo sapiens
aggaccagagagtca

SEQ ID NO: 859197 - DNA, 15 bp, Homo sapiens
ggaccagagagtcat

SEQ ID NO: 859198 - DNA, 15 bp, Homo sapiens
gaccagagagtcatt

SEQ ID NO: 859199 - DNA, 15 bp, Homo sapiens
accagagagtcattc

SEQ ID NO: 859200 - DNA, 15 bp, Homo sapiens
ccagagagtcattct

SEQ ID NO: 859201 - DNA, 15 bp, Homo sapiens
cagagagtcattctc

SEQ ID NO: 859202 - DNA, 15 bp, Homo sapiens
agagagtcattctct

SEQ ID NO: 859203 - DNA, 15 bp, Homo sapiens
gagagtcattctctc

SEQ ID NO: 859204 - DNA, 15 bp, Homo sapiens
agagtcattctctct

SEQ ID NO: 859205 - DNA, 15 bp, Homo sapiens
gagtcattctctctg

SEQ ID NO: 859206 - DNA, 15 bp, Homo sapiens
agtcattctctctga

SEQ ID NO: 859207 - DNA, 15 bp, Homo sapiens
gtcattctctctgat

SEQ ID NO: 859208 - DNA, 15 bp, Homo sapiens
tcattctctctgatt

SEQ ID NO: 859209 - DNA, 15 bp, Homo sapiens
cattctctctgattc

SEQ ID NO: 859210 - DNA, 15 bp, Homo sapiens
attctctctgattca

SEQ ID NO: 859211 - DNA, 15 bp, Homo sapiens
ttctctctgattcac

SEQ ID NO: 859212 - DNA, 15 bp, Homo sapiens
tctctctgattcacg

SEQ ID NO: 859213 - DNA, 15 bp, Homo sapiens
ctctctgattcacga

SEQ ID NO: 859214 - DNA, 15 bp, Homo sapiens
tctctgattcacgat

SEQ ID NO: 859215 - DNA, 15 bp, Homo sapiens
ctctgattcacgatt

SEQ ID NO: 859216 - DNA, 15 bp, Homo sapiens
tctgattcacgattt

SEQ ID NO: 859217 - DNA, 15 bp, Homo sapiens
ctgattcacgatttc

SEQ ID NO: 859218 - DNA, 15 bp, Homo sapiens
tgattcacgatttcc

SEQ ID NO: 859219 - DNA, 15 bp, Homo sapiens
gattcacgatttcct

SEQ ID NO: 859220 - DNA, 15 bp, Homo sapiens
attcacgatttcctg

SEQ ID NO: 859221 - DNA, 15 bp, Homo sapiens
ttcacgatttcctgc

SEQ ID NO: 859222 - DNA, 15 bp, Homo sapiens
tcacgatttcctgct

SEQ ID NO: 859223 - DNA, 15 bp, Homo sapiens
cacgatttcctgctg

SEQ ID NO: 859224 - DNA, 15 bp, Homo sapiens
acgatttcctgctgc

SEQ ID NO: 859225 - DNA, 15 bp, Homo sapiens
cgatttcctgctgct

SEQ ID NO: 859226 - DNA, 15 bp, Homo sapiens
gatttcctgctgctc

SEQ ID NO: 859227 - DNA, 15 bp, Homo sapiens
atttcctgctgctcc

SEQ ID NO: 859228 - DNA, 15 bp, Homo sapiens
tttcctgctgctcca

SEQ ID NO: 859229 - DNA, 15 bp, Homo sapiens
ttcctgctgctccag

SEQ ID NO: 859230 - DNA, 15 bp, Homo sapiens
tcctgctgctccaga

SEQ ID NO: 859231 - DNA, 15 bp, Homo sapiens
cctgctgctccagag

SEQ ID NO: 859232 - DNA, 15 bp, Homo sapiens
ctgctgctccagagc

SEQ ID NO: 859233 - DNA, 15 bp, Homo sapiens
tgctgctccagagca

SEQ ID NO: 859234 - DNA, 15 bp, Homo sapiens
gctgctccagagcag

SEQ ID NO: 859235 - DNA, 15 bp, Homo sapiens
ctgctccagagcagt

SEQ ID NO: 859236 - DNA, 15 bp, Homo sapiens
tgctccagagcagtg

SEQ ID NO: 859237 - DNA, 15 bp, Homo sapiens
gctccagagcagtgc

SEQ ID NO: 859238 - DNA, 15 bp, Homo sapiens
ctccagagcagtgcc

SEQ ID NO: 859239 - DNA, 15 bp, Homo sapiens
tccagagcagtgcca

SEQ ID NO: 859240 - DNA, 15 bp, Homo sapiens
ccagagcagtgccaa

SEQ ID NO: 859241 - DNA, 15 bp, Homo sapiens
cagagcagtgccaag

SEQ ID NO: 859242 - DNA, 15 bp, Homo sapiens
agagcagtgccaagg

SEQ ID NO: 859243 - DNA, 15 bp, Homo sapiens
gagcagtgccaaggg

SEQ ID NO: 859244 - DNA, 15 bp, Homo sapiens
agcagtgccaaggga

SEQ ID NO: 859245 - DNA, 15 bp, Homo sapiens
gcagtgccaagggac

SEQ ID NO: 859246 - DNA, 15 bp, Homo sapiens
cagtgccaagggaca

SEQ ID NO: 859247 - DNA, 15 bp, Homo sapiens
agtgccaagggacag

SEQ ID NO: 859248 - DNA, 15 bp, Homo sapiens
gtgccaagggacagg

SEQ ID NO: 859249 - DNA, 15 bp, Homo sapiens
tgccaagggacagga

SEQ ID NO: 859250 - DNA, 15 bp, Homo sapiens
gccaagggacaggat

SEQ ID NO: 859251 - DNA, 15 bp, Homo sapiens
ccaagggacaggatt

SEQ ID NO: 859252 - DNA, 15 bp, Homo sapiens
caagggacaggattc

SEQ ID NO: 859253 - DNA, 15 bp, Homo sapiens
aagggacaggattca

SEQ ID NO: 859254 - DNA, 15 bp, Homo sapiens
agggacaggattcac

SEQ ID NO: 859255 - DNA, 15 bp, Homo sapiens
gggacaggattcact

SEQ ID NO: 859256 - DNA, 15 bp, Homo sapiens
ggacaggattcactt

SEQ ID NO: 859257 - DNA, 15 bp, Homo sapiens
gacaggattcacttc

SEQ ID NO: 859258 - DNA, 15 bp, Homo sapiens
acaggattcacttca

SEQ ID NO: 859259 - DNA, 15 bp, Homo sapiens
caggattcacttcaa

SEQ ID NO: 859260 - DNA, 15 bp, Homo sapiens
aggattcacttcaaa

SEQ ID NO: 859261 - DNA, 15 bp, Homo sapiens
ggattcacttcaaag

SEQ ID NO: 859262 - DNA, 15 bp, Homo sapiens
gattcacttcaaagt

SEQ ID NO: 859263 - DNA, 15 bp, Homo sapiens
attcacttcaaagta

SEQ ID NO: 859264 - DNA, 15 bp, Homo sapiens
ttcacttcaaagtaa

SEQ ID NO: 859265 - DNA, 15 bp, Homo sapiens
tcacttcaaagtaat

SEQ ID NO: 859266 - DNA, 15 bp, Homo sapiens
cacttcaaagtaata

SEQ ID NO: 859267 - DNA, 15 bp, Homo sapiens
acttcaaagtaatac

SEQ ID NO: 859268 - DNA, 15 bp, Homo sapiens
cttcaaagtaatacc

SEQ ID NO: 859269 - DNA, 15 bp, Homo sapiens
ttcaaagtaatacct

SEQ ID NO: 859270 - DNA, 15 bp, Homo sapiens
tcaaagtaataccta

SEQ ID NO: 859271 - DNA, 15 bp, Homo sapiens
caaagtaatacctaa

SEQ ID NO: 859272 - DNA, 15 bp, Homo sapiens
aaagtaatacctaat

SEQ ID NO: 859273 - DNA, 15 bp, Homo sapiens
aagtaatacctaatg

SEQ ID NO: 859274 - DNA, 15 bp, Homo sapiens
agtaatacctaatgg

SEQ ID NO: 859275 - DNA, 15 bp, Homo sapiens
gtaatacctaatgga

SEQ ID NO: 859276 - DNA, 15 bp, Homo sapiens
taatacctaatggag

SEQ ID NO: 859277 - DNA, 15 bp, Homo sapiens
aatacctaatggagg

SEQ ID NO: 859278 - DNA, 15 bp, Homo sapiens
atacctaatggaggt

SEQ ID NO: 859279 - DNA, 15 bp, Homo sapiens
tacctaatggaggtt

SEQ ID NO: 859280 - DNA, 15 bp, Homo sapiens
acctaatggaggttg

SEQ ID NO: 859281 - DNA, 15 bp, Homo sapiens
cctaatggaggttgc

SEQ ID NO: 859282 - DNA, 15 bp, Homo sapiens
ctaatggaggttgca

SEQ ID NO: 859283 - DNA, 15 bp, Homo sapiens
taatggaggttgcat

SEQ ID NO: 859284 - DNA, 15 bp, Homo sapiens
aatggaggttgcatt

SEQ ID NO: 859285 - DNA, 15 bp, Homo sapiens
atggaggttgcattg

SEQ ID NO: 859286 - DNA, 15 bp, Homo sapiens
tggaggttgcattga

SEQ ID NO: 859287 - DNA, 15 bp, Homo sapiens
gaggttgcattgaga

SEQ ID NO: 859288 - DNA, 15 bp, Homo sapiens
aggttgcattgagag

SEQ ID NO: 859289 - DNA, 15 bp, Homo sapiens
ggttgcattgagagg

SEQ ID NO: 859290 - DNA, 15 bp, Homo sapiens
gttgcattgagaggg

SEQ ID NO: 859291 - DNA, 15 bp, Homo sapiens
ttgcattgagaggga

SEQ ID NO: 859292 - DNA, 15 bp, Homo sapiens
tgcattgagagggag

SEQ ID NO: 859293 - DNA, 15 bp, Homo sapiens
gcattgagagggagt

SEQ ID NO: 859294 - DNA, 15 bp, Homo sapiens
cattgagagggagtg

SEQ ID NO: 859295 - DNA, 15 bp, Homo sapiens
attgagagggagtgt

SEQ ID NO: 859296 - DNA, 15 bp, Homo sapiens
ttgagagggagtgtg

SEQ ID NO: 859297 - DNA, 15 bp, Homo sapiens
tgagagggagtgtgg

SEQ ID NO: 859298 - DNA, 15 bp, Homo sapiens
gagagggagtgtgga

SEQ ID NO: 859299 - DNA, 15 bp, Homo sapiens
agagggagtgtggac

SEQ ID NO: 859300 - DNA, 15 bp, Homo sapiens
gagggagtgtggact

SEQ ID NO: 859301 - DNA, 15 bp, Homo sapiens
agggagtgtggactg

SEQ ID NO: 859302 - DNA, 15 bp, Homo sapiens
gggagtgtggactgc

SEQ ID NO: 859303 - DNA, 15 bp, Homo sapiens
ggagtgtggactgcc

SEQ ID NO: 859304 - DNA, 15 bp, Homo sapiens
gagtgtggactgcca

SEQ ID NO: 859305 - DNA, 15 bp, Homo sapiens
agtgtggactgccat

SEQ ID NO: 859306 - DNA, 15 bp, Homo sapiens
gtgtggactgccata

SEQ ID NO: 859307 - DNA, 15 bp, Homo sapiens
tgtggactgccatat

SEQ ID NO: 859308 - DNA, 15 bp, Homo sapiens
gtggactgccatatg

SEQ ID NO: 859309 - DNA, 15 bp, Homo sapiens
tggactgccatatgg

SEQ ID NO: 859310 - DNA, 15 bp, Homo sapiens
ggactgccatatggg

SEQ ID NO: 859311 - DNA, 15 bp, Homo sapiens
gactgccatatgggc

SEQ ID NO: 859312 - DNA, 15 bp, Homo sapiens
actgccatatgggcc

SEQ ID NO: 859313 - DNA, 15 bp, Homo sapiens
ctgccatatgggcct

SEQ ID NO: 859314 - DNA, 15 bp, Homo sapiens
tgccatatgggccta

SEQ ID NO: 859315 - DNA, 15 bp, Homo sapiens
gccatatgggcctaa

SEQ ID NO: 859316 - DNA, 15 bp, Homo sapiens
ccatatgggcctaaa

SEQ ID NO: 859317 - DNA, 15 bp, Homo sapiens
catatgggcctaaaa

SEQ ID NO: 859318 - DNA, 15 bp, Homo sapiens
atatgggcctaaaat

SEQ ID NO: 859319 - DNA, 15 bp, Homo sapiens
tatgggcctaaaatc

SEQ ID NO: 859320 - DNA, 15 bp, Homo sapiens
atgggcctaaaatct

SEQ ID NO: 859321 - DNA, 15 bp, Homo sapiens
tgggcctaaaatctt

SEQ ID NO: 859322 - DNA, 15 bp, Homo sapiens
gggcctaaaatcttg

SEQ ID NO: 859323 - DNA, 15 bp, Homo sapiens
ggcctaaaatcttgg

SEQ ID NO: 859324 - DNA, 15 bp, Homo sapiens
gcctaaaatcttgga

SEQ ID NO: 859325 - DNA, 15 bp, Homo sapiens
cctaaaatcttggaa

SEQ ID NO: 859326 - DNA, 15 bp, Homo sapiens
ctaaaatcttggaaa

SEQ ID NO: 859327 - DNA, 15 bp, Homo sapiens
taaaatcttggaaag

SEQ ID NO: 859328 - DNA, 15 bp, Homo sapiens
aaaatcttggaaaga

SEQ ID NO: 859329 - DNA, 15 bp, Homo sapiens
aaatcttggaaagat

SEQ ID NO: 859330 - DNA, 15 bp, Homo sapiens
aatcttggaaagatt

SEQ ID NO: 859331 - DNA, 15 bp, Homo sapiens
atcttggaaagattt

SEQ ID NO: 859332 - DNA, 15 bp, Homo sapiens
tcttggaaagatttc

SEQ ID NO: 859333 - DNA, 15 bp, Homo sapiens
cttggaaagatttct

SEQ ID NO: 859334 - DNA, 15 bp, Homo sapiens
ttggaaagatttctg

SEQ ID NO: 859335 - DNA, 15 bp, Homo sapiens
tggaaagatttctgt

SEQ ID NO: 859336 - DNA, 15 bp, Homo sapiens
ggaaagatttctgtt

SEQ ID NO: 859337 - DNA, 15 bp, Homo sapiens
gaaagatttctgtta

SEQ ID NO: 859338 - DNA, 15 bp, Homo sapiens
aaagatttctgttac

SEQ ID NO: 859339 - DNA, 15 bp, Homo sapiens
aagatttctgttaca

SEQ ID NO: 859340 - DNA, 15 bp, Homo sapiens
agatttctgttacaa

SEQ ID NO: 859341 - DNA, 15 bp, Homo sapiens
gatttctgttacaat

SEQ ID NO: 859342 - DNA, 15 bp, Homo sapiens
atttctgttacaatc

SEQ ID NO: 859343 - DNA, 15 bp, Homo sapiens
tttctgttacaatcc

SEQ ID NO: 859344 - DNA, 15 bp, Homo sapiens
ttctgttacaatcct

SEQ ID NO: 859345 - DNA, 15 bp, Homo sapiens
tctgttacaatcctt

SEQ ID NO: 859346 - DNA, 15 bp, Homo sapiens
ctgttacaatcctta

SEQ ID NO: 859347 - DNA, 15 bp, Homo sapiens
tgttacaatccttag

SEQ ID NO: 859348 - DNA, 15 bp, Homo sapiens
gttacaatccttaga

SEQ ID NO: 859349 - DNA, 15 bp, Homo sapiens
ttacaatccttagat

SEQ ID NO: 859350 - DNA, 15 bp, Homo sapiens
tacaatccttagatg

SEQ ID NO: 859351 - DNA, 15 bp, Homo sapiens
acaatccttagatgc

SEQ ID NO: 859352 - DNA, 15 bp, Homo sapiens
caatccttagatgct

SEQ ID NO: 859353 - DNA, 15 bp, Homo sapiens
aatccttagatgcta

SEQ ID NO: 859354 - DNA, 15 bp, Homo sapiens
atccttagatgctac

SEQ ID NO: 859355 - DNA, 15 bp, Homo sapiens
tccttagatgctacc

SEQ ID NO: 859356 - DNA, 15 bp, Homo sapiens
ccttagatgctacca

SEQ ID NO: 859357 - DNA, 15 bp, Homo sapiens
cttagatgctaccat

SEQ ID NO: 859358 - DNA, 15 bp, Homo sapiens
ttagatgctaccata

SEQ ID NO: 859359 - DNA, 15 bp, Homo sapiens
tagatgctaccatat

SEQ ID NO: 859360 - DNA, 15 bp, Homo sapiens
agatgctaccatatg

SEQ ID NO: 859361 - DNA, 15 bp, Homo sapiens
gatgctaccatatga

SEQ ID NO: 859362 - DNA, 15 bp, Homo sapiens
atgctaccatatgaa

SEQ ID NO: 859363 - DNA, 15 bp, Homo sapiens
tgctaccatatgaat

SEQ ID NO: 859364 - DNA, 15 bp, Homo sapiens
gctaccatatgaatc

SEQ ID NO: 859365 - DNA, 15 bp, Homo sapiens
ctaccatatgaatcc

SEQ ID NO: 859366 - DNA, 15 bp, Homo sapiens
taccatatgaatcct

SEQ ID NO: 859367 - DNA, 15 bp, Homo sapiens
accatatgaatcctt

SEQ ID NO: 859368 - DNA, 15 bp, Homo sapiens
ccatatgaatcctta

SEQ ID NO: 859369 - DNA, 15 bp, Homo sapiens
catatgaatccttat

SEQ ID NO: 859370 - DNA, 15 bp, Homo sapiens
atatgaatccttatc

SEQ ID NO: 859371 - DNA, 15 bp, Homo sapiens
tatgaatccttatca

SEQ ID NO: 859372 - DNA, 15 bp, Homo sapiens
atgaatccttatcac

SEQ ID NO: 859373 - DNA, 15 bp, Homo sapiens
tgaatccttatcact

SEQ ID NO: 859374 - DNA, 15 bp, Homo sapiens
gaatccttatcactt

SEQ ID NO: 859375 - DNA, 15 bp, Homo sapiens
aatccttatcacttt

SEQ ID NO: 859376 - DNA, 15 bp, Homo sapiens
atccttatcacttta

SEQ ID NO: 859377 - DNA, 15 bp, Homo sapiens
tccttatcactttat

SEQ ID NO: 859378 - DNA, 15 bp, Homo sapiens
ccttatcactttatt

SEQ ID NO: 859379 - DNA, 15 bp, Homo sapiens
cttatcactttattt

SEQ ID NO: 859380 - DNA, 15 bp, Homo sapiens
ttatcactttatttt

SEQ ID NO: 859381 - DNA, 15 bp, Homo sapiens
tatcactttattttc

SEQ ID NO: 859382 - DNA, 15 bp, Homo sapiens
atcactttattttcc

SEQ ID NO: 859383 - DNA, 15 bp, Homo sapiens
tcactttattttccc

SEQ ID NO: 859384 - DNA, 15 bp, Homo sapiens
cactttattttcccc

SEQ ID NO: 859385 - DNA, 15 bp, Homo sapiens
actttattttcccct

SEQ ID NO: 859386 - DNA, 15 bp, Homo sapiens
ctttattttcccctg

SEQ ID NO: 859387 - DNA, 15 bp, Homo sapiens
tttattttcccctga

SEQ ID NO: 859388 - DNA, 15 bp, Homo sapiens
ttattttcccctgaa

SEQ ID NO: 859389 - DNA, 15 bp, Homo sapiens
tattttcccctgaag

SEQ ID NO: 859390 - DNA, 15 bp, Homo sapiens
attttcccctgaaga

SEQ ID NO: 859391 - DNA, 15 bp, Homo sapiens
ttttcccctgaagag

SEQ ID NO: 859392 - DNA, 15 bp, Homo sapiens
tttcccctgaagagt

SEQ ID NO: 859393 - DNA, 15 bp, Homo sapiens
ttcccctgaagagtt

SEQ ID NO: 859394 - DNA, 15 bp, Homo sapiens
tcccctgaagagtta

SEQ ID NO: 859395 - DNA, 15 bp, Homo sapiens
cccctgaagagttat

SEQ ID NO: 859396 - DNA, 15 bp, Homo sapiens
ccctgaagagttatc

SEQ ID NO: 859397 - DNA, 15 bp, Homo sapiens
cctgaagagttatct

SEQ ID NO: 859398 - DNA, 15 bp, Homo sapiens
ctgaagagttatctg

SEQ ID NO: 859399 - DNA, 15 bp, Homo sapiens
tgaagagttatctgt

SEQ ID NO: 859400 - DNA, 15 bp, Homo sapiens
gaagagttatctgta

SEQ ID NO: 859401 - DNA, 15 bp, Homo sapiens
aagagttatctgtag

SEQ ID NO: 859402 - DNA, 15 bp, Homo sapiens
agagttatctgtagt

SEQ ID NO: 859403 - DNA, 15 bp, Homo sapiens
gagttatctgtagtt

SEQ ID NO: 859404 - DNA, 15 bp, Homo sapiens
agttatctgtagttt

SEQ ID NO: 859405 - DNA, 15 bp, Homo sapiens
gttatctgtagtttg

SEQ ID NO: 859406 - DNA, 15 bp, Homo sapiens
ttatctgtagtttgc

SEQ ID NO: 859407 - DNA, 15 bp, Homo sapiens
tatctgtagtttgca

SEQ ID NO: 859408 - DNA, 15 bp, Homo sapiens
atctgtagtttgcat

SEQ ID NO: 859409 - DNA, 15 bp, Homo sapiens
tctgtagtttgcatg

SEQ ID NO: 859410 - DNA, 15 bp, Homo sapiens
ctgtagtttgcatgc

SEQ ID NO: 859411 - DNA, 15 bp, Homo sapiens
tgtagtttgcatgcc

SEQ ID NO: 859412 - DNA, 15 bp, Homo sapiens
gtagtttgcatgcca

SEQ ID NO: 859413 - DNA, 15 bp, Homo sapiens
tagtttgcatgccat

SEQ ID NO: 859414 - DNA, 15 bp, Homo sapiens
agtttgcatgccatt

SEQ ID NO: 859415 - DNA, 15 bp, Homo sapiens
gtttgcatgccatta

SEQ ID NO: 859416 - DNA, 15 bp, Homo sapiens
tttgcatgccattac

SEQ ID NO: 859417 - DNA, 15 bp, Homo sapiens
ttgcatgccattaca

SEQ ID NO: 859418 - DNA, 15 bp, Homo sapiens
tgcatgccattacag

SEQ ID NO: 859419 - DNA, 15 bp, Homo sapiens
gcatgccattacaga

SEQ ID NO: 859420 - DNA, 15 bp, Homo sapiens
catgccattacagag

SEQ ID NO: 859421 - DNA, 15 bp, Homo sapiens
atgccattacagaga

SEQ ID NO: 859422 - DNA, 15 bp, Homo sapiens
tgccattacagagat

SEQ ID NO: 859423 - DNA, 15 bp, Homo sapiens
gccattacagagata

SEQ ID NO: 859424 - DNA, 15 bp, Homo sapiens
ccattacagagataa

SEQ ID NO: 859425 - DNA, 15 bp, Homo sapiens
cattacagagataag

SEQ ID NO: 859426 - DNA, 15 bp, Homo sapiens
attacagagataagc

SEQ ID NO: 859427 - DNA, 15 bp, Homo sapiens
ttacagagataagct

SEQ ID NO: 859428 - DNA, 15 bp, Homo sapiens
tacagagataagcta

SEQ ID NO: 859429 - DNA, 15 bp, Homo sapiens
acagagataagctag

SEQ ID NO: 859430 - DNA, 15 bp, Homo sapiens
cagagataagctagg

SEQ ID NO: 859431 - DNA, 15 bp, Homo sapiens
agagataagctaggg

SEQ ID NO: 859432 - DNA, 15 bp, Homo sapiens
gagataagctagggc

SEQ ID NO: 859433 - DNA, 15 bp, Homo sapiens
agataagctagggca

SEQ ID NO: 859434 - DNA, 15 bp, Homo sapiens
gataagctagggcac

SEQ ID NO: 859435 - DNA, 15 bp, Homo sapiens
ataagctagggcaca

SEQ ID NO: 859436 - DNA, 15 bp, Homo sapiens
taagctagggcacag

SEQ ID NO: 859437 - DNA, 15 bp, Homo sapiens
aagctagggcacagc

SEQ ID NO: 859438 - DNA, 15 bp, Homo sapiens
agctagggcacagct

SEQ ID NO: 859439 - DNA, 15 bp, Homo sapiens
gctagggcacagctg

SEQ ID NO: 859440 - DNA, 15 bp, Homo sapiens
ctagggcacagctgc

SEQ ID NO: 859441 - DNA, 15 bp, Homo sapiens
tagggcacagctgca

SEQ ID NO: 859442 - DNA, 15 bp, Homo sapiens
agggcacagctgcac

SEQ ID NO: 859443 - DNA, 15 bp, Homo sapiens
gggcacagctgcaca

SEQ ID NO: 859444 - DNA, 15 bp, Homo sapiens
ggcacagctgcacag

SEQ ID NO: 859445 - DNA, 15 bp, Homo sapiens
gcacagctgcacaga

SEQ ID NO: 859446 - DNA, 15 bp, Homo sapiens
cacagctgcacagag

SEQ ID NO: 859447 - DNA, 15 bp, Homo sapiens
acagctgcacagaga

SEQ ID NO: 859448 - DNA, 15 bp, Homo sapiens
cagctgcacagagaa

SEQ ID NO: 859449 - DNA, 15 bp, Homo sapiens
agctgcacagagaac

SEQ ID NO: 859450 - DNA, 15 bp, Homo sapiens
gctgcacagagaact

SEQ ID NO: 859451 - DNA, 15 bp, Homo sapiens
ctgcacagagaactt

SEQ ID NO: 859452 - DNA, 15 bp, Homo sapiens
tgcacagagaacttg

SEQ ID NO: 859453 - DNA, 15 bp, Homo sapiens
gcacagagaacttgt

SEQ ID NO: 859454 - DNA, 15 bp, Homo sapiens
cacagagaacttgtc

SEQ ID NO: 859455 - DNA, 15 bp, Homo sapiens
acagagaacttgtct

SEQ ID NO: 859456 - DNA, 15 bp, Homo sapiens
cagagaacttgtctg

SEQ ID NO: 859457 - DNA, 15 bp, Homo sapiens
agagaacttgtctgt

SEQ ID NO: 859458 - DNA, 15 bp, Homo sapiens
gagaacttgtctgtc

SEQ ID NO: 859459 - DNA, 15 bp, Homo sapiens
agaacttgtctgtct

SEQ ID NO: 859460 - DNA, 15 bp, Homo sapiens
gaacttgtctgtcta

SEQ ID NO: 859461 - DNA, 15 bp, Homo sapiens
aacttgtctgtctac

SEQ ID NO: 859462 - DNA, 15 bp, Homo sapiens
acttgtctgtctacg

SEQ ID NO: 859463 - DNA, 15 bp, Homo sapiens
cttgtctgtctacga

SEQ ID NO: 859464 - DNA, 15 bp, Homo sapiens
ttgtctgtctacgat

SEQ ID NO: 859465 - DNA, 15 bp, Homo sapiens
tgtctgtctacgatg

SEQ ID NO: 859466 - DNA, 15 bp, Homo sapiens
gtctgtctacgatgt

SEQ ID NO: 859467 - DNA, 15 bp, Homo sapiens
tctgtctacgatgtg

SEQ ID NO: 859468 - DNA, 15 bp, Homo sapiens
ctgtctacgatgtgc

SEQ ID NO: 859469 - DNA, 15 bp, Homo sapiens
tgtctacgatgtgca

SEQ ID NO: 859470 - DNA, 15 bp, Homo sapiens
gtctacgatgtgcag

SEQ ID NO: 859471 - DNA, 15 bp, Homo sapiens
tctacgatgtgcagc

SEQ ID NO: 859472 - DNA, 15 bp, Homo sapiens
ctacgatgtgcagca

SEQ ID NO: 859473 - DNA, 15 bp, Homo sapiens
tacgatgtgcagcaa

SEQ ID NO: 859474 - DNA, 15 bp, Homo sapiens
acgatgtgcagcaag

SEQ ID NO: 859475 - DNA, 15 bp, Homo sapiens
cgatgtgcagcaaga

SEQ ID NO: 859476 - DNA, 15 bp, Homo sapiens
gatgtgcagcaagac

SEQ ID NO: 859477 - DNA, 15 bp, Homo sapiens
atgtgcagcaagaca

SEQ ID NO: 859478 - DNA, 15 bp, Homo sapiens
tgtgcagcaagacac

SEQ ID NO: 859479 - DNA, 15 bp, Homo sapiens
gtgcagcaagacacc

SEQ ID NO: 859480 - DNA, 15 bp, Homo sapiens
tgcagcaagacacca

SEQ ID NO: 859481 - DNA, 15 bp, Homo sapiens
gcagcaagacaccaa

SEQ ID NO: 859482 - DNA, 15 bp, Homo sapiens
cagcaagacaccaag

SEQ ID NO: 859483 - DNA, 15 bp, Homo sapiens
agcaagacaccaagt

SEQ ID NO: 859484 - DNA, 15 bp, Homo sapiens
gcaagacaccaagtt

SEQ ID NO: 859485 - DNA, 15 bp, Homo sapiens
caagacaccaagttc

SEQ ID NO: 859486 - DNA, 15 bp, Homo sapiens
aagacaccaagttca

SEQ ID NO: 859487 - DNA, 15 bp, Homo sapiens
agacaccaagttcaa

SEQ ID NO: 859488 - DNA, 15 bp, Homo sapiens
gacaccaagttcaaa

SEQ ID NO: 859489 - DNA, 15 bp, Homo sapiens
acaccaagttcaaag

SEQ ID NO: 859490 - DNA, 15 bp, Homo sapiens
caccaagttcaaaga

SEQ ID NO: 859491 - DNA, 15 bp, Homo sapiens
accaagttcaaagat

SEQ ID NO: 859492 - DNA, 15 bp, Homo sapiens
ccaagttcaaagata

SEQ ID NO: 859493 - DNA, 15 bp, Homo sapiens
caagttcaaagatag

SEQ ID NO: 859494 - DNA, 15 bp, Homo sapiens
agttcaaagataggt

SEQ ID NO: 859495 - DNA, 15 bp, Homo sapiens
gttcaaagataggtg

SEQ ID NO: 859496 - DNA, 15 bp, Homo sapiens
ttcaaagataggtgc

SEQ ID NO: 859497 - DNA, 15 bp, Homo sapiens
tcaaagataggtgct

SEQ ID NO: 859498 - DNA, 15 bp, Homo sapiens
caaagataggtgctg

SEQ ID NO: 859499 - DNA, 15 bp, Homo sapiens
aaagataggtgctgg

SEQ ID NO: 859500 - DNA, 15 bp, Homo sapiens
aagataggtgctggg

SEQ ID NO: 859501 - DNA, 15 bp, Homo sapiens
agataggtgctgggg

SEQ ID NO: 859502 - DNA, 15 bp, Homo sapiens
gataggtgctgggga

SEQ ID NO: 859503 - DNA, 15 bp, Homo sapiens
ataggtgctggggag

SEQ ID NO: 859504 - DNA, 15 bp, Homo sapiens
taggtgctggggagg

SEQ ID NO: 859505 - DNA, 15 bp, Homo sapiens
aggtgctggggagga

SEQ ID NO: 859506 - DNA, 15 bp, Homo sapiens
ggtgctggggaggaa

SEQ ID NO: 859507 - DNA, 15 bp, Homo sapiens
gtgctggggaggaag

SEQ ID NO: 859508 - DNA, 15 bp, Homo sapiens
tgctggggaggaaga

SEQ ID NO: 859509 - DNA, 15 bp, Homo sapiens
gctggggaggaagag

SEQ ID NO: 859510 - DNA, 15 bp, Homo sapiens
ctggggaggaagagc

SEQ ID NO: 859511 - DNA, 15 bp, Homo sapiens
tggggaggaagagca

SEQ ID NO: 859512 - DNA, 15 bp, Homo sapiens
ggggaggaagagcag

SEQ ID NO: 859513 - DNA, 15 bp, Homo sapiens
gggaggaagagcaga

SEQ ID NO: 859514 - DNA, 15 bp, Homo sapiens
ggaggaagagcagag

SEQ ID NO: 859515 - DNA, 15 bp, Homo sapiens
gaggaagagcagagg

SEQ ID NO: 859516 - DNA, 15 bp, Homo sapiens
aggaagagcagagga

SEQ ID NO: 859517 - DNA, 15 bp, Homo sapiens
ggaagagcagaggag

SEQ ID NO: 859518 - DNA, 15 bp, Homo sapiens
gaagagcagaggagg

SEQ ID NO: 859519 - DNA, 15 bp, Homo sapiens
aagagcagaggaggg

SEQ ID NO: 859520 - DNA, 15 bp, Homo sapiens
agagcagaggagggc

SEQ ID NO: 859521 - DNA, 15 bp, Homo sapiens
gagcagaggagggcc

SEQ ID NO: 859522 - DNA, 15 bp, Homo sapiens
agcagaggagggcct

SEQ ID NO: 859523 - DNA, 15 bp, Homo sapiens
gcagaggagggcctg

SEQ ID NO: 859524 - DNA, 15 bp, Homo sapiens
cagaggagggcctga

SEQ ID NO: 859525 - DNA, 15 bp, Homo sapiens
agaggagggcctgag

SEQ ID NO: 859526 - DNA, 15 bp, Homo sapiens
gaggagggcctgagg

SEQ ID NO: 859527 - DNA, 15 bp, Homo sapiens
aggagggcctgaggt

SEQ ID NO: 859528 - DNA, 15 bp, Homo sapiens
ggagggcctgaggtg

SEQ ID NO: 859529 - DNA, 15 bp, Homo sapiens
gagggcctgaggtgg

SEQ ID NO: 859530 - DNA, 15 bp, Homo sapiens
agggcctgaggtggc

SEQ ID NO: 859531 - DNA, 15 bp, Homo sapiens
gggcctgaggtggca

SEQ ID NO: 859532 - DNA, 15 bp, Homo sapiens
ggcctgaggtggcat

SEQ ID NO: 859533 - DNA, 15 bp, Homo sapiens
gcctgaggtggcatg

SEQ ID NO: 859534 - DNA, 15 bp, Homo sapiens
cctgaggtggcatga

SEQ ID NO: 859535 - DNA, 15 bp, Homo sapiens
ctgaggtggcatgaa

SEQ ID NO: 859536 - DNA, 15 bp, Homo sapiens
tgaggtggcatgaat

SEQ ID NO: 859537 - DNA, 15 bp, Homo sapiens
gaggtggcatgaatt

SEQ ID NO: 859538 - DNA, 15 bp, Homo sapiens
aggtggcatgaattg

SEQ ID NO: 859539 - DNA, 15 bp, Homo sapiens
ggtggcatgaattgg

SEQ ID NO: 859540 - DNA, 15 bp, Homo sapiens
gtggcatgaattggt

SEQ ID NO: 859541 - DNA, 15 bp, Homo sapiens
tggcatgaattggtc

SEQ ID NO: 859542 - DNA, 15 bp, Homo sapiens
ggcatgaattggtca

SEQ ID NO: 859543 - DNA, 15 bp, Homo sapiens
gcatgaattggtcac

SEQ ID NO: 859544 - DNA, 15 bp, Homo sapiens
catgaattggtcaca

SEQ ID NO: 859545 - DNA, 15 bp, Homo sapiens
atgaattggtcacat

SEQ ID NO: 859546 - DNA, 15 bp, Homo sapiens
tgaattggtcacatc

SEQ ID NO: 859547 - DNA, 15 bp, Homo sapiens
gaattggtcacatct

SEQ ID NO: 859548 - DNA, 15 bp, Homo sapiens
aattggtcacatctc

SEQ ID NO: 859549 - DNA, 15 bp, Homo sapiens
attggtcacatctct

SEQ ID NO: 859550 - DNA, 15 bp, Homo sapiens
ttggtcacatctctt

SEQ ID NO: 859551 - DNA, 15 bp, Homo sapiens
tggtcacatctcttt

SEQ ID NO: 859552 - DNA, 15 bp, Homo sapiens
ggtcacatctctttg

SEQ ID NO: 859553 - DNA, 15 bp, Homo sapiens
gtcacatctctttga

SEQ ID NO: 859554 - DNA, 15 bp, Homo sapiens
tcacatctctttgac

SEQ ID NO: 859555 - DNA, 15 bp, Homo sapiens
cacatctctttgact

SEQ ID NO: 859556 - DNA, 15 bp, Homo sapiens
acatctctttgactg

SEQ ID NO: 859557 - DNA, 15 bp, Homo sapiens
catctctttgactga

SEQ ID NO: 859558 - DNA, 15 bp, Homo sapiens
atctctttgactgat

SEQ ID NO: 859559 - DNA, 15 bp, Homo sapiens
tctctttgactgatg

SEQ ID NO: 859560 - DNA, 15 bp, Homo sapiens
ctctttgactgatgg

SEQ ID NO: 859561 - DNA, 15 bp, Homo sapiens
tctttgactgatggt

SEQ ID NO: 859562 - DNA, 15 bp, Homo sapiens
ctttgactgatggtg

SEQ ID NO: 859563 - DNA, 15 bp, Homo sapiens
tttgactgatggtgg

SEQ ID NO: 859564 - DNA, 15 bp, Homo sapiens
ttgactgatggtggt

SEQ ID NO: 859565 - DNA, 15 bp, Homo sapiens
tgactgatggtggtg

SEQ ID NO: 859566 - DNA, 15 bp, Homo sapiens
gactgatggtggtga

SEQ ID NO: 859567 - DNA, 15 bp, Homo sapiens
actgatggtggtgaa

SEQ ID NO: 859568 - DNA, 15 bp, Homo sapiens
ctgatggtggtgaaa

SEQ ID NO: 859569 - DNA, 15 bp, Homo sapiens
tgatggtggtgaaag

SEQ ID NO: 859570 - DNA, 15 bp, Homo sapiens
gatggtggtgaaagt

SEQ ID NO: 859571 - DNA, 15 bp, Homo sapiens
atggtggtgaaagta

SEQ ID NO: 859572 - DNA, 15 bp, Homo sapiens
tggtggtgaaagtaa

SEQ ID NO: 859573 - DNA, 15 bp, Homo sapiens
ggtggtgaaagtaac

SEQ ID NO: 859574 - DNA, 15 bp, Homo sapiens
gtggtgaaagtaacc

SEQ ID NO: 859575 - DNA, 15 bp, Homo sapiens
tggtgaaagtaacca

SEQ ID NO: 859576 - DNA, 15 bp, Homo sapiens
ggtgaaagtaaccac

SEQ ID NO: 859577 - DNA, 15 bp, Homo sapiens
gtgaaagtaaccaca

SEQ ID NO: 859578 - DNA, 15 bp, Homo sapiens
tgaaagtaaccacaa

SEQ ID NO: 859579 - DNA, 15 bp, Homo sapiens
gaaagtaaccacaag

SEQ ID NO: 859580 - DNA, 15 bp, Homo sapiens
aaagtaaccacaagc

SEQ ID NO: 859581 - DNA, 15 bp, Homo sapiens
aagtaaccacaagcc

SEQ ID NO: 859582 - DNA, 15 bp, Homo sapiens
agtaaccacaagccc

SEQ ID NO: 859583 - DNA, 15 bp, Homo sapiens
gtaaccacaagcccc

SEQ ID NO: 859584 - DNA, 15 bp, Homo sapiens
taaccacaagccccc

SEQ ID NO: 859585 - DNA, 15 bp, Homo sapiens
aaccacaagcccccg

SEQ ID NO: 859586 - DNA, 15 bp, Homo sapiens
accacaagcccccgg

SEQ ID NO: 859587 - DNA, 15 bp, Homo sapiens
ccacaagcccccggg

SEQ ID NO: 859588 - DNA, 15 bp, Homo sapiens
cacaagcccccgggt

SEQ ID NO: 859589 - DNA, 15 bp, Homo sapiens
acaagcccccgggtt

SEQ ID NO: 859590 - DNA, 15 bp, Homo sapiens
caagcccccgggtta

SEQ ID NO: 859591 - DNA, 15 bp, Homo sapiens
aagcccccgggttac

SEQ ID NO: 859592 - DNA, 15 bp, Homo sapiens
agcccccgggttact

SEQ ID NO: 859593 - DNA, 15 bp, Homo sapiens
gcccccgggttactc

SEQ ID NO: 859594 - DNA, 15 bp, Homo sapiens
cccccgggttactct

SEQ ID NO: 859595 - DNA, 15 bp, Homo sapiens
ccccgggttactctt

SEQ ID NO: 859596 - DNA, 15 bp, Homo sapiens
cccgggttactcttc

SEQ ID NO: 859597 - DNA, 15 bp, Homo sapiens
ccgggttactcttct

SEQ ID NO: 859598 - DNA, 15 bp, Homo sapiens
cgggttactcttctg

SEQ ID NO: 859599 - DNA, 15 bp, Homo sapiens
gggttactcttctgc

SEQ ID NO: 859600 - DNA, 15 bp, Homo sapiens
ggttactcttctgcc

SEQ ID NO: 859601 - DNA, 15 bp, Homo sapiens
gttactcttctgcct

SEQ ID NO: 859602 - DNA, 15 bp, Homo sapiens
ttactcttctgccta

SEQ ID NO: 859603 - DNA, 15 bp, Homo sapiens
tactcttctgcctaa

SEQ ID NO: 859604 - DNA, 15 bp, Homo sapiens
actcttctgcctaat

SEQ ID NO: 859605 - DNA, 15 bp, Homo sapiens
ctcttctgcctaatg

SEQ ID NO: 859606 - DNA, 15 bp, Homo sapiens
tcttctgcctaatgc

SEQ ID NO: 859607 - DNA, 15 bp, Homo sapiens
cttctgcctaatgca

SEQ ID NO: 859608 - DNA, 15 bp, Homo sapiens
ttctgcctaatgcac

SEQ ID NO: 859609 - DNA, 15 bp, Homo sapiens
tctgcctaatgcaca

SEQ ID NO: 859610 - DNA, 15 bp, Homo sapiens
ctgcctaatgcacaa

SEQ ID NO: 859611 - DNA, 15 bp, Homo sapiens
tgcctaatgcacaac

SEQ ID NO: 859612 - DNA, 15 bp, Homo sapiens
gcctaatgcacaact

SEQ ID NO: 859613 - DNA, 15 bp, Homo sapiens
cctaatgcacaactt

SEQ ID NO: 859614 - DNA, 15 bp, Homo sapiens
ctaatgcacaacttc

SEQ ID NO: 859615 - DNA, 15 bp, Homo sapiens
taatgcacaacttct

SEQ ID NO: 859616 - DNA, 15 bp, Homo sapiens
aatgcacaacttctg

SEQ ID NO: 859617 - DNA, 15 bp, Homo sapiens
atgcacaacttctgt

SEQ ID NO: 859618 - DNA, 15 bp, Homo sapiens
tgcacaacttctgtt

SEQ ID NO: 859619 - DNA, 15 bp, Homo sapiens
gcacaacttctgttc

SEQ ID NO: 859620 - DNA, 15 bp, Homo sapiens
cacaacttctgttct

SEQ ID NO: 859621 - DNA, 15 bp, Homo sapiens
acaacttctgttctc

SEQ ID NO: 859622 - DNA, 15 bp, Homo sapiens
caacttctgttctca

SEQ ID NO: 859623 - DNA, 15 bp, Homo sapiens
aacttctgttctcaa

SEQ ID NO: 859624 - DNA, 15 bp, Homo sapiens
acttctgttctcaaa

SEQ ID NO: 859625 - DNA, 15 bp, Homo sapiens
cttctgttctcaaat

SEQ ID NO: 859626 - DNA, 15 bp, Homo sapiens
ttctgttctcaaata

SEQ ID NO: 859627 - DNA, 15 bp, Homo sapiens
tctgttctcaaataa

SEQ ID NO: 859628 - DNA, 15 bp, Homo sapiens
ctgttctcaaataat

SEQ ID NO: 859629 - DNA, 15 bp, Homo sapiens
tgttctcaaataatc

SEQ ID NO: 859630 - DNA, 15 bp, Homo sapiens
gttctcaaataatca

SEQ ID NO: 859631 - DNA, 15 bp, Homo sapiens
ttctcaaataatcat

SEQ ID NO: 859632 - DNA, 15 bp, Homo sapiens
tctcaaataatcatg

SEQ ID NO: 859633 - DNA, 15 bp, Homo sapiens
ctcaaataatcatga

SEQ ID NO: 859634 - DNA, 15 bp, Homo sapiens
tcaaataatcatgag

SEQ ID NO: 859635 - DNA, 15 bp, Homo sapiens
caaataatcatgagg

SEQ ID NO: 859636 - DNA, 15 bp, Homo sapiens
aaataatcatgaggc

SEQ ID NO: 859637 - DNA, 15 bp, Homo sapiens
aataatcatgaggct

SEQ ID NO: 859638 - DNA, 15 bp, Homo sapiens
ataatcatgaggctc

SEQ ID NO: 859639 - DNA, 15 bp, Homo sapiens
taatcatgaggctct

SEQ ID NO: 859640 - DNA, 15 bp, Homo sapiens
aatcatgaggctcta

SEQ ID NO: 859641 - DNA, 15 bp, Homo sapiens
atcatgaggctctaa

SEQ ID NO: 859642 - DNA, 15 bp, Homo sapiens
tcatgaggctctaaa

SEQ ID NO: 859643 - DNA, 15 bp, Homo sapiens
catgaggctctaaaa

SEQ ID NO: 859644 - DNA, 15 bp, Homo sapiens
atgaggctctaaaac

SEQ ID NO: 859645 - DNA, 15 bp, Homo sapiens
tgaggctctaaaacc

SEQ ID NO: 859646 - DNA, 15 bp, Homo sapiens
gaggctctaaaacct

SEQ ID NO: 859647 - DNA, 15 bp, Homo sapiens
aggctctaaaacctt

SEQ ID NO: 859648 - DNA, 15 bp, Homo sapiens
ggctctaaaacctta

SEQ ID NO: 859649 - DNA, 15 bp, Homo sapiens
gctctaaaaccttag

SEQ ID NO: 859650 - DNA, 15 bp, Homo sapiens
ctctaaaaccttagc

SEQ ID NO: 859651 - DNA, 15 bp, Homo sapiens
tctaaaaccttagcc

SEQ ID NO: 859652 - DNA, 15 bp, Homo sapiens
ctaaaaccttagcct

SEQ ID NO: 859653 - DNA, 15 bp, Homo sapiens
taaaaccttagccta

SEQ ID NO: 859654 - DNA, 15 bp, Homo sapiens
aaaaccttagcctag

SEQ ID NO: 859655 - DNA, 15 bp, Homo sapiens
aaaccttagcctaga

SEQ ID NO: 859656 - DNA, 15 bp, Homo sapiens
aaccttagcctagac

SEQ ID NO: 859657 - DNA, 15 bp, Homo sapiens
accttagcctagact

SEQ ID NO: 859658 - DNA, 15 bp, Homo sapiens
ccttagcctagactc

SEQ ID NO: 859659 - DNA, 15 bp, Homo sapiens
cttagcctagactca

SEQ ID NO: 859660 - DNA, 15 bp, Homo sapiens
ttagcctagactcag

SEQ ID NO: 859661 - DNA, 15 bp, Homo sapiens
tagcctagactcagt

SEQ ID NO: 859662 - DNA, 15 bp, Homo sapiens
agcctagactcagtg

SEQ ID NO: 859663 - DNA, 15 bp, Homo sapiens
gcctagactcagtgg

SEQ ID NO: 859664 - DNA, 15 bp, Homo sapiens
cctagactcagtgga

SEQ ID NO: 859665 - DNA, 15 bp, Homo sapiens
ctagactcagtggag

SEQ ID NO: 859666 - DNA, 15 bp, Homo sapiens
tagactcagtggaga

SEQ ID NO: 859667 - DNA, 15 bp, Homo sapiens
agactcagtggagaa

SEQ ID NO: 859668 - DNA, 15 bp, Homo sapiens
gactcagtggagaaa

SEQ ID NO: 859669 - DNA, 15 bp, Homo sapiens
actcagtggagaaaa

SEQ ID NO: 859670 - DNA, 15 bp, Homo sapiens
ctcagtggagaaaag

SEQ ID NO: 859671 - DNA, 15 bp, Homo sapiens
tcagtggagaaaaga

SEQ ID NO: 859672 - DNA, 15 bp, Homo sapiens
cagtggagaaaagaa

SEQ ID NO: 859673 - DNA, 15 bp, Homo sapiens
agtggagaaaagaaa

SEQ ID NO: 859674 - DNA, 15 bp, Homo sapiens
gtggagaaaagaaag

SEQ ID NO: 859675 - DNA, 15 bp, Homo sapiens
tggagaaaagaaagg

SEQ ID NO: 859676 - DNA, 15 bp, Homo sapiens
ggagaaaagaaagga

SEQ ID NO: 859677 - DNA, 15 bp, Homo sapiens
gagaaaagaaaggag

SEQ ID NO: 859678 - DNA, 15 bp, Homo sapiens
agaaaagaaaggagc

SEQ ID NO: 859679 - DNA, 15 bp, Homo sapiens
gaaaagaaaggagcc

SEQ ID NO: 859680 - DNA, 15 bp, Homo sapiens
aaaagaaaggagcca

SEQ ID NO: 859681 - DNA, 15 bp, Homo sapiens
aaagaaaggagccac

SEQ ID NO: 859682 - DNA, 15 bp, Homo sapiens
aagaaaggagccact

SEQ ID NO: 859683 - DNA, 15 bp, Homo sapiens
agaaaggagccactc

SEQ ID NO: 859684 - DNA, 15 bp, Homo sapiens
gaaaggagccactct

SEQ ID NO: 859685 - DNA, 15 bp, Homo sapiens
aaaggagccactctg

SEQ ID NO: 859686 - DNA, 15 bp, Homo sapiens
aaggagccactctgg

SEQ ID NO: 859687 - DNA, 15 bp, Homo sapiens
aggagccactctggc

SEQ ID NO: 859688 - DNA, 15 bp, Homo sapiens
ggagccactctggct

SEQ ID NO: 859689 - DNA, 15 bp, Homo sapiens
gagccactctggctc

SEQ ID NO: 859690 - DNA, 15 bp, Homo sapiens
agccactctggctct

SEQ ID NO: 859691 - DNA, 15 bp, Homo sapiens
gccactctggctctg

SEQ ID NO: 859692 - DNA, 15 bp, Homo sapiens
ccactctggctctga

SEQ ID NO: 859693 - DNA, 15 bp, Homo sapiens
cactctggctctgag

SEQ ID NO: 859694 - DNA, 15 bp, Homo sapiens
actctggctctgagc

SEQ ID NO: 859695 - DNA, 15 bp, Homo sapiens
ctctggctctgagct

SEQ ID NO: 859696 - DNA, 15 bp, Homo sapiens
tctggctctgagcta

SEQ ID NO: 859697 - DNA, 15 bp, Homo sapiens
ctggctctgagctag

SEQ ID NO: 859698 - DNA, 15 bp, Homo sapiens
tggctctgagctagg

SEQ ID NO: 859699 - DNA, 15 bp, Homo sapiens
ggctctgagctaggg

SEQ ID NO: 859700 - DNA, 15 bp, Homo sapiens
gctctgagctagggc

SEQ ID NO: 859701 - DNA, 15 bp, Homo sapiens
ctctgagctagggcc

SEQ ID NO: 859702 - DNA, 15 bp, Homo sapiens
tctgagctagggccc

SEQ ID NO: 859703 - DNA, 15 bp, Homo sapiens
ctgagctagggcccc

SEQ ID NO: 859704 - DNA, 15 bp, Homo sapiens
tgagctagggcccct

SEQ ID NO: 859705 - DNA, 15 bp, Homo sapiens
gagctagggcccctt

SEQ ID NO: 859706 - DNA, 15 bp, Homo sapiens
agctagggccccttg

SEQ ID NO: 859707 - DNA, 15 bp, Homo sapiens
gctagggccccttgg

SEQ ID NO: 859708 - DNA, 15 bp, Homo sapiens
ctagggccccttggt

SEQ ID NO: 859709 - DNA, 15 bp, Homo sapiens
tagggccccttggtc

SEQ ID NO: 859710 - DNA, 15 bp, Homo sapiens
agggccccttggtca

SEQ ID NO: 859711 - DNA, 15 bp, Homo sapiens
gggccccttggtcat

SEQ ID NO: 859712 - DNA, 15 bp, Homo sapiens
ggccccttggtcatg

SEQ ID NO: 859713 - DNA, 15 bp, Homo sapiens
gccccttggtcatgt

SEQ ID NO: 859714 - DNA, 15 bp, Homo sapiens
ccccttggtcatgtc

SEQ ID NO: 859715 - DNA, 15 bp, Homo sapiens
cccttggtcatgtct

SEQ ID NO: 859716 - DNA, 15 bp, Homo sapiens
ccttggtcatgtctt

SEQ ID NO: 859717 - DNA, 15 bp, Homo sapiens
cttggtcatgtcttg

SEQ ID NO: 859718 - DNA, 15 bp, Homo sapiens
ttggtcatgtcttgg

SEQ ID NO: 859719 - DNA, 15 bp, Homo sapiens
tggtcatgtcttggc

SEQ ID NO: 859720 - DNA, 15 bp, Homo sapiens
ggtcatgtcttggca

SEQ ID NO: 859721 - DNA, 15 bp, Homo sapiens
gtcatgtcttggcac

SEQ ID NO: 859722 - DNA, 15 bp, Homo sapiens
tcatgtcttggcact

SEQ ID NO: 859723 - DNA, 15 bp, Homo sapiens
catgtcttggcactg

SEQ ID NO: 859724 - DNA, 15 bp, Homo sapiens
atgtcttggcactgg

SEQ ID NO: 859725 - DNA, 15 bp, Homo sapiens
tgtcttggcactggc

SEQ ID NO: 859726 - DNA, 15 bp, Homo sapiens
gtcttggcactggcc

SEQ ID NO: 859727 - DNA, 15 bp, Homo sapiens
tcttggcactggcca

SEQ ID NO: 859728 - DNA, 15 bp, Homo sapiens
cttggcactggccaa

SEQ ID NO: 859729 - DNA, 15 bp, Homo sapiens
ttggcactggccaac

SEQ ID NO: 859730 - DNA, 15 bp, Homo sapiens
tggcactggccaaca

SEQ ID NO: 859731 - DNA, 15 bp, Homo sapiens
ggcactggccaacaa

SEQ ID NO: 859732 - DNA, 15 bp, Homo sapiens
gcactggccaacaat

SEQ ID NO: 859733 - DNA, 15 bp, Homo sapiens
cactggccaacaata

SEQ ID NO: 859734 - DNA, 15 bp, Homo sapiens
actggccaacaatac

SEQ ID NO: 859735 - DNA, 15 bp, Homo sapiens
ctggccaacaatacc

SEQ ID NO: 859736 - DNA, 15 bp, Homo sapiens
tggccaacaatacca

SEQ ID NO: 859737 - DNA, 15 bp, Homo sapiens
ggccaacaataccaa

SEQ ID NO: 859738 - DNA, 15 bp, Homo sapiens
gccaacaataccaat

SEQ ID NO: 859739 - DNA, 15 bp, Homo sapiens
ccaacaataccaatc

SEQ ID NO: 859740 - DNA, 15 bp, Homo sapiens
caacaataccaatca

SEQ ID NO: 859741 - DNA, 15 bp, Homo sapiens
aacaataccaatcac

SEQ ID NO: 859742 - DNA, 15 bp, Homo sapiens
acaataccaatcaca

SEQ ID NO: 859743 - DNA, 15 bp, Homo sapiens
caataccaatcacag

SEQ ID NO: 859744 - DNA, 15 bp, Homo sapiens
aataccaatcacagc

SEQ ID NO: 859745 - DNA, 15 bp, Homo sapiens
ataccaatcacagca

SEQ ID NO: 859746 - DNA, 15 bp, Homo sapiens
taccaatcacagcac

SEQ ID NO: 859747 - DNA, 15 bp, Homo sapiens
accaatcacagcaca

SEQ ID NO: 859748 - DNA, 15 bp, Homo sapiens
ccaatcacagcacac

SEQ ID NO: 859749 - DNA, 15 bp, Homo sapiens
caatcacagcacact

SEQ ID NO: 859750 - DNA, 15 bp, Homo sapiens
aatcacagcacactc

SEQ ID NO: 859751 - DNA, 15 bp, Homo sapiens
atcacagcacactct

SEQ ID NO: 859752 - DNA, 15 bp, Homo sapiens
tcacagcacactctg

SEQ ID NO: 859753 - DNA, 15 bp, Homo sapiens
cacagcacactctgt

SEQ ID NO: 859754 - DNA, 15 bp, Homo sapiens
acagcacactctgtg

SEQ ID NO: 859755 - DNA, 15 bp, Homo sapiens
cagcacactctgtgt

SEQ ID NO: 859756 - DNA, 15 bp, Homo sapiens
agcacactctgtgtc

SEQ ID NO: 859757 - DNA, 15 bp, Homo sapiens
gcacactctgtgtcc

SEQ ID NO: 859758 - DNA, 15 bp, Homo sapiens
cacactctgtgtccc

SEQ ID NO: 859759 - DNA, 15 bp, Homo sapiens
acactctgtgtcccc

SEQ ID NO: 859760 - DNA, 15 bp, Homo sapiens
cactctgtgtccccc

SEQ ID NO: 859761 - DNA, 15 bp, Homo sapiens
actctgtgtccccca

SEQ ID NO: 859762 - DNA, 15 bp, Homo sapiens
ctctgtgtcccccat

SEQ ID NO: 859763 - DNA, 15 bp, Homo sapiens
tctgtgtcccccatg

SEQ ID NO: 859764 - DNA, 15 bp, Homo sapiens
ctgtgtcccccatgt

SEQ ID NO: 859765 - DNA, 15 bp, Homo sapiens
tgtgtcccccatgta

SEQ ID NO: 859766 - DNA, 15 bp, Homo sapiens
gtgtcccccatgtag

SEQ ID NO: 859767 - DNA, 15 bp, Homo sapiens
tgtcccccatgtaga

SEQ ID NO: 859768 - DNA, 15 bp, Homo sapiens
gtcccccatgtagac

SEQ ID NO: 859769 - DNA, 15 bp, Homo sapiens
tcccccatgtagacc

SEQ ID NO: 859770 - DNA, 15 bp, Homo sapiens
cccccatgtagaccc

SEQ ID NO: 859771 - DNA, 15 bp, Homo sapiens
ccccatgtagacccc

SEQ ID NO: 859772 - DNA, 15 bp, Homo sapiens
cccatgtagacccca

SEQ ID NO: 859773 - DNA, 15 bp, Homo sapiens
ccatgtagaccccat

SEQ ID NO: 859774 - DNA, 15 bp, Homo sapiens
catgtagaccccatg

SEQ ID NO: 859775 - DNA, 15 bp, Homo sapiens
atgtagaccccatgg

SEQ ID NO: 859776 - DNA, 15 bp, Homo sapiens
tgtagaccccatggt

SEQ ID NO: 859777 - DNA, 15 bp, Homo sapiens
gtagaccccatggtg

SEQ ID NO: 859778 - DNA, 15 bp, Homo sapiens
tagaccccatggtgc

SEQ ID NO: 859779 - DNA, 15 bp, Homo sapiens
agaccccatggtgcc

SEQ ID NO: 859780 - DNA, 15 bp, Homo sapiens
gaccccatggtgccc

SEQ ID NO: 859781 - DNA, 15 bp, Homo sapiens
accccatggtgccca

SEQ ID NO: 859782 - DNA, 15 bp, Homo sapiens
ccccatggtgcccag

SEQ ID NO: 859783 - DNA, 15 bp, Homo sapiens
cccatggtgcccagt

SEQ ID NO: 859784 - DNA, 15 bp, Homo sapiens
ccatggtgcccagtg

SEQ ID NO: 859785 - DNA, 15 bp, Homo sapiens
catggtgcccagtgt

SEQ ID NO: 859786 - DNA, 15 bp, Homo sapiens
atggtgcccagtgtg

SEQ ID NO: 859787 - DNA, 15 bp, Homo sapiens
tggtgcccagtgtgt

SEQ ID NO: 859788 - DNA, 15 bp, Homo sapiens
ggtgcccagtgtgtg

SEQ ID NO: 859789 - DNA, 15 bp, Homo sapiens
gtgcccagtgtgtgt

SEQ ID NO: 859790 - DNA, 15 bp, Homo sapiens
tgcccagtgtgtgta

SEQ ID NO: 859791 - DNA, 15 bp, Homo sapiens
gcccagtgtgtgtaa

SEQ ID NO: 859792 - DNA, 15 bp, Homo sapiens
cccagtgtgtgtaat

SEQ ID NO: 859793 - DNA, 15 bp, Homo sapiens
ccagtgtgtgtaatt

SEQ ID NO: 859794 - DNA, 15 bp, Homo sapiens
cagtgtgtgtaattt

SEQ ID NO: 859795 - DNA, 15 bp, Homo sapiens
agtgtgtgtaatttc

SEQ ID NO: 859796 - DNA, 15 bp, Homo sapiens
gtgtgtgtaatttcc

SEQ ID NO: 859797 - DNA, 15 bp, Homo sapiens
tgtgtgtaatttcca

SEQ ID NO: 859798 - DNA, 15 bp, Homo sapiens
gtgtgtaatttccat

SEQ ID NO: 859799 - DNA, 15 bp, Homo sapiens
tgtgtaatttccatt

SEQ ID NO: 859800 - DNA, 15 bp, Homo sapiens
gtgtaatttccatta

SEQ ID NO: 859801 - DNA, 15 bp, Homo sapiens
tgtaatttccattat

SEQ ID NO: 859802 - DNA, 15 bp, Homo sapiens
gtaatttccattata

SEQ ID NO: 859803 - DNA, 15 bp, Homo sapiens
taatttccattatat

SEQ ID NO: 859804 - DNA, 15 bp, Homo sapiens
aatttccattatatc

SEQ ID NO: 859805 - DNA, 15 bp, Homo sapiens
atttccattatatcc

SEQ ID NO: 859806 - DNA, 15 bp, Homo sapiens
tttccattatatcca

SEQ ID NO: 859807 - DNA, 15 bp, Homo sapiens
ttccattatatccaa

SEQ ID NO: 859808 - DNA, 15 bp, Homo sapiens
tccattatatccaag

SEQ ID NO: 859809 - DNA, 15 bp, Homo sapiens
ccattatatccaaga

SEQ ID NO: 859810 - DNA, 15 bp, Homo sapiens
cattatatccaagag

SEQ ID NO: 859811 - DNA, 15 bp, Homo sapiens
attatatccaagaga

SEQ ID NO: 859812 - DNA, 15 bp, Homo sapiens
ttatatccaagagaa

SEQ ID NO: 859813 - DNA, 15 bp, Homo sapiens
tatatccaagagaaa

SEQ ID NO: 859814 - DNA, 15 bp, Homo sapiens
atatccaagagaaat

SEQ ID NO: 859815 - DNA, 15 bp, Homo sapiens
tatccaagagaaatc

SEQ ID NO: 859816 - DNA, 15 bp, Homo sapiens
atccaagagaaatct

SEQ ID NO: 859817 - DNA, 15 bp, Homo sapiens
tccaagagaaatctt

SEQ ID NO: 859818 - DNA, 15 bp, Homo sapiens
ccaagagaaatctta

SEQ ID NO: 859819 - DNA, 15 bp, Homo sapiens
caagagaaatcttaa

SEQ ID NO: 859820 - DNA, 15 bp, Homo sapiens
aagagaaatcttaat

SEQ ID NO: 859821 - DNA, 15 bp, Homo sapiens
agagaaatcttaatt

SEQ ID NO: 859822 - DNA, 15 bp, Homo sapiens
gagaaatcttaatta

SEQ ID NO: 859823 - DNA, 15 bp, Homo sapiens
agaaatcttaattag

SEQ ID NO: 859824 - DNA, 15 bp, Homo sapiens
gaaatcttaattaga

SEQ ID NO: 859825 - DNA, 15 bp, Homo sapiens
aaatcttaattagag

SEQ ID NO: 859826 - DNA, 15 bp, Homo sapiens
aatcttaattagagg

SEQ ID NO: 859827 - DNA, 15 bp, Homo sapiens
atcttaattagaggg

SEQ ID NO: 859828 - DNA, 15 bp, Homo sapiens
tcttaattagaggga

SEQ ID NO: 859829 - DNA, 15 bp, Homo sapiens
cttaattagagggat

SEQ ID NO: 859830 - DNA, 15 bp, Homo sapiens
ttaattagagggatt

SEQ ID NO: 859831 - DNA, 15 bp, Homo sapiens
taattagagggattt

SEQ ID NO: 859832 - DNA, 15 bp, Homo sapiens
aattagagggatttc

SEQ ID NO: 859833 - DNA, 15 bp, Homo sapiens
attagagggatttct

SEQ ID NO: 859834 - DNA, 15 bp, Homo sapiens
ttagagggatttctc

SEQ ID NO: 859835 - DNA, 15 bp, Homo sapiens
tagagggatttctca

SEQ ID NO: 859836 - DNA, 15 bp, Homo sapiens
agagggatttctcag

SEQ ID NO: 859837 - DNA, 15 bp, Homo sapiens
gagggatttctcagc

SEQ ID NO: 859838 - DNA, 15 bp, Homo sapiens
agggatttctcagct

SEQ ID NO: 859839 - DNA, 15 bp, Homo sapiens
gggatttctcagctg

SEQ ID NO: 859840 - DNA, 15 bp, Homo sapiens
ggatttctcagctgt

SEQ ID NO: 859841 - DNA, 15 bp, Homo sapiens
gatttctcagctgtg

SEQ ID NO: 859842 - DNA, 15 bp, Homo sapiens
atttctcagctgtgc

SEQ ID NO: 859843 - DNA, 15 bp, Homo sapiens
tttctcagctgtgca

SEQ ID NO: 859844 - DNA, 15 bp, Homo sapiens
ttctcagctgtgcaa

SEQ ID NO: 859845 - DNA, 15 bp, Homo sapiens
tctcagctgtgcaat

SEQ ID NO: 859846 - DNA, 15 bp, Homo sapiens
ctcagctgtgcaatt

SEQ ID NO: 859847 - DNA, 15 bp, Homo sapiens
tcagctgtgcaattt

SEQ ID NO: 859848 - DNA, 15 bp, Homo sapiens
cagctgtgcaattta

SEQ ID NO: 859849 - DNA, 15 bp, Homo sapiens
agctgtgcaatttaa

SEQ ID NO: 859850 - DNA, 15 bp, Homo sapiens
gctgtgcaatttaat

SEQ ID NO: 859851 - DNA, 15 bp, Homo sapiens
ctgtgcaatttaatc

SEQ ID NO: 859852 - DNA, 15 bp, Homo sapiens
tgtgcaatttaatcc

SEQ ID NO: 859853 - DNA, 15 bp, Homo sapiens
gtgcaatttaatcca

SEQ ID NO: 859854 - DNA, 15 bp, Homo sapiens
tgcaatttaatccaa

SEQ ID NO: 859855 - DNA, 15 bp, Homo sapiens
gcaatttaatccaac

SEQ ID NO: 859856 - DNA, 15 bp, Homo sapiens
caatttaatccaacc

SEQ ID NO: 859857 - DNA, 15 bp, Homo sapiens
aatttaatccaacca

SEQ ID NO: 859858 - DNA, 15 bp, Homo sapiens
atttaatccaaccat

SEQ ID NO: 859859 - DNA, 15 bp, Homo sapiens
tttaatccaaccatt

SEQ ID NO: 859860 - DNA, 15 bp, Homo sapiens
ttaatccaaccattg

SEQ ID NO: 859861 - DNA, 15 bp, Homo sapiens
taatccaaccattga

SEQ ID NO: 859862 - DNA, 15 bp, Homo sapiens
aatccaaccattgat

SEQ ID NO: 859863 - DNA, 15 bp, Homo sapiens
atccaaccattgatg

SEQ ID NO: 859864 - DNA, 15 bp, Homo sapiens
tccaaccattgatgg

SEQ ID NO: 859865 - DNA, 15 bp, Homo sapiens
ccaaccattgatgga

SEQ ID NO: 859866 - DNA, 15 bp, Homo sapiens
caaccattgatggag

SEQ ID NO: 859867 - DNA, 15 bp, Homo sapiens
aaccattgatggaga

SEQ ID NO: 859868 - DNA, 15 bp, Homo sapiens
accattgatggagac

SEQ ID NO: 859869 - DNA, 15 bp, Homo sapiens
ccattgatggagacc

SEQ ID NO: 859870 - DNA, 15 bp, Homo sapiens
cattgatggagacca

SEQ ID NO: 859871 - DNA, 15 bp, Homo sapiens
attgatggagaccag

SEQ ID NO: 859872 - DNA, 15 bp, Homo sapiens
ttgatggagaccagg

SEQ ID NO: 859873 - DNA, 15 bp, Homo sapiens
tgatggagaccaggg

SEQ ID NO: 859874 - DNA, 15 bp, Homo sapiens
gatggagaccaggga

SEQ ID NO: 859875 - DNA, 15 bp, Homo sapiens
atggagaccagggag

SEQ ID NO: 859876 - DNA, 15 bp, Homo sapiens
tggagaccagggaga

SEQ ID NO: 859877 - DNA, 15 bp, Homo sapiens
ggagaccagggagaa

SEQ ID NO: 859878 - DNA, 15 bp, Homo sapiens
gagaccagggagaag

SEQ ID NO: 859879 - DNA, 15 bp, Homo sapiens
agaccagggagaaga

SEQ ID NO: 859880 - DNA, 15 bp, Homo sapiens
gaccagggagaagaa

SEQ ID NO: 859881 - DNA, 15 bp, Homo sapiens
accagggagaagaaa

SEQ ID NO: 859882 - DNA, 15 bp, Homo sapiens
ccagggagaagaaaa

SEQ ID NO: 859883 - DNA, 15 bp, Homo sapiens
cagggagaagaaaac

SEQ ID NO: 859884 - DNA, 15 bp, Homo sapiens
agggagaagaaaacc

SEQ ID NO: 859885 - DNA, 15 bp, Homo sapiens
gggagaagaaaacct

SEQ ID NO: 859886 - DNA, 15 bp, Homo sapiens
ggagaagaaaacctt

SEQ ID NO: 859887 - DNA, 15 bp, Homo sapiens
gagaagaaaaccttg

SEQ ID NO: 859888 - DNA, 15 bp, Homo sapiens
agaagaaaaccttgg

SEQ ID NO: 859889 - DNA, 15 bp, Homo sapiens
gaagaaaaccttggg

SEQ ID NO: 859890 - DNA, 15 bp, Homo sapiens
aagaaaaccttgggg

SEQ ID NO: 859891 - DNA, 15 bp, Homo sapiens
agaaaaccttggggt

SEQ ID NO: 859892 - DNA, 15 bp, Homo sapiens
gaaaaccttggggtg

SEQ ID NO: 859893 - DNA, 15 bp, Homo sapiens
aaaaccttggggtgg

SEQ ID NO: 859894 - DNA, 15 bp, Homo sapiens
aaaccttggggtggg

SEQ ID NO: 859895 - DNA, 15 bp, Homo sapiens
aaccttggggtggga

SEQ ID NO: 859896 - DNA, 15 bp, Homo sapiens
accttggggtgggat

SEQ ID NO: 859897 - DNA, 15 bp, Homo sapiens
ccttggggtgggatt

SEQ ID NO: 859898 - DNA, 15 bp, Homo sapiens
cttggggtgggattg

SEQ ID NO: 859899 - DNA, 15 bp, Homo sapiens
ttggggtgggattgt

SEQ ID NO: 859900 - DNA, 15 bp, Homo sapiens
tggggtgggattgtc

SEQ ID NO: 859901 - DNA, 15 bp, Homo sapiens
ggggtgggattgtcc

SEQ ID NO: 859902 - DNA, 15 bp, Homo sapiens
gggtgggattgtccc

SEQ ID NO: 859903 - DNA, 15 bp, Homo sapiens
ggtgggattgtccca

SEQ ID NO: 859904 - DNA, 15 bp, Homo sapiens
gtgggattgtcccat

SEQ ID NO: 859905 - DNA, 15 bp, Homo sapiens
tgggattgtcccatt

SEQ ID NO: 859906 - DNA, 15 bp, Homo sapiens
gggattgtcccattc

SEQ ID NO: 859907 - DNA, 15 bp, Homo sapiens
ggattgtcccattct

SEQ ID NO: 859908 - DNA, 15 bp, Homo sapiens
gattgtcccattctc

SEQ ID NO: 859909 - DNA, 15 bp, Homo sapiens
attgtcccattctct

SEQ ID NO: 859910 - DNA, 15 bp, Homo sapiens
ttgtcccattctcta

SEQ ID NO: 859911 - DNA, 15 bp, Homo sapiens
tgtcccattctctaa

SEQ ID NO: 859912 - DNA, 15 bp, Homo sapiens
gtcccattctctaag

SEQ ID NO: 859913 - DNA, 15 bp, Homo sapiens
tcccattctctaaga

SEQ ID NO: 859914 - DNA, 15 bp, Homo sapiens
cccattctctaagaa

SEQ ID NO: 859915 - DNA, 15 bp, Homo sapiens
ccattctctaagaaa

SEQ ID NO: 859916 - DNA, 15 bp, Homo sapiens
cattctctaagaaac

SEQ ID NO: 859917 - DNA, 15 bp, Homo sapiens
attctctaagaaaca

SEQ ID NO: 859918 - DNA, 15 bp, Homo sapiens
ttctctaagaaacat

SEQ ID NO: 859919 - DNA, 15 bp, Homo sapiens
tctctaagaaacatt

SEQ ID NO: 859920 - DNA, 15 bp, Homo sapiens
ctctaagaaacattc

SEQ ID NO: 859921 - DNA, 15 bp, Homo sapiens
tctaagaaacattct

SEQ ID NO: 859922 - DNA, 15 bp, Homo sapiens
ctaagaaacattctg

SEQ ID NO: 859923 - DNA, 15 bp, Homo sapiens
taagaaacattctgt

SEQ ID NO: 859924 - DNA, 15 bp, Homo sapiens
aagaaacattctgtg

SEQ ID NO: 859925 - DNA, 15 bp, Homo sapiens
agaaacattctgtga

SEQ ID NO: 859926 - DNA, 15 bp, Homo sapiens
gaaacattctgtgag

SEQ ID NO: 859927 - DNA, 15 bp, Homo sapiens
aaacattctgtgagt

SEQ ID NO: 859928 - DNA, 15 bp, Homo sapiens
aacattctgtgagtg

SEQ ID NO: 859929 - DNA, 15 bp, Homo sapiens
acattctgtgagtgg

SEQ ID NO: 859930 - DNA, 15 bp, Homo sapiens
cattctgtgagtggc

SEQ ID NO: 859931 - DNA, 15 bp, Homo sapiens
attctgtgagtggca

SEQ ID NO: 859932 - DNA, 15 bp, Homo sapiens
ttctgtgagtggcat

SEQ ID NO: 859933 - DNA, 15 bp, Homo sapiens
tctgtgagtggcatg

SEQ ID NO: 859934 - DNA, 15 bp, Homo sapiens
ctgtgagtggcatgt

SEQ ID NO: 859935 - DNA, 15 bp, Homo sapiens
tgtgagtggcatgtt

SEQ ID NO: 859936 - DNA, 15 bp, Homo sapiens
gtgagtggcatgttg

SEQ ID NO: 859937 - DNA, 15 bp, Homo sapiens
tgagtggcatgttgt

SEQ ID NO: 859938 - DNA, 15 bp, Homo sapiens
gagtggcatgttgtc

SEQ ID NO: 859939 - DNA, 15 bp, Homo sapiens
agtggcatgttgtcc

SEQ ID NO: 859940 - DNA, 15 bp, Homo sapiens
gtggcatgttgtccc

SEQ ID NO: 859941 - DNA, 15 bp, Homo sapiens
tggcatgttgtccct

SEQ ID NO: 859942 - DNA, 15 bp, Homo sapiens
ggcatgttgtccctc

SEQ ID NO: 859943 - DNA, 15 bp, Homo sapiens
gcatgttgtccctcc

SEQ ID NO: 859944 - DNA, 15 bp, Homo sapiens
catgttgtccctccc

SEQ ID NO: 859945 - DNA, 15 bp, Homo sapiens
atgttgtccctccct

SEQ ID NO: 859946 - DNA, 15 bp, Homo sapiens
tgttgtccctccctt

SEQ ID NO: 859947 - DNA, 15 bp, Homo sapiens
gttgtccctcccttg

SEQ ID NO: 859948 - DNA, 15 bp, Homo sapiens
ttgtccctcccttgc

SEQ ID NO: 859949 - DNA, 15 bp, Homo sapiens
tgtccctcccttgcc

SEQ ID NO: 859950 - DNA, 15 bp, Homo sapiens
gtccctcccttgcct

SEQ ID NO: 859951 - DNA, 15 bp, Homo sapiens
cctcccttgcctcca

SEQ ID NO: 859952 - DNA, 15 bp, Homo sapiens
ctcccttgcctccaa

SEQ ID NO: 859953 - DNA, 15 bp, Homo sapiens
tcccttgcctccaaa

SEQ ID NO: 859954 - DNA, 15 bp, Homo sapiens
cccttgcctccaaaa

SEQ ID NO: 859955 - DNA, 15 bp, Homo sapiens
ccttgcctccaaaat

SEQ ID NO: 859956 - DNA, 15 bp, Homo sapiens
cttgcctccaaaatc

SEQ ID NO: 859957 - DNA, 15 bp, Homo sapiens
ttgcctccaaaatca

SEQ ID NO: 859958 - DNA, 15 bp, Homo sapiens
tgcctccaaaatcag

SEQ ID NO: 859959 - DNA, 15 bp, Homo sapiens
gcctccaaaatcagc

SEQ ID NO: 859960 - DNA, 15 bp, Homo sapiens
cctccaaaatcagcc

SEQ ID NO: 859961 - DNA, 15 bp, Homo sapiens
ctccaaaatcagccc

SEQ ID NO: 859962 - DNA, 15 bp, Homo sapiens
tccaaaatcagcccc

SEQ ID NO: 859963 - DNA, 15 bp, Homo sapiens
ccaaaatcagccccc

SEQ ID NO: 859964 - DNA, 15 bp, Homo sapiens
caaaatcagccccca

SEQ ID NO: 859965 - DNA, 15 bp, Homo sapiens
aaaatcagcccccac

SEQ ID NO: 859966 - DNA, 15 bp, Homo sapiens
aaatcagcccccacc

SEQ ID NO: 859967 - DNA, 15 bp, Homo sapiens
aatcagcccccacca

SEQ ID NO: 859968 - DNA, 15 bp, Homo sapiens
atcagcccccaccag

SEQ ID NO: 859969 - DNA, 15 bp, Homo sapiens
tcagcccccaccagg

SEQ ID NO: 859970 - DNA, 15 bp, Homo sapiens
cagcccccaccaggg

SEQ ID NO: 859971 - DNA, 15 bp, Homo sapiens
agcccccaccaggga

SEQ ID NO: 859972 - DNA, 15 bp, Homo sapiens
gcccccaccagggaa

SEQ ID NO: 859973 - DNA, 15 bp, Homo sapiens
cccccaccagggaac

SEQ ID NO: 859974 - DNA, 15 bp, Homo sapiens
ccccaccagggaaca

SEQ ID NO: 859975 - DNA, 15 bp, Homo sapiens
cccaccagggaacac

SEQ ID NO: 859976 - DNA, 15 bp, Homo sapiens
ccaccagggaacacg

SEQ ID NO: 859977 - DNA, 15 bp, Homo sapiens
caccagggaacacgt

SEQ ID NO: 859978 - DNA, 15 bp, Homo sapiens
accagggaacacgtg

SEQ ID NO: 859979 - DNA, 15 bp, Homo sapiens
ccagggaacacgtgg

SEQ ID NO: 859980 - DNA, 15 bp, Homo sapiens
cagggaacacgtgga

SEQ ID NO: 859981 - DNA, 15 bp, Homo sapiens
agggaacacgtggag

SEQ ID NO: 859982 - DNA, 15 bp, Homo sapiens
gggaacacgtggagc

SEQ ID NO: 859983 - DNA, 15 bp, Homo sapiens
ggaacacgtggagct

SEQ ID NO: 859984 - DNA, 15 bp, Homo sapiens
gaacacgtggagctt

SEQ ID NO: 859985 - DNA, 15 bp, Homo sapiens
aacacgtggagcttt

SEQ ID NO: 859986 - DNA, 15 bp, Homo sapiens
acacgtggagctttg

SEQ ID NO: 859987 - DNA, 15 bp, Homo sapiens
cacgtggagctttgg

SEQ ID NO: 859988 - DNA, 15 bp, Homo sapiens
acgtggagctttggg

SEQ ID NO: 859989 - DNA, 15 bp, Homo sapiens
cgtggagctttgggc

SEQ ID NO: 859990 - DNA, 15 bp, Homo sapiens
gtggagctttgggct

SEQ ID NO: 859991 - DNA, 15 bp, Homo sapiens
tggagctttgggctg

SEQ ID NO: 859992 - DNA, 15 bp, Homo sapiens
ggagctttgggctgc

SEQ ID NO: 859993 - DNA, 15 bp, Homo sapiens
gagctttgggctgcg

SEQ ID NO: 859994 - DNA, 15 bp, Homo sapiens
agctttgggctgcgt

SEQ ID NO: 859995 - DNA, 15 bp, Homo sapiens
gctttgggctgcgtg

SEQ ID NO: 859996 - DNA, 15 bp, Homo sapiens
ctttgggctgcgtgt

SEQ ID NO: 859997 - DNA, 15 bp, Homo sapiens
tttgggctgcgtgtt

SEQ ID NO: 859998 - DNA, 15 bp, Homo sapiens
ttgggctgcgtgttg

SEQ ID NO: 859999 - DNA, 15 bp, Homo sapiens
tgggctgcgtgttga

SEQ ID NO: 860000 - DNA, 15 bp, Homo sapiens
gggctgcgtgttgaa

SEQ ID NO: 860001 - DNA, 15 bp, Homo sapiens
ggctgcgtgttgaag

SEQ ID NO: 860002 - DNA, 15 bp, Homo sapiens
gctgcgtgttgaagc

SEQ ID NO: 860003 - DNA, 15 bp, Homo sapiens
ctgcgtgttgaagcc

SEQ ID NO: 860004 - DNA, 15 bp, Homo sapiens
tgcgtgttgaagcct

SEQ ID NO: 860005 - DNA, 15 bp, Homo sapiens
gcgtgttgaagcctt

SEQ ID NO: 860006 - DNA, 15 bp, Homo sapiens
cgtgttgaagcctta

SEQ ID NO: 860007 - DNA, 15 bp, Homo sapiens
gtgttgaagccttaa

SEQ ID NO: 860008 - DNA, 15 bp, Homo sapiens
tgttgaagccttaac

SEQ ID NO: 860009 - DNA, 15 bp, Homo sapiens
gttgaagccttaact

SEQ ID NO: 860010 - DNA, 15 bp, Homo sapiens
ttgaagccttaactg

SEQ ID NO: 860011 - DNA, 15 bp, Homo sapiens
tgaagccttaactgg

SEQ ID NO: 860012 - DNA, 15 bp, Homo sapiens
gaagccttaactggt

SEQ ID NO: 860013 - DNA, 15 bp, Homo sapiens
aagccttaactggta

SEQ ID NO: 860014 - DNA, 15 bp, Homo sapiens
agccttaactggtat

SEQ ID NO: 860015 - DNA, 15 bp, Homo sapiens
gccttaactggtatt

SEQ ID NO: 860016 - DNA, 15 bp, Homo sapiens
ccttaactggtattg

SEQ ID NO: 860017 - DNA, 15 bp, Homo sapiens
cttaactggtattga

SEQ ID NO: 860018 - DNA, 15 bp, Homo sapiens
ttaactggtattgac

SEQ ID NO: 860019 - DNA, 15 bp, Homo sapiens
taactggtattgaca

SEQ ID NO: 860020 - DNA, 15 bp, Homo sapiens
aactggtattgacag

SEQ ID NO: 860021 - DNA, 15 bp, Homo sapiens
actggtattgacagc

SEQ ID NO: 860022 - DNA, 15 bp, Homo sapiens
ctggtattgacagct

SEQ ID NO: 860023 - DNA, 15 bp, Homo sapiens
tggtattgacagctc

SEQ ID NO: 860024 - DNA, 15 bp, Homo sapiens
ggtattgacagctca

SEQ ID NO: 860025 - DNA, 15 bp, Homo sapiens
gtattgacagctcag

SEQ ID NO: 860026 - DNA, 15 bp, Homo sapiens
tattgacagctcagg

SEQ ID NO: 860027 - DNA, 15 bp, Homo sapiens
attgacagctcaggg

SEQ ID NO: 860028 - DNA, 15 bp, Homo sapiens
ttgacagctcagggg

SEQ ID NO: 860029 - DNA, 15 bp, Homo sapiens
tgacagctcaggggg

SEQ ID NO: 860030 - DNA, 15 bp, Homo sapiens
gacagctcagggggc

SEQ ID NO: 860031 - DNA, 15 bp, Homo sapiens
acagctcagggggcg

SEQ ID NO: 860032 - DNA, 15 bp, Homo sapiens
cagctcagggggcga

SEQ ID NO: 860033 - DNA, 15 bp, Homo sapiens
agctcagggggcgat

SEQ ID NO: 860034 - DNA, 15 bp, Homo sapiens
gctcagggggcgatt

SEQ ID NO: 860035 - DNA, 15 bp, Homo sapiens
ctcagggggcgattt

SEQ ID NO: 860036 - DNA, 15 bp, Homo sapiens
tcagggggcgatttg

SEQ ID NO: 860037 - DNA, 15 bp, Homo sapiens
cagggggcgatttgc

SEQ ID NO: 860038 - DNA, 15 bp, Homo sapiens
agggggcgatttgcc

SEQ ID NO: 860039 - DNA, 15 bp, Homo sapiens
gggggcgatttgcct

SEQ ID NO: 860040 - DNA, 15 bp, Homo sapiens
ggggcgatttgcctt

SEQ ID NO: 860041 - DNA, 15 bp, Homo sapiens
gggcgatttgccttc

SEQ ID NO: 860042 - DNA, 15 bp, Homo sapiens
ggcgatttgccttct

SEQ ID NO: 860043 - DNA, 15 bp, Homo sapiens
gcgatttgccttctc

SEQ ID NO: 860044 - DNA, 15 bp, Homo sapiens
cgatttgccttctcc

SEQ ID NO: 860045 - DNA, 15 bp, Homo sapiens
gatttgccttctccg

SEQ ID NO: 860046 - DNA, 15 bp, Homo sapiens
atttgccttctccgt

SEQ ID NO: 860047 - DNA, 15 bp, Homo sapiens
tttgccttctccgtt

SEQ ID NO: 860048 - DNA, 15 bp, Homo sapiens
ttgccttctccgttt

SEQ ID NO: 860049 - DNA, 15 bp, Homo sapiens
tgccttctccgtttc

SEQ ID NO: 860050 - DNA, 15 bp, Homo sapiens
gccttctccgtttca

SEQ ID NO: 860051 - DNA, 15 bp, Homo sapiens
ccttctccgtttcat

SEQ ID NO: 860052 - DNA, 15 bp, Homo sapiens
cttctccgtttcatc

SEQ ID NO: 860053 - DNA, 15 bp, Homo sapiens
ttctccgtttcatca

SEQ ID NO: 860054 - DNA, 15 bp, Homo sapiens
tctccgtttcatcag

SEQ ID NO: 860055 - DNA, 15 bp, Homo sapiens
ctccgtttcatcagt

SEQ ID NO: 860056 - DNA, 15 bp, Homo sapiens
tccgtttcatcagtc

SEQ ID NO: 860057 - DNA, 15 bp, Homo sapiens
ccgtttcatcagtcg

SEQ ID NO: 860058 - DNA, 15 bp, Homo sapiens
cgtttcatcagtcgt

SEQ ID NO: 860059 - DNA, 15 bp, Homo sapiens
gtttcatcagtcgtc

SEQ ID NO: 860060 - DNA, 15 bp, Homo sapiens
tttcatcagtcgtcc

SEQ ID NO: 860061 - DNA, 15 bp, Homo sapiens
ttcatcagtcgtcct

SEQ ID NO: 860062 - DNA, 15 bp, Homo sapiens
tcatcagtcgtcctg

SEQ ID NO: 860063 - DNA, 15 bp, Homo sapiens
catcagtcgtcctgc

SEQ ID NO: 860064 - DNA, 15 bp, Homo sapiens
atcagtcgtcctgcc

SEQ ID NO: 860065 - DNA, 15 bp, Homo sapiens
tcagtcgtcctgccg

SEQ ID NO: 860066 - DNA, 15 bp, Homo sapiens
cagtcgtcctgccgt

SEQ ID NO: 860067 - DNA, 15 bp, Homo sapiens
agtcgtcctgccgtc

SEQ ID NO: 860068 - DNA, 15 bp, Homo sapiens
gtcgtcctgccgtca

SEQ ID NO: 860069 - DNA, 15 bp, Homo sapiens
tcgtcctgccgtcat

SEQ ID NO: 860070 - DNA, 15 bp, Homo sapiens
cgtcctgccgtcatc

SEQ ID NO: 860071 - DNA, 15 bp, Homo sapiens
gtcctgccgtcatca

SEQ ID NO: 860072 - DNA, 15 bp, Homo sapiens
tcctgccgtcatcac

SEQ ID NO: 860073 - DNA, 15 bp, Homo sapiens
cctgccgtcatcact

SEQ ID NO: 860074 - DNA, 15 bp, Homo sapiens
ctgccgtcatcactc

SEQ ID NO: 860075 - DNA, 15 bp, Homo sapiens
tgccgtcatcactcc

SEQ ID NO: 860076 - DNA, 15 bp, Homo sapiens
gccgtcatcactcca

SEQ ID NO: 860077 - DNA, 15 bp, Homo sapiens
ccgtcatcactccat

SEQ ID NO: 860078 - DNA, 15 bp, Homo sapiens
cgtcatcactccatc

SEQ ID NO: 860079 - DNA, 15 bp, Homo sapiens
gtcatcactccatca

SEQ ID NO: 860080 - DNA, 15 bp, Homo sapiens
tcatcactccatcaa

SEQ ID NO: 860081 - DNA, 15 bp, Homo sapiens
catcactccatcaaa

SEQ ID NO: 860082 - DNA, 15 bp, Homo sapiens
atcactccatcaaac

SEQ ID NO: 860083 - DNA, 15 bp, Homo sapiens
tcactccatcaaaca

SEQ ID NO: 860084 - DNA, 15 bp, Homo sapiens
cactccatcaaacaa

SEQ ID NO: 860085 - DNA, 15 bp, Homo sapiens
actccatcaaacaaa

SEQ ID NO: 860086 - DNA, 15 bp, Homo sapiens
ctccatcaaacaaaa

SEQ ID NO: 860087 - DNA, 15 bp, Homo sapiens
tccatcaaacaaaag

SEQ ID NO: 860088 - DNA, 15 bp, Homo sapiens
ccatcaaacaaaagc

SEQ ID NO: 860089 - DNA, 15 bp, Homo sapiens
catcaaacaaaagca

SEQ ID NO: 860090 - DNA, 15 bp, Homo sapiens
atcaaacaaaagcag

SEQ ID NO: 860091 - DNA, 15 bp, Homo sapiens
tcaaacaaaagcaga

SEQ ID NO: 860092 - DNA, 15 bp, Homo sapiens
caaacaaaagcagat

SEQ ID NO: 860093 - DNA, 15 bp, Homo sapiens
aaacaaaagcagatt

SEQ ID NO: 860094 - DNA, 15 bp, Homo sapiens
aacaaaagcagattt

SEQ ID NO: 860095 - DNA, 15 bp, Homo sapiens
acaaaagcagatttc

SEQ ID NO: 860096 - DNA, 15 bp, Homo sapiens
caaaagcagatttca

SEQ ID NO: 860097 - DNA, 15 bp, Homo sapiens
aaaagcagatttcat

SEQ ID NO: 860098 - DNA, 15 bp, Homo sapiens
aaagcagatttcatc

SEQ ID NO: 860099 - DNA, 15 bp, Homo sapiens
aagcagatttcatcc

SEQ ID NO: 860100 - DNA, 15 bp, Homo sapiens
agcagatttcatcca

SEQ ID NO: 860101 - DNA, 15 bp, Homo sapiens
gcagatttcatccat

SEQ ID NO: 860102 - DNA, 15 bp, Homo sapiens
cagatttcatccatc

SEQ ID NO: 860103 - DNA, 15 bp, Homo sapiens
agatttcatccatcc

SEQ ID NO: 860104 - DNA, 15 bp, Homo sapiens
gatttcatccatccc

SEQ ID NO: 860105 - DNA, 15 bp, Homo sapiens
atttcatccatccct

SEQ ID NO: 860106 - DNA, 15 bp, Homo sapiens
tttcatccatccctg

SEQ ID NO: 860107 - DNA, 15 bp, Homo sapiens
ttcatccatccctgt

SEQ ID NO: 860108 - DNA, 15 bp, Homo sapiens
tcatccatccctgtg

SEQ ID NO: 860109 - DNA, 15 bp, Homo sapiens
catccatccctgtgt

SEQ ID NO: 860110 - DNA, 15 bp, Homo sapiens
atccatccctgtgtg

SEQ ID NO: 860111 - DNA, 15 bp, Homo sapiens
tccatccctgtgtga

SEQ ID NO: 860112 - DNA, 15 bp, Homo sapiens
ccatccctgtgtgag

SEQ ID NO: 860113 - DNA, 15 bp, Homo sapiens
catccctgtgtgaga

SEQ ID NO: 860114 - DNA, 15 bp, Homo sapiens
atccctgtgtgagac

SEQ ID NO: 860115 - DNA, 15 bp, Homo sapiens
tccctgtgtgagacc

SEQ ID NO: 860116 - DNA, 15 bp, Homo sapiens
ccctgtgtgagacca

SEQ ID NO: 860117 - DNA, 15 bp, Homo sapiens
cctgtgtgagaccac

SEQ ID NO: 860118 - DNA, 15 bp, Homo sapiens
ctgtgtgagaccact

SEQ ID NO: 860119 - DNA, 15 bp, Homo sapiens
tgtgtgagaccactc

SEQ ID NO: 860120 - DNA, 15 bp, Homo sapiens
gtgtgagaccactca

SEQ ID NO: 860121 - DNA, 15 bp, Homo sapiens
tgtgagaccactcac

SEQ ID NO: 860122 - DNA, 15 bp, Homo sapiens
gtgagaccactcacc

SEQ ID NO: 860123 - DNA, 15 bp, Homo sapiens
tgagaccactcacct

SEQ ID NO: 860124 - DNA, 15 bp, Homo sapiens
gagaccactcacctt

SEQ ID NO: 860125 - DNA, 15 bp, Homo sapiens
agaccactcaccttt

SEQ ID NO: 860126 - DNA, 15 bp, Homo sapiens
gaccactcacctttg

SEQ ID NO: 860127 - DNA, 15 bp, Homo sapiens
accactcacctttga

SEQ ID NO: 860128 - DNA, 15 bp, Homo sapiens
ccactcacctttgac

SEQ ID NO: 860129 - DNA, 15 bp, Homo sapiens
cactcacctttgacc

SEQ ID NO: 860130 - DNA, 15 bp, Homo sapiens
actcacctttgacca

SEQ ID NO: 860131 - DNA, 15 bp, Homo sapiens
ctcacctttgaccat

SEQ ID NO: 860132 - DNA, 15 bp, Homo sapiens
tcacctttgaccatt

SEQ ID NO: 860133 - DNA, 15 bp, Homo sapiens
cacctttgaccatta

SEQ ID NO: 860134 - DNA, 15 bp, Homo sapiens
acctttgaccattaa

SEQ ID NO: 860135 - DNA, 15 bp, Homo sapiens
cctttgaccattaat

SEQ ID NO: 860136 - DNA, 15 bp, Homo sapiens
ctttgaccattaata

SEQ ID NO: 860137 - DNA, 15 bp, Homo sapiens
tttgaccattaataa

SEQ ID NO: 860138 - DNA, 15 bp, Homo sapiens
ttgaccattaataat

SEQ ID NO: 860139 - DNA, 15 bp, Homo sapiens
tgaccattaataata

SEQ ID NO: 860140 - DNA, 15 bp, Homo sapiens
gaccattaataataa

SEQ ID NO: 860141 - DNA, 15 bp, Homo sapiens
accattaataataag

SEQ ID NO: 860142 - DNA, 15 bp, Homo sapiens
ccattaataataagt

SEQ ID NO: 860143 - DNA, 15 bp, Homo sapiens
cattaataataagtt

SEQ ID NO: 860144 - DNA, 15 bp, Homo sapiens
attaataataagtta

SEQ ID NO: 860145 - DNA, 15 bp, Homo sapiens
ttaataataagttag

SEQ ID NO: 860146 - DNA, 15 bp, Homo sapiens
taataataagttaga

SEQ ID NO: 860147 - DNA, 15 bp, Homo sapiens
aataataagttagaa

SEQ ID NO: 860148 - DNA, 15 bp, Homo sapiens
ataataagttagaaa

SEQ ID NO: 860149 - DNA, 15 bp, Homo sapiens
taataagttagaaaa

SEQ ID NO: 860150 - DNA, 15 bp, Homo sapiens
aataagttagaaaaa

SEQ ID NO: 860151 - DNA, 15 bp, Homo sapiens
ataagttagaaaaat

SEQ ID NO: 860152 - DNA, 15 bp, Homo sapiens
taagttagaaaaatc

SEQ ID NO: 860153 - DNA, 15 bp, Homo sapiens
aagttagaaaaatcc

SEQ ID NO: 860154 - DNA, 15 bp, Homo sapiens
agttagaaaaatcca

SEQ ID NO: 860155 - DNA, 15 bp, Homo sapiens
gttagaaaaatccat

SEQ ID NO: 860156 - DNA, 15 bp, Homo sapiens
ttagaaaaatccatt

SEQ ID NO: 860157 - DNA, 15 bp, Homo sapiens
tagaaaaatccattc

SEQ ID NO: 860158 - DNA, 15 bp, Homo sapiens
agaaaaatccattcc

SEQ ID NO: 860159 - DNA, 15 bp, Homo sapiens
gaaaaatccattcca

SEQ ID NO: 860160 - DNA, 15 bp, Homo sapiens
aaaaatccattccaa

SEQ ID NO: 860161 - DNA, 15 bp, Homo sapiens
aaaatccattccaat

SEQ ID NO: 860162 - DNA, 15 bp, Homo sapiens
aaatccattccaatt

SEQ ID NO: 860163 - DNA, 15 bp, Homo sapiens
aatccattccaattt

SEQ ID NO: 860164 - DNA, 15 bp, Homo sapiens
atccattccaatttg

SEQ ID NO: 860165 - DNA, 15 bp, Homo sapiens
tccattccaatttga

SEQ ID NO: 860166 - DNA, 15 bp, Homo sapiens
ccattccaatttgag

SEQ ID NO: 860167 - DNA, 15 bp, Homo sapiens
cattccaatttgagc

SEQ ID NO: 860168 - DNA, 15 bp, Homo sapiens
attccaatttgagcc

SEQ ID NO: 860169 - DNA, 15 bp, Homo sapiens
ttccaatttgagccc

SEQ ID NO: 860170 - DNA, 15 bp, Homo sapiens
tccaatttgagcccc

SEQ ID NO: 860171 - DNA, 15 bp, Homo sapiens
ccaatttgagcccct

SEQ ID NO: 860172 - DNA, 15 bp, Homo sapiens
caatttgagcccctt

SEQ ID NO: 860173 - DNA, 15 bp, Homo sapiens
aatttgagccccttt

SEQ ID NO: 860174 - DNA, 15 bp, Homo sapiens
atttgagcccctttt

SEQ ID NO: 860175 - DNA, 15 bp, Homo sapiens
tttgagccccttttt

SEQ ID NO: 860176 - DNA, 15 bp, Homo sapiens
ttgagcccctttttg

SEQ ID NO: 860177 - DNA, 15 bp, Homo sapiens
tgagcccctttttgg

SEQ ID NO: 860178 - DNA, 15 bp, Homo sapiens
gagcccctttttggg

SEQ ID NO: 860179 - DNA, 15 bp, Homo sapiens
agcccctttttgggc

SEQ ID NO: 860180 - DNA, 15 bp, Homo sapiens
gcccctttttgggcc

SEQ ID NO: 860181 - DNA, 15 bp, Homo sapiens
cccctttttgggcct

SEQ ID NO: 860182 - DNA, 15 bp, Homo sapiens
ccctttttgggcctg

SEQ ID NO: 860183 - DNA, 15 bp, Homo sapiens
cctttttgggcctgc

SEQ ID NO: 860184 - DNA, 15 bp, Homo sapiens
ctttttgggcctgca

SEQ ID NO: 860185 - DNA, 15 bp, Homo sapiens
tttttgggcctgcat

SEQ ID NO: 860186 - DNA, 15 bp, Homo sapiens
ttttgggcctgcata

SEQ ID NO: 860187 - DNA, 15 bp, Homo sapiens
tttgggcctgcataa

SEQ ID NO: 860188 - DNA, 15 bp, Homo sapiens
ttgggcctgcataag

SEQ ID NO: 860189 - DNA, 15 bp, Homo sapiens
tgggcctgcataagc

SEQ ID NO: 860190 - DNA, 15 bp, Homo sapiens
gggcctgcataagcc

SEQ ID NO: 860191 - DNA, 15 bp, Homo sapiens
ggcctgcataagccc

SEQ ID NO: 860192 - DNA, 15 bp, Homo sapiens
gcctgcataagccct

SEQ ID NO: 860193 - DNA, 15 bp, Homo sapiens
cctgcataagccctt

SEQ ID NO: 860194 - DNA, 15 bp, Homo sapiens
ctgcataagcccttc

SEQ ID NO: 860195 - DNA, 15 bp, Homo sapiens
tgcataagcccttct

SEQ ID NO: 860196 - DNA, 15 bp, Homo sapiens
gcataagcccttctt

SEQ ID NO: 860197 - DNA, 15 bp, Homo sapiens
cataagcccttcttc

SEQ ID NO: 860198 - DNA, 15 bp, Homo sapiens
ataagcccttcttct

SEQ ID NO: 860199 - DNA, 15 bp, Homo sapiens
taagcccttcttctc

SEQ ID NO: 860200 - DNA, 15 bp, Homo sapiens
aagcccttcttctcc

SEQ ID NO: 860201 - DNA, 15 bp, Homo sapiens
agcccttcttctcca

SEQ ID NO: 860202 - DNA, 15 bp, Homo sapiens
gcccttcttctccaa

SEQ ID NO: 860203 - DNA, 15 bp, Homo sapiens
cccttcttctccaat

SEQ ID NO: 860204 - DNA, 15 bp, Homo sapiens
ccttcttctccaatt

SEQ ID NO: 860205 - DNA, 15 bp, Homo sapiens
cttcttctccaatta

SEQ ID NO: 860206 - DNA, 15 bp, Homo sapiens
ttcttctccaattat

SEQ ID NO: 860207 - DNA, 15 bp, Homo sapiens
tcttctccaattata

SEQ ID NO: 860208 - DNA, 15 bp, Homo sapiens
cttctccaattataa

SEQ ID NO: 860209 - DNA, 15 bp, Homo sapiens
ttctccaattataaa

SEQ ID NO: 860210 - DNA, 15 bp, Homo sapiens
tctccaattataaaa

SEQ ID NO: 860211 - DNA, 15 bp, Homo sapiens
ctccaattataaaaa

SEQ ID NO: 860212 - DNA, 15 bp, Homo sapiens
tccaattataaaaat

SEQ ID NO: 860213 - DNA, 15 bp, Homo sapiens
ccaattataaaaatg

SEQ ID NO: 860214 - DNA, 15 bp, Homo sapiens
caattataaaaatgt

SEQ ID NO: 860215 - DNA, 15 bp, Homo sapiens
aattataaaaatgtc

SEQ ID NO: 860216 - DNA, 15 bp, Homo sapiens
attataaaaatgtct

SEQ ID NO: 860217 - DNA, 15 bp, Homo sapiens
ttataaaaatgtctg

SEQ ID NO: 860218 - DNA, 15 bp, Homo sapiens
tataaaaatgtctgt

SEQ ID NO: 860219 - DNA, 15 bp, Homo sapiens
ataaaaatgtctgtc

SEQ ID NO: 860220 - DNA, 15 bp, Homo sapiens
taaaaatgtctgtct

SEQ ID NO: 860221 - DNA, 15 bp, Homo sapiens
aaaaatgtctgtctc

SEQ ID NO: 860222 - DNA, 15 bp, Homo sapiens
aaaatgtctgtctct

SEQ ID NO: 860223 - DNA, 15 bp, Homo sapiens
aaatgtctgtctcta

SEQ ID NO: 860224 - DNA, 15 bp, Homo sapiens
aatgtctgtctctat

SEQ ID NO: 860225 - DNA, 15 bp, Homo sapiens
atgtctgtctctatg

SEQ ID NO: 860226 - DNA, 15 bp, Homo sapiens
tgtctgtctctatgt

SEQ ID NO: 860227 - DNA, 15 bp, Homo sapiens
gtctgtctctatgtg

SEQ ID NO: 860228 - DNA, 15 bp, Homo sapiens
tctgtctctatgtga

SEQ ID NO: 860229 - DNA, 15 bp, Homo sapiens
ctgtctctatgtgaa

SEQ ID NO: 860230 - DNA, 15 bp, Homo sapiens
tgtctctatgtgaaa

SEQ ID NO: 860231 - DNA, 15 bp, Homo sapiens
gtctctatgtgaaat

SEQ ID NO: 860232 - DNA, 15 bp, Homo sapiens
tctctatgtgaaatt

SEQ ID NO: 860233 - DNA, 15 bp, Homo sapiens
ctctatgtgaaattc

SEQ ID NO: 860234 - DNA, 15 bp, Homo sapiens
tctatgtgaaattcc

SEQ ID NO: 860235 - DNA, 15 bp, Homo sapiens
ctatgtgaaattcca

SEQ ID NO: 860236 - DNA, 15 bp, Homo sapiens
tatgtgaaattccac

SEQ ID NO: 860237 - DNA, 15 bp, Homo sapiens
atgtgaaattccact

SEQ ID NO: 860238 - DNA, 15 bp, Homo sapiens
tgtgaaattccactg

SEQ ID NO: 860239 - DNA, 15 bp, Homo sapiens
gtgaaattccactgg

SEQ ID NO: 860240 - DNA, 15 bp, Homo sapiens
tgaaattccactggc

SEQ ID NO: 860241 - DNA, 15 bp, Homo sapiens
gaaattccactggca

SEQ ID NO: 860242 - DNA, 15 bp, Homo sapiens
aaattccactggcag

SEQ ID NO: 860243 - DNA, 15 bp, Homo sapiens
aattccactggcagt

SEQ ID NO: 860244 - DNA, 15 bp, Homo sapiens
attccactggcagtg

SEQ ID NO: 860245 - DNA, 15 bp, Homo sapiens
ttccactggcagtgc

SEQ ID NO: 860246 - DNA, 15 bp, Homo sapiens
tccactggcagtgct

SEQ ID NO: 860247 - DNA, 15 bp, Homo sapiens
ccactggcagtgctc

SEQ ID NO: 860248 - DNA, 15 bp, Homo sapiens
cactggcagtgctcc

SEQ ID NO: 860249 - DNA, 15 bp, Homo sapiens
actggcagtgctcca

SEQ ID NO: 860250 - DNA, 15 bp, Homo sapiens
ctggcagtgctccaa

SEQ ID NO: 860251 - DNA, 15 bp, Homo sapiens
tggcagtgctccaat

SEQ ID NO: 860252 - DNA, 15 bp, Homo sapiens
ggcagtgctccaata

SEQ ID NO: 860253 - DNA, 15 bp, Homo sapiens
gcagtgctccaatag

SEQ ID NO: 860254 - DNA, 15 bp, Homo sapiens
cagtgctccaatagc

SEQ ID NO: 860255 - DNA, 15 bp, Homo sapiens
agtgctccaatagca

SEQ ID NO: 860256 - DNA, 15 bp, Homo sapiens
gtgctccaatagcaa

SEQ ID NO: 860257 - DNA, 15 bp, Homo sapiens
tgctccaatagcaat

SEQ ID NO: 860258 - DNA, 15 bp, Homo sapiens
gctccaatagcaatc

SEQ ID NO: 860259 - DNA, 15 bp, Homo sapiens
ctccaatagcaatcc

SEQ ID NO: 860260 - DNA, 15 bp, Homo sapiens
tccaatagcaatccc

SEQ ID NO: 860261 - DNA, 15 bp, Homo sapiens
ccaatagcaatcccc

SEQ ID NO: 860262 - DNA, 15 bp, Homo sapiens
caatagcaatcccca

SEQ ID NO: 860263 - DNA, 15 bp, Homo sapiens
aatagcaatccccag

SEQ ID NO: 860264 - DNA, 15 bp, Homo sapiens
atagcaatccccagg

SEQ ID NO: 860265 - DNA, 15 bp, Homo sapiens
tagcaatccccaggc

SEQ ID NO: 860266 - DNA, 15 bp, Homo sapiens
agcaatccccaggca

SEQ ID NO: 860267 - DNA, 15 bp, Homo sapiens
gcaatccccaggcat

SEQ ID NO: 860268 - DNA, 15 bp, Homo sapiens
caatccccaggcatc

SEQ ID NO: 860269 - DNA, 15 bp, Homo sapiens
aatccccaggcatcc

SEQ ID NO: 860270 - DNA, 15 bp, Homo sapiens
atccccaggcatccc

SEQ ID NO: 860271 - DNA, 15 bp, Homo sapiens
tccccaggcatccct

SEQ ID NO: 860272 - DNA, 15 bp, Homo sapiens
ccccaggcatccctc

SEQ ID NO: 860273 - DNA, 15 bp, Homo sapiens
cccaggcatccctcg

SEQ ID NO: 860274 - DNA, 15 bp, Homo sapiens
ccaggcatccctcgc

SEQ ID NO: 860275 - DNA, 15 bp, Homo sapiens
caggcatccctcgct

SEQ ID NO: 860276 - DNA, 15 bp, Homo sapiens
aggcatccctcgctg

SEQ ID NO: 860277 - DNA, 15 bp, Homo sapiens
ggcatccctcgctgg

SEQ ID NO: 860278 - DNA, 15 bp, Homo sapiens
gcatccctcgctggt

SEQ ID NO: 860279 - DNA, 15 bp, Homo sapiens
catccctcgctggtg

SEQ ID NO: 860280 - DNA, 15 bp, Homo sapiens
atccctcgctggtgg

SEQ ID NO: 860281 - DNA, 15 bp, Homo sapiens
tccctcgctggtggt

SEQ ID NO: 860282 - DNA, 15 bp, Homo sapiens
ccctcgctggtggtg

SEQ ID NO: 860283 - DNA, 15 bp, Homo sapiens
cctcgctggtggtgg

SEQ ID NO: 860284 - DNA, 15 bp, Homo sapiens
ctcgctggtggtgga

SEQ ID NO: 860285 - DNA, 15 bp, Homo sapiens
tcgctggtggtggag

SEQ ID NO: 860286 - DNA, 15 bp, Homo sapiens
cgctggtggtggagt

SEQ ID NO: 860287 - DNA, 15 bp, Homo sapiens
gctggtggtggagtt

SEQ ID NO: 860288 - DNA, 15 bp, Homo sapiens
ctggtggtggagttg

SEQ ID NO: 860289 - DNA, 15 bp, Homo sapiens
tggtggtggagttgg

SEQ ID NO: 860290 - DNA, 15 bp, Homo sapiens
ggtggtggagttggg

SEQ ID NO: 860291 - DNA, 15 bp, Homo sapiens
gtggtggagttgggt

SEQ ID NO: 860292 - DNA, 15 bp, Homo sapiens
tggtggagttgggtg

SEQ ID NO: 860293 - DNA, 15 bp, Homo sapiens
ggtggagttgggtgg

SEQ ID NO: 860294 - DNA, 15 bp, Homo sapiens
gtggagttgggtggt

SEQ ID NO: 860295 - DNA, 15 bp, Homo sapiens
tggagttgggtggtg

SEQ ID NO: 860296 - DNA, 15 bp, Homo sapiens
ggagttgggtggtgc

SEQ ID NO: 860297 - DNA, 15 bp, Homo sapiens
gagttgggtggtgcc

SEQ ID NO: 860298 - DNA, 15 bp, Homo sapiens
agttgggtggtgccc

SEQ ID NO: 860299 - DNA, 15 bp, Homo sapiens
gttgggtggtgccca

SEQ ID NO: 860300 - DNA, 15 bp, Homo sapiens
ttgggtggtgcccat

SEQ ID NO: 860301 - DNA, 15 bp, Homo sapiens
tgggtggtgcccatt

SEQ ID NO: 860302 - DNA, 15 bp, Homo sapiens
gggtggtgcccattt

SEQ ID NO: 860303 - DNA, 15 bp, Homo sapiens
ggtggtgcccatttg

SEQ ID NO: 860304 - DNA, 15 bp, Homo sapiens
gtggtgcccatttga

SEQ ID NO: 860305 - DNA, 15 bp, Homo sapiens
tggtgcccatttgac

SEQ ID NO: 860306 - DNA, 15 bp, Homo sapiens
ggtgcccatttgaca

SEQ ID NO: 860307 - DNA, 15 bp, Homo sapiens
gtgcccatttgacag

SEQ ID NO: 860308 - DNA, 15 bp, Homo sapiens
tgcccatttgacaga

SEQ ID NO: 860309 - DNA, 15 bp, Homo sapiens
gcccatttgacagag

SEQ ID NO: 860310 - DNA, 15 bp, Homo sapiens
cccatttgacagagc

SEQ ID NO: 860311 - DNA, 15 bp, Homo sapiens
ccatttgacagagca

SEQ ID NO: 860312 - DNA, 15 bp, Homo sapiens
catttgacagagcaa

SEQ ID NO: 860313 - DNA, 15 bp, Homo sapiens
atttgacagagcaag

SEQ ID NO: 860314 - DNA, 15 bp, Homo sapiens
tttgacagagcaagt

SEQ ID NO: 860315 - DNA, 15 bp, Homo sapiens
ttgacagagcaagtt

SEQ ID NO: 860316 - DNA, 15 bp, Homo sapiens
tgacagagcaagttg

SEQ ID NO: 860317 - DNA, 15 bp, Homo sapiens
gacagagcaagttga

SEQ ID NO: 860318 - DNA, 15 bp, Homo sapiens
acagagcaagttgac

SEQ ID NO: 860319 - DNA, 15 bp, Homo sapiens
cagagcaagttgact

SEQ ID NO: 860320 - DNA, 15 bp, Homo sapiens
agagcaagttgactc

SEQ ID NO: 860321 - DNA, 15 bp, Homo sapiens
gagcaagttgactca

SEQ ID NO: 860322 - DNA, 15 bp, Homo sapiens
agcaagttgactcaa

SEQ ID NO: 860323 - DNA, 15 bp, Homo sapiens
gcaagttgactcaag

SEQ ID NO: 860324 - DNA, 15 bp, Homo sapiens
caagttgactcaaga

SEQ ID NO: 860325 - DNA, 15 bp, Homo sapiens
aagttgactcaagag

SEQ ID NO: 860326 - DNA, 15 bp, Homo sapiens
agttgactcaagagc

SEQ ID NO: 860327 - DNA, 15 bp, Homo sapiens
gttgactcaagagca

SEQ ID NO: 860328 - DNA, 15 bp, Homo sapiens
ttgactcaagagcag

SEQ ID NO: 860329 - DNA, 15 bp, Homo sapiens
tgactcaagagcagt

SEQ ID NO: 860330 - DNA, 15 bp, Homo sapiens
gactcaagagcagtg

SEQ ID NO: 860331 - DNA, 15 bp, Homo sapiens
actcaagagcagtgg

SEQ ID NO: 860332 - DNA, 15 bp, Homo sapiens
ctcaagagcagtggt

SEQ ID NO: 860333 - DNA, 15 bp, Homo sapiens
tcaagagcagtggtg

SEQ ID NO: 860334 - DNA, 15 bp, Homo sapiens
caagagcagtggtga

SEQ ID NO: 860335 - DNA, 15 bp, Homo sapiens
aagagcagtggtgag

SEQ ID NO: 860336 - DNA, 15 bp, Homo sapiens
agagcagtggtgaga

SEQ ID NO: 860337 - DNA, 15 bp, Homo sapiens
gagcagtggtgagag

SEQ ID NO: 860338 - DNA, 15 bp, Homo sapiens
agcagtggtgagagt

SEQ ID NO: 860339 - DNA, 15 bp, Homo sapiens
gcagtggtgagagtg

SEQ ID NO: 860340 - DNA, 15 bp, Homo sapiens
cagtggtgagagtgg

SEQ ID NO: 860341 - DNA, 15 bp, Homo sapiens
agtggtgagagtggg

SEQ ID NO: 860342 - DNA, 15 bp, Homo sapiens
gtggtgagagtgggc

SEQ ID NO: 860343 - DNA, 15 bp, Homo sapiens
tggtgagagtgggct

SEQ ID NO: 860344 - DNA, 15 bp, Homo sapiens
ggtgagagtgggctt

SEQ ID NO: 860345 - DNA, 15 bp, Homo sapiens
gtgagagtgggcttt

SEQ ID NO: 860346 - DNA, 15 bp, Homo sapiens
tgagagtgggctttt

SEQ ID NO: 860347 - DNA, 15 bp, Homo sapiens
gagagtgggcttttc

SEQ ID NO: 860348 - DNA, 15 bp, Homo sapiens
agagtgggcttttca

SEQ ID NO: 860349 - DNA, 15 bp, Homo sapiens
gagtgggcttttcat

SEQ ID NO: 860350 - DNA, 15 bp, Homo sapiens
agtgggcttttcatt

SEQ ID NO: 860351 - DNA, 15 bp, Homo sapiens
gtgggcttttcatta

SEQ ID NO: 860352 - DNA, 15 bp, Homo sapiens
tgggcttttcattaa

SEQ ID NO: 860353 - DNA, 15 bp, Homo sapiens
gggcttttcattaaa

SEQ ID NO: 860354 - DNA, 15 bp, Homo sapiens
ggcttttcattaaat

SEQ ID NO: 860355 - DNA, 15 bp, Homo sapiens
gcttttcattaaata

SEQ ID NO: 860356 - DNA, 15 bp, Homo sapiens
cttttcattaaatat

SEQ ID NO: 860357 - DNA, 15 bp, Homo sapiens
ttttcattaaatatg

SEQ ID NO: 860358 - DNA, 15 bp, Homo sapiens
tttcattaaatatga

SEQ ID NO: 860359 - DNA, 15 bp, Homo sapiens
ttcattaaatatgaa

SEQ ID NO: 860360 - DNA, 15 bp, Homo sapiens
tcattaaatatgaac

SEQ ID NO: 860361 - DNA, 15 bp, Homo sapiens
cattaaatatgaaca

SEQ ID NO: 860362 - DNA, 15 bp, Homo sapiens
attaaatatgaacag

SEQ ID NO: 860363 - DNA, 15 bp, Homo sapiens
ttaaatatgaacaga

SEQ ID NO: 860364 - DNA, 15 bp, Homo sapiens
taaatatgaacagat

SEQ ID NO: 860365 - DNA, 15 bp, Homo sapiens
aaatatgaacagatg

SEQ ID NO: 860366 - DNA, 15 bp, Homo sapiens
aatatgaacagatgt

SEQ ID NO: 860367 - DNA, 15 bp, Homo sapiens
atatgaacagatgtg

SEQ ID NO: 860368 - DNA, 15 bp, Homo sapiens
tatgaacagatgtga

SEQ ID NO: 860369 - DNA, 15 bp, Homo sapiens
atgaacagatgtgaa

SEQ ID NO: 860370 - DNA, 15 bp, Homo sapiens
tgaacagatgtgaaa

SEQ ID NO: 860371 - DNA, 15 bp, Homo sapiens
gaacagatgtgaaat

SEQ ID NO: 860372 - DNA, 15 bp, Homo sapiens
aacagatgtgaaatg

SEQ ID NO: 860373 - DNA, 15 bp, Homo sapiens
acagatgtgaaatgt

SEQ ID NO: 860374 - DNA, 15 bp, Homo sapiens
cagatgtgaaatgta

SEQ ID NO: 860375 - DNA, 15 bp, Homo sapiens
agatgtgaaatgtag

SEQ ID NO: 860376 - DNA, 15 bp, Homo sapiens
gatgtgaaatgtaga

SEQ ID NO: 860377 - DNA, 15 bp, Homo sapiens
atgtgaaatgtagag

SEQ ID NO: 860378 - DNA, 15 bp, Homo sapiens
tgtgaaatgtagagg

SEQ ID NO: 860379 - DNA, 15 bp, Homo sapiens
gtgaaatgtagaggg

SEQ ID NO: 860380 - DNA, 15 bp, Homo sapiens
tgaaatgtagagggt

SEQ ID NO: 860381 - DNA, 15 bp, Homo sapiens
gaaatgtagagggtt

SEQ ID NO: 860382 - DNA, 15 bp, Homo sapiens
aaatgtagagggttt

SEQ ID NO: 860383 - DNA, 15 bp, Homo sapiens
aatgtagagggtttg

SEQ ID NO: 860384 - DNA, 15 bp, Homo sapiens
atgtagagggtttga

SEQ ID NO: 860385 - DNA, 15 bp, Homo sapiens
tgtagagggtttgac

SEQ ID NO: 860386 - DNA, 15 bp, Homo sapiens
gtagagggtttgaca

SEQ ID NO: 860387 - DNA, 15 bp, Homo sapiens
tagagggtttgacaa

SEQ ID NO: 860388 - DNA, 15 bp, Homo sapiens
agagggtttgacaat

SEQ ID NO: 860389 - DNA, 15 bp, Homo sapiens
gagggtttgacaatt

SEQ ID NO: 860390 - DNA, 15 bp, Homo sapiens
agggtttgacaatta

SEQ ID NO: 860391 - DNA, 15 bp, Homo sapiens
gggtttgacaattag

SEQ ID NO: 860392 - DNA, 15 bp, Homo sapiens
ggtttgacaattaga

SEQ ID NO: 860393 - DNA, 15 bp, Homo sapiens
gtttgacaattagaa

SEQ ID NO: 860394 - DNA, 15 bp, Homo sapiens
tttgacaattagaaa

SEQ ID NO: 860395 - DNA, 15 bp, Homo sapiens
ttgacaattagaaat

SEQ ID NO: 860396 - DNA, 15 bp, Homo sapiens
tgacaattagaaatg

SEQ ID NO: 860397 - DNA, 15 bp, Homo sapiens
gacaattagaaatgg

SEQ ID NO: 860398 - DNA, 15 bp, Homo sapiens
acaattagaaatggc

SEQ ID NO: 860399 - DNA, 15 bp, Homo sapiens
caattagaaatggca

SEQ ID NO: 860400 - DNA, 15 bp, Homo sapiens
aattagaaatggcag

SEQ ID NO: 860401 - DNA, 15 bp, Homo sapiens
attagaaatggcagg

SEQ ID NO: 860402 - DNA, 15 bp, Homo sapiens
ttagaaatggcagga

SEQ ID NO: 860403 - DNA, 15 bp, Homo sapiens
tagaaatggcaggag

SEQ ID NO: 860404 - DNA, 15 bp, Homo sapiens
agaaatggcaggaga

SEQ ID NO: 860405 - DNA, 15 bp, Homo sapiens
gaaatggcaggagaa

SEQ ID NO: 860406 - DNA, 15 bp, Homo sapiens
aatggcaggagaagg

SEQ ID NO: 860407 - DNA, 15 bp, Homo sapiens
atggcaggagaaggg

SEQ ID NO: 860408 - DNA, 15 bp, Homo sapiens
tggcaggagaagggc

SEQ ID NO: 860409 - DNA, 15 bp, Homo sapiens
ggcaggagaagggcc

SEQ ID NO: 860410 - DNA, 15 bp, Homo sapiens
gcaggagaagggccc

SEQ ID NO: 860411 - DNA, 15 bp, Homo sapiens
caggagaagggccct

SEQ ID NO: 860412 - DNA, 15 bp, Homo sapiens
aggagaagggccctt

SEQ ID NO: 860413 - DNA, 15 bp, Homo sapiens
ggagaagggcccttg

SEQ ID NO: 860414 - DNA, 15 bp, Homo sapiens
gagaagggcccttga

SEQ ID NO: 860415 - DNA, 15 bp, Homo sapiens
agaagggcccttgaa

SEQ ID NO: 860416 - DNA, 15 bp, Homo sapiens
gaagggcccttgaat

SEQ ID NO: 860417 - DNA, 15 bp, Homo sapiens
aagggcccttgaatc

SEQ ID NO: 860418 - DNA, 15 bp, Homo sapiens
agggcccttgaatca

SEQ ID NO: 860419 - DNA, 15 bp, Homo sapiens
gggcccttgaatcaa

SEQ ID NO: 860420 - DNA, 15 bp, Homo sapiens
ggcccttgaatcaaa

SEQ ID NO: 860421 - DNA, 15 bp, Homo sapiens
gcccttgaatcaaag

SEQ ID NO: 860422 - DNA, 15 bp, Homo sapiens
cccttgaatcaaagt

SEQ ID NO: 860423 - DNA, 15 bp, Homo sapiens
ccttgaatcaaagtg

SEQ ID NO: 860424 - DNA, 15 bp, Homo sapiens
cttgaatcaaagtga

SEQ ID NO: 860425 - DNA, 15 bp, Homo sapiens
ttgaatcaaagtgag

SEQ ID NO: 860426 - DNA, 15 bp, Homo sapiens
tgaatcaaagtgagg

SEQ ID NO: 860427 - DNA, 15 bp, Homo sapiens
gaatcaaagtgaggt

SEQ ID NO: 860428 - DNA, 15 bp, Homo sapiens
aatcaaagtgaggtc

SEQ ID NO: 860429 - DNA, 15 bp, Homo sapiens
atcaaagtgaggtca

SEQ ID NO: 860430 - DNA, 15 bp, Homo sapiens
tcaaagtgaggtcag

SEQ ID NO: 860431 - DNA, 15 bp, Homo sapiens
caaagtgaggtcaga

SEQ ID NO: 860432 - DNA, 15 bp, Homo sapiens
aaagtgaggtcagat

SEQ ID NO: 860433 - DNA, 15 bp, Homo sapiens
aagtgaggtcagatg

SEQ ID NO: 860434 - DNA, 15 bp, Homo sapiens
agtgaggtcagatgg

SEQ ID NO: 860435 - DNA, 15 bp, Homo sapiens
gtgaggtcagatggg

SEQ ID NO: 860436 - DNA, 15 bp, Homo sapiens
tgaggtcagatgggc

SEQ ID NO: 860437 - DNA, 15 bp, Homo sapiens
gaggtcagatgggcg

SEQ ID NO: 860438 - DNA, 15 bp, Homo sapiens
aggtcagatgggcgg

SEQ ID NO: 860439 - DNA, 15 bp, Homo sapiens
ggtcagatgggcgga

SEQ ID NO: 860440 - DNA, 15 bp, Homo sapiens
gtcagatgggcggat

SEQ ID NO: 860441 - DNA, 15 bp, Homo sapiens
tcagatgggcggatc

SEQ ID NO: 860442 - DNA, 15 bp, Homo sapiens
cagatgggcggatca

SEQ ID NO: 860443 - DNA, 15 bp, Homo sapiens
agatgggcggatcag

SEQ ID NO: 860444 - DNA, 15 bp, Homo sapiens
gatgggcggatcaga

SEQ ID NO: 860445 - DNA, 15 bp, Homo sapiens
atgggcggatcagat

SEQ ID NO: 860446 - DNA, 15 bp, Homo sapiens
tgggcggatcagatt

SEQ ID NO: 860447 - DNA, 15 bp, Homo sapiens
gggcggatcagatta

SEQ ID NO: 860448 - DNA, 15 bp, Homo sapiens
ggcggatcagattac

SEQ ID NO: 860449 - DNA, 15 bp, Homo sapiens
gcggatcagattact

SEQ ID NO: 860450 - DNA, 15 bp, Homo sapiens
cggatcagattactt

SEQ ID NO: 860451 - DNA, 15 bp, Homo sapiens
ggatcagattacttc

SEQ ID NO: 860452 - DNA, 15 bp, Homo sapiens
gatcagattacttct

SEQ ID NO: 860453 - DNA, 15 bp, Homo sapiens
atcagattacttctc

SEQ ID NO: 860454 - DNA, 15 bp, Homo sapiens
tcagattacttctct

SEQ ID NO: 860455 - DNA, 15 bp, Homo sapiens
cagattacttctctt

SEQ ID NO: 860456 - DNA, 15 bp, Homo sapiens
agattacttctctta

SEQ ID NO: 860457 - DNA, 15 bp, Homo sapiens
gattacttctcttac

SEQ ID NO: 860458 - DNA, 15 bp, Homo sapiens
attacttctcttaca

SEQ ID NO: 860459 - DNA, 15 bp, Homo sapiens
ttacttctcttacat

SEQ ID NO: 860460 - DNA, 15 bp, Homo sapiens
tacttctcttacatt

SEQ ID NO: 860461 - DNA, 15 bp, Homo sapiens
acttctcttacattc

SEQ ID NO: 860462 - DNA, 15 bp, Homo sapiens
cttctcttacattct

SEQ ID NO: 860463 - DNA, 15 bp, Homo sapiens
ttctcttacattctt

SEQ ID NO: 860464 - DNA, 15 bp, Homo sapiens
tctcttacattcttt

SEQ ID NO: 860465 - DNA, 15 bp, Homo sapiens
ctcttacattcttta

SEQ ID NO: 860466 - DNA, 15 bp, Homo sapiens
tcttacattctttag

SEQ ID NO: 860467 - DNA, 15 bp, Homo sapiens
cttacattctttagt

SEQ ID NO: 860468 - DNA, 15 bp, Homo sapiens
ttacattctttagtt

SEQ ID NO: 860469 - DNA, 15 bp, Homo sapiens
tacattctttagttg

SEQ ID NO: 860470 - DNA, 15 bp, Homo sapiens
acattctttagttgt

SEQ ID NO: 860471 - DNA, 15 bp, Homo sapiens
cattctttagttgtt

SEQ ID NO: 860472 - DNA, 15 bp, Homo sapiens
attctttagttgttc

SEQ ID NO: 860473 - DNA, 15 bp, Homo sapiens
ttctttagttgttct

SEQ ID NO: 860474 - DNA, 15 bp, Homo sapiens
tctttagttgttctg

SEQ ID NO: 860475 - DNA, 15 bp, Homo sapiens
ctttagttgttctga

SEQ ID NO: 860476 - DNA, 15 bp, Homo sapiens
tttagttgttctgaa

SEQ ID NO: 860477 - DNA, 15 bp, Homo sapiens
ttagttgttctgaaa

SEQ ID NO: 860478 - DNA, 15 bp, Homo sapiens
tagttgttctgaaaa

SEQ ID NO: 860479 - DNA, 15 bp, Homo sapiens
agttgttctgaaaat

SEQ ID NO: 860480 - DNA, 15 bp, Homo sapiens
gttgttctgaaaatc

SEQ ID NO: 860481 - DNA, 15 bp, Homo sapiens
ttgttctgaaaatca

SEQ ID NO: 860482 - DNA, 15 bp, Homo sapiens
tgttctgaaaatcat

SEQ ID NO: 860483 - DNA, 15 bp, Homo sapiens
gttctgaaaatcatt

SEQ ID NO: 860484 - DNA, 15 bp, Homo sapiens
ttctgaaaatcattt

SEQ ID NO: 860485 - DNA, 15 bp, Homo sapiens
tctgaaaatcatttt

SEQ ID NO: 860486 - DNA, 15 bp, Homo sapiens
ctgaaaatcattttg

SEQ ID NO: 860487 - DNA, 15 bp, Homo sapiens
tgaaaatcattttga

SEQ ID NO: 860488 - DNA, 15 bp, Homo sapiens
gaaaatcattttgaa

SEQ ID NO: 860489 - DNA, 15 bp, Homo sapiens
aaaatcattttgaat

SEQ ID NO: 860490 - DNA, 15 bp, Homo sapiens
aaatcattttgaatt

SEQ ID NO: 860491 - DNA, 15 bp, Homo sapiens
aatcattttgaatta

SEQ ID NO: 860492 - DNA, 15 bp, Homo sapiens
atcattttgaattag

SEQ ID NO: 860493 - DNA, 15 bp, Homo sapiens
tcattttgaattagt

SEQ ID NO: 860494 - DNA, 15 bp, Homo sapiens
cattttgaattagtg

SEQ ID NO: 860495 - DNA, 15 bp, Homo sapiens
attttgaattagtgt

SEQ ID NO: 860496 - DNA, 15 bp, Homo sapiens
ttttgaattagtgtc

SEQ ID NO: 860497 - DNA, 15 bp, Homo sapiens
tttgaattagtgtca

SEQ ID NO: 860498 - DNA, 15 bp, Homo sapiens
ttgaattagtgtcag

SEQ ID NO: 860499 - DNA, 15 bp, Homo sapiens
tgaattagtgtcagc

SEQ ID NO: 860500 - DNA, 15 bp, Homo sapiens
gaattagtgtcagca

SEQ ID NO: 860501 - DNA, 15 bp, Homo sapiens
aattagtgtcagcag

SEQ ID NO: 860502 - DNA, 15 bp, Homo sapiens
attagtgtcagcaga

SEQ ID NO: 860503 - DNA, 15 bp, Homo sapiens
ttagtgtcagcagag

SEQ ID NO: 860504 - DNA, 15 bp, Homo sapiens
tagtgtcagcagagc

SEQ ID NO: 860505 - DNA, 15 bp, Homo sapiens
agtgtcagcagagcc

SEQ ID NO: 860506 - DNA, 15 bp, Homo sapiens
gtgtcagcagagcca

SEQ ID NO: 860507 - DNA, 15 bp, Homo sapiens
tgtcagcagagccat

SEQ ID NO: 860508 - DNA, 15 bp, Homo sapiens
gtcagcagagccatg

SEQ ID NO: 860509 - DNA, 15 bp, Homo sapiens
tcagcagagccatga

SEQ ID NO: 860510 - DNA, 15 bp, Homo sapiens
cagcagagccatgat

SEQ ID NO: 860511 - DNA, 15 bp, Homo sapiens
agcagagccatgatg

SEQ ID NO: 860512 - DNA, 15 bp, Homo sapiens
gcagagccatgatga

SEQ ID NO: 860513 - DNA, 15 bp, Homo sapiens
cagagccatgatgag

SEQ ID NO: 860514 - DNA, 15 bp, Homo sapiens
agagccatgatgagt

SEQ ID NO: 860515 - DNA, 15 bp, Homo sapiens
gagccatgatgagtt

SEQ ID NO: 860516 - DNA, 15 bp, Homo sapiens
agccatgatgagttt

SEQ ID NO: 860517 - DNA, 15 bp, Homo sapiens
gccatgatgagtttt

SEQ ID NO: 860518 - DNA, 15 bp, Homo sapiens
ccatgatgagttttg

SEQ ID NO: 860519 - DNA, 15 bp, Homo sapiens
catgatgagttttgc

SEQ ID NO: 860520 - DNA, 15 bp, Homo sapiens
atgatgagttttgcc

SEQ ID NO: 860521 - DNA, 15 bp, Homo sapiens
tgatgagttttgccc

SEQ ID NO: 860522 - DNA, 15 bp, Homo sapiens
gatgagttttgccct

SEQ ID NO: 860523 - DNA, 15 bp, Homo sapiens
atgagttttgccctt

SEQ ID NO: 860524 - DNA, 15 bp, Homo sapiens
tgagttttgcccttt

SEQ ID NO: 860525 - DNA, 15 bp, Homo sapiens
gagttttgccctttg

SEQ ID NO: 860526 - DNA, 15 bp, Homo sapiens
agttttgccctttgt

SEQ ID NO: 860527 - DNA, 15 bp, Homo sapiens
gttttgccctttgtc

SEQ ID NO: 860528 - DNA, 15 bp, Homo sapiens
ttttgccctttgtct

SEQ ID NO: 860529 - DNA, 15 bp, Homo sapiens
tttgccctttgtctt

SEQ ID NO: 860530 - DNA, 15 bp, Homo sapiens
ttgccctttgtcttt

SEQ ID NO: 860531 - DNA, 15 bp, Homo sapiens
tgccctttgtctttt

SEQ ID NO: 860532 - DNA, 15 bp, Homo sapiens
gccctttgtctttta

SEQ ID NO: 860533 - DNA, 15 bp, Homo sapiens
ccctttgtcttttat

SEQ ID NO: 860534 - DNA, 15 bp, Homo sapiens
cctttgtcttttatg

SEQ ID NO: 860535 - DNA, 15 bp, Homo sapiens
ctttgtcttttatgc

SEQ ID NO: 860536 - DNA, 15 bp, Homo sapiens
tttgtcttttatgct

SEQ ID NO: 860537 - DNA, 15 bp, Homo sapiens
ttgtcttttatgcta

SEQ ID NO: 860538 - DNA, 15 bp, Homo sapiens
tgtcttttatgctag

SEQ ID NO: 860539 - DNA, 15 bp, Homo sapiens
gtcttttatgctagg

SEQ ID NO: 860540 - DNA, 15 bp, Homo sapiens
tcttttatgctaggg

SEQ ID NO: 860541 - DNA, 15 bp, Homo sapiens
cttttatgctagggc

SEQ ID NO: 860542 - DNA, 15 bp, Homo sapiens
ttttatgctagggct

SEQ ID NO: 860543 - DNA, 15 bp, Homo sapiens
tttatgctagggctg

SEQ ID NO: 860544 - DNA, 15 bp, Homo sapiens
ttatgctagggctgt

SEQ ID NO: 860545 - DNA, 15 bp, Homo sapiens
tatgctagggctgta

SEQ ID NO: 860546 - DNA, 15 bp, Homo sapiens
atgctagggctgtat

SEQ ID NO: 860547 - DNA, 15 bp, Homo sapiens
tgctagggctgtatt

SEQ ID NO: 860548 - DNA, 15 bp, Homo sapiens
gctagggctgtattg

SEQ ID NO: 860549 - DNA, 15 bp, Homo sapiens
ctagggctgtattgt

SEQ ID NO: 860550 - DNA, 15 bp, Homo sapiens
tagggctgtattgtt

SEQ ID NO: 860551 - DNA, 15 bp, Homo sapiens
agggctgtattgttt

SEQ ID NO: 860552 - DNA, 15 bp, Homo sapiens
gggctgtattgtttc

SEQ ID NO: 860553 - DNA, 15 bp, Homo sapiens
ggctgtattgtttcc

SEQ ID NO: 860554 - DNA, 15 bp, Homo sapiens
gctgtattgtttccc

SEQ ID NO: 860555 - DNA, 15 bp, Homo sapiens
ctgtattgtttccca

SEQ ID NO: 860556 - DNA, 15 bp, Homo sapiens
tgtattgtttcccaa

SEQ ID NO: 860557 - DNA, 15 bp, Homo sapiens
gtattgtttcccaag

SEQ ID NO: 860558 - DNA, 15 bp, Homo sapiens
tattgtttcccaaga

SEQ ID NO: 860559 - DNA, 15 bp, Homo sapiens
attgtttcccaagac

SEQ ID NO: 860560 - DNA, 15 bp, Homo sapiens
ttgtttcccaagaca

SEQ ID NO: 860561 - DNA, 15 bp, Homo sapiens
tgtttcccaagacac

SEQ ID NO: 860562 - DNA, 15 bp, Homo sapiens
gtttcccaagacact

SEQ ID NO: 860563 - DNA, 15 bp, Homo sapiens
tttcccaagacactc

SEQ ID NO: 860564 - DNA, 15 bp, Homo sapiens
ttcccaagacactca

SEQ ID NO: 860565 - DNA, 15 bp, Homo sapiens
tcccaagacactcat

SEQ ID NO: 860566 - DNA, 15 bp, Homo sapiens
cccaagacactcatt

SEQ ID NO: 860567 - DNA, 15 bp, Homo sapiens
ccaagacactcatta

SEQ ID NO: 860568 - DNA, 15 bp, Homo sapiens
caagacactcattaa

SEQ ID NO: 860569 - DNA, 15 bp, Homo sapiens
aagacactcattaaa

SEQ ID NO: 860570 - DNA, 15 bp, Homo sapiens
agacactcattaaag

SEQ ID NO: 860571 - DNA, 15 bp, Homo sapiens
gacactcattaaagg

SEQ ID NO: 860572 - DNA, 15 bp, Homo sapiens
acactcattaaaggt

SEQ ID NO: 860573 - DNA, 15 bp, Homo sapiens
cactcattaaaggtc

SEQ ID NO: 860574 - DNA, 15 bp, Homo sapiens
actcattaaaggtca

SEQ ID NO: 860575 - DNA, 15 bp, Homo sapiens
ctcattaaaggtcat

SEQ ID NO: 860576 - DNA, 15 bp, Homo sapiens
tcattaaaggtcatt

SEQ ID NO: 860577 - DNA, 15 bp, Homo sapiens
cattaaaggtcatta

SEQ ID NO: 860578 - DNA, 15 bp, Homo sapiens
attaaaggtcattat

SEQ ID NO: 860579 - DNA, 15 bp, Homo sapiens
ttaaaggtcattata

SEQ ID NO: 860580 - DNA, 15 bp, Homo sapiens
taaaggtcattatac

SEQ ID NO: 860581 - DNA, 15 bp, Homo sapiens
aaaggtcattatact

SEQ ID NO: 860582 - DNA, 15 bp, Homo sapiens
aaggtcattatacta

SEQ ID NO: 860583 - DNA, 15 bp, Homo sapiens
aggtcattatactat

SEQ ID NO: 860584 - DNA, 15 bp, Homo sapiens
ggtcattatactatt

SEQ ID NO: 860585 - DNA, 15 bp, Homo sapiens
gtcattatactatta

SEQ ID NO: 860586 - DNA, 15 bp, Homo sapiens
tcattatactattat

SEQ ID NO: 860587 - DNA, 15 bp, Homo sapiens
cattatactattatg

SEQ ID NO: 860588 - DNA, 15 bp, Homo sapiens
attatactattatgg

SEQ ID NO: 860589 - DNA, 15 bp, Homo sapiens
ttatactattatgga

SEQ ID NO: 860590 - DNA, 15 bp, Homo sapiens
tatactattatggag

SEQ ID NO: 860591 - DNA, 15 bp, Homo sapiens
atactattatggagc

SEQ ID NO: 860592 - DNA, 15 bp, Homo sapiens
tactattatggagct

SEQ ID NO: 860593 - DNA, 15 bp, Homo sapiens
actattatggagctt

SEQ ID NO: 860594 - DNA, 15 bp, Homo sapiens
ctattatggagcttg

SEQ ID NO: 860595 - DNA, 15 bp, Homo sapiens
tattatggagcttgc

SEQ ID NO: 860596 - DNA, 15 bp, Homo sapiens
attatggagcttgct

SEQ ID NO: 860597 - DNA, 15 bp, Homo sapiens
ttatggagcttgctt

SEQ ID NO: 860598 - DNA, 15 bp, Homo sapiens
tatggagcttgcttt

SEQ ID NO: 860599 - DNA, 15 bp, Homo sapiens
atggagcttgctttg

SEQ ID NO: 860600 - DNA, 15 bp, Homo sapiens
tggagcttgctttgg

SEQ ID NO: 860601 - DNA, 15 bp, Homo sapiens
ggagcttgctttggt

SEQ ID NO: 860602 - DNA, 15 bp, Homo sapiens
gagcttgctttggtc

SEQ ID NO: 860603 - DNA, 15 bp, Homo sapiens
agcttgctttggtcg

SEQ ID NO: 860604 - DNA, 15 bp, Homo sapiens
gcttgctttggtcgc

SEQ ID NO: 860605 - DNA, 15 bp, Homo sapiens
cttgctttggtcgca

SEQ ID NO: 860606 - DNA, 15 bp, Homo sapiens
ttgctttggtcgcag

SEQ ID NO: 860607 - DNA, 15 bp, Homo sapiens
tgctttggtcgcagt

SEQ ID NO: 860608 - DNA, 15 bp, Homo sapiens
gctttggtcgcagtt

SEQ ID NO: 860609 - DNA, 15 bp, Homo sapiens
ctttggtcgcagttt

SEQ ID NO: 860610 - DNA, 15 bp, Homo sapiens
tttggtcgcagtttc

SEQ ID NO: 860611 - DNA, 15 bp, Homo sapiens
ttggtcgcagtttcc

SEQ ID NO: 860612 - DNA, 15 bp, Homo sapiens
tggtcgcagtttccc

SEQ ID NO: 860613 - DNA, 15 bp, Homo sapiens
ggtcgcagtttccca

SEQ ID NO: 860614 - DNA, 15 bp, Homo sapiens
gtcgcagtttcccag

SEQ ID NO: 860615 - DNA, 15 bp, Homo sapiens
tcgcagtttcccagt

SEQ ID NO: 860616 - DNA, 15 bp, Homo sapiens
cgcagtttcccagtt

SEQ ID NO: 860617 - DNA, 15 bp, Homo sapiens
gcagtttcccagttg

SEQ ID NO: 860618 - DNA, 15 bp, Homo sapiens
cagtttcccagttga

SEQ ID NO: 860619 - DNA, 15 bp, Homo sapiens
agtttcccagttgag

SEQ ID NO: 860620 - DNA, 15 bp, Homo sapiens
gtttcccagttgagc

SEQ ID NO: 860621 - DNA, 15 bp, Homo sapiens
tttcccagttgagcc

SEQ ID NO: 860622 - DNA, 15 bp, Homo sapiens
ttcccagttgagcca

SEQ ID NO: 860623 - DNA, 15 bp, Homo sapiens
tcccagttgagccag

SEQ ID NO: 860624 - DNA, 15 bp, Homo sapiens
cccagttgagccagt

SEQ ID NO: 860625 - DNA, 15 bp, Homo sapiens
ccagttgagccagtg

SEQ ID NO: 860626 - DNA, 15 bp, Homo sapiens
cagttgagccagtgt

SEQ ID NO: 860627 - DNA, 15 bp, Homo sapiens
agttgagccagtgtg

SEQ ID NO: 860628 - DNA, 15 bp, Homo sapiens
gttgagccagtgtgc

SEQ ID NO: 860629 - DNA, 15 bp, Homo sapiens
ttgagccagtgtgct

SEQ ID NO: 860630 - DNA, 15 bp, Homo sapiens
tgagccagtgtgctt

SEQ ID NO: 860631 - DNA, 15 bp, Homo sapiens
gagccagtgtgcttt

SEQ ID NO: 860632 - DNA, 15 bp, Homo sapiens
agccagtgtgctttg

SEQ ID NO: 860633 - DNA, 15 bp, Homo sapiens
gccagtgtgctttgg

SEQ ID NO: 860634 - DNA, 15 bp, Homo sapiens
ccagtgtgctttgga

SEQ ID NO: 860635 - DNA, 15 bp, Homo sapiens
cagtgtgctttggag

SEQ ID NO: 860636 - DNA, 15 bp, Homo sapiens
agtgtgctttggaga

SEQ ID NO: 860637 - DNA, 15 bp, Homo sapiens
gtgtgctttggagac

SEQ ID NO: 860638 - DNA, 15 bp, Homo sapiens
tgtgctttggagact

SEQ ID NO: 860639 - DNA, 15 bp, Homo sapiens
gtgctttggagactg

SEQ ID NO: 860640 - DNA, 15 bp, Homo sapiens
tgctttggagactgc

SEQ ID NO: 860641 - DNA, 15 bp, Homo sapiens
gctttggagactgcc

SEQ ID NO: 860642 - DNA, 15 bp, Homo sapiens
ctttggagactgcct

SEQ ID NO: 860643 - DNA, 15 bp, Homo sapiens
tttggagactgccta

SEQ ID NO: 860644 - DNA, 15 bp, Homo sapiens
ttggagactgcctaa

SEQ ID NO: 860645 - DNA, 15 bp, Homo sapiens
tggagactgcctaat

SEQ ID NO: 860646 - DNA, 15 bp, Homo sapiens
ggagactgcctaatt

SEQ ID NO: 860647 - DNA, 15 bp, Homo sapiens
gagactgcctaattc

SEQ ID NO: 860648 - DNA, 15 bp, Homo sapiens
agactgcctaattca

SEQ ID NO: 860649 - DNA, 15 bp, Homo sapiens
gactgcctaattcat

SEQ ID NO: 860650 - DNA, 15 bp, Homo sapiens
actgcctaattcatt

SEQ ID NO: 860651 - DNA, 15 bp, Homo sapiens
ctgcctaattcattt

SEQ ID NO: 860652 - DNA, 15 bp, Homo sapiens
tgcctaattcatttc

SEQ ID NO: 860653 - DNA, 15 bp, Homo sapiens
gcctaattcatttct

SEQ ID NO: 860654 - DNA, 15 bp, Homo sapiens
cctaattcatttctc

SEQ ID NO: 860655 - DNA, 15 bp, Homo sapiens
ctaattcatttctct

SEQ ID NO: 860656 - DNA, 15 bp, Homo sapiens
taattcatttctctc

SEQ ID NO: 860657 - DNA, 15 bp, Homo sapiens
aattcatttctctct

SEQ ID NO: 860658 - DNA, 15 bp, Homo sapiens
attcatttctctctt

SEQ ID NO: 860659 - DNA, 15 bp, Homo sapiens
ttcatttctctcttt

SEQ ID NO: 860660 - DNA, 15 bp, Homo sapiens
tcatttctctctttc

SEQ ID NO: 860661 - DNA, 15 bp, Homo sapiens
catttctctctttcc

SEQ ID NO: 860662 - DNA, 15 bp, Homo sapiens
atttctctctttcct

SEQ ID NO: 860663 - DNA, 15 bp, Homo sapiens
tttctctctttcctt

SEQ ID NO: 860664 - DNA, 15 bp, Homo sapiens
ttctctctttccttt

SEQ ID NO: 860665 - DNA, 15 bp, Homo sapiens
tctctctttcctttc

SEQ ID NO: 860666 - DNA, 15 bp, Homo sapiens
ctctctttcctttcg

SEQ ID NO: 860667 - DNA, 15 bp, Homo sapiens
tctctttcctttcgt

SEQ ID NO: 860668 - DNA, 15 bp, Homo sapiens
ctctttcctttcgtt

SEQ ID NO: 860669 - DNA, 15 bp, Homo sapiens
tctttcctttcgttt

SEQ ID NO: 860670 - DNA, 15 bp, Homo sapiens
ctttcctttcgtttc

SEQ ID NO: 860671 - DNA, 15 bp, Homo sapiens
tttcctttcgtttcc

SEQ ID NO: 860672 - DNA, 15 bp, Homo sapiens
ttcctttcgtttccc

SEQ ID NO: 860673 - DNA, 15 bp, Homo sapiens
tcctttcgtttccct

SEQ ID NO: 860674 - DNA, 15 bp, Homo sapiens
cctttcgtttccctc

SEQ ID NO: 860675 - DNA, 15 bp, Homo sapiens
ctttcgtttccctct

SEQ ID NO: 860676 - DNA, 15 bp, Homo sapiens
tttcgtttccctctt

SEQ ID NO: 860677 - DNA, 15 bp, Homo sapiens
ttcgtttccctcttt

SEQ ID NO: 860678 - DNA, 15 bp, Homo sapiens
tcgtttccctcttta

SEQ ID NO: 860679 - DNA, 15 bp, Homo sapiens
cgtttccctctttac

SEQ ID NO: 860680 - DNA, 15 bp, Homo sapiens
gtttccctctttact

SEQ ID NO: 860681 - DNA, 15 bp, Homo sapiens
tttccctctttactc

SEQ ID NO: 860682 - DNA, 15 bp, Homo sapiens
ttccctctttactct

SEQ ID NO: 860683 - DNA, 15 bp, Homo sapiens
tccctctttactcta

SEQ ID NO: 860684 - DNA, 15 bp, Homo sapiens
ccctctttactctat

SEQ ID NO: 860685 - DNA, 15 bp, Homo sapiens
cctctttactctatt

SEQ ID NO: 860686 - DNA, 15 bp, Homo sapiens
ctctttactctattt

SEQ ID NO: 860687 - DNA, 15 bp, Homo sapiens
tctttactctatttt

SEQ ID NO: 860688 - DNA, 15 bp, Homo sapiens
ctttactctattttt

SEQ ID NO: 860689 - DNA, 15 bp, Homo sapiens
tttactctatttttt

SEQ ID NO: 860690 - DNA, 15 bp, Homo sapiens
ttactctattttttt

SEQ ID NO: 860691 - DNA, 15 bp, Homo sapiens
tactctatttttttt

SEQ ID NO: 860692 - DNA, 15 bp, Homo sapiens
actctattttttttc

SEQ ID NO: 860693 - DNA, 15 bp, Homo sapiens
ctctattttttttct

SEQ ID NO: 860694 - DNA, 15 bp, Homo sapiens
tctattttttttctt

SEQ ID NO: 860695 - DNA, 15 bp, Homo sapiens
ctattttttttctta

SEQ ID NO: 860696 - DNA, 15 bp, Homo sapiens
tattttttttcttat

SEQ ID NO: 860697 - DNA, 15 bp, Homo sapiens
attttttttcttata

SEQ ID NO: 860698 - DNA, 15 bp, Homo sapiens
ttttttttcttataa

SEQ ID NO: 860699 - DNA, 15 bp, Homo sapiens
tttttttcttataag

SEQ ID NO: 860700 - DNA, 15 bp, Homo sapiens
ttttttcttataagg

SEQ ID NO: 860701 - DNA, 15 bp, Homo sapiens
tttttcttataaggg

SEQ ID NO: 860702 - DNA, 15 bp, Homo sapiens
ttttcttataagggg

SEQ ID NO: 860703 - DNA, 15 bp, Homo sapiens
tttcttataagggga

SEQ ID NO: 860704 - DNA, 15 bp, Homo sapiens
ttcttataaggggaa

SEQ ID NO: 860705 - DNA, 15 bp, Homo sapiens
tcttataaggggaaa

SEQ ID NO: 860706 - DNA, 15 bp, Homo sapiens
cttataaggggaaaa

SEQ ID NO: 860707 - DNA, 15 bp, Homo sapiens
ttataaggggaaaaa

SEQ ID NO: 860708 - DNA, 15 bp, Homo sapiens
tataaggggaaaaat

SEQ ID NO: 860709 - DNA, 15 bp, Homo sapiens
ataaggggaaaaatt

SEQ ID NO: 860710 - DNA, 15 bp, Homo sapiens
taaggggaaaaattt

SEQ ID NO: 860711 - DNA, 15 bp, Homo sapiens
aaggggaaaaatttc

SEQ ID NO: 860712 - DNA, 15 bp, Homo sapiens
aggggaaaaatttcc

SEQ ID NO: 860713 - DNA, 15 bp, Homo sapiens
ggggaaaaatttccg

SEQ ID NO: 860714 - DNA, 15 bp, Homo sapiens
gggaaaaatttccgt

SEQ ID NO: 860715 - DNA, 15 bp, Homo sapiens
ggaaaaatttccgtt

SEQ ID NO: 860716 - DNA, 15 bp, Homo sapiens
gaaaaatttccgttt

SEQ ID NO: 860717 - DNA, 15 bp, Homo sapiens
aaaaatttccgtttt

SEQ ID NO: 860718 - DNA, 15 bp, Homo sapiens
aaaatttccgttttc

SEQ ID NO: 860719 - DNA, 15 bp, Homo sapiens
aaatttccgttttca

SEQ ID NO: 860720 - DNA, 15 bp, Homo sapiens
aatttccgttttcaa

SEQ ID NO: 860721 - DNA, 15 bp, Homo sapiens
atttccgttttcaag

SEQ ID NO: 860722 - DNA, 15 bp, Homo sapiens
tttccgttttcaagg

SEQ ID NO: 860723 - DNA, 15 bp, Homo sapiens
ttccgttttcaaggg

SEQ ID NO: 860724 - DNA, 15 bp, Homo sapiens
tccgttttcaaggga

SEQ ID NO: 860725 - DNA, 15 bp, Homo sapiens
ccgttttcaagggat

SEQ ID NO: 860726 - DNA, 15 bp, Homo sapiens
cgttttcaagggatg

SEQ ID NO: 860727 - DNA, 15 bp, Homo sapiens
gttttcaagggatgt

SEQ ID NO: 860728 - DNA, 15 bp, Homo sapiens
ttttcaagggatgtt

SEQ ID NO: 860729 - DNA, 15 bp, Homo sapiens
tttcaagggatgtta

SEQ ID NO: 860730 - DNA, 15 bp, Homo sapiens
ttcaagggatgttaa

SEQ ID NO: 860731 - DNA, 15 bp, Homo sapiens
tcaagggatgttaaa

SEQ ID NO: 860732 - DNA, 15 bp, Homo sapiens
caagggatgttaaat

SEQ ID NO: 860733 - DNA, 15 bp, Homo sapiens
aagggatgttaaatt

SEQ ID NO: 860734 - DNA, 15 bp, Homo sapiens
agggatgttaaattg

SEQ ID NO: 860735 - DNA, 15 bp, Homo sapiens
gggatgttaaattga

SEQ ID NO: 860736 - DNA, 15 bp, Homo sapiens
ggatgttaaattgaa

SEQ ID NO: 860737 - DNA, 15 bp, Homo sapiens
gatgttaaattgaaa

SEQ ID NO: 860738 - DNA, 15 bp, Homo sapiens
atgttaaattgaaac

SEQ ID NO: 860739 - DNA, 15 bp, Homo sapiens
tgttaaattgaaaca

SEQ ID NO: 860740 - DNA, 15 bp, Homo sapiens
gttaaattgaaacac

SEQ ID NO: 860741 - DNA, 15 bp, Homo sapiens
ttaaattgaaacaca

SEQ ID NO: 860742 - DNA, 15 bp, Homo sapiens
taaattgaaacacaa

SEQ ID NO: 860743 - DNA, 15 bp, Homo sapiens
aaattgaaacacaaa

SEQ ID NO: 860744 - DNA, 15 bp, Homo sapiens
aattgaaacacaaag

SEQ ID NO: 860745 - DNA, 15 bp, Homo sapiens
attgaaacacaaagt

SEQ ID NO: 860746 - DNA, 15 bp, Homo sapiens
ttgaaacacaaagtc

SEQ ID NO: 860747 - DNA, 15 bp, Homo sapiens
tgaaacacaaagtcc

SEQ ID NO: 860748 - DNA, 15 bp, Homo sapiens
gaaacacaaagtccc

SEQ ID NO: 860749 - DNA, 15 bp, Homo sapiens
aaacacaaagtccca

SEQ ID NO: 860750 - DNA, 15 bp, Homo sapiens
aacacaaagtcccat

SEQ ID NO: 860751 - DNA, 15 bp, Homo sapiens
acacaaagtcccatt

SEQ ID NO: 860752 - DNA, 15 bp, Homo sapiens
cacaaagtcccatta

SEQ ID NO: 860753 - DNA, 15 bp, Homo sapiens
acaaagtcccattat

SEQ ID NO: 860754 - DNA, 15 bp, Homo sapiens
caaagtcccattatg

SEQ ID NO: 860755 - DNA, 15 bp, Homo sapiens
aaagtcccattatgt

SEQ ID NO: 860756 - DNA, 15 bp, Homo sapiens
aagtcccattatgtg

SEQ ID NO: 860757 - DNA, 15 bp, Homo sapiens
agtcccattatgtgt

SEQ ID NO: 860758 - DNA, 15 bp, Homo sapiens
gtcccattatgtgtt

SEQ ID NO: 860759 - DNA, 15 bp, Homo sapiens
tcccattatgtgttt

SEQ ID NO: 860760 - DNA, 15 bp, Homo sapiens
cccattatgtgtttt

SEQ ID NO: 860761 - DNA, 15 bp, Homo sapiens
ccattatgtgttttg

SEQ ID NO: 860762 - DNA, 15 bp, Homo sapiens
cattatgtgttttgt

SEQ ID NO: 860763 - DNA, 15 bp, Homo sapiens
attatgtgttttgtg

SEQ ID NO: 860764 - DNA, 15 bp, Homo sapiens
ttatgtgttttgtga

SEQ ID NO: 860765 - DNA, 15 bp, Homo sapiens
tatgtgttttgtgaa

SEQ ID NO: 860766 - DNA, 15 bp, Homo sapiens
atgtgttttgtgaag

SEQ ID NO: 860767 - DNA, 15 bp, Homo sapiens
tgtgttttgtgaagt

SEQ ID NO: 860768 - DNA, 15 bp, Homo sapiens
gtgttttgtgaagtg

SEQ ID NO: 860769 - DNA, 15 bp, Homo sapiens
tgttttgtgaagtgg

SEQ ID NO: 860770 - DNA, 15 bp, Homo sapiens
gttttgtgaagtggg

SEQ ID NO: 860771 - DNA, 15 bp, Homo sapiens
ttttgtgaagtggga

SEQ ID NO: 860772 - DNA, 15 bp, Homo sapiens
tttgtgaagtgggaa

SEQ ID NO: 860773 - DNA, 15 bp, Homo sapiens
ttgtgaagtgggaag

SEQ ID NO: 860774 - DNA, 15 bp, Homo sapiens
tgtgaagtgggaaga

SEQ ID NO: 860775 - DNA, 15 bp, Homo sapiens
gtgaagtgggaagag

SEQ ID NO: 860776 - DNA, 15 bp, Homo sapiens
tgaagtgggaagaga

SEQ ID NO: 860777 - DNA, 15 bp, Homo sapiens
gaagtgggaagagaa

SEQ ID NO: 860778 - DNA, 15 bp, Homo sapiens
aagtgggaagagaag

SEQ ID NO: 860779 - DNA, 15 bp, Homo sapiens
agtgggaagagaagt

SEQ ID NO: 860780 - DNA, 15 bp, Homo sapiens
gtgggaagagaagta

SEQ ID NO: 860781 - DNA, 15 bp, Homo sapiens
tgggaagagaagtag

SEQ ID NO: 860782 - DNA, 15 bp, Homo sapiens
gggaagagaagtagc

SEQ ID NO: 860783 - DNA, 15 bp, Homo sapiens
ggaagagaagtagct

SEQ ID NO: 860784 - DNA, 15 bp, Homo sapiens
gaagagaagtagctg

SEQ ID NO: 860785 - DNA, 15 bp, Homo sapiens
aagagaagtagctgg

SEQ ID NO: 860786 - DNA, 15 bp, Homo sapiens
agagaagtagctggt

SEQ ID NO: 860787 - DNA, 15 bp, Homo sapiens
gagaagtagctggtt

SEQ ID NO: 860788 - DNA, 15 bp, Homo sapiens
agaagtagctggttc

SEQ ID NO: 860789 - DNA, 15 bp, Homo sapiens
gaagtagctggttcc

SEQ ID NO: 860790 - DNA, 15 bp, Homo sapiens
aagtagctggttccc

SEQ ID NO: 860791 - DNA, 15 bp, Homo sapiens
agtagctggttccca

SEQ ID NO: 860792 - DNA, 15 bp, Homo sapiens
gtagctggttcccag

SEQ ID NO: 860793 - DNA, 15 bp, Homo sapiens
tagctggttcccaga

SEQ ID NO: 860794 - DNA, 15 bp, Homo sapiens
agctggttcccagag

SEQ ID NO: 860795 - DNA, 15 bp, Homo sapiens
gctggttcccagagg

SEQ ID NO: 860796 - DNA, 15 bp, Homo sapiens
ctggttcccagagga

SEQ ID NO: 860797 - DNA, 15 bp, Homo sapiens
tggttcccagaggaa

SEQ ID NO: 860798 - DNA, 15 bp, Homo sapiens
ggttcccagaggaat

SEQ ID NO: 860799 - DNA, 15 bp, Homo sapiens
gttcccagaggaatg

SEQ ID NO: 860800 - DNA, 15 bp, Homo sapiens
ttcccagaggaatgg

SEQ ID NO: 860801 - DNA, 15 bp, Homo sapiens
tcccagaggaatggt

SEQ ID NO: 860802 - DNA, 15 bp, Homo sapiens
cccagaggaatggta

SEQ ID NO: 860803 - DNA, 15 bp, Homo sapiens
ccagaggaatggtaa

SEQ ID NO: 860804 - DNA, 15 bp, Homo sapiens
cagaggaatggtaat

SEQ ID NO: 860805 - DNA, 15 bp, Homo sapiens
agaggaatggtaata

SEQ ID NO: 860806 - DNA, 15 bp, Homo sapiens
gaggaatggtaatat

SEQ ID NO: 860807 - DNA, 15 bp, Homo sapiens
aggaatggtaatata

SEQ ID NO: 860808 - DNA, 15 bp, Homo sapiens
ggaatggtaatatat

SEQ ID NO: 860809 - DNA, 15 bp, Homo sapiens
gaatggtaatatatt

SEQ ID NO: 860810 - DNA, 15 bp, Homo sapiens
aatggtaatatatta

SEQ ID NO: 860811 - DNA, 15 bp, Homo sapiens
atggtaatatattaa

SEQ ID NO: 860812 - DNA, 15 bp, Homo sapiens
tggtaatatattaaa

SEQ ID NO: 860813 - DNA, 15 bp, Homo sapiens
ggtaatatattaaaa

SEQ ID NO: 860814 - DNA, 15 bp, Homo sapiens
gtaatatattaaaag

SEQ ID NO: 860815 - DNA, 15 bp, Homo sapiens
taatatattaaaagt

SEQ ID NO: 860816 - DNA, 15 bp, Homo sapiens
aatatattaaaagtg

SEQ ID NO: 860817 - DNA, 15 bp, Homo sapiens
atatattaaaagtgc

SEQ ID NO: 860818 - DNA, 15 bp, Homo sapiens
tatattaaaagtgct

SEQ ID NO: 860819 - DNA, 15 bp, Homo sapiens
atattaaaagtgctc

SEQ ID NO: 860820 - DNA, 15 bp, Homo sapiens
tattaaaagtgctca

SEQ ID NO: 860821 - DNA, 15 bp, Homo sapiens
attaaaagtgctcac

SEQ ID NO: 860822 - DNA, 15 bp, Homo sapiens
ttaaaagtgctcaca

SEQ ID NO: 860823 - DNA, 15 bp, Homo sapiens
taaaagtgctcacac

SEQ ID NO: 860824 - DNA, 15 bp, Homo sapiens
aaaagtgctcacaca

SEQ ID NO: 860825 - DNA, 15 bp, Homo sapiens
aaagtgctcacacag

SEQ ID NO: 860826 - DNA, 15 bp, Homo sapiens
aagtgctcacacagt

SEQ ID NO: 860827 - DNA, 15 bp, Homo sapiens
agtgctcacacagtt

SEQ ID NO: 860828 - DNA, 15 bp, Homo sapiens
gtgctcacacagttc

SEQ ID NO: 860829 - DNA, 15 bp, Homo sapiens
tgctcacacagttct

SEQ ID NO: 860830 - DNA, 15 bp, Homo sapiens
gctcacacagttctg

SEQ ID NO: 860831 - DNA, 15 bp, Homo sapiens
ctcacacagttctga

SEQ ID NO: 860832 - DNA, 15 bp, Homo sapiens
tcacacagttctgaa

SEQ ID NO: 860833 - DNA, 15 bp, Homo sapiens
cacacagttctgaaa

SEQ ID NO: 860834 - DNA, 15 bp, Homo sapiens
acacagttctgaaaa

SEQ ID NO: 860835 - DNA, 15 bp, Homo sapiens
cacagttctgaaaac

SEQ ID NO: 860836 - DNA, 15 bp, Homo sapiens
acagttctgaaaacc

SEQ ID NO: 860837 - DNA, 15 bp, Homo sapiens
cagttctgaaaacct

SEQ ID NO: 860838 - DNA, 15 bp, Homo sapiens
agttctgaaaacctg

SEQ ID NO: 860839 - DNA, 15 bp, Homo sapiens
gttctgaaaacctgc

SEQ ID NO: 860840 - DNA, 15 bp, Homo sapiens
ttctgaaaacctgcc

SEQ ID NO: 860841 - DNA, 15 bp, Homo sapiens
tctgaaaacctgcct

SEQ ID NO: 860842 - DNA, 15 bp, Homo sapiens
ctgaaaacctgcctt

SEQ ID NO: 860843 - DNA, 15 bp, Homo sapiens
tgaaaacctgccttc

SEQ ID NO: 860844 - DNA, 15 bp, Homo sapiens
gaaaacctgccttct

SEQ ID NO: 860845 - DNA, 15 bp, Homo sapiens
aaaacctgccttcta

SEQ ID NO: 860846 - DNA, 15 bp, Homo sapiens
aaacctgccttctaa

SEQ ID NO: 860847 - DNA, 15 bp, Homo sapiens
aacctgccttctaac

SEQ ID NO: 860848 - DNA, 15 bp, Homo sapiens
acctgccttctaaca

SEQ ID NO: 860849 - DNA, 15 bp, Homo sapiens
cctgccttctaacaa

SEQ ID NO: 860850 - DNA, 15 bp, Homo sapiens
ctgccttctaacaac

SEQ ID NO: 860851 - DNA, 15 bp, Homo sapiens
tgccttctaacaaca

SEQ ID NO: 860852 - DNA, 15 bp, Homo sapiens
gccttctaacaacag

SEQ ID NO: 860853 - DNA, 15 bp, Homo sapiens
ccttctaacaacagg

SEQ ID NO: 860854 - DNA, 15 bp, Homo sapiens
cttctaacaacaggg

SEQ ID NO: 860855 - DNA, 15 bp, Homo sapiens
ttctaacaacagggg

SEQ ID NO: 860856 - DNA, 15 bp, Homo sapiens
tctaacaacaggggc

SEQ ID NO: 860857 - DNA, 15 bp, Homo sapiens
ctaacaacaggggct

SEQ ID NO: 860858 - DNA, 15 bp, Homo sapiens
taacaacaggggctg

SEQ ID NO: 860859 - DNA, 15 bp, Homo sapiens
aacaacaggggctgc

SEQ ID NO: 860860 - DNA, 15 bp, Homo sapiens
acaacaggggctgcc

SEQ ID NO: 860861 - DNA, 15 bp, Homo sapiens
caacaggggctgcct

SEQ ID NO: 860862 - DNA, 15 bp, Homo sapiens
aacaggggctgcctg

SEQ ID NO: 860863 - DNA, 15 bp, Homo sapiens
acaggggctgcctgc

SEQ ID NO: 860864 - DNA, 15 bp, Homo sapiens
caggggctgcctgct

SEQ ID NO: 860865 - DNA, 15 bp, Homo sapiens
aggggctgcctgctc

SEQ ID NO: 860866 - DNA, 15 bp, Homo sapiens
ggggctgcctgctcg

SEQ ID NO: 860867 - DNA, 15 bp, Homo sapiens
gggctgcctgctcgg

SEQ ID NO: 860868 - DNA, 15 bp, Homo sapiens
ggctgcctgctcggt

SEQ ID NO: 860869 - DNA, 15 bp, Homo sapiens
gctgcctgctcggtg

SEQ ID NO: 860870 - DNA, 15 bp, Homo sapiens
ctgcctgctcggtgc

SEQ ID NO: 860871 - DNA, 15 bp, Homo sapiens
tgcctgctcggtgca

SEQ ID NO: 860872 - DNA, 15 bp, Homo sapiens
gcctgctcggtgcac

SEQ ID NO: 860873 - DNA, 15 bp, Homo sapiens
cctgctcggtgcacc

SEQ ID NO: 860874 - DNA, 15 bp, Homo sapiens
ctgctcggtgcaccc

SEQ ID NO: 860875 - DNA, 15 bp, Homo sapiens
tgctcggtgcacccc

SEQ ID NO: 860876 - DNA, 15 bp, Homo sapiens
gctcggtgcacccct

SEQ ID NO: 860877 - DNA, 15 bp, Homo sapiens
ctcggtgcacccctc

SEQ ID NO: 860878 - DNA, 15 bp, Homo sapiens
tcggtgcacccctct

SEQ ID NO: 860879 - DNA, 15 bp, Homo sapiens
cggtgcacccctcta

SEQ ID NO: 860880 - DNA, 15 bp, Homo sapiens
ggtgcacccctctat

SEQ ID NO: 860881 - DNA, 15 bp, Homo sapiens
gtgcacccctctatg

SEQ ID NO: 860882 - DNA, 15 bp, Homo sapiens
tgcacccctctatgg

SEQ ID NO: 860883 - DNA, 15 bp, Homo sapiens
gcacccctctatgga

SEQ ID NO: 860884 - DNA, 15 bp, Homo sapiens
cacccctctatggag

SEQ ID NO: 860885 - DNA, 15 bp, Homo sapiens
acccctctatggagg

SEQ ID NO: 860886 - DNA, 15 bp, Homo sapiens
cccctctatggaggt

SEQ ID NO: 860887 - DNA, 15 bp, Homo sapiens
ccctctatggaggtg

SEQ ID NO: 860888 - DNA, 15 bp, Homo sapiens
cctctatggaggtgt

SEQ ID NO: 860889 - DNA, 15 bp, Homo sapiens
ctctatggaggtgtg

SEQ ID NO: 860890 - DNA, 15 bp, Homo sapiens
tctatggaggtgtgg

SEQ ID NO: 860891 - DNA, 15 bp, Homo sapiens
ctatggaggtgtggc

SEQ ID NO: 860892 - DNA, 15 bp, Homo sapiens
tatggaggtgtggcc

SEQ ID NO: 860893 - DNA, 15 bp, Homo sapiens
atggaggtgtggccc

SEQ ID NO: 860894 - DNA, 15 bp, Homo sapiens
tggaggtgtggccca

SEQ ID NO: 860895 - DNA, 15 bp, Homo sapiens
ggaggtgtggcccat

SEQ ID NO: 860896 - DNA, 15 bp, Homo sapiens
gaggtgtggcccatt

SEQ ID NO: 860897 - DNA, 15 bp, Homo sapiens
aggtgtggcccatta

SEQ ID NO: 860898 - DNA, 15 bp, Homo sapiens
ggtgtggcccattac

SEQ ID NO: 860899 - DNA, 15 bp, Homo sapiens
gtgtggcccattact

SEQ ID NO: 860900 - DNA, 15 bp, Homo sapiens
tgtggcccattactg

SEQ ID NO: 860901 - DNA, 15 bp, Homo sapiens
gtggcccattactgt

SEQ ID NO: 860902 - DNA, 15 bp, Homo sapiens
tggcccattactgtg

SEQ ID NO: 860903 - DNA, 15 bp, Homo sapiens
ggcccattactgtgg

SEQ ID NO: 860904 - DNA, 15 bp, Homo sapiens
gcccattactgtgga

SEQ ID NO: 860905 - DNA, 15 bp, Homo sapiens
cccattactgtggat

SEQ ID NO: 860906 - DNA, 15 bp, Homo sapiens
ccattactgtggatc

SEQ ID NO: 860907 - DNA, 15 bp, Homo sapiens
cattactgtggatcg

SEQ ID NO: 860908 - DNA, 15 bp, Homo sapiens
attactgtggatcgg

SEQ ID NO: 860909 - DNA, 15 bp, Homo sapiens
ttactgtggatcggt

SEQ ID NO: 860910 - DNA, 15 bp, Homo sapiens
tactgtggatcggtt

SEQ ID NO: 860911 - DNA, 15 bp, Homo sapiens
actgtggatcggttg

SEQ ID NO: 860912 - DNA, 15 bp, Homo sapiens
ctgtggatcggttga

SEQ ID NO: 860913 - DNA, 15 bp, Homo sapiens
tgtggatcggttgag

SEQ ID NO: 860914 - DNA, 15 bp, Homo sapiens
gtggatcggttgagt

SEQ ID NO: 860915 - DNA, 15 bp, Homo sapiens
tggatcggttgagtc

SEQ ID NO: 860916 - DNA, 15 bp, Homo sapiens
ggatcggttgagtca

SEQ ID NO: 860917 - DNA, 15 bp, Homo sapiens
gatcggttgagtcat

SEQ ID NO: 860918 - DNA, 15 bp, Homo sapiens
atcggttgagtcatg

SEQ ID NO: 860919 - DNA, 15 bp, Homo sapiens
tcggttgagtcatgt

SEQ ID NO: 860920 - DNA, 15 bp, Homo sapiens
cggttgagtcatgtg

SEQ ID NO: 860921 - DNA, 15 bp, Homo sapiens
ggttgagtcatgtgc

SEQ ID NO: 860922 - DNA, 15 bp, Homo sapiens
gttgagtcatgtgct

SEQ ID NO: 860923 - DNA, 15 bp, Homo sapiens
ttgagtcatgtgcta

SEQ ID NO: 860924 - DNA, 15 bp, Homo sapiens
tgagtcatgtgctat

SEQ ID NO: 860925 - DNA, 15 bp, Homo sapiens
gagtcatgtgctatt

SEQ ID NO: 860926 - DNA, 15 bp, Homo sapiens
agtcatgtgctatta

SEQ ID NO: 860927 - DNA, 15 bp, Homo sapiens
gtcatgtgctattat

SEQ ID NO: 860928 - DNA, 15 bp, Homo sapiens
tcatgtgctattatg

SEQ ID NO: 860929 - DNA, 15 bp, Homo sapiens
catgtgctattatga

SEQ ID NO: 860930 - DNA, 15 bp, Homo sapiens
atgtgctattatgat

SEQ ID NO: 860931 - DNA, 15 bp, Homo sapiens
tgtgctattatgata

SEQ ID NO: 860932 - DNA, 15 bp, Homo sapiens
agtgggtctgcagca

SEQ ID NO: 860933 - DNA, 15 bp, Homo sapiens
gtgggtctgcagcac

SEQ ID NO: 860934 - DNA, 15 bp, Homo sapiens
tgggtctgcagcacc

SEQ ID NO: 860935 - DNA, 15 bp, Homo sapiens
gggtctgcagcacct

SEQ ID NO: 860936 - DNA, 15 bp, Homo sapiens
ggtctgcagcacctg

SEQ ID NO: 860937 - DNA, 15 bp, Homo sapiens
gtctgcagcacctgt

SEQ ID NO: 860938 - DNA, 15 bp, Homo sapiens
tctgcagcacctgtg

SEQ ID NO: 860939 - DNA, 15 bp, Homo sapiens
ctgcagcacctgtgg

SEQ ID NO: 860940 - DNA, 15 bp, Homo sapiens
tgcagcacctgtggt

SEQ ID NO: 860941 - DNA, 15 bp, Homo sapiens
gcagcacctgtggtt

SEQ ID NO: 860942 - DNA, 15 bp, Homo sapiens
cagcacctgtggttt

SEQ ID NO: 860943 - DNA, 15 bp, Homo sapiens
agcacctgtggtttc

SEQ ID NO: 860944 - DNA, 15 bp, Homo sapiens
gcacctgtggtttcc

SEQ ID NO: 860945 - DNA, 15 bp, Homo sapiens
cacctgtggtttcca

SEQ ID NO: 860946 - DNA, 15 bp, Homo sapiens
acctgtggtttccat

SEQ ID NO: 860947 - DNA, 15 bp, Homo sapiens
cctgtggtttccatc

SEQ ID NO: 860948 - DNA, 15 bp, Homo sapiens
ctgtggtttccatca

SEQ ID NO: 860949 - DNA, 15 bp, Homo sapiens
tgtggtttccatcat

SEQ ID NO: 860950 - DNA, 15 bp, Homo sapiens
gtggtttccatcatg

SEQ ID NO: 860951 - DNA, 15 bp, Homo sapiens
tggtttccatcatgc

SEQ ID NO: 860952 - DNA, 15 bp, Homo sapiens
ggtttccatcatgcc

SEQ ID NO: 860953 - DNA, 15 bp, Homo sapiens
gtttccatcatgcct

SEQ ID NO: 860954 - DNA, 15 bp, Homo sapiens
tttccatcatgcctt

SEQ ID NO: 860955 - DNA, 15 bp, Homo sapiens
ttccatcatgccttg

SEQ ID NO: 860956 - DNA, 15 bp, Homo sapiens
tccatcatgccttgg

SEQ ID NO: 860957 - DNA, 15 bp, Homo sapiens
ccatcatgccttggg

SEQ ID NO: 860958 - DNA, 15 bp, Homo sapiens
catcatgccttggga

SEQ ID NO: 860959 - DNA, 15 bp, Homo sapiens
atcatgccttgggat

SEQ ID NO: 860960 - DNA, 15 bp, Homo sapiens
tcatgccttgggatt

SEQ ID NO: 860961 - DNA, 15 bp, Homo sapiens
catgccttgggattc

SEQ ID NO: 860962 - DNA, 15 bp, Homo sapiens
atgccttgggattct

SEQ ID NO: 860963 - DNA, 15 bp, Homo sapiens
tgccttgggattctc

SEQ ID NO: 860964 - DNA, 15 bp, Homo sapiens
gccttgggattctcc

SEQ ID NO: 860965 - DNA, 15 bp, Homo sapiens
ccttgggattctcct

SEQ ID NO: 860966 - DNA, 15 bp, Homo sapiens
cttgggattctcctt

SEQ ID NO: 860967 - DNA, 15 bp, Homo sapiens
ttgggattctccttc

SEQ ID NO: 860968 - DNA, 15 bp, Homo sapiens
tgggattctccttct

SEQ ID NO: 860969 - DNA, 15 bp, Homo sapiens
gggattctccttctc

SEQ ID NO: 860970 - DNA, 15 bp, Homo sapiens
ggattctccttctca

SEQ ID NO: 860971 - DNA, 15 bp, Homo sapiens
gattctccttctcat

SEQ ID NO: 860972 - DNA, 15 bp, Homo sapiens
attctccttctcata

SEQ ID NO: 860973 - DNA, 15 bp, Homo sapiens
ttctccttctcatat

SEQ ID NO: 860974 - DNA, 15 bp, Homo sapiens
tctccttctcatatg

SEQ ID NO: 860975 - DNA, 15 bp, Homo sapiens
ctccttctcatatgg

SEQ ID NO: 860976 - DNA, 15 bp, Homo sapiens
tccttctcatatggt

SEQ ID NO: 860977 - DNA, 15 bp, Homo sapiens
ccttctcatatggtg

SEQ ID NO: 860978 - DNA, 15 bp, Homo sapiens
cttctcatatggtgc

SEQ ID NO: 860979 - DNA, 15 bp, Homo sapiens
ttctcatatggtgcc

SEQ ID NO: 860980 - DNA, 15 bp, Homo sapiens
tctcatatggtgccc

SEQ ID NO: 860981 - DNA, 15 bp, Homo sapiens
ctcatatggtgccca

SEQ ID NO: 860982 - DNA, 15 bp, Homo sapiens
tcatatggtgcccat

SEQ ID NO: 860983 - DNA, 15 bp, Homo sapiens
catatggtgcccatc

SEQ ID NO: 860984 - DNA, 15 bp, Homo sapiens
atatggtgcccatca

SEQ ID NO: 860985 - DNA, 15 bp, Homo sapiens
tatggtgcccatcat

SEQ ID NO: 860986 - DNA, 15 bp, Homo sapiens
atggtgcccatcatt

SEQ ID NO: 860987 - DNA, 15 bp, Homo sapiens
tggtgcccatcattt

SEQ ID NO: 860988 - DNA, 15 bp, Homo sapiens
ggtgcccatcatttc

SEQ ID NO: 860989 - DNA, 15 bp, Homo sapiens
gtgcccatcatttca

SEQ ID NO: 860990 - DNA, 15 bp, Homo sapiens
tgcccatcatttcag

SEQ ID NO: 860991 - DNA, 15 bp, Homo sapiens
gcccatcatttcagt

SEQ ID NO: 860992 - DNA, 15 bp, Homo sapiens
cccatcatttcagtt

SEQ ID NO: 860993 - DNA, 15 bp, Homo sapiens
ccatcatttcagttg

SEQ ID NO: 860994 - DNA, 15 bp, Homo sapiens
catcatttcagttgg

SEQ ID NO: 860995 - DNA, 15 bp, Homo sapiens
atcatttcagttgga

SEQ ID NO: 860996 - DNA, 15 bp, Homo sapiens
tcatttcagttggat

SEQ ID NO: 860997 - DNA, 15 bp, Homo sapiens
catttcagttggata

SEQ ID NO: 860998 - DNA, 15 bp, Homo sapiens
atttcagttggatac

SEQ ID NO: 860999 - DNA, 15 bp, Homo sapiens
tttcagttggatact

SEQ ID NO: 861000 - DNA, 15 bp, Homo sapiens
ttcagttggatactt

SEQ ID NO: 861001 - DNA, 15 bp, Homo sapiens
tcagttggatacttc

SEQ ID NO: 861002 - DNA, 15 bp, Homo sapiens
cagttggatacttcc

SEQ ID NO: 861003 - DNA, 15 bp, Homo sapiens
agttggatacttcct

SEQ ID NO: 861004 - DNA, 15 bp, Homo sapiens
gttggatacttcctt

SEQ ID NO: 861005 - DNA, 15 bp, Homo sapiens
ttggatacttccttc

SEQ ID NO: 861006 - DNA, 15 bp, Homo sapiens
tggatacttccttca

SEQ ID NO: 861007 - DNA, 15 bp, Homo sapiens
ggatacttccttcat

SEQ ID NO: 861008 - DNA, 15 bp, Homo sapiens
gatacttccttcatc

SEQ ID NO: 861009 - DNA, 15 bp, Homo sapiens
atacttccttcatcg

SEQ ID NO: 861010 - DNA, 15 bp, Homo sapiens
tacttccttcatcgg

SEQ ID NO: 861011 - DNA, 15 bp, Homo sapiens
acttccttcatcgga

SEQ ID NO: 861012 - DNA, 15 bp, Homo sapiens
cttccttcatcggag

SEQ ID NO: 861013 - DNA, 15 bp, Homo sapiens
ttccttcatcggaga

SEQ ID NO: 861014 - DNA, 15 bp, Homo sapiens
tccttcatcggagat

SEQ ID NO: 861015 - DNA, 15 bp, Homo sapiens
ccttcatcggagatg

SEQ ID NO: 861016 - DNA, 15 bp, Homo sapiens
cttcatcggagatgg

SEQ ID NO: 861017 - DNA, 15 bp, Homo sapiens
ttcatcggagatgga

SEQ ID NO: 861018 - DNA, 15 bp, Homo sapiens
tcatcggagatggat

SEQ ID NO: 861019 - DNA, 15 bp, Homo sapiens
catcggagatggatg

SEQ ID NO: 861020 - DNA, 15 bp, Homo sapiens
atcggagatggatgc

SEQ ID NO: 861021 - DNA, 15 bp, Homo sapiens
tcggagatggatgct

SEQ ID NO: 861022 - DNA, 15 bp, Homo sapiens
cggagatggatgctt

SEQ ID NO: 861023 - DNA, 15 bp, Homo sapiens
ggagatggatgcttg

SEQ ID NO: 861024 - DNA, 15 bp, Homo sapiens
gagatggatgcttgt

SEQ ID NO: 861025 - DNA, 15 bp, Homo sapiens
agatggatgcttgtc

SEQ ID NO: 861026 - DNA, 15 bp, Homo sapiens
gatggatgcttgtca

SEQ ID NO: 861027 - DNA, 15 bp, Homo sapiens
atggatgcttgtcat

SEQ ID NO: 861028 - DNA, 15 bp, Homo sapiens
tggatgcttgtcatc

SEQ ID NO: 861029 - DNA, 15 bp, Homo sapiens
ggatgcttgtcatct

SEQ ID NO: 861030 - DNA, 15 bp, Homo sapiens
gatgcttgtcatctg

SEQ ID NO: 861031 - DNA, 15 bp, Homo sapiens
atgcttgtcatctgg

SEQ ID NO: 861032 - DNA, 15 bp, Homo sapiens
tgcttgtcatctggc

SEQ ID NO: 861033 - DNA, 15 bp, Homo sapiens
gcttgtcatctggcc

SEQ ID NO: 861034 - DNA, 15 bp, Homo sapiens
cttgtcatctggccc

SEQ ID NO: 861035 - DNA, 15 bp, Homo sapiens
ttgtcatctggccca

SEQ ID NO: 861036 - DNA, 15 bp, Homo sapiens
tgtcatctggcccag

SEQ ID NO: 861037 - DNA, 15 bp, Homo sapiens
gtcatctggcccagc

SEQ ID NO: 861038 - DNA, 15 bp, Homo sapiens
tcatctggcccagca

SEQ ID NO: 861039 - DNA, 15 bp, Homo sapiens
catctggcccagcac

SEQ ID NO: 861040 - DNA, 15 bp, Homo sapiens
atctggcccagcaca

SEQ ID NO: 861041 - DNA, 15 bp, Homo sapiens
tctggcccagcacat

SEQ ID NO: 861042 - DNA, 15 bp, Homo sapiens
ctggcccagcacatt

SEQ ID NO: 861043 - DNA, 15 bp, Homo sapiens
tggcccagcacattt

SEQ ID NO: 861044 - DNA, 15 bp, Homo sapiens
ggcccagcacattta

SEQ ID NO: 861045 - DNA, 15 bp, Homo sapiens
gcccagcacatttag

SEQ ID NO: 861046 - DNA, 15 bp, Homo sapiens
cccagcacatttagg

SEQ ID NO: 861047 - DNA, 15 bp, Homo sapiens
ccagcacatttagga

SEQ ID NO: 861048 - DNA, 15 bp, Homo sapiens
cagcacatttaggac

SEQ ID NO: 861049 - DNA, 15 bp, Homo sapiens
agcacatttaggaca

SEQ ID NO: 861050 - DNA, 15 bp, Homo sapiens
gcacatttaggacat

SEQ ID NO: 861051 - DNA, 15 bp, Homo sapiens
cacatttaggacatt

SEQ ID NO: 861052 - DNA, 15 bp, Homo sapiens
acatttaggacattt

SEQ ID NO: 861053 - DNA, 15 bp, Homo sapiens
catttaggacatttg

SEQ ID NO: 861054 - DNA, 15 bp, Homo sapiens
atttaggacatttgc

SEQ ID NO: 861055 - DNA, 15 bp, Homo sapiens
tttaggacatttgcc

SEQ ID NO: 861056 - DNA, 15 bp, Homo sapiens
ttaggacatttgcca

SEQ ID NO: 861057 - DNA, 15 bp, Homo sapiens
taggacatttgccag

SEQ ID NO: 861058 - DNA, 15 bp, Homo sapiens
aggacatttgccagc

SEQ ID NO: 861059 - DNA, 15 bp, Homo sapiens
ggacatttgccagca

SEQ ID NO: 861060 - DNA, 15 bp, Homo sapiens
gacatttgccagcat

SEQ ID NO: 861061 - DNA, 15 bp, Homo sapiens
acatttgccagcatg

SEQ ID NO: 861062 - DNA, 15 bp, Homo sapiens
catttgccagcatgc

SEQ ID NO: 861063 - DNA, 15 bp, Homo sapiens
atttgccagcatgct

SEQ ID NO: 861064 - DNA, 15 bp, Homo sapiens
tttgccagcatgctc

SEQ ID NO: 861065 - DNA, 15 bp, Homo sapiens
ttgccagcatgctct

SEQ ID NO: 861066 - DNA, 15 bp, Homo sapiens
tgccagcatgctctt

SEQ ID NO: 861067 - DNA, 15 bp, Homo sapiens
gccagcatgctcttc

SEQ ID NO: 861068 - DNA, 15 bp, Homo sapiens
ccagcatgctcttca

SEQ ID NO: 861069 - DNA, 15 bp, Homo sapiens
cagcatgctcttcaa

SEQ ID NO: 861070 - DNA, 15 bp, Homo sapiens
agcatgctcttcaaa

SEQ ID NO: 861071 - DNA, 15 bp, Homo sapiens
gcatgctcttcaaaa

SEQ ID NO: 861072 - DNA, 15 bp, Homo sapiens
catgctcttcaaaac

SEQ ID NO: 861073 - DNA, 15 bp, Homo sapiens
atgctcttcaaaacg

SEQ ID NO: 861074 - DNA, 15 bp, Homo sapiens
tgctcttcaaaacga

SEQ ID NO: 861075 - DNA, 15 bp, Homo sapiens
gctcttcaaaacgat

SEQ ID NO: 861076 - DNA, 15 bp, Homo sapiens
ctcttcaaaacgatc

SEQ ID NO: 861077 - DNA, 15 bp, Homo sapiens
tcttcaaaacgatct

SEQ ID NO: 861078 - DNA, 15 bp, Homo sapiens
cttcaaaacgatctt

SEQ ID NO: 861079 - DNA, 15 bp, Homo sapiens
ttcaaaacgatctta

SEQ ID NO: 861080 - DNA, 15 bp, Homo sapiens
tcaaaacgatcttaa

SEQ ID NO: 861081 - DNA, 15 bp, Homo sapiens
caaaacgatcttaac

SEQ ID NO: 861082 - DNA, 15 bp, Homo sapiens
aaaacgatcttaaca

SEQ ID NO: 861083 - DNA, 15 bp, Homo sapiens
aaacgatcttaacat

SEQ ID NO: 861084 - DNA, 15 bp, Homo sapiens
aacgatcttaacatt

SEQ ID NO: 861085 - DNA, 15 bp, Homo sapiens
acgatcttaacattt

SEQ ID NO: 861086 - DNA, 15 bp, Homo sapiens
cgatcttaacatttg

SEQ ID NO: 861087 - DNA, 15 bp, Homo sapiens
gatcttaacatttgg

SEQ ID NO: 861088 - DNA, 15 bp, Homo sapiens
atcttaacatttggg

SEQ ID NO: 861089 - DNA, 15 bp, Homo sapiens
tcttaacatttggga

SEQ ID NO: 861090 - DNA, 15 bp, Homo sapiens
cttaacatttgggat

SEQ ID NO: 861091 - DNA, 15 bp, Homo sapiens
ttaacatttgggatc

SEQ ID NO: 861092 - DNA, 15 bp, Homo sapiens
taacatttgggatct

SEQ ID NO: 861093 - DNA, 15 bp, Homo sapiens
aacatttgggatctt

SEQ ID NO: 861094 - DNA, 15 bp, Homo sapiens
acatttgggatcttt

SEQ ID NO: 861095 - DNA, 15 bp, Homo sapiens
catttgggatctttg

SEQ ID NO: 861096 - DNA, 15 bp, Homo sapiens
atttgggatctttga

SEQ ID NO: 861097 - DNA, 15 bp, Homo sapiens
tttgggatctttgac

SEQ ID NO: 861098 - DNA, 15 bp, Homo sapiens
ttgggatctttgact

SEQ ID NO: 861099 - DNA, 15 bp, Homo sapiens
tgggatctttgactc

SEQ ID NO: 861100 - DNA, 15 bp, Homo sapiens
gggatctttgactcc

SEQ ID NO: 861101 - DNA, 15 bp, Homo sapiens
ggatctttgactccc

SEQ ID NO: 861102 - DNA, 15 bp, Homo sapiens
gatctttgactccca

SEQ ID NO: 861103 - DNA, 15 bp, Homo sapiens
atctttgactcccag

SEQ ID NO: 861104 - DNA, 15 bp, Homo sapiens
tctttgactcccagt

SEQ ID NO: 861105 - DNA, 15 bp, Homo sapiens
ctttgactcccagtg

SEQ ID NO: 861106 - DNA, 15 bp, Homo sapiens
tttgactcccagtga

SEQ ID NO: 861107 - DNA, 15 bp, Homo sapiens
ttgactcccagtgaa

SEQ ID NO: 861108 - DNA, 15 bp, Homo sapiens
tgactcccagtgaag

SEQ ID NO: 861109 - DNA, 15 bp, Homo sapiens
gactcccagtgaagc

SEQ ID NO: 861110 - DNA, 15 bp, Homo sapiens
actcccagtgaagcc

SEQ ID NO: 861111 - DNA, 15 bp, Homo sapiens
ctcccagtgaagcct

SEQ ID NO: 861112 - DNA, 15 bp, Homo sapiens
tcccagtgaagccta

SEQ ID NO: 861113 - DNA, 15 bp, Homo sapiens
cccagtgaagcctag

SEQ ID NO: 861114 - DNA, 15 bp, Homo sapiens
ccagtgaagcctaga

SEQ ID NO: 861115 - DNA, 15 bp, Homo sapiens
cagtgaagcctagaa

SEQ ID NO: 861116 - DNA, 15 bp, Homo sapiens
agtgaagcctagaag

SEQ ID NO: 861117 - DNA, 15 bp, Homo sapiens
gtgaagcctagaagc

SEQ ID NO: 861118 - DNA, 15 bp, Homo sapiens
tgaagcctagaagct

SEQ ID NO: 861119 - DNA, 15 bp, Homo sapiens
gaagcctagaagctg

SEQ ID NO: 861120 - DNA, 15 bp, Homo sapiens
aagcctagaagctgc

SEQ ID NO: 861121 - DNA, 15 bp, Homo sapiens
agcctagaagctgca

SEQ ID NO: 861122 - DNA, 15 bp, Homo sapiens
gcctagaagctgcaa

SEQ ID NO: 861123 - DNA, 15 bp, Homo sapiens
cctagaagctgcaag

SEQ ID NO: 861124 - DNA, 15 bp, Homo sapiens
ctagaagctgcaagc

SEQ ID NO: 861125 - DNA, 15 bp, Homo sapiens
tagaagctgcaagca

SEQ ID NO: 861126 - DNA, 15 bp, Homo sapiens
agaagctgcaagcac

SEQ ID NO: 861127 - DNA, 15 bp, Homo sapiens
gaagctgcaagcaca

SEQ ID NO: 861128 - DNA, 15 bp, Homo sapiens
aagctgcaagcacag

SEQ ID NO: 861129 - DNA, 15 bp, Homo sapiens
agctgcaagcacaga

SEQ ID NO: 861130 - DNA, 15 bp, Homo sapiens
gctgcaagcacagag

SEQ ID NO: 861131 - DNA, 15 bp, Homo sapiens
ctgcaagcacagagc

SEQ ID NO: 861132 - DNA, 15 bp, Homo sapiens
tgcaagcacagagca

SEQ ID NO: 861133 - DNA, 15 bp, Homo sapiens
gcaagcacagagcag

SEQ ID NO: 861134 - DNA, 15 bp, Homo sapiens
caagcacagagcagc

SEQ ID NO: 861135 - DNA, 15 bp, Homo sapiens
aagcacagagcagcc

SEQ ID NO: 861136 - DNA, 15 bp, Homo sapiens
agcacagagcagcca

SEQ ID NO: 861137 - DNA, 15 bp, Homo sapiens
gcacagagcagccaa

SEQ ID NO: 861138 - DNA, 15 bp, Homo sapiens
cacagagcagccaaa

SEQ ID NO: 861139 - DNA, 15 bp, Homo sapiens
acagagcagccaaaa

SEQ ID NO: 861140 - DNA, 15 bp, Homo sapiens
cagagcagccaaaaa

SEQ ID NO: 861141 - DNA, 15 bp, Homo sapiens
agagcagccaaaaat

SEQ ID NO: 861142 - DNA, 15 bp, Homo sapiens
gagcagccaaaaatg

SEQ ID NO: 861143 - DNA, 15 bp, Homo sapiens
agcagccaaaaatgg

SEQ ID NO: 861144 - DNA, 15 bp, Homo sapiens
gcagccaaaaatgga

SEQ ID NO: 861145 - DNA, 15 bp, Homo sapiens
cagccaaaaatggaa

SEQ ID NO: 861146 - DNA, 15 bp, Homo sapiens
agccaaaaatggaaa

SEQ ID NO: 861147 - DNA, 15 bp, Homo sapiens
gccaaaaatggaaac

SEQ ID NO: 861148 - DNA, 15 bp, Homo sapiens
ccaaaaatggaaacc

SEQ ID NO: 861149 - DNA, 15 bp, Homo sapiens
caaaaatggaaacca

SEQ ID NO: 861150 - DNA, 15 bp, Homo sapiens
aaaaatggaaaccag

SEQ ID NO: 861151 - DNA, 15 bp, Homo sapiens
aaaatggaaaccaga

SEQ ID NO: 861152 - DNA, 15 bp, Homo sapiens
aaatggaaaccagaa

SEQ ID NO: 861153 - DNA, 15 bp, Homo sapiens
aatggaaaccagaat

SEQ ID NO: 861154 - DNA, 15 bp, Homo sapiens
atggaaaccagaatg

SEQ ID NO: 861155 - DNA, 15 bp, Homo sapiens
tggaaaccagaatgg

SEQ ID NO: 861156 - DNA, 15 bp, Homo sapiens
ggaaaccagaatgga

SEQ ID NO: 861157 - DNA, 15 bp, Homo sapiens
gaaaccagaatggag

SEQ ID NO: 861158 - DNA, 15 bp, Homo sapiens
aaaccagaatggagt

SEQ ID NO: 861159 - DNA, 15 bp, Homo sapiens
aaccagaatggagtg

SEQ ID NO: 861160 - DNA, 15 bp, Homo sapiens
accagaatggagtgg

SEQ ID NO: 861161 - DNA, 15 bp, Homo sapiens
ccagaatggagtgga

SEQ ID NO: 861162 - DNA, 15 bp, Homo sapiens
cagaatggagtggac

SEQ ID NO: 861163 - DNA, 15 bp, Homo sapiens
agaatggagtggacc

SEQ ID NO: 861164 - DNA, 15 bp, Homo sapiens
gaatggagtggacct

SEQ ID NO: 861165 - DNA, 15 bp, Homo sapiens
aatggagtggaccta

SEQ ID NO: 861166 - DNA, 15 bp, Homo sapiens
atggagtggacctag

SEQ ID NO: 861167 - DNA, 15 bp, Homo sapiens
tggagtggacctagt

SEQ ID NO: 861168 - DNA, 15 bp, Homo sapiens
ggagtggacctagta

SEQ ID NO: 861169 - DNA, 15 bp, Homo sapiens
gagtggacctagtaa

SEQ ID NO: 861170 - DNA, 15 bp, Homo sapiens
agtggacctagtaat

SEQ ID NO: 861171 - DNA, 15 bp, Homo sapiens
gtggacctagtaatc

SEQ ID NO: 861172 - DNA, 15 bp, Homo sapiens
tggacctagtaatca

SEQ ID NO: 861173 - DNA, 15 bp, Homo sapiens
ggacctagtaatcat

SEQ ID NO: 861174 - DNA, 15 bp, Homo sapiens
gacctagtaatcata

SEQ ID NO: 861175 - DNA, 15 bp, Homo sapiens
acctagtaatcataa

SEQ ID NO: 861176 - DNA, 15 bp, Homo sapiens
cctagtaatcataag

SEQ ID NO: 861177 - DNA, 15 bp, Homo sapiens
ctagtaatcataagc

SEQ ID NO: 861178 - DNA, 15 bp, Homo sapiens
tagtaatcataagca

SEQ ID NO: 861179 - DNA, 15 bp, Homo sapiens
agtaatcataagcag

SEQ ID NO: 861180 - DNA, 15 bp, Homo sapiens
gtaatcataagcagg

SEQ ID NO: 861181 - DNA, 15 bp, Homo sapiens
taatcataagcaggt

SEQ ID NO: 861182 - DNA, 15 bp, Homo sapiens
aatcataagcaggtc

SEQ ID NO: 861183 - DNA, 15 bp, Homo sapiens
atcataagcaggtca

SEQ ID NO: 861184 - DNA, 15 bp, Homo sapiens
tcataagcaggtcat

SEQ ID NO: 861185 - DNA, 15 bp, Homo sapiens
cataagcaggtcatg

SEQ ID NO: 861186 - DNA, 15 bp, Homo sapiens
ataagcaggtcatgc

SEQ ID NO: 861187 - DNA, 15 bp, Homo sapiens
taagcaggtcatgct

SEQ ID NO: 861188 - DNA, 15 bp, Homo sapiens
aagcaggtcatgctc

SEQ ID NO: 861189 - DNA, 15 bp, Homo sapiens
agcaggtcatgctca

SEQ ID NO: 861190 - DNA, 15 bp, Homo sapiens
gcaggtcatgctcat

SEQ ID NO: 861191 - DNA, 15 bp, Homo sapiens
caggtcatgctcatt

SEQ ID NO: 861192 - DNA, 15 bp, Homo sapiens
aggtcatgctcattg

SEQ ID NO: 861193 - DNA, 15 bp, Homo sapiens
ggtcatgctcattgg

SEQ ID NO: 861194 - DNA, 15 bp, Homo sapiens
gtcatgctcattggt

SEQ ID NO: 861195 - DNA, 15 bp, Homo sapiens
tcatgctcattggtg

SEQ ID NO: 861196 - DNA, 15 bp, Homo sapiens
catgctcattggtga

SEQ ID NO: 861197 - DNA, 15 bp, Homo sapiens
atgctcattggtgag

SEQ ID NO: 861198 - DNA, 15 bp, Homo sapiens
tgctcattggtgagg

SEQ ID NO: 861199 - DNA, 15 bp, Homo sapiens
gctcattggtgagga

SEQ ID NO: 861200 - DNA, 15 bp, Homo sapiens
ctcattggtgaggag

SEQ ID NO: 861201 - DNA, 15 bp, Homo sapiens
tcattggtgaggaga

SEQ ID NO: 861202 - DNA, 15 bp, Homo sapiens
cattggtgaggagag

SEQ ID NO: 861203 - DNA, 15 bp, Homo sapiens
attggtgaggagaga

SEQ ID NO: 861204 - DNA, 15 bp, Homo sapiens
ttggtgaggagagac

SEQ ID NO: 861205 - DNA, 15 bp, Homo sapiens
tggtgaggagagaca

SEQ ID NO: 861206 - DNA, 15 bp, Homo sapiens
ggtgaggagagacag

SEQ ID NO: 861207 - DNA, 15 bp, Homo sapiens
gtgaggagagacaga

SEQ ID NO: 861208 - DNA, 15 bp, Homo sapiens
tgaggagagacagag

SEQ ID NO: 861209 - DNA, 15 bp, Homo sapiens
gaggagagacagagg

SEQ ID NO: 861210 - DNA, 15 bp, Homo sapiens
aggagagacagaggg

SEQ ID NO: 861211 - DNA, 15 bp, Homo sapiens
ggagagacagaggga

SEQ ID NO: 861212 - DNA, 15 bp, Homo sapiens
gagagacagagggag

SEQ ID NO: 861213 - DNA, 15 bp, Homo sapiens
agagacagagggagg

SEQ ID NO: 861214 - DNA, 15 bp, Homo sapiens
gagacagagggaggc

SEQ ID NO: 861215 - DNA, 15 bp, Homo sapiens
agacagagggaggca

SEQ ID NO: 861216 - DNA, 15 bp, Homo sapiens
gacagagggaggcat

SEQ ID NO: 861217 - DNA, 15 bp, Homo sapiens
acagagggaggcata

SEQ ID NO: 861218 - DNA, 15 bp, Homo sapiens
cagagggaggcatac

SEQ ID NO: 861219 - DNA, 15 bp, Homo sapiens
agagggaggcatact

SEQ ID NO: 861220 - DNA, 15 bp, Homo sapiens
gagggaggcatacta

SEQ ID NO: 861221 - DNA, 15 bp, Homo sapiens
agggaggcatactac

SEQ ID NO: 861222 - DNA, 15 bp, Homo sapiens
gggaggcatactacc

SEQ ID NO: 861223 - DNA, 15 bp, Homo sapiens
ggaggcatactacca

SEQ ID NO: 861224 - DNA, 15 bp, Homo sapiens
gaggcatactaccaa

SEQ ID NO: 861225 - DNA, 15 bp, Homo sapiens
aggcatactaccaac

SEQ ID NO: 861226 - DNA, 15 bp, Homo sapiens
ggcatactaccaaca

SEQ ID NO: 861227 - DNA, 15 bp, Homo sapiens
gcatactaccaacat

SEQ ID NO: 861228 - DNA, 15 bp, Homo sapiens
catactaccaacatt

SEQ ID NO: 861229 - DNA, 15 bp, Homo sapiens
atactaccaacattt

SEQ ID NO: 861230 - DNA, 15 bp, Homo sapiens
tactaccaacatttg

SEQ ID NO: 861231 - DNA, 15 bp, Homo sapiens
actaccaacatttgc

SEQ ID NO: 861232 - DNA, 15 bp, Homo sapiens
ctaccaacatttgct

SEQ ID NO: 861233 - DNA, 15 bp, Homo sapiens
taccaacatttgctg

SEQ ID NO: 861234 - DNA, 15 bp, Homo sapiens
accaacatttgctga

SEQ ID NO: 861235 - DNA, 15 bp, Homo sapiens
ccaacatttgctgaa

SEQ ID NO: 861236 - DNA, 15 bp, Homo sapiens
caacatttgctgaaa

SEQ ID NO: 861237 - DNA, 15 bp, Homo sapiens
aacatttgctgaaaa

SEQ ID NO: 861238 - DNA, 15 bp, Homo sapiens
acatttgctgaaaaa

SEQ ID NO: 861239 - DNA, 15 bp, Homo sapiens
catttgctgaaaaat

SEQ ID NO: 861240 - DNA, 15 bp, Homo sapiens
atttgctgaaaaatt

SEQ ID NO: 861241 - DNA, 15 bp, Homo sapiens
tttgctgaaaaatta

SEQ ID NO: 861242 - DNA, 15 bp, Homo sapiens
ttgctgaaaaattat

SEQ ID NO: 861243 - DNA, 15 bp, Homo sapiens
tgctgaaaaattatg

SEQ ID NO: 861244 - DNA, 15 bp, Homo sapiens
gctgaaaaattatgt

SEQ ID NO: 861245 - DNA, 15 bp, Homo sapiens
ctgaaaaattatgtt

SEQ ID NO: 861246 - DNA, 15 bp, Homo sapiens
tgaaaaattatgttt

SEQ ID NO: 861247 - DNA, 15 bp, Homo sapiens
gaaaaattatgtttc

SEQ ID NO: 861248 - DNA, 15 bp, Homo sapiens
aaaaattatgtttct

SEQ ID NO: 861249 - DNA, 15 bp, Homo sapiens
aaaattatgtttctc

SEQ ID NO: 861250 - DNA, 15 bp, Homo sapiens
aaattatgtttctct

SEQ ID NO: 861251 - DNA, 15 bp, Homo sapiens
aattatgtttctctt

SEQ ID NO: 861252 - DNA, 15 bp, Homo sapiens
attatgtttctcttt

SEQ ID NO: 861253 - DNA, 15 bp, Homo sapiens
ttatgtttctctttt

SEQ ID NO: 861254 - DNA, 15 bp, Homo sapiens
tatgtttctcttttg

SEQ ID NO: 861255 - DNA, 15 bp, Homo sapiens
atgtttctcttttga

SEQ ID NO: 861256 - DNA, 15 bp, Homo sapiens
tgtttctcttttgag

SEQ ID NO: 861257 - DNA, 15 bp, Homo sapiens
gtttctcttttgagg

SEQ ID NO: 861258 - DNA, 15 bp, Homo sapiens
tttctcttttgaggc

SEQ ID NO: 861259 - DNA, 15 bp, Homo sapiens
ttctcttttgaggct

SEQ ID NO: 861260 - DNA, 15 bp, Homo sapiens
tctcttttgaggcta

SEQ ID NO: 861261 - DNA, 15 bp, Homo sapiens
ctcttttgaggctag

SEQ ID NO: 861262 - DNA, 15 bp, Homo sapiens
tcttttgaggctagc

SEQ ID NO: 861263 - DNA, 15 bp, Homo sapiens
cttttgaggctagca

SEQ ID NO: 861264 - DNA, 15 bp, Homo sapiens
ttttgaggctagcat

SEQ ID NO: 861265 - DNA, 15 bp, Homo sapiens
tttgaggctagcatc

SEQ ID NO: 861266 - DNA, 15 bp, Homo sapiens
ttgaggctagcatca

SEQ ID NO: 861267 - DNA, 15 bp, Homo sapiens
tgaggctagcatcat

SEQ ID NO: 861268 - DNA, 15 bp, Homo sapiens
gaggctagcatcatg

SEQ ID NO: 861269 - DNA, 15 bp, Homo sapiens
aggctagcatcatgt

SEQ ID NO: 861270 - DNA, 15 bp, Homo sapiens
ggctagcatcatgtt

SEQ ID NO: 861271 - DNA, 15 bp, Homo sapiens
gctagcatcatgttt

SEQ ID NO: 861272 - DNA, 15 bp, Homo sapiens
ctagcatcatgtttt

SEQ ID NO: 861273 - DNA, 15 bp, Homo sapiens
tagcatcatgtttta

SEQ ID NO: 861274 - DNA, 15 bp, Homo sapiens
agcatcatgttttag

SEQ ID NO: 861275 - DNA, 15 bp, Homo sapiens
gcatcatgttttagt

SEQ ID NO: 861276 - DNA, 15 bp, Homo sapiens
catcatgttttagtc

SEQ ID NO: 861277 - DNA, 15 bp, Homo sapiens
atcatgttttagtct

SEQ ID NO: 861278 - DNA, 15 bp, Homo sapiens
tcatgttttagtctt

SEQ ID NO: 861279 - DNA, 15 bp, Homo sapiens
catgttttagtctta

SEQ ID NO: 861280 - DNA, 15 bp, Homo sapiens
atgttttagtcttat

SEQ ID NO: 861281 - DNA, 15 bp, Homo sapiens
tgttttagtcttatc

SEQ ID NO: 861282 - DNA, 15 bp, Homo sapiens
gttttagtcttatct

SEQ ID NO: 861283 - DNA, 15 bp, Homo sapiens
ttttagtcttatctg

SEQ ID NO: 861284 - DNA, 15 bp, Homo sapiens
tttagtcttatctga

SEQ ID NO: 861285 - DNA, 15 bp, Homo sapiens
ttagtcttatctgag

SEQ ID NO: 861286 - DNA, 15 bp, Homo sapiens
tagtcttatctgagc

SEQ ID NO: 861287 - DNA, 15 bp, Homo sapiens
agtcttatctgagca

SEQ ID NO: 861288 - DNA, 15 bp, Homo sapiens
gtcttatctgagcat

SEQ ID NO: 861289 - DNA, 15 bp, Homo sapiens
tcttatctgagcatg

SEQ ID NO: 861290 - DNA, 15 bp, Homo sapiens
cttatctgagcatgg

SEQ ID NO: 861291 - DNA, 15 bp, Homo sapiens
ttatctgagcatggg

SEQ ID NO: 861292 - DNA, 15 bp, Homo sapiens
tatctgagcatgggg

SEQ ID NO: 861293 - DNA, 15 bp, Homo sapiens
atctgagcatggggt

SEQ ID NO: 861294 - DNA, 15 bp, Homo sapiens
tctgagcatggggtc

SEQ ID NO: 861295 - DNA, 15 bp, Homo sapiens
ctgagcatggggtca

SEQ ID NO: 861296 - DNA, 15 bp, Homo sapiens
tgagcatggggtcac

SEQ ID NO: 861297 - DNA, 15 bp, Homo sapiens
gagcatggggtcact

SEQ ID NO: 861298 - DNA, 15 bp, Homo sapiens
agcatggggtcactc

SEQ ID NO: 861299 - DNA, 15 bp, Homo sapiens
gcatggggtcactcc

SEQ ID NO: 861300 - DNA, 15 bp, Homo sapiens
catggggtcactccc

SEQ ID NO: 861301 - DNA, 15 bp, Homo sapiens
atggggtcactcccc

SEQ ID NO: 861302 - DNA, 15 bp, Homo sapiens
tggggtcactcccca

SEQ ID NO: 861303 - DNA, 15 bp, Homo sapiens
ggggtcactccccaa

SEQ ID NO: 861304 - DNA, 15 bp, Homo sapiens
gggtcactccccaaa

SEQ ID NO: 861305 - DNA, 15 bp, Homo sapiens
ggtcactccccaaag

SEQ ID NO: 861306 - DNA, 15 bp, Homo sapiens
gtcactccccaaaga

SEQ ID NO: 861307 - DNA, 15 bp, Homo sapiens
tcactccccaaagag

SEQ ID NO: 861308 - DNA, 15 bp, Homo sapiens
cactccccaaagaga

SEQ ID NO: 861309 - DNA, 15 bp, Homo sapiens
actccccaaagagat

SEQ ID NO: 861310 - DNA, 15 bp, Homo sapiens
ctccccaaagagatc

SEQ ID NO: 861311 - DNA, 15 bp, Homo sapiens
tccccaaagagatct

SEQ ID NO: 861312 - DNA, 15 bp, Homo sapiens
ccccaaagagatcta

SEQ ID NO: 861313 - DNA, 15 bp, Homo sapiens
cccaaagagatctat

SEQ ID NO: 861314 - DNA, 15 bp, Homo sapiens
ccaaagagatctata

SEQ ID NO: 861315 - DNA, 15 bp, Homo sapiens
caaagagatctatat

SEQ ID NO: 861316 - DNA, 15 bp, Homo sapiens
aaagagatctatatt

SEQ ID NO: 861317 - DNA, 15 bp, Homo sapiens
aagagatctatattc

SEQ ID NO: 861318 - DNA, 15 bp, Homo sapiens
agagatctatattct

SEQ ID NO: 861319 - DNA, 15 bp, Homo sapiens
gagatctatattctg

SEQ ID NO: 861320 - DNA, 15 bp, Homo sapiens
agatctatattctgt

SEQ ID NO: 861321 - DNA, 15 bp, Homo sapiens
gatctatattctgtg

SEQ ID NO: 861322 - DNA, 15 bp, Homo sapiens
atctatattctgtgt

SEQ ID NO: 861323 - DNA, 15 bp, Homo sapiens
tctatattctgtgta

SEQ ID NO: 861324 - DNA, 15 bp, Homo sapiens
ctatattctgtgtat

SEQ ID NO: 861325 - DNA, 15 bp, Homo sapiens
tatattctgtgtata

SEQ ID NO: 861326 - DNA, 15 bp, Homo sapiens
atattctgtgtatac

SEQ ID NO: 861327 - DNA, 15 bp, Homo sapiens
tattctgtgtatact

SEQ ID NO: 861328 - DNA, 15 bp, Homo sapiens
attctgtgtatactg

SEQ ID NO: 861329 - DNA, 15 bp, Homo sapiens
ttctgtgtatactgc

SEQ ID NO: 861330 - DNA, 15 bp, Homo sapiens
tctgtgtatactgca

SEQ ID NO: 861331 - DNA, 15 bp, Homo sapiens
ctgtgtatactgcat

SEQ ID NO: 861332 - DNA, 15 bp, Homo sapiens
tgtgtatactgcatc

SEQ ID NO: 861333 - DNA, 15 bp, Homo sapiens
gtgtatactgcatca

SEQ ID NO: 861334 - DNA, 15 bp, Homo sapiens
tgtatactgcatcac

SEQ ID NO: 861335 - DNA, 15 bp, Homo sapiens
gtatactgcatcacc

SEQ ID NO: 861336 - DNA, 15 bp, Homo sapiens
tatactgcatcacca

SEQ ID NO: 861337 - DNA, 15 bp, Homo sapiens
atactgcatcaccaa

SEQ ID NO: 861338 - DNA, 15 bp, Homo sapiens
tactgcatcaccaag

SEQ ID NO: 861339 - DNA, 15 bp, Homo sapiens
actgcatcaccaagg

SEQ ID NO: 861340 - DNA, 15 bp, Homo sapiens
ctgcatcaccaaggg

SEQ ID NO: 861341 - DNA, 15 bp, Homo sapiens
tgcatcaccaaggga

SEQ ID NO: 861342 - DNA, 15 bp, Homo sapiens
gcatcaccaagggag

SEQ ID NO: 861343 - DNA, 15 bp, Homo sapiens
catcaccaagggagt

SEQ ID NO: 861344 - DNA, 15 bp, Homo sapiens
atcaccaagggagtg

SEQ ID NO: 861345 - DNA, 15 bp, Homo sapiens
tcaccaagggagtga

SEQ ID NO: 861346 - DNA, 15 bp, Homo sapiens
caccaagggagtgag

SEQ ID NO: 861347 - DNA, 15 bp, Homo sapiens
accaagggagtgaga

SEQ ID NO: 861348 - DNA, 15 bp, Homo sapiens
ccaagggagtgagac

SEQ ID NO: 861349 - DNA, 15 bp, Homo sapiens
caagggagtgagact

SEQ ID NO: 861350 - DNA, 15 bp, Homo sapiens
aagggagtgagactt

SEQ ID NO: 861351 - DNA, 15 bp, Homo sapiens
agggagtgagacttg

SEQ ID NO: 861352 - DNA, 15 bp, Homo sapiens
gggagtgagacttgt

SEQ ID NO: 861353 - DNA, 15 bp, Homo sapiens
ggagtgagacttgtt

SEQ ID NO: 861354 - DNA, 15 bp, Homo sapiens
gagtgagacttgttg

SEQ ID NO: 861355 - DNA, 15 bp, Homo sapiens
agtgagacttgttga

SEQ ID NO: 861356 - DNA, 15 bp, Homo sapiens
gtgagacttgttgac

SEQ ID NO: 861357 - DNA, 15 bp, Homo sapiens
tgagacttgttgaca

SEQ ID NO: 861358 - DNA, 15 bp, Homo sapiens
gagacttgttgacac

SEQ ID NO: 861359 - DNA, 15 bp, Homo sapiens
agacttgttgacaca

SEQ ID NO: 861360 - DNA, 15 bp, Homo sapiens
gacttgttgacacag

SEQ ID NO: 861361 - DNA, 15 bp, Homo sapiens
acttgttgacacagc

SEQ ID NO: 861362 - DNA, 15 bp, Homo sapiens
cttgttgacacagca

SEQ ID NO: 861363 - DNA, 15 bp, Homo sapiens
ttgttgacacagcat

SEQ ID NO: 861364 - DNA, 15 bp, Homo sapiens
tgttgacacagcatt

SEQ ID NO: 861365 - DNA, 15 bp, Homo sapiens
gttgacacagcatta

SEQ ID NO: 861366 - DNA, 15 bp, Homo sapiens
ttgacacagcattac

SEQ ID NO: 861367 - DNA, 15 bp, Homo sapiens
tgacacagcattact

SEQ ID NO: 861368 - DNA, 15 bp, Homo sapiens
gacacagcattacta

SEQ ID NO: 861369 - DNA, 15 bp, Homo sapiens
acacagcattactaa

SEQ ID NO: 861370 - DNA, 15 bp, Homo sapiens
cacagcattactaag

SEQ ID NO: 861371 - DNA, 15 bp, Homo sapiens
acagcattactaaga

SEQ ID NO: 861372 - DNA, 15 bp, Homo sapiens
cagcattactaagaa

SEQ ID NO: 861373 - DNA, 15 bp, Homo sapiens
agcattactaagaaa

SEQ ID NO: 861374 - DNA, 15 bp, Homo sapiens
gcattactaagaaat

SEQ ID NO: 861375 - DNA, 15 bp, Homo sapiens
cattactaagaaatg

SEQ ID NO: 861376 - DNA, 15 bp, Homo sapiens
attactaagaaatgg

SEQ ID NO: 861377 - DNA, 15 bp, Homo sapiens
ttactaagaaatggc

SEQ ID NO: 861378 - DNA, 15 bp, Homo sapiens
tactaagaaatggct

SEQ ID NO: 861379 - DNA, 15 bp, Homo sapiens
actaagaaatggcta

SEQ ID NO: 861380 - DNA, 15 bp, Homo sapiens
ctaagaaatggctag

SEQ ID NO: 861381 - DNA, 15 bp, Homo sapiens
taagaaatggctagt

SEQ ID NO: 861382 - DNA, 15 bp, Homo sapiens
aagaaatggctagtt

SEQ ID NO: 861383 - DNA, 15 bp, Homo sapiens
agaaatggctagttg

SEQ ID NO: 861384 - DNA, 15 bp, Homo sapiens
gaaatggctagttgg

SEQ ID NO: 861385 - DNA, 15 bp, Homo sapiens
aaatggctagttggt

SEQ ID NO: 861386 - DNA, 15 bp, Homo sapiens
aatggctagttggtt

SEQ ID NO: 861387 - DNA, 15 bp, Homo sapiens
atggctagttggtta

SEQ ID NO: 861388 - DNA, 15 bp, Homo sapiens
tggctagttggttaa

SEQ ID NO: 861389 - DNA, 15 bp, Homo sapiens
ggctagttggttaac

SEQ ID NO: 861390 - DNA, 15 bp, Homo sapiens
gctagttggttaact

SEQ ID NO: 861391 - DNA, 15 bp, Homo sapiens
ctagttggttaactt

SEQ ID NO: 861392 - DNA, 15 bp, Homo sapiens
tagttggttaacttg

SEQ ID NO: 861393 - DNA, 15 bp, Homo sapiens
agttggttaacttgg

SEQ ID NO: 861394 - DNA, 15 bp, Homo sapiens
gttggttaacttgga

SEQ ID NO: 861395 - DNA, 15 bp, Homo sapiens
ttggttaacttggat

SEQ ID NO: 861396 - DNA, 15 bp, Homo sapiens
tggttaacttggatt

SEQ ID NO: 861397 - DNA, 15 bp, Homo sapiens
ggttaacttggattc

SEQ ID NO: 861398 - DNA, 15 bp, Homo sapiens
gttaacttggattca

SEQ ID NO: 861399 - DNA, 15 bp, Homo sapiens
ttaacttggattcat

SEQ ID NO: 861400 - DNA, 15 bp, Homo sapiens
taacttggattcatg

SEQ ID NO: 861401 - DNA, 15 bp, Homo sapiens
aacttggattcatgt

SEQ ID NO: 861402 - DNA, 15 bp, Homo sapiens
acttggattcatgtt

SEQ ID NO: 861403 - DNA, 15 bp, Homo sapiens
cttggattcatgtta

SEQ ID NO: 861404 - DNA, 15 bp, Homo sapiens
ttggattcatgttac

SEQ ID NO: 861405 - DNA, 15 bp, Homo sapiens
tggattcatgttacg

SEQ ID NO: 861406 - DNA, 15 bp, Homo sapiens
ggattcatgttacga

SEQ ID NO: 861407 - DNA, 15 bp, Homo sapiens
gattcatgttacgac

SEQ ID NO: 861408 - DNA, 15 bp, Homo sapiens
attcatgttacgact

SEQ ID NO: 861409 - DNA, 15 bp, Homo sapiens
ttcatgttacgacta

SEQ ID NO: 861410 - DNA, 15 bp, Homo sapiens
tcatgttacgactag

SEQ ID NO: 861411 - DNA, 15 bp, Homo sapiens
catgttacgactaga

SEQ ID NO: 861412 - DNA, 15 bp, Homo sapiens
atgttacgactagaa

SEQ ID NO: 861413 - DNA, 15 bp, Homo sapiens
tgttacgactagaat

SEQ ID NO: 861414 - DNA, 15 bp, Homo sapiens
gttacgactagaatt

SEQ ID NO: 861415 - DNA, 15 bp, Homo sapiens
ttacgactagaatta

SEQ ID NO: 861416 - DNA, 15 bp, Homo sapiens
tacgactagaattag

SEQ ID NO: 861417 - DNA, 15 bp, Homo sapiens
acgactagaattagt

SEQ ID NO: 861418 - DNA, 15 bp, Homo sapiens
cgactagaattagtg

SEQ ID NO: 861419 - DNA, 15 bp, Homo sapiens
gactagaattagtgt

SEQ ID NO: 861420 - DNA, 15 bp, Homo sapiens
actagaattagtgta

SEQ ID NO: 861421 - DNA, 15 bp, Homo sapiens
ctagaattagtgtag

SEQ ID NO: 861422 - DNA, 15 bp, Homo sapiens
tagaattagtgtagt

SEQ ID NO: 861423 - DNA, 15 bp, Homo sapiens
agaattagtgtagtc

SEQ ID NO: 861424 - DNA, 15 bp, Homo sapiens
gaattagtgtagtct

SEQ ID NO: 861425 - DNA, 15 bp, Homo sapiens
aattagtgtagtctc

SEQ ID NO: 861426 - DNA, 15 bp, Homo sapiens
attagtgtagtctct

SEQ ID NO: 861427 - DNA, 15 bp, Homo sapiens
ttagtgtagtctcta

SEQ ID NO: 861428 - DNA, 15 bp, Homo sapiens
tagtgtagtctctac

SEQ ID NO: 861429 - DNA, 15 bp, Homo sapiens
agtgtagtctctact

SEQ ID NO: 861430 - DNA, 15 bp, Homo sapiens
gtgtagtctctactc

SEQ ID NO: 861431 - DNA, 15 bp, Homo sapiens
tgtagtctctactct

SEQ ID NO: 861432 - DNA, 15 bp, Homo sapiens
gtagtctctactctt

SEQ ID NO: 861433 - DNA, 15 bp, Homo sapiens
tagtctctactctta

SEQ ID NO: 861434 - DNA, 15 bp, Homo sapiens
agtctctactcttac

SEQ ID NO: 861435 - DNA, 15 bp, Homo sapiens
gtctctactcttact

SEQ ID NO: 861436 - DNA, 15 bp, Homo sapiens
tctctactcttactg

SEQ ID NO: 861437 - DNA, 15 bp, Homo sapiens
ctctactcttactgt

SEQ ID NO: 861438 - DNA, 15 bp, Homo sapiens
tctactcttactgtg

SEQ ID NO: 861439 - DNA, 15 bp, Homo sapiens
ctactcttactgtgt

SEQ ID NO: 861440 - DNA, 15 bp, Homo sapiens
tactcttactgtgtg

SEQ ID NO: 861441 - DNA, 15 bp, Homo sapiens
actcttactgtgtgc

SEQ ID NO: 861442 - DNA, 15 bp, Homo sapiens
ctcttactgtgtgca

SEQ ID NO: 861443 - DNA, 15 bp, Homo sapiens
tcttactgtgtgcaa

SEQ ID NO: 861444 - DNA, 15 bp, Homo sapiens
cttactgtgtgcaag

SEQ ID NO: 861445 - DNA, 15 bp, Homo sapiens
ttactgtgtgcaagc

SEQ ID NO: 861446 - DNA, 15 bp, Homo sapiens
tactgtgtgcaagca

SEQ ID NO: 861447 - DNA, 15 bp, Homo sapiens
actgtgtgcaagcaa

SEQ ID NO: 861448 - DNA, 15 bp, Homo sapiens
ctgtgtgcaagcaac

SEQ ID NO: 861449 - DNA, 15 bp, Homo sapiens
tgtgtgcaagcaact

SEQ ID NO: 861450 - DNA, 15 bp, Homo sapiens
gtgtgcaagcaactc

SEQ ID NO: 861451 - DNA, 15 bp, Homo sapiens
tgtgcaagcaactct

SEQ ID NO: 861452 - DNA, 15 bp, Homo sapiens
gtgcaagcaactctg

SEQ ID NO: 861453 - DNA, 15 bp, Homo sapiens
tgcaagcaactctga

SEQ ID NO: 861454 - DNA, 15 bp, Homo sapiens
gcaagcaactctgag

SEQ ID NO: 861455 - DNA, 15 bp, Homo sapiens
caagcaactctgagt

SEQ ID NO: 861456 - DNA, 15 bp, Homo sapiens
aagcaactctgagta

SEQ ID NO: 861457 - DNA, 15 bp, Homo sapiens
agcaactctgagtac

SEQ ID NO: 861458 - DNA, 15 bp, Homo sapiens
gcaactctgagtaca

SEQ ID NO: 861459 - DNA, 15 bp, Homo sapiens
caactctgagtacac

SEQ ID NO: 861460 - DNA, 15 bp, Homo sapiens
aactctgagtacaca

SEQ ID NO: 861461 - DNA, 15 bp, Homo sapiens
actctgagtacacag

SEQ ID NO: 861462 - DNA, 15 bp, Homo sapiens
ctctgagtacacagg

SEQ ID NO: 861463 - DNA, 15 bp, Homo sapiens
tctgagtacacaggg

SEQ ID NO: 861464 - DNA, 15 bp, Homo sapiens
ctgagtacacaggga

SEQ ID NO: 861465 - DNA, 15 bp, Homo sapiens
tgagtacacagggag

SEQ ID NO: 861466 - DNA, 15 bp, Homo sapiens
gagtacacagggagg

SEQ ID NO: 861467 - DNA, 15 bp, Homo sapiens
agtacacagggagga

SEQ ID NO: 861468 - DNA, 15 bp, Homo sapiens
gtacacagggaggat

SEQ ID NO: 861469 - DNA, 15 bp, Homo sapiens
tacacagggaggatg

SEQ ID NO: 861470 - DNA, 15 bp, Homo sapiens
acacagggaggatgt

SEQ ID NO: 861471 - DNA, 15 bp, Homo sapiens
cacagggaggatgtg

SEQ ID NO: 861472 - DNA, 15 bp, Homo sapiens
acagggaggatgtgt

SEQ ID NO: 861473 - DNA, 15 bp, Homo sapiens
cagggaggatgtgtg

SEQ ID NO: 861474 - DNA, 15 bp, Homo sapiens
agggaggatgtgtgt

SEQ ID NO: 861475 - DNA, 15 bp, Homo sapiens
gggaggatgtgtgta

SEQ ID NO: 861476 - DNA, 15 bp, Homo sapiens
ggaggatgtgtgtat

SEQ ID NO: 861477 - DNA, 15 bp, Homo sapiens
gaggatgtgtgtatg

SEQ ID NO: 861478 - DNA, 15 bp, Homo sapiens
aggatgtgtgtatgt

SEQ ID NO: 861479 - DNA, 15 bp, Homo sapiens
ggatgtgtgtatgtg

SEQ ID NO: 861480 - DNA, 15 bp, Homo sapiens
gatgtgtgtatgtgt

SEQ ID NO: 861481 - DNA, 15 bp, Homo sapiens
tgtgtgtatgtgttg

SEQ ID NO: 861482 - DNA, 15 bp, Homo sapiens
gtgtgtatgtgttgt

SEQ ID NO: 861483 - DNA, 15 bp, Homo sapiens
tgtgtatgtgttgtt

SEQ ID NO: 861484 - DNA, 15 bp, Homo sapiens
gtgtatgtgttgttg

SEQ ID NO: 861485 - DNA, 15 bp, Homo sapiens
tgtatgtgttgttgc

SEQ ID NO: 861486 - DNA, 15 bp, Homo sapiens
gtatgtgttgttgct

SEQ ID NO: 861487 - DNA, 15 bp, Homo sapiens
tatgtgttgttgctg

SEQ ID NO: 861488 - DNA, 15 bp, Homo sapiens
atgtgttgttgctgt

SEQ ID NO: 861489 - DNA, 15 bp, Homo sapiens
tgtgttgttgctgtt

SEQ ID NO: 861490 - DNA, 15 bp, Homo sapiens
gtgttgttgctgttg

SEQ ID NO: 861491 - DNA, 15 bp, Homo sapiens
tgttgttgctgttgt

SEQ ID NO: 861492 - DNA, 15 bp, Homo sapiens
gttgttgctgttgtt

SEQ ID NO: 861493 - DNA, 15 bp, Homo sapiens
ttgttgctgttgtta

SEQ ID NO: 861494 - DNA, 15 bp, Homo sapiens
tgttgctgttgttaa

SEQ ID NO: 861495 - DNA, 15 bp, Homo sapiens
gttgctgttgttaaa

SEQ ID NO: 861496 - DNA, 15 bp, Homo sapiens
ttgctgttgttaaat

SEQ ID NO: 861497 - DNA, 15 bp, Homo sapiens
tgctgttgttaaatt

SEQ ID NO: 861498 - DNA, 15 bp, Homo sapiens
gctgttgttaaattt

SEQ ID NO: 861499 - DNA, 15 bp, Homo sapiens
ctgttgttaaattta

SEQ ID NO: 861500 - DNA, 15 bp, Homo sapiens
tgttgttaaatttaa

SEQ ID NO: 861501 - DNA, 15 bp, Homo sapiens
gttgttaaatttaac

SEQ ID NO: 861502 - DNA, 15 bp, Homo sapiens
ttgttaaatttaaca

SEQ ID NO: 861503 - DNA, 15 bp, Homo sapiens
tgttaaatttaacac

SEQ ID NO: 861504 - DNA, 15 bp, Homo sapiens
gttaaatttaacact

SEQ ID NO: 861505 - DNA, 15 bp, Homo sapiens
ttaaatttaacactt

SEQ ID NO: 861506 - DNA, 15 bp, Homo sapiens
taaatttaacactta

SEQ ID NO: 861507 - DNA, 15 bp, Homo sapiens
aaatttaacacttat

SEQ ID NO: 861508 - DNA, 15 bp, Homo sapiens
aatttaacacttata

SEQ ID NO: 861509 - DNA, 15 bp, Homo sapiens
atttaacacttatat

SEQ ID NO: 861510 - DNA, 15 bp, Homo sapiens
tttaacacttatata

SEQ ID NO: 861511 - DNA, 15 bp, Homo sapiens
ttaacacttatatag

SEQ ID NO: 861512 - DNA, 15 bp, Homo sapiens
taacacttatatagc

SEQ ID NO: 861513 - DNA, 15 bp, Homo sapiens
aacacttatatagca

SEQ ID NO: 861514 - DNA, 15 bp, Homo sapiens
acacttatatagcat

SEQ ID NO: 861515 - DNA, 15 bp, Homo sapiens
cacttatatagcatt

SEQ ID NO: 861516 - DNA, 15 bp, Homo sapiens
acttatatagcattt

SEQ ID NO: 861517 - DNA, 15 bp, Homo sapiens
cttatatagcatttg

SEQ ID NO: 861518 - DNA, 15 bp, Homo sapiens
ttatatagcatttgc

SEQ ID NO: 861519 - DNA, 15 bp, Homo sapiens
tatatagcatttgct

SEQ ID NO: 861520 - DNA, 15 bp, Homo sapiens
atatagcatttgctg

SEQ ID NO: 861521 - DNA, 15 bp, Homo sapiens
tatagcatttgctgc

SEQ ID NO: 861522 - DNA, 15 bp, Homo sapiens
atagcatttgctgca

SEQ ID NO: 861523 - DNA, 15 bp, Homo sapiens
tagcatttgctgcat

SEQ ID NO: 861524 - DNA, 15 bp, Homo sapiens
agcatttgctgcatt

SEQ ID NO: 861525 - DNA, 15 bp, Homo sapiens
gcatttgctgcatta

SEQ ID NO: 861526 - DNA, 15 bp, Homo sapiens
catttgctgcattac

SEQ ID NO: 861527 - DNA, 15 bp, Homo sapiens
atttgctgcattaca

SEQ ID NO: 861528 - DNA, 15 bp, Homo sapiens
tttgctgcattacag

SEQ ID NO: 861529 - DNA, 15 bp, Homo sapiens
ttgctgcattacagg

SEQ ID NO: 861530 - DNA, 15 bp, Homo sapiens
tgctgcattacaggc

SEQ ID NO: 861531 - DNA, 15 bp, Homo sapiens
gctgcattacaggca

SEQ ID NO: 861532 - DNA, 15 bp, Homo sapiens
ctgcattacaggcac

SEQ ID NO: 861533 - DNA, 15 bp, Homo sapiens
tgcattacaggcact

SEQ ID NO: 861534 - DNA, 15 bp, Homo sapiens
gcattacaggcacta

SEQ ID NO: 861535 - DNA, 15 bp, Homo sapiens
cattacaggcactac

SEQ ID NO: 861536 - DNA, 15 bp, Homo sapiens
attacaggcactact

SEQ ID NO: 861537 - DNA, 15 bp, Homo sapiens
ttacaggcactactc

SEQ ID NO: 861538 - DNA, 15 bp, Homo sapiens
tacaggcactactcc

SEQ ID NO: 861539 - DNA, 15 bp, Homo sapiens
acaggcactactccc

SEQ ID NO: 861540 - DNA, 15 bp, Homo sapiens
caggcactactcccc

SEQ ID NO: 861541 - DNA, 15 bp, Homo sapiens
aggcactactccccc

SEQ ID NO: 861542 - DNA, 15 bp, Homo sapiens
ggcactactccccct

SEQ ID NO: 861543 - DNA, 15 bp, Homo sapiens
gcactactcccccta

SEQ ID NO: 861544 - DNA, 15 bp, Homo sapiens
cactactccccctat

SEQ ID NO: 861545 - DNA, 15 bp, Homo sapiens
actactccccctatt

SEQ ID NO: 861546 - DNA, 15 bp, Homo sapiens
ctactccccctatta

SEQ ID NO: 861547 - DNA, 15 bp, Homo sapiens
tactccccctattac

SEQ ID NO: 861548 - DNA, 15 bp, Homo sapiens
actccccctattacc

SEQ ID NO: 861549 - DNA, 15 bp, Homo sapiens
ctccccctattacca

SEQ ID NO: 861550 - DNA, 15 bp, Homo sapiens
tccccctattaccac

SEQ ID NO: 861551 - DNA, 15 bp, Homo sapiens
ccccctattaccaca

SEQ ID NO: 861552 - DNA, 15 bp, Homo sapiens
cccctattaccacaa

SEQ ID NO: 861553 - DNA, 15 bp, Homo sapiens
ccctattaccacaaa

SEQ ID NO: 861554 - DNA, 15 bp, Homo sapiens
cctattaccacaaat

SEQ ID NO: 861555 - DNA, 15 bp, Homo sapiens
ctattaccacaaata

SEQ ID NO: 861556 - DNA, 15 bp, Homo sapiens
tattaccacaaatat

SEQ ID NO: 861557 - DNA, 15 bp, Homo sapiens
attaccacaaatatt

SEQ ID NO: 861558 - DNA, 15 bp, Homo sapiens
ttaccacaaatatta

SEQ ID NO: 861559 - DNA, 15 bp, Homo sapiens
taccacaaatattaa

SEQ ID NO: 861560 - DNA, 15 bp, Homo sapiens
accacaaatattaat

SEQ ID NO: 861561 - DNA, 15 bp, Homo sapiens
ccacaaatattaatt

SEQ ID NO: 861562 - DNA, 15 bp, Homo sapiens
cacaaatattaatta

SEQ ID NO: 861563 - DNA, 15 bp, Homo sapiens
acaaatattaattaa

SEQ ID NO: 861564 - DNA, 15 bp, Homo sapiens
caaatattaattaat

SEQ ID NO: 861565 - DNA, 15 bp, Homo sapiens
aaatattaattaatt

SEQ ID NO: 861566 - DNA, 15 bp, Homo sapiens
aatattaattaattt

SEQ ID NO: 861567 - DNA, 15 bp, Homo sapiens
atattaattaattta

SEQ ID NO: 861568 - DNA, 15 bp, Homo sapiens
tattaattaatttaa

SEQ ID NO: 861569 - DNA, 15 bp, Homo sapiens
attaattaatttaac

SEQ ID NO: 861570 - DNA, 15 bp, Homo sapiens
ttaattaatttaacc

SEQ ID NO: 861571 - DNA, 15 bp, Homo sapiens
taattaatttaaccc

SEQ ID NO: 861572 - DNA, 15 bp, Homo sapiens
aattaatttaaccct

SEQ ID NO: 861573 - DNA, 15 bp, Homo sapiens
attaatttaaccctt

SEQ ID NO: 861574 - DNA, 15 bp, Homo sapiens
ttaatttaaccctta

SEQ ID NO: 861575 - DNA, 15 bp, Homo sapiens
taatttaacccttat

SEQ ID NO: 861576 - DNA, 15 bp, Homo sapiens
aatttaacccttatt

SEQ ID NO: 861577 - DNA, 15 bp, Homo sapiens
atttaacccttatta

SEQ ID NO: 861578 - DNA, 15 bp, Homo sapiens
tttaacccttattat

SEQ ID NO: 861579 - DNA, 15 bp, Homo sapiens
ttaacccttattatg

SEQ ID NO: 861580 - DNA, 15 bp, Homo sapiens
taacccttattatgt

SEQ ID NO: 861581 - DNA, 15 bp, Homo sapiens
aacccttattatgtg

SEQ ID NO: 861582 - DNA, 15 bp, Homo sapiens
acccttattatgtgg

SEQ ID NO: 861583 - DNA, 15 bp, Homo sapiens
cccttattatgtggt

SEQ ID NO: 861584 - DNA, 15 bp, Homo sapiens
ccttattatgtggta

SEQ ID NO: 861585 - DNA, 15 bp, Homo sapiens
cttattatgtggtaa

SEQ ID NO: 861586 - DNA, 15 bp, Homo sapiens
ttattatgtggtaac

SEQ ID NO: 861587 - DNA, 15 bp, Homo sapiens
tattatgtggtaact

SEQ ID NO: 861588 - DNA, 15 bp, Homo sapiens
attatgtggtaactg

SEQ ID NO: 861589 - DNA, 15 bp, Homo sapiens
ttatgtggtaactgc

SEQ ID NO: 861590 - DNA, 15 bp, Homo sapiens
tatgtggtaactgct

SEQ ID NO: 861591 - DNA, 15 bp, Homo sapiens
atgtggtaactgctg

SEQ ID NO: 861592 - DNA, 15 bp, Homo sapiens
tgtggtaactgctgt

SEQ ID NO: 861593 - DNA, 15 bp, Homo sapiens
gtggtaactgctgtt

SEQ ID NO: 861594 - DNA, 15 bp, Homo sapiens
tggtaactgctgttt

SEQ ID NO: 861595 - DNA, 15 bp, Homo sapiens
ggtaactgctgtttg

SEQ ID NO: 861596 - DNA, 15 bp, Homo sapiens
gtaactgctgtttgc

SEQ ID NO: 861597 - DNA, 15 bp, Homo sapiens
taactgctgtttgca

SEQ ID NO: 861598 - DNA, 15 bp, Homo sapiens
aactgctgtttgcag

SEQ ID NO: 861599 - DNA, 15 bp, Homo sapiens
actgctgtttgcagt

SEQ ID NO: 861600 - DNA, 15 bp, Homo sapiens
ctgctgtttgcagtt

SEQ ID NO: 861601 - DNA, 15 bp, Homo sapiens
tgctgtttgcagttg

SEQ ID NO: 861602 - DNA, 15 bp, Homo sapiens
gctgtttgcagttga

SEQ ID NO: 861603 - DNA, 15 bp, Homo sapiens
ctgtttgcagttgag

SEQ ID NO: 861604 - DNA, 15 bp, Homo sapiens
tgtttgcagttgagg

SEQ ID NO: 861605 - DNA, 15 bp, Homo sapiens
gtttgcagttgaggc

SEQ ID NO: 861606 - DNA, 15 bp, Homo sapiens
tttgcagttgaggca

SEQ ID NO: 861607 - DNA, 15 bp, Homo sapiens
ttgcagttgaggcaa

SEQ ID NO: 861608 - DNA, 15 bp, Homo sapiens
tgcagttgaggcaac

SEQ ID NO: 861609 - DNA, 15 bp, Homo sapiens
gcagttgaggcaact

SEQ ID NO: 861610 - DNA, 15 bp, Homo sapiens
cagttgaggcaacta

SEQ ID NO: 861611 - DNA, 15 bp, Homo sapiens
agttgaggcaactat

SEQ ID NO: 861612 - DNA, 15 bp, Homo sapiens
gttgaggcaactata

SEQ ID NO: 861613 - DNA, 15 bp, Homo sapiens
ttgaggcaactataa

SEQ ID NO: 861614 - DNA, 15 bp, Homo sapiens
tgaggcaactataac

SEQ ID NO: 861615 - DNA, 15 bp, Homo sapiens
gaggcaactataacc

SEQ ID NO: 861616 - DNA, 15 bp, Homo sapiens
aggcaactataacct

SEQ ID NO: 861617 - DNA, 15 bp, Homo sapiens
ggcaactataacctg

SEQ ID NO: 861618 - DNA, 15 bp, Homo sapiens
gcaactataacctga

SEQ ID NO: 861619 - DNA, 15 bp, Homo sapiens
caactataacctgag

SEQ ID NO: 861620 - DNA, 15 bp, Homo sapiens
aactataacctgaga

SEQ ID NO: 861621 - DNA, 15 bp, Homo sapiens
actataacctgagac

SEQ ID NO: 861622 - DNA, 15 bp, Homo sapiens
ctataacctgagaca

SEQ ID NO: 861623 - DNA, 15 bp, Homo sapiens
tataacctgagacat

SEQ ID NO: 861624 - DNA, 15 bp, Homo sapiens
ataacctgagacatc

SEQ ID NO: 861625 - DNA, 15 bp, Homo sapiens
taacctgagacatct

SEQ ID NO: 861626 - DNA, 15 bp, Homo sapiens
aacctgagacatctg

SEQ ID NO: 861627 - DNA, 15 bp, Homo sapiens
acctgagacatctgc

SEQ ID NO: 861628 - DNA, 15 bp, Homo sapiens
cctgagacatctgca

SEQ ID NO: 861629 - DNA, 15 bp, Homo sapiens
ctgagacatctgcaa

SEQ ID NO: 861630 - DNA, 15 bp, Homo sapiens
tgagacatctgcaat

SEQ ID NO: 861631 - DNA, 15 bp, Homo sapiens
gagacatctgcaatg

SEQ ID NO: 861632 - DNA, 15 bp, Homo sapiens
agacatctgcaatgt

SEQ ID NO: 861633 - DNA, 15 bp, Homo sapiens
gacatctgcaatgtg

SEQ ID NO: 861634 - DNA, 15 bp, Homo sapiens
acatctgcaatgtgc

SEQ ID NO: 861635 - DNA, 15 bp, Homo sapiens
catctgcaatgtgcc

SEQ ID NO: 861636 - DNA, 15 bp, Homo sapiens
atctgcaatgtgccc

SEQ ID NO: 861637 - DNA, 15 bp, Homo sapiens
tctgcaatgtgcccc

SEQ ID NO: 861638 - DNA, 15 bp, Homo sapiens
ctgcaatgtgcccca

SEQ ID NO: 861639 - DNA, 15 bp, Homo sapiens
tgcaatgtgccccat

SEQ ID NO: 861640 - DNA, 15 bp, Homo sapiens
gcaatgtgccccatt

SEQ ID NO: 861641 - DNA, 15 bp, Homo sapiens
caatgtgccccattt

SEQ ID NO: 861642 - DNA, 15 bp, Homo sapiens
aatgtgccccattta

SEQ ID NO: 861643 - DNA, 15 bp, Homo sapiens
atgtgccccatttac

SEQ ID NO: 861644 - DNA, 15 bp, Homo sapiens
tgtgccccatttaca

SEQ ID NO: 861645 - DNA, 15 bp, Homo sapiens
gtgccccatttacag

SEQ ID NO: 861646 - DNA, 15 bp, Homo sapiens
tgccccatttacaga

SEQ ID NO: 861647 - DNA, 15 bp, Homo sapiens
gccccatttacagat

SEQ ID NO: 861648 - DNA, 15 bp, Homo sapiens
ccccatttacagata

SEQ ID NO: 861649 - DNA, 15 bp, Homo sapiens
cccatttacagataa

SEQ ID NO: 861650 - DNA, 15 bp, Homo sapiens
ccatttacagataag

SEQ ID NO: 861651 - DNA, 15 bp, Homo sapiens
catttacagataagg

SEQ ID NO: 861652 - DNA, 15 bp, Homo sapiens
atttacagataaggc

SEQ ID NO: 861653 - DNA, 15 bp, Homo sapiens
tttacagataaggca

SEQ ID NO: 861654 - DNA, 15 bp, Homo sapiens
ttacagataaggcaa

SEQ ID NO: 861655 - DNA, 15 bp, Homo sapiens
tacagataaggcaac

SEQ ID NO: 861656 - DNA, 15 bp, Homo sapiens
acagataaggcaact

SEQ ID NO: 861657 - DNA, 15 bp, Homo sapiens
cagataaggcaacta

SEQ ID NO: 861658 - DNA, 15 bp, Homo sapiens
agataaggcaactaa

SEQ ID NO: 861659 - DNA, 15 bp, Homo sapiens
gataaggcaactaag

SEQ ID NO: 861660 - DNA, 15 bp, Homo sapiens
ataaggcaactaagg

SEQ ID NO: 861661 - DNA, 15 bp, Homo sapiens
taaggcaactaaggc

SEQ ID NO: 861662 - DNA, 15 bp, Homo sapiens
aaggcaactaaggca

SEQ ID NO: 861663 - DNA, 15 bp, Homo sapiens
aggcaactaaggcac

SEQ ID NO: 861664 - DNA, 15 bp, Homo sapiens
ggcaactaaggcaca

SEQ ID NO: 861665 - DNA, 15 bp, Homo sapiens
gcaactaaggcacaa

SEQ ID NO: 861666 - DNA, 15 bp, Homo sapiens
caactaaggcacaag

SEQ ID NO: 861667 - DNA, 15 bp, Homo sapiens
aactaaggcacaagg

SEQ ID NO: 861668 - DNA, 15 bp, Homo sapiens
actaaggcacaaggg

SEQ ID NO: 861669 - DNA, 15 bp, Homo sapiens
ctaaggcacaagggt

SEQ ID NO: 861670 - DNA, 15 bp, Homo sapiens
taaggcacaagggtc

SEQ ID NO: 861671 - DNA, 15 bp, Homo sapiens
aaggcacaagggtct

SEQ ID NO: 861672 - DNA, 15 bp, Homo sapiens
aggcacaagggtctc

SEQ ID NO: 861673 - DNA, 15 bp, Homo sapiens
ggcacaagggtctca

SEQ ID NO: 861674 - DNA, 15 bp, Homo sapiens
gcacaagggtctcat

SEQ ID NO: 861675 - DNA, 15 bp, Homo sapiens
cacaagggtctcata

SEQ ID NO: 861676 - DNA, 15 bp, Homo sapiens
acaagggtctcatag

SEQ ID NO: 861677 - DNA, 15 bp, Homo sapiens
caagggtctcatagc

SEQ ID NO: 861678 - DNA, 15 bp, Homo sapiens
aagggtctcatagcc

SEQ ID NO: 861679 - DNA, 15 bp, Homo sapiens
agggtctcatagcca

SEQ ID NO: 861680 - DNA, 15 bp, Homo sapiens
gggtctcatagccag

SEQ ID NO: 861681 - DNA, 15 bp, Homo sapiens
ggtctcatagccagt

SEQ ID NO: 861682 - DNA, 15 bp, Homo sapiens
gtctcatagccagtg

SEQ ID NO: 861683 - DNA, 15 bp, Homo sapiens
tctcatagccagtga

SEQ ID NO: 861684 - DNA, 15 bp, Homo sapiens
ctcatagccagtgag

SEQ ID NO: 861685 - DNA, 15 bp, Homo sapiens
tcatagccagtgagt

SEQ ID NO: 861686 - DNA, 15 bp, Homo sapiens
catagccagtgagtc

SEQ ID NO: 861687 - DNA, 15 bp, Homo sapiens
atagccagtgagtct

SEQ ID NO: 861688 - DNA, 15 bp, Homo sapiens
tagccagtgagtctg

SEQ ID NO: 861689 - DNA, 15 bp, Homo sapiens
agccagtgagtctgg

SEQ ID NO: 861690 - DNA, 15 bp, Homo sapiens
gccagtgagtctggc

SEQ ID NO: 861691 - DNA, 15 bp, Homo sapiens
ccagtgagtctggcc

SEQ ID NO: 861692 - DNA, 15 bp, Homo sapiens
cagtgagtctggcca

SEQ ID NO: 861693 - DNA, 15 bp, Homo sapiens
agtgagtctggccaa

SEQ ID NO: 861694 - DNA, 15 bp, Homo sapiens
gtgagtctggccaag

SEQ ID NO: 861695 - DNA, 15 bp, Homo sapiens
tgagtctggccaagg

SEQ ID NO: 861696 - DNA, 15 bp, Homo sapiens
gagtctggccaaggg

SEQ ID NO: 861697 - DNA, 15 bp, Homo sapiens
agtctggccaagggt

SEQ ID NO: 861698 - DNA, 15 bp, Homo sapiens
gtctggccaagggtc

SEQ ID NO: 861699 - DNA, 15 bp, Homo sapiens
tctggccaagggtct

SEQ ID NO: 861700 - DNA, 15 bp, Homo sapiens
ctggccaagggtctc

SEQ ID NO: 861701 - DNA, 15 bp, Homo sapiens
tggccaagggtctca

SEQ ID NO: 861702 - DNA, 15 bp, Homo sapiens
ggccaagggtctcat

SEQ ID NO: 861703 - DNA, 15 bp, Homo sapiens
gccaagggtctcata

SEQ ID NO: 861704 - DNA, 15 bp, Homo sapiens
ccaagggtctcatag

SEQ ID NO: 861705 - DNA, 15 bp, Homo sapiens
agggtctcatagcct

SEQ ID NO: 861706 - DNA, 15 bp, Homo sapiens
gggtctcatagcctc

SEQ ID NO: 861707 - DNA, 15 bp, Homo sapiens
ggtctcatagcctca

SEQ ID NO: 861708 - DNA, 15 bp, Homo sapiens
gtctcatagcctcat

SEQ ID NO: 861709 - DNA, 15 bp, Homo sapiens
tctcatagcctcatg

SEQ ID NO: 861710 - DNA, 15 bp, Homo sapiens
ctcatagcctcatgt

SEQ ID NO: 861711 - DNA, 15 bp, Homo sapiens
tcatagcctcatgtc

SEQ ID NO: 861712 - DNA, 15 bp, Homo sapiens
catagcctcatgtca

SEQ ID NO: 861713 - DNA, 15 bp, Homo sapiens
atagcctcatgtcac

SEQ ID NO: 861714 - DNA, 15 bp, Homo sapiens
tagcctcatgtcaca

SEQ ID NO: 861715 - DNA, 15 bp, Homo sapiens
agcctcatgtcacag

SEQ ID NO: 861716 - DNA, 15 bp, Homo sapiens
gcctcatgtcacagt

SEQ ID NO: 861717 - DNA, 15 bp, Homo sapiens
cctcatgtcacagtc

SEQ ID NO: 861718 - DNA, 15 bp, Homo sapiens
ctcatgtcacagtct

SEQ ID NO: 861719 - DNA, 15 bp, Homo sapiens
tcatgtcacagtctc

SEQ ID NO: 861720 - DNA, 15 bp, Homo sapiens
catgtcacagtctca

SEQ ID NO: 861721 - DNA, 15 bp, Homo sapiens
atgtcacagtctcat

SEQ ID NO: 861722 - DNA, 15 bp, Homo sapiens
tgtcacagtctcatg

SEQ ID NO: 861723 - DNA, 15 bp, Homo sapiens
gtcacagtctcatga

SEQ ID NO: 861724 - DNA, 15 bp, Homo sapiens
tcacagtctcatgac

SEQ ID NO: 861725 - DNA, 15 bp, Homo sapiens
cacagtctcatgact

SEQ ID NO: 861726 - DNA, 15 bp, Homo sapiens
acagtctcatgactt

SEQ ID NO: 861727 - DNA, 15 bp, Homo sapiens
cagtctcatgacttg

SEQ ID NO: 861728 - DNA, 15 bp, Homo sapiens
agtctcatgacttgc

SEQ ID NO: 861729 - DNA, 15 bp, Homo sapiens
gtctcatgacttgcc

SEQ ID NO: 861730 - DNA, 15 bp, Homo sapiens
tctcatgacttgcca

SEQ ID NO: 861731 - DNA, 15 bp, Homo sapiens
ctcatgacttgccaa

SEQ ID NO: 861732 - DNA, 15 bp, Homo sapiens
tcatgacttgccaag

SEQ ID NO: 861733 - DNA, 15 bp, Homo sapiens
catgacttgccaagg

SEQ ID NO: 861734 - DNA, 15 bp, Homo sapiens
atgacttgccaaggg

SEQ ID NO: 861735 - DNA, 15 bp, Homo sapiens
tgacttgccaagggt

SEQ ID NO: 861736 - DNA, 15 bp, Homo sapiens
gacttgccaagggtc

SEQ ID NO: 861737 - DNA, 15 bp, Homo sapiens
acttgccaagggtct

SEQ ID NO: 861738 - DNA, 15 bp, Homo sapiens
cttgccaagggtctc

SEQ ID NO: 861739 - DNA, 15 bp, Homo sapiens
ttgccaagggtctca

SEQ ID NO: 861740 - DNA, 15 bp, Homo sapiens
tgccaagggtctcat

SEQ ID NO: 861741 - DNA, 15 bp, Homo sapiens
ctcatagccagtgac

SEQ ID NO: 861742 - DNA, 15 bp, Homo sapiens
tcatagccagtgact

SEQ ID NO: 861743 - DNA, 15 bp, Homo sapiens
catagccagtgactg

SEQ ID NO: 861744 - DNA, 15 bp, Homo sapiens
atagccagtgactgg

SEQ ID NO: 861745 - DNA, 15 bp, Homo sapiens
tagccagtgactggt

SEQ ID NO: 861746 - DNA, 15 bp, Homo sapiens
agccagtgactggtg

SEQ ID NO: 861747 - DNA, 15 bp, Homo sapiens
gccagtgactggtgg

SEQ ID NO: 861748 - DNA, 15 bp, Homo sapiens
ccagtgactggtgga

SEQ ID NO: 861749 - DNA, 15 bp, Homo sapiens
cagtgactggtggag

SEQ ID NO: 861750 - DNA, 15 bp, Homo sapiens
agtgactggtggagc

SEQ ID NO: 861751 - DNA, 15 bp, Homo sapiens
gtgactggtggagct

SEQ ID NO: 861752 - DNA, 15 bp, Homo sapiens
tgactggtggagctg

SEQ ID NO: 861753 - DNA, 15 bp, Homo sapiens
gactggtggagctgg

SEQ ID NO: 861754 - DNA, 15 bp, Homo sapiens
actggtggagctggg

SEQ ID NO: 861755 - DNA, 15 bp, Homo sapiens
ctggtggagctggga

SEQ ID NO: 861756 - DNA, 15 bp, Homo sapiens
tggtggagctgggat

SEQ ID NO: 861757 - DNA, 15 bp, Homo sapiens
ggtggagctgggatt

SEQ ID NO: 861758 - DNA, 15 bp, Homo sapiens
gtggagctgggattt

SEQ ID NO: 861759 - DNA, 15 bp, Homo sapiens
tggagctgggatttc

SEQ ID NO: 861760 - DNA, 15 bp, Homo sapiens
ggagctgggatttca

SEQ ID NO: 861761 - DNA, 15 bp, Homo sapiens
gagctgggatttcaa

SEQ ID NO: 861762 - DNA, 15 bp, Homo sapiens
agctgggatttcaac

SEQ ID NO: 861763 - DNA, 15 bp, Homo sapiens
gctgggatttcaaca

SEQ ID NO: 861764 - DNA, 15 bp, Homo sapiens
ctgggatttcaacac

SEQ ID NO: 861765 - DNA, 15 bp, Homo sapiens
tgggatttcaacaca

SEQ ID NO: 861766 - DNA, 15 bp, Homo sapiens
gggatttcaacacag

SEQ ID NO: 861767 - DNA, 15 bp, Homo sapiens
ggatttcaacacagg

SEQ ID NO: 861768 - DNA, 15 bp, Homo sapiens
gatttcaacacaggc

SEQ ID NO: 861769 - DNA, 15 bp, Homo sapiens
atttcaacacaggcc

SEQ ID NO: 861770 - DNA, 15 bp, Homo sapiens
tttcaacacaggccg

SEQ ID NO: 861771 - DNA, 15 bp, Homo sapiens
ttcaacacaggccgt

SEQ ID NO: 861772 - DNA, 15 bp, Homo sapiens
tcaacacaggccgtg

SEQ ID NO: 861773 - DNA, 15 bp, Homo sapiens
caacacaggccgtgt

SEQ ID NO: 861774 - DNA, 15 bp, Homo sapiens
aacacaggccgtgtg

SEQ ID NO: 861775 - DNA, 15 bp, Homo sapiens
acacaggccgtgtgg

SEQ ID NO: 861776 - DNA, 15 bp, Homo sapiens
cacaggccgtgtggc

SEQ ID NO: 861777 - DNA, 15 bp, Homo sapiens
acaggccgtgtggct

SEQ ID NO: 861778 - DNA, 15 bp, Homo sapiens
caggccgtgtggctc

SEQ ID NO: 861779 - DNA, 15 bp, Homo sapiens
aggccgtgtggctcc

SEQ ID NO: 861780 - DNA, 15 bp, Homo sapiens
ggccgtgtggctcca

SEQ ID NO: 861781 - DNA, 15 bp, Homo sapiens
gccgtgtggctccac

SEQ ID NO: 861782 - DNA, 15 bp, Homo sapiens
ccgtgtggctccaca

SEQ ID NO: 861783 - DNA, 15 bp, Homo sapiens
cgtgtggctccacag

SEQ ID NO: 861784 - DNA, 15 bp, Homo sapiens
gtgtggctccacaga

SEQ ID NO: 861785 - DNA, 15 bp, Homo sapiens
tgtggctccacagag

SEQ ID NO: 861786 - DNA, 15 bp, Homo sapiens
gtggctccacagagt

SEQ ID NO: 861787 - DNA, 15 bp, Homo sapiens
tggctccacagagtg

SEQ ID NO: 861788 - DNA, 15 bp, Homo sapiens
ggctccacagagtgt

SEQ ID NO: 861789 - DNA, 15 bp, Homo sapiens
gctccacagagtgtg

SEQ ID NO: 861790 - DNA, 15 bp, Homo sapiens
ctccacagagtgtgg

SEQ ID NO: 861791 - DNA, 15 bp, Homo sapiens
tccacagagtgtgga

SEQ ID NO: 861792 - DNA, 15 bp, Homo sapiens
ccacagagtgtggag

SEQ ID NO: 861793 - DNA, 15 bp, Homo sapiens
cacagagtgtggagt

SEQ ID NO: 861794 - DNA, 15 bp, Homo sapiens
acagagtgtggagtc

SEQ ID NO: 861795 - DNA, 15 bp, Homo sapiens
cagagtgtggagtcg

SEQ ID NO: 861796 - DNA, 15 bp, Homo sapiens
agagtgtggagtcgg

SEQ ID NO: 861797 - DNA, 15 bp, Homo sapiens
gagtgtggagtcggt

SEQ ID NO: 861798 - DNA, 15 bp, Homo sapiens
agtgtggagtcggtt

SEQ ID NO: 861799 - DNA, 15 bp, Homo sapiens
gtgtggagtcggttg

SEQ ID NO: 861800 - DNA, 15 bp, Homo sapiens
tgtggagtcggttga

SEQ ID NO: 861801 - DNA, 15 bp, Homo sapiens
gtggagtcggttgag

SEQ ID NO: 861802 - DNA, 15 bp, Homo sapiens
tggagtcggttgagt

SEQ ID NO: 861803 - DNA, 15 bp, Homo sapiens
ggagtcggttgagtt

SEQ ID NO: 861804 - DNA, 15 bp, Homo sapiens
gagtcggttgagttg

SEQ ID NO: 861805 - DNA, 15 bp, Homo sapiens
agtcggttgagttgc

SEQ ID NO: 861806 - DNA, 15 bp, Homo sapiens
gtcggttgagttgct

SEQ ID NO: 861807 - DNA, 15 bp, Homo sapiens
tcggttgagttgctc

SEQ ID NO: 861808 - DNA, 15 bp, Homo sapiens
cggttgagttgctca

SEQ ID NO: 861809 - DNA, 15 bp, Homo sapiens
ggttgagttgctcag

SEQ ID NO: 861810 - DNA, 15 bp, Homo sapiens
gttgagttgctcagt

SEQ ID NO: 861811 - DNA, 15 bp, Homo sapiens
ttgagttgctcagtt

SEQ ID NO: 861812 - DNA, 15 bp, Homo sapiens
tgagttgctcagtta

SEQ ID NO: 861813 - DNA, 15 bp, Homo sapiens
gagttgctcagttac

SEQ ID NO: 861814 - DNA, 15 bp, Homo sapiens
agttgctcagttact

SEQ ID NO: 861815 - DNA, 15 bp, Homo sapiens
gttgctcagttactc

SEQ ID NO: 861816 - DNA, 15 bp, Homo sapiens
ttgctcagttactct

SEQ ID NO: 861817 - DNA, 15 bp, Homo sapiens
tgctcagttactctt

SEQ ID NO: 861818 - DNA, 15 bp, Homo sapiens
gctcagttactcttg

SEQ ID NO: 861819 - DNA, 15 bp, Homo sapiens
ctcagttactcttgc

SEQ ID NO: 861820 - DNA, 15 bp, Homo sapiens
tcagttactcttgca

SEQ ID NO: 861821 - DNA, 15 bp, Homo sapiens
cagttactcttgcag

SEQ ID NO: 861822 - DNA, 15 bp, Homo sapiens
agttactcttgcagt

SEQ ID NO: 861823 - DNA, 15 bp, Homo sapiens
gttactcttgcagtt

SEQ ID NO: 861824 - DNA, 15 bp, Homo sapiens
ttactcttgcagttg

SEQ ID NO: 861825 - DNA, 15 bp, Homo sapiens
tactcttgcagttga

SEQ ID NO: 861826 - DNA, 15 bp, Homo sapiens
actcttgcagttgaa

SEQ ID NO: 861827 - DNA, 15 bp, Homo sapiens
ctcttgcagttgaat

SEQ ID NO: 861828 - DNA, 15 bp, Homo sapiens
tcttgcagttgaata

SEQ ID NO: 861829 - DNA, 15 bp, Homo sapiens
cttgcagttgaatat

SEQ ID NO: 861830 - DNA, 15 bp, Homo sapiens
ttgcagttgaatatg

SEQ ID NO: 861831 - DNA, 15 bp, Homo sapiens
tgcagttgaatatga

SEQ ID NO: 861832 - DNA, 15 bp, Homo sapiens
gcagttgaatatgat

SEQ ID NO: 861833 - DNA, 15 bp, Homo sapiens
cagttgaatatgatg

SEQ ID NO: 861834 - DNA, 15 bp, Homo sapiens
agttgaatatgatgg

SEQ ID NO: 861835 - DNA, 15 bp, Homo sapiens
gttgaatatgatgga

SEQ ID NO: 861836 - DNA, 15 bp, Homo sapiens
ttgaatatgatggat

SEQ ID NO: 861837 - DNA, 15 bp, Homo sapiens
tgaatatgatggata

SEQ ID NO: 861838 - DNA, 15 bp, Homo sapiens
gaatatgatggataa

SEQ ID NO: 861839 - DNA, 15 bp, Homo sapiens
aatatgatggataag

SEQ ID NO: 861840 - DNA, 15 bp, Homo sapiens
atatgatggataagt

SEQ ID NO: 861841 - DNA, 15 bp, Homo sapiens
tatgatggataagtc

SEQ ID NO: 861842 - DNA, 15 bp, Homo sapiens
atgatggataagtca

SEQ ID NO: 861843 - DNA, 15 bp, Homo sapiens
tggataagtcactta

SEQ ID NO: 861844 - DNA, 15 bp, Homo sapiens
ggataagtcacttaa

SEQ ID NO: 861845 - DNA, 15 bp, Homo sapiens
gataagtcacttaat

SEQ ID NO: 861846 - DNA, 15 bp, Homo sapiens
ataagtcacttaatc

SEQ ID NO: 861847 - DNA, 15 bp, Homo sapiens
taagtcacttaatct

SEQ ID NO: 861848 - DNA, 15 bp, Homo sapiens
aagtcacttaatctc

SEQ ID NO: 861849 - DNA, 15 bp, Homo sapiens
agtcacttaatctcc

SEQ ID NO: 861850 - DNA, 15 bp, Homo sapiens
gtcacttaatctcca

SEQ ID NO: 861851 - DNA, 15 bp, Homo sapiens
tcacttaatctccaa

SEQ ID NO: 861852 - DNA, 15 bp, Homo sapiens
cacttaatctccaag

SEQ ID NO: 861853 - DNA, 15 bp, Homo sapiens
acttaatctccaagg

SEQ ID NO: 861854 - DNA, 15 bp, Homo sapiens
cttaatctccaaggg

SEQ ID NO: 861855 - DNA, 15 bp, Homo sapiens
ttaatctccaaggga

SEQ ID NO: 861856 - DNA, 15 bp, Homo sapiens
taatctccaagggag

SEQ ID NO: 861857 - DNA, 15 bp, Homo sapiens
aatctccaagggagg

SEQ ID NO: 861858 - DNA, 15 bp, Homo sapiens
atctccaagggagga

SEQ ID NO: 861859 - DNA, 15 bp, Homo sapiens
tctccaagggaggag

SEQ ID NO: 861860 - DNA, 15 bp, Homo sapiens
ctccaagggaggaga

SEQ ID NO: 861861 - DNA, 15 bp, Homo sapiens
tccaagggaggagaa

SEQ ID NO: 861862 - DNA, 15 bp, Homo sapiens
ccaagggaggagaaa

SEQ ID NO: 861863 - DNA, 15 bp, Homo sapiens
caagggaggagaaaa

SEQ ID NO: 861864 - DNA, 15 bp, Homo sapiens
aagggaggagaaaaa

SEQ ID NO: 861865 - DNA, 15 bp, Homo sapiens
agggaggagaaaaaa

SEQ ID NO: 861866 - DNA, 15 bp, Homo sapiens
gggaggagaaaaaag

SEQ ID NO: 861867 - DNA, 15 bp, Homo sapiens
ggaggagaaaaaagt

SEQ ID NO: 861868 - DNA, 15 bp, Homo sapiens
gaggagaaaaaagtg

SEQ ID NO: 861869 - DNA, 15 bp, Homo sapiens
aggagaaaaaagtga

SEQ ID NO: 861870 - DNA, 15 bp, Homo sapiens
ggagaaaaaagtgag

SEQ ID NO: 861871 - DNA, 15 bp, Homo sapiens
gagaaaaaagtgagg

SEQ ID NO: 861872 - DNA, 15 bp, Homo sapiens
agaaaaaagtgagga

SEQ ID NO: 861873 - DNA, 15 bp, Homo sapiens
gaaaaaagtgaggat

SEQ ID NO: 861874 - DNA, 15 bp, Homo sapiens
aaaaaagtgaggatt

SEQ ID NO: 861875 - DNA, 15 bp, Homo sapiens
aaaaagtgaggattc

SEQ ID NO: 861876 - DNA, 15 bp, Homo sapiens
aaaagtgaggattct

SEQ ID NO: 861877 - DNA, 15 bp, Homo sapiens
aaagtgaggattctg

SEQ ID NO: 861878 - DNA, 15 bp, Homo sapiens
aagtgaggattctgg

SEQ ID NO: 861879 - DNA, 15 bp, Homo sapiens
agtgaggattctggt

SEQ ID NO: 861880 - DNA, 15 bp, Homo sapiens
gtgaggattctggta

SEQ ID NO: 861881 - DNA, 15 bp, Homo sapiens
tgaggattctggtaa

SEQ ID NO: 861882 - DNA, 15 bp, Homo sapiens
gaggattctggtaat

SEQ ID NO: 861883 - DNA, 15 bp, Homo sapiens
aggattctggtaatg

SEQ ID NO: 861884 - DNA, 15 bp, Homo sapiens
ggattctggtaatga

SEQ ID NO: 861885 - DNA, 15 bp, Homo sapiens
gattctggtaatgaa

SEQ ID NO: 861886 - DNA, 15 bp, Homo sapiens
attctggtaatgaaa

SEQ ID NO: 861887 - DNA, 15 bp, Homo sapiens
ttctggtaatgaaac

SEQ ID NO: 861888 - DNA, 15 bp, Homo sapiens
tctggtaatgaaacc

SEQ ID NO: 861889 - DNA, 15 bp, Homo sapiens
ctggtaatgaaacct

SEQ ID NO: 861890 - DNA, 15 bp, Homo sapiens
tggtaatgaaacctc

SEQ ID NO: 861891 - DNA, 15 bp, Homo sapiens
ggtaatgaaacctcg

SEQ ID NO: 861892 - DNA, 15 bp, Homo sapiens
gtaatgaaacctcga

SEQ ID NO: 861893 - DNA, 15 bp, Homo sapiens
taatgaaacctcgag

SEQ ID NO: 861894 - DNA, 15 bp, Homo sapiens
aatgaaacctcgaga

SEQ ID NO: 861895 - DNA, 15 bp, Homo sapiens
atgaaacctcgagat

SEQ ID NO: 861896 - DNA, 15 bp, Homo sapiens
tgaaacctcgagata

SEQ ID NO: 861897 - DNA, 15 bp, Homo sapiens
gaaacctcgagataa

SEQ ID NO: 861898 - DNA, 15 bp, Homo sapiens
aaacctcgagataat

SEQ ID NO: 861899 - DNA, 15 bp, Homo sapiens
aacctcgagataatg

SEQ ID NO: 861900 - DNA, 15 bp, Homo sapiens
acctcgagataatgt

SEQ ID NO: 861901 - DNA, 15 bp, Homo sapiens
cctcgagataatgta

SEQ ID NO: 861902 - DNA, 15 bp, Homo sapiens
ctcgagataatgtag

SEQ ID NO: 861903 - DNA, 15 bp, Homo sapiens
tcgagataatgtaga

SEQ ID NO: 861904 - DNA, 15 bp, Homo sapiens
cgagataatgtagag

SEQ ID NO: 861905 - DNA, 15 bp, Homo sapiens
gagataatgtagaga

SEQ ID NO: 861906 - DNA, 15 bp, Homo sapiens
agataatgtagagag

SEQ ID NO: 861907 - DNA, 15 bp, Homo sapiens
gataatgtagagagt

SEQ ID NO: 861908 - DNA, 15 bp, Homo sapiens
ataatgtagagagtc

SEQ ID NO: 861909 - DNA, 15 bp, Homo sapiens
taatgtagagagtcc

SEQ ID NO: 861910 - DNA, 15 bp, Homo sapiens
aatgtagagagtcct

SEQ ID NO: 861911 - DNA, 15 bp, Homo sapiens
atgtagagagtcctg

SEQ ID NO: 861912 - DNA, 15 bp, Homo sapiens
tgtagagagtcctgg

SEQ ID NO: 861913 - DNA, 15 bp, Homo sapiens
gtagagagtcctggg

SEQ ID NO: 861914 - DNA, 15 bp, Homo sapiens
tagagagtcctgggg

SEQ ID NO: 861915 - DNA, 15 bp, Homo sapiens
agagagtcctggggg

SEQ ID NO: 861916 - DNA, 15 bp, Homo sapiens
gagagtcctgggggg

SEQ ID NO: 861917 - DNA, 15 bp, Homo sapiens
agagtcctggggggg

SEQ ID NO: 861918 - DNA, 15 bp, Homo sapiens
gagtcctgggggggc

SEQ ID NO: 861919 - DNA, 15 bp, Homo sapiens
agtcctgggggggcc

SEQ ID NO: 861920 - DNA, 15 bp, Homo sapiens
gtcctgggggggcct

SEQ ID NO: 861921 - DNA, 15 bp, Homo sapiens
tcctgggggggcctc

SEQ ID NO: 861922 - DNA, 15 bp, Homo sapiens
cctgggggggcctcc

SEQ ID NO: 861923 - DNA, 15 bp, Homo sapiens
ctgggggggcctcct

SEQ ID NO: 861924 - DNA, 15 bp, Homo sapiens
tgggggggcctcctg

SEQ ID NO: 861925 - DNA, 15 bp, Homo sapiens
gggggggcctcctgc

SEQ ID NO: 861926 - DNA, 15 bp, Homo sapiens
ggggggcctcctgca

SEQ ID NO: 861927 - DNA, 15 bp, Homo sapiens
gggggcctcctgcac

SEQ ID NO: 861928 - DNA, 15 bp, Homo sapiens
ggggcctcctgcaca

SEQ ID NO: 861929 - DNA, 15 bp, Homo sapiens
gggcctcctgcacag

SEQ ID NO: 861930 - DNA, 15 bp, Homo sapiens
ggcctcctgcacagc

SEQ ID NO: 861931 - DNA, 15 bp, Homo sapiens
gcctcctgcacagca

SEQ ID NO: 861932 - DNA, 15 bp, Homo sapiens
cctcctgcacagcag

SEQ ID NO: 861933 - DNA, 15 bp, Homo sapiens
ctcctgcacagcagc

SEQ ID NO: 861934 - DNA, 15 bp, Homo sapiens
tcctgcacagcagct

SEQ ID NO: 861935 - DNA, 15 bp, Homo sapiens
cctgcacagcagctg

SEQ ID NO: 861936 - DNA, 15 bp, Homo sapiens
ctgcacagcagctgg

SEQ ID NO: 861937 - DNA, 15 bp, Homo sapiens
tgcacagcagctggc

SEQ ID NO: 861938 - DNA, 15 bp, Homo sapiens
gcacagcagctggcc

SEQ ID NO: 861939 - DNA, 15 bp, Homo sapiens
cacagcagctggcca

SEQ ID NO: 861940 - DNA, 15 bp, Homo sapiens
acagcagctggccac

SEQ ID NO: 861941 - DNA, 15 bp, Homo sapiens
cagcagctggccacc

SEQ ID NO: 861942 - DNA, 15 bp, Homo sapiens
agcagctggccaccc

SEQ ID NO: 861943 - DNA, 15 bp, Homo sapiens
gcagctggccaccca

SEQ ID NO: 861944 - DNA, 15 bp, Homo sapiens
cagctggccacccaa

SEQ ID NO: 861945 - DNA, 15 bp, Homo sapiens
agctggccacccaat

SEQ ID NO: 861946 - DNA, 15 bp, Homo sapiens
gctggccacccaatt

SEQ ID NO: 861947 - DNA, 15 bp, Homo sapiens
ctggccacccaattt

SEQ ID NO: 861948 - DNA, 15 bp, Homo sapiens
tggccacccaatttg

SEQ ID NO: 861949 - DNA, 15 bp, Homo sapiens
ggccacccaatttgg

SEQ ID NO: 861950 - DNA, 15 bp, Homo sapiens
gccacccaatttggc

SEQ ID NO: 861951 - DNA, 15 bp, Homo sapiens
ccacccaatttggct

SEQ ID NO: 861952 - DNA, 15 bp, Homo sapiens
cacccaatttggcta

SEQ ID NO: 861953 - DNA, 15 bp, Homo sapiens
acccaatttggctag

SEQ ID NO: 861954 - DNA, 15 bp, Homo sapiens
cccaatttggctaga

SEQ ID NO: 861955 - DNA, 15 bp, Homo sapiens
ccaatttggctagag

SEQ ID NO: 861956 - DNA, 15 bp, Homo sapiens
caatttggctagagt

SEQ ID NO: 861957 - DNA, 15 bp, Homo sapiens
aatttggctagagtt

SEQ ID NO: 861958 - DNA, 15 bp, Homo sapiens
atttggctagagttt

SEQ ID NO: 861959 - DNA, 15 bp, Homo sapiens
tttggctagagttta

SEQ ID NO: 861960 - DNA, 15 bp, Homo sapiens
ttggctagagtttaa

SEQ ID NO: 861961 - DNA, 15 bp, Homo sapiens
tggctagagtttaag

SEQ ID NO: 861962 - DNA, 15 bp, Homo sapiens
ggctagagtttaaga

SEQ ID NO: 861963 - DNA, 15 bp, Homo sapiens
gctagagtttaagac

SEQ ID NO: 861964 - DNA, 15 bp, Homo sapiens
ctagagtttaagact

SEQ ID NO: 861965 - DNA, 15 bp, Homo sapiens
tagagtttaagactt

SEQ ID NO: 861966 - DNA, 15 bp, Homo sapiens
agagtttaagactta

SEQ ID NO: 861967 - DNA, 15 bp, Homo sapiens
gagtttaagacttac

SEQ ID NO: 861968 - DNA, 15 bp, Homo sapiens
agtttaagacttact

SEQ ID NO: 861969 - DNA, 15 bp, Homo sapiens
gtttaagacttactt

SEQ ID NO: 861970 - DNA, 15 bp, Homo sapiens
tttaagacttactta

SEQ ID NO: 861971 - DNA, 15 bp, Homo sapiens
ttaagacttacttag

SEQ ID NO: 861972 - DNA, 15 bp, Homo sapiens
taagacttacttagc

SEQ ID NO: 861973 - DNA, 15 bp, Homo sapiens
aagacttacttagca

SEQ ID NO: 861974 - DNA, 15 bp, Homo sapiens
agacttacttagcat

SEQ ID NO: 861975 - DNA, 15 bp, Homo sapiens
gacttacttagcatg

SEQ ID NO: 861976 - DNA, 15 bp, Homo sapiens
acttacttagcatgc

SEQ ID NO: 861977 - DNA, 15 bp, Homo sapiens
cttacttagcatgca

SEQ ID NO: 861978 - DNA, 15 bp, Homo sapiens
ttacttagcatgcag

SEQ ID NO: 861979 - DNA, 15 bp, Homo sapiens
tacttagcatgcagg

SEQ ID NO: 861980 - DNA, 15 bp, Homo sapiens
acttagcatgcaggg

SEQ ID NO: 861981 - DNA, 15 bp, Homo sapiens
cttagcatgcaggga

SEQ ID NO: 861982 - DNA, 15 bp, Homo sapiens
ttagcatgcagggaa

SEQ ID NO: 861983 - DNA, 15 bp, Homo sapiens
tagcatgcagggaat

SEQ ID NO: 861984 - DNA, 15 bp, Homo sapiens
agcatgcagggaatt

SEQ ID NO: 861985 - DNA, 15 bp, Homo sapiens
gcatgcagggaattg

SEQ ID NO: 861986 - DNA, 15 bp, Homo sapiens
catgcagggaattga

SEQ ID NO: 861987 - DNA, 15 bp, Homo sapiens
atgcagggaattgac

SEQ ID NO: 861988 - DNA, 15 bp, Homo sapiens
tgcagggaattgacc

SEQ ID NO: 861989 - DNA, 15 bp, Homo sapiens
gcagggaattgaccc

SEQ ID NO: 861990 - DNA, 15 bp, Homo sapiens
cagggaattgacccc

SEQ ID NO: 861991 - DNA, 15 bp, Homo sapiens
agggaattgaccccc

SEQ ID NO: 861992 - DNA, 15 bp, Homo sapiens
gggaattgacccccc

SEQ ID NO: 861993 - DNA, 15 bp, Homo sapiens
ggaattgacccccct

SEQ ID NO: 861994 - DNA, 15 bp, Homo sapiens
gaattgacccccctg

SEQ ID NO: 861995 - DNA, 15 bp, Homo sapiens
aattgacccccctga

SEQ ID NO: 861996 - DNA, 15 bp, Homo sapiens
attgacccccctgaa

SEQ ID NO: 861997 - DNA, 15 bp, Homo sapiens
ttgacccccctgaag

SEQ ID NO: 861998 - DNA, 15 bp, Homo sapiens
tgacccccctgaagg

SEQ ID NO: 861999 - DNA, 15 bp, Homo sapiens
gacccccctgaaggg

SEQ ID NO: 862000 - DNA, 15 bp, Homo sapiens
acccccctgaagggt

SEQ ID NO: 862001 - DNA, 15 bp, Homo sapiens
cccccctgaagggta

SEQ ID NO: 862002 - DNA, 15 bp, Homo sapiens
ccccctgaagggtaa

SEQ ID NO: 862003 - DNA, 15 bp, Homo sapiens
cccctgaagggtaaa

SEQ ID NO: 862004 - DNA, 15 bp, Homo sapiens
ccctgaagggtaaaa

SEQ ID NO: 862005 - DNA, 15 bp, Homo sapiens
cctgaagggtaaaat

SEQ ID NO: 862006 - DNA, 15 bp, Homo sapiens
ctgaagggtaaaatg

SEQ ID NO: 862007 - DNA, 15 bp, Homo sapiens
tgaagggtaaaatgg

SEQ ID NO: 862008 - DNA, 15 bp, Homo sapiens
gaagggtaaaatggg

SEQ ID NO: 862009 - DNA, 15 bp, Homo sapiens
aagggtaaaatgggg

SEQ ID NO: 862010 - DNA, 15 bp, Homo sapiens
agggtaaaatggggc

SEQ ID NO: 862011 - DNA, 15 bp, Homo sapiens
gggtaaaatggggcc

SEQ ID NO: 862012 - DNA, 15 bp, Homo sapiens
ggtaaaatggggccc

SEQ ID NO: 862013 - DNA, 15 bp, Homo sapiens
gtaaaatggggcccc

SEQ ID NO: 862014 - DNA, 15 bp, Homo sapiens
taaaatggggcccca

SEQ ID NO: 862015 - DNA, 15 bp, Homo sapiens
aaaatggggccccat

SEQ ID NO: 862016 - DNA, 15 bp, Homo sapiens
aaatggggccccatt

SEQ ID NO: 862017 - DNA, 15 bp, Homo sapiens
aatggggccccattc

SEQ ID NO: 862018 - DNA, 15 bp, Homo sapiens
atggggccccattcc

SEQ ID NO: 862019 - DNA, 15 bp, Homo sapiens
tggggccccattcct

SEQ ID NO: 862020 - DNA, 15 bp, Homo sapiens
ggggccccattcctg

SEQ ID NO: 862021 - DNA, 15 bp, Homo sapiens
gggccccattcctgg

SEQ ID NO: 862022 - DNA, 15 bp, Homo sapiens
ggccccattcctggc

SEQ ID NO: 862023 - DNA, 15 bp, Homo sapiens
gccccattcctggca

SEQ ID NO: 862024 - DNA, 15 bp, Homo sapiens
ccccattcctggcag

SEQ ID NO: 862025 - DNA, 15 bp, Homo sapiens
cccattcctggcagg

SEQ ID NO: 862026 - DNA, 15 bp, Homo sapiens
ccattcctggcaggg

SEQ ID NO: 862027 - DNA, 15 bp, Homo sapiens
cattcctggcagggg

SEQ ID NO: 862028 - DNA, 15 bp, Homo sapiens
attcctggcaggggc

SEQ ID NO: 862029 - DNA, 15 bp, Homo sapiens
ttcctggcaggggcc

SEQ ID NO: 862030 - DNA, 15 bp, Homo sapiens
tcctggcaggggcca

SEQ ID NO: 862031 - DNA, 15 bp, Homo sapiens
cctggcaggggccag

SEQ ID NO: 862032 - DNA, 15 bp, Homo sapiens
ctggcaggggccagg

SEQ ID NO: 862033 - DNA, 15 bp, Homo sapiens
tggcaggggccaggc

SEQ ID NO: 862034 - DNA, 15 bp, Homo sapiens
ggcaggggccaggcc

SEQ ID NO: 862035 - DNA, 15 bp, Homo sapiens
gcaggggccaggcca

SEQ ID NO: 862036 - DNA, 15 bp, Homo sapiens
caggggccaggccaa

SEQ ID NO: 862037 - DNA, 15 bp, Homo sapiens
aggggccaggccaag

SEQ ID NO: 862038 - DNA, 15 bp, Homo sapiens
ggggccaggccaagg

SEQ ID NO: 862039 - DNA, 15 bp, Homo sapiens
gggccaggccaaggg

SEQ ID NO: 862040 - DNA, 15 bp, Homo sapiens
ggccaggccaagggt

SEQ ID NO: 862041 - DNA, 15 bp, Homo sapiens
gccaggccaagggtt

SEQ ID NO: 862042 - DNA, 15 bp, Homo sapiens
ccaggccaagggttt

SEQ ID NO: 862043 - DNA, 15 bp, Homo sapiens
caggccaagggtttt

SEQ ID NO: 862044 - DNA, 15 bp, Homo sapiens
aggccaagggttttg

SEQ ID NO: 862045 - DNA, 15 bp, Homo sapiens
ggccaagggttttgt

SEQ ID NO: 862046 - DNA, 15 bp, Homo sapiens
gccaagggttttgtt

SEQ ID NO: 862047 - DNA, 15 bp, Homo sapiens
ccaagggttttgttc

SEQ ID NO: 862048 - DNA, 15 bp, Homo sapiens
caagggttttgttct

SEQ ID NO: 862049 - DNA, 15 bp, Homo sapiens
aagggttttgttctt

SEQ ID NO: 862050 - DNA, 15 bp, Homo sapiens
agggttttgttctta

SEQ ID NO: 862051 - DNA, 15 bp, Homo sapiens
gggttttgttcttag

SEQ ID NO: 862052 - DNA, 15 bp, Homo sapiens
ggttttgttcttagt

SEQ ID NO: 862053 - DNA, 15 bp, Homo sapiens
gttttgttcttagtc

SEQ ID NO: 862054 - DNA, 15 bp, Homo sapiens
ttttgttcttagtct

SEQ ID NO: 862055 - DNA, 15 bp, Homo sapiens
tttgttcttagtctg

SEQ ID NO: 862056 - DNA, 15 bp, Homo sapiens
ttgttcttagtctgt

SEQ ID NO: 862057 - DNA, 15 bp, Homo sapiens
tgttcttagtctgta

SEQ ID NO: 862058 - DNA, 15 bp, Homo sapiens
gttcttagtctgtaa

SEQ ID NO: 862059 - DNA, 15 bp, Homo sapiens
ttcttagtctgtaat

SEQ ID NO: 862060 - DNA, 15 bp, Homo sapiens
tcttagtctgtaata

SEQ ID NO: 862061 - DNA, 15 bp, Homo sapiens
cttagtctgtaatat

SEQ ID NO: 862062 - DNA, 15 bp, Homo sapiens
ttagtctgtaatatg

SEQ ID NO: 862063 - DNA, 15 bp, Homo sapiens
tagtctgtaatatga

SEQ ID NO: 862064 - DNA, 15 bp, Homo sapiens
agtctgtaatatgat

SEQ ID NO: 862065 - DNA, 15 bp, Homo sapiens
gtctgtaatatgata

SEQ ID NO: 862066 - DNA, 15 bp, Homo sapiens
tctgtaatatgatag

SEQ ID NO: 862067 - DNA, 15 bp, Homo sapiens
ctgtaatatgataga

SEQ ID NO: 862068 - DNA, 15 bp, Homo sapiens
tgtaatatgatagaa

SEQ ID NO: 862069 - DNA, 15 bp, Homo sapiens
gtaatatgatagaaa

SEQ ID NO: 862070 - DNA, 15 bp, Homo sapiens
taatatgatagaaag

SEQ ID NO: 862071 - DNA, 15 bp, Homo sapiens
aatatgatagaaagt

SEQ ID NO: 862072 - DNA, 15 bp, Homo sapiens
atatgatagaaagtc

SEQ ID NO: 862073 - DNA, 15 bp, Homo sapiens
tatgatagaaagtct

SEQ ID NO: 862074 - DNA, 15 bp, Homo sapiens
atgatagaaagtctt

SEQ ID NO: 862075 - DNA, 15 bp, Homo sapiens
tgatagaaagtcttt

SEQ ID NO: 862076 - DNA, 15 bp, Homo sapiens
gatagaaagtcttta

SEQ ID NO: 862077 - DNA, 15 bp, Homo sapiens
atagaaagtctttag

SEQ ID NO: 862078 - DNA, 15 bp, Homo sapiens
tagaaagtctttaga

SEQ ID NO: 862079 - DNA, 15 bp, Homo sapiens
agaaagtctttagac

SEQ ID NO: 862080 - DNA, 15 bp, Homo sapiens
gaaagtctttagaca

SEQ ID NO: 862081 - DNA, 15 bp, Homo sapiens
aaagtctttagacag

SEQ ID NO: 862082 - DNA, 15 bp, Homo sapiens
aagtctttagacagt

SEQ ID NO: 862083 - DNA, 15 bp, Homo sapiens
agtctttagacagtg

SEQ ID NO: 862084 - DNA, 15 bp, Homo sapiens
gtctttagacagtgc

SEQ ID NO: 862085 - DNA, 15 bp, Homo sapiens
tctttagacagtgcg

SEQ ID NO: 862086 - DNA, 15 bp, Homo sapiens
ctttagacagtgcga

SEQ ID NO: 862087 - DNA, 15 bp, Homo sapiens
tttagacagtgcgac

SEQ ID NO: 862088 - DNA, 15 bp, Homo sapiens
ttagacagtgcgaca

SEQ ID NO: 862089 - DNA, 15 bp, Homo sapiens
tagacagtgcgacac

SEQ ID NO: 862090 - DNA, 15 bp, Homo sapiens
agacagtgcgacact

SEQ ID NO: 862091 - DNA, 15 bp, Homo sapiens
gacagtgcgacacta

SEQ ID NO: 862092 - DNA, 15 bp, Homo sapiens
acagtgcgacactat

SEQ ID NO: 862093 - DNA, 15 bp, Homo sapiens
cagtgcgacactatc

SEQ ID NO: 862094 - DNA, 15 bp, Homo sapiens
agtgcgacactatca

SEQ ID NO: 862095 - DNA, 15 bp, Homo sapiens
gtgcgacactatcat

SEQ ID NO: 862096 - DNA, 15 bp, Homo sapiens
tgcgacactatcata

SEQ ID NO: 862097 - DNA, 15 bp, Homo sapiens
gcgacactatcatat

SEQ ID NO: 862098 - DNA, 15 bp, Homo sapiens
cgacactatcatatt

SEQ ID NO: 862099 - DNA, 15 bp, Homo sapiens
gacactatcatattg

SEQ ID NO: 862100 - DNA, 15 bp, Homo sapiens
acactatcatattgg

SEQ ID NO: 862101 - DNA, 15 bp, Homo sapiens
cactatcatattggt

SEQ ID NO: 862102 - DNA, 15 bp, Homo sapiens
actatcatattggtg

SEQ ID NO: 862103 - DNA, 15 bp, Homo sapiens
ctatcatattggtgt

SEQ ID NO: 862104 - DNA, 15 bp, Homo sapiens
tatcatattggtgtt

SEQ ID NO: 862105 - DNA, 15 bp, Homo sapiens
atcatattggtgttt

SEQ ID NO: 862106 - DNA, 15 bp, Homo sapiens
tcatattggtgtttg

SEQ ID NO: 862107 - DNA, 15 bp, Homo sapiens
catattggtgtttga

SEQ ID NO: 862108 - DNA, 15 bp, Homo sapiens
atattggtgtttgat

SEQ ID NO: 862109 - DNA, 15 bp, Homo sapiens
tattggtgtttgatc

SEQ ID NO: 862110 - DNA, 15 bp, Homo sapiens
attggtgtttgatca

SEQ ID NO: 862111 - DNA, 15 bp, Homo sapiens
ttggtgtttgatcag

SEQ ID NO: 862112 - DNA, 15 bp, Homo sapiens
tggtgtttgatcagg

SEQ ID NO: 862113 - DNA, 15 bp, Homo sapiens
ggtgtttgatcaggg

SEQ ID NO: 862114 - DNA, 15 bp, Homo sapiens
gtgtttgatcaggga

SEQ ID NO: 862115 - DNA, 15 bp, Homo sapiens
tgtttgatcagggaa

SEQ ID NO: 862116 - DNA, 15 bp, Homo sapiens
gtttgatcagggaag

SEQ ID NO: 862117 - DNA, 15 bp, Homo sapiens
tttgatcagggaagt

SEQ ID NO: 862118 - DNA, 15 bp, Homo sapiens
ttgatcagggaagtg

SEQ ID NO: 862119 - DNA, 15 bp, Homo sapiens
tgatcagggaagtga

SEQ ID NO: 862120 - DNA, 15 bp, Homo sapiens
gatcagggaagtgac

SEQ ID NO: 862121 - DNA, 15 bp, Homo sapiens
atcagggaagtgacc

SEQ ID NO: 862122 - DNA, 15 bp, Homo sapiens
tcagggaagtgacct

SEQ ID NO: 862123 - DNA, 15 bp, Homo sapiens
cagggaagtgaccta

SEQ ID NO: 862124 - DNA, 15 bp, Homo sapiens
agggaagtgacctaa

SEQ ID NO: 862125 - DNA, 15 bp, Homo sapiens
gggaagtgacctaac

SEQ ID NO: 862126 - DNA, 15 bp, Homo sapiens
ggaagtgacctaaca

SEQ ID NO: 862127 - DNA, 15 bp, Homo sapiens
gaagtgacctaacag

SEQ ID NO: 862128 - DNA, 15 bp, Homo sapiens
aagtgacctaacaga

SEQ ID NO: 862129 - DNA, 15 bp, Homo sapiens
agtgacctaacagag

SEQ ID NO: 862130 - DNA, 15 bp, Homo sapiens
gtgacctaacagagg

SEQ ID NO: 862131 - DNA, 15 bp, Homo sapiens
tgacctaacagaggc

SEQ ID NO: 862132 - DNA, 15 bp, Homo sapiens
gacctaacagaggct

SEQ ID NO: 862133 - DNA, 15 bp, Homo sapiens
acctaacagaggctt

SEQ ID NO: 862134 - DNA, 15 bp, Homo sapiens
cctaacagaggcttt

SEQ ID NO: 862135 - DNA, 15 bp, Homo sapiens
ctaacagaggctttg

SEQ ID NO: 862136 - DNA, 15 bp, Homo sapiens
taacagaggctttgt

SEQ ID NO: 862137 - DNA, 15 bp, Homo sapiens
aacagaggctttgtt

SEQ ID NO: 862138 - DNA, 15 bp, Homo sapiens
acagaggctttgttt

SEQ ID NO: 862139 - DNA, 15 bp, Homo sapiens
cagaggctttgtttt

SEQ ID NO: 862140 - DNA, 15 bp, Homo sapiens
agaggctttgttttg

SEQ ID NO: 862141 - DNA, 15 bp, Homo sapiens
gaggctttgttttgg

SEQ ID NO: 862142 - DNA, 15 bp, Homo sapiens
aggctttgttttggg

SEQ ID NO: 862143 - DNA, 15 bp, Homo sapiens
ggctttgttttggga

SEQ ID NO: 862144 - DNA, 15 bp, Homo sapiens
gctttgttttgggag

SEQ ID NO: 862145 - DNA, 15 bp, Homo sapiens
ctttgttttgggagg

SEQ ID NO: 862146 - DNA, 15 bp, Homo sapiens
tttgttttgggaggg

SEQ ID NO: 862147 - DNA, 15 bp, Homo sapiens
ttgttttgggagggc

SEQ ID NO: 862148 - DNA, 15 bp, Homo sapiens
tgttttgggagggct

SEQ ID NO: 862149 - DNA, 15 bp, Homo sapiens
gttttgggagggctg

SEQ ID NO: 862150 - DNA, 15 bp, Homo sapiens
ttttgggagggctgc

SEQ ID NO: 862151 - DNA, 15 bp, Homo sapiens
tttgggagggctgct

SEQ ID NO: 862152 - DNA, 15 bp, Homo sapiens
ttgggagggctgctg

SEQ ID NO: 862153 - DNA, 15 bp, Homo sapiens
tgggagggctgctgt

SEQ ID NO: 862154 - DNA, 15 bp, Homo sapiens
gggagggctgctgtg

SEQ ID NO: 862155 - DNA, 15 bp, Homo sapiens
ggagggctgctgtgg

SEQ ID NO: 862156 - DNA, 15 bp, Homo sapiens
gagggctgctgtggc

SEQ ID NO: 862157 - DNA, 15 bp, Homo sapiens
agggctgctgtggct

SEQ ID NO: 862158 - DNA, 15 bp, Homo sapiens
gggctgctgtggctg

SEQ ID NO: 862159 - DNA, 15 bp, Homo sapiens
ggctgctgtggctgc

SEQ ID NO: 862160 - DNA, 15 bp, Homo sapiens
gctgctgtggctgca

SEQ ID NO: 862161 - DNA, 15 bp, Homo sapiens
ctgctgtggctgcag

SEQ ID NO: 862162 - DNA, 15 bp, Homo sapiens
tgctgtggctgcagg

SEQ ID NO: 862163 - DNA, 15 bp, Homo sapiens
gctgtggctgcaggg

SEQ ID NO: 862164 - DNA, 15 bp, Homo sapiens
ctgtggctgcagggg

SEQ ID NO: 862165 - DNA, 15 bp, Homo sapiens
tgtggctgcagggga

SEQ ID NO: 862166 - DNA, 15 bp, Homo sapiens
gtggctgcaggggag

SEQ ID NO: 862167 - DNA, 15 bp, Homo sapiens
gctgcaggggaggaa

SEQ ID NO: 862168 - DNA, 15 bp, Homo sapiens
ctgcaggggaggaag

SEQ ID NO: 862169 - DNA, 15 bp, Homo sapiens
tgcaggggaggaagg

SEQ ID NO: 862170 - DNA, 15 bp, Homo sapiens
gcaggggaggaaggg

SEQ ID NO: 862171 - DNA, 15 bp, Homo sapiens
caggggaggaaggga

SEQ ID NO: 862172 - DNA, 15 bp, Homo sapiens
aggggaggaagggac

SEQ ID NO: 862173 - DNA, 15 bp, Homo sapiens
ggggaggaagggact

SEQ ID NO: 862174 - DNA, 15 bp, Homo sapiens
gggaggaagggactg

SEQ ID NO: 862175 - DNA, 15 bp, Homo sapiens
ggaggaagggactga

SEQ ID NO: 862176 - DNA, 15 bp, Homo sapiens
gaggaagggactgac

SEQ ID NO: 862177 - DNA, 15 bp, Homo sapiens
aggaagggactgact

SEQ ID NO: 862178 - DNA, 15 bp, Homo sapiens
ggaagggactgacta

SEQ ID NO: 862179 - DNA, 15 bp, Homo sapiens
gaagggactgactag

SEQ ID NO: 862180 - DNA, 15 bp, Homo sapiens
aagggactgactaga

SEQ ID NO: 862181 - DNA, 15 bp, Homo sapiens
agggactgactagag

SEQ ID NO: 862182 - DNA, 15 bp, Homo sapiens
gggactgactagagg

SEQ ID NO: 862183 - DNA, 15 bp, Homo sapiens
ggactgactagaggg

SEQ ID NO: 862184 - DNA, 15 bp, Homo sapiens
gactgactagagggg

SEQ ID NO: 862185 - DNA, 15 bp, Homo sapiens
actgactagagggga

SEQ ID NO: 862186 - DNA, 15 bp, Homo sapiens
ctgactagaggggag

SEQ ID NO: 862187 - DNA, 15 bp, Homo sapiens
tgactagaggggagc

SEQ ID NO: 862188 - DNA, 15 bp, Homo sapiens
gactagaggggagct

SEQ ID NO: 862189 - DNA, 15 bp, Homo sapiens
actagaggggagctg

SEQ ID NO: 862190 - DNA, 15 bp, Homo sapiens
ctagaggggagctgg

SEQ ID NO: 862191 - DNA, 15 bp, Homo sapiens
tagaggggagctgga

SEQ ID NO: 862192 - DNA, 15 bp, Homo sapiens
agaggggagctggaa

SEQ ID NO: 862193 - DNA, 15 bp, Homo sapiens
gaggggagctggaag

SEQ ID NO: 862194 - DNA, 15 bp, Homo sapiens
aggggagctggaagc

SEQ ID NO: 862195 - DNA, 15 bp, Homo sapiens
ggggagctggaagcc

SEQ ID NO: 862196 - DNA, 15 bp, Homo sapiens
gggagctggaagccc

SEQ ID NO: 862197 - DNA, 15 bp, Homo sapiens
ggagctggaagcccc

SEQ ID NO: 862198 - DNA, 15 bp, Homo sapiens
gagctggaagccccc

SEQ ID NO: 862199 - DNA, 15 bp, Homo sapiens
agctggaagcccccc

SEQ ID NO: 862200 - DNA, 15 bp, Homo sapiens
gctggaagcccccct

SEQ ID NO: 862201 - DNA, 15 bp, Homo sapiens
ctggaagcccccctc

SEQ ID NO: 862202 - DNA, 15 bp, Homo sapiens
tggaagcccccctct

SEQ ID NO: 862203 - DNA, 15 bp, Homo sapiens
ggaagcccccctctc

SEQ ID NO: 862204 - DNA, 15 bp, Homo sapiens
gaagcccccctctcg

SEQ ID NO: 862205 - DNA, 15 bp, Homo sapiens
aagcccccctctcgg

SEQ ID NO: 862206 - DNA, 15 bp, Homo sapiens
agcccccctctcggg

SEQ ID NO: 862207 - DNA, 15 bp, Homo sapiens
gcccccctctcgggg

SEQ ID NO: 862208 - DNA, 15 bp, Homo sapiens
cccccctctcgggga

SEQ ID NO: 862209 - DNA, 15 bp, Homo sapiens
ccccctctcggggag

SEQ ID NO: 862210 - DNA, 15 bp, Homo sapiens
cccctctcggggagg

SEQ ID NO: 862211 - DNA, 15 bp, Homo sapiens
ccctctcggggagga

SEQ ID NO: 862212 - DNA, 15 bp, Homo sapiens
cctctcggggaggag

SEQ ID NO: 862213 - DNA, 15 bp, Homo sapiens
ctctcggggaggaga

SEQ ID NO: 862214 - DNA, 15 bp, Homo sapiens
tctcggggaggagac

SEQ ID NO: 862215 - DNA, 15 bp, Homo sapiens
ctcggggaggagaca

SEQ ID NO: 862216 - DNA, 15 bp, Homo sapiens
tcggggaggagacaa

SEQ ID NO: 862217 - DNA, 15 bp, Homo sapiens
cggggaggagacaaa

SEQ ID NO: 862218 - DNA, 15 bp, Homo sapiens
ggggaggagacaaac

SEQ ID NO: 862219 - DNA, 15 bp, Homo sapiens
gggaggagacaaaca

SEQ ID NO: 862220 - DNA, 15 bp, Homo sapiens
ggaggagacaaacag

SEQ ID NO: 862221 - DNA, 15 bp, Homo sapiens
gaggagacaaacaga

SEQ ID NO: 862222 - DNA, 15 bp, Homo sapiens
aggagacaaacagag

SEQ ID NO: 862223 - DNA, 15 bp, Homo sapiens
ggagacaaacagagg

SEQ ID NO: 862224 - DNA, 15 bp, Homo sapiens
gagacaaacagaggg

SEQ ID NO: 862225 - DNA, 15 bp, Homo sapiens
agacaaacagagggg

SEQ ID NO: 862226 - DNA, 15 bp, Homo sapiens
gacaaacagagggga

SEQ ID NO: 862227 - DNA, 15 bp, Homo sapiens
acaaacagaggggag

SEQ ID NO: 862228 - DNA, 15 bp, Homo sapiens
caaacagaggggagc

SEQ ID NO: 862229 - DNA, 15 bp, Homo sapiens
aaacagaggggagcc

SEQ ID NO: 862230 - DNA, 15 bp, Homo sapiens
aacagaggggagcct

SEQ ID NO: 862231 - DNA, 15 bp, Homo sapiens
acagaggggagcctg

SEQ ID NO: 862232 - DNA, 15 bp, Homo sapiens
cagaggggagcctgt

SEQ ID NO: 862233 - DNA, 15 bp, Homo sapiens
agaggggagcctgtt

SEQ ID NO: 862234 - DNA, 15 bp, Homo sapiens
gaggggagcctgttg

SEQ ID NO: 862235 - DNA, 15 bp, Homo sapiens
aggggagcctgttgt

SEQ ID NO: 862236 - DNA, 15 bp, Homo sapiens
ggggagcctgttgtg

SEQ ID NO: 862237 - DNA, 15 bp, Homo sapiens
gggagcctgttgtgg

SEQ ID NO: 862238 - DNA, 15 bp, Homo sapiens
ggagcctgttgtggg

SEQ ID NO: 862239 - DNA, 15 bp, Homo sapiens
gagcctgttgtgggc

SEQ ID NO: 862240 - DNA, 15 bp, Homo sapiens
agcctgttgtgggcg

SEQ ID NO: 862241 - DNA, 15 bp, Homo sapiens
gcctgttgtgggcgg

SEQ ID NO: 862242 - DNA, 15 bp, Homo sapiens
cctgttgtgggcggg

SEQ ID NO: 862243 - DNA, 15 bp, Homo sapiens
ctgttgtgggcgggc

SEQ ID NO: 862244 - DNA, 15 bp, Homo sapiens
tgttgtgggcgggcc

SEQ ID NO: 862245 - DNA, 15 bp, Homo sapiens
gttgtgggcgggccc

SEQ ID NO: 862246 - DNA, 15 bp, Homo sapiens
ttgtgggcgggcccc

SEQ ID NO: 862247 - DNA, 15 bp, Homo sapiens
tgtgggcgggcccca

SEQ ID NO: 862248 - DNA, 15 bp, Homo sapiens
gtgggcgggccccag

SEQ ID NO: 862249 - DNA, 15 bp, Homo sapiens
tgggcgggccccagc

SEQ ID NO: 862250 - DNA, 15 bp, Homo sapiens
gggcgggccccagct

SEQ ID NO: 862251 - DNA, 15 bp, Homo sapiens
ggcgggccccagctg

SEQ ID NO: 862252 - DNA, 15 bp, Homo sapiens
gcgggccccagctgt

SEQ ID NO: 862253 - DNA, 15 bp, Homo sapiens
cgggccccagctgtt

SEQ ID NO: 862254 - DNA, 15 bp, Homo sapiens
gggccccagctgttc

SEQ ID NO: 862255 - DNA, 15 bp, Homo sapiens
ggccccagctgttct

SEQ ID NO: 862256 - DNA, 15 bp, Homo sapiens
gccccagctgttctg

SEQ ID NO: 862257 - DNA, 15 bp, Homo sapiens
ccccagctgttctga

SEQ ID NO: 862258 - DNA, 15 bp, Homo sapiens
cccagctgttctgag

SEQ ID NO: 862259 - DNA, 15 bp, Homo sapiens
ccagctgttctgaga

SEQ ID NO: 862260 - DNA, 15 bp, Homo sapiens
cagctgttctgagaa

SEQ ID NO: 862261 - DNA, 15 bp, Homo sapiens
agctgttctgagaag

SEQ ID NO: 862262 - DNA, 15 bp, Homo sapiens
gctgttctgagaagc

SEQ ID NO: 862263 - DNA, 15 bp, Homo sapiens
ctgttctgagaagcc

SEQ ID NO: 862264 - DNA, 15 bp, Homo sapiens
tgttctgagaagcct

SEQ ID NO: 862265 - DNA, 15 bp, Homo sapiens
gttctgagaagcctt

SEQ ID NO: 862266 - DNA, 15 bp, Homo sapiens
ttctgagaagccttc

SEQ ID NO: 862267 - DNA, 15 bp, Homo sapiens
tctgagaagccttca

SEQ ID NO: 862268 - DNA, 15 bp, Homo sapiens
ctgagaagccttcag

SEQ ID NO: 862269 - DNA, 15 bp, Homo sapiens
tgagaagccttcaga

SEQ ID NO: 862270 - DNA, 15 bp, Homo sapiens
gagaagccttcagaa

SEQ ID NO: 862271 - DNA, 15 bp, Homo sapiens
gaagccttcagaagg

SEQ ID NO: 862272 - DNA, 15 bp, Homo sapiens
aagccttcagaagga

SEQ ID NO: 862273 - DNA, 15 bp, Homo sapiens
agccttcagaaggaa

SEQ ID NO: 862274 - DNA, 15 bp, Homo sapiens
gccttcagaaggaag

SEQ ID NO: 862275 - DNA, 15 bp, Homo sapiens
ccttcagaaggaaga

SEQ ID NO: 862276 - DNA, 15 bp, Homo sapiens
cttcagaaggaagac

SEQ ID NO: 862277 - DNA, 15 bp, Homo sapiens
ttcagaaggaagact

SEQ ID NO: 862278 - DNA, 15 bp, Homo sapiens
tcagaaggaagactt

SEQ ID NO: 862279 - DNA, 15 bp, Homo sapiens
cagaaggaagacttg

SEQ ID NO: 862280 - DNA, 15 bp, Homo sapiens
agaaggaagacttga

SEQ ID NO: 862281 - DNA, 15 bp, Homo sapiens
gaaggaagacttgat

SEQ ID NO: 862282 - DNA, 15 bp, Homo sapiens
aaggaagacttgatc

SEQ ID NO: 862283 - DNA, 15 bp, Homo sapiens
aggaagacttgatct

SEQ ID NO: 862284 - DNA, 15 bp, Homo sapiens
ggaagacttgatcta

SEQ ID NO: 862285 - DNA, 15 bp, Homo sapiens
gaagacttgatctat

SEQ ID NO: 862286 - DNA, 15 bp, Homo sapiens
aagacttgatctata

SEQ ID NO: 862287 - DNA, 15 bp, Homo sapiens
agacttgatctatag

SEQ ID NO: 862288 - DNA, 15 bp, Homo sapiens
gacttgatctatagt

SEQ ID NO: 862289 - DNA, 15 bp, Homo sapiens
acttgatctatagtc

SEQ ID NO: 862290 - DNA, 15 bp, Homo sapiens
cttgatctatagtct

SEQ ID NO: 862291 - DNA, 15 bp, Homo sapiens
ttgatctatagtctg

SEQ ID NO: 862292 - DNA, 15 bp, Homo sapiens
tgatctatagtctgc

SEQ ID NO: 862293 - DNA, 15 bp, Homo sapiens
gatctatagtctgca

SEQ ID NO: 862294 - DNA, 15 bp, Homo sapiens
atctatagtctgcag

SEQ ID NO: 862295 - DNA, 15 bp, Homo sapiens
tctatagtctgcagg

SEQ ID NO: 862296 - DNA, 15 bp, Homo sapiens
ctatagtctgcagga

SEQ ID NO: 862297 - DNA, 15 bp, Homo sapiens
tatagtctgcaggac

SEQ ID NO: 862298 - DNA, 15 bp, Homo sapiens
atagtctgcaggacc

SEQ ID NO: 862299 - DNA, 15 bp, Homo sapiens
tagtctgcaggaccc

SEQ ID NO: 862300 - DNA, 15 bp, Homo sapiens
agtctgcaggaccct

SEQ ID NO: 862301 - DNA, 15 bp, Homo sapiens
gtctgcaggaccctg

SEQ ID NO: 862302 - DNA, 15 bp, Homo sapiens
tctgcaggaccctgc

SEQ ID NO: 862303 - DNA, 15 bp, Homo sapiens
ctgcaggaccctgca

SEQ ID NO: 862304 - DNA, 15 bp, Homo sapiens
tgcaggaccctgcag

SEQ ID NO: 862305 - DNA, 15 bp, Homo sapiens
gcaggaccctgcagg

SEQ ID NO: 862306 - DNA, 15 bp, Homo sapiens
caggaccctgcaggt

SEQ ID NO: 862307 - DNA, 15 bp, Homo sapiens
aggaccctgcaggtg

SEQ ID NO: 862308 - DNA, 15 bp, Homo sapiens
ggaccctgcaggtga

SEQ ID NO: 862309 - DNA, 15 bp, Homo sapiens
gaccctgcaggtgaa

SEQ ID NO: 862310 - DNA, 15 bp, Homo sapiens
accctgcaggtgaag

SEQ ID NO: 862311 - DNA, 15 bp, Homo sapiens
ccctgcaggtgaagc

SEQ ID NO: 862312 - DNA, 15 bp, Homo sapiens
cctgcaggtgaagca

SEQ ID NO: 862313 - DNA, 15 bp, Homo sapiens
ctgcaggtgaagcac

SEQ ID NO: 862314 - DNA, 15 bp, Homo sapiens
tgcaggtgaagcaca

SEQ ID NO: 862315 - DNA, 15 bp, Homo sapiens
gcaggtgaagcacat

SEQ ID NO: 862316 - DNA, 15 bp, Homo sapiens
caggtgaagcacatt

SEQ ID NO: 862317 - DNA, 15 bp, Homo sapiens
aggtgaagcacattg

SEQ ID NO: 862318 - DNA, 15 bp, Homo sapiens
ggtgaagcacattgc

SEQ ID NO: 862319 - DNA, 15 bp, Homo sapiens
gtgaagcacattgcc

SEQ ID NO: 862320 - DNA, 15 bp, Homo sapiens
tgaagcacattgccc

SEQ ID NO: 862321 - DNA, 15 bp, Homo sapiens
gaagcacattgccca

SEQ ID NO: 862322 - DNA, 15 bp, Homo sapiens
aagcacattgcccag

SEQ ID NO: 862323 - DNA, 15 bp, Homo sapiens
agcacattgcccaga

SEQ ID NO: 862324 - DNA, 15 bp, Homo sapiens
gcacattgcccagat

SEQ ID NO: 862325 - DNA, 15 bp, Homo sapiens
cacattgcccagatg

SEQ ID NO: 862326 - DNA, 15 bp, Homo sapiens
acattgcccagatgc

SEQ ID NO: 862327 - DNA, 15 bp, Homo sapiens
cattgcccagatgca

SEQ ID NO: 862328 - DNA, 15 bp, Homo sapiens
attgcccagatgcaa

SEQ ID NO: 862329 - DNA, 15 bp, Homo sapiens
ttgcccagatgcaaa

SEQ ID NO: 862330 - DNA, 15 bp, Homo sapiens
tgcccagatgcaaat

SEQ ID NO: 862331 - DNA, 15 bp, Homo sapiens
gcccagatgcaaatc

SEQ ID NO: 862332 - DNA, 15 bp, Homo sapiens
cccagatgcaaatcc

SEQ ID NO: 862333 - DNA, 15 bp, Homo sapiens
ccagatgcaaatcca

SEQ ID NO: 862334 - DNA, 15 bp, Homo sapiens
cagatgcaaatccaa

SEQ ID NO: 862335 - DNA, 15 bp, Homo sapiens
agatgcaaatccaag

SEQ ID NO: 862336 - DNA, 15 bp, Homo sapiens
gatgcaaatccaaga

SEQ ID NO: 862337 - DNA, 15 bp, Homo sapiens
atgcaaatccaagaa

SEQ ID NO: 862338 - DNA, 15 bp, Homo sapiens
tgcaaatccaagaag

SEQ ID NO: 862339 - DNA, 15 bp, Homo sapiens
gcaaatccaagaagt

SEQ ID NO: 862340 - DNA, 15 bp, Homo sapiens
caaatccaagaagtt

SEQ ID NO: 862341 - DNA, 15 bp, Homo sapiens
aaatccaagaagtta

SEQ ID NO: 862342 - DNA, 15 bp, Homo sapiens
aatccaagaagttac

SEQ ID NO: 862343 - DNA, 15 bp, Homo sapiens
atccaagaagttaca

SEQ ID NO: 862344 - DNA, 15 bp, Homo sapiens
tccaagaagttacag

SEQ ID NO: 862345 - DNA, 15 bp, Homo sapiens
ccaagaagttacagt

SEQ ID NO: 862346 - DNA, 15 bp, Homo sapiens
caagaagttacagtc

SEQ ID NO: 862347 - DNA, 15 bp, Homo sapiens
aagaagttacagtct

SEQ ID NO: 862348 - DNA, 15 bp, Homo sapiens
agaagttacagtctt

SEQ ID NO: 862349 - DNA, 15 bp, Homo sapiens
gaagttacagtcttt

SEQ ID NO: 862350 - DNA, 15 bp, Homo sapiens
aagttacagtcttta

SEQ ID NO: 862351 - DNA, 15 bp, Homo sapiens
agttacagtctttaa

SEQ ID NO: 862352 - DNA, 15 bp, Homo sapiens
gttacagtctttaaa

SEQ ID NO: 862353 - DNA, 15 bp, Homo sapiens
ttacagtctttaaaa

SEQ ID NO: 862354 - DNA, 15 bp, Homo sapiens
tacagtctttaaaag

SEQ ID NO: 862355 - DNA, 15 bp, Homo sapiens
acagtctttaaaaga

SEQ ID NO: 862356 - DNA, 15 bp, Homo sapiens
cagtctttaaaagac

SEQ ID NO: 862357 - DNA, 15 bp, Homo sapiens
agtctttaaaagaca

SEQ ID NO: 862358 - DNA, 15 bp, Homo sapiens
gtctttaaaagacag

SEQ ID NO: 862359 - DNA, 15 bp, Homo sapiens
tctttaaaagacagt

SEQ ID NO: 862360 - DNA, 15 bp, Homo sapiens
ctttaaaagacagtt

SEQ ID NO: 862361 - DNA, 15 bp, Homo sapiens
tttaaaagacagttt

SEQ ID NO: 862362 - DNA, 15 bp, Homo sapiens
ttaaaagacagttta

SEQ ID NO: 862363 - DNA, 15 bp, Homo sapiens
taaaagacagtttaa

SEQ ID NO: 862364 - DNA, 15 bp, Homo sapiens
aaaagacagtttaat

SEQ ID NO: 862365 - DNA, 15 bp, Homo sapiens
aaagacagtttaatt

SEQ ID NO: 862366 - DNA, 15 bp, Homo sapiens
aagacagtttaatta

SEQ ID NO: 862367 - DNA, 15 bp, Homo sapiens
agacagtttaattag

SEQ ID NO: 862368 - DNA, 15 bp, Homo sapiens
gacagtttaattagt

SEQ ID NO: 862369 - DNA, 15 bp, Homo sapiens
acagtttaattagtg

SEQ ID NO: 862370 - DNA, 15 bp, Homo sapiens
cagtttaattagtgg

SEQ ID NO: 862371 - DNA, 15 bp, Homo sapiens
agtttaattagtggc

SEQ ID NO: 862372 - DNA, 15 bp, Homo sapiens
gtttaattagtggct

SEQ ID NO: 862373 - DNA, 15 bp, Homo sapiens
tttaattagtggctc

SEQ ID NO: 862374 - DNA, 15 bp, Homo sapiens
ttaattagtggctct

SEQ ID NO: 862375 - DNA, 15 bp, Homo sapiens
taattagtggctctg

SEQ ID NO: 862376 - DNA, 15 bp, Homo sapiens
aattagtggctctgg

SEQ ID NO: 862377 - DNA, 15 bp, Homo sapiens
attagtggctctgga

SEQ ID NO: 862378 - DNA, 15 bp, Homo sapiens
ttagtggctctggag

SEQ ID NO: 862379 - DNA, 15 bp, Homo sapiens
tagtggctctggagc

SEQ ID NO: 862380 - DNA, 15 bp, Homo sapiens
agtggctctggagca

SEQ ID NO: 862381 - DNA, 15 bp, Homo sapiens
gtggctctggagcag

SEQ ID NO: 862382 - DNA, 15 bp, Homo sapiens
tggctctggagcagc

SEQ ID NO: 862383 - DNA, 15 bp, Homo sapiens
ggctctggagcagct

SEQ ID NO: 862384 - DNA, 15 bp, Homo sapiens
gctctggagcagctg

SEQ ID NO: 862385 - DNA, 15 bp, Homo sapiens
ctctggagcagctga

SEQ ID NO: 862386 - DNA, 15 bp, Homo sapiens
tctggagcagctgaa

SEQ ID NO: 862387 - DNA, 15 bp, Homo sapiens
ctggagcagctgaat

SEQ ID NO: 862388 - DNA, 15 bp, Homo sapiens
tggagcagctgaatt

SEQ ID NO: 862389 - DNA, 15 bp, Homo sapiens
ggagcagctgaattc

SEQ ID NO: 862390 - DNA, 15 bp, Homo sapiens
gagcagctgaattcc

SEQ ID NO: 862391 - DNA, 15 bp, Homo sapiens
agcagctgaattcca

SEQ ID NO: 862392 - DNA, 15 bp, Homo sapiens
gcagctgaattccat

SEQ ID NO: 862393 - DNA, 15 bp, Homo sapiens
cagctgaattccatg

SEQ ID NO: 862394 - DNA, 15 bp, Homo sapiens
agctgaattccatga

SEQ ID NO: 862395 - DNA, 15 bp, Homo sapiens
gctgaattccatgag

SEQ ID NO: 862396 - DNA, 15 bp, Homo sapiens
ctgaattccatgagc

SEQ ID NO: 862397 - DNA, 15 bp, Homo sapiens
tgaattccatgagcc

SEQ ID NO: 862398 - DNA, 15 bp, Homo sapiens
gaattccatgagcct

SEQ ID NO: 862399 - DNA, 15 bp, Homo sapiens
aattccatgagccta

SEQ ID NO: 862400 - DNA, 15 bp, Homo sapiens
attccatgagcctaa

SEQ ID NO: 862401 - DNA, 15 bp, Homo sapiens
ttccatgagcctaat

SEQ ID NO: 862402 - DNA, 15 bp, Homo sapiens
tccatgagcctaatt

SEQ ID NO: 862403 - DNA, 15 bp, Homo sapiens
ccatgagcctaattc

SEQ ID NO: 862404 - DNA, 15 bp, Homo sapiens
catgagcctaattct

SEQ ID NO: 862405 - DNA, 15 bp, Homo sapiens
atgagcctaattctc

SEQ ID NO: 862406 - DNA, 15 bp, Homo sapiens
tgagcctaattctcc

SEQ ID NO: 862407 - DNA, 15 bp, Homo sapiens
gagcctaattctccc

SEQ ID NO: 862408 - DNA, 15 bp, Homo sapiens
agcctaattctcccc

SEQ ID NO: 862409 - DNA, 15 bp, Homo sapiens
gcctaattctcccca

SEQ ID NO: 862410 - DNA, 15 bp, Homo sapiens
cctaattctccccag

SEQ ID NO: 862411 - DNA, 15 bp, Homo sapiens
ctaattctccccagc

SEQ ID NO: 862412 - DNA, 15 bp, Homo sapiens
taattctccccagct

SEQ ID NO: 862413 - DNA, 15 bp, Homo sapiens
aattctccccagctg

SEQ ID NO: 862414 - DNA, 15 bp, Homo sapiens
attctccccagctga

SEQ ID NO: 862415 - DNA, 15 bp, Homo sapiens
ttctccccagctgac

SEQ ID NO: 862416 - DNA, 15 bp, Homo sapiens
tctccccagctgacc

SEQ ID NO: 862417 - DNA, 15 bp, Homo sapiens
ctccccagctgacct

SEQ ID NO: 862418 - DNA, 15 bp, Homo sapiens
tccccagctgacctg

SEQ ID NO: 862419 - DNA, 15 bp, Homo sapiens
ccccagctgacctgg

SEQ ID NO: 862420 - DNA, 15 bp, Homo sapiens
cccagctgacctggc

SEQ ID NO: 862421 - DNA, 15 bp, Homo sapiens
ccagctgacctggca

SEQ ID NO: 862422 - DNA, 15 bp, Homo sapiens
cagctgacctggcag

SEQ ID NO: 862423 - DNA, 15 bp, Homo sapiens
agctgacctggcagc

SEQ ID NO: 862424 - DNA, 15 bp, Homo sapiens
gctgacctggcagcc

SEQ ID NO: 862425 - DNA, 15 bp, Homo sapiens
ctgacctggcagcca

SEQ ID NO: 862426 - DNA, 15 bp, Homo sapiens
tgacctggcagccat

SEQ ID NO: 862427 - DNA, 15 bp, Homo sapiens
gacctggcagccatt

SEQ ID NO: 862428 - DNA, 15 bp, Homo sapiens
acctggcagccattg

SEQ ID NO: 862429 - DNA, 15 bp, Homo sapiens
cctggcagccattgt

SEQ ID NO: 862430 - DNA, 15 bp, Homo sapiens
ctggcagccattgtg

SEQ ID NO: 862431 - DNA, 15 bp, Homo sapiens
tggcagccattgtga

SEQ ID NO: 862432 - DNA, 15 bp, Homo sapiens
ggcagccattgtgat

SEQ ID NO: 862433 - DNA, 15 bp, Homo sapiens
gcagccattgtgatt

SEQ ID NO: 862434 - DNA, 15 bp, Homo sapiens
cagccattgtgattc

SEQ ID NO: 862435 - DNA, 15 bp, Homo sapiens
agccattgtgattcc

SEQ ID NO: 862436 - DNA, 15 bp, Homo sapiens
gccattgtgattcct

SEQ ID NO: 862437 - DNA, 15 bp, Homo sapiens
ccattgtgattccta

SEQ ID NO: 862438 - DNA, 15 bp, Homo sapiens
cattgtgattcctag

SEQ ID NO: 862439 - DNA, 15 bp, Homo sapiens
attgtgattcctagc

SEQ ID NO: 862440 - DNA, 15 bp, Homo sapiens
ttgtgattcctagct

SEQ ID NO: 862441 - DNA, 15 bp, Homo sapiens
tgtgattcctagctg

SEQ ID NO: 862442 - DNA, 15 bp, Homo sapiens
gtgattcctagctgg

SEQ ID NO: 862443 - DNA, 15 bp, Homo sapiens
tgattcctagctggg

SEQ ID NO: 862444 - DNA, 15 bp, Homo sapiens
gattcctagctgggt

SEQ ID NO: 862445 - DNA, 15 bp, Homo sapiens
attcctagctgggtt

SEQ ID NO: 862446 - DNA, 15 bp, Homo sapiens
ttcctagctgggttt

SEQ ID NO: 862447 - DNA, 15 bp, Homo sapiens
tcctagctgggtttg

SEQ ID NO: 862448 - DNA, 15 bp, Homo sapiens
cctagctgggtttgc

SEQ ID NO: 862449 - DNA, 15 bp, Homo sapiens
ctagctgggtttgct

SEQ ID NO: 862450 - DNA, 15 bp, Homo sapiens
tagctgggtttgcta

SEQ ID NO: 862451 - DNA, 15 bp, Homo sapiens
agctgggtttgctag

SEQ ID NO: 862452 - DNA, 15 bp, Homo sapiens
gctgggtttgctaga

SEQ ID NO: 862453 - DNA, 15 bp, Homo sapiens
ctgggtttgctagag

SEQ ID NO: 862454 - DNA, 15 bp, Homo sapiens
tgggtttgctagagt

SEQ ID NO: 862455 - DNA, 15 bp, Homo sapiens
gggtttgctagagtt

SEQ ID NO: 862456 - DNA, 15 bp, Homo sapiens
ggtttgctagagttt

SEQ ID NO: 862457 - DNA, 15 bp, Homo sapiens
gtttgctagagtttc

SEQ ID NO: 862458 - DNA, 15 bp, Homo sapiens
tttgctagagtttcc

SEQ ID NO: 862459 - DNA, 15 bp, Homo sapiens
ttgctagagtttcct

SEQ ID NO: 862460 - DNA, 15 bp, Homo sapiens
tgctagagtttcctt

SEQ ID NO: 862461 - DNA, 15 bp, Homo sapiens
gctagagtttccttc

SEQ ID NO: 862462 - DNA, 15 bp, Homo sapiens
ctagagtttccttct

SEQ ID NO: 862463 - DNA, 15 bp, Homo sapiens
tagagtttccttctt

SEQ ID NO: 862464 - DNA, 15 bp, Homo sapiens
agagtttccttctta

SEQ ID NO: 862465 - DNA, 15 bp, Homo sapiens
gagtttccttcttat

SEQ ID NO: 862466 - DNA, 15 bp, Homo sapiens
agtttccttcttatt

SEQ ID NO: 862467 - DNA, 15 bp, Homo sapiens
gtttccttcttattg

SEQ ID NO: 862468 - DNA, 15 bp, Homo sapiens
tttccttcttattgg

SEQ ID NO: 862469 - DNA, 15 bp, Homo sapiens
ttccttcttattgga

SEQ ID NO: 862470 - DNA, 15 bp, Homo sapiens
tccttcttattggag

SEQ ID NO: 862471 - DNA, 15 bp, Homo sapiens
ccttcttattggagg

SEQ ID NO: 862472 - DNA, 15 bp, Homo sapiens
cttcttattggagga

SEQ ID NO: 862473 - DNA, 15 bp, Homo sapiens
ttcttattggaggaa

SEQ ID NO: 862474 - DNA, 15 bp, Homo sapiens
tcttattggaggaag

SEQ ID NO: 862475 - DNA, 15 bp, Homo sapiens
cttattggaggaaga

SEQ ID NO: 862476 - DNA, 15 bp, Homo sapiens
ttattggaggaagat

SEQ ID NO: 862477 - DNA, 15 bp, Homo sapiens
tattggaggaagatt

SEQ ID NO: 862478 - DNA, 15 bp, Homo sapiens
attggaggaagattt

SEQ ID NO: 862479 - DNA, 15 bp, Homo sapiens
ttggaggaagatttc

SEQ ID NO: 862480 - DNA, 15 bp, Homo sapiens
tggaggaagatttcc

SEQ ID NO: 862481 - DNA, 15 bp, Homo sapiens
ggaggaagatttcct

SEQ ID NO: 862482 - DNA, 15 bp, Homo sapiens
gaggaagatttcctg

SEQ ID NO: 862483 - DNA, 15 bp, Homo sapiens
aggaagatttcctga

SEQ ID NO: 862484 - DNA, 15 bp, Homo sapiens
ggaagatttcctgac

SEQ ID NO: 862485 - DNA, 15 bp, Homo sapiens
gaagatttcctgacc

SEQ ID NO: 862486 - DNA, 15 bp, Homo sapiens
aagatttcctgaccc

SEQ ID NO: 862487 - DNA, 15 bp, Homo sapiens
agatttcctgacccc

SEQ ID NO: 862488 - DNA, 15 bp, Homo sapiens
gatttcctgacccct

SEQ ID NO: 862489 - DNA, 15 bp, Homo sapiens
atttcctgacccctg

SEQ ID NO: 862490 - DNA, 15 bp, Homo sapiens
tttcctgacccctga

SEQ ID NO: 862491 - DNA, 15 bp, Homo sapiens
ttcctgacccctgac

SEQ ID NO: 862492 - DNA, 15 bp, Homo sapiens
tcctgacccctgacc

SEQ ID NO: 862493 - DNA, 15 bp, Homo sapiens
cctgacccctgaccc

SEQ ID NO: 862494 - DNA, 15 bp, Homo sapiens
ctgacccctgaccca

SEQ ID NO: 862495 - DNA, 15 bp, Homo sapiens
tgacccctgacccag

SEQ ID NO: 862496 - DNA, 15 bp, Homo sapiens
gacccctgacccagg

SEQ ID NO: 862497 - DNA, 15 bp, Homo sapiens
acccctgacccagga

SEQ ID NO: 862498 - DNA, 15 bp, Homo sapiens
cccctgacccaggac

SEQ ID NO: 862499 - DNA, 15 bp, Homo sapiens
ccctgacccaggact

SEQ ID NO: 862500 - DNA, 15 bp, Homo sapiens
cctgacccaggacta

SEQ ID NO: 862501 - DNA, 15 bp, Homo sapiens
ctgacccaggactag

SEQ ID NO: 862502 - DNA, 15 bp, Homo sapiens
tgacccaggactagg

SEQ ID NO: 862503 - DNA, 15 bp, Homo sapiens
gacccaggactagga

SEQ ID NO: 862504 - DNA, 15 bp, Homo sapiens
acccaggactaggag

SEQ ID NO: 862505 - DNA, 15 bp, Homo sapiens
cccaggactaggaga

SEQ ID NO: 862506 - DNA, 15 bp, Homo sapiens
ccaggactaggagac

SEQ ID NO: 862507 - DNA, 15 bp, Homo sapiens
caggactaggagacc

SEQ ID NO: 862508 - DNA, 15 bp, Homo sapiens
aggactaggagaccc

SEQ ID NO: 862509 - DNA, 15 bp, Homo sapiens
ggactaggagaccca

SEQ ID NO: 862510 - DNA, 15 bp, Homo sapiens
gactaggagacccac

SEQ ID NO: 862511 - DNA, 15 bp, Homo sapiens
actaggagacccact

SEQ ID NO: 862512 - DNA, 15 bp, Homo sapiens
ctaggagacccactc

SEQ ID NO: 862513 - DNA, 15 bp, Homo sapiens
taggagacccactcg

SEQ ID NO: 862514 - DNA, 15 bp, Homo sapiens
aggagacccactcgg

SEQ ID NO: 862515 - DNA, 15 bp, Homo sapiens
ggagacccactcggc

SEQ ID NO: 862516 - DNA, 15 bp, Homo sapiens
gagacccactcggct

SEQ ID NO: 862517 - DNA, 15 bp, Homo sapiens
agacccactcggctg

SEQ ID NO: 862518 - DNA, 15 bp, Homo sapiens
gacccactcggctgc

SEQ ID NO: 862519 - DNA, 15 bp, Homo sapiens
acccactcggctgca

SEQ ID NO: 862520 - DNA, 15 bp, Homo sapiens
cccactcggctgcat

SEQ ID NO: 862521 - DNA, 15 bp, Homo sapiens
ccactcggctgcatc

SEQ ID NO: 862522 - DNA, 15 bp, Homo sapiens
cactcggctgcatcc

SEQ ID NO: 862523 - DNA, 15 bp, Homo sapiens
actcggctgcatcca

SEQ ID NO: 862524 - DNA, 15 bp, Homo sapiens
ctcggctgcatccac

SEQ ID NO: 862525 - DNA, 15 bp, Homo sapiens
tcggctgcatccact

SEQ ID NO: 862526 - DNA, 15 bp, Homo sapiens
cggctgcatccacta

SEQ ID NO: 862527 - DNA, 15 bp, Homo sapiens
ggctgcatccactac

SEQ ID NO: 862528 - DNA, 15 bp, Homo sapiens
gctgcatccactacc

SEQ ID NO: 862529 - DNA, 15 bp, Homo sapiens
ctgcatccactacca

SEQ ID NO: 862530 - DNA, 15 bp, Homo sapiens
tgcatccactaccac

SEQ ID NO: 862531 - DNA, 15 bp, Homo sapiens
gcatccactaccact

SEQ ID NO: 862532 - DNA, 15 bp, Homo sapiens
catccactaccactg

SEQ ID NO: 862533 - DNA, 15 bp, Homo sapiens
atccactaccactgg

SEQ ID NO: 862534 - DNA, 15 bp, Homo sapiens
tccactaccactggc

SEQ ID NO: 862535 - DNA, 15 bp, Homo sapiens
ccactaccactggcc

SEQ ID NO: 862536 - DNA, 15 bp, Homo sapiens
cactaccactggcct

SEQ ID NO: 862537 - DNA, 15 bp, Homo sapiens
actaccactggcctt

SEQ ID NO: 862538 - DNA, 15 bp, Homo sapiens
ctaccactggccttg

SEQ ID NO: 862539 - DNA, 15 bp, Homo sapiens
taccactggccttgg

SEQ ID NO: 862540 - DNA, 15 bp, Homo sapiens
accactggccttggg

SEQ ID NO: 862541 - DNA, 15 bp, Homo sapiens
ccactggccttgggg

SEQ ID NO: 862542 - DNA, 15 bp, Homo sapiens
actggccttggggat

SEQ ID NO: 862543 - DNA, 15 bp, Homo sapiens
ctggccttggggatc

SEQ ID NO: 862544 - DNA, 15 bp, Homo sapiens
tggccttggggatct

SEQ ID NO: 862545 - DNA, 15 bp, Homo sapiens
ggccttggggatcta

SEQ ID NO: 862546 - DNA, 15 bp, Homo sapiens
gccttggggatctac

SEQ ID NO: 862547 - DNA, 15 bp, Homo sapiens
ccttggggatctact

SEQ ID NO: 862548 - DNA, 15 bp, Homo sapiens
cttggggatctactg

SEQ ID NO: 862549 - DNA, 15 bp, Homo sapiens
ttggggatctactgc

SEQ ID NO: 862550 - DNA, 15 bp, Homo sapiens
tggggatctactgct

SEQ ID NO: 862551 - DNA, 15 bp, Homo sapiens
ggggatctactgctt

SEQ ID NO: 862552 - DNA, 15 bp, Homo sapiens
gggatctactgcttc

SEQ ID NO: 862553 - DNA, 15 bp, Homo sapiens
ggatctactgcttct

SEQ ID NO: 862554 - DNA, 15 bp, Homo sapiens
gatctactgcttctg

SEQ ID NO: 862555 - DNA, 15 bp, Homo sapiens
atctactgcttctgt

SEQ ID NO: 862556 - DNA, 15 bp, Homo sapiens
tctactgcttctgtt

SEQ ID NO: 862557 - DNA, 15 bp, Homo sapiens
ctactgcttctgttt

SEQ ID NO: 862558 - DNA, 15 bp, Homo sapiens
tactgcttctgtttc

SEQ ID NO: 862559 - DNA, 15 bp, Homo sapiens
actgcttctgtttcc

SEQ ID NO: 862560 - DNA, 15 bp, Homo sapiens
ctgcttctgtttcct

SEQ ID NO: 862561 - DNA, 15 bp, Homo sapiens
tgcttctgtttcctt

SEQ ID NO: 862562 - DNA, 15 bp, Homo sapiens
gcttctgtttccttt

SEQ ID NO: 862563 - DNA, 15 bp, Homo sapiens
cttctgtttcctttt

SEQ ID NO: 862564 - DNA, 15 bp, Homo sapiens
ttctgtttccttttc

SEQ ID NO: 862565 - DNA, 15 bp, Homo sapiens
tctgtttccttttcc

SEQ ID NO: 862566 - DNA, 15 bp, Homo sapiens
ctgtttccttttcct

SEQ ID NO: 862567 - DNA, 15 bp, Homo sapiens
tgtttccttttccta

SEQ ID NO: 862568 - DNA, 15 bp, Homo sapiens
gtttccttttcctaa

SEQ ID NO: 862569 - DNA, 15 bp, Homo sapiens
tttccttttcctaac

SEQ ID NO: 862570 - DNA, 15 bp, Homo sapiens
ttccttttcctaacc

SEQ ID NO: 862571 - DNA, 15 bp, Homo sapiens
tccttttcctaacca

SEQ ID NO: 862572 - DNA, 15 bp, Homo sapiens
ccttttcctaaccat

SEQ ID NO: 862573 - DNA, 15 bp, Homo sapiens
cttttcctaaccatt

SEQ ID NO: 862574 - DNA, 15 bp, Homo sapiens
ttttcctaaccatta

SEQ ID NO: 862575 - DNA, 15 bp, Homo sapiens
tttcctaaccattat

SEQ ID NO: 862576 - DNA, 15 bp, Homo sapiens
ttcctaaccattatt

SEQ ID NO: 862577 - DNA, 15 bp, Homo sapiens
tcctaaccattattt

SEQ ID NO: 862578 - DNA, 15 bp, Homo sapiens
cctaaccattatttc

SEQ ID NO: 862579 - DNA, 15 bp, Homo sapiens
ctaaccattatttct

SEQ ID NO: 862580 - DNA, 15 bp, Homo sapiens
taaccattatttctt

SEQ ID NO: 862581 - DNA, 15 bp, Homo sapiens
aaccattatttcttc

SEQ ID NO: 862582 - DNA, 15 bp, Homo sapiens
accattatttcttcc

SEQ ID NO: 862583 - DNA, 15 bp, Homo sapiens
ccattatttcttcct

SEQ ID NO: 862584 - DNA, 15 bp, Homo sapiens
cattatttcttcctt

SEQ ID NO: 862585 - DNA, 15 bp, Homo sapiens
attatttcttcctta

SEQ ID NO: 862586 - DNA, 15 bp, Homo sapiens
ttatttcttccttat

SEQ ID NO: 862587 - DNA, 15 bp, Homo sapiens
tatttcttccttatt

SEQ ID NO: 862588 - DNA, 15 bp, Homo sapiens
atttcttccttattc

SEQ ID NO: 862589 - DNA, 15 bp, Homo sapiens
tttcttccttattcc

SEQ ID NO: 862590 - DNA, 15 bp, Homo sapiens
ttcttccttattcct

SEQ ID NO: 862591 - DNA, 15 bp, Homo sapiens
tcttccttattcctc

SEQ ID NO: 862592 - DNA, 15 bp, Homo sapiens
cttccttattcctca

SEQ ID NO: 862593 - DNA, 15 bp, Homo sapiens
ttccttattcctcat

SEQ ID NO: 862594 - DNA, 15 bp, Homo sapiens
tccttattcctcatc

SEQ ID NO: 862595 - DNA, 15 bp, Homo sapiens
ccttattcctcatca

SEQ ID NO: 862596 - DNA, 15 bp, Homo sapiens
cttattcctcatcat

SEQ ID NO: 862597 - DNA, 15 bp, Homo sapiens
ttattcctcatcatc

SEQ ID NO: 862598 - DNA, 15 bp, Homo sapiens
tattcctcatcatct

SEQ ID NO: 862599 - DNA, 15 bp, Homo sapiens
attcctcatcatctt

SEQ ID NO: 862600 - DNA, 15 bp, Homo sapiens
ttcctcatcatcttc

SEQ ID NO: 862601 - DNA, 15 bp, Homo sapiens
tcctcatcatcttcc

SEQ ID NO: 862602 - DNA, 15 bp, Homo sapiens
cctcatcatcttccc

SEQ ID NO: 862603 - DNA, 15 bp, Homo sapiens
ctcatcatcttcccc

SEQ ID NO: 862604 - DNA, 15 bp, Homo sapiens
tcatcatcttcccca

SEQ ID NO: 862605 - DNA, 15 bp, Homo sapiens
catcatcttccccag

SEQ ID NO: 862606 - DNA, 15 bp, Homo sapiens
atcatcttccccagt

SEQ ID NO: 862607 - DNA, 15 bp, Homo sapiens
tcatcttccccagtt

SEQ ID NO: 862608 - DNA, 15 bp, Homo sapiens
catcttccccagttc

SEQ ID NO: 862609 - DNA, 15 bp, Homo sapiens
atcttccccagttca

SEQ ID NO: 862610 - DNA, 15 bp, Homo sapiens
tcttccccagttcaa

SEQ ID NO: 862611 - DNA, 15 bp, Homo sapiens
cttccccagttcaaa

SEQ ID NO: 862612 - DNA, 15 bp, Homo sapiens
ttccccagttcaaat

SEQ ID NO: 862613 - DNA, 15 bp, Homo sapiens
tccccagttcaaata

SEQ ID NO: 862614 - DNA, 15 bp, Homo sapiens
ccccagttcaaatat

SEQ ID NO: 862615 - DNA, 15 bp, Homo sapiens
cccagttcaaatata

SEQ ID NO: 862616 - DNA, 15 bp, Homo sapiens
ccagttcaaatatat

SEQ ID NO: 862617 - DNA, 15 bp, Homo sapiens
cagttcaaatatatc

SEQ ID NO: 862618 - DNA, 15 bp, Homo sapiens
agttcaaatatatct

SEQ ID NO: 862619 - DNA, 15 bp, Homo sapiens
gttcaaatatatctt

SEQ ID NO: 862620 - DNA, 15 bp, Homo sapiens
ttcaaatatatctta

SEQ ID NO: 862621 - DNA, 15 bp, Homo sapiens
tcaaatatatcttac

SEQ ID NO: 862622 - DNA, 15 bp, Homo sapiens
caaatatatcttaca

SEQ ID NO: 862623 - DNA, 15 bp, Homo sapiens
aaatatatcttacat

SEQ ID NO: 862624 - DNA, 15 bp, Homo sapiens
aatatatcttacatc

SEQ ID NO: 862625 - DNA, 15 bp, Homo sapiens
atatatcttacatct

SEQ ID NO: 862626 - DNA, 15 bp, Homo sapiens
tatatcttacatctt

SEQ ID NO: 862627 - DNA, 15 bp, Homo sapiens
atatcttacatcttg

SEQ ID NO: 862628 - DNA, 15 bp, Homo sapiens
tatcttacatcttga

SEQ ID NO: 862629 - DNA, 15 bp, Homo sapiens
atcttacatcttgag

SEQ ID NO: 862630 - DNA, 15 bp, Homo sapiens
tcttacatcttgagt

SEQ ID NO: 862631 - DNA, 15 bp, Homo sapiens
cttacatcttgagtg

SEQ ID NO: 862632 - DNA, 15 bp, Homo sapiens
ttacatcttgagtgt

SEQ ID NO: 862633 - DNA, 15 bp, Homo sapiens
tacatcttgagtgtg

SEQ ID NO: 862634 - DNA, 15 bp, Homo sapiens
acatcttgagtgtgt

SEQ ID NO: 862635 - DNA, 15 bp, Homo sapiens
catcttgagtgtgtt

SEQ ID NO: 862636 - DNA, 15 bp, Homo sapiens
atcttgagtgtgttg

SEQ ID NO: 862637 - DNA, 15 bp, Homo sapiens
tcttgagtgtgttga

SEQ ID NO: 862638 - DNA, 15 bp, Homo sapiens
cttgagtgtgttgaa

SEQ ID NO: 862639 - DNA, 15 bp, Homo sapiens
ttgagtgtgttgaag

SEQ ID NO: 862640 - DNA, 15 bp, Homo sapiens
tgagtgtgttgaagg

SEQ ID NO: 862641 - DNA, 15 bp, Homo sapiens
gagtgtgttgaaggt

SEQ ID NO: 862642 - DNA, 15 bp, Homo sapiens
agtgtgttgaaggtg

SEQ ID NO: 862643 - DNA, 15 bp, Homo sapiens
gtgtgttgaaggtga

SEQ ID NO: 862644 - DNA, 15 bp, Homo sapiens
tgtgttgaaggtgac

SEQ ID NO: 862645 - DNA, 15 bp, Homo sapiens
gtgttgaaggtgaca

SEQ ID NO: 862646 - DNA, 15 bp, Homo sapiens
tgttgaaggtgacag

SEQ ID NO: 862647 - DNA, 15 bp, Homo sapiens
gttgaaggtgacagg

SEQ ID NO: 862648 - DNA, 15 bp, Homo sapiens
ttgaaggtgacaggc

SEQ ID NO: 862649 - DNA, 15 bp, Homo sapiens
tgaaggtgacaggca

SEQ ID NO: 862650 - DNA, 15 bp, Homo sapiens
gaaggtgacaggcag

SEQ ID NO: 862651 - DNA, 15 bp, Homo sapiens
aaggtgacaggcagg

SEQ ID NO: 862652 - DNA, 15 bp, Homo sapiens
aggtgacaggcaggc

SEQ ID NO: 862653 - DNA, 15 bp, Homo sapiens
ggtgacaggcaggca

SEQ ID NO: 862654 - DNA, 15 bp, Homo sapiens
gtgacaggcaggcag

SEQ ID NO: 862655 - DNA, 15 bp, Homo sapiens
tgacaggcaggcagc

SEQ ID NO: 862656 - DNA, 15 bp, Homo sapiens
gacaggcaggcagct

SEQ ID NO: 862657 - DNA, 15 bp, Homo sapiens
acaggcaggcagctc

SEQ ID NO: 862658 - DNA, 15 bp, Homo sapiens
caggcaggcagctct

SEQ ID NO: 862659 - DNA, 15 bp, Homo sapiens
aggcaggcagctctc

SEQ ID NO: 862660 - DNA, 15 bp, Homo sapiens
ggcaggcagctctca

SEQ ID NO: 862661 - DNA, 15 bp, Homo sapiens
gcaggcagctctcac

SEQ ID NO: 862662 - DNA, 15 bp, Homo sapiens
caggcagctctcacc

SEQ ID NO: 862663 - DNA, 15 bp, Homo sapiens
aggcagctctcacct

SEQ ID NO: 862664 - DNA, 15 bp, Homo sapiens
ggcagctctcacctg

SEQ ID NO: 862665 - DNA, 15 bp, Homo sapiens
gcagctctcacctgc

SEQ ID NO: 862666 - DNA, 15 bp, Homo sapiens
cagctctcacctgct

SEQ ID NO: 862667 - DNA, 15 bp, Homo sapiens
agctctcacctgctg

SEQ ID NO: 862668 - DNA, 15 bp, Homo sapiens
gctctcacctgctgg

SEQ ID NO: 862669 - DNA, 15 bp, Homo sapiens
ctctcacctgctggt

SEQ ID NO: 862670 - DNA, 15 bp, Homo sapiens
tctcacctgctggtg

SEQ ID NO: 862671 - DNA, 15 bp, Homo sapiens
ctcacctgctggtgt

SEQ ID NO: 862672 - DNA, 15 bp, Homo sapiens
tcacctgctggtgtg

SEQ ID NO: 862673 - DNA, 15 bp, Homo sapiens
cacctgctggtgtga

SEQ ID NO: 862674 - DNA, 15 bp, Homo sapiens
acctgctggtgtgaa

SEQ ID NO: 862675 - DNA, 15 bp, Homo sapiens
cctgctggtgtgaag

SEQ ID NO: 862676 - DNA, 15 bp, Homo sapiens
ctgctggtgtgaagt

SEQ ID NO: 862677 - DNA, 15 bp, Homo sapiens
tgctggtgtgaagta

SEQ ID NO: 862678 - DNA, 15 bp, Homo sapiens
gctggtgtgaagtat

SEQ ID NO: 862679 - DNA, 15 bp, Homo sapiens
ctggtgtgaagtatt

SEQ ID NO: 862680 - DNA, 15 bp, Homo sapiens
tggtgtgaagtattg

SEQ ID NO: 862681 - DNA, 15 bp, Homo sapiens
ggtgtgaagtattgg

SEQ ID NO: 862682 - DNA, 15 bp, Homo sapiens
gtgtgaagtattggc

SEQ ID NO: 862683 - DNA, 15 bp, Homo sapiens
tgtgaagtattggct

SEQ ID NO: 862684 - DNA, 15 bp, Homo sapiens
gtgaagtattggctc

SEQ ID NO: 862685 - DNA, 15 bp, Homo sapiens
tgaagtattggctca

SEQ ID NO: 862686 - DNA, 15 bp, Homo sapiens
gaagtattggctcag

SEQ ID NO: 862687 - DNA, 15 bp, Homo sapiens
aagtattggctcagg

SEQ ID NO: 862688 - DNA, 15 bp, Homo sapiens
agtattggctcaggc

SEQ ID NO: 862689 - DNA, 15 bp, Homo sapiens
gtattggctcaggct

SEQ ID NO: 862690 - DNA, 15 bp, Homo sapiens
tattggctcaggctg

SEQ ID NO: 862691 - DNA, 15 bp, Homo sapiens
attggctcaggctga

SEQ ID NO: 862692 - DNA, 15 bp, Homo sapiens
ttggctcaggctgag

SEQ ID NO: 862693 - DNA, 15 bp, Homo sapiens
tggctcaggctgagc

SEQ ID NO: 862694 - DNA, 15 bp, Homo sapiens
ggctcaggctgagca

SEQ ID NO: 862695 - DNA, 15 bp, Homo sapiens
gctcaggctgagcag

SEQ ID NO: 862696 - DNA, 15 bp, Homo sapiens
ctcaggctgagcagc

SEQ ID NO: 862697 - DNA, 15 bp, Homo sapiens
tcaggctgagcagca

SEQ ID NO: 862698 - DNA, 15 bp, Homo sapiens
caggctgagcagcag

SEQ ID NO: 862699 - DNA, 15 bp, Homo sapiens
aggctgagcagcaga

SEQ ID NO: 862700 - DNA, 15 bp, Homo sapiens
ggctgagcagcagac

SEQ ID NO: 862701 - DNA, 15 bp, Homo sapiens
gctgagcagcagaca

SEQ ID NO: 862702 - DNA, 15 bp, Homo sapiens
ctgagcagcagacac

SEQ ID NO: 862703 - DNA, 15 bp, Homo sapiens
tgagcagcagacaca

SEQ ID NO: 862704 - DNA, 15 bp, Homo sapiens
gagcagcagacacaa

SEQ ID NO: 862705 - DNA, 15 bp, Homo sapiens
agcagcagacacaaa

SEQ ID NO: 862706 - DNA, 15 bp, Homo sapiens
gcagcagacacaaag

SEQ ID NO: 862707 - DNA, 15 bp, Homo sapiens
cagcagacacaaagc

SEQ ID NO: 862708 - DNA, 15 bp, Homo sapiens
agcagacacaaagca

SEQ ID NO: 862709 - DNA, 15 bp, Homo sapiens
gcagacacaaagcaa

SEQ ID NO: 862710 - DNA, 15 bp, Homo sapiens
cagacacaaagcaag

SEQ ID NO: 862711 - DNA, 15 bp, Homo sapiens
agacacaaagcaagt

SEQ ID NO: 862712 - DNA, 15 bp, Homo sapiens
gacacaaagcaagtg

SEQ ID NO: 862713 - DNA, 15 bp, Homo sapiens
acacaaagcaagtgg

SEQ ID NO: 862714 - DNA, 15 bp, Homo sapiens
cacaaagcaagtggg

SEQ ID NO: 862715 - DNA, 15 bp, Homo sapiens
acaaagcaagtggga

SEQ ID NO: 862716 - DNA, 15 bp, Homo sapiens
caaagcaagtgggag

SEQ ID NO: 862717 - DNA, 15 bp, Homo sapiens
aaagcaagtgggagc

SEQ ID NO: 862718 - DNA, 15 bp, Homo sapiens
aagcaagtgggagcc

SEQ ID NO: 862719 - DNA, 15 bp, Homo sapiens
agcaagtgggagcca

SEQ ID NO: 862720 - DNA, 15 bp, Homo sapiens
gcaagtgggagccac

SEQ ID NO: 862721 - DNA, 15 bp, Homo sapiens
caagtgggagccacc

SEQ ID NO: 862722 - DNA, 15 bp, Homo sapiens
aagtgggagccacca

SEQ ID NO: 862723 - DNA, 15 bp, Homo sapiens
agtgggagccaccag

SEQ ID NO: 862724 - DNA, 15 bp, Homo sapiens
gtgggagccaccagt

SEQ ID NO: 862725 - DNA, 15 bp, Homo sapiens
tgggagccaccagtg

SEQ ID NO: 862726 - DNA, 15 bp, Homo sapiens
gggagccaccagtgg

SEQ ID NO: 862727 - DNA, 15 bp, Homo sapiens
ggagccaccagtggg

SEQ ID NO: 862728 - DNA, 15 bp, Homo sapiens
gagccaccagtgggg

SEQ ID NO: 862729 - DNA, 15 bp, Homo sapiens
agccaccagtgggga

SEQ ID NO: 862730 - DNA, 15 bp, Homo sapiens
gccaccagtggggac

SEQ ID NO: 862731 - DNA, 15 bp, Homo sapiens
ccaccagtggggaca

SEQ ID NO: 862732 - DNA, 15 bp, Homo sapiens
caccagtggggacag

SEQ ID NO: 862733 - DNA, 15 bp, Homo sapiens
accagtggggacagc

SEQ ID NO: 862734 - DNA, 15 bp, Homo sapiens
ccagtggggacagct

SEQ ID NO: 862735 - DNA, 15 bp, Homo sapiens
cagtggggacagctg

SEQ ID NO: 862736 - DNA, 15 bp, Homo sapiens
agtggggacagctgg

SEQ ID NO: 862737 - DNA, 15 bp, Homo sapiens
gtggggacagctggc

SEQ ID NO: 862738 - DNA, 15 bp, Homo sapiens
tggggacagctggcc

SEQ ID NO: 862739 - DNA, 15 bp, Homo sapiens
ggggacagctggcca

SEQ ID NO: 862740 - DNA, 15 bp, Homo sapiens
gggacagctggccag

SEQ ID NO: 862741 - DNA, 15 bp, Homo sapiens
ggacagctggccagc

SEQ ID NO: 862742 - DNA, 15 bp, Homo sapiens
gacagctggccagcg

SEQ ID NO: 862743 - DNA, 15 bp, Homo sapiens
acagctggccagcgc

SEQ ID NO: 862744 - DNA, 15 bp, Homo sapiens
cagctggccagcgct

SEQ ID NO: 862745 - DNA, 15 bp, Homo sapiens
agctggccagcgctg

SEQ ID NO: 862746 - DNA, 15 bp, Homo sapiens
gctggccagcgctga

SEQ ID NO: 862747 - DNA, 15 bp, Homo sapiens
ctggccagcgctgag

SEQ ID NO: 862748 - DNA, 15 bp, Homo sapiens
tggccagcgctgagg

SEQ ID NO: 862749 - DNA, 15 bp, Homo sapiens
ggccagcgctgaggc

SEQ ID NO: 862750 - DNA, 15 bp, Homo sapiens
gccagcgctgaggct

SEQ ID NO: 862751 - DNA, 15 bp, Homo sapiens
ccagcgctgaggctc

SEQ ID NO: 862752 - DNA, 15 bp, Homo sapiens
cagcgctgaggctct

SEQ ID NO: 862753 - DNA, 15 bp, Homo sapiens
agcgctgaggctctt

SEQ ID NO: 862754 - DNA, 15 bp, Homo sapiens
gcgctgaggctcttg

SEQ ID NO: 862755 - DNA, 15 bp, Homo sapiens
cgctgaggctcttgc

SEQ ID NO: 862756 - DNA, 15 bp, Homo sapiens
gctgaggctcttgct

SEQ ID NO: 862757 - DNA, 15 bp, Homo sapiens
ctgaggctcttgctt

SEQ ID NO: 862758 - DNA, 15 bp, Homo sapiens
tgaggctcttgcttc

SEQ ID NO: 862759 - DNA, 15 bp, Homo sapiens
gaggctcttgcttcc

SEQ ID NO: 862760 - DNA, 15 bp, Homo sapiens
aggctcttgcttcca

SEQ ID NO: 862761 - DNA, 15 bp, Homo sapiens
ggctcttgcttccag

SEQ ID NO: 862762 - DNA, 15 bp, Homo sapiens
gctcttgcttccagc

SEQ ID NO: 862763 - DNA, 15 bp, Homo sapiens
ctcttgcttccagct

SEQ ID NO: 862764 - DNA, 15 bp, Homo sapiens
tcttgcttccagctg

SEQ ID NO: 862765 - DNA, 15 bp, Homo sapiens
cttgcttccagctgc

SEQ ID NO: 862766 - DNA, 15 bp, Homo sapiens
ttgcttccagctgca

SEQ ID NO: 862767 - DNA, 15 bp, Homo sapiens
tgcttccagctgcag

SEQ ID NO: 862768 - DNA, 15 bp, Homo sapiens
gcttccagctgcagg

SEQ ID NO: 862769 - DNA, 15 bp, Homo sapiens
cttccagctgcaggt

SEQ ID NO: 862770 - DNA, 15 bp, Homo sapiens
ttccagctgcaggtg

SEQ ID NO: 862771 - DNA, 15 bp, Homo sapiens
tccagctgcaggtgg

SEQ ID NO: 862772 - DNA, 15 bp, Homo sapiens
ccagctgcaggtggt

SEQ ID NO: 862773 - DNA, 15 bp, Homo sapiens
cagctgcaggtggta

SEQ ID NO: 862774 - DNA, 15 bp, Homo sapiens
agctgcaggtggtag

SEQ ID NO: 862775 - DNA, 15 bp, Homo sapiens
gctgcaggtggtagc

SEQ ID NO: 862776 - DNA, 15 bp, Homo sapiens
ctgcaggtggtagct

SEQ ID NO: 862777 - DNA, 15 bp, Homo sapiens
tgcaggtggtagctt

SEQ ID NO: 862778 - DNA, 15 bp, Homo sapiens
gcaggtggtagcttc

SEQ ID NO: 862779 - DNA, 15 bp, Homo sapiens
caggtggtagcttca

SEQ ID NO: 862780 - DNA, 15 bp, Homo sapiens
aggtggtagcttcag

SEQ ID NO: 862781 - DNA, 15 bp, Homo sapiens
ggtggtagcttcagt

SEQ ID NO: 862782 - DNA, 15 bp, Homo sapiens
gtggtagcttcagtt

SEQ ID NO: 862783 - DNA, 15 bp, Homo sapiens
tggtagcttcagtta

SEQ ID NO: 862784 - DNA, 15 bp, Homo sapiens
ggtagcttcagttag

SEQ ID NO: 862785 - DNA, 15 bp, Homo sapiens
gtagcttcagttaga

SEQ ID NO: 862786 - DNA, 15 bp, Homo sapiens
tagcttcagttagag

SEQ ID NO: 862787 - DNA, 15 bp, Homo sapiens
agcttcagttagagc

SEQ ID NO: 862788 - DNA, 15 bp, Homo sapiens
gcttcagttagagct

SEQ ID NO: 862789 - DNA, 15 bp, Homo sapiens
cttcagttagagctc

SEQ ID NO: 862790 - DNA, 15 bp, Homo sapiens
ttcagttagagctca

SEQ ID NO: 862791 - DNA, 15 bp, Homo sapiens
tcagttagagctcat

SEQ ID NO: 862792 - DNA, 15 bp, Homo sapiens
cagttagagctcatg

SEQ ID NO: 862793 - DNA, 15 bp, Homo sapiens
agttagagctcatgg

SEQ ID NO: 862794 - DNA, 15 bp, Homo sapiens
gttagagctcatggg

SEQ ID NO: 862795 - DNA, 15 bp, Homo sapiens
ttagagctcatggga

SEQ ID NO: 862796 - DNA, 15 bp, Homo sapiens
tagagctcatgggaa

SEQ ID NO: 862797 - DNA, 15 bp, Homo sapiens
agagctcatgggaat

SEQ ID NO: 862798 - DNA, 15 bp, Homo sapiens
gagctcatgggaatt

SEQ ID NO: 862799 - DNA, 15 bp, Homo sapiens
agctcatgggaatta

SEQ ID NO: 862800 - DNA, 15 bp, Homo sapiens
gctcatgggaattat

SEQ ID NO: 862801 - DNA, 15 bp, Homo sapiens
ctcatgggaattatt

SEQ ID NO: 862802 - DNA, 15 bp, Homo sapiens
tcatgggaattattc

SEQ ID NO: 862803 - DNA, 15 bp, Homo sapiens
catgggaattattct

SEQ ID NO: 862804 - DNA, 15 bp, Homo sapiens
atgggaattattctt

SEQ ID NO: 862805 - DNA, 15 bp, Homo sapiens
tgggaattattcttt

SEQ ID NO: 862806 - DNA, 15 bp, Homo sapiens
gggaattattcttta

SEQ ID NO: 862807 - DNA, 15 bp, Homo sapiens
ggaattattctttaa

SEQ ID NO: 862808 - DNA, 15 bp, Homo sapiens
gaattattctttaaa

SEQ ID NO: 862809 - DNA, 15 bp, Homo sapiens
aattattctttaaat

SEQ ID NO: 862810 - DNA, 15 bp, Homo sapiens
attattctttaaatc

SEQ ID NO: 862811 - DNA, 15 bp, Homo sapiens
ttattctttaaatcc

SEQ ID NO: 862812 - DNA, 15 bp, Homo sapiens
tattctttaaatccc

SEQ ID NO: 862813 - DNA, 15 bp, Homo sapiens
attctttaaatccct

SEQ ID NO: 862814 - DNA, 15 bp, Homo sapiens
ttctttaaatccctg

SEQ ID NO: 862815 - DNA, 15 bp, Homo sapiens
tctttaaatccctgt

SEQ ID NO: 862816 - DNA, 15 bp, Homo sapiens
ctttaaatccctgta

SEQ ID NO: 862817 - DNA, 15 bp, Homo sapiens
tttaaatccctgtat

SEQ ID NO: 862818 - DNA, 15 bp, Homo sapiens
ttaaatccctgtata

SEQ ID NO: 862819 - DNA, 15 bp, Homo sapiens
taaatccctgtatat

SEQ ID NO: 862820 - DNA, 15 bp, Homo sapiens
aaatccctgtatatg

SEQ ID NO: 862821 - DNA, 15 bp, Homo sapiens
aatccctgtatatgg

SEQ ID NO: 862822 - DNA, 15 bp, Homo sapiens
atccctgtatatggc

SEQ ID NO: 862823 - DNA, 15 bp, Homo sapiens
tccctgtatatggca

SEQ ID NO: 862824 - DNA, 15 bp, Homo sapiens
ccctgtatatggcaa

SEQ ID NO: 862825 - DNA, 15 bp, Homo sapiens
cctgtatatggcaag

SEQ ID NO: 862826 - DNA, 15 bp, Homo sapiens
ctgtatatggcaagg

SEQ ID NO: 862827 - DNA, 15 bp, Homo sapiens
tgtatatggcaagga

SEQ ID NO: 862828 - DNA, 15 bp, Homo sapiens
gtatatggcaaggag

SEQ ID NO: 862829 - DNA, 15 bp, Homo sapiens
tatatggcaaggaga

SEQ ID NO: 862830 - DNA, 15 bp, Homo sapiens
atatggcaaggagac

SEQ ID NO: 862831 - DNA, 15 bp, Homo sapiens
tatggcaaggagact

SEQ ID NO: 862832 - DNA, 15 bp, Homo sapiens
atggcaaggagactt

SEQ ID NO: 862833 - DNA, 15 bp, Homo sapiens
tggcaaggagacttt

SEQ ID NO: 862834 - DNA, 15 bp, Homo sapiens
ggcaaggagactttt

SEQ ID NO: 862835 - DNA, 15 bp, Homo sapiens
gcaaggagacttttc

SEQ ID NO: 862836 - DNA, 15 bp, Homo sapiens
caaggagacttttct

SEQ ID NO: 862837 - DNA, 15 bp, Homo sapiens
aaggagacttttctc

SEQ ID NO: 862838 - DNA, 15 bp, Homo sapiens
aggagacttttctcc

SEQ ID NO: 862839 - DNA, 15 bp, Homo sapiens
ggagacttttctcct

SEQ ID NO: 862840 - DNA, 15 bp, Homo sapiens
gagacttttctcctc

SEQ ID NO: 862841 - DNA, 15 bp, Homo sapiens
agacttttctcctcc

SEQ ID NO: 862842 - DNA, 15 bp, Homo sapiens
gacttttctcctcct

SEQ ID NO: 862843 - DNA, 15 bp, Homo sapiens
acttttctcctcctt

SEQ ID NO: 862844 - DNA, 15 bp, Homo sapiens
cttttctcctccttt

SEQ ID NO: 862845 - DNA, 15 bp, Homo sapiens
ttttctcctcctttc

SEQ ID NO: 862846 - DNA, 15 bp, Homo sapiens
tttctcctcctttct

SEQ ID NO: 862847 - DNA, 15 bp, Homo sapiens
ttctcctcctttctc

SEQ ID NO: 862848 - DNA, 15 bp, Homo sapiens
tctcctcctttctca

SEQ ID NO: 862849 - DNA, 15 bp, Homo sapiens
ctcctcctttctcag

SEQ ID NO: 862850 - DNA, 15 bp, Homo sapiens
tcctcctttctcagg

SEQ ID NO: 862851 - DNA, 15 bp, Homo sapiens
cctcctttctcagga

SEQ ID NO: 862852 - DNA, 15 bp, Homo sapiens
ctcctttctcaggaa

SEQ ID NO: 862853 - DNA, 15 bp, Homo sapiens
tcctttctcaggaag

SEQ ID NO: 862854 - DNA, 15 bp, Homo sapiens
cctttctcaggaagt

SEQ ID NO: 862855 - DNA, 15 bp, Homo sapiens
ctttctcaggaagtc

SEQ ID NO: 862856 - DNA, 15 bp, Homo sapiens
tttctcaggaagtca

SEQ ID NO: 862857 - DNA, 15 bp, Homo sapiens
ttctcaggaagtcag

SEQ ID NO: 862858 - DNA, 15 bp, Homo sapiens
tctcaggaagtcagc

SEQ ID NO: 862859 - DNA, 15 bp, Homo sapiens
ctcaggaagtcagca

SEQ ID NO: 862860 - DNA, 15 bp, Homo sapiens
tcaggaagtcagcat

SEQ ID NO: 862861 - DNA, 15 bp, Homo sapiens
caggaagtcagcatg

SEQ ID NO: 862862 - DNA, 15 bp, Homo sapiens
aggaagtcagcatgt

SEQ ID NO: 862863 - DNA, 15 bp, Homo sapiens
ggaagtcagcatgtc

SEQ ID NO: 862864 - DNA, 15 bp, Homo sapiens
gaagtcagcatgtct

SEQ ID NO: 862865 - DNA, 15 bp, Homo sapiens
aagtcagcatgtctc

SEQ ID NO: 862866 - DNA, 15 bp, Homo sapiens
agtcagcatgtctcc

SEQ ID NO: 862867 - DNA, 15 bp, Homo sapiens
gtcagcatgtctcct

SEQ ID NO: 862868 - DNA, 15 bp, Homo sapiens
tcagcatgtctcctt

SEQ ID NO: 862869 - DNA, 15 bp, Homo sapiens
cagcatgtctcctta

SEQ ID NO: 862870 - DNA, 15 bp, Homo sapiens
agcatgtctccttac

SEQ ID NO: 862871 - DNA, 15 bp, Homo sapiens
gcatgtctccttaca

SEQ ID NO: 862872 - DNA, 15 bp, Homo sapiens
catgtctccttacat

SEQ ID NO: 862873 - DNA, 15 bp, Homo sapiens
atgtctccttacatc

SEQ ID NO: 862874 - DNA, 15 bp, Homo sapiens
tgtctccttacatcg

SEQ ID NO: 862875 - DNA, 15 bp, Homo sapiens
gtctccttacatcga

SEQ ID NO: 862876 - DNA, 15 bp, Homo sapiens
tctccttacatcgat

SEQ ID NO: 862877 - DNA, 15 bp, Homo sapiens
ctccttacatcgatg

SEQ ID NO: 862878 - DNA, 15 bp, Homo sapiens
tccttacatcgatgg

SEQ ID NO: 862879 - DNA, 15 bp, Homo sapiens
ccttacatcgatggg

SEQ ID NO: 862880 - DNA, 15 bp, Homo sapiens
cttacatcgatgggg

SEQ ID NO: 862881 - DNA, 15 bp, Homo sapiens
ttacatcgatggggg

SEQ ID NO: 862882 - DNA, 15 bp, Homo sapiens
tacatcgatgggggg

SEQ ID NO: 862883 - DNA, 15 bp, Homo sapiens
acatcgatgggggga

SEQ ID NO: 862884 - DNA, 15 bp, Homo sapiens
catcgatggggggaa

SEQ ID NO: 862885 - DNA, 15 bp, Homo sapiens
atcgatggggggaaa

SEQ ID NO: 862886 - DNA, 15 bp, Homo sapiens
tcgatggggggaaaa

SEQ ID NO: 862887 - DNA, 15 bp, Homo sapiens
cgatggggggaaaat

SEQ ID NO: 862888 - DNA, 15 bp, Homo sapiens
gatggggggaaaata

SEQ ID NO: 862889 - DNA, 15 bp, Homo sapiens
atggggggaaaataa

SEQ ID NO: 862890 - DNA, 15 bp, Homo sapiens
tggggggaaaataat

SEQ ID NO: 862891 - DNA, 15 bp, Homo sapiens
ggggggaaaataata

SEQ ID NO: 862892 - DNA, 15 bp, Homo sapiens
gggggaaaataataa

SEQ ID NO: 862893 - DNA, 15 bp, Homo sapiens
ggggaaaataataaa

SEQ ID NO: 862894 - DNA, 15 bp, Homo sapiens
gggaaaataataaag

SEQ ID NO: 862895 - DNA, 15 bp, Homo sapiens
ggaaaataataaagt

SEQ ID NO: 862896 - DNA, 15 bp, Homo sapiens
gaaaataataaagtg

SEQ ID NO: 862897 - DNA, 15 bp, Homo sapiens
aaaataataaagtgc

SEQ ID NO: 862898 - DNA, 15 bp, Homo sapiens
aaataataaagtgct

SEQ ID NO: 862899 - DNA, 15 bp, Homo sapiens
aataataaagtgctt

SEQ ID NO: 862900 - DNA, 15 bp, Homo sapiens
ataataaagtgcttc

SEQ ID NO: 862901 - DNA, 15 bp, Homo sapiens
taataaagtgcttca

SEQ ID NO: 862902 - DNA, 15 bp, Homo sapiens
aataaagtgcttcac

SEQ ID NO: 862903 - DNA, 15 bp, Homo sapiens
ataaagtgcttcaca

SEQ ID NO: 862904 - DNA, 15 bp, Homo sapiens
taaagtgcttcacat

SEQ ID NO: 862905 - DNA, 15 bp, Homo sapiens
aaagtgcttcacatc

SEQ ID NO: 862906 - DNA, 15 bp, Homo sapiens
aagtgcttcacatcc

SEQ ID NO: 862907 - DNA, 15 bp, Homo sapiens
agtgcttcacatccc

SEQ ID NO: 862908 - DNA, 15 bp, Homo sapiens
gtgcttcacatccca

SEQ ID NO: 862909 - DNA, 15 bp, Homo sapiens
tgcttcacatcccat

SEQ ID NO: 862910 - DNA, 15 bp, Homo sapiens
gcttcacatcccatt

SEQ ID NO: 862911 - DNA, 15 bp, Homo sapiens
cttcacatcccattc

SEQ ID NO: 862912 - DNA, 15 bp, Homo sapiens
ttcacatcccattca

SEQ ID NO: 862913 - DNA, 15 bp, Homo sapiens
tcacatcccattcac

SEQ ID NO: 862914 - DNA, 15 bp, Homo sapiens
cacatcccattcact

SEQ ID NO: 862915 - DNA, 15 bp, Homo sapiens
acatcccattcactg

SEQ ID NO: 862916 - DNA, 15 bp, Homo sapiens
catcccattcactga

SEQ ID NO: 862917 - DNA, 15 bp, Homo sapiens
atcccattcactgaa

SEQ ID NO: 862918 - DNA, 15 bp, Homo sapiens
tcccattcactgaaa

SEQ ID NO: 862919 - DNA, 15 bp, Homo sapiens
cccattcactgaaaa

SEQ ID NO: 862920 - DNA, 15 bp, Homo sapiens
ccattcactgaaaat

SEQ ID NO: 862921 - DNA, 15 bp, Homo sapiens
cattcactgaaaatc

SEQ ID NO: 862922 - DNA, 15 bp, Homo sapiens
attcactgaaaatcc

SEQ ID NO: 862923 - DNA, 15 bp, Homo sapiens
ttcactgaaaatcca

SEQ ID NO: 862924 - DNA, 15 bp, Homo sapiens
tcactgaaaatccac

SEQ ID NO: 862925 - DNA, 15 bp, Homo sapiens
cactgaaaatccact

SEQ ID NO: 862926 - DNA, 15 bp, Homo sapiens
actgaaaatccactg

SEQ ID NO: 862927 - DNA, 15 bp, Homo sapiens
ctgaaaatccactgt

SEQ ID NO: 862928 - DNA, 15 bp, Homo sapiens
tgaaaatccactgta

SEQ ID NO: 862929 - DNA, 15 bp, Homo sapiens
gaaaatccactgtag

SEQ ID NO: 862930 - DNA, 15 bp, Homo sapiens
aaaatccactgtagt

SEQ ID NO: 862931 - DNA, 15 bp, Homo sapiens
aaatccactgtagtt

SEQ ID NO: 862932 - DNA, 15 bp, Homo sapiens
aatccactgtagttt

SEQ ID NO: 862933 - DNA, 15 bp, Homo sapiens
atccactgtagtttt

SEQ ID NO: 862934 - DNA, 15 bp, Homo sapiens
tccactgtagttttc

SEQ ID NO: 862935 - DNA, 15 bp, Homo sapiens
ccactgtagttttca

SEQ ID NO: 862936 - DNA, 15 bp, Homo sapiens
cactgtagttttcaa

SEQ ID NO: 862937 - DNA, 15 bp, Homo sapiens
actgtagttttcaaa

SEQ ID NO: 862938 - DNA, 15 bp, Homo sapiens
ctgtagttttcaaac

SEQ ID NO: 862939 - DNA, 15 bp, Homo sapiens
tgtagttttcaaaca

SEQ ID NO: 862940 - DNA, 15 bp, Homo sapiens
gtagttttcaaacac

SEQ ID NO: 862941 - DNA, 15 bp, Homo sapiens
tagttttcaaacact

SEQ ID NO: 862942 - DNA, 15 bp, Homo sapiens
agttttcaaacactt

SEQ ID NO: 862943 - DNA, 15 bp, Homo sapiens
gttttcaaacactta

SEQ ID NO: 862944 - DNA, 15 bp, Homo sapiens
ttttcaaacacttaa

SEQ ID NO: 862945 - DNA, 15 bp, Homo sapiens
tttcaaacacttaac

SEQ ID NO: 862946 - DNA, 15 bp, Homo sapiens
ttcaaacacttaacc

SEQ ID NO: 862947 - DNA, 15 bp, Homo sapiens
tcaaacacttaacct

SEQ ID NO: 862948 - DNA, 15 bp, Homo sapiens
caaacacttaacctt

SEQ ID NO: 862949 - DNA, 15 bp, Homo sapiens
aaacacttaaccttc

SEQ ID NO: 862950 - DNA, 15 bp, Homo sapiens
aacacttaaccttct

SEQ ID NO: 862951 - DNA, 15 bp, Homo sapiens
acacttaaccttctc

SEQ ID NO: 862952 - DNA, 15 bp, Homo sapiens
cacttaaccttctcg

SEQ ID NO: 862953 - DNA, 15 bp, Homo sapiens
acttaaccttctcga

SEQ ID NO: 862954 - DNA, 15 bp, Homo sapiens
cttaaccttctcgag

SEQ ID NO: 862955 - DNA, 15 bp, Homo sapiens
ttaaccttctcgagt

SEQ ID NO: 862956 - DNA, 15 bp, Homo sapiens
taaccttctcgagtg

SEQ ID NO: 862957 - DNA, 15 bp, Homo sapiens
aaccttctcgagtgg

SEQ ID NO: 862958 - DNA, 15 bp, Homo sapiens
accttctcgagtgga

SEQ ID NO: 862959 - DNA, 15 bp, Homo sapiens
ccttctcgagtggaa

SEQ ID NO: 862960 - DNA, 15 bp, Homo sapiens
cttctcgagtggaaa

SEQ ID NO: 862961 - DNA, 15 bp, Homo sapiens
ttctcgagtggaaat

SEQ ID NO: 862962 - DNA, 15 bp, Homo sapiens
tctcgagtggaaata

SEQ ID NO: 862963 - DNA, 15 bp, Homo sapiens
ctcgagtggaaatac

SEQ ID NO: 862964 - DNA, 15 bp, Homo sapiens
tcgagtggaaataca

SEQ ID NO: 862965 - DNA, 15 bp, Homo sapiens
cgagtggaaatacaa

SEQ ID NO: 862966 - DNA, 15 bp, Homo sapiens
gagtggaaatacaaa

SEQ ID NO: 862967 - DNA, 15 bp, Homo sapiens
agtggaaatacaaaa

SEQ ID NO: 862968 - DNA, 15 bp, Homo sapiens
gtggaaatacaaaac

SEQ ID NO: 862969 - DNA, 15 bp, Homo sapiens
tggaaatacaaaaca

SEQ ID NO: 862970 - DNA, 15 bp, Homo sapiens
ggaaatacaaaacac

SEQ ID NO: 862971 - DNA, 15 bp, Homo sapiens
gaaatacaaaacaca

SEQ ID NO: 862972 - DNA, 15 bp, Homo sapiens
aaatacaaaacacat

SEQ ID NO: 862973 - DNA, 15 bp, Homo sapiens
aatacaaaacacatt

SEQ ID NO: 862974 - DNA, 15 bp, Homo sapiens
atacaaaacacattt

SEQ ID NO: 862975 - DNA, 15 bp, Homo sapiens
tacaaaacacatttc

SEQ ID NO: 862976 - DNA, 15 bp, Homo sapiens
acaaaacacatttcc

SEQ ID NO: 862977 - DNA, 15 bp, Homo sapiens
caaaacacatttcct

SEQ ID NO: 862978 - DNA, 15 bp, Homo sapiens
aaaacacatttcctg

SEQ ID NO: 862979 - DNA, 15 bp, Homo sapiens
aaacacatttcctgt

SEQ ID NO: 862980 - DNA, 15 bp, Homo sapiens
aacacatttcctgtg

SEQ ID NO: 862981 - DNA, 15 bp, Homo sapiens
acacatttcctgtga

SEQ ID NO: 862982 - DNA, 15 bp, Homo sapiens
cacatttcctgtgaa

SEQ ID NO: 862983 - DNA, 15 bp, Homo sapiens
acatttcctgtgaag

SEQ ID NO: 862984 - DNA, 15 bp, Homo sapiens
catttcctgtgaagt

SEQ ID NO: 862985 - DNA, 15 bp, Homo sapiens
atttcctgtgaagta

SEQ ID NO: 862986 - DNA, 15 bp, Homo sapiens
tttcctgtgaagtac

SEQ ID NO: 862987 - DNA, 15 bp, Homo sapiens
ttcctgtgaagtact

SEQ ID NO: 862988 - DNA, 15 bp, Homo sapiens
tcctgtgaagtactg

SEQ ID NO: 862989 - DNA, 15 bp, Homo sapiens
cctgtgaagtactgc

SEQ ID NO: 862990 - DNA, 15 bp, Homo sapiens
ctgtgaagtactgcc

SEQ ID NO: 862991 - DNA, 15 bp, Homo sapiens
tgtgaagtactgcca

SEQ ID NO: 862992 - DNA, 15 bp, Homo sapiens
gtgaagtactgccac

SEQ ID NO: 862993 - DNA, 15 bp, Homo sapiens
tgaagtactgccaca

SEQ ID NO: 862994 - DNA, 15 bp, Homo sapiens
gaagtactgccacac

SEQ ID NO: 862995 - DNA, 15 bp, Homo sapiens
aagtactgccacaca

SEQ ID NO: 862996 - DNA, 15 bp, Homo sapiens
agtactgccacacag

SEQ ID NO: 862997 - DNA, 15 bp, Homo sapiens
gtactgccacacaga

SEQ ID NO: 862998 - DNA, 15 bp, Homo sapiens
tactgccacacagag

SEQ ID NO: 862999 - DNA, 15 bp, Homo sapiens
actgccacacagagt

SEQ ID NO: 863000 - DNA, 15 bp, Homo sapiens
ctgccacacagagtc

SEQ ID NO: 863001 - DNA, 15 bp, Homo sapiens
tgccacacagagtcc

SEQ ID NO: 863002 - DNA, 15 bp, Homo sapiens
gccacacagagtcct

SEQ ID NO: 863003 - DNA, 15 bp, Homo sapiens
ccacacagagtccta

SEQ ID NO: 863004 - DNA, 15 bp, Homo sapiens
cacacagagtcctaa

SEQ ID NO: 863005 - DNA, 15 bp, Homo sapiens
acacagagtcctaaa

SEQ ID NO: 863006 - DNA, 15 bp, Homo sapiens
cacagagtcctaaag

SEQ ID NO: 863007 - DNA, 15 bp, Homo sapiens
acagagtcctaaaga

SEQ ID NO: 863008 - DNA, 15 bp, Homo sapiens
cagagtcctaaagaa

SEQ ID NO: 863009 - DNA, 15 bp, Homo sapiens
agagtcctaaagaag

SEQ ID NO: 863010 - DNA, 15 bp, Homo sapiens
gagtcctaaagaagt

SEQ ID NO: 863011 - DNA, 15 bp, Homo sapiens
agtcctaaagaagtc

SEQ ID NO: 863012 - DNA, 15 bp, Homo sapiens
gtcctaaagaagtca

SEQ ID NO: 863013 - DNA, 15 bp, Homo sapiens
tcctaaagaagtcat

SEQ ID NO: 863014 - DNA, 15 bp, Homo sapiens
cctaaagaagtcatg

SEQ ID NO: 863015 - DNA, 15 bp, Homo sapiens
ctaaagaagtcatgt

SEQ ID NO: 863016 - DNA, 15 bp, Homo sapiens
taaagaagtcatgtg

SEQ ID NO: 863017 - DNA, 15 bp, Homo sapiens
aaagaagtcatgtgg

SEQ ID NO: 863018 - DNA, 15 bp, Homo sapiens
aagaagtcatgtggc

SEQ ID NO: 863019 - DNA, 15 bp, Homo sapiens
agaagtcatgtggca

SEQ ID NO: 863020 - DNA, 15 bp, Homo sapiens
gaagtcatgtggcat

SEQ ID NO: 863021 - DNA, 15 bp, Homo sapiens
aagtcatgtggcatt

SEQ ID NO: 863022 - DNA, 15 bp, Homo sapiens
agtcatgtggcattt

SEQ ID NO: 863023 - DNA, 15 bp, Homo sapiens
gtcatgtggcatttc

SEQ ID NO: 863024 - DNA, 15 bp, Homo sapiens
tcatgtggcatttct

SEQ ID NO: 863025 - DNA, 15 bp, Homo sapiens
catgtggcatttcta

SEQ ID NO: 863026 - DNA, 15 bp, Homo sapiens
atgtggcatttctaa

SEQ ID NO: 863027 - DNA, 15 bp, Homo sapiens
tgtggcatttctaag

SEQ ID NO: 863028 - DNA, 15 bp, Homo sapiens
gtggcatttctaagt

SEQ ID NO: 863029 - DNA, 15 bp, Homo sapiens
tggcatttctaagta

SEQ ID NO: 863030 - DNA, 15 bp, Homo sapiens
ggcatttctaagtat

SEQ ID NO: 863031 - DNA, 15 bp, Homo sapiens
gcatttctaagtatc

SEQ ID NO: 863032 - DNA, 15 bp, Homo sapiens
catttctaagtatca

SEQ ID NO: 863033 - DNA, 15 bp, Homo sapiens
atttctaagtatcat

SEQ ID NO: 863034 - DNA, 15 bp, Homo sapiens
tttctaagtatcatg

SEQ ID NO: 863035 - DNA, 15 bp, Homo sapiens
ttctaagtatcatgc

SEQ ID NO: 863036 - DNA, 15 bp, Homo sapiens
tctaagtatcatgca

SEQ ID NO: 863037 - DNA, 15 bp, Homo sapiens
ctaagtatcatgcac

SEQ ID NO: 863038 - DNA, 15 bp, Homo sapiens
taagtatcatgcaca

SEQ ID NO: 863039 - DNA, 15 bp, Homo sapiens
aagtatcatgcacaa

SEQ ID NO: 863040 - DNA, 15 bp, Homo sapiens
agtatcatgcacaat

SEQ ID NO: 863041 - DNA, 15 bp, Homo sapiens
gtatcatgcacaatt

SEQ ID NO: 863042 - DNA, 15 bp, Homo sapiens
tatcatgcacaattt

SEQ ID NO: 863043 - DNA, 15 bp, Homo sapiens
atcatgcacaatttt

SEQ ID NO: 863044 - DNA, 15 bp, Homo sapiens
tcatgcacaattttc

SEQ ID NO: 863045 - DNA, 15 bp, Homo sapiens
catgcacaattttct

SEQ ID NO: 863046 - DNA, 15 bp, Homo sapiens
atgcacaattttctt

SEQ ID NO: 863047 - DNA, 15 bp, Homo sapiens
tgcacaattttcttt

SEQ ID NO: 863048 - DNA, 15 bp, Homo sapiens
gcacaattttctttt

SEQ ID NO: 863049 - DNA, 15 bp, Homo sapiens
cacaattttcttttc

SEQ ID NO: 863050 - DNA, 15 bp, Homo sapiens
acaattttcttttcg

SEQ ID NO: 863051 - DNA, 15 bp, Homo sapiens
caattttcttttcgg

SEQ ID NO: 863052 - DNA, 15 bp, Homo sapiens
aattttcttttcggt

SEQ ID NO: 863053 - DNA, 15 bp, Homo sapiens
attttcttttcggtt

SEQ ID NO: 863054 - DNA, 15 bp, Homo sapiens
ttttcttttcggttt

SEQ ID NO: 863055 - DNA, 15 bp, Homo sapiens
tttcttttcggtttt

SEQ ID NO: 863056 - DNA, 15 bp, Homo sapiens
ttcttttcggtttta

SEQ ID NO: 863057 - DNA, 15 bp, Homo sapiens
tcttttcggttttac

SEQ ID NO: 863058 - DNA, 15 bp, Homo sapiens
cttttcggttttact

SEQ ID NO: 863059 - DNA, 15 bp, Homo sapiens
ttttcggttttactg

SEQ ID NO: 863060 - DNA, 15 bp, Homo sapiens
tttcggttttactgc

SEQ ID NO: 863061 - DNA, 15 bp, Homo sapiens
ttcggttttactgct

SEQ ID NO: 863062 - DNA, 15 bp, Homo sapiens
tcggttttactgctt

SEQ ID NO: 863063 - DNA, 15 bp, Homo sapiens
cggttttactgcttt

SEQ ID NO: 863064 - DNA, 15 bp, Homo sapiens
ggttttactgctttg

SEQ ID NO: 863065 - DNA, 15 bp, Homo sapiens
gttttactgctttgt

SEQ ID NO: 863066 - DNA, 15 bp, Homo sapiens
ttttactgctttgtg

SEQ ID NO: 863067 - DNA, 15 bp, Homo sapiens
tttactgctttgtgc

SEQ ID NO: 863068 - DNA, 15 bp, Homo sapiens
ttactgctttgtgca

SEQ ID NO: 863069 - DNA, 15 bp, Homo sapiens
tactgctttgtgcat

SEQ ID NO: 863070 - DNA, 15 bp, Homo sapiens
actgctttgtgcata

SEQ ID NO: 863071 - DNA, 15 bp, Homo sapiens
ctgctttgtgcataa

SEQ ID NO: 863072 - DNA, 15 bp, Homo sapiens
tgctttgtgcataag

SEQ ID NO: 863073 - DNA, 15 bp, Homo sapiens
gctttgtgcataaga

SEQ ID NO: 863074 - DNA, 15 bp, Homo sapiens
ctttgtgcataagac

SEQ ID NO: 863075 - DNA, 15 bp, Homo sapiens
tttgtgcataagacc

SEQ ID NO: 863076 - DNA, 15 bp, Homo sapiens
ttgtgcataagacct

SEQ ID NO: 863077 - DNA, 15 bp, Homo sapiens
tgtgcataagacctt

SEQ ID NO: 863078 - DNA, 15 bp, Homo sapiens
gtgcataagaccttt

SEQ ID NO: 863079 - DNA, 15 bp, Homo sapiens
tgcataagacctttg

SEQ ID NO: 863080 - DNA, 15 bp, Homo sapiens
gcataagacctttgt

SEQ ID NO: 863081 - DNA, 15 bp, Homo sapiens
cataagacctttgtc

SEQ ID NO: 863082 - DNA, 15 bp, Homo sapiens
ataagacctttgtct

SEQ ID NO: 863083 - DNA, 15 bp, Homo sapiens
taagacctttgtctg

SEQ ID NO: 863084 - DNA, 15 bp, Homo sapiens
aagacctttgtctgt

SEQ ID NO: 863085 - DNA, 15 bp, Homo sapiens
agacctttgtctgtg

SEQ ID NO: 863086 - DNA, 15 bp, Homo sapiens
gacctttgtctgtgt

SEQ ID NO: 863087 - DNA, 15 bp, Homo sapiens
acctttgtctgtgtc

SEQ ID NO: 863088 - DNA, 15 bp, Homo sapiens
cctttgtctgtgtcc

SEQ ID NO: 863089 - DNA, 15 bp, Homo sapiens
ctttgtctgtgtcct

SEQ ID NO: 863090 - DNA, 15 bp, Homo sapiens
tttgtctgtgtcctt

SEQ ID NO: 863091 - DNA, 15 bp, Homo sapiens
ttgtctgtgtcctta

SEQ ID NO: 863092 - DNA, 15 bp, Homo sapiens
tgtctgtgtccttac

SEQ ID NO: 863093 - DNA, 15 bp, Homo sapiens
gtctgtgtccttact

SEQ ID NO: 863094 - DNA, 15 bp, Homo sapiens
tctgtgtccttactt

SEQ ID NO: 863095 - DNA, 15 bp, Homo sapiens
ctgtgtccttactta

SEQ ID NO: 863096 - DNA, 15 bp, Homo sapiens
tgtgtccttacttat

SEQ ID NO: 863097 - DNA, 15 bp, Homo sapiens
gtgtccttacttatg

SEQ ID NO: 863098 - DNA, 15 bp, Homo sapiens
tgtccttacttatgt

SEQ ID NO: 863099 - DNA, 15 bp, Homo sapiens
gtccttacttatgtc

SEQ ID NO: 863100 - DNA, 15 bp, Homo sapiens
tccttacttatgtca

SEQ ID NO: 863101 - DNA, 15 bp, Homo sapiens
ccttacttatgtcag

SEQ ID NO: 863102 - DNA, 15 bp, Homo sapiens
cttacttatgtcagc

SEQ ID NO: 863103 - DNA, 15 bp, Homo sapiens
ttacttatgtcagca

SEQ ID NO: 863104 - DNA, 15 bp, Homo sapiens
tacttatgtcagcat

SEQ ID NO: 863105 - DNA, 15 bp, Homo sapiens
acttatgtcagcatc

SEQ ID NO: 863106 - DNA, 15 bp, Homo sapiens
cttatgtcagcatcc

SEQ ID NO: 863107 - DNA, 15 bp, Homo sapiens
ttatgtcagcatccg

SEQ ID NO: 863108 - DNA, 15 bp, Homo sapiens
tatgtcagcatccgt

SEQ ID NO: 863109 - DNA, 15 bp, Homo sapiens
atgtcagcatccgtg

SEQ ID NO: 863110 - DNA, 15 bp, Homo sapiens
tgtcagcatccgtga

SEQ ID NO: 863111 - DNA, 15 bp, Homo sapiens
gtcagcatccgtgat

SEQ ID NO: 863112 - DNA, 15 bp, Homo sapiens
tcagcatccgtgatt

SEQ ID NO: 863113 - DNA, 15 bp, Homo sapiens
cagcatccgtgattg

SEQ ID NO: 863114 - DNA, 15 bp, Homo sapiens
agcatccgtgattgt

SEQ ID NO: 863115 - DNA, 15 bp, Homo sapiens
gcatccgtgattgtg

SEQ ID NO: 863116 - DNA, 15 bp, Homo sapiens
catccgtgattgtgg

SEQ ID NO: 863117 - DNA, 15 bp, Homo sapiens
atccgtgattgtggc

SEQ ID NO: 863118 - DNA, 15 bp, Homo sapiens
tccgtgattgtggca

SEQ ID NO: 863119 - DNA, 15 bp, Homo sapiens
ccgtgattgtggcat

SEQ ID NO: 863120 - DNA, 15 bp, Homo sapiens
cgtgattgtggcatt

SEQ ID NO: 863121 - DNA, 15 bp, Homo sapiens
gtgattgtggcattt

SEQ ID NO: 863122 - DNA, 15 bp, Homo sapiens
tgattgtggcatttg

SEQ ID NO: 863123 - DNA, 15 bp, Homo sapiens
gattgtggcatttgt

SEQ ID NO: 863124 - DNA, 15 bp, Homo sapiens
attgtggcatttgtg

SEQ ID NO: 863125 - DNA, 15 bp, Homo sapiens
ttgtggcatttgtgt

SEQ ID NO: 863126 - DNA, 15 bp, Homo sapiens
tgtggcatttgtgta

SEQ ID NO: 863127 - DNA, 15 bp, Homo sapiens
gtggcatttgtgtac

SEQ ID NO: 863128 - DNA, 15 bp, Homo sapiens
tggcatttgtgtaca

SEQ ID NO: 863129 - DNA, 15 bp, Homo sapiens
ggcatttgtgtacac

SEQ ID NO: 863130 - DNA, 15 bp, Homo sapiens
gcatttgtgtacacc

SEQ ID NO: 863131 - DNA, 15 bp, Homo sapiens
catttgtgtacacca

SEQ ID NO: 863132 - DNA, 15 bp, Homo sapiens
atttgtgtacaccat

SEQ ID NO: 863133 - DNA, 15 bp, Homo sapiens
tttgtgtacaccatt

SEQ ID NO: 863134 - DNA, 15 bp, Homo sapiens
ttgtgtacaccattg

SEQ ID NO: 863135 - DNA, 15 bp, Homo sapiens
tgtgtacaccattga

SEQ ID NO: 863136 - DNA, 15 bp, Homo sapiens
gtgtacaccattgac

SEQ ID NO: 863137 - DNA, 15 bp, Homo sapiens
tgtacaccattgacc

SEQ ID NO: 863138 - DNA, 15 bp, Homo sapiens
gtacaccattgacct

SEQ ID NO: 863139 - DNA, 15 bp, Homo sapiens
tacaccattgacctc

SEQ ID NO: 863140 - DNA, 15 bp, Homo sapiens
acaccattgacctca

SEQ ID NO: 863141 - DNA, 15 bp, Homo sapiens
caccattgacctcag

SEQ ID NO: 863142 - DNA, 15 bp, Homo sapiens
accattgacctcagg

SEQ ID NO: 863143 - DNA, 15 bp, Homo sapiens
ccattgacctcaggg

SEQ ID NO: 863144 - DNA, 15 bp, Homo sapiens
cattgacctcagggg

SEQ ID NO: 863145 - DNA, 15 bp, Homo sapiens
attgacctcaggggg

SEQ ID NO: 863146 - DNA, 15 bp, Homo sapiens
ttgacctcagggggt

SEQ ID NO: 863147 - DNA, 15 bp, Homo sapiens
tgacctcagggggtc

SEQ ID NO: 863148 - DNA, 15 bp, Homo sapiens
gacctcagggggtca

SEQ ID NO: 863149 - DNA, 15 bp, Homo sapiens
acctcagggggtcat

SEQ ID NO: 863150 - DNA, 15 bp, Homo sapiens
cctcagggggtcatt

SEQ ID NO: 863151 - DNA, 15 bp, Homo sapiens
ctcagggggtcatta

SEQ ID NO: 863152 - DNA, 15 bp, Homo sapiens
tcagggggtcattaa

SEQ ID NO: 863153 - DNA, 15 bp, Homo sapiens
cagggggtcattaaa

SEQ ID NO: 863154 - DNA, 15 bp, Homo sapiens
agggggtcattaaaa

SEQ ID NO: 863155 - DNA, 15 bp, Homo sapiens
gggggtcattaaaac

SEQ ID NO: 863156 - DNA, 15 bp, Homo sapiens
ggggtcattaaaact

SEQ ID NO: 863157 - DNA, 15 bp, Homo sapiens
gggtcattaaaactg

SEQ ID NO: 863158 - DNA, 15 bp, Homo sapiens
ggtcattaaaactgc

SEQ ID NO: 863159 - DNA, 15 bp, Homo sapiens
gtcattaaaactgca

SEQ ID NO: 863160 - DNA, 15 bp, Homo sapiens
tcattaaaactgcat

SEQ ID NO: 863161 - DNA, 15 bp, Homo sapiens
cattaaaactgcatg

SEQ ID NO: 863162 - DNA, 15 bp, Homo sapiens
attaaaactgcatgg

SEQ ID NO: 863163 - DNA, 15 bp, Homo sapiens
ttaaaactgcatgga

SEQ ID NO: 863164 - DNA, 15 bp, Homo sapiens
taaaactgcatggaa

SEQ ID NO: 863165 - DNA, 15 bp, Homo sapiens
aaaactgcatggaaa

SEQ ID NO: 863166 - DNA, 15 bp, Homo sapiens
aaactgcatggaaaa

SEQ ID NO: 863167 - DNA, 15 bp, Homo sapiens
aactgcatggaaaag

SEQ ID NO: 863168 - DNA, 15 bp, Homo sapiens
actgcatggaaaagc

SEQ ID NO: 863169 - DNA, 15 bp, Homo sapiens
ctgcatggaaaagca

SEQ ID NO: 863170 - DNA, 15 bp, Homo sapiens
tgcatggaaaagcac

SEQ ID NO: 863171 - DNA, 15 bp, Homo sapiens
gcatggaaaagcact

SEQ ID NO: 863172 - DNA, 15 bp, Homo sapiens
catggaaaagcactt

SEQ ID NO: 863173 - DNA, 15 bp, Homo sapiens
atggaaaagcacttg

SEQ ID NO: 863174 - DNA, 15 bp, Homo sapiens
tggaaaagcacttga

SEQ ID NO: 863175 - DNA, 15 bp, Homo sapiens
ggaaaagcacttgag

SEQ ID NO: 863176 - DNA, 15 bp, Homo sapiens
gaaaagcacttgagt

SEQ ID NO: 863177 - DNA, 15 bp, Homo sapiens
aaaagcacttgagtc

SEQ ID NO: 863178 - DNA, 15 bp, Homo sapiens
aaagcacttgagtcc

SEQ ID NO: 863179 - DNA, 15 bp, Homo sapiens
aagcacttgagtcct

SEQ ID NO: 863180 - DNA, 15 bp, Homo sapiens
agcacttgagtcctg

SEQ ID NO: 863181 - DNA, 15 bp, Homo sapiens
gcacttgagtcctgg

SEQ ID NO: 863182 - DNA, 15 bp, Homo sapiens
cacttgagtcctggg

SEQ ID NO: 863183 - DNA, 15 bp, Homo sapiens
acttgagtcctgggt

SEQ ID NO: 863184 - DNA, 15 bp, Homo sapiens
cttgagtcctgggtt

SEQ ID NO: 863185 - DNA, 15 bp, Homo sapiens
ttgagtcctgggttc

SEQ ID NO: 863186 - DNA, 15 bp, Homo sapiens
tgagtcctgggttcc

SEQ ID NO: 863187 - DNA, 15 bp, Homo sapiens
gagtcctgggttccc

SEQ ID NO: 863188 - DNA, 15 bp, Homo sapiens
agtcctgggttccct

SEQ ID NO: 863189 - DNA, 15 bp, Homo sapiens
gtcctgggttccctc

SEQ ID NO: 863190 - DNA, 15 bp, Homo sapiens
tcctgggttccctca

SEQ ID NO: 863191 - DNA, 15 bp, Homo sapiens
cctgggttccctcat

SEQ ID NO: 863192 - DNA, 15 bp, Homo sapiens
ctgggttccctcatg

SEQ ID NO: 863193 - DNA, 15 bp, Homo sapiens
tgggttccctcatgg

SEQ ID NO: 863194 - DNA, 15 bp, Homo sapiens
gggttccctcatggt

SEQ ID NO: 863195 - DNA, 15 bp, Homo sapiens
ggttccctcatggtg

SEQ ID NO: 863196 - DNA, 15 bp, Homo sapiens
gttccctcatggtgg

SEQ ID NO: 863197 - DNA, 15 bp, Homo sapiens
ttccctcatggtggt

SEQ ID NO: 863198 - DNA, 15 bp, Homo sapiens
tccctcatggtggta

SEQ ID NO: 863199 - DNA, 15 bp, Homo sapiens
ccctcatggtggtag

SEQ ID NO: 863200 - DNA, 15 bp, Homo sapiens
cctcatggtggtagg

SEQ ID NO: 863201 - DNA, 15 bp, Homo sapiens
ctcatggtggtaggc

SEQ ID NO: 863202 - DNA, 15 bp, Homo sapiens
tcatggtggtaggct

SEQ ID NO: 863203 - DNA, 15 bp, Homo sapiens
catggtggtaggctg

SEQ ID NO: 863204 - DNA, 15 bp, Homo sapiens
atggtggtaggctgt

SEQ ID NO: 863205 - DNA, 15 bp, Homo sapiens
tggtggtaggctgtg

SEQ ID NO: 863206 - DNA, 15 bp, Homo sapiens
ggtggtaggctgtgc

SEQ ID NO: 863207 - DNA, 15 bp, Homo sapiens
gtggtaggctgtgca

SEQ ID NO: 863208 - DNA, 15 bp, Homo sapiens
tggtaggctgtgcat

SEQ ID NO: 863209 - DNA, 15 bp, Homo sapiens
ggtaggctgtgcatg

SEQ ID NO: 863210 - DNA, 15 bp, Homo sapiens
gtaggctgtgcatgc

SEQ ID NO: 863211 - DNA, 15 bp, Homo sapiens
taggctgtgcatgct

SEQ ID NO: 863212 - DNA, 15 bp, Homo sapiens
aggctgtgcatgctg

SEQ ID NO: 863213 - DNA, 15 bp, Homo sapiens
ggctgtgcatgctga

SEQ ID NO: 863214 - DNA, 15 bp, Homo sapiens
gctgtgcatgctgag

SEQ ID NO: 863215 - DNA, 15 bp, Homo sapiens
ctgtgcatgctgaga

SEQ ID NO: 863216 - DNA, 15 bp, Homo sapiens
tgtgcatgctgagaa

SEQ ID NO: 863217 - DNA, 15 bp, Homo sapiens
gtgcatgctgagaat

SEQ ID NO: 863218 - DNA, 15 bp, Homo sapiens
tgcatgctgagaatg

SEQ ID NO: 863219 - DNA, 15 bp, Homo sapiens
gcatgctgagaatgc

SEQ ID NO: 863220 - DNA, 15 bp, Homo sapiens
catgctgagaatgcc

SEQ ID NO: 863221 - DNA, 15 bp, Homo sapiens
atgctgagaatgcca

SEQ ID NO: 863222 - DNA, 15 bp, Homo sapiens
tgctgagaatgccaa

SEQ ID NO: 863223 - DNA, 15 bp, Homo sapiens
gctgagaatgccaac

SEQ ID NO: 863224 - DNA, 15 bp, Homo sapiens
ctgagaatgccaact

SEQ ID NO: 863225 - DNA, 15 bp, Homo sapiens
tgagaatgccaactt

SEQ ID NO: 863226 - DNA, 15 bp, Homo sapiens
gagaatgccaacttc

SEQ ID NO: 863227 - DNA, 15 bp, Homo sapiens
agaatgccaacttct

SEQ ID NO: 863228 - DNA, 15 bp, Homo sapiens
gaatgccaacttctg

SEQ ID NO: 863229 - DNA, 15 bp, Homo sapiens
aatgccaacttctgg

SEQ ID NO: 863230 - DNA, 15 bp, Homo sapiens
atgccaacttctgga

SEQ ID NO: 863231 - DNA, 15 bp, Homo sapiens
tgccaacttctggaa

SEQ ID NO: 863232 - DNA, 15 bp, Homo sapiens
gccaacttctggaag

SEQ ID NO: 863233 - DNA, 15 bp, Homo sapiens
ccaacttctggaagt

SEQ ID NO: 863234 - DNA, 15 bp, Homo sapiens
caacttctggaagtg

SEQ ID NO: 863235 - DNA, 15 bp, Homo sapiens
aacttctggaagtgc

SEQ ID NO: 863236 - DNA, 15 bp, Homo sapiens
acttctggaagtgca

SEQ ID NO: 863237 - DNA, 15 bp, Homo sapiens
cttctggaagtgcaa

SEQ ID NO: 863238 - DNA, 15 bp, Homo sapiens
ttctggaagtgcaat

SEQ ID NO: 863239 - DNA, 15 bp, Homo sapiens
tctggaagtgcaatg

SEQ ID NO: 863240 - DNA, 15 bp, Homo sapiens
ctggaagtgcaatgt

SEQ ID NO: 863241 - DNA, 15 bp, Homo sapiens
tggaagtgcaatgtg

SEQ ID NO: 863242 - DNA, 15 bp, Homo sapiens
ggaagtgcaatgtgg

SEQ ID NO: 863243 - DNA, 15 bp, Homo sapiens
gaagtgcaatgtggc

SEQ ID NO: 863244 - DNA, 15 bp, Homo sapiens
aagtgcaatgtggca

SEQ ID NO: 863245 - DNA, 15 bp, Homo sapiens
agtgcaatgtggcaa

SEQ ID NO: 863246 - DNA, 15 bp, Homo sapiens
gtgcaatgtggcaaa

SEQ ID NO: 863247 - DNA, 15 bp, Homo sapiens
tgcaatgtggcaaaa

SEQ ID NO: 863248 - DNA, 15 bp, Homo sapiens
gcaatgtggcaaaat

SEQ ID NO: 863249 - DNA, 15 bp, Homo sapiens
caatgtggcaaaatg

SEQ ID NO: 863250 - DNA, 15 bp, Homo sapiens
aatgtggcaaaatgc

SEQ ID NO: 863251 - DNA, 15 bp, Homo sapiens
atgtggcaaaatgca

SEQ ID NO: 863252 - DNA, 15 bp, Homo sapiens
tgtggcaaaatgcac

SEQ ID NO: 863253 - DNA, 15 bp, Homo sapiens
gtggcaaaatgcacc

SEQ ID NO: 863254 - DNA, 15 bp, Homo sapiens
tggcaaaatgcacca

SEQ ID NO: 863255 - DNA, 15 bp, Homo sapiens
ggcaaaatgcaccaa

SEQ ID NO: 863256 - DNA, 15 bp, Homo sapiens
gcaaaatgcaccaag

SEQ ID NO: 863257 - DNA, 15 bp, Homo sapiens
caaaatgcaccaagc

SEQ ID NO: 863258 - DNA, 15 bp, Homo sapiens
aaaatgcaccaagcc

SEQ ID NO: 863259 - DNA, 15 bp, Homo sapiens
aaatgcaccaagcca

SEQ ID NO: 863260 - DNA, 15 bp, Homo sapiens
aatgcaccaagccaa

SEQ ID NO: 863261 - DNA, 15 bp, Homo sapiens
atgcaccaagccaac

SEQ ID NO: 863262 - DNA, 15 bp, Homo sapiens
tgcaccaagccaacc

SEQ ID NO: 863263 - DNA, 15 bp, Homo sapiens
gcaccaagccaacca

SEQ ID NO: 863264 - DNA, 15 bp, Homo sapiens
caccaagccaaccag

SEQ ID NO: 863265 - DNA, 15 bp, Homo sapiens
accaagccaaccagc

SEQ ID NO: 863266 - DNA, 15 bp, Homo sapiens
ccaagccaaccagct

SEQ ID NO: 863267 - DNA, 15 bp, Homo sapiens
caagccaaccagctg

SEQ ID NO: 863268 - DNA, 15 bp, Homo sapiens
aagccaaccagctgt

SEQ ID NO: 863269 - DNA, 15 bp, Homo sapiens
agccaaccagctgtg

SEQ ID NO: 863270 - DNA, 15 bp, Homo sapiens
gccaaccagctgtgt

SEQ ID NO: 863271 - DNA, 15 bp, Homo sapiens
ccaaccagctgtgtg

SEQ ID NO: 863272 - DNA, 15 bp, Homo sapiens
caaccagctgtgtgt

SEQ ID NO: 863273 - DNA, 15 bp, Homo sapiens
aaccagctgtgtgtt

SEQ ID NO: 863274 - DNA, 15 bp, Homo sapiens
accagctgtgtgttg

SEQ ID NO: 863275 - DNA, 15 bp, Homo sapiens
ccagctgtgtgttgt

SEQ ID NO: 863276 - DNA, 15 bp, Homo sapiens
cagctgtgtgttgtc

SEQ ID NO: 863277 - DNA, 15 bp, Homo sapiens
agctgtgtgttgtcc

SEQ ID NO: 863278 - DNA, 15 bp, Homo sapiens
gctgtgtgttgtcct

SEQ ID NO: 863279 - DNA, 15 bp, Homo sapiens
ctgtgtgttgtcctt

SEQ ID NO: 863280 - DNA, 15 bp, Homo sapiens
tgtgtgttgtccttc

SEQ ID NO: 863281 - DNA, 15 bp, Homo sapiens
gtgtgttgtccttct

SEQ ID NO: 863282 - DNA, 15 bp, Homo sapiens
tgtgttgtccttctc

SEQ ID NO: 863283 - DNA, 15 bp, Homo sapiens
gtgttgtccttctct

SEQ ID NO: 863284 - DNA, 15 bp, Homo sapiens
tgttgtccttctctc

SEQ ID NO: 863285 - DNA, 15 bp, Homo sapiens
gttgtccttctctct

SEQ ID NO: 863286 - DNA, 15 bp, Homo sapiens
ttgtccttctctctc

SEQ ID NO: 863287 - DNA, 15 bp, Homo sapiens
tgtccttctctctct

SEQ ID NO: 863288 - DNA, 15 bp, Homo sapiens
gtccttctctctctg

SEQ ID NO: 863289 - DNA, 15 bp, Homo sapiens
tccttctctctctgg

SEQ ID NO: 863290 - DNA, 15 bp, Homo sapiens
ccttctctctctggg

SEQ ID NO: 863291 - DNA, 15 bp, Homo sapiens
cttctctctctgggg

SEQ ID NO: 863292 - DNA, 15 bp, Homo sapiens
ttctctctctggggc

SEQ ID NO: 863293 - DNA, 15 bp, Homo sapiens
tctctctctggggct

SEQ ID NO: 863294 - DNA, 15 bp, Homo sapiens
ctctctctggggctt

SEQ ID NO: 863295 - DNA, 15 bp, Homo sapiens
tctctctggggcttt

SEQ ID NO: 863296 - DNA, 15 bp, Homo sapiens
ctctctggggctttc

SEQ ID NO: 863297 - DNA, 15 bp, Homo sapiens
tctctggggctttct

SEQ ID NO: 863298 - DNA, 15 bp, Homo sapiens
ctctggggctttctc

SEQ ID NO: 863299 - DNA, 15 bp, Homo sapiens
tctggggctttctcc

SEQ ID NO: 863300 - DNA, 15 bp, Homo sapiens
ctggggctttctccc

SEQ ID NO: 863301 - DNA, 15 bp, Homo sapiens
tggggctttctccca

SEQ ID NO: 863302 - DNA, 15 bp, Homo sapiens
ggggctttctcccaa

SEQ ID NO: 863303 - DNA, 15 bp, Homo sapiens
gggctttctcccaaa

SEQ ID NO: 863304 - DNA, 15 bp, Homo sapiens
ggctttctcccaaac

SEQ ID NO: 863305 - DNA, 15 bp, Homo sapiens
gctttctcccaaacc

SEQ ID NO: 863306 - DNA, 15 bp, Homo sapiens
ctttctcccaaacca

SEQ ID NO: 863307 - DNA, 15 bp, Homo sapiens
tttctcccaaaccag

SEQ ID NO: 863308 - DNA, 15 bp, Homo sapiens
ttctcccaaaccagc

SEQ ID NO: 863309 - DNA, 15 bp, Homo sapiens
tctcccaaaccagct

SEQ ID NO: 863310 - DNA, 15 bp, Homo sapiens
ctcccaaaccagctt

SEQ ID NO: 863311 - DNA, 15 bp, Homo sapiens
tcccaaaccagcttg

SEQ ID NO: 863312 - DNA, 15 bp, Homo sapiens
cccaaaccagcttgt

SEQ ID NO: 863313 - DNA, 15 bp, Homo sapiens
ccaaaccagcttgtt

SEQ ID NO: 863314 - DNA, 15 bp, Homo sapiens
caaaccagcttgttg

SEQ ID NO: 863315 - DNA, 15 bp, Homo sapiens
aaaccagcttgttga

SEQ ID NO: 863316 - DNA, 15 bp, Homo sapiens
aaccagcttgttgaa

SEQ ID NO: 863317 - DNA, 15 bp, Homo sapiens
accagcttgttgaat

SEQ ID NO: 863318 - DNA, 15 bp, Homo sapiens
ccagcttgttgaatt

SEQ ID NO: 863319 - DNA, 15 bp, Homo sapiens
cagcttgttgaatta

SEQ ID NO: 863320 - DNA, 15 bp, Homo sapiens
agcttgttgaattac

SEQ ID NO: 863321 - DNA, 15 bp, Homo sapiens
gcttgttgaattacc

SEQ ID NO: 863322 - DNA, 15 bp, Homo sapiens
cttgttgaattacct

SEQ ID NO: 863323 - DNA, 15 bp, Homo sapiens
ttgttgaattacctg

SEQ ID NO: 863324 - DNA, 15 bp, Homo sapiens
tgttgaattacctgg

SEQ ID NO: 863325 - DNA, 15 bp, Homo sapiens
gttgaattacctgga

SEQ ID NO: 863326 - DNA, 15 bp, Homo sapiens
ttgaattacctggat

SEQ ID NO: 863327 - DNA, 15 bp, Homo sapiens
tgaattacctggata

SEQ ID NO: 863328 - DNA, 15 bp, Homo sapiens
gaattacctggatag

SEQ ID NO: 863329 - DNA, 15 bp, Homo sapiens
aattacctggatagt

SEQ ID NO: 863330 - DNA, 15 bp, Homo sapiens
attacctggatagtc

SEQ ID NO: 863331 - DNA, 15 bp, Homo sapiens
ttacctggatagtca

SEQ ID NO: 863332 - DNA, 15 bp, Homo sapiens
tacctggatagtcag

SEQ ID NO: 863333 - DNA, 15 bp, Homo sapiens
acctggatagtcagg

SEQ ID NO: 863334 - DNA, 15 bp, Homo sapiens
cctggatagtcaggg

SEQ ID NO: 863335 - DNA, 15 bp, Homo sapiens
ctggatagtcagggg

SEQ ID NO: 863336 - DNA, 15 bp, Homo sapiens
tggatagtcagggga

SEQ ID NO: 863337 - DNA, 15 bp, Homo sapiens
ggatagtcaggggac

SEQ ID NO: 863338 - DNA, 15 bp, Homo sapiens
gatagtcaggggacc

SEQ ID NO: 863339 - DNA, 15 bp, Homo sapiens
atagtcaggggaccc

SEQ ID NO: 863340 - DNA, 15 bp, Homo sapiens
tagtcaggggaccct

SEQ ID NO: 863341 - DNA, 15 bp, Homo sapiens
agtcaggggaccctc

SEQ ID NO: 863342 - DNA, 15 bp, Homo sapiens
gtcaggggaccctcc

SEQ ID NO: 863343 - DNA, 15 bp, Homo sapiens
tcaggggaccctcca

SEQ ID NO: 863344 - DNA, 15 bp, Homo sapiens
caggggaccctccat

SEQ ID NO: 863345 - DNA, 15 bp, Homo sapiens
aggggaccctccatc

SEQ ID NO: 863346 - DNA, 15 bp, Homo sapiens
ggggaccctccatcg

SEQ ID NO: 863347 - DNA, 15 bp, Homo sapiens
gggaccctccatcgc

SEQ ID NO: 863348 - DNA, 15 bp, Homo sapiens
ggaccctccatcgcc

SEQ ID NO: 863349 - DNA, 15 bp, Homo sapiens
gaccctccatcgcca

SEQ ID NO: 863350 - DNA, 15 bp, Homo sapiens
accctccatcgccac

SEQ ID NO: 863351 - DNA, 15 bp, Homo sapiens
ccctccatcgccaca

SEQ ID NO: 863352 - DNA, 15 bp, Homo sapiens
cctccatcgccacat

SEQ ID NO: 863353 - DNA, 15 bp, Homo sapiens
ctccatcgccacatc

SEQ ID NO: 863354 - DNA, 15 bp, Homo sapiens
tccatcgccacatct

SEQ ID NO: 863355 - DNA, 15 bp, Homo sapiens
ccatcgccacatctg

SEQ ID NO: 863356 - DNA, 15 bp, Homo sapiens
catcgccacatctgc

SEQ ID NO: 863357 - DNA, 15 bp, Homo sapiens
atcgccacatctgct

SEQ ID NO: 863358 - DNA, 15 bp, Homo sapiens
tcgccacatctgctt

SEQ ID NO: 863359 - DNA, 15 bp, Homo sapiens
cgccacatctgctta

SEQ ID NO: 863360 - DNA, 15 bp, Homo sapiens
gccacatctgcttac

SEQ ID NO: 863361 - DNA, 15 bp, Homo sapiens
ccacatctgcttaca

SEQ ID NO: 863362 - DNA, 15 bp, Homo sapiens
cacatctgcttacag

SEQ ID NO: 863363 - DNA, 15 bp, Homo sapiens
acatctgcttacagg

SEQ ID NO: 863364 - DNA, 15 bp, Homo sapiens
catctgcttacaggg

SEQ ID NO: 863365 - DNA, 15 bp, Homo sapiens
atctgcttacagggg

SEQ ID NO: 863366 - DNA, 15 bp, Homo sapiens
tctgcttacaggggt

SEQ ID NO: 863367 - DNA, 15 bp, Homo sapiens
ctgcttacaggggtt

SEQ ID NO: 863368 - DNA, 15 bp, Homo sapiens
tgcttacaggggttc

SEQ ID NO: 863369 - DNA, 15 bp, Homo sapiens
gcttacaggggttct

SEQ ID NO: 863370 - DNA, 15 bp, Homo sapiens
cttacaggggttctg

SEQ ID NO: 863371 - DNA, 15 bp, Homo sapiens
ttacaggggttctgc

SEQ ID NO: 863372 - DNA, 15 bp, Homo sapiens
tacaggggttctgct

SEQ ID NO: 863373 - DNA, 15 bp, Homo sapiens
acaggggttctgctt

SEQ ID NO: 863374 - DNA, 15 bp, Homo sapiens
caggggttctgcttc

SEQ ID NO: 863375 - DNA, 15 bp, Homo sapiens
aggggttctgcttcc

SEQ ID NO: 863376 - DNA, 15 bp, Homo sapiens
ggggttctgcttccc

SEQ ID NO: 863377 - DNA, 15 bp, Homo sapiens
gggttctgcttcccc

SEQ ID NO: 863378 - DNA, 15 bp, Homo sapiens
ggttctgcttcccca

SEQ ID NO: 863379 - DNA, 15 bp, Homo sapiens
gttctgcttccccag

SEQ ID NO: 863380 - DNA, 15 bp, Homo sapiens
ttctgcttccccagc

SEQ ID NO: 863381 - DNA, 15 bp, Homo sapiens
tctgcttccccagct

SEQ ID NO: 863382 - DNA, 15 bp, Homo sapiens
ctgcttccccagctg

SEQ ID NO: 863383 - DNA, 15 bp, Homo sapiens
tgcttccccagctga

SEQ ID NO: 863384 - DNA, 15 bp, Homo sapiens
gcttccccagctgac

SEQ ID NO: 863385 - DNA, 15 bp, Homo sapiens
cttccccagctgacc

SEQ ID NO: 863386 - DNA, 15 bp, Homo sapiens
ttccccagctgacct

SEQ ID NO: 863387 - DNA, 15 bp, Homo sapiens
tccccagctgacctt

SEQ ID NO: 863388 - DNA, 15 bp, Homo sapiens
ccccagctgaccttt

SEQ ID NO: 863389 - DNA, 15 bp, Homo sapiens
cccagctgacctttt

SEQ ID NO: 863390 - DNA, 15 bp, Homo sapiens
ccagctgaccttttt

SEQ ID NO: 863391 - DNA, 15 bp, Homo sapiens
cagctgacctttttc

SEQ ID NO: 863392 - DNA, 15 bp, Homo sapiens
agctgacctttttcc

SEQ ID NO: 863393 - DNA, 15 bp, Homo sapiens
gctgacctttttccc

SEQ ID NO: 863394 - DNA, 15 bp, Homo sapiens
ctgacctttttccca

SEQ ID NO: 863395 - DNA, 15 bp, Homo sapiens
tgacctttttcccaa

SEQ ID NO: 863396 - DNA, 15 bp, Homo sapiens
gacctttttcccaaa

SEQ ID NO: 863397 - DNA, 15 bp, Homo sapiens
acctttttcccaaag

SEQ ID NO: 863398 - DNA, 15 bp, Homo sapiens
cctttttcccaaagg

SEQ ID NO: 863399 - DNA, 15 bp, Homo sapiens
ctttttcccaaaggg

SEQ ID NO: 863400 - DNA, 15 bp, Homo sapiens
tttttcccaaaggga

SEQ ID NO: 863401 - DNA, 15 bp, Homo sapiens
ttttcccaaagggaa

SEQ ID NO: 863402 - DNA, 15 bp, Homo sapiens
tttcccaaagggaat

SEQ ID NO: 863403 - DNA, 15 bp, Homo sapiens
ttcccaaagggaatc

SEQ ID NO: 863404 - DNA, 15 bp, Homo sapiens
tcccaaagggaatct

SEQ ID NO: 863405 - DNA, 15 bp, Homo sapiens
cccaaagggaatcta

SEQ ID NO: 863406 - DNA, 15 bp, Homo sapiens
ccaaagggaatctaa

SEQ ID NO: 863407 - DNA, 15 bp, Homo sapiens
caaagggaatctaaa

SEQ ID NO: 863408 - DNA, 15 bp, Homo sapiens
aaagggaatctaaat

SEQ ID NO: 863409 - DNA, 15 bp, Homo sapiens
aagggaatctaaatg

SEQ ID NO: 863410 - DNA, 15 bp, Homo sapiens
agggaatctaaatgg

SEQ ID NO: 863411 - DNA, 15 bp, Homo sapiens
gggaatctaaatgga

SEQ ID NO: 863412 - DNA, 15 bp, Homo sapiens
ggaatctaaatggac

SEQ ID NO: 863413 - DNA, 15 bp, Homo sapiens
gaatctaaatggaca

SEQ ID NO: 863414 - DNA, 15 bp, Homo sapiens
aatctaaatggacag

SEQ ID NO: 863415 - DNA, 15 bp, Homo sapiens
atctaaatggacaga

SEQ ID NO: 863416 - DNA, 15 bp, Homo sapiens
tctaaatggacagag

SEQ ID NO: 863417 - DNA, 15 bp, Homo sapiens
ctaaatggacagagc

SEQ ID NO: 863418 - DNA, 15 bp, Homo sapiens
taaatggacagagct

SEQ ID NO: 863419 - DNA, 15 bp, Homo sapiens
aaatggacagagcta

SEQ ID NO: 863420 - DNA, 15 bp, Homo sapiens
aatggacagagctaa

SEQ ID NO: 863421 - DNA, 15 bp, Homo sapiens
atggacagagctaaa

SEQ ID NO: 863422 - DNA, 15 bp, Homo sapiens
tggacagagctaaat

SEQ ID NO: 863423 - DNA, 15 bp, Homo sapiens
ggacagagctaaatc

SEQ ID NO: 863424 - DNA, 15 bp, Homo sapiens
gacagagctaaatcc

SEQ ID NO: 863425 - DNA, 15 bp, Homo sapiens
acagagctaaatcca

SEQ ID NO: 863426 - DNA, 15 bp, Homo sapiens
cagagctaaatccag

SEQ ID NO: 863427 - DNA, 15 bp, Homo sapiens
agagctaaatccagc

SEQ ID NO: 863428 - DNA, 15 bp, Homo sapiens
gagctaaatccagca

SEQ ID NO: 863429 - DNA, 15 bp, Homo sapiens
agctaaatccagcat

SEQ ID NO: 863430 - DNA, 15 bp, Homo sapiens
gctaaatccagcatt

SEQ ID NO: 863431 - DNA, 15 bp, Homo sapiens
ctaaatccagcattg

SEQ ID NO: 863432 - DNA, 15 bp, Homo sapiens
taaatccagcattgt

SEQ ID NO: 863433 - DNA, 15 bp, Homo sapiens
aaatccagcattgtc

SEQ ID NO: 863434 - DNA, 15 bp, Homo sapiens
aatccagcattgtca

SEQ ID NO: 863435 - DNA, 15 bp, Homo sapiens
atccagcattgtcag

SEQ ID NO: 863436 - DNA, 15 bp, Homo sapiens
tccagcattgtcaga

SEQ ID NO: 863437 - DNA, 15 bp, Homo sapiens
ccagcattgtcagac

SEQ ID NO: 863438 - DNA, 15 bp, Homo sapiens
cagcattgtcagacc

SEQ ID NO: 863439 - DNA, 15 bp, Homo sapiens
agcattgtcagaccc

SEQ ID NO: 863440 - DNA, 15 bp, Homo sapiens
gcattgtcagaccct

SEQ ID NO: 863441 - DNA, 15 bp, Homo sapiens
cattgtcagaccctt

SEQ ID NO: 863442 - DNA, 15 bp, Homo sapiens
attgtcagacccttg

SEQ ID NO: 863443 - DNA, 15 bp, Homo sapiens
ttgtcagacccttgc

SEQ ID NO: 863444 - DNA, 15 bp, Homo sapiens
tgtcagacccttgca

SEQ ID NO: 863445 - DNA, 15 bp, Homo sapiens
gtcagacccttgcat

SEQ ID NO: 863446 - DNA, 15 bp, Homo sapiens
tcagacccttgcatt

SEQ ID NO: 863447 - DNA, 15 bp, Homo sapiens
cagacccttgcattt

SEQ ID NO: 863448 - DNA, 15 bp, Homo sapiens
agacccttgcatttg

SEQ ID NO: 863449 - DNA, 15 bp, Homo sapiens
gacccttgcatttga

SEQ ID NO: 863450 - DNA, 15 bp, Homo sapiens
acccttgcatttgaa

SEQ ID NO: 863451 - DNA, 15 bp, Homo sapiens
cccttgcatttgaaa

SEQ ID NO: 863452 - DNA, 15 bp, Homo sapiens
ccttgcatttgaaat

SEQ ID NO: 863453 - DNA, 15 bp, Homo sapiens
cttgcatttgaaatc

SEQ ID NO: 863454 - DNA, 15 bp, Homo sapiens
ttgcatttgaaatct

SEQ ID NO: 863455 - DNA, 15 bp, Homo sapiens
tgcatttgaaatctc

SEQ ID NO: 863456 - DNA, 15 bp, Homo sapiens
gcatttgaaatctca

SEQ ID NO: 863457 - DNA, 15 bp, Homo sapiens
catttgaaatctcag

SEQ ID NO: 863458 - DNA, 15 bp, Homo sapiens
atttgaaatctcaga

SEQ ID NO: 863459 - DNA, 15 bp, Homo sapiens
tttgaaatctcagag

SEQ ID NO: 863460 - DNA, 15 bp, Homo sapiens
ttgaaatctcagagg

SEQ ID NO: 863461 - DNA, 15 bp, Homo sapiens
tgaaatctcagaggg

SEQ ID NO: 863462 - DNA, 15 bp, Homo sapiens
gaaatctcagaggga

SEQ ID NO: 863463 - DNA, 15 bp, Homo sapiens
aaatctcagagggaa

SEQ ID NO: 863464 - DNA, 15 bp, Homo sapiens
aatctcagagggaat

SEQ ID NO: 863465 - DNA, 15 bp, Homo sapiens
atctcagagggaatt

SEQ ID NO: 863466 - DNA, 15 bp, Homo sapiens
tctcagagggaattg

SEQ ID NO: 863467 - DNA, 15 bp, Homo sapiens
ctcagagggaattgc

SEQ ID NO: 863468 - DNA, 15 bp, Homo sapiens
tcagagggaattgca

SEQ ID NO: 863469 - DNA, 15 bp, Homo sapiens
cagagggaattgcaa

SEQ ID NO: 863470 - DNA, 15 bp, Homo sapiens
agagggaattgcaaa

SEQ ID NO: 863471 - DNA, 15 bp, Homo sapiens
gagggaattgcaaag

SEQ ID NO: 863472 - DNA, 15 bp, Homo sapiens
agggaattgcaaagg

SEQ ID NO: 863473 - DNA, 15 bp, Homo sapiens
gggaattgcaaaggc

SEQ ID NO: 863474 - DNA, 15 bp, Homo sapiens
ggaattgcaaaggcc

SEQ ID NO: 863475 - DNA, 15 bp, Homo sapiens
gaattgcaaaggcct

SEQ ID NO: 863476 - DNA, 15 bp, Homo sapiens
aattgcaaaggcctt

SEQ ID NO: 863477 - DNA, 15 bp, Homo sapiens
attgcaaaggccttt

SEQ ID NO: 863478 - DNA, 15 bp, Homo sapiens
ttgcaaaggcctttc

SEQ ID NO: 863479 - DNA, 15 bp, Homo sapiens
tgcaaaggcctttct

SEQ ID NO: 863480 - DNA, 15 bp, Homo sapiens
gcaaaggcctttctg

SEQ ID NO: 863481 - DNA, 15 bp, Homo sapiens
caaaggcctttctgt

SEQ ID NO: 863482 - DNA, 15 bp, Homo sapiens
aaaggcctttctgta

SEQ ID NO: 863483 - DNA, 15 bp, Homo sapiens
aaggcctttctgtaa

SEQ ID NO: 863484 - DNA, 15 bp, Homo sapiens
aggcctttctgtaaa

SEQ ID NO: 863485 - DNA, 15 bp, Homo sapiens
ggcctttctgtaaat

SEQ ID NO: 863486 - DNA, 15 bp, Homo sapiens
ctttctgtaaatagc

SEQ ID NO: 863487 - DNA, 15 bp, Homo sapiens
tttctgtaaatagct

SEQ ID NO: 863488 - DNA, 15 bp, Homo sapiens
ttctgtaaatagcta

SEQ ID NO: 863489 - DNA, 15 bp, Homo sapiens
tctgtaaatagctag

SEQ ID NO: 863490 - DNA, 15 bp, Homo sapiens
ctgtaaatagctaga

SEQ ID NO: 863491 - DNA, 15 bp, Homo sapiens
tgtaaatagctagat

SEQ ID NO: 863492 - DNA, 15 bp, Homo sapiens
gtaaatagctagata

SEQ ID NO: 863493 - DNA, 15 bp, Homo sapiens
taaatagctagatag

SEQ ID NO: 863494 - DNA, 15 bp, Homo sapiens
aaatagctagatagt

SEQ ID NO: 863495 - DNA, 15 bp, Homo sapiens
aatagctagatagtg

SEQ ID NO: 863496 - DNA, 15 bp, Homo sapiens
atagctagatagtgc

SEQ ID NO: 863497 - DNA, 15 bp, Homo sapiens
tagctagatagtgcc

SEQ ID NO: 863498 - DNA, 15 bp, Homo sapiens
agctagatagtgcct

SEQ ID NO: 863499 - DNA, 15 bp, Homo sapiens
gctagatagtgcctg

SEQ ID NO: 863500 - DNA, 15 bp, Homo sapiens
ctagatagtgcctgc

SEQ ID NO: 863501 - DNA, 15 bp, Homo sapiens
tagatagtgcctgct

SEQ ID NO: 863502 - DNA, 15 bp, Homo sapiens
agatagtgcctgctt

SEQ ID NO: 863503 - DNA, 15 bp, Homo sapiens
gatagtgcctgcttt

SEQ ID NO: 863504 - DNA, 15 bp, Homo sapiens
atagtgcctgctttg

SEQ ID NO: 863505 - DNA, 15 bp, Homo sapiens
tagtgcctgctttgg

SEQ ID NO: 863506 - DNA, 15 bp, Homo sapiens
agtgcctgctttgga

SEQ ID NO: 863507 - DNA, 15 bp, Homo sapiens
gtgcctgctttggag

SEQ ID NO: 863508 - DNA, 15 bp, Homo sapiens
tgcctgctttggagg

SEQ ID NO: 863509 - DNA, 15 bp, Homo sapiens
ctgctttggagggag

SEQ ID NO: 863510 - DNA, 15 bp, Homo sapiens
tgctttggagggaga

SEQ ID NO: 863511 - DNA, 15 bp, Homo sapiens
gctttggagggagat

SEQ ID NO: 863512 - DNA, 15 bp, Homo sapiens
ctttggagggagatt

SEQ ID NO: 863513 - DNA, 15 bp, Homo sapiens
tttggagggagattg

SEQ ID NO: 863514 - DNA, 15 bp, Homo sapiens
ttggagggagattgc

SEQ ID NO: 863515 - DNA, 15 bp, Homo sapiens
tggagggagattgct

SEQ ID NO: 863516 - DNA, 15 bp, Homo sapiens
ggagggagattgcta

SEQ ID NO: 863517 - DNA, 15 bp, Homo sapiens
gagggagattgctac

SEQ ID NO: 863518 - DNA, 15 bp, Homo sapiens
agggagattgctaca

SEQ ID NO: 863519 - DNA, 15 bp, Homo sapiens
gggagattgctacac

SEQ ID NO: 863520 - DNA, 15 bp, Homo sapiens
ggagattgctacaca

SEQ ID NO: 863521 - DNA, 15 bp, Homo sapiens
gagattgctacacat

SEQ ID NO: 863522 - DNA, 15 bp, Homo sapiens
agattgctacacatg

SEQ ID NO: 863523 - DNA, 15 bp, Homo sapiens
gattgctacacatgc

SEQ ID NO: 863524 - DNA, 15 bp, Homo sapiens
attgctacacatgcc

SEQ ID NO: 863525 - DNA, 15 bp, Homo sapiens
ttgctacacatgccc

SEQ ID NO: 863526 - DNA, 15 bp, Homo sapiens
tgctacacatgccca

SEQ ID NO: 863527 - DNA, 15 bp, Homo sapiens
gctacacatgcccac

SEQ ID NO: 863528 - DNA, 15 bp, Homo sapiens
ctacacatgcccaca

SEQ ID NO: 863529 - DNA, 15 bp, Homo sapiens
tacacatgcccacag

SEQ ID NO: 863530 - DNA, 15 bp, Homo sapiens
acacatgcccacaga

SEQ ID NO: 863531 - DNA, 15 bp, Homo sapiens
cacatgcccacagat

SEQ ID NO: 863532 - DNA, 15 bp, Homo sapiens
acatgcccacagatt

SEQ ID NO: 863533 - DNA, 15 bp, Homo sapiens
catgcccacagattt

SEQ ID NO: 863534 - DNA, 15 bp, Homo sapiens
atgcccacagatttt

SEQ ID NO: 863535 - DNA, 15 bp, Homo sapiens
tgcccacagattttt

SEQ ID NO: 863536 - DNA, 15 bp, Homo sapiens
gcccacagattttta

SEQ ID NO: 863537 - DNA, 15 bp, Homo sapiens
cccacagatttttat

SEQ ID NO: 863538 - DNA, 15 bp, Homo sapiens
ccacagatttttatt

SEQ ID NO: 863539 - DNA, 15 bp, Homo sapiens
cacagatttttattc

SEQ ID NO: 863540 - DNA, 15 bp, Homo sapiens
acagatttttattct

SEQ ID NO: 863541 - DNA, 15 bp, Homo sapiens
cagatttttattctg

SEQ ID NO: 863542 - DNA, 15 bp, Homo sapiens
agatttttattctga

SEQ ID NO: 863543 - DNA, 15 bp, Homo sapiens
gatttttattctgag

SEQ ID NO: 863544 - DNA, 15 bp, Homo sapiens
atttttattctgagg

SEQ ID NO: 863545 - DNA, 15 bp, Homo sapiens
tttttattctgagga

SEQ ID NO: 863546 - DNA, 15 bp, Homo sapiens
ttttattctgaggag

SEQ ID NO: 863547 - DNA, 15 bp, Homo sapiens
tttattctgaggaga

SEQ ID NO: 863548 - DNA, 15 bp, Homo sapiens
ttattctgaggagac

SEQ ID NO: 863549 - DNA, 15 bp, Homo sapiens
tattctgaggagaca

SEQ ID NO: 863550 - DNA, 15 bp, Homo sapiens
attctgaggagacat

SEQ ID NO: 863551 - DNA, 15 bp, Homo sapiens
ttctgaggagacatt

SEQ ID NO: 863552 - DNA, 15 bp, Homo sapiens
tctgaggagacattc

SEQ ID NO: 863553 - DNA, 15 bp, Homo sapiens
ctgaggagacattct

SEQ ID NO: 863554 - DNA, 15 bp, Homo sapiens
tgaggagacattctt

SEQ ID NO: 863555 - DNA, 15 bp, Homo sapiens
gaggagacattcttt

SEQ ID NO: 863556 - DNA, 15 bp, Homo sapiens
aggagacattctttt

SEQ ID NO: 863557 - DNA, 15 bp, Homo sapiens
ggagacattcttttg

SEQ ID NO: 863558 - DNA, 15 bp, Homo sapiens
gagacattcttttga

SEQ ID NO: 863559 - DNA, 15 bp, Homo sapiens
agacattcttttgat

SEQ ID NO: 863560 - DNA, 15 bp, Homo sapiens
gacattcttttgatg

SEQ ID NO: 863561 - DNA, 15 bp, Homo sapiens
acattcttttgatgt

SEQ ID NO: 863562 - DNA, 15 bp, Homo sapiens
cattcttttgatgtc

SEQ ID NO: 863563 - DNA, 15 bp, Homo sapiens
attcttttgatgtcc

SEQ ID NO: 863564 - DNA, 15 bp, Homo sapiens
ttcttttgatgtcca

SEQ ID NO: 863565 - DNA, 15 bp, Homo sapiens
tcttttgatgtccag

SEQ ID NO: 863566 - DNA, 15 bp, Homo sapiens
cttttgatgtccagc

SEQ ID NO: 863567 - DNA, 15 bp, Homo sapiens
ttttgatgtccagct

SEQ ID NO: 863568 - DNA, 15 bp, Homo sapiens
tttgatgtccagctc

SEQ ID NO: 863569 - DNA, 15 bp, Homo sapiens
ttgatgtccagctca

SEQ ID NO: 863570 - DNA, 15 bp, Homo sapiens
tgatgtccagctcag

SEQ ID NO: 863571 - DNA, 15 bp, Homo sapiens
gatgtccagctcaga

SEQ ID NO: 863572 - DNA, 15 bp, Homo sapiens
atgtccagctcagat

SEQ ID NO: 863573 - DNA, 15 bp, Homo sapiens
tgtccagctcagatg

SEQ ID NO: 863574 - DNA, 15 bp, Homo sapiens
gtccagctcagatga

SEQ ID NO: 863575 - DNA, 15 bp, Homo sapiens
tccagctcagatgag

SEQ ID NO: 863576 - DNA, 15 bp, Homo sapiens
ccagctcagatgagc

SEQ ID NO: 863577 - DNA, 15 bp, Homo sapiens
cagctcagatgagca

SEQ ID NO: 863578 - DNA, 15 bp, Homo sapiens
agctcagatgagcag

SEQ ID NO: 863579 - DNA, 15 bp, Homo sapiens
gctcagatgagcagg

SEQ ID NO: 863580 - DNA, 15 bp, Homo sapiens
ctcagatgagcagga

SEQ ID NO: 863581 - DNA, 15 bp, Homo sapiens
tcagatgagcaggac

SEQ ID NO: 863582 - DNA, 15 bp, Homo sapiens
cagatgagcaggact

SEQ ID NO: 863583 - DNA, 15 bp, Homo sapiens
agatgagcaggacta

SEQ ID NO: 863584 - DNA, 15 bp, Homo sapiens
gatgagcaggactaa

SEQ ID NO: 863585 - DNA, 15 bp, Homo sapiens
atgagcaggactaac

SEQ ID NO: 863586 - DNA, 15 bp, Homo sapiens
tgagcaggactaaca

SEQ ID NO: 863587 - DNA, 15 bp, Homo sapiens
gagcaggactaacaa

SEQ ID NO: 863588 - DNA, 15 bp, Homo sapiens
agcaggactaacaaa

SEQ ID NO: 863589 - DNA, 15 bp, Homo sapiens
gcaggactaacaaaa

SEQ ID NO: 863590 - DNA, 15 bp, Homo sapiens
caggactaacaaaag

SEQ ID NO: 863591 - DNA, 15 bp, Homo sapiens
aggactaacaaaagt

SEQ ID NO: 863592 - DNA, 15 bp, Homo sapiens
ggactaacaaaagtg

SEQ ID NO: 863593 - DNA, 15 bp, Homo sapiens
gactaacaaaagtgg

SEQ ID NO: 863594 - DNA, 15 bp, Homo sapiens
actaacaaaagtggc

SEQ ID NO: 863595 - DNA, 15 bp, Homo sapiens
ctaacaaaagtggcc

SEQ ID NO: 863596 - DNA, 15 bp, Homo sapiens
taacaaaagtggcct

SEQ ID NO: 863597 - DNA, 15 bp, Homo sapiens
aacaaaagtggcctt

SEQ ID NO: 863598 - DNA, 15 bp, Homo sapiens
acaaaagtggccttt

SEQ ID NO: 863599 - DNA, 15 bp, Homo sapiens
caaaagtggcctttc

SEQ ID NO: 863600 - DNA, 15 bp, Homo sapiens
aaaagtggcctttct

SEQ ID NO: 863601 - DNA, 15 bp, Homo sapiens
aaagtggcctttctt

SEQ ID NO: 863602 - DNA, 15 bp, Homo sapiens
aagtggcctttcttc

SEQ ID NO: 863603 - DNA, 15 bp, Homo sapiens
agtggcctttcttct

SEQ ID NO: 863604 - DNA, 15 bp, Homo sapiens
gtggcctttcttctc

SEQ ID NO: 863605 - DNA, 15 bp, Homo sapiens
tggcctttcttctca

SEQ ID NO: 863606 - DNA, 15 bp, Homo sapiens
ggcctttcttctcag

SEQ ID NO: 863607 - DNA, 15 bp, Homo sapiens
gcctttcttctcaga

SEQ ID NO: 863608 - DNA, 15 bp, Homo sapiens
cctttcttctcagac

SEQ ID NO: 863609 - DNA, 15 bp, Homo sapiens
ctttcttctcagacc

SEQ ID NO: 863610 - DNA, 15 bp, Homo sapiens
tttcttctcagacca

SEQ ID NO: 863611 - DNA, 15 bp, Homo sapiens
ttcttctcagaccat

SEQ ID NO: 863612 - DNA, 15 bp, Homo sapiens
tcttctcagaccatc

SEQ ID NO: 863613 - DNA, 15 bp, Homo sapiens
cttctcagaccatct

SEQ ID NO: 863614 - DNA, 15 bp, Homo sapiens
ttctcagaccatctc

SEQ ID NO: 863615 - DNA, 15 bp, Homo sapiens
tctcagaccatctca

SEQ ID NO: 863616 - DNA, 15 bp, Homo sapiens
ctcagaccatctcat

SEQ ID NO: 863617 - DNA, 15 bp, Homo sapiens
tcagaccatctcatt

SEQ ID NO: 863618 - DNA, 15 bp, Homo sapiens
cagaccatctcattt

SEQ ID NO: 863619 - DNA, 15 bp, Homo sapiens
agaccatctcatttg

SEQ ID NO: 863620 - DNA, 15 bp, Homo sapiens
gaccatctcatttgg

SEQ ID NO: 863621 - DNA, 15 bp, Homo sapiens
accatctcatttggt

SEQ ID NO: 863622 - DNA, 15 bp, Homo sapiens
ccatctcatttggtc

SEQ ID NO: 863623 - DNA, 15 bp, Homo sapiens
catctcatttggtca

SEQ ID NO: 863624 - DNA, 15 bp, Homo sapiens
atctcatttggtcat

SEQ ID NO: 863625 - DNA, 15 bp, Homo sapiens
tctcatttggtcatc

SEQ ID NO: 863626 - DNA, 15 bp, Homo sapiens
ctcatttggtcatcc

SEQ ID NO: 863627 - DNA, 15 bp, Homo sapiens
tcatttggtcatcct

SEQ ID NO: 863628 - DNA, 15 bp, Homo sapiens
catttggtcatcctc

SEQ ID NO: 863629 - DNA, 15 bp, Homo sapiens
atttggtcatcctca

SEQ ID NO: 863630 - DNA, 15 bp, Homo sapiens
tttggtcatcctcag

SEQ ID NO: 863631 - DNA, 15 bp, Homo sapiens
ttggtcatcctcagg

SEQ ID NO: 863632 - DNA, 15 bp, Homo sapiens
tggtcatcctcaggg

SEQ ID NO: 863633 - DNA, 15 bp, Homo sapiens
ggtcatcctcagggg

SEQ ID NO: 863634 - DNA, 15 bp, Homo sapiens
gtcatcctcaggggg

SEQ ID NO: 863635 - DNA, 15 bp, Homo sapiens
tcatcctcaggggga

SEQ ID NO: 863636 - DNA, 15 bp, Homo sapiens
catcctcagggggag

SEQ ID NO: 863637 - DNA, 15 bp, Homo sapiens
atcctcagggggagc

SEQ ID NO: 863638 - DNA, 15 bp, Homo sapiens
tcctcagggggagct

SEQ ID NO: 863639 - DNA, 15 bp, Homo sapiens
cctcagggggagcta

SEQ ID NO: 863640 - DNA, 15 bp, Homo sapiens
ctcagggggagctaa

SEQ ID NO: 863641 - DNA, 15 bp, Homo sapiens
tcagggggagctaat

SEQ ID NO: 863642 - DNA, 15 bp, Homo sapiens
cagggggagctaatc

SEQ ID NO: 863643 - DNA, 15 bp, Homo sapiens
agggggagctaatct

SEQ ID NO: 863644 - DNA, 15 bp, Homo sapiens
gggggagctaatctc

SEQ ID NO: 863645 - DNA, 15 bp, Homo sapiens
ggggagctaatctct

SEQ ID NO: 863646 - DNA, 15 bp, Homo sapiens
gggagctaatctctc

SEQ ID NO: 863647 - DNA, 15 bp, Homo sapiens
ggagctaatctctca

SEQ ID NO: 863648 - DNA, 15 bp, Homo sapiens
gagctaatctctcat

SEQ ID NO: 863649 - DNA, 15 bp, Homo sapiens
agctaatctctcata

SEQ ID NO: 863650 - DNA, 15 bp, Homo sapiens
gctaatctctcatat

SEQ ID NO: 863651 - DNA, 15 bp, Homo sapiens
ctaatctctcatatt

SEQ ID NO: 863652 - DNA, 15 bp, Homo sapiens
taatctctcatattc

SEQ ID NO: 863653 - DNA, 15 bp, Homo sapiens
aatctctcatattca

SEQ ID NO: 863654 - DNA, 15 bp, Homo sapiens
atctctcatattcaa

SEQ ID NO: 863655 - DNA, 15 bp, Homo sapiens
tctctcatattcaag

SEQ ID NO: 863656 - DNA, 15 bp, Homo sapiens
ctctcatattcaagg

SEQ ID NO: 863657 - DNA, 15 bp, Homo sapiens
tctcatattcaaggg

SEQ ID NO: 863658 - DNA, 15 bp, Homo sapiens
ctcatattcaaggga

SEQ ID NO: 863659 - DNA, 15 bp, Homo sapiens
tcatattcaagggaa

SEQ ID NO: 863660 - DNA, 15 bp, Homo sapiens
catattcaagggaaa

SEQ ID NO: 863661 - DNA, 15 bp, Homo sapiens
atattcaagggaaac

SEQ ID NO: 863662 - DNA, 15 bp, Homo sapiens
tattcaagggaaaca

SEQ ID NO: 863663 - DNA, 15 bp, Homo sapiens
attcaagggaaacag

SEQ ID NO: 863664 - DNA, 15 bp, Homo sapiens
ttcaagggaaacagc

SEQ ID NO: 863665 - DNA, 15 bp, Homo sapiens
tcaagggaaacagca

SEQ ID NO: 863666 - DNA, 15 bp, Homo sapiens
caagggaaacagcaa

SEQ ID NO: 863667 - DNA, 15 bp, Homo sapiens
aagggaaacagcaag

SEQ ID NO: 863668 - DNA, 15 bp, Homo sapiens
agggaaacagcaaga

SEQ ID NO: 863669 - DNA, 15 bp, Homo sapiens
gggaaacagcaagaa

SEQ ID NO: 863670 - DNA, 15 bp, Homo sapiens
ggaaacagcaagaaa

SEQ ID NO: 863671 - DNA, 15 bp, Homo sapiens
gaaacagcaagaaaa

SEQ ID NO: 863672 - DNA, 15 bp, Homo sapiens
aacagcaagaaaaaa

SEQ ID NO: 863673 - DNA, 15 bp, Homo sapiens
acagcaagaaaaaac

SEQ ID NO: 863674 - DNA, 15 bp, Homo sapiens
cagcaagaaaaaact

SEQ ID NO: 863675 - DNA, 15 bp, Homo sapiens
agcaagaaaaaactc

SEQ ID NO: 863676 - DNA, 15 bp, Homo sapiens
gcaagaaaaaactcc

SEQ ID NO: 863677 - DNA, 15 bp, Homo sapiens
caagaaaaaactccc

SEQ ID NO: 863678 - DNA, 15 bp, Homo sapiens
aagaaaaaactcccc

SEQ ID NO: 863679 - DNA, 15 bp, Homo sapiens
agaaaaaactccccc

SEQ ID NO: 863680 - DNA, 15 bp, Homo sapiens
gaaaaaactccccca

SEQ ID NO: 863681 - DNA, 15 bp, Homo sapiens
aaaaaactcccccag

SEQ ID NO: 863682 - DNA, 15 bp, Homo sapiens
aaaaactcccccagc

SEQ ID NO: 863683 - DNA, 15 bp, Homo sapiens
aaaactcccccagcc

SEQ ID NO: 863684 - DNA, 15 bp, Homo sapiens
aaactcccccagcct

SEQ ID NO: 863685 - DNA, 15 bp, Homo sapiens
aactcccccagcctt

SEQ ID NO: 863686 - DNA, 15 bp, Homo sapiens
actcccccagccttt

SEQ ID NO: 863687 - DNA, 15 bp, Homo sapiens
ctcccccagcctttt

SEQ ID NO: 863688 - DNA, 15 bp, Homo sapiens
tcccccagccttttc

SEQ ID NO: 863689 - DNA, 15 bp, Homo sapiens
cccccagccttttct

SEQ ID NO: 863690 - DNA, 15 bp, Homo sapiens
ccccagccttttcta

SEQ ID NO: 863691 - DNA, 15 bp, Homo sapiens
cccagccttttctag

SEQ ID NO: 863692 - DNA, 15 bp, Homo sapiens
ccagccttttctagt

SEQ ID NO: 863693 - DNA, 15 bp, Homo sapiens
cagccttttctagta

SEQ ID NO: 863694 - DNA, 15 bp, Homo sapiens
agccttttctagtaa

SEQ ID NO: 863695 - DNA, 15 bp, Homo sapiens
gccttttctagtaaa

SEQ ID NO: 863696 - DNA, 15 bp, Homo sapiens
ccttttctagtaaat

SEQ ID NO: 863697 - DNA, 15 bp, Homo sapiens
cttttctagtaaatc

SEQ ID NO: 863698 - DNA, 15 bp, Homo sapiens
ttttctagtaaatct

SEQ ID NO: 863699 - DNA, 15 bp, Homo sapiens
tttctagtaaatctg

SEQ ID NO: 863700 - DNA, 15 bp, Homo sapiens
ttctagtaaatctga

SEQ ID NO: 863701 - DNA, 15 bp, Homo sapiens
tctagtaaatctgaa

SEQ ID NO: 863702 - DNA, 15 bp, Homo sapiens
ctagtaaatctgaaa

SEQ ID NO: 863703 - DNA, 15 bp, Homo sapiens
tagtaaatctgaaag

SEQ ID NO: 863704 - DNA, 15 bp, Homo sapiens
agtaaatctgaaagt

SEQ ID NO: 863705 - DNA, 15 bp, Homo sapiens
gtaaatctgaaagtt

SEQ ID NO: 863706 - DNA, 15 bp, Homo sapiens
taaatctgaaagttt

SEQ ID NO: 863707 - DNA, 15 bp, Homo sapiens
aaatctgaaagtttt

SEQ ID NO: 863708 - DNA, 15 bp, Homo sapiens
aatctgaaagttttc

SEQ ID NO: 863709 - DNA, 15 bp, Homo sapiens
atctgaaagttttca

SEQ ID NO: 863710 - DNA, 15 bp, Homo sapiens
tctgaaagttttcat

SEQ ID NO: 863711 - DNA, 15 bp, Homo sapiens
ctgaaagttttcatt

SEQ ID NO: 863712 - DNA, 15 bp, Homo sapiens
tgaaagttttcattc

SEQ ID NO: 863713 - DNA, 15 bp, Homo sapiens
gaaagttttcattct

SEQ ID NO: 863714 - DNA, 15 bp, Homo sapiens
aaagttttcattcta

SEQ ID NO: 863715 - DNA, 15 bp, Homo sapiens
aagttttcattctag

SEQ ID NO: 863716 - DNA, 15 bp, Homo sapiens
agttttcattctagc

SEQ ID NO: 863717 - DNA, 15 bp, Homo sapiens
gttttcattctagcc

SEQ ID NO: 863718 - DNA, 15 bp, Homo sapiens
ttttcattctagccc

SEQ ID NO: 863719 - DNA, 15 bp, Homo sapiens
tttcattctagcccc

SEQ ID NO: 863720 - DNA, 15 bp, Homo sapiens
ttcattctagcccct

SEQ ID NO: 863721 - DNA, 15 bp, Homo sapiens
tcattctagcccctt

SEQ ID NO: 863722 - DNA, 15 bp, Homo sapiens
cattctagccccttc

SEQ ID NO: 863723 - DNA, 15 bp, Homo sapiens
attctagccccttca

SEQ ID NO: 863724 - DNA, 15 bp, Homo sapiens
ttctagccccttcaa

SEQ ID NO: 863725 - DNA, 15 bp, Homo sapiens
tctagccccttcaat

SEQ ID NO: 863726 - DNA, 15 bp, Homo sapiens
ctagccccttcaata

SEQ ID NO: 863727 - DNA, 15 bp, Homo sapiens
tagccccttcaatac

SEQ ID NO: 863728 - DNA, 15 bp, Homo sapiens
agccccttcaatacc

SEQ ID NO: 863729 - DNA, 15 bp, Homo sapiens
gccccttcaataccg

SEQ ID NO: 863730 - DNA, 15 bp, Homo sapiens
ccccttcaataccgc

SEQ ID NO: 863731 - DNA, 15 bp, Homo sapiens
cccttcaataccgca

SEQ ID NO: 863732 - DNA, 15 bp, Homo sapiens
ccttcaataccgcaa

SEQ ID NO: 863733 - DNA, 15 bp, Homo sapiens
cttcaataccgcaag

SEQ ID NO: 863734 - DNA, 15 bp, Homo sapiens
ttcaataccgcaaga

SEQ ID NO: 863735 - DNA, 15 bp, Homo sapiens
tcaataccgcaagat

SEQ ID NO: 863736 - DNA, 15 bp, Homo sapiens
caataccgcaagatg

SEQ ID NO: 863737 - DNA, 15 bp, Homo sapiens
aataccgcaagatga

SEQ ID NO: 863738 - DNA, 15 bp, Homo sapiens
ataccgcaagatgag

SEQ ID NO: 863739 - DNA, 15 bp, Homo sapiens
taccgcaagatgagt

SEQ ID NO: 863740 - DNA, 15 bp, Homo sapiens
accgcaagatgagtc

SEQ ID NO: 863741 - DNA, 15 bp, Homo sapiens
ccgcaagatgagtcc

SEQ ID NO: 863742 - DNA, 15 bp, Homo sapiens
cgcaagatgagtccc

SEQ ID NO: 863743 - DNA, 15 bp, Homo sapiens
gcaagatgagtccca

SEQ ID NO: 863744 - DNA, 15 bp, Homo sapiens
caagatgagtcccac

SEQ ID NO: 863745 - DNA, 15 bp, Homo sapiens
aagatgagtcccacc

SEQ ID NO: 863746 - DNA, 15 bp, Homo sapiens
agatgagtcccacca

SEQ ID NO: 863747 - DNA, 15 bp, Homo sapiens
gatgagtcccaccaa

SEQ ID NO: 863748 - DNA, 15 bp, Homo sapiens
atgagtcccaccaaa

SEQ ID NO: 863749 - DNA, 15 bp, Homo sapiens
tgagtcccaccaaat

SEQ ID NO: 863750 - DNA, 15 bp, Homo sapiens
gagtcccaccaaatg

SEQ ID NO: 863751 - DNA, 15 bp, Homo sapiens
agtcccaccaaatgt

SEQ ID NO: 863752 - DNA, 15 bp, Homo sapiens
gtcccaccaaatgtt

SEQ ID NO: 863753 - DNA, 15 bp, Homo sapiens
tcccaccaaatgttc

SEQ ID NO: 863754 - DNA, 15 bp, Homo sapiens
cccaccaaatgttcc

SEQ ID NO: 863755 - DNA, 15 bp, Homo sapiens
ccaccaaatgttcct

SEQ ID NO: 863756 - DNA, 15 bp, Homo sapiens
caccaaatgttccta

SEQ ID NO: 863757 - DNA, 15 bp, Homo sapiens
accaaatgttcctag

SEQ ID NO: 863758 - DNA, 15 bp, Homo sapiens
ccaaatgttcctaga

SEQ ID NO: 863759 - DNA, 15 bp, Homo sapiens
caaatgttcctagag

SEQ ID NO: 863760 - DNA, 15 bp, Homo sapiens
aaatgttcctagagc

SEQ ID NO: 863761 - DNA, 15 bp, Homo sapiens
aatgttcctagagct

SEQ ID NO: 863762 - DNA, 15 bp, Homo sapiens
atgttcctagagctg

SEQ ID NO: 863763 - DNA, 15 bp, Homo sapiens
tgttcctagagctgc

SEQ ID NO: 863764 - DNA, 15 bp, Homo sapiens
gttcctagagctgca

SEQ ID NO: 863765 - DNA, 15 bp, Homo sapiens
ttcctagagctgcag

SEQ ID NO: 863766 - DNA, 15 bp, Homo sapiens
tcctagagctgcaga

SEQ ID NO: 863767 - DNA, 15 bp, Homo sapiens
cctagagctgcagag

SEQ ID NO: 863768 - DNA, 15 bp, Homo sapiens
ctagagctgcagaga

SEQ ID NO: 863769 - DNA, 15 bp, Homo sapiens
tagagctgcagagaa

SEQ ID NO: 863770 - DNA, 15 bp, Homo sapiens
agagctgcagagaaa

SEQ ID NO: 863771 - DNA, 15 bp, Homo sapiens
gagctgcagagaaaa

SEQ ID NO: 863772 - DNA, 15 bp, Homo sapiens
agctgcagagaaaac

SEQ ID NO: 863773 - DNA, 15 bp, Homo sapiens
gctgcagagaaaacc

SEQ ID NO: 863774 - DNA, 15 bp, Homo sapiens
ctgcagagaaaaccc

SEQ ID NO: 863775 - DNA, 15 bp, Homo sapiens
tgcagagaaaaccct

SEQ ID NO: 863776 - DNA, 15 bp, Homo sapiens
gcagagaaaacccta

SEQ ID NO: 863777 - DNA, 15 bp, Homo sapiens
cagagaaaaccctat

SEQ ID NO: 863778 - DNA, 15 bp, Homo sapiens
agagaaaaccctatg

SEQ ID NO: 863779 - DNA, 15 bp, Homo sapiens
gagaaaaccctatgc

SEQ ID NO: 863780 - DNA, 15 bp, Homo sapiens
agaaaaccctatgca

SEQ ID NO: 863781 - DNA, 15 bp, Homo sapiens
gaaaaccctatgcaa

SEQ ID NO: 863782 - DNA, 15 bp, Homo sapiens
aaaaccctatgcaaa

SEQ ID NO: 863783 - DNA, 15 bp, Homo sapiens
aaaccctatgcaaat

SEQ ID NO: 863784 - DNA, 15 bp, Homo sapiens
aaccctatgcaaata

SEQ ID NO: 863785 - DNA, 15 bp, Homo sapiens
accctatgcaaatag

SEQ ID NO: 863786 - DNA, 15 bp, Homo sapiens
ccctatgcaaataga

SEQ ID NO: 863787 - DNA, 15 bp, Homo sapiens
cctatgcaaatagaa

SEQ ID NO: 863788 - DNA, 15 bp, Homo sapiens
ctatgcaaatagaaa

SEQ ID NO: 863789 - DNA, 15 bp, Homo sapiens
tatgcaaatagaaaa

SEQ ID NO: 863790 - DNA, 15 bp, Homo sapiens
atgcaaatagaaaat

SEQ ID NO: 863791 - DNA, 15 bp, Homo sapiens
tgcaaatagaaaatg

SEQ ID NO: 863792 - DNA, 15 bp, Homo sapiens
gcaaatagaaaatgg

SEQ ID NO: 863793 - DNA, 15 bp, Homo sapiens
caaatagaaaatgga

SEQ ID NO: 863794 - DNA, 15 bp, Homo sapiens
aaatagaaaatggaa

SEQ ID NO: 863795 - DNA, 15 bp, Homo sapiens
aatagaaaatggaat

SEQ ID NO: 863796 - DNA, 15 bp, Homo sapiens
atagaaaatggaatc

SEQ ID NO: 863797 - DNA, 15 bp, Homo sapiens
tagaaaatggaatct

SEQ ID NO: 863798 - DNA, 15 bp, Homo sapiens
agaaaatggaatctt

SEQ ID NO: 863799 - DNA, 15 bp, Homo sapiens
gaaaatggaatcttt

SEQ ID NO: 863800 - DNA, 15 bp, Homo sapiens
aaaatggaatctttt

SEQ ID NO: 863801 - DNA, 15 bp, Homo sapiens
aaatggaatcttttg

SEQ ID NO: 863802 - DNA, 15 bp, Homo sapiens
aatggaatcttttga

SEQ ID NO: 863803 - DNA, 15 bp, Homo sapiens
atggaatcttttgag

SEQ ID NO: 863804 - DNA, 15 bp, Homo sapiens
tggaatcttttgagg

SEQ ID NO: 863805 - DNA, 15 bp, Homo sapiens
ggaatcttttgaggc

SEQ ID NO: 863806 - DNA, 15 bp, Homo sapiens
gaatcttttgaggca

SEQ ID NO: 863807 - DNA, 15 bp, Homo sapiens
aatcttttgaggcag

SEQ ID NO: 863808 - DNA, 15 bp, Homo sapiens
atcttttgaggcaga

SEQ ID NO: 863809 - DNA, 15 bp, Homo sapiens
tcttttgaggcagat

SEQ ID NO: 863810 - DNA, 15 bp, Homo sapiens
cttttgaggcagatc

SEQ ID NO: 863811 - DNA, 15 bp, Homo sapiens
ttttgaggcagatct

SEQ ID NO: 863812 - DNA, 15 bp, Homo sapiens
tttgaggcagatctg

SEQ ID NO: 863813 - DNA, 15 bp, Homo sapiens
ttgaggcagatctgc

SEQ ID NO: 863814 - DNA, 15 bp, Homo sapiens
tgaggcagatctgca

SEQ ID NO: 863815 - DNA, 15 bp, Homo sapiens
gaggcagatctgcat

SEQ ID NO: 863816 - DNA, 15 bp, Homo sapiens
aggcagatctgcatt

SEQ ID NO: 863817 - DNA, 15 bp, Homo sapiens
ggcagatctgcatta

SEQ ID NO: 863818 - DNA, 15 bp, Homo sapiens
gcagatctgcattag

SEQ ID NO: 863819 - DNA, 15 bp, Homo sapiens
cagatctgcattagg

SEQ ID NO: 863820 - DNA, 15 bp, Homo sapiens
agatctgcattaggg

SEQ ID NO: 863821 - DNA, 15 bp, Homo sapiens
gatctgcattaggga

SEQ ID NO: 863822 - DNA, 15 bp, Homo sapiens
atctgcattagggat

SEQ ID NO: 863823 - DNA, 15 bp, Homo sapiens
tctgcattagggatg

SEQ ID NO: 863824 - DNA, 15 bp, Homo sapiens
ctgcattagggatga

SEQ ID NO: 863825 - DNA, 15 bp, Homo sapiens
tgcattagggatgat

SEQ ID NO: 863826 - DNA, 15 bp, Homo sapiens
gcattagggatgatc

SEQ ID NO: 863827 - DNA, 15 bp, Homo sapiens
cattagggatgatcg

SEQ ID NO: 863828 - DNA, 15 bp, Homo sapiens
attagggatgatcga

SEQ ID NO: 863829 - DNA, 15 bp, Homo sapiens
ttagggatgatcgac

SEQ ID NO: 863830 - DNA, 15 bp, Homo sapiens
tagggatgatcgact

SEQ ID NO: 863831 - DNA, 15 bp, Homo sapiens
agggatgatcgactg

SEQ ID NO: 863832 - DNA, 15 bp, Homo sapiens
gggatgatcgactgc

SEQ ID NO: 863833 - DNA, 15 bp, Homo sapiens
ggatgatcgactgca

SEQ ID NO: 863834 - DNA, 15 bp, Homo sapiens
gatgatcgactgcac

SEQ ID NO: 863835 - DNA, 15 bp, Homo sapiens
atgatcgactgcact

SEQ ID NO: 863836 - DNA, 15 bp, Homo sapiens
tgatcgactgcactg

SEQ ID NO: 863837 - DNA, 15 bp, Homo sapiens
gatcgactgcactga

SEQ ID NO: 863838 - DNA, 15 bp, Homo sapiens
atcgactgcactgag

SEQ ID NO: 863839 - DNA, 15 bp, Homo sapiens
tcgactgcactgaga

SEQ ID NO: 863840 - DNA, 15 bp, Homo sapiens
cgactgcactgagag

SEQ ID NO: 863841 - DNA, 15 bp, Homo sapiens
gactgcactgagaga

SEQ ID NO: 863842 - DNA, 15 bp, Homo sapiens
actgcactgagagac

SEQ ID NO: 863843 - DNA, 15 bp, Homo sapiens
ctgcactgagagact

SEQ ID NO: 863844 - DNA, 15 bp, Homo sapiens
tgcactgagagactt

SEQ ID NO: 863845 - DNA, 15 bp, Homo sapiens
gcactgagagactta

SEQ ID NO: 863846 - DNA, 15 bp, Homo sapiens
cactgagagacttat

SEQ ID NO: 863847 - DNA, 15 bp, Homo sapiens
actgagagacttata

SEQ ID NO: 863848 - DNA, 15 bp, Homo sapiens
ctgagagacttataa

SEQ ID NO: 863849 - DNA, 15 bp, Homo sapiens
tgagagacttataaa

SEQ ID NO: 863850 - DNA, 15 bp, Homo sapiens
gagagacttataaat

SEQ ID NO: 863851 - DNA, 15 bp, Homo sapiens
agagacttataaatg

SEQ ID NO: 863852 - DNA, 15 bp, Homo sapiens
gagacttataaatga

SEQ ID NO: 863853 - DNA, 15 bp, Homo sapiens
agacttataaatgaa

SEQ ID NO: 863854 - DNA, 15 bp, Homo sapiens
gacttataaatgaag

SEQ ID NO: 863855 - DNA, 15 bp, Homo sapiens
acttataaatgaagt

SEQ ID NO: 863856 - DNA, 15 bp, Homo sapiens
cttataaatgaagtg

SEQ ID NO: 863857 - DNA, 15 bp, Homo sapiens
ttataaatgaagtga

SEQ ID NO: 863858 - DNA, 15 bp, Homo sapiens
tataaatgaagtgag

SEQ ID NO: 863859 - DNA, 15 bp, Homo sapiens
ataaatgaagtgaga

SEQ ID NO: 863860 - DNA, 15 bp, Homo sapiens
taaatgaagtgagaa

SEQ ID NO: 863861 - DNA, 15 bp, Homo sapiens
aaatgaagtgagaaa

SEQ ID NO: 863862 - DNA, 15 bp, Homo sapiens
aatgaagtgagaaag

SEQ ID NO: 863863 - DNA, 15 bp, Homo sapiens
atgaagtgagaaaga

SEQ ID NO: 863864 - DNA, 15 bp, Homo sapiens
tgaagtgagaaagac

SEQ ID NO: 863865 - DNA, 15 bp, Homo sapiens
gaagtgagaaagact

SEQ ID NO: 863866 - DNA, 15 bp, Homo sapiens
aagtgagaaagactc

SEQ ID NO: 863867 - DNA, 15 bp, Homo sapiens
agtgagaaagactcc

SEQ ID NO: 863868 - DNA, 15 bp, Homo sapiens
gtgagaaagactcca

SEQ ID NO: 863869 - DNA, 15 bp, Homo sapiens
tgagaaagactccag

SEQ ID NO: 863870 - DNA, 15 bp, Homo sapiens
gagaaagactccagc

SEQ ID NO: 863871 - DNA, 15 bp, Homo sapiens
agaaagactccagcc

SEQ ID NO: 863872 - DNA, 15 bp, Homo sapiens
gaaagactccagccc

SEQ ID NO: 863873 - DNA, 15 bp, Homo sapiens
aaagactccagccct

SEQ ID NO: 863874 - DNA, 15 bp, Homo sapiens
aagactccagcccta

SEQ ID NO: 863875 - DNA, 15 bp, Homo sapiens
agactccagccctag

SEQ ID NO: 863876 - DNA, 15 bp, Homo sapiens
gactccagccctaga

SEQ ID NO: 863877 - DNA, 15 bp, Homo sapiens
actccagccctagag

SEQ ID NO: 863878 - DNA, 15 bp, Homo sapiens
ctccagccctagagc

SEQ ID NO: 863879 - DNA, 15 bp, Homo sapiens
tccagccctagagct

SEQ ID NO: 863880 - DNA, 15 bp, Homo sapiens
ccagccctagagctg

SEQ ID NO: 863881 - DNA, 15 bp, Homo sapiens
cagccctagagctgg

SEQ ID NO: 863882 - DNA, 15 bp, Homo sapiens
agccctagagctggc

SEQ ID NO: 863883 - DNA, 15 bp, Homo sapiens
gccctagagctggca

SEQ ID NO: 863884 - DNA, 15 bp, Homo sapiens
ccctagagctggcac

SEQ ID NO: 863885 - DNA, 15 bp, Homo sapiens
cctagagctggcact

SEQ ID NO: 863886 - DNA, 15 bp, Homo sapiens
ctagagctggcactg

SEQ ID NO: 863887 - DNA, 15 bp, Homo sapiens
tagagctggcactgc

SEQ ID NO: 863888 - DNA, 15 bp, Homo sapiens
agagctggcactgca

SEQ ID NO: 863889 - DNA, 15 bp, Homo sapiens
gagctggcactgcac

SEQ ID NO: 863890 - DNA, 15 bp, Homo sapiens
agctggcactgcacc

SEQ ID NO: 863891 - DNA, 15 bp, Homo sapiens
gctggcactgcacca

SEQ ID NO: 863892 - DNA, 15 bp, Homo sapiens
ctggcactgcaccag

SEQ ID NO: 863893 - DNA, 15 bp, Homo sapiens
tggcactgcaccagc

SEQ ID NO: 863894 - DNA, 15 bp, Homo sapiens
ggcactgcaccagct

SEQ ID NO: 863895 - DNA, 15 bp, Homo sapiens
gcactgcaccagctg

SEQ ID NO: 863896 - DNA, 15 bp, Homo sapiens
cactgcaccagctgt

SEQ ID NO: 863897 - DNA, 15 bp, Homo sapiens
actgcaccagctgta

SEQ ID NO: 863898 - DNA, 15 bp, Homo sapiens
ctgcaccagctgtat

SEQ ID NO: 863899 - DNA, 15 bp, Homo sapiens
tgcaccagctgtatc

SEQ ID NO: 863900 - DNA, 15 bp, Homo sapiens
gcaccagctgtatcg

SEQ ID NO: 863901 - DNA, 15 bp, Homo sapiens
caccagctgtatcga

SEQ ID NO: 863902 - DNA, 15 bp, Homo sapiens
accagctgtatcgac

SEQ ID NO: 863903 - DNA, 15 bp, Homo sapiens
ccagctgtatcgaca

SEQ ID NO: 863904 - DNA, 15 bp, Homo sapiens
cagctgtatcgacag

SEQ ID NO: 863905 - DNA, 15 bp, Homo sapiens
agctgtatcgacagt

SEQ ID NO: 863906 - DNA, 15 bp, Homo sapiens
gctgtatcgacagtg

SEQ ID NO: 863907 - DNA, 15 bp, Homo sapiens
ctgtatcgacagtgc

SEQ ID NO: 863908 - DNA, 15 bp, Homo sapiens
tgtatcgacagtgca

SEQ ID NO: 863909 - DNA, 15 bp, Homo sapiens
gtatcgacagtgcat

SEQ ID NO: 863910 - DNA, 15 bp, Homo sapiens
tatcgacagtgcata

SEQ ID NO: 863911 - DNA, 15 bp, Homo sapiens
atcgacagtgcatag

SEQ ID NO: 863912 - DNA, 15 bp, Homo sapiens
tcgacagtgcataga

SEQ ID NO: 863913 - DNA, 15 bp, Homo sapiens
cgacagtgcatagat

SEQ ID NO: 863914 - DNA, 15 bp, Homo sapiens
gacagtgcatagatg

SEQ ID NO: 863915 - DNA, 15 bp, Homo sapiens
acagtgcatagatgg

SEQ ID NO: 863916 - DNA, 15 bp, Homo sapiens
cagtgcatagatggg

SEQ ID NO: 863917 - DNA, 15 bp, Homo sapiens
agtgcatagatgggc

SEQ ID NO: 863918 - DNA, 15 bp, Homo sapiens
gtgcatagatgggca

SEQ ID NO: 863919 - DNA, 15 bp, Homo sapiens
tgcatagatgggcat

SEQ ID NO: 863920 - DNA, 15 bp, Homo sapiens
gcatagatgggcatc

SEQ ID NO: 863921 - DNA, 15 bp, Homo sapiens
catagatgggcatct

SEQ ID NO: 863922 - DNA, 15 bp, Homo sapiens
atagatgggcatctg

SEQ ID NO: 863923 - DNA, 15 bp, Homo sapiens
tagatgggcatctgc

SEQ ID NO: 863924 - DNA, 15 bp, Homo sapiens
agatgggcatctgca

SEQ ID NO: 863925 - DNA, 15 bp, Homo sapiens
gatgggcatctgcac

SEQ ID NO: 863926 - DNA, 15 bp, Homo sapiens
atgggcatctgcaca

SEQ ID NO: 863927 - DNA, 15 bp, Homo sapiens
tgggcatctgcacac

SEQ ID NO: 863928 - DNA, 15 bp, Homo sapiens
gggcatctgcacacc

SEQ ID NO: 863929 - DNA, 15 bp, Homo sapiens
ggcatctgcacacca

SEQ ID NO: 863930 - DNA, 15 bp, Homo sapiens
gcatctgcacaccat

SEQ ID NO: 863931 - DNA, 15 bp, Homo sapiens
catctgcacaccata

SEQ ID NO: 863932 - DNA, 15 bp, Homo sapiens
atctgcacaccatag

SEQ ID NO: 863933 - DNA, 15 bp, Homo sapiens
tctgcacaccataga

SEQ ID NO: 863934 - DNA, 15 bp, Homo sapiens
ctgcacaccatagag

SEQ ID NO: 863935 - DNA, 15 bp, Homo sapiens
tgcacaccatagagc

SEQ ID NO: 863936 - DNA, 15 bp, Homo sapiens
gcacaccatagagca

SEQ ID NO: 863937 - DNA, 15 bp, Homo sapiens
cacaccatagagcat

SEQ ID NO: 863938 - DNA, 15 bp, Homo sapiens
acaccatagagcatg

SEQ ID NO: 863939 - DNA, 15 bp, Homo sapiens
caccatagagcatgg

SEQ ID NO: 863940 - DNA, 15 bp, Homo sapiens
accatagagcatggg

SEQ ID NO: 863941 - DNA, 15 bp, Homo sapiens
ccatagagcatgggc

SEQ ID NO: 863942 - DNA, 15 bp, Homo sapiens
catagagcatgggct

SEQ ID NO: 863943 - DNA, 15 bp, Homo sapiens
atagagcatgggcta

SEQ ID NO: 863944 - DNA, 15 bp, Homo sapiens
tagagcatgggctat

SEQ ID NO: 863945 - DNA, 15 bp, Homo sapiens
agagcatgggctatc

SEQ ID NO: 863946 - DNA, 15 bp, Homo sapiens
gagcatgggctatct

SEQ ID NO: 863947 - DNA, 15 bp, Homo sapiens
agcatgggctatctt

SEQ ID NO: 863948 - DNA, 15 bp, Homo sapiens
gcatgggctatcttc

SEQ ID NO: 863949 - DNA, 15 bp, Homo sapiens
catgggctatcttct

SEQ ID NO: 863950 - DNA, 15 bp, Homo sapiens
atgggctatcttctg

SEQ ID NO: 863951 - DNA, 15 bp, Homo sapiens
tgggctatcttctgg

SEQ ID NO: 863952 - DNA, 15 bp, Homo sapiens
gggctatcttctggg

SEQ ID NO: 863953 - DNA, 15 bp, Homo sapiens
ggctatcttctggga

SEQ ID NO: 863954 - DNA, 15 bp, Homo sapiens
gctatcttctgggaa

SEQ ID NO: 863955 - DNA, 15 bp, Homo sapiens
ctatcttctgggaag

SEQ ID NO: 863956 - DNA, 15 bp, Homo sapiens
tatcttctgggaagg

SEQ ID NO: 863957 - DNA, 15 bp, Homo sapiens
atcttctgggaaggg

SEQ ID NO: 863958 - DNA, 15 bp, Homo sapiens
tcttctgggaaggga

SEQ ID NO: 863959 - DNA, 15 bp, Homo sapiens
cttctgggaagggag

SEQ ID NO: 863960 - DNA, 15 bp, Homo sapiens
ttctgggaagggagc

SEQ ID NO: 863961 - DNA, 15 bp, Homo sapiens
tctgggaagggagct

SEQ ID NO: 863962 - DNA, 15 bp, Homo sapiens
ctgggaagggagctg

SEQ ID NO: 863963 - DNA, 15 bp, Homo sapiens
tgggaagggagctga

SEQ ID NO: 863964 - DNA, 15 bp, Homo sapiens
gggaagggagctgac

SEQ ID NO: 863965 - DNA, 15 bp, Homo sapiens
ggaagggagctgact

SEQ ID NO: 863966 - DNA, 15 bp, Homo sapiens
gaagggagctgactg

SEQ ID NO: 863967 - DNA, 15 bp, Homo sapiens
aagggagctgactgc

SEQ ID NO: 863968 - DNA, 15 bp, Homo sapiens
agggagctgactgct

SEQ ID NO: 863969 - DNA, 15 bp, Homo sapiens
gggagctgactgctt

SEQ ID NO: 863970 - DNA, 15 bp, Homo sapiens
ggagctgactgcttg

SEQ ID NO: 863971 - DNA, 15 bp, Homo sapiens
gagctgactgcttgc

SEQ ID NO: 863972 - DNA, 15 bp, Homo sapiens
agctgactgcttgca

SEQ ID NO: 863973 - DNA, 15 bp, Homo sapiens
gctgactgcttgcat

SEQ ID NO: 863974 - DNA, 15 bp, Homo sapiens
ctgactgcttgcatt

SEQ ID NO: 863975 - DNA, 15 bp, Homo sapiens
tgactgcttgcatta

SEQ ID NO: 863976 - DNA, 15 bp, Homo sapiens
gactgcttgcattaa

SEQ ID NO: 863977 - DNA, 15 bp, Homo sapiens
actgcttgcattaaa

SEQ ID NO: 863978 - DNA, 15 bp, Homo sapiens
ctgcttgcattaaaa

SEQ ID NO: 863979 - DNA, 15 bp, Homo sapiens
tgcttgcattaaaat

SEQ ID NO: 863980 - DNA, 15 bp, Homo sapiens
gcttgcattaaaatg

SEQ ID NO: 863981 - DNA, 15 bp, Homo sapiens
cttgcattaaaatga

SEQ ID NO: 863982 - DNA, 15 bp, Homo sapiens
ttgcattaaaatgat

SEQ ID NO: 863983 - DNA, 15 bp, Homo sapiens
tgcattaaaatgatc

SEQ ID NO: 863984 - DNA, 15 bp, Homo sapiens
gcattaaaatgatct

SEQ ID NO: 863985 - DNA, 15 bp, Homo sapiens
cattaaaatgatctt

SEQ ID NO: 863986 - DNA, 15 bp, Homo sapiens
attaaaatgatcttc

SEQ ID NO: 863987 - DNA, 15 bp, Homo sapiens
ttaaaatgatcttca

SEQ ID NO: 863988 - DNA, 15 bp, Homo sapiens
taaaatgatcttcat

SEQ ID NO: 863989 - DNA, 15 bp, Homo sapiens
aaaatgatcttcatt

SEQ ID NO: 863990 - DNA, 15 bp, Homo sapiens
aaatgatcttcattt

SEQ ID NO: 863991 - DNA, 15 bp, Homo sapiens
aatgatcttcatttt

SEQ ID NO: 863992 - DNA, 15 bp, Homo sapiens
atgatcttcattttg

SEQ ID NO: 863993 - DNA, 15 bp, Homo sapiens
tgatcttcattttgg

SEQ ID NO: 863994 - DNA, 15 bp, Homo sapiens
gatcttcattttggc

SEQ ID NO: 863995 - DNA, 15 bp, Homo sapiens
atcttcattttggcc

SEQ ID NO: 863996 - DNA, 15 bp, Homo sapiens
tcttcattttggcca

SEQ ID NO: 863997 - DNA, 15 bp, Homo sapiens
cttcattttggccaa

SEQ ID NO: 863998 - DNA, 15 bp, Homo sapiens
ttcattttggccaat

SEQ ID NO: 863999 - DNA, 15 bp, Homo sapiens
tcattttggccaatg

SEQ ID NO: 864000 - DNA, 15 bp, Homo sapiens
cattttggccaatgt

SEQ ID NO: 864001 - DNA, 15 bp, Homo sapiens
attttggccaatgtc

SEQ ID NO: 864002 - DNA, 15 bp, Homo sapiens
ttttggccaatgtca

SEQ ID NO: 864003 - DNA, 15 bp, Homo sapiens
tttggccaatgtcag

SEQ ID NO: 864004 - DNA, 15 bp, Homo sapiens
ttggccaatgtcagc

SEQ ID NO: 864005 - DNA, 15 bp, Homo sapiens
tggccaatgtcagct

SEQ ID NO: 864006 - DNA, 15 bp, Homo sapiens
ggccaatgtcagctt

SEQ ID NO: 864007 - DNA, 15 bp, Homo sapiens
gccaatgtcagcttt

SEQ ID NO: 864008 - DNA, 15 bp, Homo sapiens
ccaatgtcagctttc

SEQ ID NO: 864009 - DNA, 15 bp, Homo sapiens
caatgtcagctttct

SEQ ID NO: 864010 - DNA, 15 bp, Homo sapiens
aatgtcagctttctg

SEQ ID NO: 864011 - DNA, 15 bp, Homo sapiens
atgtcagctttctgg

SEQ ID NO: 864012 - DNA, 15 bp, Homo sapiens
tgtcagctttctggg

SEQ ID NO: 864013 - DNA, 15 bp, Homo sapiens
gtcagctttctgggc

SEQ ID NO: 864014 - DNA, 15 bp, Homo sapiens
tcagctttctgggct

SEQ ID NO: 864015 - DNA, 15 bp, Homo sapiens
cagctttctgggctg

SEQ ID NO: 864016 - DNA, 15 bp, Homo sapiens
agctttctgggctgg

SEQ ID NO: 864017 - DNA, 15 bp, Homo sapiens
gctttctgggctgga

SEQ ID NO: 864018 - DNA, 15 bp, Homo sapiens
ctttctgggctggag

SEQ ID NO: 864019 - DNA, 15 bp, Homo sapiens
tttctgggctggagc

SEQ ID NO: 864020 - DNA, 15 bp, Homo sapiens
ttctgggctggagcc

SEQ ID NO: 864021 - DNA, 15 bp, Homo sapiens
tctgggctggagcct

SEQ ID NO: 864022 - DNA, 15 bp, Homo sapiens
ctgggctggagcctg

SEQ ID NO: 864023 - DNA, 15 bp, Homo sapiens
tgggctggagcctgt

SEQ ID NO: 864024 - DNA, 15 bp, Homo sapiens
gggctggagcctgtt

SEQ ID NO: 864025 - DNA, 15 bp, Homo sapiens
ggctggagcctgttg

SEQ ID NO: 864026 - DNA, 15 bp, Homo sapiens
gctggagcctgttgg

SEQ ID NO: 864027 - DNA, 15 bp, Homo sapiens
ctggagcctgttgga

SEQ ID NO: 864028 - DNA, 15 bp, Homo sapiens
tggagcctgttggat

SEQ ID NO: 864029 - DNA, 15 bp, Homo sapiens
ggagcctgttggatc

SEQ ID NO: 864030 - DNA, 15 bp, Homo sapiens
gagcctgttggatca

SEQ ID NO: 864031 - DNA, 15 bp, Homo sapiens
agcctgttggatcac

SEQ ID NO: 864032 - DNA, 15 bp, Homo sapiens
gcctgttggatcaca

SEQ ID NO: 864033 - DNA, 15 bp, Homo sapiens
cctgttggatcacac

SEQ ID NO: 864034 - DNA, 15 bp, Homo sapiens
ctgttggatcacact

SEQ ID NO: 864035 - DNA, 15 bp, Homo sapiens
tgttggatcacactc

SEQ ID NO: 864036 - DNA, 15 bp, Homo sapiens
gttggatcacactca

SEQ ID NO: 864037 - DNA, 15 bp, Homo sapiens
ttggatcacactcag

SEQ ID NO: 864038 - DNA, 15 bp, Homo sapiens
tggatcacactcagt

SEQ ID NO: 864039 - DNA, 15 bp, Homo sapiens
ggatcacactcagtc

SEQ ID NO: 864040 - DNA, 15 bp, Homo sapiens
gatcacactcagtca

SEQ ID NO: 864041 - DNA, 15 bp, Homo sapiens
atcacactcagtcaa

SEQ ID NO: 864042 - DNA, 15 bp, Homo sapiens
tcacactcagtcaag

SEQ ID NO: 864043 - DNA, 15 bp, Homo sapiens
cacactcagtcaaga

SEQ ID NO: 864044 - DNA, 15 bp, Homo sapiens
acactcagtcaagaa

SEQ ID NO: 864045 - DNA, 15 bp, Homo sapiens
cactcagtcaagaaa

SEQ ID NO: 864046 - DNA, 15 bp, Homo sapiens
actcagtcaagaaag

SEQ ID NO: 864047 - DNA, 15 bp, Homo sapiens
ctcagtcaagaaagg

SEQ ID NO: 864048 - DNA, 15 bp, Homo sapiens
tcagtcaagaaagga

SEQ ID NO: 864049 - DNA, 15 bp, Homo sapiens
cagtcaagaaaggac

SEQ ID NO: 864050 - DNA, 15 bp, Homo sapiens
agtcaagaaaggacc

SEQ ID NO: 864051 - DNA, 15 bp, Homo sapiens
gtcaagaaaggaccc

SEQ ID NO: 864052 - DNA, 15 bp, Homo sapiens
tcaagaaaggaccca

SEQ ID NO: 864053 - DNA, 15 bp, Homo sapiens
caagaaaggacccag

SEQ ID NO: 864054 - DNA, 15 bp, Homo sapiens
aagaaaggacccagg

SEQ ID NO: 864055 - DNA, 15 bp, Homo sapiens
agaaaggacccaggg

SEQ ID NO: 864056 - DNA, 15 bp, Homo sapiens
gaaaggacccagggg

SEQ ID NO: 864057 - DNA, 15 bp, Homo sapiens
aaaggacccaggggc

SEQ ID NO: 864058 - DNA, 15 bp, Homo sapiens
aaggacccaggggct

SEQ ID NO: 864059 - DNA, 15 bp, Homo sapiens
aggacccaggggctg

SEQ ID NO: 864060 - DNA, 15 bp, Homo sapiens
ggacccaggggctgc

SEQ ID NO: 864061 - DNA, 15 bp, Homo sapiens
gacccaggggctgcc

SEQ ID NO: 864062 - DNA, 15 bp, Homo sapiens
acccaggggctgcct

SEQ ID NO: 864063 - DNA, 15 bp, Homo sapiens
cccaggggctgcctt

SEQ ID NO: 864064 - DNA, 15 bp, Homo sapiens
ccaggggctgccttc

SEQ ID NO: 864065 - DNA, 15 bp, Homo sapiens
caggggctgccttcc

SEQ ID NO: 864066 - DNA, 15 bp, Homo sapiens
aggggctgccttccc

SEQ ID NO: 864067 - DNA, 15 bp, Homo sapiens
ggggctgccttccct

SEQ ID NO: 864068 - DNA, 15 bp, Homo sapiens
gggctgccttccctc

SEQ ID NO: 864069 - DNA, 15 bp, Homo sapiens
ggctgccttccctcc

SEQ ID NO: 864070 - DNA, 15 bp, Homo sapiens
gctgccttccctccc

SEQ ID NO: 864071 - DNA, 15 bp, Homo sapiens
ctgccttccctccct

SEQ ID NO: 864072 - DNA, 15 bp, Homo sapiens
tgccttccctccctc

SEQ ID NO: 864073 - DNA, 15 bp, Homo sapiens
gccttccctccctcc

SEQ ID NO: 864074 - DNA, 15 bp, Homo sapiens
ccttccctccctcca

SEQ ID NO: 864075 - DNA, 15 bp, Homo sapiens
cttccctccctccaa

SEQ ID NO: 864076 - DNA, 15 bp, Homo sapiens
ttccctccctccaag

SEQ ID NO: 864077 - DNA, 15 bp, Homo sapiens
tccctccctccaagg

SEQ ID NO: 864078 - DNA, 15 bp, Homo sapiens
ccctccctccaaggt

SEQ ID NO: 864079 - DNA, 15 bp, Homo sapiens
cctccctccaaggtc

SEQ ID NO: 864080 - DNA, 15 bp, Homo sapiens
ctccctccaaggtca

SEQ ID NO: 864081 - DNA, 15 bp, Homo sapiens
tccctccaaggtcaa

SEQ ID NO: 864082 - DNA, 15 bp, Homo sapiens
ccctccaaggtcaaa

SEQ ID NO: 864083 - DNA, 15 bp, Homo sapiens
cctccaaggtcaaaa

SEQ ID NO: 864084 - DNA, 15 bp, Homo sapiens
ctccaaggtcaaaaa

SEQ ID NO: 864085 - DNA, 15 bp, Homo sapiens
tccaaggtcaaaaat

SEQ ID NO: 864086 - DNA, 15 bp, Homo sapiens
ccaaggtcaaaaatg

SEQ ID NO: 864087 - DNA, 15 bp, Homo sapiens
caaggtcaaaaatgt

SEQ ID NO: 864088 - DNA, 15 bp, Homo sapiens
aaggtcaaaaatgta

SEQ ID NO: 864089 - DNA, 15 bp, Homo sapiens
aggtcaaaaatgtag

SEQ ID NO: 864090 - DNA, 15 bp, Homo sapiens
ggtcaaaaatgtagc

SEQ ID NO: 864091 - DNA, 15 bp, Homo sapiens
gtcaaaaatgtagca

SEQ ID NO: 864092 - DNA, 15 bp, Homo sapiens
tcaaaaatgtagcat

SEQ ID NO: 864093 - DNA, 15 bp, Homo sapiens
caaaaatgtagcatg

SEQ ID NO: 864094 - DNA, 15 bp, Homo sapiens
aaaaatgtagcatgc

SEQ ID NO: 864095 - DNA, 15 bp, Homo sapiens
aaaatgtagcatgct

SEQ ID NO: 864096 - DNA, 15 bp, Homo sapiens
aaatgtagcatgctg

SEQ ID NO: 864097 - DNA, 15 bp, Homo sapiens
aatgtagcatgctga

SEQ ID NO: 864098 - DNA, 15 bp, Homo sapiens
atgtagcatgctgac

SEQ ID NO: 864099 - DNA, 15 bp, Homo sapiens
tgtagcatgctgaca

SEQ ID NO: 864100 - DNA, 15 bp, Homo sapiens
gtagcatgctgacat

SEQ ID NO: 864101 - DNA, 15 bp, Homo sapiens
tagcatgctgacatc

SEQ ID NO: 864102 - DNA, 15 bp, Homo sapiens
agcatgctgacatcc

SEQ ID NO: 864103 - DNA, 15 bp, Homo sapiens
gcatgctgacatcct

SEQ ID NO: 864104 - DNA, 15 bp, Homo sapiens
catgctgacatcctt

SEQ ID NO: 864105 - DNA, 15 bp, Homo sapiens
atgctgacatccttg

SEQ ID NO: 864106 - DNA, 15 bp, Homo sapiens
tgctgacatccttgg

SEQ ID NO: 864107 - DNA, 15 bp, Homo sapiens
gctgacatccttggc

SEQ ID NO: 864108 - DNA, 15 bp, Homo sapiens
ctgacatccttggct

SEQ ID NO: 864109 - DNA, 15 bp, Homo sapiens
tgacatccttggctg

SEQ ID NO: 864110 - DNA, 15 bp, Homo sapiens
gacatccttggctgg

SEQ ID NO: 864111 - DNA, 15 bp, Homo sapiens
acatccttggctggg

SEQ ID NO: 864112 - DNA, 15 bp, Homo sapiens
catccttggctgggc

SEQ ID NO: 864113 - DNA, 15 bp, Homo sapiens
atccttggctgggct

SEQ ID NO: 864114 - DNA, 15 bp, Homo sapiens
tccttggctgggctt

SEQ ID NO: 864115 - DNA, 15 bp, Homo sapiens
ccttggctgggcttc

SEQ ID NO: 864116 - DNA, 15 bp, Homo sapiens
cttggctgggcttcc

SEQ ID NO: 864117 - DNA, 15 bp, Homo sapiens
ttggctgggcttcct

SEQ ID NO: 864118 - DNA, 15 bp, Homo sapiens
tggctgggcttccta

SEQ ID NO: 864119 - DNA, 15 bp, Homo sapiens
ggctgggcttcctat

SEQ ID NO: 864120 - DNA, 15 bp, Homo sapiens
gctgggcttcctata

SEQ ID NO: 864121 - DNA, 15 bp, Homo sapiens
ctgggcttcctatat

SEQ ID NO: 864122 - DNA, 15 bp, Homo sapiens
tgggcttcctatatt

SEQ ID NO: 864123 - DNA, 15 bp, Homo sapiens
gggcttcctatattg

SEQ ID NO: 864124 - DNA, 15 bp, Homo sapiens
ggcttcctatattgg

SEQ ID NO: 864125 - DNA, 15 bp, Homo sapiens
gcttcctatattggc

SEQ ID NO: 864126 - DNA, 15 bp, Homo sapiens
cttcctatattggca

SEQ ID NO: 864127 - DNA, 15 bp, Homo sapiens
ttcctatattggcaa

SEQ ID NO: 864128 - DNA, 15 bp, Homo sapiens
tcctatattggcaag

SEQ ID NO: 864129 - DNA, 15 bp, Homo sapiens
cctatattggcaaga

SEQ ID NO: 864130 - DNA, 15 bp, Homo sapiens
ctatattggcaagag

SEQ ID NO: 864131 - DNA, 15 bp, Homo sapiens
tatattggcaagagt

SEQ ID NO: 864132 - DNA, 15 bp, Homo sapiens
atattggcaagagta

SEQ ID NO: 864133 - DNA, 15 bp, Homo sapiens
tattggcaagagtac

SEQ ID NO: 864134 - DNA, 15 bp, Homo sapiens
attggcaagagtact

SEQ ID NO: 864135 - DNA, 15 bp, Homo sapiens
ttggcaagagtactt

SEQ ID NO: 864136 - DNA, 15 bp, Homo sapiens
tggcaagagtacttg

SEQ ID NO: 864137 - DNA, 15 bp, Homo sapiens
ggcaagagtacttga

SEQ ID NO: 864138 - DNA, 15 bp, Homo sapiens
gcaagagtacttgaa

SEQ ID NO: 864139 - DNA, 15 bp, Homo sapiens
caagagtacttgaat

SEQ ID NO: 864140 - DNA, 15 bp, Homo sapiens
aagagtacttgaata

SEQ ID NO: 864141 - DNA, 15 bp, Homo sapiens
agagtacttgaatag

SEQ ID NO: 864142 - DNA, 15 bp, Homo sapiens
gagtacttgaatagg

SEQ ID NO: 864143 - DNA, 15 bp, Homo sapiens
agtacttgaatagga

SEQ ID NO: 864144 - DNA, 15 bp, Homo sapiens
gtacttgaataggaa

SEQ ID NO: 864145 - DNA, 15 bp, Homo sapiens
tacttgaataggaaa

SEQ ID NO: 864146 - DNA, 15 bp, Homo sapiens
acttgaataggaaat

SEQ ID NO: 864147 - DNA, 15 bp, Homo sapiens
cttgaataggaaatg

SEQ ID NO: 864148 - DNA, 15 bp, Homo sapiens
ttgaataggaaatgg

SEQ ID NO: 864149 - DNA, 15 bp, Homo sapiens
tgaataggaaatggc

SEQ ID NO: 864150 - DNA, 15 bp, Homo sapiens
gaataggaaatggcc

SEQ ID NO: 864151 - DNA, 15 bp, Homo sapiens
aataggaaatggcct

SEQ ID NO: 864152 - DNA, 15 bp, Homo sapiens
ataggaaatggcctg

SEQ ID NO: 864153 - DNA, 15 bp, Homo sapiens
taggaaatggcctga

SEQ ID NO: 864154 - DNA, 15 bp, Homo sapiens
aggaaatggcctgaa

SEQ ID NO: 864155 - DNA, 15 bp, Homo sapiens
ggaaatggcctgaag

SEQ ID NO: 864156 - DNA, 15 bp, Homo sapiens
gaaatggcctgaagg

SEQ ID NO: 864157 - DNA, 15 bp, Homo sapiens
aaatggcctgaagga

SEQ ID NO: 864158 - DNA, 15 bp, Homo sapiens
aatggcctgaaggat

SEQ ID NO: 864159 - DNA, 15 bp, Homo sapiens
atggcctgaaggatt

SEQ ID NO: 864160 - DNA, 15 bp, Homo sapiens
tggcctgaaggattc

SEQ ID NO: 864161 - DNA, 15 bp, Homo sapiens
ggcctgaaggattcc

SEQ ID NO: 864162 - DNA, 15 bp, Homo sapiens
gcctgaaggattcca

SEQ ID NO: 864163 - DNA, 15 bp, Homo sapiens
cctgaaggattccag

SEQ ID NO: 864164 - DNA, 15 bp, Homo sapiens
ctgaaggattccagt

SEQ ID NO: 864165 - DNA, 15 bp, Homo sapiens
tgaaggattccagtt

SEQ ID NO: 864166 - DNA, 15 bp, Homo sapiens
gaaggattccagttc

SEQ ID NO: 864167 - DNA, 15 bp, Homo sapiens
aaggattccagttca

SEQ ID NO: 864168 - DNA, 15 bp, Homo sapiens
aggattccagttcag

SEQ ID NO: 864169 - DNA, 15 bp, Homo sapiens
ggattccagttcagt

SEQ ID NO: 864170 - DNA, 15 bp, Homo sapiens
gattccagttcagta

SEQ ID NO: 864171 - DNA, 15 bp, Homo sapiens
attccagttcagtaa

SEQ ID NO: 864172 - DNA, 15 bp, Homo sapiens
ttccagttcagtaaa

SEQ ID NO: 864173 - DNA, 15 bp, Homo sapiens
tccagttcagtaaat

SEQ ID NO: 864174 - DNA, 15 bp, Homo sapiens
ccagttcagtaaata

SEQ ID NO: 864175 - DNA, 15 bp, Homo sapiens
cagttcagtaaatat

SEQ ID NO: 864176 - DNA, 15 bp, Homo sapiens
agttcagtaaatatt

SEQ ID NO: 864177 - DNA, 15 bp, Homo sapiens
gttcagtaaatattt

SEQ ID NO: 864178 - DNA, 15 bp, Homo sapiens
ttcagtaaatatttc

SEQ ID NO: 864179 - DNA, 15 bp, Homo sapiens
tcagtaaatatttca

SEQ ID NO: 864180 - DNA, 15 bp, Homo sapiens
cagtaaatatttcat

SEQ ID NO: 864181 - DNA, 15 bp, Homo sapiens
agtaaatatttcatg

SEQ ID NO: 864182 - DNA, 15 bp, Homo sapiens
gtaaatatttcatga

SEQ ID NO: 864183 - DNA, 15 bp, Homo sapiens
taaatatttcatgag

SEQ ID NO: 864184 - DNA, 15 bp, Homo sapiens
aaatatttcatgagt

SEQ ID NO: 864185 - DNA, 15 bp, Homo sapiens
aatatttcatgagta

SEQ ID NO: 864186 - DNA, 15 bp, Homo sapiens
atatttcatgagtaa

SEQ ID NO: 864187 - DNA, 15 bp, Homo sapiens
tatttcatgagtaaa

SEQ ID NO: 864188 - DNA, 15 bp, Homo sapiens
atttcatgagtaaaa

SEQ ID NO: 864189 - DNA, 15 bp, Homo sapiens
tttcatgagtaaaag

SEQ ID NO: 864190 - DNA, 15 bp, Homo sapiens
ttcatgagtaaaaga

SEQ ID NO: 864191 - DNA, 15 bp, Homo sapiens
tcatgagtaaaagaa

SEQ ID NO: 864192 - DNA, 15 bp, Homo sapiens
catgagtaaaagaat

SEQ ID NO: 864193 - DNA, 15 bp, Homo sapiens
atgagtaaaagaatg

SEQ ID NO: 864194 - DNA, 15 bp, Homo sapiens
tgagtaaaagaatga

SEQ ID NO: 864195 - DNA, 15 bp, Homo sapiens
gagtaaaagaatgaa

SEQ ID NO: 864196 - DNA, 15 bp, Homo sapiens
agtaaaagaatgaat

SEQ ID NO: 864197 - DNA, 15 bp, Homo sapiens
gtaaaagaatgaata

SEQ ID NO: 864198 - DNA, 15 bp, Homo sapiens
taaaagaatgaataa

SEQ ID NO: 864199 - DNA, 15 bp, Homo sapiens
aaaagaatgaataaa

SEQ ID NO: 864200 - DNA, 15 bp, Homo sapiens
aaagaatgaataaat

SEQ ID NO: 864201 - DNA, 15 bp, Homo sapiens
aagaatgaataaatg

SEQ ID NO: 864202 - DNA, 15 bp, Homo sapiens
agaatgaataaatga

SEQ ID NO: 864203 - DNA, 15 bp, Homo sapiens
gaatgaataaatgaa

SEQ ID NO: 864204 - DNA, 15 bp, Homo sapiens
aatgaataaatgaag

SEQ ID NO: 864205 - DNA, 15 bp, Homo sapiens
atgaataaatgaagg

SEQ ID NO: 864206 - DNA, 15 bp, Homo sapiens
tgaataaatgaaggg

SEQ ID NO: 864207 - DNA, 15 bp, Homo sapiens
gaataaatgaagggc

SEQ ID NO: 864208 - DNA, 15 bp, Homo sapiens
aataaatgaagggct

SEQ ID NO: 864209 - DNA, 15 bp, Homo sapiens
ataaatgaagggctt

SEQ ID NO: 864210 - DNA, 15 bp, Homo sapiens
taaatgaagggcttc

SEQ ID NO: 864211 - DNA, 15 bp, Homo sapiens
aaatgaagggcttcc

SEQ ID NO: 864212 - DNA, 15 bp, Homo sapiens
aatgaagggcttccc

SEQ ID NO: 864213 - DNA, 15 bp, Homo sapiens
atgaagggcttccca

SEQ ID NO: 864214 - DNA, 15 bp, Homo sapiens
tgaagggcttcccaa

SEQ ID NO: 864215 - DNA, 15 bp, Homo sapiens
gaagggcttcccaac

SEQ ID NO: 864216 - DNA, 15 bp, Homo sapiens
aagggcttcccaacc

SEQ ID NO: 864217 - DNA, 15 bp, Homo sapiens
agggcttcccaaccc

SEQ ID NO: 864218 - DNA, 15 bp, Homo sapiens
gggcttcccaaccct

SEQ ID NO: 864219 - DNA, 15 bp, Homo sapiens
ggcttcccaaccctt

SEQ ID NO: 864220 - DNA, 15 bp, Homo sapiens
gcttcccaaccctta

SEQ ID NO: 864221 - DNA, 15 bp, Homo sapiens
cttcccaacccttaa

SEQ ID NO: 864222 - DNA, 15 bp, Homo sapiens
ttcccaacccttaaa

SEQ ID NO: 864223 - DNA, 15 bp, Homo sapiens
tcccaacccttaaag

SEQ ID NO: 864224 - DNA, 15 bp, Homo sapiens
cccaacccttaaagg

SEQ ID NO: 864225 - DNA, 15 bp, Homo sapiens
ccaacccttaaagga

SEQ ID NO: 864226 - DNA, 15 bp, Homo sapiens
caacccttaaaggaa

SEQ ID NO: 864227 - DNA, 15 bp, Homo sapiens
aacccttaaaggaat

SEQ ID NO: 864228 - DNA, 15 bp, Homo sapiens
acccttaaaggaatt

SEQ ID NO: 864229 - DNA, 15 bp, Homo sapiens
cccttaaaggaattg

SEQ ID NO: 864230 - DNA, 15 bp, Homo sapiens
ccttaaaggaattgg

SEQ ID NO: 864231 - DNA, 15 bp, Homo sapiens
cttaaaggaattggt

SEQ ID NO: 864232 - DNA, 15 bp, Homo sapiens
ttaaaggaattggtg

SEQ ID NO: 864233 - DNA, 15 bp, Homo sapiens
taaaggaattggtga

SEQ ID NO: 864234 - DNA, 15 bp, Homo sapiens
aaaggaattggtgat

SEQ ID NO: 864235 - DNA, 15 bp, Homo sapiens
aaggaattggtgatg

SEQ ID NO: 864236 - DNA, 15 bp, Homo sapiens
aggaattggtgatgt

SEQ ID NO: 864237 - DNA, 15 bp, Homo sapiens
ggaattggtgatgtg

SEQ ID NO: 864238 - DNA, 15 bp, Homo sapiens
gaattggtgatgtgc

SEQ ID NO: 864239 - DNA, 15 bp, Homo sapiens
aattggtgatgtgct

SEQ ID NO: 864240 - DNA, 15 bp, Homo sapiens
attggtgatgtgcta

SEQ ID NO: 864241 - DNA, 15 bp, Homo sapiens
ttggtgatgtgctag

SEQ ID NO: 864242 - DNA, 15 bp, Homo sapiens
tggtgatgtgctaga

SEQ ID NO: 864243 - DNA, 15 bp, Homo sapiens
ggtgatgtgctagaa

SEQ ID NO: 864244 - DNA, 15 bp, Homo sapiens
gtgatgtgctagaag

SEQ ID NO: 864245 - DNA, 15 bp, Homo sapiens
tgatgtgctagaagc

SEQ ID NO: 864246 - DNA, 15 bp, Homo sapiens
gatgtgctagaagcc

SEQ ID NO: 864247 - DNA, 15 bp, Homo sapiens
atgtgctagaagcca

SEQ ID NO: 864248 - DNA, 15 bp, Homo sapiens
tgtgctagaagccag

SEQ ID NO: 864249 - DNA, 15 bp, Homo sapiens
gtgctagaagccaga

SEQ ID NO: 864250 - DNA, 15 bp, Homo sapiens
tgctagaagccagat

SEQ ID NO: 864251 - DNA, 15 bp, Homo sapiens
gctagaagccagatc

SEQ ID NO: 864252 - DNA, 15 bp, Homo sapiens
ctagaagccagatcg

SEQ ID NO: 864253 - DNA, 15 bp, Homo sapiens
tagaagccagatcgc

SEQ ID NO: 864254 - DNA, 15 bp, Homo sapiens
agaagccagatcgcc

SEQ ID NO: 864255 - DNA, 15 bp, Homo sapiens
gaagccagatcgccc

SEQ ID NO: 864256 - DNA, 15 bp, Homo sapiens
aagccagatcgccct

SEQ ID NO: 864257 - DNA, 15 bp, Homo sapiens
agccagatcgcccta

SEQ ID NO: 864258 - DNA, 15 bp, Homo sapiens
gccagatcgccctag

SEQ ID NO: 864259 - DNA, 15 bp, Homo sapiens
ccagatcgccctaga

SEQ ID NO: 864260 - DNA, 15 bp, Homo sapiens
cagatcgccctagat

SEQ ID NO: 864261 - DNA, 15 bp, Homo sapiens
agatcgccctagatc

SEQ ID NO: 864262 - DNA, 15 bp, Homo sapiens
gatcgccctagatcc

SEQ ID NO: 864263 - DNA, 15 bp, Homo sapiens
atcgccctagatcca

SEQ ID NO: 864264 - DNA, 15 bp, Homo sapiens
tcgccctagatccat

SEQ ID NO: 864265 - DNA, 15 bp, Homo sapiens
cgccctagatccatg

SEQ ID NO: 864266 - DNA, 15 bp, Homo sapiens
gccctagatccatga

SEQ ID NO: 864267 - DNA, 15 bp, Homo sapiens
ccctagatccatgaa

SEQ ID NO: 864268 - DNA, 15 bp, Homo sapiens
cctagatccatgaag

SEQ ID NO: 864269 - DNA, 15 bp, Homo sapiens
ctagatccatgaagc

SEQ ID NO: 864270 - DNA, 15 bp, Homo sapiens
tagatccatgaagct

SEQ ID NO: 864271 - DNA, 15 bp, Homo sapiens
agatccatgaagctt

SEQ ID NO: 864272 - DNA, 15 bp, Homo sapiens
gatccatgaagcttc

SEQ ID NO: 864273 - DNA, 15 bp, Homo sapiens
atccatgaagcttcc

SEQ ID NO: 864274 - DNA, 15 bp, Homo sapiens
tccatgaagcttccc

SEQ ID NO: 864275 - DNA, 15 bp, Homo sapiens
ccatgaagcttccca

SEQ ID NO: 864276 - DNA, 15 bp, Homo sapiens
catgaagcttcccaa

SEQ ID NO: 864277 - DNA, 15 bp, Homo sapiens
atgaagcttcccaaa

SEQ ID NO: 864278 - DNA, 15 bp, Homo sapiens
tgaagcttcccaaaa

SEQ ID NO: 864279 - DNA, 15 bp, Homo sapiens
gaagcttcccaaaac

SEQ ID NO: 864280 - DNA, 15 bp, Homo sapiens
aagcttcccaaaact

SEQ ID NO: 864281 - DNA, 15 bp, Homo sapiens
agcttcccaaaactt

SEQ ID NO: 864282 - DNA, 15 bp, Homo sapiens
gcttcccaaaacttt

SEQ ID NO: 864283 - DNA, 15 bp, Homo sapiens
cttcccaaaactttc

SEQ ID NO: 864284 - DNA, 15 bp, Homo sapiens
ttcccaaaactttct

SEQ ID NO: 864285 - DNA, 15 bp, Homo sapiens
tcccaaaactttcta

SEQ ID NO: 864286 - DNA, 15 bp, Homo sapiens
cccaaaactttctaa

SEQ ID NO: 864287 - DNA, 15 bp, Homo sapiens
ccaaaactttctaag

SEQ ID NO: 864288 - DNA, 15 bp, Homo sapiens
caaaactttctaagc

SEQ ID NO: 864289 - DNA, 15 bp, Homo sapiens
aaaactttctaagca

SEQ ID NO: 864290 - DNA, 15 bp, Homo sapiens
aaactttctaagcag

SEQ ID NO: 864291 - DNA, 15 bp, Homo sapiens
aactttctaagcagc

SEQ ID NO: 864292 - DNA, 15 bp, Homo sapiens
actttctaagcagca

SEQ ID NO: 864293 - DNA, 15 bp, Homo sapiens
ctttctaagcagcaa

SEQ ID NO: 864294 - DNA, 15 bp, Homo sapiens
tttctaagcagcaac

SEQ ID NO: 864295 - DNA, 15 bp, Homo sapiens
ttctaagcagcaact

SEQ ID NO: 864296 - DNA, 15 bp, Homo sapiens
tctaagcagcaactt

SEQ ID NO: 864297 - DNA, 15 bp, Homo sapiens
ctaagcagcaactta

SEQ ID NO: 864298 - DNA, 15 bp, Homo sapiens
taagcagcaacttac

SEQ ID NO: 864299 - DNA, 15 bp, Homo sapiens
aagcagcaacttact

SEQ ID NO: 864300 - DNA, 15 bp, Homo sapiens
agcagcaacttacta

SEQ ID NO: 864301 - DNA, 15 bp, Homo sapiens
gcagcaacttactat

SEQ ID NO: 864302 - DNA, 15 bp, Homo sapiens
cagcaacttactata

SEQ ID NO: 864303 - DNA, 15 bp, Homo sapiens
agcaacttactatat

SEQ ID NO: 864304 - DNA, 15 bp, Homo sapiens
gcaacttactatata

SEQ ID NO: 864305 - DNA, 15 bp, Homo sapiens
caacttactatatag

SEQ ID NO: 864306 - DNA, 15 bp, Homo sapiens
aacttactatatagt

SEQ ID NO: 864307 - DNA, 15 bp, Homo sapiens
acttactatatagta

SEQ ID NO: 864308 - DNA, 15 bp, Homo sapiens
cttactatatagtat

SEQ ID NO: 864309 - DNA, 15 bp, Homo sapiens
ttactatatagtata

SEQ ID NO: 864310 - DNA, 15 bp, Homo sapiens
tactatatagtatat

SEQ ID NO: 864311 - DNA, 15 bp, Homo sapiens
actatatagtatata

SEQ ID NO: 864312 - DNA, 15 bp, Homo sapiens
ctatatagtatatat

SEQ ID NO: 864313 - DNA, 15 bp, Homo sapiens
tatatagtatatata

SEQ ID NO: 864314 - DNA, 15 bp, Homo sapiens
atatagtatatatat

SEQ ID NO: 864315 - DNA, 15 bp, Homo sapiens
tatagtatatatatg

SEQ ID NO: 864316 - DNA, 15 bp, Homo sapiens
atagtatatatatgt

SEQ ID NO: 864317 - DNA, 15 bp, Homo sapiens
tagtatatatatgta

SEQ ID NO: 864318 - DNA, 15 bp, Homo sapiens
agtatatatatgtaa

SEQ ID NO: 864319 - DNA, 15 bp, Homo sapiens
gtatatatatgtaaa

SEQ ID NO: 864320 - DNA, 15 bp, Homo sapiens
tatatatatgtaaac

SEQ ID NO: 864321 - DNA, 15 bp, Homo sapiens
atatatatgtaaaca

SEQ ID NO: 864322 - DNA, 15 bp, Homo sapiens
tatatatgtaaacat

SEQ ID NO: 864323 - DNA, 15 bp, Homo sapiens
atatatgtaaacata

SEQ ID NO: 864324 - DNA, 15 bp, Homo sapiens
tatatgtaaacataa

SEQ ID NO: 864325 - DNA, 15 bp, Homo sapiens
atatgtaaacataaa

SEQ ID NO: 864326 - DNA, 15 bp, Homo sapiens
tatgtaaacataaaa

SEQ ID NO: 864327 - DNA, 15 bp, Homo sapiens
atgtaaacataaaaa

SEQ ID NO: 864328 - DNA, 15 bp, Homo sapiens
tgtaaacataaaaaa

SEQ ID NO: 864329 - DNA, 15 bp, Homo sapiens
gtaaacataaaaaac

SEQ ID NO: 864330 - DNA, 15 bp, Homo sapiens
taaacataaaaaact

SEQ ID NO: 864331 - DNA, 15 bp, Homo sapiens
aaacataaaaaactg

SEQ ID NO: 864332 - DNA, 15 bp, Homo sapiens
aacataaaaaactgg

SEQ ID NO: 864333 - DNA, 15 bp, Homo sapiens
acataaaaaactggg

SEQ ID NO: 864334 - DNA, 15 bp, Homo sapiens
cataaaaaactggga

SEQ ID NO: 864335 - DNA, 15 bp, Homo sapiens
ataaaaaactgggat

SEQ ID NO: 864336 - DNA, 15 bp, Homo sapiens
taaaaaactgggatg

SEQ ID NO: 864337 - DNA, 15 bp, Homo sapiens
aaaaaactgggatgt

SEQ ID NO: 864338 - DNA, 15 bp, Homo sapiens
aaaaactgggatgta

SEQ ID NO: 864339 - DNA, 15 bp, Homo sapiens
aaaactgggatgtac

SEQ ID NO: 864340 - DNA, 15 bp, Homo sapiens
aaactgggatgtaca

SEQ ID NO: 864341 - DNA, 15 bp, Homo sapiens
aactgggatgtacaa

SEQ ID NO: 864342 - DNA, 15 bp, Homo sapiens
actgggatgtacaag

SEQ ID NO: 864343 - DNA, 15 bp, Homo sapiens
ctgggatgtacaaga

SEQ ID NO: 864344 - DNA, 15 bp, Homo sapiens
tgggatgtacaagaa

SEQ ID NO: 864345 - DNA, 15 bp, Homo sapiens
gggatgtacaagaag

SEQ ID NO: 864346 - DNA, 15 bp, Homo sapiens
ggatgtacaagaaga

SEQ ID NO: 864347 - DNA, 15 bp, Homo sapiens
gatgtacaagaagag

SEQ ID NO: 864348 - DNA, 15 bp, Homo sapiens
atgtacaagaagagt

SEQ ID NO: 864349 - DNA, 15 bp, Homo sapiens
tgtacaagaagagta

SEQ ID NO: 864350 - DNA, 15 bp, Homo sapiens
gtacaagaagagtaa

SEQ ID NO: 864351 - DNA, 15 bp, Homo sapiens
tacaagaagagtaag

SEQ ID NO: 864352 - DNA, 15 bp, Homo sapiens
acaagaagagtaaga

SEQ ID NO: 864353 - DNA, 15 bp, Homo sapiens
caagaagagtaagag

SEQ ID NO: 864354 - DNA, 15 bp, Homo sapiens
aagaagagtaagagg

SEQ ID NO: 864355 - DNA, 15 bp, Homo sapiens
agaagagtaagaggg

SEQ ID NO: 864356 - DNA, 15 bp, Homo sapiens
gaagagtaagaggga

SEQ ID NO: 864357 - DNA, 15 bp, Homo sapiens
aagagtaagagggaa

SEQ ID NO: 864358 - DNA, 15 bp, Homo sapiens
agagtaagagggaaa

SEQ ID NO: 864359 - DNA, 15 bp, Homo sapiens
gagtaagagggaaaa

SEQ ID NO: 864360 - DNA, 15 bp, Homo sapiens
agtaagagggaaaaa

SEQ ID NO: 864361 - DNA, 15 bp, Homo sapiens
gtaagagggaaaaat

SEQ ID NO: 864362 - DNA, 15 bp, Homo sapiens
taagagggaaaaatg

SEQ ID NO: 864363 - DNA, 15 bp, Homo sapiens
aagagggaaaaatgt

SEQ ID NO: 864364 - DNA, 15 bp, Homo sapiens
agagggaaaaatgta

SEQ ID NO: 864365 - DNA, 15 bp, Homo sapiens
gagggaaaaatgtag

SEQ ID NO: 864366 - DNA, 15 bp, Homo sapiens
agggaaaaatgtagt

SEQ ID NO: 864367 - DNA, 15 bp, Homo sapiens
gggaaaaatgtagta

SEQ ID NO: 864368 - DNA, 15 bp, Homo sapiens
ggaaaaatgtagtaa

SEQ ID NO: 864369 - DNA, 15 bp, Homo sapiens
gaaaaatgtagtaag

SEQ ID NO: 864370 - DNA, 15 bp, Homo sapiens
aaaaatgtagtaaga

SEQ ID NO: 864371 - DNA, 15 bp, Homo sapiens
aaaatgtagtaagaa

SEQ ID NO: 864372 - DNA, 15 bp, Homo sapiens
aaatgtagtaagaaa

SEQ ID NO: 864373 - DNA, 15 bp, Homo sapiens
aatgtagtaagaaag

SEQ ID NO: 864374 - DNA, 15 bp, Homo sapiens
atgtagtaagaaaga

SEQ ID NO: 864375 - DNA, 15 bp, Homo sapiens
tgtagtaagaaagaa

SEQ ID NO: 864376 - DNA, 15 bp, Homo sapiens
gtagtaagaaagaac

SEQ ID NO: 864377 - DNA, 15 bp, Homo sapiens
tagtaagaaagaaca

SEQ ID NO: 864378 - DNA, 15 bp, Homo sapiens
agtaagaaagaacaa

SEQ ID NO: 864379 - DNA, 15 bp, Homo sapiens
gtaagaaagaacaag

SEQ ID NO: 864380 - DNA, 15 bp, Homo sapiens
taagaaagaacaagg

SEQ ID NO: 864381 - DNA, 15 bp, Homo sapiens
aagaaagaacaagga

SEQ ID NO: 864382 - DNA, 15 bp, Homo sapiens
agaaagaacaaggac

SEQ ID NO: 864383 - DNA, 15 bp, Homo sapiens
gaaagaacaaggaca

SEQ ID NO: 864384 - DNA, 15 bp, Homo sapiens
aaagaacaaggacat

SEQ ID NO: 864385 - DNA, 15 bp, Homo sapiens
aagaacaaggacatg

SEQ ID NO: 864386 - DNA, 15 bp, Homo sapiens
agaacaaggacatga

SEQ ID NO: 864387 - DNA, 15 bp, Homo sapiens
gaacaaggacatgac

SEQ ID NO: 864388 - DNA, 15 bp, Homo sapiens
aacaaggacatgact

SEQ ID NO: 864389 - DNA, 15 bp, Homo sapiens
acaaggacatgactg

SEQ ID NO: 864390 - DNA, 15 bp, Homo sapiens
caaggacatgactga

SEQ ID NO: 864391 - DNA, 15 bp, Homo sapiens
aaggacatgactgaa

SEQ ID NO: 864392 - DNA, 15 bp, Homo sapiens
aggacatgactgaag

SEQ ID NO: 864393 - DNA, 15 bp, Homo sapiens
ggacatgactgaagg

SEQ ID NO: 864394 - DNA, 15 bp, Homo sapiens
gacatgactgaagga

SEQ ID NO: 864395 - DNA, 15 bp, Homo sapiens
acatgactgaaggaa

SEQ ID NO: 864396 - DNA, 15 bp, Homo sapiens
catgactgaaggaac

SEQ ID NO: 864397 - DNA, 15 bp, Homo sapiens
atgactgaaggaact

SEQ ID NO: 864398 - DNA, 15 bp, Homo sapiens
tgactgaaggaacta

SEQ ID NO: 864399 - DNA, 15 bp, Homo sapiens
gactgaaggaactag

SEQ ID NO: 864400 - DNA, 15 bp, Homo sapiens
actgaaggaactaga

SEQ ID NO: 864401 - DNA, 15 bp, Homo sapiens
ctgaaggaactagaa

SEQ ID NO: 864402 - DNA, 15 bp, Homo sapiens
tgaaggaactagaaa

SEQ ID NO: 864403 - DNA, 15 bp, Homo sapiens
gaaggaactagaaaa

SEQ ID NO: 864404 - DNA, 15 bp, Homo sapiens
aaggaactagaaaat

SEQ ID NO: 864405 - DNA, 15 bp, Homo sapiens
aggaactagaaaatg

SEQ ID NO: 864406 - DNA, 15 bp, Homo sapiens
ggaactagaaaatga

SEQ ID NO: 864407 - DNA, 15 bp, Homo sapiens
gaactagaaaatgat

SEQ ID NO: 864408 - DNA, 15 bp, Homo sapiens
aactagaaaatgatc

SEQ ID NO: 864409 - DNA, 15 bp, Homo sapiens
actagaaaatgatca

SEQ ID NO: 864410 - DNA, 15 bp, Homo sapiens
ctagaaaatgatcaa

SEQ ID NO: 864411 - DNA, 15 bp, Homo sapiens
tagaaaatgatcaaa

SEQ ID NO: 864412 - DNA, 15 bp, Homo sapiens
agaaaatgatcaaat

SEQ ID NO: 864413 - DNA, 15 bp, Homo sapiens
gaaaatgatcaaatg

SEQ ID NO: 864414 - DNA, 15 bp, Homo sapiens
aaaatgatcaaatgg

SEQ ID NO: 864415 - DNA, 15 bp, Homo sapiens
aaatgatcaaatggc

SEQ ID NO: 864416 - DNA, 15 bp, Homo sapiens
aatgatcaaatggca

SEQ ID NO: 864417 - DNA, 15 bp, Homo sapiens
atgatcaaatggcag

SEQ ID NO: 864418 - DNA, 15 bp, Homo sapiens
tgatcaaatggcagg

SEQ ID NO: 864419 - DNA, 15 bp, Homo sapiens
gatcaaatggcaggt

SEQ ID NO: 864420 - DNA, 15 bp, Homo sapiens
atcaaatggcaggtg

SEQ ID NO: 864421 - DNA, 15 bp, Homo sapiens
tcaaatggcaggtgc

SEQ ID NO: 864422 - DNA, 15 bp, Homo sapiens
caaatggcaggtgca

SEQ ID NO: 864423 - DNA, 15 bp, Homo sapiens
aaatggcaggtgcaa

SEQ ID NO: 864424 - DNA, 15 bp, Homo sapiens
aatggcaggtgcaat

SEQ ID NO: 864425 - DNA, 15 bp, Homo sapiens
atggcaggtgcaatt

SEQ ID NO: 864426 - DNA, 15 bp, Homo sapiens
tggcaggtgcaattg

SEQ ID NO: 864427 - DNA, 15 bp, Homo sapiens
ggcaggtgcaattga

SEQ ID NO: 864428 - DNA, 15 bp, Homo sapiens
gcaggtgcaattgat

SEQ ID NO: 864429 - DNA, 15 bp, Homo sapiens
caggtgcaattgata

SEQ ID NO: 864430 - DNA, 15 bp, Homo sapiens
aggtgcaattgatat

SEQ ID NO: 864431 - DNA, 15 bp, Homo sapiens
ggtgcaattgatatt

SEQ ID NO: 864432 - DNA, 15 bp, Homo sapiens
gtgcaattgatattc

SEQ ID NO: 864433 - DNA, 15 bp, Homo sapiens
tgcaattgatattct

SEQ ID NO: 864434 - DNA, 15 bp, Homo sapiens
gcaattgatattctt

SEQ ID NO: 864435 - DNA, 15 bp, Homo sapiens
caattgatattcttt

SEQ ID NO: 864436 - DNA, 15 bp, Homo sapiens
aattgatattctttg

SEQ ID NO: 864437 - DNA, 15 bp, Homo sapiens
attgatattctttgt

SEQ ID NO: 864438 - DNA, 15 bp, Homo sapiens
ttgatattctttgtg

SEQ ID NO: 864439 - DNA, 15 bp, Homo sapiens
tgatattctttgtga

SEQ ID NO: 864440 - DNA, 15 bp, Homo sapiens
gatattctttgtgaa

SEQ ID NO: 864441 - DNA, 15 bp, Homo sapiens
atattctttgtgaag

SEQ ID NO: 864442 - DNA, 15 bp, Homo sapiens
tattctttgtgaagg

SEQ ID NO: 864443 - DNA, 15 bp, Homo sapiens
attctttgtgaagga

SEQ ID NO: 864444 - DNA, 15 bp, Homo sapiens
ttctttgtgaaggat

SEQ ID NO: 864445 - DNA, 15 bp, Homo sapiens
tctttgtgaaggata

SEQ ID NO: 864446 - DNA, 15 bp, Homo sapiens
ctttgtgaaggataa

SEQ ID NO: 864447 - DNA, 15 bp, Homo sapiens
tttgtgaaggataaa

SEQ ID NO: 864448 - DNA, 15 bp, Homo sapiens
ttgtgaaggataaat

SEQ ID NO: 864449 - DNA, 15 bp, Homo sapiens
tgtgaaggataaatt

SEQ ID NO: 864450 - DNA, 15 bp, Homo sapiens
gtgaaggataaatta

SEQ ID NO: 864451 - DNA, 15 bp, Homo sapiens
tgaaggataaattat

SEQ ID NO: 864452 - DNA, 15 bp, Homo sapiens
gaaggataaattatg

SEQ ID NO: 864453 - DNA, 15 bp, Homo sapiens
aaggataaattatgg

SEQ ID NO: 864454 - DNA, 15 bp, Homo sapiens
aggataaattatggg

SEQ ID NO: 864455 - DNA, 15 bp, Homo sapiens
ggataaattatggga

SEQ ID NO: 864456 - DNA, 15 bp, Homo sapiens
gataaattatgggaa

SEQ ID NO: 864457 - DNA, 15 bp, Homo sapiens
ataaattatgggaaa

SEQ ID NO: 864458 - DNA, 15 bp, Homo sapiens
taaattatgggaaag

SEQ ID NO: 864459 - DNA, 15 bp, Homo sapiens
aaattatgggaaaga

SEQ ID NO: 864460 - DNA, 15 bp, Homo sapiens
aattatgggaaagaa

SEQ ID NO: 864461 - DNA, 15 bp, Homo sapiens
attatgggaaagaag

SEQ ID NO: 864462 - DNA, 15 bp, Homo sapiens
ttatgggaaagaaga

SEQ ID NO: 864463 - DNA, 15 bp, Homo sapiens
tatgggaaagaagat

SEQ ID NO: 864464 - DNA, 15 bp, Homo sapiens
atgggaaagaagatc

SEQ ID NO: 864465 - DNA, 15 bp, Homo sapiens
tgggaaagaagatct

SEQ ID NO: 864466 - DNA, 15 bp, Homo sapiens
gggaaagaagatctg

SEQ ID NO: 864467 - DNA, 15 bp, Homo sapiens
ggaaagaagatctgg

SEQ ID NO: 864468 - DNA, 15 bp, Homo sapiens
gaaagaagatctgga

SEQ ID NO: 864469 - DNA, 15 bp, Homo sapiens
aaagaagatctggaa

SEQ ID NO: 864470 - DNA, 15 bp, Homo sapiens
aagaagatctggaaa

SEQ ID NO: 864471 - DNA, 15 bp, Homo sapiens
agaagatctggaaac

SEQ ID NO: 864472 - DNA, 15 bp, Homo sapiens
gaagatctggaaaca

SEQ ID NO: 864473 - DNA, 15 bp, Homo sapiens
aagatctggaaacaa

SEQ ID NO: 864474 - DNA, 15 bp, Homo sapiens
agatctggaaacaaa

SEQ ID NO: 864475 - DNA, 15 bp, Homo sapiens
gatctggaaacaaag

SEQ ID NO: 864476 - DNA, 15 bp, Homo sapiens
atctggaaacaaagt

SEQ ID NO: 864477 - DNA, 15 bp, Homo sapiens
tctggaaacaaagta

SEQ ID NO: 864478 - DNA, 15 bp, Homo sapiens
ctggaaacaaagtac

SEQ ID NO: 864479 - DNA, 15 bp, Homo sapiens
tggaaacaaagtacc

SEQ ID NO: 864480 - DNA, 15 bp, Homo sapiens
ggaaacaaagtacca

SEQ ID NO: 864481 - DNA, 15 bp, Homo sapiens
gaaacaaagtaccag

SEQ ID NO: 864482 - DNA, 15 bp, Homo sapiens
aaacaaagtaccaga

SEQ ID NO: 864483 - DNA, 15 bp, Homo sapiens
aacaaagtaccagaa

SEQ ID NO: 864484 - DNA, 15 bp, Homo sapiens
acaaagtaccagaaa

SEQ ID NO: 864485 - DNA, 15 bp, Homo sapiens
caaagtaccagaaaa

SEQ ID NO: 864486 - DNA, 15 bp, Homo sapiens
aaagtaccagaaaaa

SEQ ID NO: 864487 - DNA, 15 bp, Homo sapiens
aagtaccagaaaaaa

SEQ ID NO: 864488 - DNA, 15 bp, Homo sapiens
agtaccagaaaaaac

SEQ ID NO: 864489 - DNA, 15 bp, Homo sapiens
gtaccagaaaaaacc

SEQ ID NO: 864490 - DNA, 15 bp, Homo sapiens
taccagaaaaaacca

SEQ ID NO: 864491 - DNA, 15 bp, Homo sapiens
accagaaaaaaccac

SEQ ID NO: 864492 - DNA, 15 bp, Homo sapiens
ccagaaaaaaccaca

SEQ ID NO: 864493 - DNA, 15 bp, Homo sapiens
cagaaaaaaccacat

SEQ ID NO: 864494 - DNA, 15 bp, Homo sapiens
agaaaaaaccacata

SEQ ID NO: 864495 - DNA, 15 bp, Homo sapiens
gaaaaaaccacatag

SEQ ID NO: 864496 - DNA, 15 bp, Homo sapiens
aaaaaaccacatagg

SEQ ID NO: 864497 - DNA, 15 bp, Homo sapiens
aaaaaccacataggc

SEQ ID NO: 864498 - DNA, 15 bp, Homo sapiens
aaaaccacataggca

SEQ ID NO: 864499 - DNA, 15 bp, Homo sapiens
aaaccacataggcaa

SEQ ID NO: 864500 - DNA, 15 bp, Homo sapiens
aaccacataggcaaa

SEQ ID NO: 864501 - DNA, 15 bp, Homo sapiens
accacataggcaaaa

SEQ ID NO: 864502 - DNA, 15 bp, Homo sapiens
ccacataggcaaaaa

SEQ ID NO: 864503 - DNA, 15 bp, Homo sapiens
cacataggcaaaaat

SEQ ID NO: 864504 - DNA, 15 bp, Homo sapiens
acataggcaaaaatc

SEQ ID NO: 864505 - DNA, 15 bp, Homo sapiens
cataggcaaaaatcc

SEQ ID NO: 864506 - DNA, 15 bp, Homo sapiens
ataggcaaaaatcca

SEQ ID NO: 864507 - DNA, 15 bp, Homo sapiens
taggcaaaaatccac

SEQ ID NO: 864508 - DNA, 15 bp, Homo sapiens
aggcaaaaatccacc

SEQ ID NO: 864509 - DNA, 15 bp, Homo sapiens
ggcaaaaatccacca

SEQ ID NO: 864510 - DNA, 15 bp, Homo sapiens
gcaaaaatccaccaa

SEQ ID NO: 864511 - DNA, 15 bp, Homo sapiens
caaaaatccaccaat

SEQ ID NO: 864512 - DNA, 15 bp, Homo sapiens
aaaaatccaccaatg

SEQ ID NO: 864513 - DNA, 15 bp, Homo sapiens
aaaatccaccaatgc

SEQ ID NO: 864514 - DNA, 15 bp, Homo sapiens
aaatccaccaatgct

SEQ ID NO: 864515 - DNA, 15 bp, Homo sapiens
aatccaccaatgctt

SEQ ID NO: 864516 - DNA, 15 bp, Homo sapiens
atccaccaatgcttc

SEQ ID NO: 864517 - DNA, 15 bp, Homo sapiens
tccaccaatgcttcc

SEQ ID NO: 864518 - DNA, 15 bp, Homo sapiens
ccaccaatgcttcca

SEQ ID NO: 864519 - DNA, 15 bp, Homo sapiens
caccaatgcttccaa

SEQ ID NO: 864520 - DNA, 15 bp, Homo sapiens
accaatgcttccaat

SEQ ID NO: 864521 - DNA, 15 bp, Homo sapiens
ccaatgcttccaatg

SEQ ID NO: 864522 - DNA, 15 bp, Homo sapiens
caatgcttccaatga

SEQ ID NO: 864523 - DNA, 15 bp, Homo sapiens
aatgcttccaatgag

SEQ ID NO: 864524 - DNA, 15 bp, Homo sapiens
atgcttccaatgagg

SEQ ID NO: 864525 - DNA, 15 bp, Homo sapiens
tgcttccaatgagga

SEQ ID NO: 864526 - DNA, 15 bp, Homo sapiens
gcttccaatgaggag

SEQ ID NO: 864527 - DNA, 15 bp, Homo sapiens
cttccaatgaggagt

SEQ ID NO: 864528 - DNA, 15 bp, Homo sapiens
ttccaatgaggagtg

SEQ ID NO: 864529 - DNA, 15 bp, Homo sapiens
tccaatgaggagtgg

SEQ ID NO: 864530 - DNA, 15 bp, Homo sapiens
ccaatgaggagtggc

SEQ ID NO: 864531 - DNA, 15 bp, Homo sapiens
caatgaggagtggca

SEQ ID NO: 864532 - DNA, 15 bp, Homo sapiens
aatgaggagtggcag

SEQ ID NO: 864533 - DNA, 15 bp, Homo sapiens
atgaggagtggcagg

SEQ ID NO: 864534 - DNA, 15 bp, Homo sapiens
tgaggagtggcaggg

SEQ ID NO: 864535 - DNA, 15 bp, Homo sapiens
gaggagtggcagggt

SEQ ID NO: 864536 - DNA, 15 bp, Homo sapiens
aggagtggcagggtt

SEQ ID NO: 864537 - DNA, 15 bp, Homo sapiens
ggagtggcagggtta

SEQ ID NO: 864538 - DNA, 15 bp, Homo sapiens
gagtggcagggttac

SEQ ID NO: 864539 - DNA, 15 bp, Homo sapiens
agtggcagggttact

SEQ ID NO: 864540 - DNA, 15 bp, Homo sapiens
gtggcagggttacta

SEQ ID NO: 864541 - DNA, 15 bp, Homo sapiens
tggcagggttactac

SEQ ID NO: 864542 - DNA, 15 bp, Homo sapiens
ggcagggttactacc

SEQ ID NO: 864543 - DNA, 15 bp, Homo sapiens
gcagggttactacca

SEQ ID NO: 864544 - DNA, 15 bp, Homo sapiens
cagggttactaccac

SEQ ID NO: 864545 - DNA, 15 bp, Homo sapiens
agggttactaccaca

SEQ ID NO: 864546 - DNA, 15 bp, Homo sapiens
gggttactaccacat

SEQ ID NO: 864547 - DNA, 15 bp, Homo sapiens
ggttactaccacata

SEQ ID NO: 864548 - DNA, 15 bp, Homo sapiens
gttactaccacatat

SEQ ID NO: 864549 - DNA, 15 bp, Homo sapiens
ttactaccacatata

SEQ ID NO: 864550 - DNA, 15 bp, Homo sapiens
tactaccacatatag

SEQ ID NO: 864551 - DNA, 15 bp, Homo sapiens
actaccacatataga

SEQ ID NO: 864552 - DNA, 15 bp, Homo sapiens
ctaccacatatagag

SEQ ID NO: 864553 - DNA, 15 bp, Homo sapiens
taccacatatagagc

SEQ ID NO: 864554 - DNA, 15 bp, Homo sapiens
accacatatagagca

SEQ ID NO: 864555 - DNA, 15 bp, Homo sapiens
ccacatatagagcat

SEQ ID NO: 864556 - DNA, 15 bp, Homo sapiens
cacatatagagcatt

SEQ ID NO: 864557 - DNA, 15 bp, Homo sapiens
acatatagagcattt

SEQ ID NO: 864558 - DNA, 15 bp, Homo sapiens
catatagagcatttg

SEQ ID NO: 864559 - DNA, 15 bp, Homo sapiens
atatagagcatttgc

SEQ ID NO: 864560 - DNA, 15 bp, Homo sapiens
tatagagcatttgct

SEQ ID NO: 864561 - DNA, 15 bp, Homo sapiens
atagagcatttgctc

SEQ ID NO: 864562 - DNA, 15 bp, Homo sapiens
tagagcatttgctct

SEQ ID NO: 864563 - DNA, 15 bp, Homo sapiens
agagcatttgctctg

SEQ ID NO: 864564 - DNA, 15 bp, Homo sapiens
gagcatttgctctgg

SEQ ID NO: 864565 - DNA, 15 bp, Homo sapiens
agcatttgctctgga

SEQ ID NO: 864566 - DNA, 15 bp, Homo sapiens
gcatttgctctggaa

SEQ ID NO: 864567 - DNA, 15 bp, Homo sapiens
catttgctctggaaa

SEQ ID NO: 864568 - DNA, 15 bp, Homo sapiens
atttgctctggaaaa

SEQ ID NO: 864569 - DNA, 15 bp, Homo sapiens
tttgctctggaaaat

SEQ ID NO: 864570 - DNA, 15 bp, Homo sapiens
ttgctctggaaaatc

SEQ ID NO: 864571 - DNA, 15 bp, Homo sapiens
tgctctggaaaatca

SEQ ID NO: 864572 - DNA, 15 bp, Homo sapiens
gctctggaaaatcaa

SEQ ID NO: 864573 - DNA, 15 bp, Homo sapiens
ctctggaaaatcaag

SEQ ID NO: 864574 - DNA, 15 bp, Homo sapiens
tctggaaaatcaagg

SEQ ID NO: 864575 - DNA, 15 bp, Homo sapiens
ctggaaaatcaagga

SEQ ID NO: 864576 - DNA, 15 bp, Homo sapiens
tggaaaatcaaggac

SEQ ID NO: 864577 - DNA, 15 bp, Homo sapiens
ggaaaatcaaggact

SEQ ID NO: 864578 - DNA, 15 bp, Homo sapiens
gaaaatcaaggactt

SEQ ID NO: 864579 - DNA, 15 bp, Homo sapiens
aaaatcaaggacttg

SEQ ID NO: 864580 - DNA, 15 bp, Homo sapiens
aaatcaaggacttgt

SEQ ID NO: 864581 - DNA, 15 bp, Homo sapiens
aatcaaggacttgtg

SEQ ID NO: 864582 - DNA, 15 bp, Homo sapiens
atcaaggacttgtga

SEQ ID NO: 864583 - DNA, 15 bp, Homo sapiens
tcaaggacttgtgac

SEQ ID NO: 864584 - DNA, 15 bp, Homo sapiens
caaggacttgtgaca

SEQ ID NO: 864585 - DNA, 15 bp, Homo sapiens
aaggacttgtgacat

SEQ ID NO: 864586 - DNA, 15 bp, Homo sapiens
aggacttgtgacatt

SEQ ID NO: 864587 - DNA, 15 bp, Homo sapiens
ggacttgtgacattc

SEQ ID NO: 864588 - DNA, 15 bp, Homo sapiens
gacttgtgacattca

SEQ ID NO: 864589 - DNA, 15 bp, Homo sapiens
acttgtgacattcac

SEQ ID NO: 864590 - DNA, 15 bp, Homo sapiens
cttgtgacattcaca

SEQ ID NO: 864591 - DNA, 15 bp, Homo sapiens
ttgtgacattcacat

SEQ ID NO: 864592 - DNA, 15 bp, Homo sapiens
tgtgacattcacatt

SEQ ID NO: 864593 - DNA, 15 bp, Homo sapiens
gtgacattcacattc

SEQ ID NO: 864594 - DNA, 15 bp, Homo sapiens
tgacattcacattca

SEQ ID NO: 864595 - DNA, 15 bp, Homo sapiens
gacattcacattcag

SEQ ID NO: 864596 - DNA, 15 bp, Homo sapiens
acattcacattcagt

SEQ ID NO: 864597 - DNA, 15 bp, Homo sapiens
cattcacattcagtt

SEQ ID NO: 864598 - DNA, 15 bp, Homo sapiens
attcacattcagttt

SEQ ID NO: 864599 - DNA, 15 bp, Homo sapiens
ttcacattcagtttt

SEQ ID NO: 864600 - DNA, 15 bp, Homo sapiens
tcacattcagtttta

SEQ ID NO: 864601 - DNA, 15 bp, Homo sapiens
cacattcagttttat

SEQ ID NO: 864602 - DNA, 15 bp, Homo sapiens
acattcagttttatt

SEQ ID NO: 864603 - DNA, 15 bp, Homo sapiens
cattcagttttatta

SEQ ID NO: 864604 - DNA, 15 bp, Homo sapiens
attcagttttattaa

SEQ ID NO: 864605 - DNA, 15 bp, Homo sapiens
ttcagttttattaat

SEQ ID NO: 864606 - DNA, 15 bp, Homo sapiens
tcagttttattaatt

SEQ ID NO: 864607 - DNA, 15 bp, Homo sapiens
cagttttattaattt

SEQ ID NO: 864608 - DNA, 15 bp, Homo sapiens
agttttattaatttc

SEQ ID NO: 864609 - DNA, 15 bp, Homo sapiens
gttttattaatttca

SEQ ID NO: 864610 - DNA, 15 bp, Homo sapiens
ttttattaatttcag

SEQ ID NO: 864611 - DNA, 15 bp, Homo sapiens
tttattaatttcagc

SEQ ID NO: 864612 - DNA, 15 bp, Homo sapiens
ttattaatttcagca

SEQ ID NO: 864613 - DNA, 15 bp, Homo sapiens
tattaatttcagcaa

SEQ ID NO: 864614 - DNA, 15 bp, Homo sapiens
attaatttcagcaaa

SEQ ID NO: 864615 - DNA, 15 bp, Homo sapiens
ttaatttcagcaaac

SEQ ID NO: 864616 - DNA, 15 bp, Homo sapiens
taatttcagcaaacc

SEQ ID NO: 864617 - DNA, 15 bp, Homo sapiens
aatttcagcaaacct

SEQ ID NO: 864618 - DNA, 15 bp, Homo sapiens
atttcagcaaacctg

SEQ ID NO: 864619 - DNA, 15 bp, Homo sapiens
tttcagcaaacctga

SEQ ID NO: 864620 - DNA, 15 bp, Homo sapiens
ttcagcaaacctgat

SEQ ID NO: 864621 - DNA, 15 bp, Homo sapiens
tcagcaaacctgatt

SEQ ID NO: 864622 - DNA, 15 bp, Homo sapiens
cagcaaacctgatta

SEQ ID NO: 864623 - DNA, 15 bp, Homo sapiens
agcaaacctgattat

SEQ ID NO: 864624 - DNA, 15 bp, Homo sapiens
gcaaacctgattatt

SEQ ID NO: 864625 - DNA, 15 bp, Homo sapiens
caaacctgattattt

SEQ ID NO: 864626 - DNA, 15 bp, Homo sapiens
aaacctgattatttt

SEQ ID NO: 864627 - DNA, 15 bp, Homo sapiens
aacctgattattttg

SEQ ID NO: 864628 - DNA, 15 bp, Homo sapiens
acctgattattttgg

SEQ ID NO: 864629 - DNA, 15 bp, Homo sapiens
cctgattattttggt

SEQ ID NO: 864630 - DNA, 15 bp, Homo sapiens
ctgattattttggtg

SEQ ID NO: 864631 - DNA, 15 bp, Homo sapiens
tgattattttggtgt

SEQ ID NO: 864632 - DNA, 15 bp, Homo sapiens
gattattttggtgtg

SEQ ID NO: 864633 - DNA, 15 bp, Homo sapiens
attattttggtgtga

SEQ ID NO: 864634 - DNA, 15 bp, Homo sapiens
ttattttggtgtgag

SEQ ID NO: 864635 - DNA, 15 bp, Homo sapiens
tattttggtgtgagt

SEQ ID NO: 864636 - DNA, 15 bp, Homo sapiens
attttggtgtgagtc

SEQ ID NO: 864637 - DNA, 15 bp, Homo sapiens
ttttggtgtgagtca

SEQ ID NO: 864638 - DNA, 15 bp, Homo sapiens
tttggtgtgagtcag

SEQ ID NO: 864639 - DNA, 15 bp, Homo sapiens
ttggtgtgagtcagg

SEQ ID NO: 864640 - DNA, 15 bp, Homo sapiens
tggtgtgagtcaggg

SEQ ID NO: 864641 - DNA, 15 bp, Homo sapiens
ggtgtgagtcagggc

SEQ ID NO: 864642 - DNA, 15 bp, Homo sapiens
gtgtgagtcagggca

SEQ ID NO: 864643 - DNA, 15 bp, Homo sapiens
tgtgagtcagggcag

SEQ ID NO: 864644 - DNA, 15 bp, Homo sapiens
gtgagtcagggcagc

SEQ ID NO: 864645 - DNA, 15 bp, Homo sapiens
tgagtcagggcagca

SEQ ID NO: 864646 - DNA, 15 bp, Homo sapiens
gagtcagggcagcat

SEQ ID NO: 864647 - DNA, 15 bp, Homo sapiens
agtcagggcagcata

SEQ ID NO: 864648 - DNA, 15 bp, Homo sapiens
gtcagggcagcataa

SEQ ID NO: 864649 - DNA, 15 bp, Homo sapiens
tcagggcagcataaa

SEQ ID NO: 864650 - DNA, 15 bp, Homo sapiens
cagggcagcataaaa

SEQ ID NO: 864651 - DNA, 15 bp, Homo sapiens
agggcagcataaaac

SEQ ID NO: 864652 - DNA, 15 bp, Homo sapiens
gggcagcataaaacc

SEQ ID NO: 864653 - DNA, 15 bp, Homo sapiens
ggcagcataaaacca

SEQ ID NO: 864654 - DNA, 15 bp, Homo sapiens
gcagcataaaaccaa

SEQ ID NO: 864655 - DNA, 15 bp, Homo sapiens
cagcataaaaccaat

SEQ ID NO: 864656 - DNA, 15 bp, Homo sapiens
agcataaaaccaatg

SEQ ID NO: 864657 - DNA, 15 bp, Homo sapiens
gcataaaaccaatgc

SEQ ID NO: 864658 - DNA, 15 bp, Homo sapiens
cataaaaccaatgca

SEQ ID NO: 864659 - DNA, 15 bp, Homo sapiens
ataaaaccaatgcat

SEQ ID NO: 864660 - DNA, 15 bp, Homo sapiens
taaaaccaatgcatt

SEQ ID NO: 864661 - DNA, 15 bp, Homo sapiens
aaaaccaatgcattg

SEQ ID NO: 864662 - DNA, 15 bp, Homo sapiens
aaaccaatgcattgg

SEQ ID NO: 864663 - DNA, 15 bp, Homo sapiens
aaccaatgcattggg

SEQ ID NO: 864664 - DNA, 15 bp, Homo sapiens
accaatgcattgggc

SEQ ID NO: 864665 - DNA, 15 bp, Homo sapiens
ccaatgcattgggca

SEQ ID NO: 864666 - DNA, 15 bp, Homo sapiens
caatgcattgggcag

SEQ ID NO: 864667 - DNA, 15 bp, Homo sapiens
aatgcattgggcagg

SEQ ID NO: 864668 - DNA, 15 bp, Homo sapiens
atgcattgggcaggg

SEQ ID NO: 864669 - DNA, 15 bp, Homo sapiens
tgcattgggcagggc

SEQ ID NO: 864670 - DNA, 15 bp, Homo sapiens
gcattgggcagggct

SEQ ID NO: 864671 - DNA, 15 bp, Homo sapiens
cattgggcagggctc

SEQ ID NO: 864672 - DNA, 15 bp, Homo sapiens
attgggcagggctca

SEQ ID NO: 864673 - DNA, 15 bp, Homo sapiens
ttgggcagggctcat

SEQ ID NO: 864674 - DNA, 15 bp, Homo sapiens
tgggcagggctcatg

SEQ ID NO: 864675 - DNA, 15 bp, Homo sapiens
gggcagggctcatgt

SEQ ID NO: 864676 - DNA, 15 bp, Homo sapiens
ggcagggctcatgtg

SEQ ID NO: 864677 - DNA, 15 bp, Homo sapiens
gcagggctcatgtga

SEQ ID NO: 864678 - DNA, 15 bp, Homo sapiens
cagggctcatgtgag

SEQ ID NO: 864679 - DNA, 15 bp, Homo sapiens
agggctcatgtgagg

SEQ ID NO: 864680 - DNA, 15 bp, Homo sapiens
gggctcatgtgagga

SEQ ID NO: 864681 - DNA, 15 bp, Homo sapiens
ggctcatgtgaggaa

SEQ ID NO: 864682 - DNA, 15 bp, Homo sapiens
gctcatgtgaggaaa

SEQ ID NO: 864683 - DNA, 15 bp, Homo sapiens
ctcatgtgaggaaag

SEQ ID NO: 864684 - DNA, 15 bp, Homo sapiens
tcatgtgaggaaagg

SEQ ID NO: 864685 - DNA, 15 bp, Homo sapiens
catgtgaggaaagga

SEQ ID NO: 864686 - DNA, 15 bp, Homo sapiens
atgtgaggaaaggag

SEQ ID NO: 864687 - DNA, 15 bp, Homo sapiens
tgtgaggaaaggagt

SEQ ID NO: 864688 - DNA, 15 bp, Homo sapiens
gtgaggaaaggagtc

SEQ ID NO: 864689 - DNA, 15 bp, Homo sapiens
tgaggaaaggagtct

SEQ ID NO: 864690 - DNA, 15 bp, Homo sapiens
gaggaaaggagtctg

SEQ ID NO: 864691 - DNA, 15 bp, Homo sapiens
aggaaaggagtctgt

SEQ ID NO: 864692 - DNA, 15 bp, Homo sapiens
ggaaaggagtctgtt

SEQ ID NO: 864693 - DNA, 15 bp, Homo sapiens
gaaaggagtctgttg

SEQ ID NO: 864694 - DNA, 15 bp, Homo sapiens
aaaggagtctgttgt

SEQ ID NO: 864695 - DNA, 15 bp, Homo sapiens
aaggagtctgttgta

SEQ ID NO: 864696 - DNA, 15 bp, Homo sapiens
aggagtctgttgtag

SEQ ID NO: 864697 - DNA, 15 bp, Homo sapiens
ggagtctgttgtagc

SEQ ID NO: 864698 - DNA, 15 bp, Homo sapiens
gagtctgttgtagct

SEQ ID NO: 864699 - DNA, 15 bp, Homo sapiens
agtctgttgtagcta

SEQ ID NO: 864700 - DNA, 15 bp, Homo sapiens
gtctgttgtagctag

SEQ ID NO: 864701 - DNA, 15 bp, Homo sapiens
tctgttgtagctaga

SEQ ID NO: 864702 - DNA, 15 bp, Homo sapiens
ctgttgtagctagag

SEQ ID NO: 864703 - DNA, 15 bp, Homo sapiens
tgttgtagctagaga

SEQ ID NO: 864704 - DNA, 15 bp, Homo sapiens
gttgtagctagagag

SEQ ID NO: 864705 - DNA, 15 bp, Homo sapiens
ttgtagctagagagg

SEQ ID NO: 864706 - DNA, 15 bp, Homo sapiens
tgtagctagagaggt

SEQ ID NO: 864707 - DNA, 15 bp, Homo sapiens
gtagctagagaggtg

SEQ ID NO: 864708 - DNA, 15 bp, Homo sapiens
tagctagagaggtgt

SEQ ID NO: 864709 - DNA, 15 bp, Homo sapiens
agctagagaggtgtc

SEQ ID NO: 864710 - DNA, 15 bp, Homo sapiens
gctagagaggtgtca

SEQ ID NO: 864711 - DNA, 15 bp, Homo sapiens
ctagagaggtgtcag

SEQ ID NO: 864712 - DNA, 15 bp, Homo sapiens
tagagaggtgtcagc

SEQ ID NO: 864713 - DNA, 15 bp, Homo sapiens
agagaggtgtcagca

SEQ ID NO: 864714 - DNA, 15 bp, Homo sapiens
gagaggtgtcagcat

SEQ ID NO: 864715 - DNA, 15 bp, Homo sapiens
agaggtgtcagcatc

SEQ ID NO: 864716 - DNA, 15 bp, Homo sapiens
gaggtgtcagcatct

SEQ ID NO: 864717 - DNA, 15 bp, Homo sapiens
aggtgtcagcatctg

SEQ ID NO: 864718 - DNA, 15 bp, Homo sapiens
ggtgtcagcatctgc

SEQ ID NO: 864719 - DNA, 15 bp, Homo sapiens
gtgtcagcatctgca

SEQ ID NO: 864720 - DNA, 15 bp, Homo sapiens
tgtcagcatctgcag

SEQ ID NO: 864721 - DNA, 15 bp, Homo sapiens
gtcagcatctgcagg

SEQ ID NO: 864722 - DNA, 15 bp, Homo sapiens
tcagcatctgcaggt

SEQ ID NO: 864723 - DNA, 15 bp, Homo sapiens
cagcatctgcaggtg

SEQ ID NO: 864724 - DNA, 15 bp, Homo sapiens
agcatctgcaggtgg

SEQ ID NO: 864725 - DNA, 15 bp, Homo sapiens
gcatctgcaggtggg

SEQ ID NO: 864726 - DNA, 15 bp, Homo sapiens
catctgcaggtgggc

SEQ ID NO: 864727 - DNA, 15 bp, Homo sapiens
atctgcaggtgggca

SEQ ID NO: 864728 - DNA, 15 bp, Homo sapiens
tctgcaggtgggcac

SEQ ID NO: 864729 - DNA, 15 bp, Homo sapiens
ctgcaggtgggcaca

SEQ ID NO: 864730 - DNA, 15 bp, Homo sapiens
tgcaggtgggcacat

SEQ ID NO: 864731 - DNA, 15 bp, Homo sapiens
gcaggtgggcacatc

SEQ ID NO: 864732 - DNA, 15 bp, Homo sapiens
caggtgggcacatca

SEQ ID NO: 864733 - DNA, 15 bp, Homo sapiens
aggtgggcacatcaa

SEQ ID NO: 864734 - DNA, 15 bp, Homo sapiens
ggtgggcacatcaac

SEQ ID NO: 864735 - DNA, 15 bp, Homo sapiens
gtgggcacatcaacc

SEQ ID NO: 864736 - DNA, 15 bp, Homo sapiens
tgggcacatcaacct

SEQ ID NO: 864737 - DNA, 15 bp, Homo sapiens
gggcacatcaacctg

SEQ ID NO: 864738 - DNA, 15 bp, Homo sapiens
ggcacatcaacctgc

SEQ ID NO: 864739 - DNA, 15 bp, Homo sapiens
gcacatcaacctgcc

SEQ ID NO: 864740 - DNA, 15 bp, Homo sapiens
cacatcaacctgccc

SEQ ID NO: 864741 - DNA, 15 bp, Homo sapiens
acatcaacctgccca

SEQ ID NO: 864742 - DNA, 15 bp, Homo sapiens
catcaacctgcccaa

SEQ ID NO: 864743 - DNA, 15 bp, Homo sapiens
atcaacctgcccaaa

SEQ ID NO: 864744 - DNA, 15 bp, Homo sapiens
tcaacctgcccaaat

SEQ ID NO: 864745 - DNA, 15 bp, Homo sapiens
caacctgcccaaatg

SEQ ID NO: 864746 - DNA, 15 bp, Homo sapiens
aacctgcccaaatgt

SEQ ID NO: 864747 - DNA, 15 bp, Homo sapiens
acctgcccaaatgta

SEQ ID NO: 864748 - DNA, 15 bp, Homo sapiens
cctgcccaaatgtag

SEQ ID NO: 864749 - DNA, 15 bp, Homo sapiens
ctgcccaaatgtaga

SEQ ID NO: 864750 - DNA, 15 bp, Homo sapiens
gcccaaatgtagagc

SEQ ID NO: 864751 - DNA, 15 bp, Homo sapiens
cccaaatgtagagca

SEQ ID NO: 864752 - DNA, 15 bp, Homo sapiens
ccaaatgtagagcaa

SEQ ID NO: 864753 - DNA, 15 bp, Homo sapiens
caaatgtagagcaac

SEQ ID NO: 864754 - DNA, 15 bp, Homo sapiens
aaatgtagagcaaca

SEQ ID NO: 864755 - DNA, 15 bp, Homo sapiens
aatgtagagcaacat

SEQ ID NO: 864756 - DNA, 15 bp, Homo sapiens
atgtagagcaacatt

SEQ ID NO: 864757 - DNA, 15 bp, Homo sapiens
tgtagagcaacattc

SEQ ID NO: 864758 - DNA, 15 bp, Homo sapiens
gtagagcaacattcg

SEQ ID NO: 864759 - DNA, 15 bp, Homo sapiens
tagagcaacattcga

SEQ ID NO: 864760 - DNA, 15 bp, Homo sapiens
agagcaacattcgag

SEQ ID NO: 864761 - DNA, 15 bp, Homo sapiens
gagcaacattcgagg

SEQ ID NO: 864762 - DNA, 15 bp, Homo sapiens
agcaacattcgaggc

SEQ ID NO: 864763 - DNA, 15 bp, Homo sapiens
gcaacattcgaggcc

SEQ ID NO: 864764 - DNA, 15 bp, Homo sapiens
caacattcgaggcct

SEQ ID NO: 864765 - DNA, 15 bp, Homo sapiens
aacattcgaggcctt

SEQ ID NO: 864766 - DNA, 15 bp, Homo sapiens
acattcgaggccttt

SEQ ID NO: 864767 - DNA, 15 bp, Homo sapiens
cattcgaggcctttt

SEQ ID NO: 864768 - DNA, 15 bp, Homo sapiens
attcgaggcctttta

SEQ ID NO: 864769 - DNA, 15 bp, Homo sapiens
ttcgaggccttttat

SEQ ID NO: 864770 - DNA, 15 bp, Homo sapiens
tcgaggccttttatg

SEQ ID NO: 864771 - DNA, 15 bp, Homo sapiens
cgaggccttttatgg

SEQ ID NO: 864772 - DNA, 15 bp, Homo sapiens
gaggccttttatggc

SEQ ID NO: 864773 - DNA, 15 bp, Homo sapiens
aggccttttatggcg

SEQ ID NO: 864774 - DNA, 15 bp, Homo sapiens
ggccttttatggcgg

SEQ ID NO: 864775 - DNA, 15 bp, Homo sapiens
gccttttatggcggt

SEQ ID NO: 864776 - DNA, 15 bp, Homo sapiens
ccttttatggcggtc

SEQ ID NO: 864777 - DNA, 15 bp, Homo sapiens
cttttatggcggtca

SEQ ID NO: 864778 - DNA, 15 bp, Homo sapiens
ttttatggcggtcag

SEQ ID NO: 864779 - DNA, 15 bp, Homo sapiens
tttatggcggtcagg

SEQ ID NO: 864780 - DNA, 15 bp, Homo sapiens
ttatggcggtcaggg

SEQ ID NO: 864781 - DNA, 15 bp, Homo sapiens
tatggcggtcagggt

SEQ ID NO: 864782 - DNA, 15 bp, Homo sapiens
atggcggtcagggta

SEQ ID NO: 864783 - DNA, 15 bp, Homo sapiens
tggcggtcagggtaa

SEQ ID NO: 864784 - DNA, 15 bp, Homo sapiens
ggcggtcagggtaat

SEQ ID NO: 864785 - DNA, 15 bp, Homo sapiens
gcggtcagggtaatt

SEQ ID NO: 864786 - DNA, 15 bp, Homo sapiens
cggtcagggtaattt

SEQ ID NO: 864787 - DNA, 15 bp, Homo sapiens
ggtcagggtaatttg

SEQ ID NO: 864788 - DNA, 15 bp, Homo sapiens
gtcagggtaatttga

SEQ ID NO: 864789 - DNA, 15 bp, Homo sapiens
tcagggtaatttgac

SEQ ID NO: 864790 - DNA, 15 bp, Homo sapiens
cagggtaatttgact

SEQ ID NO: 864791 - DNA, 15 bp, Homo sapiens
agggtaatttgactc

SEQ ID NO: 864792 - DNA, 15 bp, Homo sapiens
gggtaatttgactct

SEQ ID NO: 864793 - DNA, 15 bp, Homo sapiens
ggtaatttgactctg

SEQ ID NO: 864794 - DNA, 15 bp, Homo sapiens
gtaatttgactctga

SEQ ID NO: 864795 - DNA, 15 bp, Homo sapiens
taatttgactctgac

SEQ ID NO: 864796 - DNA, 15 bp, Homo sapiens
aatttgactctgact

SEQ ID NO: 864797 - DNA, 15 bp, Homo sapiens
atttgactctgactc

SEQ ID NO: 864798 - DNA, 15 bp, Homo sapiens
tttgactctgactcg

SEQ ID NO: 864799 - DNA, 15 bp, Homo sapiens
ttgactctgactcga

SEQ ID NO: 864800 - DNA, 15 bp, Homo sapiens
tgactctgactcgag

SEQ ID NO: 864801 - DNA, 15 bp, Homo sapiens
gactctgactcgagg

SEQ ID NO: 864802 - DNA, 15 bp, Homo sapiens
actctgactcgaggt

SEQ ID NO: 864803 - DNA, 15 bp, Homo sapiens
ctctgactcgaggta

SEQ ID NO: 864804 - DNA, 15 bp, Homo sapiens
tctgactcgaggtag

SEQ ID NO: 864805 - DNA, 15 bp, Homo sapiens
ctgactcgaggtagg

SEQ ID NO: 864806 - DNA, 15 bp, Homo sapiens
tgactcgaggtaggc

SEQ ID NO: 864807 - DNA, 15 bp, Homo sapiens
gactcgaggtaggca

SEQ ID NO: 864808 - DNA, 15 bp, Homo sapiens
actcgaggtaggcag

SEQ ID NO: 864809 - DNA, 15 bp, Homo sapiens
ctcgaggtaggcagc

SEQ ID NO: 864810 - DNA, 15 bp, Homo sapiens
tcgaggtaggcagct

SEQ ID NO: 864811 - DNA, 15 bp, Homo sapiens
cgaggtaggcagctt

SEQ ID NO: 864812 - DNA, 15 bp, Homo sapiens
gaggtaggcagcttg

SEQ ID NO: 864813 - DNA, 15 bp, Homo sapiens
aggtaggcagcttga

SEQ ID NO: 864814 - DNA, 15 bp, Homo sapiens
ggtaggcagcttgaa

SEQ ID NO: 864815 - DNA, 15 bp, Homo sapiens
gtaggcagcttgaat

SEQ ID NO: 864816 - DNA, 15 bp, Homo sapiens
taggcagcttgaatg

SEQ ID NO: 864817 - DNA, 15 bp, Homo sapiens
aggcagcttgaatgc

SEQ ID NO: 864818 - DNA, 15 bp, Homo sapiens
ggcagcttgaatgca

SEQ ID NO: 864819 - DNA, 15 bp, Homo sapiens
gcagcttgaatgcaa

SEQ ID NO: 864820 - DNA, 15 bp, Homo sapiens
cagcttgaatgcaac

SEQ ID NO: 864821 - DNA, 15 bp, Homo sapiens
agcttgaatgcaaca

SEQ ID NO: 864822 - DNA, 15 bp, Homo sapiens
gcttgaatgcaacag

SEQ ID NO: 864823 - DNA, 15 bp, Homo sapiens
cttgaatgcaacagc

SEQ ID NO: 864824 - DNA, 15 bp, Homo sapiens
ttgaatgcaacagca

SEQ ID NO: 864825 - DNA, 15 bp, Homo sapiens
tgaatgcaacagcag

SEQ ID NO: 864826 - DNA, 15 bp, Homo sapiens
gaatgcaacagcagc

SEQ ID NO: 864827 - DNA, 15 bp, Homo sapiens
aatgcaacagcagca

SEQ ID NO: 864828 - DNA, 15 bp, Homo sapiens
atgcaacagcagcac

SEQ ID NO: 864829 - DNA, 15 bp, Homo sapiens
tgcaacagcagcacc

SEQ ID NO: 864830 - DNA, 15 bp, Homo sapiens
gcaacagcagcaccc

SEQ ID NO: 864831 - DNA, 15 bp, Homo sapiens
caacagcagcaccca

SEQ ID NO: 864832 - DNA, 15 bp, Homo sapiens
aacagcagcacccaa

SEQ ID NO: 864833 - DNA, 15 bp, Homo sapiens
acagcagcacccaaa

SEQ ID NO: 864834 - DNA, 15 bp, Homo sapiens
cagcagcacccaaat

SEQ ID NO: 864835 - DNA, 15 bp, Homo sapiens
agcagcacccaaatg

SEQ ID NO: 864836 - DNA, 15 bp, Homo sapiens
gcagcacccaaatga

SEQ ID NO: 864837 - DNA, 15 bp, Homo sapiens
cagcacccaaatgat

SEQ ID NO: 864838 - DNA, 15 bp, Homo sapiens
agcacccaaatgatt

SEQ ID NO: 864839 - DNA, 15 bp, Homo sapiens
gcacccaaatgattc

SEQ ID NO: 864840 - DNA, 15 bp, Homo sapiens
cacccaaatgattcc

SEQ ID NO: 864841 - DNA, 15 bp, Homo sapiens
acccaaatgattcct

SEQ ID NO: 864842 - DNA, 15 bp, Homo sapiens
cccaaatgattcctc

SEQ ID NO: 864843 - DNA, 15 bp, Homo sapiens
ccaaatgattcctcc

SEQ ID NO: 864844 - DNA, 15 bp, Homo sapiens
caaatgattcctccc

SEQ ID NO: 864845 - DNA, 15 bp, Homo sapiens
aaatgattcctcccg

SEQ ID NO: 864846 - DNA, 15 bp, Homo sapiens
aatgattcctcccgc

SEQ ID NO: 864847 - DNA, 15 bp, Homo sapiens
atgattcctcccgcg

SEQ ID NO: 864848 - DNA, 15 bp, Homo sapiens
tgattcctcccgcgt

SEQ ID NO: 864849 - DNA, 15 bp, Homo sapiens
gattcctcccgcgtg

SEQ ID NO: 864850 - DNA, 15 bp, Homo sapiens
attcctcccgcgtgg

SEQ ID NO: 864851 - DNA, 15 bp, Homo sapiens
ttcctcccgcgtgga

SEQ ID NO: 864852 - DNA, 15 bp, Homo sapiens
tcctcccgcgtggag

SEQ ID NO: 864853 - DNA, 15 bp, Homo sapiens
cctcccgcgtggagg

SEQ ID NO: 864854 - DNA, 15 bp, Homo sapiens
ctcccgcgtggaggt

SEQ ID NO: 864855 - DNA, 15 bp, Homo sapiens
tcccgcgtggaggta

SEQ ID NO: 864856 - DNA, 15 bp, Homo sapiens
cccgcgtggaggtat

SEQ ID NO: 864857 - DNA, 15 bp, Homo sapiens
ccgcgtggaggtatc

SEQ ID NO: 864858 - DNA, 15 bp, Homo sapiens
cgcgtggaggtatcc

SEQ ID NO: 864859 - DNA, 15 bp, Homo sapiens
gcgtggaggtatcca

SEQ ID NO: 864860 - DNA, 15 bp, Homo sapiens
cgtggaggtatccaa

SEQ ID NO: 864861 - DNA, 15 bp, Homo sapiens
gtggaggtatccaaa

SEQ ID NO: 864862 - DNA, 15 bp, Homo sapiens
tggaggtatccaaaa

SEQ ID NO: 864863 - DNA, 15 bp, Homo sapiens
ggaggtatccaaaag

SEQ ID NO: 864864 - DNA, 15 bp, Homo sapiens
gaggtatccaaaagc

SEQ ID NO: 864865 - DNA, 15 bp, Homo sapiens
aggtatccaaaagct

SEQ ID NO: 864866 - DNA, 15 bp, Homo sapiens
ggtatccaaaagctg

SEQ ID NO: 864867 - DNA, 15 bp, Homo sapiens
gtatccaaaagctga

SEQ ID NO: 864868 - DNA, 15 bp, Homo sapiens
tatccaaaagctgaa

SEQ ID NO: 864869 - DNA, 15 bp, Homo sapiens
atccaaaagctgaat

SEQ ID NO: 864870 - DNA, 15 bp, Homo sapiens
tccaaaagctgaatg

SEQ ID NO: 864871 - DNA, 15 bp, Homo sapiens
ccaaaagctgaatgt

SEQ ID NO: 864872 - DNA, 15 bp, Homo sapiens
caaaagctgaatgtc

SEQ ID NO: 864873 - DNA, 15 bp, Homo sapiens
aaaagctgaatgtct

SEQ ID NO: 864874 - DNA, 15 bp, Homo sapiens
aaagctgaatgtctc

SEQ ID NO: 864875 - DNA, 15 bp, Homo sapiens
aagctgaatgtctca

SEQ ID NO: 864876 - DNA, 15 bp, Homo sapiens
agctgaatgtctcat

SEQ ID NO: 864877 - DNA, 15 bp, Homo sapiens
gctgaatgtctcata

SEQ ID NO: 864878 - DNA, 15 bp, Homo sapiens
ctgaatgtctcatag

SEQ ID NO: 864879 - DNA, 15 bp, Homo sapiens
tgaatgtctcatagc

SEQ ID NO: 864880 - DNA, 15 bp, Homo sapiens
gaatgtctcatagct

SEQ ID NO: 864881 - DNA, 15 bp, Homo sapiens
aatgtctcatagcta

SEQ ID NO: 864882 - DNA, 15 bp, Homo sapiens
atgtctcatagctat

SEQ ID NO: 864883 - DNA, 15 bp, Homo sapiens
tgtctcatagctatt

SEQ ID NO: 864884 - DNA, 15 bp, Homo sapiens
gtctcatagctatta

SEQ ID NO: 864885 - DNA, 15 bp, Homo sapiens
tctcatagctattac

SEQ ID NO: 864886 - DNA, 15 bp, Homo sapiens
ctcatagctattacc

SEQ ID NO: 864887 - DNA, 15 bp, Homo sapiens
tcatagctattacct

SEQ ID NO: 864888 - DNA, 15 bp, Homo sapiens
catagctattaccta

SEQ ID NO: 864889 - DNA, 15 bp, Homo sapiens
atagctattacctat

SEQ ID NO: 864890 - DNA, 15 bp, Homo sapiens
tagctattacctatt

SEQ ID NO: 864891 - DNA, 15 bp, Homo sapiens
agctattacctatta

SEQ ID NO: 864892 - DNA, 15 bp, Homo sapiens
gctattacctattag

SEQ ID NO: 864893 - DNA, 15 bp, Homo sapiens
ctattacctattagg

SEQ ID NO: 864894 - DNA, 15 bp, Homo sapiens
tattacctattagga

SEQ ID NO: 864895 - DNA, 15 bp, Homo sapiens
attacctattaggag

SEQ ID NO: 864896 - DNA, 15 bp, Homo sapiens
ttacctattaggagc

SEQ ID NO: 864897 - DNA, 15 bp, Homo sapiens
tacctattaggagcc

SEQ ID NO: 864898 - DNA, 15 bp, Homo sapiens
acctattaggagcca

SEQ ID NO: 864899 - DNA, 15 bp, Homo sapiens
cctattaggagccat

SEQ ID NO: 864900 - DNA, 15 bp, Homo sapiens
ctattaggagccatt

SEQ ID NO: 864901 - DNA, 15 bp, Homo sapiens
tattaggagccatta

SEQ ID NO: 864902 - DNA, 15 bp, Homo sapiens
attaggagccattat

SEQ ID NO: 864903 - DNA, 15 bp, Homo sapiens
ttaggagccattatt

SEQ ID NO: 864904 - DNA, 15 bp, Homo sapiens
taggagccattattc

SEQ ID NO: 864905 - DNA, 15 bp, Homo sapiens
aggagccattattct

SEQ ID NO: 864906 - DNA, 15 bp, Homo sapiens
ggagccattattctg

SEQ ID NO: 864907 - DNA, 15 bp, Homo sapiens
gagccattattctgt

SEQ ID NO: 864908 - DNA, 15 bp, Homo sapiens
agccattattctgtt

SEQ ID NO: 864909 - DNA, 15 bp, Homo sapiens
gccattattctgttt

SEQ ID NO: 864910 - DNA, 15 bp, Homo sapiens
ccattattctgtttg

SEQ ID NO: 864911 - DNA, 15 bp, Homo sapiens
cattattctgtttgt

SEQ ID NO: 864912 - DNA, 15 bp, Homo sapiens
attattctgtttgtt

SEQ ID NO: 864913 - DNA, 15 bp, Homo sapiens
ttattctgtttgttc

SEQ ID NO: 864914 - DNA, 15 bp, Homo sapiens
tattctgtttgttct

SEQ ID NO: 864915 - DNA, 15 bp, Homo sapiens
attctgtttgttctg

SEQ ID NO: 864916 - DNA, 15 bp, Homo sapiens
ttctgtttgttctgc

SEQ ID NO: 864917 - DNA, 15 bp, Homo sapiens
tctgtttgttctgct

SEQ ID NO: 864918 - DNA, 15 bp, Homo sapiens
ctgtttgttctgctc

SEQ ID NO: 864919 - DNA, 15 bp, Homo sapiens
tgtttgttctgctca

SEQ ID NO: 864920 - DNA, 15 bp, Homo sapiens
gtttgttctgctcaa

SEQ ID NO: 864921 - DNA, 15 bp, Homo sapiens
tttgttctgctcaag

SEQ ID NO: 864922 - DNA, 15 bp, Homo sapiens
ttgttctgctcaagc

SEQ ID NO: 864923 - DNA, 15 bp, Homo sapiens
tgttctgctcaagcc

SEQ ID NO: 864924 - DNA, 15 bp, Homo sapiens
gttctgctcaagcca

SEQ ID NO: 864925 - DNA, 15 bp, Homo sapiens
ttctgctcaagccaa

SEQ ID NO: 864926 - DNA, 15 bp, Homo sapiens
tctgctcaagccaag

SEQ ID NO: 864927 - DNA, 15 bp, Homo sapiens
ctgctcaagccaagg

SEQ ID NO: 864928 - DNA, 15 bp, Homo sapiens
tgctcaagccaagga

SEQ ID NO: 864929 - DNA, 15 bp, Homo sapiens
gctcaagccaaggaa

SEQ ID NO: 864930 - DNA, 15 bp, Homo sapiens
ctcaagccaaggaag

SEQ ID NO: 864931 - DNA, 15 bp, Homo sapiens
tcaagccaaggaaga

SEQ ID NO: 864932 - DNA, 15 bp, Homo sapiens
caagccaaggaagag

SEQ ID NO: 864933 - DNA, 15 bp, Homo sapiens
aagccaaggaagagt

SEQ ID NO: 864934 - DNA, 15 bp, Homo sapiens
agccaaggaagagtt

SEQ ID NO: 864935 - DNA, 15 bp, Homo sapiens
gccaaggaagagttt

SEQ ID NO: 864936 - DNA, 15 bp, Homo sapiens
ccaaggaagagtttt

SEQ ID NO: 864937 - DNA, 15 bp, Homo sapiens
caaggaagagttttc

SEQ ID NO: 864938 - DNA, 15 bp, Homo sapiens
aaggaagagttttcc

SEQ ID NO: 864939 - DNA, 15 bp, Homo sapiens
aggaagagttttcct

SEQ ID NO: 864940 - DNA, 15 bp, Homo sapiens
ggaagagttttcctg

SEQ ID NO: 864941 - DNA, 15 bp, Homo sapiens
gaagagttttcctga

SEQ ID NO: 864942 - DNA, 15 bp, Homo sapiens
aagagttttcctgat

SEQ ID NO: 864943 - DNA, 15 bp, Homo sapiens
agagttttcctgatt

SEQ ID NO: 864944 - DNA, 15 bp, Homo sapiens
gagttttcctgattg

SEQ ID NO: 864945 - DNA, 15 bp, Homo sapiens
agttttcctgattgt

SEQ ID NO: 864946 - DNA, 15 bp, Homo sapiens
gttttcctgattgtt

SEQ ID NO: 864947 - DNA, 15 bp, Homo sapiens
ttttcctgattgttc

SEQ ID NO: 864948 - DNA, 15 bp, Homo sapiens
tttcctgattgttct

SEQ ID NO: 864949 - DNA, 15 bp, Homo sapiens
ttcctgattgttctc

SEQ ID NO: 864950 - DNA, 15 bp, Homo sapiens
tcctgattgttctca

SEQ ID NO: 864951 - DNA, 15 bp, Homo sapiens
cctgattgttctcaa

SEQ ID NO: 864952 - DNA, 15 bp, Homo sapiens
ctgattgttctcaaa

SEQ ID NO: 864953 - DNA, 15 bp, Homo sapiens
tgattgttctcaaag

SEQ ID NO: 864954 - DNA, 15 bp, Homo sapiens
gattgttctcaaagc

SEQ ID NO: 864955 - DNA, 15 bp, Homo sapiens
attgttctcaaagct

SEQ ID NO: 864956 - DNA, 15 bp, Homo sapiens
ttgttctcaaagctc

SEQ ID NO: 864957 - DNA, 15 bp, Homo sapiens
tgttctcaaagctct

SEQ ID NO: 864958 - DNA, 15 bp, Homo sapiens
gttctcaaagctctc

SEQ ID NO: 864959 - DNA, 15 bp, Homo sapiens
ttctcaaagctctct

SEQ ID NO: 864960 - DNA, 15 bp, Homo sapiens
tctcaaagctctctc

SEQ ID NO: 864961 - DNA, 15 bp, Homo sapiens
ctcaaagctctctca

SEQ ID NO: 864962 - DNA, 15 bp, Homo sapiens
tcaaagctctctcag

SEQ ID NO: 864963 - DNA, 15 bp, Homo sapiens
caaagctctctcagg

SEQ ID NO: 864964 - DNA, 15 bp, Homo sapiens
aaagctctctcaggc

SEQ ID NO: 864965 - DNA, 15 bp, Homo sapiens
aagctctctcaggct

SEQ ID NO: 864966 - DNA, 15 bp, Homo sapiens
agctctctcaggctg

SEQ ID NO: 864967 - DNA, 15 bp, Homo sapiens
gctctctcaggctgc

SEQ ID NO: 864968 - DNA, 15 bp, Homo sapiens
tgcatgctctaatat

SEQ ID NO: 864969 - DNA, 15 bp, Homo sapiens
gcatgctctaatatg

SEQ ID NO: 864970 - DNA, 15 bp, Homo sapiens
catgctctaatatgg

SEQ ID NO: 864971 - DNA, 15 bp, Homo sapiens
atgctctaatatggg

SEQ ID NO: 864972 - DNA, 15 bp, Homo sapiens
tgctctaatatgggt

SEQ ID NO: 864973 - DNA, 15 bp, Homo sapiens
gctctaatatgggtc

SEQ ID NO: 864974 - DNA, 15 bp, Homo sapiens
ctctaatatgggtct

SEQ ID NO: 864975 - DNA, 15 bp, Homo sapiens
tctaatatgggtctt

SEQ ID NO: 864976 - DNA, 15 bp, Homo sapiens
ctaatatgggtcttc

SEQ ID NO: 864977 - DNA, 15 bp, Homo sapiens
taatatgggtcttcc

SEQ ID NO: 864978 - DNA, 15 bp, Homo sapiens
aatatgggtcttcct

SEQ ID NO: 864979 - DNA, 15 bp, Homo sapiens
atatgggtcttcctg

SEQ ID NO: 864980 - DNA, 15 bp, Homo sapiens
tatgggtcttcctgg

SEQ ID NO: 864981 - DNA, 15 bp, Homo sapiens
atgggtcttcctgga

SEQ ID NO: 864982 - DNA, 15 bp, Homo sapiens
tgggtcttcctggat

SEQ ID NO: 864983 - DNA, 15 bp, Homo sapiens
gggtcttcctggata

SEQ ID NO: 864984 - DNA, 15 bp, Homo sapiens
ggtcttcctggataa

SEQ ID NO: 864985 - DNA, 15 bp, Homo sapiens
gtcttcctggataat

SEQ ID NO: 864986 - DNA, 15 bp, Homo sapiens
tcttcctggataata

SEQ ID NO: 864987 - DNA, 15 bp, Homo sapiens
cttcctggataatac

SEQ ID NO: 864988 - DNA, 15 bp, Homo sapiens
ttcctggataatacc

SEQ ID NO: 864989 - DNA, 15 bp, Homo sapiens
tcctggataatacca

SEQ ID NO: 864990 - DNA, 15 bp, Homo sapiens
cctggataataccaa

SEQ ID NO: 864991 - DNA, 15 bp, Homo sapiens
ctggataataccaag

SEQ ID NO: 864992 - DNA, 15 bp, Homo sapiens
tggataataccaagt

SEQ ID NO: 864993 - DNA, 15 bp, Homo sapiens
ggataataccaagta

SEQ ID NO: 864994 - DNA, 15 bp, Homo sapiens
gataataccaagtag

SEQ ID NO: 864995 - DNA, 15 bp, Homo sapiens
ataataccaagtagc

SEQ ID NO: 864996 - DNA, 15 bp, Homo sapiens
taataccaagtagct

SEQ ID NO: 864997 - DNA, 15 bp, Homo sapiens
aataccaagtagctg

SEQ ID NO: 864998 - DNA, 15 bp, Homo sapiens
ataccaagtagctga

SEQ ID NO: 864999 - DNA, 15 bp, Homo sapiens
taccaagtagctgac

SEQ ID NO: 865000 - DNA, 15 bp, Homo sapiens
accaagtagctgaca

SEQ ID NO: 865001 - DNA, 15 bp, Homo sapiens
ccaagtagctgacat

SEQ ID NO: 865002 - DNA, 15 bp, Homo sapiens
caagtagctgacatg

SEQ ID NO: 865003 - DNA, 15 bp, Homo sapiens
aagtagctgacatgg

SEQ ID NO: 865004 - DNA, 15 bp, Homo sapiens
agtagctgacatggc

SEQ ID NO: 865005 - DNA, 15 bp, Homo sapiens
gtagctgacatggca

SEQ ID NO: 865006 - DNA, 15 bp, Homo sapiens
tagctgacatggcac

SEQ ID NO: 865007 - DNA, 15 bp, Homo sapiens
agctgacatggcact

SEQ ID NO: 865008 - DNA, 15 bp, Homo sapiens
gctgacatggcactt

SEQ ID NO: 865009 - DNA, 15 bp, Homo sapiens
ctgacatggcacttt

SEQ ID NO: 865010 - DNA, 15 bp, Homo sapiens
tgacatggcactttc

SEQ ID NO: 865011 - DNA, 15 bp, Homo sapiens
gacatggcactttct

SEQ ID NO: 865012 - DNA, 15 bp, Homo sapiens
acatggcactttctc

SEQ ID NO: 865013 - DNA, 15 bp, Homo sapiens
catggcactttctcc

SEQ ID NO: 865014 - DNA, 15 bp, Homo sapiens
atggcactttctccc

SEQ ID NO: 865015 - DNA, 15 bp, Homo sapiens
tggcactttctcccc

SEQ ID NO: 865016 - DNA, 15 bp, Homo sapiens
ggcactttctccccc

SEQ ID NO: 865017 - DNA, 15 bp, Homo sapiens
gcactttctccccca

SEQ ID NO: 865018 - DNA, 15 bp, Homo sapiens
cactttctcccccat

SEQ ID NO: 865019 - DNA, 15 bp, Homo sapiens
actttctcccccatc

SEQ ID NO: 865020 - DNA, 15 bp, Homo sapiens
ctttctcccccatct

SEQ ID NO: 865021 - DNA, 15 bp, Homo sapiens
tttctcccccatcta

SEQ ID NO: 865022 - DNA, 15 bp, Homo sapiens
ttctcccccatctaa

SEQ ID NO: 865023 - DNA, 15 bp, Homo sapiens
tctcccccatctaag

SEQ ID NO: 865024 - DNA, 15 bp, Homo sapiens
ctcccccatctaaga

SEQ ID NO: 865025 - DNA, 15 bp, Homo sapiens
tcccccatctaagac

SEQ ID NO: 865026 - DNA, 15 bp, Homo sapiens
cccccatctaagact

SEQ ID NO: 865027 - DNA, 15 bp, Homo sapiens
ccccatctaagactc

SEQ ID NO: 865028 - DNA, 15 bp, Homo sapiens
cccatctaagactcc

SEQ ID NO: 865029 - DNA, 15 bp, Homo sapiens
ccatctaagactcct

SEQ ID NO: 865030 - DNA, 15 bp, Homo sapiens
catctaagactccta

SEQ ID NO: 865031 - DNA, 15 bp, Homo sapiens
atctaagactcctac

SEQ ID NO: 865032 - DNA, 15 bp, Homo sapiens
tctaagactcctaca

SEQ ID NO: 865033 - DNA, 15 bp, Homo sapiens
ctaagactcctacac

SEQ ID NO: 865034 - DNA, 15 bp, Homo sapiens
taagactcctacacc

SEQ ID NO: 865035 - DNA, 15 bp, Homo sapiens
aagactcctacacca

SEQ ID NO: 865036 - DNA, 15 bp, Homo sapiens
agactcctacaccat

SEQ ID NO: 865037 - DNA, 15 bp, Homo sapiens
gactcctacaccatt

SEQ ID NO: 865038 - DNA, 15 bp, Homo sapiens
actcctacaccatta

SEQ ID NO: 865039 - DNA, 15 bp, Homo sapiens
ctcctacaccattaa

SEQ ID NO: 865040 - DNA, 15 bp, Homo sapiens
tcctacaccattaac

SEQ ID NO: 865041 - DNA, 15 bp, Homo sapiens
cctacaccattaaca

SEQ ID NO: 865042 - DNA, 15 bp, Homo sapiens
ctacaccattaacat

SEQ ID NO: 865043 - DNA, 15 bp, Homo sapiens
tacaccattaacata

SEQ ID NO: 865044 - DNA, 15 bp, Homo sapiens
acaccattaacatat

SEQ ID NO: 865045 - DNA, 15 bp, Homo sapiens
caccattaacatata

SEQ ID NO: 865046 - DNA, 15 bp, Homo sapiens
accattaacatatat

SEQ ID NO: 865047 - DNA, 15 bp, Homo sapiens
ccattaacatatatc

SEQ ID NO: 865048 - DNA, 15 bp, Homo sapiens
cattaacatatatca

SEQ ID NO: 865049 - DNA, 15 bp, Homo sapiens
attaacatatatcaa

SEQ ID NO: 865050 - DNA, 15 bp, Homo sapiens
ttaacatatatcaag

SEQ ID NO: 865051 - DNA, 15 bp, Homo sapiens
taacatatatcaagt

SEQ ID NO: 865052 - DNA, 15 bp, Homo sapiens
aacatatatcaagtc

SEQ ID NO: 865053 - DNA, 15 bp, Homo sapiens
acatatatcaagtct

SEQ ID NO: 865054 - DNA, 15 bp, Homo sapiens
catatatcaagtctc

SEQ ID NO: 865055 - DNA, 15 bp, Homo sapiens
atatatcaagtctct

SEQ ID NO: 865056 - DNA, 15 bp, Homo sapiens
tatatcaagtctctt

SEQ ID NO: 865057 - DNA, 15 bp, Homo sapiens
atatcaagtctcttt

SEQ ID NO: 865058 - DNA, 15 bp, Homo sapiens
tatcaagtctctttt

SEQ ID NO: 865059 - DNA, 15 bp, Homo sapiens
atcaagtctcttttg

SEQ ID NO: 865060 - DNA, 15 bp, Homo sapiens
tcaagtctcttttga

SEQ ID NO: 865061 - DNA, 15 bp, Homo sapiens
caagtctcttttgat

SEQ ID NO: 865062 - DNA, 15 bp, Homo sapiens
aagtctcttttgatg

SEQ ID NO: 865063 - DNA, 15 bp, Homo sapiens
agtctcttttgatgt

SEQ ID NO: 865064 - DNA, 15 bp, Homo sapiens
gtctcttttgatgtc

SEQ ID NO: 865065 - DNA, 15 bp, Homo sapiens
tctcttttgatgtca

SEQ ID NO: 865066 - DNA, 15 bp, Homo sapiens
ctcttttgatgtcat

SEQ ID NO: 865067 - DNA, 15 bp, Homo sapiens
tcttttgatgtcatc

SEQ ID NO: 865068 - DNA, 15 bp, Homo sapiens
cttttgatgtcatca

SEQ ID NO: 865069 - DNA, 15 bp, Homo sapiens
ttttgatgtcatcac

SEQ ID NO: 865070 - DNA, 15 bp, Homo sapiens
tttgatgtcatcact

SEQ ID NO: 865071 - DNA, 15 bp, Homo sapiens
ttgatgtcatcactg

SEQ ID NO: 865072 - DNA, 15 bp, Homo sapiens
tgatgtcatcactgc

SEQ ID NO: 865073 - DNA, 15 bp, Homo sapiens
gatgtcatcactgct

SEQ ID NO: 865074 - DNA, 15 bp, Homo sapiens
atgtcatcactgcta

SEQ ID NO: 865075 - DNA, 15 bp, Homo sapiens
tgtcatcactgctaa

SEQ ID NO: 865076 - DNA, 15 bp, Homo sapiens
gtcatcactgctaat

SEQ ID NO: 865077 - DNA, 15 bp, Homo sapiens
tcatcactgctaata

SEQ ID NO: 865078 - DNA, 15 bp, Homo sapiens
catcactgctaatat

SEQ ID NO: 865079 - DNA, 15 bp, Homo sapiens
atcactgctaatatt

SEQ ID NO: 865080 - DNA, 15 bp, Homo sapiens
tcactgctaatattt

SEQ ID NO: 865081 - DNA, 15 bp, Homo sapiens
cactgctaatatttc

SEQ ID NO: 865082 - DNA, 15 bp, Homo sapiens
actgctaatatttct

SEQ ID NO: 865083 - DNA, 15 bp, Homo sapiens
ctgctaatatttctc

SEQ ID NO: 865084 - DNA, 15 bp, Homo sapiens
tgctaatatttctct

SEQ ID NO: 865085 - DNA, 15 bp, Homo sapiens
gctaatatttctctt

SEQ ID NO: 865086 - DNA, 15 bp, Homo sapiens
ctaatatttctcttc

SEQ ID NO: 865087 - DNA, 15 bp, Homo sapiens
taatatttctcttct

SEQ ID NO: 865088 - DNA, 15 bp, Homo sapiens
aatatttctcttctt

SEQ ID NO: 865089 - DNA, 15 bp, Homo sapiens
atatttctcttctta

SEQ ID NO: 865090 - DNA, 15 bp, Homo sapiens
tatttctcttcttag

SEQ ID NO: 865091 - DNA, 15 bp, Homo sapiens
atttctcttcttagc

SEQ ID NO: 865092 - DNA, 15 bp, Homo sapiens
tttctcttcttagct

SEQ ID NO: 865093 - DNA, 15 bp, Homo sapiens
ttctcttcttagctt

SEQ ID NO: 865094 - DNA, 15 bp, Homo sapiens
tctcttcttagcttt

SEQ ID NO: 865095 - DNA, 15 bp, Homo sapiens
ctcttcttagcttta

SEQ ID NO: 865096 - DNA, 15 bp, Homo sapiens
tcttcttagctttaa

SEQ ID NO: 865097 - DNA, 15 bp, Homo sapiens
cttcttagctttaag

SEQ ID NO: 865098 - DNA, 15 bp, Homo sapiens
ttcttagctttaagg

SEQ ID NO: 865099 - DNA, 15 bp, Homo sapiens
tcttagctttaaggt

SEQ ID NO: 865100 - DNA, 15 bp, Homo sapiens
cttagctttaaggta

SEQ ID NO: 865101 - DNA, 15 bp, Homo sapiens
ttagctttaaggtaa

SEQ ID NO: 865102 - DNA, 15 bp, Homo sapiens
tagctttaaggtaac

SEQ ID NO: 865103 - DNA, 15 bp, Homo sapiens
agctttaaggtaact

SEQ ID NO: 865104 - DNA, 15 bp, Homo sapiens
gctttaaggtaactg

SEQ ID NO: 865105 - DNA, 15 bp, Homo sapiens
ctttaaggtaactgc

SEQ ID NO: 865106 - DNA, 15 bp, Homo sapiens
tttaaggtaactgct

SEQ ID NO: 865107 - DNA, 15 bp, Homo sapiens
ttaaggtaactgctg

SEQ ID NO: 865108 - DNA, 15 bp, Homo sapiens
taaggtaactgctgt

SEQ ID NO: 865109 - DNA, 15 bp, Homo sapiens
aaggtaactgctgtg

SEQ ID NO: 865110 - DNA, 15 bp, Homo sapiens
aggtaactgctgtgc

SEQ ID NO: 865111 - DNA, 15 bp, Homo sapiens
ggtaactgctgtgca

SEQ ID NO: 865112 - DNA, 15 bp, Homo sapiens
gtaactgctgtgcat

SEQ ID NO: 865113 - DNA, 15 bp, Homo sapiens
taactgctgtgcatt

SEQ ID NO: 865114 - DNA, 15 bp, Homo sapiens
aactgctgtgcattc

SEQ ID NO: 865115 - DNA, 15 bp, Homo sapiens
actgctgtgcattct

SEQ ID NO: 865116 - DNA, 15 bp, Homo sapiens
ctgctgtgcattctg

SEQ ID NO: 865117 - DNA, 15 bp, Homo sapiens
tgctgtgcattctga

SEQ ID NO: 865118 - DNA, 15 bp, Homo sapiens
gctgtgcattctgag

SEQ ID NO: 865119 - DNA, 15 bp, Homo sapiens
ctgtgcattctgagt

SEQ ID NO: 865120 - DNA, 15 bp, Homo sapiens
tgtgcattctgagtt

SEQ ID NO: 865121 - DNA, 15 bp, Homo sapiens
gtgcattctgagttt

SEQ ID NO: 865122 - DNA, 15 bp, Homo sapiens
tgcattctgagtttc

SEQ ID NO: 865123 - DNA, 15 bp, Homo sapiens
gcattctgagtttca

SEQ ID NO: 865124 - DNA, 15 bp, Homo sapiens
cattctgagtttcag

SEQ ID NO: 865125 - DNA, 15 bp, Homo sapiens
attctgagtttcagg

SEQ ID NO: 865126 - DNA, 15 bp, Homo sapiens
ttctgagtttcaggg

SEQ ID NO: 865127 - DNA, 15 bp, Homo sapiens
tctgagtttcagggt

SEQ ID NO: 865128 - DNA, 15 bp, Homo sapiens
ctgagtttcagggtg

SEQ ID NO: 865129 - DNA, 15 bp, Homo sapiens
tgagtttcagggtgc

SEQ ID NO: 865130 - DNA, 15 bp, Homo sapiens
gagtttcagggtgct

SEQ ID NO: 865131 - DNA, 15 bp, Homo sapiens
agtttcagggtgctt

SEQ ID NO: 865132 - DNA, 15 bp, Homo sapiens
gtttcagggtgcttt

SEQ ID NO: 865133 - DNA, 15 bp, Homo sapiens
tttcagggtgctttc

SEQ ID NO: 865134 - DNA, 15 bp, Homo sapiens
ttcagggtgctttcc

SEQ ID NO: 865135 - DNA, 15 bp, Homo sapiens
tcagggtgctttcct

SEQ ID NO: 865136 - DNA, 15 bp, Homo sapiens
cagggtgctttcctc

SEQ ID NO: 865137 - DNA, 15 bp, Homo sapiens
agggtgctttcctcc

SEQ ID NO: 865138 - DNA, 15 bp, Homo sapiens
gggtgctttcctcct

SEQ ID NO: 865139 - DNA, 15 bp, Homo sapiens
ggtgctttcctccta

SEQ ID NO: 865140 - DNA, 15 bp, Homo sapiens
gtgctttcctcctag

SEQ ID NO: 865141 - DNA, 15 bp, Homo sapiens
tgctttcctcctagt

SEQ ID NO: 865142 - DNA, 15 bp, Homo sapiens
gctttcctcctagtc

SEQ ID NO: 865143 - DNA, 15 bp, Homo sapiens
ctttcctcctagtct

SEQ ID NO: 865144 - DNA, 15 bp, Homo sapiens
tttcctcctagtctg

SEQ ID NO: 865145 - DNA, 15 bp, Homo sapiens
ttcctcctagtctgt

SEQ ID NO: 865146 - DNA, 15 bp, Homo sapiens
tcctcctagtctgtg

SEQ ID NO: 865147 - DNA, 15 bp, Homo sapiens
cctcctagtctgtgt

SEQ ID NO: 865148 - DNA, 15 bp, Homo sapiens
ctcctagtctgtgtt

SEQ ID NO: 865149 - DNA, 15 bp, Homo sapiens
tcctagtctgtgttg

SEQ ID NO: 865150 - DNA, 15 bp, Homo sapiens
cctagtctgtgttgc

SEQ ID NO: 865151 - DNA, 15 bp, Homo sapiens
ctagtctgtgttgca

SEQ ID NO: 865152 - DNA, 15 bp, Homo sapiens
tagtctgtgttgcag

SEQ ID NO: 865153 - DNA, 15 bp, Homo sapiens
agtctgtgttgcagt

SEQ ID NO: 865154 - DNA, 15 bp, Homo sapiens
gtctgtgttgcagtc

SEQ ID NO: 865155 - DNA, 15 bp, Homo sapiens
tctgtgttgcagtca

SEQ ID NO: 865156 - DNA, 15 bp, Homo sapiens
ctgtgttgcagtcaa

SEQ ID NO: 865157 - DNA, 15 bp, Homo sapiens
tgtgttgcagtcaac

SEQ ID NO: 865158 - DNA, 15 bp, Homo sapiens
gtgttgcagtcaact

SEQ ID NO: 865159 - DNA, 15 bp, Homo sapiens
tgttgcagtcaacta

SEQ ID NO: 865160 - DNA, 15 bp, Homo sapiens
gttgcagtcaactat

SEQ ID NO: 865161 - DNA, 15 bp, Homo sapiens
ttgcagtcaactata

SEQ ID NO: 865162 - DNA, 15 bp, Homo sapiens
tgcagtcaactataa

SEQ ID NO: 865163 - DNA, 15 bp, Homo sapiens
gcagtcaactataag

SEQ ID NO: 865164 - DNA, 15 bp, Homo sapiens
cagtcaactataaga

SEQ ID NO: 865165 - DNA, 15 bp, Homo sapiens
agtcaactataagaa

SEQ ID NO: 865166 - DNA, 15 bp, Homo sapiens
gtcaactataagaat

SEQ ID NO: 865167 - DNA, 15 bp, Homo sapiens
tcaactataagaatc

SEQ ID NO: 865168 - DNA, 15 bp, Homo sapiens
caactataagaatcc

SEQ ID NO: 865169 - DNA, 15 bp, Homo sapiens
aactataagaatcca

SEQ ID NO: 865170 - DNA, 15 bp, Homo sapiens
actataagaatccaa

SEQ ID NO: 865171 - DNA, 15 bp, Homo sapiens
ctataagaatccaaa

SEQ ID NO: 865172 - DNA, 15 bp, Homo sapiens
tataagaatccaaag

SEQ ID NO: 865173 - DNA, 15 bp, Homo sapiens
ataagaatccaaaga

SEQ ID NO: 865174 - DNA, 15 bp, Homo sapiens
taagaatccaaagat

SEQ ID NO: 865175 - DNA, 15 bp, Homo sapiens
aagaatccaaagatc

SEQ ID NO: 865176 - DNA, 15 bp, Homo sapiens
agaatccaaagatct

SEQ ID NO: 865177 - DNA, 15 bp, Homo sapiens
gaatccaaagatctt

SEQ ID NO: 865178 - DNA, 15 bp, Homo sapiens
aatccaaagatctta

SEQ ID NO: 865179 - DNA, 15 bp, Homo sapiens
atccaaagatcttat

SEQ ID NO: 865180 - DNA, 15 bp, Homo sapiens
tccaaagatcttatt

SEQ ID NO: 865181 - DNA, 15 bp, Homo sapiens
ccaaagatcttattt

SEQ ID NO: 865182 - DNA, 15 bp, Homo sapiens
caaagatcttatttt

SEQ ID NO: 865183 - DNA, 15 bp, Homo sapiens
aaagatcttattttt

SEQ ID NO: 865184 - DNA, 15 bp, Homo sapiens
aagatcttatttttc

SEQ ID NO: 865185 - DNA, 15 bp, Homo sapiens
agatcttatttttcc

SEQ ID NO: 865186 - DNA, 15 bp, Homo sapiens
gatcttatttttcct

SEQ ID NO: 865187 - DNA, 15 bp, Homo sapiens
atcttatttttcctt

SEQ ID NO: 865188 - DNA, 15 bp, Homo sapiens
tcttatttttccttc

SEQ ID NO: 865189 - DNA, 15 bp, Homo sapiens
cttatttttccttct

SEQ ID NO: 865190 - DNA, 15 bp, Homo sapiens
ttatttttccttctt

SEQ ID NO: 865191 - DNA, 15 bp, Homo sapiens
tatttttccttcttg

SEQ ID NO: 865192 - DNA, 15 bp, Homo sapiens
atttttccttcttga

SEQ ID NO: 865193 - DNA, 15 bp, Homo sapiens
tttttccttcttgat

SEQ ID NO: 865194 - DNA, 15 bp, Homo sapiens
ttttccttcttgata

SEQ ID NO: 865195 - DNA, 15 bp, Homo sapiens
tttccttcttgatat

SEQ ID NO: 865196 - DNA, 15 bp, Homo sapiens
ttccttcttgatatt

SEQ ID NO: 865197 - DNA, 15 bp, Homo sapiens
tccttcttgatatta

SEQ ID NO: 865198 - DNA, 15 bp, Homo sapiens
ccttcttgatattac

SEQ ID NO: 865199 - DNA, 15 bp, Homo sapiens
cttcttgatattaca

SEQ ID NO: 865200 - DNA, 15 bp, Homo sapiens
ttcttgatattacag

SEQ ID NO: 865201 - DNA, 15 bp, Homo sapiens
tcttgatattacagc

SEQ ID NO: 865202 - DNA, 15 bp, Homo sapiens
cttgatattacagct

SEQ ID NO: 865203 - DNA, 15 bp, Homo sapiens
ttgatattacagctt

SEQ ID NO: 865204 - DNA, 15 bp, Homo sapiens
tgatattacagcttt

SEQ ID NO: 865205 - DNA, 15 bp, Homo sapiens
gatattacagcttta

SEQ ID NO: 865206 - DNA, 15 bp, Homo sapiens
atattacagctttag

SEQ ID NO: 865207 - DNA, 15 bp, Homo sapiens
tattacagctttagc

SEQ ID NO: 865208 - DNA, 15 bp, Homo sapiens
attacagctttagcc

SEQ ID NO: 865209 - DNA, 15 bp, Homo sapiens
ttacagctttagcct

SEQ ID NO: 865210 - DNA, 15 bp, Homo sapiens
tacagctttagcctg

SEQ ID NO: 865211 - DNA, 15 bp, Homo sapiens
acagctttagcctga

SEQ ID NO: 865212 - DNA, 15 bp, Homo sapiens
cagctttagcctgaa

SEQ ID NO: 865213 - DNA, 15 bp, Homo sapiens
agctttagcctgaat

SEQ ID NO: 865214 - DNA, 15 bp, Homo sapiens
gctttagcctgaatt

SEQ ID NO: 865215 - DNA, 15 bp, Homo sapiens
ctttagcctgaattg

SEQ ID NO: 865216 - DNA, 15 bp, Homo sapiens
tttagcctgaattgt

SEQ ID NO: 865217 - DNA, 15 bp, Homo sapiens
ttagcctgaattgtg

SEQ ID NO: 865218 - DNA, 15 bp, Homo sapiens
tagcctgaattgtgg

SEQ ID NO: 865219 - DNA, 15 bp, Homo sapiens
agcctgaattgtggg

SEQ ID NO: 865220 - DNA, 15 bp, Homo sapiens
gcctgaattgtgggg

SEQ ID NO: 865221 - DNA, 15 bp, Homo sapiens
cctgaattgtggggg

SEQ ID NO: 865222 - DNA, 15 bp, Homo sapiens
ctgaattgtgggggt

SEQ ID NO: 865223 - DNA, 15 bp, Homo sapiens
tgaattgtgggggtg

SEQ ID NO: 865224 - DNA, 15 bp, Homo sapiens
gaattgtgggggtgg

SEQ ID NO: 865225 - DNA, 15 bp, Homo sapiens
aattgtgggggtggg

SEQ ID NO: 865226 - DNA, 15 bp, Homo sapiens
attgtgggggtgggg

SEQ ID NO: 865227 - DNA, 15 bp, Homo sapiens
ttgtgggggtgggga

SEQ ID NO: 865228 - DNA, 15 bp, Homo sapiens
tgtgggggtggggag

SEQ ID NO: 865229 - DNA, 15 bp, Homo sapiens
gtgggggtggggaga

SEQ ID NO: 865230 - DNA, 15 bp, Homo sapiens
tgggggtggggagag

SEQ ID NO: 865231 - DNA, 15 bp, Homo sapiens
gggggtggggagagg

SEQ ID NO: 865232 - DNA, 15 bp, Homo sapiens
ggggtggggagagga

SEQ ID NO: 865233 - DNA, 15 bp, Homo sapiens
gggtggggagaggag

SEQ ID NO: 865234 - DNA, 15 bp, Homo sapiens
ggtggggagaggagg

SEQ ID NO: 865235 - DNA, 15 bp, Homo sapiens
gtggggagaggagga

SEQ ID NO: 865236 - DNA, 15 bp, Homo sapiens
tggggagaggaggac

SEQ ID NO: 865237 - DNA, 15 bp, Homo sapiens
ggggagaggaggact

SEQ ID NO: 865238 - DNA, 15 bp, Homo sapiens
gggagaggaggacta

SEQ ID NO: 865239 - DNA, 15 bp, Homo sapiens
ggagaggaggactag

SEQ ID NO: 865240 - DNA, 15 bp, Homo sapiens
gagaggaggactaga

SEQ ID NO: 865241 - DNA, 15 bp, Homo sapiens
agaggaggactagaa

SEQ ID NO: 865242 - DNA, 15 bp, Homo sapiens
gaggaggactagaat

SEQ ID NO: 865243 - DNA, 15 bp, Homo sapiens
aggaggactagaatt

SEQ ID NO: 865244 - DNA, 15 bp, Homo sapiens
ggaggactagaattt

SEQ ID NO: 865245 - DNA, 15 bp, Homo sapiens
gaggactagaatttt

SEQ ID NO: 865246 - DNA, 15 bp, Homo sapiens
aggactagaattttg

SEQ ID NO: 865247 - DNA, 15 bp, Homo sapiens
ggactagaattttgc

SEQ ID NO: 865248 - DNA, 15 bp, Homo sapiens
gactagaattttgcc

SEQ ID NO: 865249 - DNA, 15 bp, Homo sapiens
actagaattttgccg

SEQ ID NO: 865250 - DNA, 15 bp, Homo sapiens
ctagaattttgccgc

SEQ ID NO: 865251 - DNA, 15 bp, Homo sapiens
tagaattttgccgct

SEQ ID NO: 865252 - DNA, 15 bp, Homo sapiens
agaattttgccgctg

SEQ ID NO: 865253 - DNA, 15 bp, Homo sapiens
gaattttgccgctga

SEQ ID NO: 865254 - DNA, 15 bp, Homo sapiens
aattttgccgctgat

SEQ ID NO: 865255 - DNA, 15 bp, Homo sapiens
attttgccgctgatg

SEQ ID NO: 865256 - DNA, 15 bp, Homo sapiens
ttttgccgctgatgc

SEQ ID NO: 865257 - DNA, 15 bp, Homo sapiens
tttgccgctgatgcc

SEQ ID NO: 865258 - DNA, 15 bp, Homo sapiens
ttgccgctgatgccc

SEQ ID NO: 865259 - DNA, 15 bp, Homo sapiens
tgccgctgatgcccc

SEQ ID NO: 865260 - DNA, 15 bp, Homo sapiens
gccgctgatgcccct

SEQ ID NO: 865261 - DNA, 15 bp, Homo sapiens
ccgctgatgcccctg

SEQ ID NO: 865262 - DNA, 15 bp, Homo sapiens
cgctgatgcccctgg

SEQ ID NO: 865263 - DNA, 15 bp, Homo sapiens
gctgatgcccctggg

SEQ ID NO: 865264 - DNA, 15 bp, Homo sapiens
ctgatgcccctgggt

SEQ ID NO: 865265 - DNA, 15 bp, Homo sapiens
tgatgcccctgggtg

SEQ ID NO: 865266 - DNA, 15 bp, Homo sapiens
gatgcccctgggtga

SEQ ID NO: 865267 - DNA, 15 bp, Homo sapiens
atgcccctgggtgac

SEQ ID NO: 865268 - DNA, 15 bp, Homo sapiens
tgcccctgggtgaca

SEQ ID NO: 865269 - DNA, 15 bp, Homo sapiens
gcccctgggtgacag

SEQ ID NO: 865270 - DNA, 15 bp, Homo sapiens
cccctgggtgacagg

SEQ ID NO: 865271 - DNA, 15 bp, Homo sapiens
ccctgggtgacaggc

SEQ ID NO: 865272 - DNA, 15 bp, Homo sapiens
cctgggtgacaggct

SEQ ID NO: 865273 - DNA, 15 bp, Homo sapiens
ctgggtgacaggctg

SEQ ID NO: 865274 - DNA, 15 bp, Homo sapiens
tgggtgacaggctgg

SEQ ID NO: 865275 - DNA, 15 bp, Homo sapiens
gggtgacaggctggg

SEQ ID NO: 865276 - DNA, 15 bp, Homo sapiens
ggtgacaggctgggt

SEQ ID NO: 865277 - DNA, 15 bp, Homo sapiens
gtgacaggctgggtt

SEQ ID NO: 865278 - DNA, 15 bp, Homo sapiens
tgacaggctgggttt

SEQ ID NO: 865279 - DNA, 15 bp, Homo sapiens
gacaggctgggtttg

SEQ ID NO: 865280 - DNA, 15 bp, Homo sapiens
acaggctgggtttgc

SEQ ID NO: 865281 - DNA, 15 bp, Homo sapiens
caggctgggtttgca

SEQ ID NO: 865282 - DNA, 15 bp, Homo sapiens
aggctgggtttgcat

SEQ ID NO: 865283 - DNA, 15 bp, Homo sapiens
ggctgggtttgcatc

SEQ ID NO: 865284 - DNA, 15 bp, Homo sapiens
gctgggtttgcatct

SEQ ID NO: 865285 - DNA, 15 bp, Homo sapiens
ctgggtttgcatctg

SEQ ID NO: 865286 - DNA, 15 bp, Homo sapiens
tgggtttgcatctgc

SEQ ID NO: 865287 - DNA, 15 bp, Homo sapiens
gggtttgcatctgct

SEQ ID NO: 865288 - DNA, 15 bp, Homo sapiens
ggtttgcatctgcta

SEQ ID NO: 865289 - DNA, 15 bp, Homo sapiens
gtttgcatctgctaa

SEQ ID NO: 865290 - DNA, 15 bp, Homo sapiens
tttgcatctgctaat

SEQ ID NO: 865291 - DNA, 15 bp, Homo sapiens
ttgcatctgctaatt

SEQ ID NO: 865292 - DNA, 15 bp, Homo sapiens
tgcatctgctaatta

SEQ ID NO: 865293 - DNA, 15 bp, Homo sapiens
gcatctgctaattat

SEQ ID NO: 865294 - DNA, 15 bp, Homo sapiens
catctgctaattatc

SEQ ID NO: 865295 - DNA, 15 bp, Homo sapiens
atctgctaattatca

SEQ ID NO: 865296 - DNA, 15 bp, Homo sapiens
tctgctaattatcaa

SEQ ID NO: 865297 - DNA, 15 bp, Homo sapiens
ctgctaattatcaag

SEQ ID NO: 865298 - DNA, 15 bp, Homo sapiens
tgctaattatcaagc

SEQ ID NO: 865299 - DNA, 15 bp, Homo sapiens
gctaattatcaagca

SEQ ID NO: 865300 - DNA, 15 bp, Homo sapiens
ctaattatcaagcag

SEQ ID NO: 865301 - DNA, 15 bp, Homo sapiens
taattatcaagcagt

SEQ ID NO: 865302 - DNA, 15 bp, Homo sapiens
aattatcaagcagtt

SEQ ID NO: 865303 - DNA, 15 bp, Homo sapiens
attatcaagcagttc

SEQ ID NO: 865304 - DNA, 15 bp, Homo sapiens
ttatcaagcagttct

SEQ ID NO: 865305 - DNA, 15 bp, Homo sapiens
tatcaagcagttctc

SEQ ID NO: 865306 - DNA, 15 bp, Homo sapiens
atcaagcagttctct

SEQ ID NO: 865307 - DNA, 15 bp, Homo sapiens
tcaagcagttctctt

SEQ ID NO: 865308 - DNA, 15 bp, Homo sapiens
caagcagttctctta

SEQ ID NO: 865309 - DNA, 15 bp, Homo sapiens
aagcagttctcttaa

SEQ ID NO: 865310 - DNA, 15 bp, Homo sapiens
agcagttctcttaaa

SEQ ID NO: 865311 - DNA, 15 bp, Homo sapiens
gcagttctcttaaaa

SEQ ID NO: 865312 - DNA, 15 bp, Homo sapiens
cagttctcttaaaaa

SEQ ID NO: 865313 - DNA, 15 bp, Homo sapiens
agttctcttaaaaag

SEQ ID NO: 865314 - DNA, 15 bp, Homo sapiens
gttctcttaaaaaga

SEQ ID NO: 865315 - DNA, 15 bp, Homo sapiens
ttctcttaaaaagaa

SEQ ID NO: 865316 - DNA, 15 bp, Homo sapiens
tctcttaaaaagaag

SEQ ID NO: 865317 - DNA, 15 bp, Homo sapiens
ctcttaaaaagaagc

SEQ ID NO: 865318 - DNA, 15 bp, Homo sapiens
tcttaaaaagaagca

SEQ ID NO: 865319 - DNA, 15 bp, Homo sapiens
cttaaaaagaagcat

SEQ ID NO: 865320 - DNA, 15 bp, Homo sapiens
ttaaaaagaagcatg

SEQ ID NO: 865321 - DNA, 15 bp, Homo sapiens
taaaaagaagcatga

SEQ ID NO: 865322 - DNA, 15 bp, Homo sapiens
aaaaagaagcatgat

SEQ ID NO: 865323 - DNA, 15 bp, Homo sapiens
aaaagaagcatgatg

SEQ ID NO: 865324 - DNA, 15 bp, Homo sapiens
aaagaagcatgatgc

SEQ ID NO: 865325 - DNA, 15 bp, Homo sapiens
aagaagcatgatgca

SEQ ID NO: 865326 - DNA, 15 bp, Homo sapiens
agaagcatgatgcag

SEQ ID NO: 865327 - DNA, 15 bp, Homo sapiens
gaagcatgatgcagg

SEQ ID NO: 865328 - DNA, 15 bp, Homo sapiens
aagcatgatgcaggc

SEQ ID NO: 865329 - DNA, 15 bp, Homo sapiens
agcatgatgcaggct

SEQ ID NO: 865330 - DNA, 15 bp, Homo sapiens
gcatgatgcaggcta

SEQ ID NO: 865331 - DNA, 15 bp, Homo sapiens
catgatgcaggctaa

SEQ ID NO: 865332 - DNA, 15 bp, Homo sapiens
atgatgcaggctaat

SEQ ID NO: 865333 - DNA, 15 bp, Homo sapiens
tgatgcaggctaata

SEQ ID NO: 865334 - DNA, 15 bp, Homo sapiens
gatgcaggctaatac

SEQ ID NO: 865335 - DNA, 15 bp, Homo sapiens
atgcaggctaataca

SEQ ID NO: 865336 - DNA, 15 bp, Homo sapiens
tgcaggctaatacat

SEQ ID NO: 865337 - DNA, 15 bp, Homo sapiens
gcaggctaatacatc

SEQ ID NO: 865338 - DNA, 15 bp, Homo sapiens
caggctaatacatct

SEQ ID NO: 865339 - DNA, 15 bp, Homo sapiens
aggctaatacatctg

SEQ ID NO: 865340 - DNA, 15 bp, Homo sapiens
ggctaatacatctgc

SEQ ID NO: 865341 - DNA, 15 bp, Homo sapiens
gctaatacatctgca

SEQ ID NO: 865342 - DNA, 15 bp, Homo sapiens
ctaatacatctgcaa

SEQ ID NO: 865343 - DNA, 15 bp, Homo sapiens
taatacatctgcaaa

SEQ ID NO: 865344 - DNA, 15 bp, Homo sapiens
aatacatctgcaaag

SEQ ID NO: 865345 - DNA, 15 bp, Homo sapiens
atacatctgcaaagc

SEQ ID NO: 865346 - DNA, 15 bp, Homo sapiens
tacatctgcaaagct

SEQ ID NO: 865347 - DNA, 15 bp, Homo sapiens
acatctgcaaagctt

SEQ ID NO: 865348 - DNA, 15 bp, Homo sapiens
catctgcaaagctta

SEQ ID NO: 865349 - DNA, 15 bp, Homo sapiens
atctgcaaagcttat

SEQ ID NO: 865350 - DNA, 15 bp, Homo sapiens
tctgcaaagcttatt

SEQ ID NO: 865351 - DNA, 15 bp, Homo sapiens
ctgcaaagcttatta

SEQ ID NO: 865352 - DNA, 15 bp, Homo sapiens
tgcaaagcttattag

SEQ ID NO: 865353 - DNA, 15 bp, Homo sapiens
gcaaagcttattagt

SEQ ID NO: 865354 - DNA, 15 bp, Homo sapiens
caaagcttattagtg

SEQ ID NO: 865355 - DNA, 15 bp, Homo sapiens
aaagcttattagtgg

SEQ ID NO: 865356 - DNA, 15 bp, Homo sapiens
aagcttattagtggg

SEQ ID NO: 865357 - DNA, 15 bp, Homo sapiens
agcttattagtgggt

SEQ ID NO: 865358 - DNA, 15 bp, Homo sapiens
gcttattagtgggtg

SEQ ID NO: 865359 - DNA, 15 bp, Homo sapiens
cttattagtgggtgt

SEQ ID NO: 865360 - DNA, 15 bp, Homo sapiens
ttattagtgggtgtc

SEQ ID NO: 865361 - DNA, 15 bp, Homo sapiens
tattagtgggtgtct

SEQ ID NO: 865362 - DNA, 15 bp, Homo sapiens
attagtgggtgtctt

SEQ ID NO: 865363 - DNA, 15 bp, Homo sapiens
ttagtgggtgtcttt

SEQ ID NO: 865364 - DNA, 15 bp, Homo sapiens
tagtgggtgtctttg

SEQ ID NO: 865365 - DNA, 15 bp, Homo sapiens
agtgggtgtctttgg

SEQ ID NO: 865366 - DNA, 15 bp, Homo sapiens
gtgggtgtctttggg

SEQ ID NO: 865367 - DNA, 15 bp, Homo sapiens
tgggtgtctttgggc

SEQ ID NO: 865368 - DNA, 15 bp, Homo sapiens
gggtgtctttgggca

SEQ ID NO: 865369 - DNA, 15 bp, Homo sapiens
ggtgtctttgggcaa

SEQ ID NO: 865370 - DNA, 15 bp, Homo sapiens
gtgtctttgggcaag

SEQ ID NO: 865371 - DNA, 15 bp, Homo sapiens
tgtctttgggcaaga

SEQ ID NO: 865372 - DNA, 15 bp, Homo sapiens
gtctttgggcaagag

SEQ ID NO: 865373 - DNA, 15 bp, Homo sapiens
tctttgggcaagagc

SEQ ID NO: 865374 - DNA, 15 bp, Homo sapiens
ctttgggcaagagca

SEQ ID NO: 865375 - DNA, 15 bp, Homo sapiens
tttgggcaagagcag

SEQ ID NO: 865376 - DNA, 15 bp, Homo sapiens
ttgggcaagagcagt

SEQ ID NO: 865377 - DNA, 15 bp, Homo sapiens
tgggcaagagcagta

SEQ ID NO: 865378 - DNA, 15 bp, Homo sapiens
gggcaagagcagtag

SEQ ID NO: 865379 - DNA, 15 bp, Homo sapiens
ggcaagagcagtaga

SEQ ID NO: 865380 - DNA, 15 bp, Homo sapiens
gcaagagcagtagag

SEQ ID NO: 865381 - DNA, 15 bp, Homo sapiens
caagagcagtagagt

SEQ ID NO: 865382 - DNA, 15 bp, Homo sapiens
aagagcagtagagtg

SEQ ID NO: 865383 - DNA, 15 bp, Homo sapiens
agagcagtagagtgt

SEQ ID NO: 865384 - DNA, 15 bp, Homo sapiens
gagcagtagagtgtg

SEQ ID NO: 865385 - DNA, 15 bp, Homo sapiens
agcagtagagtgtgc

SEQ ID NO: 865386 - DNA, 15 bp, Homo sapiens
gcagtagagtgtgct

SEQ ID NO: 865387 - DNA, 15 bp, Homo sapiens
cagtagagtgtgctg

SEQ ID NO: 865388 - DNA, 15 bp, Homo sapiens
agtagagtgtgctgt

SEQ ID NO: 865389 - DNA, 15 bp, Homo sapiens
gtagagtgtgctgtg

SEQ ID NO: 865390 - DNA, 15 bp, Homo sapiens
tagagtgtgctgtgg

SEQ ID NO: 865391 - DNA, 15 bp, Homo sapiens
agagtgtgctgtggt

SEQ ID NO: 865392 - DNA, 15 bp, Homo sapiens
gagtgtgctgtggtg

SEQ ID NO: 865393 - DNA, 15 bp, Homo sapiens
agtgtgctgtggtgt

SEQ ID NO: 865394 - DNA, 15 bp, Homo sapiens
gtgtgctgtggtgtt

SEQ ID NO: 865395 - DNA, 15 bp, Homo sapiens
tgtgctgtggtgttt

SEQ ID NO: 865396 - DNA, 15 bp, Homo sapiens
gtgctgtggtgtttc

SEQ ID NO: 865397 - DNA, 15 bp, Homo sapiens
tgctgtggtgtttct

SEQ ID NO: 865398 - DNA, 15 bp, Homo sapiens
gctgtggtgtttcta

SEQ ID NO: 865399 - DNA, 15 bp, Homo sapiens
ctgtggtgtttctaa

SEQ ID NO: 865400 - DNA, 15 bp, Homo sapiens
tgtggtgtttctaag

SEQ ID NO: 865401 - DNA, 15 bp, Homo sapiens
gtggtgtttctaagt

SEQ ID NO: 865402 - DNA, 15 bp, Homo sapiens
tggtgtttctaagtg

SEQ ID NO: 865403 - DNA, 15 bp, Homo sapiens
ggtgtttctaagtga

SEQ ID NO: 865404 - DNA, 15 bp, Homo sapiens
gtgtttctaagtgaa

SEQ ID NO: 865405 - DNA, 15 bp, Homo sapiens
tgtttctaagtgaag

SEQ ID NO: 865406 - DNA, 15 bp, Homo sapiens
gtttctaagtgaagc

SEQ ID NO: 865407 - DNA, 15 bp, Homo sapiens
tttctaagtgaagct

SEQ ID NO: 865408 - DNA, 15 bp, Homo sapiens
ttctaagtgaagctt

SEQ ID NO: 865409 - DNA, 15 bp, Homo sapiens
tctaagtgaagcttc

SEQ ID NO: 865410 - DNA, 15 bp, Homo sapiens
ctaagtgaagcttca

SEQ ID NO: 865411 - DNA, 15 bp, Homo sapiens
taagtgaagcttcac

SEQ ID NO: 865412 - DNA, 15 bp, Homo sapiens
aagtgaagcttcaca

SEQ ID NO: 865413 - DNA, 15 bp, Homo sapiens
agtgaagcttcacat

SEQ ID NO: 865414 - DNA, 15 bp, Homo sapiens
gtgaagcttcacatt

SEQ ID NO: 865415 - DNA, 15 bp, Homo sapiens
tgaagcttcacattg

SEQ ID NO: 865416 - DNA, 15 bp, Homo sapiens
gaagcttcacattgc

SEQ ID NO: 865417 - DNA, 15 bp, Homo sapiens
aagcttcacattgct

SEQ ID NO: 865418 - DNA, 15 bp, Homo sapiens
agcttcacattgctt

SEQ ID NO: 865419 - DNA, 15 bp, Homo sapiens
gcttcacattgctta

SEQ ID NO: 865420 - DNA, 15 bp, Homo sapiens
cttcacattgcttag

SEQ ID NO: 865421 - DNA, 15 bp, Homo sapiens
ttcacattgcttagc

SEQ ID NO: 865422 - DNA, 15 bp, Homo sapiens
tcacattgcttagca

SEQ ID NO: 865423 - DNA, 15 bp, Homo sapiens
cacattgcttagcaa

SEQ ID NO: 865424 - DNA, 15 bp, Homo sapiens
acattgcttagcaat

SEQ ID NO: 865425 - DNA, 15 bp, Homo sapiens
cattgcttagcaatc

SEQ ID NO: 865426 - DNA, 15 bp, Homo sapiens
attgcttagcaatct

SEQ ID NO: 865427 - DNA, 15 bp, Homo sapiens
ttgcttagcaatctg

SEQ ID NO: 865428 - DNA, 15 bp, Homo sapiens
tgcttagcaatctgt

SEQ ID NO: 865429 - DNA, 15 bp, Homo sapiens
gcttagcaatctgtg

SEQ ID NO: 865430 - DNA, 15 bp, Homo sapiens
cttagcaatctgtgt

SEQ ID NO: 865431 - DNA, 15 bp, Homo sapiens
ttagcaatctgtgtg

SEQ ID NO: 865432 - DNA, 15 bp, Homo sapiens
tagcaatctgtgtgg

SEQ ID NO: 865433 - DNA, 15 bp, Homo sapiens
agcaatctgtgtggt

SEQ ID NO: 865434 - DNA, 15 bp, Homo sapiens
gcaatctgtgtggtt

SEQ ID NO: 865435 - DNA, 15 bp, Homo sapiens
caatctgtgtggttt

SEQ ID NO: 865436 - DNA, 15 bp, Homo sapiens
aatctgtgtggttta

SEQ ID NO: 865437 - DNA, 15 bp, Homo sapiens
atctgtgtggtttag

SEQ ID NO: 865438 - DNA, 15 bp, Homo sapiens
tctgtgtggtttaga

SEQ ID NO: 865439 - DNA, 15 bp, Homo sapiens
ctgtgtggtttagac

SEQ ID NO: 865440 - DNA, 15 bp, Homo sapiens
tgtgtggtttagaca

SEQ ID NO: 865441 - DNA, 15 bp, Homo sapiens
gtgtggtttagacat

SEQ ID NO: 865442 - DNA, 15 bp, Homo sapiens
tgtggtttagacatt

SEQ ID NO: 865443 - DNA, 15 bp, Homo sapiens
gtggtttagacattt

SEQ ID NO: 865444 - DNA, 15 bp, Homo sapiens
tggtttagacatttg

SEQ ID NO: 865445 - DNA, 15 bp, Homo sapiens
ggtttagacatttgg

SEQ ID NO: 865446 - DNA, 15 bp, Homo sapiens
gtttagacatttgga

SEQ ID NO: 865447 - DNA, 15 bp, Homo sapiens
tttagacatttggaa

SEQ ID NO: 865448 - DNA, 15 bp, Homo sapiens
ttagacatttggaaa

SEQ ID NO: 865449 - DNA, 15 bp, Homo sapiens
tagacatttggaaaa

SEQ ID NO: 865450 - DNA, 15 bp, Homo sapiens
agacatttggaaaac

SEQ ID NO: 865451 - DNA, 15 bp, Homo sapiens
gacatttggaaaaca

SEQ ID NO: 865452 - DNA, 15 bp, Homo sapiens
acatttggaaaacag

SEQ ID NO: 865453 - DNA, 15 bp, Homo sapiens
catttggaaaacagc

SEQ ID NO: 865454 - DNA, 15 bp, Homo sapiens
atttggaaaacagct

SEQ ID NO: 865455 - DNA, 15 bp, Homo sapiens
tttggaaaacagctt

SEQ ID NO: 865456 - DNA, 15 bp, Homo sapiens
ttggaaaacagcttt

SEQ ID NO: 865457 - DNA, 15 bp, Homo sapiens
tggaaaacagctttt

SEQ ID NO: 865458 - DNA, 15 bp, Homo sapiens
ggaaaacagcttttg

SEQ ID NO: 865459 - DNA, 15 bp, Homo sapiens
gaaaacagcttttgg

SEQ ID NO: 865460 - DNA, 15 bp, Homo sapiens
aaaacagcttttggt

SEQ ID NO: 865461 - DNA, 15 bp, Homo sapiens
aaacagcttttggtt

SEQ ID NO: 865462 - DNA, 15 bp, Homo sapiens
aacagcttttggttt

SEQ ID NO: 865463 - DNA, 15 bp, Homo sapiens
acagcttttggtttc

SEQ ID NO: 865464 - DNA, 15 bp, Homo sapiens
cagcttttggtttcc

SEQ ID NO: 865465 - DNA, 15 bp, Homo sapiens
agcttttggtttcca

SEQ ID NO: 865466 - DNA, 15 bp, Homo sapiens
gcttttggtttccaa

SEQ ID NO: 865467 - DNA, 15 bp, Homo sapiens
cttttggtttccaat

SEQ ID NO: 865468 - DNA, 15 bp, Homo sapiens
ttttggtttccaatc

SEQ ID NO: 865469 - DNA, 15 bp, Homo sapiens
tttggtttccaatcc

SEQ ID NO: 865470 - DNA, 15 bp, Homo sapiens
ttggtttccaatccc

SEQ ID NO: 865471 - DNA, 15 bp, Homo sapiens
tggtttccaatcccc

SEQ ID NO: 865472 - DNA, 15 bp, Homo sapiens
ggtttccaatcccct

SEQ ID NO: 865473 - DNA, 15 bp, Homo sapiens
gtttccaatcccctg

SEQ ID NO: 865474 - DNA, 15 bp, Homo sapiens
tttccaatcccctgt

SEQ ID NO: 865475 - DNA, 15 bp, Homo sapiens
ttccaatcccctgtg

SEQ ID NO: 865476 - DNA, 15 bp, Homo sapiens
tccaatcccctgtgc

SEQ ID NO: 865477 - DNA, 15 bp, Homo sapiens
ccaatcccctgtgct

SEQ ID NO: 865478 - DNA, 15 bp, Homo sapiens
caatcccctgtgctg

SEQ ID NO: 865479 - DNA, 15 bp, Homo sapiens
aatcccctgtgctgc

SEQ ID NO: 865480 - DNA, 15 bp, Homo sapiens
atcccctgtgctgcc

SEQ ID NO: 865481 - DNA, 15 bp, Homo sapiens
tcccctgtgctgccc

SEQ ID NO: 865482 - DNA, 15 bp, Homo sapiens
cccctgtgctgccct

SEQ ID NO: 865483 - DNA, 15 bp, Homo sapiens
ccctgtgctgccctc

SEQ ID NO: 865484 - DNA, 15 bp, Homo sapiens
cctgtgctgccctcc

SEQ ID NO: 865485 - DNA, 15 bp, Homo sapiens
ctgtgctgccctcca

SEQ ID NO: 865486 - DNA, 15 bp, Homo sapiens
tgtgctgccctccat

SEQ ID NO: 865487 - DNA, 15 bp, Homo sapiens
gtgctgccctccatc

SEQ ID NO: 865488 - DNA, 15 bp, Homo sapiens
tgctgccctccatcc

SEQ ID NO: 865489 - DNA, 15 bp, Homo sapiens
gctgccctccatccc

SEQ ID NO: 865490 - DNA, 15 bp, Homo sapiens
ctgccctccatccct

SEQ ID NO: 865491 - DNA, 15 bp, Homo sapiens
tgccctccatccctg

SEQ ID NO: 865492 - DNA, 15 bp, Homo sapiens
gccctccatccctgc

SEQ ID NO: 865493 - DNA, 15 bp, Homo sapiens
ccctccatccctgcc

SEQ ID NO: 865494 - DNA, 15 bp, Homo sapiens
cctccatccctgccc

SEQ ID NO: 865495 - DNA, 15 bp, Homo sapiens
ctccatccctgcccc

SEQ ID NO: 865496 - DNA, 15 bp, Homo sapiens
tccatccctgccccg

SEQ ID NO: 865497 - DNA, 15 bp, Homo sapiens
ccatccctgccccgc

SEQ ID NO: 865498 - DNA, 15 bp, Homo sapiens
catccctgccccgct

SEQ ID NO: 865499 - DNA, 15 bp, Homo sapiens
atccctgccccgctg

SEQ ID NO: 865500 - DNA, 15 bp, Homo sapiens
tccctgccccgctgc

SEQ ID NO: 865501 - DNA, 15 bp, Homo sapiens
ccctgccccgctgct

SEQ ID NO: 865502 - DNA, 15 bp, Homo sapiens
cctgccccgctgctg

SEQ ID NO: 865503 - DNA, 15 bp, Homo sapiens
ctgccccgctgctgc

SEQ ID NO: 865504 - DNA, 15 bp, Homo sapiens
tgccccgctgctgca

SEQ ID NO: 865505 - DNA, 15 bp, Homo sapiens
gccccgctgctgcat

SEQ ID NO: 865506 - DNA, 15 bp, Homo sapiens
ccccgctgctgcatc

SEQ ID NO: 865507 - DNA, 15 bp, Homo sapiens
ccgctgctgcatcat

SEQ ID NO: 865508 - DNA, 15 bp, Homo sapiens
cgctgctgcatcatc

SEQ ID NO: 865509 - DNA, 15 bp, Homo sapiens
gctgctgcatcatca

SEQ ID NO: 865510 - DNA, 15 bp, Homo sapiens
ctgctgcatcatcag

SEQ ID NO: 865511 - DNA, 15 bp, Homo sapiens
tgctgcatcatcaga

SEQ ID NO: 865512 - DNA, 15 bp, Homo sapiens
gctgcatcatcagag

SEQ ID NO: 865513 - DNA, 15 bp, Homo sapiens
ctgcatcatcagaga

SEQ ID NO: 865514 - DNA, 15 bp, Homo sapiens
tgcatcatcagagat

SEQ ID NO: 865515 - DNA, 15 bp, Homo sapiens
gcatcatcagagatt

SEQ ID NO: 865516 - DNA, 15 bp, Homo sapiens
catcatcagagattt

SEQ ID NO: 865517 - DNA, 15 bp, Homo sapiens
atcatcagagatttc

SEQ ID NO: 865518 - DNA, 15 bp, Homo sapiens
tcatcagagatttca

SEQ ID NO: 865519 - DNA, 15 bp, Homo sapiens
catcagagatttcat

SEQ ID NO: 865520 - DNA, 15 bp, Homo sapiens
atcagagatttcatt

SEQ ID NO: 865521 - DNA, 15 bp, Homo sapiens
tcagagatttcattc

SEQ ID NO: 865522 - DNA, 15 bp, Homo sapiens
cagagatttcattca

SEQ ID NO: 865523 - DNA, 15 bp, Homo sapiens
agagatttcattcaa

SEQ ID NO: 865524 - DNA, 15 bp, Homo sapiens
gagatttcattcaat

SEQ ID NO: 865525 - DNA, 15 bp, Homo sapiens
agatttcattcaatg

SEQ ID NO: 865526 - DNA, 15 bp, Homo sapiens
gatttcattcaatgg

SEQ ID NO: 865527 - DNA, 15 bp, Homo sapiens
atttcattcaatggc

SEQ ID NO: 865528 - DNA, 15 bp, Homo sapiens
tttcattcaatggca

SEQ ID NO: 865529 - DNA, 15 bp, Homo sapiens
ttcattcaatggcaa

SEQ ID NO: 865530 - DNA, 15 bp, Homo sapiens
tcattcaatggcaac

SEQ ID NO: 865531 - DNA, 15 bp, Homo sapiens
cattcaatggcaacc

SEQ ID NO: 865532 - DNA, 15 bp, Homo sapiens
attcaatggcaacct

SEQ ID NO: 865533 - DNA, 15 bp, Homo sapiens
ttcaatggcaacctc

SEQ ID NO: 865534 - DNA, 15 bp, Homo sapiens
tcaatggcaacctcc

SEQ ID NO: 865535 - DNA, 15 bp, Homo sapiens
caatggcaacctcct

SEQ ID NO: 865536 - DNA, 15 bp, Homo sapiens
aatggcaacctcctc

SEQ ID NO: 865537 - DNA, 15 bp, Homo sapiens
atggcaacctcctcc

SEQ ID NO: 865538 - DNA, 15 bp, Homo sapiens
tggcaacctcctcct

SEQ ID NO: 865539 - DNA, 15 bp, Homo sapiens
ggcaacctcctcctt

SEQ ID NO: 865540 - DNA, 15 bp, Homo sapiens
gcaacctcctccttc

SEQ ID NO: 865541 - DNA, 15 bp, Homo sapiens
caacctcctccttca

SEQ ID NO: 865542 - DNA, 15 bp, Homo sapiens
aacctcctccttcat

SEQ ID NO: 865543 - DNA, 15 bp, Homo sapiens
acctcctccttcatt

SEQ ID NO: 865544 - DNA, 15 bp, Homo sapiens
cctcctccttcattc

SEQ ID NO: 865545 - DNA, 15 bp, Homo sapiens
ctcctccttcattcc

SEQ ID NO: 865546 - DNA, 15 bp, Homo sapiens
tcctccttcattccg

SEQ ID NO: 865547 - DNA, 15 bp, Homo sapiens
cctccttcattccgg

SEQ ID NO: 865548 - DNA, 15 bp, Homo sapiens
ctccttcattccggg

SEQ ID NO: 865549 - DNA, 15 bp, Homo sapiens
tccttcattccgggg

SEQ ID NO: 865550 - DNA, 15 bp, Homo sapiens
ccttcattccggggc

SEQ ID NO: 865551 - DNA, 15 bp, Homo sapiens
cttcattccggggct

SEQ ID NO: 865552 - DNA, 15 bp, Homo sapiens
ttcattccggggctc

SEQ ID NO: 865553 - DNA, 15 bp, Homo sapiens
tcattccggggctct

SEQ ID NO: 865554 - DNA, 15 bp, Homo sapiens
cattccggggctctc

SEQ ID NO: 865555 - DNA, 15 bp, Homo sapiens
attccggggctctcc

SEQ ID NO: 865556 - DNA, 15 bp, Homo sapiens
ttccggggctctcct

SEQ ID NO: 865557 - DNA, 15 bp, Homo sapiens
tccggggctctcctc

SEQ ID NO: 865558 - DNA, 15 bp, Homo sapiens
ccggggctctcctcc

SEQ ID NO: 865559 - DNA, 15 bp, Homo sapiens
cggggctctcctcca

SEQ ID NO: 865560 - DNA, 15 bp, Homo sapiens
ggggctctcctccaa

SEQ ID NO: 865561 - DNA, 15 bp, Homo sapiens
gggctctcctccaac

SEQ ID NO: 865562 - DNA, 15 bp, Homo sapiens
ggctctcctccaacc

SEQ ID NO: 865563 - DNA, 15 bp, Homo sapiens
gctctcctccaacct

SEQ ID NO: 865564 - DNA, 15 bp, Homo sapiens
ctctcctccaacctc

SEQ ID NO: 865565 - DNA, 15 bp, Homo sapiens
tctcctccaacctca

SEQ ID NO: 865566 - DNA, 15 bp, Homo sapiens
ctcctccaacctcac

SEQ ID NO: 865567 - DNA, 15 bp, Homo sapiens
tcctccaacctcacc

SEQ ID NO: 865568 - DNA, 15 bp, Homo sapiens
cctccaacctcacca

SEQ ID NO: 865569 - DNA, 15 bp, Homo sapiens
ctccaacctcaccag

SEQ ID NO: 865570 - DNA, 15 bp, Homo sapiens
tccaacctcaccagc

SEQ ID NO: 865571 - DNA, 15 bp, Homo sapiens
ccaacctcaccagcc

SEQ ID NO: 865572 - DNA, 15 bp, Homo sapiens
caacctcaccagccc

SEQ ID NO: 865573 - DNA, 15 bp, Homo sapiens
aacctcaccagcccc

SEQ ID NO: 865574 - DNA, 15 bp, Homo sapiens
acctcaccagccccg

SEQ ID NO: 865575 - DNA, 15 bp, Homo sapiens
cctcaccagccccgg

SEQ ID NO: 865576 - DNA, 15 bp, Homo sapiens
ctcaccagccccggt

SEQ ID NO: 865577 - DNA, 15 bp, Homo sapiens
tcaccagccccggtg

SEQ ID NO: 865578 - DNA, 15 bp, Homo sapiens
caccagccccggtgc

SEQ ID NO: 865579 - DNA, 15 bp, Homo sapiens
accagccccggtgct

SEQ ID NO: 865580 - DNA, 15 bp, Homo sapiens
ccagccccggtgctc

SEQ ID NO: 865581 - DNA, 15 bp, Homo sapiens
cagccccggtgctcc

SEQ ID NO: 865582 - DNA, 15 bp, Homo sapiens
agccccggtgctcct

SEQ ID NO: 865583 - DNA, 15 bp, Homo sapiens
gccccggtgctcctg

SEQ ID NO: 865584 - DNA, 15 bp, Homo sapiens
ccccggtgctcctgt

SEQ ID NO: 865585 - DNA, 15 bp, Homo sapiens
cccggtgctcctgtc

SEQ ID NO: 865586 - DNA, 15 bp, Homo sapiens
ccggtgctcctgtct

SEQ ID NO: 865587 - DNA, 15 bp, Homo sapiens
cggtgctcctgtctt

SEQ ID NO: 865588 - DNA, 15 bp, Homo sapiens
ggtgctcctgtcttc

SEQ ID NO: 865589 - DNA, 15 bp, Homo sapiens
gtgctcctgtcttca

SEQ ID NO: 865590 - DNA, 15 bp, Homo sapiens
tgctcctgtcttcat

SEQ ID NO: 865591 - DNA, 15 bp, Homo sapiens
gctcctgtcttcatg

SEQ ID NO: 865592 - DNA, 15 bp, Homo sapiens
ctcctgtcttcatgg

SEQ ID NO: 865593 - DNA, 15 bp, Homo sapiens
tcctgtcttcatggg

SEQ ID NO: 865594 - DNA, 15 bp, Homo sapiens
cctgtcttcatgggt

SEQ ID NO: 865595 - DNA, 15 bp, Homo sapiens
ctgtcttcatgggtt

SEQ ID NO: 865596 - DNA, 15 bp, Homo sapiens
tgtcttcatgggttg

SEQ ID NO: 865597 - DNA, 15 bp, Homo sapiens
gtcttcatgggttga

SEQ ID NO: 865598 - DNA, 15 bp, Homo sapiens
tcttcatgggttgaa

SEQ ID NO: 865599 - DNA, 15 bp, Homo sapiens
cttcatgggttgaaa

SEQ ID NO: 865600 - DNA, 15 bp, Homo sapiens
ttcatgggttgaaaa

SEQ ID NO: 865601 - DNA, 15 bp, Homo sapiens
tcatgggttgaaaaa

SEQ ID NO: 865602 - DNA, 15 bp, Homo sapiens
catgggttgaaaaag

SEQ ID NO: 865603 - DNA, 15 bp, Homo sapiens
atgggttgaaaaagg

SEQ ID NO: 865604 - DNA, 15 bp, Homo sapiens
tgggttgaaaaagga

SEQ ID NO: 865605 - DNA, 15 bp, Homo sapiens
gggttgaaaaaggac

SEQ ID NO: 865606 - DNA, 15 bp, Homo sapiens
ggttgaaaaaggacc

SEQ ID NO: 865607 - DNA, 15 bp, Homo sapiens
gttgaaaaaggaccc

SEQ ID NO: 865608 - DNA, 15 bp, Homo sapiens
ttgaaaaaggacccc

SEQ ID NO: 865609 - DNA, 15 bp, Homo sapiens
tgaaaaaggaccccg

SEQ ID NO: 865610 - DNA, 15 bp, Homo sapiens
gaaaaaggaccccgt

SEQ ID NO: 865611 - DNA, 15 bp, Homo sapiens
aaaaaggaccccgtt

SEQ ID NO: 865612 - DNA, 15 bp, Homo sapiens
aaaaggaccccgttg

SEQ ID NO: 865613 - DNA, 15 bp, Homo sapiens
aaaggaccccgttgg

SEQ ID NO: 865614 - DNA, 15 bp, Homo sapiens
aaggaccccgttggc

SEQ ID NO: 865615 - DNA, 15 bp, Homo sapiens
aggaccccgttggca

SEQ ID NO: 865616 - DNA, 15 bp, Homo sapiens
ggaccccgttggcac

SEQ ID NO: 865617 - DNA, 15 bp, Homo sapiens
gaccccgttggcaca

SEQ ID NO: 865618 - DNA, 15 bp, Homo sapiens
accccgttggcacag

SEQ ID NO: 865619 - DNA, 15 bp, Homo sapiens
ccccgttggcacagc

SEQ ID NO: 865620 - DNA, 15 bp, Homo sapiens
cccgttggcacagcc

SEQ ID NO: 865621 - DNA, 15 bp, Homo sapiens
ccgttggcacagccc

SEQ ID NO: 865622 - DNA, 15 bp, Homo sapiens
cgttggcacagcccc

SEQ ID NO: 865623 - DNA, 15 bp, Homo sapiens
gttggcacagcccca

SEQ ID NO: 865624 - DNA, 15 bp, Homo sapiens
ttggcacagccccac

SEQ ID NO: 865625 - DNA, 15 bp, Homo sapiens
tggcacagccccaca

SEQ ID NO: 865626 - DNA, 15 bp, Homo sapiens
ggcacagccccacaa

SEQ ID NO: 865627 - DNA, 15 bp, Homo sapiens
gcacagccccacaag

SEQ ID NO: 865628 - DNA, 15 bp, Homo sapiens
cacagccccacaagc

SEQ ID NO: 865629 - DNA, 15 bp, Homo sapiens
acagccccacaagcc

SEQ ID NO: 865630 - DNA, 15 bp, Homo sapiens
cagccccacaagccc

SEQ ID NO: 865631 - DNA, 15 bp, Homo sapiens
agccccacaagccct

SEQ ID NO: 865632 - DNA, 15 bp, Homo sapiens
gccccacaagccctc

SEQ ID NO: 865633 - DNA, 15 bp, Homo sapiens
ccccacaagccctcc

SEQ ID NO: 865634 - DNA, 15 bp, Homo sapiens
cccacaagccctccc

SEQ ID NO: 865635 - DNA, 15 bp, Homo sapiens
ccacaagccctccct

SEQ ID NO: 865636 - DNA, 15 bp, Homo sapiens
cacaagccctccctc

SEQ ID NO: 865637 - DNA, 15 bp, Homo sapiens
acaagccctccctcc

SEQ ID NO: 865638 - DNA, 15 bp, Homo sapiens
caagccctccctcct

SEQ ID NO: 865639 - DNA, 15 bp, Homo sapiens
aagccctccctcctg

SEQ ID NO: 865640 - DNA, 15 bp, Homo sapiens
agccctccctcctgg

SEQ ID NO: 865641 - DNA, 15 bp, Homo sapiens
gccctccctcctggc

SEQ ID NO: 865642 - DNA, 15 bp, Homo sapiens
ccctccctcctggca

SEQ ID NO: 865643 - DNA, 15 bp, Homo sapiens
cctccctcctggcag

SEQ ID NO: 865644 - DNA, 15 bp, Homo sapiens
ctccctcctggcagt

SEQ ID NO: 865645 - DNA, 15 bp, Homo sapiens
tccctcctggcagtt

SEQ ID NO: 865646 - DNA, 15 bp, Homo sapiens
ccctcctggcagttg

SEQ ID NO: 865647 - DNA, 15 bp, Homo sapiens
cctcctggcagttgg

SEQ ID NO: 865648 - DNA, 15 bp, Homo sapiens
ctcctggcagttgga

SEQ ID NO: 865649 - DNA, 15 bp, Homo sapiens
tcctggcagttggag

SEQ ID NO: 865650 - DNA, 15 bp, Homo sapiens
cctggcagttggagg

SEQ ID NO: 865651 - DNA, 15 bp, Homo sapiens
ctggcagttggaggg

SEQ ID NO: 865652 - DNA, 15 bp, Homo sapiens
tggcagttggaggga

SEQ ID NO: 865653 - DNA, 15 bp, Homo sapiens
ggcagttggagggat

SEQ ID NO: 865654 - DNA, 15 bp, Homo sapiens
gcagttggagggata

SEQ ID NO: 865655 - DNA, 15 bp, Homo sapiens
cagttggagggataa

SEQ ID NO: 865656 - DNA, 15 bp, Homo sapiens
agttggagggataag

SEQ ID NO: 865657 - DNA, 15 bp, Homo sapiens
gttggagggataaga

SEQ ID NO: 865658 - DNA, 15 bp, Homo sapiens
ttggagggataagag

SEQ ID NO: 865659 - DNA, 15 bp, Homo sapiens
tggagggataagagc

SEQ ID NO: 865660 - DNA, 15 bp, Homo sapiens
ggagggataagagct

SEQ ID NO: 865661 - DNA, 15 bp, Homo sapiens
gagggataagagctg

SEQ ID NO: 865662 - DNA, 15 bp, Homo sapiens
agggataagagctga

SEQ ID NO: 865663 - DNA, 15 bp, Homo sapiens
gggataagagctgag

SEQ ID NO: 865664 - DNA, 15 bp, Homo sapiens
ggataagagctgagt

SEQ ID NO: 865665 - DNA, 15 bp, Homo sapiens
gataagagctgagtt

SEQ ID NO: 865666 - DNA, 15 bp, Homo sapiens
ataagagctgagttg

SEQ ID NO: 865667 - DNA, 15 bp, Homo sapiens
taagagctgagttgg

SEQ ID NO: 865668 - DNA, 15 bp, Homo sapiens
aagagctgagttggg

SEQ ID NO: 865669 - DNA, 15 bp, Homo sapiens
agagctgagttgggc

SEQ ID NO: 865670 - DNA, 15 bp, Homo sapiens
gagctgagttgggct

SEQ ID NO: 865671 - DNA, 15 bp, Homo sapiens
agctgagttgggctg

SEQ ID NO: 865672 - DNA, 15 bp, Homo sapiens
gctgagttgggctgg

SEQ ID NO: 865673 - DNA, 15 bp, Homo sapiens
tgagttgggctgggg

SEQ ID NO: 865674 - DNA, 15 bp, Homo sapiens
gagttgggctgggga

SEQ ID NO: 865675 - DNA, 15 bp, Homo sapiens
agttgggctggggat

SEQ ID NO: 865676 - DNA, 15 bp, Homo sapiens
gttgggctggggatt

SEQ ID NO: 865677 - DNA, 15 bp, Homo sapiens
ttgggctggggatta

SEQ ID NO: 865678 - DNA, 15 bp, Homo sapiens
tgggctggggattat

SEQ ID NO: 865679 - DNA, 15 bp, Homo sapiens
gggctggggattatt

SEQ ID NO: 865680 - DNA, 15 bp, Homo sapiens
ggctggggattattg

SEQ ID NO: 865681 - DNA, 15 bp, Homo sapiens
gctggggattattga

SEQ ID NO: 865682 - DNA, 15 bp, Homo sapiens
ctggggattattgag

SEQ ID NO: 865683 - DNA, 15 bp, Homo sapiens
tggggattattgagc

SEQ ID NO: 865684 - DNA, 15 bp, Homo sapiens
ggggattattgagcc

SEQ ID NO: 865685 - DNA, 15 bp, Homo sapiens
gggattattgagcca

SEQ ID NO: 865686 - DNA, 15 bp, Homo sapiens
ggattattgagccag

SEQ ID NO: 865687 - DNA, 15 bp, Homo sapiens
gattattgagccagc

SEQ ID NO: 865688 - DNA, 15 bp, Homo sapiens
attattgagccagca

SEQ ID NO: 865689 - DNA, 15 bp, Homo sapiens
ttattgagccagcat

SEQ ID NO: 865690 - DNA, 15 bp, Homo sapiens
tattgagccagcatg

SEQ ID NO: 865691 - DNA, 15 bp, Homo sapiens
attgagccagcatgc

SEQ ID NO: 865692 - DNA, 15 bp, Homo sapiens
ttgagccagcatgca

SEQ ID NO: 865693 - DNA, 15 bp, Homo sapiens
tgagccagcatgcac

SEQ ID NO: 865694 - DNA, 15 bp, Homo sapiens
gagccagcatgcacc

SEQ ID NO: 865695 - DNA, 15 bp, Homo sapiens
agccagcatgcacca

SEQ ID NO: 865696 - DNA, 15 bp, Homo sapiens
gccagcatgcaccaa

SEQ ID NO: 865697 - DNA, 15 bp, Homo sapiens
ccagcatgcaccaat

SEQ ID NO: 865698 - DNA, 15 bp, Homo sapiens
cagcatgcaccaatg

SEQ ID NO: 865699 - DNA, 15 bp, Homo sapiens
agcatgcaccaatgt

SEQ ID NO: 865700 - DNA, 15 bp, Homo sapiens
gcatgcaccaatgtg

SEQ ID NO: 865701 - DNA, 15 bp, Homo sapiens
catgcaccaatgtgc

SEQ ID NO: 865702 - DNA, 15 bp, Homo sapiens
atgcaccaatgtgcc

SEQ ID NO: 865703 - DNA, 15 bp, Homo sapiens
tgcaccaatgtgccc

SEQ ID NO: 865704 - DNA, 15 bp, Homo sapiens
gcaccaatgtgcccc

SEQ ID NO: 865705 - DNA, 15 bp, Homo sapiens
caccaatgtgccccg

SEQ ID NO: 865706 - DNA, 15 bp, Homo sapiens
accaatgtgccccga

SEQ ID NO: 865707 - DNA, 15 bp, Homo sapiens
ccaatgtgccccgat

SEQ ID NO: 865708 - DNA, 15 bp, Homo sapiens
caatgtgccccgatc

SEQ ID NO: 865709 - DNA, 15 bp, Homo sapiens
aatgtgccccgatct

SEQ ID NO: 865710 - DNA, 15 bp, Homo sapiens
atgtgccccgatctg

SEQ ID NO: 865711 - DNA, 15 bp, Homo sapiens
tgtgccccgatctga

SEQ ID NO: 865712 - DNA, 15 bp, Homo sapiens
gtgccccgatctgat

SEQ ID NO: 865713 - DNA, 15 bp, Homo sapiens
tgccccgatctgatt

SEQ ID NO: 865714 - DNA, 15 bp, Homo sapiens
gccccgatctgattg

SEQ ID NO: 865715 - DNA, 15 bp, Homo sapiens
ccccgatctgattga

SEQ ID NO: 865716 - DNA, 15 bp, Homo sapiens
cccgatctgattgaa

SEQ ID NO: 865717 - DNA, 15 bp, Homo sapiens
ccgatctgattgaaa

SEQ ID NO: 865718 - DNA, 15 bp, Homo sapiens
cgatctgattgaaac

SEQ ID NO: 865719 - DNA, 15 bp, Homo sapiens
gatctgattgaaaca

SEQ ID NO: 865720 - DNA, 15 bp, Homo sapiens
atctgattgaaacat

SEQ ID NO: 865721 - DNA, 15 bp, Homo sapiens
tctgattgaaacatt

SEQ ID NO: 865722 - DNA, 15 bp, Homo sapiens
ctgattgaaacattg

SEQ ID NO: 865723 - DNA, 15 bp, Homo sapiens
tgattgaaacattgg

SEQ ID NO: 865724 - DNA, 15 bp, Homo sapiens
gattgaaacattggc

SEQ ID NO: 865725 - DNA, 15 bp, Homo sapiens
attgaaacattggct

SEQ ID NO: 865726 - DNA, 15 bp, Homo sapiens
ttgaaacattggctg

SEQ ID NO: 865727 - DNA, 15 bp, Homo sapiens
tgaaacattggctgt

SEQ ID NO: 865728 - DNA, 15 bp, Homo sapiens
gaaacattggctgtc

SEQ ID NO: 865729 - DNA, 15 bp, Homo sapiens
aaacattggctgtca

SEQ ID NO: 865730 - DNA, 15 bp, Homo sapiens
aacattggctgtcaa

SEQ ID NO: 865731 - DNA, 15 bp, Homo sapiens
acattggctgtcaag

SEQ ID NO: 865732 - DNA, 15 bp, Homo sapiens
cattggctgtcaagg

SEQ ID NO: 865733 - DNA, 15 bp, Homo sapiens
attggctgtcaaggc

SEQ ID NO: 865734 - DNA, 15 bp, Homo sapiens
ttggctgtcaaggcc

SEQ ID NO: 865735 - DNA, 15 bp, Homo sapiens
tggctgtcaaggcct

SEQ ID NO: 865736 - DNA, 15 bp, Homo sapiens
ggctgtcaaggcctt

SEQ ID NO: 865737 - DNA, 15 bp, Homo sapiens
gctgtcaaggccttg

SEQ ID NO: 865738 - DNA, 15 bp, Homo sapiens
ctgtcaaggccttga

SEQ ID NO: 865739 - DNA, 15 bp, Homo sapiens
tgtcaaggccttgaa

SEQ ID NO: 865740 - DNA, 15 bp, Homo sapiens
gtcaaggccttgaat

SEQ ID NO: 865741 - DNA, 15 bp, Homo sapiens
tcaaggccttgaatc

SEQ ID NO: 865742 - DNA, 15 bp, Homo sapiens
caaggccttgaatcc

SEQ ID NO: 865743 - DNA, 15 bp, Homo sapiens
aaggccttgaatcct

SEQ ID NO: 865744 - DNA, 15 bp, Homo sapiens
aggccttgaatcctt

SEQ ID NO: 865745 - DNA, 15 bp, Homo sapiens
ggccttgaatccttg

SEQ ID NO: 865746 - DNA, 15 bp, Homo sapiens
gccttgaatccttgc

SEQ ID NO: 865747 - DNA, 15 bp, Homo sapiens
ccttgaatccttgcc

SEQ ID NO: 865748 - DNA, 15 bp, Homo sapiens
cttgaatccttgcct

SEQ ID NO: 865749 - DNA, 15 bp, Homo sapiens
ttgaatccttgcctc

SEQ ID NO: 865750 - DNA, 15 bp, Homo sapiens
tgaatccttgcctct

SEQ ID NO: 865751 - DNA, 15 bp, Homo sapiens
gaatccttgcctctt

SEQ ID NO: 865752 - DNA, 15 bp, Homo sapiens
aatccttgcctcttt

SEQ ID NO: 865753 - DNA, 15 bp, Homo sapiens
atccttgcctctttt

SEQ ID NO: 865754 - DNA, 15 bp, Homo sapiens
tccttgcctcttttc

SEQ ID NO: 865755 - DNA, 15 bp, Homo sapiens
ccttgcctcttttca

SEQ ID NO: 865756 - DNA, 15 bp, Homo sapiens
cttgcctcttttcaa

SEQ ID NO: 865757 - DNA, 15 bp, Homo sapiens
ttgcctcttttcaac

SEQ ID NO: 865758 - DNA, 15 bp, Homo sapiens
tgcctcttttcaacg

SEQ ID NO: 865759 - DNA, 15 bp, Homo sapiens
gcctcttttcaacgc

SEQ ID NO: 865760 - DNA, 15 bp, Homo sapiens
cctcttttcaacgct

SEQ ID NO: 865761 - DNA, 15 bp, Homo sapiens
ctcttttcaacgctc

SEQ ID NO: 865762 - DNA, 15 bp, Homo sapiens
tcttttcaacgctct

SEQ ID NO: 865763 - DNA, 15 bp, Homo sapiens
cttttcaacgctctt

SEQ ID NO: 865764 - DNA, 15 bp, Homo sapiens
ttttcaacgctcttt

SEQ ID NO: 865765 - DNA, 15 bp, Homo sapiens
tttcaacgctctttc

SEQ ID NO: 865766 - DNA, 15 bp, Homo sapiens
ttcaacgctctttct

SEQ ID NO: 865767 - DNA, 15 bp, Homo sapiens
tcaacgctctttctc

SEQ ID NO: 865768 - DNA, 15 bp, Homo sapiens
caacgctctttctct

SEQ ID NO: 865769 - DNA, 15 bp, Homo sapiens
aacgctctttctctg

SEQ ID NO: 865770 - DNA, 15 bp, Homo sapiens
acgctctttctctgg

SEQ ID NO: 865771 - DNA, 15 bp, Homo sapiens
cgctctttctctggt

SEQ ID NO: 865772 - DNA, 15 bp, Homo sapiens
gctctttctctggta

SEQ ID NO: 865773 - DNA, 15 bp, Homo sapiens
ctctttctctggtat

SEQ ID NO: 865774 - DNA, 15 bp, Homo sapiens
tctttctctggtatg

SEQ ID NO: 865775 - DNA, 15 bp, Homo sapiens
ctttctctggtatgc

SEQ ID NO: 865776 - DNA, 15 bp, Homo sapiens
tttctctggtatgca

SEQ ID NO: 865777 - DNA, 15 bp, Homo sapiens
ttctctggtatgcag

SEQ ID NO: 865778 - DNA, 15 bp, Homo sapiens
tctctggtatgcagg

SEQ ID NO: 865779 - DNA, 15 bp, Homo sapiens
ctctggtatgcaggg

SEQ ID NO: 865780 - DNA, 15 bp, Homo sapiens
tctggtatgcagggg

SEQ ID NO: 865781 - DNA, 15 bp, Homo sapiens
ctggtatgcaggggt

SEQ ID NO: 865782 - DNA, 15 bp, Homo sapiens
tggtatgcaggggtt

SEQ ID NO: 865783 - DNA, 15 bp, Homo sapiens
ggtatgcaggggtta

SEQ ID NO: 865784 - DNA, 15 bp, Homo sapiens
gtatgcaggggttag

SEQ ID NO: 865785 - DNA, 15 bp, Homo sapiens
tatgcaggggttagg

SEQ ID NO: 865786 - DNA, 15 bp, Homo sapiens
atgcaggggttagga

SEQ ID NO: 865787 - DNA, 15 bp, Homo sapiens
tgcaggggttaggaa

SEQ ID NO: 865788 - DNA, 15 bp, Homo sapiens
gcaggggttaggaac

SEQ ID NO: 865789 - DNA, 15 bp, Homo sapiens
caggggttaggaacc

SEQ ID NO: 865790 - DNA, 15 bp, Homo sapiens
aggggttaggaacca

SEQ ID NO: 865791 - DNA, 15 bp, Homo sapiens
ggggttaggaaccag

SEQ ID NO: 865792 - DNA, 15 bp, Homo sapiens
gggttaggaaccagc

SEQ ID NO: 865793 - DNA, 15 bp, Homo sapiens
ggttaggaaccagct

SEQ ID NO: 865794 - DNA, 15 bp, Homo sapiens
gttaggaaccagcta

SEQ ID NO: 865795 - DNA, 15 bp, Homo sapiens
ttaggaaccagctaa

SEQ ID NO: 865796 - DNA, 15 bp, Homo sapiens
taggaaccagctaag

SEQ ID NO: 865797 - DNA, 15 bp, Homo sapiens
aggaaccagctaagt

SEQ ID NO: 865798 - DNA, 15 bp, Homo sapiens
ggaaccagctaagtt

SEQ ID NO: 865799 - DNA, 15 bp, Homo sapiens
gaaccagctaagttg

SEQ ID NO: 865800 - DNA, 15 bp, Homo sapiens
aaccagctaagttgg

SEQ ID NO: 865801 - DNA, 15 bp, Homo sapiens
accagctaagttggt

SEQ ID NO: 865802 - DNA, 15 bp, Homo sapiens
ccagctaagttggtt

SEQ ID NO: 865803 - DNA, 15 bp, Homo sapiens
cagctaagttggttc

SEQ ID NO: 865804 - DNA, 15 bp, Homo sapiens
agctaagttggttca

SEQ ID NO: 865805 - DNA, 15 bp, Homo sapiens
gctaagttggttcat

SEQ ID NO: 865806 - DNA, 15 bp, Homo sapiens
ctaagttggttcatc

SEQ ID NO: 865807 - DNA, 15 bp, Homo sapiens
taagttggttcatct

SEQ ID NO: 865808 - DNA, 15 bp, Homo sapiens
aagttggttcatctg

SEQ ID NO: 865809 - DNA, 15 bp, Homo sapiens
agttggttcatctgg

SEQ ID NO: 865810 - DNA, 15 bp, Homo sapiens
gttggttcatctgga

SEQ ID NO: 865811 - DNA, 15 bp, Homo sapiens
ttggttcatctggag

SEQ ID NO: 865812 - DNA, 15 bp, Homo sapiens
tggttcatctggaga

SEQ ID NO: 865813 - DNA, 15 bp, Homo sapiens
ggttcatctggagaa

SEQ ID NO: 865814 - DNA, 15 bp, Homo sapiens
gttcatctggagaag

SEQ ID NO: 865815 - DNA, 15 bp, Homo sapiens
ttcatctggagaagc

SEQ ID NO: 865816 - DNA, 15 bp, Homo sapiens
tcatctggagaagca

SEQ ID NO: 865817 - DNA, 15 bp, Homo sapiens
catctggagaagcag

SEQ ID NO: 865818 - DNA, 15 bp, Homo sapiens
atctggagaagcagc

SEQ ID NO: 865819 - DNA, 15 bp, Homo sapiens
tctggagaagcagca

SEQ ID NO: 865820 - DNA, 15 bp, Homo sapiens
ctggagaagcagcag

SEQ ID NO: 865821 - DNA, 15 bp, Homo sapiens
tggagaagcagcagg

SEQ ID NO: 865822 - DNA, 15 bp, Homo sapiens
ggagaagcagcaggc

SEQ ID NO: 865823 - DNA, 15 bp, Homo sapiens
gagaagcagcaggct

SEQ ID NO: 865824 - DNA, 15 bp, Homo sapiens
agaagcagcaggctg

SEQ ID NO: 865825 - DNA, 15 bp, Homo sapiens
gaagcagcaggctgg

SEQ ID NO: 865826 - DNA, 15 bp, Homo sapiens
aagcagcaggctggc

SEQ ID NO: 865827 - DNA, 15 bp, Homo sapiens
agcagcaggctggca

SEQ ID NO: 865828 - DNA, 15 bp, Homo sapiens
gcagcaggctggcag

SEQ ID NO: 865829 - DNA, 15 bp, Homo sapiens
cagcaggctggcagt

SEQ ID NO: 865830 - DNA, 15 bp, Homo sapiens
agcaggctggcagtt

SEQ ID NO: 865831 - DNA, 15 bp, Homo sapiens
gcaggctggcagtta

SEQ ID NO: 865832 - DNA, 15 bp, Homo sapiens
caggctggcagttat

SEQ ID NO: 865833 - DNA, 15 bp, Homo sapiens
aggctggcagttatg

SEQ ID NO: 865834 - DNA, 15 bp, Homo sapiens
ggctggcagttatgc

SEQ ID NO: 865835 - DNA, 15 bp, Homo sapiens
gctggcagttatgct

SEQ ID NO: 865836 - DNA, 15 bp, Homo sapiens
ctggcagttatgctg

SEQ ID NO: 865837 - DNA, 15 bp, Homo sapiens
tggcagttatgctga

SEQ ID NO: 865838 - DNA, 15 bp, Homo sapiens
ggcagttatgctgac

SEQ ID NO: 865839 - DNA, 15 bp, Homo sapiens
gcagttatgctgaca

SEQ ID NO: 865840 - DNA, 15 bp, Homo sapiens
cagttatgctgacat

SEQ ID NO: 865841 - DNA, 15 bp, Homo sapiens
agttatgctgacatt

SEQ ID NO: 865842 - DNA, 15 bp, Homo sapiens
gttatgctgacattt

SEQ ID NO: 865843 - DNA, 15 bp, Homo sapiens
ttatgctgacatttc

SEQ ID NO: 865844 - DNA, 15 bp, Homo sapiens
tatgctgacatttca

SEQ ID NO: 865845 - DNA, 15 bp, Homo sapiens
atgctgacatttcaa

SEQ ID NO: 865846 - DNA, 15 bp, Homo sapiens
gctgacatttcaaat

SEQ ID NO: 865847 - DNA, 15 bp, Homo sapiens
ctgacatttcaaata

SEQ ID NO: 865848 - DNA, 15 bp, Homo sapiens
tgacatttcaaatac

SEQ ID NO: 865849 - DNA, 15 bp, Homo sapiens
gacatttcaaataca

SEQ ID NO: 865850 - DNA, 15 bp, Homo sapiens
acatttcaaatacaa

SEQ ID NO: 865851 - DNA, 15 bp, Homo sapiens
catttcaaatacaac

SEQ ID NO: 865852 - DNA, 15 bp, Homo sapiens
atttcaaatacaact

SEQ ID NO: 865853 - DNA, 15 bp, Homo sapiens
tttcaaatacaactt

SEQ ID NO: 865854 - DNA, 15 bp, Homo sapiens
ttcaaatacaacttt

SEQ ID NO: 865855 - DNA, 15 bp, Homo sapiens
tcaaatacaacttta

SEQ ID NO: 865856 - DNA, 15 bp, Homo sapiens
caaatacaactttat

SEQ ID NO: 865857 - DNA, 15 bp, Homo sapiens
aaatacaactttatt

SEQ ID NO: 865858 - DNA, 15 bp, Homo sapiens
aatacaactttattt

SEQ ID NO: 865859 - DNA, 15 bp, Homo sapiens
atacaactttatttc

SEQ ID NO: 865860 - DNA, 15 bp, Homo sapiens
tacaactttatttct

SEQ ID NO: 865861 - DNA, 15 bp, Homo sapiens
acaactttatttctg

SEQ ID NO: 865862 - DNA, 15 bp, Homo sapiens
caactttatttctga

SEQ ID NO: 865863 - DNA, 15 bp, Homo sapiens
aactttatttctgat

SEQ ID NO: 865864 - DNA, 15 bp, Homo sapiens
actttatttctgatt

SEQ ID NO: 865865 - DNA, 15 bp, Homo sapiens
ctttatttctgattt

SEQ ID NO: 865866 - DNA, 15 bp, Homo sapiens
tttatttctgatttt

SEQ ID NO: 865867 - DNA, 15 bp, Homo sapiens
ttatttctgattttg

SEQ ID NO: 865868 - DNA, 15 bp, Homo sapiens
tatttctgattttgg

SEQ ID NO: 865869 - DNA, 15 bp, Homo sapiens
atttctgattttggt

SEQ ID NO: 865870 - DNA, 15 bp, Homo sapiens
tttctgattttggtt

SEQ ID NO: 865871 - DNA, 15 bp, Homo sapiens
ttctgattttggtta

SEQ ID NO: 865872 - DNA, 15 bp, Homo sapiens
tctgattttggttac

SEQ ID NO: 865873 - DNA, 15 bp, Homo sapiens
ctgattttggttaca

SEQ ID NO: 865874 - DNA, 15 bp, Homo sapiens
tgattttggttacaa

SEQ ID NO: 865875 - DNA, 15 bp, Homo sapiens
gattttggttacaac

SEQ ID NO: 865876 - DNA, 15 bp, Homo sapiens
attttggttacaaca

SEQ ID NO: 865877 - DNA, 15 bp, Homo sapiens
ttttggttacaacaa

SEQ ID NO: 865878 - DNA, 15 bp, Homo sapiens
tttggttacaacaaa

SEQ ID NO: 865879 - DNA, 15 bp, Homo sapiens
ttggttacaacaaaa

SEQ ID NO: 865880 - DNA, 15 bp, Homo sapiens
tggttacaacaaaac

SEQ ID NO: 865881 - DNA, 15 bp, Homo sapiens
ggttacaacaaaacg

SEQ ID NO: 865882 - DNA, 15 bp, Homo sapiens
gttacaacaaaacgc

SEQ ID NO: 865883 - DNA, 15 bp, Homo sapiens
ttacaacaaaacgca

SEQ ID NO: 865884 - DNA, 15 bp, Homo sapiens
tacaacaaaacgcag

SEQ ID NO: 865885 - DNA, 15 bp, Homo sapiens
acaacaaaacgcagt

SEQ ID NO: 865886 - DNA, 15 bp, Homo sapiens
caacaaaacgcagtc

SEQ ID NO: 865887 - DNA, 15 bp, Homo sapiens
aacaaaacgcagtct

SEQ ID NO: 865888 - DNA, 15 bp, Homo sapiens
acaaaacgcagtcta

SEQ ID NO: 865889 - DNA, 15 bp, Homo sapiens
caaaacgcagtctat

SEQ ID NO: 865890 - DNA, 15 bp, Homo sapiens
aaaacgcagtctatt

SEQ ID NO: 865891 - DNA, 15 bp, Homo sapiens
aaacgcagtctatta

SEQ ID NO: 865892 - DNA, 15 bp, Homo sapiens
aacgcagtctattac

SEQ ID NO: 865893 - DNA, 15 bp, Homo sapiens
acgcagtctattact

SEQ ID NO: 865894 - DNA, 15 bp, Homo sapiens
cgcagtctattactg

SEQ ID NO: 865895 - DNA, 15 bp, Homo sapiens
gcagtctattactgg

SEQ ID NO: 865896 - DNA, 15 bp, Homo sapiens
cagtctattactggg

SEQ ID NO: 865897 - DNA, 15 bp, Homo sapiens
agtctattactgggc

SEQ ID NO: 865898 - DNA, 15 bp, Homo sapiens
gtctattactgggca

SEQ ID NO: 865899 - DNA, 15 bp, Homo sapiens
tctattactgggcaa

SEQ ID NO: 865900 - DNA, 15 bp, Homo sapiens
ctattactgggcaaa

SEQ ID NO: 865901 - DNA, 15 bp, Homo sapiens
tattactgggcaaag

SEQ ID NO: 865902 - DNA, 15 bp, Homo sapiens
attactgggcaaagc

SEQ ID NO: 865903 - DNA, 15 bp, Homo sapiens
ttactgggcaaagca

SEQ ID NO: 865904 - DNA, 15 bp, Homo sapiens
tactgggcaaagcaa

SEQ ID NO: 865905 - DNA, 15 bp, Homo sapiens
actgggcaaagcaaa

SEQ ID NO: 865906 - DNA, 15 bp, Homo sapiens
ctgggcaaagcaaag

SEQ ID NO: 865907 - DNA, 15 bp, Homo sapiens
tgggcaaagcaaagt

SEQ ID NO: 865908 - DNA, 15 bp, Homo sapiens
gggcaaagcaaagta

SEQ ID NO: 865909 - DNA, 15 bp, Homo sapiens
ggcaaagcaaagtaa

SEQ ID NO: 865910 - DNA, 15 bp, Homo sapiens
gcaaagcaaagtaac

SEQ ID NO: 865911 - DNA, 15 bp, Homo sapiens
caaagcaaagtaacc

SEQ ID NO: 865912 - DNA, 15 bp, Homo sapiens
aaagcaaagtaacca

SEQ ID NO: 865913 - DNA, 15 bp, Homo sapiens
aagcaaagtaaccaa

SEQ ID NO: 865914 - DNA, 15 bp, Homo sapiens
agcaaagtaaccaaa

SEQ ID NO: 865915 - DNA, 15 bp, Homo sapiens
gcaaagtaaccaaaa

SEQ ID NO: 865916 - DNA, 15 bp, Homo sapiens
caaagtaaccaaaat

SEQ ID NO: 865917 - DNA, 15 bp, Homo sapiens
aaagtaaccaaaatt

SEQ ID NO: 865918 - DNA, 15 bp, Homo sapiens
aagtaaccaaaatta

SEQ ID NO: 865919 - DNA, 15 bp, Homo sapiens
agtaaccaaaattaa

SEQ ID NO: 865920 - DNA, 15 bp, Homo sapiens
gtaaccaaaattaac

SEQ ID NO: 865921 - DNA, 15 bp, Homo sapiens
taaccaaaattaact

SEQ ID NO: 865922 - DNA, 15 bp, Homo sapiens
aaccaaaattaactc

SEQ ID NO: 865923 - DNA, 15 bp, Homo sapiens
accaaaattaactct

SEQ ID NO: 865924 - DNA, 15 bp, Homo sapiens
ccaaaattaactcta

SEQ ID NO: 865925 - DNA, 15 bp, Homo sapiens
caaaattaactctaa

SEQ ID NO: 865926 - DNA, 15 bp, Homo sapiens
aaaattaactctaag

SEQ ID NO: 865927 - DNA, 15 bp, Homo sapiens
aaattaactctaaga

SEQ ID NO: 865928 - DNA, 15 bp, Homo sapiens
aattaactctaagaa

SEQ ID NO: 865929 - DNA, 15 bp, Homo sapiens
attaactctaagaat

SEQ ID NO: 865930 - DNA, 15 bp, Homo sapiens
ttaactctaagaata

SEQ ID NO: 865931 - DNA, 15 bp, Homo sapiens
taactctaagaataa

SEQ ID NO: 865932 - DNA, 15 bp, Homo sapiens
aactctaagaataat

SEQ ID NO: 865933 - DNA, 15 bp, Homo sapiens
actctaagaataatg

SEQ ID NO: 865934 - DNA, 15 bp, Homo sapiens
ctctaagaataatga

SEQ ID NO: 865935 - DNA, 15 bp, Homo sapiens
tctaagaataatgat

SEQ ID NO: 865936 - DNA, 15 bp, Homo sapiens
ctaagaataatgata

SEQ ID NO: 865937 - DNA, 15 bp, Homo sapiens
taagaataatgataa

SEQ ID NO: 865938 - DNA, 15 bp, Homo sapiens
aagaataatgataag

SEQ ID NO: 865939 - DNA, 15 bp, Homo sapiens
agaataatgataagt

SEQ ID NO: 865940 - DNA, 15 bp, Homo sapiens
gaataatgataagta

SEQ ID NO: 865941 - DNA, 15 bp, Homo sapiens
aataatgataagtat

SEQ ID NO: 865942 - DNA, 15 bp, Homo sapiens
ataatgataagtatt

SEQ ID NO: 865943 - DNA, 15 bp, Homo sapiens
taatgataagtattt

SEQ ID NO: 865944 - DNA, 15 bp, Homo sapiens
aatgataagtatttt

SEQ ID NO: 865945 - DNA, 15 bp, Homo sapiens
atgataagtattttt

SEQ ID NO: 865946 - DNA, 15 bp, Homo sapiens
tgataagtatttttt

SEQ ID NO: 865947 - DNA, 15 bp, Homo sapiens
gataagtattttttt

SEQ ID NO: 865948 - DNA, 15 bp, Homo sapiens
ataagtatttttttt

SEQ ID NO: 865949 - DNA, 15 bp, Homo sapiens
taagtattttttttg

SEQ ID NO: 865950 - DNA, 15 bp, Homo sapiens
aagtattttttttgg

SEQ ID NO: 865951 - DNA, 15 bp, Homo sapiens
agtattttttttggt

SEQ ID NO: 865952 - DNA, 15 bp, Homo sapiens
gtattttttttggta

SEQ ID NO: 865953 - DNA, 15 bp, Homo sapiens
tattttttttggtat

SEQ ID NO: 865954 - DNA, 15 bp, Homo sapiens
attttttttggtata

SEQ ID NO: 865955 - DNA, 15 bp, Homo sapiens
ttttttttggtatac

SEQ ID NO: 865956 - DNA, 15 bp, Homo sapiens
tttttttggtataca

SEQ ID NO: 865957 - DNA, 15 bp, Homo sapiens
ttttttggtatacag

SEQ ID NO: 865958 - DNA, 15 bp, Homo sapiens
tttttggtatacaga

SEQ ID NO: 865959 - DNA, 15 bp, Homo sapiens
ttttggtatacagat

SEQ ID NO: 865960 - DNA, 15 bp, Homo sapiens
tttggtatacagata

SEQ ID NO: 865961 - DNA, 15 bp, Homo sapiens
ttggtatacagataa

SEQ ID NO: 865962 - DNA, 15 bp, Homo sapiens
tggtatacagataaa

SEQ ID NO: 865963 - DNA, 15 bp, Homo sapiens
ggtatacagataaat

SEQ ID NO: 865964 - DNA, 15 bp, Homo sapiens
gtatacagataaatc

SEQ ID NO: 865965 - DNA, 15 bp, Homo sapiens
tatacagataaatca

SEQ ID NO: 865966 - DNA, 15 bp, Homo sapiens
atacagataaatcat

SEQ ID NO: 865967 - DNA, 15 bp, Homo sapiens
tacagataaatcatg

SEQ ID NO: 865968 - DNA, 15 bp, Homo sapiens
acagataaatcatga

SEQ ID NO: 865969 - DNA, 15 bp, Homo sapiens
cagataaatcatgat

SEQ ID NO: 865970 - DNA, 15 bp, Homo sapiens
agataaatcatgatt

SEQ ID NO: 865971 - DNA, 15 bp, Homo sapiens
gataaatcatgattt

SEQ ID NO: 865972 - DNA, 15 bp, Homo sapiens
ataaatcatgatttc

SEQ ID NO: 865973 - DNA, 15 bp, Homo sapiens
taaatcatgatttct

SEQ ID NO: 865974 - DNA, 15 bp, Homo sapiens
aaatcatgatttctt

SEQ ID NO: 865975 - DNA, 15 bp, Homo sapiens
aatcatgatttcttt

SEQ ID NO: 865976 - DNA, 15 bp, Homo sapiens
atcatgatttctttt

SEQ ID NO: 865977 - DNA, 15 bp, Homo sapiens
tcatgatttcttttt

SEQ ID NO: 865978 - DNA, 15 bp, Homo sapiens
catgatttctttttt

SEQ ID NO: 865979 - DNA, 15 bp, Homo sapiens
atgatttcttttttt

SEQ ID NO: 865980 - DNA, 15 bp, Homo sapiens
tgatttctttttttt

SEQ ID NO: 865981 - DNA, 15 bp, Homo sapiens
gatttcttttttttt

SEQ ID NO: 865982 - DNA, 15 bp, Homo sapiens
tttttttttttctta

SEQ ID NO: 865983 - DNA, 15 bp, Homo sapiens
ttttttttttcttat

SEQ ID NO: 865984 - DNA, 15 bp, Homo sapiens
tttttttttcttatg

SEQ ID NO: 865985 - DNA, 15 bp, Homo sapiens
ttttttttcttatgg

SEQ ID NO: 865986 - DNA, 15 bp, Homo sapiens
tttttttcttatggc

SEQ ID NO: 865987 - DNA, 15 bp, Homo sapiens
ttttttcttatggca

SEQ ID NO: 865988 - DNA, 15 bp, Homo sapiens
tttttcttatggcag

SEQ ID NO: 865989 - DNA, 15 bp, Homo sapiens
ttttcttatggcagg

SEQ ID NO: 865990 - DNA, 15 bp, Homo sapiens
tttcttatggcaggg

SEQ ID NO: 865991 - DNA, 15 bp, Homo sapiens
ttcttatggcagggt

SEQ ID NO: 865992 - DNA, 15 bp, Homo sapiens
tcttatggcagggtg

SEQ ID NO: 865993 - DNA, 15 bp, Homo sapiens
cttatggcagggtgt

SEQ ID NO: 865994 - DNA, 15 bp, Homo sapiens
ttatggcagggtgtt

SEQ ID NO: 865995 - DNA, 15 bp, Homo sapiens
tatggcagggtgttt

SEQ ID NO: 865996 - DNA, 15 bp, Homo sapiens
atggcagggtgttta

SEQ ID NO: 865997 - DNA, 15 bp, Homo sapiens
tggcagggtgtttac

SEQ ID NO: 865998 - DNA, 15 bp, Homo sapiens
ggcagggtgtttaca

SEQ ID NO: 865999 - DNA, 15 bp, Homo sapiens
gcagggtgtttacaa

SEQ ID NO: 866000 - DNA, 15 bp, Homo sapiens
cagggtgtttacaaa

SEQ ID NO: 866001 - DNA, 15 bp, Homo sapiens
agggtgtttacaaac

SEQ ID NO: 866002 - DNA, 15 bp, Homo sapiens
gggtgtttacaaact

SEQ ID NO: 866003 - DNA, 15 bp, Homo sapiens
ggtgtttacaaactg

SEQ ID NO: 866004 - DNA, 15 bp, Homo sapiens
gtgtttacaaactgt

SEQ ID NO: 866005 - DNA, 15 bp, Homo sapiens
tgtttacaaactgtt

SEQ ID NO: 866006 - DNA, 15 bp, Homo sapiens
gtttacaaactgttt

SEQ ID NO: 866007 - DNA, 15 bp, Homo sapiens
tttacaaactgtttt

SEQ ID NO: 866008 - DNA, 15 bp, Homo sapiens
ttacaaactgtttta

SEQ ID NO: 866009 - DNA, 15 bp, Homo sapiens
tacaaactgttttag

SEQ ID NO: 866010 - DNA, 15 bp, Homo sapiens
acaaactgttttagt

SEQ ID NO: 866011 - DNA, 15 bp, Homo sapiens
caaactgttttagtc

SEQ ID NO: 866012 - DNA, 15 bp, Homo sapiens
aaactgttttagtct

SEQ ID NO: 866013 - DNA, 15 bp, Homo sapiens
aactgttttagtctg

SEQ ID NO: 866014 - DNA, 15 bp, Homo sapiens
actgttttagtctgt

SEQ ID NO: 866015 - DNA, 15 bp, Homo sapiens
ctgttttagtctgtt

SEQ ID NO: 866016 - DNA, 15 bp, Homo sapiens
tgttttagtctgttt

SEQ ID NO: 866017 - DNA, 15 bp, Homo sapiens
gttttagtctgttta

SEQ ID NO: 866018 - DNA, 15 bp, Homo sapiens
ttttagtctgtttaa

SEQ ID NO: 866019 - DNA, 15 bp, Homo sapiens
tttagtctgtttaaa

SEQ ID NO: 866020 - DNA, 15 bp, Homo sapiens
ttagtctgtttaaag

SEQ ID NO: 866021 - DNA, 15 bp, Homo sapiens
tagtctgtttaaagt

SEQ ID NO: 866022 - DNA, 15 bp, Homo sapiens
agtctgtttaaagtg

SEQ ID NO: 866023 - DNA, 15 bp, Homo sapiens
gtctgtttaaagtgt

SEQ ID NO: 866024 - DNA, 15 bp, Homo sapiens
tctgtttaaagtgta

SEQ ID NO: 866025 - DNA, 15 bp, Homo sapiens
ctgtttaaagtgtat

SEQ ID NO: 866026 - DNA, 15 bp, Homo sapiens
tgtttaaagtgtatg

SEQ ID NO: 866027 - DNA, 15 bp, Homo sapiens
gtttaaagtgtatgt

SEQ ID NO: 866028 - DNA, 15 bp, Homo sapiens
tttaaagtgtatgtt

SEQ ID NO: 866029 - DNA, 15 bp, Homo sapiens
ttaaagtgtatgttc

SEQ ID NO: 866030 - DNA, 15 bp, Homo sapiens
taaagtgtatgttca

SEQ ID NO: 866031 - DNA, 15 bp, Homo sapiens
aaagtgtatgttcaa

SEQ ID NO: 866032 - DNA, 15 bp, Homo sapiens
aagtgtatgttcaaa

SEQ ID NO: 866033 - DNA, 15 bp, Homo sapiens
agtgtatgttcaaag

SEQ ID NO: 866034 - DNA, 15 bp, Homo sapiens
gtgtatgttcaaagg

SEQ ID NO: 866035 - DNA, 15 bp, Homo sapiens
tgtatgttcaaaggc

SEQ ID NO: 866036 - DNA, 15 bp, Homo sapiens
gtatgttcaaaggct

SEQ ID NO: 866037 - DNA, 15 bp, Homo sapiens
tatgttcaaaggctg

SEQ ID NO: 866038 - DNA, 15 bp, Homo sapiens
atgttcaaaggctgg

SEQ ID NO: 866039 - DNA, 15 bp, Homo sapiens
tgttcaaaggctgga

SEQ ID NO: 866040 - DNA, 15 bp, Homo sapiens
gttcaaaggctggag

SEQ ID NO: 866041 - DNA, 15 bp, Homo sapiens
ttcaaaggctggagt

SEQ ID NO: 866042 - DNA, 15 bp, Homo sapiens
tcaaaggctggagtg

SEQ ID NO: 866043 - DNA, 15 bp, Homo sapiens
caaaggctggagtgt

SEQ ID NO: 866044 - DNA, 15 bp, Homo sapiens
aaaggctggagtgta

SEQ ID NO: 866045 - DNA, 15 bp, Homo sapiens
aaggctggagtgtaa

SEQ ID NO: 866046 - DNA, 15 bp, Homo sapiens
aggctggagtgtaaa

SEQ ID NO: 866047 - DNA, 15 bp, Homo sapiens
ggctggagtgtaaag

SEQ ID NO: 866048 - DNA, 15 bp, Homo sapiens
gctggagtgtaaaga

SEQ ID NO: 866049 - DNA, 15 bp, Homo sapiens
ctggagtgtaaagag

SEQ ID NO: 866050 - DNA, 15 bp, Homo sapiens
tggagtgtaaagagg

SEQ ID NO: 866051 - DNA, 15 bp, Homo sapiens
ggagtgtaaagaggt

SEQ ID NO: 866052 - DNA, 15 bp, Homo sapiens
gagtgtaaagaggtg

SEQ ID NO: 866053 - DNA, 15 bp, Homo sapiens
agtgtaaagaggtgt

SEQ ID NO: 866054 - DNA, 15 bp, Homo sapiens
gtgtaaagaggtgtt

SEQ ID NO: 866055 - DNA, 15 bp, Homo sapiens
tgtaaagaggtgttg

SEQ ID NO: 866056 - DNA, 15 bp, Homo sapiens
gtaaagaggtgttgc

SEQ ID NO: 866057 - DNA, 15 bp, Homo sapiens
taaagaggtgttgcc

SEQ ID NO: 866058 - DNA, 15 bp, Homo sapiens
aaagaggtgttgcct

SEQ ID NO: 866059 - DNA, 15 bp, Homo sapiens
aagaggtgttgcctt

SEQ ID NO: 866060 - DNA, 15 bp, Homo sapiens
agaggtgttgccttc

SEQ ID NO: 866061 - DNA, 15 bp, Homo sapiens
gaggtgttgccttca

SEQ ID NO: 866062 - DNA, 15 bp, Homo sapiens
aggtgttgccttcac

SEQ ID NO: 866063 - DNA, 15 bp, Homo sapiens
ggtgttgccttcacc

SEQ ID NO: 866064 - DNA, 15 bp, Homo sapiens
gtgttgccttcacct

SEQ ID NO: 866065 - DNA, 15 bp, Homo sapiens
tgttgccttcacctt

SEQ ID NO: 866066 - DNA, 15 bp, Homo sapiens
gttgccttcaccttc

SEQ ID NO: 866067 - DNA, 15 bp, Homo sapiens
ttgccttcaccttct

SEQ ID NO: 866068 - DNA, 15 bp, Homo sapiens
tgccttcaccttctc

SEQ ID NO: 866069 - DNA, 15 bp, Homo sapiens
gccttcaccttctct

SEQ ID NO: 866070 - DNA, 15 bp, Homo sapiens
ccttcaccttctcta

SEQ ID NO: 866071 - DNA, 15 bp, Homo sapiens
cttcaccttctctaa

SEQ ID NO: 866072 - DNA, 15 bp, Homo sapiens
ttcaccttctctaag

SEQ ID NO: 866073 - DNA, 15 bp, Homo sapiens
tcaccttctctaagc

SEQ ID NO: 866074 - DNA, 15 bp, Homo sapiens
caccttctctaagcc

SEQ ID NO: 866075 - DNA, 15 bp, Homo sapiens
accttctctaagccg

SEQ ID NO: 866076 - DNA, 15 bp, Homo sapiens
ccttctctaagccgg

SEQ ID NO: 866077 - DNA, 15 bp, Homo sapiens
cttctctaagccggc

SEQ ID NO: 866078 - DNA, 15 bp, Homo sapiens
ttctctaagccggcc

SEQ ID NO: 866079 - DNA, 15 bp, Homo sapiens
tctctaagccggcct

SEQ ID NO: 866080 - DNA, 15 bp, Homo sapiens
ctctaagccggcctc

SEQ ID NO: 866081 - DNA, 15 bp, Homo sapiens
tctaagccggcctct

SEQ ID NO: 866082 - DNA, 15 bp, Homo sapiens
ctaagccggcctctt

SEQ ID NO: 866083 - DNA, 15 bp, Homo sapiens
taagccggcctcttt

SEQ ID NO: 866084 - DNA, 15 bp, Homo sapiens
aagccggcctctttg

SEQ ID NO: 866085 - DNA, 15 bp, Homo sapiens
agccggcctctttga

SEQ ID NO: 866086 - DNA, 15 bp, Homo sapiens
gccggcctctttgac

SEQ ID NO: 866087 - DNA, 15 bp, Homo sapiens
ccggcctctttgact

SEQ ID NO: 866088 - DNA, 15 bp, Homo sapiens
cggcctctttgacta

SEQ ID NO: 866089 - DNA, 15 bp, Homo sapiens
ggcctctttgactaa

SEQ ID NO: 866090 - DNA, 15 bp, Homo sapiens
gcctctttgactaac

SEQ ID NO: 866091 - DNA, 15 bp, Homo sapiens
cctctttgactaaca

SEQ ID NO: 866092 - DNA, 15 bp, Homo sapiens
ctctttgactaacac

SEQ ID NO: 866093 - DNA, 15 bp, Homo sapiens
tctttgactaacaca

SEQ ID NO: 866094 - DNA, 15 bp, Homo sapiens
ctttgactaacacat

SEQ ID NO: 866095 - DNA, 15 bp, Homo sapiens
tttgactaacacatt

SEQ ID NO: 866096 - DNA, 15 bp, Homo sapiens
ttgactaacacattt

SEQ ID NO: 866097 - DNA, 15 bp, Homo sapiens
tgactaacacatttg

SEQ ID NO: 866098 - DNA, 15 bp, Homo sapiens
gactaacacatttgg

SEQ ID NO: 866099 - DNA, 15 bp, Homo sapiens
actaacacatttggt

SEQ ID NO: 866100 - DNA, 15 bp, Homo sapiens
ctaacacatttggtc

SEQ ID NO: 866101 - DNA, 15 bp, Homo sapiens
taacacatttggtct

SEQ ID NO: 866102 - DNA, 15 bp, Homo sapiens
aacacatttggtctt

SEQ ID NO: 866103 - DNA, 15 bp, Homo sapiens
acacatttggtcttt

SEQ ID NO: 866104 - DNA, 15 bp, Homo sapiens
cacatttggtctttg

SEQ ID NO: 866105 - DNA, 15 bp, Homo sapiens
acatttggtctttgt

SEQ ID NO: 866106 - DNA, 15 bp, Homo sapiens
catttggtctttgtc

SEQ ID NO: 866107 - DNA, 15 bp, Homo sapiens
atttggtctttgtca

SEQ ID NO: 866108 - DNA, 15 bp, Homo sapiens
tttggtctttgtcat

SEQ ID NO: 866109 - DNA, 15 bp, Homo sapiens
ttggtctttgtcatt

SEQ ID NO: 866110 - DNA, 15 bp, Homo sapiens
tggtctttgtcattg

SEQ ID NO: 866111 - DNA, 15 bp, Homo sapiens
ggtctttgtcattgg

SEQ ID NO: 866112 - DNA, 15 bp, Homo sapiens
gtctttgtcattggg

SEQ ID NO: 866113 - DNA, 15 bp, Homo sapiens
tctttgtcattgggt

SEQ ID NO: 866114 - DNA, 15 bp, Homo sapiens
ctttgtcattgggtc

SEQ ID NO: 866115 - DNA, 15 bp, Homo sapiens
tttgtcattgggtcc

SEQ ID NO: 866116 - DNA, 15 bp, Homo sapiens
ttgtcattgggtcct

SEQ ID NO: 866117 - DNA, 15 bp, Homo sapiens
tgtcattgggtccta

SEQ ID NO: 866118 - DNA, 15 bp, Homo sapiens
gtcattgggtcctaa

SEQ ID NO: 866119 - DNA, 15 bp, Homo sapiens
tcattgggtcctaaa

SEQ ID NO: 866120 - DNA, 15 bp, Homo sapiens
cattgggtcctaaaa

SEQ ID NO: 866121 - DNA, 15 bp, Homo sapiens
attgggtcctaaaag

SEQ ID NO: 866122 - DNA, 15 bp, Homo sapiens
ttgggtcctaaaaga

SEQ ID NO: 866123 - DNA, 15 bp, Homo sapiens
tgggtcctaaaagac

SEQ ID NO: 866124 - DNA, 15 bp, Homo sapiens
gggtcctaaaagaca

SEQ ID NO: 866125 - DNA, 15 bp, Homo sapiens
ggtcctaaaagacag

SEQ ID NO: 866126 - DNA, 15 bp, Homo sapiens
gtcctaaaagacagc

SEQ ID NO: 866127 - DNA, 15 bp, Homo sapiens
tcctaaaagacagcc

SEQ ID NO: 866128 - DNA, 15 bp, Homo sapiens
cctaaaagacagcca

SEQ ID NO: 866129 - DNA, 15 bp, Homo sapiens
ctaaaagacagccat

SEQ ID NO: 866130 - DNA, 15 bp, Homo sapiens
taaaagacagccatg

SEQ ID NO: 866131 - DNA, 15 bp, Homo sapiens
aaaagacagccatga

SEQ ID NO: 866132 - DNA, 15 bp, Homo sapiens
aaagacagccatgaa

SEQ ID NO: 866133 - DNA, 15 bp, Homo sapiens
aagacagccatgaat

SEQ ID NO: 866134 - DNA, 15 bp, Homo sapiens
agacagccatgaatt

SEQ ID NO: 866135 - DNA, 15 bp, Homo sapiens
gacagccatgaattc

SEQ ID NO: 866136 - DNA, 15 bp, Homo sapiens
acagccatgaattcc

SEQ ID NO: 866137 - DNA, 15 bp, Homo sapiens
cagccatgaattcct

SEQ ID NO: 866138 - DNA, 15 bp, Homo sapiens
agccatgaattccta

SEQ ID NO: 866139 - DNA, 15 bp, Homo sapiens
gccatgaattcctag

SEQ ID NO: 866140 - DNA, 15 bp, Homo sapiens
ccatgaattcctagt

SEQ ID NO: 866141 - DNA, 15 bp, Homo sapiens
catgaattcctagtg

SEQ ID NO: 866142 - DNA, 15 bp, Homo sapiens
atgaattcctagtga

SEQ ID NO: 866143 - DNA, 15 bp, Homo sapiens
tgaattcctagtgag

SEQ ID NO: 866144 - DNA, 15 bp, Homo sapiens
gaattcctagtgagt

SEQ ID NO: 866145 - DNA, 15 bp, Homo sapiens
aattcctagtgagtg

SEQ ID NO: 866146 - DNA, 15 bp, Homo sapiens
attcctagtgagtga

SEQ ID NO: 866147 - DNA, 15 bp, Homo sapiens
ttcctagtgagtgac

SEQ ID NO: 866148 - DNA, 15 bp, Homo sapiens
tcctagtgagtgact

SEQ ID NO: 866149 - DNA, 15 bp, Homo sapiens
cctagtgagtgactg

SEQ ID NO: 866150 - DNA, 15 bp, Homo sapiens
ctagtgagtgactga

SEQ ID NO: 866151 - DNA, 15 bp, Homo sapiens
tagtgagtgactgag

SEQ ID NO: 866152 - DNA, 15 bp, Homo sapiens
agtgagtgactgagc

SEQ ID NO: 866153 - DNA, 15 bp, Homo sapiens
gtgagtgactgagcc

SEQ ID NO: 866154 - DNA, 15 bp, Homo sapiens
tgagtgactgagcct

SEQ ID NO: 866155 - DNA, 15 bp, Homo sapiens
gagtgactgagcctt

SEQ ID NO: 866156 - DNA, 15 bp, Homo sapiens
agtgactgagccttg

SEQ ID NO: 866157 - DNA, 15 bp, Homo sapiens
gtgactgagccttga

SEQ ID NO: 866158 - DNA, 15 bp, Homo sapiens
tgactgagccttgag

SEQ ID NO: 866159 - DNA, 15 bp, Homo sapiens
gactgagccttgagt

SEQ ID NO: 866160 - DNA, 15 bp, Homo sapiens
actgagccttgagtg

SEQ ID NO: 866161 - DNA, 15 bp, Homo sapiens
ctgagccttgagtgt

SEQ ID NO: 866162 - DNA, 15 bp, Homo sapiens
tgagccttgagtgtg

SEQ ID NO: 866163 - DNA, 15 bp, Homo sapiens
gagccttgagtgtgt

SEQ ID NO: 866164 - DNA, 15 bp, Homo sapiens
agccttgagtgtgtg

SEQ ID NO: 866165 - DNA, 15 bp, Homo sapiens
gccttgagtgtgtgt

SEQ ID NO: 866166 - DNA, 15 bp, Homo sapiens
ccttgagtgtgtgtc

SEQ ID NO: 866167 - DNA, 15 bp, Homo sapiens
cttgagtgtgtgtcc

SEQ ID NO: 866168 - DNA, 15 bp, Homo sapiens
ttgagtgtgtgtcct

SEQ ID NO: 866169 - DNA, 15 bp, Homo sapiens
tgagtgtgtgtcctt

SEQ ID NO: 866170 - DNA, 15 bp, Homo sapiens
gagtgtgtgtccttt

SEQ ID NO: 866171 - DNA, 15 bp, Homo sapiens
agtgtgtgtcctttg

SEQ ID NO: 866172 - DNA, 15 bp, Homo sapiens
gtgtgtgtcctttga

SEQ ID NO: 866173 - DNA, 15 bp, Homo sapiens
tgtgtgtcctttgat

SEQ ID NO: 866174 - DNA, 15 bp, Homo sapiens
gtgtgtcctttgata

SEQ ID NO: 866175 - DNA, 15 bp, Homo sapiens
tgtgtcctttgatat

SEQ ID NO: 866176 - DNA, 15 bp, Homo sapiens
gtgtcctttgatatt

SEQ ID NO: 866177 - DNA, 15 bp, Homo sapiens
tgtcctttgatattt

SEQ ID NO: 866178 - DNA, 15 bp, Homo sapiens
gtcctttgatatttt

SEQ ID NO: 866179 - DNA, 15 bp, Homo sapiens
tcctttgatattttg

SEQ ID NO: 866180 - DNA, 15 bp, Homo sapiens
cctttgatattttgc

SEQ ID NO: 866181 - DNA, 15 bp, Homo sapiens
ctttgatattttgcc

SEQ ID NO: 866182 - DNA, 15 bp, Homo sapiens
tttgatattttgcct

SEQ ID NO: 866183 - DNA, 15 bp, Homo sapiens
ttgatattttgcctg

SEQ ID NO: 866184 - DNA, 15 bp, Homo sapiens
tgatattttgcctgt

SEQ ID NO: 866185 - DNA, 15 bp, Homo sapiens
gatattttgcctgta

SEQ ID NO: 866186 - DNA, 15 bp, Homo sapiens
atattttgcctgtat

SEQ ID NO: 866187 - DNA, 15 bp, Homo sapiens
tattttgcctgtatt

SEQ ID NO: 866188 - DNA, 15 bp, Homo sapiens
attttgcctgtattg

SEQ ID NO: 866189 - DNA, 15 bp, Homo sapiens
ttttgcctgtattgc

SEQ ID NO: 866190 - DNA, 15 bp, Homo sapiens
tttgcctgtattgca

SEQ ID NO: 866191 - DNA, 15 bp, Homo sapiens
ttgcctgtattgcac

SEQ ID NO: 866192 - DNA, 15 bp, Homo sapiens
tgcctgtattgcaca

SEQ ID NO: 866193 - DNA, 15 bp, Homo sapiens
gcctgtattgcacag

SEQ ID NO: 866194 - DNA, 15 bp, Homo sapiens
cctgtattgcacagt

SEQ ID NO: 866195 - DNA, 15 bp, Homo sapiens
ctgtattgcacagtc

SEQ ID NO: 866196 - DNA, 15 bp, Homo sapiens
tgtattgcacagtct

SEQ ID NO: 866197 - DNA, 15 bp, Homo sapiens
gtattgcacagtctg

SEQ ID NO: 866198 - DNA, 15 bp, Homo sapiens
tattgcacagtctgc

SEQ ID NO: 866199 - DNA, 15 bp, Homo sapiens
attgcacagtctgcc

SEQ ID NO: 866200 - DNA, 15 bp, Homo sapiens
ttgcacagtctgccc

SEQ ID NO: 866201 - DNA, 15 bp, Homo sapiens
tgcacagtctgccct

SEQ ID NO: 866202 - DNA, 15 bp, Homo sapiens
gcacagtctgccctc

SEQ ID NO: 866203 - DNA, 15 bp, Homo sapiens
cacagtctgccctca

SEQ ID NO: 866204 - DNA, 15 bp, Homo sapiens
acagtctgccctcaa

SEQ ID NO: 866205 - DNA, 15 bp, Homo sapiens
cagtctgccctcaaa

SEQ ID NO: 866206 - DNA, 15 bp, Homo sapiens
agtctgccctcaaac

SEQ ID NO: 866207 - DNA, 15 bp, Homo sapiens
gtctgccctcaaact

SEQ ID NO: 866208 - DNA, 15 bp, Homo sapiens
tctgccctcaaactg

SEQ ID NO: 866209 - DNA, 15 bp, Homo sapiens
ctgccctcaaactgt

SEQ ID NO: 866210 - DNA, 15 bp, Homo sapiens
tgccctcaaactgtt

SEQ ID NO: 866211 - DNA, 15 bp, Homo sapiens
gccctcaaactgttc

SEQ ID NO: 866212 - DNA, 15 bp, Homo sapiens
ccctcaaactgttca

SEQ ID NO: 866213 - DNA, 15 bp, Homo sapiens
cctcaaactgttcat

SEQ ID NO: 866214 - DNA, 15 bp, Homo sapiens
ctcaaactgttcata

SEQ ID NO: 866215 - DNA, 15 bp, Homo sapiens
tcaaactgttcataa

SEQ ID NO: 866216 - DNA, 15 bp, Homo sapiens
caaactgttcataat

SEQ ID NO: 866217 - DNA, 15 bp, Homo sapiens
aaactgttcataatc

SEQ ID NO: 866218 - DNA, 15 bp, Homo sapiens
aactgttcataatct

SEQ ID NO: 866219 - DNA, 15 bp, Homo sapiens
actgttcataatctc

SEQ ID NO: 866220 - DNA, 15 bp, Homo sapiens
ctgttcataatctca

SEQ ID NO: 866221 - DNA, 15 bp, Homo sapiens
tgttcataatctcat

SEQ ID NO: 866222 - DNA, 15 bp, Homo sapiens
gttcataatctcatg

SEQ ID NO: 866223 - DNA, 15 bp, Homo sapiens
ttcataatctcatga

SEQ ID NO: 866224 - DNA, 15 bp, Homo sapiens
tcataatctcatgag

SEQ ID NO: 866225 - DNA, 15 bp, Homo sapiens
cataatctcatgagc

SEQ ID NO: 866226 - DNA, 15 bp, Homo sapiens
ataatctcatgagct

SEQ ID NO: 866227 - DNA, 15 bp, Homo sapiens
taatctcatgagctg

SEQ ID NO: 866228 - DNA, 15 bp, Homo sapiens
aatctcatgagctgc

SEQ ID NO: 866229 - DNA, 15 bp, Homo sapiens
atctcatgagctgcc

SEQ ID NO: 866230 - DNA, 15 bp, Homo sapiens
tctcatgagctgcct

SEQ ID NO: 866231 - DNA, 15 bp, Homo sapiens
ctcatgagctgcctg

SEQ ID NO: 866232 - DNA, 15 bp, Homo sapiens
tcatgagctgcctgt

SEQ ID NO: 866233 - DNA, 15 bp, Homo sapiens
catgagctgcctgta

SEQ ID NO: 866234 - DNA, 15 bp, Homo sapiens
atgagctgcctgtat

SEQ ID NO: 866235 - DNA, 15 bp, Homo sapiens
tgagctgcctgtatt

SEQ ID NO: 866236 - DNA, 15 bp, Homo sapiens
gagctgcctgtattt

SEQ ID NO: 866237 - DNA, 15 bp, Homo sapiens
agctgcctgtatttc

SEQ ID NO: 866238 - DNA, 15 bp, Homo sapiens
gctgcctgtatttcc

SEQ ID NO: 866239 - DNA, 15 bp, Homo sapiens
ctgcctgtatttcca

SEQ ID NO: 866240 - DNA, 15 bp, Homo sapiens
tgcctgtatttccag

SEQ ID NO: 866241 - DNA, 15 bp, Homo sapiens
gcctgtatttccagt

SEQ ID NO: 866242 - DNA, 15 bp, Homo sapiens
cctgtatttccagtt

SEQ ID NO: 866243 - DNA, 15 bp, Homo sapiens
ctgtatttccagttg

SEQ ID NO: 866244 - DNA, 15 bp, Homo sapiens
tgtatttccagttga

SEQ ID NO: 866245 - DNA, 15 bp, Homo sapiens
gtatttccagttgaa

SEQ ID NO: 866246 - DNA, 15 bp, Homo sapiens
tatttccagttgaag

SEQ ID NO: 866247 - DNA, 15 bp, Homo sapiens
atttccagttgaaga

SEQ ID NO: 866248 - DNA, 15 bp, Homo sapiens
tttccagttgaagat

SEQ ID NO: 866249 - DNA, 15 bp, Homo sapiens
ttccagttgaagatg

SEQ ID NO: 866250 - DNA, 15 bp, Homo sapiens
tccagttgaagatga

SEQ ID NO: 866251 - DNA, 15 bp, Homo sapiens
ccagttgaagatgag

SEQ ID NO: 866252 - DNA, 15 bp, Homo sapiens
cagttgaagatgagc

SEQ ID NO: 866253 - DNA, 15 bp, Homo sapiens
agttgaagatgagca

SEQ ID NO: 866254 - DNA, 15 bp, Homo sapiens
gttgaagatgagcag

SEQ ID NO: 866255 - DNA, 15 bp, Homo sapiens
ttgaagatgagcagc

SEQ ID NO: 866256 - DNA, 15 bp, Homo sapiens
tgaagatgagcagcc

SEQ ID NO: 866257 - DNA, 15 bp, Homo sapiens
gaagatgagcagccg

SEQ ID NO: 866258 - DNA, 15 bp, Homo sapiens
aagatgagcagccgt

SEQ ID NO: 866259 - DNA, 15 bp, Homo sapiens
agatgagcagccgtc

SEQ ID NO: 866260 - DNA, 15 bp, Homo sapiens
gatgagcagccgtca

SEQ ID NO: 866261 - DNA, 15 bp, Homo sapiens
atgagcagccgtcaa

SEQ ID NO: 866262 - DNA, 15 bp, Homo sapiens
tgagcagccgtcaac

SEQ ID NO: 866263 - DNA, 15 bp, Homo sapiens
gagcagccgtcaaca

SEQ ID NO: 866264 - DNA, 15 bp, Homo sapiens
agcagccgtcaacac

SEQ ID NO: 866265 - DNA, 15 bp, Homo sapiens
gcagccgtcaacact

SEQ ID NO: 866266 - DNA, 15 bp, Homo sapiens
cagccgtcaacacta

SEQ ID NO: 866267 - DNA, 15 bp, Homo sapiens
agccgtcaacactat

SEQ ID NO: 866268 - DNA, 15 bp, Homo sapiens
gccgtcaacactatc

SEQ ID NO: 866269 - DNA, 15 bp, Homo sapiens
ccgtcaacactatca

SEQ ID NO: 866270 - DNA, 15 bp, Homo sapiens
cgtcaacactatcac

SEQ ID NO: 866271 - DNA, 15 bp, Homo sapiens
gtcaacactatcacc

SEQ ID NO: 866272 - DNA, 15 bp, Homo sapiens
tcaacactatcacca

SEQ ID NO: 866273 - DNA, 15 bp, Homo sapiens
caacactatcaccaa

SEQ ID NO: 866274 - DNA, 15 bp, Homo sapiens
aacactatcaccaaa

SEQ ID NO: 866275 - DNA, 15 bp, Homo sapiens
acactatcaccaaaa

SEQ ID NO: 866276 - DNA, 15 bp, Homo sapiens
cactatcaccaaaaa

SEQ ID NO: 866277 - DNA, 15 bp, Homo sapiens
actatcaccaaaaaa

SEQ ID NO: 866278 - DNA, 15 bp, Homo sapiens
ctatcaccaaaaaaa

SEQ ID NO: 866279 - DNA, 15 bp, Homo sapiens
tatcaccaaaaaaaa

SEQ ID NO: 866280 - DNA, 15 bp, Homo sapiens
atcaccaaaaaaaaa

SEQ ID NO: 866281 - DNA, 15 bp, Homo sapiens
tcaccaaaaaaaaag

SEQ ID NO: 866282 - DNA, 15 bp, Homo sapiens
caccaaaaaaaaagc

SEQ ID NO: 866283 - DNA, 15 bp, Homo sapiens
accaaaaaaaaagca

SEQ ID NO: 866284 - DNA, 15 bp, Homo sapiens
ccaaaaaaaaagcaa

SEQ ID NO: 866285 - DNA, 15 bp, Homo sapiens
caaaaaaaaagcaac

SEQ ID NO: 866286 - DNA, 15 bp, Homo sapiens
aaaaaaaaagcaacg

SEQ ID NO: 866287 - DNA, 15 bp, Homo sapiens
aaaaaaaagcaacgg

SEQ ID NO: 866288 - DNA, 15 bp, Homo sapiens
aaaaaaagcaacgga

SEQ ID NO: 866289 - DNA, 15 bp, Homo sapiens
aaaaaagcaacggaa

SEQ ID NO: 866290 - DNA, 15 bp, Homo sapiens
aaaaagcaacggaat

SEQ ID NO: 866291 - DNA, 15 bp, Homo sapiens
aaaagcaacggaatg

SEQ ID NO: 866292 - DNA, 15 bp, Homo sapiens
aaagcaacggaatgg

SEQ ID NO: 866293 - DNA, 15 bp, Homo sapiens
aagcaacggaatgga

SEQ ID NO: 866294 - DNA, 15 bp, Homo sapiens
agcaacggaatggag

SEQ ID NO: 866295 - DNA, 15 bp, Homo sapiens
gcaacggaatggagg

SEQ ID NO: 866296 - DNA, 15 bp, Homo sapiens
caacggaatggaggc

SEQ ID NO: 866297 - DNA, 15 bp, Homo sapiens
aacggaatggaggca

SEQ ID NO: 866298 - DNA, 15 bp, Homo sapiens
acggaatggaggcat

SEQ ID NO: 866299 - DNA, 15 bp, Homo sapiens
cggaatggaggcatg

SEQ ID NO: 866300 - DNA, 15 bp, Homo sapiens
ggaatggaggcatgc

SEQ ID NO: 866301 - DNA, 15 bp, Homo sapiens
gaatggaggcatgcg

SEQ ID NO: 866302 - DNA, 15 bp, Homo sapiens
aatggaggcatgcgg

SEQ ID NO: 866303 - DNA, 15 bp, Homo sapiens
atggaggcatgcgga

SEQ ID NO: 866304 - DNA, 15 bp, Homo sapiens
tggaggcatgcggaa

SEQ ID NO: 866305 - DNA, 15 bp, Homo sapiens
ggaggcatgcggaac

SEQ ID NO: 866306 - DNA, 15 bp, Homo sapiens
gaggcatgcggaact

SEQ ID NO: 866307 - DNA, 15 bp, Homo sapiens
aggcatgcggaactc

SEQ ID NO: 866308 - DNA, 15 bp, Homo sapiens
ggcatgcggaactca

SEQ ID NO: 866309 - DNA, 15 bp, Homo sapiens
gcatgcggaactcac

SEQ ID NO: 866310 - DNA, 15 bp, Homo sapiens
catgcggaactcacc

SEQ ID NO: 866311 - DNA, 15 bp, Homo sapiens
atgcggaactcaccc

SEQ ID NO: 866312 - DNA, 15 bp, Homo sapiens
tgcggaactcaccca

SEQ ID NO: 866313 - DNA, 15 bp, Homo sapiens
gcggaactcacccaa

SEQ ID NO: 866314 - DNA, 15 bp, Homo sapiens
cggaactcacccaac

SEQ ID NO: 866315 - DNA, 15 bp, Homo sapiens
ggaactcacccaaca

SEQ ID NO: 866316 - DNA, 15 bp, Homo sapiens
gaactcacccaacac

SEQ ID NO: 866317 - DNA, 15 bp, Homo sapiens
aactcacccaacacc

SEQ ID NO: 866318 - DNA, 15 bp, Homo sapiens
actcacccaacacct

SEQ ID NO: 866319 - DNA, 15 bp, Homo sapiens
ctcacccaacacctc

SEQ ID NO: 866320 - DNA, 15 bp, Homo sapiens
tcacccaacacctcg

SEQ ID NO: 866321 - DNA, 15 bp, Homo sapiens
cacccaacacctcgc

SEQ ID NO: 866322 - DNA, 15 bp, Homo sapiens
acccaacacctcgcc

SEQ ID NO: 866323 - DNA, 15 bp, Homo sapiens
cccaacacctcgcct

SEQ ID NO: 866324 - DNA, 15 bp, Homo sapiens
ccaacacctcgccta

SEQ ID NO: 866325 - DNA, 15 bp, Homo sapiens
caacacctcgcctaa

SEQ ID NO: 866326 - DNA, 15 bp, Homo sapiens
aacacctcgcctaag

SEQ ID NO: 866327 - DNA, 15 bp, Homo sapiens
acacctcgcctaagc

SEQ ID NO: 866328 - DNA, 15 bp, Homo sapiens
cacctcgcctaagct

SEQ ID NO: 866329 - DNA, 15 bp, Homo sapiens
acctcgcctaagctg

SEQ ID NO: 866330 - DNA, 15 bp, Homo sapiens
cctcgcctaagctga

SEQ ID NO: 866331 - DNA, 15 bp, Homo sapiens
ctcgcctaagctgat

SEQ ID NO: 866332 - DNA, 15 bp, Homo sapiens
tcgcctaagctgatg

SEQ ID NO: 866333 - DNA, 15 bp, Homo sapiens
cgcctaagctgatga

SEQ ID NO: 866334 - DNA, 15 bp, Homo sapiens
gcctaagctgatgag

SEQ ID NO: 866335 - DNA, 15 bp, Homo sapiens
cctaagctgatgagg

SEQ ID NO: 866336 - DNA, 15 bp, Homo sapiens
ctaagctgatgaggt

SEQ ID NO: 866337 - DNA, 15 bp, Homo sapiens
taagctgatgaggta

SEQ ID NO: 866338 - DNA, 15 bp, Homo sapiens
aagctgatgaggtaa

SEQ ID NO: 866339 - DNA, 15 bp, Homo sapiens
agctgatgaggtaag

SEQ ID NO: 866340 - DNA, 15 bp, Homo sapiens
gctgatgaggtaagg

SEQ ID NO: 866341 - DNA, 15 bp, Homo sapiens
ctgatgaggtaagga

SEQ ID NO: 866342 - DNA, 15 bp, Homo sapiens
tgatgaggtaaggag

SEQ ID NO: 866343 - DNA, 15 bp, Homo sapiens
gatgaggtaaggaga

SEQ ID NO: 866344 - DNA, 15 bp, Homo sapiens
atgaggtaaggagag

SEQ ID NO: 866345 - DNA, 15 bp, Homo sapiens
tgaggtaaggagagg

SEQ ID NO: 866346 - DNA, 15 bp, Homo sapiens
gaggtaaggagaggg

SEQ ID NO: 866347 - DNA, 15 bp, Homo sapiens
aggtaaggagagggg

SEQ ID NO: 866348 - DNA, 15 bp, Homo sapiens
ggtaaggagaggggc

SEQ ID NO: 866349 - DNA, 15 bp, Homo sapiens
gtaaggagaggggct

SEQ ID NO: 866350 - DNA, 15 bp, Homo sapiens
taaggagaggggctg

SEQ ID NO: 866351 - DNA, 15 bp, Homo sapiens
aaggagaggggctgg

SEQ ID NO: 866352 - DNA, 15 bp, Homo sapiens
aggagaggggctggt

SEQ ID NO: 866353 - DNA, 15 bp, Homo sapiens
ggagaggggctggtt

SEQ ID NO: 866354 - DNA, 15 bp, Homo sapiens
gagaggggctggttg

SEQ ID NO: 866355 - DNA, 15 bp, Homo sapiens
agaggggctggttgc

SEQ ID NO: 866356 - DNA, 15 bp, Homo sapiens
gaggggctggttgcc

SEQ ID NO: 866357 - DNA, 15 bp, Homo sapiens
aggggctggttgccc

SEQ ID NO: 866358 - DNA, 15 bp, Homo sapiens
ggggctggttgccca

SEQ ID NO: 866359 - DNA, 15 bp, Homo sapiens
gggctggttgcccac

SEQ ID NO: 866360 - DNA, 15 bp, Homo sapiens
ggctggttgcccacg

SEQ ID NO: 866361 - DNA, 15 bp, Homo sapiens
gctggttgcccacgg

SEQ ID NO: 866362 - DNA, 15 bp, Homo sapiens
ctggttgcccacggt

SEQ ID NO: 866363 - DNA, 15 bp, Homo sapiens
tggttgcccacggtt

SEQ ID NO: 866364 - DNA, 15 bp, Homo sapiens
ggttgcccacggttt

SEQ ID NO: 866365 - DNA, 15 bp, Homo sapiens
gttgcccacggtttc

SEQ ID NO: 866366 - DNA, 15 bp, Homo sapiens
ttgcccacggtttcc

SEQ ID NO: 866367 - DNA, 15 bp, Homo sapiens
tgcccacggtttccc

SEQ ID NO: 866368 - DNA, 15 bp, Homo sapiens
gcccacggtttccct

SEQ ID NO: 866369 - DNA, 15 bp, Homo sapiens
cccacggtttccctc

SEQ ID NO: 866370 - DNA, 15 bp, Homo sapiens
ccacggtttccctct

SEQ ID NO: 866371 - DNA, 15 bp, Homo sapiens
cacggtttccctctt

SEQ ID NO: 866372 - DNA, 15 bp, Homo sapiens
acggtttccctctta

SEQ ID NO: 866373 - DNA, 15 bp, Homo sapiens
cggtttccctcttag

SEQ ID NO: 866374 - DNA, 15 bp, Homo sapiens
ggtttccctcttagc

SEQ ID NO: 866375 - DNA, 15 bp, Homo sapiens
gtttccctcttagcc

SEQ ID NO: 866376 - DNA, 15 bp, Homo sapiens
tttccctcttagccc

SEQ ID NO: 866377 - DNA, 15 bp, Homo sapiens
ttccctcttagccct

SEQ ID NO: 866378 - DNA, 15 bp, Homo sapiens
tccctcttagccctt

SEQ ID NO: 866379 - DNA, 15 bp, Homo sapiens
ccctcttagcccttc

SEQ ID NO: 866380 - DNA, 15 bp, Homo sapiens
cctcttagcccttct

SEQ ID NO: 866381 - DNA, 15 bp, Homo sapiens
ctcttagcccttctc

SEQ ID NO: 866382 - DNA, 15 bp, Homo sapiens
tcttagcccttctct

SEQ ID NO: 866383 - DNA, 15 bp, Homo sapiens
cttagcccttctctt

SEQ ID NO: 866384 - DNA, 15 bp, Homo sapiens
ttagcccttctcttc

SEQ ID NO: 866385 - DNA, 15 bp, Homo sapiens
tagcccttctcttcc

SEQ ID NO: 866386 - DNA, 15 bp, Homo sapiens
agcccttctcttcct

SEQ ID NO: 866387 - DNA, 15 bp, Homo sapiens
gcccttctcttcctc

SEQ ID NO: 866388 - DNA, 15 bp, Homo sapiens
cccttctcttcctcc

SEQ ID NO: 866389 - DNA, 15 bp, Homo sapiens
cttctcttcctcccc

SEQ ID NO: 866390 - DNA, 15 bp, Homo sapiens
ttctcttcctcccct

SEQ ID NO: 866391 - DNA, 15 bp, Homo sapiens
tctcttcctcccctc

SEQ ID NO: 866392 - DNA, 15 bp, Homo sapiens
ctcttcctcccctcg

SEQ ID NO: 866393 - DNA, 15 bp, Homo sapiens
tcttcctcccctcgc

SEQ ID NO: 866394 - DNA, 15 bp, Homo sapiens
cttcctcccctcgcc

SEQ ID NO: 866395 - DNA, 15 bp, Homo sapiens
ttcctcccctcgccc

SEQ ID NO: 866396 - DNA, 15 bp, Homo sapiens
tcctcccctcgccct

SEQ ID NO: 866397 - DNA, 15 bp, Homo sapiens
cctcccctcgccctc

SEQ ID NO: 866398 - DNA, 15 bp, Homo sapiens
ctcccctcgccctct

SEQ ID NO: 866399 - DNA, 15 bp, Homo sapiens
tcccctcgccctctc

SEQ ID NO: 866400 - DNA, 15 bp, Homo sapiens
cccctcgccctctcc

SEQ ID NO: 866401 - DNA, 15 bp, Homo sapiens
ccctcgccctctcct

SEQ ID NO: 866402 - DNA, 15 bp, Homo sapiens
cctcgccctctcctc

SEQ ID NO: 866403 - DNA, 15 bp, Homo sapiens
ctcgccctctcctca

SEQ ID NO: 866404 - DNA, 15 bp, Homo sapiens
tcgccctctcctcac

SEQ ID NO: 866405 - DNA, 15 bp, Homo sapiens
cgccctctcctcacc

SEQ ID NO: 866406 - DNA, 15 bp, Homo sapiens
gccctctcctcaccc

SEQ ID NO: 866407 - DNA, 15 bp, Homo sapiens
ccctctcctcaccct

SEQ ID NO: 866408 - DNA, 15 bp, Homo sapiens
cctctcctcaccctg

SEQ ID NO: 866409 - DNA, 15 bp, Homo sapiens
ctctcctcaccctgc

SEQ ID NO: 866410 - DNA, 15 bp, Homo sapiens
tctcctcaccctgcc

SEQ ID NO: 866411 - DNA, 15 bp, Homo sapiens
ctcctcaccctgcca

SEQ ID NO: 866412 - DNA, 15 bp, Homo sapiens
tcctcaccctgccag

SEQ ID NO: 866413 - DNA, 15 bp, Homo sapiens
cctcaccctgccagg

SEQ ID NO: 866414 - DNA, 15 bp, Homo sapiens
ctcaccctgccaggc

SEQ ID NO: 866415 - DNA, 15 bp, Homo sapiens
tcaccctgccaggcc

SEQ ID NO: 866416 - DNA, 15 bp, Homo sapiens
caccctgccaggccc

SEQ ID NO: 866417 - DNA, 15 bp, Homo sapiens
accctgccaggccca

SEQ ID NO: 866418 - DNA, 15 bp, Homo sapiens
ccctgccaggcccag

SEQ ID NO: 866419 - DNA, 15 bp, Homo sapiens
cctgccaggcccaga

SEQ ID NO: 866420 - DNA, 15 bp, Homo sapiens
ctgccaggcccagag

SEQ ID NO: 866421 - DNA, 15 bp, Homo sapiens
tgccaggcccagagt

SEQ ID NO: 866422 - DNA, 15 bp, Homo sapiens
gccaggcccagagtc

SEQ ID NO: 866423 - DNA, 15 bp, Homo sapiens
ccaggcccagagtct

SEQ ID NO: 866424 - DNA, 15 bp, Homo sapiens
caggcccagagtctc

SEQ ID NO: 866425 - DNA, 15 bp, Homo sapiens
aggcccagagtctcc

SEQ ID NO: 866426 - DNA, 15 bp, Homo sapiens
ggcccagagtctccc

SEQ ID NO: 866427 - DNA, 15 bp, Homo sapiens
gcccagagtctcccc

SEQ ID NO: 866428 - DNA, 15 bp, Homo sapiens
cccagagtctcccct

SEQ ID NO: 866429 - DNA, 15 bp, Homo sapiens
ccagagtctcccctc

SEQ ID NO: 866430 - DNA, 15 bp, Homo sapiens
cagagtctcccctcc

SEQ ID NO: 866431 - DNA, 15 bp, Homo sapiens
agagtctcccctccc

SEQ ID NO: 866432 - DNA, 15 bp, Homo sapiens
gagtctcccctcccc

SEQ ID NO: 866433 - DNA, 15 bp, Homo sapiens
agtctcccctcccca

SEQ ID NO: 866434 - DNA, 15 bp, Homo sapiens
gtctcccctccccag

SEQ ID NO: 866435 - DNA, 15 bp, Homo sapiens
tctcccctccccagc

SEQ ID NO: 866436 - DNA, 15 bp, Homo sapiens
ctcccctccccagca

SEQ ID NO: 866437 - DNA, 15 bp, Homo sapiens
tcccctccccagcaa

SEQ ID NO: 866438 - DNA, 15 bp, Homo sapiens
cccctccccagcaag

SEQ ID NO: 866439 - DNA, 15 bp, Homo sapiens
ccctccccagcaagc

SEQ ID NO: 866440 - DNA, 15 bp, Homo sapiens
cctccccagcaagcc

SEQ ID NO: 866441 - DNA, 15 bp, Homo sapiens
ctccccagcaagccc

SEQ ID NO: 866442 - DNA, 15 bp, Homo sapiens
tccccagcaagcccg

SEQ ID NO: 866443 - DNA, 15 bp, Homo sapiens
ccccagcaagcccgg

SEQ ID NO: 866444 - DNA, 15 bp, Homo sapiens
cccagcaagcccggg

SEQ ID NO: 866445 - DNA, 15 bp, Homo sapiens
ccagcaagcccgggg

SEQ ID NO: 866446 - DNA, 15 bp, Homo sapiens
cagcaagcccggggt

SEQ ID NO: 866447 - DNA, 15 bp, Homo sapiens
agcaagcccggggtg

SEQ ID NO: 866448 - DNA, 15 bp, Homo sapiens
gcaagcccggggtgg

SEQ ID NO: 866449 - DNA, 15 bp, Homo sapiens
caagcccggggtggg

SEQ ID NO: 866450 - DNA, 15 bp, Homo sapiens
aagcccggggtgggg

SEQ ID NO: 866451 - DNA, 15 bp, Homo sapiens
agcccggggtggggg

SEQ ID NO: 866452 - DNA, 15 bp, Homo sapiens
gcccggggtggggga

SEQ ID NO: 866453 - DNA, 15 bp, Homo sapiens
cccggggtgggggag

SEQ ID NO: 866454 - DNA, 15 bp, Homo sapiens
ccggggtgggggagg

SEQ ID NO: 866455 - DNA, 15 bp, Homo sapiens
cggggtgggggaggg

SEQ ID NO: 866456 - DNA, 15 bp, Homo sapiens
ggggtgggggagggg

SEQ ID NO: 866457 - DNA, 15 bp, Homo sapiens
gggtgggggagggga

SEQ ID NO: 866458 - DNA, 15 bp, Homo sapiens
ggtgggggaggggag

SEQ ID NO: 866459 - DNA, 15 bp, Homo sapiens
gtgggggaggggagc

SEQ ID NO: 866460 - DNA, 15 bp, Homo sapiens
tgggggaggggagcg

SEQ ID NO: 866461 - DNA, 15 bp, Homo sapiens
gggggaggggagcga

SEQ ID NO: 866462 - DNA, 15 bp, Homo sapiens
ggggaggggagcgag

SEQ ID NO: 866463 - DNA, 15 bp, Homo sapiens
gggaggggagcgaga

SEQ ID NO: 866464 - DNA, 15 bp, Homo sapiens
ggaggggagcgagat

SEQ ID NO: 866465 - DNA, 15 bp, Homo sapiens
gaggggagcgagatc

SEQ ID NO: 866466 - DNA, 15 bp, Homo sapiens
aggggagcgagatcg

SEQ ID NO: 866467 - DNA, 15 bp, Homo sapiens
ggggagcgagatcgt

SEQ ID NO: 866468 - DNA, 15 bp, Homo sapiens
gggagcgagatcgtt

SEQ ID NO: 866469 - DNA, 15 bp, Homo sapiens
ggagcgagatcgtta

SEQ ID NO: 866470 - DNA, 15 bp, Homo sapiens
gagcgagatcgttag

SEQ ID NO: 866471 - DNA, 15 bp, Homo sapiens
agcgagatcgttaga

SEQ ID NO: 866472 - DNA, 15 bp, Homo sapiens
gcgagatcgttagat

SEQ ID NO: 866473 - DNA, 15 bp, Homo sapiens
cgagatcgttagatg

SEQ ID NO: 866474 - DNA, 15 bp, Homo sapiens
gagatcgttagatgg

SEQ ID NO: 866475 - DNA, 15 bp, Homo sapiens
agatcgttagatggc

SEQ ID NO: 866476 - DNA, 15 bp, Homo sapiens
gatcgttagatggct

SEQ ID NO: 866477 - DNA, 15 bp, Homo sapiens
atcgttagatggctt

SEQ ID NO: 866478 - DNA, 15 bp, Homo sapiens
tcgttagatggcttc

SEQ ID NO: 866479 - DNA, 15 bp, Homo sapiens
cgttagatggcttct

SEQ ID NO: 866480 - DNA, 15 bp, Homo sapiens
gttagatggcttctt

SEQ ID NO: 866481 - DNA, 15 bp, Homo sapiens
ttagatggcttctta

SEQ ID NO: 866482 - DNA, 15 bp, Homo sapiens
tagatggcttcttaa

SEQ ID NO: 866483 - DNA, 15 bp, Homo sapiens
agatggcttcttaaa

SEQ ID NO: 866484 - DNA, 15 bp, Homo sapiens
gatggcttcttaaag

SEQ ID NO: 866485 - DNA, 15 bp, Homo sapiens
atggcttcttaaagg

SEQ ID NO: 866486 - DNA, 15 bp, Homo sapiens
tggcttcttaaaggc

SEQ ID NO: 866487 - DNA, 15 bp, Homo sapiens
ggcttcttaaaggct

SEQ ID NO: 866488 - DNA, 15 bp, Homo sapiens
gcttcttaaaggctg

SEQ ID NO: 866489 - DNA, 15 bp, Homo sapiens
cttcttaaaggctgg

SEQ ID NO: 866490 - DNA, 15 bp, Homo sapiens
ttcttaaaggctgga

SEQ ID NO: 866491 - DNA, 15 bp, Homo sapiens
tcttaaaggctggag

SEQ ID NO: 866492 - DNA, 15 bp, Homo sapiens
cttaaaggctggagt

SEQ ID NO: 866493 - DNA, 15 bp, Homo sapiens
ttaaaggctggagta

SEQ ID NO: 866494 - DNA, 15 bp, Homo sapiens
taaaggctggagtat

SEQ ID NO: 866495 - DNA, 15 bp, Homo sapiens
aaaggctggagtatt

SEQ ID NO: 866496 - DNA, 15 bp, Homo sapiens
aaggctggagtattt

SEQ ID NO: 866497 - DNA, 15 bp, Homo sapiens
aggctggagtattta

SEQ ID NO: 866498 - DNA, 15 bp, Homo sapiens
ggctggagtatttat

SEQ ID NO: 866499 - DNA, 15 bp, Homo sapiens
gctggagtatttatt

SEQ ID NO: 866500 - DNA, 15 bp, Homo sapiens
ctggagtatttattc

SEQ ID NO: 866501 - DNA, 15 bp, Homo sapiens
tggagtatttattct

SEQ ID NO: 866502 - DNA, 15 bp, Homo sapiens
ggagtatttattctg

SEQ ID NO: 866503 - DNA, 15 bp, Homo sapiens
gagtatttattctgt

SEQ ID NO: 866504 - DNA, 15 bp, Homo sapiens
agtatttattctgtc

SEQ ID NO: 866505 - DNA, 15 bp, Homo sapiens
gtatttattctgtca

SEQ ID NO: 866506 - DNA, 15 bp, Homo sapiens
tatttattctgtcag

SEQ ID NO: 866507 - DNA, 15 bp, Homo sapiens
atttattctgtcagc

SEQ ID NO: 866508 - DNA, 15 bp, Homo sapiens
tttattctgtcagct

SEQ ID NO: 866509 - DNA, 15 bp, Homo sapiens
ttattctgtcagctt

SEQ ID NO: 866510 - DNA, 15 bp, Homo sapiens
tattctgtcagcttg

SEQ ID NO: 866511 - DNA, 15 bp, Homo sapiens
attctgtcagcttgt

SEQ ID NO: 866512 - DNA, 15 bp, Homo sapiens
ttctgtcagcttgtc

SEQ ID NO: 866513 - DNA, 15 bp, Homo sapiens
tctgtcagcttgtca

SEQ ID NO: 866514 - DNA, 15 bp, Homo sapiens
ctgtcagcttgtcag

SEQ ID NO: 866515 - DNA, 15 bp, Homo sapiens
tgtcagcttgtcagc

SEQ ID NO: 866516 - DNA, 15 bp, Homo sapiens
gtcagcttgtcagca

SEQ ID NO: 866517 - DNA, 15 bp, Homo sapiens
tcagcttgtcagcag

SEQ ID NO: 866518 - DNA, 15 bp, Homo sapiens
cagcttgtcagcagt

SEQ ID NO: 866519 - DNA, 15 bp, Homo sapiens
agcttgtcagcagtt

SEQ ID NO: 866520 - DNA, 15 bp, Homo sapiens
gcttgtcagcagtta

SEQ ID NO: 866521 - DNA, 15 bp, Homo sapiens
cttgtcagcagttaa

SEQ ID NO: 866522 - DNA, 15 bp, Homo sapiens
ttgtcagcagttaat

SEQ ID NO: 866523 - DNA, 15 bp, Homo sapiens
tgtcagcagttaatg

SEQ ID NO: 866524 - DNA, 15 bp, Homo sapiens
gtcagcagttaatga

SEQ ID NO: 866525 - DNA, 15 bp, Homo sapiens
tcagcagttaatgat

SEQ ID NO: 866526 - DNA, 15 bp, Homo sapiens
cagcagttaatgata

SEQ ID NO: 866527 - DNA, 15 bp, Homo sapiens
agcagttaatgatag

SEQ ID NO: 866528 - DNA, 15 bp, Homo sapiens
gcagttaatgataga

SEQ ID NO: 866529 - DNA, 15 bp, Homo sapiens
cagttaatgatagag

SEQ ID NO: 866530 - DNA, 15 bp, Homo sapiens
agttaatgatagagc

SEQ ID NO: 866531 - DNA, 15 bp, Homo sapiens
gttaatgatagagct

SEQ ID NO: 866532 - DNA, 15 bp, Homo sapiens
ttaatgatagagctg

SEQ ID NO: 866533 - DNA, 15 bp, Homo sapiens
taatgatagagctga

SEQ ID NO: 866534 - DNA, 15 bp, Homo sapiens
aatgatagagctgaa

SEQ ID NO: 866535 - DNA, 15 bp, Homo sapiens
atgatagagctgaaa

SEQ ID NO: 866536 - DNA, 15 bp, Homo sapiens
tgatagagctgaaaa

SEQ ID NO: 866537 - DNA, 15 bp, Homo sapiens
gatagagctgaaaaa

SEQ ID NO: 866538 - DNA, 15 bp, Homo sapiens
atagagctgaaaaaa

SEQ ID NO: 866539 - DNA, 15 bp, Homo sapiens
tagagctgaaaaaat

SEQ ID NO: 866540 - DNA, 15 bp, Homo sapiens
agagctgaaaaaatt

SEQ ID NO: 866541 - DNA, 15 bp, Homo sapiens
gagctgaaaaaattc

SEQ ID NO: 866542 - DNA, 15 bp, Homo sapiens
agctgaaaaaattct

SEQ ID NO: 866543 - DNA, 15 bp, Homo sapiens
gctgaaaaaattctg

SEQ ID NO: 866544 - DNA, 15 bp, Homo sapiens
ctgaaaaaattctgt

SEQ ID NO: 866545 - DNA, 15 bp, Homo sapiens
tgaaaaaattctgtc

SEQ ID NO: 866546 - DNA, 15 bp, Homo sapiens
gaaaaaattctgtca

SEQ ID NO: 866547 - DNA, 15 bp, Homo sapiens
aaaaaattctgtcat

SEQ ID NO: 866548 - DNA, 15 bp, Homo sapiens
aaaaattctgtcatg

SEQ ID NO: 866549 - DNA, 15 bp, Homo sapiens
aaaattctgtcatga

SEQ ID NO: 866550 - DNA, 15 bp, Homo sapiens
aaattctgtcatgaa

SEQ ID NO: 866551 - DNA, 15 bp, Homo sapiens
aattctgtcatgaaa

SEQ ID NO: 866552 - DNA, 15 bp, Homo sapiens
attctgtcatgaaaa

SEQ ID NO: 866553 - DNA, 15 bp, Homo sapiens
ttctgtcatgaaaaa

SEQ ID NO: 866554 - DNA, 15 bp, Homo sapiens
tctgtcatgaaaaac

SEQ ID NO: 866555 - DNA, 15 bp, Homo sapiens
ctgtcatgaaaaaca

SEQ ID NO: 866556 - DNA, 15 bp, Homo sapiens
tgtcatgaaaaacag

SEQ ID NO: 866557 - DNA, 15 bp, Homo sapiens
gtcatgaaaaacagt

SEQ ID NO: 866558 - DNA, 15 bp, Homo sapiens
tcatgaaaaacagtt

SEQ ID NO: 866559 - DNA, 15 bp, Homo sapiens
catgaaaaacagttt

SEQ ID NO: 866560 - DNA, 15 bp, Homo sapiens
atgaaaaacagtttg

SEQ ID NO: 866561 - DNA, 15 bp, Homo sapiens
tgaaaaacagtttga

SEQ ID NO: 866562 - DNA, 15 bp, Homo sapiens
gaaaaacagtttgaa

SEQ ID NO: 866563 - DNA, 15 bp, Homo sapiens
aaaaacagtttgaaa

SEQ ID NO: 866564 - DNA, 15 bp, Homo sapiens
aaaacagtttgaaaa

SEQ ID NO: 866565 - DNA, 15 bp, Homo sapiens
aaacagtttgaaaag

SEQ ID NO: 866566 - DNA, 15 bp, Homo sapiens
aacagtttgaaaagc

SEQ ID NO: 866567 - DNA, 15 bp, Homo sapiens
acagtttgaaaagct

SEQ ID NO: 866568 - DNA, 15 bp, Homo sapiens
cagtttgaaaagctg

SEQ ID NO: 866569 - DNA, 15 bp, Homo sapiens
agtttgaaaagctgt

SEQ ID NO: 866570 - DNA, 15 bp, Homo sapiens
gtttgaaaagctgtt

SEQ ID NO: 866571 - DNA, 15 bp, Homo sapiens
tttgaaaagctgttt

SEQ ID NO: 866572 - DNA, 15 bp, Homo sapiens
ttgaaaagctgtttg

SEQ ID NO: 866573 - DNA, 15 bp, Homo sapiens
tgaaaagctgtttga

SEQ ID NO: 866574 - DNA, 15 bp, Homo sapiens
gaaaagctgtttgaa

SEQ ID NO: 866575 - DNA, 15 bp, Homo sapiens
aaaagctgtttgaaa

SEQ ID NO: 866576 - DNA, 15 bp, Homo sapiens
aaagctgtttgaaaa

SEQ ID NO: 866577 - DNA, 15 bp, Homo sapiens
aagctgtttgaaaaa

SEQ ID NO: 866578 - DNA, 15 bp, Homo sapiens
agctgtttgaaaaat

SEQ ID NO: 866579 - DNA, 15 bp, Homo sapiens
gctgtttgaaaaata

SEQ ID NO: 866580 - DNA, 15 bp, Homo sapiens
ctgtttgaaaaatac

SEQ ID NO: 866581 - DNA, 15 bp, Homo sapiens
tgtttgaaaaataca

SEQ ID NO: 866582 - DNA, 15 bp, Homo sapiens
gtttgaaaaatacat

SEQ ID NO: 866583 - DNA, 15 bp, Homo sapiens
tttgaaaaatacata

SEQ ID NO: 866584 - DNA, 15 bp, Homo sapiens
ttgaaaaatacatag

SEQ ID NO: 866585 - DNA, 15 bp, Homo sapiens
tgaaaaatacatagg

SEQ ID NO: 866586 - DNA, 15 bp, Homo sapiens
gaaaaatacataggc

SEQ ID NO: 866587 - DNA, 15 bp, Homo sapiens
aaaaatacataggct

SEQ ID NO: 866588 - DNA, 15 bp, Homo sapiens
aaaatacataggctt

SEQ ID NO: 866589 - DNA, 15 bp, Homo sapiens
aaatacataggcttt

SEQ ID NO: 866590 - DNA, 15 bp, Homo sapiens
aatacataggcttta

SEQ ID NO: 866591 - DNA, 15 bp, Homo sapiens
atacataggctttaa

SEQ ID NO: 866592 - DNA, 15 bp, Homo sapiens
tacataggctttaaa

SEQ ID NO: 866593 - DNA, 15 bp, Homo sapiens
acataggctttaaag

SEQ ID NO: 866594 - DNA, 15 bp, Homo sapiens
cataggctttaaagt

SEQ ID NO: 866595 - DNA, 15 bp, Homo sapiens
ataggctttaaagtc

SEQ ID NO: 866596 - DNA, 15 bp, Homo sapiens
taggctttaaagtct

SEQ ID NO: 866597 - DNA, 15 bp, Homo sapiens
aggctttaaagtctt

SEQ ID NO: 866598 - DNA, 15 bp, Homo sapiens
ggctttaaagtctta

SEQ ID NO: 866599 - DNA, 15 bp, Homo sapiens
gctttaaagtcttag

SEQ ID NO: 866600 - DNA, 15 bp, Homo sapiens
ctttaaagtcttagc

SEQ ID NO: 866601 - DNA, 15 bp, Homo sapiens
tttaaagtcttagct

SEQ ID NO: 866602 - DNA, 15 bp, Homo sapiens
ttaaagtcttagctg

SEQ ID NO: 866603 - DNA, 15 bp, Homo sapiens
taaagtcttagctgt

SEQ ID NO: 866604 - DNA, 15 bp, Homo sapiens
aaagtcttagctgtc

SEQ ID NO: 866605 - DNA, 15 bp, Homo sapiens
aagtcttagctgtca

SEQ ID NO: 866606 - DNA, 15 bp, Homo sapiens
agtcttagctgtcac

SEQ ID NO: 866607 - DNA, 15 bp, Homo sapiens
gtcttagctgtcacc

SEQ ID NO: 866608 - DNA, 15 bp, Homo sapiens
tcttagctgtcacca

SEQ ID NO: 866609 - DNA, 15 bp, Homo sapiens
cttagctgtcaccat

SEQ ID NO: 866610 - DNA, 15 bp, Homo sapiens
ttagctgtcaccatg

SEQ ID NO: 866611 - DNA, 15 bp, Homo sapiens
tagctgtcaccatgt

SEQ ID NO: 866612 - DNA, 15 bp, Homo sapiens
agctgtcaccatgtc

SEQ ID NO: 866613 - DNA, 15 bp, Homo sapiens
gctgtcaccatgtcc

SEQ ID NO: 866614 - DNA, 15 bp, Homo sapiens
ctgtcaccatgtcct

SEQ ID NO: 866615 - DNA, 15 bp, Homo sapiens
tgtcaccatgtcctg

SEQ ID NO: 866616 - DNA, 15 bp, Homo sapiens
gtcaccatgtcctgt

SEQ ID NO: 866617 - DNA, 15 bp, Homo sapiens
tcaccatgtcctgtc

SEQ ID NO: 866618 - DNA, 15 bp, Homo sapiens
caccatgtcctgtct

SEQ ID NO: 866619 - DNA, 15 bp, Homo sapiens
accatgtcctgtctg

SEQ ID NO: 866620 - DNA, 15 bp, Homo sapiens
ccatgtcctgtctgt

SEQ ID NO: 866621 - DNA, 15 bp, Homo sapiens
catgtcctgtctgtg

SEQ ID NO: 866622 - DNA, 15 bp, Homo sapiens
atgtcctgtctgtgt

SEQ ID NO: 866623 - DNA, 15 bp, Homo sapiens
tgtcctgtctgtgtg

SEQ ID NO: 866624 - DNA, 15 bp, Homo sapiens
gtcctgtctgtgtgt

SEQ ID NO: 866625 - DNA, 15 bp, Homo sapiens
tcctgtctgtgtgta

SEQ ID NO: 866626 - DNA, 15 bp, Homo sapiens
cctgtctgtgtgtag

SEQ ID NO: 866627 - DNA, 15 bp, Homo sapiens
ctgtctgtgtgtagt

SEQ ID NO: 866628 - DNA, 15 bp, Homo sapiens
tgtctgtgtgtagtt

SEQ ID NO: 866629 - DNA, 15 bp, Homo sapiens
gtctgtgtgtagttc

SEQ ID NO: 866630 - DNA, 15 bp, Homo sapiens
tctgtgtgtagttcc

SEQ ID NO: 866631 - DNA, 15 bp, Homo sapiens
ctgtgtgtagttcct

SEQ ID NO: 866632 - DNA, 15 bp, Homo sapiens
tgtgtgtagttccta

SEQ ID NO: 866633 - DNA, 15 bp, Homo sapiens
gtgtgtagttcctaa

SEQ ID NO: 866634 - DNA, 15 bp, Homo sapiens
tgtgtagttcctaaa

SEQ ID NO: 866635 - DNA, 15 bp, Homo sapiens
gtgtagttcctaaac

SEQ ID NO: 866636 - DNA, 15 bp, Homo sapiens
tgtagttcctaaaca

SEQ ID NO: 866637 - DNA, 15 bp, Homo sapiens
gtagttcctaaacag

SEQ ID NO: 866638 - DNA, 15 bp, Homo sapiens
tagttcctaaacagc

SEQ ID NO: 866639 - DNA, 15 bp, Homo sapiens
agttcctaaacagca

SEQ ID NO: 866640 - DNA, 15 bp, Homo sapiens
gttcctaaacagcag

SEQ ID NO: 866641 - DNA, 15 bp, Homo sapiens
ttcctaaacagcagt

SEQ ID NO: 866642 - DNA, 15 bp, Homo sapiens
tcctaaacagcagtg

SEQ ID NO: 866643 - DNA, 15 bp, Homo sapiens
cctaaacagcagtgg

SEQ ID NO: 866644 - DNA, 15 bp, Homo sapiens
ctaaacagcagtggc

SEQ ID NO: 866645 - DNA, 15 bp, Homo sapiens
taaacagcagtggca

SEQ ID NO: 866646 - DNA, 15 bp, Homo sapiens
aaacagcagtggcac

SEQ ID NO: 866647 - DNA, 15 bp, Homo sapiens
aacagcagtggcact

SEQ ID NO: 866648 - DNA, 15 bp, Homo sapiens
acagcagtggcacta

SEQ ID NO: 866649 - DNA, 15 bp, Homo sapiens
cagcagtggcactaa

SEQ ID NO: 866650 - DNA, 15 bp, Homo sapiens
agcagtggcactaat

SEQ ID NO: 866651 - DNA, 15 bp, Homo sapiens
gcagtggcactaatg

SEQ ID NO: 866652 - DNA, 15 bp, Homo sapiens
cagtggcactaatga

SEQ ID NO: 866653 - DNA, 15 bp, Homo sapiens
agtggcactaatgat

SEQ ID NO: 866654 - DNA, 15 bp, Homo sapiens
gtggcactaatgatg

SEQ ID NO: 866655 - DNA, 15 bp, Homo sapiens
tggcactaatgatgg

SEQ ID NO: 866656 - DNA, 15 bp, Homo sapiens
ggcactaatgatggc

SEQ ID NO: 866657 - DNA, 15 bp, Homo sapiens
gcactaatgatggcg

SEQ ID NO: 866658 - DNA, 15 bp, Homo sapiens
cactaatgatggcgg

SEQ ID NO: 866659 - DNA, 15 bp, Homo sapiens
actaatgatggcggt

SEQ ID NO: 866660 - DNA, 15 bp, Homo sapiens
ctaatgatggcggta

SEQ ID NO: 866661 - DNA, 15 bp, Homo sapiens
taatgatggcggtaa

SEQ ID NO: 866662 - DNA, 15 bp, Homo sapiens
aatgatggcggtaac

SEQ ID NO: 866663 - DNA, 15 bp, Homo sapiens
atgatggcggtaacc

SEQ ID NO: 866664 - DNA, 15 bp, Homo sapiens
tgatggcggtaacca

SEQ ID NO: 866665 - DNA, 15 bp, Homo sapiens
gatggcggtaaccaa

SEQ ID NO: 866666 - DNA, 15 bp, Homo sapiens
atggcggtaaccaat

SEQ ID NO: 866667 - DNA, 15 bp, Homo sapiens
tggcggtaaccaatc

SEQ ID NO: 866668 - DNA, 15 bp, Homo sapiens
ggcggtaaccaatca

SEQ ID NO: 866669 - DNA, 15 bp, Homo sapiens
gcggtaaccaatcag

SEQ ID NO: 866670 - DNA, 15 bp, Homo sapiens
cggtaaccaatcaga

SEQ ID NO: 866671 - DNA, 15 bp, Homo sapiens
ggtaaccaatcagag

SEQ ID NO: 866672 - DNA, 15 bp, Homo sapiens
gtaaccaatcagaga

SEQ ID NO: 866673 - DNA, 15 bp, Homo sapiens
taaccaatcagagaa

SEQ ID NO: 866674 - DNA, 15 bp, Homo sapiens
aaccaatcagagaaa

SEQ ID NO: 866675 - DNA, 15 bp, Homo sapiens
accaatcagagaaac

SEQ ID NO: 866676 - DNA, 15 bp, Homo sapiens
ccaatcagagaaact

SEQ ID NO: 866677 - DNA, 15 bp, Homo sapiens
caatcagagaaactc

SEQ ID NO: 866678 - DNA, 15 bp, Homo sapiens
aatcagagaaactcg

SEQ ID NO: 866679 - DNA, 15 bp, Homo sapiens
atcagagaaactcgt

SEQ ID NO: 866680 - DNA, 15 bp, Homo sapiens
tcagagaaactcgtg

SEQ ID NO: 866681 - DNA, 15 bp, Homo sapiens
cagagaaactcgtgt

SEQ ID NO: 866682 - DNA, 15 bp, Homo sapiens
agagaaactcgtgtg

SEQ ID NO: 866683 - DNA, 15 bp, Homo sapiens
gagaaactcgtgtgg

SEQ ID NO: 866684 - DNA, 15 bp, Homo sapiens
agaaactcgtgtggt

SEQ ID NO: 866685 - DNA, 15 bp, Homo sapiens
gaaactcgtgtggtt

SEQ ID NO: 866686 - DNA, 15 bp, Homo sapiens
aaactcgtgtggtta

SEQ ID NO: 866687 - DNA, 15 bp, Homo sapiens
aactcgtgtggttag

SEQ ID NO: 866688 - DNA, 15 bp, Homo sapiens
actcgtgtggttagt

SEQ ID NO: 866689 - DNA, 15 bp, Homo sapiens
ctcgtgtggttagtt

SEQ ID NO: 866690 - DNA, 15 bp, Homo sapiens
tcgtgtggttagttt

SEQ ID NO: 866691 - DNA, 15 bp, Homo sapiens
cgtgtggttagtttg

SEQ ID NO: 866692 - DNA, 15 bp, Homo sapiens
gtgtggttagtttgc

SEQ ID NO: 866693 - DNA, 15 bp, Homo sapiens
tgtggttagtttgcc

SEQ ID NO: 866694 - DNA, 15 bp, Homo sapiens
gtggttagtttgcct

SEQ ID NO: 866695 - DNA, 15 bp, Homo sapiens
tggttagtttgcctg

SEQ ID NO: 866696 - DNA, 15 bp, Homo sapiens
ggttagtttgcctgc

SEQ ID NO: 866697 - DNA, 15 bp, Homo sapiens
gttagtttgcctgcg

SEQ ID NO: 866698 - DNA, 15 bp, Homo sapiens
ttagtttgcctgcgg

SEQ ID NO: 866699 - DNA, 15 bp, Homo sapiens
tagtttgcctgcggc

SEQ ID NO: 866700 - DNA, 15 bp, Homo sapiens
agtttgcctgcggca

SEQ ID NO: 866701 - DNA, 15 bp, Homo sapiens
gtttgcctgcggcag

SEQ ID NO: 866702 - DNA, 15 bp, Homo sapiens
tttgcctgcggcagt

SEQ ID NO: 866703 - DNA, 15 bp, Homo sapiens
ttgcctgcggcagtc

SEQ ID NO: 866704 - DNA, 15 bp, Homo sapiens
tgcctgcggcagtct

SEQ ID NO: 866705 - DNA, 15 bp, Homo sapiens
gcctgcggcagtctc

SEQ ID NO: 866706 - DNA, 15 bp, Homo sapiens
cctgcggcagtctct

SEQ ID NO: 866707 - DNA, 15 bp, Homo sapiens
ctgcggcagtctctt

SEQ ID NO: 866708 - DNA, 15 bp, Homo sapiens
tgcggcagtctcttt

SEQ ID NO: 866709 - DNA, 15 bp, Homo sapiens
gcggcagtctctttc

SEQ ID NO: 866710 - DNA, 15 bp, Homo sapiens
cggcagtctctttct

SEQ ID NO: 866711 - DNA, 15 bp, Homo sapiens
ggcagtctctttctg

SEQ ID NO: 866712 - DNA, 15 bp, Homo sapiens
gcagtctctttctgc

SEQ ID NO: 866713 - DNA, 15 bp, Homo sapiens
cagtctctttctgct

SEQ ID NO: 866714 - DNA, 15 bp, Homo sapiens
agtctctttctgctg

SEQ ID NO: 866715 - DNA, 15 bp, Homo sapiens
gtctctttctgctgg

SEQ ID NO: 866716 - DNA, 15 bp, Homo sapiens
tctctttctgctgga

SEQ ID NO: 866717 - DNA, 15 bp, Homo sapiens
ctctttctgctggag

SEQ ID NO: 866718 - DNA, 15 bp, Homo sapiens
tctttctgctggagt

SEQ ID NO: 866719 - DNA, 15 bp, Homo sapiens
ctttctgctggagtc

SEQ ID NO: 866720 - DNA, 15 bp, Homo sapiens
tttctgctggagtcc

SEQ ID NO: 866721 - DNA, 15 bp, Homo sapiens
ttctgctggagtccc

SEQ ID NO: 866722 - DNA, 15 bp, Homo sapiens
tctgctggagtccct

SEQ ID NO: 866723 - DNA, 15 bp, Homo sapiens
ctgctggagtccctc

SEQ ID NO: 866724 - DNA, 15 bp, Homo sapiens
tgctggagtccctcc

SEQ ID NO: 866725 - DNA, 15 bp, Homo sapiens
gctggagtccctccg

SEQ ID NO: 866726 - DNA, 15 bp, Homo sapiens
ctggagtccctccga

SEQ ID NO: 866727 - DNA, 15 bp, Homo sapiens
tggagtccctccgag

SEQ ID NO: 866728 - DNA, 15 bp, Homo sapiens
ggagtccctccgagg

SEQ ID NO: 866729 - DNA, 15 bp, Homo sapiens
gagtccctccgagga

SEQ ID NO: 866730 - DNA, 15 bp, Homo sapiens
agtccctccgaggac

SEQ ID NO: 866731 - DNA, 15 bp, Homo sapiens
gtccctccgaggact

SEQ ID NO: 866732 - DNA, 15 bp, Homo sapiens
tccctccgaggactg

SEQ ID NO: 866733 - DNA, 15 bp, Homo sapiens
ccctccgaggactgt

SEQ ID NO: 866734 - DNA, 15 bp, Homo sapiens
cctccgaggactgtt

SEQ ID NO: 866735 - DNA, 15 bp, Homo sapiens
ctccgaggactgttt

SEQ ID NO: 866736 - DNA, 15 bp, Homo sapiens
tccgaggactgtttt

SEQ ID NO: 866737 - DNA, 15 bp, Homo sapiens
ccgaggactgttttc

SEQ ID NO: 866738 - DNA, 15 bp, Homo sapiens
cgaggactgttttct

SEQ ID NO: 866739 - DNA, 15 bp, Homo sapiens
gaggactgttttctg

SEQ ID NO: 866740 - DNA, 15 bp, Homo sapiens
aggactgttttctgt

SEQ ID NO: 866741 - DNA, 15 bp, Homo sapiens
ggactgttttctgta

SEQ ID NO: 866742 - DNA, 15 bp, Homo sapiens
gactgttttctgtac

SEQ ID NO: 866743 - DNA, 15 bp, Homo sapiens
actgttttctgtact

SEQ ID NO: 866744 - DNA, 15 bp, Homo sapiens
ctgttttctgtactt

SEQ ID NO: 866745 - DNA, 15 bp, Homo sapiens
tgttttctgtactta

SEQ ID NO: 866746 - DNA, 15 bp, Homo sapiens
gttttctgtacttaa

SEQ ID NO: 866747 - DNA, 15 bp, Homo sapiens
ttttctgtacttaag

SEQ ID NO: 866748 - DNA, 15 bp, Homo sapiens
tttctgtacttaagg

SEQ ID NO: 866749 - DNA, 15 bp, Homo sapiens
ttctgtacttaaggc

SEQ ID NO: 866750 - DNA, 15 bp, Homo sapiens
tctgtacttaaggcc

SEQ ID NO: 866751 - DNA, 15 bp, Homo sapiens
ctgtacttaaggcca

SEQ ID NO: 866752 - DNA, 15 bp, Homo sapiens
tgtacttaaggccat

SEQ ID NO: 866753 - DNA, 15 bp, Homo sapiens
gtacttaaggccata

SEQ ID NO: 866754 - DNA, 15 bp, Homo sapiens
tacttaaggccatat

SEQ ID NO: 866755 - DNA, 15 bp, Homo sapiens
acttaaggccatatg

SEQ ID NO: 866756 - DNA, 15 bp, Homo sapiens
cttaaggccatatgt

SEQ ID NO: 866757 - DNA, 15 bp, Homo sapiens
ttaaggccatatgtg

SEQ ID NO: 866758 - DNA, 15 bp, Homo sapiens
taaggccatatgtga

SEQ ID NO: 866759 - DNA, 15 bp, Homo sapiens
aaggccatatgtgag

SEQ ID NO: 866760 - DNA, 15 bp, Homo sapiens
aggccatatgtgaga

SEQ ID NO: 866761 - DNA, 15 bp, Homo sapiens
ggccatatgtgagat

SEQ ID NO: 866762 - DNA, 15 bp, Homo sapiens
gccatatgtgagatg

SEQ ID NO: 866763 - DNA, 15 bp, Homo sapiens
ccatatgtgagatgt

SEQ ID NO: 866764 - DNA, 15 bp, Homo sapiens
catatgtgagatgta

SEQ ID NO: 866765 - DNA, 15 bp, Homo sapiens
atatgtgagatgtat

SEQ ID NO: 866766 - DNA, 15 bp, Homo sapiens
tatgtgagatgtatc

SEQ ID NO: 866767 - DNA, 15 bp, Homo sapiens
atgtgagatgtatca

SEQ ID NO: 866768 - DNA, 15 bp, Homo sapiens
tgtgagatgtatcat

SEQ ID NO: 866769 - DNA, 15 bp, Homo sapiens
gtgagatgtatcatc

SEQ ID NO: 866770 - DNA, 15 bp, Homo sapiens
tgagatgtatcatca

SEQ ID NO: 866771 - DNA, 15 bp, Homo sapiens
gagatgtatcatcac

SEQ ID NO: 866772 - DNA, 15 bp, Homo sapiens
agatgtatcatcaca

SEQ ID NO: 866773 - DNA, 15 bp, Homo sapiens
gatgtatcatcacaa

SEQ ID NO: 866774 - DNA, 15 bp, Homo sapiens
atgtatcatcacaat

SEQ ID NO: 866775 - DNA, 15 bp, Homo sapiens
tgtatcatcacaatc

SEQ ID NO: 866776 - DNA, 15 bp, Homo sapiens
gtatcatcacaatca

SEQ ID NO: 866777 - DNA, 15 bp, Homo sapiens
tatcatcacaatcaa

SEQ ID NO: 866778 - DNA, 15 bp, Homo sapiens
atcatcacaatcaaa

SEQ ID NO: 866779 - DNA, 15 bp, Homo sapiens
tcatcacaatcaaaa

SEQ ID NO: 866780 - DNA, 15 bp, Homo sapiens
catcacaatcaaaaa

SEQ ID NO: 866781 - DNA, 15 bp, Homo sapiens
atcacaatcaaaaat

SEQ ID NO: 866782 - DNA, 15 bp, Homo sapiens
tcacaatcaaaaatg

SEQ ID NO: 866783 - DNA, 15 bp, Homo sapiens
cacaatcaaaaatga

SEQ ID NO: 866784 - DNA, 15 bp, Homo sapiens
acaatcaaaaatgaa

SEQ ID NO: 866785 - DNA, 15 bp, Homo sapiens
caatcaaaaatgaac

SEQ ID NO: 866786 - DNA, 15 bp, Homo sapiens
aatcaaaaatgaacc

SEQ ID NO: 866787 - DNA, 15 bp, Homo sapiens
atcaaaaatgaacct

SEQ ID NO: 866788 - DNA, 15 bp, Homo sapiens
tcaaaaatgaacctg

SEQ ID NO: 866789 - DNA, 15 bp, Homo sapiens
caaaaatgaacctga

SEQ ID NO: 866790 - DNA, 15 bp, Homo sapiens
aaaaatgaacctgaa

SEQ ID NO: 866791 - DNA, 15 bp, Homo sapiens
aaaatgaacctgaag

SEQ ID NO: 866792 - DNA, 15 bp, Homo sapiens
aaatgaacctgaaga

SEQ ID NO: 866793 - DNA, 15 bp, Homo sapiens
aatgaacctgaagat

SEQ ID NO: 866794 - DNA, 15 bp, Homo sapiens
atgaacctgaagatt

SEQ ID NO: 866795 - DNA, 15 bp, Homo sapiens
tgaacctgaagatta

SEQ ID NO: 866796 - DNA, 15 bp, Homo sapiens
gaacctgaagattac

SEQ ID NO: 866797 - DNA, 15 bp, Homo sapiens
aacctgaagattacc

SEQ ID NO: 866798 - DNA, 15 bp, Homo sapiens
acctgaagattacct

SEQ ID NO: 866799 - DNA, 15 bp, Homo sapiens
cctgaagattacctt

SEQ ID NO: 866800 - DNA, 15 bp, Homo sapiens
ctgaagattaccttc

SEQ ID NO: 866801 - DNA, 15 bp, Homo sapiens
tgaagattaccttcc

SEQ ID NO: 866802 - DNA, 15 bp, Homo sapiens
gaagattaccttcct

SEQ ID NO: 866803 - DNA, 15 bp, Homo sapiens
aagattaccttcctt

SEQ ID NO: 866804 - DNA, 15 bp, Homo sapiens
agattaccttccttt

SEQ ID NO: 866805 - DNA, 15 bp, Homo sapiens
gattaccttcctttt

SEQ ID NO: 866806 - DNA, 15 bp, Homo sapiens
attaccttcctttta

SEQ ID NO: 866807 - DNA, 15 bp, Homo sapiens
ttaccttccttttat

SEQ ID NO: 866808 - DNA, 15 bp, Homo sapiens
taccttccttttatc

SEQ ID NO: 866809 - DNA, 15 bp, Homo sapiens
accttccttttatcc

SEQ ID NO: 866810 - DNA, 15 bp, Homo sapiens
ccttccttttatcct

SEQ ID NO: 866811 - DNA, 15 bp, Homo sapiens
cttccttttatcctg

SEQ ID NO: 866812 - DNA, 15 bp, Homo sapiens
ttccttttatcctgt

SEQ ID NO: 866813 - DNA, 15 bp, Homo sapiens
tccttttatcctgtc

SEQ ID NO: 866814 - DNA, 15 bp, Homo sapiens
ccttttatcctgtcg

SEQ ID NO: 866815 - DNA, 15 bp, Homo sapiens
cttttatcctgtcga

SEQ ID NO: 866816 - DNA, 15 bp, Homo sapiens
ttttatcctgtcgat

SEQ ID NO: 866817 - DNA, 15 bp, Homo sapiens
tttatcctgtcgatt

SEQ ID NO: 866818 - DNA, 15 bp, Homo sapiens
ttatcctgtcgattg

SEQ ID NO: 866819 - DNA, 15 bp, Homo sapiens
tatcctgtcgattga

SEQ ID NO: 866820 - DNA, 15 bp, Homo sapiens
atcctgtcgattgaa

SEQ ID NO: 866821 - DNA, 15 bp, Homo sapiens
tcctgtcgattgaaa

SEQ ID NO: 866822 - DNA, 15 bp, Homo sapiens
cctgtcgattgaaat

SEQ ID NO: 866823 - DNA, 15 bp, Homo sapiens
ctgtcgattgaaatc

SEQ ID NO: 866824 - DNA, 15 bp, Homo sapiens
tgtcgattgaaatca

SEQ ID NO: 866825 - DNA, 15 bp, Homo sapiens
gtcgattgaaatcaa

SEQ ID NO: 866826 - DNA, 15 bp, Homo sapiens
tcgattgaaatcaaa

SEQ ID NO: 866827 - DNA, 15 bp, Homo sapiens
cgattgaaatcaaat

SEQ ID NO: 866828 - DNA, 15 bp, Homo sapiens
gattgaaatcaaatt

SEQ ID NO: 866829 - DNA, 15 bp, Homo sapiens
attgaaatcaaattt

SEQ ID NO: 866830 - DNA, 15 bp, Homo sapiens
ttgaaatcaaatttc

SEQ ID NO: 866831 - DNA, 15 bp, Homo sapiens
tgaaatcaaatttct

SEQ ID NO: 866832 - DNA, 15 bp, Homo sapiens
gaaatcaaatttctg

SEQ ID NO: 866833 - DNA, 15 bp, Homo sapiens
aaatcaaatttctgt

SEQ ID NO: 866834 - DNA, 15 bp, Homo sapiens
aatcaaatttctgtt

SEQ ID NO: 866835 - DNA, 15 bp, Homo sapiens
atcaaatttctgtta

SEQ ID NO: 866836 - DNA, 15 bp, Homo sapiens
tcaaatttctgttaa

SEQ ID NO: 866837 - DNA, 15 bp, Homo sapiens
caaatttctgttaat

SEQ ID NO: 866838 - DNA, 15 bp, Homo sapiens
aaatttctgttaatt

SEQ ID NO: 866839 - DNA, 15 bp, Homo sapiens
aatttctgttaattg

SEQ ID NO: 866840 - DNA, 15 bp, Homo sapiens
atttctgttaattga

SEQ ID NO: 866841 - DNA, 15 bp, Homo sapiens
tttctgttaattgat

SEQ ID NO: 866842 - DNA, 15 bp, Homo sapiens
ttctgttaattgatt

SEQ ID NO: 866843 - DNA, 15 bp, Homo sapiens
tctgttaattgattt

SEQ ID NO: 866844 - DNA, 15 bp, Homo sapiens
ctgttaattgatttt

SEQ ID NO: 866845 - DNA, 15 bp, Homo sapiens
tgttaattgattttg

SEQ ID NO: 866846 - DNA, 15 bp, Homo sapiens
gttaattgattttga

SEQ ID NO: 866847 - DNA, 15 bp, Homo sapiens
ttaattgattttgac

SEQ ID NO: 866848 - DNA, 15 bp, Homo sapiens
taattgattttgact

SEQ ID NO: 866849 - DNA, 15 bp, Homo sapiens
aattgattttgactg

SEQ ID NO: 866850 - DNA, 15 bp, Homo sapiens
attgattttgactga

SEQ ID NO: 866851 - DNA, 15 bp, Homo sapiens
ttgattttgactgat

SEQ ID NO: 866852 - DNA, 15 bp, Homo sapiens
tgattttgactgata

SEQ ID NO: 866853 - DNA, 15 bp, Homo sapiens
gattttgactgataa

SEQ ID NO: 866854 - DNA, 15 bp, Homo sapiens
attttgactgataag

SEQ ID NO: 866855 - DNA, 15 bp, Homo sapiens
ttttgactgataaga

SEQ ID NO: 866856 - DNA, 15 bp, Homo sapiens
tttgactgataagaa

SEQ ID NO: 866857 - DNA, 15 bp, Homo sapiens
ttgactgataagaaa

SEQ ID NO: 866858 - DNA, 15 bp, Homo sapiens
tgactgataagaaaa

SEQ ID NO: 866859 - DNA, 15 bp, Homo sapiens
gactgataagaaaaa

SEQ ID NO: 866860 - DNA, 15 bp, Homo sapiens
actgataagaaaaag

SEQ ID NO: 866861 - DNA, 15 bp, Homo sapiens
ctgataagaaaaagt

SEQ ID NO: 866862 - DNA, 15 bp, Homo sapiens
tgataagaaaaagtc

SEQ ID NO: 866863 - DNA, 15 bp, Homo sapiens
gataagaaaaagtct

SEQ ID NO: 866864 - DNA, 15 bp, Homo sapiens
ataagaaaaagtcta

SEQ ID NO: 866865 - DNA, 15 bp, Homo sapiens
taagaaaaagtctaa

SEQ ID NO: 866866 - DNA, 15 bp, Homo sapiens
aagaaaaagtctaat

SEQ ID NO: 866867 - DNA, 15 bp, Homo sapiens
agaaaaagtctaata

SEQ ID NO: 866868 - DNA, 15 bp, Homo sapiens
gaaaaagtctaataa

SEQ ID NO: 866869 - DNA, 15 bp, Homo sapiens
aaaaagtctaataat

SEQ ID NO: 866870 - DNA, 15 bp, Homo sapiens
aaaagtctaataatc

SEQ ID NO: 866871 - DNA, 15 bp, Homo sapiens
aaagtctaataatct

SEQ ID NO: 866872 - DNA, 15 bp, Homo sapiens
aagtctaataatctg

SEQ ID NO: 866873 - DNA, 15 bp, Homo sapiens
agtctaataatctgt

SEQ ID NO: 866874 - DNA, 15 bp, Homo sapiens
gtctaataatctgtg

SEQ ID NO: 866875 - DNA, 15 bp, Homo sapiens
tctaataatctgtgg

SEQ ID NO: 866876 - DNA, 15 bp, Homo sapiens
ctaataatctgtgga

SEQ ID NO: 866877 - DNA, 15 bp, Homo sapiens
taataatctgtggac

SEQ ID NO: 866878 - DNA, 15 bp, Homo sapiens
aataatctgtggact

SEQ ID NO: 866879 - DNA, 15 bp, Homo sapiens
ataatctgtggactt

SEQ ID NO: 866880 - DNA, 15 bp, Homo sapiens
taatctgtggacttg

SEQ ID NO: 866881 - DNA, 15 bp, Homo sapiens
aatctgtggacttgc

SEQ ID NO: 866882 - DNA, 15 bp, Homo sapiens
atctgtggacttgcc

SEQ ID NO: 866883 - DNA, 15 bp, Homo sapiens
tctgtggacttgcca

SEQ ID NO: 866884 - DNA, 15 bp, Homo sapiens
ctgtggacttgccaa

SEQ ID NO: 866885 - DNA, 15 bp, Homo sapiens
tgtggacttgccaaa

SEQ ID NO: 866886 - DNA, 15 bp, Homo sapiens
gtggacttgccaaag

SEQ ID NO: 866887 - DNA, 15 bp, Homo sapiens
tggacttgccaaagc

SEQ ID NO: 866888 - DNA, 15 bp, Homo sapiens
ggacttgccaaagca

SEQ ID NO: 866889 - DNA, 15 bp, Homo sapiens
gacttgccaaagcaa

SEQ ID NO: 866890 - DNA, 15 bp, Homo sapiens
acttgccaaagcaaa

SEQ ID NO: 866891 - DNA, 15 bp, Homo sapiens
cttgccaaagcaaag

SEQ ID NO: 866892 - DNA, 15 bp, Homo sapiens
ttgccaaagcaaagt

SEQ ID NO: 866893 - DNA, 15 bp, Homo sapiens
tgccaaagcaaagtt

SEQ ID NO: 866894 - DNA, 15 bp, Homo sapiens
gccaaagcaaagttc

SEQ ID NO: 866895 - DNA, 15 bp, Homo sapiens
ccaaagcaaagttca

SEQ ID NO: 866896 - DNA, 15 bp, Homo sapiens
caaagcaaagttcaa

SEQ ID NO: 866897 - DNA, 15 bp, Homo sapiens
aaagcaaagttcaaa

SEQ ID NO: 866898 - DNA, 15 bp, Homo sapiens
aagcaaagttcaaaa

SEQ ID NO: 866899 - DNA, 15 bp, Homo sapiens
agcaaagttcaaaag

SEQ ID NO: 866900 - DNA, 15 bp, Homo sapiens
gcaaagttcaaaagt

SEQ ID NO: 866901 - DNA, 15 bp, Homo sapiens
caaagttcaaaagta

SEQ ID NO: 866902 - DNA, 15 bp, Homo sapiens
aaagttcaaaagtaa

SEQ ID NO: 866903 - DNA, 15 bp, Homo sapiens
aagttcaaaagtaat

SEQ ID NO: 866904 - DNA, 15 bp, Homo sapiens
agttcaaaagtaatc

SEQ ID NO: 866905 - DNA, 15 bp, Homo sapiens
gttcaaaagtaatcc

SEQ ID NO: 866906 - DNA, 15 bp, Homo sapiens
ttcaaaagtaatcca

SEQ ID NO: 866907 - DNA, 15 bp, Homo sapiens
tcaaaagtaatccag

SEQ ID NO: 866908 - DNA, 15 bp, Homo sapiens
caaaagtaatccagt

SEQ ID NO: 866909 - DNA, 15 bp, Homo sapiens
aaaagtaatccagtt

SEQ ID NO: 866910 - DNA, 15 bp, Homo sapiens
aaagtaatccagttc

SEQ ID NO: 866911 - DNA, 15 bp, Homo sapiens
aagtaatccagttct

SEQ ID NO: 866912 - DNA, 15 bp, Homo sapiens
agtaatccagttctg

SEQ ID NO: 866913 - DNA, 15 bp, Homo sapiens
gtaatccagttctgc

SEQ ID NO: 866914 - DNA, 15 bp, Homo sapiens
taatccagttctgct

SEQ ID NO: 866915 - DNA, 15 bp, Homo sapiens
aatccagttctgctc

SEQ ID NO: 866916 - DNA, 15 bp, Homo sapiens
atccagttctgctca

SEQ ID NO: 866917 - DNA, 15 bp, Homo sapiens
tccagttctgctcag

SEQ ID NO: 866918 - DNA, 15 bp, Homo sapiens
ccagttctgctcagg

SEQ ID NO: 866919 - DNA, 15 bp, Homo sapiens
cagttctgctcaggc

SEQ ID NO: 866920 - DNA, 15 bp, Homo sapiens
agttctgctcaggct

SEQ ID NO: 866921 - DNA, 15 bp, Homo sapiens
gttctgctcaggcta

SEQ ID NO: 866922 - DNA, 15 bp, Homo sapiens
ttctgctcaggctaa

SEQ ID NO: 866923 - DNA, 15 bp, Homo sapiens
tctgctcaggctaaa

SEQ ID NO: 866924 - DNA, 15 bp, Homo sapiens
ctgctcaggctaaaa

SEQ ID NO: 866925 - DNA, 15 bp, Homo sapiens
tgctcaggctaaaag

SEQ ID NO: 866926 - DNA, 15 bp, Homo sapiens
gctcaggctaaaagc

SEQ ID NO: 866927 - DNA, 15 bp, Homo sapiens
ctcaggctaaaagca

SEQ ID NO: 866928 - DNA, 15 bp, Homo sapiens
tcaggctaaaagcaa

SEQ ID NO: 866929 - DNA, 15 bp, Homo sapiens
caggctaaaagcaat

SEQ ID NO: 866930 - DNA, 15 bp, Homo sapiens
aggctaaaagcaata

SEQ ID NO: 866931 - DNA, 15 bp, Homo sapiens
ggctaaaagcaatat

SEQ ID NO: 866932 - DNA, 15 bp, Homo sapiens
gctaaaagcaatatt

SEQ ID NO: 866933 - DNA, 15 bp, Homo sapiens
ctaaaagcaatatta

SEQ ID NO: 866934 - DNA, 15 bp, Homo sapiens
taaaagcaatattaa

SEQ ID NO: 866935 - DNA, 15 bp, Homo sapiens
aaaagcaatattaat

SEQ ID NO: 866936 - DNA, 15 bp, Homo sapiens
aaagcaatattaatt

SEQ ID NO: 866937 - DNA, 15 bp, Homo sapiens
aagcaatattaatta

SEQ ID NO: 866938 - DNA, 15 bp, Homo sapiens
agcaatattaattat

SEQ ID NO: 866939 - DNA, 15 bp, Homo sapiens
gcaatattaattatg

SEQ ID NO: 866940 - DNA, 15 bp, Homo sapiens
caatattaattatga

SEQ ID NO: 866941 - DNA, 15 bp, Homo sapiens
aatattaattatgaa

SEQ ID NO: 866942 - DNA, 15 bp, Homo sapiens
atattaattatgaaa

SEQ ID NO: 866943 - DNA, 15 bp, Homo sapiens
tattaattatgaaat

SEQ ID NO: 866944 - DNA, 15 bp, Homo sapiens
attaattatgaaata

SEQ ID NO: 866945 - DNA, 15 bp, Homo sapiens
ttaattatgaaatac

SEQ ID NO: 866946 - DNA, 15 bp, Homo sapiens
taattatgaaataca

SEQ ID NO: 866947 - DNA, 15 bp, Homo sapiens
aattatgaaatacag

SEQ ID NO: 866948 - DNA, 15 bp, Homo sapiens
attatgaaatacagc

SEQ ID NO: 866949 - DNA, 15 bp, Homo sapiens
ttatgaaatacagca

SEQ ID NO: 866950 - DNA, 15 bp, Homo sapiens
tatgaaatacagcat

SEQ ID NO: 866951 - DNA, 15 bp, Homo sapiens
atgaaatacagcatg

SEQ ID NO: 866952 - DNA, 15 bp, Homo sapiens
tgaaatacagcatgc

SEQ ID NO: 866953 - DNA, 15 bp, Homo sapiens
gaaatacagcatgca

SEQ ID NO: 866954 - DNA, 15 bp, Homo sapiens
aaatacagcatgcat

SEQ ID NO: 866955 - DNA, 15 bp, Homo sapiens
aatacagcatgcatg

SEQ ID NO: 866956 - DNA, 15 bp, Homo sapiens
atacagcatgcatgt

SEQ ID NO: 866957 - DNA, 15 bp, Homo sapiens
tacagcatgcatgta

SEQ ID NO: 866958 - DNA, 15 bp, Homo sapiens
acagcatgcatgtac

SEQ ID NO: 866959 - DNA, 15 bp, Homo sapiens
cagcatgcatgtaca

SEQ ID NO: 866960 - DNA, 15 bp, Homo sapiens
agcatgcatgtacat

SEQ ID NO: 866961 - DNA, 15 bp, Homo sapiens
gcatgcatgtacatg

SEQ ID NO: 866962 - DNA, 15 bp, Homo sapiens
catgcatgtacatgt

SEQ ID NO: 866963 - DNA, 15 bp, Homo sapiens
atgcatgtacatgtt

SEQ ID NO: 866964 - DNA, 15 bp, Homo sapiens
tgcatgtacatgttc

SEQ ID NO: 866965 - DNA, 15 bp, Homo sapiens
gcatgtacatgttcc

SEQ ID NO: 866966 - DNA, 15 bp, Homo sapiens
catgtacatgttccc

SEQ ID NO: 866967 - DNA, 15 bp, Homo sapiens
atgtacatgttccct

SEQ ID NO: 866968 - DNA, 15 bp, Homo sapiens
tgtacatgttccctc

SEQ ID NO: 866969 - DNA, 15 bp, Homo sapiens
gtacatgttccctcc

SEQ ID NO: 866970 - DNA, 15 bp, Homo sapiens
tacatgttccctcct

SEQ ID NO: 866971 - DNA, 15 bp, Homo sapiens
acatgttccctcctt

SEQ ID NO: 866972 - DNA, 15 bp, Homo sapiens
catgttccctccttt

SEQ ID NO: 866973 - DNA, 15 bp, Homo sapiens
atgttccctcctttc

SEQ ID NO: 866974 - DNA, 15 bp, Homo sapiens
tgttccctcctttcc

SEQ ID NO: 866975 - DNA, 15 bp, Homo sapiens
gttccctcctttcct

SEQ ID NO: 866976 - DNA, 15 bp, Homo sapiens
ttccctcctttcctc

SEQ ID NO: 866977 - DNA, 15 bp, Homo sapiens
tccctcctttcctcc

SEQ ID NO: 866978 - DNA, 15 bp, Homo sapiens
ccctcctttcctccc

SEQ ID NO: 866979 - DNA, 15 bp, Homo sapiens
cctcctttcctccct

SEQ ID NO: 866980 - DNA, 15 bp, Homo sapiens
ctcctttcctccctt

SEQ ID NO: 866981 - DNA, 15 bp, Homo sapiens
tcctttcctcccttc

SEQ ID NO: 866982 - DNA, 15 bp, Homo sapiens
cctttcctcccttcc

SEQ ID NO: 866983 - DNA, 15 bp, Homo sapiens
ctttcctcccttcct

SEQ ID NO: 866984 - DNA, 15 bp, Homo sapiens
tttcctcccttcctt

SEQ ID NO: 866985 - DNA, 15 bp, Homo sapiens
tcctcccttccttcc

SEQ ID NO: 866986 - DNA, 15 bp, Homo sapiens
ccttccttccttccc

SEQ ID NO: 866987 - DNA, 15 bp, Homo sapiens
cttccttccttccct

SEQ ID NO: 866988 - DNA, 15 bp, Homo sapiens
ttccttccttccctc

SEQ ID NO: 866989 - DNA, 15 bp, Homo sapiens
ccttccttccctcct

SEQ ID NO: 866990 - DNA, 15 bp, Homo sapiens
cttccttccctcctt

SEQ ID NO: 866991 - DNA, 15 bp, Homo sapiens
ttccttccctccttc

SEQ ID NO: 866992 - DNA, 15 bp, Homo sapiens
tccttccctccttcc

SEQ ID NO: 866993 - DNA, 15 bp, Homo sapiens
ccttccctccttcct

SEQ ID NO: 866994 - DNA, 15 bp, Homo sapiens
cttccctccttcctt

SEQ ID NO: 866995 - DNA, 15 bp, Homo sapiens
ttccctccttccttc

SEQ ID NO: 866996 - DNA, 15 bp, Homo sapiens
ccctccttccttcct

SEQ ID NO: 866997 - DNA, 15 bp, Homo sapiens
cctccttccttcctt

SEQ ID NO: 866998 - DNA, 15 bp, Homo sapiens
ctccttccttccttc

SEQ ID NO: 866999 - DNA, 15 bp, Homo sapiens
ttccttccttccctt

SEQ ID NO: 867000 - DNA, 15 bp, Homo sapiens
ccttccttcccttct

SEQ ID NO: 867001 - DNA, 15 bp, Homo sapiens
cttccttcccttctt

SEQ ID NO: 867002 - DNA, 15 bp, Homo sapiens
ttccttcccttcttc

SEQ ID NO: 867003 - DNA, 15 bp, Homo sapiens
tccttcccttcttcc

SEQ ID NO: 867004 - DNA, 15 bp, Homo sapiens
ccttcccttcttccc

SEQ ID NO: 867005 - DNA, 15 bp, Homo sapiens
cttcccttcttcccc

SEQ ID NO: 867006 - DNA, 15 bp, Homo sapiens
ttcccttcttccccc

SEQ ID NO: 867007 - DNA, 15 bp, Homo sapiens
tcccttcttccccct

SEQ ID NO: 867008 - DNA, 15 bp, Homo sapiens
cccttcttccccctc

SEQ ID NO: 867009 - DNA, 15 bp, Homo sapiens
ccttcttccccctcc

SEQ ID NO: 867010 - DNA, 15 bp, Homo sapiens
cttcttccccctccc

SEQ ID NO: 867011 - DNA, 15 bp, Homo sapiens
ttcttccccctccct

SEQ ID NO: 867012 - DNA, 15 bp, Homo sapiens
tcttccccctccctc

SEQ ID NO: 867013 - DNA, 15 bp, Homo sapiens
cttccccctccctcc

SEQ ID NO: 867014 - DNA, 15 bp, Homo sapiens
ttccccctccctccc

SEQ ID NO: 867015 - DNA, 15 bp, Homo sapiens
tccccctccctccct

SEQ ID NO: 867016 - DNA, 15 bp, Homo sapiens
ccccctccctccctc

SEQ ID NO: 867017 - DNA, 15 bp, Homo sapiens
cccctccctccctcc

SEQ ID NO: 867018 - DNA, 15 bp, Homo sapiens
ccctccctccctccc

SEQ ID NO: 867019 - DNA, 15 bp, Homo sapiens
ccctcccttcctcct

SEQ ID NO: 867020 - DNA, 15 bp, Homo sapiens
cctcccttcctcctt

SEQ ID NO: 867021 - DNA, 15 bp, Homo sapiens
ctcccttcctccttc

SEQ ID NO: 867022 - DNA, 15 bp, Homo sapiens
tcccttcctccttct

SEQ ID NO: 867023 - DNA, 15 bp, Homo sapiens
ccttcctccttctct

SEQ ID NO: 867024 - DNA, 15 bp, Homo sapiens
cttcctccttctctc

SEQ ID NO: 867025 - DNA, 15 bp, Homo sapiens
ttcctccttctctct

SEQ ID NO: 867026 - DNA, 15 bp, Homo sapiens
tcctccttctctctc

SEQ ID NO: 867027 - DNA, 15 bp, Homo sapiens
cctccttctctctct

SEQ ID NO: 867028 - DNA, 15 bp, Homo sapiens
ctccttctctctctt

SEQ ID NO: 867029 - DNA, 15 bp, Homo sapiens
tccttctctctcttt

SEQ ID NO: 867030 - DNA, 15 bp, Homo sapiens
ccttctctctctttc

SEQ ID NO: 867031 - DNA, 15 bp, Homo sapiens
ttctctctctttctc

SEQ ID NO: 867032 - DNA, 15 bp, Homo sapiens
tctctctctttctcc

SEQ ID NO: 867033 - DNA, 15 bp, Homo sapiens
ctctctctttctccc

SEQ ID NO: 867034 - DNA, 15 bp, Homo sapiens
tctctctttctccct

SEQ ID NO: 867035 - DNA, 15 bp, Homo sapiens
ctctctttctccctc

SEQ ID NO: 867036 - DNA, 15 bp, Homo sapiens
tctctttctccctca

SEQ ID NO: 867037 - DNA, 15 bp, Homo sapiens
ctctttctccctcac

SEQ ID NO: 867038 - DNA, 15 bp, Homo sapiens
tctttctccctcact

SEQ ID NO: 867039 - DNA, 15 bp, Homo sapiens
ctttctccctcactt

SEQ ID NO: 867040 - DNA, 15 bp, Homo sapiens
tttctccctcacttc

SEQ ID NO: 867041 - DNA, 15 bp, Homo sapiens
ttctccctcacttct

SEQ ID NO: 867042 - DNA, 15 bp, Homo sapiens
tctccctcacttctt

SEQ ID NO: 867043 - DNA, 15 bp, Homo sapiens
ctccctcacttcttt

SEQ ID NO: 867044 - DNA, 15 bp, Homo sapiens
tccctcacttctttc

SEQ ID NO: 867045 - DNA, 15 bp, Homo sapiens
ccctcacttctttct

SEQ ID NO: 867046 - DNA, 15 bp, Homo sapiens
cctcacttctttctt

SEQ ID NO: 867047 - DNA, 15 bp, Homo sapiens
ctcacttctttcttg

SEQ ID NO: 867048 - DNA, 15 bp, Homo sapiens
tcacttctttcttga

SEQ ID NO: 867049 - DNA, 15 bp, Homo sapiens
cacttctttcttgac

SEQ ID NO: 867050 - DNA, 15 bp, Homo sapiens
acttctttcttgact

SEQ ID NO: 867051 - DNA, 15 bp, Homo sapiens
cttctttcttgacta

SEQ ID NO: 867052 - DNA, 15 bp, Homo sapiens
ttctttcttgactat

SEQ ID NO: 867053 - DNA, 15 bp, Homo sapiens
tctttcttgactatg

SEQ ID NO: 867054 - DNA, 15 bp, Homo sapiens
ctttcttgactatgg

SEQ ID NO: 867055 - DNA, 15 bp, Homo sapiens
tttcttgactatggc

SEQ ID NO: 867056 - DNA, 15 bp, Homo sapiens
ttcttgactatggct

SEQ ID NO: 867057 - DNA, 15 bp, Homo sapiens
tcttgactatggctt

SEQ ID NO: 867058 - DNA, 15 bp, Homo sapiens
cttgactatggcttc

SEQ ID NO: 867059 - DNA, 15 bp, Homo sapiens
ttgactatggcttcc

SEQ ID NO: 867060 - DNA, 15 bp, Homo sapiens
tgactatggcttcct

SEQ ID NO: 867061 - DNA, 15 bp, Homo sapiens
gactatggcttcctc

SEQ ID NO: 867062 - DNA, 15 bp, Homo sapiens
actatggcttcctct

SEQ ID NO: 867063 - DNA, 15 bp, Homo sapiens
ctatggcttcctctg

SEQ ID NO: 867064 - DNA, 15 bp, Homo sapiens
tatggcttcctctgg

SEQ ID NO: 867065 - DNA, 15 bp, Homo sapiens
atggcttcctctggt

SEQ ID NO: 867066 - DNA, 15 bp, Homo sapiens
tggcttcctctggta

SEQ ID NO: 867067 - DNA, 15 bp, Homo sapiens
ggcttcctctggtaa

SEQ ID NO: 867068 - DNA, 15 bp, Homo sapiens
gcttcctctggtaaa

SEQ ID NO: 867069 - DNA, 15 bp, Homo sapiens
cttcctctggtaaat

SEQ ID NO: 867070 - DNA, 15 bp, Homo sapiens
ttcctctggtaaata

SEQ ID NO: 867071 - DNA, 15 bp, Homo sapiens
tcctctggtaaatag

SEQ ID NO: 867072 - DNA, 15 bp, Homo sapiens
cctctggtaaatagc

SEQ ID NO: 867073 - DNA, 15 bp, Homo sapiens
ctctggtaaatagca

SEQ ID NO: 867074 - DNA, 15 bp, Homo sapiens
tctggtaaatagcaa

SEQ ID NO: 867075 - DNA, 15 bp, Homo sapiens
ctggtaaatagcaag

SEQ ID NO: 867076 - DNA, 15 bp, Homo sapiens
tggtaaatagcaagt

SEQ ID NO: 867077 - DNA, 15 bp, Homo sapiens
ggtaaatagcaagtg

SEQ ID NO: 867078 - DNA, 15 bp, Homo sapiens
gtaaatagcaagtga

SEQ ID NO: 867079 - DNA, 15 bp, Homo sapiens
taaatagcaagtgaa

SEQ ID NO: 867080 - DNA, 15 bp, Homo sapiens
aaatagcaagtgaag

SEQ ID NO: 867081 - DNA, 15 bp, Homo sapiens
aatagcaagtgaagt

SEQ ID NO: 867082 - DNA, 15 bp, Homo sapiens
atagcaagtgaagtc

SEQ ID NO: 867083 - DNA, 15 bp, Homo sapiens
tagcaagtgaagtca

SEQ ID NO: 867084 - DNA, 15 bp, Homo sapiens
agcaagtgaagtcaa

SEQ ID NO: 867085 - DNA, 15 bp, Homo sapiens
gcaagtgaagtcaaa

SEQ ID NO: 867086 - DNA, 15 bp, Homo sapiens
caagtgaagtcaaat

SEQ ID NO: 867087 - DNA, 15 bp, Homo sapiens
aagtgaagtcaaatt

SEQ ID NO: 867088 - DNA, 15 bp, Homo sapiens
agtgaagtcaaattt

SEQ ID NO: 867089 - DNA, 15 bp, Homo sapiens
gtgaagtcaaatttc

SEQ ID NO: 867090 - DNA, 15 bp, Homo sapiens
tgaagtcaaatttca

SEQ ID NO: 867091 - DNA, 15 bp, Homo sapiens
gaagtcaaatttcaa

SEQ ID NO: 867092 - DNA, 15 bp, Homo sapiens
aagtcaaatttcaac

SEQ ID NO: 867093 - DNA, 15 bp, Homo sapiens
agtcaaatttcaaca

SEQ ID NO: 867094 - DNA, 15 bp, Homo sapiens
gtcaaatttcaacag

SEQ ID NO: 867095 - DNA, 15 bp, Homo sapiens
tcaaatttcaacagc

SEQ ID NO: 867096 - DNA, 15 bp, Homo sapiens
caaatttcaacagcg

SEQ ID NO: 867097 - DNA, 15 bp, Homo sapiens
aaatttcaacagcgt

SEQ ID NO: 867098 - DNA, 15 bp, Homo sapiens
aatttcaacagcgtt

SEQ ID NO: 867099 - DNA, 15 bp, Homo sapiens
atttcaacagcgttc

SEQ ID NO: 867100 - DNA, 15 bp, Homo sapiens
tttcaacagcgttct

SEQ ID NO: 867101 - DNA, 15 bp, Homo sapiens
ttcaacagcgttctg

SEQ ID NO: 867102 - DNA, 15 bp, Homo sapiens
tcaacagcgttctgc

SEQ ID NO: 867103 - DNA, 15 bp, Homo sapiens
caacagcgttctgca

SEQ ID NO: 867104 - DNA, 15 bp, Homo sapiens
aacagcgttctgcag

SEQ ID NO: 867105 - DNA, 15 bp, Homo sapiens
acagcgttctgcagt

SEQ ID NO: 867106 - DNA, 15 bp, Homo sapiens
cagcgttctgcagtt

SEQ ID NO: 867107 - DNA, 15 bp, Homo sapiens
agcgttctgcagttt

SEQ ID NO: 867108 - DNA, 15 bp, Homo sapiens
gcgttctgcagtttc

SEQ ID NO: 867109 - DNA, 15 bp, Homo sapiens
cgttctgcagtttct

SEQ ID NO: 867110 - DNA, 15 bp, Homo sapiens
gttctgcagtttctt

SEQ ID NO: 867111 - DNA, 15 bp, Homo sapiens
ttctgcagtttcttc

SEQ ID NO: 867112 - DNA, 15 bp, Homo sapiens
tctgcagtttcttct

SEQ ID NO: 867113 - DNA, 15 bp, Homo sapiens
ctgcagtttcttctt

SEQ ID NO: 867114 - DNA, 15 bp, Homo sapiens
tgcagtttcttcttc

SEQ ID NO: 867115 - DNA, 15 bp, Homo sapiens
gcagtttcttcttct

SEQ ID NO: 867116 - DNA, 15 bp, Homo sapiens
cagtttcttcttctt

SEQ ID NO: 867117 - DNA, 15 bp, Homo sapiens
agtttcttcttcttg

SEQ ID NO: 867118 - DNA, 15 bp, Homo sapiens
gtttcttcttcttgg

SEQ ID NO: 867119 - DNA, 15 bp, Homo sapiens
tttcttcttcttggc

SEQ ID NO: 867120 - DNA, 15 bp, Homo sapiens
ttcttcttcttggcc

SEQ ID NO: 867121 - DNA, 15 bp, Homo sapiens
tcttcttcttggcct

SEQ ID NO: 867122 - DNA, 15 bp, Homo sapiens
cttcttcttggccta

SEQ ID NO: 867123 - DNA, 15 bp, Homo sapiens
ttcttcttggcctat

SEQ ID NO: 867124 - DNA, 15 bp, Homo sapiens
tcttcttggcctatc

SEQ ID NO: 867125 - DNA, 15 bp, Homo sapiens
cttcttggcctatct

SEQ ID NO: 867126 - DNA, 15 bp, Homo sapiens
ttcttggcctatctg

SEQ ID NO: 867127 - DNA, 15 bp, Homo sapiens
tcttggcctatctgt

SEQ ID NO: 867128 - DNA, 15 bp, Homo sapiens
cttggcctatctgtc

SEQ ID NO: 867129 - DNA, 15 bp, Homo sapiens
ttggcctatctgtct

SEQ ID NO: 867130 - DNA, 15 bp, Homo sapiens
tggcctatctgtctt

SEQ ID NO: 867131 - DNA, 15 bp, Homo sapiens
ggcctatctgtcttt

SEQ ID NO: 867132 - DNA, 15 bp, Homo sapiens
gcctatctgtctttt

SEQ ID NO: 867133 - DNA, 15 bp, Homo sapiens
cctatctgtctttta

SEQ ID NO: 867134 - DNA, 15 bp, Homo sapiens
ctatctgtcttttat

SEQ ID NO: 867135 - DNA, 15 bp, Homo sapiens
tatctgtcttttatc

SEQ ID NO: 867136 - DNA, 15 bp, Homo sapiens
atctgtcttttatct

SEQ ID NO: 867137 - DNA, 15 bp, Homo sapiens
tctgtcttttatctc

SEQ ID NO: 867138 - DNA, 15 bp, Homo sapiens
ctgtcttttatctcc

SEQ ID NO: 867139 - DNA, 15 bp, Homo sapiens
tgtcttttatctccc

SEQ ID NO: 867140 - DNA, 15 bp, Homo sapiens
gtcttttatctcccc

SEQ ID NO: 867141 - DNA, 15 bp, Homo sapiens
tcttttatctcccct

SEQ ID NO: 867142 - DNA, 15 bp, Homo sapiens
cttttatctcccctt

SEQ ID NO: 867143 - DNA, 15 bp, Homo sapiens
ttttatctccccttt

SEQ ID NO: 867144 - DNA, 15 bp, Homo sapiens
tttatctcccctttt

SEQ ID NO: 867145 - DNA, 15 bp, Homo sapiens
ttatctccccttttt

SEQ ID NO: 867146 - DNA, 15 bp, Homo sapiens
tatctcccctttttg

SEQ ID NO: 867147 - DNA, 15 bp, Homo sapiens
atctcccctttttgt

SEQ ID NO: 867148 - DNA, 15 bp, Homo sapiens
tctcccctttttgtc

SEQ ID NO: 867149 - DNA, 15 bp, Homo sapiens
ctcccctttttgtct

SEQ ID NO: 867150 - DNA, 15 bp, Homo sapiens
tcccctttttgtctt

SEQ ID NO: 867151 - DNA, 15 bp, Homo sapiens
cccctttttgtcttc

SEQ ID NO: 867152 - DNA, 15 bp, Homo sapiens
ccctttttgtcttca

SEQ ID NO: 867153 - DNA, 15 bp, Homo sapiens
cctttttgtcttcaa

SEQ ID NO: 867154 - DNA, 15 bp, Homo sapiens
ctttttgtcttcaat

SEQ ID NO: 867155 - DNA, 15 bp, Homo sapiens
tttttgtcttcaatt

SEQ ID NO: 867156 - DNA, 15 bp, Homo sapiens
ttttgtcttcaattc

SEQ ID NO: 867157 - DNA, 15 bp, Homo sapiens
tttgtcttcaattca

SEQ ID NO: 867158 - DNA, 15 bp, Homo sapiens
ttgtcttcaattcat

SEQ ID NO: 867159 - DNA, 15 bp, Homo sapiens
tgtcttcaattcatc

SEQ ID NO: 867160 - DNA, 15 bp, Homo sapiens
gtcttcaattcatct

SEQ ID NO: 867161 - DNA, 15 bp, Homo sapiens
tcttcaattcatctg

SEQ ID NO: 867162 - DNA, 15 bp, Homo sapiens
cttcaattcatctgc

SEQ ID NO: 867163 - DNA, 15 bp, Homo sapiens
ttcaattcatctgcc

SEQ ID NO: 867164 - DNA, 15 bp, Homo sapiens
tcaattcatctgcca

SEQ ID NO: 867165 - DNA, 15 bp, Homo sapiens
caattcatctgccaa

SEQ ID NO: 867166 - DNA, 15 bp, Homo sapiens
aattcatctgccaat

SEQ ID NO: 867167 - DNA, 15 bp, Homo sapiens
attcatctgccaatc

SEQ ID NO: 867168 - DNA, 15 bp, Homo sapiens
ttcatctgccaatcc

SEQ ID NO: 867169 - DNA, 15 bp, Homo sapiens
tcatctgccaatccc

SEQ ID NO: 867170 - DNA, 15 bp, Homo sapiens
catctgccaatccca

SEQ ID NO: 867171 - DNA, 15 bp, Homo sapiens
atctgccaatcccag

SEQ ID NO: 867172 - DNA, 15 bp, Homo sapiens
tctgccaatcccagc

SEQ ID NO: 867173 - DNA, 15 bp, Homo sapiens
ctgccaatcccagca

SEQ ID NO: 867174 - DNA, 15 bp, Homo sapiens
tgccaatcccagcat

SEQ ID NO: 867175 - DNA, 15 bp, Homo sapiens
gccaatcccagcatt

SEQ ID NO: 867176 - DNA, 15 bp, Homo sapiens
ccaatcccagcattt

SEQ ID NO: 867177 - DNA, 15 bp, Homo sapiens
caatcccagcatttt

SEQ ID NO: 867178 - DNA, 15 bp, Homo sapiens
aatcccagcattttt

SEQ ID NO: 867179 - DNA, 15 bp, Homo sapiens
atcccagcatttttt

SEQ ID NO: 867180 - DNA, 15 bp, Homo sapiens
tcccagcattttttt

SEQ ID NO: 867181 - DNA, 15 bp, Homo sapiens
cccagcatttttttc

SEQ ID NO: 867182 - DNA, 15 bp, Homo sapiens
ccagcatttttttcc

SEQ ID NO: 867183 - DNA, 15 bp, Homo sapiens
cagcatttttttcct

SEQ ID NO: 867184 - DNA, 15 bp, Homo sapiens
agcatttttttcctc

SEQ ID NO: 867185 - DNA, 15 bp, Homo sapiens
gcatttttttcctcc

SEQ ID NO: 867186 - DNA, 15 bp, Homo sapiens
catttttttcctccg

SEQ ID NO: 867187 - DNA, 15 bp, Homo sapiens
atttttttcctccga

SEQ ID NO: 867188 - DNA, 15 bp, Homo sapiens
tttttttcctccgac

SEQ ID NO: 867189 - DNA, 15 bp, Homo sapiens
ttttttcctccgaca

SEQ ID NO: 867190 - DNA, 15 bp, Homo sapiens
tttttcctccgacat

SEQ ID NO: 867191 - DNA, 15 bp, Homo sapiens
ttttcctccgacatc

SEQ ID NO: 867192 - DNA, 15 bp, Homo sapiens
tttcctccgacatcc

SEQ ID NO: 867193 - DNA, 15 bp, Homo sapiens
ttcctccgacatcct

SEQ ID NO: 867194 - DNA, 15 bp, Homo sapiens
tcctccgacatcctg

SEQ ID NO: 867195 - DNA, 15 bp, Homo sapiens
cctccgacatcctga

SEQ ID NO: 867196 - DNA, 15 bp, Homo sapiens
ctccgacatcctgac

SEQ ID NO: 867197 - DNA, 15 bp, Homo sapiens
tccgacatcctgact

SEQ ID NO: 867198 - DNA, 15 bp, Homo sapiens
ccgacatcctgactc

SEQ ID NO: 867199 - DNA, 15 bp, Homo sapiens
cgacatcctgactct

SEQ ID NO: 867200 - DNA, 15 bp, Homo sapiens
gacatcctgactctc

SEQ ID NO: 867201 - DNA, 15 bp, Homo sapiens
acatcctgactctct

SEQ ID NO: 867202 - DNA, 15 bp, Homo sapiens
catcctgactctcta

SEQ ID NO: 867203 - DNA, 15 bp, Homo sapiens
atcctgactctctac

SEQ ID NO: 867204 - DNA, 15 bp, Homo sapiens
tcctgactctctacc

SEQ ID NO: 867205 - DNA, 15 bp, Homo sapiens
cctgactctctacca

SEQ ID NO: 867206 - DNA, 15 bp, Homo sapiens
ctgactctctaccac

SEQ ID NO: 867207 - DNA, 15 bp, Homo sapiens
tgactctctaccacc

SEQ ID NO: 867208 - DNA, 15 bp, Homo sapiens
gactctctaccaccc

SEQ ID NO: 867209 - DNA, 15 bp, Homo sapiens
actctctaccaccca

SEQ ID NO: 867210 - DNA, 15 bp, Homo sapiens
ctctctaccacccaa

SEQ ID NO: 867211 - DNA, 15 bp, Homo sapiens
tctctaccacccaaa

SEQ ID NO: 867212 - DNA, 15 bp, Homo sapiens
ctctaccacccaaat

SEQ ID NO: 867213 - DNA, 15 bp, Homo sapiens
tctaccacccaaatg

SEQ ID NO: 867214 - DNA, 15 bp, Homo sapiens
ctaccacccaaatga

SEQ ID NO: 867215 - DNA, 15 bp, Homo sapiens
taccacccaaatgaa

SEQ ID NO: 867216 - DNA, 15 bp, Homo sapiens
accacccaaatgaaa

SEQ ID NO: 867217 - DNA, 15 bp, Homo sapiens
ccacccaaatgaaac

SEQ ID NO: 867218 - DNA, 15 bp, Homo sapiens
cacccaaatgaaaca

SEQ ID NO: 867219 - DNA, 15 bp, Homo sapiens
acccaaatgaaacag

SEQ ID NO: 867220 - DNA, 15 bp, Homo sapiens
cccaaatgaaacagg

SEQ ID NO: 867221 - DNA, 15 bp, Homo sapiens
ccaaatgaaacagga

SEQ ID NO: 867222 - DNA, 15 bp, Homo sapiens
caaatgaaacaggag

SEQ ID NO: 867223 - DNA, 15 bp, Homo sapiens
aaatgaaacaggagt

SEQ ID NO: 867224 - DNA, 15 bp, Homo sapiens
aatgaaacaggagtg

SEQ ID NO: 867225 - DNA, 15 bp, Homo sapiens
atgaaacaggagtga

SEQ ID NO: 867226 - DNA, 15 bp, Homo sapiens
tgaaacaggagtgat

SEQ ID NO: 867227 - DNA, 15 bp, Homo sapiens
gaaacaggagtgatt

SEQ ID NO: 867228 - DNA, 15 bp, Homo sapiens
aaacaggagtgattt

SEQ ID NO: 867229 - DNA, 15 bp, Homo sapiens
aacaggagtgatttc

SEQ ID NO: 867230 - DNA, 15 bp, Homo sapiens
acaggagtgatttca

SEQ ID NO: 867231 - DNA, 15 bp, Homo sapiens
caggagtgatttcag

SEQ ID NO: 867232 - DNA, 15 bp, Homo sapiens
aggagtgatttcaga

SEQ ID NO: 867233 - DNA, 15 bp, Homo sapiens
ggagtgatttcagat

SEQ ID NO: 867234 - DNA, 15 bp, Homo sapiens
gagtgatttcagatt

SEQ ID NO: 867235 - DNA, 15 bp, Homo sapiens
agtgatttcagattt

SEQ ID NO: 867236 - DNA, 15 bp, Homo sapiens
gtgatttcagatttg

SEQ ID NO: 867237 - DNA, 15 bp, Homo sapiens
tgatttcagatttgc

SEQ ID NO: 867238 - DNA, 15 bp, Homo sapiens
gatttcagatttgca

SEQ ID NO: 867239 - DNA, 15 bp, Homo sapiens
atttcagatttgcac

SEQ ID NO: 867240 - DNA, 15 bp, Homo sapiens
tttcagatttgcact

SEQ ID NO: 867241 - DNA, 15 bp, Homo sapiens
ttcagatttgcactg

SEQ ID NO: 867242 - DNA, 15 bp, Homo sapiens
tcagatttgcactgc

SEQ ID NO: 867243 - DNA, 15 bp, Homo sapiens
cagatttgcactgct

SEQ ID NO: 867244 - DNA, 15 bp, Homo sapiens
agatttgcactgctc

SEQ ID NO: 867245 - DNA, 15 bp, Homo sapiens
gatttgcactgctca

SEQ ID NO: 867246 - DNA, 15 bp, Homo sapiens
atttgcactgctcac

SEQ ID NO: 867247 - DNA, 15 bp, Homo sapiens
tttgcactgctcacc

SEQ ID NO: 867248 - DNA, 15 bp, Homo sapiens
ttgcactgctcaccc

SEQ ID NO: 867249 - DNA, 15 bp, Homo sapiens
tgcactgctcaccct

SEQ ID NO: 867250 - DNA, 15 bp, Homo sapiens
gcactgctcacccta

SEQ ID NO: 867251 - DNA, 15 bp, Homo sapiens
cactgctcaccctat

SEQ ID NO: 867252 - DNA, 15 bp, Homo sapiens
actgctcaccctatg

SEQ ID NO: 867253 - DNA, 15 bp, Homo sapiens
ctgctcaccctatgt

SEQ ID NO: 867254 - DNA, 15 bp, Homo sapiens
tgctcaccctatgtg

SEQ ID NO: 867255 - DNA, 15 bp, Homo sapiens
gctcaccctatgtgg

SEQ ID NO: 867256 - DNA, 15 bp, Homo sapiens
ctcaccctatgtggt

SEQ ID NO: 867257 - DNA, 15 bp, Homo sapiens
tcaccctatgtggtt

SEQ ID NO: 867258 - DNA, 15 bp, Homo sapiens
caccctatgtggttt

SEQ ID NO: 867259 - DNA, 15 bp, Homo sapiens
accctatgtggtttc

SEQ ID NO: 867260 - DNA, 15 bp, Homo sapiens
ccctatgtggtttct

SEQ ID NO: 867261 - DNA, 15 bp, Homo sapiens
cctatgtggtttctg

SEQ ID NO: 867262 - DNA, 15 bp, Homo sapiens
ctatgtggtttctgc

SEQ ID NO: 867263 - DNA, 15 bp, Homo sapiens
tatgtggtttctgct

SEQ ID NO: 867264 - DNA, 15 bp, Homo sapiens
atgtggtttctgctc

SEQ ID NO: 867265 - DNA, 15 bp, Homo sapiens
tgtggtttctgctct

SEQ ID NO: 867266 - DNA, 15 bp, Homo sapiens
gtggtttctgctctg

SEQ ID NO: 867267 - DNA, 15 bp, Homo sapiens
tggtttctgctctgg

SEQ ID NO: 867268 - DNA, 15 bp, Homo sapiens
ggtttctgctctgga

SEQ ID NO: 867269 - DNA, 15 bp, Homo sapiens
gtttctgctctggaa

SEQ ID NO: 867270 - DNA, 15 bp, Homo sapiens
tttctgctctggaaa

SEQ ID NO: 867271 - DNA, 15 bp, Homo sapiens
ttctgctctggaaat

SEQ ID NO: 867272 - DNA, 15 bp, Homo sapiens
tctgctctggaaatg

SEQ ID NO: 867273 - DNA, 15 bp, Homo sapiens
ctgctctggaaatgc

SEQ ID NO: 867274 - DNA, 15 bp, Homo sapiens
tgctctggaaatgcc

SEQ ID NO: 867275 - DNA, 15 bp, Homo sapiens
gctctggaaatgcct

SEQ ID NO: 867276 - DNA, 15 bp, Homo sapiens
ctctggaaatgcctg

SEQ ID NO: 867277 - DNA, 15 bp, Homo sapiens
tctggaaatgcctgc

SEQ ID NO: 867278 - DNA, 15 bp, Homo sapiens
ctggaaatgcctgcc

SEQ ID NO: 867279 - DNA, 15 bp, Homo sapiens
tggaaatgcctgcca

SEQ ID NO: 867280 - DNA, 15 bp, Homo sapiens
ggaaatgcctgccat

SEQ ID NO: 867281 - DNA, 15 bp, Homo sapiens
gaaatgcctgccatc

SEQ ID NO: 867282 - DNA, 15 bp, Homo sapiens
aaatgcctgccatct

SEQ ID NO: 867283 - DNA, 15 bp, Homo sapiens
aatgcctgccatctt

SEQ ID NO: 867284 - DNA, 15 bp, Homo sapiens
atgcctgccatcttg

SEQ ID NO: 867285 - DNA, 15 bp, Homo sapiens
tgcctgccatcttga

SEQ ID NO: 867286 - DNA, 15 bp, Homo sapiens
gcctgccatcttgac

SEQ ID NO: 867287 - DNA, 15 bp, Homo sapiens
cctgccatcttgaca

SEQ ID NO: 867288 - DNA, 15 bp, Homo sapiens
ctgccatcttgacat

SEQ ID NO: 867289 - DNA, 15 bp, Homo sapiens
tgccatcttgacatt

SEQ ID NO: 867290 - DNA, 15 bp, Homo sapiens
gccatcttgacatta

SEQ ID NO: 867291 - DNA, 15 bp, Homo sapiens
ccatcttgacattag

SEQ ID NO: 867292 - DNA, 15 bp, Homo sapiens
catcttgacattagt

SEQ ID NO: 867293 - DNA, 15 bp, Homo sapiens
atcttgacattagtt

SEQ ID NO: 867294 - DNA, 15 bp, Homo sapiens
tcttgacattagttt

SEQ ID NO: 867295 - DNA, 15 bp, Homo sapiens
cttgacattagtttt

SEQ ID NO: 867296 - DNA, 15 bp, Homo sapiens
ttgacattagttttg

SEQ ID NO: 867297 - DNA, 15 bp, Homo sapiens
tgacattagttttgt

SEQ ID NO: 867298 - DNA, 15 bp, Homo sapiens
gacattagttttgtc

SEQ ID NO: 867299 - DNA, 15 bp, Homo sapiens
acattagttttgtct

SEQ ID NO: 867300 - DNA, 15 bp, Homo sapiens
cattagttttgtctt

SEQ ID NO: 867301 - DNA, 15 bp, Homo sapiens
attagttttgtcttt

SEQ ID NO: 867302 - DNA, 15 bp, Homo sapiens
ttagttttgtctttt

SEQ ID NO: 867303 - DNA, 15 bp, Homo sapiens
tagttttgtcttttc

SEQ ID NO: 867304 - DNA, 15 bp, Homo sapiens
gttttgtcttttcat

SEQ ID NO: 867305 - DNA, 15 bp, Homo sapiens
ttttgtcttttcatg

SEQ ID NO: 867306 - DNA, 15 bp, Homo sapiens
tttgtcttttcatgg

SEQ ID NO: 867307 - DNA, 15 bp, Homo sapiens
ttgtcttttcatggc

SEQ ID NO: 867308 - DNA, 15 bp, Homo sapiens
tgtcttttcatggcc

SEQ ID NO: 867309 - DNA, 15 bp, Homo sapiens
gtcttttcatggcca

SEQ ID NO: 867310 - DNA, 15 bp, Homo sapiens
tcttttcatggccac

SEQ ID NO: 867311 - DNA, 15 bp, Homo sapiens
cttttcatggccacc

SEQ ID NO: 867312 - DNA, 15 bp, Homo sapiens
ttttcatggccaccg

SEQ ID NO: 867313 - DNA, 15 bp, Homo sapiens
tttcatggccaccgg

SEQ ID NO: 867314 - DNA, 15 bp, Homo sapiens
ttcatggccaccggc

SEQ ID NO: 867315 - DNA, 15 bp, Homo sapiens
tcatggccaccggct

SEQ ID NO: 867316 - DNA, 15 bp, Homo sapiens
catggccaccggctt

SEQ ID NO: 867317 - DNA, 15 bp, Homo sapiens
atggccaccggcttt

SEQ ID NO: 867318 - DNA, 15 bp, Homo sapiens
tggccaccggctttg

SEQ ID NO: 867319 - DNA, 15 bp, Homo sapiens
ggccaccggctttga

SEQ ID NO: 867320 - DNA, 15 bp, Homo sapiens
gccaccggctttgat

SEQ ID NO: 867321 - DNA, 15 bp, Homo sapiens
ccaccggctttgatt

SEQ ID NO: 867322 - DNA, 15 bp, Homo sapiens
caccggctttgattt

SEQ ID NO: 867323 - DNA, 15 bp, Homo sapiens
accggctttgatttt

SEQ ID NO: 867324 - DNA, 15 bp, Homo sapiens
ccggctttgattttt

SEQ ID NO: 867325 - DNA, 15 bp, Homo sapiens
cggctttgatttttg

SEQ ID NO: 867326 - DNA, 15 bp, Homo sapiens
ggctttgatttttga

SEQ ID NO: 867327 - DNA, 15 bp, Homo sapiens
gctttgatttttgaa

SEQ ID NO: 867328 - DNA, 15 bp, Homo sapiens
ctttgatttttgaaa

SEQ ID NO: 867329 - DNA, 15 bp, Homo sapiens
tttgatttttgaaat

SEQ ID NO: 867330 - DNA, 15 bp, Homo sapiens
ttgatttttgaaata

SEQ ID NO: 867331 - DNA, 15 bp, Homo sapiens
tgatttttgaaatag

SEQ ID NO: 867332 - DNA, 15 bp, Homo sapiens
gatttttgaaataga

SEQ ID NO: 867333 - DNA, 15 bp, Homo sapiens
atttttgaaatagaa

SEQ ID NO: 867334 - DNA, 15 bp, Homo sapiens
tttttgaaatagaat

SEQ ID NO: 867335 - DNA, 15 bp, Homo sapiens
ttttgaaatagaata

SEQ ID NO: 867336 - DNA, 15 bp, Homo sapiens
tttgaaatagaatag

SEQ ID NO: 867337 - DNA, 15 bp, Homo sapiens
ttgaaatagaatagt

SEQ ID NO: 867338 - DNA, 15 bp, Homo sapiens
tgaaatagaatagtg

SEQ ID NO: 867339 - DNA, 15 bp, Homo sapiens
gaaatagaatagtgg

SEQ ID NO: 867340 - DNA, 15 bp, Homo sapiens
aaatagaatagtggt

SEQ ID NO: 867341 - DNA, 15 bp, Homo sapiens
aatagaatagtggtg

SEQ ID NO: 867342 - DNA, 15 bp, Homo sapiens
atagaatagtggtga

SEQ ID NO: 867343 - DNA, 15 bp, Homo sapiens
tagaatagtggtgat

SEQ ID NO: 867344 - DNA, 15 bp, Homo sapiens
agaatagtggtgatt

SEQ ID NO: 867345 - DNA, 15 bp, Homo sapiens
gaatagtggtgattt

SEQ ID NO: 867346 - DNA, 15 bp, Homo sapiens
aatagtggtgatttc

SEQ ID NO: 867347 - DNA, 15 bp, Homo sapiens
atagtggtgatttcc

SEQ ID NO: 867348 - DNA, 15 bp, Homo sapiens
tagtggtgatttcca

SEQ ID NO: 867349 - DNA, 15 bp, Homo sapiens
agtggtgatttccac

SEQ ID NO: 867350 - DNA, 15 bp, Homo sapiens
gtggtgatttccact

SEQ ID NO: 867351 - DNA, 15 bp, Homo sapiens
tggtgatttccactc

SEQ ID NO: 867352 - DNA, 15 bp, Homo sapiens
ggtgatttccactcc

SEQ ID NO: 867353 - DNA, 15 bp, Homo sapiens
gtgatttccactccc

SEQ ID NO: 867354 - DNA, 15 bp, Homo sapiens
tgatttccactcccc

SEQ ID NO: 867355 - DNA, 15 bp, Homo sapiens
gatttccactcccca

SEQ ID NO: 867356 - DNA, 15 bp, Homo sapiens
atttccactccccat

SEQ ID NO: 867357 - DNA, 15 bp, Homo sapiens
tttccactccccata

SEQ ID NO: 867358 - DNA, 15 bp, Homo sapiens
ttccactccccatat

SEQ ID NO: 867359 - DNA, 15 bp, Homo sapiens
tccactccccatatt

SEQ ID NO: 867360 - DNA, 15 bp, Homo sapiens
ccactccccatattc

SEQ ID NO: 867361 - DNA, 15 bp, Homo sapiens
cactccccatattca

SEQ ID NO: 867362 - DNA, 15 bp, Homo sapiens
actccccatattcaa

SEQ ID NO: 867363 - DNA, 15 bp, Homo sapiens
ctccccatattcaat

SEQ ID NO: 867364 - DNA, 15 bp, Homo sapiens
tccccatattcaata

SEQ ID NO: 867365 - DNA, 15 bp, Homo sapiens
ccccatattcaataa

SEQ ID NO: 867366 - DNA, 15 bp, Homo sapiens
cccatattcaataac

SEQ ID NO: 867367 - DNA, 15 bp, Homo sapiens
ccatattcaataaca

SEQ ID NO: 867368 - DNA, 15 bp, Homo sapiens
catattcaataacat

SEQ ID NO: 867369 - DNA, 15 bp, Homo sapiens
atattcaataacatt

SEQ ID NO: 867370 - DNA, 15 bp, Homo sapiens
tattcaataacattt

SEQ ID NO: 867371 - DNA, 15 bp, Homo sapiens
attcaataacatttg

SEQ ID NO: 867372 - DNA, 15 bp, Homo sapiens
ttcaataacatttgc

SEQ ID NO: 867373 - DNA, 15 bp, Homo sapiens
tcaataacatttgca

SEQ ID NO: 867374 - DNA, 15 bp, Homo sapiens
caataacatttgcat

SEQ ID NO: 867375 - DNA, 15 bp, Homo sapiens
aataacatttgcatg

SEQ ID NO: 867376 - DNA, 15 bp, Homo sapiens
ataacatttgcatgt

SEQ ID NO: 867377 - DNA, 15 bp, Homo sapiens
taacatttgcatgtt

SEQ ID NO: 867378 - DNA, 15 bp, Homo sapiens
aacatttgcatgttc

SEQ ID NO: 867379 - DNA, 15 bp, Homo sapiens
acatttgcatgttcc

SEQ ID NO: 867380 - DNA, 15 bp, Homo sapiens
catttgcatgttcct

SEQ ID NO: 867381 - DNA, 15 bp, Homo sapiens
atttgcatgttcctg

SEQ ID NO: 867382 - DNA, 15 bp, Homo sapiens
tttgcatgttcctgg

SEQ ID NO: 867383 - DNA, 15 bp, Homo sapiens
ttgcatgttcctggc

SEQ ID NO: 867384 - DNA, 15 bp, Homo sapiens
tgcatgttcctggcc

SEQ ID NO: 867385 - DNA, 15 bp, Homo sapiens
gcatgttcctggccc

SEQ ID NO: 867386 - DNA, 15 bp, Homo sapiens
catgttcctggccct

SEQ ID NO: 867387 - DNA, 15 bp, Homo sapiens
atgttcctggccctc

SEQ ID NO: 867388 - DNA, 15 bp, Homo sapiens
tgttcctggccctcc

SEQ ID NO: 867389 - DNA, 15 bp, Homo sapiens
gttcctggccctcca

SEQ ID NO: 867390 - DNA, 15 bp, Homo sapiens
ttcctggccctccac

SEQ ID NO: 867391 - DNA, 15 bp, Homo sapiens
tcctggccctccaca

SEQ ID NO: 867392 - DNA, 15 bp, Homo sapiens
cctggccctccacat

SEQ ID NO: 867393 - DNA, 15 bp, Homo sapiens
ctggccctccacatc

SEQ ID NO: 867394 - DNA, 15 bp, Homo sapiens
tggccctccacatcc

SEQ ID NO: 867395 - DNA, 15 bp, Homo sapiens
ggccctccacatcca

SEQ ID NO: 867396 - DNA, 15 bp, Homo sapiens
gccctccacatccac

SEQ ID NO: 867397 - DNA, 15 bp, Homo sapiens
ccctccacatccacc

SEQ ID NO: 867398 - DNA, 15 bp, Homo sapiens
cctccacatccacct

SEQ ID NO: 867399 - DNA, 15 bp, Homo sapiens
ctccacatccacctt

SEQ ID NO: 867400 - DNA, 15 bp, Homo sapiens
tccacatccaccttt

SEQ ID NO: 867401 - DNA, 15 bp, Homo sapiens
ccacatccacctttc

SEQ ID NO: 867402 - DNA, 15 bp, Homo sapiens
cacatccacctttct

SEQ ID NO: 867403 - DNA, 15 bp, Homo sapiens
acatccacctttctg

SEQ ID NO: 867404 - DNA, 15 bp, Homo sapiens
catccacctttctgg

SEQ ID NO: 867405 - DNA, 15 bp, Homo sapiens
atccacctttctgga

SEQ ID NO: 867406 - DNA, 15 bp, Homo sapiens
tccacctttctggaa

SEQ ID NO: 867407 - DNA, 15 bp, Homo sapiens
ccacctttctggaaa

SEQ ID NO: 867408 - DNA, 15 bp, Homo sapiens
cacctttctggaaaa

SEQ ID NO: 867409 - DNA, 15 bp, Homo sapiens
acctttctggaaaat

SEQ ID NO: 867410 - DNA, 15 bp, Homo sapiens
ctttctggaaaatag

SEQ ID NO: 867411 - DNA, 15 bp, Homo sapiens
tttctggaaaatagg

SEQ ID NO: 867412 - DNA, 15 bp, Homo sapiens
ttctggaaaataggc

SEQ ID NO: 867413 - DNA, 15 bp, Homo sapiens
tctggaaaataggca

SEQ ID NO: 867414 - DNA, 15 bp, Homo sapiens
ctggaaaataggcaa

SEQ ID NO: 867415 - DNA, 15 bp, Homo sapiens
tggaaaataggcaag

SEQ ID NO: 867416 - DNA, 15 bp, Homo sapiens
ggaaaataggcaagg

SEQ ID NO: 867417 - DNA, 15 bp, Homo sapiens
gaaaataggcaaggg

SEQ ID NO: 867418 - DNA, 15 bp, Homo sapiens
aaaataggcaagggc

SEQ ID NO: 867419 - DNA, 15 bp, Homo sapiens
aaataggcaagggca

SEQ ID NO: 867420 - DNA, 15 bp, Homo sapiens
aataggcaagggcag

SEQ ID NO: 867421 - DNA, 15 bp, Homo sapiens
ataggcaagggcagt

SEQ ID NO: 867422 - DNA, 15 bp, Homo sapiens
taggcaagggcagtc

SEQ ID NO: 867423 - DNA, 15 bp, Homo sapiens
aggcaagggcagtct

SEQ ID NO: 867424 - DNA, 15 bp, Homo sapiens
ggcaagggcagtctt

SEQ ID NO: 867425 - DNA, 15 bp, Homo sapiens
gcaagggcagtcttt

SEQ ID NO: 867426 - DNA, 15 bp, Homo sapiens
caagggcagtctttc

SEQ ID NO: 867427 - DNA, 15 bp, Homo sapiens
aagggcagtctttct

SEQ ID NO: 867428 - DNA, 15 bp, Homo sapiens
agggcagtctttctt

SEQ ID NO: 867429 - DNA, 15 bp, Homo sapiens
gggcagtctttcttc

SEQ ID NO: 867430 - DNA, 15 bp, Homo sapiens
ggcagtctttcttca

SEQ ID NO: 867431 - DNA, 15 bp, Homo sapiens
gcagtctttcttcat

SEQ ID NO: 867432 - DNA, 15 bp, Homo sapiens
cagtctttcttcatg

SEQ ID NO: 867433 - DNA, 15 bp, Homo sapiens
agtctttcttcatgt

SEQ ID NO: 867434 - DNA, 15 bp, Homo sapiens
gtctttcttcatgtg

SEQ ID NO: 867435 - DNA, 15 bp, Homo sapiens
tctttcttcatgtgg

SEQ ID NO: 867436 - DNA, 15 bp, Homo sapiens
ctttcttcatgtggt

SEQ ID NO: 867437 - DNA, 15 bp, Homo sapiens
tttcttcatgtggtt

SEQ ID NO: 867438 - DNA, 15 bp, Homo sapiens
ttcttcatgtggttg

SEQ ID NO: 867439 - DNA, 15 bp, Homo sapiens
tcttcatgtggttga

SEQ ID NO: 867440 - DNA, 15 bp, Homo sapiens
cttcatgtggttgag

SEQ ID NO: 867441 - DNA, 15 bp, Homo sapiens
ttcatgtggttgagg

SEQ ID NO: 867442 - DNA, 15 bp, Homo sapiens
tcatgtggttgagga

SEQ ID NO: 867443 - DNA, 15 bp, Homo sapiens
catgtggttgaggac

SEQ ID NO: 867444 - DNA, 15 bp, Homo sapiens
atgtggttgaggaca

SEQ ID NO: 867445 - DNA, 15 bp, Homo sapiens
tgtggttgaggacac

SEQ ID NO: 867446 - DNA, 15 bp, Homo sapiens
gtggttgaggacaca

SEQ ID NO: 867447 - DNA, 15 bp, Homo sapiens
tggttgaggacacag

SEQ ID NO: 867448 - DNA, 15 bp, Homo sapiens
ggttgaggacacagg

SEQ ID NO: 867449 - DNA, 15 bp, Homo sapiens
gttgaggacacaggt

SEQ ID NO: 867450 - DNA, 15 bp, Homo sapiens
ttgaggacacaggtt

SEQ ID NO: 867451 - DNA, 15 bp, Homo sapiens
tgaggacacaggttt

SEQ ID NO: 867452 - DNA, 15 bp, Homo sapiens
gaggacacaggtttt

SEQ ID NO: 867453 - DNA, 15 bp, Homo sapiens
aggacacaggttttc

SEQ ID NO: 867454 - DNA, 15 bp, Homo sapiens
ggacacaggttttcc

SEQ ID NO: 867455 - DNA, 15 bp, Homo sapiens
gacacaggttttccg

SEQ ID NO: 867456 - DNA, 15 bp, Homo sapiens
acacaggttttccgt

SEQ ID NO: 867457 - DNA, 15 bp, Homo sapiens
cacaggttttccgtg

SEQ ID NO: 867458 - DNA, 15 bp, Homo sapiens
acaggttttccgtgg

SEQ ID NO: 867459 - DNA, 15 bp, Homo sapiens
caggttttccgtgga

SEQ ID NO: 867460 - DNA, 15 bp, Homo sapiens
aggttttccgtggaa

SEQ ID NO: 867461 - DNA, 15 bp, Homo sapiens
ggttttccgtggaag

SEQ ID NO: 867462 - DNA, 15 bp, Homo sapiens
gttttccgtggaaga

SEQ ID NO: 867463 - DNA, 15 bp, Homo sapiens
ttttccgtggaagac

SEQ ID NO: 867464 - DNA, 15 bp, Homo sapiens
tttccgtggaagact

SEQ ID NO: 867465 - DNA, 15 bp, Homo sapiens
ttccgtggaagactc

SEQ ID NO: 867466 - DNA, 15 bp, Homo sapiens
tccgtggaagactca

SEQ ID NO: 867467 - DNA, 15 bp, Homo sapiens
ccgtggaagactcac

SEQ ID NO: 867468 - DNA, 15 bp, Homo sapiens
cgtggaagactcacc

SEQ ID NO: 867469 - DNA, 15 bp, Homo sapiens
gtggaagactcaccc

SEQ ID NO: 867470 - DNA, 15 bp, Homo sapiens
tggaagactcaccct

SEQ ID NO: 867471 - DNA, 15 bp, Homo sapiens
ggaagactcaccctg

SEQ ID NO: 867472 - DNA, 15 bp, Homo sapiens
gaagactcaccctgc

SEQ ID NO: 867473 - DNA, 15 bp, Homo sapiens
aagactcaccctgcc

SEQ ID NO: 867474 - DNA, 15 bp, Homo sapiens
agactcaccctgccc

SEQ ID NO: 867475 - DNA, 15 bp, Homo sapiens
gactcaccctgccca

SEQ ID NO: 867476 - DNA, 15 bp, Homo sapiens
ctcaccctgcccaac

SEQ ID NO: 867477 - DNA, 15 bp, Homo sapiens
tcaccctgcccaact

SEQ ID NO: 867478 - DNA, 15 bp, Homo sapiens
caccctgcccaactc

SEQ ID NO: 867479 - DNA, 15 bp, Homo sapiens
accctgcccaactcc

SEQ ID NO: 867480 - DNA, 15 bp, Homo sapiens
ccctgcccaactcct

SEQ ID NO: 867481 - DNA, 15 bp, Homo sapiens
cctgcccaactcctt

SEQ ID NO: 867482 - DNA, 15 bp, Homo sapiens
ctgcccaactccttt

SEQ ID NO: 867483 - DNA, 15 bp, Homo sapiens
tgcccaactcctttt

SEQ ID NO: 867484 - DNA, 15 bp, Homo sapiens
gcccaactccttttc

SEQ ID NO: 867485 - DNA, 15 bp, Homo sapiens
cccaactccttttcc

SEQ ID NO: 867486 - DNA, 15 bp, Homo sapiens
ccaactccttttcca

SEQ ID NO: 867487 - DNA, 15 bp, Homo sapiens
caactccttttccat

SEQ ID NO: 867488 - DNA, 15 bp, Homo sapiens
aactccttttccata

SEQ ID NO: 867489 - DNA, 15 bp, Homo sapiens
actccttttccatat

SEQ ID NO: 867490 - DNA, 15 bp, Homo sapiens
ctccttttccatatc

SEQ ID NO: 867491 - DNA, 15 bp, Homo sapiens
tccttttccatatca

SEQ ID NO: 867492 - DNA, 15 bp, Homo sapiens
ccttttccatatcac

SEQ ID NO: 867493 - DNA, 15 bp, Homo sapiens
cttttccatatcacc

SEQ ID NO: 867494 - DNA, 15 bp, Homo sapiens
ttttccatatcacca

SEQ ID NO: 867495 - DNA, 15 bp, Homo sapiens
tttccatatcaccat

SEQ ID NO: 867496 - DNA, 15 bp, Homo sapiens
ttccatatcaccatc

SEQ ID NO: 867497 - DNA, 15 bp, Homo sapiens
tccatatcaccatct

SEQ ID NO: 867498 - DNA, 15 bp, Homo sapiens
ccatatcaccatcta

SEQ ID NO: 867499 - DNA, 15 bp, Homo sapiens
catatcaccatctat

SEQ ID NO: 867500 - DNA, 15 bp, Homo sapiens
atatcaccatctatt

SEQ ID NO: 867501 - DNA, 15 bp, Homo sapiens
tatcaccatctattc

SEQ ID NO: 867502 - DNA, 15 bp, Homo sapiens
atcaccatctattcc

SEQ ID NO: 867503 - DNA, 15 bp, Homo sapiens
tcaccatctattcct

SEQ ID NO: 867504 - DNA, 15 bp, Homo sapiens
caccatctattcctg

SEQ ID NO: 867505 - DNA, 15 bp, Homo sapiens
accatctattcctgt

SEQ ID NO: 867506 - DNA, 15 bp, Homo sapiens
ccatctattcctgtt

SEQ ID NO: 867507 - DNA, 15 bp, Homo sapiens
catctattcctgtta

SEQ ID NO: 867508 - DNA, 15 bp, Homo sapiens
atctattcctgttaa

SEQ ID NO: 867509 - DNA, 15 bp, Homo sapiens
tctattcctgttaaa

SEQ ID NO: 867510 - DNA, 15 bp, Homo sapiens
ctattcctgttaaat

SEQ ID NO: 867511 - DNA, 15 bp, Homo sapiens
tattcctgttaaatg

SEQ ID NO: 867512 - DNA, 15 bp, Homo sapiens
attcctgttaaatgt

SEQ ID NO: 867513 - DNA, 15 bp, Homo sapiens
ttcctgttaaatgtt

SEQ ID NO: 867514 - DNA, 15 bp, Homo sapiens
tcctgttaaatgttt

SEQ ID NO: 867515 - DNA, 15 bp, Homo sapiens
cctgttaaatgtttc

SEQ ID NO: 867516 - DNA, 15 bp, Homo sapiens
ctgttaaatgtttcc

SEQ ID NO: 867517 - DNA, 15 bp, Homo sapiens
aaatgtttccttaaa

SEQ ID NO: 867518 - DNA, 15 bp, Homo sapiens
aatgtttccttaaaa

SEQ ID NO: 867519 - DNA, 15 bp, Homo sapiens
atgtttccttaaaag

SEQ ID NO: 867520 - DNA, 15 bp, Homo sapiens
tgtttccttaaaagt

SEQ ID NO: 867521 - DNA, 15 bp, Homo sapiens
gtttccttaaaagtt

SEQ ID NO: 867522 - DNA, 15 bp, Homo sapiens
tttccttaaaagttc

SEQ ID NO: 867523 - DNA, 15 bp, Homo sapiens
ttccttaaaagttct

SEQ ID NO: 867524 - DNA, 15 bp, Homo sapiens
tccttaaaagttctc

SEQ ID NO: 867525 - DNA, 15 bp, Homo sapiens
ccttaaaagttctct

SEQ ID NO: 867526 - DNA, 15 bp, Homo sapiens
cttaaaagttctctg

SEQ ID NO: 867527 - DNA, 15 bp, Homo sapiens
ttaaaagttctctgc

SEQ ID NO: 867528 - DNA, 15 bp, Homo sapiens
taaaagttctctgcc

SEQ ID NO: 867529 - DNA, 15 bp, Homo sapiens
aaaagttctctgcct

SEQ ID NO: 867530 - DNA, 15 bp, Homo sapiens
aaagttctctgcctt

SEQ ID NO: 867531 - DNA, 15 bp, Homo sapiens
aagttctctgccttc

SEQ ID NO: 867532 - DNA, 15 bp, Homo sapiens
agttctctgccttcc

SEQ ID NO: 867533 - DNA, 15 bp, Homo sapiens
gttctctgccttcca

SEQ ID NO: 867534 - DNA, 15 bp, Homo sapiens
ttctctgccttccac

SEQ ID NO: 867535 - DNA, 15 bp, Homo sapiens
tctctgccttccact

SEQ ID NO: 867536 - DNA, 15 bp, Homo sapiens
ctctgccttccactt

SEQ ID NO: 867537 - DNA, 15 bp, Homo sapiens
tctgccttccacttc

SEQ ID NO: 867538 - DNA, 15 bp, Homo sapiens
ctgccttccacttca

SEQ ID NO: 867539 - DNA, 15 bp, Homo sapiens
tgccttccacttcac

SEQ ID NO: 867540 - DNA, 15 bp, Homo sapiens
gccttccacttcacc

SEQ ID NO: 867541 - DNA, 15 bp, Homo sapiens
ccttccacttcaccc

SEQ ID NO: 867542 - DNA, 15 bp, Homo sapiens
cttccacttcaccca

SEQ ID NO: 867543 - DNA, 15 bp, Homo sapiens
ttccacttcacccag

SEQ ID NO: 867544 - DNA, 15 bp, Homo sapiens
tccacttcacccagc

SEQ ID NO: 867545 - DNA, 15 bp, Homo sapiens
ccacttcacccagcc

SEQ ID NO: 867546 - DNA, 15 bp, Homo sapiens
cacttcacccagcct

SEQ ID NO: 867547 - DNA, 15 bp, Homo sapiens
acttcacccagcctt

SEQ ID NO: 867548 - DNA, 15 bp, Homo sapiens
cttcacccagccttc

SEQ ID NO: 867549 - DNA, 15 bp, Homo sapiens
ttcacccagccttcc

SEQ ID NO: 867550 - DNA, 15 bp, Homo sapiens
tcacccagccttcct

SEQ ID NO: 867551 - DNA, 15 bp, Homo sapiens
cacccagccttcctt

SEQ ID NO: 867552 - DNA, 15 bp, Homo sapiens
acccagccttccttg

SEQ ID NO: 867553 - DNA, 15 bp, Homo sapiens
cccagccttccttgg

SEQ ID NO: 867554 - DNA, 15 bp, Homo sapiens
ccagccttccttggg

SEQ ID NO: 867555 - DNA, 15 bp, Homo sapiens
cagccttccttgggt

SEQ ID NO: 867556 - DNA, 15 bp, Homo sapiens
agccttccttgggtt

SEQ ID NO: 867557 - DNA, 15 bp, Homo sapiens
gccttccttgggttt

SEQ ID NO: 867558 - DNA, 15 bp, Homo sapiens
ccttccttgggtttg

SEQ ID NO: 867559 - DNA, 15 bp, Homo sapiens
cttccttgggtttgg

SEQ ID NO: 867560 - DNA, 15 bp, Homo sapiens
ttccttgggtttggc

SEQ ID NO: 867561 - DNA, 15 bp, Homo sapiens
tccttgggtttggct

SEQ ID NO: 867562 - DNA, 15 bp, Homo sapiens
ccttgggtttggctg

SEQ ID NO: 867563 - DNA, 15 bp, Homo sapiens
cttgggtttggctga

SEQ ID NO: 867564 - DNA, 15 bp, Homo sapiens
ttgggtttggctgat

SEQ ID NO: 867565 - DNA, 15 bp, Homo sapiens
tgggtttggctgatt

SEQ ID NO: 867566 - DNA, 15 bp, Homo sapiens
gggtttggctgattt

SEQ ID NO: 867567 - DNA, 15 bp, Homo sapiens
ggtttggctgatttg

SEQ ID NO: 867568 - DNA, 15 bp, Homo sapiens
gtttggctgatttgc

SEQ ID NO: 867569 - DNA, 15 bp, Homo sapiens
tttggctgatttgca

SEQ ID NO: 867570 - DNA, 15 bp, Homo sapiens
ttggctgatttgcat

SEQ ID NO: 867571 - DNA, 15 bp, Homo sapiens
tggctgatttgcatg

SEQ ID NO: 867572 - DNA, 15 bp, Homo sapiens
ggctgatttgcatgc

SEQ ID NO: 867573 - DNA, 15 bp, Homo sapiens
gctgatttgcatgct

SEQ ID NO: 867574 - DNA, 15 bp, Homo sapiens
ctgatttgcatgctt

SEQ ID NO: 867575 - DNA, 15 bp, Homo sapiens
tgatttgcatgcttg

SEQ ID NO: 867576 - DNA, 15 bp, Homo sapiens
gatttgcatgcttgt

SEQ ID NO: 867577 - DNA, 15 bp, Homo sapiens
atttgcatgcttgtt

SEQ ID NO: 867578 - DNA, 15 bp, Homo sapiens
tttgcatgcttgttt

SEQ ID NO: 867579 - DNA, 15 bp, Homo sapiens
ttgcatgcttgttta

SEQ ID NO: 867580 - DNA, 15 bp, Homo sapiens
tgcatgcttgtttac

SEQ ID NO: 867581 - DNA, 15 bp, Homo sapiens
gcatgcttgtttaca

SEQ ID NO: 867582 - DNA, 15 bp, Homo sapiens
catgcttgtttacag

SEQ ID NO: 867583 - DNA, 15 bp, Homo sapiens
atgcttgtttacagt

SEQ ID NO: 867584 - DNA, 15 bp, Homo sapiens
tgcttgtttacagtt

SEQ ID NO: 867585 - DNA, 15 bp, Homo sapiens
gcttgtttacagttt

SEQ ID NO: 867586 - DNA, 15 bp, Homo sapiens
cttgtttacagttta

SEQ ID NO: 867587 - DNA, 15 bp, Homo sapiens
ttgtttacagtttat

SEQ ID NO: 867588 - DNA, 15 bp, Homo sapiens
tgtttacagtttatg

SEQ ID NO: 867589 - DNA, 15 bp, Homo sapiens
gtttacagtttatga

SEQ ID NO: 867590 - DNA, 15 bp, Homo sapiens
tttacagtttatgag

SEQ ID NO: 867591 - DNA, 15 bp, Homo sapiens
ttacagtttatgagg

SEQ ID NO: 867592 - DNA, 15 bp, Homo sapiens
tacagtttatgagga

SEQ ID NO: 867593 - DNA, 15 bp, Homo sapiens
acagtttatgaggag

SEQ ID NO: 867594 - DNA, 15 bp, Homo sapiens
cagtttatgaggagg

SEQ ID NO: 867595 - DNA, 15 bp, Homo sapiens
agtttatgaggagga

SEQ ID NO: 867596 - DNA, 15 bp, Homo sapiens
gtttatgaggaggaa

SEQ ID NO: 867597 - DNA, 15 bp, Homo sapiens
tttatgaggaggaat

SEQ ID NO: 867598 - DNA, 15 bp, Homo sapiens
ttatgaggaggaata

SEQ ID NO: 867599 - DNA, 15 bp, Homo sapiens
tatgaggaggaataa

SEQ ID NO: 867600 - DNA, 15 bp, Homo sapiens
aggaggaataaaatg

SEQ ID NO: 867601 - DNA, 15 bp, Homo sapiens
ggaggaataaaatgt

SEQ ID NO: 867602 - DNA, 15 bp, Homo sapiens
gaggaataaaatgtg

SEQ ID NO: 867603 - DNA, 15 bp, Homo sapiens
aggaataaaatgtgc

SEQ ID NO: 867604 - DNA, 15 bp, Homo sapiens
ggaataaaatgtgcc

SEQ ID NO: 867605 - DNA, 15 bp, Homo sapiens
gaataaaatgtgcca

SEQ ID NO: 867606 - DNA, 15 bp, Homo sapiens
aataaaatgtgccaa

SEQ ID NO: 867607 - DNA, 15 bp, Homo sapiens
ataaaatgtgccaac

SEQ ID NO: 867608 - DNA, 15 bp, Homo sapiens
taaaatgtgccaact

SEQ ID NO: 867609 - DNA, 15 bp, Homo sapiens
aaaatgtgccaactg

SEQ ID NO: 867610 - DNA, 15 bp, Homo sapiens
aaatgtgccaactgc

SEQ ID NO: 867611 - DNA, 15 bp, Homo sapiens
aatgtgccaactgcc

SEQ ID NO: 867612 - DNA, 15 bp, Homo sapiens
atgtgccaactgcca

SEQ ID NO: 867613 - DNA, 15 bp, Homo sapiens
tgtgccaactgccaa

SEQ ID NO: 867614 - DNA, 15 bp, Homo sapiens
gtgccaactgccaag

SEQ ID NO: 867615 - DNA, 15 bp, Homo sapiens
tgccaactgccaagc

SEQ ID NO: 867616 - DNA, 15 bp, Homo sapiens
gccaactgccaagct

SEQ ID NO: 867617 - DNA, 15 bp, Homo sapiens
ccaactgccaagctt

SEQ ID NO: 867618 - DNA, 15 bp, Homo sapiens
caactgccaagcttt

SEQ ID NO: 867619 - DNA, 15 bp, Homo sapiens
aactgccaagctttt

SEQ ID NO: 867620 - DNA, 15 bp, Homo sapiens
actgccaagcttttc

SEQ ID NO: 867621 - DNA, 15 bp, Homo sapiens
ctgccaagcttttcg

SEQ ID NO: 867622 - DNA, 15 bp, Homo sapiens
tgccaagcttttcgt

SEQ ID NO: 867623 - DNA, 15 bp, Homo sapiens
gccaagcttttcgtt

SEQ ID NO: 867624 - DNA, 15 bp, Homo sapiens
ccaagcttttcgttt

SEQ ID NO: 867625 - DNA, 15 bp, Homo sapiens
caagcttttcgtttt

SEQ ID NO: 867626 - DNA, 15 bp, Homo sapiens
aagcttttcgttttt

SEQ ID NO: 867627 - DNA, 15 bp, Homo sapiens
agcttttcgttttta

SEQ ID NO: 867628 - DNA, 15 bp, Homo sapiens
gcttttcgtttttat

SEQ ID NO: 867629 - DNA, 15 bp, Homo sapiens
cttttcgtttttatg

SEQ ID NO: 867630 - DNA, 15 bp, Homo sapiens
ttttcgtttttatga

SEQ ID NO: 867631 - DNA, 15 bp, Homo sapiens
tttcgtttttatgat

SEQ ID NO: 867632 - DNA, 15 bp, Homo sapiens
ttcgtttttatgatg

SEQ ID NO: 867633 - DNA, 15 bp, Homo sapiens
tcgtttttatgatgc

SEQ ID NO: 867634 - DNA, 15 bp, Homo sapiens
cgtttttatgatgcc

SEQ ID NO: 867635 - DNA, 15 bp, Homo sapiens
gtttttatgatgcca

SEQ ID NO: 867636 - DNA, 15 bp, Homo sapiens
tttttatgatgccag

SEQ ID NO: 867637 - DNA, 15 bp, Homo sapiens
ttttatgatgccagt

SEQ ID NO: 867638 - DNA, 15 bp, Homo sapiens
tttatgatgccagtg

SEQ ID NO: 867639 - DNA, 15 bp, Homo sapiens
ttatgatgccagtgt

SEQ ID NO: 867640 - DNA, 15 bp, Homo sapiens
tatgatgccagtgtc

SEQ ID NO: 867641 - DNA, 15 bp, Homo sapiens
atgatgccagtgtca

SEQ ID NO: 867642 - DNA, 15 bp, Homo sapiens
tgatgccagtgtcat

SEQ ID NO: 867643 - DNA, 15 bp, Homo sapiens
gatgccagtgtcatg

SEQ ID NO: 867644 - DNA, 15 bp, Homo sapiens
atgccagtgtcatgc

SEQ ID NO: 867645 - DNA, 15 bp, Homo sapiens
tgccagtgtcatgct

SEQ ID NO: 867646 - DNA, 15 bp, Homo sapiens
gccagtgtcatgcta

SEQ ID NO: 867647 - DNA, 15 bp, Homo sapiens
ccagtgtcatgctag

SEQ ID NO: 867648 - DNA, 15 bp, Homo sapiens
cagtgtcatgctagc

SEQ ID NO: 867649 - DNA, 15 bp, Homo sapiens
agtgtcatgctagca

SEQ ID NO: 867650 - DNA, 15 bp, Homo sapiens
gtgtcatgctagcat

SEQ ID NO: 867651 - DNA, 15 bp, Homo sapiens
tgtcatgctagcatt

SEQ ID NO: 867652 - DNA, 15 bp, Homo sapiens
gtcatgctagcattc

SEQ ID NO: 867653 - DNA, 15 bp, Homo sapiens
tcatgctagcattca

SEQ ID NO: 867654 - DNA, 15 bp, Homo sapiens
catgctagcattcat

SEQ ID NO: 867655 - DNA, 15 bp, Homo sapiens
atgctagcattcatt

SEQ ID NO: 867656 - DNA, 15 bp, Homo sapiens
tgctagcattcattt

SEQ ID NO: 867657 - DNA, 15 bp, Homo sapiens
gctagcattcatttc

SEQ ID NO: 867658 - DNA, 15 bp, Homo sapiens
ctagcattcatttcc

SEQ ID NO: 867659 - DNA, 15 bp, Homo sapiens
tagcattcatttcct

SEQ ID NO: 867660 - DNA, 15 bp, Homo sapiens
agcattcatttccta

SEQ ID NO: 867661 - DNA, 15 bp, Homo sapiens
gcattcatttcctat

SEQ ID NO: 867662 - DNA, 15 bp, Homo sapiens
cattcatttcctatt

SEQ ID NO: 867663 - DNA, 15 bp, Homo sapiens
attcatttcctattt

SEQ ID NO: 867664 - DNA, 15 bp, Homo sapiens
ttcatttcctattta

SEQ ID NO: 867665 - DNA, 15 bp, Homo sapiens
tcatttcctatttac

SEQ ID NO: 867666 - DNA, 15 bp, Homo sapiens
catttcctatttact

SEQ ID NO: 867667 - DNA, 15 bp, Homo sapiens
atttcctatttactc

SEQ ID NO: 867668 - DNA, 15 bp, Homo sapiens
tttcctatttactca

SEQ ID NO: 867669 - DNA, 15 bp, Homo sapiens
ttcctatttactcac

SEQ ID NO: 867670 - DNA, 15 bp, Homo sapiens
tcctatttactcacc

SEQ ID NO: 867671 - DNA, 15 bp, Homo sapiens
cctatttactcacct

SEQ ID NO: 867672 - DNA, 15 bp, Homo sapiens
ctatttactcacctt

SEQ ID NO: 867673 - DNA, 15 bp, Homo sapiens
tatttactcaccttt

SEQ ID NO: 867674 - DNA, 15 bp, Homo sapiens
atttactcaccttta

SEQ ID NO: 867675 - DNA, 15 bp, Homo sapiens
tttactcacctttag

SEQ ID NO: 867676 - DNA, 15 bp, Homo sapiens
ttactcacctttagg

SEQ ID NO: 867677 - DNA, 15 bp, Homo sapiens
tactcacctttaggt

SEQ ID NO: 867678 - DNA, 15 bp, Homo sapiens
actcacctttaggta

SEQ ID NO: 867679 - DNA, 15 bp, Homo sapiens
ctcacctttaggtaa

SEQ ID NO: 867680 - DNA, 15 bp, Homo sapiens
tcacctttaggtaat

SEQ ID NO: 867681 - DNA, 15 bp, Homo sapiens
cacctttaggtaatc

SEQ ID NO: 867682 - DNA, 15 bp, Homo sapiens
acctttaggtaatca

SEQ ID NO: 867683 - DNA, 15 bp, Homo sapiens
cctttaggtaatcac

SEQ ID NO: 867684 - DNA, 15 bp, Homo sapiens
ctttaggtaatcacc

SEQ ID NO: 867685 - DNA, 15 bp, Homo sapiens
tttaggtaatcacct

SEQ ID NO: 867686 - DNA, 15 bp, Homo sapiens
ttaggtaatcacctt

SEQ ID NO: 867687 - DNA, 15 bp, Homo sapiens
taggtaatcacctta

SEQ ID NO: 867688 - DNA, 15 bp, Homo sapiens
aggtaatcaccttat

SEQ ID NO: 867689 - DNA, 15 bp, Homo sapiens
ggtaatcaccttatc

SEQ ID NO: 867690 - DNA, 15 bp, Homo sapiens
gtaatcaccttatct

SEQ ID NO: 867691 - DNA, 15 bp, Homo sapiens
taatcaccttatcta

SEQ ID NO: 867692 - DNA, 15 bp, Homo sapiens
aatcaccttatctaa

SEQ ID NO: 867693 - DNA, 15 bp, Homo sapiens
atcaccttatctaat

SEQ ID NO: 867694 - DNA, 15 bp, Homo sapiens
tcaccttatctaatt

SEQ ID NO: 867695 - DNA, 15 bp, Homo sapiens
caccttatctaattc

SEQ ID NO: 867696 - DNA, 15 bp, Homo sapiens
accttatctaattct

SEQ ID NO: 867697 - DNA, 15 bp, Homo sapiens
ccttatctaattcta

SEQ ID NO: 867698 - DNA, 15 bp, Homo sapiens
cttatctaattctaa

SEQ ID NO: 867699 - DNA, 15 bp, Homo sapiens
ttatctaattctaat

SEQ ID NO: 867700 - DNA, 15 bp, Homo sapiens
tatctaattctaata

SEQ ID NO: 867701 - DNA, 15 bp, Homo sapiens
atctaattctaatag

SEQ ID NO: 867702 - DNA, 15 bp, Homo sapiens
tctaattctaatagt

SEQ ID NO: 867703 - DNA, 15 bp, Homo sapiens
ctaattctaatagtt

SEQ ID NO: 867704 - DNA, 15 bp, Homo sapiens
taattctaatagtta

SEQ ID NO: 867705 - DNA, 15 bp, Homo sapiens
aattctaatagttat

SEQ ID NO: 867706 - DNA, 15 bp, Homo sapiens
attctaatagttatt

SEQ ID NO: 867707 - DNA, 15 bp, Homo sapiens
ttctaatagttattc

SEQ ID NO: 867708 - DNA, 15 bp, Homo sapiens
tctaatagttattcc

SEQ ID NO: 867709 - DNA, 15 bp, Homo sapiens
ctaatagttattccc

SEQ ID NO: 867710 - DNA, 15 bp, Homo sapiens
taatagttattccca

SEQ ID NO: 867711 - DNA, 15 bp, Homo sapiens
aatagttattcccat

SEQ ID NO: 867712 - DNA, 15 bp, Homo sapiens
atagttattcccatt

SEQ ID NO: 867713 - DNA, 15 bp, Homo sapiens
tagttattcccattt

SEQ ID NO: 867714 - DNA, 15 bp, Homo sapiens
agttattcccattta

SEQ ID NO: 867715 - DNA, 15 bp, Homo sapiens
gttattcccatttaa

SEQ ID NO: 867716 - DNA, 15 bp, Homo sapiens
ttattcccatttaaa

SEQ ID NO: 867717 - DNA, 15 bp, Homo sapiens
tattcccatttaaag

SEQ ID NO: 867718 - DNA, 15 bp, Homo sapiens
attcccatttaaagt

SEQ ID NO: 867719 - DNA, 15 bp, Homo sapiens
ttcccatttaaagta

SEQ ID NO: 867720 - DNA, 15 bp, Homo sapiens
tcccatttaaagtag

SEQ ID NO: 867721 - DNA, 15 bp, Homo sapiens
cccatttaaagtaga

SEQ ID NO: 867722 - DNA, 15 bp, Homo sapiens
ccatttaaagtagag

SEQ ID NO: 867723 - DNA, 15 bp, Homo sapiens
catttaaagtagaga

SEQ ID NO: 867724 - DNA, 15 bp, Homo sapiens
atttaaagtagagaa

SEQ ID NO: 867725 - DNA, 15 bp, Homo sapiens
tttaaagtagagaaa

SEQ ID NO: 867726 - DNA, 15 bp, Homo sapiens
ttaaagtagagaaaa

SEQ ID NO: 867727 - DNA, 15 bp, Homo sapiens
taaagtagagaaaag

SEQ ID NO: 867728 - DNA, 15 bp, Homo sapiens
aaagtagagaaaagc

SEQ ID NO: 867729 - DNA, 15 bp, Homo sapiens
aagtagagaaaagcc

SEQ ID NO: 867730 - DNA, 15 bp, Homo sapiens
agtagagaaaagccc

SEQ ID NO: 867731 - DNA, 15 bp, Homo sapiens
gtagagaaaagccca

SEQ ID NO: 867732 - DNA, 15 bp, Homo sapiens
tagagaaaagcccag

SEQ ID NO: 867733 - DNA, 15 bp, Homo sapiens
agagaaaagcccagc

SEQ ID NO: 867734 - DNA, 15 bp, Homo sapiens
gagaaaagcccagcc

SEQ ID NO: 867735 - DNA, 15 bp, Homo sapiens
agaaaagcccagcca

SEQ ID NO: 867736 - DNA, 15 bp, Homo sapiens
gaaaagcccagccac

SEQ ID NO: 867737 - DNA, 15 bp, Homo sapiens
aaaagcccagccact

SEQ ID NO: 867738 - DNA, 15 bp, Homo sapiens
aaagcccagccactt

SEQ ID NO: 867739 - DNA, 15 bp, Homo sapiens
aagcccagccacttt

SEQ ID NO: 867740 - DNA, 15 bp, Homo sapiens
agcccagccactttc

SEQ ID NO: 867741 - DNA, 15 bp, Homo sapiens
gcccagccactttcc

SEQ ID NO: 867742 - DNA, 15 bp, Homo sapiens
cccagccactttcct

SEQ ID NO: 867743 - DNA, 15 bp, Homo sapiens
ccagccactttcctt

SEQ ID NO: 867744 - DNA, 15 bp, Homo sapiens
cagccactttccttc

SEQ ID NO: 867745 - DNA, 15 bp, Homo sapiens
agccactttccttca

SEQ ID NO: 867746 - DNA, 15 bp, Homo sapiens
gccactttccttcac

SEQ ID NO: 867747 - DNA, 15 bp, Homo sapiens
ccactttccttcacc

SEQ ID NO: 867748 - DNA, 15 bp, Homo sapiens
cactttccttcacct

SEQ ID NO: 867749 - DNA, 15 bp, Homo sapiens
actttccttcaccta

SEQ ID NO: 867750 - DNA, 15 bp, Homo sapiens
ctttccttcacctaa

SEQ ID NO: 867751 - DNA, 15 bp, Homo sapiens
tttccttcacctaaa

SEQ ID NO: 867752 - DNA, 15 bp, Homo sapiens
ttccttcacctaaat

SEQ ID NO: 867753 - DNA, 15 bp, Homo sapiens
tccttcacctaaatt

SEQ ID NO: 867754 - DNA, 15 bp, Homo sapiens
ccttcacctaaattt

SEQ ID NO: 867755 - DNA, 15 bp, Homo sapiens
cttcacctaaattta

SEQ ID NO: 867756 - DNA, 15 bp, Homo sapiens
ttcacctaaatttag

SEQ ID NO: 867757 - DNA, 15 bp, Homo sapiens
tcacctaaatttaga

SEQ ID NO: 867758 - DNA, 15 bp, Homo sapiens
cacctaaatttagag

SEQ ID NO: 867759 - DNA, 15 bp, Homo sapiens
acctaaatttagaga

SEQ ID NO: 867760 - DNA, 15 bp, Homo sapiens
cctaaatttagagaa

SEQ ID NO: 867761 - DNA, 15 bp, Homo sapiens
ctaaatttagagaag

SEQ ID NO: 867762 - DNA, 15 bp, Homo sapiens
taaatttagagaagc

SEQ ID NO: 867763 - DNA, 15 bp, Homo sapiens
aaatttagagaagca

SEQ ID NO: 867764 - DNA, 15 bp, Homo sapiens
aatttagagaagcaa

SEQ ID NO: 867765 - DNA, 15 bp, Homo sapiens
atttagagaagcaaa

SEQ ID NO: 867766 - DNA, 15 bp, Homo sapiens
tttagagaagcaaat

SEQ ID NO: 867767 - DNA, 15 bp, Homo sapiens
ttagagaagcaaata

SEQ ID NO: 867768 - DNA, 15 bp, Homo sapiens
tagagaagcaaataa

SEQ ID NO: 867769 - DNA, 15 bp, Homo sapiens
agagaagcaaataaa

SEQ ID NO: 867770 - DNA, 15 bp, Homo sapiens
gagaagcaaataaat

SEQ ID NO: 867771 - DNA, 15 bp, Homo sapiens
agaagcaaataaata

SEQ ID NO: 867772 - DNA, 15 bp, Homo sapiens
gaagcaaataaataa

SEQ ID NO: 867773 - DNA, 15 bp, Homo sapiens
aagcaaataaataaa

SEQ ID NO: 867774 - DNA, 15 bp, Homo sapiens
agcaaataaataaat

SEQ ID NO: 867775 - DNA, 15 bp, Homo sapiens
gcaaataaataaata

SEQ ID NO: 867776 - DNA, 15 bp, Homo sapiens
aataaataaataaag

SEQ ID NO: 867777 - DNA, 15 bp, Homo sapiens
ataaataaataaaga

SEQ ID NO: 867778 - DNA, 15 bp, Homo sapiens
taaataaataaagag

SEQ ID NO: 867779 - DNA, 15 bp, Homo sapiens
aaataaataaagaga

SEQ ID NO: 867780 - DNA, 15 bp, Homo sapiens
aataaataaagagaa

SEQ ID NO: 867781 - DNA, 15 bp, Homo sapiens
ataaataaagagaag

SEQ ID NO: 867782 - DNA, 15 bp, Homo sapiens
taaataaagagaagt

SEQ ID NO: 867783 - DNA, 15 bp, Homo sapiens
aaataaagagaagtc

SEQ ID NO: 867784 - DNA, 15 bp, Homo sapiens
aataaagagaagtct

SEQ ID NO: 867785 - DNA, 15 bp, Homo sapiens
ataaagagaagtctg

SEQ ID NO: 867786 - DNA, 15 bp, Homo sapiens
taaagagaagtctga

SEQ ID NO: 867787 - DNA, 15 bp, Homo sapiens
aaagagaagtctgaa

SEQ ID NO: 867788 - DNA, 15 bp, Homo sapiens
aagagaagtctgaaa

SEQ ID NO: 867789 - DNA, 15 bp, Homo sapiens
agagaagtctgaaaa

SEQ ID NO: 867790 - DNA, 15 bp, Homo sapiens
gagaagtctgaaaaa

SEQ ID NO: 867791 - DNA, 15 bp, Homo sapiens
agaagtctgaaaaat

SEQ ID NO: 867792 - DNA, 15 bp, Homo sapiens
gaagtctgaaaaatc

SEQ ID NO: 867793 - DNA, 15 bp, Homo sapiens
aagtctgaaaaatct

SEQ ID NO: 867794 - DNA, 15 bp, Homo sapiens
agtctgaaaaatctg

SEQ ID NO: 867795 - DNA, 15 bp, Homo sapiens
gtctgaaaaatctga

SEQ ID NO: 867796 - DNA, 15 bp, Homo sapiens
tctgaaaaatctgaa

SEQ ID NO: 867797 - DNA, 15 bp, Homo sapiens
ctgaaaaatctgaaa

SEQ ID NO: 867798 - DNA, 15 bp, Homo sapiens
tgaaaaatctgaaac

SEQ ID NO: 867799 - DNA, 15 bp, Homo sapiens
gaaaaatctgaaacc

SEQ ID NO: 867800 - DNA, 15 bp, Homo sapiens
aaaaatctgaaacct

SEQ ID NO: 867801 - DNA, 15 bp, Homo sapiens
aaaatctgaaacctt

SEQ ID NO: 867802 - DNA, 15 bp, Homo sapiens
aaatctgaaaccttt

SEQ ID NO: 867803 - DNA, 15 bp, Homo sapiens
aatctgaaacctttg

SEQ ID NO: 867804 - DNA, 15 bp, Homo sapiens
atctgaaacctttgg

SEQ ID NO: 867805 - DNA, 15 bp, Homo sapiens
tctgaaacctttgga

SEQ ID NO: 867806 - DNA, 15 bp, Homo sapiens
ctgaaacctttggag

SEQ ID NO: 867807 - DNA, 15 bp, Homo sapiens
tgaaacctttggagc

SEQ ID NO: 867808 - DNA, 15 bp, Homo sapiens
gaaacctttggagcc

SEQ ID NO: 867809 - DNA, 15 bp, Homo sapiens
aaacctttggagcca

SEQ ID NO: 867810 - DNA, 15 bp, Homo sapiens
aacctttggagccaa

SEQ ID NO: 867811 - DNA, 15 bp, Homo sapiens
acctttggagccaaa

SEQ ID NO: 867812 - DNA, 15 bp, Homo sapiens
cctttggagccaaat

SEQ ID NO: 867813 - DNA, 15 bp, Homo sapiens
ctttggagccaaatt

SEQ ID NO: 867814 - DNA, 15 bp, Homo sapiens
tttggagccaaattc

SEQ ID NO: 867815 - DNA, 15 bp, Homo sapiens
ttggagccaaattcc

SEQ ID NO: 867816 - DNA, 15 bp, Homo sapiens
tggagccaaattccc

SEQ ID NO: 867817 - DNA, 15 bp, Homo sapiens
ggagccaaattccct

SEQ ID NO: 867818 - DNA, 15 bp, Homo sapiens
gagccaaattccctg

SEQ ID NO: 867819 - DNA, 15 bp, Homo sapiens
agccaaattccctgt

SEQ ID NO: 867820 - DNA, 15 bp, Homo sapiens
gccaaattccctgtc

SEQ ID NO: 867821 - DNA, 15 bp, Homo sapiens
ccaaattccctgtcc

SEQ ID NO: 867822 - DNA, 15 bp, Homo sapiens
caaattccctgtccc

SEQ ID NO: 867823 - DNA, 15 bp, Homo sapiens
aaattccctgtccct

SEQ ID NO: 867824 - DNA, 15 bp, Homo sapiens
aattccctgtccctg

SEQ ID NO: 867825 - DNA, 15 bp, Homo sapiens
attccctgtccctgt

SEQ ID NO: 867826 - DNA, 15 bp, Homo sapiens
ttccctgtccctgtt

SEQ ID NO: 867827 - DNA, 15 bp, Homo sapiens
tccctgtccctgttt

SEQ ID NO: 867828 - DNA, 15 bp, Homo sapiens
ccctgtccctgtttg

SEQ ID NO: 867829 - DNA, 15 bp, Homo sapiens
cctgtccctgtttgc

SEQ ID NO: 867830 - DNA, 15 bp, Homo sapiens
ctgtccctgtttgct

SEQ ID NO: 867831 - DNA, 15 bp, Homo sapiens
tgtccctgtttgcta

SEQ ID NO: 867832 - DNA, 15 bp, Homo sapiens
gtccctgtttgctat

SEQ ID NO: 867833 - DNA, 15 bp, Homo sapiens
tccctgtttgctatg

SEQ ID NO: 867834 - DNA, 15 bp, Homo sapiens
ccctgtttgctatgt

SEQ ID NO: 867835 - DNA, 15 bp, Homo sapiens
cctgtttgctatgta

SEQ ID NO: 867836 - DNA, 15 bp, Homo sapiens
ctgtttgctatgtaa

SEQ ID NO: 867837 - DNA, 15 bp, Homo sapiens
tgtttgctatgtaaa

SEQ ID NO: 867838 - DNA, 15 bp, Homo sapiens
gtttgctatgtaaag

SEQ ID NO: 867839 - DNA, 15 bp, Homo sapiens
tttgctatgtaaagt

SEQ ID NO: 867840 - DNA, 15 bp, Homo sapiens
ttgctatgtaaagta

SEQ ID NO: 867841 - DNA, 15 bp, Homo sapiens
tgctatgtaaagtat

SEQ ID NO: 867842 - DNA, 15 bp, Homo sapiens
gctatgtaaagtatg

SEQ ID NO: 867843 - DNA, 15 bp, Homo sapiens
ctatgtaaagtatgg

SEQ ID NO: 867844 - DNA, 15 bp, Homo sapiens
tatgtaaagtatggc

SEQ ID NO: 867845 - DNA, 15 bp, Homo sapiens
atgtaaagtatggct

SEQ ID NO: 867846 - DNA, 15 bp, Homo sapiens
tgtaaagtatggctc

SEQ ID NO: 867847 - DNA, 15 bp, Homo sapiens
gtaaagtatggctca

SEQ ID NO: 867848 - DNA, 15 bp, Homo sapiens
taaagtatggctcat

SEQ ID NO: 867849 - DNA, 15 bp, Homo sapiens
aaagtatggctcatt

SEQ ID NO: 867850 - DNA, 15 bp, Homo sapiens
aagtatggctcattt

SEQ ID NO: 867851 - DNA, 15 bp, Homo sapiens
agtatggctcatttc

SEQ ID NO: 867852 - DNA, 15 bp, Homo sapiens
gtatggctcatttct

SEQ ID NO: 867853 - DNA, 15 bp, Homo sapiens
tatggctcatttctt

SEQ ID NO: 867854 - DNA, 15 bp, Homo sapiens
atggctcatttcttt

SEQ ID NO: 867855 - DNA, 15 bp, Homo sapiens
tggctcatttctttg

SEQ ID NO: 867856 - DNA, 15 bp, Homo sapiens
ggctcatttctttga

SEQ ID NO: 867857 - DNA, 15 bp, Homo sapiens
gctcatttctttgat

SEQ ID NO: 867858 - DNA, 15 bp, Homo sapiens
ctcatttctttgatc

SEQ ID NO: 867859 - DNA, 15 bp, Homo sapiens
tcatttctttgatct

SEQ ID NO: 867860 - DNA, 15 bp, Homo sapiens
catttctttgatctt

SEQ ID NO: 867861 - DNA, 15 bp, Homo sapiens
atttctttgatcttg

SEQ ID NO: 867862 - DNA, 15 bp, Homo sapiens
tttctttgatcttga

SEQ ID NO: 867863 - DNA, 15 bp, Homo sapiens
ttctttgatcttgag

SEQ ID NO: 867864 - DNA, 15 bp, Homo sapiens
tctttgatcttgagt

SEQ ID NO: 867865 - DNA, 15 bp, Homo sapiens
ctttgatcttgagta

SEQ ID NO: 867866 - DNA, 15 bp, Homo sapiens
tttgatcttgagtaa

SEQ ID NO: 867867 - DNA, 15 bp, Homo sapiens
ttgatcttgagtaat

SEQ ID NO: 867868 - DNA, 15 bp, Homo sapiens
tgatcttgagtaata

SEQ ID NO: 867869 - DNA, 15 bp, Homo sapiens
gatcttgagtaataa

SEQ ID NO: 867870 - DNA, 15 bp, Homo sapiens
atcttgagtaataat

SEQ ID NO: 867871 - DNA, 15 bp, Homo sapiens
tcttgagtaataata

SEQ ID NO: 867872 - DNA, 15 bp, Homo sapiens
cttgagtaataataa

SEQ ID NO: 867873 - DNA, 15 bp, Homo sapiens
ttgagtaataataat

SEQ ID NO: 867874 - DNA, 15 bp, Homo sapiens
tgagtaataataatt

SEQ ID NO: 867875 - DNA, 15 bp, Homo sapiens
gagtaataataattc

SEQ ID NO: 867876 - DNA, 15 bp, Homo sapiens
agtaataataattct

SEQ ID NO: 867877 - DNA, 15 bp, Homo sapiens
gtaataataattctg

SEQ ID NO: 867878 - DNA, 15 bp, Homo sapiens
taataataattctga

SEQ ID NO: 867879 - DNA, 15 bp, Homo sapiens
aataataattctgag

SEQ ID NO: 867880 - DNA, 15 bp, Homo sapiens
ataataattctgagg

SEQ ID NO: 867881 - DNA, 15 bp, Homo sapiens
taataattctgagga

SEQ ID NO: 867882 - DNA, 15 bp, Homo sapiens
aataattctgaggag

SEQ ID NO: 867883 - DNA, 15 bp, Homo sapiens
ataattctgaggagt

SEQ ID NO: 867884 - DNA, 15 bp, Homo sapiens
taattctgaggagtt

SEQ ID NO: 867885 - DNA, 15 bp, Homo sapiens
aattctgaggagtta

SEQ ID NO: 867886 - DNA, 15 bp, Homo sapiens
attctgaggagttat

SEQ ID NO: 867887 - DNA, 15 bp, Homo sapiens
ttctgaggagttata

SEQ ID NO: 867888 - DNA, 15 bp, Homo sapiens
tctgaggagttatac

SEQ ID NO: 867889 - DNA, 15 bp, Homo sapiens
ctgaggagttatact

SEQ ID NO: 867890 - DNA, 15 bp, Homo sapiens
tgaggagttatactg

SEQ ID NO: 867891 - DNA, 15 bp, Homo sapiens
gaggagttatactgt

SEQ ID NO: 867892 - DNA, 15 bp, Homo sapiens
aggagttatactgtt

SEQ ID NO: 867893 - DNA, 15 bp, Homo sapiens
ggagttatactgttt

SEQ ID NO: 867894 - DNA, 15 bp, Homo sapiens
gagttatactgtttt

SEQ ID NO: 867895 - DNA, 15 bp, Homo sapiens
agttatactgttttc

SEQ ID NO: 867896 - DNA, 15 bp, Homo sapiens
gttatactgttttca

SEQ ID NO: 867897 - DNA, 15 bp, Homo sapiens
ttatactgttttcat

SEQ ID NO: 867898 - DNA, 15 bp, Homo sapiens
tatactgttttcata

SEQ ID NO: 867899 - DNA, 15 bp, Homo sapiens
atactgttttcatat

SEQ ID NO: 867900 - DNA, 15 bp, Homo sapiens
tactgttttcatatg

SEQ ID NO: 867901 - DNA, 15 bp, Homo sapiens
actgttttcatatgc

SEQ ID NO: 867902 - DNA, 15 bp, Homo sapiens
ctgttttcatatgct

SEQ ID NO: 867903 - DNA, 15 bp, Homo sapiens
tgttttcatatgctt

SEQ ID NO: 867904 - DNA, 15 bp, Homo sapiens
gttttcatatgcttc

SEQ ID NO: 867905 - DNA, 15 bp, Homo sapiens
ttttcatatgcttca

SEQ ID NO: 867906 - DNA, 15 bp, Homo sapiens
tttcatatgcttcaa

SEQ ID NO: 867907 - DNA, 15 bp, Homo sapiens
ttcatatgcttcaaa

SEQ ID NO: 867908 - DNA, 15 bp, Homo sapiens
tcatatgcttcaaag

SEQ ID NO: 867909 - DNA, 15 bp, Homo sapiens
catatgcttcaaagc

SEQ ID NO: 867910 - DNA, 15 bp, Homo sapiens
atatgcttcaaagct

SEQ ID NO: 867911 - DNA, 15 bp, Homo sapiens
tatgcttcaaagctg

SEQ ID NO: 867912 - DNA, 15 bp, Homo sapiens
atgcttcaaagctgt

SEQ ID NO: 867913 - DNA, 15 bp, Homo sapiens
tgcttcaaagctgtg

SEQ ID NO: 867914 - DNA, 15 bp, Homo sapiens
gcttcaaagctgtgt

SEQ ID NO: 867915 - DNA, 15 bp, Homo sapiens
cttcaaagctgtgtc

SEQ ID NO: 867916 - DNA, 15 bp, Homo sapiens
ttcaaagctgtgtca

SEQ ID NO: 867917 - DNA, 15 bp, Homo sapiens
tcaaagctgtgtcaa

SEQ ID NO: 867918 - DNA, 15 bp, Homo sapiens
caaagctgtgtcaaa

SEQ ID NO: 867919 - DNA, 15 bp, Homo sapiens
aaagctgtgtcaaag

SEQ ID NO: 867920 - DNA, 15 bp, Homo sapiens
aagctgtgtcaaagt

SEQ ID NO: 867921 - DNA, 15 bp, Homo sapiens
agctgtgtcaaagtt

SEQ ID NO: 867922 - DNA, 15 bp, Homo sapiens
gctgtgtcaaagttt

SEQ ID NO: 867923 - DNA, 15 bp, Homo sapiens
ctgtgtcaaagtttt

SEQ ID NO: 867924 - DNA, 15 bp, Homo sapiens
tgtgtcaaagttttg

SEQ ID NO: 867925 - DNA, 15 bp, Homo sapiens
gtgtcaaagttttgc

SEQ ID NO: 867926 - DNA, 15 bp, Homo sapiens
tgtcaaagttttgct

SEQ ID NO: 867927 - DNA, 15 bp, Homo sapiens
gtcaaagttttgctg

SEQ ID NO: 867928 - DNA, 15 bp, Homo sapiens
tcaaagttttgctgc

SEQ ID NO: 867929 - DNA, 15 bp, Homo sapiens
caaagttttgctgct

SEQ ID NO: 867930 - DNA, 15 bp, Homo sapiens
aaagttttgctgctt

SEQ ID NO: 867931 - DNA, 15 bp, Homo sapiens
aagttttgctgctta

SEQ ID NO: 867932 - DNA, 15 bp, Homo sapiens
agttttgctgcttaa

SEQ ID NO: 867933 - DNA, 15 bp, Homo sapiens
gttttgctgcttaag

SEQ ID NO: 867934 - DNA, 15 bp, Homo sapiens
ttttgctgcttaagg

SEQ ID NO: 867935 - DNA, 15 bp, Homo sapiens
tttgctgcttaaggg

SEQ ID NO: 867936 - DNA, 15 bp, Homo sapiens
ttgctgcttaagggt

SEQ ID NO: 867937 - DNA, 15 bp, Homo sapiens
tgctgcttaagggta

SEQ ID NO: 867938 - DNA, 15 bp, Homo sapiens
gctgcttaagggtac

SEQ ID NO: 867939 - DNA, 15 bp, Homo sapiens
ctgcttaagggtact

SEQ ID NO: 867940 - DNA, 15 bp, Homo sapiens
tgcttaagggtactt

SEQ ID NO: 867941 - DNA, 15 bp, Homo sapiens
gcttaagggtacttc

SEQ ID NO: 867942 - DNA, 15 bp, Homo sapiens
cttaagggtacttct

SEQ ID NO: 867943 - DNA, 15 bp, Homo sapiens
ttaagggtacttctt

SEQ ID NO: 867944 - DNA, 15 bp, Homo sapiens
taagggtacttcttt

SEQ ID NO: 867945 - DNA, 15 bp, Homo sapiens
aagggtacttcttta

SEQ ID NO: 867946 - DNA, 15 bp, Homo sapiens
agggtacttctttat

SEQ ID NO: 867947 - DNA, 15 bp, Homo sapiens
gggtacttctttatt

SEQ ID NO: 867948 - DNA, 15 bp, Homo sapiens
ggtacttctttattc

SEQ ID NO: 867949 - DNA, 15 bp, Homo sapiens
gtacttctttattct

SEQ ID NO: 867950 - DNA, 15 bp, Homo sapiens
tacttctttattctg

SEQ ID NO: 867951 - DNA, 15 bp, Homo sapiens
acttctttattctgt

SEQ ID NO: 867952 - DNA, 15 bp, Homo sapiens
cttctttattctgtt

SEQ ID NO: 867953 - DNA, 15 bp, Homo sapiens
ttctttattctgttg

SEQ ID NO: 867954 - DNA, 15 bp, Homo sapiens
tctttattctgttgg

SEQ ID NO: 867955 - DNA, 15 bp, Homo sapiens
ctttattctgttggc

SEQ ID NO: 867956 - DNA, 15 bp, Homo sapiens
tttattctgttggct

SEQ ID NO: 867957 - DNA, 15 bp, Homo sapiens
ttattctgttggctc

SEQ ID NO: 867958 - DNA, 15 bp, Homo sapiens
tattctgttggctct

SEQ ID NO: 867959 - DNA, 15 bp, Homo sapiens
attctgttggctctt

SEQ ID NO: 867960 - DNA, 15 bp, Homo sapiens
ttctgttggctcttg

SEQ ID NO: 867961 - DNA, 15 bp, Homo sapiens
tctgttggctcttgg

SEQ ID NO: 867962 - DNA, 15 bp, Homo sapiens
ctgttggctcttggg

SEQ ID NO: 867963 - DNA, 15 bp, Homo sapiens
tgttggctcttgggt

SEQ ID NO: 867964 - DNA, 15 bp, Homo sapiens
gttggctcttgggta

SEQ ID NO: 867965 - DNA, 15 bp, Homo sapiens
ttggctcttgggtac

SEQ ID NO: 867966 - DNA, 15 bp, Homo sapiens
tggctcttgggtacc

SEQ ID NO: 867967 - DNA, 15 bp, Homo sapiens
ggctcttgggtacca

SEQ ID NO: 867968 - DNA, 15 bp, Homo sapiens
gctcttgggtaccaa

SEQ ID NO: 867969 - DNA, 15 bp, Homo sapiens
ctcttgggtaccaag

SEQ ID NO: 867970 - DNA, 15 bp, Homo sapiens
tcttgggtaccaaga

SEQ ID NO: 867971 - DNA, 15 bp, Homo sapiens
cttgggtaccaagat

SEQ ID NO: 867972 - DNA, 15 bp, Homo sapiens
ttgggtaccaagatg

SEQ ID NO: 867973 - DNA, 15 bp, Homo sapiens
tgggtaccaagatga

SEQ ID NO: 867974 - DNA, 15 bp, Homo sapiens
gggtaccaagatgac

SEQ ID NO: 867975 - DNA, 15 bp, Homo sapiens
ggtaccaagatgaca

SEQ ID NO: 867976 - DNA, 15 bp, Homo sapiens
gtaccaagatgacag

SEQ ID NO: 867977 - DNA, 15 bp, Homo sapiens
taccaagatgacagg

SEQ ID NO: 867978 - DNA, 15 bp, Homo sapiens
accaagatgacaggt

SEQ ID NO: 867979 - DNA, 15 bp, Homo sapiens
ccaagatgacaggtc

SEQ ID NO: 867980 - DNA, 15 bp, Homo sapiens
caagatgacaggtct

SEQ ID NO: 867981 - DNA, 15 bp, Homo sapiens
aagatgacaggtctt

SEQ ID NO: 867982 - DNA, 15 bp, Homo sapiens
agatgacaggtcttc

SEQ ID NO: 867983 - DNA, 15 bp, Homo sapiens
gatgacaggtcttct

SEQ ID NO: 867984 - DNA, 15 bp, Homo sapiens
atgacaggtcttctg

SEQ ID NO: 867985 - DNA, 15 bp, Homo sapiens
tgacaggtcttctgt

SEQ ID NO: 867986 - DNA, 15 bp, Homo sapiens
gacaggtcttctgta

SEQ ID NO: 867987 - DNA, 15 bp, Homo sapiens
acaggtcttctgtat

SEQ ID NO: 867988 - DNA, 15 bp, Homo sapiens
caggtcttctgtatg

SEQ ID NO: 867989 - DNA, 15 bp, Homo sapiens
aggtcttctgtatga

SEQ ID NO: 867990 - DNA, 15 bp, Homo sapiens
ggtcttctgtatgag

SEQ ID NO: 867991 - DNA, 15 bp, Homo sapiens
gtcttctgtatgagg

SEQ ID NO: 867992 - DNA, 15 bp, Homo sapiens
tcttctgtatgaggt

SEQ ID NO: 867993 - DNA, 15 bp, Homo sapiens
cttctgtatgaggtg

SEQ ID NO: 867994 - DNA, 15 bp, Homo sapiens
ttctgtatgaggtgg

SEQ ID NO: 867995 - DNA, 15 bp, Homo sapiens
tctgtatgaggtgga

SEQ ID NO: 867996 - DNA, 15 bp, Homo sapiens
ctgtatgaggtggag

SEQ ID NO: 867997 - DNA, 15 bp, Homo sapiens
tgtatgaggtggagg

SEQ ID NO: 867998 - DNA, 15 bp, Homo sapiens
gtatgaggtggaggc

SEQ ID NO: 867999 - DNA, 15 bp, Homo sapiens
tatgaggtggaggct

SEQ ID NO: 868000 - DNA, 15 bp, Homo sapiens
atgaggtggaggctt

SEQ ID NO: 868001 - DNA, 15 bp, Homo sapiens
tgaggtggaggcttt

SEQ ID NO: 868002 - DNA, 15 bp, Homo sapiens
gaggtggaggctttt

SEQ ID NO: 868003 - DNA, 15 bp, Homo sapiens
aggtggaggcttttt

SEQ ID NO: 868004 - DNA, 15 bp, Homo sapiens
ggtggaggctttttt

SEQ ID NO: 868005 - DNA, 15 bp, Homo sapiens
gtggaggctttttta

SEQ ID NO: 868006 - DNA, 15 bp, Homo sapiens
tggaggcttttttaa

SEQ ID NO: 868007 - DNA, 15 bp, Homo sapiens
ggaggcttttttaag

SEQ ID NO: 868008 - DNA, 15 bp, Homo sapiens
gaggcttttttaagt

SEQ ID NO: 868009 - DNA, 15 bp, Homo sapiens
aggcttttttaagtc

SEQ ID NO: 868010 - DNA, 15 bp, Homo sapiens
ggcttttttaagtcg

SEQ ID NO: 868011 - DNA, 15 bp, Homo sapiens
gcttttttaagtcgt

SEQ ID NO: 868012 - DNA, 15 bp, Homo sapiens
cttttttaagtcgta

SEQ ID NO: 868013 - DNA, 15 bp, Homo sapiens
ttttttaagtcgtag

SEQ ID NO: 868014 - DNA, 15 bp, Homo sapiens
tttttaagtcgtagc

SEQ ID NO: 868015 - DNA, 15 bp, Homo sapiens
ttttaagtcgtagcc

SEQ ID NO: 868016 - DNA, 15 bp, Homo sapiens
tttaagtcgtagcct

SEQ ID NO: 868017 - DNA, 15 bp, Homo sapiens
ttaagtcgtagcctt

SEQ ID NO: 868018 - DNA, 15 bp, Homo sapiens
taagtcgtagccttc

SEQ ID NO: 868019 - DNA, 15 bp, Homo sapiens
aagtcgtagccttca

SEQ ID NO: 868020 - DNA, 15 bp, Homo sapiens
agtcgtagccttcag

SEQ ID NO: 868021 - DNA, 15 bp, Homo sapiens
gtcgtagccttcagc

SEQ ID NO: 868022 - DNA, 15 bp, Homo sapiens
tcgtagccttcagca

SEQ ID NO: 868023 - DNA, 15 bp, Homo sapiens
cgtagccttcagcaa

SEQ ID NO: 868024 - DNA, 15 bp, Homo sapiens
gtagccttcagcaaa

SEQ ID NO: 868025 - DNA, 15 bp, Homo sapiens
tagccttcagcaaaa

SEQ ID NO: 868026 - DNA, 15 bp, Homo sapiens
agccttcagcaaaac

SEQ ID NO: 868027 - DNA, 15 bp, Homo sapiens
gccttcagcaaaaca

SEQ ID NO: 868028 - DNA, 15 bp, Homo sapiens
ccttcagcaaaacat

SEQ ID NO: 868029 - DNA, 15 bp, Homo sapiens
cttcagcaaaacatc

SEQ ID NO: 868030 - DNA, 15 bp, Homo sapiens
ttcagcaaaacatca

SEQ ID NO: 868031 - DNA, 15 bp, Homo sapiens
tcagcaaaacatcaa

SEQ ID NO: 868032 - DNA, 15 bp, Homo sapiens
cagcaaaacatcaaa

SEQ ID NO: 868033 - DNA, 15 bp, Homo sapiens
agcaaaacatcaaat

SEQ ID NO: 868034 - DNA, 15 bp, Homo sapiens
gcaaaacatcaaatt

SEQ ID NO: 868035 - DNA, 15 bp, Homo sapiens
caaaacatcaaatta

SEQ ID NO: 868036 - DNA, 15 bp, Homo sapiens
aaaacatcaaattac

SEQ ID NO: 868037 - DNA, 15 bp, Homo sapiens
aaacatcaaattacc

SEQ ID NO: 868038 - DNA, 15 bp, Homo sapiens
aacatcaaattacca

SEQ ID NO: 868039 - DNA, 15 bp, Homo sapiens
acatcaaattaccaa

SEQ ID NO: 868040 - DNA, 15 bp, Homo sapiens
catcaaattaccaaa

SEQ ID NO: 868041 - DNA, 15 bp, Homo sapiens
atcaaattaccaaat

SEQ ID NO: 868042 - DNA, 15 bp, Homo sapiens
tcaaattaccaaatc

SEQ ID NO: 868043 - DNA, 15 bp, Homo sapiens
caaattaccaaatcc

SEQ ID NO: 868044 - DNA, 15 bp, Homo sapiens
aaattaccaaatcca

SEQ ID NO: 868045 - DNA, 15 bp, Homo sapiens
aattaccaaatccag

SEQ ID NO: 868046 - DNA, 15 bp, Homo sapiens
attaccaaatccagg

SEQ ID NO: 868047 - DNA, 15 bp, Homo sapiens
ttaccaaatccaggg

SEQ ID NO: 868048 - DNA, 15 bp, Homo sapiens
taccaaatccagggt

SEQ ID NO: 868049 - DNA, 15 bp, Homo sapiens
accaaatccagggta

SEQ ID NO: 868050 - DNA, 15 bp, Homo sapiens
ccaaatccagggtaa

SEQ ID NO: 868051 - DNA, 15 bp, Homo sapiens
caaatccagggtaac

SEQ ID NO: 868052 - DNA, 15 bp, Homo sapiens
aaatccagggtaaca

SEQ ID NO: 868053 - DNA, 15 bp, Homo sapiens
aatccagggtaacat

SEQ ID NO: 868054 - DNA, 15 bp, Homo sapiens
atccagggtaacata

SEQ ID NO: 868055 - DNA, 15 bp, Homo sapiens
tccagggtaacatac

SEQ ID NO: 868056 - DNA, 15 bp, Homo sapiens
ccagggtaacatact

SEQ ID NO: 868057 - DNA, 15 bp, Homo sapiens
cagggtaacatactt

SEQ ID NO: 868058 - DNA, 15 bp, Homo sapiens
agggtaacatacttc

SEQ ID NO: 868059 - DNA, 15 bp, Homo sapiens
gggtaacatacttct

SEQ ID NO: 868060 - DNA, 15 bp, Homo sapiens
ggtaacatacttcta

SEQ ID NO: 868061 - DNA, 15 bp, Homo sapiens
gtaacatacttctac

SEQ ID NO: 868062 - DNA, 15 bp, Homo sapiens
taacatacttctaca

SEQ ID NO: 868063 - DNA, 15 bp, Homo sapiens
aacatacttctacac

SEQ ID NO: 868064 - DNA, 15 bp, Homo sapiens
acatacttctacaca

SEQ ID NO: 868065 - DNA, 15 bp, Homo sapiens
catacttctacacaa

SEQ ID NO: 868066 - DNA, 15 bp, Homo sapiens
atacttctacacaaa

SEQ ID NO: 868067 - DNA, 15 bp, Homo sapiens
tacttctacacaaat

SEQ ID NO: 868068 - DNA, 15 bp, Homo sapiens
acttctacacaaatg

SEQ ID NO: 868069 - DNA, 15 bp, Homo sapiens
cttctacacaaatgc

SEQ ID NO: 868070 - DNA, 15 bp, Homo sapiens
ttctacacaaatgcc

SEQ ID NO: 868071 - DNA, 15 bp, Homo sapiens
tctacacaaatgcct

SEQ ID NO: 868072 - DNA, 15 bp, Homo sapiens
ctacacaaatgcctt

SEQ ID NO: 868073 - DNA, 15 bp, Homo sapiens
tacacaaatgccttt

SEQ ID NO: 868074 - DNA, 15 bp, Homo sapiens
acacaaatgcctttc

SEQ ID NO: 868075 - DNA, 15 bp, Homo sapiens
cacaaatgcctttcc

SEQ ID NO: 868076 - DNA, 15 bp, Homo sapiens
acaaatgcctttcct

SEQ ID NO: 868077 - DNA, 15 bp, Homo sapiens
caaatgcctttcctg

SEQ ID NO: 868078 - DNA, 15 bp, Homo sapiens
aaatgcctttcctgt

SEQ ID NO: 868079 - DNA, 15 bp, Homo sapiens
aatgcctttcctgta

SEQ ID NO: 868080 - DNA, 15 bp, Homo sapiens
atgcctttcctgtag

SEQ ID NO: 868081 - DNA, 15 bp, Homo sapiens
tgcctttcctgtaga

SEQ ID NO: 868082 - DNA, 15 bp, Homo sapiens
gcctttcctgtagat

SEQ ID NO: 868083 - DNA, 15 bp, Homo sapiens
cctttcctgtagata

SEQ ID NO: 868084 - DNA, 15 bp, Homo sapiens
ctttcctgtagatat

SEQ ID NO: 868085 - DNA, 15 bp, Homo sapiens
tttcctgtagatata

SEQ ID NO: 868086 - DNA, 15 bp, Homo sapiens
ttcctgtagatatat

SEQ ID NO: 868087 - DNA, 15 bp, Homo sapiens
tcctgtagatatatt

SEQ ID NO: 868088 - DNA, 15 bp, Homo sapiens
cctgtagatatatta

SEQ ID NO: 868089 - DNA, 15 bp, Homo sapiens
ctgtagatatattat

SEQ ID NO: 868090 - DNA, 15 bp, Homo sapiens
tgtagatatattata

SEQ ID NO: 868091 - DNA, 15 bp, Homo sapiens
gtagatatattatac

SEQ ID NO: 868092 - DNA, 15 bp, Homo sapiens
tagatatattatacc

SEQ ID NO: 868093 - DNA, 15 bp, Homo sapiens
agatatattatacca

SEQ ID NO: 868094 - DNA, 15 bp, Homo sapiens
gatatattataccat

SEQ ID NO: 868095 - DNA, 15 bp, Homo sapiens
atatattataccata

SEQ ID NO: 868096 - DNA, 15 bp, Homo sapiens
tatattataccatat

SEQ ID NO: 868097 - DNA, 15 bp, Homo sapiens
atattataccatata

SEQ ID NO: 868098 - DNA, 15 bp, Homo sapiens
tattataccatatat

SEQ ID NO: 868099 - DNA, 15 bp, Homo sapiens
attataccatatata

SEQ ID NO: 868100 - DNA, 15 bp, Homo sapiens
ttataccatatatat

SEQ ID NO: 868101 - DNA, 15 bp, Homo sapiens
tataccatatatatt

SEQ ID NO: 868102 - DNA, 15 bp, Homo sapiens
ataccatatatatta

SEQ ID NO: 868103 - DNA, 15 bp, Homo sapiens
taccatatatattaa

SEQ ID NO: 868104 - DNA, 15 bp, Homo sapiens
accatatatattaaa

SEQ ID NO: 868105 - DNA, 15 bp, Homo sapiens
ccatatatattaaat

SEQ ID NO: 868106 - DNA, 15 bp, Homo sapiens
catatatattaaata

SEQ ID NO: 868107 - DNA, 15 bp, Homo sapiens
atatatattaaatac

SEQ ID NO: 868108 - DNA, 15 bp, Homo sapiens
tatatattaaatact

SEQ ID NO: 868109 - DNA, 15 bp, Homo sapiens
atatattaaatactt

SEQ ID NO: 868110 - DNA, 15 bp, Homo sapiens
tatattaaatacttt

SEQ ID NO: 868111 - DNA, 15 bp, Homo sapiens
atattaaatacttta

SEQ ID NO: 868112 - DNA, 15 bp, Homo sapiens
tattaaatactttag

SEQ ID NO: 868113 - DNA, 15 bp, Homo sapiens
attaaatactttagt

SEQ ID NO: 868114 - DNA, 15 bp, Homo sapiens
ttaaatactttagtg

SEQ ID NO: 868115 - DNA, 15 bp, Homo sapiens
taaatactttagtgt

SEQ ID NO: 868116 - DNA, 15 bp, Homo sapiens
aaatactttagtgtt

SEQ ID NO: 868117 - DNA, 15 bp, Homo sapiens
aatactttagtgtta

SEQ ID NO: 868118 - DNA, 15 bp, Homo sapiens
atactttagtgttac

SEQ ID NO: 868119 - DNA, 15 bp, Homo sapiens
tactttagtgttaca

SEQ ID NO: 868120 - DNA, 15 bp, Homo sapiens
actttagtgttacac

SEQ ID NO: 868121 - DNA, 15 bp, Homo sapiens
ctttagtgttacacg

SEQ ID NO: 868122 - DNA, 15 bp, Homo sapiens
tttagtgttacacgc

SEQ ID NO: 868123 - DNA, 15 bp, Homo sapiens
ttagtgttacacgct

SEQ ID NO: 868124 - DNA, 15 bp, Homo sapiens
tagtgttacacgcta

SEQ ID NO: 868125 - DNA, 15 bp, Homo sapiens
agtgttacacgctac

SEQ ID NO: 868126 - DNA, 15 bp, Homo sapiens
gtgttacacgctaca

SEQ ID NO: 868127 - DNA, 15 bp, Homo sapiens
tgttacacgctacat

SEQ ID NO: 868128 - DNA, 15 bp, Homo sapiens
gttacacgctacatt

SEQ ID NO: 868129 - DNA, 15 bp, Homo sapiens
ttacacgctacattt

SEQ ID NO: 868130 - DNA, 15 bp, Homo sapiens
tacacgctacatttt

SEQ ID NO: 868131 - DNA, 15 bp, Homo sapiens
acacgctacatttta

SEQ ID NO: 868132 - DNA, 15 bp, Homo sapiens
cacgctacattttat

SEQ ID NO: 868133 - DNA, 15 bp, Homo sapiens
acgctacattttatg

SEQ ID NO: 868134 - DNA, 15 bp, Homo sapiens
cgctacattttatgt

SEQ ID NO: 868135 - DNA, 15 bp, Homo sapiens
gctacattttatgtg

SEQ ID NO: 868136 - DNA, 15 bp, Homo sapiens
ctacattttatgtgc

SEQ ID NO: 868137 - DNA, 15 bp, Homo sapiens
tacattttatgtgca

SEQ ID NO: 868138 - DNA, 15 bp, Homo sapiens
acattttatgtgcaa

SEQ ID NO: 868139 - DNA, 15 bp, Homo sapiens
cattttatgtgcaat

SEQ ID NO: 868140 - DNA, 15 bp, Homo sapiens
attttatgtgcaata

SEQ ID NO: 868141 - DNA, 15 bp, Homo sapiens
ttttatgtgcaatag

SEQ ID NO: 868142 - DNA, 15 bp, Homo sapiens
tttatgtgcaataga

SEQ ID NO: 868143 - DNA, 15 bp, Homo sapiens
ttatgtgcaatagaa

SEQ ID NO: 868144 - DNA, 15 bp, Homo sapiens
tatgtgcaatagaaa

SEQ ID NO: 868145 - DNA, 15 bp, Homo sapiens
atgtgcaatagaaag

SEQ ID NO: 868146 - DNA, 15 bp, Homo sapiens
tgtgcaatagaaagt

SEQ ID NO: 868147 - DNA, 15 bp, Homo sapiens
gtgcaatagaaagtg

SEQ ID NO: 868148 - DNA, 15 bp, Homo sapiens
tgcaatagaaagtga

SEQ ID NO: 868149 - DNA, 15 bp, Homo sapiens
gcaatagaaagtgat

SEQ ID NO: 868150 - DNA, 15 bp, Homo sapiens
caatagaaagtgatg

SEQ ID NO: 868151 - DNA, 15 bp, Homo sapiens
aatagaaagtgatgg

SEQ ID NO: 868152 - DNA, 15 bp, Homo sapiens
atagaaagtgatggt

SEQ ID NO: 868153 - DNA, 15 bp, Homo sapiens
tagaaagtgatggtt

SEQ ID NO: 868154 - DNA, 15 bp, Homo sapiens
agaaagtgatggttt

SEQ ID NO: 868155 - DNA, 15 bp, Homo sapiens
gaaagtgatggtttg

SEQ ID NO: 868156 - DNA, 15 bp, Homo sapiens
aaagtgatggtttga

SEQ ID NO: 868157 - DNA, 15 bp, Homo sapiens
aagtgatggtttgag

SEQ ID NO: 868158 - DNA, 15 bp, Homo sapiens
agtgatggtttgagg

SEQ ID NO: 868159 - DNA, 15 bp, Homo sapiens
gtgatggtttgaggt

SEQ ID NO: 868160 - DNA, 15 bp, Homo sapiens
tgatggtttgaggta

SEQ ID NO: 868161 - DNA, 15 bp, Homo sapiens
gatggtttgaggtag

SEQ ID NO: 868162 - DNA, 15 bp, Homo sapiens
atggtttgaggtagc

SEQ ID NO: 868163 - DNA, 15 bp, Homo sapiens
tggtttgaggtagcc

SEQ ID NO: 868164 - DNA, 15 bp, Homo sapiens
ggtttgaggtagcct

SEQ ID NO: 868165 - DNA, 15 bp, Homo sapiens
gtttgaggtagcctt

SEQ ID NO: 868166 - DNA, 15 bp, Homo sapiens
tttgaggtagccttg

SEQ ID NO: 868167 - DNA, 15 bp, Homo sapiens
ttgaggtagccttgg

SEQ ID NO: 868168 - DNA, 15 bp, Homo sapiens
tgaggtagccttggg

SEQ ID NO: 868169 - DNA, 15 bp, Homo sapiens
gaggtagccttgggg

SEQ ID NO: 868170 - DNA, 15 bp, Homo sapiens
aggtagccttggggg

SEQ ID NO: 868171 - DNA, 15 bp, Homo sapiens
ggtagccttgggggg

SEQ ID NO: 868172 - DNA, 15 bp, Homo sapiens
gtagccttgggggga

SEQ ID NO: 868173 - DNA, 15 bp, Homo sapiens
tagccttggggggac

SEQ ID NO: 868174 - DNA, 15 bp, Homo sapiens
agccttggggggact

SEQ ID NO: 868175 - DNA, 15 bp, Homo sapiens
gccttggggggactt

SEQ ID NO: 868176 - DNA, 15 bp, Homo sapiens
ccttggggggacttt

SEQ ID NO: 868177 - DNA, 15 bp, Homo sapiens
cttggggggactttt

SEQ ID NO: 868178 - DNA, 15 bp, Homo sapiens
ttggggggacttttt

SEQ ID NO: 868179 - DNA, 15 bp, Homo sapiens
tggggggactttttt

SEQ ID NO: 868180 - DNA, 15 bp, Homo sapiens
ggggggacttttttt

SEQ ID NO: 868181 - DNA, 15 bp, Homo sapiens
gggggactttttttc

SEQ ID NO: 868182 - DNA, 15 bp, Homo sapiens
ggggactttttttcc

SEQ ID NO: 868183 - DNA, 15 bp, Homo sapiens
gggactttttttcca

SEQ ID NO: 868184 - DNA, 15 bp, Homo sapiens
ggactttttttccac

SEQ ID NO: 868185 - DNA, 15 bp, Homo sapiens
gactttttttccaca

SEQ ID NO: 868186 - DNA, 15 bp, Homo sapiens
actttttttccacaa

SEQ ID NO: 868187 - DNA, 15 bp, Homo sapiens
ctttttttccacaag

SEQ ID NO: 868188 - DNA, 15 bp, Homo sapiens
tttttttccacaagc

SEQ ID NO: 868189 - DNA, 15 bp, Homo sapiens
ttttttccacaagca

SEQ ID NO: 868190 - DNA, 15 bp, Homo sapiens
tttttccacaagcag

SEQ ID NO: 868191 - DNA, 15 bp, Homo sapiens
ttttccacaagcaga

SEQ ID NO: 868192 - DNA, 15 bp, Homo sapiens
tttccacaagcagaa

SEQ ID NO: 868193 - DNA, 15 bp, Homo sapiens
ttccacaagcagaaa

SEQ ID NO: 868194 - DNA, 15 bp, Homo sapiens
tccacaagcagaaaa

SEQ ID NO: 868195 - DNA, 15 bp, Homo sapiens
ccacaagcagaaaaa

SEQ ID NO: 868196 - DNA, 15 bp, Homo sapiens
cacaagcagaaaaag

SEQ ID NO: 868197 - DNA, 15 bp, Homo sapiens
acaagcagaaaaagc

SEQ ID NO: 868198 - DNA, 15 bp, Homo sapiens
caagcagaaaaagct

SEQ ID NO: 868199 - DNA, 15 bp, Homo sapiens
aagcagaaaaagcta

SEQ ID NO: 868200 - DNA, 15 bp, Homo sapiens
agcagaaaaagctag

SEQ ID NO: 868201 - DNA, 15 bp, Homo sapiens
gcagaaaaagctagt

SEQ ID NO: 868202 - DNA, 15 bp, Homo sapiens
cagaaaaagctagtg

SEQ ID NO: 868203 - DNA, 15 bp, Homo sapiens
agaaaaagctagtgt

SEQ ID NO: 868204 - DNA, 15 bp, Homo sapiens
gaaaaagctagtgta

SEQ ID NO: 868205 - DNA, 15 bp, Homo sapiens
aaaaagctagtgtat

SEQ ID NO: 868206 - DNA, 15 bp, Homo sapiens
aaaagctagtgtata

SEQ ID NO: 868207 - DNA, 15 bp, Homo sapiens
aaagctagtgtatat

SEQ ID NO: 868208 - DNA, 15 bp, Homo sapiens
aagctagtgtatatc

SEQ ID NO: 868209 - DNA, 15 bp, Homo sapiens
agctagtgtatatcg

SEQ ID NO: 868210 - DNA, 15 bp, Homo sapiens
gctagtgtatatcgt

SEQ ID NO: 868211 - DNA, 15 bp, Homo sapiens
ctagtgtatatcgta

SEQ ID NO: 868212 - DNA, 15 bp, Homo sapiens
tagtgtatatcgtat

SEQ ID NO: 868213 - DNA, 15 bp, Homo sapiens
agtgtatatcgtatc

SEQ ID NO: 868214 - DNA, 15 bp, Homo sapiens
gtgtatatcgtatca

SEQ ID NO: 868215 - DNA, 15 bp, Homo sapiens
tgtatatcgtatcaa

SEQ ID NO: 868216 - DNA, 15 bp, Homo sapiens
gtatatcgtatcaag

SEQ ID NO: 868217 - DNA, 15 bp, Homo sapiens
tatatcgtatcaagt

SEQ ID NO: 868218 - DNA, 15 bp, Homo sapiens
atatcgtatcaagta

SEQ ID NO: 868219 - DNA, 15 bp, Homo sapiens
tatcgtatcaagtat

SEQ ID NO: 868220 - DNA, 15 bp, Homo sapiens
atcgtatcaagtatg

SEQ ID NO: 868221 - DNA, 15 bp, Homo sapiens
tcgtatcaagtatgg

SEQ ID NO: 868222 - DNA, 15 bp, Homo sapiens
cgtatcaagtatggt

SEQ ID NO: 868223 - DNA, 15 bp, Homo sapiens
gtatcaagtatggtt

SEQ ID NO: 868224 - DNA, 15 bp, Homo sapiens
tatcaagtatggttt

SEQ ID NO: 868225 - DNA, 15 bp, Homo sapiens
atcaagtatggtttt

SEQ ID NO: 868226 - DNA, 15 bp, Homo sapiens
tcaagtatggttttt

SEQ ID NO: 868227 - DNA, 15 bp, Homo sapiens
caagtatggttttta

SEQ ID NO: 868228 - DNA, 15 bp, Homo sapiens
aagtatggtttttac

SEQ ID NO: 868229 - DNA, 15 bp, Homo sapiens
agtatggtttttaca

SEQ ID NO: 868230 - DNA, 15 bp, Homo sapiens
gtatggtttttacag

SEQ ID NO: 868231 - DNA, 15 bp, Homo sapiens
tatggtttttacagg

SEQ ID NO: 868232 - DNA, 15 bp, Homo sapiens
atggtttttacagga

SEQ ID NO: 868233 - DNA, 15 bp, Homo sapiens
tggtttttacaggac

SEQ ID NO: 868234 - DNA, 15 bp, Homo sapiens
ggtttttacaggact

SEQ ID NO: 868235 - DNA, 15 bp, Homo sapiens
gtttttacaggactt

SEQ ID NO: 868236 - DNA, 15 bp, Homo sapiens
tttttacaggacttt

SEQ ID NO: 868237 - DNA, 15 bp, Homo sapiens
ttttacaggactttc

SEQ ID NO: 868238 - DNA, 15 bp, Homo sapiens
tttacaggactttct

SEQ ID NO: 868239 - DNA, 15 bp, Homo sapiens
ttacaggactttctg

SEQ ID NO: 868240 - DNA, 15 bp, Homo sapiens
tacaggactttctgc

SEQ ID NO: 868241 - DNA, 15 bp, Homo sapiens
acaggactttctgcc

SEQ ID NO: 868242 - DNA, 15 bp, Homo sapiens
caggactttctgccc

SEQ ID NO: 868243 - DNA, 15 bp, Homo sapiens
aggactttctgcccg

SEQ ID NO: 868244 - DNA, 15 bp, Homo sapiens
ggactttctgcccga

SEQ ID NO: 868245 - DNA, 15 bp, Homo sapiens
gactttctgcccgaa

SEQ ID NO: 868246 - DNA, 15 bp, Homo sapiens
actttctgcccgaag

SEQ ID NO: 868247 - DNA, 15 bp, Homo sapiens
ctttctgcccgaagg

SEQ ID NO: 868248 - DNA, 15 bp, Homo sapiens
tttctgcccgaaggc

SEQ ID NO: 868249 - DNA, 15 bp, Homo sapiens
ttctgcccgaaggcc

SEQ ID NO: 868250 - DNA, 15 bp, Homo sapiens
tctgcccgaaggcct

SEQ ID NO: 868251 - DNA, 15 bp, Homo sapiens
ctgcccgaaggcctt

SEQ ID NO: 868252 - DNA, 15 bp, Homo sapiens
tgcccgaaggccttt

SEQ ID NO: 868253 - DNA, 15 bp, Homo sapiens
gcccgaaggcctttg

SEQ ID NO: 868254 - DNA, 15 bp, Homo sapiens
cccgaaggcctttgt

SEQ ID NO: 868255 - DNA, 15 bp, Homo sapiens
ccgaaggcctttgta

SEQ ID NO: 868256 - DNA, 15 bp, Homo sapiens
cgaaggcctttgtaa

SEQ ID NO: 868257 - DNA, 15 bp, Homo sapiens
gaaggcctttgtaaa

SEQ ID NO: 868258 - DNA, 15 bp, Homo sapiens
aaggcctttgtaaat

SEQ ID NO: 868259 - DNA, 15 bp, Homo sapiens
aggcctttgtaaata

SEQ ID NO: 868260 - DNA, 15 bp, Homo sapiens
ggcctttgtaaataa

SEQ ID NO: 868261 - DNA, 15 bp, Homo sapiens
gcctttgtaaataag

SEQ ID NO: 868262 - DNA, 15 bp, Homo sapiens
cctttgtaaataagt

SEQ ID NO: 868263 - DNA, 15 bp, Homo sapiens
ctttgtaaataagta

SEQ ID NO: 868264 - DNA, 15 bp, Homo sapiens
tttgtaaataagtaa

SEQ ID NO: 868265 - DNA, 15 bp, Homo sapiens
ttgtaaataagtaat

SEQ ID NO: 868266 - DNA, 15 bp, Homo sapiens
tgtaaataagtaatg

SEQ ID NO: 868267 - DNA, 15 bp, Homo sapiens
gtaaataagtaatga

SEQ ID NO: 868268 - DNA, 15 bp, Homo sapiens
taaataagtaatgat

SEQ ID NO: 868269 - DNA, 15 bp, Homo sapiens
aaataagtaatgatc

SEQ ID NO: 868270 - DNA, 15 bp, Homo sapiens
aataagtaatgatca

SEQ ID NO: 868271 - DNA, 15 bp, Homo sapiens
ataagtaatgatcaa

SEQ ID NO: 868272 - DNA, 15 bp, Homo sapiens
taagtaatgatcaac

SEQ ID NO: 868273 - DNA, 15 bp, Homo sapiens
aagtaatgatcaaca

SEQ ID NO: 868274 - DNA, 15 bp, Homo sapiens
agtaatgatcaacag

SEQ ID NO: 868275 - DNA, 15 bp, Homo sapiens
gtaatgatcaacaga

SEQ ID NO: 868276 - DNA, 15 bp, Homo sapiens
taatgatcaacagat

SEQ ID NO: 868277 - DNA, 15 bp, Homo sapiens
aatgatcaacagatt

SEQ ID NO: 868278 - DNA, 15 bp, Homo sapiens
atgatcaacagattg

SEQ ID NO: 868279 - DNA, 15 bp, Homo sapiens
tgatcaacagattgg

SEQ ID NO: 868280 - DNA, 15 bp, Homo sapiens
gatcaacagattggc

SEQ ID NO: 868281 - DNA, 15 bp, Homo sapiens
atcaacagattggct

SEQ ID NO: 868282 - DNA, 15 bp, Homo sapiens
tcaacagattggctg

SEQ ID NO: 868283 - DNA, 15 bp, Homo sapiens
caacagattggctgt

SEQ ID NO: 868284 - DNA, 15 bp, Homo sapiens
aacagattggctgtg

SEQ ID NO: 868285 - DNA, 15 bp, Homo sapiens
acagattggctgtgg

SEQ ID NO: 868286 - DNA, 15 bp, Homo sapiens
cagattggctgtggg

SEQ ID NO: 868287 - DNA, 15 bp, Homo sapiens
agattggctgtgggt

SEQ ID NO: 868288 - DNA, 15 bp, Homo sapiens
gattggctgtgggtt

SEQ ID NO: 868289 - DNA, 15 bp, Homo sapiens
ttggctgtgggtttt

SEQ ID NO: 868290 - DNA, 15 bp, Homo sapiens
tggctgtgggttttt

SEQ ID NO: 868291 - DNA, 15 bp, Homo sapiens
ggctgtgggtttttg

SEQ ID NO: 868292 - DNA, 15 bp, Homo sapiens
gctgtgggtttttga

SEQ ID NO: 868293 - DNA, 15 bp, Homo sapiens
ctgtgggtttttgaa

SEQ ID NO: 868294 - DNA, 15 bp, Homo sapiens
tgtgggtttttgaaa

SEQ ID NO: 868295 - DNA, 15 bp, Homo sapiens
gtgggtttttgaaaa

SEQ ID NO: 868296 - DNA, 15 bp, Homo sapiens
tgggtttttgaaaag

SEQ ID NO: 868297 - DNA, 15 bp, Homo sapiens
gggtttttgaaaagc

SEQ ID NO: 868298 - DNA, 15 bp, Homo sapiens
ggtttttgaaaagca

SEQ ID NO: 868299 - DNA, 15 bp, Homo sapiens
gtttttgaaaagcat

SEQ ID NO: 868300 - DNA, 15 bp, Homo sapiens
tttttgaaaagcatg

SEQ ID NO: 868301 - DNA, 15 bp, Homo sapiens
ttttgaaaagcatgc

SEQ ID NO: 868302 - DNA, 15 bp, Homo sapiens
tttgaaaagcatgcc

SEQ ID NO: 868303 - DNA, 15 bp, Homo sapiens
ttgaaaagcatgcct

SEQ ID NO: 868304 - DNA, 15 bp, Homo sapiens
tgaaaagcatgcctg

SEQ ID NO: 868305 - DNA, 15 bp, Homo sapiens
gaaaagcatgcctgt

SEQ ID NO: 868306 - DNA, 15 bp, Homo sapiens
aaaagcatgcctgtg

SEQ ID NO: 868307 - DNA, 15 bp, Homo sapiens
aaagcatgcctgtgt

SEQ ID NO: 868308 - DNA, 15 bp, Homo sapiens
aagcatgcctgtgtc

SEQ ID NO: 868309 - DNA, 15 bp, Homo sapiens
agcatgcctgtgtca

SEQ ID NO: 868310 - DNA, 15 bp, Homo sapiens
gcatgcctgtgtcag

SEQ ID NO: 868311 - DNA, 15 bp, Homo sapiens
catgcctgtgtcagt

SEQ ID NO: 868312 - DNA, 15 bp, Homo sapiens
atgcctgtgtcagtt

SEQ ID NO: 868313 - DNA, 15 bp, Homo sapiens
tgcctgtgtcagttt

SEQ ID NO: 868314 - DNA, 15 bp, Homo sapiens
gcctgtgtcagtttg

SEQ ID NO: 868315 - DNA, 15 bp, Homo sapiens
cctgtgtcagtttgc

SEQ ID NO: 868316 - DNA, 15 bp, Homo sapiens
ctgtgtcagtttgca

SEQ ID NO: 868317 - DNA, 15 bp, Homo sapiens
tgtgtcagtttgcat

SEQ ID NO: 868318 - DNA, 15 bp, Homo sapiens
gtgtcagtttgcatg

SEQ ID NO: 868319 - DNA, 15 bp, Homo sapiens
tgtcagtttgcatga

SEQ ID NO: 868320 - DNA, 15 bp, Homo sapiens
gtcagtttgcatgat

SEQ ID NO: 868321 - DNA, 15 bp, Homo sapiens
tcagtttgcatgatg

SEQ ID NO: 868322 - DNA, 15 bp, Homo sapiens
cagtttgcatgatgg

SEQ ID NO: 868323 - DNA, 15 bp, Homo sapiens
agtttgcatgatggg

SEQ ID NO: 868324 - DNA, 15 bp, Homo sapiens
gtttgcatgatgggg

SEQ ID NO: 868325 - DNA, 15 bp, Homo sapiens
tttgcatgatggggg

SEQ ID NO: 868326 - DNA, 15 bp, Homo sapiens
ttgcatgatggggga

SEQ ID NO: 868327 - DNA, 15 bp, Homo sapiens
tgcatgatgggggag

SEQ ID NO: 868328 - DNA, 15 bp, Homo sapiens
gcatgatgggggaga

SEQ ID NO: 868329 - DNA, 15 bp, Homo sapiens
catgatgggggagaa

SEQ ID NO: 868330 - DNA, 15 bp, Homo sapiens
atgatgggggagaat

SEQ ID NO: 868331 - DNA, 15 bp, Homo sapiens
tgatgggggagaatt

SEQ ID NO: 868332 - DNA, 15 bp, Homo sapiens
gatgggggagaattt

SEQ ID NO: 868333 - DNA, 15 bp, Homo sapiens
atgggggagaatttt

SEQ ID NO: 868334 - DNA, 15 bp, Homo sapiens
tgggggagaattttc

SEQ ID NO: 868335 - DNA, 15 bp, Homo sapiens
gggggagaattttca

SEQ ID NO: 868336 - DNA, 15 bp, Homo sapiens
ggggagaattttcaa

SEQ ID NO: 868337 - DNA, 15 bp, Homo sapiens
gggagaattttcaaa

SEQ ID NO: 868338 - DNA, 15 bp, Homo sapiens
ggagaattttcaaag

SEQ ID NO: 868339 - DNA, 15 bp, Homo sapiens
gagaattttcaaagt

SEQ ID NO: 868340 - DNA, 15 bp, Homo sapiens
agaattttcaaagtg

SEQ ID NO: 868341 - DNA, 15 bp, Homo sapiens
gaattttcaaagtgg

SEQ ID NO: 868342 - DNA, 15 bp, Homo sapiens
aattttcaaagtgga

SEQ ID NO: 868343 - DNA, 15 bp, Homo sapiens
attttcaaagtggat

SEQ ID NO: 868344 - DNA, 15 bp, Homo sapiens
ttttcaaagtggatc

SEQ ID NO: 868345 - DNA, 15 bp, Homo sapiens
tttcaaagtggatct

SEQ ID NO: 868346 - DNA, 15 bp, Homo sapiens
ttcaaagtggatctt

SEQ ID NO: 868347 - DNA, 15 bp, Homo sapiens
tcaaagtggatcttg

SEQ ID NO: 868348 - DNA, 15 bp, Homo sapiens
caaagtggatcttgc

SEQ ID NO: 868349 - DNA, 15 bp, Homo sapiens
aaagtggatcttgct

SEQ ID NO: 868350 - DNA, 15 bp, Homo sapiens
aagtggatcttgctt

SEQ ID NO: 868351 - DNA, 15 bp, Homo sapiens
agtggatcttgcttt

SEQ ID NO: 868352 - DNA, 15 bp, Homo sapiens
gtggatcttgctttc

SEQ ID NO: 868353 - DNA, 15 bp, Homo sapiens
tggatcttgctttca

SEQ ID NO: 868354 - DNA, 15 bp, Homo sapiens
ggatcttgctttcat

SEQ ID NO: 868355 - DNA, 15 bp, Homo sapiens
gatcttgctttcatt

SEQ ID NO: 868356 - DNA, 15 bp, Homo sapiens
atcttgctttcattc

SEQ ID NO: 868357 - DNA, 15 bp, Homo sapiens
tcttgctttcattcg

SEQ ID NO: 868358 - DNA, 15 bp, Homo sapiens
cttgctttcattcgt

SEQ ID NO: 868359 - DNA, 15 bp, Homo sapiens
ttgctttcattcgtt

SEQ ID NO: 868360 - DNA, 15 bp, Homo sapiens
tgctttcattcgttg

SEQ ID NO: 868361 - DNA, 15 bp, Homo sapiens
gctttcattcgttgc

SEQ ID NO: 868362 - DNA, 15 bp, Homo sapiens
ctttcattcgttgct

SEQ ID NO: 868363 - DNA, 15 bp, Homo sapiens
tttcattcgttgctg

SEQ ID NO: 868364 - DNA, 15 bp, Homo sapiens
ttcattcgttgctgg

SEQ ID NO: 868365 - DNA, 15 bp, Homo sapiens
tcattcgttgctgga

SEQ ID NO: 868366 - DNA, 15 bp, Homo sapiens
cattcgttgctggag

SEQ ID NO: 868367 - DNA, 15 bp, Homo sapiens
attcgttgctggaga

SEQ ID NO: 868368 - DNA, 15 bp, Homo sapiens
ttcgttgctggagag

SEQ ID NO: 868369 - DNA, 15 bp, Homo sapiens
tcgttgctggagagg

SEQ ID NO: 868370 - DNA, 15 bp, Homo sapiens
cgttgctggagaggg

SEQ ID NO: 868371 - DNA, 15 bp, Homo sapiens
gttgctggagagggg

SEQ ID NO: 868372 - DNA, 15 bp, Homo sapiens
ttgctggagaggggc

SEQ ID NO: 868373 - DNA, 15 bp, Homo sapiens
tgctggagaggggct

SEQ ID NO: 868374 - DNA, 15 bp, Homo sapiens
gctggagaggggctg

SEQ ID NO: 868375 - DNA, 15 bp, Homo sapiens
ctggagaggggctga

SEQ ID NO: 868376 - DNA, 15 bp, Homo sapiens
tggagaggggctgag

SEQ ID NO: 868377 - DNA, 15 bp, Homo sapiens
ggagaggggctgagg

SEQ ID NO: 868378 - DNA, 15 bp, Homo sapiens
gagaggggctgaggg

SEQ ID NO: 868379 - DNA, 15 bp, Homo sapiens
agaggggctgaggga

SEQ ID NO: 868380 - DNA, 15 bp, Homo sapiens
gaggggctgagggag

SEQ ID NO: 868381 - DNA, 15 bp, Homo sapiens
aggggctgagggagg

SEQ ID NO: 868382 - DNA, 15 bp, Homo sapiens
ggggctgagggaggc

SEQ ID NO: 868383 - DNA, 15 bp, Homo sapiens
gggctgagggaggca

SEQ ID NO: 868384 - DNA, 15 bp, Homo sapiens
ggctgagggaggcag

SEQ ID NO: 868385 - DNA, 15 bp, Homo sapiens
gctgagggaggcagt

SEQ ID NO: 868386 - DNA, 15 bp, Homo sapiens
ctgagggaggcagtc

SEQ ID NO: 868387 - DNA, 15 bp, Homo sapiens
tgagggaggcagtca

SEQ ID NO: 868388 - DNA, 15 bp, Homo sapiens
gagggaggcagtcat

SEQ ID NO: 868389 - DNA, 15 bp, Homo sapiens
agggaggcagtcatc

SEQ ID NO: 868390 - DNA, 15 bp, Homo sapiens
gggaggcagtcatcc

SEQ ID NO: 868391 - DNA, 15 bp, Homo sapiens
ggaggcagtcatcct

SEQ ID NO: 868392 - DNA, 15 bp, Homo sapiens
gaggcagtcatcctg

SEQ ID NO: 868393 - DNA, 15 bp, Homo sapiens
aggcagtcatcctgg

SEQ ID NO: 868394 - DNA, 15 bp, Homo sapiens
ggcagtcatcctggg

SEQ ID NO: 868395 - DNA, 15 bp, Homo sapiens
gcagtcatcctgggc

SEQ ID NO: 868396 - DNA, 15 bp, Homo sapiens
cagtcatcctgggct

SEQ ID NO: 868397 - DNA, 15 bp, Homo sapiens
agtcatcctgggctg

SEQ ID NO: 868398 - DNA, 15 bp, Homo sapiens
gtcatcctgggctgg

SEQ ID NO: 868399 - DNA, 15 bp, Homo sapiens
tcatcctgggctgga

SEQ ID NO: 868400 - DNA, 15 bp, Homo sapiens
catcctgggctggag

SEQ ID NO: 868401 - DNA, 15 bp, Homo sapiens
atcctgggctggagc

SEQ ID NO: 868402 - DNA, 15 bp, Homo sapiens
tcctgggctggagct

SEQ ID NO: 868403 - DNA, 15 bp, Homo sapiens
cctgggctggagctg

SEQ ID NO: 868404 - DNA, 15 bp, Homo sapiens
ctgggctggagctgt

SEQ ID NO: 868405 - DNA, 15 bp, Homo sapiens
tgggctggagctgtc

SEQ ID NO: 868406 - DNA, 15 bp, Homo sapiens
gggctggagctgtct

SEQ ID NO: 868407 - DNA, 15 bp, Homo sapiens
ggctggagctgtctg

SEQ ID NO: 868408 - DNA, 15 bp, Homo sapiens
gctggagctgtctgt

SEQ ID NO: 868409 - DNA, 15 bp, Homo sapiens
ctggagctgtctgtt

SEQ ID NO: 868410 - DNA, 15 bp, Homo sapiens
tggagctgtctgttt

SEQ ID NO: 868411 - DNA, 15 bp, Homo sapiens
ggagctgtctgtttc

SEQ ID NO: 868412 - DNA, 15 bp, Homo sapiens
gagctgtctgtttca

SEQ ID NO: 868413 - DNA, 15 bp, Homo sapiens
agctgtctgtttcat

SEQ ID NO: 868414 - DNA, 15 bp, Homo sapiens
gctgtctgtttcatg

SEQ ID NO: 868415 - DNA, 15 bp, Homo sapiens
ctgtctgtttcatgg

SEQ ID NO: 868416 - DNA, 15 bp, Homo sapiens
tgtctgtttcatggt

SEQ ID NO: 868417 - DNA, 15 bp, Homo sapiens
gtctgtttcatggta

SEQ ID NO: 868418 - DNA, 15 bp, Homo sapiens
tctgtttcatggtac

SEQ ID NO: 868419 - DNA, 15 bp, Homo sapiens
ctgtttcatggtaca

SEQ ID NO: 868420 - DNA, 15 bp, Homo sapiens
tgtttcatggtacat

SEQ ID NO: 868421 - DNA, 15 bp, Homo sapiens
gtttcatggtacatc

SEQ ID NO: 868422 - DNA, 15 bp, Homo sapiens
tttcatggtacatca

SEQ ID NO: 868423 - DNA, 15 bp, Homo sapiens
ttcatggtacatcaa

SEQ ID NO: 868424 - DNA, 15 bp, Homo sapiens
tcatggtacatcaaa

SEQ ID NO: 868425 - DNA, 15 bp, Homo sapiens
catggtacatcaaaa

SEQ ID NO: 868426 - DNA, 15 bp, Homo sapiens
atggtacatcaaaat

SEQ ID NO: 868427 - DNA, 15 bp, Homo sapiens
tggtacatcaaaatt

SEQ ID NO: 868428 - DNA, 15 bp, Homo sapiens
ggtacatcaaaattg

SEQ ID NO: 868429 - DNA, 15 bp, Homo sapiens
gtacatcaaaattgc

SEQ ID NO: 868430 - DNA, 15 bp, Homo sapiens
tacatcaaaattgct

SEQ ID NO: 868431 - DNA, 15 bp, Homo sapiens
acatcaaaattgcta

SEQ ID NO: 868432 - DNA, 15 bp, Homo sapiens
catcaaaattgctaa

SEQ ID NO: 868433 - DNA, 15 bp, Homo sapiens
atcaaaattgctaaa

SEQ ID NO: 868434 - DNA, 15 bp, Homo sapiens
tcaaaattgctaaac

SEQ ID NO: 868435 - DNA, 15 bp, Homo sapiens
caaaattgctaaacg

SEQ ID NO: 868436 - DNA, 15 bp, Homo sapiens
aaaattgctaaacgt

SEQ ID NO: 868437 - DNA, 15 bp, Homo sapiens
aaattgctaaacgtg

SEQ ID NO: 868438 - DNA, 15 bp, Homo sapiens
aattgctaaacgtgg

SEQ ID NO: 868439 - DNA, 15 bp, Homo sapiens
attgctaaacgtggg

SEQ ID NO: 868440 - DNA, 15 bp, Homo sapiens
ttgctaaacgtgggt

SEQ ID NO: 868441 - DNA, 15 bp, Homo sapiens
tgctaaacgtgggtc

SEQ ID NO: 868442 - DNA, 15 bp, Homo sapiens
gctaaacgtgggtca

SEQ ID NO: 868443 - DNA, 15 bp, Homo sapiens
ctaaacgtgggtcag

SEQ ID NO: 868444 - DNA, 15 bp, Homo sapiens
taaacgtgggtcagg

SEQ ID NO: 868445 - DNA, 15 bp, Homo sapiens
aaacgtgggtcaggt

SEQ ID NO: 868446 - DNA, 15 bp, Homo sapiens
aacgtgggtcaggtg

SEQ ID NO: 868447 - DNA, 15 bp, Homo sapiens
acgtgggtcaggtgg

SEQ ID NO: 868448 - DNA, 15 bp, Homo sapiens
cgtgggtcaggtggt

SEQ ID NO: 868449 - DNA, 15 bp, Homo sapiens
gtgggtcaggtggtg

SEQ ID NO: 868450 - DNA, 15 bp, Homo sapiens
tgggtcaggtggtga

SEQ ID NO: 868451 - DNA, 15 bp, Homo sapiens
gggtcaggtggtgag

SEQ ID NO: 868452 - DNA, 15 bp, Homo sapiens
ggtcaggtggtgagt

SEQ ID NO: 868453 - DNA, 15 bp, Homo sapiens
gtcaggtggtgagtg

SEQ ID NO: 868454 - DNA, 15 bp, Homo sapiens
tcaggtggtgagtgg

SEQ ID NO: 868455 - DNA, 15 bp, Homo sapiens
caggtggtgagtgga

SEQ ID NO: 868456 - DNA, 15 bp, Homo sapiens
aggtggtgagtggaa

SEQ ID NO: 868457 - DNA, 15 bp, Homo sapiens
ggtggtgagtggaaa

SEQ ID NO: 868458 - DNA, 15 bp, Homo sapiens
gtggtgagtggaaac

SEQ ID NO: 868459 - DNA, 15 bp, Homo sapiens
tggtgagtggaaact

SEQ ID NO: 868460 - DNA, 15 bp, Homo sapiens
ggtgagtggaaactt

SEQ ID NO: 868461 - DNA, 15 bp, Homo sapiens
gtgagtggaaacttg

SEQ ID NO: 868462 - DNA, 15 bp, Homo sapiens
tgagtggaaacttgc

SEQ ID NO: 868463 - DNA, 15 bp, Homo sapiens
gagtggaaacttgcc

SEQ ID NO: 868464 - DNA, 15 bp, Homo sapiens
agtggaaacttgcca

SEQ ID NO: 868465 - DNA, 15 bp, Homo sapiens
gtggaaacttgccaa

SEQ ID NO: 868466 - DNA, 15 bp, Homo sapiens
tggaaacttgccaag

SEQ ID NO: 868467 - DNA, 15 bp, Homo sapiens
ggaaacttgccaagc

SEQ ID NO: 868468 - DNA, 15 bp, Homo sapiens
gaaacttgccaagct

SEQ ID NO: 868469 - DNA, 15 bp, Homo sapiens
aaacttgccaagcta

SEQ ID NO: 868470 - DNA, 15 bp, Homo sapiens
aacttgccaagctac

SEQ ID NO: 868471 - DNA, 15 bp, Homo sapiens
acttgccaagctaca

SEQ ID NO: 868472 - DNA, 15 bp, Homo sapiens
cttgccaagctacag

SEQ ID NO: 868473 - DNA, 15 bp, Homo sapiens
ttgccaagctacaga

SEQ ID NO: 868474 - DNA, 15 bp, Homo sapiens
tgccaagctacagaa

SEQ ID NO: 868475 - DNA, 15 bp, Homo sapiens
gccaagctacagaac

SEQ ID NO: 868476 - DNA, 15 bp, Homo sapiens
ccaagctacagaact

SEQ ID NO: 868477 - DNA, 15 bp, Homo sapiens
caagctacagaactc

SEQ ID NO: 868478 - DNA, 15 bp, Homo sapiens
aagctacagaactcg

SEQ ID NO: 868479 - DNA, 15 bp, Homo sapiens
agctacagaactcgg

SEQ ID NO: 868480 - DNA, 15 bp, Homo sapiens
gctacagaactcggg

SEQ ID NO: 868481 - DNA, 15 bp, Homo sapiens
ctacagaactcgggc

SEQ ID NO: 868482 - DNA, 15 bp, Homo sapiens
tacagaactcgggct

SEQ ID NO: 868483 - DNA, 15 bp, Homo sapiens
acagaactcgggctt

SEQ ID NO: 868484 - DNA, 15 bp, Homo sapiens
cagaactcgggcttc

SEQ ID NO: 868485 - DNA, 15 bp, Homo sapiens
agaactcgggcttct

SEQ ID NO: 868486 - DNA, 15 bp, Homo sapiens
gaactcgggcttctc

SEQ ID NO: 868487 - DNA, 15 bp, Homo sapiens
aactcgggcttctca

SEQ ID NO: 868488 - DNA, 15 bp, Homo sapiens
actcgggcttctcat

SEQ ID NO: 868489 - DNA, 15 bp, Homo sapiens
ctcgggcttctcatg

SEQ ID NO: 868490 - DNA, 15 bp, Homo sapiens
tcgggcttctcatgt

SEQ ID NO: 868491 - DNA, 15 bp, Homo sapiens
cgggcttctcatgtt

SEQ ID NO: 868492 - DNA, 15 bp, Homo sapiens
gggcttctcatgttg

SEQ ID NO: 868493 - DNA, 15 bp, Homo sapiens
ggcttctcatgttgg

SEQ ID NO: 868494 - DNA, 15 bp, Homo sapiens
gcttctcatgttggt

SEQ ID NO: 868495 - DNA, 15 bp, Homo sapiens
cttctcatgttggtt

SEQ ID NO: 868496 - DNA, 15 bp, Homo sapiens
ttctcatgttggttg

SEQ ID NO: 868497 - DNA, 15 bp, Homo sapiens
tctcatgttggttgc

SEQ ID NO: 868498 - DNA, 15 bp, Homo sapiens
ctcatgttggttgcc

SEQ ID NO: 868499 - DNA, 15 bp, Homo sapiens
tcatgttggttgcct

SEQ ID NO: 868500 - DNA, 15 bp, Homo sapiens
catgttggttgcctt

SEQ ID NO: 868501 - DNA, 15 bp, Homo sapiens
atgttggttgccttt

SEQ ID NO: 868502 - DNA, 15 bp, Homo sapiens
tgttggttgcctttg

SEQ ID NO: 868503 - DNA, 15 bp, Homo sapiens
gttggttgcctttgg

SEQ ID NO: 868504 - DNA, 15 bp, Homo sapiens
ttggttgcctttggg

SEQ ID NO: 868505 - DNA, 15 bp, Homo sapiens
tggttgcctttgggc

SEQ ID NO: 868506 - DNA, 15 bp, Homo sapiens
ggttgcctttgggct

SEQ ID NO: 868507 - DNA, 15 bp, Homo sapiens
gttgcctttgggctg

SEQ ID NO: 868508 - DNA, 15 bp, Homo sapiens
ttgcctttgggctgc

SEQ ID NO: 868509 - DNA, 15 bp, Homo sapiens
tgcctttgggctgct

SEQ ID NO: 868510 - DNA, 15 bp, Homo sapiens
gcctttgggctgctg

SEQ ID NO: 868511 - DNA, 15 bp, Homo sapiens
cctttgggctgctgc

SEQ ID NO: 868512 - DNA, 15 bp, Homo sapiens
ctttgggctgctgct

SEQ ID NO: 868513 - DNA, 15 bp, Homo sapiens
tttgggctgctgcta

SEQ ID NO: 868514 - DNA, 15 bp, Homo sapiens
ttgggctgctgctaa

SEQ ID NO: 868515 - DNA, 15 bp, Homo sapiens
tgggctgctgctaag

SEQ ID NO: 868516 - DNA, 15 bp, Homo sapiens
gggctgctgctaagg

SEQ ID NO: 868517 - DNA, 15 bp, Homo sapiens
ggctgctgctaaggc

SEQ ID NO: 868518 - DNA, 15 bp, Homo sapiens
gctgctgctaaggcc

SEQ ID NO: 868519 - DNA, 15 bp, Homo sapiens
ctgctgctaaggcct

SEQ ID NO: 868520 - DNA, 15 bp, Homo sapiens
tgctgctaaggcctc

SEQ ID NO: 868521 - DNA, 15 bp, Homo sapiens
gctgctaaggcctca

SEQ ID NO: 868522 - DNA, 15 bp, Homo sapiens
ctgctaaggcctcag

SEQ ID NO: 868523 - DNA, 15 bp, Homo sapiens
tgctaaggcctcagt

SEQ ID NO: 868524 - DNA, 15 bp, Homo sapiens
gctaaggcctcagtt

SEQ ID NO: 868525 - DNA, 15 bp, Homo sapiens
ctaaggcctcagttc

SEQ ID NO: 868526 - DNA, 15 bp, Homo sapiens
taaggcctcagttcc

SEQ ID NO: 868527 - DNA, 15 bp, Homo sapiens
aaggcctcagttcct

SEQ ID NO: 868528 - DNA, 15 bp, Homo sapiens
aggcctcagttcctg

SEQ ID NO: 868529 - DNA, 15 bp, Homo sapiens
ggcctcagttcctgt

SEQ ID NO: 868530 - DNA, 15 bp, Homo sapiens
gcctcagttcctgtc

SEQ ID NO: 868531 - DNA, 15 bp, Homo sapiens
cctcagttcctgtcg

SEQ ID NO: 868532 - DNA, 15 bp, Homo sapiens
ctcagttcctgtcgc

SEQ ID NO: 868533 - DNA, 15 bp, Homo sapiens
tcagttcctgtcgct

SEQ ID NO: 868534 - DNA, 15 bp, Homo sapiens
cagttcctgtcgctg

SEQ ID NO: 868535 - DNA, 15 bp, Homo sapiens
agttcctgtcgctgg

SEQ ID NO: 868536 - DNA, 15 bp, Homo sapiens
gttcctgtcgctggg

SEQ ID NO: 868537 - DNA, 15 bp, Homo sapiens
ttcctgtcgctggga

SEQ ID NO: 868538 - DNA, 15 bp, Homo sapiens
tcctgtcgctgggat

SEQ ID NO: 868539 - DNA, 15 bp, Homo sapiens
cctgtcgctgggatg

SEQ ID NO: 868540 - DNA, 15 bp, Homo sapiens
ctgtcgctgggatgt

SEQ ID NO: 868541 - DNA, 15 bp, Homo sapiens
tgtcgctgggatgtc

SEQ ID NO: 868542 - DNA, 15 bp, Homo sapiens
gtcgctgggatgtct

SEQ ID NO: 868543 - DNA, 15 bp, Homo sapiens
tcgctgggatgtctt

SEQ ID NO: 868544 - DNA, 15 bp, Homo sapiens
cgctgggatgtctta

SEQ ID NO: 868545 - DNA, 15 bp, Homo sapiens
gctgggatgtcttat

SEQ ID NO: 868546 - DNA, 15 bp, Homo sapiens
ctgggatgtcttatc

SEQ ID NO: 868547 - DNA, 15 bp, Homo sapiens
tgggatgtcttatcc

SEQ ID NO: 868548 - DNA, 15 bp, Homo sapiens
gggatgtcttatccc

SEQ ID NO: 868549 - DNA, 15 bp, Homo sapiens
ggatgtcttatccca

SEQ ID NO: 868550 - DNA, 15 bp, Homo sapiens
gatgtcttatcccac

SEQ ID NO: 868551 - DNA, 15 bp, Homo sapiens
atgtcttatcccacc

SEQ ID NO: 868552 - DNA, 15 bp, Homo sapiens
tgtcttatcccacca

SEQ ID NO: 868553 - DNA, 15 bp, Homo sapiens
gtcttatcccaccag

SEQ ID NO: 868554 - DNA, 15 bp, Homo sapiens
tcttatcccaccagc

SEQ ID NO: 868555 - DNA, 15 bp, Homo sapiens
cttatcccaccagcc

SEQ ID NO: 868556 - DNA, 15 bp, Homo sapiens
ttatcccaccagccc

SEQ ID NO: 868557 - DNA, 15 bp, Homo sapiens
tatcccaccagccca

SEQ ID NO: 868558 - DNA, 15 bp, Homo sapiens
atcccaccagcccac

SEQ ID NO: 868559 - DNA, 15 bp, Homo sapiens
tcccaccagcccacc

SEQ ID NO: 868560 - DNA, 15 bp, Homo sapiens
cccaccagcccacca

SEQ ID NO: 868561 - DNA, 15 bp, Homo sapiens
ccaccagcccaccat

SEQ ID NO: 868562 - DNA, 15 bp, Homo sapiens
caccagcccaccatg

SEQ ID NO: 868563 - DNA, 15 bp, Homo sapiens
accagcccaccatgg

SEQ ID NO: 868564 - DNA, 15 bp, Homo sapiens
ccagcccaccatggt

SEQ ID NO: 868565 - DNA, 15 bp, Homo sapiens
cagcccaccatggtc

SEQ ID NO: 868566 - DNA, 15 bp, Homo sapiens
agcccaccatggtct

SEQ ID NO: 868567 - DNA, 15 bp, Homo sapiens
gcccaccatggtctc

SEQ ID NO: 868568 - DNA, 15 bp, Homo sapiens
cccaccatggtctcc

SEQ ID NO: 868569 - DNA, 15 bp, Homo sapiens
ccaccatggtctccc

SEQ ID NO: 868570 - DNA, 15 bp, Homo sapiens
caccatggtctccct

SEQ ID NO: 868571 - DNA, 15 bp, Homo sapiens
accatggtctccctt

SEQ ID NO: 868572 - DNA, 15 bp, Homo sapiens
ccatggtctcccttc

SEQ ID NO: 868573 - DNA, 15 bp, Homo sapiens
catggtctcccttcg

SEQ ID NO: 868574 - DNA, 15 bp, Homo sapiens
atggtctcccttcgc

SEQ ID NO: 868575 - DNA, 15 bp, Homo sapiens
tggtctcccttcgca

SEQ ID NO: 868576 - DNA, 15 bp, Homo sapiens
ggtctcccttcgcag

SEQ ID NO: 868577 - DNA, 15 bp, Homo sapiens
gtctcccttcgcagc

SEQ ID NO: 868578 - DNA, 15 bp, Homo sapiens
tctcccttcgcagcc

SEQ ID NO: 868579 - DNA, 15 bp, Homo sapiens
ctcccttcgcagccc

SEQ ID NO: 868580 - DNA, 15 bp, Homo sapiens
tcccttcgcagccca

SEQ ID NO: 868581 - DNA, 15 bp, Homo sapiens
cccttcgcagcccag

SEQ ID NO: 868582 - DNA, 15 bp, Homo sapiens
ccttcgcagcccagc

SEQ ID NO: 868583 - DNA, 15 bp, Homo sapiens
cttcgcagcccagct

SEQ ID NO: 868584 - DNA, 15 bp, Homo sapiens
ttcgcagcccagctg

SEQ ID NO: 868585 - DNA, 15 bp, Homo sapiens
tcgcagcccagctgg

SEQ ID NO: 868586 - DNA, 15 bp, Homo sapiens
cgcagcccagctgga

SEQ ID NO: 868587 - DNA, 15 bp, Homo sapiens
gcagcccagctggaa

SEQ ID NO: 868588 - DNA, 15 bp, Homo sapiens
cagcccagctggaat

SEQ ID NO: 868589 - DNA, 15 bp, Homo sapiens
agcccagctggaatg

SEQ ID NO: 868590 - DNA, 15 bp, Homo sapiens
gcccagctggaatgg

SEQ ID NO: 868591 - DNA, 15 bp, Homo sapiens
cccagctggaatggg

SEQ ID NO: 868592 - DNA, 15 bp, Homo sapiens
ccagctggaatgggc

SEQ ID NO: 868593 - DNA, 15 bp, Homo sapiens
cagctggaatgggcc

SEQ ID NO: 868594 - DNA, 15 bp, Homo sapiens
agctggaatgggcca

SEQ ID NO: 868595 - DNA, 15 bp, Homo sapiens
gctggaatgggccat

SEQ ID NO: 868596 - DNA, 15 bp, Homo sapiens
ctggaatgggccatc

SEQ ID NO: 868597 - DNA, 15 bp, Homo sapiens
tggaatgggccatcc

SEQ ID NO: 868598 - DNA, 15 bp, Homo sapiens
ggaatgggccatccc

SEQ ID NO: 868599 - DNA, 15 bp, Homo sapiens
gaatgggccatccca

SEQ ID NO: 868600 - DNA, 15 bp, Homo sapiens
aatgggccatcccat

SEQ ID NO: 868601 - DNA, 15 bp, Homo sapiens
atgggccatcccatg

SEQ ID NO: 868602 - DNA, 15 bp, Homo sapiens
tgggccatcccatga

SEQ ID NO: 868603 - DNA, 15 bp, Homo sapiens
gggccatcccatgac

SEQ ID NO: 868604 - DNA, 15 bp, Homo sapiens
ggccatcccatgaca

SEQ ID NO: 868605 - DNA, 15 bp, Homo sapiens
gccatcccatgacaa

SEQ ID NO: 868606 - DNA, 15 bp, Homo sapiens
ccatcccatgacaag

SEQ ID NO: 868607 - DNA, 15 bp, Homo sapiens
catcccatgacaagt

SEQ ID NO: 868608 - DNA, 15 bp, Homo sapiens
atcccatgacaagtg

SEQ ID NO: 868609 - DNA, 15 bp, Homo sapiens
tcccatgacaagtga

SEQ ID NO: 868610 - DNA, 15 bp, Homo sapiens
cccatgacaagtgag

SEQ ID NO: 868611 - DNA, 15 bp, Homo sapiens
ccatgacaagtgaga

SEQ ID NO: 868612 - DNA, 15 bp, Homo sapiens
catgacaagtgagaa

SEQ ID NO: 868613 - DNA, 15 bp, Homo sapiens
atgacaagtgagaaa

SEQ ID NO: 868614 - DNA, 15 bp, Homo sapiens
tgacaagtgagaaag

SEQ ID NO: 868615 - DNA, 15 bp, Homo sapiens
gacaagtgagaaagt

SEQ ID NO: 868616 - DNA, 15 bp, Homo sapiens
acaagtgagaaagtc

SEQ ID NO: 868617 - DNA, 15 bp, Homo sapiens
caagtgagaaagtct

SEQ ID NO: 868618 - DNA, 15 bp, Homo sapiens
aagtgagaaagtctt

SEQ ID NO: 868619 - DNA, 15 bp, Homo sapiens
agtgagaaagtctta

SEQ ID NO: 868620 - DNA, 15 bp, Homo sapiens
gtgagaaagtcttag

SEQ ID NO: 868621 - DNA, 15 bp, Homo sapiens
tgagaaagtcttaga

SEQ ID NO: 868622 - DNA, 15 bp, Homo sapiens
gagaaagtcttagac

SEQ ID NO: 868623 - DNA, 15 bp, Homo sapiens
agaaagtcttagaca

SEQ ID NO: 868624 - DNA, 15 bp, Homo sapiens
gaaagtcttagacac

SEQ ID NO: 868625 - DNA, 15 bp, Homo sapiens
aaagtcttagacact

SEQ ID NO: 868626 - DNA, 15 bp, Homo sapiens
aagtcttagacactc

SEQ ID NO: 868627 - DNA, 15 bp, Homo sapiens
agtcttagacactcc

SEQ ID NO: 868628 - DNA, 15 bp, Homo sapiens
gtcttagacactcct

SEQ ID NO: 868629 - DNA, 15 bp, Homo sapiens
tcttagacactcctc

SEQ ID NO: 868630 - DNA, 15 bp, Homo sapiens
cttagacactcctcc

SEQ ID NO: 868631 - DNA, 15 bp, Homo sapiens
ttagacactcctccc

SEQ ID NO: 868632 - DNA, 15 bp, Homo sapiens
tagacactcctccct

SEQ ID NO: 868633 - DNA, 15 bp, Homo sapiens
agacactcctccctt

SEQ ID NO: 868634 - DNA, 15 bp, Homo sapiens
gacactcctccctta

SEQ ID NO: 868635 - DNA, 15 bp, Homo sapiens
acactcctcccttac

SEQ ID NO: 868636 - DNA, 15 bp, Homo sapiens
cactcctcccttacc

SEQ ID NO: 868637 - DNA, 15 bp, Homo sapiens
actcctcccttacca

SEQ ID NO: 868638 - DNA, 15 bp, Homo sapiens
ctcctcccttaccac

SEQ ID NO: 868639 - DNA, 15 bp, Homo sapiens
tcctcccttaccacg

SEQ ID NO: 868640 - DNA, 15 bp, Homo sapiens
cctcccttaccacgt

SEQ ID NO: 868641 - DNA, 15 bp, Homo sapiens
ctcccttaccacgtc

SEQ ID NO: 868642 - DNA, 15 bp, Homo sapiens
tcccttaccacgtct

SEQ ID NO: 868643 - DNA, 15 bp, Homo sapiens
cccttaccacgtctt

SEQ ID NO: 868644 - DNA, 15 bp, Homo sapiens
ccttaccacgtcttt

SEQ ID NO: 868645 - DNA, 15 bp, Homo sapiens
cttaccacgtctttc

SEQ ID NO: 868646 - DNA, 15 bp, Homo sapiens
ttaccacgtctttct

SEQ ID NO: 868647 - DNA, 15 bp, Homo sapiens
taccacgtctttcta

SEQ ID NO: 868648 - DNA, 15 bp, Homo sapiens
accacgtctttctat

SEQ ID NO: 868649 - DNA, 15 bp, Homo sapiens
ccacgtctttctatg

SEQ ID NO: 868650 - DNA, 15 bp, Homo sapiens
cacgtctttctatgt

SEQ ID NO: 868651 - DNA, 15 bp, Homo sapiens
acgtctttctatgtc

SEQ ID NO: 868652 - DNA, 15 bp, Homo sapiens
cgtctttctatgtcc

SEQ ID NO: 868653 - DNA, 15 bp, Homo sapiens
gtctttctatgtccc

SEQ ID NO: 868654 - DNA, 15 bp, Homo sapiens
tctttctatgtccca

SEQ ID NO: 868655 - DNA, 15 bp, Homo sapiens
ctttctatgtcccag

SEQ ID NO: 868656 - DNA, 15 bp, Homo sapiens
tttctatgtcccagg

SEQ ID NO: 868657 - DNA, 15 bp, Homo sapiens
ttctatgtcccaggt

SEQ ID NO: 868658 - DNA, 15 bp, Homo sapiens
tctatgtcccaggtg

SEQ ID NO: 868659 - DNA, 15 bp, Homo sapiens
ctatgtcccaggtgc

SEQ ID NO: 868660 - DNA, 15 bp, Homo sapiens
tatgtcccaggtgct

SEQ ID NO: 868661 - DNA, 15 bp, Homo sapiens
atgtcccaggtgctc

SEQ ID NO: 868662 - DNA, 15 bp, Homo sapiens
tgtcccaggtgctcc

SEQ ID NO: 868663 - DNA, 15 bp, Homo sapiens
gtcccaggtgctcca

SEQ ID NO: 868664 - DNA, 15 bp, Homo sapiens
tcccaggtgctccac

SEQ ID NO: 868665 - DNA, 15 bp, Homo sapiens
cccaggtgctccaca

SEQ ID NO: 868666 - DNA, 15 bp, Homo sapiens
ccaggtgctccacat

SEQ ID NO: 868667 - DNA, 15 bp, Homo sapiens
caggtgctccacatt

SEQ ID NO: 868668 - DNA, 15 bp, Homo sapiens
aggtgctccacattc

SEQ ID NO: 868669 - DNA, 15 bp, Homo sapiens
ggtgctccacattct

SEQ ID NO: 868670 - DNA, 15 bp, Homo sapiens
gtgctccacattctc

SEQ ID NO: 868671 - DNA, 15 bp, Homo sapiens
tgctccacattctcc

SEQ ID NO: 868672 - DNA, 15 bp, Homo sapiens
gctccacattctcca

SEQ ID NO: 868673 - DNA, 15 bp, Homo sapiens
ctccacattctccat

SEQ ID NO: 868674 - DNA, 15 bp, Homo sapiens
tccacattctccatc

SEQ ID NO: 868675 - DNA, 15 bp, Homo sapiens
ccacattctccatct

SEQ ID NO: 868676 - DNA, 15 bp, Homo sapiens
cacattctccatctg

SEQ ID NO: 868677 - DNA, 15 bp, Homo sapiens
acattctccatctga

SEQ ID NO: 868678 - DNA, 15 bp, Homo sapiens
cattctccatctgac

SEQ ID NO: 868679 - DNA, 15 bp, Homo sapiens
attctccatctgacc

SEQ ID NO: 868680 - DNA, 15 bp, Homo sapiens
ttctccatctgacct

SEQ ID NO: 868681 - DNA, 15 bp, Homo sapiens
tctccatctgacctg

SEQ ID NO: 868682 - DNA, 15 bp, Homo sapiens
ctccatctgacctgg

SEQ ID NO: 868683 - DNA, 15 bp, Homo sapiens
tccatctgacctggg

SEQ ID NO: 868684 - DNA, 15 bp, Homo sapiens
ccatctgacctggga

SEQ ID NO: 868685 - DNA, 15 bp, Homo sapiens
catctgacctgggag

SEQ ID NO: 868686 - DNA, 15 bp, Homo sapiens
atctgacctgggagc

SEQ ID NO: 868687 - DNA, 15 bp, Homo sapiens
tctgacctgggagca

SEQ ID NO: 868688 - DNA, 15 bp, Homo sapiens
ctgacctgggagcaa

SEQ ID NO: 868689 - DNA, 15 bp, Homo sapiens
tgacctgggagcaaa

SEQ ID NO: 868690 - DNA, 15 bp, Homo sapiens
gacctgggagcaaag

SEQ ID NO: 868691 - DNA, 15 bp, Homo sapiens
acctgggagcaaaga

SEQ ID NO: 868692 - DNA, 15 bp, Homo sapiens
cctgggagcaaagat

SEQ ID NO: 868693 - DNA, 15 bp, Homo sapiens
ctgggagcaaagatg

SEQ ID NO: 868694 - DNA, 15 bp, Homo sapiens
tgggagcaaagatgg

SEQ ID NO: 868695 - DNA, 15 bp, Homo sapiens
gggagcaaagatgga

SEQ ID NO: 868696 - DNA, 15 bp, Homo sapiens
ggagcaaagatggac

SEQ ID NO: 868697 - DNA, 15 bp, Homo sapiens
gagcaaagatggacc

SEQ ID NO: 868698 - DNA, 15 bp, Homo sapiens
agcaaagatggaccc

SEQ ID NO: 868699 - DNA, 15 bp, Homo sapiens
gcaaagatggacccc

SEQ ID NO: 868700 - DNA, 15 bp, Homo sapiens
caaagatggacccct

SEQ ID NO: 868701 - DNA, 15 bp, Homo sapiens
aaagatggacccctc

SEQ ID NO: 868702 - DNA, 15 bp, Homo sapiens
aagatggacccctcc

SEQ ID NO: 868703 - DNA, 15 bp, Homo sapiens
agatggacccctcct

SEQ ID NO: 868704 - DNA, 15 bp, Homo sapiens
gatggacccctcctg

SEQ ID NO: 868705 - DNA, 15 bp, Homo sapiens
atggacccctcctga

SEQ ID NO: 868706 - DNA, 15 bp, Homo sapiens
tggacccctcctgag

SEQ ID NO: 868707 - DNA, 15 bp, Homo sapiens
ggacccctcctgagc

SEQ ID NO: 868708 - DNA, 15 bp, Homo sapiens
gacccctcctgagcc

SEQ ID NO: 868709 - DNA, 15 bp, Homo sapiens
acccctcctgagccc

SEQ ID NO: 868710 - DNA, 15 bp, Homo sapiens
cccctcctgagccct

SEQ ID NO: 868711 - DNA, 15 bp, Homo sapiens
ccctcctgagccctc

SEQ ID NO: 868712 - DNA, 15 bp, Homo sapiens
cctcctgagccctct

SEQ ID NO: 868713 - DNA, 15 bp, Homo sapiens
ctcctgagccctctc

SEQ ID NO: 868714 - DNA, 15 bp, Homo sapiens
tcctgagccctctct

SEQ ID NO: 868715 - DNA, 15 bp, Homo sapiens
cctgagccctctctc

SEQ ID NO: 868716 - DNA, 15 bp, Homo sapiens
ctgagccctctctcc

SEQ ID NO: 868717 - DNA, 15 bp, Homo sapiens
tgagccctctctcca

SEQ ID NO: 868718 - DNA, 15 bp, Homo sapiens
gagccctctctccat

SEQ ID NO: 868719 - DNA, 15 bp, Homo sapiens
agccctctctccata

SEQ ID NO: 868720 - DNA, 15 bp, Homo sapiens
gccctctctccatat

SEQ ID NO: 868721 - DNA, 15 bp, Homo sapiens
ccctctctccatatc

SEQ ID NO: 868722 - DNA, 15 bp, Homo sapiens
cctctctccatatcc

SEQ ID NO: 868723 - DNA, 15 bp, Homo sapiens
ctctctccatatccc

SEQ ID NO: 868724 - DNA, 15 bp, Homo sapiens
tctctccatatccct

SEQ ID NO: 868725 - DNA, 15 bp, Homo sapiens
ctctccatatccctt

SEQ ID NO: 868726 - DNA, 15 bp, Homo sapiens
tctccatatcccttg

SEQ ID NO: 868727 - DNA, 15 bp, Homo sapiens
ctccatatcccttga

SEQ ID NO: 868728 - DNA, 15 bp, Homo sapiens
tccatatcccttgac

SEQ ID NO: 868729 - DNA, 15 bp, Homo sapiens
ccatatcccttgact

SEQ ID NO: 868730 - DNA, 15 bp, Homo sapiens
catatcccttgactt

SEQ ID NO: 868731 - DNA, 15 bp, Homo sapiens
atatcccttgacttc

SEQ ID NO: 868732 - DNA, 15 bp, Homo sapiens
tatcccttgacttcc

SEQ ID NO: 868733 - DNA, 15 bp, Homo sapiens
atcccttgacttcca

SEQ ID NO: 868734 - DNA, 15 bp, Homo sapiens
tcccttgacttccag

SEQ ID NO: 868735 - DNA, 15 bp, Homo sapiens
cccttgacttccagt

SEQ ID NO: 868736 - DNA, 15 bp, Homo sapiens
ccttgacttccagtt

SEQ ID NO: 868737 - DNA, 15 bp, Homo sapiens
cttgacttccagttt

SEQ ID NO: 868738 - DNA, 15 bp, Homo sapiens
ttgacttccagttta

SEQ ID NO: 868739 - DNA, 15 bp, Homo sapiens
tgacttccagtttac

SEQ ID NO: 868740 - DNA, 15 bp, Homo sapiens
gacttccagtttaca

SEQ ID NO: 868741 - DNA, 15 bp, Homo sapiens
acttccagtttacag

SEQ ID NO: 868742 - DNA, 15 bp, Homo sapiens
cttccagtttacaga

SEQ ID NO: 868743 - DNA, 15 bp, Homo sapiens
ttccagtttacagaa

SEQ ID NO: 868744 - DNA, 15 bp, Homo sapiens
tccagtttacagaaa

SEQ ID NO: 868745 - DNA, 15 bp, Homo sapiens
ccagtttacagaaag

SEQ ID NO: 868746 - DNA, 15 bp, Homo sapiens
cagtttacagaaaga

SEQ ID NO: 868747 - DNA, 15 bp, Homo sapiens
agtttacagaaagac

SEQ ID NO: 868748 - DNA, 15 bp, Homo sapiens
gtttacagaaagacc

SEQ ID NO: 868749 - DNA, 15 bp, Homo sapiens
tttacagaaagacct

SEQ ID NO: 868750 - DNA, 15 bp, Homo sapiens
ttacagaaagacctc

SEQ ID NO: 868751 - DNA, 15 bp, Homo sapiens
tacagaaagacctca

SEQ ID NO: 868752 - DNA, 15 bp, Homo sapiens
acagaaagacctcag

SEQ ID NO: 868753 - DNA, 15 bp, Homo sapiens
cagaaagacctcagg

SEQ ID NO: 868754 - DNA, 15 bp, Homo sapiens
agaaagacctcaggg

SEQ ID NO: 868755 - DNA, 15 bp, Homo sapiens
gaaagacctcagggc

SEQ ID NO: 868756 - DNA, 15 bp, Homo sapiens
aaagacctcagggcc

SEQ ID NO: 868757 - DNA, 15 bp, Homo sapiens
aagacctcagggccc

SEQ ID NO: 868758 - DNA, 15 bp, Homo sapiens
agacctcagggccct

SEQ ID NO: 868759 - DNA, 15 bp, Homo sapiens
gacctcagggccctt

SEQ ID NO: 868760 - DNA, 15 bp, Homo sapiens
acctcagggcccttt

SEQ ID NO: 868761 - DNA, 15 bp, Homo sapiens
cctcagggccctttg

SEQ ID NO: 868762 - DNA, 15 bp, Homo sapiens
ctcagggccctttgt

SEQ ID NO: 868763 - DNA, 15 bp, Homo sapiens
tcagggccctttgtt

SEQ ID NO: 868764 - DNA, 15 bp, Homo sapiens
cagggccctttgttt

SEQ ID NO: 868765 - DNA, 15 bp, Homo sapiens
agggccctttgtttt

SEQ ID NO: 868766 - DNA, 15 bp, Homo sapiens
gggccctttgtttta

SEQ ID NO: 868767 - DNA, 15 bp, Homo sapiens
ggccctttgttttac

SEQ ID NO: 868768 - DNA, 15 bp, Homo sapiens
gccctttgttttaca

SEQ ID NO: 868769 - DNA, 15 bp, Homo sapiens
ccctttgttttacat

SEQ ID NO: 868770 - DNA, 15 bp, Homo sapiens
cctttgttttacatt

SEQ ID NO: 868771 - DNA, 15 bp, Homo sapiens
ctttgttttacattt

SEQ ID NO: 868772 - DNA, 15 bp, Homo sapiens
tttgttttacatttg

SEQ ID NO: 868773 - DNA, 15 bp, Homo sapiens
ttgttttacatttga

SEQ ID NO: 868774 - DNA, 15 bp, Homo sapiens
tgttttacatttgaa

SEQ ID NO: 868775 - DNA, 15 bp, Homo sapiens
gttttacatttgaat

SEQ ID NO: 868776 - DNA, 15 bp, Homo sapiens
ttttacatttgaata

SEQ ID NO: 868777 - DNA, 15 bp, Homo sapiens
tttacatttgaatat

SEQ ID NO: 868778 - DNA, 15 bp, Homo sapiens
ttacatttgaatatc

SEQ ID NO: 868779 - DNA, 15 bp, Homo sapiens
tacatttgaatatct

SEQ ID NO: 868780 - DNA, 15 bp, Homo sapiens
acatttgaatatctg

SEQ ID NO: 868781 - DNA, 15 bp, Homo sapiens
catttgaatatctgg

SEQ ID NO: 868782 - DNA, 15 bp, Homo sapiens
atttgaatatctggc

SEQ ID NO: 868783 - DNA, 15 bp, Homo sapiens
tttgaatatctggca

SEQ ID NO: 868784 - DNA, 15 bp, Homo sapiens
ttgaatatctggcac

SEQ ID NO: 868785 - DNA, 15 bp, Homo sapiens
tgaatatctggcact

SEQ ID NO: 868786 - DNA, 15 bp, Homo sapiens
gaatatctggcactg

SEQ ID NO: 868787 - DNA, 15 bp, Homo sapiens
aatatctggcactgg

SEQ ID NO: 868788 - DNA, 15 bp, Homo sapiens
atatctggcactggc

SEQ ID NO: 868789 - DNA, 15 bp, Homo sapiens
tatctggcactggca

SEQ ID NO: 868790 - DNA, 15 bp, Homo sapiens
atctggcactggcaa

SEQ ID NO: 868791 - DNA, 15 bp, Homo sapiens
tctggcactggcaat

SEQ ID NO: 868792 - DNA, 15 bp, Homo sapiens
ctggcactggcaatg

SEQ ID NO: 868793 - DNA, 15 bp, Homo sapiens
tggcactggcaatga

SEQ ID NO: 868794 - DNA, 15 bp, Homo sapiens
ggcactggcaatgaa

SEQ ID NO: 868795 - DNA, 15 bp, Homo sapiens
gcactggcaatgaag

SEQ ID NO: 868796 - DNA, 15 bp, Homo sapiens
cactggcaatgaagt

SEQ ID NO: 868797 - DNA, 15 bp, Homo sapiens
actggcaatgaagtc

SEQ ID NO: 868798 - DNA, 15 bp, Homo sapiens
ctggcaatgaagtca

SEQ ID NO: 868799 - DNA, 15 bp, Homo sapiens
tggcaatgaagtcat

SEQ ID NO: 868800 - DNA, 15 bp, Homo sapiens
ggcaatgaagtcatg

SEQ ID NO: 868801 - DNA, 15 bp, Homo sapiens
gcaatgaagtcatgg

SEQ ID NO: 868802 - DNA, 15 bp, Homo sapiens
caatgaagtcatggg

SEQ ID NO: 868803 - DNA, 15 bp, Homo sapiens
aatgaagtcatgggt

SEQ ID NO: 868804 - DNA, 15 bp, Homo sapiens
atgaagtcatgggtc

SEQ ID NO: 868805 - DNA, 15 bp, Homo sapiens
tgaagtcatgggtcc

SEQ ID NO: 868806 - DNA, 15 bp, Homo sapiens
gaagtcatgggtcca

SEQ ID NO: 868807 - DNA, 15 bp, Homo sapiens
aagtcatgggtccat

SEQ ID NO: 868808 - DNA, 15 bp, Homo sapiens
agtcatgggtccatt

SEQ ID NO: 868809 - DNA, 15 bp, Homo sapiens
gtcatgggtccattt

SEQ ID NO: 868810 - DNA, 15 bp, Homo sapiens
tcatgggtccatttt

SEQ ID NO: 868811 - DNA, 15 bp, Homo sapiens
catgggtccattttt

SEQ ID NO: 868812 - DNA, 15 bp, Homo sapiens
atgggtccatttttg

SEQ ID NO: 868813 - DNA, 15 bp, Homo sapiens
tgggtccatttttgc

SEQ ID NO: 868814 - DNA, 15 bp, Homo sapiens
gggtccatttttgct

SEQ ID NO: 868815 - DNA, 15 bp, Homo sapiens
ggtccatttttgcta

SEQ ID NO: 868816 - DNA, 15 bp, Homo sapiens
gtccatttttgctaa

SEQ ID NO: 868817 - DNA, 15 bp, Homo sapiens
tccatttttgctaaa

SEQ ID NO: 868818 - DNA, 15 bp, Homo sapiens
ccatttttgctaaac

SEQ ID NO: 868819 - DNA, 15 bp, Homo sapiens
catttttgctaaacc

SEQ ID NO: 868820 - DNA, 15 bp, Homo sapiens
atttttgctaaaccc

SEQ ID NO: 868821 - DNA, 15 bp, Homo sapiens
tttttgctaaacccc

SEQ ID NO: 868822 - DNA, 15 bp, Homo sapiens
ttttgctaaaccccc

SEQ ID NO: 868823 - DNA, 15 bp, Homo sapiens
tttgctaaaccccct

SEQ ID NO: 868824 - DNA, 15 bp, Homo sapiens
ttgctaaaccccctt

SEQ ID NO: 868825 - DNA, 15 bp, Homo sapiens
tgctaaacccccttt

SEQ ID NO: 868826 - DNA, 15 bp, Homo sapiens
gctaaaccccctttg

SEQ ID NO: 868827 - DNA, 15 bp, Homo sapiens
ctaaaccccctttgt

SEQ ID NO: 868828 - DNA, 15 bp, Homo sapiens
taaaccccctttgtt

SEQ ID NO: 868829 - DNA, 15 bp, Homo sapiens
aaaccccctttgttg

SEQ ID NO: 868830 - DNA, 15 bp, Homo sapiens
aaccccctttgttga

SEQ ID NO: 868831 - DNA, 15 bp, Homo sapiens
accccctttgttgat

SEQ ID NO: 868832 - DNA, 15 bp, Homo sapiens
ccccctttgttgatt

SEQ ID NO: 868833 - DNA, 15 bp, Homo sapiens
cccctttgttgattg

SEQ ID NO: 868834 - DNA, 15 bp, Homo sapiens
ccctttgttgattgg

SEQ ID NO: 868835 - DNA, 15 bp, Homo sapiens
cctttgttgattggc

SEQ ID NO: 868836 - DNA, 15 bp, Homo sapiens
ctttgttgattggca

SEQ ID NO: 868837 - DNA, 15 bp, Homo sapiens
tttgttgattggcag

SEQ ID NO: 868838 - DNA, 15 bp, Homo sapiens
ttgttgattggcaga

SEQ ID NO: 868839 - DNA, 15 bp, Homo sapiens
tgttgattggcagaa

SEQ ID NO: 868840 - DNA, 15 bp, Homo sapiens
gttgattggcagaaa

SEQ ID NO: 868841 - DNA, 15 bp, Homo sapiens
ttgattggcagaaaa

SEQ ID NO: 868842 - DNA, 15 bp, Homo sapiens
tgattggcagaaaac

SEQ ID NO: 868843 - DNA, 15 bp, Homo sapiens
gattggcagaaaaca

SEQ ID NO: 868844 - DNA, 15 bp, Homo sapiens
attggcagaaaacaa

SEQ ID NO: 868845 - DNA, 15 bp, Homo sapiens
ttggcagaaaacaag

SEQ ID NO: 868846 - DNA, 15 bp, Homo sapiens
tggcagaaaacaagg

SEQ ID NO: 868847 - DNA, 15 bp, Homo sapiens
ggcagaaaacaaggg

SEQ ID NO: 868848 - DNA, 15 bp, Homo sapiens
gcagaaaacaagggc

SEQ ID NO: 868849 - DNA, 15 bp, Homo sapiens
cagaaaacaagggct

SEQ ID NO: 868850 - DNA, 15 bp, Homo sapiens
agaaaacaagggctc

SEQ ID NO: 868851 - DNA, 15 bp, Homo sapiens
gaaaacaagggctct

SEQ ID NO: 868852 - DNA, 15 bp, Homo sapiens
aaaacaagggctctc

SEQ ID NO: 868853 - DNA, 15 bp, Homo sapiens
aaacaagggctctcc

SEQ ID NO: 868854 - DNA, 15 bp, Homo sapiens
aacaagggctctccc

SEQ ID NO: 868855 - DNA, 15 bp, Homo sapiens
acaagggctctccca

SEQ ID NO: 868856 - DNA, 15 bp, Homo sapiens
caagggctctcccag

SEQ ID NO: 868857 - DNA, 15 bp, Homo sapiens
aagggctctcccagc

SEQ ID NO: 868858 - DNA, 15 bp, Homo sapiens
agggctctcccagct

SEQ ID NO: 868859 - DNA, 15 bp, Homo sapiens
gggctctcccagctc

SEQ ID NO: 868860 - DNA, 15 bp, Homo sapiens
ggctctcccagctcc

SEQ ID NO: 868861 - DNA, 15 bp, Homo sapiens
gctctcccagctccc

SEQ ID NO: 868862 - DNA, 15 bp, Homo sapiens
ctctcccagctccct

SEQ ID NO: 868863 - DNA, 15 bp, Homo sapiens
tctcccagctccctg

SEQ ID NO: 868864 - DNA, 15 bp, Homo sapiens
ctcccagctccctgt

SEQ ID NO: 868865 - DNA, 15 bp, Homo sapiens
tcccagctccctgtg

SEQ ID NO: 868866 - DNA, 15 bp, Homo sapiens
cccagctccctgtgg

SEQ ID NO: 868867 - DNA, 15 bp, Homo sapiens
ccagctccctgtggc

SEQ ID NO: 868868 - DNA, 15 bp, Homo sapiens
cagctccctgtggct

SEQ ID NO: 868869 - DNA, 15 bp, Homo sapiens
agctccctgtggctt

SEQ ID NO: 868870 - DNA, 15 bp, Homo sapiens
gctccctgtggcttt

SEQ ID NO: 868871 - DNA, 15 bp, Homo sapiens
ctccctgtggctttt

SEQ ID NO: 868872 - DNA, 15 bp, Homo sapiens
tccctgtggcttttc

SEQ ID NO: 868873 - DNA, 15 bp, Homo sapiens
ccctgtggcttttcc

SEQ ID NO: 868874 - DNA, 15 bp, Homo sapiens
cctgtggcttttcca

SEQ ID NO: 868875 - DNA, 15 bp, Homo sapiens
ctgtggcttttccag

SEQ ID NO: 868876 - DNA, 15 bp, Homo sapiens
tgtggcttttccagt

SEQ ID NO: 868877 - DNA, 15 bp, Homo sapiens
gtggcttttccagtt

SEQ ID NO: 868878 - DNA, 15 bp, Homo sapiens
tggcttttccagttg

SEQ ID NO: 868879 - DNA, 15 bp, Homo sapiens
ggcttttccagttgc

SEQ ID NO: 868880 - DNA, 15 bp, Homo sapiens
gcttttccagttgcc

SEQ ID NO: 868881 - DNA, 15 bp, Homo sapiens
cttttccagttgccc

SEQ ID NO: 868882 - DNA, 15 bp, Homo sapiens
ttttccagttgcccc

SEQ ID NO: 868883 - DNA, 15 bp, Homo sapiens
tttccagttgccccc

SEQ ID NO: 868884 - DNA, 15 bp, Homo sapiens
ttccagttgcccccg

SEQ ID NO: 868885 - DNA, 15 bp, Homo sapiens
tccagttgcccccgc

SEQ ID NO: 868886 - DNA, 15 bp, Homo sapiens
ccagttgcccccgcc

SEQ ID NO: 868887 - DNA, 15 bp, Homo sapiens
cagttgcccccgcct

SEQ ID NO: 868888 - DNA, 15 bp, Homo sapiens
agttgcccccgcctc

SEQ ID NO: 868889 - DNA, 15 bp, Homo sapiens
gttgcccccgcctct

SEQ ID NO: 868890 - DNA, 15 bp, Homo sapiens
ttgcccccgcctctt

SEQ ID NO: 868891 - DNA, 15 bp, Homo sapiens
tgcccccgcctcttc

SEQ ID NO: 868892 - DNA, 15 bp, Homo sapiens
gcccccgcctcttcc

SEQ ID NO: 868893 - DNA, 15 bp, Homo sapiens
cccccgcctcttccg

SEQ ID NO: 868894 - DNA, 15 bp, Homo sapiens
ccccgcctcttccga

SEQ ID NO: 868895 - DNA, 15 bp, Homo sapiens
cccgcctcttccgac

SEQ ID NO: 868896 - DNA, 15 bp, Homo sapiens
ccgcctcttccgaca

SEQ ID NO: 868897 - DNA, 15 bp, Homo sapiens
cgcctcttccgacac

SEQ ID NO: 868898 - DNA, 15 bp, Homo sapiens
gcctcttccgacacc

SEQ ID NO: 868899 - DNA, 15 bp, Homo sapiens
cctcttccgacacct

SEQ ID NO: 868900 - DNA, 15 bp, Homo sapiens
ctcttccgacacctg

SEQ ID NO: 868901 - DNA, 15 bp, Homo sapiens
tcttccgacacctgc

SEQ ID NO: 868902 - DNA, 15 bp, Homo sapiens
cttccgacacctgct

SEQ ID NO: 868903 - DNA, 15 bp, Homo sapiens
ttccgacacctgctt

SEQ ID NO: 868904 - DNA, 15 bp, Homo sapiens
tccgacacctgcttt

SEQ ID NO: 868905 - DNA, 15 bp, Homo sapiens
ccgacacctgctttc

SEQ ID NO: 868906 - DNA, 15 bp, Homo sapiens
cgacacctgctttct

SEQ ID NO: 868907 - DNA, 15 bp, Homo sapiens
gacacctgctttcta

SEQ ID NO: 868908 - DNA, 15 bp, Homo sapiens
acacctgctttctac

SEQ ID NO: 868909 - DNA, 15 bp, Homo sapiens
cacctgctttctact

SEQ ID NO: 868910 - DNA, 15 bp, Homo sapiens
acctgctttctactc

SEQ ID NO: 868911 - DNA, 15 bp, Homo sapiens
cctgctttctactct

SEQ ID NO: 868912 - DNA, 15 bp, Homo sapiens
ctgctttctactctc

SEQ ID NO: 868913 - DNA, 15 bp, Homo sapiens
tgctttctactctcc

SEQ ID NO: 868914 - DNA, 15 bp, Homo sapiens
gctttctactctcca

SEQ ID NO: 868915 - DNA, 15 bp, Homo sapiens
ctttctactctccag

SEQ ID NO: 868916 - DNA, 15 bp, Homo sapiens
tttctactctccagt

SEQ ID NO: 868917 - DNA, 15 bp, Homo sapiens
ttctactctccagta

SEQ ID NO: 868918 - DNA, 15 bp, Homo sapiens
tctactctccagtaa

SEQ ID NO: 868919 - DNA, 15 bp, Homo sapiens
ctactctccagtaaa

SEQ ID NO: 868920 - DNA, 15 bp, Homo sapiens
tactctccagtaaat

SEQ ID NO: 868921 - DNA, 15 bp, Homo sapiens
actctccagtaaatg

SEQ ID NO: 868922 - DNA, 15 bp, Homo sapiens
ctctccagtaaatgg

SEQ ID NO: 868923 - DNA, 15 bp, Homo sapiens
tctccagtaaatggg

SEQ ID NO: 868924 - DNA, 15 bp, Homo sapiens
ctccagtaaatggga

SEQ ID NO: 868925 - DNA, 15 bp, Homo sapiens
tccagtaaatgggac

SEQ ID NO: 868926 - DNA, 15 bp, Homo sapiens
ccagtaaatgggact

SEQ ID NO: 868927 - DNA, 15 bp, Homo sapiens
cagtaaatgggactt

SEQ ID NO: 868928 - DNA, 15 bp, Homo sapiens
agtaaatgggacttt

SEQ ID NO: 868929 - DNA, 15 bp, Homo sapiens
gtaaatgggactttc

SEQ ID NO: 868930 - DNA, 15 bp, Homo sapiens
taaatgggactttca

SEQ ID NO: 868931 - DNA, 15 bp, Homo sapiens
aaatgggactttcag

SEQ ID NO: 868932 - DNA, 15 bp, Homo sapiens
aatgggactttcagg

SEQ ID NO: 868933 - DNA, 15 bp, Homo sapiens
atgggactttcaggt

SEQ ID NO: 868934 - DNA, 15 bp, Homo sapiens
tgggactttcaggtc

SEQ ID NO: 868935 - DNA, 15 bp, Homo sapiens
gggactttcaggtcc

SEQ ID NO: 868936 - DNA, 15 bp, Homo sapiens
ggactttcaggtcct

SEQ ID NO: 868937 - DNA, 15 bp, Homo sapiens
gactttcaggtccta

SEQ ID NO: 868938 - DNA, 15 bp, Homo sapiens
actttcaggtcctat

SEQ ID NO: 868939 - DNA, 15 bp, Homo sapiens
ctttcaggtcctatt

SEQ ID NO: 868940 - DNA, 15 bp, Homo sapiens
tttcaggtcctattc

SEQ ID NO: 868941 - DNA, 15 bp, Homo sapiens
ttcaggtcctattcc

SEQ ID NO: 868942 - DNA, 15 bp, Homo sapiens
tcaggtcctattcct

SEQ ID NO: 868943 - DNA, 15 bp, Homo sapiens
caggtcctattcctc

SEQ ID NO: 868944 - DNA, 15 bp, Homo sapiens
aggtcctattcctca

SEQ ID NO: 868945 - DNA, 15 bp, Homo sapiens
ggtcctattcctcat

SEQ ID NO: 868946 - DNA, 15 bp, Homo sapiens
gtcctattcctcatg

SEQ ID NO: 868947 - DNA, 15 bp, Homo sapiens
tctaatagattagat

SEQ ID NO: 868948 - DNA, 15 bp, Homo sapiens
ctaatagattagatt

SEQ ID NO: 868949 - DNA, 15 bp, Homo sapiens
taatagattagatta

SEQ ID NO: 868950 - DNA, 15 bp, Homo sapiens
aatagattagattag

SEQ ID NO: 868951 - DNA, 15 bp, Homo sapiens
atagattagattaga

SEQ ID NO: 868952 - DNA, 15 bp, Homo sapiens
tagattagattagat

SEQ ID NO: 868953 - DNA, 15 bp, Homo sapiens
agattagattagatc

SEQ ID NO: 868954 - DNA, 15 bp, Homo sapiens
gattagattagatcc

SEQ ID NO: 868955 - DNA, 15 bp, Homo sapiens
attagattagatccc

SEQ ID NO: 868956 - DNA, 15 bp, Homo sapiens
ttagattagatccct

SEQ ID NO: 868957 - DNA, 15 bp, Homo sapiens
tagattagatccctg

SEQ ID NO: 868958 - DNA, 15 bp, Homo sapiens
agattagatccctgc

SEQ ID NO: 868959 - DNA, 15 bp, Homo sapiens
gattagatccctgcc

SEQ ID NO: 868960 - DNA, 15 bp, Homo sapiens
attagatccctgcct

SEQ ID NO: 868961 - DNA, 15 bp, Homo sapiens
ttagatccctgcctt

SEQ ID NO: 868962 - DNA, 15 bp, Homo sapiens
tagatccctgccttc

SEQ ID NO: 868963 - DNA, 15 bp, Homo sapiens
agatccctgccttca

SEQ ID NO: 868964 - DNA, 15 bp, Homo sapiens
gatccctgccttcaa

SEQ ID NO: 868965 - DNA, 15 bp, Homo sapiens
atccctgccttcaaa

SEQ ID NO: 868966 - DNA, 15 bp, Homo sapiens
tccctgccttcaaaa

SEQ ID NO: 868967 - DNA, 15 bp, Homo sapiens
ccctgccttcaaaat

SEQ ID NO: 868968 - DNA, 15 bp, Homo sapiens
cctgccttcaaaatg

SEQ ID NO: 868969 - DNA, 15 bp, Homo sapiens
ctgccttcaaaatgc

SEQ ID NO: 868970 - DNA, 15 bp, Homo sapiens
tgccttcaaaatgct

SEQ ID NO: 868971 - DNA, 15 bp, Homo sapiens
gccttcaaaatgctt

SEQ ID NO: 868972 - DNA, 15 bp, Homo sapiens
ccttcaaaatgctta

SEQ ID NO: 868973 - DNA, 15 bp, Homo sapiens
cttcaaaatgcttat

SEQ ID NO: 868974 - DNA, 15 bp, Homo sapiens
ttcaaaatgcttata

SEQ ID NO: 868975 - DNA, 15 bp, Homo sapiens
tcaaaatgcttatag

SEQ ID NO: 868976 - DNA, 15 bp, Homo sapiens
caaaatgcttatagt

SEQ ID NO: 868977 - DNA, 15 bp, Homo sapiens
aaaatgcttatagtt

SEQ ID NO: 868978 - DNA, 15 bp, Homo sapiens
aaatgcttatagttt

SEQ ID NO: 868979 - DNA, 15 bp, Homo sapiens
aatgcttatagttta

SEQ ID NO: 868980 - DNA, 15 bp, Homo sapiens
atgcttatagtttag

SEQ ID NO: 868981 - DNA, 15 bp, Homo sapiens
tgcttatagtttagc

SEQ ID NO: 868982 - DNA, 15 bp, Homo sapiens
gcttatagtttagca

SEQ ID NO: 868983 - DNA, 15 bp, Homo sapiens
cttatagtttagcag

SEQ ID NO: 868984 - DNA, 15 bp, Homo sapiens
ttatagtttagcaga

SEQ ID NO: 868985 - DNA, 15 bp, Homo sapiens
tatagtttagcagag

SEQ ID NO: 868986 - DNA, 15 bp, Homo sapiens
atagtttagcagagg

SEQ ID NO: 868987 - DNA, 15 bp, Homo sapiens
tagtttagcagagga

SEQ ID NO: 868988 - DNA, 15 bp, Homo sapiens
agtttagcagaggag

SEQ ID NO: 868989 - DNA, 15 bp, Homo sapiens
gtttagcagaggaga

SEQ ID NO: 868990 - DNA, 15 bp, Homo sapiens
tttagcagaggagaa

SEQ ID NO: 868991 - DNA, 15 bp, Homo sapiens
ttagcagaggagaag

SEQ ID NO: 868992 - DNA, 15 bp, Homo sapiens
tagcagaggagaaga

SEQ ID NO: 868993 - DNA, 15 bp, Homo sapiens
agcagaggagaagac

SEQ ID NO: 868994 - DNA, 15 bp, Homo sapiens
gcagaggagaagaca

SEQ ID NO: 868995 - DNA, 15 bp, Homo sapiens
cagaggagaagacaa

SEQ ID NO: 868996 - DNA, 15 bp, Homo sapiens
agaggagaagacaag

SEQ ID NO: 868997 - DNA, 15 bp, Homo sapiens
gaggagaagacaagc

SEQ ID NO: 868998 - DNA, 15 bp, Homo sapiens
aggagaagacaagca

SEQ ID NO: 868999 - DNA, 15 bp, Homo sapiens
ggagaagacaagcac

SEQ ID NO: 869000 - DNA, 15 bp, Homo sapiens
gagaagacaagcaca

SEQ ID NO: 869001 - DNA, 15 bp, Homo sapiens
agaagacaagcacat

SEQ ID NO: 869002 - DNA, 15 bp, Homo sapiens
gaagacaagcacata

SEQ ID NO: 869003 - DNA, 15 bp, Homo sapiens
aagacaagcacataa

SEQ ID NO: 869004 - DNA, 15 bp, Homo sapiens
agacaagcacataaa

SEQ ID NO: 869005 - DNA, 15 bp, Homo sapiens
gacaagcacataaaa

SEQ ID NO: 869006 - DNA, 15 bp, Homo sapiens
acaagcacataaaaa

SEQ ID NO: 869007 - DNA, 15 bp, Homo sapiens
caagcacataaaaac

SEQ ID NO: 869008 - DNA, 15 bp, Homo sapiens
aagcacataaaaaca

SEQ ID NO: 869009 - DNA, 15 bp, Homo sapiens
agcacataaaaacac

SEQ ID NO: 869010 - DNA, 15 bp, Homo sapiens
gcacataaaaacaca

SEQ ID NO: 869011 - DNA, 15 bp, Homo sapiens
cacataaaaacacag

SEQ ID NO: 869012 - DNA, 15 bp, Homo sapiens
acataaaaacacaga

SEQ ID NO: 869013 - DNA, 15 bp, Homo sapiens
cataaaaacacagaa

SEQ ID NO: 869014 - DNA, 15 bp, Homo sapiens
ataaaaacacagaat

SEQ ID NO: 869015 - DNA, 15 bp, Homo sapiens
taaaaacacagaatt

SEQ ID NO: 869016 - DNA, 15 bp, Homo sapiens
aaaaacacagaattg

SEQ ID NO: 869017 - DNA, 15 bp, Homo sapiens
aaaacacagaattgg

SEQ ID NO: 869018 - DNA, 15 bp, Homo sapiens
aaacacagaattggg

SEQ ID NO: 869019 - DNA, 15 bp, Homo sapiens
aacacagaattgggt

SEQ ID NO: 869020 - DNA, 15 bp, Homo sapiens
acacagaattgggta

SEQ ID NO: 869021 - DNA, 15 bp, Homo sapiens
cacagaattgggtaa

SEQ ID NO: 869022 - DNA, 15 bp, Homo sapiens
acagaattgggtaag

SEQ ID NO: 869023 - DNA, 15 bp, Homo sapiens
cagaattgggtaaga

SEQ ID NO: 869024 - DNA, 15 bp, Homo sapiens
agaattgggtaagaa

SEQ ID NO: 869025 - DNA, 15 bp, Homo sapiens
gaattgggtaagaac

SEQ ID NO: 869026 - DNA, 15 bp, Homo sapiens
aattgggtaagaaca

SEQ ID NO: 869027 - DNA, 15 bp, Homo sapiens
attgggtaagaacaa

SEQ ID NO: 869028 - DNA, 15 bp, Homo sapiens
ttgggtaagaacaag

SEQ ID NO: 869029 - DNA, 15 bp, Homo sapiens
tgggtaagaacaagc

SEQ ID NO: 869030 - DNA, 15 bp, Homo sapiens
gggtaagaacaagct

SEQ ID NO: 869031 - DNA, 15 bp, Homo sapiens
ggtaagaacaagctg

SEQ ID NO: 869032 - DNA, 15 bp, Homo sapiens
gtaagaacaagctgg

SEQ ID NO: 869033 - DNA, 15 bp, Homo sapiens
taagaacaagctggg

SEQ ID NO: 869034 - DNA, 15 bp, Homo sapiens
aagaacaagctgggg

SEQ ID NO: 869035 - DNA, 15 bp, Homo sapiens
agaacaagctggggg

SEQ ID NO: 869036 - DNA, 15 bp, Homo sapiens
gaacaagctgggggt

SEQ ID NO: 869037 - DNA, 15 bp, Homo sapiens
aacaagctgggggtt

SEQ ID NO: 869038 - DNA, 15 bp, Homo sapiens
acaagctgggggttc

SEQ ID NO: 869039 - DNA, 15 bp, Homo sapiens
caagctgggggttcc

SEQ ID NO: 869040 - DNA, 15 bp, Homo sapiens
aagctgggggttcca

SEQ ID NO: 869041 - DNA, 15 bp, Homo sapiens
agctgggggttccac

SEQ ID NO: 869042 - DNA, 15 bp, Homo sapiens
gctgggggttccact

SEQ ID NO: 869043 - DNA, 15 bp, Homo sapiens
ctgggggttccacta

SEQ ID NO: 869044 - DNA, 15 bp, Homo sapiens
tgggggttccactag

SEQ ID NO: 869045 - DNA, 15 bp, Homo sapiens
gggggttccactagc

SEQ ID NO: 869046 - DNA, 15 bp, Homo sapiens
ggggttccactagca

SEQ ID NO: 869047 - DNA, 15 bp, Homo sapiens
gggttccactagcat

SEQ ID NO: 869048 - DNA, 15 bp, Homo sapiens
ggttccactagcatg

SEQ ID NO: 869049 - DNA, 15 bp, Homo sapiens
gttccactagcatgg

SEQ ID NO: 869050 - DNA, 15 bp, Homo sapiens
ttccactagcatggg

SEQ ID NO: 869051 - DNA, 15 bp, Homo sapiens
tccactagcatgggc

SEQ ID NO: 869052 - DNA, 15 bp, Homo sapiens
ccactagcatgggct

SEQ ID NO: 869053 - DNA, 15 bp, Homo sapiens
cactagcatgggctg

SEQ ID NO: 869054 - DNA, 15 bp, Homo sapiens
actagcatgggctgt

SEQ ID NO: 869055 - DNA, 15 bp, Homo sapiens
ctagcatgggctgtg

SEQ ID NO: 869056 - DNA, 15 bp, Homo sapiens
tagcatgggctgtga

SEQ ID NO: 869057 - DNA, 15 bp, Homo sapiens
agcatgggctgtgag

SEQ ID NO: 869058 - DNA, 15 bp, Homo sapiens
gcatgggctgtgaga

SEQ ID NO: 869059 - DNA, 15 bp, Homo sapiens
catgggctgtgagaa

SEQ ID NO: 869060 - DNA, 15 bp, Homo sapiens
atgggctgtgagaat

SEQ ID NO: 869061 - DNA, 15 bp, Homo sapiens
tgggctgtgagaata

SEQ ID NO: 869062 - DNA, 15 bp, Homo sapiens
gggctgtgagaatag

SEQ ID NO: 869063 - DNA, 15 bp, Homo sapiens
ggctgtgagaataga

SEQ ID NO: 869064 - DNA, 15 bp, Homo sapiens
gctgtgagaatagaa

SEQ ID NO: 869065 - DNA, 15 bp, Homo sapiens
ctgtgagaatagaaa

SEQ ID NO: 869066 - DNA, 15 bp, Homo sapiens
tgtgagaatagaaag

SEQ ID NO: 869067 - DNA, 15 bp, Homo sapiens
gtgagaatagaaaga

SEQ ID NO: 869068 - DNA, 15 bp, Homo sapiens
tgagaatagaaagag

SEQ ID NO: 869069 - DNA, 15 bp, Homo sapiens
gagaatagaaagagc

SEQ ID NO: 869070 - DNA, 15 bp, Homo sapiens
agaatagaaagagct

SEQ ID NO: 869071 - DNA, 15 bp, Homo sapiens
gaatagaaagagctg

SEQ ID NO: 869072 - DNA, 15 bp, Homo sapiens
aatagaaagagctgt

SEQ ID NO: 869073 - DNA, 15 bp, Homo sapiens
atagaaagagctgtc

SEQ ID NO: 869074 - DNA, 15 bp, Homo sapiens
tagaaagagctgtca

SEQ ID NO: 869075 - DNA, 15 bp, Homo sapiens
agaaagagctgtcat

SEQ ID NO: 869076 - DNA, 15 bp, Homo sapiens
gaaagagctgtcatt

SEQ ID NO: 869077 - DNA, 15 bp, Homo sapiens
aaagagctgtcatta

SEQ ID NO: 869078 - DNA, 15 bp, Homo sapiens
aagagctgtcattac

SEQ ID NO: 869079 - DNA, 15 bp, Homo sapiens
agagctgtcattacc

SEQ ID NO: 869080 - DNA, 15 bp, Homo sapiens
gagctgtcattacct

SEQ ID NO: 869081 - DNA, 15 bp, Homo sapiens
agctgtcattacctc

SEQ ID NO: 869082 - DNA, 15 bp, Homo sapiens
gctgtcattacctct

SEQ ID NO: 869083 - DNA, 15 bp, Homo sapiens
ctgtcattacctctg

SEQ ID NO: 869084 - DNA, 15 bp, Homo sapiens
tgtcattacctctgg

SEQ ID NO: 869085 - DNA, 15 bp, Homo sapiens
gtcattacctctggt

SEQ ID NO: 869086 - DNA, 15 bp, Homo sapiens
tcattacctctggtt

SEQ ID NO: 869087 - DNA, 15 bp, Homo sapiens
cattacctctggttt

SEQ ID NO: 869088 - DNA, 15 bp, Homo sapiens
attacctctggtttg

SEQ ID NO: 869089 - DNA, 15 bp, Homo sapiens
ttacctctggtttgg

SEQ ID NO: 869090 - DNA, 15 bp, Homo sapiens
tacctctggtttggg

SEQ ID NO: 869091 - DNA, 15 bp, Homo sapiens
acctctggtttggga

SEQ ID NO: 869092 - DNA, 15 bp, Homo sapiens
cctctggtttgggag

SEQ ID NO: 869093 - DNA, 15 bp, Homo sapiens
ctctggtttgggagg

SEQ ID NO: 869094 - DNA, 15 bp, Homo sapiens
tctggtttgggaggc

SEQ ID NO: 869095 - DNA, 15 bp, Homo sapiens
ctggtttgggaggct

SEQ ID NO: 869096 - DNA, 15 bp, Homo sapiens
tggtttgggaggctg

SEQ ID NO: 869097 - DNA, 15 bp, Homo sapiens
ggtttgggaggctga

SEQ ID NO: 869098 - DNA, 15 bp, Homo sapiens
gtttgggaggctgag

SEQ ID NO: 869099 - DNA, 15 bp, Homo sapiens
tttgggaggctgagc

SEQ ID NO: 869100 - DNA, 15 bp, Homo sapiens
ttgggaggctgagcc

SEQ ID NO: 869101 - DNA, 15 bp, Homo sapiens
tgggaggctgagcct

SEQ ID NO: 869102 - DNA, 15 bp, Homo sapiens
gggaggctgagcctg

SEQ ID NO: 869103 - DNA, 15 bp, Homo sapiens
ggaggctgagcctgg

SEQ ID NO: 869104 - DNA, 15 bp, Homo sapiens
gaggctgagcctggt

SEQ ID NO: 869105 - DNA, 15 bp, Homo sapiens
aggctgagcctggtt

SEQ ID NO: 869106 - DNA, 15 bp, Homo sapiens
ggctgagcctggttt

SEQ ID NO: 869107 - DNA, 15 bp, Homo sapiens
gctgagcctggttta

SEQ ID NO: 869108 - DNA, 15 bp, Homo sapiens
ctgagcctggtttag

SEQ ID NO: 869109 - DNA, 15 bp, Homo sapiens
tgagcctggtttagg

SEQ ID NO: 869110 - DNA, 15 bp, Homo sapiens
gagcctggtttagga

SEQ ID NO: 869111 - DNA, 15 bp, Homo sapiens
agcctggtttaggag

SEQ ID NO: 869112 - DNA, 15 bp, Homo sapiens
gcctggtttaggagg

SEQ ID NO: 869113 - DNA, 15 bp, Homo sapiens
cctggtttaggagga

SEQ ID NO: 869114 - DNA, 15 bp, Homo sapiens
ctggtttaggaggag

SEQ ID NO: 869115 - DNA, 15 bp, Homo sapiens
tggtttaggaggagg

SEQ ID NO: 869116 - DNA, 15 bp, Homo sapiens
ggtttaggaggaggt

SEQ ID NO: 869117 - DNA, 15 bp, Homo sapiens
gtttaggaggaggtc

SEQ ID NO: 869118 - DNA, 15 bp, Homo sapiens
tttaggaggaggtct

SEQ ID NO: 869119 - DNA, 15 bp, Homo sapiens
ttaggaggaggtctt

SEQ ID NO: 869120 - DNA, 15 bp, Homo sapiens
taggaggaggtctta

SEQ ID NO: 869121 - DNA, 15 bp, Homo sapiens
aggaggaggtcttat

SEQ ID NO: 869122 - DNA, 15 bp, Homo sapiens
ggaggaggtcttatt

SEQ ID NO: 869123 - DNA, 15 bp, Homo sapiens
gaggaggtcttattg

SEQ ID NO: 869124 - DNA, 15 bp, Homo sapiens
aggaggtcttattga

SEQ ID NO: 869125 - DNA, 15 bp, Homo sapiens
ggaggtcttattgaa

SEQ ID NO: 869126 - DNA, 15 bp, Homo sapiens
gaggtcttattgaac

SEQ ID NO: 869127 - DNA, 15 bp, Homo sapiens
aggtcttattgaacc

SEQ ID NO: 869128 - DNA, 15 bp, Homo sapiens
ggtcttattgaacct

SEQ ID NO: 869129 - DNA, 15 bp, Homo sapiens
gtcttattgaaccta

SEQ ID NO: 869130 - DNA, 15 bp, Homo sapiens
tcttattgaacctag

SEQ ID NO: 869131 - DNA, 15 bp, Homo sapiens
cttattgaacctagt

SEQ ID NO: 869132 - DNA, 15 bp, Homo sapiens
ttattgaacctagtt

SEQ ID NO: 869133 - DNA, 15 bp, Homo sapiens
tattgaacctagttc

SEQ ID NO: 869134 - DNA, 15 bp, Homo sapiens
attgaacctagttcc

SEQ ID NO: 869135 - DNA, 15 bp, Homo sapiens
ttgaacctagttcca

SEQ ID NO: 869136 - DNA, 15 bp, Homo sapiens
tgaacctagttccat

SEQ ID NO: 869137 - DNA, 15 bp, Homo sapiens
gaacctagttccata

SEQ ID NO: 869138 - DNA, 15 bp, Homo sapiens
aacctagttccatac

SEQ ID NO: 869139 - DNA, 15 bp, Homo sapiens
acctagttccatacc

SEQ ID NO: 869140 - DNA, 15 bp, Homo sapiens
cctagttccatacca

SEQ ID NO: 869141 - DNA, 15 bp, Homo sapiens
ctagttccataccat

SEQ ID NO: 869142 - DNA, 15 bp, Homo sapiens
tagttccataccatg

SEQ ID NO: 869143 - DNA, 15 bp, Homo sapiens
agttccataccatga

SEQ ID NO: 869144 - DNA, 15 bp, Homo sapiens
gttccataccatgag

SEQ ID NO: 869145 - DNA, 15 bp, Homo sapiens
ttccataccatgagg

SEQ ID NO: 869146 - DNA, 15 bp, Homo sapiens
tccataccatgagga

SEQ ID NO: 869147 - DNA, 15 bp, Homo sapiens
ccataccatgaggag

SEQ ID NO: 869148 - DNA, 15 bp, Homo sapiens
cataccatgaggaga

SEQ ID NO: 869149 - DNA, 15 bp, Homo sapiens
ataccatgaggagaa

SEQ ID NO: 869150 - DNA, 15 bp, Homo sapiens
taccatgaggagaat

SEQ ID NO: 869151 - DNA, 15 bp, Homo sapiens
accatgaggagaatg

SEQ ID NO: 869152 - DNA, 15 bp, Homo sapiens
ccatgaggagaatgc

SEQ ID NO: 869153 - DNA, 15 bp, Homo sapiens
catgaggagaatgct

SEQ ID NO: 869154 - DNA, 15 bp, Homo sapiens
atgaggagaatgctc

SEQ ID NO: 869155 - DNA, 15 bp, Homo sapiens
tgaggagaatgctca

SEQ ID NO: 869156 - DNA, 15 bp, Homo sapiens
gaggagaatgctcaa

SEQ ID NO: 869157 - DNA, 15 bp, Homo sapiens
aggagaatgctcaac

SEQ ID NO: 869158 - DNA, 15 bp, Homo sapiens
ggagaatgctcaact

SEQ ID NO: 869159 - DNA, 15 bp, Homo sapiens
gagaatgctcaacta

SEQ ID NO: 869160 - DNA, 15 bp, Homo sapiens
agaatgctcaactaa

SEQ ID NO: 869161 - DNA, 15 bp, Homo sapiens
gaatgctcaactaat

SEQ ID NO: 869162 - DNA, 15 bp, Homo sapiens
aatgctcaactaata

SEQ ID NO: 869163 - DNA, 15 bp, Homo sapiens
atgctcaactaataa

SEQ ID NO: 869164 - DNA, 15 bp, Homo sapiens
tgctcaactaataat

SEQ ID NO: 869165 - DNA, 15 bp, Homo sapiens
gctcaactaataata

SEQ ID NO: 869166 - DNA, 15 bp, Homo sapiens
ctcaactaataatat

SEQ ID NO: 869167 - DNA, 15 bp, Homo sapiens
tcaactaataatatt

SEQ ID NO: 869168 - DNA, 15 bp, Homo sapiens
caactaataatatta

SEQ ID NO: 869169 - DNA, 15 bp, Homo sapiens
aactaataatattac

SEQ ID NO: 869170 - DNA, 15 bp, Homo sapiens
actaataatattact

SEQ ID NO: 869171 - DNA, 15 bp, Homo sapiens
ctaataatattactt

SEQ ID NO: 869172 - DNA, 15 bp, Homo sapiens
taataatattacttg

SEQ ID NO: 869173 - DNA, 15 bp, Homo sapiens
aataatattacttgt

SEQ ID NO: 869174 - DNA, 15 bp, Homo sapiens
ataatattacttgtc

SEQ ID NO: 869175 - DNA, 15 bp, Homo sapiens
taatattacttgtct

SEQ ID NO: 869176 - DNA, 15 bp, Homo sapiens
aatattacttgtcta

SEQ ID NO: 869177 - DNA, 15 bp, Homo sapiens
atattacttgtctag

SEQ ID NO: 869178 - DNA, 15 bp, Homo sapiens
tattacttgtctagg

SEQ ID NO: 869179 - DNA, 15 bp, Homo sapiens
attacttgtctaggt

SEQ ID NO: 869180 - DNA, 15 bp, Homo sapiens
ttacttgtctaggtt

SEQ ID NO: 869181 - DNA, 15 bp, Homo sapiens
tacttgtctaggttt

SEQ ID NO: 869182 - DNA, 15 bp, Homo sapiens
acttgtctaggttta

SEQ ID NO: 869183 - DNA, 15 bp, Homo sapiens
cttgtctaggtttac

SEQ ID NO: 869184 - DNA, 15 bp, Homo sapiens
ttgtctaggtttacc

SEQ ID NO: 869185 - DNA, 15 bp, Homo sapiens
tgtctaggtttaccg

SEQ ID NO: 869186 - DNA, 15 bp, Homo sapiens
gtctaggtttaccga

SEQ ID NO: 869187 - DNA, 15 bp, Homo sapiens
tctaggtttaccgag

SEQ ID NO: 869188 - DNA, 15 bp, Homo sapiens
ctaggtttaccgaga

SEQ ID NO: 869189 - DNA, 15 bp, Homo sapiens
taggtttaccgagac

SEQ ID NO: 869190 - DNA, 15 bp, Homo sapiens
aggtttaccgagact

SEQ ID NO: 869191 - DNA, 15 bp, Homo sapiens
ggtttaccgagactg

SEQ ID NO: 869192 - DNA, 15 bp, Homo sapiens
gtttaccgagactgg

SEQ ID NO: 869193 - DNA, 15 bp, Homo sapiens
tttaccgagactgga

SEQ ID NO: 869194 - DNA, 15 bp, Homo sapiens
ttaccgagactggat

SEQ ID NO: 869195 - DNA, 15 bp, Homo sapiens
taccgagactggatg

SEQ ID NO: 869196 - DNA, 15 bp, Homo sapiens
accgagactggatgc

SEQ ID NO: 869197 - DNA, 15 bp, Homo sapiens
ccgagactggatgcc

SEQ ID NO: 869198 - DNA, 15 bp, Homo sapiens
cgagactggatgcct

SEQ ID NO: 869199 - DNA, 15 bp, Homo sapiens
gagactggatgcctg

SEQ ID NO: 869200 - DNA, 15 bp, Homo sapiens
agactggatgcctgt

SEQ ID NO: 869201 - DNA, 15 bp, Homo sapiens
gactggatgcctgta

SEQ ID NO: 869202 - DNA, 15 bp, Homo sapiens
actggatgcctgtaa

SEQ ID NO: 869203 - DNA, 15 bp, Homo sapiens
ctggatgcctgtaac

SEQ ID NO: 869204 - DNA, 15 bp, Homo sapiens
tggatgcctgtaact

SEQ ID NO: 869205 - DNA, 15 bp, Homo sapiens
ggatgcctgtaactc

SEQ ID NO: 869206 - DNA, 15 bp, Homo sapiens
gatgcctgtaactca

SEQ ID NO: 869207 - DNA, 15 bp, Homo sapiens
atgcctgtaactcac

SEQ ID NO: 869208 - DNA, 15 bp, Homo sapiens
tgcctgtaactcact

SEQ ID NO: 869209 - DNA, 15 bp, Homo sapiens
gcctgtaactcactg

SEQ ID NO: 869210 - DNA, 15 bp, Homo sapiens
cctgtaactcactga

SEQ ID NO: 869211 - DNA, 15 bp, Homo sapiens
ctgtaactcactgag

SEQ ID NO: 869212 - DNA, 15 bp, Homo sapiens
tgtaactcactgagt

SEQ ID NO: 869213 - DNA, 15 bp, Homo sapiens
gtaactcactgagtc

SEQ ID NO: 869214 - DNA, 15 bp, Homo sapiens
taactcactgagtcc

SEQ ID NO: 869215 - DNA, 15 bp, Homo sapiens
aactcactgagtcct

SEQ ID NO: 869216 - DNA, 15 bp, Homo sapiens
actcactgagtccta

SEQ ID NO: 869217 - DNA, 15 bp, Homo sapiens
ctcactgagtcctaa

SEQ ID NO: 869218 - DNA, 15 bp, Homo sapiens
tcactgagtcctaac

SEQ ID NO: 869219 - DNA, 15 bp, Homo sapiens
cactgagtcctaact

SEQ ID NO: 869220 - DNA, 15 bp, Homo sapiens
actgagtcctaacta

SEQ ID NO: 869221 - DNA, 15 bp, Homo sapiens
ctgagtcctaactac

SEQ ID NO: 869222 - DNA, 15 bp, Homo sapiens
tgagtcctaactaca

SEQ ID NO: 869223 - DNA, 15 bp, Homo sapiens
gagtcctaactacaa

SEQ ID NO: 869224 - DNA, 15 bp, Homo sapiens
agtcctaactacaac

SEQ ID NO: 869225 - DNA, 15 bp, Homo sapiens
gtcctaactacaact

SEQ ID NO: 869226 - DNA, 15 bp, Homo sapiens
tcctaactacaactc

SEQ ID NO: 869227 - DNA, 15 bp, Homo sapiens
cctaactacaactct

SEQ ID NO: 869228 - DNA, 15 bp, Homo sapiens
ctaactacaactcta

SEQ ID NO: 869229 - DNA, 15 bp, Homo sapiens
taactacaactctat

SEQ ID NO: 869230 - DNA, 15 bp, Homo sapiens
aactacaactctata

SEQ ID NO: 869231 - DNA, 15 bp, Homo sapiens
actacaactctataa

SEQ ID NO: 869232 - DNA, 15 bp, Homo sapiens
ctacaactctataag

SEQ ID NO: 869233 - DNA, 15 bp, Homo sapiens
tacaactctataagt

SEQ ID NO: 869234 - DNA, 15 bp, Homo sapiens
acaactctataagta

SEQ ID NO: 869235 - DNA, 15 bp, Homo sapiens
caactctataagtag

SEQ ID NO: 869236 - DNA, 15 bp, Homo sapiens
aactctataagtagt

SEQ ID NO: 869237 - DNA, 15 bp, Homo sapiens
actctataagtagtt

SEQ ID NO: 869238 - DNA, 15 bp, Homo sapiens
ctctataagtagtta

SEQ ID NO: 869239 - DNA, 15 bp, Homo sapiens
tctataagtagttat

SEQ ID NO: 869240 - DNA, 15 bp, Homo sapiens
ctataagtagttatt

SEQ ID NO: 869241 - DNA, 15 bp, Homo sapiens
tataagtagttatta

SEQ ID NO: 869242 - DNA, 15 bp, Homo sapiens
ataagtagttattac

SEQ ID NO: 869243 - DNA, 15 bp, Homo sapiens
taagtagttattact

SEQ ID NO: 869244 - DNA, 15 bp, Homo sapiens
aagtagttattactc

SEQ ID NO: 869245 - DNA, 15 bp, Homo sapiens
agtagttattactct

SEQ ID NO: 869246 - DNA, 15 bp, Homo sapiens
gtagttattactctt

SEQ ID NO: 869247 - DNA, 15 bp, Homo sapiens
tagttattactcttg

SEQ ID NO: 869248 - DNA, 15 bp, Homo sapiens
agttattactcttgc

SEQ ID NO: 869249 - DNA, 15 bp, Homo sapiens
gttattactcttgcc

SEQ ID NO: 869250 - DNA, 15 bp, Homo sapiens
ttattactcttgccc

SEQ ID NO: 869251 - DNA, 15 bp, Homo sapiens
tattactcttgcccc

SEQ ID NO: 869252 - DNA, 15 bp, Homo sapiens
attactcttgccccc

SEQ ID NO: 869253 - DNA, 15 bp, Homo sapiens
ttactcttgccccca

SEQ ID NO: 869254 - DNA, 15 bp, Homo sapiens
tactcttgcccccat

SEQ ID NO: 869255 - DNA, 15 bp, Homo sapiens
actcttgcccccatt

SEQ ID NO: 869256 - DNA, 15 bp, Homo sapiens
ctcttgcccccattt

SEQ ID NO: 869257 - DNA, 15 bp, Homo sapiens
tcttgcccccatttt

SEQ ID NO: 869258 - DNA, 15 bp, Homo sapiens
cttgcccccatttta

SEQ ID NO: 869259 - DNA, 15 bp, Homo sapiens
ttgcccccattttac

SEQ ID NO: 869260 - DNA, 15 bp, Homo sapiens
tgcccccattttaca

SEQ ID NO: 869261 - DNA, 15 bp, Homo sapiens
gcccccattttacag

SEQ ID NO: 869262 - DNA, 15 bp, Homo sapiens
cccccattttacagg

SEQ ID NO: 869263 - DNA, 15 bp, Homo sapiens
ccccattttacaggt

SEQ ID NO: 869264 - DNA, 15 bp, Homo sapiens
cccattttacaggtg

SEQ ID NO: 869265 - DNA, 15 bp, Homo sapiens
ccattttacaggtga

SEQ ID NO: 869266 - DNA, 15 bp, Homo sapiens
cattttacaggtgag

SEQ ID NO: 869267 - DNA, 15 bp, Homo sapiens
attttacaggtgagt

SEQ ID NO: 869268 - DNA, 15 bp, Homo sapiens
ttttacaggtgagta

SEQ ID NO: 869269 - DNA, 15 bp, Homo sapiens
tttacaggtgagtat

SEQ ID NO: 869270 - DNA, 15 bp, Homo sapiens
ttacaggtgagtatg

SEQ ID NO: 869271 - DNA, 15 bp, Homo sapiens
tacaggtgagtatgt

SEQ ID NO: 869272 - DNA, 15 bp, Homo sapiens
acaggtgagtatgtt

SEQ ID NO: 869273 - DNA, 15 bp, Homo sapiens
caggtgagtatgttg

SEQ ID NO: 869274 - DNA, 15 bp, Homo sapiens
aggtgagtatgttga

SEQ ID NO: 869275 - DNA, 15 bp, Homo sapiens
ggtgagtatgttgag

SEQ ID NO: 869276 - DNA, 15 bp, Homo sapiens
gtgagtatgttgagg

SEQ ID NO: 869277 - DNA, 15 bp, Homo sapiens
tgagtatgttgaggt

SEQ ID NO: 869278 - DNA, 15 bp, Homo sapiens
gagtatgttgaggta

SEQ ID NO: 869279 - DNA, 15 bp, Homo sapiens
agtatgttgaggtac

SEQ ID NO: 869280 - DNA, 15 bp, Homo sapiens
gtatgttgaggtaca

SEQ ID NO: 869281 - DNA, 15 bp, Homo sapiens
tatgttgaggtacag

SEQ ID NO: 869282 - DNA, 15 bp, Homo sapiens
atgttgaggtacaga

SEQ ID NO: 869283 - DNA, 15 bp, Homo sapiens
tgttgaggtacagaa

SEQ ID NO: 869284 - DNA, 15 bp, Homo sapiens
gttgaggtacagaaa

SEQ ID NO: 869285 - DNA, 15 bp, Homo sapiens
ttgaggtacagaaat

SEQ ID NO: 869286 - DNA, 15 bp, Homo sapiens
tgaggtacagaaatg

SEQ ID NO: 869287 - DNA, 15 bp, Homo sapiens
gaggtacagaaatgt

SEQ ID NO: 869288 - DNA, 15 bp, Homo sapiens
aggtacagaaatgta

SEQ ID NO: 869289 - DNA, 15 bp, Homo sapiens
ggtacagaaatgtaa

SEQ ID NO: 869290 - DNA, 15 bp, Homo sapiens
gtacagaaatgtaaa

SEQ ID NO: 869291 - DNA, 15 bp, Homo sapiens
tacagaaatgtaaag

SEQ ID NO: 869292 - DNA, 15 bp, Homo sapiens
acagaaatgtaaagt

SEQ ID NO: 869293 - DNA, 15 bp, Homo sapiens
cagaaatgtaaagtc

SEQ ID NO: 869294 - DNA, 15 bp, Homo sapiens
agaaatgtaaagtct

SEQ ID NO: 869295 - DNA, 15 bp, Homo sapiens
gaaatgtaaagtctg

SEQ ID NO: 869296 - DNA, 15 bp, Homo sapiens
aaatgtaaagtctgg

SEQ ID NO: 869297 - DNA, 15 bp, Homo sapiens
aatgtaaagtctggt

SEQ ID NO: 869298 - DNA, 15 bp, Homo sapiens
atgtaaagtctggta

SEQ ID NO: 869299 - DNA, 15 bp, Homo sapiens
tgtaaagtctggtaa

SEQ ID NO: 869300 - DNA, 15 bp, Homo sapiens
gtaaagtctggtaaa

SEQ ID NO: 869301 - DNA, 15 bp, Homo sapiens
taaagtctggtaaat

SEQ ID NO: 869302 - DNA, 15 bp, Homo sapiens
aaagtctggtaaatc

SEQ ID NO: 869303 - DNA, 15 bp, Homo sapiens
aagtctggtaaatct

SEQ ID NO: 869304 - DNA, 15 bp, Homo sapiens
agtctggtaaatcta

SEQ ID NO: 869305 - DNA, 15 bp, Homo sapiens
gtctggtaaatctag

SEQ ID NO: 869306 - DNA, 15 bp, Homo sapiens
tctggtaaatctagg

SEQ ID NO: 869307 - DNA, 15 bp, Homo sapiens
ctggtaaatctaggt

SEQ ID NO: 869308 - DNA, 15 bp, Homo sapiens
tggtaaatctaggta

SEQ ID NO: 869309 - DNA, 15 bp, Homo sapiens
ggtaaatctaggtaa

SEQ ID NO: 869310 - DNA, 15 bp, Homo sapiens
gtaaatctaggtaag

SEQ ID NO: 869311 - DNA, 15 bp, Homo sapiens
taaatctaggtaagt

SEQ ID NO: 869312 - DNA, 15 bp, Homo sapiens
aaatctaggtaagtt

SEQ ID NO: 869313 - DNA, 15 bp, Homo sapiens
aatctaggtaagttt

SEQ ID NO: 869314 - DNA, 15 bp, Homo sapiens
atctaggtaagtttt

SEQ ID NO: 869315 - DNA, 15 bp, Homo sapiens
tctaggtaagttttc

SEQ ID NO: 869316 - DNA, 15 bp, Homo sapiens
ctaggtaagttttcc

SEQ ID NO: 869317 - DNA, 15 bp, Homo sapiens
taggtaagttttccc

SEQ ID NO: 869318 - DNA, 15 bp, Homo sapiens
aggtaagttttccct

SEQ ID NO: 869319 - DNA, 15 bp, Homo sapiens
ggtaagttttcccta

SEQ ID NO: 869320 - DNA, 15 bp, Homo sapiens
gtaagttttccctaa

SEQ ID NO: 869321 - DNA, 15 bp, Homo sapiens
taagttttccctaat

SEQ ID NO: 869322 - DNA, 15 bp, Homo sapiens
aagttttccctaatt

SEQ ID NO: 869323 - DNA, 15 bp, Homo sapiens
agttttccctaatta

SEQ ID NO: 869324 - DNA, 15 bp, Homo sapiens
gttttccctaattag

SEQ ID NO: 869325 - DNA, 15 bp, Homo sapiens
ttttccctaattagg

SEQ ID NO: 869326 - DNA, 15 bp, Homo sapiens
tttccctaattagga

SEQ ID NO: 869327 - DNA, 15 bp, Homo sapiens
ttccctaattaggat

SEQ ID NO: 869328 - DNA, 15 bp, Homo sapiens
tccctaattaggatg

SEQ ID NO: 869329 - DNA, 15 bp, Homo sapiens
ccctaattaggatga

SEQ ID NO: 869330 - DNA, 15 bp, Homo sapiens
cctaattaggatgat

SEQ ID NO: 869331 - DNA, 15 bp, Homo sapiens
ctaattaggatgatg

SEQ ID NO: 869332 - DNA, 15 bp, Homo sapiens
taattaggatgatgg

SEQ ID NO: 869333 - DNA, 15 bp, Homo sapiens
aattaggatgatgga

SEQ ID NO: 869334 - DNA, 15 bp, Homo sapiens
attaggatgatggaa

SEQ ID NO: 869335 - DNA, 15 bp, Homo sapiens
ttaggatgatggaag

SEQ ID NO: 869336 - DNA, 15 bp, Homo sapiens
taggatgatggaaga

SEQ ID NO: 869337 - DNA, 15 bp, Homo sapiens
aggatgatggaagac

SEQ ID NO: 869338 - DNA, 15 bp, Homo sapiens
ggatgatggaagaca

SEQ ID NO: 869339 - DNA, 15 bp, Homo sapiens
gatgatggaagacat

SEQ ID NO: 869340 - DNA, 15 bp, Homo sapiens
atgatggaagacata

SEQ ID NO: 869341 - DNA, 15 bp, Homo sapiens
tgatggaagacatag

SEQ ID NO: 869342 - DNA, 15 bp, Homo sapiens
gatggaagacatagg

SEQ ID NO: 869343 - DNA, 15 bp, Homo sapiens
atggaagacataggg

SEQ ID NO: 869344 - DNA, 15 bp, Homo sapiens
tggaagacataggga

SEQ ID NO: 869345 - DNA, 15 bp, Homo sapiens
ggaagacatagggac

SEQ ID NO: 869346 - DNA, 15 bp, Homo sapiens
gaagacatagggaca

SEQ ID NO: 869347 - DNA, 15 bp, Homo sapiens
aagacatagggacag

SEQ ID NO: 869348 - DNA, 15 bp, Homo sapiens
agacatagggacagt

SEQ ID NO: 869349 - DNA, 15 bp, Homo sapiens
gacatagggacagtg

SEQ ID NO: 869350 - DNA, 15 bp, Homo sapiens
acatagggacagtgc

SEQ ID NO: 869351 - DNA, 15 bp, Homo sapiens
catagggacagtgct

SEQ ID NO: 869352 - DNA, 15 bp, Homo sapiens
atagggacagtgctc

SEQ ID NO: 869353 - DNA, 15 bp, Homo sapiens
tagggacagtgctca

SEQ ID NO: 869354 - DNA, 15 bp, Homo sapiens
agggacagtgctcag

SEQ ID NO: 869355 - DNA, 15 bp, Homo sapiens
gggacagtgctcaga

SEQ ID NO: 869356 - DNA, 15 bp, Homo sapiens
ggacagtgctcagac

SEQ ID NO: 869357 - DNA, 15 bp, Homo sapiens
gacagtgctcagacc

SEQ ID NO: 869358 - DNA, 15 bp, Homo sapiens
acagtgctcagacca

SEQ ID NO: 869359 - DNA, 15 bp, Homo sapiens
cagtgctcagaccac

SEQ ID NO: 869360 - DNA, 15 bp, Homo sapiens
agtgctcagaccaca

SEQ ID NO: 869361 - DNA, 15 bp, Homo sapiens
gtgctcagaccacag

SEQ ID NO: 869362 - DNA, 15 bp, Homo sapiens
tgctcagaccacagt

SEQ ID NO: 869363 - DNA, 15 bp, Homo sapiens
gctcagaccacagta

SEQ ID NO: 869364 - DNA, 15 bp, Homo sapiens
ctcagaccacagtaa

SEQ ID NO: 869365 - DNA, 15 bp, Homo sapiens
tcagaccacagtaaa

SEQ ID NO: 869366 - DNA, 15 bp, Homo sapiens
cagaccacagtaaat

SEQ ID NO: 869367 - DNA, 15 bp, Homo sapiens
agaccacagtaaatg

SEQ ID NO: 869368 - DNA, 15 bp, Homo sapiens
gaccacagtaaatgc

SEQ ID NO: 869369 - DNA, 15 bp, Homo sapiens
accacagtaaatgcc

SEQ ID NO: 869370 - DNA, 15 bp, Homo sapiens
ccacagtaaatgcct

SEQ ID NO: 869371 - DNA, 15 bp, Homo sapiens
cacagtaaatgcctg

SEQ ID NO: 869372 - DNA, 15 bp, Homo sapiens
acagtaaatgcctgg

SEQ ID NO: 869373 - DNA, 15 bp, Homo sapiens
cagtaaatgcctggg

SEQ ID NO: 869374 - DNA, 15 bp, Homo sapiens
agtaaatgcctgggt

SEQ ID NO: 869375 - DNA, 15 bp, Homo sapiens
gtaaatgcctgggtg

SEQ ID NO: 869376 - DNA, 15 bp, Homo sapiens
taaatgcctgggtgt

SEQ ID NO: 869377 - DNA, 15 bp, Homo sapiens
aaatgcctgggtgtg

SEQ ID NO: 869378 - DNA, 15 bp, Homo sapiens
aatgcctgggtgtgg

SEQ ID NO: 869379 - DNA, 15 bp, Homo sapiens
atgcctgggtgtggc

SEQ ID NO: 869380 - DNA, 15 bp, Homo sapiens
tgcctgggtgtggct

SEQ ID NO: 869381 - DNA, 15 bp, Homo sapiens
gcctgggtgtggcta

SEQ ID NO: 869382 - DNA, 15 bp, Homo sapiens
cctgggtgtggctat

SEQ ID NO: 869383 - DNA, 15 bp, Homo sapiens
ctgggtgtggctata

SEQ ID NO: 869384 - DNA, 15 bp, Homo sapiens
tgggtgtggctatag

SEQ ID NO: 869385 - DNA, 15 bp, Homo sapiens
gggtgtggctatagc

SEQ ID NO: 869386 - DNA, 15 bp, Homo sapiens
ggtgtggctatagcc

SEQ ID NO: 869387 - DNA, 15 bp, Homo sapiens
gtgtggctatagcca

SEQ ID NO: 869388 - DNA, 15 bp, Homo sapiens
tgtggctatagccag

SEQ ID NO: 869389 - DNA, 15 bp, Homo sapiens
gtggctatagccagg

SEQ ID NO: 869390 - DNA, 15 bp, Homo sapiens
tggctatagccaggg

SEQ ID NO: 869391 - DNA, 15 bp, Homo sapiens
ggctatagccagggg

SEQ ID NO: 869392 - DNA, 15 bp, Homo sapiens
gctatagccaggggt

SEQ ID NO: 869393 - DNA, 15 bp, Homo sapiens
ctatagccaggggtc

SEQ ID NO: 869394 - DNA, 15 bp, Homo sapiens
tatagccaggggtct

SEQ ID NO: 869395 - DNA, 15 bp, Homo sapiens
atagccaggggtctt

SEQ ID NO: 869396 - DNA, 15 bp, Homo sapiens
tagccaggggtcttt

SEQ ID NO: 869397 - DNA, 15 bp, Homo sapiens
agccaggggtctttg

SEQ ID NO: 869398 - DNA, 15 bp, Homo sapiens
gccaggggtctttgg

SEQ ID NO: 869399 - DNA, 15 bp, Homo sapiens
ccaggggtctttgga

SEQ ID NO: 869400 - DNA, 15 bp, Homo sapiens
caggggtctttggag

SEQ ID NO: 869401 - DNA, 15 bp, Homo sapiens
aggggtctttggagt

SEQ ID NO: 869402 - DNA, 15 bp, Homo sapiens
ggggtctttggagtg

SEQ ID NO: 869403 - DNA, 15 bp, Homo sapiens
gggtctttggagtgg

SEQ ID NO: 869404 - DNA, 15 bp, Homo sapiens
ggtctttggagtggc

SEQ ID NO: 869405 - DNA, 15 bp, Homo sapiens
gtctttggagtggcc

SEQ ID NO: 869406 - DNA, 15 bp, Homo sapiens
tctttggagtggcct

SEQ ID NO: 869407 - DNA, 15 bp, Homo sapiens
ctttggagtggccta

SEQ ID NO: 869408 - DNA, 15 bp, Homo sapiens
tttggagtggcctag

SEQ ID NO: 869409 - DNA, 15 bp, Homo sapiens
ttggagtggcctaga

SEQ ID NO: 869410 - DNA, 15 bp, Homo sapiens
tggagtggcctagat

SEQ ID NO: 869411 - DNA, 15 bp, Homo sapiens
ggagtggcctagatg

SEQ ID NO: 869412 - DNA, 15 bp, Homo sapiens
gagtggcctagatgg

SEQ ID NO: 869413 - DNA, 15 bp, Homo sapiens
agtggcctagatgga

SEQ ID NO: 869414 - DNA, 15 bp, Homo sapiens
gtggcctagatggag

SEQ ID NO: 869415 - DNA, 15 bp, Homo sapiens
tggcctagatggagt

SEQ ID NO: 869416 - DNA, 15 bp, Homo sapiens
ggcctagatggagtg

SEQ ID NO: 869417 - DNA, 15 bp, Homo sapiens
gcctagatggagtgg

SEQ ID NO: 869418 - DNA, 15 bp, Homo sapiens
cctagatggagtgga

SEQ ID NO: 869419 - DNA, 15 bp, Homo sapiens
ctagatggagtggag

SEQ ID NO: 869420 - DNA, 15 bp, Homo sapiens
tagatggagtggaga

SEQ ID NO: 869421 - DNA, 15 bp, Homo sapiens
agatggagtggagaa

SEQ ID NO: 869422 - DNA, 15 bp, Homo sapiens
gatggagtggagaat

SEQ ID NO: 869423 - DNA, 15 bp, Homo sapiens
atggagtggagaatg

SEQ ID NO: 869424 - DNA, 15 bp, Homo sapiens
tggagtggagaatgt

SEQ ID NO: 869425 - DNA, 15 bp, Homo sapiens
ggagtggagaatgta

SEQ ID NO: 869426 - DNA, 15 bp, Homo sapiens
gagtggagaatgtaa

SEQ ID NO: 869427 - DNA, 15 bp, Homo sapiens
agtggagaatgtaag

SEQ ID NO: 869428 - DNA, 15 bp, Homo sapiens
gtggagaatgtaaga

SEQ ID NO: 869429 - DNA, 15 bp, Homo sapiens
tggagaatgtaagag

SEQ ID NO: 869430 - DNA, 15 bp, Homo sapiens
ggagaatgtaagagt

SEQ ID NO: 869431 - DNA, 15 bp, Homo sapiens
gagaatgtaagagta

SEQ ID NO: 869432 - DNA, 15 bp, Homo sapiens
agaatgtaagagtat

SEQ ID NO: 869433 - DNA, 15 bp, Homo sapiens
gaatgtaagagtatt

SEQ ID NO: 869434 - DNA, 15 bp, Homo sapiens
aatgtaagagtattc

SEQ ID NO: 869435 - DNA, 15 bp, Homo sapiens
atgtaagagtattct

SEQ ID NO: 869436 - DNA, 15 bp, Homo sapiens
tgtaagagtattctg

SEQ ID NO: 869437 - DNA, 15 bp, Homo sapiens
gtaagagtattctgg

SEQ ID NO: 869438 - DNA, 15 bp, Homo sapiens
taagagtattctggc

SEQ ID NO: 869439 - DNA, 15 bp, Homo sapiens
aagagtattctggca

SEQ ID NO: 869440 - DNA, 15 bp, Homo sapiens
agagtattctggcac

SEQ ID NO: 869441 - DNA, 15 bp, Homo sapiens
gagtattctggcacc

SEQ ID NO: 869442 - DNA, 15 bp, Homo sapiens
agtattctggcaccc

SEQ ID NO: 869443 - DNA, 15 bp, Homo sapiens
gtattctggcaccca

SEQ ID NO: 869444 - DNA, 15 bp, Homo sapiens
tattctggcacccag

SEQ ID NO: 869445 - DNA, 15 bp, Homo sapiens
attctggcacccagt

SEQ ID NO: 869446 - DNA, 15 bp, Homo sapiens
ttctggcacccagtc

SEQ ID NO: 869447 - DNA, 15 bp, Homo sapiens
tctggcacccagtca

SEQ ID NO: 869448 - DNA, 15 bp, Homo sapiens
ctggcacccagtcat

SEQ ID NO: 869449 - DNA, 15 bp, Homo sapiens
tggcacccagtcatg

SEQ ID NO: 869450 - DNA, 15 bp, Homo sapiens
ggcacccagtcatga

SEQ ID NO: 869451 - DNA, 15 bp, Homo sapiens
gcacccagtcatgaa

SEQ ID NO: 869452 - DNA, 15 bp, Homo sapiens
cacccagtcatgaag

SEQ ID NO: 869453 - DNA, 15 bp, Homo sapiens
acccagtcatgaagg

SEQ ID NO: 869454 - DNA, 15 bp, Homo sapiens
cccagtcatgaaggt

SEQ ID NO: 869455 - DNA, 15 bp, Homo sapiens
ccagtcatgaaggtt

SEQ ID NO: 869456 - DNA, 15 bp, Homo sapiens
cagtcatgaaggttt

SEQ ID NO: 869457 - DNA, 15 bp, Homo sapiens
agtcatgaaggtttt

SEQ ID NO: 869458 - DNA, 15 bp, Homo sapiens
gtcatgaaggttttg

SEQ ID NO: 869459 - DNA, 15 bp, Homo sapiens
tcatgaaggttttgc

SEQ ID NO: 869460 - DNA, 15 bp, Homo sapiens
catgaaggttttgct

SEQ ID NO: 869461 - DNA, 15 bp, Homo sapiens
atgaaggttttgctt

SEQ ID NO: 869462 - DNA, 15 bp, Homo sapiens
tgaaggttttgcttg

SEQ ID NO: 869463 - DNA, 15 bp, Homo sapiens
gaaggttttgcttgt

SEQ ID NO: 869464 - DNA, 15 bp, Homo sapiens
aaggttttgcttgtc

SEQ ID NO: 869465 - DNA, 15 bp, Homo sapiens
aggttttgcttgtca

SEQ ID NO: 869466 - DNA, 15 bp, Homo sapiens
ggttttgcttgtcat

SEQ ID NO: 869467 - DNA, 15 bp, Homo sapiens
gttttgcttgtcata

SEQ ID NO: 869468 - DNA, 15 bp, Homo sapiens
ttttgcttgtcatag

SEQ ID NO: 869469 - DNA, 15 bp, Homo sapiens
tttgcttgtcatagg

SEQ ID NO: 869470 - DNA, 15 bp, Homo sapiens
ttgcttgtcataggc

SEQ ID NO: 869471 - DNA, 15 bp, Homo sapiens
tgcttgtcataggca

SEQ ID NO: 869472 - DNA, 15 bp, Homo sapiens
gcttgtcataggcat

SEQ ID NO: 869473 - DNA, 15 bp, Homo sapiens
cttgtcataggcatt

SEQ ID NO: 869474 - DNA, 15 bp, Homo sapiens
ttgtcataggcatta

SEQ ID NO: 869475 - DNA, 15 bp, Homo sapiens
tgtcataggcattag

SEQ ID NO: 869476 - DNA, 15 bp, Homo sapiens
gtcataggcattagg

SEQ ID NO: 869477 - DNA, 15 bp, Homo sapiens
tcataggcattaggg

SEQ ID NO: 869478 - DNA, 15 bp, Homo sapiens
cataggcattaggga

SEQ ID NO: 869479 - DNA, 15 bp, Homo sapiens
ataggcattagggaa

SEQ ID NO: 869480 - DNA, 15 bp, Homo sapiens
taggcattagggaac

SEQ ID NO: 869481 - DNA, 15 bp, Homo sapiens
aggcattagggaacc

SEQ ID NO: 869482 - DNA, 15 bp, Homo sapiens
ggcattagggaaccc

SEQ ID NO: 869483 - DNA, 15 bp, Homo sapiens
gcattagggaacccc

SEQ ID NO: 869484 - DNA, 15 bp, Homo sapiens
cattagggaacccct

SEQ ID NO: 869485 - DNA, 15 bp, Homo sapiens
attagggaacccctg

SEQ ID NO: 869486 - DNA, 15 bp, Homo sapiens
ttagggaacccctga

SEQ ID NO: 869487 - DNA, 15 bp, Homo sapiens
tagggaacccctgaa

SEQ ID NO: 869488 - DNA, 15 bp, Homo sapiens
agggaacccctgaag

SEQ ID NO: 869489 - DNA, 15 bp, Homo sapiens
gggaacccctgaagg

SEQ ID NO: 869490 - DNA, 15 bp, Homo sapiens
ggaacccctgaaggt

SEQ ID NO: 869491 - DNA, 15 bp, Homo sapiens
gaacccctgaaggtt

SEQ ID NO: 869492 - DNA, 15 bp, Homo sapiens
aacccctgaaggttt

SEQ ID NO: 869493 - DNA, 15 bp, Homo sapiens
acccctgaaggtttt

SEQ ID NO: 869494 - DNA, 15 bp, Homo sapiens
cccctgaaggttttc

SEQ ID NO: 869495 - DNA, 15 bp, Homo sapiens
ccctgaaggttttcg

SEQ ID NO: 869496 - DNA, 15 bp, Homo sapiens
cctgaaggttttcga

SEQ ID NO: 869497 - DNA, 15 bp, Homo sapiens
ctgaaggttttcgag

SEQ ID NO: 869498 - DNA, 15 bp, Homo sapiens
tgaaggttttcgagg

SEQ ID NO: 869499 - DNA, 15 bp, Homo sapiens
gaaggttttcgagga

SEQ ID NO: 869500 - DNA, 15 bp, Homo sapiens
aaggttttcgaggag

SEQ ID NO: 869501 - DNA, 15 bp, Homo sapiens
aggttttcgaggagg

SEQ ID NO: 869502 - DNA, 15 bp, Homo sapiens
ggttttcgaggaggc

SEQ ID NO: 869503 - DNA, 15 bp, Homo sapiens
gttttcgaggaggcg

SEQ ID NO: 869504 - DNA, 15 bp, Homo sapiens
ttttcgaggaggcgg

SEQ ID NO: 869505 - DNA, 15 bp, Homo sapiens
tttcgaggaggcggt

SEQ ID NO: 869506 - DNA, 15 bp, Homo sapiens
ttcgaggaggcggta

SEQ ID NO: 869507 - DNA, 15 bp, Homo sapiens
tcgaggaggcggtaa

SEQ ID NO: 869508 - DNA, 15 bp, Homo sapiens
cgaggaggcggtaac

SEQ ID NO: 869509 - DNA, 15 bp, Homo sapiens
gaggaggcggtaacc

SEQ ID NO: 869510 - DNA, 15 bp, Homo sapiens
aggaggcggtaacct

SEQ ID NO: 869511 - DNA, 15 bp, Homo sapiens
ggaggcggtaaccta

SEQ ID NO: 869512 - DNA, 15 bp, Homo sapiens
gaggcggtaacctaa

SEQ ID NO: 869513 - DNA, 15 bp, Homo sapiens
aggcggtaacctaac

SEQ ID NO: 869514 - DNA, 15 bp, Homo sapiens
ggcggtaacctaact

SEQ ID NO: 869515 - DNA, 15 bp, Homo sapiens
gcggtaacctaactt

SEQ ID NO: 869516 - DNA, 15 bp, Homo sapiens
cggtaacctaacttg

SEQ ID NO: 869517 - DNA, 15 bp, Homo sapiens
ggtaacctaacttgt

SEQ ID NO: 869518 - DNA, 15 bp, Homo sapiens
gtaacctaacttgtg

SEQ ID NO: 869519 - DNA, 15 bp, Homo sapiens
taacctaacttgtgt

SEQ ID NO: 869520 - DNA, 15 bp, Homo sapiens
aacctaacttgtgtt

SEQ ID NO: 869521 - DNA, 15 bp, Homo sapiens
acctaacttgtgttt

SEQ ID NO: 869522 - DNA, 15 bp, Homo sapiens
cctaacttgtgtttt

SEQ ID NO: 869523 - DNA, 15 bp, Homo sapiens
ctaacttgtgttttg

SEQ ID NO: 869524 - DNA, 15 bp, Homo sapiens
taacttgtgttttgg

SEQ ID NO: 869525 - DNA, 15 bp, Homo sapiens
aacttgtgttttggg

SEQ ID NO: 869526 - DNA, 15 bp, Homo sapiens
acttgtgttttgggg

SEQ ID NO: 869527 - DNA, 15 bp, Homo sapiens
cttgtgttttggggg

SEQ ID NO: 869528 - DNA, 15 bp, Homo sapiens
ttgtgttttggggga

SEQ ID NO: 869529 - DNA, 15 bp, Homo sapiens
tgtgttttgggggaa

SEQ ID NO: 869530 - DNA, 15 bp, Homo sapiens
gtgttttgggggaat

SEQ ID NO: 869531 - DNA, 15 bp, Homo sapiens
tgttttgggggaatc

SEQ ID NO: 869532 - DNA, 15 bp, Homo sapiens
gttttgggggaatca

SEQ ID NO: 869533 - DNA, 15 bp, Homo sapiens
ttttgggggaatcac

SEQ ID NO: 869534 - DNA, 15 bp, Homo sapiens
tttgggggaatcact

SEQ ID NO: 869535 - DNA, 15 bp, Homo sapiens
ttgggggaatcactg

SEQ ID NO: 869536 - DNA, 15 bp, Homo sapiens
tgggggaatcactgg

SEQ ID NO: 869537 - DNA, 15 bp, Homo sapiens
gggggaatcactggt

SEQ ID NO: 869538 - DNA, 15 bp, Homo sapiens
ggggaatcactggtg

SEQ ID NO: 869539 - DNA, 15 bp, Homo sapiens
gggaatcactggtgg

SEQ ID NO: 869540 - DNA, 15 bp, Homo sapiens
ggaatcactggtggc

SEQ ID NO: 869541 - DNA, 15 bp, Homo sapiens
gaatcactggtggca

SEQ ID NO: 869542 - DNA, 15 bp, Homo sapiens
aatcactggtggcag

SEQ ID NO: 869543 - DNA, 15 bp, Homo sapiens
atcactggtggcagc

SEQ ID NO: 869544 - DNA, 15 bp, Homo sapiens
tcactggtggcagca

SEQ ID NO: 869545 - DNA, 15 bp, Homo sapiens
cactggtggcagcag

SEQ ID NO: 869546 - DNA, 15 bp, Homo sapiens
actggtggcagcaga

SEQ ID NO: 869547 - DNA, 15 bp, Homo sapiens
ctggtggcagcagag

SEQ ID NO: 869548 - DNA, 15 bp, Homo sapiens
tggtggcagcagaga

SEQ ID NO: 869549 - DNA, 15 bp, Homo sapiens
ggtggcagcagagag

SEQ ID NO: 869550 - DNA, 15 bp, Homo sapiens
gtggcagcagagaga

SEQ ID NO: 869551 - DNA, 15 bp, Homo sapiens
tggcagcagagagaa

SEQ ID NO: 869552 - DNA, 15 bp, Homo sapiens
ggcagcagagagaag

SEQ ID NO: 869553 - DNA, 15 bp, Homo sapiens
gcagcagagagaagg

SEQ ID NO: 869554 - DNA, 15 bp, Homo sapiens
cagcagagagaaggg

SEQ ID NO: 869555 - DNA, 15 bp, Homo sapiens
agcagagagaagggt

SEQ ID NO: 869556 - DNA, 15 bp, Homo sapiens
gcagagagaagggtt

SEQ ID NO: 869557 - DNA, 15 bp, Homo sapiens
cagagagaagggttg

SEQ ID NO: 869558 - DNA, 15 bp, Homo sapiens
agagagaagggttgg

SEQ ID NO: 869559 - DNA, 15 bp, Homo sapiens
gagagaagggttggg

SEQ ID NO: 869560 - DNA, 15 bp, Homo sapiens
agagaagggttggga

SEQ ID NO: 869561 - DNA, 15 bp, Homo sapiens
gagaagggttgggag

SEQ ID NO: 869562 - DNA, 15 bp, Homo sapiens
agaagggttgggagt

SEQ ID NO: 869563 - DNA, 15 bp, Homo sapiens
gaagggttgggagtc

SEQ ID NO: 869564 - DNA, 15 bp, Homo sapiens
aagggttgggagtcc

SEQ ID NO: 869565 - DNA, 15 bp, Homo sapiens
agggttgggagtcct

SEQ ID NO: 869566 - DNA, 15 bp, Homo sapiens
gggttgggagtcctc

SEQ ID NO: 869567 - DNA, 15 bp, Homo sapiens
ggttgggagtcctcc

SEQ ID NO: 869568 - DNA, 15 bp, Homo sapiens
gttgggagtcctcca

SEQ ID NO: 869569 - DNA, 15 bp, Homo sapiens
ttgggagtcctccat

SEQ ID NO: 869570 - DNA, 15 bp, Homo sapiens
tgggagtcctccatc

SEQ ID NO: 869571 - DNA, 15 bp, Homo sapiens
gggagtcctccatca

SEQ ID NO: 869572 - DNA, 15 bp, Homo sapiens
ggagtcctccatcag

SEQ ID NO: 869573 - DNA, 15 bp, Homo sapiens
gagtcctccatcagg

SEQ ID NO: 869574 - DNA, 15 bp, Homo sapiens
agtcctccatcagga

SEQ ID NO: 869575 - DNA, 15 bp, Homo sapiens
gtcctccatcaggag

SEQ ID NO: 869576 - DNA, 15 bp, Homo sapiens
tcctccatcaggaga

SEQ ID NO: 869577 - DNA, 15 bp, Homo sapiens
cctccatcaggagat

SEQ ID NO: 869578 - DNA, 15 bp, Homo sapiens
ctccatcaggagatt

SEQ ID NO: 869579 - DNA, 15 bp, Homo sapiens
tccatcaggagattt

SEQ ID NO: 869580 - DNA, 15 bp, Homo sapiens
ccatcaggagatttc

SEQ ID NO: 869581 - DNA, 15 bp, Homo sapiens
catcaggagatttct

SEQ ID NO: 869582 - DNA, 15 bp, Homo sapiens
atcaggagatttctg

SEQ ID NO: 869583 - DNA, 15 bp, Homo sapiens
tcaggagatttctga

SEQ ID NO: 869584 - DNA, 15 bp, Homo sapiens
caggagatttctgag

SEQ ID NO: 869585 - DNA, 15 bp, Homo sapiens
aggagatttctgaga

SEQ ID NO: 869586 - DNA, 15 bp, Homo sapiens
ggagatttctgagac

SEQ ID NO: 869587 - DNA, 15 bp, Homo sapiens
gagatttctgagaca

SEQ ID NO: 869588 - DNA, 15 bp, Homo sapiens
agatttctgagacac

SEQ ID NO: 869589 - DNA, 15 bp, Homo sapiens
gatttctgagacaca

SEQ ID NO: 869590 - DNA, 15 bp, Homo sapiens
atttctgagacacac

SEQ ID NO: 869591 - DNA, 15 bp, Homo sapiens
tttctgagacacaca

SEQ ID NO: 869592 - DNA, 15 bp, Homo sapiens
ttctgagacacacac

SEQ ID NO: 869593 - DNA, 15 bp, Homo sapiens
tctgagacacacact

SEQ ID NO: 869594 - DNA, 15 bp, Homo sapiens
ctgagacacacacta

SEQ ID NO: 869595 - DNA, 15 bp, Homo sapiens
tgagacacacactac

SEQ ID NO: 869596 - DNA, 15 bp, Homo sapiens
gagacacacactaca

SEQ ID NO: 869597 - DNA, 15 bp, Homo sapiens
agacacacactacat

SEQ ID NO: 869598 - DNA, 15 bp, Homo sapiens
gacacacactacata

SEQ ID NO: 869599 - DNA, 15 bp, Homo sapiens
acacacactacataa

SEQ ID NO: 869600 - DNA, 15 bp, Homo sapiens
cacacactacataag

SEQ ID NO: 869601 - DNA, 15 bp, Homo sapiens
acacactacataagc

SEQ ID NO: 869602 - DNA, 15 bp, Homo sapiens
cacactacataagca

SEQ ID NO: 869603 - DNA, 15 bp, Homo sapiens
acactacataagcac

SEQ ID NO: 869604 - DNA, 15 bp, Homo sapiens
cactacataagcaca

SEQ ID NO: 869605 - DNA, 15 bp, Homo sapiens
actacataagcacag

SEQ ID NO: 869606 - DNA, 15 bp, Homo sapiens
ctacataagcacaga

SEQ ID NO: 869607 - DNA, 15 bp, Homo sapiens
tacataagcacagag

SEQ ID NO: 869608 - DNA, 15 bp, Homo sapiens
acataagcacagagg

SEQ ID NO: 869609 - DNA, 15 bp, Homo sapiens
cataagcacagaggt

SEQ ID NO: 869610 - DNA, 15 bp, Homo sapiens
ataagcacagaggtg

SEQ ID NO: 869611 - DNA, 15 bp, Homo sapiens
taagcacagaggtgt

SEQ ID NO: 869612 - DNA, 15 bp, Homo sapiens
aagcacagaggtgtg

SEQ ID NO: 869613 - DNA, 15 bp, Homo sapiens
agcacagaggtgtga

SEQ ID NO: 869614 - DNA, 15 bp, Homo sapiens
gcacagaggtgtgaa

SEQ ID NO: 869615 - DNA, 15 bp, Homo sapiens
cacagaggtgtgaaa

SEQ ID NO: 869616 - DNA, 15 bp, Homo sapiens
acagaggtgtgaaat

SEQ ID NO: 869617 - DNA, 15 bp, Homo sapiens
cagaggtgtgaaata

SEQ ID NO: 869618 - DNA, 15 bp, Homo sapiens
agaggtgtgaaatag

SEQ ID NO: 869619 - DNA, 15 bp, Homo sapiens
gaggtgtgaaataga

SEQ ID NO: 869620 - DNA, 15 bp, Homo sapiens
aggtgtgaaatagaa

SEQ ID NO: 869621 - DNA, 15 bp, Homo sapiens
ggtgtgaaatagaag

SEQ ID NO: 869622 - DNA, 15 bp, Homo sapiens
gtgtgaaatagaagg

SEQ ID NO: 869623 - DNA, 15 bp, Homo sapiens
tgtgaaatagaaggc

SEQ ID NO: 869624 - DNA, 15 bp, Homo sapiens
gtgaaatagaaggcc

SEQ ID NO: 869625 - DNA, 15 bp, Homo sapiens
tgaaatagaaggccc

SEQ ID NO: 869626 - DNA, 15 bp, Homo sapiens
gaaatagaaggccca

SEQ ID NO: 869627 - DNA, 15 bp, Homo sapiens
aaatagaaggcccac

SEQ ID NO: 869628 - DNA, 15 bp, Homo sapiens
aatagaaggcccact

SEQ ID NO: 869629 - DNA, 15 bp, Homo sapiens
atagaaggcccactc

SEQ ID NO: 869630 - DNA, 15 bp, Homo sapiens
tagaaggcccactca

SEQ ID NO: 869631 - DNA, 15 bp, Homo sapiens
agaaggcccactcaa

SEQ ID NO: 869632 - DNA, 15 bp, Homo sapiens
gaaggcccactcaac

SEQ ID NO: 869633 - DNA, 15 bp, Homo sapiens
aaggcccactcaacc

SEQ ID NO: 869634 - DNA, 15 bp, Homo sapiens
aggcccactcaaccc

SEQ ID NO: 869635 - DNA, 15 bp, Homo sapiens
ggcccactcaacccc

SEQ ID NO: 869636 - DNA, 15 bp, Homo sapiens
gcccactcaacccca

SEQ ID NO: 869637 - DNA, 15 bp, Homo sapiens
cccactcaaccccag

SEQ ID NO: 869638 - DNA, 15 bp, Homo sapiens
ccactcaaccccagc

SEQ ID NO: 869639 - DNA, 15 bp, Homo sapiens
cactcaaccccagcc

SEQ ID NO: 869640 - DNA, 15 bp, Homo sapiens
actcaaccccagcct

SEQ ID NO: 869641 - DNA, 15 bp, Homo sapiens
ctcaaccccagcctc

SEQ ID NO: 869642 - DNA, 15 bp, Homo sapiens
tcaaccccagcctct

SEQ ID NO: 869643 - DNA, 15 bp, Homo sapiens
caaccccagcctctg

SEQ ID NO: 869644 - DNA, 15 bp, Homo sapiens
aaccccagcctctgc

SEQ ID NO: 869645 - DNA, 15 bp, Homo sapiens
accccagcctctgcc

SEQ ID NO: 869646 - DNA, 15 bp, Homo sapiens
ccccagcctctgcca

SEQ ID NO: 869647 - DNA, 15 bp, Homo sapiens
cccagcctctgccaa

SEQ ID NO: 869648 - DNA, 15 bp, Homo sapiens
ccagcctctgccaag

SEQ ID NO: 869649 - DNA, 15 bp, Homo sapiens
cagcctctgccaagg

SEQ ID NO: 869650 - DNA, 15 bp, Homo sapiens
agcctctgccaaggc

SEQ ID NO: 869651 - DNA, 15 bp, Homo sapiens
gcctctgccaaggcc

SEQ ID NO: 869652 - DNA, 15 bp, Homo sapiens
cctctgccaaggccg

SEQ ID NO: 869653 - DNA, 15 bp, Homo sapiens
ctctgccaaggccgt

SEQ ID NO: 869654 - DNA, 15 bp, Homo sapiens
tctgccaaggccgtt

SEQ ID NO: 869655 - DNA, 15 bp, Homo sapiens
ctgccaaggccgttt

SEQ ID NO: 869656 - DNA, 15 bp, Homo sapiens
tgccaaggccgtttg

SEQ ID NO: 869657 - DNA, 15 bp, Homo sapiens
gccaaggccgtttgt

SEQ ID NO: 869658 - DNA, 15 bp, Homo sapiens
ccaaggccgtttgtg

SEQ ID NO: 869659 - DNA, 15 bp, Homo sapiens
caaggccgtttgtgt

SEQ ID NO: 869660 - DNA, 15 bp, Homo sapiens
aaggccgtttgtgtg

SEQ ID NO: 869661 - DNA, 15 bp, Homo sapiens
aggccgtttgtgtgc

SEQ ID NO: 869662 - DNA, 15 bp, Homo sapiens
ggccgtttgtgtgct

SEQ ID NO: 869663 - DNA, 15 bp, Homo sapiens
gccgtttgtgtgcta

SEQ ID NO: 869664 - DNA, 15 bp, Homo sapiens
ccgtttgtgtgctaa

SEQ ID NO: 869665 - DNA, 15 bp, Homo sapiens
cgtttgtgtgctaag

SEQ ID NO: 869666 - DNA, 15 bp, Homo sapiens
gtttgtgtgctaagc

SEQ ID NO: 869667 - DNA, 15 bp, Homo sapiens
tttgtgtgctaagcc

SEQ ID NO: 869668 - DNA, 15 bp, Homo sapiens
ttgtgtgctaagcca

SEQ ID NO: 869669 - DNA, 15 bp, Homo sapiens
tgtgtgctaagccat

SEQ ID NO: 869670 - DNA, 15 bp, Homo sapiens
gtgtgctaagccatt

SEQ ID NO: 869671 - DNA, 15 bp, Homo sapiens
tgtgctaagccattc

SEQ ID NO: 869672 - DNA, 15 bp, Homo sapiens
gtgctaagccattca

SEQ ID NO: 869673 - DNA, 15 bp, Homo sapiens
tgctaagccattcag

SEQ ID NO: 869674 - DNA, 15 bp, Homo sapiens
gctaagccattcagg

SEQ ID NO: 869675 - DNA, 15 bp, Homo sapiens
ctaagccattcaggg

SEQ ID NO: 869676 - DNA, 15 bp, Homo sapiens
taagccattcagggt

SEQ ID NO: 869677 - DNA, 15 bp, Homo sapiens
aagccattcagggtc

SEQ ID NO: 869678 - DNA, 15 bp, Homo sapiens
agccattcagggtct

SEQ ID NO: 869679 - DNA, 15 bp, Homo sapiens
gccattcagggtctg

SEQ ID NO: 869680 - DNA, 15 bp, Homo sapiens
ccattcagggtctgc

SEQ ID NO: 869681 - DNA, 15 bp, Homo sapiens
cattcagggtctgct

SEQ ID NO: 869682 - DNA, 15 bp, Homo sapiens
attcagggtctgctg

SEQ ID NO: 869683 - DNA, 15 bp, Homo sapiens
ttcagggtctgctgt

SEQ ID NO: 869684 - DNA, 15 bp, Homo sapiens
tcagggtctgctgta

SEQ ID NO: 869685 - DNA, 15 bp, Homo sapiens
cagggtctgctgtag

SEQ ID NO: 869686 - DNA, 15 bp, Homo sapiens
agggtctgctgtaga

SEQ ID NO: 869687 - DNA, 15 bp, Homo sapiens
gggtctgctgtagaa

SEQ ID NO: 869688 - DNA, 15 bp, Homo sapiens
ggtctgctgtagaat

SEQ ID NO: 869689 - DNA, 15 bp, Homo sapiens
gtctgctgtagaata

SEQ ID NO: 869690 - DNA, 15 bp, Homo sapiens
tctgctgtagaatag

SEQ ID NO: 869691 - DNA, 15 bp, Homo sapiens
ctgctgtagaatagt

SEQ ID NO: 869692 - DNA, 15 bp, Homo sapiens
tgctgtagaatagta

SEQ ID NO: 869693 - DNA, 15 bp, Homo sapiens
gctgtagaatagtag

SEQ ID NO: 869694 - DNA, 15 bp, Homo sapiens
ctgtagaatagtaga

SEQ ID NO: 869695 - DNA, 15 bp, Homo sapiens
tgtagaatagtagac

SEQ ID NO: 869696 - DNA, 15 bp, Homo sapiens
gtagaatagtagacc

SEQ ID NO: 869697 - DNA, 15 bp, Homo sapiens
tagaatagtagacca

SEQ ID NO: 869698 - DNA, 15 bp, Homo sapiens
agaatagtagaccag

SEQ ID NO: 869699 - DNA, 15 bp, Homo sapiens
gaatagtagaccagg

SEQ ID NO: 869700 - DNA, 15 bp, Homo sapiens
aatagtagaccagga

SEQ ID NO: 869701 - DNA, 15 bp, Homo sapiens
atagtagaccaggac

SEQ ID NO: 869702 - DNA, 15 bp, Homo sapiens
tagtagaccaggact

SEQ ID NO: 869703 - DNA, 15 bp, Homo sapiens
agtagaccaggactg

SEQ ID NO: 869704 - DNA, 15 bp, Homo sapiens
gtagaccaggactgg

SEQ ID NO: 869705 - DNA, 15 bp, Homo sapiens
tagaccaggactggg

SEQ ID NO: 869706 - DNA, 15 bp, Homo sapiens
agaccaggactggga

SEQ ID NO: 869707 - DNA, 15 bp, Homo sapiens
gaccaggactgggat

SEQ ID NO: 869708 - DNA, 15 bp, Homo sapiens
accaggactgggata

SEQ ID NO: 869709 - DNA, 15 bp, Homo sapiens
ccaggactgggatac

SEQ ID NO: 869710 - DNA, 15 bp, Homo sapiens
caggactgggataca

SEQ ID NO: 869711 - DNA, 15 bp, Homo sapiens
aggactgggatacat

SEQ ID NO: 869712 - DNA, 15 bp, Homo sapiens
ggactgggatacata

SEQ ID NO: 869713 - DNA, 15 bp, Homo sapiens
gactgggatacatag

SEQ ID NO: 869714 - DNA, 15 bp, Homo sapiens
actgggatacatagt

SEQ ID NO: 869715 - DNA, 15 bp, Homo sapiens
ctgggatacatagtt

SEQ ID NO: 869716 - DNA, 15 bp, Homo sapiens
tgggatacatagttt

SEQ ID NO: 869717 - DNA, 15 bp, Homo sapiens
gggatacatagtttt

SEQ ID NO: 869718 - DNA, 15 bp, Homo sapiens
ggatacatagttttc

SEQ ID NO: 869719 - DNA, 15 bp, Homo sapiens
gatacatagttttcc

SEQ ID NO: 869720 - DNA, 15 bp, Homo sapiens
atacatagttttccc

SEQ ID NO: 869721 - DNA, 15 bp, Homo sapiens
tacatagttttccca

SEQ ID NO: 869722 - DNA, 15 bp, Homo sapiens
acatagttttcccaa

SEQ ID NO: 869723 - DNA, 15 bp, Homo sapiens
catagttttcccaag

SEQ ID NO: 869724 - DNA, 15 bp, Homo sapiens
atagttttcccaagg

SEQ ID NO: 869725 - DNA, 15 bp, Homo sapiens
tagttttcccaagga

SEQ ID NO: 869726 - DNA, 15 bp, Homo sapiens
agttttcccaaggac

SEQ ID NO: 869727 - DNA, 15 bp, Homo sapiens
gttttcccaaggaca

SEQ ID NO: 869728 - DNA, 15 bp, Homo sapiens
ttttcccaaggacac

SEQ ID NO: 869729 - DNA, 15 bp, Homo sapiens
tttcccaaggacaca

SEQ ID NO: 869730 - DNA, 15 bp, Homo sapiens
ttcccaaggacacac

SEQ ID NO: 869731 - DNA, 15 bp, Homo sapiens
tcccaaggacacacg

SEQ ID NO: 869732 - DNA, 15 bp, Homo sapiens
cccaaggacacacgt

SEQ ID NO: 869733 - DNA, 15 bp, Homo sapiens
ccaaggacacacgta

SEQ ID NO: 869734 - DNA, 15 bp, Homo sapiens
caaggacacacgtaa

SEQ ID NO: 869735 - DNA, 15 bp, Homo sapiens
aaggacacacgtaat

SEQ ID NO: 869736 - DNA, 15 bp, Homo sapiens
aggacacacgtaatt

SEQ ID NO: 869737 - DNA, 15 bp, Homo sapiens
ggacacacgtaattc

SEQ ID NO: 869738 - DNA, 15 bp, Homo sapiens
gacacacgtaattcc

SEQ ID NO: 869739 - DNA, 15 bp, Homo sapiens
acacacgtaattcct

SEQ ID NO: 869740 - DNA, 15 bp, Homo sapiens
cacacgtaattcctg

SEQ ID NO: 869741 - DNA, 15 bp, Homo sapiens
acacgtaattcctga

SEQ ID NO: 869742 - DNA, 15 bp, Homo sapiens
cacgtaattcctgac

SEQ ID NO: 869743 - DNA, 15 bp, Homo sapiens
acgtaattcctgaca

SEQ ID NO: 869744 - DNA, 15 bp, Homo sapiens
cgtaattcctgacat

SEQ ID NO: 869745 - DNA, 15 bp, Homo sapiens
gtaattcctgacatc

SEQ ID NO: 869746 - DNA, 15 bp, Homo sapiens
taattcctgacatca

SEQ ID NO: 869747 - DNA, 15 bp, Homo sapiens
aattcctgacatcag

SEQ ID NO: 869748 - DNA, 15 bp, Homo sapiens
attcctgacatcagt

SEQ ID NO: 869749 - DNA, 15 bp, Homo sapiens
ttcctgacatcagtc

SEQ ID NO: 869750 - DNA, 15 bp, Homo sapiens
tcctgacatcagtcc

SEQ ID NO: 869751 - DNA, 15 bp, Homo sapiens
cctgacatcagtcct

SEQ ID NO: 869752 - DNA, 15 bp, Homo sapiens
ctgacatcagtcctg

SEQ ID NO: 869753 - DNA, 15 bp, Homo sapiens
tgacatcagtcctga

SEQ ID NO: 869754 - DNA, 15 bp, Homo sapiens
gacatcagtcctgag

SEQ ID NO: 869755 - DNA, 15 bp, Homo sapiens
acatcagtcctgaga

SEQ ID NO: 869756 - DNA, 15 bp, Homo sapiens
catcagtcctgagac

SEQ ID NO: 869757 - DNA, 15 bp, Homo sapiens
atcagtcctgagacc

SEQ ID NO: 869758 - DNA, 15 bp, Homo sapiens
tcagtcctgagacct

SEQ ID NO: 869759 - DNA, 15 bp, Homo sapiens
cagtcctgagaccta

SEQ ID NO: 869760 - DNA, 15 bp, Homo sapiens
agtcctgagacctag

SEQ ID NO: 869761 - DNA, 15 bp, Homo sapiens
gtcctgagacctaga

SEQ ID NO: 869762 - DNA, 15 bp, Homo sapiens
tcctgagacctagag

SEQ ID NO: 869763 - DNA, 15 bp, Homo sapiens
cctgagacctagagt

SEQ ID NO: 869764 - DNA, 15 bp, Homo sapiens
ctgagacctagagtt

SEQ ID NO: 869765 - DNA, 15 bp, Homo sapiens
tgagacctagagttt

SEQ ID NO: 869766 - DNA, 15 bp, Homo sapiens
gagacctagagtttt

SEQ ID NO: 869767 - DNA, 15 bp, Homo sapiens
agacctagagttttc

SEQ ID NO: 869768 - DNA, 15 bp, Homo sapiens
gacctagagttttcc

SEQ ID NO: 869769 - DNA, 15 bp, Homo sapiens
acctagagttttcct

SEQ ID NO: 869770 - DNA, 15 bp, Homo sapiens
cctagagttttcctc

SEQ ID NO: 869771 - DNA, 15 bp, Homo sapiens
ctagagttttcctct

SEQ ID NO: 869772 - DNA, 15 bp, Homo sapiens
tagagttttcctcta

SEQ ID NO: 869773 - DNA, 15 bp, Homo sapiens
agagttttcctctaa

SEQ ID NO: 869774 - DNA, 15 bp, Homo sapiens
gagttttcctctaaa

SEQ ID NO: 869775 - DNA, 15 bp, Homo sapiens
ttttcctctaaaatc

SEQ ID NO: 869776 - DNA, 15 bp, Homo sapiens
tttcctctaaaatca

SEQ ID NO: 869777 - DNA, 15 bp, Homo sapiens
ttcctctaaaatcat

SEQ ID NO: 869778 - DNA, 15 bp, Homo sapiens
tcctctaaaatcatc

SEQ ID NO: 869779 - DNA, 15 bp, Homo sapiens
cctctaaaatcatcc

SEQ ID NO: 869780 - DNA, 15 bp, Homo sapiens
ctctaaaatcatcct

SEQ ID NO: 869781 - DNA, 15 bp, Homo sapiens
tctaaaatcatccta

SEQ ID NO: 869782 - DNA, 15 bp, Homo sapiens
ctaaaatcatcctag

SEQ ID NO: 869783 - DNA, 15 bp, Homo sapiens
taaaatcatcctagt

SEQ ID NO: 869784 - DNA, 15 bp, Homo sapiens
aaaatcatcctagtt

SEQ ID NO: 869785 - DNA, 15 bp, Homo sapiens
aaatcatcctagttt

SEQ ID NO: 869786 - DNA, 15 bp, Homo sapiens
aatcatcctagtttt

SEQ ID NO: 869787 - DNA, 15 bp, Homo sapiens
atcatcctagttttc

SEQ ID NO: 869788 - DNA, 15 bp, Homo sapiens
tcatcctagttttcc

SEQ ID NO: 869789 - DNA, 15 bp, Homo sapiens
catcctagttttcct

SEQ ID NO: 869790 - DNA, 15 bp, Homo sapiens
atcctagttttcctc

SEQ ID NO: 869791 - DNA, 15 bp, Homo sapiens
tcctagttttcctct

SEQ ID NO: 869792 - DNA, 15 bp, Homo sapiens
cctagttttcctcta

SEQ ID NO: 869793 - DNA, 15 bp, Homo sapiens
ctagttttcctctaa

SEQ ID NO: 869794 - DNA, 15 bp, Homo sapiens
cctctaaaatcatca

SEQ ID NO: 869795 - DNA, 15 bp, Homo sapiens
ctctaaaatcatcaa

SEQ ID NO: 869796 - DNA, 15 bp, Homo sapiens
tctaaaatcatcaag

SEQ ID NO: 869797 - DNA, 15 bp, Homo sapiens
ctaaaatcatcaagc

SEQ ID NO: 869798 - DNA, 15 bp, Homo sapiens
taaaatcatcaagca

SEQ ID NO: 869799 - DNA, 15 bp, Homo sapiens
aaaatcatcaagcac

SEQ ID NO: 869800 - DNA, 15 bp, Homo sapiens
aaatcatcaagcacc

SEQ ID NO: 869801 - DNA, 15 bp, Homo sapiens
aatcatcaagcaccc

SEQ ID NO: 869802 - DNA, 15 bp, Homo sapiens
atcatcaagcacccg

SEQ ID NO: 869803 - DNA, 15 bp, Homo sapiens
tcatcaagcacccgt

SEQ ID NO: 869804 - DNA, 15 bp, Homo sapiens
catcaagcacccgtg

SEQ ID NO: 869805 - DNA, 15 bp, Homo sapiens
atcaagcacccgtgg

SEQ ID NO: 869806 - DNA, 15 bp, Homo sapiens
tcaagcacccgtggc

SEQ ID NO: 869807 - DNA, 15 bp, Homo sapiens
caagcacccgtggcc

SEQ ID NO: 869808 - DNA, 15 bp, Homo sapiens
aagcacccgtggccc

SEQ ID NO: 869809 - DNA, 15 bp, Homo sapiens
agcacccgtggccca

SEQ ID NO: 869810 - DNA, 15 bp, Homo sapiens
gcacccgtggcccaa

SEQ ID NO: 869811 - DNA, 15 bp, Homo sapiens
cacccgtggcccaat

SEQ ID NO: 869812 - DNA, 15 bp, Homo sapiens
acccgtggcccaatt

SEQ ID NO: 869813 - DNA, 15 bp, Homo sapiens
cccgtggcccaattc

SEQ ID NO: 869814 - DNA, 15 bp, Homo sapiens
ccgtggcccaattct

SEQ ID NO: 869815 - DNA, 15 bp, Homo sapiens
cgtggcccaattctc

SEQ ID NO: 869816 - DNA, 15 bp, Homo sapiens
gtggcccaattctcc

SEQ ID NO: 869817 - DNA, 15 bp, Homo sapiens
tggcccaattctccc

SEQ ID NO: 869818 - DNA, 15 bp, Homo sapiens
ggcccaattctccct

SEQ ID NO: 869819 - DNA, 15 bp, Homo sapiens
cttgtaaggatagct

SEQ ID NO: 869820 - DNA, 15 bp, Homo sapiens
ttgtaaggatagcta

SEQ ID NO: 869821 - DNA, 15 bp, Homo sapiens
tgtaaggatagctac

SEQ ID NO: 869822 - DNA, 15 bp, Homo sapiens
gtaaggatagctaca

SEQ ID NO: 869823 - DNA, 15 bp, Homo sapiens
taaggatagctacat

SEQ ID NO: 869824 - DNA, 15 bp, Homo sapiens
aaggatagctacatc

SEQ ID NO: 869825 - DNA, 15 bp, Homo sapiens
aggatagctacatct

SEQ ID NO: 869826 - DNA, 15 bp, Homo sapiens
ggatagctacatctt

SEQ ID NO: 869827 - DNA, 15 bp, Homo sapiens
gatagctacatcttt

SEQ ID NO: 869828 - DNA, 15 bp, Homo sapiens
atagctacatctttc

SEQ ID NO: 869829 - DNA, 15 bp, Homo sapiens
tagctacatctttcc

SEQ ID NO: 869830 - DNA, 15 bp, Homo sapiens
agctacatctttcct

SEQ ID NO: 869831 - DNA, 15 bp, Homo sapiens
gctacatctttcctc

SEQ ID NO: 869832 - DNA, 15 bp, Homo sapiens
ctacatctttcctca

SEQ ID NO: 869833 - DNA, 15 bp, Homo sapiens
tacatctttcctcat

SEQ ID NO: 869834 - DNA, 15 bp, Homo sapiens
acatctttcctcatt

SEQ ID NO: 869835 - DNA, 15 bp, Homo sapiens
catctttcctcattt

SEQ ID NO: 869836 - DNA, 15 bp, Homo sapiens
atctttcctcatttg

SEQ ID NO: 869837 - DNA, 15 bp, Homo sapiens
atttgtaaagtcctg

SEQ ID NO: 869838 - DNA, 15 bp, Homo sapiens
tttgtaaagtcctgg

SEQ ID NO: 869839 - DNA, 15 bp, Homo sapiens
ttgtaaagtcctggg

SEQ ID NO: 869840 - DNA, 15 bp, Homo sapiens
tgtaaagtcctgggg

SEQ ID NO: 869841 - DNA, 15 bp, Homo sapiens
gtaaagtcctgggga

SEQ ID NO: 869842 - DNA, 15 bp, Homo sapiens
taaagtcctggggag

SEQ ID NO: 869843 - DNA, 15 bp, Homo sapiens
aaagtcctggggagc

SEQ ID NO: 869844 - DNA, 15 bp, Homo sapiens
aagtcctggggagca

SEQ ID NO: 869845 - DNA, 15 bp, Homo sapiens
agtcctggggagcac

SEQ ID NO: 869846 - DNA, 15 bp, Homo sapiens
gtcctggggagcaca

SEQ ID NO: 869847 - DNA, 15 bp, Homo sapiens
tcctggggagcacag

SEQ ID NO: 869848 - DNA, 15 bp, Homo sapiens
cctggggagcacaga

SEQ ID NO: 869849 - DNA, 15 bp, Homo sapiens
ctggggagcacagac

SEQ ID NO: 869850 - DNA, 15 bp, Homo sapiens
tggggagcacagact

SEQ ID NO: 869851 - DNA, 15 bp, Homo sapiens
ggggagcacagactt

SEQ ID NO: 869852 - DNA, 15 bp, Homo sapiens
gggagcacagacttt

SEQ ID NO: 869853 - DNA, 15 bp, Homo sapiens
ggagcacagactttg

SEQ ID NO: 869854 - DNA, 15 bp, Homo sapiens
gagcacagactttgt

SEQ ID NO: 869855 - DNA, 15 bp, Homo sapiens
gcacagactttgtct

SEQ ID NO: 869856 - DNA, 15 bp, Homo sapiens
cacagactttgtctc

SEQ ID NO: 869857 - DNA, 15 bp, Homo sapiens
acagactttgtctct

SEQ ID NO: 869858 - DNA, 15 bp, Homo sapiens
cagactttgtctcta

SEQ ID NO: 869859 - DNA, 15 bp, Homo sapiens
agactttgtctctaa

SEQ ID NO: 869860 - DNA, 15 bp, Homo sapiens
gactttgtctctaaa

SEQ ID NO: 869861 - DNA, 15 bp, Homo sapiens
actttgtctctaaat

SEQ ID NO: 869862 - DNA, 15 bp, Homo sapiens
ctttgtctctaaata

SEQ ID NO: 869863 - DNA, 15 bp, Homo sapiens
tctctaaatagctag

SEQ ID NO: 869864 - DNA, 15 bp, Homo sapiens
ctctaaatagctagg

SEQ ID NO: 869865 - DNA, 15 bp, Homo sapiens
tctaaatagctaggt

SEQ ID NO: 869866 - DNA, 15 bp, Homo sapiens
ctaaatagctaggtc

SEQ ID NO: 869867 - DNA, 15 bp, Homo sapiens
taaatagctaggtca

SEQ ID NO: 869868 - DNA, 15 bp, Homo sapiens
aaatagctaggtcaa

SEQ ID NO: 869869 - DNA, 15 bp, Homo sapiens
aatagctaggtcaag

SEQ ID NO: 869870 - DNA, 15 bp, Homo sapiens
atagctaggtcaaga

SEQ ID NO: 869871 - DNA, 15 bp, Homo sapiens
tagctaggtcaagag

SEQ ID NO: 869872 - DNA, 15 bp, Homo sapiens
agctaggtcaagagt

SEQ ID NO: 869873 - DNA, 15 bp, Homo sapiens
gctaggtcaagagtt

SEQ ID NO: 869874 - DNA, 15 bp, Homo sapiens
ctaggtcaagagttc

SEQ ID NO: 869875 - DNA, 15 bp, Homo sapiens
taggtcaagagttct

SEQ ID NO: 869876 - DNA, 15 bp, Homo sapiens
aggtcaagagttctt

SEQ ID NO: 869877 - DNA, 15 bp, Homo sapiens
ggtcaagagttctta

SEQ ID NO: 869878 - DNA, 15 bp, Homo sapiens
cttaccaaccctata

SEQ ID NO: 869879 - DNA, 15 bp, Homo sapiens
ttaccaaccctataa

SEQ ID NO: 869880 - DNA, 15 bp, Homo sapiens
taccaaccctataaa

SEQ ID NO: 869881 - DNA, 15 bp, Homo sapiens
accaaccctataaac

SEQ ID NO: 869882 - DNA, 15 bp, Homo sapiens
ccaaccctataaact

SEQ ID NO: 869883 - DNA, 15 bp, Homo sapiens
caaccctataaactt

SEQ ID NO: 869884 - DNA, 15 bp, Homo sapiens
aaccctataaacttt

SEQ ID NO: 869885 - DNA, 15 bp, Homo sapiens
accctataaactttc

SEQ ID NO: 869886 - DNA, 15 bp, Homo sapiens
ccctataaactttca

SEQ ID NO: 869887 - DNA, 15 bp, Homo sapiens
cctataaactttcaa

SEQ ID NO: 869888 - DNA, 15 bp, Homo sapiens
ctataaactttcaat

SEQ ID NO: 869889 - DNA, 15 bp, Homo sapiens
tataaactttcaatg

SEQ ID NO: 869890 - DNA, 15 bp, Homo sapiens
ataaactttcaatga

SEQ ID NO: 869891 - DNA, 15 bp, Homo sapiens
taaactttcaatgaa

SEQ ID NO: 869892 - DNA, 15 bp, Homo sapiens
aaactttcaatgaaa

SEQ ID NO: 869893 - DNA, 15 bp, Homo sapiens
aactttcaatgaaaa

SEQ ID NO: 869894 - DNA, 15 bp, Homo sapiens
actttcaatgaaaac

SEQ ID NO: 869895 - DNA, 15 bp, Homo sapiens
ctttcaatgaaaact

SEQ ID NO: 869896 - DNA, 15 bp, Homo sapiens
tttcaatgaaaactt

SEQ ID NO: 869897 - DNA, 15 bp, Homo sapiens
ttcaatgaaaacttc

SEQ ID NO: 869898 - DNA, 15 bp, Homo sapiens
tcaatgaaaacttca

SEQ ID NO: 869899 - DNA, 15 bp, Homo sapiens
caatgaaaacttcag

SEQ ID NO: 869900 - DNA, 15 bp, Homo sapiens
aatgaaaacttcagt

SEQ ID NO: 869901 - DNA, 15 bp, Homo sapiens
atgaaaacttcagtg

SEQ ID NO: 869902 - DNA, 15 bp, Homo sapiens
tgaaaacttcagtga

SEQ ID NO: 869903 - DNA, 15 bp, Homo sapiens
gaaaacttcagtgaa

SEQ ID NO: 869904 - DNA, 15 bp, Homo sapiens
aaaacttcagtgaaa

SEQ ID NO: 869905 - DNA, 15 bp, Homo sapiens
aaacttcagtgaaag

SEQ ID NO: 869906 - DNA, 15 bp, Homo sapiens
aacttcagtgaaagt

SEQ ID NO: 869907 - DNA, 15 bp, Homo sapiens
acttcagtgaaagtt

SEQ ID NO: 869908 - DNA, 15 bp, Homo sapiens
cttcagtgaaagtta

SEQ ID NO: 869909 - DNA, 15 bp, Homo sapiens
ttcagtgaaagttag

SEQ ID NO: 869910 - DNA, 15 bp, Homo sapiens
tcagtgaaagttagg

SEQ ID NO: 869911 - DNA, 15 bp, Homo sapiens
cagtgaaagttagga

SEQ ID NO: 869912 - DNA, 15 bp, Homo sapiens
agtgaaagttaggat

SEQ ID NO: 869913 - DNA, 15 bp, Homo sapiens
gtgaaagttaggatt

SEQ ID NO: 869914 - DNA, 15 bp, Homo sapiens
tgaaagttaggattt

SEQ ID NO: 869915 - DNA, 15 bp, Homo sapiens
gaaagttaggattta

SEQ ID NO: 869916 - DNA, 15 bp, Homo sapiens
aaagttaggatttac

SEQ ID NO: 869917 - DNA, 15 bp, Homo sapiens
aagttaggatttaca

SEQ ID NO: 869918 - DNA, 15 bp, Homo sapiens
agttaggatttacat

SEQ ID NO: 869919 - DNA, 15 bp, Homo sapiens
gttaggatttacata

SEQ ID NO: 869920 - DNA, 15 bp, Homo sapiens
ttaggatttacatag

SEQ ID NO: 869921 - DNA, 15 bp, Homo sapiens
taggatttacatagg

SEQ ID NO: 869922 - DNA, 15 bp, Homo sapiens
aggatttacatagga

SEQ ID NO: 869923 - DNA, 15 bp, Homo sapiens
ggatttacataggat

SEQ ID NO: 869924 - DNA, 15 bp, Homo sapiens
gatttacataggatg

SEQ ID NO: 869925 - DNA, 15 bp, Homo sapiens
atttacataggatgt

SEQ ID NO: 869926 - DNA, 15 bp, Homo sapiens
tttacataggatgta

SEQ ID NO: 869927 - DNA, 15 bp, Homo sapiens
ttacataggatgtat

SEQ ID NO: 869928 - DNA, 15 bp, Homo sapiens
tacataggatgtatc

SEQ ID NO: 869929 - DNA, 15 bp, Homo sapiens
acataggatgtatca

SEQ ID NO: 869930 - DNA, 15 bp, Homo sapiens
cataggatgtatcag

SEQ ID NO: 869931 - DNA, 15 bp, Homo sapiens
ataggatgtatcagg

SEQ ID NO: 869932 - DNA, 15 bp, Homo sapiens
taggatgtatcaggt

SEQ ID NO: 869933 - DNA, 15 bp, Homo sapiens
aggatgtatcaggtg

SEQ ID NO: 869934 - DNA, 15 bp, Homo sapiens
ggatgtatcaggtgg

SEQ ID NO: 869935 - DNA, 15 bp, Homo sapiens
gatgtatcaggtgga

SEQ ID NO: 869936 - DNA, 15 bp, Homo sapiens
atgtatcaggtggac

SEQ ID NO: 869937 - DNA, 15 bp, Homo sapiens
tgtatcaggtggaca

SEQ ID NO: 869938 - DNA, 15 bp, Homo sapiens
gtatcaggtggacag

SEQ ID NO: 869939 - DNA, 15 bp, Homo sapiens
tatcaggtggacagt

SEQ ID NO: 869940 - DNA, 15 bp, Homo sapiens
atcaggtggacagtt

SEQ ID NO: 869941 - DNA, 15 bp, Homo sapiens
tcaggtggacagttt

SEQ ID NO: 869942 - DNA, 15 bp, Homo sapiens
caggtggacagttta

SEQ ID NO: 869943 - DNA, 15 bp, Homo sapiens
aggtggacagtttac

SEQ ID NO: 869944 - DNA, 15 bp, Homo sapiens
ggtggacagtttaca

SEQ ID NO: 869945 - DNA, 15 bp, Homo sapiens
gtggacagtttacac

SEQ ID NO: 869946 - DNA, 15 bp, Homo sapiens
tggacagtttacaca

SEQ ID NO: 869947 - DNA, 15 bp, Homo sapiens
ggacagtttacacag

SEQ ID NO: 869948 - DNA, 15 bp, Homo sapiens
gacagtttacacaga

SEQ ID NO: 869949 - DNA, 15 bp, Homo sapiens
acagtttacacagat

SEQ ID NO: 869950 - DNA, 15 bp, Homo sapiens
cagtttacacagata

SEQ ID NO: 869951 - DNA, 15 bp, Homo sapiens
agtttacacagatag

SEQ ID NO: 869952 - DNA, 15 bp, Homo sapiens
gtttacacagatagc

SEQ ID NO: 869953 - DNA, 15 bp, Homo sapiens
tttacacagatagca

SEQ ID NO: 869954 - DNA, 15 bp, Homo sapiens
ttacacagatagcac

SEQ ID NO: 869955 - DNA, 15 bp, Homo sapiens
tacacagatagcacc

SEQ ID NO: 869956 - DNA, 15 bp, Homo sapiens
acacagatagcaccc

SEQ ID NO: 869957 - DNA, 15 bp, Homo sapiens
cacagatagcaccca

SEQ ID NO: 869958 - DNA, 15 bp, Homo sapiens
acagatagcacccag

SEQ ID NO: 869959 - DNA, 15 bp, Homo sapiens
cagatagcacccagc

SEQ ID NO: 869960 - DNA, 15 bp, Homo sapiens
agatagcacccagct

SEQ ID NO: 869961 - DNA, 15 bp, Homo sapiens
gatagcacccagctg

SEQ ID NO: 869962 - DNA, 15 bp, Homo sapiens
atagcacccagctgg

SEQ ID NO: 869963 - DNA, 15 bp, Homo sapiens
tagcacccagctggg

SEQ ID NO: 869964 - DNA, 15 bp, Homo sapiens
agcacccagctgggc

SEQ ID NO: 869965 - DNA, 15 bp, Homo sapiens
gcacccagctgggct

SEQ ID NO: 869966 - DNA, 15 bp, Homo sapiens
cacccagctgggctg

SEQ ID NO: 869967 - DNA, 15 bp, Homo sapiens
acccagctgggctgg

SEQ ID NO: 869968 - DNA, 15 bp, Homo sapiens
cccagctgggctggc

SEQ ID NO: 869969 - DNA, 15 bp, Homo sapiens
ccagctgggctggca

SEQ ID NO: 869970 - DNA, 15 bp, Homo sapiens
cagctgggctggcaa

SEQ ID NO: 869971 - DNA, 15 bp, Homo sapiens
agctgggctggcaag

SEQ ID NO: 869972 - DNA, 15 bp, Homo sapiens
gctgggctggcaagg

SEQ ID NO: 869973 - DNA, 15 bp, Homo sapiens
ctgggctggcaagga

SEQ ID NO: 869974 - DNA, 15 bp, Homo sapiens
tgggctggcaaggat

SEQ ID NO: 869975 - DNA, 15 bp, Homo sapiens
gggctggcaaggata

SEQ ID NO: 869976 - DNA, 15 bp, Homo sapiens
ggctggcaaggataa

SEQ ID NO: 869977 - DNA, 15 bp, Homo sapiens
gctggcaaggataat

SEQ ID NO: 869978 - DNA, 15 bp, Homo sapiens
ctggcaaggataatt

SEQ ID NO: 869979 - DNA, 15 bp, Homo sapiens
tggcaaggataattg

SEQ ID NO: 869980 - DNA, 15 bp, Homo sapiens
ggcaaggataattga

SEQ ID NO: 869981 - DNA, 15 bp, Homo sapiens
gcaaggataattgac

SEQ ID NO: 869982 - DNA, 15 bp, Homo sapiens
caaggataattgaca

SEQ ID NO: 869983 - DNA, 15 bp, Homo sapiens
aaggataattgacaa

SEQ ID NO: 869984 - DNA, 15 bp, Homo sapiens
aggataattgacaac

SEQ ID NO: 869985 - DNA, 15 bp, Homo sapiens
ggataattgacaaca

SEQ ID NO: 869986 - DNA, 15 bp, Homo sapiens
gataattgacaacac

SEQ ID NO: 869987 - DNA, 15 bp, Homo sapiens
ataattgacaacacc

SEQ ID NO: 869988 - DNA, 15 bp, Homo sapiens
taattgacaacaccc

SEQ ID NO: 869989 - DNA, 15 bp, Homo sapiens
aattgacaacaccca

SEQ ID NO: 869990 - DNA, 15 bp, Homo sapiens
attgacaacacccag

SEQ ID NO: 869991 - DNA, 15 bp, Homo sapiens
ttgacaacacccaga

SEQ ID NO: 869992 - DNA, 15 bp, Homo sapiens
tgacaacacccagaa

SEQ ID NO: 869993 - DNA, 15 bp, Homo sapiens
gacaacacccagaaa

SEQ ID NO: 869994 - DNA, 15 bp, Homo sapiens
acaacacccagaaaa

SEQ ID NO: 869995 - DNA, 15 bp, Homo sapiens
caacacccagaaaaa

SEQ ID NO: 869996 - DNA, 15 bp, Homo sapiens
aacacccagaaaaaa

SEQ ID NO: 869997 - DNA, 15 bp, Homo sapiens
acacccagaaaaaag

SEQ ID NO: 869998 - DNA, 15 bp, Homo sapiens
cacccagaaaaaaga

SEQ ID NO: 869999 - DNA, 15 bp, Homo sapiens
acccagaaaaaagaa

SEQ ID NO: 870000 - DNA, 15 bp, Homo sapiens
cccagaaaaaagaaa

SEQ ID NO: 870001 - DNA, 15 bp, Homo sapiens
ccagaaaaaagaaat

SEQ ID NO: 870002 - DNA, 15 bp, Homo sapiens
cagaaaaaagaaatt

SEQ ID NO: 870003 - DNA, 15 bp, Homo sapiens
agaaaaaagaaattg

SEQ ID NO: 870004 - DNA, 15 bp, Homo sapiens
gaaaaaagaaattga

SEQ ID NO: 870005 - DNA, 15 bp, Homo sapiens
aaaaaagaaattgaa

SEQ ID NO: 870006 - DNA, 15 bp, Homo sapiens
aaaaagaaattgaac

SEQ ID NO: 870007 - DNA, 15 bp, Homo sapiens
aaaagaaattgaaca

SEQ ID NO: 870008 - DNA, 15 bp, Homo sapiens
aaagaaattgaacat

SEQ ID NO: 870009 - DNA, 15 bp, Homo sapiens
aagaaattgaacatt

SEQ ID NO: 870010 - DNA, 15 bp, Homo sapiens
agaaattgaacattt

SEQ ID NO: 870011 - DNA, 15 bp, Homo sapiens
gaaattgaacatttt

SEQ ID NO: 870012 - DNA, 15 bp, Homo sapiens
aaattgaacattttg

SEQ ID NO: 870013 - DNA, 15 bp, Homo sapiens
aattgaacattttga

SEQ ID NO: 870014 - DNA, 15 bp, Homo sapiens
attgaacattttgag

SEQ ID NO: 870015 - DNA, 15 bp, Homo sapiens
ttgaacattttgagg

SEQ ID NO: 870016 - DNA, 15 bp, Homo sapiens
tgaacattttgagga

SEQ ID NO: 870017 - DNA, 15 bp, Homo sapiens
gaacattttgaggag

SEQ ID NO: 870018 - DNA, 15 bp, Homo sapiens
aacattttgaggaga

SEQ ID NO: 870019 - DNA, 15 bp, Homo sapiens
acattttgaggagag

SEQ ID NO: 870020 - DNA, 15 bp, Homo sapiens
cattttgaggagagt

SEQ ID NO: 870021 - DNA, 15 bp, Homo sapiens
attttgaggagagtt

SEQ ID NO: 870022 - DNA, 15 bp, Homo sapiens
ttttgaggagagttt

SEQ ID NO: 870023 - DNA, 15 bp, Homo sapiens
tttgaggagagtttc

SEQ ID NO: 870024 - DNA, 15 bp, Homo sapiens
ttgaggagagtttca

SEQ ID NO: 870025 - DNA, 15 bp, Homo sapiens
tgaggagagtttcat

SEQ ID NO: 870026 - DNA, 15 bp, Homo sapiens
gaggagagtttcatg

SEQ ID NO: 870027 - DNA, 15 bp, Homo sapiens
aggagagtttcatgt

SEQ ID NO: 870028 - DNA, 15 bp, Homo sapiens
ggagagtttcatgtc

SEQ ID NO: 870029 - DNA, 15 bp, Homo sapiens
gagagtttcatgtca

SEQ ID NO: 870030 - DNA, 15 bp, Homo sapiens
agagtttcatgtcag

SEQ ID NO: 870031 - DNA, 15 bp, Homo sapiens
gagtttcatgtcagg

SEQ ID NO: 870032 - DNA, 15 bp, Homo sapiens
agtttcatgtcagga

SEQ ID NO: 870033 - DNA, 15 bp, Homo sapiens
gtttcatgtcaggag

SEQ ID NO: 870034 - DNA, 15 bp, Homo sapiens
tttcatgtcaggaga

SEQ ID NO: 870035 - DNA, 15 bp, Homo sapiens
ttcatgtcaggagac

SEQ ID NO: 870036 - DNA, 15 bp, Homo sapiens
tcatgtcaggagacc

SEQ ID NO: 870037 - DNA, 15 bp, Homo sapiens
catgtcaggagaccc

SEQ ID NO: 870038 - DNA, 15 bp, Homo sapiens
atgtcaggagaccca

SEQ ID NO: 870039 - DNA, 15 bp, Homo sapiens
tgtcaggagacccag

SEQ ID NO: 870040 - DNA, 15 bp, Homo sapiens
gtcaggagacccaga

SEQ ID NO: 870041 - DNA, 15 bp, Homo sapiens
tcaggagacccagaa

SEQ ID NO: 870042 - DNA, 15 bp, Homo sapiens
caggagacccagaaa

SEQ ID NO: 870043 - DNA, 15 bp, Homo sapiens
aggagacccagaaaa

SEQ ID NO: 870044 - DNA, 15 bp, Homo sapiens
ggagacccagaaaat

SEQ ID NO: 870045 - DNA, 15 bp, Homo sapiens
gagacccagaaaata

SEQ ID NO: 870046 - DNA, 15 bp, Homo sapiens
agacccagaaaatat

SEQ ID NO: 870047 - DNA, 15 bp, Homo sapiens
gacccagaaaatatt

SEQ ID NO: 870048 - DNA, 15 bp, Homo sapiens
acccagaaaatatta

SEQ ID NO: 870049 - DNA, 15 bp, Homo sapiens
cccagaaaatattag

SEQ ID NO: 870050 - DNA, 15 bp, Homo sapiens
ccagaaaatattaga

SEQ ID NO: 870051 - DNA, 15 bp, Homo sapiens
cagaaaatattagac

SEQ ID NO: 870052 - DNA, 15 bp, Homo sapiens
agaaaatattagaca

SEQ ID NO: 870053 - DNA, 15 bp, Homo sapiens
gaaaatattagacat

SEQ ID NO: 870054 - DNA, 15 bp, Homo sapiens
aaaatattagacatt

SEQ ID NO: 870055 - DNA, 15 bp, Homo sapiens
aaatattagacatta

SEQ ID NO: 870056 - DNA, 15 bp, Homo sapiens
aatattagacattag

SEQ ID NO: 870057 - DNA, 15 bp, Homo sapiens
atattagacattagt

SEQ ID NO: 870058 - DNA, 15 bp, Homo sapiens
tattagacattagtt

SEQ ID NO: 870059 - DNA, 15 bp, Homo sapiens
attagacattagttt

SEQ ID NO: 870060 - DNA, 15 bp, Homo sapiens
ttagacattagtttc

SEQ ID NO: 870061 - DNA, 15 bp, Homo sapiens
tagacattagtttcc

SEQ ID NO: 870062 - DNA, 15 bp, Homo sapiens
agacattagtttcct

SEQ ID NO: 870063 - DNA, 15 bp, Homo sapiens
gacattagtttcctg

SEQ ID NO: 870064 - DNA, 15 bp, Homo sapiens
acattagtttcctga

SEQ ID NO: 870065 - DNA, 15 bp, Homo sapiens
cattagtttcctgaa

SEQ ID NO: 870066 - DNA, 15 bp, Homo sapiens
attagtttcctgaat

SEQ ID NO: 870067 - DNA, 15 bp, Homo sapiens
ttagtttcctgaatg

SEQ ID NO: 870068 - DNA, 15 bp, Homo sapiens
tagtttcctgaatgg

SEQ ID NO: 870069 - DNA, 15 bp, Homo sapiens
agtttcctgaatggg

SEQ ID NO: 870070 - DNA, 15 bp, Homo sapiens
gtttcctgaatggga

SEQ ID NO: 870071 - DNA, 15 bp, Homo sapiens
tttcctgaatgggag

SEQ ID NO: 870072 - DNA, 15 bp, Homo sapiens
ttcctgaatgggagg

SEQ ID NO: 870073 - DNA, 15 bp, Homo sapiens
tcctgaatgggaggc

SEQ ID NO: 870074 - DNA, 15 bp, Homo sapiens
cctgaatgggaggca

SEQ ID NO: 870075 - DNA, 15 bp, Homo sapiens
ctgaatgggaggcaa

SEQ ID NO: 870076 - DNA, 15 bp, Homo sapiens
tgaatgggaggcaaa

SEQ ID NO: 870077 - DNA, 15 bp, Homo sapiens
gaatgggaggcaaaa

SEQ ID NO: 870078 - DNA, 15 bp, Homo sapiens
aatgggaggcaaaat

SEQ ID NO: 870079 - DNA, 15 bp, Homo sapiens
atgggaggcaaaata

SEQ ID NO: 870080 - DNA, 15 bp, Homo sapiens
tgggaggcaaaatat

SEQ ID NO: 870081 - DNA, 15 bp, Homo sapiens
gggaggcaaaatatg

SEQ ID NO: 870082 - DNA, 15 bp, Homo sapiens
ggaggcaaaatatga

SEQ ID NO: 870083 - DNA, 15 bp, Homo sapiens
gaggcaaaatatgat

SEQ ID NO: 870084 - DNA, 15 bp, Homo sapiens
aggcaaaatatgatt

SEQ ID NO: 870085 - DNA, 15 bp, Homo sapiens
ggcaaaatatgattt

SEQ ID NO: 870086 - DNA, 15 bp, Homo sapiens
gcaaaatatgatttg

SEQ ID NO: 870087 - DNA, 15 bp, Homo sapiens
caaaatatgatttga

SEQ ID NO: 870088 - DNA, 15 bp, Homo sapiens
aaaatatgatttgag

SEQ ID NO: 870089 - DNA, 15 bp, Homo sapiens
aaatatgatttgagg

SEQ ID NO: 870090 - DNA, 15 bp, Homo sapiens
aatatgatttgagga

SEQ ID NO: 870091 - DNA, 15 bp, Homo sapiens
atatgatttgaggaa

SEQ ID NO: 870092 - DNA, 15 bp, Homo sapiens
tatgatttgaggaaa

SEQ ID NO: 870093 - DNA, 15 bp, Homo sapiens
atgatttgaggaaaa

SEQ ID NO: 870094 - DNA, 15 bp, Homo sapiens
tgatttgaggaaaac

SEQ ID NO: 870095 - DNA, 15 bp, Homo sapiens
gatttgaggaaaaca

SEQ ID NO: 870096 - DNA, 15 bp, Homo sapiens
atttgaggaaaacag

SEQ ID NO: 870097 - DNA, 15 bp, Homo sapiens
tttgaggaaaacaga

SEQ ID NO: 870098 - DNA, 15 bp, Homo sapiens
ttgaggaaaacagat

SEQ ID NO: 870099 - DNA, 15 bp, Homo sapiens
tgaggaaaacagatt

SEQ ID NO: 870100 - DNA, 15 bp, Homo sapiens
gaggaaaacagatta

SEQ ID NO: 870101 - DNA, 15 bp, Homo sapiens
aggaaaacagattat

SEQ ID NO: 870102 - DNA, 15 bp, Homo sapiens
ggaaaacagattatc

SEQ ID NO: 870103 - DNA, 15 bp, Homo sapiens
gaaaacagattatcc

SEQ ID NO: 870104 - DNA, 15 bp, Homo sapiens
aaaacagattatcct

SEQ ID NO: 870105 - DNA, 15 bp, Homo sapiens
aaacagattatcctc

SEQ ID NO: 870106 - DNA, 15 bp, Homo sapiens
aacagattatcctct

SEQ ID NO: 870107 - DNA, 15 bp, Homo sapiens
acagattatcctctt

SEQ ID NO: 870108 - DNA, 15 bp, Homo sapiens
cagattatcctcttg

SEQ ID NO: 870109 - DNA, 15 bp, Homo sapiens
agattatcctcttgg

SEQ ID NO: 870110 - DNA, 15 bp, Homo sapiens
gattatcctcttggg

SEQ ID NO: 870111 - DNA, 15 bp, Homo sapiens
attatcctcttgggc

SEQ ID NO: 870112 - DNA, 15 bp, Homo sapiens
ttatcctcttgggca

SEQ ID NO: 870113 - DNA, 15 bp, Homo sapiens
tatcctcttgggcat

SEQ ID NO: 870114 - DNA, 15 bp, Homo sapiens
atcctcttgggcatc

SEQ ID NO: 870115 - DNA, 15 bp, Homo sapiens
tcctcttgggcatct

SEQ ID NO: 870116 - DNA, 15 bp, Homo sapiens
cctcttgggcatctc

SEQ ID NO: 870117 - DNA, 15 bp, Homo sapiens
ctcttgggcatctcc

SEQ ID NO: 870118 - DNA, 15 bp, Homo sapiens
tcttgggcatctcct

SEQ ID NO: 870119 - DNA, 15 bp, Homo sapiens
cttgggcatctcctg

SEQ ID NO: 870120 - DNA, 15 bp, Homo sapiens
ttgggcatctcctgg

SEQ ID NO: 870121 - DNA, 15 bp, Homo sapiens
tgggcatctcctggt

SEQ ID NO: 870122 - DNA, 15 bp, Homo sapiens
gggcatctcctggtc

SEQ ID NO: 870123 - DNA, 15 bp, Homo sapiens
ggcatctcctggtca

SEQ ID NO: 870124 - DNA, 15 bp, Homo sapiens
gcatctcctggtcat

SEQ ID NO: 870125 - DNA, 15 bp, Homo sapiens
catctcctggtcatt

SEQ ID NO: 870126 - DNA, 15 bp, Homo sapiens
atctcctggtcatta

SEQ ID NO: 870127 - DNA, 15 bp, Homo sapiens
tctcctggtcattaa

SEQ ID NO: 870128 - DNA, 15 bp, Homo sapiens
ctcctggtcattaag

SEQ ID NO: 870129 - DNA, 15 bp, Homo sapiens
tcctggtcattaagt

SEQ ID NO: 870130 - DNA, 15 bp, Homo sapiens
cctggtcattaagtg

SEQ ID NO: 870131 - DNA, 15 bp, Homo sapiens
ctggtcattaagtga

SEQ ID NO: 870132 - DNA, 15 bp, Homo sapiens
tggtcattaagtgaa

SEQ ID NO: 870133 - DNA, 15 bp, Homo sapiens
ggtcattaagtgaaa

SEQ ID NO: 870134 - DNA, 15 bp, Homo sapiens
gtcattaagtgaaat

SEQ ID NO: 870135 - DNA, 15 bp, Homo sapiens
tcattaagtgaaata

SEQ ID NO: 870136 - DNA, 15 bp, Homo sapiens
cattaagtgaaataa

SEQ ID NO: 870137 - DNA, 15 bp, Homo sapiens
attaagtgaaataaa

SEQ ID NO: 870138 - DNA, 15 bp, Homo sapiens
ttaagtgaaataaac

SEQ ID NO: 870139 - DNA, 15 bp, Homo sapiens
taagtgaaataaact

SEQ ID NO: 870140 - DNA, 15 bp, Homo sapiens
aagtgaaataaactc

SEQ ID NO: 870141 - DNA, 15 bp, Homo sapiens
agtgaaataaactca

SEQ ID NO: 870142 - DNA, 15 bp, Homo sapiens
gtgaaataaactcat

SEQ ID NO: 870143 - DNA, 15 bp, Homo sapiens
tgaaataaactcatc

SEQ ID NO: 870144 - DNA, 15 bp, Homo sapiens
gaaataaactcatct

SEQ ID NO: 870145 - DNA, 15 bp, Homo sapiens
aaataaactcatcta

SEQ ID NO: 870146 - DNA, 15 bp, Homo sapiens
aataaactcatctac

SEQ ID NO: 870147 - DNA, 15 bp, Homo sapiens
ataaactcatctact

SEQ ID NO: 870148 - DNA, 15 bp, Homo sapiens
taaactcatctactt

SEQ ID NO: 870149 - DNA, 15 bp, Homo sapiens
aaactcatctacttg

SEQ ID NO: 870150 - DNA, 15 bp, Homo sapiens
aactcatctacttgt

SEQ ID NO: 870151 - DNA, 15 bp, Homo sapiens
actcatctacttgtt

SEQ ID NO: 870152 - DNA, 15 bp, Homo sapiens
ctcatctacttgtta

SEQ ID NO: 870153 - DNA, 15 bp, Homo sapiens
tcatctacttgttaa

SEQ ID NO: 870154 - DNA, 15 bp, Homo sapiens
catctacttgttaag

SEQ ID NO: 870155 - DNA, 15 bp, Homo sapiens
atctacttgttaagt

SEQ ID NO: 870156 - DNA, 15 bp, Homo sapiens
tctacttgttaagtc

SEQ ID NO: 870157 - DNA, 15 bp, Homo sapiens
ctacttgttaagtct

SEQ ID NO: 870158 - DNA, 15 bp, Homo sapiens
tacttgttaagtctc

SEQ ID NO: 870159 - DNA, 15 bp, Homo sapiens
acttgttaagtctca

SEQ ID NO: 870160 - DNA, 15 bp, Homo sapiens
cttgttaagtctcat

SEQ ID NO: 870161 - DNA, 15 bp, Homo sapiens
ttgttaagtctcatc

SEQ ID NO: 870162 - DNA, 15 bp, Homo sapiens
tgttaagtctcatca

SEQ ID NO: 870163 - DNA, 15 bp, Homo sapiens
gttaagtctcatcac

SEQ ID NO: 870164 - DNA, 15 bp, Homo sapiens
ttaagtctcatcacc

SEQ ID NO: 870165 - DNA, 15 bp, Homo sapiens
taagtctcatcacct

SEQ ID NO: 870166 - DNA, 15 bp, Homo sapiens
aagtctcatcacctc

SEQ ID NO: 870167 - DNA, 15 bp, Homo sapiens
agtctcatcacctct

SEQ ID NO: 870168 - DNA, 15 bp, Homo sapiens
gtctcatcacctctc

SEQ ID NO: 870169 - DNA, 15 bp, Homo sapiens
tctcatcacctctct

SEQ ID NO: 870170 - DNA, 15 bp, Homo sapiens
ctcatcacctctctt

SEQ ID NO: 870171 - DNA, 15 bp, Homo sapiens
tcatcacctctcttt

SEQ ID NO: 870172 - DNA, 15 bp, Homo sapiens
catcacctctctttt

SEQ ID NO: 870173 - DNA, 15 bp, Homo sapiens
atcacctctcttttg

SEQ ID NO: 870174 - DNA, 15 bp, Homo sapiens
tcacctctcttttga

SEQ ID NO: 870175 - DNA, 15 bp, Homo sapiens
cacctctcttttgac

SEQ ID NO: 870176 - DNA, 15 bp, Homo sapiens
acctctcttttgact

SEQ ID NO: 870177 - DNA, 15 bp, Homo sapiens
cctctcttttgactc

SEQ ID NO: 870178 - DNA, 15 bp, Homo sapiens
ctctcttttgactca

SEQ ID NO: 870179 - DNA, 15 bp, Homo sapiens
tctcttttgactcaa

SEQ ID NO: 870180 - DNA, 15 bp, Homo sapiens
ctcttttgactcaaa

SEQ ID NO: 870181 - DNA, 15 bp, Homo sapiens
tcttttgactcaaac

SEQ ID NO: 870182 - DNA, 15 bp, Homo sapiens
cttttgactcaaacc

SEQ ID NO: 870183 - DNA, 15 bp, Homo sapiens
ttttgactcaaacct

SEQ ID NO: 870184 - DNA, 15 bp, Homo sapiens
tttgactcaaacctt

SEQ ID NO: 870185 - DNA, 15 bp, Homo sapiens
ttgactcaaaccttt

SEQ ID NO: 870186 - DNA, 15 bp, Homo sapiens
tgactcaaacctttc

SEQ ID NO: 870187 - DNA, 15 bp, Homo sapiens
gactcaaacctttcg

SEQ ID NO: 870188 - DNA, 15 bp, Homo sapiens
actcaaacctttcgt

SEQ ID NO: 870189 - DNA, 15 bp, Homo sapiens
ctcaaacctttcgtg

SEQ ID NO: 870190 - DNA, 15 bp, Homo sapiens
tcaaacctttcgtgg

SEQ ID NO: 870191 - DNA, 15 bp, Homo sapiens
caaacctttcgtggg

SEQ ID NO: 870192 - DNA, 15 bp, Homo sapiens
aaacctttcgtgggg

SEQ ID NO: 870193 - DNA, 15 bp, Homo sapiens
aacctttcgtggggt

SEQ ID NO: 870194 - DNA, 15 bp, Homo sapiens
acctttcgtggggtc

SEQ ID NO: 870195 - DNA, 15 bp, Homo sapiens
cctttcgtggggtca

SEQ ID NO: 870196 - DNA, 15 bp, Homo sapiens
ctttcgtggggtcat

SEQ ID NO: 870197 - DNA, 15 bp, Homo sapiens
tttcgtggggtcatt

SEQ ID NO: 870198 - DNA, 15 bp, Homo sapiens
ttcgtggggtcattt

SEQ ID NO: 870199 - DNA, 15 bp, Homo sapiens
tcgtggggtcatttt

SEQ ID NO: 870200 - DNA, 15 bp, Homo sapiens
cgtggggtcattttg

SEQ ID NO: 870201 - DNA, 15 bp, Homo sapiens
gtggggtcattttgt

SEQ ID NO: 870202 - DNA, 15 bp, Homo sapiens
tggggtcattttgtt

SEQ ID NO: 870203 - DNA, 15 bp, Homo sapiens
ggggtcattttgtta

SEQ ID NO: 870204 - DNA, 15 bp, Homo sapiens
gggtcattttgttag

SEQ ID NO: 870205 - DNA, 15 bp, Homo sapiens
ggtcattttgttagg

SEQ ID NO: 870206 - DNA, 15 bp, Homo sapiens
gtcattttgttagga

SEQ ID NO: 870207 - DNA, 15 bp, Homo sapiens
tcattttgttaggac

SEQ ID NO: 870208 - DNA, 15 bp, Homo sapiens
cattttgttaggact

SEQ ID NO: 870209 - DNA, 15 bp, Homo sapiens
attttgttaggactt

SEQ ID NO: 870210 - DNA, 15 bp, Homo sapiens
ttttgttaggacttc

SEQ ID NO: 870211 - DNA, 15 bp, Homo sapiens
tttgttaggacttct

SEQ ID NO: 870212 - DNA, 15 bp, Homo sapiens
ttgttaggacttctc

SEQ ID NO: 870213 - DNA, 15 bp, Homo sapiens
tgttaggacttctca

SEQ ID NO: 870214 - DNA, 15 bp, Homo sapiens
gttaggacttctcac

SEQ ID NO: 870215 - DNA, 15 bp, Homo sapiens
ttaggacttctcaca

SEQ ID NO: 870216 - DNA, 15 bp, Homo sapiens
taggacttctcacat

SEQ ID NO: 870217 - DNA, 15 bp, Homo sapiens
aggacttctcacatc

SEQ ID NO: 870218 - DNA, 15 bp, Homo sapiens
ggacttctcacatca

SEQ ID NO: 870219 - DNA, 15 bp, Homo sapiens
gacttctcacatcag

SEQ ID NO: 870220 - DNA, 15 bp, Homo sapiens
acttctcacatcaga

SEQ ID NO: 870221 - DNA, 15 bp, Homo sapiens
cttctcacatcagag

SEQ ID NO: 870222 - DNA, 15 bp, Homo sapiens
ttctcacatcagagc

SEQ ID NO: 870223 - DNA, 15 bp, Homo sapiens
tctcacatcagagcc

SEQ ID NO: 870224 - DNA, 15 bp, Homo sapiens
ctcacatcagagcct

SEQ ID NO: 870225 - DNA, 15 bp, Homo sapiens
tcacatcagagcctg

SEQ ID NO: 870226 - DNA, 15 bp, Homo sapiens
cacatcagagcctgc

SEQ ID NO: 870227 - DNA, 15 bp, Homo sapiens
acatcagagcctgct

SEQ ID NO: 870228 - DNA, 15 bp, Homo sapiens
catcagagcctgcta

SEQ ID NO: 870229 - DNA, 15 bp, Homo sapiens
atcagagcctgctag

SEQ ID NO: 870230 - DNA, 15 bp, Homo sapiens
tcagagcctgctagc

SEQ ID NO: 870231 - DNA, 15 bp, Homo sapiens
cagagcctgctagca

SEQ ID NO: 870232 - DNA, 15 bp, Homo sapiens
agagcctgctagcat

SEQ ID NO: 870233 - DNA, 15 bp, Homo sapiens
gagcctgctagcatg

SEQ ID NO: 870234 - DNA, 15 bp, Homo sapiens
agcctgctagcatga

SEQ ID NO: 870235 - DNA, 15 bp, Homo sapiens
gcctgctagcatgaa

SEQ ID NO: 870236 - DNA, 15 bp, Homo sapiens
cctgctagcatgaaa

SEQ ID NO: 870237 - DNA, 15 bp, Homo sapiens
ctgctagcatgaaag

SEQ ID NO: 870238 - DNA, 15 bp, Homo sapiens
tgctagcatgaaaga

SEQ ID NO: 870239 - DNA, 15 bp, Homo sapiens
gctagcatgaaagat

SEQ ID NO: 870240 - DNA, 15 bp, Homo sapiens
ctagcatgaaagatt

SEQ ID NO: 870241 - DNA, 15 bp, Homo sapiens
tagcatgaaagattt

SEQ ID NO: 870242 - DNA, 15 bp, Homo sapiens
agcatgaaagatttt

SEQ ID NO: 870243 - DNA, 15 bp, Homo sapiens
gcatgaaagatttta

SEQ ID NO: 870244 - DNA, 15 bp, Homo sapiens
catgaaagattttag

SEQ ID NO: 870245 - DNA, 15 bp, Homo sapiens
atgaaagattttagt

SEQ ID NO: 870246 - DNA, 15 bp, Homo sapiens
tgaaagattttagta

SEQ ID NO: 870247 - DNA, 15 bp, Homo sapiens
gaaagattttagtaa

SEQ ID NO: 870248 - DNA, 15 bp, Homo sapiens
aaagattttagtaat

SEQ ID NO: 870249 - DNA, 15 bp, Homo sapiens
aagattttagtaata

SEQ ID NO: 870250 - DNA, 15 bp, Homo sapiens
agattttagtaatag

SEQ ID NO: 870251 - DNA, 15 bp, Homo sapiens
gattttagtaataga

SEQ ID NO: 870252 - DNA, 15 bp, Homo sapiens
attttagtaatagaa

SEQ ID NO: 870253 - DNA, 15 bp, Homo sapiens
ttttagtaatagaaa

SEQ ID NO: 870254 - DNA, 15 bp, Homo sapiens
tttagtaatagaaaa

SEQ ID NO: 870255 - DNA, 15 bp, Homo sapiens
ttagtaatagaaaat

SEQ ID NO: 870256 - DNA, 15 bp, Homo sapiens
tagtaatagaaaatg

SEQ ID NO: 870257 - DNA, 15 bp, Homo sapiens
agtaatagaaaatgg

SEQ ID NO: 870258 - DNA, 15 bp, Homo sapiens
gtaatagaaaatggc

SEQ ID NO: 870259 - DNA, 15 bp, Homo sapiens
taatagaaaatggca

SEQ ID NO: 870260 - DNA, 15 bp, Homo sapiens
aatagaaaatggcaa

SEQ ID NO: 870261 - DNA, 15 bp, Homo sapiens
atagaaaatggcaaa

SEQ ID NO: 870262 - DNA, 15 bp, Homo sapiens
tagaaaatggcaaaa

SEQ ID NO: 870263 - DNA, 15 bp, Homo sapiens
agaaaatggcaaaat

SEQ ID NO: 870264 - DNA, 15 bp, Homo sapiens
gaaaatggcaaaatg

SEQ ID NO: 870265 - DNA, 15 bp, Homo sapiens
aaaatggcaaaatgg

SEQ ID NO: 870266 - DNA, 15 bp, Homo sapiens
aaatggcaaaatgga

SEQ ID NO: 870267 - DNA, 15 bp, Homo sapiens
aatggcaaaatggac

SEQ ID NO: 870268 - DNA, 15 bp, Homo sapiens
atggcaaaatggact

SEQ ID NO: 870269 - DNA, 15 bp, Homo sapiens
tggcaaaatggactg

SEQ ID NO: 870270 - DNA, 15 bp, Homo sapiens
ggcaaaatggactga

SEQ ID NO: 870271 - DNA, 15 bp, Homo sapiens
gcaaaatggactgag

SEQ ID NO: 870272 - DNA, 15 bp, Homo sapiens
caaaatggactgagc

SEQ ID NO: 870273 - DNA, 15 bp, Homo sapiens
aaaatggactgagcc

SEQ ID NO: 870274 - DNA, 15 bp, Homo sapiens
aaatggactgagcca

SEQ ID NO: 870275 - DNA, 15 bp, Homo sapiens
aatggactgagccaa

SEQ ID NO: 870276 - DNA, 15 bp, Homo sapiens
atggactgagccaag

SEQ ID NO: 870277 - DNA, 15 bp, Homo sapiens
tggactgagccaagt

SEQ ID NO: 870278 - DNA, 15 bp, Homo sapiens
ggactgagccaagtc

SEQ ID NO: 870279 - DNA, 15 bp, Homo sapiens
gactgagccaagtca

SEQ ID NO: 870280 - DNA, 15 bp, Homo sapiens
actgagccaagtcac

SEQ ID NO: 870281 - DNA, 15 bp, Homo sapiens
ctgagccaagtcacc

SEQ ID NO: 870282 - DNA, 15 bp, Homo sapiens
tgagccaagtcaccc

SEQ ID NO: 870283 - DNA, 15 bp, Homo sapiens
gagccaagtcaccct

SEQ ID NO: 870284 - DNA, 15 bp, Homo sapiens
agccaagtcaccctc

SEQ ID NO: 870285 - DNA, 15 bp, Homo sapiens
gccaagtcaccctca

SEQ ID NO: 870286 - DNA, 15 bp, Homo sapiens
ccaagtcaccctcac

SEQ ID NO: 870287 - DNA, 15 bp, Homo sapiens
caagtcaccctcaca

SEQ ID NO: 870288 - DNA, 15 bp, Homo sapiens
aagtcaccctcacaa

SEQ ID NO: 870289 - DNA, 15 bp, Homo sapiens
agtcaccctcacaat

SEQ ID NO: 870290 - DNA, 15 bp, Homo sapiens
gtcaccctcacaatt

SEQ ID NO: 870291 - DNA, 15 bp, Homo sapiens
tcaccctcacaattc

SEQ ID NO: 870292 - DNA, 15 bp, Homo sapiens
caccctcacaattcc

SEQ ID NO: 870293 - DNA, 15 bp, Homo sapiens
accctcacaattcct

SEQ ID NO: 870294 - DNA, 15 bp, Homo sapiens
ccctcacaattcctt

SEQ ID NO: 870295 - DNA, 15 bp, Homo sapiens
cctcacaattccttc

SEQ ID NO: 870296 - DNA, 15 bp, Homo sapiens
ctcacaattccttcc

SEQ ID NO: 870297 - DNA, 15 bp, Homo sapiens
tcacaattccttcca

SEQ ID NO: 870298 - DNA, 15 bp, Homo sapiens
cacaattccttccac

SEQ ID NO: 870299 - DNA, 15 bp, Homo sapiens
acaattccttccact

SEQ ID NO: 870300 - DNA, 15 bp, Homo sapiens
caattccttccactg

SEQ ID NO: 870301 - DNA, 15 bp, Homo sapiens
aattccttccactgg

SEQ ID NO: 870302 - DNA, 15 bp, Homo sapiens
attccttccactggg

SEQ ID NO: 870303 - DNA, 15 bp, Homo sapiens
ttccttccactgggc

SEQ ID NO: 870304 - DNA, 15 bp, Homo sapiens
tccttccactgggca

SEQ ID NO: 870305 - DNA, 15 bp, Homo sapiens
ccttccactgggcaa

SEQ ID NO: 870306 - DNA, 15 bp, Homo sapiens
cttccactgggcaaa

SEQ ID NO: 870307 - DNA, 15 bp, Homo sapiens
ttccactgggcaaaa

SEQ ID NO: 870308 - DNA, 15 bp, Homo sapiens
tccactgggcaaaag

SEQ ID NO: 870309 - DNA, 15 bp, Homo sapiens
ccactgggcaaaaga

SEQ ID NO: 870310 - DNA, 15 bp, Homo sapiens
cactgggcaaaagaa

SEQ ID NO: 870311 - DNA, 15 bp, Homo sapiens
actgggcaaaagaaa

SEQ ID NO: 870312 - DNA, 15 bp, Homo sapiens
ctgggcaaaagaaag

SEQ ID NO: 870313 - DNA, 15 bp, Homo sapiens
tgggcaaaagaaaga

SEQ ID NO: 870314 - DNA, 15 bp, Homo sapiens
gggcaaaagaaagaa

SEQ ID NO: 870315 - DNA, 15 bp, Homo sapiens
ggcaaaagaaagaag

SEQ ID NO: 870316 - DNA, 15 bp, Homo sapiens
gcaaaagaaagaagg

SEQ ID NO: 870317 - DNA, 15 bp, Homo sapiens
caaaagaaagaagga

SEQ ID NO: 870318 - DNA, 15 bp, Homo sapiens
agaaagaaggaaggc

SEQ ID NO: 870319 - DNA, 15 bp, Homo sapiens
gaaagaaggaaggca

SEQ ID NO: 870320 - DNA, 15 bp, Homo sapiens
aaagaaggaaggcag

SEQ ID NO: 870321 - DNA, 15 bp, Homo sapiens
aagaaggaaggcagg

SEQ ID NO: 870322 - DNA, 15 bp, Homo sapiens
agaaggaaggcaggg

SEQ ID NO: 870323 - DNA, 15 bp, Homo sapiens
gaaggaaggcaggga

SEQ ID NO: 870324 - DNA, 15 bp, Homo sapiens
aaggaaggcagggac

SEQ ID NO: 870325 - DNA, 15 bp, Homo sapiens
aggaaggcagggaca

SEQ ID NO: 870326 - DNA, 15 bp, Homo sapiens
ggaaggcagggacag

SEQ ID NO: 870327 - DNA, 15 bp, Homo sapiens
gaaggcagggacagc

SEQ ID NO: 870328 - DNA, 15 bp, Homo sapiens
aaggcagggacagct

SEQ ID NO: 870329 - DNA, 15 bp, Homo sapiens
aggcagggacagctt

SEQ ID NO: 870330 - DNA, 15 bp, Homo sapiens
ggcagggacagctta

SEQ ID NO: 870331 - DNA, 15 bp, Homo sapiens
gcagggacagcttag

SEQ ID NO: 870332 - DNA, 15 bp, Homo sapiens
cagggacagcttagc

SEQ ID NO: 870333 - DNA, 15 bp, Homo sapiens
agggacagcttagct

SEQ ID NO: 870334 - DNA, 15 bp, Homo sapiens
gggacagcttagcta

SEQ ID NO: 870335 - DNA, 15 bp, Homo sapiens
ggacagcttagctaa

SEQ ID NO: 870336 - DNA, 15 bp, Homo sapiens
gacagcttagctaag

SEQ ID NO: 870337 - DNA, 15 bp, Homo sapiens
acagcttagctaagt

SEQ ID NO: 870338 - DNA, 15 bp, Homo sapiens
cagcttagctaagta

SEQ ID NO: 870339 - DNA, 15 bp, Homo sapiens
agcttagctaagtaa

SEQ ID NO: 870340 - DNA, 15 bp, Homo sapiens
gcttagctaagtaaa

SEQ ID NO: 870341 - DNA, 15 bp, Homo sapiens
cttagctaagtaaat

SEQ ID NO: 870342 - DNA, 15 bp, Homo sapiens
ttagctaagtaaatt

SEQ ID NO: 870343 - DNA, 15 bp, Homo sapiens
tagctaagtaaattc

SEQ ID NO: 870344 - DNA, 15 bp, Homo sapiens
agctaagtaaattca

SEQ ID NO: 870345 - DNA, 15 bp, Homo sapiens
gctaagtaaattcat

SEQ ID NO: 870346 - DNA, 15 bp, Homo sapiens
ctaagtaaattcatc

SEQ ID NO: 870347 - DNA, 15 bp, Homo sapiens
taagtaaattcatct

SEQ ID NO: 870348 - DNA, 15 bp, Homo sapiens
aagtaaattcatctc

SEQ ID NO: 870349 - DNA, 15 bp, Homo sapiens
agtaaattcatctct

SEQ ID NO: 870350 - DNA, 15 bp, Homo sapiens
gtaaattcatctctt

SEQ ID NO: 870351 - DNA, 15 bp, Homo sapiens
taaattcatctctta

SEQ ID NO: 870352 - DNA, 15 bp, Homo sapiens
aaattcatctcttaa

SEQ ID NO: 870353 - DNA, 15 bp, Homo sapiens
aattcatctcttaat

SEQ ID NO: 870354 - DNA, 15 bp, Homo sapiens
attcatctcttaatg

SEQ ID NO: 870355 - DNA, 15 bp, Homo sapiens
ttcatctcttaatgc

SEQ ID NO: 870356 - DNA, 15 bp, Homo sapiens
tcatctcttaatgca

SEQ ID NO: 870357 - DNA, 15 bp, Homo sapiens
catctcttaatgcac

SEQ ID NO: 870358 - DNA, 15 bp, Homo sapiens
atctcttaatgcaca

SEQ ID NO: 870359 - DNA, 15 bp, Homo sapiens
tctcttaatgcacaa

SEQ ID NO: 870360 - DNA, 15 bp, Homo sapiens
ctcttaatgcacaaa

SEQ ID NO: 870361 - DNA, 15 bp, Homo sapiens
tcttaatgcacaaac

SEQ ID NO: 870362 - DNA, 15 bp, Homo sapiens
cttaatgcacaaact

SEQ ID NO: 870363 - DNA, 15 bp, Homo sapiens
ttaatgcacaaactg

SEQ ID NO: 870364 - DNA, 15 bp, Homo sapiens
taatgcacaaactga

SEQ ID NO: 870365 - DNA, 15 bp, Homo sapiens
aatgcacaaactgat

SEQ ID NO: 870366 - DNA, 15 bp, Homo sapiens
atgcacaaactgata

SEQ ID NO: 870367 - DNA, 15 bp, Homo sapiens
tgcacaaactgatag

SEQ ID NO: 870368 - DNA, 15 bp, Homo sapiens
gcacaaactgatagc

SEQ ID NO: 870369 - DNA, 15 bp, Homo sapiens
cacaaactgatagca

SEQ ID NO: 870370 - DNA, 15 bp, Homo sapiens
acaaactgatagcat

SEQ ID NO: 870371 - DNA, 15 bp, Homo sapiens
caaactgatagcata

SEQ ID NO: 870372 - DNA, 15 bp, Homo sapiens
aaactgatagcatat

SEQ ID NO: 870373 - DNA, 15 bp, Homo sapiens
aactgatagcatatg

SEQ ID NO: 870374 - DNA, 15 bp, Homo sapiens
actgatagcatatga

SEQ ID NO: 870375 - DNA, 15 bp, Homo sapiens
ctgatagcatatgac

SEQ ID NO: 870376 - DNA, 15 bp, Homo sapiens
tgatagcatatgaca

SEQ ID NO: 870377 - DNA, 15 bp, Homo sapiens
gatagcatatgacag

SEQ ID NO: 870378 - DNA, 15 bp, Homo sapiens
atagcatatgacagg

SEQ ID NO: 870379 - DNA, 15 bp, Homo sapiens
tagcatatgacaggc

SEQ ID NO: 870380 - DNA, 15 bp, Homo sapiens
agcatatgacaggcc

SEQ ID NO: 870381 - DNA, 15 bp, Homo sapiens
gcatatgacaggcct

SEQ ID NO: 870382 - DNA, 15 bp, Homo sapiens
catatgacaggcctc

SEQ ID NO: 870383 - DNA, 15 bp, Homo sapiens
atatgacaggcctcc

SEQ ID NO: 870384 - DNA, 15 bp, Homo sapiens
tatgacaggcctccc

SEQ ID NO: 870385 - DNA, 15 bp, Homo sapiens
atgacaggcctcccc

SEQ ID NO: 870386 - DNA, 15 bp, Homo sapiens
tgacaggcctccccc

SEQ ID NO: 870387 - DNA, 15 bp, Homo sapiens
gacaggcctccccca

SEQ ID NO: 870388 - DNA, 15 bp, Homo sapiens
acaggcctcccccag

SEQ ID NO: 870389 - DNA, 15 bp, Homo sapiens
caggcctcccccagg

SEQ ID NO: 870390 - DNA, 15 bp, Homo sapiens
aggcctcccccagga

SEQ ID NO: 870391 - DNA, 15 bp, Homo sapiens
ggcctcccccaggac

SEQ ID NO: 870392 - DNA, 15 bp, Homo sapiens
gcctcccccaggact

SEQ ID NO: 870393 - DNA, 15 bp, Homo sapiens
cctcccccaggactg

SEQ ID NO: 870394 - DNA, 15 bp, Homo sapiens
ctcccccaggactgg

SEQ ID NO: 870395 - DNA, 15 bp, Homo sapiens
tcccccaggactgga

SEQ ID NO: 870396 - DNA, 15 bp, Homo sapiens
cccccaggactggag

SEQ ID NO: 870397 - DNA, 15 bp, Homo sapiens
ccccaggactggaga

SEQ ID NO: 870398 - DNA, 15 bp, Homo sapiens
cccaggactggagaa

SEQ ID NO: 870399 - DNA, 15 bp, Homo sapiens
ccaggactggagaag

SEQ ID NO: 870400 - DNA, 15 bp, Homo sapiens
caggactggagaaga

SEQ ID NO: 870401 - DNA, 15 bp, Homo sapiens
aggactggagaagaa

SEQ ID NO: 870402 - DNA, 15 bp, Homo sapiens
ggactggagaagaaa

SEQ ID NO: 870403 - DNA, 15 bp, Homo sapiens
gactggagaagaaaa

SEQ ID NO: 870404 - DNA, 15 bp, Homo sapiens
actggagaagaaaaa

SEQ ID NO: 870405 - DNA, 15 bp, Homo sapiens
ctggagaagaaaaaa

SEQ ID NO: 870406 - DNA, 15 bp, Homo sapiens
tggagaagaaaaaag

SEQ ID NO: 870407 - DNA, 15 bp, Homo sapiens
ggagaagaaaaaagt

SEQ ID NO: 870408 - DNA, 15 bp, Homo sapiens
gagaagaaaaaagta

SEQ ID NO: 870409 - DNA, 15 bp, Homo sapiens
agaagaaaaaagtag

SEQ ID NO: 870410 - DNA, 15 bp, Homo sapiens
gaagaaaaaagtagt

SEQ ID NO: 870411 - DNA, 15 bp, Homo sapiens
aagaaaaaagtagtt

SEQ ID NO: 870412 - DNA, 15 bp, Homo sapiens
agaaaaaagtagttg

SEQ ID NO: 870413 - DNA, 15 bp, Homo sapiens
gaaaaaagtagttgg

SEQ ID NO: 870414 - DNA, 15 bp, Homo sapiens
aaaaaagtagttggt

SEQ ID NO: 870415 - DNA, 15 bp, Homo sapiens
aaaaagtagttggtg

SEQ ID NO: 870416 - DNA, 15 bp, Homo sapiens
aaaagtagttggtgt

SEQ ID NO: 870417 - DNA, 15 bp, Homo sapiens
aaagtagttggtgtc

SEQ ID NO: 870418 - DNA, 15 bp, Homo sapiens
aagtagttggtgtca

SEQ ID NO: 870419 - DNA, 15 bp, Homo sapiens
agtagttggtgtcat

SEQ ID NO: 870420 - DNA, 15 bp, Homo sapiens
gtagttggtgtcatg

SEQ ID NO: 870421 - DNA, 15 bp, Homo sapiens
tagttggtgtcatgg

SEQ ID NO: 870422 - DNA, 15 bp, Homo sapiens
agttggtgtcatggt

SEQ ID NO: 870423 - DNA, 15 bp, Homo sapiens
gttggtgtcatggta

SEQ ID NO: 870424 - DNA, 15 bp, Homo sapiens
ttggtgtcatggtac

SEQ ID NO: 870425 - DNA, 15 bp, Homo sapiens
tggtgtcatggtact

SEQ ID NO: 870426 - DNA, 15 bp, Homo sapiens
ggtgtcatggtactg

SEQ ID NO: 870427 - DNA, 15 bp, Homo sapiens
gtgtcatggtactga

SEQ ID NO: 870428 - DNA, 15 bp, Homo sapiens
tgtcatggtactgag

SEQ ID NO: 870429 - DNA, 15 bp, Homo sapiens
gtcatggtactgagg

SEQ ID NO: 870430 - DNA, 15 bp, Homo sapiens
tcatggtactgaggc

SEQ ID NO: 870431 - DNA, 15 bp, Homo sapiens
catggtactgaggct

SEQ ID NO: 870432 - DNA, 15 bp, Homo sapiens
atggtactgaggctt

SEQ ID NO: 870433 - DNA, 15 bp, Homo sapiens
tggtactgaggcttg

SEQ ID NO: 870434 - DNA, 15 bp, Homo sapiens
ggtactgaggcttgg

SEQ ID NO: 870435 - DNA, 15 bp, Homo sapiens
gtactgaggcttggg

SEQ ID NO: 870436 - DNA, 15 bp, Homo sapiens
tactgaggcttgggt

SEQ ID NO: 870437 - DNA, 15 bp, Homo sapiens
actgaggcttgggtg

SEQ ID NO: 870438 - DNA, 15 bp, Homo sapiens
ctgaggcttgggtgg

SEQ ID NO: 870439 - DNA, 15 bp, Homo sapiens
tgaggcttgggtgga

SEQ ID NO: 870440 - DNA, 15 bp, Homo sapiens
gaggcttgggtggac

SEQ ID NO: 870441 - DNA, 15 bp, Homo sapiens
aggcttgggtggacc

SEQ ID NO: 870442 - DNA, 15 bp, Homo sapiens
ggcttgggtggacca

SEQ ID NO: 870443 - DNA, 15 bp, Homo sapiens
gcttgggtggaccac

SEQ ID NO: 870444 - DNA, 15 bp, Homo sapiens
cttgggtggaccaca

SEQ ID NO: 870445 - DNA, 15 bp, Homo sapiens
ttgggtggaccacac

SEQ ID NO: 870446 - DNA, 15 bp, Homo sapiens
tgggtggaccacaca

SEQ ID NO: 870447 - DNA, 15 bp, Homo sapiens
gggtggaccacacag

SEQ ID NO: 870448 - DNA, 15 bp, Homo sapiens
ggtggaccacacagg

SEQ ID NO: 870449 - DNA, 15 bp, Homo sapiens
gtggaccacacaggt

SEQ ID NO: 870450 - DNA, 15 bp, Homo sapiens
tggaccacacaggtc

SEQ ID NO: 870451 - DNA, 15 bp, Homo sapiens
ggaccacacaggtcc

SEQ ID NO: 870452 - DNA, 15 bp, Homo sapiens
gaccacacaggtccc

SEQ ID NO: 870453 - DNA, 15 bp, Homo sapiens
accacacaggtccct

SEQ ID NO: 870454 - DNA, 15 bp, Homo sapiens
ccacacaggtccctg

SEQ ID NO: 870455 - DNA, 15 bp, Homo sapiens
cacacaggtccctgg

SEQ ID NO: 870456 - DNA, 15 bp, Homo sapiens
acacaggtccctgga

SEQ ID NO: 870457 - DNA, 15 bp, Homo sapiens
cacaggtccctggac

SEQ ID NO: 870458 - DNA, 15 bp, Homo sapiens
acaggtccctggaca

SEQ ID NO: 870459 - DNA, 15 bp, Homo sapiens
caggtccctggacaa

SEQ ID NO: 870460 - DNA, 15 bp, Homo sapiens
aggtccctggacaag

SEQ ID NO: 870461 - DNA, 15 bp, Homo sapiens
ggtccctggacaagt

SEQ ID NO: 870462 - DNA, 15 bp, Homo sapiens
gtccctggacaagtt

SEQ ID NO: 870463 - DNA, 15 bp, Homo sapiens
tccctggacaagttc

SEQ ID NO: 870464 - DNA, 15 bp, Homo sapiens
ccctggacaagttca

SEQ ID NO: 870465 - DNA, 15 bp, Homo sapiens
cctggacaagttcat

SEQ ID NO: 870466 - DNA, 15 bp, Homo sapiens
ctggacaagttcatg

SEQ ID NO: 870467 - DNA, 15 bp, Homo sapiens
tggacaagttcatgc

SEQ ID NO: 870468 - DNA, 15 bp, Homo sapiens
ggacaagttcatgct

SEQ ID NO: 870469 - DNA, 15 bp, Homo sapiens
gacaagttcatgctc

SEQ ID NO: 870470 - DNA, 15 bp, Homo sapiens
acaagttcatgctca

SEQ ID NO: 870471 - DNA, 15 bp, Homo sapiens
caagttcatgctcag

SEQ ID NO: 870472 - DNA, 15 bp, Homo sapiens
aagttcatgctcagc

SEQ ID NO: 870473 - DNA, 15 bp, Homo sapiens
agttcatgctcagca

SEQ ID NO: 870474 - DNA, 15 bp, Homo sapiens
gttcatgctcagcag

SEQ ID NO: 870475 - DNA, 15 bp, Homo sapiens
ttcatgctcagcaga

SEQ ID NO: 870476 - DNA, 15 bp, Homo sapiens
tcatgctcagcagat

SEQ ID NO: 870477 - DNA, 15 bp, Homo sapiens
catgctcagcagatg

SEQ ID NO: 870478 - DNA, 15 bp, Homo sapiens
atgctcagcagatgg

SEQ ID NO: 870479 - DNA, 15 bp, Homo sapiens
tgctcagcagatggt

SEQ ID NO: 870480 - DNA, 15 bp, Homo sapiens
gctcagcagatggtc

SEQ ID NO: 870481 - DNA, 15 bp, Homo sapiens
ctcagcagatggtca

SEQ ID NO: 870482 - DNA, 15 bp, Homo sapiens
tcagcagatggtcat

SEQ ID NO: 870483 - DNA, 15 bp, Homo sapiens
cagcagatggtcatg

SEQ ID NO: 870484 - DNA, 15 bp, Homo sapiens
agcagatggtcatga

SEQ ID NO: 870485 - DNA, 15 bp, Homo sapiens
gcagatggtcatgac

SEQ ID NO: 870486 - DNA, 15 bp, Homo sapiens
cagatggtcatgacc

SEQ ID NO: 870487 - DNA, 15 bp, Homo sapiens
agatggtcatgacct

SEQ ID NO: 870488 - DNA, 15 bp, Homo sapiens
gatggtcatgacctt

SEQ ID NO: 870489 - DNA, 15 bp, Homo sapiens
atggtcatgaccttg

SEQ ID NO: 870490 - DNA, 15 bp, Homo sapiens
tggtcatgaccttgc

SEQ ID NO: 870491 - DNA, 15 bp, Homo sapiens
ggtcatgaccttgcc

SEQ ID NO: 870492 - DNA, 15 bp, Homo sapiens
gtcatgaccttgccc

SEQ ID NO: 870493 - DNA, 15 bp, Homo sapiens
tcatgaccttgccct

SEQ ID NO: 870494 - DNA, 15 bp, Homo sapiens
catgaccttgccctc

SEQ ID NO: 870495 - DNA, 15 bp, Homo sapiens
atgaccttgccctct

SEQ ID NO: 870496 - DNA, 15 bp, Homo sapiens
tgaccttgccctctt

SEQ ID NO: 870497 - DNA, 15 bp, Homo sapiens
gaccttgccctcttg

SEQ ID NO: 870498 - DNA, 15 bp, Homo sapiens
accttgccctcttgt

SEQ ID NO: 870499 - DNA, 15 bp, Homo sapiens
ccttgccctcttgtg

SEQ ID NO: 870500 - DNA, 15 bp, Homo sapiens
cttgccctcttgtgt

SEQ ID NO: 870501 - DNA, 15 bp, Homo sapiens
ttgccctcttgtgtc

SEQ ID NO: 870502 - DNA, 15 bp, Homo sapiens
tgccctcttgtgtca

SEQ ID NO: 870503 - DNA, 15 bp, Homo sapiens
gccctcttgtgtcaa

SEQ ID NO: 870504 - DNA, 15 bp, Homo sapiens
ccctcttgtgtcaag

SEQ ID NO: 870505 - DNA, 15 bp, Homo sapiens
cctcttgtgtcaaga

SEQ ID NO: 870506 - DNA, 15 bp, Homo sapiens
ctcttgtgtcaagag

SEQ ID NO: 870507 - DNA, 15 bp, Homo sapiens
tcttgtgtcaagagc

SEQ ID NO: 870508 - DNA, 15 bp, Homo sapiens
cttgtgtcaagagca

SEQ ID NO: 870509 - DNA, 15 bp, Homo sapiens
ttgtgtcaagagcat

SEQ ID NO: 870510 - DNA, 15 bp, Homo sapiens
tgtgtcaagagcatc

SEQ ID NO: 870511 - DNA, 15 bp, Homo sapiens
gtgtcaagagcatct

SEQ ID NO: 870512 - DNA, 15 bp, Homo sapiens
tgtcaagagcatctt

SEQ ID NO: 870513 - DNA, 15 bp, Homo sapiens
gtcaagagcatcttg

SEQ ID NO: 870514 - DNA, 15 bp, Homo sapiens
tcaagagcatcttgt

SEQ ID NO: 870515 - DNA, 15 bp, Homo sapiens
caagagcatcttgta

SEQ ID NO: 870516 - DNA, 15 bp, Homo sapiens
aagagcatcttgtac

SEQ ID NO: 870517 - DNA, 15 bp, Homo sapiens
agagcatcttgtaca

SEQ ID NO: 870518 - DNA, 15 bp, Homo sapiens
gagcatcttgtacaa

SEQ ID NO: 870519 - DNA, 15 bp, Homo sapiens
agcatcttgtacaac

SEQ ID NO: 870520 - DNA, 15 bp, Homo sapiens
gcatcttgtacaacc

SEQ ID NO: 870521 - DNA, 15 bp, Homo sapiens
catcttgtacaacct

SEQ ID NO: 870522 - DNA, 15 bp, Homo sapiens
atcttgtacaacctc

SEQ ID NO: 870523 - DNA, 15 bp, Homo sapiens
tcttgtacaacctcc

SEQ ID NO: 870524 - DNA, 15 bp, Homo sapiens
cttgtacaacctcct

SEQ ID NO: 870525 - DNA, 15 bp, Homo sapiens
ttgtacaacctcctg

SEQ ID NO: 870526 - DNA, 15 bp, Homo sapiens
tgtacaacctcctgt

SEQ ID NO: 870527 - DNA, 15 bp, Homo sapiens
gtacaacctcctgta

SEQ ID NO: 870528 - DNA, 15 bp, Homo sapiens
tacaacctcctgtag

SEQ ID NO: 870529 - DNA, 15 bp, Homo sapiens
acaacctcctgtagg

SEQ ID NO: 870530 - DNA, 15 bp, Homo sapiens
caacctcctgtagga

SEQ ID NO: 870531 - DNA, 15 bp, Homo sapiens
aacctcctgtaggac

SEQ ID NO: 870532 - DNA, 15 bp, Homo sapiens
acctcctgtaggact

SEQ ID NO: 870533 - DNA, 15 bp, Homo sapiens
cctcctgtaggactg

SEQ ID NO: 870534 - DNA, 15 bp, Homo sapiens
ctcctgtaggactga

SEQ ID NO: 870535 - DNA, 15 bp, Homo sapiens
tcctgtaggactgat

SEQ ID NO: 870536 - DNA, 15 bp, Homo sapiens
cctgtaggactgatg

SEQ ID NO: 870537 - DNA, 15 bp, Homo sapiens
ctgtaggactgatga

SEQ ID NO: 870538 - DNA, 15 bp, Homo sapiens
tgtaggactgatgaa

SEQ ID NO: 870539 - DNA, 15 bp, Homo sapiens
gtaggactgatgaac

SEQ ID NO: 870540 - DNA, 15 bp, Homo sapiens
taggactgatgaacg

SEQ ID NO: 870541 - DNA, 15 bp, Homo sapiens
aggactgatgaacgt

SEQ ID NO: 870542 - DNA, 15 bp, Homo sapiens
ggactgatgaacgtg

SEQ ID NO: 870543 - DNA, 15 bp, Homo sapiens
gactgatgaacgtgt

SEQ ID NO: 870544 - DNA, 15 bp, Homo sapiens
actgatgaacgtgtt

SEQ ID NO: 870545 - DNA, 15 bp, Homo sapiens
ctgatgaacgtgttg

SEQ ID NO: 870546 - DNA, 15 bp, Homo sapiens
tgatgaacgtgttgg

SEQ ID NO: 870547 - DNA, 15 bp, Homo sapiens
gatgaacgtgttggt

SEQ ID NO: 870548 - DNA, 15 bp, Homo sapiens
atgaacgtgttggtt

SEQ ID NO: 870549 - DNA, 15 bp, Homo sapiens
tgaacgtgttggttc

SEQ ID NO: 870550 - DNA, 15 bp, Homo sapiens
gaacgtgttggttct

SEQ ID NO: 870551 - DNA, 15 bp, Homo sapiens
aacgtgttggttctc

SEQ ID NO: 870552 - DNA, 15 bp, Homo sapiens
acgtgttggttctcc

SEQ ID NO: 870553 - DNA, 15 bp, Homo sapiens
cgtgttggttctccc

SEQ ID NO: 870554 - DNA, 15 bp, Homo sapiens
gtgttggttctccca

SEQ ID NO: 870555 - DNA, 15 bp, Homo sapiens
tgttggttctcccag

SEQ ID NO: 870556 - DNA, 15 bp, Homo sapiens
gttggttctcccagg

SEQ ID NO: 870557 - DNA, 15 bp, Homo sapiens
ttggttctcccaggc

SEQ ID NO: 870558 - DNA, 15 bp, Homo sapiens
tggttctcccaggct

SEQ ID NO: 870559 - DNA, 15 bp, Homo sapiens
ggttctcccaggctg

SEQ ID NO: 870560 - DNA, 15 bp, Homo sapiens
gttctcccaggctgt

SEQ ID NO: 870561 - DNA, 15 bp, Homo sapiens
ttctcccaggctgtc

SEQ ID NO: 870562 - DNA, 15 bp, Homo sapiens
tctcccaggctgtct

SEQ ID NO: 870563 - DNA, 15 bp, Homo sapiens
ctcccaggctgtctc

SEQ ID NO: 870564 - DNA, 15 bp, Homo sapiens
tcccaggctgtctcc

SEQ ID NO: 870565 - DNA, 15 bp, Homo sapiens
cccaggctgtctccc

SEQ ID NO: 870566 - DNA, 15 bp, Homo sapiens
ccaggctgtctccca

SEQ ID NO: 870567 - DNA, 15 bp, Homo sapiens
caggctgtctcccaa

SEQ ID NO: 870568 - DNA, 15 bp, Homo sapiens
aggctgtctcccaaa

SEQ ID NO: 870569 - DNA, 15 bp, Homo sapiens
ggctgtctcccaaac

SEQ ID NO: 870570 - DNA, 15 bp, Homo sapiens
gctgtctcccaaaca

SEQ ID NO: 870571 - DNA, 15 bp, Homo sapiens
ctgtctcccaaacat

SEQ ID NO: 870572 - DNA, 15 bp, Homo sapiens
tgtctcccaaacata

SEQ ID NO: 870573 - DNA, 15 bp, Homo sapiens
gtctcccaaacataa

SEQ ID NO: 870574 - DNA, 15 bp, Homo sapiens
tctcccaaacataaa

SEQ ID NO: 870575 - DNA, 15 bp, Homo sapiens
ctcccaaacataaag

SEQ ID NO: 870576 - DNA, 15 bp, Homo sapiens
tcccaaacataaagg

SEQ ID NO: 870577 - DNA, 15 bp, Homo sapiens
cccaaacataaaggc

SEQ ID NO: 870578 - DNA, 15 bp, Homo sapiens
ccaaacataaaggca

SEQ ID NO: 870579 - DNA, 15 bp, Homo sapiens
caaacataaaggcaa

SEQ ID NO: 870580 - DNA, 15 bp, Homo sapiens
aaacataaaggcaac

SEQ ID NO: 870581 - DNA, 15 bp, Homo sapiens
aacataaaggcaacc

SEQ ID NO: 870582 - DNA, 15 bp, Homo sapiens
acataaaggcaacca

SEQ ID NO: 870583 - DNA, 15 bp, Homo sapiens
cataaaggcaaccat

SEQ ID NO: 870584 - DNA, 15 bp, Homo sapiens
ataaaggcaaccatt

SEQ ID NO: 870585 - DNA, 15 bp, Homo sapiens
taaaggcaaccattt

SEQ ID NO: 870586 - DNA, 15 bp, Homo sapiens
aaaggcaaccatttc

SEQ ID NO: 870587 - DNA, 15 bp, Homo sapiens
aaggcaaccatttcc

SEQ ID NO: 870588 - DNA, 15 bp, Homo sapiens
aggcaaccatttcct

SEQ ID NO: 870589 - DNA, 15 bp, Homo sapiens
ggcaaccatttcctt

SEQ ID NO: 870590 - DNA, 15 bp, Homo sapiens
gcaaccatttccttc

SEQ ID NO: 870591 - DNA, 15 bp, Homo sapiens
caaccatttccttct

SEQ ID NO: 870592 - DNA, 15 bp, Homo sapiens
aaccatttccttctt

SEQ ID NO: 870593 - DNA, 15 bp, Homo sapiens
accatttccttcttc

SEQ ID NO: 870594 - DNA, 15 bp, Homo sapiens
ccatttccttcttct

SEQ ID NO: 870595 - DNA, 15 bp, Homo sapiens
catttccttcttctg

SEQ ID NO: 870596 - DNA, 15 bp, Homo sapiens
atttccttcttctga

SEQ ID NO: 870597 - DNA, 15 bp, Homo sapiens
tttccttcttctgag

SEQ ID NO: 870598 - DNA, 15 bp, Homo sapiens
ttccttcttctgaga

SEQ ID NO: 870599 - DNA, 15 bp, Homo sapiens
tccttcttctgagaa

SEQ ID NO: 870600 - DNA, 15 bp, Homo sapiens
ccttcttctgagaat

SEQ ID NO: 870601 - DNA, 15 bp, Homo sapiens
cttcttctgagaatg

SEQ ID NO: 870602 - DNA, 15 bp, Homo sapiens
ttcttctgagaatgc

SEQ ID NO: 870603 - DNA, 15 bp, Homo sapiens
tcttctgagaatgct

SEQ ID NO: 870604 - DNA, 15 bp, Homo sapiens
cttctgagaatgctg

SEQ ID NO: 870605 - DNA, 15 bp, Homo sapiens
ttctgagaatgctgg

SEQ ID NO: 870606 - DNA, 15 bp, Homo sapiens
tctgagaatgctggc

SEQ ID NO: 870607 - DNA, 15 bp, Homo sapiens
ctgagaatgctggct

SEQ ID NO: 870608 - DNA, 15 bp, Homo sapiens
tgagaatgctggctg

SEQ ID NO: 870609 - DNA, 15 bp, Homo sapiens
gagaatgctggctgc

SEQ ID NO: 870610 - DNA, 15 bp, Homo sapiens
agaatgctggctgcc

SEQ ID NO: 870611 - DNA, 15 bp, Homo sapiens
gaatgctggctgcct

SEQ ID NO: 870612 - DNA, 15 bp, Homo sapiens
aatgctggctgccta

SEQ ID NO: 870613 - DNA, 15 bp, Homo sapiens
atgctggctgcctaa

SEQ ID NO: 870614 - DNA, 15 bp, Homo sapiens
tgctggctgcctaac

SEQ ID NO: 870615 - DNA, 15 bp, Homo sapiens
gctggctgcctaaca

SEQ ID NO: 870616 - DNA, 15 bp, Homo sapiens
ctggctgcctaacac

SEQ ID NO: 870617 - DNA, 15 bp, Homo sapiens
tggctgcctaacact

SEQ ID NO: 870618 - DNA, 15 bp, Homo sapiens
ggctgcctaacacta

SEQ ID NO: 870619 - DNA, 15 bp, Homo sapiens
gctgcctaacactag

SEQ ID NO: 870620 - DNA, 15 bp, Homo sapiens
ctgcctaacactaga

SEQ ID NO: 870621 - DNA, 15 bp, Homo sapiens
tgcctaacactagat

SEQ ID NO: 870622 - DNA, 15 bp, Homo sapiens
gcctaacactagata

SEQ ID NO: 870623 - DNA, 15 bp, Homo sapiens
cctaacactagataa

SEQ ID NO: 870624 - DNA, 15 bp, Homo sapiens
ctaacactagataac

SEQ ID NO: 870625 - DNA, 15 bp, Homo sapiens
taacactagataaca

SEQ ID NO: 870626 - DNA, 15 bp, Homo sapiens
aacactagataacat

SEQ ID NO: 870627 - DNA, 15 bp, Homo sapiens
acactagataacatc

SEQ ID NO: 870628 - DNA, 15 bp, Homo sapiens
cactagataacatct

SEQ ID NO: 870629 - DNA, 15 bp, Homo sapiens
actagataacatctt

SEQ ID NO: 870630 - DNA, 15 bp, Homo sapiens
ctagataacatctta

SEQ ID NO: 870631 - DNA, 15 bp, Homo sapiens
tagataacatcttag

SEQ ID NO: 870632 - DNA, 15 bp, Homo sapiens
agataacatcttagg

SEQ ID NO: 870633 - DNA, 15 bp, Homo sapiens
gataacatcttaggt

SEQ ID NO: 870634 - DNA, 15 bp, Homo sapiens
ataacatcttaggtg

SEQ ID NO: 870635 - DNA, 15 bp, Homo sapiens
taacatcttaggtgg

SEQ ID NO: 870636 - DNA, 15 bp, Homo sapiens
aacatcttaggtggc

SEQ ID NO: 870637 - DNA, 15 bp, Homo sapiens
acatcttaggtggca

SEQ ID NO: 870638 - DNA, 15 bp, Homo sapiens
catcttaggtggcag

SEQ ID NO: 870639 - DNA, 15 bp, Homo sapiens
atcttaggtggcagc

SEQ ID NO: 870640 - DNA, 15 bp, Homo sapiens
tcttaggtggcagca

SEQ ID NO: 870641 - DNA, 15 bp, Homo sapiens
cttaggtggcagcag

SEQ ID NO: 870642 - DNA, 15 bp, Homo sapiens
ttaggtggcagcagg

SEQ ID NO: 870643 - DNA, 15 bp, Homo sapiens
taggtggcagcaggg

SEQ ID NO: 870644 - DNA, 15 bp, Homo sapiens
aggtggcagcaggga

SEQ ID NO: 870645 - DNA, 15 bp, Homo sapiens
ggtggcagcagggaa

SEQ ID NO: 870646 - DNA, 15 bp, Homo sapiens
gtggcagcagggaaa

SEQ ID NO: 870647 - DNA, 15 bp, Homo sapiens
tggcagcagggaaaa

SEQ ID NO: 870648 - DNA, 15 bp, Homo sapiens
ggcagcagggaaaat

SEQ ID NO: 870649 - DNA, 15 bp, Homo sapiens
gcagcagggaaaata

SEQ ID NO: 870650 - DNA, 15 bp, Homo sapiens
cagcagggaaaataa

SEQ ID NO: 870651 - DNA, 15 bp, Homo sapiens
agcagggaaaataat

SEQ ID NO: 870652 - DNA, 15 bp, Homo sapiens
gcagggaaaataatg

SEQ ID NO: 870653 - DNA, 15 bp, Homo sapiens
cagggaaaataatgc

SEQ ID NO: 870654 - DNA, 15 bp, Homo sapiens
agggaaaataatgca

SEQ ID NO: 870655 - DNA, 15 bp, Homo sapiens
gggaaaataatgcaa

SEQ ID NO: 870656 - DNA, 15 bp, Homo sapiens
ggaaaataatgcaag

SEQ ID NO: 870657 - DNA, 15 bp, Homo sapiens
gaaaataatgcaagt

SEQ ID NO: 870658 - DNA, 15 bp, Homo sapiens
aaaataatgcaagta

SEQ ID NO: 870659 - DNA, 15 bp, Homo sapiens
aaataatgcaagtag

SEQ ID NO: 870660 - DNA, 15 bp, Homo sapiens
aataatgcaagtaga

SEQ ID NO: 870661 - DNA, 15 bp, Homo sapiens
ataatgcaagtagat

SEQ ID NO: 870662 - DNA, 15 bp, Homo sapiens
taatgcaagtagata

SEQ ID NO: 870663 - DNA, 15 bp, Homo sapiens
aatgcaagtagatag

SEQ ID NO: 870664 - DNA, 15 bp, Homo sapiens
atgcaagtagataga

SEQ ID NO: 870665 - DNA, 15 bp, Homo sapiens
tgcaagtagatagat

SEQ ID NO: 870666 - DNA, 15 bp, Homo sapiens
gcaagtagatagatg

SEQ ID NO: 870667 - DNA, 15 bp, Homo sapiens
caagtagatagatgc

SEQ ID NO: 870668 - DNA, 15 bp, Homo sapiens
aagtagatagatgca

SEQ ID NO: 870669 - DNA, 15 bp, Homo sapiens
agtagatagatgcag

SEQ ID NO: 870670 - DNA, 15 bp, Homo sapiens
gtagatagatgcaga

SEQ ID NO: 870671 - DNA, 15 bp, Homo sapiens
tagatagatgcagag

SEQ ID NO: 870672 - DNA, 15 bp, Homo sapiens
agatagatgcagaga

SEQ ID NO: 870673 - DNA, 15 bp, Homo sapiens
gatagatgcagagaa

SEQ ID NO: 870674 - DNA, 15 bp, Homo sapiens
atagatgcagagaaa

SEQ ID NO: 870675 - DNA, 15 bp, Homo sapiens
tagatgcagagaaat

SEQ ID NO: 870676 - DNA, 15 bp, Homo sapiens
agatgcagagaaatt

SEQ ID NO: 870677 - DNA, 15 bp, Homo sapiens
gatgcagagaaattg

SEQ ID NO: 870678 - DNA, 15 bp, Homo sapiens
atgcagagaaattga

SEQ ID NO: 870679 - DNA, 15 bp, Homo sapiens
tgcagagaaattgaa

SEQ ID NO: 870680 - DNA, 15 bp, Homo sapiens
gcagagaaattgaaa

SEQ ID NO: 870681 - DNA, 15 bp, Homo sapiens
cagagaaattgaaaa

SEQ ID NO: 870682 - DNA, 15 bp, Homo sapiens
agagaaattgaaaag

SEQ ID NO: 870683 - DNA, 15 bp, Homo sapiens
gagaaattgaaaagg

SEQ ID NO: 870684 - DNA, 15 bp, Homo sapiens
agaaattgaaaagga

SEQ ID NO: 870685 - DNA, 15 bp, Homo sapiens
gaaattgaaaaggac

SEQ ID NO: 870686 - DNA, 15 bp, Homo sapiens
aaattgaaaaggacc

SEQ ID NO: 870687 - DNA, 15 bp, Homo sapiens
aattgaaaaggaccc

SEQ ID NO: 870688 - DNA, 15 bp, Homo sapiens
attgaaaaggaccct

SEQ ID NO: 870689 - DNA, 15 bp, Homo sapiens
ttgaaaaggacccta

SEQ ID NO: 870690 - DNA, 15 bp, Homo sapiens
tgaaaaggaccctag

SEQ ID NO: 870691 - DNA, 15 bp, Homo sapiens
gaaaaggaccctagt

SEQ ID NO: 870692 - DNA, 15 bp, Homo sapiens
aaaaggaccctagtt

SEQ ID NO: 870693 - DNA, 15 bp, Homo sapiens
aaaggaccctagttc

SEQ ID NO: 870694 - DNA, 15 bp, Homo sapiens
aaggaccctagttct

SEQ ID NO: 870695 - DNA, 15 bp, Homo sapiens
aggaccctagttctg

SEQ ID NO: 870696 - DNA, 15 bp, Homo sapiens
ggaccctagttctgc

SEQ ID NO: 870697 - DNA, 15 bp, Homo sapiens
gaccctagttctgcc

SEQ ID NO: 870698 - DNA, 15 bp, Homo sapiens
accctagttctgcca

SEQ ID NO: 870699 - DNA, 15 bp, Homo sapiens
ccctagttctgccag

SEQ ID NO: 870700 - DNA, 15 bp, Homo sapiens
cctagttctgccagg

SEQ ID NO: 870701 - DNA, 15 bp, Homo sapiens
ctagttctgccaggg

SEQ ID NO: 870702 - DNA, 15 bp, Homo sapiens
tagttctgccagggt

SEQ ID NO: 870703 - DNA, 15 bp, Homo sapiens
agttctgccagggtg

SEQ ID NO: 870704 - DNA, 15 bp, Homo sapiens
gttctgccagggtgg

SEQ ID NO: 870705 - DNA, 15 bp, Homo sapiens
ttctgccagggtggc

SEQ ID NO: 870706 - DNA, 15 bp, Homo sapiens
tctgccagggtggct

SEQ ID NO: 870707 - DNA, 15 bp, Homo sapiens
ctgccagggtggcta

SEQ ID NO: 870708 - DNA, 15 bp, Homo sapiens
tgccagggtggctac

SEQ ID NO: 870709 - DNA, 15 bp, Homo sapiens
gccagggtggctaca

SEQ ID NO: 870710 - DNA, 15 bp, Homo sapiens
ccagggtggctacag

SEQ ID NO: 870711 - DNA, 15 bp, Homo sapiens
cagggtggctacagc

SEQ ID NO: 870712 - DNA, 15 bp, Homo sapiens
agggtggctacagcc

SEQ ID NO: 870713 - DNA, 15 bp, Homo sapiens
gggtggctacagcct

SEQ ID NO: 870714 - DNA, 15 bp, Homo sapiens
ggtggctacagcctg

SEQ ID NO: 870715 - DNA, 15 bp, Homo sapiens
gtggctacagcctgg

SEQ ID NO: 870716 - DNA, 15 bp, Homo sapiens
tggctacagcctggc

SEQ ID NO: 870717 - DNA, 15 bp, Homo sapiens
ggctacagcctggcc

SEQ ID NO: 870718 - DNA, 15 bp, Homo sapiens
gctacagcctggcct

SEQ ID NO: 870719 - DNA, 15 bp, Homo sapiens
ctacagcctggcctg

SEQ ID NO: 870720 - DNA, 15 bp, Homo sapiens
tacagcctggcctga

SEQ ID NO: 870721 - DNA, 15 bp, Homo sapiens
acagcctggcctgag

SEQ ID NO: 870722 - DNA, 15 bp, Homo sapiens
cagcctggcctgaga

SEQ ID NO: 870723 - DNA, 15 bp, Homo sapiens
agcctggcctgagag

SEQ ID NO: 870724 - DNA, 15 bp, Homo sapiens
gcctggcctgagagt

SEQ ID NO: 870725 - DNA, 15 bp, Homo sapiens
cctggcctgagagtt

SEQ ID NO: 870726 - DNA, 15 bp, Homo sapiens
ctggcctgagagttt

SEQ ID NO: 870727 - DNA, 15 bp, Homo sapiens
tggcctgagagtttt

SEQ ID NO: 870728 - DNA, 15 bp, Homo sapiens
ggcctgagagttttg

SEQ ID NO: 870729 - DNA, 15 bp, Homo sapiens
gcctgagagttttgt

SEQ ID NO: 870730 - DNA, 15 bp, Homo sapiens
cctgagagttttgtc

SEQ ID NO: 870731 - DNA, 15 bp, Homo sapiens
ctgagagttttgtca

SEQ ID NO: 870732 - DNA, 15 bp, Homo sapiens
tgagagttttgtcag

SEQ ID NO: 870733 - DNA, 15 bp, Homo sapiens
gagagttttgtcagt

SEQ ID NO: 870734 - DNA, 15 bp, Homo sapiens
agagttttgtcagtg

SEQ ID NO: 870735 - DNA, 15 bp, Homo sapiens
gagttttgtcagtgt

SEQ ID NO: 870736 - DNA, 15 bp, Homo sapiens
agttttgtcagtgtg

SEQ ID NO: 870737 - DNA, 15 bp, Homo sapiens
gttttgtcagtgtgg

SEQ ID NO: 870738 - DNA, 15 bp, Homo sapiens
ttttgtcagtgtggc

SEQ ID NO: 870739 - DNA, 15 bp, Homo sapiens
tttgtcagtgtggct

SEQ ID NO: 870740 - DNA, 15 bp, Homo sapiens
ttgtcagtgtggctc

SEQ ID NO: 870741 - DNA, 15 bp, Homo sapiens
tgtcagtgtggctcc

SEQ ID NO: 870742 - DNA, 15 bp, Homo sapiens
gtcagtgtggctcca

SEQ ID NO: 870743 - DNA, 15 bp, Homo sapiens
tcagtgtggctccag

SEQ ID NO: 870744 - DNA, 15 bp, Homo sapiens
cagtgtggctccagg

SEQ ID NO: 870745 - DNA, 15 bp, Homo sapiens
agtgtggctccaggg

SEQ ID NO: 870746 - DNA, 15 bp, Homo sapiens
gtgtggctccaggga

SEQ ID NO: 870747 - DNA, 15 bp, Homo sapiens
tgtggctccagggat

SEQ ID NO: 870748 - DNA, 15 bp, Homo sapiens
gtggctccagggatg

SEQ ID NO: 870749 - DNA, 15 bp, Homo sapiens
tggctccagggatgg

SEQ ID NO: 870750 - DNA, 15 bp, Homo sapiens
ggctccagggatggc

SEQ ID NO: 870751 - DNA, 15 bp, Homo sapiens
gctccagggatggcc

SEQ ID NO: 870752 - DNA, 15 bp, Homo sapiens
ctccagggatggccg

SEQ ID NO: 870753 - DNA, 15 bp, Homo sapiens
tccagggatggccgt

SEQ ID NO: 870754 - DNA, 15 bp, Homo sapiens
ccagggatggccgtc

SEQ ID NO: 870755 - DNA, 15 bp, Homo sapiens
cagggatggccgtca

SEQ ID NO: 870756 - DNA, 15 bp, Homo sapiens
agggatggccgtcaa

SEQ ID NO: 870757 - DNA, 15 bp, Homo sapiens
gggatggccgtcaag

SEQ ID NO: 870758 - DNA, 15 bp, Homo sapiens
ggatggccgtcaagt

SEQ ID NO: 870759 - DNA, 15 bp, Homo sapiens
gatggccgtcaagtg

SEQ ID NO: 870760 - DNA, 15 bp, Homo sapiens
atggccgtcaagtgg

SEQ ID NO: 870761 - DNA, 15 bp, Homo sapiens
tggccgtcaagtggg

SEQ ID NO: 870762 - DNA, 15 bp, Homo sapiens
ggccgtcaagtggga

SEQ ID NO: 870763 - DNA, 15 bp, Homo sapiens
gccgtcaagtgggag

SEQ ID NO: 870764 - DNA, 15 bp, Homo sapiens
ccgtcaagtgggaga

SEQ ID NO: 870765 - DNA, 15 bp, Homo sapiens
cgtcaagtgggagat

SEQ ID NO: 870766 - DNA, 15 bp, Homo sapiens
gtcaagtgggagatg

SEQ ID NO: 870767 - DNA, 15 bp, Homo sapiens
tcaagtgggagatgg

SEQ ID NO: 870768 - DNA, 15 bp, Homo sapiens
caagtgggagatggg

SEQ ID NO: 870769 - DNA, 15 bp, Homo sapiens
aagtgggagatgggg

SEQ ID NO: 870770 - DNA, 15 bp, Homo sapiens
agtgggagatgggga

SEQ ID NO: 870771 - DNA, 15 bp, Homo sapiens
gtgggagatggggag

SEQ ID NO: 870772 - DNA, 15 bp, Homo sapiens
tgggagatggggaga

SEQ ID NO: 870773 - DNA, 15 bp, Homo sapiens
gggagatggggagag

SEQ ID NO: 870774 - DNA, 15 bp, Homo sapiens
ggagatggggagagg

SEQ ID NO: 870775 - DNA, 15 bp, Homo sapiens
gagatggggagaggg

SEQ ID NO: 870776 - DNA, 15 bp, Homo sapiens
agatggggagagggt

SEQ ID NO: 870777 - DNA, 15 bp, Homo sapiens
gatggggagagggtg

SEQ ID NO: 870778 - DNA, 15 bp, Homo sapiens
atggggagagggtgg

SEQ ID NO: 870779 - DNA, 15 bp, Homo sapiens
tggggagagggtggt

SEQ ID NO: 870780 - DNA, 15 bp, Homo sapiens
ggggagagggtggtg

SEQ ID NO: 870781 - DNA, 15 bp, Homo sapiens
gggagagggtggtgg

SEQ ID NO: 870782 - DNA, 15 bp, Homo sapiens
ggagagggtggtggg

SEQ ID NO: 870783 - DNA, 15 bp, Homo sapiens
gagagggtggtgggc

SEQ ID NO: 870784 - DNA, 15 bp, Homo sapiens
agagggtggtgggca

SEQ ID NO: 870785 - DNA, 15 bp, Homo sapiens
gagggtggtgggcag

SEQ ID NO: 870786 - DNA, 15 bp, Homo sapiens
agggtggtgggcagt

SEQ ID NO: 870787 - DNA, 15 bp, Homo sapiens
gggtggtgggcagtg

SEQ ID NO: 870788 - DNA, 15 bp, Homo sapiens
ggtggtgggcagtgg

SEQ ID NO: 870789 - DNA, 15 bp, Homo sapiens
gtggtgggcagtggt

SEQ ID NO: 870790 - DNA, 15 bp, Homo sapiens
tggtgggcagtggtg

SEQ ID NO: 870791 - DNA, 15 bp, Homo sapiens
ggtgggcagtggtgt

SEQ ID NO: 870792 - DNA, 15 bp, Homo sapiens
gtgggcagtggtgtc

SEQ ID NO: 870793 - DNA, 15 bp, Homo sapiens
tgggcagtggtgtct

SEQ ID NO: 870794 - DNA, 15 bp, Homo sapiens
gggcagtggtgtctc

SEQ ID NO: 870795 - DNA, 15 bp, Homo sapiens
ggcagtggtgtctcg

SEQ ID NO: 870796 - DNA, 15 bp, Homo sapiens
gcagtggtgtctcgg

SEQ ID NO: 870797 - DNA, 15 bp, Homo sapiens
cagtggtgtctcggg

SEQ ID NO: 870798 - DNA, 15 bp, Homo sapiens
agtggtgtctcgggg

SEQ ID NO: 870799 - DNA, 15 bp, Homo sapiens
gtggtgtctcggggg

SEQ ID NO: 870800 - DNA, 15 bp, Homo sapiens
tggtgtctcgggggt

SEQ ID NO: 870801 - DNA, 15 bp, Homo sapiens
ggtgtctcgggggtg

SEQ ID NO: 870802 - DNA, 15 bp, Homo sapiens
gtgtctcgggggtga

SEQ ID NO: 870803 - DNA, 15 bp, Homo sapiens
tgtctcgggggtgat

SEQ ID NO: 870804 - DNA, 15 bp, Homo sapiens
gtctcgggggtgatg

SEQ ID NO: 870805 - DNA, 15 bp, Homo sapiens
tctcgggggtgatga

SEQ ID NO: 870806 - DNA, 15 bp, Homo sapiens
ctcgggggtgatgat

SEQ ID NO: 870807 - DNA, 15 bp, Homo sapiens
tcgggggtgatgatc

SEQ ID NO: 870808 - DNA, 15 bp, Homo sapiens
cgggggtgatgatca

SEQ ID NO: 870809 - DNA, 15 bp, Homo sapiens
gggggtgatgatcat

SEQ ID NO: 870810 - DNA, 15 bp, Homo sapiens
ggggtgatgatcatt

SEQ ID NO: 870811 - DNA, 15 bp, Homo sapiens
gggtgatgatcatta

SEQ ID NO: 870812 - DNA, 15 bp, Homo sapiens
ggtgatgatcattat

SEQ ID NO: 870813 - DNA, 15 bp, Homo sapiens
gtgatgatcattatc

SEQ ID NO: 870814 - DNA, 15 bp, Homo sapiens
tgatgatcattatca

SEQ ID NO: 870815 - DNA, 15 bp, Homo sapiens
gatgatcattatcag

SEQ ID NO: 870816 - DNA, 15 bp, Homo sapiens
atgatcattatcaga

SEQ ID NO: 870817 - DNA, 15 bp, Homo sapiens
tgatcattatcagaa

SEQ ID NO: 870818 - DNA, 15 bp, Homo sapiens
gatcattatcagaag

SEQ ID NO: 870819 - DNA, 15 bp, Homo sapiens
atcattatcagaaga

SEQ ID NO: 870820 - DNA, 15 bp, Homo sapiens
tcattatcagaagag

SEQ ID NO: 870821 - DNA, 15 bp, Homo sapiens
cattatcagaagagt

SEQ ID NO: 870822 - DNA, 15 bp, Homo sapiens
attatcagaagagtg

SEQ ID NO: 870823 - DNA, 15 bp, Homo sapiens
ttatcagaagagtgg

SEQ ID NO: 870824 - DNA, 15 bp, Homo sapiens
tatcagaagagtgga

SEQ ID NO: 870825 - DNA, 15 bp, Homo sapiens
tcagaagagtggaag

SEQ ID NO: 870826 - DNA, 15 bp, Homo sapiens
cagaagagtggaagc

SEQ ID NO: 870827 - DNA, 15 bp, Homo sapiens
agaagagtggaagcc

SEQ ID NO: 870828 - DNA, 15 bp, Homo sapiens
gaagagtggaagccc

SEQ ID NO: 870829 - DNA, 15 bp, Homo sapiens
aagagtggaagccct

SEQ ID NO: 870830 - DNA, 15 bp, Homo sapiens
agagtggaagccctg

SEQ ID NO: 870831 - DNA, 15 bp, Homo sapiens
gagtggaagccctgt

SEQ ID NO: 870832 - DNA, 15 bp, Homo sapiens
agtggaagccctgtt

SEQ ID NO: 870833 - DNA, 15 bp, Homo sapiens
gtggaagccctgttg

SEQ ID NO: 870834 - DNA, 15 bp, Homo sapiens
tggaagccctgttga

SEQ ID NO: 870835 - DNA, 15 bp, Homo sapiens
ggaagccctgttgaa

SEQ ID NO: 870836 - DNA, 15 bp, Homo sapiens
gaagccctgttgaag

SEQ ID NO: 870837 - DNA, 15 bp, Homo sapiens
aagccctgttgaagg

SEQ ID NO: 870838 - DNA, 15 bp, Homo sapiens
agccctgttgaagga

SEQ ID NO: 870839 - DNA, 15 bp, Homo sapiens
gccctgttgaaggat

SEQ ID NO: 870840 - DNA, 15 bp, Homo sapiens
ccctgttgaaggatg

SEQ ID NO: 870841 - DNA, 15 bp, Homo sapiens
cctgttgaaggatgt

SEQ ID NO: 870842 - DNA, 15 bp, Homo sapiens
ctgttgaaggatgtg

SEQ ID NO: 870843 - DNA, 15 bp, Homo sapiens
tgttgaaggatgtgt

SEQ ID NO: 870844 - DNA, 15 bp, Homo sapiens
gttgaaggatgtgtt

SEQ ID NO: 870845 - DNA, 15 bp, Homo sapiens
ttgaaggatgtgtta

SEQ ID NO: 870846 - DNA, 15 bp, Homo sapiens
tgaaggatgtgttaa

SEQ ID NO: 870847 - DNA, 15 bp, Homo sapiens
gaaggatgtgttaag

SEQ ID NO: 870848 - DNA, 15 bp, Homo sapiens
aaggatgtgttaagg

SEQ ID NO: 870849 - DNA, 15 bp, Homo sapiens
aggatgtgttaaggc

SEQ ID NO: 870850 - DNA, 15 bp, Homo sapiens
ggatgtgttaaggca

SEQ ID NO: 870851 - DNA, 15 bp, Homo sapiens
gatgtgttaaggcag

SEQ ID NO: 870852 - DNA, 15 bp, Homo sapiens
atgtgttaaggcagg

SEQ ID NO: 870853 - DNA, 15 bp, Homo sapiens
tgtgttaaggcagga

SEQ ID NO: 870854 - DNA, 15 bp, Homo sapiens
gtgttaaggcaggag

SEQ ID NO: 870855 - DNA, 15 bp, Homo sapiens
tgttaaggcaggagc

SEQ ID NO: 870856 - DNA, 15 bp, Homo sapiens
gttaaggcaggagcc

SEQ ID NO: 870857 - DNA, 15 bp, Homo sapiens
ttaaggcaggagcca

SEQ ID NO: 870858 - DNA, 15 bp, Homo sapiens
taaggcaggagccag

SEQ ID NO: 870859 - DNA, 15 bp, Homo sapiens
aaggcaggagccagg

SEQ ID NO: 870860 - DNA, 15 bp, Homo sapiens
aggcaggagccagga

SEQ ID NO: 870861 - DNA, 15 bp, Homo sapiens
ggcaggagccaggat

SEQ ID NO: 870862 - DNA, 15 bp, Homo sapiens
gcaggagccaggatt

SEQ ID NO: 870863 - DNA, 15 bp, Homo sapiens
caggagccaggattt

SEQ ID NO: 870864 - DNA, 15 bp, Homo sapiens
aggagccaggatttg

SEQ ID NO: 870865 - DNA, 15 bp, Homo sapiens
ggagccaggatttgc

SEQ ID NO: 870866 - DNA, 15 bp, Homo sapiens
gagccaggatttgct

SEQ ID NO: 870867 - DNA, 15 bp, Homo sapiens
agccaggatttgctc

SEQ ID NO: 870868 - DNA, 15 bp, Homo sapiens
gccaggatttgctct

SEQ ID NO: 870869 - DNA, 15 bp, Homo sapiens
ccaggatttgctctg

SEQ ID NO: 870870 - DNA, 15 bp, Homo sapiens
caggatttgctctgc

SEQ ID NO: 870871 - DNA, 15 bp, Homo sapiens
aggatttgctctgca

SEQ ID NO: 870872 - DNA, 15 bp, Homo sapiens
ggatttgctctgcaa

SEQ ID NO: 870873 - DNA, 15 bp, Homo sapiens
gatttgctctgcaaa

SEQ ID NO: 870874 - DNA, 15 bp, Homo sapiens
atttgctctgcaaag

SEQ ID NO: 870875 - DNA, 15 bp, Homo sapiens
tttgctctgcaaagc

SEQ ID NO: 870876 - DNA, 15 bp, Homo sapiens
ttgctctgcaaagcc

SEQ ID NO: 870877 - DNA, 15 bp, Homo sapiens
tgctctgcaaagcct

SEQ ID NO: 870878 - DNA, 15 bp, Homo sapiens
gctctgcaaagcctc

SEQ ID NO: 870879 - DNA, 15 bp, Homo sapiens
ctctgcaaagcctca

SEQ ID NO: 870880 - DNA, 15 bp, Homo sapiens
tctgcaaagcctcag

SEQ ID NO: 870881 - DNA, 15 bp, Homo sapiens
ctgcaaagcctcagg

SEQ ID NO: 870882 - DNA, 15 bp, Homo sapiens
tgcaaagcctcagga

SEQ ID NO: 870883 - DNA, 15 bp, Homo sapiens
gcaaagcctcaggaa

SEQ ID NO: 870884 - DNA, 15 bp, Homo sapiens
caaagcctcaggaag

SEQ ID NO: 870885 - DNA, 15 bp, Homo sapiens
aaagcctcaggaagt

SEQ ID NO: 870886 - DNA, 15 bp, Homo sapiens
aagcctcaggaagta

SEQ ID NO: 870887 - DNA, 15 bp, Homo sapiens
agcctcaggaagtat

SEQ ID NO: 870888 - DNA, 15 bp, Homo sapiens
gcctcaggaagtatc

SEQ ID NO: 870889 - DNA, 15 bp, Homo sapiens
cctcaggaagtatca

SEQ ID NO: 870890 - DNA, 15 bp, Homo sapiens
ctcaggaagtatcag

SEQ ID NO: 870891 - DNA, 15 bp, Homo sapiens
tcaggaagtatcagg

SEQ ID NO: 870892 - DNA, 15 bp, Homo sapiens
caggaagtatcagga

SEQ ID NO: 870893 - DNA, 15 bp, Homo sapiens
aggaagtatcaggaa

SEQ ID NO: 870894 - DNA, 15 bp, Homo sapiens
ggaagtatcaggaaa

SEQ ID NO: 870895 - DNA, 15 bp, Homo sapiens
gaagtatcaggaaat

SEQ ID NO: 870896 - DNA, 15 bp, Homo sapiens
aagtatcaggaaata

SEQ ID NO: 870897 - DNA, 15 bp, Homo sapiens
agtatcaggaaatag

SEQ ID NO: 870898 - DNA, 15 bp, Homo sapiens
gtatcaggaaatagt

SEQ ID NO: 870899 - DNA, 15 bp, Homo sapiens
tatcaggaaatagta

SEQ ID NO: 870900 - DNA, 15 bp, Homo sapiens
atcaggaaatagtaa

SEQ ID NO: 870901 - DNA, 15 bp, Homo sapiens
tcaggaaatagtaat

SEQ ID NO: 870902 - DNA, 15 bp, Homo sapiens
caggaaatagtaatc

SEQ ID NO: 870903 - DNA, 15 bp, Homo sapiens
aggaaatagtaatca

SEQ ID NO: 870904 - DNA, 15 bp, Homo sapiens
ggaaatagtaatcac

SEQ ID NO: 870905 - DNA, 15 bp, Homo sapiens
gaaatagtaatcacc

SEQ ID NO: 870906 - DNA, 15 bp, Homo sapiens
aaatagtaatcaccc

SEQ ID NO: 870907 - DNA, 15 bp, Homo sapiens
aatagtaatcaccca

SEQ ID NO: 870908 - DNA, 15 bp, Homo sapiens
atagtaatcacccag

SEQ ID NO: 870909 - DNA, 15 bp, Homo sapiens
tagtaatcacccagg

SEQ ID NO: 870910 - DNA, 15 bp, Homo sapiens
agtaatcacccagga

SEQ ID NO: 870911 - DNA, 15 bp, Homo sapiens
gtaatcacccaggag

SEQ ID NO: 870912 - DNA, 15 bp, Homo sapiens
taatcacccaggagc

SEQ ID NO: 870913 - DNA, 15 bp, Homo sapiens
aatcacccaggagcc

SEQ ID NO: 870914 - DNA, 15 bp, Homo sapiens
atcacccaggagcca

SEQ ID NO: 870915 - DNA, 15 bp, Homo sapiens
tcacccaggagccaa

SEQ ID NO: 870916 - DNA, 15 bp, Homo sapiens
cacccaggagccaag

SEQ ID NO: 870917 - DNA, 15 bp, Homo sapiens
acccaggagccaagg

SEQ ID NO: 870918 - DNA, 15 bp, Homo sapiens
cccaggagccaaggc

SEQ ID NO: 870919 - DNA, 15 bp, Homo sapiens
ccaggagccaaggca

SEQ ID NO: 870920 - DNA, 15 bp, Homo sapiens
caggagccaaggcac

SEQ ID NO: 870921 - DNA, 15 bp, Homo sapiens
aggagccaaggcacc

SEQ ID NO: 870922 - DNA, 15 bp, Homo sapiens
ggagccaaggcaccc

SEQ ID NO: 870923 - DNA, 15 bp, Homo sapiens
gagccaaggcaccca

SEQ ID NO: 870924 - DNA, 15 bp, Homo sapiens
agccaaggcacccaa

SEQ ID NO: 870925 - DNA, 15 bp, Homo sapiens
gccaaggcacccaag

SEQ ID NO: 870926 - DNA, 15 bp, Homo sapiens
ccaaggcacccaaga

SEQ ID NO: 870927 - DNA, 15 bp, Homo sapiens
caaggcacccaagaa

SEQ ID NO: 870928 - DNA, 15 bp, Homo sapiens
aaggcacccaagaat

SEQ ID NO: 870929 - DNA, 15 bp, Homo sapiens
aggcacccaagaatg

SEQ ID NO: 870930 - DNA, 15 bp, Homo sapiens
ggcacccaagaatga

SEQ ID NO: 870931 - DNA, 15 bp, Homo sapiens
gcacccaagaatgag

SEQ ID NO: 870932 - DNA, 15 bp, Homo sapiens
cacccaagaatgagg

SEQ ID NO: 870933 - DNA, 15 bp, Homo sapiens
acccaagaatgaggc

SEQ ID NO: 870934 - DNA, 15 bp, Homo sapiens
cccaagaatgaggca

SEQ ID NO: 870935 - DNA, 15 bp, Homo sapiens
ccaagaatgaggcag

SEQ ID NO: 870936 - DNA, 15 bp, Homo sapiens
caagaatgaggcaga

SEQ ID NO: 870937 - DNA, 15 bp, Homo sapiens
aagaatgaggcagat

SEQ ID NO: 870938 - DNA, 15 bp, Homo sapiens
agaatgaggcagatc

SEQ ID NO: 870939 - DNA, 15 bp, Homo sapiens
gaatgaggcagatcc

SEQ ID NO: 870940 - DNA, 15 bp, Homo sapiens
aatgaggcagatcca

SEQ ID NO: 870941 - DNA, 15 bp, Homo sapiens
atgaggcagatccag

SEQ ID NO: 870942 - DNA, 15 bp, Homo sapiens
tgaggcagatccagt

SEQ ID NO: 870943 - DNA, 15 bp, Homo sapiens
gaggcagatccagtt

SEQ ID NO: 870944 - DNA, 15 bp, Homo sapiens
aggcagatccagttg

SEQ ID NO: 870945 - DNA, 15 bp, Homo sapiens
ggcagatccagttgg

SEQ ID NO: 870946 - DNA, 15 bp, Homo sapiens
gcagatccagttgga

SEQ ID NO: 870947 - DNA, 15 bp, Homo sapiens
cagatccagttggaa

SEQ ID NO: 870948 - DNA, 15 bp, Homo sapiens
agatccagttggaac

SEQ ID NO: 870949 - DNA, 15 bp, Homo sapiens
gatccagttggaacc

SEQ ID NO: 870950 - DNA, 15 bp, Homo sapiens
atccagttggaacca

SEQ ID NO: 870951 - DNA, 15 bp, Homo sapiens
tccagttggaaccat

SEQ ID NO: 870952 - DNA, 15 bp, Homo sapiens
ccagttggaaccatt

SEQ ID NO: 870953 - DNA, 15 bp, Homo sapiens
cagttggaaccattt

SEQ ID NO: 870954 - DNA, 15 bp, Homo sapiens
agttggaaccattta

SEQ ID NO: 870955 - DNA, 15 bp, Homo sapiens
gttggaaccatttat

SEQ ID NO: 870956 - DNA, 15 bp, Homo sapiens
ttggaaccatttatg

SEQ ID NO: 870957 - DNA, 15 bp, Homo sapiens
tggaaccatttatgg

SEQ ID NO: 870958 - DNA, 15 bp, Homo sapiens
ggaaccatttatggt

SEQ ID NO: 870959 - DNA, 15 bp, Homo sapiens
gaaccatttatggtg

SEQ ID NO: 870960 - DNA, 15 bp, Homo sapiens
aaccatttatggtgc

SEQ ID NO: 870961 - DNA, 15 bp, Homo sapiens
accatttatggtgct

SEQ ID NO: 870962 - DNA, 15 bp, Homo sapiens
ccatttatggtgctg

SEQ ID NO: 870963 - DNA, 15 bp, Homo sapiens
catttatggtgctga

SEQ ID NO: 870964 - DNA, 15 bp, Homo sapiens
atttatggtgctgaa

SEQ ID NO: 870965 - DNA, 15 bp, Homo sapiens
tttatggtgctgaac

SEQ ID NO: 870966 - DNA, 15 bp, Homo sapiens
ttatggtgctgaaca

SEQ ID NO: 870967 - DNA, 15 bp, Homo sapiens
tatggtgctgaacac

SEQ ID NO: 870968 - DNA, 15 bp, Homo sapiens
atggtgctgaacacc

SEQ ID NO: 870969 - DNA, 15 bp, Homo sapiens
tggtgctgaacaccc

SEQ ID NO: 870970 - DNA, 15 bp, Homo sapiens
ggtgctgaacaccca

SEQ ID NO: 870971 - DNA, 15 bp, Homo sapiens
gtgctgaacacccaa

SEQ ID NO: 870972 - DNA, 15 bp, Homo sapiens
tgctgaacacccaac

SEQ ID NO: 870973 - DNA, 15 bp, Homo sapiens
gctgaacacccaact

SEQ ID NO: 870974 - DNA, 15 bp, Homo sapiens
ctgaacacccaacta

SEQ ID NO: 870975 - DNA, 15 bp, Homo sapiens
tgaacacccaactat

SEQ ID NO: 870976 - DNA, 15 bp, Homo sapiens
gaacacccaactatg

SEQ ID NO: 870977 - DNA, 15 bp, Homo sapiens
aacacccaactatga

SEQ ID NO: 870978 - DNA, 15 bp, Homo sapiens
acacccaactatgat

SEQ ID NO: 870979 - DNA, 15 bp, Homo sapiens
cacccaactatgatt

SEQ ID NO: 870980 - DNA, 15 bp, Homo sapiens
acccaactatgattc

SEQ ID NO: 870981 - DNA, 15 bp, Homo sapiens
cccaactatgattcc

SEQ ID NO: 870982 - DNA, 15 bp, Homo sapiens
ccaactatgattcct

SEQ ID NO: 870983 - DNA, 15 bp, Homo sapiens
caactatgattcctt

SEQ ID NO: 870984 - DNA, 15 bp, Homo sapiens
aactatgattccttt

SEQ ID NO: 870985 - DNA, 15 bp, Homo sapiens
actatgattcctttt

SEQ ID NO: 870986 - DNA, 15 bp, Homo sapiens
ctatgattccttttg

SEQ ID NO: 870987 - DNA, 15 bp, Homo sapiens
tatgattccttttga

SEQ ID NO: 870988 - DNA, 15 bp, Homo sapiens
atgattccttttgag

SEQ ID NO: 870989 - DNA, 15 bp, Homo sapiens
tgattccttttgagg

SEQ ID NO: 870990 - DNA, 15 bp, Homo sapiens
gattccttttgagga

SEQ ID NO: 870991 - DNA, 15 bp, Homo sapiens
attccttttgaggag

SEQ ID NO: 870992 - DNA, 15 bp, Homo sapiens
ttccttttgaggaga

SEQ ID NO: 870993 - DNA, 15 bp, Homo sapiens
tccttttgaggagac

SEQ ID NO: 870994 - DNA, 15 bp, Homo sapiens
ccttttgaggagacc

SEQ ID NO: 870995 - DNA, 15 bp, Homo sapiens
cttttgaggagacca

SEQ ID NO: 870996 - DNA, 15 bp, Homo sapiens
ttttgaggagaccac

SEQ ID NO: 870997 - DNA, 15 bp, Homo sapiens
tttgaggagaccacc

SEQ ID NO: 870998 - DNA, 15 bp, Homo sapiens
ttgaggagaccacct

SEQ ID NO: 870999 - DNA, 15 bp, Homo sapiens
tgaggagaccaccta

SEQ ID NO: 871000 - DNA, 15 bp, Homo sapiens
gaggagaccacctaa

SEQ ID NO: 871001 - DNA, 15 bp, Homo sapiens
aggagaccacctaag

SEQ ID NO: 871002 - DNA, 15 bp, Homo sapiens
ggagaccacctaagg

SEQ ID NO: 871003 - DNA, 15 bp, Homo sapiens
gagaccacctaaggc

SEQ ID NO: 871004 - DNA, 15 bp, Homo sapiens
agaccacctaaggcc

SEQ ID NO: 871005 - DNA, 15 bp, Homo sapiens
gaccacctaaggcct

SEQ ID NO: 871006 - DNA, 15 bp, Homo sapiens
accacctaaggccta

SEQ ID NO: 871007 - DNA, 15 bp, Homo sapiens
ccacctaaggcctaa

SEQ ID NO: 871008 - DNA, 15 bp, Homo sapiens
cacctaaggcctaat

SEQ ID NO: 871009 - DNA, 15 bp, Homo sapiens
acctaaggcctaatc

SEQ ID NO: 871010 - DNA, 15 bp, Homo sapiens
cctaaggcctaatcc

SEQ ID NO: 871011 - DNA, 15 bp, Homo sapiens
ctaaggcctaatcca

SEQ ID NO: 871012 - DNA, 15 bp, Homo sapiens
taaggcctaatccag

SEQ ID NO: 871013 - DNA, 15 bp, Homo sapiens
aaggcctaatccagc

SEQ ID NO: 871014 - DNA, 15 bp, Homo sapiens
aggcctaatccagcc

SEQ ID NO: 871015 - DNA, 15 bp, Homo sapiens
ggcctaatccagcct

SEQ ID NO: 871016 - DNA, 15 bp, Homo sapiens
gcctaatccagcctt

SEQ ID NO: 871017 - DNA, 15 bp, Homo sapiens
cctaatccagccttc

SEQ ID NO: 871018 - DNA, 15 bp, Homo sapiens
ctaatccagccttct

SEQ ID NO: 871019 - DNA, 15 bp, Homo sapiens
taatccagccttctg

SEQ ID NO: 871020 - DNA, 15 bp, Homo sapiens
aatccagccttctgt

SEQ ID NO: 871021 - DNA, 15 bp, Homo sapiens
atccagccttctgtg

SEQ ID NO: 871022 - DNA, 15 bp, Homo sapiens
tccagccttctgtgt

SEQ ID NO: 871023 - DNA, 15 bp, Homo sapiens
ccagccttctgtgtc

SEQ ID NO: 871024 - DNA, 15 bp, Homo sapiens
cagccttctgtgtct

SEQ ID NO: 871025 - DNA, 15 bp, Homo sapiens
agccttctgtgtctg

SEQ ID NO: 871026 - DNA, 15 bp, Homo sapiens
gccttctgtgtctga

SEQ ID NO: 871027 - DNA, 15 bp, Homo sapiens
ccttctgtgtctgat

SEQ ID NO: 871028 - DNA, 15 bp, Homo sapiens
cttctgtgtctgata

SEQ ID NO: 871029 - DNA, 15 bp, Homo sapiens
ttctgtgtctgatac

SEQ ID NO: 871030 - DNA, 15 bp, Homo sapiens
tctgtgtctgataca

SEQ ID NO: 871031 - DNA, 15 bp, Homo sapiens
ctgtgtctgatacag

SEQ ID NO: 871032 - DNA, 15 bp, Homo sapiens
tgtgtctgatacagg

SEQ ID NO: 871033 - DNA, 15 bp, Homo sapiens
gtgtctgatacaggc

SEQ ID NO: 871034 - DNA, 15 bp, Homo sapiens
tgtctgatacaggct

SEQ ID NO: 871035 - DNA, 15 bp, Homo sapiens
gtctgatacaggctc

SEQ ID NO: 871036 - DNA, 15 bp, Homo sapiens
tctgatacaggctca

SEQ ID NO: 871037 - DNA, 15 bp, Homo sapiens
ctgatacaggctcag

SEQ ID NO: 871038 - DNA, 15 bp, Homo sapiens
tgatacaggctcaga

SEQ ID NO: 871039 - DNA, 15 bp, Homo sapiens
gatacaggctcagac

SEQ ID NO: 871040 - DNA, 15 bp, Homo sapiens
atacaggctcagaca

SEQ ID NO: 871041 - DNA, 15 bp, Homo sapiens
tacaggctcagacag

SEQ ID NO: 871042 - DNA, 15 bp, Homo sapiens
acaggctcagacaga

SEQ ID NO: 871043 - DNA, 15 bp, Homo sapiens
caggctcagacagac

SEQ ID NO: 871044 - DNA, 15 bp, Homo sapiens
aggctcagacagacc

SEQ ID NO: 871045 - DNA, 15 bp, Homo sapiens
ggctcagacagaccc

SEQ ID NO: 871046 - DNA, 15 bp, Homo sapiens
gctcagacagacccg

SEQ ID NO: 871047 - DNA, 15 bp, Homo sapiens
ctcagacagacccgt

SEQ ID NO: 871048 - DNA, 15 bp, Homo sapiens
tcagacagacccgtg

SEQ ID NO: 871049 - DNA, 15 bp, Homo sapiens
cagacagacccgtgt

SEQ ID NO: 871050 - DNA, 15 bp, Homo sapiens
agacagacccgtgtg

SEQ ID NO: 871051 - DNA, 15 bp, Homo sapiens
gacagacccgtgtgg

SEQ ID NO: 871052 - DNA, 15 bp, Homo sapiens
acagacccgtgtggc

SEQ ID NO: 871053 - DNA, 15 bp, Homo sapiens
cagacccgtgtggcc

SEQ ID NO: 871054 - DNA, 15 bp, Homo sapiens
agacccgtgtggcct

SEQ ID NO: 871055 - DNA, 15 bp, Homo sapiens
gacccgtgtggcctg

SEQ ID NO: 871056 - DNA, 15 bp, Homo sapiens
acccgtgtggcctga

SEQ ID NO: 871057 - DNA, 15 bp, Homo sapiens
cccgtgtggcctgat

SEQ ID NO: 871058 - DNA, 15 bp, Homo sapiens
ccgtgtggcctgata

SEQ ID NO: 871059 - DNA, 15 bp, Homo sapiens
cgtgtggcctgatat

SEQ ID NO: 871060 - DNA, 15 bp, Homo sapiens
gtgtggcctgatatt

SEQ ID NO: 871061 - DNA, 15 bp, Homo sapiens
tgtggcctgatattc

SEQ ID NO: 871062 - DNA, 15 bp, Homo sapiens
gtggcctgatattct

SEQ ID NO: 871063 - DNA, 15 bp, Homo sapiens
tggcctgatattctt

SEQ ID NO: 871064 - DNA, 15 bp, Homo sapiens
ggcctgatattcttg

SEQ ID NO: 871065 - DNA, 15 bp, Homo sapiens
gcctgatattcttga

SEQ ID NO: 871066 - DNA, 15 bp, Homo sapiens
cctgatattcttgaa

SEQ ID NO: 871067 - DNA, 15 bp, Homo sapiens
ctgatattcttgaac

SEQ ID NO: 871068 - DNA, 15 bp, Homo sapiens
tgatattcttgaaca

SEQ ID NO: 871069 - DNA, 15 bp, Homo sapiens
gatattcttgaacat

SEQ ID NO: 871070 - DNA, 15 bp, Homo sapiens
atattcttgaacatt

SEQ ID NO: 871071 - DNA, 15 bp, Homo sapiens
tattcttgaacattg

SEQ ID NO: 871072 - DNA, 15 bp, Homo sapiens
attcttgaacattgt

SEQ ID NO: 871073 - DNA, 15 bp, Homo sapiens
ttcttgaacattgtg

SEQ ID NO: 871074 - DNA, 15 bp, Homo sapiens
tcttgaacattgtgc

SEQ ID NO: 871075 - DNA, 15 bp, Homo sapiens
cttgaacattgtgct

SEQ ID NO: 871076 - DNA, 15 bp, Homo sapiens
ttgaacattgtgctc

SEQ ID NO: 871077 - DNA, 15 bp, Homo sapiens
tgaacattgtgctca

SEQ ID NO: 871078 - DNA, 15 bp, Homo sapiens
gaacattgtgctcaa

SEQ ID NO: 871079 - DNA, 15 bp, Homo sapiens
aacattgtgctcaag

SEQ ID NO: 871080 - DNA, 15 bp, Homo sapiens
acattgtgctcaagg

SEQ ID NO: 871081 - DNA, 15 bp, Homo sapiens
cattgtgctcaaggt

SEQ ID NO: 871082 - DNA, 15 bp, Homo sapiens
attgtgctcaaggtc

SEQ ID NO: 871083 - DNA, 15 bp, Homo sapiens
ttgtgctcaaggtct

SEQ ID NO: 871084 - DNA, 15 bp, Homo sapiens
tgtgctcaaggtctt

SEQ ID NO: 871085 - DNA, 15 bp, Homo sapiens
gtgctcaaggtctta

SEQ ID NO: 871086 - DNA, 15 bp, Homo sapiens
tgctcaaggtcttag

SEQ ID NO: 871087 - DNA, 15 bp, Homo sapiens
gctcaaggtcttagt

SEQ ID NO: 871088 - DNA, 15 bp, Homo sapiens
ctcaaggtcttagtg

SEQ ID NO: 871089 - DNA, 15 bp, Homo sapiens
tcaaggtcttagtga

SEQ ID NO: 871090 - DNA, 15 bp, Homo sapiens
caaggtcttagtgac

SEQ ID NO: 871091 - DNA, 15 bp, Homo sapiens
aaggtcttagtgact

SEQ ID NO: 871092 - DNA, 15 bp, Homo sapiens
aggtcttagtgacta

SEQ ID NO: 871093 - DNA, 15 bp, Homo sapiens
ggtcttagtgactag

SEQ ID NO: 871094 - DNA, 15 bp, Homo sapiens
gtcttagtgactaga

SEQ ID NO: 871095 - DNA, 15 bp, Homo sapiens
tcttagtgactagat

SEQ ID NO: 871096 - DNA, 15 bp, Homo sapiens
cttagtgactagata

SEQ ID NO: 871097 - DNA, 15 bp, Homo sapiens
ttagtgactagatac

SEQ ID NO: 871098 - DNA, 15 bp, Homo sapiens
tagtgactagatacc

SEQ ID NO: 871099 - DNA, 15 bp, Homo sapiens
agtgactagatacca

SEQ ID NO: 871100 - DNA, 15 bp, Homo sapiens
gtgactagataccat

SEQ ID NO: 871101 - DNA, 15 bp, Homo sapiens
tgactagataccatg

SEQ ID NO: 871102 - DNA, 15 bp, Homo sapiens
gactagataccatgt

SEQ ID NO: 871103 - DNA, 15 bp, Homo sapiens
actagataccatgtt

SEQ ID NO: 871104 - DNA, 15 bp, Homo sapiens
ctagataccatgttg

SEQ ID NO: 871105 - DNA, 15 bp, Homo sapiens
tagataccatgttgt

SEQ ID NO: 871106 - DNA, 15 bp, Homo sapiens
agataccatgttgtt

SEQ ID NO: 871107 - DNA, 15 bp, Homo sapiens
gataccatgttgtta

SEQ ID NO: 871108 - DNA, 15 bp, Homo sapiens
ataccatgttgttaa

SEQ ID NO: 871109 - DNA, 15 bp, Homo sapiens
taccatgttgttaaa

SEQ ID NO: 871110 - DNA, 15 bp, Homo sapiens
accatgttgttaaag

SEQ ID NO: 871111 - DNA, 15 bp, Homo sapiens
ccatgttgttaaaga

SEQ ID NO: 871112 - DNA, 15 bp, Homo sapiens
catgttgttaaagaa

SEQ ID NO: 871113 - DNA, 15 bp, Homo sapiens
atgttgttaaagaag

SEQ ID NO: 871114 - DNA, 15 bp, Homo sapiens
tgttgttaaagaagg

SEQ ID NO: 871115 - DNA, 15 bp, Homo sapiens
gttgttaaagaaggg

SEQ ID NO: 871116 - DNA, 15 bp, Homo sapiens
ttgttaaagaagggt

SEQ ID NO: 871117 - DNA, 15 bp, Homo sapiens
tgttaaagaagggta

SEQ ID NO: 871118 - DNA, 15 bp, Homo sapiens
gttaaagaagggtag

SEQ ID NO: 871119 - DNA, 15 bp, Homo sapiens
ttaaagaagggtaga

SEQ ID NO: 871120 - DNA, 15 bp, Homo sapiens
taaagaagggtagaa

SEQ ID NO: 871121 - DNA, 15 bp, Homo sapiens
aaagaagggtagaac

SEQ ID NO: 871122 - DNA, 15 bp, Homo sapiens
aagaagggtagaaca

SEQ ID NO: 871123 - DNA, 15 bp, Homo sapiens
agaagggtagaacac

SEQ ID NO: 871124 - DNA, 15 bp, Homo sapiens
gaagggtagaacact

SEQ ID NO: 871125 - DNA, 15 bp, Homo sapiens
aagggtagaacactg

SEQ ID NO: 871126 - DNA, 15 bp, Homo sapiens
agggtagaacactga

SEQ ID NO: 871127 - DNA, 15 bp, Homo sapiens
gggtagaacactgaa

SEQ ID NO: 871128 - DNA, 15 bp, Homo sapiens
ggtagaacactgaat

SEQ ID NO: 871129 - DNA, 15 bp, Homo sapiens
gtagaacactgaatt

SEQ ID NO: 871130 - DNA, 15 bp, Homo sapiens
tagaacactgaattg

SEQ ID NO: 871131 - DNA, 15 bp, Homo sapiens
agaacactgaattgt

SEQ ID NO: 871132 - DNA, 15 bp, Homo sapiens
gaacactgaattgta

SEQ ID NO: 871133 - DNA, 15 bp, Homo sapiens
aacactgaattgtaa

SEQ ID NO: 871134 - DNA, 15 bp, Homo sapiens
acactgaattgtaag

SEQ ID NO: 871135 - DNA, 15 bp, Homo sapiens
cactgaattgtaagt

SEQ ID NO: 871136 - DNA, 15 bp, Homo sapiens
actgaattgtaagta

SEQ ID NO: 871137 - DNA, 15 bp, Homo sapiens
ctgaattgtaagtat

SEQ ID NO: 871138 - DNA, 15 bp, Homo sapiens
tgaattgtaagtatt

SEQ ID NO: 871139 - DNA, 15 bp, Homo sapiens
gaattgtaagtattg

SEQ ID NO: 871140 - DNA, 15 bp, Homo sapiens
aattgtaagtattgc

SEQ ID NO: 871141 - DNA, 15 bp, Homo sapiens
attgtaagtattgca

SEQ ID NO: 871142 - DNA, 15 bp, Homo sapiens
ttgtaagtattgcac

SEQ ID NO: 871143 - DNA, 15 bp, Homo sapiens
tgtaagtattgcact

SEQ ID NO: 871144 - DNA, 15 bp, Homo sapiens
gtaagtattgcactt

SEQ ID NO: 871145 - DNA, 15 bp, Homo sapiens
taagtattgcacttt

SEQ ID NO: 871146 - DNA, 15 bp, Homo sapiens
aagtattgcactttg

SEQ ID NO: 871147 - DNA, 15 bp, Homo sapiens
agtattgcactttgc

SEQ ID NO: 871148 - DNA, 15 bp, Homo sapiens
gtattgcactttgcg

SEQ ID NO: 871149 - DNA, 15 bp, Homo sapiens
tattgcactttgcga

SEQ ID NO: 871150 - DNA, 15 bp, Homo sapiens
attgcactttgcgag

SEQ ID NO: 871151 - DNA, 15 bp, Homo sapiens
ttgcactttgcgagg

SEQ ID NO: 871152 - DNA, 15 bp, Homo sapiens
tgcactttgcgagga

SEQ ID NO: 871153 - DNA, 15 bp, Homo sapiens
gcactttgcgaggac

SEQ ID NO: 871154 - DNA, 15 bp, Homo sapiens
cactttgcgaggact

SEQ ID NO: 871155 - DNA, 15 bp, Homo sapiens
actttgcgaggacta

SEQ ID NO: 871156 - DNA, 15 bp, Homo sapiens
ctttgcgaggactag

SEQ ID NO: 871157 - DNA, 15 bp, Homo sapiens
tttgcgaggactagt

SEQ ID NO: 871158 - DNA, 15 bp, Homo sapiens
ttgcgaggactagta

SEQ ID NO: 871159 - DNA, 15 bp, Homo sapiens
tgcgaggactagtat

SEQ ID NO: 871160 - DNA, 15 bp, Homo sapiens
gcgaggactagtatt

SEQ ID NO: 871161 - DNA, 15 bp, Homo sapiens
cgaggactagtattt

SEQ ID NO: 871162 - DNA, 15 bp, Homo sapiens
gaggactagtattta

SEQ ID NO: 871163 - DNA, 15 bp, Homo sapiens
aggactagtatttaa

SEQ ID NO: 871164 - DNA, 15 bp, Homo sapiens
ggactagtatttaat

SEQ ID NO: 871165 - DNA, 15 bp, Homo sapiens
gactagtatttaatt

SEQ ID NO: 871166 - DNA, 15 bp, Homo sapiens
actagtatttaattt

SEQ ID NO: 871167 - DNA, 15 bp, Homo sapiens
ctagtatttaatttg

SEQ ID NO: 871168 - DNA, 15 bp, Homo sapiens
tagtatttaatttgc

SEQ ID NO: 871169 - DNA, 15 bp, Homo sapiens
agtatttaatttgct

SEQ ID NO: 871170 - DNA, 15 bp, Homo sapiens
gtatttaatttgctt

SEQ ID NO: 871171 - DNA, 15 bp, Homo sapiens
tatttaatttgcttg

SEQ ID NO: 871172 - DNA, 15 bp, Homo sapiens
atttaatttgcttgt

SEQ ID NO: 871173 - DNA, 15 bp, Homo sapiens
tttaatttgcttgtt

SEQ ID NO: 871174 - DNA, 15 bp, Homo sapiens
ttaatttgcttgttt

SEQ ID NO: 871175 - DNA, 15 bp, Homo sapiens
taatttgcttgttta

SEQ ID NO: 871176 - DNA, 15 bp, Homo sapiens
aatttgcttgtttaa

SEQ ID NO: 871177 - DNA, 15 bp, Homo sapiens
atttgcttgtttaaa

SEQ ID NO: 871178 - DNA, 15 bp, Homo sapiens
tttgcttgtttaaat

SEQ ID NO: 871179 - DNA, 15 bp, Homo sapiens
ttgcttgtttaaatt

SEQ ID NO: 871180 - DNA, 15 bp, Homo sapiens
tgcttgtttaaattt

SEQ ID NO: 871181 - DNA, 15 bp, Homo sapiens
gcttgtttaaattta

SEQ ID NO: 871182 - DNA, 15 bp, Homo sapiens
cttgtttaaatttat

SEQ ID NO: 871183 - DNA, 15 bp, Homo sapiens
ttgtttaaatttatt

SEQ ID NO: 871184 - DNA, 15 bp, Homo sapiens
tgtttaaatttattt

SEQ ID NO: 871185 - DNA, 15 bp, Homo sapiens
gtttaaatttatttg

SEQ ID NO: 871186 - DNA, 15 bp, Homo sapiens
tttaaatttatttgc

SEQ ID NO: 871187 - DNA, 15 bp, Homo sapiens
ttaaatttatttgct

SEQ ID NO: 871188 - DNA, 15 bp, Homo sapiens
taaatttatttgctg

SEQ ID NO: 871189 - DNA, 15 bp, Homo sapiens
aaatttatttgctga

SEQ ID NO: 871190 - DNA, 15 bp, Homo sapiens
aatttatttgctgat

SEQ ID NO: 871191 - DNA, 15 bp, Homo sapiens
atttatttgctgatt

SEQ ID NO: 871192 - DNA, 15 bp, Homo sapiens
tttatttgctgatta

SEQ ID NO: 871193 - DNA, 15 bp, Homo sapiens
ttatttgctgattag

SEQ ID NO: 871194 - DNA, 15 bp, Homo sapiens
tatttgctgattagc

SEQ ID NO: 871195 - DNA, 15 bp, Homo sapiens
atttgctgattagct

SEQ ID NO: 871196 - DNA, 15 bp, Homo sapiens
tttgctgattagctc

SEQ ID NO: 871197 - DNA, 15 bp, Homo sapiens
ttgctgattagctca

SEQ ID NO: 871198 - DNA, 15 bp, Homo sapiens
tgctgattagctcat

SEQ ID NO: 871199 - DNA, 15 bp, Homo sapiens
gctgattagctcatg

SEQ ID NO: 871200 - DNA, 15 bp, Homo sapiens
ctgattagctcatgg

SEQ ID NO: 871201 - DNA, 15 bp, Homo sapiens
tgattagctcatggg

SEQ ID NO: 871202 - DNA, 15 bp, Homo sapiens
gattagctcatggga

SEQ ID NO: 871203 - DNA, 15 bp, Homo sapiens
attagctcatgggaa

SEQ ID NO: 871204 - DNA, 15 bp, Homo sapiens
ttagctcatgggaag

SEQ ID NO: 871205 - DNA, 15 bp, Homo sapiens
tagctcatgggaaga

SEQ ID NO: 871206 - DNA, 15 bp, Homo sapiens
agctcatgggaagag

SEQ ID NO: 871207 - DNA, 15 bp, Homo sapiens
gctcatgggaagaga

SEQ ID NO: 871208 - DNA, 15 bp, Homo sapiens
ctcatgggaagagaa

SEQ ID NO: 871209 - DNA, 15 bp, Homo sapiens
tcatgggaagagaag

SEQ ID NO: 871210 - DNA, 15 bp, Homo sapiens
catgggaagagaagt

SEQ ID NO: 871211 - DNA, 15 bp, Homo sapiens
atgggaagagaagtc

SEQ ID NO: 871212 - DNA, 15 bp, Homo sapiens
tgggaagagaagtca

SEQ ID NO: 871213 - DNA, 15 bp, Homo sapiens
gggaagagaagtcag

SEQ ID NO: 871214 - DNA, 15 bp, Homo sapiens
ggaagagaagtcagc

SEQ ID NO: 871215 - DNA, 15 bp, Homo sapiens
gaagagaagtcagca

SEQ ID NO: 871216 - DNA, 15 bp, Homo sapiens
aagagaagtcagcaa

SEQ ID NO: 871217 - DNA, 15 bp, Homo sapiens
agagaagtcagcaag

SEQ ID NO: 871218 - DNA, 15 bp, Homo sapiens
gagaagtcagcaaga

SEQ ID NO: 871219 - DNA, 15 bp, Homo sapiens
agaagtcagcaagag

SEQ ID NO: 871220 - DNA, 15 bp, Homo sapiens
gaagtcagcaagaga

SEQ ID NO: 871221 - DNA, 15 bp, Homo sapiens
aagtcagcaagagag

SEQ ID NO: 871222 - DNA, 15 bp, Homo sapiens
agtcagcaagagaga

SEQ ID NO: 871223 - DNA, 15 bp, Homo sapiens
gtcagcaagagagag

SEQ ID NO: 871224 - DNA, 15 bp, Homo sapiens
tcagcaagagagagt

SEQ ID NO: 871225 - DNA, 15 bp, Homo sapiens
cagcaagagagagtc

SEQ ID NO: 871226 - DNA, 15 bp, Homo sapiens
agcaagagagagtca

SEQ ID NO: 871227 - DNA, 15 bp, Homo sapiens
gcaagagagagtcat

SEQ ID NO: 871228 - DNA, 15 bp, Homo sapiens
caagagagagtcatt

SEQ ID NO: 871229 - DNA, 15 bp, Homo sapiens
aagagagagtcatta

SEQ ID NO: 871230 - DNA, 15 bp, Homo sapiens
agagagagtcattag

SEQ ID NO: 871231 - DNA, 15 bp, Homo sapiens
gagagagtcattagt

SEQ ID NO: 871232 - DNA, 15 bp, Homo sapiens
agagagtcattagtg

SEQ ID NO: 871233 - DNA, 15 bp, Homo sapiens
gagagtcattagtgc

SEQ ID NO: 871234 - DNA, 15 bp, Homo sapiens
agagtcattagtgca

SEQ ID NO: 871235 - DNA, 15 bp, Homo sapiens
gagtcattagtgcag

SEQ ID NO: 871236 - DNA, 15 bp, Homo sapiens
agtcattagtgcagc

SEQ ID NO: 871237 - DNA, 15 bp, Homo sapiens
gtcattagtgcagca

SEQ ID NO: 871238 - DNA, 15 bp, Homo sapiens
tcattagtgcagcat

SEQ ID NO: 871239 - DNA, 15 bp, Homo sapiens
cattagtgcagcatc

SEQ ID NO: 871240 - DNA, 15 bp, Homo sapiens
attagtgcagcatct

SEQ ID NO: 871241 - DNA, 15 bp, Homo sapiens
ttagtgcagcatcta

SEQ ID NO: 871242 - DNA, 15 bp, Homo sapiens
tagtgcagcatctag

SEQ ID NO: 871243 - DNA, 15 bp, Homo sapiens
agtgcagcatctagt

SEQ ID NO: 871244 - DNA, 15 bp, Homo sapiens
gtgcagcatctagtc

SEQ ID NO: 871245 - DNA, 15 bp, Homo sapiens
tgcagcatctagtca

SEQ ID NO: 871246 - DNA, 15 bp, Homo sapiens
gcagcatctagtcag

SEQ ID NO: 871247 - DNA, 15 bp, Homo sapiens
cagcatctagtcagt

SEQ ID NO: 871248 - DNA, 15 bp, Homo sapiens
agcatctagtcagta

SEQ ID NO: 871249 - DNA, 15 bp, Homo sapiens
gcatctagtcagtaa

SEQ ID NO: 871250 - DNA, 15 bp, Homo sapiens
catctagtcagtaaa

SEQ ID NO: 871251 - DNA, 15 bp, Homo sapiens
atctagtcagtaaat

SEQ ID NO: 871252 - DNA, 15 bp, Homo sapiens
tctagtcagtaaatc

SEQ ID NO: 871253 - DNA, 15 bp, Homo sapiens
ctagtcagtaaatcc

SEQ ID NO: 871254 - DNA, 15 bp, Homo sapiens
tagtcagtaaatccc

SEQ ID NO: 871255 - DNA, 15 bp, Homo sapiens
agtcagtaaatcccc

SEQ ID NO: 871256 - DNA, 15 bp, Homo sapiens
gtcagtaaatcccca

SEQ ID NO: 871257 - DNA, 15 bp, Homo sapiens
tcagtaaatccccat

SEQ ID NO: 871258 - DNA, 15 bp, Homo sapiens
cagtaaatccccatc

SEQ ID NO: 871259 - DNA, 15 bp, Homo sapiens
agtaaatccccatca

SEQ ID NO: 871260 - DNA, 15 bp, Homo sapiens
gtaaatccccatcaa

SEQ ID NO: 871261 - DNA, 15 bp, Homo sapiens
taaatccccatcaag

SEQ ID NO: 871262 - DNA, 15 bp, Homo sapiens
aaatccccatcaaga

SEQ ID NO: 871263 - DNA, 15 bp, Homo sapiens
aatccccatcaagaa

SEQ ID NO: 871264 - DNA, 15 bp, Homo sapiens
atccccatcaagaat

SEQ ID NO: 871265 - DNA, 15 bp, Homo sapiens
tccccatcaagaatc

SEQ ID NO: 871266 - DNA, 15 bp, Homo sapiens
ccccatcaagaatca

SEQ ID NO: 871267 - DNA, 15 bp, Homo sapiens
cccatcaagaatcaa

SEQ ID NO: 871268 - DNA, 15 bp, Homo sapiens
ccatcaagaatcaag

SEQ ID NO: 871269 - DNA, 15 bp, Homo sapiens
catcaagaatcaagt

SEQ ID NO: 871270 - DNA, 15 bp, Homo sapiens
atcaagaatcaagtg

SEQ ID NO: 871271 - DNA, 15 bp, Homo sapiens
tcaagaatcaagtgt

SEQ ID NO: 871272 - DNA, 15 bp, Homo sapiens
caagaatcaagtgtt

SEQ ID NO: 871273 - DNA, 15 bp, Homo sapiens
aagaatcaagtgttg

SEQ ID NO: 871274 - DNA, 15 bp, Homo sapiens
agaatcaagtgttga

SEQ ID NO: 871275 - DNA, 15 bp, Homo sapiens
gaatcaagtgttgac

SEQ ID NO: 871276 - DNA, 15 bp, Homo sapiens
aatcaagtgttgaca

SEQ ID NO: 871277 - DNA, 15 bp, Homo sapiens
atcaagtgttgacac

SEQ ID NO: 871278 - DNA, 15 bp, Homo sapiens
tcaagtgttgacaca

SEQ ID NO: 871279 - DNA, 15 bp, Homo sapiens
caagtgttgacacaa

SEQ ID NO: 871280 - DNA, 15 bp, Homo sapiens
aagtgttgacacaat

SEQ ID NO: 871281 - DNA, 15 bp, Homo sapiens
agtgttgacacaatg

SEQ ID NO: 871282 - DNA, 15 bp, Homo sapiens
gtgttgacacaatgc

SEQ ID NO: 871283 - DNA, 15 bp, Homo sapiens
tgttgacacaatgcc

SEQ ID NO: 871284 - DNA, 15 bp, Homo sapiens
gttgacacaatgcct

SEQ ID NO: 871285 - DNA, 15 bp, Homo sapiens
ttgacacaatgcctc

SEQ ID NO: 871286 - DNA, 15 bp, Homo sapiens
tgacacaatgcctcg

SEQ ID NO: 871287 - DNA, 15 bp, Homo sapiens
gacacaatgcctcga

SEQ ID NO: 871288 - DNA, 15 bp, Homo sapiens
acacaatgcctcgag

SEQ ID NO: 871289 - DNA, 15 bp, Homo sapiens
cacaatgcctcgagt

SEQ ID NO: 871290 - DNA, 15 bp, Homo sapiens
acaatgcctcgagtt

SEQ ID NO: 871291 - DNA, 15 bp, Homo sapiens
caatgcctcgagttc

SEQ ID NO: 871292 - DNA, 15 bp, Homo sapiens
aatgcctcgagttcc

SEQ ID NO: 871293 - DNA, 15 bp, Homo sapiens
atgcctcgagttcca

SEQ ID NO: 871294 - DNA, 15 bp, Homo sapiens
tgcctcgagttccac

SEQ ID NO: 871295 - DNA, 15 bp, Homo sapiens
gcctcgagttccaca

SEQ ID NO: 871296 - DNA, 15 bp, Homo sapiens
cctcgagttccacag

SEQ ID NO: 871297 - DNA, 15 bp, Homo sapiens
ctcgagttccacaga

SEQ ID NO: 871298 - DNA, 15 bp, Homo sapiens
tcgagttccacagag

SEQ ID NO: 871299 - DNA, 15 bp, Homo sapiens
cgagttccacagagt

SEQ ID NO: 871300 - DNA, 15 bp, Homo sapiens
gagttccacagagtc

SEQ ID NO: 871301 - DNA, 15 bp, Homo sapiens
agttccacagagtca

SEQ ID NO: 871302 - DNA, 15 bp, Homo sapiens
gttccacagagtcac

SEQ ID NO: 871303 - DNA, 15 bp, Homo sapiens
ttccacagagtcaca

SEQ ID NO: 871304 - DNA, 15 bp, Homo sapiens
tccacagagtcacag

SEQ ID NO: 871305 - DNA, 15 bp, Homo sapiens
ccacagagtcacaga

SEQ ID NO: 871306 - DNA, 15 bp, Homo sapiens
cacagagtcacagag

SEQ ID NO: 871307 - DNA, 15 bp, Homo sapiens
acagagtcacagaga

SEQ ID NO: 871308 - DNA, 15 bp, Homo sapiens
cagagtcacagagaa

SEQ ID NO: 871309 - DNA, 15 bp, Homo sapiens
agagtcacagagaat

SEQ ID NO: 871310 - DNA, 15 bp, Homo sapiens
gagtcacagagaatc

SEQ ID NO: 871311 - DNA, 15 bp, Homo sapiens
agtcacagagaatca

SEQ ID NO: 871312 - DNA, 15 bp, Homo sapiens
gtcacagagaatcag

SEQ ID NO: 871313 - DNA, 15 bp, Homo sapiens
tcacagagaatcaga

SEQ ID NO: 871314 - DNA, 15 bp, Homo sapiens
cacagagaatcagag

SEQ ID NO: 871315 - DNA, 15 bp, Homo sapiens
acagagaatcagagt

SEQ ID NO: 871316 - DNA, 15 bp, Homo sapiens
cagagaatcagagta

SEQ ID NO: 871317 - DNA, 15 bp, Homo sapiens
agagaatcagagtag

SEQ ID NO: 871318 - DNA, 15 bp, Homo sapiens
gagaatcagagtagg

SEQ ID NO: 871319 - DNA, 15 bp, Homo sapiens
agaatcagagtaggc

SEQ ID NO: 871320 - DNA, 15 bp, Homo sapiens
gaatcagagtaggca

SEQ ID NO: 871321 - DNA, 15 bp, Homo sapiens
aatcagagtaggcac

SEQ ID NO: 871322 - DNA, 15 bp, Homo sapiens
atcagagtaggcacc

SEQ ID NO: 871323 - DNA, 15 bp, Homo sapiens
tcagagtaggcaccc

SEQ ID NO: 871324 - DNA, 15 bp, Homo sapiens
cagagtaggcaccca

SEQ ID NO: 871325 - DNA, 15 bp, Homo sapiens
agagtaggcacccag

SEQ ID NO: 871326 - DNA, 15 bp, Homo sapiens
gagtaggcacccaga

SEQ ID NO: 871327 - DNA, 15 bp, Homo sapiens
agtaggcacccagaa

SEQ ID NO: 871328 - DNA, 15 bp, Homo sapiens
gtaggcacccagaat

SEQ ID NO: 871329 - DNA, 15 bp, Homo sapiens
taggcacccagaatg

SEQ ID NO: 871330 - DNA, 15 bp, Homo sapiens
aggcacccagaatgt

SEQ ID NO: 871331 - DNA, 15 bp, Homo sapiens
ggcacccagaatgtg

SEQ ID NO: 871332 - DNA, 15 bp, Homo sapiens
gcacccagaatgtga

SEQ ID NO: 871333 - DNA, 15 bp, Homo sapiens
cacccagaatgtgag

SEQ ID NO: 871334 - DNA, 15 bp, Homo sapiens
acccagaatgtgagg

SEQ ID NO: 871335 - DNA, 15 bp, Homo sapiens
cccagaatgtgaggc

SEQ ID NO: 871336 - DNA, 15 bp, Homo sapiens
ccagaatgtgaggcg

SEQ ID NO: 871337 - DNA, 15 bp, Homo sapiens
cagaatgtgaggcgc

SEQ ID NO: 871338 - DNA, 15 bp, Homo sapiens
agaatgtgaggcgcc

SEQ ID NO: 871339 - DNA, 15 bp, Homo sapiens
gaatgtgaggcgcct

SEQ ID NO: 871340 - DNA, 15 bp, Homo sapiens
aatgtgaggcgcctc

SEQ ID NO: 871341 - DNA, 15 bp, Homo sapiens
atgtgaggcgcctcc

SEQ ID NO: 871342 - DNA, 15 bp, Homo sapiens
tgtgaggcgcctcct

SEQ ID NO: 871343 - DNA, 15 bp, Homo sapiens
gtgaggcgcctcctt

SEQ ID NO: 871344 - DNA, 15 bp, Homo sapiens
tgaggcgcctccttc

SEQ ID NO: 871345 - DNA, 15 bp, Homo sapiens
gaggcgcctccttca

SEQ ID NO: 871346 - DNA, 15 bp, Homo sapiens
aggcgcctccttcaa

SEQ ID NO: 871347 - DNA, 15 bp, Homo sapiens
ggcgcctccttcaat

SEQ ID NO: 871348 - DNA, 15 bp, Homo sapiens
gcgcctccttcaatt

SEQ ID NO: 871349 - DNA, 15 bp, Homo sapiens
cgcctccttcaattt

SEQ ID NO: 871350 - DNA, 15 bp, Homo sapiens
gcctccttcaatttt

SEQ ID NO: 871351 - DNA, 15 bp, Homo sapiens
cctccttcaattttg

SEQ ID NO: 871352 - DNA, 15 bp, Homo sapiens
ctccttcaattttgc

SEQ ID NO: 871353 - DNA, 15 bp, Homo sapiens
tccttcaattttgca

SEQ ID NO: 871354 - DNA, 15 bp, Homo sapiens
ccttcaattttgcac

SEQ ID NO: 871355 - DNA, 15 bp, Homo sapiens
cttcaattttgcacc

SEQ ID NO: 871356 - DNA, 15 bp, Homo sapiens
ttcaattttgcaccc

SEQ ID NO: 871357 - DNA, 15 bp, Homo sapiens
tcaattttgcaccct

SEQ ID NO: 871358 - DNA, 15 bp, Homo sapiens
caattttgcacccta

SEQ ID NO: 871359 - DNA, 15 bp, Homo sapiens
aattttgcaccctag

SEQ ID NO: 871360 - DNA, 15 bp, Homo sapiens
attttgcaccctagg

SEQ ID NO: 871361 - DNA, 15 bp, Homo sapiens
ttttgcaccctaggc

SEQ ID NO: 871362 - DNA, 15 bp, Homo sapiens
tttgcaccctaggca

SEQ ID NO: 871363 - DNA, 15 bp, Homo sapiens
ttgcaccctaggcac

SEQ ID NO: 871364 - DNA, 15 bp, Homo sapiens
tgcaccctaggcacc

SEQ ID NO: 871365 - DNA, 15 bp, Homo sapiens
gcaccctaggcaccc

SEQ ID NO: 871366 - DNA, 15 bp, Homo sapiens
caccctaggcaccct

SEQ ID NO: 871367 - DNA, 15 bp, Homo sapiens
accctaggcaccctc

SEQ ID NO: 871368 - DNA, 15 bp, Homo sapiens
ccctaggcaccctct

SEQ ID NO: 871369 - DNA, 15 bp, Homo sapiens
cctaggcaccctctt

SEQ ID NO: 871370 - DNA, 15 bp, Homo sapiens
ctaggcaccctcttg

SEQ ID NO: 871371 - DNA, 15 bp, Homo sapiens
taggcaccctcttgt

SEQ ID NO: 871372 - DNA, 15 bp, Homo sapiens
aggcaccctcttgtc

SEQ ID NO: 871373 - DNA, 15 bp, Homo sapiens
ggcaccctcttgtct

SEQ ID NO: 871374 - DNA, 15 bp, Homo sapiens
gcaccctcttgtcta

SEQ ID NO: 871375 - DNA, 15 bp, Homo sapiens
caccctcttgtctag

SEQ ID NO: 871376 - DNA, 15 bp, Homo sapiens
accctcttgtctagc

SEQ ID NO: 871377 - DNA, 15 bp, Homo sapiens
ccctcttgtctagct

SEQ ID NO: 871378 - DNA, 15 bp, Homo sapiens
cctcttgtctagctg

SEQ ID NO: 871379 - DNA, 15 bp, Homo sapiens
ctcttgtctagctgt

SEQ ID NO: 871380 - DNA, 15 bp, Homo sapiens
tcttgtctagctgta

SEQ ID NO: 871381 - DNA, 15 bp, Homo sapiens
cttgtctagctgtag

SEQ ID NO: 871382 - DNA, 15 bp, Homo sapiens
ttgtctagctgtagt

SEQ ID NO: 871383 - DNA, 15 bp, Homo sapiens
tgtctagctgtagtc

SEQ ID NO: 871384 - DNA, 15 bp, Homo sapiens
gtctagctgtagtcc

SEQ ID NO: 871385 - DNA, 15 bp, Homo sapiens
tctagctgtagtcct

SEQ ID NO: 871386 - DNA, 15 bp, Homo sapiens
ctagctgtagtcctg

SEQ ID NO: 871387 - DNA, 15 bp, Homo sapiens
tagctgtagtcctgg

SEQ ID NO: 871388 - DNA, 15 bp, Homo sapiens
agctgtagtcctggc

SEQ ID NO: 871389 - DNA, 15 bp, Homo sapiens
gctgtagtcctggct

SEQ ID NO: 871390 - DNA, 15 bp, Homo sapiens
ctgtagtcctggctt

SEQ ID NO: 871391 - DNA, 15 bp, Homo sapiens
tgtagtcctggcttt

SEQ ID NO: 871392 - DNA, 15 bp, Homo sapiens
gtagtcctggctttg

SEQ ID NO: 871393 - DNA, 15 bp, Homo sapiens
tagtcctggctttgc

SEQ ID NO: 871394 - DNA, 15 bp, Homo sapiens
agtcctggctttgct

SEQ ID NO: 871395 - DNA, 15 bp, Homo sapiens
gtcctggctttgctg

SEQ ID NO: 871396 - DNA, 15 bp, Homo sapiens
tcctggctttgctga

SEQ ID NO: 871397 - DNA, 15 bp, Homo sapiens
cctggctttgctgaa

SEQ ID NO: 871398 - DNA, 15 bp, Homo sapiens
ctggctttgctgaat

SEQ ID NO: 871399 - DNA, 15 bp, Homo sapiens
tggctttgctgaata

SEQ ID NO: 871400 - DNA, 15 bp, Homo sapiens
ggctttgctgaatag

SEQ ID NO: 871401 - DNA, 15 bp, Homo sapiens
gctttgctgaataga

SEQ ID NO: 871402 - DNA, 15 bp, Homo sapiens
ctttgctgaatagaa

SEQ ID NO: 871403 - DNA, 15 bp, Homo sapiens
tttgctgaatagaac

SEQ ID NO: 871404 - DNA, 15 bp, Homo sapiens
ttgctgaatagaact

SEQ ID NO: 871405 - DNA, 15 bp, Homo sapiens
tgctgaatagaacta

SEQ ID NO: 871406 - DNA, 15 bp, Homo sapiens
gctgaatagaactac

SEQ ID NO: 871407 - DNA, 15 bp, Homo sapiens
ctgaatagaactaca

SEQ ID NO: 871408 - DNA, 15 bp, Homo sapiens
tgaatagaactacag

SEQ ID NO: 871409 - DNA, 15 bp, Homo sapiens
gaatagaactacagc

SEQ ID NO: 871410 - DNA, 15 bp, Homo sapiens
aatagaactacagcc

SEQ ID NO: 871411 - DNA, 15 bp, Homo sapiens
atagaactacagcct

SEQ ID NO: 871412 - DNA, 15 bp, Homo sapiens
tagaactacagcctt

SEQ ID NO: 871413 - DNA, 15 bp, Homo sapiens
agaactacagcctta

SEQ ID NO: 871414 - DNA, 15 bp, Homo sapiens
gaactacagccttat

SEQ ID NO: 871415 - DNA, 15 bp, Homo sapiens
aactacagccttata

SEQ ID NO: 871416 - DNA, 15 bp, Homo sapiens
actacagccttataa

SEQ ID NO: 871417 - DNA, 15 bp, Homo sapiens
ctacagccttataat

SEQ ID NO: 871418 - DNA, 15 bp, Homo sapiens
tacagccttataatc

SEQ ID NO: 871419 - DNA, 15 bp, Homo sapiens
acagccttataatct

SEQ ID NO: 871420 - DNA, 15 bp, Homo sapiens
cagccttataatctg

SEQ ID NO: 871421 - DNA, 15 bp, Homo sapiens
agccttataatctgt

SEQ ID NO: 871422 - DNA, 15 bp, Homo sapiens
gccttataatctgtg

SEQ ID NO: 871423 - DNA, 15 bp, Homo sapiens
ccttataatctgtgt

SEQ ID NO: 871424 - DNA, 15 bp, Homo sapiens
cttataatctgtgtg

SEQ ID NO: 871425 - DNA, 15 bp, Homo sapiens
ttataatctgtgtgt

SEQ ID NO: 871426 - DNA, 15 bp, Homo sapiens
tataatctgtgtgtt

SEQ ID NO: 871427 - DNA, 15 bp, Homo sapiens
ataatctgtgtgttg

SEQ ID NO: 871428 - DNA, 15 bp, Homo sapiens
taatctgtgtgttgt

SEQ ID NO: 871429 - DNA, 15 bp, Homo sapiens
aatctgtgtgttgtt

SEQ ID NO: 871430 - DNA, 15 bp, Homo sapiens
atctgtgtgttgttg

SEQ ID NO: 871431 - DNA, 15 bp, Homo sapiens
tctgtgtgttgttga

SEQ ID NO: 871432 - DNA, 15 bp, Homo sapiens
ctgtgtgttgttgac

SEQ ID NO: 871433 - DNA, 15 bp, Homo sapiens
tgtgtgttgttgaca

SEQ ID NO: 871434 - DNA, 15 bp, Homo sapiens
gtgtgttgttgacaa

SEQ ID NO: 871435 - DNA, 15 bp, Homo sapiens
tgtgttgttgacaat

SEQ ID NO: 871436 - DNA, 15 bp, Homo sapiens
gtgttgttgacaatt

SEQ ID NO: 871437 - DNA, 15 bp, Homo sapiens
tgttgttgacaattg

SEQ ID NO: 871438 - DNA, 15 bp, Homo sapiens
gttgttgacaattgc

SEQ ID NO: 871439 - DNA, 15 bp, Homo sapiens
ttgttgacaattgct

SEQ ID NO: 871440 - DNA, 15 bp, Homo sapiens
tgttgacaattgcta

SEQ ID NO: 871441 - DNA, 15 bp, Homo sapiens
gttgacaattgctaa

SEQ ID NO: 871442 - DNA, 15 bp, Homo sapiens
ttgacaattgctaac

SEQ ID NO: 871443 - DNA, 15 bp, Homo sapiens
tgacaattgctaact

SEQ ID NO: 871444 - DNA, 15 bp, Homo sapiens
gacaattgctaactt

SEQ ID NO: 871445 - DNA, 15 bp, Homo sapiens
acaattgctaacttg

SEQ ID NO: 871446 - DNA, 15 bp, Homo sapiens
caattgctaacttgg

SEQ ID NO: 871447 - DNA, 15 bp, Homo sapiens
aattgctaacttggg

SEQ ID NO: 871448 - DNA, 15 bp, Homo sapiens
attgctaacttgggt

SEQ ID NO: 871449 - DNA, 15 bp, Homo sapiens
ttgctaacttgggta

SEQ ID NO: 871450 - DNA, 15 bp, Homo sapiens
tgctaacttgggtag

SEQ ID NO: 871451 - DNA, 15 bp, Homo sapiens
gctaacttgggtagg

SEQ ID NO: 871452 - DNA, 15 bp, Homo sapiens
ctaacttgggtagga

SEQ ID NO: 871453 - DNA, 15 bp, Homo sapiens
taacttgggtaggat

SEQ ID NO: 871454 - DNA, 15 bp, Homo sapiens
aacttgggtaggatt

SEQ ID NO: 871455 - DNA, 15 bp, Homo sapiens
acttgggtaggattt

SEQ ID NO: 871456 - DNA, 15 bp, Homo sapiens
cttgggtaggattta

SEQ ID NO: 871457 - DNA, 15 bp, Homo sapiens
ttgggtaggatttac

SEQ ID NO: 871458 - DNA, 15 bp, Homo sapiens
tgggtaggatttact

SEQ ID NO: 871459 - DNA, 15 bp, Homo sapiens
gggtaggatttactg

SEQ ID NO: 871460 - DNA, 15 bp, Homo sapiens
ggtaggatttactga

SEQ ID NO: 871461 - DNA, 15 bp, Homo sapiens
gtaggatttactgaa

SEQ ID NO: 871462 - DNA, 15 bp, Homo sapiens
taggatttactgaag

SEQ ID NO: 871463 - DNA, 15 bp, Homo sapiens
aggatttactgaagc

SEQ ID NO: 871464 - DNA, 15 bp, Homo sapiens
ggatttactgaagcc

SEQ ID NO: 871465 - DNA, 15 bp, Homo sapiens
gatttactgaagcca

SEQ ID NO: 871466 - DNA, 15 bp, Homo sapiens
atttactgaagccat

SEQ ID NO: 871467 - DNA, 15 bp, Homo sapiens
tttactgaagccata

SEQ ID NO: 871468 - DNA, 15 bp, Homo sapiens
ttactgaagccatat

SEQ ID NO: 871469 - DNA, 15 bp, Homo sapiens
tactgaagccatata

SEQ ID NO: 871470 - DNA, 15 bp, Homo sapiens
actgaagccatatag

SEQ ID NO: 871471 - DNA, 15 bp, Homo sapiens
ctgaagccatataga

SEQ ID NO: 871472 - DNA, 15 bp, Homo sapiens
tgaagccatatagat

SEQ ID NO: 871473 - DNA, 15 bp, Homo sapiens
gaagccatatagatt

SEQ ID NO: 871474 - DNA, 15 bp, Homo sapiens
aagccatatagattc

SEQ ID NO: 871475 - DNA, 15 bp, Homo sapiens
agccatatagattct

SEQ ID NO: 871476 - DNA, 15 bp, Homo sapiens
gccatatagattctc

SEQ ID NO: 871477 - DNA, 15 bp, Homo sapiens
ccatatagattctcc

SEQ ID NO: 871478 - DNA, 15 bp, Homo sapiens
catatagattctcca

SEQ ID NO: 871479 - DNA, 15 bp, Homo sapiens
atatagattctccat

SEQ ID NO: 871480 - DNA, 15 bp, Homo sapiens
tatagattctccatc

SEQ ID NO: 871481 - DNA, 15 bp, Homo sapiens
atagattctccatct

SEQ ID NO: 871482 - DNA, 15 bp, Homo sapiens
tagattctccatctg

SEQ ID NO: 871483 - DNA, 15 bp, Homo sapiens
agattctccatctgg

SEQ ID NO: 871484 - DNA, 15 bp, Homo sapiens
gattctccatctggg

SEQ ID NO: 871485 - DNA, 15 bp, Homo sapiens
attctccatctgggc

SEQ ID NO: 871486 - DNA, 15 bp, Homo sapiens
ttctccatctgggca

SEQ ID NO: 871487 - DNA, 15 bp, Homo sapiens
tctccatctgggcaa

SEQ ID NO: 871488 - DNA, 15 bp, Homo sapiens
ctccatctgggcaaa

SEQ ID NO: 871489 - DNA, 15 bp, Homo sapiens
tccatctgggcaaaa

SEQ ID NO: 871490 - DNA, 15 bp, Homo sapiens
ccatctgggcaaaac

SEQ ID NO: 871491 - DNA, 15 bp, Homo sapiens
catctgggcaaaact

SEQ ID NO: 871492 - DNA, 15 bp, Homo sapiens
atctgggcaaaactt

SEQ ID NO: 871493 - DNA, 15 bp, Homo sapiens
tctgggcaaaacttt

SEQ ID NO: 871494 - DNA, 15 bp, Homo sapiens
ctgggcaaaacttta

SEQ ID NO: 871495 - DNA, 15 bp, Homo sapiens
tgggcaaaactttat

SEQ ID NO: 871496 - DNA, 15 bp, Homo sapiens
gggcaaaactttata

SEQ ID NO: 871497 - DNA, 15 bp, Homo sapiens
ggcaaaactttatag

SEQ ID NO: 871498 - DNA, 15 bp, Homo sapiens
gcaaaactttatagt

SEQ ID NO: 871499 - DNA, 15 bp, Homo sapiens
caaaactttatagtg

SEQ ID NO: 871500 - DNA, 15 bp, Homo sapiens
aaaactttatagtgg

SEQ ID NO: 871501 - DNA, 15 bp, Homo sapiens
aaactttatagtggt

SEQ ID NO: 871502 - DNA, 15 bp, Homo sapiens
aactttatagtggtg

SEQ ID NO: 871503 - DNA, 15 bp, Homo sapiens
actttatagtggtgg

SEQ ID NO: 871504 - DNA, 15 bp, Homo sapiens
ctttatagtggtggt

SEQ ID NO: 871505 - DNA, 15 bp, Homo sapiens
tttatagtggtggtt

SEQ ID NO: 871506 - DNA, 15 bp, Homo sapiens
ttatagtggtggttc

SEQ ID NO: 871507 - DNA, 15 bp, Homo sapiens
tatagtggtggttct

SEQ ID NO: 871508 - DNA, 15 bp, Homo sapiens
atagtggtggttctt

SEQ ID NO: 871509 - DNA, 15 bp, Homo sapiens
tagtggtggttctta

SEQ ID NO: 871510 - DNA, 15 bp, Homo sapiens
agtggtggttcttat

SEQ ID NO: 871511 - DNA, 15 bp, Homo sapiens
gtggtggttcttata

SEQ ID NO: 871512 - DNA, 15 bp, Homo sapiens
tggtggttcttatac

SEQ ID NO: 871513 - DNA, 15 bp, Homo sapiens
ggtggttcttatact

SEQ ID NO: 871514 - DNA, 15 bp, Homo sapiens
gtggttcttatactt

SEQ ID NO: 871515 - DNA, 15 bp, Homo sapiens
tggttcttatacttt

SEQ ID NO: 871516 - DNA, 15 bp, Homo sapiens
ggttcttatacttta

SEQ ID NO: 871517 - DNA, 15 bp, Homo sapiens
gttcttatactttag

SEQ ID NO: 871518 - DNA, 15 bp, Homo sapiens
ttcttatactttagc

SEQ ID NO: 871519 - DNA, 15 bp, Homo sapiens
tcttatactttagca

SEQ ID NO: 871520 - DNA, 15 bp, Homo sapiens
cttatactttagcag

SEQ ID NO: 871521 - DNA, 15 bp, Homo sapiens
ttatactttagcagg

SEQ ID NO: 871522 - DNA, 15 bp, Homo sapiens
tatactttagcaggt

SEQ ID NO: 871523 - DNA, 15 bp, Homo sapiens
atactttagcaggtg

SEQ ID NO: 871524 - DNA, 15 bp, Homo sapiens
tactttagcaggtgt

SEQ ID NO: 871525 - DNA, 15 bp, Homo sapiens
actttagcaggtgtc

SEQ ID NO: 871526 - DNA, 15 bp, Homo sapiens
ctttagcaggtgtcg

SEQ ID NO: 871527 - DNA, 15 bp, Homo sapiens
tttagcaggtgtcgg

SEQ ID NO: 871528 - DNA, 15 bp, Homo sapiens
ttagcaggtgtcgga

SEQ ID NO: 871529 - DNA, 15 bp, Homo sapiens
tagcaggtgtcggaa

SEQ ID NO: 871530 - DNA, 15 bp, Homo sapiens
agcaggtgtcggaat

SEQ ID NO: 871531 - DNA, 15 bp, Homo sapiens
gcaggtgtcggaatc

SEQ ID NO: 871532 - DNA, 15 bp, Homo sapiens
caggtgtcggaatca

SEQ ID NO: 871533 - DNA, 15 bp, Homo sapiens
aggtgtcggaatcac

SEQ ID NO: 871534 - DNA, 15 bp, Homo sapiens
ggtgtcggaatcacc

SEQ ID NO: 871535 - DNA, 15 bp, Homo sapiens
gtgtcggaatcacct

SEQ ID NO: 871536 - DNA, 15 bp, Homo sapiens
tgtcggaatcacctg

SEQ ID NO: 871537 - DNA, 15 bp, Homo sapiens
gtcggaatcacctgg

SEQ ID NO: 871538 - DNA, 15 bp, Homo sapiens
tcggaatcacctgga

SEQ ID NO: 871539 - DNA, 15 bp, Homo sapiens
cggaatcacctggag

SEQ ID NO: 871540 - DNA, 15 bp, Homo sapiens
ggaatcacctggagg

SEQ ID NO: 871541 - DNA, 15 bp, Homo sapiens
gaatcacctggaggg

SEQ ID NO: 871542 - DNA, 15 bp, Homo sapiens
aatcacctggagggc

SEQ ID NO: 871543 - DNA, 15 bp, Homo sapiens
atcacctggagggct

SEQ ID NO: 871544 - DNA, 15 bp, Homo sapiens
tcacctggagggctt

SEQ ID NO: 871545 - DNA, 15 bp, Homo sapiens
cacctggagggcttt

SEQ ID NO: 871546 - DNA, 15 bp, Homo sapiens
acctggagggctttg

SEQ ID NO: 871547 - DNA, 15 bp, Homo sapiens
cctggagggctttgt

SEQ ID NO: 871548 - DNA, 15 bp, Homo sapiens
ctggagggctttgtt

SEQ ID NO: 871549 - DNA, 15 bp, Homo sapiens
tggagggctttgtta

SEQ ID NO: 871550 - DNA, 15 bp, Homo sapiens
ggagggctttgttaa

SEQ ID NO: 871551 - DNA, 15 bp, Homo sapiens
gagggctttgttaag

SEQ ID NO: 871552 - DNA, 15 bp, Homo sapiens
agggctttgttaaga

SEQ ID NO: 871553 - DNA, 15 bp, Homo sapiens
gggctttgttaagat

SEQ ID NO: 871554 - DNA, 15 bp, Homo sapiens
ggctttgttaagata

SEQ ID NO: 871555 - DNA, 15 bp, Homo sapiens
gctttgttaagatat

SEQ ID NO: 871556 - DNA, 15 bp, Homo sapiens
ctttgttaagatata

SEQ ID NO: 871557 - DNA, 15 bp, Homo sapiens
tttgttaagatatag

SEQ ID NO: 871558 - DNA, 15 bp, Homo sapiens
ttgttaagatatagc

SEQ ID NO: 871559 - DNA, 15 bp, Homo sapiens
tgttaagatatagct

SEQ ID NO: 871560 - DNA, 15 bp, Homo sapiens
gttaagatatagctt

SEQ ID NO: 871561 - DNA, 15 bp, Homo sapiens
ttaagatatagcttg

SEQ ID NO: 871562 - DNA, 15 bp, Homo sapiens
taagatatagcttgc

SEQ ID NO: 871563 - DNA, 15 bp, Homo sapiens
aagatatagcttgct

SEQ ID NO: 871564 - DNA, 15 bp, Homo sapiens
agatatagcttgctg

SEQ ID NO: 871565 - DNA, 15 bp, Homo sapiens
gatatagcttgctgg

SEQ ID NO: 871566 - DNA, 15 bp, Homo sapiens
atatagcttgctggt

SEQ ID NO: 871567 - DNA, 15 bp, Homo sapiens
tatagcttgctggtc

SEQ ID NO: 871568 - DNA, 15 bp, Homo sapiens
atagcttgctggtcc

SEQ ID NO: 871569 - DNA, 15 bp, Homo sapiens
tagcttgctggtcca

SEQ ID NO: 871570 - DNA, 15 bp, Homo sapiens
agcttgctggtccac

SEQ ID NO: 871571 - DNA, 15 bp, Homo sapiens
gcttgctggtccaca

SEQ ID NO: 871572 - DNA, 15 bp, Homo sapiens
cttgctggtccacag

SEQ ID NO: 871573 - DNA, 15 bp, Homo sapiens
ttgctggtccacagc

SEQ ID NO: 871574 - DNA, 15 bp, Homo sapiens
tgctggtccacagcc

SEQ ID NO: 871575 - DNA, 15 bp, Homo sapiens
gctggtccacagccc

SEQ ID NO: 871576 - DNA, 15 bp, Homo sapiens
ctggtccacagccct

SEQ ID NO: 871577 - DNA, 15 bp, Homo sapiens
tggtccacagcccta

SEQ ID NO: 871578 - DNA, 15 bp, Homo sapiens
ggtccacagccctac

SEQ ID NO: 871579 - DNA, 15 bp, Homo sapiens
gtccacagccctaca

SEQ ID NO: 871580 - DNA, 15 bp, Homo sapiens
tccacagccctacac

SEQ ID NO: 871581 - DNA, 15 bp, Homo sapiens
ccacagccctacaca

SEQ ID NO: 871582 - DNA, 15 bp, Homo sapiens
cacagccctacacag

SEQ ID NO: 871583 - DNA, 15 bp, Homo sapiens
acagccctacacagt

SEQ ID NO: 871584 - DNA, 15 bp, Homo sapiens
cagccctacacagtc

SEQ ID NO: 871585 - DNA, 15 bp, Homo sapiens
agccctacacagtct

SEQ ID NO: 871586 - DNA, 15 bp, Homo sapiens
gccctacacagtcta

SEQ ID NO: 871587 - DNA, 15 bp, Homo sapiens
ccctacacagtctaa

SEQ ID NO: 871588 - DNA, 15 bp, Homo sapiens
cctacacagtctaat

SEQ ID NO: 871589 - DNA, 15 bp, Homo sapiens
ctacacagtctaatt

SEQ ID NO: 871590 - DNA, 15 bp, Homo sapiens
tacacagtctaattc

SEQ ID NO: 871591 - DNA, 15 bp, Homo sapiens
acacagtctaattca

SEQ ID NO: 871592 - DNA, 15 bp, Homo sapiens
cacagtctaattcag

SEQ ID NO: 871593 - DNA, 15 bp, Homo sapiens
acagtctaattcagc

SEQ ID NO: 871594 - DNA, 15 bp, Homo sapiens
cagtctaattcagca

SEQ ID NO: 871595 - DNA, 15 bp, Homo sapiens
agtctaattcagcag

SEQ ID NO: 871596 - DNA, 15 bp, Homo sapiens
gtctaattcagcaga

SEQ ID NO: 871597 - DNA, 15 bp, Homo sapiens
tctaattcagcagat

SEQ ID NO: 871598 - DNA, 15 bp, Homo sapiens
ctaattcagcagatc

SEQ ID NO: 871599 - DNA, 15 bp, Homo sapiens
taattcagcagatct

SEQ ID NO: 871600 - DNA, 15 bp, Homo sapiens
aattcagcagatctg

SEQ ID NO: 871601 - DNA, 15 bp, Homo sapiens
attcagcagatctgg

SEQ ID NO: 871602 - DNA, 15 bp, Homo sapiens
ttcagcagatctggc

SEQ ID NO: 871603 - DNA, 15 bp, Homo sapiens
tcagcagatctggcc

SEQ ID NO: 871604 - DNA, 15 bp, Homo sapiens
cagcagatctggcct

SEQ ID NO: 871605 - DNA, 15 bp, Homo sapiens
agcagatctggcctg

SEQ ID NO: 871606 - DNA, 15 bp, Homo sapiens
gcagatctggcctgg

SEQ ID NO: 871607 - DNA, 15 bp, Homo sapiens
cagatctggcctggg

SEQ ID NO: 871608 - DNA, 15 bp, Homo sapiens
agatctggcctgggg

SEQ ID NO: 871609 - DNA, 15 bp, Homo sapiens
gatctggcctgggga

SEQ ID NO: 871610 - DNA, 15 bp, Homo sapiens
atctggcctggggat

SEQ ID NO: 871611 - DNA, 15 bp, Homo sapiens
tctggcctggggatt

SEQ ID NO: 871612 - DNA, 15 bp, Homo sapiens
ctggcctggggattg

SEQ ID NO: 871613 - DNA, 15 bp, Homo sapiens
tggcctggggattgg

SEQ ID NO: 871614 - DNA, 15 bp, Homo sapiens
ggcctggggattgga

SEQ ID NO: 871615 - DNA, 15 bp, Homo sapiens
gcctggggattggaa

SEQ ID NO: 871616 - DNA, 15 bp, Homo sapiens
cctggggattggaaa

SEQ ID NO: 871617 - DNA, 15 bp, Homo sapiens
ctggggattggaaat

SEQ ID NO: 871618 - DNA, 15 bp, Homo sapiens
tggggattggaaatt

SEQ ID NO: 871619 - DNA, 15 bp, Homo sapiens
ggggattggaaattt

SEQ ID NO: 871620 - DNA, 15 bp, Homo sapiens
gggattggaaatttg

SEQ ID NO: 871621 - DNA, 15 bp, Homo sapiens
ggattggaaatttgc

SEQ ID NO: 871622 - DNA, 15 bp, Homo sapiens
gattggaaatttgca

SEQ ID NO: 871623 - DNA, 15 bp, Homo sapiens
attggaaatttgcat

SEQ ID NO: 871624 - DNA, 15 bp, Homo sapiens
ttggaaatttgcatt

SEQ ID NO: 871625 - DNA, 15 bp, Homo sapiens
tggaaatttgcattt

SEQ ID NO: 871626 - DNA, 15 bp, Homo sapiens
ggaaatttgcatttc

SEQ ID NO: 871627 - DNA, 15 bp, Homo sapiens
gaaatttgcatttct

SEQ ID NO: 871628 - DNA, 15 bp, Homo sapiens
aaatttgcatttctg

SEQ ID NO: 871629 - DNA, 15 bp, Homo sapiens
aatttgcatttctgt

SEQ ID NO: 871630 - DNA, 15 bp, Homo sapiens
atttgcatttctgtt

SEQ ID NO: 871631 - DNA, 15 bp, Homo sapiens
tttgcatttctgtta

SEQ ID NO: 871632 - DNA, 15 bp, Homo sapiens
ttgcatttctgttaa

SEQ ID NO: 871633 - DNA, 15 bp, Homo sapiens
tgcatttctgttaaa

SEQ ID NO: 871634 - DNA, 15 bp, Homo sapiens
gcatttctgttaaac

SEQ ID NO: 871635 - DNA, 15 bp, Homo sapiens
catttctgttaaact

SEQ ID NO: 871636 - DNA, 15 bp, Homo sapiens
atttctgttaaactt

SEQ ID NO: 871637 - DNA, 15 bp, Homo sapiens
tttctgttaaacttc

SEQ ID NO: 871638 - DNA, 15 bp, Homo sapiens
ttctgttaaacttcc

SEQ ID NO: 871639 - DNA, 15 bp, Homo sapiens
tctgttaaacttcca

SEQ ID NO: 871640 - DNA, 15 bp, Homo sapiens
ctgttaaacttccag

SEQ ID NO: 871641 - DNA, 15 bp, Homo sapiens
tgttaaacttccagg

SEQ ID NO: 871642 - DNA, 15 bp, Homo sapiens
gttaaacttccaggt

SEQ ID NO: 871643 - DNA, 15 bp, Homo sapiens
ttaaacttccaggtg

SEQ ID NO: 871644 - DNA, 15 bp, Homo sapiens
taaacttccaggtga

SEQ ID NO: 871645 - DNA, 15 bp, Homo sapiens
aaacttccaggtgat

SEQ ID NO: 871646 - DNA, 15 bp, Homo sapiens
aacttccaggtgatg

SEQ ID NO: 871647 - DNA, 15 bp, Homo sapiens
acttccaggtgatgc

SEQ ID NO: 871648 - DNA, 15 bp, Homo sapiens
cttccaggtgatgct

SEQ ID NO: 871649 - DNA, 15 bp, Homo sapiens
ttccaggtgatgctg

SEQ ID NO: 871650 - DNA, 15 bp, Homo sapiens
aggtgatgctgatgc

SEQ ID NO: 871651 - DNA, 15 bp, Homo sapiens
ggtgatgctgatgcg

SEQ ID NO: 871652 - DNA, 15 bp, Homo sapiens
gtgatgctgatgcgg

SEQ ID NO: 871653 - DNA, 15 bp, Homo sapiens
tgatgctgatgcggc

SEQ ID NO: 871654 - DNA, 15 bp, Homo sapiens
gatgctgatgcggct

SEQ ID NO: 871655 - DNA, 15 bp, Homo sapiens
atgctgatgcggctg

SEQ ID NO: 871656 - DNA, 15 bp, Homo sapiens
tgctgatgcggctgg

SEQ ID NO: 871657 - DNA, 15 bp, Homo sapiens
gctgatgcggctggt

SEQ ID NO: 871658 - DNA, 15 bp, Homo sapiens
ctgatgcggctggtc

SEQ ID NO: 871659 - DNA, 15 bp, Homo sapiens
tgatgcggctggtct

SEQ ID NO: 871660 - DNA, 15 bp, Homo sapiens
gatgcggctggtctg

SEQ ID NO: 871661 - DNA, 15 bp, Homo sapiens
atgcggctggtctgg

SEQ ID NO: 871662 - DNA, 15 bp, Homo sapiens
tgcggctggtctggg

SEQ ID NO: 871663 - DNA, 15 bp, Homo sapiens
gcggctggtctgggc

SEQ ID NO: 871664 - DNA, 15 bp, Homo sapiens
cggctggtctgggcc

SEQ ID NO: 871665 - DNA, 15 bp, Homo sapiens
ggctggtctgggcca

SEQ ID NO: 871666 - DNA, 15 bp, Homo sapiens
gctggtctgggccac

SEQ ID NO: 871667 - DNA, 15 bp, Homo sapiens
ctggtctgggccaca

SEQ ID NO: 871668 - DNA, 15 bp, Homo sapiens
tggtctgggccacag

SEQ ID NO: 871669 - DNA, 15 bp, Homo sapiens
ggtctgggccacagt

SEQ ID NO: 871670 - DNA, 15 bp, Homo sapiens
gtctgggccacagtt

SEQ ID NO: 871671 - DNA, 15 bp, Homo sapiens
tctgggccacagttt

SEQ ID NO: 871672 - DNA, 15 bp, Homo sapiens
ctgggccacagtttg

SEQ ID NO: 871673 - DNA, 15 bp, Homo sapiens
tgggccacagtttga

SEQ ID NO: 871674 - DNA, 15 bp, Homo sapiens
gggccacagtttgag

SEQ ID NO: 871675 - DNA, 15 bp, Homo sapiens
ggccacagtttgaga

SEQ ID NO: 871676 - DNA, 15 bp, Homo sapiens
gccacagtttgagaa

SEQ ID NO: 871677 - DNA, 15 bp, Homo sapiens
ccacagtttgagaac

SEQ ID NO: 871678 - DNA, 15 bp, Homo sapiens
cacagtttgagaacc

SEQ ID NO: 871679 - DNA, 15 bp, Homo sapiens
acagtttgagaacca

SEQ ID NO: 871680 - DNA, 15 bp, Homo sapiens
cagtttgagaaccac

SEQ ID NO: 871681 - DNA, 15 bp, Homo sapiens
gtttgagaaccactc

SEQ ID NO: 871682 - DNA, 15 bp, Homo sapiens
tttgagaaccactct

SEQ ID NO: 871683 - DNA, 15 bp, Homo sapiens
ttgagaaccactctt

SEQ ID NO: 871684 - DNA, 15 bp, Homo sapiens
tgagaaccactcttt

SEQ ID NO: 871685 - DNA, 15 bp, Homo sapiens
gagaaccactctttt

SEQ ID NO: 871686 - DNA, 15 bp, Homo sapiens
agaaccactcttttg

SEQ ID NO: 871687 - DNA, 15 bp, Homo sapiens
gaaccactcttttga

SEQ ID NO: 871688 - DNA, 15 bp, Homo sapiens
aaccactcttttgaa

SEQ ID NO: 871689 - DNA, 15 bp, Homo sapiens
accactcttttgaag

SEQ ID NO: 871690 - DNA, 15 bp, Homo sapiens
ccactcttttgaaga

SEQ ID NO: 871691 - DNA, 15 bp, Homo sapiens
cactcttttgaagaa

SEQ ID NO: 871692 - DNA, 15 bp, Homo sapiens
actcttttgaagaat

SEQ ID NO: 871693 - DNA, 15 bp, Homo sapiens
ctcttttgaagaatc

SEQ ID NO: 871694 - DNA, 15 bp, Homo sapiens
tcttttgaagaatca

SEQ ID NO: 871695 - DNA, 15 bp, Homo sapiens
cttttgaagaatcag

SEQ ID NO: 871696 - DNA, 15 bp, Homo sapiens
ttttgaagaatcaga

SEQ ID NO: 871697 - DNA, 15 bp, Homo sapiens
tttgaagaatcagaa

SEQ ID NO: 871698 - DNA, 15 bp, Homo sapiens
ttgaagaatcagaac

SEQ ID NO: 871699 - DNA, 15 bp, Homo sapiens
tgaagaatcagaaca

SEQ ID NO: 871700 - DNA, 15 bp, Homo sapiens
gaagaatcagaacag

SEQ ID NO: 871701 - DNA, 15 bp, Homo sapiens
aagaatcagaacagt

SEQ ID NO: 871702 - DNA, 15 bp, Homo sapiens
agaatcagaacagtg

SEQ ID NO: 871703 - DNA, 15 bp, Homo sapiens
gaatcagaacagtga

SEQ ID NO: 871704 - DNA, 15 bp, Homo sapiens
aatcagaacagtgag

SEQ ID NO: 871705 - DNA, 15 bp, Homo sapiens
atcagaacagtgaga

SEQ ID NO: 871706 - DNA, 15 bp, Homo sapiens
tcagaacagtgagag

SEQ ID NO: 871707 - DNA, 15 bp, Homo sapiens
cagaacagtgagagg

SEQ ID NO: 871708 - DNA, 15 bp, Homo sapiens
agaacagtgagagga

SEQ ID NO: 871709 - DNA, 15 bp, Homo sapiens
gaacagtgagaggag

SEQ ID NO: 871710 - DNA, 15 bp, Homo sapiens
aacagtgagaggagc

SEQ ID NO: 871711 - DNA, 15 bp, Homo sapiens
acagtgagaggagct

SEQ ID NO: 871712 - DNA, 15 bp, Homo sapiens
cagtgagaggagctt

SEQ ID NO: 871713 - DNA, 15 bp, Homo sapiens
agtgagaggagcttg

SEQ ID NO: 871714 - DNA, 15 bp, Homo sapiens
tgagaggagcttgaa

SEQ ID NO: 871715 - DNA, 15 bp, Homo sapiens
gagaggagcttgaag

SEQ ID NO: 871716 - DNA, 15 bp, Homo sapiens
agaggagcttgaagt

SEQ ID NO: 871717 - DNA, 15 bp, Homo sapiens
gaggagcttgaagtg

SEQ ID NO: 871718 - DNA, 15 bp, Homo sapiens
aggagcttgaagtga

SEQ ID NO: 871719 - DNA, 15 bp, Homo sapiens
ggagcttgaagtgat

SEQ ID NO: 871720 - DNA, 15 bp, Homo sapiens
gagcttgaagtgatg

SEQ ID NO: 871721 - DNA, 15 bp, Homo sapiens
agcttgaagtgatgg

SEQ ID NO: 871722 - DNA, 15 bp, Homo sapiens
gcttgaagtgatggg

SEQ ID NO: 871723 - DNA, 15 bp, Homo sapiens
cttgaagtgatgggg

SEQ ID NO: 871724 - DNA, 15 bp, Homo sapiens
ttgaagtgatggggg

SEQ ID NO: 871725 - DNA, 15 bp, Homo sapiens
tgaagtgatgggggc

SEQ ID NO: 871726 - DNA, 15 bp, Homo sapiens
gaagtgatgggggcc

SEQ ID NO: 871727 - DNA, 15 bp, Homo sapiens
aagtgatgggggccc

SEQ ID NO: 871728 - DNA, 15 bp, Homo sapiens
agtgatgggggccca

SEQ ID NO: 871729 - DNA, 15 bp, Homo sapiens
gtgatgggggcccat

SEQ ID NO: 871730 - DNA, 15 bp, Homo sapiens
tgatgggggcccatc

SEQ ID NO: 871731 - DNA, 15 bp, Homo sapiens
gatgggggcccatct

SEQ ID NO: 871732 - DNA, 15 bp, Homo sapiens
atgggggcccatctc

SEQ ID NO: 871733 - DNA, 15 bp, Homo sapiens
tgggggcccatctct

SEQ ID NO: 871734 - DNA, 15 bp, Homo sapiens
gggggcccatctcta

SEQ ID NO: 871735 - DNA, 15 bp, Homo sapiens
ggggcccatctctaa

SEQ ID NO: 871736 - DNA, 15 bp, Homo sapiens
gggcccatctctaag

SEQ ID NO: 871737 - DNA, 15 bp, Homo sapiens
ggcccatctctaaga

SEQ ID NO: 871738 - DNA, 15 bp, Homo sapiens
gcccatctctaagaa

SEQ ID NO: 871739 - DNA, 15 bp, Homo sapiens
cccatctctaagaag

SEQ ID NO: 871740 - DNA, 15 bp, Homo sapiens
ccatctctaagaagt

SEQ ID NO: 871741 - DNA, 15 bp, Homo sapiens
catctctaagaagtg

SEQ ID NO: 871742 - DNA, 15 bp, Homo sapiens
atctctaagaagtgt

SEQ ID NO: 871743 - DNA, 15 bp, Homo sapiens
tctctaagaagtgtt

SEQ ID NO: 871744 - DNA, 15 bp, Homo sapiens
ctctaagaagtgttc

SEQ ID NO: 871745 - DNA, 15 bp, Homo sapiens
tctaagaagtgttca

SEQ ID NO: 871746 - DNA, 15 bp, Homo sapiens
ctaagaagtgttcag

SEQ ID NO: 871747 - DNA, 15 bp, Homo sapiens
taagaagtgttcaga

SEQ ID NO: 871748 - DNA, 15 bp, Homo sapiens
aagaagtgttcagac

SEQ ID NO: 871749 - DNA, 15 bp, Homo sapiens
agaagtgttcagact

SEQ ID NO: 871750 - DNA, 15 bp, Homo sapiens
gaagtgttcagactt

SEQ ID NO: 871751 - DNA, 15 bp, Homo sapiens
aagtgttcagacttt

SEQ ID NO: 871752 - DNA, 15 bp, Homo sapiens
agtgttcagactttg

SEQ ID NO: 871753 - DNA, 15 bp, Homo sapiens
gtgttcagactttgc

SEQ ID NO: 871754 - DNA, 15 bp, Homo sapiens
tgttcagactttgca

SEQ ID NO: 871755 - DNA, 15 bp, Homo sapiens
gttcagactttgcac

SEQ ID NO: 871756 - DNA, 15 bp, Homo sapiens
ttcagactttgcact

SEQ ID NO: 871757 - DNA, 15 bp, Homo sapiens
tcagactttgcactg

SEQ ID NO: 871758 - DNA, 15 bp, Homo sapiens
cagactttgcactgg

SEQ ID NO: 871759 - DNA, 15 bp, Homo sapiens
agactttgcactgga

SEQ ID NO: 871760 - DNA, 15 bp, Homo sapiens
gactttgcactggag

SEQ ID NO: 871761 - DNA, 15 bp, Homo sapiens
actttgcactggaga

SEQ ID NO: 871762 - DNA, 15 bp, Homo sapiens
ctttgcactggagaa

SEQ ID NO: 871763 - DNA, 15 bp, Homo sapiens
tttgcactggagaac

SEQ ID NO: 871764 - DNA, 15 bp, Homo sapiens
ttgcactggagaacc

SEQ ID NO: 871765 - DNA, 15 bp, Homo sapiens
tgcactggagaacca

SEQ ID NO: 871766 - DNA, 15 bp, Homo sapiens
gcactggagaaccaa

SEQ ID NO: 871767 - DNA, 15 bp, Homo sapiens
cactggagaaccaaa

SEQ ID NO: 871768 - DNA, 15 bp, Homo sapiens
actggagaaccaaat

SEQ ID NO: 871769 - DNA, 15 bp, Homo sapiens
ctggagaaccaaata

SEQ ID NO: 871770 - DNA, 15 bp, Homo sapiens
tggagaaccaaatag

SEQ ID NO: 871771 - DNA, 15 bp, Homo sapiens
ggagaaccaaatagt

SEQ ID NO: 871772 - DNA, 15 bp, Homo sapiens
gagaaccaaatagtt

SEQ ID NO: 871773 - DNA, 15 bp, Homo sapiens
agaaccaaatagttg

SEQ ID NO: 871774 - DNA, 15 bp, Homo sapiens
gaaccaaatagttgc

SEQ ID NO: 871775 - DNA, 15 bp, Homo sapiens
aaccaaatagttgct

SEQ ID NO: 871776 - DNA, 15 bp, Homo sapiens
accaaatagttgctt

SEQ ID NO: 871777 - DNA, 15 bp, Homo sapiens
ccaaatagttgctta

SEQ ID NO: 871778 - DNA, 15 bp, Homo sapiens
caaatagttgcttaa

SEQ ID NO: 871779 - DNA, 15 bp, Homo sapiens
aaatagttgcttaat

SEQ ID NO: 871780 - DNA, 15 bp, Homo sapiens
aatagttgcttaatt

SEQ ID NO: 871781 - DNA, 15 bp, Homo sapiens
atagttgcttaatta

SEQ ID NO: 871782 - DNA, 15 bp, Homo sapiens
tagttgcttaattaa

SEQ ID NO: 871783 - DNA, 15 bp, Homo sapiens
agttgcttaattaag

SEQ ID NO: 871784 - DNA, 15 bp, Homo sapiens
gttgcttaattaaga

SEQ ID NO: 871785 - DNA, 15 bp, Homo sapiens
ttgcttaattaagaa

SEQ ID NO: 871786 - DNA, 15 bp, Homo sapiens
tgcttaattaagaac

SEQ ID NO: 871787 - DNA, 15 bp, Homo sapiens
gcttaattaagaaca

SEQ ID NO: 871788 - DNA, 15 bp, Homo sapiens
cttaattaagaacat

SEQ ID NO: 871789 - DNA, 15 bp, Homo sapiens
ttaattaagaacatc

SEQ ID NO: 871790 - DNA, 15 bp, Homo sapiens
taattaagaacatct

SEQ ID NO: 871791 - DNA, 15 bp, Homo sapiens
aattaagaacatctg

SEQ ID NO: 871792 - DNA, 15 bp, Homo sapiens
attaagaacatctgt

SEQ ID NO: 871793 - DNA, 15 bp, Homo sapiens
ttaagaacatctgtc

SEQ ID NO: 871794 - DNA, 15 bp, Homo sapiens
taagaacatctgtct

SEQ ID NO: 871795 - DNA, 15 bp, Homo sapiens
aagaacatctgtctg

SEQ ID NO: 871796 - DNA, 15 bp, Homo sapiens
agaacatctgtctga

SEQ ID NO: 871797 - DNA, 15 bp, Homo sapiens
gaacatctgtctgac

SEQ ID NO: 871798 - DNA, 15 bp, Homo sapiens
aacatctgtctgacc

SEQ ID NO: 871799 - DNA, 15 bp, Homo sapiens
acatctgtctgacca

SEQ ID NO: 871800 - DNA, 15 bp, Homo sapiens
catctgtctgaccac

SEQ ID NO: 871801 - DNA, 15 bp, Homo sapiens
atctgtctgaccact

SEQ ID NO: 871802 - DNA, 15 bp, Homo sapiens
tctgtctgaccactg

SEQ ID NO: 871803 - DNA, 15 bp, Homo sapiens
ctgtctgaccactga

SEQ ID NO: 871804 - DNA, 15 bp, Homo sapiens
tgtctgaccactgac

SEQ ID NO: 871805 - DNA, 15 bp, Homo sapiens
gtctgaccactgaca

SEQ ID NO: 871806 - DNA, 15 bp, Homo sapiens
tctgaccactgacat

SEQ ID NO: 871807 - DNA, 15 bp, Homo sapiens
ctgaccactgacatg

SEQ ID NO: 871808 - DNA, 15 bp, Homo sapiens
tgaccactgacatga

SEQ ID NO: 871809 - DNA, 15 bp, Homo sapiens
gaccactgacatgag

SEQ ID NO: 871810 - DNA, 15 bp, Homo sapiens
accactgacatgagt

SEQ ID NO: 871811 - DNA, 15 bp, Homo sapiens
ccactgacatgagtc

SEQ ID NO: 871812 - DNA, 15 bp, Homo sapiens
cactgacatgagtcc

SEQ ID NO: 871813 - DNA, 15 bp, Homo sapiens
actgacatgagtcct

SEQ ID NO: 871814 - DNA, 15 bp, Homo sapiens
ctgacatgagtcctc

SEQ ID NO: 871815 - DNA, 15 bp, Homo sapiens
tgacatgagtcctcc

SEQ ID NO: 871816 - DNA, 15 bp, Homo sapiens
gacatgagtcctccc

SEQ ID NO: 871817 - DNA, 15 bp, Homo sapiens
acatgagtcctccct

SEQ ID NO: 871818 - DNA, 15 bp, Homo sapiens
catgagtcctccctg

SEQ ID NO: 871819 - DNA, 15 bp, Homo sapiens
atgagtcctccctgc

SEQ ID NO: 871820 - DNA, 15 bp, Homo sapiens
tgagtcctccctgct

SEQ ID NO: 871821 - DNA, 15 bp, Homo sapiens
gagtcctccctgctg

SEQ ID NO: 871822 - DNA, 15 bp, Homo sapiens
agtcctccctgctga

SEQ ID NO: 871823 - DNA, 15 bp, Homo sapiens
gtcctccctgctgat

SEQ ID NO: 871824 - DNA, 15 bp, Homo sapiens
tcctccctgctgatt

SEQ ID NO: 871825 - DNA, 15 bp, Homo sapiens
cctccctgctgatta

SEQ ID NO: 871826 - DNA, 15 bp, Homo sapiens
ctccctgctgattag

SEQ ID NO: 871827 - DNA, 15 bp, Homo sapiens
tccctgctgattagt

SEQ ID NO: 871828 - DNA, 15 bp, Homo sapiens
ccctgctgattagtt

SEQ ID NO: 871829 - DNA, 15 bp, Homo sapiens
cctgctgattagtta

SEQ ID NO: 871830 - DNA, 15 bp, Homo sapiens
ctgctgattagttac

SEQ ID NO: 871831 - DNA, 15 bp, Homo sapiens
tgctgattagttaca

SEQ ID NO: 871832 - DNA, 15 bp, Homo sapiens
gctgattagttacag

SEQ ID NO: 871833 - DNA, 15 bp, Homo sapiens
ctgattagttacagc

SEQ ID NO: 871834 - DNA, 15 bp, Homo sapiens
tgattagttacagca

SEQ ID NO: 871835 - DNA, 15 bp, Homo sapiens
gattagttacagcag

SEQ ID NO: 871836 - DNA, 15 bp, Homo sapiens
attagttacagcagc

SEQ ID NO: 871837 - DNA, 15 bp, Homo sapiens
ttagttacagcagct

SEQ ID NO: 871838 - DNA, 15 bp, Homo sapiens
tagttacagcagctg

SEQ ID NO: 871839 - DNA, 15 bp, Homo sapiens
agttacagcagctgg

SEQ ID NO: 871840 - DNA, 15 bp, Homo sapiens
gttacagcagctggc

SEQ ID NO: 871841 - DNA, 15 bp, Homo sapiens
ttacagcagctggct

SEQ ID NO: 871842 - DNA, 15 bp, Homo sapiens
tacagcagctggctc

SEQ ID NO: 871843 - DNA, 15 bp, Homo sapiens
acagcagctggctcc

SEQ ID NO: 871844 - DNA, 15 bp, Homo sapiens
cagcagctggctcca

SEQ ID NO: 871845 - DNA, 15 bp, Homo sapiens
agcagctggctccag

SEQ ID NO: 871846 - DNA, 15 bp, Homo sapiens
gcagctggctccagg

SEQ ID NO: 871847 - DNA, 15 bp, Homo sapiens
cagctggctccaggc

SEQ ID NO: 871848 - DNA, 15 bp, Homo sapiens
agctggctccaggcg

SEQ ID NO: 871849 - DNA, 15 bp, Homo sapiens
gctggctccaggcga

SEQ ID NO: 871850 - DNA, 15 bp, Homo sapiens
ctggctccaggcgaa

SEQ ID NO: 871851 - DNA, 15 bp, Homo sapiens
tggctccaggcgaac

SEQ ID NO: 871852 - DNA, 15 bp, Homo sapiens
ggctccaggcgaact

SEQ ID NO: 871853 - DNA, 15 bp, Homo sapiens
gctccaggcgaactt

SEQ ID NO: 871854 - DNA, 15 bp, Homo sapiens
ctccaggcgaacttc

SEQ ID NO: 871855 - DNA, 15 bp, Homo sapiens
tccaggcgaacttca

SEQ ID NO: 871856 - DNA, 15 bp, Homo sapiens
ccaggcgaacttcag

SEQ ID NO: 871857 - DNA, 15 bp, Homo sapiens
caggcgaacttcagg

SEQ ID NO: 871858 - DNA, 15 bp, Homo sapiens
aggcgaacttcaggc

SEQ ID NO: 871859 - DNA, 15 bp, Homo sapiens
ggcgaacttcaggca

SEQ ID NO: 871860 - DNA, 15 bp, Homo sapiens
gcgaacttcaggcag

SEQ ID NO: 871861 - DNA, 15 bp, Homo sapiens
cgaacttcaggcagc

SEQ ID NO: 871862 - DNA, 15 bp, Homo sapiens
gaacttcaggcagcc

SEQ ID NO: 871863 - DNA, 15 bp, Homo sapiens
aacttcaggcagcct

SEQ ID NO: 871864 - DNA, 15 bp, Homo sapiens
acttcaggcagcctt

SEQ ID NO: 871865 - DNA, 15 bp, Homo sapiens
cttcaggcagccttg

SEQ ID NO: 871866 - DNA, 15 bp, Homo sapiens
ttcaggcagccttga

SEQ ID NO: 871867 - DNA, 15 bp, Homo sapiens
tcaggcagccttgac

SEQ ID NO: 871868 - DNA, 15 bp, Homo sapiens
caggcagccttgact

SEQ ID NO: 871869 - DNA, 15 bp, Homo sapiens
aggcagccttgactg

SEQ ID NO: 871870 - DNA, 15 bp, Homo sapiens
ggcagccttgactgg

SEQ ID NO: 871871 - DNA, 15 bp, Homo sapiens
gcagccttgactggt

SEQ ID NO: 871872 - DNA, 15 bp, Homo sapiens
cagccttgactggtt

SEQ ID NO: 871873 - DNA, 15 bp, Homo sapiens
agccttgactggtta

SEQ ID NO: 871874 - DNA, 15 bp, Homo sapiens
gccttgactggttag

SEQ ID NO: 871875 - DNA, 15 bp, Homo sapiens
ccttgactggttaga

SEQ ID NO: 871876 - DNA, 15 bp, Homo sapiens
cttgactggttagag

SEQ ID NO: 871877 - DNA, 15 bp, Homo sapiens
ttgactggttagaga

SEQ ID NO: 871878 - DNA, 15 bp, Homo sapiens
tgactggttagagac

SEQ ID NO: 871879 - DNA, 15 bp, Homo sapiens
gactggttagagaca

SEQ ID NO: 871880 - DNA, 15 bp, Homo sapiens
actggttagagacat

SEQ ID NO: 871881 - DNA, 15 bp, Homo sapiens
ctggttagagacata

SEQ ID NO: 871882 - DNA, 15 bp, Homo sapiens
tggttagagacataa

SEQ ID NO: 871883 - DNA, 15 bp, Homo sapiens
ggttagagacataat

SEQ ID NO: 871884 - DNA, 15 bp, Homo sapiens
gttagagacataatt

SEQ ID NO: 871885 - DNA, 15 bp, Homo sapiens
ttagagacataattt

SEQ ID NO: 871886 - DNA, 15 bp, Homo sapiens
tagagacataattta

SEQ ID NO: 871887 - DNA, 15 bp, Homo sapiens
agagacataatttag

SEQ ID NO: 871888 - DNA, 15 bp, Homo sapiens
gagacataatttagg

SEQ ID NO: 871889 - DNA, 15 bp, Homo sapiens
agacataatttaggg

SEQ ID NO: 871890 - DNA, 15 bp, Homo sapiens
gacataatttagggt

SEQ ID NO: 871891 - DNA, 15 bp, Homo sapiens
acataatttagggtt

SEQ ID NO: 871892 - DNA, 15 bp, Homo sapiens
cataatttagggttg

SEQ ID NO: 871893 - DNA, 15 bp, Homo sapiens
ataatttagggttgt

SEQ ID NO: 871894 - DNA, 15 bp, Homo sapiens
taatttagggttgtc

SEQ ID NO: 871895 - DNA, 15 bp, Homo sapiens
aatttagggttgtcc

SEQ ID NO: 871896 - DNA, 15 bp, Homo sapiens
atttagggttgtcct

SEQ ID NO: 871897 - DNA, 15 bp, Homo sapiens
tttagggttgtcctt

SEQ ID NO: 871898 - DNA, 15 bp, Homo sapiens
ttagggttgtccttc

SEQ ID NO: 871899 - DNA, 15 bp, Homo sapiens
tagggttgtccttca

SEQ ID NO: 871900 - DNA, 15 bp, Homo sapiens
agggttgtccttcac

SEQ ID NO: 871901 - DNA, 15 bp, Homo sapiens
gggttgtccttcaca

SEQ ID NO: 871902 - DNA, 15 bp, Homo sapiens
ggttgtccttcacat

SEQ ID NO: 871903 - DNA, 15 bp, Homo sapiens
gttgtccttcacatc

SEQ ID NO: 871904 - DNA, 15 bp, Homo sapiens
ttgtccttcacatca

SEQ ID NO: 871905 - DNA, 15 bp, Homo sapiens
tgtccttcacatcac

SEQ ID NO: 871906 - DNA, 15 bp, Homo sapiens
gtccttcacatcaca

SEQ ID NO: 871907 - DNA, 15 bp, Homo sapiens
tccttcacatcacaa

SEQ ID NO: 871908 - DNA, 15 bp, Homo sapiens
ccttcacatcacaat

SEQ ID NO: 871909 - DNA, 15 bp, Homo sapiens
cttcacatcacaatg

SEQ ID NO: 871910 - DNA, 15 bp, Homo sapiens
ttcacatcacaatgc

SEQ ID NO: 871911 - DNA, 15 bp, Homo sapiens
tcacatcacaatgcc

SEQ ID NO: 871912 - DNA, 15 bp, Homo sapiens
cacatcacaatgccc

SEQ ID NO: 871913 - DNA, 15 bp, Homo sapiens
acatcacaatgccct

SEQ ID NO: 871914 - DNA, 15 bp, Homo sapiens
catcacaatgccctt

SEQ ID NO: 871915 - DNA, 15 bp, Homo sapiens
atcacaatgcccttt

SEQ ID NO: 871916 - DNA, 15 bp, Homo sapiens
tcacaatgccctttt

SEQ ID NO: 871917 - DNA, 15 bp, Homo sapiens
cacaatgcccttttt

SEQ ID NO: 871918 - DNA, 15 bp, Homo sapiens
acaatgcccttttta

SEQ ID NO: 871919 - DNA, 15 bp, Homo sapiens
caatgccctttttat

SEQ ID NO: 871920 - DNA, 15 bp, Homo sapiens
aatgccctttttata

SEQ ID NO: 871921 - DNA, 15 bp, Homo sapiens
atgccctttttatag

SEQ ID NO: 871922 - DNA, 15 bp, Homo sapiens
tgccctttttatagc

SEQ ID NO: 871923 - DNA, 15 bp, Homo sapiens
gccctttttatagca

SEQ ID NO: 871924 - DNA, 15 bp, Homo sapiens
ccctttttatagcaa

SEQ ID NO: 871925 - DNA, 15 bp, Homo sapiens
cctttttatagcaaa

SEQ ID NO: 871926 - DNA, 15 bp, Homo sapiens
ctttttatagcaaat

SEQ ID NO: 871927 - DNA, 15 bp, Homo sapiens
tttttatagcaaatg

SEQ ID NO: 871928 - DNA, 15 bp, Homo sapiens
ttttatagcaaatgc

SEQ ID NO: 871929 - DNA, 15 bp, Homo sapiens
tttatagcaaatgct

SEQ ID NO: 871930 - DNA, 15 bp, Homo sapiens
ttatagcaaatgctc

SEQ ID NO: 871931 - DNA, 15 bp, Homo sapiens
tatagcaaatgctct

SEQ ID NO: 871932 - DNA, 15 bp, Homo sapiens
atagcaaatgctctg

SEQ ID NO: 871933 - DNA, 15 bp, Homo sapiens
tagcaaatgctctgt

SEQ ID NO: 871934 - DNA, 15 bp, Homo sapiens
agcaaatgctctgtg

SEQ ID NO: 871935 - DNA, 15 bp, Homo sapiens
gcaaatgctctgtgt

SEQ ID NO: 871936 - DNA, 15 bp, Homo sapiens
caaatgctctgtgtc

SEQ ID NO: 871937 - DNA, 15 bp, Homo sapiens
aaatgctctgtgtcc

SEQ ID NO: 871938 - DNA, 15 bp, Homo sapiens
aatgctctgtgtcct

SEQ ID NO: 871939 - DNA, 15 bp, Homo sapiens
atgctctgtgtccta

SEQ ID NO: 871940 - DNA, 15 bp, Homo sapiens
tgctctgtgtcctaa

SEQ ID NO: 871941 - DNA, 15 bp, Homo sapiens
gctctgtgtcctaat

SEQ ID NO: 871942 - DNA, 15 bp, Homo sapiens
ctctgtgtcctaatt

SEQ ID NO: 871943 - DNA, 15 bp, Homo sapiens
tctgtgtcctaattc

SEQ ID NO: 871944 - DNA, 15 bp, Homo sapiens
ctgtgtcctaattca

SEQ ID NO: 871945 - DNA, 15 bp, Homo sapiens
tgtgtcctaattcat

SEQ ID NO: 871946 - DNA, 15 bp, Homo sapiens
gtgtcctaattcata

SEQ ID NO: 871947 - DNA, 15 bp, Homo sapiens
tgtcctaattcatac

SEQ ID NO: 871948 - DNA, 15 bp, Homo sapiens
gtcctaattcatacg

SEQ ID NO: 871949 - DNA, 15 bp, Homo sapiens
tcctaattcatacgc

SEQ ID NO: 871950 - DNA, 15 bp, Homo sapiens
cctaattcatacgca

SEQ ID NO: 871951 - DNA, 15 bp, Homo sapiens
ctaattcatacgcag

SEQ ID NO: 871952 - DNA, 15 bp, Homo sapiens
taattcatacgcagt

SEQ ID NO: 871953 - DNA, 15 bp, Homo sapiens
aattcatacgcagtc

SEQ ID NO: 871954 - DNA, 15 bp, Homo sapiens
attcatacgcagtcc

SEQ ID NO: 871955 - DNA, 15 bp, Homo sapiens
ttcatacgcagtccc

SEQ ID NO: 871956 - DNA, 15 bp, Homo sapiens
tcatacgcagtccct

SEQ ID NO: 871957 - DNA, 15 bp, Homo sapiens
catacgcagtccctg

SEQ ID NO: 871958 - DNA, 15 bp, Homo sapiens
atacgcagtccctgt

SEQ ID NO: 871959 - DNA, 15 bp, Homo sapiens
tacgcagtccctgta

SEQ ID NO: 871960 - DNA, 15 bp, Homo sapiens
acgcagtccctgtaa

SEQ ID NO: 871961 - DNA, 15 bp, Homo sapiens
cgcagtccctgtaaa

SEQ ID NO: 871962 - DNA, 15 bp, Homo sapiens
gcagtccctgtaaat

SEQ ID NO: 871963 - DNA, 15 bp, Homo sapiens
cagtccctgtaaatg

SEQ ID NO: 871964 - DNA, 15 bp, Homo sapiens
agtccctgtaaatga

SEQ ID NO: 871965 - DNA, 15 bp, Homo sapiens
gtccctgtaaatgaa

SEQ ID NO: 871966 - DNA, 15 bp, Homo sapiens
tccctgtaaatgaaa

SEQ ID NO: 871967 - DNA, 15 bp, Homo sapiens
ccctgtaaatgaaaa

SEQ ID NO: 871968 - DNA, 15 bp, Homo sapiens
cctgtaaatgaaaaa

SEQ ID NO: 871969 - DNA, 15 bp, Homo sapiens
ctgtaaatgaaaaat

SEQ ID NO: 871970 - DNA, 15 bp, Homo sapiens
tgtaaatgaaaaatg

SEQ ID NO: 871971 - DNA, 15 bp, Homo sapiens
gtaaatgaaaaatga

SEQ ID NO: 871972 - DNA, 15 bp, Homo sapiens
taaatgaaaaatgat

SEQ ID NO: 871973 - DNA, 15 bp, Homo sapiens
aaatgaaaaatgatg

SEQ ID NO: 871974 - DNA, 15 bp, Homo sapiens
aatgaaaaatgatgc

SEQ ID NO: 871975 - DNA, 15 bp, Homo sapiens
atgaaaaatgatgca

SEQ ID NO: 871976 - DNA, 15 bp, Homo sapiens
tgaaaaatgatgcaa

SEQ ID NO: 871977 - DNA, 15 bp, Homo sapiens
gaaaaatgatgcaag

SEQ ID NO: 871978 - DNA, 15 bp, Homo sapiens
aaaaatgatgcaaga

SEQ ID NO: 871979 - DNA, 15 bp, Homo sapiens
aaaatgatgcaagaa

SEQ ID NO: 871980 - DNA, 15 bp, Homo sapiens
aaatgatgcaagaac

SEQ ID NO: 871981 - DNA, 15 bp, Homo sapiens
aatgatgcaagaacc

SEQ ID NO: 871982 - DNA, 15 bp, Homo sapiens
atgatgcaagaaccc

SEQ ID NO: 871983 - DNA, 15 bp, Homo sapiens
tgatgcaagaaccct

SEQ ID NO: 871984 - DNA, 15 bp, Homo sapiens
gatgcaagaaccctg

SEQ ID NO: 871985 - DNA, 15 bp, Homo sapiens
atgcaagaaccctga

SEQ ID NO: 871986 - DNA, 15 bp, Homo sapiens
tgcaagaaccctgat

SEQ ID NO: 871987 - DNA, 15 bp, Homo sapiens
gcaagaaccctgatt

SEQ ID NO: 871988 - DNA, 15 bp, Homo sapiens
caagaaccctgattg

SEQ ID NO: 871989 - DNA, 15 bp, Homo sapiens
aagaaccctgattgt

SEQ ID NO: 871990 - DNA, 15 bp, Homo sapiens
agaaccctgattgtt

SEQ ID NO: 871991 - DNA, 15 bp, Homo sapiens
gaaccctgattgttc

SEQ ID NO: 871992 - DNA, 15 bp, Homo sapiens
aaccctgattgttca

SEQ ID NO: 871993 - DNA, 15 bp, Homo sapiens
accctgattgttcaa

SEQ ID NO: 871994 - DNA, 15 bp, Homo sapiens
ccctgattgttcaaa

SEQ ID NO: 871995 - DNA, 15 bp, Homo sapiens
cctgattgttcaaaa

SEQ ID NO: 871996 - DNA, 15 bp, Homo sapiens
ctgattgttcaaaaa

SEQ ID NO: 871997 - DNA, 15 bp, Homo sapiens
tgattgttcaaaaac

SEQ ID NO: 871998 - DNA, 15 bp, Homo sapiens
gattgttcaaaaaca

SEQ ID NO: 871999 - DNA, 15 bp, Homo sapiens
attgttcaaaaacaa

SEQ ID NO: 872000 - DNA, 15 bp, Homo sapiens
ttgttcaaaaacaaa

SEQ ID NO: 872001 - DNA, 15 bp, Homo sapiens
tgttcaaaaacaaat

SEQ ID NO: 872002 - DNA, 15 bp, Homo sapiens
gttcaaaaacaaatt

SEQ ID NO: 872003 - DNA, 15 bp, Homo sapiens
ttcaaaaacaaattg

SEQ ID NO: 872004 - DNA, 15 bp, Homo sapiens
tcaaaaacaaattgt

SEQ ID NO: 872005 - DNA, 15 bp, Homo sapiens
caaaaacaaattgtt

SEQ ID NO: 872006 - DNA, 15 bp, Homo sapiens
aaaaacaaattgttg

SEQ ID NO: 872007 - DNA, 15 bp, Homo sapiens
aaaacaaattgttgc

SEQ ID NO: 872008 - DNA, 15 bp, Homo sapiens
aaacaaattgttgca

SEQ ID NO: 872009 - DNA, 15 bp, Homo sapiens
aacaaattgttgcaa

SEQ ID NO: 872010 - DNA, 15 bp, Homo sapiens
acaaattgttgcaag

SEQ ID NO: 872011 - DNA, 15 bp, Homo sapiens
caaattgttgcaaga

SEQ ID NO: 872012 - DNA, 15 bp, Homo sapiens
aaattgttgcaagat

SEQ ID NO: 872013 - DNA, 15 bp, Homo sapiens
aattgttgcaagata

SEQ ID NO: 872014 - DNA, 15 bp, Homo sapiens
attgttgcaagatat

SEQ ID NO: 872015 - DNA, 15 bp, Homo sapiens
ttgttgcaagatatc

SEQ ID NO: 872016 - DNA, 15 bp, Homo sapiens
tgttgcaagatatca

SEQ ID NO: 872017 - DNA, 15 bp, Homo sapiens
gttgcaagatatcag

SEQ ID NO: 872018 - DNA, 15 bp, Homo sapiens
ttgcaagatatcaga

SEQ ID NO: 872019 - DNA, 15 bp, Homo sapiens
tgcaagatatcagag

SEQ ID NO: 872020 - DNA, 15 bp, Homo sapiens
gcaagatatcagagg

SEQ ID NO: 872021 - DNA, 15 bp, Homo sapiens
caagatatcagaggt

SEQ ID NO: 872022 - DNA, 15 bp, Homo sapiens
aagatatcagaggta

SEQ ID NO: 872023 - DNA, 15 bp, Homo sapiens
agatatcagaggtaa

SEQ ID NO: 872024 - DNA, 15 bp, Homo sapiens
gatatcagaggtaaa

SEQ ID NO: 872025 - DNA, 15 bp, Homo sapiens
atatcagaggtaaat

SEQ ID NO: 872026 - DNA, 15 bp, Homo sapiens
tatcagaggtaaatg

SEQ ID NO: 872027 - DNA, 15 bp, Homo sapiens
atcagaggtaaatgg

SEQ ID NO: 872028 - DNA, 15 bp, Homo sapiens
tcagaggtaaatggg

SEQ ID NO: 872029 - DNA, 15 bp, Homo sapiens
cagaggtaaatgggt

SEQ ID NO: 872030 - DNA, 15 bp, Homo sapiens
agaggtaaatgggtt

SEQ ID NO: 872031 - DNA, 15 bp, Homo sapiens
gaggtaaatgggttc

SEQ ID NO: 872032 - DNA, 15 bp, Homo sapiens
aggtaaatgggttct

SEQ ID NO: 872033 - DNA, 15 bp, Homo sapiens
ggtaaatgggttctc

SEQ ID NO: 872034 - DNA, 15 bp, Homo sapiens
gtaaatgggttctca

SEQ ID NO: 872035 - DNA, 15 bp, Homo sapiens
taaatgggttctcac

SEQ ID NO: 872036 - DNA, 15 bp, Homo sapiens
aaatgggttctcact

SEQ ID NO: 872037 - DNA, 15 bp, Homo sapiens
aatgggttctcactg

SEQ ID NO: 872038 - DNA, 15 bp, Homo sapiens
atgggttctcactgc

SEQ ID NO: 872039 - DNA, 15 bp, Homo sapiens
tgggttctcactgca

SEQ ID NO: 872040 - DNA, 15 bp, Homo sapiens
gggttctcactgcac

SEQ ID NO: 872041 - DNA, 15 bp, Homo sapiens
ggttctcactgcaca

SEQ ID NO: 872042 - DNA, 15 bp, Homo sapiens
gttctcactgcacac

SEQ ID NO: 872043 - DNA, 15 bp, Homo sapiens
ttctcactgcacacg

SEQ ID NO: 872044 - DNA, 15 bp, Homo sapiens
tctcactgcacacgt

SEQ ID NO: 872045 - DNA, 15 bp, Homo sapiens
ctcactgcacacgtt

SEQ ID NO: 872046 - DNA, 15 bp, Homo sapiens
tcactgcacacgttt

SEQ ID NO: 872047 - DNA, 15 bp, Homo sapiens
cactgcacacgtttt

SEQ ID NO: 872048 - DNA, 15 bp, Homo sapiens
actgcacacgttttg

SEQ ID NO: 872049 - DNA, 15 bp, Homo sapiens
ctgcacacgttttgg

SEQ ID NO: 872050 - DNA, 15 bp, Homo sapiens
tgcacacgttttgga

SEQ ID NO: 872051 - DNA, 15 bp, Homo sapiens
gcacacgttttggat

SEQ ID NO: 872052 - DNA, 15 bp, Homo sapiens
cacacgttttggatc

SEQ ID NO: 872053 - DNA, 15 bp, Homo sapiens
acacgttttggatct

SEQ ID NO: 872054 - DNA, 15 bp, Homo sapiens
cacgttttggatctc

SEQ ID NO: 872055 - DNA, 15 bp, Homo sapiens
acgttttggatctcc

SEQ ID NO: 872056 - DNA, 15 bp, Homo sapiens
cgttttggatctcca

SEQ ID NO: 872057 - DNA, 15 bp, Homo sapiens
gttttggatctccac

SEQ ID NO: 872058 - DNA, 15 bp, Homo sapiens
ttttggatctccacg

SEQ ID NO: 872059 - DNA, 15 bp, Homo sapiens
tttggatctccacga

SEQ ID NO: 872060 - DNA, 15 bp, Homo sapiens
ttggatctccacgaa

SEQ ID NO: 872061 - DNA, 15 bp, Homo sapiens
tggatctccacgaaa

SEQ ID NO: 872062 - DNA, 15 bp, Homo sapiens
ggatctccacgaaag

SEQ ID NO: 872063 - DNA, 15 bp, Homo sapiens
gatctccacgaaagg

SEQ ID NO: 872064 - DNA, 15 bp, Homo sapiens
atctccacgaaaggt

SEQ ID NO: 872065 - DNA, 15 bp, Homo sapiens
tctccacgaaaggtt

SEQ ID NO: 872066 - DNA, 15 bp, Homo sapiens
ctccacgaaaggttt

SEQ ID NO: 872067 - DNA, 15 bp, Homo sapiens
tccacgaaaggtttg

SEQ ID NO: 872068 - DNA, 15 bp, Homo sapiens
ccacgaaaggtttgc

SEQ ID NO: 872069 - DNA, 15 bp, Homo sapiens
cacgaaaggtttgct

SEQ ID NO: 872070 - DNA, 15 bp, Homo sapiens
acgaaaggtttgctg

SEQ ID NO: 872071 - DNA, 15 bp, Homo sapiens
cgaaaggtttgctga

SEQ ID NO: 872072 - DNA, 15 bp, Homo sapiens
gaaaggtttgctgag

SEQ ID NO: 872073 - DNA, 15 bp, Homo sapiens
aaaggtttgctgagt

SEQ ID NO: 872074 - DNA, 15 bp, Homo sapiens
aaggtttgctgagtc

SEQ ID NO: 872075 - DNA, 15 bp, Homo sapiens
aggtttgctgagtct

SEQ ID NO: 872076 - DNA, 15 bp, Homo sapiens
ggtttgctgagtctc

SEQ ID NO: 872077 - DNA, 15 bp, Homo sapiens
gtttgctgagtctct

SEQ ID NO: 872078 - DNA, 15 bp, Homo sapiens
tttgctgagtctctg

SEQ ID NO: 872079 - DNA, 15 bp, Homo sapiens
ttgctgagtctctgt

SEQ ID NO: 872080 - DNA, 15 bp, Homo sapiens
tgctgagtctctgtt

SEQ ID NO: 872081 - DNA, 15 bp, Homo sapiens
gctgagtctctgttg

SEQ ID NO: 872082 - DNA, 15 bp, Homo sapiens
ctgagtctctgttga

SEQ ID NO: 872083 - DNA, 15 bp, Homo sapiens
tgagtctctgttgac

SEQ ID NO: 872084 - DNA, 15 bp, Homo sapiens
gagtctctgttgact

SEQ ID NO: 872085 - DNA, 15 bp, Homo sapiens
agtctctgttgactg

SEQ ID NO: 872086 - DNA, 15 bp, Homo sapiens
gtctctgttgactgc

SEQ ID NO: 872087 - DNA, 15 bp, Homo sapiens
tctctgttgactgct

SEQ ID NO: 872088 - DNA, 15 bp, Homo sapiens
ctctgttgactgctt

SEQ ID NO: 872089 - DNA, 15 bp, Homo sapiens
tctgttgactgcttg

SEQ ID NO: 872090 - DNA, 15 bp, Homo sapiens
ctgttgactgcttga

SEQ ID NO: 872091 - DNA, 15 bp, Homo sapiens
tgttgactgcttgaa

SEQ ID NO: 872092 - DNA, 15 bp, Homo sapiens
gttgactgcttgaag

SEQ ID NO: 872093 - DNA, 15 bp, Homo sapiens
ttgactgcttgaaga

SEQ ID NO: 872094 - DNA, 15 bp, Homo sapiens
tgactgcttgaagag

SEQ ID NO: 872095 - DNA, 15 bp, Homo sapiens
gactgcttgaagagt

SEQ ID NO: 872096 - DNA, 15 bp, Homo sapiens
actgcttgaagagtg

SEQ ID NO: 872097 - DNA, 15 bp, Homo sapiens
ctgcttgaagagtgt

SEQ ID NO: 872098 - DNA, 15 bp, Homo sapiens
tgcttgaagagtgtt

SEQ ID NO: 872099 - DNA, 15 bp, Homo sapiens
gcttgaagagtgttt

SEQ ID NO: 872100 - DNA, 15 bp, Homo sapiens
cttgaagagtgtttg

SEQ ID NO: 872101 - DNA, 15 bp, Homo sapiens
ttgaagagtgtttgg

SEQ ID NO: 872102 - DNA, 15 bp, Homo sapiens
tgaagagtgtttggg

SEQ ID NO: 872103 - DNA, 15 bp, Homo sapiens
gaagagtgtttgggg

SEQ ID NO: 872104 - DNA, 15 bp, Homo sapiens
aagagtgtttgggga

SEQ ID NO: 872105 - DNA, 15 bp, Homo sapiens
agagtgtttggggac

SEQ ID NO: 872106 - DNA, 15 bp, Homo sapiens
gagtgtttggggact

SEQ ID NO: 872107 - DNA, 15 bp, Homo sapiens
agtgtttggggacta

SEQ ID NO: 872108 - DNA, 15 bp, Homo sapiens
gtgtttggggactag

SEQ ID NO: 872109 - DNA, 15 bp, Homo sapiens
tgtttggggactaga

SEQ ID NO: 872110 - DNA, 15 bp, Homo sapiens
gtttggggactagag

SEQ ID NO: 872111 - DNA, 15 bp, Homo sapiens
tttggggactagaga

SEQ ID NO: 872112 - DNA, 15 bp, Homo sapiens
ttggggactagagat

SEQ ID NO: 872113 - DNA, 15 bp, Homo sapiens
tggggactagagatg

SEQ ID NO: 872114 - DNA, 15 bp, Homo sapiens
ggggactagagatga

SEQ ID NO: 872115 - DNA, 15 bp, Homo sapiens
gggactagagatgat

SEQ ID NO: 872116 - DNA, 15 bp, Homo sapiens
ggactagagatgatt

SEQ ID NO: 872117 - DNA, 15 bp, Homo sapiens
gactagagatgattc

SEQ ID NO: 872118 - DNA, 15 bp, Homo sapiens
actagagatgattca

SEQ ID NO: 872119 - DNA, 15 bp, Homo sapiens
ctagagatgattcat

SEQ ID NO: 872120 - DNA, 15 bp, Homo sapiens
tagagatgattcatc

SEQ ID NO: 872121 - DNA, 15 bp, Homo sapiens
agagatgattcatca

SEQ ID NO: 872122 - DNA, 15 bp, Homo sapiens
gagatgattcatcag

SEQ ID NO: 872123 - DNA, 15 bp, Homo sapiens
agatgattcatcagt

SEQ ID NO: 872124 - DNA, 15 bp, Homo sapiens
gatgattcatcagtt

SEQ ID NO: 872125 - DNA, 15 bp, Homo sapiens
atgattcatcagttc

SEQ ID NO: 872126 - DNA, 15 bp, Homo sapiens
tgattcatcagttcc

SEQ ID NO: 872127 - DNA, 15 bp, Homo sapiens
gattcatcagttcct

SEQ ID NO: 872128 - DNA, 15 bp, Homo sapiens
attcatcagttcctt

SEQ ID NO: 872129 - DNA, 15 bp, Homo sapiens
ttcatcagttccttt

SEQ ID NO: 872130 - DNA, 15 bp, Homo sapiens
tcatcagttccttta

SEQ ID NO: 872131 - DNA, 15 bp, Homo sapiens
catcagttcctttag

SEQ ID NO: 872132 - DNA, 15 bp, Homo sapiens
atcagttcctttagt

SEQ ID NO: 872133 - DNA, 15 bp, Homo sapiens
tcagttcctttagtt

SEQ ID NO: 872134 - DNA, 15 bp, Homo sapiens
cagttcctttagtta

SEQ ID NO: 872135 - DNA, 15 bp, Homo sapiens
agttcctttagttag

SEQ ID NO: 872136 - DNA, 15 bp, Homo sapiens
gttcctttagttagt

SEQ ID NO: 872137 - DNA, 15 bp, Homo sapiens
ttcctttagttagtt

SEQ ID NO: 872138 - DNA, 15 bp, Homo sapiens
tcctttagttagttt

SEQ ID NO: 872139 - DNA, 15 bp, Homo sapiens
cctttagttagtttg

SEQ ID NO: 872140 - DNA, 15 bp, Homo sapiens
ctttagttagtttga

SEQ ID NO: 872141 - DNA, 15 bp, Homo sapiens
tttagttagtttgat

SEQ ID NO: 872142 - DNA, 15 bp, Homo sapiens
ttagttagtttgatt

SEQ ID NO: 872143 - DNA, 15 bp, Homo sapiens
tagttagtttgattg

SEQ ID NO: 872144 - DNA, 15 bp, Homo sapiens
agttagtttgattgc

SEQ ID NO: 872145 - DNA, 15 bp, Homo sapiens
gttagtttgattgca

SEQ ID NO: 872146 - DNA, 15 bp, Homo sapiens
ttagtttgattgcat

SEQ ID NO: 872147 - DNA, 15 bp, Homo sapiens
tagtttgattgcatc

SEQ ID NO: 872148 - DNA, 15 bp, Homo sapiens
agtttgattgcatcc

SEQ ID NO: 872149 - DNA, 15 bp, Homo sapiens
gtttgattgcatcct

SEQ ID NO: 872150 - DNA, 15 bp, Homo sapiens
tttgattgcatcctc

SEQ ID NO: 872151 - DNA, 15 bp, Homo sapiens
ttgattgcatcctct

SEQ ID NO: 872152 - DNA, 15 bp, Homo sapiens
tgattgcatcctctg

SEQ ID NO: 872153 - DNA, 15 bp, Homo sapiens
gattgcatcctctgc

SEQ ID NO: 872154 - DNA, 15 bp, Homo sapiens
attgcatcctctgct

SEQ ID NO: 872155 - DNA, 15 bp, Homo sapiens
ttgcatcctctgctg

SEQ ID NO: 872156 - DNA, 15 bp, Homo sapiens
tgcatcctctgctgg

SEQ ID NO: 872157 - DNA, 15 bp, Homo sapiens
gcatcctctgctgga

SEQ ID NO: 872158 - DNA, 15 bp, Homo sapiens
catcctctgctggat

SEQ ID NO: 872159 - DNA, 15 bp, Homo sapiens
atcctctgctggatt

SEQ ID NO: 872160 - DNA, 15 bp, Homo sapiens
tcctctgctggattc

SEQ ID NO: 872161 - DNA, 15 bp, Homo sapiens
cctctgctggattct

SEQ ID NO: 872162 - DNA, 15 bp, Homo sapiens
ctctgctggattctg

SEQ ID NO: 872163 - DNA, 15 bp, Homo sapiens
tctgctggattctgg

SEQ ID NO: 872164 - DNA, 15 bp, Homo sapiens
ctgctggattctgga

SEQ ID NO: 872165 - DNA, 15 bp, Homo sapiens
tgctggattctggaa

SEQ ID NO: 872166 - DNA, 15 bp, Homo sapiens
gctggattctggaaa

SEQ ID NO: 872167 - DNA, 15 bp, Homo sapiens
ctggattctggaaat

SEQ ID NO: 872168 - DNA, 15 bp, Homo sapiens
tggattctggaaata

SEQ ID NO: 872169 - DNA, 15 bp, Homo sapiens
ggattctggaaatac

SEQ ID NO: 872170 - DNA, 15 bp, Homo sapiens
gattctggaaataca

SEQ ID NO: 872171 - DNA, 15 bp, Homo sapiens
attctggaaatacat

SEQ ID NO: 872172 - DNA, 15 bp, Homo sapiens
ttctggaaatacatg

SEQ ID NO: 872173 - DNA, 15 bp, Homo sapiens
tctggaaatacatgg

SEQ ID NO: 872174 - DNA, 15 bp, Homo sapiens
ctggaaatacatgga

SEQ ID NO: 872175 - DNA, 15 bp, Homo sapiens
tggaaatacatggaa

SEQ ID NO: 872176 - DNA, 15 bp, Homo sapiens
ggaaatacatggaag

SEQ ID NO: 872177 - DNA, 15 bp, Homo sapiens
gaaatacatggaaga

SEQ ID NO: 872178 - DNA, 15 bp, Homo sapiens
aaatacatggaagag

SEQ ID NO: 872179 - DNA, 15 bp, Homo sapiens
aatacatggaagagc

SEQ ID NO: 872180 - DNA, 15 bp, Homo sapiens
atacatggaagagca

SEQ ID NO: 872181 - DNA, 15 bp, Homo sapiens
tacatggaagagcaa

SEQ ID NO: 872182 - DNA, 15 bp, Homo sapiens
acatggaagagcaaa

SEQ ID NO: 872183 - DNA, 15 bp, Homo sapiens
catggaagagcaaaa

SEQ ID NO: 872184 - DNA, 15 bp, Homo sapiens
atggaagagcaaaat

SEQ ID NO: 872185 - DNA, 15 bp, Homo sapiens
tggaagagcaaaata

SEQ ID NO: 872186 - DNA, 15 bp, Homo sapiens
ggaagagcaaaatag

SEQ ID NO: 872187 - DNA, 15 bp, Homo sapiens
gaagagcaaaataga

SEQ ID NO: 872188 - DNA, 15 bp, Homo sapiens
aagagcaaaatagat

SEQ ID NO: 872189 - DNA, 15 bp, Homo sapiens
agagcaaaatagatc

SEQ ID NO: 872190 - DNA, 15 bp, Homo sapiens
gagcaaaatagatcc

SEQ ID NO: 872191 - DNA, 15 bp, Homo sapiens
agcaaaatagatccc

SEQ ID NO: 872192 - DNA, 15 bp, Homo sapiens
gcaaaatagatccct

SEQ ID NO: 872193 - DNA, 15 bp, Homo sapiens
caaaatagatccctg

SEQ ID NO: 872194 - DNA, 15 bp, Homo sapiens
aaaatagatccctgc

SEQ ID NO: 872195 - DNA, 15 bp, Homo sapiens
aaatagatccctgcc

SEQ ID NO: 872196 - DNA, 15 bp, Homo sapiens
aatagatccctgccc

SEQ ID NO: 872197 - DNA, 15 bp, Homo sapiens
atagatccctgcccc

SEQ ID NO: 872198 - DNA, 15 bp, Homo sapiens
tagatccctgcccct

SEQ ID NO: 872199 - DNA, 15 bp, Homo sapiens
agatccctgccccta

SEQ ID NO: 872200 - DNA, 15 bp, Homo sapiens
gatccctgcccctaa

SEQ ID NO: 872201 - DNA, 15 bp, Homo sapiens
atccctgcccctaaa

SEQ ID NO: 872202 - DNA, 15 bp, Homo sapiens
tccctgcccctaaat

SEQ ID NO: 872203 - DNA, 15 bp, Homo sapiens
ccctgcccctaaata

SEQ ID NO: 872204 - DNA, 15 bp, Homo sapiens
cctgcccctaaatag

SEQ ID NO: 872205 - DNA, 15 bp, Homo sapiens
ctgcccctaaatagt

SEQ ID NO: 872206 - DNA, 15 bp, Homo sapiens
tgcccctaaatagtt

SEQ ID NO: 872207 - DNA, 15 bp, Homo sapiens
gcccctaaatagttc

SEQ ID NO: 872208 - DNA, 15 bp, Homo sapiens
cccctaaatagttca

SEQ ID NO: 872209 - DNA, 15 bp, Homo sapiens
ccctaaatagttcac

SEQ ID NO: 872210 - DNA, 15 bp, Homo sapiens
cctaaatagttcacc

SEQ ID NO: 872211 - DNA, 15 bp, Homo sapiens
ctaaatagttcacca

SEQ ID NO: 872212 - DNA, 15 bp, Homo sapiens
taaatagttcaccat

SEQ ID NO: 872213 - DNA, 15 bp, Homo sapiens
aaatagttcaccatc

SEQ ID NO: 872214 - DNA, 15 bp, Homo sapiens
aatagttcaccatct

SEQ ID NO: 872215 - DNA, 15 bp, Homo sapiens
atagttcaccatcta

SEQ ID NO: 872216 - DNA, 15 bp, Homo sapiens
tagttcaccatctaa

SEQ ID NO: 872217 - DNA, 15 bp, Homo sapiens
agttcaccatctaat

SEQ ID NO: 872218 - DNA, 15 bp, Homo sapiens
gttcaccatctaatg

SEQ ID NO: 872219 - DNA, 15 bp, Homo sapiens
ttcaccatctaatgg

SEQ ID NO: 872220 - DNA, 15 bp, Homo sapiens
tcaccatctaatgga

SEQ ID NO: 872221 - DNA, 15 bp, Homo sapiens
caccatctaatggat

SEQ ID NO: 872222 - DNA, 15 bp, Homo sapiens
accatctaatggata

SEQ ID NO: 872223 - DNA, 15 bp, Homo sapiens
ccatctaatggataa

SEQ ID NO: 872224 - DNA, 15 bp, Homo sapiens
catctaatggataaa

SEQ ID NO: 872225 - DNA, 15 bp, Homo sapiens
atctaatggataaaa

SEQ ID NO: 872226 - DNA, 15 bp, Homo sapiens
tctaatggataaaac

SEQ ID NO: 872227 - DNA, 15 bp, Homo sapiens
ctaatggataaaaca

SEQ ID NO: 872228 - DNA, 15 bp, Homo sapiens
taatggataaaacag

SEQ ID NO: 872229 - DNA, 15 bp, Homo sapiens
aatggataaaacaga

SEQ ID NO: 872230 - DNA, 15 bp, Homo sapiens
atggataaaacagac

SEQ ID NO: 872231 - DNA, 15 bp, Homo sapiens
tggataaaacagaca

SEQ ID NO: 872232 - DNA, 15 bp, Homo sapiens
ggataaaacagacat

SEQ ID NO: 872233 - DNA, 15 bp, Homo sapiens
gataaaacagacatg

SEQ ID NO: 872234 - DNA, 15 bp, Homo sapiens
ataaaacagacatgg

SEQ ID NO: 872235 - DNA, 15 bp, Homo sapiens
taaaacagacatgga

SEQ ID NO: 872236 - DNA, 15 bp, Homo sapiens
aaaacagacatggaa

SEQ ID NO: 872237 - DNA, 15 bp, Homo sapiens
aaacagacatggaaa

SEQ ID NO: 872238 - DNA, 15 bp, Homo sapiens
aacagacatggaaat

SEQ ID NO: 872239 - DNA, 15 bp, Homo sapiens
acagacatggaaatt

SEQ ID NO: 872240 - DNA, 15 bp, Homo sapiens
cagacatggaaatta

SEQ ID NO: 872241 - DNA, 15 bp, Homo sapiens
agacatggaaattat

SEQ ID NO: 872242 - DNA, 15 bp, Homo sapiens
gacatggaaattatt

SEQ ID NO: 872243 - DNA, 15 bp, Homo sapiens
acatggaaattatta

SEQ ID NO: 872244 - DNA, 15 bp, Homo sapiens
catggaaattattat

SEQ ID NO: 872245 - DNA, 15 bp, Homo sapiens
atggaaattattatt

SEQ ID NO: 872246 - DNA, 15 bp, Homo sapiens
tggaaattattattg

SEQ ID NO: 872247 - DNA, 15 bp, Homo sapiens
ggaaattattattgc

SEQ ID NO: 872248 - DNA, 15 bp, Homo sapiens
gaaattattattgcc

SEQ ID NO: 872249 - DNA, 15 bp, Homo sapiens
aaattattattgccg

SEQ ID NO: 872250 - DNA, 15 bp, Homo sapiens
aattattattgccga

SEQ ID NO: 872251 - DNA, 15 bp, Homo sapiens
attattattgccgaa

SEQ ID NO: 872252 - DNA, 15 bp, Homo sapiens
ttattattgccgaag

SEQ ID NO: 872253 - DNA, 15 bp, Homo sapiens
tattattgccgaagg

SEQ ID NO: 872254 - DNA, 15 bp, Homo sapiens
attattgccgaagga

SEQ ID NO: 872255 - DNA, 15 bp, Homo sapiens
ttattgccgaaggag

SEQ ID NO: 872256 - DNA, 15 bp, Homo sapiens
tattgccgaaggagc

SEQ ID NO: 872257 - DNA, 15 bp, Homo sapiens
attgccgaaggagca

SEQ ID NO: 872258 - DNA, 15 bp, Homo sapiens
ttgccgaaggagcat

SEQ ID NO: 872259 - DNA, 15 bp, Homo sapiens
tgccgaaggagcatc

SEQ ID NO: 872260 - DNA, 15 bp, Homo sapiens
gccgaaggagcatct

SEQ ID NO: 872261 - DNA, 15 bp, Homo sapiens
ccgaaggagcatctc

SEQ ID NO: 872262 - DNA, 15 bp, Homo sapiens
cgaaggagcatctct

SEQ ID NO: 872263 - DNA, 15 bp, Homo sapiens
gaaggagcatctcta

SEQ ID NO: 872264 - DNA, 15 bp, Homo sapiens
aaggagcatctctag

SEQ ID NO: 872265 - DNA, 15 bp, Homo sapiens
aggagcatctctaga

SEQ ID NO: 872266 - DNA, 15 bp, Homo sapiens
ggagcatctctagaa

SEQ ID NO: 872267 - DNA, 15 bp, Homo sapiens
gagcatctctagaag

SEQ ID NO: 872268 - DNA, 15 bp, Homo sapiens
agcatctctagaagt

SEQ ID NO: 872269 - DNA, 15 bp, Homo sapiens
gcatctctagaagtt

SEQ ID NO: 872270 - DNA, 15 bp, Homo sapiens
catctctagaagttc

SEQ ID NO: 872271 - DNA, 15 bp, Homo sapiens
atctctagaagttcc

SEQ ID NO: 872272 - DNA, 15 bp, Homo sapiens
tctctagaagttccc

SEQ ID NO: 872273 - DNA, 15 bp, Homo sapiens
ctctagaagttccca

SEQ ID NO: 872274 - DNA, 15 bp, Homo sapiens
tctagaagttcccag

SEQ ID NO: 872275 - DNA, 15 bp, Homo sapiens
ctagaagttcccagg

SEQ ID NO: 872276 - DNA, 15 bp, Homo sapiens
tagaagttcccagga

SEQ ID NO: 872277 - DNA, 15 bp, Homo sapiens
agaagttcccaggaa

SEQ ID NO: 872278 - DNA, 15 bp, Homo sapiens
gaagttcccaggaag

SEQ ID NO: 872279 - DNA, 15 bp, Homo sapiens
aagttcccaggaagg

SEQ ID NO: 872280 - DNA, 15 bp, Homo sapiens
agttcccaggaaggg

SEQ ID NO: 872281 - DNA, 15 bp, Homo sapiens
gttcccaggaaggga

SEQ ID NO: 872282 - DNA, 15 bp, Homo sapiens
ttcccaggaagggaa

SEQ ID NO: 872283 - DNA, 15 bp, Homo sapiens
tcccaggaagggaaa

SEQ ID NO: 872284 - DNA, 15 bp, Homo sapiens
cccaggaagggaaaa

SEQ ID NO: 872285 - DNA, 15 bp, Homo sapiens
ccaggaagggaaaat

SEQ ID NO: 872286 - DNA, 15 bp, Homo sapiens
caggaagggaaaata

SEQ ID NO: 872287 - DNA, 15 bp, Homo sapiens
aggaagggaaaataa

SEQ ID NO: 872288 - DNA, 15 bp, Homo sapiens
ggaagggaaaataac

SEQ ID NO: 872289 - DNA, 15 bp, Homo sapiens
gaagggaaaataact

SEQ ID NO: 872290 - DNA, 15 bp, Homo sapiens
aagggaaaataactt

SEQ ID NO: 872291 - DNA, 15 bp, Homo sapiens
agggaaaataacttc

SEQ ID NO: 872292 - DNA, 15 bp, Homo sapiens
gggaaaataacttca

SEQ ID NO: 872293 - DNA, 15 bp, Homo sapiens
ggaaaataacttcag

SEQ ID NO: 872294 - DNA, 15 bp, Homo sapiens
gaaaataacttcagt

SEQ ID NO: 872295 - DNA, 15 bp, Homo sapiens
aaaataacttcagtc

SEQ ID NO: 872296 - DNA, 15 bp, Homo sapiens
aaataacttcagtct

SEQ ID NO: 872297 - DNA, 15 bp, Homo sapiens
aataacttcagtctc

SEQ ID NO: 872298 - DNA, 15 bp, Homo sapiens
ataacttcagtctct

SEQ ID NO: 872299 - DNA, 15 bp, Homo sapiens
taacttcagtctctc

SEQ ID NO: 872300 - DNA, 15 bp, Homo sapiens
aacttcagtctctct

SEQ ID NO: 872301 - DNA, 15 bp, Homo sapiens
acttcagtctctctg

SEQ ID NO: 872302 - DNA, 15 bp, Homo sapiens
cttcagtctctctgg

SEQ ID NO: 872303 - DNA, 15 bp, Homo sapiens
ttcagtctctctggc

SEQ ID NO: 872304 - DNA, 15 bp, Homo sapiens
tcagtctctctggct

SEQ ID NO: 872305 - DNA, 15 bp, Homo sapiens
cagtctctctggctg

SEQ ID NO: 872306 - DNA, 15 bp, Homo sapiens
agtctctctggctgt

SEQ ID NO: 872307 - DNA, 15 bp, Homo sapiens
gtctctctggctgtt

SEQ ID NO: 872308 - DNA, 15 bp, Homo sapiens
tctctctggctgttc

SEQ ID NO: 872309 - DNA, 15 bp, Homo sapiens
ctctctggctgttca

SEQ ID NO: 872310 - DNA, 15 bp, Homo sapiens
tctctggctgttcag

SEQ ID NO: 872311 - DNA, 15 bp, Homo sapiens
ctctggctgttcagg

SEQ ID NO: 872312 - DNA, 15 bp, Homo sapiens
tctggctgttcagga

SEQ ID NO: 872313 - DNA, 15 bp, Homo sapiens
ctggctgttcaggat

SEQ ID NO: 872314 - DNA, 15 bp, Homo sapiens
tggctgttcaggatg

SEQ ID NO: 872315 - DNA, 15 bp, Homo sapiens
ggctgttcaggatga

SEQ ID NO: 872316 - DNA, 15 bp, Homo sapiens
gctgttcaggatgat

SEQ ID NO: 872317 - DNA, 15 bp, Homo sapiens
ctgttcaggatgatg

SEQ ID NO: 872318 - DNA, 15 bp, Homo sapiens
tgttcaggatgatgg

SEQ ID NO: 872319 - DNA, 15 bp, Homo sapiens
gttcaggatgatggc

SEQ ID NO: 872320 - DNA, 15 bp, Homo sapiens
ttcaggatgatggct

SEQ ID NO: 872321 - DNA, 15 bp, Homo sapiens
tcaggatgatggctt

SEQ ID NO: 872322 - DNA, 15 bp, Homo sapiens
caggatgatggcttt

SEQ ID NO: 872323 - DNA, 15 bp, Homo sapiens
aggatgatggcttta

SEQ ID NO: 872324 - DNA, 15 bp, Homo sapiens
ggatgatggctttat

SEQ ID NO: 872325 - DNA, 15 bp, Homo sapiens
gatgatggctttatg

SEQ ID NO: 872326 - DNA, 15 bp, Homo sapiens
atgatggctttatga

SEQ ID NO: 872327 - DNA, 15 bp, Homo sapiens
tgatggctttatgag

SEQ ID NO: 872328 - DNA, 15 bp, Homo sapiens
gatggctttatgagg

SEQ ID NO: 872329 - DNA, 15 bp, Homo sapiens
atggctttatgagga

SEQ ID NO: 872330 - DNA, 15 bp, Homo sapiens
tggctttatgaggaa

SEQ ID NO: 872331 - DNA, 15 bp, Homo sapiens
ggctttatgaggaac

SEQ ID NO: 872332 - DNA, 15 bp, Homo sapiens
gctttatgaggaaca

SEQ ID NO: 872333 - DNA, 15 bp, Homo sapiens
ctttatgaggaacac

SEQ ID NO: 872334 - DNA, 15 bp, Homo sapiens
tttatgaggaacact

SEQ ID NO: 872335 - DNA, 15 bp, Homo sapiens
ttatgaggaacactt

SEQ ID NO: 872336 - DNA, 15 bp, Homo sapiens
tatgaggaacacttg

SEQ ID NO: 872337 - DNA, 15 bp, Homo sapiens
atgaggaacacttga

SEQ ID NO: 872338 - DNA, 15 bp, Homo sapiens
tgaggaacacttgag

SEQ ID NO: 872339 - DNA, 15 bp, Homo sapiens
gaggaacacttgagc

SEQ ID NO: 872340 - DNA, 15 bp, Homo sapiens
aggaacacttgagcc

SEQ ID NO: 872341 - DNA, 15 bp, Homo sapiens
ggaacacttgagcca

SEQ ID NO: 872342 - DNA, 15 bp, Homo sapiens
gaacacttgagccaa

SEQ ID NO: 872343 - DNA, 15 bp, Homo sapiens
aacacttgagccaaa

SEQ ID NO: 872344 - DNA, 15 bp, Homo sapiens
acacttgagccaaac

SEQ ID NO: 872345 - DNA, 15 bp, Homo sapiens
cacttgagccaaact

SEQ ID NO: 872346 - DNA, 15 bp, Homo sapiens
acttgagccaaactg

SEQ ID NO: 872347 - DNA, 15 bp, Homo sapiens
cttgagccaaactgt

SEQ ID NO: 872348 - DNA, 15 bp, Homo sapiens
ttgagccaaactgtg

SEQ ID NO: 872349 - DNA, 15 bp, Homo sapiens
tgagccaaactgtga

SEQ ID NO: 872350 - DNA, 15 bp, Homo sapiens
gagccaaactgtgaa

SEQ ID NO: 872351 - DNA, 15 bp, Homo sapiens
agccaaactgtgaag

SEQ ID NO: 872352 - DNA, 15 bp, Homo sapiens
gccaaactgtgaagt

SEQ ID NO: 872353 - DNA, 15 bp, Homo sapiens
ccaaactgtgaagtc

SEQ ID NO: 872354 - DNA, 15 bp, Homo sapiens
caaactgtgaagtct

SEQ ID NO: 872355 - DNA, 15 bp, Homo sapiens
aaactgtgaagtctg

SEQ ID NO: 872356 - DNA, 15 bp, Homo sapiens
aactgtgaagtctga

SEQ ID NO: 872357 - DNA, 15 bp, Homo sapiens
actgtgaagtctgag

SEQ ID NO: 872358 - DNA, 15 bp, Homo sapiens
ctgtgaagtctgaga

SEQ ID NO: 872359 - DNA, 15 bp, Homo sapiens
tgtgaagtctgagaa

SEQ ID NO: 872360 - DNA, 15 bp, Homo sapiens
gtgaagtctgagaaa

SEQ ID NO: 872361 - DNA, 15 bp, Homo sapiens
tgaagtctgagaaat

SEQ ID NO: 872362 - DNA, 15 bp, Homo sapiens
gaagtctgagaaatg

SEQ ID NO: 872363 - DNA, 15 bp, Homo sapiens
aagtctgagaaatgt

SEQ ID NO: 872364 - DNA, 15 bp, Homo sapiens
agtctgagaaatgtc

SEQ ID NO: 872365 - DNA, 15 bp, Homo sapiens
gtctgagaaatgtct

SEQ ID NO: 872366 - DNA, 15 bp, Homo sapiens
tctgagaaatgtctt

SEQ ID NO: 872367 - DNA, 15 bp, Homo sapiens
ctgagaaatgtcttg

SEQ ID NO: 872368 - DNA, 15 bp, Homo sapiens
tgagaaatgtcttgt

SEQ ID NO: 872369 - DNA, 15 bp, Homo sapiens
gagaaatgtcttgtt

SEQ ID NO: 872370 - DNA, 15 bp, Homo sapiens
agaaatgtcttgtta

SEQ ID NO: 872371 - DNA, 15 bp, Homo sapiens
gaaatgtcttgttag

SEQ ID NO: 872372 - DNA, 15 bp, Homo sapiens
aaatgtcttgttagc

SEQ ID NO: 872373 - DNA, 15 bp, Homo sapiens
aatgtcttgttagcc

SEQ ID NO: 872374 - DNA, 15 bp, Homo sapiens
atgtcttgttagccc

SEQ ID NO: 872375 - DNA, 15 bp, Homo sapiens
tgtcttgttagcccc

SEQ ID NO: 872376 - DNA, 15 bp, Homo sapiens
gtcttgttagcccca

SEQ ID NO: 872377 - DNA, 15 bp, Homo sapiens
tcttgttagccccat

SEQ ID NO: 872378 - DNA, 15 bp, Homo sapiens
cttgttagccccatc

SEQ ID NO: 872379 - DNA, 15 bp, Homo sapiens
ttgttagccccatca

SEQ ID NO: 872380 - DNA, 15 bp, Homo sapiens
tgttagccccatcat

SEQ ID NO: 872381 - DNA, 15 bp, Homo sapiens
gttagccccatcatg

SEQ ID NO: 872382 - DNA, 15 bp, Homo sapiens
ttagccccatcatgg

SEQ ID NO: 872383 - DNA, 15 bp, Homo sapiens
tagccccatcatggt

SEQ ID NO: 872384 - DNA, 15 bp, Homo sapiens
agccccatcatggtg

SEQ ID NO: 872385 - DNA, 15 bp, Homo sapiens
gccccatcatggtgc

SEQ ID NO: 872386 - DNA, 15 bp, Homo sapiens
ccccatcatggtgcc

SEQ ID NO: 872387 - DNA, 15 bp, Homo sapiens
cccatcatggtgcct

SEQ ID NO: 872388 - DNA, 15 bp, Homo sapiens
ccatcatggtgcctt

SEQ ID NO: 872389 - DNA, 15 bp, Homo sapiens
catcatggtgcctta

SEQ ID NO: 872390 - DNA, 15 bp, Homo sapiens
atcatggtgccttac

SEQ ID NO: 872391 - DNA, 15 bp, Homo sapiens
tcatggtgccttaca

SEQ ID NO: 872392 - DNA, 15 bp, Homo sapiens
catggtgccttacat

SEQ ID NO: 872393 - DNA, 15 bp, Homo sapiens
atggtgccttacata

SEQ ID NO: 872394 - DNA, 15 bp, Homo sapiens
tggtgccttacataa

SEQ ID NO: 872395 - DNA, 15 bp, Homo sapiens
ggtgccttacataat

SEQ ID NO: 872396 - DNA, 15 bp, Homo sapiens
gtgccttacataata

SEQ ID NO: 872397 - DNA, 15 bp, Homo sapiens
tgccttacataatag

SEQ ID NO: 872398 - DNA, 15 bp, Homo sapiens
gccttacataataga

SEQ ID NO: 872399 - DNA, 15 bp, Homo sapiens
ccttacataatagat

SEQ ID NO: 872400 - DNA, 15 bp, Homo sapiens
cttacataatagatg

SEQ ID NO: 872401 - DNA, 15 bp, Homo sapiens
ttacataatagatgc

SEQ ID NO: 872402 - DNA, 15 bp, Homo sapiens
tacataatagatgct

SEQ ID NO: 872403 - DNA, 15 bp, Homo sapiens
atagatgctcaataa

SEQ ID NO: 872404 - DNA, 15 bp, Homo sapiens
tagatgctcaataaa

SEQ ID NO: 872405 - DNA, 15 bp, Homo sapiens
agatgctcaataaag

SEQ ID NO: 872406 - DNA, 15 bp, Homo sapiens
gatgctcaataaagt

SEQ ID NO: 872407 - DNA, 15 bp, Homo sapiens
atgctcaataaagtc

SEQ ID NO: 872408 - DNA, 15 bp, Homo sapiens
tgctcaataaagtca

SEQ ID NO: 872409 - DNA, 15 bp, Homo sapiens
gctcaataaagtcag

SEQ ID NO: 872410 - DNA, 15 bp, Homo sapiens
ctcaataaagtcagt

SEQ ID NO: 872411 - DNA, 15 bp, Homo sapiens
tcaataaagtcagta

SEQ ID NO: 872412 - DNA, 15 bp, Homo sapiens
caataaagtcagtat

SEQ ID NO: 872413 - DNA, 15 bp, Homo sapiens
aataaagtcagtatt

SEQ ID NO: 872414 - DNA, 15 bp, Homo sapiens
ataaagtcagtattt

SEQ ID NO: 872415 - DNA, 15 bp, Homo sapiens
taaagtcagtatttg

SEQ ID NO: 872416 - DNA, 15 bp, Homo sapiens
aaagtcagtatttgc

SEQ ID NO: 872417 - DNA, 15 bp, Homo sapiens
aagtcagtatttgca

SEQ ID NO: 872418 - DNA, 15 bp, Homo sapiens
agtcagtatttgcag

SEQ ID NO: 872419 - DNA, 15 bp, Homo sapiens
gtcagtatttgcagc

SEQ ID NO: 872420 - DNA, 15 bp, Homo sapiens
tcagtatttgcagct

SEQ ID NO: 872421 - DNA, 15 bp, Homo sapiens
cagtatttgcagctc

SEQ ID NO: 872422 - DNA, 15 bp, Homo sapiens
agtatttgcagctcg

SEQ ID NO: 872423 - DNA, 15 bp, Homo sapiens
gtatttgcagctcgg

SEQ ID NO: 872424 - DNA, 15 bp, Homo sapiens
tatttgcagctcgga

SEQ ID NO: 872425 - DNA, 15 bp, Homo sapiens
atttgcagctcggat

SEQ ID NO: 872426 - DNA, 15 bp, Homo sapiens
tttgcagctcggata

SEQ ID NO: 872427 - DNA, 15 bp, Homo sapiens
ttgcagctcggataa

SEQ ID NO: 872428 - DNA, 15 bp, Homo sapiens
tgcagctcggataaa

SEQ ID NO: 872429 - DNA, 15 bp, Homo sapiens
gcagctcggataaaa

SEQ ID NO: 872430 - DNA, 15 bp, Homo sapiens
cagctcggataaaag

SEQ ID NO: 872431 - DNA, 15 bp, Homo sapiens
agctcggataaaagg

SEQ ID NO: 872432 - DNA, 15 bp, Homo sapiens
gctcggataaaaggt

SEQ ID NO: 872433 - DNA, 15 bp, Homo sapiens
ctcggataaaaggtc

SEQ ID NO: 872434 - DNA, 15 bp, Homo sapiens
tcggataaaaggtct

SEQ ID NO: 872435 - DNA, 15 bp, Homo sapiens
cggataaaaggtctg

SEQ ID NO: 872436 - DNA, 15 bp, Homo sapiens
ggataaaaggtctgt

SEQ ID NO: 872437 - DNA, 15 bp, Homo sapiens
gataaaaggtctgtg

SEQ ID NO: 872438 - DNA, 15 bp, Homo sapiens
ataaaaggtctgtgg

SEQ ID NO: 872439 - DNA, 15 bp, Homo sapiens
taaaaggtctgtgga

SEQ ID NO: 872440 - DNA, 15 bp, Homo sapiens
aaaaggtctgtggag

SEQ ID NO: 872441 - DNA, 15 bp, Homo sapiens
aaaggtctgtggagg

SEQ ID NO: 872442 - DNA, 15 bp, Homo sapiens
aaggtctgtggaggg

SEQ ID NO: 872443 - DNA, 15 bp, Homo sapiens
aggtctgtggaggga

SEQ ID NO: 872444 - DNA, 15 bp, Homo sapiens
ggtctgtggagggat

SEQ ID NO: 872445 - DNA, 15 bp, Homo sapiens
gtctgtggagggatg

SEQ ID NO: 872446 - DNA, 15 bp, Homo sapiens
tctgtggagggatga

SEQ ID NO: 872447 - DNA, 15 bp, Homo sapiens
ctgtggagggatgag

SEQ ID NO: 872448 - DNA, 15 bp, Homo sapiens
tgtggagggatgaga

SEQ ID NO: 872449 - DNA, 15 bp, Homo sapiens
gtggagggatgagaa

SEQ ID NO: 872450 - DNA, 15 bp, Homo sapiens
tggagggatgagaaa

SEQ ID NO: 872451 - DNA, 15 bp, Homo sapiens
ggagggatgagaaat

SEQ ID NO: 872452 - DNA, 15 bp, Homo sapiens
gagggatgagaaatt

SEQ ID NO: 872453 - DNA, 15 bp, Homo sapiens
agggatgagaaattc

SEQ ID NO: 872454 - DNA, 15 bp, Homo sapiens
gggatgagaaattca

SEQ ID NO: 872455 - DNA, 15 bp, Homo sapiens
ggatgagaaattcac

SEQ ID NO: 872456 - DNA, 15 bp, Homo sapiens
gatgagaaattcacc

SEQ ID NO: 872457 - DNA, 15 bp, Homo sapiens
atgagaaattcacct

SEQ ID NO: 872458 - DNA, 15 bp, Homo sapiens
tgagaaattcacctc

SEQ ID NO: 872459 - DNA, 15 bp, Homo sapiens
gagaaattcacctcc

SEQ ID NO: 872460 - DNA, 15 bp, Homo sapiens
agaaattcacctcct

SEQ ID NO: 872461 - DNA, 15 bp, Homo sapiens
gaaattcacctcctt

SEQ ID NO: 872462 - DNA, 15 bp, Homo sapiens
aaattcacctccttt

SEQ ID NO: 872463 - DNA, 15 bp, Homo sapiens
aattcacctcctttt

SEQ ID NO: 872464 - DNA, 15 bp, Homo sapiens
attcacctcctttta

SEQ ID NO: 872465 - DNA, 15 bp, Homo sapiens
ttcacctccttttaa

SEQ ID NO: 872466 - DNA, 15 bp, Homo sapiens
tcacctccttttaat

SEQ ID NO: 872467 - DNA, 15 bp, Homo sapiens
cacctccttttaatc

SEQ ID NO: 872468 - DNA, 15 bp, Homo sapiens
acctccttttaatca

SEQ ID NO: 872469 - DNA, 15 bp, Homo sapiens
cctccttttaatcaa

SEQ ID NO: 872470 - DNA, 15 bp, Homo sapiens
ctccttttaatcaag

SEQ ID NO: 872471 - DNA, 15 bp, Homo sapiens
tccttttaatcaagc

SEQ ID NO: 872472 - DNA, 15 bp, Homo sapiens
ccttttaatcaagcc

SEQ ID NO: 872473 - DNA, 15 bp, Homo sapiens
cttttaatcaagcct

SEQ ID NO: 872474 - DNA, 15 bp, Homo sapiens
ttttaatcaagcctc

SEQ ID NO: 872475 - DNA, 15 bp, Homo sapiens
tttaatcaagcctct

SEQ ID NO: 872476 - DNA, 15 bp, Homo sapiens
ttaatcaagcctctc

SEQ ID NO: 872477 - DNA, 15 bp, Homo sapiens
taatcaagcctctca

SEQ ID NO: 872478 - DNA, 15 bp, Homo sapiens
aatcaagcctctcat

SEQ ID NO: 872479 - DNA, 15 bp, Homo sapiens
atcaagcctctcatc

SEQ ID NO: 872480 - DNA, 15 bp, Homo sapiens
tcaagcctctcatct

SEQ ID NO: 872481 - DNA, 15 bp, Homo sapiens
caagcctctcatctc

SEQ ID NO: 872482 - DNA, 15 bp, Homo sapiens
aagcctctcatctcc

SEQ ID NO: 872483 - DNA, 15 bp, Homo sapiens
agcctctcatctccc

SEQ ID NO: 872484 - DNA, 15 bp, Homo sapiens
gcctctcatctccca

SEQ ID NO: 872485 - DNA, 15 bp, Homo sapiens
cctctcatctcccag

SEQ ID NO: 872486 - DNA, 15 bp, Homo sapiens
ctctcatctcccagg

SEQ ID NO: 872487 - DNA, 15 bp, Homo sapiens
tctcatctcccaggg

SEQ ID NO: 872488 - DNA, 15 bp, Homo sapiens
ctcatctcccaggga

SEQ ID NO: 872489 - DNA, 15 bp, Homo sapiens
tcatctcccagggag

SEQ ID NO: 872490 - DNA, 15 bp, Homo sapiens
catctcccagggaga

SEQ ID NO: 872491 - DNA, 15 bp, Homo sapiens
atctcccagggagac

SEQ ID NO: 872492 - DNA, 15 bp, Homo sapiens
tctcccagggagacc

SEQ ID NO: 872493 - DNA, 15 bp, Homo sapiens
ctcccagggagacca

SEQ ID NO: 872494 - DNA, 15 bp, Homo sapiens
tcccagggagaccac

SEQ ID NO: 872495 - DNA, 15 bp, Homo sapiens
cccagggagaccact

SEQ ID NO: 872496 - DNA, 15 bp, Homo sapiens
ccagggagaccactg

SEQ ID NO: 872497 - DNA, 15 bp, Homo sapiens
cagggagaccactgt

SEQ ID NO: 872498 - DNA, 15 bp, Homo sapiens
agggagaccactgta

SEQ ID NO: 872499 - DNA, 15 bp, Homo sapiens
gggagaccactgtag

SEQ ID NO: 872500 - DNA, 15 bp, Homo sapiens
ggagaccactgtagg

SEQ ID NO: 872501 - DNA, 15 bp, Homo sapiens
gagaccactgtagga

SEQ ID NO: 872502 - DNA, 15 bp, Homo sapiens
agaccactgtaggat

SEQ ID NO: 872503 - DNA, 15 bp, Homo sapiens
gaccactgtaggatg

SEQ ID NO: 872504 - DNA, 15 bp, Homo sapiens
accactgtaggatgc

SEQ ID NO: 872505 - DNA, 15 bp, Homo sapiens
ccactgtaggatgcc

SEQ ID NO: 872506 - DNA, 15 bp, Homo sapiens
cactgtaggatgccc

SEQ ID NO: 872507 - DNA, 15 bp, Homo sapiens
actgtaggatgccct

SEQ ID NO: 872508 - DNA, 15 bp, Homo sapiens
ctgtaggatgccctt

SEQ ID NO: 872509 - DNA, 15 bp, Homo sapiens
tgtaggatgccctta

SEQ ID NO: 872510 - DNA, 15 bp, Homo sapiens
gtaggatgcccttaa

SEQ ID NO: 872511 - DNA, 15 bp, Homo sapiens
taggatgcccttaat

SEQ ID NO: 872512 - DNA, 15 bp, Homo sapiens
aggatgcccttaatt

SEQ ID NO: 872513 - DNA, 15 bp, Homo sapiens
ggatgcccttaattt

SEQ ID NO: 872514 - DNA, 15 bp, Homo sapiens
gatgcccttaatttg

SEQ ID NO: 872515 - DNA, 15 bp, Homo sapiens
atgcccttaatttgg

SEQ ID NO: 872516 - DNA, 15 bp, Homo sapiens
tgcccttaatttgga

SEQ ID NO: 872517 - DNA, 15 bp, Homo sapiens
gcccttaatttggat

SEQ ID NO: 872518 - DNA, 15 bp, Homo sapiens
cccttaatttggatg

SEQ ID NO: 872519 - DNA, 15 bp, Homo sapiens
ccttaatttggatgg

SEQ ID NO: 872520 - DNA, 15 bp, Homo sapiens
cttaatttggatggg

SEQ ID NO: 872521 - DNA, 15 bp, Homo sapiens
ttaatttggatggga

SEQ ID NO: 872522 - DNA, 15 bp, Homo sapiens
taatttggatgggat

SEQ ID NO: 872523 - DNA, 15 bp, Homo sapiens
aatttggatgggatg

SEQ ID NO: 872524 - DNA, 15 bp, Homo sapiens
atttggatgggatgc

SEQ ID NO: 872525 - DNA, 15 bp, Homo sapiens
tttggatgggatgct

SEQ ID NO: 872526 - DNA, 15 bp, Homo sapiens
ttggatgggatgctc

SEQ ID NO: 872527 - DNA, 15 bp, Homo sapiens
tggatgggatgctca

SEQ ID NO: 872528 - DNA, 15 bp, Homo sapiens
ggatgggatgctcat

SEQ ID NO: 872529 - DNA, 15 bp, Homo sapiens
gatgggatgctcata

SEQ ID NO: 872530 - DNA, 15 bp, Homo sapiens
atgggatgctcataa

SEQ ID NO: 872531 - DNA, 15 bp, Homo sapiens
tgggatgctcataat

SEQ ID NO: 872532 - DNA, 15 bp, Homo sapiens
gggatgctcataatg

SEQ ID NO: 872533 - DNA, 15 bp, Homo sapiens
ggatgctcataatga

SEQ ID NO: 872534 - DNA, 15 bp, Homo sapiens
gatgctcataatgac

SEQ ID NO: 872535 - DNA, 15 bp, Homo sapiens
atgctcataatgaca

SEQ ID NO: 872536 - DNA, 15 bp, Homo sapiens
tgctcataatgacag

SEQ ID NO: 872537 - DNA, 15 bp, Homo sapiens
gctcataatgacaga

SEQ ID NO: 872538 - DNA, 15 bp, Homo sapiens
ctcataatgacagaa

SEQ ID NO: 872539 - DNA, 15 bp, Homo sapiens
tcataatgacagaaa

SEQ ID NO: 872540 - DNA, 15 bp, Homo sapiens
cataatgacagaaaa

SEQ ID NO: 872541 - DNA, 15 bp, Homo sapiens
ataatgacagaaaag

SEQ ID NO: 872542 - DNA, 15 bp, Homo sapiens
taatgacagaaaagg

SEQ ID NO: 872543 - DNA, 15 bp, Homo sapiens
aatgacagaaaaggc

SEQ ID NO: 872544 - DNA, 15 bp, Homo sapiens
atgacagaaaaggcc

SEQ ID NO: 872545 - DNA, 15 bp, Homo sapiens
tgacagaaaaggcct

SEQ ID NO: 872546 - DNA, 15 bp, Homo sapiens
gacagaaaaggcctt

SEQ ID NO: 872547 - DNA, 15 bp, Homo sapiens
acagaaaaggcctta

SEQ ID NO: 872548 - DNA, 15 bp, Homo sapiens
cagaaaaggccttat

SEQ ID NO: 872549 - DNA, 15 bp, Homo sapiens
agaaaaggccttatc

SEQ ID NO: 872550 - DNA, 15 bp, Homo sapiens
gaaaaggccttatcg

SEQ ID NO: 872551 - DNA, 15 bp, Homo sapiens
aaaaggccttatcgt

SEQ ID NO: 872552 - DNA, 15 bp, Homo sapiens
aaaggccttatcgtg

SEQ ID NO: 872553 - DNA, 15 bp, Homo sapiens
aaggccttatcgtgt

SEQ ID NO: 872554 - DNA, 15 bp, Homo sapiens
aggccttatcgtgtg

SEQ ID NO: 872555 - DNA, 15 bp, Homo sapiens
ggccttatcgtgtga

SEQ ID NO: 872556 - DNA, 15 bp, Homo sapiens
gccttatcgtgtgat

SEQ ID NO: 872557 - DNA, 15 bp, Homo sapiens
ccttatcgtgtgata

SEQ ID NO: 872558 - DNA, 15 bp, Homo sapiens
cttatcgtgtgataa

SEQ ID NO: 872559 - DNA, 15 bp, Homo sapiens
ttatcgtgtgataag

SEQ ID NO: 872560 - DNA, 15 bp, Homo sapiens
tatcgtgtgataaga

SEQ ID NO: 872561 - DNA, 15 bp, Homo sapiens
atcgtgtgataagac

SEQ ID NO: 872562 - DNA, 15 bp, Homo sapiens
tcgtgtgataagaca

SEQ ID NO: 872563 - DNA, 15 bp, Homo sapiens
cgtgtgataagacat

SEQ ID NO: 872564 - DNA, 15 bp, Homo sapiens
gtgtgataagacatg

SEQ ID NO: 872565 - DNA, 15 bp, Homo sapiens
tgtgataagacatga

SEQ ID NO: 872566 - DNA, 15 bp, Homo sapiens
gtgataagacatgag

SEQ ID NO: 872567 - DNA, 15 bp, Homo sapiens
tgataagacatgagg

SEQ ID NO: 872568 - DNA, 15 bp, Homo sapiens
gataagacatgaggt

SEQ ID NO: 872569 - DNA, 15 bp, Homo sapiens
ataagacatgaggtc

SEQ ID NO: 872570 - DNA, 15 bp, Homo sapiens
taagacatgaggtct

SEQ ID NO: 872571 - DNA, 15 bp, Homo sapiens
aagacatgaggtctc

SEQ ID NO: 872572 - DNA, 15 bp, Homo sapiens
agacatgaggtctcg

SEQ ID NO: 872573 - DNA, 15 bp, Homo sapiens
gacatgaggtctcga

SEQ ID NO: 872574 - DNA, 15 bp, Homo sapiens
acatgaggtctcgaa

SEQ ID NO: 872575 - DNA, 15 bp, Homo sapiens
catgaggtctcgaaa

SEQ ID NO: 872576 - DNA, 15 bp, Homo sapiens
atgaggtctcgaaaa

SEQ ID NO: 872577 - DNA, 15 bp, Homo sapiens
tgaggtctcgaaaat

SEQ ID NO: 872578 - DNA, 15 bp, Homo sapiens
gaggtctcgaaaatc

SEQ ID NO: 872579 - DNA, 15 bp, Homo sapiens
aggtctcgaaaatca

SEQ ID NO: 872580 - DNA, 15 bp, Homo sapiens
ggtctcgaaaatcaa

SEQ ID NO: 872581 - DNA, 15 bp, Homo sapiens
gtctcgaaaatcaag

SEQ ID NO: 872582 - DNA, 15 bp, Homo sapiens
tctcgaaaatcaagc

SEQ ID NO: 872583 - DNA, 15 bp, Homo sapiens
ctcgaaaatcaagca

SEQ ID NO: 872584 - DNA, 15 bp, Homo sapiens
tcgaaaatcaagcag

SEQ ID NO: 872585 - DNA, 15 bp, Homo sapiens
cgaaaatcaagcaga

SEQ ID NO: 872586 - DNA, 15 bp, Homo sapiens
gaaaatcaagcagag

SEQ ID NO: 872587 - DNA, 15 bp, Homo sapiens
aaaatcaagcagaga

SEQ ID NO: 872588 - DNA, 15 bp, Homo sapiens
aaatcaagcagagaa

SEQ ID NO: 872589 - DNA, 15 bp, Homo sapiens
aatcaagcagagaaa

SEQ ID NO: 872590 - DNA, 15 bp, Homo sapiens
atcaagcagagaaaa

SEQ ID NO: 872591 - DNA, 15 bp, Homo sapiens
tcaagcagagaaaag

SEQ ID NO: 872592 - DNA, 15 bp, Homo sapiens
caagcagagaaaaga

SEQ ID NO: 872593 - DNA, 15 bp, Homo sapiens
aagcagagaaaagaa

SEQ ID NO: 872594 - DNA, 15 bp, Homo sapiens
agcagagaaaagaat

SEQ ID NO: 872595 - DNA, 15 bp, Homo sapiens
gcagagaaaagaatg

SEQ ID NO: 872596 - DNA, 15 bp, Homo sapiens
cagagaaaagaatgc

SEQ ID NO: 872597 - DNA, 15 bp, Homo sapiens
agagaaaagaatgca

SEQ ID NO: 872598 - DNA, 15 bp, Homo sapiens
gagaaaagaatgcaa

SEQ ID NO: 872599 - DNA, 15 bp, Homo sapiens
agaaaagaatgcaat

SEQ ID NO: 872600 - DNA, 15 bp, Homo sapiens
gaaaagaatgcaatt

SEQ ID NO: 872601 - DNA, 15 bp, Homo sapiens
aaaagaatgcaattt

SEQ ID NO: 872602 - DNA, 15 bp, Homo sapiens
aaagaatgcaatttt

SEQ ID NO: 872603 - DNA, 15 bp, Homo sapiens
aagaatgcaattttc

SEQ ID NO: 872604 - DNA, 15 bp, Homo sapiens
agaatgcaattttct

SEQ ID NO: 872605 - DNA, 15 bp, Homo sapiens
gaatgcaattttcta

SEQ ID NO: 872606 - DNA, 15 bp, Homo sapiens
aatgcaattttctag

SEQ ID NO: 872607 - DNA, 15 bp, Homo sapiens
atgcaattttctagc

SEQ ID NO: 872608 - DNA, 15 bp, Homo sapiens
tgcaattttctagcc

SEQ ID NO: 872609 - DNA, 15 bp, Homo sapiens
gcaattttctagcca

SEQ ID NO: 872610 - DNA, 15 bp, Homo sapiens
caattttctagccat

SEQ ID NO: 872611 - DNA, 15 bp, Homo sapiens
aattttctagccatt

SEQ ID NO: 872612 - DNA, 15 bp, Homo sapiens
attttctagccattt

SEQ ID NO: 872613 - DNA, 15 bp, Homo sapiens
ttttctagccatttt

SEQ ID NO: 872614 - DNA, 15 bp, Homo sapiens
tttctagccattttg

SEQ ID NO: 872615 - DNA, 15 bp, Homo sapiens
ttctagccattttgt

SEQ ID NO: 872616 - DNA, 15 bp, Homo sapiens
tctagccattttgta

SEQ ID NO: 872617 - DNA, 15 bp, Homo sapiens
ctagccattttgtaa

SEQ ID NO: 872618 - DNA, 15 bp, Homo sapiens
tagccattttgtaac

SEQ ID NO: 872619 - DNA, 15 bp, Homo sapiens
agccattttgtaact

SEQ ID NO: 872620 - DNA, 15 bp, Homo sapiens
gccattttgtaactt

SEQ ID NO: 872621 - DNA, 15 bp, Homo sapiens
ccattttgtaacttt

SEQ ID NO: 872622 - DNA, 15 bp, Homo sapiens
cattttgtaactttc

SEQ ID NO: 872623 - DNA, 15 bp, Homo sapiens
attttgtaactttcc

SEQ ID NO: 872624 - DNA, 15 bp, Homo sapiens
ttttgtaactttcct

SEQ ID NO: 872625 - DNA, 15 bp, Homo sapiens
tttgtaactttcctt

SEQ ID NO: 872626 - DNA, 15 bp, Homo sapiens
ttgtaactttccttt

SEQ ID NO: 872627 - DNA, 15 bp, Homo sapiens
tgtaactttcctttt

SEQ ID NO: 872628 - DNA, 15 bp, Homo sapiens
gtaactttccttttt

SEQ ID NO: 872629 - DNA, 15 bp, Homo sapiens
taactttcctttttc

SEQ ID NO: 872630 - DNA, 15 bp, Homo sapiens
aactttcctttttca

SEQ ID NO: 872631 - DNA, 15 bp, Homo sapiens
actttcctttttcat

SEQ ID NO: 872632 - DNA, 15 bp, Homo sapiens
ctttcctttttcata

SEQ ID NO: 872633 - DNA, 15 bp, Homo sapiens
tttcctttttcataa

SEQ ID NO: 872634 - DNA, 15 bp, Homo sapiens
ttcctttttcataac

SEQ ID NO: 872635 - DNA, 15 bp, Homo sapiens
tcctttttcataaca

SEQ ID NO: 872636 - DNA, 15 bp, Homo sapiens
cctttttcataacat

SEQ ID NO: 872637 - DNA, 15 bp, Homo sapiens
ctttttcataacatt

SEQ ID NO: 872638 - DNA, 15 bp, Homo sapiens
tttttcataacattt

SEQ ID NO: 872639 - DNA, 15 bp, Homo sapiens
ttttcataacatttt

SEQ ID NO: 872640 - DNA, 15 bp, Homo sapiens
tttcataacattttt

SEQ ID NO: 872641 - DNA, 15 bp, Homo sapiens
ttcataacatttttg

SEQ ID NO: 872642 - DNA, 15 bp, Homo sapiens
tcataacatttttgt

SEQ ID NO: 872643 - DNA, 15 bp, Homo sapiens
cataacatttttgtg

SEQ ID NO: 872644 - DNA, 15 bp, Homo sapiens
ataacatttttgtgt

SEQ ID NO: 872645 - DNA, 15 bp, Homo sapiens
taacatttttgtgtg

SEQ ID NO: 872646 - DNA, 15 bp, Homo sapiens
aacatttttgtgtgt

SEQ ID NO: 872647 - DNA, 15 bp, Homo sapiens
acatttttgtgtgtt

SEQ ID NO: 872648 - DNA, 15 bp, Homo sapiens
catttttgtgtgttt

SEQ ID NO: 872649 - DNA, 15 bp, Homo sapiens
atttttgtgtgtttg

SEQ ID NO: 872650 - DNA, 15 bp, Homo sapiens
tttttgtgtgtttgg

SEQ ID NO: 872651 - DNA, 15 bp, Homo sapiens
ttttgtgtgtttggc

SEQ ID NO: 872652 - DNA, 15 bp, Homo sapiens
tttgtgtgtttggct

SEQ ID NO: 872653 - DNA, 15 bp, Homo sapiens
ttgtgtgtttggctg

SEQ ID NO: 872654 - DNA, 15 bp, Homo sapiens
tgtgtgtttggctgg

SEQ ID NO: 872655 - DNA, 15 bp, Homo sapiens
gtgtgtttggctggt

SEQ ID NO: 872656 - DNA, 15 bp, Homo sapiens
tgtgtttggctggtt

SEQ ID NO: 872657 - DNA, 15 bp, Homo sapiens
gtgtttggctggttt

SEQ ID NO: 872658 - DNA, 15 bp, Homo sapiens
tgtttggctggtttt

SEQ ID NO: 872659 - DNA, 15 bp, Homo sapiens
gtttggctggttttt

SEQ ID NO: 872660 - DNA, 15 bp, Homo sapiens
tttggctggtttttt

SEQ ID NO: 872661 - DNA, 15 bp, Homo sapiens
ttggctggttttttg

SEQ ID NO: 872662 - DNA, 15 bp, Homo sapiens
tggctggttttttgt

SEQ ID NO: 872663 - DNA, 15 bp, Homo sapiens
ggctggttttttgta

SEQ ID NO: 872664 - DNA, 15 bp, Homo sapiens
gctggttttttgtac

SEQ ID NO: 872665 - DNA, 15 bp, Homo sapiens
ctggttttttgtact

SEQ ID NO: 872666 - DNA, 15 bp, Homo sapiens
tggttttttgtactt

SEQ ID NO: 872667 - DNA, 15 bp, Homo sapiens
ggttttttgtacttt

SEQ ID NO: 872668 - DNA, 15 bp, Homo sapiens
gttttttgtactttc

SEQ ID NO: 872669 - DNA, 15 bp, Homo sapiens
ttttttgtactttca

SEQ ID NO: 872670 - DNA, 15 bp, Homo sapiens
tttttgtactttcat

SEQ ID NO: 872671 - DNA, 15 bp, Homo sapiens
ttttgtactttcatg

SEQ ID NO: 872672 - DNA, 15 bp, Homo sapiens
tttgtactttcatgt

SEQ ID NO: 872673 - DNA, 15 bp, Homo sapiens
ttgtactttcatgta

SEQ ID NO: 872674 - DNA, 15 bp, Homo sapiens
tgtactttcatgtaa

SEQ ID NO: 872675 - DNA, 15 bp, Homo sapiens
gtactttcatgtaaa

SEQ ID NO: 872676 - DNA, 15 bp, Homo sapiens
tactttcatgtaaat

SEQ ID NO: 872677 - DNA, 15 bp, Homo sapiens
actttcatgtaaatt

SEQ ID NO: 872678 - DNA, 15 bp, Homo sapiens
ctttcatgtaaattt

SEQ ID NO: 872679 - DNA, 15 bp, Homo sapiens
tttcatgtaaatttc

SEQ ID NO: 872680 - DNA, 15 bp, Homo sapiens
ttcatgtaaatttct

SEQ ID NO: 872681 - DNA, 15 bp, Homo sapiens
tcatgtaaatttctg

SEQ ID NO: 872682 - DNA, 15 bp, Homo sapiens
catgtaaatttctga

SEQ ID NO: 872683 - DNA, 15 bp, Homo sapiens
atgtaaatttctgaa

SEQ ID NO: 872684 - DNA, 15 bp, Homo sapiens
tgtaaatttctgaag

SEQ ID NO: 872685 - DNA, 15 bp, Homo sapiens
gtaaatttctgaagt

SEQ ID NO: 872686 - DNA, 15 bp, Homo sapiens
taaatttctgaagtc

SEQ ID NO: 872687 - DNA, 15 bp, Homo sapiens
aaatttctgaagtcc

SEQ ID NO: 872688 - DNA, 15 bp, Homo sapiens
aatttctgaagtcca

SEQ ID NO: 872689 - DNA, 15 bp, Homo sapiens
atttctgaagtccag

SEQ ID NO: 872690 - DNA, 15 bp, Homo sapiens
tttctgaagtccagc

SEQ ID NO: 872691 - DNA, 15 bp, Homo sapiens
ttctgaagtccagcg

SEQ ID NO: 872692 - DNA, 15 bp, Homo sapiens
tctgaagtccagcgt

SEQ ID NO: 872693 - DNA, 15 bp, Homo sapiens
ctgaagtccagcgtt

SEQ ID NO: 872694 - DNA, 15 bp, Homo sapiens
tgaagtccagcgttg

SEQ ID NO: 872695 - DNA, 15 bp, Homo sapiens
gaagtccagcgttga

SEQ ID NO: 872696 - DNA, 15 bp, Homo sapiens
aagtccagcgttgaa

SEQ ID NO: 872697 - DNA, 15 bp, Homo sapiens
agtccagcgttgaac

SEQ ID NO: 872698 - DNA, 15 bp, Homo sapiens
gtccagcgttgaacc

SEQ ID NO: 872699 - DNA, 15 bp, Homo sapiens
tccagcgttgaaccc

SEQ ID NO: 872700 - DNA, 15 bp, Homo sapiens
ccagcgttgaaccca

SEQ ID NO: 872701 - DNA, 15 bp, Homo sapiens
cagcgttgaacccag

SEQ ID NO: 872702 - DNA, 15 bp, Homo sapiens
agcgttgaacccagt

SEQ ID NO: 872703 - DNA, 15 bp, Homo sapiens
gcgttgaacccagtg

SEQ ID NO: 872704 - DNA, 15 bp, Homo sapiens
cgttgaacccagtgc

SEQ ID NO: 872705 - DNA, 15 bp, Homo sapiens
gttgaacccagtgcc

SEQ ID NO: 872706 - DNA, 15 bp, Homo sapiens
ttgaacccagtgcca

SEQ ID NO: 872707 - DNA, 15 bp, Homo sapiens
tgaacccagtgccac

SEQ ID NO: 872708 - DNA, 15 bp, Homo sapiens
gaacccagtgccacc

SEQ ID NO: 872709 - DNA, 15 bp, Homo sapiens
aacccagtgccaccg

SEQ ID NO: 872710 - DNA, 15 bp, Homo sapiens
acccagtgccaccga

SEQ ID NO: 872711 - DNA, 15 bp, Homo sapiens
cccagtgccaccgaa

SEQ ID NO: 872712 - DNA, 15 bp, Homo sapiens
ccagtgccaccgaag

SEQ ID NO: 872713 - DNA, 15 bp, Homo sapiens
cagtgccaccgaagg

SEQ ID NO: 872714 - DNA, 15 bp, Homo sapiens
agtgccaccgaagga

SEQ ID NO: 872715 - DNA, 15 bp, Homo sapiens
gtgccaccgaaggaa

SEQ ID NO: 872716 - DNA, 15 bp, Homo sapiens
tgccaccgaaggaac

SEQ ID NO: 872717 - DNA, 15 bp, Homo sapiens
gccaccgaaggaact

SEQ ID NO: 872718 - DNA, 15 bp, Homo sapiens
ccaccgaaggaactg

SEQ ID NO: 872719 - DNA, 15 bp, Homo sapiens
caccgaaggaactgg

SEQ ID NO: 872720 - DNA, 15 bp, Homo sapiens
accgaaggaactggg

SEQ ID NO: 872721 - DNA, 15 bp, Homo sapiens
ccgaaggaactggga

SEQ ID NO: 872722 - DNA, 15 bp, Homo sapiens
cgaaggaactgggat

SEQ ID NO: 872723 - DNA, 15 bp, Homo sapiens
gaaggaactgggatt

SEQ ID NO: 872724 - DNA, 15 bp, Homo sapiens
aaggaactgggattt

SEQ ID NO: 872725 - DNA, 15 bp, Homo sapiens
aggaactgggatttg

SEQ ID NO: 872726 - DNA, 15 bp, Homo sapiens
ggaactgggatttgc

SEQ ID NO: 872727 - DNA, 15 bp, Homo sapiens
gaactgggatttgct

SEQ ID NO: 872728 - DNA, 15 bp, Homo sapiens
aactgggatttgctg

SEQ ID NO: 872729 - DNA, 15 bp, Homo sapiens
actgggatttgctgt

SEQ ID NO: 872730 - DNA, 15 bp, Homo sapiens
ctgggatttgctgtc

SEQ ID NO: 872731 - DNA, 15 bp, Homo sapiens
tgggatttgctgtct

SEQ ID NO: 872732 - DNA, 15 bp, Homo sapiens
gggatttgctgtctt

SEQ ID NO: 872733 - DNA, 15 bp, Homo sapiens
ggatttgctgtcttt

SEQ ID NO: 872734 - DNA, 15 bp, Homo sapiens
gatttgctgtctttg

SEQ ID NO: 872735 - DNA, 15 bp, Homo sapiens
atttgctgtctttgc

SEQ ID NO: 872736 - DNA, 15 bp, Homo sapiens
tttgctgtctttgcc

SEQ ID NO: 872737 - DNA, 15 bp, Homo sapiens
ttgctgtctttgcct

SEQ ID NO: 872738 - DNA, 15 bp, Homo sapiens
tgctgtctttgcctg

SEQ ID NO: 872739 - DNA, 15 bp, Homo sapiens
gctgtctttgcctgt

SEQ ID NO: 872740 - DNA, 15 bp, Homo sapiens
ctgtctttgcctgta

SEQ ID NO: 872741 - DNA, 15 bp, Homo sapiens
tgtctttgcctgtaa

SEQ ID NO: 872742 - DNA, 15 bp, Homo sapiens
gtctttgcctgtaag

SEQ ID NO: 872743 - DNA, 15 bp, Homo sapiens
tctttgcctgtaagg

SEQ ID NO: 872744 - DNA, 15 bp, Homo sapiens
ctttgcctgtaaggg

SEQ ID NO: 872745 - DNA, 15 bp, Homo sapiens
tttgcctgtaaggga

SEQ ID NO: 872746 - DNA, 15 bp, Homo sapiens
ttgcctgtaagggaa

SEQ ID NO: 872747 - DNA, 15 bp, Homo sapiens
tgcctgtaagggaaa

SEQ ID NO: 872748 - DNA, 15 bp, Homo sapiens
gcctgtaagggaaat

SEQ ID NO: 872749 - DNA, 15 bp, Homo sapiens
cctgtaagggaaatt

SEQ ID NO: 872750 - DNA, 15 bp, Homo sapiens
ctgtaagggaaattg

SEQ ID NO: 872751 - DNA, 15 bp, Homo sapiens
tgtaagggaaattgt

SEQ ID NO: 872752 - DNA, 15 bp, Homo sapiens
gtaagggaaattgtg

SEQ ID NO: 872753 - DNA, 15 bp, Homo sapiens
taagggaaattgtgc

SEQ ID NO: 872754 - DNA, 15 bp, Homo sapiens
aagggaaattgtgca

SEQ ID NO: 872755 - DNA, 15 bp, Homo sapiens
agggaaattgtgcac

SEQ ID NO: 872756 - DNA, 15 bp, Homo sapiens
gggaaattgtgcact

SEQ ID NO: 872757 - DNA, 15 bp, Homo sapiens
ggaaattgtgcactt

SEQ ID NO: 872758 - DNA, 15 bp, Homo sapiens
gaaattgtgcacttt

SEQ ID NO: 872759 - DNA, 15 bp, Homo sapiens
aaattgtgcacttta

SEQ ID NO: 872760 - DNA, 15 bp, Homo sapiens
aattgtgcactttaa

SEQ ID NO: 872761 - DNA, 15 bp, Homo sapiens
attgtgcactttaaa

SEQ ID NO: 872762 - DNA, 15 bp, Homo sapiens
ttgtgcactttaaaa

SEQ ID NO: 872763 - DNA, 15 bp, Homo sapiens
tgtgcactttaaaat

SEQ ID NO: 872764 - DNA, 15 bp, Homo sapiens
gtgcactttaaaata

SEQ ID NO: 872765 - DNA, 15 bp, Homo sapiens
tgcactttaaaatat

SEQ ID NO: 872766 - DNA, 15 bp, Homo sapiens
gcactttaaaatatg

SEQ ID NO: 872767 - DNA, 15 bp, Homo sapiens
cactttaaaatatga

SEQ ID NO: 872768 - DNA, 15 bp, Homo sapiens
actttaaaatatgat

SEQ ID NO: 872769 - DNA, 15 bp, Homo sapiens
ctttaaaatatgata

SEQ ID NO: 872770 - DNA, 15 bp, Homo sapiens
tttaaaatatgatat

SEQ ID NO: 872771 - DNA, 15 bp, Homo sapiens
ttaaaatatgatatc

SEQ ID NO: 872772 - DNA, 15 bp, Homo sapiens
taaaatatgatatca

SEQ ID NO: 872773 - DNA, 15 bp, Homo sapiens
aaaatatgatatcag

SEQ ID NO: 872774 - DNA, 15 bp, Homo sapiens
aaatatgatatcagc

SEQ ID NO: 872775 - DNA, 15 bp, Homo sapiens
aatatgatatcagct

SEQ ID NO: 872776 - DNA, 15 bp, Homo sapiens
atatgatatcagctt

SEQ ID NO: 872777 - DNA, 15 bp, Homo sapiens
tatgatatcagcttc

SEQ ID NO: 872778 - DNA, 15 bp, Homo sapiens
atgatatcagcttcc

SEQ ID NO: 872779 - DNA, 15 bp, Homo sapiens
tgatatcagcttcct

SEQ ID NO: 872780 - DNA, 15 bp, Homo sapiens
gatatcagcttcctc

SEQ ID NO: 872781 - DNA, 15 bp, Homo sapiens
atatcagcttcctca

SEQ ID NO: 872782 - DNA, 15 bp, Homo sapiens
tatcagcttcctcac

SEQ ID NO: 872783 - DNA, 15 bp, Homo sapiens
atcagcttcctcaca

SEQ ID NO: 872784 - DNA, 15 bp, Homo sapiens
tcagcttcctcacag

SEQ ID NO: 872785 - DNA, 15 bp, Homo sapiens
cagcttcctcacagc

SEQ ID NO: 872786 - DNA, 15 bp, Homo sapiens
agcttcctcacagca

SEQ ID NO: 872787 - DNA, 15 bp, Homo sapiens
gcttcctcacagcag

SEQ ID NO: 872788 - DNA, 15 bp, Homo sapiens
cttcctcacagcagg

SEQ ID NO: 872789 - DNA, 15 bp, Homo sapiens
ttcctcacagcaggt

SEQ ID NO: 872790 - DNA, 15 bp, Homo sapiens
tcctcacagcaggtt

SEQ ID NO: 872791 - DNA, 15 bp, Homo sapiens
cctcacagcaggttt

SEQ ID NO: 872792 - DNA, 15 bp, Homo sapiens
ctcacagcaggtttg

SEQ ID NO: 872793 - DNA, 15 bp, Homo sapiens
tcacagcaggtttgc

SEQ ID NO: 872794 - DNA, 15 bp, Homo sapiens
cacagcaggtttgct

SEQ ID NO: 872795 - DNA, 15 bp, Homo sapiens
acagcaggtttgcta

SEQ ID NO: 872796 - DNA, 15 bp, Homo sapiens
cagcaggtttgctag

SEQ ID NO: 872797 - DNA, 15 bp, Homo sapiens
agcaggtttgctaga

SEQ ID NO: 872798 - DNA, 15 bp, Homo sapiens
gcaggtttgctagaa

SEQ ID NO: 872799 - DNA, 15 bp, Homo sapiens
caggtttgctagaaa

SEQ ID NO: 872800 - DNA, 15 bp, Homo sapiens
aggtttgctagaaaa

SEQ ID NO: 872801 - DNA, 15 bp, Homo sapiens
ggtttgctagaaaag

SEQ ID NO: 872802 - DNA, 15 bp, Homo sapiens
gtttgctagaaaagg

SEQ ID NO: 872803 - DNA, 15 bp, Homo sapiens
tttgctagaaaaggg

SEQ ID NO: 872804 - DNA, 15 bp, Homo sapiens
ttgctagaaaaggga

SEQ ID NO: 872805 - DNA, 15 bp, Homo sapiens
tgctagaaaagggat

SEQ ID NO: 872806 - DNA, 15 bp, Homo sapiens
gctagaaaagggatt

SEQ ID NO: 872807 - DNA, 15 bp, Homo sapiens
ctagaaaagggattt

SEQ ID NO: 872808 - DNA, 15 bp, Homo sapiens
tagaaaagggatttg

SEQ ID NO: 872809 - DNA, 15 bp, Homo sapiens
agaaaagggatttgt

SEQ ID NO: 872810 - DNA, 15 bp, Homo sapiens
gaaaagggatttgtg

SEQ ID NO: 872811 - DNA, 15 bp, Homo sapiens
aaaagggatttgtgg

SEQ ID NO: 872812 - DNA, 15 bp, Homo sapiens
aaagggatttgtggt

SEQ ID NO: 872813 - DNA, 15 bp, Homo sapiens
aagggatttgtggtt

SEQ ID NO: 872814 - DNA, 15 bp, Homo sapiens
agggatttgtggttt

SEQ ID NO: 872815 - DNA, 15 bp, Homo sapiens
gggatttgtggtttt

SEQ ID NO: 872816 - DNA, 15 bp, Homo sapiens
ggatttgtggttttg

SEQ ID NO: 872817 - DNA, 15 bp, Homo sapiens
gatttgtggttttgc

SEQ ID NO: 872818 - DNA, 15 bp, Homo sapiens
atttgtggttttgct

SEQ ID NO: 872819 - DNA, 15 bp, Homo sapiens
tttgtggttttgctt

SEQ ID NO: 872820 - DNA, 15 bp, Homo sapiens
ttgtggttttgcttt

SEQ ID NO: 872821 - DNA, 15 bp, Homo sapiens
tgtggttttgcttta

SEQ ID NO: 872822 - DNA, 15 bp, Homo sapiens
gtggttttgctttag

SEQ ID NO: 872823 - DNA, 15 bp, Homo sapiens
tggttttgctttagg

SEQ ID NO: 872824 - DNA, 15 bp, Homo sapiens
ggttttgctttaggc

SEQ ID NO: 872825 - DNA, 15 bp, Homo sapiens
gttttgctttaggct

SEQ ID NO: 872826 - DNA, 15 bp, Homo sapiens
ttttgctttaggctg

SEQ ID NO: 872827 - DNA, 15 bp, Homo sapiens
tttgctttaggctgt

SEQ ID NO: 872828 - DNA, 15 bp, Homo sapiens
ttgctttaggctgtt

SEQ ID NO: 872829 - DNA, 15 bp, Homo sapiens
tgctttaggctgttg

SEQ ID NO: 872830 - DNA, 15 bp, Homo sapiens
gctttaggctgttgt

SEQ ID NO: 872831 - DNA, 15 bp, Homo sapiens
ctttaggctgttgtc

SEQ ID NO: 872832 - DNA, 15 bp, Homo sapiens
tttaggctgttgtct

SEQ ID NO: 872833 - DNA, 15 bp, Homo sapiens
ttaggctgttgtctt

SEQ ID NO: 872834 - DNA, 15 bp, Homo sapiens
taggctgttgtcttc

SEQ ID NO: 872835 - DNA, 15 bp, Homo sapiens
aggctgttgtcttca

SEQ ID NO: 872836 - DNA, 15 bp, Homo sapiens
ggctgttgtcttcaa

SEQ ID NO: 872837 - DNA, 15 bp, Homo sapiens
gctgttgtcttcaag

SEQ ID NO: 872838 - DNA, 15 bp, Homo sapiens
ctgttgtcttcaagg

SEQ ID NO: 872839 - DNA, 15 bp, Homo sapiens
tgttgtcttcaaggc

SEQ ID NO: 872840 - DNA, 15 bp, Homo sapiens
gttgtcttcaaggcg

SEQ ID NO: 872841 - DNA, 15 bp, Homo sapiens
ttgtcttcaaggcga

SEQ ID NO: 872842 - DNA, 15 bp, Homo sapiens
tgtcttcaaggcgag

SEQ ID NO: 872843 - DNA, 15 bp, Homo sapiens
gtcttcaaggcgagc

SEQ ID NO: 872844 - DNA, 15 bp, Homo sapiens
tcttcaaggcgagct

SEQ ID NO: 872845 - DNA, 15 bp, Homo sapiens
cttcaaggcgagctt

SEQ ID NO: 872846 - DNA, 15 bp, Homo sapiens
ttcaaggcgagcttt

SEQ ID NO: 872847 - DNA, 15 bp, Homo sapiens
tcaaggcgagctttt

SEQ ID NO: 872848 - DNA, 15 bp, Homo sapiens
caaggcgagcttttt

SEQ ID NO: 872849 - DNA, 15 bp, Homo sapiens
aaggcgagctttttc

SEQ ID NO: 872850 - DNA, 15 bp, Homo sapiens
aggcgagctttttct

SEQ ID NO: 872851 - DNA, 15 bp, Homo sapiens
ggcgagctttttctg

SEQ ID NO: 872852 - DNA, 15 bp, Homo sapiens
gcgagctttttctgt

SEQ ID NO: 872853 - DNA, 15 bp, Homo sapiens
cgagctttttctgtt

SEQ ID NO: 872854 - DNA, 15 bp, Homo sapiens
gagctttttctgttc

SEQ ID NO: 872855 - DNA, 15 bp, Homo sapiens
agctttttctgttcc

SEQ ID NO: 872856 - DNA, 15 bp, Homo sapiens
gctttttctgttcct

SEQ ID NO: 872857 - DNA, 15 bp, Homo sapiens
ctttttctgttcctg

SEQ ID NO: 872858 - DNA, 15 bp, Homo sapiens
tttttctgttcctgt

SEQ ID NO: 872859 - DNA, 15 bp, Homo sapiens
ttttctgttcctgtt

SEQ ID NO: 872860 - DNA, 15 bp, Homo sapiens
tttctgttcctgttg

SEQ ID NO: 872861 - DNA, 15 bp, Homo sapiens
ttctgttcctgttgt

SEQ ID NO: 872862 - DNA, 15 bp, Homo sapiens
tctgttcctgttgta

SEQ ID NO: 872863 - DNA, 15 bp, Homo sapiens
ctgttcctgttgtag

SEQ ID NO: 872864 - DNA, 15 bp, Homo sapiens
tgttcctgttgtagc

SEQ ID NO: 872865 - DNA, 15 bp, Homo sapiens
gttcctgttgtagca

SEQ ID NO: 872866 - DNA, 15 bp, Homo sapiens
ttcctgttgtagcag

SEQ ID NO: 872867 - DNA, 15 bp, Homo sapiens
tcctgttgtagcagg

SEQ ID NO: 872868 - DNA, 15 bp, Homo sapiens
cctgttgtagcaggg

SEQ ID NO: 872869 - DNA, 15 bp, Homo sapiens
ctgttgtagcagggc

SEQ ID NO: 872870 - DNA, 15 bp, Homo sapiens
tgttgtagcagggca

SEQ ID NO: 872871 - DNA, 15 bp, Homo sapiens
gttgtagcagggcat

SEQ ID NO: 872872 - DNA, 15 bp, Homo sapiens
ttgtagcagggcatt

SEQ ID NO: 872873 - DNA, 15 bp, Homo sapiens
tgtagcagggcattt

SEQ ID NO: 872874 - DNA, 15 bp, Homo sapiens
gtagcagggcattta

SEQ ID NO: 872875 - DNA, 15 bp, Homo sapiens
tagcagggcatttag

SEQ ID NO: 872876 - DNA, 15 bp, Homo sapiens
agcagggcatttagt

SEQ ID NO: 872877 - DNA, 15 bp, Homo sapiens
gcagggcatttagtt

SEQ ID NO: 872878 - DNA, 15 bp, Homo sapiens
cagggcatttagttc

SEQ ID NO: 872879 - DNA, 15 bp, Homo sapiens
agggcatttagttca

SEQ ID NO: 872880 - DNA, 15 bp, Homo sapiens
gggcatttagttcac

SEQ ID NO: 872881 - DNA, 15 bp, Homo sapiens
ggcatttagttcact

SEQ ID NO: 872882 - DNA, 15 bp, Homo sapiens
gcatttagttcactt

SEQ ID NO: 872883 - DNA, 15 bp, Homo sapiens
catttagttcacttc

SEQ ID NO: 872884 - DNA, 15 bp, Homo sapiens
atttagttcacttcc

SEQ ID NO: 872885 - DNA, 15 bp, Homo sapiens
tttagttcacttcct

SEQ ID NO: 872886 - DNA, 15 bp, Homo sapiens
ttagttcacttcctg

SEQ ID NO: 872887 - DNA, 15 bp, Homo sapiens
tagttcacttcctga

SEQ ID NO: 872888 - DNA, 15 bp, Homo sapiens
agttcacttcctgag

SEQ ID NO: 872889 - DNA, 15 bp, Homo sapiens
gttcacttcctgaga

SEQ ID NO: 872890 - DNA, 15 bp, Homo sapiens
ttcacttcctgagat

SEQ ID NO: 872891 - DNA, 15 bp, Homo sapiens
tcacttcctgagatt

SEQ ID NO: 872892 - DNA, 15 bp, Homo sapiens
cacttcctgagatta

SEQ ID NO: 872893 - DNA, 15 bp, Homo sapiens
acttcctgagattaa

SEQ ID NO: 872894 - DNA, 15 bp, Homo sapiens
cttcctgagattaat

SEQ ID NO: 872895 - DNA, 15 bp, Homo sapiens
ttcctgagattaatt

SEQ ID NO: 872896 - DNA, 15 bp, Homo sapiens
tcctgagattaattg

SEQ ID NO: 872897 - DNA, 15 bp, Homo sapiens
cctgagattaattga

SEQ ID NO: 872898 - DNA, 15 bp, Homo sapiens
ctgagattaattgat

SEQ ID NO: 872899 - DNA, 15 bp, Homo sapiens
tgagattaattgatg

SEQ ID NO: 872900 - DNA, 15 bp, Homo sapiens
gagattaattgatgc

SEQ ID NO: 872901 - DNA, 15 bp, Homo sapiens
agattaattgatgcc

SEQ ID NO: 872902 - DNA, 15 bp, Homo sapiens
gattaattgatgcca

SEQ ID NO: 872903 - DNA, 15 bp, Homo sapiens
attaattgatgccaa

SEQ ID NO: 872904 - DNA, 15 bp, Homo sapiens
ttaattgatgccaag

SEQ ID NO: 872905 - DNA, 15 bp, Homo sapiens
taattgatgccaagt

SEQ ID NO: 872906 - DNA, 15 bp, Homo sapiens
aattgatgccaagtg

SEQ ID NO: 872907 - DNA, 15 bp, Homo sapiens
attgatgccaagtgg

SEQ ID NO: 872908 - DNA, 15 bp, Homo sapiens
ttgatgccaagtggc

SEQ ID NO: 872909 - DNA, 15 bp, Homo sapiens
tgatgccaagtggca

SEQ ID NO: 872910 - DNA, 15 bp, Homo sapiens
gatgccaagtggcat

SEQ ID NO: 872911 - DNA, 15 bp, Homo sapiens
atgccaagtggcatt

SEQ ID NO: 872912 - DNA, 15 bp, Homo sapiens
tgccaagtggcattt

SEQ ID NO: 872913 - DNA, 15 bp, Homo sapiens
gccaagtggcatttc

SEQ ID NO: 872914 - DNA, 15 bp, Homo sapiens
ccaagtggcatttct

SEQ ID NO: 872915 - DNA, 15 bp, Homo sapiens
caagtggcatttctt

SEQ ID NO: 872916 - DNA, 15 bp, Homo sapiens
aagtggcatttcttg

SEQ ID NO: 872917 - DNA, 15 bp, Homo sapiens
agtggcatttcttgc

SEQ ID NO: 872918 - DNA, 15 bp, Homo sapiens
gtggcatttcttgct

SEQ ID NO: 872919 - DNA, 15 bp, Homo sapiens
tggcatttcttgctc

SEQ ID NO: 872920 - DNA, 15 bp, Homo sapiens
ggcatttcttgctct

SEQ ID NO: 872921 - DNA, 15 bp, Homo sapiens
gcatttcttgctctg

SEQ ID NO: 872922 - DNA, 15 bp, Homo sapiens
catttcttgctctgc

SEQ ID NO: 872923 - DNA, 15 bp, Homo sapiens
atttcttgctctgcg

SEQ ID NO: 872924 - DNA, 15 bp, Homo sapiens
tttcttgctctgcga

SEQ ID NO: 872925 - DNA, 15 bp, Homo sapiens
ttcttgctctgcgaa

SEQ ID NO: 872926 - DNA, 15 bp, Homo sapiens
tcttgctctgcgaat

SEQ ID NO: 872927 - DNA, 15 bp, Homo sapiens
cttgctctgcgaatc

SEQ ID NO: 872928 - DNA, 15 bp, Homo sapiens
ttgctctgcgaatcc

SEQ ID NO: 872929 - DNA, 15 bp, Homo sapiens
tgctctgcgaatcct

SEQ ID NO: 872930 - DNA, 15 bp, Homo sapiens
gctctgcgaatcctc

SEQ ID NO: 872931 - DNA, 15 bp, Homo sapiens
ctctgcgaatcctca

SEQ ID NO: 872932 - DNA, 15 bp, Homo sapiens
tctgcgaatcctcaa

SEQ ID NO: 872933 - DNA, 15 bp, Homo sapiens
ctgcgaatcctcaaa

SEQ ID NO: 872934 - DNA, 15 bp, Homo sapiens
tgcgaatcctcaaaa

SEQ ID NO: 872935 - DNA, 15 bp, Homo sapiens
gcgaatcctcaaaac

SEQ ID NO: 872936 - DNA, 15 bp, Homo sapiens
cgaatcctcaaaaca

SEQ ID NO: 872937 - DNA, 15 bp, Homo sapiens
gaatcctcaaaacaa

SEQ ID NO: 872938 - DNA, 15 bp, Homo sapiens
aatcctcaaaacaaa

SEQ ID NO: 872939 - DNA, 15 bp, Homo sapiens
atcctcaaaacaaag

SEQ ID NO: 872940 - DNA, 15 bp, Homo sapiens
tcctcaaaacaaaga

SEQ ID NO: 872941 - DNA, 15 bp, Homo sapiens
cctcaaaacaaagat

SEQ ID NO: 872942 - DNA, 15 bp, Homo sapiens
ctcaaaacaaagatc

SEQ ID NO: 872943 - DNA, 15 bp, Homo sapiens
tcaaaacaaagatct

SEQ ID NO: 872944 - DNA, 15 bp, Homo sapiens
caaaacaaagatctt

SEQ ID NO: 872945 - DNA, 15 bp, Homo sapiens
aaaacaaagatcttt

SEQ ID NO: 872946 - DNA, 15 bp, Homo sapiens
aaacaaagatctttt

SEQ ID NO: 872947 - DNA, 15 bp, Homo sapiens
aacaaagatcttttg

SEQ ID NO: 872948 - DNA, 15 bp, Homo sapiens
acaaagatcttttgc

SEQ ID NO: 872949 - DNA, 15 bp, Homo sapiens
caaagatcttttgca

SEQ ID NO: 872950 - DNA, 15 bp, Homo sapiens
aaagatcttttgcag

SEQ ID NO: 872951 - DNA, 15 bp, Homo sapiens
aagatcttttgcagg

SEQ ID NO: 872952 - DNA, 15 bp, Homo sapiens
agatcttttgcaggc

SEQ ID NO: 872953 - DNA, 15 bp, Homo sapiens
gatcttttgcaggca

SEQ ID NO: 872954 - DNA, 15 bp, Homo sapiens
atcttttgcaggcac

SEQ ID NO: 872955 - DNA, 15 bp, Homo sapiens
tcttttgcaggcaca

SEQ ID NO: 872956 - DNA, 15 bp, Homo sapiens
cttttgcaggcacac

SEQ ID NO: 872957 - DNA, 15 bp, Homo sapiens
ttttgcaggcacacc

SEQ ID NO: 872958 - DNA, 15 bp, Homo sapiens
tttgcaggcacacct

SEQ ID NO: 872959 - DNA, 15 bp, Homo sapiens
ttgcaggcacacctc

SEQ ID NO: 872960 - DNA, 15 bp, Homo sapiens
tgcaggcacacctca

SEQ ID NO: 872961 - DNA, 15 bp, Homo sapiens
gcaggcacacctcag

SEQ ID NO: 872962 - DNA, 15 bp, Homo sapiens
caggcacacctcaga

SEQ ID NO: 872963 - DNA, 15 bp, Homo sapiens
aggcacacctcagag

SEQ ID NO: 872964 - DNA, 15 bp, Homo sapiens
ggcacacctcagaga

SEQ ID NO: 872965 - DNA, 15 bp, Homo sapiens
gcacacctcagagat

SEQ ID NO: 872966 - DNA, 15 bp, Homo sapiens
cacacctcagagata

SEQ ID NO: 872967 - DNA, 15 bp, Homo sapiens
acacctcagagatat

SEQ ID NO: 872968 - DNA, 15 bp, Homo sapiens
cacctcagagatatt

SEQ ID NO: 872969 - DNA, 15 bp, Homo sapiens
acctcagagatattg

SEQ ID NO: 872970 - DNA, 15 bp, Homo sapiens
cctcagagatattgc

SEQ ID NO: 872971 - DNA, 15 bp, Homo sapiens
ctcagagatattgca

SEQ ID NO: 872972 - DNA, 15 bp, Homo sapiens
tcagagatattgcag

SEQ ID NO: 872973 - DNA, 15 bp, Homo sapiens
cagagatattgcagg

SEQ ID NO: 872974 - DNA, 15 bp, Homo sapiens
agagatattgcaggc

SEQ ID NO: 872975 - DNA, 15 bp, Homo sapiens
gagatattgcaggct

SEQ ID NO: 872976 - DNA, 15 bp, Homo sapiens
agatattgcaggctc

SEQ ID NO: 872977 - DNA, 15 bp, Homo sapiens
gatattgcaggctca

SEQ ID NO: 872978 - DNA, 15 bp, Homo sapiens
atattgcaggctcag

SEQ ID NO: 872979 - DNA, 15 bp, Homo sapiens
tattgcaggctcagt

SEQ ID NO: 872980 - DNA, 15 bp, Homo sapiens
attgcaggctcagtt

SEQ ID NO: 872981 - DNA, 15 bp, Homo sapiens
ttgcaggctcagttc

SEQ ID NO: 872982 - DNA, 15 bp, Homo sapiens
tgcaggctcagttcc

SEQ ID NO: 872983 - DNA, 15 bp, Homo sapiens
gcaggctcagttcca

SEQ ID NO: 872984 - DNA, 15 bp, Homo sapiens
caggctcagttccag

SEQ ID NO: 872985 - DNA, 15 bp, Homo sapiens
aggctcagttccaga

SEQ ID NO: 872986 - DNA, 15 bp, Homo sapiens
ggctcagttccagac

SEQ ID NO: 872987 - DNA, 15 bp, Homo sapiens
gctcagttccagacc

SEQ ID NO: 872988 - DNA, 15 bp, Homo sapiens
ctcagttccagacca

SEQ ID NO: 872989 - DNA, 15 bp, Homo sapiens
tcagttccagaccac

SEQ ID NO: 872990 - DNA, 15 bp, Homo sapiens
cagttccagaccacc

SEQ ID NO: 872991 - DNA, 15 bp, Homo sapiens
agttccagaccacca

SEQ ID NO: 872992 - DNA, 15 bp, Homo sapiens
gttccagaccaccac

SEQ ID NO: 872993 - DNA, 15 bp, Homo sapiens
ttccagaccaccaca

SEQ ID NO: 872994 - DNA, 15 bp, Homo sapiens
tccagaccaccacaa

SEQ ID NO: 872995 - DNA, 15 bp, Homo sapiens
ccagaccaccacaac

SEQ ID NO: 872996 - DNA, 15 bp, Homo sapiens
cagaccaccacaaca

SEQ ID NO: 872997 - DNA, 15 bp, Homo sapiens
agaccaccacaacaa

SEQ ID NO: 872998 - DNA, 15 bp, Homo sapiens
gaccaccacaacaaa

SEQ ID NO: 872999 - DNA, 15 bp, Homo sapiens
accaccacaacaaag

SEQ ID NO: 873000 - DNA, 15 bp, Homo sapiens
ccaccacaacaaagt

SEQ ID NO: 873001 - DNA, 15 bp, Homo sapiens
caccacaacaaagtg

SEQ ID NO: 873002 - DNA, 15 bp, Homo sapiens
accacaacaaagtga

SEQ ID NO: 873003 - DNA, 15 bp, Homo sapiens
ccacaacaaagtgaa

SEQ ID NO: 873004 - DNA, 15 bp, Homo sapiens
cacaacaaagtgaat

SEQ ID NO: 873005 - DNA, 15 bp, Homo sapiens
acaacaaagtgaata

SEQ ID NO: 873006 - DNA, 15 bp, Homo sapiens
caacaaagtgaatat

SEQ ID NO: 873007 - DNA, 15 bp, Homo sapiens
aacaaagtgaatatc

SEQ ID NO: 873008 - DNA, 15 bp, Homo sapiens
acaaagtgaatatcg

SEQ ID NO: 873009 - DNA, 15 bp, Homo sapiens
caaagtgaatatcgc

SEQ ID NO: 873010 - DNA, 15 bp, Homo sapiens
aaagtgaatatcgca

SEQ ID NO: 873011 - DNA, 15 bp, Homo sapiens
aagtgaatatcgcaa

SEQ ID NO: 873012 - DNA, 15 bp, Homo sapiens
agtgaatatcgcaat

SEQ ID NO: 873013 - DNA, 15 bp, Homo sapiens
gtgaatatcgcaata

SEQ ID NO: 873014 - DNA, 15 bp, Homo sapiens
tgaatatcgcaataa

SEQ ID NO: 873015 - DNA, 15 bp, Homo sapiens
gaatatcgcaataaa

SEQ ID NO: 873016 - DNA, 15 bp, Homo sapiens
aatatcgcaataaag

SEQ ID NO: 873017 - DNA, 15 bp, Homo sapiens
atatcgcaataaagc

SEQ ID NO: 873018 - DNA, 15 bp, Homo sapiens
tatcgcaataaagca

SEQ ID NO: 873019 - DNA, 15 bp, Homo sapiens
atcgcaataaagcaa

SEQ ID NO: 873020 - DNA, 15 bp, Homo sapiens
tcgcaataaagcaag

SEQ ID NO: 873021 - DNA, 15 bp, Homo sapiens
cgcaataaagcaagt

SEQ ID NO: 873022 - DNA, 15 bp, Homo sapiens
gcaataaagcaagta

SEQ ID NO: 873023 - DNA, 15 bp, Homo sapiens
caataaagcaagtaa

SEQ ID NO: 873024 - DNA, 15 bp, Homo sapiens
aataaagcaagtaac

SEQ ID NO: 873025 - DNA, 15 bp, Homo sapiens
ataaagcaagtaaca

SEQ ID NO: 873026 - DNA, 15 bp, Homo sapiens
taaagcaagtaacac

SEQ ID NO: 873027 - DNA, 15 bp, Homo sapiens
aaagcaagtaacaca

SEQ ID NO: 873028 - DNA, 15 bp, Homo sapiens
aagcaagtaacacac

SEQ ID NO: 873029 - DNA, 15 bp, Homo sapiens
agcaagtaacacaca

SEQ ID NO: 873030 - DNA, 15 bp, Homo sapiens
gcaagtaacacacat

SEQ ID NO: 873031 - DNA, 15 bp, Homo sapiens
caagtaacacacatt

SEQ ID NO: 873032 - DNA, 15 bp, Homo sapiens
aagtaacacacattt

SEQ ID NO: 873033 - DNA, 15 bp, Homo sapiens
agtaacacacatttt

SEQ ID NO: 873034 - DNA, 15 bp, Homo sapiens
gtaacacacattttt

SEQ ID NO: 873035 - DNA, 15 bp, Homo sapiens
taacacacatttttt

SEQ ID NO: 873036 - DNA, 15 bp, Homo sapiens
aacacacattttttt

SEQ ID NO: 873037 - DNA, 15 bp, Homo sapiens
acacacatttttttt

SEQ ID NO: 873038 - DNA, 15 bp, Homo sapiens
cacacattttttttc

SEQ ID NO: 873039 - DNA, 15 bp, Homo sapiens
acacattttttttct

SEQ ID NO: 873040 - DNA, 15 bp, Homo sapiens
cacattttttttcta

SEQ ID NO: 873041 - DNA, 15 bp, Homo sapiens
acattttttttctag

SEQ ID NO: 873042 - DNA, 15 bp, Homo sapiens
cattttttttctagt

SEQ ID NO: 873043 - DNA, 15 bp, Homo sapiens
attttttttctagtg

SEQ ID NO: 873044 - DNA, 15 bp, Homo sapiens
ttttttttctagtgc

SEQ ID NO: 873045 - DNA, 15 bp, Homo sapiens
tttttttctagtgca

SEQ ID NO: 873046 - DNA, 15 bp, Homo sapiens
ttttttctagtgcat

SEQ ID NO: 873047 - DNA, 15 bp, Homo sapiens
tttttctagtgcata

SEQ ID NO: 873048 - DNA, 15 bp, Homo sapiens
ttttctagtgcatat

SEQ ID NO: 873049 - DNA, 15 bp, Homo sapiens
tttctagtgcatata

SEQ ID NO: 873050 - DNA, 15 bp, Homo sapiens
ttctagtgcatataa

SEQ ID NO: 873051 - DNA, 15 bp, Homo sapiens
tctagtgcatataaa

SEQ ID NO: 873052 - DNA, 15 bp, Homo sapiens
ctagtgcatataaaa

SEQ ID NO: 873053 - DNA, 15 bp, Homo sapiens
tagtgcatataaaag

SEQ ID NO: 873054 - DNA, 15 bp, Homo sapiens
agtgcatataaaagt

SEQ ID NO: 873055 - DNA, 15 bp, Homo sapiens
gtgcatataaaagtt

SEQ ID NO: 873056 - DNA, 15 bp, Homo sapiens
tgcatataaaagtta

SEQ ID NO: 873057 - DNA, 15 bp, Homo sapiens
gcatataaaagttag

SEQ ID NO: 873058 - DNA, 15 bp, Homo sapiens
catataaaagttagg

SEQ ID NO: 873059 - DNA, 15 bp, Homo sapiens
atataaaagttaggt

SEQ ID NO: 873060 - DNA, 15 bp, Homo sapiens
tataaaagttaggtt

SEQ ID NO: 873061 - DNA, 15 bp, Homo sapiens
ataaaagttaggttt

SEQ ID NO: 873062 - DNA, 15 bp, Homo sapiens
taaaagttaggttta

SEQ ID NO: 873063 - DNA, 15 bp, Homo sapiens
aaaagttaggtttac

SEQ ID NO: 873064 - DNA, 15 bp, Homo sapiens
aaagttaggtttaca

SEQ ID NO: 873065 - DNA, 15 bp, Homo sapiens
aagttaggtttacac

SEQ ID NO: 873066 - DNA, 15 bp, Homo sapiens
agttaggtttacact

SEQ ID NO: 873067 - DNA, 15 bp, Homo sapiens
gttaggtttacactc

SEQ ID NO: 873068 - DNA, 15 bp, Homo sapiens
ttaggtttacactct

SEQ ID NO: 873069 - DNA, 15 bp, Homo sapiens
taggtttacactctt

SEQ ID NO: 873070 - DNA, 15 bp, Homo sapiens
aggtttacactcttc

SEQ ID NO: 873071 - DNA, 15 bp, Homo sapiens
ggtttacactcttct

SEQ ID NO: 873072 - DNA, 15 bp, Homo sapiens
gtttacactcttctg

SEQ ID NO: 873073 - DNA, 15 bp, Homo sapiens
tttacactcttctgt

SEQ ID NO: 873074 - DNA, 15 bp, Homo sapiens
ttacactcttctgta

SEQ ID NO: 873075 - DNA, 15 bp, Homo sapiens
tacactcttctgtag

SEQ ID NO: 873076 - DNA, 15 bp, Homo sapiens
acactcttctgtagt

SEQ ID NO: 873077 - DNA, 15 bp, Homo sapiens
cactcttctgtagtc

SEQ ID NO: 873078 - DNA, 15 bp, Homo sapiens
actcttctgtagtct

SEQ ID NO: 873079 - DNA, 15 bp, Homo sapiens
ctcttctgtagtcta

SEQ ID NO: 873080 - DNA, 15 bp, Homo sapiens
tcttctgtagtctat

SEQ ID NO: 873081 - DNA, 15 bp, Homo sapiens
cttctgtagtctatt

SEQ ID NO: 873082 - DNA, 15 bp, Homo sapiens
ttctgtagtctatta

SEQ ID NO: 873083 - DNA, 15 bp, Homo sapiens
tctgtagtctattaa

SEQ ID NO: 873084 - DNA, 15 bp, Homo sapiens
ctgtagtctattaag

SEQ ID NO: 873085 - DNA, 15 bp, Homo sapiens
tgtagtctattaagt

SEQ ID NO: 873086 - DNA, 15 bp, Homo sapiens
gtagtctattaagtg

SEQ ID NO: 873087 - DNA, 15 bp, Homo sapiens
tagtctattaagtgt

SEQ ID NO: 873088 - DNA, 15 bp, Homo sapiens
agtctattaagtgtg

SEQ ID NO: 873089 - DNA, 15 bp, Homo sapiens
gtctattaagtgtgt

SEQ ID NO: 873090 - DNA, 15 bp, Homo sapiens
tctattaagtgtgta

SEQ ID NO: 873091 - DNA, 15 bp, Homo sapiens
ctattaagtgtgtac

SEQ ID NO: 873092 - DNA, 15 bp, Homo sapiens
tattaagtgtgtaca

SEQ ID NO: 873093 - DNA, 15 bp, Homo sapiens
attaagtgtgtacat

SEQ ID NO: 873094 - DNA, 15 bp, Homo sapiens
ttaagtgtgtacata

SEQ ID NO: 873095 - DNA, 15 bp, Homo sapiens
taagtgtgtacatac

SEQ ID NO: 873096 - DNA, 15 bp, Homo sapiens
aagtgtgtacatacc

SEQ ID NO: 873097 - DNA, 15 bp, Homo sapiens
agtgtgtacatacct

SEQ ID NO: 873098 - DNA, 15 bp, Homo sapiens
gtgtgtacatacctt

SEQ ID NO: 873099 - DNA, 15 bp, Homo sapiens
tgtgtacataccttc

SEQ ID NO: 873100 - DNA, 15 bp, Homo sapiens
gtgtacataccttca

SEQ ID NO: 873101 - DNA, 15 bp, Homo sapiens
tgtacataccttcat

SEQ ID NO: 873102 - DNA, 15 bp, Homo sapiens
gtacataccttcatt

SEQ ID NO: 873103 - DNA, 15 bp, Homo sapiens
tacataccttcatta

SEQ ID NO: 873104 - DNA, 15 bp, Homo sapiens
acataccttcattaa

SEQ ID NO: 873105 - DNA, 15 bp, Homo sapiens
cataccttcattaaa

SEQ ID NO: 873106 - DNA, 15 bp, Homo sapiens
ataccttcattaaaa

SEQ ID NO: 873107 - DNA, 15 bp, Homo sapiens
taccttcattaaaat

SEQ ID NO: 873108 - DNA, 15 bp, Homo sapiens
accttcattaaaata

SEQ ID NO: 873109 - DNA, 15 bp, Homo sapiens
ccttcattaaaataa

SEQ ID NO: 873110 - DNA, 15 bp, Homo sapiens
cttcattaaaataat

SEQ ID NO: 873111 - DNA, 15 bp, Homo sapiens
ttcattaaaataatt

SEQ ID NO: 873112 - DNA, 15 bp, Homo sapiens
tcattaaaataattt

SEQ ID NO: 873113 - DNA, 15 bp, Homo sapiens
cattaaaataattta

SEQ ID NO: 873114 - DNA, 15 bp, Homo sapiens
attaaaataatttac

SEQ ID NO: 873115 - DNA, 15 bp, Homo sapiens
ttaaaataatttact

SEQ ID NO: 873116 - DNA, 15 bp, Homo sapiens
taaaataatttactc

SEQ ID NO: 873117 - DNA, 15 bp, Homo sapiens
aaaataatttactcc

SEQ ID NO: 873118 - DNA, 15 bp, Homo sapiens
aaataatttactcct

SEQ ID NO: 873119 - DNA, 15 bp, Homo sapiens
aataatttactccta

SEQ ID NO: 873120 - DNA, 15 bp, Homo sapiens
ataatttactcctaa

SEQ ID NO: 873121 - DNA, 15 bp, Homo sapiens
taatttactcctaaa

SEQ ID NO: 873122 - DNA, 15 bp, Homo sapiens
aatttactcctaaaa

SEQ ID NO: 873123 - DNA, 15 bp, Homo sapiens
atttactcctaaaaa

SEQ ID NO: 873124 - DNA, 15 bp, Homo sapiens
tttactcctaaaaat

SEQ ID NO: 873125 - DNA, 15 bp, Homo sapiens
ttactcctaaaaatg

SEQ ID NO: 873126 - DNA, 15 bp, Homo sapiens
tactcctaaaaatgc

SEQ ID NO: 873127 - DNA, 15 bp, Homo sapiens
actcctaaaaatgct

SEQ ID NO: 873128 - DNA, 15 bp, Homo sapiens
ctcctaaaaatgcta

SEQ ID NO: 873129 - DNA, 15 bp, Homo sapiens
tcctaaaaatgctag

SEQ ID NO: 873130 - DNA, 15 bp, Homo sapiens
cctaaaaatgctagt

SEQ ID NO: 873131 - DNA, 15 bp, Homo sapiens
ctaaaaatgctagta

SEQ ID NO: 873132 - DNA, 15 bp, Homo sapiens
taaaaatgctagtaa

SEQ ID NO: 873133 - DNA, 15 bp, Homo sapiens
aaaaatgctagtaat

SEQ ID NO: 873134 - DNA, 15 bp, Homo sapiens
aaaatgctagtaatc

SEQ ID NO: 873135 - DNA, 15 bp, Homo sapiens
aaatgctagtaatca

SEQ ID NO: 873136 - DNA, 15 bp, Homo sapiens
aatgctagtaatcat

SEQ ID NO: 873137 - DNA, 15 bp, Homo sapiens
atgctagtaatcatc

SEQ ID NO: 873138 - DNA, 15 bp, Homo sapiens
tgctagtaatcatct

SEQ ID NO: 873139 - DNA, 15 bp, Homo sapiens
gctagtaatcatctg

SEQ ID NO: 873140 - DNA, 15 bp, Homo sapiens
ctagtaatcatctga

SEQ ID NO: 873141 - DNA, 15 bp, Homo sapiens
tagtaatcatctgag

SEQ ID NO: 873142 - DNA, 15 bp, Homo sapiens
agtaatcatctgagt

SEQ ID NO: 873143 - DNA, 15 bp, Homo sapiens
gtaatcatctgagtc

SEQ ID NO: 873144 - DNA, 15 bp, Homo sapiens
taatcatctgagtca

SEQ ID NO: 873145 - DNA, 15 bp, Homo sapiens
aatcatctgagtcat

SEQ ID NO: 873146 - DNA, 15 bp, Homo sapiens
atcatctgagtcatc

SEQ ID NO: 873147 - DNA, 15 bp, Homo sapiens
tcatctgagtcatca

SEQ ID NO: 873148 - DNA, 15 bp, Homo sapiens
catctgagtcatcag

SEQ ID NO: 873149 - DNA, 15 bp, Homo sapiens
atctgagtcatcagt

SEQ ID NO: 873150 - DNA, 15 bp, Homo sapiens
tctgagtcatcagtg

SEQ ID NO: 873151 - DNA, 15 bp, Homo sapiens
ctgagtcatcagtga

SEQ ID NO: 873152 - DNA, 15 bp, Homo sapiens
tgagtcatcagtgag

SEQ ID NO: 873153 - DNA, 15 bp, Homo sapiens
gagtcatcagtgagt

SEQ ID NO: 873154 - DNA, 15 bp, Homo sapiens
agtcatcagtgagtt

SEQ ID NO: 873155 - DNA, 15 bp, Homo sapiens
gtcatcagtgagttt

SEQ ID NO: 873156 - DNA, 15 bp, Homo sapiens
tcatcagtgagtttt

SEQ ID NO: 873157 - DNA, 15 bp, Homo sapiens
catcagtgagtttta

SEQ ID NO: 873158 - DNA, 15 bp, Homo sapiens
atcagtgagttttaa

SEQ ID NO: 873159 - DNA, 15 bp, Homo sapiens
tcagtgagttttaat

SEQ ID NO: 873160 - DNA, 15 bp, Homo sapiens
cagtgagttttaatc

SEQ ID NO: 873161 - DNA, 15 bp, Homo sapiens
agtgagttttaatct

SEQ ID NO: 873162 - DNA, 15 bp, Homo sapiens
gtgagttttaatctt

SEQ ID NO: 873163 - DNA, 15 bp, Homo sapiens
tgagttttaatcttc

SEQ ID NO: 873164 - DNA, 15 bp, Homo sapiens
gagttttaatcttct

SEQ ID NO: 873165 - DNA, 15 bp, Homo sapiens
agttttaatcttctt

SEQ ID NO: 873166 - DNA, 15 bp, Homo sapiens
gttttaatcttcttt

SEQ ID NO: 873167 - DNA, 15 bp, Homo sapiens
ttttaatcttctttc

SEQ ID NO: 873168 - DNA, 15 bp, Homo sapiens
tttaatcttctttct

SEQ ID NO: 873169 - DNA, 15 bp, Homo sapiens
ttaatcttctttctg

SEQ ID NO: 873170 - DNA, 15 bp, Homo sapiens
taatcttctttctgg

SEQ ID NO: 873171 - DNA, 15 bp, Homo sapiens
aatcttctttctggt

SEQ ID NO: 873172 - DNA, 15 bp, Homo sapiens
atcttctttctggta

SEQ ID NO: 873173 - DNA, 15 bp, Homo sapiens
tcttctttctggtag

SEQ ID NO: 873174 - DNA, 15 bp, Homo sapiens
cttctttctggtaga

SEQ ID NO: 873175 - DNA, 15 bp, Homo sapiens
ttctttctggtagag

SEQ ID NO: 873176 - DNA, 15 bp, Homo sapiens
tctttctggtagagg

SEQ ID NO: 873177 - DNA, 15 bp, Homo sapiens
ctttctggtagaggg

SEQ ID NO: 873178 - DNA, 15 bp, Homo sapiens
tttctggtagagggt

SEQ ID NO: 873179 - DNA, 15 bp, Homo sapiens
ttctggtagagggtc

SEQ ID NO: 873180 - DNA, 15 bp, Homo sapiens
tctggtagagggtct

SEQ ID NO: 873181 - DNA, 15 bp, Homo sapiens
ctggtagagggtctt

SEQ ID NO: 873182 - DNA, 15 bp, Homo sapiens
tggtagagggtcttg

SEQ ID NO: 873183 - DNA, 15 bp, Homo sapiens
ggtagagggtcttgc

SEQ ID NO: 873184 - DNA, 15 bp, Homo sapiens
gtagagggtcttgcc

SEQ ID NO: 873185 - DNA, 15 bp, Homo sapiens
tagagggtcttgcct

SEQ ID NO: 873186 - DNA, 15 bp, Homo sapiens
agagggtcttgcctc

SEQ ID NO: 873187 - DNA, 15 bp, Homo sapiens
gagggtcttgcctca

SEQ ID NO: 873188 - DNA, 15 bp, Homo sapiens
agggtcttgcctcag

SEQ ID NO: 873189 - DNA, 15 bp, Homo sapiens
gggtcttgcctcagt

SEQ ID NO: 873190 - DNA, 15 bp, Homo sapiens
ggtcttgcctcagtg

SEQ ID NO: 873191 - DNA, 15 bp, Homo sapiens
gtcttgcctcagtgt

SEQ ID NO: 873192 - DNA, 15 bp, Homo sapiens
tcttgcctcagtgtt

SEQ ID NO: 873193 - DNA, 15 bp, Homo sapiens
cttgcctcagtgttg

SEQ ID NO: 873194 - DNA, 15 bp, Homo sapiens
ttgcctcagtgttgg

SEQ ID NO: 873195 - DNA, 15 bp, Homo sapiens
tgcctcagtgttggt

SEQ ID NO: 873196 - DNA, 15 bp, Homo sapiens
gcctcagtgttggtg

SEQ ID NO: 873197 - DNA, 15 bp, Homo sapiens
cctcagtgttggtgg

SEQ ID NO: 873198 - DNA, 15 bp, Homo sapiens
ctcagtgttggtggc

SEQ ID NO: 873199 - DNA, 15 bp, Homo sapiens
tcagtgttggtggct

SEQ ID NO: 873200 - DNA, 15 bp, Homo sapiens
cagtgttggtggctg

SEQ ID NO: 873201 - DNA, 15 bp, Homo sapiens
agtgttggtggctgc

SEQ ID NO: 873202 - DNA, 15 bp, Homo sapiens
gtgttggtggctgct

SEQ ID NO: 873203 - DNA, 15 bp, Homo sapiens
tgttggtggctgctg

SEQ ID NO: 873204 - DNA, 15 bp, Homo sapiens
gttggtggctgctgt

SEQ ID NO: 873205 - DNA, 15 bp, Homo sapiens
ttggtggctgctgtc

SEQ ID NO: 873206 - DNA, 15 bp, Homo sapiens
tggtggctgctgtct

SEQ ID NO: 873207 - DNA, 15 bp, Homo sapiens
ggtggctgctgtctg

SEQ ID NO: 873208 - DNA, 15 bp, Homo sapiens
gtggctgctgtctga

SEQ ID NO: 873209 - DNA, 15 bp, Homo sapiens
tggctgctgtctgat

SEQ ID NO: 873210 - DNA, 15 bp, Homo sapiens
ggctgctgtctgatc

SEQ ID NO: 873211 - DNA, 15 bp, Homo sapiens
gctgctgtctgatcg

SEQ ID NO: 873212 - DNA, 15 bp, Homo sapiens
ctgctgtctgatcgg

SEQ ID NO: 873213 - DNA, 15 bp, Homo sapiens
tgctgtctgatcggg

SEQ ID NO: 873214 - DNA, 15 bp, Homo sapiens
gctgtctgatcgggg

SEQ ID NO: 873215 - DNA, 15 bp, Homo sapiens
ctgtctgatcggggg

SEQ ID NO: 873216 - DNA, 15 bp, Homo sapiens
tgtctgatcgggggg

SEQ ID NO: 873217 - DNA, 15 bp, Homo sapiens
gtctgatcggggggt

SEQ ID NO: 873218 - DNA, 15 bp, Homo sapiens
tctgatcggggggtg

SEQ ID NO: 873219 - DNA, 15 bp, Homo sapiens
ctgatcggggggtgg

SEQ ID NO: 873220 - DNA, 15 bp, Homo sapiens
tgatcggggggtggt

SEQ ID NO: 873221 - DNA, 15 bp, Homo sapiens
gatcggggggtggta

SEQ ID NO: 873222 - DNA, 15 bp, Homo sapiens
atcggggggtggtag

SEQ ID NO: 873223 - DNA, 15 bp, Homo sapiens
tcggggggtggtagc

SEQ ID NO: 873224 - DNA, 15 bp, Homo sapiens
cggggggtggtagct

SEQ ID NO: 873225 - DNA, 15 bp, Homo sapiens
ggggggtggtagctg

SEQ ID NO: 873226 - DNA, 15 bp, Homo sapiens
gggggtggtagctga

SEQ ID NO: 873227 - DNA, 15 bp, Homo sapiens
ggggtggtagctgaa

SEQ ID NO: 873228 - DNA, 15 bp, Homo sapiens
gggtggtagctgaag

SEQ ID NO: 873229 - DNA, 15 bp, Homo sapiens
ggtggtagctgaaga

SEQ ID NO: 873230 - DNA, 15 bp, Homo sapiens
gtggtagctgaagat

SEQ ID NO: 873231 - DNA, 15 bp, Homo sapiens
tggtagctgaagatt

SEQ ID NO: 873232 - DNA, 15 bp, Homo sapiens
ggtagctgaagattg

SEQ ID NO: 873233 - DNA, 15 bp, Homo sapiens
gtagctgaagattgt

SEQ ID NO: 873234 - DNA, 15 bp, Homo sapiens
tagctgaagattgtg

SEQ ID NO: 873235 - DNA, 15 bp, Homo sapiens
agctgaagattgtgg

SEQ ID NO: 873236 - DNA, 15 bp, Homo sapiens
gctgaagattgtggt

SEQ ID NO: 873237 - DNA, 15 bp, Homo sapiens
ctgaagattgtggtg

SEQ ID NO: 873238 - DNA, 15 bp, Homo sapiens
tgaagattgtggtgg

SEQ ID NO: 873239 - DNA, 15 bp, Homo sapiens
gaagattgtggtggc

SEQ ID NO: 873240 - DNA, 15 bp, Homo sapiens
aagattgtggtggct

SEQ ID NO: 873241 - DNA, 15 bp, Homo sapiens
agattgtggtggctg

SEQ ID NO: 873242 - DNA, 15 bp, Homo sapiens
gattgtggtggctgc

SEQ ID NO: 873243 - DNA, 15 bp, Homo sapiens
attgtggtggctgcg

SEQ ID NO: 873244 - DNA, 15 bp, Homo sapiens
ttgtggtggctgcga

SEQ ID NO: 873245 - DNA, 15 bp, Homo sapiens
tgtggtggctgcgac

SEQ ID NO: 873246 - DNA, 15 bp, Homo sapiens
gtggtggctgcgaca

SEQ ID NO: 873247 - DNA, 15 bp, Homo sapiens
tggtggctgcgacaa

SEQ ID NO: 873248 - DNA, 15 bp, Homo sapiens
ggtggctgcgacaat

SEQ ID NO: 873249 - DNA, 15 bp, Homo sapiens
gtggctgcgacaatt

SEQ ID NO: 873250 - DNA, 15 bp, Homo sapiens
tggctgcgacaattt

SEQ ID NO: 873251 - DNA, 15 bp, Homo sapiens
ggctgcgacaatttc

SEQ ID NO: 873252 - DNA, 15 bp, Homo sapiens
gctgcgacaatttct

SEQ ID NO: 873253 - DNA, 15 bp, Homo sapiens
ctgcgacaatttctt

SEQ ID NO: 873254 - DNA, 15 bp, Homo sapiens
tgcgacaatttctta

SEQ ID NO: 873255 - DNA, 15 bp, Homo sapiens
gcgacaatttcttaa

SEQ ID NO: 873256 - DNA, 15 bp, Homo sapiens
cgacaatttcttaaa

SEQ ID NO: 873257 - DNA, 15 bp, Homo sapiens
acaatttcttaaaat

SEQ ID NO: 873258 - DNA, 15 bp, Homo sapiens
caatttcttaaaata

SEQ ID NO: 873259 - DNA, 15 bp, Homo sapiens
aatttcttaaaataa

SEQ ID NO: 873260 - DNA, 15 bp, Homo sapiens
atttcttaaaataag

SEQ ID NO: 873261 - DNA, 15 bp, Homo sapiens
tttcttaaaataaga

SEQ ID NO: 873262 - DNA, 15 bp, Homo sapiens
ttcttaaaataagac

SEQ ID NO: 873263 - DNA, 15 bp, Homo sapiens
tcttaaaataagaca

SEQ ID NO: 873264 - DNA, 15 bp, Homo sapiens
cttaaaataagacaa

SEQ ID NO: 873265 - DNA, 15 bp, Homo sapiens
ttaaaataagacaac

SEQ ID NO: 873266 - DNA, 15 bp, Homo sapiens
taaaataagacaaca

SEQ ID NO: 873267 - DNA, 15 bp, Homo sapiens
aaaataagacaacaa

SEQ ID NO: 873268 - DNA, 15 bp, Homo sapiens
aaataagacaacaat

SEQ ID NO: 873269 - DNA, 15 bp, Homo sapiens
aataagacaacaatg

SEQ ID NO: 873270 - DNA, 15 bp, Homo sapiens
ataagacaacaatga

SEQ ID NO: 873271 - DNA, 15 bp, Homo sapiens
taagacaacaatgaa

SEQ ID NO: 873272 - DNA, 15 bp, Homo sapiens
aagacaacaatgaag

SEQ ID NO: 873273 - DNA, 15 bp, Homo sapiens
agacaacaatgaaga

SEQ ID NO: 873274 - DNA, 15 bp, Homo sapiens
gacaacaatgaagat

SEQ ID NO: 873275 - DNA, 15 bp, Homo sapiens
acaacaatgaagatt

SEQ ID NO: 873276 - DNA, 15 bp, Homo sapiens
caacaatgaagattg

SEQ ID NO: 873277 - DNA, 15 bp, Homo sapiens
aacaatgaagattgc

SEQ ID NO: 873278 - DNA, 15 bp, Homo sapiens
acaatgaagattgct

SEQ ID NO: 873279 - DNA, 15 bp, Homo sapiens
caatgaagattgctg

SEQ ID NO: 873280 - DNA, 15 bp, Homo sapiens
aatgaagattgctgc

SEQ ID NO: 873281 - DNA, 15 bp, Homo sapiens
atgaagattgctgca

SEQ ID NO: 873282 - DNA, 15 bp, Homo sapiens
tgaagattgctgcat

SEQ ID NO: 873283 - DNA, 15 bp, Homo sapiens
gaagattgctgcatc

SEQ ID NO: 873284 - DNA, 15 bp, Homo sapiens
aagattgctgcatcg

SEQ ID NO: 873285 - DNA, 15 bp, Homo sapiens
agattgctgcatcga

SEQ ID NO: 873286 - DNA, 15 bp, Homo sapiens
gattgctgcatcgac

SEQ ID NO: 873287 - DNA, 15 bp, Homo sapiens
attgctgcatcgact

SEQ ID NO: 873288 - DNA, 15 bp, Homo sapiens
ttgctgcatcgactg

SEQ ID NO: 873289 - DNA, 15 bp, Homo sapiens
tgctgcatcgactga

SEQ ID NO: 873290 - DNA, 15 bp, Homo sapiens
gctgcatcgactgac

SEQ ID NO: 873291 - DNA, 15 bp, Homo sapiens
ctgcatcgactgact

SEQ ID NO: 873292 - DNA, 15 bp, Homo sapiens
tgcatcgactgactc

SEQ ID NO: 873293 - DNA, 15 bp, Homo sapiens
gcatcgactgactct

SEQ ID NO: 873294 - DNA, 15 bp, Homo sapiens
catcgactgactctt

SEQ ID NO: 873295 - DNA, 15 bp, Homo sapiens
atcgactgactcttc

SEQ ID NO: 873296 - DNA, 15 bp, Homo sapiens
tcgactgactcttcc

SEQ ID NO: 873297 - DNA, 15 bp, Homo sapiens
cgactgactcttcct

SEQ ID NO: 873298 - DNA, 15 bp, Homo sapiens
gactgactcttcctt

SEQ ID NO: 873299 - DNA, 15 bp, Homo sapiens
actgactcttccttt

SEQ ID NO: 873300 - DNA, 15 bp, Homo sapiens
ctgactcttcctttg

SEQ ID NO: 873301 - DNA, 15 bp, Homo sapiens
tgactcttcctttga

SEQ ID NO: 873302 - DNA, 15 bp, Homo sapiens
gactcttcctttgac

SEQ ID NO: 873303 - DNA, 15 bp, Homo sapiens
actcttcctttgaca

SEQ ID NO: 873304 - DNA, 15 bp, Homo sapiens
ctcttcctttgacaa

SEQ ID NO: 873305 - DNA, 15 bp, Homo sapiens
tcttcctttgacaaa

SEQ ID NO: 873306 - DNA, 15 bp, Homo sapiens
cttcctttgacaaaa

SEQ ID NO: 873307 - DNA, 15 bp, Homo sapiens
ttcctttgacaaaag

SEQ ID NO: 873308 - DNA, 15 bp, Homo sapiens
tcctttgacaaaaga

SEQ ID NO: 873309 - DNA, 15 bp, Homo sapiens
cctttgacaaaagat

SEQ ID NO: 873310 - DNA, 15 bp, Homo sapiens
ctttgacaaaagatt

SEQ ID NO: 873311 - DNA, 15 bp, Homo sapiens
tttgacaaaagattt

SEQ ID NO: 873312 - DNA, 15 bp, Homo sapiens
ttgacaaaagatttc

SEQ ID NO: 873313 - DNA, 15 bp, Homo sapiens
tgacaaaagatttct

SEQ ID NO: 873314 - DNA, 15 bp, Homo sapiens
gacaaaagatttctc

SEQ ID NO: 873315 - DNA, 15 bp, Homo sapiens
acaaaagatttctct

SEQ ID NO: 873316 - DNA, 15 bp, Homo sapiens
caaaagatttctctg

SEQ ID NO: 873317 - DNA, 15 bp, Homo sapiens
aaaagatttctctgt

SEQ ID NO: 873318 - DNA, 15 bp, Homo sapiens
aaagatttctctgta

SEQ ID NO: 873319 - DNA, 15 bp, Homo sapiens
aagatttctctgtag

SEQ ID NO: 873320 - DNA, 15 bp, Homo sapiens
agatttctctgtagc

SEQ ID NO: 873321 - DNA, 15 bp, Homo sapiens
gatttctctgtagca

SEQ ID NO: 873322 - DNA, 15 bp, Homo sapiens
atttctctgtagcat

SEQ ID NO: 873323 - DNA, 15 bp, Homo sapiens
tttctctgtagcatg

SEQ ID NO: 873324 - DNA, 15 bp, Homo sapiens
ttctctgtagcatgt

SEQ ID NO: 873325 - DNA, 15 bp, Homo sapiens
tctctgtagcatgtg

SEQ ID NO: 873326 - DNA, 15 bp, Homo sapiens
ctctgtagcatgtga

SEQ ID NO: 873327 - DNA, 15 bp, Homo sapiens
tctgtagcatgtgat

SEQ ID NO: 873328 - DNA, 15 bp, Homo sapiens
ctgtagcatgtgatg

SEQ ID NO: 873329 - DNA, 15 bp, Homo sapiens
tgtagcatgtgatgc

SEQ ID NO: 873330 - DNA, 15 bp, Homo sapiens
gtagcatgtgatgct

SEQ ID NO: 873331 - DNA, 15 bp, Homo sapiens
tagcatgtgatgctg

SEQ ID NO: 873332 - DNA, 15 bp, Homo sapiens
agcatgtgatgctgt

SEQ ID NO: 873333 - DNA, 15 bp, Homo sapiens
gcatgtgatgctgtt

SEQ ID NO: 873334 - DNA, 15 bp, Homo sapiens
catgtgatgctgttg

SEQ ID NO: 873335 - DNA, 15 bp, Homo sapiens
atgtgatgctgttgg

SEQ ID NO: 873336 - DNA, 15 bp, Homo sapiens
tgtgatgctgttgga

SEQ ID NO: 873337 - DNA, 15 bp, Homo sapiens
gtgatgctgttggat

SEQ ID NO: 873338 - DNA, 15 bp, Homo sapiens
tgatgctgttggata

SEQ ID NO: 873339 - DNA, 15 bp, Homo sapiens
gatgctgttggatag

SEQ ID NO: 873340 - DNA, 15 bp, Homo sapiens
atgctgttggatagc

SEQ ID NO: 873341 - DNA, 15 bp, Homo sapiens
tgctgttggatagca

SEQ ID NO: 873342 - DNA, 15 bp, Homo sapiens
gctgttggatagcat

SEQ ID NO: 873343 - DNA, 15 bp, Homo sapiens
ctgttggatagcatt

SEQ ID NO: 873344 - DNA, 15 bp, Homo sapiens
tgttggatagcattt

SEQ ID NO: 873345 - DNA, 15 bp, Homo sapiens
gttggatagcatttt

SEQ ID NO: 873346 - DNA, 15 bp, Homo sapiens
ttggatagcatttta

SEQ ID NO: 873347 - DNA, 15 bp, Homo sapiens
tggatagcattttac

SEQ ID NO: 873348 - DNA, 15 bp, Homo sapiens
ggatagcattttacc

SEQ ID NO: 873349 - DNA, 15 bp, Homo sapiens
gatagcattttaccc

SEQ ID NO: 873350 - DNA, 15 bp, Homo sapiens
atagcattttaccca

SEQ ID NO: 873351 - DNA, 15 bp, Homo sapiens
tagcattttacccag

SEQ ID NO: 873352 - DNA, 15 bp, Homo sapiens
agcattttacccaga

SEQ ID NO: 873353 - DNA, 15 bp, Homo sapiens
gcattttacccagag

SEQ ID NO: 873354 - DNA, 15 bp, Homo sapiens
cattttacccagagt

SEQ ID NO: 873355 - DNA, 15 bp, Homo sapiens
attttacccagagta

SEQ ID NO: 873356 - DNA, 15 bp, Homo sapiens
ttttacccagagtag

SEQ ID NO: 873357 - DNA, 15 bp, Homo sapiens
tttacccagagtaga

SEQ ID NO: 873358 - DNA, 15 bp, Homo sapiens
ttacccagagtagaa

SEQ ID NO: 873359 - DNA, 15 bp, Homo sapiens
tacccagagtagaac

SEQ ID NO: 873360 - DNA, 15 bp, Homo sapiens
acccagagtagaact

SEQ ID NO: 873361 - DNA, 15 bp, Homo sapiens
cccagagtagaactt

SEQ ID NO: 873362 - DNA, 15 bp, Homo sapiens
ccagagtagaacttc

SEQ ID NO: 873363 - DNA, 15 bp, Homo sapiens
cagagtagaacttct

SEQ ID NO: 873364 - DNA, 15 bp, Homo sapiens
agagtagaacttctt

SEQ ID NO: 873365 - DNA, 15 bp, Homo sapiens
gagtagaacttcttt

SEQ ID NO: 873366 - DNA, 15 bp, Homo sapiens
agtagaacttctttc

SEQ ID NO: 873367 - DNA, 15 bp, Homo sapiens
gtagaacttctttca

SEQ ID NO: 873368 - DNA, 15 bp, Homo sapiens
tagaacttctttcaa

SEQ ID NO: 873369 - DNA, 15 bp, Homo sapiens
agaacttctttcaaa

SEQ ID NO: 873370 - DNA, 15 bp, Homo sapiens
gaacttctttcaaaa

SEQ ID NO: 873371 - DNA, 15 bp, Homo sapiens
cttctttcaaaattg

SEQ ID NO: 873372 - DNA, 15 bp, Homo sapiens
ttctttcaaaattgg

SEQ ID NO: 873373 - DNA, 15 bp, Homo sapiens
tctttcaaaattgga

SEQ ID NO: 873374 - DNA, 15 bp, Homo sapiens
ctttcaaaattggag

SEQ ID NO: 873375 - DNA, 15 bp, Homo sapiens
tttcaaaattggagt

SEQ ID NO: 873376 - DNA, 15 bp, Homo sapiens
ttcaaaattggagtc

SEQ ID NO: 873377 - DNA, 15 bp, Homo sapiens
tcaaaattggagtca

SEQ ID NO: 873378 - DNA, 15 bp, Homo sapiens
caaaattggagtcaa

SEQ ID NO: 873379 - DNA, 15 bp, Homo sapiens
aaaattggagtcaat

SEQ ID NO: 873380 - DNA, 15 bp, Homo sapiens
aaattggagtcaatc

SEQ ID NO: 873381 - DNA, 15 bp, Homo sapiens
aattggagtcaatcc

SEQ ID NO: 873382 - DNA, 15 bp, Homo sapiens
attggagtcaatcct

SEQ ID NO: 873383 - DNA, 15 bp, Homo sapiens
ttggagtcaatcctt

SEQ ID NO: 873384 - DNA, 15 bp, Homo sapiens
tggagtcaatccttt

SEQ ID NO: 873385 - DNA, 15 bp, Homo sapiens
ggagtcaatcctttc

SEQ ID NO: 873386 - DNA, 15 bp, Homo sapiens
gagtcaatcctttca

SEQ ID NO: 873387 - DNA, 15 bp, Homo sapiens
agtcaatcctttcat

SEQ ID NO: 873388 - DNA, 15 bp, Homo sapiens
gtcaatcctttcata

SEQ ID NO: 873389 - DNA, 15 bp, Homo sapiens
tcaatcctttcatac

SEQ ID NO: 873390 - DNA, 15 bp, Homo sapiens
caatcctttcatact

SEQ ID NO: 873391 - DNA, 15 bp, Homo sapiens
aatcctttcatactc

SEQ ID NO: 873392 - DNA, 15 bp, Homo sapiens
atcctttcatactct

SEQ ID NO: 873393 - DNA, 15 bp, Homo sapiens
tcctttcatactctg

SEQ ID NO: 873394 - DNA, 15 bp, Homo sapiens
cctttcatactctgc

SEQ ID NO: 873395 - DNA, 15 bp, Homo sapiens
ctttcatactctgct

SEQ ID NO: 873396 - DNA, 15 bp, Homo sapiens
tttcatactctgctg

SEQ ID NO: 873397 - DNA, 15 bp, Homo sapiens
ttcatactctgctgc

SEQ ID NO: 873398 - DNA, 15 bp, Homo sapiens
tcatactctgctgct

SEQ ID NO: 873399 - DNA, 15 bp, Homo sapiens
catactctgctgctg

SEQ ID NO: 873400 - DNA, 15 bp, Homo sapiens
atactctgctgctgc

SEQ ID NO: 873401 - DNA, 15 bp, Homo sapiens
tactctgctgctgct

SEQ ID NO: 873402 - DNA, 15 bp, Homo sapiens
actctgctgctgctt

SEQ ID NO: 873403 - DNA, 15 bp, Homo sapiens
ctctgctgctgcttc

SEQ ID NO: 873404 - DNA, 15 bp, Homo sapiens
tctgctgctgcttca

SEQ ID NO: 873405 - DNA, 15 bp, Homo sapiens
ctgctgctgcttcat

SEQ ID NO: 873406 - DNA, 15 bp, Homo sapiens
tgctgctgcttcatc

SEQ ID NO: 873407 - DNA, 15 bp, Homo sapiens
gctgctgcttcatca

SEQ ID NO: 873408 - DNA, 15 bp, Homo sapiens
ctgctgcttcatcaa

SEQ ID NO: 873409 - DNA, 15 bp, Homo sapiens
tgctgcttcatcaac

SEQ ID NO: 873410 - DNA, 15 bp, Homo sapiens
gctgcttcatcaact

SEQ ID NO: 873411 - DNA, 15 bp, Homo sapiens
ctgcttcatcaacta

SEQ ID NO: 873412 - DNA, 15 bp, Homo sapiens
tgcttcatcaactaa

SEQ ID NO: 873413 - DNA, 15 bp, Homo sapiens
gcttcatcaactaag

SEQ ID NO: 873414 - DNA, 15 bp, Homo sapiens
cttcatcaactaagt

SEQ ID NO: 873415 - DNA, 15 bp, Homo sapiens
ttcatcaactaagtt

SEQ ID NO: 873416 - DNA, 15 bp, Homo sapiens
tcatcaactaagttt

SEQ ID NO: 873417 - DNA, 15 bp, Homo sapiens
catcaactaagttta

SEQ ID NO: 873418 - DNA, 15 bp, Homo sapiens
atcaactaagtttat

SEQ ID NO: 873419 - DNA, 15 bp, Homo sapiens
tcaactaagtttatg

SEQ ID NO: 873420 - DNA, 15 bp, Homo sapiens
caactaagtttatgt

SEQ ID NO: 873421 - DNA, 15 bp, Homo sapiens
aactaagtttatgta

SEQ ID NO: 873422 - DNA, 15 bp, Homo sapiens
actaagtttatgtac

SEQ ID NO: 873423 - DNA, 15 bp, Homo sapiens
ctaagtttatgtact

SEQ ID NO: 873424 - DNA, 15 bp, Homo sapiens
taagtttatgtacta

SEQ ID NO: 873425 - DNA, 15 bp, Homo sapiens
aagtttatgtactat

SEQ ID NO: 873426 - DNA, 15 bp, Homo sapiens
agtttatgtactatt

SEQ ID NO: 873427 - DNA, 15 bp, Homo sapiens
gtttatgtactattc

SEQ ID NO: 873428 - DNA, 15 bp, Homo sapiens
tttatgtactattct

SEQ ID NO: 873429 - DNA, 15 bp, Homo sapiens
ttatgtactattcta

SEQ ID NO: 873430 - DNA, 15 bp, Homo sapiens
tatgtactattctaa

SEQ ID NO: 873431 - DNA, 15 bp, Homo sapiens
atgtactattctaaa

SEQ ID NO: 873432 - DNA, 15 bp, Homo sapiens
tgtactattctaaat

SEQ ID NO: 873433 - DNA, 15 bp, Homo sapiens
gtactattctaaatc

SEQ ID NO: 873434 - DNA, 15 bp, Homo sapiens
tactattctaaatcc

SEQ ID NO: 873435 - DNA, 15 bp, Homo sapiens
actattctaaatcct

SEQ ID NO: 873436 - DNA, 15 bp, Homo sapiens
ctattctaaatcctt

SEQ ID NO: 873437 - DNA, 15 bp, Homo sapiens
tattctaaatccttt

SEQ ID NO: 873438 - DNA, 15 bp, Homo sapiens
attctaaatcctttg

SEQ ID NO: 873439 - DNA, 15 bp, Homo sapiens
ttctaaatcctttgt

SEQ ID NO: 873440 - DNA, 15 bp, Homo sapiens
tctaaatcctttgtt

SEQ ID NO: 873441 - DNA, 15 bp, Homo sapiens
ctaaatcctttgttg

SEQ ID NO: 873442 - DNA, 15 bp, Homo sapiens
taaatcctttgttgt

SEQ ID NO: 873443 - DNA, 15 bp, Homo sapiens
aaatcctttgttgtc

SEQ ID NO: 873444 - DNA, 15 bp, Homo sapiens
aatcctttgttgtca

SEQ ID NO: 873445 - DNA, 15 bp, Homo sapiens
atcctttgttgtcat

SEQ ID NO: 873446 - DNA, 15 bp, Homo sapiens
tcctttgttgtcatt

SEQ ID NO: 873447 - DNA, 15 bp, Homo sapiens
cctttgttgtcattt

SEQ ID NO: 873448 - DNA, 15 bp, Homo sapiens
ctttgttgtcatttc

SEQ ID NO: 873449 - DNA, 15 bp, Homo sapiens
tttgttgtcatttca

SEQ ID NO: 873450 - DNA, 15 bp, Homo sapiens
ttgttgtcatttcaa

SEQ ID NO: 873451 - DNA, 15 bp, Homo sapiens
tgttgtcatttcaac

SEQ ID NO: 873452 - DNA, 15 bp, Homo sapiens
gttgtcatttcaaca

SEQ ID NO: 873453 - DNA, 15 bp, Homo sapiens
ttgtcatttcaacaa

SEQ ID NO: 873454 - DNA, 15 bp, Homo sapiens
tgtcatttcaacaat

SEQ ID NO: 873455 - DNA, 15 bp, Homo sapiens
gtcatttcaacaatg

SEQ ID NO: 873456 - DNA, 15 bp, Homo sapiens
tcatttcaacaatgc

SEQ ID NO: 873457 - DNA, 15 bp, Homo sapiens
catttcaacaatgct

SEQ ID NO: 873458 - DNA, 15 bp, Homo sapiens
atttcaacaatgctc

SEQ ID NO: 873459 - DNA, 15 bp, Homo sapiens
tttcaacaatgctca

SEQ ID NO: 873460 - DNA, 15 bp, Homo sapiens
ttcaacaatgctcac

SEQ ID NO: 873461 - DNA, 15 bp, Homo sapiens
tcaacaatgctcaca

SEQ ID NO: 873462 - DNA, 15 bp, Homo sapiens
caacaatgctcacag

SEQ ID NO: 873463 - DNA, 15 bp, Homo sapiens
aacaatgctcacaga

SEQ ID NO: 873464 - DNA, 15 bp, Homo sapiens
acaatgctcacagaa

SEQ ID NO: 873465 - DNA, 15 bp, Homo sapiens
caatgctcacagaat

SEQ ID NO: 873466 - DNA, 15 bp, Homo sapiens
aatgctcacagaatc

SEQ ID NO: 873467 - DNA, 15 bp, Homo sapiens
atgctcacagaatct

SEQ ID NO: 873468 - DNA, 15 bp, Homo sapiens
tgctcacagaatctt

SEQ ID NO: 873469 - DNA, 15 bp, Homo sapiens
gctcacagaatcttc

SEQ ID NO: 873470 - DNA, 15 bp, Homo sapiens
ctcacagaatcttca

SEQ ID NO: 873471 - DNA, 15 bp, Homo sapiens
tcacagaatcttcac

SEQ ID NO: 873472 - DNA, 15 bp, Homo sapiens
cacagaatcttcact

SEQ ID NO: 873473 - DNA, 15 bp, Homo sapiens
acagaatcttcacta

SEQ ID NO: 873474 - DNA, 15 bp, Homo sapiens
cagaatcttcactag

SEQ ID NO: 873475 - DNA, 15 bp, Homo sapiens
agaatcttcactagg

SEQ ID NO: 873476 - DNA, 15 bp, Homo sapiens
gaatcttcactagga

SEQ ID NO: 873477 - DNA, 15 bp, Homo sapiens
aatcttcactaggag

SEQ ID NO: 873478 - DNA, 15 bp, Homo sapiens
atcttcactaggagt

SEQ ID NO: 873479 - DNA, 15 bp, Homo sapiens
tcttcactaggagta

SEQ ID NO: 873480 - DNA, 15 bp, Homo sapiens
cttcactaggagtag

SEQ ID NO: 873481 - DNA, 15 bp, Homo sapiens
ttcactaggagtagc

SEQ ID NO: 873482 - DNA, 15 bp, Homo sapiens
tcactaggagtagct

SEQ ID NO: 873483 - DNA, 15 bp, Homo sapiens
cactaggagtagctt

SEQ ID NO: 873484 - DNA, 15 bp, Homo sapiens
actaggagtagcttc

SEQ ID NO: 873485 - DNA, 15 bp, Homo sapiens
ctaggagtagcttcc

SEQ ID NO: 873486 - DNA, 15 bp, Homo sapiens
taggagtagcttcca

SEQ ID NO: 873487 - DNA, 15 bp, Homo sapiens
aggagtagcttccat

SEQ ID NO: 873488 - DNA, 15 bp, Homo sapiens
ggagtagcttccatc

SEQ ID NO: 873489 - DNA, 15 bp, Homo sapiens
gagtagcttccatct

SEQ ID NO: 873490 - DNA, 15 bp, Homo sapiens
agtagcttccatctc

SEQ ID NO: 873491 - DNA, 15 bp, Homo sapiens
gtagcttccatctca

SEQ ID NO: 873492 - DNA, 15 bp, Homo sapiens
tagcttccatctcaa

SEQ ID NO: 873493 - DNA, 15 bp, Homo sapiens
agcttccatctcaag

SEQ ID NO: 873494 - DNA, 15 bp, Homo sapiens
gcttccatctcaaga

SEQ ID NO: 873495 - DNA, 15 bp, Homo sapiens
cttccatctcaagag

SEQ ID NO: 873496 - DNA, 15 bp, Homo sapiens
ttccatctcaagaga

SEQ ID NO: 873497 - DNA, 15 bp, Homo sapiens
tccatctcaagagac

SEQ ID NO: 873498 - DNA, 15 bp, Homo sapiens
ccatctcaagagacc

SEQ ID NO: 873499 - DNA, 15 bp, Homo sapiens
catctcaagagacca

SEQ ID NO: 873500 - DNA, 15 bp, Homo sapiens
atctcaagagaccac

SEQ ID NO: 873501 - DNA, 15 bp, Homo sapiens
tctcaagagaccact

SEQ ID NO: 873502 - DNA, 15 bp, Homo sapiens
ctcaagagaccactt

SEQ ID NO: 873503 - DNA, 15 bp, Homo sapiens
tcaagagaccacttt

SEQ ID NO: 873504 - DNA, 15 bp, Homo sapiens
caagagaccactttc

SEQ ID NO: 873505 - DNA, 15 bp, Homo sapiens
aagagaccactttct

SEQ ID NO: 873506 - DNA, 15 bp, Homo sapiens
agagaccactttctt

SEQ ID NO: 873507 - DNA, 15 bp, Homo sapiens
gagaccactttcttt

SEQ ID NO: 873508 - DNA, 15 bp, Homo sapiens
agaccactttctttg

SEQ ID NO: 873509 - DNA, 15 bp, Homo sapiens
gaccactttctttgc

SEQ ID NO: 873510 - DNA, 15 bp, Homo sapiens
accactttctttgct

SEQ ID NO: 873511 - DNA, 15 bp, Homo sapiens
ccactttctttgcta

SEQ ID NO: 873512 - DNA, 15 bp, Homo sapiens
cactttctttgctaa

SEQ ID NO: 873513 - DNA, 15 bp, Homo sapiens
actttctttgctaac

SEQ ID NO: 873514 - DNA, 15 bp, Homo sapiens
ctttctttgctaacc

SEQ ID NO: 873515 - DNA, 15 bp, Homo sapiens
tttctttgctaaccc

SEQ ID NO: 873516 - DNA, 15 bp, Homo sapiens
ttctttgctaacccg

SEQ ID NO: 873517 - DNA, 15 bp, Homo sapiens
tctttgctaacccgt

SEQ ID NO: 873518 - DNA, 15 bp, Homo sapiens
ctttgctaacccgta

SEQ ID NO: 873519 - DNA, 15 bp, Homo sapiens
tttgctaacccgtaa

SEQ ID NO: 873520 - DNA, 15 bp, Homo sapiens
ttgctaacccgtaag

SEQ ID NO: 873521 - DNA, 15 bp, Homo sapiens
tgctaacccgtaaga

SEQ ID NO: 873522 - DNA, 15 bp, Homo sapiens
gctaacccgtaagaa

SEQ ID NO: 873523 - DNA, 15 bp, Homo sapiens
ctaacccgtaagaag

SEQ ID NO: 873524 - DNA, 15 bp, Homo sapiens
taacccgtaagaagc

SEQ ID NO: 873525 - DNA, 15 bp, Homo sapiens
aacccgtaagaagca

SEQ ID NO: 873526 - DNA, 15 bp, Homo sapiens
acccgtaagaagcaa

SEQ ID NO: 873527 - DNA, 15 bp, Homo sapiens
cccgtaagaagcaac

SEQ ID NO: 873528 - DNA, 15 bp, Homo sapiens
ccgtaagaagcaact

SEQ ID NO: 873529 - DNA, 15 bp, Homo sapiens
cgtaagaagcaactc

SEQ ID NO: 873530 - DNA, 15 bp, Homo sapiens
gtaagaagcaactcc

SEQ ID NO: 873531 - DNA, 15 bp, Homo sapiens
taagaagcaactcct

SEQ ID NO: 873532 - DNA, 15 bp, Homo sapiens
aagaagcaactcctc

SEQ ID NO: 873533 - DNA, 15 bp, Homo sapiens
agaagcaactcctca

SEQ ID NO: 873534 - DNA, 15 bp, Homo sapiens
gaagcaactcctcat

SEQ ID NO: 873535 - DNA, 15 bp, Homo sapiens
aagcaactcctcata

SEQ ID NO: 873536 - DNA, 15 bp, Homo sapiens
agcaactcctcatat

SEQ ID NO: 873537 - DNA, 15 bp, Homo sapiens
gcaactcctcatatg

SEQ ID NO: 873538 - DNA, 15 bp, Homo sapiens
caactcctcatatgt

SEQ ID NO: 873539 - DNA, 15 bp, Homo sapiens
aactcctcatatgtt

SEQ ID NO: 873540 - DNA, 15 bp, Homo sapiens
actcctcatatgttc

SEQ ID NO: 873541 - DNA, 15 bp, Homo sapiens
ctcctcatatgttca

SEQ ID NO: 873542 - DNA, 15 bp, Homo sapiens
tcctcatatgttcaa

SEQ ID NO: 873543 - DNA, 15 bp, Homo sapiens
cctcatatgttcaag

SEQ ID NO: 873544 - DNA, 15 bp, Homo sapiens
ctcatatgttcaagt

SEQ ID NO: 873545 - DNA, 15 bp, Homo sapiens
tcatatgttcaagtt

SEQ ID NO: 873546 - DNA, 15 bp, Homo sapiens
catatgttcaagttt

SEQ ID NO: 873547 - DNA, 15 bp, Homo sapiens
atatgttcaagtttg

SEQ ID NO: 873548 - DNA, 15 bp, Homo sapiens
tatgttcaagtttga

SEQ ID NO: 873549 - DNA, 15 bp, Homo sapiens
atgttcaagtttgat

SEQ ID NO: 873550 - DNA, 15 bp, Homo sapiens
tgttcaagtttgatc

SEQ ID NO: 873551 - DNA, 15 bp, Homo sapiens
gttcaagtttgatca

SEQ ID NO: 873552 - DNA, 15 bp, Homo sapiens
ttcaagtttgatcat

SEQ ID NO: 873553 - DNA, 15 bp, Homo sapiens
tcaagtttgatcatg

SEQ ID NO: 873554 - DNA, 15 bp, Homo sapiens
caagtttgatcatga

SEQ ID NO: 873555 - DNA, 15 bp, Homo sapiens
aagtttgatcatgag

SEQ ID NO: 873556 - DNA, 15 bp, Homo sapiens
agtttgatcatgagt

SEQ ID NO: 873557 - DNA, 15 bp, Homo sapiens
gtttgatcatgagtt

SEQ ID NO: 873558 - DNA, 15 bp, Homo sapiens
tttgatcatgagttt

SEQ ID NO: 873559 - DNA, 15 bp, Homo sapiens
ttgatcatgagtttg

SEQ ID NO: 873560 - DNA, 15 bp, Homo sapiens
tgatcatgagtttgc

SEQ ID NO: 873561 - DNA, 15 bp, Homo sapiens
gatcatgagtttgca

SEQ ID NO: 873562 - DNA, 15 bp, Homo sapiens
atcatgagtttgcag

SEQ ID NO: 873563 - DNA, 15 bp, Homo sapiens
tcatgagtttgcagc

SEQ ID NO: 873564 - DNA, 15 bp, Homo sapiens
catgagtttgcagca

SEQ ID NO: 873565 - DNA, 15 bp, Homo sapiens
atgagtttgcagcaa

SEQ ID NO: 873566 - DNA, 15 bp, Homo sapiens
tgagtttgcagcaat

SEQ ID NO: 873567 - DNA, 15 bp, Homo sapiens
gagtttgcagcaatt

SEQ ID NO: 873568 - DNA, 15 bp, Homo sapiens
agtttgcagcaattc

SEQ ID NO: 873569 - DNA, 15 bp, Homo sapiens
gtttgcagcaattca

SEQ ID NO: 873570 - DNA, 15 bp, Homo sapiens
tttgcagcaattcag

SEQ ID NO: 873571 - DNA, 15 bp, Homo sapiens
ttgcagcaattcagt

SEQ ID NO: 873572 - DNA, 15 bp, Homo sapiens
tgcagcaattcagtc

SEQ ID NO: 873573 - DNA, 15 bp, Homo sapiens
gcagcaattcagtca

SEQ ID NO: 873574 - DNA, 15 bp, Homo sapiens
cagcaattcagtcac

SEQ ID NO: 873575 - DNA, 15 bp, Homo sapiens
agcaattcagtcaca

SEQ ID NO: 873576 - DNA, 15 bp, Homo sapiens
gcaattcagtcacat

SEQ ID NO: 873577 - DNA, 15 bp, Homo sapiens
caattcagtcacatg

SEQ ID NO: 873578 - DNA, 15 bp, Homo sapiens
aattcagtcacatgt

SEQ ID NO: 873579 - DNA, 15 bp, Homo sapiens
attcagtcacatgtt

SEQ ID NO: 873580 - DNA, 15 bp, Homo sapiens
ttcagtcacatgttc

SEQ ID NO: 873581 - DNA, 15 bp, Homo sapiens
tcagtcacatgttca

SEQ ID NO: 873582 - DNA, 15 bp, Homo sapiens
cagtcacatgttcag

SEQ ID NO: 873583 - DNA, 15 bp, Homo sapiens
agtcacatgttcagg

SEQ ID NO: 873584 - DNA, 15 bp, Homo sapiens
gtcacatgttcaggc

SEQ ID NO: 873585 - DNA, 15 bp, Homo sapiens
tcacatgttcaggct

SEQ ID NO: 873586 - DNA, 15 bp, Homo sapiens
cacatgttcaggctc

SEQ ID NO: 873587 - DNA, 15 bp, Homo sapiens
acatgttcaggctcc

SEQ ID NO: 873588 - DNA, 15 bp, Homo sapiens
catgttcaggctcca

SEQ ID NO: 873589 - DNA, 15 bp, Homo sapiens
atgttcaggctccac

SEQ ID NO: 873590 - DNA, 15 bp, Homo sapiens
tgttcaggctccact

SEQ ID NO: 873591 - DNA, 15 bp, Homo sapiens
gttcaggctccactt

SEQ ID NO: 873592 - DNA, 15 bp, Homo sapiens
ttcaggctccacttc

SEQ ID NO: 873593 - DNA, 15 bp, Homo sapiens
tcaggctccacttct

SEQ ID NO: 873594 - DNA, 15 bp, Homo sapiens
caggctccacttcta

SEQ ID NO: 873595 - DNA, 15 bp, Homo sapiens
aggctccacttctaa

SEQ ID NO: 873596 - DNA, 15 bp, Homo sapiens
ggctccacttctaat

SEQ ID NO: 873597 - DNA, 15 bp, Homo sapiens
gctccacttctaatt

SEQ ID NO: 873598 - DNA, 15 bp, Homo sapiens
ctccacttctaattc

SEQ ID NO: 873599 - DNA, 15 bp, Homo sapiens
tccacttctaattct

SEQ ID NO: 873600 - DNA, 15 bp, Homo sapiens
ccacttctaattcta

SEQ ID NO: 873601 - DNA, 15 bp, Homo sapiens
cacttctaattctat

SEQ ID NO: 873602 - DNA, 15 bp, Homo sapiens
acttctaattctatt

SEQ ID NO: 873603 - DNA, 15 bp, Homo sapiens
cttctaattctattt

SEQ ID NO: 873604 - DNA, 15 bp, Homo sapiens
ttctaattctatttc

SEQ ID NO: 873605 - DNA, 15 bp, Homo sapiens
tctaattctatttct

SEQ ID NO: 873606 - DNA, 15 bp, Homo sapiens
ctaattctatttctc

SEQ ID NO: 873607 - DNA, 15 bp, Homo sapiens
taattctatttctct

SEQ ID NO: 873608 - DNA, 15 bp, Homo sapiens
aattctatttctctt

SEQ ID NO: 873609 - DNA, 15 bp, Homo sapiens
attctatttctctta

SEQ ID NO: 873610 - DNA, 15 bp, Homo sapiens
ttctatttctcttac

SEQ ID NO: 873611 - DNA, 15 bp, Homo sapiens
tctatttctcttact

SEQ ID NO: 873612 - DNA, 15 bp, Homo sapiens
ctatttctcttactt

SEQ ID NO: 873613 - DNA, 15 bp, Homo sapiens
tatttctcttacttt

SEQ ID NO: 873614 - DNA, 15 bp, Homo sapiens
atttctcttactttt

SEQ ID NO: 873615 - DNA, 15 bp, Homo sapiens
tttctcttacttttt

SEQ ID NO: 873616 - DNA, 15 bp, Homo sapiens
ttctcttactttttc

SEQ ID NO: 873617 - DNA, 15 bp, Homo sapiens
tctcttactttttcc

SEQ ID NO: 873618 - DNA, 15 bp, Homo sapiens
ctcttactttttcca

SEQ ID NO: 873619 - DNA, 15 bp, Homo sapiens
tcttactttttccac

SEQ ID NO: 873620 - DNA, 15 bp, Homo sapiens
cttactttttccacc

SEQ ID NO: 873621 - DNA, 15 bp, Homo sapiens
ttactttttccacca

SEQ ID NO: 873622 - DNA, 15 bp, Homo sapiens
tactttttccaccac

SEQ ID NO: 873623 - DNA, 15 bp, Homo sapiens
actttttccaccaca

SEQ ID NO: 873624 - DNA, 15 bp, Homo sapiens
ctttttccaccacat

SEQ ID NO: 873625 - DNA, 15 bp, Homo sapiens
tttttccaccacatc

SEQ ID NO: 873626 - DNA, 15 bp, Homo sapiens
ttttccaccacatct

SEQ ID NO: 873627 - DNA, 15 bp, Homo sapiens
tttccaccacatctg

SEQ ID NO: 873628 - DNA, 15 bp, Homo sapiens
ttccaccacatctgc

SEQ ID NO: 873629 - DNA, 15 bp, Homo sapiens
tccaccacatctgct

SEQ ID NO: 873630 - DNA, 15 bp, Homo sapiens
ccaccacatctgctg

SEQ ID NO: 873631 - DNA, 15 bp, Homo sapiens
caccacatctgctgt

SEQ ID NO: 873632 - DNA, 15 bp, Homo sapiens
accacatctgctgtt

SEQ ID NO: 873633 - DNA, 15 bp, Homo sapiens
ccacatctgctgtta

SEQ ID NO: 873634 - DNA, 15 bp, Homo sapiens
cacatctgctgttac

SEQ ID NO: 873635 - DNA, 15 bp, Homo sapiens
acatctgctgttact

SEQ ID NO: 873636 - DNA, 15 bp, Homo sapiens
catctgctgttactt

SEQ ID NO: 873637 - DNA, 15 bp, Homo sapiens
atctgctgttacttc

SEQ ID NO: 873638 - DNA, 15 bp, Homo sapiens
tctgctgttacttcc

SEQ ID NO: 873639 - DNA, 15 bp, Homo sapiens
ctgctgttacttcct

SEQ ID NO: 873640 - DNA, 15 bp, Homo sapiens
tgctgttacttcctc

SEQ ID NO: 873641 - DNA, 15 bp, Homo sapiens
gctgttacttcctcc

SEQ ID NO: 873642 - DNA, 15 bp, Homo sapiens
ctgttacttcctcca

SEQ ID NO: 873643 - DNA, 15 bp, Homo sapiens
tgttacttcctccac

SEQ ID NO: 873644 - DNA, 15 bp, Homo sapiens
gttacttcctccact

SEQ ID NO: 873645 - DNA, 15 bp, Homo sapiens
ttacttcctccactg

SEQ ID NO: 873646 - DNA, 15 bp, Homo sapiens
tacttcctccactga

SEQ ID NO: 873647 - DNA, 15 bp, Homo sapiens
acttcctccactgaa

SEQ ID NO: 873648 - DNA, 15 bp, Homo sapiens
cttcctccactgaag

SEQ ID NO: 873649 - DNA, 15 bp, Homo sapiens
ttcctccactgaagt

SEQ ID NO: 873650 - DNA, 15 bp, Homo sapiens
tcctccactgaagtc

SEQ ID NO: 873651 - DNA, 15 bp, Homo sapiens
cctccactgaagtct

SEQ ID NO: 873652 - DNA, 15 bp, Homo sapiens
ctccactgaagtctt

SEQ ID NO: 873653 - DNA, 15 bp, Homo sapiens
tccactgaagtctta

SEQ ID NO: 873654 - DNA, 15 bp, Homo sapiens
ccactgaagtcttaa

SEQ ID NO: 873655 - DNA, 15 bp, Homo sapiens
cactgaagtcttaaa

SEQ ID NO: 873656 - DNA, 15 bp, Homo sapiens
actgaagtcttaaag

SEQ ID NO: 873657 - DNA, 15 bp, Homo sapiens
ctgaagtcttaaagc

SEQ ID NO: 873658 - DNA, 15 bp, Homo sapiens
tgaagtcttaaagcc

SEQ ID NO: 873659 - DNA, 15 bp, Homo sapiens
gaagtcttaaagccc

SEQ ID NO: 873660 - DNA, 15 bp, Homo sapiens
aagtcttaaagccct

SEQ ID NO: 873661 - DNA, 15 bp, Homo sapiens
agtcttaaagccctc

SEQ ID NO: 873662 - DNA, 15 bp, Homo sapiens
gtcttaaagccctca

SEQ ID NO: 873663 - DNA, 15 bp, Homo sapiens
tcttaaagccctcaa

SEQ ID NO: 873664 - DNA, 15 bp, Homo sapiens
cttaaagccctcaaa

SEQ ID NO: 873665 - DNA, 15 bp, Homo sapiens
ttaaagccctcaaag

SEQ ID NO: 873666 - DNA, 15 bp, Homo sapiens
taaagccctcaaagt

SEQ ID NO: 873667 - DNA, 15 bp, Homo sapiens
aaagccctcaaagtc

SEQ ID NO: 873668 - DNA, 15 bp, Homo sapiens
aagccctcaaagtca

SEQ ID NO: 873669 - DNA, 15 bp, Homo sapiens
agccctcaaagtcat

SEQ ID NO: 873670 - DNA, 15 bp, Homo sapiens
gccctcaaagtcatc

SEQ ID NO: 873671 - DNA, 15 bp, Homo sapiens
ccctcaaagtcatcc

SEQ ID NO: 873672 - DNA, 15 bp, Homo sapiens
cctcaaagtcatcca

SEQ ID NO: 873673 - DNA, 15 bp, Homo sapiens
ctcaaagtcatccat

SEQ ID NO: 873674 - DNA, 15 bp, Homo sapiens
tcaaagtcatccatg

SEQ ID NO: 873675 - DNA, 15 bp, Homo sapiens
caaagtcatccatga

SEQ ID NO: 873676 - DNA, 15 bp, Homo sapiens
aaagtcatccatgag

SEQ ID NO: 873677 - DNA, 15 bp, Homo sapiens
aagtcatccatgagg

SEQ ID NO: 873678 - DNA, 15 bp, Homo sapiens
agtcatccatgaggg

SEQ ID NO: 873679 - DNA, 15 bp, Homo sapiens
gtcatccatgagggt

SEQ ID NO: 873680 - DNA, 15 bp, Homo sapiens
tcatccatgagggtt

SEQ ID NO: 873681 - DNA, 15 bp, Homo sapiens
catccatgagggttg

SEQ ID NO: 873682 - DNA, 15 bp, Homo sapiens
atccatgagggttgg

SEQ ID NO: 873683 - DNA, 15 bp, Homo sapiens
tccatgagggttgga

SEQ ID NO: 873684 - DNA, 15 bp, Homo sapiens
ccatgagggttggaa

SEQ ID NO: 873685 - DNA, 15 bp, Homo sapiens
catgagggttggaat

SEQ ID NO: 873686 - DNA, 15 bp, Homo sapiens
atgagggttggaatt

SEQ ID NO: 873687 - DNA, 15 bp, Homo sapiens
tgagggttggaattc

SEQ ID NO: 873688 - DNA, 15 bp, Homo sapiens
gagggttggaattca

SEQ ID NO: 873689 - DNA, 15 bp, Homo sapiens
agggttggaattcac

SEQ ID NO: 873690 - DNA, 15 bp, Homo sapiens
gggttggaattcact

SEQ ID NO: 873691 - DNA, 15 bp, Homo sapiens
ggttggaattcactt

SEQ ID NO: 873692 - DNA, 15 bp, Homo sapiens
gttggaattcacttc

SEQ ID NO: 873693 - DNA, 15 bp, Homo sapiens
ttggaattcacttct

SEQ ID NO: 873694 - DNA, 15 bp, Homo sapiens
tggaattcacttctt

SEQ ID NO: 873695 - DNA, 15 bp, Homo sapiens
ggaattcacttcttc

SEQ ID NO: 873696 - DNA, 15 bp, Homo sapiens
gaattcacttcttcc

SEQ ID NO: 873697 - DNA, 15 bp, Homo sapiens
aattcacttcttcca

SEQ ID NO: 873698 - DNA, 15 bp, Homo sapiens
attcacttcttccaa

SEQ ID NO: 873699 - DNA, 15 bp, Homo sapiens
ttcacttcttccaaa

SEQ ID NO: 873700 - DNA, 15 bp, Homo sapiens
tcacttcttccaaac

SEQ ID NO: 873701 - DNA, 15 bp, Homo sapiens
cacttcttccaaact

SEQ ID NO: 873702 - DNA, 15 bp, Homo sapiens
acttcttccaaactc

SEQ ID NO: 873703 - DNA, 15 bp, Homo sapiens
cttcttccaaactcc

SEQ ID NO: 873704 - DNA, 15 bp, Homo sapiens
ttcttccaaactcct

SEQ ID NO: 873705 - DNA, 15 bp, Homo sapiens
tcttccaaactcctg

SEQ ID NO: 873706 - DNA, 15 bp, Homo sapiens
cttccaaactcctgt

SEQ ID NO: 873707 - DNA, 15 bp, Homo sapiens
ttccaaactcctgtt

SEQ ID NO: 873708 - DNA, 15 bp, Homo sapiens
tccaaactcctgttg

SEQ ID NO: 873709 - DNA, 15 bp, Homo sapiens
ccaaactcctgttga

SEQ ID NO: 873710 - DNA, 15 bp, Homo sapiens
caaactcctgttgat

SEQ ID NO: 873711 - DNA, 15 bp, Homo sapiens
aaactcctgttgata

SEQ ID NO: 873712 - DNA, 15 bp, Homo sapiens
aactcctgttgatat

SEQ ID NO: 873713 - DNA, 15 bp, Homo sapiens
actcctgttgatatt

SEQ ID NO: 873714 - DNA, 15 bp, Homo sapiens
ctcctgttgatattt

SEQ ID NO: 873715 - DNA, 15 bp, Homo sapiens
tcctgttgatatttt

SEQ ID NO: 873716 - DNA, 15 bp, Homo sapiens
cctgttgatattttc

SEQ ID NO: 873717 - DNA, 15 bp, Homo sapiens
ctgttgatattttca

SEQ ID NO: 873718 - DNA, 15 bp, Homo sapiens
tgttgatattttcac

SEQ ID NO: 873719 - DNA, 15 bp, Homo sapiens
gttgatattttcacc

SEQ ID NO: 873720 - DNA, 15 bp, Homo sapiens
ttgatattttcacct

SEQ ID NO: 873721 - DNA, 15 bp, Homo sapiens
tgatattttcacctc

SEQ ID NO: 873722 - DNA, 15 bp, Homo sapiens
gatattttcacctcc

SEQ ID NO: 873723 - DNA, 15 bp, Homo sapiens
atattttcacctcct

SEQ ID NO: 873724 - DNA, 15 bp, Homo sapiens
tattttcacctcctc

SEQ ID NO: 873725 - DNA, 15 bp, Homo sapiens
attttcacctcctcc

SEQ ID NO: 873726 - DNA, 15 bp, Homo sapiens
ttttcacctcctccc

SEQ ID NO: 873727 - DNA, 15 bp, Homo sapiens
tttcacctcctccca

SEQ ID NO: 873728 - DNA, 15 bp, Homo sapiens
ttcacctcctcccat

SEQ ID NO: 873729 - DNA, 15 bp, Homo sapiens
tcacctcctcccatg

SEQ ID NO: 873730 - DNA, 15 bp, Homo sapiens
cacctcctcccatga

SEQ ID NO: 873731 - DNA, 15 bp, Homo sapiens
acctcctcccatgaa

SEQ ID NO: 873732 - DNA, 15 bp, Homo sapiens
cctcctcccatgaat

SEQ ID NO: 873733 - DNA, 15 bp, Homo sapiens
ctcctcccatgaatc

SEQ ID NO: 873734 - DNA, 15 bp, Homo sapiens
tcctcccatgaatca

SEQ ID NO: 873735 - DNA, 15 bp, Homo sapiens
cctcccatgaatcac

SEQ ID NO: 873736 - DNA, 15 bp, Homo sapiens
ctcccatgaatcacg

SEQ ID NO: 873737 - DNA, 15 bp, Homo sapiens
tcccatgaatcacga

SEQ ID NO: 873738 - DNA, 15 bp, Homo sapiens
cccatgaatcacgaa

SEQ ID NO: 873739 - DNA, 15 bp, Homo sapiens
ccatgaatcacgaat

SEQ ID NO: 873740 - DNA, 15 bp, Homo sapiens
catgaatcacgaatg

SEQ ID NO: 873741 - DNA, 15 bp, Homo sapiens
atgaatcacgaatgt

SEQ ID NO: 873742 - DNA, 15 bp, Homo sapiens
tgaatcacgaatgtt

SEQ ID NO: 873743 - DNA, 15 bp, Homo sapiens
gaatcacgaatgttc

SEQ ID NO: 873744 - DNA, 15 bp, Homo sapiens
aatcacgaatgttct

SEQ ID NO: 873745 - DNA, 15 bp, Homo sapiens
atcacgaatgttctt

SEQ ID NO: 873746 - DNA, 15 bp, Homo sapiens
tcacgaatgttctta

SEQ ID NO: 873747 - DNA, 15 bp, Homo sapiens
cacgaatgttcttat

SEQ ID NO: 873748 - DNA, 15 bp, Homo sapiens
acgaatgttcttatt

SEQ ID NO: 873749 - DNA, 15 bp, Homo sapiens
cgaatgttcttatta

SEQ ID NO: 873750 - DNA, 15 bp, Homo sapiens
gaatgttcttattag

SEQ ID NO: 873751 - DNA, 15 bp, Homo sapiens
aatgttcttattagc

SEQ ID NO: 873752 - DNA, 15 bp, Homo sapiens
atgttcttattagca

SEQ ID NO: 873753 - DNA, 15 bp, Homo sapiens
tgttcttattagcat

SEQ ID NO: 873754 - DNA, 15 bp, Homo sapiens
gttcttattagcatc

SEQ ID NO: 873755 - DNA, 15 bp, Homo sapiens
ttcttattagcatct

SEQ ID NO: 873756 - DNA, 15 bp, Homo sapiens
tcttattagcatcta

SEQ ID NO: 873757 - DNA, 15 bp, Homo sapiens
cttattagcatctag

SEQ ID NO: 873758 - DNA, 15 bp, Homo sapiens
ttattagcatctaga

SEQ ID NO: 873759 - DNA, 15 bp, Homo sapiens
tattagcatctagaa

SEQ ID NO: 873760 - DNA, 15 bp, Homo sapiens
attagcatctagaat

SEQ ID NO: 873761 - DNA, 15 bp, Homo sapiens
ttagcatctagaatg

SEQ ID NO: 873762 - DNA, 15 bp, Homo sapiens
tagcatctagaatgg

SEQ ID NO: 873763 - DNA, 15 bp, Homo sapiens
agcatctagaatggc

SEQ ID NO: 873764 - DNA, 15 bp, Homo sapiens
gcatctagaatggcg

SEQ ID NO: 873765 - DNA, 15 bp, Homo sapiens
catctagaatggcga

SEQ ID NO: 873766 - DNA, 15 bp, Homo sapiens
atctagaatggcgat

SEQ ID NO: 873767 - DNA, 15 bp, Homo sapiens
tctagaatggcgatt

SEQ ID NO: 873768 - DNA, 15 bp, Homo sapiens
ctagaatggcgattc

SEQ ID NO: 873769 - DNA, 15 bp, Homo sapiens
tagaatggcgattct

SEQ ID NO: 873770 - DNA, 15 bp, Homo sapiens
agaatggcgattctt

SEQ ID NO: 873771 - DNA, 15 bp, Homo sapiens
gaatggcgattcttt

SEQ ID NO: 873772 - DNA, 15 bp, Homo sapiens
aatggcgattctttt

SEQ ID NO: 873773 - DNA, 15 bp, Homo sapiens
atggcgattcttttt

SEQ ID NO: 873774 - DNA, 15 bp, Homo sapiens
tggcgattctttttc

SEQ ID NO: 873775 - DNA, 15 bp, Homo sapiens
ggcgattctttttca

SEQ ID NO: 873776 - DNA, 15 bp, Homo sapiens
gcgattctttttcag

SEQ ID NO: 873777 - DNA, 15 bp, Homo sapiens
cgattctttttcaga

SEQ ID NO: 873778 - DNA, 15 bp, Homo sapiens
gattctttttcagaa

SEQ ID NO: 873779 - DNA, 15 bp, Homo sapiens
attctttttcagaag

SEQ ID NO: 873780 - DNA, 15 bp, Homo sapiens
ttctttttcagaagt

SEQ ID NO: 873781 - DNA, 15 bp, Homo sapiens
tctttttcagaagtt

SEQ ID NO: 873782 - DNA, 15 bp, Homo sapiens
ctttttcagaagttt

SEQ ID NO: 873783 - DNA, 15 bp, Homo sapiens
tttttcagaagtttt

SEQ ID NO: 873784 - DNA, 15 bp, Homo sapiens
ttttcagaagttttt

SEQ ID NO: 873785 - DNA, 15 bp, Homo sapiens
tttcagaagtttttc

SEQ ID NO: 873786 - DNA, 15 bp, Homo sapiens
ttcagaagtttttca

SEQ ID NO: 873787 - DNA, 15 bp, Homo sapiens
tcagaagtttttcaa

SEQ ID NO: 873788 - DNA, 15 bp, Homo sapiens
cagaagtttttcaat

SEQ ID NO: 873789 - DNA, 15 bp, Homo sapiens
agaagtttttcaatt

SEQ ID NO: 873790 - DNA, 15 bp, Homo sapiens
gaagtttttcaattt

SEQ ID NO: 873791 - DNA, 15 bp, Homo sapiens
aagtttttcaattta

SEQ ID NO: 873792 - DNA, 15 bp, Homo sapiens
gtttttcaatttatt

SEQ ID NO: 873793 - DNA, 15 bp, Homo sapiens
tttttcaatttattt

SEQ ID NO: 873794 - DNA, 15 bp, Homo sapiens
ttttcaatttatttt

SEQ ID NO: 873795 - DNA, 15 bp, Homo sapiens
tttcaatttattttg

SEQ ID NO: 873796 - DNA, 15 bp, Homo sapiens
ttcaatttattttgc

SEQ ID NO: 873797 - DNA, 15 bp, Homo sapiens
tcaatttattttgcc

SEQ ID NO: 873798 - DNA, 15 bp, Homo sapiens
caatttattttgccc

SEQ ID NO: 873799 - DNA, 15 bp, Homo sapiens
aatttattttgccca

SEQ ID NO: 873800 - DNA, 15 bp, Homo sapiens
atttattttgcccag

SEQ ID NO: 873801 - DNA, 15 bp, Homo sapiens
tttattttgcccaga

SEQ ID NO: 873802 - DNA, 15 bp, Homo sapiens
ttattttgcccagat

SEQ ID NO: 873803 - DNA, 15 bp, Homo sapiens
tattttgcccagatt

SEQ ID NO: 873804 - DNA, 15 bp, Homo sapiens
attttgcccagattc

SEQ ID NO: 873805 - DNA, 15 bp, Homo sapiens
ttttgcccagattca

SEQ ID NO: 873806 - DNA, 15 bp, Homo sapiens
tttgcccagattcat

SEQ ID NO: 873807 - DNA, 15 bp, Homo sapiens
ttgcccagattcatc

SEQ ID NO: 873808 - DNA, 15 bp, Homo sapiens
tgcccagattcatca

SEQ ID NO: 873809 - DNA, 15 bp, Homo sapiens
gcccagattcatcaa

SEQ ID NO: 873810 - DNA, 15 bp, Homo sapiens
cccagattcatcaaa

SEQ ID NO: 873811 - DNA, 15 bp, Homo sapiens
ccagattcatcaaag

SEQ ID NO: 873812 - DNA, 15 bp, Homo sapiens
cagattcatcaaagg

SEQ ID NO: 873813 - DNA, 15 bp, Homo sapiens
agattcatcaaagga

SEQ ID NO: 873814 - DNA, 15 bp, Homo sapiens
gattcatcaaaggaa

SEQ ID NO: 873815 - DNA, 15 bp, Homo sapiens
attcatcaaaggaat

SEQ ID NO: 873816 - DNA, 15 bp, Homo sapiens
ttcatcaaaggaatc

SEQ ID NO: 873817 - DNA, 15 bp, Homo sapiens
tcatcaaaggaatca

SEQ ID NO: 873818 - DNA, 15 bp, Homo sapiens
catcaaaggaatcac

SEQ ID NO: 873819 - DNA, 15 bp, Homo sapiens
atcaaaggaatcact

SEQ ID NO: 873820 - DNA, 15 bp, Homo sapiens
tcaaaggaatcacta

SEQ ID NO: 873821 - DNA, 15 bp, Homo sapiens
caaaggaatcactat

SEQ ID NO: 873822 - DNA, 15 bp, Homo sapiens
aaaggaatcactatg

SEQ ID NO: 873823 - DNA, 15 bp, Homo sapiens
aaggaatcactatgg

SEQ ID NO: 873824 - DNA, 15 bp, Homo sapiens
aggaatcactatggc

SEQ ID NO: 873825 - DNA, 15 bp, Homo sapiens
ggaatcactatggca

SEQ ID NO: 873826 - DNA, 15 bp, Homo sapiens
gaatcactatggcag

SEQ ID NO: 873827 - DNA, 15 bp, Homo sapiens
aatcactatggcagt

SEQ ID NO: 873828 - DNA, 15 bp, Homo sapiens
atcactatggcagtg

SEQ ID NO: 873829 - DNA, 15 bp, Homo sapiens
tcactatggcagtga

SEQ ID NO: 873830 - DNA, 15 bp, Homo sapiens
cactatggcagtgat

SEQ ID NO: 873831 - DNA, 15 bp, Homo sapiens
actatggcagtgata

SEQ ID NO: 873832 - DNA, 15 bp, Homo sapiens
ctatggcagtgatag

SEQ ID NO: 873833 - DNA, 15 bp, Homo sapiens
tatggcagtgatagc

SEQ ID NO: 873834 - DNA, 15 bp, Homo sapiens
atggcagtgatagct

SEQ ID NO: 873835 - DNA, 15 bp, Homo sapiens
tggcagtgatagctt

SEQ ID NO: 873836 - DNA, 15 bp, Homo sapiens
ggcagtgatagctta

SEQ ID NO: 873837 - DNA, 15 bp, Homo sapiens
gcagtgatagcttat

SEQ ID NO: 873838 - DNA, 15 bp, Homo sapiens
cagtgatagcttatt

SEQ ID NO: 873839 - DNA, 15 bp, Homo sapiens
agtgatagcttatta

SEQ ID NO: 873840 - DNA, 15 bp, Homo sapiens
gtgatagcttattaa

SEQ ID NO: 873841 - DNA, 15 bp, Homo sapiens
tgatagcttattaaa

SEQ ID NO: 873842 - DNA, 15 bp, Homo sapiens
gatagcttattaaat

SEQ ID NO: 873843 - DNA, 15 bp, Homo sapiens
atagcttattaaata

SEQ ID NO: 873844 - DNA, 15 bp, Homo sapiens
tagcttattaaatat

SEQ ID NO: 873845 - DNA, 15 bp, Homo sapiens
agcttattaaatata

SEQ ID NO: 873846 - DNA, 15 bp, Homo sapiens
gcttattaaatatat

SEQ ID NO: 873847 - DNA, 15 bp, Homo sapiens
cttattaaatatatt

SEQ ID NO: 873848 - DNA, 15 bp, Homo sapiens
ttattaaatatattt

SEQ ID NO: 873849 - DNA, 15 bp, Homo sapiens
tattaaatatatttc

SEQ ID NO: 873850 - DNA, 15 bp, Homo sapiens
attaaatatatttct

SEQ ID NO: 873851 - DNA, 15 bp, Homo sapiens
ttaaatatatttctt

SEQ ID NO: 873852 - DNA, 15 bp, Homo sapiens
taaatatatttctta

SEQ ID NO: 873853 - DNA, 15 bp, Homo sapiens
aaatatatttcttaa

SEQ ID NO: 873854 - DNA, 15 bp, Homo sapiens
aatatatttcttaag

SEQ ID NO: 873855 - DNA, 15 bp, Homo sapiens
atatatttcttaagt

SEQ ID NO: 873856 - DNA, 15 bp, Homo sapiens
tatatttcttaagta

SEQ ID NO: 873857 - DNA, 15 bp, Homo sapiens
atatttcttaagtaa

SEQ ID NO: 873858 - DNA, 15 bp, Homo sapiens
tatttcttaagtaat

SEQ ID NO: 873859 - DNA, 15 bp, Homo sapiens
atttcttaagtaata

SEQ ID NO: 873860 - DNA, 15 bp, Homo sapiens
tttcttaagtaataa

SEQ ID NO: 873861 - DNA, 15 bp, Homo sapiens
ttcttaagtaataag

SEQ ID NO: 873862 - DNA, 15 bp, Homo sapiens
tcttaagtaataagt

SEQ ID NO: 873863 - DNA, 15 bp, Homo sapiens
cttaagtaataagtc

SEQ ID NO: 873864 - DNA, 15 bp, Homo sapiens
ttaagtaataagtct

SEQ ID NO: 873865 - DNA, 15 bp, Homo sapiens
taagtaataagtctt

SEQ ID NO: 873866 - DNA, 15 bp, Homo sapiens
aagtaataagtcttg

SEQ ID NO: 873867 - DNA, 15 bp, Homo sapiens
agtaataagtcttga

SEQ ID NO: 873868 - DNA, 15 bp, Homo sapiens
gtaataagtcttgaa

SEQ ID NO: 873869 - DNA, 15 bp, Homo sapiens
taataagtcttgaaa

SEQ ID NO: 873870 - DNA, 15 bp, Homo sapiens
aataagtcttgaaag

SEQ ID NO: 873871 - DNA, 15 bp, Homo sapiens
ataagtcttgaaagt

SEQ ID NO: 873872 - DNA, 15 bp, Homo sapiens
taagtcttgaaagtc

SEQ ID NO: 873873 - DNA, 15 bp, Homo sapiens
aagtcttgaaagtca

SEQ ID NO: 873874 - DNA, 15 bp, Homo sapiens
agtcttgaaagtcaa

SEQ ID NO: 873875 - DNA, 15 bp, Homo sapiens
gtcttgaaagtcaaa

SEQ ID NO: 873876 - DNA, 15 bp, Homo sapiens
tcttgaaagtcaaaa

SEQ ID NO: 873877 - DNA, 15 bp, Homo sapiens
cttgaaagtcaaaat

SEQ ID NO: 873878 - DNA, 15 bp, Homo sapiens
ttgaaagtcaaaatt

SEQ ID NO: 873879 - DNA, 15 bp, Homo sapiens
tgaaagtcaaaatta

SEQ ID NO: 873880 - DNA, 15 bp, Homo sapiens
gaaagtcaaaattac

SEQ ID NO: 873881 - DNA, 15 bp, Homo sapiens
aaagtcaaaattacc

SEQ ID NO: 873882 - DNA, 15 bp, Homo sapiens
aagtcaaaattaccc

SEQ ID NO: 873883 - DNA, 15 bp, Homo sapiens
agtcaaaattacccc

SEQ ID NO: 873884 - DNA, 15 bp, Homo sapiens
gtcaaaattacccct

SEQ ID NO: 873885 - DNA, 15 bp, Homo sapiens
tcaaaattacccctt

SEQ ID NO: 873886 - DNA, 15 bp, Homo sapiens
caaaattaccccttg

SEQ ID NO: 873887 - DNA, 15 bp, Homo sapiens
aaaattaccccttga

SEQ ID NO: 873888 - DNA, 15 bp, Homo sapiens
aaattaccccttgat

SEQ ID NO: 873889 - DNA, 15 bp, Homo sapiens
aattaccccttgatc

SEQ ID NO: 873890 - DNA, 15 bp, Homo sapiens
attaccccttgatcc

SEQ ID NO: 873891 - DNA, 15 bp, Homo sapiens
ttaccccttgatcca

SEQ ID NO: 873892 - DNA, 15 bp, Homo sapiens
taccccttgatccat

SEQ ID NO: 873893 - DNA, 15 bp, Homo sapiens
accccttgatccatg

SEQ ID NO: 873894 - DNA, 15 bp, Homo sapiens
ccccttgatccatgg

SEQ ID NO: 873895 - DNA, 15 bp, Homo sapiens
cccttgatccatggg

SEQ ID NO: 873896 - DNA, 15 bp, Homo sapiens
ccttgatccatgggc

SEQ ID NO: 873897 - DNA, 15 bp, Homo sapiens
cttgatccatgggct

SEQ ID NO: 873898 - DNA, 15 bp, Homo sapiens
ttgatccatgggcta

SEQ ID NO: 873899 - DNA, 15 bp, Homo sapiens
tgatccatgggctac

SEQ ID NO: 873900 - DNA, 15 bp, Homo sapiens
gatccatgggctaca

SEQ ID NO: 873901 - DNA, 15 bp, Homo sapiens
atccatgggctacag

SEQ ID NO: 873902 - DNA, 15 bp, Homo sapiens
tccatgggctacaga

SEQ ID NO: 873903 - DNA, 15 bp, Homo sapiens
ccatgggctacagaa

SEQ ID NO: 873904 - DNA, 15 bp, Homo sapiens
catgggctacagaat

SEQ ID NO: 873905 - DNA, 15 bp, Homo sapiens
atgggctacagaatg

SEQ ID NO: 873906 - DNA, 15 bp, Homo sapiens
tgggctacagaatgg

SEQ ID NO: 873907 - DNA, 15 bp, Homo sapiens
gggctacagaatggt

SEQ ID NO: 873908 - DNA, 15 bp, Homo sapiens
ggctacagaatggta

SEQ ID NO: 873909 - DNA, 15 bp, Homo sapiens
gctacagaatggtag

SEQ ID NO: 873910 - DNA, 15 bp, Homo sapiens
ctacagaatggtagt

SEQ ID NO: 873911 - DNA, 15 bp, Homo sapiens
tacagaatggtagtt

SEQ ID NO: 873912 - DNA, 15 bp, Homo sapiens
acagaatggtagttg

SEQ ID NO: 873913 - DNA, 15 bp, Homo sapiens
cagaatggtagttgt

SEQ ID NO: 873914 - DNA, 15 bp, Homo sapiens
agaatggtagttgtt

SEQ ID NO: 873915 - DNA, 15 bp, Homo sapiens
gaatggtagttgttc

SEQ ID NO: 873916 - DNA, 15 bp, Homo sapiens
aatggtagttgttct

SEQ ID NO: 873917 - DNA, 15 bp, Homo sapiens
atggtagttgttcta

SEQ ID NO: 873918 - DNA, 15 bp, Homo sapiens
tggtagttgttctag

SEQ ID NO: 873919 - DNA, 15 bp, Homo sapiens
ggtagttgttctagc

SEQ ID NO: 873920 - DNA, 15 bp, Homo sapiens
gtagttgttctagca

SEQ ID NO: 873921 - DNA, 15 bp, Homo sapiens
tagttgttctagcag

SEQ ID NO: 873922 - DNA, 15 bp, Homo sapiens
agttgttctagcagg

SEQ ID NO: 873923 - DNA, 15 bp, Homo sapiens
gttgttctagcaggt

SEQ ID NO: 873924 - DNA, 15 bp, Homo sapiens
ttgttctagcaggta

SEQ ID NO: 873925 - DNA, 15 bp, Homo sapiens
tgttctagcaggtat

SEQ ID NO: 873926 - DNA, 15 bp, Homo sapiens
gttctagcaggtatg

SEQ ID NO: 873927 - DNA, 15 bp, Homo sapiens
ttctagcaggtatgg

SEQ ID NO: 873928 - DNA, 15 bp, Homo sapiens
tctagcaggtatgga

SEQ ID NO: 873929 - DNA, 15 bp, Homo sapiens
ctagcaggtatggaa

SEQ ID NO: 873930 - DNA, 15 bp, Homo sapiens
tagcaggtatggaaa

SEQ ID NO: 873931 - DNA, 15 bp, Homo sapiens
agcaggtatggaaac

SEQ ID NO: 873932 - DNA, 15 bp, Homo sapiens
gcaggtatggaaaca

SEQ ID NO: 873933 - DNA, 15 bp, Homo sapiens
caggtatggaaacaa

SEQ ID NO: 873934 - DNA, 15 bp, Homo sapiens
aggtatggaaacaac

SEQ ID NO: 873935 - DNA, 15 bp, Homo sapiens
ggtatggaaacaaca

SEQ ID NO: 873936 - DNA, 15 bp, Homo sapiens
gtatggaaacaacat

SEQ ID NO: 873937 - DNA, 15 bp, Homo sapiens
tatggaaacaacatt

SEQ ID NO: 873938 - DNA, 15 bp, Homo sapiens
atggaaacaacattc

SEQ ID NO: 873939 - DNA, 15 bp, Homo sapiens
tggaaacaacattca

SEQ ID NO: 873940 - DNA, 15 bp, Homo sapiens
ggaaacaacattcat

SEQ ID NO: 873941 - DNA, 15 bp, Homo sapiens
gaaacaacattcatc

SEQ ID NO: 873942 - DNA, 15 bp, Homo sapiens
aaacaacattcatct

SEQ ID NO: 873943 - DNA, 15 bp, Homo sapiens
aacaacattcatctt

SEQ ID NO: 873944 - DNA, 15 bp, Homo sapiens
acaacattcatctta

SEQ ID NO: 873945 - DNA, 15 bp, Homo sapiens
caacattcatcttat

SEQ ID NO: 873946 - DNA, 15 bp, Homo sapiens
aacattcatcttata

SEQ ID NO: 873947 - DNA, 15 bp, Homo sapiens
acattcatcttatac

SEQ ID NO: 873948 - DNA, 15 bp, Homo sapiens
cattcatcttataca

SEQ ID NO: 873949 - DNA, 15 bp, Homo sapiens
attcatcttatacat

SEQ ID NO: 873950 - DNA, 15 bp, Homo sapiens
ttcatcttatacatc

SEQ ID NO: 873951 - DNA, 15 bp, Homo sapiens
tcatcttatacatct

SEQ ID NO: 873952 - DNA, 15 bp, Homo sapiens
catcttatacatctc

SEQ ID NO: 873953 - DNA, 15 bp, Homo sapiens
atcttatacatctcc

SEQ ID NO: 873954 - DNA, 15 bp, Homo sapiens
tcttatacatctcca

SEQ ID NO: 873955 - DNA, 15 bp, Homo sapiens
cttatacatctccat

SEQ ID NO: 873956 - DNA, 15 bp, Homo sapiens
ttatacatctccatc

SEQ ID NO: 873957 - DNA, 15 bp, Homo sapiens
tatacatctccatca

SEQ ID NO: 873958 - DNA, 15 bp, Homo sapiens
atacatctccatcag

SEQ ID NO: 873959 - DNA, 15 bp, Homo sapiens
tacatctccatcaga

SEQ ID NO: 873960 - DNA, 15 bp, Homo sapiens
acatctccatcagag

SEQ ID NO: 873961 - DNA, 15 bp, Homo sapiens
catctccatcagagc

SEQ ID NO: 873962 - DNA, 15 bp, Homo sapiens
atctccatcagagct

SEQ ID NO: 873963 - DNA, 15 bp, Homo sapiens
tctccatcagagctc

SEQ ID NO: 873964 - DNA, 15 bp, Homo sapiens
ctccatcagagctct

SEQ ID NO: 873965 - DNA, 15 bp, Homo sapiens
tccatcagagctctt

SEQ ID NO: 873966 - DNA, 15 bp, Homo sapiens
ccatcagagctcttg

SEQ ID NO: 873967 - DNA, 15 bp, Homo sapiens
catcagagctcttga

SEQ ID NO: 873968 - DNA, 15 bp, Homo sapiens
atcagagctcttgaa

SEQ ID NO: 873969 - DNA, 15 bp, Homo sapiens
tcagagctcttgaat

SEQ ID NO: 873970 - DNA, 15 bp, Homo sapiens
cagagctcttgaata

SEQ ID NO: 873971 - DNA, 15 bp, Homo sapiens
agagctcttgaataa

SEQ ID NO: 873972 - DNA, 15 bp, Homo sapiens
gagctcttgaataat

SEQ ID NO: 873973 - DNA, 15 bp, Homo sapiens
agctcttgaataatt

SEQ ID NO: 873974 - DNA, 15 bp, Homo sapiens
gctcttgaataattg

SEQ ID NO: 873975 - DNA, 15 bp, Homo sapiens
ctcttgaataattgg

SEQ ID NO: 873976 - DNA, 15 bp, Homo sapiens
tcttgaataattggg

SEQ ID NO: 873977 - DNA, 15 bp, Homo sapiens
cttgaataattgggt

SEQ ID NO: 873978 - DNA, 15 bp, Homo sapiens
ttgaataattgggtg

SEQ ID NO: 873979 - DNA, 15 bp, Homo sapiens
tgaataattgggtgc

SEQ ID NO: 873980 - DNA, 15 bp, Homo sapiens
gaataattgggtgcg

SEQ ID NO: 873981 - DNA, 15 bp, Homo sapiens
aataattgggtgcgt

SEQ ID NO: 873982 - DNA, 15 bp, Homo sapiens
ataattgggtgcgtt

SEQ ID NO: 873983 - DNA, 15 bp, Homo sapiens
taattgggtgcgtta

SEQ ID NO: 873984 - DNA, 15 bp, Homo sapiens
aattgggtgcgttat

SEQ ID NO: 873985 - DNA, 15 bp, Homo sapiens
attgggtgcgttatc

SEQ ID NO: 873986 - DNA, 15 bp, Homo sapiens
ttgggtgcgttatca

SEQ ID NO: 873987 - DNA, 15 bp, Homo sapiens
tgggtgcgttatcag

SEQ ID NO: 873988 - DNA, 15 bp, Homo sapiens
gggtgcgttatcagt

SEQ ID NO: 873989 - DNA, 15 bp, Homo sapiens
ggtgcgttatcagtg

SEQ ID NO: 873990 - DNA, 15 bp, Homo sapiens
gtgcgttatcagtga

SEQ ID NO: 873991 - DNA, 15 bp, Homo sapiens
tgcgttatcagtgag

SEQ ID NO: 873992 - DNA, 15 bp, Homo sapiens
gcgttatcagtgagc

SEQ ID NO: 873993 - DNA, 15 bp, Homo sapiens
cgttatcagtgagca

SEQ ID NO: 873994 - DNA, 15 bp, Homo sapiens
gttatcagtgagcag

SEQ ID NO: 873995 - DNA, 15 bp, Homo sapiens
ttatcagtgagcagt

SEQ ID NO: 873996 - DNA, 15 bp, Homo sapiens
tatcagtgagcagta

SEQ ID NO: 873997 - DNA, 15 bp, Homo sapiens
atcagtgagcagtaa

SEQ ID NO: 873998 - DNA, 15 bp, Homo sapiens
tcagtgagcagtaac

SEQ ID NO: 873999 - DNA, 15 bp, Homo sapiens
cagtgagcagtaaca

SEQ ID NO: 874000 - DNA, 15 bp, Homo sapiens
agtgagcagtaacat

SEQ ID NO: 874001 - DNA, 15 bp, Homo sapiens
gtgagcagtaacatc

SEQ ID NO: 874002 - DNA, 15 bp, Homo sapiens
tgagcagtaacatct

SEQ ID NO: 874003 - DNA, 15 bp, Homo sapiens
gagcagtaacatctt

SEQ ID NO: 874004 - DNA, 15 bp, Homo sapiens
agcagtaacatcttg

SEQ ID NO: 874005 - DNA, 15 bp, Homo sapiens
gcagtaacatcttga

SEQ ID NO: 874006 - DNA, 15 bp, Homo sapiens
cagtaacatcttgaa

SEQ ID NO: 874007 - DNA, 15 bp, Homo sapiens
agtaacatcttgaaa

SEQ ID NO: 874008 - DNA, 15 bp, Homo sapiens
gtaacatcttgaaag

SEQ ID NO: 874009 - DNA, 15 bp, Homo sapiens
taacatcttgaaaga

SEQ ID NO: 874010 - DNA, 15 bp, Homo sapiens
aacatcttgaaagaa

SEQ ID NO: 874011 - DNA, 15 bp, Homo sapiens
acatcttgaaagaaa

SEQ ID NO: 874012 - DNA, 15 bp, Homo sapiens
catcttgaaagaaat

SEQ ID NO: 874013 - DNA, 15 bp, Homo sapiens
atcttgaaagaaatc

SEQ ID NO: 874014 - DNA, 15 bp, Homo sapiens
tcttgaaagaaatct

SEQ ID NO: 874015 - DNA, 15 bp, Homo sapiens
cttgaaagaaatctt

SEQ ID NO: 874016 - DNA, 15 bp, Homo sapiens
ttgaaagaaatcttt

SEQ ID NO: 874017 - DNA, 15 bp, Homo sapiens
tgaaagaaatctttt

SEQ ID NO: 874018 - DNA, 15 bp, Homo sapiens
gaaagaaatcttttt

SEQ ID NO: 874019 - DNA, 15 bp, Homo sapiens
aaagaaatctttttc

SEQ ID NO: 874020 - DNA, 15 bp, Homo sapiens
aagaaatctttttct

SEQ ID NO: 874021 - DNA, 15 bp, Homo sapiens
agaaatctttttctc

SEQ ID NO: 874022 - DNA, 15 bp, Homo sapiens
gaaatctttttctct

SEQ ID NO: 874023 - DNA, 15 bp, Homo sapiens
aaatctttttctctg

SEQ ID NO: 874024 - DNA, 15 bp, Homo sapiens
aatctttttctctga

SEQ ID NO: 874025 - DNA, 15 bp, Homo sapiens
atctttttctctgag

SEQ ID NO: 874026 - DNA, 15 bp, Homo sapiens
tctttttctctgagc

SEQ ID NO: 874027 - DNA, 15 bp, Homo sapiens
ctttttctctgagca

SEQ ID NO: 874028 - DNA, 15 bp, Homo sapiens
tttttctctgagcag

SEQ ID NO: 874029 - DNA, 15 bp, Homo sapiens
ttttctctgagcagt

SEQ ID NO: 874030 - DNA, 15 bp, Homo sapiens
tttctctgagcagta

SEQ ID NO: 874031 - DNA, 15 bp, Homo sapiens
ttctctgagcagtag

SEQ ID NO: 874032 - DNA, 15 bp, Homo sapiens
tctctgagcagtagg

SEQ ID NO: 874033 - DNA, 15 bp, Homo sapiens
ctctgagcagtaggt

SEQ ID NO: 874034 - DNA, 15 bp, Homo sapiens
tctgagcagtaggtc

SEQ ID NO: 874035 - DNA, 15 bp, Homo sapiens
ctgagcagtaggtct

SEQ ID NO: 874036 - DNA, 15 bp, Homo sapiens
tgagcagtaggtctc

SEQ ID NO: 874037 - DNA, 15 bp, Homo sapiens
gagcagtaggtctca

SEQ ID NO: 874038 - DNA, 15 bp, Homo sapiens
agcagtaggtctcaa

SEQ ID NO: 874039 - DNA, 15 bp, Homo sapiens
gcagtaggtctcaac

SEQ ID NO: 874040 - DNA, 15 bp, Homo sapiens
cagtaggtctcaaca

SEQ ID NO: 874041 - DNA, 15 bp, Homo sapiens
agtaggtctcaacag

SEQ ID NO: 874042 - DNA, 15 bp, Homo sapiens
gtaggtctcaacagc

SEQ ID NO: 874043 - DNA, 15 bp, Homo sapiens
taggtctcaacagca

SEQ ID NO: 874044 - DNA, 15 bp, Homo sapiens
aggtctcaacagcag

SEQ ID NO: 874045 - DNA, 15 bp, Homo sapiens
ggtctcaacagcagg

SEQ ID NO: 874046 - DNA, 15 bp, Homo sapiens
gtctcaacagcagga

SEQ ID NO: 874047 - DNA, 15 bp, Homo sapiens
tctcaacagcaggat

SEQ ID NO: 874048 - DNA, 15 bp, Homo sapiens
ctcaacagcaggatt

SEQ ID NO: 874049 - DNA, 15 bp, Homo sapiens
tcaacagcaggatta

SEQ ID NO: 874050 - DNA, 15 bp, Homo sapiens
caacagcaggattaa

SEQ ID NO: 874051 - DNA, 15 bp, Homo sapiens
aacagcaggattaaa

SEQ ID NO: 874052 - DNA, 15 bp, Homo sapiens
acagcaggattaaaa

SEQ ID NO: 874053 - DNA, 15 bp, Homo sapiens
cagcaggattaaaat

SEQ ID NO: 874054 - DNA, 15 bp, Homo sapiens
agcaggattaaaata

SEQ ID NO: 874055 - DNA, 15 bp, Homo sapiens
gcaggattaaaatat

SEQ ID NO: 874056 - DNA, 15 bp, Homo sapiens
caggattaaaatatt

SEQ ID NO: 874057 - DNA, 15 bp, Homo sapiens
aggattaaaatattc

SEQ ID NO: 874058 - DNA, 15 bp, Homo sapiens
ggattaaaatattca

SEQ ID NO: 874059 - DNA, 15 bp, Homo sapiens
gattaaaatattcag

SEQ ID NO: 874060 - DNA, 15 bp, Homo sapiens
attaaaatattcagt

SEQ ID NO: 874061 - DNA, 15 bp, Homo sapiens
ttaaaatattcagta

SEQ ID NO: 874062 - DNA, 15 bp, Homo sapiens
taaaatattcagtag

SEQ ID NO: 874063 - DNA, 15 bp, Homo sapiens
aaaatattcagtaga

SEQ ID NO: 874064 - DNA, 15 bp, Homo sapiens
aaatattcagtagat

SEQ ID NO: 874065 - DNA, 15 bp, Homo sapiens
aatattcagtagatc

SEQ ID NO: 874066 - DNA, 15 bp, Homo sapiens
atattcagtagatca

SEQ ID NO: 874067 - DNA, 15 bp, Homo sapiens
tattcagtagatcat

SEQ ID NO: 874068 - DNA, 15 bp, Homo sapiens
attcagtagatcatg

SEQ ID NO: 874069 - DNA, 15 bp, Homo sapiens
ttcagtagatcatgc

SEQ ID NO: 874070 - DNA, 15 bp, Homo sapiens
tcagtagatcatgct

SEQ ID NO: 874071 - DNA, 15 bp, Homo sapiens
cagtagatcatgctg

SEQ ID NO: 874072 - DNA, 15 bp, Homo sapiens
agtagatcatgctgt

SEQ ID NO: 874073 - DNA, 15 bp, Homo sapiens
gtagatcatgctgta

SEQ ID NO: 874074 - DNA, 15 bp, Homo sapiens
tagatcatgctgtaa

SEQ ID NO: 874075 - DNA, 15 bp, Homo sapiens
agatcatgctgtaaa

SEQ ID NO: 874076 - DNA, 15 bp, Homo sapiens
gatcatgctgtaaac

SEQ ID NO: 874077 - DNA, 15 bp, Homo sapiens
atcatgctgtaaaca

SEQ ID NO: 874078 - DNA, 15 bp, Homo sapiens
tcatgctgtaaacag

SEQ ID NO: 874079 - DNA, 15 bp, Homo sapiens
catgctgtaaacaga

SEQ ID NO: 874080 - DNA, 15 bp, Homo sapiens
atgctgtaaacagat

SEQ ID NO: 874081 - DNA, 15 bp, Homo sapiens
tgctgtaaacagatg

SEQ ID NO: 874082 - DNA, 15 bp, Homo sapiens
gctgtaaacagatgt

SEQ ID NO: 874083 - DNA, 15 bp, Homo sapiens
ctgtaaacagatgta

SEQ ID NO: 874084 - DNA, 15 bp, Homo sapiens
tgtaaacagatgtaa

SEQ ID NO: 874085 - DNA, 15 bp, Homo sapiens
gtaaacagatgtaaa

SEQ ID NO: 874086 - DNA, 15 bp, Homo sapiens
taaacagatgtaaat

SEQ ID NO: 874087 - DNA, 15 bp, Homo sapiens
aaacagatgtaaatg

SEQ ID NO: 874088 - DNA, 15 bp, Homo sapiens
aacagatgtaaatgc

SEQ ID NO: 874089 - DNA, 15 bp, Homo sapiens
acagatgtaaatgcc

SEQ ID NO: 874090 - DNA, 15 bp, Homo sapiens
cagatgtaaatgcct

SEQ ID NO: 874091 - DNA, 15 bp, Homo sapiens
agatgtaaatgcctg

SEQ ID NO: 874092 - DNA, 15 bp, Homo sapiens
gatgtaaatgcctga

SEQ ID NO: 874093 - DNA, 15 bp, Homo sapiens
atgtaaatgcctgac

SEQ ID NO: 874094 - DNA, 15 bp, Homo sapiens
tgtaaatgcctgact

SEQ ID NO: 874095 - DNA, 15 bp, Homo sapiens
gtaaatgcctgactt

SEQ ID NO: 874096 - DNA, 15 bp, Homo sapiens
taaatgcctgacttc

SEQ ID NO: 874097 - DNA, 15 bp, Homo sapiens
aaatgcctgacttca

SEQ ID NO: 874098 - DNA, 15 bp, Homo sapiens
aatgcctgacttcaa

SEQ ID NO: 874099 - DNA, 15 bp, Homo sapiens
atgcctgacttcaaa

SEQ ID NO: 874100 - DNA, 15 bp, Homo sapiens
tgcctgacttcaaag

SEQ ID NO: 874101 - DNA, 15 bp, Homo sapiens
gcctgacttcaaagc

SEQ ID NO: 874102 - DNA, 15 bp, Homo sapiens
cctgacttcaaagct

SEQ ID NO: 874103 - DNA, 15 bp, Homo sapiens
ctgacttcaaagctt

SEQ ID NO: 874104 - DNA, 15 bp, Homo sapiens
tgacttcaaagcttc

SEQ ID NO: 874105 - DNA, 15 bp, Homo sapiens
gacttcaaagcttca

SEQ ID NO: 874106 - DNA, 15 bp, Homo sapiens
acttcaaagcttcaa

SEQ ID NO: 874107 - DNA, 15 bp, Homo sapiens
cttcaaagcttcaaa

SEQ ID NO: 874108 - DNA, 15 bp, Homo sapiens
ttcaaagcttcaaag

SEQ ID NO: 874109 - DNA, 15 bp, Homo sapiens
tcaaagcttcaaagg

SEQ ID NO: 874110 - DNA, 15 bp, Homo sapiens
caaagcttcaaagga

SEQ ID NO: 874111 - DNA, 15 bp, Homo sapiens
aaagcttcaaaggac

SEQ ID NO: 874112 - DNA, 15 bp, Homo sapiens
aagcttcaaaggaca

SEQ ID NO: 874113 - DNA, 15 bp, Homo sapiens
agcttcaaaggacag

SEQ ID NO: 874114 - DNA, 15 bp, Homo sapiens
gcttcaaaggacagg

SEQ ID NO: 874115 - DNA, 15 bp, Homo sapiens
cttcaaaggacaggc

SEQ ID NO: 874116 - DNA, 15 bp, Homo sapiens
ttcaaaggacaggct

SEQ ID NO: 874117 - DNA, 15 bp, Homo sapiens
tcaaaggacaggctg

SEQ ID NO: 874118 - DNA, 15 bp, Homo sapiens
caaaggacaggctga

SEQ ID NO: 874119 - DNA, 15 bp, Homo sapiens
aaaggacaggctgat

SEQ ID NO: 874120 - DNA, 15 bp, Homo sapiens
aaggacaggctgatt

SEQ ID NO: 874121 - DNA, 15 bp, Homo sapiens
aggacaggctgattc

SEQ ID NO: 874122 - DNA, 15 bp, Homo sapiens
ggacaggctgattct

SEQ ID NO: 874123 - DNA, 15 bp, Homo sapiens
gacaggctgattctt

SEQ ID NO: 874124 - DNA, 15 bp, Homo sapiens
acaggctgattcttg

SEQ ID NO: 874125 - DNA, 15 bp, Homo sapiens
caggctgattcttgt

SEQ ID NO: 874126 - DNA, 15 bp, Homo sapiens
aggctgattcttgtt

SEQ ID NO: 874127 - DNA, 15 bp, Homo sapiens
ggctgattcttgttg

SEQ ID NO: 874128 - DNA, 15 bp, Homo sapiens
gctgattcttgttgg

SEQ ID NO: 874129 - DNA, 15 bp, Homo sapiens
ctgattcttgttgga

SEQ ID NO: 874130 - DNA, 15 bp, Homo sapiens
tgattcttgttggaa

SEQ ID NO: 874131 - DNA, 15 bp, Homo sapiens
gattcttgttggaac

SEQ ID NO: 874132 - DNA, 15 bp, Homo sapiens
attcttgttggaact

SEQ ID NO: 874133 - DNA, 15 bp, Homo sapiens
ttcttgttggaacta

SEQ ID NO: 874134 - DNA, 15 bp, Homo sapiens
tcttgttggaactaa

SEQ ID NO: 874135 - DNA, 15 bp, Homo sapiens
cttgttggaactaat

SEQ ID NO: 874136 - DNA, 15 bp, Homo sapiens
ttgttggaactaatg

SEQ ID NO: 874137 - DNA, 15 bp, Homo sapiens
tgttggaactaatgc

SEQ ID NO: 874138 - DNA, 15 bp, Homo sapiens
gttggaactaatgca

SEQ ID NO: 874139 - DNA, 15 bp, Homo sapiens
ttggaactaatgcag

SEQ ID NO: 874140 - DNA, 15 bp, Homo sapiens
tggaactaatgcagc

SEQ ID NO: 874141 - DNA, 15 bp, Homo sapiens
ggaactaatgcagct

SEQ ID NO: 874142 - DNA, 15 bp, Homo sapiens
gaactaatgcagctg

SEQ ID NO: 874143 - DNA, 15 bp, Homo sapiens
aactaatgcagctgg

SEQ ID NO: 874144 - DNA, 15 bp, Homo sapiens
actaatgcagctggt

SEQ ID NO: 874145 - DNA, 15 bp, Homo sapiens
ctaatgcagctggtg

SEQ ID NO: 874146 - DNA, 15 bp, Homo sapiens
taatgcagctggtga

SEQ ID NO: 874147 - DNA, 15 bp, Homo sapiens
aatgcagctggtgac

SEQ ID NO: 874148 - DNA, 15 bp, Homo sapiens
atgcagctggtgact

SEQ ID NO: 874149 - DNA, 15 bp, Homo sapiens
tgcagctggtgactt

SEQ ID NO: 874150 - DNA, 15 bp, Homo sapiens
gcagctggtgacttt

SEQ ID NO: 874151 - DNA, 15 bp, Homo sapiens
cagctggtgacttta

SEQ ID NO: 874152 - DNA, 15 bp, Homo sapiens
agctggtgactttaa

SEQ ID NO: 874153 - DNA, 15 bp, Homo sapiens
gctggtgactttaag

SEQ ID NO: 874154 - DNA, 15 bp, Homo sapiens
ctggtgactttaagt

SEQ ID NO: 874155 - DNA, 15 bp, Homo sapiens
tggtgactttaagtt

SEQ ID NO: 874156 - DNA, 15 bp, Homo sapiens
ggtgactttaagttg

SEQ ID NO: 874157 - DNA, 15 bp, Homo sapiens
gtgactttaagttga

SEQ ID NO: 874158 - DNA, 15 bp, Homo sapiens
tgactttaagttgaa

SEQ ID NO: 874159 - DNA, 15 bp, Homo sapiens
gactttaagttgaag

SEQ ID NO: 874160 - DNA, 15 bp, Homo sapiens
actttaagttgaagt

SEQ ID NO: 874161 - DNA, 15 bp, Homo sapiens
ctttaagttgaagtc

SEQ ID NO: 874162 - DNA, 15 bp, Homo sapiens
tttaagttgaagtca

SEQ ID NO: 874163 - DNA, 15 bp, Homo sapiens
ttaagttgaagtcaa

SEQ ID NO: 874164 - DNA, 15 bp, Homo sapiens
taagttgaagtcaaa

SEQ ID NO: 874165 - DNA, 15 bp, Homo sapiens
aagttgaagtcaaag

SEQ ID NO: 874166 - DNA, 15 bp, Homo sapiens
agttgaagtcaaagc

SEQ ID NO: 874167 - DNA, 15 bp, Homo sapiens
gttgaagtcaaagct

SEQ ID NO: 874168 - DNA, 15 bp, Homo sapiens
ttgaagtcaaagctc

SEQ ID NO: 874169 - DNA, 15 bp, Homo sapiens
tgaagtcaaagctca

SEQ ID NO: 874170 - DNA, 15 bp, Homo sapiens
gaagtcaaagctcat

SEQ ID NO: 874171 - DNA, 15 bp, Homo sapiens
aagtcaaagctcatt

SEQ ID NO: 874172 - DNA, 15 bp, Homo sapiens
agtcaaagctcattt

SEQ ID NO: 874173 - DNA, 15 bp, Homo sapiens
gtcaaagctcattta

SEQ ID NO: 874174 - DNA, 15 bp, Homo sapiens
tcaaagctcatttaa

SEQ ID NO: 874175 - DNA, 15 bp, Homo sapiens
caaagctcatttaac

SEQ ID NO: 874176 - DNA, 15 bp, Homo sapiens
aaagctcatttaaca

SEQ ID NO: 874177 - DNA, 15 bp, Homo sapiens
aagctcatttaacat

SEQ ID NO: 874178 - DNA, 15 bp, Homo sapiens
agctcatttaacatt

SEQ ID NO: 874179 - DNA, 15 bp, Homo sapiens
gctcatttaacattc

SEQ ID NO: 874180 - DNA, 15 bp, Homo sapiens
ctcatttaacattct

SEQ ID NO: 874181 - DNA, 15 bp, Homo sapiens
tcatttaacattctg

SEQ ID NO: 874182 - DNA, 15 bp, Homo sapiens
catttaacattctga

SEQ ID NO: 874183 - DNA, 15 bp, Homo sapiens
atttaacattctgaa

SEQ ID NO: 874184 - DNA, 15 bp, Homo sapiens
tttaacattctgaaa

SEQ ID NO: 874185 - DNA, 15 bp, Homo sapiens
ttaacattctgaaaa

SEQ ID NO: 874186 - DNA, 15 bp, Homo sapiens
taacattctgaaaat

SEQ ID NO: 874187 - DNA, 15 bp, Homo sapiens
aacattctgaaaatc

SEQ ID NO: 874188 - DNA, 15 bp, Homo sapiens
acattctgaaaatcc

SEQ ID NO: 874189 - DNA, 15 bp, Homo sapiens
cattctgaaaatccc

SEQ ID NO: 874190 - DNA, 15 bp, Homo sapiens
attctgaaaatccca

SEQ ID NO: 874191 - DNA, 15 bp, Homo sapiens
ttctgaaaatcccat

SEQ ID NO: 874192 - DNA, 15 bp, Homo sapiens
tctgaaaatcccata

SEQ ID NO: 874193 - DNA, 15 bp, Homo sapiens
ctgaaaatcccatag

SEQ ID NO: 874194 - DNA, 15 bp, Homo sapiens
tgaaaatcccatagg

SEQ ID NO: 874195 - DNA, 15 bp, Homo sapiens
gaaaatcccataggc

SEQ ID NO: 874196 - DNA, 15 bp, Homo sapiens
aaaatcccataggca

SEQ ID NO: 874197 - DNA, 15 bp, Homo sapiens
aaatcccataggcat

SEQ ID NO: 874198 - DNA, 15 bp, Homo sapiens
aatcccataggcatt

SEQ ID NO: 874199 - DNA, 15 bp, Homo sapiens
atcccataggcatta

SEQ ID NO: 874200 - DNA, 15 bp, Homo sapiens
tcccataggcattaa

SEQ ID NO: 874201 - DNA, 15 bp, Homo sapiens
cccataggcattaag

SEQ ID NO: 874202 - DNA, 15 bp, Homo sapiens
ccataggcattaaga

SEQ ID NO: 874203 - DNA, 15 bp, Homo sapiens
cataggcattaagaa

SEQ ID NO: 874204 - DNA, 15 bp, Homo sapiens
ataggcattaagaat

SEQ ID NO: 874205 - DNA, 15 bp, Homo sapiens
taggcattaagaatt

SEQ ID NO: 874206 - DNA, 15 bp, Homo sapiens
aggcattaagaatta

SEQ ID NO: 874207 - DNA, 15 bp, Homo sapiens
ggcattaagaattat

SEQ ID NO: 874208 - DNA, 15 bp, Homo sapiens
gcattaagaattatg

SEQ ID NO: 874209 - DNA, 15 bp, Homo sapiens
cattaagaattatgt

SEQ ID NO: 874210 - DNA, 15 bp, Homo sapiens
attaagaattatgtg

SEQ ID NO: 874211 - DNA, 15 bp, Homo sapiens
ttaagaattatgtga

SEQ ID NO: 874212 - DNA, 15 bp, Homo sapiens
taagaattatgtgaa

SEQ ID NO: 874213 - DNA, 15 bp, Homo sapiens
aagaattatgtgaaa

SEQ ID NO: 874214 - DNA, 15 bp, Homo sapiens
agaattatgtgaaat

SEQ ID NO: 874215 - DNA, 15 bp, Homo sapiens
gaattatgtgaaatc

SEQ ID NO: 874216 - DNA, 15 bp, Homo sapiens
aattatgtgaaatct

SEQ ID NO: 874217 - DNA, 15 bp, Homo sapiens
attatgtgaaatcta

SEQ ID NO: 874218 - DNA, 15 bp, Homo sapiens
ttatgtgaaatctac

SEQ ID NO: 874219 - DNA, 15 bp, Homo sapiens
tatgtgaaatctact

SEQ ID NO: 874220 - DNA, 15 bp, Homo sapiens
atgtgaaatctactc

SEQ ID NO: 874221 - DNA, 15 bp, Homo sapiens
tgtgaaatctactct

SEQ ID NO: 874222 - DNA, 15 bp, Homo sapiens
gtgaaatctactctg

SEQ ID NO: 874223 - DNA, 15 bp, Homo sapiens
tgaaatctactctgc

SEQ ID NO: 874224 - DNA, 15 bp, Homo sapiens
gaaatctactctgcc

SEQ ID NO: 874225 - DNA, 15 bp, Homo sapiens
aaatctactctgcct

SEQ ID NO: 874226 - DNA, 15 bp, Homo sapiens
aatctactctgcctg

SEQ ID NO: 874227 - DNA, 15 bp, Homo sapiens
atctactctgcctgt

SEQ ID NO: 874228 - DNA, 15 bp, Homo sapiens
tctactctgcctgtg

SEQ ID NO: 874229 - DNA, 15 bp, Homo sapiens
ctactctgcctgtgc

SEQ ID NO: 874230 - DNA, 15 bp, Homo sapiens
tactctgcctgtgct

SEQ ID NO: 874231 - DNA, 15 bp, Homo sapiens
actctgcctgtgctc

SEQ ID NO: 874232 - DNA, 15 bp, Homo sapiens
ctctgcctgtgctct

SEQ ID NO: 874233 - DNA, 15 bp, Homo sapiens
tctgcctgtgctcta

SEQ ID NO: 874234 - DNA, 15 bp, Homo sapiens
ctgcctgtgctctag

SEQ ID NO: 874235 - DNA, 15 bp, Homo sapiens
tgcctgtgctctagc

SEQ ID NO: 874236 - DNA, 15 bp, Homo sapiens
gcctgtgctctagca

SEQ ID NO: 874237 - DNA, 15 bp, Homo sapiens
cctgtgctctagcaa

SEQ ID NO: 874238 - DNA, 15 bp, Homo sapiens
ctgtgctctagcaat

SEQ ID NO: 874239 - DNA, 15 bp, Homo sapiens
tgtgctctagcaatg

SEQ ID NO: 874240 - DNA, 15 bp, Homo sapiens
gtgctctagcaatgg

SEQ ID NO: 874241 - DNA, 15 bp, Homo sapiens
tgctctagcaatgga

SEQ ID NO: 874242 - DNA, 15 bp, Homo sapiens
gctctagcaatggaa

SEQ ID NO: 874243 - DNA, 15 bp, Homo sapiens
ctctagcaatggaaa

SEQ ID NO: 874244 - DNA, 15 bp, Homo sapiens
tctagcaatggaaaa

SEQ ID NO: 874245 - DNA, 15 bp, Homo sapiens
ctagcaatggaaaaa

SEQ ID NO: 874246 - DNA, 15 bp, Homo sapiens
tagcaatggaaaaat

SEQ ID NO: 874247 - DNA, 15 bp, Homo sapiens
agcaatggaaaaata

SEQ ID NO: 874248 - DNA, 15 bp, Homo sapiens
gcaatggaaaaataa

SEQ ID NO: 874249 - DNA, 15 bp, Homo sapiens
caatggaaaaataaa

SEQ ID NO: 874250 - DNA, 15 bp, Homo sapiens
aatggaaaaataaac

SEQ ID NO: 874251 - DNA, 15 bp, Homo sapiens
atggaaaaataaacc

SEQ ID NO: 874252 - DNA, 15 bp, Homo sapiens
tggaaaaataaacct

SEQ ID NO: 874253 - DNA, 15 bp, Homo sapiens
ggaaaaataaacctt

SEQ ID NO: 874254 - DNA, 15 bp, Homo sapiens
gaaaaataaaccttc

SEQ ID NO: 874255 - DNA, 15 bp, Homo sapiens
aaaaataaaccttca

SEQ ID NO: 874256 - DNA, 15 bp, Homo sapiens
aaaataaaccttcaa

SEQ ID NO: 874257 - DNA, 15 bp, Homo sapiens
aaataaaccttcaat

SEQ ID NO: 874258 - DNA, 15 bp, Homo sapiens
aataaaccttcaatt

SEQ ID NO: 874259 - DNA, 15 bp, Homo sapiens
ataaaccttcaattt

SEQ ID NO: 874260 - DNA, 15 bp, Homo sapiens
taaaccttcaatttg

SEQ ID NO: 874261 - DNA, 15 bp, Homo sapiens
aaaccttcaatttgt

SEQ ID NO: 874262 - DNA, 15 bp, Homo sapiens
aaccttcaatttgta

SEQ ID NO: 874263 - DNA, 15 bp, Homo sapiens
accttcaatttgtaa

SEQ ID NO: 874264 - DNA, 15 bp, Homo sapiens
ccttcaatttgtaaa

SEQ ID NO: 874265 - DNA, 15 bp, Homo sapiens
cttcaatttgtaaaa

SEQ ID NO: 874266 - DNA, 15 bp, Homo sapiens
ttcaatttgtaaaaa

SEQ ID NO: 874267 - DNA, 15 bp, Homo sapiens
tcaatttgtaaaaaa

SEQ ID NO: 874268 - DNA, 15 bp, Homo sapiens
caatttgtaaaaaaa

SEQ ID NO: 874269 - DNA, 15 bp, Homo sapiens
aatttgtaaaaaaaa

SEQ ID NO: 874270 - DNA, 15 bp, Homo sapiens
atttgtaaaaaaaaa

SEQ ID NO: 874271 - DNA, 15 bp, Homo sapiens
tttgtaaaaaaaaaa

SEQ ID NO: 874272 - DNA, 15 bp, Homo sapiens
ttgtaaaaaaaaaaa

SEQ ID NO: 874273 - DNA, 15 bp, Homo sapiens
aaaaaaaaaaaaaac

SEQ ID NO: 874274 - DNA, 15 bp, Homo sapiens
aaaaaaaaaaaaaca

SEQ ID NO: 874275 - DNA, 15 bp, Homo sapiens
aaaaaaaaaaaacaa

SEQ ID NO: 874276 - DNA, 15 bp, Homo sapiens
aaaaaaaaaaacaaa

SEQ ID NO: 874277 - DNA, 15 bp, Homo sapiens
aaaaaaaaaacaaaa

SEQ ID NO: 874278 - DNA, 15 bp, Homo sapiens
aaaaaaaacaaaacc

SEQ ID NO: 874279 - DNA, 15 bp, Homo sapiens
aaaaaaacaaaacca

SEQ ID NO: 874280 - DNA, 15 bp, Homo sapiens
aaaaaacaaaaccat

SEQ ID NO: 874281 - DNA, 15 bp, Homo sapiens
aaaaacaaaaccata

SEQ ID NO: 874282 - DNA, 15 bp, Homo sapiens
aaaacaaaaccataa

SEQ ID NO: 874283 - DNA, 15 bp, Homo sapiens
aaacaaaaccataat

SEQ ID NO: 874284 - DNA, 15 bp, Homo sapiens
aacaaaaccataata

SEQ ID NO: 874285 - DNA, 15 bp, Homo sapiens
acaaaaccataatat

SEQ ID NO: 874286 - DNA, 15 bp, Homo sapiens
caaaaccataatatc

SEQ ID NO: 874287 - DNA, 15 bp, Homo sapiens
aaaaccataatatct

SEQ ID NO: 874288 - DNA, 15 bp, Homo sapiens
aaaccataatatctg

SEQ ID NO: 874289 - DNA, 15 bp, Homo sapiens
aaccataatatctgc

SEQ ID NO: 874290 - DNA, 15 bp, Homo sapiens
accataatatctgca

SEQ ID NO: 874291 - DNA, 15 bp, Homo sapiens
ccataatatctgcaa

SEQ ID NO: 874292 - DNA, 15 bp, Homo sapiens
cataatatctgcaaa

SEQ ID NO: 874293 - DNA, 15 bp, Homo sapiens
aggacaccagtccta

SEQ ID NO: 874294 - DNA, 15 bp, Homo sapiens
ggacaccagtcctat

SEQ ID NO: 874295 - DNA, 15 bp, Homo sapiens
gacaccagtcctatt

SEQ ID NO: 874296 - DNA, 15 bp, Homo sapiens
acaccagtcctattg

SEQ ID NO: 874297 - DNA, 15 bp, Homo sapiens
caccagtcctattgg

SEQ ID NO: 874298 - DNA, 15 bp, Homo sapiens
accagtcctattgga

SEQ ID NO: 874299 - DNA, 15 bp, Homo sapiens
ccagtcctattggat

SEQ ID NO: 874300 - DNA, 15 bp, Homo sapiens
cagtcctattggatc

SEQ ID NO: 874301 - DNA, 15 bp, Homo sapiens
agtcctattggatca

SEQ ID NO: 874302 - DNA, 15 bp, Homo sapiens
gtcctattggatcag

SEQ ID NO: 874303 - DNA, 15 bp, Homo sapiens
tcctattggatcaga

SEQ ID NO: 874304 - DNA, 15 bp, Homo sapiens
cctattggatcagaa

SEQ ID NO: 874305 - DNA, 15 bp, Homo sapiens
ctattggatcagaac

SEQ ID NO: 874306 - DNA, 15 bp, Homo sapiens
tattggatcagaact

SEQ ID NO: 874307 - DNA, 15 bp, Homo sapiens
attggatcagaactc

SEQ ID NO: 874308 - DNA, 15 bp, Homo sapiens
ttggatcagaactca

SEQ ID NO: 874309 - DNA, 15 bp, Homo sapiens
tggatcagaactcac

SEQ ID NO: 874310 - DNA, 15 bp, Homo sapiens
ggatcagaactcacc

SEQ ID NO: 874311 - DNA, 15 bp, Homo sapiens
gatcagaactcaccc

SEQ ID NO: 874312 - DNA, 15 bp, Homo sapiens
atcagaactcacccc

SEQ ID NO: 874313 - DNA, 15 bp, Homo sapiens
tcagaactcacccca

SEQ ID NO: 874314 - DNA, 15 bp, Homo sapiens
cagaactcaccccaa

SEQ ID NO: 874315 - DNA, 15 bp, Homo sapiens
agaactcaccccaat

SEQ ID NO: 874316 - DNA, 15 bp, Homo sapiens
gaactcaccccaatg

SEQ ID NO: 874317 - DNA, 15 bp, Homo sapiens
aactcaccccaatga

SEQ ID NO: 874318 - DNA, 15 bp, Homo sapiens
actcaccccaatgac

SEQ ID NO: 874319 - DNA, 15 bp, Homo sapiens
ctcaccccaatgacc

SEQ ID NO: 874320 - DNA, 15 bp, Homo sapiens
tcaccccaatgacct

SEQ ID NO: 874321 - DNA, 15 bp, Homo sapiens
caccccaatgaccta

SEQ ID NO: 874322 - DNA, 15 bp, Homo sapiens
accccaatgacctaa

SEQ ID NO: 874323 - DNA, 15 bp, Homo sapiens
ccccaatgacctaat

SEQ ID NO: 874324 - DNA, 15 bp, Homo sapiens
cccaatgacctaatt

SEQ ID NO: 874325 - DNA, 15 bp, Homo sapiens
ccaatgacctaattt

SEQ ID NO: 874326 - DNA, 15 bp, Homo sapiens
caatgacctaatttt

SEQ ID NO: 874327 - DNA, 15 bp, Homo sapiens
aatgacctaatttta

SEQ ID NO: 874328 - DNA, 15 bp, Homo sapiens
atgacctaattttaa

SEQ ID NO: 874329 - DNA, 15 bp, Homo sapiens
tgacctaattttaac

SEQ ID NO: 874330 - DNA, 15 bp, Homo sapiens
gacctaattttaact

SEQ ID NO: 874331 - DNA, 15 bp, Homo sapiens
acctaattttaactt

SEQ ID NO: 874332 - DNA, 15 bp, Homo sapiens
cctaattttaactta

SEQ ID NO: 874333 - DNA, 15 bp, Homo sapiens
ctaattttaacttaa

SEQ ID NO: 874334 - DNA, 15 bp, Homo sapiens
taattttaacttaat

SEQ ID NO: 874335 - DNA, 15 bp, Homo sapiens
aattttaacttaatt

SEQ ID NO: 874336 - DNA, 15 bp, Homo sapiens
cttctttaaagacca

SEQ ID NO: 874337 - DNA, 15 bp, Homo sapiens
ttctttaaagaccat

SEQ ID NO: 874338 - DNA, 15 bp, Homo sapiens
tctttaaagaccata

SEQ ID NO: 874339 - DNA, 15 bp, Homo sapiens
ctttaaagaccatat

SEQ ID NO: 874340 - DNA, 15 bp, Homo sapiens
tttaaagaccatatt

SEQ ID NO: 874341 - DNA, 15 bp, Homo sapiens
ttaaagaccatattt

SEQ ID NO: 874342 - DNA, 15 bp, Homo sapiens
taaagaccatatttc

SEQ ID NO: 874343 - DNA, 15 bp, Homo sapiens
aaagaccatatttca

SEQ ID NO: 874344 - DNA, 15 bp, Homo sapiens
aagaccatatttcaa

SEQ ID NO: 874345 - DNA, 15 bp, Homo sapiens
agaccatatttcaaa

SEQ ID NO: 874346 - DNA, 15 bp, Homo sapiens
gaccatatttcaaaa

SEQ ID NO: 874347 - DNA, 15 bp, Homo sapiens
accatatttcaaaat

SEQ ID NO: 874348 - DNA, 15 bp, Homo sapiens
ccatatttcaaaata

SEQ ID NO: 874349 - DNA, 15 bp, Homo sapiens
catatttcaaaatac

SEQ ID NO: 874350 - DNA, 15 bp, Homo sapiens
atatttcaaaataca

SEQ ID NO: 874351 - DNA, 15 bp, Homo sapiens
tatttcaaaatacag

SEQ ID NO: 874352 - DNA, 15 bp, Homo sapiens
atttcaaaatacagt

SEQ ID NO: 874353 - DNA, 15 bp, Homo sapiens
tttcaaaatacagtc

SEQ ID NO: 874354 - DNA, 15 bp, Homo sapiens
ttcaaaatacagtca

SEQ ID NO: 874355 - DNA, 15 bp, Homo sapiens
tcaaaatacagtcac

SEQ ID NO: 874356 - DNA, 15 bp, Homo sapiens
caaaatacagtcaca

SEQ ID NO: 874357 - DNA, 15 bp, Homo sapiens
aaaatacagtcacat

SEQ ID NO: 874358 - DNA, 15 bp, Homo sapiens
aaatacagtcacatt

SEQ ID NO: 874359 - DNA, 15 bp, Homo sapiens
aatacagtcacattc

SEQ ID NO: 874360 - DNA, 15 bp, Homo sapiens
atacagtcacattct

SEQ ID NO: 874361 - DNA, 15 bp, Homo sapiens
tacagtcacattctg

SEQ ID NO: 874362 - DNA, 15 bp, Homo sapiens
acagtcacattctga

SEQ ID NO: 874363 - DNA, 15 bp, Homo sapiens
cagtcacattctgag

SEQ ID NO: 874364 - DNA, 15 bp, Homo sapiens
agtcacattctgagg

SEQ ID NO: 874365 - DNA, 15 bp, Homo sapiens
gtcacattctgaggt

SEQ ID NO: 874366 - DNA, 15 bp, Homo sapiens
tcacattctgaggta

SEQ ID NO: 874367 - DNA, 15 bp, Homo sapiens
cacattctgaggtac

SEQ ID NO: 874368 - DNA, 15 bp, Homo sapiens
acattctgaggtacc

SEQ ID NO: 874369 - DNA, 15 bp, Homo sapiens
cattctgaggtaccg

SEQ ID NO: 874370 - DNA, 15 bp, Homo sapiens
attctgaggtaccgg

SEQ ID NO: 874371 - DNA, 15 bp, Homo sapiens
ttctgaggtaccggc

SEQ ID NO: 874372 - DNA, 15 bp, Homo sapiens
tctgaggtaccggcg

SEQ ID NO: 874373 - DNA, 15 bp, Homo sapiens
ctgaggtaccggcgg

SEQ ID NO: 874374 - DNA, 15 bp, Homo sapiens
tgaggtaccggcggt

SEQ ID NO: 874375 - DNA, 15 bp, Homo sapiens
gaggtaccggcggtt

SEQ ID NO: 874376 - DNA, 15 bp, Homo sapiens
aggtaccggcggtta

SEQ ID NO: 874377 - DNA, 15 bp, Homo sapiens
ggtaccggcggttaa

SEQ ID NO: 874378 - DNA, 15 bp, Homo sapiens
gtaccggcggttaag

SEQ ID NO: 874379 - DNA, 15 bp, Homo sapiens
taccggcggttaaga

SEQ ID NO: 874380 - DNA, 15 bp, Homo sapiens
accggcggttaagac

SEQ ID NO: 874381 - DNA, 15 bp, Homo sapiens
ccggcggttaagact

SEQ ID NO: 874382 - DNA, 15 bp, Homo sapiens
cggcggttaagactt

SEQ ID NO: 874383 - DNA, 15 bp, Homo sapiens
ggcggttaagacttc

SEQ ID NO: 874384 - DNA, 15 bp, Homo sapiens
gcggttaagacttca

SEQ ID NO: 874385 - DNA, 15 bp, Homo sapiens
cggttaagacttcac

SEQ ID NO: 874386 - DNA, 15 bp, Homo sapiens
ggttaagacttcaca

SEQ ID NO: 874387 - DNA, 15 bp, Homo sapiens
gttaagacttcacat

SEQ ID NO: 874388 - DNA, 15 bp, Homo sapiens
ttaagacttcacata

SEQ ID NO: 874389 - DNA, 15 bp, Homo sapiens
taagacttcacataa

SEQ ID NO: 874390 - DNA, 15 bp, Homo sapiens
aagacttcacataaa

SEQ ID NO: 874391 - DNA, 15 bp, Homo sapiens
agacttcacataaaa

SEQ ID NO: 874392 - DNA, 15 bp, Homo sapiens
gacttcacataaaaa

SEQ ID NO: 874393 - DNA, 15 bp, Homo sapiens
acttcacataaaaat

SEQ ID NO: 874394 - DNA, 15 bp, Homo sapiens
cttcacataaaaatt

SEQ ID NO: 874395 - DNA, 15 bp, Homo sapiens
ttcacataaaaattt

SEQ ID NO: 874396 - DNA, 15 bp, Homo sapiens
tcacataaaaatttg

SEQ ID NO: 874397 - DNA, 15 bp, Homo sapiens
cacataaaaatttgg

SEQ ID NO: 874398 - DNA, 15 bp, Homo sapiens
acataaaaatttggg

SEQ ID NO: 874399 - DNA, 15 bp, Homo sapiens
cataaaaatttgggg

SEQ ID NO: 874400 - DNA, 15 bp, Homo sapiens
ataaaaatttggggg

SEQ ID NO: 874401 - DNA, 15 bp, Homo sapiens
taaaaatttggggga

SEQ ID NO: 874402 - DNA, 15 bp, Homo sapiens
aaaaatttgggggag

SEQ ID NO: 874403 - DNA, 15 bp, Homo sapiens
aaaatttgggggaga

SEQ ID NO: 874404 - DNA, 15 bp, Homo sapiens
aaatttgggggagaa

SEQ ID NO: 874405 - DNA, 15 bp, Homo sapiens
aatttgggggagaac

SEQ ID NO: 874406 - DNA, 15 bp, Homo sapiens
atttgggggagaaca

SEQ ID NO: 874407 - DNA, 15 bp, Homo sapiens
tttgggggagaacac

SEQ ID NO: 874408 - DNA, 15 bp, Homo sapiens
ttgggggagaacaca

SEQ ID NO: 874409 - DNA, 15 bp, Homo sapiens
tgggggagaacacag

SEQ ID NO: 874410 - DNA, 15 bp, Homo sapiens
gggggagaacacagt

SEQ ID NO: 874411 - DNA, 15 bp, Homo sapiens
ggggagaacacagtt

SEQ ID NO: 874412 - DNA, 15 bp, Homo sapiens
gggagaacacagttc

SEQ ID NO: 874413 - DNA, 15 bp, Homo sapiens
ggagaacacagttca

SEQ ID NO: 874414 - DNA, 15 bp, Homo sapiens
gagaacacagttcag

SEQ ID NO: 874415 - DNA, 15 bp, Homo sapiens
agaacacagttcagc

SEQ ID NO: 874416 - DNA, 15 bp, Homo sapiens
gaacacagttcagcc

SEQ ID NO: 874417 - DNA, 15 bp, Homo sapiens
aacacagttcagccc

SEQ ID NO: 874418 - DNA, 15 bp, Homo sapiens
acacagttcagccca

SEQ ID NO: 874419 - DNA, 15 bp, Homo sapiens
cacagttcagcccat

SEQ ID NO: 874420 - DNA, 15 bp, Homo sapiens
acagttcagcccata

SEQ ID NO: 874421 - DNA, 15 bp, Homo sapiens
cagttcagcccataa

SEQ ID NO: 874422 - DNA, 15 bp, Homo sapiens
agttcagcccataaa

SEQ ID NO: 874423 - DNA, 15 bp, Homo sapiens
gttcagcccataaaa

SEQ ID NO: 874424 - DNA, 15 bp, Homo sapiens
ttcagcccataaaaa

SEQ ID NO: 874425 - DNA, 15 bp, Homo sapiens
tcagcccataaaaat

SEQ ID NO: 874426 - DNA, 15 bp, Homo sapiens
cagcccataaaaatg

SEQ ID NO: 874427 - DNA, 15 bp, Homo sapiens
agcccataaaaatga

SEQ ID NO: 874428 - DNA, 15 bp, Homo sapiens
gcccataaaaatgaa

SEQ ID NO: 874429 - DNA, 15 bp, Homo sapiens
cccataaaaatgaaa

SEQ ID NO: 874430 - DNA, 15 bp, Homo sapiens
ccataaaaatgaaac

SEQ ID NO: 874431 - DNA, 15 bp, Homo sapiens
cataaaaatgaaaca

SEQ ID NO: 874432 - DNA, 15 bp, Homo sapiens
ataaaaatgaaacag

SEQ ID NO: 874433 - DNA, 15 bp, Homo sapiens
taaaaatgaaacagc

SEQ ID NO: 874434 - DNA, 15 bp, Homo sapiens
aaaaatgaaacagca

SEQ ID NO: 874435 - DNA, 15 bp, Homo sapiens
aaaatgaaacagcag

SEQ ID NO: 874436 - DNA, 15 bp, Homo sapiens
aaatgaaacagcaga

SEQ ID NO: 874437 - DNA, 15 bp, Homo sapiens
aatgaaacagcagat

SEQ ID NO: 874438 - DNA, 15 bp, Homo sapiens
atgaaacagcagata

SEQ ID NO: 874439 - DNA, 15 bp, Homo sapiens
tgaaacagcagatat

SEQ ID NO: 874440 - DNA, 15 bp, Homo sapiens
gaaacagcagatata

SEQ ID NO: 874441 - DNA, 15 bp, Homo sapiens
aaacagcagatatat

SEQ ID NO: 874442 - DNA, 15 bp, Homo sapiens
aacagcagatatatc

SEQ ID NO: 874443 - DNA, 15 bp, Homo sapiens
acagcagatatatct

SEQ ID NO: 874444 - DNA, 15 bp, Homo sapiens
cagcagatatatctc

SEQ ID NO: 874445 - DNA, 15 bp, Homo sapiens
agcagatatatctca

SEQ ID NO: 874446 - DNA, 15 bp, Homo sapiens
gcagatatatctcac

SEQ ID NO: 874447 - DNA, 15 bp, Homo sapiens
cagatatatctcaca

SEQ ID NO: 874448 - DNA, 15 bp, Homo sapiens
agatatatctcacat

SEQ ID NO: 874449 - DNA, 15 bp, Homo sapiens
gatatatctcacatc

SEQ ID NO: 874450 - DNA, 15 bp, Homo sapiens
atatatctcacatca

SEQ ID NO: 874451 - DNA, 15 bp, Homo sapiens
tatatctcacatcat

SEQ ID NO: 874452 - DNA, 15 bp, Homo sapiens
atatctcacatcata

SEQ ID NO: 874453 - DNA, 15 bp, Homo sapiens
tatctcacatcatag

SEQ ID NO: 874454 - DNA, 15 bp, Homo sapiens
atctcacatcataga

SEQ ID NO: 874455 - DNA, 15 bp, Homo sapiens
tctcacatcatagag

SEQ ID NO: 874456 - DNA, 15 bp, Homo sapiens
ctcacatcatagagt

SEQ ID NO: 874457 - DNA, 15 bp, Homo sapiens
tcacatcatagagtt

SEQ ID NO: 874458 - DNA, 15 bp, Homo sapiens
cacatcatagagttt

SEQ ID NO: 874459 - DNA, 15 bp, Homo sapiens
acatcatagagtttc

SEQ ID NO: 874460 - DNA, 15 bp, Homo sapiens
catcatagagtttct

SEQ ID NO: 874461 - DNA, 15 bp, Homo sapiens
atcatagagtttcta

SEQ ID NO: 874462 - DNA, 15 bp, Homo sapiens
tcatagagtttctat

SEQ ID NO: 874463 - DNA, 15 bp, Homo sapiens
catagagtttctatt

SEQ ID NO: 874464 - DNA, 15 bp, Homo sapiens
atagagtttctatta

SEQ ID NO: 874465 - DNA, 15 bp, Homo sapiens
tagagtttctattac

SEQ ID NO: 874466 - DNA, 15 bp, Homo sapiens
agagtttctattacc

SEQ ID NO: 874467 - DNA, 15 bp, Homo sapiens
gagtttctattaccc

SEQ ID NO: 874468 - DNA, 15 bp, Homo sapiens
agtttctattaccct

SEQ ID NO: 874469 - DNA, 15 bp, Homo sapiens
gtttctattacccta

SEQ ID NO: 874470 - DNA, 15 bp, Homo sapiens
tttctattaccctaa

SEQ ID NO: 874471 - DNA, 15 bp, Homo sapiens
ttctattaccctaaa

SEQ ID NO: 874472 - DNA, 15 bp, Homo sapiens
tctattaccctaaaa

SEQ ID NO: 874473 - DNA, 15 bp, Homo sapiens
ctattaccctaaaat

SEQ ID NO: 874474 - DNA, 15 bp, Homo sapiens
tattaccctaaaata

SEQ ID NO: 874475 - DNA, 15 bp, Homo sapiens
attaccctaaaatag

SEQ ID NO: 874476 - DNA, 15 bp, Homo sapiens
ttaccctaaaatagg

SEQ ID NO: 874477 - DNA, 15 bp, Homo sapiens
taccctaaaataggg

SEQ ID NO: 874478 - DNA, 15 bp, Homo sapiens
accctaaaatagggc

SEQ ID NO: 874479 - DNA, 15 bp, Homo sapiens
ccctaaaatagggca

SEQ ID NO: 874480 - DNA, 15 bp, Homo sapiens
cctaaaatagggcat

SEQ ID NO: 874481 - DNA, 15 bp, Homo sapiens
ctaaaatagggcatg

SEQ ID NO: 874482 - DNA, 15 bp, Homo sapiens
taaaatagggcatgt

SEQ ID NO: 874483 - DNA, 15 bp, Homo sapiens
aaaatagggcatgta

SEQ ID NO: 874484 - DNA, 15 bp, Homo sapiens
aaatagggcatgtac

SEQ ID NO: 874485 - DNA, 15 bp, Homo sapiens
aatagggcatgtaca

SEQ ID NO: 874486 - DNA, 15 bp, Homo sapiens
atagggcatgtacat

SEQ ID NO: 874487 - DNA, 15 bp, Homo sapiens
tagggcatgtacatt

SEQ ID NO: 874488 - DNA, 15 bp, Homo sapiens
agggcatgtacattg

SEQ ID NO: 874489 - DNA, 15 bp, Homo sapiens
gggcatgtacattgg

SEQ ID NO: 874490 - DNA, 15 bp, Homo sapiens
ggcatgtacattggc

SEQ ID NO: 874491 - DNA, 15 bp, Homo sapiens
gcatgtacattggct

SEQ ID NO: 874492 - DNA, 15 bp, Homo sapiens
catgtacattggcta

SEQ ID NO: 874493 - DNA, 15 bp, Homo sapiens
atgtacattggctaa

SEQ ID NO: 874494 - DNA, 15 bp, Homo sapiens
tgtacattggctaag

SEQ ID NO: 874495 - DNA, 15 bp, Homo sapiens
gtacattggctaagt

SEQ ID NO: 874496 - DNA, 15 bp, Homo sapiens
tacattggctaagtc

SEQ ID NO: 874497 - DNA, 15 bp, Homo sapiens
acattggctaagtcg

SEQ ID NO: 874498 - DNA, 15 bp, Homo sapiens
cattggctaagtcgc

SEQ ID NO: 874499 - DNA, 15 bp, Homo sapiens
attggctaagtcgca

SEQ ID NO: 874500 - DNA, 15 bp, Homo sapiens
ttggctaagtcgcaa

SEQ ID NO: 874501 - DNA, 15 bp, Homo sapiens
tggctaagtcgcaag

SEQ ID NO: 874502 - DNA, 15 bp, Homo sapiens
ggctaagtcgcaagt

SEQ ID NO: 874503 - DNA, 15 bp, Homo sapiens
gctaagtcgcaagtg

SEQ ID NO: 874504 - DNA, 15 bp, Homo sapiens
ctaagtcgcaagtga

SEQ ID NO: 874505 - DNA, 15 bp, Homo sapiens
taagtcgcaagtgac

SEQ ID NO: 874506 - DNA, 15 bp, Homo sapiens
aagtcgcaagtgaca

SEQ ID NO: 874507 - DNA, 15 bp, Homo sapiens
agtcgcaagtgacaa

SEQ ID NO: 874508 - DNA, 15 bp, Homo sapiens
gtcgcaagtgacaag

SEQ ID NO: 874509 - DNA, 15 bp, Homo sapiens
tcgcaagtgacaagt

SEQ ID NO: 874510 - DNA, 15 bp, Homo sapiens
cgcaagtgacaagtg

SEQ ID NO: 874511 - DNA, 15 bp, Homo sapiens
gcaagtgacaagtga

SEQ ID NO: 874512 - DNA, 15 bp, Homo sapiens
caagtgacaagtgag

SEQ ID NO: 874513 - DNA, 15 bp, Homo sapiens
aagtgacaagtgagc

SEQ ID NO: 874514 - DNA, 15 bp, Homo sapiens
agtgacaagtgagcc

SEQ ID NO: 874515 - DNA, 15 bp, Homo sapiens
gtgacaagtgagcct

SEQ ID NO: 874516 - DNA, 15 bp, Homo sapiens
tgacaagtgagcctt

SEQ ID NO: 874517 - DNA, 15 bp, Homo sapiens
gacaagtgagccttg

SEQ ID NO: 874518 - DNA, 15 bp, Homo sapiens
acaagtgagccttga

SEQ ID NO: 874519 - DNA, 15 bp, Homo sapiens
caagtgagccttgaa

SEQ ID NO: 874520 - DNA, 15 bp, Homo sapiens
aagtgagccttgaat

SEQ ID NO: 874521 - DNA, 15 bp, Homo sapiens
agtgagccttgaatt

SEQ ID NO: 874522 - DNA, 15 bp, Homo sapiens
gtgagccttgaatta

SEQ ID NO: 874523 - DNA, 15 bp, Homo sapiens
tgagccttgaattaa

SEQ ID NO: 874524 - DNA, 15 bp, Homo sapiens
gagccttgaattaat

SEQ ID NO: 874525 - DNA, 15 bp, Homo sapiens
agccttgaattaatt

SEQ ID NO: 874526 - DNA, 15 bp, Homo sapiens
gccttgaattaatta

SEQ ID NO: 874527 - DNA, 15 bp, Homo sapiens
ccttgaattaattat

SEQ ID NO: 874528 - DNA, 15 bp, Homo sapiens
cttgaattaattatg

SEQ ID NO: 874529 - DNA, 15 bp, Homo sapiens
ttgaattaattatgg

SEQ ID NO: 874530 - DNA, 15 bp, Homo sapiens
tgaattaattatggt

SEQ ID NO: 874531 - DNA, 15 bp, Homo sapiens
gaattaattatggtg

SEQ ID NO: 874532 - DNA, 15 bp, Homo sapiens
aattaattatggtgc

SEQ ID NO: 874533 - DNA, 15 bp, Homo sapiens
attaattatggtgcc

SEQ ID NO: 874534 - DNA, 15 bp, Homo sapiens
ttaattatggtgcct

SEQ ID NO: 874535 - DNA, 15 bp, Homo sapiens
taattatggtgcctt

SEQ ID NO: 874536 - DNA, 15 bp, Homo sapiens
aattatggtgccttt

SEQ ID NO: 874537 - DNA, 15 bp, Homo sapiens
attatggtgcctttt

SEQ ID NO: 874538 - DNA, 15 bp, Homo sapiens
ttatggtgcctttta

SEQ ID NO: 874539 - DNA, 15 bp, Homo sapiens
tatggtgccttttag

SEQ ID NO: 874540 - DNA, 15 bp, Homo sapiens
atggtgccttttagg

SEQ ID NO: 874541 - DNA, 15 bp, Homo sapiens
tggtgccttttaggg

SEQ ID NO: 874542 - DNA, 15 bp, Homo sapiens
ggtgccttttaggga

SEQ ID NO: 874543 - DNA, 15 bp, Homo sapiens
gtgccttttagggaa

SEQ ID NO: 874544 - DNA, 15 bp, Homo sapiens
tgccttttagggaaa

SEQ ID NO: 874545 - DNA, 15 bp, Homo sapiens
gccttttagggaaat

SEQ ID NO: 874546 - DNA, 15 bp, Homo sapiens
ccttttagggaaatt

SEQ ID NO: 874547 - DNA, 15 bp, Homo sapiens
cttttagggaaattg

SEQ ID NO: 874548 - DNA, 15 bp, Homo sapiens
ttttagggaaattga

SEQ ID NO: 874549 - DNA, 15 bp, Homo sapiens
tttagggaaattgaa

SEQ ID NO: 874550 - DNA, 15 bp, Homo sapiens
ttagggaaattgaaa

SEQ ID NO: 874551 - DNA, 15 bp, Homo sapiens
tagggaaattgaaaa

SEQ ID NO: 874552 - DNA, 15 bp, Homo sapiens
agggaaattgaaaat

SEQ ID NO: 874553 - DNA, 15 bp, Homo sapiens
gggaaattgaaaatt

SEQ ID NO: 874554 - DNA, 15 bp, Homo sapiens
ggaaattgaaaatta

SEQ ID NO: 874555 - DNA, 15 bp, Homo sapiens
gaaattgaaaattac

SEQ ID NO: 874556 - DNA, 15 bp, Homo sapiens
aaattgaaaattact

SEQ ID NO: 874557 - DNA, 15 bp, Homo sapiens
aattgaaaattactt

SEQ ID NO: 874558 - DNA, 15 bp, Homo sapiens
attgaaaattacttt

SEQ ID NO: 874559 - DNA, 15 bp, Homo sapiens
ttgaaaattactttg

SEQ ID NO: 874560 - DNA, 15 bp, Homo sapiens
tgaaaattactttgt

SEQ ID NO: 874561 - DNA, 15 bp, Homo sapiens
gaaaattactttgtg

SEQ ID NO: 874562 - DNA, 15 bp, Homo sapiens
aaaattactttgtga

SEQ ID NO: 874563 - DNA, 15 bp, Homo sapiens
aaattactttgtgag

SEQ ID NO: 874564 - DNA, 15 bp, Homo sapiens
aattactttgtgagt

SEQ ID NO: 874565 - DNA, 15 bp, Homo sapiens
attactttgtgagtg

SEQ ID NO: 874566 - DNA, 15 bp, Homo sapiens
ttactttgtgagtgg

SEQ ID NO: 874567 - DNA, 15 bp, Homo sapiens
tactttgtgagtgga

SEQ ID NO: 874568 - DNA, 15 bp, Homo sapiens
actttgtgagtggaa

SEQ ID NO: 874569 - DNA, 15 bp, Homo sapiens
ctttgtgagtggaag

SEQ ID NO: 874570 - DNA, 15 bp, Homo sapiens
tttgtgagtggaaga

SEQ ID NO: 874571 - DNA, 15 bp, Homo sapiens
ttgtgagtggaagac

SEQ ID NO: 874572 - DNA, 15 bp, Homo sapiens
tgtgagtggaagact

SEQ ID NO: 874573 - DNA, 15 bp, Homo sapiens
gtgagtggaagactt

SEQ ID NO: 874574 - DNA, 15 bp, Homo sapiens
tgagtggaagactta

SEQ ID NO: 874575 - DNA, 15 bp, Homo sapiens
gagtggaagacttag

SEQ ID NO: 874576 - DNA, 15 bp, Homo sapiens
agtggaagacttagg

SEQ ID NO: 874577 - DNA, 15 bp, Homo sapiens
gtggaagacttaggt

SEQ ID NO: 874578 - DNA, 15 bp, Homo sapiens
tggaagacttaggta

SEQ ID NO: 874579 - DNA, 15 bp, Homo sapiens
ggaagacttaggtaa

SEQ ID NO: 874580 - DNA, 15 bp, Homo sapiens
gaagacttaggtaat

SEQ ID NO: 874581 - DNA, 15 bp, Homo sapiens
aagacttaggtaatg

SEQ ID NO: 874582 - DNA, 15 bp, Homo sapiens
agacttaggtaatgt

SEQ ID NO: 874583 - DNA, 15 bp, Homo sapiens
gacttaggtaatgtc

SEQ ID NO: 874584 - DNA, 15 bp, Homo sapiens
acttaggtaatgtca

SEQ ID NO: 874585 - DNA, 15 bp, Homo sapiens
cttaggtaatgtcat

SEQ ID NO: 874586 - DNA, 15 bp, Homo sapiens
ttaggtaatgtcatt

SEQ ID NO: 874587 - DNA, 15 bp, Homo sapiens
taggtaatgtcatta

SEQ ID NO: 874588 - DNA, 15 bp, Homo sapiens
aggtaatgtcattat

SEQ ID NO: 874589 - DNA, 15 bp, Homo sapiens
ggtaatgtcattatg

SEQ ID NO: 874590 - DNA, 15 bp, Homo sapiens
gtaatgtcattatga

SEQ ID NO: 874591 - DNA, 15 bp, Homo sapiens
taatgtcattatgat

SEQ ID NO: 874592 - DNA, 15 bp, Homo sapiens
aatgtcattatgatg

SEQ ID NO: 874593 - DNA, 15 bp, Homo sapiens
atgtcattatgatgt

SEQ ID NO: 874594 - DNA, 15 bp, Homo sapiens
tgtcattatgatgtg

SEQ ID NO: 874595 - DNA, 15 bp, Homo sapiens
gtcattatgatgtga

SEQ ID NO: 874596 - DNA, 15 bp, Homo sapiens
tcattatgatgtgaa

SEQ ID NO: 874597 - DNA, 15 bp, Homo sapiens
cattatgatgtgaaa

SEQ ID NO: 874598 - DNA, 15 bp, Homo sapiens
attatgatgtgaaag

SEQ ID NO: 874599 - DNA, 15 bp, Homo sapiens
ttatgatgtgaaaga

SEQ ID NO: 874600 - DNA, 15 bp, Homo sapiens
tatgatgtgaaagac

SEQ ID NO: 874601 - DNA, 15 bp, Homo sapiens
atgatgtgaaagaca

SEQ ID NO: 874602 - DNA, 15 bp, Homo sapiens
tgatgtgaaagacaa

SEQ ID NO: 874603 - DNA, 15 bp, Homo sapiens
gatgtgaaagacaat

SEQ ID NO: 874604 - DNA, 15 bp, Homo sapiens
atgtgaaagacaata

SEQ ID NO: 874605 - DNA, 15 bp, Homo sapiens
tgtgaaagacaatat

SEQ ID NO: 874606 - DNA, 15 bp, Homo sapiens
gtgaaagacaatatc

SEQ ID NO: 874607 - DNA, 15 bp, Homo sapiens
tgaaagacaatatct

SEQ ID NO: 874608 - DNA, 15 bp, Homo sapiens
gaaagacaatatcta

SEQ ID NO: 874609 - DNA, 15 bp, Homo sapiens
aaagacaatatctaa

SEQ ID NO: 874610 - DNA, 15 bp, Homo sapiens
aagacaatatctaat

SEQ ID NO: 874611 - DNA, 15 bp, Homo sapiens
agacaatatctaatc

SEQ ID NO: 874612 - DNA, 15 bp, Homo sapiens
gacaatatctaatcc

SEQ ID NO: 874613 - DNA, 15 bp, Homo sapiens
acaatatctaatcct

SEQ ID NO: 874614 - DNA, 15 bp, Homo sapiens
caatatctaatcctg

SEQ ID NO: 874615 - DNA, 15 bp, Homo sapiens
aatatctaatcctgg

SEQ ID NO: 874616 - DNA, 15 bp, Homo sapiens
atatctaatcctggt

SEQ ID NO: 874617 - DNA, 15 bp, Homo sapiens
tatctaatcctggtc

SEQ ID NO: 874618 - DNA, 15 bp, Homo sapiens
atctaatcctggtcc

SEQ ID NO: 874619 - DNA, 15 bp, Homo sapiens
tctaatcctggtcct

SEQ ID NO: 874620 - DNA, 15 bp, Homo sapiens
ctaatcctggtcctt

SEQ ID NO: 874621 - DNA, 15 bp, Homo sapiens
taatcctggtccttg

SEQ ID NO: 874622 - DNA, 15 bp, Homo sapiens
aatcctggtccttga

SEQ ID NO: 874623 - DNA, 15 bp, Homo sapiens
atcctggtccttgat

SEQ ID NO: 874624 - DNA, 15 bp, Homo sapiens
tcctggtccttgatt

SEQ ID NO: 874625 - DNA, 15 bp, Homo sapiens
cctggtccttgattt

SEQ ID NO: 874626 - DNA, 15 bp, Homo sapiens
ctggtccttgatttc

SEQ ID NO: 874627 - DNA, 15 bp, Homo sapiens
tggtccttgatttca

SEQ ID NO: 874628 - DNA, 15 bp, Homo sapiens
ggtccttgatttcaa

SEQ ID NO: 874629 - DNA, 15 bp, Homo sapiens
gtccttgatttcaac

SEQ ID NO: 874630 - DNA, 15 bp, Homo sapiens
tccttgatttcaact

SEQ ID NO: 874631 - DNA, 15 bp, Homo sapiens
ccttgatttcaacta

SEQ ID NO: 874632 - DNA, 15 bp, Homo sapiens
cttgatttcaactaa

SEQ ID NO: 874633 - DNA, 15 bp, Homo sapiens
ttgatttcaactaac

SEQ ID NO: 874634 - DNA, 15 bp, Homo sapiens
tgatttcaactaact

SEQ ID NO: 874635 - DNA, 15 bp, Homo sapiens
gatttcaactaactg

SEQ ID NO: 874636 - DNA, 15 bp, Homo sapiens
atttcaactaactgg

SEQ ID NO: 874637 - DNA, 15 bp, Homo sapiens
tttcaactaactggt

SEQ ID NO: 874638 - DNA, 15 bp, Homo sapiens
ttcaactaactggtc

SEQ ID NO: 874639 - DNA, 15 bp, Homo sapiens
tcaactaactggtct

SEQ ID NO: 874640 - DNA, 15 bp, Homo sapiens
caactaactggtctt

SEQ ID NO: 874641 - DNA, 15 bp, Homo sapiens
aactaactggtcttt

SEQ ID NO: 874642 - DNA, 15 bp, Homo sapiens
actaactggtctttg

SEQ ID NO: 874643 - DNA, 15 bp, Homo sapiens
ctaactggtctttga

SEQ ID NO: 874644 - DNA, 15 bp, Homo sapiens
taactggtctttgag

SEQ ID NO: 874645 - DNA, 15 bp, Homo sapiens
aactggtctttgagg

SEQ ID NO: 874646 - DNA, 15 bp, Homo sapiens
actggtctttgagga

SEQ ID NO: 874647 - DNA, 15 bp, Homo sapiens
ctggtctttgaggag

SEQ ID NO: 874648 - DNA, 15 bp, Homo sapiens
tggtctttgaggagt

SEQ ID NO: 874649 - DNA, 15 bp, Homo sapiens
ggtctttgaggagtt

SEQ ID NO: 874650 - DNA, 15 bp, Homo sapiens
gtctttgaggagttg

SEQ ID NO: 874651 - DNA, 15 bp, Homo sapiens
tctttgaggagttgt

SEQ ID NO: 874652 - DNA, 15 bp, Homo sapiens
ctttgaggagttgtg

SEQ ID NO: 874653 - DNA, 15 bp, Homo sapiens
tttgaggagttgtgg

SEQ ID NO: 874654 - DNA, 15 bp, Homo sapiens
ttgaggagttgtggg

SEQ ID NO: 874655 - DNA, 15 bp, Homo sapiens
tgaggagttgtggga

SEQ ID NO: 874656 - DNA, 15 bp, Homo sapiens
gaggagttgtgggag

SEQ ID NO: 874657 - DNA, 15 bp, Homo sapiens
aggagttgtgggaga

SEQ ID NO: 874658 - DNA, 15 bp, Homo sapiens
ggagttgtgggagag

SEQ ID NO: 874659 - DNA, 15 bp, Homo sapiens
gagttgtgggagagg

SEQ ID NO: 874660 - DNA, 15 bp, Homo sapiens
agttgtgggagaggc

SEQ ID NO: 874661 - DNA, 15 bp, Homo sapiens
gttgtgggagaggct

SEQ ID NO: 874662 - DNA, 15 bp, Homo sapiens
ttgtgggagaggctt

SEQ ID NO: 874663 - DNA, 15 bp, Homo sapiens
tgtgggagaggcttt

SEQ ID NO: 874664 - DNA, 15 bp, Homo sapiens
gtgggagaggctttg

SEQ ID NO: 874665 - DNA, 15 bp, Homo sapiens
tgggagaggctttgg

SEQ ID NO: 874666 - DNA, 15 bp, Homo sapiens
gggagaggctttgga

SEQ ID NO: 874667 - DNA, 15 bp, Homo sapiens
ggagaggctttggaa

SEQ ID NO: 874668 - DNA, 15 bp, Homo sapiens
gagaggctttggaag

SEQ ID NO: 874669 - DNA, 15 bp, Homo sapiens
agaggctttggaagt

SEQ ID NO: 874670 - DNA, 15 bp, Homo sapiens
gaggctttggaagtg

SEQ ID NO: 874671 - DNA, 15 bp, Homo sapiens
aggctttggaagtgg

SEQ ID NO: 874672 - DNA, 15 bp, Homo sapiens
ggctttggaagtggg

SEQ ID NO: 874673 - DNA, 15 bp, Homo sapiens
gctttggaagtgggt

SEQ ID NO: 874674 - DNA, 15 bp, Homo sapiens
ctttggaagtgggtc

SEQ ID NO: 874675 - DNA, 15 bp, Homo sapiens
tttggaagtgggtct

SEQ ID NO: 874676 - DNA, 15 bp, Homo sapiens
ttggaagtgggtctc

SEQ ID NO: 874677 - DNA, 15 bp, Homo sapiens
tggaagtgggtctct

SEQ ID NO: 874678 - DNA, 15 bp, Homo sapiens
ggaagtgggtctcta

SEQ ID NO: 874679 - DNA, 15 bp, Homo sapiens
gaagtgggtctctat

SEQ ID NO: 874680 - DNA, 15 bp, Homo sapiens
aagtgggtctctatc

SEQ ID NO: 874681 - DNA, 15 bp, Homo sapiens
agtgggtctctatca

SEQ ID NO: 874682 - DNA, 15 bp, Homo sapiens
gtgggtctctatcac

SEQ ID NO: 874683 - DNA, 15 bp, Homo sapiens
tgggtctctatcacc

SEQ ID NO: 874684 - DNA, 15 bp, Homo sapiens
gggtctctatcacct

SEQ ID NO: 874685 - DNA, 15 bp, Homo sapiens
ggtctctatcacctt

SEQ ID NO: 874686 - DNA, 15 bp, Homo sapiens
gtctctatcaccttg

SEQ ID NO: 874687 - DNA, 15 bp, Homo sapiens
tctctatcaccttgc

SEQ ID NO: 874688 - DNA, 15 bp, Homo sapiens
ctctatcaccttgca

SEQ ID NO: 874689 - DNA, 15 bp, Homo sapiens
tctatcaccttgcaa

SEQ ID NO: 874690 - DNA, 15 bp, Homo sapiens
ctatcaccttgcaaa

SEQ ID NO: 874691 - DNA, 15 bp, Homo sapiens
tatcaccttgcaaac

SEQ ID NO: 874692 - DNA, 15 bp, Homo sapiens
atcaccttgcaaact

SEQ ID NO: 874693 - DNA, 15 bp, Homo sapiens
tcaccttgcaaactg

SEQ ID NO: 874694 - DNA, 15 bp, Homo sapiens
caccttgcaaactga

SEQ ID NO: 874695 - DNA, 15 bp, Homo sapiens
accttgcaaactgaa

SEQ ID NO: 874696 - DNA, 15 bp, Homo sapiens
ccttgcaaactgaag

SEQ ID NO: 874697 - DNA, 15 bp, Homo sapiens
cttgcaaactgaaga

SEQ ID NO: 874698 - DNA, 15 bp, Homo sapiens
ttgcaaactgaagat

SEQ ID NO: 874699 - DNA, 15 bp, Homo sapiens
tgcaaactgaagatg

SEQ ID NO: 874700 - DNA, 15 bp, Homo sapiens
gcaaactgaagatgt

SEQ ID NO: 874701 - DNA, 15 bp, Homo sapiens
caaactgaagatgtt

SEQ ID NO: 874702 - DNA, 15 bp, Homo sapiens
aaactgaagatgttg

SEQ ID NO: 874703 - DNA, 15 bp, Homo sapiens
aactgaagatgttgg

SEQ ID NO: 874704 - DNA, 15 bp, Homo sapiens
actgaagatgttggg

SEQ ID NO: 874705 - DNA, 15 bp, Homo sapiens
ctgaagatgttggga

SEQ ID NO: 874706 - DNA, 15 bp, Homo sapiens
tgaagatgttgggat

SEQ ID NO: 874707 - DNA, 15 bp, Homo sapiens
gaagatgttgggatc

SEQ ID NO: 874708 - DNA, 15 bp, Homo sapiens
aagatgttgggatcc

SEQ ID NO: 874709 - DNA, 15 bp, Homo sapiens
agatgttgggatccc

SEQ ID NO: 874710 - DNA, 15 bp, Homo sapiens
gatgttgggatccct

SEQ ID NO: 874711 - DNA, 15 bp, Homo sapiens
atgttgggatccctt

SEQ ID NO: 874712 - DNA, 15 bp, Homo sapiens
tgttgggatcccttg

SEQ ID NO: 874713 - DNA, 15 bp, Homo sapiens
gttgggatcccttgt

SEQ ID NO: 874714 - DNA, 15 bp, Homo sapiens
ttgggatcccttgtt

SEQ ID NO: 874715 - DNA, 15 bp, Homo sapiens
tgggatcccttgttc

SEQ ID NO: 874716 - DNA, 15 bp, Homo sapiens
gggatcccttgttca

SEQ ID NO: 874717 - DNA, 15 bp, Homo sapiens
ggatcccttgttcag

SEQ ID NO: 874718 - DNA, 15 bp, Homo sapiens
gatcccttgttcagg

SEQ ID NO: 874719 - DNA, 15 bp, Homo sapiens
atcccttgttcaggg

SEQ ID NO: 874720 - DNA, 15 bp, Homo sapiens
tcccttgttcaggga

SEQ ID NO: 874721 - DNA, 15 bp, Homo sapiens
cccttgttcagggag

SEQ ID NO: 874722 - DNA, 15 bp, Homo sapiens
ccttgttcagggaga

SEQ ID NO: 874723 - DNA, 15 bp, Homo sapiens
cttgttcagggagat

SEQ ID NO: 874724 - DNA, 15 bp, Homo sapiens
ttgttcagggagatt

SEQ ID NO: 874725 - DNA, 15 bp, Homo sapiens
tgttcagggagattt

SEQ ID NO: 874726 - DNA, 15 bp, Homo sapiens
gttcagggagatttc

SEQ ID NO: 874727 - DNA, 15 bp, Homo sapiens
ttcagggagatttct

SEQ ID NO: 874728 - DNA, 15 bp, Homo sapiens
tcagggagatttctc

SEQ ID NO: 874729 - DNA, 15 bp, Homo sapiens
cagggagatttctca

SEQ ID NO: 874730 - DNA, 15 bp, Homo sapiens
agggagatttctcat

SEQ ID NO: 874731 - DNA, 15 bp, Homo sapiens
gggagatttctcatg

SEQ ID NO: 874732 - DNA, 15 bp, Homo sapiens
ggagatttctcatga

SEQ ID NO: 874733 - DNA, 15 bp, Homo sapiens
gagatttctcatgat

SEQ ID NO: 874734 - DNA, 15 bp, Homo sapiens
agatttctcatgatc

SEQ ID NO: 874735 - DNA, 15 bp, Homo sapiens
gatttctcatgatcc

SEQ ID NO: 874736 - DNA, 15 bp, Homo sapiens
atttctcatgatcct

SEQ ID NO: 874737 - DNA, 15 bp, Homo sapiens
tttctcatgatcctc

SEQ ID NO: 874738 - DNA, 15 bp, Homo sapiens
ttctcatgatcctcc

SEQ ID NO: 874739 - DNA, 15 bp, Homo sapiens
tctcatgatcctcct

SEQ ID NO: 874740 - DNA, 15 bp, Homo sapiens
ctcatgatcctcctt

SEQ ID NO: 874741 - DNA, 15 bp, Homo sapiens
tcatgatcctccttt

SEQ ID NO: 874742 - DNA, 15 bp, Homo sapiens
catgatcctcctttc

SEQ ID NO: 874743 - DNA, 15 bp, Homo sapiens
atgatcctcctttcc

SEQ ID NO: 874744 - DNA, 15 bp, Homo sapiens
tgatcctcctttcca

SEQ ID NO: 874745 - DNA, 15 bp, Homo sapiens
gatcctcctttccat

SEQ ID NO: 874746 - DNA, 15 bp, Homo sapiens
atcctcctttccata

SEQ ID NO: 874747 - DNA, 15 bp, Homo sapiens
tcctcctttccatac

SEQ ID NO: 874748 - DNA, 15 bp, Homo sapiens
cctcctttccataca

SEQ ID NO: 874749 - DNA, 15 bp, Homo sapiens
ctcctttccatacaa

SEQ ID NO: 874750 - DNA, 15 bp, Homo sapiens
tcctttccatacaac

SEQ ID NO: 874751 - DNA, 15 bp, Homo sapiens
cctttccatacaaca

SEQ ID NO: 874752 - DNA, 15 bp, Homo sapiens
ctttccatacaacaa

SEQ ID NO: 874753 - DNA, 15 bp, Homo sapiens
tttccatacaacaaa

SEQ ID NO: 874754 - DNA, 15 bp, Homo sapiens
ttccatacaacaaac

SEQ ID NO: 874755 - DNA, 15 bp, Homo sapiens
tccatacaacaaacg

SEQ ID NO: 874756 - DNA, 15 bp, Homo sapiens
ccatacaacaaacgg

SEQ ID NO: 874757 - DNA, 15 bp, Homo sapiens
catacaacaaacggc

SEQ ID NO: 874758 - DNA, 15 bp, Homo sapiens
atacaacaaacggcc

SEQ ID NO: 874759 - DNA, 15 bp, Homo sapiens
tacaacaaacggccc

SEQ ID NO: 874760 - DNA, 15 bp, Homo sapiens
acaacaaacggccca

SEQ ID NO: 874761 - DNA, 15 bp, Homo sapiens
caacaaacggcccaa

SEQ ID NO: 874762 - DNA, 15 bp, Homo sapiens
aacaaacggcccaat

SEQ ID NO: 874763 - DNA, 15 bp, Homo sapiens
acaaacggcccaatt

SEQ ID NO: 874764 - DNA, 15 bp, Homo sapiens
caaacggcccaattc

SEQ ID NO: 874765 - DNA, 15 bp, Homo sapiens
aaacggcccaattcc

SEQ ID NO: 874766 - DNA, 15 bp, Homo sapiens
aacggcccaattcct

SEQ ID NO: 874767 - DNA, 15 bp, Homo sapiens
acggcccaattcctc

SEQ ID NO: 874768 - DNA, 15 bp, Homo sapiens
cggcccaattcctct

SEQ ID NO: 874769 - DNA, 15 bp, Homo sapiens
ggcccaattcctctg

SEQ ID NO: 874770 - DNA, 15 bp, Homo sapiens
gcccaattcctctgg

SEQ ID NO: 874771 - DNA, 15 bp, Homo sapiens
cccaattcctctggg

SEQ ID NO: 874772 - DNA, 15 bp, Homo sapiens
ccaattcctctgggt

SEQ ID NO: 874773 - DNA, 15 bp, Homo sapiens
caattcctctgggtc

SEQ ID NO: 874774 - DNA, 15 bp, Homo sapiens
aattcctctgggtct

SEQ ID NO: 874775 - DNA, 15 bp, Homo sapiens
attcctctgggtctc

SEQ ID NO: 874776 - DNA, 15 bp, Homo sapiens
ttcctctgggtctcc

SEQ ID NO: 874777 - DNA, 15 bp, Homo sapiens
tcctctgggtctccc

SEQ ID NO: 874778 - DNA, 15 bp, Homo sapiens
cctctgggtctccct

SEQ ID NO: 874779 - DNA, 15 bp, Homo sapiens
ctctgggtctccctg

SEQ ID NO: 874780 - DNA, 15 bp, Homo sapiens
tctgggtctccctgg

SEQ ID NO: 874781 - DNA, 15 bp, Homo sapiens
ctgggtctccctgga

SEQ ID NO: 874782 - DNA, 15 bp, Homo sapiens
tgggtctccctggat

SEQ ID NO: 874783 - DNA, 15 bp, Homo sapiens
gggtctccctggatc

SEQ ID NO: 874784 - DNA, 15 bp, Homo sapiens
ggtctccctggatca

SEQ ID NO: 874785 - DNA, 15 bp, Homo sapiens
gtctccctggatcac

SEQ ID NO: 874786 - DNA, 15 bp, Homo sapiens
tctccctggatcaca

SEQ ID NO: 874787 - DNA, 15 bp, Homo sapiens
ctccctggatcacag

SEQ ID NO: 874788 - DNA, 15 bp, Homo sapiens
tccctggatcacagc

SEQ ID NO: 874789 - DNA, 15 bp, Homo sapiens
ccctggatcacagca

SEQ ID NO: 874790 - DNA, 15 bp, Homo sapiens
cctggatcacagcag

SEQ ID NO: 874791 - DNA, 15 bp, Homo sapiens
ctggatcacagcagt

SEQ ID NO: 874792 - DNA, 15 bp, Homo sapiens
tggatcacagcagtg

SEQ ID NO: 874793 - DNA, 15 bp, Homo sapiens
ggatcacagcagtgt

SEQ ID NO: 874794 - DNA, 15 bp, Homo sapiens
gatcacagcagtgtt

SEQ ID NO: 874795 - DNA, 15 bp, Homo sapiens
atcacagcagtgttg

SEQ ID NO: 874796 - DNA, 15 bp, Homo sapiens
tcacagcagtgttga

SEQ ID NO: 874797 - DNA, 15 bp, Homo sapiens
cacagcagtgttgat

SEQ ID NO: 874798 - DNA, 15 bp, Homo sapiens
acagcagtgttgatt

SEQ ID NO: 874799 - DNA, 15 bp, Homo sapiens
cagcagtgttgattg

SEQ ID NO: 874800 - DNA, 15 bp, Homo sapiens
agcagtgttgattgg

SEQ ID NO: 874801 - DNA, 15 bp, Homo sapiens
gcagtgttgattggt

SEQ ID NO: 874802 - DNA, 15 bp, Homo sapiens
cagtgttgattggtg

SEQ ID NO: 874803 - DNA, 15 bp, Homo sapiens
agtgttgattggtgt

SEQ ID NO: 874804 - DNA, 15 bp, Homo sapiens
gtgttgattggtgtg

SEQ ID NO: 874805 - DNA, 15 bp, Homo sapiens
tgttgattggtgtgc

SEQ ID NO: 874806 - DNA, 15 bp, Homo sapiens
gttgattggtgtgct

SEQ ID NO: 874807 - DNA, 15 bp, Homo sapiens
ttgattggtgtgctc

SEQ ID NO: 874808 - DNA, 15 bp, Homo sapiens
tgattggtgtgctca

SEQ ID NO: 874809 - DNA, 15 bp, Homo sapiens
gattggtgtgctcaa

SEQ ID NO: 874810 - DNA, 15 bp, Homo sapiens
attggtgtgctcaat

SEQ ID NO: 874811 - DNA, 15 bp, Homo sapiens
ttggtgtgctcaatg

SEQ ID NO: 874812 - DNA, 15 bp, Homo sapiens
tggtgtgctcaatgg

SEQ ID NO: 874813 - DNA, 15 bp, Homo sapiens
ggtgtgctcaatggc

SEQ ID NO: 874814 - DNA, 15 bp, Homo sapiens
gtgtgctcaatggca

SEQ ID NO: 874815 - DNA, 15 bp, Homo sapiens
tgtgctcaatggcaa

SEQ ID NO: 874816 - DNA, 15 bp, Homo sapiens
gtgctcaatggcaaa

SEQ ID NO: 874817 - DNA, 15 bp, Homo sapiens
tgctcaatggcaaat

SEQ ID NO: 874818 - DNA, 15 bp, Homo sapiens
gctcaatggcaaatg

SEQ ID NO: 874819 - DNA, 15 bp, Homo sapiens
ctcaatggcaaatgc

SEQ ID NO: 874820 - DNA, 15 bp, Homo sapiens
tcaatggcaaatgct

SEQ ID NO: 874821 - DNA, 15 bp, Homo sapiens
caatggcaaatgctt

SEQ ID NO: 874822 - DNA, 15 bp, Homo sapiens
aatggcaaatgcttg

SEQ ID NO: 874823 - DNA, 15 bp, Homo sapiens
atggcaaatgcttgg

SEQ ID NO: 874824 - DNA, 15 bp, Homo sapiens
tggcaaatgcttgga

SEQ ID NO: 874825 - DNA, 15 bp, Homo sapiens
ggcaaatgcttggac

SEQ ID NO: 874826 - DNA, 15 bp, Homo sapiens
gcaaatgcttggact

SEQ ID NO: 874827 - DNA, 15 bp, Homo sapiens
caaatgcttggactt

SEQ ID NO: 874828 - DNA, 15 bp, Homo sapiens
aaatgcttggacttt

SEQ ID NO: 874829 - DNA, 15 bp, Homo sapiens
aatgcttggactttc

SEQ ID NO: 874830 - DNA, 15 bp, Homo sapiens
atgcttggactttct

SEQ ID NO: 874831 - DNA, 15 bp, Homo sapiens
tgcttggactttctt

SEQ ID NO: 874832 - DNA, 15 bp, Homo sapiens
gcttggactttcttc

SEQ ID NO: 874833 - DNA, 15 bp, Homo sapiens
cttggactttcttct

SEQ ID NO: 874834 - DNA, 15 bp, Homo sapiens
ttggactttcttcta

SEQ ID NO: 874835 - DNA, 15 bp, Homo sapiens
tggactttcttctag

SEQ ID NO: 874836 - DNA, 15 bp, Homo sapiens
ggactttcttctagc

SEQ ID NO: 874837 - DNA, 15 bp, Homo sapiens
gactttcttctagca

SEQ ID NO: 874838 - DNA, 15 bp, Homo sapiens
actttcttctagcaa

SEQ ID NO: 874839 - DNA, 15 bp, Homo sapiens
ctttcttctagcaat

SEQ ID NO: 874840 - DNA, 15 bp, Homo sapiens
tttcttctagcaata

SEQ ID NO: 874841 - DNA, 15 bp, Homo sapiens
ttcttctagcaatag

SEQ ID NO: 874842 - DNA, 15 bp, Homo sapiens
tcttctagcaataga

SEQ ID NO: 874843 - DNA, 15 bp, Homo sapiens
cttctagcaatagaa

SEQ ID NO: 874844 - DNA, 15 bp, Homo sapiens
ttctagcaatagaag

SEQ ID NO: 874845 - DNA, 15 bp, Homo sapiens
tctagcaatagaagc

SEQ ID NO: 874846 - DNA, 15 bp, Homo sapiens
ctagcaatagaagct

SEQ ID NO: 874847 - DNA, 15 bp, Homo sapiens
tagcaatagaagctt

SEQ ID NO: 874848 - DNA, 15 bp, Homo sapiens
agcaatagaagcttt

SEQ ID NO: 874849 - DNA, 15 bp, Homo sapiens
gcaatagaagcttta

SEQ ID NO: 874850 - DNA, 15 bp, Homo sapiens
caatagaagctttag

SEQ ID NO: 874851 - DNA, 15 bp, Homo sapiens
aatagaagctttaga

SEQ ID NO: 874852 - DNA, 15 bp, Homo sapiens
atagaagctttagaa

SEQ ID NO: 874853 - DNA, 15 bp, Homo sapiens
tagaagctttagaaa

SEQ ID NO: 874854 - DNA, 15 bp, Homo sapiens
agaagctttagaaac

SEQ ID NO: 874855 - DNA, 15 bp, Homo sapiens
gaagctttagaaact

SEQ ID NO: 874856 - DNA, 15 bp, Homo sapiens
aagctttagaaactt

SEQ ID NO: 874857 - DNA, 15 bp, Homo sapiens
agctttagaaacttt

SEQ ID NO: 874858 - DNA, 15 bp, Homo sapiens
gctttagaaactttg

SEQ ID NO: 874859 - DNA, 15 bp, Homo sapiens
ctttagaaactttga

SEQ ID NO: 874860 - DNA, 15 bp, Homo sapiens
tttagaaactttgat

SEQ ID NO: 874861 - DNA, 15 bp, Homo sapiens
ttagaaactttgatt

SEQ ID NO: 874862 - DNA, 15 bp, Homo sapiens
tagaaactttgattt

SEQ ID NO: 874863 - DNA, 15 bp, Homo sapiens
agaaactttgattta

SEQ ID NO: 874864 - DNA, 15 bp, Homo sapiens
gaaactttgatttag

SEQ ID NO: 874865 - DNA, 15 bp, Homo sapiens
aaactttgatttagt

SEQ ID NO: 874866 - DNA, 15 bp, Homo sapiens
aactttgatttagtc

SEQ ID NO: 874867 - DNA, 15 bp, Homo sapiens
actttgatttagtcc

SEQ ID NO: 874868 - DNA, 15 bp, Homo sapiens
ctttgatttagtccc

SEQ ID NO: 874869 - DNA, 15 bp, Homo sapiens
tttgatttagtccct

SEQ ID NO: 874870 - DNA, 15 bp, Homo sapiens
ttgatttagtccctg

SEQ ID NO: 874871 - DNA, 15 bp, Homo sapiens
tgatttagtccctgt

SEQ ID NO: 874872 - DNA, 15 bp, Homo sapiens
gatttagtccctgtg

SEQ ID NO: 874873 - DNA, 15 bp, Homo sapiens
atttagtccctgtgg

SEQ ID NO: 874874 - DNA, 15 bp, Homo sapiens
tttagtccctgtgga

SEQ ID NO: 874875 - DNA, 15 bp, Homo sapiens
ttagtccctgtggac

SEQ ID NO: 874876 - DNA, 15 bp, Homo sapiens
tagtccctgtggaca

SEQ ID NO: 874877 - DNA, 15 bp, Homo sapiens
agtccctgtggacaa

SEQ ID NO: 874878 - DNA, 15 bp, Homo sapiens
gtccctgtggacaac

SEQ ID NO: 874879 - DNA, 15 bp, Homo sapiens
tccctgtggacaact

SEQ ID NO: 874880 - DNA, 15 bp, Homo sapiens
ccctgtggacaactg

SEQ ID NO: 874881 - DNA, 15 bp, Homo sapiens
cctgtggacaactga

SEQ ID NO: 874882 - DNA, 15 bp, Homo sapiens
ctgtggacaactgac

SEQ ID NO: 874883 - DNA, 15 bp, Homo sapiens
tgtggacaactgact

SEQ ID NO: 874884 - DNA, 15 bp, Homo sapiens
gtggacaactgactg

SEQ ID NO: 874885 - DNA, 15 bp, Homo sapiens
tggacaactgactgt

SEQ ID NO: 874886 - DNA, 15 bp, Homo sapiens
ggacaactgactgta

SEQ ID NO: 874887 - DNA, 15 bp, Homo sapiens
gacaactgactgtac

SEQ ID NO: 874888 - DNA, 15 bp, Homo sapiens
acaactgactgtaca

SEQ ID NO: 874889 - DNA, 15 bp, Homo sapiens
caactgactgtacac

SEQ ID NO: 874890 - DNA, 15 bp, Homo sapiens
aactgactgtacact

SEQ ID NO: 874891 - DNA, 15 bp, Homo sapiens
actgactgtacactc

SEQ ID NO: 874892 - DNA, 15 bp, Homo sapiens
ctgactgtacactct

SEQ ID NO: 874893 - DNA, 15 bp, Homo sapiens
tgactgtacactctc

SEQ ID NO: 874894 - DNA, 15 bp, Homo sapiens
gactgtacactctcc

SEQ ID NO: 874895 - DNA, 15 bp, Homo sapiens
actgtacactctcca

SEQ ID NO: 874896 - DNA, 15 bp, Homo sapiens
ctgtacactctccac

SEQ ID NO: 874897 - DNA, 15 bp, Homo sapiens
tgtacactctccacc

SEQ ID NO: 874898 - DNA, 15 bp, Homo sapiens
gtacactctccacct

SEQ ID NO: 874899 - DNA, 15 bp, Homo sapiens
tacactctccacctg

SEQ ID NO: 874900 - DNA, 15 bp, Homo sapiens
acactctccacctgt

SEQ ID NO: 874901 - DNA, 15 bp, Homo sapiens
cactctccacctgtt

SEQ ID NO: 874902 - DNA, 15 bp, Homo sapiens
actctccacctgttc

SEQ ID NO: 874903 - DNA, 15 bp, Homo sapiens
ctctccacctgttcc

SEQ ID NO: 874904 - DNA, 15 bp, Homo sapiens
tctccacctgttcca

SEQ ID NO: 874905 - DNA, 15 bp, Homo sapiens
ctccacctgttccag

SEQ ID NO: 874906 - DNA, 15 bp, Homo sapiens
tccacctgttccaga

SEQ ID NO: 874907 - DNA, 15 bp, Homo sapiens
ccacctgttccagag

SEQ ID NO: 874908 - DNA, 15 bp, Homo sapiens
cacctgttccagaga

SEQ ID NO: 874909 - DNA, 15 bp, Homo sapiens
acctgttccagagat

SEQ ID NO: 874910 - DNA, 15 bp, Homo sapiens
cctgttccagagatc

SEQ ID NO: 874911 - DNA, 15 bp, Homo sapiens
ctgttccagagatct

SEQ ID NO: 874912 - DNA, 15 bp, Homo sapiens
tgttccagagatctc

SEQ ID NO: 874913 - DNA, 15 bp, Homo sapiens
gttccagagatctct

SEQ ID NO: 874914 - DNA, 15 bp, Homo sapiens
ttccagagatctctc

SEQ ID NO: 874915 - DNA, 15 bp, Homo sapiens
tccagagatctctct

SEQ ID NO: 874916 - DNA, 15 bp, Homo sapiens
ccagagatctctctg

SEQ ID NO: 874917 - DNA, 15 bp, Homo sapiens
cagagatctctctgc

SEQ ID NO: 874918 - DNA, 15 bp, Homo sapiens
agagatctctctgca

SEQ ID NO: 874919 - DNA, 15 bp, Homo sapiens
gagatctctctgcag

SEQ ID NO: 874920 - DNA, 15 bp, Homo sapiens
agatctctctgcagc

SEQ ID NO: 874921 - DNA, 15 bp, Homo sapiens
gatctctctgcagca

SEQ ID NO: 874922 - DNA, 15 bp, Homo sapiens
atctctctgcagcac

SEQ ID NO: 874923 - DNA, 15 bp, Homo sapiens
tctctctgcagcaca

SEQ ID NO: 874924 - DNA, 15 bp, Homo sapiens
ctctctgcagcacag

SEQ ID NO: 874925 - DNA, 15 bp, Homo sapiens
tctctgcagcacagg

SEQ ID NO: 874926 - DNA, 15 bp, Homo sapiens
ctctgcagcacaggc

SEQ ID NO: 874927 - DNA, 15 bp, Homo sapiens
tctgcagcacaggcc

SEQ ID NO: 874928 - DNA, 15 bp, Homo sapiens
ctgcagcacaggcca

SEQ ID NO: 874929 - DNA, 15 bp, Homo sapiens
tgcagcacaggccag

SEQ ID NO: 874930 - DNA, 15 bp, Homo sapiens
gcagcacaggccagc

SEQ ID NO: 874931 - DNA, 15 bp, Homo sapiens
cagcacaggccagcc

SEQ ID NO: 874932 - DNA, 15 bp, Homo sapiens
agcacaggccagcct

SEQ ID NO: 874933 - DNA, 15 bp, Homo sapiens
gcacaggccagccta

SEQ ID NO: 874934 - DNA, 15 bp, Homo sapiens
cacaggccagcctaa

SEQ ID NO: 874935 - DNA, 15 bp, Homo sapiens
acaggccagcctaag

SEQ ID NO: 874936 - DNA, 15 bp, Homo sapiens
caggccagcctaagg

SEQ ID NO: 874937 - DNA, 15 bp, Homo sapiens
aggccagcctaaggc

SEQ ID NO: 874938 - DNA, 15 bp, Homo sapiens
ggccagcctaaggca

SEQ ID NO: 874939 - DNA, 15 bp, Homo sapiens
gccagcctaaggcac

SEQ ID NO: 874940 - DNA, 15 bp, Homo sapiens
ccagcctaaggcact

SEQ ID NO: 874941 - DNA, 15 bp, Homo sapiens
cagcctaaggcactt

SEQ ID NO: 874942 - DNA, 15 bp, Homo sapiens
agcctaaggcacttg

SEQ ID NO: 874943 - DNA, 15 bp, Homo sapiens
gcctaaggcacttga

SEQ ID NO: 874944 - DNA, 15 bp, Homo sapiens
cctaaggcacttgaa

SEQ ID NO: 874945 - DNA, 15 bp, Homo sapiens
ctaaggcacttgaaa

SEQ ID NO: 874946 - DNA, 15 bp, Homo sapiens
taaggcacttgaaat

SEQ ID NO: 874947 - DNA, 15 bp, Homo sapiens
aaggcacttgaaatt

SEQ ID NO: 874948 - DNA, 15 bp, Homo sapiens
aggcacttgaaatta

SEQ ID NO: 874949 - DNA, 15 bp, Homo sapiens
ggcacttgaaattac

SEQ ID NO: 874950 - DNA, 15 bp, Homo sapiens
gcacttgaaattact

SEQ ID NO: 874951 - DNA, 15 bp, Homo sapiens
cacttgaaattacta

SEQ ID NO: 874952 - DNA, 15 bp, Homo sapiens
acttgaaattactac

SEQ ID NO: 874953 - DNA, 15 bp, Homo sapiens
cttgaaattactaca

SEQ ID NO: 874954 - DNA, 15 bp, Homo sapiens
ttgaaattactacag

SEQ ID NO: 874955 - DNA, 15 bp, Homo sapiens
tgaaattactacagc

SEQ ID NO: 874956 - DNA, 15 bp, Homo sapiens
gaaattactacagca

SEQ ID NO: 874957 - DNA, 15 bp, Homo sapiens
aaattactacagcaa

SEQ ID NO: 874958 - DNA, 15 bp, Homo sapiens
aattactacagcaac

SEQ ID NO: 874959 - DNA, 15 bp, Homo sapiens
attactacagcaaca

SEQ ID NO: 874960 - DNA, 15 bp, Homo sapiens
ttactacagcaacag

SEQ ID NO: 874961 - DNA, 15 bp, Homo sapiens
tactacagcaacagc

SEQ ID NO: 874962 - DNA, 15 bp, Homo sapiens
actacagcaacagcc

SEQ ID NO: 874963 - DNA, 15 bp, Homo sapiens
ctacagcaacagcca

SEQ ID NO: 874964 - DNA, 15 bp, Homo sapiens
tacagcaacagccat

SEQ ID NO: 874965 - DNA, 15 bp, Homo sapiens
acagcaacagccata

SEQ ID NO: 874966 - DNA, 15 bp, Homo sapiens
cagcaacagccatag

SEQ ID NO: 874967 - DNA, 15 bp, Homo sapiens
agcaacagccatagt

SEQ ID NO: 874968 - DNA, 15 bp, Homo sapiens
gcaacagccatagta

SEQ ID NO: 874969 - DNA, 15 bp, Homo sapiens
caacagccatagtaa

SEQ ID NO: 874970 - DNA, 15 bp, Homo sapiens
aacagccatagtaaa

SEQ ID NO: 874971 - DNA, 15 bp, Homo sapiens
acagccatagtaaag

SEQ ID NO: 874972 - DNA, 15 bp, Homo sapiens
cagccatagtaaaga

SEQ ID NO: 874973 - DNA, 15 bp, Homo sapiens
agccatagtaaagaa

SEQ ID NO: 874974 - DNA, 15 bp, Homo sapiens
gccatagtaaagaaa

SEQ ID NO: 874975 - DNA, 15 bp, Homo sapiens
ccatagtaaagaaat

SEQ ID NO: 874976 - DNA, 15 bp, Homo sapiens
catagtaaagaaatt

SEQ ID NO: 874977 - DNA, 15 bp, Homo sapiens
atagtaaagaaattt

SEQ ID NO: 874978 - DNA, 15 bp, Homo sapiens
tagtaaagaaattta

SEQ ID NO: 874979 - DNA, 15 bp, Homo sapiens
agtaaagaaatttat

SEQ ID NO: 874980 - DNA, 15 bp, Homo sapiens
gtaaagaaatttata

SEQ ID NO: 874981 - DNA, 15 bp, Homo sapiens
taaagaaatttatac

SEQ ID NO: 874982 - DNA, 15 bp, Homo sapiens
aaagaaatttatact

SEQ ID NO: 874983 - DNA, 15 bp, Homo sapiens
aagaaatttatactg

SEQ ID NO: 874984 - DNA, 15 bp, Homo sapiens
agaaatttatactgt

SEQ ID NO: 874985 - DNA, 15 bp, Homo sapiens
gaaatttatactgtc

SEQ ID NO: 874986 - DNA, 15 bp, Homo sapiens
aaatttatactgtct

SEQ ID NO: 874987 - DNA, 15 bp, Homo sapiens
aatttatactgtctg

SEQ ID NO: 874988 - DNA, 15 bp, Homo sapiens
atttatactgtctgg

SEQ ID NO: 874989 - DNA, 15 bp, Homo sapiens
tttatactgtctggc

SEQ ID NO: 874990 - DNA, 15 bp, Homo sapiens
ttatactgtctggcc

SEQ ID NO: 874991 - DNA, 15 bp, Homo sapiens
tatactgtctggcca

SEQ ID NO: 874992 - DNA, 15 bp, Homo sapiens
atactgtctggccag

SEQ ID NO: 874993 - DNA, 15 bp, Homo sapiens
tactgtctggccaga

SEQ ID NO: 874994 - DNA, 15 bp, Homo sapiens
actgtctggccagaa

SEQ ID NO: 874995 - DNA, 15 bp, Homo sapiens
ctgtctggccagaaa

SEQ ID NO: 874996 - DNA, 15 bp, Homo sapiens
tgtctggccagaaac

SEQ ID NO: 874997 - DNA, 15 bp, Homo sapiens
gtctggccagaaaca

SEQ ID NO: 874998 - DNA, 15 bp, Homo sapiens
tctggccagaaacag

SEQ ID NO: 874999 - DNA, 15 bp, Homo sapiens
ctggccagaaacagt

SEQ ID NO: 875000 - DNA, 15 bp, Homo sapiens
tggccagaaacagtt

SEQ ID NO: 875001 - DNA, 15 bp, Homo sapiens
ggccagaaacagtta

SEQ ID NO: 875002 - DNA, 15 bp, Homo sapiens
gccagaaacagttac

SEQ ID NO: 875003 - DNA, 15 bp, Homo sapiens
ccagaaacagttaca

SEQ ID NO: 875004 - DNA, 15 bp, Homo sapiens
cagaaacagttacag

SEQ ID NO: 875005 - DNA, 15 bp, Homo sapiens
agaaacagttacaga

SEQ ID NO: 875006 - DNA, 15 bp, Homo sapiens
gaaacagttacagac

SEQ ID NO: 875007 - DNA, 15 bp, Homo sapiens
aaacagttacagact

SEQ ID NO: 875008 - DNA, 15 bp, Homo sapiens
aacagttacagactc

SEQ ID NO: 875009 - DNA, 15 bp, Homo sapiens
acagttacagactct

SEQ ID NO: 875010 - DNA, 15 bp, Homo sapiens
cagttacagactcta

SEQ ID NO: 875011 - DNA, 15 bp, Homo sapiens
agttacagactctat

SEQ ID NO: 875012 - DNA, 15 bp, Homo sapiens
gttacagactctatt

SEQ ID NO: 875013 - DNA, 15 bp, Homo sapiens
ttacagactctattg

SEQ ID NO: 875014 - DNA, 15 bp, Homo sapiens
tacagactctattgt

SEQ ID NO: 875015 - DNA, 15 bp, Homo sapiens
acagactctattgtt

SEQ ID NO: 875016 - DNA, 15 bp, Homo sapiens
cagactctattgttg

SEQ ID NO: 875017 - DNA, 15 bp, Homo sapiens
agactctattgttgc

SEQ ID NO: 875018 - DNA, 15 bp, Homo sapiens
gactctattgttgct

SEQ ID NO: 875019 - DNA, 15 bp, Homo sapiens
actctattgttgctg

SEQ ID NO: 875020 - DNA, 15 bp, Homo sapiens
ctctattgttgctgg

SEQ ID NO: 875021 - DNA, 15 bp, Homo sapiens
tctattgttgctgga

SEQ ID NO: 875022 - DNA, 15 bp, Homo sapiens
ctattgttgctggaa

SEQ ID NO: 875023 - DNA, 15 bp, Homo sapiens
tattgttgctggaac

SEQ ID NO: 875024 - DNA, 15 bp, Homo sapiens
attgttgctggaacg

SEQ ID NO: 875025 - DNA, 15 bp, Homo sapiens
ttgttgctggaacga

SEQ ID NO: 875026 - DNA, 15 bp, Homo sapiens
tgttgctggaacgaa

SEQ ID NO: 875027 - DNA, 15 bp, Homo sapiens
gttgctggaacgaat

SEQ ID NO: 875028 - DNA, 15 bp, Homo sapiens
ttgctggaacgaatt

SEQ ID NO: 875029 - DNA, 15 bp, Homo sapiens
tgctggaacgaattg

SEQ ID NO: 875030 - DNA, 15 bp, Homo sapiens
gctggaacgaattgt

SEQ ID NO: 875031 - DNA, 15 bp, Homo sapiens
ctggaacgaattgtg

SEQ ID NO: 875032 - DNA, 15 bp, Homo sapiens
tggaacgaattgtgt

SEQ ID NO: 875033 - DNA, 15 bp, Homo sapiens
ggaacgaattgtgtt

SEQ ID NO: 875034 - DNA, 15 bp, Homo sapiens
gaacgaattgtgttc

SEQ ID NO: 875035 - DNA, 15 bp, Homo sapiens
aacgaattgtgttcc

SEQ ID NO: 875036 - DNA, 15 bp, Homo sapiens
acgaattgtgttccc

SEQ ID NO: 875037 - DNA, 15 bp, Homo sapiens
cgaattgtgttccca

SEQ ID NO: 875038 - DNA, 15 bp, Homo sapiens
gaattgtgttcccag

SEQ ID NO: 875039 - DNA, 15 bp, Homo sapiens
aattgtgttcccagc

SEQ ID NO: 875040 - DNA, 15 bp, Homo sapiens
attgtgttcccagct

SEQ ID NO: 875041 - DNA, 15 bp, Homo sapiens
ttgtgttcccagctt

SEQ ID NO: 875042 - DNA, 15 bp, Homo sapiens
tgtgttcccagctta

SEQ ID NO: 875043 - DNA, 15 bp, Homo sapiens
gtgttcccagcttac

SEQ ID NO: 875044 - DNA, 15 bp, Homo sapiens
tgttcccagcttact

SEQ ID NO: 875045 - DNA, 15 bp, Homo sapiens
gttcccagcttactc

SEQ ID NO: 875046 - DNA, 15 bp, Homo sapiens
ttcccagcttactcc

SEQ ID NO: 875047 - DNA, 15 bp, Homo sapiens
tcccagcttactccc

SEQ ID NO: 875048 - DNA, 15 bp, Homo sapiens
cccagcttactccca

SEQ ID NO: 875049 - DNA, 15 bp, Homo sapiens
ccagcttactcccag

SEQ ID NO: 875050 - DNA, 15 bp, Homo sapiens
cagcttactcccaga

SEQ ID NO: 875051 - DNA, 15 bp, Homo sapiens
agcttactcccagac

SEQ ID NO: 875052 - DNA, 15 bp, Homo sapiens
gcttactcccagact

SEQ ID NO: 875053 - DNA, 15 bp, Homo sapiens
cttactcccagactg

SEQ ID NO: 875054 - DNA, 15 bp, Homo sapiens
ttactcccagactgt

SEQ ID NO: 875055 - DNA, 15 bp, Homo sapiens
tactcccagactgtg

SEQ ID NO: 875056 - DNA, 15 bp, Homo sapiens
actcccagactgtga

SEQ ID NO: 875057 - DNA, 15 bp, Homo sapiens
ctcccagactgtgaa

SEQ ID NO: 875058 - DNA, 15 bp, Homo sapiens
tcccagactgtgaaa

SEQ ID NO: 875059 - DNA, 15 bp, Homo sapiens
cccagactgtgaaat

SEQ ID NO: 875060 - DNA, 15 bp, Homo sapiens
ccagactgtgaaatc

SEQ ID NO: 875061 - DNA, 15 bp, Homo sapiens
cagactgtgaaatcc

SEQ ID NO: 875062 - DNA, 15 bp, Homo sapiens
agactgtgaaatcca

SEQ ID NO: 875063 - DNA, 15 bp, Homo sapiens
gactgtgaaatccag

SEQ ID NO: 875064 - DNA, 15 bp, Homo sapiens
actgtgaaatccagt

SEQ ID NO: 875065 - DNA, 15 bp, Homo sapiens
ctgtgaaatccagtg

SEQ ID NO: 875066 - DNA, 15 bp, Homo sapiens
tgtgaaatccagtga

SEQ ID NO: 875067 - DNA, 15 bp, Homo sapiens
gtgaaatccagtgag

SEQ ID NO: 875068 - DNA, 15 bp, Homo sapiens
tgaaatccagtgagt

SEQ ID NO: 875069 - DNA, 15 bp, Homo sapiens
gaaatccagtgagtg

SEQ ID NO: 875070 - DNA, 15 bp, Homo sapiens
aaatccagtgagtgt

SEQ ID NO: 875071 - DNA, 15 bp, Homo sapiens
aatccagtgagtgtg

SEQ ID NO: 875072 - DNA, 15 bp, Homo sapiens
atccagtgagtgtgt

SEQ ID NO: 875073 - DNA, 15 bp, Homo sapiens
tccagtgagtgtgta

SEQ ID NO: 875074 - DNA, 15 bp, Homo sapiens
ccagtgagtgtgtaa

SEQ ID NO: 875075 - DNA, 15 bp, Homo sapiens
cagtgagtgtgtaac

SEQ ID NO: 875076 - DNA, 15 bp, Homo sapiens
agtgagtgtgtaaca

SEQ ID NO: 875077 - DNA, 15 bp, Homo sapiens
gtgagtgtgtaacag

SEQ ID NO: 875078 - DNA, 15 bp, Homo sapiens
tgagtgtgtaacagt

SEQ ID NO: 875079 - DNA, 15 bp, Homo sapiens
gagtgtgtaacagtg

SEQ ID NO: 875080 - DNA, 15 bp, Homo sapiens
agtgtgtaacagtgc

SEQ ID NO: 875081 - DNA, 15 bp, Homo sapiens
gtgtgtaacagtgct

SEQ ID NO: 875082 - DNA, 15 bp, Homo sapiens
tgtgtaacagtgctg

SEQ ID NO: 875083 - DNA, 15 bp, Homo sapiens
gtgtaacagtgctgg

SEQ ID NO: 875084 - DNA, 15 bp, Homo sapiens
tgtaacagtgctggc

SEQ ID NO: 875085 - DNA, 15 bp, Homo sapiens
gtaacagtgctggcc

SEQ ID NO: 875086 - DNA, 15 bp, Homo sapiens
taacagtgctggccc

SEQ ID NO: 875087 - DNA, 15 bp, Homo sapiens
aacagtgctggccct

SEQ ID NO: 875088 - DNA, 15 bp, Homo sapiens
acagtgctggccctt

SEQ ID NO: 875089 - DNA, 15 bp, Homo sapiens
cagtgctggccctta

SEQ ID NO: 875090 - DNA, 15 bp, Homo sapiens
agtgctggcccttac

SEQ ID NO: 875091 - DNA, 15 bp, Homo sapiens
gtgctggcccttact

SEQ ID NO: 875092 - DNA, 15 bp, Homo sapiens
tgctggcccttactg

SEQ ID NO: 875093 - DNA, 15 bp, Homo sapiens
gctggcccttactgg

SEQ ID NO: 875094 - DNA, 15 bp, Homo sapiens
ctggcccttactgga

SEQ ID NO: 875095 - DNA, 15 bp, Homo sapiens
tggcccttactggag

SEQ ID NO: 875096 - DNA, 15 bp, Homo sapiens
ggcccttactggagc

SEQ ID NO: 875097 - DNA, 15 bp, Homo sapiens
gcccttactggagcc

SEQ ID NO: 875098 - DNA, 15 bp, Homo sapiens
cccttactggagcca

SEQ ID NO: 875099 - DNA, 15 bp, Homo sapiens
ccttactggagccat

SEQ ID NO: 875100 - DNA, 15 bp, Homo sapiens
cttactggagccata

SEQ ID NO: 875101 - DNA, 15 bp, Homo sapiens
ttactggagccataa

SEQ ID NO: 875102 - DNA, 15 bp, Homo sapiens
tactggagccataaa

SEQ ID NO: 875103 - DNA, 15 bp, Homo sapiens
actggagccataaat

SEQ ID NO: 875104 - DNA, 15 bp, Homo sapiens
ctggagccataaatt

SEQ ID NO: 875105 - DNA, 15 bp, Homo sapiens
tggagccataaatta

SEQ ID NO: 875106 - DNA, 15 bp, Homo sapiens
ggagccataaattaa

SEQ ID NO: 875107 - DNA, 15 bp, Homo sapiens
gagccataaattaat

SEQ ID NO: 875108 - DNA, 15 bp, Homo sapiens
agccataaattaatc

SEQ ID NO: 875109 - DNA, 15 bp, Homo sapiens
gccataaattaatcc

SEQ ID NO: 875110 - DNA, 15 bp, Homo sapiens
ccataaattaatccc

SEQ ID NO: 875111 - DNA, 15 bp, Homo sapiens
cataaattaatccct

SEQ ID NO: 875112 - DNA, 15 bp, Homo sapiens
ataaattaatccctc

SEQ ID NO: 875113 - DNA, 15 bp, Homo sapiens
taaattaatccctct

SEQ ID NO: 875114 - DNA, 15 bp, Homo sapiens
aaattaatccctctc

SEQ ID NO: 875115 - DNA, 15 bp, Homo sapiens
aattaatccctctcc

SEQ ID NO: 875116 - DNA, 15 bp, Homo sapiens
attaatccctctccc

SEQ ID NO: 875117 - DNA, 15 bp, Homo sapiens
ttaatccctctccca

SEQ ID NO: 875118 - DNA, 15 bp, Homo sapiens
taatccctctcccac

SEQ ID NO: 875119 - DNA, 15 bp, Homo sapiens
aatccctctcccacg

SEQ ID NO: 875120 - DNA, 15 bp, Homo sapiens
atccctctcccacgc

SEQ ID NO: 875121 - DNA, 15 bp, Homo sapiens
tccctctcccacgct

SEQ ID NO: 875122 - DNA, 15 bp, Homo sapiens
ccctctcccacgctg

SEQ ID NO: 875123 - DNA, 15 bp, Homo sapiens
cctctcccacgctgc

SEQ ID NO: 875124 - DNA, 15 bp, Homo sapiens
ctctcccacgctgct

SEQ ID NO: 875125 - DNA, 15 bp, Homo sapiens
tctcccacgctgctt

SEQ ID NO: 875126 - DNA, 15 bp, Homo sapiens
ctcccacgctgctta

SEQ ID NO: 875127 - DNA, 15 bp, Homo sapiens
tcccacgctgcttac

SEQ ID NO: 875128 - DNA, 15 bp, Homo sapiens
cccacgctgcttacc

SEQ ID NO: 875129 - DNA, 15 bp, Homo sapiens
ccacgctgcttacct

SEQ ID NO: 875130 - DNA, 15 bp, Homo sapiens
cacgctgcttacctc

SEQ ID NO: 875131 - DNA, 15 bp, Homo sapiens
acgctgcttacctct

SEQ ID NO: 875132 - DNA, 15 bp, Homo sapiens
cgctgcttacctctc

SEQ ID NO: 875133 - DNA, 15 bp, Homo sapiens
gctgcttacctctca

SEQ ID NO: 875134 - DNA, 15 bp, Homo sapiens
ctgcttacctctcat

SEQ ID NO: 875135 - DNA, 15 bp, Homo sapiens
tgcttacctctcatc

SEQ ID NO: 875136 - DNA, 15 bp, Homo sapiens
gcttacctctcatct

SEQ ID NO: 875137 - DNA, 15 bp, Homo sapiens
cttacctctcatctt

SEQ ID NO: 875138 - DNA, 15 bp, Homo sapiens
ttacctctcatcttc

SEQ ID NO: 875139 - DNA, 15 bp, Homo sapiens
tacctctcatcttca

SEQ ID NO: 875140 - DNA, 15 bp, Homo sapiens
acctctcatcttcac

SEQ ID NO: 875141 - DNA, 15 bp, Homo sapiens
cctctcatcttcact

SEQ ID NO: 875142 - DNA, 15 bp, Homo sapiens
ctctcatcttcactc

SEQ ID NO: 875143 - DNA, 15 bp, Homo sapiens
tctcatcttcactct

SEQ ID NO: 875144 - DNA, 15 bp, Homo sapiens
ctcatcttcactcta

SEQ ID NO: 875145 - DNA, 15 bp, Homo sapiens
tcatcttcactctag

SEQ ID NO: 875146 - DNA, 15 bp, Homo sapiens
catcttcactctagc

SEQ ID NO: 875147 - DNA, 15 bp, Homo sapiens
atcttcactctagca

SEQ ID NO: 875148 - DNA, 15 bp, Homo sapiens
tcttcactctagcaa

SEQ ID NO: 875149 - DNA, 15 bp, Homo sapiens
cttcactctagcaac

SEQ ID NO: 875150 - DNA, 15 bp, Homo sapiens
ttcactctagcaacc

SEQ ID NO: 875151 - DNA, 15 bp, Homo sapiens
tcactctagcaacct

SEQ ID NO: 875152 - DNA, 15 bp, Homo sapiens
cactctagcaacctt

SEQ ID NO: 875153 - DNA, 15 bp, Homo sapiens
actctagcaaccttt

SEQ ID NO: 875154 - DNA, 15 bp, Homo sapiens
ctctagcaacctttc

SEQ ID NO: 875155 - DNA, 15 bp, Homo sapiens
tctagcaacctttct

SEQ ID NO: 875156 - DNA, 15 bp, Homo sapiens
ctagcaacctttctt

SEQ ID NO: 875157 - DNA, 15 bp, Homo sapiens
tagcaacctttcttt

SEQ ID NO: 875158 - DNA, 15 bp, Homo sapiens
agcaacctttcttta

SEQ ID NO: 875159 - DNA, 15 bp, Homo sapiens
gcaacctttctttac

SEQ ID NO: 875160 - DNA, 15 bp, Homo sapiens
caacctttctttacc

SEQ ID NO: 875161 - DNA, 15 bp, Homo sapiens
aacctttctttacct

SEQ ID NO: 875162 - DNA, 15 bp, Homo sapiens
acctttctttaccta

SEQ ID NO: 875163 - DNA, 15 bp, Homo sapiens
cctttctttacctac

SEQ ID NO: 875164 - DNA, 15 bp, Homo sapiens
ctttctttacctact

SEQ ID NO: 875165 - DNA, 15 bp, Homo sapiens
tttctttacctactc

SEQ ID NO: 875166 - DNA, 15 bp, Homo sapiens
ttctttacctactca

SEQ ID NO: 875167 - DNA, 15 bp, Homo sapiens
tctttacctactcag

SEQ ID NO: 875168 - DNA, 15 bp, Homo sapiens
ctttacctactcagg

SEQ ID NO: 875169 - DNA, 15 bp, Homo sapiens
tttacctactcaggg

SEQ ID NO: 875170 - DNA, 15 bp, Homo sapiens
ttacctactcagggc

SEQ ID NO: 875171 - DNA, 15 bp, Homo sapiens
tacctactcagggct

SEQ ID NO: 875172 - DNA, 15 bp, Homo sapiens
acctactcagggctc

SEQ ID NO: 875173 - DNA, 15 bp, Homo sapiens
cctactcagggctct

SEQ ID NO: 875174 - DNA, 15 bp, Homo sapiens
ctactcagggctctc

SEQ ID NO: 875175 - DNA, 15 bp, Homo sapiens
tactcagggctctcc

SEQ ID NO: 875176 - DNA, 15 bp, Homo sapiens
actcagggctctcca

SEQ ID NO: 875177 - DNA, 15 bp, Homo sapiens
ctcagggctctccag

SEQ ID NO: 875178 - DNA, 15 bp, Homo sapiens
tcagggctctccagc

SEQ ID NO: 875179 - DNA, 15 bp, Homo sapiens
cagggctctccagcc

SEQ ID NO: 875180 - DNA, 15 bp, Homo sapiens
agggctctccagcct

SEQ ID NO: 875181 - DNA, 15 bp, Homo sapiens
gggctctccagcctt

SEQ ID NO: 875182 - DNA, 15 bp, Homo sapiens
ggctctccagccttc

SEQ ID NO: 875183 - DNA, 15 bp, Homo sapiens
gctctccagccttct

SEQ ID NO: 875184 - DNA, 15 bp, Homo sapiens
ctctccagccttctg

SEQ ID NO: 875185 - DNA, 15 bp, Homo sapiens
tctccagccttctga

SEQ ID NO: 875186 - DNA, 15 bp, Homo sapiens
ctccagccttctgat

SEQ ID NO: 875187 - DNA, 15 bp, Homo sapiens
tccagccttctgata

SEQ ID NO: 875188 - DNA, 15 bp, Homo sapiens
ccagccttctgatat

SEQ ID NO: 875189 - DNA, 15 bp, Homo sapiens
cagccttctgatatc

SEQ ID NO: 875190 - DNA, 15 bp, Homo sapiens
agccttctgatatcc

SEQ ID NO: 875191 - DNA, 15 bp, Homo sapiens
gccttctgatatcca

SEQ ID NO: 875192 - DNA, 15 bp, Homo sapiens
ccttctgatatccaa

SEQ ID NO: 875193 - DNA, 15 bp, Homo sapiens
cttctgatatccaac

SEQ ID NO: 875194 - DNA, 15 bp, Homo sapiens
ttctgatatccaaca

SEQ ID NO: 875195 - DNA, 15 bp, Homo sapiens
tctgatatccaacaa

SEQ ID NO: 875196 - DNA, 15 bp, Homo sapiens
ctgatatccaacaat

SEQ ID NO: 875197 - DNA, 15 bp, Homo sapiens
tgatatccaacaatg

SEQ ID NO: 875198 - DNA, 15 bp, Homo sapiens
gatatccaacaatgg

SEQ ID NO: 875199 - DNA, 15 bp, Homo sapiens
atatccaacaatggt

SEQ ID NO: 875200 - DNA, 15 bp, Homo sapiens
tatccaacaatggtc

SEQ ID NO: 875201 - DNA, 15 bp, Homo sapiens
atccaacaatggtcc

SEQ ID NO: 875202 - DNA, 15 bp, Homo sapiens
tccaacaatggtcca

SEQ ID NO: 875203 - DNA, 15 bp, Homo sapiens
ccaacaatggtccag

SEQ ID NO: 875204 - DNA, 15 bp, Homo sapiens
caacaatggtccagt

SEQ ID NO: 875205 - DNA, 15 bp, Homo sapiens
aacaatggtccagta

SEQ ID NO: 875206 - DNA, 15 bp, Homo sapiens
acaatggtccagtac

SEQ ID NO: 875207 - DNA, 15 bp, Homo sapiens
caatggtccagtact

SEQ ID NO: 875208 - DNA, 15 bp, Homo sapiens
aatggtccagtactt

SEQ ID NO: 875209 - DNA, 15 bp, Homo sapiens
atggtccagtacttt

SEQ ID NO: 875210 - DNA, 15 bp, Homo sapiens
tggtccagtactttc

SEQ ID NO: 875211 - DNA, 15 bp, Homo sapiens
ggtccagtactttca

SEQ ID NO: 875212 - DNA, 15 bp, Homo sapiens
gtccagtactttcaa

SEQ ID NO: 875213 - DNA, 15 bp, Homo sapiens
tccagtactttcaaa

SEQ ID NO: 875214 - DNA, 15 bp, Homo sapiens
ccagtactttcaaaa

SEQ ID NO: 875215 - DNA, 15 bp, Homo sapiens
cagtactttcaaaat

SEQ ID NO: 875216 - DNA, 15 bp, Homo sapiens
agtactttcaaaatt

SEQ ID NO: 875217 - DNA, 15 bp, Homo sapiens
gtactttcaaaattc

SEQ ID NO: 875218 - DNA, 15 bp, Homo sapiens
tactttcaaaattct

SEQ ID NO: 875219 - DNA, 15 bp, Homo sapiens
actttcaaaattctt

SEQ ID NO: 875220 - DNA, 15 bp, Homo sapiens
ctttcaaaattcttc

SEQ ID NO: 875221 - DNA, 15 bp, Homo sapiens
tttcaaaattcttct

SEQ ID NO: 875222 - DNA, 15 bp, Homo sapiens
ttcaaaattcttcta

SEQ ID NO: 875223 - DNA, 15 bp, Homo sapiens
tcaaaattcttctag

SEQ ID NO: 875224 - DNA, 15 bp, Homo sapiens
caaaattcttctagc

SEQ ID NO: 875225 - DNA, 15 bp, Homo sapiens
aaaattcttctagct

SEQ ID NO: 875226 - DNA, 15 bp, Homo sapiens
aaattcttctagctg

SEQ ID NO: 875227 - DNA, 15 bp, Homo sapiens
aattcttctagctgt

SEQ ID NO: 875228 - DNA, 15 bp, Homo sapiens
attcttctagctgtg

SEQ ID NO: 875229 - DNA, 15 bp, Homo sapiens
ttcttctagctgtgt

SEQ ID NO: 875230 - DNA, 15 bp, Homo sapiens
tcttctagctgtgtc

SEQ ID NO: 875231 - DNA, 15 bp, Homo sapiens
cttctagctgtgtct

SEQ ID NO: 875232 - DNA, 15 bp, Homo sapiens
ttctagctgtgtctt

SEQ ID NO: 875233 - DNA, 15 bp, Homo sapiens
tctagctgtgtcttt

SEQ ID NO: 875234 - DNA, 15 bp, Homo sapiens
ctagctgtgtctttc

SEQ ID NO: 875235 - DNA, 15 bp, Homo sapiens
tagctgtgtctttct

SEQ ID NO: 875236 - DNA, 15 bp, Homo sapiens
agctgtgtctttctc

SEQ ID NO: 875237 - DNA, 15 bp, Homo sapiens
gctgtgtctttctcc

SEQ ID NO: 875238 - DNA, 15 bp, Homo sapiens
ctgtgtctttctcca

SEQ ID NO: 875239 - DNA, 15 bp, Homo sapiens
tgtgtctttctccag

SEQ ID NO: 875240 - DNA, 15 bp, Homo sapiens
gtgtctttctccagt

SEQ ID NO: 875241 - DNA, 15 bp, Homo sapiens
tgtctttctccagtg

SEQ ID NO: 875242 - DNA, 15 bp, Homo sapiens
gtctttctccagtga

SEQ ID NO: 875243 - DNA, 15 bp, Homo sapiens
tctttctccagtgac

SEQ ID NO: 875244 - DNA, 15 bp, Homo sapiens
ctttctccagtgaca

SEQ ID NO: 875245 - DNA, 15 bp, Homo sapiens
tttctccagtgacag

SEQ ID NO: 875246 - DNA, 15 bp, Homo sapiens
ttctccagtgacagc

SEQ ID NO: 875247 - DNA, 15 bp, Homo sapiens
tctccagtgacagca

SEQ ID NO: 875248 - DNA, 15 bp, Homo sapiens
ctccagtgacagcac

SEQ ID NO: 875249 - DNA, 15 bp, Homo sapiens
tccagtgacagcaca

SEQ ID NO: 875250 - DNA, 15 bp, Homo sapiens
ccagtgacagcacag

SEQ ID NO: 875251 - DNA, 15 bp, Homo sapiens
cagtgacagcacagt

SEQ ID NO: 875252 - DNA, 15 bp, Homo sapiens
agtgacagcacagtg

SEQ ID NO: 875253 - DNA, 15 bp, Homo sapiens
gtgacagcacagtgc

SEQ ID NO: 875254 - DNA, 15 bp, Homo sapiens
tgacagcacagtgct

SEQ ID NO: 875255 - DNA, 15 bp, Homo sapiens
gacagcacagtgctt

SEQ ID NO: 875256 - DNA, 15 bp, Homo sapiens
acagcacagtgcttc

SEQ ID NO: 875257 - DNA, 15 bp, Homo sapiens
cagcacagtgcttca

SEQ ID NO: 875258 - DNA, 15 bp, Homo sapiens
agcacagtgcttcaa

SEQ ID NO: 875259 - DNA, 15 bp, Homo sapiens
gcacagtgcttcaaa

SEQ ID NO: 875260 - DNA, 15 bp, Homo sapiens
cacagtgcttcaaac

SEQ ID NO: 875261 - DNA, 15 bp, Homo sapiens
acagtgcttcaaacc

SEQ ID NO: 875262 - DNA, 15 bp, Homo sapiens
cagtgcttcaaacct

SEQ ID NO: 875263 - DNA, 15 bp, Homo sapiens
agtgcttcaaacctt

SEQ ID NO: 875264 - DNA, 15 bp, Homo sapiens
gtgcttcaaaccttc

SEQ ID NO: 875265 - DNA, 15 bp, Homo sapiens
tgcttcaaaccttca

SEQ ID NO: 875266 - DNA, 15 bp, Homo sapiens
gcttcaaaccttcag

SEQ ID NO: 875267 - DNA, 15 bp, Homo sapiens
cttcaaaccttcagg

SEQ ID NO: 875268 - DNA, 15 bp, Homo sapiens
ttcaaaccttcagga

SEQ ID NO: 875269 - DNA, 15 bp, Homo sapiens
tcaaaccttcaggat

SEQ ID NO: 875270 - DNA, 15 bp, Homo sapiens
caaaccttcaggatc

SEQ ID NO: 875271 - DNA, 15 bp, Homo sapiens
aaaccttcaggatct

SEQ ID NO: 875272 - DNA, 15 bp, Homo sapiens
aaccttcaggatctt

SEQ ID NO: 875273 - DNA, 15 bp, Homo sapiens
accttcaggatcttc

SEQ ID NO: 875274 - DNA, 15 bp, Homo sapiens
ccttcaggatcttct

SEQ ID NO: 875275 - DNA, 15 bp, Homo sapiens
cttcaggatcttcta

SEQ ID NO: 875276 - DNA, 15 bp, Homo sapiens
ttcaggatcttctag

SEQ ID NO: 875277 - DNA, 15 bp, Homo sapiens
tcaggatcttctagg

SEQ ID NO: 875278 - DNA, 15 bp, Homo sapiens
caggatcttctaggc

SEQ ID NO: 875279 - DNA, 15 bp, Homo sapiens
aggatcttctaggct

SEQ ID NO: 875280 - DNA, 15 bp, Homo sapiens
ggatcttctaggctc

SEQ ID NO: 875281 - DNA, 15 bp, Homo sapiens
gatcttctaggctcg

SEQ ID NO: 875282 - DNA, 15 bp, Homo sapiens
atcttctaggctcgc

SEQ ID NO: 875283 - DNA, 15 bp, Homo sapiens
tcttctaggctcgcc

SEQ ID NO: 875284 - DNA, 15 bp, Homo sapiens
cttctaggctcgccc

SEQ ID NO: 875285 - DNA, 15 bp, Homo sapiens
ttctaggctcgccca

SEQ ID NO: 875286 - DNA, 15 bp, Homo sapiens
tctaggctcgcccaa

SEQ ID NO: 875287 - DNA, 15 bp, Homo sapiens
ctaggctcgcccaac

SEQ ID NO: 875288 - DNA, 15 bp, Homo sapiens
taggctcgcccaacc

SEQ ID NO: 875289 - DNA, 15 bp, Homo sapiens
aggctcgcccaacct

SEQ ID NO: 875290 - DNA, 15 bp, Homo sapiens
ggctcgcccaacctt

SEQ ID NO: 875291 - DNA, 15 bp, Homo sapiens
gctcgcccaaccttt

SEQ ID NO: 875292 - DNA, 15 bp, Homo sapiens
ctcgcccaaccttta

SEQ ID NO: 875293 - DNA, 15 bp, Homo sapiens
tcgcccaacctttat

SEQ ID NO: 875294 - DNA, 15 bp, Homo sapiens
cgcccaacctttata

SEQ ID NO: 875295 - DNA, 15 bp, Homo sapiens
gcccaacctttatat

SEQ ID NO: 875296 - DNA, 15 bp, Homo sapiens
cccaacctttatatg

SEQ ID NO: 875297 - DNA, 15 bp, Homo sapiens
ccaacctttatatgc

SEQ ID NO: 875298 - DNA, 15 bp, Homo sapiens
caacctttatatgca

SEQ ID NO: 875299 - DNA, 15 bp, Homo sapiens
aacctttatatgcat

SEQ ID NO: 875300 - DNA, 15 bp, Homo sapiens
acctttatatgcata

SEQ ID NO: 875301 - DNA, 15 bp, Homo sapiens
cctttatatgcatat

SEQ ID NO: 875302 - DNA, 15 bp, Homo sapiens
ctttatatgcatatg

SEQ ID NO: 875303 - DNA, 15 bp, Homo sapiens
tttatatgcatatgc

SEQ ID NO: 875304 - DNA, 15 bp, Homo sapiens
ttatatgcatatgct

SEQ ID NO: 875305 - DNA, 15 bp, Homo sapiens
tatatgcatatgctc

SEQ ID NO: 875306 - DNA, 15 bp, Homo sapiens
atatgcatatgctca

SEQ ID NO: 875307 - DNA, 15 bp, Homo sapiens
tatgcatatgctcac

SEQ ID NO: 875308 - DNA, 15 bp, Homo sapiens
atgcatatgctcact

SEQ ID NO: 875309 - DNA, 15 bp, Homo sapiens
tgcatatgctcactg

SEQ ID NO: 875310 - DNA, 15 bp, Homo sapiens
gcatatgctcactgt

SEQ ID NO: 875311 - DNA, 15 bp, Homo sapiens
catatgctcactgta

SEQ ID NO: 875312 - DNA, 15 bp, Homo sapiens
atatgctcactgtat

SEQ ID NO: 875313 - DNA, 15 bp, Homo sapiens
tatgctcactgtatc

SEQ ID NO: 875314 - DNA, 15 bp, Homo sapiens
atgctcactgtatcc

SEQ ID NO: 875315 - DNA, 15 bp, Homo sapiens
tgctcactgtatccc

SEQ ID NO: 875316 - DNA, 15 bp, Homo sapiens
gctcactgtatccct

SEQ ID NO: 875317 - DNA, 15 bp, Homo sapiens
ctcactgtatccctt

SEQ ID NO: 875318 - DNA, 15 bp, Homo sapiens
tcactgtatcccttg

SEQ ID NO: 875319 - DNA, 15 bp, Homo sapiens
cactgtatcccttgc

SEQ ID NO: 875320 - DNA, 15 bp, Homo sapiens
actgtatcccttgct

SEQ ID NO: 875321 - DNA, 15 bp, Homo sapiens
ctgtatcccttgctc

SEQ ID NO: 875322 - DNA, 15 bp, Homo sapiens
tgtatcccttgctct

SEQ ID NO: 875323 - DNA, 15 bp, Homo sapiens
gtatcccttgctctt

SEQ ID NO: 875324 - DNA, 15 bp, Homo sapiens
tatcccttgctcttg

SEQ ID NO: 875325 - DNA, 15 bp, Homo sapiens
atcccttgctcttgt

SEQ ID NO: 875326 - DNA, 15 bp, Homo sapiens
tcccttgctcttgtg

SEQ ID NO: 875327 - DNA, 15 bp, Homo sapiens
cccttgctcttgtgg

SEQ ID NO: 875328 - DNA, 15 bp, Homo sapiens
ccttgctcttgtgga

SEQ ID NO: 875329 - DNA, 15 bp, Homo sapiens
cttgctcttgtggaa

SEQ ID NO: 875330 - DNA, 15 bp, Homo sapiens
ttgctcttgtggaat

SEQ ID NO: 875331 - DNA, 15 bp, Homo sapiens
tgctcttgtggaatg

SEQ ID NO: 875332 - DNA, 15 bp, Homo sapiens
gctcttgtggaatgg

SEQ ID NO: 875333 - DNA, 15 bp, Homo sapiens
ctcttgtggaatggc

SEQ ID NO: 875334 - DNA, 15 bp, Homo sapiens
tcttgtggaatggct

SEQ ID NO: 875335 - DNA, 15 bp, Homo sapiens
cttgtggaatggctc

SEQ ID NO: 875336 - DNA, 15 bp, Homo sapiens
ttgtggaatggctca

SEQ ID NO: 875337 - DNA, 15 bp, Homo sapiens
tgtggaatggctcaa

SEQ ID NO: 875338 - DNA, 15 bp, Homo sapiens
gtggaatggctcaat

SEQ ID NO: 875339 - DNA, 15 bp, Homo sapiens
tggaatggctcaatg

SEQ ID NO: 875340 - DNA, 15 bp, Homo sapiens
ggaatggctcaatga

SEQ ID NO: 875341 - DNA, 15 bp, Homo sapiens
gaatggctcaatgat

SEQ ID NO: 875342 - DNA, 15 bp, Homo sapiens
aatggctcaatgata

SEQ ID NO: 875343 - DNA, 15 bp, Homo sapiens
atggctcaatgatag

SEQ ID NO: 875344 - DNA, 15 bp, Homo sapiens
tggctcaatgataga

SEQ ID NO: 875345 - DNA, 15 bp, Homo sapiens
ggctcaatgatagaa

SEQ ID NO: 875346 - DNA, 15 bp, Homo sapiens
gctcaatgatagaaa

SEQ ID NO: 875347 - DNA, 15 bp, Homo sapiens
ctcaatgatagaaaa

SEQ ID NO: 875348 - DNA, 15 bp, Homo sapiens
tcaatgatagaaaac

SEQ ID NO: 875349 - DNA, 15 bp, Homo sapiens
caatgatagaaaacc

SEQ ID NO: 875350 - DNA, 15 bp, Homo sapiens
aatgatagaaaaccc

SEQ ID NO: 875351 - DNA, 15 bp, Homo sapiens
atgatagaaaaccca

SEQ ID NO: 875352 - DNA, 15 bp, Homo sapiens
tgatagaaaacccac

SEQ ID NO: 875353 - DNA, 15 bp, Homo sapiens
gatagaaaacccact

SEQ ID NO: 875354 - DNA, 15 bp, Homo sapiens
atagaaaacccactg

SEQ ID NO: 875355 - DNA, 15 bp, Homo sapiens
tagaaaacccactgt

SEQ ID NO: 875356 - DNA, 15 bp, Homo sapiens
agaaaacccactgtc

SEQ ID NO: 875357 - DNA, 15 bp, Homo sapiens
gaaaacccactgtct

SEQ ID NO: 875358 - DNA, 15 bp, Homo sapiens
aaaacccactgtctt

SEQ ID NO: 875359 - DNA, 15 bp, Homo sapiens
aaacccactgtcttg

SEQ ID NO: 875360 - DNA, 15 bp, Homo sapiens
aacccactgtcttgg

SEQ ID NO: 875361 - DNA, 15 bp, Homo sapiens
acccactgtcttggg

SEQ ID NO: 875362 - DNA, 15 bp, Homo sapiens
cccactgtcttgggc

SEQ ID NO: 875363 - DNA, 15 bp, Homo sapiens
ccactgtcttgggca

SEQ ID NO: 875364 - DNA, 15 bp, Homo sapiens
cactgtcttgggcaa

SEQ ID NO: 875365 - DNA, 15 bp, Homo sapiens
actgtcttgggcaac

SEQ ID NO: 875366 - DNA, 15 bp, Homo sapiens
ctgtcttgggcaaca

SEQ ID NO: 875367 - DNA, 15 bp, Homo sapiens
tgtcttgggcaacaa

SEQ ID NO: 875368 - DNA, 15 bp, Homo sapiens
gtcttgggcaacaac

SEQ ID NO: 875369 - DNA, 15 bp, Homo sapiens
tcttgggcaacaact

SEQ ID NO: 875370 - DNA, 15 bp, Homo sapiens
cttgggcaacaactc

SEQ ID NO: 875371 - DNA, 15 bp, Homo sapiens
ttgggcaacaactca

SEQ ID NO: 875372 - DNA, 15 bp, Homo sapiens
tgggcaacaactcat

SEQ ID NO: 875373 - DNA, 15 bp, Homo sapiens
gggcaacaactcatt

SEQ ID NO: 875374 - DNA, 15 bp, Homo sapiens
ggcaacaactcattt

SEQ ID NO: 875375 - DNA, 15 bp, Homo sapiens
gcaacaactcatttc

SEQ ID NO: 875376 - DNA, 15 bp, Homo sapiens
caacaactcatttca

SEQ ID NO: 875377 - DNA, 15 bp, Homo sapiens
aacaactcatttcat

SEQ ID NO: 875378 - DNA, 15 bp, Homo sapiens
acaactcatttcatt

SEQ ID NO: 875379 - DNA, 15 bp, Homo sapiens
caactcatttcattt

SEQ ID NO: 875380 - DNA, 15 bp, Homo sapiens
aactcatttcatttt

SEQ ID NO: 875381 - DNA, 15 bp, Homo sapiens
actcatttcattttt

SEQ ID NO: 875382 - DNA, 15 bp, Homo sapiens
ctcatttcatttttg

SEQ ID NO: 875383 - DNA, 15 bp, Homo sapiens
tcatttcatttttga

SEQ ID NO: 875384 - DNA, 15 bp, Homo sapiens
catttcatttttgaa

SEQ ID NO: 875385 - DNA, 15 bp, Homo sapiens
atttcatttttgaat

SEQ ID NO: 875386 - DNA, 15 bp, Homo sapiens
tttcatttttgaatt

SEQ ID NO: 875387 - DNA, 15 bp, Homo sapiens
ttcatttttgaatta

SEQ ID NO: 875388 - DNA, 15 bp, Homo sapiens
tcatttttgaattac

SEQ ID NO: 875389 - DNA, 15 bp, Homo sapiens
catttttgaattact

SEQ ID NO: 875390 - DNA, 15 bp, Homo sapiens
atttttgaattactt

SEQ ID NO: 875391 - DNA, 15 bp, Homo sapiens
tttttgaattacttt

SEQ ID NO: 875392 - DNA, 15 bp, Homo sapiens
ttttgaattactttc

SEQ ID NO: 875393 - DNA, 15 bp, Homo sapiens
tttgaattactttca

SEQ ID NO: 875394 - DNA, 15 bp, Homo sapiens
ttgaattactttcaa

SEQ ID NO: 875395 - DNA, 15 bp, Homo sapiens
tgaattactttcaat

SEQ ID NO: 875396 - DNA, 15 bp, Homo sapiens
gaattactttcaatt

SEQ ID NO: 875397 - DNA, 15 bp, Homo sapiens
aattactttcaattt

SEQ ID NO: 875398 - DNA, 15 bp, Homo sapiens
attactttcaatttt

SEQ ID NO: 875399 - DNA, 15 bp, Homo sapiens
ttactttcaattttt

SEQ ID NO: 875400 - DNA, 15 bp, Homo sapiens
tactttcaattttta

SEQ ID NO: 875401 - DNA, 15 bp, Homo sapiens
actttcaatttttat

SEQ ID NO: 875402 - DNA, 15 bp, Homo sapiens
ctttcaatttttata

SEQ ID NO: 875403 - DNA, 15 bp, Homo sapiens
tttcaatttttataa

SEQ ID NO: 875404 - DNA, 15 bp, Homo sapiens
ttcaatttttataac

SEQ ID NO: 875405 - DNA, 15 bp, Homo sapiens
tcaatttttataaca

SEQ ID NO: 875406 - DNA, 15 bp, Homo sapiens
caatttttataacaa

SEQ ID NO: 875407 - DNA, 15 bp, Homo sapiens
aatttttataacaat

SEQ ID NO: 875408 - DNA, 15 bp, Homo sapiens
atttttataacaatc

SEQ ID NO: 875409 - DNA, 15 bp, Homo sapiens
tttttataacaatct

SEQ ID NO: 875410 - DNA, 15 bp, Homo sapiens
ttttataacaatctt

SEQ ID NO: 875411 - DNA, 15 bp, Homo sapiens
tttataacaatcttc

SEQ ID NO: 875412 - DNA, 15 bp, Homo sapiens
ttataacaatcttcc

SEQ ID NO: 875413 - DNA, 15 bp, Homo sapiens
tataacaatcttcct

SEQ ID NO: 875414 - DNA, 15 bp, Homo sapiens
ataacaatcttcctg

SEQ ID NO: 875415 - DNA, 15 bp, Homo sapiens
taacaatcttcctgt

SEQ ID NO: 875416 - DNA, 15 bp, Homo sapiens
aacaatcttcctgtt

SEQ ID NO: 875417 - DNA, 15 bp, Homo sapiens
acaatcttcctgttt

SEQ ID NO: 875418 - DNA, 15 bp, Homo sapiens
caatcttcctgtttt

SEQ ID NO: 875419 - DNA, 15 bp, Homo sapiens
aatcttcctgttttg

SEQ ID NO: 875420 - DNA, 15 bp, Homo sapiens
atcttcctgttttgg

SEQ ID NO: 875421 - DNA, 15 bp, Homo sapiens
tcttcctgttttgga

SEQ ID NO: 875422 - DNA, 15 bp, Homo sapiens
cttcctgttttggaa

SEQ ID NO: 875423 - DNA, 15 bp, Homo sapiens
ttcctgttttggaac

SEQ ID NO: 875424 - DNA, 15 bp, Homo sapiens
tcctgttttggaacc

SEQ ID NO: 875425 - DNA, 15 bp, Homo sapiens
cctgttttggaacca

SEQ ID NO: 875426 - DNA, 15 bp, Homo sapiens
ctgttttggaaccat

SEQ ID NO: 875427 - DNA, 15 bp, Homo sapiens
tgttttggaaccatg

SEQ ID NO: 875428 - DNA, 15 bp, Homo sapiens
gttttggaaccatga

SEQ ID NO: 875429 - DNA, 15 bp, Homo sapiens
ttttggaaccatgat

SEQ ID NO: 875430 - DNA, 15 bp, Homo sapiens
tttggaaccatgatt

SEQ ID NO: 875431 - DNA, 15 bp, Homo sapiens
ttggaaccatgattt

SEQ ID NO: 875432 - DNA, 15 bp, Homo sapiens
tggaaccatgatttt

SEQ ID NO: 875433 - DNA, 15 bp, Homo sapiens
ggaaccatgattttt

SEQ ID NO: 875434 - DNA, 15 bp, Homo sapiens
gaaccatgatttttg

SEQ ID NO: 875435 - DNA, 15 bp, Homo sapiens
aaccatgatttttgt

SEQ ID NO: 875436 - DNA, 15 bp, Homo sapiens
accatgatttttgtt

SEQ ID NO: 875437 - DNA, 15 bp, Homo sapiens
ccatgatttttgttc

SEQ ID NO: 875438 - DNA, 15 bp, Homo sapiens
catgatttttgttct

SEQ ID NO: 875439 - DNA, 15 bp, Homo sapiens
atgatttttgttctc

SEQ ID NO: 875440 - DNA, 15 bp, Homo sapiens
tgatttttgttctct

SEQ ID NO: 875441 - DNA, 15 bp, Homo sapiens
gatttttgttctctc

SEQ ID NO: 875442 - DNA, 15 bp, Homo sapiens
atttttgttctctct

SEQ ID NO: 875443 - DNA, 15 bp, Homo sapiens
tttttgttctctctt

SEQ ID NO: 875444 - DNA, 15 bp, Homo sapiens
ttttgttctctctta

SEQ ID NO: 875445 - DNA, 15 bp, Homo sapiens
tttgttctctcttaa

SEQ ID NO: 875446 - DNA, 15 bp, Homo sapiens
ttgttctctcttaat

SEQ ID NO: 875447 - DNA, 15 bp, Homo sapiens
tgttctctcttaatc

SEQ ID NO: 875448 - DNA, 15 bp, Homo sapiens
gttctctcttaatct

SEQ ID NO: 875449 - DNA, 15 bp, Homo sapiens
ttctctcttaatctc

SEQ ID NO: 875450 - DNA, 15 bp, Homo sapiens
tctctcttaatctca

SEQ ID NO: 875451 - DNA, 15 bp, Homo sapiens
ctctcttaatctcat

SEQ ID NO: 875452 - DNA, 15 bp, Homo sapiens
tctcttaatctcatg

SEQ ID NO: 875453 - DNA, 15 bp, Homo sapiens
ctcttaatctcatgg

SEQ ID NO: 875454 - DNA, 15 bp, Homo sapiens
tcttaatctcatgga

SEQ ID NO: 875455 - DNA, 15 bp, Homo sapiens
cttaatctcatggat

SEQ ID NO: 875456 - DNA, 15 bp, Homo sapiens
ttaatctcatggatc

SEQ ID NO: 875457 - DNA, 15 bp, Homo sapiens
taatctcatggatca

SEQ ID NO: 875458 - DNA, 15 bp, Homo sapiens
aatctcatggatcat

SEQ ID NO: 875459 - DNA, 15 bp, Homo sapiens
atctcatggatcatt

SEQ ID NO: 875460 - DNA, 15 bp, Homo sapiens
tctcatggatcattc

SEQ ID NO: 875461 - DNA, 15 bp, Homo sapiens
ctcatggatcattct

SEQ ID NO: 875462 - DNA, 15 bp, Homo sapiens
tcatggatcattctt

SEQ ID NO: 875463 - DNA, 15 bp, Homo sapiens
catggatcattctta

SEQ ID NO: 875464 - DNA, 15 bp, Homo sapiens
atggatcattcttag

SEQ ID NO: 875465 - DNA, 15 bp, Homo sapiens
tggatcattcttagt

SEQ ID NO: 875466 - DNA, 15 bp, Homo sapiens
ggatcattcttagtc

SEQ ID NO: 875467 - DNA, 15 bp, Homo sapiens
gatcattcttagtct

SEQ ID NO: 875468 - DNA, 15 bp, Homo sapiens
atcattcttagtctg

SEQ ID NO: 875469 - DNA, 15 bp, Homo sapiens
tcattcttagtctgc

SEQ ID NO: 875470 - DNA, 15 bp, Homo sapiens
cattcttagtctgct

SEQ ID NO: 875471 - DNA, 15 bp, Homo sapiens
attcttagtctgctg

SEQ ID NO: 875472 - DNA, 15 bp, Homo sapiens
ttcttagtctgctgt

SEQ ID NO: 875473 - DNA, 15 bp, Homo sapiens
tcttagtctgctgtc

SEQ ID NO: 875474 - DNA, 15 bp, Homo sapiens
cttagtctgctgtca

SEQ ID NO: 875475 - DNA, 15 bp, Homo sapiens
ttagtctgctgtcaa

SEQ ID NO: 875476 - DNA, 15 bp, Homo sapiens
tagtctgctgtcaat

SEQ ID NO: 875477 - DNA, 15 bp, Homo sapiens
agtctgctgtcaatc

SEQ ID NO: 875478 - DNA, 15 bp, Homo sapiens
gtctgctgtcaatca

SEQ ID NO: 875479 - DNA, 15 bp, Homo sapiens
tctgctgtcaatcag

SEQ ID NO: 875480 - DNA, 15 bp, Homo sapiens
ctgctgtcaatcagt

SEQ ID NO: 875481 - DNA, 15 bp, Homo sapiens
tgctgtcaatcagtc

SEQ ID NO: 875482 - DNA, 15 bp, Homo sapiens
gctgtcaatcagtca

SEQ ID NO: 875483 - DNA, 15 bp, Homo sapiens
ctgtcaatcagtcat

SEQ ID NO: 875484 - DNA, 15 bp, Homo sapiens
tgtcaatcagtcata

SEQ ID NO: 875485 - DNA, 15 bp, Homo sapiens
gtcaatcagtcatac

SEQ ID NO: 875486 - DNA, 15 bp, Homo sapiens
tcaatcagtcatact

SEQ ID NO: 875487 - DNA, 15 bp, Homo sapiens
caatcagtcatactc

SEQ ID NO: 875488 - DNA, 15 bp, Homo sapiens
aatcagtcatactca

SEQ ID NO: 875489 - DNA, 15 bp, Homo sapiens
atcagtcatactcaa

SEQ ID NO: 875490 - DNA, 15 bp, Homo sapiens
tcagtcatactcaat

SEQ ID NO: 875491 - DNA, 15 bp, Homo sapiens
cagtcatactcaatc

SEQ ID NO: 875492 - DNA, 15 bp, Homo sapiens
agtcatactcaatca

SEQ ID NO: 875493 - DNA, 15 bp, Homo sapiens
gtcatactcaatcag

SEQ ID NO: 875494 - DNA, 15 bp, Homo sapiens
tcatactcaatcagt

SEQ ID NO: 875495 - DNA, 15 bp, Homo sapiens
catactcaatcagtt

SEQ ID NO: 875496 - DNA, 15 bp, Homo sapiens
atactcaatcagttt

SEQ ID NO: 875497 - DNA, 15 bp, Homo sapiens
tactcaatcagttta

SEQ ID NO: 875498 - DNA, 15 bp, Homo sapiens
actcaatcagtttaa

SEQ ID NO: 875499 - DNA, 15 bp, Homo sapiens
ctcaatcagtttaat

SEQ ID NO: 875500 - DNA, 15 bp, Homo sapiens
tcaatcagtttaatc

SEQ ID NO: 875501 - DNA, 15 bp, Homo sapiens
caatcagtttaatcc

SEQ ID NO: 875502 - DNA, 15 bp, Homo sapiens
aatcagtttaatcca

SEQ ID NO: 875503 - DNA, 15 bp, Homo sapiens
atcagtttaatccat

SEQ ID NO: 875504 - DNA, 15 bp, Homo sapiens
tcagtttaatccatc

SEQ ID NO: 875505 - DNA, 15 bp, Homo sapiens
cagtttaatccatct

SEQ ID NO: 875506 - DNA, 15 bp, Homo sapiens
agtttaatccatctt

SEQ ID NO: 875507 - DNA, 15 bp, Homo sapiens
gtttaatccatcttc

SEQ ID NO: 875508 - DNA, 15 bp, Homo sapiens
tttaatccatcttca

SEQ ID NO: 875509 - DNA, 15 bp, Homo sapiens
ttaatccatcttcaa

SEQ ID NO: 875510 - DNA, 15 bp, Homo sapiens
taatccatcttcaac

SEQ ID NO: 875511 - DNA, 15 bp, Homo sapiens
aatccatcttcaact

SEQ ID NO: 875512 - DNA, 15 bp, Homo sapiens
atccatcttcaactt

SEQ ID NO: 875513 - DNA, 15 bp, Homo sapiens
tccatcttcaacttg

SEQ ID NO: 875514 - DNA, 15 bp, Homo sapiens
ccatcttcaacttga

SEQ ID NO: 875515 - DNA, 15 bp, Homo sapiens
catcttcaacttgac

SEQ ID NO: 875516 - DNA, 15 bp, Homo sapiens
atcttcaacttgact

SEQ ID NO: 875517 - DNA, 15 bp, Homo sapiens
tcttcaacttgactg

SEQ ID NO: 875518 - DNA, 15 bp, Homo sapiens
cttcaacttgactgt

SEQ ID NO: 875519 - DNA, 15 bp, Homo sapiens
ttcaacttgactgtc

SEQ ID NO: 875520 - DNA, 15 bp, Homo sapiens
tcaacttgactgtca

SEQ ID NO: 875521 - DNA, 15 bp, Homo sapiens
caacttgactgtcat

SEQ ID NO: 875522 - DNA, 15 bp, Homo sapiens
aacttgactgtcatt

SEQ ID NO: 875523 - DNA, 15 bp, Homo sapiens
acttgactgtcattg

SEQ ID NO: 875524 - DNA, 15 bp, Homo sapiens
cttgactgtcattgc

SEQ ID NO: 875525 - DNA, 15 bp, Homo sapiens
ttgactgtcattgca

SEQ ID NO: 875526 - DNA, 15 bp, Homo sapiens
tgactgtcattgcac

SEQ ID NO: 875527 - DNA, 15 bp, Homo sapiens
gactgtcattgcaca

SEQ ID NO: 875528 - DNA, 15 bp, Homo sapiens
actgtcattgcacat

SEQ ID NO: 875529 - DNA, 15 bp, Homo sapiens
ctgtcattgcacatc

SEQ ID NO: 875530 - DNA, 15 bp, Homo sapiens
tgtcattgcacatct

SEQ ID NO: 875531 - DNA, 15 bp, Homo sapiens
gtcattgcacatctg

SEQ ID NO: 875532 - DNA, 15 bp, Homo sapiens
tcattgcacatctgg

SEQ ID NO: 875533 - DNA, 15 bp, Homo sapiens
cattgcacatctgga

SEQ ID NO: 875534 - DNA, 15 bp, Homo sapiens
attgcacatctggag

SEQ ID NO: 875535 - DNA, 15 bp, Homo sapiens
ttgcacatctggaga

SEQ ID NO: 875536 - DNA, 15 bp, Homo sapiens
tgcacatctggagac

SEQ ID NO: 875537 - DNA, 15 bp, Homo sapiens
gcacatctggagaca

SEQ ID NO: 875538 - DNA, 15 bp, Homo sapiens
cacatctggagacag

SEQ ID NO: 875539 - DNA, 15 bp, Homo sapiens
acatctggagacagc

SEQ ID NO: 875540 - DNA, 15 bp, Homo sapiens
catctggagacagct

SEQ ID NO: 875541 - DNA, 15 bp, Homo sapiens
atctggagacagctg

SEQ ID NO: 875542 - DNA, 15 bp, Homo sapiens
tctggagacagctgg

SEQ ID NO: 875543 - DNA, 15 bp, Homo sapiens
ctggagacagctgga

SEQ ID NO: 875544 - DNA, 15 bp, Homo sapiens
tggagacagctggaa

SEQ ID NO: 875545 - DNA, 15 bp, Homo sapiens
ggagacagctggaag

SEQ ID NO: 875546 - DNA, 15 bp, Homo sapiens
gagacagctggaagg

SEQ ID NO: 875547 - DNA, 15 bp, Homo sapiens
agacagctggaaggc

SEQ ID NO: 875548 - DNA, 15 bp, Homo sapiens
gacagctggaaggcc

SEQ ID NO: 875549 - DNA, 15 bp, Homo sapiens
acagctggaaggcct

SEQ ID NO: 875550 - DNA, 15 bp, Homo sapiens
cagctggaaggcctg

SEQ ID NO: 875551 - DNA, 15 bp, Homo sapiens
agctggaaggcctgg

SEQ ID NO: 875552 - DNA, 15 bp, Homo sapiens
gctggaaggcctggt

SEQ ID NO: 875553 - DNA, 15 bp, Homo sapiens
ctggaaggcctggtc

SEQ ID NO: 875554 - DNA, 15 bp, Homo sapiens
tggaaggcctggtct

SEQ ID NO: 875555 - DNA, 15 bp, Homo sapiens
ggaaggcctggtctg

SEQ ID NO: 875556 - DNA, 15 bp, Homo sapiens
gaaggcctggtctga

SEQ ID NO: 875557 - DNA, 15 bp, Homo sapiens
aaggcctggtctgag

SEQ ID NO: 875558 - DNA, 15 bp, Homo sapiens
aggcctggtctgagt

SEQ ID NO: 875559 - DNA, 15 bp, Homo sapiens
ggcctggtctgagtc

SEQ ID NO: 875560 - DNA, 15 bp, Homo sapiens
gcctggtctgagtct

SEQ ID NO: 875561 - DNA, 15 bp, Homo sapiens
cctggtctgagtctt

SEQ ID NO: 875562 - DNA, 15 bp, Homo sapiens
ctggtctgagtcttc

SEQ ID NO: 875563 - DNA, 15 bp, Homo sapiens
tggtctgagtcttct

SEQ ID NO: 875564 - DNA, 15 bp, Homo sapiens
ggtctgagtcttctg

SEQ ID NO: 875565 - DNA, 15 bp, Homo sapiens
gtctgagtcttctgt

SEQ ID NO: 875566 - DNA, 15 bp, Homo sapiens
tctgagtcttctgta

SEQ ID NO: 875567 - DNA, 15 bp, Homo sapiens
ctgagtcttctgtac

SEQ ID NO: 875568 - DNA, 15 bp, Homo sapiens
tgagtcttctgtacc

SEQ ID NO: 875569 - DNA, 15 bp, Homo sapiens
gagtcttctgtacct

SEQ ID NO: 875570 - DNA, 15 bp, Homo sapiens
agtcttctgtacctt

SEQ ID NO: 875571 - DNA, 15 bp, Homo sapiens
gtcttctgtacctta

SEQ ID NO: 875572 - DNA, 15 bp, Homo sapiens
tcttctgtaccttag

SEQ ID NO: 875573 - DNA, 15 bp, Homo sapiens
cttctgtaccttagg

SEQ ID NO: 875574 - DNA, 15 bp, Homo sapiens
ttctgtaccttaggt

SEQ ID NO: 875575 - DNA, 15 bp, Homo sapiens
tctgtaccttaggtt

SEQ ID NO: 875576 - DNA, 15 bp, Homo sapiens
ctgtaccttaggtta

SEQ ID NO: 875577 - DNA, 15 bp, Homo sapiens
tgtaccttaggttag

SEQ ID NO: 875578 - DNA, 15 bp, Homo sapiens
gtaccttaggttagg

SEQ ID NO: 875579 - DNA, 15 bp, Homo sapiens
taccttaggttaggt

SEQ ID NO: 875580 - DNA, 15 bp, Homo sapiens
accttaggttaggtg

SEQ ID NO: 875581 - DNA, 15 bp, Homo sapiens
ccttaggttaggtgg

SEQ ID NO: 875582 - DNA, 15 bp, Homo sapiens
cttaggttaggtggt

SEQ ID NO: 875583 - DNA, 15 bp, Homo sapiens
ttaggttaggtggta

SEQ ID NO: 875584 - DNA, 15 bp, Homo sapiens
taggttaggtggtat

SEQ ID NO: 875585 - DNA, 15 bp, Homo sapiens
aggttaggtggtatg

SEQ ID NO: 875586 - DNA, 15 bp, Homo sapiens
ggttaggtggtatgg

SEQ ID NO: 875587 - DNA, 15 bp, Homo sapiens
gttaggtggtatggt

SEQ ID NO: 875588 - DNA, 15 bp, Homo sapiens
ttaggtggtatggta

SEQ ID NO: 875589 - DNA, 15 bp, Homo sapiens
taggtggtatggtat

SEQ ID NO: 875590 - DNA, 15 bp, Homo sapiens
aggtggtatggtatg

SEQ ID NO: 875591 - DNA, 15 bp, Homo sapiens
ggtggtatggtatgg

SEQ ID NO: 875592 - DNA, 15 bp, Homo sapiens
gtggtatggtatggg

SEQ ID NO: 875593 - DNA, 15 bp, Homo sapiens
tggtatggtatgggg

SEQ ID NO: 875594 - DNA, 15 bp, Homo sapiens
ggtatggtatggggc

SEQ ID NO: 875595 - DNA, 15 bp, Homo sapiens
gtatggtatggggca

SEQ ID NO: 875596 - DNA, 15 bp, Homo sapiens
tatggtatggggcat

SEQ ID NO: 875597 - DNA, 15 bp, Homo sapiens
atggtatggggcatc

SEQ ID NO: 875598 - DNA, 15 bp, Homo sapiens
tggtatggggcatct

SEQ ID NO: 875599 - DNA, 15 bp, Homo sapiens
ggtatggggcatctt

SEQ ID NO: 875600 - DNA, 15 bp, Homo sapiens
gtatggggcatcttc

SEQ ID NO: 875601 - DNA, 15 bp, Homo sapiens
tatggggcatcttca

SEQ ID NO: 875602 - DNA, 15 bp, Homo sapiens
atggggcatcttcag

SEQ ID NO: 875603 - DNA, 15 bp, Homo sapiens
tggggcatcttcagc

SEQ ID NO: 875604 - DNA, 15 bp, Homo sapiens
ggggcatcttcagcc

SEQ ID NO: 875605 - DNA, 15 bp, Homo sapiens
gggcatcttcagcca

SEQ ID NO: 875606 - DNA, 15 bp, Homo sapiens
ggcatcttcagccat

SEQ ID NO: 875607 - DNA, 15 bp, Homo sapiens
gcatcttcagccatg

SEQ ID NO: 875608 - DNA, 15 bp, Homo sapiens
catcttcagccatgg

SEQ ID NO: 875609 - DNA, 15 bp, Homo sapiens
atcttcagccatggt

SEQ ID NO: 875610 - DNA, 15 bp, Homo sapiens
tcttcagccatggtt

SEQ ID NO: 875611 - DNA, 15 bp, Homo sapiens
cttcagccatggttt

SEQ ID NO: 875612 - DNA, 15 bp, Homo sapiens
ttcagccatggtttt

SEQ ID NO: 875613 - DNA, 15 bp, Homo sapiens
tcagccatggtttta

SEQ ID NO: 875614 - DNA, 15 bp, Homo sapiens
cagccatggttttag

SEQ ID NO: 875615 - DNA, 15 bp, Homo sapiens
agccatggttttagg

SEQ ID NO: 875616 - DNA, 15 bp, Homo sapiens
gccatggttttaggt

SEQ ID NO: 875617 - DNA, 15 bp, Homo sapiens
ccatggttttaggtg

SEQ ID NO: 875618 - DNA, 15 bp, Homo sapiens
catggttttaggtgc

SEQ ID NO: 875619 - DNA, 15 bp, Homo sapiens
atggttttaggtgcc

SEQ ID NO: 875620 - DNA, 15 bp, Homo sapiens
tggttttaggtgcca

SEQ ID NO: 875621 - DNA, 15 bp, Homo sapiens
ggttttaggtgccat

SEQ ID NO: 875622 - DNA, 15 bp, Homo sapiens
gttttaggtgccatt

SEQ ID NO: 875623 - DNA, 15 bp, Homo sapiens
ttttaggtgccatta

SEQ ID NO: 875624 - DNA, 15 bp, Homo sapiens
tttaggtgccattat

SEQ ID NO: 875625 - DNA, 15 bp, Homo sapiens
ttaggtgccattatt

SEQ ID NO: 875626 - DNA, 15 bp, Homo sapiens
taggtgccattattt

SEQ ID NO: 875627 - DNA, 15 bp, Homo sapiens
aggtgccattatttg

SEQ ID NO: 875628 - DNA, 15 bp, Homo sapiens
ggtgccattatttgg

SEQ ID NO: 875629 - DNA, 15 bp, Homo sapiens
gtgccattatttggc

SEQ ID NO: 875630 - DNA, 15 bp, Homo sapiens
tgccattatttggcc

SEQ ID NO: 875631 - DNA, 15 bp, Homo sapiens
gccattatttggccc

SEQ ID NO: 875632 - DNA, 15 bp, Homo sapiens
ccattatttggccct

SEQ ID NO: 875633 - DNA, 15 bp, Homo sapiens
cattatttggccctt

SEQ ID NO: 875634 - DNA, 15 bp, Homo sapiens
attatttggcccttt

SEQ ID NO: 875635 - DNA, 15 bp, Homo sapiens
ttatttggccctttt

SEQ ID NO: 875636 - DNA, 15 bp, Homo sapiens
tatttggcccttttc

SEQ ID NO: 875637 - DNA, 15 bp, Homo sapiens
atttggcccttttca

SEQ ID NO: 875638 - DNA, 15 bp, Homo sapiens
tttggcccttttcat

SEQ ID NO: 875639 - DNA, 15 bp, Homo sapiens
ttggcccttttcatt

SEQ ID NO: 875640 - DNA, 15 bp, Homo sapiens
tggcccttttcattt

SEQ ID NO: 875641 - DNA, 15 bp, Homo sapiens
ggcccttttcatttg

SEQ ID NO: 875642 - DNA, 15 bp, Homo sapiens
gcccttttcatttgg

SEQ ID NO: 875643 - DNA, 15 bp, Homo sapiens
cccttttcatttggg

SEQ ID NO: 875644 - DNA, 15 bp, Homo sapiens
ccttttcatttgggc

SEQ ID NO: 875645 - DNA, 15 bp, Homo sapiens
cttttcatttgggcc

SEQ ID NO: 875646 - DNA, 15 bp, Homo sapiens
ttttcatttgggcct

SEQ ID NO: 875647 - DNA, 15 bp, Homo sapiens
tttcatttgggcctc

SEQ ID NO: 875648 - DNA, 15 bp, Homo sapiens
ttcatttgggcctca

SEQ ID NO: 875649 - DNA, 15 bp, Homo sapiens
tcatttgggcctcaa

SEQ ID NO: 875650 - DNA, 15 bp, Homo sapiens
catttgggcctcaat

SEQ ID NO: 875651 - DNA, 15 bp, Homo sapiens
atttgggcctcaatt

SEQ ID NO: 875652 - DNA, 15 bp, Homo sapiens
tttgggcctcaattc

SEQ ID NO: 875653 - DNA, 15 bp, Homo sapiens
ttgggcctcaattct

SEQ ID NO: 875654 - DNA, 15 bp, Homo sapiens
tgggcctcaattctc

SEQ ID NO: 875655 - DNA, 15 bp, Homo sapiens
gggcctcaattctct

SEQ ID NO: 875656 - DNA, 15 bp, Homo sapiens
ggcctcaattctctg

SEQ ID NO: 875657 - DNA, 15 bp, Homo sapiens
gcctcaattctctgg

SEQ ID NO: 875658 - DNA, 15 bp, Homo sapiens
cctcaattctctggg

SEQ ID NO: 875659 - DNA, 15 bp, Homo sapiens
ctcaattctctgggt

SEQ ID NO: 875660 - DNA, 15 bp, Homo sapiens
tcaattctctgggtg

SEQ ID NO: 875661 - DNA, 15 bp, Homo sapiens
caattctctgggtgg

SEQ ID NO: 875662 - DNA, 15 bp, Homo sapiens
aattctctgggtggg

SEQ ID NO: 875663 - DNA, 15 bp, Homo sapiens
attctctgggtgggt

SEQ ID NO: 875664 - DNA, 15 bp, Homo sapiens
ttctctgggtgggtc

SEQ ID NO: 875665 - DNA, 15 bp, Homo sapiens
tctctgggtgggtcc

SEQ ID NO: 875666 - DNA, 15 bp, Homo sapiens
ctctgggtgggtcct

SEQ ID NO: 875667 - DNA, 15 bp, Homo sapiens
tctgggtgggtccta

SEQ ID NO: 875668 - DNA, 15 bp, Homo sapiens
ctgggtgggtcctac

SEQ ID NO: 875669 - DNA, 15 bp, Homo sapiens
tgggtgggtcctact

SEQ ID NO: 875670 - DNA, 15 bp, Homo sapiens
gggtgggtcctactg

SEQ ID NO: 875671 - DNA, 15 bp, Homo sapiens
ggtgggtcctactgg

SEQ ID NO: 875672 - DNA, 15 bp, Homo sapiens
gtgggtcctactggc

SEQ ID NO: 875673 - DNA, 15 bp, Homo sapiens
tgggtcctactggct

SEQ ID NO: 875674 - DNA, 15 bp, Homo sapiens
gggtcctactggcta

SEQ ID NO: 875675 - DNA, 15 bp, Homo sapiens
ggtcctactggctat

SEQ ID NO: 875676 - DNA, 15 bp, Homo sapiens
gtcctactggctatt

SEQ ID NO: 875677 - DNA, 15 bp, Homo sapiens
tcctactggctatta

SEQ ID NO: 875678 - DNA, 15 bp, Homo sapiens
cctactggctattag

SEQ ID NO: 875679 - DNA, 15 bp, Homo sapiens
ctactggctattagt

SEQ ID NO: 875680 - DNA, 15 bp, Homo sapiens
tactggctattagtg

SEQ ID NO: 875681 - DNA, 15 bp, Homo sapiens
actggctattagtgg

SEQ ID NO: 875682 - DNA, 15 bp, Homo sapiens
ctggctattagtgga

SEQ ID NO: 875683 - DNA, 15 bp, Homo sapiens
tggctattagtggat

SEQ ID NO: 875684 - DNA, 15 bp, Homo sapiens
ggctattagtggatc

SEQ ID NO: 875685 - DNA, 15 bp, Homo sapiens
gctattagtggatca

SEQ ID NO: 875686 - DNA, 15 bp, Homo sapiens
ctattagtggatcaa

SEQ ID NO: 875687 - DNA, 15 bp, Homo sapiens
tattagtggatcaac

SEQ ID NO: 875688 - DNA, 15 bp, Homo sapiens
attagtggatcaaca

SEQ ID NO: 875689 - DNA, 15 bp, Homo sapiens
ttagtggatcaacac

SEQ ID NO: 875690 - DNA, 15 bp, Homo sapiens
tagtggatcaacact

SEQ ID NO: 875691 - DNA, 15 bp, Homo sapiens
agtggatcaacactg

SEQ ID NO: 875692 - DNA, 15 bp, Homo sapiens
gtggatcaacactgc

SEQ ID NO: 875693 - DNA, 15 bp, Homo sapiens
tggatcaacactgca

SEQ ID NO: 875694 - DNA, 15 bp, Homo sapiens
ggatcaacactgcaa

SEQ ID NO: 875695 - DNA, 15 bp, Homo sapiens
gatcaacactgcaac

SEQ ID NO: 875696 - DNA, 15 bp, Homo sapiens
atcaacactgcaaca

SEQ ID NO: 875697 - DNA, 15 bp, Homo sapiens
tcaacactgcaacat

SEQ ID NO: 875698 - DNA, 15 bp, Homo sapiens
caacactgcaacatg

SEQ ID NO: 875699 - DNA, 15 bp, Homo sapiens
aacactgcaacatgc

SEQ ID NO: 875700 - DNA, 15 bp, Homo sapiens
acactgcaacatgct

SEQ ID NO: 875701 - DNA, 15 bp, Homo sapiens
cactgcaacatgctg

SEQ ID NO: 875702 - DNA, 15 bp, Homo sapiens
actgcaacatgctga

SEQ ID NO: 875703 - DNA, 15 bp, Homo sapiens
ctgcaacatgctgag

SEQ ID NO: 875704 - DNA, 15 bp, Homo sapiens
tgcaacatgctgaga

SEQ ID NO: 875705 - DNA, 15 bp, Homo sapiens
gcaacatgctgagat

SEQ ID NO: 875706 - DNA, 15 bp, Homo sapiens
caacatgctgagatt

SEQ ID NO: 875707 - DNA, 15 bp, Homo sapiens
aacatgctgagattc

SEQ ID NO: 875708 - DNA, 15 bp, Homo sapiens
acatgctgagattcc

SEQ ID NO: 875709 - DNA, 15 bp, Homo sapiens
catgctgagattcct

SEQ ID NO: 875710 - DNA, 15 bp, Homo sapiens
atgctgagattcctc

SEQ ID NO: 875711 - DNA, 15 bp, Homo sapiens
tgctgagattcctct

SEQ ID NO: 875712 - DNA, 15 bp, Homo sapiens
gctgagattcctctt

SEQ ID NO: 875713 - DNA, 15 bp, Homo sapiens
ctgagattcctcttc

SEQ ID NO: 875714 - DNA, 15 bp, Homo sapiens
tgagattcctcttca

SEQ ID NO: 875715 - DNA, 15 bp, Homo sapiens
gagattcctcttcat

SEQ ID NO: 875716 - DNA, 15 bp, Homo sapiens
agattcctcttcatt

SEQ ID NO: 875717 - DNA, 15 bp, Homo sapiens
gattcctcttcattt

SEQ ID NO: 875718 - DNA, 15 bp, Homo sapiens
attcctcttcatttc

SEQ ID NO: 875719 - DNA, 15 bp, Homo sapiens
ttcctcttcatttct

SEQ ID NO: 875720 - DNA, 15 bp, Homo sapiens
tcctcttcatttctc

SEQ ID NO: 875721 - DNA, 15 bp, Homo sapiens
cctcttcatttctca

SEQ ID NO: 875722 - DNA, 15 bp, Homo sapiens
ctcttcatttctcat

SEQ ID NO: 875723 - DNA, 15 bp, Homo sapiens
tcttcatttctcatg

SEQ ID NO: 875724 - DNA, 15 bp, Homo sapiens
cttcatttctcatgg

SEQ ID NO: 875725 - DNA, 15 bp, Homo sapiens
ttcatttctcatggt

SEQ ID NO: 875726 - DNA, 15 bp, Homo sapiens
tcatttctcatggtt

SEQ ID NO: 875727 - DNA, 15 bp, Homo sapiens
catttctcatggttc

SEQ ID NO: 875728 - DNA, 15 bp, Homo sapiens
atttctcatggttca

SEQ ID NO: 875729 - DNA, 15 bp, Homo sapiens
tttctcatggttcag

SEQ ID NO: 875730 - DNA, 15 bp, Homo sapiens
ttctcatggttcaga

SEQ ID NO: 875731 - DNA, 15 bp, Homo sapiens
tctcatggttcagat

SEQ ID NO: 875732 - DNA, 15 bp, Homo sapiens
ctcatggttcagatc

SEQ ID NO: 875733 - DNA, 15 bp, Homo sapiens
tcatggttcagatca

SEQ ID NO: 875734 - DNA, 15 bp, Homo sapiens
catggttcagatcaa

SEQ ID NO: 875735 - DNA, 15 bp, Homo sapiens
atggttcagatcaaa

SEQ ID NO: 875736 - DNA, 15 bp, Homo sapiens
tggttcagatcaaat

SEQ ID NO: 875737 - DNA, 15 bp, Homo sapiens
ggttcagatcaaatg

SEQ ID NO: 875738 - DNA, 15 bp, Homo sapiens
gttcagatcaaatgc

SEQ ID NO: 875739 - DNA, 15 bp, Homo sapiens
ttcagatcaaatgct

SEQ ID NO: 875740 - DNA, 15 bp, Homo sapiens
tcagatcaaatgcta

SEQ ID NO: 875741 - DNA, 15 bp, Homo sapiens
cagatcaaatgctaa

SEQ ID NO: 875742 - DNA, 15 bp, Homo sapiens
agatcaaatgctaat

SEQ ID NO: 875743 - DNA, 15 bp, Homo sapiens
gatcaaatgctaatt

SEQ ID NO: 875744 - DNA, 15 bp, Homo sapiens
atcaaatgctaattt

SEQ ID NO: 875745 - DNA, 15 bp, Homo sapiens
tcaaatgctaatttt

SEQ ID NO: 875746 - DNA, 15 bp, Homo sapiens
caaatgctaattttt

SEQ ID NO: 875747 - DNA, 15 bp, Homo sapiens
aaatgctaatttttt

SEQ ID NO: 875748 - DNA, 15 bp, Homo sapiens
aatgctaattttttt

SEQ ID NO: 875749 - DNA, 15 bp, Homo sapiens
atgctaatttttttt

SEQ ID NO: 875750 - DNA, 15 bp, Homo sapiens
tgctaattttttttt

SEQ ID NO: 875751 - DNA, 15 bp, Homo sapiens
ttgcccaggctggaa

SEQ ID NO: 875752 - DNA, 15 bp, Homo sapiens
tgcccaggctggaat

SEQ ID NO: 875753 - DNA, 15 bp, Homo sapiens
gcccaggctggaatg

SEQ ID NO: 875754 - DNA, 15 bp, Homo sapiens
cccaggctggaatgt

SEQ ID NO: 875755 - DNA, 15 bp, Homo sapiens
ccaggctggaatgta

SEQ ID NO: 875756 - DNA, 15 bp, Homo sapiens
caggctggaatgtag

SEQ ID NO: 875757 - DNA, 15 bp, Homo sapiens
aggctggaatgtagt

SEQ ID NO: 875758 - DNA, 15 bp, Homo sapiens
ggctggaatgtagtg

SEQ ID NO: 875759 - DNA, 15 bp, Homo sapiens
gctggaatgtagtgg

SEQ ID NO: 875760 - DNA, 15 bp, Homo sapiens
ctggaatgtagtggc

SEQ ID NO: 875761 - DNA, 15 bp, Homo sapiens
tggaatgtagtggcg

SEQ ID NO: 875762 - DNA, 15 bp, Homo sapiens
ggaatgtagtggcgt

SEQ ID NO: 875763 - DNA, 15 bp, Homo sapiens
gaatgtagtggcgtg

SEQ ID NO: 875764 - DNA, 15 bp, Homo sapiens
aatgtagtggcgtga

SEQ ID NO: 875765 - DNA, 15 bp, Homo sapiens
atgtagtggcgtgat

SEQ ID NO: 875766 - DNA, 15 bp, Homo sapiens
tgtagtggcgtgatc

SEQ ID NO: 875767 - DNA, 15 bp, Homo sapiens
gtagtggcgtgatct

SEQ ID NO: 875768 - DNA, 15 bp, Homo sapiens
tagtggcgtgatctc

SEQ ID NO: 875769 - DNA, 15 bp, Homo sapiens
agtggcgtgatctcg

SEQ ID NO: 875770 - DNA, 15 bp, Homo sapiens
gtggcgtgatctcgg

SEQ ID NO: 875771 - DNA, 15 bp, Homo sapiens
tggcgtgatctcggc

SEQ ID NO: 875772 - DNA, 15 bp, Homo sapiens
ggcgtgatctcggct

SEQ ID NO: 875773 - DNA, 15 bp, Homo sapiens
gcgtgatctcggctc

SEQ ID NO: 875774 - DNA, 15 bp, Homo sapiens
cgtgatctcggctca

SEQ ID NO: 875775 - DNA, 15 bp, Homo sapiens
cctcctgggttcacc

SEQ ID NO: 875776 - DNA, 15 bp, Homo sapiens
ctcctgggttcaccc

SEQ ID NO: 875777 - DNA, 15 bp, Homo sapiens
tcctgggttcacccc

SEQ ID NO: 875778 - DNA, 15 bp, Homo sapiens
cctgggttcacccca

SEQ ID NO: 875779 - DNA, 15 bp, Homo sapiens
ctgggttcaccccat

SEQ ID NO: 875780 - DNA, 15 bp, Homo sapiens
tgggttcaccccatt

SEQ ID NO: 875781 - DNA, 15 bp, Homo sapiens
gggttcaccccattc

SEQ ID NO: 875782 - DNA, 15 bp, Homo sapiens
ggttcaccccattct

SEQ ID NO: 875783 - DNA, 15 bp, Homo sapiens
gttcaccccattctc

SEQ ID NO: 875784 - DNA, 15 bp, Homo sapiens
ttcaccccattctcc

SEQ ID NO: 875785 - DNA, 15 bp, Homo sapiens
tcaccccattctcct

SEQ ID NO: 875786 - DNA, 15 bp, Homo sapiens
caccccattctcctg

SEQ ID NO: 875787 - DNA, 15 bp, Homo sapiens
accccattctcctgc

SEQ ID NO: 875788 - DNA, 15 bp, Homo sapiens
ccccattctcctgcc

SEQ ID NO: 875789 - DNA, 15 bp, Homo sapiens
cccattctcctgcct

SEQ ID NO: 875790 - DNA, 15 bp, Homo sapiens
agcctcccgagtaga

SEQ ID NO: 875791 - DNA, 15 bp, Homo sapiens
gcctcccgagtagag

SEQ ID NO: 875792 - DNA, 15 bp, Homo sapiens
cctcccgagtagagt

SEQ ID NO: 875793 - DNA, 15 bp, Homo sapiens
ctcccgagtagagta

SEQ ID NO: 875794 - DNA, 15 bp, Homo sapiens
tcccgagtagagtag

SEQ ID NO: 875795 - DNA, 15 bp, Homo sapiens
cccgagtagagtagc

SEQ ID NO: 875796 - DNA, 15 bp, Homo sapiens
ccgagtagagtagct

SEQ ID NO: 875797 - DNA, 15 bp, Homo sapiens
cgagtagagtagctg

SEQ ID NO: 875798 - DNA, 15 bp, Homo sapiens
gagtagagtagctgg

SEQ ID NO: 875799 - DNA, 15 bp, Homo sapiens
agtagagtagctggg

SEQ ID NO: 875800 - DNA, 15 bp, Homo sapiens
gtagagtagctggga

SEQ ID NO: 875801 - DNA, 15 bp, Homo sapiens
tagagtagctgggac

SEQ ID NO: 875802 - DNA, 15 bp, Homo sapiens
agagtagctgggact

SEQ ID NO: 875803 - DNA, 15 bp, Homo sapiens
ggactacaggcaccc

SEQ ID NO: 875804 - DNA, 15 bp, Homo sapiens
gactacaggcaccca

SEQ ID NO: 875805 - DNA, 15 bp, Homo sapiens
actacaggcacccac

SEQ ID NO: 875806 - DNA, 15 bp, Homo sapiens
ctacaggcacccacc

SEQ ID NO: 875807 - DNA, 15 bp, Homo sapiens
ggcacccaccaccat

SEQ ID NO: 875808 - DNA, 15 bp, Homo sapiens
gcacccaccaccatg

SEQ ID NO: 875809 - DNA, 15 bp, Homo sapiens
cacccaccaccatgc

SEQ ID NO: 875810 - DNA, 15 bp, Homo sapiens
acccaccaccatgcc

SEQ ID NO: 875811 - DNA, 15 bp, Homo sapiens
cccaccaccatgcct

SEQ ID NO: 875812 - DNA, 15 bp, Homo sapiens
ccaccaccatgcctg

SEQ ID NO: 875813 - DNA, 15 bp, Homo sapiens
ttgtatttttaatag

SEQ ID NO: 875814 - DNA, 15 bp, Homo sapiens
tgtatttttaataga

SEQ ID NO: 875815 - DNA, 15 bp, Homo sapiens
gtatttttaatagag

SEQ ID NO: 875816 - DNA, 15 bp, Homo sapiens
tatttttaatagaga

SEQ ID NO: 875817 - DNA, 15 bp, Homo sapiens
atttttaatagagat

SEQ ID NO: 875818 - DNA, 15 bp, Homo sapiens
tttttaatagagatg

SEQ ID NO: 875819 - DNA, 15 bp, Homo sapiens
ttttaatagagatgg

SEQ ID NO: 875820 - DNA, 15 bp, Homo sapiens
tttaatagagatggg

SEQ ID NO: 875821 - DNA, 15 bp, Homo sapiens
ttaatagagatgggg

SEQ ID NO: 875822 - DNA, 15 bp, Homo sapiens
taatagagatggggt

SEQ ID NO: 875823 - DNA, 15 bp, Homo sapiens
aatagagatggggtt

SEQ ID NO: 875824 - DNA, 15 bp, Homo sapiens
atagagatggggttt

SEQ ID NO: 875825 - DNA, 15 bp, Homo sapiens
accgtgttagccagg

SEQ ID NO: 875826 - DNA, 15 bp, Homo sapiens
ccgtgttagccagga

SEQ ID NO: 875827 - DNA, 15 bp, Homo sapiens
cgtgttagccaggat

SEQ ID NO: 875828 - DNA, 15 bp, Homo sapiens
gttagccaggatgga

SEQ ID NO: 875829 - DNA, 15 bp, Homo sapiens
ttagccaggatggac

SEQ ID NO: 875830 - DNA, 15 bp, Homo sapiens
tagccaggatggaca

SEQ ID NO: 875831 - DNA, 15 bp, Homo sapiens
agccaggatggacac

SEQ ID NO: 875832 - DNA, 15 bp, Homo sapiens
gccaggatggacacg

SEQ ID NO: 875833 - DNA, 15 bp, Homo sapiens
ccaggatggacacga

SEQ ID NO: 875834 - DNA, 15 bp, Homo sapiens
caggatggacacgat

SEQ ID NO: 875835 - DNA, 15 bp, Homo sapiens
aggatggacacgatc

SEQ ID NO: 875836 - DNA, 15 bp, Homo sapiens
ggatggacacgatct

SEQ ID NO: 875837 - DNA, 15 bp, Homo sapiens
gatggacacgatctc

SEQ ID NO: 875838 - DNA, 15 bp, Homo sapiens
atggacacgatctcc

SEQ ID NO: 875839 - DNA, 15 bp, Homo sapiens
tggacacgatctcct

SEQ ID NO: 875840 - DNA, 15 bp, Homo sapiens
ggacacgatctcctg

SEQ ID NO: 875841 - DNA, 15 bp, Homo sapiens
gacacgatctcctga

SEQ ID NO: 875842 - DNA, 15 bp, Homo sapiens
acacgatctcctgac

SEQ ID NO: 875843 - DNA, 15 bp, Homo sapiens
cacgatctcctgacc

SEQ ID NO: 875844 - DNA, 15 bp, Homo sapiens
acgatctcctgacct

SEQ ID NO: 875845 - DNA, 15 bp, Homo sapiens
tgacctcatgatccg

SEQ ID NO: 875846 - DNA, 15 bp, Homo sapiens
gacctcatgatccgc

SEQ ID NO: 875847 - DNA, 15 bp, Homo sapiens
acctcatgatccgcc

SEQ ID NO: 875848 - DNA, 15 bp, Homo sapiens
cctcatgatccgccc

SEQ ID NO: 875849 - DNA, 15 bp, Homo sapiens
ctcatgatccgccca

SEQ ID NO: 875850 - DNA, 15 bp, Homo sapiens
tcatgatccgcccac

SEQ ID NO: 875851 - DNA, 15 bp, Homo sapiens
catgatccgcccacc

SEQ ID NO: 875852 - DNA, 15 bp, Homo sapiens
atgatccgcccacct

SEQ ID NO: 875853 - DNA, 15 bp, Homo sapiens
tgatccgcccacctt

SEQ ID NO: 875854 - DNA, 15 bp, Homo sapiens
gatccgcccaccttg

SEQ ID NO: 875855 - DNA, 15 bp, Homo sapiens
atccgcccaccttgg

SEQ ID NO: 875856 - DNA, 15 bp, Homo sapiens
tccgcccaccttggc

SEQ ID NO: 875857 - DNA, 15 bp, Homo sapiens
ccgcccaccttggcc

SEQ ID NO: 875858 - DNA, 15 bp, Homo sapiens
ctgggattacaggcc

SEQ ID NO: 875859 - DNA, 15 bp, Homo sapiens
tgggattacaggcct

SEQ ID NO: 875860 - DNA, 15 bp, Homo sapiens
gggattacaggcctg

SEQ ID NO: 875861 - DNA, 15 bp, Homo sapiens
ggattacaggcctga

SEQ ID NO: 875862 - DNA, 15 bp, Homo sapiens
gattacaggcctgag

SEQ ID NO: 875863 - DNA, 15 bp, Homo sapiens
attacaggcctgagc

SEQ ID NO: 875864 - DNA, 15 bp, Homo sapiens
ttacaggcctgagcc

SEQ ID NO: 875865 - DNA, 15 bp, Homo sapiens
tacaggcctgagcca

SEQ ID NO: 875866 - DNA, 15 bp, Homo sapiens
acaggcctgagccac

SEQ ID NO: 875867 - DNA, 15 bp, Homo sapiens
caggcctgagccacc

SEQ ID NO: 875868 - DNA, 15 bp, Homo sapiens
aggcctgagccacca

SEQ ID NO: 875869 - DNA, 15 bp, Homo sapiens
ggcctgagccaccac

SEQ ID NO: 875870 - DNA, 15 bp, Homo sapiens
gcctgagccaccacg

SEQ ID NO: 875871 - DNA, 15 bp, Homo sapiens
cctgagccaccacgc

SEQ ID NO: 875872 - DNA, 15 bp, Homo sapiens
ctgagccaccacgcc

SEQ ID NO: 875873 - DNA, 15 bp, Homo sapiens
tgagccaccacgccc

SEQ ID NO: 875874 - DNA, 15 bp, Homo sapiens
gagccaccacgcccg

SEQ ID NO: 875875 - DNA, 15 bp, Homo sapiens
agccaccacgcccgg

SEQ ID NO: 875876 - DNA, 15 bp, Homo sapiens
ccaccacgcccggcc

SEQ ID NO: 875877 - DNA, 15 bp, Homo sapiens
caccacgcccggccc

SEQ ID NO: 875878 - DNA, 15 bp, Homo sapiens
accacgcccggccca

SEQ ID NO: 875879 - DNA, 15 bp, Homo sapiens
ccacgcccggcccaa

SEQ ID NO: 875880 - DNA, 15 bp, Homo sapiens
cacgcccggcccaaa

SEQ ID NO: 875881 - DNA, 15 bp, Homo sapiens
acgcccggcccaaat

SEQ ID NO: 875882 - DNA, 15 bp, Homo sapiens
cgcccggcccaaatg

SEQ ID NO: 875883 - DNA, 15 bp, Homo sapiens
gcccggcccaaatgc

SEQ ID NO: 875884 - DNA, 15 bp, Homo sapiens
cccggcccaaatgct
